United States Patent Application Publication US 2022/0213167 A1 - sequence listing, part 26

SEQ ID NO: 546439 - protein, 13 aa, Homo sapiens
  CDR3 for alpha chain variable domain of TCR clone 273220 (TRAV12-3, TRAJ53)
CAMRGGSNYKLTF

SEQ ID NO: 546440 - protein, 15 aa, Homo sapiens
  CDR3 for beta chain variable domain of TCR clone 273220 (TRBV19, TRBJ1-2)
CASSVGQVLNYGYTF

SEQ ID NO: 546441 - protein, 18 aa, Homo sapiens
  CDR3 for alpha chain variable domain of TCR clone 273221 (TRAV12-3, TRAJ52)
CAMSVGGAGGTSYGKLTF

SEQ ID NO: 546442 - protein, 15 aa, Homo sapiens
  CDR3 for beta chain variable domain of TCR clone 273221 (TRBV27, TRBJ1-6)
WASSFDRGLGSPLHF

SEQ ID NO: 546443 - protein, 13 aa, Homo sapiens
  CDR3 for alpha chain variable domain of TCR clone 273222 (TRAV1-2, TRAJ11)
CAVRDSGYSTLTF

SEQ ID NO: 546444 - protein, 16 aa, Homo sapiens
  CDR3 for beta chain variable domain of TCR clone 273222 (TRBV5-1, TRBJ2-7)
CAGSWGTGGRAWEQYF

SEQ ID NO: 546445 - protein, 12 aa, Homo sapiens
  CDR3 for alpha chain variable domain of TCR clone 273223 (TRAV1-2, TRAJ8)
CAVRTGFQKLVF

SEQ ID NO: 546446 - protein, 14 aa, Homo sapiens
  CDR3 for beta chain variable domain of TCR clone 273223 (TRBV12-5, TRBJ2-5)
CASGSRTHQETQYF

SEQ ID NO: 546447 - protein, 13 aa, Homo sapiens
  CDR3 for alpha chain variable domain of TCR clone 273224 (TRAV13-1, TRAJ6)
CAASKGGSYIPTF

SEQ ID NO: 546448 - protein, 13 aa, Homo sapiens
  CDR3 for beta chain variable domain of TCR clone 273224 (TRBV24-1, TRBJ2-2)
CATSDWSTGELFF

SEQ ID NO: 546449 - protein, 18 aa, Homo sapiens
  CDR3 for alpha chain variable domain of TCR clone 273225 (TRAV12-3, TRAJ52)
CAMSRTNAGGTSYGKLTF

SEQ ID NO: 546450 - protein, 15 aa, Homo sapiens
  CDR3 for beta chain variable domain of TCR clone 273225 (TRBV7-2, TRBJ2-3)
CASSSTGLETDTQYF

SEQ ID NO: 546451 - protein, 15 aa, Homo sapiens
  CDR3 for alpha chain variable domain of TCR clone 273226 (TRAV13-1, TRAJ32)
CAASIYGGATNKLIF

SEQ ID NO: 546452 - protein, 14 aa, Homo sapiens
  CDR3 for beta chain variable domain of TCR clone 273226 (TRBV7-9, TRBJ2-1)
RASSLASGSNEQFF

SEQ ID NO: 546453 - protein, 15 aa, Homo sapiens
  CDR3 for alpha chain variable domain of TCR clone 273227 (TRAV17, TRAJ23)
CATDAEDNPGGKLIF

SEQ ID NO: 546454 - protein, 12 aa, Homo sapiens
  CDR3 for beta chain variable domain of TCR clone 273227 (TRBV2, TRBJ2-1)
CAKRQGYNEHFF

SEQ ID NO: 546455 - protein, 13 aa, Homo sapiens
  CDR3 for alpha chain variable domain of TCR clone 273228 (TRAV21, TRAJ20)
CAVGLRVDYNLSF

SEQ ID NO: 546456 - protein, 11 aa, Homo sapiens
  CDR3 for beta chain variable domain of TCR clone 273228 (TRBV29-1, TRBJ2-5)
CSEDRTGTQYF

SEQ ID NO: 546457 - protein, 14 aa, Homo sapiens
  CDR3 for alpha chain variable domain of TCR clone 273229 (TRAV17, TRAJ57)
CATDPQGGSEKPVF

SEQ ID NO: 546458 - protein, 16 aa, Homo sapiens
  CDR3 for beta chain variable domain of TCR clone 273229 (TRBV20-1, TRBJ1-4)
CSAPGQGLLTNEKLFF

SEQ ID NO: 546459 - protein, 13 aa, Homo sapiens
  CDR3 for alpha chain variable domain of TCR clone 273230 (TRAV2, TRAJ15)
CAVASQAGTALIF

SEQ ID NO: 546460 - protein, 13 aa, Homo sapiens
  CDR3 for beta chain variable domain of TCR clone 273230 (TRBV15, TRBJ2-3)
CARSGTSTDTQYF

SEQ ID NO: 546461 - protein, 10 aa, Homo sapiens
  CDR3 for alpha chain variable domain of TCR clone 273231 (TRAV13-1, TRAJ7)
LIRGNNRLAF

SEQ ID NO: 546462 - protein, 16 aa, Homo sapiens
  CDR3 for beta chain variable domain of TCR clone 273231 (TRBV4-1, TRBJ1-2)
CASSQDAGQVLYGYTF

SEQ ID NO: 546463 - protein, 14 aa, Homo sapiens
  CDR3 for alpha chain variable domain of TCR clone 273232 (TRAV20, TRAJ44)
CAVQDTGTASKLAF

SEQ ID NO: 546464 - protein, 13 aa, Homo sapiens
  CDR3 for beta chain variable domain of TCR clone 273232 (TRBV29-1, TRBJ1-3)
CSAGTGRGNTMYF

SEQ ID NO: 546465 - protein, 15 aa, Homo sapiens
  CDR3 for alpha chain variable domain of TCR clone 273233 (TRAV3, TRAJ3)
CCERPRYSSASKIIF

SEQ ID NO: 546466 - protein, 16 aa, Homo sapiens
  CDR3 for beta chain variable domain of TCR clone 273233 (TRBV19, TRBJ1-5)
CASSRDRGGPRQPQHF

SEQ ID NO: 546467 - protein, 17 aa, Homo sapiens
  CDR3 for alpha chain variable domain of TCR clone 273234 (TRAV8-6, TRAJ58)
CAVSSWVGETSGSRLTF

SEQ ID NO: 546468 - protein, 14 aa, Homo sapiens
  CDR3 for beta chain variable domain of TCR clone 273234 (TRBV4-2, TRBJ2-1)
GASGLDRAYNEQFV

SEQ ID NO: 546469 - protein, 11 aa, Homo sapiens
  CDR3 for alpha chain variable domain of TCR clone 273235 (TRAV2, TRAJ13)
CASGGYQKVTF

SEQ ID NO: 546470 - protein, 16 aa, Homo sapiens
  CDR3 for beta chain variable domain of TCR clone 273235 (TRBV19, TRBJ2-1)
CASSKAGPSSDNEQFF

SEQ ID NO: 546471 - protein, 12 aa, Homo sapiens
  CDR3 for alpha chain variable domain of TCR clone 273236 (TRAV21, TRAJ3)
CCFYSSASNIIF

SEQ ID NO: 546472 - protein, 16 aa, Homo sapiens
  CDR3 for beta chain variable domain of TCR clone 273236 (TRBV19, TRBJ2-1)
CASSKAGPSAYNEQFF

SEQ ID NO: 546473 - protein, 14 aa, Homo sapiens
  CDR3 for alpha chain variable domain of TCR clone 273237 (TRAV8-2, TRAJ45)
CVVSAGGGAVGLTF

SEQ ID NO: 546474 - protein, 12 aa, Homo sapiens
  CDR3 for beta chain variable domain of TCR clone 273237 (TRBV12-4, TRBJ2-1)
CASSLVRVEQFF

SEQ ID NO: 546475 - protein, 13 aa, Homo sapiens
  CDR3 for alpha chain variable domain of TCR clone 273238 (TRAV2, TRAJ40)
CAVVTSGTYKYIF

SEQ ID NO: 546476 - protein, 14 aa, Homo sapiens
  CDR3 for beta chain variable domain of TCR clone 273238 (TRBV19, TRBJ2-1)
CASPTFVLRGEQLF

SEQ ID NO: 546477 - protein, 14 aa, Homo sapiens
  CDR3 for alpha chain variable domain of TCR clone 273239 (TRAV27, TRAJ37)
CARERSSNTGKLIF

SEQ ID NO: 546478 - protein, 15 aa, Homo sapiens
  CDR3 for beta chain variable domain of TCR clone 273239 (TRBV11-3, TRBJ1-6)
CASSLDWGANSPLHF

SEQ ID NO: 546479 - protein, 11 aa, Homo sapiens
  CDR3 for alpha chain variable domain of TCR clone 273240 (TRAV21, TRAJ11)
CAVNGYSTLTF

SEQ ID NO: 546480 - protein, 16 aa, Homo sapiens
  CDR3 for beta chain variable domain of TCR clone 273240 (TRBV4-3, TRBJ2-2)
CASSHLQGSGTGEPFF

SEQ ID NO: 546481 - protein, 13 aa, Homo sapiens
  CDR3 for alpha chain variable domain of TCR clone 273241 (TRAV3, TRAJ3)
CSVADSSASKIIF

SEQ ID NO: 546482 - protein, 16 aa, Homo sapiens
  CDR3 for beta chain variable domain of TCR clone 273241 (TRBV7-8, TRBJ2-4)
CASSAERTLAKNSQYF

SEQ ID NO: 546483 - protein, 14 aa, Homo sapiens
  CDR3 for alpha chain variable domain of TCR clone 273242 (TRAV1-2, TRAJ8)
CAVREDTGFHKLVF

SEQ ID NO: 546484 - protein, 16 aa, Homo sapiens
  CDR3 for beta chain variable domain of TCR clone 273242 (TRBV4-1, TRBJ1-4)
CASSQDLRRGGEKLFF

SEQ ID NO: 546485 - protein, 16 aa, Homo sapiens
  CDR3 for alpha chain variable domain of TCR clone 273243 (TRAV30, TRAJ24)
CGTEIVDADSWGKFQF

SEQ ID NO: 546486 - protein, 15 aa, Homo sapiens
  CDR3 for beta chain variable domain of TCR clone 273243 (TRBV20-1, TRBJ2-6)
CSARDRGRGANVLTF

SEQ ID NO: 546487 - protein, 12 aa, Homo sapiens
  CDR3 for alpha chain variable domain of TCR clone 273244 (TRAV13-2, TRAJ23)
CAERHRGGKLIF

SEQ ID NO: 546488 - protein, 15 aa, Homo sapiens
  CDR3 for beta chain variable domain of TCR clone 273244 (TRBV6-3, TRBJ2-7)
CASSSRGTVFYEQYF

SEQ ID NO: 546489 - protein, 15 aa, Homo sapiens
  CDR3 for alpha chain variable domain of TCR clone 273245 (TRAV13-2, TRAJ23)
CAERGFYNQGGKLIF

SEQ ID NO: 546490 - protein, 14 aa, Homo sapiens
  CDR3 for beta chain variable domain of TCR clone 273245 (TRBV4-1, TRBJ2-3)
CASSQDWSTDTQYV

SEQ ID NO: 546491 - protein, 18 aa, Homo sapiens
  CDR3 for alpha chain variable domain of TCR clone 273246 (TRAV21, TRAJ52)
CAVRPSPAGGTSYGKLTF

SEQ ID NO: 546492 - protein, 14 aa, Homo sapiens
  CDR3 for beta chain variable domain of TCR clone 273246 (TRBV4-2, TRBJ2-1)
CASGLDRAYNEQVF

SEQ ID NO: 546493 - protein, 14 aa, Homo sapiens
  CDR3 for alpha chain variable domain of TCR clone 273247 (TRAV12-2, TRAJ17)
CAVNIKAAGNKLTF

SEQ ID NO: 546494 - protein, 16 aa, Homo sapiens
  CDR3 for beta chain variable domain of TCR clone 273247 (TRBV20-1, TRBJ2-6)
CSASSQGYDGSNVLTF

SEQ ID NO: 546495 - protein, 18 aa, Homo sapiens
  CDR3 for alpha chain variable domain of TCR clone 273248 (TRAV21, TRAJ52)
CAVRPSPAGGTSYGQLTF

SEQ ID NO: 546496 - protein, 13 aa, Homo sapiens
  CDR3 for beta chain variable domain of TCR clone 273248 (TRBV18, TRBJ2-5)
CASSLQGQETQYS

SEQ ID NO: 546497 - protein, 13 aa, Homo sapiens
  CDR3 for alpha chain variable domain of TCR clone 273249 (TRAV13-1, TRAJ29)
CAASIGLNTPLVF

SEQ ID NO: 546498 - protein, 16 aa, Homo sapiens
  CDR3 for beta chain variable domain of TCR clone 273249 (TRBV19, TRBJ2-2)
CASRSPGTGATGELFF

SEQ ID NO: 546499 - protein, 15 aa, Homo sapiens
  CDR3 for alpha chain variable domain of TCR clone 273250 (TRAV8-2, TRAJ15)
CVVTMGNQTGTALIF

SEQ ID NO: 546500 - protein, 14 aa, Homo sapiens
  CDR3 for beta chain variable domain of TCR clone 273250 (TRBV12-5, TRBJ2-5)
CASGSRTHQETQYF

SEQ ID NO: 546501 - protein, 14 aa, Homo sapiens
  CDR3 for alpha chain variable domain of TCR clone 273251 (TRAV12-2, TRAJ13)
CAVNPSGGYKKVTF

SEQ ID NO: 546502 - protein, 13 aa, Homo sapiens
  CDR3 for beta chain variable domain of TCR clone 273251 (TRBV20-1, TRBJ1-6)
CSAKLGGTSPLHL

SEQ ID NO: 546503 - protein, 16 aa, Homo sapiens
  CDR3 for alpha chain variable domain of TCR clone 273252 (TRAV16, TRAJ4)
CALSRMFSGGYNKLIF

SEQ ID NO: 546504 - protein, 15 aa, Homo sapiens
  CDR3 for beta chain variable domain of TCR clone 273252 (TRBV18, TRBJ2-1)
CASSPPSASYNEQFF

SEQ ID NO: 546505 - protein, 12 aa, Homo sapiens
  CDR3 for alpha chain variable domain of TCR clone 273253 (TRAV21, TRAJ39)
CAADNAGNMLTF

SEQ ID NO: 546506 - protein, 13 aa, Homo sapiens
  CDR3 for beta chain variable domain of TCR clone 273253 (TRBV12-4, TRBJ1-1)
CASSAGTGFEAFF

SEQ ID NO: 546507 - protein, 14 aa, Homo sapiens
  CDR3 for alpha chain variable domain of TCR clone 273254 (TRAV1-2, TRAJ6)
CAVRSSGGSYIPTF

SEQ ID NO: 546508 - protein, 14 aa, Homo sapiens
  CDR3 for beta chain variable domain of TCR clone 273254 (TRBV7-2, TRBJ2-7)
CASSPKTSFYEQYF

SEQ ID NO: 546509 - protein, 12 aa, Homo sapiens
  CDR3 for alpha chain variable domain of TCR clone 273255 (TRAV8-3, TRAJ41)
CAVGALGYALNF

SEQ ID NO: 546510 - protein, 16 aa, Homo sapiens
  CDR3 for beta chain variable domain of TCR clone 273255 (TRBV7-6, TRBJ2-3)
CASSDSRGEGADMQYF

SEQ ID NO: 546511 - protein, 15 aa, Homo sapiens
  CDR3 for alpha chain variable domain of TCR clone 273256 (TRAV17, TRAJ56)
CATEPFTGANSKLTF

SEQ ID NO: 546512 - protein, 16 aa, Homo sapiens
  CDR3 for beta chain variable domain of TCR clone 273256 (TRBV5-1, TRBJ2-2)
CASSSRTGGRTGELFF

SEQ ID NO: 546513 - protein, 16 aa, Homo sapiens
  CDR3 for alpha chain variable domain of TCR clone 273257 (TRAV3, TRAJ28)
CAVLPRSGAGSYQLTF

SEQ ID NO: 546514 - protein, 13 aa, Homo sapiens
  CDR3 for beta chain variable domain of TCR clone 273257 (TRBV12-4, TRBJ2-5)
CASRLAVQETQFF

SEQ ID NO: 546515 - protein, 14 aa, Homo sapiens
  CDR3 for alpha chain variable domain of TCR clone 273258 (TRAV1-2, TRAJ16)
CAVNRFSDGQKLLF

SEQ ID NO: 546516 - protein, 15 aa, Homo sapiens
  CDR3 for beta chain variable domain of TCR clone 273258 (TRBV11-3, TRBJ2-2)
CASILGGRPTGELFF

SEQ ID NO: 546517 - protein, 13 aa, Homo sapiens
  CDR3 for alpha chain variable domain of TCR clone 273259 (TRAV35, TRAJ42)
CAGFPGSQGNLIF

SEQ ID NO: 546518 - protein, 15 aa, Homo sapiens
  CDR3 for beta chain variable domain of TCR clone 273259 (TRBV19, TRBJ1-1)
CASTSGQIQNTEAFF

SEQ ID NO: 546519 - protein, 16 aa, Homo sapiens
  CDR3 for alpha chain variable domain of TCR clone 273260 (TRAV12-3, TRAJ53)
CAMSPGSGGTNYKLTF

SEQ ID NO: 546520 - protein, 17 aa, Homo sapiens
  CDR3 for beta chain variable domain of TCR clone 273260 (TRBV11-2, TRBJ2-1)
CASSLYPPGVEYNEQFF

SEQ ID NO: 546521 - protein, 10 aa, Homo sapiens
  CDR3 for alpha chain variable domain of TCR clone 273261 (TRAV39, TRAJ49)
CAVAGNQFYF

SEQ ID NO: 546522 - protein, 15 aa, Homo sapiens
  CDR3 for beta chain variable domain of TCR clone 273261 (TRBV7-2, TRBJ2-1)
CASSSGLAGGNEQFF

SEQ ID NO: 546523 - protein, 10 aa, Homo sapiens
  CDR3 for alpha chain variable domain of TCR clone 273262 (TRAV12-2, TRAJ10)
CAAWTGVETH

SEQ ID NO: 546524 - protein, 18 aa, Homo sapiens
  CDR3 for beta chain variable domain of TCR clone 273262 (TRBV12-4, TRBJ2-2)
CASSLVAGTRGRTGELFF

SEQ ID NO: 546525 - protein, 13 aa, Homo sapiens
  CDR3 for alpha chain variable domain of TCR clone 273263 (TRAV8-2, TRAJ43)
CVVSDQGETDMRF

SEQ ID NO: 546526 - protein, 12 aa, Homo sapiens
  CDR3 for beta chain variable domain of TCR clone 273263 (TRBV7-9, TRBJ2-7)
CASRTGFDEQYF

SEQ ID NO: 546527 - protein, 14 aa, Homo sapiens
  CDR3 for alpha chain variable domain of TCR clone 273264 (TRAV8-2, TRAJ4)
CDVSPSGGYNKLIF

SEQ ID NO: 546528 - protein, 15 aa, Homo sapiens
  CDR3 for beta chain variable domain of TCR clone 273264 (TRBV2, TRBJ2-1)
CASSELAGSYNEQFF

SEQ ID NO: 546529 - protein, 16 aa, Homo sapiens
  CDR3 for alpha chain variable domain of TCR clone 273265 (TRAV3, TRAJ10)
CAVRDMRAGVGNKLTF

SEQ ID NO: 546530 - protein, 16 aa, Homo sapiens
  CDR3 for beta chain variable domain of TCR clone 273265 (TRBV12-4, TRBJ1-5)
CASSRPVGGSNQPQHF

SEQ ID NO: 546531 - protein, 14 aa, Homo sapiens
  CDR3 for alpha chain variable domain of TCR clone 273266 (TRAV8-3, TRAJ4)
CAVVAAGGYNKLIF

SEQ ID NO: 546532 - protein, 13 aa, Homo sapiens
  CDR3 for beta chain variable domain of TCR clone 273266 (TRBV19, TRBJ1-2)
CASSVPGQDGYTF

SEQ ID NO: 546533 - protein, 14 aa, Homo sapiens
  CDR3 for alpha chain variable domain of TCR clone 273267 (TRAV12-1, TRAJ9)
CVVTLNTGGFKTIF

SEQ ID NO: 546534 - protein, 13 aa, Homo sapiens
  CDR3 for beta chain variable domain of TCR clone 273267 (TRBV19, TRBJ2-2)
CQAGQANTGELFF

SEQ ID NO: 546535 - protein, 15 aa, Homo sapiens
  CDR3 for alpha chain variable domain of TCR clone 273268 (TRAV16, TRAJ16)
CALQGGGSDGQKLLF

SEQ ID NO: 546536 - protein, 10 aa, Homo sapiens
  CDR3 for beta chain variable domain of TCR clone 273268 (TRBV20-1, TRBJ2-7)
IGSGMDEQYF

SEQ ID NO: 546537 - protein, 15 aa, Homo sapiens
  CDR3 for alpha chain variable domain of TCR clone 273269 (TRAV27, TRAJ33)
CAGADIMDSNYQVIG

SEQ ID NO: 546538 - protein, 13 aa, Homo sapiens
  CDR3 for beta chain variable domain of TCR clone 273269 (TRBV28, TRBJ1-2)
CASSLQGRGGYTF

SEQ ID NO: 546539 - protein, 14 aa, Homo sapiens
  CDR3 for alpha chain variable domain of TCR clone 273270 (TRAV13-1, TRAJ28)
CAASKGAGSYQLTF

SEQ ID NO: 546540 - protein, 16 aa, Homo sapiens
  CDR3 for beta chain variable domain of TCR clone 273270 (TRBV4-2, TRBJ2-3)
CASSQEGARGGVKQYF

SEQ ID NO: 546541 - protein, 14 aa, Homo sapiens
  CDR3 for alpha chain variable domain of TCR clone 273271 (TRAV26-1, TRAJ45)
CIEVTGGGADGLTF

SEQ ID NO: 546542 - protein, 14 aa, Homo sapiens
  CDR3 for beta chain variable domain of TCR clone 273271 (TRBV7-6, TRBJ1-2)
CASSLVGLWLHLRF

SEQ ID NO: 546543 - protein, 14 aa, Homo sapiens
  CDR3 for alpha chain variable domain of TCR clone 273272 (TRAV2, TRAJ37)
CAVEDLGNTGKLIF

SEQ ID NO: 546544 - protein, 13 aa, Homo sapiens
  CDR3 for beta chain variable domain of TCR clone 273272 (TRBV4-2, TRBJ1-1)
CASSQAGNTEAFF

SEQ ID NO: 546545 - protein, 11 aa, Homo sapiens
  CDR3 for alpha chain variable domain of TCR clone 273273 (TRAV1-1, TRAJ5)
CAVRVRRALTF

SEQ ID NO: 546546 - protein, 15 aa, Homo sapiens
  CDR3 for beta chain variable domain of TCR clone 273273 (TRBV6-5, TRBJ2-1)
CASRGDFDSYNEQFF

SEQ ID NO: 546547 - protein, 15 aa, Homo sapiens
  CDR3 for alpha chain variable domain of TCR clone 273274 (TRAV8-3, TRAJ45)
CAASYLGGGADGLTF

SEQ ID NO: 546548 - protein, 13 aa, Homo sapiens
  CDR3 for beta chain variable domain of TCR clone 273274 (TRBV10-3, TRBJ2-7)
CASKLAVNYEQYF

SEQ ID NO: 546549 - protein, 14 aa, Homo sapiens
  CDR3 for alpha chain variable domain of TCR clone 273275 (TRAV12-3, TRAJ10)
SHLPLTGGGNKLTF

SEQ ID NO: 546550 - protein, 16 aa, Homo sapiens
  CDR3 for beta chain variable domain of TCR clone 273275 (TRBV7-3, TRBJ2-2)
CASSLQRGTLSGELFF

SEQ ID NO: 546551 - protein, 15 aa, Homo sapiens
  CDR3 for alpha chain variable domain of TCR clone 273276 (TRAV13-1, TRAJ9)
CAASTLNTGGFKTIF

SEQ ID NO: 546552 - protein, 14 aa, Homo sapiens
  CDR3 for beta chain variable domain of TCR clone 273276 (TRBV5-1, TRBJ1-1)
CASSRTTGDTEAFF

SEQ ID NO: 546553 - protein, 13 aa, Homo sapiens
  CDR3 for alpha chain variable domain of TCR clone 273277 (TRAV23/DV6, TRAJ34)
CAAIENNTDKLIF

SEQ ID NO: 546554 - protein, 18 aa, Homo sapiens
  CDR3 for beta chain variable domain of TCR clone 273277 (TRBV20-1, TRBJ2-6)
GSAETTPTHGSGANVLTF

SEQ ID NO: 546555 - protein, 14 aa, Homo sapiens
  CDR3 for alpha chain variable domain of TCR clone 273278 (TRAV8-4, TRAJ3)
CAVIEYSSASKIIF

SEQ ID NO: 546556 - protein, 13 aa, Homo sapiens
  CDR3 for beta chain variable domain of TCR clone 273278 (TRBV11-3, TRBJ2-3)
CASSHDTKDTQYF

SEQ ID NO: 546557 - protein, 12 aa, Homo sapiens
  CDR3 for alpha chain variable domain of TCR clone 273279 (TRAV27, TRAJ13)
CAGVRGYKKVTF

SEQ ID NO: 546558 - protein, 16 aa, Homo sapiens
  CDR3 for beta chain variable domain of TCR clone 273279 (TRBV28, TRBJ2-1)
CASSSSYSGSPNEQFF

SEQ ID NO: 546559 - protein, 11 aa, Homo sapiens
  CDR3 for alpha chain variable domain of TCR clone 273280 (TRAV12-2, TRAJ54)
CAVVGAQKLVF

SEQ ID NO: 546560 - protein, 12 aa, Homo sapiens
  CDR3 for beta chain variable domain of TCR clone 273280 (TRBV28, TRBJ2-7)
CASTWGGPEQYF

SEQ ID NO: 546561 - protein, 14 aa, Homo sapiens
  CDR3 for alpha chain variable domain of TCR clone 273281 (TRAV2, TRAJ20)
CAVEDGTNDYKLSF

SEQ ID NO: 546562 - protein, 13 aa, Homo sapiens
  CDR3 for beta chain variable domain of TCR clone 273281 (TRBV7-2, TRBJ1-1)
CASSRNTNTDAFF

SEQ ID NO: 546563 - protein, 16 aa, Homo sapiens
  CDR3 for alpha chain variable domain of TCR clone 273282 (TRAV26-1, )
CIDIQNPDPAGYQLRD

SEQ ID NO: 546564 - protein, 13 aa, Homo sapiens
  CDR3 for beta chain variable domain of TCR clone 273282 (TRBV12-4, TRBJ1-2)
CASSLRQGKGYTF

SEQ ID NO: 546565 - protein, 10 aa, Homo sapiens
  CDR3 for alpha chain variable domain of TCR clone 273283 (TRAV13-1, TRAJ27)
CAPLARQINL

SEQ ID NO: 546566 - protein, 13 aa, Homo sapiens
  CDR3 for beta chain variable domain of TCR clone 273283 (TRBV7-3, TRBJ1-1)
CTSSQEWGAEAVF

SEQ ID NO: 546567 - protein, 14 aa, Homo sapiens
  CDR3 for alpha chain variable domain of TCR clone 273284 (TRAV29/DV5, TRAJ32)
CAAAYGGATNKLIF

SEQ ID NO: 546568 - protein, 15 aa, Homo sapiens
  CDR3 for beta chain variable domain of TCR clone 273284 (TRBV27, TRBJ2-7)
CASSTAGTGSYELYF

SEQ ID NO: 546569 - protein, 16 aa, Homo sapiens
  CDR3 for alpha chain variable domain of TCR clone 273285 (TRAV4, TRAJ5)
CLVGPDHGHGQESTYF

SEQ ID NO: 546570 - protein, 13 aa, Homo sapiens
  CDR3 for beta chain variable domain of TCR clone 273285 (TRBV4-1, TRBJ2-2)
CASSQENTGELFF

SEQ ID NO: 546571 - protein, 15 aa, Homo sapiens
  CDR3 for alpha chain variable domain of TCR clone 273286 (TRAV12-2, TRAJ53)
CAVNGGGGSNYKLTF

SEQ ID NO: 546572 - protein, 12 aa, Homo sapiens
  CDR3 for beta chain variable domain of TCR clone 273286 (TRBV7-6, TRBJ2-5)
CASSLSQETKYF

SEQ ID NO: 546573 - protein, 12 aa, Homo sapiens
  CDR3 for alpha chain variable domain of TCR clone 273287 (TRAV16, TRAJ10)
CSRTGGGNKPTF

SEQ ID NO: 546574 - protein, 14 aa, Homo sapiens
  CDR3 for beta chain variable domain of TCR clone 273287 (TRBV7-2, TRBJ2-7)
CASRSQGAAYEQYF

SEQ ID NO: 546575 - protein, 14 aa, Homo sapiens
  CDR3 for alpha chain variable domain of TCR clone 273288 (TRAV1-2, TRAJ8)
CAVREDAGFQKLVF

SEQ ID NO: 546576 - protein, 14 aa, Homo sapiens
  CDR3 for beta chain variable domain of TCR clone 273288 (TRBV29-1, TRBJ2-5)
CSVETSGSGETQYF

SEQ ID NO: 546577 - protein, 13 aa, Homo sapiens
  CDR3 for alpha chain variable domain of TCR clone 273289 (TRAV1-2, TRAJ9)
WAVLNTGGFKTIF

SEQ ID NO: 546578 - protein, 14 aa, Homo sapiens
  CDR3 for beta chain variable domain of TCR clone 273289 (TRBV4-3, TRBJ2-7)
CASSQDVAGGEQFF

SEQ ID NO: 546579 - protein, 13 aa, Homo sapiens
  CDR3 for alpha chain variable domain of TCR clone 273290 (TRAV17, TRAJ9)
CATDYTGGIKTIF

SEQ ID NO: 546580 - protein, 16 aa, Homo sapiens
  CDR3 for beta chain variable domain of TCR clone 273290 (TRBV7-6, TRBJ1-6)
CASSLSSRIGDSPLHF

SEQ ID NO: 546581 - protein, 12 aa, Homo sapiens
  CDR3 for alpha chain variable domain of TCR clone 273291 (TRAV3, TRAJ20)
CAVRDPDCKLSF

SEQ ID NO: 546582 - protein, 15 aa, Homo sapiens
  CDR3 for beta chain variable domain of TCR clone 273291 (TRBV6-3, TRBJ2-7)
CASSSPGTVFYEQYF

SEQ ID NO: 546583 - protein, 10 aa, Homo sapiens
  CDR3 for alpha chain variable domain of TCR clone 273292 (TRAV26-1, TRAJ22)
CIVSLNFFWF

SEQ ID NO: 546584 - protein, 12 aa, Homo sapiens
  CDR3 for beta chain variable domain of TCR clone 273292 (TRBV7-8, TRBJ2-7)
CASSLGDREQYF

SEQ ID NO: 546585 - protein, 15 aa, Homo sapiens
  CDR3 for alpha chain variable domain of TCR clone 273293 (TRAV12-2, TRAJ8)
CPVREENTGFQKLVF

SEQ ID NO: 546586 - protein, 16 aa, Homo sapiens
  CDR3 for beta chain variable domain of TCR clone 273293 (TRBV7-3, TRBJ2-2)
CASSLKRGTLSGELFF

SEQ ID NO: 546587 - protein, 13 aa, Homo sapiens
  CDR3 for alpha chain variable domain of TCR clone 273294 (TRAV27, TRAJ57)
CRSAQGGSEKLVF

SEQ ID NO: 546588 - protein, 14 aa, Homo sapiens
  CDR3 for beta chain variable domain of TCR clone 273294 (TRBV7-9, TRBJ2-5)
CASSPRPSGETQYF

SEQ ID NO: 546589 - protein, 16 aa, Homo sapiens
  CDR3 for alpha chain variable domain of TCR clone 273295 (TRAV29/DV5, TRAJ39)
CAASLLFNNSGNMLTF

SEQ ID NO: 546590 - protein, 16 aa, Homo sapiens
  CDR3 for beta chain variable domain of TCR clone 273295 (TRBV19, TRBJ2-6)
CASSMSGLSGANVLTF

SEQ ID NO: 546591 - protein, 14 aa, Homo sapiens
  CDR3 for alpha chain variable domain of TCR clone 273296 (TRAV12-2, TRAJ44)
CAVNKAGTASKLTF

SEQ ID NO: 546592 - protein, 16 aa, Homo sapiens
  CDR3 for beta chain variable domain of TCR clone 273296 (TRBV4-1, TRBJ1-1)
CASSYRQGTGDTEAFF

SEQ ID NO: 546593 - protein, 17 aa, Homo sapiens
  CDR3 for alpha chain variable domain of TCR clone 273297 (TRAV3, TRAJ6)
CAVRDGPRAGGSYIPTS

SEQ ID NO: 546594 - protein, 13 aa, Homo sapiens
  CDR3 for beta chain variable domain of TCR clone 273297 (TRBV19, TRBJ1-1)
CASSITGESEAFF

SEQ ID NO: 546595 - protein, 14 aa, Homo sapiens
  CDR3 for alpha chain variable domain of TCR clone 273298 (TRAV17, TRAJ39)
CATDPVRAGNMLTF

SEQ ID NO: 546596 - protein, 13 aa, Homo sapiens
  CDR3 for beta chain variable domain of TCR clone 273298 (TRBV7-9, TRBJ1-2)
CASSLKQNYGYTF

SEQ ID NO: 546597 - protein, 17 aa, Homo sapiens
  CDR3 for alpha chain variable domain of TCR clone 273299 (TRAV3, TRAJ42)
CSVRDRDYGGSQGNIIF

SEQ ID NO: 546598 - protein, 15 aa, Homo sapiens
  CDR3 for beta chain variable domain of TCR clone 273299 (TRBV6-6, TRBJ2-7)
CASSYSYGGSYEQYF

SEQ ID NO: 546599 - protein, 17 aa, Homo sapiens
  CDR3 for alpha chain variable domain of TCR clone 273300 (TRAV9-2, TRAJ45)
CALSGYYSGGGADGLTF

SEQ ID NO: 546600 - protein, 15 aa, Homo sapiens
  CDR3 for beta chain variable domain of TCR clone 273300 (TRBV5-5, TRBJ2-2)
CASSRQASGAGELFF

SEQ ID NO: 546601 - protein, 14 aa, Homo sapiens
  CDR3 for alpha chain variable domain of TCR clone 273301 (TRAV1-2, TRAJ16)
CAVNRFSDGQKLLF

SEQ ID NO: 546602 - protein, 16 aa, Homo sapiens
  CDR3 for beta chain variable domain of TCR clone 273301 (TRBV12-4, TRBJ1-5)
CASSRPVGGSHQPQHF

SEQ ID NO: 546603 - protein, 12 aa, Homo sapiens
  CDR3 for alpha chain variable domain of TCR clone 273302 (TRAV12-3, TRAJ17)
CAMTLTGNKLTF

SEQ ID NO: 546604 - protein, 18 aa, Homo sapiens
  CDR3 for beta chain variable domain of TCR clone 273302 (TRBV28, TRBJ2-5)
CASSAGHERGGREETQYF

SEQ ID NO: 546605 - protein, 15 aa, Homo sapiens
  CDR3 for alpha chain variable domain of TCR clone 273303 (TRAV12-2, TRAJ8)
CAVREENTGFQKLVF

SEQ ID NO: 546606 - protein, 12 aa, Homo sapiens
  CDR3 for beta chain variable domain of TCR clone 273303 (TRBV7-9, TRBJ2-7)
CASSIKREEQYF

SEQ ID NO: 546607 - protein, 14 aa, Homo sapiens
  CDR3 for alpha chain variable domain of TCR clone 273304 (TRAV29/DV5, TRAJ36)
CAARRKTGANNLFF

SEQ ID NO: 546608 - protein, 15 aa, Homo sapiens
  CDR3 for beta chain variable domain of TCR clone 273304 (TRBV11-2, TRBJ2-1)
CASSLGPDSYNEQFF

SEQ ID NO: 546609 - protein, 15 aa, Homo sapiens
  CDR3 for alpha chain variable domain of TCR clone 273305 (TRAV34, TRAJ38)
CGADFTPGNNRKLIW

SEQ ID NO: 546610 - protein, 16 aa, Homo sapiens
  CDR3 for beta chain variable domain of TCR clone 273305 (TRBV28, TRBJ2-7)
CASSLFFETGGPEQYF

SEQ ID NO: 546611 - protein, 14 aa, Homo sapiens
  CDR3 for alpha chain variable domain of TCR clone 273306 (TRAV8-4, TRAJ9)
CAVTFNTGGFKTIF

SEQ ID NO: 546612 - protein, 13 aa, Homo sapiens
  CDR3 for beta chain variable domain of TCR clone 273306 (TRBV2, TRBJ1-6)
CASGRGGISPLHF

SEQ ID NO: 546613 - protein, 14 aa, Homo sapiens
  CDR3 for alpha chain variable domain of TCR clone 273307 (TRAV1-2, TRAJ16)
CAVNRFSYGQKLLF

SEQ ID NO: 546614 - protein, 17 aa, Homo sapiens
  CDR3 for beta chain variable domain of TCR clone 273307 (TRBV7-9, TRBJ2-1)
CASSLVASYPSYNEQFF

SEQ ID NO: 546615 - protein, 12 aa, Homo sapiens
  CDR3 for alpha chain variable domain of TCR clone 273308 (TRAV38-1, TRAJ47)
CAFETDGNKLVF

SEQ ID NO: 546616 - protein, 13 aa, Homo sapiens
  CDR3 for beta chain variable domain of TCR clone 273308 (TRBV4-2, TRBJ1-1)
CASSQAGNTEAFF

SEQ ID NO: 546617 - protein, 12 aa, Homo sapiens
  CDR3 for alpha chain variable domain of TCR clone 273309 (TRAV13-1, TRAJ30)
CAASYRDDKIIF

SEQ ID NO: 546618 - protein, 13 aa, Homo sapiens
  CDR3 for beta chain variable domain of TCR clone 273309 (TRBV27, TRBJ1-4)
CASSLMGDEKLFF

SEQ ID NO: 546619 - protein, 14 aa, Homo sapiens
  CDR3 for alpha chain variable domain of TCR clone 273310 (TRAV16, TRAJ33)
CALSAMDSNYQLIW

SEQ ID NO: 546620 - protein, 16 aa, Homo sapiens
  CDR3 for beta chain variable domain of TCR clone 273310 (TRBV24-1, TRBJ2-3)
CATSDAISGITDTQYF

SEQ ID NO: 546621 - protein, 12 aa, Homo sapiens
  CDR3 for alpha chain variable domain of TCR clone 273311 (TRAV2, TRAJ15)
CAVAQAGTALIF

SEQ ID NO: 546622 - protein, 14 aa, Homo sapiens
  CDR3 for beta chain variable domain of TCR clone 273311 (TRBV7-2, TRBJ1-1)
CASSHRQGRTEAFF

SEQ ID NO: 546623 - protein, 16 aa, Homo sapiens
  CDR3 for alpha chain variable domain of TCR clone 273312 (TRAV30, TRAJ32)
CGTESSYGGATNKLIF

SEQ ID NO: 546624 - protein, 13 aa, Homo sapiens
  CDR3 for beta chain variable domain of TCR clone 273312 (TRBV7-9, TRBJ1-2)
CASSLKQNYGYTF

SEQ ID NO: 546625 - protein, 12 aa, Homo sapiens
  CDR3 for alpha chain variable domain of TCR clone 273313 (TRAV35, TRAJ49)
CAGWNTVNQFYF

SEQ ID NO: 546626 - protein, 16 aa, Homo sapiens
  CDR3 for beta chain variable domain of TCR clone 273313 (TRBV5-1, TRBJ2-2)
CASSLWDTTNTGELFF

SEQ ID NO: 546627 - protein, 16 aa, Homo sapiens
  CDR3 for alpha chain variable domain of TCR clone 273314 (TRAV23/DV6, TRAJ9)
CAASIGGNTGGFKTIF

SEQ ID NO: 546628 - protein, 16 aa, Homo sapiens
  CDR3 for beta chain variable domain of TCR clone 273314 (TRBV6-1, TRBJ2-5)
CTSVPAVTRGGKRQYF

SEQ ID NO: 546629 - protein, 13 aa, Homo sapiens
  CDR3 for alpha chain variable domain of TCR clone 273315 (TRAV12-3, TRAJ7)
CAMTPYGNNRPAF

SEQ ID NO: 546630 - protein, 15 aa, Homo sapiens
  CDR3 for beta chain variable domain of TCR clone 273315 (TRBV6-3, TRBJ2-7)
CASSSPGTVFYEQYF

SEQ ID NO: 546631 - protein, 15 aa, Homo sapiens
  CDR3 for alpha chain variable domain of TCR clone 273316 (TRAV26-1, TRAJ29)
CIVRVEGSGNTPLVF

SEQ ID NO: 546632 - protein, 13 aa, Homo sapiens
  CDR3 for beta chain variable domain of TCR clone 273316 (TRBV14, TRBJ1-1)
CASSREFGTEAFF

SEQ ID NO: 546633 - protein, 13 aa, Homo sapiens
  CDR3 for alpha chain variable domain of TCR clone 273317 (TRAV13-2, TRAJ15)
CAERPQEGTALIF

SEQ ID NO: 546634 - protein, 15 aa, Homo sapiens
  CDR3 for beta chain variable domain of TCR clone 273317 (TRBV11-2, TRBJ2-7)
CASRFPGTGGYEQYF

SEQ ID NO: 546635 - protein, 14 aa, Homo sapiens
  CDR3 for alpha chain variable domain of TCR clone 273318 (TRAV20, TRAJ42)
CAVQARGSQGNLIF

SEQ ID NO: 546636 - protein, 13 aa, Homo sapiens
  CDR3 for beta chain variable domain of TCR clone 273318 (TRBV24-1, TRBJ2-2)
CATSDWSTGELFF

SEQ ID NO: 546637 - protein, 14 aa, Homo sapiens
  CDR3 for alpha chain variable domain of TCR clone 273319 (TRAV8-3, TRAJ4)
CAVGASGGYNKLIF

SEQ ID NO: 546638 - protein, 14 aa, Homo sapiens
  CDR3 for beta chain variable domain of TCR clone 273319 (TRBV5-4, TRBJ2-2)
CASRLDGGTGELFF

SEQ ID NO: 546639 - protein, 14 aa, Homo sapiens
  CDR3 for alpha chain variable domain of TCR clone 273320 (TRAV8-3, TRAJ4)
CAVGASGGYNKLIF

SEQ ID NO: 546640 - protein, 15 aa, Homo sapiens
  CDR3 for beta chain variable domain of TCR clone 273320 (TRBV19, TRBJ1-1)
CASSIRRQMNTEAFF

SEQ ID NO: 546641 - protein, 15 aa, Homo sapiens
  CDR3 for alpha chain variable domain of TCR clone 273321 (TRAV17, TRAJ57)
CATGASQGGSEKLVF

SEQ ID NO: 546642 - protein, 17 aa, Homo sapiens
  CDR3 for beta chain variable domain of TCR clone 273321 (TRBV20-1, TRBJ2-1)
CSASSSGLAGSYNEQFF

SEQ ID NO: 546643 - protein, 12 aa, Homo sapiens
  CDR3 for alpha chain variable domain of TCR clone 273322 (TRAV12-3, TRAJ17)
CAMTLTGDKLTF

SEQ ID NO: 546644 - protein, 16 aa, Homo sapiens
  CDR3 for beta chain variable domain of TCR clone 273322 (TRBV29-1, TRBJ2-7)
CSVEDAEDGTAYEQYF

SEQ ID NO: 546645 - protein, 17 aa, Homo sapiens
  CDR3 for alpha chain variable domain of TCR clone 273323 (TRAV23/DV6, TRAJ57)
CAASSTLSQGGSEKLVF

SEQ ID NO: 546646 - protein, 13 aa, Homo sapiens
  CDR3 for beta chain variable domain of TCR clone 273323 (TRBV7-6, TRBJ2-3)
CASSLRSDNTQYF

SEQ ID NO: 546647 - protein, 16 aa, Homo sapiens
  CDR3 for alpha chain variable domain of TCR clone 273324 (TRAV17, TRAJ54)
CATDSDIIQGAQKLVF

SEQ ID NO: 546648 - protein, 15 aa, Homo sapiens
  CDR3 for beta chain variable domain of TCR clone 273324 (TRBV29-1, TRBJ2-3)
CSVEVTTGDTDTQYF

SEQ ID NO: 546649 - protein, 15 aa, Homo sapiens
  CDR3 for alpha chain variable domain of TCR clone 273325 (TRAV34, TRAJ38)
CGSDFTPGNNRKLIW

SEQ ID NO: 546650 - protein, 14 aa, Homo sapiens
  CDR3 for beta chain variable domain of TCR clone 273325 (TRBV20-1, TRBJ2-1)
CSAQIGGSANEQFF

SEQ ID NO: 546651 - protein, 15 aa, Homo sapiens
  CDR3 for alpha chain variable domain of TCR clone 273326 (TRAV26-1, TRAJ40)
CIVRVTTSGTYKYIF

SEQ ID NO: 546652 - protein, 15 aa, Homo sapiens
  CDR3 for beta chain variable domain of TCR clone 273326 (TRBV18, TRBJ2-1)
CASLPDRGRDNEQFF

SEQ ID NO: 546653 - protein, 13 aa, Homo sapiens
  CDR3 for alpha chain variable domain of TCR clone 273327 (TRAV2, TRAJ40)
CAVVTSGTYKYIF

SEQ ID NO: 546654 - protein, 14 aa, Homo sapiens
  CDR3 for beta chain variable domain of TCR clone 273327 (TRBV19, TRBJ2-7)
CASSTTRSSYEQYF

SEQ ID NO: 546655 - protein, 23 aa, Homo sapiens
  CDR3 for alpha chain variable domain of TCR clone 273328 (TRAV12-2, TRAJ36)
SLLIRDSQPSDSATLERANNLFF

SEQ ID NO: 546656 - protein, 13 aa, Homo sapiens
  CDR3 for beta chain variable domain of TCR clone 273328 (TRBV7-3, TRBJ2-1)
CASSPVAYNEQFF

SEQ ID NO: 546657 - protein, 12 aa, Homo sapiens
  CDR3 for alpha chain variable domain of TCR clone 273329 (TRAV17, TRAJ12)
CATLRSSYRLIF

SEQ ID NO: 546658 - protein, 14 aa, Homo sapiens
  CDR3 for beta chain variable domain of TCR clone 273329 (TRBV19, TRBJ2-1)
CARGARSFQWEQFF

SEQ ID NO: 546659 - protein, 14 aa, Homo sapiens
  CDR3 for alpha chain variable domain of TCR clone 273330 (TRAV1-2, TRAJ8)
CAVREDTGCQKLVF

SEQ ID NO: 546660 - protein, 16 aa, Homo sapiens
  CDR3 for beta chain variable domain of TCR clone 273330 (TRBV5-1, TRBJ2-2)
CASSLWDTTNTGKLFF

SEQ ID NO: 546661 - protein, 13 aa, Homo sapiens
  CDR3 for alpha chain variable domain of TCR clone 273331 (TRAV27, TRAJ42)
CAGARGSQGNLIF

SEQ ID NO: 546662 - protein, 19 aa, Homo sapiens
  CDR3 for beta chain variable domain of TCR clone 273331 (TRBV4-1, TRBJ2-1)
CASSQGPLPGLGSRNEQFF

SEQ ID NO: 546663 - protein, 12 aa, Homo sapiens
  CDR3 for alpha chain variable domain of TCR clone 273332 (TRAV1-2, TRAJ42)
CVAGGSQGNLIF

SEQ ID NO: 546664 - protein, 16 aa, Homo sapiens
  CDR3 for beta chain variable domain of TCR clone 273332 (TRBV10-3, TRBJ2-1)
CAISGVGDGGGGEQFF

SEQ ID NO: 546665 - protein, 14 aa, Homo sapiens
  CDR3 for alpha chain variable domain of TCR clone 273333 (TRAV8-3, TRAJ4)
CAVGASGGYNKLIF

SEQ ID NO: 546666 - protein, 13 aa, Homo sapiens
  CDR3 for beta chain variable domain of TCR clone 273333 (TRBV24-1, TRBJ2-1)
CATSAGPYNEQFF

SEQ ID NO: 546667 - protein, 10 aa, Homo sapiens
  CDR3 for alpha chain variable domain of TCR clone 273334 (TRAV26-1, TRAJ22)
RSGSARQLTF

SEQ ID NO: 546668 - protein, 15 aa, Homo sapiens
  CDR3 for beta chain variable domain of TCR clone 273334 (TRBV5-1, TRBJ2-3)
CASRNQAGSTDTQYF

SEQ ID NO: 546669 - protein, 14 aa, Homo sapiens
  CDR3 for alpha chain variable domain of TCR clone 273335 (TRAV12-2, TRAJ13)
CAVRKTGGYQKVTF

SEQ ID NO: 546670 - protein, 13 aa, Homo sapiens
  CDR3 for beta chain variable domain of TCR clone 273335 (TRBV12-4, TRBJ1-2)
CASSFIWRHLRCG

SEQ ID NO: 546671 - protein, 12 aa, Homo sapiens
  CDR3 for alpha chain variable domain of TCR clone 273336 (TRAV21, TRAJ49)
CAVNDGGNQFYF

SEQ ID NO: 546672 - protein, 13 aa, Homo sapiens
  CDR3 for beta chain variable domain of TCR clone 273336 (TRBV19, TRBJ1-2)
CASSVPGQDGYTF

SEQ ID NO: 546673 - protein, 15 aa, Homo sapiens
  CDR3 for alpha chain variable domain of TCR clone 273337 (TRAV12-2, TRAJ43)
CAFDMRFGAGTRLTV

SEQ ID NO: 546674 - protein, 18 aa, Homo sapiens
  CDR3 for beta chain variable domain of TCR clone 273337 (TRBV20-1, TRBJ2-3)
RSASGLAGGPGTTDTQYF

SEQ ID NO: 546675 - protein, 14 aa, Homo sapiens
  CDR3 for alpha chain variable domain of TCR clone 273338 (TRAV4, TRAJ26)
CLVVPHNYGQNFVF

SEQ ID NO: 546676 - protein, 17 aa, Homo sapiens
  CDR3 for beta chain variable domain of TCR clone 273338 (TRBV24-1, TRBJ2-1)
CATSDVSTSGTYNEQFF

SEQ ID NO: 546677 - protein, 13 aa, Homo sapiens
  CDR3 for alpha chain variable domain of TCR clone 273339 (TRAV17, TRAJ5)
CAPMDTGRRALTF

SEQ ID NO: 546678 - protein, 13 aa, Homo sapiens
  CDR3 for beta chain variable domain of TCR clone 273339 (TRBV6-1, TRBJ1-1)
CASSRQGNTEAFF

SEQ ID NO: 546679 - protein, 18 aa, Homo sapiens
  CDR3 for alpha chain variable domain of TCR clone 273340 (TRAV17, TRAJ28)
CATDPPRGSGAGSYQRTF

SEQ ID NO: 546680 - protein, 14 aa, Homo sapiens
  CDR3 for beta chain variable domain of TCR clone 273340 (TRBV13, TRBJ2-5)
CASSLDYPQETQYF

SEQ ID NO: 546681 - protein, 12 aa, Homo sapiens
  CDR3 for alpha chain variable domain of TCR clone 273341 (TRAV16, TRAJ56)
CAPTGANSKLTF

SEQ ID NO: 546682 - protein, 16 aa, Homo sapiens
  CDR3 for beta chain variable domain of TCR clone 273341 (TRBV20-1, TRBJ2-1)
CSARGSSSGMVNEQFF

SEQ ID NO: 546683 - protein, 14 aa, Homo sapiens
  CDR3 for alpha chain variable domain of TCR clone 273342 (TRAV13-1, TRAJ44)
CAAKATGTASKLTF

SEQ ID NO: 546684 - protein, 12 aa, Homo sapiens
  CDR3 for beta chain variable domain of TCR clone 273342 (TRBV9, TRBJ2-1)
CASSVGGTDIFF

SEQ ID NO: 546685 - protein, 15 aa, Homo sapiens
  CDR3 for alpha chain variable domain of TCR clone 273343 (TRAV3, TRAJ5)
CAVRDLDTGRRALTF

SEQ ID NO: 546686 - protein, 20 aa, Homo sapiens
  CDR3 for beta chain variable domain of TCR clone 273343 (TRBV6-4, TRBJ2-7)
CASSDSSVSGQVPTSYEQYF

SEQ ID NO: 546687 - protein, 18 aa, Homo sapiens
  CDR3 for alpha chain variable domain of TCR clone 273344 (TRAV21, TRAJ52)
CAVRPSAAGGTSYGKLTF

SEQ ID NO: 546688 - protein, 13 aa, Homo sapiens
  CDR3 for beta chain variable domain of TCR clone 273344 (TRBV20-1, TRBJ1-1)
CSARVGGNTEAFF

SEQ ID NO: 546689 - protein, 17 aa, Homo sapiens
  CDR3 for alpha chain variable domain of TCR clone 273345 (TRAV3, TRAJ42)
CAVRDRDYGGSQGNLIL

SEQ ID NO: 546690 - protein, 15 aa, Homo sapiens
  CDR3 for beta chain variable domain of TCR clone 273345 (TRBV2, TRBJ2-7)
CASSEGLARSYEQYF

SEQ ID NO: 546691 - protein, 15 aa, Homo sapiens
  CDR3 for alpha chain variable domain of TCR clone 273346 (TRAV3, TRAJ42)
CAVRGGTGSQGNLIF

SEQ ID NO: 546692 - protein, 13 aa, Homo sapiens
  CDR3 for beta chain variable domain of TCR clone 273346 (TRBV7-3, TRBJ1-1)
CASSQDWGAEAFF

SEQ ID NO: 546693 - protein, 14 aa, Homo sapiens
  CDR3 for alpha chain variable domain of TCR clone 273347 (TRAV17, TRAJ12)
CATDGVDSSYKLIF

SEQ ID NO: 546694 - protein, 15 aa, Homo sapiens
  CDR3 for beta chain variable domain of TCR clone 273347 (TRBV28, TRBJ1-3)
CASSMGWASGNTIYV

SEQ ID NO: 546695 - protein, 15 aa, Homo sapiens
  CDR3 for alpha chain variable domain of TCR clone 273348 (TRAV12-2, TRAJ43)
CAFDMRFGAGTRLTV

SEQ ID NO: 546696 - protein, 13 aa, Homo sapiens
  CDR3 for beta chain variable domain of TCR clone 273348 (TRBV19, TRBJ2-7)
CASSRDRSYEQYF

SEQ ID NO: 546697 - protein, 13 aa, Homo sapiens
  CDR3 for alpha chain variable domain of TCR clone 273349 (TRAV30, TRAJ39)
CGTETNAGNMLTF

SEQ ID NO: 546698 - protein, 12 aa, Homo sapiens
  CDR3 for beta chain variable domain of TCR clone 273349 (TRBV12-4, TRBJ2-5)
CASSSAQETQYF

SEQ ID NO: 546699 - protein, 16 aa, Homo sapiens
  CDR3 for alpha chain variable domain of TCR clone 273350 (TRAV21, TRAJ33)
CAVSPASMDSNYQLIW

SEQ ID NO: 546700 - protein, 17 aa, Homo sapiens
  CDR3 for beta chain variable domain of TCR clone 273350 (TRBV2, TRBJ1-4)
CASSRRELTQGEEKLFF

SEQ ID NO: 546701 - protein, 14 aa, Homo sapiens
  CDR3 for alpha chain variable domain of TCR clone 273351 (TRAV9-2, TRAJ39)
CALYIYNAGNMLTF

SEQ ID NO: 546702 - protein, 16 aa, Homo sapiens
  CDR3 for beta chain variable domain of TCR clone 273351 (TRBV7-8, TRBJ2-5)
CASSPAGGRNQETQYF

SEQ ID NO: 546703 - protein, 11 aa, Homo sapiens
  CDR3 for alpha chain variable domain of TCR clone 273352 (TRAV2, TRAJ33)
CAVESNYQLIW

SEQ ID NO: 546704 - protein, 13 aa, Homo sapiens
  CDR3 for beta chain variable domain of TCR clone 273352 (TRBV25-1, TRBJ1-2)
CASSEAGASGYTF

SEQ ID NO: 546705 - protein, 13 aa, Homo sapiens
  CDR3 for alpha chain variable domain of TCR clone 273353 (TRAV21, TRAJ57)
CAVTQGGSEKLVF

SEQ ID NO: 546706 - protein, 14 aa, Homo sapiens
  CDR3 for beta chain variable domain of TCR clone 273353 (TRBV20-1, TRBJ1-1)
CSAQTRIGGTEAFL

SEQ ID NO: 546707 - protein, 21 aa, Homo sapiens
  CDR3 for alpha chain variable domain of TCR clone 273354 (TRAV8-4, TRAJ47)
HLAKPSAHMSDAAERGNKLVF

SEQ ID NO: 546708 - protein, 14 aa, Homo sapiens
  CDR3 for beta chain variable domain of TCR clone 273354 (TRBV18, TRBJ2-5)
CASSPGVSQETQYF

SEQ ID NO: 546709 - protein, 16 aa, Homo sapiens
  CDR3 for alpha chain variable domain of TCR clone 273355 (TRAV30, TRAJ24)
CGTEIVDADRWGKFQF

SEQ ID NO: 546710 - protein, 12 aa, Homo sapiens
  CDR3 for beta chain variable domain of TCR clone 273355 (TRBV7-8, TRBJ2-7)
CASSLGDREQYF

SEQ ID NO: 546711 - protein, 13 aa, Homo sapiens
  CDR3 for alpha chain variable domain of TCR clone 273356 (TRAV30, TRAJ6)
CGTEAGGSYIPTF

SEQ ID NO: 546712 - protein, 16 aa, Homo sapiens
  CDR3 for beta chain variable domain of TCR clone 273356 (TRBV4-3, TRBJ2-3)
CASSLGRAGEGDTQYF

SEQ ID NO: 546713 - protein, 13 aa, Homo sapiens
  CDR3 for alpha chain variable domain of TCR clone 273357 (TRAV26-1, TRAJ40)
CIVRVEGTYKYIF

SEQ ID NO: 546714 - protein, 15 aa, Homo sapiens
  CDR3 for beta chain variable domain of TCR clone 273357 (TRBV12-4, TRBJ1-2)
CASSLAHRDSQAYTF

SEQ ID NO: 546715 - protein, 11 aa, Homo sapiens
  CDR3 for alpha chain variable domain of TCR clone 273358 (TRAV12-1, TRAJ21)
CVVYNFNKFYF

SEQ ID NO: 546716 - protein, 16 aa, Homo sapiens
  CDR3 for beta chain variable domain of TCR clone 273358 (TRBV20-1, TRBJ1-2)
CSASMGQGVANYGYTF

SEQ ID NO: 546717 - protein, 23 aa, Homo sapiens
  CDR3 for alpha chain variable domain of TCR clone 273359 (TRAV30, TRAJ29)
PAQLLRNLLLWHRAFSGNTPLVF

SEQ ID NO: 546718 - protein, 15 aa, Homo sapiens
  CDR3 for beta chain variable domain of TCR clone 273359 (TRBV5-1, TRBJ2-2)
GASSLFGQNTGELFF

SEQ ID NO: 546719 - protein, 12 aa, Homo sapiens
  CDR3 for alpha chain variable domain of TCR clone 273360 (TRAV12-3, TRAJ17)
CAMTLTGNKLTF

SEQ ID NO: 546720 - protein, 13 aa, Homo sapiens
  CDR3 for beta chain variable domain of TCR clone 273360 (TRBV20-1, TRBJ2-2)
CSALSGGAGELFF

SEQ ID NO: 546721 - protein, 12 aa, Homo sapiens
  CDR3 for alpha chain variable domain of TCR clone 273361 (TRAV13-2, TRAJ23)
CAERHRRGKLIF

SEQ ID NO: 546722 - protein, 13 aa, Homo sapiens
  CDR3 for beta chain variable domain of TCR clone 273361 (TRBV7-9, TRBJ2-1)
CASSLDVGNEQFF

SEQ ID NO: 546723 - protein, 17 aa, Homo sapiens
  CDR3 for alpha chain variable domain of TCR clone 273362 (TRAV3, TRAJ6)
CAVRDGPRAGGSYIPTF

SEQ ID NO: 546724 - protein, 11 aa, Homo sapiens
  CDR3 for beta chain variable domain of TCR clone 273362 (TRBV12-4, TRBJ2-3)
RASTATDTQYF

SEQ ID NO: 546725 - protein, 17 aa, Homo sapiens
  CDR3 for alpha chain variable domain of TCR clone 273363 (TRAV3, TRAJ6)
CAVRDSPRAGGSYIPTF

SEQ ID NO: 546726 - protein, 14 aa, Homo sapiens
  CDR3 for beta chain variable domain of TCR clone 273363 (TRBV7-2, TRBJ2-7)
CASSPKTSFYERYF

SEQ ID NO: 546727 - protein, 14 aa, Homo sapiens
  CDR3 for alpha chain variable domain of TCR clone 273364 (TRAV12-2, TRAJ9)
CAVNALEGGFKTIF

SEQ ID NO: 546728 - protein, 17 aa, Homo sapiens
  CDR3 for beta chain variable domain of TCR clone 273364 (TRBV15, TRBJ1-4)
RATSRYGTGDANEKLFF

SEQ ID NO: 546729 - protein, 15 aa, Homo sapiens
  CDR3 for alpha chain variable domain of TCR clone 273365 (TRAV1-2, TRAJ36)
CAASADQTGGNNLFF

SEQ ID NO: 546730 - protein, 15 aa, Homo sapiens
  CDR3 for beta chain variable domain of TCR clone 273365 (TRBV5-1, TRBJ2-7)
CASSFSTDSVYEQYF

SEQ ID NO: 546731 - protein, 14 aa, Homo sapiens
  CDR3 for alpha chain variable domain of TCR clone 273366 (TRAV12-2, TRAJ13)
CAVKKTGGYQKVTF

SEQ ID NO: 546732 - protein, 15 aa, Homo sapiens
  CDR3 for beta chain variable domain of TCR clone 273366 (TRBV20-1, TRBJ2-7)
CSARDRVSGLDEQYF

SEQ ID NO: 546733 - protein, 12 aa, Homo sapiens
  CDR3 for alpha chain variable domain of TCR clone 273367 (TRAV17, TRAJ57)
CATDGGSEKLVF

SEQ ID NO: 546734 - protein, 16 aa, Homo sapiens
  CDR3 for beta chain variable domain of TCR clone 273367 (TRBV19, TRBJ2-2)
CASRSPGTGATGELFF

SEQ ID NO: 546735 - protein, 14 aa, Homo sapiens
  CDR3 for alpha chain variable domain of TCR clone 273368 (TRAV9-2, TRAJ27)
CALRDNTNAGKSTF

SEQ ID NO: 546736 - protein, 12 aa, Homo sapiens
  CDR3 for beta chain variable domain of TCR clone 273368 (TRBV12-4, TRBJ2-4)
CASSSSGNIQYF

SEQ ID NO: 546737 - protein, 13 aa, Homo sapiens
  CDR3 for alpha chain variable domain of TCR clone 273369 (TRAV2, TRAJ15)
CAVASQAGTALIF

SEQ ID NO: 546738 - protein, 14 aa, Homo sapiens
  CDR3 for beta chain variable domain of TCR clone 273369 (TRBV19, TRBJ2-1)
CASKDPSSYNEQFF

SEQ ID NO: 546739 - protein, 13 aa, Homo sapiens
  CDR3 for alpha chain variable domain of TCR clone 273370 (TRAV12-1, TRAJ49)
CVVSKSAGNQFYF

SEQ ID NO: 546740 - protein, 17 aa, Homo sapiens
  CDR3 for beta chain variable domain of TCR clone 273370 (TRBV20-1, TRBJ2-2)
CSASGSGQGGLTGELFF

SEQ ID NO: 546741 - protein, 15 aa, Homo sapiens
  CDR3 for alpha chain variable domain of TCR clone 273371 (TRAV3, TRAJ5)
CAVRDRKTGRRALTF

SEQ ID NO: 546742 - protein, 15 aa, Homo sapiens
  CDR3 for beta chain variable domain of TCR clone 273371 (TRBV7-8, TRBJ2-1)
CASSLADSLYNEHFF

SEQ ID NO: 546743 - protein, 13 aa, Homo sapiens
  CDR3 for alpha chain variable domain of TCR clone 273372 (TRAV4, TRAJ33)
CLVVDMNNYQLIW

SEQ ID NO: 546744 - protein, 14 aa, Homo sapiens
  CDR3 for beta chain variable domain of TCR clone 273372 (TRBV7-9, TRBJ1-1)
CASSLGGANTEDFF

SEQ ID NO: 546745 - protein, 15 aa, Homo sapiens
  CDR3 for alpha chain variable domain of TCR clone 273373 (TRAV14/DV4, TRAJ10)
CAMRELTGGGNKLTV

SEQ ID NO: 546746 - protein, 18 aa, Homo sapiens
  CDR3 for beta chain variable domain of TCR clone 273373 (TRBV7-9, TRBJ2-7)
CASSLTTSGSRTWYEQYF

SEQ ID NO: 546747 - protein, 14 aa, Homo sapiens
  CDR3 for alpha chain variable domain of TCR clone 273374 (TRAV1-2, TRAJ16)
CAVNRFSDGQKLLF

SEQ ID NO: 546748 - protein, 13 aa, Homo sapiens
  CDR3 for beta chain variable domain of TCR clone 273374 (TRBV29-1, TRBJ1-1)
CSVGDSLNTEAFF

SEQ ID NO: 546749 - protein, 14 aa, Homo sapiens
  CDR3 for alpha chain variable domain of TCR clone 273375 (TRAV8-2, TRAJ4)
CVVSPSGGYNKLIF

SEQ ID NO: 546750 - protein, 14 aa, Homo sapiens
  CDR3 for beta chain variable domain of TCR clone 273375 (TRBV28, TRBJ1-5)
CASSLGVLVKPQHF

SEQ ID NO: 546751 - protein, 16 aa, Homo sapiens
  CDR3 for alpha chain variable domain of TCR clone 273376 (TRAV17, TRAJ35)
CATAEGGIGVGNVLHC

SEQ ID NO: 546752 - protein, 12 aa, Homo sapiens
  CDR3 for beta chain variable domain of TCR clone 273376 (TRBV11-2, TRBJ2-2)
CASSLGGGELFF

SEQ ID NO: 546753 - protein, 14 aa, Homo sapiens
  CDR3 for alpha chain variable domain of TCR clone 273377 (TRAV35, TRAJ40)
CAGSTTSGTYKYIF

SEQ ID NO: 546754 - protein, 13 aa, Homo sapiens
  CDR3 for beta chain variable domain of TCR clone 273377 (TRBV20-1, TRBJ1-6)
CSAPLGVDSTLHF

SEQ ID NO: 546755 - protein, 13 aa, Homo sapiens
  CDR3 for alpha chain variable domain of TCR clone 273378 (TRAV21, TRAJ27)
CAARPGNPGKSTF

SEQ ID NO: 546756 - protein, 12 aa, Homo sapiens
  CDR3 for beta chain variable domain of TCR clone 273378 (TRBV19, TRBJ1-5)
CASSIAQQPQHF

SEQ ID NO: 546757 - protein, 14 aa, Homo sapiens
  CDR3 for alpha chain variable domain of TCR clone 273379 (TRAV17, TRAJ57)
CATDPQGGAEKLVF

SEQ ID NO: 546758 - protein, 18 aa, Homo sapiens
  CDR3 for beta chain variable domain of TCR clone 273379 (TRBV6-5, TRBJ2-6)
CASSYSGNMESGANVLTF

SEQ ID NO: 546759 - protein, 16 aa, Homo sapiens
  CDR3 for alpha chain variable domain of TCR clone 273380 (TRAV10, TRAJ13)
CVVSARNSGGYQKVTF

SEQ ID NO: 546760 - protein, 19 aa, Homo sapiens
  CDR3 for beta chain variable domain of TCR clone 273380 (TRBV12-4, TRBJ2-1)
CASTLAFGPRDKEANEQFF

SEQ ID NO: 546761 - protein, 15 aa, Homo sapiens
  CDR3 for alpha chain variable domain of TCR clone 273381 (TRAV12-3, TRAJ23)
CAMIMIYNQGGRLIF

SEQ ID NO: 546762 - protein, 14 aa, Homo sapiens
  CDR3 for beta chain variable domain of TCR clone 273381 (TRBV27, TRBJ1-5)
CASSLDPRNQPQHF

SEQ ID NO: 546763 - protein, 13 aa, Homo sapiens
  CDR3 for alpha chain variable domain of TCR clone 273382 (TRAV20, TRAJ37)
CAGCSSNKVKLIF

SEQ ID NO: 546764 - protein, 11 aa, Homo sapiens
  CDR3 for beta chain variable domain of TCR clone 273382 (TRBV12-4, TRBJ2-3)
CASTATDTQYF

SEQ ID NO: 546765 - protein, 17 aa, Homo sapiens
  CDR3 for alpha chain variable domain of TCR clone 273383 (TRAV8-6, TRAJ58)
CAVSSWVGETSGSRLTF

SEQ ID NO: 546766 - protein, 14 aa, Homo sapiens
  CDR3 for beta chain variable domain of TCR clone 273383 (TRBV2, TRBJ2-7)
CASRPPGGRYEQYF

SEQ ID NO: 546767 - protein, 14 aa, Homo sapiens
  CDR3 for alpha chain variable domain of TCR clone 273384 (TRAV17, TRAJ35)
CATDRPGFGNLLHC

SEQ ID NO: 546768 - protein, 15 aa, Homo sapiens
  CDR3 for beta chain variable domain of TCR clone 273384 (TRBV28, TRBJ2-5)
CASSSGRVIQETQYF

SEQ ID NO: 546769 - protein, 16 aa, Homo sapiens
  CDR3 for alpha chain variable domain of TCR clone 273385 (TRAV3, TRAJ10)
CAVRDMRAGGGNKLTF

SEQ ID NO: 546770 - protein, 13 aa, Homo sapiens
  CDR3 for beta chain variable domain of TCR clone 273385 (TRBV12-4, TRBJ1-1)
CASSLAGRAQAFF

SEQ ID NO: 546771 - protein, 13 aa, Homo sapiens
  CDR3 for alpha chain variable domain of TCR clone 273386 (TRAV13-1, TRAJ21)
CAASIYNFNKFYF

SEQ ID NO: 546772 - protein, 13 aa, Homo sapiens
  CDR3 for beta chain variable domain of TCR clone 273386 (TRBV27, TRBJ1-4)
CASSLMGDEKLFI

SEQ ID NO: 546773 - protein, 14 aa, Homo sapiens
  CDR3 for alpha chain variable domain of TCR clone 273387 (TRAV12-1, TRAJ42)
CVVIYGGSQGNLVF

SEQ ID NO: 546774 - protein, 19 aa, Homo sapiens
  CDR3 for beta chain variable domain of TCR clone 273387 (TRBV11-3, TRBJ2-1)
CASSLDQLGGLAGGNEQFF

SEQ ID NO: 546775 - protein, 14 aa, Homo sapiens
  CDR3 for alpha chain variable domain of TCR clone 273388 (TRAV3, TRAJ9)
CAVRLNTGGFKTIF

SEQ ID NO: 546776 - protein, 18 aa, Homo sapiens
  CDR3 for beta chain variable domain of TCR clone 273388 (TRBV20-1, TRBJ2-3)
CSASGLAGGPGTTDTQYF

SEQ ID NO: 546777 - protein, 13 aa, Homo sapiens
  CDR3 for alpha chain variable domain of TCR clone 273389 (TRAV2, TRAJ40)
CAVVTSGTYKYIF

SEQ ID NO: 546778 - protein, 14 aa, Homo sapiens
  CDR3 for beta chain variable domain of TCR clone 273389 (TRBV19, TRBJ2-3)
CASSAPSGTDTQYF

SEQ ID NO: 546779 - protein, 16 aa, Homo sapiens
  CDR3 for alpha chain variable domain of TCR clone 273390 (TRAV14/DV4, TRAJ15)
CAMREGPAQAGTALIC

SEQ ID NO: 546780 - protein, 12 aa, Homo sapiens
  CDR3 for beta chain variable domain of TCR clone 273390 (TRBV28, TRBJ2-6)
CAIQAGANVLTF

SEQ ID NO: 546781 - protein, 14 aa, Homo sapiens
  CDR3 for alpha chain variable domain of TCR clone 273391 (TRAV12-2, TRAJ36)
CAVNPPTGANTLFF

SEQ ID NO: 546782 - protein, 13 aa, Homo sapiens
  CDR3 for beta chain variable domain of TCR clone 273391 (TRBV20-1, TRBJ1-6)
CSAPTGLGSPLHF

SEQ ID NO: 546783 - protein, 14 aa, Homo sapiens
  CDR3 for alpha chain variable domain of TCR clone 273392 (TRAV12-2, TRAJ13)
GAVKKTGGYQKVTF

SEQ ID NO: 546784 - protein, 15 aa, Homo sapiens
  CDR3 for beta chain variable domain of TCR clone 273392 (TRBV20-1, TRBJ2-7)
CSARDRVSGMDEQYF

SEQ ID NO: 546785 - protein, 11 aa, Homo sapiens
  CDR3 for alpha chain variable domain of TCR clone 273393 (TRAV21, TRAJ34)
CAHYNTDKLIF

SEQ ID NO: 546786 - protein, 13 aa, Homo sapiens
  CDR3 for beta chain variable domain of TCR clone 273393 (TRBV7-6, TRBJ1-2)
CARSVVADYGYTF

SEQ ID NO: 546787 - protein, 14 aa, Homo sapiens
  CDR3 for alpha chain variable domain of TCR clone 273394 (TRAV12-3, TRAJ29)
CAMSPYSGNTPLVF

SEQ ID NO: 546788 - protein, 12 aa, Homo sapiens
  CDR3 for beta chain variable domain of TCR clone 273394 (TRBV7-8, TRBJ2-7)
CASSLGDREQYF

SEQ ID NO: 546789 - protein, 14 aa, Homo sapiens
  CDR3 for alpha chain variable domain of TCR clone 273395 (TRAV12-3, TRAJ10)
SHLPLTGGGNKLTF

SEQ ID NO: 546790 - protein, 13 aa, Homo sapiens
  CDR3 for beta chain variable domain of TCR clone 273395 (TRBV5-1, TRBJ2-1)
CASSSEGFEEQFF

SEQ ID NO: 546791 - protein, 13 aa, Homo sapiens
  CDR3 for alpha chain variable domain of TCR clone 273396 (TRAV39, TRAJ33)
CAANPDSNYQIIW

SEQ ID NO: 546792 - protein, 13 aa, Homo sapiens
  CDR3 for beta chain variable domain of TCR clone 273396 (TRBV18, TRBJ1-1)
CASSGGRNTEAFF

SEQ ID NO: 546793 - protein, 16 aa, Homo sapiens
  CDR3 for alpha chain variable domain of TCR clone 273397 (TRAV1-2, TRAJ10)
CAVRGVLTGGGNKLTF

SEQ ID NO: 546794 - protein, 14 aa, Homo sapiens
  CDR3 for beta chain variable domain of TCR clone 273397 (TRBV10-3, TRBJ2-7)
CAISAPRGAYEQYF

SEQ ID NO: 546795 - protein, 16 aa, Homo sapiens
  CDR3 for alpha chain variable domain of TCR clone 273398 (TRAV3, TRAJ37)
CAVRGKGSGNTGKLIF

SEQ ID NO: 546796 - protein, 15 aa, Homo sapiens
  CDR3 for beta chain variable domain of TCR clone 273398 (TRBV9, TRBJ1-4)
CASSVGGSTKEKLFF

SEQ ID NO: 546797 - protein, 15 aa, Homo sapiens
  CDR3 for alpha chain variable domain of TCR clone 273399 (TRAV17, TRAJ57)
CATGPSPGGSEKLVF

SEQ ID NO: 546798 - protein, 13 aa, Homo sapiens
  CDR3 for beta chain variable domain of TCR clone 273399 (TRBV11-2, TRBJ2-5)
CASSSTGEETQYF

SEQ ID NO: 546799 - protein, 17 aa, Homo sapiens
  CDR3 for alpha chain variable domain of TCR clone 273400 (TRAV3, TRAJ38)
CAVRDCLNAGNNRKLIW

SEQ ID NO: 546800 - protein, 13 aa, Homo sapiens
  CDR3 for beta chain variable domain of TCR clone 273400 (TRBV23-1, TRBJ1-4)
CARRGKFNEKLFF

SEQ ID NO: 546801 - protein, 14 aa, Homo sapiens
  CDR3 for alpha chain variable domain of TCR clone 273401 (TRAV12-2, TRAJ5)
CAVNRSTGRRALTF

SEQ ID NO: 546802 - protein, 13 aa, Homo sapiens
  CDR3 for beta chain variable domain of TCR clone 273401 (TRBV7-6, TRBJ1-2)
CASSLVADYGYTF

SEQ ID NO: 546803 - protein, 15 aa, Homo sapiens
  CDR3 for alpha chain variable domain of TCR clone 273402 (TRAV3, TRAJ5)
CAVRDRKTGRRALTC

SEQ ID NO: 546804 - protein, 15 aa, Homo sapiens
  CDR3 for beta chain variable domain of TCR clone 273402 (TRBV7-9, TRBJ2-2)
CASGPLDTFPGELFF

SEQ ID NO: 546805 - protein, 14 aa, Homo sapiens
  CDR3 for alpha chain variable domain of TCR clone 273403 (TRAV8-2, TRAJ38)
CVVSNAGNNRKLIW

SEQ ID NO: 546806 - protein, 14 aa, Homo sapiens
  CDR3 for beta chain variable domain of TCR clone 273403 (TRBV20-1, TRBJ1-1)
CSAQTRIGGTEAFF

SEQ ID NO: 546807 - protein, 15 aa, Homo sapiens
  CDR3 for alpha chain variable domain of TCR clone 273404 (TRAV8-4, TRAJ13)
CAVSDWGGGYQKVTF

SEQ ID NO: 546808 - protein, 14 aa, Homo sapiens
  CDR3 for beta chain variable domain of TCR clone 273404 (TRBV7-9, TRBJ2-7)
CASCLDRPTDEQYF

SEQ ID NO: 546809 - protein, 15 aa, Homo sapiens
  CDR3 for alpha chain variable domain of TCR clone 273405 (TRAV35, TRAJ50)
CAGQLRKTSYDKVIF

SEQ ID NO: 546810 - protein, 12 aa, Homo sapiens
  CDR3 for beta chain variable domain of TCR clone 273405 (TRBV5-1, TRBJ2-5)
CTSSLGLETQYF

SEQ ID NO: 546811 - protein, 18 aa, Homo sapiens
  CDR3 for alpha chain variable domain of TCR clone 273406 (TRAV12-2, )
CAVEDIQNPDPAVYQLRD

SEQ ID NO: 546812 - protein, 12 aa, Homo sapiens
  CDR3 for beta chain variable domain of TCR clone 273406 (TRBV7-8, TRBJ2-7)
CASSLGDREQYF

SEQ ID NO: 546813 - protein, 16 aa, Homo sapiens
  CDR3 for alpha chain variable domain of TCR clone 273407 (TRAV23/DV6, TRAJ52)
WAARPSGGTSYGKLTF

SEQ ID NO: 546814 - protein, 13 aa, Homo sapiens
  CDR3 for beta chain variable domain of TCR clone 273407 (TRBV7-9, TRBJ1-1)
CASSLSGETEAFF

SEQ ID NO: 546815 - protein, 14 aa, Homo sapiens
  CDR3 for alpha chain variable domain of TCR clone 273408 (TRAV1-2, TRAJ8)
CAVREDTGFQKLVF

SEQ ID NO: 546816 - protein, 16 aa, Homo sapiens
  CDR3 for beta chain variable domain of TCR clone 273408 (TRBV5-5, TRBJ2-2)
CASSGRREGATGELFF

SEQ ID NO: 546817 - protein, 15 aa, Homo sapiens
  CDR3 for alpha chain variable domain of TCR clone 273409 (TRAV38-1, TRAJ57)
CAFMDSQGGSEKLVF

SEQ ID NO: 546818 - protein, 15 aa, Homo sapiens
  CDR3 for beta chain variable domain of TCR clone 273409 (TRBV10-3, TRBJ2-1)
CHPGGRRGDYNEQFF

SEQ ID NO: 546819 - protein, 13 aa, Homo sapiens
  CDR3 for alpha chain variable domain of TCR clone 273410 (TRAV20, TRAJ48)
CAVQGVGNEKLTF

SEQ ID NO: 546820 - protein, 10 aa, Homo sapiens
  CDR3 for beta chain variable domain of TCR clone 273410 (TRBV2, TRBJ2-2)
WASSQPGLAG

SEQ ID NO: 546821 - protein, 15 aa, Homo sapiens
  CDR3 for alpha chain variable domain of TCR clone 273411 (TRAV12-2, TRAJ43)
CAFDMRFGAGTRLTV

SEQ ID NO: 546822 - protein, 17 aa, Homo sapiens
  CDR3 for beta chain variable domain of TCR clone 273411 (TRBV11-2, TRBJ2-1)
CASSLYPPGVEYNEQFF

SEQ ID NO: 546823 - protein, 14 aa, Homo sapiens
  CDR3 for alpha chain variable domain of TCR clone 273412 (TRAV12-3, TRAJ54)
CAMRGIQGAQKLVF

SEQ ID NO: 546824 - protein, 13 aa, Homo sapiens
  CDR3 for beta chain variable domain of TCR clone 273412 (TRBV19, TRBJ1-1)
CASSHSNGGEAFF

SEQ ID NO: 546825 - protein, 14 aa, Homo sapiens
  CDR3 for alpha chain variable domain of TCR clone 273413 (TRAV13-1, TRAJ20)
CAARPGSNDYKLSF

SEQ ID NO: 546826 - protein, 14 aa, Homo sapiens
  CDR3 for beta chain variable domain of TCR clone 273413 (TRBV11-3, TRBJ1-6)
CASSFSGGDSPLHF

SEQ ID NO: 546827 - protein, 15 aa, Homo sapiens
  CDR3 for alpha chain variable domain of TCR clone 273414 (TRAV38-1, TRAJ37)
CAFILGSGSTGKLIF

SEQ ID NO: 546828 - protein, 12 aa, Homo sapiens
  CDR3 for beta chain variable domain of TCR clone 273414 (TRBV7-9, TRBJ2-7)
CASSLEGYEQYF

SEQ ID NO: 546829 - protein, 13 aa, Homo sapiens
  CDR3 for alpha chain variable domain of TCR clone 273415 (TRAV22, TRAJ48)
CAVERFGNENLTF

SEQ ID NO: 546830 - protein, 13 aa, Homo sapiens
  CDR3 for beta chain variable domain of TCR clone 273415 (TRBV20-1, TRBJ2-5)
CSARGDYQETQYF

SEQ ID NO: 546831 - protein, 14 aa, Homo sapiens
  CDR3 for alpha chain variable domain of TCR clone 273416 (TRAV13-1, TRAJ44)
CAAKATGTASKLTF

SEQ ID NO: 546832 - protein, 15 aa, Homo sapiens
  CDR3 for beta chain variable domain of TCR clone 273416 (TRBV7-9, TRBJ2-7)
CASSLPMGQANEQYF

SEQ ID NO: 546833 - protein, 22 aa, Homo sapiens
  CDR3 for alpha chain variable domain of TCR clone 273417 (TRAV3, TRAJ38)
CAVRDCLNAGNNHIQNPDPAVY

SEQ ID NO: 546834 - protein, 17 aa, Homo sapiens
  CDR3 for beta chain variable domain of TCR clone 273417 (TRBV11-2, TRBJ2-1)
CASSLYPPGVEYNEQFF

SEQ ID NO: 546835 - protein, 13 aa, Homo sapiens
  CDR3 for alpha chain variable domain of TCR clone 273418 (TRAV21, TRAJ57)
CAVTQGGSEKLVF

SEQ ID NO: 546836 - protein, 19 aa, Homo sapiens
  CDR3 for beta chain variable domain of TCR clone 273418 (TRBV29-1, TRBJ2-7)
SAALKMLRTVRPNSSTSGR

SEQ ID NO: 546837 - protein, 17 aa, Homo sapiens
  CDR3 for alpha chain variable domain of TCR clone 273419 (TRAV13-1, TRAJ31)
CAPRDRLMFGDGTQLVV

SEQ ID NO: 546838 - protein, 13 aa, Homo sapiens
  CDR3 for beta chain variable domain of TCR clone 273419 (TRBV27, TRBJ2-7)
CASSLTTGYEQYF

SEQ ID NO: 546839 - protein, 14 aa, Homo sapiens
  CDR3 for alpha chain variable domain of TCR clone 273420 (TRAV1-1, TRAJ27)
CAVIYNTNAGKSTF

SEQ ID NO: 546840 - protein, 19 aa, Homo sapiens
  CDR3 for beta chain variable domain of TCR clone 273420 (TRBV7-2, TRBJ2-3)
CASSFLSRNWGGGTDTQYF

SEQ ID NO: 546841 - protein, 17 aa, Homo sapiens
  CDR3 for alpha chain variable domain of TCR clone 273421 (TRAV13-1, TRAJ52)
CAAGRNAGGTSYGKLTF

SEQ ID NO: 546842 - protein, 12 aa, Homo sapiens
  CDR3 for beta chain variable domain of TCR clone 273421 (TRBV7-2, TRBJ1-6)
CASSLSSSPLHF

SEQ ID NO: 546843 - protein, 14 aa, Homo sapiens
  CDR3 for alpha chain variable domain of TCR clone 273422 (TRAV1-2, TRAJ16)
CAVNRFSDGHKLPF

SEQ ID NO: 546844 - protein, 15 aa, Homo sapiens
  CDR3 for beta chain variable domain of TCR clone 273422 (TRBV7-9, TRBJ1-6)
CASSSPGRGNSPLHF

SEQ ID NO: 546845 - protein, 16 aa, Homo sapiens
  CDR3 for alpha chain variable domain of TCR clone 273423 (TRAV39, TRAJ32)
CAVDMEYGGATNKLIF

SEQ ID NO: 546846 - protein, 14 aa, Homo sapiens
  CDR3 for beta chain variable domain of TCR clone 273423 (TRBV9, TRBJ2-4)
CASSPSGTSGIQYF

SEQ ID NO: 546847 - protein, 15 aa, Homo sapiens
  CDR3 for alpha chain variable domain of TCR clone 273424 (TRAV17, TRAJ52)
CATEAGGTSYGKLTF

SEQ ID NO: 546848 - protein, 14 aa, Homo sapiens
  CDR3 for beta chain variable domain of TCR clone 273424 (TRBV28, TRBJ1-5)
CASSLGVLVKPQHF

SEQ ID NO: 546849 - protein, 15 aa, Homo sapiens
  CDR3 for alpha chain variable domain of TCR clone 273425 (TRAV13-1, TRAJ43)
CAATPELGGNNDMRF

SEQ ID NO: 546850 - protein, 15 aa, Homo sapiens
  CDR3 for beta chain variable domain of TCR clone 273425 (TRBV10-2, TRBJ2-6)
CASSEQGTGANVLTY

SEQ ID NO: 546851 - protein, 15 aa, Homo sapiens
  CDR3 for alpha chain variable domain of TCR clone 273426 (TRAV8-3, TRAJ23)
CAVGDRYNQGGKLIF

SEQ ID NO: 546852 - protein, 14 aa, Homo sapiens
  CDR3 for beta chain variable domain of TCR clone 273426 (TRBV12-5, TRBJ2-5)
CASGSRTHQETQYF

SEQ ID NO: 546853 - protein, 14 aa, Homo sapiens
  CDR3 for alpha chain variable domain of TCR clone 273427 (TRAV20, TRAJ26)
CAVQAAIYGQNFVF

SEQ ID NO: 546854 - protein, 14 aa, Homo sapiens
  CDR3 for beta chain variable domain of TCR clone 273427 (TRBV27, TRBJ2-2)
CSSSLGDTTGELFF

SEQ ID NO: 546855 - protein, 14 aa, Homo sapiens
  CDR3 for alpha chain variable domain of TCR clone 273428 (TRAV14/DV4, TRAJ7)
CAIREAYGNNRLAF

SEQ ID NO: 546856 - protein, 15 aa, Homo sapiens
  CDR3 for beta chain variable domain of TCR clone 273428 (TRBV19, TRBJ2-1)
CASSINREPSHEQFF

SEQ ID NO: 546857 - protein, 13 aa, Homo sapiens
  CDR3 for alpha chain variable domain of TCR clone 273429 (TRAV12-3, TRAJ23)
CRPLYNQGGKLIF

SEQ ID NO: 546858 - protein, 12 aa, Homo sapiens
  CDR3 for beta chain variable domain of TCR clone 273429 (TRBV11-2, TRBJ2-1)
CASSPGNNEQFF

SEQ ID NO: 546859 - protein, 14 aa, Homo sapiens
  CDR3 for alpha chain variable domain of TCR clone 273430 (TRAV12-2, TRAJ40)
CAVQIPSGTYKYIF

SEQ ID NO: 546860 - protein, 13 aa, Homo sapiens
  CDR3 for beta chain variable domain of TCR clone 273430 (TRBV7-9, TRBJ1-2)
CASSVKQNYGYAF

SEQ ID NO: 546861 - protein, 15 aa, Homo sapiens
  CDR3 for alpha chain variable domain of TCR clone 273431 (TRAV13-2, TRAJ10)
CAENKIGGGGNKLTF

SEQ ID NO: 546862 - protein, 13 aa, Homo sapiens
  CDR3 for beta chain variable domain of TCR clone 273431 (TRBV7-9, TRBJ2-7)
CASSFAGAYEQYF

SEQ ID NO: 546863 - protein, 13 aa, Homo sapiens
  CDR3 for alpha chain variable domain of TCR clone 273432 (TRAV26-1, TRAJ29)
CIVRRSGNTPLVF

SEQ ID NO: 546864 - protein, 14 aa, Homo sapiens
  CDR3 for beta chain variable domain of TCR clone 273432 (TRBV6-1, TRBJ1-3)
CASVQGGGGNTIYF

SEQ ID NO: 546865 - protein, 14 aa, Homo sapiens
  CDR3 for alpha chain variable domain of TCR clone 273433 (TRAV10, TRAJ35)
CVVRSIGFGNVLHC

SEQ ID NO: 546866 - protein, 12 aa, Homo sapiens
  CDR3 for beta chain variable domain of TCR clone 273433 (TRBV11-2, TRBJ2-2)
CASSLGGGELFF

SEQ ID NO: 546867 - protein, 12 aa, Homo sapiens
  CDR3 for alpha chain variable domain of TCR clone 273434 (TRAV21, TRAJ13)
PGPSGGYQKVTF

SEQ ID NO: 546868 - protein, 14 aa, Homo sapiens
  CDR3 for beta chain variable domain of TCR clone 273434 (TRBV20-1, TRBJ2-7)
CSAKDRKGAYERYF

SEQ ID NO: 546869 - protein, 14 aa, Homo sapiens
  CDR3 for alpha chain variable domain of TCR clone 273435 (TRAV16, TRAJ26)
CALTQPLYGQNFVF

SEQ ID NO: 546870 - protein, 15 aa, Homo sapiens
  CDR3 for beta chain variable domain of TCR clone 273435 (TRBV3-1, TRBJ2-7)
CASSQDIYRGYEQYF

SEQ ID NO: 546871 - protein, 23 aa, Homo sapiens
  CDR3 for alpha chain variable domain of TCR clone 273436 (TRAV12-2, TRAJ43)
SLLIRDSQPSDSATYLCAFDMRF

SEQ ID NO: 546872 - protein, 16 aa, Homo sapiens
  CDR3 for beta chain variable domain of TCR clone 273436 (TRBV20-1, TRBJ1-4)
CSAPGQGLLTNEKLFF

SEQ ID NO: 546873 - protein, 15 aa, Homo sapiens
  CDR3 for alpha chain variable domain of TCR clone 273437 (TRAV23/DV6, TRAJ37)
CAAGDGSSNTGNLIF

SEQ ID NO: 546874 - protein, 17 aa, Homo sapiens
  CDR3 for beta chain variable domain of TCR clone 273437 (TRBV20-1, TRBJ2-7)
CSATRAGGVAGVEEQYF

SEQ ID NO: 546875 - protein, 14 aa, Homo sapiens
  CDR3 for alpha chain variable domain of TCR clone 273438 (TRAV8-3, TRAJ9)
CAVGYNTGGFKTNF

SEQ ID NO: 546876 - protein, 14 aa, Homo sapiens
  CDR3 for beta chain variable domain of TCR clone 273438 (TRBV7-3, TRBJ2-2)
CASSSGGYTGELFF

SEQ ID NO: 546877 - protein, 17 aa, Homo sapiens
  CDR3 for alpha chain variable domain of TCR clone 273439 (TRAV3, TRAJ28)
CAVREAYSGAGSYQLTF

SEQ ID NO: 546878 - protein, 14 aa, Homo sapiens
  CDR3 for beta chain variable domain of TCR clone 273439 (TRBV19, TRBJ1-1)
CASLRTGLNTEAFF

SEQ ID NO: 546879 - protein, 13 aa, Homo sapiens
  CDR3 for alpha chain variable domain of TCR clone 273440 (TRAV8-6, TRAJ9)
CAVKNTGGFKTIF

SEQ ID NO: 546880 - protein, 14 aa, Homo sapiens
  CDR3 for beta chain variable domain of TCR clone 273440 (TRBV7-2, TRBJ1-1)
CASSFLTGTTEAFF

SEQ ID NO: 546881 - protein, 14 aa, Homo sapiens
  CDR3 for alpha chain variable domain of TCR clone 273441 (TRAV13-1, TRAJ44)
CAAKATGTASKLTF

SEQ ID NO: 546882 - protein, 15 aa, Homo sapiens
  CDR3 for beta chain variable domain of TCR clone 273441 (TRBV19, TRBJ2-1)
CGSIKGRGPYNEQFF

SEQ ID NO: 546883 - protein, 16 aa, Homo sapiens
  CDR3 for alpha chain variable domain of TCR clone 273442 (TRAV30, TRAJ24)
YGTEIVDADSWGKFQF

SEQ ID NO: 546884 - protein, 14 aa, Homo sapiens
  CDR3 for beta chain variable domain of TCR clone 273442 (TRBV12-5, TRBJ2-5)
CASGSRTHRETQYF

SEQ ID NO: 546885 - protein, 12 aa, Homo sapiens
  CDR3 for alpha chain variable domain of TCR clone 273443 (TRAV27, TRAJ35)
CAGADCGNVLHC

SEQ ID NO: 546886 - protein, 16 aa, Homo sapiens
  CDR3 for beta chain variable domain of TCR clone 273443 (TRBV6-1, TRBJ2-1)
CASISRQGSSYNEQFF

SEQ ID NO: 546887 - protein, 10 aa, Homo sapiens
  CDR3 for alpha chain variable domain of TCR clone 273444 (TRAV38-2/DV8, TRAJ40)
CASGTYKYIF

SEQ ID NO: 546888 - protein, 14 aa, Homo sapiens
  CDR3 for beta chain variable domain of TCR clone 273444 (TRBV7-9, TRBJ2-1)
CASSPRYSLYEQFF

SEQ ID NO: 546889 - protein, 14 aa, Homo sapiens
  CDR3 for alpha chain variable domain of TCR clone 273445 (TRAV3, TRAJ21)
CAVESQATFNKFYF

SEQ ID NO: 546890 - protein, 14 aa, Homo sapiens
  CDR3 for beta chain variable domain of TCR clone 273445 (TRBV11-2, TRBJ2-1)
CASSLGGSFNEQFF

SEQ ID NO: 546891 - protein, 14 aa, Homo sapiens
  CDR3 for alpha chain variable domain of TCR clone 273446 (TRAV26-1, TRAJ45)
RIEVTGGGADGPTF

SEQ ID NO: 546892 - protein, 13 aa, Homo sapiens
  CDR3 for beta chain variable domain of TCR clone 273446 (TRBV7-6, TRBJ1-2)
CASSLVADYGYTF

SEQ ID NO: 546893 - protein, 14 aa, Homo sapiens
  CDR3 for alpha chain variable domain of TCR clone 273447 (TRAV4, TRAJ17)
CLVGLKAAGNKLTF

SEQ ID NO: 546894 - protein, 12 aa, Homo sapiens
  CDR3 for beta chain variable domain of TCR clone 273447 (TRBV7-9, TRBJ2-7)
CASSFDSYEQYF

SEQ ID NO: 546895 - protein, 14 aa, Homo sapiens
  CDR3 for alpha chain variable domain of TCR clone 273448 (TRAV3, TRAJ36)
CAVGDGTGANNLFF

SEQ ID NO: 546896 - protein, 12 aa, Homo sapiens
  CDR3 for beta chain variable domain of TCR clone 273448 (TRBV19, TRBJ2-6)
CASTPLGAGQPL

SEQ ID NO: 546897 - protein, 14 aa, Homo sapiens
  CDR3 for alpha chain variable domain of TCR clone 273449 (TRAV1-2, TRAJ16)
CAVNRFSDGQKLLF

SEQ ID NO: 546898 - protein, 15 aa, Homo sapiens
  CDR3 for beta chain variable domain of TCR clone 273449 (TRBV7-2, TRBJ2-1)
CASSSGLAEGNEQFF

SEQ ID NO: 546899 - protein, 13 aa, Homo sapiens
  CDR3 for alpha chain variable domain of TCR clone 273450 (TRAV8-6, TRAJ49)
CAVIRTPVTSSIL

SEQ ID NO: 546900 - protein, 14 aa, Homo sapiens
  CDR3 for beta chain variable domain of TCR clone 273450 (TRBV19, TRBJ2-1)
CASPTFVLSGEQFF

SEQ ID NO: 546901 - protein, 14 aa, Homo sapiens
  CDR3 for alpha chain variable domain of TCR clone 273451 (TRAV16, TRAJ33)
CALSAMDSNYQLIW

SEQ ID NO: 546902 - protein, 15 aa, Homo sapiens
  CDR3 for beta chain variable domain of TCR clone 273451 (TRBV5-1, TRBJ2-1)
CASTGSGRTYNEQFF

SEQ ID NO: 546903 - protein, 16 aa, Homo sapiens
  CDR3 for alpha chain variable domain of TCR clone 273452 (TRAV27, TRAJ48)
TAAQPGDTGLSLPLTF

SEQ ID NO: 546904 - protein, 13 aa, Homo sapiens
  CDR3 for beta chain variable domain of TCR clone 273452 (TRBV7-2, TRBJ2-5)
CASSQTSVETQYF

SEQ ID NO: 546905 - protein, 14 aa, Homo sapiens
  CDR3 for alpha chain variable domain of TCR clone 273453 (TRAV1-2, TRAJ8)
CAVREDTGFQKLVF

SEQ ID NO: 546906 - protein, 12 aa, Homo sapiens
  CDR3 for beta chain variable domain of TCR clone 273453 (TRBV29-1, TRBJ2-3)
CSVTGGAYTQYF

SEQ ID NO: 546907 - protein, 15 aa, Homo sapiens
  CDR3 for alpha chain variable domain of TCR clone 273454 (TRAV26-1, TRAJ48)
CIARWSWFGNVKLTF

SEQ ID NO: 546908 - protein, 12 aa, Homo sapiens
  CDR3 for beta chain variable domain of TCR clone 273454 (TRBV19, TRBJ2-5)
CASSISEETQYL

SEQ ID NO: 546909 - protein, 12 aa, Homo sapiens
  CDR3 for alpha chain variable domain of TCR clone 273455 (TRAV8-3, TRAJ20)
CAVDFNDYKPSF

SEQ ID NO: 546910 - protein, 17 aa, Homo sapiens
  CDR3 for beta chain variable domain of TCR clone 273455 (TRBV4-1, TRBJ2-3)
CASSQDPAGGPLDTQYF

SEQ ID NO: 546911 - protein, 16 aa, Homo sapiens
  CDR3 for alpha chain variable domain of TCR clone 273456 (TRAV13-2, TRAJ32)
CAENMNSGGATNKLIF

SEQ ID NO: 546912 - protein, 14 aa, Homo sapiens
  CDR3 for beta chain variable domain of TCR clone 273456 (TRBV15, TRBJ2-5)
CATSSTGYQETQYF

SEQ ID NO: 546913 - protein, 13 aa, Homo sapiens
  CDR3 for alpha chain variable domain of TCR clone 273457 (TRAV8-1, TRAJ28)
CAVSGAGSYQRTF

SEQ ID NO: 546914 - protein, 15 aa, Homo sapiens
  CDR3 for beta chain variable domain of TCR clone 273457 (TRBV2, TRBJ2-7)
CASSEGLARSYEQYF

SEQ ID NO: 546915 - protein, 16 aa, Homo sapiens
  CDR3 for alpha chain variable domain of TCR clone 273458 (TRAV3, TRAJ37)
CAVRGEGSGNTGRLIF

SEQ ID NO: 546916 - protein, 13 aa, Homo sapiens
  CDR3 for beta chain variable domain of TCR clone 273458 (TRBV14, TRBJ2-7)
CASSQDRRYEQYF

SEQ ID NO: 546917 - protein, 14 aa, Homo sapiens
  CDR3 for alpha chain variable domain of TCR clone 273459 (TRAV1-2, TRAJ13)
CADLNSGGYQKVTF

SEQ ID NO: 546918 - protein, 14 aa, Homo sapiens
  CDR3 for beta chain variable domain of TCR clone 273459 (TRBV12-4, TRBJ1-1)
CASSLNDMNTEAFF

SEQ ID NO: 546919 - protein, 16 aa, Homo sapiens
  CDR3 for alpha chain variable domain of TCR clone 273460 (TRAV38-2/DV8, TRAJ47)
CAYRGAIMAYGNKLVF

SEQ ID NO: 546920 - protein, 14 aa, Homo sapiens
  CDR3 for beta chain variable domain of TCR clone 273460 (TRBV19, TRBJ2-7)
CASSIFAGTYEQYF

SEQ ID NO: 546921 - protein, 17 aa, Homo sapiens
  CDR3 for alpha chain variable domain of TCR clone 273461 (TRAV3, TRAJ6)
CAVRGGPRAGGSYIPTL

SEQ ID NO: 546922 - protein, 14 aa, Homo sapiens
  CDR3 for beta chain variable domain of TCR clone 273461 (TRBV7-2, TRBJ2-7)
CASSPKTSFYEQYF

SEQ ID NO: 546923 - protein, 14 aa, Homo sapiens
  CDR3 for alpha chain variable domain of TCR clone 273462 (TRAV38-1, TRAJ40)
CALRPTSGTYKYIY

SEQ ID NO: 546924 - protein, 16 aa, Homo sapiens
  CDR3 for beta chain variable domain of TCR clone 273462 (TRBV12-5, TRBJ2-5)
CASGPRTSGNQETQYF

SEQ ID NO: 546925 - protein, 16 aa, Homo sapiens
  CDR3 for alpha chain variable domain of TCR clone 273463 (TRAV3, TRAJ13)
CAVRDPNSGGYQQVPF

SEQ ID NO: 546926 - protein, 13 aa, Homo sapiens
  CDR3 for beta chain variable domain of TCR clone 273463 (TRBV7-9, TRBJ2-7)
CASSLQGSYEQYF

SEQ ID NO: 546927 - protein, 15 aa, Homo sapiens
  CDR3 for alpha chain variable domain of TCR clone 273464 (TRAV3, TRAJ47)
CAVRDIGEYGNKLVF

SEQ ID NO: 546928 - protein, 14 aa, Homo sapiens
  CDR3 for beta chain variable domain of TCR clone 273464 (TRBV4-1, TRBJ2-2)
CASSQAVNTGELFF

SEQ ID NO: 546929 - protein, 17 aa, Homo sapiens
  CDR3 for alpha chain variable domain of TCR clone 273465 (TRAV13-1, TRAJ28)
CAASPPYSGAGSYQLTF

SEQ ID NO: 546930 - protein, 13 aa, Homo sapiens
  CDR3 for beta chain variable domain of TCR clone 273465 (TRBV7-9, TRBJ1-2)
CASSLKQNYGYTF

SEQ ID NO: 546931 - protein, 15 aa, Homo sapiens
  CDR3 for alpha chain variable domain of TCR clone 273466 (TRAV17, TRAJ35)
FATAFVIGFGNVLHC

SEQ ID NO: 546932 - protein, 15 aa, Homo sapiens
  CDR3 for beta chain variable domain of TCR clone 273466 (TRBV7-9, TRBJ2-7)
CASSLALAEAYEQYF

SEQ ID NO: 546933 - protein, 13 aa, Homo sapiens
  CDR3 for alpha chain variable domain of TCR clone 273467 (TRAV23/DV6, TRAJ34)
CAASIEGTDKLIF

SEQ ID NO: 546934 - protein, 16 aa, Homo sapiens
  CDR3 for beta chain variable domain of TCR clone 273467 (TRBV19, TRBJ2-2)
CASRSPGTGATGELFF

SEQ ID NO: 546935 - protein, 11 aa, Homo sapiens
  CDR3 for alpha chain variable domain of TCR clone 273468 (TRAV4, TRAJ21)
CLIYNFNKFYF

SEQ ID NO: 546936 - protein, 15 aa, Homo sapiens
  CDR3 for beta chain variable domain of TCR clone 273468 (TRBV23-1, TRBJ2-1)
TAPAVNRDQGGEQFF

SEQ ID NO: 546937 - protein, 13 aa, Homo sapiens
  CDR3 for alpha chain variable domain of TCR clone 273469 (TRAV1-2, TRAJ9)
CAALNTGGFKTIF

SEQ ID NO: 546938 - protein, 14 aa, Homo sapiens
  CDR3 for beta chain variable domain of TCR clone 273469 (TRBV19, TRBJ1-2)
CASSVPGQWLHLRF

SEQ ID NO: 546939 - protein, 16 aa, Homo sapiens
  CDR3 for alpha chain variable domain of TCR clone 273470 (TRAV3, TRAJ10)
CAVRDMRAGGGNKLTF

SEQ ID NO: 546940 - protein, 12 aa, Homo sapiens
  CDR3 for beta chain variable domain of TCR clone 273470 (TRBV10-3, TRBJ1-1)
CATMDRPPEAFF

SEQ ID NO: 546941 - protein, 13 aa, Homo sapiens
  CDR3 for alpha chain variable domain of TCR clone 273471 (TRAV3, TRAJ20)
CAVRDTPRYTLSF

SEQ ID NO: 546942 - protein, 14 aa, Homo sapiens
  CDR3 for beta chain variable domain of TCR clone 273471 (TRBV11-1, TRBJ2-7)
CASTFAVPSYEQYF

SEQ ID NO: 546943 - protein, 18 aa, Homo sapiens
  CDR3 for alpha chain variable domain of TCR clone 273472 (TRAV13-1, TRAJ52)
CAASKRSAGGTSYGKLTF

SEQ ID NO: 546944 - protein, 13 aa, Homo sapiens
  CDR3 for beta chain variable domain of TCR clone 273472 (TRBV7-7, TRBJ2-3)
CASSLSRADTQYF

SEQ ID NO: 546945 - protein, 14 aa, Homo sapiens
  CDR3 for alpha chain variable domain of TCR clone 273473 (TRAV25, TRAJ35)
CSRRMEGFGNVLHC

SEQ ID NO: 546946 - protein, 13 aa, Homo sapiens
  CDR3 for beta chain variable domain of TCR clone 273473 (TRBV7-2, TRBJ1-4)
CASSVAGLEKLFF

SEQ ID NO: 546947 - protein, 16 aa, Homo sapiens
  CDR3 for alpha chain variable domain of TCR clone 273474 (TRAV30, TRAJ24)
CGTEIVDADSWGKFKF

SEQ ID NO: 546948 - protein, 17 aa, Homo sapiens
  CDR3 for beta chain variable domain of TCR clone 273474 (TRBV11-2, TRBJ2-1)
CASSLYPPGVEYNEQFF

SEQ ID NO: 546949 - protein, 13 aa, Homo sapiens
  CDR3 for alpha chain variable domain of TCR clone 273475 (TRAV3, TRAJ15)
CAWRDQAGTALIF

SEQ ID NO: 546950 - protein, 15 aa, Homo sapiens
  CDR3 for beta chain variable domain of TCR clone 273475 (TRBV11-1, TRBJ2-7)
CASSLNYGASYEQYF

SEQ ID NO: 546951 - protein, 16 aa, Homo sapiens
  CDR3 for alpha chain variable domain of TCR clone 273476 (TRAV29/DV5, TRAJ36)
CAASAGVETGANNLFF

SEQ ID NO: 546952 - protein, 14 aa, Homo sapiens
  CDR3 for beta chain variable domain of TCR clone 273476 (TRBV3-1, TRBJ2-2)
CASSQDWVQGELFF

SEQ ID NO: 546953 - protein, 16 aa, Homo sapiens
  CDR3 for alpha chain variable domain of TCR clone 273477 (TRAV3, TRAJ6)
CAVRDGMGRRKIHTYI

SEQ ID NO: 546954 - protein, 15 aa, Homo sapiens
  CDR3 for beta chain variable domain of TCR clone 273477 (TRBV9, TRBJ2-1)
CASSLAGSSYNEQFF

SEQ ID NO: 546955 - protein, 15 aa, Homo sapiens
  CDR3 for alpha chain variable domain of TCR clone 273478 (TRAV21, TRAJ24)
CAARSSTDSWGKLQF

SEQ ID NO: 546956 - protein, 15 aa, Homo sapiens
  CDR3 for beta chain variable domain of TCR clone 273478 (TRBV27, TRBJ2-5)
CASSLIPSGGETQYF

SEQ ID NO: 546957 - protein, 14 aa, Homo sapiens
  CDR3 for alpha chain variable domain of TCR clone 273479 (TRAV13-1, TRAJ35)
CAASKGGFGNVLHC

SEQ ID NO: 546958 - protein, 18 aa, Homo sapiens
  CDR3 for beta chain variable domain of TCR clone 273479 (TRBV7-2, TRBJ2-1)
CASSFGTSGSRSYNEQFF

SEQ ID NO: 546959 - protein, 12 aa, Homo sapiens
  CDR3 for alpha chain variable domain of TCR clone 273480 (TRAV21, TRAJ31)
CAVSPARGRLMF

SEQ ID NO: 546960 - protein, 14 aa, Homo sapiens
  CDR3 for beta chain variable domain of TCR clone 273480 (TRBV28, TRBJ2-7)
CASSLLRISYEQVF

SEQ ID NO: 546961 - protein, 12 aa, Homo sapiens
  CDR3 for alpha chain variable domain of TCR clone 273481 (TRAV36/DV7, TRAJ54)
CAVVRGAQKLVF

SEQ ID NO: 546962 - protein, 14 aa, Homo sapiens
  CDR3 for beta chain variable domain of TCR clone 273481 (TRBV7-3, TRBJ1-1)
CASSLKEGSTEAFF

SEQ ID NO: 546963 - protein, 13 aa, Homo sapiens
  CDR3 for alpha chain variable domain of TCR clone 273482 (TRAV12-2, TRAJ39)
CAVNNNAGYMLTF

SEQ ID NO: 546964 - protein, 13 aa, Homo sapiens
  CDR3 for beta chain variable domain of TCR clone 273482 (TRBV2, TRBJ1-5)
CATAGPGNQPQHF

SEQ ID NO: 546965 - protein, 13 aa, Homo sapiens
  CDR3 for alpha chain variable domain of TCR clone 273483 (TRAV2, TRAJ20)
CAVEDPSEYKRSF

SEQ ID NO: 546966 - protein, 16 aa, Homo sapiens
  CDR3 for beta chain variable domain of TCR clone 273483 (TRBV25-1, TRBJ2-7)
CASSELTGGGIYEQYF

SEQ ID NO: 546967 - protein, 14 aa, Homo sapiens
  CDR3 for alpha chain variable domain of TCR clone 273484 (TRAV12-2, TRAJ40)
CAVKIPSGTYKYIF

SEQ ID NO: 546968 - protein, 14 aa, Homo sapiens
  CDR3 for beta chain variable domain of TCR clone 273484 (TRBV7-8, TRBJ2-7)
CACSPRDRVYEQYF

SEQ ID NO: 546969 - protein, 14 aa, Homo sapiens
  CDR3 for alpha chain variable domain of TCR clone 273485 (TRAV12-3, TRAJ20)
CAMSARRGDYKLSF

SEQ ID NO: 546970 - protein, 13 aa, Homo sapiens
  CDR3 for beta chain variable domain of TCR clone 273485 (TRBV7-6, TRBJ1-2)
CASSLVADYGYTF

SEQ ID NO: 546971 - protein, 14 aa, Homo sapiens
  CDR3 for alpha chain variable domain of TCR clone 273486 (TRAV12-2, TRAJ13)
CAVKKTGGYQKVTF

SEQ ID NO: 546972 - protein, 15 aa, Homo sapiens
  CDR3 for beta chain variable domain of TCR clone 273486 (TRBV27, TRBJ2-1)
CASSNGGGSSNEQLF

SEQ ID NO: 546973 - protein, 12 aa, Homo sapiens
  CDR3 for alpha chain variable domain of TCR clone 273487 (TRAV21, TRAJ43)
CAVSWNNNDMRF

SEQ ID NO: 546974 - protein, 15 aa, Homo sapiens
  CDR3 for beta chain variable domain of TCR clone 273487 (TRBV20-1, TRBJ2-1)
CSASPPSGGYNEQVF

SEQ ID NO: 546975 - protein, 14 aa, Homo sapiens
  CDR3 for alpha chain variable domain of TCR clone 273488 (TRAV17, TRAJ6)
CATNPAGGSYIPTF

SEQ ID NO: 546976 - protein, 14 aa, Homo sapiens
  CDR3 for beta chain variable domain of TCR clone 273488 (TRBV19, TRBJ2-2)
CASSTLHRSGELFF

SEQ ID NO: 546977 - protein, 14 aa, Homo sapiens
  CDR3 for alpha chain variable domain of TCR clone 273489 (TRAV12-2, TRAJ32)
CAHPESCATNKLIF

SEQ ID NO: 546978 - protein, 14 aa, Homo sapiens
  CDR3 for beta chain variable domain of TCR clone 273489 (TRBV4-2, TRBJ2-3)
CASRETRAPGMQYF

SEQ ID NO: 546979 - protein, 14 aa, Homo sapiens
  CDR3 for alpha chain variable domain of TCR clone 273490 (TRAV3, TRAJ9)
CAVRLNTGGSKTIF

SEQ ID NO: 546980 - protein, 12 aa, Homo sapiens
  CDR3 for beta chain variable domain of TCR clone 273490 (TRBV6-1, TRBJ2-1)
CATQKGGGHLFF

SEQ ID NO: 546981 - protein, 18 aa, Homo sapiens
  CDR3 for alpha chain variable domain of TCR clone 273491 (TRAV21, TRAJ52)
CAVRPSPAGGTSYGKLTF

SEQ ID NO: 546982 - protein, 14 aa, Homo sapiens
  CDR3 for beta chain variable domain of TCR clone 273491 (TRBV9, TRBJ2-4)
CASSPSGTSGFQYF

SEQ ID NO: 546983 - protein, 14 aa, Homo sapiens
  CDR3 for alpha chain variable domain of TCR clone 273492 (TRAV13-1, TRAJ44)
CAAKATGTASKLTF

SEQ ID NO: 546984 - protein, 17 aa, Homo sapiens
  CDR3 for beta chain variable domain of TCR clone 273492 (TRBV7-6, TRBJ2-5)
CASSSPQAGDPSETQYF

SEQ ID NO: 546985 - protein, 15 aa, Homo sapiens
  CDR3 for alpha chain variable domain of TCR clone 273493 (TRAV26-1, TRAJ29)
CIVRVEGSGNTPLAV

SEQ ID NO: 546986 - protein, 15 aa, Homo sapiens
  CDR3 for beta chain variable domain of TCR clone 273493 (TRBV7-9, TRBJ1-5)
CASSQGHQPNQPQHF

SEQ ID NO: 546987 - protein, 15 aa, Homo sapiens
  CDR3 for alpha chain variable domain of TCR clone 273494 (TRAV12-2, TRAJ43)
CAFDMRFGAGTRLTV

SEQ ID NO: 546988 - protein, 17 aa, Homo sapiens
  CDR3 for beta chain variable domain of TCR clone 273494 (TRBV13, TRBJ2-3)
CASSLSRVAGGRNTQNF

SEQ ID NO: 546989 - protein, 15 aa, Homo sapiens
  CDR3 for alpha chain variable domain of TCR clone 273495 (TRAV4, TRAJ9)
CLVGGGNTGGFKTIF

SEQ ID NO: 546990 - protein, 15 aa, Homo sapiens
  CDR3 for beta chain variable domain of TCR clone 273495 (TRBV7-2, TRBJ1-2)
CASSLAPDRGLGYTF

SEQ ID NO: 546991 - protein, 15 aa, Homo sapiens
  CDR3 for alpha chain variable domain of TCR clone 273496 (TRAV21, TRAJ24)
CAARSSTDSWGKLQF

SEQ ID NO: 546992 - protein, 14 aa, Homo sapiens
  CDR3 for beta chain variable domain of TCR clone 273496 (TRBV7-3, TRBJ2-3)
CASSSTGVADTQYF

SEQ ID NO: 546993 - protein, 16 aa, Homo sapiens
  CDR3 for alpha chain variable domain of TCR clone 273497 (TRAV30, TRAJ24)
CGTEIVDADSCGKFQF

SEQ ID NO: 546994 - protein, 15 aa, Homo sapiens
  CDR3 for beta chain variable domain of TCR clone 273497 (TRBV7-9, TRBJ1-4)
CASSARTGGNEELFF

SEQ ID NO: 546995 - protein, 14 aa, Homo sapiens
  CDR3 for alpha chain variable domain of TCR clone 273498 (TRAV2, TRAJ37)
CAVDFTSYTGKLIF

SEQ ID NO: 546996 - protein, 15 aa, Homo sapiens
  CDR3 for beta chain variable domain of TCR clone 273498 (TRBV19, TRBJ1-1)
CASTSGQIQNTEAFF

SEQ ID NO: 546997 - protein, 14 aa, Homo sapiens
  CDR3 for alpha chain variable domain of TCR clone 273499 (TRAV8-3, TRAJ35)
CAVVSQGFGNVLHC

SEQ ID NO: 546998 - protein, 15 aa, Homo sapiens
  CDR3 for beta chain variable domain of TCR clone 273499 (TRBV6-1, TRBJ2-2)
CASSAGQGYTGELFF

SEQ ID NO: 546999 - protein, 13 aa, Homo sapiens
  CDR3 for alpha chain variable domain of TCR clone 273500 (TRAV21, TRAJ45)
CAVMGGGADGLTF

SEQ ID NO: 547000 - protein, 14 aa, Homo sapiens
  CDR3 for beta chain variable domain of TCR clone 273500 (TRBV6-1, TRBJ1-3)
CASVQGGGGNTIYF

SEQ ID NO: 547001 - protein, 13 aa, Homo sapiens
  CDR3 for alpha chain variable domain of TCR clone 273501 (TRAV8-3, TRAJ43)
CAVGPDNNNDMRF

SEQ ID NO: 547002 - protein, 12 aa, Homo sapiens
  CDR3 for beta chain variable domain of TCR clone 273501 (TRBV7-2, TRBJ1-6)
CASSLSSSPLNF

SEQ ID NO: 547003 - protein, 12 aa, Homo sapiens
  CDR3 for alpha chain variable domain of TCR clone 273502 (TRAV8-3, TRAJ20)
CAVGANDYKLIF

SEQ ID NO: 547004 - protein, 13 aa, Homo sapiens
  CDR3 for beta chain variable domain of TCR clone 273502 (TRBV11-1, TRBJ1-1)
CASSLARGSQAFF

SEQ ID NO: 547005 - protein, 19 aa, Homo sapiens
  CDR3 for alpha chain variable domain of TCR clone 273503 (TRAV26-2, TRAJ52)
CILRTGFNAGGTSYGKLTF

SEQ ID NO: 547006 - protein, 14 aa, Homo sapiens
  CDR3 for beta chain variable domain of TCR clone 273503 (TRBV12-4, TRBJ1-1)
CASSLGTGGTEAFF

SEQ ID NO: 547007 - protein, 14 aa, Homo sapiens
  CDR3 for alpha chain variable domain of TCR clone 273504 (TRAV12-1, TRAJ17)
CVVNYKAAGNKLTF

SEQ ID NO: 547008 - protein, 11 aa, Homo sapiens
  CDR3 for beta chain variable domain of TCR clone 273504 (TRBV20-1, TRBJ2-7)
CSARTSYEQYF

SEQ ID NO: 547009 - protein, 11 aa, Homo sapiens
  CDR3 for alpha chain variable domain of TCR clone 273505 (TRAV17, TRAJ9)
CGFTGGFKTIF

SEQ ID NO: 547010 - protein, 14 aa, Homo sapiens
  CDR3 for beta chain variable domain of TCR clone 273505 (TRBV7-9, TRBJ2-2)
CASSLDQDTGELFF

SEQ ID NO: 547011 - protein, 13 aa, Homo sapiens
  CDR3 for alpha chain variable domain of TCR clone 273506 (TRAV30, TRAJ24)
CGTVTDSWGRLQF

SEQ ID NO: 547012 - protein, 15 aa, Homo sapiens
  CDR3 for beta chain variable domain of TCR clone 273506 (TRBV4-1, TRBJ2-1)
CASSQDPGNYNEQFF

SEQ ID NO: 547013 - protein, 13 aa, Homo sapiens
  CDR3 for alpha chain variable domain of TCR clone 273507 (TRAV1-2, TRAJ9)
CAALNTGSFKTIF

SEQ ID NO: 547014 - protein, 14 aa, Homo sapiens
  CDR3 for beta chain variable domain of TCR clone 273507 (TRBV7-3, TRBJ2-1)
CASSLAGGTNEQFF

SEQ ID NO: 547015 - protein, 14 aa, Homo sapiens
  CDR3 for alpha chain variable domain of TCR clone 273508 (TRAV26-1, TRAJ45)
CIEGTGGGADGLTF

SEQ ID NO: 547016 - protein, 19 aa, Homo sapiens
  CDR3 for beta chain variable domain of TCR clone 273508 (TRBV19, TRBJ2-2)
CASTRPGLAGGRVTGELFF

SEQ ID NO: 547017 - protein, 11 aa, Homo sapiens
  CDR3 for alpha chain variable domain of TCR clone 273509 (TRAV1-2, TRAJ40)
CAVPGTFKYIF

SEQ ID NO: 547018 - protein, 16 aa, Homo sapiens
  CDR3 for beta chain variable domain of TCR clone 273509 (TRBV29-1, TRBJ2-7)
CSVEVVGTSGSYEQYF

SEQ ID NO: 547019 - protein, 21 aa, Homo sapiens
  CDR3 for alpha chain variable domain of TCR clone 273510 (TRAV3, )
CAVRPTPDIQNPDPAVYQLID

SEQ ID NO: 547020 - protein, 15 aa, Homo sapiens
  CDR3 for beta chain variable domain of TCR clone 273510 (TRBV11-3, TRBJ2-5)
CASSDTSGGIETQYF

SEQ ID NO: 547021 - protein, 13 aa, Homo sapiens
  CDR3 for alpha chain variable domain of TCR clone 273511 (TRAV13-1, TRAJ21)
CAASIYNFNKFYF

SEQ ID NO: 547022 - protein, 13 aa, Homo sapiens
  CDR3 for beta chain variable domain of TCR clone 273511 (TRBV7-7, TRBJ2-5)
CASSLRAIETQYF

SEQ ID NO: 547023 - protein, 15 aa, Homo sapiens
  CDR3 for alpha chain variable domain of TCR clone 273512 (TRAV27, TRAJ38)
CAARRTAGNNRKLIW

SEQ ID NO: 547024 - protein, 13 aa, Homo sapiens
  CDR3 for beta chain variable domain of TCR clone 273512 (TRBV12-5, TRBJ2-3)
CASGERQSDTQYF

SEQ ID NO: 547025 - protein, 17 aa, Homo sapiens
  CDR3 for alpha chain variable domain of TCR clone 273513 (TRAV3, TRAJ6)
CAVRYGPRAGGSYIPTF

SEQ ID NO: 547026 - protein, 15 aa, Homo sapiens
  CDR3 for beta chain variable domain of TCR clone 273513 (TRBV7-3, TRBJ2-2)
CASSETGQGTGELFF

SEQ ID NO: 547027 - protein, 15 aa, Homo sapiens
  CDR3 for alpha chain variable domain of TCR clone 273514 (TRAV3, TRAJ17)
CAVSPKEASGNKLTF

SEQ ID NO: 547028 - protein, 12 aa, Homo sapiens
  CDR3 for beta chain variable domain of TCR clone 273514 (TRBV7-9, TRBJ1-6)
CASSLMTSPLHF

SEQ ID NO: 547029 - protein, 17 aa, Homo sapiens
  CDR3 for alpha chain variable domain of TCR clone 273515 (TRAV13-1, TRAJ52)
CAAGRNAGGTSYGKLTF

SEQ ID NO: 547030 - protein, 13 aa, Homo sapiens
  CDR3 for beta chain variable domain of TCR clone 273515 (TRBV7-2, TRBJ2-4)
CASSREHANIQYF

SEQ ID NO: 547031 - protein, 14 aa, Homo sapiens
  CDR3 for alpha chain variable domain of TCR clone 273516 (TRAV29/DV5, TRAJ22)
CAASATGSARQLTF

SEQ ID NO: 547032 - protein, 13 aa, Homo sapiens
  CDR3 for beta chain variable domain of TCR clone 273516 (TRBV19, TRBJ2-1)
CSSPGLAPNEQFF

SEQ ID NO: 547033 - protein, 14 aa, Homo sapiens
  CDR3 for alpha chain variable domain of TCR clone 273517 (TRAV1-1, TRAJ35)
CAVRSIGFGNVLHC

SEQ ID NO: 547034 - protein, 14 aa, Homo sapiens
  CDR3 for beta chain variable domain of TCR clone 273517 (TRBV5-7, TRBJ2-7)
CASSGGRSSYEQYF

SEQ ID NO: 547035 - protein, 14 aa, Homo sapiens
  CDR3 for alpha chain variable domain of TCR clone 273518 (TRAV8-3, TRAJ4)
CAVGASGGYNKLIF

SEQ ID NO: 547036 - protein, 15 aa, Homo sapiens
  CDR3 for beta chain variable domain of TCR clone 273518 (TRBV10-3, TRBJ2-3)
CAISLTSGGTDTQYF

SEQ ID NO: 547037 - protein, 16 aa, Homo sapiens
  CDR3 for alpha chain variable domain of TCR clone 273519 (TRAV26-1, TRAJ33)
CIVPFWGEDSNYQLIW

SEQ ID NO: 547038 - protein, 14 aa, Homo sapiens
  CDR3 for beta chain variable domain of TCR clone 273519 (TRBV7-2, TRBJ2-7)
CASSPKTSFYEQYF

SEQ ID NO: 547039 - protein, 12 aa, Homo sapiens
  CDR3 for alpha chain variable domain of TCR clone 273520 (TRAV29/DV5, TRAJ49)
CAATDTGNQFYF

SEQ ID NO: 547040 - protein, 19 aa, Homo sapiens
  CDR3 for beta chain variable domain of TCR clone 273520 (TRBV25-1, TRBJ2-2)
CSILVYRVDRGRKTGELFF

SEQ ID NO: 547041 - protein, 15 aa, Homo sapiens
  CDR3 for alpha chain variable domain of TCR clone 273521 (TRAV21, TRAJ24)
CAARSSTDSWGKLQF

SEQ ID NO: 547042 - protein, 15 aa, Homo sapiens
  CDR3 for beta chain variable domain of TCR clone 273521 (TRBV5-1, TRBJ2-1)
CASSPPRARYNEQFF

SEQ ID NO: 547043 - protein, 14 aa, Homo sapiens
  CDR3 for alpha chain variable domain of TCR clone 273522 (TRAV12-1, TRAJ36)
CVVNYWGKQRLLWD

SEQ ID NO: 547044 - protein, 13 aa, Homo sapiens
  CDR3 for beta chain variable domain of TCR clone 273522 (TRBV14, TRBJ1-1)
CASSREFGTEAFF

SEQ ID NO: 547045 - protein, 12 aa, Homo sapiens
  CDR3 for alpha chain variable domain of TCR clone 273523 (TRAV38-2/DV8, TRAJ48)
CALLSGNEKLTF

SEQ ID NO: 547046 - protein, 15 aa, Homo sapiens
  CDR3 for beta chain variable domain of TCR clone 273523 (TRBV7-9, TRBJ1-6)
CASSTPGRGNSPLHF

SEQ ID NO: 547047 - protein, 16 aa, Homo sapiens
  CDR3 for alpha chain variable domain of TCR clone 273524 (TRAV8-3, TRAJ44)
CAVGTLMTGTASKITF

SEQ ID NO: 547048 - protein, 15 aa, Homo sapiens
  CDR3 for beta chain variable domain of TCR clone 273524 (TRBV10-2, TRBJ2-6)
CASSEQGTGANVLTF

SEQ ID NO: 547049 - protein, 14 aa, Homo sapiens
  CDR3 for alpha chain variable domain of TCR clone 273525 (TRAV12-2, TRAJ13)
CAVKKTGGYQKVTF

SEQ ID NO: 547050 - protein, 15 aa, Homo sapiens
  CDR3 for beta chain variable domain of TCR clone 273525 (TRBV7-3, TRBJ2-1)
CQQLQTSGRYNEQFF

SEQ ID NO: 547051 - protein, 15 aa, Homo sapiens
  CDR3 for alpha chain variable domain of TCR clone 273526 (TRAV8-4, TRAJ8)
CAVIDLNTGFQKLVF

SEQ ID NO: 547052 - protein, 14 aa, Homo sapiens
  CDR3 for beta chain variable domain of TCR clone 273526 (TRBV7-2, TRBJ2-3)
CASSQTGSSYTQYF

SEQ ID NO: 547053 - protein, 13 aa, Homo sapiens
  CDR3 for alpha chain variable domain of TCR clone 273527 (TRAV13-2, TRAJ41)
CAESINPGYALNF

SEQ ID NO: 547054 - protein, 14 aa, Homo sapiens
  CDR3 for beta chain variable domain of TCR clone 273527 (TRBV2, TRBJ2-1)
CASSEALDGNEQFF

SEQ ID NO: 547055 - protein, 14 aa, Homo sapiens
  CDR3 for alpha chain variable domain of TCR clone 273528 (TRAV1-2, TRAJ16)
CAVNRFSDGQKLLF

SEQ ID NO: 547056 - protein, 15 aa, Homo sapiens
  CDR3 for beta chain variable domain of TCR clone 273528 (TRBV7-9, TRBJ2-7)
CASSLRTSGSYEQYF

SEQ ID NO: 547057 - protein, 13 aa, Homo sapiens
  CDR3 for alpha chain variable domain of TCR clone 273529 (TRAV13-2, TRAJ48)
CAEMDFGNEKLTF

SEQ ID NO: 547058 - protein, 15 aa, Homo sapiens
  CDR3 for beta chain variable domain of TCR clone 273529 (TRBV7-2, TRBJ2-1)
CASGLVGSSYNEQFF

SEQ ID NO: 547059 - protein, 13 aa, Homo sapiens
  CDR3 for alpha chain variable domain of TCR clone 273530 (TRAV8-3, TRAJ44)
CAVVPGTASKRTF

SEQ ID NO: 547060 - protein, 11 aa, Homo sapiens
  CDR3 for beta chain variable domain of TCR clone 273530 (TRBV19, TRBJ1-2)
CASSISSGYTF

SEQ ID NO: 547061 - protein, 14 aa, Homo sapiens
  CDR3 for alpha chain variable domain of TCR clone 273531 (TRAV1-2, TRAJ8)
CAVREDTGFQKLVS

SEQ ID NO: 547062 - protein, 16 aa, Homo sapiens
  CDR3 for beta chain variable domain of TCR clone 273531 (TRBV7-3, TRBJ2-2)
CASSLKRGTLSGELFF

SEQ ID NO: 547063 - protein, 12 aa, Homo sapiens
  CDR3 for alpha chain variable domain of TCR clone 273532 (TRAV29/DV5, TRAJ49)
CAATDTGNLFYF

SEQ ID NO: 547064 - protein, 19 aa, Homo sapiens
  CDR3 for beta chain variable domain of TCR clone 273532 (TRBV25-1, TRBJ2-2)
CAILVYRVDRGRKTGELFF

SEQ ID NO: 547065 - protein, 11 aa, Homo sapiens
  CDR3 for alpha chain variable domain of TCR clone 273533 (TRAV17, TRAJ9)
CGFTGGFKTIF

SEQ ID NO: 547066 - protein, 13 aa, Homo sapiens
  CDR3 for beta chain variable domain of TCR clone 273533 (TRBV20-1, TRBJ2-5)
CSAREGGKETQYF

SEQ ID NO: 547067 - protein, 13 aa, Homo sapiens
  CDR3 for alpha chain variable domain of TCR clone 273534 (TRAV35, TRAJ44)
CAGLSGTASKLTF

SEQ ID NO: 547068 - protein, 14 aa, Homo sapiens
  CDR3 for beta chain variable domain of TCR clone 273534 (TRBV7-9, TRBJ2-1)
CASSPRDSLYEQFF

SEQ ID NO: 547069 - protein, 17 aa, Homo sapiens
  CDR3 for alpha chain variable domain of TCR clone 273535 (TRAV16, TRAJ48)
CALRRDISNFGNEKLTF

SEQ ID NO: 547070 - protein, 13 aa, Homo sapiens
  CDR3 for beta chain variable domain of TCR clone 273535 (TRBV29-1, TRBJ1-1)
CSVGDSRNTEAVF

SEQ ID NO: 547071 - protein, 12 aa, Homo sapiens
  CDR3 for alpha chain variable domain of TCR clone 273536 (TRAV17, TRAJ57)
CATDGGSEKLVF

SEQ ID NO: 547072 - protein, 13 aa, Homo sapiens
  CDR3 for beta chain variable domain of TCR clone 273536 (TRBV7-9, TRBJ2-7)
RASSFAVAYEQYF

SEQ ID NO: 547073 - protein, 15 aa, Homo sapiens
  CDR3 for alpha chain variable domain of TCR clone 273537 (TRAV13-1, TRAJ17)
CAASIERAAGNKLTF

SEQ ID NO: 547074 - protein, 13 aa, Homo sapiens
  CDR3 for beta chain variable domain of TCR clone 273537 (TRBV9, TRBJ2-1)
CASSPSGGNEQFF

SEQ ID NO: 547075 - protein, 15 aa, Homo sapiens
  CDR3 for alpha chain variable domain of TCR clone 273538 (TRAV23/DV6, TRAJ13)
CAAWPGGGGYQKVTF

SEQ ID NO: 547076 - protein, 17 aa, Homo sapiens
  CDR3 for beta chain variable domain of TCR clone 273538 (TRBV19, TRBJ2-7)
CASSSSFYDSYPYEQYF

SEQ ID NO: 547077 - protein, 14 aa, Homo sapiens
  CDR3 for alpha chain variable domain of TCR clone 273539 (TRAV1-2, TRAJ13)
CAVKHSGGYQKVTF

SEQ ID NO: 547078 - protein, 12 aa, Homo sapiens
  CDR3 for beta chain variable domain of TCR clone 273539 (TRBV7-3, TRBJ2-5)
CASSSPGGTQYF

SEQ ID NO: 547079 - protein, 12 aa, Homo sapiens
  CDR3 for alpha chain variable domain of TCR clone 273540 (TRAV17, TRAJ12)
CATLRSTYKLIF

SEQ ID NO: 547080 - protein, 16 aa, Homo sapiens
  CDR3 for beta chain variable domain of TCR clone 273540 (TRBV14, TRBJ2-2)
CASSRSLGDDTGELFF

SEQ ID NO: 547081 - protein, 14 aa, Homo sapiens
  CDR3 for alpha chain variable domain of TCR clone 273541 (TRAV35, TRAJ34)
CAGQSPRNTDKLIF

SEQ ID NO: 547082 - protein, 15 aa, Homo sapiens
  CDR3 for beta chain variable domain of TCR clone 273541 (TRBV6-3, TRBJ2-7)
CASSSPGTVFYEQYF

SEQ ID NO: 547083 - protein, 14 aa, Homo sapiens
  CDR3 for alpha chain variable domain of TCR clone 273542 (TRAV17, TRAJ6)
CATNPAGGSYIPTF

SEQ ID NO: 547084 - protein, 12 aa, Homo sapiens
  CDR3 for beta chain variable domain of TCR clone 273542 (TRBV24-1, TRBJ2-3)
CATSDSTDTQYF

SEQ ID NO: 547085 - protein, 11 aa, Homo sapiens
  CDR3 for alpha chain variable domain of TCR clone 273543 (TRAV13-2, TRAJ54)
RAVQGAQKLVI

SEQ ID NO: 547086 - protein, 15 aa, Homo sapiens
  CDR3 for beta chain variable domain of TCR clone 273543 (TRBV20-1, TRBJ2-7)
CSAESGTSGAYEQYF

SEQ ID NO: 547087 - protein, 13 aa, Homo sapiens
  CDR3 for alpha chain variable domain of TCR clone 273544 (TRAV23/DV6, TRAJ54)
CAASRQGAQKLVF

SEQ ID NO: 547088 - protein, 15 aa, Homo sapiens
  CDR3 for beta chain variable domain of TCR clone 273544 (TRBV28, TRBJ2-5)
CASSPGQGSIETQYF

SEQ ID NO: 547089 - protein, 15 aa, Homo sapiens
  CDR3 for alpha chain variable domain of TCR clone 273545 (TRAV12-1, TRAJ10)
CVVNKFTGGGNKLTF

SEQ ID NO: 547090 - protein, 17 aa, Homo sapiens
  CDR3 for beta chain variable domain of TCR clone 273545 (TRBV5-1, TRBJ1-6)
CASSPSLQGSDNSPLHF

SEQ ID NO: 547091 - protein, 14 aa, Homo sapiens
  CDR3 for alpha chain variable domain of TCR clone 273546 (TRAV40, TRAJ41)
CLLGPPNSWYALNF

SEQ ID NO: 547092 - protein, 11 aa, Homo sapiens
  CDR3 for beta chain variable domain of TCR clone 273546 (TRBV19, TRBJ2-7)
CASSILGEQYF

SEQ ID NO: 547093 - protein, 13 aa, Homo sapiens
  CDR3 for alpha chain variable domain of TCR clone 273547 (TRAV12-1, TRAJ39)
CVVNYNAGNMLAS

SEQ ID NO: 547094 - protein, 14 aa, Homo sapiens
  CDR3 for beta chain variable domain of TCR clone 273547 (TRBV27, TRBJ2-3)
CASSPLGTTDTQYF

SEQ ID NO: 547095 - protein, 12 aa, Homo sapiens
  CDR3 for alpha chain variable domain of TCR clone 273548 (TRAV13-1, TRAJ49)
CAASPMGNQFYF

SEQ ID NO: 547096 - protein, 14 aa, Homo sapiens
  CDR3 for beta chain variable domain of TCR clone 273548 (TRBV19, TRBJ2-1)
CARGARSFQWEQFF

SEQ ID NO: 547097 - protein, 15 aa, Homo sapiens
  CDR3 for alpha chain variable domain of TCR clone 273549 (TRAV4, TRAJ42)
CLVGGYGGSQGNLIF

SEQ ID NO: 547098 - protein, 16 aa, Homo sapiens
  CDR3 for beta chain variable domain of TCR clone 273549 (TRBV27, TRBJ1-1)
CASSTRTGGVGTESFF

SEQ ID NO: 547099 - protein, 13 aa, Homo sapiens
  CDR3 for alpha chain variable domain of TCR clone 273550 (TRAV13-2, TRAJ48)
CAEMDFGNENLTF

SEQ ID NO: 547100 - protein, 13 aa, Homo sapiens
  CDR3 for beta chain variable domain of TCR clone 273550 (TRBV7-9, TRBJ1-2)
CASSLKQNYGYTF

SEQ ID NO: 547101 - protein, 14 aa, Homo sapiens
  CDR3 for alpha chain variable domain of TCR clone 273551 (TRAV26-1, TRAJ39)
CIVRGSRAGNMPTF

SEQ ID NO: 547102 - protein, 15 aa, Homo sapiens
  CDR3 for beta chain variable domain of TCR clone 273551 (TRBV7-9, TRBJ1-5)
CASSQDHQPNQPQHF

SEQ ID NO: 547103 - protein, 13 aa, Homo sapiens
  CDR3 for alpha chain variable domain of TCR clone 273552 (TRAV21, TRAJ27)
CAALKTNAGKSTF

SEQ ID NO: 547104 - protein, 14 aa, Homo sapiens
  CDR3 for beta chain variable domain of TCR clone 273552 (TRBV27, TRBJ1-1)
CASSLLSGLSDAFF

SEQ ID NO: 547105 - protein, 23 aa, Homo sapiens
  CDR3 for alpha chain variable domain of TCR clone 273553 (TRAV26-1, TRAJ38)
CIADNAGNNHIQNPDPAVYQLRD

SEQ ID NO: 547106 - protein, 13 aa, Homo sapiens
  CDR3 for beta chain variable domain of TCR clone 273553 (TRBV11-3, TRBJ1-2)
CASSLPGDVGYTF

SEQ ID NO: 547107 - protein, 17 aa, Homo sapiens
  CDR3 for alpha chain variable domain of TCR clone 273554 (TRAV13-1, TRAJ28)
CAASPPYSGAGSYQLTL

SEQ ID NO: 547108 - protein, 13 aa, Homo sapiens
  CDR3 for beta chain variable domain of TCR clone 273554 (TRBV7-3, TRBJ1-1)
CASSQDWGAEAFF

SEQ ID NO: 547109 - protein, 13 aa, Homo sapiens
  CDR3 for alpha chain variable domain of TCR clone 273555 (TRAV3, TRAJ21)
CAVREPDFNKFYF

SEQ ID NO: 547110 - protein, 15 aa, Homo sapiens
  CDR3 for beta chain variable domain of TCR clone 273555 (TRBV3-1, TRBJ2-5)
CASSRGQASWKTQYF

SEQ ID NO: 547111 - protein, 13 aa, Homo sapiens
  CDR3 for alpha chain variable domain of TCR clone 273556 (TRAV3, TRAJ20)
CAVRDGGDYKPSF

SEQ ID NO: 547112 - protein, 16 aa, Homo sapiens
  CDR3 for beta chain variable domain of TCR clone 273556 (TRBV4-1, TRBJ2-5)
CASSQTSGGPLETQYF

SEQ ID NO: 547113 - protein, 13 aa, Homo sapiens
  CDR3 for alpha chain variable domain of TCR clone 273557 (TRAV8-2, TRAJ34)
CVVSDRRTDKLIF

SEQ ID NO: 547114 - protein, 15 aa, Homo sapiens
  CDR3 for beta chain variable domain of TCR clone 273557 (TRBV20-1, TRBJ2-3)
CSARVVGCSTDTQYF

SEQ ID NO: 547115 - protein, 14 aa, Homo sapiens
  CDR3 for alpha chain variable domain of TCR clone 273558 (TRAV1-2, TRAJ8)
CAVREGTGFQKLVF

SEQ ID NO: 547116 - protein, 16 aa, Homo sapiens
  CDR3 for beta chain variable domain of TCR clone 273558 (TRBV19, TRBJ2-1)
CASSKAGPSSYNEQFF

SEQ ID NO: 547117 - protein, 16 aa, Homo sapiens
  CDR3 for alpha chain variable domain of TCR clone 273559 (TRAV21, TRAJ37)
CAVRPRGSSNTGRLIF

SEQ ID NO: 547118 - protein, 13 aa, Homo sapiens
  CDR3 for beta chain variable domain of TCR clone 273559 (TRBV20-1, TRBJ2-2)
CSALSGGAGELFF

SEQ ID NO: 547119 - protein, 13 aa, Homo sapiens
  CDR3 for alpha chain variable domain of TCR clone 273560 (TRAV27, TRAJ41)
CAGEGNSGYARNF

SEQ ID NO: 547120 - protein, 13 aa, Homo sapiens
  CDR3 for beta chain variable domain of TCR clone 273560 (TRBV28, TRBJ1-5)
CASRMTGDQPQHF

SEQ ID NO: 547121 - protein, 12 aa, Homo sapiens
  CDR3 for alpha chain variable domain of TCR clone 273561 (TRAV25, TRAJ11)
CAGASGYSTLTF

SEQ ID NO: 547122 - protein, 15 aa, Homo sapiens
  CDR3 for beta chain variable domain of TCR clone 273561 (TRBV27, TRBJ2-1)
CASSNGGGSSNEQFF

SEQ ID NO: 547123 - protein, 16 aa, Homo sapiens
  CDR3 for alpha chain variable domain of TCR clone 273562 (TRAV3, TRAJ10)
CAVRDMRAGGGNTLTF

SEQ ID NO: 547124 - protein, 17 aa, Homo sapiens
  CDR3 for beta chain variable domain of TCR clone 273562 (TRBV20-1, TRBJ2-2)
CSASGSGQGGLTGELFF

SEQ ID NO: 547125 - protein, 12 aa, Homo sapiens
  CDR3 for alpha chain variable domain of TCR clone 273563 (TRAV1-1, TRAJ30)
CAVRGRDDKIIF

SEQ ID NO: 547126 - protein, 15 aa, Homo sapiens
  CDR3 for beta chain variable domain of TCR clone 273563 (TRBV7-9, TRBJ2-1)
CASSLGWGRANEQFF

SEQ ID NO: 547127 - protein, 16 aa, Homo sapiens
  CDR3 for alpha chain variable domain of TCR clone 273564 (TRAV4, TRAJ4)
CLVVPLFSGCYNKLIF

SEQ ID NO: 547128 - protein, 13 aa, Homo sapiens
  CDR3 for beta chain variable domain of TCR clone 273564 (TRBV9, TRBJ2-1)
CASSVGPNNEQFF

SEQ ID NO: 547129 - protein, 16 aa, Homo sapiens
  CDR3 for alpha chain variable domain of TCR clone 273565 (TRAV30, TRAJ24)
CGTQIVDADSWGKFQF

SEQ ID NO: 547130 - protein, 12 aa, Homo sapiens
  CDR3 for beta chain variable domain of TCR clone 273565 (TRBV11-2, TRBJ2-2)
CASSLPTGELFF

SEQ ID NO: 547131 - protein, 11 aa, Homo sapiens
  CDR3 for alpha chain variable domain of TCR clone 273566 (TRAV17, TRAJ9)
CGFTGGFKTIF

SEQ ID NO: 547132 - protein, 16 aa, Homo sapiens
  CDR3 for beta chain variable domain of TCR clone 273566 (TRBV2, TRBJ2-1)
CASSVGGSLSYNEQFF

SEQ ID NO: 547133 - protein, 15 aa, Homo sapiens
  CDR3 for alpha chain variable domain of TCR clone 273567 (TRAV12-3, TRAJ49)
CAMAVTPNTGNQFYF

SEQ ID NO: 547134 - protein, 15 aa, Homo sapiens
  CDR3 for beta chain variable domain of TCR clone 273567 (TRBV4-2, TRBJ1-2)
CASSQRTGGRDGYTF

SEQ ID NO: 547135 - protein, 14 aa, Homo sapiens
  CDR3 for alpha chain variable domain of TCR clone 273568 (TRAV17, TRAJ45)
RATDARGGADGLTF

SEQ ID NO: 547136 - protein, 11 aa, Homo sapiens
  CDR3 for beta chain variable domain of TCR clone 273568 (TRBV28, TRBJ2-5)
CATGNQETQYF

SEQ ID NO: 547137 - protein, 14 aa, Homo sapiens
  CDR3 for alpha chain variable domain of TCR clone 273569 (TRAV17, TRAJ22)
CATSPSGSARQLPF

SEQ ID NO: 547138 - protein, 13 aa, Homo sapiens
  CDR3 for beta chain variable domain of TCR clone 273569 (TRBV12-4, TRBJ1-2)
CASSLRQGKGYTF

SEQ ID NO: 547139 - protein, 14 aa, Homo sapiens
  CDR3 for alpha chain variable domain of TCR clone 273570 (TRAV38-1, TRAJ40)
CALRPTSGTYKYIF

SEQ ID NO: 547140 - protein, 17 aa, Homo sapiens
  CDR3 for beta chain variable domain of TCR clone 273570 (TRBV7-3, TRBJ2-3)
CASSLMKRMRGADTQYF

SEQ ID NO: 547141 - protein, 18 aa, Homo sapiens
  CDR3 for alpha chain variable domain of TCR clone 273571 (TRAV21, TRAJ52)
CAVRPSPAGGTSYGKLTF

SEQ ID NO: 547142 - protein, 15 aa, Homo sapiens
  CDR3 for beta chain variable domain of TCR clone 273571 (TRBV7-2, TRBJ2-1)
CASTHGTGFYNEQFF

SEQ ID NO: 547143 - protein, 11 aa, Homo sapiens
  CDR3 for alpha chain variable domain of TCR clone 273572 (TRAV4, TRAJ23)
CLVAPGGKLIF

SEQ ID NO: 547144 - protein, 16 aa, Homo sapiens
  CDR3 for beta chain variable domain of TCR clone 273572 (TRBV20-1, TRBJ1-4)
CSAPGQGLLTNEKLFF

SEQ ID NO: 547145 - protein, 14 aa, Homo sapiens
  CDR3 for alpha chain variable domain of TCR clone 273573 (TRAV2, TRAJ37)
CAVDFTSNTGKLIF

SEQ ID NO: 547146 - protein, 13 aa, Homo sapiens
  CDR3 for beta chain variable domain of TCR clone 273573 (TRBV7-9, TRBJ2-7)
CASSAGLQYEQYF

SEQ ID NO: 547147 - protein, 17 aa, Homo sapiens
  CDR3 for alpha chain variable domain of TCR clone 273574 (TRAV3, TRAJ42)
CAVRDRDYGGSQGNLIF

SEQ ID NO: 547148 - protein, 13 aa, Homo sapiens
  CDR3 for beta chain variable domain of TCR clone 273574 (TRBV7-2, TRBJ2-5)
CASSQTSVETQYF

SEQ ID NO: 547149 - protein, 13 aa, Homo sapiens
  CDR3 for alpha chain variable domain of TCR clone 273575 (TRAV21, TRAJ27)
CAARPGNAGRSTF

SEQ ID NO: 547150 - protein, 20 aa, Homo sapiens
  CDR3 for beta chain variable domain of TCR clone 273575 (TRBV4-2, TRBJ2-7)
CASSQASGGNLRAVLRAGHQ

SEQ ID NO: 547151 - protein, 15 aa, Homo sapiens
  CDR3 for alpha chain variable domain of TCR clone 273576 (TRAV10, TRAJ36)
CVVSALGEGANNLSF

SEQ ID NO: 547152 - protein, 17 aa, Homo sapiens
  CDR3 for beta chain variable domain of TCR clone 273576 (TRBV6-5, TRBJ2-7)
CASSLLPQDRGPYEQYF

SEQ ID NO: 547153 - protein, 12 aa, Homo sapiens
  CDR3 for alpha chain variable domain of TCR clone 273577 (TRAV13-2, TRAJ23)
CAERYRGGKLIF

SEQ ID NO: 547154 - protein, 15 aa, Homo sapiens
  CDR3 for beta chain variable domain of TCR clone 273577 (TRBV15, TRBJ2-1)
CATSRPGQGLHEQFF

SEQ ID NO: 547155 - protein, 16 aa, Homo sapiens
  CDR3 for alpha chain variable domain of TCR clone 273578 (TRAV3, TRAJ37)
CAVRGKGSGNTGKLIF

SEQ ID NO: 547156 - protein, 18 aa, Homo sapiens
  CDR3 for beta chain variable domain of TCR clone 273578 (TRBV4-1, TRBJ2-7)
CASSQDTGAGSGLNEQYF

SEQ ID NO: 547157 - protein, 13 aa, Homo sapiens
  CDR3 for alpha chain variable domain of TCR clone 273579 (TRAV20, TRAJ31)
CAVQAIGGARLMF

SEQ ID NO: 547158 - protein, 14 aa, Homo sapiens
  CDR3 for beta chain variable domain of TCR clone 273579 (TRBV4-1, TRBJ2-2)
CASSQAVNTGELFF

SEQ ID NO: 547159 - protein, 14 aa, Homo sapiens
  CDR3 for alpha chain variable domain of TCR clone 273580 (TRAV12-1, TRAJ17)
CVVNYKAAGNKLTF

SEQ ID NO: 547160 - protein, 17 aa, Homo sapiens
  CDR3 for beta chain variable domain of TCR clone 273580 (TRBV20-1, TRBJ2-1)
GSAGSSGLAGSYNEQFF

SEQ ID NO: 547161 - protein, 14 aa, Homo sapiens
  CDR3 for alpha chain variable domain of TCR clone 273581 (TRAV12-3, TRAJ9)
CAMSPNTGGFKTIF

SEQ ID NO: 547162 - protein, 15 aa, Homo sapiens
  CDR3 for beta chain variable domain of TCR clone 273581 (TRBV11-2, TRBJ2-2)
CASRGLAANTGELFF

SEQ ID NO: 547163 - protein, 10 aa, Homo sapiens
  CDR3 for alpha chain variable domain of TCR clone 273582 (TRAV8-4, TRAJ43)
CAVSADDMRF

SEQ ID NO: 547164 - protein, 15 aa, Homo sapiens
  CDR3 for beta chain variable domain of TCR clone 273582 (TRBV5-1, TRBJ2-3)
CAISVTSGSTDTQYF

SEQ ID NO: 547165 - protein, 14 aa, Homo sapiens
  CDR3 for alpha chain variable domain of TCR clone 273583 (TRAV17, TRAJ57)
CATDPQGGSEKLVF

SEQ ID NO: 547166 - protein, 16 aa, Homo sapiens
  CDR3 for beta chain variable domain of TCR clone 273583 (TRBV12-4, TRBJ2-7)
CASSLIGGTGTYEQYF

SEQ ID NO: 547167 - protein, 15 aa, Homo sapiens
  CDR3 for alpha chain variable domain of TCR clone 273584 (TRAV8-3, TRAJ20)
CAVEAKGSNDYKLSF

SEQ ID NO: 547168 - protein, 16 aa, Homo sapiens
  CDR3 for beta chain variable domain of TCR clone 273584 (TRBV12-5, TRBJ2-5)
CASGPRTSGNQETQYF

SEQ ID NO: 547169 - protein, 15 aa, Homo sapiens
  CDR3 for alpha chain variable domain of TCR clone 273585 (TRAV26-1, TRAJ29)
CIVRVEGSGNTPLVF

SEQ ID NO: 547170 - protein, 15 aa, Homo sapiens
  CDR3 for beta chain variable domain of TCR clone 273585 (TRBV28, TRBJ2-5)
CASSTGQGSIETQYF

SEQ ID NO: 547171 - protein, 14 aa, Homo sapiens
  CDR3 for alpha chain variable domain of TCR clone 273586 (TRAV38-1, TRAJ39)
CALAYNNAGNMLTF

SEQ ID NO: 547172 - protein, 15 aa, Homo sapiens
  CDR3 for beta chain variable domain of TCR clone 273586 (TRBV19, TRBJ2-6)
CASSIGPSGANVLTF

SEQ ID NO: 547173 - protein, 14 aa, Homo sapiens
  CDR3 for alpha chain variable domain of TCR clone 273587 (TRAV16, TRAJ33)
CALSSIDSNYQLIW

SEQ ID NO: 547174 - protein, 12 aa, Homo sapiens
  CDR3 for beta chain variable domain of TCR clone 273587 (TRBV5-1, TRBJ1-2)
CASSQYTYGYTF

SEQ ID NO: 547175 - protein, 15 aa, Homo sapiens
  CDR3 for alpha chain variable domain of TCR clone 273588 (TRAV2, TRAJ9)
CAVEDRGTGGFKTIF

SEQ ID NO: 547176 - protein, 17 aa, Homo sapiens
  CDR3 for beta chain variable domain of TCR clone 273588 (TRBV4-3, TRBJ2-1)
CASSQFSGGRASGEQFF

SEQ ID NO: 547177 - protein, 14 aa, Homo sapiens
  CDR3 for alpha chain variable domain of TCR clone 273589 (TRAV12-2, TRAJ8)
CAVKENTGFQKLVF

SEQ ID NO: 547178 - protein, 13 aa, Homo sapiens
  CDR3 for beta chain variable domain of TCR clone 273589 (TRBV18, TRBJ1-2)
CASSASATEDYTF

SEQ ID NO: 547179 - protein, 16 aa, Homo sapiens
  CDR3 for alpha chain variable domain of TCR clone 273590 (TRAV3, TRAJ37)
CAVRGKGSGNTGKLIF

SEQ ID NO: 547180 - protein, 15 aa, Homo sapiens
  CDR3 for beta chain variable domain of TCR clone 273590 (TRBV28, TRBJ1-5)
CASSRTGGYVQPQHF

SEQ ID NO: 547181 - protein, 10 aa, Homo sapiens
  CDR3 for alpha chain variable domain of TCR clone 273591 (TRAV1-2, TRAJ31)
CVSEDARLMF

SEQ ID NO: 547182 - protein, 14 aa, Homo sapiens
  CDR3 for beta chain variable domain of TCR clone 273591 (TRBV19, TRBJ2-1)
CASPTFVLIGEQFF

SEQ ID NO: 547183 - protein, 14 aa, Homo sapiens
  CDR3 for alpha chain variable domain of TCR clone 273592 (TRAV38-1, TRAJ45)
CASHSGGGADGLTF

SEQ ID NO: 547184 - protein, 14 aa, Homo sapiens
  CDR3 for beta chain variable domain of TCR clone 273592 (TRBV11-2, TRBJ2-3)
CASSRLARTDTQYF

SEQ ID NO: 547185 - protein, 14 aa, Homo sapiens
  CDR3 for alpha chain variable domain of TCR clone 273593 (TRAV29/DV5, TRAJ47)
CAASEPEYGNELVF

SEQ ID NO: 547186 - protein, 14 aa, Homo sapiens
  CDR3 for beta chain variable domain of TCR clone 273593 (TRBV4-1, TRBJ2-2)
CASSQAVNTGELFF

SEQ ID NO: 547187 - protein, 12 aa, Homo sapiens
  CDR3 for alpha chain variable domain of TCR clone 273594 (TRAV13-1, TRAJ9)
CASHTGGFKTIF

SEQ ID NO: 547188 - protein, 14 aa, Homo sapiens
  CDR3 for beta chain variable domain of TCR clone 273594 (TRBV11-2, TRBJ2-5)
CASRPLAGRETQYF

SEQ ID NO: 547189 - protein, 13 aa, Homo sapiens
  CDR3 for alpha chain variable domain of TCR clone 273595 (TRAV27, TRAJ45)
CRSSGGGADGLTF

SEQ ID NO: 547190 - protein, 17 aa, Homo sapiens
  CDR3 for beta chain variable domain of TCR clone 273595 (TRBV11-2, TRBJ2-1)
CASSLYPPGVEYYEQFF

SEQ ID NO: 547191 - protein, 12 aa, Homo sapiens
  CDR3 for alpha chain variable domain of TCR clone 273596 (TRAV12-2, TRAJ45)
CASGGGADGLTF

SEQ ID NO: 547192 - protein, 16 aa, Homo sapiens
  CDR3 for beta chain variable domain of TCR clone 273596 (TRBV19, TRBJ2-3)
CASSPGLLASTDTQYS

SEQ ID NO: 547193 - protein, 16 aa, Homo sapiens
  CDR3 for alpha chain variable domain of TCR clone 273597 (TRAV3, TRAJ32)
CAVRENYGGATNKLIF

SEQ ID NO: 547194 - protein, 15 aa, Homo sapiens
  CDR3 for beta chain variable domain of TCR clone 273597 (TRBV9, TRBJ1-6)
CASSVAGTGDSPLHF

SEQ ID NO: 547195 - protein, 12 aa, Homo sapiens
  CDR3 for alpha chain variable domain of TCR clone 273598 (TRAV12-2, TRAJ10)
WGVTGGGNKLTF

SEQ ID NO: 547196 - protein, 14 aa, Homo sapiens
  CDR3 for beta chain variable domain of TCR clone 273598 (TRBV18, TRBJ1-1)
CASSQGQGNTEAFF

SEQ ID NO: 547197 - protein, 14 aa, Homo sapiens
  CDR3 for alpha chain variable domain of TCR clone 273599 (TRAV6, TRAJ37)
CALGSPGNTGKLIF

SEQ ID NO: 547198 - protein, 15 aa, Homo sapiens
  CDR3 for beta chain variable domain of TCR clone 273599 (TRBV2, TRBJ2-1)
CAGSEEREGDNEQVF

SEQ ID NO: 547199 - protein, 13 aa, Homo sapiens
  CDR3 for alpha chain variable domain of TCR clone 273600 (TRAV20, TRAJ15)
CATINHAGTALIF

SEQ ID NO: 547200 - protein, 13 aa, Homo sapiens
  CDR3 for beta chain variable domain of TCR clone 273600 (TRBV12-4, TRBJ2-1)
CASRQPSNNEQFF

SEQ ID NO: 547201 - protein, 13 aa, Homo sapiens
  CDR3 for alpha chain variable domain of TCR clone 273601 (TRAV27, TRAJ45)
CRSSGGGADGLTF

SEQ ID NO: 547202 - protein, 11 aa, Homo sapiens
  CDR3 for beta chain variable domain of TCR clone 273601 (TRBV11-2, TRBJ2-7)
CASSLSLEQYF

SEQ ID NO: 547203 - protein, 11 aa, Homo sapiens
  CDR3 for alpha chain variable domain of TCR clone 273602 (TRAV2, TRAJ31)
CAAGPPARLMF

SEQ ID NO: 547204 - protein, 14 aa, Homo sapiens
  CDR3 for beta chain variable domain of TCR clone 273602 (TRBV7-2, TRBJ2-7)
CASRSQGAAYEQYF

SEQ ID NO: 547205 - protein, 12 aa, Homo sapiens
  CDR3 for alpha chain variable domain of TCR clone 273603 (TRAV21, TRAJ30)
CAALNRDDKIIF

SEQ ID NO: 547206 - protein, 14 aa, Homo sapiens
  CDR3 for beta chain variable domain of TCR clone 273603 (TRBV25-1, TRBJ1-1)
CASTHLGGNTEAFF

SEQ ID NO: 547207 - protein, 14 aa, Homo sapiens
  CDR3 for alpha chain variable domain of TCR clone 273604 (TRAV35, TRAJ22)
CAGLRSGSASQLTF

SEQ ID NO: 547208 - protein, 15 aa, Homo sapiens
  CDR3 for beta chain variable domain of TCR clone 273604 (TRBV12-4, TRBJ2-5)
CASSPPTGLQETQYF

SEQ ID NO: 547209 - protein, 14 aa, Homo sapiens
  CDR3 for alpha chain variable domain of TCR clone 273605 (TRAV12-2, TRAJ13)
CAAKKTGGYQKVTF

SEQ ID NO: 547210 - protein, 15 aa, Homo sapiens
  CDR3 for beta chain variable domain of TCR clone 273605 (TRBV9, TRBJ1-6)
CASSVAGTGDSPLHF

SEQ ID NO: 547211 - protein, 15 aa, Homo sapiens
  CDR3 for alpha chain variable domain of TCR clone 273606 (TRAV12-2, TRAJ43)
CAFDIRFGAGTRLIV

SEQ ID NO: 547212 - protein, 18 aa, Homo sapiens
  CDR3 for beta chain variable domain of TCR clone 273606 (TRBV20-1, TRBJ2-3)
CSASGLAGGPGTTDTQYF

SEQ ID NO: 547213 - protein, 13 aa, Homo sapiens
  CDR3 for alpha chain variable domain of TCR clone 273607 (TRAV20, TRAJ37)
CAGCSSNTGKLIL

SEQ ID NO: 547214 - protein, 16 aa, Homo sapiens
  CDR3 for beta chain variable domain of TCR clone 273607 (TRBV3-1, TRBJ2-7)
WASSQGATGVAYEQYF

SEQ ID NO: 547215 - protein, 15 aa, Homo sapiens
  CDR3 for alpha chain variable domain of TCR clone 273608 (TRAV19, TRAJ58)
CALSQGETSGSRLTF

SEQ ID NO: 547216 - protein, 12 aa, Homo sapiens
  CDR3 for beta chain variable domain of TCR clone 273608 (TRBV7-9, TRBJ1-5)
CASSPQGQPQHF

SEQ ID NO: 547217 - protein, 11 aa, Homo sapiens
  CDR3 for alpha chain variable domain of TCR clone 273609 (TRAV35, TRAJ30)
CAPGGDDKIIF

SEQ ID NO: 547218 - protein, 16 aa, Homo sapiens
  CDR3 for beta chain variable domain of TCR clone 273609 (TRBV7-3, TRBJ2-2)
CASSLKRGTLSGELFF

SEQ ID NO: 547219 - protein, 15 aa, Homo sapiens
  CDR3 for alpha chain variable domain of TCR clone 273610 (TRAV12-3, TRAJ11)
CAMSEENSGYSTLTF

SEQ ID NO: 547220 - protein, 13 aa, Homo sapiens
  CDR3 for beta chain variable domain of TCR clone 273610 (TRBV7-2, TRBJ2-2)
CASSSVRAGELFF

SEQ ID NO: 547221 - protein, 15 aa, Homo sapiens
  CDR3 for alpha chain variable domain of TCR clone 273611 (TRAV38-2/DV8, TRAJ47)
CAYRSAKGYGNKLVF

SEQ ID NO: 547222 - protein, 15 aa, Homo sapiens
  CDR3 for beta chain variable domain of TCR clone 273611 (TRBV6-6, TRBJ2-7)
CASSYSYGGSYEQYS

SEQ ID NO: 547223 - protein, 11 aa, Homo sapiens
  CDR3 for alpha chain variable domain of TCR clone 273612 (TRAV23/DV6, TRAJ58)
CAARLLRGETS

SEQ ID NO: 547224 - protein, 23 aa, Homo sapiens
  CDR3 for beta chain variable domain of TCR clone 273612 (TRBV7-9, TRBJ1-2)
EAQLEKSRLLSDRFSSGEDGYTF

SEQ ID NO: 547225 - protein, 14 aa, Homo sapiens
  CDR3 for alpha chain variable domain of TCR clone 273613 (TRAV1-2, TRAJ16)
CAVSRFSDGQKLVF

SEQ ID NO: 547226 - protein, 16 aa, Homo sapiens
  CDR3 for beta chain variable domain of TCR clone 273613 (TRBV12-5, TRBJ2-5)
CASGPRTSGNQETQYF

SEQ ID NO: 547227 - protein, 15 aa, Homo sapiens
  CDR3 for alpha chain variable domain of TCR clone 273614 (TRAV14/DV4, TRAJ15)
CAMREGWQAGTALFF

SEQ ID NO: 547228 - protein, 14 aa, Homo sapiens
  CDR3 for beta chain variable domain of TCR clone 273614 (TRBV19, TRBJ2-5)
CDSSMTGQQETQYF

SEQ ID NO: 547229 - protein, 12 aa, Homo sapiens
  CDR3 for alpha chain variable domain of TCR clone 273615 (TRAV13-1, TRAJ34)
CAASKGTDKLIF

SEQ ID NO: 547230 - protein, 15 aa, Homo sapiens
  CDR3 for beta chain variable domain of TCR clone 273615 (TRBV28, TRBJ2-1)
CASSLDTSSYNEQFF

SEQ ID NO: 547231 - protein, 13 aa, Homo sapiens
  CDR3 for alpha chain variable domain of TCR clone 273616 (TRAV21, TRAJ27)
CAARPGTAGKSTF

SEQ ID NO: 547232 - protein, 15 aa, Homo sapiens
  CDR3 for beta chain variable domain of TCR clone 273616 (TRBV20-1, TRBJ2-7)
CSARDRVSGMDEQYF

SEQ ID NO: 547233 - protein, 15 aa, Homo sapiens
  CDR3 for alpha chain variable domain of TCR clone 273617 (TRAV3, TRAJ22)
CAVSDRGGSARQLTF

SEQ ID NO: 547234 - protein, 15 aa, Homo sapiens
  CDR3 for beta chain variable domain of TCR clone 273617 (TRBV7-8, TRBJ2-7)
CASSLERAGSYEQYF

SEQ ID NO: 547235 - protein, 16 aa, Homo sapiens
  CDR3 for alpha chain variable domain of TCR clone 273618 (TRAV26-1, TRAJ38)
FIVRAYNAGNNRKLIW

SEQ ID NO: 547236 - protein, 13 aa, Homo sapiens
  CDR3 for beta chain variable domain of TCR clone 273618 (TRBV4-2, TRBJ2-7)
CASSRDPHDEQYF

SEQ ID NO: 547237 - protein, 16 aa, Homo sapiens
  CDR3 for alpha chain variable domain of TCR clone 273619 (TRAV21, TRAJ37)
CAVRTAGSSDTGKLVF

SEQ ID NO: 547238 - protein, 13 aa, Homo sapiens
  CDR3 for beta chain variable domain of TCR clone 273619 (TRBV7-9, TRBJ2-5)
CASLPSGRETQYF

SEQ ID NO: 547239 - protein, 15 aa, Homo sapiens
  CDR3 for alpha chain variable domain of TCR clone 273620 (TRAV8-3, TRAJ11)
CAVGLLNSGYSTLTF

SEQ ID NO: 547240 - protein, 12 aa, Homo sapiens
  CDR3 for beta chain variable domain of TCR clone 273620 (TRBV11-2, TRBJ2-2)
CASSLPTGELFF

SEQ ID NO: 547241 - protein, 17 aa, Homo sapiens
  CDR3 for alpha chain variable domain of TCR clone 273621 (TRAV3, TRAJ12)
CAVRDGGGMDSSYKLIF

SEQ ID NO: 547242 - protein, 13 aa, Homo sapiens
  CDR3 for beta chain variable domain of TCR clone 273621 (TRBV7-3, TRBJ1-1)
CASSQDWGAEAFF

SEQ ID NO: 547243 - protein, 17 aa, Homo sapiens
  CDR3 for alpha chain variable domain of TCR clone 273622 (TRAV13-1, TRAJ52)
CAASSGAGGTSYGKLTF

SEQ ID NO: 547244 - protein, 14 aa, Homo sapiens
  CDR3 for beta chain variable domain of TCR clone 273622 (TRBV2, TRBJ1-1)
CASSEQGGDTEAFC

SEQ ID NO: 547245 - protein, 14 aa, Homo sapiens
  CDR3 for alpha chain variable domain of TCR clone 273623 (TRAV12-3, TRAJ42)
CAMNYGGSQGNLIF

SEQ ID NO: 547246 - protein, 15 aa, Homo sapiens
  CDR3 for beta chain variable domain of TCR clone 273623 (TRBV5-7, TRBJ1-5)
CASSYGKLWDQPQHY

SEQ ID NO: 547247 - protein, 18 aa, Homo sapiens
  CDR3 for alpha chain variable domain of TCR clone 273624 (TRAV21, TRAJ52)
CAVRPSPAGGTSYGKLTF

SEQ ID NO: 547248 - protein, 14 aa, Homo sapiens
  CDR3 for beta chain variable domain of TCR clone 273624 (TRBV28, TRBJ2-1)
CASSYYTAYNEQFF

SEQ ID NO: 547249 - protein, 13 aa, Homo sapiens
  CDR3 for alpha chain variable domain of TCR clone 273625 (TRAV27, TRAJ42)
CAGARGSQGNLIF

SEQ ID NO: 547250 - protein, 15 aa, Homo sapiens
  CDR3 for beta chain variable domain of TCR clone 273625 (TRBV10-3, TRBJ2-2)
CAIRTDKEDTGELFF

SEQ ID NO: 547251 - protein, 12 aa, Homo sapiens
  CDR3 for alpha chain variable domain of TCR clone 273626 (TRAV12-1, TRAJ20)
CVAHFNDYKLSF

SEQ ID NO: 547252 - protein, 15 aa, Homo sapiens
  CDR3 for beta chain variable domain of TCR clone 273626 (TRBV6-3, TRBJ2-7)
CASSSPGTVFYEQYF

SEQ ID NO: 547253 - protein, 21 aa, Homo sapiens
  CDR3 for alpha chain variable domain of TCR clone 273627 (TRAV8-3, TRAJ6)
CAARRGGSYIPTLEEEPALLF

SEQ ID NO: 547254 - protein, 15 aa, Homo sapiens
  CDR3 for beta chain variable domain of TCR clone 273627 (TRBV4-1, TRBJ2-3)
CASSNLAGGRDTQYF

SEQ ID NO: 547255 - protein, 16 aa, Homo sapiens
  CDR3 for alpha chain variable domain of TCR clone 273628 (TRAV12-3, TRAJ10)
CAMKKGITGGGNKLTF

SEQ ID NO: 547256 - protein, 12 aa, Homo sapiens
  CDR3 for beta chain variable domain of TCR clone 273628 (TRBV20-1, TRBJ2-7)
CSAITPTKEQYV

SEQ ID NO: 547257 - protein, 14 aa, Homo sapiens
  CDR3 for alpha chain variable domain of TCR clone 273629 (TRAV13-1, TRAJ35)
CSASKGGFGNVLHC

SEQ ID NO: 547258 - protein, 13 aa, Homo sapiens
  CDR3 for beta chain variable domain of TCR clone 273629 (TRBV7-3, TRBJ1-1)
CASSQGWGAEAFF

SEQ ID NO: 547259 - protein, 14 aa, Homo sapiens
  CDR3 for alpha chain variable domain of TCR clone 273630 (TRAV12-2, TRAJ13)
CAVKKTGGYQKVTF

SEQ ID NO: 547260 - protein, 15 aa, Homo sapiens
  CDR3 for beta chain variable domain of TCR clone 273630 (TRBV19, TRBJ1-1)
CASTSGQSQNAEAFF

SEQ ID NO: 547261 - protein, 11 aa, Homo sapiens
  CDR3 for alpha chain variable domain of TCR clone 273631 (TRAV1-2, TRAJ20)
CAVANDYKLSF

SEQ ID NO: 547262 - protein, 16 aa, Homo sapiens
  CDR3 for beta chain variable domain of TCR clone 273631 (TRBV27, TRBJ2-2)
CASSLSGFWVTGELFF

SEQ ID NO: 547263 - protein, 15 aa, Homo sapiens
  CDR3 for alpha chain variable domain of TCR clone 273632 (TRAV1-2, TRAJ35)
CAVRDPVGFGNVLHC

SEQ ID NO: 547264 - protein, 14 aa, Homo sapiens
  CDR3 for beta chain variable domain of TCR clone 273632 (TRBV5-1, TRBJ2-1)
CASSLDDRFDEQFF

SEQ ID NO: 547265 - protein, 15 aa, Homo sapiens
  CDR3 for alpha chain variable domain of TCR clone 273633 (TRAV14/DV4, TRAJ10)
CAMRELTGGGNKLTC

SEQ ID NO: 547266 - protein, 15 aa, Homo sapiens
  CDR3 for beta chain variable domain of TCR clone 273633 (TRBV3-1, TRBJ2-5)
CASSANLGGPETQYF

SEQ ID NO: 547267 - protein, 14 aa, Homo sapiens
  CDR3 for alpha chain variable domain of TCR clone 273634 (TRAV21, TRAJ38)
CAVLGAGNNRKLIW

SEQ ID NO: 547268 - protein, 13 aa, Homo sapiens
  CDR3 for beta chain variable domain of TCR clone 273634 (TRBV7-3, TRBJ2-5)
CASSIGFVETQYF

SEQ ID NO: 547269 - protein, 16 aa, Homo sapiens
  CDR3 for alpha chain variable domain of TCR clone 273635 (TRAV38-2/DV8, TRAJ45)
CVYTTTSGGGADGLTF

SEQ ID NO: 547270 - protein, 14 aa, Homo sapiens
  CDR3 for beta chain variable domain of TCR clone 273635 (TRBV7-9, TRBJ2-2)
CASSLGHRTGELFF

SEQ ID NO: 547271 - protein, 13 aa, Homo sapiens
  CDR3 for alpha chain variable domain of TCR clone 273636 (TRAV21, TRAJ20)
CAVGLRVDYKLSF

SEQ ID NO: 547272 - protein, 13 aa, Homo sapiens
  CDR3 for beta chain variable domain of TCR clone 273636 (TRBV4-1, TRBJ1-1)
CASSRKMNTEAFF

SEQ ID NO: 547273 - protein, 16 aa, Homo sapiens
  CDR3 for alpha chain variable domain of TCR clone 273637 (TRAV8-3, TRAJ13)
CAVGAQEGYRKLPLEL

SEQ ID NO: 547274 - protein, 13 aa, Homo sapiens
  CDR3 for beta chain variable domain of TCR clone 273637 (TRBV11-2, TRBJ2-5)
CASSSTGEETQYF

SEQ ID NO: 547275 - protein, 14 aa, Homo sapiens
  CDR3 for alpha chain variable domain of TCR clone 273638 (TRAV17, TRAJ16)
CATADFSDGQKLLF

SEQ ID NO: 547276 - protein, 12 aa, Homo sapiens
  CDR3 for beta chain variable domain of TCR clone 273638 (TRBV7-3, TRBJ2-1)
CASSLGFNEQFF

SEQ ID NO: 547277 - protein, 14 aa, Homo sapiens
  CDR3 for alpha chain variable domain of TCR clone 273639 (TRAV12-2, TRAJ45)
CALPERGGADGLTF

SEQ ID NO: 547278 - protein, 14 aa, Homo sapiens
  CDR3 for beta chain variable domain of TCR clone 273639 (TRBV7-8, TRBJ2-7)
CASTLGGALGEQYF

SEQ ID NO: 547279 - protein, 18 aa, Homo sapiens
  CDR3 for alpha chain variable domain of TCR clone 273640 (TRAV26-2, TRAJ45)
CILRVDKYSGGGADGLTF

SEQ ID NO: 547280 - protein, 18 aa, Homo sapiens
  CDR3 for beta chain variable domain of TCR clone 273640 (TRBV2, TRBJ1-4)
CASNLLQGATNENCFLAV

SEQ ID NO: 547281 - protein, 14 aa, Homo sapiens
  CDR3 for alpha chain variable domain of TCR clone 273641 (TRAV27, TRAJ22)
CAGLPSGSARQRTF

SEQ ID NO: 547282 - protein, 16 aa, Homo sapiens
  CDR3 for beta chain variable domain of TCR clone 273641 (TRBV7-3, TRBJ2-2)
CASSLKRGTLSGELFF

SEQ ID NO: 547283 - protein, 14 aa, Homo sapiens
  CDR3 for alpha chain variable domain of TCR clone 273642 (TRAV38-1, TRAJ29)
CAFITPSGNTPLVF

SEQ ID NO: 547284 - protein, 15 aa, Homo sapiens
  CDR3 for beta chain variable domain of TCR clone 273642 (TRBV28, TRBJ2-4)
CAAGSGTLLMGIQYF

SEQ ID NO: 547285 - protein, 11 aa, Homo sapiens
  CDR3 for alpha chain variable domain of TCR clone 273643 (TRAV3, TRAJ21)
CAVGDFNKFYF

SEQ ID NO: 547286 - protein, 16 aa, Homo sapiens
  CDR3 for beta chain variable domain of TCR clone 273643 (TRBV19, TRBJ2-1)
CASSKAGPSSYNEQFV

SEQ ID NO: 547287 - protein, 16 aa, Homo sapiens
  CDR3 for alpha chain variable domain of TCR clone 273644 (TRAV3, TRAJ37)
CAVRRKGSGNTGKLIF

SEQ ID NO: 547288 - protein, 13 aa, Homo sapiens
  CDR3 for beta chain variable domain of TCR clone 273644 (TRBV19, TRBJ2-1)
CATSRGVYNEQFF

SEQ ID NO: 547289 - protein, 17 aa, Homo sapiens
  CDR3 for alpha chain variable domain of TCR clone 273645 (TRAV3, TRAJ6)
CAVRDGPRAGGSYIPTF

SEQ ID NO: 547290 - protein, 12 aa, Homo sapiens
  CDR3 for beta chain variable domain of TCR clone 273645 (TRBV27, TRBJ2-1)
CQRTLGVGEQFF

SEQ ID NO: 547291 - protein, 16 aa, Homo sapiens
  CDR3 for alpha chain variable domain of TCR clone 273646 (TRAV12-2, TRAJ43)
CAGDDMRFGAGTRLTV

SEQ ID NO: 547292 - protein, 13 aa, Homo sapiens
  CDR3 for beta chain variable domain of TCR clone 273646 (TRBV12-4, TRBJ1-1)
CASSFGEDTEAFF

SEQ ID NO: 547293 - protein, 12 aa, Homo sapiens
  CDR3 for alpha chain variable domain of TCR clone 273647 (TRAV36/DV7, TRAJ54)
CDVVRGAQKLVF

SEQ ID NO: 547294 - protein, 11 aa, Homo sapiens
  CDR3 for beta chain variable domain of TCR clone 273647 (TRBV12-4, TRBJ2-2)
CASSSAGELFF

SEQ ID NO: 547295 - protein, 11 aa, Homo sapiens
  CDR3 for alpha chain variable domain of TCR clone 273648 (TRAV16, TRAJ49)
CALRSGNQLYF

SEQ ID NO: 547296 - protein, 16 aa, Homo sapiens
  CDR3 for beta chain variable domain of TCR clone 273648 (TRBV20-1, TRBJ1-5)
CSARDVGGGWIQPQHF

SEQ ID NO: 547297 - protein, 13 aa, Homo sapiens
  CDR3 for alpha chain variable domain of TCR clone 273649 (TRAV13-2, TRAJ13)
CADLSGGYQKVTF

SEQ ID NO: 547298 - protein, 15 aa, Homo sapiens
  CDR3 for beta chain variable domain of TCR clone 273649 (TRBV27, TRBJ2-1)
CASSNGGGSSNEQFF

SEQ ID NO: 547299 - protein, 15 aa, Homo sapiens
  CDR3 for alpha chain variable domain of TCR clone 273650 (TRAV26-2, TRAJ50)
CILRDEETSYDKVIF

SEQ ID NO: 547300 - protein, 13 aa, Homo sapiens
  CDR3 for beta chain variable domain of TCR clone 273650 (TRBV5-1, TRBJ2-4)
CASSLEGGMNQYF

SEQ ID NO: 547301 - protein, 13 aa, Homo sapiens
  CDR3 for alpha chain variable domain of TCR clone 273651 (TRAV29/DV5, TRAJ31)
CAASRNNNARLMF

SEQ ID NO: 547302 - protein, 14 aa, Homo sapiens
  CDR3 for beta chain variable domain of TCR clone 273651 (TRBV11-2, TRBJ2-5)
CASSRTGGIETQYF

SEQ ID NO: 547303 - protein, 14 aa, Homo sapiens
  CDR3 for alpha chain variable domain of TCR clone 273652 (TRAV3, TRAJ21)
CALGRGSTNFILVL

SEQ ID NO: 547304 - protein, 14 aa, Homo sapiens
  CDR3 for beta chain variable domain of TCR clone 273652 (TRBV7-9, TRBJ2-4)
CASSLAMGGNIQYF

SEQ ID NO: 547305 - protein, 17 aa, Homo sapiens
  CDR3 for alpha chain variable domain of TCR clone 273653 (TRAV26-1, TRAJ53)
CIVRVDDSGGSNYKLQF

SEQ ID NO: 547306 - protein, 15 aa, Homo sapiens
  CDR3 for beta chain variable domain of TCR clone 273653 (TRBV20-1, TRBJ2-7)
CSARVPAAYFYEQYF

SEQ ID NO: 547307 - protein, 12 aa, Homo sapiens
  CDR3 for alpha chain variable domain of TCR clone 273654 (TRAV38-1, TRAJ30)
CALENRDDKIIF

SEQ ID NO: 547308 - protein, 15 aa, Homo sapiens
  CDR3 for beta chain variable domain of TCR clone 273654 (TRBV4-1, TRBJ2-7)
CASSQQGQGFDEQYF

SEQ ID NO: 547309 - protein, 20 aa, Homo sapiens
  CDR3 for alpha chain variable domain of TCR clone 273655 (TRAV8-3, TRAJ44)
LSTSVLWVRLYTGTASKLTF

SEQ ID NO: 547310 - protein, 12 aa, Homo sapiens
  CDR3 for beta chain variable domain of TCR clone 273655 (TRBV19, TRBJ1-5)
CASSIAQQPQHF

SEQ ID NO: 547311 - protein, 12 aa, Homo sapiens
  CDR3 for alpha chain variable domain of TCR clone 273656 (TRAV13-1, TRAJ5)
CAVDTGWRALTF

SEQ ID NO: 547312 - protein, 12 aa, Homo sapiens
  CDR3 for beta chain variable domain of TCR clone 273656 (TRBV28, TRBJ2-1)
CASRFYRHGQFF

SEQ ID NO: 547313 - protein, 14 aa, Homo sapiens
  CDR3 for alpha chain variable domain of TCR clone 273657 (TRAV13-1, TRAJ35)
CAASKGGFGNVMHC

SEQ ID NO: 547314 - protein, 17 aa, Homo sapiens
  CDR3 for beta chain variable domain of TCR clone 273657 (TRBV11-2, TRBJ2-1)
CASSLYPPGVEYNEQFF

SEQ ID NO: 547315 - protein, 13 aa, Homo sapiens
  CDR3 for alpha chain variable domain of TCR clone 273658 (TRAV21, TRAJ27)
CAARPGNAGKSTF

SEQ ID NO: 547316 - protein, 14 aa, Homo sapiens
  CDR3 for beta chain variable domain of TCR clone 273658 (TRBV7-6, TRBJ2-3)
CATSLGTVTDTQYL

SEQ ID NO: 547317 - protein, 15 aa, Homo sapiens
  CDR3 for alpha chain variable domain of TCR clone 273659 (TRAV1-2, TRAJ28)
CAVQYSGAGSYQLTF

SEQ ID NO: 547318 - protein, 13 aa, Homo sapiens
  CDR3 for beta chain variable domain of TCR clone 273659 (TRBV4-2, TRBJ1-1)
CASRQAGNTEAFF

SEQ ID NO: 547319 - protein, 12 aa, Homo sapiens
  CDR3 for alpha chain variable domain of TCR clone 273660 (TRAV1-2, TRAJ29)
CAVPSGNTPLVF

SEQ ID NO: 547320 - protein, 16 aa, Homo sapiens
  CDR3 for beta chain variable domain of TCR clone 273660 (TRBV10-3, TRBJ2-1)
CAISGVGDGGGGEQFF

SEQ ID NO: 547321 - protein, 13 aa, Homo sapiens
  CDR3 for alpha chain variable domain of TCR clone 273661 (TRAV12-2, TRAJ52)
CAVGGTSYGKLTF

SEQ ID NO: 547322 - protein, 15 aa, Homo sapiens
  CDR3 for beta chain variable domain of TCR clone 273661 (TRBV12-4, TRBJ2-5)
CASSPPTGLQETQYF

SEQ ID NO: 547323 - protein, 15 aa, Homo sapiens
  CDR3 for alpha chain variable domain of TCR clone 273662 (TRAV27, TRAJ38)
CAGRFNAGNNRKLIL

SEQ ID NO: 547324 - protein, 13 aa, Homo sapiens
  CDR3 for beta chain variable domain of TCR clone 273662 (TRBV12-5, TRBJ2-3)
CDSQNRGIDTQYF

SEQ ID NO: 547325 - protein, 16 aa, Homo sapiens
  CDR3 for alpha chain variable domain of TCR clone 273663 (TRAV21, TRAJ52)
CAVTNAGGTSYGKLTF

SEQ ID NO: 547326 - protein, 15 aa, Homo sapiens
  CDR3 for beta chain variable domain of TCR clone 273663 (TRBV7-9, TRBJ1-4)
CASSRTGGFNEKLFF

SEQ ID NO: 547327 - protein, 13 aa, Homo sapiens
  CDR3 for alpha chain variable domain of TCR clone 273664 (TRAV21, TRAJ27)
CAARPGNEGKSTF

SEQ ID NO: 547328 - protein, 14 aa, Homo sapiens
  CDR3 for beta chain variable domain of TCR clone 273664 (TRBV11-2, TRBJ2-7)
CASSLGAGAYEQYF

SEQ ID NO: 547329 - protein, 18 aa, Homo sapiens
  CDR3 for alpha chain variable domain of TCR clone 273665 (TRAV21, TRAJ52)
CAVRPSPAGGTSYGKLTF

SEQ ID NO: 547330 - protein, 13 aa, Homo sapiens
  CDR3 for beta chain variable domain of TCR clone 273665 (TRBV7-9, TRBJ1-2)
CARSLKQNYGYTF

SEQ ID NO: 547331 - protein, 14 aa, Homo sapiens
  CDR3 for alpha chain variable domain of TCR clone 273666 (TRAV8-1, TRAJ4)
CAVPFSGGYNKLIF

SEQ ID NO: 547332 - protein, 15 aa, Homo sapiens
  CDR3 for beta chain variable domain of TCR clone 273666 (TRBV5-1, TRBJ1-1)
CASSWTGRGNTEAFF

SEQ ID NO: 547333 - protein, 12 aa, Homo sapiens
  CDR3 for alpha chain variable domain of TCR clone 273667 (TRAV13-2, TRAJ8)
CAPWLGFQKLVF

SEQ ID NO: 547334 - protein, 14 aa, Homo sapiens
  CDR3 for beta chain variable domain of TCR clone 273667 (TRBV7-2, TRBJ1-2)
CASSQTGSTYGYTF

SEQ ID NO: 547335 - protein, 12 aa, Homo sapiens
  CDR3 for alpha chain variable domain of TCR clone 273668 (TRAV13-1, TRAJ21)
CAAKEGFNKFYF

SEQ ID NO: 547336 - protein, 15 aa, Homo sapiens
  CDR3 for beta chain variable domain of TCR clone 273668 (TRBV7-7, TRBJ2-5)
CASSQVARAEETQYF

SEQ ID NO: 547337 - protein, 16 aa, Homo sapiens
  CDR3 for alpha chain variable domain of TCR clone 273669 (TRAV21, TRAJ52)
CAVTNAGGTSYGNLTF

SEQ ID NO: 547338 - protein, 17 aa, Homo sapiens
  CDR3 for beta chain variable domain of TCR clone 273669 (TRBV28, TRBJ2-5)
CASSRQGGLAGAETQYF

SEQ ID NO: 547339 - protein, 15 aa, Homo sapiens
  CDR3 for alpha chain variable domain of TCR clone 273670 (TRAV3, TRAJ22)
CAVRDRGGSARQLTV

SEQ ID NO: 547340 - protein, 14 aa, Homo sapiens
  CDR3 for beta chain variable domain of TCR clone 273670 (TRBV20-1, TRBJ1-1)
CSAQTRIGGTEAFF

SEQ ID NO: 547341 - protein, 15 aa, Homo sapiens
  CDR3 for alpha chain variable domain of TCR clone 273671 (TRAV8-3, TRAJ11)
CALGLLNSGYSTLTF

SEQ ID NO: 547342 - protein, 16 aa, Homo sapiens
  CDR3 for beta chain variable domain of TCR clone 273671 (TRBV7-9, TRBJ1-2)
CASSLGFSSGEDGDTF

SEQ ID NO: 547343 - protein, 18 aa, Homo sapiens
  CDR3 for alpha chain variable domain of TCR clone 273672 (TRAV3, TRAJ52)
CAAKNPNAGGTSYGKLTF

SEQ ID NO: 547344 - protein, 16 aa, Homo sapiens
  CDR3 for beta chain variable domain of TCR clone 273672 (TRBV6-5, TRBJ1-1)
CASSFGRGSLKLSLDK

SEQ ID NO: 547345 - protein, 11 aa, Homo sapiens
  CDR3 for alpha chain variable domain of TCR clone 273673 (TRAV1-2, TRAJ31)
CAVKNNARLMF

SEQ ID NO: 547346 - protein, 17 aa, Homo sapiens
  CDR3 for beta chain variable domain of TCR clone 273673 (TRBV11-2, TRBJ2-1)
CASSLYPPGVEYNEQFF

SEQ ID NO: 547347 - protein, 11 aa, Homo sapiens
  CDR3 for alpha chain variable domain of TCR clone 273674 (TRAV21, TRAJ34)
CAHYNTDKLIF

SEQ ID NO: 547348 - protein, 14 aa, Homo sapiens
  CDR3 for beta chain variable domain of TCR clone 273674 (TRBV19, TRBJ2-7)
CASSIFAGTYEQYF

SEQ ID NO: 547349 - protein, 14 aa, Homo sapiens
  CDR3 for alpha chain variable domain of TCR clone 273675 (TRAV38-1, TRAJ40)
CALRPTSGTYKYIF

SEQ ID NO: 547350 - protein, 15 aa, Homo sapiens
  CDR3 for beta chain variable domain of TCR clone 273675 (TRBV5-1, TRBJ1-1)
CASSSTTGTNTEAFF

SEQ ID NO: 547351 - protein, 13 aa, Homo sapiens
  CDR3 for alpha chain variable domain of TCR clone 273676 (TRAV8-4, TRAJ15)
CAVSEQAGTALIF

SEQ ID NO: 547352 - protein, 15 aa, Homo sapiens
  CDR3 for beta chain variable domain of TCR clone 273676 (TRBV20-1, TRBJ1-1)
CSASRGVTGNTEAFF

SEQ ID NO: 547353 - protein, 18 aa, Homo sapiens
  CDR3 for alpha chain variable domain of TCR clone 273677 (TRAV12-3, TRAJ52)
CAMSRTNAGGTSYGKLTF

SEQ ID NO: 547354 - protein, 16 aa, Homo sapiens
  CDR3 for beta chain variable domain of TCR clone 273677 (TRBV7-3, TRBJ2-5)
CASSLRGGASQETQYF

SEQ ID NO: 547355 - protein, 15 aa, Homo sapiens
  CDR3 for alpha chain variable domain of TCR clone 273678 (TRAV35, TRAJ40)
CAGQLGTSGTYKYIF

SEQ ID NO: 547356 - protein, 15 aa, Homo sapiens
  CDR3 for beta chain variable domain of TCR clone 273678 (TRBV7-3, TRBJ2-3)
CASSLGLTLGDTQYF

SEQ ID NO: 547357 - protein, 15 aa, Homo sapiens
  CDR3 for alpha chain variable domain of TCR clone 273679 (TRAV3, TRAJ22)
CSVRDRGGSARQLTL

SEQ ID NO: 547358 - protein, 16 aa, Homo sapiens
  CDR3 for beta chain variable domain of TCR clone 273679 (TRBV5-4, TRBJ2-3)
CASQQPGAGGADTQYF

SEQ ID NO: 547359 - protein, 15 aa, Homo sapiens
  CDR3 for alpha chain variable domain of TCR clone 273680 (TRAV12-2, TRAJ43)
CAFDMRFGAGTRLTV

SEQ ID NO: 547360 - protein, 18 aa, Homo sapiens
  CDR3 for beta chain variable domain of TCR clone 273680 (TRBV20-1, TRBJ2-3)
CSASGLAGGTGTTDTQYF

SEQ ID NO: 547361 - protein, 14 aa, Homo sapiens
  CDR3 for alpha chain variable domain of TCR clone 273681 (TRAV26-2, TRAJ31)
CILIPGNNNARPIF

SEQ ID NO: 547362 - protein, 16 aa, Homo sapiens
  CDR3 for beta chain variable domain of TCR clone 273681 (TRBV7-3, TRBJ2-1)
CASSLVGGSSNNEQFF

SEQ ID NO: 547363 - protein, 14 aa, Homo sapiens
  CDR3 for alpha chain variable domain of TCR clone 273682 (TRAV17, TRAJ53)
CALNSGGSNYKLTI

SEQ ID NO: 547364 - protein, 12 aa, Homo sapiens
  CDR3 for beta chain variable domain of TCR clone 273682 (TRBV6-5, TRBJ2-5)
CASSEGSETQYF

SEQ ID NO: 547365 - protein, 13 aa, Homo sapiens
  CDR3 for alpha chain variable domain of TCR clone 273683 (TRAV12-1, TRAJ38)
CVAPAGNNRKLIW

SEQ ID NO: 547366 - protein, 17 aa, Homo sapiens
  CDR3 for beta chain variable domain of TCR clone 273683 (TRBV4-1, TRBJ2-3)
CASSQSATGGPVDTQYF

SEQ ID NO: 547367 - protein, 14 aa, Homo sapiens
  CDR3 for alpha chain variable domain of TCR clone 273684 (TRAV1-2, TRAJ16)
CAVNRFSDGQKLLF

SEQ ID NO: 547368 - protein, 15 aa, Homo sapiens
  CDR3 for beta chain variable domain of TCR clone 273684 (TRBV27, TRBJ2-1)
CASSNGGGSSNGQFF

SEQ ID NO: 547369 - protein, 12 aa, Homo sapiens
  CDR3 for alpha chain variable domain of TCR clone 273685 (TRAV12-2, TRAJ10)
WGVTGGGSKLTF

SEQ ID NO: 547370 - protein, 20 aa, Homo sapiens
  CDR3 for beta chain variable domain of TCR clone 273685 (TRBV19, TRBJ2-1)
CASSISRTVTSTRLNNEQFF

SEQ ID NO: 547371 - protein, 15 aa, Homo sapiens
  CDR3 for alpha chain variable domain of TCR clone 273686 (TRAV3, TRAJ22)
CAVRDRGGSAWQLTF

SEQ ID NO: 547372 - protein, 16 aa, Homo sapiens
  CDR3 for beta chain variable domain of TCR clone 273686 (TRBV25-1, TRBJ1-1)
CASSGDRDRGRIEAFF

SEQ ID NO: 547373 - protein, 13 aa, Homo sapiens
  CDR3 for alpha chain variable domain of TCR clone 273687 (TRAV8-3, TRAJ36)
CAVGATGANNLFF

SEQ ID NO: 547374 - protein, 13 aa, Homo sapiens
  CDR3 for beta chain variable domain of TCR clone 273687 (TRBV19, TRBJ1-2)
CASSVPGQDGYTL

SEQ ID NO: 547375 - protein, 16 aa, Homo sapiens
  CDR3 for alpha chain variable domain of TCR clone 273688 (TRAV30, TRAJ24)
CGTEIVDADIWGKFQF

SEQ ID NO: 547376 - protein, 13 aa, Homo sapiens
  CDR3 for beta chain variable domain of TCR clone 273688 (TRBV11-2, TRBJ1-3)
CASSLSERNTIYF

SEQ ID NO: 547377 - protein, 14 aa, Homo sapiens
  CDR3 for alpha chain variable domain of TCR clone 273689 (TRAV3, TRAJ7)
CAVREEEREQQTRF

SEQ ID NO: 547378 - protein, 11 aa, Homo sapiens
  CDR3 for beta chain variable domain of TCR clone 273689 (TRBV7-8, TRBJ2-7)
CSSLGDREQYF

SEQ ID NO: 547379 - protein, 12 aa, Homo sapiens
  CDR3 for alpha chain variable domain of TCR clone 273690 (TRAV13-1, TRAJ53)
AASGGSNYKLTF

SEQ ID NO: 547380 - protein, 18 aa, Homo sapiens
  CDR3 for beta chain variable domain of TCR clone 273690 (TRBV12-4, TRBJ2-2)
CASSLVAGTRGRTGELFF

SEQ ID NO: 547381 - protein, 11 aa, Homo sapiens
  CDR3 for alpha chain variable domain of TCR clone 273691 (TRAV2, TRAJ33)
CAVDSNYELIW

SEQ ID NO: 547382 - protein, 15 aa, Homo sapiens
  CDR3 for beta chain variable domain of TCR clone 273691 (TRBV19, TRBJ1-2)
CASSVGQVLNYGYTF

SEQ ID NO: 547383 - protein, 13 aa, Homo sapiens
  CDR3 for alpha chain variable domain of TCR clone 273692 (TRAV13-1, TRAJ33)
CAASRARNYQLIW

SEQ ID NO: 547384 - protein, 12 aa, Homo sapiens
  CDR3 for beta chain variable domain of TCR clone 273692 (TRBV11-2, TRBJ1-2)
CASSREGDGYTF

SEQ ID NO: 547385 - protein, 14 aa, Homo sapiens
  CDR3 for alpha chain variable domain of TCR clone 273693 (TRAV12-1, TRAJ18)
CVVSRGSTLGRLYF

SEQ ID NO: 547386 - protein, 15 aa, Homo sapiens
  CDR3 for beta chain variable domain of TCR clone 273693 (TRBV20-1, TRBJ2-7)
CSARDRVSGMDEQYF

SEQ ID NO: 547387 - protein, 19 aa, Homo sapiens
  CDR3 for alpha chain variable domain of TCR clone 273694 (TRAV3, TRAJ37)
CAVRDIVGGYPSNTAKLIF

SEQ ID NO: 547388 - protein, 15 aa, Homo sapiens
  CDR3 for beta chain variable domain of TCR clone 273694 (TRBV5-1, TRBJ2-3)
CASSVTSGSTDTQYF

SEQ ID NO: 547389 - protein, 11 aa, Homo sapiens
  CDR3 for alpha chain variable domain of TCR clone 273695 (TRAV12-2, TRAJ33)
CAVTSNYQLIW

SEQ ID NO: 547390 - protein, 14 aa, Homo sapiens
  CDR3 for beta chain variable domain of TCR clone 273695 (TRBV28, TRBJ2-2)
CASRIKSGTGELFF

SEQ ID NO: 547391 - protein, 15 aa, Homo sapiens
  CDR3 for alpha chain variable domain of TCR clone 273696 (TRAV4, TRAJ36)
CLVGSNWGKQPLLWD

SEQ ID NO: 547392 - protein, 15 aa, Homo sapiens
  CDR3 for beta chain variable domain of TCR clone 273696 (TRBV11-2, TRBJ2-1)
CASSSPSTRYNGQFF

SEQ ID NO: 547393 - protein, 11 aa, Homo sapiens
  CDR3 for alpha chain variable domain of TCR clone 273697 (TRAV21, TRAJ34)
CALDNTDKLIF

SEQ ID NO: 547394 - protein, 13 aa, Homo sapiens
  CDR3 for beta chain variable domain of TCR clone 273697 (TRBV7-6, TRBJ1-2)
CASSLVADYGYTF

SEQ ID NO: 547395 - protein, 18 aa, Homo sapiens
  CDR3 for alpha chain variable domain of TCR clone 273698 (TRAV21, TRAJ52)
CAVRPSPAGGTSYGKLTF

SEQ ID NO: 547396 - protein, 12 aa, Homo sapiens
  CDR3 for beta chain variable domain of TCR clone 273698 (TRBV11-2, TRBJ2-2)
SASSLGGGELFF

SEQ ID NO: 547397 - protein, 12 aa, Homo sapiens
  CDR3 for alpha chain variable domain of TCR clone 273699 (TRAV30, TRAJ43)
CGTEERGNDMRF

SEQ ID NO: 547398 - protein, 13 aa, Homo sapiens
  CDR3 for beta chain variable domain of TCR clone 273699 (TRBV12-4, TRBJ1-2)
CASSSGSKDGYTV

SEQ ID NO: 547399 - protein, 15 aa, Homo sapiens
  CDR3 for alpha chain variable domain of TCR clone 273700 (TRAV3, TRAJ22)
CAVRDRGGFARKLTF

SEQ ID NO: 547400 - protein, 16 aa, Homo sapiens
  CDR3 for beta chain variable domain of TCR clone 273700 (TRBV5-4, TRBJ2-3)
CASQQPGAGGADTQYF

SEQ ID NO: 547401 - protein, 13 aa, Homo sapiens
  CDR3 for alpha chain variable domain of TCR clone 273701 (TRAV8-3, TRAJ28)
CAVGAVWSYQLTF

SEQ ID NO: 547402 - protein, 17 aa, Homo sapiens
  CDR3 for beta chain variable domain of TCR clone 273701 (TRBV11-2, TRBJ2-1)
CASSLYPPGVEYNEQFF

SEQ ID NO: 547403 - protein, 14 aa, Homo sapiens
  CDR3 for alpha chain variable domain of TCR clone 273702 (TRAV12-1, TRAJ22)
CVVTTSGSARQLTF

SEQ ID NO: 547404 - protein, 18 aa, Homo sapiens
  CDR3 for beta chain variable domain of TCR clone 273702 (TRBV7-9, TRBJ2-7)
CASSLTTSGSRTWYEQYF

SEQ ID NO: 547405 - protein, 12 aa, Homo sapiens
  CDR3 for alpha chain variable domain of TCR clone 273703 (TRAV13-2, TRAJ23)
CAERHRGGKLIF

SEQ ID NO: 547406 - protein, 13 aa, Homo sapiens
  CDR3 for beta chain variable domain of TCR clone 273703 (TRBV7-3, TRBJ1-1)
CASSQDWGAEAYF

SEQ ID NO: 547407 - protein, 23 aa, Homo sapiens
  CDR3 for alpha chain variable domain of TCR clone 273704 (TRAV26-1, TRAJ38)
VIADNAGNNHIQNPDPAVYQLRD

SEQ ID NO: 547408 - protein, 17 aa, Homo sapiens
  CDR3 for beta chain variable domain of TCR clone 273704 (TRBV11-2, TRBJ2-6)
CASSQRDIFSGANVLTF

SEQ ID NO: 547409 - protein, 15 aa, Homo sapiens
  CDR3 for alpha chain variable domain of TCR clone 273705 (TRAV8-3, TRAJ23)
CAVGDRYNQGGKLIF

SEQ ID NO: 547410 - protein, 14 aa, Homo sapiens
  CDR3 for beta chain variable domain of TCR clone 273705 (TRBV19, TRBJ2-1)
CASGKSTQYNEQFF

SEQ ID NO: 547411 - protein, 14 aa, Homo sapiens
  CDR3 for alpha chain variable domain of TCR clone 273706 (TRAV2, TRAJ21)
CAVEDLNNSNKFYF

SEQ ID NO: 547412 - protein, 11 aa, Homo sapiens
  CDR3 for beta chain variable domain of TCR clone 273706 (TRBV10-3, TRBJ2-1)
CAIGDRGLQFF

SEQ ID NO: 547413 - protein, 13 aa, Homo sapiens
  CDR3 for alpha chain variable domain of TCR clone 273707 (TRAV12-2, TRAJ20)
CAEYPSNDYKLSF

SEQ ID NO: 547414 - protein, 13 aa, Homo sapiens
  CDR3 for beta chain variable domain of TCR clone 273707 (TRBV7-3, TRBJ2-1)
CASSLDSYNEQFF

SEQ ID NO: 547415 - protein, 15 aa, Homo sapiens
  CDR3 for alpha chain variable domain of TCR clone 273708 (TRAV12-3, TRAJ6)
CAMSAASGGSYIPTF

SEQ ID NO: 547416 - protein, 14 aa, Homo sapiens
  CDR3 for beta chain variable domain of TCR clone 273708 (TRBV13, TRBJ2-7)
CASSLKGASYEQYF

SEQ ID NO: 547417 - protein, 13 aa, Homo sapiens
  CDR3 for alpha chain variable domain of TCR clone 273709 (TRAV30, TRAJ16)
CGTFGGDGQKLLF

SEQ ID NO: 547418 - protein, 13 aa, Homo sapiens
  CDR3 for beta chain variable domain of TCR clone 273709 (TRBV7-3, TRBJ2-1)
CASSLGSYNEQFF

SEQ ID NO: 547419 - protein, 13 aa, Homo sapiens
  CDR3 for alpha chain variable domain of TCR clone 273710 (TRAV2, TRAJ24)
CAVTTDSWGKLRF

SEQ ID NO: 547420 - protein, 14 aa, Homo sapiens
  CDR3 for beta chain variable domain of TCR clone 273710 (TRBV13, TRBJ2-5)
CASSLGRGQETQYF

SEQ ID NO: 547421 - protein, 13 aa, Homo sapiens
  CDR3 for alpha chain variable domain of TCR clone 273711 (TRAV12-1, TRAJ11)
CVVSGGGYSTLTF

SEQ ID NO: 547422 - protein, 13 aa, Homo sapiens
  CDR3 for beta chain variable domain of TCR clone 273711 (TRBV7-2, TRBJ2-7)
CASSSPSGSEQYF

SEQ ID NO: 547423 - protein, 12 aa, Homo sapiens
  CDR3 for alpha chain variable domain of TCR clone 273712 (TRAV13-2, TRAJ23)
CAERHRGGKLIF

SEQ ID NO: 547424 - protein, 15 aa, Homo sapiens
  CDR3 for beta chain variable domain of TCR clone 273712 (TRBV20-1, TRBJ1-4)
SAPGQGLLTNEKLFF

SEQ ID NO: 547425 - protein, 11 aa, Homo sapiens
  CDR3 for alpha chain variable domain of TCR clone 273713 (TRAV3, TRAJ21)
CAMGTFNKFYF

SEQ ID NO: 547426 - protein, 16 aa, Homo sapiens
  CDR3 for beta chain variable domain of TCR clone 273713 (TRBV19, TRBJ2-1)
CASSKAGPSSYNEQFF

SEQ ID NO: 547427 - protein, 13 aa, Homo sapiens
  CDR3 for alpha chain variable domain of TCR clone 273714 (TRAV3, TRAJ21)
CAVRETDFNKFYF

SEQ ID NO: 547428 - protein, 14 aa, Homo sapiens
  CDR3 for beta chain variable domain of TCR clone 273714 (TRBV20-1, TRBJ2-3)
CSARGGTSTDTQYF

SEQ ID NO: 547429 - protein, 15 aa, Homo sapiens
  CDR3 for alpha chain variable domain of TCR clone 273715 (TRAV21, TRAJ13)
CAVRPTSGGYQKVTF

SEQ ID NO: 547430 - protein, 16 aa, Homo sapiens
  CDR3 for beta chain variable domain of TCR clone 273715 (TRBV12-4, TRBJ2-5)
CASSFFVRGRQETQYF

SEQ ID NO: 547431 - protein, 12 aa, Homo sapiens
  CDR3 for alpha chain variable domain of TCR clone 273716 (TRAV5, TRAJ27)
CAEITNAGNSTF

SEQ ID NO: 547432 - protein, 15 aa, Homo sapiens
  CDR3 for beta chain variable domain of TCR clone 273716 (TRBV11-2, TRBJ1-2)
CASSLEGVQRNGYTF

SEQ ID NO: 547433 - protein, 22 aa, Homo sapiens
  CDR3 for alpha chain variable domain of TCR clone 273717 (TRAV26-1, )
CIVRPLNAGNNNIQNPDPAVYQ

SEQ ID NO: 547434 - protein, 13 aa, Homo sapiens
  CDR3 for beta chain variable domain of TCR clone 273717 (TRBV18, TRBJ1-1)
CASSPNGDTEAFF

SEQ ID NO: 547435 - protein, 14 aa, Homo sapiens
  CDR3 for alpha chain variable domain of TCR clone 273718 (TRAV1-2, TRAJ16)
CAVNRFSDGQQLLF

SEQ ID NO: 547436 - protein, 15 aa, Homo sapiens
  CDR3 for beta chain variable domain of TCR clone 273718 (TRBV11-3, TRBJ2-3)
CASLKDGREGDTQYF

SEQ ID NO: 547437 - protein, 21 aa, Homo sapiens
  CDR3 for alpha chain variable domain of TCR clone 273719 (TRAV36/DV7, TRAJ39)
TATQTGDSAIYLPNAGNMLTF

SEQ ID NO: 547438 - protein, 16 aa, Homo sapiens
  CDR3 for beta chain variable domain of TCR clone 273719 (TRBV4-1, TRBJ2-3)
CASSQSTSGAEDTQYF

SEQ ID NO: 547439 - protein, 11 aa, Homo sapiens
  CDR3 for alpha chain variable domain of TCR clone 273720 (TRAV1-1, TRAJ23)
CAVRQGGKLIF

SEQ ID NO: 547440 - protein, 17 aa, Homo sapiens
  CDR3 for beta chain variable domain of TCR clone 273720 (TRBV20-1, TRBJ1-5)
CSARDPSAQGFNQPQHF

SEQ ID NO: 547441 - protein, 13 aa, Homo sapiens
  CDR3 for alpha chain variable domain of TCR clone 273721 (TRAV26-1, TRAJ30)
CIVRVESNDKTIF

SEQ ID NO: 547442 - protein, 15 aa, Homo sapiens
  CDR3 for beta chain variable domain of TCR clone 273721 (TRBV6-1, TRBJ2-3)
CASSERGGITDTQYF

SEQ ID NO: 547443 - protein, 16 aa, Homo sapiens
  CDR3 for alpha chain variable domain of TCR clone 273722 (TRAV26-2, TRAJ13)
CILRRRGSGGYQKVTF

SEQ ID NO: 547444 - protein, 13 aa, Homo sapiens
  CDR3 for beta chain variable domain of TCR clone 273722 (TRBV10-3, TRBJ2-7)
CASKLAVNYEQYF

SEQ ID NO: 547445 - protein, 13 aa, Homo sapiens
  CDR3 for alpha chain variable domain of TCR clone 273723 (TRAV1-2, TRAJ12)
CAASMDSSYKLIF

SEQ ID NO: 547446 - protein, 15 aa, Homo sapiens
  CDR3 for beta chain variable domain of TCR clone 273723 (TRBV6-1, TRBJ2-1)
CASSELRGQYNEQFF

SEQ ID NO: 547447 - protein, 15 aa, Homo sapiens
  CDR3 for alpha chain variable domain of TCR clone 273724 (TRAV16, TRAJ12)
CSKWPLRDSSYKLIF

SEQ ID NO: 547448 - protein, 16 aa, Homo sapiens
  CDR3 for beta chain variable domain of TCR clone 273724 (TRBV19, TRBJ2-2)
CASRSPGTGATGELFF

SEQ ID NO: 547449 - protein, 17 aa, Homo sapiens
  CDR3 for alpha chain variable domain of TCR clone 273725 (TRAV26-2, TRAJ42)
CILSDESYGGSQGNLIF

SEQ ID NO: 547450 - protein, 15 aa, Homo sapiens
  CDR3 for beta chain variable domain of TCR clone 273725 (TRBV6-6, TRBJ2-7)
CASSYSYGGSYEQYF

SEQ ID NO: 547451 - protein, 11 aa, Homo sapiens
  CDR3 for alpha chain variable domain of TCR clone 273726 (TRAV21, TRAJ11)
CAVNGYSTLTF

SEQ ID NO: 547452 - protein, 14 aa, Homo sapiens
  CDR3 for beta chain variable domain of TCR clone 273726 (TRBV7-6, TRBJ2-1)
CASSLGGGADEQFF

SEQ ID NO: 547453 - protein, 10 aa, Homo sapiens
  CDR3 for alpha chain variable domain of TCR clone 273727 (TRAV2, TRAJ15)
RSQAGTALIF

SEQ ID NO: 547454 - protein, 13 aa, Homo sapiens
  CDR3 for beta chain variable domain of TCR clone 273727 (TRBV10-3, TRBJ2-7)
CASKLAVNYEQYF

SEQ ID NO: 547455 - protein, 13 aa, Homo sapiens
  CDR3 for alpha chain variable domain of TCR clone 273728 (TRAV27, TRAJ54)
CAVAGQGPQKLEF

SEQ ID NO: 547456 - protein, 15 aa, Homo sapiens
  CDR3 for beta chain variable domain of TCR clone 273728 (TRBV18, TRBJ2-6)
CASSPSYAGANVLTF

SEQ ID NO: 547457 - protein, 12 aa, Homo sapiens
  CDR3 for alpha chain variable domain of TCR clone 273729 (TRAV12-3, TRAJ17)
CAMTLTGNKLTV

SEQ ID NO: 547458 - protein, 14 aa, Homo sapiens
  CDR3 for beta chain variable domain of TCR clone 273729 (TRBV4-1, TRBJ2-7)
CASSQDREHVEQYF

SEQ ID NO: 547459 - protein, 12 aa, Homo sapiens
  CDR3 for alpha chain variable domain of TCR clone 273730 (TRAV12-3, TRAJ17)
RAMTLTGNKLTF

SEQ ID NO: 547460 - protein, 15 aa, Homo sapiens
  CDR3 for beta chain variable domain of TCR clone 273730 (TRBV20-1, TRBJ2-7)
CSASDRVSGMDEQYF

SEQ ID NO: 547461 - protein, 14 aa, Homo sapiens
  CDR3 for alpha chain variable domain of TCR clone 273731 (TRAV4, TRAJ34)
CLVGVGYNTDKLIF

SEQ ID NO: 547462 - protein, 12 aa, Homo sapiens
  CDR3 for beta chain variable domain of TCR clone 273731 (TRBV7-8, TRBJ2-7)
CASSLGDREQYF

SEQ ID NO: 547463 - protein, 16 aa, Homo sapiens
  CDR3 for alpha chain variable domain of TCR clone 273732 (TRAV8-6, TRAJ4)
CAVSPTFSVGYNKLIF

SEQ ID NO: 547464 - protein, 14 aa, Homo sapiens
  CDR3 for beta chain variable domain of TCR clone 273732 (TRBV29-1, TRBJ2-2)
CSVVTSGAPGKLFF

SEQ ID NO: 547465 - protein, 16 aa, Homo sapiens
  CDR3 for alpha chain variable domain of TCR clone 273733 (TRAV3, TRAJ10)
CAVRDMRAGGGNKLTF

SEQ ID NO: 547466 - protein, 16 aa, Homo sapiens
  CDR3 for beta chain variable domain of TCR clone 273733 (TRBV6-1, TRBJ2-5)
CASSETLGRGAETQYF

SEQ ID NO: 547467 - protein, 11 aa, Homo sapiens
  CDR3 for alpha chain variable domain of TCR clone 273734 (TRAV13-1, TRAJ24)
CAASGWGKLQF

SEQ ID NO: 547468 - protein, 16 aa, Homo sapiens
  CDR3 for beta chain variable domain of TCR clone 273734 (TRBV29-1, TRBJ2-7)
CSVEDAEDGTAYEQYF

SEQ ID NO: 547469 - protein, 15 aa, Homo sapiens
  CDR3 for alpha chain variable domain of TCR clone 273735 (TRAV12-3, TRAJ52)
CNGGAGGTSYGKLTL

SEQ ID NO: 547470 - protein, 13 aa, Homo sapiens
  CDR3 for beta chain variable domain of TCR clone 273735 (TRBV20-1, TRBJ2-5)
CSARGDYQETQYF

SEQ ID NO: 547471 - protein, 13 aa, Homo sapiens
  CDR3 for alpha chain variable domain of TCR clone 273736 (TRAV21, TRAJ27)
CAARPGNAGKSTF

SEQ ID NO: 547472 - protein, 16 aa, Homo sapiens
  CDR3 for beta chain variable domain of TCR clone 273736 (TRBV20-1, TRBJ1-2)
CSASMGQGVANFGYTF

SEQ ID NO: 547473 - protein, 16 aa, Homo sapiens
  CDR3 for alpha chain variable domain of TCR clone 273737 (TRAV12-3, TRAJ50)
CAMRDPMKTSYDKVIF

SEQ ID NO: 547474 - protein, 13 aa, Homo sapiens
  CDR3 for beta chain variable domain of TCR clone 273737 (TRBV4-1, TRBJ2-3)
CASSLDCTDTQYF

SEQ ID NO: 547475 - protein, 14 aa, Homo sapiens
  CDR3 for alpha chain variable domain of TCR clone 273738 (TRAV3, TRAJ21)
WAVESQANFNKFYF

SEQ ID NO: 547476 - protein, 12 aa, Homo sapiens
  CDR3 for beta chain variable domain of TCR clone 273738 (TRBV6-3, TRBJ2-7)
CASSLTPYEQYF

SEQ ID NO: 547477 - protein, 14 aa, Homo sapiens
  CDR3 for alpha chain variable domain of TCR clone 273739 (TRAV13-1, TRAJ35)
CAASKGGFGKGLHC

SEQ ID NO: 547478 - protein, 13 aa, Homo sapiens
  CDR3 for beta chain variable domain of TCR clone 273739 (TRBV7-3, TRBJ1-1)
CASSQDWGAEAFF

SEQ ID NO: 547479 - protein, 13 aa, Homo sapiens
  CDR3 for alpha chain variable domain of TCR clone 273740 (TRAV21, TRAJ27)
CAARPGNAGKSTF

SEQ ID NO: 547480 - protein, 13 aa, Homo sapiens
  CDR3 for beta chain variable domain of TCR clone 273740 (TRBV18, TRBJ2-7)
CTSQSGGGYEQYF

SEQ ID NO: 547481 - protein, 14 aa, Homo sapiens
  CDR3 for alpha chain variable domain of TCR clone 273741 (TRAV12-3, TRAJ10)
SHLPLTGGGNKLTF

SEQ ID NO: 547482 - protein, 13 aa, Homo sapiens
  CDR3 for beta chain variable domain of TCR clone 273741 (TRBV4-3, TRBJ2-3)
CASSQGYTDTQYF

SEQ ID NO: 547483 - protein, 13 aa, Homo sapiens
  CDR3 for alpha chain variable domain of TCR clone 273742 (TRAV21, TRAJ8)
CAAPNTGFQTLVF

SEQ ID NO: 547484 - protein, 13 aa, Homo sapiens
  CDR3 for beta chain variable domain of TCR clone 273742 (TRBV6-3, TRBJ2-3)
CASTLQGIDTQYF

SEQ ID NO: 547485 - protein, 21 aa, Homo sapiens
  CDR3 for alpha chain variable domain of TCR clone 273743 (TRAV12-1, TRAJ32)
SSVIQPPTSMNYGGATNKLIF

SEQ ID NO: 547486 - protein, 15 aa, Homo sapiens
  CDR3 for beta chain variable domain of TCR clone 273743 (TRBV7-9, TRBJ2-2)
FASGPLDTFPGELFF

SEQ ID NO: 547487 - protein, 14 aa, Homo sapiens
  CDR3 for alpha chain variable domain of TCR clone 273744 (TRAV12-2, TRAJ17)
CAVLFKAAGNKLTF

SEQ ID NO: 547488 - protein, 14 aa, Homo sapiens
  CDR3 for beta chain variable domain of TCR clone 273744 (TRBV7-3, TRBJ2-7)
CASRSQGAAYEQYF

SEQ ID NO: 547489 - protein, 10 aa, Homo sapiens
  CDR3 for alpha chain variable domain of TCR clone 273745 (TRAV8-4, TRAJ43)
CAVSADDSRF

SEQ ID NO: 547490 - protein, 13 aa, Homo sapiens
  CDR3 for beta chain variable domain of TCR clone 273745 (TRBV12-4, TRBJ2-5)
CASSPGTEETQYF

SEQ ID NO: 547491 - protein, 13 aa, Homo sapiens
  CDR3 for alpha chain variable domain of TCR clone 273746 (TRAV27, TRAJ49)
CAPRPYTGNQFYF

SEQ ID NO: 547492 - protein, 14 aa, Homo sapiens
  CDR3 for beta chain variable domain of TCR clone 273746 (TRBV19, TRBJ2-5)
CASSMTGQQETQYF

SEQ ID NO: 547493 - protein, 13 aa, Homo sapiens
  CDR3 for alpha chain variable domain of TCR clone 273747 (TRAV8-3, TRAJ36)
CAVGATGANNPFF

SEQ ID NO: 547494 - protein, 13 aa, Homo sapiens
  CDR3 for beta chain variable domain of TCR clone 273747 (TRBV12-4, TRBJ1-2)
CASSLRQGKGCTF

SEQ ID NO: 547495 - protein, 15 aa, Homo sapiens
  CDR3 for alpha chain variable domain of TCR clone 273748 (TRAV12-3, TRAJ42)
CAMSGHGGSQGNLIF

SEQ ID NO: 547496 - protein, 14 aa, Homo sapiens
  CDR3 for beta chain variable domain of TCR clone 273748 (TRBV6-1, TRBJ1-3)
CASVQGGGGNTIYF

SEQ ID NO: 547497 - protein, 13 aa, Homo sapiens
  CDR3 for alpha chain variable domain of TCR clone 273749 (TRAV2, TRAJ40)
CAVVTPGTYKYIF

SEQ ID NO: 547498 - protein, 14 aa, Homo sapiens
  CDR3 for beta chain variable domain of TCR clone 273749 (TRBV19, TRBJ2-1)
CASPTFVLSGDQFF

SEQ ID NO: 547499 - protein, 11 aa, Homo sapiens
  CDR3 for alpha chain variable domain of TCR clone 273750 (TRAV12-1, TRAJ21)
CVVNNFNKFYF

SEQ ID NO: 547500 - protein, 17 aa, Homo sapiens
  CDR3 for beta chain variable domain of TCR clone 273750 (TRBV7-8, TRBJ2-1)
CASSPPTGTLAYNQQFF

SEQ ID NO: 547501 - protein, 15 aa, Homo sapiens
  CDR3 for alpha chain variable domain of TCR clone 273751 (TRAV3, TRAJ22)
CAVIDRGGSARQLTF

SEQ ID NO: 547502 - protein, 13 aa, Homo sapiens
  CDR3 for beta chain variable domain of TCR clone 273751 (TRBV7-9, TRBJ1-2)
CASSLKQNYGYTF

SEQ ID NO: 547503 - protein, 15 aa, Homo sapiens
  CDR3 for alpha chain variable domain of TCR clone 273752 (TRAV13-1, TRAJ17)
CAASIERAAGNKLTF

SEQ ID NO: 547504 - protein, 15 aa, Homo sapiens
  CDR3 for beta chain variable domain of TCR clone 273752 (TRBV7-9, TRBJ1-6)
CASSSPGRGNSPLHF

SEQ ID NO: 547505 - protein, 14 aa, Homo sapiens
  CDR3 for alpha chain variable domain of TCR clone 273753 (TRAV1-2, TRAJ16)
CAVNRFSDGQKLLC

SEQ ID NO: 547506 - protein, 13 aa, Homo sapiens
  CDR3 for beta chain variable domain of TCR clone 273753 (TRBV7-9, TRBJ1-2)
CASSLKQNYGYTF

SEQ ID NO: 547507 - protein, 12 aa, Homo sapiens
  CDR3 for alpha chain variable domain of TCR clone 273754 (TRAV35, TRAJ34)
CAVVTPGDKLIF

SEQ ID NO: 547508 - protein, 11 aa, Homo sapiens
  CDR3 for beta chain variable domain of TCR clone 273754 (TRBV11-2, TRBJ2-1)
CASSFLDEQFF

SEQ ID NO: 547509 - protein, 12 aa, Homo sapiens
  CDR3 for alpha chain variable domain of TCR clone 273755 (TRAV3, TRAJ20)
CAVRDPDYRLSF

SEQ ID NO: 547510 - protein, 14 aa, Homo sapiens
  CDR3 for beta chain variable domain of TCR clone 273755 (TRBV5-4, TRBJ1-1)
CASSLDSRRDEAFF

SEQ ID NO: 547511 - protein, 15 aa, Homo sapiens
  CDR3 for alpha chain variable domain of TCR clone 273756 (TRAV12-2, TRAJ50)
CAVNGLETSYDKVIF

SEQ ID NO: 547512 - protein, 12 aa, Homo sapiens
  CDR3 for beta chain variable domain of TCR clone 273756 (TRBV12-4, TRBJ2-1)
CANSLVRVEQFF

SEQ ID NO: 547513 - protein, 14 aa, Homo sapiens
  CDR3 for alpha chain variable domain of TCR clone 273757 (TRAV17, TRAJ57)
CAKDPQGGSEKLVF

SEQ ID NO: 547514 - protein, 18 aa, Homo sapiens
  CDR3 for beta chain variable domain of TCR clone 273757 (TRBV6-6, TRBJ1-3)
CASSYSKWDSISGNTIHF

SEQ ID NO: 547515 - protein, 17 aa, Homo sapiens
  CDR3 for alpha chain variable domain of TCR clone 273758 (TRAV3, TRAJ42)
CALRGRDYGGSQGNLIF

SEQ ID NO: 547516 - protein, 14 aa, Homo sapiens
  CDR3 for beta chain variable domain of TCR clone 273758 (TRBV5-4, TRBJ1-1)
CASSLDSRRDEAFF

SEQ ID NO: 547517 - protein, 14 aa, Homo sapiens
  CDR3 for alpha chain variable domain of TCR clone 273759 (TRAV8-4, TRAJ48)
CAVRETFGNAKLTF

SEQ ID NO: 547518 - protein, 14 aa, Homo sapiens
  CDR3 for beta chain variable domain of TCR clone 273759 (TRBV13, TRBJ2-7)
CASSLKGASYEQYF

SEQ ID NO: 547519 - protein, 15 aa, Homo sapiens
  CDR3 for alpha chain variable domain of TCR clone 273760 (TRAV8-2, TRAJ28)
CVVSESGAGSYQLTF

SEQ ID NO: 547520 - protein, 15 aa, Homo sapiens
  CDR3 for beta chain variable domain of TCR clone 273760 (TRBV5-1, TRBJ2-7)
CASSLNGGPAREQYF

SEQ ID NO: 547521 - protein, 16 aa, Homo sapiens
  CDR3 for alpha chain variable domain of TCR clone 273761 (TRAV1-2, TRAJ10)
CAVRGVLTGGGNKLTF

SEQ ID NO: 547522 - protein, 15 aa, Homo sapiens
  CDR3 for beta chain variable domain of TCR clone 273761 (TRBV28, TRBJ2-7)
CASSPGGRGFYEQYF

SEQ ID NO: 547523 - protein, 14 aa, Homo sapiens
  CDR3 for alpha chain variable domain of TCR clone 273762 (TRAV17, TRAJ11)
CATDGSSGYSTLTF

SEQ ID NO: 547524 - protein, 14 aa, Homo sapiens
  CDR3 for beta chain variable domain of TCR clone 273762 (TRBV12-5, TRBJ2-5)
CASGSRTHQETQYF

SEQ ID NO: 547525 - protein, 15 aa, Homo sapiens
  CDR3 for alpha chain variable domain of TCR clone 273763 (TRAV25, TRAJ10)
CAGPLLTGGGNKLTF

SEQ ID NO: 547526 - protein, 14 aa, Homo sapiens
  CDR3 for beta chain variable domain of TCR clone 273763 (TRBV19, TRBJ2-1)
CASPTFVLSGEQFF

SEQ ID NO: 547527 - protein, 18 aa, Homo sapiens
  CDR3 for alpha chain variable domain of TCR clone 273764 (TRAV13-1, TRAJ52)
CAARNPNAGGTSDGKLTF

SEQ ID NO: 547528 - protein, 15 aa, Homo sapiens
  CDR3 for beta chain variable domain of TCR clone 273764 (TRBV6-1, TRBJ2-3)
CASSERGGITDTQYF

SEQ ID NO: 547529 - protein, 12 aa, Homo sapiens
  CDR3 for alpha chain variable domain of TCR clone 273765 (TRAV21, TRAJ33)
CAKMDSNYQLIW

SEQ ID NO: 547530 - protein, 13 aa, Homo sapiens
  CDR3 for beta chain variable domain of TCR clone 273765 (TRBV7-7, TRBJ2-2)
CASSLTSAGELFF

SEQ ID NO: 547531 - protein, 14 aa, Homo sapiens
  CDR3 for alpha chain variable domain of TCR clone 273766 (TRAV1-2, TRAJ27)
CAPAEYTTAGKSTF

SEQ ID NO: 547532 - protein, 18 aa, Homo sapiens
  CDR3 for beta chain variable domain of TCR clone 273766 (TRBV28, TRBJ1-2)
CASRQQQGKRGSNYGYTF

SEQ ID NO: 547533 - protein, 14 aa, Homo sapiens
  CDR3 for alpha chain variable domain of TCR clone 273767 (TRAV12-3, TRAJ58)
CPMSTETSGSRLTF

SEQ ID NO: 547534 - protein, 15 aa, Homo sapiens
  CDR3 for beta chain variable domain of TCR clone 273767 (TRBV11-3, TRBJ2-3)
CASLKDGREGDTQYF

SEQ ID NO: 547535 - protein, 18 aa, Homo sapiens
  CDR3 for alpha chain variable domain of TCR clone 273768 (TRAV26-1, TRAJ23)
CIVRVGLEGWNQGGKLIF

SEQ ID NO: 547536 - protein, 16 aa, Homo sapiens
  CDR3 for beta chain variable domain of TCR clone 273768 (TRBV12-4, TRBJ2-5)
CASSFFVRGRQETQYV

SEQ ID NO: 547537 - protein, 14 aa, Homo sapiens
  CDR3 for alpha chain variable domain of TCR clone 273769 (TRAV26-1, TRAJ38)
CIADNAGNNRKLIW

SEQ ID NO: 547538 - protein, 14 aa, Homo sapiens
  CDR3 for beta chain variable domain of TCR clone 273769 (TRBV6-1, TRBJ1-3)
CASVQGGGGNTIYF

SEQ ID NO: 547539 - protein, 15 aa, Homo sapiens
  CDR3 for alpha chain variable domain of TCR clone 273770 (TRAV21, TRAJ53)
CATLNSGGSNYKLTF

SEQ ID NO: 547540 - protein, 13 aa, Homo sapiens
  CDR3 for beta chain variable domain of TCR clone 273770 (TRBV29-1, TRBJ2-5)
CSACSSRRETQYF

SEQ ID NO: 547541 - protein, 15 aa, Homo sapiens
  CDR3 for alpha chain variable domain of TCR clone 273771 (TRAV25, TRAJ53)
CAATGGGGSNYKLTL

SEQ ID NO: 547542 - protein, 15 aa, Homo sapiens
  CDR3 for beta chain variable domain of TCR clone 273771 (TRBV20-1, TRBJ2-7)
CSARDRVSGMDEQYF

SEQ ID NO: 547543 - protein, 16 aa, Homo sapiens
  CDR3 for alpha chain variable domain of TCR clone 273772 (TRAV1-1, TRAJ28)
CAVRDDSGAGSYQLTF

SEQ ID NO: 547544 - protein, 15 aa, Homo sapiens
  CDR3 for beta chain variable domain of TCR clone 273772 (TRBV7-3, TRBJ1-1)
CASSLIRQGETEAFF

SEQ ID NO: 547545 - protein, 14 aa, Homo sapiens
  CDR3 for alpha chain variable domain of TCR clone 273773 (TRAV26-1, TRAJ39)
CIVRGSRAGNILTF

SEQ ID NO: 547546 - protein, 12 aa, Homo sapiens
  CDR3 for beta chain variable domain of TCR clone 273773 (TRBV11-2, TRBJ2-2)
CASSLGGGELFF

SEQ ID NO: 547547 - protein, 14 aa, Homo sapiens
  CDR3 for alpha chain variable domain of TCR clone 273774 (TRAV29/DV5, TRAJ44)
CAAFLVGPASKLLF

SEQ ID NO: 547548 - protein, 15 aa, Homo sapiens
  CDR3 for beta chain variable domain of TCR clone 273774 (TRBV7-3, TRBJ2-2)
CASSETGQGTGELFF

SEQ ID NO: 547549 - protein, 12 aa, Homo sapiens
  CDR3 for alpha chain variable domain of TCR clone 273775 (TRAV35, TRAJ49)
CAGWNTGNQFYF

SEQ ID NO: 547550 - protein, 17 aa, Homo sapiens
  CDR3 for beta chain variable domain of TCR clone 273775 (TRBV11-2, TRBJ2-1)
CASSLYPPGVEYNEQFF

SEQ ID NO: 547551 - protein, 14 aa, Homo sapiens
  CDR3 for alpha chain variable domain of TCR clone 273776 (TRAV13-1, TRAJ29)
CAASSNSGNTPLVF

SEQ ID NO: 547552 - protein, 15 aa, Homo sapiens
  CDR3 for beta chain variable domain of TCR clone 273776 (TRBV7-9, TRBJ1-6)
CASSSPGRGNSPLHF

SEQ ID NO: 547553 - protein, 13 aa, Homo sapiens
  CDR3 for alpha chain variable domain of TCR clone 273777 (TRAV21, TRAJ56)
CAVRTGANSKLKF

SEQ ID NO: 547554 - protein, 15 aa, Homo sapiens
  CDR3 for beta chain variable domain of TCR clone 273777 (TRBV7-9, TRBJ1-1)
CASSHRGTVNTEAFF

SEQ ID NO: 547555 - protein, 18 aa, Homo sapiens
  CDR3 for alpha chain variable domain of TCR clone 273778 (TRAV12-1, TRAJ52)
CVVKLINAGGTSYGKLTF

SEQ ID NO: 547556 - protein, 14 aa, Homo sapiens
  CDR3 for beta chain variable domain of TCR clone 273778 (TRBV16, TRBJ1-1)
CASSQAGPNTEAFF

SEQ ID NO: 547557 - protein, 16 aa, Homo sapiens
  CDR3 for alpha chain variable domain of TCR clone 273779 (TRAV3, TRAJ10)
CAVRDMRAGGGNKLTL

SEQ ID NO: 547558 - protein, 14 aa, Homo sapiens
  CDR3 for beta chain variable domain of TCR clone 273779 (TRBV25-1, TRBJ1-1)
CVSTHLGGNTEAFF

SEQ ID NO: 547559 - protein, 12 aa, Homo sapiens
  CDR3 for alpha chain variable domain of TCR clone 273780 (TRAV12-3, TRAJ20)
CAMVRGDYKLSF

SEQ ID NO: 547560 - protein, 15 aa, Homo sapiens
  CDR3 for beta chain variable domain of TCR clone 273780 (TRBV18, TRBJ2-3)
CASSPPGRSTDTQYF

SEQ ID NO: 547561 - protein, 17 aa, Homo sapiens
  CDR3 for alpha chain variable domain of TCR clone 273781 (TRAV13-1, TRAJ31)
CAPRDRLMFGDGTQLVV

SEQ ID NO: 547562 - protein, 17 aa, Homo sapiens
  CDR3 for beta chain variable domain of TCR clone 273781 (TRBV20-1, TRBJ2-1)
CSASSSGLAGSYNEQFF

SEQ ID NO: 547563 - protein, 18 aa, Homo sapiens
  CDR3 for alpha chain variable domain of TCR clone 273782 (TRAV21, TRAJ52)
CAVRPSPAGGTSYGKLTF

SEQ ID NO: 547564 - protein, 14 aa, Homo sapiens
  CDR3 for beta chain variable domain of TCR clone 273782 (TRBV15, TRBJ2-1)
CATSGVEDYNEQFF

SEQ ID NO: 547565 - protein, 15 aa, Homo sapiens
  CDR3 for alpha chain variable domain of TCR clone 273783 (TRAV26-1, TRAJ29)
CIVRVEGSGNTPLVF

SEQ ID NO: 547566 - protein, 14 aa, Homo sapiens
  CDR3 for beta chain variable domain of TCR clone 273783 (TRBV18, TRBJ2-5)
CASSPGVSQETQYF

SEQ ID NO: 547567 - protein, 13 aa, Homo sapiens
  CDR3 for alpha chain variable domain of TCR clone 273784 (TRAV8-6, TRAJ21)
CAVSPSSLNKFYF

SEQ ID NO: 547568 - protein, 17 aa, Homo sapiens
  CDR3 for beta chain variable domain of TCR clone 273784 (TRBV13, TRBJ2-3)
CASSLSRVAGGRNTQYF

SEQ ID NO: 547569 - protein, 14 aa, Homo sapiens
  CDR3 for alpha chain variable domain of TCR clone 273785 (TRAV26-1, TRAJ3)
CIVRVGSSASKIIF

SEQ ID NO: 547570 - protein, 14 aa, Homo sapiens
  CDR3 for beta chain variable domain of TCR clone 273785 (TRBV25-1, TRBJ1-1)
CASTHLGGNTEAFF

SEQ ID NO: 547571 - protein, 15 aa, Homo sapiens
  CDR3 for alpha chain variable domain of TCR clone 273786 (TRAV13-1, TRAJ37)
CAATDGSSKTGKLIF

SEQ ID NO: 547572 - protein, 17 aa, Homo sapiens
  CDR3 for beta chain variable domain of TCR clone 273786 (TRBV2, TRBJ2-3)
CASSAGLAGYIGDTQYF

SEQ ID NO: 547573 - protein, 15 aa, Homo sapiens
  CDR3 for alpha chain variable domain of TCR clone 273787 (TRAV12-1, TRAJ37)
CEVNLPTSNTGKLIF

SEQ ID NO: 547574 - protein, 16 aa, Homo sapiens
  CDR3 for beta chain variable domain of TCR clone 273787 (TRBV2, TRBJ2-1)
CASRSPAGGKYNEQFF

SEQ ID NO: 547575 - protein, 14 aa, Homo sapiens
  CDR3 for alpha chain variable domain of TCR clone 273788 (TRAV12-2, TRAJ17)
CAALFKAAGNKLTF

SEQ ID NO: 547576 - protein, 15 aa, Homo sapiens
  CDR3 for beta chain variable domain of TCR clone 273788 (TRBV12-4, TRBJ2-5)
CASSPPTGLQETQYF

SEQ ID NO: 547577 - protein, 15 aa, Homo sapiens
  CDR3 for alpha chain variable domain of TCR clone 273789 (TRAV26-1, TRAJ48)
CIVRVGDFGNEKLTF

SEQ ID NO: 547578 - protein, 16 aa, Homo sapiens
  CDR3 for beta chain variable domain of TCR clone 273789 (TRBV11-2, TRBJ1-1)
CASSLRQGGEHSKAFF

SEQ ID NO: 547579 - protein, 19 aa, Homo sapiens
  CDR3 for alpha chain variable domain of TCR clone 273790 (TRAV3, TRAJ37)
CAVRDIVGGYPSNTGNLIF

SEQ ID NO: 547580 - protein, 14 aa, Homo sapiens
  CDR3 for beta chain variable domain of TCR clone 273790 (TRBV7-8, TRBJ2-3)
CASSLEAGTDTQYF

SEQ ID NO: 547581 - protein, 15 aa, Homo sapiens
  CDR3 for alpha chain variable domain of TCR clone 273791 (TRAV17, TRAJ48)
CATDDTNFGNEKLTF

SEQ ID NO: 547582 - protein, 13 aa, Homo sapiens
  CDR3 for beta chain variable domain of TCR clone 273791 (TRBV12-4, TRBJ1-5)
CASSPDRAQPQHF

SEQ ID NO: 547583 - protein, 14 aa, Homo sapiens
  CDR3 for alpha chain variable domain of TCR clone 273792 (TRAV13-1, TRAJ3)
CAASKSSSASKIIF

SEQ ID NO: 547584 - protein, 11 aa, Homo sapiens
  CDR3 for beta chain variable domain of TCR clone 273792 (TRBV19, TRBJ1-1)
CVSSIGSEAFF

SEQ ID NO: 547585 - protein, 13 aa, Homo sapiens
  CDR3 for alpha chain variable domain of TCR clone 273793 (TRAV27, TRAJ41)
CAGEGNSGYALNF

SEQ ID NO: 547586 - protein, 13 aa, Homo sapiens
  CDR3 for beta chain variable domain of TCR clone 273793 (TRBV7-6, TRBJ1-3)
CASSSQQGNTIYF

SEQ ID NO: 547587 - protein, 16 aa, Homo sapiens
  CDR3 for alpha chain variable domain of TCR clone 273794 (TRAV30, TRAJ24)
CGPEIVDADSWGKFQF

SEQ ID NO: 547588 - protein, 15 aa, Homo sapiens
  CDR3 for beta chain variable domain of TCR clone 273794 (TRBV12-4, TRBJ2-2)
CASSPNDSGTGELFF

SEQ ID NO: 547589 - protein, 12 aa, Homo sapiens
  CDR3 for alpha chain variable domain of TCR clone 273795 (TRAV21, TRAJ11)
CAATSGYSTLTF

SEQ ID NO: 547590 - protein, 16 aa, Homo sapiens
  CDR3 for beta chain variable domain of TCR clone 273795 (TRBV20-1, TRBJ2-7)
CSGQSWRESASSTSGR

SEQ ID NO: 547591 - protein, 14 aa, Homo sapiens
  CDR3 for alpha chain variable domain of TCR clone 273796 (TRAV21, TRAJ45)
CAVVSGGGADELTV

SEQ ID NO: 547592 - protein, 14 aa, Homo sapiens
  CDR3 for beta chain variable domain of TCR clone 273796 (TRBV20-1, TRBJ2-3)
CSALGLEGADTQYF

SEQ ID NO: 547593 - protein, 16 aa, Homo sapiens
  CDR3 for alpha chain variable domain of TCR clone 273797 (TRAV12-2, TRAJ10)
CAANRVLTGGGNKLTF

SEQ ID NO: 547594 - protein, 12 aa, Homo sapiens
  CDR3 for beta chain variable domain of TCR clone 273797 (TRBV28, TRBJ2-7)
CASSFSSYEQYF

SEQ ID NO: 547595 - protein, 13 aa, Homo sapiens
  CDR3 for alpha chain variable domain of TCR clone 273798 (TRAV21, TRAJ27)
CAARPGTAGKSTF

SEQ ID NO: 547596 - protein, 14 aa, Homo sapiens
  CDR3 for beta chain variable domain of TCR clone 273798 (TRBV7-6, TRBJ2-3)
CASSLGTVKDTQYF

SEQ ID NO: 547597 - protein, 16 aa, Homo sapiens
  CDR3 for alpha chain variable domain of TCR clone 273799 (TRAV3, TRAJ37)
CAVRGKGSGNTGKLIF

SEQ ID NO: 547598 - protein, 13 aa, Homo sapiens
  CDR3 for beta chain variable domain of TCR clone 273799 (TRBV7-8, TRBJ2-2)
CASSHLFPGPTII

SEQ ID NO: 547599 - protein, 14 aa, Homo sapiens
  CDR3 for alpha chain variable domain of TCR clone 273800 (TRAV8-4, TRAJ34)
CAVSDPGDTVKLIF

SEQ ID NO: 547600 - protein, 15 aa, Homo sapiens
  CDR3 for beta chain variable domain of TCR clone 273800 (TRBV6-6, TRBJ1-1)
CASSPRGDVETEAFF

SEQ ID NO: 547601 - protein, 12 aa, Homo sapiens
  CDR3 for alpha chain variable domain of TCR clone 273801 (TRAV29/DV5, TRAJ36)
CAARRKTGANNL

SEQ ID NO: 547602 - protein, 13 aa, Homo sapiens
  CDR3 for beta chain variable domain of TCR clone 273801 (TRBV24-1, TRBJ2-2)
CATSDWSTGELFF

SEQ ID NO: 547603 - protein, 15 aa, Homo sapiens
  CDR3 for alpha chain variable domain of TCR clone 273802 (TRAV3, TRAJ20)
CAVRDIKLSDYKLSF

SEQ ID NO: 547604 - protein, 12 aa, Homo sapiens
  CDR3 for beta chain variable domain of TCR clone 273802 (TRBV7-9, TRBJ2-7)
CASSIKREEQYF

SEQ ID NO: 547605 - protein, 18 aa, Homo sapiens
  CDR3 for alpha chain variable domain of TCR clone 273803 (TRAV21, TRAJ52)
CAVRPSPAGGTSYGKLTF

SEQ ID NO: 547606 - protein, 14 aa, Homo sapiens
  CDR3 for beta chain variable domain of TCR clone 273803 (TRBV11-2, TRBJ2-3)
CASSLGGGTDTQYF

SEQ ID NO: 547607 - protein, 12 aa, Homo sapiens
  CDR3 for alpha chain variable domain of TCR clone 273804 (TRAV12-1, TRAJ20)
CVVNPDDYKLSF

SEQ ID NO: 547608 - protein, 12 aa, Homo sapiens
  CDR3 for beta chain variable domain of TCR clone 273804 (TRBV11-2, TRBJ2-2)
WASSLGGGELFF

SEQ ID NO: 547609 - protein, 12 aa, Homo sapiens
  CDR3 for alpha chain variable domain of TCR clone 273805 (TRAV13-1, TRAJ27)
CAAHTNAGQSTL

SEQ ID NO: 547610 - protein, 14 aa, Homo sapiens
  CDR3 for beta chain variable domain of TCR clone 273805 (TRBV19, TRBJ2-2)
CASSGQGIAGELFF

SEQ ID NO: 547611 - protein, 13 aa, Homo sapiens
  CDR3 for alpha chain variable domain of TCR clone 273806 (TRAV27, TRAJ41)
CAGEGNSGYALNF

SEQ ID NO: 547612 - protein, 15 aa, Homo sapiens
  CDR3 for beta chain variable domain of TCR clone 273806 (TRBV4-1, TRBJ1-4)
CASSDTGGTNEKLFF

SEQ ID NO: 547613 - protein, 19 aa, Homo sapiens
  CDR3 for alpha chain variable domain of TCR clone 273807 (TRAV16, )
CALSGDIQNPDPAVYQLRD

SEQ ID NO: 547614 - protein, 12 aa, Homo sapiens
  CDR3 for beta chain variable domain of TCR clone 273807 (TRBV24-1, TRBJ2-3)
CATSDSTDTQYF

SEQ ID NO: 547615 - protein, 11 aa, Homo sapiens
  CDR3 for alpha chain variable domain of TCR clone 273808 (TRAV3, TRAJ21)
CAVGDFNKFYF

SEQ ID NO: 547616 - protein, 14 aa, Homo sapiens
  CDR3 for beta chain variable domain of TCR clone 273808 (TRBV29-1, TRBJ2-2)
CSGRGSGNTGELFF

SEQ ID NO: 547617 - protein, 14 aa, Homo sapiens
  CDR3 for alpha chain variable domain of TCR clone 273809 (TRAV1-2, TRAJ16)
CAVNRFSDGQKLPF

SEQ ID NO: 547618 - protein, 14 aa, Homo sapiens
  CDR3 for beta chain variable domain of TCR clone 273809 (TRBV5-5, TRBJ1-2)
CASSLDPYNYGYTF

SEQ ID NO: 547619 - protein, 14 aa, Homo sapiens
  CDR3 for alpha chain variable domain of TCR clone 273810 (TRAV12-1, TRAJ26)
RVVKGSNYGQNFVF

SEQ ID NO: 547620 - protein, 15 aa, Homo sapiens
  CDR3 for beta chain variable domain of TCR clone 273810 (TRBV10-2, TRBJ2-6)
CASSEQGTGANVLTF

SEQ ID NO: 547621 - protein, 12 aa, Homo sapiens
  CDR3 for alpha chain variable domain of TCR clone 273811 (TRAV1-1, TRAJ43)
CAPRVSSNDMRF

SEQ ID NO: 547622 - protein, 14 aa, Homo sapiens
  CDR3 for beta chain variable domain of TCR clone 273811 (TRBV5-1, TRBJ1-1)
CASSLVSINTEAFF

SEQ ID NO: 547623 - protein, 13 aa, Homo sapiens
  CDR3 for alpha chain variable domain of TCR clone 273812 (TRAV17, TRAJ9)
CATYYTGGFKTIF

SEQ ID NO: 547624 - protein, 14 aa, Homo sapiens
  CDR3 for beta chain variable domain of TCR clone 273812 (TRBV19, TRBJ2-5)
CASSMIGQQETQYF

SEQ ID NO: 547625 - protein, 12 aa, Homo sapiens
  CDR3 for alpha chain variable domain of TCR clone 273813 (TRAV21, TRAJ56)
CAVYGANSKLTF

SEQ ID NO: 547626 - protein, 17 aa, Homo sapiens
  CDR3 for beta chain variable domain of TCR clone 273813 (TRBV10-3, TRBJ2-6)
CAISELAESSGANGLTF

SEQ ID NO: 547627 - protein, 16 aa, Homo sapiens
  CDR3 for alpha chain variable domain of TCR clone 273814 (TRAV3, TRAJ10)
CAVRDIRAGGGNKLTF

SEQ ID NO: 547628 - protein, 15 aa, Homo sapiens
  CDR3 for beta chain variable domain of TCR clone 273814 (TRBV6-3, TRBJ2-7)
CASSSPGTVFYEQYF

SEQ ID NO: 547629 - protein, 14 aa, Homo sapiens
  CDR3 for alpha chain variable domain of TCR clone 273815 (TRAV26-1, TRAJ6)
CIVSPVGGSYIPTF

SEQ ID NO: 547630 - protein, 14 aa, Homo sapiens
  CDR3 for beta chain variable domain of TCR clone 273815 (TRBV19, TRBJ2-1)
CASPTFVLSGEQFF

SEQ ID NO: 547631 - protein, 11 aa, Homo sapiens
  CDR3 for alpha chain variable domain of TCR clone 273816 (TRAV1-2, TRAJ34)
CAVLGTDKLIF

SEQ ID NO: 547632 - protein, 14 aa, Homo sapiens
  CDR3 for beta chain variable domain of TCR clone 273816 (TRBV6-6, TRBJ2-7)
CASSDSGAGYEQYF

SEQ ID NO: 547633 - protein, 13 aa, Homo sapiens
  CDR3 for alpha chain variable domain of TCR clone 273817 (TRAV8-6, TRAJ32)
CALSDRAPDKLIF

SEQ ID NO: 547634 - protein, 13 aa, Homo sapiens
  CDR3 for beta chain variable domain of TCR clone 273817 (TRBV11-2, TRBJ2-7)
CASSLDLGYEQYF

SEQ ID NO: 547635 - protein, 13 aa, Homo sapiens
  CDR3 for alpha chain variable domain of TCR clone 273818 (TRAV21, TRAJ27)
CAARPGNAGKSTF

SEQ ID NO: 547636 - protein, 12 aa, Homo sapiens
  CDR3 for beta chain variable domain of TCR clone 273818 (TRBV14, TRBJ2-5)
CASSHLKETQYF

SEQ ID NO: 547637 - protein, 14 aa, Homo sapiens
  CDR3 for alpha chain variable domain of TCR clone 273819 (TRAV23/DV6, TRAJ39)
CAASIGNAGNMLTL

SEQ ID NO: 547638 - protein, 14 aa, Homo sapiens
  CDR3 for beta chain variable domain of TCR clone 273819 (TRBV7-3, TRBJ1-1)
CASSLKGGNTEAFF

SEQ ID NO: 547639 - protein, 15 aa, Homo sapiens
  CDR3 for alpha chain variable domain of TCR clone 273820 (TRAV26-1, TRAJ3)
CIVRSGYSSASKIIF

SEQ ID NO: 547640 - protein, 14 aa, Homo sapiens
  CDR3 for beta chain variable domain of TCR clone 273820 (TRBV13, TRBJ2-5)
CASCRRLAEETQYF

SEQ ID NO: 547641 - protein, 15 aa, Homo sapiens
  CDR3 for alpha chain variable domain of TCR clone 273821 (TRAV3, TRAJ5)
CAVRDLDTGRRALTF

SEQ ID NO: 547642 - protein, 13 aa, Homo sapiens
  CDR3 for beta chain variable domain of TCR clone 273821 (TRBV12-4, TRBJ2-7)
CASSPTETYEQYG

SEQ ID NO: 547643 - protein, 16 aa, Homo sapiens
  CDR3 for alpha chain variable domain of TCR clone 273822 (TRAV3, TRAJ37)
CAVRVRGSGNTGKLIF

SEQ ID NO: 547644 - protein, 11 aa, Homo sapiens
  CDR3 for beta chain variable domain of TCR clone 273822 (TRBV11-2, TRBJ2-2)
CAISLPGELFF

SEQ ID NO: 547645 - protein, 14 aa, Homo sapiens
  CDR3 for alpha chain variable domain of TCR clone 273823 (TRAV1-2, TRAJ16)
CAVNRLSDGQKLLF

SEQ ID NO: 547646 - protein, 15 aa, Homo sapiens
  CDR3 for beta chain variable domain of TCR clone 273823 (TRBV3-1, TRBJ2-5)
CASSADLGGPETQYF

SEQ ID NO: 547647 - protein, 14 aa, Homo sapiens
  CDR3 for alpha chain variable domain of TCR clone 273824 (TRAV38-1, TRAJ40)
CALRPTPGTYKNIF

SEQ ID NO: 547648 - protein, 14 aa, Homo sapiens
  CDR3 for beta chain variable domain of TCR clone 273824 (TRBV25-1, TRBJ1-1)
CASTHLGGNTEAFF

SEQ ID NO: 547649 - protein, 14 aa, Homo sapiens
  CDR3 for alpha chain variable domain of TCR clone 273825 (TRAV12-3, TRAJ10)
SHLPLTGGGNKLTF

SEQ ID NO: 547650 - protein, 16 aa, Homo sapiens
  CDR3 for beta chain variable domain of TCR clone 273825 (TRBV5-1, TRBJ2-7)
CASSPGLAGVIYEQYF

SEQ ID NO: 547651 - protein, 13 aa, Homo sapiens
  CDR3 for alpha chain variable domain of TCR clone 273826 (TRAV38-2/DV8, TRAJ53)
CASGGGSNYKLTF

SEQ ID NO: 547652 - protein, 13 aa, Homo sapiens
  CDR3 for beta chain variable domain of TCR clone 273826 (TRBV11-2, TRBJ2-7)
CASSVTRQGEQYF

SEQ ID NO: 547653 - protein, 15 aa, Homo sapiens
  CDR3 for alpha chain variable domain of TCR clone 273827 (TRAV26-1, TRAJ56)
CIVRVATGANSKLTF

SEQ ID NO: 547654 - protein, 15 aa, Homo sapiens
  CDR3 for beta chain variable domain of TCR clone 273827 (TRBV4-1, TRBJ2-7)
CASSQNTGRLYEQYF

SEQ ID NO: 547655 - protein, 12 aa, Homo sapiens
  CDR3 for alpha chain variable domain of TCR clone 273828 (TRAV27, TRAJ11)
CAGASGYSTLTL

SEQ ID NO: 547656 - protein, 14 aa, Homo sapiens
  CDR3 for beta chain variable domain of TCR clone 273828 (TRBV12-5, TRBJ1-3)
CASGPAGSGNTIYF

SEQ ID NO: 547657 - protein, 11 aa, Homo sapiens
  CDR3 for alpha chain variable domain of TCR clone 273829 (TRAV13-1, TRAJ39)
CASHAGNMLTF

SEQ ID NO: 547658 - protein, 15 aa, Homo sapiens
  CDR3 for beta chain variable domain of TCR clone 273829 (TRBV6-4, TRBJ2-7)
CASSDSIRGYDEQYF

SEQ ID NO: 547659 - protein, 17 aa, Homo sapiens
  CDR3 for alpha chain variable domain of TCR clone 273830 (TRAV3, TRAJ6)
CAVRHGPRAGGSYIPTF

SEQ ID NO: 547660 - protein, 13 aa, Homo sapiens
  CDR3 for beta chain variable domain of TCR clone 273830 (TRBV2, TRBJ2-7)
CASSVVEAYEQYF

SEQ ID NO: 547661 - protein, 13 aa, Homo sapiens
  CDR3 for alpha chain variable domain of TCR clone 273831 (TRAV38-1, TRAJ42)
CARWGGSQGNLIF

SEQ ID NO: 547662 - protein, 14 aa, Homo sapiens
  CDR3 for beta chain variable domain of TCR clone 273831 (TRBV12-4, TRBJ2-1)
CASSLGQGAYEQFF

SEQ ID NO: 547663 - protein, 14 aa, Homo sapiens
  CDR3 for alpha chain variable domain of TCR clone 273832 (TRAV3, TRAJ34)
CALRDINNTDKLIF

SEQ ID NO: 547664 - protein, 15 aa, Homo sapiens
  CDR3 for beta chain variable domain of TCR clone 273832 (TRBV20-1, TRBJ2-7)
CSARDRVSGMDEQYF

SEQ ID NO: 547665 - protein, 13 aa, Homo sapiens
  CDR3 for alpha chain variable domain of TCR clone 273833 (TRAV21, TRAJ57)
CAGTQGGSEKLVV

SEQ ID NO: 547666 - protein, 16 aa, Homo sapiens
  CDR3 for beta chain variable domain of TCR clone 273833 (TRBV29-1, TRBJ2-7)
CSVEDAEDGTAYEQYF

SEQ ID NO: 547667 - protein, 12 aa, Homo sapiens
  CDR3 for alpha chain variable domain of TCR clone 273834 (TRAV12-3, TRAJ41)
CAMSYSGYALNF

SEQ ID NO: 547668 - protein, 13 aa, Homo sapiens
  CDR3 for beta chain variable domain of TCR clone 273834 (TRBV7-3, TRBJ2-1)
CTSSLDSYNEQFF

SEQ ID NO: 547669 - protein, 14 aa, Homo sapiens
  CDR3 for alpha chain variable domain of TCR clone 273835 (TRAV14/DV4, TRAJ11)
CAMRETSGYSTPTF

SEQ ID NO: 547670 - protein, 16 aa, Homo sapiens
  CDR3 for beta chain variable domain of TCR clone 273835 (TRBV19, TRBJ1-5)
CASSTWTGGGNQPQHF

SEQ ID NO: 547671 - protein, 14 aa, Homo sapiens
  CDR3 for alpha chain variable domain of TCR clone 273836 (TRAV1-2, TRAJ16)
CAVNRFSDGQKLLL

SEQ ID NO: 547672 - protein, 15 aa, Homo sapiens
  CDR3 for beta chain variable domain of TCR clone 273836 (TRBV2, TRBJ2-1)
CASSEEREGDNEQFF

SEQ ID NO: 547673 - protein, 14 aa, Homo sapiens
  CDR3 for alpha chain variable domain of TCR clone 273837 (TRAV38-1, TRAJ40)
CALRPTSGTYKYIF

SEQ ID NO: 547674 - protein, 13 aa, Homo sapiens
  CDR3 for beta chain variable domain of TCR clone 273837 (TRBV27, TRBJ2-7)
CASSSGDSYEQYF

SEQ ID NO: 547675 - protein, 14 aa, Homo sapiens
  CDR3 for alpha chain variable domain of TCR clone 273838 (TRAV1-2, TRAJ16)
CAVNRFSDGQKLLF

SEQ ID NO: 547676 - protein, 15 aa, Homo sapiens
  CDR3 for beta chain variable domain of TCR clone 273838 (TRBV19, TRBJ1-5)
CASSIVWADNQPQHL

SEQ ID NO: 547677 - protein, 14 aa, Homo sapiens
  CDR3 for alpha chain variable domain of TCR clone 273839 (TRAV4, TRAJ17)
CLVGDMAAGHKLTF

SEQ ID NO: 547678 - protein, 14 aa, Homo sapiens
  CDR3 for beta chain variable domain of TCR clone 273839 (TRBV4-1, TRBJ2-7)
CASRPVAGGDEQYF

SEQ ID NO: 547679 - protein, 13 aa, Homo sapiens
  CDR3 for alpha chain variable domain of TCR clone 273840 (TRAV16, TRAJ54)
CALLVQGAQKLVF

SEQ ID NO: 547680 - protein, 12 aa, Homo sapiens
  CDR3 for beta chain variable domain of TCR clone 273840 (TRBV18, TRBJ2-7)
CASSTAMGEQYF

SEQ ID NO: 547681 - protein, 17 aa, Homo sapiens
  CDR3 for alpha chain variable domain of TCR clone 273841 (TRAV3, TRAJ6)
CAVRDGPRAGGSSIPPF

SEQ ID NO: 547682 - protein, 15 aa, Homo sapiens
  CDR3 for beta chain variable domain of TCR clone 273841 (TRBV28, TRBJ2-1)
CASSIIAGGRSEQFF

SEQ ID NO: 547683 - protein, 17 aa, Homo sapiens
  CDR3 for alpha chain variable domain of TCR clone 273842 (TRAV3, TRAJ6)
CAVRDGPRAEGSYSPTF

SEQ ID NO: 547684 - protein, 14 aa, Homo sapiens
  CDR3 for beta chain variable domain of TCR clone 273842 (TRBV7-2, TRBJ2-7)
CASSPKTSFYEQYF

SEQ ID NO: 547685 - protein, 16 aa, Homo sapiens
  CDR3 for alpha chain variable domain of TCR clone 273843 (TRAV3, TRAJ21)
CAVRDIERGNFKKFYF

SEQ ID NO: 547686 - protein, 13 aa, Homo sapiens
  CDR3 for beta chain variable domain of TCR clone 273843 (TRBV28, TRBJ1-1)
CASSKQGWTEAFF

SEQ ID NO: 547687 - protein, 16 aa, Homo sapiens
  CDR3 for alpha chain variable domain of TCR clone 273844 (TRAV12-2, TRAJ32)
CAVNLGQGGATNKLIF

SEQ ID NO: 547688 - protein, 15 aa, Homo sapiens
  CDR3 for beta chain variable domain of TCR clone 273844 (TRBV20-1, TRBJ2-7)
CSARGPLAGGREEYF

SEQ ID NO: 547689 - protein, 13 aa, Homo sapiens
  CDR3 for alpha chain variable domain of TCR clone 273845 (TRAV21, TRAJ20)
CAVGLRVDYKLSF

SEQ ID NO: 547690 - protein, 17 aa, Homo sapiens
  CDR3 for beta chain variable domain of TCR clone 273845 (TRBV11-3, TRBJ1-5)
CASSPLTGLRGNQPQHF

SEQ ID NO: 547691 - protein, 16 aa, Homo sapiens
  CDR3 for alpha chain variable domain of TCR clone 273846 (TRAV17, TRAJ52)
CATGIIGGTSYGKLTF

SEQ ID NO: 547692 - protein, 12 aa, Homo sapiens
  CDR3 for beta chain variable domain of TCR clone 273846 (TRBV7-3, TRBJ2-1)
CASSFTNNEQFF

SEQ ID NO: 547693 - protein, 14 aa, Homo sapiens
  CDR3 for alpha chain variable domain of TCR clone 273847 (TRAV21, TRAJ10)
SAVALTGGGNKLTF

SEQ ID NO: 547694 - protein, 13 aa, Homo sapiens
  CDR3 for beta chain variable domain of TCR clone 273847 (TRBV7-2, TRBJ1-6)
CASSLGSNSPLHF

SEQ ID NO: 547695 - protein, 17 aa, Homo sapiens
  CDR3 for alpha chain variable domain of TCR clone 273848 (TRAV26-1, TRAJ37)
CIVRVITVSRNTGKLIF

SEQ ID NO: 547696 - protein, 14 aa, Homo sapiens
  CDR3 for beta chain variable domain of TCR clone 273848 (TRBV19, TRBJ2-1)
CASPTFVLSGEQFF

SEQ ID NO: 547697 - protein, 15 aa, Homo sapiens
  CDR3 for alpha chain variable domain of TCR clone 273849 (TRAV26-1, TRAJ48)
CIVRVGDFGNEKLTF

SEQ ID NO: 547698 - protein, 16 aa, Homo sapiens
  CDR3 for beta chain variable domain of TCR clone 273849 (TRBV4-1, TRBJ2-3)
CASSQRAGGLTDTQYL

SEQ ID NO: 547699 - protein, 16 aa, Homo sapiens
  CDR3 for alpha chain variable domain of TCR clone 273850 (TRAV8-4, TRAJ16)
CAVSPVGRWPGAALCK

SEQ ID NO: 547700 - protein, 14 aa, Homo sapiens
  CDR3 for beta chain variable domain of TCR clone 273850 (TRBV23-1, TRBJ2-5)
CASSSLRSQETQYF

SEQ ID NO: 547701 - protein, 14 aa, Homo sapiens
  CDR3 for alpha chain variable domain of TCR clone 273851 (TRAV13-1, TRAJ44)
CAAKATGTASKLTF

SEQ ID NO: 547702 - protein, 20 aa, Homo sapiens
  CDR3 for beta chain variable domain of TCR clone 273851 (TRBV11-2, TRBJ2-7)
CASSPVGRERAGGPSYEQYF

SEQ ID NO: 547703 - protein, 18 aa, Homo sapiens
  CDR3 for alpha chain variable domain of TCR clone 273852 (TRAV21, TRAJ52)
CAVRSSPAGGTSYGKLTF

SEQ ID NO: 547704 - protein, 13 aa, Homo sapiens
  CDR3 for beta chain variable domain of TCR clone 273852 (TRBV5-7, TRBJ2-6)
CTSTSSGANVLTF

SEQ ID NO: 547705 - protein, 15 aa, Homo sapiens
  CDR3 for alpha chain variable domain of TCR clone 273853 (TRAV12-1, TRAJ41)
CVVNGASHSGYALNF

SEQ ID NO: 547706 - protein, 15 aa, Homo sapiens
  CDR3 for beta chain variable domain of TCR clone 273853 (TRBV7-2, TRBJ1-5)
CASSSTGVDNQPQHF

SEQ ID NO: 547707 - protein, 11 aa, Homo sapiens
  CDR3 for alpha chain variable domain of TCR clone 273854 (TRAV27, TRAJ47)
CRSNQGNKLVF

SEQ ID NO: 547708 - protein, 16 aa, Homo sapiens
  CDR3 for beta chain variable domain of TCR clone 273854 (TRBV12-4, TRBJ1-5)
CASSRPVGGSNQPQHL

SEQ ID NO: 547709 - protein, 13 aa, Homo sapiens
  CDR3 for alpha chain variable domain of TCR clone 273855 (TRAV3, TRAJ40)
CAVRGSGAYKYIF

SEQ ID NO: 547710 - protein, 15 aa, Homo sapiens
  CDR3 for beta chain variable domain of TCR clone 273855 (TRBV5-1, TRBJ2-1)
CASSWGPGPGGEQFF

SEQ ID NO: 547711 - protein, 15 aa, Homo sapiens
  CDR3 for alpha chain variable domain of TCR clone 273856 (TRAV21, TRAJ53)
CATLSRGGSNYKLTF

SEQ ID NO: 547712 - protein, 15 aa, Homo sapiens
  CDR3 for beta chain variable domain of TCR clone 273856 (TRBV18, TRBJ2-1)
CASSPPSASYNEQFF

SEQ ID NO: 547713 - protein, 16 aa, Homo sapiens
  CDR3 for alpha chain variable domain of TCR clone 273857 (TRAV1-2, TRAJ10)
CAVRGVLTGGGNKLTF

SEQ ID NO: 547714 - protein, 13 aa, Homo sapiens
  CDR3 for beta chain variable domain of TCR clone 273857 (TRBV19, TRBJ2-7)
CASSKQGGYEQYF

SEQ ID NO: 547715 - protein, 12 aa, Homo sapiens
  CDR3 for alpha chain variable domain of TCR clone 273858 (TRAV21, TRAJ29)
CAVTSGNTPLVF

SEQ ID NO: 547716 - protein, 14 aa, Homo sapiens
  CDR3 for beta chain variable domain of TCR clone 273858 (TRBV6-5, TRBJ2-2)
CASTEGQETGELFF

SEQ ID NO: 547717 - protein, 12 aa, Homo sapiens
  CDR3 for alpha chain variable domain of TCR clone 273859 (TRAV21, TRAJ15)
CAVNQAGTALIF

SEQ ID NO: 547718 - protein, 13 aa, Homo sapiens
  CDR3 for beta chain variable domain of TCR clone 273859 (TRBV11-2, TRBJ2-5)
CASSSTGEETQFF

SEQ ID NO: 547719 - protein, 12 aa, Homo sapiens
  CDR3 for alpha chain variable domain of TCR clone 273860 (TRAV1-1, TRAJ8)
CAGGTGFQKLVF

SEQ ID NO: 547720 - protein, 15 aa, Homo sapiens
  CDR3 for beta chain variable domain of TCR clone 273860 (TRBV23-1, TRBJ2-7)
CASKVGVGGGYEQYF

SEQ ID NO: 547721 - protein, 14 aa, Homo sapiens
  CDR3 for alpha chain variable domain of TCR clone 273861 (TRAV16, TRAJ29)
CALTRNSGNTPLVF

SEQ ID NO: 547722 - protein, 16 aa, Homo sapiens
  CDR3 for beta chain variable domain of TCR clone 273861 (TRBV5-1, TRBJ2-7)
CASSLEGLAGLYEQYF

SEQ ID NO: 547723 - protein, 13 aa, Homo sapiens
  CDR3 for alpha chain variable domain of TCR clone 273862 (TRAV21, TRAJ15)
CAVANQAGTALIF

SEQ ID NO: 547724 - protein, 16 aa, Homo sapiens
  CDR3 for beta chain variable domain of TCR clone 273862 (TRBV5-1, TRBJ2-2)
CASSSRTGGRTGELFF

SEQ ID NO: 547725 - protein, 14 aa, Homo sapiens
  CDR3 for alpha chain variable domain of TCR clone 273863 (TRAV1-2, TRAJ8)
CAVREDTGFQKLLF

SEQ ID NO: 547726 - protein, 13 aa, Homo sapiens
  CDR3 for beta chain variable domain of TCR clone 273863 (TRBV15, TRBJ2-7)
CATSTTGHYEQYF

SEQ ID NO: 547727 - protein, 14 aa, Homo sapiens
  CDR3 for alpha chain variable domain of TCR clone 273864 (TRAV2, TRAJ37)
CAVDFTSNTGKLIV

SEQ ID NO: 547728 - protein, 13 aa, Homo sapiens
  CDR3 for beta chain variable domain of TCR clone 273864 (TRBV19, TRBJ1-2)
CASIVPGQDGYTF

SEQ ID NO: 547729 - protein, 13 aa, Homo sapiens
  CDR3 for alpha chain variable domain of TCR clone 273865 (TRAV26-1, TRAJ48)
CIVRVVGDEKLTF

SEQ ID NO: 547730 - protein, 14 aa, Homo sapiens
  CDR3 for beta chain variable domain of TCR clone 273865 (TRBV15, TRBJ2-5)
CATSIGGLGETQYF

SEQ ID NO: 547731 - protein, 13 aa, Homo sapiens
  CDR3 for alpha chain variable domain of TCR clone 273866 (TRAV12-2, TRAJ37)
CSGGSGNTGKLIF

SEQ ID NO: 547732 - protein, 17 aa, Homo sapiens
  CDR3 for beta chain variable domain of TCR clone 273866 (TRBV11-2, TRBJ2-1)
CASSLYPPGVEYNEQFF

SEQ ID NO: 547733 - protein, 15 aa, Homo sapiens
  CDR3 for alpha chain variable domain of TCR clone 273867 (TRAV35, TRAJ50)
CGGQLRKTSYDKVIF

SEQ ID NO: 547734 - protein, 12 aa, Homo sapiens
  CDR3 for beta chain variable domain of TCR clone 273867 (TRBV5-1, TRBJ2-5)
CASSLGLETQYF

SEQ ID NO: 547735 - protein, 14 aa, Homo sapiens
  CDR3 for alpha chain variable domain of TCR clone 273868 (TRAV1-2, TRAJ16)
WAVNRFSDGQKLLF

SEQ ID NO: 547736 - protein, 12 aa, Homo sapiens
  CDR3 for beta chain variable domain of TCR clone 273868 (TRBV11-2, TRBJ2-1)
CSSSHGNNEQFF

SEQ ID NO: 547737 - protein, 12 aa, Homo sapiens
  CDR3 for alpha chain variable domain of TCR clone 273869 (TRAV21, TRAJ13)
PGPSGGYQKVTF

SEQ ID NO: 547738 - protein, 16 aa, Homo sapiens
  CDR3 for beta chain variable domain of TCR clone 273869 (TRBV7-9, TRBJ1-2)
CASSLGFSSGEDGYTF

SEQ ID NO: 547739 - protein, 15 aa, Homo sapiens
  CDR3 for alpha chain variable domain of TCR clone 273870 (TRAV25, TRAJ52)
CARRPGGTSYGKLTF

SEQ ID NO: 547740 - protein, 17 aa, Homo sapiens
  CDR3 for beta chain variable domain of TCR clone 273870 (TRBV28, TRBJ2-5)
CASSTPEGDALQETQYF

SEQ ID NO: 547741 - protein, 16 aa, Homo sapiens
  CDR3 for alpha chain variable domain of TCR clone 273871 (TRAV26-1, TRAJ37)
CIVRGDCSGNTGKLIF

SEQ ID NO: 547742 - protein, 14 aa, Homo sapiens
  CDR3 for beta chain variable domain of TCR clone 273871 (TRBV2, TRBJ2-7)
CASSLTSGGYEQYF

SEQ ID NO: 547743 - protein, 16 aa, Homo sapiens
  CDR3 for alpha chain variable domain of TCR clone 273872 (TRAV3, TRAJ37)
CAVRGKGSGNTGKLIF

SEQ ID NO: 547744 - protein, 15 aa, Homo sapiens
  CDR3 for beta chain variable domain of TCR clone 273872 (TRBV11-2, TRBJ2-7)
CASSLSQGSSYEQYF

SEQ ID NO: 547745 - protein, 15 aa, Homo sapiens
  CDR3 for alpha chain variable domain of TCR clone 273873 (TRAV20, TRAJ58)
CAVQDLETSGSRLTF

SEQ ID NO: 547746 - protein, 13 aa, Homo sapiens
  CDR3 for beta chain variable domain of TCR clone 273873 (TRBV20-1, TRBJ1-1)
CSARGGGNTEASF

SEQ ID NO: 547747 - protein, 12 aa, Homo sapiens
  CDR3 for alpha chain variable domain of TCR clone 273874 (TRAV34, TRAJ27)
CGADTNAGKSTF

SEQ ID NO: 547748 - protein, 15 aa, Homo sapiens
  CDR3 for beta chain variable domain of TCR clone 273874 (TRBV7-9, TRBJ1-5)
CASSQGHQPNQPQHF

SEQ ID NO: 547749 - protein, 14 aa, Homo sapiens
  CDR3 for alpha chain variable domain of TCR clone 273875 (TRAV26-1, TRAJ26)
CIVRATFFGQNFVF

SEQ ID NO: 547750 - protein, 16 aa, Homo sapiens
  CDR3 for beta chain variable domain of TCR clone 273875 (TRBV12-4, TRBJ2-7)
CASRSTGTGPSYEQYF

SEQ ID NO: 547751 - protein, 15 aa, Homo sapiens
  CDR3 for alpha chain variable domain of TCR clone 273876 (TRAV12-3, TRAJ6)
CAMSATTGGSYIPTY

SEQ ID NO: 547752 - protein, 16 aa, Homo sapiens
  CDR3 for beta chain variable domain of TCR clone 273876 (TRBV20-1, TRBJ1-2)
CSASMGQGVANYGDTF

SEQ ID NO: 547753 - protein, 15 aa, Homo sapiens
  CDR3 for alpha chain variable domain of TCR clone 273877 (TRAV25, TRAJ43)
CAVFMRCGAGTRLTV

SEQ ID NO: 547754 - protein, 13 aa, Homo sapiens
  CDR3 for beta chain variable domain of TCR clone 273877 (TRBV7-9, TRBJ1-2)
CASSLKQNYGYTF

SEQ ID NO: 547755 - protein, 12 aa, Homo sapiens
  CDR3 for alpha chain variable domain of TCR clone 273878 (TRAV21, TRAJ23)
CAVGPQGGKLIF

SEQ ID NO: 547756 - protein, 13 aa, Homo sapiens
  CDR3 for beta chain variable domain of TCR clone 273878 (TRBV6-3, TRBJ2-3)
CASEGELKDTQYF

SEQ ID NO: 547757 - protein, 15 aa, Homo sapiens
  CDR3 for alpha chain variable domain of TCR clone 273879 (TRAV27, TRAJ38)
CAARRNAGNNRKLIL

SEQ ID NO: 547758 - protein, 13 aa, Homo sapiens
  CDR3 for beta chain variable domain of TCR clone 273879 (TRBV12-5, TRBJ2-3)
CASGDRQSGTQYF

SEQ ID NO: 547759 - protein, 13 aa, Homo sapiens
  CDR3 for alpha chain variable domain of TCR clone 273880 (TRAV13-1, TRAJ43)
CAASLSNNNDMRF

SEQ ID NO: 547760 - protein, 16 aa, Homo sapiens
  CDR3 for beta chain variable domain of TCR clone 273880 (TRBV5-1, TRBJ2-5)
SVSAGCWGAGEKTQYF

SEQ ID NO: 547761 - protein, 14 aa, Homo sapiens
  CDR3 for alpha chain variable domain of TCR clone 273881 (TRAV26-1, TRAJ34)
CIVRVAYNTDKLIF

SEQ ID NO: 547762 - protein, 15 aa, Homo sapiens
  CDR3 for beta chain variable domain of TCR clone 273881 (TRBV20-1, TRBJ2-7)
CSAESGTSGAYEQYF

SEQ ID NO: 547763 - protein, 18 aa, Homo sapiens
  CDR3 for alpha chain variable domain of TCR clone 273882 (TRAV26-2, TRAJ45)
CILRVDKYSGGGADGLTF

SEQ ID NO: 547764 - protein, 15 aa, Homo sapiens
  CDR3 for beta chain variable domain of TCR clone 273882 (TRBV28, TRBJ2-2)
CASSSPGQGGGELFF

SEQ ID NO: 547765 - protein, 13 aa, Homo sapiens
  CDR3 for alpha chain variable domain of TCR clone 273883 (TRAV13-2, TRAJ48)
CAEMDFGNEKLTF

SEQ ID NO: 547766 - protein, 15 aa, Homo sapiens
  CDR3 for beta chain variable domain of TCR clone 273883 (TRBV7-9, TRBJ1-6)
CASSCPGRGNSPLHF

SEQ ID NO: 547767 - protein, 12 aa, Homo sapiens
  CDR3 for alpha chain variable domain of TCR clone 273884 (TRAV2, TRAJ33)
CAVEDSNYQLIL

SEQ ID NO: 547768 - protein, 14 aa, Homo sapiens
  CDR3 for beta chain variable domain of TCR clone 273884 (TRBV19, TRBJ1-4)
CASSINRGGEKLFF

SEQ ID NO: 547769 - protein, 11 aa, Homo sapiens
  CDR3 for alpha chain variable domain of TCR clone 273885 (TRAV21, TRAJ34)
CAVTNTDTLIF

SEQ ID NO: 547770 - protein, 14 aa, Homo sapiens
  CDR3 for beta chain variable domain of TCR clone 273885 (TRBV12-4, TRBJ2-1)
CASSLGQGASEQFF

SEQ ID NO: 547771 - protein, 13 aa, Homo sapiens
  CDR3 for alpha chain variable domain of TCR clone 273886 (TRAV21, TRAJ13)
CAVNSGGYQKVTF

SEQ ID NO: 547772 - protein, 15 aa, Homo sapiens
  CDR3 for beta chain variable domain of TCR clone 273886 (TRBV19, TRBJ1-2)
CASTLDSTGNYGYTF

SEQ ID NO: 547773 - protein, 14 aa, Homo sapiens
  CDR3 for alpha chain variable domain of TCR clone 273887 (TRAV1-2, TRAJ8)
CAVREDTGFLKLVF

SEQ ID NO: 547774 - protein, 12 aa, Homo sapiens
  CDR3 for beta chain variable domain of TCR clone 273887 (TRBV11-3, TRBJ1-1)
CASSHRQGEAFF

SEQ ID NO: 547775 - protein, 14 aa, Homo sapiens
  CDR3 for alpha chain variable domain of TCR clone 273888 (TRAV12-2, TRAJ3)
CAVNGYSSASKIIF

SEQ ID NO: 547776 - protein, 15 aa, Homo sapiens
  CDR3 for beta chain variable domain of TCR clone 273888 (TRBV4-1, TRBJ2-5)
CASSQASGEYETQYF

SEQ ID NO: 547777 - protein, 15 aa, Homo sapiens
  CDR3 for alpha chain variable domain of TCR clone 273889 (TRAV3, TRAJ3)
CAVRDRRSSASKVIF

SEQ ID NO: 547778 - protein, 13 aa, Homo sapiens
  CDR3 for beta chain variable domain of TCR clone 273889 (TRBV9, TRBJ2-5)
CASSPAGLGTQYF

SEQ ID NO: 547779 - protein, 13 aa, Homo sapiens
  CDR3 for alpha chain variable domain of TCR clone 273890 (TRAV13-1, TRAJ5)
CAASDTGRRALTL

SEQ ID NO: 547780 - protein, 14 aa, Homo sapiens
  CDR3 for beta chain variable domain of TCR clone 273890 (TRBV11-2, TRBJ1-2)
CASSLGTANYGYTF

SEQ ID NO: 547781 - protein, 11 aa, Homo sapiens
  CDR3 for alpha chain variable domain of TCR clone 273891 (TRAV1-2, TRAJ20)
RAVSNDYKLSF

SEQ ID NO: 547782 - protein, 16 aa, Homo sapiens
  CDR3 for beta chain variable domain of TCR clone 273891 (TRBV29-1, TRBJ2-6)
CSVEDITYSGANVLTF

SEQ ID NO: 547783 - protein, 12 aa, Homo sapiens
  CDR3 for alpha chain variable domain of TCR clone 273892 (TRAV13-1, TRAJ9)
CASHTGGFKTIF

SEQ ID NO: 547784 - protein, 16 aa, Homo sapiens
  CDR3 for beta chain variable domain of TCR clone 273892 (TRBV7-2, TRBJ2-1)
CASSSQGAAAYNEQFF

SEQ ID NO: 547785 - protein, 15 aa, Homo sapiens
  CDR3 for alpha chain variable domain of TCR clone 273893 (TRAV17, TRAJ13)
CATDAGSGGYQKVTF

SEQ ID NO: 547786 - protein, 17 aa, Homo sapiens
  CDR3 for beta chain variable domain of TCR clone 273893 (TRBV13, TRBJ2-3)
CASSLSRVAGGGNTQYF

SEQ ID NO: 547787 - protein, 12 aa, Homo sapiens
  CDR3 for alpha chain variable domain of TCR clone 273894 (TRAV26-1, TRAJ17)
CIVRSAGNKLTF

SEQ ID NO: 547788 - protein, 15 aa, Homo sapiens
  CDR3 for beta chain variable domain of TCR clone 273894 (TRBV7-6, TRBJ1-2)
CASSSGGRGGYCYTF

SEQ ID NO: 547789 - protein, 12 aa, Homo sapiens
  CDR3 for alpha chain variable domain of TCR clone 273895 (TRAV8-3, TRAJ20)
CAVGVNDYKLSF

SEQ ID NO: 547790 - protein, 16 aa, Homo sapiens
  CDR3 for beta chain variable domain of TCR clone 273895 (TRBV19, TRBJ2-2)
CASRSPGTGATGELSF

SEQ ID NO: 547791 - protein, 14 aa, Homo sapiens
  CDR3 for alpha chain variable domain of TCR clone 273896 (TRAV6, TRAJ10)
CALDLTGGGNQLTF

SEQ ID NO: 547792 - protein, 14 aa, Homo sapiens
  CDR3 for beta chain variable domain of TCR clone 273896 (TRBV18, TRBJ2-7)
CASSPAGGPGEQYF

SEQ ID NO: 547793 - protein, 16 aa, Homo sapiens
  CDR3 for alpha chain variable domain of TCR clone 273897 (TRAV12-3, TRAJ58)
CAMTDTEETSGSRLTF

SEQ ID NO: 547794 - protein, 22 aa, Homo sapiens
  CDR3 for beta chain variable domain of TCR clone 273897 (TRBV23-1, TRBJ2-7)
CDSSRRLDSGQGYVGGGYEQYF

SEQ ID NO: 547795 - protein, 13 aa, Homo sapiens
  CDR3 for alpha chain variable domain of TCR clone 273898 (TRAV13-1, TRAJ39)
CSKYSNAVNMLTF

SEQ ID NO: 547796 - protein, 16 aa, Homo sapiens
  CDR3 for beta chain variable domain of TCR clone 273898 (TRBV20-1, TRBJ1-4)
CSAPGQGLLTNERLFF

SEQ ID NO: 547797 - protein, 12 aa, Homo sapiens
  CDR3 for alpha chain variable domain of TCR clone 273899 (TRAV38-2/DV8, TRAJ49)
CAYRSSGNQFYF

SEQ ID NO: 547798 - protein, 14 aa, Homo sapiens
  CDR3 for beta chain variable domain of TCR clone 273899 (TRBV11-2, TRBJ1-5)
CASSLDRGRQPQHF

SEQ ID NO: 547799 - protein, 15 aa, Homo sapiens
  CDR3 for alpha chain variable domain of TCR clone 273900 (TRAV12-3, TRAJ49)
CAMAVTPNTGNQFYF

SEQ ID NO: 547800 - protein, 14 aa, Homo sapiens
  CDR3 for beta chain variable domain of TCR clone 273900 (TRBV7-6, TRBJ2-3)
CASSLGTVTDTQYF

SEQ ID NO: 547801 - protein, 14 aa, Homo sapiens
  CDR3 for alpha chain variable domain of TCR clone 273901 (TRAV4, TRAJ17)
CLVGAPLVGNKLTF

SEQ ID NO: 547802 - protein, 20 aa, Homo sapiens
  CDR3 for beta chain variable domain of TCR clone 273901 (TRBV20-1, TRBJ2-1)
CSARPYSVAGGPSYYNEQFF

SEQ ID NO: 547803 - protein, 14 aa, Homo sapiens
  CDR3 for alpha chain variable domain of TCR clone 273902 (TRAV35, TRAJ33)
CAGSSQDSNYQLIW

SEQ ID NO: 547804 - protein, 15 aa, Homo sapiens
  CDR3 for beta chain variable domain of TCR clone 273902 (TRBV5-1, TRBJ1-4)
FAPEAWKDGNEKLFF

SEQ ID NO: 547805 - protein, 14 aa, Homo sapiens
  CDR3 for alpha chain variable domain of TCR clone 273903 (TRAV13-2, TRAJ11)
CAETGNSGYSTLTF

SEQ ID NO: 547806 - protein, 15 aa, Homo sapiens
  CDR3 for beta chain variable domain of TCR clone 273903 (TRBV12-4, TRBJ2-5)
CASSLGGQGRETQYF

SEQ ID NO: 547807 - protein, 11 aa, Homo sapiens
  CDR3 for alpha chain variable domain of TCR clone 273904 (TRAV1-1, TRAJ5)
CAVRVRRALTF

SEQ ID NO: 547808 - protein, 11 aa, Homo sapiens
  CDR3 for beta chain variable domain of TCR clone 273904 (TRBV12-4, TRBJ2-3)
CASTATDTQYF

SEQ ID NO: 547809 - protein, 14 aa, Homo sapiens
  CDR3 for alpha chain variable domain of TCR clone 273905 (TRAV38-2/DV8, TRAJ57)
CARNTQGGSEKLVF

SEQ ID NO: 547810 - protein, 15 aa, Homo sapiens
  CDR3 for beta chain variable domain of TCR clone 273905 (TRBV9, TRBJ1-6)
CASSVAGTGDSPLHF

SEQ ID NO: 547811 - protein, 19 aa, Homo sapiens
  CDR3 for alpha chain variable domain of TCR clone 273906 (TRAV17, TRAJ40)
TASRSADTASYFCASKYIF

SEQ ID NO: 547812 - protein, 17 aa, Homo sapiens
  CDR3 for beta chain variable domain of TCR clone 273906 (TRBV11-2, TRBJ2-4)
CASSFLALGGAGDIQYF

SEQ ID NO: 547813 - protein, 12 aa, Homo sapiens
  CDR3 for alpha chain variable domain of TCR clone 273907 (TRAV13-1, TRAJ21)
CAAKEGFNKFYF

SEQ ID NO: 547814 - protein, 13 aa, Homo sapiens
  CDR3 for beta chain variable domain of TCR clone 273907 (TRBV18, TRBJ2-7)
CSSPRGGAYEQYF

SEQ ID NO: 547815 - protein, 12 aa, Homo sapiens
  CDR3 for alpha chain variable domain of TCR clone 273908 (TRAV12-1, TRAJ40)
CVFYSGTYKYIF

SEQ ID NO: 547816 - protein, 15 aa, Homo sapiens
  CDR3 for beta chain variable domain of TCR clone 273908 (TRBV6-5, TRBJ2-1)
CASSYDAGAGNEQFF

SEQ ID NO: 547817 - protein, 16 aa, Homo sapiens
  CDR3 for alpha chain variable domain of TCR clone 273909 (TRAV30, TRAJ24)
CGTEIVDADSWGKFQF

SEQ ID NO: 547818 - protein, 14 aa, Homo sapiens
  CDR3 for beta chain variable domain of TCR clone 273909 (TRBV7-3, TRBJ2-1)
CASSLAGGTSEQFF

SEQ ID NO: 547819 - protein, 14 aa, Homo sapiens
  CDR3 for alpha chain variable domain of TCR clone 273910 (TRAV1-2, TRAJ16)
CAVNRVSDGQKLLF

SEQ ID NO: 547820 - protein, 15 aa, Homo sapiens
  CDR3 for beta chain variable domain of TCR clone 273910 (TRBV28, TRBJ1-3)
CASGATGNSGNTIYF

SEQ ID NO: 547821 - protein, 10 aa, Homo sapiens
  CDR3 for alpha chain variable domain of TCR clone 273911 (TRAV23/DV6, TRAJ57)
CAASSTLSQG

SEQ ID NO: 547822 - protein, 13 aa, Homo sapiens
  CDR3 for beta chain variable domain of TCR clone 273911 (TRBV12-5, TRBJ2-3)
CASGDRQSDTQYF

SEQ ID NO: 547823 - protein, 14 aa, Homo sapiens
  CDR3 for alpha chain variable domain of TCR clone 273912 (TRAV21, TRAJ15)
CAVSLNQAGTALIF

SEQ ID NO: 547824 - protein, 19 aa, Homo sapiens
  CDR3 for beta chain variable domain of TCR clone 273912 (TRBV11-3, TRBJ2-2)
CASSTSPGAKTTNTGELFF

SEQ ID NO: 547825 - protein, 16 aa, Homo sapiens
  CDR3 for alpha chain variable domain of TCR clone 273913 (TRAV8-2, TRAJ7)
CVASEGPYYGNNRLAF

SEQ ID NO: 547826 - protein, 15 aa, Homo sapiens
  CDR3 for beta chain variable domain of TCR clone 273913 (TRBV27, TRBJ2-3)
CASSLGLAATDTQYF

SEQ ID NO: 547827 - protein, 21 aa, Homo sapiens
  CDR3 for alpha chain variable domain of TCR clone 273914 (TRAV12-1, TRAJ32)
SSVIQPPTSMNYGGAPNKLIF

SEQ ID NO: 547828 - protein, 15 aa, Homo sapiens
  CDR3 for beta chain variable domain of TCR clone 273914 (TRBV7-9, TRBJ2-2)
CASGPLDTFPGELFF

SEQ ID NO: 547829 - protein, 16 aa, Homo sapiens
  CDR3 for alpha chain variable domain of TCR clone 273915 (TRAV30, TRAJ42)
SVAQSPYGGSQGNLIF

SEQ ID NO: 547830 - protein, 14 aa, Homo sapiens
  CDR3 for beta chain variable domain of TCR clone 273915 (TRBV5-1, TRBJ2-7)
CASSFASGVNEQYF

SEQ ID NO: 547831 - protein, 16 aa, Homo sapiens
  CDR3 for alpha chain variable domain of TCR clone 273916 (TRAV16, TRAJ4)
CALSRMFSGGYIKLFF

SEQ ID NO: 547832 - protein, 16 aa, Homo sapiens
  CDR3 for beta chain variable domain of TCR clone 273916 (TRBV24-1, TRBJ2-3)
CATSDPGTGATDTQYF

SEQ ID NO: 547833 - protein, 18 aa, Homo sapiens
  CDR3 for alpha chain variable domain of TCR clone 273917 (TRAV9-2, TRAJ52)
CALSRHNAGGTSYGKLTF

SEQ ID NO: 547834 - protein, 16 aa, Homo sapiens
  CDR3 for beta chain variable domain of TCR clone 273917 (TRBV11-2, TRBJ2-1)
CASSFGGSFVYNEQFF

SEQ ID NO: 547835 - protein, 17 aa, Homo sapiens
  CDR3 for alpha chain variable domain of TCR clone 273918 (TRAV3, TRAJ12)
CAVRDGGRMDSSYKLIF

SEQ ID NO: 547836 - protein, 13 aa, Homo sapiens
  CDR3 for beta chain variable domain of TCR clone 273918 (TRBV20-1, TRBJ2-3)
CSARIAGSGAKYF

SEQ ID NO: 547837 - protein, 11 aa, Homo sapiens
  CDR3 for alpha chain variable domain of TCR clone 273919 (TRAV3, TRAJ21)
CAVGNFNKFYF

SEQ ID NO: 547838 - protein, 15 aa, Homo sapiens
  CDR3 for beta chain variable domain of TCR clone 273919 (TRBV12-4, TRBJ2-5)
CASSPPTGVRETQYF

SEQ ID NO: 547839 - protein, 16 aa, Homo sapiens
  CDR3 for alpha chain variable domain of TCR clone 273920 (TRAV26-2, TRAJ48)
CILRPPFNFGNEKLPF

SEQ ID NO: 547840 - protein, 14 aa, Homo sapiens
  CDR3 for beta chain variable domain of TCR clone 273920 (TRBV25-1, TRBJ1-1)
CASTHLGGNTEAFF

SEQ ID NO: 547841 - protein, 13 aa, Homo sapiens
  CDR3 for alpha chain variable domain of TCR clone 273921 (TRAV12-2, TRAJ18)
CAVRGSTLGGLYF

SEQ ID NO: 547842 - protein, 18 aa, Homo sapiens
  CDR3 for beta chain variable domain of TCR clone 273921 (TRBV27, TRBJ2-3)
CASSLSGTSGRGTDTQYF

SEQ ID NO: 547843 - protein, 13 aa, Homo sapiens
  CDR3 for alpha chain variable domain of TCR clone 273922 (TRAV21, TRAJ27)
CAARPGNAGKSTF

SEQ ID NO: 547844 - protein, 15 aa, Homo sapiens
  CDR3 for beta chain variable domain of TCR clone 273922 (TRBV2, TRBJ2-1)
CASSELAGSYNEQFF

SEQ ID NO: 547845 - protein, 13 aa, Homo sapiens
  CDR3 for alpha chain variable domain of TCR clone 273923 (TRAV12-2, TRAJ13)
CREEDWGYQRVTF

SEQ ID NO: 547846 - protein, 18 aa, Homo sapiens
  CDR3 for beta chain variable domain of TCR clone 273923 (TRBV12-5, TRBJ2-7)
CASGSQGAPTSSTSGRAT

SEQ ID NO: 547847 - protein, 15 aa, Homo sapiens
  CDR3 for alpha chain variable domain of TCR clone 273924 (TRAV8-2, TRAJ16)
YVVSDGFSDGQKLLF

SEQ ID NO: 547848 - protein, 14 aa, Homo sapiens
  CDR3 for beta chain variable domain of TCR clone 273924 (TRBV7-3, TRBJ1-1)
CASSLGTGYTEAFF

SEQ ID NO: 547849 - protein, 14 aa, Homo sapiens
  CDR3 for alpha chain variable domain of TCR clone 273925 (TRAV9-2, TRAJ39)
CALYIYNAGNMLTF

SEQ ID NO: 547850 - protein, 17 aa, Homo sapiens
  CDR3 for beta chain variable domain of TCR clone 273925 (TRBV6-1, TRBJ2-3)
YASSEFVTGGPTDTQYF

SEQ ID NO: 547851 - protein, 15 aa, Homo sapiens
  CDR3 for alpha chain variable domain of TCR clone 273926 (TRAV38-2/DV8, TRAJ45)
CAYWDSGGGADGLTF

SEQ ID NO: 547852 - protein, 16 aa, Homo sapiens
  CDR3 for beta chain variable domain of TCR clone 273926 (TRBV19, TRBJ1-1)
CASSTTRFWPGTEAFF

SEQ ID NO: 547853 - protein, 12 aa, Homo sapiens
  CDR3 for alpha chain variable domain of TCR clone 273927 (TRAV26-1, TRAJ17)
CIVRSAGNKLTF

SEQ ID NO: 547854 - protein, 15 aa, Homo sapiens
  CDR3 for beta chain variable domain of TCR clone 273927 (TRBV7-6, TRBJ1-2)
CASSSGGRGGYGETF

SEQ ID NO: 547855 - protein, 16 aa, Homo sapiens
  CDR3 for alpha chain variable domain of TCR clone 273928 (TRAV3, TRAJ5)
CAVSNLMDTGRRALTF

SEQ ID NO: 547856 - protein, 16 aa, Homo sapiens
  CDR3 for beta chain variable domain of TCR clone 273928 (TRBV12-5, TRBJ2-5)
CASGPRTSGNQETQYF

SEQ ID NO: 547857 - protein, 17 aa, Homo sapiens
  CDR3 for alpha chain variable domain of TCR clone 273929 (TRAV26-2, TRAJ42)
CILRDVGYGGSQGNLIF

SEQ ID NO: 547858 - protein, 16 aa, Homo sapiens
  CDR3 for beta chain variable domain of TCR clone 273929 (TRBV12-4, TRBJ2-7)
CASSLIGRTGTYEQYF

SEQ ID NO: 547859 - protein, 15 aa, Homo sapiens
  CDR3 for alpha chain variable domain of TCR clone 273930 (TRAV26-2, TRAJ50)
CILRDEETSSDKGIF

SEQ ID NO: 547860 - protein, 12 aa, Homo sapiens
  CDR3 for beta chain variable domain of TCR clone 273930 (TRBV5-7, TRBJ1-2)
CASSDGPYGYTF

SEQ ID NO: 547861 - protein, 12 aa, Homo sapiens
  CDR3 for alpha chain variable domain of TCR clone 273931 (TRAV12-3, TRAJ40)
CAMSSVTYKYIF

SEQ ID NO: 547862 - protein, 12 aa, Homo sapiens
  CDR3 for beta chain variable domain of TCR clone 273931 (TRBV19, TRBJ1-1)
CASSTTGIEAFF

SEQ ID NO: 547863 - protein, 14 aa, Homo sapiens
  CDR3 for alpha chain variable domain of TCR clone 273932 (TRAV12-1, TRAJ30)
CVPTGTNRDDKTIF

SEQ ID NO: 547864 - protein, 11 aa, Homo sapiens
  CDR3 for beta chain variable domain of TCR clone 273932 (TRBV4-1, TRBJ2-2)
CASEHTGELFF

SEQ ID NO: 547865 - protein, 18 aa, Homo sapiens
  CDR3 for alpha chain variable domain of TCR clone 273933 (TRAV9-2, TRAJ52)
CALSRHNAGGTSYGKLTF

SEQ ID NO: 547866 - protein, 13 aa, Homo sapiens
  CDR3 for beta chain variable domain of TCR clone 273933 (TRBV6-1, TRBJ1-1)
CASSRQGNTEAFF

SEQ ID NO: 547867 - protein, 18 aa, Homo sapiens
  CDR3 for alpha chain variable domain of TCR clone 273934 (TRAV13-1, TRAJ52)
CAASKRSAGGTSYGKLTF

SEQ ID NO: 547868 - protein, 11 aa, Homo sapiens
  CDR3 for beta chain variable domain of TCR clone 273934 (TRBV7-8, TRBJ2-7)
CASSLSLEQYF

SEQ ID NO: 547869 - protein, 15 aa, Homo sapiens
  CDR3 for alpha chain variable domain of TCR clone 273935 (TRAV38-1, TRAJ37)
CAFIFGSGNTGKLIF

SEQ ID NO: 547870 - protein, 13 aa, Homo sapiens
  CDR3 for beta chain variable domain of TCR clone 273935 (TRBV5-1, TRBJ2-7)
CASIGTDSYEQYF

SEQ ID NO: 547871 - protein, 13 aa, Homo sapiens
  CDR3 for alpha chain variable domain of TCR clone 273936 (TRAV29/DV5, TRAJ48)
CAASSFGNEKLTF

SEQ ID NO: 547872 - protein, 14 aa, Homo sapiens
  CDR3 for beta chain variable domain of TCR clone 273936 (TRBV3-1, TRBJ2-2)
CASSQDWVQGELFF

SEQ ID NO: 547873 - protein, 18 aa, Homo sapiens
  CDR3 for alpha chain variable domain of TCR clone 273937 (TRAV29/DV5, TRAJ52)
CAAGFRGAGGTSYGKLTF

SEQ ID NO: 547874 - protein, 15 aa, Homo sapiens
  CDR3 for beta chain variable domain of TCR clone 273937 (TRBV2, TRBJ2-7)
CASSEGLARSYEQYF

SEQ ID NO: 547875 - protein, 14 aa, Homo sapiens
  CDR3 for alpha chain variable domain of TCR clone 273938 (TRAV13-1, TRAJ35)
CAASKGGFGNVLHC

SEQ ID NO: 547876 - protein, 15 aa, Homo sapiens
  CDR3 for beta chain variable domain of TCR clone 273938 (TRBV28, TRBJ2-1)
CASSGLAGVDNEQFF

SEQ ID NO: 547877 - protein, 11 aa, Homo sapiens
  CDR3 for alpha chain variable domain of TCR clone 273939 (TRAV13-1, TRAJ6)
CATSGSYIPTF

SEQ ID NO: 547878 - protein, 13 aa, Homo sapiens
  CDR3 for beta chain variable domain of TCR clone 273939 (TRBV6-6, TRBJ2-1)
CASSLHQGDEQFF

SEQ ID NO: 547879 - protein, 15 aa, Homo sapiens
  CDR3 for alpha chain variable domain of TCR clone 273940 (TRAV3, TRAJ29)
CAVRDINSGNTPLVF

SEQ ID NO: 547880 - protein, 16 aa, Homo sapiens
  CDR3 for beta chain variable domain of TCR clone 273940 (TRBV4-1, TRBJ2-5)
CASSQTFYGDLETQYF

SEQ ID NO: 547881 - protein, 14 aa, Homo sapiens
  CDR3 for alpha chain variable domain of TCR clone 273941 (TRAV4, TRAJ9)
CLVGSGTGGFKTIF

SEQ ID NO: 547882 - protein, 18 aa, Homo sapiens
  CDR3 for beta chain variable domain of TCR clone 273941 (TRBV11-2, TRBJ2-6)
CASSLNPFLGTGANVLTF

SEQ ID NO: 547883 - protein, 11 aa, Homo sapiens
  CDR3 for alpha chain variable domain of TCR clone 273942 (TRAV12-2, TRAJ33)
CAVTSNYQLIW

SEQ ID NO: 547884 - protein, 16 aa, Homo sapiens
  CDR3 for beta chain variable domain of TCR clone 273942 (TRBV2, TRBJ2-3)
CASSTSVEGVTDTQYF

SEQ ID NO: 547885 - protein, 12 aa, Homo sapiens
  CDR3 for alpha chain variable domain of TCR clone 273943 (TRAV8-3, TRAJ20)
CAVGANDYKLCF

SEQ ID NO: 547886 - protein, 16 aa, Homo sapiens
  CDR3 for beta chain variable domain of TCR clone 273943 (TRBV19, TRBJ2-2)
CASRSPGTGATGELFF

SEQ ID NO: 547887 - protein, 14 aa, Homo sapiens
  CDR3 for alpha chain variable domain of TCR clone 273944 (TRAV14/DV4, TRAJ15)
CAMRRDQAGTPLIF

SEQ ID NO: 547888 - protein, 16 aa, Homo sapiens
  CDR3 for beta chain variable domain of TCR clone 273944 (TRBV15, TRBJ2-3)
CATSRDLGIVTDTQYF

SEQ ID NO: 547889 - protein, 16 aa, Homo sapiens
  CDR3 for alpha chain variable domain of TCR clone 273945 (TRAV14/DV4, TRAJ20)
CAMREGRSRDDYKLSF

SEQ ID NO: 547890 - protein, 12 aa, Homo sapiens
  CDR3 for beta chain variable domain of TCR clone 273945 (TRBV7-9, TRBJ2-7)
CASSQGVYEQYF

SEQ ID NO: 547891 - protein, 17 aa, Homo sapiens
  CDR3 for alpha chain variable domain of TCR clone 273946 (TRAV26-1, TRAJ37)
CIVRVITVSSNTGKLIF

SEQ ID NO: 547892 - protein, 15 aa, Homo sapiens
  CDR3 for beta chain variable domain of TCR clone 273946 (TRBV28, TRBJ1-5)
CAGSRTGGYVQTQHF

SEQ ID NO: 547893 - protein, 13 aa, Homo sapiens
  CDR3 for alpha chain variable domain of TCR clone 273947 (TRAV12-2, TRAJ4)
CAGFSGGYNKLIF

SEQ ID NO: 547894 - protein, 13 aa, Homo sapiens
  CDR3 for beta chain variable domain of TCR clone 273947 (TRBV11-2, TRBJ2-5)
CASSFSSQETQYF

SEQ ID NO: 547895 - protein, 15 aa, Homo sapiens
  CDR3 for alpha chain variable domain of TCR clone 273948 (TRAV8-1, TRAJ6)
CAVNTPPGGRYILTF

SEQ ID NO: 547896 - protein, 15 aa, Homo sapiens
  CDR3 for beta chain variable domain of TCR clone 273948 (TRBV11-2, TRBJ2-2)
CASSSDRVNAGELFF

SEQ ID NO: 547897 - protein, 13 aa, Homo sapiens
  CDR3 for alpha chain variable domain of TCR clone 273949 (TRAV21, TRAJ27)
CAARPGNAGKSTF

SEQ ID NO: 547898 - protein, 17 aa, Homo sapiens
  CDR3 for beta chain variable domain of TCR clone 273949 (TRBV2, TRBJ1-6)
CASSLRSGGLMTSPLHF

SEQ ID NO: 547899 - protein, 17 aa, Homo sapiens
  CDR3 for alpha chain variable domain of TCR clone 273950 (TRAV3, TRAJ6)
CAVRDGPRAGGSYKPTF

SEQ ID NO: 547900 - protein, 13 aa, Homo sapiens
  CDR3 for beta chain variable domain of TCR clone 273950 (TRBV20-1, TRBJ1-1)
CSARGGGNTEAFF

SEQ ID NO: 547901 - protein, 14 aa, Homo sapiens
  CDR3 for alpha chain variable domain of TCR clone 273951 (TRAV13-1, TRAJ3)
CAASKSSSASKIIF

SEQ ID NO: 547902 - protein, 13 aa, Homo sapiens
  CDR3 for beta chain variable domain of TCR clone 273951 (TRBV25-1, TRBJ2-5)
GASSESGRETQYF

SEQ ID NO: 547903 - protein, 13 aa, Homo sapiens
  CDR3 for alpha chain variable domain of TCR clone 273952 (TRAV21, TRAJ20)
CAVGVFADYKLSF

SEQ ID NO: 547904 - protein, 13 aa, Homo sapiens
  CDR3 for beta chain variable domain of TCR clone 273952 (TRBV12-4, TRBJ2-7)
CASSPTETYEQYF

SEQ ID NO: 547905 - protein, 14 aa, Homo sapiens
  CDR3 for alpha chain variable domain of TCR clone 273953 (TRAV8-4, TRAJ54)
CSVREVLGAQKLVF

SEQ ID NO: 547906 - protein, 17 aa, Homo sapiens
  CDR3 for beta chain variable domain of TCR clone 273953 (TRBV4-1, TRBJ1-4)
CASSQEGPRGVEEKLFF

SEQ ID NO: 547907 - protein, 10 aa, Homo sapiens
  CDR3 for alpha chain variable domain of TCR clone 273954 (TRAV21, TRAJ20)
CAVPTYKLSF

SEQ ID NO: 547908 - protein, 16 aa, Homo sapiens
  CDR3 for beta chain variable domain of TCR clone 273954 (TRBV7-6, TRBJ2-3)
CASSPLAGGSTDTQYF

SEQ ID NO: 547909 - protein, 13 aa, Homo sapiens
  CDR3 for alpha chain variable domain of TCR clone 273955 (TRAV26-1, TRAJ34)
CIVRPWLTDKLIF

SEQ ID NO: 547910 - protein, 14 aa, Homo sapiens
  CDR3 for beta chain variable domain of TCR clone 273955 (TRBV7-2, TRBJ2-7)
CASRSQGAAYEQYF

SEQ ID NO: 547911 - protein, 13 aa, Homo sapiens
  CDR3 for alpha chain variable domain of TCR clone 273956 (TRAV35, TRAJ44)
CAGLSGTASKLTF

SEQ ID NO: 547912 - protein, 17 aa, Homo sapiens
  CDR3 for beta chain variable domain of TCR clone 273956 (TRBV7-8, TRBJ1-2)
CASNLRPLQGHLYGYTF

SEQ ID NO: 547913 - protein, 12 aa, Homo sapiens
  CDR3 for alpha chain variable domain of TCR clone 273957 (TRAV12-1, TRAJ23)
CVVNWGGGKLTF

SEQ ID NO: 547914 - protein, 14 aa, Homo sapiens
  CDR3 for beta chain variable domain of TCR clone 273957 (TRBV27, TRBJ2-7)
CASSPQRGTYEQYF

SEQ ID NO: 547915 - protein, 12 aa, Homo sapiens
  CDR3 for alpha chain variable domain of TCR clone 273958 (TRAV12-2, TRAJ10)
WGVTGGGNKLTF

SEQ ID NO: 547916 - protein, 15 aa, Homo sapiens
  CDR3 for beta chain variable domain of TCR clone 273958 (TRBV2, TRBJ2-1)
CATQARLVMIGEQFF

SEQ ID NO: 547917 - protein, 14 aa, Homo sapiens
  CDR3 for alpha chain variable domain of TCR clone 273959 (TRAV8-4, TRAJ15)
FAVTIREAGTALIF

SEQ ID NO: 547918 - protein, 16 aa, Homo sapiens
  CDR3 for beta chain variable domain of TCR clone 273959 (TRBV29-1, TRBJ2-6)
CSVEDITYSGANVLTF

SEQ ID NO: 547919 - protein, 14 aa, Homo sapiens
  CDR3 for alpha chain variable domain of TCR clone 273960 (TRAV8-4, TRAJ37)
CAVSEPSNTGKLIV

SEQ ID NO: 547920 - protein, 14 aa, Homo sapiens
  CDR3 for beta chain variable domain of TCR clone 273960 (TRBV28, TRBJ2-1)
CAIHRTGARTEQFF

SEQ ID NO: 547921 - protein, 15 aa, Homo sapiens
  CDR3 for alpha chain variable domain of TCR clone 273961 (TRAV12-2, TRAJ5)
CAVNGKDTGRRALTF

SEQ ID NO: 547922 - protein, 13 aa, Homo sapiens
  CDR3 for beta chain variable domain of TCR clone 273961 (TRBV7-3, TRBJ1-1)
CASSQDWGAEAFF

SEQ ID NO: 547923 - protein, 14 aa, Homo sapiens
  CDR3 for alpha chain variable domain of TCR clone 273962 (TRAV4, TRAJ42)
CLVGGGGSQGNLIF

SEQ ID NO: 547924 - protein, 18 aa, Homo sapiens
  CDR3 for beta chain variable domain of TCR clone 273962 (TRBV7-6, TRBJ2-1)
CASSPRTSGMSSYNEQFF

SEQ ID NO: 547925 - protein, 11 aa, Homo sapiens
  CDR3 for alpha chain variable domain of TCR clone 273963 (TRAV1-2, TRAJ20)
CAVANDYKLSF

SEQ ID NO: 547926 - protein, 18 aa, Homo sapiens
  CDR3 for beta chain variable domain of TCR clone 273963 (TRBV20-1, TRBJ2-6)
CSAETTATRGSGANVLTF

SEQ ID NO: 547927 - protein, 13 aa, Homo sapiens
  CDR3 for alpha chain variable domain of TCR clone 273964 (TRAV12-3, TRAJ7)
CAMTPYGNNRLAF

SEQ ID NO: 547928 - protein, 16 aa, Homo sapiens
  CDR3 for beta chain variable domain of TCR clone 273964 (TRBV20-1, TRBJ1-4)
CSARPYGGELNEKPFF

SEQ ID NO: 547929 - protein, 14 aa, Homo sapiens
  CDR3 for alpha chain variable domain of TCR clone 273965 (TRAV1-1, TRAJ27)
CAVICNTNAGKSTF

SEQ ID NO: 547930 - protein, 15 aa, Homo sapiens
  CDR3 for beta chain variable domain of TCR clone 273965 (TRBV7-2, TRBJ2-1)
CASSSGLAGGNEQFF

SEQ ID NO: 547931 - protein, 15 aa, Homo sapiens
  CDR3 for alpha chain variable domain of TCR clone 273966 (TRAV13-1, TRAJ32)
CAASNGWWCYKQAHL

SEQ ID NO: 547932 - protein, 16 aa, Homo sapiens
  CDR3 for beta chain variable domain of TCR clone 273966 (TRBV15, TRBJ1-2)
CHPGREIDVVNYGYTF

SEQ ID NO: 547933 - protein, 14 aa, Homo sapiens
  CDR3 for alpha chain variable domain of TCR clone 273967 (TRAV17, TRAJ12)
CATDENDSSYKLIF

SEQ ID NO: 547934 - protein, 18 aa, Homo sapiens
  CDR3 for beta chain variable domain of TCR clone 273967 (TRBV25-1, TRBJ1-2)
CASSGLQNGQGLIFGYTF

SEQ ID NO: 547935 - protein, 13 aa, Homo sapiens
  CDR3 for alpha chain variable domain of TCR clone 273968 (TRAV1-2, TRAJ9)
CAALNTGGFKTIF

SEQ ID NO: 547936 - protein, 11 aa, Homo sapiens
  CDR3 for beta chain variable domain of TCR clone 273968 (TRBV7-3, TRBJ2-5)
CASSLSETQYF

SEQ ID NO: 547937 - protein, 17 aa, Homo sapiens
  CDR3 for alpha chain variable domain of TCR clone 273969 (TRAV3, TRAJ6)
CAVRDGPRAGGSCIPTF

SEQ ID NO: 547938 - protein, 12 aa, Homo sapiens
  CDR3 for beta chain variable domain of TCR clone 273969 (TRBV11-2, TRBJ2-2)
CASSLGGGELFF

SEQ ID NO: 547939 - protein, 15 aa, Homo sapiens
  CDR3 for alpha chain variable domain of TCR clone 273970 (TRAV26-1, TRAJ22)
CIVRVSFWFCKATDL

SEQ ID NO: 547940 - protein, 15 aa, Homo sapiens
  CDR3 for beta chain variable domain of TCR clone 273970 (TRBV4-1, TRBJ1-4)
CASSDTGGTNEKLFF

SEQ ID NO: 547941 - protein, 15 aa, Homo sapiens
  CDR3 for alpha chain variable domain of TCR clone 273971 (TRAV8-2, TRAJ42)
CVVSAYMGSHGNLIL

SEQ ID NO: 547942 - protein, 11 aa, Homo sapiens
  CDR3 for beta chain variable domain of TCR clone 273971 (TRBV5-1, TRBJ2-1)
CASSIGQEQFF

SEQ ID NO: 547943 - protein, 14 aa, Homo sapiens
  CDR3 for alpha chain variable domain of TCR clone 273972 (TRAV38-1, TRAJ40)
CALRPTSGTYKYIF

SEQ ID NO: 547944 - protein, 17 aa, Homo sapiens
  CDR3 for beta chain variable domain of TCR clone 273972 (TRBV20-1, TRBJ2-1)
CSASSSGLAGSYNEQFF

SEQ ID NO: 547945 - protein, 13 aa, Homo sapiens
  CDR3 for alpha chain variable domain of TCR clone 273973 (TRAV8-3, TRAJ48)
CALVPFGNEKLTF

SEQ ID NO: 547946 - protein, 19 aa, Homo sapiens
  CDR3 for beta chain variable domain of TCR clone 273973 (TRBV25-1, TRBJ2-2)
CAILVYRVDRGRKTGELFF

SEQ ID NO: 547947 - protein, 16 aa, Homo sapiens
  CDR3 for alpha chain variable domain of TCR clone 273974 (TRAV3, TRAJ10)
CAVRDMRAGGGNKLTF

SEQ ID NO: 547948 - protein, 14 aa, Homo sapiens
  CDR3 for beta chain variable domain of TCR clone 273974 (TRBV4-1, TRBJ1-1)
CASSRSGQSFEAFF

SEQ ID NO: 547949 - protein, 14 aa, Homo sapiens
  CDR3 for alpha chain variable domain of TCR clone 273975 (TRAV27, TRAJ22)
CAGVVPGSARQLTF

SEQ ID NO: 547950 - protein, 15 aa, Homo sapiens
  CDR3 for beta chain variable domain of TCR clone 273975 (TRBV29-1, TRBJ2-7)
CSVDFFDRGSYEQYF

SEQ ID NO: 547951 - protein, 14 aa, Homo sapiens
  CDR3 for alpha chain variable domain of TCR clone 273976 (TRAV1-2, TRAJ16)
CAVNRFSDDQKLLF

SEQ ID NO: 547952 - protein, 17 aa, Homo sapiens
  CDR3 for beta chain variable domain of TCR clone 273976 (TRBV13, TRBJ2-3)
CASSLSRVAGGRNTQYF

SEQ ID NO: 547953 - protein, 18 aa, Homo sapiens
  CDR3 for alpha chain variable domain of TCR clone 273977 (TRAV14/DV4, TRAJ52)
CAMREANAGGTSYGKLTF

SEQ ID NO: 547954 - protein, 13 aa, Homo sapiens
  CDR3 for beta chain variable domain of TCR clone 273977 (TRBV29-1, TRBJ2-5)
CSATTSGGETQYF

SEQ ID NO: 547955 - protein, 20 aa, Homo sapiens
  CDR3 for alpha chain variable domain of TCR clone 273978 (TRAV12-1, TRAJ42)
SAVIQPPTSVKGGSQGNLIS

SEQ ID NO: 547956 - protein, 18 aa, Homo sapiens
  CDR3 for beta chain variable domain of TCR clone 273978 (TRBV11-2, TRBJ2-3)
CASSLGGASRGAPNTQYF

SEQ ID NO: 547957 - protein, 14 aa, Homo sapiens
  CDR3 for alpha chain variable domain of TCR clone 273979 (TRAV8-6, TRAJ57)
CAPYDQGGSEKLVF

SEQ ID NO: 547958 - protein, 12 aa, Homo sapiens
  CDR3 for beta chain variable domain of TCR clone 273979 (TRBV7-9, TRBJ1-5)
CASSPQGQPQHF

SEQ ID NO: 547959 - protein, 11 aa, Homo sapiens
  CDR3 for alpha chain variable domain of TCR clone 273980 (TRAV17, TRAJ31)
CATSNNARLMF

SEQ ID NO: 547960 - protein, 15 aa, Homo sapiens
  CDR3 for beta chain variable domain of TCR clone 273980 (TRBV15, TRBJ2-1)
CATSRPGQGLHEQFF

SEQ ID NO: 547961 - protein, 15 aa, Homo sapiens
  CDR3 for alpha chain variable domain of TCR clone 273981 (TRAV3, TRAJ3)
CAVRDMSSSASKIIL

SEQ ID NO: 547962 - protein, 17 aa, Homo sapiens
  CDR3 for beta chain variable domain of TCR clone 273981 (TRBV4-1, TRBJ2-3)
CASSQGYVSGGTDTQYF

SEQ ID NO: 547963 - protein, 12 aa, Homo sapiens
  CDR3 for alpha chain variable domain of TCR clone 273982 (TRAV13-2, TRAJ39)
CAENSERNMLTF

SEQ ID NO: 547964 - protein, 13 aa, Homo sapiens
  CDR3 for beta chain variable domain of TCR clone 273982 (TRBV6-1, TRBJ1-2)
CASSGGISCGYTF

SEQ ID NO: 547965 - protein, 14 aa, Homo sapiens
  CDR3 for alpha chain variable domain of TCR clone 273983 (TRAV12-1, TRAJ30)
CVVNIGGRDDKIIF

SEQ ID NO: 547966 - protein, 13 aa, Homo sapiens
  CDR3 for beta chain variable domain of TCR clone 273983 (TRBV12-5, TRBJ2-1)
CASGLARGNEQFF

SEQ ID NO: 547967 - protein, 13 aa, Homo sapiens
  CDR3 for alpha chain variable domain of TCR clone 273984 (TRAV23/DV6, TRAJ36)
CAAGQTGANNLFF

SEQ ID NO: 547968 - protein, 15 aa, Homo sapiens
  CDR3 for beta chain variable domain of TCR clone 273984 (TRBV7-3, TRBJ2-1)
CASSLAGAGADEQFF

SEQ ID NO: 547969 - protein, 14 aa, Homo sapiens
  CDR3 for alpha chain variable domain of TCR clone 273985 (TRAV13-1, TRAJ35)
CAASKGGFGNVLHC

SEQ ID NO: 547970 - protein, 18 aa, Homo sapiens
  CDR3 for beta chain variable domain of TCR clone 273985 (TRBV27, TRBJ2-3)
CASSFSGTSGRGTDTQYF

SEQ ID NO: 547971 - protein, 14 aa, Homo sapiens
  CDR3 for alpha chain variable domain of TCR clone 273986 (TRAV13-1, TRAJ35)
CAASKGGFGNVLHC

SEQ ID NO: 547972 - protein, 13 aa, Homo sapiens
  CDR3 for beta chain variable domain of TCR clone 273986 (TRBV7-3, TRBJ1-1)
RASSQDWGAKAFF

SEQ ID NO: 547973 - protein, 14 aa, Homo sapiens
  CDR3 for alpha chain variable domain of TCR clone 273987 (TRAV4, TRAJ20)
CLVGRRSNDYKPSF

SEQ ID NO: 547974 - protein, 13 aa, Homo sapiens
  CDR3 for beta chain variable domain of TCR clone 273987 (TRBV19, TRBJ1-2)
CASSVPGQDGYTF

SEQ ID NO: 547975 - protein, 16 aa, Homo sapiens
  CDR3 for alpha chain variable domain of TCR clone 273988 (TRAV26-1, TRAJ32)
CIFRTNYGGATNKLIF

SEQ ID NO: 547976 - protein, 14 aa, Homo sapiens
  CDR3 for beta chain variable domain of TCR clone 273988 (TRBV27, TRBJ1-1)
CASSLLSGLSEAFF

SEQ ID NO: 547977 - protein, 16 aa, Homo sapiens
  CDR3 for alpha chain variable domain of TCR clone 273989 (TRAV17, TRAJ28)
CATDESSGAGSYQLTF

SEQ ID NO: 547978 - protein, 13 aa, Homo sapiens
  CDR3 for beta chain variable domain of TCR clone 273989 (TRBV7-9, TRBJ1-2)
CASWTGPNYGYTF

SEQ ID NO: 547979 - protein, 17 aa, Homo sapiens
  CDR3 for alpha chain variable domain of TCR clone 273990 (TRAV8-6, TRAJ58)
CAVSSWVGETSRSRLTF

SEQ ID NO: 547980 - protein, 14 aa, Homo sapiens
  CDR3 for beta chain variable domain of TCR clone 273990 (TRBV4-2, TRBJ2-1)
CASGLDRAYNEQFF

SEQ ID NO: 547981 - protein, 12 aa, Homo sapiens
  CDR3 for alpha chain variable domain of TCR clone 273991 (TRAV12-3, TRAJ17)
CAMTLTGNKLTF

SEQ ID NO: 547982 - protein, 13 aa, Homo sapiens
  CDR3 for beta chain variable domain of TCR clone 273991 (TRBV7-9, TRBJ1-2)
CASSLTQNYGYTF

SEQ ID NO: 547983 - protein, 13 aa, Homo sapiens
  CDR3 for alpha chain variable domain of TCR clone 273992 (TRAV20, TRAJ45)
CGYSGGGADGLTF

SEQ ID NO: 547984 - protein, 15 aa, Homo sapiens
  CDR3 for beta chain variable domain of TCR clone 273992 (TRBV27, TRBJ2-7)
CASSTAGTGSYEQFF

SEQ ID NO: 547985 - protein, 14 aa, Homo sapiens
  CDR3 for alpha chain variable domain of TCR clone 273993 (TRAV35, TRAJ54)
CAGYLIQGAQKLVF

SEQ ID NO: 547986 - protein, 14 aa, Homo sapiens
  CDR3 for beta chain variable domain of TCR clone 273993 (TRBV12-5, TRBJ2-5)
CASGSRTHQETQYF

SEQ ID NO: 547987 - protein, 14 aa, Homo sapiens
  CDR3 for alpha chain variable domain of TCR clone 273994 (TRAV8-6, TRAJ53)
CAVSDIGSNYKLTF

SEQ ID NO: 547988 - protein, 13 aa, Homo sapiens
  CDR3 for beta chain variable domain of TCR clone 273994 (TRBV11-3, TRBJ1-1)
CASSSTGNTEAFF

SEQ ID NO: 547989 - protein, 15 aa, Homo sapiens
  CDR3 for alpha chain variable domain of TCR clone 273995 (TRAV12-2, TRAJ53)
CAVNGGGGSNYKLSF

SEQ ID NO: 547990 - protein, 13 aa, Homo sapiens
  CDR3 for beta chain variable domain of TCR clone 273995 (TRBV3-1, TRBJ1-1)
CASSPGVITEAFF

SEQ ID NO: 547991 - protein, 12 aa, Homo sapiens
  CDR3 for alpha chain variable domain of TCR clone 273996 (TRAV30, TRAJ9)
CGTEARGNDMRF

SEQ ID NO: 547992 - protein, 13 aa, Homo sapiens
  CDR3 for beta chain variable domain of TCR clone 273996 (TRBV12-4, TRBJ1-2)
CASSSGSKDGYTF

SEQ ID NO: 547993 - protein, 14 aa, Homo sapiens
  CDR3 for alpha chain variable domain of TCR clone 273997 (TRAV27, TRAJ13)
CRSSNSGGYQKVTF

SEQ ID NO: 547994 - protein, 14 aa, Homo sapiens
  CDR3 for beta chain variable domain of TCR clone 273997 (TRBV7-3, TRBJ2-1)
CASSLAGGTNEQFF

SEQ ID NO: 547995 - protein, 15 aa, Homo sapiens
  CDR3 for alpha chain variable domain of TCR clone 273998 (TRAV38-1, TRAJ37)
CAFIHGSGNTGKPIF

SEQ ID NO: 547996 - protein, 12 aa, Homo sapiens
  CDR3 for beta chain variable domain of TCR clone 273998 (TRBV7-9, TRBJ2-7)
CASSFGSDEQYF

SEQ ID NO: 547997 - protein, 17 aa, Homo sapiens
  CDR3 for alpha chain variable domain of TCR clone 273999 (TRAV4, TRAJ18)
CLVGERSVGSTLGRLYF

SEQ ID NO: 547998 - protein, 18 aa, Homo sapiens
  CDR3 for beta chain variable domain of TCR clone 273999 (TRBV11-2, TRBJ2-3)
CARSLGGASRGAPNTQYF

SEQ ID NO: 547999 - protein, 15 aa, Homo sapiens
  CDR3 for alpha chain variable domain of TCR clone 274000 (TRAV17, TRAJ56)
CATDAIPGANSKLTF

SEQ ID NO: 548000 - protein, 15 aa, Homo sapiens
  CDR3 for beta chain variable domain of TCR clone 274000 (TRBV6-3, TRBJ2-2)
CASSRCGGNTGELFF

SEQ ID NO: 548001 - protein, 14 aa, Homo sapiens
  CDR3 for alpha chain variable domain of TCR clone 274001 (TRAV17, TRAJ39)
CATDPVRAGNMLTF

SEQ ID NO: 548002 - protein, 14 aa, Homo sapiens
  CDR3 for beta chain variable domain of TCR clone 274001 (TRBV19, TRBJ2-1)
CASGKSTQYNEQFF

SEQ ID NO: 548003 - protein, 16 aa, Homo sapiens
  CDR3 for alpha chain variable domain of TCR clone 274002 (TRAV30, TRAJ24)
CGTEIVDADSRGKFQF

SEQ ID NO: 548004 - protein, 13 aa, Homo sapiens
  CDR3 for beta chain variable domain of TCR clone 274002 (TRBV7-9, TRBJ1-2)
CASSLKQNYGYTF

SEQ ID NO: 548005 - protein, 14 aa, Homo sapiens
  CDR3 for alpha chain variable domain of TCR clone 274003 (TRAV12-2, TRAJ40)
CAVKIPSGTYKYIF

SEQ ID NO: 548006 - protein, 13 aa, Homo sapiens
  CDR3 for beta chain variable domain of TCR clone 274003 (TRBV11-2, TRBJ2-5)
CASSSTGEETQYF

SEQ ID NO: 548007 - protein, 14 aa, Homo sapiens
  CDR3 for alpha chain variable domain of TCR clone 274004 (TRAV16, TRAJ26)
CALSSANYGQNFVF

SEQ ID NO: 548008 - protein, 12 aa, Homo sapiens
  CDR3 for beta chain variable domain of TCR clone 274004 (TRBV29-1, TRBJ2-2)
CSVDKYTGELFF

SEQ ID NO: 548009 - protein, 13 aa, Homo sapiens
  CDR3 for alpha chain variable domain of TCR clone 274005 (TRAV3, TRAJ27)
CAVRPLGAGKSTF

SEQ ID NO: 548010 - protein, 17 aa, Homo sapiens
  CDR3 for beta chain variable domain of TCR clone 274005 (TRBV7-7, TRBJ1-4)
CASSLVGQGASNEKLFF

SEQ ID NO: 548011 - protein, 14 aa, Homo sapiens
  CDR3 for alpha chain variable domain of TCR clone 274006 (TRAV36/DV7, TRAJ44)
CCGANTGTASKLTF

SEQ ID NO: 548012 - protein, 15 aa, Homo sapiens
  CDR3 for beta chain variable domain of TCR clone 274006 (TRBV12-4, TRBJ2-5)
CASSPPTGLQGTQYF

SEQ ID NO: 548013 - protein, 12 aa, Homo sapiens
  CDR3 for alpha chain variable domain of TCR clone 274007 (TRAV13-1, TRAJ21)
CALRDNFNKFYF

SEQ ID NO: 548014 - protein, 14 aa, Homo sapiens
  CDR3 for beta chain variable domain of TCR clone 274007 (TRBV7-9, TRBJ1-4)
CAITEGEANEKLFF

SEQ ID NO: 548015 - protein, 13 aa, Homo sapiens
  CDR3 for alpha chain variable domain of TCR clone 274008 (TRAV2, TRAJ15)
CAVASQAGTALIF

SEQ ID NO: 548016 - protein, 18 aa, Homo sapiens
  CDR3 for beta chain variable domain of TCR clone 274008 (TRBV5-1, TRBJ2-7)
CASSSTGGASGYSYEQYF

SEQ ID NO: 548017 - protein, 15 aa, Homo sapiens
  CDR3 for alpha chain variable domain of TCR clone 274009 (TRAV12-1, TRAJ44)
CVADLPTGTASKLTF

SEQ ID NO: 548018 - protein, 17 aa, Homo sapiens
  CDR3 for beta chain variable domain of TCR clone 274009 (TRBV4-1, TRBJ2-3)
CASSQGYVSGGTDTQYF

SEQ ID NO: 548019 - protein, 14 aa, Homo sapiens
  CDR3 for alpha chain variable domain of TCR clone 274010 (TRAV12-1, TRAJ3)
CGAARYSSAPKIIF

SEQ ID NO: 548020 - protein, 15 aa, Homo sapiens
  CDR3 for beta chain variable domain of TCR clone 274010 (TRBV7-2, TRBJ2-6)
CASSREGSGANVLTF

SEQ ID NO: 548021 - protein, 15 aa, Homo sapiens
  CDR3 for alpha chain variable domain of TCR clone 274011 (TRAV27, TRAJ38)
CAGRFNAGNNRKLIW

SEQ ID NO: 548022 - protein, 13 aa, Homo sapiens
  CDR3 for beta chain variable domain of TCR clone 274011 (TRBV20-1, TRBJ2-1)
TSGALPPCNEQFF

SEQ ID NO: 548023 - protein, 13 aa, Homo sapiens
  CDR3 for alpha chain variable domain of TCR clone 274012 (TRAV8-3, TRAJ43)
CAVGPDNNNDMRF

SEQ ID NO: 548024 - protein, 15 aa, Homo sapiens
  CDR3 for beta chain variable domain of TCR clone 274012 (TRBV6-9, TRBJ1-5)
CASSYRGERDQPQHF

SEQ ID NO: 548025 - protein, 13 aa, Homo sapiens
  CDR3 for alpha chain variable domain of TCR clone 274013 (TRAV12-1, TRAJ3)
CVVNPRGASKIIF

SEQ ID NO: 548026 - protein, 13 aa, Homo sapiens
  CDR3 for beta chain variable domain of TCR clone 274013 (TRBV28, TRBJ1-5)
CASSDRGNQPQRF

SEQ ID NO: 548027 - protein, 16 aa, Homo sapiens
  CDR3 for alpha chain variable domain of TCR clone 274014 (TRAV30, TRAJ57)
CGTGWAPQGGSEKLFF

SEQ ID NO: 548028 - protein, 14 aa, Homo sapiens
  CDR3 for beta chain variable domain of TCR clone 274014 (TRBV18, TRBJ1-1)
CASSPGFQGVEAFF

SEQ ID NO: 548029 - protein, 14 aa, Homo sapiens
  CDR3 for alpha chain variable domain of TCR clone 274015 (TRAV9-2, TRAJ36)
CALPWRTGANNIFF

SEQ ID NO: 548030 - protein, 14 aa, Homo sapiens
  CDR3 for beta chain variable domain of TCR clone 274015 (TRBV2, TRBJ1-2)
CASSELQVNYGYTF

SEQ ID NO: 548031 - protein, 16 aa, Homo sapiens
  CDR3 for alpha chain variable domain of TCR clone 274016 (TRAV13-1, TRAJ42)
CAASGEYGGSQGNLIF

SEQ ID NO: 548032 - protein, 15 aa, Homo sapiens
  CDR3 for beta chain variable domain of TCR clone 274016 (TRBV11-2, TRBJ1-1)
CASSSRSSLLLSLDK

SEQ ID NO: 548033 - protein, 13 aa, Homo sapiens
  CDR3 for alpha chain variable domain of TCR clone 274017 (TRAV38-1, TRAJ42)
CARWVGSQGNLIF

SEQ ID NO: 548034 - protein, 17 aa, Homo sapiens
  CDR3 for beta chain variable domain of TCR clone 274017 (TRBV20-1, TRBJ2-1)
CSARDPLAGVWDNEQFF

SEQ ID NO: 548035 - protein, 15 aa, Homo sapiens
  CDR3 for alpha chain variable domain of TCR clone 274018 (TRAV38-1, TRAJ37)
CAFIHGSGNTGTLLF

SEQ ID NO: 548036 - protein, 12 aa, Homo sapiens
  CDR3 for beta chain variable domain of TCR clone 274018 (TRBV7-9, TRBJ2-7)
CASSFGSYEQYF

SEQ ID NO: 548037 - protein, 11 aa, Homo sapiens
  CDR3 for alpha chain variable domain of TCR clone 274019 (TRAV12-3, TRAJ27)
CAMAIAGKSTF

SEQ ID NO: 548038 - protein, 13 aa, Homo sapiens
  CDR3 for beta chain variable domain of TCR clone 274019 (TRBV20-1, TRBJ1-1)
CSARVGGNTEAFF

SEQ ID NO: 548039 - protein, 13 aa, Homo sapiens
  CDR3 for alpha chain variable domain of TCR clone 274020 (TRAV16, TRAJ54)
CALKVRGAQKLEF

SEQ ID NO: 548040 - protein, 13 aa, Homo sapiens
  CDR3 for beta chain variable domain of TCR clone 274020 (TRBV20-1, TRBJ1-1)
CSARGGGNTEAFF

SEQ ID NO: 548041 - protein, 11 aa, Homo sapiens
  CDR3 for alpha chain variable domain of TCR clone 274021 (TRAV12-2, TRAJ48)
CAVSGNEKLTF

SEQ ID NO: 548042 - protein, 15 aa, Homo sapiens
  CDR3 for beta chain variable domain of TCR clone 274021 (TRBV9, TRBJ2-1)
CASSLAGSSYNEQFF

SEQ ID NO: 548043 - protein, 12 aa, Homo sapiens
  CDR3 for alpha chain variable domain of TCR clone 274022 (TRAV22, TRAJ22)
CAPGGSARQLTF

SEQ ID NO: 548044 - protein, 19 aa, Homo sapiens
  CDR3 for beta chain variable domain of TCR clone 274022 (TRBV19, TRBJ2-2)
CASTRPGLAGGRVTGELFF

SEQ ID NO: 548045 - protein, 10 aa, Homo sapiens
  CDR3 for alpha chain variable domain of TCR clone 274023 (TRAV16, TRAJ22)
SAMYLRQLTF

SEQ ID NO: 548046 - protein, 16 aa, Homo sapiens
  CDR3 for beta chain variable domain of TCR clone 274023 (TRBV19, TRBJ2-1)
CASSKAGPSSHNEQFF

SEQ ID NO: 548047 - protein, 13 aa, Homo sapiens
  CDR3 for alpha chain variable domain of TCR clone 274024 (TRAV12-1, TRAJ16)
CVVNGPDGQKLLF

SEQ ID NO: 548048 - protein, 15 aa, Homo sapiens
  CDR3 for beta chain variable domain of TCR clone 274024 (TRBV6-3, TRBJ2-7)
CASSSPGTVFYEQYF

SEQ ID NO: 548049 - protein, 16 aa, Homo sapiens
  CDR3 for alpha chain variable domain of TCR clone 274025 (TRAV26-1, TRAJ6)
CIVRVPRTGGSYIPTF

SEQ ID NO: 548050 - protein, 15 aa, Homo sapiens
  CDR3 for beta chain variable domain of TCR clone 274025 (TRBV10-3, TRBJ2-7)
CANSDMTALSYEQYF

SEQ ID NO: 548051 - protein, 14 aa, Homo sapiens
  CDR3 for alpha chain variable domain of TCR clone 274026 (TRAV26-2, TRAJ38)
CILSNAGNNRKLIW

SEQ ID NO: 548052 - protein, 14 aa, Homo sapiens
  CDR3 for beta chain variable domain of TCR clone 274026 (TRBV19, TRBJ2-1)
CASPTFVLSGEQFF

SEQ ID NO: 548053 - protein, 14 aa, Homo sapiens
  CDR3 for alpha chain variable domain of TCR clone 274027 (TRAV13-1, TRAJ35)
CAASKGGFGNVLPC

SEQ ID NO: 548054 - protein, 14 aa, Homo sapiens
  CDR3 for beta chain variable domain of TCR clone 274027 (TRBV20-1, TRBJ2-2)
CSAPDTANTGELFF

SEQ ID NO: 548055 - protein, 17 aa, Homo sapiens
  CDR3 for alpha chain variable domain of TCR clone 274028 (TRAV26-1, TRAJ53)
CIVRVDDSGGSNYKLTF

SEQ ID NO: 548056 - protein, 15 aa, Homo sapiens
  CDR3 for beta chain variable domain of TCR clone 274028 (TRBV20-1, TRBJ2-7)
CSARVPAAYFYAQYF

SEQ ID NO: 548057 - protein, 15 aa, Homo sapiens
  CDR3 for alpha chain variable domain of TCR clone 274029 (TRAV12-2, TRAJ43)
CSFDMRFGAGTRLTV

SEQ ID NO: 548058 - protein, 14 aa, Homo sapiens
  CDR3 for beta chain variable domain of TCR clone 274029 (TRBV7-2, TRBJ2-7)
CASSPKTSFYEQYF

SEQ ID NO: 548059 - protein, 17 aa, Homo sapiens
  CDR3 for alpha chain variable domain of TCR clone 274030 (TRAV12-3, TRAJ6)
CAMSARGGAGGSYIPTF

SEQ ID NO: 548060 - protein, 12 aa, Homo sapiens
  CDR3 for beta chain variable domain of TCR clone 274030 (TRBV12-4, TRBJ2-3)
CASSTLPDTEYF

SEQ ID NO: 548061 - protein, 12 aa, Homo sapiens
  CDR3 for alpha chain variable domain of TCR clone 274031 (TRAV12-3, TRAJ17)
CAMTLTGNKLTF

SEQ ID NO: 548062 - protein, 15 aa, Homo sapiens
  CDR3 for beta chain variable domain of TCR clone 274031 (TRBV20-1, TRBJ2-7)
CSASDRVSGMDEQSF

SEQ ID NO: 548063 - protein, 17 aa, Homo sapiens
  CDR3 for alpha chain variable domain of TCR clone 274032 (TRAV23/DV6, TRAJ58)
CPARLLRGETSGSRLTF

SEQ ID NO: 548064 - protein, 14 aa, Homo sapiens
  CDR3 for beta chain variable domain of TCR clone 274032 (TRBV7-3, TRBJ2-1)
CASSLAGGTNEQFF

SEQ ID NO: 548065 - protein, 14 aa, Homo sapiens
  CDR3 for alpha chain variable domain of TCR clone 274033 (TRAV12-2, TRAJ40)
LAVNIPSGTYKYIF

SEQ ID NO: 548066 - protein, 14 aa, Homo sapiens
  CDR3 for beta chain variable domain of TCR clone 274033 (TRBV20-1, TRBJ1-1)
CSAQTRIGGTEAFF

SEQ ID NO: 548067 - protein, 14 aa, Homo sapiens
  CDR3 for alpha chain variable domain of TCR clone 274034 (TRAV1-2, TRAJ16)
CAVNRFSDGQKLIF

SEQ ID NO: 548068 - protein, 12 aa, Homo sapiens
  CDR3 for beta chain variable domain of TCR clone 274034 (TRBV11-2, TRBJ2-2)
CASSLGGGELFF

SEQ ID NO: 548069 - protein, 14 aa, Homo sapiens
  CDR3 for alpha chain variable domain of TCR clone 274035 (TRAV8-4, TRAJ45)
CASGGGGGADGLTF

SEQ ID NO: 548070 - protein, 20 aa, Homo sapiens
  CDR3 for beta chain variable domain of TCR clone 274035 (TRBV4-3, TRBJ2-3)
CASSPSVEMRASGRPDTQYF

SEQ ID NO: 548071 - protein, 16 aa, Homo sapiens
  CDR3 for alpha chain variable domain of TCR clone 274036 (TRAV8-3, TRAJ10)
CAVGPILTGRGNKLTF

SEQ ID NO: 548072 - protein, 16 aa, Homo sapiens
  CDR3 for beta chain variable domain of TCR clone 274036 (TRBV7-2, TRBJ2-5)
CASSSKWLSGQETQYF

SEQ ID NO: 548073 - protein, 12 aa, Homo sapiens
  CDR3 for alpha chain variable domain of TCR clone 274037 (TRAV12-2, TRAJ9)
CAVYNGGFKTIF

SEQ ID NO: 548074 - protein, 15 aa, Homo sapiens
  CDR3 for beta chain variable domain of TCR clone 274037 (TRBV4-3, TRBJ1-5)
CASSHDSGGGQPQHF

SEQ ID NO: 548075 - protein, 15 aa, Homo sapiens
  CDR3 for alpha chain variable domain of TCR clone 274038 (TRAV12-1, TRAJ44)
CVADLPTGTASKLTF

SEQ ID NO: 548076 - protein, 16 aa, Homo sapiens
  CDR3 for beta chain variable domain of TCR clone 274038 (TRBV19, TRBJ2-2)
CASSFPGQGLAGELFF

SEQ ID NO: 548077 - protein, 14 aa, Homo sapiens
  CDR3 for alpha chain variable domain of TCR clone 274039 (TRAV29/DV5, TRAJ43)
CAAIHSYNNNDMRF

SEQ ID NO: 548078 - protein, 14 aa, Homo sapiens
  CDR3 for beta chain variable domain of TCR clone 274039 (TRBV12-4, TRBJ2-5)
CASSSTEGSKTQYF

SEQ ID NO: 548079 - protein, 14 aa, Homo sapiens
  CDR3 for alpha chain variable domain of TCR clone 274040 (TRAV1-1, TRAJ35)
CAVRSIGFGNVLHC

SEQ ID NO: 548080 - protein, 14 aa, Homo sapiens
  CDR3 for beta chain variable domain of TCR clone 274040 (TRBV5-7, TRBJ2-7)
CACSGGLSSYEQYF

SEQ ID NO: 548081 - protein, 12 aa, Homo sapiens
  CDR3 for alpha chain variable domain of TCR clone 274041 (TRAV29/DV5, TRAJ49)
CAATDTGNQFYF

SEQ ID NO: 548082 - protein, 18 aa, Homo sapiens
  CDR3 for beta chain variable domain of TCR clone 274041 (TRBV25-1, TRBJ2-2)
CHPSYRVDRGRKTGELFF

SEQ ID NO: 548083 - protein, 13 aa, Homo sapiens
  CDR3 for alpha chain variable domain of TCR clone 274042 (TRAV8-3, TRAJ6)
CASRRGGSYIPTF

SEQ ID NO: 548084 - protein, 15 aa, Homo sapiens
  CDR3 for beta chain variable domain of TCR clone 274042 (TRBV4-1, TRBJ2-3)
CASSNLAGGRDTQYF

SEQ ID NO: 548085 - protein, 14 aa, Homo sapiens
  CDR3 for alpha chain variable domain of TCR clone 274043 (TRAV29/DV5, TRAJ47)
CAASSIEYGNKLVF

SEQ ID NO: 548086 - protein, 16 aa, Homo sapiens
  CDR3 for beta chain variable domain of TCR clone 274043 (TRBV7-3, TRBJ2-1)
CASSLEGYRSYNEQFF

SEQ ID NO: 548087 - protein, 11 aa, Homo sapiens
  CDR3 for alpha chain variable domain of TCR clone 274044 (TRAV23/DV6, TRAJ26)
CAARTYKADNY

SEQ ID NO: 548088 - protein, 16 aa, Homo sapiens
  CDR3 for beta chain variable domain of TCR clone 274044 (TRBV6-5, TRBJ2-2)
CASSHVSRAQPGELFF

SEQ ID NO: 548089 - protein, 12 aa, Homo sapiens
  CDR3 for alpha chain variable domain of TCR clone 274045 (TRAV2, TRAJ31)
CAVEDNNARLMF

SEQ ID NO: 548090 - protein, 15 aa, Homo sapiens
  CDR3 for beta chain variable domain of TCR clone 274045 (TRBV28, TRBJ2-7)
CASSLGRGLSYEQYF

SEQ ID NO: 548091 - protein, 15 aa, Homo sapiens
  CDR3 for alpha chain variable domain of TCR clone 274046 (TRAV26-1, TRAJ22)
CIVRVSFWFCKATDL

SEQ ID NO: 548092 - protein, 13 aa, Homo sapiens
  CDR3 for beta chain variable domain of TCR clone 274046 (TRBV12-5, TRBJ2-3)
CASGDRQSDTQYF

SEQ ID NO: 548093 - protein, 15 aa, Homo sapiens
  CDR3 for alpha chain variable domain of TCR clone 274047 (TRAV21, TRAJ53)
CATLNSGGSNYKLTF

SEQ ID NO: 548094 - protein, 15 aa, Homo sapiens
  CDR3 for beta chain variable domain of TCR clone 274047 (TRBV19, TRBJ2-1)
CASSLETSGYNEQFF

SEQ ID NO: 548095 - protein, 16 aa, Homo sapiens
  CDR3 for alpha chain variable domain of TCR clone 274048 (TRAV3, TRAJ18)
CAVRDGRGSTLGRLYF

SEQ ID NO: 548096 - protein, 17 aa, Homo sapiens
  CDR3 for beta chain variable domain of TCR clone 274048 (TRBV5-1, TRBJ2-3)
CASSKTGLADRTDTQYF

SEQ ID NO: 548097 - protein, 19 aa, Homo sapiens
  CDR3 for alpha chain variable domain of TCR clone 274049 (TRAV3, TRAJ6)
CAVRDRNPSRSGGSSIPKF

SEQ ID NO: 548098 - protein, 15 aa, Homo sapiens
  CDR3 for beta chain variable domain of TCR clone 274049 (TRBV18, TRBJ2-7)
CASSPTFMDSYEQYF

SEQ ID NO: 548099 - protein, 14 aa, Homo sapiens
  CDR3 for alpha chain variable domain of TCR clone 274050 (TRAV13-1, TRAJ9)
CAASALTGGFKTIF

SEQ ID NO: 548100 - protein, 14 aa, Homo sapiens
  CDR3 for beta chain variable domain of TCR clone 274050 (TRBV5-4, TRBJ1-1)
CASSLDSRRDEAFF

SEQ ID NO: 548101 - protein, 12 aa, Homo sapiens
  CDR3 for alpha chain variable domain of TCR clone 274051 (TRAV1-1, TRAJ8)
CAGGTGFQKLVF

SEQ ID NO: 548102 - protein, 15 aa, Homo sapiens
  CDR3 for beta chain variable domain of TCR clone 274051 (TRBV6-5, TRBJ2-1)
CASSYDAGAGNEQFF

SEQ ID NO: 548103 - protein, 14 aa, Homo sapiens
  CDR3 for alpha chain variable domain of TCR clone 274052 (TRAV8-3, TRAJ4)
CAVGAAGGYNKLIF

SEQ ID NO: 548104 - protein, 15 aa, Homo sapiens
  CDR3 for beta chain variable domain of TCR clone 274052 (TRBV6-5, TRBJ2-1)
CASSYDAGAGNEQFI

SEQ ID NO: 548105 - protein, 15 aa, Homo sapiens
  CDR3 for alpha chain variable domain of TCR clone 274053 (TRAV26-1, TRAJ20)
CIVRVAGSNDYKLSF

SEQ ID NO: 548106 - protein, 17 aa, Homo sapiens
  CDR3 for beta chain variable domain of TCR clone 274053 (TRBV11-2, TRBJ2-1)
CASSLYPPGVEYDEQFF

SEQ ID NO: 548107 - protein, 12 aa, Homo sapiens
  CDR3 for alpha chain variable domain of TCR clone 274054 (TRAV13-1, TRAJ15)
CAASQAGTALIF

SEQ ID NO: 548108 - protein, 18 aa, Homo sapiens
  CDR3 for beta chain variable domain of TCR clone 274054 (TRBV7-9, TRBJ2-3)
CAGSLPINGQISTDTQYF

SEQ ID NO: 548109 - protein, 12 aa, Homo sapiens
  CDR3 for alpha chain variable domain of TCR clone 274055 (TRAV12-3, TRAJ17)
CAMTLTGNKLTF

SEQ ID NO: 548110 - protein, 16 aa, Homo sapiens
  CDR3 for beta chain variable domain of TCR clone 274055 (TRBV19, TRBJ2-1)
CASSKVGPSSYNEQFF

SEQ ID NO: 548111 - protein, 12 aa, Homo sapiens
  CDR3 for alpha chain variable domain of TCR clone 274056 (TRAV23/DV6, TRAJ26)
CAASKFGQNFVF

SEQ ID NO: 548112 - protein, 14 aa, Homo sapiens
  CDR3 for beta chain variable domain of TCR clone 274056 (TRBV19, TRBJ2-1)
CASPTFVLSGEQFF

SEQ ID NO: 548113 - protein, 14 aa, Homo sapiens
  CDR3 for alpha chain variable domain of TCR clone 274057 (TRAV4, TRAJ9)
CLVGSGTGGFKTIF

SEQ ID NO: 548114 - protein, 13 aa, Homo sapiens
  CDR3 for beta chain variable domain of TCR clone 274057 (TRBV7-2, TRBJ1-2)
CASSLKQNYGYTF

SEQ ID NO: 548115 - protein, 17 aa, Homo sapiens
  CDR3 for alpha chain variable domain of TCR clone 274058 (TRAV3, TRAJ6)
CAVRDGPRAGGSYIPTF

SEQ ID NO: 548116 - protein, 15 aa, Homo sapiens
  CDR3 for beta chain variable domain of TCR clone 274058 (TRBV7-9, TRBJ2-2)
CASRPEGTSTGELFF

SEQ ID NO: 548117 - protein, 13 aa, Homo sapiens
  CDR3 for alpha chain variable domain of TCR clone 274059 (TRAV13-1, TRAJ40)
CAAISPGTYKYIF

SEQ ID NO: 548118 - protein, 13 aa, Homo sapiens
  CDR3 for beta chain variable domain of TCR clone 274059 (TRBV10-3, TRBJ2-7)
CASRAGGPHEQYF

SEQ ID NO: 548119 - protein, 13 aa, Homo sapiens
  CDR3 for alpha chain variable domain of TCR clone 274060 (TRAV23/DV6, TRAJ12)
WAPRVDRSYKLIF

SEQ ID NO: 548120 - protein, 12 aa, Homo sapiens
  CDR3 for beta chain variable domain of TCR clone 274060 (TRBV7-6, TRBJ2-5)
CASSLSQETQYF

SEQ ID NO: 548121 - protein, 13 aa, Homo sapiens
  CDR3 for alpha chain variable domain of TCR clone 274061 (TRAV30, TRAJ49)
CGTEPNTGNQFYF

SEQ ID NO: 548122 - protein, 16 aa, Homo sapiens
  CDR3 for beta chain variable domain of TCR clone 274061 (TRBV12-4, TRBJ2-5)
CASSLSTSGGKETQYF

SEQ ID NO: 548123 - protein, 15 aa, Homo sapiens
  CDR3 for alpha chain variable domain of TCR clone 274062 (TRAV29/DV5, TRAJ40)
CAASAQGAGTYKYIF

SEQ ID NO: 548124 - protein, 11 aa, Homo sapiens
  CDR3 for beta chain variable domain of TCR clone 274062 (TRBV29-1, TRBJ2-5)
CSEDRTGTQYF

SEQ ID NO: 548125 - protein, 14 aa, Homo sapiens
  CDR3 for alpha chain variable domain of TCR clone 274063 (TRAV14/DV4, TRAJ20)
CAMRESLNDYKLSF

SEQ ID NO: 548126 - protein, 15 aa, Homo sapiens
  CDR3 for beta chain variable domain of TCR clone 274063 (TRBV7-9, TRBJ2-7)
CASSLALAEAYEQYC

SEQ ID NO: 548127 - protein, 13 aa, Homo sapiens
  CDR3 for alpha chain variable domain of TCR clone 274064 (TRAV26-1, TRAJ38)
CIADNAGNNRKLI

SEQ ID NO: 548128 - protein, 17 aa, Homo sapiens
  CDR3 for beta chain variable domain of TCR clone 274064 (TRBV15, TRBJ1-1)
CATSRVGGADGDTEAFF

SEQ ID NO: 548129 - protein, 15 aa, Homo sapiens
  CDR3 for alpha chain variable domain of TCR clone 274065 (TRAV25, TRAJ52)
CAGRPGGTSYGKLTL

SEQ ID NO: 548130 - protein, 16 aa, Homo sapiens
  CDR3 for beta chain variable domain of TCR clone 274065 (TRBV12-4, TRBJ1-5)
CASSSGPRGSNQPQHF

SEQ ID NO: 548131 - protein, 14 aa, Homo sapiens
  CDR3 for alpha chain variable domain of TCR clone 274066 (TRAV8-4, TRAJ15)
CDVTIREAGTALIF

SEQ ID NO: 548132 - protein, 16 aa, Homo sapiens
  CDR3 for beta chain variable domain of TCR clone 274066 (TRBV29-1, TRBJ2-6)
CSVEDITYSGANVLTF

SEQ ID NO: 548133 - protein, 16 aa, Homo sapiens
  CDR3 for alpha chain variable domain of TCR clone 274067 (TRAV12-2, TRAJ32)
CAVNLGQGGATNKLIF

SEQ ID NO: 548134 - protein, 15 aa, Homo sapiens
  CDR3 for beta chain variable domain of TCR clone 274067 (TRBV20-1, TRBJ2-7)
CSARGPLVGGREQYF

SEQ ID NO: 548135 - protein, 14 aa, Homo sapiens
  CDR3 for alpha chain variable domain of TCR clone 274068 (TRAV1-2, TRAJ16)
CAVNRFSDGQKLLF

SEQ ID NO: 548136 - protein, 16 aa, Homo sapiens
  CDR3 for beta chain variable domain of TCR clone 274068 (TRBV5-1, TRBJ2-5)
CASSLRRTSGQETQHF

SEQ ID NO: 548137 - protein, 13 aa, Homo sapiens
  CDR3 for alpha chain variable domain of TCR clone 274069 (TRAV2, TRAJ40)
CAVVTSGTYKYIF

SEQ ID NO: 548138 - protein, 13 aa, Homo sapiens
  CDR3 for beta chain variable domain of TCR clone 274069 (TRBV2, TRBJ1-4)
CASSERAGEKLFF

SEQ ID NO: 548139 - protein, 17 aa, Homo sapiens
  CDR3 for alpha chain variable domain of TCR clone 274070 (TRAV3, TRAJ42)
CAVRDRDYGGSQGNLIF

SEQ ID NO: 548140 - protein, 15 aa, Homo sapiens
  CDR3 for beta chain variable domain of TCR clone 274070 (TRBV2, TRBJ2-7)
CASSEGLARSYKQYF

SEQ ID NO: 548141 - protein, 15 aa, Homo sapiens
  CDR3 for alpha chain variable domain of TCR clone 274071 (TRAV34, TRAJ38)
CGADFTPGNNRKLIW

SEQ ID NO: 548142 - protein, 15 aa, Homo sapiens
  CDR3 for beta chain variable domain of TCR clone 274071 (TRBV7-3, TRBJ2-2)
CASSLTGQGTGELFF

SEQ ID NO: 548143 - protein, 14 aa, Homo sapiens
  CDR3 for alpha chain variable domain of TCR clone 274072 (TRAV1-2, TRAJ13)
CALKHSGGYQKVTF

SEQ ID NO: 548144 - protein, 12 aa, Homo sapiens
  CDR3 for beta chain variable domain of TCR clone 274072 (TRBV7-3, TRBJ2-5)
CASSSPGGTQYF

SEQ ID NO: 548145 - protein, 10 aa, Homo sapiens
  CDR3 for alpha chain variable domain of TCR clone 274073 (TRAV12-1, TRAJ20)
CVVNPRKLSF

SEQ ID NO: 548146 - protein, 17 aa, Homo sapiens
  CDR3 for beta chain variable domain of TCR clone 274073 (TRBV20-1, TRBJ2-1)
CSASSSGLAGSYNEQFF

SEQ ID NO: 548147 - protein, 10 aa, Homo sapiens
  CDR3 for alpha chain variable domain of TCR clone 274074 (TRAV26-1, TRAJ40)
CIAGTYKYIF

SEQ ID NO: 548148 - protein, 13 aa, Homo sapiens
  CDR3 for beta chain variable domain of TCR clone 274074 (TRBV5-1, TRBJ2-1)
CASSLGSYNEQFF

SEQ ID NO: 548149 - protein, 14 aa, Homo sapiens
  CDR3 for alpha chain variable domain of TCR clone 274075 (TRAV12-1, TRAJ15)
CLPPAHQAGTALIF

SEQ ID NO: 548150 - protein, 13 aa, Homo sapiens
  CDR3 for beta chain variable domain of TCR clone 274075 (TRBV7-2, TRBJ2-4)
CASSREHANMQYF

SEQ ID NO: 548151 - protein, 14 aa, Homo sapiens
  CDR3 for alpha chain variable domain of TCR clone 274076 (TRAV26-1, TRAJ39)
CIVRGSRAGNMLPF

SEQ ID NO: 548152 - protein, 15 aa, Homo sapiens
  CDR3 for beta chain variable domain of TCR clone 274076 (TRBV7-9, TRBJ1-5)
CASSRGHQPNQPQHF

SEQ ID NO: 548153 - protein, 11 aa, Homo sapiens
  CDR3 for alpha chain variable domain of TCR clone 274077 (TRAV2, TRAJ13)
CASGVYQKVTF

SEQ ID NO: 548154 - protein, 17 aa, Homo sapiens
  CDR3 for beta chain variable domain of TCR clone 274077 (TRBV7-3, TRBJ2-3)
CASSLMKRMRGADTQYF

SEQ ID NO: 548155 - protein, 13 aa, Homo sapiens
  CDR3 for alpha chain variable domain of TCR clone 274078 (TRAV3, TRAJ21)
CAVREPDFNKFYF

SEQ ID NO: 548156 - protein, 12 aa, Homo sapiens
  CDR3 for beta chain variable domain of TCR clone 274078 (TRBV12-4, TRBJ2-7)
CASSVGGYEQYF

SEQ ID NO: 548157 - protein, 14 aa, Homo sapiens
  CDR3 for alpha chain variable domain of TCR clone 274079 (TRAV1-2, TRAJ16)
CAVNRISDGQKLLF

SEQ ID NO: 548158 - protein, 14 aa, Homo sapiens
  CDR3 for beta chain variable domain of TCR clone 274079 (TRBV19, TRBJ2-1)
CASPTFVLSGEQFF

SEQ ID NO: 548159 - protein, 13 aa, Homo sapiens
  CDR3 for alpha chain variable domain of TCR clone 274080 (TRAV17, TRAJ4)
CATKYGGYNKLIF

SEQ ID NO: 548160 - protein, 14 aa, Homo sapiens
  CDR3 for beta chain variable domain of TCR clone 274080 (TRBV20-1, TRBJ1-5)
CSARDDRGNQPQHF

SEQ ID NO: 548161 - protein, 15 aa, Homo sapiens
  CDR3 for alpha chain variable domain of TCR clone 274081 (TRAV20, TRAJ16)
CAVQIRFSDGQKLLF

SEQ ID NO: 548162 - protein, 16 aa, Homo sapiens
  CDR3 for beta chain variable domain of TCR clone 274081 (TRBV13, TRBJ2-2)
CASSPRTGEHTGELFF

SEQ ID NO: 548163 - protein, 19 aa, Homo sapiens
  CDR3 for alpha chain variable domain of TCR clone 274082 (TRAV26-1, TRAJ50)
CCVLLHRQNPKTSYDKVIF

SEQ ID NO: 548164 - protein, 16 aa, Homo sapiens
  CDR3 for beta chain variable domain of TCR clone 274082 (TRBV12-5, TRBJ2-5)
CASGPRTSGNQETQYF

SEQ ID NO: 548165 - protein, 16 aa, Homo sapiens
  CDR3 for alpha chain variable domain of TCR clone 274083 (TRAV17, TRAJ28)
CATASVPGAWSYQLTF

SEQ ID NO: 548166 - protein, 14 aa, Homo sapiens
  CDR3 for beta chain variable domain of TCR clone 274083 (TRBV19, TRBJ2-1)
CASEVTGARNEQFF

SEQ ID NO: 548167 - protein, 12 aa, Homo sapiens
  CDR3 for alpha chain variable domain of TCR clone 274084 (TRAV20, TRAJ39)
CAVGNAGNMLTF

SEQ ID NO: 548168 - protein, 16 aa, Homo sapiens
  CDR3 for beta chain variable domain of TCR clone 274084 (TRBV15, TRBJ1-2)
CATGRGPRTGGGGYTF

SEQ ID NO: 548169 - protein, 14 aa, Homo sapiens
  CDR3 for alpha chain variable domain of TCR clone 274085 (TRAV2, TRAJ9)
CAVEDRSGGCKTIF

SEQ ID NO: 548170 - protein, 13 aa, Homo sapiens
  CDR3 for beta chain variable domain of TCR clone 274085 (TRBV11-2, TRBJ2-5)
CASSSTGEETQYF

SEQ ID NO: 548171 - protein, 14 aa, Homo sapiens
  CDR3 for alpha chain variable domain of TCR clone 274086 (TRAV1-2, TRAJ8)
CAVREDTGFQKLVF

SEQ ID NO: 548172 - protein, 15 aa, Homo sapiens
  CDR3 for beta chain variable domain of TCR clone 274086 (TRBV10-3, TRBJ2-3)
CAISVLGQETDTQYF

SEQ ID NO: 548173 - protein, 14 aa, Homo sapiens
  CDR3 for alpha chain variable domain of TCR clone 274087 (TRAV1-2, TRAJ16)
CAVNRFSDGQKLLF

SEQ ID NO: 548174 - protein, 13 aa, Homo sapiens
  CDR3 for beta chain variable domain of TCR clone 274087 (TRBV10-3, TRBJ2-7)
SASKLAVNYEQYF

SEQ ID NO: 548175 - protein, 10 aa, Homo sapiens
  CDR3 for alpha chain variable domain of TCR clone 274088 (TRAV12-3, TRAJ18)
CAMSAEAQPW

SEQ ID NO: 548176 - protein, 16 aa, Homo sapiens
  CDR3 for beta chain variable domain of TCR clone 274088 (TRBV19, TRBJ2-2)
CASRSPGTGATGELFF

SEQ ID NO: 548177 - protein, 14 aa, Homo sapiens
  CDR3 for alpha chain variable domain of TCR clone 274089 (TRAV21, TRAJ28)
CAVGSGAGSCQLTF

SEQ ID NO: 548178 - protein, 14 aa, Homo sapiens
  CDR3 for beta chain variable domain of TCR clone 274089 (TRBV18, TRBJ1-4)
CASSPGPNGEKLFF

SEQ ID NO: 548179 - protein, 12 aa, Homo sapiens
  CDR3 for alpha chain variable domain of TCR clone 274090 (TRAV12-3, TRAJ17)
CAMTLTGNKLTF

SEQ ID NO: 548180 - protein, 15 aa, Homo sapiens
  CDR3 for beta chain variable domain of TCR clone 274090 (TRBV11-2, TRBJ2-3)
CASSARRGRGDTQYF

SEQ ID NO: 548181 - protein, 13 aa, Homo sapiens
  CDR3 for alpha chain variable domain of TCR clone 274091 (TRAV13-1, TRAJ6)
CAASSGGSYIPTF

SEQ ID NO: 548182 - protein, 12 aa, Homo sapiens
  CDR3 for beta chain variable domain of TCR clone 274091 (TRBV12-4, TRBJ2-1)
CAYGPPGNEQFF

SEQ ID NO: 548183 - protein, 11 aa, Homo sapiens
  CDR3 for alpha chain variable domain of TCR clone 274092 (TRAV2, TRAJ13)
CASGGYQKVTF

SEQ ID NO: 548184 - protein, 15 aa, Homo sapiens
  CDR3 for beta chain variable domain of TCR clone 274092 (TRBV7-9, TRBJ1-6)
SASSSPGRGNSPLHF

SEQ ID NO: 548185 - protein, 14 aa, Homo sapiens
  CDR3 for alpha chain variable domain of TCR clone 274093 (TRAV12-1, TRAJ42)
CVVIYGGSQGNLIF

SEQ ID NO: 548186 - protein, 12 aa, Homo sapiens
  CDR3 for beta chain variable domain of TCR clone 274093 (TRBV11-2, TRBJ2-4)
CASSSASGSEYF

SEQ ID NO: 548187 - protein, 15 aa, Homo sapiens
  CDR3 for alpha chain variable domain of TCR clone 274094 (TRAV8-3, TRAJ11)
CAVGLLNSGYSTLTF

SEQ ID NO: 548188 - protein, 14 aa, Homo sapiens
  CDR3 for beta chain variable domain of TCR clone 274094 (TRBV7-2, TRBJ1-1)
CASSFLTGTTEAFF

SEQ ID NO: 548189 - protein, 12 aa, Homo sapiens
  CDR3 for alpha chain variable domain of TCR clone 274095 (TRAV3, TRAJ20)
CAVRDGDYKLSF

SEQ ID NO: 548190 - protein, 16 aa, Homo sapiens
  CDR3 for beta chain variable domain of TCR clone 274095 (TRBV7-8, TRBJ1-5)
CASSPWGPEGNQPQHF

SEQ ID NO: 548191 - protein, 12 aa, Homo sapiens
  CDR3 for alpha chain variable domain of TCR clone 274096 (TRAV13-1, TRAJ39)
CAASNAGNMLTF

SEQ ID NO: 548192 - protein, 15 aa, Homo sapiens
  CDR3 for beta chain variable domain of TCR clone 274096 (TRBV29-1, TRBJ2-5)
CSVAGASWTQETQYF

SEQ ID NO: 548193 - protein, 13 aa, Homo sapiens
  CDR3 for alpha chain variable domain of TCR clone 274097 (TRAV13-2, TRAJ40)
CAEFTSGTYTYIF

SEQ ID NO: 548194 - protein, 14 aa, Homo sapiens
  CDR3 for beta chain variable domain of TCR clone 274097 (TRBV10-2, TRBJ1-5)
CASSSTGRNQPQHF

SEQ ID NO: 548195 - protein, 18 aa, Homo sapiens
  CDR3 for alpha chain variable domain of TCR clone 274098 (TRAV26-2, TRAJ54)
CILRDVEVGIQGAQKLVF

SEQ ID NO: 548196 - protein, 13 aa, Homo sapiens
  CDR3 for beta chain variable domain of TCR clone 274098 (TRBV7-6, TRBJ2-7)
CASSLDHTHEQYF

SEQ ID NO: 548197 - protein, 14 aa, Homo sapiens
  CDR3 for alpha chain variable domain of TCR clone 274099 (TRAV8-3, TRAJ10)
CAVQAPGGGNKLTF

SEQ ID NO: 548198 - protein, 15 aa, Homo sapiens
  CDR3 for beta chain variable domain of TCR clone 274099 (TRBV28, TRBJ1-2)
CASSSPRRGNYGYTF

SEQ ID NO: 548199 - protein, 15 aa, Homo sapiens
  CDR3 for alpha chain variable domain of TCR clone 274100 (TRAV17, TRAJ16)
CATALRFSDGQKLLF

SEQ ID NO: 548200 - protein, 12 aa, Homo sapiens
  CDR3 for beta chain variable domain of TCR clone 274100 (TRBV11-2, TRBJ2-1)
CASSPGNNEQFF

SEQ ID NO: 548201 - protein, 12 aa, Homo sapiens
  CDR3 for alpha chain variable domain of TCR clone 274101 (TRAV12-3, TRAJ17)
CAMTLTGNKLTF

SEQ ID NO: 548202 - protein, 15 aa, Homo sapiens
  CDR3 for beta chain variable domain of TCR clone 274101 (TRBV13, TRBJ1-3)
CASSPNRGSGNTMYF

SEQ ID NO: 548203 - protein, 14 aa, Homo sapiens
  CDR3 for alpha chain variable domain of TCR clone 274102 (TRAV13-1, TRAJ35)
CAASKGGFGNVLHS

SEQ ID NO: 548204 - protein, 13 aa, Homo sapiens
  CDR3 for beta chain variable domain of TCR clone 274102 (TRBV7-3, TRBJ1-1)
CASSQDWGDEAFF

SEQ ID NO: 548205 - protein, 15 aa, Homo sapiens
  CDR3 for alpha chain variable domain of TCR clone 274103 (TRAV26-1, TRAJ29)
CIVRVEGSGNTPLVF

SEQ ID NO: 548206 - protein, 11 aa, Homo sapiens
  CDR3 for beta chain variable domain of TCR clone 274103 (TRBV7-2, TRBJ2-7)
CASSSGLWQYF

SEQ ID NO: 548207 - protein, 16 aa, Homo sapiens
  CDR3 for alpha chain variable domain of TCR clone 274104 (TRAV21, TRAJ45)
CAVTMYSGGGADGLTF

SEQ ID NO: 548208 - protein, 15 aa, Homo sapiens
  CDR3 for beta chain variable domain of TCR clone 274104 (TRBV5-7, TRBJ1-2)
CAGSSPGQGNYGYTF

SEQ ID NO: 548209 - protein, 14 aa, Homo sapiens
  CDR3 for alpha chain variable domain of TCR clone 274105 (TRAV38-1, TRAJ40)
CALRPTSGTYKYIL

SEQ ID NO: 548210 - protein, 15 aa, Homo sapiens
  CDR3 for beta chain variable domain of TCR clone 274105 (TRBV4-1, TRBJ1-4)
CASSDTGGTNEKLFF

SEQ ID NO: 548211 - protein, 19 aa, Homo sapiens
  CDR3 for alpha chain variable domain of TCR clone 274106 (TRAV26-1, TRAJ52)
CIVRAHRNAGGTSYGKLTF

SEQ ID NO: 548212 - protein, 16 aa, Homo sapiens
  CDR3 for beta chain variable domain of TCR clone 274106 (TRBV19, TRBJ2-2)
CASRSPWTGATGELFF

SEQ ID NO: 548213 - protein, 15 aa, Homo sapiens
  CDR3 for alpha chain variable domain of TCR clone 274107 (TRAV8-3, TRAJ11)
CAVGLLNSGYSPLTF

SEQ ID NO: 548214 - protein, 23 aa, Homo sapiens
  CDR3 for beta chain variable domain of TCR clone 274107 (TRBV7-9, TRBJ1-2)
EAQLEKSRLLSDRFSSGEDGYTF

SEQ ID NO: 548215 - protein, 16 aa, Homo sapiens
  CDR3 for alpha chain variable domain of TCR clone 274108 (TRAV20, TRAJ10)
CSVLRGLTGGGNKLTF

SEQ ID NO: 548216 - protein, 14 aa, Homo sapiens
  CDR3 for beta chain variable domain of TCR clone 274108 (TRBV19, TRBJ1-5)
CASRAPDSFLSQHF

SEQ ID NO: 548217 - protein, 16 aa, Homo sapiens
  CDR3 for alpha chain variable domain of TCR clone 274109 (TRAV26-1, TRAJ37)
CVVRGDGSGSTGKLIF

SEQ ID NO: 548218 - protein, 17 aa, Homo sapiens
  CDR3 for beta chain variable domain of TCR clone 274109 (TRBV4-1, TRBJ2-7)
CASSRDPLGVRGGEQYF

SEQ ID NO: 548219 - protein, 14 aa, Homo sapiens
  CDR3 for alpha chain variable domain of TCR clone 274110 (TRAV13-1, TRAJ45)
CAAIGGGGADGLTF

SEQ ID NO: 548220 - protein, 11 aa, Homo sapiens
  CDR3 for beta chain variable domain of TCR clone 274110 (TRBV29-1, TRBJ2-5)
CSEDRTGTQYF

SEQ ID NO: 548221 - protein, 19 aa, Homo sapiens
  CDR3 for alpha chain variable domain of TCR clone 274111 (TRAV3, TRAJ6)
CAVETAPGQEEATYLHLEE

SEQ ID NO: 548222 - protein, 14 aa, Homo sapiens
  CDR3 for beta chain variable domain of TCR clone 274111 (TRBV7-2, TRBJ2-7)
CASSPKTSFYEQYF

SEQ ID NO: 548223 - protein, 13 aa, Homo sapiens
  CDR3 for alpha chain variable domain of TCR clone 274112 (TRAV2, TRAJ40)
CAVVTSGTYKYIF

SEQ ID NO: 548224 - protein, 14 aa, Homo sapiens
  CDR3 for beta chain variable domain of TCR clone 274112 (TRBV15, TRBJ2-7)
CATSRVARGYEQYF

SEQ ID NO: 548225 - protein, 14 aa, Homo sapiens
  CDR3 for alpha chain variable domain of TCR clone 274113 (TRAV27, TRAJ15)
CAGFDNKAGTALIF

SEQ ID NO: 548226 - protein, 11 aa, Homo sapiens
  CDR3 for beta chain variable domain of TCR clone 274113 (TRBV29-1, TRBJ1-1)
CSVEVGTRTFF

SEQ ID NO: 548227 - protein, 11 aa, Homo sapiens
  CDR3 for alpha chain variable domain of TCR clone 274114 (TRAV29/DV5, TRAJ31)
CAAMNNARLMF

SEQ ID NO: 548228 - protein, 15 aa, Homo sapiens
  CDR3 for beta chain variable domain of TCR clone 274114 (TRBV7-9, TRBJ1-5)
CASSQGHQPNQPQHF

SEQ ID NO: 548229 - protein, 12 aa, Homo sapiens
  CDR3 for alpha chain variable domain of TCR clone 274115 (TRAV17, TRAJ57)
CATDGGSEKLVF

SEQ ID NO: 548230 - protein, 13 aa, Homo sapiens
  CDR3 for beta chain variable domain of TCR clone 274115 (TRBV14, TRBJ2-7)
CASSPRRPYEQYF

SEQ ID NO: 548231 - protein, 11 aa, Homo sapiens
  CDR3 for alpha chain variable domain of TCR clone 274116 (TRAV22, TRAJ49)
CAVLTGNQFYF

SEQ ID NO: 548232 - protein, 11 aa, Homo sapiens
  CDR3 for beta chain variable domain of TCR clone 274116 (TRBV5-6, TRBJ2-1)
CARSLGGEQFF

SEQ ID NO: 548233 - protein, 12 aa, Homo sapiens
  CDR3 for alpha chain variable domain of TCR clone 274117 (TRAV21, TRAJ11)
CAVRGGNSTLTF

SEQ ID NO: 548234 - protein, 15 aa, Homo sapiens
  CDR3 for beta chain variable domain of TCR clone 274117 (TRBV6-1, TRBJ2-7)
CASSEPIAASTEQYF

SEQ ID NO: 548235 - protein, 14 aa, Homo sapiens
  CDR3 for alpha chain variable domain of TCR clone 274118 (TRAV1-2, TRAJ8)
FAVREDTGFQKLVF

SEQ ID NO: 548236 - protein, 16 aa, Homo sapiens
  CDR3 for beta chain variable domain of TCR clone 274118 (TRBV29-1, TRBJ2-6)
CSVEDITYSGANVLTF

SEQ ID NO: 548237 - protein, 13 aa, Homo sapiens
  CDR3 for alpha chain variable domain of TCR clone 274119 (TRAV36/DV7, TRAJ54)
CAVDIQGAQKLVF

SEQ ID NO: 548238 - protein, 13 aa, Homo sapiens
  CDR3 for beta chain variable domain of TCR clone 274119 (TRBV19, TRBJ2-2)
CASSIWSTGELFF

SEQ ID NO: 548239 - protein, 13 aa, Homo sapiens
  CDR3 for alpha chain variable domain of TCR clone 274120 (TRAV12-2, TRAJ30)
CAVNLNRDDKIIF

SEQ ID NO: 548240 - protein, 13 aa, Homo sapiens
  CDR3 for beta chain variable domain of TCR clone 274120 (TRBV5-5, TRBJ2-7)
CASSSQTRQRQYF

SEQ ID NO: 548241 - protein, 13 aa, Homo sapiens
  CDR3 for alpha chain variable domain of TCR clone 274121 (TRAV1-2, TRAJ9)
CAALNTGGFKTIF

SEQ ID NO: 548242 - protein, 15 aa, Homo sapiens
  CDR3 for beta chain variable domain of TCR clone 274121 (TRBV7-2, TRBJ2-1)
CASSSDSLNYNEQFF

SEQ ID NO: 548243 - protein, 14 aa, Homo sapiens
  CDR3 for alpha chain variable domain of TCR clone 274122 (TRAV1-2, TRAJ8)
CAVREDTGFQKLVF

SEQ ID NO: 548244 - protein, 13 aa, Homo sapiens
  CDR3 for beta chain variable domain of TCR clone 274122 (TRBV6-3, TRBJ2-2)
CASSYMGAGELFF

SEQ ID NO: 548245 - protein, 16 aa, Homo sapiens
  CDR3 for alpha chain variable domain of TCR clone 274123 (TRAV29/DV5, TRAJ39)
CPASLLFNNAGNMLTF

SEQ ID NO: 548246 - protein, 16 aa, Homo sapiens
  CDR3 for beta chain variable domain of TCR clone 274123 (TRBV19, TRBJ2-6)
CASSMSGLSGANVLTF

SEQ ID NO: 548247 - protein, 13 aa, Homo sapiens
  CDR3 for alpha chain variable domain of TCR clone 274124 (TRAV13-1, TRAJ39)
CAASIWAGNMLTF

SEQ ID NO: 548248 - protein, 15 aa, Homo sapiens
  CDR3 for beta chain variable domain of TCR clone 274124 (TRBV10-2, TRBJ2-6)
CASSEQGTGANVLTF

SEQ ID NO: 548249 - protein, 15 aa, Homo sapiens
  CDR3 for alpha chain variable domain of TCR clone 274125 (TRAV3, TRAJ5)
CAVRDLDKGRRALTF

SEQ ID NO: 548250 - protein, 13 aa, Homo sapiens
  CDR3 for beta chain variable domain of TCR clone 274125 (TRBV12-4, TRBJ2-7)
CASSPTEAYEQYF

SEQ ID NO: 548251 - protein, 10 aa, Homo sapiens
  CDR3 for alpha chain variable domain of TCR clone 274126 (TRAV39, TRAJ49)
CAVSGNQFYF

SEQ ID NO: 548252 - protein, 14 aa, Homo sapiens
  CDR3 for beta chain variable domain of TCR clone 274126 (TRBV7-8, TRBJ2-7)
CASSPRDRVYEQYF

SEQ ID NO: 548253 - protein, 16 aa, Homo sapiens
  CDR3 for alpha chain variable domain of TCR clone 274127 (TRAV30, TRAJ26)
CGTESVGENYGQNFVF

SEQ ID NO: 548254 - protein, 13 aa, Homo sapiens
  CDR3 for beta chain variable domain of TCR clone 274127 (TRBV19, TRBJ1-2)
CASSISEDYGYTF

SEQ ID NO: 548255 - protein, 13 aa, Homo sapiens
  CDR3 for alpha chain variable domain of TCR clone 274128 (TRAV8-2, TRAJ43)
CGVSDQGDNDMRF

SEQ ID NO: 548256 - protein, 12 aa, Homo sapiens
  CDR3 for beta chain variable domain of TCR clone 274128 (TRBV7-9, TRBJ2-7)
CASRTGFDEQYF

SEQ ID NO: 548257 - protein, 13 aa, Homo sapiens
  CDR3 for alpha chain variable domain of TCR clone 274129 (TRAV27, TRAJ8)
CAGGPTGFQKLVF

SEQ ID NO: 548258 - protein, 15 aa, Homo sapiens
  CDR3 for beta chain variable domain of TCR clone 274129 (TRBV11-2, TRBJ2-1)
CASSPAGQSLNEQFF

SEQ ID NO: 548259 - protein, 16 aa, Homo sapiens
  CDR3 for alpha chain variable domain of TCR clone 274130 (TRAV3, TRAJ37)
CAVGPHGSVNPGKLIF

SEQ ID NO: 548260 - protein, 16 aa, Homo sapiens
  CDR3 for beta chain variable domain of TCR clone 274130 (TRBV9, TRBJ1-2)
CASSVEEKVSPYGYTF

SEQ ID NO: 548261 - protein, 14 aa, Homo sapiens
  CDR3 for alpha chain variable domain of TCR clone 274131 (TRAV12-3, TRAJ42)
CAMNYGGSQGNLIF

SEQ ID NO: 548262 - protein, 12 aa, Homo sapiens
  CDR3 for beta chain variable domain of TCR clone 274131 (TRBV7-2, TRBJ2-3)
CASSLTGDTQYF

SEQ ID NO: 548263 - protein, 17 aa, Homo sapiens
  CDR3 for alpha chain variable domain of TCR clone 274132 (TRAV3, TRAJ6)
CAVRDGPRAGGSYIPTF

SEQ ID NO: 548264 - protein, 15 aa, Homo sapiens
  CDR3 for beta chain variable domain of TCR clone 274132 (TRBV6-6, TRBJ2-5)
CASSPGGGLEETQYF

SEQ ID NO: 548265 - protein, 19 aa, Homo sapiens
  CDR3 for alpha chain variable domain of TCR clone 274133 (TRAV26-1, TRAJ27)
CCVLLHRQSFNTNAGKLTF

SEQ ID NO: 548266 - protein, 13 aa, Homo sapiens
  CDR3 for beta chain variable domain of TCR clone 274133 (TRBV20-1, TRBJ2-7)
CSATHTSGYEQYF

SEQ ID NO: 548267 - protein, 11 aa, Homo sapiens
  CDR3 for alpha chain variable domain of TCR clone 274134 (TRAV23/DV6, TRAJ47)
CTAGYGNKLVF

SEQ ID NO: 548268 - protein, 15 aa, Homo sapiens
  CDR3 for beta chain variable domain of TCR clone 274134 (TRBV4-1, TRBJ1-4)
CASSDTGGTNEKLFF

SEQ ID NO: 548269 - protein, 15 aa, Homo sapiens
  CDR3 for alpha chain variable domain of TCR clone 274135 (TRAV21, TRAJ4)
CAVPFSSGGYNKLIF

SEQ ID NO: 548270 - protein, 16 aa, Homo sapiens
  CDR3 for beta chain variable domain of TCR clone 274135 (TRBV2, TRBJ2-1)
CASSVGGSLSYNEQFF

SEQ ID NO: 548271 - protein, 14 aa, Homo sapiens
  CDR3 for alpha chain variable domain of TCR clone 274136 (TRAV9-2, TRAJ39)
CALYIYNAGNMLTF

SEQ ID NO: 548272 - protein, 15 aa, Homo sapiens
  CDR3 for beta chain variable domain of TCR clone 274136 (TRBV5-1, TRBJ2-2)
CASSSQGGNTGELFF

SEQ ID NO: 548273 - protein, 17 aa, Homo sapiens
  CDR3 for alpha chain variable domain of TCR clone 274137 (TRAV13-1, TRAJ52)
CAAGRNAGGTSYGKLTF

SEQ ID NO: 548274 - protein, 16 aa, Homo sapiens
  CDR3 for beta chain variable domain of TCR clone 274137 (TRBV27, TRBJ2-7)
CASSSERRDSAYEQYF

SEQ ID NO: 548275 - protein, 17 aa, Homo sapiens
  CDR3 for alpha chain variable domain of TCR clone 274138 (TRAV3, TRAJ42)
CAVRDRDYGGSQGTLII

SEQ ID NO: 548276 - protein, 13 aa, Homo sapiens
  CDR3 for beta chain variable domain of TCR clone 274138 (TRBV10-3, TRBJ2-7)
CASELAVNYEQYF

SEQ ID NO: 548277 - protein, 14 aa, Homo sapiens
  CDR3 for alpha chain variable domain of TCR clone 274139 (TRAV12-3, TRAJ29)
GAIILPSGNTPLVF

SEQ ID NO: 548278 - protein, 16 aa, Homo sapiens
  CDR3 for beta chain variable domain of TCR clone 274139 (TRBV28, TRBJ2-7)
CASSSGTSGRGYEQYF

SEQ ID NO: 548279 - protein, 13 aa, Homo sapiens
  CDR3 for alpha chain variable domain of TCR clone 274140 (TRAV12-3, TRAJ13)
CAMTSGGYQKDTF

SEQ ID NO: 548280 - protein, 13 aa, Homo sapiens
  CDR3 for beta chain variable domain of TCR clone 274140 (TRBV20-1, TRBJ2-2)
CSALSGGAGELFF

SEQ ID NO: 548281 - protein, 13 aa, Homo sapiens
  CDR3 for alpha chain variable domain of TCR clone 274141 (TRAV12-2, TRAJ20)
CDVNRLDDYKLSF

SEQ ID NO: 548282 - protein, 12 aa, Homo sapiens
  CDR3 for beta chain variable domain of TCR clone 274141 (TRBV28, TRBJ2-3)
CASSLYRDTQYF

SEQ ID NO: 548283 - protein, 10 aa, Homo sapiens
  CDR3 for alpha chain variable domain of TCR clone 274142 (TRAV8-2, TRAJ29)
CTGGNTPLVF

SEQ ID NO: 548284 - protein, 17 aa, Homo sapiens
  CDR3 for beta chain variable domain of TCR clone 274142 (TRBV2, TRBJ2-7)
YASSQALTGWDSYEQYF

SEQ ID NO: 548285 - protein, 18 aa, Homo sapiens
  CDR3 for alpha chain variable domain of TCR clone 274143 (TRAV8-3, TRAJ28)
CAVGATLGLGVTNSLTGR

SEQ ID NO: 548286 - protein, 14 aa, Homo sapiens
  CDR3 for beta chain variable domain of TCR clone 274143 (TRBV7-2, TRBJ2-1)
CASSLGVGYNEQFF

SEQ ID NO: 548287 - protein, 18 aa, Homo sapiens
  CDR3 for alpha chain variable domain of TCR clone 274144 (TRAV26-2, TRAJ54)
CILKDVEVGIQGAQKLVF

SEQ ID NO: 548288 - protein, 12 aa, Homo sapiens
  CDR3 for beta chain variable domain of TCR clone 274144 (TRBV27, TRBJ2-2)
CASKLFTGELFF

SEQ ID NO: 548289 - protein, 14 aa, Homo sapiens
  CDR3 for alpha chain variable domain of TCR clone 274145 (TRAV3, TRAJ33)
CAVGDMDSNYQLIW

SEQ ID NO: 548290 - protein, 19 aa, Homo sapiens
  CDR3 for beta chain variable domain of TCR clone 274145 (TRBV7-3, TRBJ1-2)
CASSFPQGNDGELWLHLRF

SEQ ID NO: 548291 - protein, 16 aa, Homo sapiens
  CDR3 for alpha chain variable domain of TCR clone 274146 (TRAV1-2, TRAJ10)
CAVRGVLTGGGNKLTF

SEQ ID NO: 548292 - protein, 15 aa, Homo sapiens
  CDR3 for beta chain variable domain of TCR clone 274146 (TRBV27, TRBJ2-1)
CASSNGGGSSDEQFF

SEQ ID NO: 548293 - protein, 16 aa, Homo sapiens
  CDR3 for alpha chain variable domain of TCR clone 274147 (TRAV4, TRAJ18)
CCVLLIGGSTLGRLYF

SEQ ID NO: 548294 - protein, 13 aa, Homo sapiens
  CDR3 for beta chain variable domain of TCR clone 274147 (TRBV27, TRBJ1-1)
CASSLSIGAEAFF

SEQ ID NO: 548295 - protein, 13 aa, Homo sapiens
  CDR3 for alpha chain variable domain of TCR clone 274148 (TRAV8-6, TRAJ33)
CAVSEGSNYQLIW

SEQ ID NO: 548296 - protein, 13 aa, Homo sapiens
  CDR3 for beta chain variable domain of TCR clone 274148 (TRBV5-7, TRBJ2-3)
CASSLGRKDTQYF

SEQ ID NO: 548297 - protein, 16 aa, Homo sapiens
  CDR3 for alpha chain variable domain of TCR clone 274149 (TRAV8-3, TRAJ44)
CAVGTLMTGTASKLTF

SEQ ID NO: 548298 - protein, 13 aa, Homo sapiens
  CDR3 for beta chain variable domain of TCR clone 274149 (TRBV5-7, TRBJ1-2)
CASSLGTGYGYTF

SEQ ID NO: 548299 - protein, 12 aa, Homo sapiens
  CDR3 for alpha chain variable domain of TCR clone 274150 (TRAV27, TRAJ13)
CAGAGGYQKVTF

SEQ ID NO: 548300 - protein, 15 aa, Homo sapiens
  CDR3 for beta chain variable domain of TCR clone 274150 (TRBV20-1, TRBJ2-6)
CSARDRGPGAHVLTF

SEQ ID NO: 548301 - protein, 14 aa, Homo sapiens
  CDR3 for alpha chain variable domain of TCR clone 274151 (TRAV3, TRAJ21)
CAVESQANFNKFYF

SEQ ID NO: 548302 - protein, 13 aa, Homo sapiens
  CDR3 for beta chain variable domain of TCR clone 274151 (TRBV7-3, TRBJ2-1)
CASSLDSYNEQFF

SEQ ID NO: 548303 - protein, 12 aa, Homo sapiens
  CDR3 for alpha chain variable domain of TCR clone 274152 (TRAV23/DV6, TRAJ30)
CAASKGGDKIIF

SEQ ID NO: 548304 - protein, 18 aa, Homo sapiens
  CDR3 for beta chain variable domain of TCR clone 274152 (TRBV10-3, TRBJ2-3)
CAISESRVGRMRGDTQYF

SEQ ID NO: 548305 - protein, 13 aa, Homo sapiens
  CDR3 for alpha chain variable domain of TCR clone 274153 (TRAV17, TRAJ34)
CATDLYNTDKLIF

SEQ ID NO: 548306 - protein, 18 aa, Homo sapiens
  CDR3 for beta chain variable domain of TCR clone 274153 (TRBV4-1, TRBJ1-4)
CASSPRTGGAWTNEKLFF

SEQ ID NO: 548307 - protein, 14 aa, Homo sapiens
  CDR3 for alpha chain variable domain of TCR clone 274154 (TRAV8-3, TRAJ10)
CAVGKSGGGNKLTF

SEQ ID NO: 548308 - protein, 16 aa, Homo sapiens
  CDR3 for beta chain variable domain of TCR clone 274154 (TRBV11-2, TRBJ1-2)
CASSLDTGGADYGYTF

SEQ ID NO: 548309 - protein, 14 aa, Homo sapiens
  CDR3 for alpha chain variable domain of TCR clone 274155 (TRAV12-2, TRAJ24)
CAVTPADSWGKLQF

SEQ ID NO: 548310 - protein, 13 aa, Homo sapiens
  CDR3 for beta chain variable domain of TCR clone 274155 (TRBV6-4, TRBJ1-5)
CSSSADLNQPQHF

SEQ ID NO: 548311 - protein, 13 aa, Homo sapiens
  CDR3 for alpha chain variable domain of TCR clone 274156 (TRAV27, TRAJ16)
CAGACSNGQKLVF

SEQ ID NO: 548312 - protein, 15 aa, Homo sapiens
  CDR3 for beta chain variable domain of TCR clone 274156 (TRBV19, TRBJ1-2)
CASTLDSTGNYGYTF

SEQ ID NO: 548313 - protein, 18 aa, Homo sapiens
  CDR3 for alpha chain variable domain of TCR clone 274157 (TRAV21, TRAJ52)
CAVRPSPAGGTSYGKLTF

SEQ ID NO: 548314 - protein, 13 aa, Homo sapiens
  CDR3 for beta chain variable domain of TCR clone 274157 (TRBV5-1, TRBJ1-1)
CASSLGSDTEAFS

SEQ ID NO: 548315 - protein, 17 aa, Homo sapiens
  CDR3 for alpha chain variable domain of TCR clone 274158 (TRAV3, TRAJ6)
CAVRDGPRAGGSYIPTF

SEQ ID NO: 548316 - protein, 18 aa, Homo sapiens
  CDR3 for beta chain variable domain of TCR clone 274158 (TRBV25-1, TRBJ1-2)
RGSSGLQNGQGLIFGYTF

SEQ ID NO: 548317 - protein, 13 aa, Homo sapiens
  CDR3 for alpha chain variable domain of TCR clone 274159 (TRAV16, TRAJ9)
CALRATGGFKTIF

SEQ ID NO: 548318 - protein, 19 aa, Homo sapiens
  CDR3 for beta chain variable domain of TCR clone 274159 (TRBV7-2, TRBJ2-5)
CASGTSGGTPPLGSETQYF

SEQ ID NO: 548319 - protein, 15 aa, Homo sapiens
  CDR3 for alpha chain variable domain of TCR clone 274160 (TRAV8-3, TRAJ45)
CVSSYSGGGADGLTF

SEQ ID NO: 548320 - protein, 16 aa, Homo sapiens
  CDR3 for beta chain variable domain of TCR clone 274160 (TRBV7-9, TRBJ2-2)
CASSGFGGANTGELFF

SEQ ID NO: 548321 - protein, 14 aa, Homo sapiens
  CDR3 for alpha chain variable domain of TCR clone 274161 (TRAV10, TRAJ48)
CVGVFHFGNEKLTF

SEQ ID NO: 548322 - protein, 13 aa, Homo sapiens
  CDR3 for beta chain variable domain of TCR clone 274161 (TRBV4-1, TRBJ2-7)
CASSQGQAYEQYV

SEQ ID NO: 548323 - protein, 12 aa, Homo sapiens
  CDR3 for alpha chain variable domain of TCR clone 274162 (TRAV8-4, TRAJ49)
CAVSEAGNQFYF

SEQ ID NO: 548324 - protein, 17 aa, Homo sapiens
  CDR3 for beta chain variable domain of TCR clone 274162 (TRBV11-2, TRBJ2-1)
CASSLYPPGVEYNEQFF

SEQ ID NO: 548325 - protein, 18 aa, Homo sapiens
  CDR3 for alpha chain variable domain of TCR clone 274163 (TRAV13-1, TRAJ52)
CAAKNPNAGGTSYGKLTF

SEQ ID NO: 548326 - protein, 16 aa, Homo sapiens
  CDR3 for beta chain variable domain of TCR clone 274163 (TRBV7-2, TRBJ2-5)
CASSSKWLRGQETQYF

SEQ ID NO: 548327 - protein, 13 aa, Homo sapiens
  CDR3 for alpha chain variable domain of TCR clone 274164 (TRAV36/DV7, TRAJ7)
CAGTRYGNNRLAF

SEQ ID NO: 548328 - protein, 14 aa, Homo sapiens
  CDR3 for beta chain variable domain of TCR clone 274164 (TRBV19, TRBJ2-1)
CASPTFVLSGERFF

SEQ ID NO: 548329 - protein, 12 aa, Homo sapiens
  CDR3 for alpha chain variable domain of TCR clone 274165 (TRAV26-1, TRAJ17)
CIVRSAGNKLTF

SEQ ID NO: 548330 - protein, 13 aa, Homo sapiens
  CDR3 for beta chain variable domain of TCR clone 274165 (TRBV5-5, TRBJ2-7)
CASSSQTGQRQYF

SEQ ID NO: 548331 - protein, 17 aa, Homo sapiens
  CDR3 for alpha chain variable domain of TCR clone 274166 (TRAV3, TRAJ42)
CAVRDRDYGGSQGNLIF

SEQ ID NO: 548332 - protein, 16 aa, Homo sapiens
  CDR3 for beta chain variable domain of TCR clone 274166 (TRBV6-1, TRBJ2-5)
CASSLRTGGVGETQYF

SEQ ID NO: 548333 - protein, 12 aa, Homo sapiens
  CDR3 for alpha chain variable domain of TCR clone 274167 (TRAV12-2, TRAJ36)
CAAPRGSNNLFF

SEQ ID NO: 548334 - protein, 15 aa, Homo sapiens
  CDR3 for beta chain variable domain of TCR clone 274167 (TRBV11-2, TRBJ1-3)
CASSLDGTVGNTIYF

SEQ ID NO: 548335 - protein, 14 aa, Homo sapiens
  CDR3 for alpha chain variable domain of TCR clone 274168 (TRAV2, TRAJ42)
CAVVGGGSQGNIIF

SEQ ID NO: 548336 - protein, 15 aa, Homo sapiens
  CDR3 for beta chain variable domain of TCR clone 274168 (TRBV11-3, TRBJ2-3)
CASSFRAAFPDTQYF

SEQ ID NO: 548337 - protein, 18 aa, Homo sapiens
  CDR3 for alpha chain variable domain of TCR clone 274169 (TRAV21, TRAJ52)
CAVRPSPAGGTSYGKLTF

SEQ ID NO: 548338 - protein, 15 aa, Homo sapiens
  CDR3 for beta chain variable domain of TCR clone 274169 (TRBV7-3, TRBJ1-6)
CASSPTGAPNSPLHF

SEQ ID NO: 548339 - protein, 14 aa, Homo sapiens
  CDR3 for alpha chain variable domain of TCR clone 274170 (TRAV17, TRAJ6)
CATNPAGGSYIPKF

SEQ ID NO: 548340 - protein, 13 aa, Homo sapiens
  CDR3 for beta chain variable domain of TCR clone 274170 (TRBV7-9, TRBJ2-3)
CASSPGSTDTQYF

SEQ ID NO: 548341 - protein, 18 aa, Homo sapiens
  CDR3 for alpha chain variable domain of TCR clone 274171 (TRAV26-2, TRAJ54)
CILRDVEVGIQGAQKLVF

SEQ ID NO: 548342 - protein, 16 aa, Homo sapiens
  CDR3 for beta chain variable domain of TCR clone 274171 (TRBV7-9, TRBJ2-1)
CASSDVAGGSYNEQFF

SEQ ID NO: 548343 - protein, 14 aa, Homo sapiens
  CDR3 for alpha chain variable domain of TCR clone 274172 (TRAV12-2, TRAJ13)
CAVKKTGGDQKVTF

SEQ ID NO: 548344 - protein, 15 aa, Homo sapiens
  CDR3 for beta chain variable domain of TCR clone 274172 (TRBV27, TRBJ2-1)
CASSDGGGSSNEQFF

SEQ ID NO: 548345 - protein, 13 aa, Homo sapiens
  CDR3 for alpha chain variable domain of TCR clone 274173 (TRAV12-1, TRAJ39)
CVARSGAGNMLTF

SEQ ID NO: 548346 - protein, 18 aa, Homo sapiens
  CDR3 for beta chain variable domain of TCR clone 274173 (TRBV7-6, TRBJ2-1)
CASSPRTSGMSSYNEQFF

SEQ ID NO: 548347 - protein, 18 aa, Homo sapiens
  CDR3 for alpha chain variable domain of TCR clone 274174 (TRAV13-1, TRAJ52)
CDASKRSAGGTSYGKLTF

SEQ ID NO: 548348 - protein, 13 aa, Homo sapiens
  CDR3 for beta chain variable domain of TCR clone 274174 (TRBV12-4, TRBJ1-2)
CASSLRQGEGYTF

SEQ ID NO: 548349 - protein, 14 aa, Homo sapiens
  CDR3 for alpha chain variable domain of TCR clone 274175 (TRAV38-1, TRAJ35)
CAFLNIGFGNVLHF

SEQ ID NO: 548350 - protein, 17 aa, Homo sapiens
  CDR3 for beta chain variable domain of TCR clone 274175 (TRBV28, TRBJ1-1)
CASSGDLRTESNTEAFF

SEQ ID NO: 548351 - protein, 14 aa, Homo sapiens
  CDR3 for alpha chain variable domain of TCR clone 274176 (TRAV8-2, TRAJ37)
CVVSISGNTGKLIF

SEQ ID NO: 548352 - protein, 11 aa, Homo sapiens
  CDR3 for beta chain variable domain of TCR clone 274176 (TRBV18, TRBJ2-5)
CAGAPRETQYF

SEQ ID NO: 548353 - protein, 14 aa, Homo sapiens
  CDR3 for alpha chain variable domain of TCR clone 274177 (TRAV8-3, TRAJ10)
CAVGNAGGGNKLTF

SEQ ID NO: 548354 - protein, 17 aa, Homo sapiens
  CDR3 for beta chain variable domain of TCR clone 274177 (TRBV27, TRBJ2-7)
WASSTKRPGTGPYEQYF

SEQ ID NO: 548355 - protein, 14 aa, Homo sapiens
  CDR3 for alpha chain variable domain of TCR clone 274178 (TRAV16, TRAJ17)
CAPRIKAAGNKLTF

SEQ ID NO: 548356 - protein, 13 aa, Homo sapiens
  CDR3 for beta chain variable domain of TCR clone 274178 (TRBV4-1, TRBJ2-7)
CASSQGQAYEQYF

SEQ ID NO: 548357 - protein, 16 aa, Homo sapiens
  CDR3 for alpha chain variable domain of TCR clone 274179 (TRAV16, TRAJ4)
CVRSRMFSGGYNKLIF

SEQ ID NO: 548358 - protein, 16 aa, Homo sapiens
  CDR3 for beta chain variable domain of TCR clone 274179 (TRBV24-1, TRBJ2-3)
CATSDPGTGATDTQYF

SEQ ID NO: 548359 - protein, 11 aa, Homo sapiens
  CDR3 for alpha chain variable domain of TCR clone 274180 (TRAV1-1, TRAJ23)
CAVRQGGKLIF

SEQ ID NO: 548360 - protein, 13 aa, Homo sapiens
  CDR3 for beta chain variable domain of TCR clone 274180 (TRBV12-4, TRBJ1-5)
CASSPRQYQPQHF

SEQ ID NO: 548361 - protein, 16 aa, Homo sapiens
  CDR3 for alpha chain variable domain of TCR clone 274181 (TRAV3, TRAJ23)
CAVKIGIYNQGGKLIF

SEQ ID NO: 548362 - protein, 17 aa, Homo sapiens
  CDR3 for beta chain variable domain of TCR clone 274181 (TRBV10-3, TRBJ2-6)
CAISESTAHSGANVLTF

SEQ ID NO: 548363 - protein, 14 aa, Homo sapiens
  CDR3 for alpha chain variable domain of TCR clone 274182 (TRAV2, TRAJ9)
CAVDPNTGGFKTIF

SEQ ID NO: 548364 - protein, 13 aa, Homo sapiens
  CDR3 for beta chain variable domain of TCR clone 274182 (TRBV20-1, TRBJ2-1)
CSASTGTSKEQFF

SEQ ID NO: 548365 - protein, 14 aa, Homo sapiens
  CDR3 for alpha chain variable domain of TCR clone 274183 (TRAV12-2, TRAJ44)
CSVNKAGTASKLTF

SEQ ID NO: 548366 - protein, 16 aa, Homo sapiens
  CDR3 for beta chain variable domain of TCR clone 274183 (TRBV6-1, TRBJ1-3)
CASSEGGVTSGNTIYF

SEQ ID NO: 548367 - protein, 13 aa, Homo sapiens
  CDR3 for alpha chain variable domain of TCR clone 274184 (TRAV13-1, TRAJ33)
CAASRAGNYQLIW

SEQ ID NO: 548368 - protein, 15 aa, Homo sapiens
  CDR3 for beta chain variable domain of TCR clone 274184 (TRBV2, TRBJ2-7)
EDSAMYLCASSEQYF

SEQ ID NO: 548369 - protein, 17 aa, Homo sapiens
  CDR3 for alpha chain variable domain of TCR clone 274185 (TRAV3, TRAJ6)
CAVRDGPRAGGSSIPPF

SEQ ID NO: 548370 - protein, 14 aa, Homo sapiens
  CDR3 for beta chain variable domain of TCR clone 274185 (TRBV7-2, TRBJ2-7)
CASSPKTSFYEQYF

SEQ ID NO: 548371 - protein, 14 aa, Homo sapiens
  CDR3 for alpha chain variable domain of TCR clone 274186 (TRAV20, TRAJ42)
CAVQGWRSQGNLIF

SEQ ID NO: 548372 - protein, 16 aa, Homo sapiens
  CDR3 for beta chain variable domain of TCR clone 274186 (TRBV7-3, TRBJ2-2)
CASSLKRGTLSGELFF

SEQ ID NO: 548373 - protein, 14 aa, Homo sapiens
  CDR3 for alpha chain variable domain of TCR clone 274187 (TRAV12-3, TRAJ10)
SHLPLTGGGNKLTF

SEQ ID NO: 548374 - protein, 15 aa, Homo sapiens
  CDR3 for beta chain variable domain of TCR clone 274187 (TRBV13, TRBJ2-1)
CASSLLSGLNNEQSF

SEQ ID NO: 548375 - protein, 14 aa, Homo sapiens
  CDR3 for alpha chain variable domain of TCR clone 274188 (TRAV30, TRAJ33)
CGTVAPRSNYQLIW

SEQ ID NO: 548376 - protein, 15 aa, Homo sapiens
  CDR3 for beta chain variable domain of TCR clone 274188 (TRBV5-1, TRBJ2-4)
CASSLGGGGSYIQYF

SEQ ID NO: 548377 - protein, 13 aa, Homo sapiens
  CDR3 for alpha chain variable domain of TCR clone 274189 (TRAV12-3, TRAJ7)
CAMTPYGNNRLAF

SEQ ID NO: 548378 - protein, 17 aa, Homo sapiens
  CDR3 for beta chain variable domain of TCR clone 274189 (TRBV25-1, TRBJ2-1)
CASSAYGQGRGVYEQFF

SEQ ID NO: 548379 - protein, 14 aa, Homo sapiens
  CDR3 for alpha chain variable domain of TCR clone 274190 (TRAV13-1, TRAJ44)
CAAKATGTASKLTF

SEQ ID NO: 548380 - protein, 16 aa, Homo sapiens
  CDR3 for beta chain variable domain of TCR clone 274190 (TRBV7-9, TRBJ2-6)
CASSLKGLLGANVLTF

SEQ ID NO: 548381 - protein, 15 aa, Homo sapiens
  CDR3 for alpha chain variable domain of TCR clone 274191 (TRAV9-2, TRAJ49)
CALSPLTTPVTSSIL

SEQ ID NO: 548382 - protein, 14 aa, Homo sapiens
  CDR3 for beta chain variable domain of TCR clone 274191 (TRBV12-4, TRBJ1-1)
CASSLGTGGTEAFF

SEQ ID NO: 548383 - protein, 13 aa, Homo sapiens
  CDR3 for alpha chain variable domain of TCR clone 274192 (TRAV20, TRAJ31)
CAVQACNNARLMF

SEQ ID NO: 548384 - protein, 13 aa, Homo sapiens
  CDR3 for beta chain variable domain of TCR clone 274192 (TRBV12-4, TRBJ1-2)
CASSLRQGKGYTF

SEQ ID NO: 548385 - protein, 14 aa, Homo sapiens
  CDR3 for alpha chain variable domain of TCR clone 274193 (TRAV1-2, TRAJ8)
CAVKEDTGFQKLVF

SEQ ID NO: 548386 - protein, 12 aa, Homo sapiens
  CDR3 for beta chain variable domain of TCR clone 274193 (TRBV14, TRBJ2-5)
CASSQLKETQYF

SEQ ID NO: 548387 - protein, 13 aa, Homo sapiens
  CDR3 for alpha chain variable domain of TCR clone 274194 (TRAV13-1, TRAJ6)
CSASSGGSYIPKF

SEQ ID NO: 548388 - protein, 13 aa, Homo sapiens
  CDR3 for beta chain variable domain of TCR clone 274194 (TRBV7-8, TRBJ2-7)
CASSLTGGREQYF

SEQ ID NO: 548389 - protein, 14 aa, Homo sapiens
  CDR3 for alpha chain variable domain of TCR clone 274195 (TRAV1-2, TRAJ16)
CAVNRFSDGQMLLF

SEQ ID NO: 548390 - protein, 12 aa, Homo sapiens
  CDR3 for beta chain variable domain of TCR clone 274195 (TRBV7-6, TRBJ2-7)
CASSLADSEQYF

SEQ ID NO: 548391 - protein, 14 aa, Homo sapiens
  CDR3 for alpha chain variable domain of TCR clone 274196 (TRAV13-1, TRAJ13)
CAASRVVGYQKVTF

SEQ ID NO: 548392 - protein, 14 aa, Homo sapiens
  CDR3 for beta chain variable domain of TCR clone 274196 (TRBV5-1, TRBJ2-7)
CASSATGGYDEQYF

SEQ ID NO: 548393 - protein, 17 aa, Homo sapiens
  CDR3 for alpha chain variable domain of TCR clone 274197 (TRAV12-3, TRAJ6)
CAMSARGGAGGSYIPTF

SEQ ID NO: 548394 - protein, 12 aa, Homo sapiens
  CDR3 for beta chain variable domain of TCR clone 274197 (TRBV12-4, TRBJ2-3)
CASSTLPHTQYF

SEQ ID NO: 548395 - protein, 21 aa, Homo sapiens
  CDR3 for alpha chain variable domain of TCR clone 274198 (TRAV26-1, )
CIADNAVNNHIQNPDPAVYQL

SEQ ID NO: 548396 - protein, 12 aa, Homo sapiens
  CDR3 for beta chain variable domain of TCR clone 274198 (TRBV11-2, TRBJ2-2)
CASSLGGGELFF

SEQ ID NO: 548397 - protein, 16 aa, Homo sapiens
  CDR3 for alpha chain variable domain of TCR clone 274199 (TRAV30, TRAJ53)
CGTEKGGGGSNYKLTF

SEQ ID NO: 548398 - protein, 15 aa, Homo sapiens
  CDR3 for beta chain variable domain of TCR clone 274199 (TRBV9, TRBJ2-7)
CASSVDPTASYEQYF

SEQ ID NO: 548399 - protein, 17 aa, Homo sapiens
  CDR3 for alpha chain variable domain of TCR clone 274200 (TRAV23/DV6, TRAJ57)
CAASSTLSQGGSEKLVF

SEQ ID NO: 548400 - protein, 14 aa, Homo sapiens
  CDR3 for beta chain variable domain of TCR clone 274200 (TRBV25-1, TRBJ1-1)
FASTHLGGNTEAFF

SEQ ID NO: 548401 - protein, 12 aa, Homo sapiens
  CDR3 for alpha chain variable domain of TCR clone 274201 (TRAV12-3, TRAJ17)
CAMTLTGNKLTF

SEQ ID NO: 548402 - protein, 15 aa, Homo sapiens
  CDR3 for beta chain variable domain of TCR clone 274201 (TRBV20-1, TRBJ2-7)
RSARDRVSGMDEQCF

SEQ ID NO: 548403 - protein, 13 aa, Homo sapiens
  CDR3 for alpha chain variable domain of TCR clone 274202 (TRAV27, TRAJ56)
CAGKPGANSKLTF

SEQ ID NO: 548404 - protein, 18 aa, Homo sapiens
  CDR3 for beta chain variable domain of TCR clone 274202 (TRBV11-2, TRBJ2-3)
CASSLGGASRVAPNTQYF

SEQ ID NO: 548405 - protein, 12 aa, Homo sapiens
  CDR3 for alpha chain variable domain of TCR clone 274203 (TRAV21, TRAJ49)
CAVSWTGNQFYF

SEQ ID NO: 548406 - protein, 14 aa, Homo sapiens
  CDR3 for beta chain variable domain of TCR clone 274203 (TRBV28, TRBJ2-7)
CASTFYGRAHEQYF

SEQ ID NO: 548407 - protein, 16 aa, Homo sapiens
  CDR3 for alpha chain variable domain of TCR clone 274204 (TRAV30, TRAJ24)
CGTEIVDADSWGKFQF

SEQ ID NO: 548408 - protein, 13 aa, Homo sapiens
  CDR3 for beta chain variable domain of TCR clone 274204 (TRBV9, TRBJ1-1)
CASSLTGSTEAFF

SEQ ID NO: 548409 - protein, 14 aa, Homo sapiens
  CDR3 for alpha chain variable domain of TCR clone 274205 (TRAV30, TRAJ33)
CGTVAPRSNYQLIW

SEQ ID NO: 548410 - protein, 14 aa, Homo sapiens
  CDR3 for beta chain variable domain of TCR clone 274205 (TRBV19, TRBJ2-1)
CASPTFVLSSEQFF

SEQ ID NO: 548411 - protein, 13 aa, Homo sapiens
  CDR3 for alpha chain variable domain of TCR clone 274206 (TRAV2, TRAJ20)
CAVEDPYEYKLSF

SEQ ID NO: 548412 - protein, 16 aa, Homo sapiens
  CDR3 for beta chain variable domain of TCR clone 274206 (TRBV25-1, TRBJ2-7)
CASSELTGGGIYEQYF

SEQ ID NO: 548413 - protein, 12 aa, Homo sapiens
  CDR3 for alpha chain variable domain of TCR clone 274207 (TRAV3, TRAJ20)
CAVRDPDYKLSF

SEQ ID NO: 548414 - protein, 16 aa, Homo sapiens
  CDR3 for beta chain variable domain of TCR clone 274207 (TRBV20-1, TRBJ1-4)
CSARPYGGELNEKLFF

SEQ ID NO: 548415 - protein, 14 aa, Homo sapiens
  CDR3 for alpha chain variable domain of TCR clone 274208 (TRAV20, TRAJ22)
CAVALGGSARQLTF

SEQ ID NO: 548416 - protein, 15 aa, Homo sapiens
  CDR3 for beta chain variable domain of TCR clone 274208 (TRBV7-2, TRBJ1-1)
CASSFAGYRDTEAFF

SEQ ID NO: 548417 - protein, 14 aa, Homo sapiens
  CDR3 for alpha chain variable domain of TCR clone 274209 (TRAV12-2, TRAJ40)
CAVKIPSGTYKYIF

SEQ ID NO: 548418 - protein, 16 aa, Homo sapiens
  CDR3 for beta chain variable domain of TCR clone 274209 (TRBV28, TRBJ2-7)
CASSPWVATGDRSQYF

SEQ ID NO: 548419 - protein, 13 aa, Homo sapiens
  CDR3 for alpha chain variable domain of TCR clone 274210 (TRAV12-3, TRAJ7)
CSMTPYGNNRLAF

SEQ ID NO: 548420 - protein, 16 aa, Homo sapiens
  CDR3 for beta chain variable domain of TCR clone 274210 (TRBV20-1, TRBJ1-4)
CSARPYGGEPNDNLFF

SEQ ID NO: 548421 - protein, 17 aa, Homo sapiens
  CDR3 for alpha chain variable domain of TCR clone 274211 (TRAV27, TRAJ45)
PLPLCRSSGGGADGLTF

SEQ ID NO: 548422 - protein, 17 aa, Homo sapiens
  CDR3 for beta chain variable domain of TCR clone 274211 (TRBV10-3, TRBJ2-4)
CTSVPSVNKGSKNIQYF

SEQ ID NO: 548423 - protein, 16 aa, Homo sapiens
  CDR3 for alpha chain variable domain of TCR clone 274212 (TRAV35, TRAJ20)
CWADPSSGFNDYKLSF

SEQ ID NO: 548424 - protein, 16 aa, Homo sapiens
  CDR3 for beta chain variable domain of TCR clone 274212 (TRBV4-3, TRBJ1-6)
RASSAQPGGEGSPLHF

SEQ ID NO: 548425 - protein, 14 aa, Homo sapiens
  CDR3 for alpha chain variable domain of TCR clone 274213 (TRAV12-1, TRAJ8)
CVVDSNTGFQKLGF

SEQ ID NO: 548426 - protein, 16 aa, Homo sapiens
  CDR3 for beta chain variable domain of TCR clone 274213 (TRBV20-1, TRBJ2-2)
CSARDDRVGLTGELFF

SEQ ID NO: 548427 - protein, 15 aa, Homo sapiens
  CDR3 for alpha chain variable domain of TCR clone 274214 (TRAV12-2, TRAJ56)
CAVNPFTGANSKLTF

SEQ ID NO: 548428 - protein, 13 aa, Homo sapiens
  CDR3 for beta chain variable domain of TCR clone 274214 (TRBV20-1, TRBJ1-2)
CSASDRVYGGYTF

SEQ ID NO: 548429 - protein, 14 aa, Homo sapiens
  CDR3 for alpha chain variable domain of TCR clone 274215 (TRAV13-1, TRAJ45)
CAAIGGGGTDGLTF

SEQ ID NO: 548430 - protein, 16 aa, Homo sapiens
  CDR3 for beta chain variable domain of TCR clone 274215 (TRBV7-2, TRBJ1-1)
CASSLGAGWTNTEAFF

SEQ ID NO: 548431 - protein, 16 aa, Homo sapiens
  CDR3 for alpha chain variable domain of TCR clone 274216 (TRAV8-3, TRAJ38)
CAVGASNAGNNRKLLW

SEQ ID NO: 548432 - protein, 15 aa, Homo sapiens
  CDR3 for beta chain variable domain of TCR clone 274216 (TRBV11-3, TRBJ1-3)
CASSLFGPSGNTIYF

SEQ ID NO: 548433 - protein, 15 aa, Homo sapiens
  CDR3 for alpha chain variable domain of TCR clone 274217 (TRAV26-1, TRAJ22)
CIVRVSFWFCKATDL

SEQ ID NO: 548434 - protein, 15 aa, Homo sapiens
  CDR3 for beta chain variable domain of TCR clone 274217 (TRBV9, TRBJ1-6)
CASGVAGTGDSPLHF

SEQ ID NO: 548435 - protein, 12 aa, Homo sapiens
  CDR3 for alpha chain variable domain of TCR clone 274218 (TRAV13-1, TRAJ21)
CAAKEGFNKFYF

SEQ ID NO: 548436 - protein, 17 aa, Homo sapiens
  CDR3 for beta chain variable domain of TCR clone 274218 (TRBV4-1, TRBJ2-7)
CASSRDPLGVRGGEQYF

SEQ ID NO: 548437 - protein, 14 aa, Homo sapiens
  CDR3 for alpha chain variable domain of TCR clone 274219 (TRAV1-2, TRAJ16)
CAANRFSDGQKLLF

SEQ ID NO: 548438 - protein, 16 aa, Homo sapiens
  CDR3 for beta chain variable domain of TCR clone 274219 (TRBV19, TRBJ2-1)
CASSKAGPRSYNEQFF

SEQ ID NO: 548439 - protein, 12 aa, Homo sapiens
  CDR3 for alpha chain variable domain of TCR clone 274220 (TRAV12-3, TRAJ17)
CAMTLTGSKLTF

SEQ ID NO: 548440 - protein, 15 aa, Homo sapiens
  CDR3 for beta chain variable domain of TCR clone 274220 (TRBV4-1, TRBJ1-4)
CASSDTGGTNEKLFF

SEQ ID NO: 548441 - protein, 17 aa, Homo sapiens
  CDR3 for alpha chain variable domain of TCR clone 274221 (TRAV8-6, TRAJ58)
YAVSSWVGETSGSRLTF

SEQ ID NO: 548442 - protein, 14 aa, Homo sapiens
  CDR3 for beta chain variable domain of TCR clone 274221 (TRBV4-3, TRBJ2-1)
CASGLDRAYNEQFF

SEQ ID NO: 548443 - protein, 16 aa, Homo sapiens
  CDR3 for alpha chain variable domain of TCR clone 274222 (TRAV27, TRAJ52)
CAGAPAGGTNYGKLTF

SEQ ID NO: 548444 - protein, 12 aa, Homo sapiens
  CDR3 for beta chain variable domain of TCR clone 274222 (TRBV27, TRBJ2-1)
CASRGFYNEQFF

SEQ ID NO: 548445 - protein, 12 aa, Homo sapiens
  CDR3 for alpha chain variable domain of TCR clone 274223 (TRAV13-1, TRAJ21)
CAAKESFNKFYF

SEQ ID NO: 548446 - protein, 20 aa, Homo sapiens
  CDR3 for beta chain variable domain of TCR clone 274223 (TRBV28, TRBJ2-1)
CASTPIGRSPGLAGGNEQFF

SEQ ID NO: 548447 - protein, 16 aa, Homo sapiens
  CDR3 for alpha chain variable domain of TCR clone 274224 (TRAV26-1, TRAJ53)
CIVRVAMGGSNYKLTF

SEQ ID NO: 548448 - protein, 19 aa, Homo sapiens
  CDR3 for beta chain variable domain of TCR clone 274224 (TRBV28, TRBJ1-5)
CASSLQGPTSSYSNQPQHF

SEQ ID NO: 548449 - protein, 13 aa, Homo sapiens
  CDR3 for alpha chain variable domain of TCR clone 274225 (TRAV12-3, TRAJ54)
CAMTLQGAQKLVF

SEQ ID NO: 548450 - protein, 14 aa, Homo sapiens
  CDR3 for beta chain variable domain of TCR clone 274225 (TRBV4-1, TRBJ2-2)
CASSQAVNTGEPFF

SEQ ID NO: 548451 - protein, 12 aa, Homo sapiens
  CDR3 for alpha chain variable domain of TCR clone 274226 (TRAV16, TRAJ9)
CALRSGGFKTIF

SEQ ID NO: 548452 - protein, 14 aa, Homo sapiens
  CDR3 for beta chain variable domain of TCR clone 274226 (TRBV7-9, TRBJ2-1)
CASIFAGPYNEQFF

SEQ ID NO: 548453 - protein, 13 aa, Homo sapiens
  CDR3 for alpha chain variable domain of TCR clone 274227 (TRAV8-3, TRAJ48)
CCGCNFGTEKLTF

SEQ ID NO: 548454 - protein, 12 aa, Homo sapiens
  CDR3 for beta chain variable domain of TCR clone 274227 (TRBV7-2, TRBJ2-5)
CASSQYQETQYF

SEQ ID NO: 548455 - protein, 14 aa, Homo sapiens
  CDR3 for alpha chain variable domain of TCR clone 274228 (TRAV12-3, TRAJ35)
CAMSLIGFGNVLHC

SEQ ID NO: 548456 - protein, 12 aa, Homo sapiens
  CDR3 for beta chain variable domain of TCR clone 274228 (TRBV12-4, TRBJ1-1)
CASSVAGLEAFF

SEQ ID NO: 548457 - protein, 14 aa, Homo sapiens
  CDR3 for alpha chain variable domain of TCR clone 274229 (TRAV13-1, TRAJ13)
CAASRVGGYQKVTF

SEQ ID NO: 548458 - protein, 14 aa, Homo sapiens
  CDR3 for beta chain variable domain of TCR clone 274229 (TRBV2, TRBJ2-7)
CASSLTSGGYEQYF

SEQ ID NO: 548459 - protein, 16 aa, Homo sapiens
  CDR3 for alpha chain variable domain of TCR clone 274230 (TRAV3, TRAJ37)
CSVRGKGSGNTGKLIF

SEQ ID NO: 548460 - protein, 15 aa, Homo sapiens
  CDR3 for beta chain variable domain of TCR clone 274230 (TRBV9, TRBJ1-4)
CASSVGGSTNEKLFF

SEQ ID NO: 548461 - protein, 14 aa, Homo sapiens
  CDR3 for alpha chain variable domain of TCR clone 274231 (TRAV12-1, TRAJ40)
WVVYTTSGTYKYIF

SEQ ID NO: 548462 - protein, 17 aa, Homo sapiens
  CDR3 for beta chain variable domain of TCR clone 274231 (TRBV13, TRBJ2-3)
CASSLSRVAGGRNTQYF

SEQ ID NO: 548463 - protein, 13 aa, Homo sapiens
  CDR3 for alpha chain variable domain of TCR clone 274232 (TRAV12-2, TRAJ4)
CAVFSGGYNKLIF

SEQ ID NO: 548464 - protein, 13 aa, Homo sapiens
  CDR3 for beta chain variable domain of TCR clone 274232 (TRBV19, TRBJ1-5)
CASSIDGEQPQHF

SEQ ID NO: 548465 - protein, 13 aa, Homo sapiens
  CDR3 for alpha chain variable domain of TCR clone 274233 (TRAV3, TRAJ27)
CAVRPLCAGKSTF

SEQ ID NO: 548466 - protein, 13 aa, Homo sapiens
  CDR3 for beta chain variable domain of TCR clone 274233 (TRBV7-9, TRBJ2-3)
CASSPGSTDTQYL

SEQ ID NO: 548467 - protein, 16 aa, Homo sapiens
  CDR3 for alpha chain variable domain of TCR clone 274234 (TRAV30, TRAJ24)
CGTEIVDADSWGKCQF

SEQ ID NO: 548468 - protein, 13 aa, Homo sapiens
  CDR3 for beta chain variable domain of TCR clone 274234 (TRBV20-1, TRBJ1-1)
CSARGGGNTEAFF

SEQ ID NO: 548469 - protein, 16 aa, Homo sapiens
  CDR3 for alpha chain variable domain of TCR clone 274235 (TRAV3, TRAJ37)
CAVRGKGSGNTGKLIC

SEQ ID NO: 548470 - protein, 16 aa, Homo sapiens
  CDR3 for beta chain variable domain of TCR clone 274235 (TRBV12-5, TRBJ2-5)
CASGPRTSGSQETQYF

SEQ ID NO: 548471 - protein, 15 aa, Homo sapiens
  CDR3 for alpha chain variable domain of TCR clone 274236 (TRAV21, TRAJ37)
CCPYRGSSNTGKLIF

SEQ ID NO: 548472 - protein, 13 aa, Homo sapiens
  CDR3 for beta chain variable domain of TCR clone 274236 (TRBV7-9, TRBJ2-5)
CASLPSGRETQYF

SEQ ID NO: 548473 - protein, 16 aa, Homo sapiens
  CDR3 for alpha chain variable domain of TCR clone 274237 (TRAV12-2, TRAJ6)
CAAPLAGSGGSYIPTS

SEQ ID NO: 548474 - protein, 10 aa, Homo sapiens
  CDR3 for beta chain variable domain of TCR clone 274237 (TRBV28, TRBJ1-2)
CASSSDRAVF

SEQ ID NO: 548475 - protein, 13 aa, Homo sapiens
  CDR3 for alpha chain variable domain of TCR clone 274238 (TRAV12-2, TRAJ20)
CAVYPSNDYKLSF

SEQ ID NO: 548476 - protein, 20 aa, Homo sapiens
  CDR3 for beta chain variable domain of TCR clone 274238 (TRBV7-8, TRBJ2-2)
CASSHLFPGPNIHITGELFF

SEQ ID NO: 548477 - protein, 12 aa, Homo sapiens
  CDR3 for alpha chain variable domain of TCR clone 274239 (TRAV16, TRAJ17)
CAQGAAGNKLTF

SEQ ID NO: 548478 - protein, 16 aa, Homo sapiens
  CDR3 for beta chain variable domain of TCR clone 274239 (TRBV19, TRBJ2-1)
CASSKAGPSSYNEQFF

SEQ ID NO: 548479 - protein, 18 aa, Homo sapiens
  CDR3 for alpha chain variable domain of TCR clone 274240 (TRAV21, TRAJ52)
CAVRPFPAGGTSYGKLTF

SEQ ID NO: 548480 - protein, 14 aa, Homo sapiens
  CDR3 for beta chain variable domain of TCR clone 274240 (TRBV6-1, TRBJ1-3)
CASVQGGGGNTIYF

SEQ ID NO: 548481 - protein, 14 aa, Homo sapiens
  CDR3 for alpha chain variable domain of TCR clone 274241 (TRAV26-1, TRAJ38)
CIADNAGNNRKLIW

SEQ ID NO: 548482 - protein, 14 aa, Homo sapiens
  CDR3 for beta chain variable domain of TCR clone 274241 (TRBV12-4, TRBJ2-2)
CASSLSQDTGELFF

SEQ ID NO: 548483 - protein, 15 aa, Homo sapiens
  CDR3 for alpha chain variable domain of TCR clone 274242 (TRAV12-3, TRAJ42)
CAMSGHGGSQGNLIF

SEQ ID NO: 548484 - protein, 14 aa, Homo sapiens
  CDR3 for beta chain variable domain of TCR clone 274242 (TRBV6-5, TRBJ1-5)
CASSFRQFNQPQHF

SEQ ID NO: 548485 - protein, 13 aa, Homo sapiens
  CDR3 for alpha chain variable domain of TCR clone 274243 (TRAV12-2, TRAJ31)
CAVKADNNARLMF

SEQ ID NO: 548486 - protein, 15 aa, Homo sapiens
  CDR3 for beta chain variable domain of TCR clone 274243 (TRBV15, TRBJ1-5)
CATSREQGGKQPQHF

SEQ ID NO: 548487 - protein, 12 aa, Homo sapiens
  CDR3 for alpha chain variable domain of TCR clone 274244 (TRAV8-3, TRAJ20)
CAVGANDYKLSF

SEQ ID NO: 548488 - protein, 15 aa, Homo sapiens
  CDR3 for beta chain variable domain of TCR clone 274244 (TRBV11-2, TRBJ2-1)
CASRLGNRGINEQLL

SEQ ID NO: 548489 - protein, 14 aa, Homo sapiens
  CDR3 for alpha chain variable domain of TCR clone 274245 (TRAV13-1, TRAJ22)
CAASNGGSARQLNF

SEQ ID NO: 548490 - protein, 14 aa, Homo sapiens
  CDR3 for beta chain variable domain of TCR clone 274245 (TRBV18, TRBJ2-2)
CASSPGQNTGELFF

SEQ ID NO: 548491 - protein, 13 aa, Homo sapiens
  CDR3 for alpha chain variable domain of TCR clone 274246 (TRAV8-3, TRAJ48)
CAVAAGGNEKLTF

SEQ ID NO: 548492 - protein, 15 aa, Homo sapiens
  CDR3 for beta chain variable domain of TCR clone 274246 (TRBV24-1, TRBJ2-5)
CATSETTGAVGAQYF

SEQ ID NO: 548493 - protein, 12 aa, Homo sapiens
  CDR3 for alpha chain variable domain of TCR clone 274247 (TRAV16, TRAJ8)
CAPLGGFQNLVF

SEQ ID NO: 548494 - protein, 15 aa, Homo sapiens
  CDR3 for beta chain variable domain of TCR clone 274247 (TRBV6-1, TRBJ1-5)
CASIPDRLGNQPQHF

SEQ ID NO: 548495 - protein, 12 aa, Homo sapiens
  CDR3 for alpha chain variable domain of TCR clone 274248 (TRAV21, TRAJ13)
PGPSGCYQKVTF

SEQ ID NO: 548496 - protein, 14 aa, Homo sapiens
  CDR3 for beta chain variable domain of TCR clone 274248 (TRBV20-1, TRBJ2-7)
CSAKDRKGAYEQYF

SEQ ID NO: 548497 - protein, 11 aa, Homo sapiens
  CDR3 for alpha chain variable domain of TCR clone 274249 (TRAV23/DV6, TRAJ58)
CAARLLRGETS

SEQ ID NO: 548498 - protein, 16 aa, Homo sapiens
  CDR3 for beta chain variable domain of TCR clone 274249 (TRBV7-3, TRBJ2-1)
CASSLEGYCSYNEQFF

SEQ ID NO: 548499 - protein, 15 aa, Homo sapiens
  CDR3 for alpha chain variable domain of TCR clone 274250 (TRAV3, TRAJ22)
CAVRDRGGSARPLTF

SEQ ID NO: 548500 - protein, 14 aa, Homo sapiens
  CDR3 for beta chain variable domain of TCR clone 274250 (TRBV7-2, TRBJ1-2)
CASSQTGSTYGYTF

SEQ ID NO: 548501 - protein, 14 aa, Homo sapiens
  CDR3 for alpha chain variable domain of TCR clone 274251 (TRAV4, TRAJ26)
CLVGPHNDGQNFVF

SEQ ID NO: 548502 - protein, 17 aa, Homo sapiens
  CDR3 for beta chain variable domain of TCR clone 274251 (TRBV24-1, TRBJ2-1)
CATSDVSTSGTYNEQFF

SEQ ID NO: 548503 - protein, 15 aa, Homo sapiens
  CDR3 for alpha chain variable domain of TCR clone 274252 (TRAV2, TRAJ37)
CAVEDGSSNTGKLIF

SEQ ID NO: 548504 - protein, 13 aa, Homo sapiens
  CDR3 for beta chain variable domain of TCR clone 274252 (TRBV20-1, TRBJ1-6)
CRTFREGNSPLHF

SEQ ID NO: 548505 - protein, 15 aa, Homo sapiens
  CDR3 for alpha chain variable domain of TCR clone 274253 (TRAV17, TRAJ57)
CATGPSQGGSEKLVC

SEQ ID NO: 548506 - protein, 12 aa, Homo sapiens
  CDR3 for beta chain variable domain of TCR clone 274253 (TRBV11-2, TRBJ2-4)
CASSSASGSEYF

SEQ ID NO: 548507 - protein, 14 aa, Homo sapiens
  CDR3 for alpha chain variable domain of TCR clone 274254 (TRAV12-2, TRAJ13)
CAVKKTGCYQKVTF

SEQ ID NO: 548508 - protein, 16 aa, Homo sapiens
  CDR3 for beta chain variable domain of TCR clone 274254 (TRBV2, TRBJ2-1)
CASRSPAGGKYNEQFF

SEQ ID NO: 548509 - protein, 15 aa, Homo sapiens
  CDR3 for alpha chain variable domain of TCR clone 274255 (TRAV23/DV6, TRAJ18)
CAASFRGQTLGRLYF

SEQ ID NO: 548510 - protein, 13 aa, Homo sapiens
  CDR3 for beta chain variable domain of TCR clone 274255 (TRBV28, TRBJ2-7)
CAILDRAGGEQYF

SEQ ID NO: 548511 - protein, 15 aa, Homo sapiens
  CDR3 for alpha chain variable domain of TCR clone 274256 (TRAV3, TRAJ17)
CAVSPKEAAGNKPTF

SEQ ID NO: 548512 - protein, 12 aa, Homo sapiens
  CDR3 for beta chain variable domain of TCR clone 274256 (TRBV7-9, TRBJ1-6)
CASSVMTSPLYF

SEQ ID NO: 548513 - protein, 20 aa, Homo sapiens
  CDR3 for alpha chain variable domain of TCR clone 274257 (TRAV14/DV4, TRAJ22)
CAMREGPFSISSGSARQLTF

SEQ ID NO: 548514 - protein, 13 aa, Homo sapiens
  CDR3 for beta chain variable domain of TCR clone 274257 (TRBV4-2, TRBJ2-3)
CARSQGWQHTQYF

SEQ ID NO: 548515 - protein, 23 aa, Homo sapiens
  CDR3 for alpha chain variable domain of TCR clone 274258 (TRAV26-1, TRAJ38)
CIADNAGNNHIQNPDPAVYQLSY

SEQ ID NO: 548516 - protein, 13 aa, Homo sapiens
  CDR3 for beta chain variable domain of TCR clone 274258 (TRBV20-1, TRBJ1-1)
CSARGGGNTEAFF

SEQ ID NO: 548517 - protein, 14 aa, Homo sapiens
  CDR3 for alpha chain variable domain of TCR clone 274259 (TRAV10, TRAJ32)
CGEPRGGSTNKLIF

SEQ ID NO: 548518 - protein, 14 aa, Homo sapiens
  CDR3 for beta chain variable domain of TCR clone 274259 (TRBV5-4, TRBJ2-2)
CASRLDGGTGELFF

SEQ ID NO: 548519 - protein, 16 aa, Homo sapiens
  CDR3 for alpha chain variable domain of TCR clone 274260 (TRAV23/DV6, TRAJ52)
CAARPSGVTSYGKLKF

SEQ ID NO: 548520 - protein, 13 aa, Homo sapiens
  CDR3 for beta chain variable domain of TCR clone 274260 (TRBV7-9, TRBJ1-1)
CASSLSGETEAFF

SEQ ID NO: 548521 - protein, 17 aa, Homo sapiens
  CDR3 for alpha chain variable domain of TCR clone 274261 (TRAV38-2/DV8, TRAJ38)
CAYRSARGACNNRKLIW

SEQ ID NO: 548522 - protein, 13 aa, Homo sapiens
  CDR3 for beta chain variable domain of TCR clone 274261 (TRBV6-5, TRBJ2-1)
CASRGRVGNEQFF

SEQ ID NO: 548523 - protein, 12 aa, Homo sapiens
  CDR3 for alpha chain variable domain of TCR clone 274262 (TRAV27, TRAJ35)
CAGADFGNVLHC

SEQ ID NO: 548524 - protein, 15 aa, Homo sapiens
  CDR3 for beta chain variable domain of TCR clone 274262 (TRBV28, TRBJ2-5)
CASSSGRTIQETQYF

SEQ ID NO: 548525 - protein, 17 aa, Homo sapiens
  CDR3 for alpha chain variable domain of TCR clone 274263 (TRAV3, TRAJ6)
CAARDGPRAGGSYIPTF

SEQ ID NO: 548526 - protein, 15 aa, Homo sapiens
  CDR3 for beta chain variable domain of TCR clone 274263 (TRBV7-9, TRBJ2-7)
CASSLALAEAYEQYF

SEQ ID NO: 548527 - protein, 17 aa, Homo sapiens
  CDR3 for alpha chain variable domain of TCR clone 274264 (TRAV20, TRAJ4)
CAVQLVLFSGGYNKLIF

SEQ ID NO: 548528 - protein, 14 aa, Homo sapiens
  CDR3 for beta chain variable domain of TCR clone 274264 (TRBV12-5, TRBJ2-5)
CASGSRTHQETQYF

SEQ ID NO: 548529 - protein, 12 aa, Homo sapiens
  CDR3 for alpha chain variable domain of TCR clone 274265 (TRAV17, TRAJ4)
CATDGGYNKLIF

SEQ ID NO: 548530 - protein, 13 aa, Homo sapiens
  CDR3 for beta chain variable domain of TCR clone 274265 (TRBV29-1, TRBJ2-2)
CSTKGVNTGELFF

SEQ ID NO: 548531 - protein, 15 aa, Homo sapiens
  CDR3 for alpha chain variable domain of TCR clone 274266 (TRAV27, TRAJ38)
CAARRNAGNNRKLIW

SEQ ID NO: 548532 - protein, 13 aa, Homo sapiens
  CDR3 for beta chain variable domain of TCR clone 274266 (TRBV12-5, TRBJ2-3)
CASGDRRSDTQYF

SEQ ID NO: 548533 - protein, 14 aa, Homo sapiens
  CDR3 for alpha chain variable domain of TCR clone 274267 (TRAV12-1, TRAJ26)
CVVKGSNYGQNFVF

SEQ ID NO: 548534 - protein, 18 aa, Homo sapiens
  CDR3 for beta chain variable domain of TCR clone 274267 (TRBV11-2, TRBJ2-3)
CASSLGGASRGAPNTQYF

SEQ ID NO: 548535 - protein, 15 aa, Homo sapiens
  CDR3 for alpha chain variable domain of TCR clone 274268 (TRAV3, TRAJ5)
CAVRDSKTGRRARTS

SEQ ID NO: 548536 - protein, 15 aa, Homo sapiens
  CDR3 for beta chain variable domain of TCR clone 274268 (TRBV7-8, TRBJ2-1)
CASSLADSLYNEQFF

SEQ ID NO: 548537 - protein, 18 aa, Homo sapiens
  CDR3 for alpha chain variable domain of TCR clone 274269 (TRAV13-1, TRAJ52)
CAASKRSAGGTSYGKLTF

SEQ ID NO: 548538 - protein, 14 aa, Homo sapiens
  CDR3 for beta chain variable domain of TCR clone 274269 (TRBV19, TRBJ2-1)
CASPTVVLSGEQFF

SEQ ID NO: 548539 - protein, 11 aa, Homo sapiens
  CDR3 for alpha chain variable domain of TCR clone 274270 (TRAV35, TRAJ34)
CWARNTDKLIF

SEQ ID NO: 548540 - protein, 14 aa, Homo sapiens
  CDR3 for beta chain variable domain of TCR clone 274270 (TRBV5-1, TRBJ2-7)
CASSRGASLYEQYF

SEQ ID NO: 548541 - protein, 13 aa, Homo sapiens
  CDR3 for alpha chain variable domain of TCR clone 274271 (TRAV12-1, TRAJ16)
CVVNGPDGQKLPF

SEQ ID NO: 548542 - protein, 14 aa, Homo sapiens
  CDR3 for beta chain variable domain of TCR clone 274271 (TRBV6-6, TRBJ2-7)
CASSIAGGVDEQYF

SEQ ID NO: 548543 - protein, 12 aa, Homo sapiens
  CDR3 for alpha chain variable domain of TCR clone 274272 (TRAV17, TRAJ28)
WDSGAGSYQLAF

SEQ ID NO: 548544 - protein, 13 aa, Homo sapiens
  CDR3 for beta chain variable domain of TCR clone 274272 (TRBV11-3, TRBJ1-1)
CASSRQPNTEAFF

SEQ ID NO: 548545 - protein, 10 aa, Homo sapiens
  CDR3 for alpha chain variable domain of TCR clone 274273 (TRAV12-2, TRAJ20)
CAVYLYKLSF

SEQ ID NO: 548546 - protein, 14 aa, Homo sapiens
  CDR3 for beta chain variable domain of TCR clone 274273 (TRBV19, TRBJ2-1)
CASPTFVLSGEQFF

SEQ ID NO: 548547 - protein, 14 aa, Homo sapiens
  CDR3 for alpha chain variable domain of TCR clone 274274 (TRAV12-2, TRAJ5)
CAVNRSTGRRALTF

SEQ ID NO: 548548 - protein, 15 aa, Homo sapiens
  CDR3 for beta chain variable domain of TCR clone 274274 (TRBV15, TRBJ1-5)
CATSREQGGNQTQHF

SEQ ID NO: 548549 - protein, 19 aa, Homo sapiens
  CDR3 for alpha chain variable domain of TCR clone 274275 (TRAV25, TRAJ20)
TATQTTDVGILPHDYKLSF

SEQ ID NO: 548550 - protein, 15 aa, Homo sapiens
  CDR3 for beta chain variable domain of TCR clone 274275 (TRBV6-6, TRBJ1-5)
CASSSIQGTNQTQHF

SEQ ID NO: 548551 - protein, 12 aa, Homo sapiens
  CDR3 for alpha chain variable domain of TCR clone 274276 (TRAV13-1, TRAJ21)
CAAFFNFNKFYF

SEQ ID NO: 548552 - protein, 14 aa, Homo sapiens
  CDR3 for beta chain variable domain of TCR clone 274276 (TRBV4-1, TRBJ2-7)
CSSRLTSGSYEQYF

SEQ ID NO: 548553 - protein, 18 aa, Homo sapiens
  CDR3 for alpha chain variable domain of TCR clone 274277 (TRAV21, TRAJ52)
CAVRPSPAGGTSYGKLTF

SEQ ID NO: 548554 - protein, 14 aa, Homo sapiens
  CDR3 for beta chain variable domain of TCR clone 274277 (TRBV7-6, TRBJ2-3)
CASNSGGDANTQYF

SEQ ID NO: 548555 - protein, 16 aa, Homo sapiens
  CDR3 for alpha chain variable domain of TCR clone 274278 (TRAV12-3, TRAJ53)
CAMSPGSGGSNSKLTF

SEQ ID NO: 548556 - protein, 16 aa, Homo sapiens
  CDR3 for beta chain variable domain of TCR clone 274278 (TRBV11-2, TRBJ1-2)
CASSLDTGGADYGYTF

SEQ ID NO: 548557 - protein, 10 aa, Homo sapiens
  CDR3 for alpha chain variable domain of TCR clone 274279 (TRAV1-2, TRAJ34)
CAVNTDKLIF

SEQ ID NO: 548558 - protein, 17 aa, Homo sapiens
  CDR3 for beta chain variable domain of TCR clone 274279 (TRBV7-2, TRBJ2-7)
CASSFETSGSTSSTSGR

SEQ ID NO: 548559 - protein, 16 aa, Homo sapiens
  CDR3 for alpha chain variable domain of TCR clone 274280 (TRAV30, TRAJ24)
CGTEIVDADSWGKFQF

SEQ ID NO: 548560 - protein, 13 aa, Homo sapiens
  CDR3 for beta chain variable domain of TCR clone 274280 (TRBV9, TRBJ1-1)
CASSPTGSTEAFV

SEQ ID NO: 548561 - protein, 11 aa, Homo sapiens
  CDR3 for alpha chain variable domain of TCR clone 274281 (TRAV3, TRAJ21)
WAVGNFNKFYF

SEQ ID NO: 548562 - protein, 17 aa, Homo sapiens
  CDR3 for beta chain variable domain of TCR clone 274281 (TRBV24-1, TRBJ2-1)
CATSDVSTSGTYNEQFF

SEQ ID NO: 548563 - protein, 11 aa, Homo sapiens
  CDR3 for alpha chain variable domain of TCR clone 274282 (TRAV4, TRAJ31)
CLVGDNARLMF

SEQ ID NO: 548564 - protein, 20 aa, Homo sapiens
  CDR3 for beta chain variable domain of TCR clone 274282 (TRBV7-2, TRBJ2-5)
CASSSKWLSGQETVLRARHA

SEQ ID NO: 548565 - protein, 14 aa, Homo sapiens
  CDR3 for alpha chain variable domain of TCR clone 274283 (TRAV12-3, TRAJ10)
SHLPLTGGGNKLTF

SEQ ID NO: 548566 - protein, 11 aa, Homo sapiens
  CDR3 for beta chain variable domain of TCR clone 274283 (TRBV19, TRBJ1-1)
CASSIGSEPFF

SEQ ID NO: 548567 - protein, 14 aa, Homo sapiens
  CDR3 for alpha chain variable domain of TCR clone 274284 (TRAV9-2, TRAJ39)
CALYIYNAGNMLTF

SEQ ID NO: 548568 - protein, 15 aa, Homo sapiens
  CDR3 for beta chain variable domain of TCR clone 274284 (TRBV5-1, TRBJ2-1)
CASSPPRAPTMSSSS

SEQ ID NO: 548569 - protein, 11 aa, Homo sapiens
  CDR3 for alpha chain variable domain of TCR clone 274285 (TRAV12-3, TRAJ23)
CAVRQGGKLIF

SEQ ID NO: 548570 - protein, 20 aa, Homo sapiens
  CDR3 for beta chain variable domain of TCR clone 274285 (TRBV7-8, TRBJ2-2)
CASSLLFPGPTIHITGELFF

SEQ ID NO: 548571 - protein, 12 aa, Homo sapiens
  CDR3 for alpha chain variable domain of TCR clone 274286 (TRAV40, TRAJ20)
CLRGLNDYKLSF

SEQ ID NO: 548572 - protein, 14 aa, Homo sapiens
  CDR3 for beta chain variable domain of TCR clone 274286 (TRBV19, TRBJ2-1)
CASSSGLDYNEQFF

SEQ ID NO: 548573 - protein, 14 aa, Homo sapiens
  CDR3 for alpha chain variable domain of TCR clone 274287 (TRAV8-3, TRAJ35)
CAVVPQGLGNVLHC

SEQ ID NO: 548574 - protein, 15 aa, Homo sapiens
  CDR3 for beta chain variable domain of TCR clone 274287 (TRBV6-1, TRBJ2-2)
CASSAGQGYTGELFF

SEQ ID NO: 548575 - protein, 14 aa, Homo sapiens
  CDR3 for alpha chain variable domain of TCR clone 274288 (TRAV9-2, TRAJ39)
CAIYIYNAGNMLTF

SEQ ID NO: 548576 - protein, 15 aa, Homo sapiens
  CDR3 for beta chain variable domain of TCR clone 274288 (TRBV29-1, TRBJ2-6)
CSVGDRGSGANDLTF

SEQ ID NO: 548577 - protein, 12 aa, Homo sapiens
  CDR3 for alpha chain variable domain of TCR clone 274289 (TRAV12-1, TRAJ34)
CAMGYNTDKLIF

SEQ ID NO: 548578 - protein, 14 aa, Homo sapiens
  CDR3 for beta chain variable domain of TCR clone 274289 (TRBV4-1, TRBJ2-2)
CASSQAVNTGELFF

SEQ ID NO: 548579 - protein, 14 aa, Homo sapiens
  CDR3 for alpha chain variable domain of TCR clone 274290 (TRAV12-2, TRAJ13)
CAVKKTGGYQKFTF

SEQ ID NO: 548580 - protein, 16 aa, Homo sapiens
  CDR3 for beta chain variable domain of TCR clone 274290 (TRBV2, TRBJ2-1)
CASRSPAGGKYNEQFF

SEQ ID NO: 548581 - protein, 14 aa, Homo sapiens
  CDR3 for alpha chain variable domain of TCR clone 274291 (TRAV12-1, TRAJ3)
CVVNPGSSASKIIF

SEQ ID NO: 548582 - protein, 13 aa, Homo sapiens
  CDR3 for beta chain variable domain of TCR clone 274291 (TRBV10-3, TRBJ2-7)
CASKLAVNYEQYF

SEQ ID NO: 548583 - protein, 14 aa, Homo sapiens
  CDR3 for alpha chain variable domain of TCR clone 274292 (TRAV12-2, TRAJ8)
CAVKENTGFQKLVL

SEQ ID NO: 548584 - protein, 13 aa, Homo sapiens
  CDR3 for beta chain variable domain of TCR clone 274292 (TRBV18, TRBJ1-2)
CASSASATEGYTF

SEQ ID NO: 548585 - protein, 14 aa, Homo sapiens
  CDR3 for alpha chain variable domain of TCR clone 274293 (TRAV1-2, TRAJ6)
CAVSLSGGSYIAAF

SEQ ID NO: 548586 - protein, 15 aa, Homo sapiens
  CDR3 for beta chain variable domain of TCR clone 274293 (TRBV28, TRBJ2-7)
CASSPGGRGFYEQYF

SEQ ID NO: 548587 - protein, 14 aa, Homo sapiens
  CDR3 for alpha chain variable domain of TCR clone 274294 (TRAV23/DV6, TRAJ50)
CAADMKTSYDKVIF

SEQ ID NO: 548588 - protein, 14 aa, Homo sapiens
  CDR3 for beta chain variable domain of TCR clone 274294 (TRBV2, TRBJ2-7)
CASSLTSGGYEQYF

SEQ ID NO: 548589 - protein, 14 aa, Homo sapiens
  CDR3 for alpha chain variable domain of TCR clone 274295 (TRAV8-6, TRAJ40)
CAVSATSGTYKYIF

SEQ ID NO: 548590 - protein, 14 aa, Homo sapiens
  CDR3 for beta chain variable domain of TCR clone 274295 (TRBV7-6, TRBJ2-3)
CASSLGTVTDTQYF

SEQ ID NO: 548591 - protein, 11 aa, Homo sapiens
  CDR3 for alpha chain variable domain of TCR clone 274296 (TRAV13-1, TRAJ6)
CATLGSYIPTF

SEQ ID NO: 548592 - protein, 12 aa, Homo sapiens
  CDR3 for beta chain variable domain of TCR clone 274296 (TRBV11-2, TRBJ2-1)
CASTPGNNEQFF

SEQ ID NO: 548593 - protein, 15 aa, Homo sapiens
  CDR3 for alpha chain variable domain of TCR clone 274297 (TRAV12-2, TRAJ9)
CAVNNERTGGCKTIF

SEQ ID NO: 548594 - protein, 14 aa, Homo sapiens
  CDR3 for beta chain variable domain of TCR clone 274297 (TRBV4-1, TRBJ1-4)
CASSQERKNEKLFF

SEQ ID NO: 548595 - protein, 11 aa, Homo sapiens
  CDR3 for alpha chain variable domain of TCR clone 274298 (TRAV2, TRAJ23)
CAVETRGKLIF

SEQ ID NO: 548596 - protein, 15 aa, Homo sapiens
  CDR3 for beta chain variable domain of TCR clone 274298 (TRBV7-3, TRBJ2-1)
CASSQRGGALIEQFF

SEQ ID NO: 548597 - protein, 16 aa, Homo sapiens
  CDR3 for alpha chain variable domain of TCR clone 274299 (TRAV38-1, TRAJ56)
CAFTKRQTGANSKLTF

SEQ ID NO: 548598 - protein, 15 aa, Homo sapiens
  CDR3 for beta chain variable domain of TCR clone 274299 (TRBV11-2, TRBJ2-1)
CASSLGTSGLNEQFF

SEQ ID NO: 548599 - protein, 12 aa, Homo sapiens
  CDR3 for alpha chain variable domain of TCR clone 274300 (TRAV12-3, TRAJ5)
CAMDTGRRALTF

SEQ ID NO: 548600 - protein, 16 aa, Homo sapiens
  CDR3 for beta chain variable domain of TCR clone 274300 (TRBV19, TRBJ2-2)
CASRSPGTGATGELFF

SEQ ID NO: 548601 - protein, 14 aa, Homo sapiens
  CDR3 for alpha chain variable domain of TCR clone 274301 (TRAV26-1, TRAJ38)
CIADNAGNNRKLIW

SEQ ID NO: 548602 - protein, 16 aa, Homo sapiens
  CDR3 for beta chain variable domain of TCR clone 274301 (TRBV2, TRBJ2-1)
CASSVGGSLSYNEQFF

SEQ ID NO: 548603 - protein, 12 aa, Homo sapiens
  CDR3 for alpha chain variable domain of TCR clone 274302 (TRAV29/DV5, TRAJ41)
CAAISSGYALNF

SEQ ID NO: 548604 - protein, 17 aa, Homo sapiens
  CDR3 for beta chain variable domain of TCR clone 274302 (TRBV18, TRBJ2-1)
CASSKGLSGGADNEQFL

SEQ ID NO: 548605 - protein, 16 aa, Homo sapiens
  CDR3 for alpha chain variable domain of TCR clone 274303 (TRAV30, TRAJ24)
CGTEIVDADSWGKFQF

SEQ ID NO: 548606 - protein, 14 aa, Homo sapiens
  CDR3 for beta chain variable domain of TCR clone 274303 (TRBV12-5, TRBJ2-5)
CASGARTQQETQYF

SEQ ID NO: 548607 - protein, 14 aa, Homo sapiens
  CDR3 for alpha chain variable domain of TCR clone 274304 (TRAV23/DV6, TRAJ24)
CAASLSDSWWKLQF

SEQ ID NO: 548608 - protein, 16 aa, Homo sapiens
  CDR3 for beta chain variable domain of TCR clone 274304 (TRBV7-9, TRBJ2-6)
CASSLKGPLRANVLTF

SEQ ID NO: 548609 - protein, 12 aa, Homo sapiens
  CDR3 for alpha chain variable domain of TCR clone 274305 (TRAV8-3, TRAJ20)
CAEGANDYKLSF

SEQ ID NO: 548610 - protein, 17 aa, Homo sapiens
  CDR3 for beta chain variable domain of TCR clone 274305 (TRBV13, TRBJ2-3)
CASSLSRVAGGRNTQYF

SEQ ID NO: 548611 - protein, 14 aa, Homo sapiens
  CDR3 for alpha chain variable domain of TCR clone 274306 (TRAV12-3, TRAJ10)
SHLPLTGGGNKLTF

SEQ ID NO: 548612 - protein, 14 aa, Homo sapiens
  CDR3 for beta chain variable domain of TCR clone 274306 (TRBV7-9, TRBJ1-2)
CASSRQGANYGYTF

SEQ ID NO: 548613 - protein, 11 aa, Homo sapiens
  CDR3 for alpha chain variable domain of TCR clone 274307 (TRAV3, TRAJ21)
CAVGNFNKFYF

SEQ ID NO: 548614 - protein, 16 aa, Homo sapiens
  CDR3 for beta chain variable domain of TCR clone 274307 (TRBV7-3, TRBJ2-1)
CAISLVSGSSNNEQFF

SEQ ID NO: 548615 - protein, 13 aa, Homo sapiens
  CDR3 for alpha chain variable domain of TCR clone 274308 (TRAV17, TRAJ7)
CATDNYVNNRLAF

SEQ ID NO: 548616 - protein, 16 aa, Homo sapiens
  CDR3 for beta chain variable domain of TCR clone 274308 (TRBV4-1, TRBJ2-5)
CASSQAIAASSATQYF

SEQ ID NO: 548617 - protein, 16 aa, Homo sapiens
  CDR3 for alpha chain variable domain of TCR clone 274309 (TRAV16, TRAJ52)
FSLSGVGGTSYGKLTF

SEQ ID NO: 548618 - protein, 14 aa, Homo sapiens
  CDR3 for beta chain variable domain of TCR clone 274309 (TRBV19, TRBJ1-2)
CASSLQGQAYGYTF

SEQ ID NO: 548619 - protein, 14 aa, Homo sapiens
  CDR3 for alpha chain variable domain of TCR clone 274310 (TRAV16, TRAJ29)
CALTRNSGKTPLVF

SEQ ID NO: 548620 - protein, 12 aa, Homo sapiens
  CDR3 for beta chain variable domain of TCR clone 274310 (TRBV2, TRBJ2-1)
CAKREGYNEQFF

SEQ ID NO: 548621 - protein, 15 aa, Homo sapiens
  CDR3 for alpha chain variable domain of TCR clone 274311 (TRAV8-3, TRAJ45)
CALSYSGGGADGLTF

SEQ ID NO: 548622 - protein, 13 aa, Homo sapiens
  CDR3 for beta chain variable domain of TCR clone 274311 (TRBV10-3, TRBJ2-7)
CASKLTVNYEQYF

SEQ ID NO: 548623 - protein, 14 aa, Homo sapiens
  CDR3 for alpha chain variable domain of TCR clone 274312 (TRAV3, TRAJ6)
CAMRDGMGRRKLHN

SEQ ID NO: 548624 - protein, 15 aa, Homo sapiens
  CDR3 for beta chain variable domain of TCR clone 274312 (TRBV9, TRBJ2-1)
CASSLAGSSYNEQFF

SEQ ID NO: 548625 - protein, 14 aa, Homo sapiens
  CDR3 for alpha chain variable domain of TCR clone 274313 (TRAV2, TRAJ9)
CAVEDRSGGFKTIF

SEQ ID NO: 548626 - protein, 14 aa, Homo sapiens
  CDR3 for beta chain variable domain of TCR clone 274313 (TRBV18, TRBJ2-7)
CASSPRGGAYELYF

SEQ ID NO: 548627 - protein, 14 aa, Homo sapiens
  CDR3 for alpha chain variable domain of TCR clone 274314 (TRAV1-2, TRAJ8)
CAVREDTGFQKLLF

SEQ ID NO: 548628 - protein, 15 aa, Homo sapiens
  CDR3 for beta chain variable domain of TCR clone 274314 (TRBV10-2, TRBJ2-6)
CASSEQGTGANVLTF

SEQ ID NO: 548629 - protein, 17 aa, Homo sapiens
  CDR3 for alpha chain variable domain of TCR clone 274315 (TRAV3, TRAJ42)
CAVRDRDYGGSQGNLIF

SEQ ID NO: 548630 - protein, 12 aa, Homo sapiens
  CDR3 for beta chain variable domain of TCR clone 274315 (TRBV28, TRBJ2-7)
CASTGNHYEQYF

SEQ ID NO: 548631 - protein, 14 aa, Homo sapiens
  CDR3 for alpha chain variable domain of TCR clone 274316 (TRAV12-3, TRAJ10)
SHLPLTGGGNKLNF

SEQ ID NO: 548632 - protein, 12 aa, Homo sapiens
  CDR3 for beta chain variable domain of TCR clone 274316 (TRBV11-2, TRBJ2-2)
CASSLGGGELFV

SEQ ID NO: 548633 - protein, 12 aa, Homo sapiens
  CDR3 for alpha chain variable domain of TCR clone 274317 (TRAV8-3, TRAJ20)
CAVGANDYKPSF

SEQ ID NO: 548634 - protein, 16 aa, Homo sapiens
  CDR3 for beta chain variable domain of TCR clone 274317 (TRBV19, TRBJ2-2)
CASRSPGTGTTGELFF

SEQ ID NO: 548635 - protein, 12 aa, Homo sapiens
  CDR3 for alpha chain variable domain of TCR clone 274318 (TRAV21, TRAJ10)
CAVTGGGNKLTF

SEQ ID NO: 548636 - protein, 14 aa, Homo sapiens
  CDR3 for beta chain variable domain of TCR clone 274318 (TRBV11-3, TRBJ2-3)
CASSLVASTDTQYV

SEQ ID NO: 548637 - protein, 13 aa, Homo sapiens
  CDR3 for alpha chain variable domain of TCR clone 274319 (TRAV3, TRAJ30)
CAVRDRGDDKIIF

SEQ ID NO: 548638 - protein, 16 aa, Homo sapiens
  CDR3 for beta chain variable domain of TCR clone 274319 (TRBV7-3, TRBJ2-2)
CASRLKRGTLSGELFF

SEQ ID NO: 548639 - protein, 13 aa, Homo sapiens
  CDR3 for alpha chain variable domain of TCR clone 274320 (TRAV27, TRAJ45)
CRGGGGGADGLNF

SEQ ID NO: 548640 - protein, 13 aa, Homo sapiens
  CDR3 for beta chain variable domain of TCR clone 274320 (TRBV20-1, TRBJ1-1)
CSAPEGGNTEAFF

SEQ ID NO: 548641 - protein, 13 aa, Homo sapiens
  CDR3 for alpha chain variable domain of TCR clone 274321 (TRAV12-1, TRAJ39)
CVVPQRAGNMPTF

SEQ ID NO: 548642 - protein, 12 aa, Homo sapiens
  CDR3 for beta chain variable domain of TCR clone 274321 (TRBV12-4, TRBJ1-1)
CASSLAGLEAFF

SEQ ID NO: 548643 - protein, 13 aa, Homo sapiens
  CDR3 for alpha chain variable domain of TCR clone 274322 (TRAV1-1, TRAJ9)
CVAKNTGCFKTIF

SEQ ID NO: 548644 - protein, 14 aa, Homo sapiens
  CDR3 for beta chain variable domain of TCR clone 274322 (TRBV12-5, TRBJ2-5)
CASGSRTHQETQYF

SEQ ID NO: 548645 - protein, 14 aa, Homo sapiens
  CDR3 for alpha chain variable domain of TCR clone 274323 (TRAV9-2, TRAJ39)
CALYIYNAGNMLTF

SEQ ID NO: 548646 - protein, 16 aa, Homo sapiens
  CDR3 for beta chain variable domain of TCR clone 274323 (TRBV3-1, TRBJ2-7)
CASSQGATGVAYEQYF

SEQ ID NO: 548647 - protein, 14 aa, Homo sapiens
  CDR3 for alpha chain variable domain of TCR clone 274324 (TRAV8-3, TRAJ13)
CAVGAQEGYQKATF

SEQ ID NO: 548648 - protein, 15 aa, Homo sapiens
  CDR3 for beta chain variable domain of TCR clone 274324 (TRBV15, TRBJ2-2)
CATSGTGGRVGELFF

SEQ ID NO: 548649 - protein, 23 aa, Homo sapiens
  CDR3 for alpha chain variable domain of TCR clone 274325 (TRAV8-1, TRAJ6)
CAVNTPPEEATHLHLEVEPALLF

SEQ ID NO: 548650 - protein, 14 aa, Homo sapiens
  CDR3 for beta chain variable domain of TCR clone 274325 (TRBV12-4, TRBJ2-1)
CASSLGQGASEQFF

SEQ ID NO: 548651 - protein, 16 aa, Homo sapiens
  CDR3 for alpha chain variable domain of TCR clone 274326 (TRAV12-3, TRAJ53)
CAMSPGSGGSNYKLTF

SEQ ID NO: 548652 - protein, 17 aa, Homo sapiens
  CDR3 for beta chain variable domain of TCR clone 274326 (TRBV7-2, TRBJ2-3)
CASSLAGGLAGTAGQYF

SEQ ID NO: 548653 - protein, 14 aa, Homo sapiens
  CDR3 for alpha chain variable domain of TCR clone 274327 (TRAV26-1, TRAJ38)
CIADNAGNNRKLIR

SEQ ID NO: 548654 - protein, 16 aa, Homo sapiens
  CDR3 for beta chain variable domain of TCR clone 274327 (TRBV20-1, TRBJ2-7)
CSASTSGRLSSYEQYF

SEQ ID NO: 548655 - protein, 19 aa, Homo sapiens
  CDR3 for alpha chain variable domain of TCR clone 274328 (TRAV2, TRAJ20)
ILQVREADAAVYRDCKLSF

SEQ ID NO: 548656 - protein, 15 aa, Homo sapiens
  CDR3 for beta chain variable domain of TCR clone 274328 (TRBV7-7, TRBJ2-2)
CATSKLAKNTGELFF

SEQ ID NO: 548657 - protein, 14 aa, Homo sapiens
  CDR3 for alpha chain variable domain of TCR clone 274329 (TRAV13-1, TRAJ44)
CAAKATGTASKLTF

SEQ ID NO: 548658 - protein, 14 aa, Homo sapiens
  CDR3 for beta chain variable domain of TCR clone 274329 (TRBV12-4, TRBJ2-7)
CASSASGVDSEQYF

SEQ ID NO: 548659 - protein, 13 aa, Homo sapiens
  CDR3 for alpha chain variable domain of TCR clone 274330 (TRAV8-6, TRAJ5)
CAVLDTGRRALTF

SEQ ID NO: 548660 - protein, 13 aa, Homo sapiens
  CDR3 for beta chain variable domain of TCR clone 274330 (TRBV7-3, TRBJ2-1)
CASSLDSYNEQFF

SEQ ID NO: 548661 - protein, 11 aa, Homo sapiens
  CDR3 for alpha chain variable domain of TCR clone 274331 (TRAV2, TRAJ13)
CASGGYQKVTF

SEQ ID NO: 548662 - protein, 15 aa, Homo sapiens
  CDR3 for beta chain variable domain of TCR clone 274331 (TRBV7-9, TRBJ1-6)
CASSSTGRGNSPLHF

SEQ ID NO: 548663 - protein, 14 aa, Homo sapiens
  CDR3 for alpha chain variable domain of TCR clone 274332 (TRAV12-3, TRAJ57)
CAMSAWGGSEKLVF

SEQ ID NO: 548664 - protein, 14 aa, Homo sapiens
  CDR3 for beta chain variable domain of TCR clone 274332 (TRBV18, TRBJ2-5)
CASSPGVFQETQYF

SEQ ID NO: 548665 - protein, 17 aa, Homo sapiens
  CDR3 for alpha chain variable domain of TCR clone 274333 (TRAV12-3, TRAJ52)
CSSPPFAGGTSYGKLTF

SEQ ID NO: 548666 - protein, 16 aa, Homo sapiens
  CDR3 for beta chain variable domain of TCR clone 274333 (TRBV6-5, TRBJ2-5)
CASSSVGRWGRETQYF

SEQ ID NO: 548667 - protein, 15 aa, Homo sapiens
  CDR3 for alpha chain variable domain of TCR clone 274334 (TRAV2, TRAJ28)
CAVPYSGAASYQLTF

SEQ ID NO: 548668 - protein, 17 aa, Homo sapiens
  CDR3 for beta chain variable domain of TCR clone 274334 (TRBV20-1, TRBJ2-4)
CSARDWASGGRENIQYF

SEQ ID NO: 548669 - protein, 13 aa, Homo sapiens
  CDR3 for alpha chain variable domain of TCR clone 274335 (TRAV2, TRAJ40)
CAVVTSGTYKYIF

SEQ ID NO: 548670 - protein, 14 aa, Homo sapiens
  CDR3 for beta chain variable domain of TCR clone 274335 (TRBV27, TRBJ1-1)
CASSLLSGLSEAFF

SEQ ID NO: 548671 - protein, 15 aa, Homo sapiens
  CDR3 for alpha chain variable domain of TCR clone 274336 (TRAV8-3, TRAJ45)
CASSYSGGGADGLTC

SEQ ID NO: 548672 - protein, 12 aa, Homo sapiens
  CDR3 for beta chain variable domain of TCR clone 274336 (TRBV12-4, TRBJ2-7)
CASSLGGYEQYF

SEQ ID NO: 548673 - protein, 11 aa, Homo sapiens
  CDR3 for alpha chain variable domain of TCR clone 274337 (TRAV12-1, TRAJ3)
CGEPGQQRFQD

SEQ ID NO: 548674 - protein, 14 aa, Homo sapiens
  CDR3 for beta chain variable domain of TCR clone 274337 (TRBV20-1, TRBJ2-3)
CSARGGTSTDTQYF

SEQ ID NO: 548675 - protein, 12 aa, Homo sapiens
  CDR3 for alpha chain variable domain of TCR clone 274338 (TRAV12-3, TRAJ17)
CAMTLTGNKLTF

SEQ ID NO: 548676 - protein, 20 aa, Homo sapiens
  CDR3 for beta chain variable domain of TCR clone 274338 (TRBV7-9, TRBJ2-1)
CASSSPRAPRTRSSYNEQFF

SEQ ID NO: 548677 - protein, 13 aa, Homo sapiens
  CDR3 for alpha chain variable domain of TCR clone 274339 (TRAV2, TRAJ23)
CAVEANQGGKLIF

SEQ ID NO: 548678 - protein, 16 aa, Homo sapiens
  CDR3 for beta chain variable domain of TCR clone 274339 (TRBV7-9, TRBJ1-2)
CASSLGFSSGEDGYTF

SEQ ID NO: 548679 - protein, 14 aa, Homo sapiens
  CDR3 for alpha chain variable domain of TCR clone 274340 (TRAV26-1, TRAJ38)
CIADNAGNNRKQIW

SEQ ID NO: 548680 - protein, 15 aa, Homo sapiens
  CDR3 for beta chain variable domain of TCR clone 274340 (TRBV27, TRBJ2-1)
CASSNGGGSSNEQFF

SEQ ID NO: 548681 - protein, 18 aa, Homo sapiens
  CDR3 for alpha chain variable domain of TCR clone 274341 (TRAV13-1, TRAJ52)
CAAKNPNAGGTSYGNLTF

SEQ ID NO: 548682 - protein, 17 aa, Homo sapiens
  CDR3 for beta chain variable domain of TCR clone 274341 (TRBV11-2, TRBJ2-1)
CASSLYPPGVEYNEQFF

SEQ ID NO: 548683 - protein, 14 aa, Homo sapiens
  CDR3 for alpha chain variable domain of TCR clone 274342 (TRAV30, TRAJ26)
CGTEIVSYGQNFVF

SEQ ID NO: 548684 - protein, 13 aa, Homo sapiens
  CDR3 for beta chain variable domain of TCR clone 274342 (TRBV19, TRBJ1-3)
CARRLSLGNTRYF

SEQ ID NO: 548685 - protein, 16 aa, Homo sapiens
  CDR3 for alpha chain variable domain of TCR clone 274343 (TRAV12-3, TRAJ50)
CAMRDPMKTSYDKVIF

SEQ ID NO: 548686 - protein, 20 aa, Homo sapiens
  CDR3 for beta chain variable domain of TCR clone 274343 (TRBV28, TRBJ2-1)
CASTPIGRSPGLAGGNEQFF

SEQ ID NO: 548687 - protein, 15 aa, Homo sapiens
  CDR3 for alpha chain variable domain of TCR clone 274344 (TRAV1-2, TRAJ18)
CAVGDRGSTLGRLYF

SEQ ID NO: 548688 - protein, 15 aa, Homo sapiens
  CDR3 for beta chain variable domain of TCR clone 274344 (TRBV10-3, TRBJ2-1)
CAISGGREGSDEQFF

SEQ ID NO: 548689 - protein, 23 aa, Homo sapiens
  CDR3 for alpha chain variable domain of TCR clone 274345 (TRAV26-1, TRAJ38)
CIADNAGNNHIQNPDPAVYQLRD

SEQ ID NO: 548690 - protein, 14 aa, Homo sapiens
  CDR3 for beta chain variable domain of TCR clone 274345 (TRBV28, TRBJ1-2)
CASRIQGANYGYAF

SEQ ID NO: 548691 - protein, 14 aa, Homo sapiens
  CDR3 for alpha chain variable domain of TCR clone 274346 (TRAV8-1, TRAJ23)
CAVGTYNQGGKLIF

SEQ ID NO: 548692 - protein, 16 aa, Homo sapiens
  CDR3 for beta chain variable domain of TCR clone 274346 (TRBV18, TRBJ1-5)
CARSPSTGNSNEPQHF

SEQ ID NO: 548693 - protein, 14 aa, Homo sapiens
  CDR3 for alpha chain variable domain of TCR clone 274347 (TRAV1-1, TRAJ27)
CAVIYNTNAGKTTF

SEQ ID NO: 548694 - protein, 14 aa, Homo sapiens
  CDR3 for beta chain variable domain of TCR clone 274347 (TRBV6-5, TRBJ1-2)
CASSYDGTGGGYTF

SEQ ID NO: 548695 - protein, 18 aa, Homo sapiens
  CDR3 for alpha chain variable domain of TCR clone 274348 (TRAV26-2, TRAJ33)
CCVLLHPEEPASNYQLIW

SEQ ID NO: 548696 - protein, 16 aa, Homo sapiens
  CDR3 for beta chain variable domain of TCR clone 274348 (TRBV19, TRBJ2-2)
CASSFPGQGLAGELFF

SEQ ID NO: 548697 - protein, 14 aa, Homo sapiens
  CDR3 for alpha chain variable domain of TCR clone 274349 (TRAV12-1, TRAJ41)
CVVLNSNSGYALNF

SEQ ID NO: 548698 - protein, 14 aa, Homo sapiens
  CDR3 for beta chain variable domain of TCR clone 274349 (TRBV5-1, TRBJ2-7)
WASSRGESLYEQYF

SEQ ID NO: 548699 - protein, 16 aa, Homo sapiens
  CDR3 for alpha chain variable domain of TCR clone 274350 (TRAV3, TRAJ37)
CAVRPHGSGNTGTLIF

SEQ ID NO: 548700 - protein, 15 aa, Homo sapiens
  CDR3 for beta chain variable domain of TCR clone 274350 (TRBV20-1, TRBJ2-7)
CSARDRVSGMDEQYF

SEQ ID NO: 548701 - protein, 15 aa, Homo sapiens
  CDR3 for alpha chain variable domain of TCR clone 274351 (TRAV21, TRAJ40)
CAVTPQTSGTYKYIF

SEQ ID NO: 548702 - protein, 13 aa, Homo sapiens
  CDR3 for beta chain variable domain of TCR clone 274351 (TRBV7-2, TRBJ2-2)
CASSSVRAGELFF

SEQ ID NO: 548703 - protein, 16 aa, Homo sapiens
  CDR3 for alpha chain variable domain of TCR clone 274352 (TRAV17, TRAJ28)
CASYAYSVAGSYQLTF

SEQ ID NO: 548704 - protein, 15 aa, Homo sapiens
  CDR3 for beta chain variable domain of TCR clone 274352 (TRBV4-2, TRBJ2-1)
CASSPSGGLYNEQFF

SEQ ID NO: 548705 - protein, 15 aa, Homo sapiens
  CDR3 for alpha chain variable domain of TCR clone 274353 (TRAV17, TRAJ56)
CATDANTGANSKLTF

SEQ ID NO: 548706 - protein, 16 aa, Homo sapiens
  CDR3 for beta chain variable domain of TCR clone 274353 (TRBV7-3, TRBJ2-2)
CASSLKRGPLSGELFF

SEQ ID NO: 548707 - protein, 14 aa, Homo sapiens
  CDR3 for alpha chain variable domain of TCR clone 274354 (TRAV12-3, TRAJ10)
SHLPLTGGGNKLTF

SEQ ID NO: 548708 - protein, 14 aa, Homo sapiens
  CDR3 for beta chain variable domain of TCR clone 274354 (TRBV7-9, TRBJ1-4)
CASSRAGFGEKLFF

SEQ ID NO: 548709 - protein, 15 aa, Homo sapiens
  CDR3 for alpha chain variable domain of TCR clone 274355 (TRAV27, TRAJ38)
CAARRNAGNNRKLIW

SEQ ID NO: 548710 - protein, 15 aa, Homo sapiens
  CDR3 for beta chain variable domain of TCR clone 274355 (TRBV18, TRBJ2-7)
CASSPLQGRTYEQYF

SEQ ID NO: 548711 - protein, 13 aa, Homo sapiens
  CDR3 for alpha chain variable domain of TCR clone 274356 (TRAV1-2, TRAJ9)
CAALNTGGFKTIF

SEQ ID NO: 548712 - protein, 14 aa, Homo sapiens
  CDR3 for beta chain variable domain of TCR clone 274356 (TRBV24-1, TRBJ1-1)
CATSIPRGDTEAFF

SEQ ID NO: 548713 - protein, 11 aa, Homo sapiens
  CDR3 for alpha chain variable domain of TCR clone 274357 (TRAV2, TRAJ13)
CASGGYQNVTF

SEQ ID NO: 548714 - protein, 15 aa, Homo sapiens
  CDR3 for beta chain variable domain of TCR clone 274357 (TRBV20-1, TRBJ2-7)
CSARVPAAYFYEQYF

SEQ ID NO: 548715 - protein, 14 aa, Homo sapiens
  CDR3 for alpha chain variable domain of TCR clone 274358 (TRAV1-2, TRAJ16)
CAVNRFSDGQKLLF

SEQ ID NO: 548716 - protein, 11 aa, Homo sapiens
  CDR3 for beta chain variable domain of TCR clone 274358 (TRBV4-1, TRBJ1-4)
CASKENEKLFF

SEQ ID NO: 548717 - protein, 14 aa, Homo sapiens
  CDR3 for alpha chain variable domain of TCR clone 274359 (TRAV38-1, TRAJ45)
CAYYSGGGADGLTF

SEQ ID NO: 548718 - protein, 13 aa, Homo sapiens
  CDR3 for beta chain variable domain of TCR clone 274359 (TRBV7-9, TRBJ2-2)
CASSLDPTGELFF

SEQ ID NO: 548719 - protein, 11 aa, Homo sapiens
  CDR3 for alpha chain variable domain of TCR clone 274360 (TRAV3, TRAJ32)
CAVRDELVLQT

SEQ ID NO: 548720 - protein, 12 aa, Homo sapiens
  CDR3 for beta chain variable domain of TCR clone 274360 (TRBV6-1, TRBJ2-7)
CASSDYSYEQYF

SEQ ID NO: 548721 - protein, 16 aa, Homo sapiens
  CDR3 for alpha chain variable domain of TCR clone 274361 (TRAV1-2, TRAJ10)
CAVRGVLTGGGNKLTS

SEQ ID NO: 548722 - protein, 19 aa, Homo sapiens
  CDR3 for beta chain variable domain of TCR clone 274361 (TRBV4-3, TRBJ2-7)
CISAPAAKQPSGTPYEQYF

SEQ ID NO: 548723 - protein, 10 aa, Homo sapiens
  CDR3 for alpha chain variable domain of TCR clone 274362 (TRAV26-1, TRAJ11)
CIPGYSTLTF

SEQ ID NO: 548724 - protein, 15 aa, Homo sapiens
  CDR3 for beta chain variable domain of TCR clone 274362 (TRBV3-1, TRBJ1-2)
CASSHPGTPGYGYTF

SEQ ID NO: 548725 - protein, 12 aa, Homo sapiens
  CDR3 for alpha chain variable domain of TCR clone 274363 (TRAV12-3, TRAJ17)
CAMTLTGNKLTF

SEQ ID NO: 548726 - protein, 14 aa, Homo sapiens
  CDR3 for beta chain variable domain of TCR clone 274363 (TRBV7-2, TRBJ1-5)
CASSPRGGPQPQHF

SEQ ID NO: 548727 - protein, 16 aa, Homo sapiens
  CDR3 for alpha chain variable domain of TCR clone 274364 (TRAV17, TRAJ53)
CATDALSGGSNYKLTF

SEQ ID NO: 548728 - protein, 12 aa, Homo sapiens
  CDR3 for beta chain variable domain of TCR clone 274364 (TRBV11-2, TRBJ2-5)
CASSLGQETQYF

SEQ ID NO: 548729 - protein, 13 aa, Homo sapiens
  CDR3 for alpha chain variable domain of TCR clone 274365 (TRAV13-1, TRAJ41)
CADAPNSGYALNF

SEQ ID NO: 548730 - protein, 13 aa, Homo sapiens
  CDR3 for beta chain variable domain of TCR clone 274365 (TRBV19, TRBJ2-7)
CASEGTTTNEQYF

SEQ ID NO: 548731 - protein, 13 aa, Homo sapiens
  CDR3 for alpha chain variable domain of TCR clone 274366 (TRAV21, TRAJ11)
CAVPNSGYSTLTF

SEQ ID NO: 548732 - protein, 13 aa, Homo sapiens
  CDR3 for beta chain variable domain of TCR clone 274366 (TRBV3-1, TRBJ2-7)
CASSLREGYEQYF

SEQ ID NO: 548733 - protein, 16 aa, Homo sapiens
  CDR3 for alpha chain variable domain of TCR clone 274367 (TRAV12-3, TRAJ10)
CAMKKGITGGGNKLTF

SEQ ID NO: 548734 - protein, 12 aa, Homo sapiens
  CDR3 for beta chain variable domain of TCR clone 274367 (TRBV20-1, TRBJ2-7)
CSAITPTKEQDF

SEQ ID NO: 548735 - protein, 13 aa, Homo sapiens
  CDR3 for alpha chain variable domain of TCR clone 274368 (TRAV13-1, TRAJ21)
CAASIYNFNKFYF

SEQ ID NO: 548736 - protein, 14 aa, Homo sapiens
  CDR3 for beta chain variable domain of TCR clone 274368 (TRBV6-3, TRBJ2-5)
CASRRDGGEETQYF

SEQ ID NO: 548737 - protein, 14 aa, Homo sapiens
  CDR3 for alpha chain variable domain of TCR clone 274369 (TRAV26-1, TRAJ40)
CIVRLLSGTYKYIF

SEQ ID NO: 548738 - protein, 13 aa, Homo sapiens
  CDR3 for beta chain variable domain of TCR clone 274369 (TRBV4-1, TRBJ2-1)
CASSQEVQYEQFF

SEQ ID NO: 548739 - protein, 17 aa, Homo sapiens
  CDR3 for alpha chain variable domain of TCR clone 274370 (TRAV8-6, TRAJ58)
CAVSSWVGETSGSSLTF

SEQ ID NO: 548740 - protein, 17 aa, Homo sapiens
  CDR3 for beta chain variable domain of TCR clone 274370 (TRBV4-3, TRBJ1-2)
CASSSRLQAGGSVGYTF

SEQ ID NO: 548741 - protein, 16 aa, Homo sapiens
  CDR3 for alpha chain variable domain of TCR clone 274371 (TRAV17, TRAJ52)
CATSNAGGTSYGKLTF

SEQ ID NO: 548742 - protein, 13 aa, Homo sapiens
  CDR3 for beta chain variable domain of TCR clone 274371 (TRBV27, TRBJ1-6)
CASSLVLVSPLQF

SEQ ID NO: 548743 - protein, 16 aa, Homo sapiens
  CDR3 for alpha chain variable domain of TCR clone 274372 (TRAV3, TRAJ10)
CAVRDMRAGGGNKLTF

SEQ ID NO: 548744 - protein, 14 aa, Homo sapiens
  CDR3 for beta chain variable domain of TCR clone 274372 (TRBV11-2, TRBJ2-7)
CASSLGNSLYEQYF

SEQ ID NO: 548745 - protein, 15 aa, Homo sapiens
  CDR3 for alpha chain variable domain of TCR clone 274373 (TRAV12-1, TRAJ44)
CVVFVNTGTASKLTF

SEQ ID NO: 548746 - protein, 17 aa, Homo sapiens
  CDR3 for beta chain variable domain of TCR clone 274373 (TRBV7-8, TRBJ2-6)
CASSAGTGGAGANDLSF

SEQ ID NO: 548747 - protein, 16 aa, Homo sapiens
  CDR3 for alpha chain variable domain of TCR clone 274374 (TRAV30, TRAJ24)
FGTEIVDADSWGKFQL

SEQ ID NO: 548748 - protein, 14 aa, Homo sapiens
  CDR3 for beta chain variable domain of TCR clone 274374 (TRBV12-5, TRBJ2-5)
CASGSRTHQETQYF

SEQ ID NO: 548749 - protein, 15 aa, Homo sapiens
  CDR3 for alpha chain variable domain of TCR clone 274375 (TRAV8-3, TRAJ45)
CASSYSGGGADGLTF

SEQ ID NO: 548750 - protein, 15 aa, Homo sapiens
  CDR3 for beta chain variable domain of TCR clone 274375 (TRBV6-5, TRBJ2-1)
CASSYDAGAGNEQFF

SEQ ID NO: 548751 - protein, 12 aa, Homo sapiens
  CDR3 for alpha chain variable domain of TCR clone 274376 (TRAV13-1, TRAJ21)
CAAKEGFNKFYF

SEQ ID NO: 548752 - protein, 18 aa, Homo sapiens
  CDR3 for beta chain variable domain of TCR clone 274376 (TRBV13, TRBJ2-6)
CASSPMTSGGSGANVLTF

SEQ ID NO: 548753 - protein, 14 aa, Homo sapiens
  CDR3 for alpha chain variable domain of TCR clone 274377 (TRAV8-4, TRAJ47)
CAVSIMEYGNKLVF

SEQ ID NO: 548754 - protein, 16 aa, Homo sapiens
  CDR3 for beta chain variable domain of TCR clone 274377 (TRBV14, TRBJ1-2)
CAISQGPTTANYGCTF

SEQ ID NO: 548755 - protein, 13 aa, Homo sapiens
  CDR3 for alpha chain variable domain of TCR clone 274378 (TRAV16, TRAJ5)
CALTNTGRRALTF

SEQ ID NO: 548756 - protein, 15 aa, Homo sapiens
  CDR3 for beta chain variable domain of TCR clone 274378 (TRBV11-2, TRBJ2-4)
CASSRPGTGINSHYF

SEQ ID NO: 548757 - protein, 14 aa, Homo sapiens
  CDR3 for alpha chain variable domain of TCR clone 274379 (TRAV1-2, TRAJ8)
CAVREDTGFQKLVF

SEQ ID NO: 548758 - protein, 17 aa, Homo sapiens
  CDR3 for beta chain variable domain of TCR clone 274379 (TRBV28, TRBJ2-5)
CASSRQGGLAGAETQSF

SEQ ID NO: 548759 - protein, 14 aa, Homo sapiens
  CDR3 for alpha chain variable domain of TCR clone 274380 (TRAV3, TRAJ9)
CAVTLNTGGFKTIF

SEQ ID NO: 548760 - protein, 15 aa, Homo sapiens
  CDR3 for beta chain variable domain of TCR clone 274380 (TRBV7-2, TRBJ2-1)
CASSLASGRVNEQFF

SEQ ID NO: 548761 - protein, 15 aa, Homo sapiens
  CDR3 for alpha chain variable domain of TCR clone 274381 (TRAV12-1, TRAJ9)
CVVSFGDTGGFKTIF

SEQ ID NO: 548762 - protein, 14 aa, Homo sapiens
  CDR3 for beta chain variable domain of TCR clone 274381 (TRBV14, TRBJ2-3)
CASSRKLAADTQYF

SEQ ID NO: 548763 - protein, 14 aa, Homo sapiens
  CDR3 for alpha chain variable domain of TCR clone 274382 (TRAV1-2, TRAJ8)
CAVREDTGFQKLVF

SEQ ID NO: 548764 - protein, 12 aa, Homo sapiens
  CDR3 for beta chain variable domain of TCR clone 274382 (TRBV7-3, TRBJ2-1)
RASSFQSGPQFF

SEQ ID NO: 548765 - protein, 18 aa, Homo sapiens
  CDR3 for alpha chain variable domain of TCR clone 274383 (TRAV26-2, TRAJ45)
CILRVDKYSGGGADGLTF

SEQ ID NO: 548766 - protein, 17 aa, Homo sapiens
  CDR3 for beta chain variable domain of TCR clone 274383 (TRBV11-2, TRBJ2-1)
CASSLYPPGVEYNEQFF

SEQ ID NO: 548767 - protein, 19 aa, Homo sapiens
  CDR3 for alpha chain variable domain of TCR clone 274384 (TRAV1-2, TRAJ8)
CAVEHRLSETCIWNWHPTS

SEQ ID NO: 548768 - protein, 16 aa, Homo sapiens
  CDR3 for beta chain variable domain of TCR clone 274384 (TRBV4-1, TRBJ2-5)
CASSSGLAGVLGTQYF

SEQ ID NO: 548769 - protein, 14 aa, Homo sapiens
  CDR3 for alpha chain variable domain of TCR clone 274385 (TRAV8-6, TRAJ29)
CAVSGWPGNTPLVF

SEQ ID NO: 548770 - protein, 15 aa, Homo sapiens
  CDR3 for beta chain variable domain of TCR clone 274385 (TRBV6-3, TRBJ2-2)
CASRGMTVDTGELFF

SEQ ID NO: 548771 - protein, 13 aa, Homo sapiens
  CDR3 for alpha chain variable domain of TCR clone 274386 (TRAV38-2/DV8, TRAJ34)
CAYRNYNTDKLIF

SEQ ID NO: 548772 - protein, 16 aa, Homo sapiens
  CDR3 for beta chain variable domain of TCR clone 274386 (TRBV9, TRBJ2-2)
CASSAMAKGNTGELFF

SEQ ID NO: 548773 - protein, 23 aa, Homo sapiens
  CDR3 for alpha chain variable domain of TCR clone 274387 (TRAV26-1, TRAJ38)
CIADNAGNNHIQNPDPAVYQLRD

SEQ ID NO: 548774 - protein, 16 aa, Homo sapiens
  CDR3 for beta chain variable domain of TCR clone 274387 (TRBV7-8, TRBJ2-6)
CASRVGDSSGANVLTF

SEQ ID NO: 548775 - protein, 13 aa, Homo sapiens
  CDR3 for alpha chain variable domain of TCR clone 274388 (TRAV12-2, TRAJ52)
CAVSGTSYGKLTF

SEQ ID NO: 548776 - protein, 17 aa, Homo sapiens
  CDR3 for beta chain variable domain of TCR clone 274388 (TRBV11-2, TRBJ2-1)
CAGSLYPPGVEYNEQFF

SEQ ID NO: 548777 - protein, 23 aa, Homo sapiens
  CDR3 for alpha chain variable domain of TCR clone 274389 (TRAV21, TRAJ9)
CAVEAVALGASKISLEQEQDYLL

SEQ ID NO: 548778 - protein, 13 aa, Homo sapiens
  CDR3 for beta chain variable domain of TCR clone 274389 (TRBV12-4, TRBJ1-2)
CASSSGLTVISTF

SEQ ID NO: 548779 - protein, 13 aa, Homo sapiens
  CDR3 for alpha chain variable domain of TCR clone 274390 (TRAV13-1, TRAJ35)
CAASLGFGNVLPC

SEQ ID NO: 548780 - protein, 15 aa, Homo sapiens
  CDR3 for beta chain variable domain of TCR clone 274390 (TRBV20-1, TRBJ2-7)
CSARDRVSGMDEQYF

SEQ ID NO: 548781 - protein, 16 aa, Homo sapiens
  CDR3 for alpha chain variable domain of TCR clone 274391 (TRAV8-4, TRAJ4)
CAVSPSISGGYNKLIF

SEQ ID NO: 548782 - protein, 14 aa, Homo sapiens
  CDR3 for beta chain variable domain of TCR clone 274391 (TRBV11-2, TRBJ2-3)
CASSRLARTDTQYF

SEQ ID NO: 548783 - protein, 14 aa, Homo sapiens
  CDR3 for alpha chain variable domain of TCR clone 274392 (TRAV12-2, TRAJ9)
CAVNALEGGFKTIF

SEQ ID NO: 548784 - protein, 14 aa, Homo sapiens
  CDR3 for beta chain variable domain of TCR clone 274392 (TRBV25-1, TRBJ1-1)
CASTHLGGNTEAFF

SEQ ID NO: 548785 - protein, 13 aa, Homo sapiens
  CDR3 for alpha chain variable domain of TCR clone 274393 (TRAV35, TRAJ48)
CAGHEFGNEKLTF

SEQ ID NO: 548786 - protein, 14 aa, Homo sapiens
  CDR3 for beta chain variable domain of TCR clone 274393 (TRBV19, TRBJ2-1)
CASPTCVLSGEQFF

SEQ ID NO: 548787 - protein, 16 aa, Homo sapiens
  CDR3 for alpha chain variable domain of TCR clone 274394 (TRAV12-3, TRAJ28)
CAMRANSGAGSSQLTF

SEQ ID NO: 548788 - protein, 16 aa, Homo sapiens
  CDR3 for beta chain variable domain of TCR clone 274394 (TRBV7-2, TRBJ1-3)
CASSRLEASSGNTIYF

SEQ ID NO: 548789 - protein, 16 aa, Homo sapiens
  CDR3 for alpha chain variable domain of TCR clone 274395 (TRAV3, TRAJ37)
CALRPRGSGNTGKLIF

SEQ ID NO: 548790 - protein, 17 aa, Homo sapiens
  CDR3 for beta chain variable domain of TCR clone 274395 (TRBV20-1, TRBJ2-1)
CSASSSGLAGSYNEQFF

SEQ ID NO: 548791 - protein, 13 aa, Homo sapiens
  CDR3 for alpha chain variable domain of TCR clone 274396 (TRAV21, TRAJ10)
CAVRPGGGNKLTF

SEQ ID NO: 548792 - protein, 14 aa, Homo sapiens
  CDR3 for beta chain variable domain of TCR clone 274396 (TRBV19, TRBJ2-7)
CASSIGGAVAEQYF

SEQ ID NO: 548793 - protein, 15 aa, Homo sapiens
  CDR3 for alpha chain variable domain of TCR clone 274397 (TRAV17, TRAJ35)
CATAFVIGFGYVLHC

SEQ ID NO: 548794 - protein, 15 aa, Homo sapiens
  CDR3 for beta chain variable domain of TCR clone 274397 (TRBV7-9, TRBJ2-7)
CASSLALAEAYEQYF

SEQ ID NO: 548795 - protein, 13 aa, Homo sapiens
  CDR3 for alpha chain variable domain of TCR clone 274398 (TRAV2, TRAJ29)
CAAQNSGNTPLVF

SEQ ID NO: 548796 - protein, 17 aa, Homo sapiens
  CDR3 for beta chain variable domain of TCR clone 274398 (TRBV24-1, TRBJ2-1)
CATSDVSTSGTYNEQFF

SEQ ID NO: 548797 - protein, 16 aa, Homo sapiens
  CDR3 for alpha chain variable domain of TCR clone 274399 (TRAV17, TRAJ35)
CATAEGGIGFGNVLHY

SEQ ID NO: 548798 - protein, 16 aa, Homo sapiens
  CDR3 for beta chain variable domain of TCR clone 274399 (TRBV6-5, TRBJ2-7)
CASSSDPTSGFYEQYF

SEQ ID NO: 548799 - protein, 16 aa, Homo sapiens
  CDR3 for alpha chain variable domain of TCR clone 274400 (TRAV2, TRAJ10)
CCLLLCFHGGGNKLTF

SEQ ID NO: 548800 - protein, 14 aa, Homo sapiens
  CDR3 for beta chain variable domain of TCR clone 274400 (TRBV7-2, TRBJ2-2)
CASRGQGAAGELFF

SEQ ID NO: 548801 - protein, 15 aa, Homo sapiens
  CDR3 for alpha chain variable domain of TCR clone 274401 (TRAV13-1, TRAJ10)
CAATILTGGGNKLTF

SEQ ID NO: 548802 - protein, 15 aa, Homo sapiens
  CDR3 for beta chain variable domain of TCR clone 274401 (TRBV2, TRBJ2-7)
CASTPLGSGATEQYF

SEQ ID NO: 548803 - protein, 11 aa, Homo sapiens
  CDR3 for alpha chain variable domain of TCR clone 274402 (TRAV17, TRAJ9)
CATTGGFKTIF

SEQ ID NO: 548804 - protein, 13 aa, Homo sapiens
  CDR3 for beta chain variable domain of TCR clone 274402 (TRBV28, TRBJ2-7)
CASSPSGTYEQYF

SEQ ID NO: 548805 - protein, 14 aa, Homo sapiens
  CDR3 for alpha chain variable domain of TCR clone 274403 (TRAV24, TRAJ53)
CAAIGGGSNYKLTF

SEQ ID NO: 548806 - protein, 14 aa, Homo sapiens
  CDR3 for beta chain variable domain of TCR clone 274403 (TRBV25-1, TRBJ1-1)
CASTHLGGNTEAFF

SEQ ID NO: 548807 - protein, 14 aa, Homo sapiens
  CDR3 for alpha chain variable domain of TCR clone 274404 (TRAV16, TRAJ33)
CALSAMDSNYSLIW

SEQ ID NO: 548808 - protein, 12 aa, Homo sapiens
  CDR3 for beta chain variable domain of TCR clone 274404 (TRBV5-1, TRBJ1-2)
CASSQDTYGYTF

SEQ ID NO: 548809 - protein, 15 aa, Homo sapiens
  CDR3 for alpha chain variable domain of TCR clone 274405 (TRAV17, TRAJ57)
CATGPSQGGSEKLVF

SEQ ID NO: 548810 - protein, 13 aa, Homo sapiens
  CDR3 for beta chain variable domain of TCR clone 274405 (TRBV27, TRBJ1-4)
CASSLMGDDKLFF

SEQ ID NO: 548811 - protein, 16 aa, Homo sapiens
  CDR3 for alpha chain variable domain of TCR clone 274406 (TRAV3, TRAJ10)
CAVSDMRAGGGNKLTF

SEQ ID NO: 548812 - protein, 15 aa, Homo sapiens
  CDR3 for beta chain variable domain of TCR clone 274406 (TRBV6-3, TRBJ2-7)
CASSSPGTVFYEQYF

SEQ ID NO: 548813 - protein, 15 aa, Homo sapiens
  CDR3 for alpha chain variable domain of TCR clone 274407 (TRAV1-2, TRAJ10)
CAVRGFTGGGNKLTF

SEQ ID NO: 548814 - protein, 13 aa, Homo sapiens
  CDR3 for beta chain variable domain of TCR clone 274407 (TRBV7-7, TRBJ2-3)
CASSLSRADTQYF

SEQ ID NO: 548815 - protein, 12 aa, Homo sapiens
  CDR3 for alpha chain variable domain of TCR clone 274408 (TRAV2, TRAJ31)
CAVEDNNARLIF

SEQ ID NO: 548816 - protein, 14 aa, Homo sapiens
  CDR3 for beta chain variable domain of TCR clone 274408 (TRBV7-6, TRBJ2-3)
CASSLGTVTDTQYF

SEQ ID NO: 548817 - protein, 15 aa, Homo sapiens
  CDR3 for alpha chain variable domain of TCR clone 274409 (TRAV21, TRAJ24)
CAARPSTGSWGKLQF

SEQ ID NO: 548818 - protein, 13 aa, Homo sapiens
  CDR3 for beta chain variable domain of TCR clone 274409 (TRBV10-3, TRBJ2-7)
CASKLAVNYEQYF

SEQ ID NO: 548819 - protein, 10 aa, Homo sapiens
  CDR3 for alpha chain variable domain of TCR clone 274410 (TRAV12-3, TRAJ18)
CAMSAEAQPL

SEQ ID NO: 548820 - protein, 13 aa, Homo sapiens
  CDR3 for beta chain variable domain of TCR clone 274410 (TRBV15, TRBJ1-6)
CATSGGLNSPLHF

SEQ ID NO: 548821 - protein, 13 aa, Homo sapiens
  CDR3 for alpha chain variable domain of TCR clone 274411 (TRAV8-3, TRAJ28)
CAVGAVGSYQLTF

SEQ ID NO: 548822 - protein, 16 aa, Homo sapiens
  CDR3 for beta chain variable domain of TCR clone 274411 (TRBV27, TRBJ2-2)
CASSFRGLVRTGVLFF

SEQ ID NO: 548823 - protein, 18 aa, Homo sapiens
  CDR3 for alpha chain variable domain of TCR clone 274412 (TRAV17, TRAJ37)
CFLLLCYGGSSNTGKLIF

SEQ ID NO: 548824 - protein, 13 aa, Homo sapiens
  CDR3 for beta chain variable domain of TCR clone 274412 (TRBV11-2, TRBJ2-1)
CASSLDLVNEQFF

SEQ ID NO: 548825 - protein, 15 aa, Homo sapiens
  CDR3 for alpha chain variable domain of TCR clone 274413 (TRAV17, TRAJ57)
CATGPSQGGSENLVL

SEQ ID NO: 548826 - protein, 16 aa, Homo sapiens
  CDR3 for beta chain variable domain of TCR clone 274413 (TRBV12-4, TRBJ1-5)
CASSRPVGGSNQPQHF

SEQ ID NO: 548827 - protein, 18 aa, Homo sapiens
  CDR3 for alpha chain variable domain of TCR clone 274414 (TRAV17, TRAJ45)
CATYLDLYSGGGADGLTF

SEQ ID NO: 548828 - protein, 13 aa, Homo sapiens
  CDR3 for beta chain variable domain of TCR clone 274414 (TRBV10-3, TRBJ2-7)
CASKLAVNYEQYF

SEQ ID NO: 548829 - protein, 15 aa, Homo sapiens
  CDR3 for alpha chain variable domain of TCR clone 274415 (TRAV8-3, TRAJ45)
CASSYSGGGADGLTF

SEQ ID NO: 548830 - protein, 13 aa, Homo sapiens
  CDR3 for beta chain variable domain of TCR clone 274415 (TRBV10-3, TRBJ2-7)
CASTLAVSYEQYF

SEQ ID NO: 548831 - protein, 14 aa, Homo sapiens
  CDR3 for alpha chain variable domain of TCR clone 274416 (TRAV16, TRAJ33)
CALSAMDSNYQLIW

SEQ ID NO: 548832 - protein, 17 aa, Homo sapiens
  CDR3 for beta chain variable domain of TCR clone 274416 (TRBV25-1, TRBJ2-7)
RASSDARVVFSSYEQYF

SEQ ID NO: 548833 - protein, 11 aa, Homo sapiens
  CDR3 for alpha chain variable domain of TCR clone 274417 (TRAV1-2, TRAJ20)
CAVANDYKLSF

SEQ ID NO: 548834 - protein, 13 aa, Homo sapiens
  CDR3 for beta chain variable domain of TCR clone 274417 (TRBV5-7, TRBJ2-5)
CASSSRQGETQYF

SEQ ID NO: 548835 - protein, 13 aa, Homo sapiens
  CDR3 for alpha chain variable domain of TCR clone 274418 (TRAV2, TRAJ26)
CAVRDNYGQNFVF

SEQ ID NO: 548836 - protein, 13 aa, Homo sapiens
  CDR3 for beta chain variable domain of TCR clone 274418 (TRBV7-2, TRBJ2-2)
CASSLAVTGELFF

SEQ ID NO: 548837 - protein, 14 aa, Homo sapiens
  CDR3 for alpha chain variable domain of TCR clone 274419 (TRAV26-1, TRAJ49)
CIVRLTNTGNQFYF

SEQ ID NO: 548838 - protein, 13 aa, Homo sapiens
  CDR3 for beta chain variable domain of TCR clone 274419 (TRBV4-1, TRBJ2-7)
CASRKGQAYEQYF

SEQ ID NO: 548839 - protein, 11 aa, Homo sapiens
  CDR3 for alpha chain variable domain of TCR clone 274420 (TRAV1-2, TRAJ34)
CAVQNTDKLIF

SEQ ID NO: 548840 - protein, 16 aa, Homo sapiens
  CDR3 for beta chain variable domain of TCR clone 274420 (TRBV4-1, TRBJ2-7)
CASSQVGGRGNYEQYF

SEQ ID NO: 548841 - protein, 14 aa, Homo sapiens
  CDR3 for alpha chain variable domain of TCR clone 274421 (TRAV36/DV7, TRAJ44)
CCGANTCTASKLTF

SEQ ID NO: 548842 - protein, 14 aa, Homo sapiens
  CDR3 for beta chain variable domain of TCR clone 274421 (TRBV20-1, TRBJ1-3)
CSASPTGAGNTIYF

SEQ ID NO: 548843 - protein, 13 aa, Homo sapiens
  CDR3 for alpha chain variable domain of TCR clone 274422 (TRAV20, TRAJ37)
CAGCSSNTGKLIF

SEQ ID NO: 548844 - protein, 14 aa, Homo sapiens
  CDR3 for beta chain variable domain of TCR clone 274422 (TRBV7-9, TRBJ2-2)
CASSGLADTGELFF

SEQ ID NO: 548845 - protein, 13 aa, Homo sapiens
  CDR3 for alpha chain variable domain of TCR clone 274423 (TRAV1-2, TRAJ9)
CAALNTGGCKTIF

SEQ ID NO: 548846 - protein, 12 aa, Homo sapiens
  CDR3 for beta chain variable domain of TCR clone 274423 (TRBV11-2, TRBJ2-2)
CASSLGGGELFF

SEQ ID NO: 548847 - protein, 12 aa, Homo sapiens
  CDR3 for alpha chain variable domain of TCR clone 274424 (TRAV12-1, TRAJ34)
CVVAGATDKLIF

SEQ ID NO: 548848 - protein, 11 aa, Homo sapiens
  CDR3 for beta chain variable domain of TCR clone 274424 (TRBV7-9, TRBJ1-1)
CQQLVRGEAFF

SEQ ID NO: 548849 - protein, 14 aa, Homo sapiens
  CDR3 for alpha chain variable domain of TCR clone 274425 (TRAV1-2, TRAJ8)
CAVREDTDFQKLVF

SEQ ID NO: 548850 - protein, 15 aa, Homo sapiens
  CDR3 for beta chain variable domain of TCR clone 274425 (TRBV6-3, TRBJ2-7)
CASSAPGTVFYEQYF

SEQ ID NO: 548851 - protein, 14 aa, Homo sapiens
  CDR3 for alpha chain variable domain of TCR clone 274426 (TRAV17, TRAJ17)
CATDHRAAGNKLTF

SEQ ID NO: 548852 - protein, 15 aa, Homo sapiens
  CDR3 for beta chain variable domain of TCR clone 274426 (TRBV20-1, TRBJ2-7)
CSARDRVSGMDEQYF

SEQ ID NO: 548853 - protein, 13 aa, Homo sapiens
  CDR3 for alpha chain variable domain of TCR clone 274427 (TRAV8-4, TRAJ9)
CAVSGTGGFKTIF

SEQ ID NO: 548854 - protein, 14 aa, Homo sapiens
  CDR3 for beta chain variable domain of TCR clone 274427 (TRBV13, TRBJ2-5)
CASSLERVGETQYF

SEQ ID NO: 548855 - protein, 15 aa, Homo sapiens
  CDR3 for alpha chain variable domain of TCR clone 274428 (TRAV26-1, TRAJ29)
FIVRVEGSGNTPLVC

SEQ ID NO: 548856 - protein, 15 aa, Homo sapiens
  CDR3 for beta chain variable domain of TCR clone 274428 (TRBV7-9, TRBJ1-5)
CASSQGHQPNQPQHF

SEQ ID NO: 548857 - protein, 11 aa, Homo sapiens
  CDR3 for alpha chain variable domain of TCR clone 274429 (TRAV1-1, TRAJ23)
CAVRQGGKLIF

SEQ ID NO: 548858 - protein, 12 aa, Homo sapiens
  CDR3 for beta chain variable domain of TCR clone 274429 (TRBV11-2, TRBJ2-2)
CTSSLGGGELFF

SEQ ID NO: 548859 - protein, 13 aa, Homo sapiens
  CDR3 for alpha chain variable domain of TCR clone 274430 (TRAV29/DV5, TRAJ31)
CAASRRNNARLMF

SEQ ID NO: 548860 - protein, 12 aa, Homo sapiens
  CDR3 for beta chain variable domain of TCR clone 274430 (TRBV14, TRBJ1-1)
CASSQLKGLAFF

SEQ ID NO: 548861 - protein, 14 aa, Homo sapiens
  CDR3 for alpha chain variable domain of TCR clone 274431 (TRAV16, TRAJ33)
CALSAMDSNYQLIW

SEQ ID NO: 548862 - protein, 16 aa, Homo sapiens
  CDR3 for beta chain variable domain of TCR clone 274431 (TRBV25-1, TRBJ2-7)
CASSELTGGGIYEQHF

SEQ ID NO: 548863 - protein, 16 aa, Homo sapiens
  CDR3 for alpha chain variable domain of TCR clone 274432 (TRAV1-2, TRAJ18)
CAVRGERGSTLGRLYF

SEQ ID NO: 548864 - protein, 16 aa, Homo sapiens
  CDR3 for beta chain variable domain of TCR clone 274432 (TRBV20-1, TRBJ2-7)
CSASTSGRLSSYEQYF

SEQ ID NO: 548865 - protein, 15 aa, Homo sapiens
  CDR3 for alpha chain variable domain of TCR clone 274433 (TRAV34, TRAJ38)
CGADFTPGNNRKLIW

SEQ ID NO: 548866 - protein, 12 aa, Homo sapiens
  CDR3 for beta chain variable domain of TCR clone 274433 (TRBV7-9, TRBJ2-7)
CATQTDAYEQYF

SEQ ID NO: 548867 - protein, 15 aa, Homo sapiens
  CDR3 for alpha chain variable domain of TCR clone 274434 (TRAV12-2, TRAJ6)
CPPLAGSGGSYIPTF

SEQ ID NO: 548868 - protein, 10 aa, Homo sapiens
  CDR3 for beta chain variable domain of TCR clone 274434 (TRBV28, TRBJ1-2)
CASSSDRAVF

SEQ ID NO: 548869 - protein, 11 aa, Homo sapiens
  CDR3 for alpha chain variable domain of TCR clone 274435 (TRAV3, TRAJ21)
CAVGNFNKFYF

SEQ ID NO: 548870 - protein, 14 aa, Homo sapiens
  CDR3 for beta chain variable domain of TCR clone 274435 (TRBV16, TRBJ2-7)
CASSQWGRLYEQYF

SEQ ID NO: 548871 - protein, 15 aa, Homo sapiens
  CDR3 for alpha chain variable domain of TCR clone 274436 (TRAV1-2, TRAJ38)
CAVRENAGNNRKRIW

SEQ ID NO: 548872 - protein, 13 aa, Homo sapiens
  CDR3 for beta chain variable domain of TCR clone 274436 (TRBV27, TRBJ1-2)
CASSPSHRGRYTF

SEQ ID NO: 548873 - protein, 17 aa, Homo sapiens
  CDR3 for alpha chain variable domain of TCR clone 274437 (TRAV12-3, TRAJ6)
CAMSARGGAGGSYIPTF

SEQ ID NO: 548874 - protein, 14 aa, Homo sapiens
  CDR3 for beta chain variable domain of TCR clone 274437 (TRBV20-1, TRBJ2-1)
CSAQIGGSANEQFF

SEQ ID NO: 548875 - protein, 15 aa, Homo sapiens
  CDR3 for alpha chain variable domain of TCR clone 274438 (TRAV21, TRAJ53)
CATLNSGGSNYKLTF

SEQ ID NO: 548876 - protein, 16 aa, Homo sapiens
  CDR3 for beta chain variable domain of TCR clone 274438 (TRBV2, TRBJ2-7)
CASSEPWTGPSYEQYF

SEQ ID NO: 548877 - protein, 18 aa, Homo sapiens
  CDR3 for alpha chain variable domain of TCR clone 274439 (TRAV26-1, TRAJ5)
CIVRVVPPRDTGRTALTF

SEQ ID NO: 548878 - protein, 15 aa, Homo sapiens
  CDR3 for beta chain variable domain of TCR clone 274439 (TRBV7-9, TRBJ2-7)
CASSLPIGQANEQYF

SEQ ID NO: 548879 - protein, 11 aa, Homo sapiens
  CDR3 for alpha chain variable domain of TCR clone 274440 (TRAV1-2, TRAJ20)
CAVANGYKLSF

SEQ ID NO: 548880 - protein, 14 aa, Homo sapiens
  CDR3 for beta chain variable domain of TCR clone 274440 (TRBV7-9, TRBJ1-1)
CASTPLQSYTEAFF

SEQ ID NO: 548881 - protein, 15 aa, Homo sapiens
  CDR3 for alpha chain variable domain of TCR clone 274441 (TRAV29/DV5, TRAJ13)
FAASLNSGGYQKVTF

SEQ ID NO: 548882 - protein, 16 aa, Homo sapiens
  CDR3 for beta chain variable domain of TCR clone 274441 (TRBV28, TRBJ2-7)
CASSSSGTSGSYEQYF

SEQ ID NO: 548883 - protein, 16 aa, Homo sapiens
  CDR3 for alpha chain variable domain of TCR clone 274442 (TRAV3, TRAJ18)
CAVRDVRGSTLVRLYF

SEQ ID NO: 548884 - protein, 17 aa, Homo sapiens
  CDR3 for beta chain variable domain of TCR clone 274442 (TRBV5-1, TRBJ2-3)
CASSKIGLADRTDTQYF

SEQ ID NO: 548885 - protein, 14 aa, Homo sapiens
  CDR3 for alpha chain variable domain of TCR clone 274443 (TRAV26-1, TRAJ38)
CIADNAGNNRKLIW

SEQ ID NO: 548886 - protein, 13 aa, Homo sapiens
  CDR3 for beta chain variable domain of TCR clone 274443 (TRBV15, TRBJ1-6)
CATSGGLKSPLHF

SEQ ID NO: 548887 - protein, 14 aa, Homo sapiens
  CDR3 for alpha chain variable domain of TCR clone 274444 (TRAV9-2, TRAJ39)
CALYIYNAGNLLTF

SEQ ID NO: 548888 - protein, 16 aa, Homo sapiens
  CDR3 for beta chain variable domain of TCR clone 274444 (TRBV19, TRBJ2-2)
CASRSPGTGATGELFF

SEQ ID NO: 548889 - protein, 13 aa, Homo sapiens
  CDR3 for alpha chain variable domain of TCR clone 274445 (TRAV26-2, TRAJ37)
CIRGSSNTGKLIF

SEQ ID NO: 548890 - protein, 16 aa, Homo sapiens
  CDR3 for beta chain variable domain of TCR clone 274445 (TRBV7-3, TRBJ2-2)
CASSLKRGTLSGELFF

SEQ ID NO: 548891 - protein, 14 aa, Homo sapiens
  CDR3 for alpha chain variable domain of TCR clone 274446 (TRAV12-2, TRAJ13)
CAVKETGGYQKVTF

SEQ ID NO: 548892 - protein, 14 aa, Homo sapiens
  CDR3 for beta chain variable domain of TCR clone 274446 (TRBV27, TRBJ2-5)
CASSSLKGWETQYF

SEQ ID NO: 548893 - protein, 18 aa, Homo sapiens
  CDR3 for alpha chain variable domain of TCR clone 274447 (TRAV29/DV5, TRAJ53)
CRVLLCSKRGGSNYKLTF

SEQ ID NO: 548894 - protein, 17 aa, Homo sapiens
  CDR3 for beta chain variable domain of TCR clone 274447 (TRBV7-8, TRBJ2-6)
CASSAGTGGAGANVLTF

SEQ ID NO: 548895 - protein, 15 aa, Homo sapiens
  CDR3 for alpha chain variable domain of TCR clone 274448 (TRAV13-1, TRAJ32)
CAASIYGGATNKLIF

SEQ ID NO: 548896 - protein, 17 aa, Homo sapiens
  CDR3 for beta chain variable domain of TCR clone 274448 (TRBV7-3, TRBJ2-5)
WASSLGSGRSGSETQYF

SEQ ID NO: 548897 - protein, 14 aa, Homo sapiens
  CDR3 for alpha chain variable domain of TCR clone 274449 (TRAV12-2, TRAJ40)
CAVKIPSGTYKYIF

SEQ ID NO: 548898 - protein, 15 aa, Homo sapiens
  CDR3 for beta chain variable domain of TCR clone 274449 (TRBV9, TRBJ1-6)
CASSVAGAGDSPLHF

SEQ ID NO: 548899 - protein, 13 aa, Homo sapiens
  CDR3 for alpha chain variable domain of TCR clone 274450 (TRAV29/DV5, TRAJ33)
CAASVVSNYQLIW

SEQ ID NO: 548900 - protein, 15 aa, Homo sapiens
  CDR3 for beta chain variable domain of TCR clone 274450 (TRBV18, TRBJ1-1)
CASSDRGTGDTEAFF

SEQ ID NO: 548901 - protein, 15 aa, Homo sapiens
  CDR3 for alpha chain variable domain of TCR clone 274451 (TRAV13-2, TRAJ10)
CAENKIGGGGNKLTF

SEQ ID NO: 548902 - protein, 15 aa, Homo sapiens
  CDR3 for beta chain variable domain of TCR clone 274451 (TRBV27, TRBJ2-1)
CASSNGGGSSNEQFF

SEQ ID NO: 548903 - protein, 13 aa, Homo sapiens
  CDR3 for alpha chain variable domain of TCR clone 274452 (TRAV23/DV6, TRAJ10)
ASVLTGGGNKLTF

SEQ ID NO: 548904 - protein, 13 aa, Homo sapiens
  CDR3 for beta chain variable domain of TCR clone 274452 (TRBV11-1, TRBJ1-2)
CASVGSGGYGYTF

SEQ ID NO: 548905 - protein, 15 aa, Homo sapiens
  CDR3 for alpha chain variable domain of TCR clone 274453 (TRAV12-1, TRAJ44)
CVVDTPQGTASKLTF

SEQ ID NO: 548906 - protein, 12 aa, Homo sapiens
  CDR3 for beta chain variable domain of TCR clone 274453 (TRBV7-9, TRBJ1-2)
CQSLKQNYGYTF

SEQ ID NO: 548907 - protein, 12 aa, Homo sapiens
  CDR3 for alpha chain variable domain of TCR clone 274454 (TRAV12-3, TRAJ17)
CAMTLTGNKLTF

SEQ ID NO: 548908 - protein, 11 aa, Homo sapiens
  CDR3 for beta chain variable domain of TCR clone 274454 (TRBV11-2, TRBJ1-1)
CASSIDTEAFF

SEQ ID NO: 548909 - protein, 14 aa, Homo sapiens
  CDR3 for alpha chain variable domain of TCR clone 274455 (TRAV35, TRAJ30)
CAGHQPNRDDKIIF

SEQ ID NO: 548910 - protein, 17 aa, Homo sapiens
  CDR3 for beta chain variable domain of TCR clone 274455 (TRBV20-1, TRBJ2-1)
CSAPPRLAGTRYNEQFF

SEQ ID NO: 548911 - protein, 13 aa, Homo sapiens
  CDR3 for alpha chain variable domain of TCR clone 274456 (TRAV12-2, TRAJ10)
CAVPTGGGNKLTF

SEQ ID NO: 548912 - protein, 14 aa, Homo sapiens
  CDR3 for beta chain variable domain of TCR clone 274456 (TRBV7-2, TRBJ2-7)
CASRSQGAAYEQYF

SEQ ID NO: 548913 - protein, 15 aa, Homo sapiens
  CDR3 for alpha chain variable domain of TCR clone 274457 (TRAV3, TRAJ29)
GAVRDLYSGNTPLVF

SEQ ID NO: 548914 - protein, 17 aa, Homo sapiens
  CDR3 for beta chain variable domain of TCR clone 274457 (TRBV20-1, TRBJ2-1)
CSARDPLAGVWDNEQFF

SEQ ID NO: 548915 - protein, 23 aa, Homo sapiens
  CDR3 for alpha chain variable domain of TCR clone 274458 (TRAV1-1, TRAJ11)
LLQGLQMKDSASYFCAGYSTLTF

SEQ ID NO: 548916 - protein, 15 aa, Homo sapiens
  CDR3 for beta chain variable domain of TCR clone 274458 (TRBV6-5, TRBJ2-1)
CASRGDFDSYNEQFF

SEQ ID NO: 548917 - protein, 15 aa, Homo sapiens
  CDR3 for alpha chain variable domain of TCR clone 274459 (TRAV26-1, TRAJ29)
CIVRVEGSGNTPLVF

SEQ ID NO: 548918 - protein, 12 aa, Homo sapiens
  CDR3 for beta chain variable domain of TCR clone 274459 (TRBV4-1, TRBJ2-1)
CASSQPGQGQFF

SEQ ID NO: 548919 - protein, 15 aa, Homo sapiens
  CDR3 for alpha chain variable domain of TCR clone 274460 (TRAV35, TRAJ40)
CAGQLWDSGTYTYIF

SEQ ID NO: 548920 - protein, 12 aa, Homo sapiens
  CDR3 for beta chain variable domain of TCR clone 274460 (TRBV7-8, TRBJ2-7)
CASSLAGYEQYF

SEQ ID NO: 548921 - protein, 14 aa, Homo sapiens
  CDR3 for alpha chain variable domain of TCR clone 274461 (TRAV1-2, TRAJ16)
CAVNRFSDSQKLLF

SEQ ID NO: 548922 - protein, 18 aa, Homo sapiens
  CDR3 for beta chain variable domain of TCR clone 274461 (TRBV20-1, TRBJ2-6)
CSAETTPTHGSGANVLTF

SEQ ID NO: 548923 - protein, 15 aa, Homo sapiens
  CDR3 for alpha chain variable domain of TCR clone 274462 (TRAV1-1, TRAJ20)
CAVRDNVANDYKPSF

SEQ ID NO: 548924 - protein, 15 aa, Homo sapiens
  CDR3 for beta chain variable domain of TCR clone 274462 (TRBV20-1, TRBJ2-7)
CSARKGLAESYEQYF

SEQ ID NO: 548925 - protein, 15 aa, Homo sapiens
  CDR3 for alpha chain variable domain of TCR clone 274463 (TRAV17, TRAJ35)
CATAFVIGCGNVLHC

SEQ ID NO: 548926 - protein, 16 aa, Homo sapiens
  CDR3 for beta chain variable domain of TCR clone 274463 (TRBV11-2, TRBJ2-7)
CASSPLAGGPRYEQYF

SEQ ID NO: 548927 - protein, 20 aa, Homo sapiens
  CDR3 for alpha chain variable domain of TCR clone 274464 (TRAV26-1, )
CIVRVSDIQNPDPAVYQLRD

SEQ ID NO: 548928 - protein, 20 aa, Homo sapiens
  CDR3 for beta chain variable domain of TCR clone 274464 (TRBV7-8, TRBJ2-2)
CASSHLFPGPTIHITGELFF

SEQ ID NO: 548929 - protein, 15 aa, Homo sapiens
  CDR3 for alpha chain variable domain of TCR clone 274465 (TRAV4, TRAJ26)
CLVGDMNNYGQHFVF

SEQ ID NO: 548930 - protein, 16 aa, Homo sapiens
  CDR3 for beta chain variable domain of TCR clone 274465 (TRBV12-5, TRBJ2-5)
CASGPRTSGNQETQYF

SEQ ID NO: 548931 - protein, 16 aa, Homo sapiens
  CDR3 for alpha chain variable domain of TCR clone 274466 (TRAV3, TRAJ6)
CAVRDGQGRRKLHTYI

SEQ ID NO: 548932 - protein, 14 aa, Homo sapiens
  CDR3 for beta chain variable domain of TCR clone 274466 (TRBV7-2, TRBJ2-7)
CASSPRTSFYEQYF

SEQ ID NO: 548933 - protein, 11 aa, Homo sapiens
  CDR3 for alpha chain variable domain of TCR clone 274467 (TRAV1-2, TRAJ11)
CAVRGYSTLTF

SEQ ID NO: 548934 - protein, 14 aa, Homo sapiens
  CDR3 for beta chain variable domain of TCR clone 274467 (TRBV12-4, TRBJ2-2)
CASNQGANTGELFF

SEQ ID NO: 548935 - protein, 22 aa, Homo sapiens
  CDR3 for alpha chain variable domain of TCR clone 274468 (TRAV2, TRAJ9)
CAVRIGVEASKLSLEQEQDYLL

SEQ ID NO: 548936 - protein, 12 aa, Homo sapiens
  CDR3 for beta chain variable domain of TCR clone 274468 (TRBV12-5, TRBJ2-5)
CASGQGVETQYF

SEQ ID NO: 548937 - protein, 11 aa, Homo sapiens
  CDR3 for alpha chain variable domain of TCR clone 274469 (TRAV1-2, TRAJ17)
CASGAGNKLTF

SEQ ID NO: 548938 - protein, 14 aa, Homo sapiens
  CDR3 for beta chain variable domain of TCR clone 274469 (TRBV23-1, TRBJ2-5)
CASSFLRSQETQYF

SEQ ID NO: 548939 - protein, 15 aa, Homo sapiens
  CDR3 for alpha chain variable domain of TCR clone 274470 (TRAV3, TRAJ29)
CAVRDPLSGNTPLVF

SEQ ID NO: 548940 - protein, 17 aa, Homo sapiens
  CDR3 for beta chain variable domain of TCR clone 274470 (TRBV7-2, TRBJ2-7)
CASSLGTGTSGRYEQNF

SEQ ID NO: 548941 - protein, 14 aa, Homo sapiens
  CDR3 for alpha chain variable domain of TCR clone 274471 (TRAV13-1, TRAJ26)
CAASSAHYCQNFVF

SEQ ID NO: 548942 - protein, 17 aa, Homo sapiens
  CDR3 for beta chain variable domain of TCR clone 274471 (TRBV25-1, TRBJ2-5)
CASSRRGGRGGQETQYF

SEQ ID NO: 548943 - protein, 16 aa, Homo sapiens
  CDR3 for alpha chain variable domain of TCR clone 274472 (TRAV12-1, TRAJ12)
CVVNTLLMDSSYKLIF

SEQ ID NO: 548944 - protein, 13 aa, Homo sapiens
  CDR3 for beta chain variable domain of TCR clone 274472 (TRBV20-1, TRBJ2-7)
CSADPGATYEQYF

SEQ ID NO: 548945 - protein, 14 aa, Homo sapiens
  CDR3 for alpha chain variable domain of TCR clone 274473 (TRAV36/DV7, TRAJ44)
CCGANTGTASKLTF

SEQ ID NO: 548946 - protein, 21 aa, Homo sapiens
  CDR3 for beta chain variable domain of TCR clone 274473 (TRBV6-1, TRBJ1-1)
CASSGVGNYKGISGFDTEAFF

SEQ ID NO: 548947 - protein, 17 aa, Homo sapiens
  CDR3 for alpha chain variable domain of TCR clone 274474 (TRAV3, TRAJ6)
CAVRDGPRAGGSNRPTF

SEQ ID NO: 548948 - protein, 14 aa, Homo sapiens
  CDR3 for beta chain variable domain of TCR clone 274474 (TRBV7-2, TRBJ2-7)
CASSPKTSFYEQYF

SEQ ID NO: 548949 - protein, 12 aa, Homo sapiens
  CDR3 for alpha chain variable domain of TCR clone 274475 (TRAV29/DV5, TRAJ34)
CAASGSTDKLIF

SEQ ID NO: 548950 - protein, 12 aa, Homo sapiens
  CDR3 for beta chain variable domain of TCR clone 274475 (TRBV11-2, TRBJ2-2)
CASSLPTGELFF

SEQ ID NO: 548951 - protein, 11 aa, Homo sapiens
  CDR3 for alpha chain variable domain of TCR clone 274476 (TRAV1-1, TRAJ23)
CAVRQGGKLIF

SEQ ID NO: 548952 - protein, 20 aa, Homo sapiens
  CDR3 for beta chain variable domain of TCR clone 274476 (TRBV7-8, TRBJ2-2)
CASSHLFPGPTVHNTGELFF

SEQ ID NO: 548953 - protein, 18 aa, Homo sapiens
  CDR3 for alpha chain variable domain of TCR clone 274477 (TRAV29/DV5, TRAJ53)
CSVPLCSKRGGSNYKLTF

SEQ ID NO: 548954 - protein, 17 aa, Homo sapiens
  CDR3 for beta chain variable domain of TCR clone 274477 (TRBV7-8, TRBJ2-6)
CASSAGTGGAGANVLTF

SEQ ID NO: 548955 - protein, 14 aa, Homo sapiens
  CDR3 for alpha chain variable domain of TCR clone 274478 (TRAV29/DV5, TRAJ32)
CAASQGGATNKLIF

SEQ ID NO: 548956 - protein, 15 aa, Homo sapiens
  CDR3 for beta chain variable domain of TCR clone 274478 (TRBV7-9, TRBJ1-4)
CASSARTGGNEKLFF

SEQ ID NO: 548957 - protein, 16 aa, Homo sapiens
  CDR3 for alpha chain variable domain of TCR clone 274479 (TRAV12-1, TRAJ48)
CVVNMVSNFGDEKLTF

SEQ ID NO: 548958 - protein, 18 aa, Homo sapiens
  CDR3 for beta chain variable domain of TCR clone 274479 (TRBV11-2, TRBJ2-6)
CASSLNPFLGTGANDLIF

SEQ ID NO: 548959 - protein, 15 aa, Homo sapiens
  CDR3 for alpha chain variable domain of TCR clone 274480 (TRAV3, TRAJ20)
CAVRDIKLSDYKLSF

SEQ ID NO: 548960 - protein, 15 aa, Homo sapiens
  CDR3 for beta chain variable domain of TCR clone 274480 (TRBV7-9, TRBJ1-6)
CASSSPGHGNSPLHF

SEQ ID NO: 548961 - protein, 17 aa, Homo sapiens
  CDR3 for alpha chain variable domain of TCR clone 274481 (TRAV3, TRAJ28)
FAVREAYSGAGSYQLTF

SEQ ID NO: 548962 - protein, 18 aa, Homo sapiens
  CDR3 for beta chain variable domain of TCR clone 274481 (TRBV27, TRBJ2-1)
CASGNRAVGVGSKNEQFF

SEQ ID NO: 548963 - protein, 14 aa, Homo sapiens
  CDR3 for alpha chain variable domain of TCR clone 274482 (TRAV12-2, TRAJ9)
CAVNMEGGGFKNIF

SEQ ID NO: 548964 - protein, 14 aa, Homo sapiens
  CDR3 for beta chain variable domain of TCR clone 274482 (TRBV27, TRBJ2-3)
CASRKGGRTDTQYF

SEQ ID NO: 548965 - protein, 14 aa, Homo sapiens
  CDR3 for alpha chain variable domain of TCR clone 274483 (TRAV12-2, TRAJ17)
CAVLFKAAGNQLTF

SEQ ID NO: 548966 - protein, 12 aa, Homo sapiens
  CDR3 for beta chain variable domain of TCR clone 274483 (TRBV29-1, TRBJ2-3)
CSVTGGADTQYF

SEQ ID NO: 548967 - protein, 13 aa, Homo sapiens
  CDR3 for alpha chain variable domain of TCR clone 274484 (TRAV21, TRAJ57)
CAVTQGGSEKLVF

SEQ ID NO: 548968 - protein, 15 aa, Homo sapiens
  CDR3 for beta chain variable domain of TCR clone 274484 (TRBV5-1, TRBJ1-1)
CASSSTTGTTTAAFF

SEQ ID NO: 548969 - protein, 11 aa, Homo sapiens
  CDR3 for alpha chain variable domain of TCR clone 274485 (TRAV1-2, TRAJ40)
CAVPGPYKYIF

SEQ ID NO: 548970 - protein, 16 aa, Homo sapiens
  CDR3 for beta chain variable domain of TCR clone 274485 (TRBV7-3, TRBJ2-2)
CASSLKRGTLSGELFF

SEQ ID NO: 548971 - protein, 18 aa, Homo sapiens
  CDR3 for alpha chain variable domain of TCR clone 274486 (TRAV13-1, TRAJ52)
CAASKRIAGGTSYGKLTF

SEQ ID NO: 548972 - protein, 13 aa, Homo sapiens
  CDR3 for beta chain variable domain of TCR clone 274486 (TRBV12-4, TRBJ1-2)
CASSLRQGEGYTF

SEQ ID NO: 548973 - protein, 11 aa, Homo sapiens
  CDR3 for alpha chain variable domain of TCR clone 274487 (TRAV21, TRAJ27)
CAVRMQANQPL

SEQ ID NO: 548974 - protein, 16 aa, Homo sapiens
  CDR3 for beta chain variable domain of TCR clone 274487 (TRBV3-1, TRBJ2-7)
CASSQGATGVAHEQYF

SEQ ID NO: 548975 - protein, 14 aa, Homo sapiens
  CDR3 for alpha chain variable domain of TCR clone 274488 (TRAV26-1, TRAJ48)
CIVRVGFGNEQLTF

SEQ ID NO: 548976 - protein, 13 aa, Homo sapiens
  CDR3 for beta chain variable domain of TCR clone 274488 (TRBV11-3, TRBJ2-3)
FASSHDTKDTQYF

SEQ ID NO: 548977 - protein, 16 aa, Homo sapiens
  CDR3 for alpha chain variable domain of TCR clone 274489 (TRAV13-1, TRAJ18)
CAASRMRGSTLGRLYF

SEQ ID NO: 548978 - protein, 14 aa, Homo sapiens
  CDR3 for beta chain variable domain of TCR clone 274489 (TRBV18, TRBJ1-1)
CASSPGFQGVEAFF

SEQ ID NO: 548979 - protein, 23 aa, Homo sapiens
  CDR3 for alpha chain variable domain of TCR clone 274490 (TRAV26-1, TRAJ38)
CIADNAGNNHIQNPDPAVYHLRA

SEQ ID NO: 548980 - protein, 13 aa, Homo sapiens
  CDR3 for beta chain variable domain of TCR clone 274490 (TRBV20-1, TRBJ1-1)
YSARGGGNTEAFF

SEQ ID NO: 548981 - protein, 16 aa, Homo sapiens
  CDR3 for alpha chain variable domain of TCR clone 274491 (TRAV3, TRAJ23)
CAVKIGIYNQGGKLIF

SEQ ID NO: 548982 - protein, 16 aa, Homo sapiens
  CDR3 for beta chain variable domain of TCR clone 274491 (TRBV28, TRBJ1-2)
CASSHGQGVYKDGYTF

SEQ ID NO: 548983 - protein, 15 aa, Homo sapiens
  CDR3 for alpha chain variable domain of TCR clone 274492 (TRAV27, TRAJ38)
CAARRNAANNRKLIW

SEQ ID NO: 548984 - protein, 13 aa, Homo sapiens
  CDR3 for beta chain variable domain of TCR clone 274492 (TRBV28, TRBJ2-5)
CAGVSRGEETQYF

SEQ ID NO: 548985 - protein, 13 aa, Homo sapiens
  CDR3 for alpha chain variable domain of TCR clone 274493 (TRAV8-3, TRAJ6)
CAARKGGSYIPTF

SEQ ID NO: 548986 - protein, 15 aa, Homo sapiens
  CDR3 for beta chain variable domain of TCR clone 274493 (TRBV4-1, TRBJ2-3)
CASSNLAGGRDTQYF

SEQ ID NO: 548987 - protein, 12 aa, Homo sapiens
  CDR3 for alpha chain variable domain of TCR clone 274494 (TRAV12-3, TRAJ3)
CAIDSSASQTIF

SEQ ID NO: 548988 - protein, 17 aa, Homo sapiens
  CDR3 for beta chain variable domain of TCR clone 274494 (TRBV7-9, TRBJ2-3)
CASSLEEAGAYPDTQYF

SEQ ID NO: 548989 - protein, 14 aa, Homo sapiens
  CDR3 for alpha chain variable domain of TCR clone 274495 (TRAV1-2, TRAJ8)
CAVREDTSFQKLVF

SEQ ID NO: 548990 - protein, 14 aa, Homo sapiens
  CDR3 for beta chain variable domain of TCR clone 274495 (TRBV7-6, TRBJ2-3)
CASSLGTVTDTQYF

SEQ ID NO: 548991 - protein, 12 aa, Homo sapiens
  CDR3 for alpha chain variable domain of TCR clone 274496 (TRAV8-4, TRAJ37)
CAKSSNTGKLIF

SEQ ID NO: 548992 - protein, 15 aa, Homo sapiens
  CDR3 for beta chain variable domain of TCR clone 274496 (TRBV7-3, TRBJ2-1)
CASSLSSGSFDEQFF

SEQ ID NO: 548993 - protein, 17 aa, Homo sapiens
  CDR3 for alpha chain variable domain of TCR clone 274497 (TRAV8-6, TRAJ58)
CAVSSWVGETSGSRLTF

SEQ ID NO: 548994 - protein, 13 aa, Homo sapiens
  CDR3 for beta chain variable domain of TCR clone 274497 (TRBV20-1, TRBJ1-1)
CSAPLGGGTGAFF

SEQ ID NO: 548995 - protein, 16 aa, Homo sapiens
  CDR3 for alpha chain variable domain of TCR clone 274498 (TRAV8-6, TRAJ53)
CAVTSNSGGSNYKLTF

SEQ ID NO: 548996 - protein, 13 aa, Homo sapiens
  CDR3 for beta chain variable domain of TCR clone 274498 (TRBV11-2, TRBJ1-1)
CASSLGRNTEAFF

SEQ ID NO: 548997 - protein, 15 aa, Homo sapiens
  CDR3 for alpha chain variable domain of TCR clone 274499 (TRAV12-3, TRAJ49)
CAMAVTPNTGNQFYF

SEQ ID NO: 548998 - protein, 14 aa, Homo sapiens
  CDR3 for beta chain variable domain of TCR clone 274499 (TRBV7-3, TRBJ2-1)
CASSLAGGTNEQFF

SEQ ID NO: 548999 - protein, 17 aa, Homo sapiens
  CDR3 for alpha chain variable domain of TCR clone 274500 (TRAV3, TRAJ28)
CAVRPLYSGAGSYQLTF

SEQ ID NO: 549000 - protein, 13 aa, Homo sapiens
  CDR3 for beta chain variable domain of TCR clone 274500 (TRBV12-5, TRBJ2-3)
CASGDRQSDTQYF

SEQ ID NO: 549001 - protein, 14 aa, Homo sapiens
  CDR3 for alpha chain variable domain of TCR clone 274501 (TRAV25, TRAJ35)
CARRMEGFGNVLHC

SEQ ID NO: 549002 - protein, 13 aa, Homo sapiens
  CDR3 for beta chain variable domain of TCR clone 274501 (TRBV7-2, TRBJ1-4)
CASSLAGLEKLIF

SEQ ID NO: 549003 - protein, 16 aa, Homo sapiens
  CDR3 for alpha chain variable domain of TCR clone 274502 (TRAV30, TRAJ24)
CGTEIVDADSWGKFQF

SEQ ID NO: 549004 - protein, 16 aa, Homo sapiens
  CDR3 for beta chain variable domain of TCR clone 274502 (TRBV6-1, TRBJ2-1)
CASSGPGQEVYNEQFF

SEQ ID NO: 549005 - protein, 16 aa, Homo sapiens
  CDR3 for alpha chain variable domain of TCR clone 274503 (TRAV30, TRAJ24)
CGTEIVDADSCGKFQF

SEQ ID NO: 549006 - protein, 16 aa, Homo sapiens
  CDR3 for beta chain variable domain of TCR clone 274503 (TRBV12-4, TRBJ2-5)
CASSFFVRGRQETQYF

SEQ ID NO: 549007 - protein, 16 aa, Homo sapiens
  CDR3 for alpha chain variable domain of TCR clone 274504 (TRAV38-1, TRAJ45)
CAFMKGSGGGADGLTF

SEQ ID NO: 549008 - protein, 15 aa, Homo sapiens
  CDR3 for beta chain variable domain of TCR clone 274504 (TRBV20-1, TRBJ2-7)
CSSREGRDSLYEQYF

SEQ ID NO: 549009 - protein, 13 aa, Homo sapiens
  CDR3 for alpha chain variable domain of TCR clone 274505 (TRAV13-1, TRAJ5)
CAASDTGRRALTF

SEQ ID NO: 549010 - protein, 14 aa, Homo sapiens
  CDR3 for beta chain variable domain of TCR clone 274505 (TRBV6-1, TRBJ2-7)
CASSEGPVSYEQYF

SEQ ID NO: 549011 - protein, 16 aa, Homo sapiens
  CDR3 for alpha chain variable domain of TCR clone 274506 (TRAV12-3, TRAJ53)
CAMSPGSGGSNYKLTF

SEQ ID NO: 549012 - protein, 15 aa, Homo sapiens
  CDR3 for beta chain variable domain of TCR clone 274506 (TRBV19, TRBJ2-4)
CASRGPRRGENIQYF

SEQ ID NO: 549013 - protein, 16 aa, Homo sapiens
  CDR3 for alpha chain variable domain of TCR clone 274507 (TRAV38-1, TRAJ56)
CAFMKRQTGANSKLTF

SEQ ID NO: 549014 - protein, 14 aa, Homo sapiens
  CDR3 for beta chain variable domain of TCR clone 274507 (TRBV13, TRBJ2-5)
CASSLERVGETQYF

SEQ ID NO: 549015 - protein, 14 aa, Homo sapiens
  CDR3 for alpha chain variable domain of TCR clone 274508 (TRAV12-2, TRAJ13)
CAVKKTGGYQKVTC

SEQ ID NO: 549016 - protein, 15 aa, Homo sapiens
  CDR3 for beta chain variable domain of TCR clone 274508 (TRBV6-3, TRBJ2-7)
CASSSPGTVFYEQYF

SEQ ID NO: 549017 - protein, 13 aa, Homo sapiens
  CDR3 for alpha chain variable domain of TCR clone 274509 (TRAV13-1, TRAJ11)
CAAVLAGYSTLTF

SEQ ID NO: 549018 - protein, 17 aa, Homo sapiens
  CDR3 for beta chain variable domain of TCR clone 274509 (TRBV25-1, TRBJ2-7)
CASIDARVVFSSYEQYF

SEQ ID NO: 549019 - protein, 15 aa, Homo sapiens
  CDR3 for alpha chain variable domain of TCR clone 274510 (TRAV26-1, TRAJ38)
CIVRAEGGNNRKLIW

SEQ ID NO: 549020 - protein, 15 aa, Homo sapiens
  CDR3 for beta chain variable domain of TCR clone 274510 (TRBV20-1, TRBJ2-7)
CSARDRVSGMDEQYF

SEQ ID NO: 549021 - protein, 14 aa, Homo sapiens
  CDR3 for alpha chain variable domain of TCR clone 274511 (TRAV12-3, TRAJ29)
FAMILLSGNTPLVF

SEQ ID NO: 549022 - protein, 16 aa, Homo sapiens
  CDR3 for beta chain variable domain of TCR clone 274511 (TRBV28, TRBJ2-7)
CASSSGTSGRGYEQYF

SEQ ID NO: 549023 - protein, 18 aa, Homo sapiens
  CDR3 for alpha chain variable domain of TCR clone 274512 (TRAV13-1, TRAJ52)
CAAKNPNAGGTSYGKPTF

SEQ ID NO: 549024 - protein, 15 aa, Homo sapiens
  CDR3 for beta chain variable domain of TCR clone 274512 (TRBV20-1, TRBJ2-7)
CSARDRVSGMDEQYF

SEQ ID NO: 549025 - protein, 16 aa, Homo sapiens
  CDR3 for alpha chain variable domain of TCR clone 274513 (TRAV30, TRAJ24)
CGTEIVDADSWGKFQF

SEQ ID NO: 549026 - protein, 16 aa, Homo sapiens
  CDR3 for beta chain variable domain of TCR clone 274513 (TRBV12-5, TRBJ2-5)
CASGPRTSGNLETQYF

SEQ ID NO: 549027 - protein, 14 aa, Homo sapiens
  CDR3 for alpha chain variable domain of TCR clone 274514 (TRAV26-1, TRAJ38)
CIVVGAGNNRKLIW

SEQ ID NO: 549028 - protein, 15 aa, Homo sapiens
  CDR3 for beta chain variable domain of TCR clone 274514 (TRBV7-6, TRBJ1-5)
CASSQSSGINQPQHF

SEQ ID NO: 549029 - protein, 12 aa, Homo sapiens
  CDR3 for alpha chain variable domain of TCR clone 274515 (TRAV6, TRAJ9)
CALNTGGFKTIF

SEQ ID NO: 549030 - protein, 14 aa, Homo sapiens
  CDR3 for beta chain variable domain of TCR clone 274515 (TRBV4-2, TRBJ2-5)
CASSQDRGRETQYF

SEQ ID NO: 549031 - protein, 16 aa, Homo sapiens
  CDR3 for alpha chain variable domain of TCR clone 274516 (TRAV27, TRAJ13)
CSGAKSDPGGYQKVTF

SEQ ID NO: 549032 - protein, 15 aa, Homo sapiens
  CDR3 for beta chain variable domain of TCR clone 274516 (TRBV29-1, TRBJ2-1)
CSVGRHALFYNEQFF

SEQ ID NO: 549033 - protein, 15 aa, Homo sapiens
  CDR3 for alpha chain variable domain of TCR clone 274517 (TRAV8-3, TRAJ45)
CDSSYSGGGADGLPF

SEQ ID NO: 549034 - protein, 13 aa, Homo sapiens
  CDR3 for beta chain variable domain of TCR clone 274517 (TRBV10-3, TRBJ2-7)
CASKLAVNYEQYF

SEQ ID NO: 549035 - protein, 13 aa, Homo sapiens
  CDR3 for alpha chain variable domain of TCR clone 274518 (TRAV12-2, TRAJ18)
CAVSGSTLGRLYF

SEQ ID NO: 549036 - protein, 13 aa, Homo sapiens
  CDR3 for beta chain variable domain of TCR clone 274518 (TRBV4-2, TRBJ1-1)
CASSQAGNTEAFF

SEQ ID NO: 549037 - protein, 18 aa, Homo sapiens
  CDR3 for alpha chain variable domain of TCR clone 274519 (TRAV21, TRAJ52)
CAVRPSPAGGPSYGKLTF

SEQ ID NO: 549038 - protein, 17 aa, Homo sapiens
  CDR3 for beta chain variable domain of TCR clone 274519 (TRBV28, TRBJ2-3)
CASSPTPAGGRVDTQYF

SEQ ID NO: 549039 - protein, 14 aa, Homo sapiens
  CDR3 for alpha chain variable domain of TCR clone 274520 (TRAV29/DV5, TRAJ36)
CAARRKPGANNLLF

SEQ ID NO: 549040 - protein, 14 aa, Homo sapiens
  CDR3 for beta chain variable domain of TCR clone 274520 (TRBV7-8, TRBJ2-3)
CASSLEAGTDTQYF

SEQ ID NO: 549041 - protein, 14 aa, Homo sapiens
  CDR3 for alpha chain variable domain of TCR clone 274521 (TRAV23/DV6, TRAJ11)
CAARLESGYSTLTF

SEQ ID NO: 549042 - protein, 13 aa, Homo sapiens
  CDR3 for beta chain variable domain of TCR clone 274521 (TRBV4-1, TRBJ2-5)
CASSLTRGETQYF

SEQ ID NO: 549043 - protein, 13 aa, Homo sapiens
  CDR3 for alpha chain variable domain of TCR clone 274522 (TRAV27, TRAJ29)
CAGAHSGNTALVF

SEQ ID NO: 549044 - protein, 14 aa, Homo sapiens
  CDR3 for beta chain variable domain of TCR clone 274522 (TRBV7-9, TRBJ2-7)
CASSIGQGAGEQYF

SEQ ID NO: 549045 - protein, 14 aa, Homo sapiens
  CDR3 for alpha chain variable domain of TCR clone 274523 (TRAV12-3, TRAJ33)
CAMSVPGSNYQVIW

SEQ ID NO: 549046 - protein, 12 aa, Homo sapiens
  CDR3 for beta chain variable domain of TCR clone 274523 (TRBV7-8, TRBJ2-7)
CASSLGDREQYF

SEQ ID NO: 549047 - protein, 14 aa, Homo sapiens
  CDR3 for alpha chain variable domain of TCR clone 274524 (TRAV13-1, TRAJ44)
CAAKATGTASKLAF

SEQ ID NO: 549048 - protein, 17 aa, Homo sapiens
  CDR3 for beta chain variable domain of TCR clone 274524 (TRBV7-3, TRBJ2-3)
RASSLMKRMRGADTKYF

SEQ ID NO: 549049 - protein, 13 aa, Homo sapiens
  CDR3 for alpha chain variable domain of TCR clone 274525 (TRAV20, TRAJ54)
CAVQAGGARKLVF

SEQ ID NO: 549050 - protein, 15 aa, Homo sapiens
  CDR3 for beta chain variable domain of TCR clone 274525 (TRBV20-1, TRBJ2-7)
CSARDRVSGMDEQYF

SEQ ID NO: 549051 - protein, 14 aa, Homo sapiens
  CDR3 for alpha chain variable domain of TCR clone 274526 (TRAV12-1, TRAJ12)
CVVISMDSSYKLIF

SEQ ID NO: 549052 - protein, 14 aa, Homo sapiens
  CDR3 for beta chain variable domain of TCR clone 274526 (TRBV6-3, TRBJ2-2)
CASTYTPDTGELFF

SEQ ID NO: 549053 - protein, 11 aa, Homo sapiens
  CDR3 for alpha chain variable domain of TCR clone 274527 (TRAV26-1, TRAJ37)
CIVRVGRKLIF

SEQ ID NO: 549054 - protein, 14 aa, Homo sapiens
  CDR3 for beta chain variable domain of TCR clone 274527 (TRBV28, TRBJ2-3)
CASRSRDSTDTQYF

SEQ ID NO: 549055 - protein, 14 aa, Homo sapiens
  CDR3 for alpha chain variable domain of TCR clone 274528 (TRAV23/DV6, TRAJ37)
CAASTSSNTGTLIF

SEQ ID NO: 549056 - protein, 13 aa, Homo sapiens
  CDR3 for beta chain variable domain of TCR clone 274528 (TRBV18, TRBJ2-5)
CASSPIPGETQYF

SEQ ID NO: 549057 - protein, 13 aa, Homo sapiens
  CDR3 for alpha chain variable domain of TCR clone 274529 (TRAV12-3, TRAJ4)
CNEQAGGYNKLIF

SEQ ID NO: 549058 - protein, 19 aa, Homo sapiens
  CDR3 for beta chain variable domain of TCR clone 274529 (TRBV28, TRBJ2-1)
CASSFSIRGSGRTRYEQFF

SEQ ID NO: 549059 - protein, 12 aa, Homo sapiens
  CDR3 for alpha chain variable domain of TCR clone 274530 (TRAV13-1, TRAJ53)
AASGGSNYKLTF

SEQ ID NO: 549060 - protein, 13 aa, Homo sapiens
  CDR3 for beta chain variable domain of TCR clone 274530 (TRBV19, TRBJ1-5)
CASSINFNQPQHF

SEQ ID NO: 549061 - protein, 14 aa, Homo sapiens
  CDR3 for alpha chain variable domain of TCR clone 274531 (TRAV38-1, TRAJ29)
CAFITPSGNTPLVF

SEQ ID NO: 549062 - protein, 15 aa, Homo sapiens
  CDR3 for beta chain variable domain of TCR clone 274531 (TRBV5-1, TRBJ2-3)
CASSVTSGSTDTQYF

SEQ ID NO: 549063 - protein, 17 aa, Homo sapiens
  CDR3 for alpha chain variable domain of TCR clone 274532 (TRAV4, TRAJ13)
CLVGVQGSSGGYQKVTF

SEQ ID NO: 549064 - protein, 18 aa, Homo sapiens
  CDR3 for beta chain variable domain of TCR clone 274532 (TRBV15, TRBJ2-3)
CATSRDGARSWDTDRQYF

SEQ ID NO: 549065 - protein, 14 aa, Homo sapiens
  CDR3 for alpha chain variable domain of TCR clone 274533 (TRAV13-1, TRAJ35)
CAASKGGFGNVLHC

SEQ ID NO: 549066 - protein, 15 aa, Homo sapiens
  CDR3 for beta chain variable domain of TCR clone 274533 (TRBV7-2, TRBJ1-1)
CASSPQGGANTEAFF

SEQ ID NO: 549067 - protein, 14 aa, Homo sapiens
  CDR3 for alpha chain variable domain of TCR clone 274534 (TRAV12-1, TRAJ23)
CVVIVYNQGGKLIF

SEQ ID NO: 549068 - protein, 15 aa, Homo sapiens
  CDR3 for beta chain variable domain of TCR clone 274534 (TRBV20-1, TRBJ1-5)
SSAKPPGQGPQPQHF

SEQ ID NO: 549069 - protein, 16 aa, Homo sapiens
  CDR3 for alpha chain variable domain of TCR clone 274535 (TRAV4, TRAJ18)
CCVLLIGGSTLGRLYF

SEQ ID NO: 549070 - protein, 14 aa, Homo sapiens
  CDR3 for beta chain variable domain of TCR clone 274535 (TRBV18, TRBJ1-2)
YASSPSGRDYGCTF

SEQ ID NO: 549071 - protein, 13 aa, Homo sapiens
  CDR3 for alpha chain variable domain of TCR clone 274536 (TRAV27, TRAJ40)
CAGPPSGTYKYIF

SEQ ID NO: 549072 - protein, 15 aa, Homo sapiens
  CDR3 for beta chain variable domain of TCR clone 274536 (TRBV10-2, TRBJ2-6)
CASSEQGTGANVLTF

SEQ ID NO: 549073 - protein, 13 aa, Homo sapiens
  CDR3 for alpha chain variable domain of TCR clone 274537 (TRAV36/DV7, TRAJ37)
CAVFSSNTGKLIF

SEQ ID NO: 549074 - protein, 15 aa, Homo sapiens
  CDR3 for beta chain variable domain of TCR clone 274537 (TRBV5-1, TRBJ2-5)
CASSFKGGDQETQYF

SEQ ID NO: 549075 - protein, 10 aa, Homo sapiens
  CDR3 for alpha chain variable domain of TCR clone 274538 (TRAV1-2, TRAJ20)
CACNDYKLSF

SEQ ID NO: 549076 - protein, 16 aa, Homo sapiens
  CDR3 for beta chain variable domain of TCR clone 274538 (TRBV20-1, TRBJ2-1)
RSARDLKQSMNNEQFF

SEQ ID NO: 549077 - protein, 14 aa, Homo sapiens
  CDR3 for alpha chain variable domain of TCR clone 274539 (TRAV1-2, TRAJ16)
CAVNRFSDGQKLLF

SEQ ID NO: 549078 - protein, 16 aa, Homo sapiens
  CDR3 for beta chain variable domain of TCR clone 274539 (TRBV9, TRBJ2-1)
CASSAYFLGGPSEQFL

SEQ ID NO: 549079 - protein, 12 aa, Homo sapiens
  CDR3 for alpha chain variable domain of TCR clone 274540 (TRAV22, TRAJ48)
CCERFGNEKLTF

SEQ ID NO: 549080 - protein, 13 aa, Homo sapiens
  CDR3 for beta chain variable domain of TCR clone 274540 (TRBV20-1, TRBJ2-5)
CSARGDYQETQYF

SEQ ID NO: 549081 - protein, 13 aa, Homo sapiens
  CDR3 for alpha chain variable domain of TCR clone 274541 (TRAV27, TRAJ6)
CAGGTVGSYIPTS

SEQ ID NO: 549082 - protein, 14 aa, Homo sapiens
  CDR3 for beta chain variable domain of TCR clone 274541 (TRBV6-3, TRBJ1-1)
CASSYQRRDTEAFF

SEQ ID NO: 549083 - protein, 16 aa, Homo sapiens
  CDR3 for alpha chain variable domain of TCR clone 274542 (TRAV3, TRAJ32)
CCEIRNYGGATNKLIF

SEQ ID NO: 549084 - protein, 13 aa, Homo sapiens
  CDR3 for beta chain variable domain of TCR clone 274542 (TRBV2, TRBJ1-1)
CASSEGGNTEAFF

SEQ ID NO: 549085 - protein, 13 aa, Homo sapiens
  CDR3 for alpha chain variable domain of TCR clone 274543 (TRAV36/DV7, TRAJ54)
CAVDIQGAQKLVF

SEQ ID NO: 549086 - protein, 15 aa, Homo sapiens
  CDR3 for beta chain variable domain of TCR clone 274543 (TRBV4-2, TRBJ1-2)
CASSGGGAGIGGYTF

SEQ ID NO: 549087 - protein, 15 aa, Homo sapiens
  CDR3 for alpha chain variable domain of TCR clone 274544 (TRAV3, TRAJ5)
CAVRDLDTGRRALTF

SEQ ID NO: 549088 - protein, 13 aa, Homo sapiens
  CDR3 for beta chain variable domain of TCR clone 274544 (TRBV27, TRBJ1-1)
CASSLSIGAEAFF

SEQ ID NO: 549089 - protein, 15 aa, Homo sapiens
  CDR3 for alpha chain variable domain of TCR clone 274545 (TRAV2, TRAJ27)
CAVDSITPMQANQPL

SEQ ID NO: 549090 - protein, 18 aa, Homo sapiens
  CDR3 for beta chain variable domain of TCR clone 274545 (TRBV7-9, TRBJ2-7)
CASSLTTSGSMTWYEQYF

SEQ ID NO: 549091 - protein, 16 aa, Homo sapiens
  CDR3 for alpha chain variable domain of TCR clone 274546 (TRAV21, TRAJ52)
CAVTNAGGTSYGKLTF

SEQ ID NO: 549092 - protein, 16 aa, Homo sapiens
  CDR3 for beta chain variable domain of TCR clone 274546 (TRBV2, TRBJ2-1)
CASSVGGSLSYNEQSF

SEQ ID NO: 549093 - protein, 15 aa, Homo sapiens
  CDR3 for alpha chain variable domain of TCR clone 274547 (TRAV26-1, TRAJ29)
CIVRVEGSGNTPLVF

SEQ ID NO: 549094 - protein, 14 aa, Homo sapiens
  CDR3 for beta chain variable domain of TCR clone 274547 (TRBV19, TRBJ2-5)
CASSMTGQQETQYF

SEQ ID NO: 549095 - protein, 14 aa, Homo sapiens
  CDR3 for alpha chain variable domain of TCR clone 274548 (TRAV1-2, TRAJ16)
CAVNRFSDGQKLLL

SEQ ID NO: 549096 - protein, 12 aa, Homo sapiens
  CDR3 for beta chain variable domain of TCR clone 274548 (TRBV7-9, TRBJ1-1)
CASSLVRGEAFF

SEQ ID NO: 549097 - protein, 13 aa, Homo sapiens
  CDR3 for alpha chain variable domain of TCR clone 274549 (TRAV26-2, TRAJ47)
CILPMEYGNKLVF

SEQ ID NO: 549098 - protein, 13 aa, Homo sapiens
  CDR3 for beta chain variable domain of TCR clone 274549 (TRBV12-5, TRBJ2-3)
CASGDRQSDTQYF

SEQ ID NO: 549099 - protein, 17 aa, Homo sapiens
  CDR3 for alpha chain variable domain of TCR clone 274550 (TRAV8-4, TRAJ53)
RAVSGPRSEGSNYKLTF

SEQ ID NO: 549100 - protein, 14 aa, Homo sapiens
  CDR3 for beta chain variable domain of TCR clone 274550 (TRBV7-3, TRBJ2-1)
CASSALAGGPEQFF

SEQ ID NO: 549101 - protein, 11 aa, Homo sapiens
  CDR3 for alpha chain variable domain of TCR clone 274551 (TRAV3, TRAJ21)
CAVGNFNQFYF

SEQ ID NO: 549102 - protein, 16 aa, Homo sapiens
  CDR3 for beta chain variable domain of TCR clone 274551 (TRBV20-1, TRBJ2-2)
CSASASGIPGAGELFF

SEQ ID NO: 549103 - protein, 13 aa, Homo sapiens
  CDR3 for alpha chain variable domain of TCR clone 274552 (TRAV29/DV5, TRAJ29)
CAASAAGNTPLVF

SEQ ID NO: 549104 - protein, 14 aa, Homo sapiens
  CDR3 for beta chain variable domain of TCR clone 274552 (TRBV7-6, TRBJ2-4)
CASSPAPGSFLWYF

SEQ ID NO: 549105 - protein, 13 aa, Homo sapiens
  CDR3 for alpha chain variable domain of TCR clone 274553 (TRAV12-3, TRAJ7)
CAMSASGNNRLAF

SEQ ID NO: 549106 - protein, 17 aa, Homo sapiens
  CDR3 for beta chain variable domain of TCR clone 274553 (TRBV3-1, TRBJ2-2)
CASSQFRDKVDTGELFF

SEQ ID NO: 549107 - protein, 16 aa, Homo sapiens
  CDR3 for alpha chain variable domain of TCR clone 274554 (TRAV26-2, TRAJ48)
CILRSPFNFGNEKLTF

SEQ ID NO: 549108 - protein, 15 aa, Homo sapiens
  CDR3 for beta chain variable domain of TCR clone 274554 (TRBV20-1, TRBJ2-3)
CSARFEGTYTDTQYF

SEQ ID NO: 549109 - protein, 13 aa, Homo sapiens
  CDR3 for alpha chain variable domain of TCR clone 274555 (TRAV2, TRAJ40)
CAVVTSGTYKYIF

SEQ ID NO: 549110 - protein, 17 aa, Homo sapiens
  CDR3 for beta chain variable domain of TCR clone 274555 (TRBV7-8, TRBJ1-2)
CASSLRPLQGHLYGYTF

SEQ ID NO: 549111 - protein, 12 aa, Homo sapiens
  CDR3 for alpha chain variable domain of TCR clone 274556 (TRAV12-3, TRAJ17)
CAMTLTGNKLTF

SEQ ID NO: 549112 - protein, 15 aa, Homo sapiens
  CDR3 for beta chain variable domain of TCR clone 274556 (TRBV20-1, TRBJ2-7)
CSAREQVSGMDEQYF

SEQ ID NO: 549113 - protein, 13 aa, Homo sapiens
  CDR3 for alpha chain variable domain of TCR clone 274557 (TRAV12-2, TRAJ10)
CAVPTGGGNKLNF

SEQ ID NO: 549114 - protein, 14 aa, Homo sapiens
  CDR3 for beta chain variable domain of TCR clone 274557 (TRBV25-1, TRBJ1-1)
CASTHLGGNTEAFF

SEQ ID NO: 549115 - protein, 17 aa, Homo sapiens
  CDR3 for alpha chain variable domain of TCR clone 274558 (TRAV23/DV6, TRAJ58)
CAARLLRGETSGSRLTF

SEQ ID NO: 549116 - protein, 17 aa, Homo sapiens
  CDR3 for beta chain variable domain of TCR clone 274558 (TRBV13, TRBJ2-3)
CASSLSSVAGGRNTQYF

SEQ ID NO: 549117 - protein, 16 aa, Homo sapiens
  CDR3 for alpha chain variable domain of TCR clone 274559 (TRAV12-3, TRAJ26)
CNERGRWDNYGQNFVF

SEQ ID NO: 549118 - protein, 12 aa, Homo sapiens
  CDR3 for beta chain variable domain of TCR clone 274559 (TRBV19, TRBJ1-1)
CASSTTGIEAFF

SEQ ID NO: 549119 - protein, 14 aa, Homo sapiens
  CDR3 for alpha chain variable domain of TCR clone 274560 (TRAV4, TRAJ29)
CLGGPDSGNTPLVF

SEQ ID NO: 549120 - protein, 14 aa, Homo sapiens
  CDR3 for beta chain variable domain of TCR clone 274560 (TRBV12-5, TRBJ2-5)
CASGSRTHQGTQYF

SEQ ID NO: 549121 - protein, 16 aa, Homo sapiens
  CDR3 for alpha chain variable domain of TCR clone 274561 (TRAV23/DV6, TRAJ52)
CAARPSSGTSYGKLTF

SEQ ID NO: 549122 - protein, 13 aa, Homo sapiens
  CDR3 for beta chain variable domain of TCR clone 274561 (TRBV7-9, TRBJ1-1)
CASSLSGETEAFF

SEQ ID NO: 549123 - protein, 12 aa, Homo sapiens
  CDR3 for alpha chain variable domain of TCR clone 274562 (TRAV29/DV5, TRAJ49)
CAATDTGNQFYF

SEQ ID NO: 549124 - protein, 15 aa, Homo sapiens
  CDR3 for beta chain variable domain of TCR clone 274562 (TRBV19, TRBJ2-2)
CASRQTGADTGELFF

SEQ ID NO: 549125 - protein, 14 aa, Homo sapiens
  CDR3 for alpha chain variable domain of TCR clone 274563 (TRAV12-1, TRAJ17)
CVVNYKAAGNKLTF

SEQ ID NO: 549126 - protein, 17 aa, Homo sapiens
  CDR3 for beta chain variable domain of TCR clone 274563 (TRBV20-1, TRBJ2-1)
CSASSSGLAGSYNVQFF

SEQ ID NO: 549127 - protein, 12 aa, Homo sapiens
  CDR3 for alpha chain variable domain of TCR clone 274564 (TRAV17, TRAJ20)
CATDRYYYKLSF

SEQ ID NO: 549128 - protein, 14 aa, Homo sapiens
  CDR3 for beta chain variable domain of TCR clone 274564 (TRBV19, TRBJ2-1)
CASPTVVLSGEQFF

SEQ ID NO: 549129 - protein, 16 aa, Homo sapiens
  CDR3 for alpha chain variable domain of TCR clone 274565 (TRAV12-2, TRAJ32)
CAVNLGQGGATNKLIF

SEQ ID NO: 549130 - protein, 14 aa, Homo sapiens
  CDR3 for beta chain variable domain of TCR clone 274565 (TRBV7-2, TRBJ2-7)
CASRSQGAAYEQYF

SEQ ID NO: 549131 - protein, 14 aa, Homo sapiens
  CDR3 for alpha chain variable domain of TCR clone 274566 (TRAV22, TRAJ6)
CAGVGPGGSYIPTF

SEQ ID NO: 549132 - protein, 16 aa, Homo sapiens
  CDR3 for beta chain variable domain of TCR clone 274566 (TRBV5-7, TRBJ2-5)
CASSLLGCPGVETQYF

SEQ ID NO: 549133 - protein, 13 aa, Homo sapiens
  CDR3 for alpha chain variable domain of TCR clone 274567 (TRAV8-3, TRAJ5)
CAVGPRGRRALTF

SEQ ID NO: 549134 - protein, 16 aa, Homo sapiens
  CDR3 for beta chain variable domain of TCR clone 274567 (TRBV19, TRBJ2-1)
CASSKAGPSSYNEQFF

SEQ ID NO: 549135 - protein, 14 aa, Homo sapiens
  CDR3 for alpha chain variable domain of TCR clone 274568 (TRAV16, TRAJ39)
CALSKNNAGNMLTF

SEQ ID NO: 549136 - protein, 15 aa, Homo sapiens
  CDR3 for beta chain variable domain of TCR clone 274568 (TRBV11-2, TRBJ2-2)
CASSSDRVNAGELFF

SEQ ID NO: 549137 - protein, 14 aa, Homo sapiens
  CDR3 for alpha chain variable domain of TCR clone 274569 (TRAV1-1, TRAJ23)
CAVSIYNQGGKLIF

SEQ ID NO: 549138 - protein, 15 aa, Homo sapiens
  CDR3 for beta chain variable domain of TCR clone 274569 (TRBV11-3, TRBJ2-2)
CASSLGGRPTGELFF

SEQ ID NO: 549139 - protein, 13 aa, Homo sapiens
  CDR3 for alpha chain variable domain of TCR clone 274570 (TRAV20, TRAJ20)
CAVRDFNDYKLSF

SEQ ID NO: 549140 - protein, 17 aa, Homo sapiens
  CDR3 for beta chain variable domain of TCR clone 274570 (TRBV28, TRBJ2-5)
CASSRQGGLAGAETQYF

SEQ ID NO: 549141 - protein, 17 aa, Homo sapiens
  CDR3 for alpha chain variable domain of TCR clone 274571 (TRAV4, TRAJ18)
CLVGERSVGSTLGRLYF

SEQ ID NO: 549142 - protein, 16 aa, Homo sapiens
  CDR3 for beta chain variable domain of TCR clone 274571 (TRBV19, TRBJ2-1)
CASSKAGPSSYTEQFF

SEQ ID NO: 549143 - protein, 13 aa, Homo sapiens
  CDR3 for alpha chain variable domain of TCR clone 274572 (TRAV21, TRAJ36)
CAVREAGANNLFF

SEQ ID NO: 549144 - protein, 15 aa, Homo sapiens
  CDR3 for beta chain variable domain of TCR clone 274572 (TRBV9, TRBJ2-3)
CASSTGGGEGDTQYF

SEQ ID NO: 549145 - protein, 15 aa, Homo sapiens
  CDR3 for alpha chain variable domain of TCR clone 274573 (TRAV3, TRAJ22)
CAVRDRGGSARQLTF

SEQ ID NO: 549146 - protein, 14 aa, Homo sapiens
  CDR3 for beta chain variable domain of TCR clone 274573 (TRBV19, TRBJ1-5)
CASSLGLIGRPQHF

SEQ ID NO: 549147 - protein, 15 aa, Homo sapiens
  CDR3 for alpha chain variable domain of TCR clone 274574 (TRAV12-1, TRAJ42)
CVVTRDGGSQGNLIF

SEQ ID NO: 549148 - protein, 15 aa, Homo sapiens
  CDR3 for beta chain variable domain of TCR clone 274574 (TRBV7-2, TRBJ2-2)
CASRRPGQNTGELFF

SEQ ID NO: 549149 - protein, 13 aa, Homo sapiens
  CDR3 for alpha chain variable domain of TCR clone 274575 (TRAV1-1, TRAJ23)
CAVVANQGGKLIF

SEQ ID NO: 549150 - protein, 13 aa, Homo sapiens
  CDR3 for beta chain variable domain of TCR clone 274575 (TRBV7-3, TRBJ1-1)
CASSQDWGAEAFF

SEQ ID NO: 549151 - protein, 15 aa, Homo sapiens
  CDR3 for alpha chain variable domain of TCR clone 274576 (TRAV8-4, TRAJ3)
CAVTGENLVQPCFQD

SEQ ID NO: 549152 - protein, 12 aa, Homo sapiens
  CDR3 for beta chain variable domain of TCR clone 274576 (TRBV7-8, TRBJ2-7)
CASSLGDREQYF

SEQ ID NO: 549153 - protein, 18 aa, Homo sapiens
  CDR3 for alpha chain variable domain of TCR clone 274577 (TRAV26-1, TRAJ23)
CIVRVGLEVWNQGGKLIF

SEQ ID NO: 549154 - protein, 15 aa, Homo sapiens
  CDR3 for beta chain variable domain of TCR clone 274577 (TRBV18, TRBJ2-7)
CASSPTFMDSYEQYF

SEQ ID NO: 549155 - protein, 16 aa, Homo sapiens
  CDR3 for alpha chain variable domain of TCR clone 274578 (TRAV30, TRAJ24)
CGTEIVDADSWGKFEF

SEQ ID NO: 549156 - protein, 13 aa, Homo sapiens
  CDR3 for beta chain variable domain of TCR clone 274578 (TRBV7-2, TRBJ1-4)
CASSLAGLEKLFF

SEQ ID NO: 549157 - protein, 15 aa, Homo sapiens
  CDR3 for alpha chain variable domain of TCR clone 274579 (TRAV21, TRAJ24)
CAVRSSTDSWGKLQF

SEQ ID NO: 549158 - protein, 13 aa, Homo sapiens
  CDR3 for beta chain variable domain of TCR clone 274579 (TRBV11-3, TRBJ2-5)
CASSSTGEETQYF

SEQ ID NO: 549159 - protein, 14 aa, Homo sapiens
  CDR3 for alpha chain variable domain of TCR clone 274580 (TRAV1-2, TRAJ16)
CAVNRFSAGQKLLF

SEQ ID NO: 549160 - protein, 15 aa, Homo sapiens
  CDR3 for beta chain variable domain of TCR clone 274580 (TRBV5-1, TRBJ2-3)
CASSVTSGSTDTQYF

SEQ ID NO: 549161 - protein, 14 aa, Homo sapiens
  CDR3 for alpha chain variable domain of TCR clone 274581 (TRAV38-1, TRAJ45)
CAYYSGGGADGLTF

SEQ ID NO: 549162 - protein, 20 aa, Homo sapiens
  CDR3 for beta chain variable domain of TCR clone 274581 (TRBV28, TRBJ2-1)
CASTRIGRSPGLAGGNEQFF

SEQ ID NO: 549163 - protein, 22 aa, Homo sapiens
  CDR3 for alpha chain variable domain of TCR clone 274582 (TRAV12-2, TRAJ32)
CSSETPSPVIQPPKSATNKLIF

SEQ ID NO: 549164 - protein, 13 aa, Homo sapiens
  CDR3 for beta chain variable domain of TCR clone 274582 (TRBV7-3, TRBJ1-1)
CASSQDWGAEAFF

SEQ ID NO: 549165 - protein, 16 aa, Homo sapiens
  CDR3 for alpha chain variable domain of TCR clone 274583 (TRAV1-1, TRAJ31)
CAVPKQCQTHVWRWNS

SEQ ID NO: 549166 - protein, 17 aa, Homo sapiens
  CDR3 for beta chain variable domain of TCR clone 274583 (TRBV27, TRBJ2-6)
CASSAGTGFSGANDLTF

SEQ ID NO: 549167 - protein, 13 aa, Homo sapiens
  CDR3 for alpha chain variable domain of TCR clone 274584 (TRAV27, TRAJ41)
CAGEGNSGYALNF

SEQ ID NO: 549168 - protein, 17 aa, Homo sapiens
  CDR3 for beta chain variable domain of TCR clone 274584 (TRBV24-1, TRBJ2-1)
CATSDVSTSGTYNEQFF

SEQ ID NO: 549169 - protein, 13 aa, Homo sapiens
  CDR3 for alpha chain variable domain of TCR clone 274585 (TRAV13-1, TRAJ4)
CAASIGGYNKLIL

SEQ ID NO: 549170 - protein, 16 aa, Homo sapiens
  CDR3 for beta chain variable domain of TCR clone 274585 (TRBV20-1, TRBJ2-1)
CGAPGLAGSYSDEQFF

SEQ ID NO: 549171 - protein, 13 aa, Homo sapiens
  CDR3 for alpha chain variable domain of TCR clone 274586 (TRAV12-1, TRAJ26)
CVVRRNYGQNFVF

SEQ ID NO: 549172 - protein, 14 aa, Homo sapiens
  CDR3 for beta chain variable domain of TCR clone 274586 (TRBV7-8, TRBJ2-3)
CASSLEAGTDTQYF

SEQ ID NO: 549173 - protein, 16 aa, Homo sapiens
  CDR3 for alpha chain variable domain of TCR clone 274587 (TRAV4, TRAJ5)
CLVGPDHGHGRRALTS

SEQ ID NO: 549174 - protein, 15 aa, Homo sapiens
  CDR3 for beta chain variable domain of TCR clone 274587 (TRBV27, TRBJ2-5)
CASSLIPSGGETQYF

SEQ ID NO: 549175 - protein, 14 aa, Homo sapiens
  CDR3 for alpha chain variable domain of TCR clone 274588 (TRAV2, TRAJ9)
CAVADRSGGFKTIF

SEQ ID NO: 549176 - protein, 14 aa, Homo sapiens
  CDR3 for beta chain variable domain of TCR clone 274588 (TRBV18, TRBJ2-7)
CASSPRGGAYEQYF

SEQ ID NO: 549177 - protein, 13 aa, Homo sapiens
  CDR3 for alpha chain variable domain of TCR clone 274589 (TRAV12-1, TRAJ22)
CVVPSGSARQLTF

SEQ ID NO: 549178 - protein, 13 aa, Homo sapiens
  CDR3 for beta chain variable domain of TCR clone 274589 (TRBV7-2, TRBJ2-7)
CASSSPSGSEQYF

SEQ ID NO: 549179 - protein, 14 aa, Homo sapiens
  CDR3 for alpha chain variable domain of TCR clone 274590 (TRAV12-3, TRAJ10)
SHLPLTGGGNKLTF

SEQ ID NO: 549180 - protein, 12 aa, Homo sapiens
  CDR3 for beta chain variable domain of TCR clone 274590 (TRBV11-2, TRBJ2-2)
YASSLGGGELFF

SEQ ID NO: 549181 - protein, 12 aa, Homo sapiens
  CDR3 for alpha chain variable domain of TCR clone 274591 (TRAV16, TRAJ10)
CSRTGGGNKLTF

SEQ ID NO: 549182 - protein, 11 aa, Homo sapiens
  CDR3 for beta chain variable domain of TCR clone 274591 (TRBV11-2, TRBJ1-1)
CASSINTEAFF

SEQ ID NO: 549183 - protein, 14 aa, Homo sapiens
  CDR3 for alpha chain variable domain of TCR clone 274592 (TRAV36/DV7, TRAJ57)
CAVGFPGGSDKLVF

SEQ ID NO: 549184 - protein, 12 aa, Homo sapiens
  CDR3 for beta chain variable domain of TCR clone 274592 (TRBV19, TRBJ2-7)
CASTSGTYEQYL

SEQ ID NO: 549185 - protein, 15 aa, Homo sapiens
  CDR3 for alpha chain variable domain of TCR clone 274593 (TRAV27, TRAJ38)
CAARRNAGNNRKLIW

SEQ ID NO: 549186 - protein, 13 aa, Homo sapiens
  CDR3 for beta chain variable domain of TCR clone 274593 (TRBV10-3, TRBJ2-7)
CACKLAVNYEQYF

SEQ ID NO: 549187 - protein, 12 aa, Homo sapiens
  CDR3 for alpha chain variable domain of TCR clone 274594 (TRAV21, TRAJ49)
CDVTNTGNQFYF

SEQ ID NO: 549188 - protein, 17 aa, Homo sapiens
  CDR3 for beta chain variable domain of TCR clone 274594 (TRBV13, TRBJ2-3)
CASSRSRVAGGRNTQYF

SEQ ID NO: 549189 - protein, 14 aa, Homo sapiens
  CDR3 for alpha chain variable domain of TCR clone 274595 (TRAV26-1, TRAJ45)
CIEGTGGGADGLTF

SEQ ID NO: 549190 - protein, 13 aa, Homo sapiens
  CDR3 for beta chain variable domain of TCR clone 274595 (TRBV11-2, TRBJ2-5)
CASSSTGEETQYF

SEQ ID NO: 549191 - protein, 12 aa, Homo sapiens
  CDR3 for alpha chain variable domain of TCR clone 274596 (TRAV17, TRAJ4)
CATDGGYNKLIF

SEQ ID NO: 549192 - protein, 16 aa, Homo sapiens
  CDR3 for beta chain variable domain of TCR clone 274596 (TRBV5-1, TRBJ1-1)
CASSSGGNSLNTEAFF

SEQ ID NO: 549193 - protein, 13 aa, Homo sapiens
  CDR3 for alpha chain variable domain of TCR clone 274597 (TRAV26-2, TRAJ43)
CILRAVNNNDMRF

SEQ ID NO: 549194 - protein, 14 aa, Homo sapiens
  CDR3 for beta chain variable domain of TCR clone 274597 (TRBV7-3, TRBJ2-1)
CASSLGTSANEQFF

SEQ ID NO: 549195 - protein, 17 aa, Homo sapiens
  CDR3 for alpha chain variable domain of TCR clone 274598 (TRAV4, TRAJ18)
CLVGEMSVGSTLGRLYF

SEQ ID NO: 549196 - protein, 16 aa, Homo sapiens
  CDR3 for beta chain variable domain of TCR clone 274598 (TRBV15, TRBJ1-4)
CATSRDSPPGREKLFF

SEQ ID NO: 549197 - protein, 13 aa, Homo sapiens
  CDR3 for alpha chain variable domain of TCR clone 274599 (TRAV1-2, TRAJ9)
CAALNTGGFKTIF

SEQ ID NO: 549198 - protein, 15 aa, Homo sapiens
  CDR3 for beta chain variable domain of TCR clone 274599 (TRBV11-3, TRBJ2-3)
CASLKDGREGDTHYF

SEQ ID NO: 549199 - protein, 14 aa, Homo sapiens
  CDR3 for alpha chain variable domain of TCR clone 274600 (TRAV12-1, TRAJ30)
CVVNIWGRDDKIIF

SEQ ID NO: 549200 - protein, 13 aa, Homo sapiens
  CDR3 for beta chain variable domain of TCR clone 274600 (TRBV12-5, TRBJ2-1)
CASGLGRGNEQFF

SEQ ID NO: 549201 - protein, 15 aa, Homo sapiens
  CDR3 for alpha chain variable domain of TCR clone 274601 (TRAV38-1, TRAJ37)
CAFIFGSGNTGKLIF

SEQ ID NO: 549202 - protein, 12 aa, Homo sapiens
  CDR3 for beta chain variable domain of TCR clone 274601 (TRBV7-9, TRBJ2-7)
CDSSLEGYEQYF

SEQ ID NO: 549203 - protein, 13 aa, Homo sapiens
  CDR3 for alpha chain variable domain of TCR clone 274602 (TRAV13-2, TRAJ13)
CAERPGGYHKVTF

SEQ ID NO: 549204 - protein, 16 aa, Homo sapiens
  CDR3 for beta chain variable domain of TCR clone 274602 (TRBV18, TRBJ2-5)
CASSPPSSGGAKTQYF

SEQ ID NO: 549205 - protein, 13 aa, Homo sapiens
  CDR3 for alpha chain variable domain of TCR clone 274603 (TRAV3, TRAJ41)
FAVCSNSGYALNI

SEQ ID NO: 549206 - protein, 14 aa, Homo sapiens
  CDR3 for beta chain variable domain of TCR clone 274603 (TRBV7-2, TRBJ2-7)
CASSPKTSFYEQYF

SEQ ID NO: 549207 - protein, 15 aa, Homo sapiens
  CDR3 for alpha chain variable domain of TCR clone 274604 (TRAV3, TRAJ22)
CAVRNRGGSARQLTF

SEQ ID NO: 549208 - protein, 13 aa, Homo sapiens
  CDR3 for beta chain variable domain of TCR clone 274604 (TRBV7-9, TRBJ1-2)
CASSLKQNYGYTF

SEQ ID NO: 549209 - protein, 14 aa, Homo sapiens
  CDR3 for alpha chain variable domain of TCR clone 274605 (TRAV27, TRAJ13)
CRSSNSGGYQKVTF

SEQ ID NO: 549210 - protein, 16 aa, Homo sapiens
  CDR3 for beta chain variable domain of TCR clone 274605 (TRBV12-4, TRBJ2-1)
CASKRTSGDTYNEQFF

SEQ ID NO: 549211 - protein, 14 aa, Homo sapiens
  CDR3 for alpha chain variable domain of TCR clone 274606 (TRAV12-3, TRAJ10)
SHLPLTGGGNKLTF

SEQ ID NO: 549212 - protein, 15 aa, Homo sapiens
  CDR3 for beta chain variable domain of TCR clone 274606 (TRBV19, TRBJ1-5)
CASSMGSYSNQPQHF

SEQ ID NO: 549213 - protein, 15 aa, Homo sapiens
  CDR3 for alpha chain variable domain of TCR clone 274607 (TRAV8-2, TRAJ15)
GVVSDRYQAGTALIF

SEQ ID NO: 549214 - protein, 13 aa, Homo sapiens
  CDR3 for beta chain variable domain of TCR clone 274607 (TRBV20-1, TRBJ1-1)
CSAPDRRNTEAFF

SEQ ID NO: 549215 - protein, 11 aa, Homo sapiens
  CDR3 for alpha chain variable domain of TCR clone 274608 (TRAV1-2, TRAJ20)
CAVSNDYKLSF

SEQ ID NO: 549216 - protein, 16 aa, Homo sapiens
  CDR3 for beta chain variable domain of TCR clone 274608 (TRBV29-1, TRBJ2-6)
CSVEDITHSGANVLTF

SEQ ID NO: 549217 - protein, 14 aa, Homo sapiens
  CDR3 for alpha chain variable domain of TCR clone 274609 (TRAV41, TRAJ57)
CAVLLQGGAEKLVF

SEQ ID NO: 549218 - protein, 12 aa, Homo sapiens
  CDR3 for beta chain variable domain of TCR clone 274609 (TRBV10-3, TRBJ1-1)
CATMDRPPEAFF

SEQ ID NO: 549219 - protein, 13 aa, Homo sapiens
  CDR3 for alpha chain variable domain of TCR clone 274610 (TRAV21, TRAJ10)
CAVPTGGGNKLTF

SEQ ID NO: 549220 - protein, 12 aa, Homo sapiens
  CDR3 for beta chain variable domain of TCR clone 274610 (TRBV7-9, TRBJ1-5)
CASSPQGQPQHF

SEQ ID NO: 549221 - protein, 11 aa, Homo sapiens
  CDR3 for alpha chain variable domain of TCR clone 274611 (TRAV1-2, TRAJ40)
CAVPGTYKYIF

SEQ ID NO: 549222 - protein, 13 aa, Homo sapiens
  CDR3 for beta chain variable domain of TCR clone 274611 (TRBV4-1, TRBJ2-2)
CASSQENTGELFF

SEQ ID NO: 549223 - protein, 14 aa, Homo sapiens
  CDR3 for alpha chain variable domain of TCR clone 274612 (TRAV3, TRAJ34)
CAVRAINNTDKLIF

SEQ ID NO: 549224 - protein, 13 aa, Homo sapiens
  CDR3 for beta chain variable domain of TCR clone 274612 (TRBV20-1, TRBJ1-1)
CSARGGGNTEAFF

SEQ ID NO: 549225 - protein, 16 aa, Homo sapiens
  CDR3 for alpha chain variable domain of TCR clone 274613 (TRAV12-2, TRAJ32)
CAVNMNYGGATNKLIF

SEQ ID NO: 549226 - protein, 16 aa, Homo sapiens
  CDR3 for beta chain variable domain of TCR clone 274613 (TRBV7-8, TRBJ2-3)
CASSTKGQRETDTQYF

SEQ ID NO: 549227 - protein, 10 aa, Homo sapiens
  CDR3 for alpha chain variable domain of TCR clone 274614 (TRAV23/DV6, TRAJ57)
CAASSTLSQG

SEQ ID NO: 549228 - protein, 14 aa, Homo sapiens
  CDR3 for beta chain variable domain of TCR clone 274614 (TRBV25-1, TRBJ1-1)
CAITHLGGNTGAFF

SEQ ID NO: 549229 - protein, 15 aa, Homo sapiens
  CDR3 for alpha chain variable domain of TCR clone 274615 (TRAV8-2, TRAJ16)
CVVRDGFSDVQKLLV

SEQ ID NO: 549230 - protein, 13 aa, Homo sapiens
  CDR3 for beta chain variable domain of TCR clone 274615 (TRBV20-1, TRBJ1-1)
CSAPPGGHTEAFF

SEQ ID NO: 549231 - protein, 17 aa, Homo sapiens
  CDR3 for alpha chain variable domain of TCR clone 274616 (TRAV4, TRAJ18)
SLVVAAGRGSTLGRLYF

SEQ ID NO: 549232 - protein, 17 aa, Homo sapiens
  CDR3 for beta chain variable domain of TCR clone 274616 (TRBV28, TRBJ2-2)
CASSLATGMGDAGELFF

SEQ ID NO: 549233 - protein, 14 aa, Homo sapiens
  CDR3 for alpha chain variable domain of TCR clone 274617 (TRAV38-1, TRAJ29)
CAFITPSGNITLVF

SEQ ID NO: 549234 - protein, 14 aa, Homo sapiens
  CDR3 for beta chain variable domain of TCR clone 274617 (TRBV18, TRBJ2-7)
CASSPRGGAYEQYF

SEQ ID NO: 549235 - protein, 16 aa, Homo sapiens
  CDR3 for alpha chain variable domain of TCR clone 274618 (TRAV3, TRAJ13)
CAVRDPNSGGYQKVTF

SEQ ID NO: 549236 - protein, 13 aa, Homo sapiens
  CDR3 for beta chain variable domain of TCR clone 274618 (TRBV7-9, TRBJ2-7)
RASSLQGSNEQYF

SEQ ID NO: 549237 - protein, 19 aa, Homo sapiens
  CDR3 for alpha chain variable domain of TCR clone 274619 (TRAV26-1, TRAJ52)
CIVRAHRNAGGTSYGKLTF

SEQ ID NO: 549238 - protein, 14 aa, Homo sapiens
  CDR3 for beta chain variable domain of TCR clone 274619 (TRBV4-1, TRBJ2-2)
CASSRAVNTGELFF

SEQ ID NO: 549239 - protein, 13 aa, Homo sapiens
  CDR3 for alpha chain variable domain of TCR clone 274620 (TRAV8-3, TRAJ28)
CAVGVVGSYQLTF

SEQ ID NO: 549240 - protein, 15 aa, Homo sapiens
  CDR3 for beta chain variable domain of TCR clone 274620 (TRBV7-9, TRBJ1-4)
CASSARTGGNEKLFF

SEQ ID NO: 549241 - protein, 11 aa, Homo sapiens
  CDR3 for alpha chain variable domain of TCR clone 274621 (TRAV13-1, TRAJ5)
CAPKGRRALTF

SEQ ID NO: 549242 - protein, 14 aa, Homo sapiens
  CDR3 for beta chain variable domain of TCR clone 274621 (TRBV4-1, TRBJ2-2)
CASSQAVNTGGLSF

SEQ ID NO: 549243 - protein, 16 aa, Homo sapiens
  CDR3 for alpha chain variable domain of TCR clone 274622 (TRAV8-2, TRAJ5)
CVVSDPMDTGRRALTF

SEQ ID NO: 549244 - protein, 13 aa, Homo sapiens
  CDR3 for beta chain variable domain of TCR clone 274622 (TRBV6-3, TRBJ2-5)
CASRRAGEETQYF

SEQ ID NO: 549245 - protein, 13 aa, Homo sapiens
  CDR3 for alpha chain variable domain of TCR clone 274623 (TRAV36/DV7, TRAJ38)
CVANAGNNRKLIW

SEQ ID NO: 549246 - protein, 14 aa, Homo sapiens
  CDR3 for beta chain variable domain of TCR clone 274623 (TRBV7-2, TRBJ2-7)
RASSLRWEVNEQYF

SEQ ID NO: 549247 - protein, 15 aa, Homo sapiens
  CDR3 for alpha chain variable domain of TCR clone 274624 (TRAV25, TRAJ53)
CPTSNSGGSNYKLTF

SEQ ID NO: 549248 - protein, 14 aa, Homo sapiens
  CDR3 for beta chain variable domain of TCR clone 274624 (TRBV11-2, TRBJ1-2)
CASSLGTANYGYTF

SEQ ID NO: 549249 - protein, 14 aa, Homo sapiens
  CDR3 for alpha chain variable domain of TCR clone 274625 (TRAV21, TRAJ35)
CAVMPIGLGNVLHF

SEQ ID NO: 549250 - protein, 12 aa, Homo sapiens
  CDR3 for beta chain variable domain of TCR clone 274625 (TRBV7-9, TRBJ2-7)
CASSIKREEQYF

SEQ ID NO: 549251 - protein, 13 aa, Homo sapiens
  CDR3 for alpha chain variable domain of TCR clone 274626 (TRAV2, TRAJ40)
CAVVTSGTYKDIF

SEQ ID NO: 549252 - protein, 16 aa, Homo sapiens
  CDR3 for beta chain variable domain of TCR clone 274626 (TRBV19, TRBJ2-2)
CASRSPGTGATGELFF

SEQ ID NO: 549253 - protein, 13 aa, Homo sapiens
  CDR3 for alpha chain variable domain of TCR clone 274627 (TRAV12-2, TRAJ12)
CAGPEDSSYKLFF

SEQ ID NO: 549254 - protein, 13 aa, Homo sapiens
  CDR3 for beta chain variable domain of TCR clone 274627 (TRBV28, TRBJ2-1)
CASSLIGRDEQFF

SEQ ID NO: 549255 - protein, 14 aa, Homo sapiens
  CDR3 for alpha chain variable domain of TCR clone 274628 (TRAV12-2, TRAJ11)
CAVNRESGYSSLTF

SEQ ID NO: 549256 - protein, 10 aa, Homo sapiens
  CDR3 for beta chain variable domain of TCR clone 274628 (TRBV20-1, TRBJ2-5)
CSARFETQYF

SEQ ID NO: 549257 - protein, 12 aa, Homo sapiens
  CDR3 for alpha chain variable domain of TCR clone 274629 (TRAV1-1, TRAJ8)
CAGGTGFQKLVF

SEQ ID NO: 549258 - protein, 15 aa, Homo sapiens
  CDR3 for beta chain variable domain of TCR clone 274629 (TRBV28, TRBJ2-7)
CASSPGGRGFYEQYF

SEQ ID NO: 549259 - protein, 14 aa, Homo sapiens
  CDR3 for alpha chain variable domain of TCR clone 274630 (TRAV10, TRAJ34)
CVVSRGGDTDKLIF

SEQ ID NO: 549260 - protein, 17 aa, Homo sapiens
  CDR3 for beta chain variable domain of TCR clone 274630 (TRBV6-3, TRBJ2-3)
CSSRRPLGGGSTDTQYF

SEQ ID NO: 549261 - protein, 13 aa, Homo sapiens
  CDR3 for alpha chain variable domain of TCR clone 274631 (TRAV12-1, TRAJ40)
CVVKEAGTYKYIF

SEQ ID NO: 549262 - protein, 16 aa, Homo sapiens
  CDR3 for beta chain variable domain of TCR clone 274631 (TRBV19, TRBJ2-2)
CASRSPGTGATGELFF

SEQ ID NO: 549263 - protein, 13 aa, Homo sapiens
  CDR3 for alpha chain variable domain of TCR clone 274632 (TRAV13-2, TRAJ48)
CAEMDFGNEKLTF

SEQ ID NO: 549264 - protein, 16 aa, Homo sapiens
  CDR3 for beta chain variable domain of TCR clone 274632 (TRBV12-4, TRBJ2-7)
CASSLIGGTGTYEQYF

SEQ ID NO: 549265 - protein, 15 aa, Homo sapiens
  CDR3 for alpha chain variable domain of TCR clone 274633 (TRAV21, TRAJ52)
CAVRGGGTSYGKLTF

SEQ ID NO: 549266 - protein, 15 aa, Homo sapiens
  CDR3 for beta chain variable domain of TCR clone 274633 (TRBV18, TRBJ1-5)
CAGSPSDRSNQPQHF

SEQ ID NO: 549267 - protein, 17 aa, Homo sapiens
  CDR3 for alpha chain variable domain of TCR clone 274634 (TRAV12-2, TRAJ4)
CAVSVRPVSGGYNKLIF

SEQ ID NO: 549268 - protein, 14 aa, Homo sapiens
  CDR3 for beta chain variable domain of TCR clone 274634 (TRBV7-2, TRBJ1-1)
CASSFLTGTTEAFF

SEQ ID NO: 549269 - protein, 18 aa, Homo sapiens
  CDR3 for alpha chain variable domain of TCR clone 274635 (TRAV13-1, TRAJ52)
CAAKNPNAGGTSYVKLTF

SEQ ID NO: 549270 - protein, 18 aa, Homo sapiens
  CDR3 for beta chain variable domain of TCR clone 274635 (TRBV12-4, TRBJ2-4)
CASSRTGAVDVAKNIQYF

SEQ ID NO: 549271 - protein, 14 aa, Homo sapiens
  CDR3 for alpha chain variable domain of TCR clone 274636 (TRAV17, TRAJ16)
CATADFSDGQKLLF

SEQ ID NO: 549272 - protein, 14 aa, Homo sapiens
  CDR3 for beta chain variable domain of TCR clone 274636 (TRBV7-9, TRBJ1-4)
CAITEGEANEKLFF

SEQ ID NO: 549273 - protein, 14 aa, Homo sapiens
  CDR3 for alpha chain variable domain of TCR clone 274637 (TRAV20, TRAJ22)
CAVALGGSARQLTF

SEQ ID NO: 549274 - protein, 15 aa, Homo sapiens
  CDR3 for beta chain variable domain of TCR clone 274637 (TRBV29-1, TRBJ2-1)
CSGRDRKSSYNEQFF

SEQ ID NO: 549275 - protein, 16 aa, Homo sapiens
  CDR3 for alpha chain variable domain of TCR clone 274638 (TRAV8-4, TRAJ5)
CAVSPLTDTGMRALTF

SEQ ID NO: 549276 - protein, 14 aa, Homo sapiens
  CDR3 for beta chain variable domain of TCR clone 274638 (TRBV19, TRBJ1-6)
CASSTDGWNSPLHF

SEQ ID NO: 549277 - protein, 17 aa, Homo sapiens
  CDR3 for alpha chain variable domain of TCR clone 274639 (TRAV35, TRAJ47)
GLLDFRTYKEYGNKLVF

SEQ ID NO: 549278 - protein, 11 aa, Homo sapiens
  CDR3 for beta chain variable domain of TCR clone 274639 (TRBV29-1, TRBJ1-1)
CSVEVGTRTFF

SEQ ID NO: 549279 - protein, 17 aa, Homo sapiens
  CDR3 for alpha chain variable domain of TCR clone 274640 (TRAV3, TRAJ42)
CAVRDRDYGGSQGNLIF

SEQ ID NO: 549280 - protein, 12 aa, Homo sapiens
  CDR3 for beta chain variable domain of TCR clone 274640 (TRBV29-1, TRBJ1-1)
CSESDGNTEAFF

SEQ ID NO: 549281 - protein, 16 aa, Homo sapiens
  CDR3 for alpha chain variable domain of TCR clone 274641 (TRAV3, TRAJ21)
CAVRDIERGNFNKFYF

SEQ ID NO: 549282 - protein, 15 aa, Homo sapiens
  CDR3 for beta chain variable domain of TCR clone 274641 (TRBV6-6, TRBJ1-5)
CASSSIQGTNQPQHF

SEQ ID NO: 549283 - protein, 13 aa, Homo sapiens
  CDR3 for alpha chain variable domain of TCR clone 274642 (TRAV20, TRAJ40)
CAVPFSGTYKYIF

SEQ ID NO: 549284 - protein, 13 aa, Homo sapiens
  CDR3 for beta chain variable domain of TCR clone 274642 (TRBV15, TRBJ2-5)
CATSQGGEETQYF

SEQ ID NO: 549285 - protein, 12 aa, Homo sapiens
  CDR3 for alpha chain variable domain of TCR clone 274643 (TRAV8-3, TRAJ26)
CAGDNYRQNSVF

SEQ ID NO: 549286 - protein, 15 aa, Homo sapiens
  CDR3 for beta chain variable domain of TCR clone 274643 (TRBV9, TRBJ2-1)
CASSLAGSSYNEQFF

SEQ ID NO: 549287 - protein, 12 aa, Homo sapiens
  CDR3 for alpha chain variable domain of TCR clone 274644 (TRAV21, TRAJ56)
CAVGVNRSKLTF

SEQ ID NO: 549288 - protein, 13 aa, Homo sapiens
  CDR3 for beta chain variable domain of TCR clone 274644 (TRBV6-1, TRBJ1-1)
CASSRQGNTEAFF

SEQ ID NO: 549289 - protein, 10 aa, Homo sapiens
  CDR3 for alpha chain variable domain of TCR clone 274645 (TRAV13-1, TRAJ7)
LIGGNNRLAF

SEQ ID NO: 549290 - protein, 13 aa, Homo sapiens
  CDR3 for beta chain variable domain of TCR clone 274645 (TRBV11-2, TRBJ2-2)
CASGRDREEELFF

SEQ ID NO: 549291 - protein, 13 aa, Homo sapiens
  CDR3 for alpha chain variable domain of TCR clone 274646 (TRAV3, TRAJ29)
CAARAIIDTPLVF

SEQ ID NO: 549292 - protein, 14 aa, Homo sapiens
  CDR3 for beta chain variable domain of TCR clone 274646 (TRBV27, TRBJ2-1)
CASSATGGYNEQFF

SEQ ID NO: 549293 - protein, 15 aa, Homo sapiens
  CDR3 for alpha chain variable domain of TCR clone 274647 (TRAV13-1, TRAJ38)
CAAGSLMLATTVSGF

SEQ ID NO: 549294 - protein, 14 aa, Homo sapiens
  CDR3 for beta chain variable domain of TCR clone 274647 (TRBV11-2, TRBJ2-1)
CASSLEVANNEQFF

SEQ ID NO: 549295 - protein, 14 aa, Homo sapiens
  CDR3 for alpha chain variable domain of TCR clone 274648 (TRAV21, TRAJ48)
CAVRSNFGNEKLTF

SEQ ID NO: 549296 - protein, 13 aa, Homo sapiens
  CDR3 for beta chain variable domain of TCR clone 274648 (TRBV7-9, TRBJ1-2)
CASSLKQNYGYTF

SEQ ID NO: 549297 - protein, 15 aa, Homo sapiens
  CDR3 for alpha chain variable domain of TCR clone 274649 (TRAV3, TRAJ9)
CAVRGLNTGGFKTIF

SEQ ID NO: 549298 - protein, 14 aa, Homo sapiens
  CDR3 for beta chain variable domain of TCR clone 274649 (TRBV19, TRBJ1-2)
CASEGTGVTYGYPF

SEQ ID NO: 549299 - protein, 15 aa, Homo sapiens
  CDR3 for alpha chain variable domain of TCR clone 274650 (TRAV3, TRAJ22)
CALRDRGGSARQLTF

SEQ ID NO: 549300 - protein, 13 aa, Homo sapiens
  CDR3 for beta chain variable domain of TCR clone 274650 (TRBV7-6, TRBJ1-2)
CASSLVADYGYTF

SEQ ID NO: 549301 - protein, 13 aa, Homo sapiens
  CDR3 for alpha chain variable domain of TCR clone 274651 (TRAV21, TRAJ27)
CAARPGNAGKSHF

SEQ ID NO: 549302 - protein, 14 aa, Homo sapiens
  CDR3 for beta chain variable domain of TCR clone 274651 (TRBV11-2, TRBJ2-7)
CASSLGAGAYEQYF

SEQ ID NO: 549303 - protein, 13 aa, Homo sapiens
  CDR3 for alpha chain variable domain of TCR clone 274652 (TRAV20, TRAJ37)
CAWCSSNTGKLIF

SEQ ID NO: 549304 - protein, 14 aa, Homo sapiens
  CDR3 for beta chain variable domain of TCR clone 274652 (TRBV20-1, TRBJ2-5)
CSARDGRAGETQYF

SEQ ID NO: 549305 - protein, 13 aa, Homo sapiens
  CDR3 for alpha chain variable domain of TCR clone 274653 (TRAV1-2, TRAJ9)
CAALNTGGFKTIF

SEQ ID NO: 549306 - protein, 15 aa, Homo sapiens
  CDR3 for beta chain variable domain of TCR clone 274653 (TRBV7-8, TRBJ2-1)
CASSLADSLYNEQFF

SEQ ID NO: 549307 - protein, 14 aa, Homo sapiens
  CDR3 for alpha chain variable domain of TCR clone 274654 (TRAV12-2, TRAJ32)
CAHPESGATNKLIF

SEQ ID NO: 549308 - protein, 14 aa, Homo sapiens
  CDR3 for beta chain variable domain of TCR clone 274654 (TRBV4-2, TRBJ2-3)
CASRETRAPGKQYF

SEQ ID NO: 549309 - protein, 14 aa, Homo sapiens
  CDR3 for alpha chain variable domain of TCR clone 274655 (TRAV8-2, TRAJ32)
CVVSAGVATNKLIF

SEQ ID NO: 549310 - protein, 13 aa, Homo sapiens
  CDR3 for beta chain variable domain of TCR clone 274655 (TRBV11-2, TRBJ2-5)
CASSSTGEETQYF

SEQ ID NO: 549311 - protein, 15 aa, Homo sapiens
  CDR3 for alpha chain variable domain of TCR clone 274656 (TRAV26-2, TRAJ39)
CSLRGNSNAGNMLTF

SEQ ID NO: 549312 - protein, 15 aa, Homo sapiens
  CDR3 for beta chain variable domain of TCR clone 274656 (TRBV5-4, TRBJ1-1)
CASSSLGWANTEAFF

SEQ ID NO: 549313 - protein, 13 aa, Homo sapiens
  CDR3 for alpha chain variable domain of TCR clone 274657 (TRAV23/DV6, TRAJ47)
CAASMTRGNKLVF

SEQ ID NO: 549314 - protein, 14 aa, Homo sapiens
  CDR3 for beta chain variable domain of TCR clone 274657 (TRBV7-3, TRBJ1-1)
CASSLKGANTEAFF

SEQ ID NO: 549315 - protein, 14 aa, Homo sapiens
  CDR3 for alpha chain variable domain of TCR clone 274658 (TRAV1-2, TRAJ8)
CAVREDTVFQKLVF

SEQ ID NO: 549316 - protein, 14 aa, Homo sapiens
  CDR3 for beta chain variable domain of TCR clone 274658 (TRBV5-4, TRBJ1-1)
CASSLDSRRDEAFF

SEQ ID NO: 549317 - protein, 16 aa, Homo sapiens
  CDR3 for alpha chain variable domain of TCR clone 274659 (TRAV13-1, TRAJ10)
CAASSHFTRGGNKLTF

SEQ ID NO: 549318 - protein, 15 aa, Homo sapiens
  CDR3 for beta chain variable domain of TCR clone 274659 (TRBV7-9, TRBJ1-6)
CASSSPGRGNSPLHC

SEQ ID NO: 549319 - protein, 13 aa, Homo sapiens
  CDR3 for alpha chain variable domain of TCR clone 274660 (TRAV23/DV6, TRAJ22)
CAPYSGSARQLTF

SEQ ID NO: 549320 - protein, 15 aa, Homo sapiens
  CDR3 for beta chain variable domain of TCR clone 274660 (TRBV11-2, TRBJ1-6)
CASSLDPWAVPPLHF

SEQ ID NO: 549321 - protein, 13 aa, Homo sapiens
  CDR3 for alpha chain variable domain of TCR clone 274661 (TRAV20, TRAJ37)
CAGCSSNAGKLIF

SEQ ID NO: 549322 - protein, 11 aa, Homo sapiens
  CDR3 for beta chain variable domain of TCR clone 274661 (TRBV12-4, TRBJ2-3)
CASTATDTQNF

SEQ ID NO: 549323 - protein, 14 aa, Homo sapiens
  CDR3 for alpha chain variable domain of TCR clone 274662 (TRAV12-2, TRAJ13)
CAVKKTGGYQKVTF

SEQ ID NO: 549324 - protein, 14 aa, Homo sapiens
  CDR3 for beta chain variable domain of TCR clone 274662 (TRBV25-1, TRBJ1-1)
CASTHLGGNTEEFF

SEQ ID NO: 549325 - protein, 11 aa, Homo sapiens
  CDR3 for alpha chain variable domain of TCR clone 274663 (TRAV12-1, TRAJ30)
CVVNGQDKIIF

SEQ ID NO: 549326 - protein, 14 aa, Homo sapiens
  CDR3 for beta chain variable domain of TCR clone 274663 (TRBV7-2, TRBJ1-1)
CASSFLTGTTEAFF

SEQ ID NO: 549327 - protein, 15 aa, Homo sapiens
  CDR3 for alpha chain variable domain of TCR clone 274664 (TRAV13-1, TRAJ43)
CAATPELGGNNDMRF

SEQ ID NO: 549328 - protein, 15 aa, Homo sapiens
  CDR3 for beta chain variable domain of TCR clone 274664 (TRBV10-2, TRBJ2-6)
CASGEQGTGANVLTF

SEQ ID NO: 549329 - protein, 16 aa, Homo sapiens
  CDR3 for alpha chain variable domain of TCR clone 274665 (TRAV12-3, TRAJ53)
CAMSPGSGGSNYKLTF

SEQ ID NO: 549330 - protein, 13 aa, Homo sapiens
  CDR3 for beta chain variable domain of TCR clone 274665 (TRBV20-1, TRBJ1-1)
CSARVGGNTEAFF

SEQ ID NO: 549331 - protein, 13 aa, Homo sapiens
  CDR3 for alpha chain variable domain of TCR clone 274666 (TRAV26-1, TRAJ34)
CIVRPWITDKLIF

SEQ ID NO: 549332 - protein, 15 aa, Homo sapiens
  CDR3 for beta chain variable domain of TCR clone 274666 (TRBV5-7, TRBJ1-5)
CASSYGKLWDQPQHF

SEQ ID NO: 549333 - protein, 12 aa, Homo sapiens
  CDR3 for alpha chain variable domain of TCR clone 274667 (TRAV2, TRAJ33)
CAFMDSNYQLIW

SEQ ID NO: 549334 - protein, 16 aa, Homo sapiens
  CDR3 for beta chain variable domain of TCR clone 274667 (TRBV2, TRBJ2-7)
CASSEPWTGPSYEKYF

SEQ ID NO: 549335 - protein, 13 aa, Homo sapiens
  CDR3 for alpha chain variable domain of TCR clone 274668 (TRAV12-2, TRAJ9)
CAVKWAGGFKTIF

SEQ ID NO: 549336 - protein, 15 aa, Homo sapiens
  CDR3 for beta chain variable domain of TCR clone 274668 (TRBV28, TRBJ2-7)
CASSFRGQGRYEQYF

SEQ ID NO: 549337 - protein, 14 aa, Homo sapiens
  CDR3 for alpha chain variable domain of TCR clone 274669 (TRAV20, TRAJ42)
CAVQGWRSQGNLIF

SEQ ID NO: 549338 - protein, 15 aa, Homo sapiens
  CDR3 for beta chain variable domain of TCR clone 274669 (TRBV5-8, TRBJ2-7)
CASSLGSGSSYEQYF

SEQ ID NO: 549339 - protein, 12 aa, Homo sapiens
  CDR3 for alpha chain variable domain of TCR clone 274670 (TRAV12-1, TRAJ40)
CVAYSGTYKYIF

SEQ ID NO: 549340 - protein, 17 aa, Homo sapiens
  CDR3 for beta chain variable domain of TCR clone 274670 (TRBV11-3, TRBJ1-5)
CASSPLTGLRGNQPQHF

SEQ ID NO: 549341 - protein, 13 aa, Homo sapiens
  CDR3 for alpha chain variable domain of TCR clone 274671 (TRAV22, TRAJ29)
FAVGGSGNTPLGF

SEQ ID NO: 549342 - protein, 13 aa, Homo sapiens
  CDR3 for beta chain variable domain of TCR clone 274671 (TRBV4-2, TRBJ1-1)
CASSQAGNTEAFF

SEQ ID NO: 549343 - protein, 14 aa, Homo sapiens
  CDR3 for alpha chain variable domain of TCR clone 274672 (TRAV26-1, TRAJ34)
CIVRVAYNNEKLIF

SEQ ID NO: 549344 - protein, 15 aa, Homo sapiens
  CDR3 for beta chain variable domain of TCR clone 274672 (TRBV20-1, TRBJ2-7)
CSARVPAAYFYEQYF

SEQ ID NO: 549345 - protein, 14 aa, Homo sapiens
  CDR3 for alpha chain variable domain of TCR clone 274673 (TRAV12-3, TRAJ42)
CAMNYGGSQGNLIF

SEQ ID NO: 549346 - protein, 14 aa, Homo sapiens
  CDR3 for beta chain variable domain of TCR clone 274673 (TRBV25-1, TRBJ1-1)
CASTHLGGNTEAFF

SEQ ID NO: 549347 - protein, 14 aa, Homo sapiens
  CDR3 for alpha chain variable domain of TCR clone 274674 (TRAV12-2, TRAJ13)
CAVKKTGGYQKVNF

SEQ ID NO: 549348 - protein, 16 aa, Homo sapiens
  CDR3 for beta chain variable domain of TCR clone 274674 (TRBV11-3, TRBJ2-3)
CASSSGSGGGTDTQYF

SEQ ID NO: 549349 - protein, 11 aa, Homo sapiens
  CDR3 for alpha chain variable domain of TCR clone 274675 (TRAV3, TRAJ17)
PRGAAGNKLTF

SEQ ID NO: 549350 - protein, 16 aa, Homo sapiens
  CDR3 for beta chain variable domain of TCR clone 274675 (TRBV6-1, TRBJ2-5)
CASSETLDRGAETQYF

SEQ ID NO: 549351 - protein, 13 aa, Homo sapiens
  CDR3 for alpha chain variable domain of TCR clone 274676 (TRAV26-1, TRAJ48)
CIVRVVGGEKLTL

SEQ ID NO: 549352 - protein, 19 aa, Homo sapiens
  CDR3 for beta chain variable domain of TCR clone 274676 (TRBV11-3, TRBJ2-2)
CASSTRPGAKTTNTGELFF

SEQ ID NO: 549353 - protein, 13 aa, Homo sapiens
  CDR3 for alpha chain variable domain of TCR clone 274677 (TRAV8-3, TRAJ44)
CAVVPGTSSKLTF

SEQ ID NO: 549354 - protein, 13 aa, Homo sapiens
  CDR3 for beta chain variable domain of TCR clone 274677 (TRBV10-3, TRBJ1-2)
CAISERDSYGYTF

SEQ ID NO: 549355 - protein, 14 aa, Homo sapiens
  CDR3 for alpha chain variable domain of TCR clone 274678 (TRAV1-2, TRAJ16)
CAVTRFSDGQKLLF

SEQ ID NO: 549356 - protein, 15 aa, Homo sapiens
  CDR3 for beta chain variable domain of TCR clone 274678 (TRBV7-3, TRBJ1-6)
CASSLGRGAGSPLHF

SEQ ID NO: 549357 - protein, 13 aa, Homo sapiens
  CDR3 for alpha chain variable domain of TCR clone 274679 (TRAV12-2, TRAJ39)
CAVNNNAGNMLTF

SEQ ID NO: 549358 - protein, 13 aa, Homo sapiens
  CDR3 for beta chain variable domain of TCR clone 274679 (TRBV2, TRBJ1-5)
YATAGPGNQPQHF

SEQ ID NO: 549359 - protein, 14 aa, Homo sapiens
  CDR3 for alpha chain variable domain of TCR clone 274680 (TRAV2, TRAJ9)
CAVEDRSGGVKTIF

SEQ ID NO: 549360 - protein, 15 aa, Homo sapiens
  CDR3 for beta chain variable domain of TCR clone 274680 (TRBV5-7, TRBJ1-5)
CASSYGKLWDQPQHF

SEQ ID NO: 549361 - protein, 17 aa, Homo sapiens
  CDR3 for alpha chain variable domain of TCR clone 274681 (TRAV35, TRAJ34)
CAGTSIVRNTTSSSLGL

SEQ ID NO: 549362 - protein, 15 aa, Homo sapiens
  CDR3 for beta chain variable domain of TCR clone 274681 (TRBV6-1, TRBJ1-5)
CASSELREGNQPQHF

SEQ ID NO: 549363 - protein, 14 aa, Homo sapiens
  CDR3 for alpha chain variable domain of TCR clone 274682 (TRAV26-1, TRAJ38)
CIADNAGNNRKLIW

SEQ ID NO: 549364 - protein, 14 aa, Homo sapiens
  CDR3 for beta chain variable domain of TCR clone 274682 (TRBV11-2, TRBJ2-7)
CASSLVPGGDEQYF

SEQ ID NO: 549365 - protein, 15 aa, Homo sapiens
  CDR3 for alpha chain variable domain of TCR clone 274683 (TRAV8-6, TRAJ42)
CAVRGRKPRKSHLWK

SEQ ID NO: 549366 - protein, 13 aa, Homo sapiens
  CDR3 for beta chain variable domain of TCR clone 274683 (TRBV7-3, TRBJ1-1)
CASGQDWGAEAFF

SEQ ID NO: 549367 - protein, 18 aa, Homo sapiens
  CDR3 for alpha chain variable domain of TCR clone 274684 (TRAV13-2, TRAJ10)
CAASLPPILTGGGNKLTF

SEQ ID NO: 549368 - protein, 12 aa, Homo sapiens
  CDR3 for beta chain variable domain of TCR clone 274684 (TRBV5-7, TRBJ2-7)
RASSVQGGEQYF

SEQ ID NO: 549369 - protein, 16 aa, Homo sapiens
  CDR3 for alpha chain variable domain of TCR clone 274685 (TRAV38-1, TRAJ32)
CAFMPFFGGATNKLIF

SEQ ID NO: 549370 - protein, 13 aa, Homo sapiens
  CDR3 for beta chain variable domain of TCR clone 274685 (TRBV7-9, TRBJ2-7)
CASSFAGAYEQYF

SEQ ID NO: 549371 - protein, 16 aa, Homo sapiens
  CDR3 for alpha chain variable domain of TCR clone 274686 (TRAV12-1, TRAJ12)
CLVNTLLMDSSYKLIF

SEQ ID NO: 549372 - protein, 13 aa, Homo sapiens
  CDR3 for beta chain variable domain of TCR clone 274686 (TRBV11-2, TRBJ2-1)
CASSSEAYNEQFF

SEQ ID NO: 549373 - protein, 14 aa, Homo sapiens
  CDR3 for alpha chain variable domain of TCR clone 274687 (TRAV38-1, TRAJ45)
CASHSEGGADGLTF

SEQ ID NO: 549374 - protein, 13 aa, Homo sapiens
  CDR3 for beta chain variable domain of TCR clone 274687 (TRBV10-3, TRBJ1-2)
CAISERDSYGYTF

SEQ ID NO: 549375 - protein, 12 aa, Homo sapiens
  CDR3 for alpha chain variable domain of TCR clone 274688 (TRAV21, TRAJ34)
CVVAGATDKLIF

SEQ ID NO: 549376 - protein, 12 aa, Homo sapiens
  CDR3 for beta chain variable domain of TCR clone 274688 (TRBV7-9, TRBJ1-1)
CASSLVRGEAFF

SEQ ID NO: 549377 - protein, 12 aa, Homo sapiens
  CDR3 for alpha chain variable domain of TCR clone 274689 (TRAV29/DV5, TRAJ49)
CAATDTGNQFYF

SEQ ID NO: 549378 - protein, 11 aa, Homo sapiens
  CDR3 for beta chain variable domain of TCR clone 274689 (TRBV12-4, TRBJ2-7)
CQQFRGLQQYF

SEQ ID NO: 549379 - protein, 13 aa, Homo sapiens
  CDR3 for alpha chain variable domain of TCR clone 274690 (TRAV8-3, TRAJ44)
CAVVPGTASKLTF

SEQ ID NO: 549380 - protein, 14 aa, Homo sapiens
  CDR3 for beta chain variable domain of TCR clone 274690 (TRBV11-2, TRBJ2-3)
CGSSRLARTDTQHF

SEQ ID NO: 549381 - protein, 14 aa, Homo sapiens
  CDR3 for alpha chain variable domain of TCR clone 274691 (TRAV12-2, TRAJ24)
CTVTPADSWGKLQF

SEQ ID NO: 549382 - protein, 12 aa, Homo sapiens
  CDR3 for beta chain variable domain of TCR clone 274691 (TRBV3-1, TRBJ2-1)
CASSQGSSGQFF

SEQ ID NO: 549383 - protein, 13 aa, Homo sapiens
  CDR3 for alpha chain variable domain of TCR clone 274692 (TRAV12-1, TRAJ6)
CVVFPGGSYVPTF

SEQ ID NO: 549384 - protein, 13 aa, Homo sapiens
  CDR3 for beta chain variable domain of TCR clone 274692 (TRBV12-4, TRBJ2-7)
CASSFVPTAEQYF

SEQ ID NO: 549385 - protein, 14 aa, Homo sapiens
  CDR3 for alpha chain variable domain of TCR clone 274693 (TRAV8-3, TRAJ10)
CAVGNAGGGNKLTF

SEQ ID NO: 549386 - protein, 11 aa, Homo sapiens
  CDR3 for beta chain variable domain of TCR clone 274693 (TRBV7-2, TRBJ2-3)
CASSSSDTQYF

SEQ ID NO: 549387 - protein, 16 aa, Homo sapiens
  CDR3 for alpha chain variable domain of TCR clone 274694 (TRAV12-2, TRAJ52)
CRLANAGGTSYGKLTF

SEQ ID NO: 549388 - protein, 16 aa, Homo sapiens
  CDR3 for beta chain variable domain of TCR clone 274694 (TRBV12-4, TRBJ1-5)
CASSRPVGGSNQPQHF

SEQ ID NO: 549389 - protein, 12 aa, Homo sapiens
  CDR3 for alpha chain variable domain of TCR clone 274695 (TRAV27, TRAJ28)
CAGWGWELPTHF

SEQ ID NO: 549390 - protein, 15 aa, Homo sapiens
  CDR3 for beta chain variable domain of TCR clone 274695 (TRBV28, TRBJ2-1)
CASSIIAGGRSEQFF

SEQ ID NO: 549391 - protein, 10 aa, Homo sapiens
  CDR3 for alpha chain variable domain of TCR clone 274696 (TRAV1-2, TRAJ20)
CACNDYKLSF

SEQ ID NO: 549392 - protein, 16 aa, Homo sapiens
  CDR3 for beta chain variable domain of TCR clone 274696 (TRBV20-1, TRBJ2-1)
CSARDRKQGMNNEQFC

SEQ ID NO: 549393 - protein, 15 aa, Homo sapiens
  CDR3 for alpha chain variable domain of TCR clone 274697 (TRAV3, TRAJ22)
CAVKDRGGSARQLTF

SEQ ID NO: 549394 - protein, 13 aa, Homo sapiens
  CDR3 for beta chain variable domain of TCR clone 274697 (TRBV12-4, TRBJ1-2)
CASSLRQGKGYIF

SEQ ID NO: 549395 - protein, 10 aa, Homo sapiens
  CDR3 for alpha chain variable domain of TCR clone 274698 (TRAV30, TRAJ48)
CGIGNEKLTF

SEQ ID NO: 549396 - protein, 14 aa, Homo sapiens
  CDR3 for beta chain variable domain of TCR clone 274698 (TRBV5-1, TRBJ2-7)
CASSRGESLYEQYF

SEQ ID NO: 549397 - protein, 12 aa, Homo sapiens
  CDR3 for alpha chain variable domain of TCR clone 274699 (TRAV3, TRAJ43)
CAVRDPNNDMRF

SEQ ID NO: 549398 - protein, 16 aa, Homo sapiens
  CDR3 for beta chain variable domain of TCR clone 274699 (TRBV2, TRBJ2-1)
CASSVGGSLSYNEQFF

SEQ ID NO: 549399 - protein, 18 aa, Homo sapiens
  CDR3 for alpha chain variable domain of TCR clone 274700 (TRAV13-1, TRAJ52)
CAAKNPNAGVTSCGKLTF

SEQ ID NO: 549400 - protein, 18 aa, Homo sapiens
  CDR3 for beta chain variable domain of TCR clone 274700 (TRBV12-4, TRBJ2-4)
CASSRTGAVDVARNIQYF

SEQ ID NO: 549401 - protein, 14 aa, Homo sapiens
  CDR3 for alpha chain variable domain of TCR clone 274701 (TRAV14/DV4, TRAJ54)
CAMREAPGAQKLVL

SEQ ID NO: 549402 - protein, 15 aa, Homo sapiens
  CDR3 for beta chain variable domain of TCR clone 274701 (TRBV5-1, TRBJ2-7)
CASSLNGGPAREQYF

SEQ ID NO: 549403 - protein, 14 aa, Homo sapiens
  CDR3 for alpha chain variable domain of TCR clone 274702 (TRAV25, TRAJ50)
CAGPKKTSYDKVIF

SEQ ID NO: 549404 - protein, 12 aa, Homo sapiens
  CDR3 for beta chain variable domain of TCR clone 274702 (TRBV11-2, TRBJ2-2)
CASSLGGGELFF

SEQ ID NO: 549405 - protein, 16 aa, Homo sapiens
  CDR3 for alpha chain variable domain of TCR clone 274703 (TRAV30, TRAJ24)
CGTEIVDADSWGKLQF

SEQ ID NO: 549406 - protein, 14 aa, Homo sapiens
  CDR3 for beta chain variable domain of TCR clone 274703 (TRBV7-9, TRBJ2-4)
CASSLAMGGNIQYF

SEQ ID NO: 549407 - protein, 15 aa, Homo sapiens
  CDR3 for alpha chain variable domain of TCR clone 274704 (TRAV38-1, TRAJ57)
RAFMYSQGGSEKLVF

SEQ ID NO: 549408 - protein, 16 aa, Homo sapiens
  CDR3 for beta chain variable domain of TCR clone 274704 (TRBV10-3, TRBJ2-1)
CAIRGGGRGDYNEQFF

SEQ ID NO: 549409 - protein, 16 aa, Homo sapiens
  CDR3 for alpha chain variable domain of TCR clone 274705 (TRAV21, TRAJ37)
CAFRTAGSSDTGKLIF

SEQ ID NO: 549410 - protein, 13 aa, Homo sapiens
  CDR3 for beta chain variable domain of TCR clone 274705 (TRBV7-9, TRBJ2-5)
CASLPSVRETQYF

SEQ ID NO: 549411 - protein, 11 aa, Homo sapiens
  CDR3 for alpha chain variable domain of TCR clone 274706 (TRAV12-2, TRAJ33)
CAAGSNYQLIW

SEQ ID NO: 549412 - protein, 14 aa, Homo sapiens
  CDR3 for beta chain variable domain of TCR clone 274706 (TRBV12-5, TRBJ2-5)
CASGSRTHQETQYF

SEQ ID NO: 549413 - protein, 14 aa, Homo sapiens
  CDR3 for alpha chain variable domain of TCR clone 274707 (TRAV16, TRAJ33)
CALSAMDSNYQLIW

SEQ ID NO: 549414 - protein, 16 aa, Homo sapiens
  CDR3 for beta chain variable domain of TCR clone 274707 (TRBV25-1, TRBJ2-7)
FASSELTGGGIYEQYF

SEQ ID NO: 549415 - protein, 15 aa, Homo sapiens
  CDR3 for alpha chain variable domain of TCR clone 274708 (TRAV12-1, TRAJ45)
CVVLSGGGSADGLTF

SEQ ID NO: 549416 - protein, 14 aa, Homo sapiens
  CDR3 for beta chain variable domain of TCR clone 274708 (TRBV11-2, TRBJ2-5)
CASSRTGGIETQYF

SEQ ID NO: 549417 - protein, 15 aa, Homo sapiens
  CDR3 for alpha chain variable domain of TCR clone 274709 (TRAV3, TRAJ5)
CAVRDLYTGRRALTF

SEQ ID NO: 549418 - protein, 13 aa, Homo sapiens
  CDR3 for beta chain variable domain of TCR clone 274709 (TRBV12-4, TRBJ2-7)
CASSLTETYEQYF

SEQ ID NO: 549419 - protein, 14 aa, Homo sapiens
  CDR3 for alpha chain variable domain of TCR clone 274710 (TRAV1-2, TRAJ8)
CAVREDTGFQKLLF

SEQ ID NO: 549420 - protein, 13 aa, Homo sapiens
  CDR3 for beta chain variable domain of TCR clone 274710 (TRBV12-4, TRBJ1-5)
CASSPDRAQPQHF

SEQ ID NO: 549421 - protein, 16 aa, Homo sapiens
  CDR3 for alpha chain variable domain of TCR clone 274711 (TRAV30, TRAJ24)
CGTEIVDADSWGKVQF

SEQ ID NO: 549422 - protein, 16 aa, Homo sapiens
  CDR3 for beta chain variable domain of TCR clone 274711 (TRBV7-7, TRBJ2-3)
CASSPGTSGSTDTQYF

SEQ ID NO: 549423 - protein, 15 aa, Homo sapiens
  CDR3 for alpha chain variable domain of TCR clone 274712 (TRAV1-2, TRAJ15)
CAVDVMGSAGTALIF

SEQ ID NO: 549424 - protein, 13 aa, Homo sapiens
  CDR3 for beta chain variable domain of TCR clone 274712 (TRBV12-5, TRBJ2-3)
CASGDRQSDTQYF

SEQ ID NO: 549425 - protein, 15 aa, Homo sapiens
  CDR3 for alpha chain variable domain of TCR clone 274713 (TRAV13-2, TRAJ32)
CAENTHGGATNKLLF

SEQ ID NO: 549426 - protein, 17 aa, Homo sapiens
  CDR3 for beta chain variable domain of TCR clone 274713 (TRBV11-2, TRBJ2-1)
CASSLYPPGVEYNEQFF

SEQ ID NO: 549427 - protein, 13 aa, Homo sapiens
  CDR3 for alpha chain variable domain of TCR clone 274714 (TRAV3, TRAJ40)
CCERHDRNLKYIF

SEQ ID NO: 549428 - protein, 16 aa, Homo sapiens
  CDR3 for beta chain variable domain of TCR clone 274714 (TRBV18, TRBJ2-7)
CASSPGRAGGAYEQYF

SEQ ID NO: 549429 - protein, 14 aa, Homo sapiens
  CDR3 for alpha chain variable domain of TCR clone 274715 (TRAV38-1, TRAJ54)
CAFMSPSGAQKLVF

SEQ ID NO: 549430 - protein, 16 aa, Homo sapiens
  CDR3 for beta chain variable domain of TCR clone 274715 (TRBV28, TRBJ2-1)
CVSSLGGSGSYNEQFF

SEQ ID NO: 549431 - protein, 18 aa, Homo sapiens
  CDR3 for alpha chain variable domain of TCR clone 274716 (TRAV13-1, TRAJ52)
CAAKNPNAGGTSYGKQTF

SEQ ID NO: 549432 - protein, 15 aa, Homo sapiens
  CDR3 for beta chain variable domain of TCR clone 274716 (TRBV6-1, TRBJ2-3)
CASSERGGITDTQYF

SEQ ID NO: 549433 - protein, 10 aa, Homo sapiens
  CDR3 for alpha chain variable domain of TCR clone 274717 (TRAV1-2, TRAJ31)
CAFFDARLMF

SEQ ID NO: 549434 - protein, 13 aa, Homo sapiens
  CDR3 for beta chain variable domain of TCR clone 274717 (TRBV7-9, TRBJ2-7)
CASSFAGAYEQYF

SEQ ID NO: 549435 - protein, 14 aa, Homo sapiens
  CDR3 for alpha chain variable domain of TCR clone 274718 (TRAV1-1, TRAJ27)
CAVIYNTNAGKSTF

SEQ ID NO: 549436 - protein, 18 aa, Homo sapiens
  CDR3 for beta chain variable domain of TCR clone 274718 (TRBV7-3, TRBJ2-1)
CASSLTLASGRAMVSSYS

SEQ ID NO: 549437 - protein, 12 aa, Homo sapiens
  CDR3 for alpha chain variable domain of TCR clone 274719 (TRAV1-1, TRAJ8)
CAVRPGFQKLVF

SEQ ID NO: 549438 - protein, 13 aa, Homo sapiens
  CDR3 for beta chain variable domain of TCR clone 274719 (TRBV7-9, TRBJ1-2)
CASSLKQNYGYTF

SEQ ID NO: 549439 - protein, 18 aa, Homo sapiens
  CDR3 for alpha chain variable domain of TCR clone 274720 (TRAV21, TRAJ52)
CAVRPSPAGGTSYGKLTF

SEQ ID NO: 549440 - protein, 14 aa, Homo sapiens
  CDR3 for beta chain variable domain of TCR clone 274720 (TRBV4-1, TRBJ2-2)
CASSQAVNTGELFF

SEQ ID NO: 549441 - protein, 12 aa, Homo sapiens
  CDR3 for alpha chain variable domain of TCR clone 274721 (TRAV29/DV5, TRAJ41)
CAASDSGYALNF

SEQ ID NO: 549442 - protein, 14 aa, Homo sapiens
  CDR3 for beta chain variable domain of TCR clone 274721 (TRBV2, TRBJ1-5)
CASHAGEGDHPQHF

SEQ ID NO: 549443 - protein, 14 aa, Homo sapiens
  CDR3 for alpha chain variable domain of TCR clone 274722 (TRAV12-3, TRAJ10)
SHLPLTGGGNKLTF

SEQ ID NO: 549444 - protein, 16 aa, Homo sapiens
  CDR3 for beta chain variable domain of TCR clone 274722 (TRBV7-2, TRBJ1-4)
CASSPVGRFDREKLFF

SEQ ID NO: 549445 - protein, 17 aa, Homo sapiens
  CDR3 for alpha chain variable domain of TCR clone 274723 (TRAV14/DV4, TRAJ28)
CAMREGYSGAGSYQLTF

SEQ ID NO: 549446 - protein, 18 aa, Homo sapiens
  CDR3 for beta chain variable domain of TCR clone 274723 (TRBV7-9, TRBJ2-7)
CASSLTTSGSRTWYEQYF

SEQ ID NO: 549447 - protein, 14 aa, Homo sapiens
  CDR3 for alpha chain variable domain of TCR clone 274724 (TRAV29/DV5, TRAJ22)
CAASATGSARQLTF

SEQ ID NO: 549448 - protein, 13 aa, Homo sapiens
  CDR3 for beta chain variable domain of TCR clone 274724 (TRBV20-1, TRBJ2-5)
CSARDNYMETQYF

SEQ ID NO: 549449 - protein, 12 aa, Homo sapiens
  CDR3 for alpha chain variable domain of TCR clone 274725 (TRAV24, TRAJ37)
CASSSNTGKLIF

SEQ ID NO: 549450 - protein, 16 aa, Homo sapiens
  CDR3 for beta chain variable domain of TCR clone 274725 (TRBV19, TRBJ1-1)
FASRFGGPVTGTEAFF

SEQ ID NO: 549451 - protein, 16 aa, Homo sapiens
  CDR3 for alpha chain variable domain of TCR clone 274726 (TRAV30, TRAJ24)
CGTEIVDADSWGKFQF

SEQ ID NO: 549452 - protein, 14 aa, Homo sapiens
  CDR3 for beta chain variable domain of TCR clone 274726 (TRBV7-6, TRBJ1-6)
CASSQAGGGSPLHF

SEQ ID NO: 549453 - protein, 16 aa, Homo sapiens
  CDR3 for alpha chain variable domain of TCR clone 274727 (TRAV17, TRAJ4)
CATAAHSSGGYNKLIF

SEQ ID NO: 549454 - protein, 19 aa, Homo sapiens
  CDR3 for beta chain variable domain of TCR clone 274727 (TRBV11-3, TRBJ2-2)
CASSTRPGAKTTNTGELFF

SEQ ID NO: 549455 - protein, 13 aa, Homo sapiens
  CDR3 for alpha chain variable domain of TCR clone 274728 (TRAV2, TRAJ20)
CAVEDPSEYKLSF

SEQ ID NO: 549456 - protein, 14 aa, Homo sapiens
  CDR3 for beta chain variable domain of TCR clone 274728 (TRBV7-2, TRBJ2-7)
CASSFKGQDHEQYF

SEQ ID NO: 549457 - protein, 12 aa, Homo sapiens
  CDR3 for alpha chain variable domain of TCR clone 274729 (TRAV12-3, TRAJ40)
CAMSSGTYKYIF

SEQ ID NO: 549458 - protein, 11 aa, Homo sapiens
  CDR3 for beta chain variable domain of TCR clone 274729 (TRBV7-8, TRBJ2-7)
CASSLSLEQYF

SEQ ID NO: 549459 - protein, 14 aa, Homo sapiens
  CDR3 for alpha chain variable domain of TCR clone 274730 (TRAV12-2, TRAJ48)
CAVNAFFGNENLTF

SEQ ID NO: 549460 - protein, 13 aa, Homo sapiens
  CDR3 for beta chain variable domain of TCR clone 274730 (TRBV28, TRBJ2-7)
CAGAQQGLDEQYF

SEQ ID NO: 549461 - protein, 15 aa, Homo sapiens
  CDR3 for alpha chain variable domain of TCR clone 274731 (TRAV38-1, TRAJ37)
CAFIHGSGNIGKLIF

SEQ ID NO: 549462 - protein, 12 aa, Homo sapiens
  CDR3 for beta chain variable domain of TCR clone 274731 (TRBV7-9, TRBJ2-7)
CASSFGSYEQYF

SEQ ID NO: 549463 - protein, 19 aa, Homo sapiens
  CDR3 for alpha chain variable domain of TCR clone 274732 (TRAV2, TRAJ20)
ILQAREADAAVYRDCKLSF

SEQ ID NO: 549464 - protein, 15 aa, Homo sapiens
  CDR3 for beta chain variable domain of TCR clone 274732 (TRBV7-2, TRBJ2-1)
CASSSGLAGGNEQFF

SEQ ID NO: 549465 - protein, 13 aa, Homo sapiens
  CDR3 for alpha chain variable domain of TCR clone 274733 (TRAV3, TRAJ20)
CAVRSLNDFKLSF

SEQ ID NO: 549466 - protein, 13 aa, Homo sapiens
  CDR3 for beta chain variable domain of TCR clone 274733 (TRBV6-1, TRBJ2-1)
CAGMDPTNNEQFF

SEQ ID NO: 549467 - protein, 12 aa, Homo sapiens
  CDR3 for alpha chain variable domain of TCR clone 274734 (TRAV20, TRAJ49)
CAVNKDGNQFYF

SEQ ID NO: 549468 - protein, 12 aa, Homo sapiens
  CDR3 for beta chain variable domain of TCR clone 274734 (TRBV11-2, TRBJ2-1)
CASSPGNNEQFL

SEQ ID NO: 549469 - protein, 12 aa, Homo sapiens
  CDR3 for alpha chain variable domain of TCR clone 274735 (TRAV16, TRAJ49)
CALNEGGNQFYF

SEQ ID NO: 549470 - protein, 14 aa, Homo sapiens
  CDR3 for beta chain variable domain of TCR clone 274735 (TRBV7-9, TRBJ2-1)
CASRPTGLRNEQCV

SEQ ID NO: 549471 - protein, 11 aa, Homo sapiens
  CDR3 for alpha chain variable domain of TCR clone 274736 (TRAV4, TRAJ31)
RLVGDNARLMF

SEQ ID NO: 549472 - protein, 14 aa, Homo sapiens
  CDR3 for beta chain variable domain of TCR clone 274736 (TRBV4-1, TRBJ2-2)
CASSQAVNTGELFF

SEQ ID NO: 549473 - protein, 12 aa, Homo sapiens
  CDR3 for alpha chain variable domain of TCR clone 274737 (TRAV13-2, TRAJ23)
CSERHRGGKLIF

SEQ ID NO: 549474 - protein, 13 aa, Homo sapiens
  CDR3 for beta chain variable domain of TCR clone 274737 (TRBV15, TRBJ1-6)
CATSGGLNSPLHF

SEQ ID NO: 549475 - protein, 12 aa, Homo sapiens
  CDR3 for alpha chain variable domain of TCR clone 274738 (TRAV12-1, TRAJ34)
CVVAGATDKLIF

SEQ ID NO: 549476 - protein, 12 aa, Homo sapiens
  CDR3 for beta chain variable domain of TCR clone 274738 (TRBV7-9, TRBJ1-1)
CASSLVRGEASF

SEQ ID NO: 549477 - protein, 14 aa, Homo sapiens
  CDR3 for alpha chain variable domain of TCR clone 274739 (TRAV8-4, TRAJ9)
CAVILNTGGFKTIF

SEQ ID NO: 549478 - protein, 11 aa, Homo sapiens
  CDR3 for beta chain variable domain of TCR clone 274739 (TRBV7-9, TRBJ2-6)
CASPRANDLTF

SEQ ID NO: 549479 - protein, 14 aa, Homo sapiens
  CDR3 for alpha chain variable domain of TCR clone 274740 (TRAV26-1, TRAJ39)
CIFRGSRAGNMLTF

SEQ ID NO: 549480 - protein, 15 aa, Homo sapiens
  CDR3 for beta chain variable domain of TCR clone 274740 (TRBV7-9, TRBJ1-5)
CASSQGYQPNQPQHF

SEQ ID NO: 549481 - protein, 15 aa, Homo sapiens
  CDR3 for alpha chain variable domain of TCR clone 274741 (TRAV3, TRAJ29)
CAVRDGNSGNTPLVF

SEQ ID NO: 549482 - protein, 16 aa, Homo sapiens
  CDR3 for beta chain variable domain of TCR clone 274741 (TRBV7-3, TRBJ2-2)
CASSLKRGTLSGELFF

SEQ ID NO: 549483 - protein, 15 aa, Homo sapiens
  CDR3 for alpha chain variable domain of TCR clone 274742 (TRAV8-1, TRAJ37)
CAVKKGSGNTGKLIF

SEQ ID NO: 549484 - protein, 17 aa, Homo sapiens
  CDR3 for beta chain variable domain of TCR clone 274742 (TRBV13, TRBJ2-3)
CASSLSRVAGGRNTQYF

SEQ ID NO: 549485 - protein, 12 aa, Homo sapiens
  CDR3 for alpha chain variable domain of TCR clone 274743 (TRAV12-3, TRAJ17)
CAMTVTGNKLTF

SEQ ID NO: 549486 - protein, 15 aa, Homo sapiens
  CDR3 for beta chain variable domain of TCR clone 274743 (TRBV20-1, TRBJ2-7)
CSAGDRVSGMDEQYF

SEQ ID NO: 549487 - protein, 12 aa, Homo sapiens
  CDR3 for alpha chain variable domain of TCR clone 274744 (TRAV12-3, TRAJ17)
CAMTLTGNKLTF

SEQ ID NO: 549488 - protein, 16 aa, Homo sapiens
  CDR3 for beta chain variable domain of TCR clone 274744 (TRBV7-3, TRBJ2-3)
CASSLSGYRPEDTQYF

SEQ ID NO: 549489 - protein, 17 aa, Homo sapiens
  CDR3 for alpha chain variable domain of TCR clone 274745 (TRAV26-1, TRAJ53)
CIVRVDDSGGSNYKLTF

SEQ ID NO: 549490 - protein, 15 aa, Homo sapiens
  CDR3 for beta chain variable domain of TCR clone 274745 (TRBV20-1, TRBJ2-7)
CSARVPAAYFFEQYF

SEQ ID NO: 549491 - protein, 14 aa, Homo sapiens
  CDR3 for alpha chain variable domain of TCR clone 274746 (TRAV2, TRAJ9)
CAVEDRSGGFKTIF

SEQ ID NO: 549492 - protein, 13 aa, Homo sapiens
  CDR3 for beta chain variable domain of TCR clone 274746 (TRBV19, TRBJ1-2)
CASSVPGQDGHTF

SEQ ID NO: 549493 - protein, 14 aa, Homo sapiens
  CDR3 for alpha chain variable domain of TCR clone 274747 (TRAV17, TRAJ57)
CATDPQGGSEKLVF

SEQ ID NO: 549494 - protein, 13 aa, Homo sapiens
  CDR3 for beta chain variable domain of TCR clone 274747 (TRBV10-3, TRBJ2-7)
CASKLAVYYEQYF

SEQ ID NO: 549495 - protein, 16 aa, Homo sapiens
  CDR3 for alpha chain variable domain of TCR clone 274748 (TRAV4, TRAJ22)
CLVGDLYSGSARQLTF

SEQ ID NO: 549496 - protein, 14 aa, Homo sapiens
  CDR3 for beta chain variable domain of TCR clone 274748 (TRBV7-9, TRBJ2-2)
CANSLGHRTGELFF

SEQ ID NO: 549497 - protein, 13 aa, Homo sapiens
  CDR3 for alpha chain variable domain of TCR clone 274749 (TRAV2, TRAJ21)
CAVEDLNFNKFYF

SEQ ID NO: 549498 - protein, 15 aa, Homo sapiens
  CDR3 for beta chain variable domain of TCR clone 274749 (TRBV28, TRBJ2-5)
GASSPGQGSIETQYF

SEQ ID NO: 549499 - protein, 11 aa, Homo sapiens
  CDR3 for alpha chain variable domain of TCR clone 274750 (TRAV17, TRAJ31)
CATSNNARIMF

SEQ ID NO: 549500 - protein, 16 aa, Homo sapiens
  CDR3 for beta chain variable domain of TCR clone 274750 (TRBV7-8, TRBJ2-4)
CASSAERTLAKNIQYF

SEQ ID NO: 549501 - protein, 14 aa, Homo sapiens
  CDR3 for alpha chain variable domain of TCR clone 274751 (TRAV12-2, TRAJ13)
CAVKKTGCYQKVTS

SEQ ID NO: 549502 - protein, 16 aa, Homo sapiens
  CDR3 for beta chain variable domain of TCR clone 274751 (TRBV4-1, TRBJ1-4)
CASSQDLRRGGEKLFF

SEQ ID NO: 549503 - protein, 16 aa, Homo sapiens
  CDR3 for alpha chain variable domain of TCR clone 274752 (TRAV26-1, TRAJ23)
CIVRVHPYNQGGKLTF

SEQ ID NO: 549504 - protein, 15 aa, Homo sapiens
  CDR3 for beta chain variable domain of TCR clone 274752 (TRBV5-7, TRBJ2-7)
CASSPYLEGSYEQYF

SEQ ID NO: 549505 - protein, 13 aa, Homo sapiens
  CDR3 for alpha chain variable domain of TCR clone 274753 (TRAV12-3, TRAJ33)
CAMSVNSNYQLIW

SEQ ID NO: 549506 - protein, 23 aa, Homo sapiens
  CDR3 for beta chain variable domain of TCR clone 274753 (TRBV4-2, TRBJ2-3)
CASSQDPPRASSISGGRGDTQYF

SEQ ID NO: 549507 - protein, 13 aa, Homo sapiens
  CDR3 for alpha chain variable domain of TCR clone 274754 (TRAV36/DV7, TRAJ49)
CAVEADTGNQFYF

SEQ ID NO: 549508 - protein, 13 aa, Homo sapiens
  CDR3 for beta chain variable domain of TCR clone 274754 (TRBV10-3, TRBJ2-7)
CASKLAVNYEQYF

SEQ ID NO: 549509 - protein, 14 aa, Homo sapiens
  CDR3 for alpha chain variable domain of TCR clone 274755 (TRAV26-1, TRAJ38)
CIADNAGNNRKLIW

SEQ ID NO: 549510 - protein, 16 aa, Homo sapiens
  CDR3 for beta chain variable domain of TCR clone 274755 (TRBV27, TRBJ2-2)
CASSFRGLVRTGELFF

SEQ ID NO: 549511 - protein, 17 aa, Homo sapiens
  CDR3 for alpha chain variable domain of TCR clone 274756 (TRAV8-3, TRAJ42)
CAVGKGNYGGSQGNLIF

SEQ ID NO: 549512 - protein, 12 aa, Homo sapiens
  CDR3 for beta chain variable domain of TCR clone 274756 (TRBV7-2, TRBJ1-6)
CASSLSSSPLHF

SEQ ID NO: 549513 - protein, 16 aa, Homo sapiens
  CDR3 for alpha chain variable domain of TCR clone 274757 (TRAV3, TRAJ10)
CAVRDMRAGGGNKLTF

SEQ ID NO: 549514 - protein, 18 aa, Homo sapiens
  CDR3 for beta chain variable domain of TCR clone 274757 (TRBV11-2, TRBJ2-6)
CASSLNPFLGTGANVLTF

SEQ ID NO: 549515 - protein, 12 aa, Homo sapiens
  CDR3 for alpha chain variable domain of TCR clone 274758 (TRAV2, TRAJ33)
CAVPDSNYQLIW

SEQ ID NO: 549516 - protein, 15 aa, Homo sapiens
  CDR3 for beta chain variable domain of TCR clone 274758 (TRBV11-2, TRBJ2-1)
CASSLGTSGLNEQFF

SEQ ID NO: 549517 - protein, 15 aa, Homo sapiens
  CDR3 for alpha chain variable domain of TCR clone 274759 (TRAV35, TRAJ20)
CAGQLVGYKDYKLSF

SEQ ID NO: 549518 - protein, 13 aa, Homo sapiens
  CDR3 for beta chain variable domain of TCR clone 274759 (TRBV19, TRBJ2-7)
CASSKTGTHEQYF

SEQ ID NO: 549519 - protein, 12 aa, Homo sapiens
  CDR3 for alpha chain variable domain of TCR clone 274760 (TRAV24, TRAJ37)
CASSSNTGKLIF

SEQ ID NO: 549520 - protein, 11 aa, Homo sapiens
  CDR3 for beta chain variable domain of TCR clone 274760 (TRBV29-1, TRBJ2-5)
CSEDQTGTQYF

SEQ ID NO: 549521 - protein, 19 aa, Homo sapiens
  CDR3 for alpha chain variable domain of TCR clone 274761 (TRAV2, TRAJ20)
ILQVREADAAVYRDCKLSF

SEQ ID NO: 549522 - protein, 13 aa, Homo sapiens
  CDR3 for beta chain variable domain of TCR clone 274761 (TRBV15, TRBJ1-6)
CATSGGINSPLHF

SEQ ID NO: 549523 - protein, 14 aa, Homo sapiens
  CDR3 for alpha chain variable domain of TCR clone 274762 (TRAV9-2, TRAJ39)
CALDIYNAGNMLTF

SEQ ID NO: 549524 - protein, 13 aa, Homo sapiens
  CDR3 for beta chain variable domain of TCR clone 274762 (TRBV20-1, TRBJ1-1)
CSAGTVGNTEAFF

SEQ ID NO: 549525 - protein, 14 aa, Homo sapiens
  CDR3 for alpha chain variable domain of TCR clone 274763 (TRAV8-6, TRAJ8)
CAVNEKTGFQKLVF

SEQ ID NO: 549526 - protein, 15 aa, Homo sapiens
  CDR3 for beta chain variable domain of TCR clone 274763 (TRBV27, TRBJ2-3)
CASSSLAGVIDTQYF

SEQ ID NO: 549527 - protein, 14 aa, Homo sapiens
  CDR3 for alpha chain variable domain of TCR clone 274764 (TRAV26-1, TRAJ48)
CNHSTISGNEKLTF

SEQ ID NO: 549528 - protein, 13 aa, Homo sapiens
  CDR3 for beta chain variable domain of TCR clone 274764 (TRBV19, TRBJ1-5)
CASSMRGYQPQHF

SEQ ID NO: 549529 - protein, 16 aa, Homo sapiens
  CDR3 for alpha chain variable domain of TCR clone 274765 (TRAV8-2, TRAJ50)
CVVSDHMKTSYDTVIF

SEQ ID NO: 549530 - protein, 15 aa, Homo sapiens
  CDR3 for beta chain variable domain of TCR clone 274765 (TRBV7-2, TRBJ2-1)
CASSFQADEYNEQFF

SEQ ID NO: 549531 - protein, 14 aa, Homo sapiens
  CDR3 for alpha chain variable domain of TCR clone 274766 (TRAV8-3, TRAJ15)
CAVGRHQAGTALIF

SEQ ID NO: 549532 - protein, 14 aa, Homo sapiens
  CDR3 for beta chain variable domain of TCR clone 274766 (TRBV18, TRBJ2-7)
CASSPRGGAYEQYF

SEQ ID NO: 549533 - protein, 12 aa, Homo sapiens
  CDR3 for alpha chain variable domain of TCR clone 274767 (TRAV13-1, TRAJ11)
CAGPSGYSTLTF

SEQ ID NO: 549534 - protein, 12 aa, Homo sapiens
  CDR3 for beta chain variable domain of TCR clone 274767 (TRBV5-1, TRBJ1-2)
CASSQDTYGYTF

SEQ ID NO: 549535 - protein, 12 aa, Homo sapiens
  CDR3 for alpha chain variable domain of TCR clone 274768 (TRAV30, TRAJ39)
CGRGNAGNMLTF

SEQ ID NO: 549536 - protein, 13 aa, Homo sapiens
  CDR3 for beta chain variable domain of TCR clone 274768 (TRBV3-1, TRBJ1-1)
CASSPGVITEAFF

SEQ ID NO: 549537 - protein, 14 aa, Homo sapiens
  CDR3 for alpha chain variable domain of TCR clone 274769 (TRAV10, TRAJ34)
CVVSRGGDTDKLIF

SEQ ID NO: 549538 - protein, 17 aa, Homo sapiens
  CDR3 for beta chain variable domain of TCR clone 274769 (TRBV6-3, TRBJ2-3)
CASRRPLGGGSTDTQFF

SEQ ID NO: 549539 - protein, 15 aa, Homo sapiens
  CDR3 for alpha chain variable domain of TCR clone 274770 (TRAV8-4, TRAJ9)
CAVSDPRAGGFTTIF

SEQ ID NO: 549540 - protein, 15 aa, Homo sapiens
  CDR3 for beta chain variable domain of TCR clone 274770 (TRBV2, TRBJ2-3)
CASSDFEKATDTQYF

SEQ ID NO: 549541 - protein, 12 aa, Homo sapiens
  CDR3 for alpha chain variable domain of TCR clone 274771 (TRAV25, TRAJ11)
CAGASGYSTLTF

SEQ ID NO: 549542 - protein, 13 aa, Homo sapiens
  CDR3 for beta chain variable domain of TCR clone 274771 (TRBV4-2, TRBJ1-1)
CASSQAGNTEAFF

SEQ ID NO: 549543 - protein, 15 aa, Homo sapiens
  CDR3 for alpha chain variable domain of TCR clone 274772 (TRAV2, TRAJ42)
CAVGGYGGSQGNLIF

SEQ ID NO: 549544 - protein, 14 aa, Homo sapiens
  CDR3 for beta chain variable domain of TCR clone 274772 (TRBV11-3, TRBJ2-7)
CASSPDRNTYEQYF

SEQ ID NO: 549545 - protein, 12 aa, Homo sapiens
  CDR3 for alpha chain variable domain of TCR clone 274773 (TRAV29/DV5, TRAJ49)
CAATDTGDQFYF

SEQ ID NO: 549546 - protein, 16 aa, Homo sapiens
  CDR3 for beta chain variable domain of TCR clone 274773 (TRBV12-5, TRBJ2-5)
CASGPRTSGNQETQYF

SEQ ID NO: 549547 - protein, 14 aa, Homo sapiens
  CDR3 for alpha chain variable domain of TCR clone 274774 (TRAV29/DV5, TRAJ44)
CAAFLVGPASKLTF

SEQ ID NO: 549548 - protein, 16 aa, Homo sapiens
  CDR3 for beta chain variable domain of TCR clone 274774 (TRBV19, TRBJ1-5)
CASSIQGGYSNQTQHF

SEQ ID NO: 549549 - protein, 14 aa, Homo sapiens
  CDR3 for alpha chain variable domain of TCR clone 274775 (TRAV13-2, TRAJ10)
CAERGTGGGNKLTF

SEQ ID NO: 549550 - protein, 11 aa, Homo sapiens
  CDR3 for beta chain variable domain of TCR clone 274775 (TRBV13, TRBJ2-3)
CASGNADTQYF

SEQ ID NO: 549551 - protein, 15 aa, Homo sapiens
  CDR3 for alpha chain variable domain of TCR clone 274776 (TRAV12-3, TRAJ6)
CAMSATTGGSYIPTF

SEQ ID NO: 549552 - protein, 14 aa, Homo sapiens
  CDR3 for beta chain variable domain of TCR clone 274776 (TRBV19, TRBJ1-5)
CASRAPDSFLSQHF

SEQ ID NO: 549553 - protein, 14 aa, Homo sapiens
  CDR3 for alpha chain variable domain of TCR clone 274777 (TRAV12-2, TRAJ40)
CAVKIPSGTSKYIF

SEQ ID NO: 549554 - protein, 17 aa, Homo sapiens
  CDR3 for beta chain variable domain of TCR clone 274777 (TRBV11-2, TRBJ2-1)
CASSLYPPGVEYNEQFF

SEQ ID NO: 549555 - protein, 20 aa, Homo sapiens
  CDR3 for alpha chain variable domain of TCR clone 274778 (TRAV8-3, TRAJ26)
CAGDNYGQNFVLVPEPDCPF

SEQ ID NO: 549556 - protein, 13 aa, Homo sapiens
  CDR3 for beta chain variable domain of TCR clone 274778 (TRBV20-1, TRBJ1-1)
CSAPLGGGTEAFF

SEQ ID NO: 549557 - protein, 11 aa, Homo sapiens
  CDR3 for alpha chain variable domain of TCR clone 274779 (TRAV1-1, TRAJ23)
CAVRQGGKLIF

SEQ ID NO: 549558 - protein, 13 aa, Homo sapiens
  CDR3 for beta chain variable domain of TCR clone 274779 (TRBV19, TRBJ2-1)
CATSRGVYNEQFF

SEQ ID NO: 549559 - protein, 13 aa, Homo sapiens
  CDR3 for alpha chain variable domain of TCR clone 274780 (TRAV8-4, TRAJ54)
CAVRIQGAQKLGF

SEQ ID NO: 549560 - protein, 15 aa, Homo sapiens
  CDR3 for beta chain variable domain of TCR clone 274780 (TRBV5-5, TRBJ2-7)
CASSLDAPLSYEQYF

SEQ ID NO: 549561 - protein, 14 aa, Homo sapiens
  CDR3 for alpha chain variable domain of TCR clone 274781 (TRAV12-1, TRAJ9)
CVVNIITGGFKTIF

SEQ ID NO: 549562 - protein, 17 aa, Homo sapiens
  CDR3 for beta chain variable domain of TCR clone 274781 (TRBV9, TRBJ2-1)
CASSVAPTGMARDEQFF

SEQ ID NO: 549563 - protein, 15 aa, Homo sapiens
  CDR3 for alpha chain variable domain of TCR clone 274782 (TRAV3, TRAJ22)
CAVRDRGGSARQLTF

SEQ ID NO: 549564 - protein, 14 aa, Homo sapiens
  CDR3 for beta chain variable domain of TCR clone 274782 (TRBV3-1, TRBJ2-5)
CASSQGPDQETQYF

SEQ ID NO: 549565 - protein, 14 aa, Homo sapiens
  CDR3 for alpha chain variable domain of TCR clone 274783 (TRAV23/DV6, TRAJ22)
CAASVSGSARQLTF

SEQ ID NO: 549566 - protein, 15 aa, Homo sapiens
  CDR3 for beta chain variable domain of TCR clone 274783 (TRBV7-2, TRBJ2-1)
CASSLVGSSYNEQFF

SEQ ID NO: 549567 - protein, 11 aa, Homo sapiens
  CDR3 for alpha chain variable domain of TCR clone 274784 (TRAV13-1, TRAJ6)
CATVGSYIPTF

SEQ ID NO: 549568 - protein, 12 aa, Homo sapiens
  CDR3 for beta chain variable domain of TCR clone 274784 (TRBV11-2, TRBJ2-1)
CASSPGNNEQFF

SEQ ID NO: 549569 - protein, 14 aa, Homo sapiens
  CDR3 for alpha chain variable domain of TCR clone 274785 (TRAV12-3, TRAJ12)
CAMSRMDSSYKLIF

SEQ ID NO: 549570 - protein, 17 aa, Homo sapiens
  CDR3 for beta chain variable domain of TCR clone 274785 (TRBV11-2, TRBJ2-1)
CASSLYPPGVEYNEQFF

SEQ ID NO: 549571 - protein, 12 aa, Homo sapiens
  CDR3 for alpha chain variable domain of TCR clone 274786 (TRAV6, TRAJ29)
CSHRSGSTPLVF

SEQ ID NO: 549572 - protein, 16 aa, Homo sapiens
  CDR3 for beta chain variable domain of TCR clone 274786 (TRBV11-2, TRBJ2-2)
CASSLRTGNLIGELFF

SEQ ID NO: 549573 - protein, 12 aa, Homo sapiens
  CDR3 for alpha chain variable domain of TCR clone 274787 (TRAV16, TRAJ22)
CALEVSARKLTF

SEQ ID NO: 549574 - protein, 14 aa, Homo sapiens
  CDR3 for beta chain variable domain of TCR clone 274787 (TRBV11-2, TRBJ2-3)
CASSSIASTDTQYF

SEQ ID NO: 549575 - protein, 14 aa, Homo sapiens
  CDR3 for alpha chain variable domain of TCR clone 274788 (TRAV12-2, TRAJ36)
CAVKISTGANNLFF

SEQ ID NO: 549576 - protein, 14 aa, Homo sapiens
  CDR3 for beta chain variable domain of TCR clone 274788 (TRBV25-1, TRBJ1-2)
CASSDTTGVVGYTC

SEQ ID NO: 549577 - protein, 23 aa, Homo sapiens
  CDR3 for alpha chain variable domain of TCR clone 274789 (TRAV3, TRAJ42)
CAVRRLEEAKEISSLEKAINSLL

SEQ ID NO: 549578 - protein, 14 aa, Homo sapiens
  CDR3 for beta chain variable domain of TCR clone 274789 (TRBV19, TRBJ2-5)
CASSSSGIQETQYF

SEQ ID NO: 549579 - protein, 14 aa, Homo sapiens
  CDR3 for alpha chain variable domain of TCR clone 274790 (TRAV12-2, TRAJ5)
CAVNWATGRRALTF

SEQ ID NO: 549580 - protein, 12 aa, Homo sapiens
  CDR3 for beta chain variable domain of TCR clone 274790 (TRBV19, TRBJ1-5)
CASSIAQQPQHF

SEQ ID NO: 549581 - protein, 14 aa, Homo sapiens
  CDR3 for alpha chain variable domain of TCR clone 274791 (TRAV17, TRAJ6)
CGTDASGGSYIPTF

SEQ ID NO: 549582 - protein, 19 aa, Homo sapiens
  CDR3 for beta chain variable domain of TCR clone 274791 (TRBV4-3, TRBJ2-7)
CASSQEFIGWQVTPYEQYF

SEQ ID NO: 549583 - protein, 15 aa, Homo sapiens
  CDR3 for alpha chain variable domain of TCR clone 274792 (TRAV21, TRAJ32)
CAVNSYGGATTKLIF

SEQ ID NO: 549584 - protein, 14 aa, Homo sapiens
  CDR3 for beta chain variable domain of TCR clone 274792 (TRBV7-2, TRBJ2-7)
CASSPKTSFYEQYF

SEQ ID NO: 549585 - protein, 13 aa, Homo sapiens
  CDR3 for alpha chain variable domain of TCR clone 274793 (TRAV12-3, TRAJ40)
CAMSDSGTYKYIF

SEQ ID NO: 549586 - protein, 13 aa, Homo sapiens
  CDR3 for beta chain variable domain of TCR clone 274793 (TRBV19, TRBJ1-2)
CASSQGQVYGYTF

SEQ ID NO: 549587 - protein, 15 aa, Homo sapiens
  CDR3 for alpha chain variable domain of TCR clone 274794 (TRAV8-3, TRAJ11)
CAVGLLNSGYSTLTF

SEQ ID NO: 549588 - protein, 14 aa, Homo sapiens
  CDR3 for beta chain variable domain of TCR clone 274794 (TRBV11-2, TRBJ2-5)
CASRPLAGRETQYF

SEQ ID NO: 549589 - protein, 13 aa, Homo sapiens
  CDR3 for alpha chain variable domain of TCR clone 274795 (TRAV2, TRAJ29)
CAAQNSVNTPLVF

SEQ ID NO: 549590 - protein, 14 aa, Homo sapiens
  CDR3 for beta chain variable domain of TCR clone 274795 (TRBV7-9, TRBJ2-4)
CASSLAMGGNIQYF

SEQ ID NO: 549591 - protein, 14 aa, Homo sapiens
  CDR3 for alpha chain variable domain of TCR clone 274796 (TRAV12-2, TRAJ40)
CAVKIPSGTYKYIF

SEQ ID NO: 549592 - protein, 16 aa, Homo sapiens
  CDR3 for beta chain variable domain of TCR clone 274796 (TRBV6-1, TRBJ1-2)
CASSGAWQGRSHGYTF

SEQ ID NO: 549593 - protein, 17 aa, Homo sapiens
  CDR3 for alpha chain variable domain of TCR clone 274797 (TRAV3, TRAJ6)
CAVRDGPRAGGSYIPTL

SEQ ID NO: 549594 - protein, 17 aa, Homo sapiens
  CDR3 for beta chain variable domain of TCR clone 274797 (TRBV7-7, TRBJ1-1)
CASIGDRPNLGVTEAFF

SEQ ID NO: 549595 - protein, 13 aa, Homo sapiens
  CDR3 for alpha chain variable domain of TCR clone 274798 (TRAV12-3, TRAJ40)
CALSARGTYKYNF

SEQ ID NO: 549596 - protein, 16 aa, Homo sapiens
  CDR3 for beta chain variable domain of TCR clone 274798 (TRBV20-1, TRBJ2-3)
CSGEAGLAGGQDTQYF

SEQ ID NO: 549597 - protein, 15 aa, Homo sapiens
  CDR3 for alpha chain variable domain of TCR clone 274799 (TRAV3, TRAJ3)
CAVRDRDSSASKIIF

SEQ ID NO: 549598 - protein, 14 aa, Homo sapiens
  CDR3 for beta chain variable domain of TCR clone 274799 (TRBV13, TRBJ2-5)
CASYRRLAEETQYF

SEQ ID NO: 549599 - protein, 13 aa, Homo sapiens
  CDR3 for alpha chain variable domain of TCR clone 274800 (TRAV39, TRAJ58)
CAGEETSGSRWTF

SEQ ID NO: 549600 - protein, 15 aa, Homo sapiens
  CDR3 for beta chain variable domain of TCR clone 274800 (TRBV4-1, TRBJ2-7)
CASSQNTGRLYEQYF

SEQ ID NO: 549601 - protein, 13 aa, Homo sapiens
  CDR3 for alpha chain variable domain of TCR clone 274801 (TRAV3, TRAJ21)
CAVREPDFNKFYF

SEQ ID NO: 549602 - protein, 17 aa, Homo sapiens
  CDR3 for beta chain variable domain of TCR clone 274801 (TRBV4-1, TRBJ1-5)
CASSQQPPTVANQPQHF

SEQ ID NO: 549603 - protein, 11 aa, Homo sapiens
  CDR3 for alpha chain variable domain of TCR clone 274802 (TRAV12-1, TRAJ26)
CVVAYGQNFVF

SEQ ID NO: 549604 - protein, 13 aa, Homo sapiens
  CDR3 for beta chain variable domain of TCR clone 274802 (TRBV5-4, TRBJ1-1)
CASSVDLGTEAFF

SEQ ID NO: 549605 - protein, 23 aa, Homo sapiens
  CDR3 for alpha chain variable domain of TCR clone 274803 (TRAV26-1, TRAJ38)
CIADNAGNNHIQNPDPAVYQLRD

SEQ ID NO: 549606 - protein, 15 aa, Homo sapiens
  CDR3 for beta chain variable domain of TCR clone 274803 (TRBV20-1, TRBJ1-1)
CSARVGGTPKLSLDK

SEQ ID NO: 549607 - protein, 19 aa, Homo sapiens
  CDR3 for alpha chain variable domain of TCR clone 274804 (TRAV16, )
CALSGDIQNPDPAVYQLRD

SEQ ID NO: 549608 - protein, 16 aa, Homo sapiens
  CDR3 for beta chain variable domain of TCR clone 274804 (TRBV12-5, TRBJ2-5)
CASGPRTSGNQETQSF

SEQ ID NO: 549609 - protein, 16 aa, Homo sapiens
  CDR3 for alpha chain variable domain of TCR clone 274805 (TRAV8-3, TRAJ22)
CAVDLLGAGSARQLSF

SEQ ID NO: 549610 - protein, 14 aa, Homo sapiens
  CDR3 for beta chain variable domain of TCR clone 274805 (TRBV11-2, TRBJ2-7)
CASSLELEGYEQYF

SEQ ID NO: 549611 - protein, 13 aa, Homo sapiens
  CDR3 for alpha chain variable domain of TCR clone 274806 (TRAV12-2, TRAJ20)
CAVNRFDDYTPSF

SEQ ID NO: 549612 - protein, 12 aa, Homo sapiens
  CDR3 for beta chain variable domain of TCR clone 274806 (TRBV19, TRBJ2-1)
CASSQISNEQFF

SEQ ID NO: 549613 - protein, 12 aa, Homo sapiens
  CDR3 for alpha chain variable domain of TCR clone 274807 (TRAV20, TRAJ37)
CALPSNTGKLIF

SEQ ID NO: 549614 - protein, 20 aa, Homo sapiens
  CDR3 for beta chain variable domain of TCR clone 274807 (TRBV19, TRBJ2-1)
CASSISRTVTSTRLNNEQFF

SEQ ID NO: 549615 - protein, 16 aa, Homo sapiens
  CDR3 for alpha chain variable domain of TCR clone 274808 (TRAV12-3, TRAJ53)
CAMSPGSGGSNYKLTF

SEQ ID NO: 549616 - protein, 15 aa, Homo sapiens
  CDR3 for beta chain variable domain of TCR clone 274808 (TRBV7-8, TRBJ2-1)
CASSLADSLYNEQFF

SEQ ID NO: 549617 - protein, 17 aa, Homo sapiens
  CDR3 for alpha chain variable domain of TCR clone 274809 (TRAV3, TRAJ12)
CAVRDGGRMDSSYKLIF

SEQ ID NO: 549618 - protein, 15 aa, Homo sapiens
  CDR3 for beta chain variable domain of TCR clone 274809 (TRBV20-1, TRBJ2-7)
CSARDRVPGMDEQYF

SEQ ID NO: 549619 - protein, 15 aa, Homo sapiens
  CDR3 for alpha chain variable domain of TCR clone 274810 (TRAV12-2, TRAJ5)
CAVTPSGTGRRALTF

SEQ ID NO: 549620 - protein, 17 aa, Homo sapiens
  CDR3 for beta chain variable domain of TCR clone 274810 (TRBV7-8, TRBJ2-6)
CASSAGTGGAGANVLTF

SEQ ID NO: 549621 - protein, 14 aa, Homo sapiens
  CDR3 for alpha chain variable domain of TCR clone 274811 (TRAV12-3, TRAJ10)
SHLPLTGGGNKLTF

SEQ ID NO: 549622 - protein, 15 aa, Homo sapiens
  CDR3 for beta chain variable domain of TCR clone 274811 (TRBV5-1, TRBJ2-5)
CASSFKGGDQETKYF

SEQ ID NO: 549623 - protein, 14 aa, Homo sapiens
  CDR3 for alpha chain variable domain of TCR clone 274812 (TRAV38-1, TRAJ27)
CAFIHNTNAGQSTF

SEQ ID NO: 549624 - protein, 12 aa, Homo sapiens
  CDR3 for beta chain variable domain of TCR clone 274812 (TRBV7-8, TRBJ2-7)
RASSLGDREQYF

SEQ ID NO: 549625 - protein, 15 aa, Homo sapiens
  CDR3 for alpha chain variable domain of TCR clone 274813 (TRAV8-3, TRAJ45)
CASSYSGVGADGLTF

SEQ ID NO: 549626 - protein, 13 aa, Homo sapiens
  CDR3 for beta chain variable domain of TCR clone 274813 (TRBV10-3, TRBJ2-7)
CASKLAVSYEQYF

SEQ ID NO: 549627 - protein, 18 aa, Homo sapiens
  CDR3 for alpha chain variable domain of TCR clone 274814 (TRAV21, TRAJ52)
CAVTPSPAGGTSYGKLTF

SEQ ID NO: 549628 - protein, 15 aa, Homo sapiens
  CDR3 for beta chain variable domain of TCR clone 274814 (TRBV6-3, TRBJ2-7)
CASSSPGTVFYEQYF

SEQ ID NO: 549629 - protein, 15 aa, Homo sapiens
  CDR3 for alpha chain variable domain of TCR clone 274815 (TRAV27, TRAJ50)
CAGVGGGTSYDKVRF

SEQ ID NO: 549630 - protein, 14 aa, Homo sapiens
  CDR3 for beta chain variable domain of TCR clone 274815 (TRBV7-2, TRBJ1-1)
CASSFYDLNTEAFF

SEQ ID NO: 549631 - protein, 18 aa, Homo sapiens
  CDR3 for alpha chain variable domain of TCR clone 274816 (TRAV12-3, TRAJ52)
CAMSVEGAGGTSYGKLTF

SEQ ID NO: 549632 - protein, 19 aa, Homo sapiens
  CDR3 for beta chain variable domain of TCR clone 274816 (TRBV25-1, TRBJ2-2)
CAILVYRVDRGRKTGELFF

SEQ ID NO: 549633 - protein, 14 aa, Homo sapiens
  CDR3 for alpha chain variable domain of TCR clone 274817 (TRAV1-2, TRAJ16)
CAVNRFSDGQTLLF

SEQ ID NO: 549634 - protein, 13 aa, Homo sapiens
  CDR3 for beta chain variable domain of TCR clone 274817 (TRBV19, TRBJ2-7)
CASRKAGGSEQYF

SEQ ID NO: 549635 - protein, 16 aa, Homo sapiens
  CDR3 for alpha chain variable domain of TCR clone 274818 (TRAV30, TRAJ24)
CVTEIVDADSWGKFQF

SEQ ID NO: 549636 - protein, 13 aa, Homo sapiens
  CDR3 for beta chain variable domain of TCR clone 274818 (TRBV20-1, TRBJ1-1)
CSARGGGNTEAFF

SEQ ID NO: 549637 - protein, 23 aa, Homo sapiens
  CDR3 for alpha chain variable domain of TCR clone 274819 (TRAV12-2, TRAJ43)
SLLIRDSQPSDSATYPCAFDMRF

SEQ ID NO: 549638 - protein, 15 aa, Homo sapiens
  CDR3 for beta chain variable domain of TCR clone 274819 (TRBV7-3, TRBJ2-2)
CASSETGQGTGELFV

SEQ ID NO: 549639 - protein, 12 aa, Homo sapiens
  CDR3 for alpha chain variable domain of TCR clone 274820 (TRAV13-2, TRAJ23)
CAERHRGGKLIF

SEQ ID NO: 549640 - protein, 17 aa, Homo sapiens
  CDR3 for beta chain variable domain of TCR clone 274820 (TRBV7-9, TRBJ1-6)
CAAAPRDVEIHPSTLGT

SEQ ID NO: 549641 - protein, 10 aa, Homo sapiens
  CDR3 for alpha chain variable domain of TCR clone 274821 (TRAV8-4, TRAJ43)
CAVSADDMRL

SEQ ID NO: 549642 - protein, 13 aa, Homo sapiens
  CDR3 for beta chain variable domain of TCR clone 274821 (TRBV4-2, TRBJ1-1)
CASSQAGNTEAFF

SEQ ID NO: 549643 - protein, 12 aa, Homo sapiens
  CDR3 for alpha chain variable domain of TCR clone 274822 (TRAV13-1, TRAJ49)
CAAYSTGNQFYF

SEQ ID NO: 549644 - protein, 15 aa, Homo sapiens
  CDR3 for beta chain variable domain of TCR clone 274822 (TRBV15, TRBJ1-5)
CATSRDPVSNQPQHF

SEQ ID NO: 549645 - protein, 14 aa, Homo sapiens
  CDR3 for alpha chain variable domain of TCR clone 274823 (TRAV27, TRAJ15)
CAGFDNQAGTALIF

SEQ ID NO: 549646 - protein, 11 aa, Homo sapiens
  CDR3 for beta chain variable domain of TCR clone 274823 (TRBV29-1, TRBJ1-1)
CSVVVGTRTFF

SEQ ID NO: 549647 - protein, 14 aa, Homo sapiens
  CDR3 for alpha chain variable domain of TCR clone 274824 (TRAV23/DV6, TRAJ40)
CAARKKSGTYKYIF

SEQ ID NO: 549648 - protein, 14 aa, Homo sapiens
  CDR3 for beta chain variable domain of TCR clone 274824 (TRBV10-3, TRBJ2-5)
CAISERDYQETQYF

SEQ ID NO: 549649 - protein, 15 aa, Homo sapiens
  CDR3 for alpha chain variable domain of TCR clone 274825 (TRAV3, TRAJ22)
CAVRDRGGSAKQLTF

SEQ ID NO: 549650 - protein, 15 aa, Homo sapiens
  CDR3 for beta chain variable domain of TCR clone 274825 (TRBV7-3, TRBJ2-2)
CASSETGQGTGELFF

SEQ ID NO: 549651 - protein, 14 aa, Homo sapiens
  CDR3 for alpha chain variable domain of TCR clone 274826 (TRAV20, TRAJ56)
CTVQFRGANSKLTF

SEQ ID NO: 549652 - protein, 14 aa, Homo sapiens
  CDR3 for beta chain variable domain of TCR clone 274826 (TRBV20-1, TRBJ2-7)
CSAKRGRSSYEQYF

SEQ ID NO: 549653 - protein, 13 aa, Homo sapiens
  CDR3 for alpha chain variable domain of TCR clone 274827 (TRAV1-2, TRAJ11)
CAVRSSGYSTLTF

SEQ ID NO: 549654 - protein, 15 aa, Homo sapiens
  CDR3 for beta chain variable domain of TCR clone 274827 (TRBV12-4, TRBJ2-5)
CASSPPTGLQETQYF

SEQ ID NO: 549655 - protein, 15 aa, Homo sapiens
  CDR3 for alpha chain variable domain of TCR clone 274828 (TRAV26-1, TRAJ40)
CIVRAVPSGTYKYIF

SEQ ID NO: 549656 - protein, 15 aa, Homo sapiens
  CDR3 for beta chain variable domain of TCR clone 274828 (TRBV20-1, TRBJ2-7)
CSARDRVSGMDEQYF

SEQ ID NO: 549657 - protein, 19 aa, Homo sapiens
  CDR3 for alpha chain variable domain of TCR clone 274829 (TRAV1-2, TRAJ26)
CLLPLCCERPDNYGQNFVF

SEQ ID NO: 549658 - protein, 15 aa, Homo sapiens
  CDR3 for beta chain variable domain of TCR clone 274829 (TRBV9, TRBJ1-6)
CASSVAGTGDSHLHF

SEQ ID NO: 549659 - protein, 11 aa, Homo sapiens
  CDR3 for alpha chain variable domain of TCR clone 274830 (TRAV1-1, TRAJ23)
CAVRPGGKLIF

SEQ ID NO: 549660 - protein, 20 aa, Homo sapiens
  CDR3 for beta chain variable domain of TCR clone 274830 (TRBV7-8, TRBJ2-2)
CDSSHLFPGPTIHITGELFF

SEQ ID NO: 549661 - protein, 12 aa, Homo sapiens
  CDR3 for alpha chain variable domain of TCR clone 274831 (TRAV12-3, TRAJ17)
CAMTLTGNKLPF

SEQ ID NO: 549662 - protein, 14 aa, Homo sapiens
  CDR3 for beta chain variable domain of TCR clone 274831 (TRBV10-3, TRBJ1-1)
CAISDTDRGVEAFF

SEQ ID NO: 549663 - protein, 13 aa, Homo sapiens
  CDR3 for alpha chain variable domain of TCR clone 274832 (TRAV2, TRAJ23)
CAVMGNQGGKLIF

SEQ ID NO: 549664 - protein, 14 aa, Homo sapiens
  CDR3 for beta chain variable domain of TCR clone 274832 (TRBV11-2, TRBJ2-1)
CTSSRATSYNEQFF

SEQ ID NO: 549665 - protein, 10 aa, Homo sapiens
  CDR3 for alpha chain variable domain of TCR clone 274833 (TRAV3, TRAJ27)
CAPLARQINL

SEQ ID NO: 549666 - protein, 13 aa, Homo sapiens
  CDR3 for beta chain variable domain of TCR clone 274833 (TRBV7-3, TRBJ1-1)
CASSQDWGAEAFF

SEQ ID NO: 549667 - protein, 16 aa, Homo sapiens
  CDR3 for alpha chain variable domain of TCR clone 274834 (TRAV30, TRAJ24)
CGTEIVDADSWGKFQF

SEQ ID NO: 549668 - protein, 18 aa, Homo sapiens
  CDR3 for beta chain variable domain of TCR clone 274834 (TRBV24-1, TRBJ2-1)
CATSDLMFLGRGVHEQFF

SEQ ID NO: 549669 - protein, 13 aa, Homo sapiens
  CDR3 for alpha chain variable domain of TCR clone 274835 (TRAV21, TRAJ26)
CAVLDNYVQNFVF

SEQ ID NO: 549670 - protein, 16 aa, Homo sapiens
  CDR3 for beta chain variable domain of TCR clone 274835 (TRBV29-1, TRBJ2-2)
CSVETRASGNTGELFF

SEQ ID NO: 549671 - protein, 14 aa, Homo sapiens
  CDR3 for alpha chain variable domain of TCR clone 274836 (TRAV3, TRAJ9)
CVVRGNTGGFKTIF

SEQ ID NO: 549672 - protein, 14 aa, Homo sapiens
  CDR3 for beta chain variable domain of TCR clone 274836 (TRBV15, TRBJ2-1)
CATSGVEDYNEQFF

SEQ ID NO: 549673 - protein, 10 aa, Homo sapiens
  CDR3 for alpha chain variable domain of TCR clone 274837 (TRAV23/DV6, TRAJ31)
CARGGARLMF

SEQ ID NO: 549674 - protein, 16 aa, Homo sapiens
  CDR3 for beta chain variable domain of TCR clone 274837 (TRBV19, TRBJ2-1)
CASSKAGPSAYNEQFF

SEQ ID NO: 549675 - protein, 14 aa, Homo sapiens
  CDR3 for alpha chain variable domain of TCR clone 274838 (TRAV1-2, TRAJ8)
CAVREDTGFQKLVF

SEQ ID NO: 549676 - protein, 13 aa, Homo sapiens
  CDR3 for beta chain variable domain of TCR clone 274838 (TRBV15, TRBJ2-7)
CATSTTGHYEQYL

SEQ ID NO: 549677 - protein, 11 aa, Homo sapiens
  CDR3 for alpha chain variable domain of TCR clone 274839 (TRAV13-2, TRAJ20)
CADSNDYKLSF

SEQ ID NO: 549678 - protein, 14 aa, Homo sapiens
  CDR3 for beta chain variable domain of TCR clone 274839 (TRBV11-2, TRBJ1-5)
CASSLGRGRQPQHF

SEQ ID NO: 549679 - protein, 13 aa, Homo sapiens
  CDR3 for alpha chain variable domain of TCR clone 274840 (TRAV27, TRAJ6)
CAGGTRGSYTPTF

SEQ ID NO: 549680 - protein, 14 aa, Homo sapiens
  CDR3 for beta chain variable domain of TCR clone 274840 (TRBV6-3, TRBJ1-1)
CASSYQRRDTEAFF

SEQ ID NO: 549681 - protein, 14 aa, Homo sapiens
  CDR3 for alpha chain variable domain of TCR clone 274841 (TRAV26-1, TRAJ38)
CIADNAGNNRKLIW

SEQ ID NO: 549682 - protein, 15 aa, Homo sapiens
  CDR3 for beta chain variable domain of TCR clone 274841 (TRBV4-1, TRBJ2-7)
CASSQQGQGFDEQYF

SEQ ID NO: 549683 - protein, 20 aa, Homo sapiens
  CDR3 for alpha chain variable domain of TCR clone 274842 (TRAV6, TRAJ37)
TASQPADSPRKAGNTGKLIF

SEQ ID NO: 549684 - protein, 16 aa, Homo sapiens
  CDR3 for beta chain variable domain of TCR clone 274842 (TRBV19, TRBJ1-1)
CASRPRSEALNTEAFF

SEQ ID NO: 549685 - protein, 11 aa, Homo sapiens
  CDR3 for alpha chain variable domain of TCR clone 274843 (TRAV13-2, TRAJ20)
CADSNDYKLSF

SEQ ID NO: 549686 - protein, 11 aa, Homo sapiens
  CDR3 for beta chain variable domain of TCR clone 274843 (TRBV12-4, TRBJ2-3)
CASTATDTQYF

SEQ ID NO: 549687 - protein, 12 aa, Homo sapiens
  CDR3 for alpha chain variable domain of TCR clone 274844 (TRAV12-3, TRAJ3)
CAIHSSASKIIF

SEQ ID NO: 549688 - protein, 17 aa, Homo sapiens
  CDR3 for beta chain variable domain of TCR clone 274844 (TRBV7-9, TRBJ2-3)
CASSLEEAGAYPDTQYF

SEQ ID NO: 549689 - protein, 12 aa, Homo sapiens
  CDR3 for alpha chain variable domain of TCR clone 274845 (TRAV16, TRAJ10)
CSRTGGGNKLTF

SEQ ID NO: 549690 - protein, 13 aa, Homo sapiens
  CDR3 for beta chain variable domain of TCR clone 274845 (TRBV7-9, TRBJ2-1)
CASSLGTVNEQFF

SEQ ID NO: 549691 - protein, 14 aa, Homo sapiens
  CDR3 for alpha chain variable domain of TCR clone 274846 (TRAV26-1, TRAJ26)
CIVRVASYGQNFVF

SEQ ID NO: 549692 - protein, 10 aa, Homo sapiens
  CDR3 for beta chain variable domain of TCR clone 274846 (TRBV20-1, TRBJ2-5)
CSARFETQYF

SEQ ID NO: 549693 - protein, 16 aa, Homo sapiens
  CDR3 for alpha chain variable domain of TCR clone 274847 (TRAV30, TRAJ24)
CGTEIVDADSWGKFQF

SEQ ID NO: 549694 - protein, 14 aa, Homo sapiens
  CDR3 for beta chain variable domain of TCR clone 274847 (TRBV7-9, TRBJ2-4)
CASRLAMGGNIQYF

SEQ ID NO: 549695 - protein, 16 aa, Homo sapiens
  CDR3 for alpha chain variable domain of TCR clone 274848 (TRAV23/DV6, TRAJ12)
CAAIDLGAMDSSYKLI

SEQ ID NO: 549696 - protein, 14 aa, Homo sapiens
  CDR3 for beta chain variable domain of TCR clone 274848 (TRBV6-1, TRBJ1-3)
CASVQGGGGNTIYF

SEQ ID NO: 549697 - protein, 17 aa, Homo sapiens
  CDR3 for alpha chain variable domain of TCR clone 274849 (TRAV26-2, TRAJ40)
DAAVSRGNDGGTYKYIF

SEQ ID NO: 549698 - protein, 15 aa, Homo sapiens
  CDR3 for beta chain variable domain of TCR clone 274849 (TRBV19, TRBJ1-2)
CASSVGQVLNYGYTF

SEQ ID NO: 549699 - protein, 12 aa, Homo sapiens
  CDR3 for alpha chain variable domain of TCR clone 274850 (TRAV8-3, TRAJ20)
CAVGANDYKLSF

SEQ ID NO: 549700 - protein, 14 aa, Homo sapiens
  CDR3 for beta chain variable domain of TCR clone 274850 (TRBV7-3, TRBJ2-2)
CASSSGGYTGELFF

SEQ ID NO: 549701 - protein, 12 aa, Homo sapiens
  CDR3 for alpha chain variable domain of TCR clone 274851 (TRAV35, TRAJ39)
LAPNNAGNMLTF

SEQ ID NO: 549702 - protein, 13 aa, Homo sapiens
  CDR3 for beta chain variable domain of TCR clone 274851 (TRBV7-3, TRBJ1-1)
CASSQDWGDEAFF

SEQ ID NO: 549703 - protein, 12 aa, Homo sapiens
  CDR3 for alpha chain variable domain of TCR clone 274852 (TRAV12-2, TRAJ20)
CRVPFNDYKLSF

SEQ ID NO: 549704 - protein, 15 aa, Homo sapiens
  CDR3 for beta chain variable domain of TCR clone 274852 (TRBV27, TRBJ2-5)
CASSLYPRGGETQYF

SEQ ID NO: 549705 - protein, 17 aa, Homo sapiens
  CDR3 for alpha chain variable domain of TCR clone 274853 (TRAV3, TRAJ38)
CAVRDCLNAGNNRKLIW

SEQ ID NO: 549706 - protein, 14 aa, Homo sapiens
  CDR3 for beta chain variable domain of TCR clone 274853 (TRBV12-5, TRBJ2-5)
CASGSRTHQGTQYF

SEQ ID NO: 549707 - protein, 17 aa, Homo sapiens
  CDR3 for alpha chain variable domain of TCR clone 274854 (TRAV16, TRAJ37)
CAFWPKNGSSNTGKLIF

SEQ ID NO: 549708 - protein, 13 aa, Homo sapiens
  CDR3 for beta chain variable domain of TCR clone 274854 (TRBV12-5, TRBJ2-3)
CASGDRQSDTQYF

SEQ ID NO: 549709 - protein, 11 aa, Homo sapiens
  CDR3 for alpha chain variable domain of TCR clone 274855 (TRAV1-1, TRAJ30)
CAQNRDDKIIF

SEQ ID NO: 549710 - protein, 16 aa, Homo sapiens
  CDR3 for beta chain variable domain of TCR clone 274855 (TRBV5-4, TRBJ2-3)
CASQQPGAGGADTQYF

SEQ ID NO: 549711 - protein, 15 aa, Homo sapiens
  CDR3 for alpha chain variable domain of TCR clone 274856 (TRAV13-1, TRAJ44)
CAASWGGSTASKLTF

SEQ ID NO: 549712 - protein, 12 aa, Homo sapiens
  CDR3 for beta chain variable domain of TCR clone 274856 (TRBV11-2, TRBJ2-2)
CASSLGGGELFF

SEQ ID NO: 549713 - protein, 14 aa, Homo sapiens
  CDR3 for alpha chain variable domain of TCR clone 274857 (TRAV12-2, TRAJ45)
CAVYSGGGADGLTF

SEQ ID NO: 549714 - protein, 14 aa, Homo sapiens
  CDR3 for beta chain variable domain of TCR clone 274857 (TRBV12-4, TRBJ1-1)
CASSLGTGGTEAFF

SEQ ID NO: 549715 - protein, 12 aa, Homo sapiens
  CDR3 for alpha chain variable domain of TCR clone 274858 (TRAV13-2, TRAJ8)
CAPWLGFQKLVI

SEQ ID NO: 549716 - protein, 13 aa, Homo sapiens
  CDR3 for beta chain variable domain of TCR clone 274858 (TRBV12-4, TRBJ1-2)
CASTMTSNYGYTF

SEQ ID NO: 549717 - protein, 15 aa, Homo sapiens
  CDR3 for alpha chain variable domain of TCR clone 274859 (TRAV12-2, TRAJ43)
CAFDMRFGEGTRLTV

SEQ ID NO: 549718 - protein, 18 aa, Homo sapiens
  CDR3 for beta chain variable domain of TCR clone 274859 (TRBV20-1, TRBJ2-3)
CSASGLAGGPGTTDTQYF

SEQ ID NO: 549719 - protein, 12 aa, Homo sapiens
  CDR3 for alpha chain variable domain of TCR clone 274860 (TRAV25, TRAJ11)
CAGYSGYSTLTF

SEQ ID NO: 549720 - protein, 13 aa, Homo sapiens
  CDR3 for beta chain variable domain of TCR clone 274860 (TRBV7-9, TRBJ1-2)
CASSLKQNYGYTL

SEQ ID NO: 549721 - protein, 12 aa, Homo sapiens
  CDR3 for alpha chain variable domain of TCR clone 274861 (TRAV2, TRAJ3)
CAVRSSASEIIF

SEQ ID NO: 549722 - protein, 15 aa, Homo sapiens
  CDR3 for beta chain variable domain of TCR clone 274861 (TRBV15, TRBJ2-5)
CATSRDGGPQETQYF

SEQ ID NO: 549723 - protein, 14 aa, Homo sapiens
  CDR3 for alpha chain variable domain of TCR clone 274862 (TRAV1-2, TRAJ16)
CAVNRFSDGQKLLF

SEQ ID NO: 549724 - protein, 15 aa, Homo sapiens
  CDR3 for beta chain variable domain of TCR clone 274862 (TRBV18, TRBJ2-5)
CASSPDPGLQETQYF

SEQ ID NO: 549725 - protein, 16 aa, Homo sapiens
  CDR3 for alpha chain variable domain of TCR clone 274863 (TRAV1-2, TRAJ10)
CAVRGVLTGGGNNFTF

SEQ ID NO: 549726 - protein, 12 aa, Homo sapiens
  CDR3 for beta chain variable domain of TCR clone 274863 (TRBV7-8, TRBJ2-7)
CASSLGDREQYF

SEQ ID NO: 549727 - protein, 13 aa, Homo sapiens
  CDR3 for alpha chain variable domain of TCR clone 274864 (TRAV8-6, TRAJ49)
CAVITNTGNQFYF

SEQ ID NO: 549728 - protein, 14 aa, Homo sapiens
  CDR3 for beta chain variable domain of TCR clone 274864 (TRBV5-1, TRBJ2-7)
CASGRGESLYEQYF

SEQ ID NO: 549729 - protein, 15 aa, Homo sapiens
  CDR3 for alpha chain variable domain of TCR clone 274865 (TRAV8-2, TRAJ16)
CVVSDGFSDGQKLLF

SEQ ID NO: 549730 - protein, 14 aa, Homo sapiens
  CDR3 for beta chain variable domain of TCR clone 274865 (TRBV6-1, TRBJ1-3)
CASVQGGGGNTMYF

SEQ ID NO: 549731 - protein, 11 aa, Homo sapiens
  CDR3 for alpha chain variable domain of TCR clone 274866 (TRAV39, TRAJ49)
CAVDISTQFYF

SEQ ID NO: 549732 - protein, 11 aa, Homo sapiens
  CDR3 for beta chain variable domain of TCR clone 274866 (TRBV7-8, TRBJ2-7)
CAGSLSREQYF

SEQ ID NO: 549733 - protein, 19 aa, Homo sapiens
  CDR3 for alpha chain variable domain of TCR clone 274867 (TRAV1-1, TRAJ13)
CLLLLRCEGESGGYQKVTF

SEQ ID NO: 549734 - protein, 13 aa, Homo sapiens
  CDR3 for beta chain variable domain of TCR clone 274867 (TRBV29-1, TRBJ2-1)
CSVEGGRVNEQSF

SEQ ID NO: 549735 - protein, 13 aa, Homo sapiens
  CDR3 for alpha chain variable domain of TCR clone 274868 (TRAV12-2, TRAJ37)
CAGGSGNTGKLIF

SEQ ID NO: 549736 - protein, 15 aa, Homo sapiens
  CDR3 for beta chain variable domain of TCR clone 274868 (TRBV7-3, TRBJ2-1)
CASSPQRGGYNEQFF

SEQ ID NO: 549737 - protein, 14 aa, Homo sapiens
  CDR3 for alpha chain variable domain of TCR clone 274869 (TRAV1-2, TRAJ8)
CAVREDTGFQKLVF

SEQ ID NO: 549738 - protein, 15 aa, Homo sapiens
  CDR3 for beta chain variable domain of TCR clone 274869 (TRBV11-2, TRBJ1-6)
CASTLRGTGNSPLHF

SEQ ID NO: 549739 - protein, 15 aa, Homo sapiens
  CDR3 for alpha chain variable domain of TCR clone 274870 (TRAV8-6, TRAJ6)
CAVSGESGGSYIPTF

SEQ ID NO: 549740 - protein, 13 aa, Homo sapiens
  CDR3 for beta chain variable domain of TCR clone 274870 (TRBV12-4, TRBJ2-5)
CASSSVPQETQYF

SEQ ID NO: 549741 - protein, 14 aa, Homo sapiens
  CDR3 for alpha chain variable domain of TCR clone 274871 (TRAV13-1, TRAJ35)
CAASKGGFGNVLHC

SEQ ID NO: 549742 - protein, 15 aa, Homo sapiens
  CDR3 for beta chain variable domain of TCR clone 274871 (TRBV5-5, TRBJ1-5)
CASSSTPGSNQPQHF

SEQ ID NO: 549743 - protein, 13 aa, Homo sapiens
  CDR3 for alpha chain variable domain of TCR clone 274872 (TRAV20, TRAJ37)
CAGCSSNTGKLIF

SEQ ID NO: 549744 - protein, 15 aa, Homo sapiens
  CDR3 for beta chain variable domain of TCR clone 274872 (TRBV7-2, TRBJ2-3)
CASSLRGGSTDTQYF

SEQ ID NO: 549745 - protein, 11 aa, Homo sapiens
  CDR3 for alpha chain variable domain of TCR clone 274873 (TRAV12-1, TRAJ26)
CVVAFGQNFVF

SEQ ID NO: 549746 - protein, 15 aa, Homo sapiens
  CDR3 for beta chain variable domain of TCR clone 274873 (TRBV12-4, TRBJ2-5)
CASSGTGQAQETQYF

SEQ ID NO: 549747 - protein, 18 aa, Homo sapiens
  CDR3 for alpha chain variable domain of TCR clone 274874 (TRAV29/DV5, TRAJ52)
CAAGFRGAGGTSYGKLTF

SEQ ID NO: 549748 - protein, 16 aa, Homo sapiens
  CDR3 for beta chain variable domain of TCR clone 274874 (TRBV7-3, TRBJ2-2)
CASSVKRGSLSEELFF

SEQ ID NO: 549749 - protein, 13 aa, Homo sapiens
  CDR3 for alpha chain variable domain of TCR clone 274875 (TRAV17, TRAJ5)
CAPMETGRRALTF

SEQ ID NO: 549750 - protein, 14 aa, Homo sapiens
  CDR3 for beta chain variable domain of TCR clone 274875 (TRBV19, TRBJ2-1)
CASPTFVLSGEQFF

SEQ ID NO: 549751 - protein, 13 aa, Homo sapiens
  CDR3 for alpha chain variable domain of TCR clone 274876 (TRAV21, TRAJ23)
CAVVANQGGKLIF

SEQ ID NO: 549752 - protein, 16 aa, Homo sapiens
  CDR3 for beta chain variable domain of TCR clone 274876 (TRBV5-5, TRBJ1-2)
CASSPTWGRGLYGYTF

SEQ ID NO: 549753 - protein, 15 aa, Homo sapiens
  CDR3 for alpha chain variable domain of TCR clone 274877 (TRAV12-3, TRAJ6)
CAMSATSGGSYIPTF

SEQ ID NO: 549754 - protein, 11 aa, Homo sapiens
  CDR3 for beta chain variable domain of TCR clone 274877 (TRBV20-1, TRBJ1-5)
CSPQGDQPQHF

SEQ ID NO: 549755 - protein, 16 aa, Homo sapiens
  CDR3 for alpha chain variable domain of TCR clone 274878 (TRAV3, TRAJ37)
CAVRDSGSGNTGTLIF

SEQ ID NO: 549756 - protein, 12 aa, Homo sapiens
  CDR3 for beta chain variable domain of TCR clone 274878 (TRBV7-2, TRBJ2-5)
CASSLYQETQYF

SEQ ID NO: 549757 - protein, 13 aa, Homo sapiens
  CDR3 for alpha chain variable domain of TCR clone 274879 (TRAV8-6, TRAJ9)
CAVWDTGGLKTIF

SEQ ID NO: 549758 - protein, 15 aa, Homo sapiens
  CDR3 for beta chain variable domain of TCR clone 274879 (TRBV6-3, TRBJ2-7)
CASSSPGTVFYEQYF

SEQ ID NO: 549759 - protein, 12 aa, Homo sapiens
  CDR3 for alpha chain variable domain of TCR clone 274880 (TRAV29/DV5, TRAJ43)
CAAPYNNNDMRF

SEQ ID NO: 549760 - protein, 17 aa, Homo sapiens
  CDR3 for beta chain variable domain of TCR clone 274880 (TRBV19, TRBJ2-6)
CASSTGQVFSGDNVLTF

SEQ ID NO: 549761 - protein, 12 aa, Homo sapiens
  CDR3 for alpha chain variable domain of TCR clone 274881 (TRAV3, TRAJ43)
CAVRDPNKDMRF

SEQ ID NO: 549762 - protein, 15 aa, Homo sapiens
  CDR3 for beta chain variable domain of TCR clone 274881 (TRBV4-3, TRBJ2-7)
CASSQGDWGDYEQYF

SEQ ID NO: 549763 - protein, 11 aa, Homo sapiens
  CDR3 for alpha chain variable domain of TCR clone 274882 (TRAV21, TRAJ11)
CAVNGYSTLTF

SEQ ID NO: 549764 - protein, 14 aa, Homo sapiens
  CDR3 for beta chain variable domain of TCR clone 274882 (TRBV7-9, TRBJ1-1)
CASTPLQSYTEAFF

SEQ ID NO: 549765 - protein, 14 aa, Homo sapiens
  CDR3 for alpha chain variable domain of TCR clone 274883 (TRAV27, TRAJ38)
CAARRNAGNNRKLI

SEQ ID NO: 549766 - protein, 13 aa, Homo sapiens
  CDR3 for beta chain variable domain of TCR clone 274883 (TRBV12-5, TRBJ2-3)
CASGDRQSDTQYL

SEQ ID NO: 549767 - protein, 15 aa, Homo sapiens
  CDR3 for alpha chain variable domain of TCR clone 274884 (TRAV13-1, TRAJ11)
CAASNRNSGYTTLTF

SEQ ID NO: 549768 - protein, 11 aa, Homo sapiens
  CDR3 for beta chain variable domain of TCR clone 274884 (TRBV20-1, TRBJ2-7)
CSARLSYEQYF

SEQ ID NO: 549769 - protein, 14 aa, Homo sapiens
  CDR3 for alpha chain variable domain of TCR clone 274885 (TRAV26-1, TRAJ26)
CIVRATFLGQNFVF

SEQ ID NO: 549770 - protein, 15 aa, Homo sapiens
  CDR3 for beta chain variable domain of TCR clone 274885 (TRBV7-2, TRBJ2-1)
CASSLASGRVNEQFF

SEQ ID NO: 549771 - protein, 14 aa, Homo sapiens
  CDR3 for alpha chain variable domain of TCR clone 274886 (TRAV38-1, TRAJ54)
CAFMSPSGAQKLVF

SEQ ID NO: 549772 - protein, 16 aa, Homo sapiens
  CDR3 for beta chain variable domain of TCR clone 274886 (TRBV28, TRBJ2-1)
CAISLGGSGSYNEQFF

SEQ ID NO: 549773 - protein, 13 aa, Homo sapiens
  CDR3 for alpha chain variable domain of TCR clone 274887 (TRAV8-3, TRAJ36)
CAVGATGANNLFF

SEQ ID NO: 549774 - protein, 14 aa, Homo sapiens
  CDR3 for beta chain variable domain of TCR clone 274887 (TRBV7-2, TRBJ2-5)
CASSFTQGQETQYF

SEQ ID NO: 549775 - protein, 11 aa, Homo sapiens
  CDR3 for alpha chain variable domain of TCR clone 274888 (TRAV2, TRAJ33)
CAVESNYQLIW

SEQ ID NO: 549776 - protein, 14 aa, Homo sapiens
  CDR3 for beta chain variable domain of TCR clone 274888 (TRBV9, TRBJ2-7)
CASSAGSALYEQYF

SEQ ID NO: 549777 - protein, 12 aa, Homo sapiens
  CDR3 for alpha chain variable domain of TCR clone 274889 (TRAV13-1, TRAJ9)
CASHTGGFNTIF

SEQ ID NO: 549778 - protein, 13 aa, Homo sapiens
  CDR3 for beta chain variable domain of TCR clone 274889 (TRBV12-4, TRBJ1-2)
CASSSGSKDGYTF

SEQ ID NO: 549779 - protein, 16 aa, Homo sapiens
  CDR3 for alpha chain variable domain of TCR clone 274890 (TRAV12-1, TRAJ4)
CVVNMGPLGGYNKLMF

SEQ ID NO: 549780 - protein, 16 aa, Homo sapiens
  CDR3 for beta chain variable domain of TCR clone 274890 (TRBV4-1, TRBJ2-7)
CASSQDPTGYSYEQYF

SEQ ID NO: 549781 - protein, 11 aa, Homo sapiens
  CDR3 for alpha chain variable domain of TCR clone 274891 (TRAV12-2, TRAJ31)
CAVTRWARLMF

SEQ ID NO: 549782 - protein, 15 aa, Homo sapiens
  CDR3 for beta chain variable domain of TCR clone 274891 (TRBV19, TRBJ2-7)
CASSIGGGFVNEQYF

SEQ ID NO: 549783 - protein, 14 aa, Homo sapiens
  CDR3 for alpha chain variable domain of TCR clone 274892 (TRAV12-3, TRAJ10)
SHLPLTGGGNKLTF

SEQ ID NO: 549784 - protein, 15 aa, Homo sapiens
  CDR3 for beta chain variable domain of TCR clone 274892 (TRBV4-1, TRBJ1-4)
CASSDTGGTNEKPFF

SEQ ID NO: 549785 - protein, 11 aa, Homo sapiens
  CDR3 for alpha chain variable domain of TCR clone 274893 (TRAV1-1, TRAJ23)
SAVRQGGKLIF

SEQ ID NO: 549786 - protein, 13 aa, Homo sapiens
  CDR3 for beta chain variable domain of TCR clone 274893 (TRBV7-3, TRBJ1-1)
CASSQDWGAEAFF

SEQ ID NO: 549787 - protein, 14 aa, Homo sapiens
  CDR3 for alpha chain variable domain of TCR clone 274894 (TRAV13-1, TRAJ32)
CAARGSGATNKPIF

SEQ ID NO: 549788 - protein, 15 aa, Homo sapiens
  CDR3 for beta chain variable domain of TCR clone 274894 (TRBV5-5, TRBJ1-1)
CASSLVGKDNTEAFF

SEQ ID NO: 549789 - protein, 16 aa, Homo sapiens
  CDR3 for alpha chain variable domain of TCR clone 274895 (TRAV12-2, TRAJ40)
CAVIRGGTSGTYKYIY

SEQ ID NO: 549790 - protein, 13 aa, Homo sapiens
  CDR3 for beta chain variable domain of TCR clone 274895 (TRBV7-9, TRBJ1-2)
CASSLKQNYGYTF

SEQ ID NO: 549791 - protein, 12 aa, Homo sapiens
  CDR3 for alpha chain variable domain of TCR clone 274896 (TRAV12-3, TRAJ17)
RAMTLTGNKLTF

SEQ ID NO: 549792 - protein, 14 aa, Homo sapiens
  CDR3 for beta chain variable domain of TCR clone 274896 (TRBV4-1, TRBJ2-2)
CASSQAVNTGELFF

SEQ ID NO: 549793 - protein, 13 aa, Homo sapiens
  CDR3 for alpha chain variable domain of TCR clone 274897 (TRAV2, TRAJ40)
CAVVTSGTYKYIF

SEQ ID NO: 549794 - protein, 16 aa, Homo sapiens
  CDR3 for beta chain variable domain of TCR clone 274897 (TRBV19, TRBJ2-1)
CASSKAGPGSYNEQFF

SEQ ID NO: 549795 - protein, 12 aa, Homo sapiens
  CDR3 for alpha chain variable domain of TCR clone 274898 (TRAV12-3, TRAJ33)
CAFMDSNYQLIW

SEQ ID NO: 549796 - protein, 14 aa, Homo sapiens
  CDR3 for beta chain variable domain of TCR clone 274898 (TRBV11-2, TRBJ2-5)
CASSRTGGIETQYF

SEQ ID NO: 549797 - protein, 12 aa, Homo sapiens
  CDR3 for alpha chain variable domain of TCR clone 274899 (TRAV16, TRAJ12)
CAHGDSSYKLIF

SEQ ID NO: 549798 - protein, 15 aa, Homo sapiens
  CDR3 for beta chain variable domain of TCR clone 274899 (TRBV10-3, TRBJ1-3)
CAISDSQGAGNTIYF

SEQ ID NO: 549799 - protein, 12 aa, Homo sapiens
  CDR3 for alpha chain variable domain of TCR clone 274900 (TRAV12-3, TRAJ42)
CAPGGSQGNLIF

SEQ ID NO: 549800 - protein, 13 aa, Homo sapiens
  CDR3 for beta chain variable domain of TCR clone 274900 (TRBV5-4, TRBJ1-2)
CASSFRNNYGYTF

SEQ ID NO: 549801 - protein, 16 aa, Homo sapiens
  CDR3 for alpha chain variable domain of TCR clone 274901 (TRAV1-2, TRAJ10)
CAVRVVLTGGGNKLTF

SEQ ID NO: 549802 - protein, 13 aa, Homo sapiens
  CDR3 for beta chain variable domain of TCR clone 274901 (TRBV20-1, TRBJ1-6)
CSAPLGVGSPLHF

SEQ ID NO: 549803 - protein, 11 aa, Homo sapiens
  CDR3 for alpha chain variable domain of TCR clone 274902 (TRAV17, TRAJ31)
CATSNNARLMF

SEQ ID NO: 549804 - protein, 18 aa, Homo sapiens
  CDR3 for beta chain variable domain of TCR clone 274902 (TRBV20-1, TRBJ2-6)
CSAETTPTHGSGANVLTF

SEQ ID NO: 549805 - protein, 15 aa, Homo sapiens
  CDR3 for alpha chain variable domain of TCR clone 274903 (TRAV26-1, TRAJ42)
CIVRVKGGSQGNRIF

SEQ ID NO: 549806 - protein, 14 aa, Homo sapiens
  CDR3 for beta chain variable domain of TCR clone 274903 (TRBV19, TRBJ2-2)
CATTGHANTGELFF

SEQ ID NO: 549807 - protein, 14 aa, Homo sapiens
  CDR3 for alpha chain variable domain of TCR clone 274904 (TRAV13-1, TRAJ22)
CTASYSGSARQLTF

SEQ ID NO: 549808 - protein, 13 aa, Homo sapiens
  CDR3 for beta chain variable domain of TCR clone 274904 (TRBV6-3, TRBJ1-2)
CASSLTGDYGYTF

SEQ ID NO: 549809 - protein, 17 aa, Homo sapiens
  CDR3 for alpha chain variable domain of TCR clone 274905 (TRAV26-1, TRAJ10)
CIVPFRGLTGGGNKLTF

SEQ ID NO: 549810 - protein, 13 aa, Homo sapiens
  CDR3 for beta chain variable domain of TCR clone 274905 (TRBV20-1, TRBJ2-3)
CSASRQAADTQYF

SEQ ID NO: 549811 - protein, 15 aa, Homo sapiens
  CDR3 for alpha chain variable domain of TCR clone 274906 (TRAV2, TRAJ11)
CAVGGRNSVYSTLTF

SEQ ID NO: 549812 - protein, 12 aa, Homo sapiens
  CDR3 for beta chain variable domain of TCR clone 274906 (TRBV5-4, TRBJ2-7)
CASSLEAYEQYF

SEQ ID NO: 549813 - protein, 11 aa, Homo sapiens
  CDR3 for alpha chain variable domain of TCR clone 274907 (TRAV21, TRAJ39)
LLVNAGNMLTF

SEQ ID NO: 549814 - protein, 16 aa, Homo sapiens
  CDR3 for beta chain variable domain of TCR clone 274907 (TRBV3-1, TRBJ2-5)
CASSQDWASGQETQYF

SEQ ID NO: 549815 - protein, 13 aa, Homo sapiens
  CDR3 for alpha chain variable domain of TCR clone 274908 (TRAV21, TRAJ57)
CAVTQGGSEKLVF

SEQ ID NO: 549816 - protein, 18 aa, Homo sapiens
  CDR3 for beta chain variable domain of TCR clone 274908 (TRBV29-1, TRBJ2-7)
CSVEDAEDGTAYEQYLGR

SEQ ID NO: 549817 - protein, 18 aa, Homo sapiens
  CDR3 for alpha chain variable domain of TCR clone 274909 (TRAV1-2, TRAJ18)
CAVRDMCDRGSTLGRLYF

SEQ ID NO: 549818 - protein, 16 aa, Homo sapiens
  CDR3 for beta chain variable domain of TCR clone 274909 (TRBV29-1, TRBJ1-2)
CSAEANRNIANYGYTF

SEQ ID NO: 549819 - protein, 14 aa, Homo sapiens
  CDR3 for alpha chain variable domain of TCR clone 274910 (TRAV12-2, TRAJ9)
CAVNMEGVGFKTIF

SEQ ID NO: 549820 - protein, 14 aa, Homo sapiens
  CDR3 for beta chain variable domain of TCR clone 274910 (TRBV27, TRBJ2-3)
FASRKGGRTDTQYF

SEQ ID NO: 549821 - protein, 13 aa, Homo sapiens
  CDR3 for alpha chain variable domain of TCR clone 274911 (TRAV13-1, TRAJ39)
CAASIWAGNMLTF

SEQ ID NO: 549822 - protein, 18 aa, Homo sapiens
  CDR3 for beta chain variable domain of TCR clone 274911 (TRBV20-1, TRBJ2-6)
CSAETTPTHGSGANVLTF

SEQ ID NO: 549823 - protein, 11 aa, Homo sapiens
  CDR3 for alpha chain variable domain of TCR clone 274912 (TRAV23/DV6, TRAJ48)
CAPRWGEKLTF

SEQ ID NO: 549824 - protein, 13 aa, Homo sapiens
  CDR3 for beta chain variable domain of TCR clone 274912 (TRBV12-4, TRBJ2-5)
CASSPGTKETQYF

SEQ ID NO: 549825 - protein, 13 aa, Homo sapiens
  CDR3 for alpha chain variable domain of TCR clone 274913 (TRAV12-3, TRAJ13)
CAMSSGGYQKVTF

SEQ ID NO: 549826 - protein, 16 aa, Homo sapiens
  CDR3 for beta chain variable domain of TCR clone 274913 (TRBV29-1, TRBJ2-7)
CSVEDAEDGTAYEQYF

SEQ ID NO: 549827 - protein, 15 aa, Homo sapiens
  CDR3 for alpha chain variable domain of TCR clone 274914 (TRAV14/DV4, TRAJ49)
CAMREGSDTGNQFYF

SEQ ID NO: 549828 - protein, 17 aa, Homo sapiens
  CDR3 for beta chain variable domain of TCR clone 274914 (TRBV12-4, TRBJ1-5)
CASSLRGDRGPNQPQHF

SEQ ID NO: 549829 - protein, 14 aa, Homo sapiens
  CDR3 for alpha chain variable domain of TCR clone 274915 (TRAV23/DV6, TRAJ5)
CAAKRPAGRRALTF

SEQ ID NO: 549830 - protein, 14 aa, Homo sapiens
  CDR3 for beta chain variable domain of TCR clone 274915 (TRBV18, TRBJ2-5)
CASSPGVSQETQYF

SEQ ID NO: 549831 - protein, 14 aa, Homo sapiens
  CDR3 for alpha chain variable domain of TCR clone 274916 (TRAV26-1, TRAJ34)
CSVRVAHNTDNLIF

SEQ ID NO: 549832 - protein, 11 aa, Homo sapiens
  CDR3 for beta chain variable domain of TCR clone 274916 (TRBV12-4, TRBJ2-3)
CASTATDTQYF

SEQ ID NO: 549833 - protein, 18 aa, Homo sapiens
  CDR3 for alpha chain variable domain of TCR clone 274917 (TRAV29/DV5, TRAJ52)
CAAGFRGAGGTSYGTLTF

SEQ ID NO: 549834 - protein, 16 aa, Homo sapiens
  CDR3 for beta chain variable domain of TCR clone 274917 (TRBV7-3, TRBJ2-2)
CASSLRRGTLSGELFF

SEQ ID NO: 549835 - protein, 14 aa, Homo sapiens
  CDR3 for alpha chain variable domain of TCR clone 274918 (TRAV29/DV5, TRAJ36)
CAARRKTGANNLFF

SEQ ID NO: 549836 - protein, 16 aa, Homo sapiens
  CDR3 for beta chain variable domain of TCR clone 274918 (TRBV7-3, TRBJ2-1)
CASSLSSGGGAKEQFF

SEQ ID NO: 549837 - protein, 14 aa, Homo sapiens
  CDR3 for alpha chain variable domain of TCR clone 274919 (TRAV4, TRAJ5)
CLVGDQTGRRALTF

SEQ ID NO: 549838 - protein, 14 aa, Homo sapiens
  CDR3 for beta chain variable domain of TCR clone 274919 (TRBV28, TRBJ2-7)
CASTAIGLLYEQYF

SEQ ID NO: 549839 - protein, 12 aa, Homo sapiens
  CDR3 for alpha chain variable domain of TCR clone 274920 (TRAV12-3, TRAJ17)
CAMTLTGNKLTF

SEQ ID NO: 549840 - protein, 12 aa, Homo sapiens
  CDR3 for beta chain variable domain of TCR clone 274920 (TRBV2, TRBJ2-1)
CAYGLPGNEQFF

SEQ ID NO: 549841 - protein, 13 aa, Homo sapiens
  CDR3 for alpha chain variable domain of TCR clone 274921 (TRAV13-1, TRAJ9)
CAASGTGGFTTIF

SEQ ID NO: 549842 - protein, 14 aa, Homo sapiens
  CDR3 for beta chain variable domain of TCR clone 274921 (TRBV5-5, TRBJ2-7)
CASSLGQGTYEQYF

SEQ ID NO: 549843 - protein, 16 aa, Homo sapiens
  CDR3 for alpha chain variable domain of TCR clone 274922 (TRAV3, TRAJ37)
CAVRGEGSGNTGKLIF

SEQ ID NO: 549844 - protein, 13 aa, Homo sapiens
  CDR3 for beta chain variable domain of TCR clone 274922 (TRBV12-4, TRBJ1-5)
CASSPDRAQPQHF

SEQ ID NO: 549845 - protein, 18 aa, Homo sapiens
  CDR3 for alpha chain variable domain of TCR clone 274923 (TRAV13-1, TRAJ52)
CAASKRSAGGTSYGKLTF

SEQ ID NO: 549846 - protein, 15 aa, Homo sapiens
  CDR3 for beta chain variable domain of TCR clone 274923 (TRBV29-1, TRBJ1-2)
CSVVLEAGSNYGYAF

SEQ ID NO: 549847 - protein, 23 aa, Homo sapiens
  CDR3 for alpha chain variable domain of TCR clone 274924 (TRAV1-1, TRAJ29)
LQQELQMKDSASYFLGGNTPLVF

SEQ ID NO: 549848 - protein, 14 aa, Homo sapiens
  CDR3 for beta chain variable domain of TCR clone 274924 (TRBV4-1, TRBJ2-2)
CASSQAVNTGELFF

SEQ ID NO: 549849 - protein, 19 aa, Homo sapiens
  CDR3 for alpha chain variable domain of TCR clone 274925 (TRAV26-1, TRAJ52)
CIVRAHRNAGGTSYGKLTF

SEQ ID NO: 549850 - protein, 15 aa, Homo sapiens
  CDR3 for beta chain variable domain of TCR clone 274925 (TRBV10-3, TRBJ2-3)
CAISLTSGGTDTQYF

SEQ ID NO: 549851 - protein, 13 aa, Homo sapiens
  CDR3 for alpha chain variable domain of TCR clone 274926 (TRAV6, TRAJ12)
CALDPYSSYKLIF

SEQ ID NO: 549852 - protein, 14 aa, Homo sapiens
  CDR3 for beta chain variable domain of TCR clone 274926 (TRBV7-3, TRBJ2-1)
CQQPCRGRGDEQFF

SEQ ID NO: 549853 - protein, 14 aa, Homo sapiens
  CDR3 for alpha chain variable domain of TCR clone 274927 (TRAV21, TRAJ58)
CAVRRGRSGSRLTF

SEQ ID NO: 549854 - protein, 12 aa, Homo sapiens
  CDR3 for beta chain variable domain of TCR clone 274927 (TRBV11-2, TRBJ2-2)
CASSLGGGELFF

SEQ ID NO: 549855 - protein, 14 aa, Homo sapiens
  CDR3 for alpha chain variable domain of TCR clone 274928 (TRAV8-4, TRAJ39)
WAVSLNNAGNMLTF

SEQ ID NO: 549856 - protein, 16 aa, Homo sapiens
  CDR3 for beta chain variable domain of TCR clone 274928 (TRBV13, TRBJ2-7)
CASSSRESGRTYEQYF

SEQ ID NO: 549857 - protein, 14 aa, Homo sapiens
  CDR3 for alpha chain variable domain of TCR clone 274929 (TRAV12-1, TRAJ30)
CVPTGTNRDDKIIF

SEQ ID NO: 549858 - protein, 11 aa, Homo sapiens
  CDR3 for beta chain variable domain of TCR clone 274929 (TRBV4-1, TRBJ2-2)
CASEHTRELFF

SEQ ID NO: 549859 - protein, 13 aa, Homo sapiens
  CDR3 for alpha chain variable domain of TCR clone 274930 (TRAV35, TRAJ57)
CAGSQGGSEKLVF

SEQ ID NO: 549860 - protein, 15 aa, Homo sapiens
  CDR3 for beta chain variable domain of TCR clone 274930 (TRBV18, TRBJ1-1)
CASSPSSWVNTEAFF

SEQ ID NO: 549861 - protein, 16 aa, Homo sapiens
  CDR3 for alpha chain variable domain of TCR clone 274931 (TRAV14/DV4, TRAJ12)
CAMREVLMDSSYKLIF

SEQ ID NO: 549862 - protein, 12 aa, Homo sapiens
  CDR3 for beta chain variable domain of TCR clone 274931 (TRBV7-8, TRBJ2-7)
CASEGGPHGQYF

SEQ ID NO: 549863 - protein, 14 aa, Homo sapiens
  CDR3 for alpha chain variable domain of TCR clone 274932 (TRAV35, TRAJ10)
CAGILTGGRNKLTF

SEQ ID NO: 549864 - protein, 16 aa, Homo sapiens
  CDR3 for beta chain variable domain of TCR clone 274932 (TRBV12-5, TRBJ2-5)
CASGPRTSGNQETQYF

SEQ ID NO: 549865 - protein, 16 aa, Homo sapiens
  CDR3 for alpha chain variable domain of TCR clone 274933 (TRAV20, TRAJ28)
CAVRDPSGAGSYQLTV

SEQ ID NO: 549866 - protein, 12 aa, Homo sapiens
  CDR3 for beta chain variable domain of TCR clone 274933 (TRBV28, TRBJ2-3)
CASRLYRDTQYF

SEQ ID NO: 549867 - protein, 17 aa, Homo sapiens
  CDR3 for alpha chain variable domain of TCR clone 274934 (TRAV3, TRAJ42)
CAVRDRDYGGSQGNLIF

SEQ ID NO: 549868 - protein, 15 aa, Homo sapiens
  CDR3 for beta chain variable domain of TCR clone 274934 (TRBV6-1, TRBJ2-3)
CASSERGGITDTQYF

SEQ ID NO: 549869 - protein, 14 aa, Homo sapiens
  CDR3 for alpha chain variable domain of TCR clone 274935 (TRAV1-2, TRAJ16)
CAVNRFSDGQKLLF

SEQ ID NO: 549870 - protein, 14 aa, Homo sapiens
  CDR3 for beta chain variable domain of TCR clone 274935 (TRBV7-3, TRBJ2-7)
CASRSQGAAYEQYF

SEQ ID NO: 549871 - protein, 13 aa, Homo sapiens
  CDR3 for alpha chain variable domain of TCR clone 274936 (TRAV26-1, TRAJ33)
CIVRVDSNYQLIW

SEQ ID NO: 549872 - protein, 15 aa, Homo sapiens
  CDR3 for beta chain variable domain of TCR clone 274936 (TRBV7-2, TRBJ1-5)
CASSFSEGINQPQHF

SEQ ID NO: 549873 - protein, 13 aa, Homo sapiens
  CDR3 for alpha chain variable domain of TCR clone 274937 (TRAV17, TRAJ22)
CAHHSGSARQLTF

SEQ ID NO: 549874 - protein, 13 aa, Homo sapiens
  CDR3 for beta chain variable domain of TCR clone 274937 (TRBV27, TRBJ1-4)
CASSLRGDEKLFF

SEQ ID NO: 549875 - protein, 12 aa, Homo sapiens
  CDR3 for alpha chain variable domain of TCR clone 274938 (TRAV26-2, TRAJ21)
CILKGNFNKFYF

SEQ ID NO: 549876 - protein, 15 aa, Homo sapiens
  CDR3 for beta chain variable domain of TCR clone 274938 (TRBV20-1, TRBJ2-7)
CGARDRVSGMDEQYF

SEQ ID NO: 549877 - protein, 14 aa, Homo sapiens
  CDR3 for alpha chain variable domain of TCR clone 274939 (TRAV1-2, TRAJ8)
CAVREDTGFQKLVF

SEQ ID NO: 549878 - protein, 12 aa, Homo sapiens
  CDR3 for beta chain variable domain of TCR clone 274939 (TRBV28, TRBJ2-3)
CTSSLYRDTQYF

SEQ ID NO: 549879 - protein, 15 aa, Homo sapiens
  CDR3 for alpha chain variable domain of TCR clone 274940 (TRAV27, TRAJ38)
CAAHRNAGNNRKRIW

SEQ ID NO: 549880 - protein, 17 aa, Homo sapiens
  CDR3 for beta chain variable domain of TCR clone 274940 (TRBV20-1, TRBJ2-2)
CSASGSGQGGLTGELFF

SEQ ID NO: 549881 - protein, 13 aa, Homo sapiens
  CDR3 for alpha chain variable domain of TCR clone 274941 (TRAV17, TRAJ11)
CATVPGGYSTLTF

SEQ ID NO: 549882 - protein, 13 aa, Homo sapiens
  CDR3 for beta chain variable domain of TCR clone 274941 (TRBV7-3, TRBJ1-1)
CASSQDWGAEAFF

SEQ ID NO: 549883 - protein, 15 aa, Homo sapiens
  CDR3 for alpha chain variable domain of TCR clone 274942 (TRAV3, TRAJ15)
CAVRPANQAGTALIF

SEQ ID NO: 549884 - protein, 17 aa, Homo sapiens
  CDR3 for beta chain variable domain of TCR clone 274942 (TRBV20-1, TRBJ2-1)
CSASSSGLAGSYNEQFF

SEQ ID NO: 549885 - protein, 14 aa, Homo sapiens
  CDR3 for alpha chain variable domain of TCR clone 274943 (TRAV8-3, TRAJ13)
CAVGAAGGYQKVTF

SEQ ID NO: 549886 - protein, 15 aa, Homo sapiens
  CDR3 for beta chain variable domain of TCR clone 274943 (TRBV9, TRBJ1-6)
CASSVAGTGDSPLHV

SEQ ID NO: 549887 - protein, 15 aa, Homo sapiens
  CDR3 for alpha chain variable domain of TCR clone 274944 (TRAV26-1, TRAJ56)
CIVRVATGANSKLTF

SEQ ID NO: 549888 - protein, 14 aa, Homo sapiens
  CDR3 for beta chain variable domain of TCR clone 274944 (TRBV27, TRBJ2-7)
CQQSPAGGQREQYF

SEQ ID NO: 549889 - protein, 17 aa, Homo sapiens
  CDR3 for alpha chain variable domain of TCR clone 274945 (TRAV26-1, TRAJ37)
CIVRVITVSSNTGKLIF

SEQ ID NO: 549890 - protein, 14 aa, Homo sapiens
  CDR3 for beta chain variable domain of TCR clone 274945 (TRBV5-1, TRBJ2-7)
CASSRGESLYKQYF

SEQ ID NO: 549891 - protein, 20 aa, Homo sapiens
  CDR3 for alpha chain variable domain of TCR clone 274946 (TRAV26-1, TRAJ42)
CCVLLHRQTYYGGSQGNLIF

SEQ ID NO: 549892 - protein, 12 aa, Homo sapiens
  CDR3 for beta chain variable domain of TCR clone 274946 (TRBV7-3, TRBJ2-2)
CASSLPTGELFF

SEQ ID NO: 549893 - protein, 14 aa, Homo sapiens
  CDR3 for alpha chain variable domain of TCR clone 274947 (TRAV13-2, TRAJ15)
CAENPNQAGTALIF

SEQ ID NO: 549894 - protein, 16 aa, Homo sapiens
  CDR3 for beta chain variable domain of TCR clone 274947 (TRBV12-4, TRBJ1-2)
CGSSPTATGKTRGDTF

SEQ ID NO: 549895 - protein, 14 aa, Homo sapiens
  CDR3 for alpha chain variable domain of TCR clone 274948 (TRAV12-1, TRAJ26)
CVVKGSNYGQNLVF

SEQ ID NO: 549896 - protein, 17 aa, Homo sapiens
  CDR3 for beta chain variable domain of TCR clone 274948 (TRBV11-2, TRBJ2-6)
CASSQRDIFSGANVLTF

SEQ ID NO: 549897 - protein, 13 aa, Homo sapiens
  CDR3 for alpha chain variable domain of TCR clone 274949 (TRAV3, TRAJ21)
CAVREPDFNKFYF

SEQ ID NO: 549898 - protein, 19 aa, Homo sapiens
  CDR3 for beta chain variable domain of TCR clone 274949 (TRBV19, TRBJ2-2)
CASTRPGLAGGRVTGELFF

SEQ ID NO: 549899 - protein, 12 aa, Homo sapiens
  CDR3 for alpha chain variable domain of TCR clone 274950 (TRAV27, TRAJ13)
CAGVRGYQKVTF

SEQ ID NO: 549900 - protein, 13 aa, Homo sapiens
  CDR3 for beta chain variable domain of TCR clone 274950 (TRBV19, TRBJ1-2)
CASSVPGQDGYTF

SEQ ID NO: 549901 - protein, 14 aa, Homo sapiens
  CDR3 for alpha chain variable domain of TCR clone 274951 (TRAV3, TRAJ16)
CCERLKSDGQKLLF

SEQ ID NO: 549902 - protein, 15 aa, Homo sapiens
  CDR3 for beta chain variable domain of TCR clone 274951 (TRBV28, TRBJ2-7)
CASSPGGRGFYERYF

SEQ ID NO: 549903 - protein, 13 aa, Homo sapiens
  CDR3 for alpha chain variable domain of TCR clone 274952 (TRAV1-1, TRAJ31)
CASYLNNNARLMF

SEQ ID NO: 549904 - protein, 17 aa, Homo sapiens
  CDR3 for beta chain variable domain of TCR clone 274952 (TRBV24-1, TRBJ2-1)
CATSDVSTSGTYNEQFF

SEQ ID NO: 549905 - protein, 13 aa, Homo sapiens
  CDR3 for alpha chain variable domain of TCR clone 274953 (TRAV3, TRAJ21)
CAVREPDFNKFYF

SEQ ID NO: 549906 - protein, 11 aa, Homo sapiens
  CDR3 for beta chain variable domain of TCR clone 274953 (TRBV29-1, TRBJ2-5)
CSEDRTGNQYF

SEQ ID NO: 549907 - protein, 14 aa, Homo sapiens
  CDR3 for alpha chain variable domain of TCR clone 274954 (TRAV8-4, TRAJ9)
CAVRINTGGFKTIF

SEQ ID NO: 549908 - protein, 15 aa, Homo sapiens
  CDR3 for beta chain variable domain of TCR clone 274954 (TRBV10-2, TRBJ2-6)
CASSEQGTGANILTF

SEQ ID NO: 549909 - protein, 14 aa, Homo sapiens
  CDR3 for alpha chain variable domain of TCR clone 274955 (TRAV17, TRAJ54)
CATDANQGAQKLVF

SEQ ID NO: 549910 - protein, 14 aa, Homo sapiens
  CDR3 for beta chain variable domain of TCR clone 274955 (TRBV7-2, TRBJ1-1)
CASSFLTGTTEAFF

SEQ ID NO: 549911 - protein, 14 aa, Homo sapiens
  CDR3 for alpha chain variable domain of TCR clone 274956 (TRAV12-1, TRAJ30)
CVVNIGGRDDKIIF

SEQ ID NO: 549912 - protein, 15 aa, Homo sapiens
  CDR3 for beta chain variable domain of TCR clone 274956 (TRBV18, TRBJ1-2)
CASSPSSTPNYGYTF

SEQ ID NO: 549913 - protein, 12 aa, Homo sapiens
  CDR3 for alpha chain variable domain of TCR clone 274957 (TRAV13-1, TRAJ11)
CAGPSGYSTLTF

SEQ ID NO: 549914 - protein, 13 aa, Homo sapiens
  CDR3 for beta chain variable domain of TCR clone 274957 (TRBV12-4, TRBJ2-1)
CASSLSPSNESSS

SEQ ID NO: 549915 - protein, 16 aa, Homo sapiens
  CDR3 for alpha chain variable domain of TCR clone 274958 (TRAV20, TRAJ52)
CAVLRAGGTSYGKLTF

SEQ ID NO: 549916 - protein, 12 aa, Homo sapiens
  CDR3 for beta chain variable domain of TCR clone 274958 (TRBV7-6, TRBJ2-3)
CASSTGTDTQYF

SEQ ID NO: 549917 - protein, 15 aa, Homo sapiens
  CDR3 for alpha chain variable domain of TCR clone 274959 (TRAV25, TRAJ52)
CAGTSGGTSDGKLTF

SEQ ID NO: 549918 - protein, 13 aa, Homo sapiens
  CDR3 for beta chain variable domain of TCR clone 274959 (TRBV6-5, TRBJ2-5)
CASSPQGGETQYF

SEQ ID NO: 549919 - protein, 14 aa, Homo sapiens
  CDR3 for alpha chain variable domain of TCR clone 274960 (TRAV13-1, TRAJ35)
CAASKGGFGNVLHC

SEQ ID NO: 549920 - protein, 16 aa, Homo sapiens
  CDR3 for beta chain variable domain of TCR clone 274960 (TRBV2, TRBJ1-4)
CASNLVQGATNEKLFF

SEQ ID NO: 549921 - protein, 13 aa, Homo sapiens
  CDR3 for alpha chain variable domain of TCR clone 274961 (TRAV13-1, TRAJ34)
CAASKGNTDKLIF

SEQ ID NO: 549922 - protein, 17 aa, Homo sapiens
  CDR3 for beta chain variable domain of TCR clone 274961 (TRBV13, TRBJ2-3)
CASSLSRVAGGRNTQYF

SEQ ID NO: 549923 - protein, 14 aa, Homo sapiens
  CDR3 for alpha chain variable domain of TCR clone 274962 (TRAV23/DV6, TRAJ40)
CAASLTSGTYKYIF

SEQ ID NO: 549924 - protein, 12 aa, Homo sapiens
  CDR3 for beta chain variable domain of TCR clone 274962 (TRBV11-2, TRBJ2-2)
CASSLPTGELFF

SEQ ID NO: 549925 - protein, 12 aa, Homo sapiens
  CDR3 for alpha chain variable domain of TCR clone 274963 (TRAV2, TRAJ33)
CAFMDSNYQLIW

SEQ ID NO: 549926 - protein, 13 aa, Homo sapiens
  CDR3 for beta chain variable domain of TCR clone 274963 (TRBV19, TRBJ1-2)
CASSVPGQDGYTF

SEQ ID NO: 549927 - protein, 16 aa, Homo sapiens
  CDR3 for alpha chain variable domain of TCR clone 274964 (TRAV3, TRAJ37)
CAVRGKGSGNTGKLIF

SEQ ID NO: 549928 - protein, 12 aa, Homo sapiens
  CDR3 for beta chain variable domain of TCR clone 274964 (TRBV6-3, TRBJ2-3)
CASSYSTDTQYF

SEQ ID NO: 549929 - protein, 14 aa, Homo sapiens
  CDR3 for alpha chain variable domain of TCR clone 274965 (TRAV26-1, TRAJ38)
CIADNAGNNHKLIW

SEQ ID NO: 549930 - protein, 13 aa, Homo sapiens
  CDR3 for beta chain variable domain of TCR clone 274965 (TRBV19, TRBJ1-2)
CASSVPGQDGYTF

SEQ ID NO: 549931 - protein, 16 aa, Homo sapiens
  CDR3 for alpha chain variable domain of TCR clone 274966 (TRAV16, TRAJ4)
CALSRMFSGGYNKLIF

SEQ ID NO: 549932 - protein, 13 aa, Homo sapiens
  CDR3 for beta chain variable domain of TCR clone 274966 (TRBV7-7, TRBJ2-2)
CASSLTSAGELFF

SEQ ID NO: 549933 - protein, 14 aa, Homo sapiens
  CDR3 for alpha chain variable domain of TCR clone 274967 (TRAV12-2, TRAJ49)
CAVTLGLYGNQFYF

SEQ ID NO: 549934 - protein, 15 aa, Homo sapiens
  CDR3 for beta chain variable domain of TCR clone 274967 (TRBV6-1, TRBJ2-1)
CASSELRGQYNEQFF

SEQ ID NO: 549935 - protein, 11 aa, Homo sapiens
  CDR3 for alpha chain variable domain of TCR clone 274968 (TRAV2, TRAJ21)
CAVFNFNKFYF

SEQ ID NO: 549936 - protein, 13 aa, Homo sapiens
  CDR3 for beta chain variable domain of TCR clone 274968 (TRBV11-2, TRBJ2-5)
CASSFSSQETQYF

SEQ ID NO: 549937 - protein, 14 aa, Homo sapiens
  CDR3 for alpha chain variable domain of TCR clone 274969 (TRAV26-1, TRAJ38)
SIADNAGNNRKLIW

SEQ ID NO: 549938 - protein, 13 aa, Homo sapiens
  CDR3 for beta chain variable domain of TCR clone 274969 (TRBV20-1, TRBJ1-1)
CSARGGGNTEALF

SEQ ID NO: 549939 - protein, 10 aa, Homo sapiens
  CDR3 for alpha chain variable domain of TCR clone 274970 (TRAV4, TRAJ28)
CLVGDRALGL

SEQ ID NO: 549940 - protein, 14 aa, Homo sapiens
  CDR3 for beta chain variable domain of TCR clone 274970 (TRBV4-1, TRBJ2-7)
CASSPVAGGDEQYF

SEQ ID NO: 549941 - protein, 14 aa, Homo sapiens
  CDR3 for alpha chain variable domain of TCR clone 274971 (TRAV8-3, TRAJ44)
CAVGLTGTASKLTF

SEQ ID NO: 549942 - protein, 13 aa, Homo sapiens
  CDR3 for beta chain variable domain of TCR clone 274971 (TRBV7-3, TRBJ1-1)
CASSQDWGAEAFF

SEQ ID NO: 549943 - protein, 11 aa, Homo sapiens
  CDR3 for alpha chain variable domain of TCR clone 274972 (TRAV17, TRAJ9)
CATTGSFKTIF

SEQ ID NO: 549944 - protein, 15 aa, Homo sapiens
  CDR3 for beta chain variable domain of TCR clone 274972 (TRBV9, TRBJ1-6)
CASSVAGTGDSPLHF

SEQ ID NO: 549945 - protein, 12 aa, Homo sapiens
  CDR3 for alpha chain variable domain of TCR clone 274973 (TRAV3, TRAJ20)
CAVRDPDYKLSF

SEQ ID NO: 549946 - protein, 15 aa, Homo sapiens
  CDR3 for beta chain variable domain of TCR clone 274973 (TRBV9, TRBJ1-6)
CASSVAGTGDSTLHF

SEQ ID NO: 549947 - protein, 13 aa, Homo sapiens
  CDR3 for alpha chain variable domain of TCR clone 274974 (TRAV38-1, TRAJ42)
CARWGGSQGNLIF

SEQ ID NO: 549948 - protein, 17 aa, Homo sapiens
  CDR3 for beta chain variable domain of TCR clone 274974 (TRBV20-1, TRBJ2-1)
CSARDALAGVWDNEQFF

SEQ ID NO: 549949 - protein, 13 aa, Homo sapiens
  CDR3 for alpha chain variable domain of TCR clone 274975 (TRAV13-1, TRAJ5)
CAASDTGRSALTF

SEQ ID NO: 549950 - protein, 13 aa, Homo sapiens
  CDR3 for beta chain variable domain of TCR clone 274975 (TRBV27, TRBJ1-1)
CASSLSIGAEAFF

SEQ ID NO: 549951 - protein, 12 aa, Homo sapiens
  CDR3 for alpha chain variable domain of TCR clone 274976 (TRAV8-3, TRAJ20)
CALDFNDYKLSF

SEQ ID NO: 549952 - protein, 13 aa, Homo sapiens
  CDR3 for beta chain variable domain of TCR clone 274976 (TRBV5-7, TRBJ2-3)
CASSLGRTDTQYF

SEQ ID NO: 549953 - protein, 14 aa, Homo sapiens
  CDR3 for alpha chain variable domain of TCR clone 274977 (TRAV8-6, TRAJ5)
CAVSVDTGRRALTF

SEQ ID NO: 549954 - protein, 14 aa, Homo sapiens
  CDR3 for beta chain variable domain of TCR clone 274977 (TRBV6-1, TRBJ1-3)
CGSVQGGGGNTIYF

SEQ ID NO: 549955 - protein, 14 aa, Homo sapiens
  CDR3 for alpha chain variable domain of TCR clone 274978 (TRAV38-1, TRAJ45)
CAYYSGGGADGLTF

SEQ ID NO: 549956 - protein, 14 aa, Homo sapiens
  CDR3 for beta chain variable domain of TCR clone 274978 (TRBV11-2, TRBJ1-2)
CASSLGTANYGYTF

SEQ ID NO: 549957 - protein, 16 aa, Homo sapiens
  CDR3 for alpha chain variable domain of TCR clone 274979 (TRAV3, TRAJ10)
CAVRDMRAGGGNKLTF

SEQ ID NO: 549958 - protein, 16 aa, Homo sapiens
  CDR3 for beta chain variable domain of TCR clone 274979 (TRBV27, TRBJ1-1)
CASSTRTGGVGTEAFF

SEQ ID NO: 549959 - protein, 12 aa, Homo sapiens
  CDR3 for alpha chain variable domain of TCR clone 274980 (TRAV1-1, TRAJ8)
CAGGTGFQKIVF

SEQ ID NO: 549960 - protein, 12 aa, Homo sapiens
  CDR3 for beta chain variable domain of TCR clone 274980 (TRBV11-2, TRBJ2-1)
CASSPGNNEQFF

SEQ ID NO: 549961 - protein, 14 aa, Homo sapiens
  CDR3 for alpha chain variable domain of TCR clone 274981 (TRAV2, TRAJ9)
CAVEDRSGGFKTIF

SEQ ID NO: 549962 - protein, 18 aa, Homo sapiens
  CDR3 for beta chain variable domain of TCR clone 274981 (TRBV5-5, TRBJ1-5)
CASSLRQVKGSSNQPQHF

SEQ ID NO: 549963 - protein, 15 aa, Homo sapiens
  CDR3 for alpha chain variable domain of TCR clone 274982 (TRAV8-3, TRAJ37)
CAVGGLSSNTGTLIF

SEQ ID NO: 549964 - protein, 15 aa, Homo sapiens
  CDR3 for beta chain variable domain of TCR clone 274982 (TRBV10-3, TRBJ2-7)
CATREQGLRSYEQYF

SEQ ID NO: 549965 - protein, 14 aa, Homo sapiens
  CDR3 for alpha chain variable domain of TCR clone 274983 (TRAV35, TRAJ58)
CAGPEETSGSRLTF

SEQ ID NO: 549966 - protein, 13 aa, Homo sapiens
  CDR3 for beta chain variable domain of TCR clone 274983 (TRBV11-3, TRBJ2-5)
CASSSGLQETQYF

SEQ ID NO: 549967 - protein, 14 aa, Homo sapiens
  CDR3 for alpha chain variable domain of TCR clone 274984 (TRAV1-1, TRAJ27)
CTVIYNTNAGNSTF

SEQ ID NO: 549968 - protein, 15 aa, Homo sapiens
  CDR3 for beta chain variable domain of TCR clone 274984 (TRBV7-2, TRBJ2-1)
CASSSGLAGGNEQFF

SEQ ID NO: 549969 - protein, 15 aa, Homo sapiens
  CDR3 for alpha chain variable domain of TCR clone 274985 (TRAV12-1, TRAJ44)
CVVDEYTGTASKLTF

SEQ ID NO: 549970 - protein, 14 aa, Homo sapiens
  CDR3 for beta chain variable domain of TCR clone 274985 (TRBV5-1, TRBJ1-2)
CASSLAPVNYGYTF

SEQ ID NO: 549971 - protein, 16 aa, Homo sapiens
  CDR3 for alpha chain variable domain of TCR clone 274986 (TRAV30, TRAJ24)
CGTDIVDADSWGKFQF

SEQ ID NO: 549972 - protein, 13 aa, Homo sapiens
  CDR3 for beta chain variable domain of TCR clone 274986 (TRBV20-1, TRBJ1-1)
CSARGGGNTEAFF

SEQ ID NO: 549973 - protein, 16 aa, Homo sapiens
  CDR3 for alpha chain variable domain of TCR clone 274987 (TRAV30, TRAJ24)
CGTEIVDADSWGKFQF

SEQ ID NO: 549974 - protein, 17 aa, Homo sapiens
  CDR3 for beta chain variable domain of TCR clone 274987 (TRBV18, TRBJ2-6)
CASSPRQGAVGANVLTF

SEQ ID NO: 549975 - protein, 16 aa, Homo sapiens
  CDR3 for alpha chain variable domain of TCR clone 274988 (TRAV35, TRAJ28)
CAGQRYSGAGSCQLTF

SEQ ID NO: 549976 - protein, 14 aa, Homo sapiens
  CDR3 for beta chain variable domain of TCR clone 274988 (TRBV18, TRBJ2-7)
CASSPRGGAYEQYF

SEQ ID NO: 549977 - protein, 11 aa, Homo sapiens
  CDR3 for alpha chain variable domain of TCR clone 274989 (TRAV12-3, TRAJ49)
CAANTGNQFYF

SEQ ID NO: 549978 - protein, 17 aa, Homo sapiens
  CDR3 for beta chain variable domain of TCR clone 274989 (TRBV7-3, TRBJ2-3)
CASSLMKRMRGADTQYF

SEQ ID NO: 549979 - protein, 16 aa, Homo sapiens
  CDR3 for alpha chain variable domain of TCR clone 274990 (TRAV3, TRAJ10)
CAVRDMRAGGGNKLTF

SEQ ID NO: 549980 - protein, 15 aa, Homo sapiens
  CDR3 for beta chain variable domain of TCR clone 274990 (TRBV7-2, TRBJ2-7)
CASSSGLAGRREQYF

SEQ ID NO: 549981 - protein, 13 aa, Homo sapiens
  CDR3 for alpha chain variable domain of TCR clone 274991 (TRAV3, TRAJ21)
CAVREPDFNKFYF

SEQ ID NO: 549982 - protein, 15 aa, Homo sapiens
  CDR3 for beta chain variable domain of TCR clone 274991 (TRBV28, TRBJ2-4)
CAAGSGTLLMGIQYF

SEQ ID NO: 549983 - protein, 11 aa, Homo sapiens
  CDR3 for alpha chain variable domain of TCR clone 274992 (TRAV21, TRAJ9)
CAVPGGFKTTF

SEQ ID NO: 549984 - protein, 12 aa, Homo sapiens
  CDR3 for beta chain variable domain of TCR clone 274992 (TRBV20-1, TRBJ2-3)
CSARVGTDTQYF

SEQ ID NO: 549985 - protein, 15 aa, Homo sapiens
  CDR3 for alpha chain variable domain of TCR clone 274993 (TRAV10, TRAJ39)
CVVSASGNAGNMLTF

SEQ ID NO: 549986 - protein, 14 aa, Homo sapiens
  CDR3 for beta chain variable domain of TCR clone 274993 (TRBV2, TRBJ2-1)
CASSEALIYNEQFF

SEQ ID NO: 549987 - protein, 14 aa, Homo sapiens
  CDR3 for alpha chain variable domain of TCR clone 274994 (TRAV8-6, TRAJ12)
CAVKAADSSYKLIF

SEQ ID NO: 549988 - protein, 16 aa, Homo sapiens
  CDR3 for beta chain variable domain of TCR clone 274994 (TRBV28, TRBJ1-2)
CASSHGQGVYKDGYTF

SEQ ID NO: 549989 - protein, 13 aa, Homo sapiens
  CDR3 for alpha chain variable domain of TCR clone 274995 (TRAV6, TRAJ5)
CAPKATGRRALTF

SEQ ID NO: 549990 - protein, 13 aa, Homo sapiens
  CDR3 for beta chain variable domain of TCR clone 274995 (TRBV20-1, TRBJ2-7)
CSASPFSSYEQYC

SEQ ID NO: 549991 - protein, 12 aa, Homo sapiens
  CDR3 for alpha chain variable domain of TCR clone 274996 (TRAV23/DV6, TRAJ24)
CAANDSWGKFKV

SEQ ID NO: 549992 - protein, 16 aa, Homo sapiens
  CDR3 for beta chain variable domain of TCR clone 274996 (TRBV12-4, TRBJ2-5)
CASSLSTSGGKETQYF

SEQ ID NO: 549993 - protein, 13 aa, Homo sapiens
  CDR3 for alpha chain variable domain of TCR clone 274997 (TRAV8-1, TRAJ30)
CAVNSKRDDKIIF

SEQ ID NO: 549994 - protein, 13 aa, Homo sapiens
  CDR3 for beta chain variable domain of TCR clone 274997 (TRBV20-1, TRBJ1-1)
CSAPLGGGTEAFF

SEQ ID NO: 549995 - protein, 14 aa, Homo sapiens
  CDR3 for alpha chain variable domain of TCR clone 274998 (TRAV8-4, TRAJ13)
CAVTLSGGYQKVTF

SEQ ID NO: 549996 - protein, 12 aa, Homo sapiens
  CDR3 for beta chain variable domain of TCR clone 274998 (TRBV18, TRBJ2-1)
CASSSDEDEQFF

SEQ ID NO: 549997 - protein, 14 aa, Homo sapiens
  CDR3 for alpha chain variable domain of TCR clone 274999 (TRAV39, TRAJ29)
CAVARNSGNTPLVF

SEQ ID NO: 549998 - protein, 12 aa, Homo sapiens
  CDR3 for beta chain variable domain of TCR clone 274999 (TRBV10-2, TRBJ2-7)
CASSGTGYEQYF

SEQ ID NO: 549999 - protein, 14 aa, Homo sapiens
  CDR3 for alpha chain variable domain of TCR clone 275000 (TRAV12-3, TRAJ10)
SHLPLPGGGNKLTF

SEQ ID NO: 550000 - protein, 14 aa, Homo sapiens
  CDR3 for beta chain variable domain of TCR clone 275000 (TRBV25-1, TRBJ1-1)
CASTHLGGNTEAFF

SEQ ID NO: 550001 - protein, 13 aa, Homo sapiens
  CDR3 for alpha chain variable domain of TCR clone 275001 (TRAV13-2, TRAJ48)
CAEMDFGNEKLTF

SEQ ID NO: 550002 - protein, 16 aa, Homo sapiens
  CDR3 for beta chain variable domain of TCR clone 275001 (TRBV9, TRBJ2-2)
CASSAMGKGNTGELFF

SEQ ID NO: 550003 - protein, 13 aa, Homo sapiens
  CDR3 for alpha chain variable domain of TCR clone 275002 (TRAV6, TRAJ16)
CALDDSDGQKLLF

SEQ ID NO: 550004 - protein, 16 aa, Homo sapiens
  CDR3 for beta chain variable domain of TCR clone 275002 (TRBV12-3, TRBJ1-6)
CASNLQGKGSPRLLGT

SEQ ID NO: 550005 - protein, 10 aa, Homo sapiens
  CDR3 for alpha chain variable domain of TCR clone 275003 (TRAV17, TRAJ52)
SATSYGKLAF

SEQ ID NO: 550006 - protein, 13 aa, Homo sapiens
  CDR3 for beta chain variable domain of TCR clone 275003 (TRBV29-1, TRBJ2-5)
CSVGGTSAETQYF

SEQ ID NO: 550007 - protein, 14 aa, Homo sapiens
  CDR3 for alpha chain variable domain of TCR clone 275004 (TRAV12-2, TRAJ45)
CAVNIQGKADGLTF

SEQ ID NO: 550008 - protein, 18 aa, Homo sapiens
  CDR3 for beta chain variable domain of TCR clone 275004 (TRBV11-2, TRBJ2-3)
CASSLGGASRGAPNTQYF

SEQ ID NO: 550009 - protein, 10 aa, Homo sapiens
  CDR3 for alpha chain variable domain of TCR clone 275005 (TRAV16, TRAJ22)
SAMYLRQLTF

SEQ ID NO: 550010 - protein, 15 aa, Homo sapiens
  CDR3 for beta chain variable domain of TCR clone 275005 (TRBV7-9, TRBJ2-7)
CASSPGGGLTYEQYF

SEQ ID NO: 550011 - protein, 17 aa, Homo sapiens
  CDR3 for alpha chain variable domain of TCR clone 275006 (TRAV8-6, TRAJ8)
CAVKEGIENTGCQKFVF

SEQ ID NO: 550012 - protein, 12 aa, Homo sapiens
  CDR3 for beta chain variable domain of TCR clone 275006 (TRBV19, TRBJ1-4)
CASKDWPGGLFF

SEQ ID NO: 550013 - protein, 11 aa, Homo sapiens
  CDR3 for alpha chain variable domain of TCR clone 275007 (TRAV1-1, TRAJ23)
CAVRQGGKLIF

SEQ ID NO: 550014 - protein, 20 aa, Homo sapiens
  CDR3 for beta chain variable domain of TCR clone 275007 (TRBV7-8, TRBJ2-2)
CASSHLFPWPTIQITGELFF

SEQ ID NO: 550015 - protein, 21 aa, Homo sapiens
  CDR3 for alpha chain variable domain of TCR clone 275008 (TRAV8-3, TRAJ10)
CAVGHTHGRRKQTHLWDRHVA

SEQ ID NO: 550016 - protein, 10 aa, Homo sapiens
  CDR3 for beta chain variable domain of TCR clone 275008 (TRBV20-1, TRBJ2-5)
CSARFETQYF

SEQ ID NO: 550017 - protein, 14 aa, Homo sapiens
  CDR3 for alpha chain variable domain of TCR clone 275009 (TRAV1-2, TRAJ24)
CAVLTTDSWGKFPF

SEQ ID NO: 550018 - protein, 21 aa, Homo sapiens
  CDR3 for beta chain variable domain of TCR clone 275009 (TRBV6-5, TRBJ1-3)
CASSYWEKIAQGMSSGNTVYF

SEQ ID NO: 550019 - protein, 13 aa, Homo sapiens
  CDR3 for alpha chain variable domain of TCR clone 275010 (TRAV21, TRAJ20)
CAVGLRVDYKLSF

SEQ ID NO: 550020 - protein, 15 aa, Homo sapiens
  CDR3 for beta chain variable domain of TCR clone 275010 (TRBV20-1, TRBJ2-6)
CSARDRGPGANVLTF

SEQ ID NO: 550021 - protein, 13 aa, Homo sapiens
  CDR3 for alpha chain variable domain of TCR clone 275011 (TRAV12-2, TRAJ37)
RAGGSGNTGKLIF

SEQ ID NO: 550022 - protein, 14 aa, Homo sapiens
  CDR3 for beta chain variable domain of TCR clone 275011 (TRBV6-1, TRBJ2-6)
CASQQGVGANVLTF

SEQ ID NO: 550023 - protein, 12 aa, Homo sapiens
  CDR3 for alpha chain variable domain of TCR clone 275012 (TRAV13-1, TRAJ15)
CAANQAGTALIF

SEQ ID NO: 550024 - protein, 14 aa, Homo sapiens
  CDR3 for beta chain variable domain of TCR clone 275012 (TRBV20-1, TRBJ2-5)
CSARYGGLEETQYF

SEQ ID NO: 550025 - protein, 14 aa, Homo sapiens
  CDR3 for alpha chain variable domain of TCR clone 275013 (TRAV12-3, TRAJ17)
CAALFKAAGNKLTF

SEQ ID NO: 550026 - protein, 15 aa, Homo sapiens
  CDR3 for beta chain variable domain of TCR clone 275013 (TRBV18, TRBJ2-3)
CASSPLAGETDTQYF

SEQ ID NO: 550027 - protein, 16 aa, Homo sapiens
  CDR3 for alpha chain variable domain of TCR clone 275014 (TRAV30, TRAJ24)
CGIEIVDADSWGKFKF

SEQ ID NO: 550028 - protein, 14 aa, Homo sapiens
  CDR3 for beta chain variable domain of TCR clone 275014 (TRBV12-5, TRBJ2-5)
CASGSRTHQETQYF

SEQ ID NO: 550029 - protein, 10 aa, Homo sapiens
  CDR3 for alpha chain variable domain of TCR clone 275015 (TRAV30, TRAJ48)
CGIGNEKLTF

SEQ ID NO: 550030 - protein, 13 aa, Homo sapiens
  CDR3 for beta chain variable domain of TCR clone 275015 (TRBV29-1, TRBJ2-7)
CSVGPSVGYEQYF

SEQ ID NO: 550031 - protein, 15 aa, Homo sapiens
  CDR3 for alpha chain variable domain of TCR clone 275016 (TRAV13-1, TRAJ43)
CAASGGFGAGTGLTV

SEQ ID NO: 550032 - protein, 18 aa, Homo sapiens
  CDR3 for beta chain variable domain of TCR clone 275016 (TRBV11-2, TRBJ1-6)
CASSLAVQGLSLNSALHF

SEQ ID NO: 550033 - protein, 15 aa, Homo sapiens
  CDR3 for alpha chain variable domain of TCR clone 275017 (TRAV2, TRAJ9)
CAVEDRGTGGFKTIF

SEQ ID NO: 550034 - protein, 15 aa, Homo sapiens
  CDR3 for beta chain variable domain of TCR clone 275017 (TRBV7-8, TRBJ2-7)
CASSLERAGSYEQYF

SEQ ID NO: 550035 - protein, 11 aa, Homo sapiens
  CDR3 for alpha chain variable domain of TCR clone 275018 (TRAV2, TRAJ33)
CAVESNYQLIW

SEQ ID NO: 550036 - protein, 12 aa, Homo sapiens
  CDR3 for beta chain variable domain of TCR clone 275018 (TRBV5-7, TRBJ1-1)
CASSLGRGKAFF

SEQ ID NO: 550037 - protein, 13 aa, Homo sapiens
  CDR3 for alpha chain variable domain of TCR clone 275019 (TRAV12-2, TRAJ12)
CAVNWDSSYKLIF

SEQ ID NO: 550038 - protein, 17 aa, Homo sapiens
  CDR3 for beta chain variable domain of TCR clone 275019 (TRBV15, TRBJ1-5)
CATSRAPPGTRNQPQHF

SEQ ID NO: 550039 - protein, 14 aa, Homo sapiens
  CDR3 for alpha chain variable domain of TCR clone 275020 (TRAV12-3, TRAJ58)
CAMSTVTSGSRLTF

SEQ ID NO: 550040 - protein, 13 aa, Homo sapiens
  CDR3 for beta chain variable domain of TCR clone 275020 (TRBV27, TRBJ2-3)
CASSWGRTDTQYF

SEQ ID NO: 550041 - protein, 14 aa, Homo sapiens
  CDR3 for alpha chain variable domain of TCR clone 275021 (TRAV13-1, TRAJ3)
CAASKSSSASKLIF

SEQ ID NO: 550042 - protein, 13 aa, Homo sapiens
  CDR3 for beta chain variable domain of TCR clone 275021 (TRBV25-1, TRBJ2-5)
CASSESGRETQYF

SEQ ID NO: 550043 - protein, 14 aa, Homo sapiens
  CDR3 for alpha chain variable domain of TCR clone 275022 (TRAV8-3, TRAJ28)
CAVVPGAGSYQLTF

SEQ ID NO: 550044 - protein, 14 aa, Homo sapiens
  CDR3 for beta chain variable domain of TCR clone 275022 (TRBV12-5, TRBJ2-5)
CASGSRTHQETQYF

SEQ ID NO: 550045 - protein, 13 aa, Homo sapiens
  CDR3 for alpha chain variable domain of TCR clone 275023 (TRAV27, TRAJ57)
CRSAQGGSEKLAF

SEQ ID NO: 550046 - protein, 11 aa, Homo sapiens
  CDR3 for beta chain variable domain of TCR clone 275023 (TRBV11-2, TRBJ1-1)
CASSINTEAFV

SEQ ID NO: 550047 - protein, 14 aa, Homo sapiens
  CDR3 for alpha chain variable domain of TCR clone 275024 (TRAV12-2, TRAJ5)
CAVNRSTGRRALTF

SEQ ID NO: 550048 - protein, 16 aa, Homo sapiens
  CDR3 for beta chain variable domain of TCR clone 275024 (TRBV19, TRBJ2-1)
CAISKAGPSSYNEQFF

SEQ ID NO: 550049 - protein, 16 aa, Homo sapiens
  CDR3 for alpha chain variable domain of TCR clone 275025 (TRAV30, TRAJ24)
CGTEIVDADSWGKFQL

SEQ ID NO: 550050 - protein, 14 aa, Homo sapiens
  CDR3 for beta chain variable domain of TCR clone 275025 (TRBV7-2, TRBJ2-7)
CASSLYPGRYEQYF

SEQ ID NO: 550051 - protein, 16 aa, Homo sapiens
  CDR3 for alpha chain variable domain of TCR clone 275026 (TRAV30, TRAJ24)
CGTEIVDADSWGKYQC

SEQ ID NO: 550052 - protein, 14 aa, Homo sapiens
  CDR3 for beta chain variable domain of TCR clone 275026 (TRBV12-5, TRBJ2-5)
CASGSRTHQETQYF

SEQ ID NO: 550053 - protein, 17 aa, Homo sapiens
  CDR3 for alpha chain variable domain of TCR clone 275027 (TRAV3, TRAJ6)
CAVRDGLRAGGSYIPTF

SEQ ID NO: 550054 - protein, 15 aa, Homo sapiens
  CDR3 for beta chain variable domain of TCR clone 275027 (TRBV20-1, TRBJ1-1)
CSASWDRFLNTEAFF

SEQ ID NO: 550055 - protein, 13 aa, Homo sapiens
  CDR3 for alpha chain variable domain of TCR clone 275028 (TRAV12-2, TRAJ52)
CAVSGTSYGKLTF

SEQ ID NO: 550056 - protein, 17 aa, Homo sapiens
  CDR3 for beta chain variable domain of TCR clone 275028 (TRBV11-2, TRBJ2-1)
CASSLYPPGDEYNEQFF

SEQ ID NO: 550057 - protein, 13 aa, Homo sapiens
  CDR3 for alpha chain variable domain of TCR clone 275029 (TRAV38-1, TRAJ57)
CALVQGGSAKLVF

SEQ ID NO: 550058 - protein, 17 aa, Homo sapiens
  CDR3 for beta chain variable domain of TCR clone 275029 (TRBV29-1, TRBJ2-3)
CSVDSPPRGARTDTQYF

SEQ ID NO: 550059 - protein, 17 aa, Homo sapiens
  CDR3 for alpha chain variable domain of TCR clone 275030 (TRAV13-1, TRAJ31)
CAPRDRLMFGDGTQLVV

SEQ ID NO: 550060 - protein, 12 aa, Homo sapiens
  CDR3 for beta chain variable domain of TCR clone 275030 (TRBV7-9, TRBJ2-7)
CASSLEDYEQYF

SEQ ID NO: 550061 - protein, 14 aa, Homo sapiens
  CDR3 for alpha chain variable domain of TCR clone 275031 (TRAV35, TRAJ22)
CSGLRPGSARQLTF

SEQ ID NO: 550062 - protein, 15 aa, Homo sapiens
  CDR3 for beta chain variable domain of TCR clone 275031 (TRBV12-4, TRBJ2-5)
CASSPPTGLQETQYF

SEQ ID NO: 550063 - protein, 14 aa, Homo sapiens
  CDR3 for alpha chain variable domain of TCR clone 275032 (TRAV12-2, TRAJ3)
CAVSLYISASKITF

SEQ ID NO: 550064 - protein, 14 aa, Homo sapiens
  CDR3 for beta chain variable domain of TCR clone 275032 (TRBV27, TRBJ2-1)
CAGSIAETYNEQFF

SEQ ID NO: 550065 - protein, 14 aa, Homo sapiens
  CDR3 for alpha chain variable domain of TCR clone 275033 (TRAV1-2, TRAJ16)
GAVNRFSDGQKLLF

SEQ ID NO: 550066 - protein, 14 aa, Homo sapiens
  CDR3 for beta chain variable domain of TCR clone 275033 (TRBV11-2, TRBJ2-3)
CASSRLARTDTQYF

SEQ ID NO: 550067 - protein, 14 aa, Homo sapiens
  CDR3 for alpha chain variable domain of TCR clone 275034 (TRAV16, TRAJ33)
CALSAMDSNYQLIW

SEQ ID NO: 550068 - protein, 16 aa, Homo sapiens
  CDR3 for beta chain variable domain of TCR clone 275034 (TRBV25-1, TRBJ2-7)
CASSELTGGGTYEQYF

SEQ ID NO: 550069 - protein, 12 aa, Homo sapiens
  CDR3 for alpha chain variable domain of TCR clone 275035 (TRAV12-3, TRAJ54)
CGADRGAQKLVF

SEQ ID NO: 550070 - protein, 16 aa, Homo sapiens
  CDR3 for beta chain variable domain of TCR clone 275035 (TRBV3-1, TRBJ2-1)
CASSQVGGTSYNEQFF

SEQ ID NO: 550071 - protein, 14 aa, Homo sapiens
  CDR3 for alpha chain variable domain of TCR clone 275036 (TRAV16, TRAJ57)
CAIPTQCGSERLVF

SEQ ID NO: 550072 - protein, 15 aa, Homo sapiens
  CDR3 for beta chain variable domain of TCR clone 275036 (TRBV28, TRBJ1-3)
CASWGGHLSGNTIYF

SEQ ID NO: 550073 - protein, 15 aa, Homo sapiens
  CDR3 for alpha chain variable domain of TCR clone 275037 (TRAV25, TRAJ52)
CAGTSGGTSYGKLTY

SEQ ID NO: 550074 - protein, 13 aa, Homo sapiens
  CDR3 for beta chain variable domain of TCR clone 275037 (TRBV6-5, TRBJ2-5)
CASSPQGGETQYF

SEQ ID NO: 550075 - protein, 13 aa, Homo sapiens
  CDR3 for alpha chain variable domain of TCR clone 275038 (TRAV12-1, TRAJ39)
CVVPQRAGNMLTF

SEQ ID NO: 550076 - protein, 17 aa, Homo sapiens
  CDR3 for beta chain variable domain of TCR clone 275038 (TRBV4-1, TRBJ2-5)
CASSQDLTGGSIETQYF

SEQ ID NO: 550077 - protein, 16 aa, Homo sapiens
  CDR3 for alpha chain variable domain of TCR clone 275039 (TRAV1-2, TRAJ16)
CAVTGFQMARSCSLQG

SEQ ID NO: 550078 - protein, 16 aa, Homo sapiens
  CDR3 for beta chain variable domain of TCR clone 275039 (TRBV20-1, TRBJ1-4)
CSAPGQGLLTNEKLFF

SEQ ID NO: 550079 - protein, 14 aa, Homo sapiens
  CDR3 for alpha chain variable domain of TCR clone 275040 (TRAV1-2, TRAJ16)
CAVNRFSDGQKLLF

SEQ ID NO: 550080 - protein, 12 aa, Homo sapiens
  CDR3 for beta chain variable domain of TCR clone 275040 (TRBV19, TRBJ2-7)
CAITDSTYEQYF

SEQ ID NO: 550081 - protein, 12 aa, Homo sapiens
  CDR3 for alpha chain variable domain of TCR clone 275041 (TRAV25, TRAJ20)
CAGSSNDYKLSF

SEQ ID NO: 550082 - protein, 16 aa, Homo sapiens
  CDR3 for beta chain variable domain of TCR clone 275041 (TRBV7-3, TRBJ2-2)
CAGSLKRGTLSGELFF

SEQ ID NO: 550083 - protein, 13 aa, Homo sapiens
  CDR3 for alpha chain variable domain of TCR clone 275042 (TRAV9-2, TRAJ49)
CALIQIGCNQFYF

SEQ ID NO: 550084 - protein, 17 aa, Homo sapiens
  CDR3 for beta chain variable domain of TCR clone 275042 (TRBV11-2, TRBJ2-1)
CASSLYPPGVEYNEQFF

SEQ ID NO: 550085 - protein, 11 aa, Homo sapiens
  CDR3 for alpha chain variable domain of TCR clone 275043 (TRAV12-3, TRAJ41)
CAMNAREPLNF

SEQ ID NO: 550086 - protein, 16 aa, Homo sapiens
  CDR3 for beta chain variable domain of TCR clone 275043 (TRBV7-8, TRBJ2-3)
CASSTEGQRETDTQYF

SEQ ID NO: 550087 - protein, 11 aa, Homo sapiens
  CDR3 for alpha chain variable domain of TCR clone 275044 (TRAV12-3, TRAJ27)
CAMANAGKSTF

SEQ ID NO: 550088 - protein, 14 aa, Homo sapiens
  CDR3 for beta chain variable domain of TCR clone 275044 (TRBV20-1, TRBJ2-2)
CSARSGSNTGELFF

SEQ ID NO: 550089 - protein, 12 aa, Homo sapiens
  CDR3 for alpha chain variable domain of TCR clone 275045 (TRAV1-1, TRAJ39)
CAVPVVGNLLTF

SEQ ID NO: 550090 - protein, 17 aa, Homo sapiens
  CDR3 for beta chain variable domain of TCR clone 275045 (TRBV28, TRBJ2-5)
CASSAPEGDALQETQYF

SEQ ID NO: 550091 - protein, 12 aa, Homo sapiens
  CDR3 for alpha chain variable domain of TCR clone 275046 (TRAV12-3, TRAJ21)
CAMFNNFNKFYF

SEQ ID NO: 550092 - protein, 14 aa, Homo sapiens
  CDR3 for beta chain variable domain of TCR clone 275046 (TRBV28, TRBJ2-1)
CASSIQGTVWEQFF

SEQ ID NO: 550093 - protein, 12 aa, Homo sapiens
  CDR3 for alpha chain variable domain of TCR clone 275047 (TRAV29/DV5, TRAJ34)
CAASGNTDKLIF

SEQ ID NO: 550094 - protein, 19 aa, Homo sapiens
  CDR3 for beta chain variable domain of TCR clone 275047 (TRBV25-1, TRBJ2-2)
CAILVYRVDRGRKTGELFF

SEQ ID NO: 550095 - protein, 13 aa, Homo sapiens
  CDR3 for alpha chain variable domain of TCR clone 275048 (TRAV12-2, TRAJ12)
CAVNGVSSYKLIF

SEQ ID NO: 550096 - protein, 14 aa, Homo sapiens
  CDR3 for beta chain variable domain of TCR clone 275048 (TRBV18, TRBJ2-7)
CASSPRGGAYEQYF

SEQ ID NO: 550097 - protein, 13 aa, Homo sapiens
  CDR3 for alpha chain variable domain of TCR clone 275049 (TRAV23/DV6, TRAJ31)
CAARRGNNARLMF

SEQ ID NO: 550098 - protein, 15 aa, Homo sapiens
  CDR3 for beta chain variable domain of TCR clone 275049 (TRBV5-4, TRBJ2-3)
CASSLAGRVIDTQYF

SEQ ID NO: 550099 - protein, 11 aa, Homo sapiens
  CDR3 for alpha chain variable domain of TCR clone 275050 (TRAV20, TRAJ34)
CRTKGTDKLIF

SEQ ID NO: 550100 - protein, 14 aa, Homo sapiens
  CDR3 for beta chain variable domain of TCR clone 275050 (TRBV20-1, TRBJ1-1)
CSAQTRIGGTEAFF

SEQ ID NO: 550101 - protein, 17 aa, Homo sapiens
  CDR3 for alpha chain variable domain of TCR clone 275051 (TRAV13-1, TRAJ52)
CAAGRNAGSTSYGKLTF

SEQ ID NO: 550102 - protein, 13 aa, Homo sapiens
  CDR3 for beta chain variable domain of TCR clone 275051 (TRBV7-2, TRBJ1-1)
CASNLKGAKVAFF

SEQ ID NO: 550103 - protein, 16 aa, Homo sapiens
  CDR3 for alpha chain variable domain of TCR clone 275052 (TRAV3, TRAJ32)
CAVRDIGGGSTNKLIF

SEQ ID NO: 550104 - protein, 11 aa, Homo sapiens
  CDR3 for beta chain variable domain of TCR clone 275052 (TRBV12-4, TRBJ2-1)
CASSRLNEQFF

SEQ ID NO: 550105 - protein, 16 aa, Homo sapiens
  CDR3 for alpha chain variable domain of TCR clone 275053 (TRAV12-1, TRAJ43)
CVVNPHRFGAGTRLTV

SEQ ID NO: 550106 - protein, 16 aa, Homo sapiens
  CDR3 for beta chain variable domain of TCR clone 275053 (TRBV27, TRBJ2-2)
CASSSTWGGDTGELFF

SEQ ID NO: 550107 - protein, 18 aa, Homo sapiens
  CDR3 for alpha chain variable domain of TCR clone 275054 (TRAV12-3, TRAJ52)
CAMSGGGAGGTSYGKLTF

SEQ ID NO: 550108 - protein, 15 aa, Homo sapiens
  CDR3 for beta chain variable domain of TCR clone 275054 (TRBV27, TRBJ1-6)
CACSFDRGLGSPLHF

SEQ ID NO: 550109 - protein, 16 aa, Homo sapiens
  CDR3 for alpha chain variable domain of TCR clone 275055 (TRAV27, TRAJ53)
CAAPEGSGGSNYKLTF

SEQ ID NO: 550110 - protein, 19 aa, Homo sapiens
  CDR3 for beta chain variable domain of TCR clone 275055 (TRBV12-4, TRBJ2-6)
CASSLSLGQGGSGANVLTF

SEQ ID NO: 550111 - protein, 12 aa, Homo sapiens
  CDR3 for alpha chain variable domain of TCR clone 275056 (TRAV12-3, TRAJ17)
CAMTLTGNKLTF

SEQ ID NO: 550112 - protein, 11 aa, Homo sapiens
  CDR3 for beta chain variable domain of TCR clone 275056 (TRBV11-2, TRBJ1-1)
CSSSINTEAFF

SEQ ID NO: 550113 - protein, 12 aa, Homo sapiens
  CDR3 for alpha chain variable domain of TCR clone 275057 (TRAV12-1, TRAJ40)
CVVYSGTYKYIL

SEQ ID NO: 550114 - protein, 18 aa, Homo sapiens
  CDR3 for beta chain variable domain of TCR clone 275057 (TRBV7-2, TRBJ2-3)
CQSFLSRNWGGGTDTQYF

SEQ ID NO: 550115 - protein, 16 aa, Homo sapiens
  CDR3 for alpha chain variable domain of TCR clone 275058 (TRAV3, TRAJ37)
CAVRRHGLGNKGKLIF

SEQ ID NO: 550116 - protein, 14 aa, Homo sapiens
  CDR3 for beta chain variable domain of TCR clone 275058 (TRBV20-1, TRBJ2-1)
CSARGGSSYNEQFF

SEQ ID NO: 550117 - protein, 23 aa, Homo sapiens
  CDR3 for alpha chain variable domain of TCR clone 275059 (TRAV21, )
CAVMGAGNNHIQHPDPAVYQLRD

SEQ ID NO: 550118 - protein, 13 aa, Homo sapiens
  CDR3 for beta chain variable domain of TCR clone 275059 (TRBV7-3, TRBJ2-5)
CASSIGFFETQYF

SEQ ID NO: 550119 - protein, 13 aa, Homo sapiens
  CDR3 for alpha chain variable domain of TCR clone 275060 (TRAV21, TRAJ27)
CAARPGNAGKSTF

SEQ ID NO: 550120 - protein, 12 aa, Homo sapiens
  CDR3 for beta chain variable domain of TCR clone 275060 (TRBV24-1, TRBJ2-3)
CATSDSTDTQYF

SEQ ID NO: 550121 - protein, 12 aa, Homo sapiens
  CDR3 for alpha chain variable domain of TCR clone 275061 (TRAV12-1, TRAJ31)
CVSWNNNAILMF

SEQ ID NO: 550122 - protein, 15 aa, Homo sapiens
  CDR3 for beta chain variable domain of TCR clone 275061 (TRBV7-2, TRBJ1-5)
CASSLDRGQDQPQHF

SEQ ID NO: 550123 - protein, 14 aa, Homo sapiens
  CDR3 for alpha chain variable domain of TCR clone 275062 (TRAV12-3, TRAJ33)
CAMSAGDSKYQLIW

SEQ ID NO: 550124 - protein, 14 aa, Homo sapiens
  CDR3 for beta chain variable domain of TCR clone 275062 (TRBV20-1, TRBJ2-1)
CSAQIGGSANEQFF

SEQ ID NO: 550125 - protein, 15 aa, Homo sapiens
  CDR3 for alpha chain variable domain of TCR clone 275063 (TRAV17, TRAJ57)
CATGPSQGGSETLVF

SEQ ID NO: 550126 - protein, 16 aa, Homo sapiens
  CDR3 for beta chain variable domain of TCR clone 275063 (TRBV12-4, TRBJ1-5)
CASSRPVGGSKQPQHF

SEQ ID NO: 550127 - protein, 12 aa, Homo sapiens
  CDR3 for alpha chain variable domain of TCR clone 275064 (TRAV12-2, TRAJ10)
WGATGGGNKLTF

SEQ ID NO: 550128 - protein, 16 aa, Homo sapiens
  CDR3 for beta chain variable domain of TCR clone 275064 (TRBV6-4, TRBJ1-2)
CASSEAVGDPNYGDTF

SEQ ID NO: 550129 - protein, 12 aa, Homo sapiens
  CDR3 for alpha chain variable domain of TCR clone 275065 (TRAV12-1, TRAJ40)
CVVYSGTYKYIF

SEQ ID NO: 550130 - protein, 15 aa, Homo sapiens
  CDR3 for beta chain variable domain of TCR clone 275065 (TRBV18, TRBJ2-1)
CASLPDRGRDNEQFF

SEQ ID NO: 550131 - protein, 14 aa, Homo sapiens
  CDR3 for alpha chain variable domain of TCR clone 275066 (TRAV13-2, TRAJ17)
FAENSKAAGNKITF

SEQ ID NO: 550132 - protein, 11 aa, Homo sapiens
  CDR3 for beta chain variable domain of TCR clone 275066 (TRBV6-3, TRBJ2-3)
CATGQADTQYF

SEQ ID NO: 550133 - protein, 11 aa, Homo sapiens
  CDR3 for alpha chain variable domain of TCR clone 275067 (TRAV16, TRAJ29)
WAPSGNTPLVF

SEQ ID NO: 550134 - protein, 15 aa, Homo sapiens
  CDR3 for beta chain variable domain of TCR clone 275067 (TRBV5-6, TRBJ2-7)
CASSPYVEGSYEQYF

SEQ ID NO: 550135 - protein, 11 aa, Homo sapiens
  CDR3 for alpha chain variable domain of TCR clone 275068 (TRAV2, TRAJ13)
CASGCYQKVTF

SEQ ID NO: 550136 - protein, 15 aa, Homo sapiens
  CDR3 for beta chain variable domain of TCR clone 275068 (TRBV4-1, TRBJ2-5)
CASSQWDLYQETQYF

SEQ ID NO: 550137 - protein, 14 aa, Homo sapiens
  CDR3 for alpha chain variable domain of TCR clone 275069 (TRAV16, TRAJ33)
CALSAMDSNYQLIW

SEQ ID NO: 550138 - protein, 12 aa, Homo sapiens
  CDR3 for beta chain variable domain of TCR clone 275069 (TRBV18, TRBJ2-1)
CASSSDEDEQFF

SEQ ID NO: 550139 - protein, 15 aa, Homo sapiens
  CDR3 for alpha chain variable domain of TCR clone 275070 (TRAV8-3, TRAJ45)
CASSYSGGGADGPTF

SEQ ID NO: 550140 - protein, 16 aa, Homo sapiens
  CDR3 for beta chain variable domain of TCR clone 275070 (TRBV7-9, TRBJ2-2)
CASSGFGGANTGELFF

SEQ ID NO: 550141 - protein, 11 aa, Homo sapiens
  CDR3 for alpha chain variable domain of TCR clone 275071 (TRAV3, TRAJ21)
CAVGNFSKFYF

SEQ ID NO: 550142 - protein, 15 aa, Homo sapiens
  CDR3 for beta chain variable domain of TCR clone 275071 (TRBV29-1, TRBJ2-1)
CSVEGGPASYNEKFF

SEQ ID NO: 550143 - protein, 11 aa, Homo sapiens
  CDR3 for alpha chain variable domain of TCR clone 275072 (TRAV17, TRAJ9)
CATTGGFKTIF

SEQ ID NO: 550144 - protein, 15 aa, Homo sapiens
  CDR3 for beta chain variable domain of TCR clone 275072 (TRBV11-2, TRBJ2-3)
CASRGAGLAMVAQYF

SEQ ID NO: 550145 - protein, 15 aa, Homo sapiens
  CDR3 for alpha chain variable domain of TCR clone 275073 (TRAV2, TRAJ9)
CAVEDRGTGGFKTIF

SEQ ID NO: 550146 - protein, 14 aa, Homo sapiens
  CDR3 for beta chain variable domain of TCR clone 275073 (TRBV7-2, TRBJ2-1)
CASSLGVGYNEQFF

SEQ ID NO: 550147 - protein, 12 aa, Homo sapiens
  CDR3 for alpha chain variable domain of TCR clone 275074 (TRAV30, TRAJ43)
CGTEERGNDMRF

SEQ ID NO: 550148 - protein, 17 aa, Homo sapiens
  CDR3 for beta chain variable domain of TCR clone 275074 (TRBV7-8, TRBJ2-6)
CASSAGTGGAGANDLTF

SEQ ID NO: 550149 - protein, 13 aa, Homo sapiens
  CDR3 for alpha chain variable domain of TCR clone 275075 (TRAV12-1, TRAJ39)
CGDDNNAGNMLTF

SEQ ID NO: 550150 - protein, 16 aa, Homo sapiens
  CDR3 for beta chain variable domain of TCR clone 275075 (TRBV7-7, TRBJ2-1)
CASSPGLAGGFNEQFF

SEQ ID NO: 550151 - protein, 15 aa, Homo sapiens
  CDR3 for alpha chain variable domain of TCR clone 275076 (TRAV8-3, TRAJ15)
CAVGAPNHAGTALIF

SEQ ID NO: 550152 - protein, 14 aa, Homo sapiens
  CDR3 for beta chain variable domain of TCR clone 275076 (TRBV20-1, TRBJ2-1)
CSPNDEASYNEQFF

SEQ ID NO: 550153 - protein, 14 aa, Homo sapiens
  CDR3 for alpha chain variable domain of TCR clone 275077 (TRAV29/DV5, TRAJ29)
CAARSNSGNTPLVF

SEQ ID NO: 550154 - protein, 17 aa, Homo sapiens
  CDR3 for beta chain variable domain of TCR clone 275077 (TRBV4-2, TRBJ2-1)
CASSHVSGLAMNNEQFF

SEQ ID NO: 550155 - protein, 17 aa, Homo sapiens
  CDR3 for alpha chain variable domain of TCR clone 275078 (TRAV12-2, TRAJ6)
CAPQGPPRAGGSYTPTF

SEQ ID NO: 550156 - protein, 16 aa, Homo sapiens
  CDR3 for beta chain variable domain of TCR clone 275078 (TRBV19, TRBJ2-2)
CASSTARASNTGELFF

SEQ ID NO: 550157 - protein, 14 aa, Homo sapiens
  CDR3 for alpha chain variable domain of TCR clone 275079 (TRAV3, TRAJ33)
CAVRDMGSNYQLIW

SEQ ID NO: 550158 - protein, 17 aa, Homo sapiens
  CDR3 for beta chain variable domain of TCR clone 275079 (TRBV19, TRBJ2-1)
CASSIWSAQPTNNEQFF

SEQ ID NO: 550159 - protein, 14 aa, Homo sapiens
  CDR3 for alpha chain variable domain of TCR clone 275080 (TRAV8-3, TRAJ15)
CAVGSHQAGTALIF

SEQ ID NO: 550160 - protein, 15 aa, Homo sapiens
  CDR3 for beta chain variable domain of TCR clone 275080 (TRBV27, TRBJ2-1)
CASSNGGGSSNEQFF

SEQ ID NO: 550161 - protein, 11 aa, Homo sapiens
  CDR3 for alpha chain variable domain of TCR clone 275081 (TRAV21, TRAJ9)
CAVSGGFKTIF

SEQ ID NO: 550162 - protein, 12 aa, Homo sapiens
  CDR3 for beta chain variable domain of TCR clone 275081 (TRBV20-1, TRBJ2-3)
CSARVGTDTQYF

SEQ ID NO: 550163 - protein, 16 aa, Homo sapiens
  CDR3 for alpha chain variable domain of TCR clone 275082 (TRAV30, TRAJ44)
CGTEDKRTGTASKLTF

SEQ ID NO: 550164 - protein, 20 aa, Homo sapiens
  CDR3 for beta chain variable domain of TCR clone 275082 (TRBV28, TRBJ2-1)
CASTPIGRSPGLAGGNEQFF

SEQ ID NO: 550165 - protein, 15 aa, Homo sapiens
  CDR3 for alpha chain variable domain of TCR clone 275083 (TRAV27, TRAJ28)
ASTPHSGAGSYQLTF

SEQ ID NO: 550166 - protein, 15 aa, Homo sapiens
  CDR3 for beta chain variable domain of TCR clone 275083 (TRBV2, TRBJ2-2)
CASSRETVGTGELFF

SEQ ID NO: 550167 - protein, 16 aa, Homo sapiens
  CDR3 for alpha chain variable domain of TCR clone 275084 (TRAV17, TRAJ52)
CSTGIIGGTSYGKLTF

SEQ ID NO: 550168 - protein, 14 aa, Homo sapiens
  CDR3 for beta chain variable domain of TCR clone 275084 (TRBV7-3, TRBJ2-2)
CASSSGGYAGELFF

SEQ ID NO: 550169 - protein, 12 aa, Homo sapiens
  CDR3 for alpha chain variable domain of TCR clone 275085 (TRAV21, TRAJ31)
CVLAGNNARLMF

SEQ ID NO: 550170 - protein, 16 aa, Homo sapiens
  CDR3 for beta chain variable domain of TCR clone 275085 (TRBV27, TRBJ2-5)
CASSFGPGGTKETQYV

SEQ ID NO: 550171 - protein, 17 aa, Homo sapiens
  CDR3 for alpha chain variable domain of TCR clone 275086 (TRAV38-2/DV8, TRAJ28)
CAYRFAYSGAGSYQLTF

SEQ ID NO: 550172 - protein, 15 aa, Homo sapiens
  CDR3 for beta chain variable domain of TCR clone 275086 (TRBV6-5, TRBJ1-5)
CASSYSRRSNQPQHF

SEQ ID NO: 550173 - protein, 15 aa, Homo sapiens
  CDR3 for alpha chain variable domain of TCR clone 275087 (TRAV27, TRAJ38)
CAARRNARNNRKLIW

SEQ ID NO: 550174 - protein, 14 aa, Homo sapiens
  CDR3 for beta chain variable domain of TCR clone 275087 (TRBV6-1, TRBJ1-3)
CASVQGGGGNTIYF

SEQ ID NO: 550175 - protein, 11 aa, Homo sapiens
  CDR3 for alpha chain variable domain of TCR clone 275088 (TRAV12-1, TRAJ30)
CVVNGQDKIIF

SEQ ID NO: 550176 - protein, 12 aa, Homo sapiens
  CDR3 for beta chain variable domain of TCR clone 275088 (TRBV27, TRBJ2-2)
CVSKLLTGELFF

SEQ ID NO: 550177 - protein, 14 aa, Homo sapiens
  CDR3 for alpha chain variable domain of TCR clone 275089 (TRAV4, TRAJ17)
RLVGDMAAGNKLTF

SEQ ID NO: 550178 - protein, 14 aa, Homo sapiens
  CDR3 for beta chain variable domain of TCR clone 275089 (TRBV4-1, TRBJ2-7)
CASSPVAGGDEQYF

SEQ ID NO: 550179 - protein, 16 aa, Homo sapiens
  CDR3 for alpha chain variable domain of TCR clone 275090 (TRAV30, TRAJ24)
CGTEIVDADSWGKFQF

SEQ ID NO: 550180 - protein, 15 aa, Homo sapiens
  CDR3 for beta chain variable domain of TCR clone 275090 (TRBV18, TRBJ2-1)
CTSLPDRGRDNEQFF

SEQ ID NO: 550181 - protein, 13 aa, Homo sapiens
  CDR3 for alpha chain variable domain of TCR clone 275091 (TRAV13-1, TRAJ39)
CSKYSNAGNMLTF

SEQ ID NO: 550182 - protein, 16 aa, Homo sapiens
  CDR3 for beta chain variable domain of TCR clone 275091 (TRBV7-9, TRBJ2-7)
CASRNHGGQEKYEQYF

SEQ ID NO: 550183 - protein, 23 aa, Homo sapiens
  CDR3 for alpha chain variable domain of TCR clone 275092 (TRAV26-1, TRAJ38)
CIVRPLNAGNNHIQNPDPAVYQL

SEQ ID NO: 550184 - protein, 14 aa, Homo sapiens
  CDR3 for beta chain variable domain of TCR clone 275092 (TRBV18, TRBJ2-5)
CASSPGVSQETQYF

SEQ ID NO: 550185 - protein, 11 aa, Homo sapiens
  CDR3 for alpha chain variable domain of TCR clone 275093 (TRAV1-2, TRAJ40)
CAVPGTYKYIF

SEQ ID NO: 550186 - protein, 13 aa, Homo sapiens
  CDR3 for beta chain variable domain of TCR clone 275093 (TRBV27, TRBJ1-4)
CASSLMGDEKLFL

SEQ ID NO: 550187 - protein, 16 aa, Homo sapiens
  CDR3 for alpha chain variable domain of TCR clone 275094 (TRAV27, TRAJ13)
FAGAKSDSGGYQKVTF

SEQ ID NO: 550188 - protein, 15 aa, Homo sapiens
  CDR3 for beta chain variable domain of TCR clone 275094 (TRBV29-1, TRBJ2-1)
CSVGRHALFYNEQLF

SEQ ID NO: 550189 - protein, 11 aa, Homo sapiens
  CDR3 for alpha chain variable domain of TCR clone 275095 (TRAV8-6, TRAJ23)
CAVISGGKLIF

SEQ ID NO: 550190 - protein, 14 aa, Homo sapiens
  CDR3 for beta chain variable domain of TCR clone 275095 (TRBV12-5, TRBJ2-5)
CASGSRTHQGTQYF

SEQ ID NO: 550191 - protein, 13 aa, Homo sapiens
  CDR3 for alpha chain variable domain of TCR clone 275096 (TRAV29/DV5, TRAJ48)
CAARLFGNEKLTF

SEQ ID NO: 550192 - protein, 15 aa, Homo sapiens
  CDR3 for beta chain variable domain of TCR clone 275096 (TRBV20-1, TRBJ1-1)
CSAKPGQKMNTEAFF

SEQ ID NO: 550193 - protein, 16 aa, Homo sapiens
  CDR3 for alpha chain variable domain of TCR clone 275097 (TRAV17, TRAJ35)
CATAEGGIGFGNVLHC

SEQ ID NO: 550194 - protein, 14 aa, Homo sapiens
  CDR3 for beta chain variable domain of TCR clone 275097 (TRBV24-1, TRBJ1-1)
CDTSIPRGDTEAFF

SEQ ID NO: 550195 - protein, 16 aa, Homo sapiens
  CDR3 for alpha chain variable domain of TCR clone 275098 (TRAV30, TRAJ24)
CGTEIVDADSWGQFQF

SEQ ID NO: 550196 - protein, 15 aa, Homo sapiens
  CDR3 for beta chain variable domain of TCR clone 275098 (TRBV15, TRBJ1-5)
CATSRDPVSNQPQHF

SEQ ID NO: 550197 - protein, 11 aa, Homo sapiens
  CDR3 for alpha chain variable domain of TCR clone 275099 (TRAV1-1, TRAJ23)
CAVRQGGKLIF

SEQ ID NO: 550198 - protein, 20 aa, Homo sapiens
  CDR3 for beta chain variable domain of TCR clone 275099 (TRBV7-8, TRBJ2-2)
CASSHLFAGPTVHITGELFF

SEQ ID NO: 550199 - protein, 16 aa, Homo sapiens
  CDR3 for alpha chain variable domain of TCR clone 275100 (TRAV23/DV6, TRAJ9)
CAASIGGNTGGFKTIF

SEQ ID NO: 550200 - protein, 12 aa, Homo sapiens
  CDR3 for beta chain variable domain of TCR clone 275100 (TRBV6-3, TRBJ2-7)
CASSERGFEQYF

SEQ ID NO: 550201 - protein, 12 aa, Homo sapiens
  CDR3 for alpha chain variable domain of TCR clone 275101 (TRAV24, TRAJ37)
CASSSNTGKLIF

SEQ ID NO: 550202 - protein, 18 aa, Homo sapiens
  CDR3 for beta chain variable domain of TCR clone 275101 (TRBV4-3, TRBJ1-6)
CASSQETPASSYNSPLHF

SEQ ID NO: 550203 - protein, 17 aa, Homo sapiens
  CDR3 for alpha chain variable domain of TCR clone 275102 (TRAV38-2/DV8, TRAJ54)
CAYRGGWGSQGAQKLVF

SEQ ID NO: 550204 - protein, 14 aa, Homo sapiens
  CDR3 for beta chain variable domain of TCR clone 275102 (TRBV20-1, TRBJ2-3)
CSARDGVGTDTQYF

SEQ ID NO: 550205 - protein, 13 aa, Homo sapiens
  CDR3 for alpha chain variable domain of TCR clone 275103 (TRAV30, TRAJ26)
CGTEIPLGQNFVF

SEQ ID NO: 550206 - protein, 14 aa, Homo sapiens
  CDR3 for beta chain variable domain of TCR clone 275103 (TRBV7-3, TRBJ1-1)
CASSLKGGNTEAFF

SEQ ID NO: 550207 - protein, 16 aa, Homo sapiens
  CDR3 for alpha chain variable domain of TCR clone 275104 (TRAV17, TRAJ52)
CATSNAGGTSYGKLPF

SEQ ID NO: 550208 - protein, 13 aa, Homo sapiens
  CDR3 for beta chain variable domain of TCR clone 275104 (TRBV27, TRBJ1-6)
CASSLVLVSPLHF

SEQ ID NO: 550209 - protein, 14 aa, Homo sapiens
  CDR3 for alpha chain variable domain of TCR clone 275105 (TRAV35, TRAJ33)
WAGSSQDSNYQLIW

SEQ ID NO: 550210 - protein, 15 aa, Homo sapiens
  CDR3 for beta chain variable domain of TCR clone 275105 (TRBV20-1, TRBJ2-7)
CSAESGTSGAYEQYF

SEQ ID NO: 550211 - protein, 13 aa, Homo sapiens
  CDR3 for alpha chain variable domain of TCR clone 275106 (TRAV12-1, TRAJ7)
CVVNMRGNNRLAF

SEQ ID NO: 550212 - protein, 13 aa, Homo sapiens
  CDR3 for beta chain variable domain of TCR clone 275106 (TRBV7-3, TRBJ1-2)
CASSLKRGYGYTF

SEQ ID NO: 550213 - protein, 15 aa, Homo sapiens
  CDR3 for alpha chain variable domain of TCR clone 275107 (TRAV2, TRAJ9)
CPVEDRGTGGFKTIF

SEQ ID NO: 550214 - protein, 13 aa, Homo sapiens
  CDR3 for beta chain variable domain of TCR clone 275107 (TRBV19, TRBJ1-2)
CASSVPGQDGYTF

SEQ ID NO: 550215 - protein, 14 aa, Homo sapiens
  CDR3 for alpha chain variable domain of TCR clone 275108 (TRAV12-2, TRAJ40)
CAVKITSGTYKYIF

SEQ ID NO: 550216 - protein, 20 aa, Homo sapiens
  CDR3 for beta chain variable domain of TCR clone 275108 (TRBV28, TRBJ2-1)
CASTPIGRSPGLAGGNEQFF

SEQ ID NO: 550217 - protein, 16 aa, Homo sapiens
  CDR3 for alpha chain variable domain of TCR clone 275109 (TRAV14/DV4, TRAJ54)
CAMREGRIQGAQKLVF

SEQ ID NO: 550218 - protein, 14 aa, Homo sapiens
  CDR3 for beta chain variable domain of TCR clone 275109 (TRBV10-3, TRBJ2-1)
CAISSDLAYNEQFF

SEQ ID NO: 550219 - protein, 14 aa, Homo sapiens
  CDR3 for alpha chain variable domain of TCR clone 275110 (TRAV38-1, TRAJ40)
CALRPTSGTYKYIF

SEQ ID NO: 550220 - protein, 13 aa, Homo sapiens
  CDR3 for beta chain variable domain of TCR clone 275110 (TRBV7-9, TRBJ1-2)
CASSLKQSYGYTF

SEQ ID NO: 550221 - protein, 15 aa, Homo sapiens
  CDR3 for alpha chain variable domain of TCR clone 275111 (TRAV3, TRAJ5)
CAVRDLDTGRRALTF

SEQ ID NO: 550222 - protein, 13 aa, Homo sapiens
  CDR3 for beta chain variable domain of TCR clone 275111 (TRBV12-4, TRBJ2-7)
CASSPTETNEQYF

SEQ ID NO: 550223 - protein, 13 aa, Homo sapiens
  CDR3 for alpha chain variable domain of TCR clone 275112 (TRAV23/DV6, TRAJ49)
CAATLRPGNQLYF

SEQ ID NO: 550224 - protein, 14 aa, Homo sapiens
  CDR3 for beta chain variable domain of TCR clone 275112 (TRBV7-2, TRBJ2-6)
CASRQSSGANVLTF

SEQ ID NO: 550225 - protein, 11 aa, Homo sapiens
  CDR3 for alpha chain variable domain of TCR clone 275113 (TRAV17, TRAJ39)
CATNPYNMLTF

SEQ ID NO: 550226 - protein, 13 aa, Homo sapiens
  CDR3 for beta chain variable domain of TCR clone 275113 (TRBV7-8, TRBJ2-1)
CASTRYAVDEQFF

SEQ ID NO: 550227 - protein, 12 aa, Homo sapiens
  CDR3 for alpha chain variable domain of TCR clone 275114 (TRAV8-3, TRAJ26)
CAGDNYGKNFVF

SEQ ID NO: 550228 - protein, 15 aa, Homo sapiens
  CDR3 for beta chain variable domain of TCR clone 275114 (TRBV5-1, TRBJ2-3)
CASSVTSGSTDTQYF

SEQ ID NO: 550229 - protein, 18 aa, Homo sapiens
  CDR3 for alpha chain variable domain of TCR clone 275115 (TRAV21, TRAJ52)
CAVRPSPAGGTSYGKLTF

SEQ ID NO: 550230 - protein, 14 aa, Homo sapiens
  CDR3 for beta chain variable domain of TCR clone 275115 (TRBV7-6, TRBJ1-6)
CASSQAGGGSPLHF

SEQ ID NO: 550231 - protein, 12 aa, Homo sapiens
  CDR3 for alpha chain variable domain of TCR clone 275116 (TRAV8-3, TRAJ26)
CAGDNYGQNLVF

SEQ ID NO: 550232 - protein, 15 aa, Homo sapiens
  CDR3 for beta chain variable domain of TCR clone 275116 (TRBV6-1, TRBJ1-1)
CASRTPGQLNTEAFF

SEQ ID NO: 550233 - protein, 15 aa, Homo sapiens
  CDR3 for alpha chain variable domain of TCR clone 275117 (TRAV12-1, TRAJ44)
CVADLPTGTASKLTF

SEQ ID NO: 550234 - protein, 18 aa, Homo sapiens
  CDR3 for beta chain variable domain of TCR clone 275117 (TRBV5-5, TRBJ1-5)
CASSLRQVKGSSNQPQHF

SEQ ID NO: 550235 - protein, 13 aa, Homo sapiens
  CDR3 for alpha chain variable domain of TCR clone 275118 (TRAV12-3, TRAJ33)
CAMSVNSNYQLIW

SEQ ID NO: 550236 - protein, 13 aa, Homo sapiens
  CDR3 for beta chain variable domain of TCR clone 275118 (TRBV28, TRBJ2-7)
CASSLPSRYEQYF

SEQ ID NO: 550237 - protein, 12 aa, Homo sapiens
  CDR3 for alpha chain variable domain of TCR clone 275119 (TRAV13-1, TRAJ21)
CAAKEGFNKFYF

SEQ ID NO: 550238 - protein, 13 aa, Homo sapiens
  CDR3 for beta chain variable domain of TCR clone 275119 (TRBV12-4, TRBJ2-2)
CASSITRSGELFF

SEQ ID NO: 550239 - protein, 14 aa, Homo sapiens
  CDR3 for alpha chain variable domain of TCR clone 275120 (TRAV26-1, TRAJ34)
CIVRVAYNTDKLIF

SEQ ID NO: 550240 - protein, 20 aa, Homo sapiens
  CDR3 for beta chain variable domain of TCR clone 275120 (TRBV7-8, TRBJ2-2)
CASSHLFPGPTIHITGELFF

SEQ ID NO: 550241 - protein, 14 aa, Homo sapiens
  CDR3 for alpha chain variable domain of TCR clone 275121 (TRAV13-1, TRAJ39)
CAASEGNAGNMLTF

SEQ ID NO: 550242 - protein, 14 aa, Homo sapiens
  CDR3 for beta chain variable domain of TCR clone 275121 (TRBV7-9, TRBJ2-2)
CASSVGHRTGELFF

SEQ ID NO: 550243 - protein, 13 aa, Homo sapiens
  CDR3 for alpha chain variable domain of TCR clone 275122 (TRAV21, TRAJ27)
CAARPGNAGKSTL

SEQ ID NO: 550244 - protein, 13 aa, Homo sapiens
  CDR3 for beta chain variable domain of TCR clone 275122 (TRBV18, TRBJ2-7)
CASQSGGGYEQYF

SEQ ID NO: 550245 - protein, 15 aa, Homo sapiens
  CDR3 for alpha chain variable domain of TCR clone 275123 (TRAV12-3, TRAJ6)
CAMSPASGGSYIPTF

SEQ ID NO: 550246 - protein, 13 aa, Homo sapiens
  CDR3 for beta chain variable domain of TCR clone 275123 (TRBV20-1, TRBJ1-5)
CSASPRANQPQHF

SEQ ID NO: 550247 - protein, 11 aa, Homo sapiens
  CDR3 for alpha chain variable domain of TCR clone 275124 (TRAV13-1, TRAJ6)
CATLGSYIPIF

SEQ ID NO: 550248 - protein, 13 aa, Homo sapiens
  CDR3 for beta chain variable domain of TCR clone 275124 (TRBV6-6, TRBJ2-1)
CANSLHQGDEQFF

SEQ ID NO: 550249 - protein, 20 aa, Homo sapiens
  CDR3 for alpha chain variable domain of TCR clone 275125 (TRAV8-3, TRAJ44)
LSTSVLWVRLYTGTASKLTF

SEQ ID NO: 550250 - protein, 13 aa, Homo sapiens
  CDR3 for beta chain variable domain of TCR clone 275125 (TRBV4-2, TRBJ1-1)
CASSQAGNTEAFF

SEQ ID NO: 550251 - protein, 18 aa, Homo sapiens
  CDR3 for alpha chain variable domain of TCR clone 275126 (TRAV26-1, TRAJ52)
CIVRVEGAGGTSYGKLTF

SEQ ID NO: 550252 - protein, 16 aa, Homo sapiens
  CDR3 for beta chain variable domain of TCR clone 275126 (TRBV13, TRBJ2-2)
CASSPRTGEHTGELFF

SEQ ID NO: 550253 - protein, 12 aa, Homo sapiens
  CDR3 for alpha chain variable domain of TCR clone 275127 (TRAV8-3, TRAJ20)
CAVGANDYKLSF

SEQ ID NO: 550254 - protein, 15 aa, Homo sapiens
  CDR3 for beta chain variable domain of TCR clone 275127 (TRBV19, TRBJ2-2)
CQPISRAGATGELFF

SEQ ID NO: 550255 - protein, 15 aa, Homo sapiens
  CDR3 for alpha chain variable domain of TCR clone 275128 (TRAV16, TRAJ16)
CSKWPGHRDDQKLLF

SEQ ID NO: 550256 - protein, 14 aa, Homo sapiens
  CDR3 for beta chain variable domain of TCR clone 275128 (TRBV7-9, TRBJ2-4)
CASTTGGAKNIQYF

SEQ ID NO: 550257 - protein, 12 aa, Homo sapiens
  CDR3 for alpha chain variable domain of TCR clone 275129 (TRAV12-3, TRAJ17)
FAMTLTGNKLTF

SEQ ID NO: 550258 - protein, 16 aa, Homo sapiens
  CDR3 for beta chain variable domain of TCR clone 275129 (TRBV13, TRBJ2-2)
CASSPRTGEHTGELFF

SEQ ID NO: 550259 - protein, 14 aa, Homo sapiens
  CDR3 for alpha chain variable domain of TCR clone 275130 (TRAV13-1, TRAJ35)
CAASKGSFGNVLHC

SEQ ID NO: 550260 - protein, 13 aa, Homo sapiens
  CDR3 for beta chain variable domain of TCR clone 275130 (TRBV7-3, TRBJ1-1)
CASSQDWGAEAFV

SEQ ID NO: 550261 - protein, 16 aa, Homo sapiens
  CDR3 for alpha chain variable domain of TCR clone 275131 (TRAV12-3, TRAJ37)
CAMSAYSSSNTGKLIF

SEQ ID NO: 550262 - protein, 14 aa, Homo sapiens
  CDR3 for beta chain variable domain of TCR clone 275131 (TRBV7-2, TRBJ2-7)
CASSPKTSFYEQYF

SEQ ID NO: 550263 - protein, 15 aa, Homo sapiens
  CDR3 for alpha chain variable domain of TCR clone 275132 (TRAV3, TRAJ22)
CAVRDRGGSARQLTF

SEQ ID NO: 550264 - protein, 11 aa, Homo sapiens
  CDR3 for beta chain variable domain of TCR clone 275132 (TRBV4-1, TRBJ1-2)
CASSGRNGYTF

SEQ ID NO: 550265 - protein, 17 aa, Homo sapiens
  CDR3 for alpha chain variable domain of TCR clone 275133 (TRAV3, TRAJ42)
CAVRDRDYGGNQGNLIF

SEQ ID NO: 550266 - protein, 18 aa, Homo sapiens
  CDR3 for beta chain variable domain of TCR clone 275133 (TRBV20-1, TRBJ2-3)
CSASGLAGGPGTTDTQYF

SEQ ID NO: 550267 - protein, 13 aa, Homo sapiens
  CDR3 for alpha chain variable domain of TCR clone 275134 (TRAV21, TRAJ20)
CAVGVFADYKLSF

SEQ ID NO: 550268 - protein, 16 aa, Homo sapiens
  CDR3 for beta chain variable domain of TCR clone 275134 (TRBV4-3, TRBJ2-1)
CASSPALDRGVNEQFF

SEQ ID NO: 550269 - protein, 17 aa, Homo sapiens
  CDR3 for alpha chain variable domain of TCR clone 275135 (TRAV17, TRAJ52)
CATDRNAGGTSYGKLTF

SEQ ID NO: 550270 - protein, 15 aa, Homo sapiens
  CDR3 for beta chain variable domain of TCR clone 275135 (TRBV4-1, TRBJ2-5)
CASSQWDLYQETQYF

SEQ ID NO: 550271 - protein, 16 aa, Homo sapiens
  CDR3 for alpha chain variable domain of TCR clone 275136 (TRAV26-1, TRAJ23)
CIVRPHGNNQGGKLIV

SEQ ID NO: 550272 - protein, 14 aa, Homo sapiens
  CDR3 for beta chain variable domain of TCR clone 275136 (TRBV19, TRBJ2-1)
CASPTFVLSGEQFF

SEQ ID NO: 550273 - protein, 16 aa, Homo sapiens
  CDR3 for alpha chain variable domain of TCR clone 275137 (TRAV12-2, TRAJ32)
CAVNLGQGGAPNKPIF

SEQ ID NO: 550274 - protein, 15 aa, Homo sapiens
  CDR3 for beta chain variable domain of TCR clone 275137 (TRBV20-1, TRBJ2-7)
CSARGPLAGGREQYF

SEQ ID NO: 550275 - protein, 13 aa, Homo sapiens
  CDR3 for alpha chain variable domain of TCR clone 275138 (TRAV3, TRAJ21)
CAVREPDFNKFYF

SEQ ID NO: 550276 - protein, 13 aa, Homo sapiens
  CDR3 for beta chain variable domain of TCR clone 275138 (TRBV9, TRBJ2-1)
CASSPAGGSEQFF

SEQ ID NO: 550277 - protein, 12 aa, Homo sapiens
  CDR3 for alpha chain variable domain of TCR clone 275139 (TRAV16, TRAJ26)
CALRSYGQNFVF

SEQ ID NO: 550278 - protein, 14 aa, Homo sapiens
  CDR3 for beta chain variable domain of TCR clone 275139 (TRBV10-3, TRBJ2-1)
CAISSDPAYNEQFS

SEQ ID NO: 550279 - protein, 13 aa, Homo sapiens
  CDR3 for alpha chain variable domain of TCR clone 275140 (TRAV23/DV6, TRAJ22)
CAPYSGSAKQLTF

SEQ ID NO: 550280 - protein, 13 aa, Homo sapiens
  CDR3 for beta chain variable domain of TCR clone 275140 (TRBV6-1, TRBJ1-1)
CASSRQGNTEAFF

SEQ ID NO: 550281 - protein, 11 aa, Homo sapiens
  CDR3 for alpha chain variable domain of TCR clone 275141 (TRAV20, TRAJ23)
CACNQGGKLIF

SEQ ID NO: 550282 - protein, 13 aa, Homo sapiens
  CDR3 for beta chain variable domain of TCR clone 275141 (TRBV7-9, TRBJ2-7)
CASSFAGAYEQYF

SEQ ID NO: 550283 - protein, 14 aa, Homo sapiens
  CDR3 for alpha chain variable domain of TCR clone 275142 (TRAV12-2, TRAJ38)
CDPQTAGNNRKLTW

SEQ ID NO: 550284 - protein, 14 aa, Homo sapiens
  CDR3 for beta chain variable domain of TCR clone 275142 (TRBV20-1, TRBJ2-1)
CSAQIGGSANEQFF

SEQ ID NO: 550285 - protein, 11 aa, Homo sapiens
  CDR3 for alpha chain variable domain of TCR clone 275143 (TRAV23/DV6, TRAJ48)
CAPRWVEKLTF

SEQ ID NO: 550286 - protein, 13 aa, Homo sapiens
  CDR3 for beta chain variable domain of TCR clone 275143 (TRBV12-4, TRBJ2-5)
CASSPGTEETQYF

SEQ ID NO: 550287 - protein, 15 aa, Homo sapiens
  CDR3 for alpha chain variable domain of TCR clone 275144 (TRAV3, TRAJ22)
CAVRDRGGSARQLTF

SEQ ID NO: 550288 - protein, 13 aa, Homo sapiens
  CDR3 for beta chain variable domain of TCR clone 275144 (TRBV5-4, TRBJ2-3)
PAAGAGGADTQYF

SEQ ID NO: 550289 - protein, 17 aa, Homo sapiens
  CDR3 for alpha chain variable domain of TCR clone 275145 (TRAV8-3, TRAJ34)
CAIPGKLIFGTGTRLQV

SEQ ID NO: 550290 - protein, 13 aa, Homo sapiens
  CDR3 for beta chain variable domain of TCR clone 275145 (TRBV7-9, TRBJ1-2)
CASSLKQNYGYTF

SEQ ID NO: 550291 - protein, 18 aa, Homo sapiens
  CDR3 for alpha chain variable domain of TCR clone 275146 (TRAV21, TRAJ52)
CAVRPSPAGGTSYGKLTF

SEQ ID NO: 550292 - protein, 16 aa, Homo sapiens
  CDR3 for beta chain variable domain of TCR clone 275146 (TRBV5-4, TRBJ2-2)
CASSLVGGPNTGELFF

SEQ ID NO: 550293 - protein, 16 aa, Homo sapiens
  CDR3 for alpha chain variable domain of TCR clone 275147 (TRAV12-3, TRAJ53)
CAMSPGSEVATINLHL

SEQ ID NO: 550294 - protein, 11 aa, Homo sapiens
  CDR3 for beta chain variable domain of TCR clone 275147 (TRBV29-1, TRBJ2-5)
CSEDRTGTQYF

SEQ ID NO: 550295 - protein, 14 aa, Homo sapiens
  CDR3 for alpha chain variable domain of TCR clone 275148 (TRAV35, TRAJ33)
CAGSSQDSNYQLIW

SEQ ID NO: 550296 - protein, 15 aa, Homo sapiens
  CDR3 for beta chain variable domain of TCR clone 275148 (TRBV29-1, TRBJ2-7)
WSVEFFDRGSYEQYF

SEQ ID NO: 550297 - protein, 13 aa, Homo sapiens
  CDR3 for alpha chain variable domain of TCR clone 275149 (TRAV21, TRAJ3)
CAASTAVLPRYSL

SEQ ID NO: 550298 - protein, 16 aa, Homo sapiens
  CDR3 for beta chain variable domain of TCR clone 275149 (TRBV19, TRBJ2-1)
CASSKAGPSSYNEQFF

SEQ ID NO: 550299 - protein, 10 aa, Homo sapiens
  CDR3 for alpha chain variable domain of TCR clone 275150 (TRAV25, TRAJ20)
CAVNDYKLSF

SEQ ID NO: 550300 - protein, 18 aa, Homo sapiens
  CDR3 for beta chain variable domain of TCR clone 275150 (TRBV20-1, TRBJ2-6)
CSAETTPTHGSGANGLTF

SEQ ID NO: 550301 - protein, 12 aa, Homo sapiens
  CDR3 for alpha chain variable domain of TCR clone 275151 (TRAV23/DV6, TRAJ8)
CAARKATGFQKL

SEQ ID NO: 550302 - protein, 15 aa, Homo sapiens
  CDR3 for beta chain variable domain of TCR clone 275151 (TRBV28, TRBJ2-3)
CASSPDRQGANTQYF

SEQ ID NO: 550303 - protein, 13 aa, Homo sapiens
  CDR3 for alpha chain variable domain of TCR clone 275152 (TRAV13-2, TRAJ57)
CAESEGGSEKLVF

SEQ ID NO: 550304 - protein, 14 aa, Homo sapiens
  CDR3 for beta chain variable domain of TCR clone 275152 (TRBV11-2, TRBJ2-1)
CASSASSSYNEQFF

SEQ ID NO: 550305 - protein, 11 aa, Homo sapiens
  CDR3 for alpha chain variable domain of TCR clone 275153 (TRAV2, TRAJ13)
CASGGYQKVTF

SEQ ID NO: 550306 - protein, 17 aa, Homo sapiens
  CDR3 for beta chain variable domain of TCR clone 275153 (TRBV25-1, TRBJ2-7)
CASSDARVVFSSYEQYF

SEQ ID NO: 550307 - protein, 14 aa, Homo sapiens
  CDR3 for alpha chain variable domain of TCR clone 275154 (TRAV29/DV5, TRAJ32)
CAAAYGGSTNKLIF

SEQ ID NO: 550308 - protein, 11 aa, Homo sapiens
  CDR3 for beta chain variable domain of TCR clone 275154 (TRBV11-2, TRBJ2-2)
CASSLPGELFF

SEQ ID NO: 550309 - protein, 14 aa, Homo sapiens
  CDR3 for alpha chain variable domain of TCR clone 275155 (TRAV8-3, TRAJ26)
CAVAPGNYGQNFFF

SEQ ID NO: 550310 - protein, 16 aa, Homo sapiens
  CDR3 for beta chain variable domain of TCR clone 275155 (TRBV3-1, TRBJ2-1)
CASNQVGGTSYNEQFF

SEQ ID NO: 550311 - protein, 13 aa, Homo sapiens
  CDR3 for alpha chain variable domain of TCR clone 275156 (TRAV12-3, TRAJ7)
CAVSASGNNRLAF

SEQ ID NO: 550312 - protein, 14 aa, Homo sapiens
  CDR3 for beta chain variable domain of TCR clone 275156 (TRBV13, TRBJ2-5)
CASSLGPRGESQYF

SEQ ID NO: 550313 - protein, 13 aa, Homo sapiens
  CDR3 for alpha chain variable domain of TCR clone 275157 (TRAV23/DV6, TRAJ36)
CAVGATGATNLFF

SEQ ID NO: 550314 - protein, 15 aa, Homo sapiens
  CDR3 for beta chain variable domain of TCR clone 275157 (TRBV7-2, TRBJ1-2)
CASSPRAGWNYGYTF

SEQ ID NO: 550315 - protein, 17 aa, Homo sapiens
  CDR3 for alpha chain variable domain of TCR clone 275158 (TRAV8-1, TRAJ43)
CAVTNDMRLGAGTRLTV

SEQ ID NO: 550316 - protein, 17 aa, Homo sapiens
  CDR3 for beta chain variable domain of TCR clone 275158 (TRBV5-4, TRBJ2-1)
CASSSAGGRGPYNERFF

SEQ ID NO: 550317 - protein, 13 aa, Homo sapiens
  CDR3 for alpha chain variable domain of TCR clone 275159 (TRAV8-4, TRAJ30)
CAVSVNRDDKIIF

SEQ ID NO: 550318 - protein, 12 aa, Homo sapiens
  CDR3 for beta chain variable domain of TCR clone 275159 (TRBV7-2, TRBJ1-4)
CASSQANEKLFF

SEQ ID NO: 550319 - protein, 11 aa, Homo sapiens
  CDR3 for alpha chain variable domain of TCR clone 275160 (TRAV12-1, TRAJ31)
CVADNNARLMF

SEQ ID NO: 550320 - protein, 14 aa, Homo sapiens
  CDR3 for beta chain variable domain of TCR clone 275160 (TRBV24-1, TRBJ1-2)
CATSDSDLDYGYTC

SEQ ID NO: 550321 - protein, 12 aa, Homo sapiens
  CDR3 for alpha chain variable domain of TCR clone 275161 (TRAV13-1, TRAJ11)
CAASKGYSTLTF

SEQ ID NO: 550322 - protein, 16 aa, Homo sapiens
  CDR3 for beta chain variable domain of TCR clone 275161 (TRBV6-1, TRBJ2-5)
CASSETLDRGAETQYF

SEQ ID NO: 550323 - protein, 14 aa, Homo sapiens
  CDR3 for alpha chain variable domain of TCR clone 275162 (TRAV2, TRAJ9)
CAVEDRSGGFKTIF

SEQ ID NO: 550324 - protein, 12 aa, Homo sapiens
  CDR3 for beta chain variable domain of TCR clone 275162 (TRBV5-1, TRBJ2-3)
CASSLAADTQYF

SEQ ID NO: 550325 - protein, 18 aa, Homo sapiens
  CDR3 for alpha chain variable domain of TCR clone 275163 (TRAV21, TRAJ53)
CAVKGGANSGGSNYKLTF

SEQ ID NO: 550326 - protein, 14 aa, Homo sapiens
  CDR3 for beta chain variable domain of TCR clone 275163 (TRBV11-3, TRBJ1-5)
LTGDRLYYNQPQHF

SEQ ID NO: 550327 - protein, 13 aa, Homo sapiens
  CDR3 for alpha chain variable domain of TCR clone 275164 (TRAV2, TRAJ40)
CAVVTSGTYKYIF

SEQ ID NO: 550328 - protein, 14 aa, Homo sapiens
  CDR3 for beta chain variable domain of TCR clone 275164 (TRBV4-2, TRBJ2-3)
CASSQERGTDTQYF

SEQ ID NO: 550329 - protein, 12 aa, Homo sapiens
  CDR3 for alpha chain variable domain of TCR clone 275165 (TRAV12-3, TRAJ17)
CAMTLTGNKLTF

SEQ ID NO: 550330 - protein, 14 aa, Homo sapiens
  CDR3 for beta chain variable domain of TCR clone 275165 (TRBV13, TRBJ2-5)
CASSLDYPQETQYF

SEQ ID NO: 550331 - protein, 13 aa, Homo sapiens
  CDR3 for alpha chain variable domain of TCR clone 275166 (TRAV17, TRAJ9)
CATDYTGGFKTIF

SEQ ID NO: 550332 - protein, 14 aa, Homo sapiens
  CDR3 for beta chain variable domain of TCR clone 275166 (TRBV7-9, TRBJ2-3)
CASSLEDGTDTQYF

SEQ ID NO: 550333 - protein, 16 aa, Homo sapiens
  CDR3 for alpha chain variable domain of TCR clone 275167 (TRAV27, TRAJ13)
CAGAKSDSGGYQKVTF

SEQ ID NO: 550334 - protein, 15 aa, Homo sapiens
  CDR3 for beta chain variable domain of TCR clone 275167 (TRBV3-1, TRBJ1-2)
CASSPTRRPEGGYTF

SEQ ID NO: 550335 - protein, 17 aa, Homo sapiens
  CDR3 for alpha chain variable domain of TCR clone 275168 (TRAV12-2, TRAJ4)
CAVNVRPVSGGYNKLIF

SEQ ID NO: 550336 - protein, 17 aa, Homo sapiens
  CDR3 for beta chain variable domain of TCR clone 275168 (TRBV6-3, TRBJ2-1)
CASSYSSGTTGLDEQFF

SEQ ID NO: 550337 - protein, 13 aa, Homo sapiens
  CDR3 for alpha chain variable domain of TCR clone 275169 (TRAV38-2/DV8, TRAJ34)
CAYRWGNTDKLIF

SEQ ID NO: 550338 - protein, 13 aa, Homo sapiens
  CDR3 for beta chain variable domain of TCR clone 275169 (TRBV15, TRBJ1-6)
CATSGGLNSPLHF

SEQ ID NO: 550339 - protein, 16 aa, Homo sapiens
  CDR3 for alpha chain variable domain of TCR clone 275170 (TRAV13-1, TRAJ18)
CAASRMRGSTLGRLYV

SEQ ID NO: 550340 - protein, 17 aa, Homo sapiens
  CDR3 for beta chain variable domain of TCR clone 275170 (TRBV11-2, TRBJ2-1)
CASSLYPPGVEYNEQFF

SEQ ID NO: 550341 - protein, 15 aa, Homo sapiens
  CDR3 for alpha chain variable domain of TCR clone 275171 (TRAV8-2, TRAJ15)
CVVTMGNQAGTALIF

SEQ ID NO: 550342 - protein, 14 aa, Homo sapiens
  CDR3 for beta chain variable domain of TCR clone 275171 (TRBV20-1, TRBJ1-1)
CSAQTRIGGTEAFF

SEQ ID NO: 550343 - protein, 13 aa, Homo sapiens
  CDR3 for alpha chain variable domain of TCR clone 275172 (TRAV12-1, TRAJ13)
CVVALLGYQKVTF

SEQ ID NO: 550344 - protein, 13 aa, Homo sapiens
  CDR3 for beta chain variable domain of TCR clone 275172 (TRBV20-1, TRBJ2-5)
CSAILTGQETQYY

SEQ ID NO: 550345 - protein, 13 aa, Homo sapiens
  CDR3 for alpha chain variable domain of TCR clone 275173 (TRAV8-3, TRAJ28)
FAVGAVGRYQLTF

SEQ ID NO: 550346 - protein, 15 aa, Homo sapiens
  CDR3 for beta chain variable domain of TCR clone 275173 (TRBV7-9, TRBJ1-5)
CASSQGHQPNQPQHF

SEQ ID NO: 550347 - protein, 11 aa, Homo sapiens
  CDR3 for alpha chain variable domain of TCR clone 275174 (TRAV13-2, TRAJ20)
CADSNDYKLSF

SEQ ID NO: 550348 - protein, 14 aa, Homo sapiens
  CDR3 for beta chain variable domain of TCR clone 275174 (TRBV7-3, TRBJ2-3)
CASSFGASTDTQYF

SEQ ID NO: 550349 - protein, 11 aa, Homo sapiens
  CDR3 for alpha chain variable domain of TCR clone 275175 (TRAV12-2, TRAJ33)
FAVTSNYQLIW

SEQ ID NO: 550350 - protein, 14 aa, Homo sapiens
  CDR3 for beta chain variable domain of TCR clone 275175 (TRBV12-4, TRBJ2-2)
CASNQGANTGELFF

SEQ ID NO: 550351 - protein, 15 aa, Homo sapiens
  CDR3 for alpha chain variable domain of TCR clone 275176 (TRAV17, TRAJ4)
CATGTRSGGYNKLIF

SEQ ID NO: 550352 - protein, 13 aa, Homo sapiens
  CDR3 for beta chain variable domain of TCR clone 275176 (TRBV6-6, TRBJ2-7)
CASSPKHLAEQYF

SEQ ID NO: 550353 - protein, 13 aa, Homo sapiens
  CDR3 for alpha chain variable domain of TCR clone 275177 (TRAV27, TRAJ29)
CAGAHSGNTPFVF

SEQ ID NO: 550354 - protein, 14 aa, Homo sapiens
  CDR3 for beta chain variable domain of TCR clone 275177 (TRBV7-9, TRBJ2-7)
CASSIGQGAGEQYF

SEQ ID NO: 550355 - protein, 11 aa, Homo sapiens
  CDR3 for alpha chain variable domain of TCR clone 275178 (TRAV12-2, TRAJ29)
CAVTLRSPLVF

SEQ ID NO: 550356 - protein, 16 aa, Homo sapiens
  CDR3 for beta chain variable domain of TCR clone 275178 (TRBV19, TRBJ1-5)
CASSIDLGGPRQPQHF

SEQ ID NO: 550357 - protein, 16 aa, Homo sapiens
  CDR3 for alpha chain variable domain of TCR clone 275179 (TRAV3, TRAJ37)
CAVRVRGSGNTGKPIF

SEQ ID NO: 550358 - protein, 11 aa, Homo sapiens
  CDR3 for beta chain variable domain of TCR clone 275179 (TRBV11-2, TRBJ2-2)
CASSLPGELFF

SEQ ID NO: 550359 - protein, 18 aa, Homo sapiens
  CDR3 for alpha chain variable domain of TCR clone 275180 (TRAV9-2, TRAJ52)
CSLSRRNAGGTSYGKLTF

SEQ ID NO: 550360 - protein, 13 aa, Homo sapiens
  CDR3 for beta chain variable domain of TCR clone 275180 (TRBV7-9, TRBJ1-2)
CASSLKQNYGYTF

SEQ ID NO: 550361 - protein, 10 aa, Homo sapiens
  CDR3 for alpha chain variable domain of TCR clone 275181 (TRAV12-1, TRAJ43)
CVVHNNDMRF

SEQ ID NO: 550362 - protein, 15 aa, Homo sapiens
  CDR3 for beta chain variable domain of TCR clone 275181 (TRBV5-1, TRBJ2-1)
CASSPPRAPYNEQFF

SEQ ID NO: 550363 - protein, 13 aa, Homo sapiens
  CDR3 for alpha chain variable domain of TCR clone 275182 (TRAV9-2, TRAJ53)
CALSGGSNYKLTF

SEQ ID NO: 550364 - protein, 14 aa, Homo sapiens
  CDR3 for beta chain variable domain of TCR clone 275182 (TRBV25-1, TRBJ1-1)
CASTHLGGNTEAFF

SEQ ID NO: 550365 - protein, 13 aa, Homo sapiens
  CDR3 for alpha chain variable domain of TCR clone 275183 (TRAV12-2, TRAJ10)
CAVPTGGGNKLTF

SEQ ID NO: 550366 - protein, 14 aa, Homo sapiens
  CDR3 for beta chain variable domain of TCR clone 275183 (TRBV25-1, TRBJ1-1)
CASTPLGGNTEAFF

SEQ ID NO: 550367 - protein, 13 aa, Homo sapiens
  CDR3 for alpha chain variable domain of TCR clone 275184 (TRAV8-6, TRAJ33)
CAVSEGSNYQLIW

SEQ ID NO: 550368 - protein, 15 aa, Homo sapiens
  CDR3 for beta chain variable domain of TCR clone 275184 (TRBV11-3, TRBJ2-5)
CASSDTSGGIETQYF

SEQ ID NO: 550369 - protein, 14 aa, Homo sapiens
  CDR3 for alpha chain variable domain of TCR clone 275185 (TRAV12-1, TRAJ9)
CVVNRGTGGFKNIF

SEQ ID NO: 550370 - protein, 15 aa, Homo sapiens
  CDR3 for beta chain variable domain of TCR clone 275185 (TRBV12-4, TRBJ2-2)
CASGPGQLNTGELFF

SEQ ID NO: 550371 - protein, 11 aa, Homo sapiens
  CDR3 for alpha chain variable domain of TCR clone 275186 (TRAV12-2, TRAJ29)
CAVTLRSPLVF

SEQ ID NO: 550372 - protein, 18 aa, Homo sapiens
  CDR3 for beta chain variable domain of TCR clone 275186 (TRBV19, TRBJ1-5)
CASSIGRGALDSPSILVM

SEQ ID NO: 550373 - protein, 18 aa, Homo sapiens
  CDR3 for alpha chain variable domain of TCR clone 275187 (TRAV21, TRAJ52)
CAVRPSPAGGTSYGKPTF

SEQ ID NO: 550374 - protein, 17 aa, Homo sapiens
  CDR3 for beta chain variable domain of TCR clone 275187 (TRBV25-1, TRBJ2-1)
CASSAYGQGRGVYEQFF

SEQ ID NO: 550375 - protein, 13 aa, Homo sapiens
  CDR3 for alpha chain variable domain of TCR clone 275188 (TRAV21, TRAJ27)
CAARPGNTGKSTF

SEQ ID NO: 550376 - protein, 14 aa, Homo sapiens
  CDR3 for beta chain variable domain of TCR clone 275188 (TRBV11-2, TRBJ2-7)
CVSSLGAGAYEQYF

SEQ ID NO: 550377 - protein, 13 aa, Homo sapiens
  CDR3 for alpha chain variable domain of TCR clone 275189 (TRAV17, TRAJ9)
CATAITGGFKTIF

SEQ ID NO: 550378 - protein, 15 aa, Homo sapiens
  CDR3 for beta chain variable domain of TCR clone 275189 (TRBV4-1, TRBJ1-4)
CASSDTGGTNEKLFF

SEQ ID NO: 550379 - protein, 13 aa, Homo sapiens
  CDR3 for alpha chain variable domain of TCR clone 275190 (TRAV3, TRAJ21)
CAVREPDFNKFYF

SEQ ID NO: 550380 - protein, 14 aa, Homo sapiens
  CDR3 for beta chain variable domain of TCR clone 275190 (TRBV18, TRBJ1-5)
CASSPGNSNQPQHF

SEQ ID NO: 550381 - protein, 14 aa, Homo sapiens
  CDR3 for alpha chain variable domain of TCR clone 275191 (TRAV29/DV5, TRAJ32)
CAAAYGGATNELIF

SEQ ID NO: 550382 - protein, 15 aa, Homo sapiens
  CDR3 for beta chain variable domain of TCR clone 275191 (TRBV27, TRBJ2-7)
CASSTAGTGSYEQYF

SEQ ID NO: 550383 - protein, 15 aa, Homo sapiens
  CDR3 for alpha chain variable domain of TCR clone 275192 (TRAV23/DV6, TRAJ21)
CAASSEQLQQILLWI

SEQ ID NO: 550384 - protein, 16 aa, Homo sapiens
  CDR3 for beta chain variable domain of TCR clone 275192 (TRBV20-1, TRBJ2-3)
CSAVRDRGPIADTQYF

SEQ ID NO: 550385 - protein, 19 aa, Homo sapiens
  CDR3 for alpha chain variable domain of TCR clone 275193 (TRAV1-2, TRAJ26)
CLLPLCCERPDNYGQNFVF

SEQ ID NO: 550386 - protein, 14 aa, Homo sapiens
  CDR3 for beta chain variable domain of TCR clone 275193 (TRBV2, TRBJ2-1)
CASSEALIYNEQFF

SEQ ID NO: 550387 - protein, 16 aa, Homo sapiens
  CDR3 for alpha chain variable domain of TCR clone 275194 (TRAV12-1, TRAJ45)
CVVIRYSGGGADGLTF

SEQ ID NO: 550388 - protein, 12 aa, Homo sapiens
  CDR3 for beta chain variable domain of TCR clone 275194 (TRBV5-4, TRBJ2-5)
CASSSTRETQYF

SEQ ID NO: 550389 - protein, 12 aa, Homo sapiens
  CDR3 for alpha chain variable domain of TCR clone 275195 (TRAV12-3, TRAJ17)
CAMTLTGNKLTF

SEQ ID NO: 550390 - protein, 15 aa, Homo sapiens
  CDR3 for beta chain variable domain of TCR clone 275195 (TRBV11-3, TRBJ2-7)
CASRPGPASSYEQYF

SEQ ID NO: 550391 - protein, 14 aa, Homo sapiens
  CDR3 for alpha chain variable domain of TCR clone 275196 (TRAV8-1, TRAJ27)
CAVNVGTNAGKSTF

SEQ ID NO: 550392 - protein, 15 aa, Homo sapiens
  CDR3 for beta chain variable domain of TCR clone 275196 (TRBV11-3, TRBJ2-2)
CASSVGGRPTGELFF

SEQ ID NO: 550393 - protein, 16 aa, Homo sapiens
  CDR3 for alpha chain variable domain of TCR clone 275197 (TRAV17, TRAJ53)
CATDALSGGSNYKLTF

SEQ ID NO: 550394 - protein, 12 aa, Homo sapiens
  CDR3 for beta chain variable domain of TCR clone 275197 (TRBV5-1, TRBJ2-7)
CASSVRGYEQYF

SEQ ID NO: 550395 - protein, 12 aa, Homo sapiens
  CDR3 for alpha chain variable domain of TCR clone 275198 (TRAV17, TRAJ39)
CATGAAGNMLTF

SEQ ID NO: 550396 - protein, 12 aa, Homo sapiens
  CDR3 for beta chain variable domain of TCR clone 275198 (TRBV7-8, TRBJ2-7)
CASEGGPHGQYF

SEQ ID NO: 550397 - protein, 11 aa, Homo sapiens
  CDR3 for alpha chain variable domain of TCR clone 275199 (TRAV27, TRAJ49)
CAGVPPNQFYF

SEQ ID NO: 550398 - protein, 16 aa, Homo sapiens
  CDR3 for beta chain variable domain of TCR clone 275199 (TRBV24-1, TRBJ2-3)
CATSDPGTGATDTQYF

SEQ ID NO: 550399 - protein, 22 aa, Homo sapiens
  CDR3 for alpha chain variable domain of TCR clone 275200 (TRAV36/DV7, TRAJ50)
CAVEPENLLRQGDVWARDKLIS

SEQ ID NO: 550400 - protein, 13 aa, Homo sapiens
  CDR3 for beta chain variable domain of TCR clone 275200 (TRBV7-2, TRBJ2-7)
CASSSPSGSEQYF

SEQ ID NO: 550401 - protein, 14 aa, Homo sapiens
  CDR3 for alpha chain variable domain of TCR clone 275201 (TRAV8-2, TRAJ4)
CVVSPSGGYHKLIF

SEQ ID NO: 550402 - protein, 14 aa, Homo sapiens
  CDR3 for beta chain variable domain of TCR clone 275201 (TRBV19, TRBJ2-5)
CASSASGIQETQYF

SEQ ID NO: 550403 - protein, 13 aa, Homo sapiens
  CDR3 for alpha chain variable domain of TCR clone 275202 (TRAV1-2, TRAJ9)
CAALNTGGFKTIF

SEQ ID NO: 550404 - protein, 16 aa, Homo sapiens
  CDR3 for beta chain variable domain of TCR clone 275202 (TRBV6-3, TRBJ2-1)
CASSFRLAGRYNEQFF

SEQ ID NO: 550405 - protein, 14 aa, Homo sapiens
  CDR3 for alpha chain variable domain of TCR clone 275203 (TRAV12-2, TRAJ13)
CAVKTTGGYQKVTF

SEQ ID NO: 550406 - protein, 14 aa, Homo sapiens
  CDR3 for beta chain variable domain of TCR clone 275203 (TRBV19, TRBJ2-1)
CASPTFVLSSEQFF

SEQ ID NO: 550407 - protein, 14 aa, Homo sapiens
  CDR3 for alpha chain variable domain of TCR clone 275204 (TRAV12-2, TRAJ17)
CAVLFKAAGNKLTF

SEQ ID NO: 550408 - protein, 10 aa, Homo sapiens
  CDR3 for beta chain variable domain of TCR clone 275204 (TRBV23-1, TRBJ2-7)
NDSTSYEQYF

SEQ ID NO: 550409 - protein, 17 aa, Homo sapiens
  CDR3 for alpha chain variable domain of TCR clone 275205 (TRAV13-1, TRAJ53)
CAASWKSSGGSNYKLTF

SEQ ID NO: 550410 - protein, 15 aa, Homo sapiens
  CDR3 for beta chain variable domain of TCR clone 275205 (TRBV4-1, TRBJ1-4)
CASSDTGGTNEKLFF

SEQ ID NO: 550411 - protein, 16 aa, Homo sapiens
  CDR3 for alpha chain variable domain of TCR clone 275206 (TRAV30, TRAJ24)
CGTEMVDADSWGKFQF

SEQ ID NO: 550412 - protein, 17 aa, Homo sapiens
  CDR3 for beta chain variable domain of TCR clone 275206 (TRBV18, TRBJ2-1)
CASSKGLSGGADNEQFF

SEQ ID NO: 550413 - protein, 14 aa, Homo sapiens
  CDR3 for alpha chain variable domain of TCR clone 275207 (TRAV1-2, TRAJ16)
CAVNRFSDGQKLLF

SEQ ID NO: 550414 - protein, 13 aa, Homo sapiens
  CDR3 for beta chain variable domain of TCR clone 275207 (TRBV6-1, TRBJ2-1)
CAGAGTGLHEQFF

SEQ ID NO: 550415 - protein, 15 aa, Homo sapiens
  CDR3 for alpha chain variable domain of TCR clone 275208 (TRAV13-2, TRAJ45)
CAENNAGGGADGLTF

SEQ ID NO: 550416 - protein, 13 aa, Homo sapiens
  CDR3 for beta chain variable domain of TCR clone 275208 (TRBV25-1, TRBJ2-6)
CASRGPGANVLTF

SEQ ID NO: 550417 - protein, 16 aa, Homo sapiens
  CDR3 for alpha chain variable domain of TCR clone 275209 (TRAV3, TRAJ10)
CAVRDMRAGGGNQLTF

SEQ ID NO: 550418 - protein, 15 aa, Homo sapiens
  CDR3 for beta chain variable domain of TCR clone 275209 (TRBV11-2, TRBJ1-2)
CASSLEGVQRNGYTF

SEQ ID NO: 550419 - protein, 13 aa, Homo sapiens
  CDR3 for alpha chain variable domain of TCR clone 275210 (TRAV36/DV7, TRAJ53)
CALSGGSNYKLTF

SEQ ID NO: 550420 - protein, 12 aa, Homo sapiens
  CDR3 for beta chain variable domain of TCR clone 275210 (TRBV2, TRBJ1-5)
CAFGEYDQPQHF

SEQ ID NO: 550421 - protein, 18 aa, Homo sapiens
  CDR3 for alpha chain variable domain of TCR clone 275211 (TRAV26-1, TRAJ52)
CIVRVEGAGGTSYGKLTF

SEQ ID NO: 550422 - protein, 12 aa, Homo sapiens
  CDR3 for beta chain variable domain of TCR clone 275211 (TRBV11-2, TRBJ2-1)
CASSPGNNEQFF

SEQ ID NO: 550423 - protein, 14 aa, Homo sapiens
  CDR3 for alpha chain variable domain of TCR clone 275212 (TRAV1-2, TRAJ8)
CAVREETGFQKLVF

SEQ ID NO: 550424 - protein, 13 aa, Homo sapiens
  CDR3 for beta chain variable domain of TCR clone 275212 (TRBV12-4, TRBJ2-5)
CASRKRGKETQYF

SEQ ID NO: 550425 - protein, 13 aa, Homo sapiens
  CDR3 for alpha chain variable domain of TCR clone 275213 (TRAV21, TRAJ27)
CAVRPGNAGKSTF

SEQ ID NO: 550426 - protein, 13 aa, Homo sapiens
  CDR3 for beta chain variable domain of TCR clone 275213 (TRBV18, TRBJ2-7)
CASQSGGGYEQYF

SEQ ID NO: 550427 - protein, 14 aa, Homo sapiens
  CDR3 for alpha chain variable domain of TCR clone 275214 (TRAV12-1, TRAJ17)
CVVNYKAAGNKLTF

SEQ ID NO: 550428 - protein, 13 aa, Homo sapiens
  CDR3 for beta chain variable domain of TCR clone 275214 (TRBV19, TRBJ2-7)
RASRKAGGSEQYF

SEQ ID NO: 550429 - protein, 15 aa, Homo sapiens
  CDR3 for alpha chain variable domain of TCR clone 275215 (TRAV1-2, TRAJ28)
CAVQYSGAGSYQLTF

SEQ ID NO: 550430 - protein, 15 aa, Homo sapiens
  CDR3 for beta chain variable domain of TCR clone 275215 (TRBV20-1, TRBJ2-7)
CSARDRVSGMDEQYF

SEQ ID NO: 550431 - protein, 15 aa, Homo sapiens
  CDR3 for alpha chain variable domain of TCR clone 275216 (TRAV13-1, TRAJ17)
CAASIERAAVNKLTF

SEQ ID NO: 550432 - protein, 12 aa, Homo sapiens
  CDR3 for beta chain variable domain of TCR clone 275216 (TRBV5-7, TRBJ1-1)
CASSLGRGKAFF

SEQ ID NO: 550433 - protein, 14 aa, Homo sapiens
  CDR3 for alpha chain variable domain of TCR clone 275217 (TRAV1-2, TRAJ17)
CALRRGAAGNKLTF

SEQ ID NO: 550434 - protein, 14 aa, Homo sapiens
  CDR3 for beta chain variable domain of TCR clone 275217 (TRBV19, TRBJ2-1)
CASPTFVLSGEQFF

SEQ ID NO: 550435 - protein, 14 aa, Homo sapiens
  CDR3 for alpha chain variable domain of TCR clone 275218 (TRAV13-1, TRAJ35)
CAASKGGFGNVLHC

SEQ ID NO: 550436 - protein, 12 aa, Homo sapiens
  CDR3 for beta chain variable domain of TCR clone 275218 (TRBV18, TRBJ2-1)
CASSSDEDEQFF

SEQ ID NO: 550437 - protein, 13 aa, Homo sapiens
  CDR3 for alpha chain variable domain of TCR clone 275219 (TRAV20, TRAJ34)
CAVSSYNPDKLIF

SEQ ID NO: 550438 - protein, 13 aa, Homo sapiens
  CDR3 for beta chain variable domain of TCR clone 275219 (TRBV7-9, TRBJ1-2)
CASSLKQNYGYTF

SEQ ID NO: 550439 - protein, 13 aa, Homo sapiens
  CDR3 for alpha chain variable domain of TCR clone 275220 (TRAV8-2, TRAJ49)
CVVTPTTGNQFYF

SEQ ID NO: 550440 - protein, 15 aa, Homo sapiens
  CDR3 for beta chain variable domain of TCR clone 275220 (TRBV11-2, TRBJ2-1)
CASSLTSGGYNEQFF

SEQ ID NO: 550441 - protein, 11 aa, Homo sapiens
  CDR3 for alpha chain variable domain of TCR clone 275221 (TRAV1-2, TRAJ40)
CAVPGTYKYIF

SEQ ID NO: 550442 - protein, 14 aa, Homo sapiens
  CDR3 for beta chain variable domain of TCR clone 275221 (TRBV19, TRBJ2-1)
CASPTFVLGGEQFF

SEQ ID NO: 550443 - protein, 14 aa, Homo sapiens
  CDR3 for alpha chain variable domain of TCR clone 275222 (TRAV17, TRAJ11)
CATDTRRGYSTLTF

SEQ ID NO: 550444 - protein, 13 aa, Homo sapiens
  CDR3 for beta chain variable domain of TCR clone 275222 (TRBV19, TRBJ2-5)
CASRDSRRETQYF

SEQ ID NO: 550445 - protein, 14 aa, Homo sapiens
  CDR3 for alpha chain variable domain of TCR clone 275223 (TRAV26-1, TRAJ22)
CIVRVYGSARQLTF

SEQ ID NO: 550446 - protein, 17 aa, Homo sapiens
  CDR3 for beta chain variable domain of TCR clone 275223 (TRBV7-3, TRBJ2-3)
CASSHGGLAGFGDTQYF

SEQ ID NO: 550447 - protein, 14 aa, Homo sapiens
  CDR3 for alpha chain variable domain of TCR clone 275224 (TRAV1-2, TRAJ8)
CAVREDTGFQKLVF

SEQ ID NO: 550448 - protein, 13 aa, Homo sapiens
  CDR3 for beta chain variable domain of TCR clone 275224 (TRBV14, TRBJ1-1)
CASSREFGTEAVF

SEQ ID NO: 550449 - protein, 16 aa, Homo sapiens
  CDR3 for alpha chain variable domain of TCR clone 275225 (TRAV13-1, TRAJ22)
CAAKGGRSGSARPLTF

SEQ ID NO: 550450 - protein, 15 aa, Homo sapiens
  CDR3 for beta chain variable domain of TCR clone 275225 (TRBV9, TRBJ1-6)
CASSVAGTGDSPLHF

SEQ ID NO: 550451 - protein, 14 aa, Homo sapiens
  CDR3 for alpha chain variable domain of TCR clone 275226 (TRAV21, TRAJ28)
CAVGSGAGSYQLTF

SEQ ID NO: 550452 - protein, 12 aa, Homo sapiens
  CDR3 for beta chain variable domain of TCR clone 275226 (TRBV7-9, TRBJ2-7)
CASSLEGYEQYF

SEQ ID NO: 550453 - protein, 11 aa, Homo sapiens
  CDR3 for alpha chain variable domain of TCR clone 275227 (TRAV12-3, TRAJ43)
CAMSVSNDMRF

SEQ ID NO: 550454 - protein, 20 aa, Homo sapiens
  CDR3 for beta chain variable domain of TCR clone 275227 (TRBV28, TRBJ2-1)
CASTPIGRSPALAGGNEQFF

SEQ ID NO: 550455 - protein, 13 aa, Homo sapiens
  CDR3 for alpha chain variable domain of TCR clone 275228 (TRAV1-1, TRAJ13)
CAVNSGGYQKVTF

SEQ ID NO: 550456 - protein, 12 aa, Homo sapiens
  CDR3 for beta chain variable domain of TCR clone 275228 (TRBV28, TRBJ2-1)
CASGVQINEQFF

SEQ ID NO: 550457 - protein, 10 aa, Homo sapiens
  CDR3 for alpha chain variable domain of TCR clone 275229 (TRAV21, TRAJ43)
CAVRIGDMRF

SEQ ID NO: 550458 - protein, 14 aa, Homo sapiens
  CDR3 for beta chain variable domain of TCR clone 275229 (TRBV20-1, TRBJ2-7)
CSAPELAGVGEQYF

SEQ ID NO: 550459 - protein, 15 aa, Homo sapiens
  CDR3 for alpha chain variable domain of TCR clone 275230 (TRAV3, TRAJ13)
CAVRDIGGSYQKVTF

SEQ ID NO: 550460 - protein, 15 aa, Homo sapiens
  CDR3 for beta chain variable domain of TCR clone 275230 (TRBV9, TRBJ1-6)
CASSVAGTGDSPLHF

SEQ ID NO: 550461 - protein, 12 aa, Homo sapiens
  CDR3 for alpha chain variable domain of TCR clone 275231 (TRAV13-2, TRAJ8)
FAPWLGFQKLLF

SEQ ID NO: 550462 - protein, 14 aa, Homo sapiens
  CDR3 for beta chain variable domain of TCR clone 275231 (TRBV18, TRBJ1-5)
CASSRQQRNQPQHF

SEQ ID NO: 550463 - protein, 14 aa, Homo sapiens
  CDR3 for alpha chain variable domain of TCR clone 275232 (TRAV17, TRAJ4)
CATAPLCGYNKLIF

SEQ ID NO: 550464 - protein, 13 aa, Homo sapiens
  CDR3 for beta chain variable domain of TCR clone 275232 (TRBV12-4, TRBJ1-3)
CASSLASGDTIYF

SEQ ID NO: 550465 - protein, 12 aa, Homo sapiens
  CDR3 for alpha chain variable domain of TCR clone 275233 (TRAV17, TRAJ20)
CATDSNDYKLSF

SEQ ID NO: 550466 - protein, 13 aa, Homo sapiens
  CDR3 for beta chain variable domain of TCR clone 275233 (TRBV27, TRBJ2-7)
CASSFVSSYEQYF

SEQ ID NO: 550467 - protein, 14 aa, Homo sapiens
  CDR3 for alpha chain variable domain of TCR clone 275234 (TRAV12-1, TRAJ9)
CVVNEGTGGFKTIF

SEQ ID NO: 550468 - protein, 16 aa, Homo sapiens
  CDR3 for beta chain variable domain of TCR clone 275234 (TRBV4-3, TRBJ2-2)
CASSQDRGSDTGELFF

SEQ ID NO: 550469 - protein, 14 aa, Homo sapiens
  CDR3 for alpha chain variable domain of TCR clone 275235 (TRAV1-2, TRAJ8)
FAVREDTGFQKLLF

SEQ ID NO: 550470 - protein, 13 aa, Homo sapiens
  CDR3 for beta chain variable domain of TCR clone 275235 (TRBV20-1, TRBJ1-4)
CSARTPYNEKLFF

SEQ ID NO: 550471 - protein, 10 aa, Homo sapiens
  CDR3 for alpha chain variable domain of TCR clone 275236 (TRAV21, TRAJ43)
CAVRIGDMRF

SEQ ID NO: 550472 - protein, 13 aa, Homo sapiens
  CDR3 for beta chain variable domain of TCR clone 275236 (TRBV20-1, TRBJ2-1)
CSAPGLADYEQFF

SEQ ID NO: 550473 - protein, 15 aa, Homo sapiens
  CDR3 for alpha chain variable domain of TCR clone 275237 (TRAV10, TRAJ6)
CVVRPRTGGSYIPTF

SEQ ID NO: 550474 - protein, 17 aa, Homo sapiens
  CDR3 for beta chain variable domain of TCR clone 275237 (TRBV13, TRBJ2-3)
CASSLSRVAGGRNTQYF

SEQ ID NO: 550475 - protein, 14 aa, Homo sapiens
  CDR3 for alpha chain variable domain of TCR clone 275238 (TRAV26-1, TRAJ38)
CIADNAGNNRKRIW

SEQ ID NO: 550476 - protein, 18 aa, Homo sapiens
  CDR3 for beta chain variable domain of TCR clone 275238 (TRBV7-3, TRBJ2-3)
CASSSTGTYPGSTDTQYF

SEQ ID NO: 550477 - protein, 13 aa, Homo sapiens
  CDR3 for alpha chain variable domain of TCR clone 275239 (TRAV12-1, TRAJ16)
CVVNGPDGQRLLF

SEQ ID NO: 550478 - protein, 13 aa, Homo sapiens
  CDR3 for beta chain variable domain of TCR clone 275239 (TRBV2, TRBJ1-1)
CARNPTGGFHAVF

SEQ ID NO: 550479 - protein, 16 aa, Homo sapiens
  CDR3 for alpha chain variable domain of TCR clone 275240 (TRAV21, TRAJ37)
CAVRPRGSSSTGKLIF

SEQ ID NO: 550480 - protein, 13 aa, Homo sapiens
  CDR3 for beta chain variable domain of TCR clone 275240 (TRBV7-9, TRBJ2-5)
CASPSPGQETQYF

SEQ ID NO: 550481 - protein, 19 aa, Homo sapiens
  CDR3 for alpha chain variable domain of TCR clone 275241 (TRAV26-1, TRAJ52)
CIVRAHRNAGVTSYGKLTF

SEQ ID NO: 550482 - protein, 15 aa, Homo sapiens
  CDR3 for beta chain variable domain of TCR clone 275241 (TRBV29-1, TRBJ2-1)
CSGSDRKSSYNEQFF

SEQ ID NO: 550483 - protein, 10 aa, Homo sapiens
  CDR3 for alpha chain variable domain of TCR clone 275242 (TRAV13-2, TRAJ24)
TTDSWGQLQF

SEQ ID NO: 550484 - protein, 13 aa, Homo sapiens
  CDR3 for beta chain variable domain of TCR clone 275242 (TRBV29-1, TRBJ2-1)
CSVEGGRVNEQFF

SEQ ID NO: 550485 - protein, 15 aa, Homo sapiens
  CDR3 for alpha chain variable domain of TCR clone 275243 (TRAV4, TRAJ39)
CLVGPNNNAGNMLTF

SEQ ID NO: 550486 - protein, 16 aa, Homo sapiens
  CDR3 for beta chain variable domain of TCR clone 275243 (TRBV18, TRBJ1-5)
CASSPYRVEGNQPQHF

SEQ ID NO: 550487 - protein, 15 aa, Homo sapiens
  CDR3 for alpha chain variable domain of TCR clone 275244 (TRAV8-3, TRAJ37)
CAVGARASNTGKLIF

SEQ ID NO: 550488 - protein, 15 aa, Homo sapiens
  CDR3 for beta chain variable domain of TCR clone 275244 (TRBV5-4, TRBJ2-3)
CASGLAGRVTDTQYF

SEQ ID NO: 550489 - protein, 14 aa, Homo sapiens
  CDR3 for alpha chain variable domain of TCR clone 275245 (TRAV12-3, TRAJ10)
SHLPLTGGGNKLTF

SEQ ID NO: 550490 - protein, 16 aa, Homo sapiens
  CDR3 for beta chain variable domain of TCR clone 275245 (TRBV24-1, TRBJ2-3)
CATSEAREGRGDTQYF

SEQ ID NO: 550491 - protein, 13 aa, Homo sapiens
  CDR3 for alpha chain variable domain of TCR clone 275246 (TRAV2, TRAJ29)
CAAQNSGNTPLVF

SEQ ID NO: 550492 - protein, 14 aa, Homo sapiens
  CDR3 for beta chain variable domain of TCR clone 275246 (TRBV7-9, TRBJ2-4)
CASSLAMGGNIQYV

SEQ ID NO: 550493 - protein, 13 aa, Homo sapiens
  CDR3 for alpha chain variable domain of TCR clone 275247 (TRAV2, TRAJ40)
CAVVTSGTYKYIF

SEQ ID NO: 550494 - protein, 11 aa, Homo sapiens
  CDR3 for beta chain variable domain of TCR clone 275247 (TRBV24-1, TRBJ2-3)
CATASTDTQYF

SEQ ID NO: 550495 - protein, 15 aa, Homo sapiens
  CDR3 for alpha chain variable domain of TCR clone 275248 (TRAV34, TRAJ38)
CGADFTPGNNRKLIW

SEQ ID NO: 550496 - protein, 15 aa, Homo sapiens
  CDR3 for beta chain variable domain of TCR clone 275248 (TRBV6-6, TRBJ1-5)
CASSSIQGTNQPQHF

SEQ ID NO: 550497 - protein, 14 aa, Homo sapiens
  CDR3 for alpha chain variable domain of TCR clone 275249 (TRAV38-1, TRAJ40)
CALRPTSGTYKYIF

SEQ ID NO: 550498 - protein, 14 aa, Homo sapiens
  CDR3 for beta chain variable domain of TCR clone 275249 (TRBV25-1, TRBJ1-1)
CSSTHLVENTEAFF

SEQ ID NO: 550499 - protein, 18 aa, Homo sapiens
  CDR3 for alpha chain variable domain of TCR clone 275250 (TRAV26-1, TRAJ23)
CIVRVGREVWNQGGKLIF

SEQ ID NO: 550500 - protein, 16 aa, Homo sapiens
  CDR3 for beta chain variable domain of TCR clone 275250 (TRBV12-4, TRBJ2-5)
FASSFFVRGRQETQYF

SEQ ID NO: 550501 - protein, 16 aa, Homo sapiens
  CDR3 for alpha chain variable domain of TCR clone 275251 (TRAV12-3, TRAJ53)
CAMSPGSGGSSYQMTF

SEQ ID NO: 550502 - protein, 11 aa, Homo sapiens
  CDR3 for beta chain variable domain of TCR clone 275251 (TRBV29-1, TRBJ2-5)
CSEDRTGTQYF

SEQ ID NO: 550503 - protein, 13 aa, Homo sapiens
  CDR3 for alpha chain variable domain of TCR clone 275252 (TRAV8-3, TRAJ21)
CAVGLDNFNKFYF

SEQ ID NO: 550504 - protein, 13 aa, Homo sapiens
  CDR3 for beta chain variable domain of TCR clone 275252 (TRBV27, TRBJ1-1)
CASSLSIGAEAFF

SEQ ID NO: 550505 - protein, 12 aa, Homo sapiens
  CDR3 for alpha chain variable domain of TCR clone 275253 (TRAV12-3, TRAJ20)
CAMVRGDNKLSF

SEQ ID NO: 550506 - protein, 16 aa, Homo sapiens
  CDR3 for beta chain variable domain of TCR clone 275253 (TRBV5-1, TRBJ2-3)
CASSLGLAVYTDTQYF

SEQ ID NO: 550507 - protein, 15 aa, Homo sapiens
  CDR3 for alpha chain variable domain of TCR clone 275254 (TRAV3, TRAJ30)
CAVRDEYARDDKIIF

SEQ ID NO: 550508 - protein, 16 aa, Homo sapiens
  CDR3 for beta chain variable domain of TCR clone 275254 (TRBV5-1, TRBJ2-5)
CASSLANHRGRETQYF

SEQ ID NO: 550509 - protein, 17 aa, Homo sapiens
  CDR3 for alpha chain variable domain of TCR clone 275255 (TRAV23/DV6, TRAJ57)
CAASSTLSQGGSDKLVF

SEQ ID NO: 550510 - protein, 14 aa, Homo sapiens
  CDR3 for beta chain variable domain of TCR clone 275255 (TRBV7-8, TRBJ2-5)
CASSATGGQEAQYF

SEQ ID NO: 550511 - protein, 17 aa, Homo sapiens
  CDR3 for alpha chain variable domain of TCR clone 275256 (TRAV3, TRAJ38)
CAVRDCLNAGNHRKLIW

SEQ ID NO: 550512 - protein, 15 aa, Homo sapiens
  CDR3 for beta chain variable domain of TCR clone 275256 (TRBV27, TRBJ2-1)
CASSNGGGSSNEQFF

SEQ ID NO: 550513 - protein, 13 aa, Homo sapiens
  CDR3 for alpha chain variable domain of TCR clone 275257 (TRAV8-1, TRAJ7)
CAVMPYGNNRLAF

SEQ ID NO: 550514 - protein, 11 aa, Homo sapiens
  CDR3 for beta chain variable domain of TCR clone 275257 (TRBV20-1, TRBJ2-5)
CSADRAETQYF

SEQ ID NO: 550515 - protein, 11 aa, Homo sapiens
  CDR3 for alpha chain variable domain of TCR clone 275258 (TRAV21, TRAJ34)
CAVTNTDELIF

SEQ ID NO: 550516 - protein, 14 aa, Homo sapiens
  CDR3 for beta chain variable domain of TCR clone 275258 (TRBV4-2, TRBJ1-2)
CASSPGGSNYGYTF

SEQ ID NO: 550517 - protein, 14 aa, Homo sapiens
  CDR3 for alpha chain variable domain of TCR clone 275259 (TRAV17, TRAJ15)
CATTTNQAGTALLF

SEQ ID NO: 550518 - protein, 16 aa, Homo sapiens
  CDR3 for beta chain variable domain of TCR clone 275259 (TRBV4-1, TRBJ2-7)
CASSRGDILNSYEQYF

SEQ ID NO: 550519 - protein, 12 aa, Homo sapiens
  CDR3 for alpha chain variable domain of TCR clone 275260 (TRAV12-3, TRAJ39)
CSMTQAGNMLTF

SEQ ID NO: 550520 - protein, 13 aa, Homo sapiens
  CDR3 for beta chain variable domain of TCR clone 275260 (TRBV20-1, TRBJ1-1)
CSAPEGGNTEAFF

SEQ ID NO: 550521 - protein, 10 aa, Homo sapiens
  CDR3 for alpha chain variable domain of TCR clone 275261 (TRAV21, TRAJ20)
CAVNDYKLSF

SEQ ID NO: 550522 - protein, 16 aa, Homo sapiens
  CDR3 for beta chain variable domain of TCR clone 275261 (TRBV13, TRBJ2-2)
CASSPRTGEHTGEPFF

SEQ ID NO: 550523 - protein, 12 aa, Homo sapiens
  CDR3 for alpha chain variable domain of TCR clone 275262 (TRAV1-1, TRAJ15)
CDVGQAGTALIF

SEQ ID NO: 550524 - protein, 16 aa, Homo sapiens
  CDR3 for beta chain variable domain of TCR clone 275262 (TRBV12-4, TRBJ2-7)
CASSPEGQGSSYEQYF

SEQ ID NO: 550525 - protein, 14 aa, Homo sapiens
  CDR3 for alpha chain variable domain of TCR clone 275263 (TRAV27, TRAJ45)
CAGAQEEVLKDSPL

SEQ ID NO: 550526 - protein, 17 aa, Homo sapiens
  CDR3 for beta chain variable domain of TCR clone 275263 (TRBV11-2, TRBJ2-1)
CASSLYPPGVEYNEQFF

SEQ ID NO: 550527 - protein, 14 aa, Homo sapiens
  CDR3 for alpha chain variable domain of TCR clone 275264 (TRAV13-1, TRAJ44)
CAAKATGPASKLTF

SEQ ID NO: 550528 - protein, 15 aa, Homo sapiens
  CDR3 for beta chain variable domain of TCR clone 275264 (TRBV19, TRBJ2-1)
CASIKGRGPYNEQFF

SEQ ID NO: 550529 - protein, 15 aa, Homo sapiens
  CDR3 for alpha chain variable domain of TCR clone 275265 (TRAV26-1, TRAJ13)
CIVRASRGGYQKVTF

SEQ ID NO: 550530 - protein, 14 aa, Homo sapiens
  CDR3 for beta chain variable domain of TCR clone 275265 (TRBV7-2, TRBJ1-5)
CASSTQGAGQTQHF

SEQ ID NO: 550531 - protein, 15 aa, Homo sapiens
  CDR3 for alpha chain variable domain of TCR clone 275266 (TRAV21, TRAJ53)
CATLNSGGSNYKLTF

SEQ ID NO: 550532 - protein, 15 aa, Homo sapiens
  CDR3 for beta chain variable domain of TCR clone 275266 (TRBV27, TRBJ1-6)
CASSFDRGLGSPLHF

SEQ ID NO: 550533 - protein, 14 aa, Homo sapiens
  CDR3 for alpha chain variable domain of TCR clone 275267 (TRAV17, TRAJ54)
CATDANQGAQKLVF

SEQ ID NO: 550534 - protein, 15 aa, Homo sapiens
  CDR3 for beta chain variable domain of TCR clone 275267 (TRBV5-1, TRBJ2-1)
CASSPPRAPYNEQFF

SEQ ID NO: 550535 - protein, 12 aa, Homo sapiens
  CDR3 for alpha chain variable domain of TCR clone 275268 (TRAV1-2, TRAJ33)
CAALDSNYQLIW

SEQ ID NO: 550536 - protein, 13 aa, Homo sapiens
  CDR3 for beta chain variable domain of TCR clone 275268 (TRBV10-3, TRBJ1-2)
CAISERDSYGYTF

SEQ ID NO: 550537 - protein, 13 aa, Homo sapiens
  CDR3 for alpha chain variable domain of TCR clone 275269 (TRAV21, TRAJ20)
CAAGLRVDDKLSF

SEQ ID NO: 550538 - protein, 13 aa, Homo sapiens
  CDR3 for beta chain variable domain of TCR clone 275269 (TRBV6-1, TRBJ1-1)
CASSRQGNTEAFF

SEQ ID NO: 550539 - protein, 15 aa, Homo sapiens
  CDR3 for alpha chain variable domain of TCR clone 275270 (TRAV17, TRAJ4)
CATGTWSGGYNKLIV

SEQ ID NO: 550540 - protein, 16 aa, Homo sapiens
  CDR3 for beta chain variable domain of TCR clone 275270 (TRBV7-9, TRBJ1-3)
CASSLGAGSSGNTIYF

SEQ ID NO: 550541 - protein, 14 aa, Homo sapiens
  CDR3 for alpha chain variable domain of TCR clone 275271 (TRAV12-3, TRAJ10)
SHLPLTGGGNKLSF

SEQ ID NO: 550542 - protein, 15 aa, Homo sapiens
  CDR3 for beta chain variable domain of TCR clone 275271 (TRBV5-7, TRBJ2-7)
CASSLGPGRGHEQYF

SEQ ID NO: 550543 - protein, 14 aa, Homo sapiens
  CDR3 for alpha chain variable domain of TCR clone 275272 (TRAV1-2, TRAJ8)
CDVREDTGFQKLVF

SEQ ID NO: 550544 - protein, 16 aa, Homo sapiens
  CDR3 for beta chain variable domain of TCR clone 275272 (TRBV24-1, TRBJ2-3)
CATSDPGTGTTDTQYF

SEQ ID NO: 550545 - protein, 13 aa, Homo sapiens
  CDR3 for alpha chain variable domain of TCR clone 275273 (TRAV8-3, TRAJ44)
CAVVPGTASKLTF

SEQ ID NO: 550546 - protein, 13 aa, Homo sapiens
  CDR3 for beta chain variable domain of TCR clone 275273 (TRBV27, TRBJ1-1)
CASSLSIGAEAFF

SEQ ID NO: 550547 - protein, 12 aa, Homo sapiens
  CDR3 for alpha chain variable domain of TCR clone 275274 (TRAV12-3, TRAJ17)
CVMTLTGTKLTF

SEQ ID NO: 550548 - protein, 15 aa, Homo sapiens
  CDR3 for beta chain variable domain of TCR clone 275274 (TRBV20-1, TRBJ2-7)
CSARDRVSGMDEQYF

SEQ ID NO: 550549 - protein, 10 aa, Homo sapiens
  CDR3 for alpha chain variable domain of TCR clone 275275 (TRAV30, TRAJ48)
CGIGNEKLTF

SEQ ID NO: 550550 - protein, 16 aa, Homo sapiens
  CDR3 for beta chain variable domain of TCR clone 275275 (TRBV20-1, TRBJ1-4)
CSGSGQGLLTNEKLFF

SEQ ID NO: 550551 - protein, 11 aa, Homo sapiens
  CDR3 for alpha chain variable domain of TCR clone 275276 (TRAV4, TRAJ31)
CLVRDNARLMF

SEQ ID NO: 550552 - protein, 16 aa, Homo sapiens
  CDR3 for beta chain variable domain of TCR clone 275276 (TRBV7-2, TRBJ2-5)
CASSSKWLSGQETQYF

SEQ ID NO: 550553 - protein, 16 aa, Homo sapiens
  CDR3 for alpha chain variable domain of TCR clone 275277 (TRAV12-2, TRAJ18)
CAVTTDSGSTLGRLYF

SEQ ID NO: 550554 - protein, 15 aa, Homo sapiens
  CDR3 for beta chain variable domain of TCR clone 275277 (TRBV9, TRBJ1-6)
CASSVAGTGDSPLHF

SEQ ID NO: 550555 - protein, 13 aa, Homo sapiens
  CDR3 for alpha chain variable domain of TCR clone 275278 (TRAV12-2, TRAJ10)
YAVPTGGGNKLTF

SEQ ID NO: 550556 - protein, 11 aa, Homo sapiens
  CDR3 for beta chain variable domain of TCR clone 275278 (TRBV6-1, TRBJ2-1)
CASISSNEQFF

SEQ ID NO: 550557 - protein, 16 aa, Homo sapiens
  CDR3 for alpha chain variable domain of TCR clone 275279 (TRAV8-3, TRAJ10)
CAVGPGGTGGGNKLTS

SEQ ID NO: 550558 - protein, 13 aa, Homo sapiens
  CDR3 for beta chain variable domain of TCR clone 275279 (TRBV18, TRBJ1-1)
CASSPGPSGEAFF

SEQ ID NO: 550559 - protein, 12 aa, Homo sapiens
  CDR3 for alpha chain variable domain of TCR clone 275280 (TRAV21, TRAJ49)
CAVTNTGNQFYF

SEQ ID NO: 550560 - protein, 17 aa, Homo sapiens
  CDR3 for beta chain variable domain of TCR clone 275280 (TRBV13, TRBJ2-3)
CASSLSRVAVGRNTQYF

SEQ ID NO: 550561 - protein, 13 aa, Homo sapiens
  CDR3 for alpha chain variable domain of TCR clone 275281 (TRAV12-1, TRAJ17)
FVVNKAAGNKLTF

SEQ ID NO: 550562 - protein, 16 aa, Homo sapiens
  CDR3 for beta chain variable domain of TCR clone 275281 (TRBV11-2, TRBJ2-2)
CASSLRTGNLIGELFF

SEQ ID NO: 550563 - protein, 14 aa, Homo sapiens
  CDR3 for alpha chain variable domain of TCR clone 275282 (TRAV13-1, TRAJ40)
CSASRASGTYKYIF

SEQ ID NO: 550564 - protein, 13 aa, Homo sapiens
  CDR3 for beta chain variable domain of TCR clone 275282 (TRBV29-1, TRBJ2-7)
CSVGRTGGYEQYF

SEQ ID NO: 550565 - protein, 12 aa, Homo sapiens
  CDR3 for alpha chain variable domain of TCR clone 275283 (TRAV1-1, TRAJ39)
CAVPVVGNMLTF

SEQ ID NO: 550566 - protein, 16 aa, Homo sapiens
  CDR3 for beta chain variable domain of TCR clone 275283 (TRBV7-2, TRBJ1-2)
CASSSNQDRRGHGYTF

SEQ ID NO: 550567 - protein, 14 aa, Homo sapiens
  CDR3 for alpha chain variable domain of TCR clone 275284 (TRAV12-3, TRAJ10)
SHLPLTGGGNKLTF

SEQ ID NO: 550568 - protein, 14 aa, Homo sapiens
  CDR3 for beta chain variable domain of TCR clone 275284 (TRBV7-2, TRBJ1-3)
CASSLSRSGNTIYF

SEQ ID NO: 550569 - protein, 14 aa, Homo sapiens
  CDR3 for alpha chain variable domain of TCR clone 275285 (TRAV26-1, TRAJ38)
CIADNAGNNRKLIW

SEQ ID NO: 550570 - protein, 13 aa, Homo sapiens
  CDR3 for beta chain variable domain of TCR clone 275285 (TRBV7-3, TRBJ1-1)
CQQLKGGNTEAFF

SEQ ID NO: 550571 - protein, 16 aa, Homo sapiens
  CDR3 for alpha chain variable domain of TCR clone 275286 (TRAV30, TRAJ24)
CGTGIVDADSWGKFQF

SEQ ID NO: 550572 - protein, 18 aa, Homo sapiens
  CDR3 for beta chain variable domain of TCR clone 275286 (TRBV20-1, TRBJ2-6)
CNAETTPTHGSGANVLTF

SEQ ID NO: 550573 - protein, 18 aa, Homo sapiens
  CDR3 for alpha chain variable domain of TCR clone 275287 (TRAV13-2, TRAJ52)
CAETPLNAGGTSSGKLTF

SEQ ID NO: 550574 - protein, 15 aa, Homo sapiens
  CDR3 for beta chain variable domain of TCR clone 275287 (TRBV7-2, TRBJ2-7)
CASSLKGALTYEQYF

SEQ ID NO: 550575 - protein, 14 aa, Homo sapiens
  CDR3 for alpha chain variable domain of TCR clone 275288 (TRAV1-2, TRAJ16)
CAVNGFSDGQKLLF

SEQ ID NO: 550576 - protein, 16 aa, Homo sapiens
  CDR3 for beta chain variable domain of TCR clone 275288 (TRBV20-1, TRBJ1-4)
CSAPGQGLLTNEKLFF

SEQ ID NO: 550577 - protein, 14 aa, Homo sapiens
  CDR3 for alpha chain variable domain of TCR clone 275289 (TRAV1-2, TRAJ8)
CAVREDTGFQKLVF

SEQ ID NO: 550578 - protein, 15 aa, Homo sapiens
  CDR3 for beta chain variable domain of TCR clone 275289 (TRBV7-3, TRBJ2-1)
CASSQRGGALIEQFF

SEQ ID NO: 550579 - protein, 14 aa, Homo sapiens
  CDR3 for alpha chain variable domain of TCR clone 275290 (TRAV12-3, TRAJ10)
SHLPLTGGGNKLTF

SEQ ID NO: 550580 - protein, 17 aa, Homo sapiens
  CDR3 for beta chain variable domain of TCR clone 275290 (TRBV20-1, TRBJ2-7)
CSARDPEGDHREYEQYF

SEQ ID NO: 550581 - protein, 14 aa, Homo sapiens
  CDR3 for alpha chain variable domain of TCR clone 275291 (TRAV21, TRAJ15)
CAVRLNQAGTALIF

SEQ ID NO: 550582 - protein, 11 aa, Homo sapiens
  CDR3 for beta chain variable domain of TCR clone 275291 (TRBV20-1, TRBJ2-7)
CSARTSYEQYF

SEQ ID NO: 550583 - protein, 14 aa, Homo sapiens
  CDR3 for alpha chain variable domain of TCR clone 275292 (TRAV1-2, TRAJ16)
CAVNRLSDGQKLLF

SEQ ID NO: 550584 - protein, 14 aa, Homo sapiens
  CDR3 for beta chain variable domain of TCR clone 275292 (TRBV7-3, TRBJ2-1)
CASSLAGGTNEQFF

SEQ ID NO: 550585 - protein, 17 aa, Homo sapiens
  CDR3 for alpha chain variable domain of TCR clone 275293 (TRAV35, TRAJ47)
GLLDCRTHTEYGNKLVF

SEQ ID NO: 550586 - protein, 16 aa, Homo sapiens
  CDR3 for beta chain variable domain of TCR clone 275293 (TRBV15, TRBJ2-6)
CATSVNGGFLANVLTF

SEQ ID NO: 550587 - protein, 10 aa, Homo sapiens
  CDR3 for alpha chain variable domain of TCR clone 275294 (TRAV9-2, TRAJ49)
CALTGNQLYF

SEQ ID NO: 550588 - protein, 16 aa, Homo sapiens
  CDR3 for beta chain variable domain of TCR clone 275294 (TRBV19, TRBJ2-3)
CASSPGAASRTDTQYF

SEQ ID NO: 550589 - protein, 12 aa, Homo sapiens
  CDR3 for alpha chain variable domain of TCR clone 275295 (TRAV8-3, TRAJ41)
CAVGALGYALNF

SEQ ID NO: 550590 - protein, 16 aa, Homo sapiens
  CDR3 for beta chain variable domain of TCR clone 275295 (TRBV7-6, TRBJ2-3)
GASSDSRGEGTDTQYF

SEQ ID NO: 550591 - protein, 16 aa, Homo sapiens
  CDR3 for alpha chain variable domain of TCR clone 275296 (TRAV3, TRAJ32)
CAVQLWWCYKQAHLWN

SEQ ID NO: 550592 - protein, 15 aa, Homo sapiens
  CDR3 for beta chain variable domain of TCR clone 275296 (TRBV4-1, TRBJ2-7)
CASSQNTGRLYEQYF

SEQ ID NO: 550593 - protein, 14 aa, Homo sapiens
  CDR3 for alpha chain variable domain of TCR clone 275297 (TRAV12-3, TRAJ56)
WAMSVTGANSKLTF

SEQ ID NO: 550594 - protein, 17 aa, Homo sapiens
  CDR3 for beta chain variable domain of TCR clone 275297 (TRBV20-1, TRBJ2-3)
CSASLLGRGGSADTQYF

SEQ ID NO: 550595 - protein, 14 aa, Homo sapiens
  CDR3 for alpha chain variable domain of TCR clone 275298 (TRAV16, TRAJ57)
CALPTQGGSEQLVF

SEQ ID NO: 550596 - protein, 15 aa, Homo sapiens
  CDR3 for beta chain variable domain of TCR clone 275298 (TRBV28, TRBJ1-3)
CASWGGHLSGNTIYF

SEQ ID NO: 550597 - protein, 13 aa, Homo sapiens
  CDR3 for alpha chain variable domain of TCR clone 275299 (TRAV2, TRAJ40)
CAAVTSGTYKYIF

SEQ ID NO: 550598 - protein, 16 aa, Homo sapiens
  CDR3 for beta chain variable domain of TCR clone 275299 (TRBV11-1, TRBJ2-2)
CASSAEGLKNTGELFF

SEQ ID NO: 550599 - protein, 16 aa, Homo sapiens
  CDR3 for alpha chain variable domain of TCR clone 275300 (TRAV30, TRAJ24)
CGTEIVDADSWGKFEF

SEQ ID NO: 550600 - protein, 16 aa, Homo sapiens
  CDR3 for beta chain variable domain of TCR clone 275300 (TRBV2, TRBJ1-3)
CASSGGAGRSGNTMYF

SEQ ID NO: 550601 - protein, 13 aa, Homo sapiens
  CDR3 for alpha chain variable domain of TCR clone 275301 (TRAV3, TRAJ8)
CAVRFTGFKKLVF

SEQ ID NO: 550602 - protein, 12 aa, Homo sapiens
  CDR3 for beta chain variable domain of TCR clone 275301 (TRBV2, TRBJ1-2)
CASSGQTYGYTF

SEQ ID NO: 550603 - protein, 20 aa, Homo sapiens
  CDR3 for alpha chain variable domain of TCR clone 275302 (TRAV12-2, TRAJ52)
SPVIQPPARAGGTSYGKLTF

SEQ ID NO: 550604 - protein, 14 aa, Homo sapiens
  CDR3 for beta chain variable domain of TCR clone 275302 (TRBV6-1, TRBJ1-3)
CASVQGGGGNTIYF

SEQ ID NO: 550605 - protein, 17 aa, Homo sapiens
  CDR3 for alpha chain variable domain of TCR clone 275303 (TRAV3, TRAJ6)
CAVRDGPSAGGSYIPTF

SEQ ID NO: 550606 - protein, 15 aa, Homo sapiens
  CDR3 for beta chain variable domain of TCR clone 275303 (TRBV11-3, TRBJ2-7)
CASSPGPASSYEQYF

SEQ ID NO: 550607 - protein, 14 aa, Homo sapiens
  CDR3 for alpha chain variable domain of TCR clone 275304 (TRAV38-1, TRAJ40)
CALRPTSGTYKYIF

SEQ ID NO: 550608 - protein, 14 aa, Homo sapiens
  CDR3 for beta chain variable domain of TCR clone 275304 (TRBV7-2, TRBJ2-5)
CASSPRGSSETQYF

SEQ ID NO: 550609 - protein, 14 aa, Homo sapiens
  CDR3 for alpha chain variable domain of TCR clone 275305 (TRAV2, TRAJ20)
CAVEDVVNDYKLSF

SEQ ID NO: 550610 - protein, 15 aa, Homo sapiens
  CDR3 for beta chain variable domain of TCR clone 275305 (TRBV23-1, TRBJ2-1)
CASSQWPQLTMSSSS

SEQ ID NO: 550611 - protein, 13 aa, Homo sapiens
  CDR3 for alpha chain variable domain of TCR clone 275306 (TRAV30, TRAJ24)
CGTVTDSWGKLQF

SEQ ID NO: 550612 - protein, 15 aa, Homo sapiens
  CDR3 for beta chain variable domain of TCR clone 275306 (TRBV25-1, TRBJ1-4)
CASSPWDSTNEKLFF

SEQ ID NO: 550613 - protein, 13 aa, Homo sapiens
  CDR3 for alpha chain variable domain of TCR clone 275307 (TRAV27, TRAJ49)
CAPRPYTGNQFYF

SEQ ID NO: 550614 - protein, 17 aa, Homo sapiens
  CDR3 for beta chain variable domain of TCR clone 275307 (TRBV20-1, TRBJ2-2)
CSASGSGQGGLTGELFF

SEQ ID NO: 550615 - protein, 11 aa, Homo sapiens
  CDR3 for alpha chain variable domain of TCR clone 275308 (TRAV3, TRAJ21)
CAVGNFKKFYF

SEQ ID NO: 550616 - protein, 16 aa, Homo sapiens
  CDR3 for beta chain variable domain of TCR clone 275308 (TRBV19, TRBJ2-1)
CASSKAGPSSYNEQFS

SEQ ID NO: 550617 - protein, 14 aa, Homo sapiens
  CDR3 for alpha chain variable domain of TCR clone 275309 (TRAV1-2, TRAJ16)
CAVNRFSDGQKMLF

SEQ ID NO: 550618 - protein, 16 aa, Homo sapiens
  CDR3 for beta chain variable domain of TCR clone 275309 (TRBV12-4, TRBJ1-5)
CASSRPVGGSNQPQHF

SEQ ID NO: 550619 - protein, 12 aa, Homo sapiens
  CDR3 for alpha chain variable domain of TCR clone 275310 (TRAV12-2, TRAJ20)
CAVGPSDYKLSF

SEQ ID NO: 550620 - protein, 14 aa, Homo sapiens
  CDR3 for beta chain variable domain of TCR clone 275310 (TRBV6-1, TRBJ2-7)
CASNRARPDYEQYF

SEQ ID NO: 550621 - protein, 15 aa, Homo sapiens
  CDR3 for alpha chain variable domain of TCR clone 275311 (TRAV8-3, TRAJ45)
CASSYSGGGADGRTF

SEQ ID NO: 550622 - protein, 15 aa, Homo sapiens
  CDR3 for beta chain variable domain of TCR clone 275311 (TRBV27, TRBJ1-4)
CASSPRHATNEKLFF

SEQ ID NO: 550623 - protein, 11 aa, Homo sapiens
  CDR3 for alpha chain variable domain of TCR clone 275312 (TRAV12-1, TRAJ30)
CVVNGQDKIIF

SEQ ID NO: 550624 - protein, 14 aa, Homo sapiens
  CDR3 for beta chain variable domain of TCR clone 275312 (TRBV11-2, TRBJ2-7)
CASSPGQGLYEQYF

SEQ ID NO: 550625 - protein, 13 aa, Homo sapiens
  CDR3 for alpha chain variable domain of TCR clone 275313 (TRAV30, TRAJ24)
CGTVTDSWGKLQF

SEQ ID NO: 550626 - protein, 15 aa, Homo sapiens
  CDR3 for beta chain variable domain of TCR clone 275313 (TRBV19, TRBJ1-1)
CGSTSGQIQNTEAFF

SEQ ID NO: 550627 - protein, 12 aa, Homo sapiens
  CDR3 for alpha chain variable domain of TCR clone 275314 (TRAV12-1, TRAJ40)
CVVTSGTYKYIF

SEQ ID NO: 550628 - protein, 13 aa, Homo sapiens
  CDR3 for beta chain variable domain of TCR clone 275314 (TRBV19, TRBJ1-2)
CASSVPGQDGYTF

SEQ ID NO: 550629 - protein, 15 aa, Homo sapiens
  CDR3 for alpha chain variable domain of TCR clone 275315 (TRAV13-2, TRAJ24)
CAENSATDSWGKLQF

SEQ ID NO: 550630 - protein, 16 aa, Homo sapiens
  CDR3 for beta chain variable domain of TCR clone 275315 (TRBV5-5, TRBJ1-2)
CASSPTWGRGLYGYTF

SEQ ID NO: 550631 - protein, 11 aa, Homo sapiens
  CDR3 for alpha chain variable domain of TCR clone 275316 (TRAV3, TRAJ49)
CAPITGNQFYF

SEQ ID NO: 550632 - protein, 12 aa, Homo sapiens
  CDR3 for beta chain variable domain of TCR clone 275316 (TRBV7-8, TRBJ2-7)
CASSLGDREQYF

SEQ ID NO: 550633 - protein, 16 aa, Homo sapiens
  CDR3 for alpha chain variable domain of TCR clone 275317 (TRAV30, TRAJ57)
CGTGWAPQGGSEKLVF

SEQ ID NO: 550634 - protein, 13 aa, Homo sapiens
  CDR3 for beta chain variable domain of TCR clone 275317 (TRBV18, TRBJ1-1)
CQLTRIQGVEAFF

SEQ ID NO: 550635 - protein, 11 aa, Homo sapiens
  CDR3 for alpha chain variable domain of TCR clone 275318 (TRAV13-2, TRAJ15)
CSHQAGTALIF

SEQ ID NO: 550636 - protein, 14 aa, Homo sapiens
  CDR3 for beta chain variable domain of TCR clone 275318 (TRBV7-9, TRBJ2-5)
CASSLAFGQETQYF

SEQ ID NO: 550637 - protein, 16 aa, Homo sapiens
  CDR3 for alpha chain variable domain of TCR clone 275319 (TRAV8-3, TRAJ8)
CAVPRDGNTGFQKLVF

SEQ ID NO: 550638 - protein, 15 aa, Homo sapiens
  CDR3 for beta chain variable domain of TCR clone 275319 (TRBV6-1, TRBJ2-6)
CASSSLPSGANVLTF

SEQ ID NO: 550639 - protein, 15 aa, Homo sapiens
  CDR3 for alpha chain variable domain of TCR clone 275320 (TRAV8-4, TRAJ29)
CAVSEDFRGNTPLVF

SEQ ID NO: 550640 - protein, 13 aa, Homo sapiens
  CDR3 for beta chain variable domain of TCR clone 275320 (TRBV20-1, TRBJ1-1)
CSARAGGNTEAFF

SEQ ID NO: 550641 - protein, 14 aa, Homo sapiens
  CDR3 for alpha chain variable domain of TCR clone 275321 (TRAV1-2, TRAJ16)
CAVNRFSDGQNLLF

SEQ ID NO: 550642 - protein, 16 aa, Homo sapiens
  CDR3 for beta chain variable domain of TCR clone 275321 (TRBV12-4, TRBJ2-5)
CASSFFVRGRQETQYF

SEQ ID NO: 550643 - protein, 18 aa, Homo sapiens
  CDR3 for alpha chain variable domain of TCR clone 275322 (TRAV26-2, TRAJ54)
CILRDVEVGIQGAQKLVF

SEQ ID NO: 550644 - protein, 14 aa, Homo sapiens
  CDR3 for beta chain variable domain of TCR clone 275322 (TRBV12-4, TRBJ2-1)
CASSLGQGASEQFF

SEQ ID NO: 550645 - protein, 16 aa, Homo sapiens
  CDR3 for alpha chain variable domain of TCR clone 275323 (TRAV30, TRAJ26)
CGTESVGDNYGQNFVF

SEQ ID NO: 550646 - protein, 13 aa, Homo sapiens
  CDR3 for beta chain variable domain of TCR clone 275323 (TRBV19, TRBJ1-2)
CASSISEDYCYTF

SEQ ID NO: 550647 - protein, 14 aa, Homo sapiens
  CDR3 for alpha chain variable domain of TCR clone 275324 (TRAV12-2, TRAJ45)
CALPERGGADGLTS

SEQ ID NO: 550648 - protein, 14 aa, Homo sapiens
  CDR3 for beta chain variable domain of TCR clone 275324 (TRBV18, TRBJ1-5)
CASSPGNSNQPQHF

SEQ ID NO: 550649 - protein, 14 aa, Homo sapiens
  CDR3 for alpha chain variable domain of TCR clone 275325 (TRAV17, TRAJ57)
CATDPQGGSENLVF

SEQ ID NO: 550650 - protein, 15 aa, Homo sapiens
  CDR3 for beta chain variable domain of TCR clone 275325 (TRBV27, TRBJ2-1)
CASSNGGGSSNEQFF

SEQ ID NO: 550651 - protein, 13 aa, Homo sapiens
  CDR3 for alpha chain variable domain of TCR clone 275326 (TRAV12-3, TRAJ35)
CAMAIGFGNVLHC

SEQ ID NO: 550652 - protein, 15 aa, Homo sapiens
  CDR3 for beta chain variable domain of TCR clone 275326 (TRBV20-1, TRBJ2-1)
CSARGSGTYYNEHFF

SEQ ID NO: 550653 - protein, 14 aa, Homo sapiens
  CDR3 for alpha chain variable domain of TCR clone 275327 (TRAV4, TRAJ6)
CLVGEAGGSYIPTF

SEQ ID NO: 550654 - protein, 13 aa, Homo sapiens
  CDR3 for beta chain variable domain of TCR clone 275327 (TRBV7-3, TRBJ1-1)
CASSQDWGAEAFF

SEQ ID NO: 550655 - protein, 15 aa, Homo sapiens
  CDR3 for alpha chain variable domain of TCR clone 275328 (TRAV4, TRAJ10)
CLVGDGSGGGNKPTF

SEQ ID NO: 550656 - protein, 16 aa, Homo sapiens
  CDR3 for beta chain variable domain of TCR clone 275328 (TRBV19, TRBJ2-1)
CASSKAGPSSYNEQFF

SEQ ID NO: 550657 - protein, 16 aa, Homo sapiens
  CDR3 for alpha chain variable domain of TCR clone 275329 (TRAV35, TRAJ28)
CAGQKYSGAGSYQLTF

SEQ ID NO: 550658 - protein, 16 aa, Homo sapiens
  CDR3 for beta chain variable domain of TCR clone 275329 (TRBV7-3, TRBJ2-2)
CASSFKRGTLSGELFF

SEQ ID NO: 550659 - protein, 18 aa, Homo sapiens
  CDR3 for alpha chain variable domain of TCR clone 275330 (TRAV26-1, TRAJ52)
CIVRVEGAGGTSYGKLTF

SEQ ID NO: 550660 - protein, 14 aa, Homo sapiens
  CDR3 for beta chain variable domain of TCR clone 275330 (TRBV7-9, TRBJ2-2)
CASSLGHRTGELFF

SEQ ID NO: 550661 - protein, 17 aa, Homo sapiens
  CDR3 for alpha chain variable domain of TCR clone 275331 (TRAV3, TRAJ28)
CAVRDGYSGAGSYQLTF

SEQ ID NO: 550662 - protein, 16 aa, Homo sapiens
  CDR3 for beta chain variable domain of TCR clone 275331 (TRBV25-1, TRBJ1-1)
CASSGDRDRVRIEAFF

SEQ ID NO: 550663 - protein, 10 aa, Homo sapiens
  CDR3 for alpha chain variable domain of TCR clone 275332 (TRAV8-3, TRAJ28)
GAVGSYQLTF

SEQ ID NO: 550664 - protein, 14 aa, Homo sapiens
  CDR3 for beta chain variable domain of TCR clone 275332 (TRBV7-2, TRBJ2-7)
CASRSQGAAYEQYF

SEQ ID NO: 550665 - protein, 12 aa, Homo sapiens
  CDR3 for alpha chain variable domain of TCR clone 275333 (TRAV26-2, TRAJ21)
CILKGNFDKFYF

SEQ ID NO: 550666 - protein, 14 aa, Homo sapiens
  CDR3 for beta chain variable domain of TCR clone 275333 (TRBV12-4, TRBJ1-1)
CASSLGTGGTEAFF

SEQ ID NO: 550667 - protein, 14 aa, Homo sapiens
  CDR3 for alpha chain variable domain of TCR clone 275334 (TRAV26-1, TRAJ45)
CIEVTGGGADGLTF

SEQ ID NO: 550668 - protein, 16 aa, Homo sapiens
  CDR3 for beta chain variable domain of TCR clone 275334 (TRBV10-2, TRBJ1-1)
CASSEFGEGASTEAVF

SEQ ID NO: 550669 - protein, 16 aa, Homo sapiens
  CDR3 for alpha chain variable domain of TCR clone 275335 (TRAV35, TRAJ37)
CRAFLRGSSNTGKLIF

SEQ ID NO: 550670 - protein, 13 aa, Homo sapiens
  CDR3 for beta chain variable domain of TCR clone 275335 (TRBV2, TRBJ1-2)
CASSVRGNYGYTF

SEQ ID NO: 550671 - protein, 14 aa, Homo sapiens
  CDR3 for alpha chain variable domain of TCR clone 275336 (TRAV35, TRAJ24)
CAGPRRNSWGKLQF

SEQ ID NO: 550672 - protein, 12 aa, Homo sapiens
  CDR3 for beta chain variable domain of TCR clone 275336 (TRBV12-4, TRBJ2-3)
CASSLGQDTQYF

SEQ ID NO: 550673 - protein, 13 aa, Homo sapiens
  CDR3 for alpha chain variable domain of TCR clone 275337 (TRAV26-2, TRAJ57)
CILSRGGSAKLVF

SEQ ID NO: 550674 - protein, 16 aa, Homo sapiens
  CDR3 for beta chain variable domain of TCR clone 275337 (TRBV18, TRBJ1-5)
CASSPRTGGGNQPQHF

SEQ ID NO: 550675 - protein, 16 aa, Homo sapiens
  CDR3 for alpha chain variable domain of TCR clone 275338 (TRAV21, TRAJ17)
CAVRPGEEAAGNKLTF

SEQ ID NO: 550676 - protein, 15 aa, Homo sapiens
  CDR3 for beta chain variable domain of TCR clone 275338 (TRBV2, TRBJ2-7)
CSSEPWTGPSYEQYF

SEQ ID NO: 550677 - protein, 13 aa, Homo sapiens
  CDR3 for alpha chain variable domain of TCR clone 275339 (TRAV35, TRAJ21)
CARQLSNFNKFYF

SEQ ID NO: 550678 - protein, 11 aa, Homo sapiens
  CDR3 for beta chain variable domain of TCR clone 275339 (TRBV7-6, TRBJ2-5)
CASSSQETQYF

SEQ ID NO: 550679 - protein, 10 aa, Homo sapiens
  CDR3 for alpha chain variable domain of TCR clone 275340 (TRAV26-1, TRAJ40)
CIAGTYKYIF

SEQ ID NO: 550680 - protein, 15 aa, Homo sapiens
  CDR3 for beta chain variable domain of TCR clone 275340 (TRBV6-3, TRBJ2-7)
CASSSPGTVFYEQYY

SEQ ID NO: 550681 - protein, 16 aa, Homo sapiens
  CDR3 for alpha chain variable domain of TCR clone 275341 (TRAV23/DV6, TRAJ9)
CAASIGGNTGGYKTIF

SEQ ID NO: 550682 - protein, 14 aa, Homo sapiens
  CDR3 for beta chain variable domain of TCR clone 275341 (TRBV9, TRBJ2-7)
CASSVGVGSYEQYF

SEQ ID NO: 550683 - protein, 17 aa, Homo sapiens
  CDR3 for alpha chain variable domain of TCR clone 275342 (TRAV3, TRAJ6)
CAVRDGPRAGGSYTPKF

SEQ ID NO: 550684 - protein, 14 aa, Homo sapiens
  CDR3 for beta chain variable domain of TCR clone 275342 (TRBV7-2, TRBJ2-7)
CASSPKTSFYEQYF

SEQ ID NO: 550685 - protein, 18 aa, Homo sapiens
  CDR3 for alpha chain variable domain of TCR clone 275343 (TRAV13-1, TRAJ4)
CSKYKEVPWRGGYNKLIF

SEQ ID NO: 550686 - protein, 13 aa, Homo sapiens
  CDR3 for beta chain variable domain of TCR clone 275343 (TRBV11-3, TRBJ2-3)
CASSHDTKDTQYF

SEQ ID NO: 550687 - protein, 17 aa, Homo sapiens
  CDR3 for alpha chain variable domain of TCR clone 275344 (TRAV12-2, TRAJ36)
CAVKDNLFFGTGTRLNS

SEQ ID NO: 550688 - protein, 15 aa, Homo sapiens
  CDR3 for beta chain variable domain of TCR clone 275344 (TRBV28, TRBJ2-2)
CASTVAGANTGELFF

SEQ ID NO: 550689 - protein, 18 aa, Homo sapiens
  CDR3 for alpha chain variable domain of TCR clone 275345 (TRAV1-2, TRAJ18)
CAVRDMGDRGSTMGRLYF

SEQ ID NO: 550690 - protein, 16 aa, Homo sapiens
  CDR3 for beta chain variable domain of TCR clone 275345 (TRBV29-1, TRBJ1-2)
CSVEANRDIANYGYTF

SEQ ID NO: 550691 - protein, 14 aa, Homo sapiens
  CDR3 for alpha chain variable domain of TCR clone 275346 (TRAV1-2, TRAJ16)
CAVNRFSDAQKLLF

SEQ ID NO: 550692 - protein, 16 aa, Homo sapiens
  CDR3 for beta chain variable domain of TCR clone 275346 (TRBV7-3, TRBJ2-2)
CASSLKRGTLSGELFF

SEQ ID NO: 550693 - protein, 15 aa, Homo sapiens
  CDR3 for alpha chain variable domain of TCR clone 275347 (TRAV26-1, TRAJ29)
CIVRVEGSGDTPLVF

SEQ ID NO: 550694 - protein, 15 aa, Homo sapiens
  CDR3 for beta chain variable domain of TCR clone 275347 (TRBV7-9, TRBJ1-5)
SASSQGHQPNQPQHF

SEQ ID NO: 550695 - protein, 14 aa, Homo sapiens
  CDR3 for alpha chain variable domain of TCR clone 275348 (TRAV20, TRAJ56)
CAVQFGGDNSKLTF

SEQ ID NO: 550696 - protein, 14 aa, Homo sapiens
  CDR3 for beta chain variable domain of TCR clone 275348 (TRBV20-1, TRBJ2-7)
CSAKRGRSTYEQYF

SEQ ID NO: 550697 - protein, 16 aa, Homo sapiens
  CDR3 for alpha chain variable domain of TCR clone 275349 (TRAV23/DV6, TRAJ21)
CAASSGGGTTSTNFTL

SEQ ID NO: 550698 - protein, 11 aa, Homo sapiens
  CDR3 for beta chain variable domain of TCR clone 275349 (TRBV7-8, TRBJ2-7)
CAGSPSLEQYF

SEQ ID NO: 550699 - protein, 13 aa, Homo sapiens
  CDR3 for alpha chain variable domain of TCR clone 275350 (TRAV17, TRAJ26)
CATVDNYGQNFVF

SEQ ID NO: 550700 - protein, 17 aa, Homo sapiens
  CDR3 for beta chain variable domain of TCR clone 275350 (TRBV25-1, TRBJ2-7)
CASSDARVVFSSYEQYF

SEQ ID NO: 550701 - protein, 17 aa, Homo sapiens
  CDR3 for alpha chain variable domain of TCR clone 275351 (TRAV26-1, TRAJ36)
FIVRPPGDQTGANNLFF

SEQ ID NO: 550702 - protein, 15 aa, Homo sapiens
  CDR3 for beta chain variable domain of TCR clone 275351 (TRBV10-3, TRBJ2-6)
CATPAAASGANVLTF

SEQ ID NO: 550703 - protein, 15 aa, Homo sapiens
  CDR3 for alpha chain variable domain of TCR clone 275352 (TRAV8-3, TRAJ45)
CASSYSGGGADGLTL

SEQ ID NO: 550704 - protein, 14 aa, Homo sapiens
  CDR3 for beta chain variable domain of TCR clone 275352 (TRBV10-3, TRBJ2-7)
CASKLAVNYEQYFG

SEQ ID NO: 550705 - protein, 14 aa, Homo sapiens
  CDR3 for alpha chain variable domain of TCR clone 275353 (TRAV23/DV6, TRAJ4)
CAANLSRGYNKLIF

SEQ ID NO: 550706 - protein, 17 aa, Homo sapiens
  CDR3 for beta chain variable domain of TCR clone 275353 (TRBV4-1, TRBJ1-3)
CASSPQRGIRFGNTIYF

SEQ ID NO: 550707 - protein, 11 aa, Homo sapiens
  CDR3 for alpha chain variable domain of TCR clone 275354 (TRAV1-2, TRAJ40)
CAVPGTYKYIF

SEQ ID NO: 550708 - protein, 11 aa, Homo sapiens
  CDR3 for beta chain variable domain of TCR clone 275354 (TRBV7-2, TRBJ2-7)
CASSSGLWQYF

SEQ ID NO: 550709 - protein, 15 aa, Homo sapiens
  CDR3 for alpha chain variable domain of TCR clone 275355 (TRAV8-1, TRAJ23)
CAVNSHYNQGGKLTF

SEQ ID NO: 550710 - protein, 13 aa, Homo sapiens
  CDR3 for beta chain variable domain of TCR clone 275355 (TRBV12-4, TRBJ2-7)
CASSPTETYEQYF

SEQ ID NO: 550711 - protein, 14 aa, Homo sapiens
  CDR3 for alpha chain variable domain of TCR clone 275356 (TRAV16, TRAJ33)
CALSATDSNYQLIW

SEQ ID NO: 550712 - protein, 16 aa, Homo sapiens
  CDR3 for beta chain variable domain of TCR clone 275356 (TRBV25-1, TRBJ2-7)
CASSELTGGGIYEQYF

SEQ ID NO: 550713 - protein, 16 aa, Homo sapiens
  CDR3 for alpha chain variable domain of TCR clone 275357 (TRAV12-3, TRAJ53)
CAMSPGSGGSSYKLTF

SEQ ID NO: 550714 - protein, 17 aa, Homo sapiens
  CDR3 for beta chain variable domain of TCR clone 275357 (TRBV28, TRBJ2-5)
CASSTPEGDALQETQYF

SEQ ID NO: 550715 - protein, 14 aa, Homo sapiens
  CDR3 for alpha chain variable domain of TCR clone 275358 (TRAV17, TRAJ45)
CATDARGGTDGLTF

SEQ ID NO: 550716 - protein, 11 aa, Homo sapiens
  CDR3 for beta chain variable domain of TCR clone 275358 (TRBV28, TRBJ2-5)
CATGNQETQYF

SEQ ID NO: 550717 - protein, 12 aa, Homo sapiens
  CDR3 for alpha chain variable domain of TCR clone 275359 (TRAV12-3, TRAJ17)
CAMTLTGNKLTF

SEQ ID NO: 550718 - protein, 15 aa, Homo sapiens
  CDR3 for beta chain variable domain of TCR clone 275359 (TRBV4-1, TRBJ1-1)
CASSQAPGLNTEAFF

SEQ ID NO: 550719 - protein, 14 aa, Homo sapiens
  CDR3 for alpha chain variable domain of TCR clone 275360 (TRAV8-4, TRAJ34)
CAVSDPGDTDKLIF

SEQ ID NO: 550720 - protein, 11 aa, Homo sapiens
  CDR3 for beta chain variable domain of TCR clone 275360 (TRBV20-1, TRBJ2-7)
CSARTSYEQYF

SEQ ID NO: 550721 - protein, 13 aa, Homo sapiens
  CDR3 for alpha chain variable domain of TCR clone 275361 (TRAV8-6, TRAJ50)
CAVIKTSYDKVIF

SEQ ID NO: 550722 - protein, 17 aa, Homo sapiens
  CDR3 for beta chain variable domain of TCR clone 275361 (TRBV13, TRBJ2-3)
CASSLSRVAGGRNTQYF

SEQ ID NO: 550723 - protein, 14 aa, Homo sapiens
  CDR3 for alpha chain variable domain of TCR clone 275362 (TRAV17, TRAJ12)
CATDEKDSSYKLIF

SEQ ID NO: 550724 - protein, 16 aa, Homo sapiens
  CDR3 for beta chain variable domain of TCR clone 275362 (TRBV11-2, TRBJ2-1)
CASSPRLAGVYNEQFC

SEQ ID NO: 550725 - protein, 13 aa, Homo sapiens
  CDR3 for alpha chain variable domain of TCR clone 275363 (TRAV17, TRAJ29)
CATGPSGNTPLVF

SEQ ID NO: 550726 - protein, 13 aa, Homo sapiens
  CDR3 for beta chain variable domain of TCR clone 275363 (TRBV20-1, TRBJ1-1)
CSARGGGNTEAFF

SEQ ID NO: 550727 - protein, 11 aa, Homo sapiens
  CDR3 for alpha chain variable domain of TCR clone 275364 (TRAV3, TRAJ21)
CAVGNFNKFYF

SEQ ID NO: 550728 - protein, 13 aa, Homo sapiens
  CDR3 for beta chain variable domain of TCR clone 275364 (TRBV4-1, TRBJ2-2)
CATSQENTGELFF

SEQ ID NO: 550729 - protein, 14 aa, Homo sapiens
  CDR3 for alpha chain variable domain of TCR clone 275365 (TRAV16, TRAJ15)
FALSGPQAGTALIF

SEQ ID NO: 550730 - protein, 17 aa, Homo sapiens
  CDR3 for beta chain variable domain of TCR clone 275365 (TRBV7-8, TRBJ2-6)
CASSAGTGGAGANVLTF

SEQ ID NO: 550731 - protein, 15 aa, Homo sapiens
  CDR3 for alpha chain variable domain of TCR clone 275366 (TRAV21, TRAJ40)
CAVRPQTSGTYKYIF

SEQ ID NO: 550732 - protein, 13 aa, Homo sapiens
  CDR3 for beta chain variable domain of TCR clone 275366 (TRBV19, TRBJ2-5)
CASSGRAGETQYF

SEQ ID NO: 550733 - protein, 14 aa, Homo sapiens
  CDR3 for alpha chain variable domain of TCR clone 275367 (TRAV16, TRAJ32)
CALKSGGATNKLIF

SEQ ID NO: 550734 - protein, 13 aa, Homo sapiens
  CDR3 for beta chain variable domain of TCR clone 275367 (TRBV15, TRBJ1-6)
CAASGGLNSPLHF

SEQ ID NO: 550735 - protein, 13 aa, Homo sapiens
  CDR3 for alpha chain variable domain of TCR clone 275368 (TRAV2, TRAJ15)
CAVASQAGTALIF

SEQ ID NO: 550736 - protein, 14 aa, Homo sapiens
  CDR3 for beta chain variable domain of TCR clone 275368 (TRBV7-3, TRBJ2-7)
CASSLIGVSYEQYF

SEQ ID NO: 550737 - protein, 13 aa, Homo sapiens
  CDR3 for alpha chain variable domain of TCR clone 275369 (TRAV8-2, TRAJ43)
CVVIDQGDNDMRF

SEQ ID NO: 550738 - protein, 12 aa, Homo sapiens
  CDR3 for beta chain variable domain of TCR clone 275369 (TRBV7-9, TRBJ2-7)
CASRTGFDEQYF

SEQ ID NO: 550739 - protein, 18 aa, Homo sapiens
  CDR3 for alpha chain variable domain of TCR clone 275370 (TRAV35, TRAJ52)
CAGLLRYPGGTSYGKLTF

SEQ ID NO: 550740 - protein, 11 aa, Homo sapiens
  CDR3 for beta chain variable domain of TCR clone 275370 (TRBV11-2, TRBJ2-2)
CASSLPGELFF

SEQ ID NO: 550741 - protein, 12 aa, Homo sapiens
  CDR3 for alpha chain variable domain of TCR clone 275371 (TRAV12-3, TRAJ17)
CAMKLTGNKLTF

SEQ ID NO: 550742 - protein, 11 aa, Homo sapiens
  CDR3 for beta chain variable domain of TCR clone 275371 (TRBV11-2, TRBJ1-1)
CASSINTEAFF

SEQ ID NO: 550743 - protein, 14 aa, Homo sapiens
  CDR3 for alpha chain variable domain of TCR clone 275372 (TRAV27, TRAJ36)
CAGARQTGANNLFF

SEQ ID NO: 550744 - protein, 13 aa, Homo sapiens
  CDR3 for beta chain variable domain of TCR clone 275372 (TRBV4-1, TRBJ2-1)
CASSQAGGDEQFF

SEQ ID NO: 550745 - protein, 15 aa, Homo sapiens
  CDR3 for alpha chain variable domain of TCR clone 275373 (TRAV30, TRAJ57)
CGAAIPQGGSEKLVF

SEQ ID NO: 550746 - protein, 13 aa, Homo sapiens
  CDR3 for beta chain variable domain of TCR clone 275373 (TRBV7-9, TRBJ1-2)
CASSPSNFWGYTF

SEQ ID NO: 550747 - protein, 13 aa, Homo sapiens
  CDR3 for alpha chain variable domain of TCR clone 275374 (TRAV9-2, TRAJ58)
CSATGTSGSWLTF

SEQ ID NO: 550748 - protein, 14 aa, Homo sapiens
  CDR3 for beta chain variable domain of TCR clone 275374 (TRBV7-9, TRBJ2-1)
CASSPRDSLYEQFF

SEQ ID NO: 550749 - protein, 12 aa, Homo sapiens
  CDR3 for alpha chain variable domain of TCR clone 275375 (TRAV1-1, TRAJ39)
FAVPVVGNMLTF

SEQ ID NO: 550750 - protein, 17 aa, Homo sapiens
  CDR3 for beta chain variable domain of TCR clone 275375 (TRBV28, TRBJ2-5)
CASSTPEGDALQETQYF

SEQ ID NO: 550751 - protein, 14 aa, Homo sapiens
  CDR3 for alpha chain variable domain of TCR clone 275376 (TRAV1-2, TRAJ8)
CAVREDTGFQKLVF

SEQ ID NO: 550752 - protein, 16 aa, Homo sapiens
  CDR3 for beta chain variable domain of TCR clone 275376 (TRBV11-2, TRBJ1-2)
CASSPSGREANYGYTF

SEQ ID NO: 550753 - protein, 13 aa, Homo sapiens
  CDR3 for alpha chain variable domain of TCR clone 275377 (TRAV17, TRAJ40)
CATLPSGTYKYIF

SEQ ID NO: 550754 - protein, 15 aa, Homo sapiens
  CDR3 for beta chain variable domain of TCR clone 275377 (TRBV3-1, TRBJ2-5)
CASSQEVRLEETQYF

SEQ ID NO: 550755 - protein, 13 aa, Homo sapiens
  CDR3 for alpha chain variable domain of TCR clone 275378 (TRAV35, TRAJ33)
CAGQLYGVYQLIW

SEQ ID NO: 550756 - protein, 14 aa, Homo sapiens
  CDR3 for beta chain variable domain of TCR clone 275378 (TRBV7-2, TRBJ1-1)
CASSLGVAGTEAFF

SEQ ID NO: 550757 - protein, 19 aa, Homo sapiens
  CDR3 for alpha chain variable domain of TCR clone 275379 (TRAV1-2, TRAJ26)
CLLPLCCERPDNYGQNFVF

SEQ ID NO: 550758 - protein, 11 aa, Homo sapiens
  CDR3 for beta chain variable domain of TCR clone 275379 (TRBV12-4, TRBJ2-3)
CASTATDKQYF

SEQ ID NO: 550759 - protein, 14 aa, Homo sapiens
  CDR3 for alpha chain variable domain of TCR clone 275380 (TRAV1-2, TRAJ13)
CAVLNSGGYQKVTF

SEQ ID NO: 550760 - protein, 16 aa, Homo sapiens
  CDR3 for beta chain variable domain of TCR clone 275380 (TRBV7-2, TRBJ2-1)
CASSQSSGNLPNEQFF

SEQ ID NO: 550761 - protein, 15 aa, Homo sapiens
  CDR3 for alpha chain variable domain of TCR clone 275381 (TRAV8-1, TRAJ6)
CAVNAGAGGSYIPTF

SEQ ID NO: 550762 - protein, 14 aa, Homo sapiens
  CDR3 for beta chain variable domain of TCR clone 275381 (TRBV25-1, TRBJ1-6)
CASSLSADISPLHF

SEQ ID NO: 550763 - protein, 16 aa, Homo sapiens
  CDR3 for alpha chain variable domain of TCR clone 275382 (TRAV12-1, TRAJ28)
CVVIAYSGAGSYQLTF

SEQ ID NO: 550764 - protein, 14 aa, Homo sapiens
  CDR3 for beta chain variable domain of TCR clone 275382 (TRBV19, TRBJ2-1)
CASPTFVLSGEQFF

SEQ ID NO: 550765 - protein, 12 aa, Homo sapiens
  CDR3 for alpha chain variable domain of TCR clone 275383 (TRAV13-1, TRAJ45)
CAATRGADGLTF

SEQ ID NO: 550766 - protein, 15 aa, Homo sapiens
  CDR3 for beta chain variable domain of TCR clone 275383 (TRBV27, TRBJ2-1)
CASSNGGGSYNEQFF

SEQ ID NO: 550767 - protein, 15 aa, Homo sapiens
  CDR3 for alpha chain variable domain of TCR clone 275384 (TRAV23/DV6, TRAJ18)
CAARYRGSTLGRLYF

SEQ ID NO: 550768 - protein, 14 aa, Homo sapiens
  CDR3 for beta chain variable domain of TCR clone 275384 (TRBV28, TRBJ1-2)
CASRIQGANYGYTF

SEQ ID NO: 550769 - protein, 12 aa, Homo sapiens
  CDR3 for alpha chain variable domain of TCR clone 275385 (TRAV20, TRAJ34)
CAVKDNTDKLIF

SEQ ID NO: 550770 - protein, 14 aa, Homo sapiens
  CDR3 for beta chain variable domain of TCR clone 275385 (TRBV7-9, TRBJ2-7)
CASSRPGGHYEQYF

SEQ ID NO: 550771 - protein, 13 aa, Homo sapiens
  CDR3 for alpha chain variable domain of TCR clone 275386 (TRAV2, TRAJ24)
CAVTTESWGKLQF

SEQ ID NO: 550772 - protein, 14 aa, Homo sapiens
  CDR3 for beta chain variable domain of TCR clone 275386 (TRBV13, TRBJ2-5)
CASSLGRGQETQYF

SEQ ID NO: 550773 - protein, 13 aa, Homo sapiens
  CDR3 for alpha chain variable domain of TCR clone 275387 (TRAV21, TRAJ3)
CCEPYSSASKIIF

SEQ ID NO: 550774 - protein, 12 aa, Homo sapiens
  CDR3 for beta chain variable domain of TCR clone 275387 (TRBV12-5, TRBJ2-5)
CASGQGVETQYF

SEQ ID NO: 550775 - protein, 16 aa, Homo sapiens
  CDR3 for alpha chain variable domain of TCR clone 275388 (TRAV26-1, TRAJ50)
CIVRALMKTSYDKVIF

SEQ ID NO: 550776 - protein, 16 aa, Homo sapiens
  CDR3 for beta chain variable domain of TCR clone 275388 (TRBV6-4, TRBJ1-2)
CASSEAVEDPNYGYTF

SEQ ID NO: 550777 - protein, 11 aa, Homo sapiens
  CDR3 for alpha chain variable domain of TCR clone 275389 (TRAV2, TRAJ31)
CAAGPPARLMF

SEQ ID NO: 550778 - protein, 15 aa, Homo sapiens
  CDR3 for beta chain variable domain of TCR clone 275389 (TRBV7-8, TRBJ2-3)
CASSPRTGSTDTQYF

SEQ ID NO: 550779 - protein, 14 aa, Homo sapiens
  CDR3 for alpha chain variable domain of TCR clone 275390 (TRAV12-2, TRAJ17)
CAVLFKAAGTKLTF

SEQ ID NO: 550780 - protein, 12 aa, Homo sapiens
  CDR3 for beta chain variable domain of TCR clone 275390 (TRBV11-2, TRBJ2-2)
CASSLGGGELFF

SEQ ID NO: 550781 - protein, 18 aa, Homo sapiens
  CDR3 for alpha chain variable domain of TCR clone 275391 (TRAV21, TRAJ52)
CAARPSPPGGTSYGTLTF

SEQ ID NO: 550782 - protein, 17 aa, Homo sapiens
  CDR3 for beta chain variable domain of TCR clone 275391 (TRBV13, TRBJ2-3)
CASSLSRVAGGRNTQYF

SEQ ID NO: 550783 - protein, 15 aa, Homo sapiens
  CDR3 for alpha chain variable domain of TCR clone 275392 (TRAV9-2, TRAJ56)
CALSDVDGANSKLTL

SEQ ID NO: 550784 - protein, 16 aa, Homo sapiens
  CDR3 for beta chain variable domain of TCR clone 275392 (TRBV27, TRBJ2-2)
CASSFRGLVRTGELFF

SEQ ID NO: 550785 - protein, 15 aa, Homo sapiens
  CDR3 for alpha chain variable domain of TCR clone 275393 (TRAV17, TRAJ37)
CATDGGSSNTGKLIF

SEQ ID NO: 550786 - protein, 13 aa, Homo sapiens
  CDR3 for beta chain variable domain of TCR clone 275393 (TRBV4-1, TRBJ2-1)
CASSQAGGDEQFF

SEQ ID NO: 550787 - protein, 13 aa, Homo sapiens
  CDR3 for alpha chain variable domain of TCR clone 275394 (TRAV20, TRAJ34)
CAVRSYNTNKLIF

SEQ ID NO: 550788 - protein, 15 aa, Homo sapiens
  CDR3 for beta chain variable domain of TCR clone 275394 (TRBV27, TRBJ1-3)
CASSPSPGSGNTIYF

SEQ ID NO: 550789 - protein, 13 aa, Homo sapiens
  CDR3 for alpha chain variable domain of TCR clone 275395 (TRAV8-2, TRAJ26)
CVVSLGYGQNFVF

SEQ ID NO: 550790 - protein, 13 aa, Homo sapiens
  CDR3 for beta chain variable domain of TCR clone 275395 (TRBV18, TRBJ2-3)
CASSTGRTDTQYF

SEQ ID NO: 550791 - protein, 14 aa, Homo sapiens
  CDR3 for alpha chain variable domain of TCR clone 275396 (TRAV8-2, TRAJ37)
CVVSLTGNTGKLIF

SEQ ID NO: 550792 - protein, 15 aa, Homo sapiens
  CDR3 for beta chain variable domain of TCR clone 275396 (TRBV15, TRBJ1-1)
CATSLQGGRNTEAFF

SEQ ID NO: 550793 - protein, 14 aa, Homo sapiens
  CDR3 for alpha chain variable domain of TCR clone 275397 (TRAV12-2, TRAJ13)
CAVKKTGGYQKVTF

SEQ ID NO: 550794 - protein, 20 aa, Homo sapiens
  CDR3 for beta chain variable domain of TCR clone 275397 (TRBV7-8, TRBJ2-2)
CASSHLFPGQTIHITGELFF

SEQ ID NO: 550795 - protein, 14 aa, Homo sapiens
  CDR3 for alpha chain variable domain of TCR clone 275398 (TRAV1-2, TRAJ8)
CAVREDTGFQKLVF

SEQ ID NO: 550796 - protein, 18 aa, Homo sapiens
  CDR3 for beta chain variable domain of TCR clone 275398 (TRBV4-1, TRBJ2-7)
CASRQDVQGLPTSSTSGR

SEQ ID NO: 550797 - protein, 15 aa, Homo sapiens
  CDR3 for alpha chain variable domain of TCR clone 275399 (TRAV12-1, TRAJ47)
CVVTNRLKGGNKLVL

SEQ ID NO: 550798 - protein, 19 aa, Homo sapiens
  CDR3 for beta chain variable domain of TCR clone 275399 (TRBV20-1, TRBJ2-5)
CSARPQGLAGTSKSGTQYF

SEQ ID NO: 550799 - protein, 13 aa, Homo sapiens
  CDR3 for alpha chain variable domain of TCR clone 275400 (TRAV13-2, TRAJ13)
CAERPGGYQKVTF

SEQ ID NO: 550800 - protein, 15 aa, Homo sapiens
  CDR3 for beta chain variable domain of TCR clone 275400 (TRBV11-3, TRBJ2-3)
CASLKDGREGDTQYF

SEQ ID NO: 550801 - protein, 14 aa, Homo sapiens
  CDR3 for alpha chain variable domain of TCR clone 275401 (TRAV8-4, TRAJ9)
CAVRINTGGFKTIF

SEQ ID NO: 550802 - protein, 11 aa, Homo sapiens
  CDR3 for beta chain variable domain of TCR clone 275401 (TRBV7-9, TRBJ2-1)
CASSLRDRATF

SEQ ID NO: 550803 - protein, 14 aa, Homo sapiens
  CDR3 for alpha chain variable domain of TCR clone 275402 (TRAV9-2, TRAJ20)
CALRDPLNDYKLSF

SEQ ID NO: 550804 - protein, 14 aa, Homo sapiens
  CDR3 for beta chain variable domain of TCR clone 275402 (TRBV4-1, TRBJ2-2)
CASSQAVNTGELFF

SEQ ID NO: 550805 - protein, 15 aa, Homo sapiens
  CDR3 for alpha chain variable domain of TCR clone 275403 (TRAV16, TRAJ12)
CSKWPLRDSSYKLIF

SEQ ID NO: 550806 - protein, 16 aa, Homo sapiens
  CDR3 for beta chain variable domain of TCR clone 275403 (TRBV4-1, TRBJ2-2)
CASSLRTLQNTGELFF

SEQ ID NO: 550807 - protein, 14 aa, Homo sapiens
  CDR3 for alpha chain variable domain of TCR clone 275404 (TRAV12-3, TRAJ10)
SHLPLTGGGNKLTF

SEQ ID NO: 550808 - protein, 12 aa, Homo sapiens
  CDR3 for beta chain variable domain of TCR clone 275404 (TRBV11-2, TRBJ2-7)
CASSPPADEQYF

SEQ ID NO: 550809 - protein, 13 aa, Homo sapiens
  CDR3 for alpha chain variable domain of TCR clone 275405 (TRAV21, TRAJ27)
CAARPGNAGKSTL

SEQ ID NO: 550810 - protein, 16 aa, Homo sapiens
  CDR3 for beta chain variable domain of TCR clone 275405 (TRBV20-1, TRBJ1-2)
CSAWMGQGVANYGYTF

SEQ ID NO: 550811 - protein, 15 aa, Homo sapiens
  CDR3 for alpha chain variable domain of TCR clone 275406 (TRAV12-2, TRAJ43)
CAFDMRFGAGTRLTI

SEQ ID NO: 550812 - protein, 18 aa, Homo sapiens
  CDR3 for beta chain variable domain of TCR clone 275406 (TRBV20-1, TRBJ2-3)
CSASGLAGGPGTTDTQYF

SEQ ID NO: 550813 - protein, 15 aa, Homo sapiens
  CDR3 for alpha chain variable domain of TCR clone 275407 (TRAV3, TRAJ13)
CAVRVYSGGYQKVTF

SEQ ID NO: 550814 - protein, 16 aa, Homo sapiens
  CDR3 for beta chain variable domain of TCR clone 275407 (TRBV4-2, TRBJ2-1)
CASSQETATPYNEQFF

SEQ ID NO: 550815 - protein, 12 aa, Homo sapiens
  CDR3 for alpha chain variable domain of TCR clone 275408 (TRAV12-1, TRAJ49)
CVGFLTGNQFYF

SEQ ID NO: 550816 - protein, 13 aa, Homo sapiens
  CDR3 for beta chain variable domain of TCR clone 275408 (TRBV28, TRBJ2-1)
CASSNRLVYEQFF

SEQ ID NO: 550817 - protein, 12 aa, Homo sapiens
  CDR3 for alpha chain variable domain of TCR clone 275409 (TRAV12-3, TRAJ17)
CAMTLTGNKLTF

SEQ ID NO: 550818 - protein, 12 aa, Homo sapiens
  CDR3 for beta chain variable domain of TCR clone 275409 (TRBV11-2, TRBJ2-2)
CASRLPTGELFF

SEQ ID NO: 550819 - protein, 14 aa, Homo sapiens
  CDR3 for alpha chain variable domain of TCR clone 275410 (TRAV1-2, TRAJ16)
CAVNRFSDGQKLLF

SEQ ID NO: 550820 - protein, 15 aa, Homo sapiens
  CDR3 for beta chain variable domain of TCR clone 275410 (TRBV2, TRBJ2-1)
CASSEEQEGDNEQFF

SEQ ID NO: 550821 - protein, 14 aa, Homo sapiens
  CDR3 for alpha chain variable domain of TCR clone 275411 (TRAV17, TRAJ31)
CATVLRNNNARLMF

SEQ ID NO: 550822 - protein, 17 aa, Homo sapiens
  CDR3 for beta chain variable domain of TCR clone 275411 (TRBV13, TRBJ2-3)
CASSLSRVAGGRNTQYF

SEQ ID NO: 550823 - protein, 13 aa, Homo sapiens
  CDR3 for alpha chain variable domain of TCR clone 275412 (TRAV12-3, TRAJ56)
CALATGANSKLTF

SEQ ID NO: 550824 - protein, 14 aa, Homo sapiens
  CDR3 for beta chain variable domain of TCR clone 275412 (TRBV7-3, TRBJ2-1)
CASSLAGGTNEQFF

SEQ ID NO: 550825 - protein, 14 aa, Homo sapiens
  CDR3 for alpha chain variable domain of TCR clone 275413 (TRAV12-3, TRAJ42)
CSMNYGGSQGNLIF

SEQ ID NO: 550826 - protein, 15 aa, Homo sapiens
  CDR3 for beta chain variable domain of TCR clone 275413 (TRBV5-7, TRBJ1-5)
CASSYGKLWDQPQHF

SEQ ID NO: 550827 - protein, 16 aa, Homo sapiens
  CDR3 for alpha chain variable domain of TCR clone 275414 (TRAV35, TRAJ37)
CWAFLRGSRNTGKLIF

SEQ ID NO: 550828 - protein, 13 aa, Homo sapiens
  CDR3 for beta chain variable domain of TCR clone 275414 (TRBV2, TRBJ1-2)
CASSVRGNYGYTF

SEQ ID NO: 550829 - protein, 12 aa, Homo sapiens
  CDR3 for alpha chain variable domain of TCR clone 275415 (TRAV3, TRAJ20)
CAVRDGDYKLSF

SEQ ID NO: 550830 - protein, 15 aa, Homo sapiens
  CDR3 for beta chain variable domain of TCR clone 275415 (TRBV6-5, TRBJ2-1)
CASRGDFDSYNEQFF

SEQ ID NO: 550831 - protein, 18 aa, Homo sapiens
  CDR3 for alpha chain variable domain of TCR clone 275416 (TRAV26-2, TRAJ33)
CCVLLHPEGPASNYQLIW

SEQ ID NO: 550832 - protein, 13 aa, Homo sapiens
  CDR3 for beta chain variable domain of TCR clone 275416 (TRBV24-1, TRBJ2-2)
CATSDWSTGELFF

SEQ ID NO: 550833 - protein, 15 aa, Homo sapiens
  CDR3 for alpha chain variable domain of TCR clone 275417 (TRAV9-2, TRAJ49)
CALSPPDHTGNQFYF

SEQ ID NO: 550834 - protein, 12 aa, Homo sapiens
  CDR3 for beta chain variable domain of TCR clone 275417 (TRBV7-8, TRBJ2-7)
CASSLGDREQYF

SEQ ID NO: 550835 - protein, 16 aa, Homo sapiens
  CDR3 for alpha chain variable domain of TCR clone 275418 (TRAV30, TRAJ24)
CGTEIVDADSWGKFQF

SEQ ID NO: 550836 - protein, 18 aa, Homo sapiens
  CDR3 for beta chain variable domain of TCR clone 275418 (TRBV12-4, TRBJ2-2)
CASRPFGAGALNTGELFF

SEQ ID NO: 550837 - protein, 14 aa, Homo sapiens
  CDR3 for alpha chain variable domain of TCR clone 275419 (TRAV17, TRAJ22)
CATSPSGSARQLTF

SEQ ID NO: 550838 - protein, 14 aa, Homo sapiens
  CDR3 for beta chain variable domain of TCR clone 275419 (TRBV4-1, TRBJ2-5)
RSSQWDLYQETQYF

SEQ ID NO: 550839 - protein, 12 aa, Homo sapiens
  CDR3 for alpha chain variable domain of TCR clone 275420 (TRAV1-1, TRAJ9)
CAVDTGGFKTIF

SEQ ID NO: 550840 - protein, 14 aa, Homo sapiens
  CDR3 for beta chain variable domain of TCR clone 275420 (TRBV7-8, TRBJ2-5)
CASSATGGQDTQYF

SEQ ID NO: 550841 - protein, 14 aa, Homo sapiens
  CDR3 for alpha chain variable domain of TCR clone 275421 (TRAV1-2, TRAJ16)
CAVNRFSDGQKLLF

SEQ ID NO: 550842 - protein, 21 aa, Homo sapiens
  CDR3 for beta chain variable domain of TCR clone 275421 (TRBV7-2, TRBJ2-7)
RRTRPCISVPAAQTSFYEQYF

SEQ ID NO: 550843 - protein, 14 aa, Homo sapiens
  CDR3 for alpha chain variable domain of TCR clone 275422 (TRAV12-3, TRAJ10)
SHLPLTGGGNKLTF

SEQ ID NO: 550844 - protein, 16 aa, Homo sapiens
  CDR3 for beta chain variable domain of TCR clone 275422 (TRBV12-4, TRBJ2-5)
CASSWRPSGDLKTQYF

SEQ ID NO: 550845 - protein, 17 aa, Homo sapiens
  CDR3 for alpha chain variable domain of TCR clone 275423 (TRAV26-2, TRAJ42)
CILRDESYGGSQGNLIF

SEQ ID NO: 550846 - protein, 15 aa, Homo sapiens
  CDR3 for beta chain variable domain of TCR clone 275423 (TRBV20-1, TRBJ2-7)
CSARDRVSGMDEQYF

SEQ ID NO: 550847 - protein, 13 aa, Homo sapiens
  CDR3 for alpha chain variable domain of TCR clone 275424 (TRAV12-2, TRAJ39)
CAVNINAGNMLTF

SEQ ID NO: 550848 - protein, 15 aa, Homo sapiens
  CDR3 for beta chain variable domain of TCR clone 275424 (TRBV29-1, TRBJ2-1)
CSGRDRKSSYNEQFF

SEQ ID NO: 550849 - protein, 14 aa, Homo sapiens
  CDR3 for alpha chain variable domain of TCR clone 275425 (TRAV8-4, TRAJ13)
CAVTLSGGYQKVTF

SEQ ID NO: 550850 - protein, 14 aa, Homo sapiens
  CDR3 for beta chain variable domain of TCR clone 275425 (TRBV7-2, TRBJ1-2)
CTSSQTGSTYGYTF

SEQ ID NO: 550851 - protein, 13 aa, Homo sapiens
  CDR3 for alpha chain variable domain of TCR clone 275426 (TRAV27, TRAJ49)
CAPLPYTGNQFYF

SEQ ID NO: 550852 - protein, 16 aa, Homo sapiens
  CDR3 for beta chain variable domain of TCR clone 275426 (TRBV4-1, TRBJ1-2)
CASSQDAGQVLYGYTF

SEQ ID NO: 550853 - protein, 14 aa, Homo sapiens
  CDR3 for alpha chain variable domain of TCR clone 275427 (TRAV1-1, TRAJ33)
CAVRPEDSNCQLIW

SEQ ID NO: 550854 - protein, 15 aa, Homo sapiens
  CDR3 for beta chain variable domain of TCR clone 275427 (TRBV20-1, TRBJ2-1)
CSARSPGGPGNEQFF

SEQ ID NO: 550855 - protein, 13 aa, Homo sapiens
  CDR3 for alpha chain variable domain of TCR clone 275428 (TRAV14/DV4, TRAJ32)
NVLPLTPTNKLIF

SEQ ID NO: 550856 - protein, 14 aa, Homo sapiens
  CDR3 for beta chain variable domain of TCR clone 275428 (TRBV7-9, TRBJ1-2)
CASSRQGANYGYTF

SEQ ID NO: 550857 - protein, 12 aa, Homo sapiens
  CDR3 for alpha chain variable domain of TCR clone 275429 (TRAV21, TRAJ31)
CAVWGNNARLMF

SEQ ID NO: 550858 - protein, 14 aa, Homo sapiens
  CDR3 for beta chain variable domain of TCR clone 275429 (TRBV7-2, TRBJ2-5)
CASSFGGAQETQYF

SEQ ID NO: 550859 - protein, 11 aa, Homo sapiens
  CDR3 for alpha chain variable domain of TCR clone 275430 (TRAV1-1, TRAJ23)
CAVRQGGKLGF

SEQ ID NO: 550860 - protein, 20 aa, Homo sapiens
  CDR3 for beta chain variable domain of TCR clone 275430 (TRBV7-8, TRBJ2-2)
CASSHLFPGPPIHITGELFF

SEQ ID NO: 550861 - protein, 15 aa, Homo sapiens
  CDR3 for alpha chain variable domain of TCR clone 275431 (TRAV14/DV4, TRAJ12)
CAMIEERDSSYKLIF

SEQ ID NO: 550862 - protein, 16 aa, Homo sapiens
  CDR3 for beta chain variable domain of TCR clone 275431 (TRBV11-2, TRBJ1-2)
CASSLDRGGNNYGYTF

SEQ ID NO: 550863 - protein, 16 aa, Homo sapiens
  CDR3 for alpha chain variable domain of TCR clone 275432 (TRAV30, TRAJ24)
CGTELVGADSWGKFQF

SEQ ID NO: 550864 - protein, 16 aa, Homo sapiens
  CDR3 for beta chain variable domain of TCR clone 275432 (TRBV12-4, TRBJ2-5)
CASSFFVRGRQETQYF

SEQ ID NO: 550865 - protein, 12 aa, Homo sapiens
  CDR3 for alpha chain variable domain of TCR clone 275433 (TRAV20, TRAJ22)
CAVRGSARQLTF

SEQ ID NO: 550866 - protein, 15 aa, Homo sapiens
  CDR3 for beta chain variable domain of TCR clone 275433 (TRBV28, TRBJ2-1)
CASSGLAEVDNEQFF

SEQ ID NO: 550867 - protein, 13 aa, Homo sapiens
  CDR3 for alpha chain variable domain of TCR clone 275434 (TRAV13-1, TRAJ39)
CAASIVMQATYSP

SEQ ID NO: 550868 - protein, 15 aa, Homo sapiens
  CDR3 for beta chain variable domain of TCR clone 275434 (TRBV6-3, TRBJ2-7)
CASSSPGTVFYEQYF

SEQ ID NO: 550869 - protein, 14 aa, Homo sapiens
  CDR3 for alpha chain variable domain of TCR clone 275435 (TRAV2, TRAJ9)
CAVEDRSGGFKTIF

SEQ ID NO: 550870 - protein, 14 aa, Homo sapiens
  CDR3 for beta chain variable domain of TCR clone 275435 (TRBV2, TRBJ2-2)
CASSLFGGNGELFF

SEQ ID NO: 550871 - protein, 14 aa, Homo sapiens
  CDR3 for alpha chain variable domain of TCR clone 275436 (TRAV12-3, TRAJ43)
CAMSLGGAGTRLTV

SEQ ID NO: 550872 - protein, 13 aa, Homo sapiens
  CDR3 for beta chain variable domain of TCR clone 275436 (TRBV7-9, TRBJ1-2)
CASSLKQNYGYIF

SEQ ID NO: 550873 - protein, 13 aa, Homo sapiens
  CDR3 for alpha chain variable domain of TCR clone 275437 (TRAV2, TRAJ38)
CAVEDFPNAGNNH

SEQ ID NO: 550874 - protein, 14 aa, Homo sapiens
  CDR3 for beta chain variable domain of TCR clone 275437 (TRBV29-1, TRBJ1-4)
CSVSGRQGGEKLFF

SEQ ID NO: 550875 - protein, 18 aa, Homo sapiens
  CDR3 for alpha chain variable domain of TCR clone 275438 (TRAV3, TRAJ32)
CAVRDIRGYGGATNKIIF

SEQ ID NO: 550876 - protein, 15 aa, Homo sapiens
  CDR3 for beta chain variable domain of TCR clone 275438 (TRBV12-4, TRBJ2-2)
CASSLGVRHTGELFF

SEQ ID NO: 550877 - protein, 12 aa, Homo sapiens
  CDR3 for alpha chain variable domain of TCR clone 275439 (TRAV12-2, TRAJ10)
WGVTGGGNKLTF

SEQ ID NO: 550878 - protein, 16 aa, Homo sapiens
  CDR3 for beta chain variable domain of TCR clone 275439 (TRBV6-4, TRBJ1-2)
CASSEAVRDPNYGYTF

SEQ ID NO: 550879 - protein, 15 aa, Homo sapiens
  CDR3 for alpha chain variable domain of TCR clone 275440 (TRAV3, TRAJ3)
CCERPRYSSASKIIF

SEQ ID NO: 550880 - protein, 16 aa, Homo sapiens
  CDR3 for beta chain variable domain of TCR clone 275440 (TRBV19, TRBJ1-5)
CAISIDRGGPRQPQHF

SEQ ID NO: 550881 - protein, 15 aa, Homo sapiens
  CDR3 for alpha chain variable domain of TCR clone 275441 (TRAV3, TRAJ3)
CAVRGGHSSASKIIF

SEQ ID NO: 550882 - protein, 14 aa, Homo sapiens
  CDR3 for beta chain variable domain of TCR clone 275441 (TRBV28, TRBJ1-4)
CASSFGTFDEKLFF

SEQ ID NO: 550883 - protein, 17 aa, Homo sapiens
  CDR3 for alpha chain variable domain of TCR clone 275442 (TRAV26-2, TRAJ42)
CILRDVGYGGSQGNLIF

SEQ ID NO: 550884 - protein, 15 aa, Homo sapiens
  CDR3 for beta chain variable domain of TCR clone 275442 (TRBV7-8, TRBJ1-1)
CASSLGDSRNTEAFF

SEQ ID NO: 550885 - protein, 14 aa, Homo sapiens
  CDR3 for alpha chain variable domain of TCR clone 275443 (TRAV13-1, TRAJ44)
CAAKATGTASQLTF

SEQ ID NO: 550886 - protein, 15 aa, Homo sapiens
  CDR3 for beta chain variable domain of TCR clone 275443 (TRBV19, TRBJ2-1)
CASIKGRGPYNEQFF

SEQ ID NO: 550887 - protein, 16 aa, Homo sapiens
  CDR3 for alpha chain variable domain of TCR clone 275444 (TRAV4, TRAJ22)
CLVGDPYSGSARQLTF

SEQ ID NO: 550888 - protein, 13 aa, Homo sapiens
  CDR3 for beta chain variable domain of TCR clone 275444 (TRBV4-2, TRBJ1-1)
CASSQAGNTEAFF

SEQ ID NO: 550889 - protein, 13 aa, Homo sapiens
  CDR3 for alpha chain variable domain of TCR clone 275445 (TRAV8-2, TRAJ15)
CVVSGPGRNCSDL

SEQ ID NO: 550890 - protein, 16 aa, Homo sapiens
  CDR3 for beta chain variable domain of TCR clone 275445 (TRBV4-1, TRBJ1-2)
CASSQDAGQVLYGYTF

SEQ ID NO: 550891 - protein, 14 aa, Homo sapiens
  CDR3 for alpha chain variable domain of TCR clone 275446 (TRAV8-3, TRAJ4)
CAVGASGGYNKLIF

SEQ ID NO: 550892 - protein, 16 aa, Homo sapiens
  CDR3 for beta chain variable domain of TCR clone 275446 (TRBV4-3, TRBJ2-2)
CASSHLQGSGTTELFF

SEQ ID NO: 550893 - protein, 15 aa, Homo sapiens
  CDR3 for alpha chain variable domain of TCR clone 275447 (TRAV3, TRAJ22)
CAVRDRGGSARQLTF

SEQ ID NO: 550894 - protein, 14 aa, Homo sapiens
  CDR3 for beta chain variable domain of TCR clone 275447 (TRBV19, TRBJ1-1)
CASRRGQGNTEAFF

SEQ ID NO: 550895 - protein, 14 aa, Homo sapiens
  CDR3 for alpha chain variable domain of TCR clone 275448 (TRAV13-1, TRAJ40)
CAASMTSGTYKYIF

SEQ ID NO: 550896 - protein, 16 aa, Homo sapiens
  CDR3 for beta chain variable domain of TCR clone 275448 (TRBV6-3, TRBJ1-2)
CASSYSRRASNYGYTF

SEQ ID NO: 550897 - protein, 11 aa, Homo sapiens
  CDR3 for alpha chain variable domain of TCR clone 275449 (TRAV2, TRAJ33)
CAVDSNYQLIW

SEQ ID NO: 550898 - protein, 19 aa, Homo sapiens
  CDR3 for beta chain variable domain of TCR clone 275449 (TRBV19, TRBJ2-5)
CASIIGQVTDFFLGETQYF

SEQ ID NO: 550899 - protein, 14 aa, Homo sapiens
  CDR3 for alpha chain variable domain of TCR clone 275450 (TRAV2, TRAJ9)
CAVDPNIGGFKTIF

SEQ ID NO: 550900 - protein, 13 aa, Homo sapiens
  CDR3 for beta chain variable domain of TCR clone 275450 (TRBV20-1, TRBJ2-1)
CSASTGTSNEQFF

SEQ ID NO: 550901 - protein, 15 aa, Homo sapiens
  CDR3 for alpha chain variable domain of TCR clone 275451 (TRAV12-3, TRAJ6)
CAMSATTGGSYIPTF

SEQ ID NO: 550902 - protein, 13 aa, Homo sapiens
  CDR3 for beta chain variable domain of TCR clone 275451 (TRBV7-9, TRBJ1-2)
CASSVKQNYGEIF

SEQ ID NO: 550903 - protein, 15 aa, Homo sapiens
  CDR3 for alpha chain variable domain of TCR clone 275452 (TRAV35, TRAJ52)
CAEPRGGTSYGKLTF

SEQ ID NO: 550904 - protein, 14 aa, Homo sapiens
  CDR3 for beta chain variable domain of TCR clone 275452 (TRBV20-1, TRBJ2-7)
CSAWTALSSYEQYF

SEQ ID NO: 550905 - protein, 15 aa, Homo sapiens
  CDR3 for alpha chain variable domain of TCR clone 275453 (TRAV2, TRAJ9)
CAVEDPGTGGFKTIF

SEQ ID NO: 550906 - protein, 16 aa, Homo sapiens
  CDR3 for beta chain variable domain of TCR clone 275453 (TRBV24-1, TRBJ2-3)
CATSDPGTGATDTQYF

SEQ ID NO: 550907 - protein, 12 aa, Homo sapiens
  CDR3 for alpha chain variable domain of TCR clone 275454 (TRAV12-1, TRAJ34)
CVVAGATDKPIF

SEQ ID NO: 550908 - protein, 12 aa, Homo sapiens
  CDR3 for beta chain variable domain of TCR clone 275454 (TRBV7-9, TRBJ1-1)
CASSVVRGEAFF

SEQ ID NO: 550909 - protein, 15 aa, Homo sapiens
  CDR3 for alpha chain variable domain of TCR clone 275455 (TRAV3, TRAJ11)
CSVRDRGSGYSTLTF

SEQ ID NO: 550910 - protein, 15 aa, Homo sapiens
  CDR3 for beta chain variable domain of TCR clone 275455 (TRBV18, TRBJ2-6)
CASSPSYAGANVLTF

SEQ ID NO: 550911 - protein, 17 aa, Homo sapiens
  CDR3 for alpha chain variable domain of TCR clone 275456 (TRAV13-1, TRAJ52)
CAASSGAGGTSYGKLTS

SEQ ID NO: 550912 - protein, 13 aa, Homo sapiens
  CDR3 for beta chain variable domain of TCR clone 275456 (TRBV7-9, TRBJ1-2)
CASSLKQNYGYTF

SEQ ID NO: 550913 - protein, 14 aa, Homo sapiens
  CDR3 for alpha chain variable domain of TCR clone 275457 (TRAV12-2, TRAJ29)
CAVRRNSGNPPLVF

SEQ ID NO: 550914 - protein, 13 aa, Homo sapiens
  CDR3 for beta chain variable domain of TCR clone 275457 (TRBV12-4, TRBJ2-1)
CASSHYTDNEQFF

SEQ ID NO: 550915 - protein, 13 aa, Homo sapiens
  CDR3 for alpha chain variable domain of TCR clone 275458 (TRAV12-2, TRAJ47)
CAVFMEYGNKLIF

SEQ ID NO: 550916 - protein, 14 aa, Homo sapiens
  CDR3 for beta chain variable domain of TCR clone 275458 (TRBV4-1, TRBJ1-5)
CASSQGPTNQPQHF

SEQ ID NO: 550917 - protein, 15 aa, Homo sapiens
  CDR3 for alpha chain variable domain of TCR clone 275459 (TRAV8-2, TRAJ16)
WVVSDGFSDGQKLLF

SEQ ID NO: 550918 - protein, 14 aa, Homo sapiens
  CDR3 for beta chain variable domain of TCR clone 275459 (TRBV7-3, TRBJ1-1)
CASSLGTGYNEAFF

SEQ ID NO: 550919 - protein, 11 aa, Homo sapiens
  CDR3 for alpha chain variable domain of TCR clone 275460 (TRAV13-1, TRAJ39)
CASHAGNMLTF

SEQ ID NO: 550920 - protein, 12 aa, Homo sapiens
  CDR3 for beta chain variable domain of TCR clone 275460 (TRBV12-4, TRBJ2-1)
CASSLQGSEQFF

SEQ ID NO: 550921 - protein, 15 aa, Homo sapiens
  CDR3 for alpha chain variable domain of TCR clone 275461 (TRAV8-2, TRAJ15)
CVVTMGNQAGTALIF

SEQ ID NO: 550922 - protein, 13 aa, Homo sapiens
  CDR3 for beta chain variable domain of TCR clone 275461 (TRBV19, TRBJ1-5)
CASSMRGYQPQHF

SEQ ID NO: 550923 - protein, 15 aa, Homo sapiens
  CDR3 for alpha chain variable domain of TCR clone 275462 (TRAV38-2/DV8, TRAJ48)
CAYRSGGFGNEKLTF

SEQ ID NO: 550924 - protein, 16 aa, Homo sapiens
  CDR3 for beta chain variable domain of TCR clone 275462 (TRBV28, TRBJ2-7)
CASSPRVATGDLSQYF

SEQ ID NO: 550925 - protein, 18 aa, Homo sapiens
  CDR3 for alpha chain variable domain of TCR clone 275463 (TRAV12-3, TRAJ52)
CAMSRTNAVGTSYGKLTF

SEQ ID NO: 550926 - protein, 12 aa, Homo sapiens
  CDR3 for beta chain variable domain of TCR clone 275463 (TRBV7-3, TRBJ2-3)
MKSMRGADTQYF

SEQ ID NO: 550927 - protein, 13 aa, Homo sapiens
  CDR3 for alpha chain variable domain of TCR clone 275464 (TRAV21, TRAJ27)
CAARPGNAGKSTF

SEQ ID NO: 550928 - protein, 13 aa, Homo sapiens
  CDR3 for beta chain variable domain of TCR clone 275464 (TRBV24-1, TRBJ2-2)
CATGDWSTGELFF

SEQ ID NO: 550929 - protein, 14 aa, Homo sapiens
  CDR3 for alpha chain variable domain of TCR clone 275465 (TRAV1-2, TRAJ16)
CAVNRFSEGQKLLF

SEQ ID NO: 550930 - protein, 14 aa, Homo sapiens
  CDR3 for beta chain variable domain of TCR clone 275465 (TRBV4-1, TRBJ2-2)
CASSQAVNTGELFF

SEQ ID NO: 550931 - protein, 13 aa, Homo sapiens
  CDR3 for alpha chain variable domain of TCR clone 275466 (TRAV2, TRAJ29)
CAAGNSGNTPLVF

SEQ ID NO: 550932 - protein, 14 aa, Homo sapiens
  CDR3 for beta chain variable domain of TCR clone 275466 (TRBV6-6, TRBJ2-5)
CASTLGSDMQTQYF

SEQ ID NO: 550933 - protein, 15 aa, Homo sapiens
  CDR3 for alpha chain variable domain of TCR clone 275467 (TRAV12-2, TRAJ43)
CAFDMRFGAGTRLTV

SEQ ID NO: 550934 - protein, 17 aa, Homo sapiens
  CDR3 for beta chain variable domain of TCR clone 275467 (TRBV20-1, TRBJ2-3)
CSASGLAGGPHHRYAVF

SEQ ID NO: 550935 - protein, 15 aa, Homo sapiens
  CDR3 for alpha chain variable domain of TCR clone 275468 (TRAV13-1, TRAJ17)
CAASIHGGCRKQANF

SEQ ID NO: 550936 - protein, 14 aa, Homo sapiens
  CDR3 for beta chain variable domain of TCR clone 275468 (TRBV20-1, TRBJ2-4)
CSARDRGQGGMQYF

SEQ ID NO: 550937 - protein, 12 aa, Homo sapiens
  CDR3 for alpha chain variable domain of TCR clone 275469 (TRAV21, TRAJ39)
CAADNAGNMLTF

SEQ ID NO: 550938 - protein, 17 aa, Homo sapiens
  CDR3 for beta chain variable domain of TCR clone 275469 (TRBV20-1, TRBJ2-1)
CSASSSGLAGSYNEQFF

SEQ ID NO: 550939 - protein, 15 aa, Homo sapiens
  CDR3 for alpha chain variable domain of TCR clone 275470 (TRAV26-1, TRAJ29)
CIVRVEGSGNTPLVF

SEQ ID NO: 550940 - protein, 19 aa, Homo sapiens
  CDR3 for beta chain variable domain of TCR clone 275470 (TRBV11-3, TRBJ2-3)
CAGGFGTSGGPRGGGTQYF

SEQ ID NO: 550941 - protein, 10 aa, Homo sapiens
  CDR3 for alpha chain variable domain of TCR clone 275471 (TRAV23/DV6, TRAJ57)
CAARSTLSQR

SEQ ID NO: 550942 - protein, 14 aa, Homo sapiens
  CDR3 for beta chain variable domain of TCR clone 275471 (TRBV25-1, TRBJ1-1)
CASTHLGGNTEAFF

SEQ ID NO: 550943 - protein, 20 aa, Homo sapiens
  CDR3 for alpha chain variable domain of TCR clone 275472 (TRAV8-3, TRAJ45)
LSTSVLWGSYSGGGADGLTF

SEQ ID NO: 550944 - protein, 11 aa, Homo sapiens
  CDR3 for beta chain variable domain of TCR clone 275472 (TRBV20-1, TRBJ2-5)
GSADRAETQYF

SEQ ID NO: 550945 - protein, 10 aa, Homo sapiens
  CDR3 for alpha chain variable domain of TCR clone 275473 (TRAV1-2, TRAJ31)
CVSEDARLMF

SEQ ID NO: 550946 - protein, 14 aa, Homo sapiens
  CDR3 for beta chain variable domain of TCR clone 275473 (TRBV7-3, TRBJ1-1)
CASSLKGGNTEAFF

SEQ ID NO: 550947 - protein, 13 aa, Homo sapiens
  CDR3 for alpha chain variable domain of TCR clone 275474 (TRAV36/DV7, TRAJ37)
CAVFSSTTGKLIF

SEQ ID NO: 550948 - protein, 12 aa, Homo sapiens
  CDR3 for beta chain variable domain of TCR clone 275474 (TRBV11-2, TRBJ2-2)
CASSLGGGELFF

SEQ ID NO: 550949 - protein, 13 aa, Homo sapiens
  CDR3 for alpha chain variable domain of TCR clone 275475 (TRAV21, TRAJ27)
CAALNTNAGKSPF

SEQ ID NO: 550950 - protein, 14 aa, Homo sapiens
  CDR3 for beta chain variable domain of TCR clone 275475 (TRBV27, TRBJ1-1)
CASSLLSGLSEAFF

SEQ ID NO: 550951 - protein, 15 aa, Homo sapiens
  CDR3 for alpha chain variable domain of TCR clone 275476 (TRAV12-2, TRAJ23)
CAVKPIYNQGGKLIF

SEQ ID NO: 550952 - protein, 14 aa, Homo sapiens
  CDR3 for beta chain variable domain of TCR clone 275476 (TRBV6-1, TRBJ1-3)
CASVQGGGGNTIYF

SEQ ID NO: 550953 - protein, 14 aa, Homo sapiens
  CDR3 for alpha chain variable domain of TCR clone 275477 (TRAV12-2, TRAJ13)
CAVKKTGGYQKVTF

SEQ ID NO: 550954 - protein, 11 aa, Homo sapiens
  CDR3 for beta chain variable domain of TCR clone 275477 (TRBV29-1, TRBJ1-1)
CSVEVGTRTFF

SEQ ID NO: 550955 - protein, 13 aa, Homo sapiens
  CDR3 for alpha chain variable domain of TCR clone 275478 (TRAV27, TRAJ39)
CAGVNNAGNMLTF

SEQ ID NO: 550956 - protein, 13 aa, Homo sapiens
  CDR3 for beta chain variable domain of TCR clone 275478 (TRBV19, TRBJ2-7)
CASSIDRTYEQYF

SEQ ID NO: 550957 - protein, 13 aa, Homo sapiens
  CDR3 for alpha chain variable domain of TCR clone 275479 (TRAV27, TRAJ41)
CAGGGNSGYALNF

SEQ ID NO: 550958 - protein, 14 aa, Homo sapiens
  CDR3 for beta chain variable domain of TCR clone 275479 (TRBV7-2, TRBJ1-1)
CASSFLTGTTEAVF

SEQ ID NO: 550959 - protein, 14 aa, Homo sapiens
  CDR3 for alpha chain variable domain of TCR clone 275480 (TRAV1-1, TRAJ28)
CAAPSGAGSYQLTF

SEQ ID NO: 550960 - protein, 12 aa, Homo sapiens
  CDR3 for beta chain variable domain of TCR clone 275480 (TRBV6-3, TRBJ2-7)
CASSLTPYEQYF

SEQ ID NO: 550961 - protein, 13 aa, Homo sapiens
  CDR3 for alpha chain variable domain of TCR clone 275481 (TRAV34, TRAJ33)
CGADMNSNYQLIW

SEQ ID NO: 550962 - protein, 15 aa, Homo sapiens
  CDR3 for beta chain variable domain of TCR clone 275481 (TRBV7-6, TRBJ2-7)
CTSSLEGQGAGEQYF

SEQ ID NO: 550963 - protein, 14 aa, Homo sapiens
  CDR3 for alpha chain variable domain of TCR clone 275482 (TRAV4, TRAJ9)
CLVGSGTGGYKTIF

SEQ ID NO: 550964 - protein, 14 aa, Homo sapiens
  CDR3 for beta chain variable domain of TCR clone 275482 (TRBV7-9, TRBJ2-4)
CASSLAMGGNIQYF

SEQ ID NO: 550965 - protein, 13 aa, Homo sapiens
  CDR3 for alpha chain variable domain of TCR clone 275483 (TRAV2, TRAJ40)
CAVVTSGTYKYIF

SEQ ID NO: 550966 - protein, 14 aa, Homo sapiens
  CDR3 for beta chain variable domain of TCR clone 275483 (TRBV7-3, TRBJ2-7)
CASSLSGVSYEQYF

SEQ ID NO: 550967 - protein, 15 aa, Homo sapiens
  CDR3 for alpha chain variable domain of TCR clone 275484 (TRAV16, TRAJ12)
CSKWPLRDSSYKLIF

SEQ ID NO: 550968 - protein, 14 aa, Homo sapiens
  CDR3 for beta chain variable domain of TCR clone 275484 (TRBV6-1, TRBJ1-3)
CASVQGGGGNTIYF

SEQ ID NO: 550969 - protein, 14 aa, Homo sapiens
  CDR3 for alpha chain variable domain of TCR clone 275485 (TRAV12-1, TRAJ32)
CVVRWNGCYKQAHL

SEQ ID NO: 550970 - protein, 13 aa, Homo sapiens
  CDR3 for beta chain variable domain of TCR clone 275485 (TRBV18, TRBJ2-7)
CASSPGRNYEQYF

SEQ ID NO: 550971 - protein, 16 aa, Homo sapiens
  CDR3 for alpha chain variable domain of TCR clone 275486 (TRAV20, TRAJ10)
CAVLRGLTGGGNKLTF

SEQ ID NO: 550972 - protein, 14 aa, Homo sapiens
  CDR3 for beta chain variable domain of TCR clone 275486 (TRBV19, TRBJ1-5)
CASRAPDSFLYQHF

SEQ ID NO: 550973 - protein, 14 aa, Homo sapiens
  CDR3 for alpha chain variable domain of TCR clone 275487 (TRAV35, TRAJ13)
CAGRSPGGHQKVTF

SEQ ID NO: 550974 - protein, 14 aa, Homo sapiens
  CDR3 for beta chain variable domain of TCR clone 275487 (TRBV19, TRBJ2-2)
CASSMVGLSWELFF

SEQ ID NO: 550975 - protein, 12 aa, Homo sapiens
  CDR3 for alpha chain variable domain of TCR clone 275488 (TRAV1-1, TRAJ43)
CAPRVSSNDMRF

SEQ ID NO: 550976 - protein, 16 aa, Homo sapiens
  CDR3 for beta chain variable domain of TCR clone 275488 (TRBV12-4, TRBJ2-5)
CASSFFVRGRQETQYF

SEQ ID NO: 550977 - protein, 11 aa, Homo sapiens
  CDR3 for alpha chain variable domain of TCR clone 275489 (TRAV2, TRAJ33)
CAVDSNYQLIW

SEQ ID NO: 550978 - protein, 15 aa, Homo sapiens
  CDR3 for beta chain variable domain of TCR clone 275489 (TRBV5-7, TRBJ1-2)
CASSLGVAANYGYTF

SEQ ID NO: 550979 - protein, 18 aa, Homo sapiens
  CDR3 for alpha chain variable domain of TCR clone 275490 (TRAV3, TRAJ17)
CAVRARRGGRSCRQQANF

SEQ ID NO: 550980 - protein, 15 aa, Homo sapiens
  CDR3 for beta chain variable domain of TCR clone 275490 (TRBV20-1, TRBJ2-7)
CSARGRGPSSYEQYF

SEQ ID NO: 550981 - protein, 12 aa, Homo sapiens
  CDR3 for alpha chain variable domain of TCR clone 275491 (TRAV3, TRAJ20)
YAVRDGDYKLSF

SEQ ID NO: 550982 - protein, 14 aa, Homo sapiens
  CDR3 for beta chain variable domain of TCR clone 275491 (TRBV7-2, TRBJ2-7)
CASSPKTSFYEQYF

SEQ ID NO: 550983 - protein, 17 aa, Homo sapiens
  CDR3 for alpha chain variable domain of TCR clone 275492 (TRAV3, TRAJ6)
CAVRDGPSAGGSYIPTF

SEQ ID NO: 550984 - protein, 19 aa, Homo sapiens
  CDR3 for beta chain variable domain of TCR clone 275492 (TRBV25-1, TRBJ2-2)
CAILVYRVDRGRKTGELFF

SEQ ID NO: 550985 - protein, 13 aa, Homo sapiens
  CDR3 for alpha chain variable domain of TCR clone 275493 (TRAV8-1, TRAJ39)
CAGLNNAGNMLTF

SEQ ID NO: 550986 - protein, 17 aa, Homo sapiens
  CDR3 for beta chain variable domain of TCR clone 275493 (TRBV19, TRBJ2-3)
CASSINPAGGGTDTQYF

SEQ ID NO: 550987 - protein, 15 aa, Homo sapiens
  CDR3 for alpha chain variable domain of TCR clone 275494 (TRAV12-1, TRAJ44)
CVVFVNTGTASKLTF

SEQ ID NO: 550988 - protein, 13 aa, Homo sapiens
  CDR3 for beta chain variable domain of TCR clone 275494 (TRBV20-1, TRBJ2-7)
CSASPPSSYEQYF

SEQ ID NO: 550989 - protein, 14 aa, Homo sapiens
  CDR3 for alpha chain variable domain of TCR clone 275495 (TRAV26-1, TRAJ34)
CIVRESYNTDKLIF

SEQ ID NO: 550990 - protein, 13 aa, Homo sapiens
  CDR3 for beta chain variable domain of TCR clone 275495 (TRBV24-1, TRBJ2-2)
CATSDWSTGELFF

SEQ ID NO: 550991 - protein, 14 aa, Homo sapiens
  CDR3 for alpha chain variable domain of TCR clone 275496 (TRAV8-3, TRAJ17)
CAVGAQTAGNKLHF

SEQ ID NO: 550992 - protein, 11 aa, Homo sapiens
  CDR3 for beta chain variable domain of TCR clone 275496 (TRBV29-1, TRBJ1-4)
CSVSSGEKLFF

SEQ ID NO: 550993 - protein, 18 aa, Homo sapiens
  CDR3 for alpha chain variable domain of TCR clone 275497 (TRAV26-2, TRAJ54)
CILRDVEVGIQGAQKLVF

SEQ ID NO: 550994 - protein, 15 aa, Homo sapiens
  CDR3 for beta chain variable domain of TCR clone 275497 (TRBV7-6, TRBJ2-5)
CASSKPTGPQETQYF

SEQ ID NO: 550995 - protein, 13 aa, Homo sapiens
  CDR3 for alpha chain variable domain of TCR clone 275498 (TRAV3, TRAJ41)
CAVSSNSGYALNF

SEQ ID NO: 550996 - protein, 16 aa, Homo sapiens
  CDR3 for beta chain variable domain of TCR clone 275498 (TRBV2, TRBJ2-1)
CASSVGGSLSYNEQFF

SEQ ID NO: 550997 - protein, 17 aa, Homo sapiens
  CDR3 for alpha chain variable domain of TCR clone 275499 (TRAV23/DV6, TRAJ57)
CAASSTLSQGGSEKLVF

SEQ ID NO: 550998 - protein, 14 aa, Homo sapiens
  CDR3 for beta chain variable domain of TCR clone 275499 (TRBV25-1, TRBJ1-1)
CASIHLGGNTEAFF

SEQ ID NO: 550999 - protein, 13 aa, Homo sapiens
  CDR3 for alpha chain variable domain of TCR clone 275500 (TRAV21, TRAJ20)
CAVGVFADYKLSF

SEQ ID NO: 551000 - protein, 17 aa, Homo sapiens
  CDR3 for beta chain variable domain of TCR clone 275500 (TRBV13, TRBJ2-3)
CASSVSRVAGGRNTQYF

SEQ ID NO: 551001 - protein, 12 aa, Homo sapiens
  CDR3 for alpha chain variable domain of TCR clone 275501 (TRAV12-3, TRAJ34)
CAMGYNTDKLIF

SEQ ID NO: 551002 - protein, 15 aa, Homo sapiens
  CDR3 for beta chain variable domain of TCR clone 275501 (TRBV28, TRBJ2-1)
CASSIRAGGRSEQFF

SEQ ID NO: 551003 - protein, 14 aa, Homo sapiens
  CDR3 for alpha chain variable domain of TCR clone 275502 (TRAV12-3, TRAJ10)
SHLPLTGGGNKLTF

SEQ ID NO: 551004 - protein, 13 aa, Homo sapiens
  CDR3 for beta chain variable domain of TCR clone 275502 (TRBV4-1, TRBJ2-2)
CASSQANTGELFF

SEQ ID NO: 551005 - protein, 13 aa, Homo sapiens
  CDR3 for alpha chain variable domain of TCR clone 275503 (TRAV3, TRAJ21)
CAVREPDFNKFYF

SEQ ID NO: 551006 - protein, 15 aa, Homo sapiens
  CDR3 for beta chain variable domain of TCR clone 275503 (TRBV27, TRBJ2-7)
CASSTAGTGAYEQYF

SEQ ID NO: 551007 - protein, 12 aa, Homo sapiens
  CDR3 for alpha chain variable domain of TCR clone 275504 (TRAV35, TRAJ28)
GVEGAGGYQLTF

SEQ ID NO: 551008 - protein, 13 aa, Homo sapiens
  CDR3 for beta chain variable domain of TCR clone 275504 (TRBV9, TRBJ2-1)
CASSPSGGSEQFF

SEQ ID NO: 551009 - protein, 18 aa, Homo sapiens
  CDR3 for alpha chain variable domain of TCR clone 275505 (TRAV26-2, TRAJ54)
CILRDVEVGIQGAQQLVF

SEQ ID NO: 551010 - protein, 17 aa, Homo sapiens
  CDR3 for beta chain variable domain of TCR clone 275505 (TRBV20-1, TRBJ1-5)
CSASLSPGQGGNQPQHF

SEQ ID NO: 551011 - protein, 14 aa, Homo sapiens
  CDR3 for alpha chain variable domain of TCR clone 275506 (TRAV12-2, TRAJ13)
CAVKKTGGYQKVTF

SEQ ID NO: 551012 - protein, 17 aa, Homo sapiens
  CDR3 for beta chain variable domain of TCR clone 275506 (TRBV13, TRBJ2-3)
CSSSLSRVAGGRNTQYF

SEQ ID NO: 551013 - protein, 17 aa, Homo sapiens
  CDR3 for alpha chain variable domain of TCR clone 275507 (TRAV3, TRAJ42)
CAVRERDYGGSQGNLIF

SEQ ID NO: 551014 - protein, 17 aa, Homo sapiens
  CDR3 for beta chain variable domain of TCR clone 275507 (TRBV7-9, TRBJ2-3)
CASSPTVAGDLTDTQYF

SEQ ID NO: 551015 - protein, 15 aa, Homo sapiens
  CDR3 for alpha chain variable domain of TCR clone 275508 (TRAV12-2, TRAJ50)
CAVNGPETSYDKVIF

SEQ ID NO: 551016 - protein, 16 aa, Homo sapiens
  CDR3 for beta chain variable domain of TCR clone 275508 (TRBV5-4, TRBJ2-3)
CASQQPGAGGADTQYF

SEQ ID NO: 551017 - protein, 14 aa, Homo sapiens
  CDR3 for alpha chain variable domain of TCR clone 275509 (TRAV12-1, TRAJ12)
CVVNGRDSSYKLIF

SEQ ID NO: 551018 - protein, 12 aa, Homo sapiens
  CDR3 for beta chain variable domain of TCR clone 275509 (TRBV29-1, TRBJ2-3)
CSVTGGADTQYF

SEQ ID NO: 551019 - protein, 14 aa, Homo sapiens
  CDR3 for alpha chain variable domain of TCR clone 275510 (TRAV12-3, TRAJ10)
SHLPLTGGGNKLTF

SEQ ID NO: 551020 - protein, 16 aa, Homo sapiens
  CDR3 for beta chain variable domain of TCR clone 275510 (TRBV4-1, TRBJ2-6)
CASSQVGDPGANVLTF

SEQ ID NO: 551021 - protein, 14 aa, Homo sapiens
  CDR3 for alpha chain variable domain of TCR clone 275511 (TRAV35, TRAJ13)
CARSPSGGYQKVTF

SEQ ID NO: 551022 - protein, 13 aa, Homo sapiens
  CDR3 for beta chain variable domain of TCR clone 275511 (TRBV29-1, TRBJ1-1)
CSVGDSRNTEAFF

SEQ ID NO: 551023 - protein, 12 aa, Homo sapiens
  CDR3 for alpha chain variable domain of TCR clone 275512 (TRAV12-3, TRAJ17)
CAMTLTGNKLTF

SEQ ID NO: 551024 - protein, 17 aa, Homo sapiens
  CDR3 for beta chain variable domain of TCR clone 275512 (TRBV6-3, TRBJ2-7)
CTSVPAVPPTVFYEQYF

SEQ ID NO: 551025 - protein, 13 aa, Homo sapiens
  CDR3 for alpha chain variable domain of TCR clone 275513 (TRAV3, TRAJ20)
CAVRDTPRYKLSF

SEQ ID NO: 551026 - protein, 12 aa, Homo sapiens
  CDR3 for beta chain variable domain of TCR clone 275513 (TRBV14, TRBJ2-7)
CASSLYKDEQYF

SEQ ID NO: 551027 - protein, 13 aa, Homo sapiens
  CDR3 for alpha chain variable domain of TCR clone 275514 (TRAV8-1, TRAJ39)
CAVANNAGNMLAF

SEQ ID NO: 551028 - protein, 15 aa, Homo sapiens
  CDR3 for beta chain variable domain of TCR clone 275514 (TRBV7-2, TRBJ2-1)
CASSLNRGAYNEQFF

SEQ ID NO: 551029 - protein, 16 aa, Homo sapiens
  CDR3 for alpha chain variable domain of TCR clone 275515 (TRAV23/DV6, TRAJ9)
CAASIGGNTGGFKTIF

SEQ ID NO: 551030 - protein, 13 aa, Homo sapiens
  CDR3 for beta chain variable domain of TCR clone 275515 (TRBV4-1, TRBJ2-7)
CASSQGQAYEQYF

SEQ ID NO: 551031 - protein, 10 aa, Homo sapiens
  CDR3 for alpha chain variable domain of TCR clone 275516 (TRAV12-2, TRAJ48)
CAVTSEKLTF

SEQ ID NO: 551032 - protein, 14 aa, Homo sapiens
  CDR3 for beta chain variable domain of TCR clone 275516 (TRBV4-1, TRBJ2-2)
CASSQAVNTGELFF

SEQ ID NO: 551033 - protein, 13 aa, Homo sapiens
  CDR3 for alpha chain variable domain of TCR clone 275517 (TRAV2, TRAJ40)
CAVVTSGTYKYIF

SEQ ID NO: 551034 - protein, 12 aa, Homo sapiens
  CDR3 for beta chain variable domain of TCR clone 275517 (TRBV7-9, TRBJ2-7)
CASSQGVYEQYF

SEQ ID NO: 551035 - protein, 20 aa, Homo sapiens
  CDR3 for alpha chain variable domain of TCR clone 275518 (TRAV26-1, TRAJ42)
CCVLLHCQTYYGGSQGNLIF

SEQ ID NO: 551036 - protein, 16 aa, Homo sapiens
  CDR3 for beta chain variable domain of TCR clone 275518 (TRBV7-3, TRBJ2-2)
CASSLKRGTLSGELFF

SEQ ID NO: 551037 - protein, 16 aa, Homo sapiens
  CDR3 for alpha chain variable domain of TCR clone 275519 (TRAV30, TRAJ24)
CGTEIVDADSWGKFQV

SEQ ID NO: 551038 - protein, 14 aa, Homo sapiens
  CDR3 for beta chain variable domain of TCR clone 275519 (TRBV12-5, TRBJ2-5)
CASGSRTHQEAQYF

SEQ ID NO: 551039 - protein, 12 aa, Homo sapiens
  CDR3 for alpha chain variable domain of TCR clone 275520 (TRAV26-2, TRAJ21)
CLLKGNFNKFYF

SEQ ID NO: 551040 - protein, 14 aa, Homo sapiens
  CDR3 for beta chain variable domain of TCR clone 275520 (TRBV7-9, TRBJ1-1)
CASTPLQSYTEAFF

SEQ ID NO: 551041 - protein, 15 aa, Homo sapiens
  CDR3 for alpha chain variable domain of TCR clone 275521 (TRAV12-1, TRAJ42)
CVVKTGGGSQGNLIF

SEQ ID NO: 551042 - protein, 14 aa, Homo sapiens
  CDR3 for beta chain variable domain of TCR clone 275521 (TRBV19, TRBJ1-5)
CASRAPDSFLSQHF

SEQ ID NO: 551043 - protein, 11 aa, Homo sapiens
  CDR3 for alpha chain variable domain of TCR clone 275522 (TRAV3, TRAJ21)
CAVGNFNKFYF

SEQ ID NO: 551044 - protein, 18 aa, Homo sapiens
  CDR3 for beta chain variable domain of TCR clone 275522 (TRBV11-2, TRBJ2-3)
CASSSGGASRGAPNTQYF

SEQ ID NO: 551045 - protein, 16 aa, Homo sapiens
  CDR3 for alpha chain variable domain of TCR clone 275523 (TRAV4, TRAJ9)
CLVGDPNRPGGFKTIF

SEQ ID NO: 551046 - protein, 16 aa, Homo sapiens
  CDR3 for beta chain variable domain of TCR clone 275523 (TRBV28, TRBJ1-4)
CASSPPYRGRSEKLVF

SEQ ID NO: 551047 - protein, 12 aa, Homo sapiens
  CDR3 for alpha chain variable domain of TCR clone 275524 (TRAV1-1, TRAJ23)
CAVTNQGGKLIF

SEQ ID NO: 551048 - protein, 15 aa, Homo sapiens
  CDR3 for beta chain variable domain of TCR clone 275524 (TRBV19, TRBJ2-1)
CASSRPGQNYNEQFF

SEQ ID NO: 551049 - protein, 13 aa, Homo sapiens
  CDR3 for alpha chain variable domain of TCR clone 275525 (TRAV38-1, TRAJ48)
CAFMNQGNEKLTF

SEQ ID NO: 551050 - protein, 18 aa, Homo sapiens
  CDR3 for beta chain variable domain of TCR clone 275525 (TRBV12-4, TRBJ1-3)
CASSLSRGGAFSGNTIYF

SEQ ID NO: 551051 - protein, 11 aa, Homo sapiens
  CDR3 for alpha chain variable domain of TCR clone 275526 (TRAV2, TRAJ13)
CASVGYQKVTF

SEQ ID NO: 551052 - protein, 14 aa, Homo sapiens
  CDR3 for beta chain variable domain of TCR clone 275526 (TRBV5-7, TRBJ1-2)
CASSLVRGDYGYTF

SEQ ID NO: 551053 - protein, 16 aa, Homo sapiens
  CDR3 for alpha chain variable domain of TCR clone 275527 (TRAV30, TRAJ24)
CGTEIVDADSWGKFQF

SEQ ID NO: 551054 - protein, 14 aa, Homo sapiens
  CDR3 for beta chain variable domain of TCR clone 275527 (TRBV12-5)
CAGGLGVGGGTRLF

SEQ ID NO: 551055 - protein, 15 aa, Homo sapiens
  CDR3 for alpha chain variable domain of TCR clone 275528 (TRAV38-1, TRAJ37)
GAFIFGSGNTGKRIF

SEQ ID NO: 551056 - protein, 12 aa, Homo sapiens
  CDR3 for beta chain variable domain of TCR clone 275528 (TRBV7-9, TRBJ2-7)
CASSLEGYEQYF

SEQ ID NO: 551057 - protein, 14 aa, Homo sapiens
  CDR3 for alpha chain variable domain of TCR clone 275529 (TRAV9-2, TRAJ39)
CALYLYNAGNMLTF

SEQ ID NO: 551058 - protein, 15 aa, Homo sapiens
  CDR3 for beta chain variable domain of TCR clone 275529 (TRBV2, TRBJ2-7)
CASSEGLARSYEQYF

SEQ ID NO: 551059 - protein, 14 aa, Homo sapiens
  CDR3 for alpha chain variable domain of TCR clone 275530 (TRAV12-1, TRAJ17)
CVVNYKAAGNKLTF

SEQ ID NO: 551060 - protein, 14 aa, Homo sapiens
  CDR3 for beta chain variable domain of TCR clone 275530 (TRBV6-5, TRBJ2-5)
CASNSGSPPETQYF

SEQ ID NO: 551061 - protein, 11 aa, Homo sapiens
  CDR3 for alpha chain variable domain of TCR clone 275531 (TRAV35, TRAJ34)
CWARNTDKLIF

SEQ ID NO: 551062 - protein, 11 aa, Homo sapiens
  CDR3 for beta chain variable domain of TCR clone 275531 (TRBV19, TRBJ2-5)
CASSIKETQYF

SEQ ID NO: 551063 - protein, 12 aa, Homo sapiens
  CDR3 for alpha chain variable domain of TCR clone 275532 (TRAV17, TRAJ29)
CATRGGNTPLVF

SEQ ID NO: 551064 - protein, 15 aa, Homo sapiens
  CDR3 for beta chain variable domain of TCR clone 275532 (TRBV4-2, TRBJ2-7)
CASSPEGVSAYEQYF

SEQ ID NO: 551065 - protein, 16 aa, Homo sapiens
  CDR3 for alpha chain variable domain of TCR clone 275533 (TRAV21, TRAJ52)
SAVSDAGGTSYGKLTF

SEQ ID NO: 551066 - protein, 13 aa, Homo sapiens
  CDR3 for beta chain variable domain of TCR clone 275533 (TRBV7-3, TRBJ2-5)
CASSFRGSQTQYF

SEQ ID NO: 551067 - protein, 15 aa, Homo sapiens
  CDR3 for alpha chain variable domain of TCR clone 275534 (TRAV27, TRAJ38)
CAARRNAGNNRKLIW

SEQ ID NO: 551068 - protein, 15 aa, Homo sapiens
  CDR3 for beta chain variable domain of TCR clone 275534 (TRBV7-9, TRBJ1-6)
CASSSPGRGNSPHHF

SEQ ID NO: 551069 - protein, 11 aa, Homo sapiens
  CDR3 for alpha chain variable domain of TCR clone 275535 (TRAV12-3, TRAJ6)
CAMSGSYIPTF

SEQ ID NO: 551070 - protein, 11 aa, Homo sapiens
  CDR3 for beta chain variable domain of TCR clone 275535 (TRBV11-2, TRBJ2-2)
CASSLPGELFF

SEQ ID NO: 551071 - protein, 16 aa, Homo sapiens
  CDR3 for alpha chain variable domain of TCR clone 275536 (TRAV1-2, TRAJ10)
CAVRGVLTGGGNKLTC

SEQ ID NO: 551072 - protein, 15 aa, Homo sapiens
  CDR3 for beta chain variable domain of TCR clone 275536 (TRBV6-3, TRBJ2-7)
CASSSPGTVFYEQYF

SEQ ID NO: 551073 - protein, 16 aa, Homo sapiens
  CDR3 for alpha chain variable domain of TCR clone 275537 (TRAV4, TRAJ18)
CLVGDTRGSTLGRLYF

SEQ ID NO: 551074 - protein, 11 aa, Homo sapiens
  CDR3 for beta chain variable domain of TCR clone 275537 (TRBV11-2, TRBJ2-2)
CASSLPGELFF

SEQ ID NO: 551075 - protein, 10 aa, Homo sapiens
  CDR3 for alpha chain variable domain of TCR clone 275538 (TRAV12-3, TRAJ49)
CAMNDDQFYF

SEQ ID NO: 551076 - protein, 15 aa, Homo sapiens
  CDR3 for beta chain variable domain of TCR clone 275538 (TRBV12-4, TRBJ2-5)
CASSPPTGLQETQYF

SEQ ID NO: 551077 - protein, 14 aa, Homo sapiens
  CDR3 for alpha chain variable domain of TCR clone 275539 (TRAV14/DV4, TRAJ20)
CAMRESLNDYKLSF

SEQ ID NO: 551078 - protein, 15 aa, Homo sapiens
  CDR3 for beta chain variable domain of TCR clone 275539 (TRBV19, TRBJ1-1)
CASTSGQIQNTEAFF

SEQ ID NO: 551079 - protein, 14 aa, Homo sapiens
  CDR3 for alpha chain variable domain of TCR clone 275540 (TRAV12-2, TRAJ17)
CAVLFKAAANKLTF

SEQ ID NO: 551080 - protein, 17 aa, Homo sapiens
  CDR3 for beta chain variable domain of TCR clone 275540 (TRBV20-1, TRBJ2-2)
CSASGSGQGGLTGEPFF

SEQ ID NO: 551081 - protein, 15 aa, Homo sapiens
  CDR3 for alpha chain variable domain of TCR clone 275541 (TRAV3, TRAJ5)
CAVRDPDTGRRALTF

SEQ ID NO: 551082 - protein, 13 aa, Homo sapiens
  CDR3 for beta chain variable domain of TCR clone 275541 (TRBV20-1, TRBJ1-1)
CSARLGQGTEAFF

SEQ ID NO: 551083 - protein, 13 aa, Homo sapiens
  CDR3 for alpha chain variable domain of TCR clone 275542 (TRAV24, TRAJ37)
CAFSPGNTGKLIF

SEQ ID NO: 551084 - protein, 14 aa, Homo sapiens
  CDR3 for beta chain variable domain of TCR clone 275542 (TRBV18, TRBJ2-5)
CASSPPGHQETQYF

SEQ ID NO: 551085 - protein, 15 aa, Homo sapiens
  CDR3 for alpha chain variable domain of TCR clone 275543 (TRAV12-1, TRAJ22)
CVVRISSGSARQLTF

SEQ ID NO: 551086 - protein, 13 aa, Homo sapiens
  CDR3 for beta chain variable domain of TCR clone 275543 (TRBV6-3, TRBJ1-1)
CASSYSRTDAAFF

SEQ ID NO: 551087 - protein, 15 aa, Homo sapiens
  CDR3 for alpha chain variable domain of TCR clone 275544 (TRAV21, TRAJ53)
CATLNSGGSNYKLTF

SEQ ID NO: 551088 - protein, 14 aa, Homo sapiens
  CDR3 for beta chain variable domain of TCR clone 275544 (TRBV12-4, TRBJ1-1)
CASSFAQMNTEAFF

SEQ ID NO: 551089 - protein, 13 aa, Homo sapiens
  CDR3 for alpha chain variable domain of TCR clone 275545 (TRAV2, TRAJ40)
CAVVTSGTYKYIF

SEQ ID NO: 551090 - protein, 15 aa, Homo sapiens
  CDR3 for beta chain variable domain of TCR clone 275545 (TRBV13, TRBJ2-1)
CASSLLSGLNNEQFF

SEQ ID NO: 551091 - protein, 16 aa, Homo sapiens
  CDR3 for alpha chain variable domain of TCR clone 275546 (TRAV35, TRAJ28)
CAGQKYSGAGSYQLTF

SEQ ID NO: 551092 - protein, 17 aa, Homo sapiens
  CDR3 for beta chain variable domain of TCR clone 275546 (TRBV4-1, TRBJ2-1)
CASSQDPRGASYNEQFF

SEQ ID NO: 551093 - protein, 14 aa, Homo sapiens
  CDR3 for alpha chain variable domain of TCR clone 275547 (TRAV12-3, TRAJ10)
SHLPLTGGGNKLTF

SEQ ID NO: 551094 - protein, 13 aa, Homo sapiens
  CDR3 for beta chain variable domain of TCR clone 275547 (TRBV11-2, TRBJ2-1)
CASSLDLVNEQFF

SEQ ID NO: 551095 - protein, 19 aa, Homo sapiens
  CDR3 for alpha chain variable domain of TCR clone 275548 (TRAV26-1, TRAJ52)
CIVRAHRNAGGTSYGKLTF

SEQ ID NO: 551096 - protein, 14 aa, Homo sapiens
  CDR3 for beta chain variable domain of TCR clone 275548 (TRBV2, TRBJ2-5)
CASTWGRAQETQYF

SEQ ID NO: 551097 - protein, 12 aa, Homo sapiens
  CDR3 for alpha chain variable domain of TCR clone 275549 (TRAV2, TRAJ26)
CAVGEYGQNFVF

SEQ ID NO: 551098 - protein, 14 aa, Homo sapiens
  CDR3 for beta chain variable domain of TCR clone 275549 (TRBV7-2, TRBJ2-2)
CASSPSVGTGELFF

SEQ ID NO: 551099 - protein, 13 aa, Homo sapiens
  CDR3 for alpha chain variable domain of TCR clone 275550 (TRAV30, TRAJ31)
CGTETRNNARLMF

SEQ ID NO: 551100 - protein, 16 aa, Homo sapiens
  CDR3 for beta chain variable domain of TCR clone 275550 (TRBV7-2, TRBJ1-2)
CASSSNQDRRGHGYTF

SEQ ID NO: 551101 - protein, 13 aa, Homo sapiens
  CDR3 for alpha chain variable domain of TCR clone 275551 (TRAV8-3, TRAJ6)
CAVGSGGSYIPPF

SEQ ID NO: 551102 - protein, 14 aa, Homo sapiens
  CDR3 for beta chain variable domain of TCR clone 275551 (TRBV11-2, TRBJ1-1)
CASSTQRGRTEAFF

SEQ ID NO: 551103 - protein, 12 aa, Homo sapiens
  CDR3 for alpha chain variable domain of TCR clone 275552 (TRAV8-3, TRAJ53)
CAVVGSNYKLTF

SEQ ID NO: 551104 - protein, 13 aa, Homo sapiens
  CDR3 for beta chain variable domain of TCR clone 275552 (TRBV7-9, TRBJ1-2)
CASSLKQNYGYTF

SEQ ID NO: 551105 - protein, 14 aa, Homo sapiens
  CDR3 for alpha chain variable domain of TCR clone 275553 (TRAV13-1, TRAJ26)
CAASSAHYGQNFVY

SEQ ID NO: 551106 - protein, 17 aa, Homo sapiens
  CDR3 for beta chain variable domain of TCR clone 275553 (TRBV25-1, TRBJ2-5)
CASSRRGGRGGQETQYF

SEQ ID NO: 551107 - protein, 14 aa, Homo sapiens
  CDR3 for alpha chain variable domain of TCR clone 275554 (TRAV38-1, TRAJ45)
CAYYSGGGSAGLTF

SEQ ID NO: 551108 - protein, 20 aa, Homo sapiens
  CDR3 for beta chain variable domain of TCR clone 275554 (TRBV28, TRBJ2-1)
CASTPIGRSPGLAGGNEQFF

SEQ ID NO: 551109 - protein, 11 aa, Homo sapiens
  CDR3 for alpha chain variable domain of TCR clone 275555 (TRAV3, TRAJ21)
CAVGNFNKFYF

SEQ ID NO: 551110 - protein, 14 aa, Homo sapiens
  CDR3 for beta chain variable domain of TCR clone 275555 (TRBV25-1, TRBJ1-1)
CASTHLGGNTEASF

SEQ ID NO: 551111 - protein, 14 aa, Homo sapiens
  CDR3 for alpha chain variable domain of TCR clone 275556 (TRAV3, TRAJ36)
CAVRDGTGANNLFF

SEQ ID NO: 551112 - protein, 16 aa, Homo sapiens
  CDR3 for beta chain variable domain of TCR clone 275556 (TRBV20-1, TRBJ2-6)
CSAREGPGGGANVLTF

SEQ ID NO: 551113 - protein, 12 aa, Homo sapiens
  CDR3 for alpha chain variable domain of TCR clone 275557 (TRAV2, TRAJ32)
CAVGGATNKLIF

SEQ ID NO: 551114 - protein, 15 aa, Homo sapiens
  CDR3 for beta chain variable domain of TCR clone 275557 (TRBV7-2, TRBJ2-1)
CASGSRTSREDEQFF

SEQ ID NO: 551115 - protein, 13 aa, Homo sapiens
  CDR3 for alpha chain variable domain of TCR clone 275558 (TRAV8-4, TRAJ39)
STPPPDAGNMLTF

SEQ ID NO: 551116 - protein, 13 aa, Homo sapiens
  CDR3 for beta chain variable domain of TCR clone 275558 (TRBV12-4, TRBJ2-7)
CASSPTETYEQYF

SEQ ID NO: 551117 - protein, 10 aa, Homo sapiens
  CDR3 for alpha chain variable domain of TCR clone 275559 (TRAV16, TRAJ22)
SAMYLRQLTF

SEQ ID NO: 551118 - protein, 11 aa, Homo sapiens
  CDR3 for beta chain variable domain of TCR clone 275559 (TRBV7-2, TRBJ2-2)
CASSTRGELFF

SEQ ID NO: 551119 - protein, 17 aa, Homo sapiens
  CDR3 for alpha chain variable domain of TCR clone 275560 (TRAV4, TRAJ18)
CLVVAAGRGSTLGRLYF

SEQ ID NO: 551120 - protein, 17 aa, Homo sapiens
  CDR3 for beta chain variable domain of TCR clone 275560 (TRBV28, TRBJ2-2)
CASSLATGMGEAGELFF

SEQ ID NO: 551121 - protein, 17 aa, Homo sapiens
  CDR3 for alpha chain variable domain of TCR clone 275561 (TRAV3, TRAJ12)
CAVRDGGRMDSSYKLIF

SEQ ID NO: 551122 - protein, 19 aa, Homo sapiens
  CDR3 for beta chain variable domain of TCR clone 275561 (TRBV25-1, TRBJ2-2)
CAILVYRVDRGRKTGELFF

SEQ ID NO: 551123 - protein, 16 aa, Homo sapiens
  CDR3 for alpha chain variable domain of TCR clone 275562 (TRAV3, TRAJ37)
CAVRGKGSGNTGKLIF

SEQ ID NO: 551124 - protein, 16 aa, Homo sapiens
  CDR3 for beta chain variable domain of TCR clone 275562 (TRBV28, TRBJ2-1)
CASSSPEYPRDNEQFF

SEQ ID NO: 551125 - protein, 15 aa, Homo sapiens
  CDR3 for alpha chain variable domain of TCR clone 275563 (TRAV23/DV6, TRAJ39)
CAASMSNNAGNILTF

SEQ ID NO: 551126 - protein, 16 aa, Homo sapiens
  CDR3 for beta chain variable domain of TCR clone 275563 (TRBV4-1, TRBJ2-1)
CASSPYAGGHDNEQFF

SEQ ID NO: 551127 - protein, 21 aa, Homo sapiens
  CDR3 for alpha chain variable domain of TCR clone 275564 (TRAV2, TRAJ15)
ILQVREADAAVYSRGGTALIF

SEQ ID NO: 551128 - protein, 14 aa, Homo sapiens
  CDR3 for beta chain variable domain of TCR clone 275564 (TRBV4-1, TRBJ2-2)
CASSLTENTGELFF

SEQ ID NO: 551129 - protein, 14 aa, Homo sapiens
  CDR3 for alpha chain variable domain of TCR clone 275565 (TRAV4, TRAJ17)
CLVGDMAAGYKLTF

SEQ ID NO: 551130 - protein, 14 aa, Homo sapiens
  CDR3 for beta chain variable domain of TCR clone 275565 (TRBV7-6, TRBJ2-3)
CASSLGTVTDTQYF

SEQ ID NO: 551131 - protein, 12 aa, Homo sapiens
  CDR3 for alpha chain variable domain of TCR clone 275566 (TRAV16, TRAJ8)
CALDKGFQKLVF

SEQ ID NO: 551132 - protein, 15 aa, Homo sapiens
  CDR3 for beta chain variable domain of TCR clone 275566 (TRBV2, TRBJ1-2)
SASRNRESGNYGYTF

SEQ ID NO: 551133 - protein, 14 aa, Homo sapiens
  CDR3 for alpha chain variable domain of TCR clone 275567 (TRAV26-1, TRAJ38)
CIADNAGNNRKLIW

SEQ ID NO: 551134 - protein, 15 aa, Homo sapiens
  CDR3 for beta chain variable domain of TCR clone 275567 (TRBV7-6, TRBJ1-4)
CASSLGAGAGEKRFF

SEQ ID NO: 551135 - protein, 14 aa, Homo sapiens
  CDR3 for alpha chain variable domain of TCR clone 275568 (TRAV4, TRAJ6)
CLGPASGGSYIPTF

SEQ ID NO: 551136 - protein, 12 aa, Homo sapiens
  CDR3 for beta chain variable domain of TCR clone 275568 (TRBV6-5, TRBJ2-3)
CASRPSTDTQYF

SEQ ID NO: 551137 - protein, 13 aa, Homo sapiens
  CDR3 for alpha chain variable domain of TCR clone 275569 (TRAV12-3, TRAJ7)
CAMTPYGNNRLAF

SEQ ID NO: 551138 - protein, 16 aa, Homo sapiens
  CDR3 for beta chain variable domain of TCR clone 275569 (TRBV10-3, TRBJ2-1)
CAISGVGDGGGGEQFF

SEQ ID NO: 551139 - protein, 14 aa, Homo sapiens
  CDR3 for alpha chain variable domain of TCR clone 275570 (TRAV12-1, TRAJ43)
CVVNCRSNNNDMRF

SEQ ID NO: 551140 - protein, 10 aa, Homo sapiens
  CDR3 for beta chain variable domain of TCR clone 275570 (TRBV28, TRBJ2-5)
CQQSSWTQYF

SEQ ID NO: 551141 - protein, 13 aa, Homo sapiens
  CDR3 for alpha chain variable domain of TCR clone 275571 (TRAV39, TRAJ48)
CAAANFGNEKLTF

SEQ ID NO: 551142 - protein, 12 aa, Homo sapiens
  CDR3 for beta chain variable domain of TCR clone 275571 (TRBV5-5, TRBJ2-5)
CASSYFGETQYF

SEQ ID NO: 551143 - protein, 15 aa, Homo sapiens
  CDR3 for alpha chain variable domain of TCR clone 275572 (TRAV27, TRAJ38)
CAARRNAGNNRKLIW

SEQ ID NO: 551144 - protein, 14 aa, Homo sapiens
  CDR3 for beta chain variable domain of TCR clone 275572 (TRBV11-2, TRBJ2-7)
CASGLGAGAYEQYF

SEQ ID NO: 551145 - protein, 17 aa, Homo sapiens
  CDR3 for alpha chain variable domain of TCR clone 275573 (TRAV3, TRAJ6)
CAVRDGPRAGGSYVPTF

SEQ ID NO: 551146 - protein, 14 aa, Homo sapiens
  CDR3 for beta chain variable domain of TCR clone 275573 (TRBV7-2, TRBJ2-7)
CASSLKTSFYEQYF

SEQ ID NO: 551147 - protein, 14 aa, Homo sapiens
  CDR3 for alpha chain variable domain of TCR clone 275574 (TRAV12-2, TRAJ45)
CALPERGGADGLTF

SEQ ID NO: 551148 - protein, 14 aa, Homo sapiens
  CDR3 for beta chain variable domain of TCR clone 275574 (TRBV18, TRBJ1-5)
CASSPGNSNQPKHF

SEQ ID NO: 551149 - protein, 14 aa, Homo sapiens
  CDR3 for alpha chain variable domain of TCR clone 275575 (TRAV13-1, TRAJ5)
CAAHPDTGRRALTF

SEQ ID NO: 551150 - protein, 13 aa, Homo sapiens
  CDR3 for beta chain variable domain of TCR clone 275575 (TRBV27, TRBJ2-1)
CASRTLGVGEQFF

SEQ ID NO: 551151 - protein, 12 aa, Homo sapiens
  CDR3 for alpha chain variable domain of TCR clone 275576 (TRAV12-3, TRAJ17)
CAMTLTGNTLTF

SEQ ID NO: 551152 - protein, 15 aa, Homo sapiens
  CDR3 for beta chain variable domain of TCR clone 275576 (TRBV13, TRBJ1-3)
CASSPNRGSGNTIYF

SEQ ID NO: 551153 - protein, 14 aa, Homo sapiens
  CDR3 for alpha chain variable domain of TCR clone 275577 (TRAV8-3, TRAJ6)
CAVGASGVSYIPTF

SEQ ID NO: 551154 - protein, 17 aa, Homo sapiens
  CDR3 for beta chain variable domain of TCR clone 275577 (TRBV18, TRBJ2-2)
CASSPSDPWQNTGELFF

SEQ ID NO: 551155 - protein, 13 aa, Homo sapiens
  CDR3 for alpha chain variable domain of TCR clone 275578 (TRAV3, TRAJ27)
CVVRPLGAGKSTF

SEQ ID NO: 551156 - protein, 13 aa, Homo sapiens
  CDR3 for beta chain variable domain of TCR clone 275578 (TRBV7-9, TRBJ2-3)
CASSPRSTDTQYF

SEQ ID NO: 551157 - protein, 14 aa, Homo sapiens
  CDR3 for alpha chain variable domain of TCR clone 275579 (TRAV12-2, TRAJ53)
CAVKGGGRNYKLTF

SEQ ID NO: 551158 - protein, 15 aa, Homo sapiens
  CDR3 for beta chain variable domain of TCR clone 275579 (TRBV11-2, TRBJ2-2)
CASSSDRVNAGELFF

SEQ ID NO: 551159 - protein, 12 aa, Homo sapiens
  CDR3 for alpha chain variable domain of TCR clone 275580 (TRAV8-3, TRAJ26)
CAGDNYGQNFFF

SEQ ID NO: 551160 - protein, 12 aa, Homo sapiens
  CDR3 for beta chain variable domain of TCR clone 275580 (TRBV11-2, TRBJ2-1)
CASSPGNNEQFF

SEQ ID NO: 551161 - protein, 18 aa, Homo sapiens
  CDR3 for alpha chain variable domain of TCR clone 275581 (TRAV17, TRAJ57)
CFLLLCYGPQGGSEKLVF

SEQ ID NO: 551162 - protein, 19 aa, Homo sapiens
  CDR3 for beta chain variable domain of TCR clone 275581 (TRBV7-9, TRBJ2-1)
CASSHNRGALLRSYNEQFF

SEQ ID NO: 551163 - protein, 16 aa, Homo sapiens
  CDR3 for alpha chain variable domain of TCR clone 275582 (TRAV1-2, TRAJ42)
CLLPLCGGGSQGNLIF

SEQ ID NO: 551164 - protein, 14 aa, Homo sapiens
  CDR3 for beta chain variable domain of TCR clone 275582 (TRBV5-4, TRBJ2-5)
CASSLVRGQETQYF

SEQ ID NO: 551165 - protein, 13 aa, Homo sapiens
  CDR3 for alpha chain variable domain of TCR clone 275583 (TRAV8-3, TRAJ43)
CAVGIYNNNDMRF

SEQ ID NO: 551166 - protein, 16 aa, Homo sapiens
  CDR3 for beta chain variable domain of TCR clone 275583 (TRBV7-2, TRBJ2-5)
CASSLGLGTKQETQYF

SEQ ID NO: 551167 - protein, 14 aa, Homo sapiens
  CDR3 for alpha chain variable domain of TCR clone 275584 (TRAV12-2, TRAJ13)
CAVKKTGGYQKVTF

SEQ ID NO: 551168 - protein, 15 aa, Homo sapiens
  CDR3 for beta chain variable domain of TCR clone 275584 (TRBV9, TRBJ1-6)
CSSSVAGTGDSPLHF

SEQ ID NO: 551169 - protein, 16 aa, Homo sapiens
  CDR3 for alpha chain variable domain of TCR clone 275585 (TRAV26-1, TRAJ37)
CIVRGEGSGNTGKLIF

SEQ ID NO: 551170 - protein, 17 aa, Homo sapiens
  CDR3 for beta chain variable domain of TCR clone 275585 (TRBV4-1, TRBJ2-7)
CASSRAPLGVRGGEQYF

SEQ ID NO: 551171 - protein, 15 aa, Homo sapiens
  CDR3 for alpha chain variable domain of TCR clone 275586 (TRAV23/DV6, TRAJ17)
CARGSCRQQANFWRR

SEQ ID NO: 551172 - protein, 14 aa, Homo sapiens
  CDR3 for beta chain variable domain of TCR clone 275586 (TRBV7-2, TRBJ1-2)
CASSQTGPTYGYTF

SEQ ID NO: 551173 - protein, 14 aa, Homo sapiens
  CDR3 for alpha chain variable domain of TCR clone 275587 (TRAV1-2, TRAJ8)
CAVREDTGFPKLVF

SEQ ID NO: 551174 - protein, 14 aa, Homo sapiens
  CDR3 for beta chain variable domain of TCR clone 275587 (TRBV7-2, TRBJ1-1)
CASSFLTGTTEAFF

SEQ ID NO: 551175 - protein, 14 aa, Homo sapiens
  CDR3 for alpha chain variable domain of TCR clone 275588 (TRAV1-2, TRAJ16)
CAVNRFSDGQKLLL

SEQ ID NO: 551176 - protein, 14 aa, Homo sapiens
  CDR3 for beta chain variable domain of TCR clone 275588 (TRBV18, TRBJ2-5)
CASSPGVSQETQYF

SEQ ID NO: 551177 - protein, 16 aa, Homo sapiens
  CDR3 for alpha chain variable domain of TCR clone 275589 (TRAV30, TRAJ24)
CGTEIVDADSWGKFQF

SEQ ID NO: 551178 - protein, 16 aa, Homo sapiens
  CDR3 for beta chain variable domain of TCR clone 275589 (TRBV6-3, TRBJ1-1)
CASTDLGTVPNAEAFF

SEQ ID NO: 551179 - protein, 15 aa, Homo sapiens
  CDR3 for alpha chain variable domain of TCR clone 275590 (TRAV3, TRAJ3)
CAVRRAGSSASKIIF

SEQ ID NO: 551180 - protein, 12 aa, Homo sapiens
  CDR3 for beta chain variable domain of TCR clone 275590 (TRBV11-2, TRBJ2-2)
CASSLGGGELFF

SEQ ID NO: 551181 - protein, 13 aa, Homo sapiens
  CDR3 for alpha chain variable domain of TCR clone 275591 (TRAV27, TRAJ8)
CAGGPTGFQKLVF

SEQ ID NO: 551182 - protein, 15 aa, Homo sapiens
  CDR3 for beta chain variable domain of TCR clone 275591 (TRBV6-1, TRBJ2-7)
CASSESMGDVYEQYF

SEQ ID NO: 551183 - protein, 16 aa, Homo sapiens
  CDR3 for alpha chain variable domain of TCR clone 275592 (TRAV22, TRAJ45)
CAVERGKRGGADGLTF

SEQ ID NO: 551184 - protein, 13 aa, Homo sapiens
  CDR3 for beta chain variable domain of TCR clone 275592 (TRBV27, TRBJ1-1)
CASSLSICAEAFF

SEQ ID NO: 551185 - protein, 13 aa, Homo sapiens
  CDR3 for alpha chain variable domain of TCR clone 275593 (TRAV1-2, TRAJ9)
CAALNTGGFKTIF

SEQ ID NO: 551186 - protein, 15 aa, Homo sapiens
  CDR3 for beta chain variable domain of TCR clone 275593 (TRBV11-3, TRBJ2-7)
CASSPGPASSYEQYF

SEQ ID NO: 551187 - protein, 14 aa, Homo sapiens
  CDR3 for alpha chain variable domain of TCR clone 275594 (TRAV17, TRAJ15)
CATDAWQAGTALIF

SEQ ID NO: 551188 - protein, 13 aa, Homo sapiens
  CDR3 for beta chain variable domain of TCR clone 275594 (TRBV11-2, TRBJ2-5)
CASSFSSQETQYF

SEQ ID NO: 551189 - protein, 12 aa, Homo sapiens
  CDR3 for alpha chain variable domain of TCR clone 275595 (TRAV10, TRAJ43)
CVVFRVGNDMRF

SEQ ID NO: 551190 - protein, 15 aa, Homo sapiens
  CDR3 for beta chain variable domain of TCR clone 275595 (TRBV2, TRBJ2-7)
CASSEGLARSYEQYF

SEQ ID NO: 551191 - protein, 12 aa, Homo sapiens
  CDR3 for alpha chain variable domain of TCR clone 275596 (TRAV29/DV5, TRAJ31)
CAASSPNARPMF

SEQ ID NO: 551192 - protein, 17 aa, Homo sapiens
  CDR3 for beta chain variable domain of TCR clone 275596 (TRBV18, TRBJ2-6)
CASSPRQGAVGANVLTF

SEQ ID NO: 551193 - protein, 14 aa, Homo sapiens
  CDR3 for alpha chain variable domain of TCR clone 275597 (TRAV12-3, TRAJ10)
SHLLLTGGGNKLTF

SEQ ID NO: 551194 - protein, 14 aa, Homo sapiens
  CDR3 for beta chain variable domain of TCR clone 275597 (TRBV6-1, TRBJ1-3)
CASVQGRGGNTIYF

SEQ ID NO: 551195 - protein, 14 aa, Homo sapiens
  CDR3 for alpha chain variable domain of TCR clone 275598 (TRAV12-2, TRAJ24)
CAVTPADSWGKLQF

SEQ ID NO: 551196 - protein, 12 aa, Homo sapiens
  CDR3 for beta chain variable domain of TCR clone 275598 (TRBV3-1, TRBJ2-1)
CASSQGSSAQFF

SEQ ID NO: 551197 - protein, 13 aa, Homo sapiens
  CDR3 for alpha chain variable domain of TCR clone 275599 (TRAV17, )
CATDPTPGITMIS

SEQ ID NO: 551198 - protein, 14 aa, Homo sapiens
  CDR3 for beta chain variable domain of TCR clone 275599 (TRBV19, TRBJ2-1)
CASPTFVLSGEQFF

SEQ ID NO: 551199 - protein, 14 aa, Homo sapiens
  CDR3 for alpha chain variable domain of TCR clone 275600 (TRAV12-2, TRAJ13)
CAVKKTGGYQKVTF

SEQ ID NO: 551200 - protein, 12 aa, Homo sapiens
  CDR3 for beta chain variable domain of TCR clone 275600 (TRBV29-1, TRBJ2-3)
CGVTGGADTQYF

SEQ ID NO: 551201 - protein, 16 aa, Homo sapiens
  CDR3 for alpha chain variable domain of TCR clone 275601 (TRAV30, TRAJ24)
CGTEIVDADSWGKFQF

SEQ ID NO: 551202 - protein, 13 aa, Homo sapiens
  CDR3 for beta chain variable domain of TCR clone 275601 (TRBV19, TRBJ2-1)
CASSPRASLEQFF

SEQ ID NO: 551203 - protein, 12 aa, Homo sapiens
  CDR3 for alpha chain variable domain of TCR clone 275602 (TRAV36/DV7, TRAJ37)
CACYGNTGKLIF

SEQ ID NO: 551204 - protein, 18 aa, Homo sapiens
  CDR3 for beta chain variable domain of TCR clone 275602 (TRBV27, TRBJ2-1)
CASGNRAVGVGSKNEQFF

SEQ ID NO: 551205 - protein, 14 aa, Homo sapiens
  CDR3 for alpha chain variable domain of TCR clone 275603 (TRAV23/DV6, TRAJ4)
CAANLSGGYNKLIF

SEQ ID NO: 551206 - protein, 13 aa, Homo sapiens
  CDR3 for beta chain variable domain of TCR clone 275603 (TRBV7-3, TRBJ2-3)
CASSSWSTDTQYF

SEQ ID NO: 551207 - protein, 15 aa, Homo sapiens
  CDR3 for alpha chain variable domain of TCR clone 275604 (TRAV21, TRAJ37)
CAVRPTLSNTGKLIF

SEQ ID NO: 551208 - protein, 12 aa, Homo sapiens
  CDR3 for beta chain variable domain of TCR clone 275604 (TRBV20-1, TRBJ1-5)
CSASGTNQAQHF

SEQ ID NO: 551209 - protein, 14 aa, Homo sapiens
  CDR3 for alpha chain variable domain of TCR clone 275605 (TRAV38-1, TRAJ40)
CALSPTTGTYKYIF

SEQ ID NO: 551210 - protein, 14 aa, Homo sapiens
  CDR3 for beta chain variable domain of TCR clone 275605 (TRBV25-1, TRBJ1-1)
CASTHLGGNTEAFF

SEQ ID NO: 551211 - protein, 16 aa, Homo sapiens
  CDR3 for alpha chain variable domain of TCR clone 275606 (TRAV4, TRAJ18)
CCVLLIGGSTLGRLYF

SEQ ID NO: 551212 - protein, 17 aa, Homo sapiens
  CDR3 for beta chain variable domain of TCR clone 275606 (TRBV15, TRBJ1-5)
CATSRAPPGTRNQPQHF

SEQ ID NO: 551213 - protein, 17 aa, Homo sapiens
  CDR3 for alpha chain variable domain of TCR clone 275607 (TRAV13-1, )
CAANIQNPDTAVYQLRD

SEQ ID NO: 551214 - protein, 16 aa, Homo sapiens
  CDR3 for beta chain variable domain of TCR clone 275607 (TRBV5-4, TRBJ2-3)
CASSWGTSGGTDTQYF

SEQ ID NO: 551215 - protein, 18 aa, Homo sapiens
  CDR3 for alpha chain variable domain of TCR clone 275608 (TRAV26-1, TRAJ52)
CIVRVEGAGGTSYGKLTF

SEQ ID NO: 551216 - protein, 13 aa, Homo sapiens
  CDR3 for beta chain variable domain of TCR clone 275608 (TRBV7-3, TRBJ1-2)
CASSLKRGHGYTF

SEQ ID NO: 551217 - protein, 13 aa, Homo sapiens
  CDR3 for alpha chain variable domain of TCR clone 275609 (TRAV1-1, TRAJ11)
CAVTNSGYSTLTF

SEQ ID NO: 551218 - protein, 15 aa, Homo sapiens
  CDR3 for beta chain variable domain of TCR clone 275609 (TRBV7-3, TRBJ2-1)
CASSLSSGSFDEQFF

SEQ ID NO: 551219 - protein, 17 aa, Homo sapiens
  CDR3 for alpha chain variable domain of TCR clone 275610 (TRAV1-2, TRAJ27)
CAVRDKTGDTNAGKSTF

SEQ ID NO: 551220 - protein, 14 aa, Homo sapiens
  CDR3 for beta chain variable domain of TCR clone 275610 (TRBV13, TRBJ2-3)
CASSLGGPQRPQYF

SEQ ID NO: 551221 - protein, 13 aa, Homo sapiens
  CDR3 for alpha chain variable domain of TCR clone 275611 (TRAV3, TRAJ8)
CDVRFTGFQKLVF

SEQ ID NO: 551222 - protein, 14 aa, Homo sapiens
  CDR3 for beta chain variable domain of TCR clone 275611 (TRBV19, TRBJ2-5)
CASSMTGQQETQYF

SEQ ID NO: 551223 - protein, 14 aa, Homo sapiens
  CDR3 for alpha chain variable domain of TCR clone 275612 (TRAV1-2, TRAJ8)
CAVREDTGSQKLVF

SEQ ID NO: 551224 - protein, 15 aa, Homo sapiens
  CDR3 for beta chain variable domain of TCR clone 275612 (TRBV20-1, TRBJ2-7)
CSARDRVSRMDDQYF

SEQ ID NO: 551225 - protein, 13 aa, Homo sapiens
  CDR3 for alpha chain variable domain of TCR clone 275613 (TRAV8-3, TRAJ43)
CAVGPDNNNDMRF

SEQ ID NO: 551226 - protein, 15 aa, Homo sapiens
  CDR3 for beta chain variable domain of TCR clone 275613 (TRBV3-1, TRBJ2-7)
CASSQGVGVKVEQYF

SEQ ID NO: 551227 - protein, 15 aa, Homo sapiens
  CDR3 for alpha chain variable domain of TCR clone 275614 (TRAV8-3, TRAJ20)
CAVEAKGSSDYKLSF

SEQ ID NO: 551228 - protein, 12 aa, Homo sapiens
  CDR3 for beta chain variable domain of TCR clone 275614 (TRBV11-2, TRBJ2-2)
CASSLGGGELFF

SEQ ID NO: 551229 - protein, 16 aa, Homo sapiens
  CDR3 for alpha chain variable domain of TCR clone 275615 (TRAV16, TRAJ42)
CARKMNYGGSQGNRIF

SEQ ID NO: 551230 - protein, 15 aa, Homo sapiens
  CDR3 for beta chain variable domain of TCR clone 275615 (TRBV20-1, TRBJ2-7)
CSAREGRDSLYEQYF

SEQ ID NO: 551231 - protein, 15 aa, Homo sapiens
  CDR3 for alpha chain variable domain of TCR clone 275616 (TRAV8-3, TRAJ48)
CAVCAQLSGNEKLTF

SEQ ID NO: 551232 - protein, 15 aa, Homo sapiens
  CDR3 for beta chain variable domain of TCR clone 275616 (TRBV6-6, TRBJ2-7)
CASSYSYGGSYEQYF

SEQ ID NO: 551233 - protein, 15 aa, Homo sapiens
  CDR3 for alpha chain variable domain of TCR clone 275617 (TRAV21, TRAJ24)
CAARSSTDSCGKLQF

SEQ ID NO: 551234 - protein, 13 aa, Homo sapiens
  CDR3 for beta chain variable domain of TCR clone 275617 (TRBV11-2, TRBJ2-5)
CASSATGEETQYF

SEQ ID NO: 551235 - protein, 12 aa, Homo sapiens
  CDR3 for alpha chain variable domain of TCR clone 275618 (TRAV23/DV6, TRAJ30)
CAASKGGDKIIF

SEQ ID NO: 551236 - protein, 17 aa, Homo sapiens
  CDR3 for beta chain variable domain of TCR clone 275618 (TRBV13, TRBJ2-3)
CASSLSRVAGGRNTQYF

SEQ ID NO: 551237 - protein, 14 aa, Homo sapiens
  CDR3 for alpha chain variable domain of TCR clone 275619 (TRAV35, TRAJ42)
CCVPYGGSQGNRIF

SEQ ID NO: 551238 - protein, 18 aa, Homo sapiens
  CDR3 for beta chain variable domain of TCR clone 275619 (TRBV13, TRBJ2-6)
CASSPMTSGGSGANVLTF

SEQ ID NO: 551239 - protein, 15 aa, Homo sapiens
  CDR3 for alpha chain variable domain of TCR clone 275620 (TRAV25, TRAJ53)
CAATGGGGSNYKLTF

SEQ ID NO: 551240 - protein, 19 aa, Homo sapiens
  CDR3 for beta chain variable domain of TCR clone 275620 (TRBV7-2, TRBJ2-3)
SASSFLSRNWGGGTDTQYF

SEQ ID NO: 551241 - protein, 14 aa, Homo sapiens
  CDR3 for alpha chain variable domain of TCR clone 275621 (TRAV12-3, TRAJ6)
CAMSATGGSYIPTF

SEQ ID NO: 551242 - protein, 16 aa, Homo sapiens
  CDR3 for beta chain variable domain of TCR clone 275621 (TRBV4-2, TRBJ2-1)
CGSSPRAGQGANEQFF

SEQ ID NO: 551243 - protein, 12 aa, Homo sapiens
  CDR3 for alpha chain variable domain of TCR clone 275622 (TRAV20, TRAJ56)
CAVTGANSKLTF

SEQ ID NO: 551244 - protein, 17 aa, Homo sapiens
  CDR3 for beta chain variable domain of TCR clone 275622 (TRBV4-1, TRBJ2-1)
CASSQGRGGGLYNEQFF

SEQ ID NO: 551245 - protein, 10 aa, Homo sapiens
  CDR3 for alpha chain variable domain of TCR clone 275623 (TRAV13-1, TRAJ8)
CAAPFQKLVF

SEQ ID NO: 551246 - protein, 18 aa, Homo sapiens
  CDR3 for beta chain variable domain of TCR clone 275623 (TRBV28, TRBJ2-7)
CASSLYAGDNSGLNEQYF

SEQ ID NO: 551247 - protein, 16 aa, Homo sapiens
  CDR3 for alpha chain variable domain of TCR clone 275624 (TRAV3, TRAJ37)
CAVRPPGSGNTGQLIF

SEQ ID NO: 551248 - protein, 14 aa, Homo sapiens
  CDR3 for beta chain variable domain of TCR clone 275624 (TRBV25-1, TRBJ1-1)
CASTHLGGNTEAFF

SEQ ID NO: 551249 - protein, 14 aa, Homo sapiens
  CDR3 for alpha chain variable domain of TCR clone 275625 (TRAV1-2, TRAJ16)
CAVNRFSDGQKLLF

SEQ ID NO: 551250 - protein, 14 aa, Homo sapiens
  CDR3 for beta chain variable domain of TCR clone 275625 (TRBV6-1, TRBJ2-1)
CASSEATRANEQFF

SEQ ID NO: 551251 - protein, 17 aa, Homo sapiens
  CDR3 for alpha chain variable domain of TCR clone 275626 (TRAV12-2, TRAJ22)
CAVNRIPFFGSARQLTF

SEQ ID NO: 551252 - protein, 13 aa, Homo sapiens
  CDR3 for beta chain variable domain of TCR clone 275626 (TRBV11-3, TRBJ1-1)
CASSSNRDTEAFF

SEQ ID NO: 551253 - protein, 14 aa, Homo sapiens
  CDR3 for alpha chain variable domain of TCR clone 275627 (TRAV35, TRAJ22)
CAGLRPGSARQLTL

SEQ ID NO: 551254 - protein, 13 aa, Homo sapiens
  CDR3 for beta chain variable domain of TCR clone 275627 (TRBV20-1, TRBJ2-7)
CSATHTSGYEQYF

SEQ ID NO: 551255 - protein, 18 aa, Homo sapiens
  CDR3 for alpha chain variable domain of TCR clone 275628 (TRAV13-1, TRAJ52)
CAAKNPNAGGTSYGKLTF

SEQ ID NO: 551256 - protein, 13 aa, Homo sapiens
  CDR3 for beta chain variable domain of TCR clone 275628 (TRBV7-2, TRBJ2-5)
CASSQTSVETQYF

SEQ ID NO: 551257 - protein, 15 aa, Homo sapiens
  CDR3 for alpha chain variable domain of TCR clone 275629 (TRAV26-1, TRAJ29)
CIVRVEGSGNTPLVF

SEQ ID NO: 551258 - protein, 13 aa, Homo sapiens
  CDR3 for beta chain variable domain of TCR clone 275629 (TRBV27, TRBJ1-1)
CASSLSIGAEAFF

SEQ ID NO: 551259 - protein, 11 aa, Homo sapiens
  CDR3 for alpha chain variable domain of TCR clone 275630 (TRAV1-1, TRAJ20)
CAVFNDYKLSF

SEQ ID NO: 551260 - protein, 14 aa, Homo sapiens
  CDR3 for beta chain variable domain of TCR clone 275630 (TRBV19, TRBJ2-1)
CASSKDRGQDGQFF

SEQ ID NO: 551261 - protein, 10 aa, Homo sapiens
  CDR3 for alpha chain variable domain of TCR clone 275631 (TRAV30, TRAJ48)
CGIGNEKLTF

SEQ ID NO: 551262 - protein, 14 aa, Homo sapiens
  CDR3 for beta chain variable domain of TCR clone 275631 (TRBV7-6, TRBJ2-3)
CASSVAGGTDTPYF

SEQ ID NO: 551263 - protein, 13 aa, Homo sapiens
  CDR3 for alpha chain variable domain of TCR clone 275632 (TRAV13-1, TRAJ21)
CAASIYNFNKFYF

SEQ ID NO: 551264 - protein, 14 aa, Homo sapiens
  CDR3 for beta chain variable domain of TCR clone 275632 (TRBV6-1, TRBJ1-5)
CASSETGMEQPQHF

SEQ ID NO: 551265 - protein, 15 aa, Homo sapiens
  CDR3 for alpha chain variable domain of TCR clone 275633 (TRAV17, TRAJ57)
CATGPSQGGSVKLVF

SEQ ID NO: 551266 - protein, 16 aa, Homo sapiens
  CDR3 for beta chain variable domain of TCR clone 275633 (TRBV12-4, TRBJ1-5)
CASSRPVGGSNQPQHF

SEQ ID NO: 551267 - protein, 17 aa, Homo sapiens
  CDR3 for alpha chain variable domain of TCR clone 275634 (TRAV12-3, TRAJ52)
CASPPFAGGTSYGKLTF

SEQ ID NO: 551268 - protein, 16 aa, Homo sapiens
  CDR3 for beta chain variable domain of TCR clone 275634 (TRBV6-5, TRBJ2-5)
CASSSVGRWGRETQYV

SEQ ID NO: 551269 - protein, 10 aa, Homo sapiens
  CDR3 for alpha chain variable domain of TCR clone 275635 (TRAV20, TRAJ22)
CAAPARQLTF

SEQ ID NO: 551270 - protein, 15 aa, Homo sapiens
  CDR3 for beta chain variable domain of TCR clone 275635 (TRBV28, TRBJ2-7)
CASSLVLAGAREQYF

SEQ ID NO: 551271 - protein, 19 aa, Homo sapiens
  CDR3 for alpha chain variable domain of TCR clone 275636 (TRAV16, )
CSLSGDIQNPDPAVYQLRD

SEQ ID NO: 551272 - protein, 16 aa, Homo sapiens
  CDR3 for beta chain variable domain of TCR clone 275636 (TRBV12-5, TRBJ2-5)
CASGPRTSGNQETQYC

SEQ ID NO: 551273 - protein, 11 aa, Homo sapiens
  CDR3 for alpha chain variable domain of TCR clone 275637 (TRAV17, TRAJ9)
CGFTGGFKTIF

SEQ ID NO: 551274 - protein, 15 aa, Homo sapiens
  CDR3 for beta chain variable domain of TCR clone 275637 (TRBV11-3, TRBJ2-3)
CASLKDGREGDTQYF

SEQ ID NO: 551275 - protein, 12 aa, Homo sapiens
  CDR3 for alpha chain variable domain of TCR clone 275638 (TRAV21, TRAJ13)
PGPSGGYQKVTF

SEQ ID NO: 551276 - protein, 13 aa, Homo sapiens
  CDR3 for beta chain variable domain of TCR clone 275638 (TRBV7-2, TRBJ1-2)
CASSSRGAYGYTF

SEQ ID NO: 551277 - protein, 13 aa, Homo sapiens
  CDR3 for alpha chain variable domain of TCR clone 275639 (TRAV21, TRAJ36)
CAVIKTGANNLFF

SEQ ID NO: 551278 - protein, 15 aa, Homo sapiens
  CDR3 for beta chain variable domain of TCR clone 275639 (TRBV6-3, TRBJ2-7)
CASSSPGTVFYEQYF

SEQ ID NO: 551279 - protein, 14 aa, Homo sapiens
  CDR3 for alpha chain variable domain of TCR clone 275640 (TRAV1-2, TRAJ16)
CAVNRFSDGQKLLF

SEQ ID NO: 551280 - protein, 13 aa, Homo sapiens
  CDR3 for beta chain variable domain of TCR clone 275640 (TRBV18, TRBJ2-7)
CQLTERGAYEQYF

SEQ ID NO: 551281 - protein, 12 aa, Homo sapiens
  CDR3 for alpha chain variable domain of TCR clone 275641 (TRAV21, TRAJ8)
CAVNTGFQKLVF

SEQ ID NO: 551282 - protein, 13 aa, Homo sapiens
  CDR3 for beta chain variable domain of TCR clone 275641 (TRBV6-3, TRBJ2-1)
CASSYDNYSEQFF

SEQ ID NO: 551283 - protein, 14 aa, Homo sapiens
  CDR3 for alpha chain variable domain of TCR clone 275642 (TRAV8-3, TRAJ9)
CAVVYNTGGFKTIF

SEQ ID NO: 551284 - protein, 18 aa, Homo sapiens
  CDR3 for beta chain variable domain of TCR clone 275642 (TRBV12-4, TRBJ2-2)
CASSLVAGTRGRTGELFF

SEQ ID NO: 551285 - protein, 17 aa, Homo sapiens
  CDR3 for alpha chain variable domain of TCR clone 275643 (TRAV27, TRAJ26)
CAGARAPLDNYGQNFVV

SEQ ID NO: 551286 - protein, 15 aa, Homo sapiens
  CDR3 for beta chain variable domain of TCR clone 275643 (TRBV11-2, TRBJ2-5)
CASSPRSGGLETQYF

SEQ ID NO: 551287 - protein, 13 aa, Homo sapiens
  CDR3 for alpha chain variable domain of TCR clone 275644 (TRAV12-3, TRAJ33)
CAMSVNSNYQLIW

SEQ ID NO: 551288 - protein, 13 aa, Homo sapiens
  CDR3 for beta chain variable domain of TCR clone 275644 (TRBV12-4, TRBJ1-2)
CTSVPAVSYGYTF

SEQ ID NO: 551289 - protein, 16 aa, Homo sapiens
  CDR3 for alpha chain variable domain of TCR clone 275645 (TRAV16, TRAJ52)
CALSEAGGTSYGKLPF

SEQ ID NO: 551290 - protein, 12 aa, Homo sapiens
  CDR3 for beta chain variable domain of TCR clone 275645 (TRBV12-4, TRBJ1-3)
CASSFSGNTIYF

SEQ ID NO: 551291 - protein, 14 aa, Homo sapiens
  CDR3 for alpha chain variable domain of TCR clone 275646 (TRAV1-1, TRAJ23)
CAVSIYNQGGKLIF

SEQ ID NO: 551292 - protein, 15 aa, Homo sapiens
  CDR3 for beta chain variable domain of TCR clone 275646 (TRBV7-9, TRBJ2-2)
CASGPLDTFPGELFF

SEQ ID NO: 551293 - protein, 14 aa, Homo sapiens
  CDR3 for alpha chain variable domain of TCR clone 275647 (TRAV12-2, TRAJ6)
CASKWGGGSYIPTF

SEQ ID NO: 551294 - protein, 16 aa, Homo sapiens
  CDR3 for beta chain variable domain of TCR clone 275647 (TRBV19, TRBJ2-2)
CASRSPGTGATGELFF

SEQ ID NO: 551295 - protein, 14 aa, Homo sapiens
  CDR3 for alpha chain variable domain of TCR clone 275648 (TRAV12-1, TRAJ17)
CVVNPKAAGNKLTF

SEQ ID NO: 551296 - protein, 16 aa, Homo sapiens
  CDR3 for beta chain variable domain of TCR clone 275648 (TRBV20-1, TRBJ2-1)
CSASASGYSSYNEQFF

SEQ ID NO: 551297 - protein, 13 aa, Homo sapiens
  CDR3 for alpha chain variable domain of TCR clone 275649 (TRAV13-1, TRAJ37)
CAAVSGNTGKLIF

SEQ ID NO: 551298 - protein, 13 aa, Homo sapiens
  CDR3 for beta chain variable domain of TCR clone 275649 (TRBV7-9, TRBJ1-2)
CASSVKQNYGYTF

SEQ ID NO: 551299 - protein, 14 aa, Homo sapiens
  CDR3 for alpha chain variable domain of TCR clone 275650 (TRAV3, TRAJ20)
CAVRDSFNDYKLSF

SEQ ID NO: 551300 - protein, 13 aa, Homo sapiens
  CDR3 for beta chain variable domain of TCR clone 275650 (TRBV4-2, TRBJ1-1)
CASSQAGNTEAFF

SEQ ID NO: 551301 - protein, 16 aa, Homo sapiens
  CDR3 for alpha chain variable domain of TCR clone 275651 (TRAV16, TRAJ42)
CALSGYYGGSQGNIIF

SEQ ID NO: 551302 - protein, 14 aa, Homo sapiens
  CDR3 for beta chain variable domain of TCR clone 275651 (TRBV3-1, TRBJ2-5)
CASSQAVRQETQYF

SEQ ID NO: 551303 - protein, 16 aa, Homo sapiens
  CDR3 for alpha chain variable domain of TCR clone 275652 (TRAV16, TRAJ52)
RALSAAGGTSYGKLTF

SEQ ID NO: 551304 - protein, 17 aa, Homo sapiens
  CDR3 for beta chain variable domain of TCR clone 275652 (TRBV11-2, TRBJ2-1)
CASSLYPPGVEHNEQFF

SEQ ID NO: 551305 - protein, 21 aa, Homo sapiens
  CDR3 for alpha chain variable domain of TCR clone 275653 (TRAV9-2, )
CALIQIGDIQNPDPAVYQLRD

SEQ ID NO: 551306 - protein, 17 aa, Homo sapiens
  CDR3 for beta chain variable domain of TCR clone 275653 (TRBV7-8, TRBJ2-6)
CASSAGTGGAGANDLSF

SEQ ID NO: 551307 - protein, 16 aa, Homo sapiens
  CDR3 for alpha chain variable domain of TCR clone 275654 (TRAV3, TRAJ37)
CAVRPHGSGNTGKLIF

SEQ ID NO: 551308 - protein, 12 aa, Homo sapiens
  CDR3 for beta chain variable domain of TCR clone 275654 (TRBV12-4, TRBJ1-1)
CASSFGRAEAFF

SEQ ID NO: 551309 - protein, 16 aa, Homo sapiens
  CDR3 for alpha chain variable domain of TCR clone 275655 (TRAV30, TRAJ24)
CGKEIVDADSWGKFQL

SEQ ID NO: 551310 - protein, 14 aa, Homo sapiens
  CDR3 for beta chain variable domain of TCR clone 275655 (TRBV12-5, TRBJ2-5)
CASGSRTHQETQYF

SEQ ID NO: 551311 - protein, 15 aa, Homo sapiens
  CDR3 for alpha chain variable domain of TCR clone 275656 (TRAV12-1, TRAJ45)
CVVLSGGGDADGLTF

SEQ ID NO: 551312 - protein, 14 aa, Homo sapiens
  CDR3 for beta chain variable domain of TCR clone 275656 (TRBV11-2, TRBJ2-5)
CASSRTGGIETQYF

SEQ ID NO: 551313 - protein, 14 aa, Homo sapiens
  CDR3 for alpha chain variable domain of TCR clone 275657 (TRAV12-2, TRAJ52)
CAVPGGTSYGKLTF

SEQ ID NO: 551314 - protein, 12 aa, Homo sapiens
  CDR3 for beta chain variable domain of TCR clone 275657 (TRBV18, TRBJ2-1)
CASSPGTSEGSF

SEQ ID NO: 551315 - protein, 17 aa, Homo sapiens
  CDR3 for alpha chain variable domain of TCR clone 275658 (TRAV1-2, TRAJ6)
CAVRDTTRTGGSYIPPF

SEQ ID NO: 551316 - protein, 12 aa, Homo sapiens
  CDR3 for beta chain variable domain of TCR clone 275658 (TRBV24-1, TRBJ2-3)
CATSSGGDTQYF

SEQ ID NO: 551317 - protein, 11 aa, Homo sapiens
  CDR3 for alpha chain variable domain of TCR clone 275659 (TRAV17, TRAJ31)
CATNRTARLMF

SEQ ID NO: 551318 - protein, 14 aa, Homo sapiens
  CDR3 for beta chain variable domain of TCR clone 275659 (TRBV18, TRBJ1-2)
CASSPDRVVYGYTF

SEQ ID NO: 551319 - protein, 12 aa, Homo sapiens
  CDR3 for alpha chain variable domain of TCR clone 275660 (TRAV12-2, TRAJ4)
GWLEGGYNKLIF

SEQ ID NO: 551320 - protein, 16 aa, Homo sapiens
  CDR3 for beta chain variable domain of TCR clone 275660 (TRBV6-1, TRBJ2-5)
CASSETLDRGAETQYF

SEQ ID NO: 551321 - protein, 13 aa, Homo sapiens
  CDR3 for alpha chain variable domain of TCR clone 275661 (TRAV13-1, TRAJ21)
CPASIYNFNKFYF

SEQ ID NO: 551322 - protein, 15 aa, Homo sapiens
  CDR3 for beta chain variable domain of TCR clone 275661 (TRBV7-8, TRBJ1-5)
CASSLAGQPNQPQHF

SEQ ID NO: 551323 - protein, 14 aa, Homo sapiens
  CDR3 for alpha chain variable domain of TCR clone 275662 (TRAV26-1, TRAJ52)
CIVKGGTSYGKLTF

SEQ ID NO: 551324 - protein, 15 aa, Homo sapiens
  CDR3 for beta chain variable domain of TCR clone 275662 (TRBV11-2, TRBJ1-6)
CASTLRGTGNSHLHF

SEQ ID NO: 551325 - protein, 13 aa, Homo sapiens
  CDR3 for alpha chain variable domain of TCR clone 275663 (TRAV27, TRAJ49)
CAPRPYTGNQFYF

SEQ ID NO: 551326 - protein, 14 aa, Homo sapiens
  CDR3 for beta chain variable domain of TCR clone 275663 (TRBV7-6, TRBJ2-3)
CASSVAGGTDTQYF

SEQ ID NO: 551327 - protein, 17 aa, Homo sapiens
  CDR3 for alpha chain variable domain of TCR clone 275664 (TRAV13-1, TRAJ53)
CAASWKSSGGSNYKLTF

SEQ ID NO: 551328 - protein, 19 aa, Homo sapiens
  CDR3 for beta chain variable domain of TCR clone 275664 (TRBV7-9, TRBJ2-1)
WASSHSRGALLRSYNEQFF

SEQ ID NO: 551329 - protein, 13 aa, Homo sapiens
  CDR3 for alpha chain variable domain of TCR clone 275665 (TRAV36/DV7, TRAJ54)
CTVCTQGAQKLVF

SEQ ID NO: 551330 - protein, 13 aa, Homo sapiens
  CDR3 for beta chain variable domain of TCR clone 275665 (TRBV7-6, TRBJ2-7)
CASSLDHTHEQYF

SEQ ID NO: 551331 - protein, 15 aa, Homo sapiens
  CDR3 for alpha chain variable domain of TCR clone 275666 (TRAV21, TRAJ18)
CAVRDRGSTLGRLYF

SEQ ID NO: 551332 - protein, 17 aa, Homo sapiens
  CDR3 for beta chain variable domain of TCR clone 275666 (TRBV7-2, TRBJ2-3)
CASSSCSGTRRADTQYF

SEQ ID NO: 551333 - protein, 14 aa, Homo sapiens
  CDR3 for alpha chain variable domain of TCR clone 275667 (TRAV12-2, TRAJ17)
CAVLPKAAGNKLTF

SEQ ID NO: 551334 - protein, 16 aa, Homo sapiens
  CDR3 for beta chain variable domain of TCR clone 275667 (TRBV7-2, TRBJ2-7)
CASSLGLAGGAYEQYF

SEQ ID NO: 551335 - protein, 15 aa, Homo sapiens
  CDR3 for alpha chain variable domain of TCR clone 275668 (TRAV3, TRAJ22)
CAVRDRGGSVRQMTF

SEQ ID NO: 551336 - protein, 16 aa, Homo sapiens
  CDR3 for beta chain variable domain of TCR clone 275668 (TRBV5-4, TRBJ2-3)
CASQQPGAGGADTQYF

SEQ ID NO: 551337 - protein, 12 aa, Homo sapiens
  CDR3 for alpha chain variable domain of TCR clone 275669 (TRAV10, TRAJ43)
CVVVRVGNDMRF

SEQ ID NO: 551338 - protein, 12 aa, Homo sapiens
  CDR3 for beta chain variable domain of TCR clone 275669 (TRBV7-8, TRBJ2-7)
CASSLGDREQYF

SEQ ID NO: 551339 - protein, 11 aa, Homo sapiens
  CDR3 for alpha chain variable domain of TCR clone 275670 (TRAV1-1, TRAJ23)
CAVRQGGKLIF

SEQ ID NO: 551340 - protein, 17 aa, Homo sapiens
  CDR3 for beta chain variable domain of TCR clone 275670 (TRBV20-1, TRBJ2-1)
CSAPPRLAGTRYNEQFF

SEQ ID NO: 551341 - protein, 12 aa, Homo sapiens
  CDR3 for alpha chain variable domain of TCR clone 275671 (TRAV1-2, TRAJ29)
CAVPSGNTPLVF

SEQ ID NO: 551342 - protein, 14 aa, Homo sapiens
  CDR3 for beta chain variable domain of TCR clone 275671 (TRBV7-6, TRBJ2-1)
CAGSLGGGADEQFF

SEQ ID NO: 551343 - protein, 15 aa, Homo sapiens
  CDR3 for alpha chain variable domain of TCR clone 275672 (TRAV38-1, TRAJ57)
CAFMDSQGGSEKLVF

SEQ ID NO: 551344 - protein, 15 aa, Homo sapiens
  CDR3 for beta chain variable domain of TCR clone 275672 (TRBV10-3, TRBJ2-1)
CHPGGRQGGLNEQFF

SEQ ID NO: 551345 - protein, 14 aa, Homo sapiens
  CDR3 for alpha chain variable domain of TCR clone 275673 (TRAV12-1, TRAJ12)
CVVTRMDSSYKLIF

SEQ ID NO: 551346 - protein, 17 aa, Homo sapiens
  CDR3 for beta chain variable domain of TCR clone 275673 (TRBV4-1, TRBJ1-4)
CASSQDGPRGVEEKLFF

SEQ ID NO: 551347 - protein, 22 aa, Homo sapiens
  CDR3 for alpha chain variable domain of TCR clone 275674 (TRAV27, TRAJ38)
CAARRNAGNNHIQNPDPAAYQL

SEQ ID NO: 551348 - protein, 12 aa, Homo sapiens
  CDR3 for beta chain variable domain of TCR clone 275674 (TRBV29-1, TRBJ2-3)
CSVTGGADTQYF

SEQ ID NO: 551349 - protein, 13 aa, Homo sapiens
  CDR3 for alpha chain variable domain of TCR clone 275675 (TRAV38-1, TRAJ42)
CARWGGSQGNLIF

SEQ ID NO: 551350 - protein, 20 aa, Homo sapiens
  CDR3 for beta chain variable domain of TCR clone 275675 (TRBV28, TRBJ2-1)
CASTPIGRSPGLAGGNEQFF

SEQ ID NO: 551351 - protein, 12 aa, Homo sapiens
  CDR3 for alpha chain variable domain of TCR clone 275676 (TRAV2, TRAJ31)
CAVEDNNARLMF

SEQ ID NO: 551352 - protein, 15 aa, Homo sapiens
  CDR3 for beta chain variable domain of TCR clone 275676 (TRBV5-1, TRBJ2-1)
CASSPPRAPYNEQFF

SEQ ID NO: 551353 - protein, 15 aa, Homo sapiens
  CDR3 for alpha chain variable domain of TCR clone 275677 (TRAV34, TRAJ38)
CGADFTPGNNRKRIW

SEQ ID NO: 551354 - protein, 12 aa, Homo sapiens
  CDR3 for beta chain variable domain of TCR clone 275677 (TRBV7-9, TRBJ2-7)
CATRTDAYEQYF

SEQ ID NO: 551355 - protein, 16 aa, Homo sapiens
  CDR3 for alpha chain variable domain of TCR clone 275678 (TRAV12-2, TRAJ45)
CAVNRGSGGGADGLTF

SEQ ID NO: 551356 - protein, 14 aa, Homo sapiens
  CDR3 for beta chain variable domain of TCR clone 275678 (TRBV25-1, TRBJ1-1)
CASTHLGGNTEAFF

SEQ ID NO: 551357 - protein, 16 aa, Homo sapiens
  CDR3 for alpha chain variable domain of TCR clone 275679 (TRAV30, IGKJ4)
CGTEIVDADSWGKFQL

SEQ ID NO: 551358 - protein, 14 aa, Homo sapiens
  CDR3 for beta chain variable domain of TCR clone 275679 (TRBV12-5, TRBJ2-5)
CASGSRTHQETQYF

SEQ ID NO: 551359 - protein, 13 aa, Homo sapiens
  CDR3 for alpha chain variable domain of TCR clone 275680 (TRAV12-1, TRAJ31)
CVVIPNNNARLMF

SEQ ID NO: 551360 - protein, 15 aa, Homo sapiens
  CDR3 for beta chain variable domain of TCR clone 275680 (TRBV19, TRBJ1-2)
CASILGGETPYGYTF

SEQ ID NO: 551361 - protein, 16 aa, Homo sapiens
  CDR3 for alpha chain variable domain of TCR clone 275681 (TRAV12-2, TRAJ10)
CAVNRVLTGGGNKLTF

SEQ ID NO: 551362 - protein, 16 aa, Homo sapiens
  CDR3 for beta chain variable domain of TCR clone 275681 (TRBV13, TRBJ2-2)
CASSPRTGEHTGELFF

SEQ ID NO: 551363 - protein, 16 aa, Homo sapiens
  CDR3 for alpha chain variable domain of TCR clone 275682 (TRAV30, TRAJ24)
CGTEIVDADSWRKFQF

SEQ ID NO: 551364 - protein, 13 aa, Homo sapiens
  CDR3 for beta chain variable domain of TCR clone 275682 (TRBV10-3, TRBJ1-2)
CAISERDSYGYTF

SEQ ID NO: 551365 - protein, 14 aa, Homo sapiens
  CDR3 for alpha chain variable domain of TCR clone 275683 (TRAV17, TRAJ37)
CATDGSSHTGKLIF

SEQ ID NO: 551366 - protein, 13 aa, Homo sapiens
  CDR3 for beta chain variable domain of TCR clone 275683 (TRBV11-2, TRBJ2-1)
CASSLDLVNEQFF

SEQ ID NO: 551367 - protein, 16 aa, Homo sapiens
  CDR3 for alpha chain variable domain of TCR clone 275684 (TRAV8-3, TRAJ8)
CAVPRDGNTGFQKLVF

SEQ ID NO: 551368 - protein, 16 aa, Homo sapiens
  CDR3 for beta chain variable domain of TCR clone 275684 (TRBV12-5, TRBJ2-5)
CASGPRTSGNQETQYF

SEQ ID NO: 551369 - protein, 11 aa, Homo sapiens
  CDR3 for alpha chain variable domain of TCR clone 275685 (TRAV13-1, TRAJ6)
CATLGSYIPTF

SEQ ID NO: 551370 - protein, 13 aa, Homo sapiens
  CDR3 for beta chain variable domain of TCR clone 275685 (TRBV6-6, TRBJ2-1)
CASSLHQGDEQSF

SEQ ID NO: 551371 - protein, 14 aa, Homo sapiens
  CDR3 for alpha chain variable domain of TCR clone 275686 (TRAV14/DV4, TRAJ9)
CAMRESTGGFKTIF

SEQ ID NO: 551372 - protein, 19 aa, Homo sapiens
  CDR3 for beta chain variable domain of TCR clone 275686 (TRBV19, TRBJ2-2)
CASTRPGRAGGRVTGELFF

SEQ ID NO: 551373 - protein, 10 aa, Homo sapiens
  CDR3 for alpha chain variable domain of TCR clone 275687 (TRAV12-3, TRAJ34)
CAMGADKLIF

SEQ ID NO: 551374 - protein, 20 aa, Homo sapiens
  CDR3 for beta chain variable domain of TCR clone 275687 (TRBV28, TRBJ2-1)
CASTPIGRSPGLAGGNEQFF

SEQ ID NO: 551375 - protein, 14 aa, Homo sapiens
  CDR3 for alpha chain variable domain of TCR clone 275688 (TRAV22, TRAJ40)
CAVGRNSGTYKYIF

SEQ ID NO: 551376 - protein, 16 aa, Homo sapiens
  CDR3 for beta chain variable domain of TCR clone 275688 (TRBV7-3, TRBJ2-3)
CASSPRTLPSTDTQYF

SEQ ID NO: 551377 - protein, 17 aa, Homo sapiens
  CDR3 for alpha chain variable domain of TCR clone 275689 (TRAV26-1, TRAJ11)
FIVRVGQSNSGYSTLTF

SEQ ID NO: 551378 - protein, 15 aa, Homo sapiens
  CDR3 for beta chain variable domain of TCR clone 275689 (TRBV27, TRBJ2-5)
CASSLIPSGGETQYF

SEQ ID NO: 551379 - protein, 13 aa, Homo sapiens
  CDR3 for alpha chain variable domain of TCR clone 275690 (TRAV12-1, TRAJ38)
CVVPAGNNRKLIW

SEQ ID NO: 551380 - protein, 13 aa, Homo sapiens
  CDR3 for beta chain variable domain of TCR clone 275690 (TRBV7-3, TRBJ1-1)
CASSQDWGAEAFF

SEQ ID NO: 551381 - protein, 12 aa, Homo sapiens
  CDR3 for alpha chain variable domain of TCR clone 275691 (TRAV12-3, TRAJ17)
CAMTLTGNKLTF

SEQ ID NO: 551382 - protein, 22 aa, Homo sapiens
  CDR3 for beta chain variable domain of TCR clone 275691 (TRBV7-2, TRBJ2-7)
RRTRPCISVPSLKGALTYEQYF

SEQ ID NO: 551383 - protein, 17 aa, Homo sapiens
  CDR3 for alpha chain variable domain of TCR clone 275692 (TRAV12-2, TRAJ22)
CAVNRIPFSGSARQLPF

SEQ ID NO: 551384 - protein, 13 aa, Homo sapiens
  CDR3 for beta chain variable domain of TCR clone 275692 (TRBV11-3, TRBJ1-1)
CASSSNRDTEAFF

SEQ ID NO: 551385 - protein, 16 aa, Homo sapiens
  CDR3 for alpha chain variable domain of TCR clone 275693 (TRAV30, TRAJ24)
CGTEIVDADSWGKFQF

SEQ ID NO: 551386 - protein, 14 aa, Homo sapiens
  CDR3 for beta chain variable domain of TCR clone 275693 (TRBV19, TRBJ2-1)
CARPTFVLSGEQFF

SEQ ID NO: 551387 - protein, 15 aa, Homo sapiens
  CDR3 for alpha chain variable domain of TCR clone 275694 (TRAV8-2, TRAJ17)
CVVSPFKAAGNKLTF

SEQ ID NO: 551388 - protein, 18 aa, Homo sapiens
  CDR3 for beta chain variable domain of TCR clone 275694 (TRBV28, TRBJ2-5)
CASSFPSFGTGGGETQYF

SEQ ID NO: 551389 - protein, 15 aa, Homo sapiens
  CDR3 for alpha chain variable domain of TCR clone 275695 (TRAV23/DV6, TRAJ18)
CSARYRGSTLGRLYF

SEQ ID NO: 551390 - protein, 15 aa, Homo sapiens
  CDR3 for beta chain variable domain of TCR clone 275695 (TRBV20-1, TRBJ2-7)
CSARDRVSGMDEQYF

SEQ ID NO: 551391 - protein, 10 aa, Homo sapiens
  CDR3 for alpha chain variable domain of TCR clone 275696 (TRAV1-2, TRAJ20)
CACNKYKLSF

SEQ ID NO: 551392 - protein, 14 aa, Homo sapiens
  CDR3 for beta chain variable domain of TCR clone 275696 (TRBV20-1, TRBJ1-1)
CSAQTRIGGTEAFF

SEQ ID NO: 551393 - protein, 12 aa, Homo sapiens
  CDR3 for alpha chain variable domain of TCR clone 275697 (TRAV12-3, TRAJ17)
CAMMLTGNELTF

SEQ ID NO: 551394 - protein, 15 aa, Homo sapiens
  CDR3 for beta chain variable domain of TCR clone 275697 (TRBV20-1, TRBJ2-7)
CSARDRVSGMDEQYF

SEQ ID NO: 551395 - protein, 13 aa, Homo sapiens
  CDR3 for alpha chain variable domain of TCR clone 275698 (TRAV13-1, TRAJ53)
QAARGGSNYELTI

SEQ ID NO: 551396 - protein, 15 aa, Homo sapiens
  CDR3 for beta chain variable domain of TCR clone 275698 (TRBV11-3, TRBJ2-3)
CASLKDGREGDTQYF

SEQ ID NO: 551397 - protein, 14 aa, Homo sapiens
  CDR3 for alpha chain variable domain of TCR clone 275699 (TRAV13-1, TRAJ35)
CAASKGGFGNVLHC

SEQ ID NO: 551398 - protein, 16 aa, Homo sapiens
  CDR3 for beta chain variable domain of TCR clone 275699 (TRBV2, TRBJ1-4)
CASNLLKGATNEKLFF

SEQ ID NO: 551399 - protein, 11 aa, Homo sapiens
  CDR3 for alpha chain variable domain of TCR clone 275700 (TRAV3, TRAJ21)
CAVGNFNTFYF

SEQ ID NO: 551400 - protein, 16 aa, Homo sapiens
  CDR3 for beta chain variable domain of TCR clone 275700 (TRBV19, TRBJ2-1)
CASSKAGPSSYNGQFF

SEQ ID NO: 551401 - protein, 14 aa, Homo sapiens
  CDR3 for alpha chain variable domain of TCR clone 275701 (TRAV1-2, TRAJ16)
CAVNRFSYGQKLLF

SEQ ID NO: 551402 - protein, 13 aa, Homo sapiens
  CDR3 for beta chain variable domain of TCR clone 275701 (TRBV14, TRBJ2-7)
CASSQDRRYEQYF

SEQ ID NO: 551403 - protein, 11 aa, Homo sapiens
  CDR3 for alpha chain variable domain of TCR clone 275702 (TRAV21, TRAJ48)
CAVDGNEKLTF

SEQ ID NO: 551404 - protein, 16 aa, Homo sapiens
  CDR3 for beta chain variable domain of TCR clone 275702 (TRBV12-4, TRBJ1-5)
CASSSGPRGRNQPQHF

SEQ ID NO: 551405 - protein, 13 aa, Homo sapiens
  CDR3 for alpha chain variable domain of TCR clone 275703 (TRAV21, TRAJ47)
CAVSGLYGNKLVL

SEQ ID NO: 551406 - protein, 17 aa, Homo sapiens
  CDR3 for beta chain variable domain of TCR clone 275703 (TRBV15, TRBJ2-3)
CAASGTTSEEGTDTQYF

SEQ ID NO: 551407 - protein, 14 aa, Homo sapiens
  CDR3 for alpha chain variable domain of TCR clone 275704 (TRAV23/DV6, TRAJ53)
CAARSGGSNYRLTF

SEQ ID NO: 551408 - protein, 14 aa, Homo sapiens
  CDR3 for beta chain variable domain of TCR clone 275704 (TRBV27, TRBJ1-1)
CASSPQGKRAEAFF

SEQ ID NO: 551409 - protein, 14 aa, Homo sapiens
  CDR3 for alpha chain variable domain of TCR clone 275705 (TRAV16, TRAJ33)
CALSAMDSNYQLIW

SEQ ID NO: 551410 - protein, 14 aa, Homo sapiens
  CDR3 for beta chain variable domain of TCR clone 275705 (TRBV12-5, TRBJ2-5)
CASGSRTHQENQYF

SEQ ID NO: 551411 - protein, 14 aa, Homo sapiens
  CDR3 for alpha chain variable domain of TCR clone 275706 (TRAV17, TRAJ34)
CATDSLEGTDKLIF

SEQ ID NO: 551412 - protein, 13 aa, Homo sapiens
  CDR3 for beta chain variable domain of TCR clone 275706 (TRBV11-2, TRBJ2-7)
CASSGTGPYEQYF

SEQ ID NO: 551413 - protein, 19 aa, Homo sapiens
  CDR3 for alpha chain variable domain of TCR clone 275707 (TRAV1-1, TRAJ37)
CAVPSSGRYGSGNTGKLIF

SEQ ID NO: 551414 - protein, 14 aa, Homo sapiens
  CDR3 for beta chain variable domain of TCR clone 275707 (TRBV12-4, TRBJ1-1)
CASSLGTGGTEAFF

SEQ ID NO: 551415 - protein, 11 aa, Homo sapiens
  CDR3 for alpha chain variable domain of TCR clone 275708 (TRAV13-1, TRAJ49)
CACVGGNQFYF

SEQ ID NO: 551416 - protein, 16 aa, Homo sapiens
  CDR3 for beta chain variable domain of TCR clone 275708 (TRBV11-2, TRBJ2-2)
CASSLRTGNLIGELVF

SEQ ID NO: 551417 - protein, 15 aa, Homo sapiens
  CDR3 for alpha chain variable domain of TCR clone 275709 (TRAV12-2, TRAJ5)
CAVNGKDTGRRALTF

SEQ ID NO: 551418 - protein, 17 aa, Homo sapiens
  CDR3 for beta chain variable domain of TCR clone 275709 (TRBV7-8, TRBJ1-5)
CASSRRDRAPLGQPQHF

SEQ ID NO: 551419 - protein, 13 aa, Homo sapiens
  CDR3 for alpha chain variable domain of TCR clone 275710 (TRAV20, TRAJ54)
CALTFEGAQKLVF

SEQ ID NO: 551420 - protein, 13 aa, Homo sapiens
  CDR3 for beta chain variable domain of TCR clone 275710 (TRBV2, TRBJ2-7)
CASSVGGSGEQYF

SEQ ID NO: 551421 - protein, 11 aa, Homo sapiens
  CDR3 for alpha chain variable domain of TCR clone 275711 (TRAV21, TRAJ33)
CAVLSNYQLIW

SEQ ID NO: 551422 - protein, 15 aa, Homo sapiens
  CDR3 for beta chain variable domain of TCR clone 275711 (TRBV11-2, TRBJ2-7)
CASSLMGGGSYEQYF

SEQ ID NO: 551423 - protein, 16 aa, Homo sapiens
  CDR3 for alpha chain variable domain of TCR clone 275712 (TRAV27, TRAJ53)
CAAPEGSGGSNSKLTF

SEQ ID NO: 551424 - protein, 14 aa, Homo sapiens
  CDR3 for beta chain variable domain of TCR clone 275712 (TRBV4-3, TRBJ1-5)
CASSQGGQGWPQHF

SEQ ID NO: 551425 - protein, 12 aa, Homo sapiens
  CDR3 for alpha chain variable domain of TCR clone 275713 (TRAV21, TRAJ39)
CAADNAGNMLTF

SEQ ID NO: 551426 - protein, 12 aa, Homo sapiens
  CDR3 for beta chain variable domain of TCR clone 275713 (TRBV5-4, TRBJ2-7)
CASSRAGQGENF

SEQ ID NO: 551427 - protein, 17 aa, Homo sapiens
  CDR3 for alpha chain variable domain of TCR clone 275714 (TRAV2, TRAJ36)
CAVEDRGNWGKQPLLWV

SEQ ID NO: 551428 - protein, 14 aa, Homo sapiens
  CDR3 for beta chain variable domain of TCR clone 275714 (TRBV7-9, TRBJ2-5)
CASSLDTAQETQYF

SEQ ID NO: 551429 - protein, 17 aa, Homo sapiens
  CDR3 for alpha chain variable domain of TCR clone 275715 (TRAV3, TRAJ6)
CAVRDGPRAGGSYIPTL

SEQ ID NO: 551430 - protein, 16 aa, Homo sapiens
  CDR3 for beta chain variable domain of TCR clone 275715 (TRBV6-1, TRBJ1-3)
CTSVQGGVETPYILER

SEQ ID NO: 551431 - protein, 10 aa, Homo sapiens
  CDR3 for alpha chain variable domain of TCR clone 275716 (TRAV12-3, TRAJ49)
CAMNDDQFYF

SEQ ID NO: 551432 - protein, 13 aa, Homo sapiens
  CDR3 for beta chain variable domain of TCR clone 275716 (TRBV12-4, TRBJ1-2)
CASSLRQGKGYTF

SEQ ID NO: 551433 - protein, 14 aa, Homo sapiens
  CDR3 for alpha chain variable domain of TCR clone 275717 (TRAV3, TRAJ17)
CAVRDAAAGNKLTF

SEQ ID NO: 551434 - protein, 15 aa, Homo sapiens
  CDR3 for beta chain variable domain of TCR clone 275717 (TRBV4-1, TRBJ1-4)
CASSDTGGTNEKLFV

SEQ ID NO: 551435 - protein, 11 aa, Homo sapiens
  CDR3 for alpha chain variable domain of TCR clone 275718 (TRAV25, TRAJ31)
CRVNNNARLMF

SEQ ID NO: 551436 - protein, 13 aa, Homo sapiens
  CDR3 for beta chain variable domain of TCR clone 275718 (TRBV4-2, TRBJ1-1)
CASSQAGNTEAFF

SEQ ID NO: 551437 - protein, 16 aa, Homo sapiens
  CDR3 for alpha chain variable domain of TCR clone 275719 (TRAV12-2, TRAJ45)
CAMIFLSGGGADGLTS

SEQ ID NO: 551438 - protein, 19 aa, Homo sapiens
  CDR3 for beta chain variable domain of TCR clone 275719 (TRBV28, TRBJ2-4)
CASSFQPGGPAHSKNIQYF

SEQ ID NO: 551439 - protein, 14 aa, Homo sapiens
  CDR3 for alpha chain variable domain of TCR clone 275720 (TRAV12-2, TRAJ17)
CAVLFKAAGNKLTF

SEQ ID NO: 551440 - protein, 14 aa, Homo sapiens
  CDR3 for beta chain variable domain of TCR clone 275720 (TRBV2, TRBJ2-5)
CASKKATGLETQYF

SEQ ID NO: 551441 - protein, 14 aa, Homo sapiens
  CDR3 for alpha chain variable domain of TCR clone 275721 (TRAV1-2, TRAJ16)
RAVNRFSDGQKLLF

SEQ ID NO: 551442 - protein, 15 aa, Homo sapiens
  CDR3 for beta chain variable domain of TCR clone 275721 (TRBV20-1, TRBJ2-7)
CSARDRVSGMDEQYF

SEQ ID NO: 551443 - protein, 14 aa, Homo sapiens
  CDR3 for alpha chain variable domain of TCR clone 275722 (TRAV1-2, TRAJ8)
CAVREDTGFQKLVF

SEQ ID NO: 551444 - protein, 16 aa, Homo sapiens
  CDR3 for beta chain variable domain of TCR clone 275722 (TRBV7-3, TRBJ2-2)
CASSLKRGTLSGELVF

SEQ ID NO: 551445 - protein, 11 aa, Homo sapiens
  CDR3 for alpha chain variable domain of TCR clone 275723 (TRAV13-1, TRAJ43)
CAASMSNDMRF

SEQ ID NO: 551446 - protein, 12 aa, Homo sapiens
  CDR3 for beta chain variable domain of TCR clone 275723 (TRBV29-1, TRBJ2-3)
CSVTGGADTQYF

SEQ ID NO: 551447 - protein, 13 aa, Homo sapiens
  CDR3 for alpha chain variable domain of TCR clone 275724 (TRAV21, TRAJ27)
CAARPGNAGKSTF

SEQ ID NO: 551448 - protein, 12 aa, Homo sapiens
  CDR3 for beta chain variable domain of TCR clone 275724 (TRBV6-3, TRBJ2-7)
CATSLTPYEQYF

SEQ ID NO: 551449 - protein, 14 aa, Homo sapiens
  CDR3 for alpha chain variable domain of TCR clone 275725 (TRAV12-2, TRAJ45)
CAVNIGGGAAGLTF

SEQ ID NO: 551450 - protein, 17 aa, Homo sapiens
  CDR3 for beta chain variable domain of TCR clone 275725 (TRBV7-8, TRBJ2-6)
CASSAGTGGAGANVLTF

SEQ ID NO: 551451 - protein, 15 aa, Homo sapiens
  CDR3 for alpha chain variable domain of TCR clone 275726 (TRAV14/DV4, TRAJ46)
CAMREKQSSGDKLTF

SEQ ID NO: 551452 - protein, 13 aa, Homo sapiens
  CDR3 for beta chain variable domain of TCR clone 275726 (TRBV20-1, TRBJ2-5)
CSAREAFQETQYF

SEQ ID NO: 551453 - protein, 14 aa, Homo sapiens
  CDR3 for alpha chain variable domain of TCR clone 275727 (TRAV21, TRAJ35)
CAVMPIGFGNVLHC

SEQ ID NO: 551454 - protein, 13 aa, Homo sapiens
  CDR3 for beta chain variable domain of TCR clone 275727 (TRBV27, TRBJ1-1)
CASSLSIGAEAFF

SEQ ID NO: 551455 - protein, 14 aa, Homo sapiens
  CDR3 for alpha chain variable domain of TCR clone 275728 (TRAV8-2, TRAJ4)
CVVSPSGGYNKLIF

SEQ ID NO: 551456 - protein, 15 aa, Homo sapiens
  CDR3 for beta chain variable domain of TCR clone 275728 (TRBV6-6, TRBJ2-7)
CAGSYSYGGSYEQYF

SEQ ID NO: 551457 - protein, 12 aa, Homo sapiens
  CDR3 for alpha chain variable domain of TCR clone 275729 (TRAV4, TRAJ5)
RTMDTGRRALTF

SEQ ID NO: 551458 - protein, 17 aa, Homo sapiens
  CDR3 for beta chain variable domain of TCR clone 275729 (TRBV11-2, TRBJ2-1)
CAGSLYPPGVEYNEQFF

SEQ ID NO: 551459 - protein, 12 aa, Homo sapiens
  CDR3 for alpha chain variable domain of TCR clone 275730 (TRAV12-3, TRAJ17)
CAMTLTCNKLTF

SEQ ID NO: 551460 - protein, 15 aa, Homo sapiens
  CDR3 for beta chain variable domain of TCR clone 275730 (TRBV20-1, TRBJ2-7)
CSARDRVAGMDEQYF

SEQ ID NO: 551461 - protein, 17 aa, Homo sapiens
  CDR3 for alpha chain variable domain of TCR clone 275731 (TRAV26-1, TRAJ53)
CIVRVDDSGGSNYKQTF

SEQ ID NO: 551462 - protein, 15 aa, Homo sapiens
  CDR3 for beta chain variable domain of TCR clone 275731 (TRBV20-1, TRBJ2-7)
CSARVPAAYFYEQYF

SEQ ID NO: 551463 - protein, 14 aa, Homo sapiens
  CDR3 for alpha chain variable domain of TCR clone 275732 (TRAV1-2, TRAJ8)
CAVREDTGFQQLVF

SEQ ID NO: 551464 - protein, 17 aa, Homo sapiens
  CDR3 for beta chain variable domain of TCR clone 275732 (TRBV11-3, TRBJ2-3)
CASSPGSSGGRTDTQYF

SEQ ID NO: 551465 - protein, 17 aa, Homo sapiens
  CDR3 for alpha chain variable domain of TCR clone 275733 (TRAV3, TRAJ6)
CAVRDGPRAGGSYIPTF

SEQ ID NO: 551466 - protein, 15 aa, Homo sapiens
  CDR3 for beta chain variable domain of TCR clone 275733 (TRBV7-9, TRBJ1-4)
CASSARTGGNEKLFF

SEQ ID NO: 551467 - protein, 16 aa, Homo sapiens
  CDR3 for alpha chain variable domain of TCR clone 275734 (TRAV8-3, TRAJ44)
CAVGASNTGTASKLTF

SEQ ID NO: 551468 - protein, 12 aa, Homo sapiens
  CDR3 for beta chain variable domain of TCR clone 275734 (TRBV7-9, TRBJ1-4)
CASSTDREKLFF

SEQ ID NO: 551469 - protein, 12 aa, Homo sapiens
  CDR3 for alpha chain variable domain of TCR clone 275735 (TRAV25, TRAJ29)
CAGHSGNTPLVL

SEQ ID NO: 551470 - protein, 14 aa, Homo sapiens
  CDR3 for beta chain variable domain of TCR clone 275735 (TRBV6-1, TRBJ2-7)
CASTRTGDYYEQYF

SEQ ID NO: 551471 - protein, 13 aa, Homo sapiens
  CDR3 for alpha chain variable domain of TCR clone 275736 (TRAV3, TRAJ21)
CAVREPDSNKFYF

SEQ ID NO: 551472 - protein, 15 aa, Homo sapiens
  CDR3 for beta chain variable domain of TCR clone 275736 (TRBV2, TRBJ2-1)
CASSELAGGYNEQFF

SEQ ID NO: 551473 - protein, 14 aa, Homo sapiens
  CDR3 for alpha chain variable domain of TCR clone 275737 (TRAV22, TRAJ57)
CAVELQGGSEKLVF

SEQ ID NO: 551474 - protein, 13 aa, Homo sapiens
  CDR3 for beta chain variable domain of TCR clone 275737 (TRBV7-3, TRBJ1-1)
CASSQDWGAEAFF

SEQ ID NO: 551475 - protein, 15 aa, Homo sapiens
  CDR3 for alpha chain variable domain of TCR clone 275738 (TRAV17, TRAJ57)
CATGPSQGGSEKLVF

SEQ ID NO: 551476 - protein, 16 aa, Homo sapiens
  CDR3 for beta chain variable domain of TCR clone 275738 (TRBV19, TRBJ2-2)
CASSPSGGLNTGELFF

SEQ ID NO: 551477 - protein, 13 aa, Homo sapiens
  CDR3 for alpha chain variable domain of TCR clone 275739 (TRAV3, TRAJ8)
CAVRFTGFQKLVF

SEQ ID NO: 551478 - protein, 12 aa, Homo sapiens
  CDR3 for beta chain variable domain of TCR clone 275739 (TRBV2, TRBJ1-2)
CASSGRTYGYTF

SEQ ID NO: 551479 - protein, 18 aa, Homo sapiens
  CDR3 for alpha chain variable domain of TCR clone 275740 (TRAV40, TRAJ42)
SSGRRLLNYGGSQGNLIF

SEQ ID NO: 551480 - protein, 15 aa, Homo sapiens
  CDR3 for beta chain variable domain of TCR clone 275740 (TRBV11-3, TRBJ2-7)
CASSPGPASSYEQYF

SEQ ID NO: 551481 - protein, 17 aa, Homo sapiens
  CDR3 for alpha chain variable domain of TCR clone 275741 (TRAV38-2/DV8, TRAJ48)
CAYMSVFRGLVNEKLTF

SEQ ID NO: 551482 - protein, 15 aa, Homo sapiens
  CDR3 for beta chain variable domain of TCR clone 275741 (TRBV5-1, TRBJ2-5)
CASSRLGTVQETQYF

SEQ ID NO: 551483 - protein, 14 aa, Homo sapiens
  CDR3 for alpha chain variable domain of TCR clone 275742 (TRAV12-3, TRAJ42)
CAMNYGGTQGNLIF

SEQ ID NO: 551484 - protein, 15 aa, Homo sapiens
  CDR3 for beta chain variable domain of TCR clone 275742 (TRBV5-7, TRBJ1-5)
CASSYGKLWDQPQHF

SEQ ID NO: 551485 - protein, 12 aa, Homo sapiens
  CDR3 for alpha chain variable domain of TCR clone 275743 (TRAV27, TRAJ13)
CAGAGGYQKVTF

SEQ ID NO: 551486 - protein, 15 aa, Homo sapiens
  CDR3 for beta chain variable domain of TCR clone 275743 (TRBV20-1, TRBJ2-6)
GSARDRGPGANVLTF

SEQ ID NO: 551487 - protein, 13 aa, Homo sapiens
  CDR3 for alpha chain variable domain of TCR clone 275744 (TRAV12-1, TRAJ29)
CVVVVSGNTPLVF

SEQ ID NO: 551488 - protein, 14 aa, Homo sapiens
  CDR3 for beta chain variable domain of TCR clone 275744 (TRBV18, TRBJ2-3)
CASSLGGGSDTQYF

SEQ ID NO: 551489 - protein, 13 aa, Homo sapiens
  CDR3 for alpha chain variable domain of TCR clone 275745 (TRAV27, TRAJ45)
CGSSGGGADGLTF

SEQ ID NO: 551490 - protein, 15 aa, Homo sapiens
  CDR3 for beta chain variable domain of TCR clone 275745 (TRBV12-4, TRBJ2-5)
CASSPPTGLQETQYF

SEQ ID NO: 551491 - protein, 15 aa, Homo sapiens
  CDR3 for alpha chain variable domain of TCR clone 275746 (TRAV21, TRAJ52)
CCDKCFGTSYGKLTF

SEQ ID NO: 551492 - protein, 14 aa, Homo sapiens
  CDR3 for beta chain variable domain of TCR clone 275746 (TRBV6-1, TRBJ1-3)
CASVQGGGGNTIYF

SEQ ID NO: 551493 - protein, 13 aa, Homo sapiens
  CDR3 for alpha chain variable domain of TCR clone 275747 (TRAV8-1, TRAJ30)
CAVIMNIDDKIIF

SEQ ID NO: 551494 - protein, 14 aa, Homo sapiens
  CDR3 for beta chain variable domain of TCR clone 275747 (TRBV7-2, TRBJ1-6)
CASSLQGANSPLHV

SEQ ID NO: 551495 - protein, 12 aa, Homo sapiens
  CDR3 for alpha chain variable domain of TCR clone 275748 (TRAV12-1, TRAJ39)
CVVREAGNMLTF

SEQ ID NO: 551496 - protein, 15 aa, Homo sapiens
  CDR3 for beta chain variable domain of TCR clone 275748 (TRBV5-1, TRBJ2-2)
CASSWRQGDTGELFF

SEQ ID NO: 551497 - protein, 12 aa, Homo sapiens
  CDR3 for alpha chain variable domain of TCR clone 275749 (TRAV12-3, TRAJ17)
CAMTLTGNKLTF

SEQ ID NO: 551498 - protein, 15 aa, Homo sapiens
  CDR3 for beta chain variable domain of TCR clone 275749 (TRBV19, TRBJ2-7)
CASSIRQGARYEQYF

SEQ ID NO: 551499 - protein, 15 aa, Homo sapiens
  CDR3 for alpha chain variable domain of TCR clone 275750 (TRAV27, TRAJ38)
CAARRNAGNNRKLIW

SEQ ID NO: 551500 - protein, 16 aa, Homo sapiens
  CDR3 for beta chain variable domain of TCR clone 275750 (TRBV7-9, TRBJ2-1)
CASSDVAGGSYNEQFF

SEQ ID NO: 551501 - protein, 13 aa, Homo sapiens
  CDR3 for alpha chain variable domain of TCR clone 275751 (TRAV2, TRAJ40)
CAVVTSGTYKYLF

SEQ ID NO: 551502 - protein, 15 aa, Homo sapiens
  CDR3 for beta chain variable domain of TCR clone 275751 (TRBV18, TRBJ1-1)
CASSPRQGENTEAFF

SEQ ID NO: 551503 - protein, 11 aa, Homo sapiens
  CDR3 for alpha chain variable domain of TCR clone 275752 (TRAV21, TRAJ34)
CAVINTDKLIF

SEQ ID NO: 551504 - protein, 16 aa, Homo sapiens
  CDR3 for beta chain variable domain of TCR clone 275752 (TRBV12-4, TRBJ2-7)
CASSLIGGTGTYEQYF

SEQ ID NO: 551505 - protein, 14 aa, Homo sapiens
  CDR3 for alpha chain variable domain of TCR clone 275753 (TRAV2, TRAJ37)
CAVDFTSNTGKLIF

SEQ ID NO: 551506 - protein, 16 aa, Homo sapiens
  CDR3 for beta chain variable domain of TCR clone 275753 (TRBV13, TRBJ2-2)
CASSPRTGEHTVELFF

SEQ ID NO: 551507 - protein, 13 aa, Homo sapiens
  CDR3 for alpha chain variable domain of TCR clone 275754 (TRAV27, TRAJ29)
CAGAHSGNAPLVF

SEQ ID NO: 551508 - protein, 14 aa, Homo sapiens
  CDR3 for beta chain variable domain of TCR clone 275754 (TRBV7-9, TRBJ2-7)
CASSIGQGAGEQYF

SEQ ID NO: 551509 - protein, 12 aa, Homo sapiens
  CDR3 for alpha chain variable domain of TCR clone 275755 (TRAV29/DV5, TRAJ34)
CSARHNTDKLIF

SEQ ID NO: 551510 - protein, 15 aa, Homo sapiens
  CDR3 for beta chain variable domain of TCR clone 275755 (TRBV19, TRBJ2-7)
CASSPAGSGDALRYF

SEQ ID NO: 551511 - protein, 14 aa, Homo sapiens
  CDR3 for alpha chain variable domain of TCR clone 275756 (TRAV12-3, TRAJ10)
SHLPLTGGGNKLTF

SEQ ID NO: 551512 - protein, 16 aa, Homo sapiens
  CDR3 for beta chain variable domain of TCR clone 275756 (TRBV6-6, TRBJ2-7)
CASRASGRARSYEQYF

SEQ ID NO: 551513 - protein, 12 aa, Homo sapiens
  CDR3 for alpha chain variable domain of TCR clone 275757 (TRAV12-2, TRAJ16)
CAVNLDGQTLLF

SEQ ID NO: 551514 - protein, 12 aa, Homo sapiens
  CDR3 for beta chain variable domain of TCR clone 275757 (TRBV5-7, TRBJ2-7)
CASSIQGGEHYF

SEQ ID NO: 551515 - protein, 14 aa, Homo sapiens
  CDR3 for alpha chain variable domain of TCR clone 275758 (TRAV17, TRAJ12)
CAILPMDSSYKLIF

SEQ ID NO: 551516 - protein, 15 aa, Homo sapiens
  CDR3 for beta chain variable domain of TCR clone 275758 (TRBV11-3, TRBJ2-3)
CASLKDGREGDTQYF

SEQ ID NO: 551517 - protein, 12 aa, Homo sapiens
  CDR3 for alpha chain variable domain of TCR clone 275759 (TRAV1-2, TRAJ7)
CAVAYGSNRLAF

SEQ ID NO: 551518 - protein, 16 aa, Homo sapiens
  CDR3 for beta chain variable domain of TCR clone 275759 (TRBV5-1, TRBJ2-7)
CASSPMTGALSYEQYF

SEQ ID NO: 551519 - protein, 16 aa, Homo sapiens
  CDR3 for alpha chain variable domain of TCR clone 275760 (TRAV8-3, TRAJ44)
CAVGTFMTGTAIKLTF

SEQ ID NO: 551520 - protein, 15 aa, Homo sapiens
  CDR3 for beta chain variable domain of TCR clone 275760 (TRBV10-2, TRBJ2-6)
CASSEQGTGANVLTF

SEQ ID NO: 551521 - protein, 14 aa, Homo sapiens
  CDR3 for alpha chain variable domain of TCR clone 275761 (TRAV12-2, TRAJ53)
CAVKGGGSNYKLTF

SEQ ID NO: 551522 - protein, 15 aa, Homo sapiens
  CDR3 for beta chain variable domain of TCR clone 275761 (TRBV11-2, TRBJ2-2)
CASILDTGNTGELFF

SEQ ID NO: 551523 - protein, 13 aa, Homo sapiens
  CDR3 for alpha chain variable domain of TCR clone 275762 (TRAV8-3, TRAJ36)
CAVGATGANNLFF

SEQ ID NO: 551524 - protein, 15 aa, Homo sapiens
  CDR3 for beta chain variable domain of TCR clone 275762 (TRBV7-2, TRBJ1-2)
CASSPRAGWYYGYTF

SEQ ID NO: 551525 - protein, 15 aa, Homo sapiens
  CDR3 for alpha chain variable domain of TCR clone 275763 (TRAV14/DV4, TRAJ33)
RAMREGRDSNYQLIW

SEQ ID NO: 551526 - protein, 15 aa, Homo sapiens
  CDR3 for beta chain variable domain of TCR clone 275763 (TRBV5-5, TRBJ1-5)
CASSSTPGSNQPQHF

SEQ ID NO: 551527 - protein, 14 aa, Homo sapiens
  CDR3 for alpha chain variable domain of TCR clone 275764 (TRAV13-2, TRAJ49)
CAEILSNTGNQFYF

SEQ ID NO: 551528 - protein, 15 aa, Homo sapiens
  CDR3 for beta chain variable domain of TCR clone 275764 (TRBV7-2, TRBJ2-7)
CASSLSSGRTYEQYF

SEQ ID NO: 551529 - protein, 14 aa, Homo sapiens
  CDR3 for alpha chain variable domain of TCR clone 275765 (TRAV12-2, TRAJ13)
CAVKKTGGYQKVNF

SEQ ID NO: 551530 - protein, 13 aa, Homo sapiens
  CDR3 for beta chain variable domain of TCR clone 275765 (TRBV7-9, TRBJ2-3)
CASSPGSTDTQYF

SEQ ID NO: 551531 - protein, 14 aa, Homo sapiens
  CDR3 for alpha chain variable domain of TCR clone 275766 (TRAV20, TRAJ29)
CDVQAWVGNTPLVF

SEQ ID NO: 551532 - protein, 15 aa, Homo sapiens
  CDR3 for beta chain variable domain of TCR clone 275766 (TRBV29-1, TRBJ2-7)
CSVEFFDRGSYEQYF

SEQ ID NO: 551533 - protein, 14 aa, Homo sapiens
  CDR3 for alpha chain variable domain of TCR clone 275767 (TRAV17, TRAJ57)
CATDPQGGSEKLVF

SEQ ID NO: 551534 - protein, 15 aa, Homo sapiens
  CDR3 for beta chain variable domain of TCR clone 275767 (TRBV6-5, TRBJ2-1)
CASSYDAGAGNEQFF

SEQ ID NO: 551535 - protein, 17 aa, Homo sapiens
  CDR3 for alpha chain variable domain of TCR clone 275768 (TRAV2, TRAJ22)
ILQVREADAAEQRRLTF

SEQ ID NO: 551536 - protein, 16 aa, Homo sapiens
  CDR3 for beta chain variable domain of TCR clone 275768 (TRBV2, TRBJ2-5)
CASSETQGVGEETQYV

SEQ ID NO: 551537 - protein, 20 aa, Homo sapiens
  CDR3 for alpha chain variable domain of TCR clone 275769 (TRAV8-1, TRAJ26)
CAVNNYGQNFVLVPEPDCPF

SEQ ID NO: 551538 - protein, 12 aa, Homo sapiens
  CDR3 for beta chain variable domain of TCR clone 275769 (TRBV5-5, TRBJ2-5)
CASSYFGETQYF

SEQ ID NO: 551539 - protein, 15 aa, Homo sapiens
  CDR3 for alpha chain variable domain of TCR clone 275770 (TRAV21, TRAJ24)
CAARSSTDIWGKLQF

SEQ ID NO: 551540 - protein, 13 aa, Homo sapiens
  CDR3 for beta chain variable domain of TCR clone 275770 (TRBV11-2, TRBJ2-5)
CASSSTGEETQYF

SEQ ID NO: 551541 - protein, 14 aa, Homo sapiens
  CDR3 for alpha chain variable domain of TCR clone 275771 (TRAV8-3, TRAJ13)
CAVGAQEGYQTVTF

SEQ ID NO: 551542 - protein, 13 aa, Homo sapiens
  CDR3 for beta chain variable domain of TCR clone 275771 (TRBV11-2, TRBJ2-5)
CASSSTGEETQYF

SEQ ID NO: 551543 - protein, 19 aa, Homo sapiens
  CDR3 for alpha chain variable domain of TCR clone 275772 (TRAV2, TRAJ26)
CAVVGLWSEFCLCSRNQIV

SEQ ID NO: 551544 - protein, 15 aa, Homo sapiens
  CDR3 for beta chain variable domain of TCR clone 275772 (TRBV11-2, TRBJ2-1)
CASSLGTSGLNEQFF

SEQ ID NO: 551545 - protein, 13 aa, Homo sapiens
  CDR3 for alpha chain variable domain of TCR clone 275773 (TRAV12-1, TRAJ31)
CVVNDNNNARLMF

SEQ ID NO: 551546 - protein, 14 aa, Homo sapiens
  CDR3 for beta chain variable domain of TCR clone 275773 (TRBV27, TRBJ2-5)
CASSWREGLETQYF

SEQ ID NO: 551547 - protein, 12 aa, Homo sapiens
  CDR3 for alpha chain variable domain of TCR clone 275774 (TRAV16, TRAJ10)
CSRTGGGNKLTF

SEQ ID NO: 551548 - protein, 15 aa, Homo sapiens
  CDR3 for beta chain variable domain of TCR clone 275774 (TRBV5-1, TRBJ1-5)
CASSLSGNSNQPQHF

SEQ ID NO: 551549 - protein, 21 aa, Homo sapiens
  CDR3 for alpha chain variable domain of TCR clone 275775 (TRAV25, TRAJ53)
TATQTTDVGTGSGGSNYKLTF

SEQ ID NO: 551550 - protein, 16 aa, Homo sapiens
  CDR3 for beta chain variable domain of TCR clone 275775 (TRBV4-2, TRBJ2-3)
SASSLSSGGHTDTQYF

SEQ ID NO: 551551 - protein, 15 aa, Homo sapiens
  CDR3 for alpha chain variable domain of TCR clone 275776 (TRAV14/DV4, TRAJ12)
CAMREERDSSYKLIF

SEQ ID NO: 551552 - protein, 16 aa, Homo sapiens
  CDR3 for beta chain variable domain of TCR clone 275776 (TRBV28, TRBJ2-7)
CASSPWVATGDLSQYF

SEQ ID NO: 551553 - protein, 15 aa, Homo sapiens
  CDR3 for alpha chain variable domain of TCR clone 275777 (TRAV12-3, TRAJ10)
CASYILTGGGNKLTS

SEQ ID NO: 551554 - protein, 15 aa, Homo sapiens
  CDR3 for beta chain variable domain of TCR clone 275777 (TRBV7-2, TRBJ1-6)
CASSLGPDRGMPLHF

SEQ ID NO: 551555 - protein, 16 aa, Homo sapiens
  CDR3 for alpha chain variable domain of TCR clone 275778 (TRAV3, TRAJ10)
CAVRDMRAGGGNTLTF

SEQ ID NO: 551556 - protein, 17 aa, Homo sapiens
  CDR3 for beta chain variable domain of TCR clone 275778 (TRBV20-1, TRBJ2-2)
CSASGSGQGGVTGELFF

SEQ ID NO: 551557 - protein, 12 aa, Homo sapiens
  CDR3 for alpha chain variable domain of TCR clone 275779 (TRAV13-1, TRAJ11)
CAGPSGHSTLTF

SEQ ID NO: 551558 - protein, 13 aa, Homo sapiens
  CDR3 for beta chain variable domain of TCR clone 275779 (TRBV12-4, TRBJ1-5)
CASSPDRAQPQHF

SEQ ID NO: 551559 - protein, 12 aa, Homo sapiens
  CDR3 for alpha chain variable domain of TCR clone 275780 (TRAV13-2, TRAJ23)
CAERHRGGKLIF

SEQ ID NO: 551560 - protein, 19 aa, Homo sapiens
  CDR3 for beta chain variable domain of TCR clone 275780 (TRBV19, TRBJ2-5)
CASIIGQVTDFFLGETQYF

SEQ ID NO: 551561 - protein, 13 aa, Homo sapiens
  CDR3 for alpha chain variable domain of TCR clone 275781 (TRAV13-1, TRAJ21)
CAASIYNFNKFYF

SEQ ID NO: 551562 - protein, 12 aa, Homo sapiens
  CDR3 for beta chain variable domain of TCR clone 275781 (TRBV12-5, TRBJ2-3)
CASGGAADTQYF

SEQ ID NO: 551563 - protein, 18 aa, Homo sapiens
  CDR3 for alpha chain variable domain of TCR clone 275782 (TRAV21, TRAJ52)
CAVRPSPAGGTSYGRLTF

SEQ ID NO: 551564 - protein, 17 aa, Homo sapiens
  CDR3 for beta chain variable domain of TCR clone 275782 (TRBV13, TRBJ2-3)
CASSRSRVAGGRNTQYF

SEQ ID NO: 551565 - protein, 17 aa, Homo sapiens
  CDR3 for alpha chain variable domain of TCR clone 275783 (TRAV3, TRAJ12)
CAVRDGGRMDSSYKLLF

SEQ ID NO: 551566 - protein, 14 aa, Homo sapiens
  CDR3 for beta chain variable domain of TCR clone 275783 (TRBV7-9, TRBJ1-2)
CASSRQGANYGYTF

SEQ ID NO: 551567 - protein, 11 aa, Homo sapiens
  CDR3 for alpha chain variable domain of TCR clone 275784 (TRAV3, TRAJ21)
CAVGNFNKFYF

SEQ ID NO: 551568 - protein, 13 aa, Homo sapiens
  CDR3 for beta chain variable domain of TCR clone 275784 (TRBV19, TRBJ1-5)
CASSIGGNQPQHF

SEQ ID NO: 551569 - protein, 14 aa, Homo sapiens
  CDR3 for alpha chain variable domain of TCR clone 275785 (TRAV20, TRAJ17)
CAVQASAAGNKLTF

SEQ ID NO: 551570 - protein, 13 aa, Homo sapiens
  CDR3 for beta chain variable domain of TCR clone 275785 (TRBV19, TRBJ1-2)
CASSPTLNYGYTF

SEQ ID NO: 551571 - protein, 14 aa, Homo sapiens
  CDR3 for alpha chain variable domain of TCR clone 275786 (TRAV1-2, TRAJ16)
CAVNRFSDGQKLLF

SEQ ID NO: 551572 - protein, 14 aa, Homo sapiens
  CDR3 for beta chain variable domain of TCR clone 275786 (TRBV11-2, TRBJ2-3)
CGSSRLARTDTQYF

SEQ ID NO: 551573 - protein, 18 aa, Homo sapiens
  CDR3 for alpha chain variable domain of TCR clone 275787 (TRAV12-3, TRAJ52)
CAMSRTNAGGTSSGKLAF

SEQ ID NO: 551574 - protein, 17 aa, Homo sapiens
  CDR3 for beta chain variable domain of TCR clone 275787 (TRBV7-3, TRBJ2-3)
CASSLMKRMRGADTQYF

SEQ ID NO: 551575 - protein, 12 aa, Homo sapiens
  CDR3 for alpha chain variable domain of TCR clone 275788 (TRAV13-1, TRAJ9)
CASHTGGFKTIF

SEQ ID NO: 551576 - protein, 13 aa, Homo sapiens
  CDR3 for beta chain variable domain of TCR clone 275788 (TRBV12-4, TRBJ1-2)
CAISSGSKDGYTF

SEQ ID NO: 551577 - protein, 13 aa, Homo sapiens
  CDR3 for alpha chain variable domain of TCR clone 275789 (TRAV21, TRAJ27)
CAALNTNAGKSTF

SEQ ID NO: 551578 - protein, 11 aa, Homo sapiens
  CDR3 for beta chain variable domain of TCR clone 275789 (TRBV29-1, TRBJ2-5)
CSEDRTGTQYF

SEQ ID NO: 551579 - protein, 13 aa, Homo sapiens
  CDR3 for alpha chain variable domain of TCR clone 275790 (TRAV2, TRAJ40)
CAVVTSGTYKYIF

SEQ ID NO: 551580 - protein, 14 aa, Homo sapiens
  CDR3 for beta chain variable domain of TCR clone 275790 (TRBV19, TRBJ1-2)
CASSVLGYNYGYTF

SEQ ID NO: 551581 - protein, 13 aa, Homo sapiens
  CDR3 for alpha chain variable domain of TCR clone 275791 (TRAV12-1, TRAJ49)
CVVNTNTGNQFYF

SEQ ID NO: 551582 - protein, 14 aa, Homo sapiens
  CDR3 for beta chain variable domain of TCR clone 275791 (TRBV7-2, TRBJ2-7)
CASRSQGAAYEQYF

SEQ ID NO: 551583 - protein, 19 aa, Homo sapiens
  CDR3 for alpha chain variable domain of TCR clone 275792 (TRAV21, TRAJ20)
SLVTQPPTSVLPNDYKLSF

SEQ ID NO: 551584 - protein, 14 aa, Homo sapiens
  CDR3 for beta chain variable domain of TCR clone 275792 (TRBV19, TRBJ1-1)
CASRRFAGVTEAFF

SEQ ID NO: 551585 - protein, 14 aa, Homo sapiens
  CDR3 for alpha chain variable domain of TCR clone 275793 (TRAV17, TRAJ57)
CATDPQGGSEKLVF

SEQ ID NO: 551586 - protein, 15 aa, Homo sapiens
  CDR3 for beta chain variable domain of TCR clone 275793 (TRBV18, TRBJ2-5)
CASSPDPGLQETQYF

SEQ ID NO: 551587 - protein, 13 aa, Homo sapiens
  CDR3 for alpha chain variable domain of TCR clone 275794 (TRAV21, TRAJ27)
CAARPGNAGKSTF

SEQ ID NO: 551588 - protein, 15 aa, Homo sapiens
  CDR3 for beta chain variable domain of TCR clone 275794 (TRBV20-1, TRBJ2-7)
CSARDRFSGMDEQYF

SEQ ID NO: 551589 - protein, 14 aa, Homo sapiens
  CDR3 for alpha chain variable domain of TCR clone 275795 (TRAV21, TRAJ35)
CAVMPIGFGNVLHC

SEQ ID NO: 551590 - protein, 14 aa, Homo sapiens
  CDR3 for beta chain variable domain of TCR clone 275795 (TRBV7-3, TRBJ1-1)
CASSRQGGDTEAFF

SEQ ID NO: 551591 - protein, 14 aa, Homo sapiens
  CDR3 for alpha chain variable domain of TCR clone 275796 (TRAV1-2, TRAJ8)
CAVREDTGFHKLVF

SEQ ID NO: 551592 - protein, 14 aa, Homo sapiens
  CDR3 for beta chain variable domain of TCR clone 275796 (TRBV15, TRBJ2-5)
CATSIGGLGETQYF

SEQ ID NO: 551593 - protein, 21 aa, Homo sapiens
  CDR3 for alpha chain variable domain of TCR clone 275797 (TRAV3, TRAJ43)
HLKKPSALVSDSALYFGGMRF

SEQ ID NO: 551594 - protein, 15 aa, Homo sapiens
  CDR3 for beta chain variable domain of TCR clone 275797 (TRBV7-3, TRBJ2-1)
CASSLDGNSYNEQFF

SEQ ID NO: 551595 - protein, 14 aa, Homo sapiens
  CDR3 for alpha chain variable domain of TCR clone 275798 (TRAV12-2, TRAJ13)
CSVKKTGGYQKVTF

SEQ ID NO: 551596 - protein, 17 aa, Homo sapiens
  CDR3 for beta chain variable domain of TCR clone 275798 (TRBV20-1, TRBJ2-2)
CSASGSGQGGLTGELFF

SEQ ID NO: 551597 - protein, 16 aa, Homo sapiens
  CDR3 for alpha chain variable domain of TCR clone 275799 (TRAV3, TRAJ27)
CAVRDPQGTNAGESTF

SEQ ID NO: 551598 - protein, 17 aa, Homo sapiens
  CDR3 for beta chain variable domain of TCR clone 275799 (TRBV4-1, TRBJ2-7)
CASSQGRGLQTSYEQYF

SEQ ID NO: 551599 - protein, 11 aa, Homo sapiens
  CDR3 for alpha chain variable domain of TCR clone 275800 (TRAV1-1, TRAJ23)
CAVRQGGKLIF

SEQ ID NO: 551600 - protein, 15 aa, Homo sapiens
  CDR3 for beta chain variable domain of TCR clone 275800 (TRBV12-4, TRBJ1-5)
CASTQGTGPLQPQHF

SEQ ID NO: 551601 - protein, 22 aa, Homo sapiens
  CDR3 for alpha chain variable domain of TCR clone 275801 (TRAV3, )
CAVRDCLNAGNNNIQNPDPAVY

SEQ ID NO: 551602 - protein, 19 aa, Homo sapiens
  CDR3 for beta chain variable domain of TCR clone 275801 (TRBV7-2, TRBJ2-3)
CACSFLSRNWGGGTDTQYF

SEQ ID NO: 551603 - protein, 14 aa, Homo sapiens
  CDR3 for alpha chain variable domain of TCR clone 275802 (TRAV1-2, TRAJ16)
CAVNRFADGQKLLF

SEQ ID NO: 551604 - protein, 16 aa, Homo sapiens
  CDR3 for beta chain variable domain of TCR clone 275802 (TRBV11-2, TRBJ1-1)
CASSLRQGGEHSKAFF

SEQ ID NO: 551605 - protein, 14 aa, Homo sapiens
  CDR3 for alpha chain variable domain of TCR clone 275803 (TRAV12-2, TRAJ24)
CAVTPADSWGNLQF

SEQ ID NO: 551606 - protein, 13 aa, Homo sapiens
  CDR3 for beta chain variable domain of TCR clone 275803 (TRBV6-4, TRBJ1-5)
CASSADLNQPQHF

SEQ ID NO: 551607 - protein, 12 aa, Homo sapiens
  CDR3 for alpha chain variable domain of TCR clone 275804 (TRAV3, TRAJ27)
CAVRDGAGKSTF

SEQ ID NO: 551608 - protein, 13 aa, Homo sapiens
  CDR3 for beta chain variable domain of TCR clone 275804 (TRBV10-3, TRBJ1-2)
CAINAVLNYGYTF

SEQ ID NO: 551609 - protein, 13 aa, Homo sapiens
  CDR3 for alpha chain variable domain of TCR clone 275805 (TRAV29/DV5, TRAJ31)
CAASRNNNARLMF

SEQ ID NO: 551610 - protein, 14 aa, Homo sapiens
  CDR3 for beta chain variable domain of TCR clone 275805 (TRBV11-2, TRBJ2-3)
CASSRLARTDTQYF

SEQ ID NO: 551611 - protein, 15 aa, Homo sapiens
  CDR3 for alpha chain variable domain of TCR clone 275806 (TRAV3, TRAJ29)
CAVRDSPSGNTPLVF

SEQ ID NO: 551612 - protein, 13 aa, Homo sapiens
  CDR3 for beta chain variable domain of TCR clone 275806 (TRBV12-4, TRBJ2-7)
CASSPTETYDQYF

SEQ ID NO: 551613 - protein, 13 aa, Homo sapiens
  CDR3 for alpha chain variable domain of TCR clone 275807 (TRAV1-1, TRAJ9)
CAAKNTGGFKTIF

SEQ ID NO: 551614 - protein, 14 aa, Homo sapiens
  CDR3 for beta chain variable domain of TCR clone 275807 (TRBV19, TRBJ2-1)
CASEVTGARNEQFF

SEQ ID NO: 551615 - protein, 14 aa, Homo sapiens
  CDR3 for alpha chain variable domain of TCR clone 275808 (TRAV29/DV5, TRAJ44)
CAASATGTASKLTF

SEQ ID NO: 551616 - protein, 16 aa, Homo sapiens
  CDR3 for beta chain variable domain of TCR clone 275808 (TRBV7-9, TRBJ1-3)
CVSSQTSGLRMGTIYF

SEQ ID NO: 551617 - protein, 14 aa, Homo sapiens
  CDR3 for alpha chain variable domain of TCR clone 275809 (TRAV1-2, TRAJ6)
CAVSLSGGSYIPTF

SEQ ID NO: 551618 - protein, 15 aa, Homo sapiens
  CDR3 for beta chain variable domain of TCR clone 275809 (TRBV28, TRBJ2-7)
CVSSPGGRGFYEQYF

SEQ ID NO: 551619 - protein, 13 aa, Homo sapiens
  CDR3 for alpha chain variable domain of TCR clone 275810 (TRAV1-1, TRAJ9)
CAAKNTGGFKTIF

SEQ ID NO: 551620 - protein, 16 aa, Homo sapiens
  CDR3 for beta chain variable domain of TCR clone 275810 (TRBV25-1, TRBJ1-1)
CASSGDRDRGRIEAFF

SEQ ID NO: 551621 - protein, 16 aa, Homo sapiens
  CDR3 for alpha chain variable domain of TCR clone 275811 (TRAV13-1, TRAJ18)
CAASRMRGSTLGRLYF

SEQ ID NO: 551622 - protein, 16 aa, Homo sapiens
  CDR3 for beta chain variable domain of TCR clone 275811 (TRBV27, TRBJ1-1)
CASSSRGRTGYTEASF

SEQ ID NO: 551623 - protein, 14 aa, Homo sapiens
  CDR3 for alpha chain variable domain of TCR clone 275812 (TRAV23/DV6, TRAJ57)
CAASTQGGAEKLVF

SEQ ID NO: 551624 - protein, 13 aa, Homo sapiens
  CDR3 for beta chain variable domain of TCR clone 275812 (TRBV11-2, TRBJ2-7)
CASSSYPSYEQYF

SEQ ID NO: 551625 - protein, 16 aa, Homo sapiens
  CDR3 for alpha chain variable domain of TCR clone 275813 (TRAV3, TRAJ37)
CAVRGTGSGNTGKLIF

SEQ ID NO: 551626 - protein, 16 aa, Homo sapiens
  CDR3 for beta chain variable domain of TCR clone 275813 (TRBV12-5, TRBJ2-5)
CASGPRTSGSQETQYF

SEQ ID NO: 551627 - protein, 14 aa, Homo sapiens
  CDR3 for alpha chain variable domain of TCR clone 275814 (TRAV12-1, TRAJ23)
CVVMIYNQGGKLIF

SEQ ID NO: 551628 - protein, 12 aa, Homo sapiens
  CDR3 for beta chain variable domain of TCR clone 275814 (TRBV7-3, TRBJ2-7)
CASSLEGYEQYF

SEQ ID NO: 551629 - protein, 14 aa, Homo sapiens
  CDR3 for alpha chain variable domain of TCR clone 275815 (TRAV13-2, TRAJ43)
CAEIPTYNNNDMRF

SEQ ID NO: 551630 - protein, 15 aa, Homo sapiens
  CDR3 for beta chain variable domain of TCR clone 275815 (TRBV5-1, TRBJ2-1)
CASKGLAGVYNEQFF

SEQ ID NO: 551631 - protein, 15 aa, Homo sapiens
  CDR3 for alpha chain variable domain of TCR clone 275816 (TRAV12-2, TRAJ43)
CAFDMRFGAGTRLTV

SEQ ID NO: 551632 - protein, 14 aa, Homo sapiens
  CDR3 for beta chain variable domain of TCR clone 275816 (TRBV11-2, TRBJ2-7)
CASSLGAGAYEQYF

SEQ ID NO: 551633 - protein, 14 aa, Homo sapiens
  CDR3 for alpha chain variable domain of TCR clone 275817 (TRAV38-1, TRAJ40)
SALRPTSGTYKYIF

SEQ ID NO: 551634 - protein, 15 aa, Homo sapiens
  CDR3 for beta chain variable domain of TCR clone 275817 (TRBV9, TRBJ1-6)
CASSVAGTGDSPLHF

SEQ ID NO: 551635 - protein, 18 aa, Homo sapiens
  CDR3 for alpha chain variable domain of TCR clone 275818 (TRAV21, TRAJ52)
CAVRPSRAGGTSYGKLTF

SEQ ID NO: 551636 - protein, 17 aa, Homo sapiens
  CDR3 for beta chain variable domain of TCR clone 275818 (TRBV13, TRBJ2-3)
CASSLSRVVGGRNTQYF

SEQ ID NO: 551637 - protein, 20 aa, Homo sapiens
  CDR3 for alpha chain variable domain of TCR clone 275819 (TRAV27, TRAJ9)
CAGESEVSKLSLEQEQDYLL

SEQ ID NO: 551638 - protein, 14 aa, Homo sapiens
  CDR3 for beta chain variable domain of TCR clone 275819 (TRBV6-1, TRBJ2-1)
CASAKDGFYNEQFF

SEQ ID NO: 551639 - protein, 18 aa, Homo sapiens
  CDR3 for alpha chain variable domain of TCR clone 275820 (TRAV3, TRAJ17)
CAVRARRGGRSCRHHANF

SEQ ID NO: 551640 - protein, 14 aa, Homo sapiens
  CDR3 for beta chain variable domain of TCR clone 275820 (TRBV4-1, TRBJ2-2)
CASSQAVNTGELFF

SEQ ID NO: 551641 - protein, 12 aa, Homo sapiens
  CDR3 for alpha chain variable domain of TCR clone 275821 (TRAV23/DV6, TRAJ30)
CAASKGDDKIIF

SEQ ID NO: 551642 - protein, 15 aa, Homo sapiens
  CDR3 for beta chain variable domain of TCR clone 275821 (TRBV29-1, TRBJ2-1)
CSGRDRKSAYNGQFF

SEQ ID NO: 551643 - protein, 13 aa, Homo sapiens
  CDR3 for alpha chain variable domain of TCR clone 275822 (TRAV13-1, TRAJ23)
CAASGRGGGKLIF

SEQ ID NO: 551644 - protein, 13 aa, Homo sapiens
  CDR3 for beta chain variable domain of TCR clone 275822 (TRBV15, TRBJ1-6)
CATSGGLNSHLHF

SEQ ID NO: 551645 - protein, 11 aa, Homo sapiens
  CDR3 for alpha chain variable domain of TCR clone 275823 (TRAV23/DV6, TRAJ49)
CAVAPLTSSIF

SEQ ID NO: 551646 - protein, 13 aa, Homo sapiens
  CDR3 for beta chain variable domain of TCR clone 275823 (TRBV6-1, TRBJ1-1)
CASSRQGNTEAFF

SEQ ID NO: 551647 - protein, 11 aa, Homo sapiens
  CDR3 for alpha chain variable domain of TCR clone 275824 (TRAV17, TRAJ9)
CGFTGGFKTIF

SEQ ID NO: 551648 - protein, 18 aa, Homo sapiens
  CDR3 for beta chain variable domain of TCR clone 275824 (TRBV11-2, TRBJ2-3)
CASSLGGASRGAPNTQYF

SEQ ID NO: 551649 - protein, 15 aa, Homo sapiens
  CDR3 for alpha chain variable domain of TCR clone 275825 (TRAV17, TRAJ34)
CATDPRMEDTDKLIF

SEQ ID NO: 551650 - protein, 12 aa, Homo sapiens
  CDR3 for beta chain variable domain of TCR clone 275825 (TRBV10-2, TRBJ2-3)
CASSEGPGPRYF

SEQ ID NO: 551651 - protein, 13 aa, Homo sapiens
  CDR3 for alpha chain variable domain of TCR clone 275826 (TRAV3, TRAJ20)
CAVRSLNDCKLNF

SEQ ID NO: 551652 - protein, 13 aa, Homo sapiens
  CDR3 for beta chain variable domain of TCR clone 275826 (TRBV7-3, TRBJ1-1)
CASSQDWGAEAFF

SEQ ID NO: 551653 - protein, 14 aa, Homo sapiens
  CDR3 for alpha chain variable domain of TCR clone 275827 (TRAV12-2, TRAJ40)
CAVKIPSGTYKYIF

SEQ ID NO: 551654 - protein, 16 aa, Homo sapiens
  CDR3 for beta chain variable domain of TCR clone 275827 (TRBV7-6, TRBJ2-3)
CASSLWREMGPDTQYF

SEQ ID NO: 551655 - protein, 16 aa, Homo sapiens
  CDR3 for alpha chain variable domain of TCR clone 275828 (TRAV8-3, TRAJ13)
CAVGAYPSGGYQKVTF

SEQ ID NO: 551656 - protein, 15 aa, Homo sapiens
  CDR3 for beta chain variable domain of TCR clone 275828 (TRBV20-1, TRBJ1-1)
CSASRGVTGNTGAFF

SEQ ID NO: 551657 - protein, 12 aa, Homo sapiens
  CDR3 for alpha chain variable domain of TCR clone 275829 (TRAV12-2, TRAJ49)
CAVLNTGNQFYF

SEQ ID NO: 551658 - protein, 16 aa, Homo sapiens
  CDR3 for beta chain variable domain of TCR clone 275829 (TRBV11-2, TRBJ1-2)
CASSLDTGGADYGYTF

SEQ ID NO: 551659 - protein, 11 aa, Homo sapiens
  CDR3 for alpha chain variable domain of TCR clone 275830 (TRAV21, TRAJ48)
CAVDGNEKLTF

SEQ ID NO: 551660 - protein, 15 aa, Homo sapiens
  CDR3 for beta chain variable domain of TCR clone 275830 (TRBV6-6, TRBJ2-5)
CAGSPGGGLEETQYF

SEQ ID NO: 551661 - protein, 15 aa, Homo sapiens
  CDR3 for alpha chain variable domain of TCR clone 275831 (TRAV34, TRAJ38)
CGAGFTPGNNRKLIW

SEQ ID NO: 551662 - protein, 15 aa, Homo sapiens
  CDR3 for beta chain variable domain of TCR clone 275831 (TRBV9, TRBJ1-6)
CASSVAGTGDSPLHF

SEQ ID NO: 551663 - protein, 18 aa, Homo sapiens
  CDR3 for alpha chain variable domain of TCR clone 275832 (TRAV21, TRAJ52)
CAVRPSPAGGTIYGKLTF

SEQ ID NO: 551664 - protein, 17 aa, Homo sapiens
  CDR3 for beta chain variable domain of TCR clone 275832 (TRBV13, TRBJ2-3)
CASRLSRVAGGRNTQYF

SEQ ID NO: 551665 - protein, 14 aa, Homo sapiens
  CDR3 for alpha chain variable domain of TCR clone 275833 (TRAV1-2, TRAJ16)
CAANRFSDGQKLLF

SEQ ID NO: 551666 - protein, 13 aa, Homo sapiens
  CDR3 for beta chain variable domain of TCR clone 275833 (TRBV15, TRBJ1-6)
CATSGGLNSPLHF

SEQ ID NO: 551667 - protein, 16 aa, Homo sapiens
  CDR3 for alpha chain variable domain of TCR clone 275834 (TRAV30, TRAJ24)
CGTETVDADSWGKFQF

SEQ ID NO: 551668 - protein, 18 aa, Homo sapiens
  CDR3 for beta chain variable domain of TCR clone 275834 (TRBV7-9, TRBJ2-7)
CASSLTTSGSRTWYEQYF

SEQ ID NO: 551669 - protein, 14 aa, Homo sapiens
  CDR3 for alpha chain variable domain of TCR clone 275835 (TRAV26-1, TRAJ39)
CIVRGSRAGNMLTF

SEQ ID NO: 551670 - protein, 15 aa, Homo sapiens
  CDR3 for beta chain variable domain of TCR clone 275835 (TRBV7-9, TRBJ1-5)
CASSPGHQPNQPQHF

SEQ ID NO: 551671 - protein, 14 aa, Homo sapiens
  CDR3 for alpha chain variable domain of TCR clone 275836 (TRAV13-2, TRAJ43)
CAEIPTYNNNDIRF

SEQ ID NO: 551672 - protein, 15 aa, Homo sapiens
  CDR3 for beta chain variable domain of TCR clone 275836 (TRBV7-9, TRBJ2-2)
CASGPLATFPGELFF

SEQ ID NO: 551673 - protein, 15 aa, Homo sapiens
  CDR3 for alpha chain variable domain of TCR clone 275837 (TRAV26-1, TRAJ44)
CIVRANTGTASKLTF

SEQ ID NO: 551674 - protein, 16 aa, Homo sapiens
  CDR3 for beta chain variable domain of TCR clone 275837 (TRBV7-7, TRBJ2-1)
CASILASGTSYNEQFF

SEQ ID NO: 551675 - protein, 15 aa, Homo sapiens
  CDR3 for alpha chain variable domain of TCR clone 275838 (TRAV21, TRAJ53)
CATLNSGGSNYKLTF

SEQ ID NO: 551676 - protein, 15 aa, Homo sapiens
  CDR3 for beta chain variable domain of TCR clone 275838 (TRBV7-6, TRBJ1-5)
CASSQSSGINQPQYF

SEQ ID NO: 551677 - protein, 17 aa, Homo sapiens
  CDR3 for alpha chain variable domain of TCR clone 275839 (TRAV13-1, TRAJ52)
CAASSGAGCTSYGKLTF

SEQ ID NO: 551678 - protein, 15 aa, Homo sapiens
  CDR3 for beta chain variable domain of TCR clone 275839 (TRBV7-2, TRBJ2-1)
CASSSGLAGGNEQFF

SEQ ID NO: 551679 - protein, 15 aa, Homo sapiens
  CDR3 for alpha chain variable domain of TCR clone 275840 (TRAV13-1, TRAJ17)
CAASIERAAGNKLTF

SEQ ID NO: 551680 - protein, 16 aa, Homo sapiens
  CDR3 for beta chain variable domain of TCR clone 275840 (TRBV28, TRBJ1-2)
CASSLYGQEANYGYTF

SEQ ID NO: 551681 - protein, 11 aa, Homo sapiens
  CDR3 for alpha chain variable domain of TCR clone 275841 (TRAV2, TRAJ33)
CAVESNYQLIW

SEQ ID NO: 551682 - protein, 16 aa, Homo sapiens
  CDR3 for beta chain variable domain of TCR clone 275841 (TRBV5-1, TRBJ1-1)
GASSSGGNSLNTEAFF

SEQ ID NO: 551683 - protein, 15 aa, Homo sapiens
  CDR3 for alpha chain variable domain of TCR clone 275842 (TRAV21, TRAJ53)
CATLNSGGSNYKLTF

SEQ ID NO: 551684 - protein, 14 aa, Homo sapiens
  CDR3 for beta chain variable domain of TCR clone 275842 (TRBV5-4, TRBJ1-4)
CASSLNLGREKLFF

SEQ ID NO: 551685 - protein, 17 aa, Homo sapiens
  CDR3 for alpha chain variable domain of TCR clone 275843 (TRAV12-2, TRAJ48)
CASNEKLTFGTGTRLTI

SEQ ID NO: 551686 - protein, 16 aa, Homo sapiens
  CDR3 for beta chain variable domain of TCR clone 275843 (TRBV7-3, TRBJ2-2)
CASSLKRGTLSGQLFF

SEQ ID NO: 551687 - protein, 15 aa, Homo sapiens
  CDR3 for alpha chain variable domain of TCR clone 275844 (TRAV17, TRAJ17)
CATDASIIRRQQANF

SEQ ID NO: 551688 - protein, 15 aa, Homo sapiens
  CDR3 for beta chain variable domain of TCR clone 275844 (TRBV11-3, TRBJ2-3)
CASLKDGREGDTQYF

SEQ ID NO: 551689 - protein, 13 aa, Homo sapiens
  CDR3 for alpha chain variable domain of TCR clone 275845 (TRAV13-1, TRAJ20)
CAARVPNDYKLSF

SEQ ID NO: 551690 - protein, 16 aa, Homo sapiens
  CDR3 for beta chain variable domain of TCR clone 275845 (TRBV11-1, TRBJ1-1)
CATNPRDRAFNTEAFF

SEQ ID NO: 551691 - protein, 15 aa, Homo sapiens
  CDR3 for alpha chain variable domain of TCR clone 275846 (TRAV38-2/DV8, TRAJ57)
CAYKSGLGGSEKLFF

SEQ ID NO: 551692 - protein, 16 aa, Homo sapiens
  CDR3 for beta chain variable domain of TCR clone 275846 (TRBV28, TRBJ1-5)
CASSFRGGYSNKPQHF

SEQ ID NO: 551693 - protein, 16 aa, Homo sapiens
  CDR3 for alpha chain variable domain of TCR clone 275847 (TRAV16, TRAJ4)
CALSRMFSGGYHKLIF

SEQ ID NO: 551694 - protein, 16 aa, Homo sapiens
  CDR3 for beta chain variable domain of TCR clone 275847 (TRBV2, TRBJ2-3)
CASSTSVEGVTDTQYF

SEQ ID NO: 551695 - protein, 14 aa, Homo sapiens
  CDR3 for alpha chain variable domain of TCR clone 275848 (TRAV12-3, TRAJ13)
CAMRNSGGYQKVTF

SEQ ID NO: 551696 - protein, 14 aa, Homo sapiens
  CDR3 for beta chain variable domain of TCR clone 275848 (TRBV4-1, TRBJ1-6)
CASSPGSDSSTLLF

SEQ ID NO: 551697 - protein, 14 aa, Homo sapiens
  CDR3 for alpha chain variable domain of TCR clone 275849 (TRAV12-2, TRAJ13)
CAVKKTGGYQKVIF

SEQ ID NO: 551698 - protein, 14 aa, Homo sapiens
  CDR3 for beta chain variable domain of TCR clone 275849 (TRBV10-3, TRBJ2-1)
CAISSDLAYNEQFF

SEQ ID NO: 551699 - protein, 13 aa, Homo sapiens
  CDR3 for alpha chain variable domain of TCR clone 275850 (TRAV17, TRAJ40)
CATDEGGTYKYIF

SEQ ID NO: 551700 - protein, 16 aa, Homo sapiens
  CDR3 for beta chain variable domain of TCR clone 275850 (TRBV12-5, TRBJ2-5)
CASGPRTSGNQETQYF

SEQ ID NO: 551701 - protein, 19 aa, Homo sapiens
  CDR3 for alpha chain variable domain of TCR clone 275851 (TRAV3, TRAJ37)
CAVRDIVGGYPSNTGKLSF

SEQ ID NO: 551702 - protein, 14 aa, Homo sapiens
  CDR3 for beta chain variable domain of TCR clone 275851 (TRBV7-8, TRBJ2-3)
CASSLEAGTDTQYF

SEQ ID NO: 551703 - protein, 16 aa, Homo sapiens
  CDR3 for alpha chain variable domain of TCR clone 275852 (TRAV9-2, TRAJ5)
CALSFSMDTGRRALTF

SEQ ID NO: 551704 - protein, 16 aa, Homo sapiens
  CDR3 for beta chain variable domain of TCR clone 275852 (TRBV12-5, TRBJ2-5)
CASGPRTSGNQETQYF

SEQ ID NO: 551705 - protein, 13 aa, Homo sapiens
  CDR3 for alpha chain variable domain of TCR clone 275853 (TRAV17, TRAJ5)
CAPMDTGRRALTF

SEQ ID NO: 551706 - protein, 16 aa, Homo sapiens
  CDR3 for beta chain variable domain of TCR clone 275853 (TRBV27, TRBJ2-7)
CASSSERGDSAYEQYF

SEQ ID NO: 551707 - protein, 13 aa, Homo sapiens
  CDR3 for alpha chain variable domain of TCR clone 275854 (TRAV12-2, TRAJ4)
CAVFFGGYNKLIF

SEQ ID NO: 551708 - protein, 16 aa, Homo sapiens
  CDR3 for beta chain variable domain of TCR clone 275854 (TRBV6-1, TRBJ1-2)
CASSEYASGANYGYNF

SEQ ID NO: 551709 - protein, 13 aa, Homo sapiens
  CDR3 for alpha chain variable domain of TCR clone 275855 (TRAV12-1, TRAJ5)
CGFTDTGRKALTF

SEQ ID NO: 551710 - protein, 15 aa, Homo sapiens
  CDR3 for beta chain variable domain of TCR clone 275855 (TRBV7-9, TRBJ1-6)
CASSSPGRGNSPLHF

SEQ ID NO: 551711 - protein, 13 aa, Homo sapiens
  CDR3 for alpha chain variable domain of TCR clone 275856 (TRAV13-1, TRAJ43)
CAASLSNNHDMRF

SEQ ID NO: 551712 - protein, 14 aa, Homo sapiens
  CDR3 for beta chain variable domain of TCR clone 275856 (TRBV5-1, TRBJ2-5)
CASSLAGKQETQYF

SEQ ID NO: 551713 - protein, 16 aa, Homo sapiens
  CDR3 for alpha chain variable domain of TCR clone 275857 (TRAV8-4, TRAJ52)
CAVRLEGGTSYGKLTF

SEQ ID NO: 551714 - protein, 20 aa, Homo sapiens
  CDR3 for beta chain variable domain of TCR clone 275857 (TRBV7-8, TRBJ2-2)
CASSHLFPGPTIHITGELFF

SEQ ID NO: 551715 - protein, 11 aa, Homo sapiens
  CDR3 for alpha chain variable domain of TCR clone 275858 (TRAV12-3, TRAJ27)
CTMANAGKSTF

SEQ ID NO: 551716 - protein, 12 aa, Homo sapiens
  CDR3 for beta chain variable domain of TCR clone 275858 (TRBV14, TRBJ2-7)
CASSSLKGEQYF

SEQ ID NO: 551717 - protein, 15 aa, Homo sapiens
  CDR3 for alpha chain variable domain of TCR clone 275859 (TRAV13-2, TRAJ40)
CAENRSRPGTYKYIF

SEQ ID NO: 551718 - protein, 15 aa, Homo sapiens
  CDR3 for beta chain variable domain of TCR clone 275859 (TRBV19, TRBJ2-1)
CASSMGWNSNNEQFF

SEQ ID NO: 551719 - protein, 14 aa, Homo sapiens
  CDR3 for alpha chain variable domain of TCR clone 275860 (TRAV2, TRAJ9)
CAVEDRRGGVKTIF

SEQ ID NO: 551720 - protein, 17 aa, Homo sapiens
  CDR3 for beta chain variable domain of TCR clone 275860 (TRBV20-1, TRBJ2-7)
CSATRAGGVAGVEEQYF

SEQ ID NO: 551721 - protein, 18 aa, Homo sapiens
  CDR3 for alpha chain variable domain of TCR clone 275861 (TRAV13-1, TRAJ52)
CAASKRSAGGTSNGKLTF

SEQ ID NO: 551722 - protein, 15 aa, Homo sapiens
  CDR3 for beta chain variable domain of TCR clone 275861 (TRBV20-1, TRBJ1-1)
CSASRGVTGNTEAFF

SEQ ID NO: 551723 - protein, 14 aa, Homo sapiens
  CDR3 for alpha chain variable domain of TCR clone 275862 (TRAV1-2, TRAJ16)
CAVNRFADGQKLLF

SEQ ID NO: 551724 - protein, 13 aa, Homo sapiens
  CDR3 for beta chain variable domain of TCR clone 275862 (TRBV4-2, TRBJ1-1)
CASSQAGNTEAFF

SEQ ID NO: 551725 - protein, 14 aa, Homo sapiens
  CDR3 for alpha chain variable domain of TCR clone 275863 (TRAV26-1, TRAJ34)
CIVRVAYNTDKRIF

SEQ ID NO: 551726 - protein, 14 aa, Homo sapiens
  CDR3 for beta chain variable domain of TCR clone 275863 (TRBV20-1, TRBJ2-7)
CSAWTALSSYEQYF

SEQ ID NO: 551727 - protein, 15 aa, Homo sapiens
  CDR3 for alpha chain variable domain of TCR clone 275864 (TRAV13-1, TRAJ42)
RAASIAGGSQGNLIF

SEQ ID NO: 551728 - protein, 15 aa, Homo sapiens
  CDR3 for beta chain variable domain of TCR clone 275864 (TRBV19, TRBJ2-1)
CASSIVRGEGREQFF

SEQ ID NO: 551729 - protein, 12 aa, Homo sapiens
  CDR3 for alpha chain variable domain of TCR clone 275865 (TRAV26-1, TRAJ53)
CIEGGSNYKLTC

SEQ ID NO: 551730 - protein, 15 aa, Homo sapiens
  CDR3 for beta chain variable domain of TCR clone 275865 (TRBV5-1, TRBJ2-2)
CASSLLQGRPGELFF

SEQ ID NO: 551731 - protein, 16 aa, Homo sapiens
  CDR3 for alpha chain variable domain of TCR clone 275866 (TRAV26-2, TRAJ40)
YILRDVIGGGTYKYIF

SEQ ID NO: 551732 - protein, 14 aa, Homo sapiens
  CDR3 for beta chain variable domain of TCR clone 275866 (TRBV19, TRBJ2-1)
CASPTFVLSGEQFF

SEQ ID NO: 551733 - protein, 13 aa, Homo sapiens
  CDR3 for alpha chain variable domain of TCR clone 275867 (TRAV13-2, TRAJ54)
CAENYQGAQKLVF

SEQ ID NO: 551734 - protein, 16 aa, Homo sapiens
  CDR3 for beta chain variable domain of TCR clone 275867 (TRBV12-5, TRBJ2-5)
CASGPRTSGNQETQYF

SEQ ID NO: 551735 - protein, 13 aa, Homo sapiens
  CDR3 for alpha chain variable domain of TCR clone 275868 (TRAV16, TRAJ29)
CALSRRGNTPLVC

SEQ ID NO: 551736 - protein, 15 aa, Homo sapiens
  CDR3 for beta chain variable domain of TCR clone 275868 (TRBV4-1, TRBJ2-3)
CASSRGQGIPDTQYF

SEQ ID NO: 551737 - protein, 13 aa, Homo sapiens
  CDR3 for alpha chain variable domain of TCR clone 275869 (TRAV16, TRAJ31)
CALSAHNNARLMF

SEQ ID NO: 551738 - protein, 17 aa, Homo sapiens
  CDR3 for beta chain variable domain of TCR clone 275869 (TRBV12-4, TRBJ2-1)
CASSPWLAGGRINELFF

SEQ ID NO: 551739 - protein, 15 aa, Homo sapiens
  CDR3 for alpha chain variable domain of TCR clone 275870 (TRAV27, TRAJ38)
CAARRNAGNNRQLIW

SEQ ID NO: 551740 - protein, 17 aa, Homo sapiens
  CDR3 for beta chain variable domain of TCR clone 275870 (TRBV7-8, TRBJ2-6)
CASSAGTGGAGANVLTF

SEQ ID NO: 551741 - protein, 11 aa, Homo sapiens
  CDR3 for alpha chain variable domain of TCR clone 275871 (TRAV20, TRAJ23)
CACNQGGKLIF

SEQ ID NO: 551742 - protein, 16 aa, Homo sapiens
  CDR3 for beta chain variable domain of TCR clone 275871 (TRBV29-1, TRBJ2-7)
CSVEVVGTSGSYEQYF

SEQ ID NO: 551743 - protein, 18 aa, Homo sapiens
  CDR3 for alpha chain variable domain of TCR clone 275872 (TRAV13-1, TRAJ52)
CAASKRSAGGTSYGKLTV

SEQ ID NO: 551744 - protein, 13 aa, Homo sapiens
  CDR3 for beta chain variable domain of TCR clone 275872 (TRBV12-4, TRBJ1-2)
CASSIRQGKGYTF

SEQ ID NO: 551745 - protein, 16 aa, Homo sapiens
  CDR3 for alpha chain variable domain of TCR clone 275873 (TRAV1-2, TRAJ27)
CAVRETQTPMQANQPL

SEQ ID NO: 551746 - protein, 13 aa, Homo sapiens
  CDR3 for beta chain variable domain of TCR clone 275873 (TRBV6-1, TRBJ1-2)
CASSAREGYGYTF

SEQ ID NO: 551747 - protein, 10 aa, Homo sapiens
  CDR3 for alpha chain variable domain of TCR clone 275874 (TRAV10, TRAJ34)
CAVNTDKLIF

SEQ ID NO: 551748 - protein, 14 aa, Homo sapiens
  CDR3 for beta chain variable domain of TCR clone 275874 (TRBV19, TRBJ2-1)
CASPTFVLSGEQFF

SEQ ID NO: 551749 - protein, 11 aa, Homo sapiens
  CDR3 for alpha chain variable domain of TCR clone 275875 (TRAV2, TRAJ13)
CASGVYQKVTF

SEQ ID NO: 551750 - protein, 13 aa, Homo sapiens
  CDR3 for beta chain variable domain of TCR clone 275875 (TRBV12-4, TRBJ1-2)
CASSLRQGKGYTF

SEQ ID NO: 551751 - protein, 11 aa, Homo sapiens
  CDR3 for alpha chain variable domain of TCR clone 275876 (TRAV3, TRAJ21)
CAVGNFNKFYF

SEQ ID NO: 551752 - protein, 12 aa, Homo sapiens
  CDR3 for beta chain variable domain of TCR clone 275876 (TRBV14, TRBJ2-5)
CASSHLKEAQYF

SEQ ID NO: 551753 - protein, 15 aa, Homo sapiens
  CDR3 for alpha chain variable domain of TCR clone 275877 (TRAV12-1, TRAJ41)
CVVNGASNSGYALTF

SEQ ID NO: 551754 - protein, 15 aa, Homo sapiens
  CDR3 for beta chain variable domain of TCR clone 275877 (TRBV7-2, TRBJ1-5)
CASSSTGVDNQPQHF

SEQ ID NO: 551755 - protein, 18 aa, Homo sapiens
  CDR3 for alpha chain variable domain of TCR clone 275878 (TRAV38-1, TRAJ29)
CDVFLSFITPSGNTPLVF

SEQ ID NO: 551756 - protein, 14 aa, Homo sapiens
  CDR3 for beta chain variable domain of TCR clone 275878 (TRBV18, TRBJ2-7)
CASSPRGGAYEQYF

SEQ ID NO: 551757 - protein, 11 aa, Homo sapiens
  CDR3 for alpha chain variable domain of TCR clone 275879 (TRAV12-2, TRAJ43)
CASYNNNDMRF

SEQ ID NO: 551758 - protein, 14 aa, Homo sapiens
  CDR3 for beta chain variable domain of TCR clone 275879 (TRBV7-8, TRBJ1-2)
CASSAGTAIYGYTF

SEQ ID NO: 551759 - protein, 14 aa, Homo sapiens
  CDR3 for alpha chain variable domain of TCR clone 275880 (TRAV2, TRAJ37)
CAVDFTSNTGKLIF

SEQ ID NO: 551760 - protein, 14 aa, Homo sapiens
  CDR3 for beta chain variable domain of TCR clone 275880 (TRBV20-1, TRBJ2-7)
RSAPELAGVGEQYF

SEQ ID NO: 551761 - protein, 10 aa, Homo sapiens
  CDR3 for alpha chain variable domain of TCR clone 275881 (TRAV26-1, TRAJ22)
CIAGSRQLTF

SEQ ID NO: 551762 - protein, 14 aa, Homo sapiens
  CDR3 for beta chain variable domain of TCR clone 275881 (TRBV7-3, TRBJ1-1)
CASSLKGGNTEAFF

SEQ ID NO: 551763 - protein, 17 aa, Homo sapiens
  CDR3 for alpha chain variable domain of TCR clone 275882 (TRAV3, TRAJ6)
CAVRDGPRAGGSYIPTF

SEQ ID NO: 551764 - protein, 14 aa, Homo sapiens
  CDR3 for beta chain variable domain of TCR clone 275882 (TRBV7-2, TRBJ2-7)
CASSPKTRFYEQSF

SEQ ID NO: 551765 - protein, 17 aa, Homo sapiens
  CDR3 for alpha chain variable domain of TCR clone 275883 (TRAV3, TRAJ12)
CCERRDGTMVSSYKLIF

SEQ ID NO: 551766 - protein, 15 aa, Homo sapiens
  CDR3 for beta chain variable domain of TCR clone 275883 (TRBV5-5, TRBJ1-5)
CASSLKGGGEQPQHF

SEQ ID NO: 551767 - protein, 15 aa, Homo sapiens
  CDR3 for alpha chain variable domain of TCR clone 275884 (TRAV3, TRAJ3)
CAVRDGHSSASKIIF

SEQ ID NO: 551768 - protein, 17 aa, Homo sapiens
  CDR3 for beta chain variable domain of TCR clone 275884 (TRBV25-1, TRBJ2-7)
CASSDAGVVFSSYEQYF

SEQ ID NO: 551769 - protein, 13 aa, Homo sapiens
  CDR3 for alpha chain variable domain of TCR clone 275885 (TRAV2, TRAJ12)
CAVGADSSYKLIL

SEQ ID NO: 551770 - protein, 13 aa, Homo sapiens
  CDR3 for beta chain variable domain of TCR clone 275885 (TRBV20-1, TRBJ2-1)
CSARSSPRDEQFF

SEQ ID NO: 551771 - protein, 16 aa, Homo sapiens
  CDR3 for alpha chain variable domain of TCR clone 275886 (TRAV22, TRAJ45)
CAVERGKSGGADGLTF

SEQ ID NO: 551772 - protein, 13 aa, Homo sapiens
  CDR3 for beta chain variable domain of TCR clone 275886 (TRBV27, TRBJ1-1)
CASSLAIGAEAFF

SEQ ID NO: 551773 - protein, 11 aa, Homo sapiens
  CDR3 for alpha chain variable domain of TCR clone 275887 (TRAV3, TRAJ49)
CAPITGNQFYF

SEQ ID NO: 551774 - protein, 16 aa, Homo sapiens
  CDR3 for beta chain variable domain of TCR clone 275887 (TRBV5-1, TRBJ2-3)
CASSVCPMSSTDMQYF

SEQ ID NO: 551775 - protein, 13 aa, Homo sapiens
  CDR3 for alpha chain variable domain of TCR clone 275888 (TRAV23/DV6, TRAJ9)
CAASTTGGFKTIF

SEQ ID NO: 551776 - protein, 15 aa, Homo sapiens
  CDR3 for beta chain variable domain of TCR clone 275888 (TRBV7-6, TRBJ2-7)
CASSGRRDTFGEQYF

SEQ ID NO: 551777 - protein, 16 aa, Homo sapiens
  CDR3 for alpha chain variable domain of TCR clone 275889 (TRAV30, TRAJ24)
CGTEIVDADSWGKFQF

SEQ ID NO: 551778 - protein, 13 aa, Homo sapiens
  CDR3 for beta chain variable domain of TCR clone 275889 (TRBV5-5, TRBJ1-2)
CASSFWRGEDHTF

SEQ ID NO: 551779 - protein, 15 aa, Homo sapiens
  CDR3 for alpha chain variable domain of TCR clone 275890 (TRAV21, TRAJ24)
CAARSSTDSWGKLRF

SEQ ID NO: 551780 - protein, 15 aa, Homo sapiens
  CDR3 for beta chain variable domain of TCR clone 275890 (TRBV4-1, TRBJ2-7)
CASSQNTGRLYEQYF

SEQ ID NO: 551781 - protein, 19 aa, Homo sapiens
  CDR3 for alpha chain variable domain of TCR clone 275891 (TRAV16, )
CALSGDIQNPDPAVYQLRD

SEQ ID NO: 551782 - protein, 15 aa, Homo sapiens
  CDR3 for beta chain variable domain of TCR clone 275891 (TRBV27, TRBJ2-7)
CASSPPGQGTYEQYF

SEQ ID NO: 551783 - protein, 16 aa, Homo sapiens
  CDR3 for alpha chain variable domain of TCR clone 275892 (TRAV1-1, TRAJ29)
CAVRSTRNAGNTPLVF

SEQ ID NO: 551784 - protein, 16 aa, Homo sapiens
  CDR3 for beta chain variable domain of TCR clone 275892 (TRBV27, TRBJ1-1)
CASSSRGRTGYTEAFF

SEQ ID NO: 551785 - protein, 15 aa, Homo sapiens
  CDR3 for alpha chain variable domain of TCR clone 275893 (TRAV12-2, TRAJ53)
CAVNGGGGSNYKLTF

SEQ ID NO: 551786 - protein, 14 aa, Homo sapiens
  CDR3 for beta chain variable domain of TCR clone 275893 (TRBV19, TRBJ2-2)
CASSTRHRSGELFF

SEQ ID NO: 551787 - protein, 12 aa, Homo sapiens
  CDR3 for alpha chain variable domain of TCR clone 275894 (TRAV12-3, TRAJ40)
CAMSPGTYKSIF

SEQ ID NO: 551788 - protein, 15 aa, Homo sapiens
  CDR3 for beta chain variable domain of TCR clone 275894 (TRBV7-3, TRBJ2-2)
CASSETGQGTGELFF

SEQ ID NO: 551789 - protein, 13 aa, Homo sapiens
  CDR3 for alpha chain variable domain of TCR clone 275895 (TRAV12-2, TRAJ52)
FAVSGTSYGKLTF

SEQ ID NO: 551790 - protein, 16 aa, Homo sapiens
  CDR3 for beta chain variable domain of TCR clone 275895 (TRBV5-7, TRBJ2-7)
CASSPTSGRELDEQYF

SEQ ID NO: 551791 - protein, 16 aa, Homo sapiens
  CDR3 for alpha chain variable domain of TCR clone 275896 (TRAV30, TRAJ24)
CGTEIVDADSWGKFQF

SEQ ID NO: 551792 - protein, 18 aa, Homo sapiens
  CDR3 for beta chain variable domain of TCR clone 275896 (TRBV11-2, TRBJ2-6)
CASSLNPFLGTGANGLTF

SEQ ID NO: 551793 - protein, 13 aa, Homo sapiens
  CDR3 for alpha chain variable domain of TCR clone 275897 (TRAV17, TRAJ9)
CSTFLTGGFKTIF

SEQ ID NO: 551794 - protein, 13 aa, Homo sapiens
  CDR3 for beta chain variable domain of TCR clone 275897 (TRBV4-2, TRBJ1-1)
CASSQAGNTEAFF

SEQ ID NO: 551795 - protein, 19 aa, Homo sapiens
  CDR3 for alpha chain variable domain of TCR clone 275898 (TRAV2, TRAJ20)
ILQVREADAAVYRDCKLCF

SEQ ID NO: 551796 - protein, 13 aa, Homo sapiens
  CDR3 for beta chain variable domain of TCR clone 275898 (TRBV7-3, TRBJ1-1)
CASSQYWGAEAFF

SEQ ID NO: 551797 - protein, 15 aa, Homo sapiens
  CDR3 for alpha chain variable domain of TCR clone 275899 (TRAV12-1, TRAJ44)
CVVFVNTGTASKLTF

SEQ ID NO: 551798 - protein, 16 aa, Homo sapiens
  CDR3 for beta chain variable domain of TCR clone 275899 (TRBV20-1, TRBJ2-5)
CSRGGTSGGYMETQYF

SEQ ID NO: 551799 - protein, 15 aa, Homo sapiens
  CDR3 for alpha chain variable domain of TCR clone 275900 (TRAV8-6, TRAJ38)
CAVSSNAGNNRKLIW

SEQ ID NO: 551800 - protein, 13 aa, Homo sapiens
  CDR3 for beta chain variable domain of TCR clone 275900 (TRBV7-9, TRBJ1-2)
CASSLKQNYGYTF

SEQ ID NO: 551801 - protein, 14 aa, Homo sapiens
  CDR3 for alpha chain variable domain of TCR clone 275901 (TRAV1-2, TRAJ16)
CSVNRFSDGQKLLF

SEQ ID NO: 551802 - protein, 17 aa, Homo sapiens
  CDR3 for beta chain variable domain of TCR clone 275901 (TRBV28, TRBJ2-5)
CASSFWGEWGGQETQYF

SEQ ID NO: 551803 - protein, 14 aa, Homo sapiens
  CDR3 for alpha chain variable domain of TCR clone 275902 (TRAV1-1, TRAJ27)
CAVIYNTNAGKSTF

SEQ ID NO: 551804 - protein, 15 aa, Homo sapiens
  CDR3 for beta chain variable domain of TCR clone 275902 (TRBV7-9, TRBJ1-4)
CASSRTGGFNEKLFF

SEQ ID NO: 551805 - protein, 13 aa, Homo sapiens
  CDR3 for alpha chain variable domain of TCR clone 275903 (TRAV13-1, TRAJ5)
CAASDTGRRALTF

SEQ ID NO: 551806 - protein, 14 aa, Homo sapiens
  CDR3 for beta chain variable domain of TCR clone 275903 (TRBV7-9, TRBJ2-7)
CASSLGGSSYEQYF

SEQ ID NO: 551807 - protein, 14 aa, Homo sapiens
  CDR3 for alpha chain variable domain of TCR clone 275904 (TRAV17, TRAJ57)
CATDPQGGFEKLVF

SEQ ID NO: 551808 - protein, 15 aa, Homo sapiens
  CDR3 for beta chain variable domain of TCR clone 275904 (TRBV5-1, TRBJ2-7)
CASSLDLTSSYEQYF

SEQ ID NO: 551809 - protein, 14 aa, Homo sapiens
  CDR3 for alpha chain variable domain of TCR clone 275905 (TRAV17, TRAJ16)
CATADFSDDQKLLF

SEQ ID NO: 551810 - protein, 12 aa, Homo sapiens
  CDR3 for beta chain variable domain of TCR clone 275905 (TRBV24-1, TRBJ1-1)
CATLYPDTEAFF

SEQ ID NO: 551811 - protein, 16 aa, Homo sapiens
  CDR3 for alpha chain variable domain of TCR clone 275906 (TRAV26-2, TRAJ45)
CTTASPIGGGADGLTF

SEQ ID NO: 551812 - protein, 20 aa, Homo sapiens
  CDR3 for beta chain variable domain of TCR clone 275906 (TRBV28, TRBJ2-7)
CASTPIGRSPGLAGGDEQFF

SEQ ID NO: 551813 - protein, 14 aa, Homo sapiens
  CDR3 for alpha chain variable domain of TCR clone 275907 (TRAV1-2, TRAJ16)
CAVNRFSDGQKLLF

SEQ ID NO: 551814 - protein, 16 aa, Homo sapiens
  CDR3 for beta chain variable domain of TCR clone 275907 (TRBV5-4, TRBJ2-3)
CASSLGAGGPSDTQYF

SEQ ID NO: 551815 - protein, 17 aa, Homo sapiens
  CDR3 for alpha chain variable domain of TCR clone 275908 (TRAV23/DV6, TRAJ57)
CAASSTLSQGGSEKLVF

SEQ ID NO: 551816 - protein, 15 aa, Homo sapiens
  CDR3 for beta chain variable domain of TCR clone 275908 (TRBV2, TRBJ2-5)
CASSEQGLIGETQYF

SEQ ID NO: 551817 - protein, 13 aa, Homo sapiens
  CDR3 for alpha chain variable domain of TCR clone 275909 (TRAV23/DV6, TRAJ34)
CAAIENNTDKLIF

SEQ ID NO: 551818 - protein, 18 aa, Homo sapiens
  CDR3 for beta chain variable domain of TCR clone 275909 (TRBV20-1, TRBJ2-6)
CSAETTPTHGPGANVLTF

SEQ ID NO: 551819 - protein, 13 aa, Homo sapiens
  CDR3 for alpha chain variable domain of TCR clone 275910 (TRAV27, TRAJ56)
CAGKPGANSKLTL

SEQ ID NO: 551820 - protein, 15 aa, Homo sapiens
  CDR3 for beta chain variable domain of TCR clone 275910 (TRBV6-1, TRBJ2-3)
CASSERWDSTDTQYF

SEQ ID NO: 551821 - protein, 12 aa, Homo sapiens
  CDR3 for alpha chain variable domain of TCR clone 275911 (TRAV29/DV5, TRAJ53)
CAASGGNYKLTF

SEQ ID NO: 551822 - protein, 15 aa, Homo sapiens
  CDR3 for beta chain variable domain of TCR clone 275911 (TRBV11-3, TRBJ2-3)
CASLKDGREGDTQYF

SEQ ID NO: 551823 - protein, 12 aa, Homo sapiens
  CDR3 for alpha chain variable domain of TCR clone 275912 (TRAV21, TRAJ47)
CAAMEYGNKLVF

SEQ ID NO: 551824 - protein, 14 aa, Homo sapiens
  CDR3 for beta chain variable domain of TCR clone 275912 (TRBV25-1, TRBJ1-1)
CASTHLGGNTEAFF

SEQ ID NO: 551825 - protein, 11 aa, Homo sapiens
  CDR3 for alpha chain variable domain of TCR clone 275913 (TRAV3, TRAJ21)
CAVGNFNKFYF

SEQ ID NO: 551826 - protein, 14 aa, Homo sapiens
  CDR3 for beta chain variable domain of TCR clone 275913 (TRBV13, TRBJ2-5)
CASSLGPRGETQYF

SEQ ID NO: 551827 - protein, 11 aa, Homo sapiens
  CDR3 for alpha chain variable domain of TCR clone 275914 (TRAV12-3, TRAJ27)
CAMVNAGKSTF

SEQ ID NO: 551828 - protein, 14 aa, Homo sapiens
  CDR3 for beta chain variable domain of TCR clone 275914 (TRBV25-1, TRBJ1-1)
CASTHLGGNTEAFF

SEQ ID NO: 551829 - protein, 15 aa, Homo sapiens
  CDR3 for alpha chain variable domain of TCR clone 275915 (TRAV10, TRAJ42)
SLLHLWGGSQGNLIF

SEQ ID NO: 551830 - protein, 14 aa, Homo sapiens
  CDR3 for beta chain variable domain of TCR clone 275915 (TRBV25-1, TRBJ1-1)
CASTHLGGNTEAFF

SEQ ID NO: 551831 - protein, 15 aa, Homo sapiens
  CDR3 for alpha chain variable domain of TCR clone 275916 (TRAV12-3, TRAJ6)
CAMSATSGGSYIPTS

SEQ ID NO: 551832 - protein, 11 aa, Homo sapiens
  CDR3 for beta chain variable domain of TCR clone 275916 (TRBV20-1, TRBJ1-5)
SSAQGDQPQHF

SEQ ID NO: 551833 - protein, 14 aa, Homo sapiens
  CDR3 for alpha chain variable domain of TCR clone 275917 (TRAV17, TRAJ54)
CTTDANQGAQKLVF

SEQ ID NO: 551834 - protein, 12 aa, Homo sapiens
  CDR3 for beta chain variable domain of TCR clone 275917 (TRBV6-3, TRBJ2-1)
CASSGSYNELFF

SEQ ID NO: 551835 - protein, 16 aa, Homo sapiens
  CDR3 for alpha chain variable domain of TCR clone 275918 (TRAV8-3, TRAJ44)
CAVGASNTGTASKLTF

SEQ ID NO: 551836 - protein, 15 aa, Homo sapiens
  CDR3 for beta chain variable domain of TCR clone 275918 (TRBV27, TRBJ1-5)
CASTFNRGSNQTQQF

SEQ ID NO: 551837 - protein, 15 aa, Homo sapiens
  CDR3 for alpha chain variable domain of TCR clone 275919 (TRAV12-1, TRAJ45)
CVVLSGGGGADGLTC

SEQ ID NO: 551838 - protein, 15 aa, Homo sapiens
  CDR3 for beta chain variable domain of TCR clone 275919 (TRBV20-1, TRBJ2-7)
CSARDRVSGMDEQYF

SEQ ID NO: 551839 - protein, 12 aa, Homo sapiens
  CDR3 for alpha chain variable domain of TCR clone 275920 (TRAV8-3, TRAJ20)
CAVDFNDYNLSF

SEQ ID NO: 551840 - protein, 17 aa, Homo sapiens
  CDR3 for beta chain variable domain of TCR clone 275920 (TRBV7-8, TRBJ2-6)
CASSAGTGGAGANVLTF

SEQ ID NO: 551841 - protein, 14 aa, Homo sapiens
  CDR3 for alpha chain variable domain of TCR clone 275921 (TRAV8-3, TRAJ39)
CAVGANNAGDMLTF

SEQ ID NO: 551842 - protein, 16 aa, Homo sapiens
  CDR3 for beta chain variable domain of TCR clone 275921 (TRBV6-1, TRBJ2-5)
CASSETLDGGAETQYF

SEQ ID NO: 551843 - protein, 15 aa, Homo sapiens
  CDR3 for alpha chain variable domain of TCR clone 275922 (TRAV26-1, TRAJ42)
CIVTYYGGSQGNLIF

SEQ ID NO: 551844 - protein, 16 aa, Homo sapiens
  CDR3 for beta chain variable domain of TCR clone 275922 (TRBV7-3, TRBJ2-2)
CASSLKRGTLSGELFF

SEQ ID NO: 551845 - protein, 15 aa, Homo sapiens
  CDR3 for alpha chain variable domain of TCR clone 275923 (TRAV2, TRAJ9)
CAVAALNTGGFKTIF

SEQ ID NO: 551846 - protein, 14 aa, Homo sapiens
  CDR3 for beta chain variable domain of TCR clone 275923 (TRBV7-2, TRBJ2-5)
CASSFTQGQETQYF

SEQ ID NO: 551847 - protein, 14 aa, Homo sapiens
  CDR3 for alpha chain variable domain of TCR clone 275924 (TRAV8-6, TRAJ52)
CAVIGGTSYGKLTF

SEQ ID NO: 551848 - protein, 14 aa, Homo sapiens
  CDR3 for beta chain variable domain of TCR clone 275924 (TRBV4-1, TRBJ2-2)
CASSQAVNTGELFF

SEQ ID NO: 551849 - protein, 13 aa, Homo sapiens
  CDR3 for alpha chain variable domain of TCR clone 275925 (TRAV21, TRAJ57)
CAATQGGSEKLVF

SEQ ID NO: 551850 - protein, 17 aa, Homo sapiens
  CDR3 for beta chain variable domain of TCR clone 275925 (TRBV11-2, TRBJ2-1)
CASSLYPPGVEYNEQFF

SEQ ID NO: 551851 - protein, 12 aa, Homo sapiens
  CDR3 for alpha chain variable domain of TCR clone 275926 (TRAV1-1, TRAJ29)
CAVISGNTPLVF

SEQ ID NO: 551852 - protein, 14 aa, Homo sapiens
  CDR3 for beta chain variable domain of TCR clone 275926 (TRBV2, TRBJ2-5)
CASSEVLAQETQYF

SEQ ID NO: 551853 - protein, 12 aa, Homo sapiens
  CDR3 for alpha chain variable domain of TCR clone 275927 (TRAV13-1, TRAJ43)
CAAGRFNNDMRF

SEQ ID NO: 551854 - protein, 14 aa, Homo sapiens
  CDR3 for beta chain variable domain of TCR clone 275927 (TRBV6-3, TRBJ2-5)
CASRRDGGEETQDF

SEQ ID NO: 551855 - protein, 11 aa, Homo sapiens
  CDR3 for alpha chain variable domain of TCR clone 275928 (TRAV1-1, TRAJ23)
CAVRQGGKLIF

SEQ ID NO: 551856 - protein, 17 aa, Homo sapiens
  CDR3 for beta chain variable domain of TCR clone 275928 (TRBV4-1, TRBJ2-3)
CASSQGYVSGGTDTQYF

SEQ ID NO: 551857 - protein, 17 aa, Homo sapiens
  CDR3 for alpha chain variable domain of TCR clone 275929 (TRAV8-6, TRAJ58)
CAVSSWVGETSGSRLTF

SEQ ID NO: 551858 - protein, 15 aa, Homo sapiens
  CDR3 for beta chain variable domain of TCR clone 275929 (TRBV7-2, TRBJ2-1)
CASTHGTGIYNEQFF

SEQ ID NO: 551859 - protein, 14 aa, Homo sapiens
  CDR3 for alpha chain variable domain of TCR clone 275930 (TRAV16, TRAJ26)
CALSSANYVQNFVF

SEQ ID NO: 551860 - protein, 12 aa, Homo sapiens
  CDR3 for beta chain variable domain of TCR clone 275930 (TRBV6-5, TRBJ2-2)
CASRTGTGELFF

SEQ ID NO: 551861 - protein, 15 aa, Homo sapiens
  CDR3 for alpha chain variable domain of TCR clone 275931 (TRAV3, TRAJ7)
RAVRDKDNGNNRLAF

SEQ ID NO: 551862 - protein, 19 aa, Homo sapiens
  CDR3 for beta chain variable domain of TCR clone 275931 (TRBV5-8, TRBJ2-3)
CASSFLGTSGSHRTDTQYF

SEQ ID NO: 551863 - protein, 14 aa, Homo sapiens
  CDR3 for alpha chain variable domain of TCR clone 275932 (TRAV1-2, TRAJ8)
CAVREDTGFQQLVF

SEQ ID NO: 551864 - protein, 15 aa, Homo sapiens
  CDR3 for beta chain variable domain of TCR clone 275932 (TRBV9, TRBJ1-6)
CASSVAGTGDSPLHF

SEQ ID NO: 551865 - protein, 15 aa, Homo sapiens
  CDR3 for alpha chain variable domain of TCR clone 275933 (TRAV3, TRAJ3)
CAVRDRDSSASKIIF

SEQ ID NO: 551866 - protein, 13 aa, Homo sapiens
  CDR3 for beta chain variable domain of TCR clone 275933 (TRBV11-3, TRBJ2-3)
CASSHDTKDTQYF

SEQ ID NO: 551867 - protein, 18 aa, Homo sapiens
  CDR3 for alpha chain variable domain of TCR clone 275934 (TRAV26-1, TRAJ52)
CIVRVAGACGTSYGKLTF

SEQ ID NO: 551868 - protein, 13 aa, Homo sapiens
  CDR3 for beta chain variable domain of TCR clone 275934 (TRBV7-8, TRBJ1-2)
CASSAQSYYGYTF

SEQ ID NO: 551869 - protein, 13 aa, Homo sapiens
  CDR3 for alpha chain variable domain of TCR clone 275935 (TRAV1-1, TRAJ38)
SASNAGNNRKLIW

SEQ ID NO: 551870 - protein, 14 aa, Homo sapiens
  CDR3 for beta chain variable domain of TCR clone 275935 (TRBV15, TRBJ2-1)
CATSGVEDYNEQFF

SEQ ID NO: 551871 - protein, 14 aa, Homo sapiens
  CDR3 for alpha chain variable domain of TCR clone 275936 (TRAV12-2, TRAJ13)
CAVKKTGGYQKVTF

SEQ ID NO: 551872 - protein, 15 aa, Homo sapiens
  CDR3 for beta chain variable domain of TCR clone 275936 (TRBV28, TRBJ2-1)
CASSIIAGGRIEQFF

SEQ ID NO: 551873 - protein, 19 aa, Homo sapiens
  CDR3 for alpha chain variable domain of TCR clone 275937 (TRAV1-2, TRAJ26)
CLLPLCCERPDNYGQNFVF

SEQ ID NO: 551874 - protein, 13 aa, Homo sapiens
  CDR3 for beta chain variable domain of TCR clone 275937 (TRBV19, TRBJ1-2)
CASSQGQVYGYTF

SEQ ID NO: 551875 - protein, 15 aa, Homo sapiens
  CDR3 for alpha chain variable domain of TCR clone 275938 (TRAV8-3, TRAJ45)
CASSYSGGGADGLTF

SEQ ID NO: 551876 - protein, 16 aa, Homo sapiens
  CDR3 for beta chain variable domain of TCR clone 275938 (TRBV11-2, TRBJ2-7)
CASSPIAGGPRYEQYF

SEQ ID NO: 551877 - protein, 15 aa, Homo sapiens
  CDR3 for alpha chain variable domain of TCR clone 275939 (TRAV4, TRAJ39)
CLVGPNNSAGNMLTF

SEQ ID NO: 551878 - protein, 16 aa, Homo sapiens
  CDR3 for beta chain variable domain of TCR clone 275939 (TRBV13, TRBJ2-2)
CASSPRTGAHTGELFF

SEQ ID NO: 551879 - protein, 13 aa, Homo sapiens
  CDR3 for alpha chain variable domain of TCR clone 275940 (TRAV8-6, TRAJ49)
CAVITNTGNRFYF

SEQ ID NO: 551880 - protein, 15 aa, Homo sapiens
  CDR3 for beta chain variable domain of TCR clone 275940 (TRBV9, TRBJ1-6)
CASSVAGTGDSHLHF

SEQ ID NO: 551881 - protein, 13 aa, Homo sapiens
  CDR3 for alpha chain variable domain of TCR clone 275941 (TRAV30, TRAJ24)
CGTVTDSWGKLQF

SEQ ID NO: 551882 - protein, 15 aa, Homo sapiens
  CDR3 for beta chain variable domain of TCR clone 275941 (TRBV25-1, TRBJ1-4)
CASSKGGGIGGNMFF

SEQ ID NO: 551883 - protein, 12 aa, Homo sapiens
  CDR3 for alpha chain variable domain of TCR clone 275942 (TRAV21, TRAJ11)
CAATSGYSTLTF

SEQ ID NO: 551884 - protein, 16 aa, Homo sapiens
  CDR3 for beta chain variable domain of TCR clone 275942 (TRBV5-7, TRBJ1-2)
CASSRGVTGGSYGHTF

SEQ ID NO: 551885 - protein, 12 aa, Homo sapiens
  CDR3 for alpha chain variable domain of TCR clone 275943 (TRAV10, TRAJ6)
CVVSEGSYIPKF

SEQ ID NO: 551886 - protein, 15 aa, Homo sapiens
  CDR3 for beta chain variable domain of TCR clone 275943 (TRBV4-3, TRBJ2-7)
CASSQGGRGIYEQYF

SEQ ID NO: 551887 - protein, 16 aa, Homo sapiens
  CDR3 for alpha chain variable domain of TCR clone 275944 (TRAV17, TRAJ28)
CATASVSGAGSYQLTF

SEQ ID NO: 551888 - protein, 11 aa, Homo sapiens
  CDR3 for beta chain variable domain of TCR clone 275944 (TRBV7-9, TRBJ2-5)
CASSLGETQYV

SEQ ID NO: 551889 - protein, 14 aa, Homo sapiens
  CDR3 for alpha chain variable domain of TCR clone 275945 (TRAV35, TRAJ22)
CAGLRPGSARQLTF

SEQ ID NO: 551890 - protein, 13 aa, Homo sapiens
  CDR3 for beta chain variable domain of TCR clone 275945 (TRBV20-1, TRBJ2-7)
CSATHTSGYEQFF

SEQ ID NO: 551891 - protein, 14 aa, Homo sapiens
  CDR3 for alpha chain variable domain of TCR clone 275946 (TRAV1-2, TRAJ8)
CAVREDTGFQKLVF

SEQ ID NO: 551892 - protein, 14 aa, Homo sapiens
  CDR3 for beta chain variable domain of TCR clone 275946 (TRBV2, TRBJ1-5)
CASSGTVSNQTQHF

SEQ ID NO: 551893 - protein, 16 aa, Homo sapiens
  CDR3 for alpha chain variable domain of TCR clone 275947 (TRAV12-2, TRAJ45)
CAVKRNPGGGADGLTF

SEQ ID NO: 551894 - protein, 15 aa, Homo sapiens
  CDR3 for beta chain variable domain of TCR clone 275947 (TRBV19, TRBJ1-1)
CASTSGQIQNTEAFF

SEQ ID NO: 551895 - protein, 15 aa, Homo sapiens
  CDR3 for alpha chain variable domain of TCR clone 275948 (TRAV20, TRAJ24)
CAVQAAPDSWGKFQC

SEQ ID NO: 551896 - protein, 14 aa, Homo sapiens
  CDR3 for beta chain variable domain of TCR clone 275948 (TRBV20-1, TRBJ1-1)
CSARDRGQGSEAFF

SEQ ID NO: 551897 - protein, 14 aa, Homo sapiens
  CDR3 for alpha chain variable domain of TCR clone 275949 (TRAV12-2, TRAJ45)
CAVYSGGGADGLTF

SEQ ID NO: 551898 - protein, 13 aa, Homo sapiens
  CDR3 for beta chain variable domain of TCR clone 275949 (TRBV5-5, TRBJ1-2)
CASSVWRGEDYTF

SEQ ID NO: 551899 - protein, 12 aa, Homo sapiens
  CDR3 for alpha chain variable domain of TCR clone 275950 (TRAV1-1, TRAJ8)
WAGGTGFQKLVF

SEQ ID NO: 551900 - protein, 16 aa, Homo sapiens
  CDR3 for beta chain variable domain of TCR clone 275950 (TRBV12-5, TRBJ2-5)
CASGPRTSGNQETQYF

SEQ ID NO: 551901 - protein, 15 aa, Homo sapiens
  CDR3 for alpha chain variable domain of TCR clone 275951 (TRAV12-2, TRAJ43)
CAFDMRFGAGTSLPV

SEQ ID NO: 551902 - protein, 17 aa, Homo sapiens
  CDR3 for beta chain variable domain of TCR clone 275951 (TRBV13, TRBJ2-3)
CASSLSRVAGGRNTQYF

SEQ ID NO: 551903 - protein, 10 aa, Homo sapiens
  CDR3 for alpha chain variable domain of TCR clone 275952 (TRAV29/DV5, TRAJ54)
LIQGAQRLVF

SEQ ID NO: 551904 - protein, 18 aa, Homo sapiens
  CDR3 for beta chain variable domain of TCR clone 275952 (TRBV3-1, TRBJ1-2)
CASSQDVIGWNGDYGYTF

SEQ ID NO: 551905 - protein, 14 aa, Homo sapiens
  CDR3 for alpha chain variable domain of TCR clone 275953 (TRAV4, TRAJ9)
CLVGSGTGGFKTIF

SEQ ID NO: 551906 - protein, 19 aa, Homo sapiens
  CDR3 for beta chain variable domain of TCR clone 275953 (TRBV7-2, TRBJ2-3)
CASSFLSRNWGGGTDTQYF

SEQ ID NO: 551907 - protein, 14 aa, Homo sapiens
  CDR3 for alpha chain variable domain of TCR clone 275954 (TRAV1-1, TRAJ27)
CAVSDNTNAGKSTF

SEQ ID NO: 551908 - protein, 17 aa, Homo sapiens
  CDR3 for beta chain variable domain of TCR clone 275954 (TRBV11-2, TRBJ2-1)
CASSLYPPGVEYTEQFF

SEQ ID NO: 551909 - protein, 13 aa, Homo sapiens
  CDR3 for alpha chain variable domain of TCR clone 275955 (TRAV14/DV4, TRAJ49)
CAIVENTGNQFYF

SEQ ID NO: 551910 - protein, 13 aa, Homo sapiens
  CDR3 for beta chain variable domain of TCR clone 275955 (TRBV11-3, TRBJ2-1)
CASSSRRVDEQFF

SEQ ID NO: 551911 - protein, 14 aa, Homo sapiens
  CDR3 for alpha chain variable domain of TCR clone 275956 (TRAV13-2, TRAJ9)
CAENSFTGGFKTIF

SEQ ID NO: 551912 - protein, 13 aa, Homo sapiens
  CDR3 for beta chain variable domain of TCR clone 275956 (TRBV19, TRBJ2-7)
RASSIDRTYEQYF

SEQ ID NO: 551913 - protein, 16 aa, Homo sapiens
  CDR3 for alpha chain variable domain of TCR clone 275957 (TRAV12-3, TRAJ53)
CAMSPGSGGSNYKLTF

SEQ ID NO: 551914 - protein, 14 aa, Homo sapiens
  CDR3 for beta chain variable domain of TCR clone 275957 (TRBV6-1, TRBJ2-1)
CASAKDGFYNEQFF

SEQ ID NO: 551915 - protein, 19 aa, Homo sapiens
  CDR3 for alpha chain variable domain of TCR clone 275958 (TRAV38-1, TRAJ53)
CAFMKHGLESGGSNYKLTF

SEQ ID NO: 551916 - protein, 15 aa, Homo sapiens
  CDR3 for beta chain variable domain of TCR clone 275958 (TRBV20-1, TRBJ2-3)
CSARVVGSSTDTQYF

SEQ ID NO: 551917 - protein, 16 aa, Homo sapiens
  CDR3 for alpha chain variable domain of TCR clone 275959 (TRAV30, TRAJ24)
CGTEIVDADSWGKFQF

SEQ ID NO: 551918 - protein, 15 aa, Homo sapiens
  CDR3 for beta chain variable domain of TCR clone 275959 (TRBV7-3, TRBJ2-1)
CQQRQTSGRYNEQFF

SEQ ID NO: 551919 - protein, 15 aa, Homo sapiens
  CDR3 for alpha chain variable domain of TCR clone 275960 (TRAV17, TRAJ57)
CATGPSQGGSEKLVF

SEQ ID NO: 551920 - protein, 13 aa, Homo sapiens
  CDR3 for beta chain variable domain of TCR clone 275960 (TRBV6-5, TRBJ2-1)
CASIGETSKREFF

SEQ ID NO: 551921 - protein, 14 aa, Homo sapiens
  CDR3 for alpha chain variable domain of TCR clone 275961 (TRAV1-2, TRAJ16)
CAVNRFSDGQKLLF

SEQ ID NO: 551922 - protein, 14 aa, Homo sapiens
  CDR3 for beta chain variable domain of TCR clone 275961 (TRBV7-2, TRBJ2-7)
CASNLYPGRYEQYF

SEQ ID NO: 551923 - protein, 14 aa, Homo sapiens
  CDR3 for alpha chain variable domain of TCR clone 275962 (TRAV22, TRAJ40)
CAVDPTSGTYKYIF

SEQ ID NO: 551924 - protein, 16 aa, Homo sapiens
  CDR3 for beta chain variable domain of TCR clone 275962 (TRBV5-1, TRBJ2-7)
CASSFTTGTALVEQYF

SEQ ID NO: 551925 - protein, 14 aa, Homo sapiens
  CDR3 for alpha chain variable domain of TCR clone 275963 (TRAV23/DV6, TRAJ10)
CAAAISGGGNKLTF

SEQ ID NO: 551926 - protein, 12 aa, Homo sapiens
  CDR3 for beta chain variable domain of TCR clone 275963 (TRBV28, TRBJ2-7)
CASGVPPYEQYF

SEQ ID NO: 551927 - protein, 15 aa, Homo sapiens
  CDR3 for alpha chain variable domain of TCR clone 275964 (TRAV12-3, TRAJ6)
CAMSATTGGGYIPTF

SEQ ID NO: 551928 - protein, 13 aa, Homo sapiens
  CDR3 for beta chain variable domain of TCR clone 275964 (TRBV19, TRBJ2-5)
CASRDARRETQYF

SEQ ID NO: 551929 - protein, 14 aa, Homo sapiens
  CDR3 for alpha chain variable domain of TCR clone 275965 (TRAV12-2, TRAJ40)
CAVKIPSGTYKYIF

SEQ ID NO: 551930 - protein, 14 aa, Homo sapiens
  CDR3 for beta chain variable domain of TCR clone 275965 (TRBV20-1, TRBJ1-1)
SSAQTRIGGTEALF

SEQ ID NO: 551931 - protein, 14 aa, Homo sapiens
  CDR3 for alpha chain variable domain of TCR clone 275966 (TRAV29/DV5, TRAJ57)
CAASEMGGSEKLVF

SEQ ID NO: 551932 - protein, 14 aa, Homo sapiens
  CDR3 for beta chain variable domain of TCR clone 275966 (TRBV7-9, TRBJ2-1)
CASSPRDSLYEQFF

SEQ ID NO: 551933 - protein, 12 aa, Homo sapiens
  CDR3 for alpha chain variable domain of TCR clone 275967 (TRAV8-4, TRAJ43)
CAVSVNNNDVRF

SEQ ID NO: 551934 - protein, 18 aa, Homo sapiens
  CDR3 for beta chain variable domain of TCR clone 275967 (TRBV5-7, TRBJ2-2)
CASSLGASGGLNTGELFF

SEQ ID NO: 551935 - protein, 14 aa, Homo sapiens
  CDR3 for alpha chain variable domain of TCR clone 275968 (TRAV29/DV5, TRAJ48)
CAASANFGNEKLTF

SEQ ID NO: 551936 - protein, 13 aa, Homo sapiens
  CDR3 for beta chain variable domain of TCR clone 275968 (TRBV7-2, TRBJ1-1)
CASNLKGAKVAFF

SEQ ID NO: 551937 - protein, 16 aa, Homo sapiens
  CDR3 for alpha chain variable domain of TCR clone 275969 (TRAV21, TRAJ17)
CAVRPGEEAAGNKITL

SEQ ID NO: 551938 - protein, 16 aa, Homo sapiens
  CDR3 for beta chain variable domain of TCR clone 275969 (TRBV2, TRBJ2-7)
CASSEPWTGPSDEQYF

SEQ ID NO: 551939 - protein, 14 aa, Homo sapiens
  CDR3 for alpha chain variable domain of TCR clone 275970 (TRAV36/DV7, TRAJ44)
CCGANTGTASKLTF

SEQ ID NO: 551940 - protein, 13 aa, Homo sapiens
  CDR3 for beta chain variable domain of TCR clone 275970 (TRBV7-9, TRBJ2-1)
CASSLDVGNEQFF

SEQ ID NO: 551941 - protein, 14 aa, Homo sapiens
  CDR3 for alpha chain variable domain of TCR clone 275971 (TRAV13-1, TRAJ5)
CAASPGSRRRALTF

SEQ ID NO: 551942 - protein, 18 aa, Homo sapiens
  CDR3 for beta chain variable domain of TCR clone 275971 (TRBV11-2, TRBJ2-3)
CASSLGGASRGAPNTQYF

SEQ ID NO: 551943 - protein, 14 aa, Homo sapiens
  CDR3 for alpha chain variable domain of TCR clone 275972 (TRAV12-2, TRAJ53)
CAVKGGGSNYKLTF

SEQ ID NO: 551944 - protein, 14 aa, Homo sapiens
  CDR3 for beta chain variable domain of TCR clone 275972 (TRBV7-7, TRBJ2-2)
CATRQDSGAGELFF

SEQ ID NO: 551945 - protein, 14 aa, Homo sapiens
  CDR3 for alpha chain variable domain of TCR clone 275973 (TRAV13-1, TRAJ4)
CAASTPGGYNKLIF

SEQ ID NO: 551946 - protein, 17 aa, Homo sapiens
  CDR3 for beta chain variable domain of TCR clone 275973 (TRBV7-3, TRBJ2-3)
CASSLMKRMRGADTQYF

SEQ ID NO: 551947 - protein, 13 aa, Homo sapiens
  CDR3 for alpha chain variable domain of TCR clone 275974 (TRAV3, TRAJ16)
CAVRDRNGQKLLF

SEQ ID NO: 551948 - protein, 17 aa, Homo sapiens
  CDR3 for beta chain variable domain of TCR clone 275974 (TRBV4-3, TRBJ2-2)
CASSQDTSARSPGELFF

SEQ ID NO: 551949 - protein, 14 aa, Homo sapiens
  CDR3 for alpha chain variable domain of TCR clone 275975 (TRAV21, TRAJ10)
CAVALTGGGNKLTF

SEQ ID NO: 551950 - protein, 15 aa, Homo sapiens
  CDR3 for beta chain variable domain of TCR clone 275975 (TRBV12-4, TRBJ2-5)
CASSPPTGLQETQYF

SEQ ID NO: 551951 - protein, 13 aa, Homo sapiens
  CDR3 for alpha chain variable domain of TCR clone 275976 (TRAV1-2, TRAJ9)
CAALNTGGFKTIF

SEQ ID NO: 551952 - protein, 15 aa, Homo sapiens
  CDR3 for beta chain variable domain of TCR clone 275976 (TRBV11-2, TRBJ2-2)
CASSPSGGGTGELFF

SEQ ID NO: 551953 - protein, 15 aa, Homo sapiens
  CDR3 for alpha chain variable domain of TCR clone 275977 (TRAV25, TRAJ53)
CAATGGGGSNYKLTF

SEQ ID NO: 551954 - protein, 15 aa, Homo sapiens
  CDR3 for beta chain variable domain of TCR clone 275977 (TRBV7-9, TRBJ2-1)
CASSLGWGRANEQFF

SEQ ID NO: 551955 - protein, 15 aa, Homo sapiens
  CDR3 for alpha chain variable domain of TCR clone 275978 (TRAV38-1, TRAJ30)
CAFMMSYGGDDKIIF

SEQ ID NO: 551956 - protein, 17 aa, Homo sapiens
  CDR3 for beta chain variable domain of TCR clone 275978 (TRBV13, TRBJ2-3)
CASSLSRVAGGRNTQYF

SEQ ID NO: 551957 - protein, 14 aa, Homo sapiens
  CDR3 for alpha chain variable domain of TCR clone 275979 (TRAV2, TRAJ9)
CAVEDRSGGFKTIL

SEQ ID NO: 551958 - protein, 13 aa, Homo sapiens
  CDR3 for beta chain variable domain of TCR clone 275979 (TRBV12-4, TRBJ1-5)
CASSPDRAQPQHF

SEQ ID NO: 551959 - protein, 16 aa, Homo sapiens
  CDR3 for alpha chain variable domain of TCR clone 275980 (TRAV8-3, TRAJ8)
CAVPRDGNTGFQKLVF

SEQ ID NO: 551960 - protein, 13 aa, Homo sapiens
  CDR3 for beta chain variable domain of TCR clone 275980 (TRBV18, TRBJ1-1)
CASSGGRNTEAFF

SEQ ID NO: 551961 - protein, 14 aa, Homo sapiens
  CDR3 for alpha chain variable domain of TCR clone 275981 (TRAV26-1, TRAJ16)
CIVREPFRWPEAAL

SEQ ID NO: 551962 - protein, 12 aa, Homo sapiens
  CDR3 for beta chain variable domain of TCR clone 275981 (TRBV20-1, TRBJ2-1)
CSAQYTYNEQFF

SEQ ID NO: 551963 - protein, 14 aa, Homo sapiens
  CDR3 for alpha chain variable domain of TCR clone 275982 (TRAV1-2, TRAJ16)
CAVNRFSDGQKLLF

SEQ ID NO: 551964 - protein, 17 aa, Homo sapiens
  CDR3 for beta chain variable domain of TCR clone 275982 (TRBV4-2, TRBJ2-1)
CASSQEGGQGRGNEQFF

SEQ ID NO: 551965 - protein, 18 aa, Homo sapiens
  CDR3 for alpha chain variable domain of TCR clone 275983 (TRAV12-3, TRAJ22)
CANENDFWFCKATDLLIW

SEQ ID NO: 551966 - protein, 16 aa, Homo sapiens
  CDR3 for beta chain variable domain of TCR clone 275983 (TRBV20-1, TRBJ2-2)
CSARRPGTGNTGELFF

SEQ ID NO: 551967 - protein, 15 aa, Homo sapiens
  CDR3 for alpha chain variable domain of TCR clone 275984 (TRAV3, TRAJ29)
CAVRPGNSGNTHLVF

SEQ ID NO: 551968 - protein, 16 aa, Homo sapiens
  CDR3 for beta chain variable domain of TCR clone 275984 (TRBV24-1, TRBJ2-2)
CATSDPGTANTGELFF

SEQ ID NO: 551969 - protein, 12 aa, Homo sapiens
  CDR3 for alpha chain variable domain of TCR clone 275985 (TRAV12-3, TRAJ17)
CAMTLTGNKLTF

SEQ ID NO: 551970 - protein, 17 aa, Homo sapiens
  CDR3 for beta chain variable domain of TCR clone 275985 (TRBV20-1, TRBJ2-3)
CSAVSRTSGVSTDTQYF

SEQ ID NO: 551971 - protein, 16 aa, Homo sapiens
  CDR3 for alpha chain variable domain of TCR clone 275986 (TRAV13-1, TRAJ10)
CAAGDILTGGGNKLTF

SEQ ID NO: 551972 - protein, 15 aa, Homo sapiens
  CDR3 for beta chain variable domain of TCR clone 275986 (TRBV12-4, TRBJ2-7)
CASSQTGAISYEQYF

SEQ ID NO: 551973 - protein, 14 aa, Homo sapiens
  CDR3 for alpha chain variable domain of TCR clone 275987 (TRAV9-2, TRAJ39)
CALYIYNAGNMLTF

SEQ ID NO: 551974 - protein, 15 aa, Homo sapiens
  CDR3 for beta chain variable domain of TCR clone 275987 (TRBV27, TRBJ1-6)
CASSFDRGLGSTLHF

SEQ ID NO: 551975 - protein, 13 aa, Homo sapiens
  CDR3 for alpha chain variable domain of TCR clone 275988 (TRAV13-1, TRAJ37)
CAARSGNTGKLIF

SEQ ID NO: 551976 - protein, 14 aa, Homo sapiens
  CDR3 for beta chain variable domain of TCR clone 275988 (TRBV12-4, TRBJ2-3)
CVSSLGQGTDTQYF

SEQ ID NO: 551977 - protein, 15 aa, Homo sapiens
  CDR3 for alpha chain variable domain of TCR clone 275989 (TRAV35, TRAJ50)
CAEQLRKTSYDKVIF

SEQ ID NO: 551978 - protein, 12 aa, Homo sapiens
  CDR3 for beta chain variable domain of TCR clone 275989 (TRBV5-1, TRBJ2-5)
CASSLGLETQYF

SEQ ID NO: 551979 - protein, 11 aa, Homo sapiens
  CDR3 for alpha chain variable domain of TCR clone 275990 (TRAV35, TRAJ34)
CWARNTDKLIF

SEQ ID NO: 551980 - protein, 15 aa, Homo sapiens
  CDR3 for beta chain variable domain of TCR clone 275990 (TRBV7-9, TRBJ1-5)
CASSQGHQPNQPQHF

SEQ ID NO: 551981 - protein, 15 aa, Homo sapiens
  CDR3 for alpha chain variable domain of TCR clone 275991 (TRAV12-1, TRAJ8)
CVVNVENTGFQKLVF

SEQ ID NO: 551982 - protein, 17 aa, Homo sapiens
  CDR3 for beta chain variable domain of TCR clone 275991 (TRBV12-4, TRBJ1-6)
CASSLGRVFGHPSTLGT

SEQ ID NO: 551983 - protein, 15 aa, Homo sapiens
  CDR3 for alpha chain variable domain of TCR clone 275992 (TRAV3, TRAJ5)
CAVRGLDTGRRALTL

SEQ ID NO: 551984 - protein, 15 aa, Homo sapiens
  CDR3 for beta chain variable domain of TCR clone 275992 (TRBV20-1, TRBJ2-1)
CSARSPGGPGNEQFF

SEQ ID NO: 551985 - protein, 13 aa, Homo sapiens
  CDR3 for alpha chain variable domain of TCR clone 275993 (TRAV13-1, TRAJ21)
CAASIYNFNKFYF

SEQ ID NO: 551986 - protein, 15 aa, Homo sapiens
  CDR3 for beta chain variable domain of TCR clone 275993 (TRBV28, TRBJ2-1)
CASRVGLDEYNEQFF

SEQ ID NO: 551987 - protein, 11 aa, Homo sapiens
  CDR3 for alpha chain variable domain of TCR clone 275994 (TRAV1-1, TRAJ23)
CAVRQGGKLIF

SEQ ID NO: 551988 - protein, 13 aa, Homo sapiens
  CDR3 for beta chain variable domain of TCR clone 275994 (TRBV7-2, TRBJ2-2)
CASSSVRAGELFF

SEQ ID NO: 551989 - protein, 14 aa, Homo sapiens
  CDR3 for alpha chain variable domain of TCR clone 275995 (TRAV38-1, TRAJ40)
CALRPASGTYKYIF

SEQ ID NO: 551990 - protein, 14 aa, Homo sapiens
  CDR3 for beta chain variable domain of TCR clone 275995 (TRBV25-1, TRBJ1-1)
CASTHLGGNTEAFL

SEQ ID NO: 551991 - protein, 11 aa, Homo sapiens
  CDR3 for alpha chain variable domain of TCR clone 275996 (TRAV12-2, TRAJ39)
CAVNNMLTFGG

SEQ ID NO: 551992 - protein, 16 aa, Homo sapiens
  CDR3 for beta chain variable domain of TCR clone 275996 (TRBV9, TRBJ2-7)
CASSAGPDWSPYEQYF

SEQ ID NO: 551993 - protein, 14 aa, Homo sapiens
  CDR3 for alpha chain variable domain of TCR clone 275997 (TRAV13-1, TRAJ9)
CAASALTGGFKPIF

SEQ ID NO: 551994 - protein, 16 aa, Homo sapiens
  CDR3 for beta chain variable domain of TCR clone 275997 (TRBV12-4, TRBJ2-3)
CASSCGTGGISDTQYF

SEQ ID NO: 551995 - protein, 14 aa, Homo sapiens
  CDR3 for alpha chain variable domain of TCR clone 275998 (TRAV12-2, TRAJ11)
YAVRKNSGYSTLTF

SEQ ID NO: 551996 - protein, 14 aa, Homo sapiens
  CDR3 for beta chain variable domain of TCR clone 275998 (TRBV7-2, TRBJ2-5)
CASWEERFRETQYF

SEQ ID NO: 551997 - protein, 14 aa, Homo sapiens
  CDR3 for alpha chain variable domain of TCR clone 275999 (TRAV2, TRAJ9)
CAVEDRSGGFKTIF

SEQ ID NO: 551998 - protein, 14 aa, Homo sapiens
  CDR3 for beta chain variable domain of TCR clone 275999 (TRBV7-9, TRBJ2-5)
CASSLDTAQETQYF

SEQ ID NO: 551999 - protein, 11 aa, Homo sapiens
  CDR3 for alpha chain variable domain of TCR clone 276000 (TRAV2, TRAJ13)
CASWGYQKVTF

SEQ ID NO: 552000 - protein, 16 aa, Homo sapiens
  CDR3 for beta chain variable domain of TCR clone 276000 (TRBV10-3, TRBJ2-1)
CAISGVGDGGGGEQFF

SEQ ID NO: 552001 - protein, 16 aa, Homo sapiens
  CDR3 for alpha chain variable domain of TCR clone 276001 (TRAV3, TRAJ10)
CAVRDMRAGGGNKLTF

SEQ ID NO: 552002 - protein, 15 aa, Homo sapiens
  CDR3 for beta chain variable domain of TCR clone 276001 (TRBV9, TRBJ1-6)
CASGVAGTGDSPLHF

SEQ ID NO: 552003 - protein, 13 aa, Homo sapiens
  CDR3 for alpha chain variable domain of TCR clone 276002 (TRAV13-1, TRAJ21)
CAASIYNFNKFYF

SEQ ID NO: 552004 - protein, 13 aa, Homo sapiens
  CDR3 for beta chain variable domain of TCR clone 276002 (TRBV27, TRBJ1-4)
CASSLMGDKKLFF

SEQ ID NO: 552005 - protein, 15 aa, Homo sapiens
  CDR3 for alpha chain variable domain of TCR clone 276003 (TRAV26-1, TRAJ22)
CIVRVSFWFCNATDL

SEQ ID NO: 552006 - protein, 16 aa, Homo sapiens
  CDR3 for beta chain variable domain of TCR clone 276003 (TRBV24-1, TRBJ2-3)
CATSDPGTGATDTQYF

SEQ ID NO: 552007 - protein, 14 aa, Homo sapiens
  CDR3 for alpha chain variable domain of TCR clone 276004 (TRAV29/DV5, TRAJ44)
CAASALGTASKLTF

SEQ ID NO: 552008 - protein, 11 aa, Homo sapiens
  CDR3 for beta chain variable domain of TCR clone 276004 (TRBV29-1, TRBJ1-3)
CSVAIGNTIYV

SEQ ID NO: 552009 - protein, 15 aa, Homo sapiens
  CDR3 for alpha chain variable domain of TCR clone 276005 (TRAV26-1, TRAJ40)
CIVRVTSSGTYKYIF

SEQ ID NO: 552010 - protein, 12 aa, Homo sapiens
  CDR3 for beta chain variable domain of TCR clone 276005 (TRBV7-9, TRBJ1-4)
CASSTDREKLFF

SEQ ID NO: 552011 - protein, 11 aa, Homo sapiens
  CDR3 for alpha chain variable domain of TCR clone 276006 (TRAV38-1, TRAJ35)
CAFMSLDRLWE

SEQ ID NO: 552012 - protein, 13 aa, Homo sapiens
  CDR3 for beta chain variable domain of TCR clone 276006 (TRBV4-2, TRBJ1-1)
CASSQAGNTEAFF

SEQ ID NO: 552013 - protein, 15 aa, Homo sapiens
  CDR3 for alpha chain variable domain of TCR clone 276007 (TRAV12-3, TRAJ5)
CAMSGLGTGRRGLTF

SEQ ID NO: 552014 - protein, 15 aa, Homo sapiens
  CDR3 for beta chain variable domain of TCR clone 276007 (TRBV19, TRBJ1-1)
CASTSGQIQNTEAFF

SEQ ID NO: 552015 - protein, 12 aa, Homo sapiens
  CDR3 for alpha chain variable domain of TCR clone 276008 (TRAV17, TRAJ20)
CATQSNDYKLSF

SEQ ID NO: 552016 - protein, 13 aa, Homo sapiens
  CDR3 for beta chain variable domain of TCR clone 276008 (TRBV10-3, TRBJ1-1)
CASSPEGGTEAFF

SEQ ID NO: 552017 - protein, 13 aa, Homo sapiens
  CDR3 for alpha chain variable domain of TCR clone 276009 (TRAV8-3, TRAJ6)
CAVEKGGSYIPAF

SEQ ID NO: 552018 - protein, 15 aa, Homo sapiens
  CDR3 for beta chain variable domain of TCR clone 276009 (TRBV28, TRBJ2-5)
CASSADRGRGETQYF

SEQ ID NO: 552019 - protein, 18 aa, Homo sapiens
  CDR3 for alpha chain variable domain of TCR clone 276010 (TRAV12-3, TRAJ52)
CAMRRTNAGGTSYGKLTL

SEQ ID NO: 552020 - protein, 17 aa, Homo sapiens
  CDR3 for beta chain variable domain of TCR clone 276010 (TRBV7-3, TRBJ2-3)
CASSLMKRMRGADTQYF

SEQ ID NO: 552021 - protein, 17 aa, Homo sapiens
  CDR3 for alpha chain variable domain of TCR clone 276011 (TRAV14/DV4, TRAJ4)
CAMREASGRGGYNKLLF

SEQ ID NO: 552022 - protein, 14 aa, Homo sapiens
  CDR3 for beta chain variable domain of TCR clone 276011 (TRBV19, TRBJ2-7)
CASSMGQGAIEQYF

SEQ ID NO: 552023 - protein, 16 aa, Homo sapiens
  CDR3 for alpha chain variable domain of TCR clone 276012 (TRAV25, TRAJ53)
CAGTKGSGGSYYKLTF

SEQ ID NO: 552024 - protein, 17 aa, Homo sapiens
  CDR3 for beta chain variable domain of TCR clone 276012 (TRBV11-3, TRBJ2-6)
CASKWGQGLSGANVLSF

SEQ ID NO: 552025 - protein, 14 aa, Homo sapiens
  CDR3 for alpha chain variable domain of TCR clone 276013 (TRAV8-3, TRAJ21)
CAVGARDNFNKFYF

SEQ ID NO: 552026 - protein, 16 aa, Homo sapiens
  CDR3 for beta chain variable domain of TCR clone 276013 (TRBV20-1, TRBJ2-1)
CSARDLAGHSYNEQFF

SEQ ID NO: 552027 - protein, 17 aa, Homo sapiens
  CDR3 for alpha chain variable domain of TCR clone 276014 (TRAV3, TRAJ6)
CAVRDGPRAGGSYIPTF

SEQ ID NO: 552028 - protein, 15 aa, Homo sapiens
  CDR3 for beta chain variable domain of TCR clone 276014 (TRBV2, TRBJ2-1)
CASSDRSSGAREQFF

SEQ ID NO: 552029 - protein, 16 aa, Homo sapiens
  CDR3 for alpha chain variable domain of TCR clone 276015 (TRAV30, TRAJ24)
CGTEIVDADSWGKFQF

SEQ ID NO: 552030 - protein, 15 aa, Homo sapiens
  CDR3 for beta chain variable domain of TCR clone 276015 (TRBV20-1, TRBJ2-7)
CSARDRVSEMDEQYF

SEQ ID NO: 552031 - protein, 14 aa, Homo sapiens
  CDR3 for alpha chain variable domain of TCR clone 276016 (TRAV12-1, TRAJ36)
CVVNYWGKQPLLWD

SEQ ID NO: 552032 - protein, 13 aa, Homo sapiens
  CDR3 for beta chain variable domain of TCR clone 276016 (TRBV14, TRBJ1-1)
CASSREFATEAFF

SEQ ID NO: 552033 - protein, 22 aa, Homo sapiens
  CDR3 for alpha chain variable domain of TCR clone 276017 (TRAV3, TRAJ9)
CAVRLNTGGFKTILEQEKDYLL

SEQ ID NO: 552034 - protein, 15 aa, Homo sapiens
  CDR3 for beta chain variable domain of TCR clone 276017 (TRBV7-2, TRBJ2-1)
CASSLASGRVNEQFF

SEQ ID NO: 552035 - protein, 14 aa, Homo sapiens
  CDR3 for alpha chain variable domain of TCR clone 276018 (TRAV4, TRAJ6)
CLVGEAGGSYIPTC

SEQ ID NO: 552036 - protein, 13 aa, Homo sapiens
  CDR3 for beta chain variable domain of TCR clone 276018 (TRBV7-3, TRBJ1-1)
CASSQDWGAEAFF

SEQ ID NO: 552037 - protein, 14 aa, Homo sapiens
  CDR3 for alpha chain variable domain of TCR clone 276019 (TRAV35, TRAJ10)
CAGILTGGGNKLTF

SEQ ID NO: 552038 - protein, 15 aa, Homo sapiens
  CDR3 for beta chain variable domain of TCR clone 276019 (TRBV19, TRBJ1-5)
CASSIVWADNQPQHF

SEQ ID NO: 552039 - protein, 14 aa, Homo sapiens
  CDR3 for alpha chain variable domain of TCR clone 276020 (TRAV1-2, TRAJ8)
CAVREDTGFQKLVF

SEQ ID NO: 552040 - protein, 15 aa, Homo sapiens
  CDR3 for beta chain variable domain of TCR clone 276020 (TRBV3-1, TRBJ2-5)
CASSRGQASWKTQYF

SEQ ID NO: 552041 - protein, 15 aa, Homo sapiens
  CDR3 for alpha chain variable domain of TCR clone 276021 (TRAV4, TRAJ39)
CLVGPNNNAGTMLTF

SEQ ID NO: 552042 - protein, 12 aa, Homo sapiens
  CDR3 for beta chain variable domain of TCR clone 276021 (TRBV12-4, TRBJ2-7)
CASNPGGGEQYF

SEQ ID NO: 552043 - protein, 14 aa, Homo sapiens
  CDR3 for alpha chain variable domain of TCR clone 276022 (TRAV13-1, TRAJ35)
CAASKGGFGNVLHF

SEQ ID NO: 552044 - protein, 14 aa, Homo sapiens
  CDR3 for beta chain variable domain of TCR clone 276022 (TRBV5-1, TRBJ2-1)
CASSALWAGNEQFF

SEQ ID NO: 552045 - protein, 17 aa, Homo sapiens
  CDR3 for alpha chain variable domain of TCR clone 276023 (TRAV3, TRAJ6)
CAVRDGPRAGGSYIPTF

SEQ ID NO: 552046 - protein, 14 aa, Homo sapiens
  CDR3 for beta chain variable domain of TCR clone 276023 (TRBV7-2, TRBJ2-7)
GASNPKTSFYEQYF

SEQ ID NO: 552047 - protein, 13 aa, Homo sapiens
  CDR3 for alpha chain variable domain of TCR clone 276024 (TRAV35, TRAJ22)
CAGLSGSARQLTF

SEQ ID NO: 552048 - protein, 16 aa, Homo sapiens
  CDR3 for beta chain variable domain of TCR clone 276024 (TRBV7-9, TRBJ2-1)
CASSLVLTGQGNEKFF

SEQ ID NO: 552049 - protein, 12 aa, Homo sapiens
  CDR3 for alpha chain variable domain of TCR clone 276025 (TRAV17, TRAJ53)
CAFGGSNYKLPF

SEQ ID NO: 552050 - protein, 16 aa, Homo sapiens
  CDR3 for beta chain variable domain of TCR clone 276025 (TRBV11-2, TRBJ2-4)
CASSQEGRGGLDIQYF

SEQ ID NO: 552051 - protein, 16 aa, Homo sapiens
  CDR3 for alpha chain variable domain of TCR clone 276026 (TRAV20, TRAJ22)
CALHASSSGSARQLTF

SEQ ID NO: 552052 - protein, 13 aa, Homo sapiens
  CDR3 for beta chain variable domain of TCR clone 276026 (TRBV7-2, TRBJ2-5)
CASSQTSVETQYF

SEQ ID NO: 552053 - protein, 14 aa, Homo sapiens
  CDR3 for alpha chain variable domain of TCR clone 276027 (TRAV25, TRAJ22)
CAVRSSGSARQLTF

SEQ ID NO: 552054 - protein, 16 aa, Homo sapiens
  CDR3 for beta chain variable domain of TCR clone 276027 (TRBV4-2, TRBJ1-1)
CASGPSPGRAAPEAFF

SEQ ID NO: 552055 - protein, 11 aa, Homo sapiens
  CDR3 for alpha chain variable domain of TCR clone 276028 (TRAV3, TRAJ21)
FAVGNFNNFYF

SEQ ID NO: 552056 - protein, 17 aa, Homo sapiens
  CDR3 for beta chain variable domain of TCR clone 276028 (TRBV24-1, TRBJ2-1)
CATSDVSTSGTYSEQFF

SEQ ID NO: 552057 - protein, 12 aa, Homo sapiens
  CDR3 for alpha chain variable domain of TCR clone 276029 (TRAV4, TRAJ6)
CLAPGGSYIPTF

SEQ ID NO: 552058 - protein, 18 aa, Homo sapiens
  CDR3 for beta chain variable domain of TCR clone 276029 (TRBV20-1, TRBJ2-3)
CSASGLAGGPGTTDTQCF

SEQ ID NO: 552059 - protein, 11 aa, Homo sapiens
  CDR3 for alpha chain variable domain of TCR clone 276030 (TRAV21, TRAJ11)
CAVNGYSILTF

SEQ ID NO: 552060 - protein, 11 aa, Homo sapiens
  CDR3 for beta chain variable domain of TCR clone 276030 (TRBV19, TRBJ1-1)
CASSIGSEAFF

SEQ ID NO: 552061 - protein, 15 aa, Homo sapiens
  CDR3 for alpha chain variable domain of TCR clone 276031 (TRAV8-3, TRAJ45)
RASSYSGGGGDGLTF

SEQ ID NO: 552062 - protein, 13 aa, Homo sapiens
  CDR3 for beta chain variable domain of TCR clone 276031 (TRBV10-3, TRBJ2-7)
CASKLAVNYEQYF

SEQ ID NO: 552063 - protein, 12 aa, Homo sapiens
  CDR3 for alpha chain variable domain of TCR clone 276032 (TRAV12-3, TRAJ17)
CATTLTGNKLTF

SEQ ID NO: 552064 - protein, 15 aa, Homo sapiens
  CDR3 for beta chain variable domain of TCR clone 276032 (TRBV7-9, TRBJ1-6)
CASSSPGRGNSPLHF

SEQ ID NO: 552065 - protein, 14 aa, Homo sapiens
  CDR3 for alpha chain variable domain of TCR clone 276033 (TRAV13-1, TRAJ35)
CAASKGGFGNVLHC

SEQ ID NO: 552066 - protein, 15 aa, Homo sapiens
  CDR3 for beta chain variable domain of TCR clone 276033 (TRBV7-3, TRBJ2-1)
CASSLGRGPFGEQFF

SEQ ID NO: 552067 - protein, 13 aa, Homo sapiens
  CDR3 for alpha chain variable domain of TCR clone 276034 (TRAV8-3, TRAJ28)
CAVGAVGSYQLTF

SEQ ID NO: 552068 - protein, 14 aa, Homo sapiens
  CDR3 for beta chain variable domain of TCR clone 276034 (TRBV20-1, TRBJ1-1)
CSAQTRIGGTEAFF

SEQ ID NO: 552069 - protein, 12 aa, Homo sapiens
  CDR3 for alpha chain variable domain of TCR clone 276035 (TRAV8-3, TRAJ26)
CAGDNYGQNFVF

SEQ ID NO: 552070 - protein, 16 aa, Homo sapiens
  CDR3 for beta chain variable domain of TCR clone 276035 (TRBV15, TRBJ2-6)
CATSVNGGFLANVLTF

SEQ ID NO: 552071 - protein, 10 aa, Homo sapiens
  CDR3 for alpha chain variable domain of TCR clone 276036 (TRAV20, TRAJ22)
CATPARQLTF

SEQ ID NO: 552072 - protein, 14 aa, Homo sapiens
  CDR3 for beta chain variable domain of TCR clone 276036 (TRBV19, TRBJ2-1)
CASSMGSGATEQFF

SEQ ID NO: 552073 - protein, 14 aa, Homo sapiens
  CDR3 for alpha chain variable domain of TCR clone 276037 (TRAV12-3, TRAJ57)
CAMSAWGGSEKLVF

SEQ ID NO: 552074 - protein, 16 aa, Homo sapiens
  CDR3 for beta chain variable domain of TCR clone 276037 (TRBV7-9, TRBJ1-2)
CASSLGFSSGEDGYTF

SEQ ID NO: 552075 - protein, 14 aa, Homo sapiens
  CDR3 for alpha chain variable domain of TCR clone 276038 (TRAV12-2, TRAJ13)
CAVKKTGGYQKVTF

SEQ ID NO: 552076 - protein, 15 aa, Homo sapiens
  CDR3 for beta chain variable domain of TCR clone 276038 (TRBV19, TRBJ2-1)
CASSSPGVPLDEQSF

SEQ ID NO: 552077 - protein, 14 aa, Homo sapiens
  CDR3 for alpha chain variable domain of TCR clone 276039 (TRAV12-2, TRAJ13)
CAVKKTGGYQKVTF

SEQ ID NO: 552078 - protein, 12 aa, Homo sapiens
  CDR3 for beta chain variable domain of TCR clone 276039 (TRBV12-4, TRBJ2-3)
CASSLGQDTQYF

SEQ ID NO: 552079 - protein, 19 aa, Homo sapiens
  CDR3 for alpha chain variable domain of TCR clone 276040 (TRAV14/DV4, )
CAMREDIQNPDPAVYQLRN

SEQ ID NO: 552080 - protein, 12 aa, Homo sapiens
  CDR3 for beta chain variable domain of TCR clone 276040 (TRBV29-1, TRBJ2-3)
CSVTGGADTQYF

SEQ ID NO: 552081 - protein, 18 aa, Homo sapiens
  CDR3 for alpha chain variable domain of TCR clone 276041 (TRAV14/DV4, TRAJ15)
CAMREFPPTGQAGTALIF

SEQ ID NO: 552082 - protein, 16 aa, Homo sapiens
  CDR3 for beta chain variable domain of TCR clone 276041 (TRBV4-2, TRBJ1-1)
CASSQAGFGMNTEAFF

SEQ ID NO: 552083 - protein, 14 aa, Homo sapiens
  CDR3 for alpha chain variable domain of TCR clone 276042 (TRAV12-3, TRAJ15)
CAMIPPQAGTALIF

SEQ ID NO: 552084 - protein, 14 aa, Homo sapiens
  CDR3 for beta chain variable domain of TCR clone 276042 (TRBV20-1, TRBJ2-2)
CSARKRLTTGELVF

SEQ ID NO: 552085 - protein, 12 aa, Homo sapiens
  CDR3 for alpha chain variable domain of TCR clone 276043 (TRAV25, TRAJ11)
CSGYSGYSTLTF

SEQ ID NO: 552086 - protein, 18 aa, Homo sapiens
  CDR3 for beta chain variable domain of TCR clone 276043 (TRBV5-4, TRBJ2-3)
CASSPTAGFLPSTDTQYF

SEQ ID NO: 552087 - protein, 18 aa, Homo sapiens
  CDR3 for alpha chain variable domain of TCR clone 276044 (TRAV21, TRAJ52)
CAVRPSPSGGTSYGKLTF

SEQ ID NO: 552088 - protein, 14 aa, Homo sapiens
  CDR3 for beta chain variable domain of TCR clone 276044 (TRBV4-2, TRBJ2-1)
CASGLDRAYNEQFF

SEQ ID NO: 552089 - protein, 14 aa, Homo sapiens
  CDR3 for alpha chain variable domain of TCR clone 276045 (TRAV26-1, TRAJ38)
CVADNAGNNRKLSW

SEQ ID NO: 552090 - protein, 13 aa, Homo sapiens
  CDR3 for beta chain variable domain of TCR clone 276045 (TRBV20-1, TRBJ2-1)
CSARSSPRDEQFF

SEQ ID NO: 552091 - protein, 14 aa, Homo sapiens
  CDR3 for alpha chain variable domain of TCR clone 276046 (TRAV9-2, TRAJ39)
CALYIYNAGNMLTF

SEQ ID NO: 552092 - protein, 15 aa, Homo sapiens
  CDR3 for beta chain variable domain of TCR clone 276046 (TRBV20-1, TRBJ2-1)
CSASSAGSSYNEQFF

SEQ ID NO: 552093 - protein, 14 aa, Homo sapiens
  CDR3 for alpha chain variable domain of TCR clone 276047 (TRAV12-2, TRAJ13)
CAVRKTGGYQKVTF

SEQ ID NO: 552094 - protein, 14 aa, Homo sapiens
  CDR3 for beta chain variable domain of TCR clone 276047 (TRBV7-3, TRBJ1-1)
CDSSLGTGYTEAFF

SEQ ID NO: 552095 - protein, 16 aa, Homo sapiens
  CDR3 for alpha chain variable domain of TCR clone 276048 (TRAV12-3, TRAJ53)
CAMSPGSGVSNYKLTF

SEQ ID NO: 552096 - protein, 13 aa, Homo sapiens
  CDR3 for beta chain variable domain of TCR clone 276048 (TRBV12-5, TRBJ2-3)
CASGDRQSDTQYF

SEQ ID NO: 552097 - protein, 15 aa, Homo sapiens
  CDR3 for alpha chain variable domain of TCR clone 276049 (TRAV3, TRAJ22)
CAVRDRGGSARQLTF

SEQ ID NO: 552098 - protein, 14 aa, Homo sapiens
  CDR3 for beta chain variable domain of TCR clone 276049 (TRBV28, TRBJ2-1)
CASSYYTAYNEQFF

SEQ ID NO: 552099 - protein, 15 aa, Homo sapiens
  CDR3 for alpha chain variable domain of TCR clone 276050 (TRAV25, TRAJ52)
CAGTSGGTSYGKLTF

SEQ ID NO: 552100 - protein, 14 aa, Homo sapiens
  CDR3 for beta chain variable domain of TCR clone 276050 (TRBV5-7, TRBJ2-7)
CASSGGLSSYEQYF

SEQ ID NO: 552101 - protein, 17 aa, Homo sapiens
  CDR3 for alpha chain variable domain of TCR clone 276051 (TRAV3, TRAJ6)
CAVRDGPRAGGSYIPTI

SEQ ID NO: 552102 - protein, 16 aa, Homo sapiens
  CDR3 for beta chain variable domain of TCR clone 276051 (TRBV4-1, TRBJ2-7)
CASSLTAGQATYEQYF

SEQ ID NO: 552103 - protein, 11 aa, Homo sapiens
  CDR3 for alpha chain variable domain of TCR clone 276052 (TRAV12-2, TRAJ3)
CAVKRASKIIF

SEQ ID NO: 552104 - protein, 14 aa, Homo sapiens
  CDR3 for beta chain variable domain of TCR clone 276052 (TRBV4-1, TRBJ2-2)
CASSRAVNTGELFF

SEQ ID NO: 552105 - protein, 15 aa, Homo sapiens
  CDR3 for alpha chain variable domain of TCR clone 276053 (TRAV8-3, TRAJ40)
CAAPSLGSGTYKYIF

SEQ ID NO: 552106 - protein, 16 aa, Homo sapiens
  CDR3 for beta chain variable domain of TCR clone 276053 (TRBV7-9, TRBJ1-2)
CASSLGFSAGEDGYTF

SEQ ID NO: 552107 - protein, 12 aa, Homo sapiens
  CDR3 for alpha chain variable domain of TCR clone 276054 (TRAV2, TRAJ10)
CASTGGGNKLTF

SEQ ID NO: 552108 - protein, 15 aa, Homo sapiens
  CDR3 for beta chain variable domain of TCR clone 276054 (TRBV28, TRBJ2-1)
CASSIIAGGRSEQFF

SEQ ID NO: 552109 - protein, 12 aa, Homo sapiens
  CDR3 for alpha chain variable domain of TCR clone 276055 (TRAV17, TRAJ9)
CATTGLQNNLWS

SEQ ID NO: 552110 - protein, 11 aa, Homo sapiens
  CDR3 for beta chain variable domain of TCR clone 276055 (TRBV29-1, TRBJ2-5)
CSEDRTGTQYF

SEQ ID NO: 552111 - protein, 16 aa, Homo sapiens
  CDR3 for alpha chain variable domain of TCR clone 276056 (TRAV3, TRAJ37)
CAVRPHGSGNTGKLIF

SEQ ID NO: 552112 - protein, 16 aa, Homo sapiens
  CDR3 for beta chain variable domain of TCR clone 276056 (TRBV9, TRBJ1-2)
CASSVKEKVSPYGYTF

SEQ ID NO: 552113 - protein, 12 aa, Homo sapiens
  CDR3 for alpha chain variable domain of TCR clone 276057 (TRAV27, TRAJ35)
SAGADFGNVLHC

SEQ ID NO: 552114 - protein, 16 aa, Homo sapiens
  CDR3 for beta chain variable domain of TCR clone 276057 (TRBV6-1, TRBJ2-1)
CASILRQGSSYNEQFF

SEQ ID NO: 552115 - protein, 13 aa, Homo sapiens
  CDR3 for alpha chain variable domain of TCR clone 276058 (TRAV12-1, TRAJ17)
CVVFLTAGNKLTF

SEQ ID NO: 552116 - protein, 12 aa, Homo sapiens
  CDR3 for beta chain variable domain of TCR clone 276058 (TRBV11-2, TRBJ2-2)
CASSLGGGELFF

SEQ ID NO: 552117 - protein, 13 aa, Homo sapiens
  CDR3 for alpha chain variable domain of TCR clone 276059 (TRAV36/DV7, TRAJ49)
CAVEANTGNQFYF

SEQ ID NO: 552118 - protein, 15 aa, Homo sapiens
  CDR3 for beta chain variable domain of TCR clone 276059 (TRBV7-9, TRBJ2-3)
CASSHGDRVPDTQYF

SEQ ID NO: 552119 - protein, 16 aa, Homo sapiens
  CDR3 for alpha chain variable domain of TCR clone 276060 (TRAV30, TRAJ24)
CGTEIVDANSWGKFQF

SEQ ID NO: 552120 - protein, 14 aa, Homo sapiens
  CDR3 for beta chain variable domain of TCR clone 276060 (TRBV20-1, TRBJ1-1)
CSAQTRIGGTEAFF

SEQ ID NO: 552121 - protein, 14 aa, Homo sapiens
  CDR3 for alpha chain variable domain of TCR clone 276061 (TRAV8-3, TRAJ6)
CAVGASGRSYIPTF

SEQ ID NO: 552122 - protein, 17 aa, Homo sapiens
  CDR3 for beta chain variable domain of TCR clone 276061 (TRBV18, TRBJ2-2)
CASSPSDPWQNTGELFF

SEQ ID NO: 552123 - protein, 17 aa, Homo sapiens
  CDR3 for alpha chain variable domain of TCR clone 276062 (TRAV13-1, TRAJ52)
CAAGRNAGGTSYGKLTF

SEQ ID NO: 552124 - protein, 15 aa, Homo sapiens
  CDR3 for beta chain variable domain of TCR clone 276062 (TRBV2, TRBJ2-7)
CASTLLGSGAKEQYF

SEQ ID NO: 552125 - protein, 14 aa, Homo sapiens
  CDR3 for alpha chain variable domain of TCR clone 276063 (TRAV1-2, TRAJ16)
CAVNRFPDGQKLLF

SEQ ID NO: 552126 - protein, 11 aa, Homo sapiens
  CDR3 for beta chain variable domain of TCR clone 276063 (TRBV12-4, TRBJ2-3)
CASTATDTQYF

SEQ ID NO: 552127 - protein, 18 aa, Homo sapiens
  CDR3 for alpha chain variable domain of TCR clone 276064 (TRAV26-2, TRAJ45)
CILRVDKYSGGGAAGLTF

SEQ ID NO: 552128 - protein, 13 aa, Homo sapiens
  CDR3 for beta chain variable domain of TCR clone 276064 (TRBV29-1, TRBJ1-1)
CSVGDSRNTEAFF

SEQ ID NO: 552129 - protein, 13 aa, Homo sapiens
  CDR3 for alpha chain variable domain of TCR clone 276065 (TRAV8-3, TRAJ28)
CAVVSVVSYQLTF

SEQ ID NO: 552130 - protein, 14 aa, Homo sapiens
  CDR3 for beta chain variable domain of TCR clone 276065 (TRBV7-2, TRBJ2-7)
CASRSQGAAYEQYF

SEQ ID NO: 552131 - protein, 12 aa, Homo sapiens
  CDR3 for alpha chain variable domain of TCR clone 276066 (TRAV2, TRAJ40)
CCGTSGTYKYIF

SEQ ID NO: 552132 - protein, 16 aa, Homo sapiens
  CDR3 for beta chain variable domain of TCR clone 276066 (TRBV19, TRBJ2-2)
CASRSPGTGATGELFF

SEQ ID NO: 552133 - protein, 19 aa, Homo sapiens
  CDR3 for alpha chain variable domain of TCR clone 276067 (TRAV29/DV5, TRAJ49)
CSVLLCSKLTVDTGDQFYF

SEQ ID NO: 552134 - protein, 17 aa, Homo sapiens
  CDR3 for beta chain variable domain of TCR clone 276067 (TRBV13, TRBJ2-3)
CASSLSRVAGGRNTQYF

SEQ ID NO: 552135 - protein, 14 aa, Homo sapiens
  CDR3 for alpha chain variable domain of TCR clone 276068 (TRAV3, TRAJ9)
CAVRLNTGGFKTIF

SEQ ID NO: 552136 - protein, 15 aa, Homo sapiens
  CDR3 for beta chain variable domain of TCR clone 276068 (TRBV24-1, TRBJ2-1)
CATSEPGQGYNEQFF

SEQ ID NO: 552137 - protein, 12 aa, Homo sapiens
  CDR3 for alpha chain variable domain of TCR clone 276069 (TRAV13-1, TRAJ15)
CAASQAGTALIF

SEQ ID NO: 552138 - protein, 13 aa, Homo sapiens
  CDR3 for beta chain variable domain of TCR clone 276069 (TRBV10-3, TRBJ1-2)
CAISERDSYGYTS

SEQ ID NO: 552139 - protein, 16 aa, Homo sapiens
  CDR3 for alpha chain variable domain of TCR clone 276070 (TRAV3, TRAJ37)
CAVRGKGSGNTGKLLF

SEQ ID NO: 552140 - protein, 20 aa, Homo sapiens
  CDR3 for beta chain variable domain of TCR clone 276070 (TRBV7-8, TRBJ2-2)
CASSHLFPGPTIHITGELFF

SEQ ID NO: 552141 - protein, 11 aa, Homo sapiens
  CDR3 for alpha chain variable domain of TCR clone 276071 (TRAV21, TRAJ48)
CAVDGNENLTS

SEQ ID NO: 552142 - protein, 16 aa, Homo sapiens
  CDR3 for beta chain variable domain of TCR clone 276071 (TRBV12-4, TRBJ1-5)
CASSSGPRGSNQPQHF

SEQ ID NO: 552143 - protein, 11 aa, Homo sapiens
  CDR3 for alpha chain variable domain of TCR clone 276072 (TRAV2, TRAJ33)
CAVDSNYQLIW

SEQ ID NO: 552144 - protein, 13 aa, Homo sapiens
  CDR3 for beta chain variable domain of TCR clone 276072 (TRBV11-2, TRBJ2-5)
CASSFSSQETQYF

SEQ ID NO: 552145 - protein, 14 aa, Homo sapiens
  CDR3 for alpha chain variable domain of TCR clone 276073 (TRAV14/DV4, TRAJ41)
CARGGPDSGYAPNF

SEQ ID NO: 552146 - protein, 15 aa, Homo sapiens
  CDR3 for beta chain variable domain of TCR clone 276073 (TRBV19, TRBJ2-1)
CASSIQATSYNEQFF

SEQ ID NO: 552147 - protein, 14 aa, Homo sapiens
  CDR3 for alpha chain variable domain of TCR clone 276074 (TRAV12-2, TRAJ13)
CAVKKTGGYQKVTF

SEQ ID NO: 552148 - protein, 12 aa, Homo sapiens
  CDR3 for beta chain variable domain of TCR clone 276074 (TRBV7-3, TRBJ2-7)
RASKLRGYEQYF

SEQ ID NO: 552149 - protein, 18 aa, Homo sapiens
  CDR3 for alpha chain variable domain of TCR clone 276075 (TRAV13-1, TRAJ52)
CAASKRSAGGTTYGKLTF

SEQ ID NO: 552150 - protein, 13 aa, Homo sapiens
  CDR3 for beta chain variable domain of TCR clone 276075 (TRBV12-4, TRBJ1-2)
CASSLRQGKGYTF

SEQ ID NO: 552151 - protein, 15 aa, Homo sapiens
  CDR3 for alpha chain variable domain of TCR clone 276076 (TRAV3, TRAJ4)
CAVSPFSGGYNKLIF

SEQ ID NO: 552152 - protein, 14 aa, Homo sapiens
  CDR3 for beta chain variable domain of TCR clone 276076 (TRBV19, TRBJ2-1)
CASKDPGLANEQFF

SEQ ID NO: 552153 - protein, 16 aa, Homo sapiens
  CDR3 for alpha chain variable domain of TCR clone 276077 (TRAV8-3, TRAJ13)
CAVGAYPSGGYQKVTF

SEQ ID NO: 552154 - protein, 15 aa, Homo sapiens
  CDR3 for beta chain variable domain of TCR clone 276077 (TRBV20-1, TRBJ2-7)
CSAESGTSGAYEQYF

SEQ ID NO: 552155 - protein, 20 aa, Homo sapiens
  CDR3 for alpha chain variable domain of TCR clone 276078 (TRAV4, TRAJ29)
CCVLLPRGCVPFSGNTPLVF

SEQ ID NO: 552156 - protein, 17 aa, Homo sapiens
  CDR3 for beta chain variable domain of TCR clone 276078 (TRBV25-1, TRBJ2-7)
CASSDGRVVFSSYEQYF

SEQ ID NO: 552157 - protein, 14 aa, Homo sapiens
  CDR3 for alpha chain variable domain of TCR clone 276079 (TRAV35, TRAJ22)
CAGLRPGSARQLTF

SEQ ID NO: 552158 - protein, 14 aa, Homo sapiens
  CDR3 for beta chain variable domain of TCR clone 276079 (TRBV28, TRBJ2-1)
CASSLVAPYNEQFF

SEQ ID NO: 552159 - protein, 16 aa, Homo sapiens
  CDR3 for alpha chain variable domain of TCR clone 276080 (TRAV26-1, TRAJ45)
CIVEKYSGGVADGLTF

SEQ ID NO: 552160 - protein, 16 aa, Homo sapiens
  CDR3 for beta chain variable domain of TCR clone 276080 (TRBV10-3, TRBJ1-6)
CAISERRGQGNSPLHF

SEQ ID NO: 552161 - protein, 12 aa, Homo sapiens
  CDR3 for alpha chain variable domain of TCR clone 276081 (TRAV12-2, TRAJ39)
CREYNAGNMLTF

SEQ ID NO: 552162 - protein, 10 aa, Homo sapiens
  CDR3 for beta chain variable domain of TCR clone 276081 (TRBV2, TRBJ2-2)
CASSQPGLAG

SEQ ID NO: 552163 - protein, 14 aa, Homo sapiens
  CDR3 for alpha chain variable domain of TCR clone 276082 (TRAV12-1, TRAJ23)
CVGIVYNQGGKLIF

SEQ ID NO: 552164 - protein, 13 aa, Homo sapiens
  CDR3 for beta chain variable domain of TCR clone 276082 (TRBV11-2, TRBJ2-5)
CASSFSSQETQYF

SEQ ID NO: 552165 - protein, 16 aa, Homo sapiens
  CDR3 for alpha chain variable domain of TCR clone 276083 (TRAV3, TRAJ10)
CAVSDMRAGGGNKLTF

SEQ ID NO: 552166 - protein, 14 aa, Homo sapiens
  CDR3 for beta chain variable domain of TCR clone 276083 (TRBV6-1, TRBJ1-3)
CASVQGGGGNTIYF

SEQ ID NO: 552167 - protein, 12 aa, Homo sapiens
  CDR3 for alpha chain variable domain of TCR clone 276084 (TRAV26-1, TRAJ36)
CIVRVRADNLFF

SEQ ID NO: 552168 - protein, 14 aa, Homo sapiens
  CDR3 for beta chain variable domain of TCR clone 276084 (TRBV5-7, TRBJ1-1)
CASSLAGDWTEAFF

SEQ ID NO: 552169 - protein, 11 aa, Homo sapiens
  CDR3 for alpha chain variable domain of TCR clone 276085 (TRAV1-1, TRAJ23)
CAVRQGGKLIF

SEQ ID NO: 552170 - protein, 20 aa, Homo sapiens
  CDR3 for beta chain variable domain of TCR clone 276085 (TRBV7-8, TRBJ2-2)
CASSHLFPGPTVHITGEMFF

SEQ ID NO: 552171 - protein, 12 aa, Homo sapiens
  CDR3 for alpha chain variable domain of TCR clone 276086 (TRAV8-3, TRAJ41)
CAVALSGHALNF

SEQ ID NO: 552172 - protein, 16 aa, Homo sapiens
  CDR3 for beta chain variable domain of TCR clone 276086 (TRBV27, TRBJ2-7)
CASSSERRDSAYEQYF

SEQ ID NO: 552173 - protein, 18 aa, Homo sapiens
  CDR3 for alpha chain variable domain of TCR clone 276087 (TRAV21, TRAJ52)
CAVRPSPAGGTSYGKLTF

SEQ ID NO: 552174 - protein, 15 aa, Homo sapiens
  CDR3 for beta chain variable domain of TCR clone 276087 (TRBV20-1, TRBJ2-7)
CSARKGRAESYEQYF

SEQ ID NO: 552175 - protein, 14 aa, Homo sapiens
  CDR3 for alpha chain variable domain of TCR clone 276088 (TRAV12-3, TRAJ7)
CAMSEIGGNTRLAF

SEQ ID NO: 552176 - protein, 12 aa, Homo sapiens
  CDR3 for beta chain variable domain of TCR clone 276088 (TRBV5-4, TRBJ1-1)
CASSLDRREAFF

SEQ ID NO: 552177 - protein, 16 aa, Homo sapiens
  CDR3 for alpha chain variable domain of TCR clone 276089 (TRAV35, TRAJ50)
CAGHRKPPTTRRYLGQ

SEQ ID NO: 552178 - protein, 13 aa, Homo sapiens
  CDR3 for beta chain variable domain of TCR clone 276089 (TRBV7-7, TRBJ2-3)
CASSLSRADTQYF

SEQ ID NO: 552179 - protein, 16 aa, Homo sapiens
  CDR3 for alpha chain variable domain of TCR clone 276090 (TRAV3, TRAJ37)
CAVRPHGSGNTCKLIF

SEQ ID NO: 552180 - protein, 16 aa, Homo sapiens
  CDR3 for beta chain variable domain of TCR clone 276090 (TRBV9, TRBJ1-2)
CASSVEEKVSPYGHTF

SEQ ID NO: 552181 - protein, 17 aa, Homo sapiens
  CDR3 for alpha chain variable domain of TCR clone 276091 (TRAV23/DV6, TRAJ57)
CAASSTLSQGGSETLVF

SEQ ID NO: 552182 - protein, 17 aa, Homo sapiens
  CDR3 for beta chain variable domain of TCR clone 276091 (TRBV10-3, TRBJ2-6)
CAISESTAPSGANVLTF

SEQ ID NO: 552183 - protein, 11 aa, Homo sapiens
  CDR3 for alpha chain variable domain of TCR clone 276092 (TRAV2, TRAJ33)
CAVDSNYQLIW

SEQ ID NO: 552184 - protein, 17 aa, Homo sapiens
  CDR3 for beta chain variable domain of TCR clone 276092 (TRBV11-2, TRBJ2-1)
CGSSLYPPGVEYNEQFF

SEQ ID NO: 552185 - protein, 16 aa, Homo sapiens
  CDR3 for alpha chain variable domain of TCR clone 276093 (TRAV30, TRAJ24)
CGTEIVDPDSWGKFQF

SEQ ID NO: 552186 - protein, 19 aa, Homo sapiens
  CDR3 for beta chain variable domain of TCR clone 276093 (TRBV25-1, TRBJ2-2)
CAILVYRVDRGRKTGELFF

SEQ ID NO: 552187 - protein, 11 aa, Homo sapiens
  CDR3 for alpha chain variable domain of TCR clone 276094 (TRAV3, TRAJ21)
CAVGNFNKFYF

SEQ ID NO: 552188 - protein, 16 aa, Homo sapiens
  CDR3 for beta chain variable domain of TCR clone 276094 (TRBV19, TRBJ2-1)
CASSKAGPRSYPEQFF

SEQ ID NO: 552189 - protein, 15 aa, Homo sapiens
  CDR3 for alpha chain variable domain of TCR clone 276095 (TRAV23/DV6, TRAJ33)
RAASNSGGGNYQLIW

SEQ ID NO: 552190 - protein, 14 aa, Homo sapiens
  CDR3 for beta chain variable domain of TCR clone 276095 (TRBV7-2, TRBJ2-7)
CASSLYPGRYEQYF

SEQ ID NO: 552191 - protein, 13 aa, Homo sapiens
  CDR3 for alpha chain variable domain of TCR clone 276096 (TRAV17, TRAJ26)
CATVDNYGQNFVF

SEQ ID NO: 552192 - protein, 17 aa, Homo sapiens
  CDR3 for beta chain variable domain of TCR clone 276096 (TRBV7-8, TRBJ2-6)
CASSAGTGGAGANVLTF

SEQ ID NO: 552193 - protein, 14 aa, Homo sapiens
  CDR3 for alpha chain variable domain of TCR clone 276097 (TRAV21, TRAJ45)
CAVSSGGGADGLTF

SEQ ID NO: 552194 - protein, 16 aa, Homo sapiens
  CDR3 for beta chain variable domain of TCR clone 276097 (TRBV4-1, TRBJ2-7)
CASSQGPGQGVYEQYF

SEQ ID NO: 552195 - protein, 10 aa, Homo sapiens
  CDR3 for alpha chain variable domain of TCR clone 276098 (TRAV1-2, TRAJ20)
CACNDYKLSF

SEQ ID NO: 552196 - protein, 15 aa, Homo sapiens
  CDR3 for beta chain variable domain of TCR clone 276098 (TRBV20-1, TRBJ2-7)
CSARDRVSGMDEQYF

SEQ ID NO: 552197 - protein, 14 aa, Homo sapiens
  CDR3 for alpha chain variable domain of TCR clone 276099 (TRAV17, TRAJ57)
CATDPQGGSEKLVS

SEQ ID NO: 552198 - protein, 15 aa, Homo sapiens
  CDR3 for beta chain variable domain of TCR clone 276099 (TRBV6-3, TRBJ2-7)
CASSSPGTVFYEQYF

SEQ ID NO: 552199 - protein, 11 aa, Homo sapiens
  CDR3 for alpha chain variable domain of TCR clone 276100 (TRAV2, TRAJ33)
CAVDSNYQLIW

SEQ ID NO: 552200 - protein, 13 aa, Homo sapiens
  CDR3 for beta chain variable domain of TCR clone 276100 (TRBV5-7, TRBJ1-1)
CASSLFQNTEAFF

SEQ ID NO: 552201 - protein, 17 aa, Homo sapiens
  CDR3 for alpha chain variable domain of TCR clone 276101 (TRAV23/DV6, TRAJ57)
CAASSTLSQGGSEKLVF

SEQ ID NO: 552202 - protein, 14 aa, Homo sapiens
  CDR3 for beta chain variable domain of TCR clone 276101 (TRBV25-1, TRBJ1-1)
CASTHVGGNTEAFF

SEQ ID NO: 552203 - protein, 12 aa, Homo sapiens
  CDR3 for alpha chain variable domain of TCR clone 276102 (TRAV8-3, TRAJ26)
CAGDNYGKNFVF

SEQ ID NO: 552204 - protein, 11 aa, Homo sapiens
  CDR3 for beta chain variable domain of TCR clone 276102 (TRBV19, TRBJ1-1)
CASSIGSEAFF

SEQ ID NO: 552205 - protein, 17 aa, Homo sapiens
  CDR3 for alpha chain variable domain of TCR clone 276103 (TRAV13-1, TRAJ31)
CALRDRLMFGDGTRLVV

SEQ ID NO: 552206 - protein, 12 aa, Homo sapiens
  CDR3 for beta chain variable domain of TCR clone 276103 (TRBV7-9, TRBJ2-7)
CASSLEGYEQYF

SEQ ID NO: 552207 - protein, 14 aa, Homo sapiens
  CDR3 for alpha chain variable domain of TCR clone 276104 (TRAV17, TRAJ57)
CATDPQGGSEKLVF

SEQ ID NO: 552208 - protein, 13 aa, Homo sapiens
  CDR3 for beta chain variable domain of TCR clone 276104 (TRBV12-4, TRBJ1-1)
CASSLGGTTEAFF

SEQ ID NO: 552209 - protein, 14 aa, Homo sapiens
  CDR3 for alpha chain variable domain of TCR clone 276105 (TRAV2, TRAJ29)
CAVTPPSGNTPLVF

SEQ ID NO: 552210 - protein, 14 aa, Homo sapiens
  CDR3 for beta chain variable domain of TCR clone 276105 (TRBV7-3, TRBJ1-1)
CASSLGTGYTEAFF

SEQ ID NO: 552211 - protein, 12 aa, Homo sapiens
  CDR3 for alpha chain variable domain of TCR clone 276106 (TRAV20, TRAJ39)
YAVGNAGNMLTF

SEQ ID NO: 552212 - protein, 16 aa, Homo sapiens
  CDR3 for beta chain variable domain of TCR clone 276106 (TRBV15, TRBJ1-2)
CATSRGPRTGGGGYTF

SEQ ID NO: 552213 - protein, 16 aa, Homo sapiens
  CDR3 for alpha chain variable domain of TCR clone 276107 (TRAV23/DV6, TRAJ9)
CAASIGGNTGGFTHIF

SEQ ID NO: 552214 - protein, 14 aa, Homo sapiens
  CDR3 for beta chain variable domain of TCR clone 276107 (TRBV9, TRBJ2-7)
CASSVGVGSYEQYF

SEQ ID NO: 552215 - protein, 13 aa, Homo sapiens
  CDR3 for alpha chain variable domain of TCR clone 276108 (TRAV29/DV5, TRAJ44)
CAASTGTASKLTF

SEQ ID NO: 552216 - protein, 12 aa, Homo sapiens
  CDR3 for beta chain variable domain of TCR clone 276108 (TRBV7-8, TRBJ2-1)
CASSLGHNEQFF

SEQ ID NO: 552217 - protein, 14 aa, Homo sapiens
  CDR3 for alpha chain variable domain of TCR clone 276109 (TRAV1-2, TRAJ8)
CAVREDTGFEKLVF

SEQ ID NO: 552218 - protein, 14 aa, Homo sapiens
  CDR3 for beta chain variable domain of TCR clone 276109 (TRBV12-5, TRBJ2-5)
CASGSRTHQETQYF

SEQ ID NO: 552219 - protein, 15 aa, Homo sapiens
  CDR3 for alpha chain variable domain of TCR clone 276110 (TRAV17, TRAJ57)
CATGPSQGGSEKLVL

SEQ ID NO: 552220 - protein, 17 aa, Homo sapiens
  CDR3 for beta chain variable domain of TCR clone 276110 (TRBV20-1, TRBJ2-1)
CSASSSGLAGSYNEQFF

SEQ ID NO: 552221 - protein, 14 aa, Homo sapiens
  CDR3 for alpha chain variable domain of TCR clone 276111 (TRAV30, TRAJ33)
CGTVAPRSNYQFIW

SEQ ID NO: 552222 - protein, 16 aa, Homo sapiens
  CDR3 for beta chain variable domain of TCR clone 276111 (TRBV3-1, TRBJ2-5)
CASSPGQFNGFGTQYF

SEQ ID NO: 552223 - protein, 15 aa, Homo sapiens
  CDR3 for alpha chain variable domain of TCR clone 276112 (TRAV23/DV6, TRAJ45)
CAASSAGGGADGLTF

SEQ ID NO: 552224 - protein, 13 aa, Homo sapiens
  CDR3 for beta chain variable domain of TCR clone 276112 (TRBV7-7, TRBJ2-3)
CASSLSRADTQYF

SEQ ID NO: 552225 - protein, 12 aa, Homo sapiens
  CDR3 for alpha chain variable domain of TCR clone 276113 (TRAV12-2, TRAJ4)
GWPEGGYNKLIF

SEQ ID NO: 552226 - protein, 16 aa, Homo sapiens
  CDR3 for beta chain variable domain of TCR clone 276113 (TRBV6-1, TRBJ1-2)
CASSGAWQGRSHGYTF

SEQ ID NO: 552227 - protein, 19 aa, Homo sapiens
  CDR3 for alpha chain variable domain of TCR clone 276114 (TRAV1-2, TRAJ26)
CLLPLCCEGPDNYGQNFVF

SEQ ID NO: 552228 - protein, 13 aa, Homo sapiens
  CDR3 for beta chain variable domain of TCR clone 276114 (TRBV19, TRBJ1-2)
CASSQGQVYGYTF

SEQ ID NO: 552229 - protein, 16 aa, Homo sapiens
  CDR3 for alpha chain variable domain of TCR clone 276115 (TRAV17, TRAJ52)
CATDPMGGTRYGKLTF

SEQ ID NO: 552230 - protein, 16 aa, Homo sapiens
  CDR3 for beta chain variable domain of TCR clone 276115 (TRBV6-6, TRBJ2-3)
CASSYLKATSTDTQYF

SEQ ID NO: 552231 - protein, 14 aa, Homo sapiens
  CDR3 for alpha chain variable domain of TCR clone 276116 (TRAV20, TRAJ42)
CAVQAGGKQGNLIF

SEQ ID NO: 552232 - protein, 14 aa, Homo sapiens
  CDR3 for beta chain variable domain of TCR clone 276116 (TRBV28, TRBJ1-2)
CASRVQGANYGYTF

SEQ ID NO: 552233 - protein, 14 aa, Homo sapiens
  CDR3 for alpha chain variable domain of TCR clone 276117 (TRAV25, TRAJ44)
CALFPTGTASKLTF

SEQ ID NO: 552234 - protein, 14 aa, Homo sapiens
  CDR3 for beta chain variable domain of TCR clone 276117 (TRBV19, TRBJ1-1)
CASTGHRLNTEAFF

SEQ ID NO: 552235 - protein, 10 aa, Homo sapiens
  CDR3 for alpha chain variable domain of TCR clone 276118 (TRAV12-3, TRAJ49)
CAMNDDQFYF

SEQ ID NO: 552236 - protein, 14 aa, Homo sapiens
  CDR3 for beta chain variable domain of TCR clone 276118 (TRBV25-1, TRBJ1-1)
CASTHLGGNTEAFF

SEQ ID NO: 552237 - protein, 18 aa, Homo sapiens
  CDR3 for alpha chain variable domain of TCR clone 276119 (TRAV26-1, TRAJ23)
YIVRVGLEVWNQGGKLIF

SEQ ID NO: 552238 - protein, 15 aa, Homo sapiens
  CDR3 for beta chain variable domain of TCR clone 276119 (TRBV11-2, TRBJ2-2)
CASSSDRVNAGELFF

SEQ ID NO: 552239 - protein, 11 aa, Homo sapiens
  CDR3 for alpha chain variable domain of TCR clone 276120 (TRAV35, TRAJ30)
CAPGGDDKIIF

SEQ ID NO: 552240 - protein, 15 aa, Homo sapiens
  CDR3 for beta chain variable domain of TCR clone 276120 (TRBV9, TRBJ1-6)
CASSVAGAGDSPLHF

SEQ ID NO: 552241 - protein, 13 aa, Homo sapiens
  CDR3 for alpha chain variable domain of TCR clone 276121 (TRAV12-1, TRAJ21)
CVVTLYNFNKFYF

SEQ ID NO: 552242 - protein, 20 aa, Homo sapiens
  CDR3 for beta chain variable domain of TCR clone 276121 (TRBV7-8, TRBJ2-1)
CASSLADRLAGVRSYNEQFF

SEQ ID NO: 552243 - protein, 16 aa, Homo sapiens
  CDR3 for alpha chain variable domain of TCR clone 276122 (TRAV13-1, TRAJ48)
CAASIFGNFGNEKLTF

SEQ ID NO: 552244 - protein, 14 aa, Homo sapiens
  CDR3 for beta chain variable domain of TCR clone 276122 (TRBV7-8, TRBJ1-1)
CASSLGAGRTEAFF

SEQ ID NO: 552245 - protein, 12 aa, Homo sapiens
  CDR3 for alpha chain variable domain of TCR clone 276123 (TRAV21, TRAJ39)
CAADNAGNMHTF

SEQ ID NO: 552246 - protein, 13 aa, Homo sapiens
  CDR3 for beta chain variable domain of TCR clone 276123 (TRBV6-1, TRBJ1-1)
CASSRQENTEAFF

SEQ ID NO: 552247 - protein, 16 aa, Homo sapiens
  CDR3 for alpha chain variable domain of TCR clone 276124 (TRAV12-3, TRAJ53)
CAMSPGSGGSNYKLTF

SEQ ID NO: 552248 - protein, 17 aa, Homo sapiens
  CDR3 for beta chain variable domain of TCR clone 276124 (TRBV28, TRBJ2-5)
CARSTPEGDALQETQYF

SEQ ID NO: 552249 - protein, 12 aa, Homo sapiens
  CDR3 for alpha chain variable domain of TCR clone 276125 (TRAV4, TRAJ6)
CLAPGGSYIPTF

SEQ ID NO: 552250 - protein, 15 aa, Homo sapiens
  CDR3 for beta chain variable domain of TCR clone 276125 (TRBV7-2, TRBJ1-2)
CASSLVSGGDYGYTF

SEQ ID NO: 552251 - protein, 13 aa, Homo sapiens
  CDR3 for alpha chain variable domain of TCR clone 276126 (TRAV16, TRAJ48)
CSPLNFGHEKLTF

SEQ ID NO: 552252 - protein, 11 aa, Homo sapiens
  CDR3 for beta chain variable domain of TCR clone 276126 (TRBV7-9, TRBJ2-3)
CASSPTDTRYF

SEQ ID NO: 552253 - protein, 15 aa, Homo sapiens
  CDR3 for alpha chain variable domain of TCR clone 276127 (TRAV26-2, TRAJ39)
CSLRGNNNAGNMLNF

SEQ ID NO: 552254 - protein, 15 aa, Homo sapiens
  CDR3 for beta chain variable domain of TCR clone 276127 (TRBV5-4, TRBJ1-1)
CASSSLGWANTEAFF

SEQ ID NO: 552255 - protein, 13 aa, Homo sapiens
  CDR3 for alpha chain variable domain of TCR clone 276128 (TRAV34, TRAJ22)
CGAGAGSVRQLTF

SEQ ID NO: 552256 - protein, 16 aa, Homo sapiens
  CDR3 for beta chain variable domain of TCR clone 276128 (TRBV7-3, TRBJ2-1)
CASSKPLAGGYNEQFF

SEQ ID NO: 552257 - protein, 16 aa, Homo sapiens
  CDR3 for alpha chain variable domain of TCR clone 276129 (TRAV21, TRAJ37)
CAVRPRGSSNTGKLIF

SEQ ID NO: 552258 - protein, 15 aa, Homo sapiens
  CDR3 for beta chain variable domain of TCR clone 276129 (TRBV5-1, TRBJ2-7)
CASSLMTSGSNEQYF

SEQ ID NO: 552259 - protein, 14 aa, Homo sapiens
  CDR3 for alpha chain variable domain of TCR clone 276130 (TRAV13-2, TRAJ45)
CAEMSGGGADGLTF

SEQ ID NO: 552260 - protein, 14 aa, Homo sapiens
  CDR3 for beta chain variable domain of TCR clone 276130 (TRBV2, TRBJ1-4)
CASNQGGLSLSLFF

SEQ ID NO: 552261 - protein, 15 aa, Homo sapiens
  CDR3 for alpha chain variable domain of TCR clone 276131 (TRAV26-1, TRAJ29)
CIVRVEGSGNTPLVC

SEQ ID NO: 552262 - protein, 15 aa, Homo sapiens
  CDR3 for beta chain variable domain of TCR clone 276131 (TRBV7-9, TRBJ1-5)
CASSQGHQPNQPQHV

SEQ ID NO: 552263 - protein, 12 aa, Homo sapiens
  CDR3 for alpha chain variable domain of TCR clone 276132 (TRAV8-3, TRAJ20)
WAVGANDYELSF

SEQ ID NO: 552264 - protein, 16 aa, Homo sapiens
  CDR3 for beta chain variable domain of TCR clone 276132 (TRBV19, TRBJ2-2)
CASRSPGTGATGELFS

SEQ ID NO: 552265 - protein, 15 aa, Homo sapiens
  CDR3 for alpha chain variable domain of TCR clone 276133 (TRAV12-3, TRAJ6)
CAMSATTGGSYIPTF

SEQ ID NO: 552266 - protein, 16 aa, Homo sapiens
  CDR3 for beta chain variable domain of TCR clone 276133 (TRBV10-3, TRBJ2-1)
CAISGVGDGGGGEQFF

SEQ ID NO: 552267 - protein, 14 aa, Homo sapiens
  CDR3 for alpha chain variable domain of TCR clone 276134 (TRAV1-2, TRAJ8)
CAVREDTGFQKLVF

SEQ ID NO: 552268 - protein, 12 aa, Homo sapiens
  CDR3 for beta chain variable domain of TCR clone 276134 (TRBV11-2, TRBJ2-2)
CASSLPTGEQFF

SEQ ID NO: 552269 - protein, 14 aa, Homo sapiens
  CDR3 for alpha chain variable domain of TCR clone 276135 (TRAV12-2, TRAJ17)
CAVLFKAAGNKLTF

SEQ ID NO: 552270 - protein, 17 aa, Homo sapiens
  CDR3 for beta chain variable domain of TCR clone 276135 (TRBV11-2, TRBJ2-1)
CASSLYPPGVEHNEQFF

SEQ ID NO: 552271 - protein, 15 aa, Homo sapiens
  CDR3 for alpha chain variable domain of TCR clone 276136 (TRAV8-3, TRAJ27)
CAVGPSKTNAGKSTF

SEQ ID NO: 552272 - protein, 15 aa, Homo sapiens
  CDR3 for beta chain variable domain of TCR clone 276136 (TRBV7-2, TRBJ2-1)
SASSSGLAGGNEQFF

SEQ ID NO: 552273 - protein, 16 aa, Homo sapiens
  CDR3 for alpha chain variable domain of TCR clone 276137 (TRAV26-1, TRAJ23)
CIVRVERYNQGGKLIF

SEQ ID NO: 552274 - protein, 11 aa, Homo sapiens
  CDR3 for beta chain variable domain of TCR clone 276137 (TRBV11-2, TRBJ2-2)
CASSLPGELFF

SEQ ID NO: 552275 - protein, 11 aa, Homo sapiens
  CDR3 for alpha chain variable domain of TCR clone 276138 (TRAV12-3, TRAJ27)
CAMANAGKSTF

SEQ ID NO: 552276 - protein, 14 aa, Homo sapiens
  CDR3 for beta chain variable domain of TCR clone 276138 (TRBV7-2, TRBJ1-2)
CASSQTGSTYGYTF

SEQ ID NO: 552277 - protein, 12 aa, Homo sapiens
  CDR3 for alpha chain variable domain of TCR clone 276139 (TRAV2, TRAJ10)
CASTGGGNKLTF

SEQ ID NO: 552278 - protein, 14 aa, Homo sapiens
  CDR3 for beta chain variable domain of TCR clone 276139 (TRBV19, TRBJ2-5)
CASSMTGQQETQFF

SEQ ID NO: 552279 - protein, 14 aa, Homo sapiens
  CDR3 for alpha chain variable domain of TCR clone 276140 (TRAV12-3, TRAJ10)
SHLPLTGGGNKLTF

SEQ ID NO: 552280 - protein, 15 aa, Homo sapiens
  CDR3 for beta chain variable domain of TCR clone 276140 (TRBV3-1, TRBJ1-2)
WASSPTRLPEGGYTF

SEQ ID NO: 552281 - protein, 14 aa, Homo sapiens
  CDR3 for alpha chain variable domain of TCR clone 276141 (TRAV34, TRAJ44)
CGADGTGTASKLTF

SEQ ID NO: 552282 - protein, 15 aa, Homo sapiens
  CDR3 for beta chain variable domain of TCR clone 276141 (TRBV5-1, TRBJ2-1)
CVSSPPRAPYNEQFF

SEQ ID NO: 552283 - protein, 14 aa, Homo sapiens
  CDR3 for alpha chain variable domain of TCR clone 276142 (TRAV13-1, TRAJ35)
CSASNGGFGNVLHC

SEQ ID NO: 552284 - protein, 13 aa, Homo sapiens
  CDR3 for beta chain variable domain of TCR clone 276142 (TRBV7-3, TRBJ1-1)
CASSQDWGAEAFF

SEQ ID NO: 552285 - protein, 14 aa, Homo sapiens
  CDR3 for alpha chain variable domain of TCR clone 276143 (TRAV4, TRAJ10)
CLVGDTGGGNKLTF

SEQ ID NO: 552286 - protein, 14 aa, Homo sapiens
  CDR3 for beta chain variable domain of TCR clone 276143 (TRBV19, TRBJ2-1)
CASPTFVLSGEQFF

SEQ ID NO: 552287 - protein, 12 aa, Homo sapiens
  CDR3 for alpha chain variable domain of TCR clone 276144 (TRAV21, TRAJ31)
CVLAGNNARLMF

SEQ ID NO: 552288 - protein, 16 aa, Homo sapiens
  CDR3 for beta chain variable domain of TCR clone 276144 (TRBV27, TRBJ2-5)
CASSFGPGGTKEQQYF

SEQ ID NO: 552289 - protein, 13 aa, Homo sapiens
  CDR3 for alpha chain variable domain of TCR clone 276145 (TRAV8-3, TRAJ4)
WVFYSGGYNKLIF

SEQ ID NO: 552290 - protein, 16 aa, Homo sapiens
  CDR3 for beta chain variable domain of TCR clone 276145 (TRBV7-8, TRBJ2-3)
CASSNEGQRETDTQYF

SEQ ID NO: 552291 - protein, 12 aa, Homo sapiens
  CDR3 for alpha chain variable domain of TCR clone 276146 (TRAV35, TRAJ39)
LAPNNAGNMHTF

SEQ ID NO: 552292 - protein, 13 aa, Homo sapiens
  CDR3 for beta chain variable domain of TCR clone 276146 (TRBV19, TRBJ1-3)
CASRLSLGNTIYF

SEQ ID NO: 552293 - protein, 16 aa, Homo sapiens
  CDR3 for alpha chain variable domain of TCR clone 276147 (TRAV4, TRAJ22)
CLVGDLYSGSARQLTF

SEQ ID NO: 552294 - protein, 16 aa, Homo sapiens
  CDR3 for beta chain variable domain of TCR clone 276147 (TRBV3-1, TRBJ2-5)
CASSQDWASGQETQYF

SEQ ID NO: 552295 - protein, 15 aa, Homo sapiens
  CDR3 for alpha chain variable domain of TCR clone 276148 (TRAV23/DV6, TRAJ37)
CAAGEGSSNTGKLIF

SEQ ID NO: 552296 - protein, 17 aa, Homo sapiens
  CDR3 for beta chain variable domain of TCR clone 276148 (TRBV20-1, TRBJ2-7)
CSATRAGGVAGVEEPYF

SEQ ID NO: 552297 - protein, 14 aa, Homo sapiens
  CDR3 for alpha chain variable domain of TCR clone 276149 (TRAV13-2, TRAJ11)
CAETGNSGYSTLTF

SEQ ID NO: 552298 - protein, 16 aa, Homo sapiens
  CDR3 for beta chain variable domain of TCR clone 276149 (TRBV4-1, TRBJ2-5)
CASSQAIAASSATQYF

SEQ ID NO: 552299 - protein, 14 aa, Homo sapiens
  CDR3 for alpha chain variable domain of TCR clone 276150 (TRAV12-3, TRAJ10)
SHLPLTGGGNKLTF

SEQ ID NO: 552300 - protein, 15 aa, Homo sapiens
  CDR3 for beta chain variable domain of TCR clone 276150 (TRBV13, TRBJ2-1)
CASSLISGLNNEQFF

SEQ ID NO: 552301 - protein, 13 aa, Homo sapiens
  CDR3 for alpha chain variable domain of TCR clone 276151 (TRAV13-2, TRAJ53)
CAENMGSNYKLTF

SEQ ID NO: 552302 - protein, 18 aa, Homo sapiens
  CDR3 for beta chain variable domain of TCR clone 276151 (TRBV20-1, TRBJ2-6)
CSAETTPTHGSGANVLTF

SEQ ID NO: 552303 - protein, 12 aa, Homo sapiens
  CDR3 for alpha chain variable domain of TCR clone 276152 (TRAV26-1, TRAJ36)
CIVRIRADNLFF

SEQ ID NO: 552304 - protein, 13 aa, Homo sapiens
  CDR3 for beta chain variable domain of TCR clone 276152 (TRBV11-2, TRBJ2-5)
CASSRGPSETQYF

SEQ ID NO: 552305 - protein, 18 aa, Homo sapiens
  CDR3 for alpha chain variable domain of TCR clone 276153 (TRAV3, TRAJ17)
CAVRARRGGRSCRQQANF

SEQ ID NO: 552306 - protein, 16 aa, Homo sapiens
  CDR3 for beta chain variable domain of TCR clone 276153 (TRBV9, TRBJ2-7)
CASSAGPDRSPYEQYF

SEQ ID NO: 552307 - protein, 15 aa, Homo sapiens
  CDR3 for alpha chain variable domain of TCR clone 276154 (TRAV34, TRAJ38)
CGADFTTGNNRKLIW

SEQ ID NO: 552308 - protein, 15 aa, Homo sapiens
  CDR3 for beta chain variable domain of TCR clone 276154 (TRBV7-3, TRBJ2-1)
CASSPTGGGEVEQFF

SEQ ID NO: 552309 - protein, 12 aa, Homo sapiens
  CDR3 for alpha chain variable domain of TCR clone 276155 (TRAV27, TRAJ42)
CAGGGSQGNLSF

SEQ ID NO: 552310 - protein, 13 aa, Homo sapiens
  CDR3 for beta chain variable domain of TCR clone 276155 (TRBV19, TRBJ2-7)
CASSIRSSYEQYF

SEQ ID NO: 552311 - protein, 14 aa, Homo sapiens
  CDR3 for alpha chain variable domain of TCR clone 276156 (TRAV35, TRAJ22)
CAGLRPGSARQLTF

SEQ ID NO: 552312 - protein, 16 aa, Homo sapiens
  CDR3 for beta chain variable domain of TCR clone 276156 (TRBV12-4, TRBJ1-5)
CASRQPVEGSNQHQHF

SEQ ID NO: 552313 - protein, 18 aa, Homo sapiens
  CDR3 for alpha chain variable domain of TCR clone 276157 (TRAV26-2, TRAJ45)
CILRVDKYSGGGADGLTF

SEQ ID NO: 552314 - protein, 14 aa, Homo sapiens
  CDR3 for beta chain variable domain of TCR clone 276157 (TRBV28, TRBJ2-4)
CASTQVTGVNIQYF

SEQ ID NO: 552315 - protein, 14 aa, Homo sapiens
  CDR3 for alpha chain variable domain of TCR clone 276158 (TRAV26-2, TRAJ11)
CIPRLNSGYSTLTF

SEQ ID NO: 552316 - protein, 16 aa, Homo sapiens
  CDR3 for beta chain variable domain of TCR clone 276158 (TRBV19, TRBJ2-1)
CASSKAGPSSYNEQFF

SEQ ID NO: 552317 - protein, 14 aa, Homo sapiens
  CDR3 for alpha chain variable domain of TCR clone 276159 (TRAV21, TRAJ45)
CAVHSGGGADGLTF

SEQ ID NO: 552318 - protein, 14 aa, Homo sapiens
  CDR3 for beta chain variable domain of TCR clone 276159 (TRBV20-1, TRBJ2-1)
CSARRLAEADEQFF

SEQ ID NO: 552319 - protein, 17 aa, Homo sapiens
  CDR3 for alpha chain variable domain of TCR clone 276160 (TRAV13-2, TRAJ31)
CAENARLRFGDGTQLVV

SEQ ID NO: 552320 - protein, 14 aa, Homo sapiens
  CDR3 for beta chain variable domain of TCR clone 276160 (TRBV7-9, TRBJ2-1)
CASSLGVADNEQFF

SEQ ID NO: 552321 - protein, 13 aa, Homo sapiens
  CDR3 for alpha chain variable domain of TCR clone 276161 (TRAV36/DV7, TRAJ54)
CAVDIQGDQKLVF

SEQ ID NO: 552322 - protein, 14 aa, Homo sapiens
  CDR3 for beta chain variable domain of TCR clone 276161 (TRBV19, TRBJ2-7)
CASNFRDTFTGMYF

SEQ ID NO: 552323 - protein, 14 aa, Homo sapiens
  CDR3 for alpha chain variable domain of TCR clone 276162 (TRAV12-2, TRAJ13)
CAVKKTGGYQKVTF

SEQ ID NO: 552324 - protein, 14 aa, Homo sapiens
  CDR3 for beta chain variable domain of TCR clone 276162 (TRBV12-5, TRBJ2-5)
CASGSRTHQENQYF

SEQ ID NO: 552325 - protein, 13 aa, Homo sapiens
  CDR3 for alpha chain variable domain of TCR clone 276163 (TRAV3, TRAJ21)
CAVRGPDFNKFYF

SEQ ID NO: 552326 - protein, 15 aa, Homo sapiens
  CDR3 for beta chain variable domain of TCR clone 276163 (TRBV7-2, TRBJ1-1)
CASSPQGGANTEAFF

SEQ ID NO: 552327 - protein, 15 aa, Homo sapiens
  CDR3 for alpha chain variable domain of TCR clone 276164 (TRAV12-1, TRAJ13)
CVVNPNSGGYQKVTF

SEQ ID NO: 552328 - protein, 16 aa, Homo sapiens
  CDR3 for beta chain variable domain of TCR clone 276164 (TRBV12-5, TRBJ2-5)
CASGPRTSGNQETQYF

SEQ ID NO: 552329 - protein, 22 aa, Homo sapiens
  CDR3 for alpha chain variable domain of TCR clone 276165 (TRAV12-1, )
CVVSPQIPDIQNPDPAVYQLRD

SEQ ID NO: 552330 - protein, 16 aa, Homo sapiens
  CDR3 for beta chain variable domain of TCR clone 276165 (TRBV19, TRBJ1-5)
CASSIDRGGPRQPQHF

SEQ ID NO: 552331 - protein, 15 aa, Homo sapiens
  CDR3 for alpha chain variable domain of TCR clone 276166 (TRAV13-1, TRAJ11)
CAASNRNSGYSTLTC

SEQ ID NO: 552332 - protein, 11 aa, Homo sapiens
  CDR3 for beta chain variable domain of TCR clone 276166 (TRBV20-1, TRBJ2-7)
CSARLSYEQYF

SEQ ID NO: 552333 - protein, 14 aa, Homo sapiens
  CDR3 for alpha chain variable domain of TCR clone 276167 (TRAV26-1, TRAJ38)
CIADNAGNNRKLIW

SEQ ID NO: 552334 - protein, 13 aa, Homo sapiens
  CDR3 for beta chain variable domain of TCR clone 276167 (TRBV20-1, TRBJ1-1)
CSARGGRNTEALF

SEQ ID NO: 552335 - protein, 12 aa, Homo sapiens
  CDR3 for alpha chain variable domain of TCR clone 276168 (TRAV2, TRAJ33)
CAFLDSNYQLIW

SEQ ID NO: 552336 - protein, 16 aa, Homo sapiens
  CDR3 for beta chain variable domain of TCR clone 276168 (TRBV2, TRBJ2-7)
CASSEPWTGPSYKQYF

SEQ ID NO: 552337 - protein, 13 aa, Homo sapiens
  CDR3 for alpha chain variable domain of TCR clone 276169 (TRAV26-2, TRAJ57)
CILSRGGSEKLVF

SEQ ID NO: 552338 - protein, 16 aa, Homo sapiens
  CDR3 for beta chain variable domain of TCR clone 276169 (TRBV18, TRBJ1-5)
CASSPRTGGGNQTQHF

SEQ ID NO: 552339 - protein, 16 aa, Homo sapiens
  CDR3 for alpha chain variable domain of TCR clone 276170 (TRAV17, TRAJ52)
CATSNAGGTSYGKLTF

SEQ ID NO: 552340 - protein, 16 aa, Homo sapiens
  CDR3 for beta chain variable domain of TCR clone 276170 (TRBV28, TRBJ1-5)
CASSFRGGYSNQPQHF

SEQ ID NO: 552341 - protein, 13 aa, Homo sapiens
  CDR3 for alpha chain variable domain of TCR clone 276171 (TRAV8-6, TRAJ49)
CAVSDSSGNQFYF

SEQ ID NO: 552342 - protein, 15 aa, Homo sapiens
  CDR3 for beta chain variable domain of TCR clone 276171 (TRBV2, TRBJ2-7)
CASSEGLARSYEQYF

SEQ ID NO: 552343 - protein, 15 aa, Homo sapiens
  CDR3 for alpha chain variable domain of TCR clone 276172 (TRAV4, TRAJ39)
CLVGPNNNAGNMLTF

SEQ ID NO: 552344 - protein, 13 aa, Homo sapiens
  CDR3 for beta chain variable domain of TCR clone 276172 (TRBV12-4, TRBJ1-1)
CASSPGTGFEAFF

SEQ ID NO: 552345 - protein, 15 aa, Homo sapiens
  CDR3 for alpha chain variable domain of TCR clone 276173 (TRAV8-4, TRAJ37)
CAVTYGSSNTGTLIF

SEQ ID NO: 552346 - protein, 20 aa, Homo sapiens
  CDR3 for beta chain variable domain of TCR clone 276173 (TRBV7-8, TRBJ2-2)
CASSHLFPGPTIHITGELFF

SEQ ID NO: 552347 - protein, 13 aa, Homo sapiens
  CDR3 for alpha chain variable domain of TCR clone 276174 (TRAV20, TRAJ37)
CAGCSSNTGKLIF

SEQ ID NO: 552348 - protein, 11 aa, Homo sapiens
  CDR3 for beta chain variable domain of TCR clone 276174 (TRBV6-6, TRBJ2-2)
CASQKTGELFF

SEQ ID NO: 552349 - protein, 14 aa, Homo sapiens
  CDR3 for alpha chain variable domain of TCR clone 276175 (TRAV1-1, TRAJ27)
CAVIYNPNAGKSTF

SEQ ID NO: 552350 - protein, 15 aa, Homo sapiens
  CDR3 for beta chain variable domain of TCR clone 276175 (TRBV7-2, TRBJ2-1)
CASSSGLAGGNEQFF

SEQ ID NO: 552351 - protein, 13 aa, Homo sapiens
  CDR3 for alpha chain variable domain of TCR clone 276176 (TRAV12-2, TRAJ10)
CAVPTGGGNKLPF

SEQ ID NO: 552352 - protein, 11 aa, Homo sapiens
  CDR3 for beta chain variable domain of TCR clone 276176 (TRBV6-1, TRBJ2-1)
CASISSNEQFF

SEQ ID NO: 552353 - protein, 14 aa, Homo sapiens
  CDR3 for alpha chain variable domain of TCR clone 276177 (TRAV12-3, TRAJ58)
CAMSTATSGSRLTF

SEQ ID NO: 552354 - protein, 15 aa, Homo sapiens
  CDR3 for beta chain variable domain of TCR clone 276177 (TRBV11-3, TRBJ2-3)
CASLKDGREGDTQYF

SEQ ID NO: 552355 - protein, 17 aa, Homo sapiens
  CDR3 for alpha chain variable domain of TCR clone 276178 (TRAV13-1, TRAJ52)
CAARSGAGGTSYVKLTF

SEQ ID NO: 552356 - protein, 15 aa, Homo sapiens
  CDR3 for beta chain variable domain of TCR clone 276178 (TRBV2, TRBJ2-1)
CASSELAGSYNEQFF

SEQ ID NO: 552357 - protein, 12 aa, Homo sapiens
  CDR3 for alpha chain variable domain of TCR clone 276179 (TRAV12-2, TRAJ10)
WGVTGGGNKLTF

SEQ ID NO: 552358 - protein, 14 aa, Homo sapiens
  CDR3 for beta chain variable domain of TCR clone 276179 (TRBV27, TRBJ2-7)
CASATGTERREQYS

SEQ ID NO: 552359 - protein, 15 aa, Homo sapiens
  CDR3 for alpha chain variable domain of TCR clone 276180 (TRAV20, TRAJ40)
CAVQRGTSGTYKYIF

SEQ ID NO: 552360 - protein, 19 aa, Homo sapiens
  CDR3 for beta chain variable domain of TCR clone 276180 (TRBV28, TRBJ2-7)
WASSYSGTSRLGWVYEQYF

SEQ ID NO: 552361 - protein, 12 aa, Homo sapiens
  CDR3 for alpha chain variable domain of TCR clone 276181 (TRAV8-3, TRAJ27)
CAVGAEAGKSTF

SEQ ID NO: 552362 - protein, 14 aa, Homo sapiens
  CDR3 for beta chain variable domain of TCR clone 276181 (TRBV2, TRBJ2-1)
CAGRLMVGHDEQFF

SEQ ID NO: 552363 - protein, 15 aa, Homo sapiens
  CDR3 for alpha chain variable domain of TCR clone 276182 (TRAV26-1, TRAJ56)
CIVRVDNGANSKLTF

SEQ ID NO: 552364 - protein, 16 aa, Homo sapiens
  CDR3 for beta chain variable domain of TCR clone 276182 (TRBV7-3, TRBJ2-2)
CASSLKRGTLSGELFF

SEQ ID NO: 552365 - protein, 14 aa, Homo sapiens
  CDR3 for alpha chain variable domain of TCR clone 276183 (TRAV12-3, TRAJ9)
CAMSPNTGAFKTIF

SEQ ID NO: 552366 - protein, 12 aa, Homo sapiens
  CDR3 for beta chain variable domain of TCR clone 276183 (TRBV19, TRBJ1-5)
CASSIAQQPQHF

SEQ ID NO: 552367 - protein, 12 aa, Homo sapiens
  CDR3 for alpha chain variable domain of TCR clone 276184 (TRAV2, TRAJ10)
CASTGGGNKLTF

SEQ ID NO: 552368 - protein, 14 aa, Homo sapiens
  CDR3 for beta chain variable domain of TCR clone 276184 (TRBV7-2, TRBJ2-2)
CANRGQGAAGELFF

SEQ ID NO: 552369 - protein, 13 aa, Homo sapiens
  CDR3 for alpha chain variable domain of TCR clone 276185 (TRAV12-1, TRAJ39)
CVARSGAGNMLPF

SEQ ID NO: 552370 - protein, 16 aa, Homo sapiens
  CDR3 for beta chain variable domain of TCR clone 276185 (TRBV20-1, TRBJ2-1)
CSGESRTGTVRNEQFF

SEQ ID NO: 552371 - protein, 13 aa, Homo sapiens
  CDR3 for alpha chain variable domain of TCR clone 276186 (TRAV3, TRAJ33)
CAVRDRSDYQLIW

SEQ ID NO: 552372 - protein, 16 aa, Homo sapiens
  CDR3 for beta chain variable domain of TCR clone 276186 (TRBV4-2, TRBJ2-7)
CASSQDSGTAAYEQYF

SEQ ID NO: 552373 - protein, 14 aa, Homo sapiens
  CDR3 for alpha chain variable domain of TCR clone 276187 (TRAV2, TRAJ16)
CAVERGSDGQKLLL

SEQ ID NO: 552374 - protein, 12 aa, Homo sapiens
  CDR3 for beta chain variable domain of TCR clone 276187 (TRBV6-5, TRBJ2-7)
CASYIYGYEQYF

SEQ ID NO: 552375 - protein, 14 aa, Homo sapiens
  CDR3 for alpha chain variable domain of TCR clone 276188 (TRAV12-3, TRAJ57)
CAMSAWGGSEKLVF

SEQ ID NO: 552376 - protein, 14 aa, Homo sapiens
  CDR3 for beta chain variable domain of TCR clone 276188 (TRBV20-1, TRBJ2-5)
CSAHRQGLWETQYF

SEQ ID NO: 552377 - protein, 14 aa, Homo sapiens
  CDR3 for alpha chain variable domain of TCR clone 276189 (TRAV38-1, TRAJ43)
CAFMKHNNNNDMRL

SEQ ID NO: 552378 - protein, 17 aa, Homo sapiens
  CDR3 for beta chain variable domain of TCR clone 276189 (TRBV7-7, TRBJ1-4)
CASSLVGQGASNDKLFF

SEQ ID NO: 552379 - protein, 10 aa, Homo sapiens
  CDR3 for alpha chain variable domain of TCR clone 276190 (TRAV30, TRAJ48)
CGIGNEKLTF

SEQ ID NO: 552380 - protein, 15 aa, Homo sapiens
  CDR3 for beta chain variable domain of TCR clone 276190 (TRBV19, TRBJ2-1)
CASSIQATSYNEQFF

SEQ ID NO: 552381 - protein, 15 aa, Homo sapiens
  CDR3 for alpha chain variable domain of TCR clone 276191 (TRAV17, TRAJ56)
CATDANTGANSKLKF

SEQ ID NO: 552382 - protein, 14 aa, Homo sapiens
  CDR3 for beta chain variable domain of TCR clone 276191 (TRBV19, TRBJ1-5)
CASSLGTGGQPQHF

SEQ ID NO: 552383 - protein, 15 aa, Homo sapiens
  CDR3 for alpha chain variable domain of TCR clone 276192 (TRAV17, TRAJ16)
CATALRFSDGQKLLF

SEQ ID NO: 552384 - protein, 19 aa, Homo sapiens
  CDR3 for beta chain variable domain of TCR clone 276192 (TRBV25-1, TRBJ2-2)
CAILVYRVDRGRKTGELFF

SEQ ID NO: 552385 - protein, 15 aa, Homo sapiens
  CDR3 for alpha chain variable domain of TCR clone 276193 (TRAV2, TRAJ24)
CAVVRLRTAGGNCSL

SEQ ID NO: 552386 - protein, 16 aa, Homo sapiens
  CDR3 for beta chain variable domain of TCR clone 276193 (TRBV7-7, TRBJ2-3)
CASSPGTSGSTDTQYF

SEQ ID NO: 552387 - protein, 15 aa, Homo sapiens
  CDR3 for alpha chain variable domain of TCR clone 276194 (TRAV21, TRAJ37)
CAVRPTLSNTGKLIF

SEQ ID NO: 552388 - protein, 11 aa, Homo sapiens
  CDR3 for beta chain variable domain of TCR clone 276194 (TRBV29-1, TRBJ2-5)
CSEDRTGTQYF

SEQ ID NO: 552389 - protein, 21 aa, Homo sapiens
  CDR3 for alpha chain variable domain of TCR clone 276195 (TRAV20, )
CAVTGANNIQNPDPAVYQLRD

SEQ ID NO: 552390 - protein, 13 aa, Homo sapiens
  CDR3 for beta chain variable domain of TCR clone 276195 (TRBV20-1, TRBJ2-2)
CSALSGGAGELFF

SEQ ID NO: 552391 - protein, 15 aa, Homo sapiens
  CDR3 for alpha chain variable domain of TCR clone 276196 (TRAV8-3, TRAJ45)
CASSYSGGGADGLTF

SEQ ID NO: 552392 - protein, 17 aa, Homo sapiens
  CDR3 for beta chain variable domain of TCR clone 276196 (TRBV18, TRBJ2-1)
CASSPLAAGAGDNEQFF

SEQ ID NO: 552393 - protein, 12 aa, Homo sapiens
  CDR3 for alpha chain variable domain of TCR clone 276197 (TRAV13-1, TRAJ27)
CAAHTNPGKSTF

SEQ ID NO: 552394 - protein, 14 aa, Homo sapiens
  CDR3 for beta chain variable domain of TCR clone 276197 (TRBV19, TRBJ2-2)
CASSGQGIAGELFF

SEQ ID NO: 552395 - protein, 12 aa, Homo sapiens
  CDR3 for alpha chain variable domain of TCR clone 276198 (TRAV25, TRAJ11)
CAGASGYSTLTF

SEQ ID NO: 552396 - protein, 14 aa, Homo sapiens
  CDR3 for beta chain variable domain of TCR clone 276198 (TRBV5-8, TRBJ2-3)
CASSLGQGTDTLYF

SEQ ID NO: 552397 - protein, 16 aa, Homo sapiens
  CDR3 for alpha chain variable domain of TCR clone 276199 (TRAV13-1, TRAJ45)
CAASWESGGGADELTF

SEQ ID NO: 552398 - protein, 15 aa, Homo sapiens
  CDR3 for beta chain variable domain of TCR clone 276199 (TRBV4-1, TRBJ1-4)
CASSDTGGTNEKLFF

SEQ ID NO: 552399 - protein, 14 aa, Homo sapiens
  CDR3 for alpha chain variable domain of TCR clone 276200 (TRAV1-2, TRAJ8)
CALREDTGFQKLVF

SEQ ID NO: 552400 - protein, 17 aa, Homo sapiens
  CDR3 for beta chain variable domain of TCR clone 276200 (TRBV9, TRBJ2-2)
CASSVGGQGTDTGELFF

SEQ ID NO: 552401 - protein, 15 aa, Homo sapiens
  CDR3 for alpha chain variable domain of TCR clone 276201 (TRAV12-3, TRAJ6)
CAMSATTGGSYITTF

SEQ ID NO: 552402 - protein, 13 aa, Homo sapiens
  CDR3 for beta chain variable domain of TCR clone 276201 (TRBV19, TRBJ1-2)
CASSVPGQDGYTF

SEQ ID NO: 552403 - protein, 12 aa, Homo sapiens
  CDR3 for alpha chain variable domain of TCR clone 276202 (TRAV16, TRAJ10)
CSRTGGGNKLTL

SEQ ID NO: 552404 - protein, 15 aa, Homo sapiens
  CDR3 for beta chain variable domain of TCR clone 276202 (TRBV7-2, TRBJ2-1)
CASSFQLALYNEQFF

SEQ ID NO: 552405 - protein, 15 aa, Homo sapiens
  CDR3 for alpha chain variable domain of TCR clone 276203 (TRAV20, TRAJ43)
CAVQAGKRSNNDMRC

SEQ ID NO: 552406 - protein, 13 aa, Homo sapiens
  CDR3 for beta chain variable domain of TCR clone 276203 (TRBV27, TRBJ1-1)
CASSLSIGAEAFF

SEQ ID NO: 552407 - protein, 17 aa, Homo sapiens
  CDR3 for alpha chain variable domain of TCR clone 276204 (TRAV4, TRAJ18)
CLVGERSVGSTLGWLYF

SEQ ID NO: 552408 - protein, 14 aa, Homo sapiens
  CDR3 for beta chain variable domain of TCR clone 276204 (TRBV6-5, TRBJ1-2)
CASSYDGTGGGYTF

SEQ ID NO: 552409 - protein, 10 aa, Homo sapiens
  CDR3 for alpha chain variable domain of TCR clone 276205 (TRAV14/DV4, TRAJ48)
CAPRSEKLTF

SEQ ID NO: 552410 - protein, 13 aa, Homo sapiens
  CDR3 for beta chain variable domain of TCR clone 276205 (TRBV13, TRBJ2-5)
CASSPEVRETQYF

SEQ ID NO: 552411 - protein, 14 aa, Homo sapiens
  CDR3 for alpha chain variable domain of TCR clone 276206 (TRAV8-4, TRAJ43)
CAVSDPRNNNDMRF

SEQ ID NO: 552412 - protein, 18 aa, Homo sapiens
  CDR3 for beta chain variable domain of TCR clone 276206 (TRBV10-3, TRBJ2-3)
CAISESRVGPMRGDTQYF

SEQ ID NO: 552413 - protein, 14 aa, Homo sapiens
  CDR3 for alpha chain variable domain of TCR clone 276207 (TRAV26-1, TRAJ38)
CIAANAGNNRKLIW

SEQ ID NO: 552414 - protein, 15 aa, Homo sapiens
  CDR3 for beta chain variable domain of TCR clone 276207 (TRBV9, TRBJ2-1)
CASSLAGSAYNEQFF

SEQ ID NO: 552415 - protein, 13 aa, Homo sapiens
  CDR3 for alpha chain variable domain of TCR clone 276208 (TRAV5, TRAJ6)
CAESNSVSYIPTF

SEQ ID NO: 552416 - protein, 14 aa, Homo sapiens
  CDR3 for beta chain variable domain of TCR clone 276208 (TRBV5-1, TRBJ2-3)
CARSPGLAADTQYF

SEQ ID NO: 552417 - protein, 14 aa, Homo sapiens
  CDR3 for alpha chain variable domain of TCR clone 276209 (TRAV8-4, TRAJ15)
CAVILNQAGTALIF

SEQ ID NO: 552418 - protein, 15 aa, Homo sapiens
  CDR3 for beta chain variable domain of TCR clone 276209 (TRBV6-3, TRBJ2-7)
CASSSPGTVFYEQYF

SEQ ID NO: 552419 - protein, 15 aa, Homo sapiens
  CDR3 for alpha chain variable domain of TCR clone 276210 (TRAV8-2, TRAJ40)
CVVLGTTSGTYKYIF

SEQ ID NO: 552420 - protein, 16 aa, Homo sapiens
  CDR3 for beta chain variable domain of TCR clone 276210 (TRBV7-3, TRBJ2-1)
CASSLEGYRFYNEQFF

SEQ ID NO: 552421 - protein, 13 aa, Homo sapiens
  CDR3 for alpha chain variable domain of TCR clone 276211 (TRAV21, TRAJ33)
CAVAGDSNYQLIW

SEQ ID NO: 552422 - protein, 17 aa, Homo sapiens
  CDR3 for beta chain variable domain of TCR clone 276211 (TRBV11-2, TRBJ2-1)
CASSLYPPGVEYNEQFF

SEQ ID NO: 552423 - protein, 13 aa, Homo sapiens
  CDR3 for alpha chain variable domain of TCR clone 276212 (TRAV1-2, TRAJ9)
CAVLNTGGFKTIF

SEQ ID NO: 552424 - protein, 12 aa, Homo sapiens
  CDR3 for beta chain variable domain of TCR clone 276212 (TRBV7-9, TRBJ2-7)
CASSLEGYEQYF

SEQ ID NO: 552425 - protein, 18 aa, Homo sapiens
  CDR3 for alpha chain variable domain of TCR clone 276213 (TRAV3, TRAJ17)
CAVRARRGGRSCRQQANF

SEQ ID NO: 552426 - protein, 13 aa, Homo sapiens
  CDR3 for beta chain variable domain of TCR clone 276213 (TRBV4-1, TRBJ2-2)
RQQPSGEHGELFF

SEQ ID NO: 552427 - protein, 14 aa, Homo sapiens
  CDR3 for alpha chain variable domain of TCR clone 276214 (TRAV24, TRAJ42)
CAQNYGGGQGNLIF

SEQ ID NO: 552428 - protein, 15 aa, Homo sapiens
  CDR3 for beta chain variable domain of TCR clone 276214 (TRBV19, TRBJ1-5)
CASSIPGGAGQPQHF

SEQ ID NO: 552429 - protein, 14 aa, Homo sapiens
  CDR3 for alpha chain variable domain of TCR clone 276215 (TRAV12-2, TRAJ33)
CAAKRARSNYQLIW

SEQ ID NO: 552430 - protein, 16 aa, Homo sapiens
  CDR3 for beta chain variable domain of TCR clone 276215 (TRBV11-2, TRBJ2-7)
CASSLAPTGVNYEQYF

SEQ ID NO: 552431 - protein, 13 aa, Homo sapiens
  CDR3 for alpha chain variable domain of TCR clone 276216 (TRAV36/DV7, TRAJ54)
CTVVIQGAQKLVF

SEQ ID NO: 552432 - protein, 14 aa, Homo sapiens
  CDR3 for beta chain variable domain of TCR clone 276216 (TRBV19, TRBJ2-7)
CASNFRDTFTGLYF

SEQ ID NO: 552433 - protein, 14 aa, Homo sapiens
  CDR3 for alpha chain variable domain of TCR clone 276217 (TRAV12-2, TRAJ13)
CSVKQTGGYQKVTF

SEQ ID NO: 552434 - protein, 15 aa, Homo sapiens
  CDR3 for beta chain variable domain of TCR clone 276217 (TRBV27, TRBJ2-1)
CASSNGGGSSNEQFF

SEQ ID NO: 552435 - protein, 15 aa, Homo sapiens
  CDR3 for alpha chain variable domain of TCR clone 276218 (TRAV17, TRAJ57)
CATGPSQGGSEKLVF

SEQ ID NO: 552436 - protein, 16 aa, Homo sapiens
  CDR3 for beta chain variable domain of TCR clone 276218 (TRBV20-1, TRBJ2-2)
CSASASGIPGVGELFF

SEQ ID NO: 552437 - protein, 18 aa, Homo sapiens
  CDR3 for alpha chain variable domain of TCR clone 276219 (TRAV12-2, )
CAVEDIQNPDPAVYQLRY

SEQ ID NO: 552438 - protein, 16 aa, Homo sapiens
  CDR3 for beta chain variable domain of TCR clone 276219 (TRBV6-1, TRBJ1-2)
CASSGAWQGRSHGYTF

SEQ ID NO: 552439 - protein, 14 aa, Homo sapiens
  CDR3 for alpha chain variable domain of TCR clone 276220 (TRAV1-2, TRAJ16)
CAVNRFSDGQKLLL

SEQ ID NO: 552440 - protein, 14 aa, Homo sapiens
  CDR3 for beta chain variable domain of TCR clone 276220 (TRBV19, TRBJ2-2)
CASSTLHRSGELFF

SEQ ID NO: 552441 - protein, 14 aa, Homo sapiens
  CDR3 for alpha chain variable domain of TCR clone 276221 (TRAV13-1, TRAJ35)
CAASKGGFGNVLHC

SEQ ID NO: 552442 - protein, 13 aa, Homo sapiens
  CDR3 for beta chain variable domain of TCR clone 276221 (TRBV10-2, TRBJ2-5)
CASSEGGKETQYF

SEQ ID NO: 552443 - protein, 15 aa, Homo sapiens
  CDR3 for alpha chain variable domain of TCR clone 276222 (TRAV12-2, TRAJ50)
CAVNGLETSYDKVRF

SEQ ID NO: 552444 - protein, 16 aa, Homo sapiens
  CDR3 for beta chain variable domain of TCR clone 276222 (TRBV5-4, TRBJ2-3)
CASQQPGAGGADTQYF

SEQ ID NO: 552445 - protein, 15 aa, Homo sapiens
  CDR3 for alpha chain variable domain of TCR clone 276223 (TRAV26-1, TRAJ22)
CIGGSFLVLQGNLPF

SEQ ID NO: 552446 - protein, 19 aa, Homo sapiens
  CDR3 for beta chain variable domain of TCR clone 276223 (TRBV19, TRBJ2-5)
CASSIGQVTDFFLGETQYF

SEQ ID NO: 552447 - protein, 13 aa, Homo sapiens
  CDR3 for alpha chain variable domain of TCR clone 276224 (TRAV8-6, TRAJ49)
CAVITNTGNQFYF

SEQ ID NO: 552448 - protein, 14 aa, Homo sapiens
  CDR3 for beta chain variable domain of TCR clone 276224 (TRBV12-5, TRBJ2-5)
CASGSRAHQETQYF

SEQ ID NO: 552449 - protein, 16 aa, Homo sapiens
  CDR3 for alpha chain variable domain of TCR clone 276225 (TRAV6, TRAJ37)
CALDIFGSSNTGKPIF

SEQ ID NO: 552450 - protein, 14 aa, Homo sapiens
  CDR3 for beta chain variable domain of TCR clone 276225 (TRBV5-7, TRBJ2-7)
CASSLRSATYEQYF

SEQ ID NO: 552451 - protein, 14 aa, Homo sapiens
  CDR3 for alpha chain variable domain of TCR clone 276226 (TRAV12-1, TRAJ3)
CGAARYSSASKIIF

SEQ ID NO: 552452 - protein, 13 aa, Homo sapiens
  CDR3 for beta chain variable domain of TCR clone 276226 (TRBV19, TRBJ1-2)
CASSVPGQDGYTF

SEQ ID NO: 552453 - protein, 15 aa, Homo sapiens
  CDR3 for alpha chain variable domain of TCR clone 276227 (TRAV27, TRAJ50)
CAGVGRGTSYDKVII

SEQ ID NO: 552454 - protein, 14 aa, Homo sapiens
  CDR3 for beta chain variable domain of TCR clone 276227 (TRBV7-2, TRBJ1-1)
CASSFYDLNTEAFF

SEQ ID NO: 552455 - protein, 13 aa, Homo sapiens
  CDR3 for alpha chain variable domain of TCR clone 276228 (TRAV17, TRAJ54)
CATSWGGAQKLVF

SEQ ID NO: 552456 - protein, 14 aa, Homo sapiens
  CDR3 for beta chain variable domain of TCR clone 276228 (TRBV19, TRBJ1-5)
CASSKMTGPQPQHF

SEQ ID NO: 552457 - protein, 15 aa, Homo sapiens
  CDR3 for alpha chain variable domain of TCR clone 276229 (TRAV14/DV4, TRAJ54)
CAMRPSIQGAQKLVF

SEQ ID NO: 552458 - protein, 14 aa, Homo sapiens
  CDR3 for beta chain variable domain of TCR clone 276229 (TRBV5-5, TRBJ1-2)
CASSLDPYNYGYTF

SEQ ID NO: 552459 - protein, 15 aa, Homo sapiens
  CDR3 for alpha chain variable domain of TCR clone 276230 (TRAV1-2, TRAJ30)
CAVRPHGNRDDKIIF

SEQ ID NO: 552460 - protein, 16 aa, Homo sapiens
  CDR3 for beta chain variable domain of TCR clone 276230 (TRBV29-1, TRBJ2-7)
CSVEVVGTSGSYEQYF

SEQ ID NO: 552461 - protein, 15 aa, Homo sapiens
  CDR3 for alpha chain variable domain of TCR clone 276231 (TRAV26-2, TRAJ13)
CILRDLSGGYQKVTF

SEQ ID NO: 552462 - protein, 14 aa, Homo sapiens
  CDR3 for beta chain variable domain of TCR clone 276231 (TRBV4-1, TRBJ2-3)
GASSQEGSADTQYF

SEQ ID NO: 552463 - protein, 11 aa, Homo sapiens
  CDR3 for alpha chain variable domain of TCR clone 276232 (TRAV12-1, TRAJ30)
CVLNGQDKIIF

SEQ ID NO: 552464 - protein, 15 aa, Homo sapiens
  CDR3 for beta chain variable domain of TCR clone 276232 (TRBV28, TRBJ2-5)
CASSSGRTIQETQYF

SEQ ID NO: 552465 - protein, 14 aa, Homo sapiens
  CDR3 for alpha chain variable domain of TCR clone 276233 (TRAV3, TRAJ6)
CAVRDPWGSYIPTF

SEQ ID NO: 552466 - protein, 16 aa, Homo sapiens
  CDR3 for beta chain variable domain of TCR clone 276233 (TRBV7-6, TRBJ2-3)
CASSPRRGGLGDTQYF

SEQ ID NO: 552467 - protein, 16 aa, Homo sapiens
  CDR3 for alpha chain variable domain of TCR clone 276234 (TRAV12-3, TRAJ53)
CAMSPGSGGSNYKPTF

SEQ ID NO: 552468 - protein, 14 aa, Homo sapiens
  CDR3 for beta chain variable domain of TCR clone 276234 (TRBV7-3, TRBJ2-1)
CASSLAGGTNEQLF

SEQ ID NO: 552469 - protein, 12 aa, Homo sapiens
  CDR3 for alpha chain variable domain of TCR clone 276235 (TRAV13-2, TRAJ23)
CAERHRGGKLIF

SEQ ID NO: 552470 - protein, 15 aa, Homo sapiens
  CDR3 for beta chain variable domain of TCR clone 276235 (TRBV18, TRBJ2-7)
CASSPRSGTAYEQYF

SEQ ID NO: 552471 - protein, 14 aa, Homo sapiens
  CDR3 for alpha chain variable domain of TCR clone 276236 (TRAV38-1, TRAJ45)
CAYYSGGGADGLTF

SEQ ID NO: 552472 - protein, 15 aa, Homo sapiens
  CDR3 for beta chain variable domain of TCR clone 276236 (TRBV3-1, TRBJ2-5)
CASSANLGGPETQYF

SEQ ID NO: 552473 - protein, 15 aa, Homo sapiens
  CDR3 for alpha chain variable domain of TCR clone 276237 (TRAV12-3, TRAJ6)
CAMSATSGGSHIPTF

SEQ ID NO: 552474 - protein, 11 aa, Homo sapiens
  CDR3 for beta chain variable domain of TCR clone 276237 (TRBV20-1, TRBJ1-5)
CSAQGDQPQHF

SEQ ID NO: 552475 - protein, 12 aa, Homo sapiens
  CDR3 for alpha chain variable domain of TCR clone 276238 (TRAV17, TRAJ57)
CATDGGSEKLVF

SEQ ID NO: 552476 - protein, 15 aa, Homo sapiens
  CDR3 for beta chain variable domain of TCR clone 276238 (TRBV7-9, TRBJ2-7)
CASSLALAEAYEQYF

SEQ ID NO: 552477 - protein, 12 aa, Homo sapiens
  CDR3 for alpha chain variable domain of TCR clone 276239 (TRAV25, TRAJ38)
CAGTGNNRKLIW

SEQ ID NO: 552478 - protein, 14 aa, Homo sapiens
  CDR3 for beta chain variable domain of TCR clone 276239 (TRBV19, TRBJ1-5)
CASSIMTGPQPQHF

SEQ ID NO: 552479 - protein, 14 aa, Homo sapiens
  CDR3 for alpha chain variable domain of TCR clone 276240 (TRAV12-1, TRAJ22)
CVVTTSGSARQLTF

SEQ ID NO: 552480 - protein, 17 aa, Homo sapiens
  CDR3 for beta chain variable domain of TCR clone 276240 (TRBV13, TRBJ2-3)
CASSPSRVAGGRNTQYF

SEQ ID NO: 552481 - protein, 12 aa, Homo sapiens
  CDR3 for alpha chain variable domain of TCR clone 276241 (TRAV21, TRAJ27)
CAARPAMQANQP

SEQ ID NO: 552482 - protein, 14 aa, Homo sapiens
  CDR3 for beta chain variable domain of TCR clone 276241 (TRBV7-6, TRBJ2-3)
CASSLGTVTDTQYF

SEQ ID NO: 552483 - protein, 19 aa, Homo sapiens
  CDR3 for alpha chain variable domain of TCR clone 276242 (TRAV26-1, TRAJ52)
CIVRAHRNAGGTTYGRLTF

SEQ ID NO: 552484 - protein, 15 aa, Homo sapiens
  CDR3 for beta chain variable domain of TCR clone 276242 (TRBV12-4, TRBJ2-5)
CAGSPPTGLQETQYF

SEQ ID NO: 552485 - protein, 19 aa, Homo sapiens
  CDR3 for alpha chain variable domain of TCR clone 276243 (TRAV2, TRAJ8)
CAVDHRLSETCIWNWHPTS

SEQ ID NO: 552486 - protein, 15 aa, Homo sapiens
  CDR3 for beta chain variable domain of TCR clone 276243 (TRBV15, TRBJ2-7)
CATSSRQESSYEQYF

SEQ ID NO: 552487 - protein, 18 aa, Homo sapiens
  CDR3 for alpha chain variable domain of TCR clone 276244 (TRAV13-1, TRAJ52)
CAASKRSTGGTSYGKLTF

SEQ ID NO: 552488 - protein, 13 aa, Homo sapiens
  CDR3 for beta chain variable domain of TCR clone 276244 (TRBV12-4, TRBJ1-2)
CASSLRQGKGYAF

SEQ ID NO: 552489 - protein, 12 aa, Homo sapiens
  CDR3 for alpha chain variable domain of TCR clone 276245 (TRAV3, TRAJ27)
CAVRDKAGKSTF

SEQ ID NO: 552490 - protein, 14 aa, Homo sapiens
  CDR3 for beta chain variable domain of TCR clone 276245 (TRBV5-1, TRBJ1-2)
CASSVDSTDYGYTF

SEQ ID NO: 552491 - protein, 12 aa, Homo sapiens
  CDR3 for alpha chain variable domain of TCR clone 276246 (TRAV13-1, TRAJ37)
CAATSNTGKLIF

SEQ ID NO: 552492 - protein, 13 aa, Homo sapiens
  CDR3 for beta chain variable domain of TCR clone 276246 (TRBV19, TRBJ2-5)
CASRLAGHETQYF

SEQ ID NO: 552493 - protein, 13 aa, Homo sapiens
  CDR3 for alpha chain variable domain of TCR clone 276247 (TRAV27, TRAJ42)
CAGARGSQGNLIF

SEQ ID NO: 552494 - protein, 17 aa, Homo sapiens
  CDR3 for beta chain variable domain of TCR clone 276247 (TRBV13, TRBJ2-3)
RASSLSRVAGGRNTQYF

SEQ ID NO: 552495 - protein, 13 aa, Homo sapiens
  CDR3 for alpha chain variable domain of TCR clone 276248 (TRAV21, TRAJ57)
CAVTQGGSEKLVF

SEQ ID NO: 552496 - protein, 17 aa, Homo sapiens
  CDR3 for beta chain variable domain of TCR clone 276248 (TRBV11-3, TRBJ1-5)
CASSPLTGLRGNQPQHF

SEQ ID NO: 552497 - protein, 17 aa, Homo sapiens
  CDR3 for alpha chain variable domain of TCR clone 276249 (TRAV23/DV6, TRAJ57)
CSASSTLSQGGSEKLVF

SEQ ID NO: 552498 - protein, 14 aa, Homo sapiens
  CDR3 for beta chain variable domain of TCR clone 276249 (TRBV25-1, TRBJ1-1)
CASTHLGRNTEAFF

SEQ ID NO: 552499 - protein, 11 aa, Homo sapiens
  CDR3 for alpha chain variable domain of TCR clone 276250 (TRAV12-1, TRAJ16)
CGDPDGQKLLF

SEQ ID NO: 552500 - protein, 13 aa, Homo sapiens
  CDR3 for beta chain variable domain of TCR clone 276250 (TRBV11-2, TRBJ2-5)
CASSSTGEETQYF

SEQ ID NO: 552501 - protein, 15 aa, Homo sapiens
  CDR3 for alpha chain variable domain of TCR clone 276251 (TRAV21, TRAJ45)
CAVSYSGGGADGLTF

SEQ ID NO: 552502 - protein, 15 aa, Homo sapiens
  CDR3 for beta chain variable domain of TCR clone 276251 (TRBV20-1, TRBJ2-7)
CSARDRVSGMDEQYF

SEQ ID NO: 552503 - protein, 14 aa, Homo sapiens
  CDR3 for alpha chain variable domain of TCR clone 276252 (TRAV13-1, TRAJ35)
CAASKGGGGNVLQC

SEQ ID NO: 552504 - protein, 13 aa, Homo sapiens
  CDR3 for beta chain variable domain of TCR clone 276252 (TRBV7-3, TRBJ1-1)
CASSQDWGADAFF

SEQ ID NO: 552505 - protein, 16 aa, Homo sapiens
  CDR3 for alpha chain variable domain of TCR clone 276253 (TRAV35, TRAJ28)
CAGQKYSGAGSYQLTF

SEQ ID NO: 552506 - protein, 16 aa, Homo sapiens
  CDR3 for beta chain variable domain of TCR clone 276253 (TRBV7-3, TRBJ2-2)
CASILKRGTLSGELFF

SEQ ID NO: 552507 - protein, 17 aa, Homo sapiens
  CDR3 for alpha chain variable domain of TCR clone 276254 (TRAV9-2, TRAJ45)
CALSGYYSGGGADGLTF

SEQ ID NO: 552508 - protein, 14 aa, Homo sapiens
  CDR3 for beta chain variable domain of TCR clone 276254 (TRBV7-2, TRBJ2-7)
CASSPKTSFYEQYF

SEQ ID NO: 552509 - protein, 16 aa, Homo sapiens
  CDR3 for alpha chain variable domain of TCR clone 276255 (TRAV35, TRAJ28)
CAGQRYSGAGSYQLTF

SEQ ID NO: 552510 - protein, 16 aa, Homo sapiens
  CDR3 for beta chain variable domain of TCR clone 276255 (TRBV13, TRBJ2-2)
CASSPRTGEHTGELFF

SEQ ID NO: 552511 - protein, 12 aa, Homo sapiens
  CDR3 for alpha chain variable domain of TCR clone 276256 (TRAV8-3, TRAJ20)
CAVGANAYKLSF

SEQ ID NO: 552512 - protein, 16 aa, Homo sapiens
  CDR3 for beta chain variable domain of TCR clone 276256 (TRBV5-1, TRBJ1-1)
CASSSGGNSLNTEAFF

SEQ ID NO: 552513 - protein, 17 aa, Homo sapiens
  CDR3 for alpha chain variable domain of TCR clone 276257 (TRAV3, TRAJ6)
CAARDGPRAGGSYIPTF

SEQ ID NO: 552514 - protein, 14 aa, Homo sapiens
  CDR3 for beta chain variable domain of TCR clone 276257 (TRBV7-2, TRBJ2-7)
CASRSQGAAYEQYF

SEQ ID NO: 552515 - protein, 12 aa, Homo sapiens
  CDR3 for alpha chain variable domain of TCR clone 276258 (TRAV13-1, TRAJ15)
CAASQAGTALIF

SEQ ID NO: 552516 - protein, 15 aa, Homo sapiens
  CDR3 for beta chain variable domain of TCR clone 276258 (TRBV11-2, TRBJ2-1)
CASSLGTSGLNEQFF

SEQ ID NO: 552517 - protein, 14 aa, Homo sapiens
  CDR3 for alpha chain variable domain of TCR clone 276259 (TRAV12-1, TRAJ9)
CVVTGYTGGFKTIF

SEQ ID NO: 552518 - protein, 13 aa, Homo sapiens
  CDR3 for beta chain variable domain of TCR clone 276259 (TRBV20-1, TRBJ1-1)
CSARAGGNAEAFF

SEQ ID NO: 552519 - protein, 12 aa, Homo sapiens
  CDR3 for alpha chain variable domain of TCR clone 276260 (TRAV26-1, TRAJ48)
CIAVFGNEKLTF

SEQ ID NO: 552520 - protein, 14 aa, Homo sapiens
  CDR3 for beta chain variable domain of TCR clone 276260 (TRBV19, TRBJ2-7)
CASSMGQGAIEQYF

SEQ ID NO: 552521 - protein, 12 aa, Homo sapiens
  CDR3 for alpha chain variable domain of TCR clone 276261 (TRAV1-2, TRAJ33)
CAALDSNYQLIW

SEQ ID NO: 552522 - protein, 16 aa, Homo sapiens
  CDR3 for beta chain variable domain of TCR clone 276261 (TRBV12-4, TRBJ2-5)
CASSPQSPQGGETQYF

SEQ ID NO: 552523 - protein, 14 aa, Homo sapiens
  CDR3 for alpha chain variable domain of TCR clone 276262 (TRAV12-3, TRAJ10)
SHLPLTGGGNKLTF

SEQ ID NO: 552524 - protein, 15 aa, Homo sapiens
  CDR3 for beta chain variable domain of TCR clone 276262 (TRBV27, TRBJ2-7)
CASSPDQGRLYEQYF

SEQ ID NO: 552525 - protein, 21 aa, Homo sapiens
  CDR3 for alpha chain variable domain of TCR clone 276263 (TRAV12-1, TRAJ32)
SSVIQPPTSMNYGGATDKLIF

SEQ ID NO: 552526 - protein, 15 aa, Homo sapiens
  CDR3 for beta chain variable domain of TCR clone 276263 (TRBV7-9, TRBJ2-2)
CASGPLDTFPGELFF

SEQ ID NO: 552527 - protein, 12 aa, Homo sapiens
  CDR3 for alpha chain variable domain of TCR clone 276264 (TRAV27, TRAJ42)
CAGGGSQGNLIF

SEQ ID NO: 552528 - protein, 14 aa, Homo sapiens
  CDR3 for beta chain variable domain of TCR clone 276264 (TRBV20-1, TRBJ2-1)
SSAQIGGSANEQFF

SEQ ID NO: 552529 - protein, 16 aa, Homo sapiens
  CDR3 for alpha chain variable domain of TCR clone 276265 (TRAV3, TRAJ37)
CAVRPHGSGNTGKQIF

SEQ ID NO: 552530 - protein, 14 aa, Homo sapiens
  CDR3 for beta chain variable domain of TCR clone 276265 (TRBV20-1, TRBJ2-1)
CSARGGSSYNEQFF

SEQ ID NO: 552531 - protein, 12 aa, Homo sapiens
  CDR3 for alpha chain variable domain of TCR clone 276266 (TRAV12-2, TRAJ8)
CAVNTGFQNLVF

SEQ ID NO: 552532 - protein, 15 aa, Homo sapiens
  CDR3 for beta chain variable domain of TCR clone 276266 (TRBV7-8, TRBJ1-5)
CACSLERRGLEPQHF

SEQ ID NO: 552533 - protein, 12 aa, Homo sapiens
  CDR3 for alpha chain variable domain of TCR clone 276267 (TRAV36/DV7, TRAJ39)
CWTNNAGNMLTF

SEQ ID NO: 552534 - protein, 14 aa, Homo sapiens
  CDR3 for beta chain variable domain of TCR clone 276267 (TRBV7-2, TRBJ2-2)
CASSSDGHTGELFL

SEQ ID NO: 552535 - protein, 15 aa, Homo sapiens
  CDR3 for alpha chain variable domain of TCR clone 276268 (TRAV21, TRAJ53)
CATLNSGGSNYKLTL

SEQ ID NO: 552536 - protein, 15 aa, Homo sapiens
  CDR3 for beta chain variable domain of TCR clone 276268 (TRBV20-1, TRBJ2-7)
CSARDRVCGMDEQYF

SEQ ID NO: 552537 - protein, 16 aa, Homo sapiens
  CDR3 for alpha chain variable domain of TCR clone 276269 (TRAV30, TRAJ57)
CGTGWAHQGGSEKLVF

SEQ ID NO: 552538 - protein, 14 aa, Homo sapiens
  CDR3 for beta chain variable domain of TCR clone 276269 (TRBV18, TRBJ1-1)
CASSPGFQGVEAFF

SEQ ID NO: 552539 - protein, 12 aa, Homo sapiens
  CDR3 for alpha chain variable domain of TCR clone 276270 (TRAV13-1, TRAJ11)
CAGPSGYSTLTF

SEQ ID NO: 552540 - protein, 13 aa, Homo sapiens
  CDR3 for beta chain variable domain of TCR clone 276270 (TRBV12-4, TRBJ1-5)
CASSPDRAQPKHF

SEQ ID NO: 552541 - protein, 14 aa, Homo sapiens
  CDR3 for alpha chain variable domain of TCR clone 276271 (TRAV17, TRAJ16)
CATADFSDGQKLLF

SEQ ID NO: 552542 - protein, 16 aa, Homo sapiens
  CDR3 for beta chain variable domain of TCR clone 276271 (TRBV2, TRBJ2-5)
CASSETQGVGEETQYF

SEQ ID NO: 552543 - protein, 14 aa, Homo sapiens
  CDR3 for alpha chain variable domain of TCR clone 276272 (TRAV30, TRAJ33)
CGTERRFSNYQLIW

SEQ ID NO: 552544 - protein, 16 aa, Homo sapiens
  CDR3 for beta chain variable domain of TCR clone 276272 (TRBV7-3, TRBJ2-2)
CASSFKRGSLSGELFF

SEQ ID NO: 552545 - protein, 21 aa, Homo sapiens
  CDR3 for alpha chain variable domain of TCR clone 276273 (TRAV16, TRAJ22)
HLKKPFAQEEDSTMYLRQLTF

SEQ ID NO: 552546 - protein, 15 aa, Homo sapiens
  CDR3 for beta chain variable domain of TCR clone 276273 (TRBV7-9, TRBJ1-6)
CASSSPGRGNSPLHF

SEQ ID NO: 552547 - protein, 15 aa, Homo sapiens
  CDR3 for alpha chain variable domain of TCR clone 276274 (TRAV1-2, TRAJ32)
FAVRGYGVATNKLIF

SEQ ID NO: 552548 - protein, 15 aa, Homo sapiens
  CDR3 for beta chain variable domain of TCR clone 276274 (TRBV25-1, TRBJ2-5)
CASSDTGTHQETQYF

SEQ ID NO: 552549 - protein, 13 aa, Homo sapiens
  CDR3 for alpha chain variable domain of TCR clone 276275 (TRAV29/DV5, TRAJ31)
CAASRNNNARLMF

SEQ ID NO: 552550 - protein, 13 aa, Homo sapiens
  CDR3 for beta chain variable domain of TCR clone 276275 (TRBV7-2, TRBJ1-5)
CASTQTVTQPQHF

SEQ ID NO: 552551 - protein, 12 aa, Homo sapiens
  CDR3 for alpha chain variable domain of TCR clone 276276 (TRAV12-2, TRAJ16)
CAVAPDGQKLLF

SEQ ID NO: 552552 - protein, 16 aa, Homo sapiens
  CDR3 for beta chain variable domain of TCR clone 276276 (TRBV9, TRBJ1-2)
CASSVEEKVSPYGYTF

SEQ ID NO: 552553 - protein, 13 aa, Homo sapiens
  CDR3 for alpha chain variable domain of TCR clone 276277 (TRAV1-2, TRAJ9)
CAALSTGGFKTIF

SEQ ID NO: 552554 - protein, 13 aa, Homo sapiens
  CDR3 for beta chain variable domain of TCR clone 276277 (TRBV4-1, TRBJ2-1)
CASSQEVRYEQFF

SEQ ID NO: 552555 - protein, 12 aa, Homo sapiens
  CDR3 for alpha chain variable domain of TCR clone 276278 (TRAV27, TRAJ41)
CAGRNYGYALNF

SEQ ID NO: 552556 - protein, 15 aa, Homo sapiens
  CDR3 for beta chain variable domain of TCR clone 276278 (TRBV6-3, TRBJ2-7)
CASSSPGTVFYEQYF

SEQ ID NO: 552557 - protein, 15 aa, Homo sapiens
  CDR3 for alpha chain variable domain of TCR clone 276279 (TRAV2, TRAJ22)
CAVGFLSGSARQLTC

SEQ ID NO: 552558 - protein, 15 aa, Homo sapiens
  CDR3 for beta chain variable domain of TCR clone 276279 (TRBV2, TRBJ2-1)
CASSELAGGYNEQFF

SEQ ID NO: 552559 - protein, 15 aa, Homo sapiens
  CDR3 for alpha chain variable domain of TCR clone 276280 (TRAV3, TRAJ22)
CAVRDRGGSARQLTF

SEQ ID NO: 552560 - protein, 14 aa, Homo sapiens
  CDR3 for beta chain variable domain of TCR clone 276280 (TRBV5-4, TRBJ2-3)
PASPGAGGADTQYF

SEQ ID NO: 552561 - protein, 14 aa, Homo sapiens
  CDR3 for alpha chain variable domain of TCR clone 276281 (TRAV13-1, TRAJ35)
CAASKGGFGNVLHF

SEQ ID NO: 552562 - protein, 15 aa, Homo sapiens
  CDR3 for beta chain variable domain of TCR clone 276281 (TRBV28, TRBJ2-1)
CACSGLAEVDNEQFF

SEQ ID NO: 552563 - protein, 15 aa, Homo sapiens
  CDR3 for alpha chain variable domain of TCR clone 276282 (TRAV1-1, TRAJ5)
CAVRHMDTGRRALTF

SEQ ID NO: 552564 - protein, 17 aa, Homo sapiens
  CDR3 for beta chain variable domain of TCR clone 276282 (TRBV28, TRBJ2-7)
CASSPGLAGGDSSELYF

SEQ ID NO: 552565 - protein, 15 aa, Homo sapiens
  CDR3 for alpha chain variable domain of TCR clone 276283 (TRAV3, TRAJ5)
CAVRDLYMGRRALTF

SEQ ID NO: 552566 - protein, 13 aa, Homo sapiens
  CDR3 for beta chain variable domain of TCR clone 276283 (TRBV12-4, TRBJ2-7)
CASSPTETYEQYF

SEQ ID NO: 552567 - protein, 13 aa, Homo sapiens
  CDR3 for alpha chain variable domain of TCR clone 276284 (TRAV20, TRAJ48)
CAVQGVGNEKLTF

SEQ ID NO: 552568 - protein, 19 aa, Homo sapiens
  CDR3 for beta chain variable domain of TCR clone 276284 (TRBV2, TRBJ2-2)
CASSQTGLAGGGNTGEPFF

SEQ ID NO: 552569 - protein, 14 aa, Homo sapiens
  CDR3 for alpha chain variable domain of TCR clone 276285 (TRAV13-2, TRAJ23)
CAENTYNQGGKLIF

SEQ ID NO: 552570 - protein, 15 aa, Homo sapiens
  CDR3 for beta chain variable domain of TCR clone 276285 (TRBV12-4, TRBJ2-5)
CASSPPTGLQETQYF

SEQ ID NO: 552571 - protein, 14 aa, Homo sapiens
  CDR3 for alpha chain variable domain of TCR clone 276286 (TRAV1-2, TRAJ16)
CAVNRLSDGQKLLF

SEQ ID NO: 552572 - protein, 13 aa, Homo sapiens
  CDR3 for beta chain variable domain of TCR clone 276286 (TRBV14, TRBJ1-1)
CASSREFGTEAFF

SEQ ID NO: 552573 - protein, 12 aa, Homo sapiens
  CDR3 for alpha chain variable domain of TCR clone 276287 (TRAV13-1, TRAJ21)
CSAKEGFNKFYF

SEQ ID NO: 552574 - protein, 16 aa, Homo sapiens
  CDR3 for beta chain variable domain of TCR clone 276287 (TRBV24-1, TRBJ2-3)
CATSDPGTGATDTQYF

SEQ ID NO: 552575 - protein, 14 aa, Homo sapiens
  CDR3 for alpha chain variable domain of TCR clone 276288 (TRAV12-2, TRAJ40)
CAVKIPSGTYKYIF

SEQ ID NO: 552576 - protein, 15 aa, Homo sapiens
  CDR3 for beta chain variable domain of TCR clone 276288 (TRBV20-1, TRBJ2-7)
RSARDRVSGMDEQYF

SEQ ID NO: 552577 - protein, 13 aa, Homo sapiens
  CDR3 for alpha chain variable domain of TCR clone 276289 (TRAV21, TRAJ36)
CAVIKTGPNNLFF

SEQ ID NO: 552578 - protein, 13 aa, Homo sapiens
  CDR3 for beta chain variable domain of TCR clone 276289 (TRBV29-1, TRBJ2-3)
CSATRGGRDTQYF

SEQ ID NO: 552579 - protein, 20 aa, Homo sapiens
  CDR3 for alpha chain variable domain of TCR clone 276290 (TRAV12-3, TRAJ41)
SLFIGDSQPSDSATPEALNF

SEQ ID NO: 552580 - protein, 16 aa, Homo sapiens
  CDR3 for beta chain variable domain of TCR clone 276290 (TRBV12-3, TRBJ2-1)
CASSPGGNRWSHEQFF

SEQ ID NO: 552581 - protein, 15 aa, Homo sapiens
  CDR3 for alpha chain variable domain of TCR clone 276291 (TRAV25, TRAJ10)
CAGLGLTGGGNKLTF

SEQ ID NO: 552582 - protein, 15 aa, Homo sapiens
  CDR3 for beta chain variable domain of TCR clone 276291 (TRBV19, TRBJ2-1)
CASSSPGVPLDEQFF

SEQ ID NO: 552583 - protein, 14 aa, Homo sapiens
  CDR3 for alpha chain variable domain of TCR clone 276292 (TRAV12-2, TRAJ13)
YAVKKTGGYQKVTF

SEQ ID NO: 552584 - protein, 17 aa, Homo sapiens
  CDR3 for beta chain variable domain of TCR clone 276292 (TRBV20-1, TRBJ2-2)
CSASGSGQGGLTGELFF

SEQ ID NO: 552585 - protein, 16 aa, Homo sapiens
  CDR3 for alpha chain variable domain of TCR clone 276293 (TRAV30, TRAJ24)
CGTEIVDADSWGKFQL

SEQ ID NO: 552586 - protein, 14 aa, Homo sapiens
  CDR3 for beta chain variable domain of TCR clone 276293 (TRBV12-5, TRBJ2-5)
CASGSQTHQETQYF

SEQ ID NO: 552587 - protein, 13 aa, Homo sapiens
  CDR3 for alpha chain variable domain of TCR clone 276294 (TRAV13-2, TRAJ13)
CAERPGGYQKLTF

SEQ ID NO: 552588 - protein, 15 aa, Homo sapiens
  CDR3 for beta chain variable domain of TCR clone 276294 (TRBV11-3, TRBJ2-7)
CASSPGPASSYEQYF

SEQ ID NO: 552589 - protein, 13 aa, Homo sapiens
  CDR3 for alpha chain variable domain of TCR clone 276295 (TRAV23/DV6, TRAJ12)
CAPRVDSSYKLIF

SEQ ID NO: 552590 - protein, 16 aa, Homo sapiens
  CDR3 for beta chain variable domain of TCR clone 276295 (TRBV28, TRBJ1-4)
CASSPPYRGRSEKLFF

SEQ ID NO: 552591 - protein, 11 aa, Homo sapiens
  CDR3 for alpha chain variable domain of TCR clone 276296 (TRAV3, TRAJ21)
CAVGNLNKFYF

SEQ ID NO: 552592 - protein, 16 aa, Homo sapiens
  CDR3 for beta chain variable domain of TCR clone 276296 (TRBV19, TRBJ2-1)
CASNKAGPSSYNEQFF

SEQ ID NO: 552593 - protein, 14 aa, Homo sapiens
  CDR3 for alpha chain variable domain of TCR clone 276297 (TRAV12-2, TRAJ40)
CAVKITSGTYKYIF

SEQ ID NO: 552594 - protein, 14 aa, Homo sapiens
  CDR3 for beta chain variable domain of TCR clone 276297 (TRBV7-9, TRBJ2-1)
CASSPRDSLYEQFF

SEQ ID NO: 552595 - protein, 14 aa, Homo sapiens
  CDR3 for alpha chain variable domain of TCR clone 276298 (TRAV12-3, TRAJ10)
SHLPLTGGGNKLTF

SEQ ID NO: 552596 - protein, 14 aa, Homo sapiens
  CDR3 for beta chain variable domain of TCR clone 276298 (TRBV11-3, TRBJ2-7)
SASSPDRNTYEQYF

SEQ ID NO: 552597 - protein, 13 aa, Homo sapiens
  CDR3 for alpha chain variable domain of TCR clone 276299 (TRAV20, TRAJ54)
CAVQAGGAQKLAF

SEQ ID NO: 552598 - protein, 14 aa, Homo sapiens
  CDR3 for beta chain variable domain of TCR clone 276299 (TRBV20-1, TRBJ2-7)
CSAKTGTGGYEQYF

SEQ ID NO: 552599 - protein, 14 aa, Homo sapiens
  CDR3 for alpha chain variable domain of TCR clone 276300 (TRAV12-2, TRAJ45)
CALPQRGGADGLTF

SEQ ID NO: 552600 - protein, 14 aa, Homo sapiens
  CDR3 for beta chain variable domain of TCR clone 276300 (TRBV18, TRBJ1-5)
CASSPGNSNQPQHF

SEQ ID NO: 552601 - protein, 13 aa, Homo sapiens
  CDR3 for alpha chain variable domain of TCR clone 276301 (TRAV26-1, TRAJ48)
CIVRVVGDGKLTF

SEQ ID NO: 552602 - protein, 19 aa, Homo sapiens
  CDR3 for beta chain variable domain of TCR clone 276301 (TRBV11-3, TRBJ2-2)
CASSTRPGAKTTNTGELFF

SEQ ID NO: 552603 - protein, 14 aa, Homo sapiens
  CDR3 for alpha chain variable domain of TCR clone 276302 (TRAV26-1, TRAJ34)
CFVRESYNTDKLIF

SEQ ID NO: 552604 - protein, 13 aa, Homo sapiens
  CDR3 for beta chain variable domain of TCR clone 276302 (TRBV19, TRBJ2-1)
CATSRGVYNEQFF

SEQ ID NO: 552605 - protein, 13 aa, Homo sapiens
  CDR3 for alpha chain variable domain of TCR clone 276303 (TRAV36/DV7, TRAJ21)
CAVEAYNFNKFYF

SEQ ID NO: 552606 - protein, 14 aa, Homo sapiens
  CDR3 for beta chain variable domain of TCR clone 276303 (TRBV6-1, TRBJ1-1)
CASSGTGLNTEASF

SEQ ID NO: 552607 - protein, 14 aa, Homo sapiens
  CDR3 for alpha chain variable domain of TCR clone 276304 (TRAV8-3, TRAJ28)
CAVVPGAGSYQLTF

SEQ ID NO: 552608 - protein, 15 aa, Homo sapiens
  CDR3 for beta chain variable domain of TCR clone 276304 (TRBV6-3, TRBJ2-2)
CASRGMTVDTGELFF

SEQ ID NO: 552609 - protein, 14 aa, Homo sapiens
  CDR3 for alpha chain variable domain of TCR clone 276305 (TRAV12-2, TRAJ13)
CAVKKTGGYQKVTF

SEQ ID NO: 552610 - protein, 15 aa, Homo sapiens
  CDR3 for beta chain variable domain of TCR clone 276305 (TRBV7-2, TRBJ2-1)
CASSSGLAGGNKQFF

SEQ ID NO: 552611 - protein, 19 aa, Homo sapiens
  CDR3 for alpha chain variable domain of TCR clone 276306 (TRAV40, )
CLPIPDIQNPDPAVYQLRD

SEQ ID NO: 552612 - protein, 15 aa, Homo sapiens
  CDR3 for beta chain variable domain of TCR clone 276306 (TRBV2, TRBJ1-2)
CASSEIGGANYGYTC

SEQ ID NO: 552613 - protein, 11 aa, Homo sapiens
  CDR3 for alpha chain variable domain of TCR clone 276307 (TRAV35, TRAJ30)
CAPGGDDKIIF

SEQ ID NO: 552614 - protein, 14 aa, Homo sapiens
  CDR3 for beta chain variable domain of TCR clone 276307 (TRBV12-5, TRBJ2-5)
CASGSRTHQETQYF

SEQ ID NO: 552615 - protein, 15 aa, Homo sapiens
  CDR3 for alpha chain variable domain of TCR clone 276308 (TRAV2, TRAJ22)
CAVPSREVSARQLTF

SEQ ID NO: 552616 - protein, 11 aa, Homo sapiens
  CDR3 for beta chain variable domain of TCR clone 276308 (TRBV27, TRBJ2-3)
CASSLGDTQYF

SEQ ID NO: 552617 - protein, 11 aa, Homo sapiens
  CDR3 for alpha chain variable domain of TCR clone 276309 (TRAV4, TRAJ31)
FLVGFSARLMF

SEQ ID NO: 552618 - protein, 16 aa, Homo sapiens
  CDR3 for beta chain variable domain of TCR clone 276309 (TRBV15, TRBJ2-6)
CATSVNGGFLANVLTF

SEQ ID NO: 552619 - protein, 13 aa, Homo sapiens
  CDR3 for alpha chain variable domain of TCR clone 276310 (TRAV13-1, TRAJ5)
CAASDTGRRPLTF

SEQ ID NO: 552620 - protein, 12 aa, Homo sapiens
  CDR3 for beta chain variable domain of TCR clone 276310 (TRBV28, TRBJ2-3)
CASSLYRDTQYF

SEQ ID NO: 552621 - protein, 15 aa, Homo sapiens
  CDR3 for alpha chain variable domain of TCR clone 276311 (TRAV17, TRAJ37)
CATDHGSSNTGNLIF

SEQ ID NO: 552622 - protein, 14 aa, Homo sapiens
  CDR3 for beta chain variable domain of TCR clone 276311 (TRBV7-3, TRBJ2-1)
CASSLTGGANEQFF

SEQ ID NO: 552623 - protein, 13 aa, Homo sapiens
  CDR3 for alpha chain variable domain of TCR clone 276312 (TRAV12-3, TRAJ13)
CAMTSGGYQKVTF

SEQ ID NO: 552624 - protein, 15 aa, Homo sapiens
  CDR3 for beta chain variable domain of TCR clone 276312 (TRBV27, TRBJ2-1)
CASSNGGGSSNEQFF

SEQ ID NO: 552625 - protein, 12 aa, Homo sapiens
  CDR3 for alpha chain variable domain of TCR clone 276313 (TRAV27, TRAJ35)
CAGADFGNVLHC

SEQ ID NO: 552626 - protein, 14 aa, Homo sapiens
  CDR3 for beta chain variable domain of TCR clone 276313 (TRBV20-1, TRBJ2-3)
CSARGGTSTDTQYF

SEQ ID NO: 552627 - protein, 13 aa, Homo sapiens
  CDR3 for alpha chain variable domain of TCR clone 276314 (TRAV29/DV5, TRAJ47)
CAASEEYGNKLVC

SEQ ID NO: 552628 - protein, 12 aa, Homo sapiens
  CDR3 for beta chain variable domain of TCR clone 276314 (TRBV29-1, TRBJ2-3)
CSVTGGADTQYF

SEQ ID NO: 552629 - protein, 16 aa, Homo sapiens
  CDR3 for alpha chain variable domain of TCR clone 276315 (TRAV30, TRAJ24)
CGTEIVDADSWGKFQF

SEQ ID NO: 552630 - protein, 14 aa, Homo sapiens
  CDR3 for beta chain variable domain of TCR clone 276315 (TRBV7-2, TRBJ1-2)
CASSQTGSTYGDTF

SEQ ID NO: 552631 - protein, 15 aa, Homo sapiens
  CDR3 for alpha chain variable domain of TCR clone 276316 (TRAV38-1, TRAJ37)
CAFIFSSGNTGKLIF

SEQ ID NO: 552632 - protein, 18 aa, Homo sapiens
  CDR3 for beta chain variable domain of TCR clone 276316 (TRBV7-9, TRBJ2-7)
CASSLTTSGSRTWYEQYF

SEQ ID NO: 552633 - protein, 14 aa, Homo sapiens
  CDR3 for alpha chain variable domain of TCR clone 276317 (TRAV13-1, TRAJ35)
CAASKGGFGNVLHC

SEQ ID NO: 552634 - protein, 13 aa, Homo sapiens
  CDR3 for beta chain variable domain of TCR clone 276317 (TRBV7-3, TRBJ1-1)
CASSQDWGAKAFV

SEQ ID NO: 552635 - protein, 14 aa, Homo sapiens
  CDR3 for alpha chain variable domain of TCR clone 276318 (TRAV1-2, TRAJ16)
CAVRGFSDGQKLLF

SEQ ID NO: 552636 - protein, 13 aa, Homo sapiens
  CDR3 for beta chain variable domain of TCR clone 276318 (TRBV7-9, TRBJ1-2)
CASSLKQNYGYTF

SEQ ID NO: 552637 - protein, 14 aa, Homo sapiens
  CDR3 for alpha chain variable domain of TCR clone 276319 (TRAV13-1, TRAJ44)
CAAKATGTASILTF

SEQ ID NO: 552638 - protein, 16 aa, Homo sapiens
  CDR3 for beta chain variable domain of TCR clone 276319 (TRBV20-1, TRBJ1-4)
CSAPGQGLLTNEKLFF

SEQ ID NO: 552639 - protein, 11 aa, Homo sapiens
  CDR3 for alpha chain variable domain of TCR clone 276320 (TRAV1-1, TRAJ23)
CAVRQGGKPIF

SEQ ID NO: 552640 - protein, 13 aa, Homo sapiens
  CDR3 for beta chain variable domain of TCR clone 276320 (TRBV11-2, TRBJ2-5)
CASGRGPSETQYF

SEQ ID NO: 552641 - protein, 13 aa, Homo sapiens
  CDR3 for alpha chain variable domain of TCR clone 276321 (TRAV20, TRAJ49)
CAVQARTGNQFYF

SEQ ID NO: 552642 - protein, 14 aa, Homo sapiens
  CDR3 for beta chain variable domain of TCR clone 276321 (TRBV7-2, TRBJ2-1)
CASSPKTSFYEQYF

SEQ ID NO: 552643 - protein, 14 aa, Homo sapiens
  CDR3 for alpha chain variable domain of TCR clone 276322 (TRAV13-1, TRAJ4)
CAAIPVTGYIKLIF

SEQ ID NO: 552644 - protein, 13 aa, Homo sapiens
  CDR3 for beta chain variable domain of TCR clone 276322 (TRBV20-1, TRBJ1-2)
CSAITGGGGGYTF

SEQ ID NO: 552645 - protein, 15 aa, Homo sapiens
  CDR3 for alpha chain variable domain of TCR clone 276323 (TRAV8-2, TRAJ16)
CVVSDGFSDGQKLLF

SEQ ID NO: 552646 - protein, 14 aa, Homo sapiens
  CDR3 for beta chain variable domain of TCR clone 276323 (TRBV7-2, TRBJ2-7)
CASSPKTSFYEQYF

SEQ ID NO: 552647 - protein, 11 aa, Homo sapiens
  CDR3 for alpha chain variable domain of TCR clone 276324 (TRAV17, TRAJ9)
CGFTGGFKTIF

SEQ ID NO: 552648 - protein, 15 aa, Homo sapiens
  CDR3 for beta chain variable domain of TCR clone 276324 (TRBV27, TRBJ2-3)
CASSSLAGVIDTQYF

SEQ ID NO: 552649 - protein, 23 aa, Homo sapiens
  CDR3 for alpha chain variable domain of TCR clone 276325 (TRAV8-4, )
CARLNAGNIHIQNPDPAVYQLRD

SEQ ID NO: 552650 - protein, 14 aa, Homo sapiens
  CDR3 for beta chain variable domain of TCR clone 276325 (TRBV7-8, TRBJ2-3)
CASSLEAGTDTQYF

SEQ ID NO: 552651 - protein, 19 aa, Homo sapiens
  CDR3 for alpha chain variable domain of TCR clone 276326 (TRAV29/DV5, TRAJ49)
CSVLLCSKLTVDTGNQFYF

SEQ ID NO: 552652 - protein, 17 aa, Homo sapiens
  CDR3 for beta chain variable domain of TCR clone 276326 (TRBV13, TRBJ2-3)
CASSLCRVAGGRNTQYF

SEQ ID NO: 552653 - protein, 17 aa, Homo sapiens
  CDR3 for alpha chain variable domain of TCR clone 276327 (TRAV35, TRAJ28)
CAGLQVYSVAGSYQLTL

SEQ ID NO: 552654 - protein, 15 aa, Homo sapiens
  CDR3 for beta chain variable domain of TCR clone 276327 (TRBV2, TRBJ1-2)
CASSEIGGANYGYTF

SEQ ID NO: 552655 - protein, 13 aa, Homo sapiens
  CDR3 for alpha chain variable domain of TCR clone 276328 (TRAV17, TRAJ54)
CAAGIQGAQKLVF

SEQ ID NO: 552656 - protein, 14 aa, Homo sapiens
  CDR3 for beta chain variable domain of TCR clone 276328 (TRBV11-2, TRBJ1-2)
CASSLGTANYGYAV

SEQ ID NO: 552657 - protein, 14 aa, Homo sapiens
  CDR3 for alpha chain variable domain of TCR clone 276329 (TRAV13-1, TRAJ35)
CAASKGGFGNVLHC

SEQ ID NO: 552658 - protein, 13 aa, Homo sapiens
  CDR3 for beta chain variable domain of TCR clone 276329 (TRBV7-3, TRBJ1-2)
CASSLKRGYGYTF

SEQ ID NO: 552659 - protein, 16 aa, Homo sapiens
  CDR3 for alpha chain variable domain of TCR clone 276330 (TRAV30, TRAJ24)
CGTEIVDADSWGKFQF

SEQ ID NO: 552660 - protein, 14 aa, Homo sapiens
  CDR3 for beta chain variable domain of TCR clone 276330 (TRBV12-5, TRBJ2-5)
CATGSRTHQGTQYF

SEQ ID NO: 552661 - protein, 13 aa, Homo sapiens
  CDR3 for alpha chain variable domain of TCR clone 276331 (TRAV8-1, TRAJ30)
CAVIMNRDDKIIF

SEQ ID NO: 552662 - protein, 16 aa, Homo sapiens
  CDR3 for beta chain variable domain of TCR clone 276331 (TRBV7-2, TRBJ1-6)
CASSLQGPIHPSTLGM

SEQ ID NO: 552663 - protein, 20 aa, Homo sapiens
  CDR3 for alpha chain variable domain of TCR clone 276332 (TRAV26-1, TRAJ42)
CCVLLHRQTYYGGSQGNLIF

SEQ ID NO: 552664 - protein, 15 aa, Homo sapiens
  CDR3 for beta chain variable domain of TCR clone 276332 (TRBV4-1, TRBJ1-1)
CASSQEWGHYTEAFF

SEQ ID NO: 552665 - protein, 14 aa, Homo sapiens
  CDR3 for alpha chain variable domain of TCR clone 276333 (TRAV17, TRAJ16)
CATADFSDGQKRLF

SEQ ID NO: 552666 - protein, 12 aa, Homo sapiens
  CDR3 for beta chain variable domain of TCR clone 276333 (TRBV24-1, TRBJ1-1)
CATLYPDTEAFF

SEQ ID NO: 552667 - protein, 16 aa, Homo sapiens
  CDR3 for alpha chain variable domain of TCR clone 276334 (TRAV38-1, TRAJ45)
CAFMKGSGGGADGPTF

SEQ ID NO: 552668 - protein, 15 aa, Homo sapiens
  CDR3 for beta chain variable domain of TCR clone 276334 (TRBV7-2, TRBJ2-3)
CASSSTGLETDTQYF

SEQ ID NO: 552669 - protein, 15 aa, Homo sapiens
  CDR3 for alpha chain variable domain of TCR clone 276335 (TRAV25, TRAJ23)
CALAPNYNQGGKLIF

SEQ ID NO: 552670 - protein, 14 aa, Homo sapiens
  CDR3 for beta chain variable domain of TCR clone 276335 (TRBV13, TRBJ2-7)
CASSLKGASYEQYF

SEQ ID NO: 552671 - protein, 14 aa, Homo sapiens
  CDR3 for alpha chain variable domain of TCR clone 276336 (TRAV8-3, TRAJ15)
CAVGRHKAGTALIF

SEQ ID NO: 552672 - protein, 13 aa, Homo sapiens
  CDR3 for beta chain variable domain of TCR clone 276336 (TRBV9, TRBJ2-7)
CASSASDSYEQYF

SEQ ID NO: 552673 - protein, 11 aa, Homo sapiens
  CDR3 for alpha chain variable domain of TCR clone 276337 (TRAV8-3, TRAJ12)
QRMDSSYKLIF

SEQ ID NO: 552674 - protein, 13 aa, Homo sapiens
  CDR3 for beta chain variable domain of TCR clone 276337 (TRBV5-1, TRBJ2-1)
GASSYGTSSEQFF

SEQ ID NO: 552675 - protein, 12 aa, Homo sapiens
  CDR3 for alpha chain variable domain of TCR clone 276338 (TRAV27, TRAJ9)
CAGESGGFKTIF

SEQ ID NO: 552676 - protein, 18 aa, Homo sapiens
  CDR3 for beta chain variable domain of TCR clone 276338 (TRBV10-2, TRBJ2-2)
CISAPAVHQQADAGELFF

SEQ ID NO: 552677 - protein, 14 aa, Homo sapiens
  CDR3 for alpha chain variable domain of TCR clone 276339 (TRAV25, TRAJ6)
CAGRESGGSYIPTF

SEQ ID NO: 552678 - protein, 16 aa, Homo sapiens
  CDR3 for beta chain variable domain of TCR clone 276339 (TRBV7-3, TRBJ2-2)
CASSLKRGTLSGELFF

SEQ ID NO: 552679 - protein, 13 aa, Homo sapiens
  CDR3 for alpha chain variable domain of TCR clone 276340 (TRAV17, TRAJ54)
CATVMQGAQKLVF

SEQ ID NO: 552680 - protein, 15 aa, Homo sapiens
  CDR3 for beta chain variable domain of TCR clone 276340 (TRBV13, TRBJ2-1)
CASSLLSGLNNEQFF

SEQ ID NO: 552681 - protein, 12 aa, Homo sapiens
  CDR3 for alpha chain variable domain of TCR clone 276341 (TRAV27, TRAJ11)
CAGASGYSTLTF

SEQ ID NO: 552682 - protein, 13 aa, Homo sapiens
  CDR3 for beta chain variable domain of TCR clone 276341 (TRBV7-9, TRBJ1-2)
CASSLKQNYGYTF

SEQ ID NO: 552683 - protein, 16 aa, Homo sapiens
  CDR3 for alpha chain variable domain of TCR clone 276342 (TRAV3, TRAJ4)
CAVRRSPSGGYNKLIF

SEQ ID NO: 552684 - protein, 12 aa, Homo sapiens
  CDR3 for beta chain variable domain of TCR clone 276342 (TRBV7-9, TRBJ2-7)
CASSQGVYEQYF

SEQ ID NO: 552685 - protein, 14 aa, Homo sapiens
  CDR3 for alpha chain variable domain of TCR clone 276343 (TRAV26-1, TRAJ38)
CIADNAGNNRKLIW

SEQ ID NO: 552686 - protein, 16 aa, Homo sapiens
  CDR3 for beta chain variable domain of TCR clone 276343 (TRBV19, TRBJ2-1)
CASSKAGPSSYNEQFF

SEQ ID NO: 552687 - protein, 13 aa, Homo sapiens
  CDR3 for alpha chain variable domain of TCR clone 276344 (TRAV8-6, TRAJ49)
CAVITNTGNQFYF

SEQ ID NO: 552688 - protein, 13 aa, Homo sapiens
  CDR3 for beta chain variable domain of TCR clone 276344 (TRBV7-9, TRBJ2-3)
CASSPGSTDTQYF

SEQ ID NO: 552689 - protein, 13 aa, Homo sapiens
  CDR3 for alpha chain variable domain of TCR clone 276345 (TRAV12-1, TRAJ37)
CVVNAGNTGKLIF

SEQ ID NO: 552690 - protein, 14 aa, Homo sapiens
  CDR3 for beta chain variable domain of TCR clone 276345 (TRBV7-2, TRBJ2-7)
CASSLGAGAYEQYF

SEQ ID NO: 552691 - protein, 16 aa, Homo sapiens
  CDR3 for alpha chain variable domain of TCR clone 276346 (TRAV30, TRAJ24)
CGTEIADADSWGKFQF

SEQ ID NO: 552692 - protein, 12 aa, Homo sapiens
  CDR3 for beta chain variable domain of TCR clone 276346 (TRBV11-2, TRBJ2-2)
CASSLPTGELFF

SEQ ID NO: 552693 - protein, 14 aa, Homo sapiens
  CDR3 for alpha chain variable domain of TCR clone 276347 (TRAV8-4, TRAJ5)
CAVSTDTGRRALTF

SEQ ID NO: 552694 - protein, 16 aa, Homo sapiens
  CDR3 for beta chain variable domain of TCR clone 276347 (TRBV2, TRBJ1-3)
CASSRTGGSTGNTIYF

SEQ ID NO: 552695 - protein, 14 aa, Homo sapiens
  CDR3 for alpha chain variable domain of TCR clone 276348 (TRAV29/DV5, TRAJ36)
CAARRKTGPNNLFF

SEQ ID NO: 552696 - protein, 14 aa, Homo sapiens
  CDR3 for beta chain variable domain of TCR clone 276348 (TRBV28, TRBJ2-3)
CASSFVSGTDTQYF

SEQ ID NO: 552697 - protein, 10 aa, Homo sapiens
  CDR3 for alpha chain variable domain of TCR clone 276349 (TRAV36/DV7, TRAJ48)
CAVGNEKLTF

SEQ ID NO: 552698 - protein, 12 aa, Homo sapiens
  CDR3 for beta chain variable domain of TCR clone 276349 (TRBV20-1, TRBJ2-5)
CSAGVAGETQYF

SEQ ID NO: 552699 - protein, 15 aa, Homo sapiens
  CDR3 for alpha chain variable domain of TCR clone 276350 (TRAV1-2, TRAJ28)
CAVQYSGAGSYQLTF

SEQ ID NO: 552700 - protein, 15 aa, Homo sapiens
  CDR3 for beta chain variable domain of TCR clone 276350 (TRBV9, TRBJ1-6)
CASSVAGTGVSPLHF

SEQ ID NO: 552701 - protein, 19 aa, Homo sapiens
  CDR3 for alpha chain variable domain of TCR clone 276351 (TRAV29/DV5, TRAJ49)
CSVLLCSKLTVDTGNQFYF

SEQ ID NO: 552702 - protein, 19 aa, Homo sapiens
  CDR3 for beta chain variable domain of TCR clone 276351 (TRBV4-3, TRBJ2-2)
GPVSLRQQPRGTPTGELFF

SEQ ID NO: 552703 - protein, 13 aa, Homo sapiens
  CDR3 for alpha chain variable domain of TCR clone 276352 (TRAV1-2, TRAJ9)
CAVLNTGGFKTIF

SEQ ID NO: 552704 - protein, 14 aa, Homo sapiens
  CDR3 for beta chain variable domain of TCR clone 276352 (TRBV20-1, TRBJ2-3)
CSARGGTSKDTQYF

SEQ ID NO: 552705 - protein, 20 aa, Homo sapiens
  CDR3 for alpha chain variable domain of TCR clone 276353 (TRAV1-1, TRAJ4)
CLLLLRCEGFLSGGYNKLIV

SEQ ID NO: 552706 - protein, 16 aa, Homo sapiens
  CDR3 for beta chain variable domain of TCR clone 276353 (TRBV28, TRBJ1-4)
CASSPPYRGRSEKLFF

SEQ ID NO: 552707 - protein, 13 aa, Homo sapiens
  CDR3 for alpha chain variable domain of TCR clone 276354 (TRAV12-2, TRAJ9)
CAGGKTGGFKTIF

SEQ ID NO: 552708 - protein, 17 aa, Homo sapiens
  CDR3 for beta chain variable domain of TCR clone 276354 (TRBV4-1, TRBJ2-1)
CASSQGRGGGLYNEQFF

SEQ ID NO: 552709 - protein, 14 aa, Homo sapiens
  CDR3 for alpha chain variable domain of TCR clone 276355 (TRAV1-2, TRAJ16)
SAVNRFSDGQKLLF

SEQ ID NO: 552710 - protein, 13 aa, Homo sapiens
  CDR3 for beta chain variable domain of TCR clone 276355 (TRBV7-9, TRBJ1-2)
CASSLKQTYGYTF

SEQ ID NO: 552711 - protein, 12 aa, Homo sapiens
  CDR3 for alpha chain variable domain of TCR clone 276356 (TRAV17, TRAJ36)
CATLTGANNLFF

SEQ ID NO: 552712 - protein, 15 aa, Homo sapiens
  CDR3 for beta chain variable domain of TCR clone 276356 (TRBV19, TRBJ1-2)
CASSTKTDTNYGYSF

SEQ ID NO: 552713 - protein, 13 aa, Homo sapiens
  CDR3 for alpha chain variable domain of TCR clone 276357 (TRAV8-3, TRAJ44)
CAVVPGTASKLTF

SEQ ID NO: 552714 - protein, 12 aa, Homo sapiens
  CDR3 for beta chain variable domain of TCR clone 276357 (TRBV11-2, TRBJ2-2)
CASSLPTGELFF

SEQ ID NO: 552715 - protein, 13 aa, Homo sapiens
  CDR3 for alpha chain variable domain of TCR clone 276358 (TRAV1-2, TRAJ9)
CAALNTGGFKTIF

SEQ ID NO: 552716 - protein, 13 aa, Homo sapiens
  CDR3 for beta chain variable domain of TCR clone 276358 (TRBV13, TRBJ2-5)
CQQLRTGWETQYF

SEQ ID NO: 552717 - protein, 13 aa, Homo sapiens
  CDR3 for alpha chain variable domain of TCR clone 276359 (TRAV1-2, TRAJ9)
CAVLNTGGFKTIF

SEQ ID NO: 552718 - protein, 14 aa, Homo sapiens
  CDR3 for beta chain variable domain of TCR clone 276359 (TRBV20-1, TRBJ2-3)
CSARGWTSTDTQYF

SEQ ID NO: 552719 - protein, 13 aa, Homo sapiens
  CDR3 for alpha chain variable domain of TCR clone 276360 (TRAV12-2, TRAJ7)
CAVKLYGNNRLAF

SEQ ID NO: 552720 - protein, 14 aa, Homo sapiens
  CDR3 for beta chain variable domain of TCR clone 276360 (TRBV25-1, TRBJ1-2)
CASSEATGPYGYTF

SEQ ID NO: 552721 - protein, 13 aa, Homo sapiens
  CDR3 for alpha chain variable domain of TCR clone 276361 (TRAV21, TRAJ27)
CAARPGNAGKSTF

SEQ ID NO: 552722 - protein, 14 aa, Homo sapiens
  CDR3 for beta chain variable domain of TCR clone 276361 (TRBV19, TRBJ2-1)
CASPTFVLSGEQVF

SEQ ID NO: 552723 - protein, 14 aa, Homo sapiens
  CDR3 for alpha chain variable domain of TCR clone 276362 (TRAV26-1, TRAJ39)
CIVRAYNAGNMLTF

SEQ ID NO: 552724 - protein, 16 aa, Homo sapiens
  CDR3 for beta chain variable domain of TCR clone 276362 (TRBV15, TRBJ2-7)
CATSRDFGAAVDEQYF

SEQ ID NO: 552725 - protein, 15 aa, Homo sapiens
  CDR3 for alpha chain variable domain of TCR clone 276363 (TRAV27, TRAJ38)
CTGRCKAGNNRKLIW

SEQ ID NO: 552726 - protein, 13 aa, Homo sapiens
  CDR3 for beta chain variable domain of TCR clone 276363 (TRBV20-1, TRBJ2-1)
TSGALPPGNEQFF

SEQ ID NO: 552727 - protein, 11 aa, Homo sapiens
  CDR3 for alpha chain variable domain of TCR clone 276364 (TRAV2, TRAJ23)
CAVETRGKLIF

SEQ ID NO: 552728 - protein, 15 aa, Homo sapiens
  CDR3 for beta chain variable domain of TCR clone 276364 (TRBV7-2, TRBJ1-2)
CASSPRAGWNYGYTF

SEQ ID NO: 552729 - protein, 13 aa, Homo sapiens
  CDR3 for alpha chain variable domain of TCR clone 276365 (TRAV8-6, TRAJ21)
CAVSPSSLNKFYF

SEQ ID NO: 552730 - protein, 14 aa, Homo sapiens
  CDR3 for beta chain variable domain of TCR clone 276365 (TRBV7-9, TRBJ2-5)
CASSLDTAQETEYF

SEQ ID NO: 552731 - protein, 14 aa, Homo sapiens
  CDR3 for alpha chain variable domain of TCR clone 276366 (TRAV8-3, TRAJ4)
CAVGAAGGYNKLIF

SEQ ID NO: 552732 - protein, 14 aa, Homo sapiens
  CDR3 for beta chain variable domain of TCR clone 276366 (TRBV7-2, TRBJ1-2)
CASSRGGTNYGYTL

SEQ ID NO: 552733 - protein, 14 aa, Homo sapiens
  CDR3 for alpha chain variable domain of TCR clone 276367 (TRAV1-2, TRAJ8)
CAVREDTGFQKLVF

SEQ ID NO: 552734 - protein, 13 aa, Homo sapiens
  CDR3 for beta chain variable domain of TCR clone 276367 (TRBV10-3, TRBJ2-2)
CAISPSVTGELFF

SEQ ID NO: 552735 - protein, 16 aa, Homo sapiens
  CDR3 for alpha chain variable domain of TCR clone 276368 (TRAV30, TRAJ24)
CGTEIVDADSCGKFQF

SEQ ID NO: 552736 - protein, 13 aa, Homo sapiens
  CDR3 for beta chain variable domain of TCR clone 276368 (TRBV19, TRBJ1-2)
CASSVPGQDGYTF

SEQ ID NO: 552737 - protein, 15 aa, Homo sapiens
  CDR3 for alpha chain variable domain of TCR clone 276369 (TRAV12-3, TRAJ6)
CAMNATTGGSYIPTF

SEQ ID NO: 552738 - protein, 19 aa, Homo sapiens
  CDR3 for beta chain variable domain of TCR clone 276369 (TRBV25-1, TRBJ2-2)
CAILVCRVDRGRKTGELFF

SEQ ID NO: 552739 - protein, 16 aa, Homo sapiens
  CDR3 for alpha chain variable domain of TCR clone 276370 (TRAV20, TRAJ10)
CAVLRGLTGGGNKLTF

SEQ ID NO: 552740 - protein, 14 aa, Homo sapiens
  CDR3 for beta chain variable domain of TCR clone 276370 (TRBV19, TRBJ1-5)
CATRAPDSFLSQHF

SEQ ID NO: 552741 - protein, 14 aa, Homo sapiens
  CDR3 for alpha chain variable domain of TCR clone 276371 (TRAV29/DV5, TRAJ28)
CAATEGAGRYQLTF

SEQ ID NO: 552742 - protein, 15 aa, Homo sapiens
  CDR3 for beta chain variable domain of TCR clone 276371 (TRBV7-8, TRBJ2-1)
CASSLPGGPYNEQFF

SEQ ID NO: 552743 - protein, 12 aa, Homo sapiens
  CDR3 for alpha chain variable domain of TCR clone 276372 (TRAV13-1, TRAJ21)
CAAKEGFNKFYF

SEQ ID NO: 552744 - protein, 14 aa, Homo sapiens
  CDR3 for beta chain variable domain of TCR clone 276372 (TRBV11-2, TRBJ2-3)
CASSLGGGANTQYF

SEQ ID NO: 552745 - protein, 14 aa, Homo sapiens
  CDR3 for alpha chain variable domain of TCR clone 276373 (TRAV8-6, TRAJ52)
CSVIGGTSYGKLTF

SEQ ID NO: 552746 - protein, 15 aa, Homo sapiens
  CDR3 for beta chain variable domain of TCR clone 276373 (TRBV11-2, TRBJ2-5)
CASSLGAGGVETQYF

SEQ ID NO: 552747 - protein, 13 aa, Homo sapiens
  CDR3 for alpha chain variable domain of TCR clone 276374 (TRAV8-3, TRAJ42)
CAVDGGSQGNLIF

SEQ ID NO: 552748 - protein, 13 aa, Homo sapiens
  CDR3 for beta chain variable domain of TCR clone 276374 (TRBV12-4, TRBJ2-7)
CASSPTETHEQYF

SEQ ID NO: 552749 - protein, 12 aa, Homo sapiens
  CDR3 for alpha chain variable domain of TCR clone 276375 (TRAV2, TRAJ24)
CAATDSWGKFQF

SEQ ID NO: 552750 - protein, 13 aa, Homo sapiens
  CDR3 for beta chain variable domain of TCR clone 276375 (TRBV5-8, TRBJ1-1)
CASSLGGGNEAFF

SEQ ID NO: 552751 - protein, 12 aa, Homo sapiens
  CDR3 for alpha chain variable domain of TCR clone 276376 (TRAV12-1, TRAJ40)
CVFYSGTYKYIF

SEQ ID NO: 552752 - protein, 17 aa, Homo sapiens
  CDR3 for beta chain variable domain of TCR clone 276376 (TRBV12-4, TRBJ2-2)
CSSLVAGTRGRTGELFF

SEQ ID NO: 552753 - protein, 17 aa, Homo sapiens
  CDR3 for alpha chain variable domain of TCR clone 276377 (TRAV8-4, TRAJ9)
CAVTFNTGGFKNYLLSR

SEQ ID NO: 552754 - protein, 15 aa, Homo sapiens
  CDR3 for beta chain variable domain of TCR clone 276377 (TRBV7-9, TRBJ2-2)
CASSPETGAGGELFF

SEQ ID NO: 552755 - protein, 14 aa, Homo sapiens
  CDR3 for alpha chain variable domain of TCR clone 276378 (TRAV1-2, TRAJ16)
CAVNRFSDGQKLLF

SEQ ID NO: 552756 - protein, 16 aa, Homo sapiens
  CDR3 for beta chain variable domain of TCR clone 276378 (TRBV12-4, TRBJ2-5)
CASSFFVRGPQETQYF

SEQ ID NO: 552757 - protein, 18 aa, Homo sapiens
  CDR3 for alpha chain variable domain of TCR clone 276379 (TRAV13-1, TRAJ52)
CAASKRSAGGTSYGKLTF

SEQ ID NO: 552758 - protein, 16 aa, Homo sapiens
  CDR3 for beta chain variable domain of TCR clone 276379 (TRBV5-1, TRBJ1-1)
CASSSGGNALNTEAFF

SEQ ID NO: 552759 - protein, 15 aa, Homo sapiens
  CDR3 for alpha chain variable domain of TCR clone 276380 (TRAV12-3, TRAJ47)
CAMSALEEYGNKLVF

SEQ ID NO: 552760 - protein, 13 aa, Homo sapiens
  CDR3 for beta chain variable domain of TCR clone 276380 (TRBV7-7, TRBJ2-3)
CASSLSRADTQYF

SEQ ID NO: 552761 - protein, 14 aa, Homo sapiens
  CDR3 for alpha chain variable domain of TCR clone 276381 (TRAV17, TRAJ54)
CATDANQGAQKLVF

SEQ ID NO: 552762 - protein, 14 aa, Homo sapiens
  CDR3 for beta chain variable domain of TCR clone 276381 (TRBV7-6, TRBJ2-3)
CASSLGTVTDTQYF

SEQ ID NO: 552763 - protein, 14 aa, Homo sapiens
  CDR3 for alpha chain variable domain of TCR clone 276382 (TRAV8-3, TRAJ4)
CAVGAAGGYNKLMF

SEQ ID NO: 552764 - protein, 15 aa, Homo sapiens
  CDR3 for beta chain variable domain of TCR clone 276382 (TRBV6-5, TRBJ2-1)
CASSYAAGAGNEQFF

SEQ ID NO: 552765 - protein, 14 aa, Homo sapiens
  CDR3 for alpha chain variable domain of TCR clone 276383 (TRAV26-1, TRAJ38)
CIADNAGNNRKLIW

SEQ ID NO: 552766 - protein, 15 aa, Homo sapiens
  CDR3 for beta chain variable domain of TCR clone 276383 (TRBV20-1, TRBJ1-1)
CSARVGGTLKLSLDK

SEQ ID NO: 552767 - protein, 14 aa, Homo sapiens
  CDR3 for alpha chain variable domain of TCR clone 276384 (TRAV2, TRAJ9)
CAVEDRSGGFKTIF

SEQ ID NO: 552768 - protein, 16 aa, Homo sapiens
  CDR3 for beta chain variable domain of TCR clone 276384 (TRBV3-1, TRBJ2-1)
CASSQGGRRSFDEQFF

SEQ ID NO: 552769 - protein, 18 aa, Homo sapiens
  CDR3 for alpha chain variable domain of TCR clone 276385 (TRAV21, TRAJ52)
CAVRPSPAGGTSYGKLTC

SEQ ID NO: 552770 - protein, 14 aa, Homo sapiens
  CDR3 for beta chain variable domain of TCR clone 276385 (TRBV20-1, TRBJ2-1)
CSAQIGGSANEQFF

SEQ ID NO: 552771 - protein, 13 aa, Homo sapiens
  CDR3 for alpha chain variable domain of TCR clone 276386 (TRAV2, TRAJ40)
FAVVTSGTYKYIS

SEQ ID NO: 552772 - protein, 14 aa, Homo sapiens
  CDR3 for beta chain variable domain of TCR clone 276386 (TRBV7-9, TRBJ2-1)
CASSSMVGFGEQFF

SEQ ID NO: 552773 - protein, 13 aa, Homo sapiens
  CDR3 for alpha chain variable domain of TCR clone 276387 (TRAV17, TRAJ54)
CTTVIQGAQKLVF

SEQ ID NO: 552774 - protein, 15 aa, Homo sapiens
  CDR3 for beta chain variable domain of TCR clone 276387 (TRBV13, TRBJ2-1)
CASSLLSGLNNEQFF

SEQ ID NO: 552775 - protein, 14 aa, Homo sapiens
  CDR3 for alpha chain variable domain of TCR clone 276388 (TRAV35, TRAJ22)
CAGLRPGSARQLTF

SEQ ID NO: 552776 - protein, 15 aa, Homo sapiens
  CDR3 for beta chain variable domain of TCR clone 276388 (TRBV12-4, TRBJ2-5)
CASGPPTGLQETHYF

SEQ ID NO: 552777 - protein, 12 aa, Homo sapiens
  CDR3 for alpha chain variable domain of TCR clone 276389 (TRAV2, TRAJ31)
CAVEEGNARLMF

SEQ ID NO: 552778 - protein, 18 aa, Homo sapiens
  CDR3 for beta chain variable domain of TCR clone 276389 (TRBV7-9, TRBJ2-3)
CAISLDLAGLATPDTQYF

SEQ ID NO: 552779 - protein, 13 aa, Homo sapiens
  CDR3 for alpha chain variable domain of TCR clone 276390 (TRAV30, TRAJ34)
CGTVGYNTDKLVF

SEQ ID NO: 552780 - protein, 16 aa, Homo sapiens
  CDR3 for beta chain variable domain of TCR clone 276390 (TRBV7-9, TRBJ1-2)
CASSLGFSAGEDGYTF

SEQ ID NO: 552781 - protein, 12 aa, Homo sapiens
  CDR3 for alpha chain variable domain of TCR clone 276391 (TRAV1-1, TRAJ30)
CAVRGGDDKFIF

SEQ ID NO: 552782 - protein, 13 aa, Homo sapiens
  CDR3 for beta chain variable domain of TCR clone 276391 (TRBV11-3, TRBJ2-7)
CASSLDKLYEQYF

SEQ ID NO: 552783 - protein, 16 aa, Homo sapiens
  CDR3 for alpha chain variable domain of TCR clone 276392 (TRAV30, TRAJ24)
CGTEIADADSWGKFQF

SEQ ID NO: 552784 - protein, 16 aa, Homo sapiens
  CDR3 for beta chain variable domain of TCR clone 276392 (TRBV6-1, TRBJ2-1)
CASILRQGSSYNEQFF

SEQ ID NO: 552785 - protein, 13 aa, Homo sapiens
  CDR3 for alpha chain variable domain of TCR clone 276393 (TRAV13-1, TRAJ39)
CAASILAGNMLTF

SEQ ID NO: 552786 - protein, 12 aa, Homo sapiens
  CDR3 for beta chain variable domain of TCR clone 276393 (TRBV7-9, TRBJ1-1)
AYSNRGGTEAFF

SEQ ID NO: 552787 - protein, 15 aa, Homo sapiens
  CDR3 for alpha chain variable domain of TCR clone 276394 (TRAV21, TRAJ24)
CAARSSTDSWGKLQF

SEQ ID NO: 552788 - protein, 13 aa, Homo sapiens
  CDR3 for beta chain variable domain of TCR clone 276394 (TRBV11-3, TRBJ2-5)
CASSSTGEETQYY

SEQ ID NO: 552789 - protein, 23 aa, Homo sapiens
  CDR3 for alpha chain variable domain of TCR clone 276395 (TRAV21, TRAJ8)
CAVNTGFQKLVLELAPDFWSVQI

SEQ ID NO: 552790 - protein, 13 aa, Homo sapiens
  CDR3 for beta chain variable domain of TCR clone 276395 (TRBV6-3, TRBJ2-1)
CASSYDNYNEQFF

SEQ ID NO: 552791 - protein, 14 aa, Homo sapiens
  CDR3 for alpha chain variable domain of TCR clone 276396 (TRAV3, TRAJ37)
CAVKESGNTGKLIF

SEQ ID NO: 552792 - protein, 15 aa, Homo sapiens
  CDR3 for beta chain variable domain of TCR clone 276396 (TRBV5-1, TRBJ2-3)
CASSVTSGSTDTQYF

SEQ ID NO: 552793 - protein, 13 aa, Homo sapiens
  CDR3 for alpha chain variable domain of TCR clone 276397 (TRAV23/DV6, TRAJ27)
CAASKPMQANQPL

SEQ ID NO: 552794 - protein, 16 aa, Homo sapiens
  CDR3 for beta chain variable domain of TCR clone 276397 (TRBV6-1, TRBJ2-5)
CASSETLDRGAETQYF

SEQ ID NO: 552795 - protein, 16 aa, Homo sapiens
  CDR3 for alpha chain variable domain of TCR clone 276398 (TRAV16, TRAJ4)
CALSRMFSGGYNKLIF

SEQ ID NO: 552796 - protein, 14 aa, Homo sapiens
  CDR3 for beta chain variable domain of TCR clone 276398 (TRBV7-8, TRBJ2-3)
CASSFPDGQDTQYF

SEQ ID NO: 552797 - protein, 17 aa, Homo sapiens
  CDR3 for alpha chain variable domain of TCR clone 276399 (TRAV16, TRAJ58)
CITLLSNGETSGSRLTF

SEQ ID NO: 552798 - protein, 13 aa, Homo sapiens
  CDR3 for beta chain variable domain of TCR clone 276399 (TRBV20-1, TRBJ2-2)
CSASAAGTGELFF

SEQ ID NO: 552799 - protein, 16 aa, Homo sapiens
  CDR3 for alpha chain variable domain of TCR clone 276400 (TRAV17, TRAJ52)
CATSNAGGTSYGKLTF

SEQ ID NO: 552800 - protein, 17 aa, Homo sapiens
  CDR3 for beta chain variable domain of TCR clone 276400 (TRBV7-7, TRBJ2-2)
CASSSVPAGGEIGELFF

SEQ ID NO: 552801 - protein, 11 aa, Homo sapiens
  CDR3 for alpha chain variable domain of TCR clone 276401 (TRAV3, TRAJ32)
CALREGIMVVL

SEQ ID NO: 552802 - protein, 13 aa, Homo sapiens
  CDR3 for beta chain variable domain of TCR clone 276401 (TRBV2, TRBJ1-1)
CASSEGGNTEAFF

SEQ ID NO: 552803 - protein, 16 aa, Homo sapiens
  CDR3 for alpha chain variable domain of TCR clone 276402 (TRAV12-1, TRAJ42)
CVVTPYYGGSQGNLIF

SEQ ID NO: 552804 - protein, 17 aa, Homo sapiens
  CDR3 for beta chain variable domain of TCR clone 276402 (TRBV13, TRBJ2-3)
CSSSLSRVAGGRNTQYF

SEQ ID NO: 552805 - protein, 14 aa, Homo sapiens
  CDR3 for alpha chain variable domain of TCR clone 276403 (TRAV8-6, TRAJ5)
CAVSVDTGRRALTF

SEQ ID NO: 552806 - protein, 12 aa, Homo sapiens
  CDR3 for beta chain variable domain of TCR clone 276403 (TRBV27, TRBJ2-1)
CASSLSQGKQFF

SEQ ID NO: 552807 - protein, 12 aa, Homo sapiens
  CDR3 for alpha chain variable domain of TCR clone 276404 (TRAV21, TRAJ58)
CALSASGSRLTF

SEQ ID NO: 552808 - protein, 13 aa, Homo sapiens
  CDR3 for beta chain variable domain of TCR clone 276404 (TRBV7-2, TRBJ2-4)
CASSREHANIQYF

SEQ ID NO: 552809 - protein, 15 aa, Homo sapiens
  CDR3 for alpha chain variable domain of TCR clone 276405 (TRAV38-2/DV8, TRAJ48)
CDYRSGGFGNEKLTF

SEQ ID NO: 552810 - protein, 16 aa, Homo sapiens
  CDR3 for beta chain variable domain of TCR clone 276405 (TRBV28, TRBJ2-7)
CASSPWVATGDLSQYF

SEQ ID NO: 552811 - protein, 15 aa, Homo sapiens
  CDR3 for alpha chain variable domain of TCR clone 276406 (TRAV8-2, TRAJ15)
CVVTMGNQAGTTLIF

SEQ ID NO: 552812 - protein, 12 aa, Homo sapiens
  CDR3 for beta chain variable domain of TCR clone 276406 (TRBV6-1, TRBJ2-7)
CASSDYSYEQYF

SEQ ID NO: 552813 - protein, 12 aa, Homo sapiens
  CDR3 for alpha chain variable domain of TCR clone 276407 (TRAV20, TRAJ39)
CAVGNAGNMLTF

SEQ ID NO: 552814 - protein, 15 aa, Homo sapiens
  CDR3 for beta chain variable domain of TCR clone 276407 (TRBV7-3, TRBJ2-1)
CASSLGQGPFGEQFF

SEQ ID NO: 552815 - protein, 14 aa, Homo sapiens
  CDR3 for alpha chain variable domain of TCR clone 276408 (TRAV35, TRAJ22)
CAGLRPGSARQLTF

SEQ ID NO: 552816 - protein, 15 aa, Homo sapiens
  CDR3 for beta chain variable domain of TCR clone 276408 (TRBV7-9, TRBJ2-7)
CASSLDLDRGYEQYF

SEQ ID NO: 552817 - protein, 13 aa, Homo sapiens
  CDR3 for alpha chain variable domain of TCR clone 276409 (TRAV21, TRAJ20)
CAVGLRVDYKLSF

SEQ ID NO: 552818 - protein, 13 aa, Homo sapiens
  CDR3 for beta chain variable domain of TCR clone 276409 (TRBV6-1, TRBJ1-1)
CASSRQGNTGAFV

SEQ ID NO: 552819 - protein, 19 aa, Homo sapiens
  CDR3 for alpha chain variable domain of TCR clone 276410 (TRAV26-1, TRAJ28)
CIVRVAHAYSGAGSYQLTF

SEQ ID NO: 552820 - protein, 17 aa, Homo sapiens
  CDR3 for beta chain variable domain of TCR clone 276410 (TRBV9, TRBJ2-2)
CASSVGGQGTDTGKLFF

SEQ ID NO: 552821 - protein, 12 aa, Homo sapiens
  CDR3 for alpha chain variable domain of TCR clone 276411 (TRAV8-6, TRAJ43)
CAVSHNNDDMRF

SEQ ID NO: 552822 - protein, 15 aa, Homo sapiens
  CDR3 for beta chain variable domain of TCR clone 276411 (TRBV11-3, TRBJ2-3)
CASLKDGREGDTQYF

SEQ ID NO: 552823 - protein, 12 aa, Homo sapiens
  CDR3 for alpha chain variable domain of TCR clone 276412 (TRAV16, TRAJ10)
CSRTGGGNKLTF

SEQ ID NO: 552824 - protein, 15 aa, Homo sapiens
  CDR3 for beta chain variable domain of TCR clone 276412 (TRBV27, TRBJ1-5)
CASSLGTGFDQPQHF

SEQ ID NO: 552825 - protein, 12 aa, Homo sapiens
  CDR3 for alpha chain variable domain of TCR clone 276413 (TRAV1-2, TRAJ29)
CAVPSGNTPLVF

SEQ ID NO: 552826 - protein, 14 aa, Homo sapiens
  CDR3 for beta chain variable domain of TCR clone 276413 (TRBV11-2, TRBJ2-5)
CASSRTGGIETQYF

SEQ ID NO: 552827 - protein, 15 aa, Homo sapiens
  CDR3 for alpha chain variable domain of TCR clone 276414 (TRAV3, TRAJ29)
CAVRDLYSGDTPLVF

SEQ ID NO: 552828 - protein, 17 aa, Homo sapiens
  CDR3 for beta chain variable domain of TCR clone 276414 (TRBV20-1, TRBJ2-1)
CSARDPLAGVWDNEQFF

SEQ ID NO: 552829 - protein, 17 aa, Homo sapiens
  CDR3 for alpha chain variable domain of TCR clone 276415 (TRAV27, TRAJ26)
CAGARAPLDNYCQNFVF

SEQ ID NO: 552830 - protein, 15 aa, Homo sapiens
  CDR3 for beta chain variable domain of TCR clone 276415 (TRBV11-2, TRBJ2-5)
CASSPRSGGLETQYF

SEQ ID NO: 552831 - protein, 12 aa, Homo sapiens
  CDR3 for alpha chain variable domain of TCR clone 276416 (TRAV10, TRAJ43)
CVVVRVGNDMRF

SEQ ID NO: 552832 - protein, 14 aa, Homo sapiens
  CDR3 for beta chain variable domain of TCR clone 276416 (TRBV7-2, TRBJ2-5)
CASSTGGELKTQYF

SEQ ID NO: 552833 - protein, 11 aa, Homo sapiens
  CDR3 for alpha chain variable domain of TCR clone 276417 (TRAV35, TRAJ30)
CAPGGDDKIIF

SEQ ID NO: 552834 - protein, 13 aa, Homo sapiens
  CDR3 for beta chain variable domain of TCR clone 276417 (TRBV15, TRBJ1-6)
CATSGGLNSPLHF

SEQ ID NO: 552835 - protein, 13 aa, Homo sapiens
  CDR3 for alpha chain variable domain of TCR clone 276418 (TRAV21, TRAJ27)
CAARPGNAGKSTF

SEQ ID NO: 552836 - protein, 14 aa, Homo sapiens
  CDR3 for beta chain variable domain of TCR clone 276418 (TRBV25-1, TRBJ1-1)
CTSTHLGGNTEAFF

SEQ ID NO: 552837 - protein, 11 aa, Homo sapiens
  CDR3 for alpha chain variable domain of TCR clone 276419 (TRAV8-4, TRAJ34)
CAVSWTDKLIF

SEQ ID NO: 552838 - protein, 15 aa, Homo sapiens
  CDR3 for beta chain variable domain of TCR clone 276419 (TRBV11-2, TRBJ2-2)
CASSLVLRNTGELFF

SEQ ID NO: 552839 - protein, 11 aa, Homo sapiens
  CDR3 for alpha chain variable domain of TCR clone 276420 (TRAV4, TRAJ31)
CLVGLNARLMF

SEQ ID NO: 552840 - protein, 16 aa, Homo sapiens
  CDR3 for beta chain variable domain of TCR clone 276420 (TRBV15, TRBJ2-6)
CATSVNGGFLVNVLTF

SEQ ID NO: 552841 - protein, 12 aa, Homo sapiens
  CDR3 for alpha chain variable domain of TCR clone 276421 (TRAV12-1, TRAJ40)
CVVYSGTYKYIF

SEQ ID NO: 552842 - protein, 13 aa, Homo sapiens
  CDR3 for beta chain variable domain of TCR clone 276421 (TRBV5-7, TRBJ2-5)
CASSLRLQETQYF

SEQ ID NO: 552843 - protein, 14 aa, Homo sapiens
  CDR3 for alpha chain variable domain of TCR clone 276422 (TRAV8-3, TRAJ17)
CAVGAQTAGNQLTF

SEQ ID NO: 552844 - protein, 14 aa, Homo sapiens
  CDR3 for beta chain variable domain of TCR clone 276422 (TRBV25-1, TRBJ1-1)
CASTHLGGNTEAFF

SEQ ID NO: 552845 - protein, 10 aa, Homo sapiens
  CDR3 for alpha chain variable domain of TCR clone 276423 (TRAV1-2, TRAJ31)
CVSEDARLMF

SEQ ID NO: 552846 - protein, 14 aa, Homo sapiens
  CDR3 for beta chain variable domain of TCR clone 276423 (TRBV19, TRBJ2-1)
CASPTFVLSGEQFC

SEQ ID NO: 552847 - protein, 15 aa, Homo sapiens
  CDR3 for alpha chain variable domain of TCR clone 276424 (TRAV13-1, TRAJ42)
CAASIAGGSQGNLIF

SEQ ID NO: 552848 - protein, 15 aa, Homo sapiens
  CDR3 for beta chain variable domain of TCR clone 276424 (TRBV19, TRBJ2-1)
CASSIGRGESREQFF

SEQ ID NO: 552849 - protein, 12 aa, Homo sapiens
  CDR3 for alpha chain variable domain of TCR clone 276425 (TRAV13-1, TRAJ48)
CAADFGNEKLTF

SEQ ID NO: 552850 - protein, 13 aa, Homo sapiens
  CDR3 for beta chain variable domain of TCR clone 276425 (TRBV7-3, TRBJ1-1)
CASSQDWGAEAFC

SEQ ID NO: 552851 - protein, 12 aa, Homo sapiens
  CDR3 for alpha chain variable domain of TCR clone 276426 (TRAV13-1, TRAJ21)
CAAKEDFNKFYF

SEQ ID NO: 552852 - protein, 15 aa, Homo sapiens
  CDR3 for beta chain variable domain of TCR clone 276426 (TRBV27, TRBJ2-1)
CASSNGGGSSNEQFF

SEQ ID NO: 552853 - protein, 15 aa, Homo sapiens
  CDR3 for alpha chain variable domain of TCR clone 276427 (TRAV8-3, TRAJ27)
CAVGPSKTNAGKSTF

SEQ ID NO: 552854 - protein, 16 aa, Homo sapiens
  CDR3 for beta chain variable domain of TCR clone 276427 (TRBV4-2, TRBJ2-3)
CASSQELAGDTDTQYF

SEQ ID NO: 552855 - protein, 15 aa, Homo sapiens
  CDR3 for alpha chain variable domain of TCR clone 276428 (TRAV20, TRAJ43)
CAVQAGKSSNNGMRL

SEQ ID NO: 552856 - protein, 14 aa, Homo sapiens
  CDR3 for beta chain variable domain of TCR clone 276428 (TRBV27, TRBJ2-1)
CASRHLGGGKEQFF

SEQ ID NO: 552857 - protein, 15 aa, Homo sapiens
  CDR3 for alpha chain variable domain of TCR clone 276429 (TRAV12-1, TRAJ42)
CVVTRDGGSQGNPTF

SEQ ID NO: 552858 - protein, 13 aa, Homo sapiens
  CDR3 for beta chain variable domain of TCR clone 276429 (TRBV27, TRBJ2-7)
CASSLTTGYEQYF

SEQ ID NO: 552859 - protein, 14 aa, Homo sapiens
  CDR3 for alpha chain variable domain of TCR clone 276430 (TRAV1-2, TRAJ8)
CAVREDTGFQKLVF

SEQ ID NO: 552860 - protein, 14 aa, Homo sapiens
  CDR3 for beta chain variable domain of TCR clone 276430 (TRBV20-1, TRBJ1-1)
CSAQTRIGSTEAFF

SEQ ID NO: 552861 - protein, 14 aa, Homo sapiens
  CDR3 for alpha chain variable domain of TCR clone 276431 (TRAV1-2, TRAJ12)
CAVSGTDSSYELIF

SEQ ID NO: 552862 - protein, 15 aa, Homo sapiens
  CDR3 for beta chain variable domain of TCR clone 276431 (TRBV2, TRBJ2-4)
CASSGTNLAKNIQYF

SEQ ID NO: 552863 - protein, 16 aa, Homo sapiens
  CDR3 for alpha chain variable domain of TCR clone 276432 (TRAV12-3, TRAJ53)
CAMSPGSGGSNYKLTF

SEQ ID NO: 552864 - protein, 15 aa, Homo sapiens
  CDR3 for beta chain variable domain of TCR clone 276432 (TRBV18, TRBJ2-7)
CASSPPSTGNYEQYF

SEQ ID NO: 552865 - protein, 13 aa, Homo sapiens
  CDR3 for alpha chain variable domain of TCR clone 276433 (TRAV17, TRAJ22)
CAHHSGSARQLAF

SEQ ID NO: 552866 - protein, 14 aa, Homo sapiens
  CDR3 for beta chain variable domain of TCR clone 276433 (TRBV16, TRBJ1-1)
CASSQAGPNTEAFF

SEQ ID NO: 552867 - protein, 11 aa, Homo sapiens
  CDR3 for alpha chain variable domain of TCR clone 276434 (TRAV2, TRAJ13)
CASGGYQKVTF

SEQ ID NO: 552868 - protein, 14 aa, Homo sapiens
  CDR3 for beta chain variable domain of TCR clone 276434 (TRBV11-2, TRBJ2-7)
CASSLGNSLYEQYF

SEQ ID NO: 552869 - protein, 13 aa, Homo sapiens
  CDR3 for alpha chain variable domain of TCR clone 276435 (TRAV17, TRAJ26)
CATVDNYGQNFVF

SEQ ID NO: 552870 - protein, 15 aa, Homo sapiens
  CDR3 for beta chain variable domain of TCR clone 276435 (TRBV18, TRBJ2-1)
CASSPPSASYNEQFF

SEQ ID NO: 552871 - protein, 12 aa, Homo sapiens
  CDR3 for alpha chain variable domain of TCR clone 276436 (TRAV25, TRAJ29)
CARHSGNTPLVF

SEQ ID NO: 552872 - protein, 14 aa, Homo sapiens
  CDR3 for beta chain variable domain of TCR clone 276436 (TRBV6-1, TRBJ2-7)
CASTRTGDYYEQYF

SEQ ID NO: 552873 - protein, 12 aa, Homo sapiens
  CDR3 for alpha chain variable domain of TCR clone 276437 (TRAV13-1, TRAJ15)
CAAIQAGTALIF

SEQ ID NO: 552874 - protein, 13 aa, Homo sapiens
  CDR3 for beta chain variable domain of TCR clone 276437 (TRBV10-3, TRBJ1-2)
CAISERDSYGYTF

SEQ ID NO: 552875 - protein, 13 aa, Homo sapiens
  CDR3 for alpha chain variable domain of TCR clone 276438 (TRAV2, TRAJ40)
CAVVISGTYKYIF

SEQ ID NO: 552876 - protein, 14 aa, Homo sapiens
  CDR3 for beta chain variable domain of TCR clone 276438 (TRBV12-4, TRBJ2-5)
CASSYSGYFETQYF

SEQ ID NO: 552877 - protein, 14 aa, Homo sapiens
  CDR3 for alpha chain variable domain of TCR clone 276439 (TRAV13-1, TRAJ3)
CAASKSSSASKIIF

SEQ ID NO: 552878 - protein, 13 aa, Homo sapiens
  CDR3 for beta chain variable domain of TCR clone 276439 (TRBV6-1, TRBJ1-5)
CASSGDRVRSQHF

SEQ ID NO: 552879 - protein, 15 aa, Homo sapiens
  CDR3 for alpha chain variable domain of TCR clone 276440 (TRAV13-1, TRAJ32)
CAASNGWWYYKQVHL

SEQ ID NO: 552880 - protein, 17 aa, Homo sapiens
  CDR3 for beta chain variable domain of TCR clone 276440 (TRBV15, TRBJ1-2)
CATSGREIDVVNYGYTF

SEQ ID NO: 552881 - protein, 17 aa, Homo sapiens
  CDR3 for alpha chain variable domain of TCR clone 276441 (TRAV3, TRAJ6)
CAVRDGPRAGGSYIPTF

SEQ ID NO: 552882 - protein, 14 aa, Homo sapiens
  CDR3 for beta chain variable domain of TCR clone 276441 (TRBV5-1, TRBJ2-3)
CASSRGQGGGTQYF

SEQ ID NO: 552883 - protein, 12 aa, Homo sapiens
  CDR3 for alpha chain variable domain of TCR clone 276442 (TRAV1-1, TRAJ8)
CAGGTGFQKLVF

SEQ ID NO: 552884 - protein, 18 aa, Homo sapiens
  CDR3 for beta chain variable domain of TCR clone 276442 (TRBV19, TRBJ2-6)
CASSPTGTGPSGANVLTF

SEQ ID NO: 552885 - protein, 15 aa, Homo sapiens
  CDR3 for alpha chain variable domain of TCR clone 276443 (TRAV21, TRAJ10)
CAVPVLTGGGNKLTF

SEQ ID NO: 552886 - protein, 14 aa, Homo sapiens
  CDR3 for beta chain variable domain of TCR clone 276443 (TRBV12-4, TRBJ1-1)
CASSLGTGGTEAFF

SEQ ID NO: 552887 - protein, 14 aa, Homo sapiens
  CDR3 for alpha chain variable domain of TCR clone 276444 (TRAV8-6, TRAJ12)
CAVKAADSIYKLIF

SEQ ID NO: 552888 - protein, 15 aa, Homo sapiens
  CDR3 for beta chain variable domain of TCR clone 276444 (TRBV5-1, TRBJ2-5)
CASSLGLAEQETQYF

SEQ ID NO: 552889 - protein, 13 aa, Homo sapiens
  CDR3 for alpha chain variable domain of TCR clone 276445 (TRAV27, TRAJ56)
CAGTPGANSKLTF

SEQ ID NO: 552890 - protein, 18 aa, Homo sapiens
  CDR3 for beta chain variable domain of TCR clone 276445 (TRBV11-2, TRBJ2-3)
CASSLGGASRGAPNTQYF

SEQ ID NO: 552891 - protein, 18 aa, Homo sapiens
  CDR3 for alpha chain variable domain of TCR clone 276446 (TRAV29/DV5, TRAJ52)
CAAGFRGAGGTSYGKLTL

SEQ ID NO: 552892 - protein, 13 aa, Homo sapiens
  CDR3 for beta chain variable domain of TCR clone 276446 (TRBV12-5, TRBJ2-3)
CASGDRQSDTQYF

SEQ ID NO: 552893 - protein, 19 aa, Homo sapiens
  CDR3 for alpha chain variable domain of TCR clone 276447 (TRAV29/DV5, TRAJ49)
CSVLLCSKLTVDTGNQFYF

SEQ ID NO: 552894 - protein, 12 aa, Homo sapiens
  CDR3 for beta chain variable domain of TCR clone 276447 (TRBV11-2, TRBJ2-2)
CASSLGGGELFF

SEQ ID NO: 552895 - protein, 17 aa, Homo sapiens
  CDR3 for alpha chain variable domain of TCR clone 276448 (TRAV3, TRAJ6)
CAVRDGPRAGGSYIPTF

SEQ ID NO: 552896 - protein, 14 aa, Homo sapiens
  CDR3 for beta chain variable domain of TCR clone 276448 (TRBV19, TRBJ2-1)
CASSLAGTYNEQFF

SEQ ID NO: 552897 - protein, 14 aa, Homo sapiens
  CDR3 for alpha chain variable domain of TCR clone 276449 (TRAV8-1, TRAJ24)
CAVNAADSWWKLQF

SEQ ID NO: 552898 - protein, 16 aa, Homo sapiens
  CDR3 for beta chain variable domain of TCR clone 276449 (TRBV4-3, TRBJ2-1)
CASSPALDRGVNEQFF

SEQ ID NO: 552899 - protein, 14 aa, Homo sapiens
  CDR3 for alpha chain variable domain of TCR clone 276450 (TRAV17, TRAJ31)
CATVPLSGNARLMF

SEQ ID NO: 552900 - protein, 15 aa, Homo sapiens
  CDR3 for beta chain variable domain of TCR clone 276450 (TRBV15, TRBJ2-2)
CATSGTGGRVGELFS

SEQ ID NO: 552901 - protein, 12 aa, Homo sapiens
  CDR3 for alpha chain variable domain of TCR clone 276451 (TRAV21, TRAJ37)
CAVAPVTGKLIF

SEQ ID NO: 552902 - protein, 14 aa, Homo sapiens
  CDR3 for beta chain variable domain of TCR clone 276451 (TRBV6-1, TRBJ1-3)
CASVQGGGGNTMYF

SEQ ID NO: 552903 - protein, 11 aa, Homo sapiens
  CDR3 for alpha chain variable domain of TCR clone 276452 (TRAV12-3, TRAJ43)
CAMSVSNYMRF

SEQ ID NO: 552904 - protein, 20 aa, Homo sapiens
  CDR3 for beta chain variable domain of TCR clone 276452 (TRBV28, TRBJ2-1)
CASTPIGRSPGLAGGNEQFF

SEQ ID NO: 552905 - protein, 15 aa, Homo sapiens
  CDR3 for alpha chain variable domain of TCR clone 276453 (TRAV6, TRAJ4)
CALGGVSGGYTKLIF

SEQ ID NO: 552906 - protein, 13 aa, Homo sapiens
  CDR3 for beta chain variable domain of TCR clone 276453 (TRBV19, TRBJ1-2)
CASSVPGQDGYTF

SEQ ID NO: 552907 - protein, 14 aa, Homo sapiens
  CDR3 for alpha chain variable domain of TCR clone 276454 (TRAV29/DV5, TRAJ44)
CAASALGTASKIPF

SEQ ID NO: 552908 - protein, 11 aa, Homo sapiens
  CDR3 for beta chain variable domain of TCR clone 276454 (TRBV29-1, TRBJ1-3)
CSVAIGNTIYF

SEQ ID NO: 552909 - protein, 14 aa, Homo sapiens
  CDR3 for alpha chain variable domain of TCR clone 276455 (TRAV16, TRAJ39)
CALSKNNAGNMLTF

SEQ ID NO: 552910 - protein, 15 aa, Homo sapiens
  CDR3 for beta chain variable domain of TCR clone 276455 (TRBV20-1, TRBJ1-1)
CSASRGVTGNTEAFF

SEQ ID NO: 552911 - protein, 12 aa, Homo sapiens
  CDR3 for alpha chain variable domain of TCR clone 276456 (TRAV8-3, TRAJ20)
CAVGANDYKLSF

SEQ ID NO: 552912 - protein, 11 aa, Homo sapiens
  CDR3 for beta chain variable domain of TCR clone 276456 (TRBV20-1, TRBJ2-7)
CSGRQGHEQYF

SEQ ID NO: 552913 - protein, 11 aa, Homo sapiens
  CDR3 for alpha chain variable domain of TCR clone 276457 (TRAV1-2, TRAJ20)
CAVSNDYKLSF

SEQ ID NO: 552914 - protein, 16 aa, Homo sapiens
  CDR3 for beta chain variable domain of TCR clone 276457 (TRBV28, TRBJ2-1)
CASSSPEYPRGNEQFF

SEQ ID NO: 552915 - protein, 11 aa, Homo sapiens
  CDR3 for alpha chain variable domain of TCR clone 276458 (TRAV16, TRAJ33)
CALHSNYQSIW

SEQ ID NO: 552916 - protein, 15 aa, Homo sapiens
  CDR3 for beta chain variable domain of TCR clone 276458 (TRBV4-1, TRBJ2-7)
CASSQQGQGFDEQYF

SEQ ID NO: 552917 - protein, 11 aa, Homo sapiens
  CDR3 for alpha chain variable domain of TCR clone 276459 (TRAV12-1, TRAJ34)
CVVNKGRELNC

SEQ ID NO: 552918 - protein, 12 aa, Homo sapiens
  CDR3 for beta chain variable domain of TCR clone 276459 (TRBV2, TRBJ2-1)
CAYGPPGNEQFF

SEQ ID NO: 552919 - protein, 13 aa, Homo sapiens
  CDR3 for alpha chain variable domain of TCR clone 276460 (TRAV2, TRAJ15)
CAVASQAGTALIF

SEQ ID NO: 552920 - protein, 17 aa, Homo sapiens
  CDR3 for beta chain variable domain of TCR clone 276460 (TRBV10-3, TRBJ1-2)
CAISQTGSASGVDGYTF

SEQ ID NO: 552921 - protein, 11 aa, Homo sapiens
  CDR3 for alpha chain variable domain of TCR clone 276461 (TRAV1-2, TRAJ20)
CAVANDYTLSF

SEQ ID NO: 552922 - protein, 15 aa, Homo sapiens
  CDR3 for beta chain variable domain of TCR clone 276461 (TRBV20-1, TRBJ2-7)
CSARDPVKGEGEQYF

SEQ ID NO: 552923 - protein, 14 aa, Homo sapiens
  CDR3 for alpha chain variable domain of TCR clone 276462 (TRAV1-2, TRAJ16)
CAVNGFQMARSCSL

SEQ ID NO: 552924 - protein, 16 aa, Homo sapiens
  CDR3 for beta chain variable domain of TCR clone 276462 (TRBV11-2, TRBJ1-2)
CASSLDTGGADYGYTF

SEQ ID NO: 552925 - protein, 12 aa, Homo sapiens
  CDR3 for alpha chain variable domain of TCR clone 276463 (TRAV13-2, TRAJ23)
CAERHRGGKLIF

SEQ ID NO: 552926 - protein, 14 aa, Homo sapiens
  CDR3 for beta chain variable domain of TCR clone 276463 (TRBV20-1, TRBJ2-3)
CSARGGTSTDTQYF

SEQ ID NO: 552927 - protein, 13 aa, Homo sapiens
  CDR3 for alpha chain variable domain of TCR clone 276464 (TRAV8-1, TRAJ23)
YAVTGGHGGKLIF

SEQ ID NO: 552928 - protein, 15 aa, Homo sapiens
  CDR3 for beta chain variable domain of TCR clone 276464 (TRBV20-1, TRBJ2-2)
CSAIPGHSNTGELFF

SEQ ID NO: 552929 - protein, 14 aa, Homo sapiens
  CDR3 for alpha chain variable domain of TCR clone 276465 (TRAV1-2, TRAJ16)
CAVNMFSDGQKLLF

SEQ ID NO: 552930 - protein, 15 aa, Homo sapiens
  CDR3 for beta chain variable domain of TCR clone 276465 (TRBV9, TRBJ1-6)
CASSVAGTGDSPLHF

SEQ ID NO: 552931 - protein, 15 aa, Homo sapiens
  CDR3 for alpha chain variable domain of TCR clone 276466 (TRAV8-3, TRAJ20)
CAVEAKGSNDYKLSF

SEQ ID NO: 552932 - protein, 14 aa, Homo sapiens
  CDR3 for beta chain variable domain of TCR clone 276466 (TRBV19, TRBJ2-3)
CASSAPRGTDTQYF

SEQ ID NO: 552933 - protein, 13 aa, Homo sapiens
  CDR3 for alpha chain variable domain of TCR clone 276467 (TRAV12-2, TRAJ6)
CAVNASRKLHTYI

SEQ ID NO: 552934 - protein, 18 aa, Homo sapiens
  CDR3 for beta chain variable domain of TCR clone 276467 (TRBV4-1, TRBJ1-5)
CASGQDPRGQGLNQPQHL

SEQ ID NO: 552935 - protein, 15 aa, Homo sapiens
  CDR3 for alpha chain variable domain of TCR clone 276468 (TRAV12-2, TRAJ53)
CAVNGGGGSNYKLTF

SEQ ID NO: 552936 - protein, 13 aa, Homo sapiens
  CDR3 for beta chain variable domain of TCR clone 276468 (TRBV28, TRBJ2-7)
CASKAGGVYEQYF

SEQ ID NO: 552937 - protein, 14 aa, Homo sapiens
  CDR3 for alpha chain variable domain of TCR clone 276469 (TRAV12-2, TRAJ53)
CAMKGGGSNYKLTF

SEQ ID NO: 552938 - protein, 16 aa, Homo sapiens
  CDR3 for beta chain variable domain of TCR clone 276469 (TRBV29-1, TRBJ1-2)
CSVEANRDIANYGYTF

SEQ ID NO: 552939 - protein, 11 aa, Homo sapiens
  CDR3 for alpha chain variable domain of TCR clone 276470 (TRAV3, TRAJ21)
CAVGNFNNFYF

SEQ ID NO: 552940 - protein, 16 aa, Homo sapiens
  CDR3 for beta chain variable domain of TCR clone 276470 (TRBV20-1, TRBJ1-2)
CSASMGQGVANYGYTF

SEQ ID NO: 552941 - protein, 19 aa, Homo sapiens
  CDR3 for alpha chain variable domain of TCR clone 276471 (TRAV17, TRAJ57)
CFLLLCYGPLPGGSEKLVF

SEQ ID NO: 552942 - protein, 18 aa, Homo sapiens
  CDR3 for beta chain variable domain of TCR clone 276471 (TRBV7-9, TRBJ2-7)
CASSLTTSGSRTWYEQYF

SEQ ID NO: 552943 - protein, 14 aa, Homo sapiens
  CDR3 for alpha chain variable domain of TCR clone 276472 (TRAV1-2, TRAJ16)
CAVNRFSDGQKLLF

SEQ ID NO: 552944 - protein, 13 aa, Homo sapiens
  CDR3 for beta chain variable domain of TCR clone 276472 (TRBV7-3, TRBJ2-5)
CASSLTAGETQYF

SEQ ID NO: 552945 - protein, 14 aa, Homo sapiens
  CDR3 for alpha chain variable domain of TCR clone 276473 (TRAV12-2, TRAJ45)
CALPERGGAGGLTF

SEQ ID NO: 552946 - protein, 15 aa, Homo sapiens
  CDR3 for beta chain variable domain of TCR clone 276473 (TRBV6-1, TRBJ2-5)
CASSEGWGIQETQYF

SEQ ID NO: 552947 - protein, 12 aa, Homo sapiens
  CDR3 for alpha chain variable domain of TCR clone 276474 (TRAV21, TRAJ33)
SAKMDSNYQLIW

SEQ ID NO: 552948 - protein, 15 aa, Homo sapiens
  CDR3 for beta chain variable domain of TCR clone 276474 (TRBV12-4, TRBJ2-5)
CASSPPTGLQETQYF

SEQ ID NO: 552949 - protein, 23 aa, Homo sapiens
  CDR3 for alpha chain variable domain of TCR clone 276475 (TRAV26-1, TRAJ38)
CIADNAGNNHNQNPDPAVYPLTN

SEQ ID NO: 552950 - protein, 13 aa, Homo sapiens
  CDR3 for beta chain variable domain of TCR clone 276475 (TRBV20-1, TRBJ1-1)
CSARGGGNTEACF

SEQ ID NO: 552951 - protein, 18 aa, Homo sapiens
  CDR3 for alpha chain variable domain of TCR clone 276476 (TRAV21, TRAJ52)
CAVRPSPAGGTSYGKLTF

SEQ ID NO: 552952 - protein, 16 aa, Homo sapiens
  CDR3 for beta chain variable domain of TCR clone 276476 (TRBV13, TRBJ2-3)
CASLSRVAGGRNTQYF

SEQ ID NO: 552953 - protein, 16 aa, Homo sapiens
  CDR3 for alpha chain variable domain of TCR clone 276477 (TRAV30, TRAJ24)
CGSEIVDADSWGKFQF

SEQ ID NO: 552954 - protein, 12 aa, Homo sapiens
  CDR3 for beta chain variable domain of TCR clone 276477 (TRBV11-2, TRBJ2-2)
CASSLGGGDLFF

SEQ ID NO: 552955 - protein, 13 aa, Homo sapiens
  CDR3 for alpha chain variable domain of TCR clone 276478 (TRAV2, TRAJ10)
CAVVTGGGNKLTF

SEQ ID NO: 552956 - protein, 14 aa, Homo sapiens
  CDR3 for beta chain variable domain of TCR clone 276478 (TRBV20-1, TRBJ2-3)
CSAGGRRGTDTQYF

SEQ ID NO: 552957 - protein, 16 aa, Homo sapiens
  CDR3 for alpha chain variable domain of TCR clone 276479 (TRAV12-1, TRAJ53)
CVVTSVAGGSNYKLTF

SEQ ID NO: 552958 - protein, 14 aa, Homo sapiens
  CDR3 for beta chain variable domain of TCR clone 276479 (TRBV7-8, TRBJ2-7)
CASSPRDRVYEQYF

SEQ ID NO: 552959 - protein, 17 aa, Homo sapiens
  CDR3 for alpha chain variable domain of TCR clone 276480 (TRAV26-1, TRAJ27)
CIVSTPWINTNAGKSTF

SEQ ID NO: 552960 - protein, 16 aa, Homo sapiens
  CDR3 for beta chain variable domain of TCR clone 276480 (TRBV7-9, TRBJ2-1)
GASSLDPGLAIDEQFF

SEQ ID NO: 552961 - protein, 16 aa, Homo sapiens
  CDR3 for alpha chain variable domain of TCR clone 276481 (TRAV30, TRAJ24)
CGTEIVDDESWGKFQF

SEQ ID NO: 552962 - protein, 14 aa, Homo sapiens
  CDR3 for beta chain variable domain of TCR clone 276481 (TRBV12-5, TRBJ2-5)
CASGSRTHQETQYF

SEQ ID NO: 552963 - protein, 16 aa, Homo sapiens
  CDR3 for alpha chain variable domain of TCR clone 276482 (TRAV30, TRAJ24)
CGTEIVDADSWGKCPF

SEQ ID NO: 552964 - protein, 14 aa, Homo sapiens
  CDR3 for beta chain variable domain of TCR clone 276482 (TRBV12-5, TRBJ2-5)
CASGSRTHQETQYF

SEQ ID NO: 552965 - protein, 19 aa, Homo sapiens
  CDR3 for alpha chain variable domain of TCR clone 276483 (TRAV25, TRAJ20)
TATQTTDVGILPHDYKLSF

SEQ ID NO: 552966 - protein, 14 aa, Homo sapiens
  CDR3 for beta chain variable domain of TCR clone 276483 (TRBV7-2, TRBJ1-1)
CASSFLTGTTEAFF

SEQ ID NO: 552967 - protein, 16 aa, Homo sapiens
  CDR3 for alpha chain variable domain of TCR clone 276484 (TRAV17, TRAJ53)
CATDALSGGSNYKLTF

SEQ ID NO: 552968 - protein, 12 aa, Homo sapiens
  CDR3 for beta chain variable domain of TCR clone 276484 (TRBV19, TRBJ2-7)
CASTSGTYEQYF

SEQ ID NO: 552969 - protein, 23 aa, Homo sapiens
  CDR3 for alpha chain variable domain of TCR clone 276485 (TRAV26-1, TRAJ38)
CIVRPLNAGNNHIQNPDPAVYQL

SEQ ID NO: 552970 - protein, 13 aa, Homo sapiens
  CDR3 for beta chain variable domain of TCR clone 276485 (TRBV18, TRBJ1-1)
CASSPNGDTEALF

SEQ ID NO: 552971 - protein, 14 aa, Homo sapiens
  CDR3 for alpha chain variable domain of TCR clone 276486 (TRAV12-1, TRAJ12)
CVVTRMDSSYKLIF

SEQ ID NO: 552972 - protein, 14 aa, Homo sapiens
  CDR3 for beta chain variable domain of TCR clone 276486 (TRBV4-1, TRBJ2-7)
CAGSPVAGGDEQYF

SEQ ID NO: 552973 - protein, 14 aa, Homo sapiens
  CDR3 for alpha chain variable domain of TCR clone 276487 (TRAV13-1, TRAJ44)
CATKATGTASKLTF

SEQ ID NO: 552974 - protein, 17 aa, Homo sapiens
  CDR3 for beta chain variable domain of TCR clone 276487 (TRBV7-3, TRBJ2-3)
RASSLMKRMRGADTQYF

SEQ ID NO: 552975 - protein, 14 aa, Homo sapiens
  CDR3 for alpha chain variable domain of TCR clone 276488 (TRAV13-1, TRAJ3)
CAAEGYSSASKIIF

SEQ ID NO: 552976 - protein, 14 aa, Homo sapiens
  CDR3 for beta chain variable domain of TCR clone 276488 (TRBV12-4, TRBJ1-3)
CASTLTGAGNTIYF

SEQ ID NO: 552977 - protein, 13 aa, Homo sapiens
  CDR3 for alpha chain variable domain of TCR clone 276489 (TRAV21, TRAJ27)
CAARPGNAGKSTF

SEQ ID NO: 552978 - protein, 14 aa, Homo sapiens
  CDR3 for beta chain variable domain of TCR clone 276489 (TRBV20-1, TRBJ1-5)
CSAPGTGVGQPQHF

SEQ ID NO: 552979 - protein, 11 aa, Homo sapiens
  CDR3 for alpha chain variable domain of TCR clone 276490 (TRAV2, TRAJ21)
CAVFNFKKFYF

SEQ ID NO: 552980 - protein, 14 aa, Homo sapiens
  CDR3 for beta chain variable domain of TCR clone 276490 (TRBV7-2, TRBJ2-1)
CASSRGGARNEQFF

SEQ ID NO: 552981 - protein, 13 aa, Homo sapiens
  CDR3 for alpha chain variable domain of TCR clone 276491 (TRAV12-1, TRAJ40)
CVVPTSGTYKYIF

SEQ ID NO: 552982 - protein, 18 aa, Homo sapiens
  CDR3 for beta chain variable domain of TCR clone 276491 (TRBV7-6, TRBJ2-1)
CASSPRTSGMSSYNEPFF

SEQ ID NO: 552983 - protein, 12 aa, Homo sapiens
  CDR3 for alpha chain variable domain of TCR clone 276492 (TRAV12-3, TRAJ17)
WAMTLTGNKLTF

SEQ ID NO: 552984 - protein, 12 aa, Homo sapiens
  CDR3 for beta chain variable domain of TCR clone 276492 (TRBV7-3, TRBJ1-3)
CASSLGGNTIYF

SEQ ID NO: 552985 - protein, 12 aa, Homo sapiens
  CDR3 for alpha chain variable domain of TCR clone 276493 (TRAV12-3, TRAJ17)
CAMTLTGNNLTF

SEQ ID NO: 552986 - protein, 16 aa, Homo sapiens
  CDR3 for beta chain variable domain of TCR clone 276493 (TRBV12-4, TRBJ2-5)
CASSFFVRGRQETQYF

SEQ ID NO: 552987 - protein, 14 aa, Homo sapiens
  CDR3 for alpha chain variable domain of TCR clone 276494 (TRAV23/DV6, TRAJ37)
CAASTSSNTGKLIF

SEQ ID NO: 552988 - protein, 13 aa, Homo sapiens
  CDR3 for beta chain variable domain of TCR clone 276494 (TRBV10-3, TRBJ2-7)
CASKLAVNYEQYF

SEQ ID NO: 552989 - protein, 12 aa, Homo sapiens
  CDR3 for alpha chain variable domain of TCR clone 276495 (TRAV20, TRAJ56)
FAVTGANSKLTF

SEQ ID NO: 552990 - protein, 14 aa, Homo sapiens
  CDR3 for beta chain variable domain of TCR clone 276495 (TRBV20-1, TRBJ2-5)
CSALVPGYQETQYF

SEQ ID NO: 552991 - protein, 12 aa, Homo sapiens
  CDR3 for alpha chain variable domain of TCR clone 276496 (TRAV17, TRAJ57)
CATDGGSEKLVF

SEQ ID NO: 552992 - protein, 13 aa, Homo sapiens
  CDR3 for beta chain variable domain of TCR clone 276496 (TRBV7-9, TRBJ2-7)
CASSFAGAYEQRF

SEQ ID NO: 552993 - protein, 12 aa, Homo sapiens
  CDR3 for alpha chain variable domain of TCR clone 276497 (TRAV2, TRAJ37)
CAVAGNTGKLIF

SEQ ID NO: 552994 - protein, 17 aa, Homo sapiens
  CDR3 for beta chain variable domain of TCR clone 276497 (TRBV28, TRBJ2-5)
CVSSTPEGDALQETQYF

SEQ ID NO: 552995 - protein, 17 aa, Homo sapiens
  CDR3 for alpha chain variable domain of TCR clone 276498 (TRAV26-1, TRAJ11)
CIVRVCQRNSGYSTLTF

SEQ ID NO: 552996 - protein, 15 aa, Homo sapiens
  CDR3 for beta chain variable domain of TCR clone 276498 (TRBV27, TRBJ2-5)
CASSLIPSGGETQYF

SEQ ID NO: 552997 - protein, 12 aa, Homo sapiens
  CDR3 for alpha chain variable domain of TCR clone 276499 (TRAV2, TRAJ33)
CAFMDSNYQLIW

SEQ ID NO: 552998 - protein, 16 aa, Homo sapiens
  CDR3 for beta chain variable domain of TCR clone 276499 (TRBV2, TRBJ2-7)
CASSQPWTGPSYDQYF

SEQ ID NO: 552999 - protein, 15 aa, Homo sapiens
  CDR3 for alpha chain variable domain of TCR clone 276500 (TRAV8-3, TRAJ45)
CASSYSGGGADGLTF

SEQ ID NO: 553000 - protein, 16 aa, Homo sapiens
  CDR3 for beta chain variable domain of TCR clone 276500 (TRBV7-9, TRBJ2-2)
SASSGFGGANTGELFF

SEQ ID NO: 553001 - protein, 13 aa, Homo sapiens
  CDR3 for alpha chain variable domain of TCR clone 276501 (TRAV13-1, TRAJ13)
CAASKGGYQKVTF

SEQ ID NO: 553002 - protein, 16 aa, Homo sapiens
  CDR3 for beta chain variable domain of TCR clone 276501 (TRBV18, TRBJ1-2)
CASSPPERVTNYGYTF

SEQ ID NO: 553003 - protein, 15 aa, Homo sapiens
  CDR3 for alpha chain variable domain of TCR clone 276502 (TRAV2, TRAJ11)
CAVGGRNSGYSTLTF

SEQ ID NO: 553004 - protein, 14 aa, Homo sapiens
  CDR3 for beta chain variable domain of TCR clone 276502 (TRBV4-1, TRBJ2-2)
CASSQAVNTGELFV

SEQ ID NO: 553005 - protein, 17 aa, Homo sapiens
  CDR3 for alpha chain variable domain of TCR clone 276503 (TRAV3, TRAJ42)
CAVRDRDYGGSQGNLIY

SEQ ID NO: 553006 - protein, 15 aa, Homo sapiens
  CDR3 for beta chain variable domain of TCR clone 276503 (TRBV2, TRBJ2-7)
CASSEGLARSYEQYF

SEQ ID NO: 553007 - protein, 11 aa, Homo sapiens
  CDR3 for alpha chain variable domain of TCR clone 276504 (TRAV2, TRAJ13)
CASGGYQKVTF

SEQ ID NO: 553008 - protein, 14 aa, Homo sapiens
  CDR3 for beta chain variable domain of TCR clone 276504 (TRBV19, TRBJ2-7)
CASSMGQGAIGQYF

SEQ ID NO: 553009 - protein, 13 aa, Homo sapiens
  CDR3 for alpha chain variable domain of TCR clone 276505 (TRAV27, TRAJ45)
CMSSGGGADGLTF

SEQ ID NO: 553010 - protein, 17 aa, Homo sapiens
  CDR3 for beta chain variable domain of TCR clone 276505 (TRBV11-2, TRBJ2-1)
CGSSLYPPGVEYNEQFF

SEQ ID NO: 553011 - protein, 15 aa, Homo sapiens
  CDR3 for alpha chain variable domain of TCR clone 276506 (TRAV1-2, TRAJ10)
CAVRGFTGGGNKLTF

SEQ ID NO: 553012 - protein, 16 aa, Homo sapiens
  CDR3 for beta chain variable domain of TCR clone 276506 (TRBV4-1, TRBJ2-1)
CASSQEAGQESDEQFF

SEQ ID NO: 553013 - protein, 16 aa, Homo sapiens
  CDR3 for alpha chain variable domain of TCR clone 276507 (TRAV38-2/DV8, TRAJ45)
CAYTTTSGGGADGLTL

SEQ ID NO: 553014 - protein, 15 aa, Homo sapiens
  CDR3 for beta chain variable domain of TCR clone 276507 (TRBV7-9, TRBJ2-1)
CASSSGLAGGNEQFF

SEQ ID NO: 553015 - protein, 14 aa, Homo sapiens
  CDR3 for alpha chain variable domain of TCR clone 276508 (TRAV12-3, TRAJ10)
SHLPLTGGGNKLTF

SEQ ID NO: 553016 - protein, 14 aa, Homo sapiens
  CDR3 for beta chain variable domain of TCR clone 276508 (TRBV28, TRBJ1-2)
CASSLTRTGPGYTF

SEQ ID NO: 553017 - protein, 17 aa, Homo sapiens
  CDR3 for alpha chain variable domain of TCR clone 276509 (TRAV23/DV6, TRAJ58)
CAARLLRGETSGSRLTF

SEQ ID NO: 553018 - protein, 14 aa, Homo sapiens
  CDR3 for beta chain variable domain of TCR clone 276509 (TRBV12-4, TRBJ1-1)
CASRPGQGRTEAFF

SEQ ID NO: 553019 - protein, 12 aa, Homo sapiens
  CDR3 for alpha chain variable domain of TCR clone 276510 (TRAV12-3, TRAJ17)
CAMTLKGNKLTF

SEQ ID NO: 553020 - protein, 11 aa, Homo sapiens
  CDR3 for beta chain variable domain of TCR clone 276510 (TRBV29-1, TRBJ2-5)
CSEDRTGTQYF

SEQ ID NO: 553021 - protein, 16 aa, Homo sapiens
  CDR3 for alpha chain variable domain of TCR clone 276511 (TRAV23/DV6, TRAJ9)
CAASIGGNTGGFKTNV

SEQ ID NO: 553022 - protein, 14 aa, Homo sapiens
  CDR3 for beta chain variable domain of TCR clone 276511 (TRBV9, TRBJ2-7)
CASSVGVGSYEQYF

SEQ ID NO: 553023 - protein, 11 aa, Homo sapiens
  CDR3 for alpha chain variable domain of TCR clone 276512 (TRAV8-3, TRAJ26)
CAGDNYGEFCL

SEQ ID NO: 553024 - protein, 12 aa, Homo sapiens
  CDR3 for beta chain variable domain of TCR clone 276512 (TRBV11-2, TRBJ2-1)
CASSPGNNEQFF

SEQ ID NO: 553025 - protein, 13 aa, Homo sapiens
  CDR3 for alpha chain variable domain of TCR clone 276513 (TRAV1-2, TRAJ26)
CAVRPNYVQNFVF

SEQ ID NO: 553026 - protein, 14 aa, Homo sapiens
  CDR3 for beta chain variable domain of TCR clone 276513 (TRBV4-1, TRBJ2-5)
CASSQDLALETQYF

SEQ ID NO: 553027 - protein, 15 aa, Homo sapiens
  CDR3 for alpha chain variable domain of TCR clone 276514 (TRAV12-1, TRAJ4)
CVVNPFSGGYNKLIF

SEQ ID NO: 553028 - protein, 13 aa, Homo sapiens
  CDR3 for beta chain variable domain of TCR clone 276514 (TRBV20-1, TRBJ1-2)
GSARGTADYGYTF

SEQ ID NO: 553029 - protein, 13 aa, Homo sapiens
  CDR3 for alpha chain variable domain of TCR clone 276515 (TRAV3, TRAJ16)
CAVRDRNGQKLLF

SEQ ID NO: 553030 - protein, 15 aa, Homo sapiens
  CDR3 for beta chain variable domain of TCR clone 276515 (TRBV5-1, TRBJ2-1)
CARSPPRAPYNKQFF

SEQ ID NO: 553031 - protein, 12 aa, Homo sapiens
  CDR3 for alpha chain variable domain of TCR clone 276516 (TRAV12-1, TRAJ20)
RVVNPDDYKPSF

SEQ ID NO: 553032 - protein, 15 aa, Homo sapiens
  CDR3 for beta chain variable domain of TCR clone 276516 (TRBV11-3, TRBJ2-2)
CASSLVGTGAGELFF

SEQ ID NO: 553033 - protein, 15 aa, Homo sapiens
  CDR3 for alpha chain variable domain of TCR clone 276517 (TRAV12-1, TRAJ44)
CVADLPTGTASKLTF

SEQ ID NO: 553034 - protein, 14 aa, Homo sapiens
  CDR3 for beta chain variable domain of TCR clone 276517 (TRBV7-2, TRBJ2-3)
CASSQTGSSYTQYF

SEQ ID NO: 553035 - protein, 13 aa, Homo sapiens
  CDR3 for alpha chain variable domain of TCR clone 276518 (TRAV23/DV6, TRAJ49)
CAASHSTGNQCYF

SEQ ID NO: 553036 - protein, 15 aa, Homo sapiens
  CDR3 for beta chain variable domain of TCR clone 276518 (TRBV6-5, TRBJ2-1)
CASSYDAGAGNEQFF

SEQ ID NO: 553037 - protein, 16 aa, Homo sapiens
  CDR3 for alpha chain variable domain of TCR clone 276519 (TRAV13-1, TRAJ48)
CSKYRESNFGNEKLTF

SEQ ID NO: 553038 - protein, 17 aa, Homo sapiens
  CDR3 for beta chain variable domain of TCR clone 276519 (TRBV28, TRBJ2-1)
CASSSARQAITYNEQFF

SEQ ID NO: 553039 - protein, 12 aa, Homo sapiens
  CDR3 for alpha chain variable domain of TCR clone 276520 (TRAV12-2, TRAJ10)
WGVTGGGNKLTF

SEQ ID NO: 553040 - protein, 12 aa, Homo sapiens
  CDR3 for beta chain variable domain of TCR clone 276520 (TRBV28, TRBJ2-3)
CASSLYRDTQYF

SEQ ID NO: 553041 - protein, 13 aa, Homo sapiens
  CDR3 for alpha chain variable domain of TCR clone 276521 (TRAV12-1, TRAJ39)
CVALNNAGNMLTF

SEQ ID NO: 553042 - protein, 13 aa, Homo sapiens
  CDR3 for beta chain variable domain of TCR clone 276521 (TRBV20-1, TRBJ1-1)
CSARVGGNTEAFF

SEQ ID NO: 553043 - protein, 12 aa, Homo sapiens
  CDR3 for alpha chain variable domain of TCR clone 276522 (TRAV12-1, TRAJ32)
CVVKGATNKLIF

SEQ ID NO: 553044 - protein, 15 aa, Homo sapiens
  CDR3 for beta chain variable domain of TCR clone 276522 (TRBV20-1, TRBJ2-3)
CSASETSGYTDTQYF

SEQ ID NO: 553045 - protein, 15 aa, Homo sapiens
  CDR3 for alpha chain variable domain of TCR clone 276523 (TRAV8-6, TRAJ6)
CAGSFTSGGSYIPTF

SEQ ID NO: 553046 - protein, 13 aa, Homo sapiens
  CDR3 for beta chain variable domain of TCR clone 276523 (TRBV29-1, TRBJ2-1)
CSVEGGRVNEQFF

SEQ ID NO: 553047 - protein, 13 aa, Homo sapiens
  CDR3 for alpha chain variable domain of TCR clone 276524 (TRAV17, TRAJ34)
CATDLYNTDKLIF

SEQ ID NO: 553048 - protein, 15 aa, Homo sapiens
  CDR3 for beta chain variable domain of TCR clone 276524 (TRBV20-1, TRBJ2-3)
CIATGTSGFTDTQYF

SEQ ID NO: 553049 - protein, 14 aa, Homo sapiens
  CDR3 for alpha chain variable domain of TCR clone 276525 (TRAV1-2, TRAJ8)
CAVREDTGFQKLVF

SEQ ID NO: 553050 - protein, 12 aa, Homo sapiens
  CDR3 for beta chain variable domain of TCR clone 276525 (TRBV7-8, TRBJ2-1)
CASSLGHNEQFF

SEQ ID NO: 553051 - protein, 14 aa, Homo sapiens
  CDR3 for alpha chain variable domain of TCR clone 276526 (TRAV17, TRAJ53)
CGVGSGGSNYKLTF

SEQ ID NO: 553052 - protein, 14 aa, Homo sapiens
  CDR3 for beta chain variable domain of TCR clone 276526 (TRBV7-2, TRBJ2-2)
CASRGQGAAGELFF

SEQ ID NO: 553053 - protein, 13 aa, Homo sapiens
  CDR3 for alpha chain variable domain of TCR clone 276527 (TRAV29/DV5, TRAJ31)
CEASRNTNARLMF

SEQ ID NO: 553054 - protein, 12 aa, Homo sapiens
  CDR3 for beta chain variable domain of TCR clone 276527 (TRBV14, TRBJ2-5)
CASSQLKETQYF

SEQ ID NO: 553055 - protein, 13 aa, Homo sapiens
  CDR3 for alpha chain variable domain of TCR clone 276528 (TRAV8-4, TRAJ4)
CAVSDIGYNKLIF

SEQ ID NO: 553056 - protein, 13 aa, Homo sapiens
  CDR3 for beta chain variable domain of TCR clone 276528 (TRBV19, TRBJ1-2)
CASSQGQVYGYAF

SEQ ID NO: 553057 - protein, 14 aa, Homo sapiens
  CDR3 for alpha chain variable domain of TCR clone 276529 (TRAV1-2, TRAJ8)
YAVREDTGFQKLVF

SEQ ID NO: 553058 - protein, 16 aa, Homo sapiens
  CDR3 for beta chain variable domain of TCR clone 276529 (TRBV12-5, TRBJ2-5)
CASGPRTSGNQETQYF

SEQ ID NO: 553059 - protein, 13 aa, Homo sapiens
  CDR3 for alpha chain variable domain of TCR clone 276530 (TRAV8-6, TRAJ13)
CAVSAGGYQKVTF

SEQ ID NO: 553060 - protein, 15 aa, Homo sapiens
  CDR3 for beta chain variable domain of TCR clone 276530 (TRBV7-9, TRBJ2-7)
CASSLPMGQANEQYF

SEQ ID NO: 553061 - protein, 23 aa, Homo sapiens
  CDR3 for alpha chain variable domain of TCR clone 276531 (TRAV30, TRAJ43)
CTLRPPSSVTQEPTSAALSDMRF

SEQ ID NO: 553062 - protein, 15 aa, Homo sapiens
  CDR3 for beta chain variable domain of TCR clone 276531 (TRBV6-1, TRBJ2-5)
CASSEFPLMGETQYF

SEQ ID NO: 553063 - protein, 13 aa, Homo sapiens
  CDR3 for alpha chain variable domain of TCR clone 276532 (TRAV12-3, TRAJ21)
CAPGPHNFKKFYF

SEQ ID NO: 553064 - protein, 16 aa, Homo sapiens
  CDR3 for beta chain variable domain of TCR clone 276532 (TRBV5-1, TRBJ2-2)
CASSSYREGDTGELFF

SEQ ID NO: 553065 - protein, 14 aa, Homo sapiens
  CDR3 for alpha chain variable domain of TCR clone 276533 (TRAV1-2, TRAJ16)
CAVNRFADGQKLLF

SEQ ID NO: 553066 - protein, 11 aa, Homo sapiens
  CDR3 for beta chain variable domain of TCR clone 276533 (TRBV7-9, TRBJ2-3)
CASSPTETQYF

SEQ ID NO: 553067 - protein, 15 aa, Homo sapiens
  CDR3 for alpha chain variable domain of TCR clone 276534 (TRAV3, TRAJ5)
CAVRDLDTGRRALTF

SEQ ID NO: 553068 - protein, 15 aa, Homo sapiens
  CDR3 for beta chain variable domain of TCR clone 276534 (TRBV7-2, TRBJ1-2)
CASSPRAGWNYGYTF

SEQ ID NO: 553069 - protein, 15 aa, Homo sapiens
  CDR3 for alpha chain variable domain of TCR clone 276535 (TRAV1-2, TRAJ39)
CAVEGVDNAGNMITF

SEQ ID NO: 553070 - protein, 13 aa, Homo sapiens
  CDR3 for beta chain variable domain of TCR clone 276535 (TRBV27, TRBJ1-6)
CASRWTGYSPLHF

SEQ ID NO: 553071 - protein, 14 aa, Homo sapiens
  CDR3 for alpha chain variable domain of TCR clone 276536 (TRAV12-3, TRAJ10)
SHLPLTGGGNKLTF

SEQ ID NO: 553072 - protein, 13 aa, Homo sapiens
  CDR3 for beta chain variable domain of TCR clone 276536 (TRBV12-4, TRBJ1-1)
CASSPGTGSEAFF

SEQ ID NO: 553073 - protein, 11 aa, Homo sapiens
  CDR3 for alpha chain variable domain of TCR clone 276537 (TRAV35, TRAJ30)
CAGPEDDKIIF

SEQ ID NO: 553074 - protein, 14 aa, Homo sapiens
  CDR3 for beta chain variable domain of TCR clone 276537 (TRBV7-6, TRBJ1-6)
CASSQAGGGSRLHF

SEQ ID NO: 553075 - protein, 15 aa, Homo sapiens
  CDR3 for alpha chain variable domain of TCR clone 276538 (TRAV13-1, TRAJ10)
CAATILTGGGNKLTF

SEQ ID NO: 553076 - protein, 17 aa, Homo sapiens
  CDR3 for beta chain variable domain of TCR clone 276538 (TRBV13, TRBJ2-3)
CASSLSRVAGGRNTQYF

SEQ ID NO: 553077 - protein, 13 aa, Homo sapiens
  CDR3 for alpha chain variable domain of TCR clone 276539 (TRAV12-1, TRAJ40)
CVVNSSGTYKYIL

SEQ ID NO: 553078 - protein, 14 aa, Homo sapiens
  CDR3 for beta chain variable domain of TCR clone 276539 (TRBV2, TRBJ1-6)
CASVVSSYNSPLHF

SEQ ID NO: 553079 - protein, 13 aa, Homo sapiens
  CDR3 for alpha chain variable domain of TCR clone 276540 (TRAV13-1, TRAJ49)
CGTSSILGQGQVD

SEQ ID NO: 553080 - protein, 16 aa, Homo sapiens
  CDR3 for beta chain variable domain of TCR clone 276540 (TRBV5-1, TRBJ2-7)
CASRPSFSNNPYEPYF

SEQ ID NO: 553081 - protein, 14 aa, Homo sapiens
  CDR3 for alpha chain variable domain of TCR clone 276541 (TRAV12-2, TRAJ40)
CAVKIPSGTYKYIF

SEQ ID NO: 553082 - protein, 20 aa, Homo sapiens
  CDR3 for beta chain variable domain of TCR clone 276541 (TRBV28, TRBJ2-1)
WASTPIGRAPGLAGGNEQFF

SEQ ID NO: 553083 - protein, 16 aa, Homo sapiens
  CDR3 for alpha chain variable domain of TCR clone 276542 (TRAV30, TRAJ24)
CGTEIEDADSWGKFQF

SEQ ID NO: 553084 - protein, 13 aa, Homo sapiens
  CDR3 for beta chain variable domain of TCR clone 276542 (TRBV7-3, TRBJ1-1)
CASSQDWGAEAFF

SEQ ID NO: 553085 - protein, 17 aa, Homo sapiens
  CDR3 for alpha chain variable domain of TCR clone 276543 (TRAV3, TRAJ12)
CAVSDGGRMDSSYKLIF

SEQ ID NO: 553086 - protein, 16 aa, Homo sapiens
  CDR3 for beta chain variable domain of TCR clone 276543 (TRBV9, TRBJ2-2)
CASSAMGKGNTGELFF

SEQ ID NO: 553087 - protein, 13 aa, Homo sapiens
  CDR3 for alpha chain variable domain of TCR clone 276544 (TRAV8-1, TRAJ9)
CAVNSVGGLKTIF

SEQ ID NO: 553088 - protein, 15 aa, Homo sapiens
  CDR3 for beta chain variable domain of TCR clone 276544 (TRBV11-2, TRBJ2-3)
CASSGRDGLTDTQYF

SEQ ID NO: 553089 - protein, 15 aa, Homo sapiens
  CDR3 for alpha chain variable domain of TCR clone 276545 (TRAV3, TRAJ40)
CSVRDVTSGTYKYIF

SEQ ID NO: 553090 - protein, 14 aa, Homo sapiens
  CDR3 for beta chain variable domain of TCR clone 276545 (TRBV28, TRBJ2-5)
CASSLGDRAETQYF

SEQ ID NO: 553091 - protein, 15 aa, Homo sapiens
  CDR3 for alpha chain variable domain of TCR clone 276546 (TRAV17, TRAJ28)
CATVDSGAGSYNSLS

SEQ ID NO: 553092 - protein, 13 aa, Homo sapiens
  CDR3 for beta chain variable domain of TCR clone 276546 (TRBV5-4, TRBJ2-5)
CASSRQEGETQYF

SEQ ID NO: 553093 - protein, 11 aa, Homo sapiens
  CDR3 for alpha chain variable domain of TCR clone 276547 (TRAV1-2, TRAJ31)
CAVNNNARVMF

SEQ ID NO: 553094 - protein, 15 aa, Homo sapiens
  CDR3 for beta chain variable domain of TCR clone 276547 (TRBV28, TRBJ2-1)
CASSIIAGGRSEQFF

SEQ ID NO: 553095 - protein, 13 aa, Homo sapiens
  CDR3 for alpha chain variable domain of TCR clone 276548 (TRAV1-2, TRAJ26)
CAVRPNYGKNFVF

SEQ ID NO: 553096 - protein, 14 aa, Homo sapiens
  CDR3 for beta chain variable domain of TCR clone 276548 (TRBV4-1, TRBJ2-5)
CASSQDLALETQYF

SEQ ID NO: 553097 - protein, 16 aa, Homo sapiens
  CDR3 for alpha chain variable domain of TCR clone 276549 (TRAV12-3, TRAJ53)
CAMSPGSGGSNYKLTF

SEQ ID NO: 553098 - protein, 16 aa, Homo sapiens
  CDR3 for beta chain variable domain of TCR clone 276549 (TRBV4-2, TRBJ1-1)
CASSQAGFGMNTKAFF

SEQ ID NO: 553099 - protein, 13 aa, Homo sapiens
  CDR3 for alpha chain variable domain of TCR clone 276550 (TRAV3, TRAJ21)
CAVREPDFNQFYF

SEQ ID NO: 553100 - protein, 16 aa, Homo sapiens
  CDR3 for beta chain variable domain of TCR clone 276550 (TRBV5-5, TRBJ2-2)
CASSGRREGATGELFF

SEQ ID NO: 553101 - protein, 15 aa, Homo sapiens
  CDR3 for alpha chain variable domain of TCR clone 276551 (TRAV12-3, TRAJ27)
CAMRAYNTNAGKSTF

SEQ ID NO: 553102 - protein, 12 aa, Homo sapiens
  CDR3 for beta chain variable domain of TCR clone 276551 (TRBV11-2, TRBJ2-7)
CASSLEGYEQYF

SEQ ID NO: 553103 - protein, 15 aa, Homo sapiens
  CDR3 for alpha chain variable domain of TCR clone 276552 (TRAV29/DV5, TRAJ29)
CAASERSSGNTPLVF

SEQ ID NO: 553104 - protein, 14 aa, Homo sapiens
  CDR3 for beta chain variable domain of TCR clone 276552 (TRBV7-2, TRBJ2-7)
CASSPKTSFHEQYF

SEQ ID NO: 553105 - protein, 16 aa, Homo sapiens
  CDR3 for alpha chain variable domain of TCR clone 276553 (TRAV12-3, TRAJ53)
CAMSPGSGGSNYKLTF

SEQ ID NO: 553106 - protein, 19 aa, Homo sapiens
  CDR3 for beta chain variable domain of TCR clone 276553 (TRBV28, TRBJ2-4)
CASSFQPGGPAHSKNIQYF

SEQ ID NO: 553107 - protein, 13 aa, Homo sapiens
  CDR3 for alpha chain variable domain of TCR clone 276554 (TRAV13-1, TRAJ5)
CAARVTGRRALTF

SEQ ID NO: 553108 - protein, 14 aa, Homo sapiens
  CDR3 for beta chain variable domain of TCR clone 276554 (TRBV2, TRBJ2-3)
CASSEGQNTDTQYF

SEQ ID NO: 553109 - protein, 16 aa, Homo sapiens
  CDR3 for alpha chain variable domain of TCR clone 276555 (TRAV2, TRAJ4)
CAVEDRFSGGYNKLIF

SEQ ID NO: 553110 - protein, 15 aa, Homo sapiens
  CDR3 for beta chain variable domain of TCR clone 276555 (TRBV5-1, TRBJ2-2)
CASSSQGGNTGELFF

SEQ ID NO: 553111 - protein, 13 aa, Homo sapiens
  CDR3 for alpha chain variable domain of TCR clone 276556 (TRAV2, TRAJ12)
CAVGADSSYKLIF

SEQ ID NO: 553112 - protein, 12 aa, Homo sapiens
  CDR3 for beta chain variable domain of TCR clone 276556 (TRBV12-4, TRBJ2-7)
CASSLGGYEQYF

SEQ ID NO: 553113 - protein, 15 aa, Homo sapiens
  CDR3 for alpha chain variable domain of TCR clone 276557 (TRAV26-1, TRAJ56)
CIVRVATGANSKLTF

SEQ ID NO: 553114 - protein, 15 aa, Homo sapiens
  CDR3 for beta chain variable domain of TCR clone 276557 (TRBV7-2, TRBJ2-1)
CASTHGTGIYNEQFF

SEQ ID NO: 553115 - protein, 13 aa, Homo sapiens
  CDR3 for alpha chain variable domain of TCR clone 276558 (TRAV12-2, TRAJ20)
CAVYPSNDYKLSF

SEQ ID NO: 553116 - protein, 15 aa, Homo sapiens
  CDR3 for beta chain variable domain of TCR clone 276558 (TRBV20-1, TRBJ2-7)
CSARVPAAYFYEQYF

SEQ ID NO: 553117 - protein, 15 aa, Homo sapiens
  CDR3 for alpha chain variable domain of TCR clone 276559 (TRAV3, TRAJ4)
CAVRDETGGYNKLIF

SEQ ID NO: 553118 - protein, 16 aa, Homo sapiens
  CDR3 for beta chain variable domain of TCR clone 276559 (TRBV27, TRBJ2-2)
CASSSSGVSNTGELFF

SEQ ID NO: 553119 - protein, 18 aa, Homo sapiens
  CDR3 for alpha chain variable domain of TCR clone 276560 (TRAV26-2, TRAJ54)
CILRDVEGGIQGAQKLVF

SEQ ID NO: 553120 - protein, 15 aa, Homo sapiens
  CDR3 for beta chain variable domain of TCR clone 276560 (TRBV20-1, TRBJ2-7)
CSARDRVSGMDEQYF

SEQ ID NO: 553121 - protein, 13 aa, Homo sapiens
  CDR3 for alpha chain variable domain of TCR clone 276561 (TRAV1-2, TRAJ9)
CAVLNTGGFKTIF

SEQ ID NO: 553122 - protein, 14 aa, Homo sapiens
  CDR3 for beta chain variable domain of TCR clone 276561 (TRBV13, TRBJ2-3)
CASSSGSPTDTQYF

SEQ ID NO: 553123 - protein, 14 aa, Homo sapiens
  CDR3 for alpha chain variable domain of TCR clone 276562 (TRAV29/DV5, TRAJ32)
CAASQGGATNKLIF

SEQ ID NO: 553124 - protein, 14 aa, Homo sapiens
  CDR3 for beta chain variable domain of TCR clone 276562 (TRBV7-6, TRBJ2-3)
CASSLGTVTDTQYF

SEQ ID NO: 553125 - protein, 13 aa, Homo sapiens
  CDR3 for alpha chain variable domain of TCR clone 276563 (TRAV27, TRAJ29)
CAGAHSGNTPLVF

SEQ ID NO: 553126 - protein, 18 aa, Homo sapiens
  CDR3 for beta chain variable domain of TCR clone 276563 (TRBV6-6, TRBJ1-3)
CASSYSKWDSVSGNTIYF

SEQ ID NO: 553127 - protein, 13 aa, Homo sapiens
  CDR3 for alpha chain variable domain of TCR clone 276564 (TRAV22, TRAJ29)
FAVGGSGNTPLVF

SEQ ID NO: 553128 - protein, 13 aa, Homo sapiens
  CDR3 for beta chain variable domain of TCR clone 276564 (TRBV4-2, TRBJ1-1)
CASSQAGNTESFF

SEQ ID NO: 553129 - protein, 18 aa, Homo sapiens
  CDR3 for alpha chain variable domain of TCR clone 276565 (TRAV21, TRAJ52)
CAVMPSPAGGTSYGKLTF

SEQ ID NO: 553130 - protein, 15 aa, Homo sapiens
  CDR3 for beta chain variable domain of TCR clone 276565 (TRBV28, TRBJ2-1)
CASSIIAGGRSEQFF

SEQ ID NO: 553131 - protein, 15 aa, Homo sapiens
  CDR3 for alpha chain variable domain of TCR clone 276566 (TRAV13-1, TRAJ45)
CAASGSGGGADGLTF

SEQ ID NO: 553132 - protein, 12 aa, Homo sapiens
  CDR3 for beta chain variable domain of TCR clone 276566 (TRBV11-2, TRBJ2-2)
CASSLGGGELFS

SEQ ID NO: 553133 - protein, 20 aa, Homo sapiens
  CDR3 for alpha chain variable domain of TCR clone 276567 (TRAV26-1, TRAJ52)
IASSERTRNAGGTSYGKLTF

SEQ ID NO: 553134 - protein, 15 aa, Homo sapiens
  CDR3 for beta chain variable domain of TCR clone 276567 (TRBV12-4, TRBJ2-5)
CASSPPTGLQETQYF

SEQ ID NO: 553135 - protein, 10 aa, Homo sapiens
  CDR3 for alpha chain variable domain of TCR clone 276568 (TRAV23/DV6, TRAJ3)
CAATTFALGG

SEQ ID NO: 553136 - protein, 12 aa, Homo sapiens
  CDR3 for beta chain variable domain of TCR clone 276568 (TRBV11-2, TRBJ2-2)
CASSLGGGELFF

SEQ ID NO: 553137 - protein, 14 aa, Homo sapiens
  CDR3 for alpha chain variable domain of TCR clone 276569 (TRAV8-4, TRAJ48)
CAVSETFGHEKLTF

SEQ ID NO: 553138 - protein, 14 aa, Homo sapiens
  CDR3 for beta chain variable domain of TCR clone 276569 (TRBV13, TRBJ2-7)
CASSLKGASYEQYF

SEQ ID NO: 553139 - protein, 12 aa, Homo sapiens
  CDR3 for alpha chain variable domain of TCR clone 276570 (TRAV13-1, TRAJ21)
CAAKEDFNKFYF

SEQ ID NO: 553140 - protein, 13 aa, Homo sapiens
  CDR3 for beta chain variable domain of TCR clone 276570 (TRBV7-3, TRBJ1-1)
CASSQDWGAEAFF

SEQ ID NO: 553141 - protein, 15 aa, Homo sapiens
  CDR3 for alpha chain variable domain of TCR clone 276571 (TRAV12-3, TRAJ6)
CAMSATPGGSYIPTF

SEQ ID NO: 553142 - protein, 15 aa, Homo sapiens
  CDR3 for beta chain variable domain of TCR clone 276571 (TRBV28, TRBJ2-5)
CASSPPWSYQETQYF

SEQ ID NO: 553143 - protein, 12 aa, Homo sapiens
  CDR3 for alpha chain variable domain of TCR clone 276572 (TRAV36/DV7, TRAJ26)
CAADNYGQNFVF

SEQ ID NO: 553144 - protein, 13 aa, Homo sapiens
  CDR3 for beta chain variable domain of TCR clone 276572 (TRBV12-4, TRBJ2-1)
CASSSGTVNEPFF

SEQ ID NO: 553145 - protein, 16 aa, Homo sapiens
  CDR3 for alpha chain variable domain of TCR clone 276573 (TRAV3, TRAJ3)
CAVRDRAKSSASKIIF

SEQ ID NO: 553146 - protein, 13 aa, Homo sapiens
  CDR3 for beta chain variable domain of TCR clone 276573 (TRBV10-3, TRBJ2-7)
CASKLAGNYEQYF

SEQ ID NO: 553147 - protein, 17 aa, Homo sapiens
  CDR3 for alpha chain variable domain of TCR clone 276574 (TRAV3, TRAJ6)
CAVSRRTDKGGSYIPTF

SEQ ID NO: 553148 - protein, 18 aa, Homo sapiens
  CDR3 for beta chain variable domain of TCR clone 276574 (TRBV7-2, TRBJ2-3)
CASSLETSRGRKADTQYF

SEQ ID NO: 553149 - protein, 11 aa, Homo sapiens
  CDR3 for alpha chain variable domain of TCR clone 276575 (TRAV4, TRAJ23)
CLVAPGGKLIF

SEQ ID NO: 553150 - protein, 13 aa, Homo sapiens
  CDR3 for beta chain variable domain of TCR clone 276575 (TRBV4-2, TRBJ1-1)
CASSQAGNTEAFF

SEQ ID NO: 553151 - protein, 15 aa, Homo sapiens
  CDR3 for alpha chain variable domain of TCR clone 276576 (TRAV21, TRAJ57)
CAVIITQGGSEKLSL

SEQ ID NO: 553152 - protein, 14 aa, Homo sapiens
  CDR3 for beta chain variable domain of TCR clone 276576 (TRBV5-1, TRBJ2-2)
CASSLIWIPGELFF

SEQ ID NO: 553153 - protein, 14 aa, Homo sapiens
  CDR3 for alpha chain variable domain of TCR clone 276577 (TRAV26-1, TRAJ45)
CIEVTGGGDDGLTF

SEQ ID NO: 553154 - protein, 14 aa, Homo sapiens
  CDR3 for beta chain variable domain of TCR clone 276577 (TRBV7-2, TRBJ2-1)
CASSLGVGYNEQFF

SEQ ID NO: 553155 - protein, 14 aa, Homo sapiens
  CDR3 for alpha chain variable domain of TCR clone 276578 (TRAV35, TRAJ22)
CAGLRPGSARQLTF

SEQ ID NO: 553156 - protein, 14 aa, Homo sapiens
  CDR3 for beta chain variable domain of TCR clone 276578 (TRBV5-5, TRBJ1-5)
CASSGQGVDQPQHF

SEQ ID NO: 553157 - protein, 14 aa, Homo sapiens
  CDR3 for alpha chain variable domain of TCR clone 276579 (TRAV1-2, TRAJ16)
CAVGGFSDGQKLLF

SEQ ID NO: 553158 - protein, 12 aa, Homo sapiens
  CDR3 for beta chain variable domain of TCR clone 276579 (TRBV14, TRBJ2-7)
CASSRLKGEQYF

SEQ ID NO: 553159 - protein, 15 aa, Homo sapiens
  CDR3 for alpha chain variable domain of TCR clone 276580 (TRAV30, TRAJ32)
CGTELLGGATNKLIF

SEQ ID NO: 553160 - protein, 17 aa, Homo sapiens
  CDR3 for beta chain variable domain of TCR clone 276580 (TRBV5-4, TRBJ2-1)
CASSSAGGRGPYNEQFF

SEQ ID NO: 553161 - protein, 14 aa, Homo sapiens
  CDR3 for alpha chain variable domain of TCR clone 276581 (TRAV12-2, TRAJ45)
CAVNKGGGADGLTF

SEQ ID NO: 553162 - protein, 15 aa, Homo sapiens
  CDR3 for beta chain variable domain of TCR clone 276581 (TRBV9, TRBJ1-6)
FASSVAGTGDSSLHF

SEQ ID NO: 553163 - protein, 15 aa, Homo sapiens
  CDR3 for alpha chain variable domain of TCR clone 276582 (TRAV26-1, TRAJ42)
CIVRVKGGSQGNLIF

SEQ ID NO: 553164 - protein, 14 aa, Homo sapiens
  CDR3 for beta chain variable domain of TCR clone 276582 (TRBV6-1, TRBJ1-3)
CASVQGGGGNTIYF

SEQ ID NO: 553165 - protein, 12 aa, Homo sapiens
  CDR3 for alpha chain variable domain of TCR clone 276583 (TRAV3, TRAJ43)
CAVRDPNNDMRF

SEQ ID NO: 553166 - protein, 15 aa, Homo sapiens
  CDR3 for beta chain variable domain of TCR clone 276583 (TRBV5-1, TRBJ2-6)
CASSLDPSGANVLTF

SEQ ID NO: 553167 - protein, 15 aa, Homo sapiens
  CDR3 for alpha chain variable domain of TCR clone 276584 (TRAV3, TRAJ4)
CAVRDVTSGYNKLIF

SEQ ID NO: 553168 - protein, 16 aa, Homo sapiens
  CDR3 for beta chain variable domain of TCR clone 276584 (TRBV27, TRBJ2-2)
CASSSSGVSNTGELFF

SEQ ID NO: 553169 - protein, 15 aa, Homo sapiens
  CDR3 for alpha chain variable domain of TCR clone 276585 (TRAV12-1, TRAJ44)
CVVFVNTGTASKLTF

SEQ ID NO: 553170 - protein, 16 aa, Homo sapiens
  CDR3 for beta chain variable domain of TCR clone 276585 (TRBV20-1, TRBJ2-5)
CSPGGSSGGYMETQYF

SEQ ID NO: 553171 - protein, 12 aa, Homo sapiens
  CDR3 for alpha chain variable domain of TCR clone 276586 (TRAV3, TRAJ43)
CAVRDPNNDMRF

SEQ ID NO: 553172 - protein, 16 aa, Homo sapiens
  CDR3 for beta chain variable domain of TCR clone 276586 (TRBV4-3, TRBJ2-1)
CASSPALDRGVNEQFF

SEQ ID NO: 553173 - protein, 13 aa, Homo sapiens
  CDR3 for alpha chain variable domain of TCR clone 276587 (TRAV8-1, TRAJ30)
CAVILNRDDKIIF

SEQ ID NO: 553174 - protein, 14 aa, Homo sapiens
  CDR3 for beta chain variable domain of TCR clone 276587 (TRBV7-2, TRBJ1-6)
CASSLQGANSPLHF

SEQ ID NO: 553175 - protein, 14 aa, Homo sapiens
  CDR3 for alpha chain variable domain of TCR clone 276588 (TRAV21, TRAJ57)
CAVSRGGGSEKLVF

SEQ ID NO: 553176 - protein, 15 aa, Homo sapiens
  CDR3 for beta chain variable domain of TCR clone 276588 (TRBV28, TRBJ2-5)
CASSSGRTIQETQYF

SEQ ID NO: 553177 - protein, 12 aa, Homo sapiens
  CDR3 for alpha chain variable domain of TCR clone 276589 (TRAV27, TRAJ9)
CAGESGGFKIIF

SEQ ID NO: 553178 - protein, 14 aa, Homo sapiens
  CDR3 for beta chain variable domain of TCR clone 276589 (TRBV6-1, TRBJ2-1)
CASAKDGFYNEQFF

SEQ ID NO: 553179 - protein, 13 aa, Homo sapiens
  CDR3 for alpha chain variable domain of TCR clone 276590 (TRAV26-1, TRAJ29)
CIVWRSGNTPLVF

SEQ ID NO: 553180 - protein, 16 aa, Homo sapiens
  CDR3 for beta chain variable domain of TCR clone 276590 (TRBV11-2, TRBJ2-7)
CASSLAPTGVNYEQYF

SEQ ID NO: 553181 - protein, 14 aa, Homo sapiens
  CDR3 for alpha chain variable domain of TCR clone 276591 (TRAV12-3, TRAJ10)
SHLPLTGGGNKLTF

SEQ ID NO: 553182 - protein, 17 aa, Homo sapiens
  CDR3 for beta chain variable domain of TCR clone 276591 (TRBV11-2, TRBJ2-6)
CARSQRDIFSGANVLTF

SEQ ID NO: 553183 - protein, 16 aa, Homo sapiens
  CDR3 for alpha chain variable domain of TCR clone 276592 (TRAV16, TRAJ52)
CALSWVGGTSYGKLTF

SEQ ID NO: 553184 - protein, 14 aa, Homo sapiens
  CDR3 for beta chain variable domain of TCR clone 276592 (TRBV19, TRBJ1-2)
CASSLQGQAYGYTF

SEQ ID NO: 553185 - protein, 13 aa, Homo sapiens
  CDR3 for alpha chain variable domain of TCR clone 276593 (TRAV3, TRAJ27)
CAVRPLGAGKSTF

SEQ ID NO: 553186 - protein, 16 aa, Homo sapiens
  CDR3 for beta chain variable domain of TCR clone 276593 (TRBV19, TRBJ2-1)
CASSTAGPSSYNEQFF

SEQ ID NO: 553187 - protein, 15 aa, Homo sapiens
  CDR3 for alpha chain variable domain of TCR clone 276594 (TRAV12-2, TRAJ53)
CAVNGGGGSNYKLTF

SEQ ID NO: 553188 - protein, 14 aa, Homo sapiens
  CDR3 for beta chain variable domain of TCR clone 276594 (TRBV2, TRBJ2-3)
CASSEGQNTDTQYF

SEQ ID NO: 553189 - protein, 14 aa, Homo sapiens
  CDR3 for alpha chain variable domain of TCR clone 276595 (TRAV13-1, TRAJ39)
LSSKYSNAGNMLTF

SEQ ID NO: 553190 - protein, 16 aa, Homo sapiens
  CDR3 for beta chain variable domain of TCR clone 276595 (TRBV20-1, TRBJ1-4)
CSAPGQGLLTNEKLFF

SEQ ID NO: 553191 - protein, 10 aa, Homo sapiens
  CDR3 for alpha chain variable domain of TCR clone 276596 (TRAV26-1, TRAJ22)
RSGSARQLTF

SEQ ID NO: 553192 - protein, 14 aa, Homo sapiens
  CDR3 for beta chain variable domain of TCR clone 276596 (TRBV4-1, TRBJ2-2)
CASRQAVNTGELFF

SEQ ID NO: 553193 - protein, 12 aa, Homo sapiens
  CDR3 for alpha chain variable domain of TCR clone 276597 (TRAV21, TRAJ33)
CAKMDSNYQLIW

SEQ ID NO: 553194 - protein, 16 aa, Homo sapiens
  CDR3 for beta chain variable domain of TCR clone 276597 (TRBV7-9, TRBJ1-3)
CASSQTSGLRMGTIYF

SEQ ID NO: 553195 - protein, 19 aa, Homo sapiens
  CDR3 for alpha chain variable domain of TCR clone 276598 (TRAV1-2, TRAJ26)
CLLLLCCERPDNYGQNFVF

SEQ ID NO: 553196 - protein, 11 aa, Homo sapiens
  CDR3 for beta chain variable domain of TCR clone 276598 (TRBV12-4, TRBJ2-3)
CASTATDTQYF

SEQ ID NO: 553197 - protein, 13 aa, Homo sapiens
  CDR3 for alpha chain variable domain of TCR clone 276599 (TRAV13-2, TRAJ31)
CAENLNNNARLMF

SEQ ID NO: 553198 - protein, 15 aa, Homo sapiens
  CDR3 for beta chain variable domain of TCR clone 276599 (TRBV5-4, TRBJ2-1)
CASSREGLPYNDQFF

SEQ ID NO: 553199 - protein, 18 aa, Homo sapiens
  CDR3 for alpha chain variable domain of TCR clone 276600 (TRAV21, TRAJ52)
CAVRPSPAGGTSYGMLTF

SEQ ID NO: 553200 - protein, 14 aa, Homo sapiens
  CDR3 for beta chain variable domain of TCR clone 276600 (TRBV7-2, TRBJ2-7)
CASSPKTSFYEQYF

SEQ ID NO: 553201 - protein, 14 aa, Homo sapiens
  CDR3 for alpha chain variable domain of TCR clone 276601 (TRAV35, TRAJ33)
CAGSSQDSNYQLIW

SEQ ID NO: 553202 - protein, 15 aa, Homo sapiens
  CDR3 for beta chain variable domain of TCR clone 276601 (TRBV29-1, TRBJ2-7)
CRVEFFDRGSYEQYF

SEQ ID NO: 553203 - protein, 13 aa, Homo sapiens
  CDR3 for alpha chain variable domain of TCR clone 276602 (TRAV8-6, TRAJ21)
CAVSPSSLNKFYF

SEQ ID NO: 553204 - protein, 14 aa, Homo sapiens
  CDR3 for beta chain variable domain of TCR clone 276602 (TRBV7-9, TRBJ2-5)
CAGSLDTAQETQYF

SEQ ID NO: 553205 - protein, 13 aa, Homo sapiens
  CDR3 for alpha chain variable domain of TCR clone 276603 (TRAV2, TRAJ40)
CAVVTSGTYKYIF

SEQ ID NO: 553206 - protein, 14 aa, Homo sapiens
  CDR3 for beta chain variable domain of TCR clone 276603 (TRBV4-1, TRBJ2-2)
RASSQAVNTGELFF

SEQ ID NO: 553207 - protein, 15 aa, Homo sapiens
  CDR3 for alpha chain variable domain of TCR clone 276604 (TRAV1-2, TRAJ38)
CAVSENAGNNHKLIW

SEQ ID NO: 553208 - protein, 16 aa, Homo sapiens
  CDR3 for beta chain variable domain of TCR clone 276604 (TRBV4-1, TRBJ2-7)
CASSLTAGQATYEQYF

SEQ ID NO: 553209 - protein, 19 aa, Homo sapiens
  CDR3 for alpha chain variable domain of TCR clone 276605 (TRAV12-1, TRAJ34)
SSVIQPPTSVVNKGRELIF

SEQ ID NO: 553210 - protein, 12 aa, Homo sapiens
  CDR3 for beta chain variable domain of TCR clone 276605 (TRBV2, TRBJ2-1)
CAYGPPGNEQFF

SEQ ID NO: 553211 - protein, 13 aa, Homo sapiens
  CDR3 for alpha chain variable domain of TCR clone 276606 (TRAV2, TRAJ40)
CAVVTSGTYKYIF

SEQ ID NO: 553212 - protein, 15 aa, Homo sapiens
  CDR3 for beta chain variable domain of TCR clone 276606 (TRBV18, TRBJ1-1)
CASSPRQGGNTEAFF

SEQ ID NO: 553213 - protein, 12 aa, Homo sapiens
  CDR3 for alpha chain variable domain of TCR clone 276607 (TRAV35, TRAJ49)
CAGWNTGNQFYF

SEQ ID NO: 553214 - protein, 15 aa, Homo sapiens
  CDR3 for beta chain variable domain of TCR clone 276607 (TRBV27, TRBJ1-5)
CASSLGTGFDQHQHF

SEQ ID NO: 553215 - protein, 17 aa, Homo sapiens
  CDR3 for alpha chain variable domain of TCR clone 276608 (TRAV13-1, TRAJ31)
CAPRDRLMFGDGSQLVV

SEQ ID NO: 553216 - protein, 12 aa, Homo sapiens
  CDR3 for beta chain variable domain of TCR clone 276608 (TRBV7-9, TRBJ2-7)
CASSLEGYEQYF

SEQ ID NO: 553217 - protein, 16 aa, Homo sapiens
  CDR3 for alpha chain variable domain of TCR clone 276609 (TRAV3, TRAJ22)
CAVRDMGSGSASQLTF

SEQ ID NO: 553218 - protein, 13 aa, Homo sapiens
  CDR3 for beta chain variable domain of TCR clone 276609 (TRBV7-9, TRBJ2-3)
CASSPGSTDTQYF

SEQ ID NO: 553219 - protein, 13 aa, Homo sapiens
  CDR3 for alpha chain variable domain of TCR clone 276610 (TRAV12-3, TRAJ47)
CAMKKEYGNKLVF

SEQ ID NO: 553220 - protein, 17 aa, Homo sapiens
  CDR3 for beta chain variable domain of TCR clone 276610 (TRBV11-2, TRBJ2-1)
CASSLYPPGVEYSEQFF

SEQ ID NO: 553221 - protein, 15 aa, Homo sapiens
  CDR3 for alpha chain variable domain of TCR clone 276611 (TRAV1-2, TRAJ28)
CAVQYSGAGSYQLTF

SEQ ID NO: 553222 - protein, 13 aa, Homo sapiens
  CDR3 for beta chain variable domain of TCR clone 276611 (TRBV28, TRBJ2-7)
CASKAGGVYEQYL

SEQ ID NO: 553223 - protein, 15 aa, Homo sapiens
  CDR3 for alpha chain variable domain of TCR clone 276612 (TRAV3, TRAJ13)
CAVRVYSGGYQKVTL

SEQ ID NO: 553224 - protein, 15 aa, Homo sapiens
  CDR3 for beta chain variable domain of TCR clone 276612 (TRBV7-2, TRBJ2-1)
CASSSGLAGGNEQFF

SEQ ID NO: 553225 - protein, 19 aa, Homo sapiens
  CDR3 for alpha chain variable domain of TCR clone 276613 (TRAV1-2, TRAJ26)
CLLPLCCERPDNHGQNFVF

SEQ ID NO: 553226 - protein, 12 aa, Homo sapiens
  CDR3 for beta chain variable domain of TCR clone 276613 (TRBV20-1, TRBJ2-1)
CSAQYTYNEQFL

SEQ ID NO: 553227 - protein, 13 aa, Homo sapiens
  CDR3 for alpha chain variable domain of TCR clone 276614 (TRAV13-2, TRAJ13)
CAERPGGYQKVTF

SEQ ID NO: 553228 - protein, 15 aa, Homo sapiens
  CDR3 for beta chain variable domain of TCR clone 276614 (TRBV11-3, TRBJ2-7)
CSSSPGPASSYEQYF

SEQ ID NO: 553229 - protein, 14 aa, Homo sapiens
  CDR3 for alpha chain variable domain of TCR clone 276615 (TRAV2, TRAJ9)
CAVEDRSGGFKTIF

SEQ ID NO: 553230 - protein, 17 aa, Homo sapiens
  CDR3 for beta chain variable domain of TCR clone 276615 (TRBV24-1, TRBJ2-1)
CATGDVSTSGTYNEQFF

SEQ ID NO: 553231 - protein, 15 aa, Homo sapiens
  CDR3 for alpha chain variable domain of TCR clone 276616 (TRAV3, TRAJ4)
CAVRDGTGGYNKLIF

SEQ ID NO: 553232 - protein, 14 aa, Homo sapiens
  CDR3 for beta chain variable domain of TCR clone 276616 (TRBV23-1, TRBJ2-1)
CASSPGGVRVSSSS

SEQ ID NO: 553233 - protein, 15 aa, Homo sapiens
  CDR3 for alpha chain variable domain of TCR clone 276617 (TRAV12-1, TRAJ41)
CVVTGASTSGYALNF

SEQ ID NO: 553234 - protein, 15 aa, Homo sapiens
  CDR3 for beta chain variable domain of TCR clone 276617 (TRBV7-2, TRBJ1-5)
CASSSTGVDNQPQQF

SEQ ID NO: 553235 - protein, 17 aa, Homo sapiens
  CDR3 for alpha chain variable domain of TCR clone 276618 (TRAV2, TRAJ22)
ILQVREADADEQRQLTF

SEQ ID NO: 553236 - protein, 16 aa, Homo sapiens
  CDR3 for beta chain variable domain of TCR clone 276618 (TRBV2, TRBJ2-5)
CASSETQGVGEETQYF

SEQ ID NO: 553237 - protein, 15 aa, Homo sapiens
  CDR3 for alpha chain variable domain of TCR clone 276619 (TRAV23/DV6, TRAJ13)
CAAWPGGGGYQKVTF

SEQ ID NO: 553238 - protein, 14 aa, Homo sapiens
  CDR3 for beta chain variable domain of TCR clone 276619 (TRBV7-2, TRBJ1-6)
CASSLQGANSPLHF

SEQ ID NO: 553239 - protein, 18 aa, Homo sapiens
  CDR3 for alpha chain variable domain of TCR clone 276620 (TRAV26-1, TRAJ52)
RIVRVAGAGGTSYGKLTF

SEQ ID NO: 553240 - protein, 12 aa, Homo sapiens
  CDR3 for beta chain variable domain of TCR clone 276620 (TRBV29-1, TRBJ2-3)
CSVTGGADTQYF

SEQ ID NO: 553241 - protein, 12 aa, Homo sapiens
  CDR3 for alpha chain variable domain of TCR clone 276621 (TRAV30, TRAJ15)
CGTNQAGTALIF

SEQ ID NO: 553242 - protein, 16 aa, Homo sapiens
  CDR3 for beta chain variable domain of TCR clone 276621 (TRBV12-5, TRBJ2-5)
CASGPRTSGNQETQYF

SEQ ID NO: 553243 - protein, 11 aa, Homo sapiens
  CDR3 for alpha chain variable domain of TCR clone 276622 (TRAV3, TRAJ21)
CAVGNFNKFYF

SEQ ID NO: 553244 - protein, 13 aa, Homo sapiens
  CDR3 for beta chain variable domain of TCR clone 276622 (TRBV3-1, TRBJ1-5)
CAITRRDGQPQHF

SEQ ID NO: 553245 - protein, 13 aa, Homo sapiens
  CDR3 for alpha chain variable domain of TCR clone 276623 (TRAV25, TRAJ40)
CAESASGTYKYIF

SEQ ID NO: 553246 - protein, 14 aa, Homo sapiens
  CDR3 for beta chain variable domain of TCR clone 276623 (TRBV7-2, TRBJ2-7)
CASRSQGAAYEQYF

SEQ ID NO: 553247 - protein, 15 aa, Homo sapiens
  CDR3 for alpha chain variable domain of TCR clone 276624 (TRAV12-2, TRAJ43)
CAFDMRFGAGTRLTV

SEQ ID NO: 553248 - protein, 17 aa, Homo sapiens
  CDR3 for beta chain variable domain of TCR clone 276624 (TRBV13, TRBJ2-3)
CASSLSRVAGGRDTQYF

SEQ ID NO: 553249 - protein, 13 aa, Homo sapiens
  CDR3 for alpha chain variable domain of TCR clone 276625 (TRAV21, TRAJ56)
CAGWVGANSKLTF

SEQ ID NO: 553250 - protein, 13 aa, Homo sapiens
  CDR3 for beta chain variable domain of TCR clone 276625 (TRBV7-9, TRBJ2-1)
CASTSGGAPFGFF

SEQ ID NO: 553251 - protein, 18 aa, Homo sapiens
  CDR3 for alpha chain variable domain of TCR clone 276626 (TRAV8-4, TRAJ52)
CAVTRANAGGPSYGKLTF

SEQ ID NO: 553252 - protein, 16 aa, Homo sapiens
  CDR3 for beta chain variable domain of TCR clone 276626 (TRBV6-4, TRBJ1-2)
CASSEAVGDPNYGYTF

SEQ ID NO: 553253 - protein, 14 aa, Homo sapiens
  CDR3 for alpha chain variable domain of TCR clone 276627 (TRAV13-1, TRAJ4)
CAASFSGGYNKLIF

SEQ ID NO: 553254 - protein, 17 aa, Homo sapiens
  CDR3 for beta chain variable domain of TCR clone 276627 (TRBV13, TRBJ2-3)
CASSLSRVAGGRNTQYF

SEQ ID NO: 553255 - protein, 16 aa, Homo sapiens
  CDR3 for alpha chain variable domain of TCR clone 276628 (TRAV3, TRAJ21)
CAVRDIERGNFNKFYF

SEQ ID NO: 553256 - protein, 13 aa, Homo sapiens
  CDR3 for beta chain variable domain of TCR clone 276628 (TRBV27, TRBJ2-7)
CASSITTGYEQYF

SEQ ID NO: 553257 - protein, 16 aa, Homo sapiens
  CDR3 for alpha chain variable domain of TCR clone 276629 (TRAV14/DV4, TRAJ20)
CAMREGRSRDDYKLSF

SEQ ID NO: 553258 - protein, 15 aa, Homo sapiens
  CDR3 for beta chain variable domain of TCR clone 276629 (TRBV9, TRBJ1-6)
CASSVAGTGDSPLHL

SEQ ID NO: 553259 - protein, 11 aa, Homo sapiens
  CDR3 for alpha chain variable domain of TCR clone 276630 (TRAV2, TRAJ33)
CAVESNYQLIW

SEQ ID NO: 553260 - protein, 11 aa, Homo sapiens
  CDR3 for beta chain variable domain of TCR clone 276630 (TRBV7-9, TRBJ2-3)
CASSTTDTQYF

SEQ ID NO: 553261 - protein, 15 aa, Homo sapiens
  CDR3 for alpha chain variable domain of TCR clone 276631 (TRAV23/DV6, TRAJ13)
CAAWPGGGGYQKVTF

SEQ ID NO: 553262 - protein, 14 aa, Homo sapiens
  CDR3 for beta chain variable domain of TCR clone 276631 (TRBV6-1, TRBJ2-1)
CASAGGAIKNEHFF

SEQ ID NO: 553263 - protein, 11 aa, Homo sapiens
  CDR3 for alpha chain variable domain of TCR clone 276632 (TRAV3, TRAJ21)
CAVGNFNNFYF

SEQ ID NO: 553264 - protein, 16 aa, Homo sapiens
  CDR3 for beta chain variable domain of TCR clone 276632 (TRBV19, TRBJ2-1)
CANSKAGPSSYNEQFF

SEQ ID NO: 553265 - protein, 13 aa, Homo sapiens
  CDR3 for alpha chain variable domain of TCR clone 276633 (TRAV8-2, TRAJ44)
CSRGAGTASKLTF

SEQ ID NO: 553266 - protein, 13 aa, Homo sapiens
  CDR3 for beta chain variable domain of TCR clone 276633 (TRBV12-4, TRBJ2-7)
CASTRQASYEQYF

SEQ ID NO: 553267 - protein, 13 aa, Homo sapiens
  CDR3 for alpha chain variable domain of TCR clone 276634 (TRAV8-3, TRAJ43)
CAMGPDNNNDMRF

SEQ ID NO: 553268 - protein, 13 aa, Homo sapiens
  CDR3 for beta chain variable domain of TCR clone 276634 (TRBV29-1, TRBJ2-1)
CSVEGGRVNEQFF

SEQ ID NO: 553269 - protein, 15 aa, Homo sapiens
  CDR3 for alpha chain variable domain of TCR clone 276635 (TRAV3, TRAJ5)
CAVRDLETGRRALTF

SEQ ID NO: 553270 - protein, 16 aa, Homo sapiens
  CDR3 for beta chain variable domain of TCR clone 276635 (TRBV20-1, TRBJ1-2)
CSASMGQGVANYGYTF

SEQ ID NO: 553271 - protein, 12 aa, Homo sapiens
  CDR3 for alpha chain variable domain of TCR clone 276636 (TRAV41, TRAJ58)
CAVETSGSRLTF

SEQ ID NO: 553272 - protein, 15 aa, Homo sapiens
  CDR3 for beta chain variable domain of TCR clone 276636 (TRBV29-1, TRBJ2-6)
CSVGDRGSGANVLTI

SEQ ID NO: 553273 - protein, 15 aa, Homo sapiens
  CDR3 for alpha chain variable domain of TCR clone 276637 (TRAV1-2, TRAJ30)
CAVRPHGNRDEKIIF

SEQ ID NO: 553274 - protein, 13 aa, Homo sapiens
  CDR3 for beta chain variable domain of TCR clone 276637 (TRBV4-1, TRBJ2-7)
CASSQGQAYEQYF

SEQ ID NO: 553275 - protein, 15 aa, Homo sapiens
  CDR3 for alpha chain variable domain of TCR clone 276638 (TRAV27, TRAJ50)
CAGVGRGTSYDKVIF

SEQ ID NO: 553276 - protein, 14 aa, Homo sapiens
  CDR3 for beta chain variable domain of TCR clone 276638 (TRBV7-2, TRBJ1-1)
CASSFYDLNTEAFF

SEQ ID NO: 553277 - protein, 18 aa, Homo sapiens
  CDR3 for alpha chain variable domain of TCR clone 276639 (TRAV21, TRAJ52)
CAVRPSPAGGTSYGKLTF

SEQ ID NO: 553278 - protein, 15 aa, Homo sapiens
  CDR3 for beta chain variable domain of TCR clone 276639 (TRBV6-6, TRBJ2-7)
CSSSCSYGGSYEQYF

SEQ ID NO: 553279 - protein, 18 aa, Homo sapiens
  CDR3 for alpha chain variable domain of TCR clone 276640 (TRAV1-2, TRAJ18)
CAVRDMGDRGSTLGRLYF

SEQ ID NO: 553280 - protein, 15 aa, Homo sapiens
  CDR3 for beta chain variable domain of TCR clone 276640 (TRBV12-4, TRBJ2-5)
CASSPPTGLQETQYF

SEQ ID NO: 553281 - protein, 20 aa, Homo sapiens
  CDR3 for alpha chain variable domain of TCR clone 276641 (TRAV1-1, TRAJ39)
CLLLLRCESSVYNAGNMLTF

SEQ ID NO: 553282 - protein, 13 aa, Homo sapiens
  CDR3 for beta chain variable domain of TCR clone 276641 (TRBV12-4, TRBJ1-5)
CASSPDRAQPQHF

SEQ ID NO: 553283 - protein, 11 aa, Homo sapiens
  CDR3 for alpha chain variable domain of TCR clone 276642 (TRAV12-3, TRAJ27)
CAMANAGKSTF

SEQ ID NO: 553284 - protein, 13 aa, Homo sapiens
  CDR3 for beta chain variable domain of TCR clone 276642 (TRBV20-1, TRBJ1-1)
SSARVGGNTEAFF

SEQ ID NO: 553285 - protein, 15 aa, Homo sapiens
  CDR3 for alpha chain variable domain of TCR clone 276643 (TRAV27, TRAJ38)
CAARRNAGNNRKLIW

SEQ ID NO: 553286 - protein, 11 aa, Homo sapiens
  CDR3 for beta chain variable domain of TCR clone 276643 (TRBV6-3, TRBJ2-3)
CATGQADTQYF

SEQ ID NO: 553287 - protein, 15 aa, Homo sapiens
  CDR3 for alpha chain variable domain of TCR clone 276644 (TRAV21, TRAJ53)
CATLSSGGSNYKLTF

SEQ ID NO: 553288 - protein, 16 aa, Homo sapiens
  CDR3 for beta chain variable domain of TCR clone 276644 (TRBV9, TRBJ2-1)
CASSVGGGGNYKEQFF

SEQ ID NO: 553289 - protein, 14 aa, Homo sapiens
  CDR3 for alpha chain variable domain of TCR clone 276645 (TRAV8-4, TRAJ9)
CAASINTGGFKTIF

SEQ ID NO: 553290 - protein, 15 aa, Homo sapiens
  CDR3 for beta chain variable domain of TCR clone 276645 (TRBV10-2, TRBJ2-6)
CASSEQGTGANVLTF

SEQ ID NO: 553291 - protein, 14 aa, Homo sapiens
  CDR3 for alpha chain variable domain of TCR clone 276646 (TRAV9-2, TRAJ39)
CALYIYNSGNMLTF

SEQ ID NO: 553292 - protein, 16 aa, Homo sapiens
  CDR3 for beta chain variable domain of TCR clone 276646 (TRBV13, TRBJ2-2)
CASSPRTGEHTGELFF

SEQ ID NO: 553293 - protein, 14 aa, Homo sapiens
  CDR3 for alpha chain variable domain of TCR clone 276647 (TRAV1-2, TRAJ16)
CAVNRFSDGQKLLF

SEQ ID NO: 553294 - protein, 13 aa, Homo sapiens
  CDR3 for beta chain variable domain of TCR clone 276647 (TRBV12-4, TRBJ2-3)
CASSFPPRDTQYF

SEQ ID NO: 553295 - protein, 13 aa, Homo sapiens
  CDR3 for alpha chain variable domain of TCR clone 276648 (TRAV3, TRAJ21)
CAVRAPDFNQFYF

SEQ ID NO: 553296 - protein, 17 aa, Homo sapiens
  CDR3 for beta chain variable domain of TCR clone 276648 (TRBV7-8, TRBJ2-6)
CASSAGTGGAGANVLTF

SEQ ID NO: 553297 - protein, 14 aa, Homo sapiens
  CDR3 for alpha chain variable domain of TCR clone 276649 (TRAV13-1, TRAJ35)
CAASKGGFGNVLHC

SEQ ID NO: 553298 - protein, 13 aa, Homo sapiens
  CDR3 for beta chain variable domain of TCR clone 276649 (TRBV7-3, TRBJ1-1)
CASSQDWGAEAIF

SEQ ID NO: 553299 - protein, 12 aa, Homo sapiens
  CDR3 for alpha chain variable domain of TCR clone 276650 (TRAV12-3, TRAJ17)
CAMTLTGNKLTF

SEQ ID NO: 553300 - protein, 14 aa, Homo sapiens
  CDR3 for beta chain variable domain of TCR clone 276650 (TRBV11-2, TRBJ2-3)
FASSRLARTDTQYF

SEQ ID NO: 553301 - protein, 16 aa, Homo sapiens
  CDR3 for alpha chain variable domain of TCR clone 276651 (TRAV12-3, TRAJ53)
CAMSVGSGGSNYKLTF

SEQ ID NO: 553302 - protein, 11 aa, Homo sapiens
  CDR3 for beta chain variable domain of TCR clone 276651 (TRBV29-1, TRBJ2-5)
CSVASGGTEYF

SEQ ID NO: 553303 - protein, 11 aa, Homo sapiens
  CDR3 for alpha chain variable domain of TCR clone 276652 (TRAV36/DV7, TRAJ36)
CAVIARRQTTS

SEQ ID NO: 553304 - protein, 14 aa, Homo sapiens
  CDR3 for beta chain variable domain of TCR clone 276652 (TRBV19, TRBJ2-1)
CASPTFVLSGEQFF

SEQ ID NO: 553305 - protein, 12 aa, Homo sapiens
  CDR3 for alpha chain variable domain of TCR clone 276653 (TRAV12-2, TRAJ52)
IGGGTSYGKLTF

SEQ ID NO: 553306 - protein, 15 aa, Homo sapiens
  CDR3 for beta chain variable domain of TCR clone 276653 (TRBV28, TRBJ2-7)
CASSPGGRGFYEQYF

SEQ ID NO: 553307 - protein, 13 aa, Homo sapiens
  CDR3 for alpha chain variable domain of TCR clone 276654 (TRAV20, TRAJ31)
CAVQAWNNARLLF

SEQ ID NO: 553308 - protein, 16 aa, Homo sapiens
  CDR3 for beta chain variable domain of TCR clone 276654 (TRBV6-6, TRBJ2-1)
CASSWGGQGPYNEQFF

SEQ ID NO: 553309 - protein, 14 aa, Homo sapiens
  CDR3 for alpha chain variable domain of TCR clone 276655 (TRAV1-2, TRAJ8)
CAVREDTGFQKLVF

SEQ ID NO: 553310 - protein, 14 aa, Homo sapiens
  CDR3 for beta chain variable domain of TCR clone 276655 (TRBV5-4, TRBJ2-5)
CASSPPRGQETQYF

SEQ ID NO: 553311 - protein, 14 aa, Homo sapiens
  CDR3 for alpha chain variable domain of TCR clone 276656 (TRAV12-2, TRAJ13)
CAVKKTGGYQKVTF

SEQ ID NO: 553312 - protein, 14 aa, Homo sapiens
  CDR3 for beta chain variable domain of TCR clone 276656 (TRBV4-2, TRBJ2-3)
CASSQERGTDTQYF

SEQ ID NO: 553313 - protein, 16 aa, Homo sapiens
  CDR3 for alpha chain variable domain of TCR clone 276657 (TRAV3, TRAJ3)
CAGRDRAKSSASKIIF

SEQ ID NO: 553314 - protein, 13 aa, Homo sapiens
  CDR3 for beta chain variable domain of TCR clone 276657 (TRBV10-3, TRBJ2-7)
CASKLAVNYEQYF

SEQ ID NO: 553315 - protein, 13 aa, Homo sapiens
  CDR3 for alpha chain variable domain of TCR clone 276658 (TRAV29/DV5, TRAJ47)
CAASAEYGNKLVF

SEQ ID NO: 553316 - protein, 15 aa, Homo sapiens
  CDR3 for beta chain variable domain of TCR clone 276658 (TRBV7-3, TRBJ2-2)
CASSETGQGTGELFF

SEQ ID NO: 553317 - protein, 13 aa, Homo sapiens
  CDR3 for alpha chain variable domain of TCR clone 276659 (TRAV39, TRAJ49)
CAVDRNTGDQFYF

SEQ ID NO: 553318 - protein, 14 aa, Homo sapiens
  CDR3 for beta chain variable domain of TCR clone 276659 (TRBV4-1, TRBJ1-1)
CASSRSGQSFEAFF

SEQ ID NO: 553319 - protein, 15 aa, Homo sapiens
  CDR3 for alpha chain variable domain of TCR clone 276660 (TRAV27, TRAJ38)
CAARRNAGNNRKLIW

SEQ ID NO: 553320 - protein, 14 aa, Homo sapiens
  CDR3 for beta chain variable domain of TCR clone 276660 (TRBV12-4, TRBJ1-1)
CASSLGTGGTEAFF

SEQ ID NO: 553321 - protein, 10 aa, Homo sapiens
  CDR3 for alpha chain variable domain of TCR clone 276661 (TRAV35, TRAJ45)
SGGGADGLTF

SEQ ID NO: 553322 - protein, 14 aa, Homo sapiens
  CDR3 for beta chain variable domain of TCR clone 276661 (TRBV12-5, TRBJ2-5)
CASGSRTHQETQYF

SEQ ID NO: 553323 - protein, 16 aa, Homo sapiens
  CDR3 for alpha chain variable domain of TCR clone 276662 (TRAV35, TRAJ28)
CAGQRYSGAGSYQLTF

SEQ ID NO: 553324 - protein, 13 aa, Homo sapiens
  CDR3 for beta chain variable domain of TCR clone 276662 (TRBV19, TRBJ1-2)
CSSSQGQVYGYTF

SEQ ID NO: 553325 - protein, 15 aa, Homo sapiens
  CDR3 for alpha chain variable domain of TCR clone 276663 (TRAV3, TRAJ3)
CAVRDMSSSASKIIF

SEQ ID NO: 553326 - protein, 15 aa, Homo sapiens
  CDR3 for beta chain variable domain of TCR clone 276663 (TRBV5-1, TRBJ2-1)
CASTGSGRTYNEQFF

SEQ ID NO: 553327 - protein, 11 aa, Homo sapiens
  CDR3 for alpha chain variable domain of TCR clone 276664 (TRAV12-1, TRAJ43)
CVEYDNNDMRF

SEQ ID NO: 553328 - protein, 14 aa, Homo sapiens
  CDR3 for beta chain variable domain of TCR clone 276664 (TRBV10-2, TRBJ2-1)
CASREGTSEDEQFF

SEQ ID NO: 553329 - protein, 14 aa, Homo sapiens
  CDR3 for alpha chain variable domain of TCR clone 276665 (TRAV1-2, TRAJ8)
CAVRDDTGFQKLEF

SEQ ID NO: 553330 - protein, 13 aa, Homo sapiens
  CDR3 for beta chain variable domain of TCR clone 276665 (TRBV4-2, TRBJ2-2)
CASEDRGTGELFF

SEQ ID NO: 553331 - protein, 18 aa, Homo sapiens
  CDR3 for alpha chain variable domain of TCR clone 276666 (TRAV21, TRAJ52)
CAVRPSPAGGTSYGKLTF

SEQ ID NO: 553332 - protein, 14 aa, Homo sapiens
  CDR3 for beta chain variable domain of TCR clone 276666 (TRBV7-9, TRBJ1-6)
CASSVMTDYSPLHF

SEQ ID NO: 553333 - protein, 14 aa, Homo sapiens
  CDR3 for alpha chain variable domain of TCR clone 276667 (TRAV20, TRAJ17)
CAVQARAAGIKLTF

SEQ ID NO: 553334 - protein, 13 aa, Homo sapiens
  CDR3 for beta chain variable domain of TCR clone 276667 (TRBV19, TRBJ1-2)
CASSPTLNYGYTF

SEQ ID NO: 553335 - protein, 15 aa, Homo sapiens
  CDR3 for alpha chain variable domain of TCR clone 276668 (TRAV12-2, TRAJ53)
CAVNGGGGSNYKLTL

SEQ ID NO: 553336 - protein, 16 aa, Homo sapiens
  CDR3 for beta chain variable domain of TCR clone 276668 (TRBV4-3, TRBJ1-6)
CASSAQPGGEGSPLHF

SEQ ID NO: 553337 - protein, 11 aa, Homo sapiens
  CDR3 for alpha chain variable domain of TCR clone 276669 (TRAV13-1, TRAJ20)
CGPHGLYKLSF

SEQ ID NO: 553338 - protein, 14 aa, Homo sapiens
  CDR3 for beta chain variable domain of TCR clone 276669 (TRBV28, TRBJ2-5)
CASTGAGGVETQYF

SEQ ID NO: 553339 - protein, 13 aa, Homo sapiens
  CDR3 for alpha chain variable domain of TCR clone 276670 (TRAV13-2, TRAJ22)
CLGWTSSARQLTF

SEQ ID NO: 553340 - protein, 15 aa, Homo sapiens
  CDR3 for beta chain variable domain of TCR clone 276670 (TRBV7-2, TRBJ2-3)
CASSSTGLETDTQYF

SEQ ID NO: 553341 - protein, 13 aa, Homo sapiens
  CDR3 for alpha chain variable domain of TCR clone 276671 (TRAV26-1, )
CIVSHRVEGFWNQ

SEQ ID NO: 553342 - protein, 13 aa, Homo sapiens
  CDR3 for beta chain variable domain of TCR clone 276671 (TRBV7-8, TRBJ2-2)
CASSSSRTGELFF

SEQ ID NO: 553343 - protein, 14 aa, Homo sapiens
  CDR3 for alpha chain variable domain of TCR clone 276672 (TRAV26-1, TRAJ38)
CIADNAGNNRKLIF

SEQ ID NO: 553344 - protein, 13 aa, Homo sapiens
  CDR3 for beta chain variable domain of TCR clone 276672 (TRBV20-1, TRBJ1-1)
CSARGGGNTEAFL

SEQ ID NO: 553345 - protein, 14 aa, Homo sapiens
  CDR3 for alpha chain variable domain of TCR clone 276673 (TRAV12-1, TRAJ13)
CVVIDSGGYQKVTF

SEQ ID NO: 553346 - protein, 12 aa, Homo sapiens
  CDR3 for beta chain variable domain of TCR clone 276673 (TRBV29-1, TRBJ2-3)
CSVTGGADTQYL

SEQ ID NO: 553347 - protein, 14 aa, Homo sapiens
  CDR3 for alpha chain variable domain of TCR clone 276674 (TRAV4, TRAJ17)
CLVGDMAAGNKLTF

SEQ ID NO: 553348 - protein, 16 aa, Homo sapiens
  CDR3 for beta chain variable domain of TCR clone 276674 (TRBV4-1, TRBJ2-7)
CASSPVAWGTSSTSGR

SEQ ID NO: 553349 - protein, 11 aa, Homo sapiens
  CDR3 for alpha chain variable domain of TCR clone 276675 (TRAV12-1, TRAJ30)
CVVNGQDKMIF

SEQ ID NO: 553350 - protein, 12 aa, Homo sapiens
  CDR3 for beta chain variable domain of TCR clone 276675 (TRBV27, TRBJ2-2)
CASKLFTGELFF

SEQ ID NO: 553351 - protein, 14 aa, Homo sapiens
  CDR3 for alpha chain variable domain of TCR clone 276676 (TRAV12-2, TRAJ45)
CAVYSGGGADGLTF

SEQ ID NO: 553352 - protein, 13 aa, Homo sapiens
  CDR3 for beta chain variable domain of TCR clone 276676 (TRBV7-7, TRBJ2-3)
CASSFSRADTQYF

SEQ ID NO: 553353 - protein, 12 aa, Homo sapiens
  CDR3 for alpha chain variable domain of TCR clone 276677 (TRAV12-3, TRAJ3)
CAIDSSASKIIF

SEQ ID NO: 553354 - protein, 17 aa, Homo sapiens
  CDR3 for beta chain variable domain of TCR clone 276677 (TRBV7-9, TRBJ2-3)
CVSSLEEAGAYPDTQYF

SEQ ID NO: 553355 - protein, 14 aa, Homo sapiens
  CDR3 for alpha chain variable domain of TCR clone 276678 (TRAV12-3, TRAJ10)
SHLPLTGGGNKLTF

SEQ ID NO: 553356 - protein, 15 aa, Homo sapiens
  CDR3 for beta chain variable domain of TCR clone 276678 (TRBV5-1, TRBJ2-1)
CASSTPRAPYNEQFF

SEQ ID NO: 553357 - protein, 13 aa, Homo sapiens
  CDR3 for alpha chain variable domain of TCR clone 276679 (TRAV27, TRAJ8)
CAGGPTGFQKLVF

SEQ ID NO: 553358 - protein, 15 aa, Homo sapiens
  CDR3 for beta chain variable domain of TCR clone 276679 (TRBV6-1, TRBJ2-7)
CASGERMGDFYEQYF

SEQ ID NO: 553359 - protein, 13 aa, Homo sapiens
  CDR3 for alpha chain variable domain of TCR clone 276680 (TRAV8-3, TRAJ48)
GAVVPFGIEKLTF

SEQ ID NO: 553360 - protein, 15 aa, Homo sapiens
  CDR3 for beta chain variable domain of TCR clone 276680 (TRBV11-2, TRBJ2-1)
CASSSPSTRYNEQFF

SEQ ID NO: 553361 - protein, 15 aa, Homo sapiens
  CDR3 for alpha chain variable domain of TCR clone 276681 (TRAV35, TRAJ40)
CAGQLGTSGTYKYIF

SEQ ID NO: 553362 - protein, 12 aa, Homo sapiens
  CDR3 for beta chain variable domain of TCR clone 276681 (TRBV11-2, TRBJ2-1)
CASSPGNNEQFF

SEQ ID NO: 553363 - protein, 11 aa, Homo sapiens
  CDR3 for alpha chain variable domain of TCR clone 276682 (TRAV3, TRAJ13)
CAVTSYQKVTF

SEQ ID NO: 553364 - protein, 15 aa, Homo sapiens
  CDR3 for beta chain variable domain of TCR clone 276682 (TRBV7-9, TRBJ2-7)
CASSSSGLAVYEHYF

SEQ ID NO: 553365 - protein, 19 aa, Homo sapiens
  CDR3 for alpha chain variable domain of TCR clone 276683 (TRAV29/DV5, TRAJ49)
CSVLLCSKLTVDTGNQFYF

SEQ ID NO: 553366 - protein, 14 aa, Homo sapiens
  CDR3 for beta chain variable domain of TCR clone 276683 (TRBV7-6, TRBJ2-3)
CASSLGTVTDTQYF

SEQ ID NO: 553367 - protein, 15 aa, Homo sapiens
  CDR3 for alpha chain variable domain of TCR clone 276684 (TRAV8-3, TRAJ45)
CASSYSGGGADGLTF

SEQ ID NO: 553368 - protein, 16 aa, Homo sapiens
  CDR3 for beta chain variable domain of TCR clone 276684 (TRBV3-1, TRBJ2-7)
CASSQGTTGVAYEQYF

SEQ ID NO: 553369 - protein, 15 aa, Homo sapiens
  CDR3 for alpha chain variable domain of TCR clone 276685 (TRAV35, TRAJ40)
CAGQLCTSGTYKYIF

SEQ ID NO: 553370 - protein, 14 aa, Homo sapiens
  CDR3 for beta chain variable domain of TCR clone 276685 (TRBV7-3, TRBJ2-1)
CASSVAGGTNEQFF

SEQ ID NO: 553371 - protein, 15 aa, Homo sapiens
  CDR3 for alpha chain variable domain of TCR clone 276686 (TRAV8-4, TRAJ37)
CAVSRGAGNTGKLIF

SEQ ID NO: 553372 - protein, 16 aa, Homo sapiens
  CDR3 for beta chain variable domain of TCR clone 276686 (TRBV7-3, TRBJ2-3)
CASSLSGDRPEDTQYF

SEQ ID NO: 553373 - protein, 15 aa, Homo sapiens
  CDR3 for alpha chain variable domain of TCR clone 276687 (TRAV12-3, TRAJ6)
CAMSATTGGSYIPTF

SEQ ID NO: 553374 - protein, 15 aa, Homo sapiens
  CDR3 for beta chain variable domain of TCR clone 276687 (TRBV6-5, TRBJ2-1)
CASSYDAGAGNEQFF

SEQ ID NO: 553375 - protein, 14 aa, Homo sapiens
  CDR3 for alpha chain variable domain of TCR clone 276688 (TRAV12-1, TRAJ43)
CVVNGRSNNNDMRF

SEQ ID NO: 553376 - protein, 13 aa, Homo sapiens
  CDR3 for beta chain variable domain of TCR clone 276688 (TRBV7-9, TRBJ1-2)
CASSLKQNYGHTF

SEQ ID NO: 553377 - protein, 15 aa, Homo sapiens
  CDR3 for alpha chain variable domain of TCR clone 276689 (TRAV17, TRAJ52)
CATEAGGTSYGQLTF

SEQ ID NO: 553378 - protein, 14 aa, Homo sapiens
  CDR3 for beta chain variable domain of TCR clone 276689 (TRBV28, TRBJ1-5)
CASSLGVLVKPQHF

SEQ ID NO: 553379 - protein, 15 aa, Homo sapiens
  CDR3 for alpha chain variable domain of TCR clone 276690 (TRAV13-1, TRAJ16)
CAARYKMARSCSLQG

SEQ ID NO: 553380 - protein, 17 aa, Homo sapiens
  CDR3 for beta chain variable domain of TCR clone 276690 (TRBV7-9, TRBJ2-6)
CASSFGAGYSGANVPTF

SEQ ID NO: 553381 - protein, 17 aa, Homo sapiens
  CDR3 for alpha chain variable domain of TCR clone 276691 (TRAV3, TRAJ6)
CAVRDGPRAGGSCIPTF

SEQ ID NO: 553382 - protein, 18 aa, Homo sapiens
  CDR3 for beta chain variable domain of TCR clone 276691 (TRBV7-3, TRBJ2-3)
CASSSTGTYPGSADTQYF

SEQ ID NO: 553383 - protein, 10 aa, Homo sapiens
  CDR3 for alpha chain variable domain of TCR clone 276692 (TRAV1-2, TRAJ34)
CAVNTDKLIF

SEQ ID NO: 553384 - protein, 15 aa, Homo sapiens
  CDR3 for beta chain variable domain of TCR clone 276692 (TRBV28, TRBJ2-7)
CASSPGGRGFYEQYF

SEQ ID NO: 553385 - protein, 14 aa, Homo sapiens
  CDR3 for alpha chain variable domain of TCR clone 276693 (TRAV20, TRAJ29)
CAVQAWVGNTPLVF

SEQ ID NO: 553386 - protein, 10 aa, Homo sapiens
  CDR3 for beta chain variable domain of TCR clone 276693 (TRBV6-3, TRBJ1-1)
CASHGTEAFF

SEQ ID NO: 553387 - protein, 14 aa, Homo sapiens
  CDR3 for alpha chain variable domain of TCR clone 276694 (TRAV23/DV6, TRAJ58)
CAATRETSGSRLTF

SEQ ID NO: 553388 - protein, 16 aa, Homo sapiens
  CDR3 for beta chain variable domain of TCR clone 276694 (TRBV10-3, TRBJ2-1)
CAISGVGDGGGGEQFF

SEQ ID NO: 553389 - protein, 10 aa, Homo sapiens
  CDR3 for alpha chain variable domain of TCR clone 276695 (TRAV12-1, TRAJ43)
CVVHNNDMRF

SEQ ID NO: 553390 - protein, 15 aa, Homo sapiens
  CDR3 for beta chain variable domain of TCR clone 276695 (TRBV4-1, TRBJ1-2)
CASSLNTGQGYGYTF

SEQ ID NO: 553391 - protein, 15 aa, Homo sapiens
  CDR3 for alpha chain variable domain of TCR clone 276696 (TRAV13-1, TRAJ5)
CAASKADTRRRALTF

SEQ ID NO: 553392 - protein, 16 aa, Homo sapiens
  CDR3 for beta chain variable domain of TCR clone 276696 (TRBV7-2, TRBJ2-1)
CASSLGRTSGDNEQFF

SEQ ID NO: 553393 - protein, 13 aa, Homo sapiens
  CDR3 for alpha chain variable domain of TCR clone 276697 (TRAV13-1, TRAJ40)
CAAISPGTYKYIF

SEQ ID NO: 553394 - protein, 14 aa, Homo sapiens
  CDR3 for beta chain variable domain of TCR clone 276697 (TRBV27, TRBJ1-1)
CASSLLSGLSEAFF

SEQ ID NO: 553395 - protein, 11 aa, Homo sapiens
  CDR3 for alpha chain variable domain of TCR clone 276698 (TRAV2, TRAJ13)
CASGGYQKVTF

SEQ ID NO: 553396 - protein, 13 aa, Homo sapiens
  CDR3 for beta chain variable domain of TCR clone 276698 (TRBV18, TRBJ1-1)
CASSPETKPEAFF

SEQ ID NO: 553397 - protein, 10 aa, Homo sapiens
  CDR3 for alpha chain variable domain of TCR clone 276699 (TRAV1-2, TRAJ31)
CVSEDARLMF

SEQ ID NO: 553398 - protein, 16 aa, Homo sapiens
  CDR3 for beta chain variable domain of TCR clone 276699 (TRBV7-3, TRBJ2-2)
CASSLKRGTLSGELFF

SEQ ID NO: 553399 - protein, 11 aa, Homo sapiens
  CDR3 for alpha chain variable domain of TCR clone 276700 (TRAV26-1, TRAJ37)
CIVRVGRKLIF

SEQ ID NO: 553400 - protein, 15 aa, Homo sapiens
  CDR3 for beta chain variable domain of TCR clone 276700 (TRBV5-1, TRBJ2-3)
CASSYTSGSTDTQYF

SEQ ID NO: 553401 - protein, 12 aa, Homo sapiens
  CDR3 for alpha chain variable domain of TCR clone 276701 (TRAV16, TRAJ10)
CSRTGGGNKLTF

SEQ ID NO: 553402 - protein, 12 aa, Homo sapiens
  CDR3 for beta chain variable domain of TCR clone 276701 (TRBV11-3, TRBJ2-3)
CASAFGGRSQYF

SEQ ID NO: 553403 - protein, 10 aa, Homo sapiens
  CDR3 for alpha chain variable domain of TCR clone 276702 (TRAV2, TRAJ34)
CAVVNDKLIF

SEQ ID NO: 553404 - protein, 15 aa, Homo sapiens
  CDR3 for beta chain variable domain of TCR clone 276702 (TRBV3-1, TRBJ2-2)
CASSQDWTRSGELFF

SEQ ID NO: 553405 - protein, 16 aa, Homo sapiens
  CDR3 for alpha chain variable domain of TCR clone 276703 (TRAV17, TRAJ17)
CATALQEEAAGNKLTF

SEQ ID NO: 553406 - protein, 16 aa, Homo sapiens
  CDR3 for beta chain variable domain of TCR clone 276703 (TRBV5-1, TRBJ1-1)
CASSSGGNSLNTEAFF

SEQ ID NO: 553407 - protein, 11 aa, Homo sapiens
  CDR3 for alpha chain variable domain of TCR clone 276704 (TRAV27, TRAJ45)
CVGGEEEVLTD

SEQ ID NO: 553408 - protein, 13 aa, Homo sapiens
  CDR3 for beta chain variable domain of TCR clone 276704 (TRBV20-1, TRBJ1-1)
CSAPEGGNTEAFF

SEQ ID NO: 553409 - protein, 13 aa, Homo sapiens
  CDR3 for alpha chain variable domain of TCR clone 276705 (TRAV1-1, TRAJ20)
CAVRGSNDYKPSF

SEQ ID NO: 553410 - protein, 15 aa, Homo sapiens
  CDR3 for beta chain variable domain of TCR clone 276705 (TRBV7-2, TRBJ2-1)
CASSSRTSREDEQFF

SEQ ID NO: 553411 - protein, 14 aa, Homo sapiens
  CDR3 for alpha chain variable domain of TCR clone 276706 (TRAV4, TRAJ9)
CLVGSGTGGIKTIF

SEQ ID NO: 553412 - protein, 14 aa, Homo sapiens
  CDR3 for beta chain variable domain of TCR clone 276706 (TRBV7-9, TRBJ2-4)
CASSLAMGGNIQYF

SEQ ID NO: 553413 - protein, 15 aa, Homo sapiens
  CDR3 for alpha chain variable domain of TCR clone 276707 (TRAV25, TRAJ10)
CAGPLLTGGGNKLTF

SEQ ID NO: 553414 - protein, 15 aa, Homo sapiens
  CDR3 for beta chain variable domain of TCR clone 276707 (TRBV6-3, TRBJ2-7)
CASSSPGTVFYEQYF

SEQ ID NO: 553415 - protein, 12 aa, Homo sapiens
  CDR3 for alpha chain variable domain of TCR clone 276708 (TRAV21, TRAJ33)
CAKMDSNYQLIW

SEQ ID NO: 553416 - protein, 14 aa, Homo sapiens
  CDR3 for beta chain variable domain of TCR clone 276708 (TRBV12-4, TRBJ1-1)
CASTWTGHDTEAFF

SEQ ID NO: 553417 - protein, 12 aa, Homo sapiens
  CDR3 for alpha chain variable domain of TCR clone 276709 (TRAV12-2, TRAJ49)
CAVTTPGNQFYF

SEQ ID NO: 553418 - protein, 14 aa, Homo sapiens
  CDR3 for beta chain variable domain of TCR clone 276709 (TRBV2, TRBJ2-3)
CAVGGTISTDTQYF

SEQ ID NO: 553419 - protein, 18 aa, Homo sapiens
  CDR3 for alpha chain variable domain of TCR clone 276710 (TRAV14/DV4, TRAJ15)
CAMREFPPTGQAGTALIF

SEQ ID NO: 553420 - protein, 16 aa, Homo sapiens
  CDR3 for beta chain variable domain of TCR clone 276710 (TRBV20-1, TRBJ1-2)
CSASMGQGVANYGYTF

SEQ ID NO: 553421 - protein, 13 aa, Homo sapiens
  CDR3 for alpha chain variable domain of TCR clone 276711 (TRAV2, TRAJ15)
CAVASQAGTALIF

SEQ ID NO: 553422 - protein, 13 aa, Homo sapiens
  CDR3 for beta chain variable domain of TCR clone 276711 (TRBV7-9, TRBJ1-5)
CASSLRNDQPQHF

SEQ ID NO: 553423 - protein, 16 aa, Homo sapiens
  CDR3 for alpha chain variable domain of TCR clone 276712 (TRAV23/DV6, TRAJ3)
CSKPAVSYRSASKIIF

SEQ ID NO: 553424 - protein, 15 aa, Homo sapiens
  CDR3 for beta chain variable domain of TCR clone 276712 (TRBV27, TRBJ2-1)
CASSNGGGSSNEQFF

SEQ ID NO: 553425 - protein, 16 aa, Homo sapiens
  CDR3 for alpha chain variable domain of TCR clone 276713 (TRAV4, TRAJ42)
CVVGPIYGGSQGNLIF

SEQ ID NO: 553426 - protein, 18 aa, Homo sapiens
  CDR3 for beta chain variable domain of TCR clone 276713 (TRBV25-1, TRBJ1-2)
CASSGLQNGQGLIFGYTF

SEQ ID NO: 553427 - protein, 13 aa, Homo sapiens
  CDR3 for alpha chain variable domain of TCR clone 276714 (TRAV12-1, TRAJ29)
CVVRNSGNTPLVF

SEQ ID NO: 553428 - protein, 14 aa, Homo sapiens
  CDR3 for beta chain variable domain of TCR clone 276714 (TRBV7-2, TRBJ2-7)
CASRSQGAAYEQNF

SEQ ID NO: 553429 - protein, 14 aa, Homo sapiens
  CDR3 for alpha chain variable domain of TCR clone 276715 (TRAV13-1, TRAJ45)
CAAVGGGGADGLTF

SEQ ID NO: 553430 - protein, 16 aa, Homo sapiens
  CDR3 for beta chain variable domain of TCR clone 276715 (TRBV7-2, TRBJ1-1)
CASSLGAGWTNTEAFF

SEQ ID NO: 553431 - protein, 11 aa, Homo sapiens
  CDR3 for alpha chain variable domain of TCR clone 276716 (TRAV4, TRAJ31)
CFVGDNARLMF

SEQ ID NO: 553432 - protein, 16 aa, Homo sapiens
  CDR3 for beta chain variable domain of TCR clone 276716 (TRBV7-2, TRBJ2-5)
CASSSKWLSGQETQYF

SEQ ID NO: 553433 - protein, 18 aa, Homo sapiens
  CDR3 for alpha chain variable domain of TCR clone 276717 (TRAV12-2, )
CAVEDIQNPDPAVYQMRD

SEQ ID NO: 553434 - protein, 20 aa, Homo sapiens
  CDR3 for beta chain variable domain of TCR clone 276717 (TRBV11-3, TRBJ2-7)
CASSQRTSGSLRAVLRAGHQ

SEQ ID NO: 553435 - protein, 14 aa, Homo sapiens
  CDR3 for alpha chain variable domain of TCR clone 276718 (TRAV16, TRAJ33)
CALSAMDSNYQLIW

SEQ ID NO: 553436 - protein, 15 aa, Homo sapiens
  CDR3 for beta chain variable domain of TCR clone 276718 (TRBV27, TRBJ2-7)
CASSPIVTGAYVQYF

SEQ ID NO: 553437 - protein, 12 aa, Homo sapiens
  CDR3 for alpha chain variable domain of TCR clone 276719 (TRAV21, TRAJ13)
PGPSGGYQKVTF

SEQ ID NO: 553438 - protein, 15 aa, Homo sapiens
  CDR3 for beta chain variable domain of TCR clone 276719 (TRBV7-9, TRBJ1-6)
CVSSSPGRGNSPLHF

SEQ ID NO: 553439 - protein, 14 aa, Homo sapiens
  CDR3 for alpha chain variable domain of TCR clone 276720 (TRAV35, TRAJ53)
CAGNSGGSNYKLTF

SEQ ID NO: 553440 - protein, 14 aa, Homo sapiens
  CDR3 for beta chain variable domain of TCR clone 276720 (TRBV7-9, TRBJ2-2)
CASSLVQDTGELFF

SEQ ID NO: 553441 - protein, 15 aa, Homo sapiens
  CDR3 for alpha chain variable domain of TCR clone 276721 (TRAV1-1, TRAJ24)
CALSGGTDSWGNSSL

SEQ ID NO: 553442 - protein, 16 aa, Homo sapiens
  CDR3 for beta chain variable domain of TCR clone 276721 (TRBV2, TRBJ2-7)
CASSEPWTGPSYEQYF

SEQ ID NO: 553443 - protein, 13 aa, Homo sapiens
  CDR3 for alpha chain variable domain of TCR clone 276722 (TRAV8-6, TRAJ49)
CAVITNTGNQFYF

SEQ ID NO: 553444 - protein, 15 aa, Homo sapiens
  CDR3 for beta chain variable domain of TCR clone 276722 (TRBV5-1, TRBJ2-5)
CASSLGLAEQETQYF

SEQ ID NO: 553445 - protein, 14 aa, Homo sapiens
  CDR3 for alpha chain variable domain of TCR clone 276723 (TRAV36/DV7, TRAJ33)
CAVLPRDSNYQLIW

SEQ ID NO: 553446 - protein, 15 aa, Homo sapiens
  CDR3 for beta chain variable domain of TCR clone 276723 (TRBV7-6, TRBJ1-5)
CASSQSSGINQPQHF

SEQ ID NO: 553447 - protein, 11 aa, Homo sapiens
  CDR3 for alpha chain variable domain of TCR clone 276724 (TRAV35, TRAJ34)
CWARNTDKLIF

SEQ ID NO: 553448 - protein, 15 aa, Homo sapiens
  CDR3 for beta chain variable domain of TCR clone 276724 (TRBV11-3, TRBJ2-3)
CASSFRAAFPDTQYF

SEQ ID NO: 553449 - protein, 14 aa, Homo sapiens
  CDR3 for alpha chain variable domain of TCR clone 276725 (TRAV1-2, TRAJ16)
CAVNRFSDGQKLLF

SEQ ID NO: 553450 - protein, 13 aa, Homo sapiens
  CDR3 for beta chain variable domain of TCR clone 276725 (TRBV10-3, TRBJ2-7)
CAAKLAVSYEQYF

SEQ ID NO: 553451 - protein, 12 aa, Homo sapiens
  CDR3 for alpha chain variable domain of TCR clone 276726 (TRAV20, TRAJ4)
CRASGGYNKRIF

SEQ ID NO: 553452 - protein, 18 aa, Homo sapiens
  CDR3 for beta chain variable domain of TCR clone 276726 (TRBV19, TRBJ1-5)
CASSKGQVSIHSNQPQHF

SEQ ID NO: 553453 - protein, 13 aa, Homo sapiens
  CDR3 for alpha chain variable domain of TCR clone 276727 (TRAV12-2, TRAJ6)
CAVNVSRKLHTYI

SEQ ID NO: 553454 - protein, 13 aa, Homo sapiens
  CDR3 for beta chain variable domain of TCR clone 276727 (TRBV5-1, TRBJ2-7)
CASSATGGNERYF

SEQ ID NO: 553455 - protein, 13 aa, Homo sapiens
  CDR3 for alpha chain variable domain of TCR clone 276728 (TRAV21, TRAJ27)
CAARPGNAGKSTF

SEQ ID NO: 553456 - protein, 17 aa, Homo sapiens
  CDR3 for beta chain variable domain of TCR clone 276728 (TRBV4-1, TRBJ1-4)
CASSPEGPRGVEEKLFF

SEQ ID NO: 553457 - protein, 14 aa, Homo sapiens
  CDR3 for alpha chain variable domain of TCR clone 276729 (TRAV16, TRAJ33)
CALSAMDSNYQLIW

SEQ ID NO: 553458 - protein, 12 aa, Homo sapiens
  CDR3 for beta chain variable domain of TCR clone 276729 (TRBV7-9, TRBJ2-7)
CATRTDAYEQYF

SEQ ID NO: 553459 - protein, 11 aa, Homo sapiens
  CDR3 for alpha chain variable domain of TCR clone 276730 (TRAV26-1, TRAJ27)
CIDPNAGKSTF

SEQ ID NO: 553460 - protein, 18 aa, Homo sapiens
  CDR3 for beta chain variable domain of TCR clone 276730 (TRBV7-9, TRBJ2-6)
CASSCPGAGMSGANVLTF

SEQ ID NO: 553461 - protein, 16 aa, Homo sapiens
  CDR3 for alpha chain variable domain of TCR clone 276731 (TRAV16, TRAJ21)
CACGWATTLTNFTLDL

SEQ ID NO: 553462 - protein, 15 aa, Homo sapiens
  CDR3 for beta chain variable domain of TCR clone 276731 (TRBV19, TRBJ2-1)
CASSIQATSCNEQFF

SEQ ID NO: 553463 - protein, 11 aa, Homo sapiens
  CDR3 for alpha chain variable domain of TCR clone 276732 (TRAV3, TRAJ21)
CAVGNFNKFYF

SEQ ID NO: 553464 - protein, 16 aa, Homo sapiens
  CDR3 for beta chain variable domain of TCR clone 276732 (TRBV19, TRBJ2-1)
CANSRAGPSSYNEQFF

SEQ ID NO: 553465 - protein, 12 aa, Homo sapiens
  CDR3 for alpha chain variable domain of TCR clone 276733 (TRAV20, TRAJ30)
CAGGVGNDKIIF

SEQ ID NO: 553466 - protein, 12 aa, Homo sapiens
  CDR3 for beta chain variable domain of TCR clone 276733 (TRBV5-5, TRBJ2-5)
CASSYFGETQYF

SEQ ID NO: 553467 - protein, 12 aa, Homo sapiens
  CDR3 for alpha chain variable domain of TCR clone 276734 (TRAV12-3, TRAJ40)
CAMSSGTYKYIF

SEQ ID NO: 553468 - protein, 14 aa, Homo sapiens
  CDR3 for beta chain variable domain of TCR clone 276734 (TRBV4-1, TRBJ2-5)
CASSRSGSGETQYF

SEQ ID NO: 553469 - protein, 10 aa, Homo sapiens
  CDR3 for alpha chain variable domain of TCR clone 276735 (TRAV30, TRAJ48)
CGIGNEKLTF

SEQ ID NO: 553470 - protein, 19 aa, Homo sapiens
  CDR3 for beta chain variable domain of TCR clone 276735 (TRBV25-1, TRBJ2-2)
CAILVYRVDRGRKTGELFF

SEQ ID NO: 553471 - protein, 10 aa, Homo sapiens
  CDR3 for alpha chain variable domain of TCR clone 276736 (TRAV16, TRAJ22)
SAMYLRQLAF

SEQ ID NO: 553472 - protein, 15 aa, Homo sapiens
  CDR3 for beta chain variable domain of TCR clone 276736 (TRBV7-9, TRBJ1-6)
CASSSLGRGNSPLHF

SEQ ID NO: 553473 - protein, 14 aa, Homo sapiens
  CDR3 for alpha chain variable domain of TCR clone 276737 (TRAV1-2, TRAJ8)
CAVREDTGFQKLVF

SEQ ID NO: 553474 - protein, 12 aa, Homo sapiens
  CDR3 for beta chain variable domain of TCR clone 276737 (TRBV2, TRBJ2-1)
CTYGPPGNEQFF

SEQ ID NO: 553475 - protein, 17 aa, Homo sapiens
  CDR3 for alpha chain variable domain of TCR clone 276738 (TRAV3, TRAJ28)
CAVREAYSGAGSYQLTF

SEQ ID NO: 553476 - protein, 13 aa, Homo sapiens
  CDR3 for beta chain variable domain of TCR clone 276738 (TRBV11-2, TRBJ1-1)
CASSLETSTEAFF

SEQ ID NO: 553477 - protein, 13 aa, Homo sapiens
  CDR3 for alpha chain variable domain of TCR clone 276739 (TRAV21, TRAJ20)
CAVGLRVDYKLSF

SEQ ID NO: 553478 - protein, 15 aa, Homo sapiens
  CDR3 for beta chain variable domain of TCR clone 276739 (TRBV25-1, TRBJ1-4)
CASSKRIATNEKLFF

SEQ ID NO: 553479 - protein, 14 aa, Homo sapiens
  CDR3 for alpha chain variable domain of TCR clone 276740 (TRAV8-1, TRAJ23)
CAVGTYNQGGKLIF

SEQ ID NO: 553480 - protein, 12 aa, Homo sapiens
  CDR3 for beta chain variable domain of TCR clone 276740 (TRBV19, TRBJ2-1)
CASSRQGAEQFF

SEQ ID NO: 553481 - protein, 11 aa, Homo sapiens
  CDR3 for alpha chain variable domain of TCR clone 276741 (TRAV21, TRAJ34)
CAVTNTDKLIF

SEQ ID NO: 553482 - protein, 16 aa, Homo sapiens
  CDR3 for beta chain variable domain of TCR clone 276741 (TRBV27, TRBJ2-1)
SMNVEPGTSGDNEQFF

SEQ ID NO: 553483 - protein, 11 aa, Homo sapiens
  CDR3 for alpha chain variable domain of TCR clone 276742 (TRAV1-2, TRAJ40)
SAVPGTYKYIF

SEQ ID NO: 553484 - protein, 16 aa, Homo sapiens
  CDR3 for beta chain variable domain of TCR clone 276742 (TRBV29-1, TRBJ2-7)
CSVEVVGTSGSYEQYF

SEQ ID NO: 553485 - protein, 14 aa, Homo sapiens
  CDR3 for alpha chain variable domain of TCR clone 276743 (TRAV12-1, TRAJ17)
CVVNYKAAGNKLTF

SEQ ID NO: 553486 - protein, 15 aa, Homo sapiens
  CDR3 for beta chain variable domain of TCR clone 276743 (TRBV20-1, TRBJ2-7)
CSARDQVSGMDEQYF

SEQ ID NO: 553487 - protein, 16 aa, Homo sapiens
  CDR3 for alpha chain variable domain of TCR clone 276744 (TRAV8-3, TRAJ8)
CAVPRDGNTGFQKLVF

SEQ ID NO: 553488 - protein, 15 aa, Homo sapiens
  CDR3 for beta chain variable domain of TCR clone 276744 (TRBV20-1, TRBJ2-7)
CSARDRVSGMDEQYF

SEQ ID NO: 553489 - protein, 13 aa, Homo sapiens
  CDR3 for alpha chain variable domain of TCR clone 276745 (TRAV8-2, TRAJ47)
CVVSEREGNKLGL

SEQ ID NO: 553490 - protein, 16 aa, Homo sapiens
  CDR3 for beta chain variable domain of TCR clone 276745 (TRBV5-1, TRBJ1-1)
CASSKTGTEVGTEAFF

SEQ ID NO: 553491 - protein, 15 aa, Homo sapiens
  CDR3 for alpha chain variable domain of TCR clone 276746 (TRAV13-1, TRAJ45)
CAASGSGGGADGLTF

SEQ ID NO: 553492 - protein, 16 aa, Homo sapiens
  CDR3 for beta chain variable domain of TCR clone 276746 (TRBV7-9, TRBJ2-1)
CASSDVAGGSYNEQFF

SEQ ID NO: 553493 - protein, 14 aa, Homo sapiens
  CDR3 for alpha chain variable domain of TCR clone 276747 (TRAV12-3, TRAJ9)
CAMSPNTGGFKTIV

SEQ ID NO: 553494 - protein, 12 aa, Homo sapiens
  CDR3 for beta chain variable domain of TCR clone 276747 (TRBV19, TRBJ1-5)
CASSIAQQPQHF

SEQ ID NO: 553495 - protein, 14 aa, Homo sapiens
  CDR3 for alpha chain variable domain of TCR clone 276748 (TRAV12-3, TRAJ13)
CAMKNSGGYQKVTF

SEQ ID NO: 553496 - protein, 12 aa, Homo sapiens
  CDR3 for beta chain variable domain of TCR clone 276748 (TRBV2, TRBJ2-1)
CAKREGYNEQFF

SEQ ID NO: 553497 - protein, 14 aa, Homo sapiens
  CDR3 for alpha chain variable domain of TCR clone 276749 (TRAV2, TRAJ37)
CAVDFTVNTGKLIF

SEQ ID NO: 553498 - protein, 14 aa, Homo sapiens
  CDR3 for beta chain variable domain of TCR clone 276749 (TRBV5-1, TRBJ2-5)
CASSFGGSQETQYF

SEQ ID NO: 553499 - protein, 14 aa, Homo sapiens
  CDR3 for alpha chain variable domain of TCR clone 276750 (TRAV12-1, TRAJ24)
CVVRSTDSWGKFQF

SEQ ID NO: 553500 - protein, 14 aa, Homo sapiens
  CDR3 for beta chain variable domain of TCR clone 276750 (TRBV11-2, TRBJ2-3)
CASSRLARTDTQYF

SEQ ID NO: 553501 - protein, 12 aa, Homo sapiens
  CDR3 for alpha chain variable domain of TCR clone 276751 (TRAV12-3, TRAJ17)
CAMTLTGNKLTF

SEQ ID NO: 553502 - protein, 15 aa, Homo sapiens
  CDR3 for beta chain variable domain of TCR clone 276751 (TRBV28, TRBJ1-1)
CASTSTRGLNTEAFF

SEQ ID NO: 553503 - protein, 15 aa, Homo sapiens
  CDR3 for alpha chain variable domain of TCR clone 276752 (TRAV25, TRAJ52)
CAGRPGGTSYGKLTF

SEQ ID NO: 553504 - protein, 16 aa, Homo sapiens
  CDR3 for beta chain variable domain of TCR clone 276752 (TRBV7-2, TRBJ2-3)
CASSLVALYSTDTQYF

SEQ ID NO: 553505 - protein, 15 aa, Homo sapiens
  CDR3 for alpha chain variable domain of TCR clone 276753 (TRAV27, TRAJ22)
CAGAPLKGSARQLTF

SEQ ID NO: 553506 - protein, 16 aa, Homo sapiens
  CDR3 for beta chain variable domain of TCR clone 276753 (TRBV12-5, TRBJ2-5)
CASGPRTSGNQETQYF

SEQ ID NO: 553507 - protein, 14 aa, Homo sapiens
  CDR3 for alpha chain variable domain of TCR clone 276754 (TRAV20, TRAJ40)
CAVQAVPGTYKYIF

SEQ ID NO: 553508 - protein, 14 aa, Homo sapiens
  CDR3 for beta chain variable domain of TCR clone 276754 (TRBV7-2, TRBJ2-7)
CASSPKTSFYEQYF

SEQ ID NO: 553509 - protein, 12 aa, Homo sapiens
  CDR3 for alpha chain variable domain of TCR clone 276755 (TRAV12-3, TRAJ40)
CAMSSGTYKYIF

SEQ ID NO: 553510 - protein, 13 aa, Homo sapiens
  CDR3 for beta chain variable domain of TCR clone 276755 (TRBV7-8, TRBJ2-2)
PGRLSISPGSCFF

SEQ ID NO: 553511 - protein, 13 aa, Homo sapiens
  CDR3 for alpha chain variable domain of TCR clone 276756 (TRAV21, TRAJ57)
CAVTQGGSEKLVF

SEQ ID NO: 553512 - protein, 11 aa, Homo sapiens
  CDR3 for beta chain variable domain of TCR clone 276756 (TRBV6-5, TRBJ1-1)
CATGTGGAAFF

SEQ ID NO: 553513 - protein, 14 aa, Homo sapiens
  CDR3 for alpha chain variable domain of TCR clone 276757 (TRAV12-1, TRAJ39)
CVVNFNNAGNMLTF

SEQ ID NO: 553514 - protein, 14 aa, Homo sapiens
  CDR3 for beta chain variable domain of TCR clone 276757 (TRBV12-4, TRBJ1-1)
CASSLGTGGTEAFF

SEQ ID NO: 553515 - protein, 23 aa, Homo sapiens
  CDR3 for alpha chain variable domain of TCR clone 276758 (TRAV26-1, TRAJ38)
CIADNAGNNHNQNPDPAVYQLRD

SEQ ID NO: 553516 - protein, 15 aa, Homo sapiens
  CDR3 for beta chain variable domain of TCR clone 276758 (TRBV27, TRBJ2-1)
CASSNGGGSSNEQFF

SEQ ID NO: 553517 - protein, 13 aa, Homo sapiens
  CDR3 for alpha chain variable domain of TCR clone 276759 (TRAV21, TRAJ27)
CAARPGHAGKSTF

SEQ ID NO: 553518 - protein, 17 aa, Homo sapiens
  CDR3 for beta chain variable domain of TCR clone 276759 (TRBV13, TRBJ2-3)
CASSLSRVAGGRNTQYF

SEQ ID NO: 553519 - protein, 14 aa, Homo sapiens
  CDR3 for alpha chain variable domain of TCR clone 276760 (TRAV26-1, TRAJ22)
SIVRVYGSARQLTF

SEQ ID NO: 553520 - protein, 17 aa, Homo sapiens
  CDR3 for beta chain variable domain of TCR clone 276760 (TRBV7-3, TRBJ2-3)
CASSPGGLAGFGDTQYF

SEQ ID NO: 553521 - protein, 16 aa, Homo sapiens
  CDR3 for alpha chain variable domain of TCR clone 276761 (TRAV8-3, TRAJ13)
CAVGAYPSGVYQKVTF

SEQ ID NO: 553522 - protein, 14 aa, Homo sapiens
  CDR3 for beta chain variable domain of TCR clone 276761 (TRBV5-8, TRBJ2-1)
CASRLRGGANEQFF

SEQ ID NO: 553523 - protein, 15 aa, Homo sapiens
  CDR3 for alpha chain variable domain of TCR clone 276762 (TRAV12-3, TRAJ27)
CAMRAYNTNAGKSTF

SEQ ID NO: 553524 - protein, 20 aa, Homo sapiens
  CDR3 for beta chain variable domain of TCR clone 276762 (TRBV7-8, TRBJ2-2)
YASSHLFPGPTIHITGELFF

SEQ ID NO: 553525 - protein, 13 aa, Homo sapiens
  CDR3 for alpha chain variable domain of TCR clone 276763 (TRAV3, TRAJ20)
CAVRDTGDYKLSF

SEQ ID NO: 553526 - protein, 12 aa, Homo sapiens
  CDR3 for beta chain variable domain of TCR clone 276763 (TRBV19, TRBJ1-1)
CASSIGTEEAFF

SEQ ID NO: 553527 - protein, 13 aa, Homo sapiens
  CDR3 for alpha chain variable domain of TCR clone 276764 (TRAV13-1, TRAJ10)
CAALEGGGNKLTF

SEQ ID NO: 553528 - protein, 11 aa, Homo sapiens
  CDR3 for beta chain variable domain of TCR clone 276764 (TRBV6-3, TRBJ2-7)
CASSFSYEQYI

SEQ ID NO: 553529 - protein, 11 aa, Homo sapiens
  CDR3 for alpha chain variable domain of TCR clone 276765 (TRAV3, TRAJ21)
CAVGNFNKFYF

SEQ ID NO: 553530 - protein, 15 aa, Homo sapiens
  CDR3 for beta chain variable domain of TCR clone 276765 (TRBV7-9, TRBJ2-7)
CASSFGTSGAYEQYF

SEQ ID NO: 553531 - protein, 12 aa, Homo sapiens
  CDR3 for alpha chain variable domain of TCR clone 276766 (TRAV12-3, TRAJ17)
CAMTLTGNNLTF

SEQ ID NO: 553532 - protein, 15 aa, Homo sapiens
  CDR3 for beta chain variable domain of TCR clone 276766 (TRBV9, TRBJ1-6)
CASSVAGTGDSPLHF

SEQ ID NO: 553533 - protein, 14 aa, Homo sapiens
  CDR3 for alpha chain variable domain of TCR clone 276767 (TRAV35, TRAJ40)
CAGSTTSGTYKYIF

SEQ ID NO: 553534 - protein, 13 aa, Homo sapiens
  CDR3 for beta chain variable domain of TCR clone 276767 (TRBV20-1, TRBJ1-6)
CSAHLGVGSPLHF

SEQ ID NO: 553535 - protein, 15 aa, Homo sapiens
  CDR3 for alpha chain variable domain of TCR clone 276768 (TRAV8-4, TRAJ3)
CAVTGENLVQQCFQD

SEQ ID NO: 553536 - protein, 14 aa, Homo sapiens
  CDR3 for beta chain variable domain of TCR clone 276768 (TRBV11-2, TRBJ2-1)
CASSLSGPYNEQFF

SEQ ID NO: 553537 - protein, 17 aa, Homo sapiens
  CDR3 for alpha chain variable domain of TCR clone 276769 (TRAV36/DV7, TRAJ52)
CAEAQRAGGTSYGKLTF

SEQ ID NO: 553538 - protein, 17 aa, Homo sapiens
  CDR3 for beta chain variable domain of TCR clone 276769 (TRBV28, TRBJ2-5)
CASSTPEGDALQETQYF

SEQ ID NO: 553539 - protein, 10 aa, Homo sapiens
  CDR3 for alpha chain variable domain of TCR clone 276770 (TRAV30, TRAJ48)
CGIGNEKLTF

SEQ ID NO: 553540 - protein, 14 aa, Homo sapiens
  CDR3 for beta chain variable domain of TCR clone 276770 (TRBV7-6, TRBJ2-3)
CASSVAGGTDTQYV

SEQ ID NO: 553541 - protein, 15 aa, Homo sapiens
  CDR3 for alpha chain variable domain of TCR clone 276771 (TRAV35, TRAJ52)
CAGPRGGTSYGKLTF

SEQ ID NO: 553542 - protein, 11 aa, Homo sapiens
  CDR3 for beta chain variable domain of TCR clone 276771 (TRBV13, TRBJ2-3)
CASGNADTQYF

SEQ ID NO: 553543 - protein, 14 aa, Homo sapiens
  CDR3 for alpha chain variable domain of TCR clone 276772 (TRAV1-2, TRAJ8)
CAVREDTGSQKLVF

SEQ ID NO: 553544 - protein, 14 aa, Homo sapiens
  CDR3 for beta chain variable domain of TCR clone 276772 (TRBV4-2, TRBJ2-5)
CASSQDRGRETQYF

SEQ ID NO: 553545 - protein, 14 aa, Homo sapiens
  CDR3 for alpha chain variable domain of TCR clone 276773 (TRAV1-2, TRAJ8)
CAVREDTGFQKLVF

SEQ ID NO: 553546 - protein, 15 aa, Homo sapiens
  CDR3 for beta chain variable domain of TCR clone 276773 (TRBV7-9, TRBJ1-6)
CSSSSPGRGNSPLHF

SEQ ID NO: 553547 - protein, 11 aa, Homo sapiens
  CDR3 for alpha chain variable domain of TCR clone 276774 (TRAV21, TRAJ23)
CAPQRRGKLIF

SEQ ID NO: 553548 - protein, 14 aa, Homo sapiens
  CDR3 for beta chain variable domain of TCR clone 276774 (TRBV12-4, TRBJ1-1)
CASTWTGHDTEAFV

SEQ ID NO: 553549 - protein, 16 aa, Homo sapiens
  CDR3 for alpha chain variable domain of TCR clone 276775 (TRAV2, TRAJ13)
CAARILGVTRKLPLAL

SEQ ID NO: 553550 - protein, 14 aa, Homo sapiens
  CDR3 for beta chain variable domain of TCR clone 276775 (TRBV19, TRBJ2-1)
CASEVTGARNEQFF

SEQ ID NO: 553551 - protein, 16 aa, Homo sapiens
  CDR3 for alpha chain variable domain of TCR clone 276776 (TRAV12-2, TRAJ32)
CAVNLGQGGATNKPSF

SEQ ID NO: 553552 - protein, 15 aa, Homo sapiens
  CDR3 for beta chain variable domain of TCR clone 276776 (TRBV20-1, TRBJ2-7)
CSARGPLAGGREQYF

SEQ ID NO: 553553 - protein, 14 aa, Homo sapiens
  CDR3 for alpha chain variable domain of TCR clone 276777 (TRAV9-2, TRAJ39)
CALYIYNAGIMLTF

SEQ ID NO: 553554 - protein, 12 aa, Homo sapiens
  CDR3 for beta chain variable domain of TCR clone 276777 (TRBV11-2, TRBJ2-2)
CASSLGGGELFF

SEQ ID NO: 553555 - protein, 13 aa, Homo sapiens
  CDR3 for alpha chain variable domain of TCR clone 276778 (TRAV8-3, TRAJ43)
CSVGIYNNNDMRF

SEQ ID NO: 553556 - protein, 16 aa, Homo sapiens
  CDR3 for beta chain variable domain of TCR clone 276778 (TRBV7-2, TRBJ2-5)
CASSLVLWTKQETQYF

SEQ ID NO: 553557 - protein, 17 aa, Homo sapiens
  CDR3 for alpha chain variable domain of TCR clone 276779 (TRAV3, TRAJ6)
CAVRDGPRAGGSYIPTF

SEQ ID NO: 553558 - protein, 16 aa, Homo sapiens
  CDR3 for beta chain variable domain of TCR clone 276779 (TRBV7-8, TRBJ2-3)
CARSTEGQRETDTQYF

SEQ ID NO: 553559 - protein, 15 aa, Homo sapiens
  CDR3 for alpha chain variable domain of TCR clone 276780 (TRAV17, TRAJ13)
CATDAGSGGYQKVTF

SEQ ID NO: 553560 - protein, 17 aa, Homo sapiens
  CDR3 for beta chain variable domain of TCR clone 276780 (TRBV11-2, TRBJ2-1)
CASSLYPPGVDYNEQFF

SEQ ID NO: 553561 - protein, 12 aa, Homo sapiens
  CDR3 for alpha chain variable domain of TCR clone 276781 (TRAV27, TRAJ35)
CAGADFGNVLPC

SEQ ID NO: 553562 - protein, 16 aa, Homo sapiens
  CDR3 for beta chain variable domain of TCR clone 276781 (TRBV6-1, TRBJ2-1)
CASILRQGGSYNEQFF

SEQ ID NO: 553563 - protein, 15 aa, Homo sapiens
  CDR3 for alpha chain variable domain of TCR clone 276782 (TRAV27, TRAJ38)
CAARRNAGNNRKLIW

SEQ ID NO: 553564 - protein, 13 aa, Homo sapiens
  CDR3 for beta chain variable domain of TCR clone 276782 (TRBV20-1, TRBJ1-1)
CSASLGLGTEAFF

SEQ ID NO: 553565 - protein, 12 aa, Homo sapiens
  CDR3 for alpha chain variable domain of TCR clone 276783 (TRAV12-2, TRAJ16)
FAVNLDGQKLPF

SEQ ID NO: 553566 - protein, 12 aa, Homo sapiens
  CDR3 for beta chain variable domain of TCR clone 276783 (TRBV12-4, TRBJ2-7)
CASSLGGYEQYF

SEQ ID NO: 553567 - protein, 17 aa, Homo sapiens
  CDR3 for alpha chain variable domain of TCR clone 276784 (TRAV3, TRAJ12)
CAVRGGGRMDSSYKLIF

SEQ ID NO: 553568 - protein, 12 aa, Homo sapiens
  CDR3 for beta chain variable domain of TCR clone 276784 (TRBV5-1, TRBJ1-2)
CASSLDSYGYTF

SEQ ID NO: 553569 - protein, 15 aa, Homo sapiens
  CDR3 for alpha chain variable domain of TCR clone 276785 (TRAV29/DV5, TRAJ53)
CAASASGGSNYKLTF

SEQ ID NO: 553570 - protein, 11 aa, Homo sapiens
  CDR3 for beta chain variable domain of TCR clone 276785 (TRBV29-1, TRBJ2-5)
CSEDRTGTQYF

SEQ ID NO: 553571 - protein, 14 aa, Homo sapiens
  CDR3 for alpha chain variable domain of TCR clone 276786 (TRAV3, TRAJ34)
CAARDINNNDKLIF

SEQ ID NO: 553572 - protein, 15 aa, Homo sapiens
  CDR3 for beta chain variable domain of TCR clone 276786 (TRBV20-1, TRBJ2-7)
CSARDRVSGMDEQYF

SEQ ID NO: 553573 - protein, 11 aa, Homo sapiens
  CDR3 for alpha chain variable domain of TCR clone 276787 (TRAV1-2, TRAJ20)
CAVSNDDKLSF

SEQ ID NO: 553574 - protein, 16 aa, Homo sapiens
  CDR3 for beta chain variable domain of TCR clone 276787 (TRBV29-1, TRBJ2-6)
CSVEDITYSGANVLTF

SEQ ID NO: 553575 - protein, 16 aa, Homo sapiens
  CDR3 for alpha chain variable domain of TCR clone 276788 (TRAV26-1, TRAJ36)
CIVRVPDQTRANNPFF

SEQ ID NO: 553576 - protein, 14 aa, Homo sapiens
  CDR3 for beta chain variable domain of TCR clone 276788 (TRBV7-2, TRBJ2-7)
CASSLYPGRYEQYF

SEQ ID NO: 553577 - protein, 13 aa, Homo sapiens
  CDR3 for alpha chain variable domain of TCR clone 276789 (TRAV12-3, TRAJ9)
CAMRNTGGFTTIF

SEQ ID NO: 553578 - protein, 13 aa, Homo sapiens
  CDR3 for beta chain variable domain of TCR clone 276789 (TRBV27, TRBJ2-1)
CASRTLGVGEQFF

SEQ ID NO: 553579 - protein, 11 aa, Homo sapiens
  CDR3 for alpha chain variable domain of TCR clone 276790 (TRAV12-1, TRAJ30)
CVVNGQDQIIF

SEQ ID NO: 553580 - protein, 14 aa, Homo sapiens
  CDR3 for beta chain variable domain of TCR clone 276790 (TRBV7-9, TRBJ2-5)
CASSLDTAQETQYF

SEQ ID NO: 553581 - protein, 17 aa, Homo sapiens
  CDR3 for alpha chain variable domain of TCR clone 276791 (TRAV3, TRAJ6)
CAVRDGPRAGGSYIPTF

SEQ ID NO: 553582 - protein, 12 aa, Homo sapiens
  CDR3 for beta chain variable domain of TCR clone 276791 (TRBV28, TRBJ2-7)
CASSGRPYEQYF

SEQ ID NO: 553583 - protein, 14 aa, Homo sapiens
  CDR3 for alpha chain variable domain of TCR clone 276792 (TRAV12-2, TRAJ44)
CAVNKAGTASKPTF

SEQ ID NO: 553584 - protein, 16 aa, Homo sapiens
  CDR3 for beta chain variable domain of TCR clone 276792 (TRBV6-1, TRBJ1-3)
CASSEGGVTSGNTIYF

SEQ ID NO: 553585 - protein, 19 aa, Homo sapiens
  CDR3 for alpha chain variable domain of TCR clone 276793 (TRAV2, TRAJ20)
ILQVREADAAVYRACKLSF

SEQ ID NO: 553586 - protein, 13 aa, Homo sapiens
  CDR3 for beta chain variable domain of TCR clone 276793 (TRBV7-3, TRBJ1-1)
CASSQEWGAEAFF

SEQ ID NO: 553587 - protein, 14 aa, Homo sapiens
  CDR3 for alpha chain variable domain of TCR clone 276794 (TRAV1-2, TRAJ16)
CAVNRFSDGQKLIF

SEQ ID NO: 553588 - protein, 15 aa, Homo sapiens
  CDR3 for beta chain variable domain of TCR clone 276794 (TRBV27, TRBJ2-1)
CASSNGGGSSNEQFF

SEQ ID NO: 553589 - protein, 11 aa, Homo sapiens
  CDR3 for alpha chain variable domain of TCR clone 276795 (TRAV2, TRAJ33)
CAVESNYQLIW

SEQ ID NO: 553590 - protein, 14 aa, Homo sapiens
  CDR3 for beta chain variable domain of TCR clone 276795 (TRBV5-1, TRBJ2-1)
CASSLSGGANEQFF

SEQ ID NO: 553591 - protein, 11 aa, Homo sapiens
  CDR3 for alpha chain variable domain of TCR clone 276796 (TRAV35, TRAJ30)
CAPGGDDKIIF

SEQ ID NO: 553592 - protein, 15 aa, Homo sapiens
  CDR3 for beta chain variable domain of TCR clone 276796 (TRBV6-1, TRBJ2-5)
CASSEGWGIQETQYF

SEQ ID NO: 553593 - protein, 14 aa, Homo sapiens
  CDR3 for alpha chain variable domain of TCR clone 276797 (TRAV8-3, TRAJ4)
CAVGAARGYNKLIF

SEQ ID NO: 553594 - protein, 14 aa, Homo sapiens
  CDR3 for beta chain variable domain of TCR clone 276797 (TRBV12-5, TRBJ2-5)
CASGSRTHQETQYF

SEQ ID NO: 553595 - protein, 15 aa, Homo sapiens
  CDR3 for alpha chain variable domain of TCR clone 276798 (TRAV25, TRAJ53)
CAATGGGGSNYKLTF

SEQ ID NO: 553596 - protein, 15 aa, Homo sapiens
  CDR3 for beta chain variable domain of TCR clone 276798 (TRBV5-4, TRBJ2-1)
RASSFGQGLNNEQFF

SEQ ID NO: 553597 - protein, 15 aa, Homo sapiens
  CDR3 for alpha chain variable domain of TCR clone 276799 (TRAV8-3, TRAJ13)
CAVAPNSGGYQKVTF

SEQ ID NO: 553598 - protein, 14 aa, Homo sapiens
  CDR3 for beta chain variable domain of TCR clone 276799 (TRBV7-2, TRBJ2-7)
CASSPKTSFYEQYF

SEQ ID NO: 553599 - protein, 18 aa, Homo sapiens
  CDR3 for alpha chain variable domain of TCR clone 276800 (TRAV12-1, TRAJ52)
CVVKLINAGGTSYGKLTF

SEQ ID NO: 553600 - protein, 16 aa, Homo sapiens
  CDR3 for beta chain variable domain of TCR clone 276800 (TRBV19, TRBJ2-1)
CAGSKAGPSSYNEQFF

SEQ ID NO: 553601 - protein, 12 aa, Homo sapiens
  CDR3 for alpha chain variable domain of TCR clone 276801 (TRAV3, TRAJ20)
CAVRDYDYKLSF

SEQ ID NO: 553602 - protein, 15 aa, Homo sapiens
  CDR3 for beta chain variable domain of TCR clone 276801 (TRBV27, TRBJ1-5)
CASSPGTGVNQPQHV

SEQ ID NO: 553603 - protein, 12 aa, Homo sapiens
  CDR3 for alpha chain variable domain of TCR clone 276802 (TRAV3, TRAJ20)
CVVRDPDYKLSF

SEQ ID NO: 553604 - protein, 13 aa, Homo sapiens
  CDR3 for beta chain variable domain of TCR clone 276802 (TRBV9, TRBJ2-1)
CASSVGQGGEQFF

SEQ ID NO: 553605 - protein, 12 aa, Homo sapiens
  CDR3 for alpha chain variable domain of TCR clone 276803 (TRAV25, TRAJ5)
CAGGGGRTALTF

SEQ ID NO: 553606 - protein, 15 aa, Homo sapiens
  CDR3 for beta chain variable domain of TCR clone 276803 (TRBV19, TRBJ2-4)
CASRGPRRGENIQYF

SEQ ID NO: 553607 - protein, 15 aa, Homo sapiens
  CDR3 for alpha chain variable domain of TCR clone 276804 (TRAV14/DV4, TRAJ33)
CAMRADMDSNYQLIW

SEQ ID NO: 553608 - protein, 16 aa, Homo sapiens
  CDR3 for beta chain variable domain of TCR clone 276804 (TRBV20-1, TRBJ1-4)
CSAPGQGLLTNEKLFF

SEQ ID NO: 553609 - protein, 11 aa, Homo sapiens
  CDR3 for alpha chain variable domain of TCR clone 276805 (TRAV2, TRAJ33)
CAVDSNYQLIW

SEQ ID NO: 553610 - protein, 13 aa, Homo sapiens
  CDR3 for beta chain variable domain of TCR clone 276805 (TRBV20-1, TRBJ1-1)
CSASLGLGTEAFF

SEQ ID NO: 553611 - protein, 14 aa, Homo sapiens
  CDR3 for alpha chain variable domain of TCR clone 276806 (TRAV25, TRAJ23)
CAGQGDNHGGKLIF

SEQ ID NO: 553612 - protein, 12 aa, Homo sapiens
  CDR3 for beta chain variable domain of TCR clone 276806 (TRBV7-9, TRBJ1-1)
CASSLVRGEASF

SEQ ID NO: 553613 - protein, 11 aa, Homo sapiens
  CDR3 for alpha chain variable domain of TCR clone 276807 (TRAV8-3, TRAJ49)
CAVNTGNQFYF

SEQ ID NO: 553614 - protein, 12 aa, Homo sapiens
  CDR3 for beta chain variable domain of TCR clone 276807 (TRBV11-2, TRBJ2-7)
CASSPPADEQYV

SEQ ID NO: 553615 - protein, 14 aa, Homo sapiens
  CDR3 for alpha chain variable domain of TCR clone 276808 (TRAV17, TRAJ34)
CATDSLEGTDKLIF

SEQ ID NO: 553616 - protein, 15 aa, Homo sapiens
  CDR3 for beta chain variable domain of TCR clone 276808 (TRBV2, TRBJ2-1)
CASSELAGSYNEQFF

SEQ ID NO: 553617 - protein, 14 aa, Homo sapiens
  CDR3 for alpha chain variable domain of TCR clone 276809 (TRAV14/DV4, TRAJ15)
CAMRRDQAGTALSF

SEQ ID NO: 553618 - protein, 16 aa, Homo sapiens
  CDR3 for beta chain variable domain of TCR clone 276809 (TRBV12-5, TRBJ2-5)
CASGPRTSGNQETQYS

SEQ ID NO: 553619 - protein, 14 aa, Homo sapiens
  CDR3 for alpha chain variable domain of TCR clone 276810 (TRAV1-2, TRAJ8)
CAVREDTVFQKLVF

SEQ ID NO: 553620 - protein, 14 aa, Homo sapiens
  CDR3 for beta chain variable domain of TCR clone 276810 (TRBV7-2, TRBJ2-7)
CASSPKTSFYEQYF

SEQ ID NO: 553621 - protein, 13 aa, Homo sapiens
  CDR3 for alpha chain variable domain of TCR clone 276811 (TRAV8-2, TRAJ34)
CVVSDRRTDKLSF

SEQ ID NO: 553622 - protein, 15 aa, Homo sapiens
  CDR3 for beta chain variable domain of TCR clone 276811 (TRBV20-1, TRBJ2-3)
CSARVVGGSTDTQYF

SEQ ID NO: 553623 - protein, 15 aa, Homo sapiens
  CDR3 for alpha chain variable domain of TCR clone 276812 (TRAV12-2, TRAJ56)
CAVNPFTGANSKLTF

SEQ ID NO: 553624 - protein, 14 aa, Homo sapiens
  CDR3 for beta chain variable domain of TCR clone 276812 (TRBV7-9, TRBJ2-5)
CASSLDTAQETQYF

SEQ ID NO: 553625 - protein, 13 aa, Homo sapiens
  CDR3 for alpha chain variable domain of TCR clone 276813 (TRAV20, TRAJ34)
CAGGSYNTDKLIF

SEQ ID NO: 553626 - protein, 16 aa, Homo sapiens
  CDR3 for beta chain variable domain of TCR clone 276813 (TRBV2, TRBJ2-1)
CASSVGGSLSYNEQFF

SEQ ID NO: 553627 - protein, 12 aa, Homo sapiens
  CDR3 for alpha chain variable domain of TCR clone 276814 (TRAV2, TRAJ10)
CASTEGGNKLTF

SEQ ID NO: 553628 - protein, 13 aa, Homo sapiens
  CDR3 for beta chain variable domain of TCR clone 276814 (TRBV19, TRBJ1-5)
CASSMRGYQPQHF

SEQ ID NO: 553629 - protein, 13 aa, Homo sapiens
  CDR3 for alpha chain variable domain of TCR clone 276815 (TRAV8-3, TRAJ48)
CAVVPFGTEKLTF

SEQ ID NO: 553630 - protein, 12 aa, Homo sapiens
  CDR3 for beta chain variable domain of TCR clone 276815 (TRBV11-2, TRBJ2-2)
CASSLGGGELFF

SEQ ID NO: 553631 - protein, 22 aa, Homo sapiens
  CDR3 for alpha chain variable domain of TCR clone 276816 (TRAV12-2, TRAJ53)
SPVIQPPTSVPPILSSNYKLTF

SEQ ID NO: 553632 - protein, 14 aa, Homo sapiens
  CDR3 for beta chain variable domain of TCR clone 276816 (TRBV19, TRBJ2-1)
CASPTFVLSGEQFF

SEQ ID NO: 553633 - protein, 14 aa, Homo sapiens
  CDR3 for alpha chain variable domain of TCR clone 276817 (TRAV8-4, TRAJ13)
SAVTLSGGYQKVTF

SEQ ID NO: 553634 - protein, 16 aa, Homo sapiens
  CDR3 for beta chain variable domain of TCR clone 276817 (TRBV19, TRBJ2-2)
CASRSPGTGATGELFF

SEQ ID NO: 553635 - protein, 12 aa, Homo sapiens
  CDR3 for alpha chain variable domain of TCR clone 276818 (TRAV12-3, TRAJ20)
CAMVRGDYKLSF

SEQ ID NO: 553636 - protein, 13 aa, Homo sapiens
  CDR3 for beta chain variable domain of TCR clone 276818 (TRBV25-1, TRBJ1-4)
CASSEERWEKLFF

SEQ ID NO: 553637 - protein, 16 aa, Homo sapiens
  CDR3 for alpha chain variable domain of TCR clone 276819 (TRAV16, TRAJ42)
CARKMNYGGSQGNLIF

SEQ ID NO: 553638 - protein, 15 aa, Homo sapiens
  CDR3 for beta chain variable domain of TCR clone 276819 (TRBV3-1, TRBJ2-7)
CASSQVRQGAYEQYF

SEQ ID NO: 553639 - protein, 16 aa, Homo sapiens
  CDR3 for alpha chain variable domain of TCR clone 276820 (TRAV3, TRAJ37)
CAVRPHGSGDTGKLIF

SEQ ID NO: 553640 - protein, 16 aa, Homo sapiens
  CDR3 for beta chain variable domain of TCR clone 276820 (TRBV20-1, TRBJ1-4)
CSAPGQGLLTNEKLFF

SEQ ID NO: 553641 - protein, 13 aa, Homo sapiens
  CDR3 for alpha chain variable domain of TCR clone 276821 (TRAV20, TRAJ37)
CAGCSSNTGKLIF

SEQ ID NO: 553642 - protein, 14 aa, Homo sapiens
  CDR3 for beta chain variable domain of TCR clone 276821 (TRBV20-1, TRBJ2-5)
CGARDGRAGETQYF

SEQ ID NO: 553643 - protein, 11 aa, Homo sapiens
  CDR3 for alpha chain variable domain of TCR clone 276822 (TRAV12-2, TRAJ49)
CAVTGGNQFYF

SEQ ID NO: 553644 - protein, 15 aa, Homo sapiens
  CDR3 for beta chain variable domain of TCR clone 276822 (TRBV7-8, TRBJ1-5)
CASSLERRGLEPQHL

SEQ ID NO: 553645 - protein, 11 aa, Homo sapiens
  CDR3 for alpha chain variable domain of TCR clone 276823 (TRAV3, TRAJ21)
CAVGNFNKFYF

SEQ ID NO: 553646 - protein, 14 aa, Homo sapiens
  CDR3 for beta chain variable domain of TCR clone 276823 (TRBV28, TRBJ1-1)
CASSSEQGYTEAFF

SEQ ID NO: 553647 - protein, 15 aa, Homo sapiens
  CDR3 for alpha chain variable domain of TCR clone 276824 (TRAV2, TRAJ15)
CAVEDRNQAGTALIF

SEQ ID NO: 553648 - protein, 13 aa, Homo sapiens
  CDR3 for beta chain variable domain of TCR clone 276824 (TRBV10-2, TRBJ2-7)
CASSEAGVYEQYF

SEQ ID NO: 553649 - protein, 12 aa, Homo sapiens
  CDR3 for alpha chain variable domain of TCR clone 276825 (TRAV13-1, TRAJ48)
CAANFGNEKLTF

SEQ ID NO: 553650 - protein, 13 aa, Homo sapiens
  CDR3 for beta chain variable domain of TCR clone 276825 (TRBV7-3, TRBJ1-1)
CASSQDWRAEAFF

SEQ ID NO: 553651 - protein, 14 aa, Homo sapiens
  CDR3 for alpha chain variable domain of TCR clone 276826 (TRAV26-1, TRAJ38)
CIADNAGNKRKLIR

SEQ ID NO: 553652 - protein, 13 aa, Homo sapiens
  CDR3 for beta chain variable domain of TCR clone 276826 (TRBV20-1, TRBJ1-1)
CSARGGGNTEAFF

SEQ ID NO: 553653 - protein, 16 aa, Homo sapiens
  CDR3 for alpha chain variable domain of TCR clone 276827 (TRAV26-1, TRAJ48)
CIVRETPNFGNEKLTF

SEQ ID NO: 553654 - protein, 15 aa, Homo sapiens
  CDR3 for beta chain variable domain of TCR clone 276827 (TRBV7-2, TRBJ2-6)
CASSLQEAGANVLTF

SEQ ID NO: 553655 - protein, 15 aa, Homo sapiens
  CDR3 for alpha chain variable domain of TCR clone 276828 (TRAV3, TRAJ12)
CAVRDIRDSSYKLIF

SEQ ID NO: 553656 - protein, 15 aa, Homo sapiens
  CDR3 for beta chain variable domain of TCR clone 276828 (TRBV27, TRBJ2-7)
CASSSRNEQGYEQYF

SEQ ID NO: 553657 - protein, 14 aa, Homo sapiens
  CDR3 for alpha chain variable domain of TCR clone 276829 (TRAV5, TRAJ4)
CAASFSGGYNKLIF

SEQ ID NO: 553658 - protein, 12 aa, Homo sapiens
  CDR3 for beta chain variable domain of TCR clone 276829 (TRBV7-9, TRBJ2-7)
CASSIKREEQYF

SEQ ID NO: 553659 - protein, 13 aa, Homo sapiens
  CDR3 for alpha chain variable domain of TCR clone 276830 (TRAV2, TRAJ15)
CAVASQAGTARIF

SEQ ID NO: 553660 - protein, 15 aa, Homo sapiens
  CDR3 for beta chain variable domain of TCR clone 276830 (TRBV7-3, TRBJ2-2)
CASSETGQGTGELFF

SEQ ID NO: 553661 - protein, 12 aa, Homo sapiens
  CDR3 for alpha chain variable domain of TCR clone 276831 (TRAV25, TRAJ17)
CAGGAAGNKLTF

SEQ ID NO: 553662 - protein, 14 aa, Homo sapiens
  CDR3 for beta chain variable domain of TCR clone 276831 (TRBV5-1, TRBJ2-1)
CASSALWAGNEQFF

SEQ ID NO: 553663 - protein, 14 aa, Homo sapiens
  CDR3 for alpha chain variable domain of TCR clone 276832 (TRAV12-2, TRAJ13)
RAVKKTGGYQKVTF

SEQ ID NO: 553664 - protein, 15 aa, Homo sapiens
  CDR3 for beta chain variable domain of TCR clone 276832 (TRBV2, TRBJ2-7)
CASTLLGSGATEQYF

SEQ ID NO: 553665 - protein, 12 aa, Homo sapiens
  CDR3 for alpha chain variable domain of TCR clone 276833 (TRAV29/DV5, TRAJ43)
CAAPYNNNNMRF

SEQ ID NO: 553666 - protein, 17 aa, Homo sapiens
  CDR3 for beta chain variable domain of TCR clone 276833 (TRBV19, TRBJ2-6)
CASSTGQVFSGANVLTF

SEQ ID NO: 553667 - protein, 14 aa, Homo sapiens
  CDR3 for alpha chain variable domain of TCR clone 276834 (TRAV12-1, TRAJ30)
CVVNIGGRDDKIIF

SEQ ID NO: 553668 - protein, 16 aa, Homo sapiens
  CDR3 for beta chain variable domain of TCR clone 276834 (TRBV7-3, TRBJ2-1)
CASSLEGYRSYNEQFF

SEQ ID NO: 553669 - protein, 12 aa, Homo sapiens
  CDR3 for alpha chain variable domain of TCR clone 276835 (TRAV12-3, TRAJ3)
CAIDSSASKIIF

SEQ ID NO: 553670 - protein, 16 aa, Homo sapiens
  CDR3 for beta chain variable domain of TCR clone 276835 (TRBV12-4, TRBJ1-5)
CASSRPVGGSNQPQHF

SEQ ID NO: 553671 - protein, 10 aa, Homo sapiens
  CDR3 for alpha chain variable domain of TCR clone 276836 (TRAV13-1, TRAJ41)
CAASGPRRTQ

SEQ ID NO: 553672 - protein, 21 aa, Homo sapiens
  CDR3 for beta chain variable domain of TCR clone 276836 (TRBV18, TRBJ2-3)
CASSPPAGGPRKYAVFWRRHP

SEQ ID NO: 553673 - protein, 11 aa, Homo sapiens
  CDR3 for alpha chain variable domain of TCR clone 276837 (TRAV8-6, TRAJ42)
VGGGSQGNRIF

SEQ ID NO: 553674 - protein, 13 aa, Homo sapiens
  CDR3 for beta chain variable domain of TCR clone 276837 (TRBV7-3, TRBJ1-1)
CASSQDWGAEAFF

SEQ ID NO: 553675 - protein, 13 aa, Homo sapiens
  CDR3 for alpha chain variable domain of TCR clone 276838 (TRAV12-2, TRAJ9)
CAVKLAGGFKTIF

SEQ ID NO: 553676 - protein, 15 aa, Homo sapiens
  CDR3 for beta chain variable domain of TCR clone 276838 (TRBV5-1, TRBJ1-4)
CASSLTADSDEKLFF

SEQ ID NO: 553677 - protein, 15 aa, Homo sapiens
  CDR3 for alpha chain variable domain of TCR clone 276839 (TRAV2, TRAJ11)
CAVGGRNSGYSTLTF

SEQ ID NO: 553678 - protein, 12 aa, Homo sapiens
  CDR3 for beta chain variable domain of TCR clone 276839 (TRBV5-4, TRBJ2-7)
CASSLEAYEQYV

SEQ ID NO: 553679 - protein, 17 aa, Homo sapiens
  CDR3 for alpha chain variable domain of TCR clone 276840 (TRAV26-1, TRAJ28)
CIVRALYSGAGSYQLTL

SEQ ID NO: 553680 - protein, 12 aa, Homo sapiens
  CDR3 for beta chain variable domain of TCR clone 276840 (TRBV12-4, TRBJ2-1)
CASRQTENEQFF

SEQ ID NO: 553681 - protein, 13 aa, Homo sapiens
  CDR3 for alpha chain variable domain of TCR clone 276841 (TRAV12-3, TRAJ33)
CAMSVNTNYQLIW

SEQ ID NO: 553682 - protein, 12 aa, Homo sapiens
  CDR3 for beta chain variable domain of TCR clone 276841 (TRBV11-2, TRBJ2-2)
CASSLGGGELFF

SEQ ID NO: 553683 - protein, 16 aa, Homo sapiens
  CDR3 for alpha chain variable domain of TCR clone 276842 (TRAV30, TRAJ24)
CGTEIVDADSCGKFQF

SEQ ID NO: 553684 - protein, 15 aa, Homo sapiens
  CDR3 for beta chain variable domain of TCR clone 276842 (TRBV11-3, TRBJ2-3)
CASLKDGREGDTQYF

SEQ ID NO: 553685 - protein, 15 aa, Homo sapiens
  CDR3 for alpha chain variable domain of TCR clone 276843 (TRAV21, TRAJ52)
CAVRGGGTSYGKPTF

SEQ ID NO: 553686 - protein, 15 aa, Homo sapiens
  CDR3 for beta chain variable domain of TCR clone 276843 (TRBV5-4, TRBJ2-2)
CASSRRGGGTGELFF

SEQ ID NO: 553687 - protein, 15 aa, Homo sapiens
  CDR3 for alpha chain variable domain of TCR clone 276844 (TRAV35, TRAJ23)
CAGQRGYNQGGKLIF

SEQ ID NO: 553688 - protein, 16 aa, Homo sapiens
  CDR3 for beta chain variable domain of TCR clone 276844 (TRBV27, TRBJ1-4)
CASSRNAGIGNEKLFF

SEQ ID NO: 553689 - protein, 14 aa, Homo sapiens
  CDR3 for alpha chain variable domain of TCR clone 276845 (TRAV1-2, TRAJ8)
CAVREDTGFQKLVF

SEQ ID NO: 553690 - protein, 12 aa, Homo sapiens
  CDR3 for beta chain variable domain of TCR clone 276845 (TRBV14, TRBJ2-7)
CASSLYKDEQYF

SEQ ID NO: 553691 - protein, 18 aa, Homo sapiens
  CDR3 for alpha chain variable domain of TCR clone 276846 (TRAV26-1, TRAJ52)
CIVRVEGAGGNSYGKLTF

SEQ ID NO: 553692 - protein, 16 aa, Homo sapiens
  CDR3 for beta chain variable domain of TCR clone 276846 (TRBV7-3, TRBJ2-1)
CASSLEGYRSYNEQFF

SEQ ID NO: 553693 - protein, 13 aa, Homo sapiens
  CDR3 for alpha chain variable domain of TCR clone 276847 (TRAV25, TRAJ29)
CAGRFVGNTPLVC

SEQ ID NO: 553694 - protein, 15 aa, Homo sapiens
  CDR3 for beta chain variable domain of TCR clone 276847 (TRBV29-1, TRBJ2-1)
CSVRTSLSSYNEQFF

SEQ ID NO: 553695 - protein, 17 aa, Homo sapiens
  CDR3 for alpha chain variable domain of TCR clone 276848 (TRAV3, TRAJ12)
CAVRDGGRMVSSYKLIF

SEQ ID NO: 553696 - protein, 13 aa, Homo sapiens
  CDR3 for beta chain variable domain of TCR clone 276848 (TRBV15, TRBJ1-6)
CATSGGLNSPLHF

SEQ ID NO: 553697 - protein, 14 aa, Homo sapiens
  CDR3 for alpha chain variable domain of TCR clone 276849 (TRAV17, TRAJ54)
CATDANQGAQKLAF

SEQ ID NO: 553698 - protein, 14 aa, Homo sapiens
  CDR3 for beta chain variable domain of TCR clone 276849 (TRBV20-1, TRBJ2-7)
CSAPELAGVGEQYF

SEQ ID NO: 553699 - protein, 11 aa, Homo sapiens
  CDR3 for alpha chain variable domain of TCR clone 276850 (TRAV4, TRAJ31)
CLVGDNARLMF

SEQ ID NO: 553700 - protein, 15 aa, Homo sapiens
  CDR3 for beta chain variable domain of TCR clone 276850 (TRBV12-4, TRBJ2-5)
CASSGTGQAQETQYF

SEQ ID NO: 553701 - protein, 15 aa, Homo sapiens
  CDR3 for alpha chain variable domain of TCR clone 276851 (TRAV12-3, TRAJ49)
CAMAVTPNTGNQFYF

SEQ ID NO: 553702 - protein, 20 aa, Homo sapiens
  CDR3 for beta chain variable domain of TCR clone 276851 (TRBV4-1, TRBJ1-5)
CASSQDPRGQGLISPSILVM

SEQ ID NO: 553703 - protein, 14 aa, Homo sapiens
  CDR3 for alpha chain variable domain of TCR clone 276852 (TRAV4, TRAJ6)
CLVGETGGSYIPTF

SEQ ID NO: 553704 - protein, 16 aa, Homo sapiens
  CDR3 for beta chain variable domain of TCR clone 276852 (TRBV7-6, TRBJ2-1)
CASSLNEGPSYNEQFF

SEQ ID NO: 553705 - protein, 15 aa, Homo sapiens
  CDR3 for alpha chain variable domain of TCR clone 276853 (TRAV38-1, TRAJ37)
CAFIFGSGNTGKLIF

SEQ ID NO: 553706 - protein, 15 aa, Homo sapiens
  CDR3 for beta chain variable domain of TCR clone 276853 (TRBV19, TRBJ2-1)
CASIEGRGPYNEQFF

SEQ ID NO: 553707 - protein, 13 aa, Homo sapiens
  CDR3 for alpha chain variable domain of TCR clone 276854 (TRAV20, TRAJ20)
CAVRWVRDYKLSF

SEQ ID NO: 553708 - protein, 14 aa, Homo sapiens
  CDR3 for beta chain variable domain of TCR clone 276854 (TRBV12-5, TRBJ2-5)
CASGSRTHQETQYF

SEQ ID NO: 553709 - protein, 16 aa, Homo sapiens
  CDR3 for alpha chain variable domain of TCR clone 276855 (TRAV3, TRAJ37)
CAVRGKGSGNTGKLIF

SEQ ID NO: 553710 - protein, 15 aa, Homo sapiens
  CDR3 for beta chain variable domain of TCR clone 276855 (TRBV5-1, TRBJ2-1)
GASSPPRAPYNEQFF

SEQ ID NO: 553711 - protein, 15 aa, Homo sapiens
  CDR3 for alpha chain variable domain of TCR clone 276856 (TRAV16, TRAJ12)
CSKWPLRDSSYKLIF

SEQ ID NO: 553712 - protein, 15 aa, Homo sapiens
  CDR3 for beta chain variable domain of TCR clone 276856 (TRBV4-2, TRBJ1-1)
CASSQAGNTEASLDK

SEQ ID NO: 553713 - protein, 14 aa, Homo sapiens
  CDR3 for alpha chain variable domain of TCR clone 276857 (TRAV1-2, TRAJ8)
CSVREDTGFQKLVF

SEQ ID NO: 553714 - protein, 22 aa, Homo sapiens
  CDR3 for beta chain variable domain of TCR clone 276857 (TRBV7-3, TRBJ2-2)
GGTQPCISVPAAQEDTPGSCFF

SEQ ID NO: 553715 - protein, 16 aa, Homo sapiens
  CDR3 for alpha chain variable domain of TCR clone 276858 (TRAV21, TRAJ37)
CAVRPRGPSSTGKLIF

SEQ ID NO: 553716 - protein, 13 aa, Homo sapiens
  CDR3 for beta chain variable domain of TCR clone 276858 (TRBV7-9, TRBJ2-5)
CASLSPGQETQYF

SEQ ID NO: 553717 - protein, 14 aa, Homo sapiens
  CDR3 for alpha chain variable domain of TCR clone 276859 (TRAV8-3, TRAJ9)
CAVVYNTGGFKTIF

SEQ ID NO: 553718 - protein, 15 aa, Homo sapiens
  CDR3 for beta chain variable domain of TCR clone 276859 (TRBV19, TRBJ1-2)
CASTPGQVANYGYTF

SEQ ID NO: 553719 - protein, 12 aa, Homo sapiens
  CDR3 for alpha chain variable domain of TCR clone 276860 (TRAV17, TRAJ57)
CATDGGSEKLVV

SEQ ID NO: 553720 - protein, 12 aa, Homo sapiens
  CDR3 for beta chain variable domain of TCR clone 276860 (TRBV29-1, TRBJ2-2)
CSVDKYTGELFF

SEQ ID NO: 553721 - protein, 11 aa, Homo sapiens
  CDR3 for alpha chain variable domain of TCR clone 276861 (TRAV35, TRAJ30)
CAGPGDDKIIF

SEQ ID NO: 553722 - protein, 14 aa, Homo sapiens
  CDR3 for beta chain variable domain of TCR clone 276861 (TRBV7-6, TRBJ1-6)
CASSQSGGGSPLHF

SEQ ID NO: 553723 - protein, 13 aa, Homo sapiens
  CDR3 for alpha chain variable domain of TCR clone 276862 (TRAV20, TRAJ21)
CAVAGYNFNKFYF

SEQ ID NO: 553724 - protein, 15 aa, Homo sapiens
  CDR3 for beta chain variable domain of TCR clone 276862 (TRBV11-3, TRBJ2-3)
CASLKDGREGDTQYF

SEQ ID NO: 553725 - protein, 15 aa, Homo sapiens
  CDR3 for alpha chain variable domain of TCR clone 276863 (TRAV17, TRAJ37)
CATDGGSSNTGKLSF

SEQ ID NO: 553726 - protein, 15 aa, Homo sapiens
  CDR3 for beta chain variable domain of TCR clone 276863 (TRBV28, TRBJ2-5)
CASSSGRTIQETQYF

SEQ ID NO: 553727 - protein, 14 aa, Homo sapiens
  CDR3 for alpha chain variable domain of TCR clone 276864 (TRAV12-2, TRAJ17)
CAALFKAAGNKLTF

SEQ ID NO: 553728 - protein, 16 aa, Homo sapiens
  CDR3 for beta chain variable domain of TCR clone 276864 (TRBV20-1, TRBJ2-2)
CSASASGIPGAGELYF

SEQ ID NO: 553729 - protein, 20 aa, Homo sapiens
  CDR3 for alpha chain variable domain of TCR clone 276865 (TRAV4, TRAJ22)
CCVLLPRGSLISGSAGQLTF

SEQ ID NO: 553730 - protein, 14 aa, Homo sapiens
  CDR3 for beta chain variable domain of TCR clone 276865 (TRBV6-1, TRBJ1-3)
CASVQGGGGNTIYF

SEQ ID NO: 553731 - protein, 14 aa, Homo sapiens
  CDR3 for alpha chain variable domain of TCR clone 276866 (TRAV8-3, TRAJ16)
CAADRFSDGQKLLF

SEQ ID NO: 553732 - protein, 15 aa, Homo sapiens
  CDR3 for beta chain variable domain of TCR clone 276866 (TRBV7-6, TRBJ2-1)
CASSPGQGPYNEQFF

SEQ ID NO: 553733 - protein, 13 aa, Homo sapiens
  CDR3 for alpha chain variable domain of TCR clone 276867 (TRAV8-3, TRAJ12)
WVLRMDSSYKLIF

SEQ ID NO: 553734 - protein, 15 aa, Homo sapiens
  CDR3 for beta chain variable domain of TCR clone 276867 (TRBV11-3, TRBJ2-3)
CASLKDGREGDTQYF

SEQ ID NO: 553735 - protein, 14 aa, Homo sapiens
  CDR3 for alpha chain variable domain of TCR clone 276868 (TRAV8-4, TRAJ54)
CAVSEVLGAQKLVF

SEQ ID NO: 553736 - protein, 13 aa, Homo sapiens
  CDR3 for beta chain variable domain of TCR clone 276868 (TRBV7-9, TRBJ1-1)
CASTQGMNTEAFF

SEQ ID NO: 553737 - protein, 14 aa, Homo sapiens
  CDR3 for alpha chain variable domain of TCR clone 276869 (TRAV3, TRAJ16)
CCERLKSDGQKLLF

SEQ ID NO: 553738 - protein, 15 aa, Homo sapiens
  CDR3 for beta chain variable domain of TCR clone 276869 (TRBV28, TRBJ2-7)
CARSPGGRGFYEQYF

SEQ ID NO: 553739 - protein, 14 aa, Homo sapiens
  CDR3 for alpha chain variable domain of TCR clone 276870 (TRAV12-1, TRAJ34)
CGEPASYNTDKLIF

SEQ ID NO: 553740 - protein, 13 aa, Homo sapiens
  CDR3 for beta chain variable domain of TCR clone 276870 (TRBV7-6, TRBJ2-3)
CASSLRSDNTQYF

SEQ ID NO: 553741 - protein, 14 aa, Homo sapiens
  CDR3 for alpha chain variable domain of TCR clone 276871 (TRAV16, TRAJ37)
CALDISGNTGKLIF

SEQ ID NO: 553742 - protein, 14 aa, Homo sapiens
  CDR3 for beta chain variable domain of TCR clone 276871 (TRBV7-6, TRBJ2-7)
CASSFRQGAYEQYF

SEQ ID NO: 553743 - protein, 14 aa, Homo sapiens
  CDR3 for alpha chain variable domain of TCR clone 276872 (TRAV1-2, TRAJ16)
CAVNRFSDGQKLIF

SEQ ID NO: 553744 - protein, 15 aa, Homo sapiens
  CDR3 for beta chain variable domain of TCR clone 276872 (TRBV9, TRBJ1-6)
CASSVAGTWDSPLHF

SEQ ID NO: 553745 - protein, 13 aa, Homo sapiens
  CDR3 for alpha chain variable domain of TCR clone 276873 (TRAV12-3, TRAJ56)
CALATGANSKLTF

SEQ ID NO: 553746 - protein, 16 aa, Homo sapiens
  CDR3 for beta chain variable domain of TCR clone 276873 (TRBV7-3, TRBJ2-2)
CASSLKRGTLSGELFF

SEQ ID NO: 553747 - protein, 14 aa, Homo sapiens
  CDR3 for alpha chain variable domain of TCR clone 276874 (TRAV8-6, TRAJ29)
CAVSRSSGDTPLVF

SEQ ID NO: 553748 - protein, 13 aa, Homo sapiens
  CDR3 for beta chain variable domain of TCR clone 276874 (TRBV19, TRBJ1-5)
CASSEGSNQPQHF

SEQ ID NO: 553749 - protein, 14 aa, Homo sapiens
  CDR3 for alpha chain variable domain of TCR clone 276875 (TRAV8-3, TRAJ36)
CAVGPITGANNRFF

SEQ ID NO: 553750 - protein, 15 aa, Homo sapiens
  CDR3 for beta chain variable domain of TCR clone 276875 (TRBV4-1, TRBJ2-1)
CASSQDPGNYNEQFF

SEQ ID NO: 553751 - protein, 14 aa, Homo sapiens
  CDR3 for alpha chain variable domain of TCR clone 276876 (TRAV8-3, TRAJ27)
CAGGRNTNAGKPTF

SEQ ID NO: 553752 - protein, 16 aa, Homo sapiens
  CDR3 for beta chain variable domain of TCR clone 276876 (TRBV12-5, TRBJ2-5)
CASGPRTSGNQETQYF

SEQ ID NO: 553753 - protein, 16 aa, Homo sapiens
  CDR3 for alpha chain variable domain of TCR clone 276877 (TRAV3, TRAJ37)
CAVRPHGSGNTAKLIF

SEQ ID NO: 553754 - protein, 17 aa, Homo sapiens
  CDR3 for beta chain variable domain of TCR clone 276877 (TRBV5-1, TRBJ2-5)
CASSPVALGQNQETQYF

SEQ ID NO: 553755 - protein, 12 aa, Homo sapiens
  CDR3 for alpha chain variable domain of TCR clone 276878 (TRAV21, TRAJ29)
CAVTSGNTPLVF

SEQ ID NO: 553756 - protein, 18 aa, Homo sapiens
  CDR3 for beta chain variable domain of TCR clone 276878 (TRBV11-2, TRBJ2-3)
CASSLGGASRGAPNTQYF

SEQ ID NO: 553757 - protein, 11 aa, Homo sapiens
  CDR3 for alpha chain variable domain of TCR clone 276879 (TRAV12-1, TRAJ26)
CVVAYGHNFVF

SEQ ID NO: 553758 - protein, 15 aa, Homo sapiens
  CDR3 for beta chain variable domain of TCR clone 276879 (TRBV12-4, TRBJ2-5)
CASSGTGQAQETQYF

SEQ ID NO: 553759 - protein, 14 aa, Homo sapiens
  CDR3 for alpha chain variable domain of TCR clone 276880 (TRAV8-4, TRAJ39)
CAVSEGNAGNMLTF

SEQ ID NO: 553760 - protein, 17 aa, Homo sapiens
  CDR3 for beta chain variable domain of TCR clone 276880 (TRBV19, TRBJ2-6)
CASSTGQVFSGANVLTF

SEQ ID NO: 553761 - protein, 13 aa, Homo sapiens
  CDR3 for alpha chain variable domain of TCR clone 276881 (TRAV12-3, TRAJ40)
CAMSDSGTYKYNF

SEQ ID NO: 553762 - protein, 14 aa, Homo sapiens
  CDR3 for beta chain variable domain of TCR clone 276881 (TRBV7-2, TRBJ1-5)
CARSTQGAGQPQHF

SEQ ID NO: 553763 - protein, 14 aa, Homo sapiens
  CDR3 for alpha chain variable domain of TCR clone 276882 (TRAV1-2, TRAJ16)
CAVNRFSDGQKPLF

SEQ ID NO: 553764 - protein, 17 aa, Homo sapiens
  CDR3 for beta chain variable domain of TCR clone 276882 (TRBV4-2, TRBJ1-1)
CASTQLGGGSGNTEAFF

SEQ ID NO: 553765 - protein, 16 aa, Homo sapiens
  CDR3 for alpha chain variable domain of TCR clone 276883 (TRAV12-1, TRAJ43)
CVVNPHRFGAGTRLTV

SEQ ID NO: 553766 - protein, 15 aa, Homo sapiens
  CDR3 for beta chain variable domain of TCR clone 276883 (TRBV19, TRBJ2-1)
CPSSSPGVPLDEQFF

SEQ ID NO: 553767 - protein, 10 aa, Homo sapiens
  CDR3 for alpha chain variable domain of TCR clone 276884 (TRAV8-1, TRAJ43)
CAVNVDDMRF

SEQ ID NO: 553768 - protein, 14 aa, Homo sapiens
  CDR3 for beta chain variable domain of TCR clone 276884 (TRBV29-1, TRBJ2-3)
CSARAGAGTDTQYF

SEQ ID NO: 553769 - protein, 18 aa, Homo sapiens
  CDR3 for alpha chain variable domain of TCR clone 276885 (TRAV3, TRAJ32)
CAVRDIRGYGGATNKLIF

SEQ ID NO: 553770 - protein, 15 aa, Homo sapiens
  CDR3 for beta chain variable domain of TCR clone 276885 (TRBV12-4, TRBJ2-2)
CASSLGVRHAGELFF

SEQ ID NO: 553771 - protein, 14 aa, Homo sapiens
  CDR3 for alpha chain variable domain of TCR clone 276886 (TRAV17, TRAJ57)
CATDPQGGSEKLVF

SEQ ID NO: 553772 - protein, 20 aa, Homo sapiens
  CDR3 for beta chain variable domain of TCR clone 276886 (TRBV6-6, TRBJ1-3)
CASSYSKWDSISGNTYILER

SEQ ID NO: 553773 - protein, 14 aa, Homo sapiens
  CDR3 for alpha chain variable domain of TCR clone 276887 (TRAV1-2, TRAJ16)
CAVNRFSAGTKLLF

SEQ ID NO: 553774 - protein, 16 aa, Homo sapiens
  CDR3 for beta chain variable domain of TCR clone 276887 (TRBV20-1, TRBJ1-4)
CSAPGQGLLTNEKLFF

SEQ ID NO: 553775 - protein, 17 aa, Homo sapiens
  CDR3 for alpha chain variable domain of TCR clone 276888 (TRAV8-1, TRAJ43)
CAVTNDMRFGAGTRLTV

SEQ ID NO: 553776 - protein, 15 aa, Homo sapiens
  CDR3 for beta chain variable domain of TCR clone 276888 (TRBV11-2, TRBJ1-3)
CASSLSPLVRDTIYF

SEQ ID NO: 553777 - protein, 16 aa, Homo sapiens
  CDR3 for alpha chain variable domain of TCR clone 276889 (TRAV3, TRAJ10)
CAVRDMRAGGVNKLTF

SEQ ID NO: 553778 - protein, 15 aa, Homo sapiens
  CDR3 for beta chain variable domain of TCR clone 276889 (TRBV20-1, TRBJ2-1)
CSASSAGSSYNEQFF

SEQ ID NO: 553779 - protein, 14 aa, Homo sapiens
  CDR3 for alpha chain variable domain of TCR clone 276890 (TRAV12-3, TRAJ53)
CGATSGGSNYKLTF

SEQ ID NO: 553780 - protein, 13 aa, Homo sapiens
  CDR3 for beta chain variable domain of TCR clone 276890 (TRBV19, TRBJ1-5)
CASSTQGGQPQNF

SEQ ID NO: 553781 - protein, 14 aa, Homo sapiens
  CDR3 for alpha chain variable domain of TCR clone 276891 (TRAV8-4, TRAJ13)
CAVTLSGGYQKVTF

SEQ ID NO: 553782 - protein, 15 aa, Homo sapiens
  CDR3 for beta chain variable domain of TCR clone 276891 (TRBV11-2, TRBJ2-6)
CASSPTVAGANVLTF

SEQ ID NO: 553783 - protein, 15 aa, Homo sapiens
  CDR3 for alpha chain variable domain of TCR clone 276892 (TRAV12-1, TRAJ9)
CVVSFGDTGGFKTIF

SEQ ID NO: 553784 - protein, 12 aa, Homo sapiens
  CDR3 for beta chain variable domain of TCR clone 276892 (TRBV12-4, TRBJ2-7)
CASSLGGYKQYF

SEQ ID NO: 553785 - protein, 13 aa, Homo sapiens
  CDR3 for alpha chain variable domain of TCR clone 276893 (TRAV12-1, TRAJ29)
CVVNGPGNTPLVF

SEQ ID NO: 553786 - protein, 17 aa, Homo sapiens
  CDR3 for beta chain variable domain of TCR clone 276893 (TRBV7-2, TRBJ2-5)
CASSRGVGDPVLRARHA

SEQ ID NO: 553787 - protein, 14 aa, Homo sapiens
  CDR3 for alpha chain variable domain of TCR clone 276894 (TRAV12-2, TRAJ17)
CAVLFKAAGNKLTF

SEQ ID NO: 553788 - protein, 16 aa, Homo sapiens
  CDR3 for beta chain variable domain of TCR clone 276894 (TRBV5-1, TRBJ1-2)
CASSFGLADGLYGYTF

SEQ ID NO: 553789 - protein, 16 aa, Homo sapiens
  CDR3 for alpha chain variable domain of TCR clone 276895 (TRAV16, TRAJ52)
CALSGVGGTSYGKLTF

SEQ ID NO: 553790 - protein, 14 aa, Homo sapiens
  CDR3 for beta chain variable domain of TCR clone 276895 (TRBV19, TRBJ1-2)
CASSLQGQAYGYTC

SEQ ID NO: 553791 - protein, 11 aa, Homo sapiens
  CDR3 for alpha chain variable domain of TCR clone 276896 (TRAV35, TRAJ30)
CAGPGDDKLIF

SEQ ID NO: 553792 - protein, 12 aa, Homo sapiens
  CDR3 for beta chain variable domain of TCR clone 276896 (TRBV11-2, TRBJ2-2)
CASSLGGGELFF

SEQ ID NO: 553793 - protein, 11 aa, Homo sapiens
  CDR3 for alpha chain variable domain of TCR clone 276897 (TRAV2, TRAJ13)
CASGGYQKVTF

SEQ ID NO: 553794 - protein, 15 aa, Homo sapiens
  CDR3 for beta chain variable domain of TCR clone 276897 (TRBV20-1, TRBJ2-7)
CSARGLWTGVGEQYF

SEQ ID NO: 553795 - protein, 15 aa, Homo sapiens
  CDR3 for alpha chain variable domain of TCR clone 276898 (TRAV8-3, TRAJ45)
CASSYSGGGADGLTF

SEQ ID NO: 553796 - protein, 15 aa, Homo sapiens
  CDR3 for beta chain variable domain of TCR clone 276898 (TRBV6-5, TRBJ2-7)
CASSRTSGFSYEQYF

SEQ ID NO: 553797 - protein, 12 aa, Homo sapiens
  CDR3 for alpha chain variable domain of TCR clone 276899 (TRAV12-3, TRAJ17)
CAVTLTGNKLTF

SEQ ID NO: 553798 - protein, 14 aa, Homo sapiens
  CDR3 for beta chain variable domain of TCR clone 276899 (TRBV7-2, TRBJ2-7)
CASRSQGAAYEQYF

SEQ ID NO: 553799 - protein, 15 aa, Homo sapiens
  CDR3 for alpha chain variable domain of TCR clone 276900 (TRAV12-1, TRAJ44)
CVADLPTGTASKLTF

SEQ ID NO: 553800 - protein, 13 aa, Homo sapiens
  CDR3 for beta chain variable domain of TCR clone 276900 (TRBV28, TRBJ2-7)
CASTPGLAGEQYF

SEQ ID NO: 553801 - protein, 13 aa, Homo sapiens
  CDR3 for alpha chain variable domain of TCR clone 276901 (TRAV26-2, TRAJ54)
CILRDQGAQKLVF

SEQ ID NO: 553802 - protein, 12 aa, Homo sapiens
  CDR3 for beta chain variable domain of TCR clone 276901 (TRBV7-9, TRBJ2-7)
CASSLEGYEQYF

SEQ ID NO: 553803 - protein, 12 aa, Homo sapiens
  CDR3 for alpha chain variable domain of TCR clone 276902 (TRAV8-3, TRAJ26)
CAGYNYGQNFVF

SEQ ID NO: 553804 - protein, 15 aa, Homo sapiens
  CDR3 for beta chain variable domain of TCR clone 276902 (TRBV11-2, TRBJ2-1)
CASSLGTSGLNEQFF

SEQ ID NO: 553805 - protein, 14 aa, Homo sapiens
  CDR3 for alpha chain variable domain of TCR clone 276903 (TRAV12-2, TRAJ40)
CAVKIPSGTYKYIF

SEQ ID NO: 553806 - protein, 17 aa, Homo sapiens
  CDR3 for beta chain variable domain of TCR clone 276903 (TRBV15, TRBJ1-2)
CATSGREIDVVNYGYTF

SEQ ID NO: 553807 - protein, 12 aa, Homo sapiens
  CDR3 for alpha chain variable domain of TCR clone 276904 (TRAV17, TRAJ53)
CAFGGSNYKLTF

SEQ ID NO: 553808 - protein, 20 aa, Homo sapiens
  CDR3 for beta chain variable domain of TCR clone 276904 (TRBV11-2, TRBJ1-6)
CASSLVFATGGSVHPSTLGT

SEQ ID NO: 553809 - protein, 15 aa, Homo sapiens
  CDR3 for alpha chain variable domain of TCR clone 276905 (TRAV4, TRAJ39)
CLVGPNNKAGNMPTF

SEQ ID NO: 553810 - protein, 14 aa, Homo sapiens
  CDR3 for beta chain variable domain of TCR clone 276905 (TRBV18, TRBJ2-7)
CASSPRGGSYEQYF

SEQ ID NO: 553811 - protein, 13 aa, Homo sapiens
  CDR3 for alpha chain variable domain of TCR clone 276906 (TRAV36/DV7, TRAJ37)
CAVFSSNTGKLIF

SEQ ID NO: 553812 - protein, 15 aa, Homo sapiens
  CDR3 for beta chain variable domain of TCR clone 276906 (TRBV20-1, TRBJ1-1)
CSARDPRGKYTEAFF

SEQ ID NO: 553813 - protein, 15 aa, Homo sapiens
  CDR3 for alpha chain variable domain of TCR clone 276907 (TRAV8-3, TRAJ11)
CAVGLLNSGYSTLTF

SEQ ID NO: 553814 - protein, 14 aa, Homo sapiens
  CDR3 for beta chain variable domain of TCR clone 276907 (TRBV4-1, TRBJ2-5)
HASSRSGSGETQYF

SEQ ID NO: 553815 - protein, 16 aa, Homo sapiens
  CDR3 for alpha chain variable domain of TCR clone 276908 (TRAV3, TRAJ37)
CAVRGKGSGTTGKLIF

SEQ ID NO: 553816 - protein, 15 aa, Homo sapiens
  CDR3 for beta chain variable domain of TCR clone 276908 (TRBV7-9, TRBJ1-6)
CASSSPGRGNSPLHF

SEQ ID NO: 553817 - protein, 18 aa, Homo sapiens
  CDR3 for alpha chain variable domain of TCR clone 276909 (TRAV12-3, TRAJ52)
CAMSVGGAGGTSYGKLTF

SEQ ID NO: 553818 - protein, 12 aa, Homo sapiens
  CDR3 for beta chain variable domain of TCR clone 276909 (TRBV7-9, TRBJ2-7)
CATRTDAYEQYF

SEQ ID NO: 553819 - protein, 15 aa, Homo sapiens
  CDR3 for alpha chain variable domain of TCR clone 276910 (TRAV23/DV6, TRAJ13)
CAAWPGGGGYQKGTF

SEQ ID NO: 553820 - protein, 15 aa, Homo sapiens
  CDR3 for beta chain variable domain of TCR clone 276910 (TRBV20-1, TRBJ1-6)
CSARAASSYNSPLHF

SEQ ID NO: 553821 - protein, 14 aa, Homo sapiens
  CDR3 for alpha chain variable domain of TCR clone 276911 (TRAV1-2, TRAJ16)
CAVNRFSDGQKLLF

SEQ ID NO: 553822 - protein, 13 aa, Homo sapiens
  CDR3 for beta chain variable domain of TCR clone 276911 (TRBV6-5, TRBJ1-1)
QTSVYFCALRAFC

SEQ ID NO: 553823 - protein, 16 aa, Homo sapiens
  CDR3 for alpha chain variable domain of TCR clone 276912 (TRAV8-1, TRAJ42)
CAVTSRYGGSQGNLIF

SEQ ID NO: 553824 - protein, 15 aa, Homo sapiens
  CDR3 for beta chain variable domain of TCR clone 276912 (TRBV11-3, TRBJ2-7)
CASSPGPASSYEQYF

SEQ ID NO: 553825 - protein, 14 aa, Homo sapiens
  CDR3 for alpha chain variable domain of TCR clone 276913 (TRAV16, TRAJ32)
CALKSGGATNKLIF

SEQ ID NO: 553826 - protein, 16 aa, Homo sapiens
  CDR3 for beta chain variable domain of TCR clone 276913 (TRBV5-1, TRBJ2-2)
CASSSRTGGRTGELFF

SEQ ID NO: 553827 - protein, 12 aa, Homo sapiens
  CDR3 for alpha chain variable domain of TCR clone 276914 (TRAV1-1, TRAJ8)
CAGGTGFQKLVF

SEQ ID NO: 553828 - protein, 15 aa, Homo sapiens
  CDR3 for beta chain variable domain of TCR clone 276914 (TRBV20-1, TRBJ2-7)
CGARDRVSGMDEQYF

SEQ ID NO: 553829 - protein, 13 aa, Homo sapiens
  CDR3 for alpha chain variable domain of TCR clone 276915 (TRAV35, TRAJ33)
CPGRHDSNYQLIW

SEQ ID NO: 553830 - protein, 19 aa, Homo sapiens
  CDR3 for beta chain variable domain of TCR clone 276915 (TRBV6-3, TRBJ2-1)
CASSYSWTSGRATYNEQFF

SEQ ID NO: 553831 - protein, 14 aa, Homo sapiens
  CDR3 for alpha chain variable domain of TCR clone 276916 (TRAV12-2, TRAJ17)
CAVPFKAAGNKLTF

SEQ ID NO: 553832 - protein, 16 aa, Homo sapiens
  CDR3 for beta chain variable domain of TCR clone 276916 (TRBV19, TRBJ2-2)
CASRSPGTGATGELFF

SEQ ID NO: 553833 - protein, 13 aa, Homo sapiens
  CDR3 for alpha chain variable domain of TCR clone 276917 (TRAV1-1, TRAJ31)
CASYLNNNARLMF

SEQ ID NO: 553834 - protein, 16 aa, Homo sapiens
  CDR3 for beta chain variable domain of TCR clone 276917 (TRBV19, TRBJ2-1)
CASSKAGPSSYNEQFF

SEQ ID NO: 553835 - protein, 14 aa, Homo sapiens
  CDR3 for alpha chain variable domain of TCR clone 276918 (TRAV1-1, TRAJ27)
CAVIYNTNAGKSTF

SEQ ID NO: 553836 - protein, 13 aa, Homo sapiens
  CDR3 for beta chain variable domain of TCR clone 276918 (TRBV20-1, TRBJ1-1)
CSARGGGNTEAFF

SEQ ID NO: 553837 - protein, 14 aa, Homo sapiens
  CDR3 for alpha chain variable domain of TCR clone 276919 (TRAV13-2, TRAJ43)
CAEIPTYNNNDMRF

SEQ ID NO: 553838 - protein, 20 aa, Homo sapiens
  CDR3 for beta chain variable domain of TCR clone 276919 (TRBV28, TRBJ2-1)
CASTPIGRSPGLAGGNEQFF

SEQ ID NO: 553839 - protein, 16 aa, Homo sapiens
  CDR3 for alpha chain variable domain of TCR clone 276920 (TRAV3, TRAJ10)
CAVRDMRAGGGNKLTF

SEQ ID NO: 553840 - protein, 16 aa, Homo sapiens
  CDR3 for beta chain variable domain of TCR clone 276920 (TRBV4-1, TRBJ2-7)
CASSQEWTSGPLEQYF

SEQ ID NO: 553841 - protein, 15 aa, Homo sapiens
  CDR3 for alpha chain variable domain of TCR clone 276921 (TRAV4, TRAJ12)
CLVGDLMDSSYKLIF

SEQ ID NO: 553842 - protein, 14 aa, Homo sapiens
  CDR3 for beta chain variable domain of TCR clone 276921 (TRBV7-2, TRBJ1-1)
CASSHRRGRTEAFF

SEQ ID NO: 553843 - protein, 14 aa, Homo sapiens
  CDR3 for alpha chain variable domain of TCR clone 276922 (TRAV2, TRAJ9)
CAVEDRSGGFKPIF

SEQ ID NO: 553844 - protein, 17 aa, Homo sapiens
  CDR3 for beta chain variable domain of TCR clone 276922 (TRBV5-7, TRBJ1-5)
CASSYGKLWISPSILVM

SEQ ID NO: 553845 - protein, 13 aa, Homo sapiens
  CDR3 for alpha chain variable domain of TCR clone 276923 (TRAV8-1, TRAJ23)
YAVTGGPGGKLIF

SEQ ID NO: 553846 - protein, 15 aa, Homo sapiens
  CDR3 for beta chain variable domain of TCR clone 276923 (TRBV20-1, TRBJ2-2)
CSAIPGHTNTGELFF

SEQ ID NO: 553847 - protein, 13 aa, Homo sapiens
  CDR3 for alpha chain variable domain of TCR clone 276924 (TRAV1-2, TRAJ11)
CAVRRAGYSTLTF

SEQ ID NO: 553848 - protein, 14 aa, Homo sapiens
  CDR3 for beta chain variable domain of TCR clone 276924 (TRBV25-1, TRBJ1-1)
CASTHLGGNTEAFF

SEQ ID NO: 553849 - protein, 11 aa, Homo sapiens
  CDR3 for alpha chain variable domain of TCR clone 276925 (TRAV17, TRAJ23)
CAVRQGGKLIF

SEQ ID NO: 553850 - protein, 20 aa, Homo sapiens
  CDR3 for beta chain variable domain of TCR clone 276925 (TRBV7-8, TRBJ2-2)
CASSHLFPGPTIHITGELFF

SEQ ID NO: 553851 - protein, 14 aa, Homo sapiens
  CDR3 for alpha chain variable domain of TCR clone 276926 (TRAV12-1, TRAJ13)
CVVIDSGGYQKVTF

SEQ ID NO: 553852 - protein, 20 aa, Homo sapiens
  CDR3 for beta chain variable domain of TCR clone 276926 (TRBV7-8, TRBJ2-2)
CASSHLFPGPTIQITGELFF

SEQ ID NO: 553853 - protein, 12 aa, Homo sapiens
  CDR3 for alpha chain variable domain of TCR clone 276927 (TRAV8-3, TRAJ34)
WASGYNTDRLIF

SEQ ID NO: 553854 - protein, 14 aa, Homo sapiens
  CDR3 for beta chain variable domain of TCR clone 276927 (TRBV7-2, TRBJ2-7)
CASSPKTSFYEQYF

SEQ ID NO: 553855 - protein, 11 aa, Homo sapiens
  CDR3 for alpha chain variable domain of TCR clone 276928 (TRAV1-2, TRAJ20)
CAVSNEYKLSF

SEQ ID NO: 553856 - protein, 16 aa, Homo sapiens
  CDR3 for beta chain variable domain of TCR clone 276928 (TRBV29-1, TRBJ2-6)
CSVEDITYSGANVLTF

SEQ ID NO: 553857 - protein, 19 aa, Homo sapiens
  CDR3 for alpha chain variable domain of TCR clone 276929 (TRAV2, TRAJ20)
ILQVREADAAVYRYCKLSF

SEQ ID NO: 553858 - protein, 17 aa, Homo sapiens
  CDR3 for beta chain variable domain of TCR clone 276929 (TRBV11-2, TRBJ2-1)
CASSLYPPGVEYNEQFF

SEQ ID NO: 553859 - protein, 15 aa, Homo sapiens
  CDR3 for alpha chain variable domain of TCR clone 276930 (TRAV35, TRAJ42)
CAGQLRGGSQGNLIF

SEQ ID NO: 553860 - protein, 14 aa, Homo sapiens
  CDR3 for beta chain variable domain of TCR clone 276930 (TRBV6-1, TRBJ1-3)
CASVQGGGGNTIYF

SEQ ID NO: 553861 - protein, 16 aa, Homo sapiens
  CDR3 for alpha chain variable domain of TCR clone 276931 (TRAV30, TRAJ24)
CGTEIVDADSWGKFQF

SEQ ID NO: 553862 - protein, 19 aa, Homo sapiens
  CDR3 for beta chain variable domain of TCR clone 276931 (TRBV25-1, TRBJ2-2)
CAILVYRVDRGRKPGELFF

SEQ ID NO: 553863 - protein, 15 aa, Homo sapiens
  CDR3 for alpha chain variable domain of TCR clone 276932 (TRAV13-1, TRAJ32)
CAASIYGGATNKPIF

SEQ ID NO: 553864 - protein, 17 aa, Homo sapiens
  CDR3 for beta chain variable domain of TCR clone 276932 (TRBV7-3, TRBJ2-5)
CASSLGSGRSGSETQYF

SEQ ID NO: 553865 - protein, 13 aa, Homo sapiens
  CDR3 for alpha chain variable domain of TCR clone 276933 (TRAV13-1, TRAJ43)
CAASLSNNNDMRI

SEQ ID NO: 553866 - protein, 16 aa, Homo sapiens
  CDR3 for beta chain variable domain of TCR clone 276933 (TRBV2, TRBJ2-7)
CASRKGSLGLVYEQYF

SEQ ID NO: 553867 - protein, 11 aa, Homo sapiens
  CDR3 for alpha chain variable domain of TCR clone 276934 (TRAV3, TRAJ21)
CAVGNFNKFYF

SEQ ID NO: 553868 - protein, 13 aa, Homo sapiens
  CDR3 for beta chain variable domain of TCR clone 276934 (TRBV4-2, TRBJ2-1)
CASSPGTYKEQFS

SEQ ID NO: 553869 - protein, 14 aa, Homo sapiens
  CDR3 for alpha chain variable domain of TCR clone 276935 (TRAV1-2, TRAJ16)
CAVNRFSDGQKLPF

SEQ ID NO: 553870 - protein, 15 aa, Homo sapiens
  CDR3 for beta chain variable domain of TCR clone 276935 (TRBV6-3, TRBJ2-7)
CASSSPGTVFYEQYF

SEQ ID NO: 553871 - protein, 14 aa, Homo sapiens
  CDR3 for alpha chain variable domain of TCR clone 276936 (TRAV1-2, TRAJ16)
CAVNRFSDGQKLLF

SEQ ID NO: 553872 - protein, 15 aa, Homo sapiens
  CDR3 for beta chain variable domain of TCR clone 276936 (TRBV11-2, TRBJ2-2)
CASSADRVNAGELFF

SEQ ID NO: 553873 - protein, 16 aa, Homo sapiens
  CDR3 for alpha chain variable domain of TCR clone 276937 (TRAV1-2, TRAJ10)
CAVGGVLTGVGNKLTF

SEQ ID NO: 553874 - protein, 12 aa, Homo sapiens
  CDR3 for beta chain variable domain of TCR clone 276937 (TRBV7-8, TRBJ2-7)
CASSLGDREQYF

SEQ ID NO: 553875 - protein, 16 aa, Homo sapiens
  CDR3 for alpha chain variable domain of TCR clone 276938 (TRAV30, TRAJ24)
CGTEIVDADSWGKFQF

SEQ ID NO: 553876 - protein, 16 aa, Homo sapiens
  CDR3 for beta chain variable domain of TCR clone 276938 (TRBV27, TRBJ2-5)
CASSSQTSGFQETQYF

SEQ ID NO: 553877 - protein, 14 aa, Homo sapiens
  CDR3 for alpha chain variable domain of TCR clone 276939 (TRAV1-2, TRAJ16)
CAVNRFSDGQKLLF

SEQ ID NO: 553878 - protein, 15 aa, Homo sapiens
  CDR3 for beta chain variable domain of TCR clone 276939 (TRBV2, TRBJ1-4)
CASSERRGTNEKLFF

SEQ ID NO: 553879 - protein, 16 aa, Homo sapiens
  CDR3 for alpha chain variable domain of TCR clone 276940 (TRAV30, TRAJ24)
FGTEIVDADSWGKFQF

SEQ ID NO: 553880 - protein, 15 aa, Homo sapiens
  CDR3 for beta chain variable domain of TCR clone 276940 (TRBV4-2, TRBJ1-2)
CASSQRTGGRDGYTF

SEQ ID NO: 553881 - protein, 15 aa, Homo sapiens
  CDR3 for alpha chain variable domain of TCR clone 276941 (TRAV17, TRAJ56)
CATEPFTGANSKLTF

SEQ ID NO: 553882 - protein, 13 aa, Homo sapiens
  CDR3 for beta chain variable domain of TCR clone 276941 (TRBV7-9, TRBJ1-2)
CASSLKQNYGYTF

SEQ ID NO: 553883 - protein, 11 aa, Homo sapiens
  CDR3 for alpha chain variable domain of TCR clone 276942 (TRAV1-2, TRAJ20)
CAVSNDYKLRF

SEQ ID NO: 553884 - protein, 15 aa, Homo sapiens
  CDR3 for beta chain variable domain of TCR clone 276942 (TRBV7-9, TRBJ1-5)
CASSQGHQPNQPQHF

SEQ ID NO: 553885 - protein, 14 aa, Homo sapiens
  CDR3 for alpha chain variable domain of TCR clone 276943 (TRAV10, TRAJ34)
CVVSRGGDTDKLIF

SEQ ID NO: 553886 - protein, 17 aa, Homo sapiens
  CDR3 for beta chain variable domain of TCR clone 276943 (TRBV6-3, TRBJ2-3)
FASRRPLGGGSTDTQYF

SEQ ID NO: 553887 - protein, 14 aa, Homo sapiens
  CDR3 for alpha chain variable domain of TCR clone 276944 (TRAV12-2, TRAJ40)
CAVKIPSGTYKYIF

SEQ ID NO: 553888 - protein, 14 aa, Homo sapiens
  CDR3 for beta chain variable domain of TCR clone 276944 (TRBV20-1, TRBJ1-1)
CSSQTRIGGTEAFF

SEQ ID NO: 553889 - protein, 13 aa, Homo sapiens
  CDR3 for alpha chain variable domain of TCR clone 276945 (TRAV26-2, TRAJ43)
CILRAVNNNDIRF

SEQ ID NO: 553890 - protein, 15 aa, Homo sapiens
  CDR3 for beta chain variable domain of TCR clone 276945 (TRBV7-2, TRBJ2-1)
CASTHGAGIYNEQFF

SEQ ID NO: 553891 - protein, 13 aa, Homo sapiens
  CDR3 for alpha chain variable domain of TCR clone 276946 (TRAV3, TRAJ8)
CAVRFTGFQELVF

SEQ ID NO: 553892 - protein, 15 aa, Homo sapiens
  CDR3 for beta chain variable domain of TCR clone 276946 (TRBV20-1, TRBJ2-7)
CSARDRVSGMDEQYF

SEQ ID NO: 553893 - protein, 14 aa, Homo sapiens
  CDR3 for alpha chain variable domain of TCR clone 276947 (TRAV3, TRAJ17)
CAVRDAAAVNKLTF

SEQ ID NO: 553894 - protein, 13 aa, Homo sapiens
  CDR3 for beta chain variable domain of TCR clone 276947 (TRBV2, TRBJ1-1)
CASSVSGYTEAFF

SEQ ID NO: 553895 - protein, 14 aa, Homo sapiens
  CDR3 for alpha chain variable domain of TCR clone 276948 (TRAV2, TRAJ11)
CAVVPNSGSSTLTF

SEQ ID NO: 553896 - protein, 15 aa, Homo sapiens
  CDR3 for beta chain variable domain of TCR clone 276948 (TRBV4-1, TRBJ1-3)
CASSQDLRVGNTIYF

SEQ ID NO: 553897 - protein, 15 aa, Homo sapiens
  CDR3 for alpha chain variable domain of TCR clone 276949 (TRAV35, TRAJ58)
CAGRRQETSGSRLTF

SEQ ID NO: 553898 - protein, 14 aa, Homo sapiens
  CDR3 for beta chain variable domain of TCR clone 276949 (TRBV7-9, TRBJ2-2)
CASSLVQDTGELFF

SEQ ID NO: 553899 - protein, 13 aa, Homo sapiens
  CDR3 for alpha chain variable domain of TCR clone 276950 (TRAV8-3, TRAJ44)
CAVVPGTASKLNF

SEQ ID NO: 553900 - protein, 12 aa, Homo sapiens
  CDR3 for beta chain variable domain of TCR clone 276950 (TRBV7-8, TRBJ2-7)
CASSLGDREQYF

SEQ ID NO: 553901 - protein, 15 aa, Homo sapiens
  CDR3 for alpha chain variable domain of TCR clone 276951 (TRAV8-3, TRAJ45)
CASSYSGGGADGLTF

SEQ ID NO: 553902 - protein, 13 aa, Homo sapiens
  CDR3 for beta chain variable domain of TCR clone 276951 (TRBV19, TRBJ2-2)
CASSQRSTGELFF

SEQ ID NO: 553903 - protein, 14 aa, Homo sapiens
  CDR3 for alpha chain variable domain of TCR clone 276952 (TRAV12-1, TRAJ15)
CVVNRNQAGTALIV

SEQ ID NO: 553904 - protein, 14 aa, Homo sapiens
  CDR3 for beta chain variable domain of TCR clone 276952 (TRBV19, TRBJ1-1)
CATTSGTRGTEAFF

SEQ ID NO: 553905 - protein, 12 aa, Homo sapiens
  CDR3 for alpha chain variable domain of TCR clone 276953 (TRAV13-1, TRAJ53)
AASGGSNYKLTF

SEQ ID NO: 553906 - protein, 14 aa, Homo sapiens
  CDR3 for beta chain variable domain of TCR clone 276953 (TRBV20-1, TRBJ1-1)
CSAQTRIGGTEAFF

SEQ ID NO: 553907 - protein, 12 aa, Homo sapiens
  CDR3 for alpha chain variable domain of TCR clone 276954 (TRAV17, TRAJ57)
CTTDGGSEKLVF

SEQ ID NO: 553908 - protein, 13 aa, Homo sapiens
  CDR3 for beta chain variable domain of TCR clone 276954 (TRBV7-9, TRBJ2-7)
CASSFAGAYEQYF

SEQ ID NO: 553909 - protein, 11 aa, Homo sapiens
  CDR3 for alpha chain variable domain of TCR clone 276955 (TRAV21, TRAJ23)
CAPQRRGQLIF

SEQ ID NO: 553910 - protein, 14 aa, Homo sapiens
  CDR3 for beta chain variable domain of TCR clone 276955 (TRBV12-4, TRBJ1-1)
CASTWTGHDTEAFF

SEQ ID NO: 553911 - protein, 15 aa, Homo sapiens
  CDR3 for alpha chain variable domain of TCR clone 276956 (TRAV25, TRAJ52)
CAGTSGGTSYGKLTV

SEQ ID NO: 553912 - protein, 13 aa, Homo sapiens
  CDR3 for beta chain variable domain of TCR clone 276956 (TRBV6-5, TRBJ2-5)
CASSPQGGETQYF

SEQ ID NO: 553913 - protein, 12 aa, Homo sapiens
  CDR3 for alpha chain variable domain of TCR clone 276957 (TRAV12-2, TRAJ39)
CAVNNNAATCSP

SEQ ID NO: 553914 - protein, 13 aa, Homo sapiens
  CDR3 for beta chain variable domain of TCR clone 276957 (TRBV2, TRBJ1-5)
CATAGPGNQPQHF

SEQ ID NO: 553915 - protein, 14 aa, Homo sapiens
  CDR3 for alpha chain variable domain of TCR clone 276958 (TRAV23/DV6, TRAJ4)
CAANLSVGYKKLIF

SEQ ID NO: 553916 - protein, 11 aa, Homo sapiens
  CDR3 for beta chain variable domain of TCR clone 276958 (TRBV7-9, TRBJ2-3)
CASSPTDTQYF

SEQ ID NO: 553917 - protein, 12 aa, Homo sapiens
  CDR3 for alpha chain variable domain of TCR clone 276959 (TRAV1-2, TRAJ33)
CAALDINYQLIW

SEQ ID NO: 553918 - protein, 16 aa, Homo sapiens
  CDR3 for beta chain variable domain of TCR clone 276959 (TRBV6-4, TRBJ1-2)
CASSEAVGDPYYGYTF

SEQ ID NO: 553919 - protein, 15 aa, Homo sapiens
  CDR3 for alpha chain variable domain of TCR clone 276960 (TRAV8-2, TRAJ40)
CVVLGTTSGTYKYIF

SEQ ID NO: 553920 - protein, 13 aa, Homo sapiens
  CDR3 for beta chain variable domain of TCR clone 276960 (TRBV14, TRBJ1-1)
CASGREFGTEAFF

SEQ ID NO: 553921 - protein, 17 aa, Homo sapiens
  CDR3 for alpha chain variable domain of TCR clone 276961 (TRAV3, TRAJ42)
CAVRDRDYGGSQGKLIF

SEQ ID NO: 553922 - protein, 17 aa, Homo sapiens
  CDR3 for beta chain variable domain of TCR clone 276961 (TRBV24-1, TRBJ2-4)
CATSDAEARGVRNIQYF

SEQ ID NO: 553923 - protein, 13 aa, Homo sapiens
  CDR3 for alpha chain variable domain of TCR clone 276962 (TRAV8-6, TRAJ21)
CAASPSSLNKFYF

SEQ ID NO: 553924 - protein, 14 aa, Homo sapiens
  CDR3 for beta chain variable domain of TCR clone 276962 (TRBV7-9, TRBJ2-5)
CASSLDTAQETQYF

SEQ ID NO: 553925 - protein, 16 aa, Homo sapiens
  CDR3 for alpha chain variable domain of TCR clone 276963 (TRAV14/DV4, TRAJ20)
CAMREGRSRDDYKLSF

SEQ ID NO: 553926 - protein, 14 aa, Homo sapiens
  CDR3 for beta chain variable domain of TCR clone 276963 (TRBV4-1, TRBJ2-5)
CASSRSGSGETQYF

SEQ ID NO: 553927 - protein, 15 aa, Homo sapiens
  CDR3 for alpha chain variable domain of TCR clone 276964 (TRAV8-3, TRAJ23)
CAVGDRYNQGGRLTF

SEQ ID NO: 553928 - protein, 17 aa, Homo sapiens
  CDR3 for beta chain variable domain of TCR clone 276964 (TRBV4-1, TRBJ1-4)
CASSQEGPRGVEEKLFF

SEQ ID NO: 553929 - protein, 14 aa, Homo sapiens
  CDR3 for alpha chain variable domain of TCR clone 276965 (TRAV12-1, TRAJ12)
CVVTRMDSSYKLIF

SEQ ID NO: 553930 - protein, 13 aa, Homo sapiens
  CDR3 for beta chain variable domain of TCR clone 276965 (TRBV20-1, TRBJ1-1)
CSARGGGNTAAFF

SEQ ID NO: 553931 - protein, 12 aa, Homo sapiens
  CDR3 for alpha chain variable domain of TCR clone 276966 (TRAV1-1, TRAJ24)
CAVLGSWGKFQF

SEQ ID NO: 553932 - protein, 14 aa, Homo sapiens
  CDR3 for beta chain variable domain of TCR clone 276966 (TRBV20-1, TRBJ2-3)
CSARGGTSTDTQYF

SEQ ID NO: 553933 - protein, 10 aa, Homo sapiens
  CDR3 for alpha chain variable domain of TCR clone 276967 (TRAV12-3, TRAJ49)
CAMNDDSSIL

SEQ ID NO: 553934 - protein, 16 aa, Homo sapiens
  CDR3 for beta chain variable domain of TCR clone 276967 (TRBV19, TRBJ2-1)
CASSKAGPSSYNEQFF

SEQ ID NO: 553935 - protein, 14 aa, Homo sapiens
  CDR3 for alpha chain variable domain of TCR clone 276968 (TRAV1-2, TRAJ16)
CAVNRFSDGQKLLF

SEQ ID NO: 553936 - protein, 15 aa, Homo sapiens
  CDR3 for beta chain variable domain of TCR clone 276968 (TRBV28, TRBJ2-4)
CAAGSGTLLIGIQYF

SEQ ID NO: 553937 - protein, 18 aa, Homo sapiens
  CDR3 for alpha chain variable domain of TCR clone 276969 (TRAV21, TRAJ52)
FAVRPSPAGGTSYGKLTF

SEQ ID NO: 553938 - protein, 14 aa, Homo sapiens
  CDR3 for beta chain variable domain of TCR clone 276969 (TRBV4-2, TRBJ2-1)
CASGLDRAYNEQFF

SEQ ID NO: 553939 - protein, 11 aa, Homo sapiens
  CDR3 for alpha chain variable domain of TCR clone 276970 (TRAV12-2, TRAJ33)
CAVTSNYQLIW

SEQ ID NO: 553940 - protein, 13 aa, Homo sapiens
  CDR3 for beta chain variable domain of TCR clone 276970 (TRBV12-4, TRBJ2-2)
CQQPGGEHGELFF

SEQ ID NO: 553941 - protein, 20 aa, Homo sapiens
  CDR3 for alpha chain variable domain of TCR clone 276971 (TRAV27, TRAJ10)
ASTSVPSRGILTGGGNKLTL

SEQ ID NO: 553942 - protein, 16 aa, Homo sapiens
  CDR3 for beta chain variable domain of TCR clone 276971 (TRBV12-5, TRBJ2-5)
CASGPRTSGNQETQYF

SEQ ID NO: 553943 - protein, 15 aa, Homo sapiens
  CDR3 for alpha chain variable domain of TCR clone 276972 (TRAV3, TRAJ4)
CAVRDGTGGYNKLIF

SEQ ID NO: 553944 - protein, 16 aa, Homo sapiens
  CDR3 for beta chain variable domain of TCR clone 276972 (TRBV7-2, TRBJ1-2)
CASSSNQDRRGHGYTF

SEQ ID NO: 553945 - protein, 17 aa, Homo sapiens
  CDR3 for alpha chain variable domain of TCR clone 276973 (TRAV23/DV6, TRAJ28)
CAALLAYSGSGIYQLTF

SEQ ID NO: 553946 - protein, 13 aa, Homo sapiens
  CDR3 for beta chain variable domain of TCR clone 276973 (TRBV4-2, TRBJ2-3)
CASSQGNTDTQYF

SEQ ID NO: 553947 - protein, 17 aa, Homo sapiens
  CDR3 for alpha chain variable domain of TCR clone 276974 (TRAV13-1, TRAJ28)
CAASPPYAGAGSYQLTF

SEQ ID NO: 553948 - protein, 15 aa, Homo sapiens
  CDR3 for beta chain variable domain of TCR clone 276974 (TRBV6-3, TRBJ2-2)
CASSFLATLTGELFF

SEQ ID NO: 553949 - protein, 15 aa, Homo sapiens
  CDR3 for alpha chain variable domain of TCR clone 276975 (TRAV12-3, TRAJ27)
CAMSAYNTNAGKSTF

SEQ ID NO: 553950 - protein, 13 aa, Homo sapiens
  CDR3 for beta chain variable domain of TCR clone 276975 (TRBV11-2, TRBJ2-5)
CASSRGPSETQYF

SEQ ID NO: 553951 - protein, 18 aa, Homo sapiens
  CDR3 for alpha chain variable domain of TCR clone 276976 (TRAV26-1, TRAJ52)
CIVRGRNAGGTSYGKLTF

SEQ ID NO: 553952 - protein, 13 aa, Homo sapiens
  CDR3 for beta chain variable domain of TCR clone 276976 (TRBV7-9, TRBJ2-5)
CASTPVGQETQSF

SEQ ID NO: 553953 - protein, 13 aa, Homo sapiens
  CDR3 for alpha chain variable domain of TCR clone 276977 (TRAV2, TRAJ40)
CAVVTSGTYKYIF

SEQ ID NO: 553954 - protein, 13 aa, Homo sapiens
  CDR3 for beta chain variable domain of TCR clone 276977 (TRBV7-9, TRBJ2-7)
CASKGEGAYEQYF

SEQ ID NO: 553955 - protein, 14 aa, Homo sapiens
  CDR3 for alpha chain variable domain of TCR clone 276978 (TRAV16, TRAJ54)
CARSDGQGVQKLVF

SEQ ID NO: 553956 - protein, 13 aa, Homo sapiens
  CDR3 for beta chain variable domain of TCR clone 276978 (TRBV20-1, TRBJ2-4)
CSAPTWAGNIQYF

SEQ ID NO: 553957 - protein, 17 aa, Homo sapiens
  CDR3 for alpha chain variable domain of TCR clone 276979 (TRAV3, TRAJ6)
CAVRDGPRAGGSYIPTF

SEQ ID NO: 553958 - protein, 12 aa, Homo sapiens
  CDR3 for beta chain variable domain of TCR clone 276979 (TRBV7-2, TRBJ2-5)
CASSQYQETQYF

SEQ ID NO: 553959 - protein, 11 aa, Homo sapiens
  CDR3 for alpha chain variable domain of TCR clone 276980 (TRAV13-1, TRAJ52)
PGGTSYGKLTF

SEQ ID NO: 553960 - protein, 16 aa, Homo sapiens
  CDR3 for beta chain variable domain of TCR clone 276980 (TRBV28, TRBJ2-7)
CASSPWVATGDLPQYF

SEQ ID NO: 553961 - protein, 16 aa, Homo sapiens
  CDR3 for alpha chain variable domain of TCR clone 276981 (TRAV26-1, TRAJ37)
CIYARHGSSNTGKLIF

SEQ ID NO: 553962 - protein, 15 aa, Homo sapiens
  CDR3 for beta chain variable domain of TCR clone 276981 (TRBV20-1, TRBJ2-7)
CSAESGTSGAYEQYF

SEQ ID NO: 553963 - protein, 17 aa, Homo sapiens
  CDR3 for alpha chain variable domain of TCR clone 276982 (TRAV12-2, TRAJ6)
CAPQGPPRAGGSYIPTF

SEQ ID NO: 553964 - protein, 17 aa, Homo sapiens
  CDR3 for beta chain variable domain of TCR clone 276982 (TRBV10-3, TRBJ2-6)
CAISESTAPSGANVLTF

SEQ ID NO: 553965 - protein, 14 aa, Homo sapiens
  CDR3 for alpha chain variable domain of TCR clone 276983 (TRAV1-2, TRAJ8)
FAVREDTGFQKLVF

SEQ ID NO: 553966 - protein, 10 aa, Homo sapiens
  CDR3 for beta chain variable domain of TCR clone 276983 (TRBV6-3, TRBJ2-7)
CASSPPGQFS

SEQ ID NO: 553967 - protein, 23 aa, Homo sapiens
  CDR3 for alpha chain variable domain of TCR clone 276984 (TRAV12-2, TRAJ36)
SLLIRDSQPSDSATLERANNLFF

SEQ ID NO: 553968 - protein, 17 aa, Homo sapiens
  CDR3 for beta chain variable domain of TCR clone 276984 (TRBV29-1, TRBJ2-1)
CSVVGLAGAYSYNEQFV

SEQ ID NO: 553969 - protein, 13 aa, Homo sapiens
  CDR3 for alpha chain variable domain of TCR clone 276985 (TRAV2, TRAJ40)
CAVVTSGTYKYIF

SEQ ID NO: 553970 - protein, 17 aa, Homo sapiens
  CDR3 for beta chain variable domain of TCR clone 276985 (TRBV7-3, TRBJ2-3)
CASSLMKRKRGADTQYF

SEQ ID NO: 553971 - protein, 14 aa, Homo sapiens
  CDR3 for alpha chain variable domain of TCR clone 276986 (TRAV12-2, TRAJ53)
CAVKGGGSNYKLTF

SEQ ID NO: 553972 - protein, 14 aa, Homo sapiens
  CDR3 for beta chain variable domain of TCR clone 276986 (TRBV19, TRBJ2-1)
CASPTFVLSSEQFF

SEQ ID NO: 553973 - protein, 14 aa, Homo sapiens
  CDR3 for alpha chain variable domain of TCR clone 276987 (TRAV29/DV5, TRAJ45)
CAPYSGGDADGLTF

SEQ ID NO: 553974 - protein, 13 aa, Homo sapiens
  CDR3 for beta chain variable domain of TCR clone 276987 (TRBV29-1, TRBJ2-3)
CSATRGGRDTQYF

SEQ ID NO: 553975 - protein, 14 aa, Homo sapiens
  CDR3 for alpha chain variable domain of TCR clone 276988 (TRAV9-2, TRAJ39)
CALYIYNAGNMLTF

SEQ ID NO: 553976 - protein, 12 aa, Homo sapiens
  CDR3 for beta chain variable domain of TCR clone 276988 (TRBV12-5, TRBJ2-3)
CASQASTDTQYF

SEQ ID NO: 553977 - protein, 14 aa, Homo sapiens
  CDR3 for alpha chain variable domain of TCR clone 276989 (TRAV2, TRAJ3)
CAVPPYSSASKIIF

SEQ ID NO: 553978 - protein, 14 aa, Homo sapiens
  CDR3 for beta chain variable domain of TCR clone 276989 (TRBV7-2, TRBJ2-5)
CASSLSGGGETQYF

SEQ ID NO: 553979 - protein, 16 aa, Homo sapiens
  CDR3 for alpha chain variable domain of TCR clone 276990 (TRAV35, TRAJ42)
GRMERYYGGSQGNLIF

SEQ ID NO: 553980 - protein, 15 aa, Homo sapiens
  CDR3 for beta chain variable domain of TCR clone 276990 (TRBV6-1, TRBJ2-7)
CASSDWDKPNYDQYF

SEQ ID NO: 553981 - protein, 14 aa, Homo sapiens
  CDR3 for alpha chain variable domain of TCR clone 276991 (TRAV26-1, TRAJ34)
CIVRVPVGYDKLIF

SEQ ID NO: 553982 - protein, 17 aa, Homo sapiens
  CDR3 for beta chain variable domain of TCR clone 276991 (TRBV7-8, TRBJ2-6)
CASSAGTGGAGANVLTF

SEQ ID NO: 553983 - protein, 14 aa, Homo sapiens
  CDR3 for alpha chain variable domain of TCR clone 276992 (TRAV26-1, TRAJ34)
CIVRVAYNSDKLIF

SEQ ID NO: 553984 - protein, 15 aa, Homo sapiens
  CDR3 for beta chain variable domain of TCR clone 276992 (TRBV20-1, TRBJ2-7)
CSARVPAAYFYERYF

SEQ ID NO: 553985 - protein, 13 aa, Homo sapiens
  CDR3 for alpha chain variable domain of TCR clone 276993 (TRAV17, TRAJ34)
CATVPYNTDKPIF

SEQ ID NO: 553986 - protein, 14 aa, Homo sapiens
  CDR3 for beta chain variable domain of TCR clone 276993 (TRBV9, TRBJ2-3)
CASSAGGGPDTQYF

SEQ ID NO: 553987 - protein, 14 aa, Homo sapiens
  CDR3 for alpha chain variable domain of TCR clone 276994 (TRAV12-1, TRAJ15)
CVVNRNQAGTALIF

SEQ ID NO: 553988 - protein, 14 aa, Homo sapiens
  CDR3 for beta chain variable domain of TCR clone 276994 (TRBV19, TRBJ2-1)
CASPTFVLSGEQFF

SEQ ID NO: 553989 - protein, 14 aa, Homo sapiens
  CDR3 for alpha chain variable domain of TCR clone 276995 (TRAV14/DV4, TRAJ58)
FAMMKETSGSRLTF

SEQ ID NO: 553990 - protein, 12 aa, Homo sapiens
  CDR3 for beta chain variable domain of TCR clone 276995 (TRBV12-4, TRBJ2-1)
CASTYVLNEQFF

SEQ ID NO: 553991 - protein, 14 aa, Homo sapiens
  CDR3 for alpha chain variable domain of TCR clone 276996 (TRAV4, TRAJ15)
CLVGDPQAGTALIF

SEQ ID NO: 553992 - protein, 15 aa, Homo sapiens
  CDR3 for beta chain variable domain of TCR clone 276996 (TRBV12-4, TRBJ2-5)
CASSPPTGLQETQYF

SEQ ID NO: 553993 - protein, 16 aa, Homo sapiens
  CDR3 for alpha chain variable domain of TCR clone 276997 (TRAV30, TRAJ24)
CGTEIVDADSWGKFQF

SEQ ID NO: 553994 - protein, 14 aa, Homo sapiens
  CDR3 for beta chain variable domain of TCR clone 276997 (TRBV4-1, TRBJ2-2)
CASSQAVNTGELFF

SEQ ID NO: 553995 - protein, 16 aa, Homo sapiens
  CDR3 for alpha chain variable domain of TCR clone 276998 (TRAV27, TRAJ52)
CAGAGAGGTSYGKLRF

SEQ ID NO: 553996 - protein, 17 aa, Homo sapiens
  CDR3 for beta chain variable domain of TCR clone 276998 (TRBV24-1, TRBJ2-3)
CATSDLPSGEDTDTQYF

SEQ ID NO: 553997 - protein, 15 aa, Homo sapiens
  CDR3 for alpha chain variable domain of TCR clone 276999 (TRAV26-1, TRAJ44)
CIVRANTGTASKLTF

SEQ ID NO: 553998 - protein, 18 aa, Homo sapiens
  CDR3 for beta chain variable domain of TCR clone 276999 (TRBV20-1, TRBJ2-3)
CSASGLAGGPGTTDTQYF

SEQ ID NO: 553999 - protein, 11 aa, Homo sapiens
  CDR3 for alpha chain variable domain of TCR clone 277000 (TRAV17, TRAJ9)
CATTGDFKTIF

SEQ ID NO: 554000 - protein, 14 aa, Homo sapiens
  CDR3 for beta chain variable domain of TCR clone 277000 (TRBV7-9, TRBJ2-2)
CASSGLADTGELFF

SEQ ID NO: 554001 - protein, 12 aa, Homo sapiens
  CDR3 for alpha chain variable domain of TCR clone 277001 (TRAV21, TRAJ23)
CAVGPQGGKLIF

SEQ ID NO: 554002 - protein, 12 aa, Homo sapiens
  CDR3 for beta chain variable domain of TCR clone 277001 (TRBV7-9, TRBJ1-4)
CASSTDREKLFF

SEQ ID NO: 554003 - protein, 15 aa, Homo sapiens
  CDR3 for alpha chain variable domain of TCR clone 277002 (TRAV3, TRAJ3)
CCERPRYSSASKIIF

SEQ ID NO: 554004 - protein, 12 aa, Homo sapiens
  CDR3 for beta chain variable domain of TCR clone 277002 (TRBV7-9, TRBJ2-7)
CASSIKREEQYF

SEQ ID NO: 554005 - protein, 18 aa, Homo sapiens
  CDR3 for alpha chain variable domain of TCR clone 277003 (TRAV21, TRAJ52)
CAVRPSPAGGTSYVKLTF

SEQ ID NO: 554006 - protein, 13 aa, Homo sapiens
  CDR3 for beta chain variable domain of TCR clone 277003 (TRBV7-3, TRBJ1-1)
CASSHDWGAEAFF

SEQ ID NO: 554007 - protein, 12 aa, Homo sapiens
  CDR3 for alpha chain variable domain of TCR clone 277004 (TRAV1-1, TRAJ33)
CAASDSNYQLIW

SEQ ID NO: 554008 - protein, 18 aa, Homo sapiens
  CDR3 for beta chain variable domain of TCR clone 277004 (TRBV20-1, TRBJ2-2)
CSARVHTARPSGTGELFF

SEQ ID NO: 554009 - protein, 15 aa, Homo sapiens
  CDR3 for alpha chain variable domain of TCR clone 277005 (TRAV23/DV6, TRAJ13)
CAAWPGGGGYQTVPF

SEQ ID NO: 554010 - protein, 17 aa, Homo sapiens
  CDR3 for beta chain variable domain of TCR clone 277005 (TRBV19, TRBJ2-7)
CASSISFYDSYPYEQYF

SEQ ID NO: 554011 - protein, 14 aa, Homo sapiens
  CDR3 for alpha chain variable domain of TCR clone 277006 (TRAV12-2, TRAJ5)
CAVSRSTGRRALTF

SEQ ID NO: 554012 - protein, 15 aa, Homo sapiens
  CDR3 for beta chain variable domain of TCR clone 277006 (TRBV19, TRBJ2-4)
CASRGPRRGENIQYF

SEQ ID NO: 554013 - protein, 15 aa, Homo sapiens
  CDR3 for alpha chain variable domain of TCR clone 277007 (TRAV8-3, TRAJ27)
CAVGPSKTNAGKSTV

SEQ ID NO: 554014 - protein, 14 aa, Homo sapiens
  CDR3 for beta chain variable domain of TCR clone 277007 (TRBV7-2, TRBJ2-7)
CASRSQGAAYEQYF

SEQ ID NO: 554015 - protein, 16 aa, Homo sapiens
  CDR3 for alpha chain variable domain of TCR clone 277008 (TRAV21, TRAJ37)
CAVRTAGSSNTGKLIF

SEQ ID NO: 554016 - protein, 13 aa, Homo sapiens
  CDR3 for beta chain variable domain of TCR clone 277008 (TRBV7-9, TRBJ2-1)
SSSDNSGYNEQFF

SEQ ID NO: 554017 - protein, 15 aa, Homo sapiens
  CDR3 for alpha chain variable domain of TCR clone 277009 (TRAV26-1, TRAJ29)
CIVRVTNSGNTPLVF

SEQ ID NO: 554018 - protein, 17 aa, Homo sapiens
  CDR3 for beta chain variable domain of TCR clone 277009 (TRBV20-1, TRBJ2-1)
CSASSSGLAGSYNEQFF

SEQ ID NO: 554019 - protein, 14 aa, Homo sapiens
  CDR3 for alpha chain variable domain of TCR clone 277010 (TRAV13-1, TRAJ44)
CSKEGGGTASKLTF

SEQ ID NO: 554020 - protein, 14 aa, Homo sapiens
  CDR3 for beta chain variable domain of TCR clone 277010 (TRBV7-2, TRBJ2-5)
CASSPRGSSETQYF

SEQ ID NO: 554021 - protein, 12 aa, Homo sapiens
  CDR3 for alpha chain variable domain of TCR clone 277011 (TRAV1-1, TRAJ39)
CAVPVVGNMFTF

SEQ ID NO: 554022 - protein, 13 aa, Homo sapiens
  CDR3 for beta chain variable domain of TCR clone 277011 (TRBV7-9, TRBJ2-1)
CASSSSNFNEQFF

SEQ ID NO: 554023 - protein, 15 aa, Homo sapiens
  CDR3 for alpha chain variable domain of TCR clone 277012 (TRAV12-2, TRAJ53)
CAVNGGGGSNYTLTF

SEQ ID NO: 554024 - protein, 17 aa, Homo sapiens
  CDR3 for beta chain variable domain of TCR clone 277012 (TRBV7-3, TRBJ2-3)
CASSLRKRMRGADTQYF

SEQ ID NO: 554025 - protein, 14 aa, Homo sapiens
  CDR3 for alpha chain variable domain of TCR clone 277013 (TRAV13-1, TRAJ26)
CAAPKGPDGQNFVF

SEQ ID NO: 554026 - protein, 15 aa, Homo sapiens
  CDR3 for beta chain variable domain of TCR clone 277013 (TRBV28, TRBJ2-5)
CASSFRQGALDTQYF

SEQ ID NO: 554027 - protein, 12 aa, Homo sapiens
  CDR3 for alpha chain variable domain of TCR clone 277014 (TRAV13-1, TRAJ27)
CAAHTTAGKSTF

SEQ ID NO: 554028 - protein, 15 aa, Homo sapiens
  CDR3 for beta chain variable domain of TCR clone 277014 (TRBV7-9, TRBJ1-6)
CASSSPGRGNSPLHF

SEQ ID NO: 554029 - protein, 11 aa, Homo sapiens
  CDR3 for alpha chain variable domain of TCR clone 277015 (TRAV2, TRAJ20)
CAVGGDYKLSF

SEQ ID NO: 554030 - protein, 17 aa, Homo sapiens
  CDR3 for beta chain variable domain of TCR clone 277015 (TRBV28, TRBJ2-5)
CASSRQGGLAGAETQYF

SEQ ID NO: 554031 - protein, 11 aa, Homo sapiens
  CDR3 for alpha chain variable domain of TCR clone 277016 (TRAV3, TRAJ21)
CAVGNFNKFYF

SEQ ID NO: 554032 - protein, 12 aa, Homo sapiens
  CDR3 for beta chain variable domain of TCR clone 277016 (TRBV20-1, TRBJ2-7)
CSAITPTKEQYF

SEQ ID NO: 554033 - protein, 12 aa, Homo sapiens
  CDR3 for alpha chain variable domain of TCR clone 277017 (TRAV13-2, TRAJ23)
CAERHRGGKLIF

SEQ ID NO: 554034 - protein, 12 aa, Homo sapiens
  CDR3 for beta chain variable domain of TCR clone 277017 (TRBV12-4, TRBJ1-1)
CASSLAGLEAFF

SEQ ID NO: 554035 - protein, 14 aa, Homo sapiens
  CDR3 for alpha chain variable domain of TCR clone 277018 (TRAV25, TRAJ35)
CARRMEGFGNVLHC

SEQ ID NO: 554036 - protein, 15 aa, Homo sapiens
  CDR3 for beta chain variable domain of TCR clone 277018 (TRBV11-2, TRBJ1-2)
RASSLEGVQRNGYTF

SEQ ID NO: 554037 - protein, 11 aa, Homo sapiens
  CDR3 for alpha chain variable domain of TCR clone 277019 (TRAV35, TRAJ57)
GPQGGSEKLVF

SEQ ID NO: 554038 - protein, 16 aa, Homo sapiens
  CDR3 for beta chain variable domain of TCR clone 277019 (TRBV7-2, TRBJ1-5)
CASSWTGGPGNQTQHF

SEQ ID NO: 554039 - protein, 15 aa, Homo sapiens
  CDR3 for alpha chain variable domain of TCR clone 277020 (TRAV12-1, TRAJ45)
CVVLSGGGGADGLTF

SEQ ID NO: 554040 - protein, 16 aa, Homo sapiens
  CDR3 for beta chain variable domain of TCR clone 277020 (TRBV6-5, TRBJ2-1)
CASSETLAGHYNEQFL

SEQ ID NO: 554041 - protein, 14 aa, Homo sapiens
  CDR3 for alpha chain variable domain of TCR clone 277021 (TRAV35, TRAJ53)
CAGNRGGSNYKLTF

SEQ ID NO: 554042 - protein, 11 aa, Homo sapiens
  CDR3 for beta chain variable domain of TCR clone 277021 (TRBV4-1, TRBJ1-4)
CASKEDEKLFF

SEQ ID NO: 554043 - protein, 14 aa, Homo sapiens
  CDR3 for alpha chain variable domain of TCR clone 277022 (TRAV9-2, TRAJ39)
CALYIYNAGNMLTF

SEQ ID NO: 554044 - protein, 11 aa, Homo sapiens
  CDR3 for beta chain variable domain of TCR clone 277022 (TRBV20-1, TRBJ2-7)
CSARTSYEQYF

SEQ ID NO: 554045 - protein, 15 aa, Homo sapiens
  CDR3 for alpha chain variable domain of TCR clone 277023 (TRAV8-3, TRAJ27)
CAVGPSKTNAGKSTF

SEQ ID NO: 554046 - protein, 14 aa, Homo sapiens
  CDR3 for beta chain variable domain of TCR clone 277023 (TRBV28, TRBJ1-2)
CASRIQGANYGYTL

SEQ ID NO: 554047 - protein, 14 aa, Homo sapiens
  CDR3 for alpha chain variable domain of TCR clone 277024 (TRAV8-3, TRAJ9)
CAVVYNTGGFKTIF

SEQ ID NO: 554048 - protein, 16 aa, Homo sapiens
  CDR3 for beta chain variable domain of TCR clone 277024 (TRBV2, TRBJ2-7)
CASSEPWTGPSYEQYF

SEQ ID NO: 554049 - protein, 15 aa, Homo sapiens
  CDR3 for alpha chain variable domain of TCR clone 277025 (TRAV38-2/DV8, TRAJ28)
CAYRSRGAGSYQLTL

SEQ ID NO: 554050 - protein, 14 aa, Homo sapiens
  CDR3 for beta chain variable domain of TCR clone 277025 (TRBV7-9, TRBJ2-7)
CASSLSQGSYEQYF

SEQ ID NO: 554051 - protein, 14 aa, Homo sapiens
  CDR3 for alpha chain variable domain of TCR clone 277026 (TRAV4, TRAJ26)
CLVGPHDYGQNVVF

SEQ ID NO: 554052 - protein, 17 aa, Homo sapiens
  CDR3 for beta chain variable domain of TCR clone 277026 (TRBV24-1, TRBJ2-1)
CATSDVSTSGTYNEQFF

SEQ ID NO: 554053 - protein, 13 aa, Homo sapiens
  CDR3 for alpha chain variable domain of TCR clone 277027 (TRAV39, TRAJ58)
CAGEETSGSRLTF

SEQ ID NO: 554054 - protein, 13 aa, Homo sapiens
  CDR3 for beta chain variable domain of TCR clone 277027 (TRBV7-9, TRBJ2-1)
CASSLDVGNEQFF

SEQ ID NO: 554055 - protein, 14 aa, Homo sapiens
  CDR3 for alpha chain variable domain of TCR clone 277028 (TRAV17, TRAJ57)
CATDASGGSEKLVF

SEQ ID NO: 554056 - protein, 14 aa, Homo sapiens
  CDR3 for beta chain variable domain of TCR clone 277028 (TRBV4-1, TRBJ2-2)
CASSQAVNTGELFF

SEQ ID NO: 554057 - protein, 15 aa, Homo sapiens
  CDR3 for alpha chain variable domain of TCR clone 277029 (TRAV12-1, TRAJ47)
CVVTNRLKGGNKLVF

SEQ ID NO: 554058 - protein, 19 aa, Homo sapiens
  CDR3 for beta chain variable domain of TCR clone 277029 (TRBV20-1, TRBJ2-5)
CRARPQGLAGTSKSGAQYF

SEQ ID NO: 554059 - protein, 13 aa, Homo sapiens
  CDR3 for alpha chain variable domain of TCR clone 277030 (TRAV21, TRAJ20)
CAVGLRVDYKLSF

SEQ ID NO: 554060 - protein, 16 aa, Homo sapiens
  CDR3 for beta chain variable domain of TCR clone 277030 (TRBV19, TRBJ2-1)
CANSKAGPSSYNEQFF

SEQ ID NO: 554061 - protein, 12 aa, Homo sapiens
  CDR3 for alpha chain variable domain of TCR clone 277031 (TRAV4, TRAJ26)
CLVGDYGQNFVF

SEQ ID NO: 554062 - protein, 15 aa, Homo sapiens
  CDR3 for beta chain variable domain of TCR clone 277031 (TRBV20-1, TRBJ2-5)
CSAEGTGGLQETQYF

SEQ ID NO: 554063 - protein, 10 aa, Homo sapiens
  CDR3 for alpha chain variable domain of TCR clone 277032 (TRAV13-1, TRAJ10)
CAAFGTNSPL

SEQ ID NO: 554064 - protein, 13 aa, Homo sapiens
  CDR3 for beta chain variable domain of TCR clone 277032 (TRBV7-9, TRBJ1-2)
CASSLKQNYGYTF

SEQ ID NO: 554065 - protein, 13 aa, Homo sapiens
  CDR3 for alpha chain variable domain of TCR clone 277033 (TRAV27, TRAJ8)
CAGGPTGFQKLVF

SEQ ID NO: 554066 - protein, 15 aa, Homo sapiens
  CDR3 for beta chain variable domain of TCR clone 277033 (TRBV6-1, TRBJ2-7)
CASSESMGDCYEQYF

SEQ ID NO: 554067 - protein, 13 aa, Homo sapiens
  CDR3 for alpha chain variable domain of TCR clone 277034 (TRAV13-2, TRAJ13)
CAERPGGYQKATF

SEQ ID NO: 554068 - protein, 16 aa, Homo sapiens
  CDR3 for beta chain variable domain of TCR clone 277034 (TRBV18, TRBJ2-5)
CASSPPSSGGAKTQYF

SEQ ID NO: 554069 - protein, 14 aa, Homo sapiens
  CDR3 for alpha chain variable domain of TCR clone 277035 (TRAV26-1, TRAJ34)
CIVRVAYNTDKLIF

SEQ ID NO: 554070 - protein, 14 aa, Homo sapiens
  CDR3 for beta chain variable domain of TCR clone 277035 (TRBV7-9, TRBJ1-4)
CRQPDRGFNEKLFF

SEQ ID NO: 554071 - protein, 14 aa, Homo sapiens
  CDR3 for alpha chain variable domain of TCR clone 277036 (TRAV1-2, TRAJ8)
CAAREDTGFQKLVF

SEQ ID NO: 554072 - protein, 14 aa, Homo sapiens
  CDR3 for beta chain variable domain of TCR clone 277036 (TRBV12-5, TRBJ2-5)
CASGSRTHQETQYF

SEQ ID NO: 554073 - protein, 14 aa, Homo sapiens
  CDR3 for alpha chain variable domain of TCR clone 277037 (TRAV1-2, TRAJ16)
CAVNRFSVGQKLLF

SEQ ID NO: 554074 - protein, 13 aa, Homo sapiens
  CDR3 for beta chain variable domain of TCR clone 277037 (TRBV20-1, TRBJ2-2)
CSALSGGAGELFF

SEQ ID NO: 554075 - protein, 14 aa, Homo sapiens
  CDR3 for alpha chain variable domain of TCR clone 277038 (TRAV6, TRAJ6)
CALPTSGGSYIPTF

SEQ ID NO: 554076 - protein, 17 aa, Homo sapiens
  CDR3 for beta chain variable domain of TCR clone 277038 (TRBV5-1, TRBJ2-5)
CASSPAALGQNQETQYF

SEQ ID NO: 554077 - protein, 11 aa, Homo sapiens
  CDR3 for alpha chain variable domain of TCR clone 277039 (TRAV12-1, TRAJ16)
CGDPDVQKLLF

SEQ ID NO: 554078 - protein, 11 aa, Homo sapiens
  CDR3 for beta chain variable domain of TCR clone 277039 (TRBV29-1, TRBJ2-5)
CSEDRTGTQYF

SEQ ID NO: 554079 - protein, 14 aa, Homo sapiens
  CDR3 for alpha chain variable domain of TCR clone 277040 (TRAV1-2, TRAJ16)
CAVNRFSDGQKLLF

SEQ ID NO: 554080 - protein, 17 aa, Homo sapiens
  CDR3 for beta chain variable domain of TCR clone 277040 (TRBV7-3, TRBJ2-5)
CASSLGSGRSVSETQYF

SEQ ID NO: 554081 - protein, 11 aa, Homo sapiens
  CDR3 for alpha chain variable domain of TCR clone 277041 (TRAV12-1, TRAJ43)
CVEYDNNDMRF

SEQ ID NO: 554082 - protein, 13 aa, Homo sapiens
  CDR3 for beta chain variable domain of TCR clone 277041 (TRBV19, TRBJ1-2)
CASSQGQVYGYTF

SEQ ID NO: 554083 - protein, 13 aa, Homo sapiens
  CDR3 for alpha chain variable domain of TCR clone 277042 (TRAV21, TRAJ20)
SAVGLRVDYKLSF

SEQ ID NO: 554084 - protein, 15 aa, Homo sapiens
  CDR3 for beta chain variable domain of TCR clone 277042 (TRBV29-1, TRBJ2-1)
CSVPTGLALYNEQFF

SEQ ID NO: 554085 - protein, 16 aa, Homo sapiens
  CDR3 for alpha chain variable domain of TCR clone 277043 (TRAV12-2, TRAJ6)
YASPLAGSGGSYIPTF

SEQ ID NO: 554086 - protein, 10 aa, Homo sapiens
  CDR3 for beta chain variable domain of TCR clone 277043 (TRBV28, TRBJ1-2)
CASSSDRAVF

SEQ ID NO: 554087 - protein, 15 aa, Homo sapiens
  CDR3 for alpha chain variable domain of TCR clone 277044 (TRAV4, TRAJ26)
CLVGDMNNYGQNFVF

SEQ ID NO: 554088 - protein, 16 aa, Homo sapiens
  CDR3 for beta chain variable domain of TCR clone 277044 (TRBV28, TRBJ1-4)
CASSSRTGAANEKLFC

SEQ ID NO: 554089 - protein, 11 aa, Homo sapiens
  CDR3 for alpha chain variable domain of TCR clone 277045 (TRAV1-1, TRAJ16)
CAAGDGQKLLF

SEQ ID NO: 554090 - protein, 16 aa, Homo sapiens
  CDR3 for beta chain variable domain of TCR clone 277045 (TRBV7-3, TRBJ2-2)
CAGSLKRGTLSGELFF

SEQ ID NO: 554091 - protein, 16 aa, Homo sapiens
  CDR3 for alpha chain variable domain of TCR clone 277046 (TRAV13-2, TRAJ53)
CAENANSGGSNYKLTF

SEQ ID NO: 554092 - protein, 19 aa, Homo sapiens
  CDR3 for beta chain variable domain of TCR clone 277046 (TRBV28, TRBJ2-7)
CASSYSGTSRLGWVYKQYF

SEQ ID NO: 554093 - protein, 15 aa, Homo sapiens
  CDR3 for alpha chain variable domain of TCR clone 277047 (TRAV20, TRAJ28)
CAVQYSWAGSYQLTF

SEQ ID NO: 554094 - protein, 11 aa, Homo sapiens
  CDR3 for beta chain variable domain of TCR clone 277047 (TRBV24-1, TRBJ2-3)
CATASTDTQYF

SEQ ID NO: 554095 - protein, 14 aa, Homo sapiens
  CDR3 for alpha chain variable domain of TCR clone 277048 (TRAV12-3, TRAJ10)
SHLPLTGGGNKLTF

SEQ ID NO: 554096 - protein, 16 aa, Homo sapiens
  CDR3 for beta chain variable domain of TCR clone 277048 (TRBV11-2, TRBJ2-7)
CASSPLAGGPRYEQYF

SEQ ID NO: 554097 - protein, 17 aa, Homo sapiens
  CDR3 for alpha chain variable domain of TCR clone 277049 (TRAV3, TRAJ6)
CAVRDCPRAGGSYIPPF

SEQ ID NO: 554098 - protein, 20 aa, Homo sapiens
  CDR3 for beta chain variable domain of TCR clone 277049 (TRBV28, TRBJ2-1)
CASTPIGRSPGLAGGNEQFF

SEQ ID NO: 554099 - protein, 14 aa, Homo sapiens
  CDR3 for alpha chain variable domain of TCR clone 277050 (TRAV17, TRAJ39)
CATDTVRAGNMLTF

SEQ ID NO: 554100 - protein, 16 aa, Homo sapiens
  CDR3 for beta chain variable domain of TCR clone 277050 (TRBV6-5, TRBJ2-1)
CASSETLAGHYNEQFF

SEQ ID NO: 554101 - protein, 14 aa, Homo sapiens
  CDR3 for alpha chain variable domain of TCR clone 277051 (TRAV38-1, TRAJ29)
CAFITPSGNTPLVF

SEQ ID NO: 554102 - protein, 14 aa, Homo sapiens
  CDR3 for beta chain variable domain of TCR clone 277051 (TRBV11-2, TRBJ2-7)
CASSLGAGAYEQYF

SEQ ID NO: 554103 - protein, 14 aa, Homo sapiens
  CDR3 for alpha chain variable domain of TCR clone 277052 (TRAV12-2, TRAJ6)
CASKWGGGRYIPTF

SEQ ID NO: 554104 - protein, 13 aa, Homo sapiens
  CDR3 for beta chain variable domain of TCR clone 277052 (TRBV2, TRBJ1-1)
CASSEGGNNEAFF

SEQ ID NO: 554105 - protein, 13 aa, Homo sapiens
  CDR3 for alpha chain variable domain of TCR clone 277053 (TRAV12-2, TRAJ53)
CAGVGGSNYKLTF

SEQ ID NO: 554106 - protein, 14 aa, Homo sapiens
  CDR3 for beta chain variable domain of TCR clone 277053 (TRBV7-2, TRBJ2-7)
CASRSQGAAYEQYF

SEQ ID NO: 554107 - protein, 13 aa, Homo sapiens
  CDR3 for alpha chain variable domain of TCR clone 277054 (TRAV12-1, TRAJ39)
CVVPQRAGNMLTF

SEQ ID NO: 554108 - protein, 16 aa, Homo sapiens
  CDR3 for beta chain variable domain of TCR clone 277054 (TRBV19, TRBJ2-1)
CASSKAGPSSYNEQFF

SEQ ID NO: 554109 - protein, 12 aa, Homo sapiens
  CDR3 for alpha chain variable domain of TCR clone 277055 (TRAV12-2, TRAJ7)
CAVMRGNNRLAF

SEQ ID NO: 554110 - protein, 14 aa, Homo sapiens
  CDR3 for beta chain variable domain of TCR clone 277055 (TRBV12-4, TRBJ2-5)
CASSFGASGGTQYF

SEQ ID NO: 554111 - protein, 15 aa, Homo sapiens
  CDR3 for alpha chain variable domain of TCR clone 277056 (TRAV20, TRAJ53)
CAVQAIGGSNYKLTF

SEQ ID NO: 554112 - protein, 14 aa, Homo sapiens
  CDR3 for beta chain variable domain of TCR clone 277056 (TRBV7-2, TRBJ2-3)
CASSLVGRSRYAVF

SEQ ID NO: 554113 - protein, 17 aa, Homo sapiens
  CDR3 for alpha chain variable domain of TCR clone 277057 (TRAV13-1, )
CAANIQNPDPAVYQLRD

SEQ ID NO: 554114 - protein, 14 aa, Homo sapiens
  CDR3 for beta chain variable domain of TCR clone 277057 (TRBV19, TRBJ2-7)
CASSIGPNTYEQYF

SEQ ID NO: 554115 - protein, 15 aa, Homo sapiens
  CDR3 for alpha chain variable domain of TCR clone 277058 (TRAV34, TRAJ38)
CGADFTPGNNRKLIW

SEQ ID NO: 554116 - protein, 16 aa, Homo sapiens
  CDR3 for beta chain variable domain of TCR clone 277058 (TRBV12-5, TRBJ2-5)
YASGPRTSGNQETQYF

SEQ ID NO: 554117 - protein, 13 aa, Homo sapiens
  CDR3 for alpha chain variable domain of TCR clone 277059 (TRAV4, TRAJ22)
CLGGSGSARQLTF

SEQ ID NO: 554118 - protein, 15 aa, Homo sapiens
  CDR3 for beta chain variable domain of TCR clone 277059 (TRBV7-9, TRBJ1-6)
CASSSPGRGNSPLHF

SEQ ID NO: 554119 - protein, 22 aa, Homo sapiens
  CDR3 for alpha chain variable domain of TCR clone 277060 (TRAV8-3, TRAJ32)
CAVEVVLQTSSSLELALCLLSS

SEQ ID NO: 554120 - protein, 14 aa, Homo sapiens
  CDR3 for beta chain variable domain of TCR clone 277060 (TRBV7-8, TRBJ2-3)
CASSLEAGTDTQYF

SEQ ID NO: 554121 - protein, 22 aa, Homo sapiens
  CDR3 for alpha chain variable domain of TCR clone 277061 (TRAV26-1, TRAJ42)
CIVRPIMEEAKEIPSLEKALNS

SEQ ID NO: 554122 - protein, 16 aa, Homo sapiens
  CDR3 for beta chain variable domain of TCR clone 277061 (TRBV7-3, TRBJ2-2)
CASSLKRGTLSGELFF

SEQ ID NO: 554123 - protein, 15 aa, Homo sapiens
  CDR3 for alpha chain variable domain of TCR clone 277062 (TRAV26-1, TRAJ29)
CIVRVEGSGNPPLVF

SEQ ID NO: 554124 - protein, 15 aa, Homo sapiens
  CDR3 for beta chain variable domain of TCR clone 277062 (TRBV28, TRBJ2-5)
CASSPGQGSIETQYF

SEQ ID NO: 554125 - protein, 16 aa, Homo sapiens
  CDR3 for alpha chain variable domain of TCR clone 277063 (TRAV30, TRAJ24)
CGTEIVDADSWGNSSL

SEQ ID NO: 554126 - protein, 16 aa, Homo sapiens
  CDR3 for beta chain variable domain of TCR clone 277063 (TRBV7-9, TRBJ2-1)
CASSLVSGPSYNEQFF

SEQ ID NO: 554127 - protein, 14 aa, Homo sapiens
  CDR3 for alpha chain variable domain of TCR clone 277064 (TRAV41, TRAJ48)
CAVISNFGNEKLTF

SEQ ID NO: 554128 - protein, 17 aa, Homo sapiens
  CDR3 for beta chain variable domain of TCR clone 277064 (TRBV11-2, TRBJ2-1)
CASSLYPPGVEYKEQFF

SEQ ID NO: 554129 - protein, 13 aa, Homo sapiens
  CDR3 for alpha chain variable domain of TCR clone 277065 (TRAV13-2, TRAJ13)
CAERPGGYQKVTF

SEQ ID NO: 554130 - protein, 16 aa, Homo sapiens
  CDR3 for beta chain variable domain of TCR clone 277065 (TRBV18, TRBJ2-5)
RASSPPSSGGAKTQYF

SEQ ID NO: 554131 - protein, 16 aa, Homo sapiens
  CDR3 for alpha chain variable domain of TCR clone 277066 (TRAV12-2, TRAJ6)
CAAPLAGSGGSYIPTF

SEQ ID NO: 554132 - protein, 11 aa, Homo sapiens
  CDR3 for beta chain variable domain of TCR clone 277066 (TRBV11-2, TRBJ2-2)
CASSLPGELFF

SEQ ID NO: 554133 - protein, 14 aa, Homo sapiens
  CDR3 for alpha chain variable domain of TCR clone 277067 (TRAV1-2, TRAJ8)
CAVREDTGFQKLVF

SEQ ID NO: 554134 - protein, 14 aa, Homo sapiens
  CDR3 for beta chain variable domain of TCR clone 277067 (TRBV7-9, TRBJ1-1)
CASSFGGANTEAFF

SEQ ID NO: 554135 - protein, 15 aa, Homo sapiens
  CDR3 for alpha chain variable domain of TCR clone 277068 (TRAV26-1, TRAJ44)
CIARVPFGTASKLTF

SEQ ID NO: 554136 - protein, 11 aa, Homo sapiens
  CDR3 for beta chain variable domain of TCR clone 277068 (TRBV11-2, TRBJ2-2)
CASSLPGELFF

SEQ ID NO: 554137 - protein, 14 aa, Homo sapiens
  CDR3 for alpha chain variable domain of TCR clone 277069 (TRAV1-2, TRAJ16)
CAVNRFSDGQKLLF

SEQ ID NO: 554138 - protein, 15 aa, Homo sapiens
  CDR3 for beta chain variable domain of TCR clone 277069 (TRBV19, TRBJ1-5)
WASSIVWADNQPQHF

SEQ ID NO: 554139 - protein, 14 aa, Homo sapiens
  CDR3 for alpha chain variable domain of TCR clone 277070 (TRAV12-3, TRAJ10)
SHLPLTGGGNKLTF

SEQ ID NO: 554140 - protein, 12 aa, Homo sapiens
  CDR3 for beta chain variable domain of TCR clone 277070 (TRBV5-1, TRBJ2-5)
CASSFSWETQYF

SEQ ID NO: 554141 - protein, 16 aa, Homo sapiens
  CDR3 for alpha chain variable domain of TCR clone 277071 (TRAV30, TRAJ24)
CGTEIVDADSWGKFQF

SEQ ID NO: 554142 - protein, 13 aa, Homo sapiens
  CDR3 for beta chain variable domain of TCR clone 277071 (TRBV18, TRBJ1-2)
CASSAPATEGYTF

SEQ ID NO: 554143 - protein, 16 aa, Homo sapiens
  CDR3 for alpha chain variable domain of TCR clone 277072 (TRAV3, TRAJ37)
CAVRPHGSGNTAKLIF

SEQ ID NO: 554144 - protein, 13 aa, Homo sapiens
  CDR3 for beta chain variable domain of TCR clone 277072 (TRBV9, TRBJ1-2)
CASSVEEKVSPYG

SEQ ID NO: 554145 - protein, 17 aa, Homo sapiens
  CDR3 for alpha chain variable domain of TCR clone 277073 (TRAV2, TRAJ22)
ILQVREADAADQRQLTF

SEQ ID NO: 554146 - protein, 16 aa, Homo sapiens
  CDR3 for beta chain variable domain of TCR clone 277073 (TRBV2, TRBJ2-5)
CASSETQGVGEETQYF

SEQ ID NO: 554147 - protein, 13 aa, Homo sapiens
  CDR3 for alpha chain variable domain of TCR clone 277074 (TRAV8-6, TRAJ49)
CAVIKNTGNQFYF

SEQ ID NO: 554148 - protein, 12 aa, Homo sapiens
  CDR3 for beta chain variable domain of TCR clone 277074 (TRBV12-4, TRBJ2-7)
CASSLGGYEQYF

SEQ ID NO: 554149 - protein, 11 aa, Homo sapiens
  CDR3 for alpha chain variable domain of TCR clone 277075 (TRAV3, TRAJ21)
CAVGNFTKFYF

SEQ ID NO: 554150 - protein, 13 aa, Homo sapiens
  CDR3 for beta chain variable domain of TCR clone 277075 (TRBV7-9, TRBJ2-7)
CASSFAGAYEQYF

SEQ ID NO: 554151 - protein, 13 aa, Homo sapiens
  CDR3 for alpha chain variable domain of TCR clone 277076 (TRAV12-1, TRAJ26)
CVARRNYGQNFVF

SEQ ID NO: 554152 - protein, 14 aa, Homo sapiens
  CDR3 for beta chain variable domain of TCR clone 277076 (TRBV4-2, TRBJ2-1)
CASGLDRAYNEQFF

SEQ ID NO: 554153 - protein, 13 aa, Homo sapiens
  CDR3 for alpha chain variable domain of TCR clone 277077 (TRAV8-6, TRAJ41)
CAVSENSGYALNF

SEQ ID NO: 554154 - protein, 11 aa, Homo sapiens
  CDR3 for beta chain variable domain of TCR clone 277077 (TRBV11-2, TRBJ2-2)
CASSLPGELFF

SEQ ID NO: 554155 - protein, 14 aa, Homo sapiens
  CDR3 for alpha chain variable domain of TCR clone 277078 (TRAV16, TRAJ39)
CALSKNNAVNMLTF

SEQ ID NO: 554156 - protein, 17 aa, Homo sapiens
  CDR3 for beta chain variable domain of TCR clone 277078 (TRBV23-1, TRBJ1-2)
CASSNTGGGLLWLHLRF

SEQ ID NO: 554157 - protein, 20 aa, Homo sapiens
  CDR3 for alpha chain variable domain of TCR clone 277079 (TRAV26-1, TRAJ42)
CCVLLHRQTSYGGSQGKLIF

SEQ ID NO: 554158 - protein, 16 aa, Homo sapiens
  CDR3 for beta chain variable domain of TCR clone 277079 (TRBV7-3, TRBJ2-2)
CASSLKRGTLSGELFF

SEQ ID NO: 554159 - protein, 21 aa, Homo sapiens
  CDR3 for alpha chain variable domain of TCR clone 277080 (TRAV1-1, TRAJ6)
CLLLLRCERLERTGGSYIPTF

SEQ ID NO: 554160 - protein, 14 aa, Homo sapiens
  CDR3 for beta chain variable domain of TCR clone 277080 (TRBV7-9, TRBJ2-5)
CASSLDTAQETQYF

SEQ ID NO: 554161 - protein, 14 aa, Homo sapiens
  CDR3 for alpha chain variable domain of TCR clone 277081 (TRAV3, TRAJ36)
CAVRDGTGANNLFF

SEQ ID NO: 554162 - protein, 16 aa, Homo sapiens
  CDR3 for beta chain variable domain of TCR clone 277081 (TRBV7-3, TRBJ2-5)
CASIQPGGSVEETQYF

SEQ ID NO: 554163 - protein, 11 aa, Homo sapiens
  CDR3 for alpha chain variable domain of TCR clone 277082 (TRAV1-2, TRAJ20)
CAVSNDYKISF

SEQ ID NO: 554164 - protein, 13 aa, Homo sapiens
  CDR3 for beta chain variable domain of TCR clone 277082 (TRBV7-9, TRBJ1-2)
CASSLKQNYGYTF

SEQ ID NO: 554165 - protein, 14 aa, Homo sapiens
  CDR3 for alpha chain variable domain of TCR clone 277083 (TRAV1-2, TRAJ8)
CAVREDTSFQKLVF

SEQ ID NO: 554166 - protein, 11 aa, Homo sapiens
  CDR3 for beta chain variable domain of TCR clone 277083 (TRBV11-3, TRBJ2-7)
CASSRTYEQYF

SEQ ID NO: 554167 - protein, 18 aa, Homo sapiens
  CDR3 for alpha chain variable domain of TCR clone 277084 (TRAV21, TRAJ52)
CAVRPSPAGGTSYGNLTF

SEQ ID NO: 554168 - protein, 12 aa, Homo sapiens
  CDR3 for beta chain variable domain of TCR clone 277084 (TRBV19, TRBJ2-1)
CASSRQGAEQFF

SEQ ID NO: 554169 - protein, 16 aa, Homo sapiens
  CDR3 for alpha chain variable domain of TCR clone 277085 (TRAV3, TRAJ10)
CAVRDMRAGGGNKLTF

SEQ ID NO: 554170 - protein, 16 aa, Homo sapiens
  CDR3 for beta chain variable domain of TCR clone 277085 (TRBV18, TRBJ1-5)
CASSPSTGNSNQPQHF

SEQ ID NO: 554171 - protein, 21 aa, Homo sapiens
  CDR3 for alpha chain variable domain of TCR clone 277086 (TRAV8-3, TRAJ32)
CAVEVVLQTSSSLELALCLSS

SEQ ID NO: 554172 - protein, 15 aa, Homo sapiens
  CDR3 for beta chain variable domain of TCR clone 277086 (TRBV7-2, TRBJ2-1)
CASSSRTSREDEQFF

SEQ ID NO: 554173 - protein, 16 aa, Homo sapiens
  CDR3 for alpha chain variable domain of TCR clone 277087 (TRAV16, TRAJ52)
CALSAAGGTSYGKLTF

SEQ ID NO: 554174 - protein, 11 aa, Homo sapiens
  CDR3 for beta chain variable domain of TCR clone 277087 (TRBV19, TRBJ1-1)
CASSIGSEAFF

SEQ ID NO: 554175 - protein, 13 aa, Homo sapiens
  CDR3 for alpha chain variable domain of TCR clone 277088 (TRAV27, TRAJ57)
CRSAQGGSEKLVF

SEQ ID NO: 554176 - protein, 14 aa, Homo sapiens
  CDR3 for beta chain variable domain of TCR clone 277088 (TRBV25-1, TRBJ1-1)
CASTHLGGNTEAFF

SEQ ID NO: 554177 - protein, 13 aa, Homo sapiens
  CDR3 for alpha chain variable domain of TCR clone 277089 (TRAV3, TRAJ21)
CAVREPDFNKFYF

SEQ ID NO: 554178 - protein, 15 aa, Homo sapiens
  CDR3 for beta chain variable domain of TCR clone 277089 (TRBV9, TRBJ2-1)
CISVPAVPLGNEQFF

SEQ ID NO: 554179 - protein, 14 aa, Homo sapiens
  CDR3 for alpha chain variable domain of TCR clone 277090 (TRAV4, TRAJ26)
CLVGPHNYGQNFVF

SEQ ID NO: 554180 - protein, 17 aa, Homo sapiens
  CDR3 for beta chain variable domain of TCR clone 277090 (TRBV24-1, TRBJ2-1)
CATSDVSTGGTYNEQFF

SEQ ID NO: 554181 - protein, 15 aa, Homo sapiens
  CDR3 for alpha chain variable domain of TCR clone 277091 (TRAV8-1, TRAJ23)
CAVNSHYNQGGKLIV

SEQ ID NO: 554182 - protein, 15 aa, Homo sapiens
  CDR3 for beta chain variable domain of TCR clone 277091 (TRBV28, TRBJ1-3)
CASSMGWVSGNTIYF

SEQ ID NO: 554183 - protein, 11 aa, Homo sapiens
  CDR3 for alpha chain variable domain of TCR clone 277092 (TRAV2, TRAJ13)
CASVGYQKVTF

SEQ ID NO: 554184 - protein, 14 aa, Homo sapiens
  CDR3 for beta chain variable domain of TCR clone 277092 (TRBV19, TRBJ2-7)
CASSMGQGAIEQYF

SEQ ID NO: 554185 - protein, 15 aa, Homo sapiens
  CDR3 for alpha chain variable domain of TCR clone 277093 (TRAV21, TRAJ45)
CAVSYSGGGADGLTF

SEQ ID NO: 554186 - protein, 14 aa, Homo sapiens
  CDR3 for beta chain variable domain of TCR clone 277093 (TRBV12-5, TRBJ2-5)
CASGSRTHQETQYF

SEQ ID NO: 554187 - protein, 16 aa, Homo sapiens
  CDR3 for alpha chain variable domain of TCR clone 277094 (TRAV8-3, TRAJ38)
CAVGASNAGNNRKLFW

SEQ ID NO: 554188 - protein, 15 aa, Homo sapiens
  CDR3 for beta chain variable domain of TCR clone 277094 (TRBV11-3, TRBJ1-3)
CASSLFGPSGNTTYF

SEQ ID NO: 554189 - protein, 14 aa, Homo sapiens
  CDR3 for alpha chain variable domain of TCR clone 277095 (TRAV35, TRAJ13)
CAGSPSGGYQKVTF

SEQ ID NO: 554190 - protein, 17 aa, Homo sapiens
  CDR3 for beta chain variable domain of TCR clone 277095 (TRBV18, TRBJ1-5)
CQLTTCRVRQNNQPQYF

SEQ ID NO: 554191 - protein, 13 aa, Homo sapiens
  CDR3 for alpha chain variable domain of TCR clone 277096 (TRAV2, TRAJ40)
RAVVTSVTYKYIF

SEQ ID NO: 554192 - protein, 15 aa, Homo sapiens
  CDR3 for beta chain variable domain of TCR clone 277096 (TRBV11-3, TRBJ2-3)
CASLKDGREGDTQYF

SEQ ID NO: 554193 - protein, 15 aa, Homo sapiens
  CDR3 for alpha chain variable domain of TCR clone 277097 (TRAV2, TRAJ9)
CAVEDRGTGGFKTIF

SEQ ID NO: 554194 - protein, 15 aa, Homo sapiens
  CDR3 for beta chain variable domain of TCR clone 277097 (TRBV11-2, TRBJ2-2)
CASRGLAANTGELFF

SEQ ID NO: 554195 - protein, 12 aa, Homo sapiens
  CDR3 for alpha chain variable domain of TCR clone 277098 (TRAV29/DV5, TRAJ40)
CASNQAGTALIF

SEQ ID NO: 554196 - protein, 14 aa, Homo sapiens
  CDR3 for beta chain variable domain of TCR clone 277098 (TRBV20-1, TRBJ1-1)
CSAQTRIGGTEAFF

SEQ ID NO: 554197 - protein, 10 aa, Homo sapiens
  CDR3 for alpha chain variable domain of TCR clone 277099 (TRAV12-3, TRAJ49)
CAVHGNQFYF

SEQ ID NO: 554198 - protein, 12 aa, Homo sapiens
  CDR3 for beta chain variable domain of TCR clone 277099 (TRBV24-1, TRBJ2-7)
CATSDPGYEQYV

SEQ ID NO: 554199 - protein, 16 aa, Homo sapiens
  CDR3 for alpha chain variable domain of TCR clone 277100 (TRAV12-1, TRAJ42)
CVVTPYYGGSQGNLIF

SEQ ID NO: 554200 - protein, 14 aa, Homo sapiens
  CDR3 for beta chain variable domain of TCR clone 277100 (TRBV7-2, TRBJ2-7)
CASSPKTSFYEQYF

SEQ ID NO: 554201 - protein, 12 aa, Homo sapiens
  CDR3 for alpha chain variable domain of TCR clone 277101 (TRAV1-1, TRAJ20)
CAVREDDYKLCF

SEQ ID NO: 554202 - protein, 14 aa, Homo sapiens
  CDR3 for beta chain variable domain of TCR clone 277101 (TRBV11-2, TRBJ2-3)
CASSILARTDTQYF

SEQ ID NO: 554203 - protein, 14 aa, Homo sapiens
  CDR3 for alpha chain variable domain of TCR clone 277102 (TRAV4, TRAJ13)
CPVGYSGGYQKVTF

SEQ ID NO: 554204 - protein, 13 aa, Homo sapiens
  CDR3 for beta chain variable domain of TCR clone 277102 (TRBV18, TRBJ1-1)
CASSGGRNTEAFF

SEQ ID NO: 554205 - protein, 15 aa, Homo sapiens
  CDR3 for alpha chain variable domain of TCR clone 277103 (TRAV38-2/DV8, TRAJ28)
CAYRSRGAGSYQLTF

SEQ ID NO: 554206 - protein, 14 aa, Homo sapiens
  CDR3 for beta chain variable domain of TCR clone 277103 (TRBV7-9, TRBJ2-7)
CASSIGQGAGEQYL

SEQ ID NO: 554207 - protein, 12 aa, Homo sapiens
  CDR3 for alpha chain variable domain of TCR clone 277104 (TRAV26-1, TRAJ36)
FIVRVRADNFFF

SEQ ID NO: 554208 - protein, 13 aa, Homo sapiens
  CDR3 for beta chain variable domain of TCR clone 277104 (TRBV11-2, TRBJ2-5)
CASSRGPSETQYF

SEQ ID NO: 554209 - protein, 14 aa, Homo sapiens
  CDR3 for alpha chain variable domain of TCR clone 277105 (TRAV20, TRAJ56)
CAVQFGGANSKLTF

SEQ ID NO: 554210 - protein, 14 aa, Homo sapiens
  CDR3 for beta chain variable domain of TCR clone 277105 (TRBV7-2, TRBJ2-3)
CASSLGLATDTQYF

SEQ ID NO: 554211 - protein, 11 aa, Homo sapiens
  CDR3 for alpha chain variable domain of TCR clone 277106 (TRAV13-1, TRAJ40)
CAVSGTYKYIF

SEQ ID NO: 554212 - protein, 16 aa, Homo sapiens
  CDR3 for beta chain variable domain of TCR clone 277106 (TRBV10-3, TRBJ2-3)
CAVSVSRLALTDTQYF

SEQ ID NO: 554213 - protein, 15 aa, Homo sapiens
  CDR3 for alpha chain variable domain of TCR clone 277107 (TRAV8-3, TRAJ11)
YAVGMLNSGYSTLTF

SEQ ID NO: 554214 - protein, 16 aa, Homo sapiens
  CDR3 for beta chain variable domain of TCR clone 277107 (TRBV7-9, TRBJ1-2)
CASSLGFSSGGDGYTF

SEQ ID NO: 554215 - protein, 14 aa, Homo sapiens
  CDR3 for alpha chain variable domain of TCR clone 277108 (TRAV16, TRAJ33)
CDLSAMDSNYQLIW

SEQ ID NO: 554216 - protein, 16 aa, Homo sapiens
  CDR3 for beta chain variable domain of TCR clone 277108 (TRBV25-1, TRBJ2-7)
CASSELTGGGIYEQYF

SEQ ID NO: 554217 - protein, 15 aa, Homo sapiens
  CDR3 for alpha chain variable domain of TCR clone 277109 (TRAV12-2, TRAJ53)
CAVNGGGGSNYKLTF

SEQ ID NO: 554218 - protein, 14 aa, Homo sapiens
  CDR3 for beta chain variable domain of TCR clone 277109 (TRBV11-2, TRBJ2-5)
CASSRTEGIETQYF

SEQ ID NO: 554219 - protein, 14 aa, Homo sapiens
  CDR3 for alpha chain variable domain of TCR clone 277110 (TRAV26-2, TRAJ32)
CCVRYGGATNKLIF

SEQ ID NO: 554220 - protein, 14 aa, Homo sapiens
  CDR3 for beta chain variable domain of TCR clone 277110 (TRBV4-2, TRBJ2-1)
CASGLDRAYNEQFF

SEQ ID NO: 554221 - protein, 12 aa, Homo sapiens
  CDR3 for alpha chain variable domain of TCR clone 277111 (TRAV13-1, TRAJ49)
CAASPMGNQFYF

SEQ ID NO: 554222 - protein, 15 aa, Homo sapiens
  CDR3 for beta chain variable domain of TCR clone 277111 (TRBV12-4, TRBJ2-7)
CASSLGSGGPYEQYF

SEQ ID NO: 554223 - protein, 11 aa, Homo sapiens
  CDR3 for alpha chain variable domain of TCR clone 277112 (TRAV1-1, TRAJ23)
CAVRQGGKLFF

SEQ ID NO: 554224 - protein, 20 aa, Homo sapiens
  CDR3 for beta chain variable domain of TCR clone 277112 (TRBV7-8, TRBJ2-2)
CASGHLFPGPTIHITGELFF

SEQ ID NO: 554225 - protein, 11 aa, Homo sapiens
  CDR3 for alpha chain variable domain of TCR clone 277113 (TRAV35, TRAJ34)
CWARNTDKLIF

SEQ ID NO: 554226 - protein, 13 aa, Homo sapiens
  CDR3 for beta chain variable domain of TCR clone 277113 (TRBV19, TRBJ2-5)
CASSIDRTYEQYF

SEQ ID NO: 554227 - protein, 12 aa, Homo sapiens
  CDR3 for alpha chain variable domain of TCR clone 277114 (TRAV13-1, TRAJ27)
CAAHTNAGKSTF

SEQ ID NO: 554228 - protein, 14 aa, Homo sapiens
  CDR3 for beta chain variable domain of TCR clone 277114 (TRBV19, TRBJ2-2)
CATSGQGIAGELFF

SEQ ID NO: 554229 - protein, 14 aa, Homo sapiens
  CDR3 for alpha chain variable domain of TCR clone 277115 (TRAV9-2, TRAJ39)
CALYFYNAGNMLTF

SEQ ID NO: 554230 - protein, 15 aa, Homo sapiens
  CDR3 for beta chain variable domain of TCR clone 277115 (TRBV10-1, TRBJ2-3)
CASSATSGGFDTQYF

SEQ ID NO: 554231 - protein, 14 aa, Homo sapiens
  CDR3 for alpha chain variable domain of TCR clone 277116 (TRAV12-3, TRAJ58)
CAMRPETSGSRLTF

SEQ ID NO: 554232 - protein, 13 aa, Homo sapiens
  CDR3 for beta chain variable domain of TCR clone 277116 (TRBV27, TRBJ2-3)
CASSWGRTDTQYF

SEQ ID NO: 554233 - protein, 15 aa, Homo sapiens
  CDR3 for alpha chain variable domain of TCR clone 277117 (TRAV26-2, TRAJ13)
CILRDLSGGYQKVTF

SEQ ID NO: 554234 - protein, 11 aa, Homo sapiens
  CDR3 for beta chain variable domain of TCR clone 277117 (TRBV7-9, TRBJ2-5)
CDSSLSATQYF

SEQ ID NO: 554235 - protein, 15 aa, Homo sapiens
  CDR3 for alpha chain variable domain of TCR clone 277118 (TRAV23/DV6, TRAJ44)
CAAIKPTGTASKLTF

SEQ ID NO: 554236 - protein, 16 aa, Homo sapiens
  CDR3 for beta chain variable domain of TCR clone 277118 (TRBV28, TRBJ2-5)
CATSGWPSRLKETQYF

SEQ ID NO: 554237 - protein, 15 aa, Homo sapiens
  CDR3 for alpha chain variable domain of TCR clone 277119 (TRAV23/DV6, TRAJ18)
CAARYRGPAMGRLYF

SEQ ID NO: 554238 - protein, 13 aa, Homo sapiens
  CDR3 for beta chain variable domain of TCR clone 277119 (TRBV7-2, TRBJ2-7)
CASSSPSGSEQYF

SEQ ID NO: 554239 - protein, 15 aa, Homo sapiens
  CDR3 for alpha chain variable domain of TCR clone 277120 (TRAV3, TRAJ22)
CAVRDRGGSARQLTF

SEQ ID NO: 554240 - protein, 15 aa, Homo sapiens
  CDR3 for beta chain variable domain of TCR clone 277120 (TRBV6-3, TRBJ2-7)
FASSSPGTVFYEQYF

SEQ ID NO: 554241 - protein, 16 aa, Homo sapiens
  CDR3 for alpha chain variable domain of TCR clone 277121 (TRAV8-2, TRAJ50)
CVVSDHMKTSYDKVIL

SEQ ID NO: 554242 - protein, 15 aa, Homo sapiens
  CDR3 for beta chain variable domain of TCR clone 277121 (TRBV7-2, TRBJ2-1)
CASSFQADEYNEQFF

SEQ ID NO: 554243 - protein, 16 aa, Homo sapiens
  CDR3 for alpha chain variable domain of TCR clone 277122 (TRAV13-1, TRAJ48)
CAASIFGNFRNEKLTF

SEQ ID NO: 554244 - protein, 16 aa, Homo sapiens
  CDR3 for beta chain variable domain of TCR clone 277122 (TRBV18, TRBJ1-5)
CASSPYRVEGNQPQHF

SEQ ID NO: 554245 - protein, 17 aa, Homo sapiens
  CDR3 for alpha chain variable domain of TCR clone 277123 (TRAV3, TRAJ6)
CAVRDGPRAGGSNRPTF

SEQ ID NO: 554246 - protein, 17 aa, Homo sapiens
  CDR3 for beta chain variable domain of TCR clone 277123 (TRBV13, TRBJ2-3)
CASSLSRVAGGRNTQYF

SEQ ID NO: 554247 - protein, 15 aa, Homo sapiens
  CDR3 for alpha chain variable domain of TCR clone 277124 (TRAV3, TRAJ13)
CAGRVYSGGYQKVTF

SEQ ID NO: 554248 - protein, 15 aa, Homo sapiens
  CDR3 for beta chain variable domain of TCR clone 277124 (TRBV7-2, TRBJ2-1)
CASSSGLAGGNEQFF

SEQ ID NO: 554249 - protein, 16 aa, Homo sapiens
  CDR3 for alpha chain variable domain of TCR clone 277125 (TRAV26-2, TRAJ45)
CTTASPIGGGADGLTF

SEQ ID NO: 554250 - protein, 13 aa, Homo sapiens
  CDR3 for beta chain variable domain of TCR clone 277125 (TRBV19, TRBJ2-5)
CASSMGGAGTQYF

SEQ ID NO: 554251 - protein, 13 aa, Homo sapiens
  CDR3 for alpha chain variable domain of TCR clone 277126 (TRAV2, TRAJ40)
FAVVTSGTYKYIF

SEQ ID NO: 554252 - protein, 15 aa, Homo sapiens
  CDR3 for beta chain variable domain of TCR clone 277126 (TRBV18, TRBJ2-1)
CASSPPSASYNEQFF

SEQ ID NO: 554253 - protein, 13 aa, Homo sapiens
  CDR3 for alpha chain variable domain of TCR clone 277127 (TRAV8-3, TRAJ44)
CAVVPGTASKLTF

SEQ ID NO: 554254 - protein, 14 aa, Homo sapiens
  CDR3 for beta chain variable domain of TCR clone 277127 (TRBV11-2, TRBJ2-3)
CASSRLACTDTQHF

SEQ ID NO: 554255 - protein, 13 aa, Homo sapiens
  CDR3 for alpha chain variable domain of TCR clone 277128 (TRAV2, TRAJ15)
CAVASQAGTALIF

SEQ ID NO: 554256 - protein, 15 aa, Homo sapiens
  CDR3 for beta chain variable domain of TCR clone 277128 (TRBV18, TRBJ1-1)
CASSPRQGENTEAFF

SEQ ID NO: 554257 - protein, 14 aa, Homo sapiens
  CDR3 for alpha chain variable domain of TCR clone 277129 (TRAV26-1, TRAJ38)
CIADNAGNNRKLIG

SEQ ID NO: 554258 - protein, 11 aa, Homo sapiens
  CDR3 for beta chain variable domain of TCR clone 277129 (TRBV29-1, TRBJ2-5)
CSEDRTGTQYF

SEQ ID NO: 554259 - protein, 14 aa, Homo sapiens
  CDR3 for alpha chain variable domain of TCR clone 277130 (TRAV8-3, TRAJ36)
CAVGPITGANNLFF

SEQ ID NO: 554260 - protein, 15 aa, Homo sapiens
  CDR3 for beta chain variable domain of TCR clone 277130 (TRBV4-1, TRBJ2-1)
CASSQDPGSYNEQFF

SEQ ID NO: 554261 - protein, 12 aa, Homo sapiens
  CDR3 for alpha chain variable domain of TCR clone 277131 (TRAV36/DV7, TRAJ54)
CAVVRGAQALVF

SEQ ID NO: 554262 - protein, 14 aa, Homo sapiens
  CDR3 for beta chain variable domain of TCR clone 277131 (TRBV7-3, TRBJ1-1)
CASSLKGGNTEAFF

SEQ ID NO: 554263 - protein, 11 aa, Homo sapiens
  CDR3 for alpha chain variable domain of TCR clone 277132 (TRAV12-3, TRAJ49)
CAMSSGNQFYF

SEQ ID NO: 554264 - protein, 17 aa, Homo sapiens
  CDR3 for beta chain variable domain of TCR clone 277132 (TRBV5-6, TRBJ2-7)
CASSLWRVLAGSYEQYL

SEQ ID NO: 554265 - protein, 15 aa, Homo sapiens
  CDR3 for alpha chain variable domain of TCR clone 277133 (TRAV8-2, TRAJ40)
CVVSDRGSGTYKYIF

SEQ ID NO: 554266 - protein, 17 aa, Homo sapiens
  CDR3 for beta chain variable domain of TCR clone 277133 (TRBV13, TRBJ2-3)
CASSLSRVAGGRNTQYC

SEQ ID NO: 554267 - protein, 12 aa, Homo sapiens
  CDR3 for alpha chain variable domain of TCR clone 277134 (TRAV13-1, TRAJ21)
CAAKEGFNKVYF

SEQ ID NO: 554268 - protein, 15 aa, Homo sapiens
  CDR3 for beta chain variable domain of TCR clone 277134 (TRBV15, TRBJ1-5)
CATSRDPVSNQPQHF

SEQ ID NO: 554269 - protein, 13 aa, Homo sapiens
  CDR3 for alpha chain variable domain of TCR clone 277135 (TRAV27, TRAJ16)
CAGACSDGQKLLF

SEQ ID NO: 554270 - protein, 12 aa, Homo sapiens
  CDR3 for beta chain variable domain of TCR clone 277135 (TRBV11-2, TRBJ2-2)
CASSLGGGELFF

SEQ ID NO: 554271 - protein, 15 aa, Homo sapiens
  CDR3 for alpha chain variable domain of TCR clone 277136 (TRAV12-3, TRAJ6)
CAMSATTGGSYIPTF

SEQ ID NO: 554272 - protein, 14 aa, Homo sapiens
  CDR3 for beta chain variable domain of TCR clone 277136 (TRBV25-1, TRBJ2-2)
CAILVYRVEGAQNR

SEQ ID NO: 554273 - protein, 16 aa, Homo sapiens
  CDR3 for alpha chain variable domain of TCR clone 277137 (TRAV12-3, TRAJ53)
CAMSPGSGGSNYKLTF

SEQ ID NO: 554274 - protein, 16 aa, Homo sapiens
  CDR3 for beta chain variable domain of TCR clone 277137 (TRBV4-2, TRBJ1-1)
CASSQAVFGMNTEAVF

SEQ ID NO: 554275 - protein, 14 aa, Homo sapiens
  CDR3 for alpha chain variable domain of TCR clone 277138 (TRAV12-2, TRAJ17)
CAVLFKAAGNKLTF

SEQ ID NO: 554276 - protein, 14 aa, Homo sapiens
  CDR3 for beta chain variable domain of TCR clone 277138 (TRBV29-1, TRBJ2-1)
CSVGAVAGGNEQFV

SEQ ID NO: 554277 - protein, 15 aa, Homo sapiens
  CDR3 for alpha chain variable domain of TCR clone 277139 (TRAV26-2, TRAJ13)
CILGDLSGGYQKVTF

SEQ ID NO: 554278 - protein, 11 aa, Homo sapiens
  CDR3 for beta chain variable domain of TCR clone 277139 (TRBV7-9, TRBJ2-5)
CASSLSATQYF

SEQ ID NO: 554279 - protein, 13 aa, Homo sapiens
  CDR3 for alpha chain variable domain of TCR clone 277140 (TRAV29/DV5, TRAJ47)
CAASAEYGNKLVF

SEQ ID NO: 554280 - protein, 15 aa, Homo sapiens
  CDR3 for beta chain variable domain of TCR clone 277140 (TRBV7-9, TRBJ1-4)
CASSARTVGNEKLFF

SEQ ID NO: 554281 - protein, 18 aa, Homo sapiens
  CDR3 for alpha chain variable domain of TCR clone 277141 (TRAV26-1, TRAJ23)
CIVRVGLVVWNQGGKLIF

SEQ ID NO: 554282 - protein, 12 aa, Homo sapiens
  CDR3 for beta chain variable domain of TCR clone 277141 (TRBV7-2, TRBJ1-6)
CASSLSSSPLHF

SEQ ID NO: 554283 - protein, 14 aa, Homo sapiens
  CDR3 for alpha chain variable domain of TCR clone 277142 (TRAV17, TRAJ54)
CATDANQGVQKLVF

SEQ ID NO: 554284 - protein, 14 aa, Homo sapiens
  CDR3 for beta chain variable domain of TCR clone 277142 (TRBV25-1, TRBJ1-1)
CASTHLGGNTEAFF

SEQ ID NO: 554285 - protein, 12 aa, Homo sapiens
  CDR3 for alpha chain variable domain of TCR clone 277143 (TRAV21, TRAJ30)
CAALNRDDKIIF

SEQ ID NO: 554286 - protein, 15 aa, Homo sapiens
  CDR3 for beta chain variable domain of TCR clone 277143 (TRBV27, TRBJ2-1)
CASSNGGGSSNEQFF

SEQ ID NO: 554287 - protein, 15 aa, Homo sapiens
  CDR3 for alpha chain variable domain of TCR clone 277144 (TRAV35, TRAJ50)
CVGQLRKTSYDKVIF

SEQ ID NO: 554288 - protein, 12 aa, Homo sapiens
  CDR3 for beta chain variable domain of TCR clone 277144 (TRBV5-1, TRBJ2-5)
CASSWGLETQYF

SEQ ID NO: 554289 - protein, 14 aa, Homo sapiens
  CDR3 for alpha chain variable domain of TCR clone 277145 (TRAV1-2, TRAJ16)
CAVNRFSDGQELLF

SEQ ID NO: 554290 - protein, 14 aa, Homo sapiens
  CDR3 for beta chain variable domain of TCR clone 277145 (TRBV12-4, TRBJ1-1)
CASSLGTEGTEAFF

SEQ ID NO: 554291 - protein, 21 aa, Homo sapiens
  CDR3 for alpha chain variable domain of TCR clone 277146 (TRAV1-1, TRAJ6)
CLLLLRCERVERTGGSYIPTF

SEQ ID NO: 554292 - protein, 14 aa, Homo sapiens
  CDR3 for beta chain variable domain of TCR clone 277146 (TRBV4-1, TRBJ2-2)
CASSQAVNTGELFF

SEQ ID NO: 554293 - protein, 13 aa, Homo sapiens
  CDR3 for alpha chain variable domain of TCR clone 277147 (TRAV16, TRAJ26)
CITVLCLGQNFVF

SEQ ID NO: 554294 - protein, 12 aa, Homo sapiens
  CDR3 for beta chain variable domain of TCR clone 277147 (TRBV11-2, TRBJ2-1)
CASSPGNNEQFS

SEQ ID NO: 554295 - protein, 11 aa, Homo sapiens
  CDR3 for alpha chain variable domain of TCR clone 277148 (TRAV17, TRAJ49)
CATNTGNQFYF

SEQ ID NO: 554296 - protein, 14 aa, Homo sapiens
  CDR3 for beta chain variable domain of TCR clone 277148 (TRBV4-2, TRBJ2-1)
CASGLDRAYNEQFF

SEQ ID NO: 554297 - protein, 14 aa, Homo sapiens
  CDR3 for alpha chain variable domain of TCR clone 277149 (TRAV35, TRAJ54)
CAGYLIQGAQKLVF

SEQ ID NO: 554298 - protein, 13 aa, Homo sapiens
  CDR3 for beta chain variable domain of TCR clone 277149 (TRBV7-9, TRBJ2-3)
CASSPGSTDTQYF

SEQ ID NO: 554299 - protein, 17 aa, Homo sapiens
  CDR3 for alpha chain variable domain of TCR clone 277150 (TRAV13-1, TRAJ52)
CAAGRNAGGTSYGKLTF

SEQ ID NO: 554300 - protein, 12 aa, Homo sapiens
  CDR3 for beta chain variable domain of TCR clone 277150 (TRBV19, TRBJ2-1)
CASSMQDTEQFF

SEQ ID NO: 554301 - protein, 14 aa, Homo sapiens
  CDR3 for alpha chain variable domain of TCR clone 277151 (TRAV12-3, TRAJ10)
SHLPLTGGGNKLTF

SEQ ID NO: 554302 - protein, 13 aa, Homo sapiens
  CDR3 for beta chain variable domain of TCR clone 277151 (TRBV2, TRBJ2-1)
CASSGTSGGEQFF

SEQ ID NO: 554303 - protein, 14 aa, Homo sapiens
  CDR3 for alpha chain variable domain of TCR clone 277152 (TRAV12-2, TRAJ6)
CASKWGGGSYIPTF

SEQ ID NO: 554304 - protein, 14 aa, Homo sapiens
  CDR3 for beta chain variable domain of TCR clone 277152 (TRBV9, TRBJ2-7)
CASSVGVGAYEQYF

SEQ ID NO: 554305 - protein, 17 aa, Homo sapiens
  CDR3 for alpha chain variable domain of TCR clone 277153 (TRAV26-1, TRAJ53)
CIVRVDDSGGSNYKLTF

SEQ ID NO: 554306 - protein, 15 aa, Homo sapiens
  CDR3 for beta chain variable domain of TCR clone 277153 (TRBV20-1, TRBJ2-7)
CSARVLAAYFYEQYF

SEQ ID NO: 554307 - protein, 18 aa, Homo sapiens
  CDR3 for alpha chain variable domain of TCR clone 277154 (TRAV13-1, TRAJ52)
CAAKNPNAGGTSYGKLKF

SEQ ID NO: 554308 - protein, 15 aa, Homo sapiens
  CDR3 for beta chain variable domain of TCR clone 277154 (TRBV2, TRBJ2-2)
CASSMETVGTGELFF

SEQ ID NO: 554309 - protein, 14 aa, Homo sapiens
  CDR3 for alpha chain variable domain of TCR clone 277155 (TRAV4, TRAJ9)
RLVGSGTGGFKTIF

SEQ ID NO: 554310 - protein, 16 aa, Homo sapiens
  CDR3 for beta chain variable domain of TCR clone 277155 (TRBV24-1, TRBJ2-3)
CATSDPGTGATDTQYF

SEQ ID NO: 554311 - protein, 16 aa, Homo sapiens
  CDR3 for alpha chain variable domain of TCR clone 277156 (TRAV12-3, TRAJ53)
CAMSPGSGGSNYKLTF

SEQ ID NO: 554312 - protein, 16 aa, Homo sapiens
  CDR3 for beta chain variable domain of TCR clone 277156 (TRBV19, TRBJ2-4)
GATGGLAGGTKNIQYF

SEQ ID NO: 554313 - protein, 15 aa, Homo sapiens
  CDR3 for alpha chain variable domain of TCR clone 277157 (TRAV20, TRAJ53)
CAVQASGGSNYKLTF

SEQ ID NO: 554314 - protein, 12 aa, Homo sapiens
  CDR3 for beta chain variable domain of TCR clone 277157 (TRBV7-6, TRBJ2-5)
CASSLSQETQDF

SEQ ID NO: 554315 - protein, 13 aa, Homo sapiens
  CDR3 for alpha chain variable domain of TCR clone 277158 (TRAV1-2, TRAJ9)
CAVLNTGDFKTIF

SEQ ID NO: 554316 - protein, 14 aa, Homo sapiens
  CDR3 for beta chain variable domain of TCR clone 277158 (TRBV20-1, TRBJ2-1)
CSAQIGGSANEQFF

SEQ ID NO: 554317 - protein, 12 aa, Homo sapiens
  CDR3 for alpha chain variable domain of TCR clone 277159 (TRAV12-2, TRAJ4)
GWPEGGYNKLIF

SEQ ID NO: 554318 - protein, 13 aa, Homo sapiens
  CDR3 for beta chain variable domain of TCR clone 277159 (TRBV19, TRBJ1-2)
CASSVPGQDGYTF

SEQ ID NO: 554319 - protein, 10 aa, Homo sapiens
  CDR3 for alpha chain variable domain of TCR clone 277160 (TRAV30, TRAJ20)
CGTDDYKLSF

SEQ ID NO: 554320 - protein, 13 aa, Homo sapiens
  CDR3 for beta chain variable domain of TCR clone 277160 (TRBV19, TRBJ1-2)
CASSVPGQDGYTF

SEQ ID NO: 554321 - protein, 12 aa, Homo sapiens
  CDR3 for alpha chain variable domain of TCR clone 277161 (TRAV13-2, TRAJ8)
CAPWLGFQKLVF

SEQ ID NO: 554322 - protein, 15 aa, Homo sapiens
  CDR3 for beta chain variable domain of TCR clone 277161 (TRBV7-3, TRBJ2-1)
CASSPTGGSRNEQFF

SEQ ID NO: 554323 - protein, 11 aa, Homo sapiens
  CDR3 for alpha chain variable domain of TCR clone 277162 (TRAV1-2, TRAJ40)
CAVPGTYKYIF

SEQ ID NO: 554324 - protein, 16 aa, Homo sapiens
  CDR3 for beta chain variable domain of TCR clone 277162 (TRBV29-1, TRBJ2-7)
CSVEGVGTSGSYEHYF

SEQ ID NO: 554325 - protein, 16 aa, Homo sapiens
  CDR3 for alpha chain variable domain of TCR clone 277163 (TRAV14/DV4, TRAJ53)
CAMRDGGGGSNYKLTF

SEQ ID NO: 554326 - protein, 18 aa, Homo sapiens
  CDR3 for beta chain variable domain of TCR clone 277163 (TRBV18, TRBJ1-3)
CASSPRGGAGPSGNTIYF

SEQ ID NO: 554327 - protein, 15 aa, Homo sapiens
  CDR3 for alpha chain variable domain of TCR clone 277164 (TRAV3, TRAJ10)
CAVRDGTGGGNKLTF

SEQ ID NO: 554328 - protein, 15 aa, Homo sapiens
  CDR3 for beta chain variable domain of TCR clone 277164 (TRBV4-3, TRBJ1-4)
CASSLVQREVEKLFF

SEQ ID NO: 554329 - protein, 12 aa, Homo sapiens
  CDR3 for alpha chain variable domain of TCR clone 277165 (TRAV3, TRAJ31)
CAVREGNARLMF

SEQ ID NO: 554330 - protein, 13 aa, Homo sapiens
  CDR3 for beta chain variable domain of TCR clone 277165 (TRBV20-1, TRBJ2-2)
CSASAAGTGELFF

SEQ ID NO: 554331 - protein, 13 aa, Homo sapiens
  CDR3 for alpha chain variable domain of TCR clone 277166 (TRAV4, TRAJ20)
CLVGSSNDYKLSF

SEQ ID NO: 554332 - protein, 14 aa, Homo sapiens
  CDR3 for beta chain variable domain of TCR clone 277166 (TRBV6-6, TRBJ2-7)
CASSDSGAGYEQYF

SEQ ID NO: 554333 - protein, 14 aa, Homo sapiens
  CDR3 for alpha chain variable domain of TCR clone 277167 (TRAV20, TRAJ56)
CAVQFGGANSKLTF

SEQ ID NO: 554334 - protein, 13 aa, Homo sapiens
  CDR3 for beta chain variable domain of TCR clone 277167 (TRBV6-4, TRBJ2-1)
CASSVEREEEQFF

SEQ ID NO: 554335 - protein, 14 aa, Homo sapiens
  CDR3 for alpha chain variable domain of TCR clone 277168 (TRAV4, TRAJ26)
CLVGPHKYGQNFVF

SEQ ID NO: 554336 - protein, 17 aa, Homo sapiens
  CDR3 for beta chain variable domain of TCR clone 277168 (TRBV24-1, TRBJ2-1)
CATSDVSTSGTYNEQFF

SEQ ID NO: 554337 - protein, 14 aa, Homo sapiens
  CDR3 for alpha chain variable domain of TCR clone 277169 (TRAV13-1, TRAJ35)
CAASKGGFGNVLHC

SEQ ID NO: 554338 - protein, 15 aa, Homo sapiens
  CDR3 for beta chain variable domain of TCR clone 277169 (TRBV3-1, TRBJ2-1)
CASSQDYTPRGEQFF

SEQ ID NO: 554339 - protein, 10 aa, Homo sapiens
  CDR3 for alpha chain variable domain of TCR clone 277170 (TRAV30, TRAJ48)
CGIGNEKLTF

SEQ ID NO: 554340 - protein, 15 aa, Homo sapiens
  CDR3 for beta chain variable domain of TCR clone 277170 (TRBV7-9, TRBJ2-3)
CASSHGDRVPDTQYF

SEQ ID NO: 554341 - protein, 12 aa, Homo sapiens
  CDR3 for alpha chain variable domain of TCR clone 277171 (TRAV13-1, TRAJ53)
CAETGGNYKLTF

SEQ ID NO: 554342 - protein, 14 aa, Homo sapiens
  CDR3 for beta chain variable domain of TCR clone 277171 (TRBV7-2, TRBJ1-1)
CASSFLTGTTEAFF

SEQ ID NO: 554343 - protein, 15 aa, Homo sapiens
  CDR3 for alpha chain variable domain of TCR clone 277172 (TRAV1-1, TRAJ22)
CAVRVSSGSARQLTF

SEQ ID NO: 554344 - protein, 16 aa, Homo sapiens
  CDR3 for beta chain variable domain of TCR clone 277172 (TRBV11-2, TRBJ2-7)
CASSPTTGGVSYEQYF

SEQ ID NO: 554345 - protein, 13 aa, Homo sapiens
  CDR3 for alpha chain variable domain of TCR clone 277173 (TRAV2, TRAJ29)
CAAGGPGNTPLVF

SEQ ID NO: 554346 - protein, 13 aa, Homo sapiens
  CDR3 for beta chain variable domain of TCR clone 277173 (TRBV7-9, TRBJ1-2)
CASSLKQNYGYTF

SEQ ID NO: 554347 - protein, 15 aa, Homo sapiens
  CDR3 for alpha chain variable domain of TCR clone 277174 (TRAV12-3, TRAJ6)
CAMSAASGGSYIPTF

SEQ ID NO: 554348 - protein, 13 aa, Homo sapiens
  CDR3 for beta chain variable domain of TCR clone 277174 (TRBV20-1, TRBJ1-2)
CSASPEFNHGYTF

SEQ ID NO: 554349 - protein, 18 aa, Homo sapiens
  CDR3 for alpha chain variable domain of TCR clone 277175 (TRAV21, TRAJ52)
CAVRPSPGGGTSYGKLTF

SEQ ID NO: 554350 - protein, 13 aa, Homo sapiens
  CDR3 for beta chain variable domain of TCR clone 277175 (TRBV10-3, TRBJ2-7)
CASKLAVNYEQYF

SEQ ID NO: 554351 - protein, 13 aa, Homo sapiens
  CDR3 for alpha chain variable domain of TCR clone 277176 (TRAV20, TRAJ11)
CAVQARGYSTLTF

SEQ ID NO: 554352 - protein, 14 aa, Homo sapiens
  CDR3 for beta chain variable domain of TCR clone 277176 (TRBV7-2, TRBJ2-5)
CASSPRGSSETQYF

SEQ ID NO: 554353 - protein, 15 aa, Homo sapiens
  CDR3 for alpha chain variable domain of TCR clone 277177 (TRAV16, TRAJ20)
CALKGGLRADYNLSF

SEQ ID NO: 554354 - protein, 16 aa, Homo sapiens
  CDR3 for beta chain variable domain of TCR clone 277177 (TRBV11-3, TRBJ2-2)
CASSSRTSPGTGELFF

SEQ ID NO: 554355 - protein, 15 aa, Homo sapiens
  CDR3 for alpha chain variable domain of TCR clone 277178 (TRAV38-1, TRAJ58)
CAFMKHGTSGSRLTF

SEQ ID NO: 554356 - protein, 15 aa, Homo sapiens
  CDR3 for beta chain variable domain of TCR clone 277178 (TRBV9, TRBJ1-6)
CASSVAGTGDSPLHF

SEQ ID NO: 554357 - protein, 12 aa, Homo sapiens
  CDR3 for alpha chain variable domain of TCR clone 277179 (TRAV2, TRAJ10)
CASTGGGNKLTC

SEQ ID NO: 554358 - protein, 13 aa, Homo sapiens
  CDR3 for beta chain variable domain of TCR clone 277179 (TRBV7-9, TRBJ1-2)
CASSLKQNYGYTF

SEQ ID NO: 554359 - protein, 15 aa, Homo sapiens
  CDR3 for alpha chain variable domain of TCR clone 277180 (TRAV12-2, TRAJ53)
CAVNGGGGSNYKLTF

SEQ ID NO: 554360 - protein, 15 aa, Homo sapiens
  CDR3 for beta chain variable domain of TCR clone 277180 (TRBV5-1, TRBJ2-7)
FASSLNGGPAREQYF

SEQ ID NO: 554361 - protein, 14 aa, Homo sapiens
  CDR3 for alpha chain variable domain of TCR clone 277181 (TRAV12-2, TRAJ40)
CAVKIPTGTYKYIF

SEQ ID NO: 554362 - protein, 15 aa, Homo sapiens
  CDR3 for beta chain variable domain of TCR clone 277181 (TRBV20-1, TRBJ1-4)
CSARREWGVNEKLFF

SEQ ID NO: 554363 - protein, 11 aa, Homo sapiens
  CDR3 for alpha chain variable domain of TCR clone 277182 (TRAV16, TRAJ33)
CALHSNYQLIW

SEQ ID NO: 554364 - protein, 15 aa, Homo sapiens
  CDR3 for beta chain variable domain of TCR clone 277182 (TRBV20-1, TRBJ2-7)
CSVRDRVSGMDEQYF

SEQ ID NO: 554365 - protein, 13 aa, Homo sapiens
  CDR3 for alpha chain variable domain of TCR clone 277183 (TRAV3, TRAJ21)
CAVREPDFNKFYF

SEQ ID NO: 554366 - protein, 16 aa, Homo sapiens
  CDR3 for beta chain variable domain of TCR clone 277183 (TRBV29-1, TRBJ2-1)
CSVAGEGGKGFFEQFF

SEQ ID NO: 554367 - protein, 12 aa, Homo sapiens
  CDR3 for alpha chain variable domain of TCR clone 277184 (TRAV21, TRAJ37)
CAVRGNTGKLIF

SEQ ID NO: 554368 - protein, 14 aa, Homo sapiens
  CDR3 for beta chain variable domain of TCR clone 277184 (TRBV19, TRBJ2-2)
CASSTGQGAGELFF

SEQ ID NO: 554369 - protein, 14 aa, Homo sapiens
  CDR3 for alpha chain variable domain of TCR clone 277185 (TRAV1-2, TRAJ33)
CAVRAPDSNYQLIW

SEQ ID NO: 554370 - protein, 14 aa, Homo sapiens
  CDR3 for beta chain variable domain of TCR clone 277185 (TRBV11-3, TRBJ1-6)
FASSFSGGDSPLHF

SEQ ID NO: 554371 - protein, 17 aa, Homo sapiens
  CDR3 for alpha chain variable domain of TCR clone 277186 (TRAV3, TRAJ6)
CAVRDGPRAGGSYIPTF

SEQ ID NO: 554372 - protein, 20 aa, Homo sapiens
  CDR3 for beta chain variable domain of TCR clone 277186 (TRBV28, TRBJ2-1)
FASTPIGRSPGLAGGNEQFF

SEQ ID NO: 554373 - protein, 14 aa, Homo sapiens
  CDR3 for alpha chain variable domain of TCR clone 277187 (TRAV1-1, TRAJ27)
CAVIYNTNAGKSTF

SEQ ID NO: 554374 - protein, 15 aa, Homo sapiens
  CDR3 for beta chain variable domain of TCR clone 277187 (TRBV7-2, TRBJ1-2)
CASSPRAGWNYGYTF

SEQ ID NO: 554375 - protein, 17 aa, Homo sapiens
  CDR3 for alpha chain variable domain of TCR clone 277188 (TRAV3, TRAJ42)
CAVRDRAYGGSQGNLIF

SEQ ID NO: 554376 - protein, 18 aa, Homo sapiens
  CDR3 for beta chain variable domain of TCR clone 277188 (TRBV20-1, TRBJ2-3)
CSASGLAGGPRTTDTHYF

SEQ ID NO: 554377 - protein, 15 aa, Homo sapiens
  CDR3 for alpha chain variable domain of TCR clone 277189 (TRAV17, TRAJ57)
CATGPSPGGAEKLVF

SEQ ID NO: 554378 - protein, 14 aa, Homo sapiens
  CDR3 for beta chain variable domain of TCR clone 277189 (TRBV12-5, TRBJ2-5)
CASGSRTHQETQYF

SEQ ID NO: 554379 - protein, 17 aa, Homo sapiens
  CDR3 for alpha chain variable domain of TCR clone 277190 (TRAV8-6, TRAJ22)
CAVSLYPSSGSARHLTF

SEQ ID NO: 554380 - protein, 16 aa, Homo sapiens
  CDR3 for beta chain variable domain of TCR clone 277190 (TRBV19, TRBJ2-7)
CASSPAGSGSLNEQYF

SEQ ID NO: 554381 - protein, 13 aa, Homo sapiens
  CDR3 for alpha chain variable domain of TCR clone 277191 (TRAV21, TRAJ27)
CAARPGNAGKSTF

SEQ ID NO: 554382 - protein, 16 aa, Homo sapiens
  CDR3 for beta chain variable domain of TCR clone 277191 (TRBV20-1, TRBJ2-7)
CSASMGQGVANYGYTF

SEQ ID NO: 554383 - protein, 14 aa, Homo sapiens
  CDR3 for alpha chain variable domain of TCR clone 277192 (TRAV1-1, TRAJ27)
CAVIYNTNAVKSTF

SEQ ID NO: 554384 - protein, 15 aa, Homo sapiens
  CDR3 for beta chain variable domain of TCR clone 277192 (TRBV7-2, TRBJ2-1)
CARSSGLAGGNEQFF

SEQ ID NO: 554385 - protein, 11 aa, Homo sapiens
  CDR3 for alpha chain variable domain of TCR clone 277193 (TRAV1-2, TRAJ20)
CAVANDYELSF

SEQ ID NO: 554386 - protein, 18 aa, Homo sapiens
  CDR3 for beta chain variable domain of TCR clone 277193 (TRBV20-1, TRBJ2-6)
CSAETTPTHGSGANDLTF

SEQ ID NO: 554387 - protein, 13 aa, Homo sapiens
  CDR3 for alpha chain variable domain of TCR clone 277194 (TRAV12-2, TRAJ39)
CAVNNNAGNMLTF

SEQ ID NO: 554388 - protein, 16 aa, Homo sapiens
  CDR3 for beta chain variable domain of TCR clone 277194 (TRBV27, TRBJ2-2)
CASSFRGLVRTGELFF

SEQ ID NO: 554389 - protein, 13 aa, Homo sapiens
  CDR3 for alpha chain variable domain of TCR clone 277195 (TRAV27, TRAJ49)
CAPRPYTGNQFYF

SEQ ID NO: 554390 - protein, 14 aa, Homo sapiens
  CDR3 for beta chain variable domain of TCR clone 277195 (TRBV4-2, TRBJ2-1)
CASGLDRAYNEQFV

SEQ ID NO: 554391 - protein, 13 aa, Homo sapiens
  CDR3 for alpha chain variable domain of TCR clone 277196 (TRAV13-1, TRAJ6)
CAASSGGSYIPTF

SEQ ID NO: 554392 - protein, 15 aa, Homo sapiens
  CDR3 for beta chain variable domain of TCR clone 277196 (TRBV12-4, TRBJ2-2)
CASGPGQLNTGELFF

SEQ ID NO: 554393 - protein, 14 aa, Homo sapiens
  CDR3 for alpha chain variable domain of TCR clone 277197 (TRAV13-1, TRAJ6)
CAASITGGSYIPTF

SEQ ID NO: 554394 - protein, 14 aa, Homo sapiens
  CDR3 for beta chain variable domain of TCR clone 277197 (TRBV6-3, TRBJ2-1)
CASLRSAYYNEQFF

SEQ ID NO: 554395 - protein, 15 aa, Homo sapiens
  CDR3 for alpha chain variable domain of TCR clone 277198 (TRAV21, TRAJ53)
CATLNSGGINYKLTF

SEQ ID NO: 554396 - protein, 14 aa, Homo sapiens
  CDR3 for beta chain variable domain of TCR clone 277198 (TRBV15, TRBJ2-5)
CATSIGGLGETQYF

SEQ ID NO: 554397 - protein, 13 aa, Homo sapiens
  CDR3 for alpha chain variable domain of TCR clone 277199 (TRAV13-1, TRAJ43)
CAASKNNNNDMSF

SEQ ID NO: 554398 - protein, 16 aa, Homo sapiens
  CDR3 for beta chain variable domain of TCR clone 277199 (TRBV7-8, TRBJ2-4)
CASSAERTLAKNIQYF

SEQ ID NO: 554399 - protein, 14 aa, Homo sapiens
  CDR3 for alpha chain variable domain of TCR clone 277200 (TRAV1-2, TRAJ8)
CAVREDTGFQKLVF

SEQ ID NO: 554400 - protein, 14 aa, Homo sapiens
  CDR3 for beta chain variable domain of TCR clone 277200 (TRBV4-1, TRBJ2-2)
CASSQAVNTGELLF

SEQ ID NO: 554401 - protein, 12 aa, Homo sapiens
  CDR3 for alpha chain variable domain of TCR clone 277201 (TRAV2, TRAJ9)
CAVVAGGFKTIC

SEQ ID NO: 554402 - protein, 16 aa, Homo sapiens
  CDR3 for beta chain variable domain of TCR clone 277201 (TRBV13, TRBJ2-2)
CASSPRTGEHTGELFF

SEQ ID NO: 554403 - protein, 14 aa, Homo sapiens
  CDR3 for alpha chain variable domain of TCR clone 277202 (TRAV8-6, TRAJ13)
CAGGSSGGYQKVTF

SEQ ID NO: 554404 - protein, 12 aa, Homo sapiens
  CDR3 for beta chain variable domain of TCR clone 277202 (TRBV11-2, TRBJ2-2)
CASSLGGGELFF

SEQ ID NO: 554405 - protein, 14 aa, Homo sapiens
  CDR3 for alpha chain variable domain of TCR clone 277203 (TRAV12-3, TRAJ10)
SHLPLTGGGNKLTF

SEQ ID NO: 554406 - protein, 13 aa, Homo sapiens
  CDR3 for beta chain variable domain of TCR clone 277203 (TRBV27, TRBJ1-1)
CASSLSIGAEAFF

SEQ ID NO: 554407 - protein, 16 aa, Homo sapiens
  CDR3 for alpha chain variable domain of TCR clone 277204 (TRAV12-3, TRAJ53)
CAMSPGSGGSNYKLTF

SEQ ID NO: 554408 - protein, 14 aa, Homo sapiens
  CDR3 for beta chain variable domain of TCR clone 277204 (TRBV7-2, TRBJ1-1)
CASSFLTVTTEAFF

SEQ ID NO: 554409 - protein, 14 aa, Homo sapiens
  CDR3 for alpha chain variable domain of TCR clone 277205 (TRAV3, TRAJ17)
YAVRDAAAGNKLTF

SEQ ID NO: 554410 - protein, 15 aa, Homo sapiens
  CDR3 for beta chain variable domain of TCR clone 277205 (TRBV4-1, TRBJ1-4)
CASSDTGGTNEKLFF

SEQ ID NO: 554411 - protein, 14 aa, Homo sapiens
  CDR3 for alpha chain variable domain of TCR clone 277206 (TRAV12-3, TRAJ9)
CARSPNTGGFKTIF

SEQ ID NO: 554412 - protein, 12 aa, Homo sapiens
  CDR3 for beta chain variable domain of TCR clone 277206 (TRBV19, TRBJ1-5)
CASSIAQQPQHF

SEQ ID NO: 554413 - protein, 23 aa, Homo sapiens
  CDR3 for alpha chain variable domain of TCR clone 277207 (TRAV26-1, TRAJ38)
CIADNAGNNHIQNPDPAVYQLRD

SEQ ID NO: 554414 - protein, 15 aa, Homo sapiens
  CDR3 for beta chain variable domain of TCR clone 277207 (TRBV7-2, TRBJ2-2)
CASRGPGQNTGELFF

SEQ ID NO: 554415 - protein, 14 aa, Homo sapiens
  CDR3 for alpha chain variable domain of TCR clone 277208 (TRAV1-2, TRAJ17)
CAVRDMIAGNKLTF

SEQ ID NO: 554416 - protein, 15 aa, Homo sapiens
  CDR3 for beta chain variable domain of TCR clone 277208 (TRBV20-1, TRBJ2-7)
CSARDRVSGMDEQYF

SEQ ID NO: 554417 - protein, 14 aa, Homo sapiens
  CDR3 for alpha chain variable domain of TCR clone 277209 (TRAV29/DV5, TRAJ36)
CAARRKTGANNLLA

SEQ ID NO: 554418 - protein, 13 aa, Homo sapiens
  CDR3 for beta chain variable domain of TCR clone 277209 (TRBV24-1, TRBJ2-2)
CATSDWSTGELFF

SEQ ID NO: 554419 - protein, 15 aa, Homo sapiens
  CDR3 for alpha chain variable domain of TCR clone 277210 (TRAV13-1, TRAJ17)
CAASIHGGCRHQANF

SEQ ID NO: 554420 - protein, 14 aa, Homo sapiens
  CDR3 for beta chain variable domain of TCR clone 277210 (TRBV20-1, TRBJ2-4)
CSARDRGQGGIQYF

SEQ ID NO: 554421 - protein, 13 aa, Homo sapiens
  CDR3 for alpha chain variable domain of TCR clone 277211 (TRAV1-2, TRAJ9)
CAALNTGGFKTIF

SEQ ID NO: 554422 - protein, 14 aa, Homo sapiens
  CDR3 for beta chain variable domain of TCR clone 277211 (TRBV13, TRBJ2-3)
CASSSGSPRDTQYF

SEQ ID NO: 554423 - protein, 13 aa, Homo sapiens
  CDR3 for alpha chain variable domain of TCR clone 277212 (TRAV21, TRAJ57)
CAVTQGGSERLVF

SEQ ID NO: 554424 - protein, 11 aa, Homo sapiens
  CDR3 for beta chain variable domain of TCR clone 277212 (TRBV11-2, TRBJ2-2)
CASSLPGELFF

SEQ ID NO: 554425 - protein, 13 aa, Homo sapiens
  CDR3 for alpha chain variable domain of TCR clone 277213 (TRAV6, TRAJ16)
CALDDSDSQKLLF

SEQ ID NO: 554426 - protein, 14 aa, Homo sapiens
  CDR3 for beta chain variable domain of TCR clone 277213 (TRBV12-4, TRBJ1-6)
CASNLQGKGSPLHF

SEQ ID NO: 554427 - protein, 13 aa, Homo sapiens
  CDR3 for alpha chain variable domain of TCR clone 277214 (TRAV12-1, TRAJ3)
CVVNGIVQQCFQD

SEQ ID NO: 554428 - protein, 18 aa, Homo sapiens
  CDR3 for beta chain variable domain of TCR clone 277214 (TRBV4-2, TRBJ2-1)
CASSQQGLAASSYNEQFF

SEQ ID NO: 554429 - protein, 16 aa, Homo sapiens
  CDR3 for alpha chain variable domain of TCR clone 277215 (TRAV3, TRAJ3)
CAVRDRAKSSASKIIF

SEQ ID NO: 554430 - protein, 13 aa, Homo sapiens
  CDR3 for beta chain variable domain of TCR clone 277215 (TRBV10-3, TRBJ2-5)
CASKLAVNYEQYF

SEQ ID NO: 554431 - protein, 15 aa, Homo sapiens
  CDR3 for alpha chain variable domain of TCR clone 277216 (TRAV8-3, TRAJ45)
CASSYSGGGADGLTF

SEQ ID NO: 554432 - protein, 16 aa, Homo sapiens
  CDR3 for beta chain variable domain of TCR clone 277216 (TRBV7-9, TRBJ2-2)
CASSGLGGASTGELFF

SEQ ID NO: 554433 - protein, 12 aa, Homo sapiens
  CDR3 for alpha chain variable domain of TCR clone 277217 (TRAV1-1, TRAJ43)
CAPRASSNDMRF

SEQ ID NO: 554434 - protein, 18 aa, Homo sapiens
  CDR3 for beta chain variable domain of TCR clone 277217 (TRBV12-4, TRBJ2-2)
CASSLVAGTRGRTGELFF

SEQ ID NO: 554435 - protein, 14 aa, Homo sapiens
  CDR3 for alpha chain variable domain of TCR clone 277218 (TRAV38-1, TRAJ45)
CAYYSGGGADGLTF

SEQ ID NO: 554436 - protein, 13 aa, Homo sapiens
  CDR3 for beta chain variable domain of TCR clone 277218 (TRBV27, TRBJ1-1)
CASSLSIGAEAFF

SEQ ID NO: 554437 - protein, 16 aa, Homo sapiens
  CDR3 for alpha chain variable domain of TCR clone 277219 (TRAV30, TRAJ24)
CGTEIVDADGWGKFQF

SEQ ID NO: 554438 - protein, 15 aa, Homo sapiens
  CDR3 for beta chain variable domain of TCR clone 277219 (TRBV5-4, TRBJ2-1)
CASSREGLPYNEQFF

SEQ ID NO: 554439 - protein, 10 aa, Homo sapiens
  CDR3 for alpha chain variable domain of TCR clone 277220 (TRAV23/DV6, TRAJ57)
CAASSTLSQG

SEQ ID NO: 554440 - protein, 14 aa, Homo sapiens
  CDR3 for beta chain variable domain of TCR clone 277220 (TRBV7-8, TRBJ2-5)
CAGGVGGGGGEWFF

SEQ ID NO: 554441 - protein, 13 aa, Homo sapiens
  CDR3 for alpha chain variable domain of TCR clone 277221 (TRAV20, TRAJ37)
CAGCTSNTGKLIF

SEQ ID NO: 554442 - protein, 18 aa, Homo sapiens
  CDR3 for beta chain variable domain of TCR clone 277221 (TRBV4-1, TRBJ1-5)
CASSQDPRGQGLNQPQHF

SEQ ID NO: 554443 - protein, 16 aa, Homo sapiens
  CDR3 for alpha chain variable domain of TCR clone 277222 (TRAV30, TRAJ24)
CGTEIVDAGSWGKFQF

SEQ ID NO: 554444 - protein, 14 aa, Homo sapiens
  CDR3 for beta chain variable domain of TCR clone 277222 (TRBV12-5, TRBJ2-5)
CASGSRTHQESQYF

SEQ ID NO: 554445 - protein, 12 aa, Homo sapiens
  CDR3 for alpha chain variable domain of TCR clone 277223 (TRAV21, TRAJ37)
CDVRGNTGKLIF

SEQ ID NO: 554446 - protein, 14 aa, Homo sapiens
  CDR3 for beta chain variable domain of TCR clone 277223 (TRBV19, TRBJ2-1)
CASEVTGARNEQFF

SEQ ID NO: 554447 - protein, 13 aa, Homo sapiens
  CDR3 for alpha chain variable domain of TCR clone 277224 (TRAV8-3, TRAJ43)
RAVGPDNNNDMRF

SEQ ID NO: 554448 - protein, 14 aa, Homo sapiens
  CDR3 for beta chain variable domain of TCR clone 277224 (TRBV6-1, TRBJ1-3)
CASVQGGGGNTIYF

SEQ ID NO: 554449 - protein, 15 aa, Homo sapiens
  CDR3 for alpha chain variable domain of TCR clone 277225 (TRAV26-1, TRAJ42)
CIVRVKGGSQGNLIF

SEQ ID NO: 554450 - protein, 14 aa, Homo sapiens
  CDR3 for beta chain variable domain of TCR clone 277225 (TRBV19, TRBJ2-2)
CATTGHANTWELFF

SEQ ID NO: 554451 - protein, 11 aa, Homo sapiens
  CDR3 for alpha chain variable domain of TCR clone 277226 (TRAV3, TRAJ21)
CAVGNCNKFYF

SEQ ID NO: 554452 - protein, 17 aa, Homo sapiens
  CDR3 for beta chain variable domain of TCR clone 277226 (TRBV24-1, TRBJ2-1)
CATSDVSTSGTYNEQFF

SEQ ID NO: 554453 - protein, 18 aa, Homo sapiens
  CDR3 for alpha chain variable domain of TCR clone 277227 (TRAV21, TRAJ52)
CSVRPSPAGGTSFGKLTF

SEQ ID NO: 554454 - protein, 17 aa, Homo sapiens
  CDR3 for beta chain variable domain of TCR clone 277227 (TRBV13, TRBJ2-3)
CASSLSRVAGGRNTQYF

SEQ ID NO: 554455 - protein, 12 aa, Homo sapiens
  CDR3 for alpha chain variable domain of TCR clone 277228 (TRAV12-2, TRAJ3)
CAVWSRASKIIF

SEQ ID NO: 554456 - protein, 12 aa, Homo sapiens
  CDR3 for beta chain variable domain of TCR clone 277228 (TRBV11-2, TRBJ2-1)
CASSPGNNEQFF

SEQ ID NO: 554457 - protein, 13 aa, Homo sapiens
  CDR3 for alpha chain variable domain of TCR clone 277229 (TRAV21, TRAJ27)
CAALNTNAGKSTF

SEQ ID NO: 554458 - protein, 18 aa, Homo sapiens
  CDR3 for beta chain variable domain of TCR clone 277229 (TRBV20-1, TRBJ2-6)
CSARTLAGGPSGANVLSF

SEQ ID NO: 554459 - protein, 14 aa, Homo sapiens
  CDR3 for alpha chain variable domain of TCR clone 277230 (TRAV1-1, TRAJ27)
CAVIYNTNAGKSAF

SEQ ID NO: 554460 - protein, 15 aa, Homo sapiens
  CDR3 for beta chain variable domain of TCR clone 277230 (TRBV6-3, TRBJ2-7)
CASSSPGTVFYEQYF

SEQ ID NO: 554461 - protein, 13 aa, Homo sapiens
  CDR3 for alpha chain variable domain of TCR clone 277231 (TRAV12-2, TRAJ17)
CAVLFKGRQQANF

SEQ ID NO: 554462 - protein, 17 aa, Homo sapiens
  CDR3 for beta chain variable domain of TCR clone 277231 (TRBV20-1, TRBJ2-2)
CSASGSGQGGLTGELFF

SEQ ID NO: 554463 - protein, 13 aa, Homo sapiens
  CDR3 for alpha chain variable domain of TCR clone 277232 (TRAV21, TRAJ15)
CAVANQAGTALIF

SEQ ID NO: 554464 - protein, 14 aa, Homo sapiens
  CDR3 for beta chain variable domain of TCR clone 277232 (TRBV27, TRBJ2-2)
CASSLGPATGELFF

SEQ ID NO: 554465 - protein, 12 aa, Homo sapiens
  CDR3 for alpha chain variable domain of TCR clone 277233 (TRAV3, TRAJ20)
CAVRDGDYKLSF

SEQ ID NO: 554466 - protein, 16 aa, Homo sapiens
  CDR3 for beta chain variable domain of TCR clone 277233 (TRBV6-5, TRBJ2-1)
CASSYSLSGGYNEQFF

SEQ ID NO: 554467 - protein, 14 aa, Homo sapiens
  CDR3 for alpha chain variable domain of TCR clone 277234 (TRAV26-1, TRAJ38)
CIADNAGNNRKLIW

SEQ ID NO: 554468 - protein, 15 aa, Homo sapiens
  CDR3 for beta chain variable domain of TCR clone 277234 (TRBV9, TRBJ1-6)
CASSVAGTGVSPLHF

SEQ ID NO: 554469 - protein, 15 aa, Homo sapiens
  CDR3 for alpha chain variable domain of TCR clone 277235 (TRAV2, TRAJ9)
CAVEDRGTGGFKTIF

SEQ ID NO: 554470 - protein, 13 aa, Homo sapiens
  CDR3 for beta chain variable domain of TCR clone 277235 (TRBV7-9, TRBJ1-2)
CASSLKQNYGYAF

SEQ ID NO: 554471 - protein, 12 aa, Homo sapiens
  CDR3 for alpha chain variable domain of TCR clone 277236 (TRAV26-1, TRAJ17)
CIVRSAGNNLTF

SEQ ID NO: 554472 - protein, 16 aa, Homo sapiens
  CDR3 for beta chain variable domain of TCR clone 277236 (TRBV6-5, TRBJ2-7)
CASSYFRVGISDEQYF

SEQ ID NO: 554473 - protein, 14 aa, Homo sapiens
  CDR3 for alpha chain variable domain of TCR clone 277237 (TRAV13-1, TRAJ20)
CAARPGSNVYKLSF

SEQ ID NO: 554474 - protein, 13 aa, Homo sapiens
  CDR3 for beta chain variable domain of TCR clone 277237 (TRBV20-1, TRBJ1-1)
CSAPPGGHTEAFF

SEQ ID NO: 554475 - protein, 12 aa, Homo sapiens
  CDR3 for alpha chain variable domain of TCR clone 277238 (TRAV12-3, TRAJ41)
CAMSYSGYALNF

SEQ ID NO: 554476 - protein, 14 aa, Homo sapiens
  CDR3 for beta chain variable domain of TCR clone 277238 (TRBV10-2, TRBJ1-5)
CASSSTGRNQPQHF

SEQ ID NO: 554477 - protein, 14 aa, Homo sapiens
  CDR3 for alpha chain variable domain of TCR clone 277239 (TRAV1-2, TRAJ16)
CAVNRFSDGQKLLF

SEQ ID NO: 554478 - protein, 15 aa, Homo sapiens
  CDR3 for beta chain variable domain of TCR clone 277239 (TRBV29-1, TRBJ2-7)
CSVVFFDRGSYEQYF

SEQ ID NO: 554479 - protein, 13 aa, Homo sapiens
  CDR3 for alpha chain variable domain of TCR clone 277240 (TRAV1-1, TRAJ31)
CASYLNNNASLMF

SEQ ID NO: 554480 - protein, 13 aa, Homo sapiens
  CDR3 for beta chain variable domain of TCR clone 277240 (TRBV15, TRBJ1-6)
CATSGGLNSPLHF

SEQ ID NO: 554481 - protein, 12 aa, Homo sapiens
  CDR3 for alpha chain variable domain of TCR clone 277241 (TRAV3, TRAJ26)
CAVRDYGQNFVF

SEQ ID NO: 554482 - protein, 13 aa, Homo sapiens
  CDR3 for beta chain variable domain of TCR clone 277241 (TRBV7-2, TRBJ2-2)
CASSLAVTGELFF

SEQ ID NO: 554483 - protein, 13 aa, Homo sapiens
  CDR3 for alpha chain variable domain of TCR clone 277242 (TRAV3, TRAJ20)
CAVRSLNDYKLSF

SEQ ID NO: 554484 - protein, 14 aa, Homo sapiens
  CDR3 for beta chain variable domain of TCR clone 277242 (TRBV25-1, TRBJ1-1)
CASTHLGGNTEAFF

SEQ ID NO: 554485 - protein, 15 aa, Homo sapiens
  CDR3 for alpha chain variable domain of TCR clone 277243 (TRAV16, TRAJ12)
CSKWPLRDSSYKLIF

SEQ ID NO: 554486 - protein, 14 aa, Homo sapiens
  CDR3 for beta chain variable domain of TCR clone 277243 (TRBV27, TRBJ2-2)
CASRPGVNTGELFF

SEQ ID NO: 554487 - protein, 14 aa, Homo sapiens
  CDR3 for alpha chain variable domain of TCR clone 277244 (TRAV34, TRAJ44)
CGADGTGTASKLTF

SEQ ID NO: 554488 - protein, 18 aa, Homo sapiens
  CDR3 for beta chain variable domain of TCR clone 277244 (TRBV13, TRBJ2-6)
CASSPMTSGGSGANVLTF

SEQ ID NO: 554489 - protein, 16 aa, Homo sapiens
  CDR3 for alpha chain variable domain of TCR clone 277245 (TRAV3, TRAJ13)
CAVRDPNSGGYKKVTF

SEQ ID NO: 554490 - protein, 13 aa, Homo sapiens
  CDR3 for beta chain variable domain of TCR clone 277245 (TRBV7-9, TRBJ2-7)
CASSLQGSYEQYF

SEQ ID NO: 554491 - protein, 14 aa, Homo sapiens
  CDR3 for alpha chain variable domain of TCR clone 277246 (TRAV13-1, TRAJ44)
CAAKATGPASKLPF

SEQ ID NO: 554492 - protein, 17 aa, Homo sapiens
  CDR3 for beta chain variable domain of TCR clone 277246 (TRBV7-3, TRBJ2-3)
RASSLMKRMRGADTQYF

SEQ ID NO: 554493 - protein, 14 aa, Homo sapiens
  CDR3 for alpha chain variable domain of TCR clone 277247 (TRAV13-1, TRAJ15)
CAASTNQAGTALIF

SEQ ID NO: 554494 - protein, 11 aa, Homo sapiens
  CDR3 for beta chain variable domain of TCR clone 277247 (TRBV7-2, TRBJ2-1)
CASSLRDKEFF

SEQ ID NO: 554495 - protein, 12 aa, Homo sapiens
  CDR3 for alpha chain variable domain of TCR clone 277248 (TRAV13-1, TRAJ48)
CAANFGNEKLTF

SEQ ID NO: 554496 - protein, 15 aa, Homo sapiens
  CDR3 for beta chain variable domain of TCR clone 277248 (TRBV2, TRBJ2-7)
CASSEGLARSYEQYF

SEQ ID NO: 554497 - protein, 17 aa, Homo sapiens
  CDR3 for alpha chain variable domain of TCR clone 277249 (TRAV3, TRAJ6)
CAVRDGPRAGGSYIPTF

SEQ ID NO: 554498 - protein, 19 aa, Homo sapiens
  CDR3 for beta chain variable domain of TCR clone 277249 (TRBV28, TRBJ2-1)
CSTPIGRSPGLAGGNEQFF

SEQ ID NO: 554499 - protein, 13 aa, Homo sapiens
  CDR3 for alpha chain variable domain of TCR clone 277250 (TRAV13-1, TRAJ9)
CASRGTGGFKTIF

SEQ ID NO: 554500 - protein, 12 aa, Homo sapiens
  CDR3 for beta chain variable domain of TCR clone 277250 (TRBV2, TRBJ2-1)
CAYGPPGNEQFF

SEQ ID NO: 554501 - protein, 17 aa, Homo sapiens
  CDR3 for alpha chain variable domain of TCR clone 277251 (TRAV13-1, TRAJ28)
CAASPPYSGAGRYQLTF

SEQ ID NO: 554502 - protein, 14 aa, Homo sapiens
  CDR3 for beta chain variable domain of TCR clone 277251 (TRBV24-1, TRBJ1-1)
CATSIPRGDTEAFF

SEQ ID NO: 554503 - protein, 13 aa, Homo sapiens
  CDR3 for alpha chain variable domain of TCR clone 277252 (TRAV5, TRAJ30)
CAEIANRDDKIIF

SEQ ID NO: 554504 - protein, 14 aa, Homo sapiens
  CDR3 for beta chain variable domain of TCR clone 277252 (TRBV4-1, TRBJ2-2)
CASSQAGNTGELFF

SEQ ID NO: 554505 - protein, 17 aa, Homo sapiens
  CDR3 for alpha chain variable domain of TCR clone 277253 (TRAV3, TRAJ6)
CAVKDGPRAGGSYIPTF

SEQ ID NO: 554506 - protein, 15 aa, Homo sapiens
  CDR3 for beta chain variable domain of TCR clone 277253 (TRBV6-5, TRBJ2-1)
CASSYDARAGNEQFF

SEQ ID NO: 554507 - protein, 15 aa, Homo sapiens
  CDR3 for alpha chain variable domain of TCR clone 277254 (TRAV3, TRAJ20)
CAVRDIKLSDYKLSF

SEQ ID NO: 554508 - protein, 18 aa, Homo sapiens
  CDR3 for beta chain variable domain of TCR clone 277254 (TRBV20-1, TRBJ2-5)
CSQTGNSGRLGGKETQYF

SEQ ID NO: 554509 - protein, 12 aa, Homo sapiens
  CDR3 for alpha chain variable domain of TCR clone 277255 (TRAV35, TRAJ52)
NAGGTSYGKLTF

SEQ ID NO: 554510 - protein, 12 aa, Homo sapiens
  CDR3 for beta chain variable domain of TCR clone 277255 (TRBV11-2, TRBJ2-2)
CASSLGGGELFF

SEQ ID NO: 554511 - protein, 13 aa, Homo sapiens
  CDR3 for alpha chain variable domain of TCR clone 277256 (TRAV26-2, TRAJ43)
CILRAVNNNDMRF

SEQ ID NO: 554512 - protein, 14 aa, Homo sapiens
  CDR3 for beta chain variable domain of TCR clone 277256 (TRBV19, TRBJ2-1)
CDSPTFVLSGEQFF

SEQ ID NO: 554513 - protein, 14 aa, Homo sapiens
  CDR3 for alpha chain variable domain of TCR clone 277257 (TRAV13-2, TRAJ22)
CADGTLGSARQLTI

SEQ ID NO: 554514 - protein, 16 aa, Homo sapiens
  CDR3 for beta chain variable domain of TCR clone 277257 (TRBV19, TRBJ2-1)
CASSSKGTRSYNEQFF

SEQ ID NO: 554515 - protein, 13 aa, Homo sapiens
  CDR3 for alpha chain variable domain of TCR clone 277258 (TRAV12-1, TRAJ3)
CVVNPRGASKIIF

SEQ ID NO: 554516 - protein, 13 aa, Homo sapiens
  CDR3 for beta chain variable domain of TCR clone 277258 (TRBV28, TRBJ1-5)
CASSDRVNQPQHF

SEQ ID NO: 554517 - protein, 12 aa, Homo sapiens
  CDR3 for alpha chain variable domain of TCR clone 277259 (TRAV35, TRAJ39)
LAPNNAGNMLTF

SEQ ID NO: 554518 - protein, 16 aa, Homo sapiens
  CDR3 for beta chain variable domain of TCR clone 277259 (TRBV2, TRBJ2-3)
CASSTSVDGVTDTQYC

SEQ ID NO: 554519 - protein, 16 aa, Homo sapiens
  CDR3 for alpha chain variable domain of TCR clone 277260 (TRAV27, TRAJ52)
CAGAPAGGTSYGKLTF

SEQ ID NO: 554520 - protein, 16 aa, Homo sapiens
  CDR3 for beta chain variable domain of TCR clone 277260 (TRBV27, TRBJ2-2)
CASSFRGLVRTGELFF

SEQ ID NO: 554521 - protein, 13 aa, Homo sapiens
  CDR3 for alpha chain variable domain of TCR clone 277261 (TRAV3, TRAJ30)
CAVRDRGDDKIIF

SEQ ID NO: 554522 - protein, 12 aa, Homo sapiens
  CDR3 for beta chain variable domain of TCR clone 277261 (TRBV7-9, TRBJ1-6)
CASSLMTSPLHF

SEQ ID NO: 554523 - protein, 13 aa, Homo sapiens
  CDR3 for alpha chain variable domain of TCR clone 277262 (TRAV3, TRAJ13)
CAVRDGGYQKVTF

SEQ ID NO: 554524 - protein, 13 aa, Homo sapiens
  CDR3 for beta chain variable domain of TCR clone 277262 (TRBV27, TRBJ2-3)
CASSLSRTDTQYF

SEQ ID NO: 554525 - protein, 14 aa, Homo sapiens
  CDR3 for alpha chain variable domain of TCR clone 277263 (TRAV12-2, TRAJ40)
CAVKIPSGTYKSIF

SEQ ID NO: 554526 - protein, 18 aa, Homo sapiens
  CDR3 for beta chain variable domain of TCR clone 277263 (TRBV20-1, TRBJ2-6)
CSAETTPTHGSGANVLTF

SEQ ID NO: 554527 - protein, 16 aa, Homo sapiens
  CDR3 for alpha chain variable domain of TCR clone 277264 (TRAV4, TRAJ9)
CLVGDTNRPGGFKTIF

SEQ ID NO: 554528 - protein, 14 aa, Homo sapiens
  CDR3 for beta chain variable domain of TCR clone 277264 (TRBV20-1, TRBJ1-1)
CSAQTRIGGTEAFF

SEQ ID NO: 554529 - protein, 12 aa, Homo sapiens
  CDR3 for alpha chain variable domain of TCR clone 277265 (TRAV1-1, TRAJ8)
CVGGTGFQKLVF

SEQ ID NO: 554530 - protein, 17 aa, Homo sapiens
  CDR3 for beta chain variable domain of TCR clone 277265 (TRBV4-3, TRBJ2-1)
SASSQELAIVSSNEQFF

SEQ ID NO: 554531 - protein, 12 aa, Homo sapiens
  CDR3 for alpha chain variable domain of TCR clone 277266 (TRAV20, TRAJ54)
CAVQEGAQKLVF

SEQ ID NO: 554532 - protein, 16 aa, Homo sapiens
  CDR3 for beta chain variable domain of TCR clone 277266 (TRBV13, TRBJ2-3)
CQRPLQGSGGRNTQYF

SEQ ID NO: 554533 - protein, 11 aa, Homo sapiens
  CDR3 for alpha chain variable domain of TCR clone 277267 (TRAV3, TRAJ21)
CAVGNFNKFYF

SEQ ID NO: 554534 - protein, 15 aa, Homo sapiens
  CDR3 for beta chain variable domain of TCR clone 277267 (TRBV7-2, TRBJ2-3)
CASSLEQGGTDTQYF

SEQ ID NO: 554535 - protein, 16 aa, Homo sapiens
  CDR3 for alpha chain variable domain of TCR clone 277268 (TRAV27, TRAJ13)
CAGAKSDSGGYQKVTF

SEQ ID NO: 554536 - protein, 15 aa, Homo sapiens
  CDR3 for beta chain variable domain of TCR clone 277268 (TRBV10-1, TRBJ2-1)
CASSEWRGTYNEQFF

SEQ ID NO: 554537 - protein, 14 aa, Homo sapiens
  CDR3 for alpha chain variable domain of TCR clone 277269 (TRAV21, TRAJ21)
CAVKGFGNFNKFYF

SEQ ID NO: 554538 - protein, 15 aa, Homo sapiens
  CDR3 for beta chain variable domain of TCR clone 277269 (TRBV18, TRBJ2-1)
CASSPPSASYNEQFF

SEQ ID NO: 554539 - protein, 17 aa, Homo sapiens
  CDR3 for alpha chain variable domain of TCR clone 277270 (TRAV1-1, TRAJ3)
CLLLLRCPYSSASKIIF

SEQ ID NO: 554540 - protein, 13 aa, Homo sapiens
  CDR3 for beta chain variable domain of TCR clone 277270 (TRBV20-1, TRBJ1-1)
CSARAGGDTEAFF

SEQ ID NO: 554541 - protein, 12 aa, Homo sapiens
  CDR3 for alpha chain variable domain of TCR clone 277271 (TRAV12-3, TRAJ17)
CAMTLTGNKLTF

SEQ ID NO: 554542 - protein, 17 aa, Homo sapiens
  CDR3 for beta chain variable domain of TCR clone 277271 (TRBV11-2, TRBJ2-1)
WASSLYPPGVEYNEQFF

SEQ ID NO: 554543 - protein, 14 aa, Homo sapiens
  CDR3 for alpha chain variable domain of TCR clone 277272 (TRAV12-1, TRAJ43)
CVVNGRSNNNDMRF

SEQ ID NO: 554544 - protein, 15 aa, Homo sapiens
  CDR3 for beta chain variable domain of TCR clone 277272 (TRBV5-1, TRBJ1-1)
CASSLSDLGGTEAFF

SEQ ID NO: 554545 - protein, 10 aa, Homo sapiens
  CDR3 for alpha chain variable domain of TCR clone 277273 (TRAV1-2, TRAJ34)
CAVNTDKLFF

SEQ ID NO: 554546 - protein, 13 aa, Homo sapiens
  CDR3 for beta chain variable domain of TCR clone 277273 (TRBV10-1, TRBJ2-1)
CASSAGPDNEQFF

SEQ ID NO: 554547 - protein, 16 aa, Homo sapiens
  CDR3 for alpha chain variable domain of TCR clone 277274 (TRAV13-1, TRAJ17)
CAASKGVNAAGNKLTF

SEQ ID NO: 554548 - protein, 15 aa, Homo sapiens
  CDR3 for beta chain variable domain of TCR clone 277274 (TRBV20-1, TRBJ1-5)
CSAREGGYSNQPQHF

SEQ ID NO: 554549 - protein, 13 aa, Homo sapiens
  CDR3 for alpha chain variable domain of TCR clone 277275 (TRAV23/DV6, TRAJ58)
CAATGTSGSRMTF

SEQ ID NO: 554550 - protein, 13 aa, Homo sapiens
  CDR3 for beta chain variable domain of TCR clone 277275 (TRBV5-5, TRBJ1-2)
CASSFWRGEDYTF

SEQ ID NO: 554551 - protein, 11 aa, Homo sapiens
  CDR3 for alpha chain variable domain of TCR clone 277276 (TRAV12-3, TRAJ27)
CAMANAGKSTF

SEQ ID NO: 554552 - protein, 12 aa, Homo sapiens
  CDR3 for beta chain variable domain of TCR clone 277276 (TRBV11-2, TRBJ2-2)
SASSLGGGELFF

SEQ ID NO: 554553 - protein, 16 aa, Homo sapiens
  CDR3 for alpha chain variable domain of TCR clone 277277 (TRAV12-3, TRAJ53)
CAMSPGSGSSNYKLTF

SEQ ID NO: 554554 - protein, 12 aa, Homo sapiens
  CDR3 for beta chain variable domain of TCR clone 277277 (TRBV11-2, TRBJ2-2)
CASSLGGGELFF

SEQ ID NO: 554555 - protein, 11 aa, Homo sapiens
  CDR3 for alpha chain variable domain of TCR clone 277278 (TRAV17, TRAJ43)
CATPRSNDMRF

SEQ ID NO: 554556 - protein, 14 aa, Homo sapiens
  CDR3 for beta chain variable domain of TCR clone 277278 (TRBV7-2, TRBJ2-7)
CASSSKTSFYEQYF

SEQ ID NO: 554557 - protein, 14 aa, Homo sapiens
  CDR3 for alpha chain variable domain of TCR clone 277279 (TRAV27, TRAJ22)
CAGVSVLGKRQLTF

SEQ ID NO: 554558 - protein, 14 aa, Homo sapiens
  CDR3 for beta chain variable domain of TCR clone 277279 (TRBV7-2, TRBJ1-5)
CASSTQGAGQPQHF

SEQ ID NO: 554559 - protein, 15 aa, Homo sapiens
  CDR3 for alpha chain variable domain of TCR clone 277280 (TRAV35, TRAJ58)
CAGRRQETSGSRLTF

SEQ ID NO: 554560 - protein, 16 aa, Homo sapiens
  CDR3 for beta chain variable domain of TCR clone 277280 (TRBV7-3, TRBJ2-1)
CASSLSSGGGAKEQFF

SEQ ID NO: 554561 - protein, 13 aa, Homo sapiens
  CDR3 for alpha chain variable domain of TCR clone 277281 (TRAV21, TRAJ57)
RAVTQGGSGKLFF

SEQ ID NO: 554562 - protein, 11 aa, Homo sapiens
  CDR3 for beta chain variable domain of TCR clone 277281 (TRBV11-2, TRBJ2-2)
CASSLPGELFF

SEQ ID NO: 554563 - protein, 17 aa, Homo sapiens
  CDR3 for alpha chain variable domain of TCR clone 277282 (TRAV20, TRAJ28)
CAVQGGYSGAGSYQLTF

SEQ ID NO: 554564 - protein, 15 aa, Homo sapiens
  CDR3 for beta chain variable domain of TCR clone 277282 (TRBV7-2, TRBJ2-7)
CASSLPSGRTYEQYF

SEQ ID NO: 554565 - protein, 16 aa, Homo sapiens
  CDR3 for alpha chain variable domain of TCR clone 277283 (TRAV30, TRAJ24)
CGTEIVDDDSWGKFQF

SEQ ID NO: 554566 - protein, 15 aa, Homo sapiens
  CDR3 for beta chain variable domain of TCR clone 277283 (TRBV9, TRBJ1-6)
CASSVAGTGDSPLHF

SEQ ID NO: 554567 - protein, 13 aa, Homo sapiens
  CDR3 for alpha chain variable domain of TCR clone 277284 (TRAV1-2, TRAJ9)
CAALNTGGFKTIF

SEQ ID NO: 554568 - protein, 16 aa, Homo sapiens
  CDR3 for beta chain variable domain of TCR clone 277284 (TRBV4-1, TRBJ1-2)
CASSQESRGGSYGYTF

SEQ ID NO: 554569 - protein, 18 aa, Homo sapiens
  CDR3 for alpha chain variable domain of TCR clone 277285 (TRAV21, TRAJ52)
CAVRPSPAGGTSYGQLTF

SEQ ID NO: 554570 - protein, 17 aa, Homo sapiens
  CDR3 for beta chain variable domain of TCR clone 277285 (TRBV13, TRBJ2-3)
CASSLARVAGGRNTQYF

SEQ ID NO: 554571 - protein, 14 aa, Homo sapiens
  CDR3 for alpha chain variable domain of TCR clone 277286 (TRAV26-1, TRAJ21)
CIVRPPYNFNKFYF

SEQ ID NO: 554572 - protein, 14 aa, Homo sapiens
  CDR3 for beta chain variable domain of TCR clone 277286 (TRBV11-3, TRBJ2-1)
CASSATASGSIQFF

SEQ ID NO: 554573 - protein, 14 aa, Homo sapiens
  CDR3 for alpha chain variable domain of TCR clone 277287 (TRAV8-4, TRAJ13)
CAVTLSGGYQKVTF

SEQ ID NO: 554574 - protein, 16 aa, Homo sapiens
  CDR3 for beta chain variable domain of TCR clone 277287 (TRBV18, TRBJ2-2)
CASSPPRTANTGELFF

SEQ ID NO: 554575 - protein, 14 aa, Homo sapiens
  CDR3 for alpha chain variable domain of TCR clone 277288 (TRAV17, TRAJ37)
CATDGSSNTGKLIF

SEQ ID NO: 554576 - protein, 13 aa, Homo sapiens
  CDR3 for beta chain variable domain of TCR clone 277288 (TRBV11-2, TRBJ2-1)
CASSLNLVNEQFF

SEQ ID NO: 554577 - protein, 11 aa, Homo sapiens
  CDR3 for alpha chain variable domain of TCR clone 277289 (TRAV1-1, TRAJ23)
CAVRQGGKLIF

SEQ ID NO: 554578 - protein, 14 aa, Homo sapiens
  CDR3 for beta chain variable domain of TCR clone 277289 (TRBV19, TRBJ2-5)
CASSSSGIQETQYF

SEQ ID NO: 554579 - protein, 13 aa, Homo sapiens
  CDR3 for alpha chain variable domain of TCR clone 277290 (TRAV27, TRAJ56)
CAGKPGANSKLTF

SEQ ID NO: 554580 - protein, 18 aa, Homo sapiens
  CDR3 for beta chain variable domain of TCR clone 277290 (TRBV11-2, TRBJ2-3)
CASSLGGGSRGAPNTQYF

SEQ ID NO: 554581 - protein, 11 aa, Homo sapiens
  CDR3 for alpha chain variable domain of TCR clone 277291 (TRAV2, TRAJ20)
CAVEYDYKLSF

SEQ ID NO: 554582 - protein, 12 aa, Homo sapiens
  CDR3 for beta chain variable domain of TCR clone 277291 (TRBV6-3, TRBJ2-7)
CASSLTPYEQYF

SEQ ID NO: 554583 - protein, 17 aa, Homo sapiens
  CDR3 for alpha chain variable domain of TCR clone 277292 (TRAV13-1, TRAJ52)
CAARSGAGGTSYGKLTF

SEQ ID NO: 554584 - protein, 15 aa, Homo sapiens
  CDR3 for beta chain variable domain of TCR clone 277292 (TRBV28, TRBJ2-4)
CAAGSGTLLMGIQYF

SEQ ID NO: 554585 - protein, 17 aa, Homo sapiens
  CDR3 for alpha chain variable domain of TCR clone 277293 (TRAV3, TRAJ6)
CAVRAGPRAGGSYIPTF

SEQ ID NO: 554586 - protein, 13 aa, Homo sapiens
  CDR3 for beta chain variable domain of TCR clone 277293 (TRBV27, TRBJ2-1)
CASRTLGVGEQFF

SEQ ID NO: 554587 - protein, 14 aa, Homo sapiens
  CDR3 for alpha chain variable domain of TCR clone 277294 (TRAV2, TRAJ37)
CAVDFTSNTGNLIF

SEQ ID NO: 554588 - protein, 13 aa, Homo sapiens
  CDR3 for beta chain variable domain of TCR clone 277294 (TRBV9, TRBJ2-1)
CASSPSGGNEQFF

SEQ ID NO: 554589 - protein, 15 aa, Homo sapiens
  CDR3 for alpha chain variable domain of TCR clone 277295 (TRAV23/DV6, TRAJ18)
CAASFRGPTLGRLSF

SEQ ID NO: 554590 - protein, 13 aa, Homo sapiens
  CDR3 for beta chain variable domain of TCR clone 277295 (TRBV28, TRBJ2-7)
CAILDRAGGEQYF

SEQ ID NO: 554591 - protein, 15 aa, Homo sapiens
  CDR3 for alpha chain variable domain of TCR clone 277296 (TRAV34, TRAJ38)
CGADFTPGNNRKLIW

SEQ ID NO: 554592 - protein, 16 aa, Homo sapiens
  CDR3 for beta chain variable domain of TCR clone 277296 (TRBV12-5, TRBJ2-5)
CARGPRTSGNQETQYF

SEQ ID NO: 554593 - protein, 14 aa, Homo sapiens
  CDR3 for alpha chain variable domain of TCR clone 277297 (TRAV12-1, TRAJ9)
CVVIPQGGGFKTIF

SEQ ID NO: 554594 - protein, 13 aa, Homo sapiens
  CDR3 for beta chain variable domain of TCR clone 277297 (TRBV19, TRBJ1-2)
CASSVPGQDGYTF

SEQ ID NO: 554595 - protein, 13 aa, Homo sapiens
  CDR3 for alpha chain variable domain of TCR clone 277298 (TRAV21, TRAJ27)
FAARPGNPGKSTF

SEQ ID NO: 554596 - protein, 14 aa, Homo sapiens
  CDR3 for beta chain variable domain of TCR clone 277298 (TRBV7-6, TRBJ2-3)
CASSLGTVTDTQYF

SEQ ID NO: 554597 - protein, 14 aa, Homo sapiens
  CDR3 for alpha chain variable domain of TCR clone 277299 (TRAV12-1, TRAJ3)
CGAARYSSASKIIF

SEQ ID NO: 554598 - protein, 14 aa, Homo sapiens
  CDR3 for beta chain variable domain of TCR clone 277299 (TRBV7-6, TRBJ2-3)
CASSLGTVTDTQYF

SEQ ID NO: 554599 - protein, 15 aa, Homo sapiens
  CDR3 for alpha chain variable domain of TCR clone 277300 (TRAV2, TRAJ45)
CAVDGTGGGADGLTF

SEQ ID NO: 554600 - protein, 18 aa, Homo sapiens
  CDR3 for beta chain variable domain of TCR clone 277300 (TRBV11-2, TRBJ2-3)
CASSLGGASRGAPNTQYF

SEQ ID NO: 554601 - protein, 14 aa, Homo sapiens
  CDR3 for alpha chain variable domain of TCR clone 277301 (TRAV12-2, TRAJ13)
CAVKKTGGYQKVTF

SEQ ID NO: 554602 - protein, 15 aa, Homo sapiens
  CDR3 for beta chain variable domain of TCR clone 277301 (TRBV19, TRBJ2-1)
CASSIQATSYNEQFF

SEQ ID NO: 554603 - protein, 13 aa, Homo sapiens
  CDR3 for alpha chain variable domain of TCR clone 277302 (TRAV21, TRAJ20)
CAVGLRVDYKLSF

SEQ ID NO: 554604 - protein, 14 aa, Homo sapiens
  CDR3 for beta chain variable domain of TCR clone 277302 (TRBV7-2, TRBJ2-1)
CASSLEGGYNEQFF

SEQ ID NO: 554605 - protein, 19 aa, Homo sapiens
  CDR3 for alpha chain variable domain of TCR clone 277303 (TRAV23/DV6, TRAJ9)
CSKHRLKGAGHTGGFKTIF

SEQ ID NO: 554606 - protein, 15 aa, Homo sapiens
  CDR3 for beta chain variable domain of TCR clone 277303 (TRBV6-3, TRBJ2-1)
CAGSYASDSYNEQFF

SEQ ID NO: 554607 - protein, 14 aa, Homo sapiens
  CDR3 for alpha chain variable domain of TCR clone 277304 (TRAV26-1, TRAJ38)
CIADNAGNNRKLFW

SEQ ID NO: 554608 - protein, 13 aa, Homo sapiens
  CDR3 for beta chain variable domain of TCR clone 277304 (TRBV19, TRBJ1-2)
CASSVPGQDGYTF

SEQ ID NO: 554609 - protein, 11 aa, Homo sapiens
  CDR3 for alpha chain variable domain of TCR clone 277305 (TRAV2, TRAJ13)
CASGGYQKVTF

SEQ ID NO: 554610 - protein, 15 aa, Homo sapiens
  CDR3 for beta chain variable domain of TCR clone 277305 (TRBV5-1, TRBJ2-2)
CASSLAVGGSGELFF

SEQ ID NO: 554611 - protein, 14 aa, Homo sapiens
  CDR3 for alpha chain variable domain of TCR clone 277306 (TRAV8-1, TRAJ5)
CAVSMDTGRRALPF

SEQ ID NO: 554612 - protein, 15 aa, Homo sapiens
  CDR3 for beta chain variable domain of TCR clone 277306 (TRBV19, TRBJ2-4)
CASRGPRRGENMQYF

SEQ ID NO: 554613 - protein, 15 aa, Homo sapiens
  CDR3 for alpha chain variable domain of TCR clone 277307 (TRAV3, TRAJ22)
CAVRDRGGSARQLTF

SEQ ID NO: 554614 - protein, 17 aa, Homo sapiens
  CDR3 for beta chain variable domain of TCR clone 277307 (TRBV7-3, TRBJ2-3)
RASSLMKRMRGADTQYF

SEQ ID NO: 554615 - protein, 14 aa, Homo sapiens
  CDR3 for alpha chain variable domain of TCR clone 277308 (TRAV13-1, TRAJ35)
CAASKGGFGNVLHC

SEQ ID NO: 554616 - protein, 13 aa, Homo sapiens
  CDR3 for beta chain variable domain of TCR clone 277308 (TRBV6-1, TRBJ1-1)
CASSRQGNTEAFF

SEQ ID NO: 554617 - protein, 13 aa, Homo sapiens
  CDR3 for alpha chain variable domain of TCR clone 277309 (TRAV12-3, TRAJ47)
CAMKKEYGNKLVF

SEQ ID NO: 554618 - protein, 13 aa, Homo sapiens
  CDR3 for beta chain variable domain of TCR clone 277309 (TRBV7-7, TRBJ2-3)
CASSLSRADTQYF

SEQ ID NO: 554619 - protein, 12 aa, Homo sapiens
  CDR3 for alpha chain variable domain of TCR clone 277310 (TRAV8-3, TRAJ26)
CDGDNYGQNFVF

SEQ ID NO: 554620 - protein, 13 aa, Homo sapiens
  CDR3 for beta chain variable domain of TCR clone 277310 (TRBV10-3, TRBJ2-7)
CASKLAVNYEQYF

SEQ ID NO: 554621 - protein, 12 aa, Homo sapiens
  CDR3 for alpha chain variable domain of TCR clone 277311 (TRAV12-1, TRAJ40)
CVGYSGTYKYIF

SEQ ID NO: 554622 - protein, 17 aa, Homo sapiens
  CDR3 for beta chain variable domain of TCR clone 277311 (TRBV7-3, TRBJ2-3)
CASSPRGQGYGTDTQYF

SEQ ID NO: 554623 - protein, 13 aa, Homo sapiens
  CDR3 for alpha chain variable domain of TCR clone 277312 (TRAV13-1, TRAJ17)
CAASRAAGNKLTF

SEQ ID NO: 554624 - protein, 16 aa, Homo sapiens
  CDR3 for beta chain variable domain of TCR clone 277312 (TRBV24-1, TRBJ2-3)
CATSDPGTGATDTQYF

SEQ ID NO: 554625 - protein, 22 aa, Homo sapiens
  CDR3 for alpha chain variable domain of TCR clone 277313 (TRAV27, TRAJ41)
CAVRTQIPDIQNPDPAVDQLRV

SEQ ID NO: 554626 - protein, 16 aa, Homo sapiens
  CDR3 for beta chain variable domain of TCR clone 277313 (TRBV5-1, TRBJ2-3)
CASSLGLAVYTDTQYF

SEQ ID NO: 554627 - protein, 14 aa, Homo sapiens
  CDR3 for alpha chain variable domain of TCR clone 277314 (TRAV12-2, TRAJ40)
CAVITRGGTYKYIF

SEQ ID NO: 554628 - protein, 15 aa, Homo sapiens
  CDR3 for beta chain variable domain of TCR clone 277314 (TRBV7-9, TRBJ1-6)
CASSSPGRGNSPLHF

SEQ ID NO: 554629 - protein, 15 aa, Homo sapiens
  CDR3 for alpha chain variable domain of TCR clone 277315 (TRAV12-2, TRAJ53)
CAVNGGGGSNYKLPF

SEQ ID NO: 554630 - protein, 14 aa, Homo sapiens
  CDR3 for beta chain variable domain of TCR clone 277315 (TRBV18, TRBJ2-7)
CASSPRGGAYEQYF

SEQ ID NO: 554631 - protein, 16 aa, Homo sapiens
  CDR3 for alpha chain variable domain of TCR clone 277316 (TRAV8-3, TRAJ44)
CAVGTLMTGTASKLTF

SEQ ID NO: 554632 - protein, 15 aa, Homo sapiens
  CDR3 for beta chain variable domain of TCR clone 277316 (TRBV10-2, TRBJ2-6)
CTSSEQGTGANVLTF

SEQ ID NO: 554633 - protein, 16 aa, Homo sapiens
  CDR3 for alpha chain variable domain of TCR clone 277317 (TRAV21, TRAJ52)
CAVPNAGGTSYGKLTF

SEQ ID NO: 554634 - protein, 11 aa, Homo sapiens
  CDR3 for beta chain variable domain of TCR clone 277317 (TRBV2, TRBJ1-1)
CASREGTEAFF

SEQ ID NO: 554635 - protein, 14 aa, Homo sapiens
  CDR3 for alpha chain variable domain of TCR clone 277318 (TRAV12-2, TRAJ48)
CAVNAFFGNEKLTI

SEQ ID NO: 554636 - protein, 13 aa, Homo sapiens
  CDR3 for beta chain variable domain of TCR clone 277318 (TRBV28, TRBJ2-7)
CAGAQQGLDEQYF

SEQ ID NO: 554637 - protein, 14 aa, Homo sapiens
  CDR3 for alpha chain variable domain of TCR clone 277319 (TRAV23/DV6, TRAJ22)
CAASVSGSARQLTF

SEQ ID NO: 554638 - protein, 15 aa, Homo sapiens
  CDR3 for beta chain variable domain of TCR clone 277319 (TRBV4-1, TRBJ2-3)
CASSLQRVGPDTQYF

SEQ ID NO: 554639 - protein, 13 aa, Homo sapiens
  CDR3 for alpha chain variable domain of TCR clone 277320 (TRAV3, TRAJ27)
CAVSPLGAGKSTF

SEQ ID NO: 554640 - protein, 13 aa, Homo sapiens
  CDR3 for beta chain variable domain of TCR clone 277320 (TRBV7-9, TRBJ2-3)
CASSPGSTDTHYF

SEQ ID NO: 554641 - protein, 14 aa, Homo sapiens
  CDR3 for alpha chain variable domain of TCR clone 277321 (TRAV17, TRAJ35)
CATDRPGFGNVLHC

SEQ ID NO: 554642 - protein, 15 aa, Homo sapiens
  CDR3 for beta chain variable domain of TCR clone 277321 (TRBV28, TRBJ2-5)
CASSSGRVIQETQHF

SEQ ID NO: 554643 - protein, 14 aa, Homo sapiens
  CDR3 for alpha chain variable domain of TCR clone 277322 (TRAV12-1, TRAJ9)
CVVNKGTGGFKTIF

SEQ ID NO: 554644 - protein, 16 aa, Homo sapiens
  CDR3 for beta chain variable domain of TCR clone 277322 (TRBV4-3, TRBJ2-2)
CASSEDRGSDTGELFF

SEQ ID NO: 554645 - protein, 15 aa, Homo sapiens
  CDR3 for alpha chain variable domain of TCR clone 277323 (TRAV8-4, TRAJ39)
CAVSHHRGAGNMLTF

SEQ ID NO: 554646 - protein, 12 aa, Homo sapiens
  CDR3 for beta chain variable domain of TCR clone 277323 (TRBV7-8, TRBJ2-7)
CASSLGDREQYF

SEQ ID NO: 554647 - protein, 13 aa, Homo sapiens
  CDR3 for alpha chain variable domain of TCR clone 277324 (TRAV9-2, TRAJ53)
CALSGGSDYKLTF

SEQ ID NO: 554648 - protein, 17 aa, Homo sapiens
  CDR3 for beta chain variable domain of TCR clone 277324 (TRBV11-2, TRBJ2-1)
CAGSLYPPGVEYNEQFF

SEQ ID NO: 554649 - protein, 16 aa, Homo sapiens
  CDR3 for alpha chain variable domain of TCR clone 277325 (TRAV2, TRAJ4)
CAVEDRFSGGYNKLIF

SEQ ID NO: 554650 - protein, 14 aa, Homo sapiens
  CDR3 for beta chain variable domain of TCR clone 277325 (TRBV7-7, TRBJ2-1)
CASSLAGGTNEQFF

SEQ ID NO: 554651 - protein, 12 aa, Homo sapiens
  CDR3 for alpha chain variable domain of TCR clone 277326 (TRAV12-3, TRAJ40)
CAMSSGTYKYIF

SEQ ID NO: 554652 - protein, 14 aa, Homo sapiens
  CDR3 for beta chain variable domain of TCR clone 277326 (TRBV7-2, TRBJ2-7)
CASSSISGFSEQYF

SEQ ID NO: 554653 - protein, 14 aa, Homo sapiens
  CDR3 for alpha chain variable domain of TCR clone 277327 (TRAV2, TRAJ9)
CAVEDRSGGFKTIF

SEQ ID NO: 554654 - protein, 14 aa, Homo sapiens
  CDR3 for beta chain variable domain of TCR clone 277327 (TRBV2, TRBJ2-7)
CASNRDRGPYEQYF

SEQ ID NO: 554655 - protein, 14 aa, Homo sapiens
  CDR3 for alpha chain variable domain of TCR clone 277328 (TRAV9-2, TRAJ39)
CALYIYNAGNMLTF

SEQ ID NO: 554656 - protein, 14 aa, Homo sapiens
  CDR3 for beta chain variable domain of TCR clone 277328 (TRBV12-4, TRBJ2-5)
CASSSRQGAETQHF

SEQ ID NO: 554657 - protein, 14 aa, Homo sapiens
  CDR3 for alpha chain variable domain of TCR clone 277329 (TRAV38-1, TRAJ45)
CASHSGGGADGLTF

SEQ ID NO: 554658 - protein, 15 aa, Homo sapiens
  CDR3 for beta chain variable domain of TCR clone 277329 (TRBV6-5, TRBJ2-4)
CASSLRESPKNIQYF

SEQ ID NO: 554659 - protein, 17 aa, Homo sapiens
  CDR3 for alpha chain variable domain of TCR clone 277330 (TRAV13-1, TRAJ31)
CAPRDRLMFGDGTQLVV

SEQ ID NO: 554660 - protein, 14 aa, Homo sapiens
  CDR3 for beta chain variable domain of TCR clone 277330 (TRBV12-5, TRBJ2-5)
CASGLEGYQETQYF

SEQ ID NO: 554661 - protein, 14 aa, Homo sapiens
  CDR3 for alpha chain variable domain of TCR clone 277331 (TRAV36/DV7, TRAJ48)
CAQRRDFGNEKLTF

SEQ ID NO: 554662 - protein, 14 aa, Homo sapiens
  CDR3 for beta chain variable domain of TCR clone 277331 (TRBV20-1, TRBJ1-1)
CSAQTRIGGTEAFF

SEQ ID NO: 554663 - protein, 13 aa, Homo sapiens
  CDR3 for alpha chain variable domain of TCR clone 277332 (TRAV35, TRAJ42)
CAGFPGRQGNLIF

SEQ ID NO: 554664 - protein, 14 aa, Homo sapiens
  CDR3 for beta chain variable domain of TCR clone 277332 (TRBV19, TRBJ2-1)
CASPTFVLSGEQFF

SEQ ID NO: 554665 - protein, 14 aa, Homo sapiens
  CDR3 for alpha chain variable domain of TCR clone 277333 (TRAV17, TRAJ57)
CATDPQGGSEKLVF

SEQ ID NO: 554666 - protein, 12 aa, Homo sapiens
  CDR3 for beta chain variable domain of TCR clone 277333 (TRBV12-4, TRBJ1-2)
CASSFIWLHLRF

SEQ ID NO: 554667 - protein, 13 aa, Homo sapiens
  CDR3 for alpha chain variable domain of TCR clone 277334 (TRAV3, TRAJ21)
CAVREPDFNNFYF

SEQ ID NO: 554668 - protein, 17 aa, Homo sapiens
  CDR3 for beta chain variable domain of TCR clone 277334 (TRBV11-3, TRBJ2-3)
CQQLRGASRGAPNTQYF

SEQ ID NO: 554669 - protein, 12 aa, Homo sapiens
  CDR3 for alpha chain variable domain of TCR clone 277335 (TRAV1-2, TRAJ42)
CVAGGSPGNLFF

SEQ ID NO: 554670 - protein, 12 aa, Homo sapiens
  CDR3 for beta chain variable domain of TCR clone 277335 (TRBV24-1, TRBJ1-1)
CATSDSDRGAFF

SEQ ID NO: 554671 - protein, 13 aa, Homo sapiens
  CDR3 for alpha chain variable domain of TCR clone 277336 (TRAV1-2, TRAJ11)
CAVRDSGYSTLTF

SEQ ID NO: 554672 - protein, 16 aa, Homo sapiens
  CDR3 for beta chain variable domain of TCR clone 277336 (TRBV19, TRBJ2-3)
CASSPGAASRTDTQYF

SEQ ID NO: 554673 - protein, 12 aa, Homo sapiens
  CDR3 for alpha chain variable domain of TCR clone 277337 (TRAV22, TRAJ22)
CAPGGSARQLTF

SEQ ID NO: 554674 - protein, 13 aa, Homo sapiens
  CDR3 for beta chain variable domain of TCR clone 277337 (TRBV15, TRBJ1-6)
CATSGGLNSHLHF

SEQ ID NO: 554675 - protein, 14 aa, Homo sapiens
  CDR3 for alpha chain variable domain of TCR clone 277338 (TRAV2, TRAJ23)
CAVGLRNQGGKLIF

SEQ ID NO: 554676 - protein, 14 aa, Homo sapiens
  CDR3 for beta chain variable domain of TCR clone 277338 (TRBV28, TRBJ1-2)
CASRIQGANYGYTF

SEQ ID NO: 554677 - protein, 14 aa, Homo sapiens
  CDR3 for alpha chain variable domain of TCR clone 277339 (TRAV17, TRAJ54)
CATDANQGAQKLVF

SEQ ID NO: 554678 - protein, 12 aa, Homo sapiens
  CDR3 for beta chain variable domain of TCR clone 277339 (TRBV6-3, TRBJ2-1)
CTSSGSYNEQFF

SEQ ID NO: 554679 - protein, 14 aa, Homo sapiens
  CDR3 for alpha chain variable domain of TCR clone 277340 (TRAV13-1, TRAJ35)
CAASKGGCGNVLHC

SEQ ID NO: 554680 - protein, 13 aa, Homo sapiens
  CDR3 for beta chain variable domain of TCR clone 277340 (TRBV7-3, TRBJ1-1)
CASRQDWGAEAFF

SEQ ID NO: 554681 - protein, 14 aa, Homo sapiens
  CDR3 for alpha chain variable domain of TCR clone 277341 (TRAV1-1, TRAJ27)
CAVIYNTNAGKSTF

SEQ ID NO: 554682 - protein, 15 aa, Homo sapiens
  CDR3 for beta chain variable domain of TCR clone 277341 (TRBV11-3, TRBJ2-3)
CASLKDGREGDTQYF

SEQ ID NO: 554683 - protein, 17 aa, Homo sapiens
  CDR3 for alpha chain variable domain of TCR clone 277342 (TRAV1-1, TRAJ32)
CAVRVDELWWCYKHAHL

SEQ ID NO: 554684 - protein, 12 aa, Homo sapiens
  CDR3 for beta chain variable domain of TCR clone 277342 (TRBV7-8, TRBJ2-1)
CASSLGHNEQFF

SEQ ID NO: 554685 - protein, 16 aa, Homo sapiens
  CDR3 for alpha chain variable domain of TCR clone 277343 (TRAV8-3, TRAJ13)
CAVGAYPSGGYQKVTF

SEQ ID NO: 554686 - protein, 15 aa, Homo sapiens
  CDR3 for beta chain variable domain of TCR clone 277343 (TRBV19, TRBJ1-5)
CASSIVWADNPPQHF

SEQ ID NO: 554687 - protein, 18 aa, Homo sapiens
  CDR3 for alpha chain variable domain of TCR clone 277344 (TRAV12-1, TRAJ52)
CAVKLINAGGTSYGKLTF

SEQ ID NO: 554688 - protein, 15 aa, Homo sapiens
  CDR3 for beta chain variable domain of TCR clone 277344 (TRBV20-1, TRBJ2-7)
CSARDRVSGMDEQYF

SEQ ID NO: 554689 - protein, 14 aa, Homo sapiens
  CDR3 for alpha chain variable domain of TCR clone 277345 (TRAV13-1, TRAJ44)
CAAKATGTASKLTF

SEQ ID NO: 554690 - protein, 15 aa, Homo sapiens
  CDR3 for beta chain variable domain of TCR clone 277345 (TRBV4-3, TRBJ1-1)
CASSQELGRGTEAVF

SEQ ID NO: 554691 - protein, 13 aa, Homo sapiens
  CDR3 for alpha chain variable domain of TCR clone 277346 (TRAV21, TRAJ34)
CAVESYNTDKLIF

SEQ ID NO: 554692 - protein, 12 aa, Homo sapiens
  CDR3 for beta chain variable domain of TCR clone 277346 (TRBV2, TRBJ1-5)
CAFGEYDQPQHF

SEQ ID NO: 554693 - protein, 14 aa, Homo sapiens
  CDR3 for alpha chain variable domain of TCR clone 277347 (TRAV17, TRAJ6)
CATNPAGGSYIPTF

SEQ ID NO: 554694 - protein, 15 aa, Homo sapiens
  CDR3 for beta chain variable domain of TCR clone 277347 (TRBV7-8, TRBJ2-1)
CASSLAGGLYNEQFF

SEQ ID NO: 554695 - protein, 13 aa, Homo sapiens
  CDR3 for alpha chain variable domain of TCR clone 277348 (TRAV12-2, TRAJ42)
CAVKRGSQGNLIF

SEQ ID NO: 554696 - protein, 15 aa, Homo sapiens
  CDR3 for beta chain variable domain of TCR clone 277348 (TRBV7-8, TRBJ2-3)
CASRKLRDHTDTQYF

SEQ ID NO: 554697 - protein, 15 aa, Homo sapiens
  CDR3 for alpha chain variable domain of TCR clone 277349 (TRAV3, TRAJ36)
CAVRASQTGANNLFF

SEQ ID NO: 554698 - protein, 13 aa, Homo sapiens
  CDR3 for beta chain variable domain of TCR clone 277349 (TRBV10-3, TRBJ1-2)
CAISERDSYGCTF

SEQ ID NO: 554699 - protein, 12 aa, Homo sapiens
  CDR3 for alpha chain variable domain of TCR clone 277350 (TRAV8-3, TRAJ20)
CAVDFNDYKLSF

SEQ ID NO: 554700 - protein, 12 aa, Homo sapiens
  CDR3 for beta chain variable domain of TCR clone 277350 (TRBV5-5, TRBJ2-5)
CASSYFGETQYF

SEQ ID NO: 554701 - protein, 14 aa, Homo sapiens
  CDR3 for alpha chain variable domain of TCR clone 277351 (TRAV12-2, TRAJ17)
CAVLFKAAGNKLTF

SEQ ID NO: 554702 - protein, 14 aa, Homo sapiens
  CDR3 for beta chain variable domain of TCR clone 277351 (TRBV18, TRBJ1-5)
CASSPGNSNQPQHF

SEQ ID NO: 554703 - protein, 13 aa, Homo sapiens
  CDR3 for alpha chain variable domain of TCR clone 277352 (TRAV27, TRAJ3)
ASLRGSSASKIIF

SEQ ID NO: 554704 - protein, 15 aa, Homo sapiens
  CDR3 for beta chain variable domain of TCR clone 277352 (TRBV28, TRBJ1-3)
CASSMGWASGTTIYF

SEQ ID NO: 554705 - protein, 12 aa, Homo sapiens
  CDR3 for alpha chain variable domain of TCR clone 277353 (TRAV8-6, TRAJ43)
CAVSHNNNAMRF

SEQ ID NO: 554706 - protein, 14 aa, Homo sapiens
  CDR3 for beta chain variable domain of TCR clone 277353 (TRBV10-3, TRBJ1-1)
CAISDGSGVTEAFF

SEQ ID NO: 554707 - protein, 13 aa, Homo sapiens
  CDR3 for alpha chain variable domain of TCR clone 277354 (TRAV26-1, TRAJ29)
CIVRRSGNTPIVF

SEQ ID NO: 554708 - protein, 16 aa, Homo sapiens
  CDR3 for beta chain variable domain of TCR clone 277354 (TRBV11-2, TRBJ2-7)
CASSLAPTGVNYEQYF

SEQ ID NO: 554709 - protein, 13 aa, Homo sapiens
  CDR3 for alpha chain variable domain of TCR clone 277355 (TRAV34, TRAJ33)
CGADMNSNYQLIW

SEQ ID NO: 554710 - protein, 15 aa, Homo sapiens
  CDR3 for beta chain variable domain of TCR clone 277355 (TRBV28, TRBJ2-5)
CASSQTSGSLETQYF

SEQ ID NO: 554711 - protein, 15 aa, Homo sapiens
  CDR3 for alpha chain variable domain of TCR clone 277356 (TRAV3, TRAJ22)
CAVRDRGGSARKLTF

SEQ ID NO: 554712 - protein, 12 aa, Homo sapiens
  CDR3 for beta chain variable domain of TCR clone 277356 (TRBV12-4, TRBJ1-2)
CASSFIWLHLRF

SEQ ID NO: 554713 - protein, 17 aa, Homo sapiens
  CDR3 for alpha chain variable domain of TCR clone 277357 (TRAV3, TRAJ42)
CAVRDRDYGVSKGNLIF

SEQ ID NO: 554714 - protein, 15 aa, Homo sapiens
  CDR3 for beta chain variable domain of TCR clone 277357 (TRBV6-6, TRBJ2-7)
CASSYSYGGSYKQYF

SEQ ID NO: 554715 - protein, 14 aa, Homo sapiens
  CDR3 for alpha chain variable domain of TCR clone 277358 (TRAV1-2, TRAJ16)
CAVNRFSDGQKLLC

SEQ ID NO: 554716 - protein, 14 aa, Homo sapiens
  CDR3 for beta chain variable domain of TCR clone 277358 (TRBV7-9, TRBJ2-3)
CASSLEDGTGTQYF

SEQ ID NO: 554717 - protein, 15 aa, Homo sapiens
  CDR3 for alpha chain variable domain of TCR clone 277359 (TRAV3, TRAJ9)
CSVRARNTGGFKTIF

SEQ ID NO: 554718 - protein, 16 aa, Homo sapiens
  CDR3 for beta chain variable domain of TCR clone 277359 (TRBV19, TRBJ2-2)
CASRSPGTGATGELFF

SEQ ID NO: 554719 - protein, 16 aa, Homo sapiens
  CDR3 for alpha chain variable domain of TCR clone 277360 (TRAV6, TRAJ43)
CARHKPRFGAGTRLRV

SEQ ID NO: 554720 - protein, 16 aa, Homo sapiens
  CDR3 for beta chain variable domain of TCR clone 277360 (TRBV6-5, TRBJ2-1)
CASSYSLAGGYNEQFF

SEQ ID NO: 554721 - protein, 16 aa, Homo sapiens
  CDR3 for alpha chain variable domain of TCR clone 277361 (TRAV3, TRAJ37)
CAVRGKGSGNTGKLIY

SEQ ID NO: 554722 - protein, 13 aa, Homo sapiens
  CDR3 for beta chain variable domain of TCR clone 277361 (TRBV4-2, TRBJ1-1)
CASSQAGNTEAFF

SEQ ID NO: 554723 - protein, 14 aa, Homo sapiens
  CDR3 for alpha chain variable domain of TCR clone 277362 (TRAV35, TRAJ53)
GRVNSGGSNYKLTF

SEQ ID NO: 554724 - protein, 14 aa, Homo sapiens
  CDR3 for beta chain variable domain of TCR clone 277362 (TRBV7-3, TRBJ2-2)
CASSLLGSTGELFV

SEQ ID NO: 554725 - protein, 14 aa, Homo sapiens
  CDR3 for alpha chain variable domain of TCR clone 277363 (TRAV9-2, TRAJ39)
CALYIYNAGNMLTF

SEQ ID NO: 554726 - protein, 13 aa, Homo sapiens
  CDR3 for beta chain variable domain of TCR clone 277363 (TRBV7-3, TRBJ2-3)
CASSSWSTDTQYF

SEQ ID NO: 554727 - protein, 15 aa, Homo sapiens
  CDR3 for alpha chain variable domain of TCR clone 277364 (TRAV4, TRAJ42)
CLVGGYGGSQGNLIF

SEQ ID NO: 554728 - protein, 16 aa, Homo sapiens
  CDR3 for beta chain variable domain of TCR clone 277364 (TRBV27, TRBJ1-1)
CASSTRRGGVGTEAFF

SEQ ID NO: 554729 - protein, 16 aa, Homo sapiens
  CDR3 for alpha chain variable domain of TCR clone 277365 (TRAV26-1, )
CIDIQNPDPALYQLRD

SEQ ID NO: 554730 - protein, 19 aa, Homo sapiens
  CDR3 for beta chain variable domain of TCR clone 277365 (TRBV19, TRBJ2-5)
CASSIGQVTDFVLGETQYF

SEQ ID NO: 554731 - protein, 15 aa, Homo sapiens
  CDR3 for alpha chain variable domain of TCR clone 277366 (TRAV4, TRAJ39)
CLVGPNNNAGNMLTF

SEQ ID NO: 554732 - protein, 14 aa, Homo sapiens
  CDR3 for beta chain variable domain of TCR clone 277366 (TRBV7-9, TRBJ1-2)
CASSRQGANYGYTF

SEQ ID NO: 554733 - protein, 12 aa, Homo sapiens
  CDR3 for alpha chain variable domain of TCR clone 277367 (TRAV23/DV6, TRAJ30)
CAASKGDDTIIF

SEQ ID NO: 554734 - protein, 15 aa, Homo sapiens
  CDR3 for beta chain variable domain of TCR clone 277367 (TRBV20-1, TRBJ2-7)
CSARDRVSGMDEQYF

SEQ ID NO: 554735 - protein, 16 aa, Homo sapiens
  CDR3 for alpha chain variable domain of TCR clone 277368 (TRAV20, TRAJ22)
CAVQASSSGSARHLTF

SEQ ID NO: 554736 - protein, 13 aa, Homo sapiens
  CDR3 for beta chain variable domain of TCR clone 277368 (TRBV7-2, TRBJ2-5)
CASSQTSVETQYV

SEQ ID NO: 554737 - protein, 18 aa, Homo sapiens
  CDR3 for alpha chain variable domain of TCR clone 277369 (TRAV21, TRAJ52)
CAVRPSPAGGTSYGKLTF

SEQ ID NO: 554738 - protein, 13 aa, Homo sapiens
  CDR3 for beta chain variable domain of TCR clone 277369 (TRBV29-1, TRBJ2-1)
CRVEGGRVNEQFF

SEQ ID NO: 554739 - protein, 14 aa, Homo sapiens
  CDR3 for alpha chain variable domain of TCR clone 277370 (TRAV8-6, TRAJ48)
CAVRTNFGNEKLTF

SEQ ID NO: 554740 - protein, 16 aa, Homo sapiens
  CDR3 for beta chain variable domain of TCR clone 277370 (TRBV7-3, TRBJ2-2)
CASSLKRGTLSGELFF

SEQ ID NO: 554741 - protein, 11 aa, Homo sapiens
  CDR3 for alpha chain variable domain of TCR clone 277371 (TRAV13-1, TRAJ20)
FGPHGLYKLSF

SEQ ID NO: 554742 - protein, 14 aa, Homo sapiens
  CDR3 for beta chain variable domain of TCR clone 277371 (TRBV28, TRBJ2-5)
CASTGAGGVETQYF

SEQ ID NO: 554743 - protein, 12 aa, Homo sapiens
  CDR3 for alpha chain variable domain of TCR clone 277372 (TRAV12-3, TRAJ40)
CAMSSGTYKYIF

SEQ ID NO: 554744 - protein, 17 aa, Homo sapiens
  CDR3 for beta chain variable domain of TCR clone 277372 (TRBV11-2, TRBJ2-6)
CASSQRDIFSGANVLTF

SEQ ID NO: 554745 - protein, 13 aa, Homo sapiens
  CDR3 for alpha chain variable domain of TCR clone 277373 (TRAV21, TRAJ49)
CAVRQSTGNQFYF

SEQ ID NO: 554746 - protein, 16 aa, Homo sapiens
  CDR3 for beta chain variable domain of TCR clone 277373 (TRBV6-1, TRBJ1-3)
CASVQGGLETPYILVR

SEQ ID NO: 554747 - protein, 13 aa, Homo sapiens
  CDR3 for alpha chain variable domain of TCR clone 277374 (TRAV12-1, TRAJ16)
CVVNGPDDQKLLF

SEQ ID NO: 554748 - protein, 13 aa, Homo sapiens
  CDR3 for beta chain variable domain of TCR clone 277374 (TRBV2, TRBJ1-1)
CARNPTGGFHAFF

SEQ ID NO: 554749 - protein, 15 aa, Homo sapiens
  CDR3 for alpha chain variable domain of TCR clone 277375 (TRAV26-1, TRAJ15)
CIVRAANQAGTALIF

SEQ ID NO: 554750 - protein, 15 aa, Homo sapiens
  CDR3 for beta chain variable domain of TCR clone 277375 (TRBV4-2, TRBJ1-2)
CASSRPGDGMGGYTF

SEQ ID NO: 554751 - protein, 12 aa, Homo sapiens
  CDR3 for alpha chain variable domain of TCR clone 277376 (TRAV2, TRAJ31)
CAVEDNNARLMV

SEQ ID NO: 554752 - protein, 14 aa, Homo sapiens
  CDR3 for beta chain variable domain of TCR clone 277376 (TRBV28, TRBJ1-5)
CASSRTGLNQPQHF

SEQ ID NO: 554753 - protein, 17 aa, Homo sapiens
  CDR3 for alpha chain variable domain of TCR clone 277377 (TRAV3, TRAJ12)
CAVRDGGRMDSSYKLIF

SEQ ID NO: 554754 - protein, 15 aa, Homo sapiens
  CDR3 for beta chain variable domain of TCR clone 277377 (TRBV25-1, TRBJ2-5)
GASSDTGTHQETQYF

SEQ ID NO: 554755 - protein, 16 aa, Homo sapiens
  CDR3 for alpha chain variable domain of TCR clone 277378 (TRAV13-2, TRAJ32)
CAENMNYRGATNKLIF

SEQ ID NO: 554756 - protein, 14 aa, Homo sapiens
  CDR3 for beta chain variable domain of TCR clone 277378 (TRBV4-3, TRBJ2-7)
CASSQDVAGGEQYV

SEQ ID NO: 554757 - protein, 14 aa, Homo sapiens
  CDR3 for alpha chain variable domain of TCR clone 277379 (TRAV1-1, TRAJ27)
CAVIYNTNAGKSTF

SEQ ID NO: 554758 - protein, 14 aa, Homo sapiens
  CDR3 for beta chain variable domain of TCR clone 277379 (TRBV11-2, TRBJ2-1)
CASSPSRQGGGQFF

SEQ ID NO: 554759 - protein, 18 aa, Homo sapiens
  CDR3 for alpha chain variable domain of TCR clone 277380 (TRAV26-1, TRAJ52)
CIVRVEGAGGTSYGKLTV

SEQ ID NO: 554760 - protein, 13 aa, Homo sapiens
  CDR3 for beta chain variable domain of TCR clone 277380 (TRBV7-3, TRBJ1-2)
CASSLERGYGYTF

SEQ ID NO: 554761 - protein, 12 aa, Homo sapiens
  CDR3 for alpha chain variable domain of TCR clone 277381 (TRAV16, TRAJ9)
CAPRAGGFKTIF

SEQ ID NO: 554762 - protein, 13 aa, Homo sapiens
  CDR3 for beta chain variable domain of TCR clone 277381 (TRBV4-3, TRBJ1-1)
CASSQVEGSMAFF

SEQ ID NO: 554763 - protein, 14 aa, Homo sapiens
  CDR3 for alpha chain variable domain of TCR clone 277382 (TRAV13-1, TRAJ20)
CAARRGSNDYKLSF

SEQ ID NO: 554764 - protein, 13 aa, Homo sapiens
  CDR3 for beta chain variable domain of TCR clone 277382 (TRBV20-1, TRBJ1-1)
CSAPPGGHTEAFF

SEQ ID NO: 554765 - protein, 11 aa, Homo sapiens
  CDR3 for alpha chain variable domain of TCR clone 277383 (TRAV23/DV6, TRAJ48)
CAPRWGGKFTF

SEQ ID NO: 554766 - protein, 13 aa, Homo sapiens
  CDR3 for beta chain variable domain of TCR clone 277383 (TRBV12-4, TRBJ2-5)
CASSPGTEETQYF

SEQ ID NO: 554767 - protein, 21 aa, Homo sapiens
  CDR3 for alpha chain variable domain of TCR clone 277384 (TRAV13-2, TRAJ45)
EAQLSTFVQRVTGGGADGLTF

SEQ ID NO: 554768 - protein, 17 aa, Homo sapiens
  CDR3 for beta chain variable domain of TCR clone 277384 (TRBV19, TRBJ1-1)
CASSIAGRGLMNTEAFF

SEQ ID NO: 554769 - protein, 13 aa, Homo sapiens
  CDR3 for alpha chain variable domain of TCR clone 277385 (TRAV35, TRAJ57)
CAGSQGGSEKLVF

SEQ ID NO: 554770 - protein, 14 aa, Homo sapiens
  CDR3 for beta chain variable domain of TCR clone 277385 (TRBV7-2, TRBJ1-1)
CASSFLTGTTEAFF

SEQ ID NO: 554771 - protein, 14 aa, Homo sapiens
  CDR3 for alpha chain variable domain of TCR clone 277386 (TRAV23/DV6, TRAJ23)
CAAGPCNQGGKLIF

SEQ ID NO: 554772 - protein, 16 aa, Homo sapiens
  CDR3 for beta chain variable domain of TCR clone 277386 (TRBV28, TRBJ2-7)
CASSLFFETGGPEQYF

SEQ ID NO: 554773 - protein, 14 aa, Homo sapiens
  CDR3 for alpha chain variable domain of TCR clone 277387 (TRAV12-2, TRAJ5)
CAVNSSTGRRALTF

SEQ ID NO: 554774 - protein, 16 aa, Homo sapiens
  CDR3 for beta chain variable domain of TCR clone 277387 (TRBV20-1, TRBJ1-4)
CSAPGQGLLTNEKLFF

SEQ ID NO: 554775 - protein, 13 aa, Homo sapiens
  CDR3 for alpha chain variable domain of TCR clone 277388 (TRAV27, TRAJ3)
ASLRGSSASKIIF

SEQ ID NO: 554776 - protein, 17 aa, Homo sapiens
  CDR3 for beta chain variable domain of TCR clone 277388 (TRBV20-1, TRBJ2-1)
CSASSSGLAGSYNEQFF

SEQ ID NO: 554777 - protein, 15 aa, Homo sapiens
  CDR3 for alpha chain variable domain of TCR clone 277389 (TRAV2, TRAJ44)
CAVEAYTGTASKLTF

SEQ ID NO: 554778 - protein, 15 aa, Homo sapiens
  CDR3 for beta chain variable domain of TCR clone 277389 (TRBV20-1, TRBJ2-7)
CSARDRVSGMDEQYF

SEQ ID NO: 554779 - protein, 21 aa, Homo sapiens
  CDR3 for alpha chain variable domain of TCR clone 277390 (TRAV3, )
CAVRPTPDIQNPDPAVYQLRD

SEQ ID NO: 554780 - protein, 14 aa, Homo sapiens
  CDR3 for beta chain variable domain of TCR clone 277390 (TRBV7-2, TRBJ2-7)
CASSPKTSFYEQYF

SEQ ID NO: 554781 - protein, 15 aa, Homo sapiens
  CDR3 for alpha chain variable domain of TCR clone 277391 (TRAV13-1, TRAJ17)
CAASIERAAGNKLTF

SEQ ID NO: 554782 - protein, 15 aa, Homo sapiens
  CDR3 for beta chain variable domain of TCR clone 277391 (TRBV20-1, TRBJ2-7)
CSARDRVSGMDEQYF

SEQ ID NO: 554783 - protein, 16 aa, Homo sapiens
  CDR3 for alpha chain variable domain of TCR clone 277392 (TRAV30, TRAJ24)
CGTEIVDADSWGKFQF

SEQ ID NO: 554784 - protein, 13 aa, Homo sapiens
  CDR3 for beta chain variable domain of TCR clone 277392 (TRBV9, TRBJ1-1)
CASSTTGSTEAFF

SEQ ID NO: 554785 - protein, 15 aa, Homo sapiens
  CDR3 for alpha chain variable domain of TCR clone 277393 (TRAV26-1, TRAJ15)
CIVRAANQDGTALIF

SEQ ID NO: 554786 - protein, 15 aa, Homo sapiens
  CDR3 for beta chain variable domain of TCR clone 277393 (TRBV20-1, TRBJ1-1)
CSARSAATSNTEAFF

SEQ ID NO: 554787 - protein, 12 aa, Homo sapiens
  CDR3 for alpha chain variable domain of TCR clone 277394 (TRAV2, TRAJ31)
CAVEDNNARLMF

SEQ ID NO: 554788 - protein, 15 aa, Homo sapiens
  CDR3 for beta chain variable domain of TCR clone 277394 (TRBV10-3, TRBJ2-1)
CHQWSGHGGGGEQFF

SEQ ID NO: 554789 - protein, 12 aa, Homo sapiens
  CDR3 for alpha chain variable domain of TCR clone 277395 (TRAV8-3, TRAJ20)
CAVGANDYKLSS

SEQ ID NO: 554790 - protein, 15 aa, Homo sapiens
  CDR3 for beta chain variable domain of TCR clone 277395 (TRBV7-9, TRBJ1-6)
CASSSPGRGNSPLHF

SEQ ID NO: 554791 - protein, 11 aa, Homo sapiens
  CDR3 for alpha chain variable domain of TCR clone 277396 (TRAV1-2, TRAJ40)
CAVPGTYKYIF

SEQ ID NO: 554792 - protein, 14 aa, Homo sapiens
  CDR3 for beta chain variable domain of TCR clone 277396 (TRBV7-2, TRBJ2-7)
CASSPKTSFYEQYF

SEQ ID NO: 554793 - protein, 11 aa, Homo sapiens
  CDR3 for alpha chain variable domain of TCR clone 277397 (TRAV12-3, TRAJ16)
LTGGDGQKLLF

SEQ ID NO: 554794 - protein, 13 aa, Homo sapiens
  CDR3 for beta chain variable domain of TCR clone 277397 (TRBV12-4, TRBJ1-4)
CASAMGHDEKLFF

SEQ ID NO: 554795 - protein, 14 aa, Homo sapiens
  CDR3 for alpha chain variable domain of TCR clone 277398 (TRAV21, TRAJ35)
CAVMPVGFGNVLHC

SEQ ID NO: 554796 - protein, 12 aa, Homo sapiens
  CDR3 for beta chain variable domain of TCR clone 277398 (TRBV7-9, TRBJ2-7)
CASSIKREAQYF

SEQ ID NO: 554797 - protein, 13 aa, Homo sapiens
  CDR3 for alpha chain variable domain of TCR clone 277399 (TRAV13-2, TRAJ22)
CLGWISSARQLTF

SEQ ID NO: 554798 - protein, 15 aa, Homo sapiens
  CDR3 for beta chain variable domain of TCR clone 277399 (TRBV7-2, TRBJ2-3)
CASSYTGLETDTQYF

SEQ ID NO: 554799 - protein, 15 aa, Homo sapiens
  CDR3 for alpha chain variable domain of TCR clone 277400 (TRAV17, TRAJ22)
CATDLLSGSARQLTF

SEQ ID NO: 554800 - protein, 14 aa, Homo sapiens
  CDR3 for beta chain variable domain of TCR clone 277400 (TRBV19, TRBJ2-1)
CASPTFVLSGEQFF

SEQ ID NO: 554801 - protein, 17 aa, Homo sapiens
  CDR3 for alpha chain variable domain of TCR clone 277401 (TRAV26-1, TRAJ46)
IASSESEKKSSGDKLTF

SEQ ID NO: 554802 - protein, 17 aa, Homo sapiens
  CDR3 for beta chain variable domain of TCR clone 277401 (TRBV20-1, TRBJ2-1)
CSASSSGLAGSYNEQFF

SEQ ID NO: 554803 - protein, 13 aa, Homo sapiens
  CDR3 for alpha chain variable domain of TCR clone 277402 (TRAV21, TRAJ58)
CCETRGSGSRLTF

SEQ ID NO: 554804 - protein, 13 aa, Homo sapiens
  CDR3 for beta chain variable domain of TCR clone 277402 (TRBV7-2, TRBJ1-6)
CASSLKFDSPLHF

SEQ ID NO: 554805 - protein, 14 aa, Homo sapiens
  CDR3 for alpha chain variable domain of TCR clone 277403 (TRAV12-3, TRAJ7)
CAMSEIGGNNRLAF

SEQ ID NO: 554806 - protein, 13 aa, Homo sapiens
  CDR3 for beta chain variable domain of TCR clone 277403 (TRBV9, TRBJ1-1)
CASSVARNPESFF

SEQ ID NO: 554807 - protein, 12 aa, Homo sapiens
  CDR3 for alpha chain variable domain of TCR clone 277404 (TRAV3, TRAJ20)
CAVGDPDYKLSF

SEQ ID NO: 554808 - protein, 15 aa, Homo sapiens
  CDR3 for beta chain variable domain of TCR clone 277404 (TRBV28, TRBJ2-5)
CASSPPWSYQETQYF

SEQ ID NO: 554809 - protein, 15 aa, Homo sapiens
  CDR3 for alpha chain variable domain of TCR clone 277405 (TRAV26-1, TRAJ22)
CIVRVSFWFCKATDL

SEQ ID NO: 554810 - protein, 20 aa, Homo sapiens
  CDR3 for beta chain variable domain of TCR clone 277405 (TRBV28, TRBJ2-1)
CASAPIGRSPGLAGGNEQFF

SEQ ID NO: 554811 - protein, 13 aa, Homo sapiens
  CDR3 for alpha chain variable domain of TCR clone 277406 (TRAV36/DV7, TRAJ49)
CAGDSNTGNQFYF

SEQ ID NO: 554812 - protein, 16 aa, Homo sapiens
  CDR3 for beta chain variable domain of TCR clone 277406 (TRBV7-9, TRBJ1-2)
CASSLGFSSGEDGYTF

SEQ ID NO: 554813 - protein, 18 aa, Homo sapiens
  CDR3 for alpha chain variable domain of TCR clone 277407 (TRAV8-6, TRAJ52)
CAVSRANAGGTSYGKLTF

SEQ ID NO: 554814 - protein, 17 aa, Homo sapiens
  CDR3 for beta chain variable domain of TCR clone 277407 (TRBV7-3, TRBJ2-2)
CASSLSGTSGGTGELFF

SEQ ID NO: 554815 - protein, 14 aa, Homo sapiens
  CDR3 for alpha chain variable domain of TCR clone 277408 (TRAV2, TRAJ9)
CAVDDRSGGFKTIF

SEQ ID NO: 554816 - protein, 17 aa, Homo sapiens
  CDR3 for beta chain variable domain of TCR clone 277408 (TRBV20-1, TRBJ2-7)
CSATRAGGVAGVEEQYF

SEQ ID NO: 554817 - protein, 17 aa, Homo sapiens
  CDR3 for alpha chain variable domain of TCR clone 277409 (TRAV8-2, TRAJ17)
CVVSDRRFKAAGNTLTF

SEQ ID NO: 554818 - protein, 18 aa, Homo sapiens
  CDR3 for beta chain variable domain of TCR clone 277409 (TRBV7-9, TRBJ2-7)
CASSLTTSGSRTWYEQYF

SEQ ID NO: 554819 - protein, 18 aa, Homo sapiens
  CDR3 for alpha chain variable domain of TCR clone 277410 (TRAV12-2, )
CAVEDIQNPDPAVYQLRD

SEQ ID NO: 554820 - protein, 15 aa, Homo sapiens
  CDR3 for beta chain variable domain of TCR clone 277410 (TRBV7-3, TRBJ2-1)
CASSPTGGGEVEQFF

SEQ ID NO: 554821 - protein, 14 aa, Homo sapiens
  CDR3 for alpha chain variable domain of TCR clone 277411 (TRAV12-2, TRAJ40)
CAVKIPSGTYKYIF

SEQ ID NO: 554822 - protein, 13 aa, Homo sapiens
  CDR3 for beta chain variable domain of TCR clone 277411 (TRBV7-9, TRBJ2-5)
CASLPSGRETQYC

SEQ ID NO: 554823 - protein, 14 aa, Homo sapiens
  CDR3 for alpha chain variable domain of TCR clone 277412 (TRAV2, TRAJ9)
CAVEDRSGGFKTIF

SEQ ID NO: 554824 - protein, 17 aa, Homo sapiens
  CDR3 for beta chain variable domain of TCR clone 277412 (TRBV13, TRBJ2-3)
WASSLSRVAGGRNTQYF

SEQ ID NO: 554825 - protein, 14 aa, Homo sapiens
  CDR3 for alpha chain variable domain of TCR clone 277413 (TRAV17, TRAJ6)
CATDASGGSYIPPF

SEQ ID NO: 554826 - protein, 19 aa, Homo sapiens
  CDR3 for beta chain variable domain of TCR clone 277413 (TRBV4-3, TRBJ2-7)
CASSQEFIGWQVTPYEQYF

SEQ ID NO: 554827 - protein, 13 aa, Homo sapiens
  CDR3 for alpha chain variable domain of TCR clone 277414 (TRAV13-1, TRAJ5)
CAASDTGRRALTF

SEQ ID NO: 554828 - protein, 16 aa, Homo sapiens
  CDR3 for beta chain variable domain of TCR clone 277414 (TRBV6-1, TRBJ2-1)
CASILRQGSSYNEQFF

SEQ ID NO: 554829 - protein, 15 aa, Homo sapiens
  CDR3 for alpha chain variable domain of TCR clone 277415 (TRAV2, TRAJ18)
CAVEDRGSTLGRLYF

SEQ ID NO: 554830 - protein, 15 aa, Homo sapiens
  CDR3 for beta chain variable domain of TCR clone 277415 (TRBV20-1, TRBJ2-7)
CSARDRVSGMDEQYF

SEQ ID NO: 554831 - protein, 14 aa, Homo sapiens
  CDR3 for alpha chain variable domain of TCR clone 277416 (TRAV13-1, TRAJ35)
CTASKGGFGNVLHC

SEQ ID NO: 554832 - protein, 12 aa, Homo sapiens
  CDR3 for beta chain variable domain of TCR clone 277416 (TRBV7-3, TRBJ1-1)
CQQPGLGAEAFF

SEQ ID NO: 554833 - protein, 14 aa, Homo sapiens
  CDR3 for alpha chain variable domain of TCR clone 277417 (TRAV38-2/DV8, TRAJ30)
CAYMDGLGGDKIIF

SEQ ID NO: 554834 - protein, 15 aa, Homo sapiens
  CDR3 for beta chain variable domain of TCR clone 277417 (TRBV7-9, TRBJ2-2)
RASRPADRDTGELFF

SEQ ID NO: 554835 - protein, 13 aa, Homo sapiens
  CDR3 for alpha chain variable domain of TCR clone 277418 (TRAV2, TRAJ40)
CAVVTSGTYKYIC

SEQ ID NO: 554836 - protein, 14 aa, Homo sapiens
  CDR3 for beta chain variable domain of TCR clone 277418 (TRBV25-1, TRBJ1-1)
CASTHLGGNTEAFF

SEQ ID NO: 554837 - protein, 14 aa, Homo sapiens
  CDR3 for alpha chain variable domain of TCR clone 277419 (TRAV12-1, TRAJ23)
CVVIVYNKGGKLIF

SEQ ID NO: 554838 - protein, 13 aa, Homo sapiens
  CDR3 for beta chain variable domain of TCR clone 277419 (TRBV11-2, TRBJ2-5)
CASSFSSQETQYF

SEQ ID NO: 554839 - protein, 15 aa, Homo sapiens
  CDR3 for alpha chain variable domain of TCR clone 277420 (TRAV8-6, TRAJ11)
CAVSDRRSGYTTLTF

SEQ ID NO: 554840 - protein, 15 aa, Homo sapiens
  CDR3 for beta chain variable domain of TCR clone 277420 (TRBV7-3, TRBJ2-1)
CASSPTGGSRNEQFF

SEQ ID NO: 554841 - protein, 14 aa, Homo sapiens
  CDR3 for alpha chain variable domain of TCR clone 277421 (TRAV13-1, TRAJ20)
CAARPGSNDYKLSF

SEQ ID NO: 554842 - protein, 16 aa, Homo sapiens
  CDR3 for beta chain variable domain of TCR clone 277421 (TRBV7-7, TRBJ2-1)
CASSLASGTSYNEQFF

SEQ ID NO: 554843 - protein, 15 aa, Homo sapiens
  CDR3 for alpha chain variable domain of TCR clone 277422 (TRAV21, TRAJ53)
CATLNSGGSNYKLTF

SEQ ID NO: 554844 - protein, 16 aa, Homo sapiens
  CDR3 for beta chain variable domain of TCR clone 277422 (TRBV9, TRBJ2-1)
CASSVGGGGIYNEQFF

SEQ ID NO: 554845 - protein, 17 aa, Homo sapiens
  CDR3 for alpha chain variable domain of TCR clone 277423 (TRAV3, TRAJ6)
CAVRDGPRAGGSYRPTF

SEQ ID NO: 554846 - protein, 14 aa, Homo sapiens
  CDR3 for beta chain variable domain of TCR clone 277423 (TRBV7-2, TRBJ2-7)
CASSPRTSFYEQYF

SEQ ID NO: 554847 - protein, 14 aa, Homo sapiens
  CDR3 for alpha chain variable domain of TCR clone 277424 (TRAV4, TRAJ9)
CLVGSVTGGFKTIF

SEQ ID NO: 554848 - protein, 15 aa, Homo sapiens
  CDR3 for beta chain variable domain of TCR clone 277424 (TRBV7-2, TRBJ2-1)
CASSLASGRVNEQFF

SEQ ID NO: 554849 - protein, 16 aa, Homo sapiens
  CDR3 for alpha chain variable domain of TCR clone 277425 (TRAV3, TRAJ10)
CAVRDMRAGGGNKLTF

SEQ ID NO: 554850 - protein, 17 aa, Homo sapiens
  CDR3 for beta chain variable domain of TCR clone 277425 (TRBV28, TRBJ2-5)
CASSTPAGDALQETQYF

SEQ ID NO: 554851 - protein, 14 aa, Homo sapiens
  CDR3 for alpha chain variable domain of TCR clone 277426 (TRAV1-2, TRAJ16)
CAVNRFSDGQKLLF

SEQ ID NO: 554852 - protein, 16 aa, Homo sapiens
  CDR3 for beta chain variable domain of TCR clone 277426 (TRBV19, TRBJ2-7)
CASSISAGGALYEHYF

SEQ ID NO: 554853 - protein, 13 aa, Homo sapiens
  CDR3 for alpha chain variable domain of TCR clone 277427 (TRAV39, TRAJ40)
CAVYTSGTYKYIF

SEQ ID NO: 554854 - protein, 13 aa, Homo sapiens
  CDR3 for beta chain variable domain of TCR clone 277427 (TRBV28, TRBJ2-7)
CASKAGGVYEQYF

SEQ ID NO: 554855 - protein, 18 aa, Homo sapiens
  CDR3 for alpha chain variable domain of TCR clone 277428 (TRAV38-2/DV8, TRAJ42)
CAYRRADLTGGSQGNLIF

SEQ ID NO: 554856 - protein, 12 aa, Homo sapiens
  CDR3 for beta chain variable domain of TCR clone 277428 (TRBV11-2, TRBJ2-2)
CASSLGGGELFF

SEQ ID NO: 554857 - protein, 13 aa, Homo sapiens
  CDR3 for alpha chain variable domain of TCR clone 277429 (TRAV20, TRAJ40)
CAVPFSGNYKYIF

SEQ ID NO: 554858 - protein, 13 aa, Homo sapiens
  CDR3 for beta chain variable domain of TCR clone 277429 (TRBV15, TRBJ2-5)
CATSQIGEETQYF

SEQ ID NO: 554859 - protein, 14 aa, Homo sapiens
  CDR3 for alpha chain variable domain of TCR clone 277430 (TRAV12-2, TRAJ36)
CAVKISSGANNLFF

SEQ ID NO: 554860 - protein, 14 aa, Homo sapiens
  CDR3 for beta chain variable domain of TCR clone 277430 (TRBV25-1, TRBJ1-2)
CASSDTTGVVGYTF

SEQ ID NO: 554861 - protein, 14 aa, Homo sapiens
  CDR3 for alpha chain variable domain of TCR clone 277431 (TRAV26-1, TRAJ39)
CIVRAYNAGKMLTF

SEQ ID NO: 554862 - protein, 16 aa, Homo sapiens
  CDR3 for beta chain variable domain of TCR clone 277431 (TRBV15, TRBJ2-7)
CATSRDFGAAVYEQYF

SEQ ID NO: 554863 - protein, 16 aa, Homo sapiens
  CDR3 for alpha chain variable domain of TCR clone 277432 (TRAV1-2, TRAJ27)
CAVSRGSNTNAGKSTF

SEQ ID NO: 554864 - protein, 13 aa, Homo sapiens
  CDR3 for beta chain variable domain of TCR clone 277432 (TRBV12-4, TRBJ1-2)
CASSLRQGKGYTF

SEQ ID NO: 554865 - protein, 14 aa, Homo sapiens
  CDR3 for alpha chain variable domain of TCR clone 277433 (TRAV12-1, TRAJ30)
CVLNIGGRDDKIIF

SEQ ID NO: 554866 - protein, 14 aa, Homo sapiens
  CDR3 for beta chain variable domain of TCR clone 277433 (TRBV20-1, TRBJ2-1)
CSAQIGGSANEQFF

SEQ ID NO: 554867 - protein, 14 aa, Homo sapiens
  CDR3 for alpha chain variable domain of TCR clone 277434 (TRAV8-3, TRAJ4)
CAVGASGGYNKLIF

SEQ ID NO: 554868 - protein, 13 aa, Homo sapiens
  CDR3 for beta chain variable domain of TCR clone 277434 (TRBV7-2, TRBJ2-7)
CASSSPSGSEQYF

SEQ ID NO: 554869 - protein, 11 aa, Homo sapiens
  CDR3 for alpha chain variable domain of TCR clone 277435 (TRAV30, TRAJ23)
CGTEIAGKLIF

SEQ ID NO: 554870 - protein, 16 aa, Homo sapiens
  CDR3 for beta chain variable domain of TCR clone 277435 (TRBV6-5, TRBJ2-5)
CASSSVGRWGRETQYF

SEQ ID NO: 554871 - protein, 12 aa, Homo sapiens
  CDR3 for alpha chain variable domain of TCR clone 277436 (TRAV8-3, TRAJ26)
CAGDNYGQHFVF

SEQ ID NO: 554872 - protein, 15 aa, Homo sapiens
  CDR3 for beta chain variable domain of TCR clone 277436 (TRBV4-1, TRBJ1-4)
CASSDTGGTNEKLFF

SEQ ID NO: 554873 - protein, 14 aa, Homo sapiens
  CDR3 for alpha chain variable domain of TCR clone 277437 (TRAV8-3, TRAJ35)
CAVGARGFGNVLHC

SEQ ID NO: 554874 - protein, 13 aa, Homo sapiens
  CDR3 for beta chain variable domain of TCR clone 277437 (TRBV4-2, TRBJ1-1)
CASSQAGNTEAFF

SEQ ID NO: 554875 - protein, 15 aa, Homo sapiens
  CDR3 for alpha chain variable domain of TCR clone 277438 (TRAV35, TRAJ42)
CAGRLYGGSQGNLIF

SEQ ID NO: 554876 - protein, 12 aa, Homo sapiens
  CDR3 for beta chain variable domain of TCR clone 277438 (TRBV11-2, TRBJ2-5)
CASSLVGETQYF

SEQ ID NO: 554877 - protein, 16 aa, Homo sapiens
  CDR3 for alpha chain variable domain of TCR clone 277439 (TRAV26-1, )
CIGIQNPDPAVYQLRD

SEQ ID NO: 554878 - protein, 19 aa, Homo sapiens
  CDR3 for beta chain variable domain of TCR clone 277439 (TRBV19, TRBJ2-5)
CASSIGQVTDFFLGETQYF

SEQ ID NO: 554879 - protein, 14 aa, Homo sapiens
  CDR3 for alpha chain variable domain of TCR clone 277440 (TRAV1-2, TRAJ16)
CAVNRFSDGQKLLF

SEQ ID NO: 554880 - protein, 15 aa, Homo sapiens
  CDR3 for beta chain variable domain of TCR clone 277440 (TRBV3-1, TRBJ1-2)
CASSHPGTPGYGYTF

SEQ ID NO: 554881 - protein, 15 aa, Homo sapiens
  CDR3 for alpha chain variable domain of TCR clone 277441 (TRAV8-4, TRAJ47)
CAVSDPEEYGDKLVF

SEQ ID NO: 554882 - protein, 15 aa, Homo sapiens
  CDR3 for beta chain variable domain of TCR clone 277441 (TRBV11-2, TRBJ2-1)
CASSLGPDSYNEQFF

SEQ ID NO: 554883 - protein, 13 aa, Homo sapiens
  CDR3 for alpha chain variable domain of TCR clone 277442 (TRAV36/DV7, TRAJ33)
CAVDMDSNYQLIW

SEQ ID NO: 554884 - protein, 16 aa, Homo sapiens
  CDR3 for beta chain variable domain of TCR clone 277442 (TRBV15, TRBJ2-3)
CANRLSGGRAPDTQYF

SEQ ID NO: 554885 - protein, 15 aa, Homo sapiens
  CDR3 for alpha chain variable domain of TCR clone 277443 (TRAV29/DV5, TRAJ24)
CAASGATDSWGKFKF

SEQ ID NO: 554886 - protein, 20 aa, Homo sapiens
  CDR3 for beta chain variable domain of TCR clone 277443 (TRBV11-2, TRBJ2-2)
LRTRPCISVPAASLPGSCFF

SEQ ID NO: 554887 - protein, 17 aa, Homo sapiens
  CDR3 for alpha chain variable domain of TCR clone 277444 (TRAV12-2, TRAJ48)
CASNEKLTLGTGTRLTI

SEQ ID NO: 554888 - protein, 14 aa, Homo sapiens
  CDR3 for beta chain variable domain of TCR clone 277444 (TRBV5-1, TRBJ2-5)
CASSLAGKQETQYF

SEQ ID NO: 554889 - protein, 13 aa, Homo sapiens
  CDR3 for alpha chain variable domain of TCR clone 277445 (TRAV35, TRAJ43)
CAGYPYNNNDMRF

SEQ ID NO: 554890 - protein, 15 aa, Homo sapiens
  CDR3 for beta chain variable domain of TCR clone 277445 (TRBV25-1, TRBJ1-4)
CASSKRIATNKKLFF

SEQ ID NO: 554891 - protein, 14 aa, Homo sapiens
  CDR3 for alpha chain variable domain of TCR clone 277446 (TRAV1-2, TRAJ16)
CAVNRFSDGQKLLF

SEQ ID NO: 554892 - protein, 17 aa, Homo sapiens
  CDR3 for beta chain variable domain of TCR clone 277446 (TRBV13, TRBJ2-3)
CASSLSRVVGGRNTQYF

SEQ ID NO: 554893 - protein, 10 aa, Homo sapiens
  CDR3 for alpha chain variable domain of TCR clone 277447 (TRAV2, TRAJ34)
CAVVNDKLIF

SEQ ID NO: 554894 - protein, 13 aa, Homo sapiens
  CDR3 for beta chain variable domain of TCR clone 277447 (TRBV7-3, TRBJ1-2)
CASSLKRGYGYTF

SEQ ID NO: 554895 - protein, 23 aa, Homo sapiens
  CDR3 for alpha chain variable domain of TCR clone 277448 (TRAV8-6, TRAJ38)
CAVRNAGNNHIQNPDPPVYQLRD

SEQ ID NO: 554896 - protein, 15 aa, Homo sapiens
  CDR3 for beta chain variable domain of TCR clone 277448 (TRBV4-1, TRBJ2-2)
CASSEGQGITGELFF

SEQ ID NO: 554897 - protein, 12 aa, Homo sapiens
  CDR3 for alpha chain variable domain of TCR clone 277449 (TRAV13-1, TRAJ20)
CAAPMGFTSSAL

SEQ ID NO: 554898 - protein, 14 aa, Homo sapiens
  CDR3 for beta chain variable domain of TCR clone 277449 (TRBV28, TRBJ2-5)
CASTGAGGVETQYF

SEQ ID NO: 554899 - protein, 14 aa, Homo sapiens
  CDR3 for alpha chain variable domain of TCR clone 277450 (TRAV26-1, TRAJ38)
CIADNAGNNRKLFW

SEQ ID NO: 554900 - protein, 14 aa, Homo sapiens
  CDR3 for beta chain variable domain of TCR clone 277450 (TRBV19, TRBJ2-1)
CASPTFVLSGEQFF

SEQ ID NO: 554901 - protein, 14 aa, Homo sapiens
  CDR3 for alpha chain variable domain of TCR clone 277451 (TRAV12-2, TRAJ13)
CAVKKTGGYQIVTF

SEQ ID NO: 554902 - protein, 15 aa, Homo sapiens
  CDR3 for beta chain variable domain of TCR clone 277451 (TRBV19, TRBJ1-6)
CASSTQGAVGSPLHF

SEQ ID NO: 554903 - protein, 15 aa, Homo sapiens
  CDR3 for alpha chain variable domain of TCR clone 277452 (TRAV20, TRAJ43)
CAVQAGKSSNNDIRV

SEQ ID NO: 554904 - protein, 14 aa, Homo sapiens
  CDR3 for beta chain variable domain of TCR clone 277452 (TRBV27, TRBJ2-1)
CASRHLGGGKEQFF

SEQ ID NO: 554905 - protein, 11 aa, Homo sapiens
  CDR3 for alpha chain variable domain of TCR clone 277453 (TRAV12-2, TRAJ43)
CAAYNNNDMRF

SEQ ID NO: 554906 - protein, 13 aa, Homo sapiens
  CDR3 for beta chain variable domain of TCR clone 277453 (TRBV7-2, TRBJ2-7)
CASSSPSGSEQYF

SEQ ID NO: 554907 - protein, 15 aa, Homo sapiens
  CDR3 for alpha chain variable domain of TCR clone 277454 (TRAV1-2, TRAJ9)
CAVRDDGTGGFKTIF

SEQ ID NO: 554908 - protein, 17 aa, Homo sapiens
  CDR3 for beta chain variable domain of TCR clone 277454 (TRBV20-1, TRBJ2-1)
CSTSSSGLAGSYNEQFF

SEQ ID NO: 554909 - protein, 17 aa, Homo sapiens
  CDR3 for alpha chain variable domain of TCR clone 277455 (TRAV12-1, TRAJ6)
CVVKGGIPSGGSYIPTF

SEQ ID NO: 554910 - protein, 13 aa, Homo sapiens
  CDR3 for beta chain variable domain of TCR clone 277455 (TRBV5-1, TRBJ2-5)
CASGLIPAETQYF

SEQ ID NO: 554911 - protein, 14 aa, Homo sapiens
  CDR3 for alpha chain variable domain of TCR clone 277456 (TRAV12-1, TRAJ17)
CVVNYKAAGNKQTF

SEQ ID NO: 554912 - protein, 17 aa, Homo sapiens
  CDR3 for beta chain variable domain of TCR clone 277456 (TRBV20-1, TRBJ2-1)
CSASSSGLVGSYNEQFF

SEQ ID NO: 554913 - protein, 14 aa, Homo sapiens
  CDR3 for alpha chain variable domain of TCR clone 277457 (TRAV9-2, TRAJ39)
CALYIYNAGNMLTF

SEQ ID NO: 554914 - protein, 14 aa, Homo sapiens
  CDR3 for beta chain variable domain of TCR clone 277457 (TRBV9, TRBJ2-7)
CASSPRRAVGEQYF

SEQ ID NO: 554915 - protein, 13 aa, Homo sapiens
  CDR3 for alpha chain variable domain of TCR clone 277458 (TRAV1-2, TRAJ9)
CAALNTGGFKTIF

SEQ ID NO: 554916 - protein, 16 aa, Homo sapiens
  CDR3 for beta chain variable domain of TCR clone 277458 (TRBV7-6, TRBJ2-1)
CASSLAYSGRAGEQFF

SEQ ID NO: 554917 - protein, 15 aa, Homo sapiens
  CDR3 for alpha chain variable domain of TCR clone 277459 (TRAV13-1, TRAJ32)
CAASIYGGAPNKLIF

SEQ ID NO: 554918 - protein, 12 aa, Homo sapiens
  CDR3 for beta chain variable domain of TCR clone 277459 (TRBV7-6, TRBJ2-3)
CASSTGTDTQYF

SEQ ID NO: 554919 - protein, 14 aa, Homo sapiens
  CDR3 for alpha chain variable domain of TCR clone 277460 (TRAV3, TRAJ9)
CAVRLNTGDSKTIF

SEQ ID NO: 554920 - protein, 15 aa, Homo sapiens
  CDR3 for beta chain variable domain of TCR clone 277460 (TRBV7-2, TRBJ2-1)
CASSLASGRVNEQFF

SEQ ID NO: 554921 - protein, 22 aa, Homo sapiens
  CDR3 for alpha chain variable domain of TCR clone 277461 (TRAV12-2, TRAJ32)
CSSETPSPVIQPPKSATNKPIF

SEQ ID NO: 554922 - protein, 15 aa, Homo sapiens
  CDR3 for beta chain variable domain of TCR clone 277461 (TRBV28, TRBJ2-5)
CASSADRGRGETQYF

SEQ ID NO: 554923 - protein, 17 aa, Homo sapiens
  CDR3 for alpha chain variable domain of TCR clone 277462 (TRAV39, TRAJ32)
FAVDIKWVGGATNKLIF

SEQ ID NO: 554924 - protein, 11 aa, Homo sapiens
  CDR3 for beta chain variable domain of TCR clone 277462 (TRBV18, TRBJ1-2)
CASSPLNGYTF

SEQ ID NO: 554925 - protein, 17 aa, Homo sapiens
  CDR3 for alpha chain variable domain of TCR clone 277463 (TRAV36/DV7, TRAJ52)
CAVAQRAGGTSYGKLTF

SEQ ID NO: 554926 - protein, 13 aa, Homo sapiens
  CDR3 for beta chain variable domain of TCR clone 277463 (TRBV4-3, TRBJ1-1)
CASSPTGNTEAFF

SEQ ID NO: 554927 - protein, 19 aa, Homo sapiens
  CDR3 for alpha chain variable domain of TCR clone 277464 (TRAV26-1, TRAJ52)
CIVRVANNAGGTSYGKLTF

SEQ ID NO: 554928 - protein, 14 aa, Homo sapiens
  CDR3 for beta chain variable domain of TCR clone 277464 (TRBV19, TRBJ1-2)
FASSIGAGSYGYTF

SEQ ID NO: 554929 - protein, 13 aa, Homo sapiens
  CDR3 for alpha chain variable domain of TCR clone 277465 (TRAV12-1, TRAJ6)
CVVFPGGSYILTF

SEQ ID NO: 554930 - protein, 14 aa, Homo sapiens
  CDR3 for beta chain variable domain of TCR clone 277465 (TRBV20-1, TRBJ1-3)
CSASPTGAGNTIYF

SEQ ID NO: 554931 - protein, 14 aa, Homo sapiens
  CDR3 for alpha chain variable domain of TCR clone 277466 (TRAV2, TRAJ9)
CAVEDRCGGFKTIF

SEQ ID NO: 554932 - protein, 15 aa, Homo sapiens
  CDR3 for beta chain variable domain of TCR clone 277466 (TRBV19, TRBJ2-1)
CTSSHRDRGPNEQFF

SEQ ID NO: 554933 - protein, 13 aa, Homo sapiens
  CDR3 for alpha chain variable domain of TCR clone 277467 (TRAV12-2, TRAJ22)
CAVQSGSARQLTF

SEQ ID NO: 554934 - protein, 13 aa, Homo sapiens
  CDR3 for beta chain variable domain of TCR clone 277467 (TRBV6-1, TRBJ1-2)
CASSGGISFGYTF

SEQ ID NO: 554935 - protein, 11 aa, Homo sapiens
  CDR3 for alpha chain variable domain of TCR clone 277468 (TRAV2, TRAJ33)
CAVDSNYQLIW

SEQ ID NO: 554936 - protein, 15 aa, Homo sapiens
  CDR3 for beta chain variable domain of TCR clone 277468 (TRBV3-1, TRBJ2-5)
CASSRGQASWKTQYF

SEQ ID NO: 554937 - protein, 16 aa, Homo sapiens
  CDR3 for alpha chain variable domain of TCR clone 277469 (TRAV30, TRAJ49)
SAAQRVGPNTGNQFYF

SEQ ID NO: 554938 - protein, 13 aa, Homo sapiens
  CDR3 for beta chain variable domain of TCR clone 277469 (TRBV4-2, TRBJ1-1)
CASSQAGNTEAFF

SEQ ID NO: 554939 - protein, 16 aa, Homo sapiens
  CDR3 for alpha chain variable domain of TCR clone 277470 (TRAV30, TRAJ24)
CCTEIVDADSWGKFQF

SEQ ID NO: 554940 - protein, 12 aa, Homo sapiens
  CDR3 for beta chain variable domain of TCR clone 277470 (TRBV11-2, TRBJ2-2)
CASSLPTGELFF

SEQ ID NO: 554941 - protein, 14 aa, Homo sapiens
  CDR3 for alpha chain variable domain of TCR clone 277471 (TRAV2, TRAJ9)
CAVADRSGGFKTIF

SEQ ID NO: 554942 - protein, 15 aa, Homo sapiens
  CDR3 for beta chain variable domain of TCR clone 277471 (TRBV5-7, TRBJ1-5)
CASSYGKLWDQPQHF

SEQ ID NO: 554943 - protein, 16 aa, Homo sapiens
  CDR3 for alpha chain variable domain of TCR clone 277472 (TRAV22, TRAJ45)
CAVERGKRGGADGLTF

SEQ ID NO: 554944 - protein, 12 aa, Homo sapiens
  CDR3 for beta chain variable domain of TCR clone 277472 (TRBV27, TRBJ1-1)
CQQLSIGAEAFF

SEQ ID NO: 554945 - protein, 17 aa, Homo sapiens
  CDR3 for alpha chain variable domain of TCR clone 277473 (TRAV12-3, TRAJ6)
CAMSARGGEGGSYIPTF

SEQ ID NO: 554946 - protein, 12 aa, Homo sapiens
  CDR3 for beta chain variable domain of TCR clone 277473 (TRBV12-4, TRBJ2-3)
CASSALPDTQYF

SEQ ID NO: 554947 - protein, 14 aa, Homo sapiens
  CDR3 for alpha chain variable domain of TCR clone 277474 (TRAV12-2, TRAJ13)
CAVKKTGGYQKVTF

SEQ ID NO: 554948 - protein, 13 aa, Homo sapiens
  CDR3 for beta chain variable domain of TCR clone 277474 (TRBV28, TRBJ2-7)
CARKAGGVYEQYF

SEQ ID NO: 554949 - protein, 10 aa, Homo sapiens
  CDR3 for alpha chain variable domain of TCR clone 277475 (TRAV13-1, TRAJ26)
CAARRLWSEF

SEQ ID NO: 554950 - protein, 16 aa, Homo sapiens
  CDR3 for beta chain variable domain of TCR clone 277475 (TRBV7-3, TRBJ2-2)
CASSLKRGTLSGELFF

SEQ ID NO: 554951 - protein, 14 aa, Homo sapiens
  CDR3 for alpha chain variable domain of TCR clone 277476 (TRAV12-2, TRAJ13)
CAVKKTGGYQKVTF

SEQ ID NO: 554952 - protein, 15 aa, Homo sapiens
  CDR3 for beta chain variable domain of TCR clone 277476 (TRBV20-1, TRBJ2-7)
CSAESGTSGGYEQYF

SEQ ID NO: 554953 - protein, 14 aa, Homo sapiens
  CDR3 for alpha chain variable domain of TCR clone 277477 (TRAV13-1, TRAJ35)
FAASKGGFGNVRHC

SEQ ID NO: 554954 - protein, 13 aa, Homo sapiens
  CDR3 for beta chain variable domain of TCR clone 277477 (TRBV7-3, TRBJ1-1)
CASSQDWGAEAFF

SEQ ID NO: 554955 - protein, 17 aa, Homo sapiens
  CDR3 for alpha chain variable domain of TCR clone 277478 (TRAV16, TRAJ58)
CITVLSTGETSGSRLTF

SEQ ID NO: 554956 - protein, 17 aa, Homo sapiens
  CDR3 for beta chain variable domain of TCR clone 277478 (TRBV18, TRBJ2-1)
CASSKGLSGGADNEQFF

SEQ ID NO: 554957 - protein, 14 aa, Homo sapiens
  CDR3 for alpha chain variable domain of TCR clone 277479 (TRAV13-1, TRAJ50)
CAARSKTSYEKVIF

SEQ ID NO: 554958 - protein, 17 aa, Homo sapiens
  CDR3 for beta chain variable domain of TCR clone 277479 (TRBV13, TRBJ2-3)
CASSLSRVAGGRNTQYF

SEQ ID NO: 554959 - protein, 16 aa, Homo sapiens
  CDR3 for alpha chain variable domain of TCR clone 277480 (TRAV12-1, TRAJ28)
CVVIAYSGAGSYQLTF

SEQ ID NO: 554960 - protein, 12 aa, Homo sapiens
  CDR3 for beta chain variable domain of TCR clone 277480 (TRBV11-2, TRBJ2-2)
CASSLGGGELFF

SEQ ID NO: 554961 - protein, 13 aa, Homo sapiens
  CDR3 for alpha chain variable domain of TCR clone 277481 (TRAV12-2, TRAJ30)
RAVNLNRDDKIIV

SEQ ID NO: 554962 - protein, 12 aa, Homo sapiens
  CDR3 for beta chain variable domain of TCR clone 277481 (TRBV11-2, TRBJ2-2)
CASSLGGGELFF

SEQ ID NO: 554963 - protein, 13 aa, Homo sapiens
  CDR3 for alpha chain variable domain of TCR clone 277482 (TRAV13-1, TRAJ33)
CAASRAGNYQLIW

SEQ ID NO: 554964 - protein, 15 aa, Homo sapiens
  CDR3 for beta chain variable domain of TCR clone 277482 (TRBV2, TRBJ2-7)
EDSAMYFCASSDQYF

SEQ ID NO: 554965 - protein, 12 aa, Homo sapiens
  CDR3 for alpha chain variable domain of TCR clone 277483 (TRAV12-3, TRAJ17)
CAMTLTRNKLTF

SEQ ID NO: 554966 - protein, 15 aa, Homo sapiens
  CDR3 for beta chain variable domain of TCR clone 277483 (TRBV5-1, TRBJ2-7)
CASSLNGGPAREQYF

SEQ ID NO: 554967 - protein, 14 aa, Homo sapiens
  CDR3 for alpha chain variable domain of TCR clone 277484 (TRAV3, TRAJ6)
CAVRDWGGSYILTF

SEQ ID NO: 554968 - protein, 17 aa, Homo sapiens
  CDR3 for beta chain variable domain of TCR clone 277484 (TRBV6-5, TRBJ2-1)
CASRLSGRFESYNEQFF

SEQ ID NO: 554969 - protein, 12 aa, Homo sapiens
  CDR3 for alpha chain variable domain of TCR clone 277485 (TRAV9-2, TRAJ49)
CALSNTGDQFYF

SEQ ID NO: 554970 - protein, 15 aa, Homo sapiens
  CDR3 for beta chain variable domain of TCR clone 277485 (TRBV7-2, TRBJ2-1)
CASSLVGSSYNEQFF

SEQ ID NO: 554971 - protein, 14 aa, Homo sapiens
  CDR3 for alpha chain variable domain of TCR clone 277486 (TRAV35, TRAJ50)
CAGHRKTSYDKVIF

SEQ ID NO: 554972 - protein, 12 aa, Homo sapiens
  CDR3 for beta chain variable domain of TCR clone 277486 (TRBV7-3, TRBJ2-1)
CASSFINNEQFF

SEQ ID NO: 554973 - protein, 14 aa, Homo sapiens
  CDR3 for alpha chain variable domain of TCR clone 277487 (TRAV2, TRAJ9)
CAVEDRSGCFKTIF

SEQ ID NO: 554974 - protein, 12 aa, Homo sapiens
  CDR3 for beta chain variable domain of TCR clone 277487 (TRBV7-9, TRBJ2-7)
CASSLEGYEQYF

SEQ ID NO: 554975 - protein, 13 aa, Homo sapiens
  CDR3 for alpha chain variable domain of TCR clone 277488 (TRAV21, TRAJ20)
CAVSRLGDHKLSF

SEQ ID NO: 554976 - protein, 13 aa, Homo sapiens
  CDR3 for beta chain variable domain of TCR clone 277488 (TRBV7-3, TRBJ1-1)
CASSTAGGLEAFF

SEQ ID NO: 554977 - protein, 15 aa, Homo sapiens
  CDR3 for alpha chain variable domain of TCR clone 277489 (TRAV3, TRAJ27)
CAVRDPLTNAGQSTF

SEQ ID NO: 554978 - protein, 15 aa, Homo sapiens
  CDR3 for beta chain variable domain of TCR clone 277489 (TRBV28, TRBJ2-1)
CASSIIAGGRSEQFF

SEQ ID NO: 554979 - protein, 13 aa, Homo sapiens
  CDR3 for alpha chain variable domain of TCR clone 277490 (TRAV34, TRAJ22)
CGAGAGSARQLTF

SEQ ID NO: 554980 - protein, 13 aa, Homo sapiens
  CDR3 for beta chain variable domain of TCR clone 277490 (TRBV7-3, TRBJ1-1)
CASSQDWGAEAFF

SEQ ID NO: 554981 - protein, 12 aa, Homo sapiens
  CDR3 for alpha chain variable domain of TCR clone 277491 (TRAV1-1, TRAJ8)
CAGGTGFQKLVF

SEQ ID NO: 554982 - protein, 15 aa, Homo sapiens
  CDR3 for beta chain variable domain of TCR clone 277491 (TRBV5-5, TRBJ2-2)
CASSRQASGAGELFF

SEQ ID NO: 554983 - protein, 14 aa, Homo sapiens
  CDR3 for alpha chain variable domain of TCR clone 277492 (TRAV12-3, TRAJ56)
CAMSVTGANSKLTF

SEQ ID NO: 554984 - protein, 17 aa, Homo sapiens
  CDR3 for beta chain variable domain of TCR clone 277492 (TRBV20-1, TRBJ2-3)
CSASLHGRGGSADTQYF

SEQ ID NO: 554985 - protein, 15 aa, Homo sapiens
  CDR3 for alpha chain variable domain of TCR clone 277493 (TRAV35, TRAJ40)
CAGVPGASGTYKYIF

SEQ ID NO: 554986 - protein, 16 aa, Homo sapiens
  CDR3 for beta chain variable domain of TCR clone 277493 (TRBV12-4, TRBJ1-5)
CASSSGYGASNQPQHF

SEQ ID NO: 554987 - protein, 11 aa, Homo sapiens
  CDR3 for alpha chain variable domain of TCR clone 277494 (TRAV1-2, TRAJ20)
CAVSNDYKLSF

SEQ ID NO: 554988 - protein, 13 aa, Homo sapiens
  CDR3 for beta chain variable domain of TCR clone 277494 (TRBV19, TRBJ2-7)
CASSTKQGYEQYF

SEQ ID NO: 554989 - protein, 14 aa, Homo sapiens
  CDR3 for alpha chain variable domain of TCR clone 277495 (TRAV17, TRAJ12)
CATDEKDSSYKLIF

SEQ ID NO: 554990 - protein, 15 aa, Homo sapiens
  CDR3 for beta chain variable domain of TCR clone 277495 (TRBV27, TRBJ2-1)
CASSNGGGSSNEQFF

SEQ ID NO: 554991 - protein, 15 aa, Homo sapiens
  CDR3 for alpha chain variable domain of TCR clone 277496 (TRAV12-1, TRAJ40)
CVVNRDTSGTYKYIF

SEQ ID NO: 554992 - protein, 15 aa, Homo sapiens
  CDR3 for beta chain variable domain of TCR clone 277496 (TRBV7-9, TRBJ1-6)
CASSSPGRGNSPLHF

SEQ ID NO: 554993 - protein, 12 aa, Homo sapiens
  CDR3 for alpha chain variable domain of TCR clone 277497 (TRAV12-3, TRAJ17)
CAMTLTGNKRTC

SEQ ID NO: 554994 - protein, 15 aa, Homo sapiens
  CDR3 for beta chain variable domain of TCR clone 277497 (TRBV20-1, TRBJ2-7)
CSARDRVSGMDEQYF

SEQ ID NO: 554995 - protein, 15 aa, Homo sapiens
  CDR3 for alpha chain variable domain of TCR clone 277498 (TRAV12-2, TRAJ42)
CAVNSHGGSQGNRIF

SEQ ID NO: 554996 - protein, 13 aa, Homo sapiens
  CDR3 for beta chain variable domain of TCR clone 277498 (TRBV27, TRBJ1-1)
CASSVSANTEAFF

SEQ ID NO: 554997 - protein, 13 aa, Homo sapiens
  CDR3 for alpha chain variable domain of TCR clone 277499 (TRAV12-2, TRAJ45)
CREQGGGADGLTF

SEQ ID NO: 554998 - protein, 15 aa, Homo sapiens
  CDR3 for beta chain variable domain of TCR clone 277499 (TRBV9, TRBJ1-6)
CASSVAGTGDSPLHF

SEQ ID NO: 554999 - protein, 11 aa, Homo sapiens
  CDR3 for alpha chain variable domain of TCR clone 277500 (TRAV17, TRAJ49)
CATDAGNQSYF

SEQ ID NO: 555000 - protein, 16 aa, Homo sapiens
  CDR3 for beta chain variable domain of TCR clone 277500 (TRBV7-2, TRBJ1-2)
CASSPTSGTSLGGYTF

SEQ ID NO: 555001 - protein, 14 aa, Homo sapiens
  CDR3 for alpha chain variable domain of TCR clone 277501 (TRAV8-2, TRAJ37)
CVVSISGNTGKLSF

SEQ ID NO: 555002 - protein, 11 aa, Homo sapiens
  CDR3 for beta chain variable domain of TCR clone 277501 (TRBV18, TRBJ2-5)
CASSPRETQYF

SEQ ID NO: 555003 - protein, 16 aa, Homo sapiens
  CDR3 for alpha chain variable domain of TCR clone 277502 (TRAV13-1, TRAJ45)
CAARGSRKGGADGLTV

SEQ ID NO: 555004 - protein, 13 aa, Homo sapiens
  CDR3 for beta chain variable domain of TCR clone 277502 (TRBV12-4, TRBJ2-5)
CASRERGKETQYF

SEQ ID NO: 555005 - protein, 10 aa, Homo sapiens
  CDR3 for alpha chain variable domain of TCR clone 277503 (TRAV30, TRAJ34)
CGTNPDKLIF

SEQ ID NO: 555006 - protein, 16 aa, Homo sapiens
  CDR3 for beta chain variable domain of TCR clone 277503 (TRBV12-5, TRBJ2-5)
CASGPRTSGNQETQYF

SEQ ID NO: 555007 - protein, 14 aa, Homo sapiens
  CDR3 for alpha chain variable domain of TCR clone 277504 (TRAV12-2, TRAJ40)
CAVKITSGTYKYIF

SEQ ID NO: 555008 - protein, 14 aa, Homo sapiens
  CDR3 for beta chain variable domain of TCR clone 277504 (TRBV7-8, TRBJ2-7)
CASSPRDRVYEQYF

SEQ ID NO: 555009 - protein, 16 aa, Homo sapiens
  CDR3 for alpha chain variable domain of TCR clone 277505 (TRAV22, TRAJ45)
CAVGRGKRGGADGLTF

SEQ ID NO: 555010 - protein, 16 aa, Homo sapiens
  CDR3 for beta chain variable domain of TCR clone 277505 (TRBV7-8, TRBJ2-3)
CASSTEGQRETDTQYF

SEQ ID NO: 555011 - protein, 14 aa, Homo sapiens
  CDR3 for alpha chain variable domain of TCR clone 277506 (TRAV4, TRAJ9)
CLVGSGTGGFKTII

SEQ ID NO: 555012 - protein, 15 aa, Homo sapiens
  CDR3 for beta chain variable domain of TCR clone 277506 (TRBV7-2, TRBJ2-1)
CASSLASGRVNEQFF

SEQ ID NO: 555013 - protein, 15 aa, Homo sapiens
  CDR3 for alpha chain variable domain of TCR clone 277507 (TRAV21, TRAJ17)
CAVRPTLSNTGKLTF

SEQ ID NO: 555014 - protein, 15 aa, Homo sapiens
  CDR3 for beta chain variable domain of TCR clone 277507 (TRBV12-4, TRBJ2-7)
CASSLGSGGPYEQYF

SEQ ID NO: 555015 - protein, 15 aa, Homo sapiens
  CDR3 for alpha chain variable domain of TCR clone 277508 (TRAV8-3, TRAJ45)
CASSYSGGGADGLTF

SEQ ID NO: 555016 - protein, 16 aa, Homo sapiens
  CDR3 for beta chain variable domain of TCR clone 277508 (TRBV2, TRBJ2-4)
CASSEAPGGEQNIQYF

SEQ ID NO: 555017 - protein, 11 aa, Homo sapiens
  CDR3 for alpha chain variable domain of TCR clone 277509 (TRAV20, TRAJ23)
CAYNQGGKLIF

SEQ ID NO: 555018 - protein, 16 aa, Homo sapiens
  CDR3 for beta chain variable domain of TCR clone 277509 (TRBV7-8, TRBJ2-5)
CASSFGGQPAQETQYF

SEQ ID NO: 555019 - protein, 17 aa, Homo sapiens
  CDR3 for alpha chain variable domain of TCR clone 277510 (TRAV38-1, TRAJ28)
CAFMKPTYGAGSYQLTF

SEQ ID NO: 555020 - protein, 15 aa, Homo sapiens
  CDR3 for beta chain variable domain of TCR clone 277510 (TRBV5-1, TRBJ2-4)
CASSLGGGGSYIQYF

SEQ ID NO: 555021 - protein, 14 aa, Homo sapiens
  CDR3 for alpha chain variable domain of TCR clone 277511 (TRAV12-3, TRAJ10)
SHLPLTGGGNKLTF

SEQ ID NO: 555022 - protein, 15 aa, Homo sapiens
  CDR3 for beta chain variable domain of TCR clone 277511 (TRBV27, TRBJ1-5)
CASSIGTGFDQPQHF

SEQ ID NO: 555023 - protein, 11 aa, Homo sapiens
  CDR3 for alpha chain variable domain of TCR clone 277512 (TRAV12-3, TRAJ7)
CAMRGNNRLAF

SEQ ID NO: 555024 - protein, 14 aa, Homo sapiens
  CDR3 for beta chain variable domain of TCR clone 277512 (TRBV7-2, TRBJ2-7)
CASRSQGAAYEQYF

SEQ ID NO: 555025 - protein, 15 aa, Homo sapiens
  CDR3 for alpha chain variable domain of TCR clone 277513 (TRAV23/DV6, TRAJ18)
CAARYRGSTLGRLYF

SEQ ID NO: 555026 - protein, 13 aa, Homo sapiens
  CDR3 for beta chain variable domain of TCR clone 277513 (TRBV4-2, TRBJ1-1)
CASSQAGNTEAFF

SEQ ID NO: 555027 - protein, 13 aa, Homo sapiens
  CDR3 for alpha chain variable domain of TCR clone 277514 (TRAV21, TRAJ27)
FGARPGNAGKSTF

SEQ ID NO: 555028 - protein, 14 aa, Homo sapiens
  CDR3 for beta chain variable domain of TCR clone 277514 (TRBV7-6, TRBJ2-3)
CASSLGTVTDTQYF

SEQ ID NO: 555029 - protein, 12 aa, Homo sapiens
  CDR3 for alpha chain variable domain of TCR clone 277515 (TRAV26-1, TRAJ36)
CIVETGANNLFL

SEQ ID NO: 555030 - protein, 12 aa, Homo sapiens
  CDR3 for beta chain variable domain of TCR clone 277515 (TRBV11-2, TRBJ2-1)
CASSPGNNEQFF

SEQ ID NO: 555031 - protein, 15 aa, Homo sapiens
  CDR3 for alpha chain variable domain of TCR clone 277516 (TRAV4, TRAJ28)
CLVEGSGAGSYQLTF

SEQ ID NO: 555032 - protein, 13 aa, Homo sapiens
  CDR3 for beta chain variable domain of TCR clone 277516 (TRBV2, TRBJ2-3)
CASGRGRTDTQYF

SEQ ID NO: 555033 - protein, 16 aa, Homo sapiens
  CDR3 for alpha chain variable domain of TCR clone 277517 (TRAV12-3, TRAJ53)
CAMSPGSGGSNYKLTF

SEQ ID NO: 555034 - protein, 11 aa, Homo sapiens
  CDR3 for beta chain variable domain of TCR clone 277517 (TRBV29-1, TRBJ2-5)
CREDRTGTQFF

SEQ ID NO: 555035 - protein, 14 aa, Homo sapiens
  CDR3 for alpha chain variable domain of TCR clone 277518 (TRAV12-1, TRAJ17)
CVVNFKAAGNKLTF

SEQ ID NO: 555036 - protein, 13 aa, Homo sapiens
  CDR3 for beta chain variable domain of TCR clone 277518 (TRBV12-5, TRBJ2-3)
CASGDRQSDTQYF

SEQ ID NO: 555037 - protein, 13 aa, Homo sapiens
  CDR3 for alpha chain variable domain of TCR clone 277519 (TRAV12-3, TRAJ7)
CAMTPYGNYRLAF

SEQ ID NO: 555038 - protein, 16 aa, Homo sapiens
  CDR3 for beta chain variable domain of TCR clone 277519 (TRBV20-1, TRBJ1-4)
CSARPYGGELNEKLFF

SEQ ID NO: 555039 - protein, 15 aa, Homo sapiens
  CDR3 for alpha chain variable domain of TCR clone 277520 (TRAV17, TRAJ52)
CATEAGGTSYVKLTF

SEQ ID NO: 555040 - protein, 14 aa, Homo sapiens
  CDR3 for beta chain variable domain of TCR clone 277520 (TRBV28, TRBJ1-5)
CASSLGVLVKPQHF

SEQ ID NO: 555041 - protein, 13 aa, Homo sapiens
  CDR3 for alpha chain variable domain of TCR clone 277521 (TRAV29/DV5, TRAJ31)
CAASRNNNAKLMF

SEQ ID NO: 555042 - protein, 15 aa, Homo sapiens
  CDR3 for beta chain variable domain of TCR clone 277521 (TRBV27, TRBJ2-1)
CASSNGGGSSNEQFF

SEQ ID NO: 555043 - protein, 11 aa, Homo sapiens
  CDR3 for alpha chain variable domain of TCR clone 277522 (TRAV25, TRAJ5)
CRGGGRRALTF

SEQ ID NO: 555044 - protein, 15 aa, Homo sapiens
  CDR3 for beta chain variable domain of TCR clone 277522 (TRBV20-1, TRBJ2-7)
CSARDRVSVMDEQYF

SEQ ID NO: 555045 - protein, 15 aa, Homo sapiens
  CDR3 for alpha chain variable domain of TCR clone 277523 (TRAV17, TRAJ45)
CATAYSGGGADGLAF

SEQ ID NO: 555046 - protein, 17 aa, Homo sapiens
  CDR3 for beta chain variable domain of TCR clone 277523 (TRBV5-1, TRBJ1-5)
CASSLVGREEVNQPQHF

SEQ ID NO: 555047 - protein, 17 aa, Homo sapiens
  CDR3 for alpha chain variable domain of TCR clone 277524 (TRAV26-1, TRAJ53)
CIVRVDDSGGSNYKLTF

SEQ ID NO: 555048 - protein, 14 aa, Homo sapiens
  CDR3 for beta chain variable domain of TCR clone 277524 (TRBV19, TRBJ2-7)
CASSIFAGTYEQYF

SEQ ID NO: 555049 - protein, 14 aa, Homo sapiens
  CDR3 for alpha chain variable domain of TCR clone 277525 (TRAV13-1, TRAJ35)
CAASKGGFGNVLHC

SEQ ID NO: 555050 - protein, 16 aa, Homo sapiens
  CDR3 for beta chain variable domain of TCR clone 277525 (TRBV24-1, TRBJ2-3)
CATSDAISGITDTQYV

SEQ ID NO: 555051 - protein, 14 aa, Homo sapiens
  CDR3 for alpha chain variable domain of TCR clone 277526 (TRAV13-2, TRAJ9)
CAENLETGGFKTII

SEQ ID NO: 555052 - protein, 16 aa, Homo sapiens
  CDR3 for beta chain variable domain of TCR clone 277526 (TRBV28, TRBJ2-5)
CASSFSPAGGWETQYF

SEQ ID NO: 555053 - protein, 12 aa, Homo sapiens
  CDR3 for alpha chain variable domain of TCR clone 277527 (TRAV29/DV5, TRAJ34)
CAARHNTDKPIF

SEQ ID NO: 555054 - protein, 16 aa, Homo sapiens
  CDR3 for beta chain variable domain of TCR clone 277527 (TRBV19, TRBJ2-2)
CASSAAGTGGTGELFF

SEQ ID NO: 555055 - protein, 14 aa, Homo sapiens
  CDR3 for alpha chain variable domain of TCR clone 277528 (TRAV12-1, TRAJ12)
CVVNGGDSSYKLIF

SEQ ID NO: 555056 - protein, 13 aa, Homo sapiens
  CDR3 for beta chain variable domain of TCR clone 277528 (TRBV28, TRBJ2-2)
CASIRESTGELFF

SEQ ID NO: 555057 - protein, 12 aa, Homo sapiens
  CDR3 for alpha chain variable domain of TCR clone 277529 (TRAV20, TRAJ39)
CAVGNAGNMLTF

SEQ ID NO: 555058 - protein, 14 aa, Homo sapiens
  CDR3 for beta chain variable domain of TCR clone 277529 (TRBV12-4, TRBJ1-1)
CASSLGTGGTEAFF

SEQ ID NO: 555059 - protein, 14 aa, Homo sapiens
  CDR3 for alpha chain variable domain of TCR clone 277530 (TRAV23/DV6, TRAJ6)
CAASRSGGSYIPLF

SEQ ID NO: 555060 - protein, 17 aa, Homo sapiens
  CDR3 for beta chain variable domain of TCR clone 277530 (TRBV20-1, TRBJ2-1)
CSASASGLAGSYNEQFF

SEQ ID NO: 555061 - protein, 11 aa, Homo sapiens
  CDR3 for alpha chain variable domain of TCR clone 277531 (TRAV35, TRAJ57)
GPQGGSEKLIF

SEQ ID NO: 555062 - protein, 14 aa, Homo sapiens
  CDR3 for beta chain variable domain of TCR clone 277531 (TRBV19, TRBJ2-1)
CASPTFVLSGEQFF

SEQ ID NO: 555063 - protein, 14 aa, Homo sapiens
  CDR3 for alpha chain variable domain of TCR clone 277532 (TRAV35, TRAJ22)
CAGLRPGSARQLTF

SEQ ID NO: 555064 - protein, 14 aa, Homo sapiens
  CDR3 for beta chain variable domain of TCR clone 277532 (TRBV24-1, TRBJ1-1)
CATSIPRGDTEAFF

SEQ ID NO: 555065 - protein, 13 aa, Homo sapiens
  CDR3 for alpha chain variable domain of TCR clone 277533 (TRAV29/DV5, TRAJ31)
CAASRNNNARLMF

SEQ ID NO: 555066 - protein, 13 aa, Homo sapiens
  CDR3 for beta chain variable domain of TCR clone 277533 (TRBV7-8, TRBJ2-4)
CASSREHANIQYF

SEQ ID NO: 555067 - protein, 13 aa, Homo sapiens
  CDR3 for alpha chain variable domain of TCR clone 277534 (TRAV8-3, TRAJ43)
CAVVPYNNNDMRF

SEQ ID NO: 555068 - protein, 15 aa, Homo sapiens
  CDR3 for beta chain variable domain of TCR clone 277534 (TRBV7-3, TRBJ2-1)
CASSPTGGGEVEQFF

SEQ ID NO: 555069 - protein, 16 aa, Homo sapiens
  CDR3 for alpha chain variable domain of TCR clone 277535 (TRAV8-3, TRAJ28)
CAVPPQRGAGSYQLTF

SEQ ID NO: 555070 - protein, 11 aa, Homo sapiens
  CDR3 for beta chain variable domain of TCR clone 277535 (TRBV12-4, TRBJ2-3)
CASTATDTQYF

SEQ ID NO: 555071 - protein, 14 aa, Homo sapiens
  CDR3 for alpha chain variable domain of TCR clone 277536 (TRAV12-3, TRAJ10)
SHLPLTGGGNKLTF

SEQ ID NO: 555072 - protein, 19 aa, Homo sapiens
  CDR3 for beta chain variable domain of TCR clone 277536 (TRBV25-1, TRBJ2-2)
CAILVYRVDRGRETGELFF

SEQ ID NO: 555073 - protein, 14 aa, Homo sapiens
  CDR3 for alpha chain variable domain of TCR clone 277537 (TRAV1-1, TRAJ27)
FAVIYNTNAGKSTF

SEQ ID NO: 555074 - protein, 15 aa, Homo sapiens
  CDR3 for beta chain variable domain of TCR clone 277537 (TRBV7-2, TRBJ2-1)
CASSSGLAGSNEQFF

SEQ ID NO: 555075 - protein, 14 aa, Homo sapiens
  CDR3 for alpha chain variable domain of TCR clone 277538 (TRAV1-2, TRAJ8)
CAVREDTGFQKLVF

SEQ ID NO: 555076 - protein, 15 aa, Homo sapiens
  CDR3 for beta chain variable domain of TCR clone 277538 (TRBV4-1, TRBJ1-1)
RASSQEWGHYTEAFF

SEQ ID NO: 555077 - protein, 14 aa, Homo sapiens
  CDR3 for alpha chain variable domain of TCR clone 277539 (TRAV13-2, TRAJ42)
CGEWVGGSQGNLIF

SEQ ID NO: 555078 - protein, 13 aa, Homo sapiens
  CDR3 for beta chain variable domain of TCR clone 277539 (TRBV19, TRBJ1-2)
CASSVPGQDGDTF

SEQ ID NO: 555079 - protein, 13 aa, Homo sapiens
  CDR3 for alpha chain variable domain of TCR clone 277540 (TRAV25, TRAJ24)
CAGGTDSWGKFQF

SEQ ID NO: 555080 - protein, 16 aa, Homo sapiens
  CDR3 for beta chain variable domain of TCR clone 277540 (TRBV28, TRBJ2-3)
CASSLFTGVSTETQYF

SEQ ID NO: 555081 - protein, 13 aa, Homo sapiens
  CDR3 for alpha chain variable domain of TCR clone 277541 (TRAV8-6, TRAJ54)
CAGGIQGAQKLVF

SEQ ID NO: 555082 - protein, 12 aa, Homo sapiens
  CDR3 for beta chain variable domain of TCR clone 277541 (TRBV19, TRBJ1-4)
CASKDWPGGLFF

SEQ ID NO: 555083 - protein, 13 aa, Homo sapiens
  CDR3 for alpha chain variable domain of TCR clone 277542 (TRAV13-2, TRAJ10)
CAENTGGGNKLTF

SEQ ID NO: 555084 - protein, 15 aa, Homo sapiens
  CDR3 for beta chain variable domain of TCR clone 277542 (TRBV12-4, TRBJ2-2)
CASSRQGTNTGELFF

SEQ ID NO: 555085 - protein, 18 aa, Homo sapiens
  CDR3 for alpha chain variable domain of TCR clone 277543 (TRAV21, TRAJ52)
CAVRPSLAGGTSYGKLTF

SEQ ID NO: 555086 - protein, 12 aa, Homo sapiens
  CDR3 for beta chain variable domain of TCR clone 277543 (TRBV11-2, TRBJ2-2)
CASSLGGGELFF

SEQ ID NO: 555087 - protein, 15 aa, Homo sapiens
  CDR3 for alpha chain variable domain of TCR clone 277544 (TRAV29/DV5, TRAJ24)
CAASGATDSWGKFHF

SEQ ID NO: 555088 - protein, 12 aa, Homo sapiens
  CDR3 for beta chain variable domain of TCR clone 277544 (TRBV11-2, TRBJ2-2)
CASSLPTGELFF

SEQ ID NO: 555089 - protein, 13 aa, Homo sapiens
  CDR3 for alpha chain variable domain of TCR clone 277545 (TRAV17, TRAJ5)
CALRGTVRRALTF

SEQ ID NO: 555090 - protein, 19 aa, Homo sapiens
  CDR3 for beta chain variable domain of TCR clone 277545 (TRBV19, TRBJ2-5)
CASSIGQVTDFFLGETQYF

SEQ ID NO: 555091 - protein, 15 aa, Homo sapiens
  CDR3 for alpha chain variable domain of TCR clone 277546 (TRAV4, TRAJ10)
CLVGDGSGGGNRLTF

SEQ ID NO: 555092 - protein, 15 aa, Homo sapiens
  CDR3 for beta chain variable domain of TCR clone 277546 (TRBV27, TRBJ2-3)
CASSSLAGVIDTQYF

SEQ ID NO: 555093 - protein, 15 aa, Homo sapiens
  CDR3 for alpha chain variable domain of TCR clone 277547 (TRAV3, TRAJ4)
CAVRDGTGGYNKLIF

SEQ ID NO: 555094 - protein, 15 aa, Homo sapiens
  CDR3 for beta chain variable domain of TCR clone 277547 (TRBV12-4, TRBJ2-5)
CASSPPTGLQETQYF

SEQ ID NO: 555095 - protein, 13 aa, Homo sapiens
  CDR3 for alpha chain variable domain of TCR clone 277548 (TRAV12-1, TRAJ31)
CVVNPNNNARLMF

SEQ ID NO: 555096 - protein, 15 aa, Homo sapiens
  CDR3 for beta chain variable domain of TCR clone 277548 (TRBV6-3, TRBJ2-7)
CASSSPGTVFYEQYF

SEQ ID NO: 555097 - protein, 18 aa, Homo sapiens
  CDR3 for alpha chain variable domain of TCR clone 277549 (TRAV21, TRAJ52)
CVVRPSPAGGTSYGKLTF

SEQ ID NO: 555098 - protein, 15 aa, Homo sapiens
  CDR3 for beta chain variable domain of TCR clone 277549 (TRBV7-9, TRBJ2-7)
CASSSSGLAVYEQYF

SEQ ID NO: 555099 - protein, 13 aa, Homo sapiens
  CDR3 for alpha chain variable domain of TCR clone 277550 (TRAV3, TRAJ8)
CAVRFTGFQKLVF

SEQ ID NO: 555100 - protein, 12 aa, Homo sapiens
  CDR3 for beta chain variable domain of TCR clone 277550 (TRBV2, TRBJ1-2)
CASSGQTYSYTF

SEQ ID NO: 555101 - protein, 15 aa, Homo sapiens
  CDR3 for alpha chain variable domain of TCR clone 277551 (TRAV8-3, TRAJ40)
CAAPSLGSGTYKYIF

SEQ ID NO: 555102 - protein, 16 aa, Homo sapiens
  CDR3 for beta chain variable domain of TCR clone 277551 (TRBV7-3, TRBJ2-3)
ELSLMKRMRGADTQYF

SEQ ID NO: 555103 - protein, 14 aa, Homo sapiens
  CDR3 for alpha chain variable domain of TCR clone 277552 (TRAV12-2, TRAJ17)
CAVLFKAAGNKLTF

SEQ ID NO: 555104 - protein, 13 aa, Homo sapiens
  CDR3 for beta chain variable domain of TCR clone 277552 (TRBV19, TRBJ1-2)
CAGSQGQVYGYSF

SEQ ID NO: 555105 - protein, 14 aa, Homo sapiens
  CDR3 for alpha chain variable domain of TCR clone 277553 (TRAV1-2, TRAJ15)
CAVRDRQAGTALIF

SEQ ID NO: 555106 - protein, 12 aa, Homo sapiens
  CDR3 for beta chain variable domain of TCR clone 277553 (TRBV7-8, TRBJ2-7)
CASSLGDREQYF

SEQ ID NO: 555107 - protein, 13 aa, Homo sapiens
  CDR3 for alpha chain variable domain of TCR clone 277554 (TRAV12-2, TRAJ15)
CPHTGQAGTALIF

SEQ ID NO: 555108 - protein, 13 aa, Homo sapiens
  CDR3 for beta chain variable domain of TCR clone 277554 (TRBV19, TRBJ2-2)
CASSQRSTGELFF

SEQ ID NO: 555109 - protein, 11 aa, Homo sapiens
  CDR3 for alpha chain variable domain of TCR clone 277555 (TRAV13-1, TRAJ30)
CAASRDDRIIF

SEQ ID NO: 555110 - protein, 17 aa, Homo sapiens
  CDR3 for beta chain variable domain of TCR clone 277555 (TRBV11-2, TRBJ2-1)
CASSLYPPGVEYNEQFF

SEQ ID NO: 555111 - protein, 13 aa, Homo sapiens
  CDR3 for alpha chain variable domain of TCR clone 277556 (TRAV27, TRAJ54)
CAGAGQGAQKLEF

SEQ ID NO: 555112 - protein, 15 aa, Homo sapiens
  CDR3 for beta chain variable domain of TCR clone 277556 (TRBV18, TRBJ2-6)
CASSPSYAGANVLSF

SEQ ID NO: 555113 - protein, 15 aa, Homo sapiens
  CDR3 for alpha chain variable domain of TCR clone 277557 (TRAV17, TRAJ57)
CATGPSQGGSEKLVF

SEQ ID NO: 555114 - protein, 12 aa, Homo sapiens
  CDR3 for beta chain variable domain of TCR clone 277557 (TRBV28, TRBJ2-7)
CASSFSSYEQYF

SEQ ID NO: 555115 - protein, 14 aa, Homo sapiens
  CDR3 for alpha chain variable domain of TCR clone 277558 (TRAV12-2, TRAJ17)
RAVLFKAAGNKLTL

SEQ ID NO: 555116 - protein, 19 aa, Homo sapiens
  CDR3 for beta chain variable domain of TCR clone 277558 (TRBV28, TRBJ2-7)
CASSYSGTSRLGWVYEQYF

SEQ ID NO: 555117 - protein, 14 aa, Homo sapiens
  CDR3 for alpha chain variable domain of TCR clone 277559 (TRAV1-2, TRAJ16)
CAVNRFSDGQKLLF

SEQ ID NO: 555118 - protein, 16 aa, Homo sapiens
  CDR3 for beta chain variable domain of TCR clone 277559 (TRBV7-3, TRBJ2-5)
CQQLGYGRSGSETQYF

SEQ ID NO: 555119 - protein, 14 aa, Homo sapiens
  CDR3 for alpha chain variable domain of TCR clone 277560 (TRAV26-1, TRAJ21)
CIVRPPYNFNKFYF

SEQ ID NO: 555120 - protein, 14 aa, Homo sapiens
  CDR3 for beta chain variable domain of TCR clone 277560 (TRBV27, TRBJ2-7)
CASSLARGHYEQYF

SEQ ID NO: 555121 - protein, 16 aa, Homo sapiens
  CDR3 for alpha chain variable domain of TCR clone 277561 (TRAV21, TRAJ37)
CAVRTAGSSNTGKLIF

SEQ ID NO: 555122 - protein, 13 aa, Homo sapiens
  CDR3 for beta chain variable domain of TCR clone 277561 (TRBV7-9, TRBJ2-5)
CGSLPSGRETQYF

SEQ ID NO: 555123 - protein, 15 aa, Homo sapiens
  CDR3 for alpha chain variable domain of TCR clone 277562 (TRAV3, TRAJ20)
CAVRDIKLSDYKLSF

SEQ ID NO: 555124 - protein, 15 aa, Homo sapiens
  CDR3 for beta chain variable domain of TCR clone 277562 (TRBV15, TRBJ1-4)
CATSRDMGSYEKLFF

SEQ ID NO: 555125 - protein, 15 aa, Homo sapiens
  CDR3 for alpha chain variable domain of TCR clone 277563 (TRAV12-1, TRAJ9)
CVVSFGDTGGFKTIF

SEQ ID NO: 555126 - protein, 15 aa, Homo sapiens
  CDR3 for beta chain variable domain of TCR clone 277563 (TRBV7-9, TRBJ1-4)
CASSARTGGNEKLFF

SEQ ID NO: 555127 - protein, 16 aa, Homo sapiens
  CDR3 for alpha chain variable domain of TCR clone 277564 (TRAV12-3, TRAJ53)
CAMSPGSGGSNYKLTF

SEQ ID NO: 555128 - protein, 17 aa, Homo sapiens
  CDR3 for beta chain variable domain of TCR clone 277564 (TRBV11-2, TRBJ2-1)
CASSVYPPGVEYNAQFF

SEQ ID NO: 555129 - protein, 11 aa, Homo sapiens
  CDR3 for alpha chain variable domain of TCR clone 277565 (TRAV2, TRAJ33)
CAVDSNYQLIW

SEQ ID NO: 555130 - protein, 12 aa, Homo sapiens
  CDR3 for beta chain variable domain of TCR clone 277565 (TRBV20-1, TRBJ2-1)
CSAQYMYNEQFF

SEQ ID NO: 555131 - protein, 12 aa, Homo sapiens
  CDR3 for alpha chain variable domain of TCR clone 277566 (TRAV3, TRAJ20)
CAVRDGDYKLSF

SEQ ID NO: 555132 - protein, 13 aa, Homo sapiens
  CDR3 for beta chain variable domain of TCR clone 277566 (TRBV12-4, TRBJ1-5)
CASSPDRAQPQHF

SEQ ID NO: 555133 - protein, 13 aa, Homo sapiens
  CDR3 for alpha chain variable domain of TCR clone 277567 (TRAV2, TRAJ40)
CAVVTSGTFKYIF

SEQ ID NO: 555134 - protein, 16 aa, Homo sapiens
  CDR3 for beta chain variable domain of TCR clone 277567 (TRBV29-1, TRBJ2-6)
CSVEDITYSGANVLTF

SEQ ID NO: 555135 - protein, 15 aa, Homo sapiens
  CDR3 for alpha chain variable domain of TCR clone 277568 (TRAV27, TRAJ38)
CAARRNAGNNRKLIW

SEQ ID NO: 555136 - protein, 15 aa, Homo sapiens
  CDR3 for beta chain variable domain of TCR clone 277568 (TRBV7-2, TRBJ2-1)
CASSSGLAGGNEQFL

SEQ ID NO: 555137 - protein, 10 aa, Homo sapiens
  CDR3 for alpha chain variable domain of TCR clone 277569 (TRAV21, TRAJ20)
CAVNGGRLQA

SEQ ID NO: 555138 - protein, 15 aa, Homo sapiens
  CDR3 for beta chain variable domain of TCR clone 277569 (TRBV6-1, TRBJ2-5)
CASSEFPLMGETQYF

SEQ ID NO: 555139 - protein, 15 aa, Homo sapiens
  CDR3 for alpha chain variable domain of TCR clone 277570 (TRAV9-2, TRAJ8)
CALRGLNTGFRKLVF

SEQ ID NO: 555140 - protein, 14 aa, Homo sapiens
  CDR3 for beta chain variable domain of TCR clone 277570 (TRBV4-1, TRBJ2-2)
CASSQAVNTGELFF

SEQ ID NO: 555141 - protein, 16 aa, Homo sapiens
  CDR3 for alpha chain variable domain of TCR clone 277571 (TRAV26-1, TRAJ45)
CIVEKYSGGGADGLTF

SEQ ID NO: 555142 - protein, 15 aa, Homo sapiens
  CDR3 for beta chain variable domain of TCR clone 277571 (TRBV15, TRBJ2-7)
CHQKRPIQQAYEQYF

SEQ ID NO: 555143 - protein, 13 aa, Homo sapiens
  CDR3 for alpha chain variable domain of TCR clone 277572 (TRAV29/DV5, TRAJ31)
CAASRNNNARLMF

SEQ ID NO: 555144 - protein, 16 aa, Homo sapiens
  CDR3 for beta chain variable domain of TCR clone 277572 (TRBV4-2, TRBJ2-1)
CASSQDGTGGYNEQFF

SEQ ID NO: 555145 - protein, 12 aa, Homo sapiens
  CDR3 for alpha chain variable domain of TCR clone 277573 (TRAV36/DV7, TRAJ54)
CAVVRGAQKLVF

SEQ ID NO: 555146 - protein, 15 aa, Homo sapiens
  CDR3 for beta chain variable domain of TCR clone 277573 (TRBV7-3, TRBJ2-2)
CASKANGANTGELFF

SEQ ID NO: 555147 - protein, 14 aa, Homo sapiens
  CDR3 for alpha chain variable domain of TCR clone 277574 (TRAV12-3, TRAJ58)
CAMSTETSGSRLTF

SEQ ID NO: 555148 - protein, 16 aa, Homo sapiens
  CDR3 for beta chain variable domain of TCR clone 277574 (TRBV20-1, TRBJ2-1)
CSARDLKQGMNNEQFF

SEQ ID NO: 555149 - protein, 14 aa, Homo sapiens
  CDR3 for alpha chain variable domain of TCR clone 277575 (TRAV23/DV6, TRAJ27)
CAASRDTNAGKSTF

SEQ ID NO: 555150 - protein, 13 aa, Homo sapiens
  CDR3 for beta chain variable domain of TCR clone 277575 (TRBV20-1, TRBJ1-5)
CSASGRGNKPQHF

SEQ ID NO: 555151 - protein, 14 aa, Homo sapiens
  CDR3 for alpha chain variable domain of TCR clone 277576 (TRAV1-2, TRAJ16)
CAVNRCSDGQKLLF

SEQ ID NO: 555152 - protein, 14 aa, Homo sapiens
  CDR3 for beta chain variable domain of TCR clone 277576 (TRBV7-3, TRBJ2-1)
CASSLAGGTNEQFF

SEQ ID NO: 555153 - protein, 11 aa, Homo sapiens
  CDR3 for alpha chain variable domain of TCR clone 277577 (TRAV17, TRAJ36)
CAPTGANNLFF

SEQ ID NO: 555154 - protein, 12 aa, Homo sapiens
  CDR3 for beta chain variable domain of TCR clone 277577 (TRBV29-1, TRBJ2-3)
CSVVLVADTQYF

SEQ ID NO: 555155 - protein, 12 aa, Homo sapiens
  CDR3 for alpha chain variable domain of TCR clone 277578 (TRAV12-1, TRAJ40)
CAVPSGTYKYIF

SEQ ID NO: 555156 - protein, 15 aa, Homo sapiens
  CDR3 for beta chain variable domain of TCR clone 277578 (TRBV12-4, TRBJ2-1)
CASSPLSGRNNEQFV

SEQ ID NO: 555157 - protein, 15 aa, Homo sapiens
  CDR3 for alpha chain variable domain of TCR clone 277579 (TRAV2, TRAJ24)
CAVVRLKNRWGKLQF

SEQ ID NO: 555158 - protein, 16 aa, Homo sapiens
  CDR3 for beta chain variable domain of TCR clone 277579 (TRBV7-7, TRBJ2-3)
CASSPGTSGSTDTQYF

SEQ ID NO: 555159 - protein, 15 aa, Homo sapiens
  CDR3 for alpha chain variable domain of TCR clone 277580 (TRAV12-2, TRAJ43)
CAFDMRFGAGTRLTV

SEQ ID NO: 555160 - protein, 15 aa, Homo sapiens
  CDR3 for beta chain variable domain of TCR clone 277580 (TRBV6-3, TRBJ2-2)
CASSFLATLTGELFF

SEQ ID NO: 555161 - protein, 10 aa, Homo sapiens
  CDR3 for alpha chain variable domain of TCR clone 277581 (TRAV12-1, TRAJ43)
CVVHNNDMRF

SEQ ID NO: 555162 - protein, 15 aa, Homo sapiens
  CDR3 for beta chain variable domain of TCR clone 277581 (TRBV5-4, TRBJ2-5)
CASSFFGEGMETQYF

SEQ ID NO: 555163 - protein, 16 aa, Homo sapiens
  CDR3 for alpha chain variable domain of TCR clone 277582 (TRAV21, TRAJ33)
CAVSPGSMDSNYQLIW

SEQ ID NO: 555164 - protein, 17 aa, Homo sapiens
  CDR3 for beta chain variable domain of TCR clone 277582 (TRBV2, TRBJ1-4)
CASSKRELTQGEEKLFF

SEQ ID NO: 555165 - protein, 16 aa, Homo sapiens
  CDR3 for alpha chain variable domain of TCR clone 277583 (TRAV30, TRAJ24)
CGTEIVDAGSWGKFQF

SEQ ID NO: 555166 - protein, 15 aa, Homo sapiens
  CDR3 for beta chain variable domain of TCR clone 277583 (TRBV28, TRBJ2-1)
CASSIIAGGRSEQFF

SEQ ID NO: 555167 - protein, 13 aa, Homo sapiens
  CDR3 for alpha chain variable domain of TCR clone 277584 (TRAV2, TRAJ21)
WAVEDLNFNKFYF

SEQ ID NO: 555168 - protein, 15 aa, Homo sapiens
  CDR3 for beta chain variable domain of TCR clone 277584 (TRBV28, TRBJ2-5)
CASSPGQGSIETQYF

SEQ ID NO: 555169 - protein, 18 aa, Homo sapiens
  CDR3 for alpha chain variable domain of TCR clone 277585 (TRAV21, TRAJ52)
CAVRPSPAGGTSHGKLTF

SEQ ID NO: 555170 - protein, 13 aa, Homo sapiens
  CDR3 for beta chain variable domain of TCR clone 277585 (TRBV20-1, TRBJ1-1)
CSARVGGNTEAFF

SEQ ID NO: 555171 - protein, 14 aa, Homo sapiens
  CDR3 for alpha chain variable domain of TCR clone 277586 (TRAV26-2, TRAJ32)
CCVGYGGATNKLIF

SEQ ID NO: 555172 - protein, 14 aa, Homo sapiens
  CDR3 for beta chain variable domain of TCR clone 277586 (TRBV4-2, TRBJ2-1)
CASGLDRAYNEHVF

SEQ ID NO: 555173 - protein, 17 aa, Homo sapiens
  CDR3 for alpha chain variable domain of TCR clone 277587 (TRAV4, TRAJ18)
CLVGERSVGSTLGRLYF

SEQ ID NO: 555174 - protein, 15 aa, Homo sapiens
  CDR3 for beta chain variable domain of TCR clone 277587 (TRBV28, TRBJ2-1)
CASSIIAGGRSEQFF

SEQ ID NO: 555175 - protein, 18 aa, Homo sapiens
  CDR3 for alpha chain variable domain of TCR clone 277588 (TRAV26-1, TRAJ23)
CIVRVGLEVWNQGGKIIF

SEQ ID NO: 555176 - protein, 16 aa, Homo sapiens
  CDR3 for beta chain variable domain of TCR clone 277588 (TRBV12-4, TRBJ2-5)
CARSFFVRGRQETQYF

SEQ ID NO: 555177 - protein, 12 aa, Homo sapiens
  CDR3 for alpha chain variable domain of TCR clone 277589 (TRAV8-3, TRAJ41)
CAVALSGYALNF

SEQ ID NO: 555178 - protein, 16 aa, Homo sapiens
  CDR3 for beta chain variable domain of TCR clone 277589 (TRBV27, TRBJ2-7)
CASSSERRDSAYEQYF

SEQ ID NO: 555179 - protein, 12 aa, Homo sapiens
  CDR3 for alpha chain variable domain of TCR clone 277590 (TRAV2, TRAJ9)
CAVGAGGFKTIF

SEQ ID NO: 555180 - protein, 13 aa, Homo sapiens
  CDR3 for beta chain variable domain of TCR clone 277590 (TRBV14, TRBJ1-1)
CASSQEAGTEAFF

SEQ ID NO: 555181 - protein, 13 aa, Homo sapiens
  CDR3 for alpha chain variable domain of TCR clone 277591 (TRAV20, TRAJ40)
CAVPFSGTYKYIF

SEQ ID NO: 555182 - protein, 16 aa, Homo sapiens
  CDR3 for beta chain variable domain of TCR clone 277591 (TRBV7-9, TRBJ2-3)
CASSPWREVGTDTQYF

SEQ ID NO: 555183 - protein, 13 aa, Homo sapiens
  CDR3 for alpha chain variable domain of TCR clone 277592 (TRAV21, TRAJ20)
CAVGLRVDYKLSF

SEQ ID NO: 555184 - protein, 13 aa, Homo sapiens
  CDR3 for beta chain variable domain of TCR clone 277592 (TRBV19, TRBJ2-7)
CASSIDRTYEQYF

SEQ ID NO: 555185 - protein, 18 aa, Homo sapiens
  CDR3 for alpha chain variable domain of TCR clone 277593 (TRAV26-1, TRAJ52)
CIVRVEGAGGTSYGKLTF

SEQ ID NO: 555186 - protein, 12 aa, Homo sapiens
  CDR3 for beta chain variable domain of TCR clone 277593 (TRBV12-4, TRBJ2-7)
CASSLGGYEQYF

SEQ ID NO: 555187 - protein, 12 aa, Homo sapiens
  CDR3 for alpha chain variable domain of TCR clone 277594 (TRAV3, TRAJ26)
CAVRDYGQNFVF

SEQ ID NO: 555188 - protein, 14 aa, Homo sapiens
  CDR3 for beta chain variable domain of TCR clone 277594 (TRBV7-2, TRBJ2-7)
CASRSQGAAYEQYF

SEQ ID NO: 555189 - protein, 21 aa, Homo sapiens
  CDR3 for alpha chain variable domain of TCR clone 277595 (TRAV8-1, TRAJ9)
CAVNSVEASKLSLEQEQDYLL

SEQ ID NO: 555190 - protein, 15 aa, Homo sapiens
  CDR3 for beta chain variable domain of TCR clone 277595 (TRBV11-2, TRBJ2-3)
CASSGRDGLTDTQYF

SEQ ID NO: 555191 - protein, 14 aa, Homo sapiens
  CDR3 for alpha chain variable domain of TCR clone 277596 (TRAV17, TRAJ56)
CATVPAGANSKLTF

SEQ ID NO: 555192 - protein, 13 aa, Homo sapiens
  CDR3 for beta chain variable domain of TCR clone 277596 (TRBV7-2, TRBJ2-2)
CASSLAVTGELFF

SEQ ID NO: 555193 - protein, 14 aa, Homo sapiens
  CDR3 for alpha chain variable domain of TCR clone 277597 (TRAV26-1, TRAJ39)
CIVRGSRAGNMLTF

SEQ ID NO: 555194 - protein, 14 aa, Homo sapiens
  CDR3 for beta chain variable domain of TCR clone 277597 (TRBV4-1, TRBJ2-2)
CASSLTENTGELFF

SEQ ID NO: 555195 - protein, 14 aa, Homo sapiens
  CDR3 for alpha chain variable domain of TCR clone 277598 (TRAV1-2, TRAJ8)
CAVREDTGFQKLVF

SEQ ID NO: 555196 - protein, 15 aa, Homo sapiens
  CDR3 for beta chain variable domain of TCR clone 277598 (TRBV4-2, TRBJ1-1)
CASSQRSSGRTEAFF

SEQ ID NO: 555197 - protein, 12 aa, Homo sapiens
  CDR3 for alpha chain variable domain of TCR clone 277599 (TRAV17, TRAJ16)
CATVLPGQKLLF

SEQ ID NO: 555198 - protein, 13 aa, Homo sapiens
  CDR3 for beta chain variable domain of TCR clone 277599 (TRBV20-1, TRBJ1-6)
CSAKLGGTSPLHF

SEQ ID NO: 555199 - protein, 13 aa, Homo sapiens
  CDR3 for alpha chain variable domain of TCR clone 277600 (TRAV20, TRAJ48)
CAVHLFGNEKLTF

SEQ ID NO: 555200 - protein, 12 aa, Homo sapiens
  CDR3 for beta chain variable domain of TCR clone 277600 (TRBV7-9, TRBJ2-7)
CASSFGSYEQYF

SEQ ID NO: 555201 - protein, 14 aa, Homo sapiens
  CDR3 for alpha chain variable domain of TCR clone 277601 (TRAV21, TRAJ37)
CAVKGSSNTGKLIF

SEQ ID NO: 555202 - protein, 14 aa, Homo sapiens
  CDR3 for beta chain variable domain of TCR clone 277601 (TRBV19, TRBJ1-2)
CASSLQGQAYGYTF

SEQ ID NO: 555203 - protein, 19 aa, Homo sapiens
  CDR3 for alpha chain variable domain of TCR clone 277602 (TRAV2, TRAJ20)
ILQVREADAAVYRDCNLSF

SEQ ID NO: 555204 - protein, 13 aa, Homo sapiens
  CDR3 for beta chain variable domain of TCR clone 277602 (TRBV15, TRBJ1-6)
CATSGGLNSPLHF

SEQ ID NO: 555205 - protein, 14 aa, Homo sapiens
  CDR3 for alpha chain variable domain of TCR clone 277603 (TRAV1-2, TRAJ8)
CAVREDTGFQKLVF

SEQ ID NO: 555206 - protein, 11 aa, Homo sapiens
  CDR3 for beta chain variable domain of TCR clone 277603 (TRBV29-1, TRBJ1-4)
CSASSGEKLFF

SEQ ID NO: 555207 - protein, 15 aa, Homo sapiens
  CDR3 for alpha chain variable domain of TCR clone 277604 (TRAV13-1, TRAJ44)
CAASRGGGTASKLTF

SEQ ID NO: 555208 - protein, 15 aa, Homo sapiens
  CDR3 for beta chain variable domain of TCR clone 277604 (TRBV6-3, TRBJ2-7)
CASSSPGTVFYEQYF

SEQ ID NO: 555209 - protein, 14 aa, Homo sapiens
  CDR3 for alpha chain variable domain of TCR clone 277605 (TRAV12-2, TRAJ13)
CAVAGSGGYQKVTF

SEQ ID NO: 555210 - protein, 13 aa, Homo sapiens
  CDR3 for beta chain variable domain of TCR clone 277605 (TRBV7-6, TRBJ1-2)
CASSLVADYGYTF

SEQ ID NO: 555211 - protein, 15 aa, Homo sapiens
  CDR3 for alpha chain variable domain of TCR clone 277606 (TRAV3, TRAJ5)
CAVRDLYTGRRALTF

SEQ ID NO: 555212 - protein, 11 aa, Homo sapiens
  CDR3 for beta chain variable domain of TCR clone 277606 (TRBV7-9, TRBJ2-5)
CASSLGETQYF

SEQ ID NO: 555213 - protein, 13 aa, Homo sapiens
  CDR3 for alpha chain variable domain of TCR clone 277607 (TRAV40, TRAJ41)
CLLGAQSGYALNF

SEQ ID NO: 555214 - protein, 15 aa, Homo sapiens
  CDR3 for beta chain variable domain of TCR clone 277607 (TRBV6-3, TRBJ2-7)
CASSSPGTVFYEQYF

SEQ ID NO: 555215 - protein, 13 aa, Homo sapiens
  CDR3 for alpha chain variable domain of TCR clone 277608 (TRAV27, TRAJ41)
CAGEGNSGYALNF

SEQ ID NO: 555216 - protein, 17 aa, Homo sapiens
  CDR3 for beta chain variable domain of TCR clone 277608 (TRBV15, TRBJ1-1)
CATSRVGGADGDTEAFF

SEQ ID NO: 555217 - protein, 16 aa, Homo sapiens
  CDR3 for alpha chain variable domain of TCR clone 277609 (TRAV12-3, TRAJ53)
CAMSPGSGGSNYKLTF

SEQ ID NO: 555218 - protein, 16 aa, Homo sapiens
  CDR3 for beta chain variable domain of TCR clone 277609 (TRBV9, TRBJ2-5)
CASSPRTGYDEETQYF

SEQ ID NO: 555219 - protein, 15 aa, Homo sapiens
  CDR3 for alpha chain variable domain of TCR clone 277610 (TRAV8-4, TRAJ37)
CAVSYGSSNTGKLIF

SEQ ID NO: 555220 - protein, 13 aa, Homo sapiens
  CDR3 for beta chain variable domain of TCR clone 277610 (TRBV12-4, TRBJ2-5)
CASSLGGSRTQYF

SEQ ID NO: 555221 - protein, 16 aa, Homo sapiens
  CDR3 for alpha chain variable domain of TCR clone 277611 (TRAV12-3, TRAJ28)
CAMRSNSGAGSYQLTF

SEQ ID NO: 555222 - protein, 16 aa, Homo sapiens
  CDR3 for beta chain variable domain of TCR clone 277611 (TRBV7-2, TRBJ1-3)
CASSRLEASSGNTIYF

SEQ ID NO: 555223 - protein, 14 aa, Homo sapiens
  CDR3 for alpha chain variable domain of TCR clone 277612 (TRAV1-2, TRAJ8)
CAVRDDTGFQKLVF

SEQ ID NO: 555224 - protein, 14 aa, Homo sapiens
  CDR3 for beta chain variable domain of TCR clone 277612 (TRBV29-1, TRBJ1-4)
CSVTGTGGNEKLFF

SEQ ID NO: 555225 - protein, 13 aa, Homo sapiens
  CDR3 for alpha chain variable domain of TCR clone 277613 (TRAV3, TRAJ20)
CAVRDTPRYKLSF

SEQ ID NO: 555226 - protein, 16 aa, Homo sapiens
  CDR3 for beta chain variable domain of TCR clone 277613 (TRBV19, TRBJ2-2)
CASRSPGTGATGELFF

SEQ ID NO: 555227 - protein, 11 aa, Homo sapiens
  CDR3 for alpha chain variable domain of TCR clone 277614 (TRAV4, TRAJ31)
CLVGDNARLMF

SEQ ID NO: 555228 - protein, 16 aa, Homo sapiens
  CDR3 for beta chain variable domain of TCR clone 277614 (TRBV7-2, TRBJ2-5)
CASSSKWLSAQEAQYF

SEQ ID NO: 555229 - protein, 15 aa, Homo sapiens
  CDR3 for alpha chain variable domain of TCR clone 277615 (TRAV29/DV5, TRAJ42)
CAAKTDGGSQGNLIF

SEQ ID NO: 555230 - protein, 16 aa, Homo sapiens
  CDR3 for beta chain variable domain of TCR clone 277615 (TRBV7-9, TRBJ2-1)
CASGLVSGPSYNEQFF

SEQ ID NO: 555231 - protein, 21 aa, Homo sapiens
  CDR3 for alpha chain variable domain of TCR clone 277616 (TRAV8-4, TRAJ47)
HLTKPSAHMSDAAERGNKLVF

SEQ ID NO: 555232 - protein, 14 aa, Homo sapiens
  CDR3 for beta chain variable domain of TCR clone 277616 (TRBV12-4, TRBJ2-5)
CARSLWQKQETQYF

SEQ ID NO: 555233 - protein, 15 aa, Homo sapiens
  CDR3 for alpha chain variable domain of TCR clone 277617 (TRAV1-2, TRAJ30)
CAVRPHGNRDDKIIF

SEQ ID NO: 555234 - protein, 13 aa, Homo sapiens
  CDR3 for beta chain variable domain of TCR clone 277617 (TRBV4-1, TRBJ2-7)
CARSQGQAYEQYF

SEQ ID NO: 555235 - protein, 14 aa, Homo sapiens
  CDR3 for alpha chain variable domain of TCR clone 277618 (TRAV13-1, TRAJ23)
CAASRLGRGGKLIF

SEQ ID NO: 555236 - protein, 14 aa, Homo sapiens
  CDR3 for beta chain variable domain of TCR clone 277618 (TRBV7-6, TRBJ2-3)
CASSLGTVTDTQYF

SEQ ID NO: 555237 - protein, 11 aa, Homo sapiens
  CDR3 for alpha chain variable domain of TCR clone 277619 (TRAV21, TRAJ41)
CAVRSGYALNL

SEQ ID NO: 555238 - protein, 13 aa, Homo sapiens
  CDR3 for beta chain variable domain of TCR clone 277619 (TRBV7-9, TRBJ1-2)
CASSLKQNYGDTF

SEQ ID NO: 555239 - protein, 16 aa, Homo sapiens
  CDR3 for alpha chain variable domain of TCR clone 277620 (TRAV1-2, TRAJ10)
CAVRGVLTGGGNKLTF

SEQ ID NO: 555240 - protein, 13 aa, Homo sapiens
  CDR3 for beta chain variable domain of TCR clone 277620 (TRBV19, TRBJ1-5)
CASSIGGEQPQHF

SEQ ID NO: 555241 - protein, 14 aa, Homo sapiens
  CDR3 for alpha chain variable domain of TCR clone 277621 (TRAV12-2, TRAJ45)
CAVNKGGGADGLTF

SEQ ID NO: 555242 - protein, 14 aa, Homo sapiens
  CDR3 for beta chain variable domain of TCR clone 277621 (TRBV20-1, TRBJ1-1)
GSAMGGTANTEAFF

SEQ ID NO: 555243 - protein, 15 aa, Homo sapiens
  CDR3 for alpha chain variable domain of TCR clone 277622 (TRAV20, TRAJ43)
CAVQAGKSSNNDMPF

SEQ ID NO: 555244 - protein, 14 aa, Homo sapiens
  CDR3 for beta chain variable domain of TCR clone 277622 (TRBV27, TRBJ2-1)
CASRHLGGGKEQFF

SEQ ID NO: 555245 - protein, 11 aa, Homo sapiens
  CDR3 for alpha chain variable domain of TCR clone 277623 (TRAV13-1, TRAJ6)
CATLGSYIPTF

SEQ ID NO: 555246 - protein, 14 aa, Homo sapiens
  CDR3 for beta chain variable domain of TCR clone 277623 (TRBV7-2, TRBJ1-3)
CASSRGGTGNTIYF

SEQ ID NO: 555247 - protein, 15 aa, Homo sapiens
  CDR3 for alpha chain variable domain of TCR clone 277624 (TRAV3, TRAJ4)
CAVRDGTGGYKKLIF

SEQ ID NO: 555248 - protein, 15 aa, Homo sapiens
  CDR3 for beta chain variable domain of TCR clone 277624 (TRBV7-3, TRBJ2-1)
CASSPTGGGEVEQFF

SEQ ID NO: 555249 - protein, 14 aa, Homo sapiens
  CDR3 for alpha chain variable domain of TCR clone 277625 (TRAV29/DV5, TRAJ32)
CAAAYGGATNNLLF

SEQ ID NO: 555250 - protein, 15 aa, Homo sapiens
  CDR3 for beta chain variable domain of TCR clone 277625 (TRBV27, TRBJ2-7)
CASSTAGTGSYEQYF

SEQ ID NO: 555251 - protein, 14 aa, Homo sapiens
  CDR3 for alpha chain variable domain of TCR clone 277626 (TRAV26-1, TRAJ49)
CIVRVATGGKQFYF

SEQ ID NO: 555252 - protein, 16 aa, Homo sapiens
  CDR3 for beta chain variable domain of TCR clone 277626 (TRBV6-6, TRBJ1-6)
CASSLHGPGRGSPLHF

SEQ ID NO: 555253 - protein, 13 aa, Homo sapiens
  CDR3 for alpha chain variable domain of TCR clone 277627 (TRAV26-1, TRAJ29)
CIVRRSGNTPLVF

SEQ ID NO: 555254 - protein, 15 aa, Homo sapiens
  CDR3 for beta chain variable domain of TCR clone 277627 (TRBV7-2, TRBJ2-1)
CASSLASGRVNEQFF

SEQ ID NO: 555255 - protein, 15 aa, Homo sapiens
  CDR3 for alpha chain variable domain of TCR clone 277628 (TRAV35, TRAJ52)
CAGPRGGTRYGKLTF

SEQ ID NO: 555256 - protein, 14 aa, Homo sapiens
  CDR3 for beta chain variable domain of TCR clone 277628 (TRBV20-1, TRBJ2-7)
CSAWTALSSYEQSF

SEQ ID NO: 555257 - protein, 23 aa, Homo sapiens
  CDR3 for alpha chain variable domain of TCR clone 277629 (TRAV3, )
CAVRDCLNAGDNHIQNPDPAVYQ

SEQ ID NO: 555258 - protein, 14 aa, Homo sapiens
  CDR3 for beta chain variable domain of TCR clone 277629 (TRBV5-5, TRBJ1-5)
CASSGQGVDQPQHF

SEQ ID NO: 555259 - protein, 13 aa, Homo sapiens
  CDR3 for alpha chain variable domain of TCR clone 277630 (TRAV8-3, TRAJ36)
CAVGATGANNLFF

SEQ ID NO: 555260 - protein, 13 aa, Homo sapiens
  CDR3 for beta chain variable domain of TCR clone 277630 (TRBV18, TRBJ2-5)
CASSPIPGETQYF

SEQ ID NO: 555261 - protein, 14 aa, Homo sapiens
  CDR3 for alpha chain variable domain of TCR clone 277631 (TRAV2, TRAJ29)
CAGPFQYGNTPLVF

SEQ ID NO: 555262 - protein, 13 aa, Homo sapiens
  CDR3 for beta chain variable domain of TCR clone 277631 (TRBV3-1, TRBJ1-1)
CASSPGVITEAFF

SEQ ID NO: 555263 - protein, 15 aa, Homo sapiens
  CDR3 for alpha chain variable domain of TCR clone 277632 (TRAV26-1, TRAJ21)
CIVRVPNYNFNKFYF

SEQ ID NO: 555264 - protein, 11 aa, Homo sapiens
  CDR3 for beta chain variable domain of TCR clone 277632 (TRBV7-3, TRBJ2-5)
CASSLSETQYF

SEQ ID NO: 555265 - protein, 15 aa, Homo sapiens
  CDR3 for alpha chain variable domain of TCR clone 277633 (TRAV2, TRAJ9)
CAVEERGTGSFKTIF

SEQ ID NO: 555266 - protein, 13 aa, Homo sapiens
  CDR3 for beta chain variable domain of TCR clone 277633 (TRBV3-1, TRBJ1-2)
CASSQRAPGGYTF

SEQ ID NO: 555267 - protein, 18 aa, Homo sapiens
  CDR3 for alpha chain variable domain of TCR clone 277634 (TRAV21, TRAJ52)
CAVRPSPAGGTSYGKLTF

SEQ ID NO: 555268 - protein, 14 aa, Homo sapiens
  CDR3 for beta chain variable domain of TCR clone 277634 (TRBV4-1, TRBJ2-2)
CASSQSVNTGELFF

SEQ ID NO: 555269 - protein, 13 aa, Homo sapiens
  CDR3 for alpha chain variable domain of TCR clone 277635 (TRAV17, TRAJ11)
CATEPVGYSTLTF

SEQ ID NO: 555270 - protein, 14 aa, Homo sapiens
  CDR3 for beta chain variable domain of TCR clone 277635 (TRBV7-8, TRBJ2-5)
CASSATGGQETQYF

SEQ ID NO: 555271 - protein, 17 aa, Homo sapiens
  CDR3 for alpha chain variable domain of TCR clone 277636 (TRAV3, TRAJ42)
CAVRDRYYGGSQGNLIF

SEQ ID NO: 555272 - protein, 12 aa, Homo sapiens
  CDR3 for beta chain variable domain of TCR clone 277636 (TRBV29-1, TRBJ2-2)
CSVYKYTGELFF

SEQ ID NO: 555273 - protein, 14 aa, Homo sapiens
  CDR3 for alpha chain variable domain of TCR clone 277637 (TRAV2, TRAJ9)
CAVEDRSGGFKTIF

SEQ ID NO: 555274 - protein, 18 aa, Homo sapiens
  CDR3 for beta chain variable domain of TCR clone 277637 (TRBV11-2, TRBJ2-3)
CANSLGGASRGAPNTQYF

SEQ ID NO: 555275 - protein, 18 aa, Homo sapiens
  CDR3 for alpha chain variable domain of TCR clone 277638 (TRAV12-3, TRAJ52)
CAMSRTNAGGTSYGKLTF

SEQ ID NO: 555276 - protein, 17 aa, Homo sapiens
  CDR3 for beta chain variable domain of TCR clone 277638 (TRBV7-3, TRBJ2-3)
CRAQLNERMRGADTQYF

SEQ ID NO: 555277 - protein, 13 aa, Homo sapiens
  CDR3 for alpha chain variable domain of TCR clone 277639 (TRAV8-3, TRAJ28)
CAVGAVGSYQLTC

SEQ ID NO: 555278 - protein, 15 aa, Homo sapiens
  CDR3 for beta chain variable domain of TCR clone 277639 (TRBV7-9, TRBJ1-5)
CASSQGHQTNQPQHF

SEQ ID NO: 555279 - protein, 14 aa, Homo sapiens
  CDR3 for alpha chain variable domain of TCR clone 277640 (TRAV9-2, TRAJ39)
CALYIYNAGNLLTF

SEQ ID NO: 555280 - protein, 11 aa, Homo sapiens
  CDR3 for beta chain variable domain of TCR clone 277640 (TRBV19, TRBJ1-1)
CASSIGSEAFF

SEQ ID NO: 555281 - protein, 13 aa, Homo sapiens
  CDR3 for alpha chain variable domain of TCR clone 277641 (TRAV30, TRAJ6)
FGTEAGGSYIPTF

SEQ ID NO: 555282 - protein, 16 aa, Homo sapiens
  CDR3 for beta chain variable domain of TCR clone 277641 (TRBV4-3, TRBJ2-3)
CASSLGLAGEGDTQYF

SEQ ID NO: 555283 - protein, 12 aa, Homo sapiens
  CDR3 for alpha chain variable domain of TCR clone 277642 (TRAV17, TRAJ39)
CATGAAGNMLTF

SEQ ID NO: 555284 - protein, 15 aa, Homo sapiens
  CDR3 for beta chain variable domain of TCR clone 277642 (TRBV29-1, TRBJ2-6)
CSVGDRGSGANVLTF

SEQ ID NO: 555285 - protein, 15 aa, Homo sapiens
  CDR3 for alpha chain variable domain of TCR clone 277643 (TRAV12-3, TRAJ22)
CAMRSSSGYARQLTF

SEQ ID NO: 555286 - protein, 18 aa, Homo sapiens
  CDR3 for beta chain variable domain of TCR clone 277643 (TRBV27, TRBJ2-1)
CASRRSGRGESSGNEQFF

SEQ ID NO: 555287 - protein, 18 aa, Homo sapiens
  CDR3 for alpha chain variable domain of TCR clone 277644 (TRAV21, TRAJ52)
CAVSPSPAGGTSYGKLTF

SEQ ID NO: 555288 - protein, 16 aa, Homo sapiens
  CDR3 for beta chain variable domain of TCR clone 277644 (TRBV13, TRBJ2-3)
CQQPLQGSGGRNTQYF

SEQ ID NO: 555289 - protein, 11 aa, Homo sapiens
  CDR3 for alpha chain variable domain of TCR clone 277645 (TRAV3, TRAJ21)
CAVGNFNTFYF

SEQ ID NO: 555290 - protein, 15 aa, Homo sapiens
  CDR3 for beta chain variable domain of TCR clone 277645 (TRBV20-1, TRBJ2-7)
CSARDRVSGMDEQYF

SEQ ID NO: 555291 - protein, 11 aa, Homo sapiens
  CDR3 for alpha chain variable domain of TCR clone 277646 (TRAV8-6, TRAJ13)
CALGLYQKVTF

SEQ ID NO: 555292 - protein, 14 aa, Homo sapiens
  CDR3 for beta chain variable domain of TCR clone 277646 (TRBV3-1, TRBJ2-7)
CASSQPGLLDEQYF

SEQ ID NO: 555293 - protein, 17 aa, Homo sapiens
  CDR3 for alpha chain variable domain of TCR clone 277647 (TRAV3, TRAJ6)
CAVRDGPRAGGSYIPTF

SEQ ID NO: 555294 - protein, 12 aa, Homo sapiens
  CDR3 for beta chain variable domain of TCR clone 277647 (TRBV7-6, TRBJ2-7)
CASSLADSEQYF

SEQ ID NO: 555295 - protein, 12 aa, Homo sapiens
  CDR3 for alpha chain variable domain of TCR clone 277648 (TRAV12-1, TRAJ40)
CVVYSGTYKYIF

SEQ ID NO: 555296 - protein, 17 aa, Homo sapiens
  CDR3 for beta chain variable domain of TCR clone 277648 (TRBV11-2, TRBJ2-3)
CQRLRGGLAGAPNTQYF

SEQ ID NO: 555297 - protein, 12 aa, Homo sapiens
  CDR3 for alpha chain variable domain of TCR clone 277649 (TRAV1-2, TRAJ33)
CAALDSNYQIIW

SEQ ID NO: 555298 - protein, 14 aa, Homo sapiens
  CDR3 for beta chain variable domain of TCR clone 277649 (TRBV20-1, TRBJ2-1)
CSAQIGGSANEQFF

SEQ ID NO: 555299 - protein, 12 aa, Homo sapiens
  CDR3 for alpha chain variable domain of TCR clone 277650 (TRAV8-3, TRAJ20)
CAVGANDYKLSF

SEQ ID NO: 555300 - protein, 15 aa, Homo sapiens
  CDR3 for beta chain variable domain of TCR clone 277650 (TRBV19, TRBJ2-1)
CASSIQATSYNEQFF

SEQ ID NO: 555301 - protein, 15 aa, Homo sapiens
  CDR3 for alpha chain variable domain of TCR clone 277651 (TRAV12-3, TRAJ6)
CAMSAASGGSYIPTF

SEQ ID NO: 555302 - protein, 13 aa, Homo sapiens
  CDR3 for beta chain variable domain of TCR clone 277651 (TRBV20-1, TRBJ1-2)
SSASPEFNYGYSF

SEQ ID NO: 555303 - protein, 12 aa, Homo sapiens
  CDR3 for alpha chain variable domain of TCR clone 277652 (TRAV12-3, TRAJ4)
CAMTGAGTRLAV

SEQ ID NO: 555304 - protein, 14 aa, Homo sapiens
  CDR3 for beta chain variable domain of TCR clone 277652 (TRBV10-3, TRBJ1-1)
CAISDTDRGVAAFF

SEQ ID NO: 555305 - protein, 16 aa, Homo sapiens
  CDR3 for alpha chain variable domain of TCR clone 277653 (TRAV3, TRAJ37)
CAVRPHGSGNTGNLIF

SEQ ID NO: 555306 - protein, 16 aa, Homo sapiens
  CDR3 for beta chain variable domain of TCR clone 277653 (TRBV9, TRBJ1-2)
CASNVEEKVSPYGYTF

SEQ ID NO: 555307 - protein, 12 aa, Homo sapiens
  CDR3 for alpha chain variable domain of TCR clone 277654 (TRAV13-2, TRAJ20)
CAENENDYKLSF

SEQ ID NO: 555308 - protein, 15 aa, Homo sapiens
  CDR3 for beta chain variable domain of TCR clone 277654 (TRBV19, TRBJ1-1)
CASSLPRSANTEAFF

SEQ ID NO: 555309 - protein, 15 aa, Homo sapiens
  CDR3 for alpha chain variable domain of TCR clone 277655 (TRAV21, TRAJ53)
CATLNSGGSNYKLTF

SEQ ID NO: 555310 - protein, 14 aa, Homo sapiens
  CDR3 for beta chain variable domain of TCR clone 277655 (TRBV15, TRBJ2-5)
CATSIRGLGETQYF

SEQ ID NO: 555311 - protein, 11 aa, Homo sapiens
  CDR3 for alpha chain variable domain of TCR clone 277656 (TRAV2, TRAJ13)
CASGGYQKVTF

SEQ ID NO: 555312 - protein, 13 aa, Homo sapiens
  CDR3 for beta chain variable domain of TCR clone 277656 (TRBV10-3, TRBJ1-2)
CAISERDSYGYTS

SEQ ID NO: 555313 - protein, 13 aa, Homo sapiens
  CDR3 for alpha chain variable domain of TCR clone 277657 (TRAV36/DV7, TRAJ54)
CAVAIQGAQKLVF

SEQ ID NO: 555314 - protein, 15 aa, Homo sapiens
  CDR3 for beta chain variable domain of TCR clone 277657 (TRBV7-9, TRBJ1-4)
CASSATGGNNEKLFF

SEQ ID NO: 555315 - protein, 14 aa, Homo sapiens
  CDR3 for alpha chain variable domain of TCR clone 277658 (TRAV9-2, TRAJ40)
CALIGASGTYKYIF

SEQ ID NO: 555316 - protein, 15 aa, Homo sapiens
  CDR3 for beta chain variable domain of TCR clone 277658 (TRBV20-1, TRBJ2-7)
CSARDRVSGMDEQYF

SEQ ID NO: 555317 - protein, 14 aa, Homo sapiens
  CDR3 for alpha chain variable domain of TCR clone 277659 (TRAV2, TRAJ29)
CAVTPPSGNTPLVF

SEQ ID NO: 555318 - protein, 13 aa, Homo sapiens
  CDR3 for beta chain variable domain of TCR clone 277659 (TRBV7-3, TRBJ2-5)
CASSSDREETQYF

SEQ ID NO: 555319 - protein, 14 aa, Homo sapiens
  CDR3 for alpha chain variable domain of TCR clone 277660 (TRAV1-1, TRAJ35)
CAVRSIGFGNVLHC

SEQ ID NO: 555320 - protein, 16 aa, Homo sapiens
  CDR3 for beta chain variable domain of TCR clone 277660 (TRBV5-1, TRBJ2-2)
CASSLWDTTNTGELFF

SEQ ID NO: 555321 - protein, 16 aa, Homo sapiens
  CDR3 for alpha chain variable domain of TCR clone 277661 (TRAV12-2, TRAJ18)
CAVTTDRGSTLGRLYF

SEQ ID NO: 555322 - protein, 16 aa, Homo sapiens
  CDR3 for beta chain variable domain of TCR clone 277661 (TRBV28, TRBJ2-1)
CASSSPEYPRDNEQFF

SEQ ID NO: 555323 - protein, 10 aa, Homo sapiens
  CDR3 for alpha chain variable domain of TCR clone 277662 (TRAV36/DV7, TRAJ49)
CALTGNPFYF

SEQ ID NO: 555324 - protein, 14 aa, Homo sapiens
  CDR3 for beta chain variable domain of TCR clone 277662 (TRBV4-2, TRBJ2-5)
CASSQDRGRETQYF

SEQ ID NO: 555325 - protein, 15 aa, Homo sapiens
  CDR3 for alpha chain variable domain of TCR clone 277663 (TRAV4, TRAJ10)
CLVGDEEGGGNKLTF

SEQ ID NO: 555326 - protein, 15 aa, Homo sapiens
  CDR3 for beta chain variable domain of TCR clone 277663 (TRBV7-2, TRBJ2-5)
CASSLTGQGTYEQYF

SEQ ID NO: 555327 - protein, 18 aa, Homo sapiens
  CDR3 for alpha chain variable domain of TCR clone 277664 (TRAV9-2, TRAJ52)
CALSRHNAGGTSYGKLTF

SEQ ID NO: 555328 - protein, 15 aa, Homo sapiens
  CDR3 for beta chain variable domain of TCR clone 277664 (TRBV7-3, TRBJ2-2)
CASSETGQGTGELFF

SEQ ID NO: 555329 - protein, 14 aa, Homo sapiens
  CDR3 for alpha chain variable domain of TCR clone 277665 (TRAV8-4, TRAJ9)
CAVSDRTGGFKTIF

SEQ ID NO: 555330 - protein, 13 aa, Homo sapiens
  CDR3 for beta chain variable domain of TCR clone 277665 (TRBV11-2, TRBJ2-7)
CASSLGESYEQYF

SEQ ID NO: 555331 - protein, 14 aa, Homo sapiens
  CDR3 for alpha chain variable domain of TCR clone 277666 (TRAV12-2, TRAJ44)
CAVNPAGTASKLTF

SEQ ID NO: 555332 - protein, 18 aa, Homo sapiens
  CDR3 for beta chain variable domain of TCR clone 277666 (TRBV4-1, TRBJ2-3)
CASSQLTSGGGIRSILAQ

SEQ ID NO: 555333 - protein, 14 aa, Homo sapiens
  CDR3 for alpha chain variable domain of TCR clone 277667 (TRAV8-1, TRAJ15)
CAVNGQQAGTALIF

SEQ ID NO: 555334 - protein, 16 aa, Homo sapiens
  CDR3 for beta chain variable domain of TCR clone 277667 (TRBV19, TRBJ1-5)
CASSIDRGGPRQPQHF

SEQ ID NO: 555335 - protein, 12 aa, Homo sapiens
  CDR3 for alpha chain variable domain of TCR clone 277668 (TRAV12-3, TRAJ17)
CAVTLTGNKLTF

SEQ ID NO: 555336 - protein, 11 aa, Homo sapiens
  CDR3 for beta chain variable domain of TCR clone 277668 (TRBV11-2, TRBJ1-1)
CASSINTEAFF

SEQ ID NO: 555337 - protein, 15 aa, Homo sapiens
  CDR3 for alpha chain variable domain of TCR clone 277669 (TRAV12-1, TRAJ44)
CVVFVNTGTASKLTF

SEQ ID NO: 555338 - protein, 13 aa, Homo sapiens
  CDR3 for beta chain variable domain of TCR clone 277669 (TRBV27, TRBJ1-6)
CASSGTGDSPLHF

SEQ ID NO: 555339 - protein, 13 aa, Homo sapiens
  CDR3 for alpha chain variable domain of TCR clone 277670 (TRAV20, TRAJ42)
CAVQGGSQGNLIF

SEQ ID NO: 555340 - protein, 17 aa, Homo sapiens
  CDR3 for beta chain variable domain of TCR clone 277670 (TRBV7-2, TRBJ1-4)
CASSFKAGPTTNEKLFF

SEQ ID NO: 555341 - protein, 14 aa, Homo sapiens
  CDR3 for alpha chain variable domain of TCR clone 277671 (TRAV35, TRAJ41)
CAGQASVRRNALNF

SEQ ID NO: 555342 - protein, 14 aa, Homo sapiens
  CDR3 for beta chain variable domain of TCR clone 277671 (TRBV20-1, TRBJ1-2)
CSASEQVAVYGYTF

SEQ ID NO: 555343 - protein, 16 aa, Homo sapiens
  CDR3 for alpha chain variable domain of TCR clone 277672 (TRAV20, TRAJ38)
CAVQASNAGNNRKPIW

SEQ ID NO: 555344 - protein, 16 aa, Homo sapiens
  CDR3 for beta chain variable domain of TCR clone 277672 (TRBV7-8, TRBJ2-6)
CAPRGGDSSGANDLTF

SEQ ID NO: 555345 - protein, 13 aa, Homo sapiens
  CDR3 for alpha chain variable domain of TCR clone 277673 (TRAV12-1, TRAJ39)
CVARSGAGNMLTF

SEQ ID NO: 555346 - protein, 14 aa, Homo sapiens
  CDR3 for beta chain variable domain of TCR clone 277673 (TRBV7-2, TRBJ2-7)
CASRSQGAAYEQYF

SEQ ID NO: 555347 - protein, 14 aa, Homo sapiens
  CDR3 for alpha chain variable domain of TCR clone 277674 (TRAV13-1, TRAJ35)
CAASKGGFGNVLHC

SEQ ID NO: 555348 - protein, 14 aa, Homo sapiens
  CDR3 for beta chain variable domain of TCR clone 277674 (TRBV6-1, TRBJ1-3)
CASSEDRGIDTIYF

SEQ ID NO: 555349 - protein, 12 aa, Homo sapiens
  CDR3 for alpha chain variable domain of TCR clone 277675 (TRAV1-1, TRAJ9)
CAVDTGGFKTIF

SEQ ID NO: 555350 - protein, 15 aa, Homo sapiens
  CDR3 for beta chain variable domain of TCR clone 277675 (TRBV20-1, TRBJ2-7)
CSARDRVSGMDEQYF

SEQ ID NO: 555351 - protein, 13 aa, Homo sapiens
  CDR3 for alpha chain variable domain of TCR clone 277676 (TRAV27, TRAJ6)
CAGGTRGSYIPTF

SEQ ID NO: 555352 - protein, 14 aa, Homo sapiens
  CDR3 for beta chain variable domain of TCR clone 277676 (TRBV20-1, TRBJ2-4)
YSASGRVGENIQYF

SEQ ID NO: 555353 - protein, 12 aa, Homo sapiens
  CDR3 for alpha chain variable domain of TCR clone 277677 (TRAV16, TRAJ28)
CSNRAGGYQLTF

SEQ ID NO: 555354 - protein, 16 aa, Homo sapiens
  CDR3 for beta chain variable domain of TCR clone 277677 (TRBV28, TRBJ1-5)
CASSLTGQGWNQPQHF

SEQ ID NO: 555355 - protein, 12 aa, Homo sapiens
  CDR3 for alpha chain variable domain of TCR clone 277678 (TRAV20, TRAJ39)
CAAGNAGNMLTF

SEQ ID NO: 555356 - protein, 17 aa, Homo sapiens
  CDR3 for beta chain variable domain of TCR clone 277678 (TRBV4-1, TRBJ2-3)
CASSQGYVSGGTDTQYF

SEQ ID NO: 555357 - protein, 14 aa, Homo sapiens
  CDR3 for alpha chain variable domain of TCR clone 277679 (TRAV1-2, TRAJ29)
CAVRELTSATPLVF

SEQ ID NO: 555358 - protein, 14 aa, Homo sapiens
  CDR3 for beta chain variable domain of TCR clone 277679 (TRBV3-1, TRBJ2-5)
CASSQGPVQETQYF

SEQ ID NO: 555359 - protein, 10 aa, Homo sapiens
  CDR3 for alpha chain variable domain of TCR clone 277680 (TRAV8-4, TRAJ43)
CAVSADDMRF

SEQ ID NO: 555360 - protein, 15 aa, Homo sapiens
  CDR3 for beta chain variable domain of TCR clone 277680 (TRBV5-1, TRBJ1-1)
CASSLNDFKNTEAFF

SEQ ID NO: 555361 - protein, 14 aa, Homo sapiens
  CDR3 for alpha chain variable domain of TCR clone 277681 (TRAV20, TRAJ4)
CAVQASGGYNKLIF

SEQ ID NO: 555362 - protein, 19 aa, Homo sapiens
  CDR3 for beta chain variable domain of TCR clone 277681 (TRBV25-1, TRBJ2-2)
CAILVYRVDRGRKTGELFF

SEQ ID NO: 555363 - protein, 16 aa, Homo sapiens
  CDR3 for alpha chain variable domain of TCR clone 277682 (TRAV12-3, TRAJ53)
CAMSPGSGGSNYKLPF

SEQ ID NO: 555364 - protein, 15 aa, Homo sapiens
  CDR3 for beta chain variable domain of TCR clone 277682 (TRBV4-1, TRBJ2-2)
CASSEGQGITGELFF

SEQ ID NO: 555365 - protein, 14 aa, Homo sapiens
  CDR3 for alpha chain variable domain of TCR clone 277683 (TRAV12-3, TRAJ10)
SHLPLTGGGNKLTF

SEQ ID NO: 555366 - protein, 15 aa, Homo sapiens
  CDR3 for beta chain variable domain of TCR clone 277683 (TRBV6-1, TRBJ2-3)
CASSERGGITDSQYF

SEQ ID NO: 555367 - protein, 13 aa, Homo sapiens
  CDR3 for alpha chain variable domain of TCR clone 277684 (TRAV35, TRAJ48)
CAGHEFGNEKLTF

SEQ ID NO: 555368 - protein, 22 aa, Homo sapiens
  CDR3 for beta chain variable domain of TCR clone 277684 (TRBV19, TRBJ2-1)
CASPTFVLSGEPCPWPEELLTV

SEQ ID NO: 555369 - protein, 10 aa, Homo sapiens
  CDR3 for alpha chain variable domain of TCR clone 277685 (TRAV1-2, TRAJ31)
CAFFDARLMF

SEQ ID NO: 555370 - protein, 14 aa, Homo sapiens
  CDR3 for beta chain variable domain of TCR clone 277685 (TRBV12-4, TRBJ1-3)
CASTLTGAGNTIYV

SEQ ID NO: 555371 - protein, 10 aa, Homo sapiens
  CDR3 for alpha chain variable domain of TCR clone 277686 (TRAV12-3, TRAJ49)
CAMNDDQFYF

SEQ ID NO: 555372 - protein, 15 aa, Homo sapiens
  CDR3 for beta chain variable domain of TCR clone 277686 (TRBV6-5, TRBJ2-3)
CASSRSGGARDTQHF

SEQ ID NO: 555373 - protein, 14 aa, Homo sapiens
  CDR3 for alpha chain variable domain of TCR clone 277687 (TRAV29/DV5, TRAJ48)
CAAMALFGNEKLTF

SEQ ID NO: 555374 - protein, 15 aa, Homo sapiens
  CDR3 for beta chain variable domain of TCR clone 277687 (TRBV7-2, TRBJ2-1)
CASTHVTGIYNEQFF

SEQ ID NO: 555375 - protein, 12 aa, Homo sapiens
  CDR3 for alpha chain variable domain of TCR clone 277688 (TRAV12-3, TRAJ17)
CAMTLTGNKLTF

SEQ ID NO: 555376 - protein, 14 aa, Homo sapiens
  CDR3 for beta chain variable domain of TCR clone 277688 (TRBV20-1, TRBJ2-1)
CSAQIGGSVNEQFF

SEQ ID NO: 555377 - protein, 14 aa, Homo sapiens
  CDR3 for alpha chain variable domain of TCR clone 277689 (TRAV23/DV6, TRAJ26)
CAVRGNNYGQNFVF

SEQ ID NO: 555378 - protein, 15 aa, Homo sapiens
  CDR3 for beta chain variable domain of TCR clone 277689 (TRBV11-2, TRBJ1-1)
CASSPSRRLNTEAFF

SEQ ID NO: 555379 - protein, 16 aa, Homo sapiens
  CDR3 for alpha chain variable domain of TCR clone 277690 (TRAV3, TRAJ10)
CAARDMRAGGGNKLTF

SEQ ID NO: 555380 - protein, 14 aa, Homo sapiens
  CDR3 for beta chain variable domain of TCR clone 277690 (TRBV19, TRBJ2-2)
CASSGQGIAGELFF

SEQ ID NO: 555381 - protein, 16 aa, Homo sapiens
  CDR3 for alpha chain variable domain of TCR clone 277691 (TRAV3, TRAJ37)
CAVRPHGSGNTGKLIF

SEQ ID NO: 555382 - protein, 16 aa, Homo sapiens
  CDR3 for beta chain variable domain of TCR clone 277691 (TRBV9, TRBJ1-2)
CASCVEEKVSPYGYTF

SEQ ID NO: 555383 - protein, 14 aa, Homo sapiens
  CDR3 for alpha chain variable domain of TCR clone 277692 (TRAV1-2, TRAJ10)
CAVGVTGGGNKLTF

SEQ ID NO: 555384 - protein, 12 aa, Homo sapiens
  CDR3 for beta chain variable domain of TCR clone 277692 (TRBV5-4, TRBJ1-1)
CASSFGQTEAFF

SEQ ID NO: 555385 - protein, 11 aa, Homo sapiens
  CDR3 for alpha chain variable domain of TCR clone 277693 (TRAV13-2, TRAJ23)
CRASQGGKLIF

SEQ ID NO: 555386 - protein, 12 aa, Homo sapiens
  CDR3 for beta chain variable domain of TCR clone 277693 (TRBV29-1, TRBJ2-3)
CSVTGGADTQYF

SEQ ID NO: 555387 - protein, 13 aa, Homo sapiens
  CDR3 for alpha chain variable domain of TCR clone 277694 (TRAV12-2, TRAJ7)
CAVSLYGNKRLAV

SEQ ID NO: 555388 - protein, 18 aa, Homo sapiens
  CDR3 for beta chain variable domain of TCR clone 277694 (TRBV4-2, TRBJ2-1)
CASSQQGLAASSYNEQFF

SEQ ID NO: 555389 - protein, 15 aa, Homo sapiens
  CDR3 for alpha chain variable domain of TCR clone 277695 (TRAV12-1, TRAJ45)
CVVIRRGGGADGLTF

SEQ ID NO: 555390 - protein, 18 aa, Homo sapiens
  CDR3 for beta chain variable domain of TCR clone 277695 (TRBV23-1, TRBJ1-1)
CASEKQGAEAILKLSLDK

SEQ ID NO: 555391 - protein, 13 aa, Homo sapiens
  CDR3 for alpha chain variable domain of TCR clone 277696 (TRAV3, TRAJ20)
CCEAFCNDYKLSF

SEQ ID NO: 555392 - protein, 15 aa, Homo sapiens
  CDR3 for beta chain variable domain of TCR clone 277696 (TRBV19, TRBJ2-6)
CASVRRHSGANVLTF

SEQ ID NO: 555393 - protein, 14 aa, Homo sapiens
  CDR3 for alpha chain variable domain of TCR clone 277697 (TRAV1-2, TRAJ8)
CAAREDTGFQKLVF

SEQ ID NO: 555394 - protein, 13 aa, Homo sapiens
  CDR3 for beta chain variable domain of TCR clone 277697 (TRBV19, TRBJ1-2)
CASSVPGQDGHTF

SEQ ID NO: 555395 - protein, 14 aa, Homo sapiens
  CDR3 for alpha chain variable domain of TCR clone 277698 (TRAV1-2, TRAJ16)
CAVNRFSDGQKLLF

SEQ ID NO: 555396 - protein, 12 aa, Homo sapiens
  CDR3 for beta chain variable domain of TCR clone 277698 (TRBV11-3, TRBJ2-3)
CASAFGGRSQYF

SEQ ID NO: 555397 - protein, 13 aa, Homo sapiens
  CDR3 for alpha chain variable domain of TCR clone 277699 (TRAV8-3, TRAJ43)
CAVVPYNNNDMRF

SEQ ID NO: 555398 - protein, 14 aa, Homo sapiens
  CDR3 for beta chain variable domain of TCR clone 277699 (TRBV7-2, TRBJ2-7)
CASSLYPGRYEQYF

SEQ ID NO: 555399 - protein, 14 aa, Homo sapiens
  CDR3 for alpha chain variable domain of TCR clone 277700 (TRAV29/DV5, TRAJ36)
CAARRKTGANNIFF

SEQ ID NO: 555400 - protein, 13 aa, Homo sapiens
  CDR3 for beta chain variable domain of TCR clone 277700 (TRBV19, TRBJ1-2)
CASSRGQVYGYTF

SEQ ID NO: 555401 - protein, 12 aa, Homo sapiens
  CDR3 for alpha chain variable domain of TCR clone 277701 (TRAV35, TRAJ39)
LAPNDAGNMLTF

SEQ ID NO: 555402 - protein, 16 aa, Homo sapiens
  CDR3 for beta chain variable domain of TCR clone 277701 (TRBV2, TRBJ2-3)
CASSTSVEGVTDKQYF

SEQ ID NO: 555403 - protein, 13 aa, Homo sapiens
  CDR3 for alpha chain variable domain of TCR clone 277702 (TRAV29/DV5, TRAJ31)
CAASRNNNARLTF

SEQ ID NO: 555404 - protein, 16 aa, Homo sapiens
  CDR3 for beta chain variable domain of TCR clone 277702 (TRBV20-1, TRBJ1-4)
CSAPGQGLLTNEKLFF

SEQ ID NO: 555405 - protein, 15 aa, Homo sapiens
  CDR3 for alpha chain variable domain of TCR clone 277703 (TRAV12-2, TRAJ57)
CAVSRGQGGSAKLVF

SEQ ID NO: 555406 - protein, 14 aa, Homo sapiens
  CDR3 for beta chain variable domain of TCR clone 277703 (TRBV20-1, TRBJ2-1)
CSAHPGLPYNEQFF

SEQ ID NO: 555407 - protein, 14 aa, Homo sapiens
  CDR3 for alpha chain variable domain of TCR clone 277704 (TRAV26-1, TRAJ38)
CIADNAGNNRKLMW

SEQ ID NO: 555408 - protein, 13 aa, Homo sapiens
  CDR3 for beta chain variable domain of TCR clone 277704 (TRBV7-9, TRBJ1-2)
CASSLKQNYGYTF

SEQ ID NO: 555409 - protein, 11 aa, Homo sapiens
  CDR3 for alpha chain variable domain of TCR clone 277705 (TRAV1-1, TRAJ31)
CAVPKQCQTHV

SEQ ID NO: 555410 - protein, 17 aa, Homo sapiens
  CDR3 for beta chain variable domain of TCR clone 277705 (TRBV27, TRBJ2-6)
CASSSGTGFSGANVLTF

SEQ ID NO: 555411 - protein, 13 aa, Homo sapiens
  CDR3 for alpha chain variable domain of TCR clone 277706 (TRAV27, TRAJ11)
CAGARSGYSTLTF

SEQ ID NO: 555412 - protein, 14 aa, Homo sapiens
  CDR3 for beta chain variable domain of TCR clone 277706 (TRBV12-5, TRBJ2-5)
CASGSRTHQETQYF

SEQ ID NO: 555413 - protein, 14 aa, Homo sapiens
  CDR3 for alpha chain variable domain of TCR clone 277707 (TRAV8-6, TRAJ52)
CAVIGGTSYGKLTF

SEQ ID NO: 555414 - protein, 15 aa, Homo sapiens
  CDR3 for beta chain variable domain of TCR clone 277707 (TRBV15, TRBJ1-3)
CATSRDRGPGNTIYF

SEQ ID NO: 555415 - protein, 13 aa, Homo sapiens
  CDR3 for alpha chain variable domain of TCR clone 277708 (TRAV12-1, TRAJ7)
CVVNMRGNNRLAF

SEQ ID NO: 555416 - protein, 17 aa, Homo sapiens
  CDR3 for beta chain variable domain of TCR clone 277708 (TRBV24-1, TRBJ2-1)
CATSDVSTSGTYNEQFF

SEQ ID NO: 555417 - protein, 14 aa, Homo sapiens
  CDR3 for alpha chain variable domain of TCR clone 277709 (TRAV26-1, TRAJ45)
CIKVTGGGADGLTF

SEQ ID NO: 555418 - protein, 13 aa, Homo sapiens
  CDR3 for beta chain variable domain of TCR clone 277709 (TRBV7-6, TRBJ1-2)
CASSLVADYGYTF

SEQ ID NO: 555419 - protein, 10 aa, Homo sapiens
  CDR3 for alpha chain variable domain of TCR clone 277710 (TRAV23/DV6, TRAJ4)
CAARDFWSRD

SEQ ID NO: 555420 - protein, 14 aa, Homo sapiens
  CDR3 for beta chain variable domain of TCR clone 277710 (TRBV27, TRBJ2-5)
CASSSLKGWETQYF

SEQ ID NO: 555421 - protein, 14 aa, Homo sapiens
  CDR3 for alpha chain variable domain of TCR clone 277711 (TRAV1-2, TRAJ16)
CAVNRFSDGQKLLF

SEQ ID NO: 555422 - protein, 14 aa, Homo sapiens
  CDR3 for beta chain variable domain of TCR clone 277711 (TRBV20-1, TRBJ1-5)
RSAPGTGVGQPQHF

SEQ ID NO: 555423 - protein, 10 aa, Homo sapiens
  CDR3 for alpha chain variable domain of TCR clone 277712 (TRAV8-3, TRAJ43)
CAVALADMRF

SEQ ID NO: 555424 - protein, 14 aa, Homo sapiens
  CDR3 for beta chain variable domain of TCR clone 277712 (TRBV4-2, TRBJ2-1)
CASGLDRAYNEQFC

SEQ ID NO: 555425 - protein, 15 aa, Homo sapiens
  CDR3 for alpha chain variable domain of TCR clone 277713 (TRAV35, TRAJ23)
CAGPLGNNQGGKLIF

SEQ ID NO: 555426 - protein, 15 aa, Homo sapiens
  CDR3 for beta chain variable domain of TCR clone 277713 (TRBV11-3, TRBJ2-3)
CASNGGLDSTDTQYF

SEQ ID NO: 555427 - protein, 16 aa, Homo sapiens
  CDR3 for alpha chain variable domain of TCR clone 277714 (TRAV12-3, TRAJ58)
CAMTDTEENSGSRLTF

SEQ ID NO: 555428 - protein, 22 aa, Homo sapiens
  CDR3 for beta chain variable domain of TCR clone 277714 (TRBV23-1, TRBJ2-7)
CASSRRLDSGQGYVGGGYEQYF

SEQ ID NO: 555429 - protein, 16 aa, Homo sapiens
  CDR3 for alpha chain variable domain of TCR clone 277715 (TRAV3, TRAJ37)
CAVRGKGSGTTGKLIF

SEQ ID NO: 555430 - protein, 14 aa, Homo sapiens
  CDR3 for beta chain variable domain of TCR clone 277715 (TRBV7-2, TRBJ2-7)
CASSPKTSFYEQYF

SEQ ID NO: 555431 - protein, 14 aa, Homo sapiens
  CDR3 for alpha chain variable domain of TCR clone 277716 (TRAV12-2, TRAJ53)
CAVKGGGSNYKLTF

SEQ ID NO: 555432 - protein, 13 aa, Homo sapiens
  CDR3 for beta chain variable domain of TCR clone 277716 (TRBV7-2, TRBJ2-2)
CASSSVRAGELFF

SEQ ID NO: 555433 - protein, 17 aa, Homo sapiens
  CDR3 for alpha chain variable domain of TCR clone 277717 (TRAV13-1, TRAJ52)
CAAGRNAGGTSYGKLTF

SEQ ID NO: 555434 - protein, 13 aa, Homo sapiens
  CDR3 for beta chain variable domain of TCR clone 277717 (TRBV7-2, TRBJ1-1)
CASNLKGAKVAFS

SEQ ID NO: 555435 - protein, 15 aa, Homo sapiens
  CDR3 for alpha chain variable domain of TCR clone 277718 (TRAV8-3, TRAJ41)
CAVGSNSNSGYALNF

SEQ ID NO: 555436 - protein, 15 aa, Homo sapiens
  CDR3 for beta chain variable domain of TCR clone 277718 (TRBV11-1, TRBJ2-1)
CASSLFRDTYNEQFF

SEQ ID NO: 555437 - protein, 14 aa, Homo sapiens
  CDR3 for alpha chain variable domain of TCR clone 277719 (TRAV12-3, TRAJ42)
CALNYGGSQGNLIF

SEQ ID NO: 555438 - protein, 15 aa, Homo sapiens
  CDR3 for beta chain variable domain of TCR clone 277719 (TRBV11-3, TRBJ2-7)
CASSPGPASSYEQYF

SEQ ID NO: 555439 - protein, 12 aa, Homo sapiens
  CDR3 for alpha chain variable domain of TCR clone 277720 (TRAV3, TRAJ31)
CSVRYGNARLMF

SEQ ID NO: 555440 - protein, 18 aa, Homo sapiens
  CDR3 for beta chain variable domain of TCR clone 277720 (TRBV7-2, TRBJ2-3)
CASSLKREGSGITDTQYF

SEQ ID NO: 555441 - protein, 16 aa, Homo sapiens
  CDR3 for alpha chain variable domain of TCR clone 277721 (TRAV38-2/DV8, TRAJ29)
CAYRSPLNSGNTPLVF

SEQ ID NO: 555442 - protein, 15 aa, Homo sapiens
  CDR3 for beta chain variable domain of TCR clone 277721 (TRBV29-1, TRBJ2-1)
CSGRDRKSSYNEQFF

SEQ ID NO: 555443 - protein, 11 aa, Homo sapiens
  CDR3 for alpha chain variable domain of TCR clone 277722 (TRAV4, TRAJ23)
CLVAPGGKLIF

SEQ ID NO: 555444 - protein, 15 aa, Homo sapiens
  CDR3 for beta chain variable domain of TCR clone 277722 (TRBV19, TRBJ1-2)
CASSVGQVLNYGYTF

SEQ ID NO: 555445 - protein, 16 aa, Homo sapiens
  CDR3 for alpha chain variable domain of TCR clone 277723 (TRAV26-1, TRAJ36)
CIVRVPDQTGANNLFF

SEQ ID NO: 555446 - protein, 15 aa, Homo sapiens
  CDR3 for beta chain variable domain of TCR clone 277723 (TRBV19, TRBJ2-4)
CASRGPRRVENIQYF

SEQ ID NO: 555447 - protein, 15 aa, Homo sapiens
  CDR3 for alpha chain variable domain of TCR clone 277724 (TRAV13-2, TRAJ45)
CAENNSGGGADGLTF

SEQ ID NO: 555448 - protein, 13 aa, Homo sapiens
  CDR3 for beta chain variable domain of TCR clone 277724 (TRBV25-1, TRBJ2-6)
CASRGPGANALTF

SEQ ID NO: 555449 - protein, 12 aa, Homo sapiens
  CDR3 for alpha chain variable domain of TCR clone 277725 (TRAV13-1, TRAJ52)
SAGGTSYGKLTF

SEQ ID NO: 555450 - protein, 13 aa, Homo sapiens
  CDR3 for beta chain variable domain of TCR clone 277725 (TRBV12-4, TRBJ1-2)
CASSLRQGKGYTF

SEQ ID NO: 555451 - protein, 14 aa, Homo sapiens
  CDR3 for alpha chain variable domain of TCR clone 277726 (TRAV26-1, TRAJ38)
CIADDAGNNRKLIW

SEQ ID NO: 555452 - protein, 15 aa, Homo sapiens
  CDR3 for beta chain variable domain of TCR clone 277726 (TRBV7-6, TRBJ1-4)
CASSLGAGAGEKLFF

SEQ ID NO: 555453 - protein, 12 aa, Homo sapiens
  CDR3 for alpha chain variable domain of TCR clone 277727 (TRAV25, TRAJ35)
CAGIGFGNVLHC

SEQ ID NO: 555454 - protein, 13 aa, Homo sapiens
  CDR3 for beta chain variable domain of TCR clone 277727 (TRBV12-4, TRBJ1-2)
CASSLDSNYGYTF

SEQ ID NO: 555455 - protein, 11 aa, Homo sapiens
  CDR3 for alpha chain variable domain of TCR clone 277728 (TRAV27, TRAJ30)
CRRGRDDKIIF

SEQ ID NO: 555456 - protein, 15 aa, Homo sapiens
  CDR3 for beta chain variable domain of TCR clone 277728 (TRBV15, TRBJ2-3)
CATSGAGFGTDTQYF

SEQ ID NO: 555457 - protein, 13 aa, Homo sapiens
  CDR3 for alpha chain variable domain of TCR clone 277729 (TRAV39, TRAJ58)
CAGEETSGSRLTF

SEQ ID NO: 555458 - protein, 14 aa, Homo sapiens
  CDR3 for beta chain variable domain of TCR clone 277729 (TRBV6-1, TRBJ1-3)
CASVQGGGGNTIYF

SEQ ID NO: 555459 - protein, 13 aa, Homo sapiens
  CDR3 for alpha chain variable domain of TCR clone 277730 (TRAV17, TRAJ15)
CATDTRAGTALIF

SEQ ID NO: 555460 - protein, 15 aa, Homo sapiens
  CDR3 for beta chain variable domain of TCR clone 277730 (TRBV20-1, TRBJ2-7)
CSARDRVSGMDEQYF

SEQ ID NO: 555461 - protein, 11 aa, Homo sapiens
  CDR3 for alpha chain variable domain of TCR clone 277731 (TRAV16, TRAJ26)
CALTRWSEFCL

SEQ ID NO: 555462 - protein, 14 aa, Homo sapiens
  CDR3 for beta chain variable domain of TCR clone 277731 (TRBV7-9, TRBJ2-1)
CASSPRDSLYEQFF

SEQ ID NO: 555463 - protein, 13 aa, Homo sapiens
  CDR3 for alpha chain variable domain of TCR clone 277732 (TRAV29/DV5, TRAJ31)
CAASRNNNARLMF

SEQ ID NO: 555464 - protein, 13 aa, Homo sapiens
  CDR3 for beta chain variable domain of TCR clone 277732 (TRBV7-2, TRBJ2-7)
CASSSPSGSEQYF

SEQ ID NO: 555465 - protein, 18 aa, Homo sapiens
  CDR3 for alpha chain variable domain of TCR clone 277733 (TRAV21, TRAJ52)
CAVRPSPAGGTSYGKLTF

SEQ ID NO: 555466 - protein, 18 aa, Homo sapiens
  CDR3 for beta chain variable domain of TCR clone 277733 (TRBV7-6, TRBJ2-1)
CASSPRTSGMSSYNEQFF

SEQ ID NO: 555467 - protein, 13 aa, Homo sapiens
  CDR3 for alpha chain variable domain of TCR clone 277734 (TRAV25, TRAJ54)
CAGTIQGAQKLVF

SEQ ID NO: 555468 - protein, 13 aa, Homo sapiens
  CDR3 for beta chain variable domain of TCR clone 277734 (TRBV20-1, TRBJ1-1)
CSARGGGNTEAFF

SEQ ID NO: 555469 - protein, 14 aa, Homo sapiens
  CDR3 for alpha chain variable domain of TCR clone 277735 (TRAV1-2, TRAJ8)
CAVREDTGFQKLVF

SEQ ID NO: 555470 - protein, 14 aa, Homo sapiens
  CDR3 for beta chain variable domain of TCR clone 277735 (TRBV20-1, TRBJ1-4)
CSASPGATNEKLFF

SEQ ID NO: 555471 - protein, 17 aa, Homo sapiens
  CDR3 for alpha chain variable domain of TCR clone 277736 (TRAV3, TRAJ12)
CAVRDGGRMDSSYKLIF

SEQ ID NO: 555472 - protein, 16 aa, Homo sapiens
  CDR3 for beta chain variable domain of TCR clone 277736 (TRBV20-1, TRBJ1-4)
CSAPGQGLLTNEKLFF

SEQ ID NO: 555473 - protein, 14 aa, Homo sapiens
  CDR3 for alpha chain variable domain of TCR clone 277737 (TRAV8-4, TRAJ8)
CAVSVGAGFQKLVF

SEQ ID NO: 555474 - protein, 15 aa, Homo sapiens
  CDR3 for beta chain variable domain of TCR clone 277737 (TRBV2, TRBJ2-3)
CASSGEGTGTDTQYF

SEQ ID NO: 555475 - protein, 15 aa, Homo sapiens
  CDR3 for alpha chain variable domain of TCR clone 277738 (TRAV12-3, TRAJ47)
CAMSALVEYGNKLVF

SEQ ID NO: 555476 - protein, 16 aa, Homo sapiens
  CDR3 for beta chain variable domain of TCR clone 277738 (TRBV7-8, TRBJ2-6)
CASRVGDSSGANVLTF

SEQ ID NO: 555477 - protein, 14 aa, Homo sapiens
  CDR3 for alpha chain variable domain of TCR clone 277739 (TRAV12-2, TRAJ13)
CAVKKTGGYQKVTF

SEQ ID NO: 555478 - protein, 13 aa, Homo sapiens
  CDR3 for beta chain variable domain of TCR clone 277739 (TRBV28, TRBJ2-7)
CASKAGRVYEQYF

SEQ ID NO: 555479 - protein, 14 aa, Homo sapiens
  CDR3 for alpha chain variable domain of TCR clone 277740 (TRAV12-2, TRAJ13)
CAVKKTGVYQKVTF

SEQ ID NO: 555480 - protein, 14 aa, Homo sapiens
  CDR3 for beta chain variable domain of TCR clone 277740 (TRBV7-2, TRBJ2-7)
CASSPKTSFYEQYF

SEQ ID NO: 555481 - protein, 15 aa, Homo sapiens
  CDR3 for alpha chain variable domain of TCR clone 277741 (TRAV36/DV7, TRAJ53)
WEGENSGGSNYKLTF

SEQ ID NO: 555482 - protein, 20 aa, Homo sapiens
  CDR3 for beta chain variable domain of TCR clone 277741 (TRBV11-2, TRBJ2-2)
LRTRPCISVPAALEAGSCFF

SEQ ID NO: 555483 - protein, 15 aa, Homo sapiens
  CDR3 for alpha chain variable domain of TCR clone 277742 (TRAV8-6, TRAJ6)
CAVSFTSGGSYIPTF

SEQ ID NO: 555484 - protein, 15 aa, Homo sapiens
  CDR3 for beta chain variable domain of TCR clone 277742 (TRBV7-3, TRBJ2-2)
CASSETGQGTGELFF

SEQ ID NO: 555485 - protein, 12 aa, Homo sapiens
  CDR3 for alpha chain variable domain of TCR clone 277743 (TRAV30, TRAJ43)
CGTEERGNDMRF

SEQ ID NO: 555486 - protein, 15 aa, Homo sapiens
  CDR3 for beta chain variable domain of TCR clone 277743 (TRBV7-2, TRBJ2-1)
CASSSGLAGGNEQFF

SEQ ID NO: 555487 - protein, 14 aa, Homo sapiens
  CDR3 for alpha chain variable domain of TCR clone 277744 (TRAV29/DV5, TRAJ22)
CAAKTSGSARQLTF

SEQ ID NO: 555488 - protein, 13 aa, Homo sapiens
  CDR3 for beta chain variable domain of TCR clone 277744 (TRBV5-7, TRBJ1-2)
CASSLGTGYGYTF

SEQ ID NO: 555489 - protein, 15 aa, Homo sapiens
  CDR3 for alpha chain variable domain of TCR clone 277745 (TRAV17, TRAJ23)
CATDAEDNQGGKLIF

SEQ ID NO: 555490 - protein, 12 aa, Homo sapiens
  CDR3 for beta chain variable domain of TCR clone 277745 (TRBV2, TRBJ2-1)
CAKREGFNEQFF

SEQ ID NO: 555491 - protein, 14 aa, Homo sapiens
  CDR3 for alpha chain variable domain of TCR clone 277746 (TRAV12-2, TRAJ13)
CAVTKTGGYQKVTF

SEQ ID NO: 555492 - protein, 13 aa, Homo sapiens
  CDR3 for beta chain variable domain of TCR clone 277746 (TRBV4-2, TRBJ1-1)
CASSQAGNTEAFF

SEQ ID NO: 555493 - protein, 15 aa, Homo sapiens
  CDR3 for alpha chain variable domain of TCR clone 277747 (TRAV12-1, TRAJ44)
FVSDLPTGTASKLTF

SEQ ID NO: 555494 - protein, 13 aa, Homo sapiens
  CDR3 for beta chain variable domain of TCR clone 277747 (TRBV6-5, TRBJ2-5)
CASSPQGGETQYF

SEQ ID NO: 555495 - protein, 14 aa, Homo sapiens
  CDR3 for alpha chain variable domain of TCR clone 277748 (TRAV8-3, TRAJ23)
CAVIIYNQGGKLIF

SEQ ID NO: 555496 - protein, 15 aa, Homo sapiens
  CDR3 for beta chain variable domain of TCR clone 277748 (TRBV18, TRBJ2-1)
CASSPPSASYNAQFF

SEQ ID NO: 555497 - protein, 14 aa, Homo sapiens
  CDR3 for alpha chain variable domain of TCR clone 277749 (TRAV12-3, TRAJ20)
CAMSAHRGDYKLSF

SEQ ID NO: 555498 - protein, 14 aa, Homo sapiens
  CDR3 for beta chain variable domain of TCR clone 277749 (TRBV7-3, TRBJ2-3)
CASSPSARTDTQYF

SEQ ID NO: 555499 - protein, 11 aa, Homo sapiens
  CDR3 for alpha chain variable domain of TCR clone 277750 (TRAV8-3, TRAJ15)
CAVGPGPALLF

SEQ ID NO: 555500 - protein, 18 aa, Homo sapiens
  CDR3 for beta chain variable domain of TCR clone 277750 (TRBV18, TRBJ2-3)
CASSYTSGAAGGTDTQYF

SEQ ID NO: 555501 - protein, 12 aa, Homo sapiens
  CDR3 for alpha chain variable domain of TCR clone 277751 (TRAV12-3, TRAJ17)
CAMTLTGNKLTF

SEQ ID NO: 555502 - protein, 15 aa, Homo sapiens
  CDR3 for beta chain variable domain of TCR clone 277751 (TRBV20-1, TRBJ2-7)
CSARDRVSRMDDQYF

SEQ ID NO: 555503 - protein, 13 aa, Homo sapiens
  CDR3 for alpha chain variable domain of TCR clone 277752 (TRAV12-2, TRAJ13)
CAVEDWGLPESYL

SEQ ID NO: 555504 - protein, 14 aa, Homo sapiens
  CDR3 for beta chain variable domain of TCR clone 277752 (TRBV25-1, TRBJ1-1)
CASTHLGGNTEAFF

SEQ ID NO: 555505 - protein, 12 aa, Homo sapiens
  CDR3 for alpha chain variable domain of TCR clone 277753 (TRAV3, TRAJ34)
CAVLGNTDKLIF

SEQ ID NO: 555506 - protein, 13 aa, Homo sapiens
  CDR3 for beta chain variable domain of TCR clone 277753 (TRBV19, TRBJ2-1)
CASSIGTGSEQFF

SEQ ID NO: 555507 - protein, 12 aa, Homo sapiens
  CDR3 for alpha chain variable domain of TCR clone 277754 (TRAV1-2, TRAJ33)
CAALDSNYQLIW

SEQ ID NO: 555508 - protein, 14 aa, Homo sapiens
  CDR3 for beta chain variable domain of TCR clone 277754 (TRBV2, TRBJ1-5)
CASLGSRDNQPQHF

SEQ ID NO: 555509 - protein, 13 aa, Homo sapiens
  CDR3 for alpha chain variable domain of TCR clone 277755 (TRAV12-2, TRAJ10)
CAVSTGGGNKLTF

SEQ ID NO: 555510 - protein, 14 aa, Homo sapiens
  CDR3 for beta chain variable domain of TCR clone 277755 (TRBV28, TRBJ1-3)
CASSLRGAHYTIYF

SEQ ID NO: 555511 - protein, 16 aa, Homo sapiens
  CDR3 for alpha chain variable domain of TCR clone 277756 (TRAV21, TRAJ17)
CAVRPGEEAAGNKLTF

SEQ ID NO: 555512 - protein, 15 aa, Homo sapiens
  CDR3 for beta chain variable domain of TCR clone 277756 (TRBV28, TRBJ1-6)
CASSRSPGHISPLHF

SEQ ID NO: 555513 - protein, 14 aa, Homo sapiens
  CDR3 for alpha chain variable domain of TCR clone 277757 (TRAV1-2, TRAJ8)
CAVREDTGFQKLVF

SEQ ID NO: 555514 - protein, 12 aa, Homo sapiens
  CDR3 for beta chain variable domain of TCR clone 277757 (TRBV2, TRBJ2-1)
CAYGPPGNEQYF

SEQ ID NO: 555515 - protein, 14 aa, Homo sapiens
  CDR3 for alpha chain variable domain of TCR clone 277758 (TRAV12-3, TRAJ15)
CATIPPQAGTALIF

SEQ ID NO: 555516 - protein, 14 aa, Homo sapiens
  CDR3 for beta chain variable domain of TCR clone 277758 (TRBV20-1, TRBJ2-2)
CSARKRLTTGELFF

SEQ ID NO: 555517 - protein, 14 aa, Homo sapiens
  CDR3 for alpha chain variable domain of TCR clone 277759 (TRAV8-3, TRAJ4)
CAVGASGGYNKLIF

SEQ ID NO: 555518 - protein, 16 aa, Homo sapiens
  CDR3 for beta chain variable domain of TCR clone 277759 (TRBV7-9, TRBJ2-1)
CASSDVAGGSYNEQFF

SEQ ID NO: 555519 - protein, 17 aa, Homo sapiens
  CDR3 for alpha chain variable domain of TCR clone 277760 (TRAV4, TRAJ42)
CLVGVLNYGGSQGNLIF

SEQ ID NO: 555520 - protein, 14 aa, Homo sapiens
  CDR3 for beta chain variable domain of TCR clone 277760 (TRBV7-2, TRBJ2-5)
CASSPRGSSETQYF

SEQ ID NO: 555521 - protein, 16 aa, Homo sapiens
  CDR3 for alpha chain variable domain of TCR clone 277761 (TRAV30, TRAJ32)
CGTESSYGGATNKLIF

SEQ ID NO: 555522 - protein, 14 aa, Homo sapiens
  CDR3 for beta chain variable domain of TCR clone 277761 (TRBV12-5, TRBJ2-5)
CASGSRTHQETQYF

SEQ ID NO: 555523 - protein, 21 aa, Homo sapiens
  CDR3 for alpha chain variable domain of TCR clone 277762 (TRAV26-1, TRAJ30)
CIVNMNRDDKIILEKGHDFIF

SEQ ID NO: 555524 - protein, 16 aa, Homo sapiens
  CDR3 for beta chain variable domain of TCR clone 277762 (TRBV16, TRBJ2-7)
CASSRPAGESSYEQYF

SEQ ID NO: 555525 - protein, 14 aa, Homo sapiens
  CDR3 for alpha chain variable domain of TCR clone 277763 (TRAV38-1, TRAJ45)
CASHSGGGADGLTF

SEQ ID NO: 555526 - protein, 15 aa, Homo sapiens
  CDR3 for beta chain variable domain of TCR clone 277763 (TRBV10-2, TRBJ2-6)
RASSEQGTGANVLTF

SEQ ID NO: 555527 - protein, 12 aa, Homo sapiens
  CDR3 for alpha chain variable domain of TCR clone 277764 (TRAV13-1, TRAJ40)
CAASWATYKYLF

SEQ ID NO: 555528 - protein, 15 aa, Homo sapiens
  CDR3 for beta chain variable domain of TCR clone 277764 (TRBV7-8, TRBJ2-1)
CASSSRLAAYNEQFF

SEQ ID NO: 555529 - protein, 12 aa, Homo sapiens
  CDR3 for alpha chain variable domain of TCR clone 277765 (TRAV12-3, TRAJ17)
CAMTLTGNKLTF

SEQ ID NO: 555530 - protein, 16 aa, Homo sapiens
  CDR3 for beta chain variable domain of TCR clone 277765 (TRBV2, TRBJ2-1)
CASSVGGSLSYDEQFF

SEQ ID NO: 555531 - protein, 15 aa, Homo sapiens
  CDR3 for alpha chain variable domain of TCR clone 277766 (TRAV26-1, TRAJ29)
CIVRVEGSGNTPLVF

SEQ ID NO: 555532 - protein, 14 aa, Homo sapiens
  CDR3 for beta chain variable domain of TCR clone 277766 (TRBV7-2, TRBJ2-5)
CASSLSGGGETQYF

SEQ ID NO: 555533 - protein, 13 aa, Homo sapiens
  CDR3 for alpha chain variable domain of TCR clone 277767 (TRAV13-1, TRAJ5)
YAASDTGRRALTF

SEQ ID NO: 555534 - protein, 12 aa, Homo sapiens
  CDR3 for beta chain variable domain of TCR clone 277767 (TRBV28, TRBJ2-3)
CASSLYRDTQYF

SEQ ID NO: 555535 - protein, 11 aa, Homo sapiens
  CDR3 for alpha chain variable domain of TCR clone 277768 (TRAV3, TRAJ21)
CAVGNFNKFYF

SEQ ID NO: 555536 - protein, 13 aa, Homo sapiens
  CDR3 for beta chain variable domain of TCR clone 277768 (TRBV11-2, TRBJ2-1)
CASSSEAYNEQFF

SEQ ID NO: 555537 - protein, 15 aa, Homo sapiens
  CDR3 for alpha chain variable domain of TCR clone 277769 (TRAV12-2, TRAJ8)
CAVREDNTGFQKLVF

SEQ ID NO: 555538 - protein, 16 aa, Homo sapiens
  CDR3 for beta chain variable domain of TCR clone 277769 (TRBV7-3, TRBJ2-2)
CASSLKRGTLSGELFF

SEQ ID NO: 555539 - protein, 11 aa, Homo sapiens
  CDR3 for alpha chain variable domain of TCR clone 277770 (TRAV3, TRAJ21)
CAVCNFDKFYF

SEQ ID NO: 555540 - protein, 16 aa, Homo sapiens
  CDR3 for beta chain variable domain of TCR clone 277770 (TRBV19, TRBJ2-1)
CASSKAGPSSYNEQFF

SEQ ID NO: 555541 - protein, 13 aa, Homo sapiens
  CDR3 for alpha chain variable domain of TCR clone 277771 (TRAV1-2, TRAJ9)
CAALNTGGFETIF

SEQ ID NO: 555542 - protein, 15 aa, Homo sapiens
  CDR3 for beta chain variable domain of TCR clone 277771 (TRBV29-1, TRBJ2-5)
CSVEGLAVNQETQYF

SEQ ID NO: 555543 - protein, 15 aa, Homo sapiens
  CDR3 for alpha chain variable domain of TCR clone 277772 (TRAV12-1, TRAJ44)
CVADLPTGTASKLTF

SEQ ID NO: 555544 - protein, 15 aa, Homo sapiens
  CDR3 for beta chain variable domain of TCR clone 277772 (TRBV19, TRBJ2-1)
CASSIAGSSYNEQFF

SEQ ID NO: 555545 - protein, 13 aa, Homo sapiens
  CDR3 for alpha chain variable domain of TCR clone 277773 (TRAV17, TRAJ26)
CATVDNYVQNFVF

SEQ ID NO: 555546 - protein, 13 aa, Homo sapiens
  CDR3 for beta chain variable domain of TCR clone 277773 (TRBV4-2, TRBJ1-1)
CASSQAGNTEAFF

SEQ ID NO: 555547 - protein, 19 aa, Homo sapiens
  CDR3 for alpha chain variable domain of TCR clone 277774 (TRAV38-1, TRAJ53)
CAFMKHGLESGGSNYKLTV

SEQ ID NO: 555548 - protein, 13 aa, Homo sapiens
  CDR3 for beta chain variable domain of TCR clone 277774 (TRBV19, TRBJ2-7)
CASSPRQSYEQYF

SEQ ID NO: 555549 - protein, 16 aa, Homo sapiens
  CDR3 for alpha chain variable domain of TCR clone 277775 (TRAV30, TRAJ24)
CGTEIVDAASWGKFQF

SEQ ID NO: 555550 - protein, 14 aa, Homo sapiens
  CDR3 for beta chain variable domain of TCR clone 277775 (TRBV12-5, TRBJ2-5)
CTSGSRTHQETQYF

SEQ ID NO: 555551 - protein, 17 aa, Homo sapiens
  CDR3 for alpha chain variable domain of TCR clone 277776 (TRAV13-1, TRAJ28)
CAASPPYSGAGSYQLTF

SEQ ID NO: 555552 - protein, 16 aa, Homo sapiens
  CDR3 for beta chain variable domain of TCR clone 277776 (TRBV5-1, TRBJ1-1)
CASSLRPRNLNTEAFF

SEQ ID NO: 555553 - protein, 11 aa, Homo sapiens
  CDR3 for alpha chain variable domain of TCR clone 277777 (TRAV21, TRAJ34)
CAVTNTDKLIF

SEQ ID NO: 555554 - protein, 14 aa, Homo sapiens
  CDR3 for beta chain variable domain of TCR clone 277777 (TRBV12-4, TRBJ2-1)
CASSLVQGASEQFF

SEQ ID NO: 555555 - protein, 13 aa, Homo sapiens
  CDR3 for alpha chain variable domain of TCR clone 277778 (TRAV20, TRAJ49)
CAVHSNTGNQFYF

SEQ ID NO: 555556 - protein, 14 aa, Homo sapiens
  CDR3 for beta chain variable domain of TCR clone 277778 (TRBV7-2, TRBJ2-7)
CASRSQGAAYEQYF

SEQ ID NO: 555557 - protein, 16 aa, Homo sapiens
  CDR3 for alpha chain variable domain of TCR clone 277779 (TRAV14/DV4, TRAJ53)
CAMREGGGGSNYKLTF

SEQ ID NO: 555558 - protein, 17 aa, Homo sapiens
  CDR3 for beta chain variable domain of TCR clone 277779 (TRBV13, TRBJ2-3)
CASSLSRGAGGRNTQYF

SEQ ID NO: 555559 - protein, 12 aa, Homo sapiens
  CDR3 for alpha chain variable domain of TCR clone 277780 (TRAV17, TRAJ36)
CATLTGANNLLF

SEQ ID NO: 555560 - protein, 15 aa, Homo sapiens
  CDR3 for beta chain variable domain of TCR clone 277780 (TRBV19, TRBJ1-2)
CASSTKTDTNYGYTF

SEQ ID NO: 555561 - protein, 13 aa, Homo sapiens
  CDR3 for alpha chain variable domain of TCR clone 277781 (TRAV27, TRAJ41)
CAGEGNSGYALNF

SEQ ID NO: 555562 - protein, 13 aa, Homo sapiens
  CDR3 for beta chain variable domain of TCR clone 277781 (TRBV12-4, TRBJ2-5)
CASSPGTEETQYF

SEQ ID NO: 555563 - protein, 11 aa, Homo sapiens
  CDR3 for alpha chain variable domain of TCR clone 277782 (TRAV2, TRAJ13)
CASGGYQKVTF

SEQ ID NO: 555564 - protein, 13 aa, Homo sapiens
  CDR3 for beta chain variable domain of TCR clone 277782 (TRBV28, TRBJ2-7)
CASSPSGTYEQYF

SEQ ID NO: 555565 - protein, 17 aa, Homo sapiens
  CDR3 for alpha chain variable domain of TCR clone 277783 (TRAV17, TRAJ52)
CATERPSGGTSYGKLTF

SEQ ID NO: 555566 - protein, 13 aa, Homo sapiens
  CDR3 for beta chain variable domain of TCR clone 277783 (TRBV7-9, TRBJ1-2)
CASSLKQNYGYTS

SEQ ID NO: 555567 - protein, 15 aa, Homo sapiens
  CDR3 for alpha chain variable domain of TCR clone 277784 (TRAV13-1, TRAJ42)
CAASIAGGSQGNLIF

SEQ ID NO: 555568 - protein, 15 aa, Homo sapiens
  CDR3 for beta chain variable domain of TCR clone 277784 (TRBV19, TRBJ2-1)
CASSIVRGEGCEQFF

SEQ ID NO: 555569 - protein, 14 aa, Homo sapiens
  CDR3 for alpha chain variable domain of TCR clone 277785 (TRAV5, TRAJ4)
CAASFSGGYNRLIF

SEQ ID NO: 555570 - protein, 19 aa, Homo sapiens
  CDR3 for beta chain variable domain of TCR clone 277785 (TRBV2, TRBJ2-7)
CAGSDDETSGRANDYEQYF

SEQ ID NO: 555571 - protein, 13 aa, Homo sapiens
  CDR3 for alpha chain variable domain of TCR clone 277786 (TRAV8-3, TRAJ47)
CAVSMEYGNKLVF

SEQ ID NO: 555572 - protein, 13 aa, Homo sapiens
  CDR3 for beta chain variable domain of TCR clone 277786 (TRBV19, TRBJ2-2)
CASKVSAAGELFF

SEQ ID NO: 555573 - protein, 12 aa, Homo sapiens
  CDR3 for alpha chain variable domain of TCR clone 277787 (TRAV8-3, TRAJ26)
CAGDNYGQNFVF

SEQ ID NO: 555574 - protein, 17 aa, Homo sapiens
  CDR3 for beta chain variable domain of TCR clone 277787 (TRBV7-8, TRBJ2-6)
CASSAGTWGAGANVLTF

SEQ ID NO: 555575 - protein, 14 aa, Homo sapiens
  CDR3 for alpha chain variable domain of TCR clone 277788 (TRAV12-2, TRAJ17)
CAVLFKAAGNKLTF

SEQ ID NO: 555576 - protein, 16 aa, Homo sapiens
  CDR3 for beta chain variable domain of TCR clone 277788 (TRBV4-1, TRBJ2-7)
CATSQEWTSGPLEQYF

SEQ ID NO: 555577 - protein, 13 aa, Homo sapiens
  CDR3 for alpha chain variable domain of TCR clone 277789 (TRAV36/DV7, TRAJ54)
CAVDIQGAQKLVF

SEQ ID NO: 555578 - protein, 14 aa, Homo sapiens
  CDR3 for beta chain variable domain of TCR clone 277789 (TRBV19, TRBJ2-7)
CSSNFRDTFTRMYF

SEQ ID NO: 555579 - protein, 14 aa, Homo sapiens
  CDR3 for alpha chain variable domain of TCR clone 277790 (TRAV2, TRAJ22)
CAVEVKRAARQLTF

SEQ ID NO: 555580 - protein, 14 aa, Homo sapiens
  CDR3 for beta chain variable domain of TCR clone 277790 (TRBV19, TRBJ2-2)
CASTTGYSGGELFF

SEQ ID NO: 555581 - protein, 14 aa, Homo sapiens
  CDR3 for alpha chain variable domain of TCR clone 277791 (TRAV1-2, TRAJ16)
CAVNRFSDGQKLLF

SEQ ID NO: 555582 - protein, 15 aa, Homo sapiens
  CDR3 for beta chain variable domain of TCR clone 277791 (TRBV6-5, TRBJ2-3)
CASSLNGDYTDTQYF

SEQ ID NO: 555583 - protein, 12 aa, Homo sapiens
  CDR3 for alpha chain variable domain of TCR clone 277792 (TRAV13-1, TRAJ11)
CAASKGYSTLTF

SEQ ID NO: 555584 - protein, 14 aa, Homo sapiens
  CDR3 for beta chain variable domain of TCR clone 277792 (TRBV11-3, TRBJ2-2)
CASSPRRDTGELFF

SEQ ID NO: 555585 - protein, 14 aa, Homo sapiens
  CDR3 for alpha chain variable domain of TCR clone 277793 (TRAV13-1, TRAJ32)
CAARGSGATNKLIF

SEQ ID NO: 555586 - protein, 15 aa, Homo sapiens
  CDR3 for beta chain variable domain of TCR clone 277793 (TRBV5-5, TRBJ1-1)
CASSLVGKDNTEAVF

SEQ ID NO: 555587 - protein, 13 aa, Homo sapiens
  CDR3 for alpha chain variable domain of TCR clone 277794 (TRAV13-2, TRAJ11)
FAENYSGYSTLTF

SEQ ID NO: 555588 - protein, 13 aa, Homo sapiens
  CDR3 for beta chain variable domain of TCR clone 277794 (TRBV12-4, TRBJ1-4)
CASAMGHNEKLFF

SEQ ID NO: 555589 - protein, 13 aa, Homo sapiens
  CDR3 for alpha chain variable domain of TCR clone 277795 (TRAV17, TRAJ5)
CATMDTGRRALTF

SEQ ID NO: 555590 - protein, 15 aa, Homo sapiens
  CDR3 for beta chain variable domain of TCR clone 277795 (TRBV20-1, TRBJ2-5)
CSATQTSGSLETQYF

SEQ ID NO: 555591 - protein, 14 aa, Homo sapiens
  CDR3 for alpha chain variable domain of TCR clone 277796 (TRAV41, TRAJ48)
CAVISNFGNEKLTF

SEQ ID NO: 555592 - protein, 13 aa, Homo sapiens
  CDR3 for beta chain variable domain of TCR clone 277796 (TRBV29-1, TRBJ1-1)
CSVGDSRNTEAFF

SEQ ID NO: 555593 - protein, 13 aa, Homo sapiens
  CDR3 for alpha chain variable domain of TCR clone 277797 (TRAV27, TRAJ42)
CAGAQGSQGNPIF

SEQ ID NO: 555594 - protein, 15 aa, Homo sapiens
  CDR3 for beta chain variable domain of TCR clone 277797 (TRBV10-3, TRBJ2-2)
CAIRTDREDTGELFF

SEQ ID NO: 555595 - protein, 10 aa, Homo sapiens
  CDR3 for alpha chain variable domain of TCR clone 277798 (TRAV26-2, TRAJ49)
CILLGNQFYF

SEQ ID NO: 555596 - protein, 13 aa, Homo sapiens
  CDR3 for beta chain variable domain of TCR clone 277798 (TRBV20-1, TRBJ2-7)
CSADPRATYEHYF

SEQ ID NO: 555597 - protein, 11 aa, Homo sapiens
  CDR3 for alpha chain variable domain of TCR clone 277799 (TRAV1-2, TRAJ20)
CAGANDYKLSF

SEQ ID NO: 555598 - protein, 16 aa, Homo sapiens
  CDR3 for beta chain variable domain of TCR clone 277799 (TRBV12-4, TRBJ1-4)
CASSLKGIGHGEKLFF

SEQ ID NO: 555599 - protein, 17 aa, Homo sapiens
  CDR3 for alpha chain variable domain of TCR clone 277800 (TRAV36/DV7, TRAJ52)
CAVAQRAGGTSYGNLTF

SEQ ID NO: 555600 - protein, 14 aa, Homo sapiens
  CDR3 for beta chain variable domain of TCR clone 277800 (TRBV6-1, TRBJ1-3)
CASVQGGGGNTIYF

SEQ ID NO: 555601 - protein, 23 aa, Homo sapiens
  CDR3 for alpha chain variable domain of TCR clone 277801 (TRAV12-2, TRAJ36)
SLLIRDSQPSDSATVERANNLFF

SEQ ID NO: 555602 - protein, 15 aa, Homo sapiens
  CDR3 for beta chain variable domain of TCR clone 277801 (TRBV29-1, TRBJ2-7)
CSVEFFDRGSYEQYF

SEQ ID NO: 555603 - protein, 18 aa, Homo sapiens
  CDR3 for alpha chain variable domain of TCR clone 277802 (TRAV13-1, TRAJ52)
CAAKNPNAGGTSYGKLTF

SEQ ID NO: 555604 - protein, 18 aa, Homo sapiens
  CDR3 for beta chain variable domain of TCR clone 277802 (TRBV12-4, TRBJ2-4)
CASSRTVAVDVAKNIQYF

SEQ ID NO: 555605 - protein, 16 aa, Homo sapiens
  CDR3 for alpha chain variable domain of TCR clone 277803 (TRAV8-3, TRAJ44)
CAVGASNTVTASKLTF

SEQ ID NO: 555606 - protein, 16 aa, Homo sapiens
  CDR3 for beta chain variable domain of TCR clone 277803 (TRBV27, TRBJ2-2)
CASSFRGLVRTGELFF

SEQ ID NO: 555607 - protein, 13 aa, Homo sapiens
  CDR3 for alpha chain variable domain of TCR clone 277804 (TRAV13-1, TRAJ6)
CAARRRGSYIPTF

SEQ ID NO: 555608 - protein, 14 aa, Homo sapiens
  CDR3 for beta chain variable domain of TCR clone 277804 (TRBV19, TRBJ2-1)
CASEVTGARNEQFF

SEQ ID NO: 555609 - protein, 12 aa, Homo sapiens
  CDR3 for alpha chain variable domain of TCR clone 277805 (TRAV3, TRAJ31)
CAMRDGNARLMF

SEQ ID NO: 555610 - protein, 18 aa, Homo sapiens
  CDR3 for beta chain variable domain of TCR clone 277805 (TRBV7-8, TRBJ2-3)
CASSLKREGSGITDTQYF

SEQ ID NO: 555611 - protein, 12 aa, Homo sapiens
  CDR3 for alpha chain variable domain of TCR clone 277806 (TRAV27, TRAJ35)
CAGADFGNVLHC

SEQ ID NO: 555612 - protein, 15 aa, Homo sapiens
  CDR3 for beta chain variable domain of TCR clone 277806 (TRBV7-2, TRBJ1-2)
CASSLVSGGDYGYNF

SEQ ID NO: 555613 - protein, 12 aa, Homo sapiens
  CDR3 for alpha chain variable domain of TCR clone 277807 (TRAV21, TRAJ39)
WAADNAGNMLTF

SEQ ID NO: 555614 - protein, 17 aa, Homo sapiens
  CDR3 for beta chain variable domain of TCR clone 277807 (TRBV11-2, TRBJ2-1)
CASSLYPPGVEYNEQFF

SEQ ID NO: 555615 - protein, 14 aa, Homo sapiens
  CDR3 for alpha chain variable domain of TCR clone 277808 (TRAV1-2, TRAJ8)
CAVREDTGFQKLVF

SEQ ID NO: 555616 - protein, 17 aa, Homo sapiens
  CDR3 for beta chain variable domain of TCR clone 277808 (TRBV13, TRBJ2-3)
CASSISRVAGGRNTQYF

SEQ ID NO: 555617 - protein, 15 aa, Homo sapiens
  CDR3 for alpha chain variable domain of TCR clone 277809 (TRAV3, TRAJ4)
CAVRDGTGGYNKLIF

SEQ ID NO: 555618 - protein, 18 aa, Homo sapiens
  CDR3 for beta chain variable domain of TCR clone 277809 (TRBV7-2, TRBJ2-3)
CASSLKREGSGITDTQYF

SEQ ID NO: 555619 - protein, 15 aa, Homo sapiens
  CDR3 for alpha chain variable domain of TCR clone 277810 (TRAV21, TRAJ24)
CAARSSTDSRGKLQF

SEQ ID NO: 555620 - protein, 14 aa, Homo sapiens
  CDR3 for beta chain variable domain of TCR clone 277810 (TRBV19, TRBJ2-1)
CASTTFVLSGEQFF

SEQ ID NO: 555621 - protein, 14 aa, Homo sapiens
  CDR3 for alpha chain variable domain of TCR clone 277811 (TRAV1-2, TRAJ8)
CAVREDTGFQKLVF

SEQ ID NO: 555622 - protein, 15 aa, Homo sapiens
  CDR3 for beta chain variable domain of TCR clone 277811 (TRBV7-9, TRBJ1-6)
CASSSPGRGNSPLHS

SEQ ID NO: 555623 - protein, 17 aa, Homo sapiens
  CDR3 for alpha chain variable domain of TCR clone 277812 (TRAV26-2, TRAJ32)
EGCCCVGYGGATNKLIF

SEQ ID NO: 555624 - protein, 14 aa, Homo sapiens
  CDR3 for beta chain variable domain of TCR clone 277812 (TRBV7-8, TRBJ2-3)
CASSSRDSTDTQYF

SEQ ID NO: 555625 - protein, 16 aa, Homo sapiens
  CDR3 for alpha chain variable domain of TCR clone 277813 (TRAV16, TRAJ57)
CALYLTTPGGSEKLVF

SEQ ID NO: 555626 - protein, 17 aa, Homo sapiens
  CDR3 for beta chain variable domain of TCR clone 277813 (TRBV24-1, TRBJ2-4)
CATSDAEARGVRNIQYF

SEQ ID NO: 555627 - protein, 13 aa, Homo sapiens
  CDR3 for alpha chain variable domain of TCR clone 277814 (TRAV12-1, TRAJ21)
CVVTLYDFNKFYF

SEQ ID NO: 555628 - protein, 20 aa, Homo sapiens
  CDR3 for beta chain variable domain of TCR clone 277814 (TRBV7-8, TRBJ2-1)
CASSLAHRLAGVRSYNEQFF

SEQ ID NO: 555629 - protein, 14 aa, Homo sapiens
  CDR3 for alpha chain variable domain of TCR clone 277815 (TRAV12-2, TRAJ13)
CAVKKTGGYQKVNF

SEQ ID NO: 555630 - protein, 14 aa, Homo sapiens
  CDR3 for beta chain variable domain of TCR clone 277815 (TRBV25-1, TRBJ1-1)
CASTHLGGNTEAFF

SEQ ID NO: 555631 - protein, 13 aa, Homo sapiens
  CDR3 for alpha chain variable domain of TCR clone 277816 (TRAV12-1, TRAJ7)
CVVNMRGNNRLAF

SEQ ID NO: 555632 - protein, 12 aa, Homo sapiens
  CDR3 for beta chain variable domain of TCR clone 277816 (TRBV11-2, TRBJ2-2)
CASSLPTGELFF

SEQ ID NO: 555633 - protein, 15 aa, Homo sapiens
  CDR3 for alpha chain variable domain of TCR clone 277817 (TRAV39, TRAJ42)
CAVVNYGGSQGNLIF

SEQ ID NO: 555634 - protein, 15 aa, Homo sapiens
  CDR3 for beta chain variable domain of TCR clone 277817 (TRBV10-3, TRBJ1-1)
CGISDLGRANTEAFF

SEQ ID NO: 555635 - protein, 13 aa, Homo sapiens
  CDR3 for alpha chain variable domain of TCR clone 277818 (TRAV20, TRAJ40)
CAVPFSGTYKYIF

SEQ ID NO: 555636 - protein, 13 aa, Homo sapiens
  CDR3 for beta chain variable domain of TCR clone 277818 (TRBV7-9, TRBJ2-3)
CASSPGSTDTQYF

SEQ ID NO: 555637 - protein, 14 aa, Homo sapiens
  CDR3 for alpha chain variable domain of TCR clone 277819 (TRAV1-2, TRAJ33)
CAVRAPDSNYQLIW

SEQ ID NO: 555638 - protein, 14 aa, Homo sapiens
  CDR3 for beta chain variable domain of TCR clone 277819 (TRBV20-1, TRBJ1-1)
CSAQTRIGGTEAFF

SEQ ID NO: 555639 - protein, 18 aa, Homo sapiens
  CDR3 for alpha chain variable domain of TCR clone 277820 (TRAV21, TRAJ52)
CAVRPSPAGGTSYGKLTF

SEQ ID NO: 555640 - protein, 17 aa, Homo sapiens
  CDR3 for beta chain variable domain of TCR clone 277820 (TRBV13, TRBJ2-3)
CAISLARVAGGRNTQYF

SEQ ID NO: 555641 - protein, 11 aa, Homo sapiens
  CDR3 for alpha chain variable domain of TCR clone 277821 (TRAV2, TRAJ13)
CASGGYQKVTL

SEQ ID NO: 555642 - protein, 15 aa, Homo sapiens
  CDR3 for beta chain variable domain of TCR clone 277821 (TRBV19, TRBJ2-1)
CASSSPGVPLDEQFF

SEQ ID NO: 555643 - protein, 11 aa, Homo sapiens
  CDR3 for alpha chain variable domain of TCR clone 277822 (TRAV1-2, TRAJ20)
CAVANDYKLSF

SEQ ID NO: 555644 - protein, 15 aa, Homo sapiens
  CDR3 for beta chain variable domain of TCR clone 277822 (TRBV19, TRBJ2-4)
CASRGPRRGENIQYF

SEQ ID NO: 555645 - protein, 13 aa, Homo sapiens
  CDR3 for alpha chain variable domain of TCR clone 277823 (TRAV24, TRAJ39)
CAYLNNAGNMLTF

SEQ ID NO: 555646 - protein, 12 aa, Homo sapiens
  CDR3 for beta chain variable domain of TCR clone 277823 (TRBV15, TRBJ2-7)
CATSRAAGEQYF

SEQ ID NO: 555647 - protein, 11 aa, Homo sapiens
  CDR3 for alpha chain variable domain of TCR clone 277824 (TRAV27, TRAJ20)
CAGADDYKLSF

SEQ ID NO: 555648 - protein, 12 aa, Homo sapiens
  CDR3 for beta chain variable domain of TCR clone 277824 (TRBV2, TRBJ1-1)
CATTSRGTEAFF

SEQ ID NO: 555649 - protein, 14 aa, Homo sapiens
  CDR3 for alpha chain variable domain of TCR clone 277825 (TRAV40, TRAJ41)
CLLGPPNSGYALNF

SEQ ID NO: 555650 - protein, 16 aa, Homo sapiens
  CDR3 for beta chain variable domain of TCR clone 277825 (TRBV19, TRBJ2-1)
CASSKAGPSSYNEQFF

SEQ ID NO: 555651 - protein, 12 aa, Homo sapiens
  CDR3 for alpha chain variable domain of TCR clone 277826 (TRAV12-3, TRAJ17)
CAMTLTGNKLTF

SEQ ID NO: 555652 - protein, 15 aa, Homo sapiens
  CDR3 for beta chain variable domain of TCR clone 277826 (TRBV12-4, TRBJ2-5)
CASSPPTGLQETQYY

SEQ ID NO: 555653 - protein, 12 aa, Homo sapiens
  CDR3 for alpha chain variable domain of TCR clone 277827 (TRAV2, TRAJ33)
CAVPDSNYQLIW

SEQ ID NO: 555654 - protein, 18 aa, Homo sapiens
  CDR3 for beta chain variable domain of TCR clone 277827 (TRBV7-3, TRBJ2-3)
CARSSTGTYPGSTDTQYF

SEQ ID NO: 555655 - protein, 12 aa, Homo sapiens
  CDR3 for alpha chain variable domain of TCR clone 277828 (TRAV38-1, TRAJ43)
CAFMTRLAGMRF

SEQ ID NO: 555656 - protein, 14 aa, Homo sapiens
  CDR3 for beta chain variable domain of TCR clone 277828 (TRBV27, TRBJ2-2)
CASSLSVVDGRMFF

SEQ ID NO: 555657 - protein, 15 aa, Homo sapiens
  CDR3 for alpha chain variable domain of TCR clone 277829 (TRAV26-1, TRAJ44)
CIVRATIGTASKLTF

SEQ ID NO: 555658 - protein, 12 aa, Homo sapiens
  CDR3 for beta chain variable domain of TCR clone 277829 (TRBV2, TRBJ2-1)
GRGLPSYNEQFF

SEQ ID NO: 555659 - protein, 18 aa, Homo sapiens
  CDR3 for alpha chain variable domain of TCR clone 277830 (TRAV26-2, TRAJ54)
CILRDVEVGIQGAQKLVF

SEQ ID NO: 555660 - protein, 16 aa, Homo sapiens
  CDR3 for beta chain variable domain of TCR clone 277830 (TRBV6-1, TRBJ2-5)
CASSETLDRGAETQCF

SEQ ID NO: 555661 - protein, 17 aa, Homo sapiens
  CDR3 for alpha chain variable domain of TCR clone 277831 (TRAV23/DV6, TRAJ57)
CAASSTLSQGGSEKLVF

SEQ ID NO: 555662 - protein, 14 aa, Homo sapiens
  CDR3 for beta chain variable domain of TCR clone 277831 (TRBV7-2, TRBJ2-7)
CASRSQGAAYEQYF

SEQ ID NO: 555663 - protein, 15 aa, Homo sapiens
  CDR3 for alpha chain variable domain of TCR clone 277832 (TRAV23/DV6, TRAJ18)
CAARYRGSTLGRLYL

SEQ ID NO: 555664 - protein, 15 aa, Homo sapiens
  CDR3 for beta chain variable domain of TCR clone 277832 (TRBV7-2, TRBJ2-3)
CASSLAGAFIDTQYF

SEQ ID NO: 555665 - protein, 12 aa, Homo sapiens
  CDR3 for alpha chain variable domain of TCR clone 277833 (TRAV12-3, TRAJ17)
CAMTLTGNKLTF

SEQ ID NO: 555666 - protein, 14 aa, Homo sapiens
  CDR3 for beta chain variable domain of TCR clone 277833 (TRBV20-1, TRBJ2-3)
CSASSGGSTDTQYF

SEQ ID NO: 555667 - protein, 13 aa, Homo sapiens
  CDR3 for alpha chain variable domain of TCR clone 277834 (TRAV8-3, TRAJ44)
CAVVPGTASKLTF

SEQ ID NO: 555668 - protein, 14 aa, Homo sapiens
  CDR3 for beta chain variable domain of TCR clone 277834 (TRBV11-2, TRBJ2-3)
CASSKLARTDTQHF

SEQ ID NO: 555669 - protein, 17 aa, Homo sapiens
  CDR3 for alpha chain variable domain of TCR clone 277835 (TRAV17, TRAJ28)
CATDPRRGGAWSYQLNF

SEQ ID NO: 555670 - protein, 16 aa, Homo sapiens
  CDR3 for beta chain variable domain of TCR clone 277835 (TRBV25-1, TRBJ1-1)
CASSGDRDRGRIEAFF

SEQ ID NO: 555671 - protein, 13 aa, Homo sapiens
  CDR3 for alpha chain variable domain of TCR clone 277836 (TRAV13-1, TRAJ20)
CAARVSNDYKLSF

SEQ ID NO: 555672 - protein, 16 aa, Homo sapiens
  CDR3 for beta chain variable domain of TCR clone 277836 (TRBV11-1, TRBJ1-1)
CATIPRDRAFNTEAFF

SEQ ID NO: 555673 - protein, 14 aa, Homo sapiens
  CDR3 for alpha chain variable domain of TCR clone 277837 (TRAV12-1, TRAJ17)
CVVNYKAAGNKLTF

SEQ ID NO: 555674 - protein, 12 aa, Homo sapiens
  CDR3 for beta chain variable domain of TCR clone 277837 (TRBV7-9, TRBJ2-7)
CASSQGVYEQYF

SEQ ID NO: 555675 - protein, 18 aa, Homo sapiens
  CDR3 for alpha chain variable domain of TCR clone 277838 (TRAV13-1, TRAJ52)
CAASNRSAGGTSYGKLTF

SEQ ID NO: 555676 - protein, 14 aa, Homo sapiens
  CDR3 for beta chain variable domain of TCR clone 277838 (TRBV7-2, TRBJ2-5)
CASSTGGELKTQYF

SEQ ID NO: 555677 - protein, 15 aa, Homo sapiens
  CDR3 for alpha chain variable domain of TCR clone 277839 (TRAV23/DV6, TRAJ30)
CAASSQESRDDKIIF

SEQ ID NO: 555678 - protein, 15 aa, Homo sapiens
  CDR3 for beta chain variable domain of TCR clone 277839 (TRBV6-3, TRBJ2-7)
CASSSPGTVFYEQYF

SEQ ID NO: 555679 - protein, 14 aa, Homo sapiens
  CDR3 for alpha chain variable domain of TCR clone 277840 (TRAV8-3, TRAJ15)
CAVGLNQAGTALIF

SEQ ID NO: 555680 - protein, 17 aa, Homo sapiens
  CDR3 for beta chain variable domain of TCR clone 277840 (TRBV20-1, TRBJ2-1)
CSARSPSGGPPTMSSSS

SEQ ID NO: 555681 - protein, 12 aa, Homo sapiens
  CDR3 for alpha chain variable domain of TCR clone 277841 (TRAV13-2, TRAJ23)
CAERHRGGKLIF

SEQ ID NO: 555682 - protein, 16 aa, Homo sapiens
  CDR3 for beta chain variable domain of TCR clone 277841 (TRBV7-2, TRBJ2-6)
CAILSGVSSRANDLTF

SEQ ID NO: 555683 - protein, 14 aa, Homo sapiens
  CDR3 for alpha chain variable domain of TCR clone 277842 (TRAV13-2, TRAJ43)
CAEIPTYNKNDMRF

SEQ ID NO: 555684 - protein, 14 aa, Homo sapiens
  CDR3 for beta chain variable domain of TCR clone 277842 (TRBV4-1, TRBJ2-2)
CASSQAVNTGELFF

SEQ ID NO: 555685 - protein, 12 aa, Homo sapiens
  CDR3 for alpha chain variable domain of TCR clone 277843 (TRAV8-3, TRAJ26)
SAGDNYGQNFVF

SEQ ID NO: 555686 - protein, 15 aa, Homo sapiens
  CDR3 for beta chain variable domain of TCR clone 277843 (TRBV11-2, TRBJ2-1)
CASSLGTSGLNEQFF

SEQ ID NO: 555687 - protein, 14 aa, Homo sapiens
  CDR3 for alpha chain variable domain of TCR clone 277844 (TRAV38-1, TRAJ43)
CAFMKHNNNNDMRF

SEQ ID NO: 555688 - protein, 15 aa, Homo sapiens
  CDR3 for beta chain variable domain of TCR clone 277844 (TRBV9, TRBJ1-6)
CSSSVAGTGDSPLHF

SEQ ID NO: 555689 - protein, 13 aa, Homo sapiens
  CDR3 for alpha chain variable domain of TCR clone 277845 (TRAV12-3, TRAJ13)
CAMTSGGHQKVTF

SEQ ID NO: 555690 - protein, 14 aa, Homo sapiens
  CDR3 for beta chain variable domain of TCR clone 277845 (TRBV7-2, TRBJ2-7)
CASRSQGAAYEQYF

SEQ ID NO: 555691 - protein, 17 aa, Homo sapiens
  CDR3 for alpha chain variable domain of TCR clone 277846 (TRAV3, TRAJ6)
CAVRDGPRAGGSYAPTF

SEQ ID NO: 555692 - protein, 14 aa, Homo sapiens
  CDR3 for beta chain variable domain of TCR clone 277846 (TRBV7-2, TRBJ2-7)
CASSPKTSFYEQYF

SEQ ID NO: 555693 - protein, 11 aa, Homo sapiens
  CDR3 for alpha chain variable domain of TCR clone 277847 (TRAV8-4, TRAJ21)
CAVGNFNKFYF

SEQ ID NO: 555694 - protein, 16 aa, Homo sapiens
  CDR3 for beta chain variable domain of TCR clone 277847 (TRBV19, TRBJ2-1)
CASSKAGPSSYNEQFF

SEQ ID NO: 555695 - protein, 11 aa, Homo sapiens
  CDR3 for alpha chain variable domain of TCR clone 277848 (TRAV3, TRAJ17)
CAEAAGNKLSF

SEQ ID NO: 555696 - protein, 15 aa, Homo sapiens
  CDR3 for beta chain variable domain of TCR clone 277848 (TRBV12-4, TRBJ2-7)
CASSLGSGGPYEQYF

SEQ ID NO: 555697 - protein, 15 aa, Homo sapiens
  CDR3 for alpha chain variable domain of TCR clone 277849 (TRAV26-1, TRAJ22)
CIVRVSFWFCKATDL

SEQ ID NO: 555698 - protein, 12 aa, Homo sapiens
  CDR3 for beta chain variable domain of TCR clone 277849 (TRBV11-2, TRBJ2-2)
CASSLGGGELCF

SEQ ID NO: 555699 - protein, 14 aa, Homo sapiens
  CDR3 for alpha chain variable domain of TCR clone 277850 (TRAV12-2, TRAJ45)
CAVYSGGGADGLTF

SEQ ID NO: 555700 - protein, 14 aa, Homo sapiens
  CDR3 for beta chain variable domain of TCR clone 277850 (TRBV6-5, TRBJ1-2)
CASTRGGGSDVYTF

SEQ ID NO: 555701 - protein, 19 aa, Homo sapiens
  CDR3 for alpha chain variable domain of TCR clone 277851 (TRAV26-1, TRAJ36)
CIVRPPRGSNWGKQPLLWD

SEQ ID NO: 555702 - protein, 15 aa, Homo sapiens
  CDR3 for beta chain variable domain of TCR clone 277851 (TRBV10-3, TRBJ2-6)
CATPAAASGANVLTL

SEQ ID NO: 555703 - protein, 13 aa, Homo sapiens
  CDR3 for alpha chain variable domain of TCR clone 277852 (TRAV2, TRAJ15)
CAVASQAGTALIF

SEQ ID NO: 555704 - protein, 16 aa, Homo sapiens
  CDR3 for beta chain variable domain of TCR clone 277852 (TRBV5-1, TRBJ1-1)
WASSSGGNSLNTEAFF

SEQ ID NO: 555705 - protein, 16 aa, Homo sapiens
  CDR3 for alpha chain variable domain of TCR clone 277853 (TRAV30, TRAJ24)
CGTEIVDADSWGTFQF

SEQ ID NO: 555706 - protein, 17 aa, Homo sapiens
  CDR3 for beta chain variable domain of TCR clone 277853 (TRBV13, TRBJ2-3)
CASSLSRVAGGRNTQYF

SEQ ID NO: 555707 - protein, 15 aa, Homo sapiens
  CDR3 for alpha chain variable domain of TCR clone 277854 (TRAV8-3, TRAJ37)
CAVGAPSSHTGQLIF

SEQ ID NO: 555708 - protein, 15 aa, Homo sapiens
  CDR3 for beta chain variable domain of TCR clone 277854 (TRBV11-2, TRBJ1-2)
CASSQMRGLNYGYTF

SEQ ID NO: 555709 - protein, 14 aa, Homo sapiens
  CDR3 for alpha chain variable domain of TCR clone 277855 (TRAV17, TRAJ23)
CATALGGQGGKLIF

SEQ ID NO: 555710 - protein, 16 aa, Homo sapiens
  CDR3 for beta chain variable domain of TCR clone 277855 (TRBV7-9, TRBJ2-1)
CASSLDPGLAIDEQFF

SEQ ID NO: 555711 - protein, 15 aa, Homo sapiens
  CDR3 for alpha chain variable domain of TCR clone 277856 (TRAV25, TRAJ52)
CAGRPGGTSYGKLTF

SEQ ID NO: 555712 - protein, 13 aa, Homo sapiens
  CDR3 for beta chain variable domain of TCR clone 277856 (TRBV7-2, TRBJ1-1)
CASNLKGAKVAFF

SEQ ID NO: 555713 - protein, 13 aa, Homo sapiens
  CDR3 for alpha chain variable domain of TCR clone 277857 (TRAV12-1, TRAJ39)
CVVNYNAGNMLTF

SEQ ID NO: 555714 - protein, 14 aa, Homo sapiens
  CDR3 for beta chain variable domain of TCR clone 277857 (TRBV27, TRBJ2-3)
CASSPLGTTDTRYF

SEQ ID NO: 555715 - protein, 16 aa, Homo sapiens
  CDR3 for alpha chain variable domain of TCR clone 277858 (TRAV12-3, TRAJ53)
CAMSPGSGGSNYKLTF

SEQ ID NO: 555716 - protein, 14 aa, Homo sapiens
  CDR3 for beta chain variable domain of TCR clone 277858 (TRBV4-2, TRBJ2-1)
CASGLDMAYNEQFC

SEQ ID NO: 555717 - protein, 17 aa, Homo sapiens
  CDR3 for alpha chain variable domain of TCR clone 277859 (TRAV23/DV6, TRAJ57)
FAASSTLSQCGSEKLVF

SEQ ID NO: 555718 - protein, 14 aa, Homo sapiens
  CDR3 for beta chain variable domain of TCR clone 277859 (TRBV25-1, TRBJ1-1)
CASTHLGGNTEAFF

SEQ ID NO: 555719 - protein, 13 aa, Homo sapiens
  CDR3 for alpha chain variable domain of TCR clone 277860 (TRAV2, TRAJ40)
CAVVSSGTYKYIF

SEQ ID NO: 555720 - protein, 15 aa, Homo sapiens
  CDR3 for beta chain variable domain of TCR clone 277860 (TRBV18, TRBJ1-1)
CASSPRQGENTEAFF

SEQ ID NO: 555721 - protein, 13 aa, Homo sapiens
  CDR3 for alpha chain variable domain of TCR clone 277861 (TRAV20, TRAJ37)
CAGCSSNTGKLIF

SEQ ID NO: 555722 - protein, 14 aa, Homo sapiens
  CDR3 for beta chain variable domain of TCR clone 277861 (TRBV7-2, TRBJ2-7)
CASSGLAGRGEQYF

SEQ ID NO: 555723 - protein, 13 aa, Homo sapiens
  CDR3 for alpha chain variable domain of TCR clone 277862 (TRAV8-6, TRAJ21)
CAVSSSSLNKFYF

SEQ ID NO: 555724 - protein, 18 aa, Homo sapiens
  CDR3 for beta chain variable domain of TCR clone 277862 (TRBV11-2, TRBJ2-3)
CASSLGGASRGAPNTQYF

SEQ ID NO: 555725 - protein, 14 aa, Homo sapiens
  CDR3 for alpha chain variable domain of TCR clone 277863 (TRAV12-3, TRAJ15)
CAMIPPQAGTALIF

SEQ ID NO: 555726 - protein, 14 aa, Homo sapiens
  CDR3 for beta chain variable domain of TCR clone 277863 (TRBV20-1, TRBJ2-2)
GSARKRLATGELFF

SEQ ID NO: 555727 - protein, 12 aa, Homo sapiens
  CDR3 for alpha chain variable domain of TCR clone 277864 (TRAV12-3, TRAJ17)
CAMKLTGNKLTF

SEQ ID NO: 555728 - protein, 16 aa, Homo sapiens
  CDR3 for beta chain variable domain of TCR clone 277864 (TRBV12-4, TRBJ2-5)
CASSFFVRGRQETQYF

SEQ ID NO: 555729 - protein, 23 aa, Homo sapiens
  CDR3 for alpha chain variable domain of TCR clone 277865 (TRAV26-1, TRAJ38)
CIADNAGNNHIQNPDPAVYQLRD

SEQ ID NO: 555730 - protein, 15 aa, Homo sapiens
  CDR3 for beta chain variable domain of TCR clone 277865 (TRBV27, TRBJ2-1)
CASSNGGGSSNEQFL

SEQ ID NO: 555731 - protein, 15 aa, Homo sapiens
  CDR3 for alpha chain variable domain of TCR clone 277866 (TRAV17, TRAJ4)
CATGMWSGGYNKLIF

SEQ ID NO: 555732 - protein, 13 aa, Homo sapiens
  CDR3 for beta chain variable domain of TCR clone 277866 (TRBV6-6, TRBJ2-7)
CASSPKHLAEQYF

SEQ ID NO: 555733 - protein, 13 aa, Homo sapiens
  CDR3 for alpha chain variable domain of TCR clone 277867 (TRAV13-2, TRAJ48)
CAEMDFGNEKLTF

SEQ ID NO: 555734 - protein, 15 aa, Homo sapiens
  CDR3 for beta chain variable domain of TCR clone 277867 (TRBV7-9, TRBJ1-6)
CASSSPGRGKSPHHF

SEQ ID NO: 555735 - protein, 14 aa, Homo sapiens
  CDR3 for alpha chain variable domain of TCR clone 277868 (TRAV1-2, TRAJ8)
CAVREDTGFQKLLF

SEQ ID NO: 555736 - protein, 15 aa, Homo sapiens
  CDR3 for beta chain variable domain of TCR clone 277868 (TRBV7-3, TRBJ2-2)
CASSETGQGTGELFF

SEQ ID NO: 555737 - protein, 15 aa, Homo sapiens
  CDR3 for alpha chain variable domain of TCR clone 277869 (TRAV4, TRAJ10)
CLVGDEEGGGNKLTF

SEQ ID NO: 555738 - protein, 17 aa, Homo sapiens
  CDR3 for beta chain variable domain of TCR clone 277869 (TRBV19, TRBJ2-6)
CASSTGQVFSGAKVLTF

SEQ ID NO: 555739 - protein, 14 aa, Homo sapiens
  CDR3 for alpha chain variable domain of TCR clone 277870 (TRAV36/DV7, TRAJ49)
CAVGDWNTGNQFYF

SEQ ID NO: 555740 - protein, 15 aa, Homo sapiens
  CDR3 for beta chain variable domain of TCR clone 277870 (TRBV11-2, TRBJ1-6)
CASSLDPWAVSPLHF

SEQ ID NO: 555741 - protein, 13 aa, Homo sapiens
  CDR3 for alpha chain variable domain of TCR clone 277871 (TRAV1-1, TRAJ23)
CAVVANQGGKLIF

SEQ ID NO: 555742 - protein, 16 aa, Homo sapiens
  CDR3 for beta chain variable domain of TCR clone 277871 (TRBV5-5, TRBJ1-2)
CASSPTWCRGLYGYTF

SEQ ID NO: 555743 - protein, 15 aa, Homo sapiens
  CDR3 for alpha chain variable domain of TCR clone 277872 (TRAV13-1, TRAJ17)
CAASIERAAGNKLTF

SEQ ID NO: 555744 - protein, 12 aa, Homo sapiens
  CDR3 for beta chain variable domain of TCR clone 277872 (TRBV11-2, TRBJ2-5)
CASSLGQETQYF

SEQ ID NO: 555745 - protein, 15 aa, Homo sapiens
  CDR3 for alpha chain variable domain of TCR clone 277873 (TRAV8-3, TRAJ15)
CAVGEANQAGTALIF

SEQ ID NO: 555746 - protein, 14 aa, Homo sapiens
  CDR3 for beta chain variable domain of TCR clone 277873 (TRBV20-1, TRBJ2-1)
CSPNDEASYNEQFF

SEQ ID NO: 555747 - protein, 15 aa, Homo sapiens
  CDR3 for alpha chain variable domain of TCR clone 277874 (TRAV12-3, TRAJ27)
CAMRAYNTNAGKSTF

SEQ ID NO: 555748 - protein, 15 aa, Homo sapiens
  CDR3 for beta chain variable domain of TCR clone 277874 (TRBV11-3, TRBJ2-7)
CASSPGPASSYEQYF

SEQ ID NO: 555749 - protein, 12 aa, Homo sapiens
  CDR3 for alpha chain variable domain of TCR clone 277875 (TRAV2, TRAJ34)
CAVERNTDKLIF

SEQ ID NO: 555750 - protein, 12 aa, Homo sapiens
  CDR3 for beta chain variable domain of TCR clone 277875 (TRBV11-2, TRBJ2-1)
CASSPGNNEQFF

SEQ ID NO: 555751 - protein, 17 aa, Homo sapiens
  CDR3 for alpha chain variable domain of TCR clone 277876 (TRAV3, TRAJ42)
CAVRDRDYGGSKGNLIF

SEQ ID NO: 555752 - protein, 13 aa, Homo sapiens
  CDR3 for beta chain variable domain of TCR clone 277876 (TRBV10-3, TRBJ2-7)
CASKLAVNYDQYF

SEQ ID NO: 555753 - protein, 19 aa, Homo sapiens
  CDR3 for alpha chain variable domain of TCR clone 277877 (TRAV26-1, TRAJ52)
FIVRAHRNAGGTSYGKLTF

SEQ ID NO: 555754 - protein, 13 aa, Homo sapiens
  CDR3 for beta chain variable domain of TCR clone 277877 (TRBV19, TRBJ2-7)
CASRKAGGSEQYF

SEQ ID NO: 555755 - protein, 14 aa, Homo sapiens
  CDR3 for alpha chain variable domain of TCR clone 277878 (TRAV13-1, TRAJ35)
CAASKGGFGNVLHC

SEQ ID NO: 555756 - protein, 13 aa, Homo sapiens
  CDR3 for beta chain variable domain of TCR clone 277878 (TRBV5-1, TRBJ1-5)
CASSLGAGQPQHF

SEQ ID NO: 555757 - protein, 14 aa, Homo sapiens
  CDR3 for alpha chain variable domain of TCR clone 277879 (TRAV12-3, TRAJ50)
CSMSPKTSYDKVIF

SEQ ID NO: 555758 - protein, 13 aa, Homo sapiens
  CDR3 for beta chain variable domain of TCR clone 277879 (TRBV11-2, TRBJ2-5)
CASSSTGEETQYF

SEQ ID NO: 555759 - protein, 12 aa, Homo sapiens
  CDR3 for alpha chain variable domain of TCR clone 277880 (TRAV8-3, TRAJ26)
CAGDNYGQNFFF

SEQ ID NO: 555760 - protein, 15 aa, Homo sapiens
  CDR3 for beta chain variable domain of TCR clone 277880 (TRBV9, TRBJ2-1)
CASSLAGSSYNEQLF

SEQ ID NO: 555761 - protein, 14 aa, Homo sapiens
  CDR3 for alpha chain variable domain of TCR clone 277881 (TRAV1-2, TRAJ16)
CAVNRFSDGQNLLF

SEQ ID NO: 555762 - protein, 16 aa, Homo sapiens
  CDR3 for beta chain variable domain of TCR clone 277881 (TRBV12-4, TRBJ1-5)
CASSRPVGGSNQPQHF

SEQ ID NO: 555763 - protein, 17 aa, Homo sapiens
  CDR3 for alpha chain variable domain of TCR clone 277882 (TRAV13-1, TRAJ28)
CAASPPYSGSGSYQLTF

SEQ ID NO: 555764 - protein, 13 aa, Homo sapiens
  CDR3 for beta chain variable domain of TCR clone 277882 (TRBV25-1, TRBJ2-2)
CASRKANTGELFF

SEQ ID NO: 555765 - protein, 20 aa, Homo sapiens
  CDR3 for alpha chain variable domain of TCR clone 277883 (TRAV25, TRAJ21)
TATQTTDVGTYPLSFNKFYF

SEQ ID NO: 555766 - protein, 14 aa, Homo sapiens
  CDR3 for beta chain variable domain of TCR clone 277883 (TRBV20-1, TRBJ2-7)
CSAPEPAGVGEQYF

SEQ ID NO: 555767 - protein, 14 aa, Homo sapiens
  CDR3 for alpha chain variable domain of TCR clone 277884 (TRAV12-3, TRAJ10)
SHLPLTGGGNKLTF

SEQ ID NO: 555768 - protein, 14 aa, Homo sapiens
  CDR3 for beta chain variable domain of TCR clone 277884 (TRBV19, TRBJ2-1)
CASPTFVVSGEQFF

SEQ ID NO: 555769 - protein, 13 aa, Homo sapiens
  CDR3 for alpha chain variable domain of TCR clone 277885 (TRAV12-2, TRAJ39)
CAVNNNAGKMLTF

SEQ ID NO: 555770 - protein, 13 aa, Homo sapiens
  CDR3 for beta chain variable domain of TCR clone 277885 (TRBV7-3, TRBJ2-5)
CASSFRGGETQYF

SEQ ID NO: 555771 - protein, 16 aa, Homo sapiens
  CDR3 for alpha chain variable domain of TCR clone 277886 (TRAV30, TRAJ24)
CGTEVVDADSSGKFQF

SEQ ID NO: 555772 - protein, 14 aa, Homo sapiens
  CDR3 for beta chain variable domain of TCR clone 277886 (TRBV12-5, TRBJ2-5)
CASGSRTHQETQYF

SEQ ID NO: 555773 - protein, 13 aa, Homo sapiens
  CDR3 for alpha chain variable domain of TCR clone 277887 (TRAV21, TRAJ37)
CAVSSSNTGKLIF

SEQ ID NO: 555774 - protein, 15 aa, Homo sapiens
  CDR3 for beta chain variable domain of TCR clone 277887 (TRBV12-4, TRBJ1-2)
CASSFVDRGNYGYTF

SEQ ID NO: 555775 - protein, 14 aa, Homo sapiens
  CDR3 for alpha chain variable domain of TCR clone 277888 (TRAV17, TRAJ56)
CATVPAGANSKLTF

SEQ ID NO: 555776 - protein, 16 aa, Homo sapiens
  CDR3 for beta chain variable domain of TCR clone 277888 (TRBV7-2, TRBJ2-7)
CASSLVMGVGSYEQYF

SEQ ID NO: 555777 - protein, 13 aa, Homo sapiens
  CDR3 for alpha chain variable domain of TCR clone 277889 (TRAV1-1, TRAJ9)
CAAKNTGGFKTIF

SEQ ID NO: 555778 - protein, 17 aa, Homo sapiens
  CDR3 for beta chain variable domain of TCR clone 277889 (TRBV15, TRBJ1-4)
CATSRYGTGDPNEKLFF

SEQ ID NO: 555779 - protein, 17 aa, Homo sapiens
  CDR3 for alpha chain variable domain of TCR clone 277890 (TRAV3, TRAJ6)
CAVRDGPRAGGNYIPTF

SEQ ID NO: 555780 - protein, 14 aa, Homo sapiens
  CDR3 for beta chain variable domain of TCR clone 277890 (TRBV7-2, TRBJ2-7)
CASSPKTSFYEQYI

SEQ ID NO: 555781 - protein, 14 aa, Homo sapiens
  CDR3 for alpha chain variable domain of TCR clone 277891 (TRAV13-1, TRAJ3)
CAASKSSSASKIIF

SEQ ID NO: 555782 - protein, 13 aa, Homo sapiens
  CDR3 for beta chain variable domain of TCR clone 277891 (TRBV25-1, TRBJ2-5)
CASSESGRETQYI

SEQ ID NO: 555783 - protein, 14 aa, Homo sapiens
  CDR3 for alpha chain variable domain of TCR clone 277892 (TRAV12-3, TRAJ9)
CAMSPNTGGFTTIF

SEQ ID NO: 555784 - protein, 12 aa, Homo sapiens
  CDR3 for beta chain variable domain of TCR clone 277892 (TRBV11-2, TRBJ2-2)
CASSLGGGELFF

SEQ ID NO: 555785 - protein, 13 aa, Homo sapiens
  CDR3 for alpha chain variable domain of TCR clone 277893 (TRAV2, TRAJ40)
CAVVTSGTYKYIV

SEQ ID NO: 555786 - protein, 14 aa, Homo sapiens
  CDR3 for beta chain variable domain of TCR clone 277893 (TRBV19, TRBJ2-1)
RASPTFVLSGEQFF

SEQ ID NO: 555787 - protein, 13 aa, Homo sapiens
  CDR3 for alpha chain variable domain of TCR clone 277894 (TRAV13-1, TRAJ48)
CAAASFGNEKLTF

SEQ ID NO: 555788 - protein, 13 aa, Homo sapiens
  CDR3 for beta chain variable domain of TCR clone 277894 (TRBV7-9, TRBJ1-2)
CASSLKQNYGYTF

SEQ ID NO: 555789 - protein, 15 aa, Homo sapiens
  CDR3 for alpha chain variable domain of TCR clone 277895 (TRAV38-1, TRAJ57)
CAFMDSQGGSEKLVF

SEQ ID NO: 555790 - protein, 16 aa, Homo sapiens
  CDR3 for beta chain variable domain of TCR clone 277895 (TRBV7-6, TRBJ2-1)
CASSPTSGRLYNEQFF

SEQ ID NO: 555791 - protein, 15 aa, Homo sapiens
  CDR3 for alpha chain variable domain of TCR clone 277896 (TRAV13-2, TRAJ16)
CAENDRFSDGQKLLF

SEQ ID NO: 555792 - protein, 13 aa, Homo sapiens
  CDR3 for beta chain variable domain of TCR clone 277896 (TRBV12-4, TRBJ2-2)
CASSITGSGELFF

SEQ ID NO: 555793 - protein, 15 aa, Homo sapiens
  CDR3 for alpha chain variable domain of TCR clone 277897 (TRAV8-4, TRAJ6)
CAVSAPSGGSYIPTF

SEQ ID NO: 555794 - protein, 15 aa, Homo sapiens
  CDR3 for beta chain variable domain of TCR clone 277897 (TRBV2, TRBJ2-1)
CASGEARSAYNEQFF

SEQ ID NO: 555795 - protein, 15 aa, Homo sapiens
  CDR3 for alpha chain variable domain of TCR clone 277898 (TRAV17, TRAJ4)
CATGTWSGCYNKLIF

SEQ ID NO: 555796 - protein, 15 aa, Homo sapiens
  CDR3 for beta chain variable domain of TCR clone 277898 (TRBV20-1, TRBJ2-7)
CSARDRVSGMDEQYF

SEQ ID NO: 555797 - protein, 14 aa, Homo sapiens
  CDR3 for alpha chain variable domain of TCR clone 277899 (TRAV8-6, TRAJ54)
CAVSRIQGAQKLVF

SEQ ID NO: 555798 - protein, 12 aa, Homo sapiens
  CDR3 for beta chain variable domain of TCR clone 277899 (TRBV7-2, TRBJ2-5)
CASSTGPGPQYF

SEQ ID NO: 555799 - protein, 15 aa, Homo sapiens
  CDR3 for alpha chain variable domain of TCR clone 277900 (TRAV29/DV5, TRAJ29)
CAASERSSGNTPLVF

SEQ ID NO: 555800 - protein, 16 aa, Homo sapiens
  CDR3 for beta chain variable domain of TCR clone 277900 (TRBV7-6, TRBJ2-1)
CIAVPAAWGGADEQFF

SEQ ID NO: 555801 - protein, 15 aa, Homo sapiens
  CDR3 for alpha chain variable domain of TCR clone 277901 (TRAV12-2, TRAJ53)
CAVNGGGGSNYNLTF

SEQ ID NO: 555802 - protein, 14 aa, Homo sapiens
  CDR3 for beta chain variable domain of TCR clone 277901 (TRBV18, TRBJ2-7)
CASSPRGGAYEQYF

SEQ ID NO: 555803 - protein, 13 aa, Homo sapiens
  CDR3 for alpha chain variable domain of TCR clone 277902 (TRAV3, TRAJ21)
CAVREPDFSKFYF

SEQ ID NO: 555804 - protein, 14 aa, Homo sapiens
  CDR3 for beta chain variable domain of TCR clone 277902 (TRBV4-1, TRBJ2-2)
CASSQAVNTGELFF

SEQ ID NO: 555805 - protein, 14 aa, Homo sapiens
  CDR3 for alpha chain variable domain of TCR clone 277903 (TRAV38-1, TRAJ28)
CAFTSGAGSYHLTF

SEQ ID NO: 555806 - protein, 18 aa, Homo sapiens
  CDR3 for beta chain variable domain of TCR clone 277903 (TRBV7-9, TRBJ1-1)
CASSKPWDTMGMNTEAFF

SEQ ID NO: 555807 - protein, 11 aa, Homo sapiens
  CDR3 for alpha chain variable domain of TCR clone 277904 (TRAV21, TRAJ11)
CAVNGYITLTF

SEQ ID NO: 555808 - protein, 16 aa, Homo sapiens
  CDR3 for beta chain variable domain of TCR clone 277904 (TRBV19, TRBJ2-1)
CASSKAGPSSYNEQFF

SEQ ID NO: 555809 - protein, 15 aa, Homo sapiens
  CDR3 for alpha chain variable domain of TCR clone 277905 (TRAV12-3, TRAJ6)
CAMSAASGGSYIPTF

SEQ ID NO: 555810 - protein, 13 aa, Homo sapiens
  CDR3 for beta chain variable domain of TCR clone 277905 (TRBV12-4, TRBJ1-1)
CASSPGTGFEAFF

SEQ ID NO: 555811 - protein, 14 aa, Homo sapiens
  CDR3 for alpha chain variable domain of TCR clone 277906 (TRAV13-2, TRAJ29)
CAEGTFETTTPLVF

SEQ ID NO: 555812 - protein, 13 aa, Homo sapiens
  CDR3 for beta chain variable domain of TCR clone 277906 (TRBV2, TRBJ1-1)
CASNLLRNTEAFF

SEQ ID NO: 555813 - protein, 14 aa, Homo sapiens
  CDR3 for alpha chain variable domain of TCR clone 277907 (TRAV1-2, TRAJ16)
CAVNRFSDGQKLLF

SEQ ID NO: 555814 - protein, 17 aa, Homo sapiens
  CDR3 for beta chain variable domain of TCR clone 277907 (TRBV7-9, TRBJ1-6)
CASSSPGREIHPSTLGT

SEQ ID NO: 555815 - protein, 14 aa, Homo sapiens
  CDR3 for alpha chain variable domain of TCR clone 277908 (TRAV8-1, TRAJ5)
CAVRTDTGRRARTF

SEQ ID NO: 555816 - protein, 14 aa, Homo sapiens
  CDR3 for beta chain variable domain of TCR clone 277908 (TRBV7-8, TRBJ2-3)
CASSFPDGQDTQYF

SEQ ID NO: 555817 - protein, 14 aa, Homo sapiens
  CDR3 for alpha chain variable domain of TCR clone 277909 (TRAV12-2, TRAJ11)
CAVNRESGYITLTF

SEQ ID NO: 555818 - protein, 10 aa, Homo sapiens
  CDR3 for beta chain variable domain of TCR clone 277909 (TRBV20-1, TRBJ2-5)
CSARFETQYF

SEQ ID NO: 555819 - protein, 14 aa, Homo sapiens
  CDR3 for alpha chain variable domain of TCR clone 277910 (TRAV12-2, TRAJ44)
CAVNKAGTASNLTF

SEQ ID NO: 555820 - protein, 12 aa, Homo sapiens
  CDR3 for beta chain variable domain of TCR clone 277910 (TRBV19, TRBJ1-4)
CASKDWPGGLFF

SEQ ID NO: 555821 - protein, 15 aa, Homo sapiens
  CDR3 for alpha chain variable domain of TCR clone 277911 (TRAV4, TRAJ39)
CLVGPNNNAGNMITF

SEQ ID NO: 555822 - protein, 13 aa, Homo sapiens
  CDR3 for beta chain variable domain of TCR clone 277911 (TRBV11-2, TRBJ2-5)
CASSSTGEETQYV

SEQ ID NO: 555823 - protein, 12 aa, Homo sapiens
  CDR3 for alpha chain variable domain of TCR clone 277912 (TRAV12-3, TRAJ34)
CAMGYNTDKLIF

SEQ ID NO: 555824 - protein, 14 aa, Homo sapiens
  CDR3 for beta chain variable domain of TCR clone 277912 (TRBV18, TRBJ2-1)
CASSPQGRFNEQFF

SEQ ID NO: 555825 - protein, 16 aa, Homo sapiens
  CDR3 for alpha chain variable domain of TCR clone 277913 (TRAV12-3, TRAJ53)
CAMSPGSGGSNYKPTF

SEQ ID NO: 555826 - protein, 16 aa, Homo sapiens
  CDR3 for beta chain variable domain of TCR clone 277913 (TRBV4-2, TRBJ1-1)
CANSQAGFGMNTEAFF

SEQ ID NO: 555827 - protein, 15 aa, Homo sapiens
  CDR3 for alpha chain variable domain of TCR clone 277914 (TRAV12-2, TRAJ53)
CAVNGGGGSNYKLTF

SEQ ID NO: 555828 - protein, 12 aa, Homo sapiens
  CDR3 for beta chain variable domain of TCR clone 277914 (TRBV7-6, TRBJ2-5)
CASSFSQETQYF

SEQ ID NO: 555829 - protein, 14 aa, Homo sapiens
  CDR3 for alpha chain variable domain of TCR clone 277915 (TRAV1-2, TRAJ8)
CAVREDTGFQKLVF

SEQ ID NO: 555830 - protein, 16 aa, Homo sapiens
  CDR3 for beta chain variable domain of TCR clone 277915 (TRBV12-4, TRBJ1-5)
CASSRPVGGSKQPQHF

SEQ ID NO: 555831 - protein, 14 aa, Homo sapiens
  CDR3 for alpha chain variable domain of TCR clone 277916 (TRAV12-3, TRAJ10)
SHLPLTGGGNKLTF

SEQ ID NO: 555832 - protein, 15 aa, Homo sapiens
  CDR3 for beta chain variable domain of TCR clone 277916 (TRBV7-9, TRBJ1-6)
CAGSSPGRGNSPLHF

SEQ ID NO: 555833 - protein, 12 aa, Homo sapiens
  CDR3 for alpha chain variable domain of TCR clone 277917 (TRAV16, TRAJ10)
CSRTGGGNELTF

SEQ ID NO: 555834 - protein, 14 aa, Homo sapiens
  CDR3 for beta chain variable domain of TCR clone 277917 (TRBV12-4, TRBJ1-1)
CASSFDRVNTEAFF

SEQ ID NO: 555835 - protein, 14 aa, Homo sapiens
  CDR3 for alpha chain variable domain of TCR clone 277918 (TRAV14/DV4, TRAJ57)
CAMREEGGSEKLVF

SEQ ID NO: 555836 - protein, 14 aa, Homo sapiens
  CDR3 for beta chain variable domain of TCR clone 277918 (TRBV11-2, TRBJ1-5)
CASSLDRGRQPQHF

SEQ ID NO: 555837 - protein, 15 aa, Homo sapiens
  CDR3 for alpha chain variable domain of TCR clone 277919 (TRAV2, TRAJ9)
CAVEDRGTGGFKTIF

SEQ ID NO: 555838 - protein, 13 aa, Homo sapiens
  CDR3 for beta chain variable domain of TCR clone 277919 (TRBV18, TRBJ2-5)
CASSLQGQETQYF

SEQ ID NO: 555839 - protein, 16 aa, Homo sapiens
  CDR3 for alpha chain variable domain of TCR clone 277920 (TRAV3, TRAJ10)
CAVRAMRAGGGNKLTF

SEQ ID NO: 555840 - protein, 15 aa, Homo sapiens
  CDR3 for beta chain variable domain of TCR clone 277920 (TRBV11-2, TRBJ1-6)
CACTGFGTAVSPLHF

SEQ ID NO: 555841 - protein, 16 aa, Homo sapiens
  CDR3 for alpha chain variable domain of TCR clone 277921 (TRAV30, TRAJ24)
CGTEIVDANSWGKFQF

SEQ ID NO: 555842 - protein, 15 aa, Homo sapiens
  CDR3 for beta chain variable domain of TCR clone 277921 (TRBV15, TRBJ1-5)
CATSRDPVSNQPQHF

SEQ ID NO: 555843 - protein, 14 aa, Homo sapiens
  CDR3 for alpha chain variable domain of TCR clone 277922 (TRAV12-2, TRAJ13)
CAVKKTGGYQKVTF

SEQ ID NO: 555844 - protein, 15 aa, Homo sapiens
  CDR3 for beta chain variable domain of TCR clone 277922 (TRBV11-2, TRBJ2-2)
CASSSDRVNAGEPFF

SEQ ID NO: 555845 - protein, 14 aa, Homo sapiens
  CDR3 for alpha chain variable domain of TCR clone 277923 (TRAV8-4, TRAJ29)
CAVSAVEGNTPLVF

SEQ ID NO: 555846 - protein, 15 aa, Homo sapiens
  CDR3 for beta chain variable domain of TCR clone 277923 (TRBV20-1, TRBJ2-7)
CSARDRVPGMDEQYF

SEQ ID NO: 555847 - protein, 12 aa, Homo sapiens
  CDR3 for alpha chain variable domain of TCR clone 277924 (TRAV27, TRAJ36)
ASTLAGANNLFF

SEQ ID NO: 555848 - protein, 13 aa, Homo sapiens
  CDR3 for beta chain variable domain of TCR clone 277924 (TRBV7-9, TRBJ2-3)
CASSPGSTDTQYF

SEQ ID NO: 555849 - protein, 16 aa, Homo sapiens
  CDR3 for alpha chain variable domain of TCR clone 277925 (TRAV26-1, TRAJ53)
CIVRVAMGGSNYKLTF

SEQ ID NO: 555850 - protein, 13 aa, Homo sapiens
  CDR3 for beta chain variable domain of TCR clone 277925 (TRBV18, TRBJ2-7)
CQLTERGAYEQYF

SEQ ID NO: 555851 - protein, 22 aa, Homo sapiens
  CDR3 for alpha chain variable domain of TCR clone 277926 (TRAV3, TRAJ38)
CAVRDCLNAGNNHIQNPDPAVY

SEQ ID NO: 555852 - protein, 17 aa, Homo sapiens
  CDR3 for beta chain variable domain of TCR clone 277926 (TRBV7-9, TRBJ2-6)
CASSFGAGYSGANVLTF

SEQ ID NO: 555853 - protein, 13 aa, Homo sapiens
  CDR3 for alpha chain variable domain of TCR clone 277927 (TRAV26-2, TRAJ54)
CIPRVGGAQKLVF

SEQ ID NO: 555854 - protein, 16 aa, Homo sapiens
  CDR3 for beta chain variable domain of TCR clone 277927 (TRBV4-1, TRBJ1-1)
CASSSMSELPNTEAFF

SEQ ID NO: 555855 - protein, 21 aa, Homo sapiens
  CDR3 for alpha chain variable domain of TCR clone 277928 (TRAV1-1, TRAJ6)
CRLLLRCERLERTGESYIPTF

SEQ ID NO: 555856 - protein, 13 aa, Homo sapiens
  CDR3 for beta chain variable domain of TCR clone 277928 (TRBV10-2, TRBJ2-7)
CASGASGGYEQYF

SEQ ID NO: 555857 - protein, 16 aa, Homo sapiens
  CDR3 for alpha chain variable domain of TCR clone 277929 (TRAV38-1, TRAJ32)
CAFMKGGGGPTNKLIF

SEQ ID NO: 555858 - protein, 13 aa, Homo sapiens
  CDR3 for beta chain variable domain of TCR clone 277929 (TRBV20-1, TRBJ2-5)
CSAREAFQETQYF

SEQ ID NO: 555859 - protein, 11 aa, Homo sapiens
  CDR3 for alpha chain variable domain of TCR clone 277930 (TRAV13-1, TRAJ11)
CAARGYSTLTF

SEQ ID NO: 555860 - protein, 12 aa, Homo sapiens
  CDR3 for beta chain variable domain of TCR clone 277930 (TRBV28, TRBJ2-6)
CAIQAGANVLTF

SEQ ID NO: 555861 - protein, 16 aa, Homo sapiens
  CDR3 for alpha chain variable domain of TCR clone 277931 (TRAV26-1, TRAJ32)
CIVRTNYGGATNKLIF

SEQ ID NO: 555862 - protein, 20 aa, Homo sapiens
  CDR3 for beta chain variable domain of TCR clone 277931 (TRBV7-8, TRBJ2-2)
CASSHLFLGPTIHITGELFF

SEQ ID NO: 555863 - protein, 16 aa, Homo sapiens
  CDR3 for alpha chain variable domain of TCR clone 277932 (TRAV8-3, TRAJ13)
CAVGAYPSGGYQKVTF

SEQ ID NO: 555864 - protein, 16 aa, Homo sapiens
  CDR3 for beta chain variable domain of TCR clone 277932 (TRBV11-2, TRBJ2-1)
CASARGSYSHHNEQFF

SEQ ID NO: 555865 - protein, 13 aa, Homo sapiens
  CDR3 for alpha chain variable domain of TCR clone 277933 (TRAV21, TRAJ27)
CAARPGNAGTSTF

SEQ ID NO: 555866 - protein, 16 aa, Homo sapiens
  CDR3 for beta chain variable domain of TCR clone 277933 (TRBV20-1, TRBJ1-2)
CSASMGQGVANYGYTF

SEQ ID NO: 555867 - protein, 14 aa, Homo sapiens
  CDR3 for alpha chain variable domain of TCR clone 277934 (TRAV21, TRAJ23)
CAVSLYNQGGKLIF

SEQ ID NO: 555868 - protein, 12 aa, Homo sapiens
  CDR3 for beta chain variable domain of TCR clone 277934 (TRBV11-2, TRBJ2-2)
CASSLGGGELFF

SEQ ID NO: 555869 - protein, 13 aa, Homo sapiens
  CDR3 for alpha chain variable domain of TCR clone 277935 (TRAV3, TRAJ21)
CAVREPAFNKFYF

SEQ ID NO: 555870 - protein, 15 aa, Homo sapiens
  CDR3 for beta chain variable domain of TCR clone 277935 (TRBV9, TRBJ1-6)
CASSVAGTGDSPLHF

SEQ ID NO: 555871 - protein, 13 aa, Homo sapiens
  CDR3 for alpha chain variable domain of TCR clone 277936 (TRAV12-3, TRAJ13)
CAMTSGSYQKVTF

SEQ ID NO: 555872 - protein, 13 aa, Homo sapiens
  CDR3 for beta chain variable domain of TCR clone 277936 (TRBV7-9, TRBJ1-2)
CASSLKQNYGYTF

SEQ ID NO: 555873 - protein, 16 aa, Homo sapiens
  CDR3 for alpha chain variable domain of TCR clone 277937 (TRAV3, TRAJ37)
CAVRGKGSGNLGKLIF

SEQ ID NO: 555874 - protein, 15 aa, Homo sapiens
  CDR3 for beta chain variable domain of TCR clone 277937 (TRBV9, TRBJ1-4)
CASSVGGSTNEKLFF

SEQ ID NO: 555875 - protein, 14 aa, Homo sapiens
  CDR3 for alpha chain variable domain of TCR clone 277938 (TRAV2, TRAJ29)
TAVLRNSGNTPLVF

SEQ ID NO: 555876 - protein, 16 aa, Homo sapiens
  CDR3 for beta chain variable domain of TCR clone 277938 (TRBV7-9, TRBJ1-2)
CASSPGGGAINYGYTF

SEQ ID NO: 555877 - protein, 12 aa, Homo sapiens
  CDR3 for alpha chain variable domain of TCR clone 277939 (TRAV26-1, TRAJ53)
CIEGGSNYKLTF

SEQ ID NO: 555878 - protein, 15 aa, Homo sapiens
  CDR3 for beta chain variable domain of TCR clone 277939 (TRBV5-1, TRBJ2-2)
CASSLLQGRPGELFF

SEQ ID NO: 555879 - protein, 12 aa, Homo sapiens
  CDR3 for alpha chain variable domain of TCR clone 277940 (TRAV17, TRAJ39)
CATGAAGNMLTF

SEQ ID NO: 555880 - protein, 16 aa, Homo sapiens
  CDR3 for beta chain variable domain of TCR clone 277940 (TRBV6-1, TRBJ2-5)
CASSETLDRGAETQYF

SEQ ID NO: 555881 - protein, 15 aa, Homo sapiens
  CDR3 for alpha chain variable domain of TCR clone 277941 (TRAV35, TRAJ42)
CAGQGYGGCQGNLIF

SEQ ID NO: 555882 - protein, 13 aa, Homo sapiens
  CDR3 for beta chain variable domain of TCR clone 277941 (TRBV7-2, TRBJ1-1)
CASSLVQGAEAVF

SEQ ID NO: 555883 - protein, 17 aa, Homo sapiens
  CDR3 for alpha chain variable domain of TCR clone 277942 (TRAV3, TRAJ6)
CAVRDGPRAGGSLIPTF

SEQ ID NO: 555884 - protein, 14 aa, Homo sapiens
  CDR3 for beta chain variable domain of TCR clone 277942 (TRBV7-2, TRBJ2-7)
CASSPKTSFYEQYF

SEQ ID NO: 555885 - protein, 12 aa, Homo sapiens
  CDR3 for alpha chain variable domain of TCR clone 277943 (TRAV35, TRAJ49)
CAGWNTGNQFYF

SEQ ID NO: 555886 - protein, 16 aa, Homo sapiens
  CDR3 for beta chain variable domain of TCR clone 277943 (TRBV5-1, TRBJ2-2)
WASSLWDTTNTGELFF

SEQ ID NO: 555887 - protein, 12 aa, Homo sapiens
  CDR3 for alpha chain variable domain of TCR clone 277944 (TRAV8-3, TRAJ20)
CAVDFIDYKLSF

SEQ ID NO: 555888 - protein, 17 aa, Homo sapiens
  CDR3 for beta chain variable domain of TCR clone 277944 (TRBV7-8, TRBJ2-6)
CASSAGTGGAGANVLTF

SEQ ID NO: 555889 - protein, 15 aa, Homo sapiens
  CDR3 for alpha chain variable domain of TCR clone 277945 (TRAV12-1, TRAJ44)
CVVFVNTGTASKLTF

SEQ ID NO: 555890 - protein, 12 aa, Homo sapiens
  CDR3 for beta chain variable domain of TCR clone 277945 (TRBV28, TRBJ2-3)
CASSLYRDTQYF

SEQ ID NO: 555891 - protein, 14 aa, Homo sapiens
  CDR3 for alpha chain variable domain of TCR clone 277946 (TRAV13-1, TRAJ29)
CAASANSGNTTLVF

SEQ ID NO: 555892 - protein, 15 aa, Homo sapiens
  CDR3 for beta chain variable domain of TCR clone 277946 (TRBV20-1, TRBJ2-7)
CSARDRVSGMDEQYF

SEQ ID NO: 555893 - protein, 13 aa, Homo sapiens
  CDR3 for alpha chain variable domain of TCR clone 277947 (TRAV13-1, TRAJ13)
CAASKGGYQEVTF

SEQ ID NO: 555894 - protein, 16 aa, Homo sapiens
  CDR3 for beta chain variable domain of TCR clone 277947 (TRBV18, TRBJ1-2)
CASSPPERVTIYGYTF

SEQ ID NO: 555895 - protein, 12 aa, Homo sapiens
  CDR3 for alpha chain variable domain of TCR clone 277948 (TRAV1-1, TRAJ9)
CAVDTGGFKTIF

SEQ ID NO: 555896 - protein, 14 aa, Homo sapiens
  CDR3 for beta chain variable domain of TCR clone 277948 (TRBV7-8, TRBJ2-5)
CASSATGGQEAQYF

SEQ ID NO: 555897 - protein, 15 aa, Homo sapiens
  CDR3 for alpha chain variable domain of TCR clone 277949 (TRAV14/DV4, TRAJ9)
CAMREGNTGGFKTIF

SEQ ID NO: 555898 - protein, 16 aa, Homo sapiens
  CDR3 for beta chain variable domain of TCR clone 277949 (TRBV13, TRBJ2-5)
CASSRGAGIRQETQYF

SEQ ID NO: 555899 - protein, 14 aa, Homo sapiens
  CDR3 for alpha chain variable domain of TCR clone 277950 (TRAV13-1, TRAJ40)
CAASMTSGTYKYIF

SEQ ID NO: 555900 - protein, 20 aa, Homo sapiens
  CDR3 for beta chain variable domain of TCR clone 277950 (TRBV28, TRBJ2-1)
CASTPIGRSPGLAGGNEQFF

SEQ ID NO: 555901 - protein, 21 aa, Homo sapiens
  CDR3 for alpha chain variable domain of TCR clone 277951 (TRAV29/DV5, TRAJ52)
CSVLLCSKREAGGTSYGKLTF

SEQ ID NO: 555902 - protein, 15 aa, Homo sapiens
  CDR3 for beta chain variable domain of TCR clone 277951 (TRBV6-1, TRBJ2-1)
CASSELRGQYNEQVF

SEQ ID NO: 555903 - protein, 10 aa, Homo sapiens
  CDR3 for alpha chain variable domain of TCR clone 277952 (TRAV30, TRAJ48)
CGIGNEKLTF

SEQ ID NO: 555904 - protein, 14 aa, Homo sapiens
  CDR3 for beta chain variable domain of TCR clone 277952 (TRBV7-6, TRBJ2-3)
CASSVAGRTDTQYF

SEQ ID NO: 555905 - protein, 15 aa, Homo sapiens
  CDR3 for alpha chain variable domain of TCR clone 277953 (TRAV38-1, TRAJ37)
CAFIFGSGNTGKLIF

SEQ ID NO: 555906 - protein, 16 aa, Homo sapiens
  CDR3 for beta chain variable domain of TCR clone 277953 (TRBV12-4, TRBJ1-5)
CASRQPVEGSTQHQHF

SEQ ID NO: 555907 - protein, 16 aa, Homo sapiens
  CDR3 for alpha chain variable domain of TCR clone 277954 (TRAV8-3, TRAJ13)
CAVGAYPSGGYQKVIF

SEQ ID NO: 555908 - protein, 15 aa, Homo sapiens
  CDR3 for beta chain variable domain of TCR clone 277954 (TRBV19, TRBJ1-5)
CASSIVWADKQPQHF

SEQ ID NO: 555909 - protein, 15 aa, Homo sapiens
  CDR3 for alpha chain variable domain of TCR clone 277955 (TRAV21, TRAJ24)
CAARSSTDSWGKLQF

SEQ ID NO: 555910 - protein, 14 aa, Homo sapiens
  CDR3 for beta chain variable domain of TCR clone 277955 (TRBV12-4, TRBJ2-5)
CASSAGLVSETQYF

SEQ ID NO: 555911 - protein, 11 aa, Homo sapiens
  CDR3 for alpha chain variable domain of TCR clone 277956 (TRAV3, TRAJ17)
PRGAAGNKLPF

SEQ ID NO: 555912 - protein, 12 aa, Homo sapiens
  CDR3 for beta chain variable domain of TCR clone 277956 (TRBV11-2, TRBJ2-2)
CASSLGGGELFF

SEQ ID NO: 555913 - protein, 12 aa, Homo sapiens
  CDR3 for alpha chain variable domain of TCR clone 277957 (TRAV12-2, TRAJ8)
CAVATGFQKLVF

SEQ ID NO: 555914 - protein, 12 aa, Homo sapiens
  CDR3 for beta chain variable domain of TCR clone 277957 (TRBV14, TRBJ1-1)
CASSQLKGLAFF

SEQ ID NO: 555915 - protein, 14 aa, Homo sapiens
  CDR3 for alpha chain variable domain of TCR clone 277958 (TRAV12-2, TRAJ5)
CAVSRSTGGRALTF

SEQ ID NO: 555916 - protein, 12 aa, Homo sapiens
  CDR3 for beta chain variable domain of TCR clone 277958 (TRBV19, TRBJ1-5)
CASSTAQQPQHF

SEQ ID NO: 555917 - protein, 13 aa, Homo sapiens
  CDR3 for alpha chain variable domain of TCR clone 277959 (TRAV2, TRAJ15)
CAVASQAGAALLF

SEQ ID NO: 555918 - protein, 16 aa, Homo sapiens
  CDR3 for beta chain variable domain of TCR clone 277959 (TRBV5-1, TRBJ1-1)
CASSSGGNSLNTEAFF

SEQ ID NO: 555919 - protein, 16 aa, Homo sapiens
  CDR3 for alpha chain variable domain of TCR clone 277960 (TRAV8-1, TRAJ39)
CAVNVPSYNAGNMLTF

SEQ ID NO: 555920 - protein, 15 aa, Homo sapiens
  CDR3 for beta chain variable domain of TCR clone 277960 (TRBV4-1, TRBJ2-3)
CASRSTRAGTETQYF

SEQ ID NO: 555921 - protein, 12 aa, Homo sapiens
  CDR3 for alpha chain variable domain of TCR clone 277961 (TRAV3, TRAJ36)
CAVRDGTGQTTS

SEQ ID NO: 555922 - protein, 16 aa, Homo sapiens
  CDR3 for beta chain variable domain of TCR clone 277961 (TRBV7-3, TRBJ2-5)
CASIQPGGSVQETQYF

SEQ ID NO: 555923 - protein, 14 aa, Homo sapiens
  CDR3 for alpha chain variable domain of TCR clone 277962 (TRAV1-2, TRAJ16)
CAVNRFSDGQKLLF

SEQ ID NO: 555924 - protein, 13 aa, Homo sapiens
  CDR3 for beta chain variable domain of TCR clone 277962 (TRBV7-3, TRBJ1-1)
CASSQDWGAEAFF

SEQ ID NO: 555925 - protein, 13 aa, Homo sapiens
  CDR3 for alpha chain variable domain of TCR clone 277963 (TRAV12-2, TRAJ23)
CAVMGNQGGKLIF

SEQ ID NO: 555926 - protein, 14 aa, Homo sapiens
  CDR3 for beta chain variable domain of TCR clone 277963 (TRBV25-1, TRBJ1-1)
CASTHLGGNTEAFF

SEQ ID NO: 555927 - protein, 13 aa, Homo sapiens
  CDR3 for alpha chain variable domain of TCR clone 277964 (TRAV2, TRAJ40)
CAAVTSGTYKYIF

SEQ ID NO: 555928 - protein, 16 aa, Homo sapiens
  CDR3 for beta chain variable domain of TCR clone 277964 (TRBV19, TRBJ2-2)
CASRSPGTGATGELFF

SEQ ID NO: 555929 - protein, 18 aa, Homo sapiens
  CDR3 for alpha chain variable domain of TCR clone 277965 (TRAV26-1, TRAJ23)
CIVRVGLEVWNQGGKLIF

SEQ ID NO: 555930 - protein, 12 aa, Homo sapiens
  CDR3 for beta chain variable domain of TCR clone 277965 (TRBV12-4, TRBJ2-1)
CASSPGRNEQFF

SEQ ID NO: 555931 - protein, 12 aa, Homo sapiens
  CDR3 for alpha chain variable domain of TCR clone 277966 (TRAV21, TRAJ29)
CAVTSGNTPLVF

SEQ ID NO: 555932 - protein, 14 aa, Homo sapiens
  CDR3 for beta chain variable domain of TCR clone 277966 (TRBV7-3, TRBJ2-1)
CASSLSGSYNEQFF

SEQ ID NO: 555933 - protein, 14 aa, Homo sapiens
  CDR3 for alpha chain variable domain of TCR clone 277967 (TRAV26-1, TRAJ48)
CIVRVGFGNATLTF

SEQ ID NO: 555934 - protein, 13 aa, Homo sapiens
  CDR3 for beta chain variable domain of TCR clone 277967 (TRBV11-3, TRBJ2-3)
CASSHDTKDTQYF

SEQ ID NO: 555935 - protein, 19 aa, Homo sapiens
  CDR3 for alpha chain variable domain of TCR clone 277968 (TRAV26-1, TRAJ52)
CIVRAYRNAGGTSYGKLTF

SEQ ID NO: 555936 - protein, 15 aa, Homo sapiens
  CDR3 for beta chain variable domain of TCR clone 277968 (TRBV29-1, TRBJ2-1)
CSGRDRKSSYNEQFF

SEQ ID NO: 555937 - protein, 11 aa, Homo sapiens
  CDR3 for alpha chain variable domain of TCR clone 277969 (TRAV12-3, TRAJ43)
CAMSVSNDMRF

SEQ ID NO: 555938 - protein, 13 aa, Homo sapiens
  CDR3 for beta chain variable domain of TCR clone 277969 (TRBV15, TRBJ1-6)
CATSGGLNSPLHF

SEQ ID NO: 555939 - protein, 16 aa, Homo sapiens
  CDR3 for alpha chain variable domain of TCR clone 277970 (TRAV3, TRAJ28)
CAVLPRSGAGSYQLTF

SEQ ID NO: 555940 - protein, 13 aa, Homo sapiens
  CDR3 for beta chain variable domain of TCR clone 277970 (TRBV9, TRBJ2-1)
CASSVGQGGEQFF

SEQ ID NO: 555941 - protein, 15 aa, Homo sapiens
  CDR3 for alpha chain variable domain of TCR clone 277971 (TRAV3, TRAJ45)
CAVRTPWGGADGLTF

SEQ ID NO: 555942 - protein, 14 aa, Homo sapiens
  CDR3 for beta chain variable domain of TCR clone 277971 (TRBV7-9, TRBJ2-5)
CASSLVGGEETQYF

SEQ ID NO: 555943 - protein, 14 aa, Homo sapiens
  CDR3 for alpha chain variable domain of TCR clone 277972 (TRAV12-1, TRAJ22)
CVVTTSGSARQLTF

SEQ ID NO: 555944 - protein, 15 aa, Homo sapiens
  CDR3 for beta chain variable domain of TCR clone 277972 (TRBV5-1, TRBJ2-2)
CASSSQGGNTGELFF

SEQ ID NO: 555945 - protein, 14 aa, Homo sapiens
  CDR3 for alpha chain variable domain of TCR clone 277973 (TRAV13-1, TRAJ10)
FAALFTGGGNKLTF

SEQ ID NO: 555946 - protein, 15 aa, Homo sapiens
  CDR3 for beta chain variable domain of TCR clone 277973 (TRBV10-3, TRBJ2-2)
CAISEGDRAAGELFF

SEQ ID NO: 555947 - protein, 14 aa, Homo sapiens
  CDR3 for alpha chain variable domain of TCR clone 277974 (TRAV3, TRAJ8)
CAVSLNTAFQKLVF

SEQ ID NO: 555948 - protein, 14 aa, Homo sapiens
  CDR3 for beta chain variable domain of TCR clone 277974 (TRBV6-6, TRBJ1-5)
CASVDSGFNQPQHF

SEQ ID NO: 555949 - protein, 15 aa, Homo sapiens
  CDR3 for alpha chain variable domain of TCR clone 277975 (TRAV26-1, TRAJ47)
CIVRPAGEYGNKLVF

SEQ ID NO: 555950 - protein, 14 aa, Homo sapiens
  CDR3 for beta chain variable domain of TCR clone 277975 (TRBV20-1, TRBJ2-7)
CSAPELAGVGEQYF

SEQ ID NO: 555951 - protein, 10 aa, Homo sapiens
  CDR3 for alpha chain variable domain of TCR clone 277976 (TRAV1-2, TRAJ23)
CDAWAGKLIF

SEQ ID NO: 555952 - protein, 14 aa, Homo sapiens
  CDR3 for beta chain variable domain of TCR clone 277976 (TRBV20-1, TRBJ2-7)
CSAKTGTGGYEQYF

SEQ ID NO: 555953 - protein, 15 aa, Homo sapiens
  CDR3 for alpha chain variable domain of TCR clone 277977 (TRAV17, TRAJ57)
CATGPSQGGSEKLVF

SEQ ID NO: 555954 - protein, 15 aa, Homo sapiens
  CDR3 for beta chain variable domain of TCR clone 277977 (TRBV12-4, TRBJ1-5)
CQQPTGGGSNQPQHF

SEQ ID NO: 555955 - protein, 13 aa, Homo sapiens
  CDR3 for alpha chain variable domain of TCR clone 277978 (TRAV26-2, TRAJ43)
CILRAVNNNDMRF

SEQ ID NO: 555956 - protein, 13 aa, Homo sapiens
  CDR3 for beta chain variable domain of TCR clone 277978 (TRBV14, TRBJ2-1)
CASSQDGRNEQFF

SEQ ID NO: 555957 - protein, 15 aa, Homo sapiens
  CDR3 for alpha chain variable domain of TCR clone 277979 (TRAV8-3, TRAJ45)
CASSYSGGGADGLTF

SEQ ID NO: 555958 - protein, 14 aa, Homo sapiens
  CDR3 for beta chain variable domain of TCR clone 277979 (TRBV11-1, TRBJ2-7)
CASSFRQGSYEQYF

SEQ ID NO: 555959 - protein, 11 aa, Homo sapiens
  CDR3 for alpha chain variable domain of TCR clone 277980 (TRAV3, TRAJ17)
PRGAGGNKLTF

SEQ ID NO: 555960 - protein, 16 aa, Homo sapiens
  CDR3 for beta chain variable domain of TCR clone 277980 (TRBV7-6, TRBJ2-1)
CASSAPGPSSYNEQFF

SEQ ID NO: 555961 - protein, 14 aa, Homo sapiens
  CDR3 for alpha chain variable domain of TCR clone 277981 (TRAV13-1, TRAJ35)
CAASKGGFGNVLHC

SEQ ID NO: 555962 - protein, 12 aa, Homo sapiens
  CDR3 for beta chain variable domain of TCR clone 277981 (TRBV11-2, TRBJ2-2)
CASSLGGGGLFF

SEQ ID NO: 555963 - protein, 15 aa, Homo sapiens
  CDR3 for alpha chain variable domain of TCR clone 277982 (TRAV13-1, TRAJ16)
CAARYQMDRSCSLQG

SEQ ID NO: 555964 - protein, 13 aa, Homo sapiens
  CDR3 for beta chain variable domain of TCR clone 277982 (TRBV6-4, TRBJ2-3)
CASSVSWADTQYF

SEQ ID NO: 555965 - protein, 17 aa, Homo sapiens
  CDR3 for alpha chain variable domain of TCR clone 277983 (TRAV16, TRAJ42)
FALSPKLYVGSQGNLIF

SEQ ID NO: 555966 - protein, 13 aa, Homo sapiens
  CDR3 for beta chain variable domain of TCR clone 277983 (TRBV19, TRBJ1-5)
CASSTRRDQPQHF

SEQ ID NO: 555967 - protein, 13 aa, Homo sapiens
  CDR3 for alpha chain variable domain of TCR clone 277984 (TRAV12-3, TRAJ36)
CAMRRPGANNLFF

SEQ ID NO: 555968 - protein, 13 aa, Homo sapiens
  CDR3 for beta chain variable domain of TCR clone 277984 (TRBV19, TRBJ2-7)
CASSPRQSYEQYF

SEQ ID NO: 555969 - protein, 14 aa, Homo sapiens
  CDR3 for alpha chain variable domain of TCR clone 277985 (TRAV26-1, TRAJ48)
SIVRVGFGNEKLTF

SEQ ID NO: 555970 - protein, 14 aa, Homo sapiens
  CDR3 for beta chain variable domain of TCR clone 277985 (TRBV19, TRBJ2-1)
CASPTFVLSGEQFF

SEQ ID NO: 555971 - protein, 14 aa, Homo sapiens
  CDR3 for alpha chain variable domain of TCR clone 277986 (TRAV1-2, TRAJ16)
CAVNRFSDGPKLLF

SEQ ID NO: 555972 - protein, 14 aa, Homo sapiens
  CDR3 for beta chain variable domain of TCR clone 277986 (TRBV7-2, TRBJ2-7)
CASRSQGAAYEQYF

SEQ ID NO: 555973 - protein, 13 aa, Homo sapiens
  CDR3 for alpha chain variable domain of TCR clone 277987 (TRAV3, TRAJ29)
CAVRDWGNTTLGF

SEQ ID NO: 555974 - protein, 15 aa, Homo sapiens
  CDR3 for beta chain variable domain of TCR clone 277987 (TRBV12-4, TRBJ2-5)
CASIGRTGEGETQYF

SEQ ID NO: 555975 - protein, 15 aa, Homo sapiens
  CDR3 for alpha chain variable domain of TCR clone 277988 (TRAV21, TRAJ24)
CAARSSTDSWGKLPF

SEQ ID NO: 555976 - protein, 13 aa, Homo sapiens
  CDR3 for beta chain variable domain of TCR clone 277988 (TRBV11-2, TRBJ2-5)
CASSSTGEENQYF

SEQ ID NO: 555977 - protein, 15 aa, Homo sapiens
  CDR3 for alpha chain variable domain of TCR clone 277989 (TRAV3, TRAJ5)
CAVRDRKTGRRALTF

SEQ ID NO: 555978 - protein, 15 aa, Homo sapiens
  CDR3 for beta chain variable domain of TCR clone 277989 (TRBV7-8, TRBJ2-1)
CASSLADSLYNEQFC

SEQ ID NO: 555979 - protein, 18 aa, Homo sapiens
  CDR3 for alpha chain variable domain of TCR clone 277990 (TRAV21, TRAJ52)
CAVRPSPAGGTSYGKPTF

SEQ ID NO: 555980 - protein, 14 aa, Homo sapiens
  CDR3 for beta chain variable domain of TCR clone 277990 (TRBV7-2, TRBJ1-3)
CASSRLRSGNTIYF

SEQ ID NO: 555981 - protein, 14 aa, Homo sapiens
  CDR3 for alpha chain variable domain of TCR clone 277991 (TRAV34, TRAJ44)
CGADGTDTTSKLTF

SEQ ID NO: 555982 - protein, 13 aa, Homo sapiens
  CDR3 for beta chain variable domain of TCR clone 277991 (TRBV10-3, TRBJ2-7)
CASKLAVNYEQYF

SEQ ID NO: 555983 - protein, 13 aa, Homo sapiens
  CDR3 for alpha chain variable domain of TCR clone 277992 (TRAV8-3, TRAJ48)
CAVVPFGNEKLTF

SEQ ID NO: 555984 - protein, 14 aa, Homo sapiens
  CDR3 for beta chain variable domain of TCR clone 277992 (TRBV2, TRBJ2-1)
CASGLIVGHDEQFF

SEQ ID NO: 555985 - protein, 13 aa, Homo sapiens
  CDR3 for alpha chain variable domain of TCR clone 277993 (TRAV27, TRAJ41)
CAGEGNSGYAPNF

SEQ ID NO: 555986 - protein, 14 aa, Homo sapiens
  CDR3 for beta chain variable domain of TCR clone 277993 (TRBV7-2, TRBJ1-1)
CASSFLTGTTAAFF

SEQ ID NO: 555987 - protein, 13 aa, Homo sapiens
  CDR3 for alpha chain variable domain of TCR clone 277994 (TRAV12-3, TRAJ41)
CAIAPNSGYALNF

SEQ ID NO: 555988 - protein, 13 aa, Homo sapiens
  CDR3 for beta chain variable domain of TCR clone 277994 (TRBV7-3, TRBJ1-1)
CASSQDWGAEAFF

SEQ ID NO: 555989 - protein, 14 aa, Homo sapiens
  CDR3 for alpha chain variable domain of TCR clone 277995 (TRAV35, TRAJ13)
CAGSPSGGHQKVTF

SEQ ID NO: 555990 - protein, 13 aa, Homo sapiens
  CDR3 for beta chain variable domain of TCR clone 277995 (TRBV29-1, TRBJ1-1)
CSVGDSRNTEEFF

SEQ ID NO: 555991 - protein, 14 aa, Homo sapiens
  CDR3 for alpha chain variable domain of TCR clone 277996 (TRAV29/DV5, TRAJ54)
CAARSRGGAQKLAF

SEQ ID NO: 555992 - protein, 13 aa, Homo sapiens
  CDR3 for beta chain variable domain of TCR clone 277996 (TRBV27, TRBJ1-1)
CASSLSIGAEAFF

SEQ ID NO: 555993 - protein, 13 aa, Homo sapiens
  CDR3 for alpha chain variable domain of TCR clone 277997 (TRAV3, TRAJ27)
CAVRPLGAGKSTF

SEQ ID NO: 555994 - protein, 14 aa, Homo sapiens
  CDR3 for beta chain variable domain of TCR clone 277997 (TRBV25-1, TRBJ1-1)
CASTHLGGYTEAFF

SEQ ID NO: 555995 - protein, 12 aa, Homo sapiens
  CDR3 for alpha chain variable domain of TCR clone 277998 (TRAV29/DV5, TRAJ49)
CAALNTGNQFYF

SEQ ID NO: 555996 - protein, 14 aa, Homo sapiens
  CDR3 for beta chain variable domain of TCR clone 277998 (TRBV7-2, TRBJ1-1)
CASSFLTGTTEAFF

SEQ ID NO: 555997 - protein, 13 aa, Homo sapiens
  CDR3 for alpha chain variable domain of TCR clone 277999 (TRAV12-2, TRAJ50)
CAVIVTSYDKVIF

SEQ ID NO: 555998 - protein, 14 aa, Homo sapiens
  CDR3 for beta chain variable domain of TCR clone 277999 (TRBV9, TRBJ2-1)
CAISVDPRGKEQFF

SEQ ID NO: 555999 - protein, 16 aa, Homo sapiens
  CDR3 for alpha chain variable domain of TCR clone 278000 (TRAV21, TRAJ17)
CAVRPGEEAAGNKLTF

SEQ ID NO: 556000 - protein, 16 aa, Homo sapiens
  CDR3 for beta chain variable domain of TCR clone 278000 (TRBV2, TRBJ2-7)
CSSSEPWTGPSYEQYF

SEQ ID NO: 556001 - protein, 13 aa, Homo sapiens
  CDR3 for alpha chain variable domain of TCR clone 278001 (TRAV12-1, TRAJ53)
CVVNAESNYKLTF

SEQ ID NO: 556002 - protein, 14 aa, Homo sapiens
  CDR3 for beta chain variable domain of TCR clone 278001 (TRBV5-1, TRBJ1-1)
CASSLTRRSTEAFF

SEQ ID NO: 556003 - protein, 14 aa, Homo sapiens
  CDR3 for alpha chain variable domain of TCR clone 278002 (TRAV12-2, TRAJ33)
CAVKRARSNYQLIW

SEQ ID NO: 556004 - protein, 12 aa, Homo sapiens
  CDR3 for beta chain variable domain of TCR clone 278002 (TRBV24-1, TRBJ2-3)
CATSDSTDMQYF

SEQ ID NO: 556005 - protein, 12 aa, Homo sapiens
  CDR3 for alpha chain variable domain of TCR clone 278003 (TRAV36/DV7, TRAJ54)
CAVVRGAQKLVF

SEQ ID NO: 556006 - protein, 15 aa, Homo sapiens
  CDR3 for beta chain variable domain of TCR clone 278003 (TRBV7-2, TRBJ2-3)
CASSLVVRGPDTQYF

SEQ ID NO: 556007 - protein, 15 aa, Homo sapiens
  CDR3 for alpha chain variable domain of TCR clone 278004 (TRAV3, TRAJ22)
CAVRDRGGSARQLTF

SEQ ID NO: 556008 - protein, 14 aa, Homo sapiens
  CDR3 for beta chain variable domain of TCR clone 278004 (TRBV19, TRBJ1-5)
CASSLALIGQPQHF

SEQ ID NO: 556009 - protein, 13 aa, Homo sapiens
  CDR3 for alpha chain variable domain of TCR clone 278005 (TRAV29/DV5, TRAJ31)
CAASRNNNARLMF

SEQ ID NO: 556010 - protein, 15 aa, Homo sapiens
  CDR3 for beta chain variable domain of TCR clone 278005 (TRBV19, TRBJ2-3)
CAAGDTNAPNDTQYF

SEQ ID NO: 556011 - protein, 11 aa, Homo sapiens
  CDR3 for alpha chain variable domain of TCR clone 278006 (TRAV1-2, TRAJ11)
CAVRGYSTLTF

SEQ ID NO: 556012 - protein, 15 aa, Homo sapiens
  CDR3 for beta chain variable domain of TCR clone 278006 (TRBV5-7, TRBJ1-5)
CASSYGKLWDQPQHF

SEQ ID NO: 556013 - protein, 13 aa, Homo sapiens
  CDR3 for alpha chain variable domain of TCR clone 278007 (TRAV27, TRAJ8)
CAGGPTGFQKLVF

SEQ ID NO: 556014 - protein, 14 aa, Homo sapiens
  CDR3 for beta chain variable domain of TCR clone 278007 (TRBV7-8, TRBJ2-3)
CASSLEAGTDTQYF

SEQ ID NO: 556015 - protein, 16 aa, Homo sapiens
  CDR3 for alpha chain variable domain of TCR clone 278008 (TRAV26-2, TRAJ37)
CILRDFGSSTTGKLIF

SEQ ID NO: 556016 - protein, 15 aa, Homo sapiens
  CDR3 for beta chain variable domain of TCR clone 278008 (TRBV6-5, TRBJ2-7)
CASRSLAVSSYEQYF

SEQ ID NO: 556017 - protein, 15 aa, Homo sapiens
  CDR3 for alpha chain variable domain of TCR clone 278009 (TRAV8-3, TRAJ11)
CAVGLLNSGYITLTF

SEQ ID NO: 556018 - protein, 14 aa, Homo sapiens
  CDR3 for beta chain variable domain of TCR clone 278009 (TRBV4-1, TRBJ2-5)
CASSRSGSGETQYF

SEQ ID NO: 556019 - protein, 14 aa, Homo sapiens
  CDR3 for alpha chain variable domain of TCR clone 278010 (TRAV13-2, TRAJ11)
CAETGNSGYSTLTF

SEQ ID NO: 556020 - protein, 11 aa, Homo sapiens
  CDR3 for beta chain variable domain of TCR clone 278010 (TRBV10-3, TRBJ2-7)
CAISEGLDQYF

SEQ ID NO: 556021 - protein, 11 aa, Homo sapiens
  CDR3 for alpha chain variable domain of TCR clone 278011 (TRAV13-1, TRAJ52)
PGGTSYGKLTF

SEQ ID NO: 556022 - protein, 15 aa, Homo sapiens
  CDR3 for beta chain variable domain of TCR clone 278011 (TRBV9, TRBJ1-6)
CASSVAGTGDSPLHF

SEQ ID NO: 556023 - protein, 13 aa, Homo sapiens
  CDR3 for alpha chain variable domain of TCR clone 278012 (TRAV39, TRAJ33)
CAANPDSNYQLIL

SEQ ID NO: 556024 - protein, 13 aa, Homo sapiens
  CDR3 for beta chain variable domain of TCR clone 278012 (TRBV18, TRBJ1-1)
CASSGGRNTEAFF

SEQ ID NO: 556025 - protein, 18 aa, Homo sapiens
  CDR3 for alpha chain variable domain of TCR clone 278013 (TRAV26-1, TRAJ23)
CIVRVGLEVWNQGGKLIF

SEQ ID NO: 556026 - protein, 13 aa, Homo sapiens
  CDR3 for beta chain variable domain of TCR clone 278013 (TRBV24-1, TRBJ2-2)
CATSETNTGELFF

SEQ ID NO: 556027 - protein, 20 aa, Homo sapiens
  CDR3 for alpha chain variable domain of TCR clone 278014 (TRAV8-3, TRAJ44)
LSTSVLWVRLYTGTASKLTF

SEQ ID NO: 556028 - protein, 13 aa, Homo sapiens
  CDR3 for beta chain variable domain of TCR clone 278014 (TRBV12-4, TRBJ1-5)
CASSPDRAQPQHF

SEQ ID NO: 556029 - protein, 15 aa, Homo sapiens
  CDR3 for alpha chain variable domain of TCR clone 278015 (TRAV8-6, TRAJ45)
CAVSEQGGGADGLTF

SEQ ID NO: 556030 - protein, 14 aa, Homo sapiens
  CDR3 for beta chain variable domain of TCR clone 278015 (TRBV7-2, TRBJ2-7)
CASSPKTSFYEQYF

SEQ ID NO: 556031 - protein, 11 aa, Homo sapiens
  CDR3 for alpha chain variable domain of TCR clone 278016 (TRAV1-1, TRAJ23)
CAVRQGGKLIF

SEQ ID NO: 556032 - protein, 14 aa, Homo sapiens
  CDR3 for beta chain variable domain of TCR clone 278016 (TRBV19, TRBJ2-1)
CASPTFVLSGEQFV

SEQ ID NO: 556033 - protein, 14 aa, Homo sapiens
  CDR3 for alpha chain variable domain of TCR clone 278017 (TRAV1-2, TRAJ37)
CAVSSKSNTGKLIF

SEQ ID NO: 556034 - protein, 14 aa, Homo sapiens
  CDR3 for beta chain variable domain of TCR clone 278017 (TRBV6-3, TRBJ1-2)
CASSEGGGSYGYTF

SEQ ID NO: 556035 - protein, 11 aa, Homo sapiens
  CDR3 for alpha chain variable domain of TCR clone 278018 (TRAV27, TRAJ47)
SIVEYGNKLVF

SEQ ID NO: 556036 - protein, 18 aa, Homo sapiens
  CDR3 for beta chain variable domain of TCR clone 278018 (TRBV2, TRBJ2-1)
CASRGLAGGPGTYNEQFF

SEQ ID NO: 556037 - protein, 12 aa, Homo sapiens
  CDR3 for alpha chain variable domain of TCR clone 278019 (TRAV30, TRAJ43)
CGTEEGGNDIRF

SEQ ID NO: 556038 - protein, 17 aa, Homo sapiens
  CDR3 for beta chain variable domain of TCR clone 278019 (TRBV7-8, TRBJ2-6)
CASSAGTGGAGANVLTF

SEQ ID NO: 556039 - protein, 13 aa, Homo sapiens
  CDR3 for alpha chain variable domain of TCR clone 278020 (TRAV27, TRAJ8)
CAGGPTGLQKLVF

SEQ ID NO: 556040 - protein, 15 aa, Homo sapiens
  CDR3 for beta chain variable domain of TCR clone 278020 (TRBV5-1, TRBJ2-1)
CASSPPRAPYNEQFF

SEQ ID NO: 556041 - protein, 13 aa, Homo sapiens
  CDR3 for alpha chain variable domain of TCR clone 278021 (TRAV3, TRAJ21)
CAVREPNFNKFYF

SEQ ID NO: 556042 - protein, 15 aa, Homo sapiens
  CDR3 for beta chain variable domain of TCR clone 278021 (TRBV7-9, TRBJ1-4)
CASSRTGGFNEKLFF

SEQ ID NO: 556043 - protein, 13 aa, Homo sapiens
  CDR3 for alpha chain variable domain of TCR clone 278022 (TRAV12-1, TRAJ7)
CVVNMRGNNRLAF

SEQ ID NO: 556044 - protein, 12 aa, Homo sapiens
  CDR3 for beta chain variable domain of TCR clone 278022 (TRBV4-1, TRBJ2-3)
CASSQGTDTQYF

SEQ ID NO: 556045 - protein, 14 aa, Homo sapiens
  CDR3 for alpha chain variable domain of TCR clone 278023 (TRAV12-2, TRAJ53)
CAVKGGGSNYRLTF

SEQ ID NO: 556046 - protein, 15 aa, Homo sapiens
  CDR3 for beta chain variable domain of TCR clone 278023 (TRBV11-2, TRBJ2-2)
CASSLDTGNTGELFF

SEQ ID NO: 556047 - protein, 13 aa, Homo sapiens
  CDR3 for alpha chain variable domain of TCR clone 278024 (TRAV12-1, TRAJ11)
CVVTRGGYSTRTL

SEQ ID NO: 556048 - protein, 13 aa, Homo sapiens
  CDR3 for beta chain variable domain of TCR clone 278024 (TRBV20-1, TRBJ1-2)
CSARDQGAYGYTF

SEQ ID NO: 556049 - protein, 14 aa, Homo sapiens
  CDR3 for alpha chain variable domain of TCR clone 278025 (TRAV9-2, TRAJ36)
CALPWRIGANNLFF

SEQ ID NO: 556050 - protein, 14 aa, Homo sapiens
  CDR3 for beta chain variable domain of TCR clone 278025 (TRBV2, TRBJ1-2)
CASSELQVNYGYTF

SEQ ID NO: 556051 - protein, 12 aa, Homo sapiens
  CDR3 for alpha chain variable domain of TCR clone 278026 (TRAV4, TRAJ6)
CLAPGGSDIPTF

SEQ ID NO: 556052 - protein, 18 aa, Homo sapiens
  CDR3 for beta chain variable domain of TCR clone 278026 (TRBV20-1, TRBJ2-3)
CSASGLAGGPGTTDTQYF

SEQ ID NO: 556053 - protein, 14 aa, Homo sapiens
  CDR3 for alpha chain variable domain of TCR clone 278027 (TRAV17, TRAJ40)
CATVRFTGTYKYIF

SEQ ID NO: 556054 - protein, 14 aa, Homo sapiens
  CDR3 for beta chain variable domain of TCR clone 278027 (TRBV11-2, TRBJ2-3)
CASSRLARTDTQYF

SEQ ID NO: 556055 - protein, 14 aa, Homo sapiens
  CDR3 for alpha chain variable domain of TCR clone 278028 (TRAV12-1, TRAJ44)
CVVTHTGTASKLTF

SEQ ID NO: 556056 - protein, 16 aa, Homo sapiens
  CDR3 for beta chain variable domain of TCR clone 278028 (TRBV4-2, TRBJ2-3)
CASSQELAGDTDTQYF

SEQ ID NO: 556057 - protein, 16 aa, Homo sapiens
  CDR3 for alpha chain variable domain of TCR clone 278029 (TRAV26-1, TRAJ23)
CIVRPHGNNQGGKLIF

SEQ ID NO: 556058 - protein, 19 aa, Homo sapiens
  CDR3 for beta chain variable domain of TCR clone 278029 (TRBV12-4, TRBJ2-7)
CASSPRSLRTSGRGHEQYF

SEQ ID NO: 556059 - protein, 14 aa, Homo sapiens
  CDR3 for alpha chain variable domain of TCR clone 278030 (TRAV17, TRAJ40)
CATALTSGTYKYIS

SEQ ID NO: 556060 - protein, 13 aa, Homo sapiens
  CDR3 for beta chain variable domain of TCR clone 278030 (TRBV27, TRBJ2-1)
CASSSGSYNEQFF

SEQ ID NO: 556061 - protein, 15 aa, Homo sapiens
  CDR3 for alpha chain variable domain of TCR clone 278031 (TRAV12-3, TRAJ11)
CAMSEENSGYSTLTF

SEQ ID NO: 556062 - protein, 12 aa, Homo sapiens
  CDR3 for beta chain variable domain of TCR clone 278031 (TRBV7-8, TRBJ2-5)
CASSLRAETQYF

SEQ ID NO: 556063 - protein, 15 aa, Homo sapiens
  CDR3 for alpha chain variable domain of TCR clone 278032 (TRAV21, TRAJ13)
CAVRPTSGGYQKVNF

SEQ ID NO: 556064 - protein, 15 aa, Homo sapiens
  CDR3 for beta chain variable domain of TCR clone 278032 (TRBV28, TRBJ2-7)
CASSPGGRGFYEQYF

SEQ ID NO: 556065 - protein, 11 aa, Homo sapiens
  CDR3 for alpha chain variable domain of TCR clone 278033 (TRAV13-1, TRAJ23)
CAASSRGKLIF

SEQ ID NO: 556066 - protein, 15 aa, Homo sapiens
  CDR3 for beta chain variable domain of TCR clone 278033 (TRBV27, TRBJ2-1)
CASSNGGGSSNDQFF

SEQ ID NO: 556067 - protein, 13 aa, Homo sapiens
  CDR3 for alpha chain variable domain of TCR clone 278034 (TRAV3, TRAJ21)
CAVREPDFNKFYF

SEQ ID NO: 556068 - protein, 12 aa, Homo sapiens
  CDR3 for beta chain variable domain of TCR clone 278034 (TRBV5-1, TRBJ2-4)
LAGEWTKNVQYF

SEQ ID NO: 556069 - protein, 15 aa, Homo sapiens
  CDR3 for alpha chain variable domain of TCR clone 278035 (TRAV40, TRAJ53)
CLLANSGGSNYKLTF

SEQ ID NO: 556070 - protein, 11 aa, Homo sapiens
  CDR3 for beta chain variable domain of TCR clone 278035 (TRBV6-3, TRBJ2-3)
CATGQADTQYF

SEQ ID NO: 556071 - protein, 12 aa, Homo sapiens
  CDR3 for alpha chain variable domain of TCR clone 278036 (TRAV22, TRAJ34)
CAVLYNTDKLIF

SEQ ID NO: 556072 - protein, 14 aa, Homo sapiens
  CDR3 for beta chain variable domain of TCR clone 278036 (TRBV18, TRBJ2-7)
CASSPRGGAYEQYF

SEQ ID NO: 556073 - protein, 11 aa, Homo sapiens
  CDR3 for alpha chain variable domain of TCR clone 278037 (TRAV13-1, TRAJ6)
CATLGSYIPTF

SEQ ID NO: 556074 - protein, 12 aa, Homo sapiens
  CDR3 for beta chain variable domain of TCR clone 278037 (TRBV11-2, TRBJ2-1)
CASSPGTNEQFF

SEQ ID NO: 556075 - protein, 13 aa, Homo sapiens
  CDR3 for alpha chain variable domain of TCR clone 278038 (TRAV17, TRAJ9)
CTTGSTGGFKTIF

SEQ ID NO: 556076 - protein, 14 aa, Homo sapiens
  CDR3 for beta chain variable domain of TCR clone 278038 (TRBV7-8, TRBJ2-7)
CASTFRGGPNEQYF

SEQ ID NO: 556077 - protein, 14 aa, Homo sapiens
  CDR3 for alpha chain variable domain of TCR clone 278039 (TRAV3, TRAJ6)
CAVRDPWGSYIPTF

SEQ ID NO: 556078 - protein, 12 aa, Homo sapiens
  CDR3 for beta chain variable domain of TCR clone 278039 (TRBV5-1, TRBJ2-1)
CASIGGYNEQFF

SEQ ID NO: 556079 - protein, 11 aa, Homo sapiens
  CDR3 for alpha chain variable domain of TCR clone 278040 (TRAV13-2, TRAJ26)
CAEIPGQNFVF

SEQ ID NO: 556080 - protein, 12 aa, Homo sapiens
  CDR3 for beta chain variable domain of TCR clone 278040 (TRBV7-9, TRBJ1-1)
CASNLVRGEAFF

SEQ ID NO: 556081 - protein, 10 aa, Homo sapiens
  CDR3 for alpha chain variable domain of TCR clone 278041 (TRAV1-2, TRAJ31)
CAFFRCQTHV

SEQ ID NO: 556082 - protein, 13 aa, Homo sapiens
  CDR3 for beta chain variable domain of TCR clone 278041 (TRBV7-9, TRBJ1-2)
CASSLKQNYGYIF

SEQ ID NO: 556083 - protein, 13 aa, Homo sapiens
  CDR3 for alpha chain variable domain of TCR clone 278042 (TRAV16, TRAJ37)
CALSSSNTGKLIF

SEQ ID NO: 556084 - protein, 17 aa, Homo sapiens
  CDR3 for beta chain variable domain of TCR clone 278042 (TRBV7-9, TRBJ2-6)
CASSFGAGYSGANVLTF

SEQ ID NO: 556085 - protein, 14 aa, Homo sapiens
  CDR3 for alpha chain variable domain of TCR clone 278043 (TRAV12-2, TRAJ3)
CAVKGYSSASKIIF

SEQ ID NO: 556086 - protein, 14 aa, Homo sapiens
  CDR3 for beta chain variable domain of TCR clone 278043 (TRBV6-1, TRBJ1-3)
CASVQGGGGNTIYF

SEQ ID NO: 556087 - protein, 16 aa, Homo sapiens
  CDR3 for alpha chain variable domain of TCR clone 278044 (TRAV12-3, TRAJ53)
CAMSPGSGGRNYKLTF

SEQ ID NO: 556088 - protein, 11 aa, Homo sapiens
  CDR3 for beta chain variable domain of TCR clone 278044 (TRBV29-1, TRBJ2-5)
CSGDRTGTQYF

SEQ ID NO: 556089 - protein, 11 aa, Homo sapiens
  CDR3 for alpha chain variable domain of TCR clone 278045 (TRAV1-1, TRAJ23)
CAVRQGGKLLF

SEQ ID NO: 556090 - protein, 15 aa, Homo sapiens
  CDR3 for beta chain variable domain of TCR clone 278045 (TRBV20-1, TRBJ1-1)
CSASRGVTGNTEAFF

SEQ ID NO: 556091 - protein, 12 aa, Homo sapiens
  CDR3 for alpha chain variable domain of TCR clone 278046 (TRAV13-2, TRAJ23)
FAERHRGGTLIF

SEQ ID NO: 556092 - protein, 16 aa, Homo sapiens
  CDR3 for beta chain variable domain of TCR clone 278046 (TRBV20-1, TRBJ1-4)
CSAPGQGLLTNEKLFF

SEQ ID NO: 556093 - protein, 14 aa, Homo sapiens
  CDR3 for alpha chain variable domain of TCR clone 278047 (TRAV12-2, TRAJ40)
RAVKIPSGTYKYIF

SEQ ID NO: 556094 - protein, 15 aa, Homo sapiens
  CDR3 for beta chain variable domain of TCR clone 278047 (TRBV2, TRBJ2-7)
CASSEGLARSYEQYF

SEQ ID NO: 556095 - protein, 14 aa, Homo sapiens
  CDR3 for alpha chain variable domain of TCR clone 278048 (TRAV1-2, TRAJ16)
CAVNRFSDGQKLFF

SEQ ID NO: 556096 - protein, 17 aa, Homo sapiens
  CDR3 for beta chain variable domain of TCR clone 278048 (TRBV7-3, TRBJ2-3)
CASSRGLAGEVPDTQYF

SEQ ID NO: 556097 - protein, 14 aa, Homo sapiens
  CDR3 for alpha chain variable domain of TCR clone 278049 (TRAV8-4, TRAJ13)
CAVTLSGGYQKVTF

SEQ ID NO: 556098 - protein, 16 aa, Homo sapiens
  CDR3 for beta chain variable domain of TCR clone 278049 (TRBV29-1, TRBJ2-7)
CSVEDAEDGTAYEQYF

SEQ ID NO: 556099 - protein, 11 aa, Homo sapiens
  CDR3 for alpha chain variable domain of TCR clone 278050 (TRAV3, TRAJ21)
CAVGNFNKFYF

SEQ ID NO: 556100 - protein, 12 aa, Homo sapiens
  CDR3 for beta chain variable domain of TCR clone 278050 (TRBV20-1, TRBJ2-1)
CSAQYTYNEQFF

SEQ ID NO: 556101 - protein, 13 aa, Homo sapiens
  CDR3 for alpha chain variable domain of TCR clone 278051 (TRAV12-1, TRAJ22)
CVVYSGSARQLTF

SEQ ID NO: 556102 - protein, 16 aa, Homo sapiens
  CDR3 for beta chain variable domain of TCR clone 278051 (TRBV5-1, TRBJ2-1)
CASSLADIGSYNEPFF

SEQ ID NO: 556103 - protein, 11 aa, Homo sapiens
  CDR3 for alpha chain variable domain of TCR clone 278052 (TRAV12-3, TRAJ43)
CAMSVSNDMRF

SEQ ID NO: 556104 - protein, 13 aa, Homo sapiens
  CDR3 for beta chain variable domain of TCR clone 278052 (TRBV20-1, TRBJ1-1)
CSAPIGGGTEAFL

SEQ ID NO: 556105 - protein, 15 aa, Homo sapiens
  CDR3 for alpha chain variable domain of TCR clone 278053 (TRAV35, TRAJ40)
CAGQIGQAGTHKYIF

SEQ ID NO: 556106 - protein, 14 aa, Homo sapiens
  CDR3 for beta chain variable domain of TCR clone 278053 (TRBV7-3, TRBJ2-1)
CASSLTGGANEQFF

SEQ ID NO: 556107 - protein, 16 aa, Homo sapiens
  CDR3 for alpha chain variable domain of TCR clone 278054 (TRAV13-1, TRAJ18)
CAASRMRGSTLGRLYF

SEQ ID NO: 556108 - protein, 16 aa, Homo sapiens
  CDR3 for beta chain variable domain of TCR clone 278054 (TRBV15, TRBJ2-5)
CATSRYLEAAQGTQYF

SEQ ID NO: 556109 - protein, 14 aa, Homo sapiens
  CDR3 for alpha chain variable domain of TCR clone 278055 (TRAV1-2, TRAJ8)
CAVREDTGFQQLVF

SEQ ID NO: 556110 - protein, 15 aa, Homo sapiens
  CDR3 for beta chain variable domain of TCR clone 278055 (TRBV20-1, TRBJ2-7)
CSARDRVSGMDEQYF

SEQ ID NO: 556111 - protein, 15 aa, Homo sapiens
  CDR3 for alpha chain variable domain of TCR clone 278056 (TRAV12-2, TRAJ10)
GRGWRLTGGGNKLTF

SEQ ID NO: 556112 - protein, 14 aa, Homo sapiens
  CDR3 for beta chain variable domain of TCR clone 278056 (TRBV5-5, TRBJ1-2)
CASSLDPYNYGYTF

SEQ ID NO: 556113 - protein, 14 aa, Homo sapiens
  CDR3 for alpha chain variable domain of TCR clone 278057 (TRAV30, TRAJ26)
CGTELVSYGQNFVF

SEQ ID NO: 556114 - protein, 13 aa, Homo sapiens
  CDR3 for beta chain variable domain of TCR clone 278057 (TRBV7-3, TRBJ1-1)
CASSQDWGAEAFF

SEQ ID NO: 556115 - protein, 17 aa, Homo sapiens
  CDR3 for alpha chain variable domain of TCR clone 278058 (TRAV3, TRAJ6)
CAVRDGPREGGSYIPTF

SEQ ID NO: 556116 - protein, 20 aa, Homo sapiens
  CDR3 for beta chain variable domain of TCR clone 278058 (TRBV28, TRBJ2-1)
CGSTPIGRSPGLAGGNEQFF

SEQ ID NO: 556117 - protein, 14 aa, Homo sapiens
  CDR3 for alpha chain variable domain of TCR clone 278059 (TRAV3, TRAJ40)
CAVRDRRGTYKYIF

SEQ ID NO: 556118 - protein, 16 aa, Homo sapiens
  CDR3 for beta chain variable domain of TCR clone 278059 (TRBV4-1, TRBJ2-7)
CASSQEWTSGPLEQYF

SEQ ID NO: 556119 - protein, 16 aa, Homo sapiens
  CDR3 for alpha chain variable domain of TCR clone 278060 (TRAV1-2, TRAJ18)
CAVRVERGSTLGRLYF

SEQ ID NO: 556120 - protein, 16 aa, Homo sapiens
  CDR3 for beta chain variable domain of TCR clone 278060 (TRBV20-1, TRBJ2-7)
CSASTSGRFSSYEQYF

SEQ ID NO: 556121 - protein, 14 aa, Homo sapiens
  CDR3 for alpha chain variable domain of TCR clone 278061 (TRAV4, TRAJ26)
CLVGPHNYGQNFVF

SEQ ID NO: 556122 - protein, 14 aa, Homo sapiens
  CDR3 for beta chain variable domain of TCR clone 278061 (TRBV2, TRBJ2-7)
CASSLTSGGYEQYF

SEQ ID NO: 556123 - protein, 13 aa, Homo sapiens
  CDR3 for alpha chain variable domain of TCR clone 278062 (TRAV35, TRAJ48)
CAGHEFGNEKLTF

SEQ ID NO: 556124 - protein, 14 aa, Homo sapiens
  CDR3 for beta chain variable domain of TCR clone 278062 (TRBV5-1, TRBJ1-1)
CASSLAVGSGEAFF

SEQ ID NO: 556125 - protein, 14 aa, Homo sapiens
  CDR3 for alpha chain variable domain of TCR clone 278063 (TRAV8-1, TRAJ24)
CAVNAADSWGKLQC

SEQ ID NO: 556126 - protein, 16 aa, Homo sapiens
  CDR3 for beta chain variable domain of TCR clone 278063 (TRBV4-3, TRBJ2-1)
CASSPALDRGVNEQFF

SEQ ID NO: 556127 - protein, 15 aa, Homo sapiens
  CDR3 for alpha chain variable domain of TCR clone 278064 (TRAV35, TRAJ23)
CAGQRGYNQGGKLIF

SEQ ID NO: 556128 - protein, 15 aa, Homo sapiens
  CDR3 for beta chain variable domain of TCR clone 278064 (TRBV6-3, TRBJ2-7)
CASSSPGTVFYEQYF

SEQ ID NO: 556129 - protein, 18 aa, Homo sapiens
  CDR3 for alpha chain variable domain of TCR clone 278065 (TRAV8-4, TRAJ52)
CAVTRANAGGTSYGKLTF

SEQ ID NO: 556130 - protein, 13 aa, Homo sapiens
  CDR3 for beta chain variable domain of TCR clone 278065 (TRBV20-1, TRBJ1-1)
CSAPLGGGTEAFF

SEQ ID NO: 556131 - protein, 15 aa, Homo sapiens
  CDR3 for alpha chain variable domain of TCR clone 278066 (TRAV27, TRAJ38)
CAARRNAGNNRKLSG

SEQ ID NO: 556132 - protein, 11 aa, Homo sapiens
  CDR3 for beta chain variable domain of TCR clone 278066 (TRBV29-1, TRBJ2-5)
CSEDRTGTQYF

SEQ ID NO: 556133 - protein, 13 aa, Homo sapiens
  CDR3 for alpha chain variable domain of TCR clone 278067 (TRAV21, TRAJ27)
FAALTGNAGKSTV

SEQ ID NO: 556134 - protein, 14 aa, Homo sapiens
  CDR3 for beta chain variable domain of TCR clone 278067 (TRBV7-6, TRBJ2-3)
CASSLGTVTDTQYF

SEQ ID NO: 556135 - protein, 16 aa, Homo sapiens
  CDR3 for alpha chain variable domain of TCR clone 278068 (TRAV30, TRAJ24)
CGTEIVDADSWGKFQF

SEQ ID NO: 556136 - protein, 15 aa, Homo sapiens
  CDR3 for beta chain variable domain of TCR clone 278068 (TRBV7-9, TRBJ1-4)
CDSSARTGGDEKLFF

SEQ ID NO: 556137 - protein, 16 aa, Homo sapiens
  CDR3 for alpha chain variable domain of TCR clone 278069 (TRAV3, TRAJ37)
CAVRGRGSGNTGKLIF

SEQ ID NO: 556138 - protein, 14 aa, Homo sapiens
  CDR3 for beta chain variable domain of TCR clone 278069 (TRBV12-4, TRBJ1-1)
CASSLGTGGTEAFF

SEQ ID NO: 556139 - protein, 14 aa, Homo sapiens
  CDR3 for alpha chain variable domain of TCR clone 278070 (TRAV12-3, TRAJ10)
SHLPLTGGGNKLTF

SEQ ID NO: 556140 - protein, 15 aa, Homo sapiens
  CDR3 for beta chain variable domain of TCR clone 278070 (TRBV7-9, TRBJ2-7)
CASSPTGLRTYEQYF

SEQ ID NO: 556141 - protein, 13 aa, Homo sapiens
  CDR3 for alpha chain variable domain of TCR clone 278071 (TRAV13-2, TRAJ40)
CAEMNSGTYKYIF

SEQ ID NO: 556142 - protein, 15 aa, Homo sapiens
  CDR3 for beta chain variable domain of TCR clone 278071 (TRBV19, TRBJ1-1)
CASTSGQIQNTEAFF

SEQ ID NO: 556143 - protein, 12 aa, Homo sapiens
  CDR3 for alpha chain variable domain of TCR clone 278072 (TRAV12-3, TRAJ17)
CAMTLTGNKLTF

SEQ ID NO: 556144 - protein, 13 aa, Homo sapiens
  CDR3 for beta chain variable domain of TCR clone 278072 (TRBV10-3, TRBJ1-2)
CAISERDSYGYTL

SEQ ID NO: 556145 - protein, 14 aa, Homo sapiens
  CDR3 for alpha chain variable domain of TCR clone 278073 (TRAV27, TRAJ22)
CAGLPSGSARQLTF

SEQ ID NO: 556146 - protein, 16 aa, Homo sapiens
  CDR3 for beta chain variable domain of TCR clone 278073 (TRBV7-3, TRBJ2-2)
CASSLKRGTLSGEQFF

SEQ ID NO: 556147 - protein, 17 aa, Homo sapiens
  CDR3 for alpha chain variable domain of TCR clone 278074 (TRAV3, TRAJ6)
CAVRDGPRAGRSYIPTI

SEQ ID NO: 556148 - protein, 14 aa, Homo sapiens
  CDR3 for beta chain variable domain of TCR clone 278074 (TRBV7-2, TRBJ2-7)
CASSPKTSFYEQYF

SEQ ID NO: 556149 - protein, 14 aa, Homo sapiens
  CDR3 for alpha chain variable domain of TCR clone 278075 (TRAV35, TRAJ22)
CTGLRPGSARQLTF

SEQ ID NO: 556150 - protein, 13 aa, Homo sapiens
  CDR3 for beta chain variable domain of TCR clone 278075 (TRBV14, TRBJ2-7)
CASSRGQAYEQYF

SEQ ID NO: 556151 - protein, 13 aa, Homo sapiens
  CDR3 for alpha chain variable domain of TCR clone 278076 (TRAV1-2, TRAJ9)
CSALNTGGFKTIF

SEQ ID NO: 556152 - protein, 13 aa, Homo sapiens
  CDR3 for beta chain variable domain of TCR clone 278076 (TRBV19, TRBJ1-2)
CASSVPGRDGYTF

SEQ ID NO: 556153 - protein, 15 aa, Homo sapiens
  CDR3 for alpha chain variable domain of TCR clone 278077 (TRAV12-3, TRAJ6)
CAMSATTGGSYIHTF

SEQ ID NO: 556154 - protein, 14 aa, Homo sapiens
  CDR3 for beta chain variable domain of TCR clone 278077 (TRBV12-5, TRBJ2-5)
CASGSRTHQETQYF

SEQ ID NO: 556155 - protein, 16 aa, Homo sapiens
  CDR3 for alpha chain variable domain of TCR clone 278078 (TRAV12-3, TRAJ53)
CAMSPGSGGSNYKLPF

SEQ ID NO: 556156 - protein, 15 aa, Homo sapiens
  CDR3 for beta chain variable domain of TCR clone 278078 (TRBV6-1, TRBJ2-7)
CASSESMGDFYEQYF

SEQ ID NO: 556157 - protein, 15 aa, Homo sapiens
  CDR3 for alpha chain variable domain of TCR clone 278079 (TRAV38-2/DV8, TRAJ48)
CSYRSPESGNEKLPF

SEQ ID NO: 556158 - protein, 13 aa, Homo sapiens
  CDR3 for beta chain variable domain of TCR clone 278079 (TRBV4-2, TRBJ1-2)
CASSLSASGGYTF

SEQ ID NO: 556159 - protein, 13 aa, Homo sapiens
  CDR3 for alpha chain variable domain of TCR clone 278080 (TRAV3, TRAJ17)
VLPQRGCCNKLTF

SEQ ID NO: 556160 - protein, 16 aa, Homo sapiens
  CDR3 for beta chain variable domain of TCR clone 278080 (TRBV7-6, TRBJ2-1)
CASSAPGPSSYNEQFF

SEQ ID NO: 556161 - protein, 11 aa, Homo sapiens
  CDR3 for alpha chain variable domain of TCR clone 278081 (TRAV21, TRAJ39)
LLVNAGNMLTF

SEQ ID NO: 556162 - protein, 15 aa, Homo sapiens
  CDR3 for beta chain variable domain of TCR clone 278081 (TRBV29-1, TRBJ2-1)
CSGRDRKSSSNEQFF

SEQ ID NO: 556163 - protein, 12 aa, Homo sapiens
  CDR3 for alpha chain variable domain of TCR clone 278082 (TRAV38-1, TRAJ47)
CAFETYGNKLVF

SEQ ID NO: 556164 - protein, 15 aa, Homo sapiens
  CDR3 for beta chain variable domain of TCR clone 278082 (TRBV20-1, TRBJ2-7)
CSARKGLAESYEQYV

SEQ ID NO: 556165 - protein, 16 aa, Homo sapiens
  CDR3 for alpha chain variable domain of TCR clone 278083 (TRAV3, TRAJ3)
CAVRDRAKSSASKIIF

SEQ ID NO: 556166 - protein, 14 aa, Homo sapiens
  CDR3 for beta chain variable domain of TCR clone 278083 (TRBV7-2, TRBJ2-7)
YASSPKTSFYEQYF

SEQ ID NO: 556167 - protein, 12 aa, Homo sapiens
  CDR3 for alpha chain variable domain of TCR clone 278084 (TRAV36/DV7, TRAJ54)
CAVVRGAQKLVF

SEQ ID NO: 556168 - protein, 17 aa, Homo sapiens
  CDR3 for beta chain variable domain of TCR clone 278084 (TRBV10-3, TRBJ2-7)
CASKLGELRAVLRAGHQ

SEQ ID NO: 556169 - protein, 11 aa, Homo sapiens
  CDR3 for alpha chain variable domain of TCR clone 278085 (TRAV21, TRAJ7)
CAAYGNNRLAF

SEQ ID NO: 556170 - protein, 14 aa, Homo sapiens
  CDR3 for beta chain variable domain of TCR clone 278085 (TRBV7-2, TRBJ2-7)
CASRSQGAAYEQYF

SEQ ID NO: 556171 - protein, 14 aa, Homo sapiens
  CDR3 for alpha chain variable domain of TCR clone 278086 (TRAV9-2, TRAJ39)
CALYIYNAGNMLTF

SEQ ID NO: 556172 - protein, 15 aa, Homo sapiens
  CDR3 for beta chain variable domain of TCR clone 278086 (TRBV15, TRBJ1-5)
CATSRDPVSNQPQHF

SEQ ID NO: 556173 - protein, 15 aa, Homo sapiens
  CDR3 for alpha chain variable domain of TCR clone 278087 (TRAV13-2, TRAJ40)
CAENRSRQGTYKYIF

SEQ ID NO: 556174 - protein, 16 aa, Homo sapiens
  CDR3 for beta chain variable domain of TCR clone 278087 (TRBV7-2, TRBJ2-1)
CASSLGRTSGDKEQFF

SEQ ID NO: 556175 - protein, 16 aa, Homo sapiens
  CDR3 for alpha chain variable domain of TCR clone 278088 (TRAV30, TRAJ26)
FGTESVGDNYGQNFVF

SEQ ID NO: 556176 - protein, 13 aa, Homo sapiens
  CDR3 for beta chain variable domain of TCR clone 278088 (TRBV19, TRBJ1-2)
CASSISEDYGYTF

SEQ ID NO: 556177 - protein, 16 aa, Homo sapiens
  CDR3 for alpha chain variable domain of TCR clone 278089 (TRAV12-1, TRAJ28)
CVVIAYSGAGSYQLTF

SEQ ID NO: 556178 - protein, 15 aa, Homo sapiens
  CDR3 for beta chain variable domain of TCR clone 278089 (TRBV5-1, TRBJ2-7)
CASSLGDFTTYEQYF

SEQ ID NO: 556179 - protein, 16 aa, Homo sapiens
  CDR3 for alpha chain variable domain of TCR clone 278090 (TRAV3, TRAJ37)
CAVRGKESGNTGKLIF

SEQ ID NO: 556180 - protein, 16 aa, Homo sapiens
  CDR3 for beta chain variable domain of TCR clone 278090 (TRBV10-3, TRBJ2-1)
CAISGVGDGGGGEQFF

SEQ ID NO: 556181 - protein, 12 aa, Homo sapiens
  CDR3 for alpha chain variable domain of TCR clone 278091 (TRAV38-2/DV8, TRAJ48)
CALLSGNEKLTF

SEQ ID NO: 556182 - protein, 15 aa, Homo sapiens
  CDR3 for beta chain variable domain of TCR clone 278091 (TRBV6-1, TRBJ2-1)
CASSELRGQYNEQFL

SEQ ID NO: 556183 - protein, 15 aa, Homo sapiens
  CDR3 for alpha chain variable domain of TCR clone 278092 (TRAV23/DV6, TRAJ44)
CAASSGDGTASKLTF

SEQ ID NO: 556184 - protein, 15 aa, Homo sapiens
  CDR3 for beta chain variable domain of TCR clone 278092 (TRBV20-1, TRBJ2-7)
CSARDRVSGMDEQYF

SEQ ID NO: 556185 - protein, 14 aa, Homo sapiens
  CDR3 for alpha chain variable domain of TCR clone 278093 (TRAV17, TRAJ16)
CATADFSDGQKLLF

SEQ ID NO: 556186 - protein, 12 aa, Homo sapiens
  CDR3 for beta chain variable domain of TCR clone 278093 (TRBV24-1, TRBJ1-1)
CATLYPYTEAFF

SEQ ID NO: 556187 - protein, 14 aa, Homo sapiens
  CDR3 for alpha chain variable domain of TCR clone 278094 (TRAV9-2, TRAJ39)
CALYIYNACNMLTF

SEQ ID NO: 556188 - protein, 16 aa, Homo sapiens
  CDR3 for beta chain variable domain of TCR clone 278094 (TRBV5-7, TRBJ2-1)
CASSGGLAGTYNEQFF

SEQ ID NO: 556189 - protein, 14 aa, Homo sapiens
  CDR3 for alpha chain variable domain of TCR clone 278095 (TRAV1-2, TRAJ16)
CAVNRFSDGEKLLF

SEQ ID NO: 556190 - protein, 15 aa, Homo sapiens
  CDR3 for beta chain variable domain of TCR clone 278095 (TRBV2, TRBJ2-1)
CASSEEREGDNEQFF

SEQ ID NO: 556191 - protein, 13 aa, Homo sapiens
  CDR3 for alpha chain variable domain of TCR clone 278096 (TRAV8-3, TRAJ43)
CAVGPDNNNDMRF

SEQ ID NO: 556192 - protein, 13 aa, Homo sapiens
  CDR3 for beta chain variable domain of TCR clone 278096 (TRBV7-6, TRBJ1-5)
CASSQGPNRPQHF

SEQ ID NO: 556193 - protein, 13 aa, Homo sapiens
  CDR3 for alpha chain variable domain of TCR clone 278097 (TRAV3, TRAJ15)
CAVRDQAGTALTF

SEQ ID NO: 556194 - protein, 15 aa, Homo sapiens
  CDR3 for beta chain variable domain of TCR clone 278097 (TRBV11-1, TRBJ2-7)
CVSSLNYGASYEQYF

SEQ ID NO: 556195 - protein, 13 aa, Homo sapiens
  CDR3 for alpha chain variable domain of TCR clone 278098 (TRAV3, TRAJ27)
CAVRPLGAGKSTF

SEQ ID NO: 556196 - protein, 13 aa, Homo sapiens
  CDR3 for beta chain variable domain of TCR clone 278098 (TRBV7-9, TRBJ2-3)
CASSPGSTHTQYF

SEQ ID NO: 556197 - protein, 16 aa, Homo sapiens
  CDR3 for alpha chain variable domain of TCR clone 278099 (TRAV26-2, TRAJ45)
CTTASPIGGGADGLTF

SEQ ID NO: 556198 - protein, 12 aa, Homo sapiens
  CDR3 for beta chain variable domain of TCR clone 278099 (TRBV7-9, TRBJ2-7)
CASSIKREEQYF

SEQ ID NO: 556199 - protein, 14 aa, Homo sapiens
  CDR3 for alpha chain variable domain of TCR clone 278100 (TRAV12-3, TRAJ10)
SHLPLTGVGNKLTF

SEQ ID NO: 556200 - protein, 15 aa, Homo sapiens
  CDR3 for beta chain variable domain of TCR clone 278100 (TRBV5-1, TRBJ2-7)
CASSLMTSGSNEQYF

SEQ ID NO: 556201 - protein, 14 aa, Homo sapiens
  CDR3 for alpha chain variable domain of TCR clone 278101 (TRAV26-1, TRAJ48)
CIVRVPFGNEKLTF

SEQ ID NO: 556202 - protein, 16 aa, Homo sapiens
  CDR3 for beta chain variable domain of TCR clone 278101 (TRBV18, TRBJ2-1)
CASSPYLSIRGDEHFF

SEQ ID NO: 556203 - protein, 15 aa, Homo sapiens
  CDR3 for alpha chain variable domain of TCR clone 278102 (TRAV8-4, TRAJ11)
CAVSRALSGYSTLTF

SEQ ID NO: 556204 - protein, 16 aa, Homo sapiens
  CDR3 for beta chain variable domain of TCR clone 278102 (TRBV4-2, TRBJ2-5)
CASSQELVGSQETQYF

SEQ ID NO: 556205 - protein, 12 aa, Homo sapiens
  CDR3 for alpha chain variable domain of TCR clone 278103 (TRAV26-1, TRAJ35)
CIGLSFGNVLHC

SEQ ID NO: 556206 - protein, 15 aa, Homo sapiens
  CDR3 for beta chain variable domain of TCR clone 278103 (TRBV5-1, TRBJ2-3)
CASSVTSGSTDTQYF

SEQ ID NO: 556207 - protein, 14 aa, Homo sapiens
  CDR3 for alpha chain variable domain of TCR clone 278104 (TRAV1-2, TRAJ8)
RAVREDTGFQKLVF

SEQ ID NO: 556208 - protein, 15 aa, Homo sapiens
  CDR3 for beta chain variable domain of TCR clone 278104 (TRBV4-1, TRBJ2-7)
CASSQNTGRLYEQYF

SEQ ID NO: 556209 - protein, 11 aa, Homo sapiens
  CDR3 for alpha chain variable domain of TCR clone 278105 (TRAV1-2, TRAJ20)
CAVINDYKLSF

SEQ ID NO: 556210 - protein, 15 aa, Homo sapiens
  CDR3 for beta chain variable domain of TCR clone 278105 (TRBV5-1, TRBJ2-2)
CASSSQGGNTGELFF

SEQ ID NO: 556211 - protein, 14 aa, Homo sapiens
  CDR3 for alpha chain variable domain of TCR clone 278106 (TRAV4, TRAJ20)
CLVGDFINDYKLIF

SEQ ID NO: 556212 - protein, 15 aa, Homo sapiens
  CDR3 for beta chain variable domain of TCR clone 278106 (TRBV6-5, TRBJ1-1)
CASSYLRGSVPEAFF

SEQ ID NO: 556213 - protein, 12 aa, Homo sapiens
  CDR3 for alpha chain variable domain of TCR clone 278107 (TRAV12-2, TRAJ44)
CADTGTASKLTF

SEQ ID NO: 556214 - protein, 17 aa, Homo sapiens
  CDR3 for beta chain variable domain of TCR clone 278107 (TRBV20-1, TRBJ1-1)
CSARWTGGSYGNTGAFF

SEQ ID NO: 556215 - protein, 14 aa, Homo sapiens
  CDR3 for alpha chain variable domain of TCR clone 278108 (TRAV35, TRAJ50)
CAGHRKTSYDKVIF

SEQ ID NO: 556216 - protein, 13 aa, Homo sapiens
  CDR3 for beta chain variable domain of TCR clone 278108 (TRBV7-7, TRBJ2-3)
CASSLSRADMQYF

SEQ ID NO: 556217 - protein, 16 aa, Homo sapiens
  CDR3 for alpha chain variable domain of TCR clone 278109 (TRAV21, TRAJ37)
CAVRTAGSSNPGKIIF

SEQ ID NO: 556218 - protein, 13 aa, Homo sapiens
  CDR3 for beta chain variable domain of TCR clone 278109 (TRBV7-9, TRBJ2-5)
CASLPSGRETQYF

SEQ ID NO: 556219 - protein, 14 aa, Homo sapiens
  CDR3 for alpha chain variable domain of TCR clone 278110 (TRAV8-3, TRAJ9)
CAVVYNTGGFKTIF

SEQ ID NO: 556220 - protein, 16 aa, Homo sapiens
  CDR3 for beta chain variable domain of TCR clone 278110 (TRBV7-3, TRBJ2-2)
CASSLKRGTLSGELVF

SEQ ID NO: 556221 - protein, 15 aa, Homo sapiens
  CDR3 for alpha chain variable domain of TCR clone 278111 (TRAV21, TRAJ52)
CAVRGGGTSYGQPTF

SEQ ID NO: 556222 - protein, 12 aa, Homo sapiens
  CDR3 for beta chain variable domain of TCR clone 278111 (TRBV11-2, TRBJ2-2)
CASSLGGGELFF

SEQ ID NO: 556223 - protein, 14 aa, Homo sapiens
  CDR3 for alpha chain variable domain of TCR clone 278112 (TRAV1-2, TRAJ8)
CAVREETGFQKLVF

SEQ ID NO: 556224 - protein, 15 aa, Homo sapiens
  CDR3 for beta chain variable domain of TCR clone 278112 (TRBV15, TRBJ1-1)
CATSLQGGRNTEAFF

SEQ ID NO: 556225 - protein, 14 aa, Homo sapiens
  CDR3 for alpha chain variable domain of TCR clone 278113 (TRAV26-1, TRAJ57)
CIRAGQGGSEKLVF

SEQ ID NO: 556226 - protein, 15 aa, Homo sapiens
  CDR3 for beta chain variable domain of TCR clone 278113 (TRBV11-2, TRBJ1-2)
CASSLEGVQRNGYTF

SEQ ID NO: 556227 - protein, 12 aa, Homo sapiens
  CDR3 for alpha chain variable domain of TCR clone 278114 (TRAV26-2, TRAJ47)
CILVAYGNNLVF

SEQ ID NO: 556228 - protein, 16 aa, Homo sapiens
  CDR3 for beta chain variable domain of TCR clone 278114 (TRBV18, TRBJ1-4)
CASSPLVGDRSEKLFF

SEQ ID NO: 556229 - protein, 18 aa, Homo sapiens
  CDR3 for alpha chain variable domain of TCR clone 278115 (TRAV26-2, TRAJ54)
CILRDVEVGIQGAQKLVF

SEQ ID NO: 556230 - protein, 15 aa, Homo sapiens
  CDR3 for beta chain variable domain of TCR clone 278115 (TRBV28, TRBJ2-4)
CAAGSGTLLMGIQYF

SEQ ID NO: 556231 - protein, 14 aa, Homo sapiens
  CDR3 for alpha chain variable domain of TCR clone 278116 (TRAV12-2, TRAJ17)
CAVLFKAAGNKLTF

SEQ ID NO: 556232 - protein, 20 aa, Homo sapiens
  CDR3 for beta chain variable domain of TCR clone 278116 (TRBV4-1, TRBJ2-5)
CASPPGGAETRDPVLRARHA

SEQ ID NO: 556233 - protein, 18 aa, Homo sapiens
  CDR3 for alpha chain variable domain of TCR clone 278117 (TRAV21, TRAJ52)
CAVRPSPAGGTSYGKLTF

SEQ ID NO: 556234 - protein, 16 aa, Homo sapiens
  CDR3 for beta chain variable domain of TCR clone 278117 (TRBV12-5, TRBJ2-5)
CASGTRTSGNQETQYF

SEQ ID NO: 556235 - protein, 13 aa, Homo sapiens
  CDR3 for alpha chain variable domain of TCR clone 278118 (TRAV3, TRAJ36)
CAVRDTGANNLFF

SEQ ID NO: 556236 - protein, 15 aa, Homo sapiens
  CDR3 for beta chain variable domain of TCR clone 278118 (TRBV24-1, TRBJ2-1)
CATSGSGGFYNEQFV

SEQ ID NO: 556237 - protein, 12 aa, Homo sapiens
  CDR3 for alpha chain variable domain of TCR clone 278119 (TRAV1-1, TRAJ12)
CAVGDSSYKLIF

SEQ ID NO: 556238 - protein, 14 aa, Homo sapiens
  CDR3 for beta chain variable domain of TCR clone 278119 (TRBV15, TRBJ2-3)
CATARDGGGDAQYF

SEQ ID NO: 556239 - protein, 16 aa, Homo sapiens
  CDR3 for alpha chain variable domain of TCR clone 278120 (TRAV3, TRAJ37)
CAVRPHGSGNTGKLIL

SEQ ID NO: 556240 - protein, 15 aa, Homo sapiens
  CDR3 for beta chain variable domain of TCR clone 278120 (TRBV5-5, TRBJ2-7)
CASSLAAPLSYEQYF

SEQ ID NO: 556241 - protein, 14 aa, Homo sapiens
  CDR3 for alpha chain variable domain of TCR clone 278121 (TRAV2, TRAJ20)
CAVEAGTNDYKLSF

SEQ ID NO: 556242 - protein, 13 aa, Homo sapiens
  CDR3 for beta chain variable domain of TCR clone 278121 (TRBV7-2, TRBJ1-1)
CASSRNTNTEAFF

SEQ ID NO: 556243 - protein, 23 aa, Homo sapiens
  CDR3 for alpha chain variable domain of TCR clone 278122 (TRAV12-2, TRAJ36)
SLLIRDSQPSDSATLERANNLFF

SEQ ID NO: 556244 - protein, 15 aa, Homo sapiens
  CDR3 for beta chain variable domain of TCR clone 278122 (TRBV19, TRBJ1-2)
CASSVGQVLNYGYTF

SEQ ID NO: 556245 - protein, 14 aa, Homo sapiens
  CDR3 for alpha chain variable domain of TCR clone 278123 (TRAV26-1, TRAJ38)
CIADNAGNNRKLIW

SEQ ID NO: 556246 - protein, 15 aa, Homo sapiens
  CDR3 for beta chain variable domain of TCR clone 278123 (TRBV4-1, TRBJ1-1)
CPSSQEWGHYTEAFF

SEQ ID NO: 556247 - protein, 13 aa, Homo sapiens
  CDR3 for alpha chain variable domain of TCR clone 278124 (TRAV13-1, TRAJ39)
CSKYSNAGNMLTF

SEQ ID NO: 556248 - protein, 11 aa, Homo sapiens
  CDR3 for beta chain variable domain of TCR clone 278124 (TRBV7-9, TRBJ2-3)
CASSTTDTQYF

SEQ ID NO: 556249 - protein, 12 aa, Homo sapiens
  CDR3 for alpha chain variable domain of TCR clone 278125 (TRAV12-3, TRAJ17)
CAMTFTGNKLTF

SEQ ID NO: 556250 - protein, 14 aa, Homo sapiens
  CDR3 for beta chain variable domain of TCR clone 278125 (TRBV9, TRBJ2-1)
CASSVDPRGKEQFF

SEQ ID NO: 556251 - protein, 14 aa, Homo sapiens
  CDR3 for alpha chain variable domain of TCR clone 278126 (TRAV17, TRAJ37)
CATDGSSNTGKLIF

SEQ ID NO: 556252 - protein, 13 aa, Homo sapiens
  CDR3 for beta chain variable domain of TCR clone 278126 (TRBV11-2, TRBJ2-1)
CSSSLDLVNEQFF

SEQ ID NO: 556253 - protein, 13 aa, Homo sapiens
  CDR3 for alpha chain variable domain of TCR clone 278127 (TRAV8-3, TRAJ34)
CAVGAFNTDKLIF

SEQ ID NO: 556254 - protein, 11 aa, Homo sapiens
  CDR3 for beta chain variable domain of TCR clone 278127 (TRBV7-3, TRBJ1-2)
CASSLGDGYTF

SEQ ID NO: 556255 - protein, 12 aa, Homo sapiens
  CDR3 for alpha chain variable domain of TCR clone 278128 (TRAV13-1, TRAJ11)
CAADSGYSTLTF

SEQ ID NO: 556256 - protein, 16 aa, Homo sapiens
  CDR3 for beta chain variable domain of TCR clone 278128 (TRBV2, TRBJ2-1)
CASRLNTASAYNEQFF

SEQ ID NO: 556257 - protein, 13 aa, Homo sapiens
  CDR3 for alpha chain variable domain of TCR clone 278129 (TRAV13-2, TRAJ13)
CAERPGGYQKVTF

SEQ ID NO: 556258 - protein, 19 aa, Homo sapiens
  CDR3 for beta chain variable domain of TCR clone 278129 (TRBV4-1, TRBJ2-1)
CASSQGPLPGIGSRNEQFF

SEQ ID NO: 556259 - protein, 14 aa, Homo sapiens
  CDR3 for alpha chain variable domain of TCR clone 278130 (TRAV36/DV7, TRAJ44)
CCGANTGTASKLTF

SEQ ID NO: 556260 - protein, 14 aa, Homo sapiens
  CDR3 for beta chain variable domain of TCR clone 278130 (TRBV20-1, TRBJ1-3)
CSASPTGAGNTMYF

SEQ ID NO: 556261 - protein, 13 aa, Homo sapiens
  CDR3 for alpha chain variable domain of TCR clone 278131 (TRAV13-2, TRAJ13)
CAERPGGYQKVTF

SEQ ID NO: 556262 - protein, 12 aa, Homo sapiens
  CDR3 for beta chain variable domain of TCR clone 278131 (TRBV28, TRBJ2-5)
CASSGQTETQYF

SEQ ID NO: 556263 - protein, 14 aa, Homo sapiens
  CDR3 for alpha chain variable domain of TCR clone 278132 (TRAV1-2, TRAJ16)
CAVNRFSDGQKLLF

SEQ ID NO: 556264 - protein, 16 aa, Homo sapiens
  CDR3 for beta chain variable domain of TCR clone 278132 (TRBV24-1, TRBJ2-3)
CATSDLGTGATDTQYF

SEQ ID NO: 556265 - protein, 14 aa, Homo sapiens
  CDR3 for alpha chain variable domain of TCR clone 278133 (TRAV34, TRAJ44)
CGADGTGTASKLTF

SEQ ID NO: 556266 - protein, 11 aa, Homo sapiens
  CDR3 for beta chain variable domain of TCR clone 278133 (TRBV10-3, TRBJ2-1)
CAISDRGLQFF

SEQ ID NO: 556267 - protein, 14 aa, Homo sapiens
  CDR3 for alpha chain variable domain of TCR clone 278134 (TRAV1-2, TRAJ16)
CAVNRFSDGQRLLF

SEQ ID NO: 556268 - protein, 15 aa, Homo sapiens
  CDR3 for beta chain variable domain of TCR clone 278134 (TRBV7-9, TRBJ1-6)
CARSSPGRGNSPLHF

SEQ ID NO: 556269 - protein, 16 aa, Homo sapiens
  CDR3 for alpha chain variable domain of TCR clone 278135 (TRAV8-2, TRAJ48)
CVVSDVSNFGNEKLTF

SEQ ID NO: 556270 - protein, 13 aa, Homo sapiens
  CDR3 for beta chain variable domain of TCR clone 278135 (TRBV7-2, TRBJ1-2)
CASSRLERGGYTF

SEQ ID NO: 556271 - protein, 14 aa, Homo sapiens
  CDR3 for alpha chain variable domain of TCR clone 278136 (TRAV12-2, TRAJ15)
CAPHTGQAGTALIF

SEQ ID NO: 556272 - protein, 17 aa, Homo sapiens
  CDR3 for beta chain variable domain of TCR clone 278136 (TRBV25-1, TRBJ2-1)
CASSAYGQGRGVYEQFF

SEQ ID NO: 556273 - protein, 15 aa, Homo sapiens
  CDR3 for alpha chain variable domain of TCR clone 278137 (TRAV26-1, TRAJ29)
CIVRVEGSGNTPLVF

SEQ ID NO: 556274 - protein, 15 aa, Homo sapiens
  CDR3 for beta chain variable domain of TCR clone 278137 (TRBV7-2, TRBJ2-1)
CASTHGTGIYNEQFF

SEQ ID NO: 556275 - protein, 15 aa, Homo sapiens
  CDR3 for alpha chain variable domain of TCR clone 278138 (TRAV17, TRAJ28)
CATVDSGSGSYQLTF

SEQ ID NO: 556276 - protein, 13 aa, Homo sapiens
  CDR3 for beta chain variable domain of TCR clone 278138 (TRBV7-6, TRBJ1-2)
CASSLVADYGYTF

SEQ ID NO: 556277 - protein, 14 aa, Homo sapiens
  CDR3 for alpha chain variable domain of TCR clone 278139 (TRAV8-2, TRAJ4)
CVVSPSGGYNKLIF

SEQ ID NO: 556278 - protein, 15 aa, Homo sapiens
  CDR3 for beta chain variable domain of TCR clone 278139 (TRBV7-2, TRBJ2-3)
CASSLAGAFIDTQYF

SEQ ID NO: 556279 - protein, 14 aa, Homo sapiens
  CDR3 for alpha chain variable domain of TCR clone 278140 (TRAV8-1, TRAJ5)
CAVRTDTGRRPLTF

SEQ ID NO: 556280 - protein, 14 aa, Homo sapiens
  CDR3 for beta chain variable domain of TCR clone 278140 (TRBV7-8, TRBJ2-3)
CASSFPDGQDTQYF

SEQ ID NO: 556281 - protein, 15 aa, Homo sapiens
  CDR3 for alpha chain variable domain of TCR clone 278141 (TRAV25, TRAJ41)
CAGPWNSNSGYALNF

SEQ ID NO: 556282 - protein, 15 aa, Homo sapiens
  CDR3 for beta chain variable domain of TCR clone 278141 (TRBV19, TRBJ2-7)
CASSPAGSGEALRYF

SEQ ID NO: 556283 - protein, 13 aa, Homo sapiens
  CDR3 for alpha chain variable domain of TCR clone 278142 (TRAV17, TRAJ9)
CATVDTGGFKTIF

SEQ ID NO: 556284 - protein, 16 aa, Homo sapiens
  CDR3 for beta chain variable domain of TCR clone 278142 (TRBV19, TRBJ1-1)
CASSPTRFWPGTEAFF

SEQ ID NO: 556285 - protein, 13 aa, Homo sapiens
  CDR3 for alpha chain variable domain of TCR clone 278143 (TRAV8-3, TRAJ48)
CAVVRFGNEKLTF

SEQ ID NO: 556286 - protein, 16 aa, Homo sapiens
  CDR3 for beta chain variable domain of TCR clone 278143 (TRBV20-1, TRBJ2-5)
CSARDFASGIKETQYF

SEQ ID NO: 556287 - protein, 12 aa, Homo sapiens
  CDR3 for alpha chain variable domain of TCR clone 278144 (TRAV12-3, TRAJ20)
CAMVRGDYKLSF

SEQ ID NO: 556288 - protein, 15 aa, Homo sapiens
  CDR3 for beta chain variable domain of TCR clone 278144 (TRBV5-1, TRBJ2-3)
CASSVTSGSTDTQYF

SEQ ID NO: 556289 - protein, 17 aa, Homo sapiens
  CDR3 for alpha chain variable domain of TCR clone 278145 (TRAV3, TRAJ32)
CAVRDPFYGGATNKLIF

SEQ ID NO: 556290 - protein, 17 aa, Homo sapiens
  CDR3 for beta chain variable domain of TCR clone 278145 (TRBV28, TRBJ1-1)
CASSLSGTGYENTEAFF

SEQ ID NO: 556291 - protein, 13 aa, Homo sapiens
  CDR3 for alpha chain variable domain of TCR clone 278146 (TRAV9-2, TRAJ5)
CAPPGTGRRALTF

SEQ ID NO: 556292 - protein, 12 aa, Homo sapiens
  CDR3 for beta chain variable domain of TCR clone 278146 (TRBV2, TRBJ2-7)
CASKRGSYEQYF

SEQ ID NO: 556293 - protein, 17 aa, Homo sapiens
  CDR3 for alpha chain variable domain of TCR clone 278147 (TRAV13-1, TRAJ28)
CAASPPYSGAGSYQLHF

SEQ ID NO: 556294 - protein, 12 aa, Homo sapiens
  CDR3 for beta chain variable domain of TCR clone 278147 (TRBV11-2, TRBJ2-2)
CASSLPTGELFF

SEQ ID NO: 556295 - protein, 14 aa, Homo sapiens
  CDR3 for alpha chain variable domain of TCR clone 278148 (TRAV12-2, TRAJ45)
CAVYIGGGADGLTF

SEQ ID NO: 556296 - protein, 17 aa, Homo sapiens
  CDR3 for beta chain variable domain of TCR clone 278148 (TRBV7-8, TRBJ2-6)
CASSAGTGGAGANVLTF

SEQ ID NO: 556297 - protein, 11 aa, Homo sapiens
  CDR3 for alpha chain variable domain of TCR clone 278149 (TRAV13-1, TRAJ49)
CAASWGNQFYF

SEQ ID NO: 556298 - protein, 13 aa, Homo sapiens
  CDR3 for beta chain variable domain of TCR clone 278149 (TRBV19, TRBJ2-1)
CASSRGPYNEQFF

SEQ ID NO: 556299 - protein, 13 aa, Homo sapiens
  CDR3 for alpha chain variable domain of TCR clone 278150 (TRAV8-3, TRAJ43)
CAVVTYNNNDMRF

SEQ ID NO: 556300 - protein, 17 aa, Homo sapiens
  CDR3 for beta chain variable domain of TCR clone 278150 (TRBV7-7, TRBJ1-1)
CASIGDRPNLGVTEAFF

SEQ ID NO: 556301 - protein, 14 aa, Homo sapiens
  CDR3 for alpha chain variable domain of TCR clone 278151 (TRAV12-3, TRAJ10)
SHLPLTGGGHKLTF

SEQ ID NO: 556302 - protein, 17 aa, Homo sapiens
  CDR3 for beta chain variable domain of TCR clone 278151 (TRBV20-1, TRBJ2-2)
CSASGSGQGGSTGELFF

SEQ ID NO: 556303 - protein, 15 aa, Homo sapiens
  CDR3 for alpha chain variable domain of TCR clone 278152 (TRAV8-2, TRAJ15)
CVVTMGNQAGTALIF

SEQ ID NO: 556304 - protein, 12 aa, Homo sapiens
  CDR3 for beta chain variable domain of TCR clone 278152 (TRBV6-1, TRBJ2-7)
CASSDDSYEQYF

SEQ ID NO: 556305 - protein, 13 aa, Homo sapiens
  CDR3 for alpha chain variable domain of TCR clone 278153 (TRAV35, TRAJ57)
CAGSQGGSEKLVF

SEQ ID NO: 556306 - protein, 16 aa, Homo sapiens
  CDR3 for beta chain variable domain of TCR clone 278153 (TRBV4-2, TRBJ2-5)
CASSQELVGSQETQYF

SEQ ID NO: 556307 - protein, 18 aa, Homo sapiens
  CDR3 for alpha chain variable domain of TCR clone 278154 (TRAV13-1, TRAJ52)
CAASKRSAGGTDYGKLTF

SEQ ID NO: 556308 - protein, 13 aa, Homo sapiens
  CDR3 for beta chain variable domain of TCR clone 278154 (TRBV12-4, TRBJ1-2)
CASSLRQGKGYTF

SEQ ID NO: 556309 - protein, 10 aa, Homo sapiens
  CDR3 for alpha chain variable domain of TCR clone 278155 (TRAV13-1, TRAJ7)
LIWGNNRLAF

SEQ ID NO: 556310 - protein, 16 aa, Homo sapiens
  CDR3 for beta chain variable domain of TCR clone 278155 (TRBV4-1, TRBJ1-2)
CASSQDAGQVLYGYTF

SEQ ID NO: 556311 - protein, 12 aa, Homo sapiens
  CDR3 for alpha chain variable domain of TCR clone 278156 (TRAV12-3, TRAJ17)
CAMTLTGNKLTF

SEQ ID NO: 556312 - protein, 14 aa, Homo sapiens
  CDR3 for beta chain variable domain of TCR clone 278156 (TRBV20-1, TRBJ1-3)
CSDSPTGAGNTIYF

SEQ ID NO: 556313 - protein, 12 aa, Homo sapiens
  CDR3 for alpha chain variable domain of TCR clone 278157 (TRAV1-1, TRAJ9)
CAVDTGGFKTIF

SEQ ID NO: 556314 - protein, 15 aa, Homo sapiens
  CDR3 for beta chain variable domain of TCR clone 278157 (TRBV6-1, TRBJ2-3)
CASSERVWITDTQYF

SEQ ID NO: 556315 - protein, 16 aa, Homo sapiens
  CDR3 for alpha chain variable domain of TCR clone 278158 (TRAV14/DV4, TRAJ53)
CAMREGGGGSNYKLKF

SEQ ID NO: 556316 - protein, 14 aa, Homo sapiens
  CDR3 for beta chain variable domain of TCR clone 278158 (TRBV7-2, TRBJ2-7)
CASSPKTSFYEQYF

SEQ ID NO: 556317 - protein, 14 aa, Homo sapiens
  CDR3 for alpha chain variable domain of TCR clone 278159 (TRAV12-2, TRAJ44)
CAVNPAGTASKLTF

SEQ ID NO: 556318 - protein, 15 aa, Homo sapiens
  CDR3 for beta chain variable domain of TCR clone 278159 (TRBV20-1, TRBJ2-7)
CSARVPAAYFYEQYF

SEQ ID NO: 556319 - protein, 14 aa, Homo sapiens
  CDR3 for alpha chain variable domain of TCR clone 278160 (TRAV1-2, TRAJ8)
CAVRENTGFQKLVF

SEQ ID NO: 556320 - protein, 15 aa, Homo sapiens
  CDR3 for beta chain variable domain of TCR clone 278160 (TRBV6-3, TRBJ2-7)
CASSSPGTVCYEQYF

SEQ ID NO: 556321 - protein, 13 aa, Homo sapiens
  CDR3 for alpha chain variable domain of TCR clone 278161 (TRAV1-2, TRAJ24)
CAVTGDSWGKLQF

SEQ ID NO: 556322 - protein, 15 aa, Homo sapiens
  CDR3 for beta chain variable domain of TCR clone 278161 (TRBV7-2, TRBJ2-7)
CASSLGGAKAGEQYF

SEQ ID NO: 556323 - protein, 14 aa, Homo sapiens
  CDR3 for alpha chain variable domain of TCR clone 278162 (TRAV12-2, TRAJ9)
CAMSPNTGGFKTIF

SEQ ID NO: 556324 - protein, 12 aa, Homo sapiens
  CDR3 for beta chain variable domain of TCR clone 278162 (TRBV19, TRBJ1-5)
CASSISQQPQHF

SEQ ID NO: 556325 - protein, 15 aa, Homo sapiens
  CDR3 for alpha chain variable domain of TCR clone 278163 (TRAV35, TRAJ50)
CAGQLRKTSYDKVIF

SEQ ID NO: 556326 - protein, 12 aa, Homo sapiens
  CDR3 for beta chain variable domain of TCR clone 278163 (TRBV5-1, TRBJ2-5)
CASSLGLETQSF

SEQ ID NO: 556327 - protein, 16 aa, Homo sapiens
  CDR3 for alpha chain variable domain of TCR clone 278164 (TRAV27, TRAJ57)
CAGALGTQGGSEKLVF

SEQ ID NO: 556328 - protein, 15 aa, Homo sapiens
  CDR3 for beta chain variable domain of TCR clone 278164 (TRBV2, TRBJ2-2)
CASSRETVGTGELFF

SEQ ID NO: 556329 - protein, 16 aa, Homo sapiens
  CDR3 for alpha chain variable domain of TCR clone 278165 (TRAV35, TRAJ29)
CAGPIRGISGNTPLVF

SEQ ID NO: 556330 - protein, 14 aa, Homo sapiens
  CDR3 for beta chain variable domain of TCR clone 278165 (TRBV25-1, TRBJ1-1)
CASTHLGGNTEAFF

SEQ ID NO: 556331 - protein, 17 aa, Homo sapiens
  CDR3 for alpha chain variable domain of TCR clone 278166 (TRAV3, TRAJ6)
CAVRDGPRAGGSYIPTF

SEQ ID NO: 556332 - protein, 13 aa, Homo sapiens
  CDR3 for beta chain variable domain of TCR clone 278166 (TRBV12-4, TRBJ2-7)
CASSFVPTAEQYF

SEQ ID NO: 556333 - protein, 14 aa, Homo sapiens
  CDR3 for alpha chain variable domain of TCR clone 278167 (TRAV1-2, TRAJ8)
CAVREDTGFQKLVF

SEQ ID NO: 556334 - protein, 13 aa, Homo sapiens
  CDR3 for beta chain variable domain of TCR clone 278167 (TRBV28, TRBJ2-7)
CASRSSGVYEQYF

SEQ ID NO: 556335 - protein, 15 aa, Homo sapiens
  CDR3 for alpha chain variable domain of TCR clone 278168 (TRAV29/DV5, TRAJ24)
CAASGATDSCGKFQF

SEQ ID NO: 556336 - protein, 12 aa, Homo sapiens
  CDR3 for beta chain variable domain of TCR clone 278168 (TRBV11-2, TRBJ2-2)
CASSLPTGELCF

SEQ ID NO: 556337 - protein, 16 aa, Homo sapiens
  CDR3 for alpha chain variable domain of TCR clone 278169 (TRAV16, TRAJ4)
CALSRMFSGGYNKLIF

SEQ ID NO: 556338 - protein, 16 aa, Homo sapiens
  CDR3 for beta chain variable domain of TCR clone 278169 (TRBV24-1, TRBJ2-3)
FATSEPGTGATDTQYF

SEQ ID NO: 556339 - protein, 14 aa, Homo sapiens
  CDR3 for alpha chain variable domain of TCR clone 278170 (TRAV4, TRAJ17)
CLVGDMAAGNKLTF

SEQ ID NO: 556340 - protein, 14 aa, Homo sapiens
  CDR3 for beta chain variable domain of TCR clone 278170 (TRBV4-1, TRBJ2-7)
RASSPVAGGDEQYF

SEQ ID NO: 556341 - protein, 12 aa, Homo sapiens
  CDR3 for alpha chain variable domain of TCR clone 278171 (TRAV13-2, TRAJ23)
CAERHRGGKLIF

SEQ ID NO: 556342 - protein, 13 aa, Homo sapiens
  CDR3 for beta chain variable domain of TCR clone 278171 (TRBV7-9, TRBJ1-1)
CASSQDWGAEAFF

SEQ ID NO: 556343 - protein, 15 aa, Homo sapiens
  CDR3 for alpha chain variable domain of TCR clone 278172 (TRAV4, TRAJ36)
CLVGDRQTGANNLFF

SEQ ID NO: 556344 - protein, 14 aa, Homo sapiens
  CDR3 for beta chain variable domain of TCR clone 278172 (TRBV18, TRBJ2-7)
CASSPRGGAYEQYF

SEQ ID NO: 556345 - protein, 14 aa, Homo sapiens
  CDR3 for alpha chain variable domain of TCR clone 278173 (TRAV13-1, TRAJ35)
CAASKGGFGNVLHC

SEQ ID NO: 556346 - protein, 21 aa, Homo sapiens
  CDR3 for beta chain variable domain of TCR clone 278173 (TRBV7-3, TRBJ1-1)
GGTQPCISVPAARIGGAEAFF

SEQ ID NO: 556347 - protein, 11 aa, Homo sapiens
  CDR3 for alpha chain variable domain of TCR clone 278174 (TRAV1-2, TRAJ20)
CAVSNDYKLSF

SEQ ID NO: 556348 - protein, 15 aa, Homo sapiens
  CDR3 for beta chain variable domain of TCR clone 278174 (TRBV28, TRBJ2-5)
CASSPPWSYQETQYF

SEQ ID NO: 556349 - protein, 14 aa, Homo sapiens
  CDR3 for alpha chain variable domain of TCR clone 278175 (TRAV13-2, TRAJ20)
CAESPAKDDYTLSF

SEQ ID NO: 556350 - protein, 12 aa, Homo sapiens
  CDR3 for beta chain variable domain of TCR clone 278175 (TRBV7-8, TRBJ2-5)
CASSPRVETQYF

SEQ ID NO: 556351 - protein, 12 aa, Homo sapiens
  CDR3 for alpha chain variable domain of TCR clone 278176 (TRAV13-1, TRAJ49)
CAAPNTGNQFYF

SEQ ID NO: 556352 - protein, 17 aa, Homo sapiens
  CDR3 for beta chain variable domain of TCR clone 278176 (TRBV25-1, TRBJ2-7)
CASSDARVVFSSDEQYF

SEQ ID NO: 556353 - protein, 15 aa, Homo sapiens
  CDR3 for alpha chain variable domain of TCR clone 278177 (TRAV25, TRAJ53)
CSATGGGGSNYKLTL

SEQ ID NO: 556354 - protein, 19 aa, Homo sapiens
  CDR3 for beta chain variable domain of TCR clone 278177 (TRBV7-2, TRBJ2-3)
CASSFLSRNWGGGTDTQYF

SEQ ID NO: 556355 - protein, 15 aa, Homo sapiens
  CDR3 for alpha chain variable domain of TCR clone 278178 (TRAV20, TRAJ50)
CAVRQMKTSYDKVIF

SEQ ID NO: 556356 - protein, 15 aa, Homo sapiens
  CDR3 for beta chain variable domain of TCR clone 278178 (TRBV9, TRBJ2-1)
CASSLAGSSYNEQFF

SEQ ID NO: 556357 - protein, 16 aa, Homo sapiens
  CDR3 for alpha chain variable domain of TCR clone 278179 (TRAV3, TRAJ18)
CTVRDGRGSTLGRLYF

SEQ ID NO: 556358 - protein, 17 aa, Homo sapiens
  CDR3 for beta chain variable domain of TCR clone 278179 (TRBV5-1, TRBJ2-3)
CASSKIGLADRTDTQYF

SEQ ID NO: 556359 - protein, 15 aa, Homo sapiens
  CDR3 for alpha chain variable domain of TCR clone 278180 (TRAV20, TRAJ6)
CAVRLQSGGSSIPTF

SEQ ID NO: 556360 - protein, 14 aa, Homo sapiens
  CDR3 for beta chain variable domain of TCR clone 278180 (TRBV12-4, TRBJ2-7)
CASSASGGWYEQYF

SEQ ID NO: 556361 - protein, 16 aa, Homo sapiens
  CDR3 for alpha chain variable domain of TCR clone 278181 (TRAV23/DV6, TRAJ48)
CAASGVVNFGNEKLHF

SEQ ID NO: 556362 - protein, 15 aa, Homo sapiens
  CDR3 for beta chain variable domain of TCR clone 278181 (TRBV20-1, TRBJ2-5)
CSAGLAGVSQETQYF

SEQ ID NO: 556363 - protein, 14 aa, Homo sapiens
  CDR3 for alpha chain variable domain of TCR clone 278182 (TRAV27, TRAJ15)
CAGFDNQAGTALNF

SEQ ID NO: 556364 - protein, 11 aa, Homo sapiens
  CDR3 for beta chain variable domain of TCR clone 278182 (TRBV29-1, TRBJ1-1)
CSVEVGTRTFF

SEQ ID NO: 556365 - protein, 11 aa, Homo sapiens
  CDR3 for alpha chain variable domain of TCR clone 278183 (TRAV21, TRAJ41)
CAVRSGYALNF

SEQ ID NO: 556366 - protein, 13 aa, Homo sapiens
  CDR3 for beta chain variable domain of TCR clone 278183 (TRBV7-9, TRBJ1-2)
YASSLKQNYGYTF

SEQ ID NO: 556367 - protein, 14 aa, Homo sapiens
  CDR3 for alpha chain variable domain of TCR clone 278184 (TRAV30, TRAJ33)
CGTVAPRSNYQLIW

SEQ ID NO: 556368 - protein, 16 aa, Homo sapiens
  CDR3 for beta chain variable domain of TCR clone 278184 (TRBV5-4, TRBJ2-5)
CASSLGLAGGRETQYF

SEQ ID NO: 556369 - protein, 13 aa, Homo sapiens
  CDR3 for alpha chain variable domain of TCR clone 278185 (TRAV8-3, TRAJ28)
FAVGAVGSYQLTF

SEQ ID NO: 556370 - protein, 15 aa, Homo sapiens
  CDR3 for beta chain variable domain of TCR clone 278185 (TRBV29-1, TRBJ2-7)
CSVEFFDRGSYEQYF

SEQ ID NO: 556371 - protein, 13 aa, Homo sapiens
  CDR3 for alpha chain variable domain of TCR clone 278186 (TRAV6, TRAJ20)
CALAVSNDYKLSF

SEQ ID NO: 556372 - protein, 16 aa, Homo sapiens
  CDR3 for beta chain variable domain of TCR clone 278186 (TRBV7-9, TRBJ2-1)
CASSDVAGGSYDEQFF

SEQ ID NO: 556373 - protein, 16 aa, Homo sapiens
  CDR3 for alpha chain variable domain of TCR clone 278187 (TRAV1-2, TRAJ27)
CAVREPQSPMQANQPL

SEQ ID NO: 556374 - protein, 13 aa, Homo sapiens
  CDR3 for beta chain variable domain of TCR clone 278187 (TRBV6-1, TRBJ1-2)
CASSAREGYGYTF

SEQ ID NO: 556375 - protein, 17 aa, Homo sapiens
  CDR3 for alpha chain variable domain of TCR clone 278188 (TRAV3, TRAJ6)
CAVRDGPRAGGSYIPTC

SEQ ID NO: 556376 - protein, 14 aa, Homo sapiens
  CDR3 for beta chain variable domain of TCR clone 278188 (TRBV6-5, TRBJ1-2)
CASTRGGGSDGYTF

SEQ ID NO: 556377 - protein, 14 aa, Homo sapiens
  CDR3 for alpha chain variable domain of TCR clone 278189 (TRAV8-1, TRAJ32)
CAVNARGATNKLIF

SEQ ID NO: 556378 - protein, 15 aa, Homo sapiens
  CDR3 for beta chain variable domain of TCR clone 278189 (TRBV11-2, TRBJ2-1)
CASSKNRGLIYEQFF

SEQ ID NO: 556379 - protein, 18 aa, Homo sapiens
  CDR3 for alpha chain variable domain of TCR clone 278190 (TRAV12-3, TRAJ52)
CAMSVGGAGGTSYGKLTF

SEQ ID NO: 556380 - protein, 15 aa, Homo sapiens
  CDR3 for beta chain variable domain of TCR clone 278190 (TRBV27, TRBJ1-6)
CASSFDRGIGSPLHF

SEQ ID NO: 556381 - protein, 15 aa, Homo sapiens
  CDR3 for alpha chain variable domain of TCR clone 278191 (TRAV20, TRAJ53)
CAVQASGGSNYKLTF

SEQ ID NO: 556382 - protein, 14 aa, Homo sapiens
  CDR3 for beta chain variable domain of TCR clone 278191 (TRBV7-2, TRBJ1-2)
CGSSQTGATYGYTF

SEQ ID NO: 556383 - protein, 12 aa, Homo sapiens
  CDR3 for alpha chain variable domain of TCR clone 278192 (TRAV1-1, TRAJ33)
CAASDSNYPLIW

SEQ ID NO: 556384 - protein, 18 aa, Homo sapiens
  CDR3 for beta chain variable domain of TCR clone 278192 (TRBV20-1, TRBJ2-2)
CSARVQTARPSGTGELFF

SEQ ID NO: 556385 - protein, 14 aa, Homo sapiens
  CDR3 for alpha chain variable domain of TCR clone 278193 (TRAV26-1, TRAJ44)
CIARTTGTASKLTF

SEQ ID NO: 556386 - protein, 13 aa, Homo sapiens
  CDR3 for beta chain variable domain of TCR clone 278193 (TRBV11-3, TRBJ2-7)
CASSLDKLYEQYF

SEQ ID NO: 556387 - protein, 11 aa, Homo sapiens
  CDR3 for alpha chain variable domain of TCR clone 278194 (TRAV21, TRAJ11)
CAVNGYSTLTF

SEQ ID NO: 556388 - protein, 10 aa, Homo sapiens
  CDR3 for beta chain variable domain of TCR clone 278194 (TRBV19, TRBJ1-1)
CSSIGSEAFF

SEQ ID NO: 556389 - protein, 14 aa, Homo sapiens
  CDR3 for alpha chain variable domain of TCR clone 278195 (TRAV8-3, TRAJ4)
CAVGAAGGYNKLIF

SEQ ID NO: 556390 - protein, 13 aa, Homo sapiens
  CDR3 for beta chain variable domain of TCR clone 278195 (TRBV7-2, TRBJ2-7)
CASSSPSGSEQYF

SEQ ID NO: 556391 - protein, 13 aa, Homo sapiens
  CDR3 for alpha chain variable domain of TCR clone 278196 (TRAV3, TRAJ21)
CAVREPDFNNFYF

SEQ ID NO: 556392 - protein, 13 aa, Homo sapiens
  CDR3 for beta chain variable domain of TCR clone 278196 (TRBV9, TRBJ2-1)
CASSPPGGNEQFF

SEQ ID NO: 556393 - protein, 14 aa, Homo sapiens
  CDR3 for alpha chain variable domain of TCR clone 278197 (TRAV38-2/DV8, TRAJ29)
CAYRSRSGNTPLVL

SEQ ID NO: 556394 - protein, 17 aa, Homo sapiens
  CDR3 for beta chain variable domain of TCR clone 278197 (TRBV6-1, TRBJ1-2)
CASSGTHSQRGNYGYTF

SEQ ID NO: 556395 - protein, 14 aa, Homo sapiens
  CDR3 for alpha chain variable domain of TCR clone 278198 (TRAV38-1, TRAJ45)
CASHSGGGADGLTF

SEQ ID NO: 556396 - protein, 16 aa, Homo sapiens
  CDR3 for beta chain variable domain of TCR clone 278198 (TRBV27, TRBJ2-2)
CASSFRGLVCTGELFF

SEQ ID NO: 556397 - protein, 14 aa, Homo sapiens
  CDR3 for alpha chain variable domain of TCR clone 278199 (TRAV13-1, TRAJ35)
SAASKGGFGNVLHC

SEQ ID NO: 556398 - protein, 15 aa, Homo sapiens
  CDR3 for beta chain variable domain of TCR clone 278199 (TRBV7-3, TRBJ2-1)
CASSLGQGPFGEQFF

SEQ ID NO: 556399 - protein, 17 aa, Homo sapiens
  CDR3 for alpha chain variable domain of TCR clone 278200 (TRAV3, TRAJ6)
CAVRDGPRAGGSQIPTF

SEQ ID NO: 556400 - protein, 14 aa, Homo sapiens
  CDR3 for beta chain variable domain of TCR clone 278200 (TRBV7-2, TRBJ2-7)
CASSPKTSFHEQYF

SEQ ID NO: 556401 - protein, 13 aa, Homo sapiens
  CDR3 for alpha chain variable domain of TCR clone 278201 (TRAV38-1, TRAJ7)
CAFMMDGNNRRAF

SEQ ID NO: 556402 - protein, 14 aa, Homo sapiens
  CDR3 for beta chain variable domain of TCR clone 278201 (TRBV4-2, TRBJ2-3)
CASRETRAPGMQYF

SEQ ID NO: 556403 - protein, 19 aa, Homo sapiens
  CDR3 for alpha chain variable domain of TCR clone 278202 (TRAV2, TRAJ20)
ILQVREADAAVYRDCKLSF

SEQ ID NO: 556404 - protein, 13 aa, Homo sapiens
  CDR3 for beta chain variable domain of TCR clone 278202 (TRBV15, TRBJ1-6)
CATSGGLNSPLHY

SEQ ID NO: 556405 - protein, 12 aa, Homo sapiens
  CDR3 for alpha chain variable domain of TCR clone 278203 (TRAV3, TRAJ26)
CAVRDYGQNFVF

SEQ ID NO: 556406 - protein, 15 aa, Homo sapiens
  CDR3 for beta chain variable domain of TCR clone 278203 (TRBV2, TRBJ2-5)
CASSEQGLIGETQYF

SEQ ID NO: 556407 - protein, 13 aa, Homo sapiens
  CDR3 for alpha chain variable domain of TCR clone 278204 (TRAV8-3, TRAJ43)
CAVGPDNNNDMRF

SEQ ID NO: 556408 - protein, 18 aa, Homo sapiens
  CDR3 for beta chain variable domain of TCR clone 278204 (TRBV7-8, TRBJ2-1)
CASSPYLGQRGSNNEQFF

SEQ ID NO: 556409 - protein, 12 aa, Homo sapiens
  CDR3 for alpha chain variable domain of TCR clone 278205 (TRAV13-1, TRAJ21)
CAAKEGFNKFYF

SEQ ID NO: 556410 - protein, 13 aa, Homo sapiens
  CDR3 for beta chain variable domain of TCR clone 278205 (TRBV20-1, TRBJ1-1)
CSAPLGGGSEAFF

SEQ ID NO: 556411 - protein, 13 aa, Homo sapiens
  CDR3 for alpha chain variable domain of TCR clone 278206 (TRAV13-1, TRAJ49)
CAAMLYTGNQFYF

SEQ ID NO: 556412 - protein, 16 aa, Homo sapiens
  CDR3 for beta chain variable domain of TCR clone 278206 (TRBV18, TRBJ1-3)
CASSLGILNGENTIYF

SEQ ID NO: 556413 - protein, 15 aa, Homo sapiens
  CDR3 for alpha chain variable domain of TCR clone 278207 (TRAV6, TRAJ4)
CALGGCSGGYNKLIF

SEQ ID NO: 556414 - protein, 13 aa, Homo sapiens
  CDR3 for beta chain variable domain of TCR clone 278207 (TRBV19, TRBJ1-2)
CASSVPGQDGYTF

SEQ ID NO: 556415 - protein, 14 aa, Homo sapiens
  CDR3 for alpha chain variable domain of TCR clone 278208 (TRAV14/DV4, TRAJ34)
CAMREGRPHRQAHL

SEQ ID NO: 556416 - protein, 12 aa, Homo sapiens
  CDR3 for beta chain variable domain of TCR clone 278208 (TRBV7-6, TRBJ2-7)
CASSLADSEQYF

SEQ ID NO: 556417 - protein, 13 aa, Homo sapiens
  CDR3 for alpha chain variable domain of TCR clone 278209 (TRAV20, TRAJ34)
CAVRPYNTDKLIF

SEQ ID NO: 556418 - protein, 12 aa, Homo sapiens
  CDR3 for beta chain variable domain of TCR clone 278209 (TRBV11-2, TRBJ2-1)
CASSPGNNEQFF

SEQ ID NO: 556419 - protein, 13 aa, Homo sapiens
  CDR3 for alpha chain variable domain of TCR clone 278210 (TRAV35, TRAJ57)
CAGSQGGSEKLVF

SEQ ID NO: 556420 - protein, 13 aa, Homo sapiens
  CDR3 for beta chain variable domain of TCR clone 278210 (TRBV12-4, TRBJ1-1)
CASSSGRGTEAFF

SEQ ID NO: 556421 - protein, 17 aa, Homo sapiens
  CDR3 for alpha chain variable domain of TCR clone 278211 (TRAV12-2, TRAJ45)
CAVNIWGSGGGADGPTF

SEQ ID NO: 556422 - protein, 18 aa, Homo sapiens
  CDR3 for beta chain variable domain of TCR clone 278211 (TRBV20-1, TRBJ2-6)
CSAETTPTHGSGANVLTF

SEQ ID NO: 556423 - protein, 17 aa, Homo sapiens
  CDR3 for alpha chain variable domain of TCR clone 278212 (TRAV13-1, TRAJ31)
CAPRHRLMFGDGTQLVV

SEQ ID NO: 556424 - protein, 12 aa, Homo sapiens
  CDR3 for beta chain variable domain of TCR clone 278212 (TRBV7-9, TRBJ2-7)
RASSLEGYEQYF

SEQ ID NO: 556425 - protein, 12 aa, Homo sapiens
  CDR3 for alpha chain variable domain of TCR clone 278213 (TRAV25, TRAJ7)
CAGTYGNNSLAF

SEQ ID NO: 556426 - protein, 19 aa, Homo sapiens
  CDR3 for beta chain variable domain of TCR clone 278213 (TRBV6-5, TRBJ1-6)
CASSHGTGRVRSYNSPLHF

SEQ ID NO: 556427 - protein, 13 aa, Homo sapiens
  CDR3 for alpha chain variable domain of TCR clone 278214 (TRAV21, TRAJ27)
CAARPGNAGKSTF

SEQ ID NO: 556428 - protein, 15 aa, Homo sapiens
  CDR3 for beta chain variable domain of TCR clone 278214 (TRBV4-2, TRBJ2-7)
CASSQASGGTYEQYF

SEQ ID NO: 556429 - protein, 16 aa, Homo sapiens
  CDR3 for alpha chain variable domain of TCR clone 278215 (TRAV13-1, TRAJ18)
CAASRMRGSTLGRLYF

SEQ ID NO: 556430 - protein, 13 aa, Homo sapiens
  CDR3 for beta chain variable domain of TCR clone 278215 (TRBV2, TRBJ1-4)
CASSERAGEKLFF

SEQ ID NO: 556431 - protein, 12 aa, Homo sapiens
  CDR3 for alpha chain variable domain of TCR clone 278216 (TRAV12-2, TRAJ30)
CAVRNRDDKIIF

SEQ ID NO: 556432 - protein, 16 aa, Homo sapiens
  CDR3 for beta chain variable domain of TCR clone 278216 (TRBV20-1, TRBJ1-2)
CSASMGQGVANYGYTF

SEQ ID NO: 556433 - protein, 14 aa, Homo sapiens
  CDR3 for alpha chain variable domain of TCR clone 278217 (TRAV17, TRAJ6)
CATNPAGGSYIPTF

SEQ ID NO: 556434 - protein, 13 aa, Homo sapiens
  CDR3 for beta chain variable domain of TCR clone 278217 (TRBV7-3, TRBJ2-1)
CASSLDSYNEQFF

SEQ ID NO: 556435 - protein, 15 aa, Homo sapiens
  CDR3 for alpha chain variable domain of TCR clone 278218 (TRAV12-2, TRAJ53)
CAVNGGGGSNHKLTF

SEQ ID NO: 556436 - protein, 14 aa, Homo sapiens
  CDR3 for beta chain variable domain of TCR clone 278218 (TRBV19, TRBJ2-2)
CASSTLHRSGELFF

SEQ ID NO: 556437 - protein, 12 aa, Homo sapiens
  CDR3 for alpha chain variable domain of TCR clone 278219 (TRAV16, TRAJ26)
CALRSYGQNFVF

SEQ ID NO: 556438 - protein, 12 aa, Homo sapiens
  CDR3 for beta chain variable domain of TCR clone 278219 (TRBV11-2, TRBJ2-2)
CASSLGGGELLF

SEQ ID NO: 556439 - protein, 16 aa, Homo sapiens
  CDR3 for alpha chain variable domain of TCR clone 278220 (TRAV30, TRAJ24)
CGTEIVDADSWGKFQF

SEQ ID NO: 556440 - protein, 15 aa, Homo sapiens
  CDR3 for beta chain variable domain of TCR clone 278220 (TRBV7-2, TRBJ2-3)
CASTPTSGETDTQYF

SEQ ID NO: 556441 - protein, 12 aa, Homo sapiens
  CDR3 for alpha chain variable domain of TCR clone 278221 (TRAV13-1, TRAJ21)
SAAKEGFNKFYF

SEQ ID NO: 556442 - protein, 14 aa, Homo sapiens
  CDR3 for beta chain variable domain of TCR clone 278221 (TRBV5-4, TRBJ1-1)
CASSLDSRRDEAFF

SEQ ID NO: 556443 - protein, 14 aa, Homo sapiens
  CDR3 for alpha chain variable domain of TCR clone 278222 (TRAV3, TRAJ8)
CAALSNTGFQKLVF

SEQ ID NO: 556444 - protein, 15 aa, Homo sapiens
  CDR3 for beta chain variable domain of TCR clone 278222 (TRBV28, TRBJ2-5)
CASSLGLGNQETQYF

SEQ ID NO: 556445 - protein, 13 aa, Homo sapiens
  CDR3 for alpha chain variable domain of TCR clone 278223 (TRAV26-2, TRAJ54)
CIPRVGGAQKLLF

SEQ ID NO: 556446 - protein, 16 aa, Homo sapiens
  CDR3 for beta chain variable domain of TCR clone 278223 (TRBV4-1, TRBJ1-1)
CASSSMSERPNTEAFF

SEQ ID NO: 556447 - protein, 18 aa, Homo sapiens
  CDR3 for alpha chain variable domain of TCR clone 278224 (TRAV12-1, TRAJ26)
SSVIQPPTSVPYGQNFVF

SEQ ID NO: 556448 - protein, 14 aa, Homo sapiens
  CDR3 for beta chain variable domain of TCR clone 278224 (TRBV5-4, TRBJ2-1)
CTSSLDQGLNEQFF

SEQ ID NO: 556449 - protein, 13 aa, Homo sapiens
  CDR3 for alpha chain variable domain of TCR clone 278225 (TRAV8-6, TRAJ40)
CAVSVTGTYKYIF

SEQ ID NO: 556450 - protein, 15 aa, Homo sapiens
  CDR3 for beta chain variable domain of TCR clone 278225 (TRBV4-1, TRBJ2-3)
YASSRGQGIPDTKYF

SEQ ID NO: 556451 - protein, 11 aa, Homo sapiens
  CDR3 for alpha chain variable domain of TCR clone 278226 (TRAV1-1, TRAJ23)
CAVRQGGKLIF

SEQ ID NO: 556452 - protein, 14 aa, Homo sapiens
  CDR3 for beta chain variable domain of TCR clone 278226 (TRBV7-7, TRBJ2-2)
CATRQDSDTGELFF

SEQ ID NO: 556453 - protein, 12 aa, Homo sapiens
  CDR3 for alpha chain variable domain of TCR clone 278227 (TRAV4, TRAJ20)
CLVGEGQERLQA

SEQ ID NO: 556454 - protein, 17 aa, Homo sapiens
  CDR3 for beta chain variable domain of TCR clone 278227 (TRBV11-2, TRBJ2-1)
CASSLYPPGVEYNEQFF

SEQ ID NO: 556455 - protein, 14 aa, Homo sapiens
  CDR3 for alpha chain variable domain of TCR clone 278228 (TRAV26-1, TRAJ39)
CIVRGSRAGNMLKF

SEQ ID NO: 556456 - protein, 15 aa, Homo sapiens
  CDR3 for beta chain variable domain of TCR clone 278228 (TRBV7-9, TRBJ1-5)
CASSQGHQPNQPQHF

SEQ ID NO: 556457 - protein, 16 aa, Homo sapiens
  CDR3 for alpha chain variable domain of TCR clone 278229 (TRAV3, TRAJ37)
CAVRGKGSVNTGQLIF

SEQ ID NO: 556458 - protein, 16 aa, Homo sapiens
  CDR3 for beta chain variable domain of TCR clone 278229 (TRBV12-4, TRBJ1-5)
CASSRPVGGSNQPQHF

SEQ ID NO: 556459 - protein, 12 aa, Homo sapiens
  CDR3 for alpha chain variable domain of TCR clone 278230 (TRAV8-3, TRAJ26)
GAGDNYGQNFVF

SEQ ID NO: 556460 - protein, 15 aa, Homo sapiens
  CDR3 for beta chain variable domain of TCR clone 278230 (TRBV11-2, TRBJ2-1)
CASSLGTSGLNEQFF

SEQ ID NO: 556461 - protein, 14 aa, Homo sapiens
  CDR3 for alpha chain variable domain of TCR clone 278231 (TRAV23/DV6, TRAJ4)
CAANLSGGYNKLIL

SEQ ID NO: 556462 - protein, 17 aa, Homo sapiens
  CDR3 for beta chain variable domain of TCR clone 278231 (TRBV4-1, TRBJ1-3)
CASSPQRGIRFGNTIYF

SEQ ID NO: 556463 - protein, 13 aa, Homo sapiens
  CDR3 for alpha chain variable domain of TCR clone 278232 (TRAV8-2, TRAJ49)
CVVTPNTGNQFYF

SEQ ID NO: 556464 - protein, 16 aa, Homo sapiens
  CDR3 for beta chain variable domain of TCR clone 278232 (TRBV20-1, TRBJ1-5)
CSAELPGQQTNQPQHF

SEQ ID NO: 556465 - protein, 15 aa, Homo sapiens
  CDR3 for alpha chain variable domain of TCR clone 278233 (TRAV3, TRAJ5)
CAGRDLYTGRRALTF

SEQ ID NO: 556466 - protein, 16 aa, Homo sapiens
  CDR3 for beta chain variable domain of TCR clone 278233 (TRBV20-1, TRBJ1-4)
CSAPGQGLLTNEKLFF

SEQ ID NO: 556467 - protein, 12 aa, Homo sapiens
  CDR3 for alpha chain variable domain of TCR clone 278234 (TRAV12-2, TRAJ30)
CSVRNRDDKIIF

SEQ ID NO: 556468 - protein, 15 aa, Homo sapiens
  CDR3 for beta chain variable domain of TCR clone 278234 (TRBV6-3, TRBJ1-5)
CASRVDRWSNQPQHF

SEQ ID NO: 556469 - protein, 23 aa, Homo sapiens
  CDR3 for alpha chain variable domain of TCR clone 278235 (TRAV21, TRAJ32)
CAVEIMVLLQTSSSLALALCLLS

SEQ ID NO: 556470 - protein, 13 aa, Homo sapiens
  CDR3 for beta chain variable domain of TCR clone 278235 (TRBV2, TRBJ1-6)
CASGRGGISPLHF

SEQ ID NO: 556471 - protein, 11 aa, Homo sapiens
  CDR3 for alpha chain variable domain of TCR clone 278236 (TRAV8-3, TRAJ47)
CAVGPRNKLVF

SEQ ID NO: 556472 - protein, 15 aa, Homo sapiens
  CDR3 for beta chain variable domain of TCR clone 278236 (TRBV7-9, TRBJ1-5)
CASSQGHQPNQPQHF

SEQ ID NO: 556473 - protein, 18 aa, Homo sapiens
  CDR3 for alpha chain variable domain of TCR clone 278237 (TRAV21, TRAJ52)
CAVRPSPAGGTSYGKLTF

SEQ ID NO: 556474 - protein, 17 aa, Homo sapiens
  CDR3 for beta chain variable domain of TCR clone 278237 (TRBV13, TRBJ2-3)
CASSLPSVAGGRNTQYF

SEQ ID NO: 556475 - protein, 16 aa, Homo sapiens
  CDR3 for alpha chain variable domain of TCR clone 278238 (TRAV21, TRAJ52)
CAVTNAGGTSYGKLTF

SEQ ID NO: 556476 - protein, 16 aa, Homo sapiens
  CDR3 for beta chain variable domain of TCR clone 278238 (TRBV2, TRBJ2-1)
CASSVGGSLSYNEQFV

SEQ ID NO: 556477 - protein, 11 aa, Homo sapiens
  CDR3 for alpha chain variable domain of TCR clone 278239 (TRAV21, TRAJ23)
CAPQRRGKLIF

SEQ ID NO: 556478 - protein, 14 aa, Homo sapiens
  CDR3 for beta chain variable domain of TCR clone 278239 (TRBV7-8, TRBJ2-3)
CASSSRDSTDTQYF

SEQ ID NO: 556479 - protein, 14 aa, Homo sapiens
  CDR3 for alpha chain variable domain of TCR clone 278240 (TRAV1-2, TRAJ16)
WAVNRFSDGQKLLF

SEQ ID NO: 556480 - protein, 14 aa, Homo sapiens
  CDR3 for beta chain variable domain of TCR clone 278240 (TRBV18, TRBJ2-7)
CASSPRGGAYEQYF

SEQ ID NO: 556481 - protein, 15 aa, Homo sapiens
  CDR3 for alpha chain variable domain of TCR clone 278241 (TRAV21, TRAJ24)
CAARSSTDSWGKLQF

SEQ ID NO: 556482 - protein, 15 aa, Homo sapiens
  CDR3 for beta chain variable domain of TCR clone 278241 (TRBV4-1, TRBJ2-7)
CASSQSTGRLYEQYF

SEQ ID NO: 556483 - protein, 16 aa, Homo sapiens
  CDR3 for alpha chain variable domain of TCR clone 278242 (TRAV8-3, TRAJ44)
CAVGTLMTGTASKLTF

SEQ ID NO: 556484 - protein, 15 aa, Homo sapiens
  CDR3 for beta chain variable domain of TCR clone 278242 (TRBV10-2, TRBJ2-6)
CASSEQGTGANILTF

SEQ ID NO: 556485 - protein, 15 aa, Homo sapiens
  CDR3 for alpha chain variable domain of TCR clone 278243 (TRAV4, TRAJ39)
CLVGPNNNAGNMLTF

SEQ ID NO: 556486 - protein, 17 aa, Homo sapiens
  CDR3 for beta chain variable domain of TCR clone 278243 (TRBV11-3, TRBJ2-1)
CQQLKGGRGGSYNEQFF

SEQ ID NO: 556487 - protein, 15 aa, Homo sapiens
  CDR3 for alpha chain variable domain of TCR clone 278244 (TRAV4, TRAJ39)
CLGGPNNNAGNMLTF

SEQ ID NO: 556488 - protein, 12 aa, Homo sapiens
  CDR3 for beta chain variable domain of TCR clone 278244 (TRBV12-4, TRBJ2-7)
CASNPGGGEQYF

SEQ ID NO: 556489 - protein, 13 aa, Homo sapiens
  CDR3 for alpha chain variable domain of TCR clone 278245 (TRAV2, TRAJ40)
CAVVTSGTYKYIF

SEQ ID NO: 556490 - protein, 16 aa, Homo sapiens
  CDR3 for beta chain variable domain of TCR clone 278245 (TRBV19, TRBJ1-1)
CASRVDVTGAAWGAFF

SEQ ID NO: 556491 - protein, 14 aa, Homo sapiens
  CDR3 for alpha chain variable domain of TCR clone 278246 (TRAV38-1, TRAJ43)
CAFMKHHNNNDMRF

SEQ ID NO: 556492 - protein, 17 aa, Homo sapiens
  CDR3 for beta chain variable domain of TCR clone 278246 (TRBV7-7, TRBJ1-4)
CASSLVGQGASNEKLFF

SEQ ID NO: 556493 - protein, 15 aa, Homo sapiens
  CDR3 for alpha chain variable domain of TCR clone 278247 (TRAV8-6, TRAJ11)
CAVSDCRSGYSTLTF

SEQ ID NO: 556494 - protein, 15 aa, Homo sapiens
  CDR3 for beta chain variable domain of TCR clone 278247 (TRBV7-9, TRBJ1-6)
CASSSPGRGNSPLHF

SEQ ID NO: 556495 - protein, 13 aa, Homo sapiens
  CDR3 for alpha chain variable domain of TCR clone 278248 (TRAV27, TRAJ17)
CAGAATAGNKLTF

SEQ ID NO: 556496 - protein, 13 aa, Homo sapiens
  CDR3 for beta chain variable domain of TCR clone 278248 (TRBV19, TRBJ1-3)
CASRLSLGNTIYF

SEQ ID NO: 556497 - protein, 15 aa, Homo sapiens
  CDR3 for alpha chain variable domain of TCR clone 278249 (TRAV26-1, TRAJ29)
CIVRVEGSGNTPLVF

SEQ ID NO: 556498 - protein, 15 aa, Homo sapiens
  CDR3 for beta chain variable domain of TCR clone 278249 (TRBV4-1, TRBJ1-4)
CASSDTGGTNEKLFF

SEQ ID NO: 556499 - protein, 15 aa, Homo sapiens
  CDR3 for alpha chain variable domain of TCR clone 278250 (TRAV6, TRAJ4)
CALGGFSGIYNKLIF

SEQ ID NO: 556500 - protein, 13 aa, Homo sapiens
  CDR3 for beta chain variable domain of TCR clone 278250 (TRBV19, TRBJ1-2)
CASSVPGQDGYTF

SEQ ID NO: 556501 - protein, 12 aa, Homo sapiens
  CDR3 for alpha chain variable domain of TCR clone 278251 (TRAV8-3, TRAJ26)
CAGDNYGQNFVF

SEQ ID NO: 556502 - protein, 15 aa, Homo sapiens
  CDR3 for beta chain variable domain of TCR clone 278251 (TRBV11-2, TRBJ2-1)
CASSLGTSGLNEQYF

SEQ ID NO: 556503 - protein, 12 aa, Homo sapiens
  CDR3 for alpha chain variable domain of TCR clone 278252 (TRAV1-2, TRAJ9)
CTGYTGGFKTIF

SEQ ID NO: 556504 - protein, 15 aa, Homo sapiens
  CDR3 for beta chain variable domain of TCR clone 278252 (TRBV11-2, TRBJ2-1)
CASSPAGQSLNEQFV

SEQ ID NO: 556505 - protein, 10 aa, Homo sapiens
  CDR3 for alpha chain variable domain of TCR clone 278253 (TRAV12-3, TRAJ49)
CAMNDDQFYF

SEQ ID NO: 556506 - protein, 12 aa, Homo sapiens
  CDR3 for beta chain variable domain of TCR clone 278253 (TRBV14, TRBJ2-5)
CASSHLKETQYF

SEQ ID NO: 556507 - protein, 16 aa, Homo sapiens
  CDR3 for alpha chain variable domain of TCR clone 278254 (TRAV38-2/DV8, TRAJ45)
CAYRGNSGGGADGLTF

SEQ ID NO: 556508 - protein, 17 aa, Homo sapiens
  CDR3 for beta chain variable domain of TCR clone 278254 (TRBV11-3, TRBJ2-5)
CASSRPGVRGGKETQYF

SEQ ID NO: 556509 - protein, 16 aa, Homo sapiens
  CDR3 for alpha chain variable domain of TCR clone 278255 (TRAV12-3, TRAJ45)
CAMVWGSGGGADGLTF

SEQ ID NO: 556510 - protein, 15 aa, Homo sapiens
  CDR3 for beta chain variable domain of TCR clone 278255 (TRBV3-1, TRBJ1-2)
CASSHPGTPGYGYTF

SEQ ID NO: 556511 - protein, 14 aa, Homo sapiens
  CDR3 for alpha chain variable domain of TCR clone 278256 (TRAV1-2, TRAJ16)
FAVNRFSDGQKLLF

SEQ ID NO: 556512 - protein, 13 aa, Homo sapiens
  CDR3 for beta chain variable domain of TCR clone 278256 (TRBV10-2, TRBJ2-7)
CASSESGVYEQYF

SEQ ID NO: 556513 - protein, 13 aa, Homo sapiens
  CDR3 for alpha chain variable domain of TCR clone 278257 (TRAV21, TRAJ27)
CAARPGNAAKSTF

SEQ ID NO: 556514 - protein, 16 aa, Homo sapiens
  CDR3 for beta chain variable domain of TCR clone 278257 (TRBV20-1, TRBJ1-2)
CSASMGQGVANYGYTF

SEQ ID NO: 556515 - protein, 17 aa, Homo sapiens
  CDR3 for alpha chain variable domain of TCR clone 278258 (TRAV13-1, TRAJ52)
CAASSGPGGTSYGKLTF

SEQ ID NO: 556516 - protein, 15 aa, Homo sapiens
  CDR3 for beta chain variable domain of TCR clone 278258 (TRBV2, TRBJ2-1)
CASSELAGSYNEQFF

SEQ ID NO: 556517 - protein, 17 aa, Homo sapiens
  CDR3 for alpha chain variable domain of TCR clone 278259 (TRAV13-1, TRAJ28)
CAASPPYSGAGSYQLTF

SEQ ID NO: 556518 - protein, 19 aa, Homo sapiens
  CDR3 for beta chain variable domain of TCR clone 278259 (TRBV11-2, TRBJ2-2)
LRTRPCISVLAASLPELFF

SEQ ID NO: 556519 - protein, 16 aa, Homo sapiens
  CDR3 for alpha chain variable domain of TCR clone 278260 (TRAV2, TRAJ4)
CAVEDRFSGGYNKLIF

SEQ ID NO: 556520 - protein, 15 aa, Homo sapiens
  CDR3 for beta chain variable domain of TCR clone 278260 (TRBV20-1, TRBJ2-7)
CSARDRVSGMDEQYF

SEQ ID NO: 556521 - protein, 15 aa, Homo sapiens
  CDR3 for alpha chain variable domain of TCR clone 278261 (TRAV29/DV5, TRAJ24)
CAASGATDSWRKFQL

SEQ ID NO: 556522 - protein, 12 aa, Homo sapiens
  CDR3 for beta chain variable domain of TCR clone 278261 (TRBV11-2, TRBJ2-2)
CASSLPTGELFF

SEQ ID NO: 556523 - protein, 15 aa, Homo sapiens
  CDR3 for alpha chain variable domain of TCR clone 278262 (TRAV13-1, TRAJ17)
CAASIERAAGNKLTF

SEQ ID NO: 556524 - protein, 12 aa, Homo sapiens
  CDR3 for beta chain variable domain of TCR clone 278262 (TRBV5-7, TRBJ1-1)
CAISLGRGKAFF

SEQ ID NO: 556525 - protein, 15 aa, Homo sapiens
  CDR3 for alpha chain variable domain of TCR clone 278263 (TRAV3, TRAJ5)
CAVRDLDTGRRALTF

SEQ ID NO: 556526 - protein, 15 aa, Homo sapiens
  CDR3 for beta chain variable domain of TCR clone 278263 (TRBV19, TRBJ2-4)
CASRGPRRGENIQYF

SEQ ID NO: 556527 - protein, 15 aa, Homo sapiens
  CDR3 for alpha chain variable domain of TCR clone 278264 (TRAV13-2, TRAJ45)
CAENHSGGGADGLTF

SEQ ID NO: 556528 - protein, 15 aa, Homo sapiens
  CDR3 for beta chain variable domain of TCR clone 278264 (TRBV7-2, TRBJ2-7)
CASSLALGSAYEQYF

SEQ ID NO: 556529 - protein, 14 aa, Homo sapiens
  CDR3 for alpha chain variable domain of TCR clone 278265 (TRAV17, TRAJ16)
CATADFSDGQKLPF

SEQ ID NO: 556530 - protein, 15 aa, Homo sapiens
  CDR3 for beta chain variable domain of TCR clone 278265 (TRBV18, TRBJ2-1)
CAISPPSASYNEQFF

SEQ ID NO: 556531 - protein, 14 aa, Homo sapiens
  CDR3 for alpha chain variable domain of TCR clone 278266 (TRAV1-2, TRAJ8)
CAVREDTGFQKLVF

SEQ ID NO: 556532 - protein, 14 aa, Homo sapiens
  CDR3 for beta chain variable domain of TCR clone 278266 (TRBV11-1, TRBJ2-7)
CASTFAVPSYEQYF

SEQ ID NO: 556533 - protein, 13 aa, Homo sapiens
  CDR3 for alpha chain variable domain of TCR clone 278267 (TRAV12-3, TRAJ33)
CAMSVNSNYQLIW

SEQ ID NO: 556534 - protein, 17 aa, Homo sapiens
  CDR3 for beta chain variable domain of TCR clone 278267 (TRBV7-2, TRBJ2-1)
CASSLYPPGVEYNEQFF

SEQ ID NO: 556535 - protein, 11 aa, Homo sapiens
  CDR3 for alpha chain variable domain of TCR clone 278268 (TRAV25, TRAJ29)
CRHSGNTPLVF

SEQ ID NO: 556536 - protein, 14 aa, Homo sapiens
  CDR3 for beta chain variable domain of TCR clone 278268 (TRBV6-1, TRBJ2-7)
CASTRTGDYYEQYF

SEQ ID NO: 556537 - protein, 12 aa, Homo sapiens
  CDR3 for alpha chain variable domain of TCR clone 278269 (TRAV1-1, TRAJ9)
CAVDTGVLKTIF

SEQ ID NO: 556538 - protein, 14 aa, Homo sapiens
  CDR3 for beta chain variable domain of TCR clone 278269 (TRBV7-8, TRBJ2-5)
CASSATGGQETQYF

SEQ ID NO: 556539 - protein, 10 aa, Homo sapiens
  CDR3 for alpha chain variable domain of TCR clone 278270 (TRAV12-3, TRAJ50)
CAMSAMGNLL

SEQ ID NO: 556540 - protein, 14 aa, Homo sapiens
  CDR3 for beta chain variable domain of TCR clone 278270 (TRBV11-2, TRBJ2-1)
CASTTGQGNNEQFF

SEQ ID NO: 556541 - protein, 14 aa, Homo sapiens
  CDR3 for alpha chain variable domain of TCR clone 278271 (TRAV17, TRAJ40)
CATALTSGTYKYIF

SEQ ID NO: 556542 - protein, 15 aa, Homo sapiens
  CDR3 for beta chain variable domain of TCR clone 278271 (TRBV6-3, TRBJ2-7)
CASSSPGTVFYEQYF

SEQ ID NO: 556543 - protein, 12 aa, Homo sapiens
  CDR3 for alpha chain variable domain of TCR clone 278272 (TRAV1-1, TRAJ15)
CAVGQAGTALIF

SEQ ID NO: 556544 - protein, 15 aa, Homo sapiens
  CDR3 for beta chain variable domain of TCR clone 278272 (TRBV20-1, TRBJ2-7)
CSARDRVSGMDEQYF

SEQ ID NO: 556545 - protein, 15 aa, Homo sapiens
  CDR3 for alpha chain variable domain of TCR clone 278273 (TRAV21, TRAJ32)
CAVNSYGGATNKLIF

SEQ ID NO: 556546 - protein, 18 aa, Homo sapiens
  CDR3 for beta chain variable domain of TCR clone 278273 (TRBV7-9, TRBJ2-1)
CASSTGLADGSSYNEQFF

SEQ ID NO: 556547 - protein, 12 aa, Homo sapiens
  CDR3 for alpha chain variable domain of TCR clone 278274 (TRAV1-2, TRAJ7)
CAVAYGNNRLAF

SEQ ID NO: 556548 - protein, 16 aa, Homo sapiens
  CDR3 for beta chain variable domain of TCR clone 278274 (TRBV5-1, TRBJ2-7)
CASSPMTGALSYEQYF

SEQ ID NO: 556549 - protein, 14 aa, Homo sapiens
  CDR3 for alpha chain variable domain of TCR clone 278275 (TRAV12-3, TRAJ20)
CAMSARRGDYKLSF

SEQ ID NO: 556550 - protein, 16 aa, Homo sapiens
  CDR3 for beta chain variable domain of TCR clone 278275 (TRBV7-9, TRBJ1-2)
CASSLGFSSGEDGYTF

SEQ ID NO: 556551 - protein, 14 aa, Homo sapiens
  CDR3 for alpha chain variable domain of TCR clone 278276 (TRAV34, TRAJ44)
CGADGTGTASKPTL

SEQ ID NO: 556552 - protein, 12 aa, Homo sapiens
  CDR3 for beta chain variable domain of TCR clone 278276 (TRBV11-2, TRBJ2-2)
CASSLGGGELFF

SEQ ID NO: 556553 - protein, 15 aa, Homo sapiens
  CDR3 for alpha chain variable domain of TCR clone 278277 (TRAV25, TRAJ48)
CAGPGANFGNEKLTF

SEQ ID NO: 556554 - protein, 14 aa, Homo sapiens
  CDR3 for beta chain variable domain of TCR clone 278277 (TRBV5-4, TRBJ2-2)
CASRLDGGTGELFF

SEQ ID NO: 556555 - protein, 14 aa, Homo sapiens
  CDR3 for alpha chain variable domain of TCR clone 278278 (TRAV13-1, TRAJ22)
CAASYSGSARQMTF

SEQ ID NO: 556556 - protein, 13 aa, Homo sapiens
  CDR3 for beta chain variable domain of TCR clone 278278 (TRBV6-3, TRBJ1-2)
CASSLTGDYGYTF

SEQ ID NO: 556557 - protein, 15 aa, Homo sapiens
  CDR3 for alpha chain variable domain of TCR clone 278279 (TRAV3, TRAJ22)
CAVRDRCGSARQLTF

SEQ ID NO: 556558 - protein, 16 aa, Homo sapiens
  CDR3 for beta chain variable domain of TCR clone 278279 (TRBV11-2, TRBJ2-1)
CASARGSYSHHNEQFF

SEQ ID NO: 556559 - protein, 14 aa, Homo sapiens
  CDR3 for alpha chain variable domain of TCR clone 278280 (TRAV9-2, TRAJ39)
CALYIYNAGNMLTF

SEQ ID NO: 556560 - protein, 15 aa, Homo sapiens
  CDR3 for beta chain variable domain of TCR clone 278280 (TRBV7-2, TRBJ1-2)
CASSLAPDRGLGYTF

SEQ ID NO: 556561 - protein, 13 aa, Homo sapiens
  CDR3 for alpha chain variable domain of TCR clone 278281 (TRAV21, TRAJ27)
CAARPGNAGTSTF

SEQ ID NO: 556562 - protein, 14 aa, Homo sapiens
  CDR3 for beta chain variable domain of TCR clone 278281 (TRBV7-6, TRBJ2-3)
CASSVGTVTDTQYF

SEQ ID NO: 556563 - protein, 15 aa, Homo sapiens
  CDR3 for alpha chain variable domain of TCR clone 278282 (TRAV13-1, TRAJ32)
CAASIYGGATNKLIF

SEQ ID NO: 556564 - protein, 17 aa, Homo sapiens
  CDR3 for beta chain variable domain of TCR clone 278282 (TRBV7-3, TRBJ2-5)
CASSWGSGRGGSETQYF

SEQ ID NO: 556565 - protein, 18 aa, Homo sapiens
  CDR3 for alpha chain variable domain of TCR clone 278283 (TRAV1-1, TRAJ42)
CAVSPSAFYGGSQGNLIF

SEQ ID NO: 556566 - protein, 18 aa, Homo sapiens
  CDR3 for beta chain variable domain of TCR clone 278283 (TRBV15, TRBJ2-3)
CATSRAGARSWDTDTQYF

SEQ ID NO: 556567 - protein, 15 aa, Homo sapiens
  CDR3 for alpha chain variable domain of TCR clone 278284 (TRAV35, TRAJ58)
CAGRRQETSGSRLTF

SEQ ID NO: 556568 - protein, 15 aa, Homo sapiens
  CDR3 for beta chain variable domain of TCR clone 278284 (TRBV2, TRBJ2-7)
CASSPYGTGASEQYF

SEQ ID NO: 556569 - protein, 15 aa, Homo sapiens
  CDR3 for alpha chain variable domain of TCR clone 278285 (TRAV27, TRAJ38)
FAARRNAGNNRKLIW

SEQ ID NO: 556570 - protein, 13 aa, Homo sapiens
  CDR3 for beta chain variable domain of TCR clone 278285 (TRBV20-1, TRBJ1-1)
CSARAGGNTEAFF

SEQ ID NO: 556571 - protein, 12 aa, Homo sapiens
  CDR3 for alpha chain variable domain of TCR clone 278286 (TRAV2, TRAJ31)
CAVEDNNARLMF

SEQ ID NO: 556572 - protein, 16 aa, Homo sapiens
  CDR3 for beta chain variable domain of TCR clone 278286 (TRBV7-3, TRBJ2-2)
CASSLKRGTLSGELFF

SEQ ID NO: 556573 - protein, 12 aa, Homo sapiens
  CDR3 for alpha chain variable domain of TCR clone 278287 (TRAV13-1, TRAJ27)
CAAHTNAGKSTF

SEQ ID NO: 556574 - protein, 13 aa, Homo sapiens
  CDR3 for beta chain variable domain of TCR clone 278287 (TRBV7-7, TRBJ2-3)
CASSLSRADTQYF

SEQ ID NO: 556575 - protein, 14 aa, Homo sapiens
  CDR3 for alpha chain variable domain of TCR clone 278288 (TRAV13-1, TRAJ32)
CAARGSGATNKLIF

SEQ ID NO: 556576 - protein, 15 aa, Homo sapiens
  CDR3 for beta chain variable domain of TCR clone 278288 (TRBV5-5, TRBJ1-1)
CASRLVGKDNTEAFC

SEQ ID NO: 556577 - protein, 14 aa, Homo sapiens
  CDR3 for alpha chain variable domain of TCR clone 278289 (TRAV1-2, TRAJ16)
CAVNRFSDGQKLLF

SEQ ID NO: 556578 - protein, 12 aa, Homo sapiens
  CDR3 for beta chain variable domain of TCR clone 278289 (TRBV7-8, TRBJ2-1)
CASSLGDREQFF

SEQ ID NO: 556579 - protein, 12 aa, Homo sapiens
  CDR3 for alpha chain variable domain of TCR clone 278290 (TRAV3, TRAJ43)
CAVRDPNYDMRF

SEQ ID NO: 556580 - protein, 14 aa, Homo sapiens
  CDR3 for beta chain variable domain of TCR clone 278290 (TRBV5-1, TRBJ2-3)
CASSLFGPTDTQYF

SEQ ID NO: 556581 - protein, 14 aa, Homo sapiens
  CDR3 for alpha chain variable domain of TCR clone 278291 (TRAV13-1, TRAJ48)
CAASRSFGNEKLTF

SEQ ID NO: 556582 - protein, 15 aa, Homo sapiens
  CDR3 for beta chain variable domain of TCR clone 278291 (TRBV12-4, TRBJ2-5)
CASSLGGQGRETQYF

SEQ ID NO: 556583 - protein, 15 aa, Homo sapiens
  CDR3 for alpha chain variable domain of TCR clone 278292 (TRAV21, TRAJ24)
CAARSSTNSWGKLQF

SEQ ID NO: 556584 - protein, 16 aa, Homo sapiens
  CDR3 for beta chain variable domain of TCR clone 278292 (TRBV27, TRBJ2-2)
CASSSSGVSNTGELFF

SEQ ID NO: 556585 - protein, 13 aa, Homo sapiens
  CDR3 for alpha chain variable domain of TCR clone 278293 (TRAV26-1, TRAJ54)
CIVRVKGAQKLLF

SEQ ID NO: 556586 - protein, 15 aa, Homo sapiens
  CDR3 for beta chain variable domain of TCR clone 278293 (TRBV20-1, TRBJ2-1)
CSAQPGGGPYNEQFF

SEQ ID NO: 556587 - protein, 18 aa, Homo sapiens
  CDR3 for alpha chain variable domain of TCR clone 278294 (TRAV26-1, TRAJ56)
FIVRVASRVTGANSKLTF

SEQ ID NO: 556588 - protein, 15 aa, Homo sapiens
  CDR3 for beta chain variable domain of TCR clone 278294 (TRBV7-9, TRBJ2-5)
CASSDTGRGRETQYF

SEQ ID NO: 556589 - protein, 15 aa, Homo sapiens
  CDR3 for alpha chain variable domain of TCR clone 278295 (TRAV4, TRAJ8)
CLVGEQHTGIQKLVF

SEQ ID NO: 556590 - protein, 15 aa, Homo sapiens
  CDR3 for beta chain variable domain of TCR clone 278295 (TRBV7-9, TRBJ2-5)
CASSNRDYLQETQYF

SEQ ID NO: 556591 - protein, 12 aa, Homo sapiens
  CDR3 for alpha chain variable domain of TCR clone 278296 (TRAV21, TRAJ31)
CAVSPARGRLMF

SEQ ID NO: 556592 - protein, 14 aa, Homo sapiens
  CDR3 for beta chain variable domain of TCR clone 278296 (TRBV12-4, TRBJ1-1)
CASASSEFYTEAFF

SEQ ID NO: 556593 - protein, 12 aa, Homo sapiens
  CDR3 for alpha chain variable domain of TCR clone 278297 (TRAV12-1, TRAJ23)
CGVNWGGGKLIF

SEQ ID NO: 556594 - protein, 14 aa, Homo sapiens
  CDR3 for beta chain variable domain of TCR clone 278297 (TRBV27, TRBJ2-7)
CASSPQRGTYEQYF

SEQ ID NO: 556595 - protein, 13 aa, Homo sapiens
  CDR3 for alpha chain variable domain of TCR clone 278298 (TRAV1-1, TRAJ7)
CAVSPLWEQQTRF

SEQ ID NO: 556596 - protein, 15 aa, Homo sapiens
  CDR3 for beta chain variable domain of TCR clone 278298 (TRBV7-3, TRBJ2-2)
CASSETGQGTGELFF

SEQ ID NO: 556597 - protein, 11 aa, Homo sapiens
  CDR3 for alpha chain variable domain of TCR clone 278299 (TRAV2, TRAJ13)
CASGGYQKVTF

SEQ ID NO: 556598 - protein, 12 aa, Homo sapiens
  CDR3 for beta chain variable domain of TCR clone 278299 (TRBV12-4, TRBJ1-3)
CASSFSGNTIYF

SEQ ID NO: 556599 - protein, 14 aa, Homo sapiens
  CDR3 for alpha chain variable domain of TCR clone 278300 (TRAV21, TRAJ45)
CAVSSGGGADGLTF

SEQ ID NO: 556600 - protein, 14 aa, Homo sapiens
  CDR3 for beta chain variable domain of TCR clone 278300 (TRBV7-2, TRBJ2-7)
CASSLDPGPYEQYF

SEQ ID NO: 556601 - protein, 15 aa, Homo sapiens
  CDR3 for alpha chain variable domain of TCR clone 278301 (TRAV3, TRAJ47)
CAVRDIGEYGNKLVF

SEQ ID NO: 556602 - protein, 13 aa, Homo sapiens
  CDR3 for beta chain variable domain of TCR clone 278301 (TRBV13, TRBJ2-5)
CQQLERVGETQYF

SEQ ID NO: 556603 - protein, 16 aa, Homo sapiens
  CDR3 for alpha chain variable domain of TCR clone 278302 (TRAV30, TRAJ24)
CGTEIVDAASWGKFQF

SEQ ID NO: 556604 - protein, 15 aa, Homo sapiens
  CDR3 for beta chain variable domain of TCR clone 278302 (TRBV7-9, TRBJ1-4)
CASSARTRGNEKLFF

SEQ ID NO: 556605 - protein, 12 aa, Homo sapiens
  CDR3 for alpha chain variable domain of TCR clone 278303 (TRAV8-3, TRAJ26)
CAGDDYGQNFVF

SEQ ID NO: 556606 - protein, 13 aa, Homo sapiens
  CDR3 for beta chain variable domain of TCR clone 278303 (TRBV20-1, TRBJ1-1)
CSAGTVGNTEAFF

SEQ ID NO: 556607 - protein, 11 aa, Homo sapiens
  CDR3 for alpha chain variable domain of TCR clone 278304 (TRAV17, TRAJ43)
CATPRSNDMRF

SEQ ID NO: 556608 - protein, 15 aa, Homo sapiens
  CDR3 for beta chain variable domain of TCR clone 278304 (TRBV11-2, TRBJ2-1)
CASSVGTSGLNEQFF

SEQ ID NO: 556609 - protein, 15 aa, Homo sapiens
  CDR3 for alpha chain variable domain of TCR clone 278305 (TRAV1-2, TRAJ28)
CAVQYSGAGSYQLIF

SEQ ID NO: 556610 - protein, 15 aa, Homo sapiens
  CDR3 for beta chain variable domain of TCR clone 278305 (TRBV9, TRBJ1-6)
CASSVAGTGDSPLHF

SEQ ID NO: 556611 - protein, 12 aa, Homo sapiens
  CDR3 for alpha chain variable domain of TCR clone 278306 (TRAV29/DV5, TRAJ15)
CASNQAGTALIF

SEQ ID NO: 556612 - protein, 15 aa, Homo sapiens
  CDR3 for beta chain variable domain of TCR clone 278306 (TRBV6-3, TRBJ2-7)
CASSSPGTVFYEQYF

SEQ ID NO: 556613 - protein, 16 aa, Homo sapiens
  CDR3 for alpha chain variable domain of TCR clone 278307 (TRAV26-1, TRAJ12)
TIASSELMDSSYKLIF

SEQ ID NO: 556614 - protein, 11 aa, Homo sapiens
  CDR3 for beta chain variable domain of TCR clone 278307 (TRBV7-9, TRBJ2-3)
CASSPPDTQYF

SEQ ID NO: 556615 - protein, 12 aa, Homo sapiens
  CDR3 for alpha chain variable domain of TCR clone 278308 (TRAV12-3, TRAJ17)
CAMTLTGNKLTF

SEQ ID NO: 556616 - protein, 15 aa, Homo sapiens
  CDR3 for beta chain variable domain of TCR clone 278308 (TRBV11-2, TRBJ2-2)
CASRGLAANTGELFF

SEQ ID NO: 556617 - protein, 12 aa, Homo sapiens
  CDR3 for alpha chain variable domain of TCR clone 278309 (TRAV13-2, TRAJ31)
CAESYNNARLMF

SEQ ID NO: 556618 - protein, 13 aa, Homo sapiens
  CDR3 for beta chain variable domain of TCR clone 278309 (TRBV24-1, TRBJ1-3)
CATMADSGNTIYC

SEQ ID NO: 556619 - protein, 15 aa, Homo sapiens
  CDR3 for alpha chain variable domain of TCR clone 278310 (TRAV29/DV5, TRAJ31)
CSVLLCSKRNPRLMF

SEQ ID NO: 556620 - protein, 14 aa, Homo sapiens
  CDR3 for beta chain variable domain of TCR clone 278310 (TRBV7-8, TRBJ2-7)
CARSVGQGAYEQYF

SEQ ID NO: 556621 - protein, 16 aa, Homo sapiens
  CDR3 for alpha chain variable domain of TCR clone 278311 (TRAV12-3, TRAJ53)
CAMSPGSGGSNYKLTF

SEQ ID NO: 556622 - protein, 12 aa, Homo sapiens
  CDR3 for beta chain variable domain of TCR clone 278311 (TRBV29-1, TRBJ2-5)
AAARTERGTQYF

SEQ ID NO: 556623 - protein, 14 aa, Homo sapiens
  CDR3 for alpha chain variable domain of TCR clone 278312 (TRAV2, TRAJ39)
CAVEGDNAGNMLPF

SEQ ID NO: 556624 - protein, 14 aa, Homo sapiens
  CDR3 for beta chain variable domain of TCR clone 278312 (TRBV28, TRBJ2-7)
CASSLRARGNEQYF

SEQ ID NO: 556625 - protein, 15 aa, Homo sapiens
  CDR3 for alpha chain variable domain of TCR clone 278313 (TRAV4, TRAJ39)
CLVGAVNNAGNMLTF

SEQ ID NO: 556626 - protein, 15 aa, Homo sapiens
  CDR3 for beta chain variable domain of TCR clone 278313 (TRBV30, TRBJ2-7)
CAWSVLAGVAYEQYF

SEQ ID NO: 556627 - protein, 13 aa, Homo sapiens
  CDR3 for alpha chain variable domain of TCR clone 278314 (TRAV8-6, TRAJ49)
CAVITNTGNQFYF

SEQ ID NO: 556628 - protein, 23 aa, Homo sapiens
  CDR3 for beta chain variable domain of TCR clone 278314 (TRBV11-2, TRBJ2-7)
LRTRPCISVPAAQPQGVSYEQYF

SEQ ID NO: 556629 - protein, 14 aa, Homo sapiens
  CDR3 for alpha chain variable domain of TCR clone 278315 (TRAV35, TRAJ22)
CAGLRPGSARQLTF

SEQ ID NO: 556630 - protein, 13 aa, Homo sapiens
  CDR3 for beta chain variable domain of TCR clone 278315 (TRBV29-1, TRBJ2-1)
CSVEGGRVNEQFF

SEQ ID NO: 556631 - protein, 12 aa, Homo sapiens
  CDR3 for alpha chain variable domain of TCR clone 278316 (TRAV17, TRAJ20)
CATDSNDYKLSF

SEQ ID NO: 556632 - protein, 16 aa, Homo sapiens
  CDR3 for beta chain variable domain of TCR clone 278316 (TRBV4-2, TRBJ2-5)
CASSQELVGSQETQYF

SEQ ID NO: 556633 - protein, 13 aa, Homo sapiens
  CDR3 for alpha chain variable domain of TCR clone 278317 (TRAV23/DV6, TRAJ58)
CAASEIGGSRLTF

SEQ ID NO: 556634 - protein, 15 aa, Homo sapiens
  CDR3 for beta chain variable domain of TCR clone 278317 (TRBV19, TRBJ1-1)
CTSTSGQIQNTEAFF

SEQ ID NO: 556635 - protein, 12 aa, Homo sapiens
  CDR3 for alpha chain variable domain of TCR clone 278318 (TRAV8-3, TRAJ26)
CAGDNYGQNFVF

SEQ ID NO: 556636 - protein, 15 aa, Homo sapiens
  CDR3 for beta chain variable domain of TCR clone 278318 (TRBV7-2, TRBJ2-1)
CASTHGTGIYNEQFF

SEQ ID NO: 556637 - protein, 13 aa, Homo sapiens
  CDR3 for alpha chain variable domain of TCR clone 278319 (TRAV12-2, TRAJ7)
CAGLIYGNNRLAF

SEQ ID NO: 556638 - protein, 16 aa, Homo sapiens
  CDR3 for beta chain variable domain of TCR clone 278319 (TRBV12-4, TRBJ2-1)
CASSAVGQGNGDEQFF

SEQ ID NO: 556639 - protein, 13 aa, Homo sapiens
  CDR3 for alpha chain variable domain of TCR clone 278320 (TRAV21, TRAJ45)
CAAPGGGADGLTF

SEQ ID NO: 556640 - protein, 15 aa, Homo sapiens
  CDR3 for beta chain variable domain of TCR clone 278320 (TRBV11-2, TRBJ2-1)
CASSRNRGLMYEQFF

SEQ ID NO: 556641 - protein, 13 aa, Homo sapiens
  CDR3 for alpha chain variable domain of TCR clone 278321 (TRAV12-1, TRAJ12)
CVVNIESSYKLIF

SEQ ID NO: 556642 - protein, 15 aa, Homo sapiens
  CDR3 for beta chain variable domain of TCR clone 278321 (TRBV7-8, TRBJ2-7)
CASSLERAGSYEQYF

SEQ ID NO: 556643 - protein, 12 aa, Homo sapiens
  CDR3 for alpha chain variable domain of TCR clone 278322 (TRAV12-2, TRAJ9)
CAVNTGGFKTIF

SEQ ID NO: 556644 - protein, 16 aa, Homo sapiens
  CDR3 for beta chain variable domain of TCR clone 278322 (TRBV12-5, TRBJ2-5)
CASGPRTSGNQETQYF

SEQ ID NO: 556645 - protein, 14 aa, Homo sapiens
  CDR3 for alpha chain variable domain of TCR clone 278323 (TRAV2, TRAJ29)
CAGPVQYGNTPLVF

SEQ ID NO: 556646 - protein, 19 aa, Homo sapiens
  CDR3 for beta chain variable domain of TCR clone 278323 (TRBV7-2, TRBJ2-5)
GRVSLWQQLKEQGRETQYF

SEQ ID NO: 556647 - protein, 14 aa, Homo sapiens
  CDR3 for alpha chain variable domain of TCR clone 278324 (TRAV13-1, TRAJ9)
CAASALTGGFKTIF

SEQ ID NO: 556648 - protein, 13 aa, Homo sapiens
  CDR3 for beta chain variable domain of TCR clone 278324 (TRBV20-1, TRBJ1-1)
CSAGAVGNTEAVF

SEQ ID NO: 556649 - protein, 16 aa, Homo sapiens
  CDR3 for alpha chain variable domain of TCR clone 278325 (TRAV4, TRAJ9)
CLVGAPNRPGGFKTIF

SEQ ID NO: 556650 - protein, 14 aa, Homo sapiens
  CDR3 for beta chain variable domain of TCR clone 278325 (TRBV20-1, TRBJ1-1)
CSAQTRIGGTEAFF

SEQ ID NO: 556651 - protein, 14 aa, Homo sapiens
  CDR3 for alpha chain variable domain of TCR clone 278326 (TRAV26-1, TRAJ57)
CIRAGQGGSEKLVF

SEQ ID NO: 556652 - protein, 13 aa, Homo sapiens
  CDR3 for beta chain variable domain of TCR clone 278326 (TRBV19, TRBJ2-7)
GASSLTTSYEQYF

SEQ ID NO: 556653 - protein, 19 aa, Homo sapiens
  CDR3 for alpha chain variable domain of TCR clone 278327 (TRAV26-1, TRAJ28)
CIVRVAHAYSGAGSYQLTF

SEQ ID NO: 556654 - protein, 15 aa, Homo sapiens
  CDR3 for beta chain variable domain of TCR clone 278327 (TRBV20-1, TRBJ1-1)
CSASRGVTGNTRAFF

SEQ ID NO: 556655 - protein, 13 aa, Homo sapiens
  CDR3 for alpha chain variable domain of TCR clone 278328 (TRAV13-1, TRAJ28)
CAANAAGSYQLTF

SEQ ID NO: 556656 - protein, 15 aa, Homo sapiens
  CDR3 for beta chain variable domain of TCR clone 278328 (TRBV7-9, TRBJ1-6)
CASSSPGRGNSPLHF

SEQ ID NO: 556657 - protein, 14 aa, Homo sapiens
  CDR3 for alpha chain variable domain of TCR clone 278329 (TRAV13-1, TRAJ35)
CAASKGGVGNVLHC

SEQ ID NO: 556658 - protein, 16 aa, Homo sapiens
  CDR3 for beta chain variable domain of TCR clone 278329 (TRBV2, TRBJ1-4)
CASNLLQGATNEKLFF

SEQ ID NO: 556659 - protein, 15 aa, Homo sapiens
  CDR3 for alpha chain variable domain of TCR clone 278330 (TRAV3, TRAJ22)
CAVIDRGGSARQLTL

SEQ ID NO: 556660 - protein, 13 aa, Homo sapiens
  CDR3 for beta chain variable domain of TCR clone 278330 (TRBV12-4, TRBJ1-2)
CASSLRQGKGYTF

SEQ ID NO: 556661 - protein, 13 aa, Homo sapiens
  CDR3 for alpha chain variable domain of TCR clone 278331 (TRAV17, TRAJ5)
FAPMDTGRRALTF

SEQ ID NO: 556662 - protein, 14 aa, Homo sapiens
  CDR3 for beta chain variable domain of TCR clone 278331 (TRBV19, TRBJ2-1)
CASPTFVLSGEQFF

SEQ ID NO: 556663 - protein, 18 aa, Homo sapiens
  CDR3 for alpha chain variable domain of TCR clone 278332 (TRAV12-3, TRAJ52)
CAMSRTKAGGTSYGKLTF

SEQ ID NO: 556664 - protein, 17 aa, Homo sapiens
  CDR3 for beta chain variable domain of TCR clone 278332 (TRBV7-3, TRBJ2-3)
CASSFMKRMRGADTQYF

SEQ ID NO: 556665 - protein, 14 aa, Homo sapiens
  CDR3 for alpha chain variable domain of TCR clone 278333 (TRAV17, TRAJ15)
CATTTTQAGTALIF

SEQ ID NO: 556666 - protein, 16 aa, Homo sapiens
  CDR3 for beta chain variable domain of TCR clone 278333 (TRBV4-1, TRBJ2-7)
CASSRGDILNSYEQYF

SEQ ID NO: 556667 - protein, 14 aa, Homo sapiens
  CDR3 for alpha chain variable domain of TCR clone 278334 (TRAV38-2/DV8, TRAJ31)
CAYRSDNNNARPMF

SEQ ID NO: 556668 - protein, 13 aa, Homo sapiens
  CDR3 for beta chain variable domain of TCR clone 278334 (TRBV28, TRBJ1-1)
CASSKQGWTEAFF

SEQ ID NO: 556669 - protein, 14 aa, Homo sapiens
  CDR3 for alpha chain variable domain of TCR clone 278335 (TRAV35, TRAJ22)
CAGLRPGSARQLTF

SEQ ID NO: 556670 - protein, 15 aa, Homo sapiens
  CDR3 for beta chain variable domain of TCR clone 278335 (TRBV7-3, TRBJ2-1)
CASSRIGTGSSEQFF

SEQ ID NO: 556671 - protein, 14 aa, Homo sapiens
  CDR3 for alpha chain variable domain of TCR clone 278336 (TRAV12-2, TRAJ13)
CAVKQPGGYQKVTF

SEQ ID NO: 556672 - protein, 15 aa, Homo sapiens
  CDR3 for beta chain variable domain of TCR clone 278336 (TRBV27, TRBJ2-1)
CASSNGGGSSNEQFF

SEQ ID NO: 556673 - protein, 15 aa, Homo sapiens
  CDR3 for alpha chain variable domain of TCR clone 278337 (TRAV8-3, TRAJ45)
CASSYSGGGADGLTF

SEQ ID NO: 556674 - protein, 15 aa, Homo sapiens
  CDR3 for beta chain variable domain of TCR clone 278337 (TRBV6-1, TRBJ2-2)
CASSRLRGDTGELFF

SEQ ID NO: 556675 - protein, 13 aa, Homo sapiens
  CDR3 for alpha chain variable domain of TCR clone 278338 (TRAV17, TRAJ9)
CATYYTGGFKTIF

SEQ ID NO: 556676 - protein, 14 aa, Homo sapiens
  CDR3 for beta chain variable domain of TCR clone 278338 (TRBV19, TRBJ2-5)
CASSMTGQQETQYF

SEQ ID NO: 556677 - protein, 13 aa, Homo sapiens
  CDR3 for alpha chain variable domain of TCR clone 278339 (TRAV3, TRAJ21)
CAVREPDFNKFYF

SEQ ID NO: 556678 - protein, 14 aa, Homo sapiens
  CDR3 for beta chain variable domain of TCR clone 278339 (TRBV6-1, TRBJ1-3)
CASVQGGGGNTMYF

SEQ ID NO: 556679 - protein, 14 aa, Homo sapiens
  CDR3 for alpha chain variable domain of TCR clone 278340 (TRAV17, TRAJ57)
CATDPQGGSEKLVF

SEQ ID NO: 556680 - protein, 18 aa, Homo sapiens
  CDR3 for beta chain variable domain of TCR clone 278340 (TRBV6-6, TRBJ1-3)
CASSYSKWVSISGNTIYF

SEQ ID NO: 556681 - protein, 13 aa, Homo sapiens
  CDR3 for alpha chain variable domain of TCR clone 278341 (TRAV38-1, TRAJ42)
CARWGGSQGNLIF

SEQ ID NO: 556682 - protein, 17 aa, Homo sapiens
  CDR3 for beta chain variable domain of TCR clone 278341 (TRBV20-1, TRBJ2-1)
CSARDPLAGVWYNEQFL

SEQ ID NO: 556683 - protein, 17 aa, Homo sapiens
  CDR3 for alpha chain variable domain of TCR clone 278342 (TRAV12-2, TRAJ42)
CAVNILNYGGSQGNLIF

SEQ ID NO: 556684 - protein, 19 aa, Homo sapiens
  CDR3 for beta chain variable domain of TCR clone 278342 (TRBV25-1, TRBJ2-2)
CAILVYRVDRGRKTGELFF

SEQ ID NO: 556685 - protein, 15 aa, Homo sapiens
  CDR3 for alpha chain variable domain of TCR clone 278343 (TRAV9-2, TRAJ49)
CALSPPDHTGNQFYF

SEQ ID NO: 556686 - protein, 14 aa, Homo sapiens
  CDR3 for beta chain variable domain of TCR clone 278343 (TRBV12-4, TRBJ1-1)
CASSLGTGGTEAFL

SEQ ID NO: 556687 - protein, 14 aa, Homo sapiens
  CDR3 for alpha chain variable domain of TCR clone 278344 (TRAV16, TRAJ26)
CALSGCNYGQNFVF

SEQ ID NO: 556688 - protein, 13 aa, Homo sapiens
  CDR3 for beta chain variable domain of TCR clone 278344 (TRBV7-3, TRBJ2-5)
CASSIGVFETQYF

SEQ ID NO: 556689 - protein, 14 aa, Homo sapiens
  CDR3 for alpha chain variable domain of TCR clone 278345 (TRAV16, TRAJ33)
CALSAMDGNYQLIW

SEQ ID NO: 556690 - protein, 16 aa, Homo sapiens
  CDR3 for beta chain variable domain of TCR clone 278345 (TRBV12-4, TRBJ2-3)
CASSFPSNTNTDTQYF

SEQ ID NO: 556691 - protein, 14 aa, Homo sapiens
  CDR3 for alpha chain variable domain of TCR clone 278346 (TRAV13-2, TRAJ26)
CAENLGNYGQNFVF

SEQ ID NO: 556692 - protein, 15 aa, Homo sapiens
  CDR3 for beta chain variable domain of TCR clone 278346 (TRBV7-9, TRBJ1-6)
CASSSPGRGNSPLHF

SEQ ID NO: 556693 - protein, 15 aa, Homo sapiens
  CDR3 for alpha chain variable domain of TCR clone 278347 (TRAV27, TRAJ38)
CAARRNAGNSRKRIW

SEQ ID NO: 556694 - protein, 13 aa, Homo sapiens
  CDR3 for beta chain variable domain of TCR clone 278347 (TRBV12-5, TRBJ2-3)
CASGDRQSDTQYF

SEQ ID NO: 556695 - protein, 12 aa, Homo sapiens
  CDR3 for alpha chain variable domain of TCR clone 278348 (TRAV12-3, TRAJ17)
CAMTLTGNKLTF

SEQ ID NO: 556696 - protein, 12 aa, Homo sapiens
  CDR3 for beta chain variable domain of TCR clone 278348 (TRBV4-1, TRBJ2-3)
CASSHGTDTQYF

SEQ ID NO: 556697 - protein, 15 aa, Homo sapiens
  CDR3 for alpha chain variable domain of TCR clone 278349 (TRAV8-6, TRAJ21)
CAVSDRGGNFNKFYF

SEQ ID NO: 556698 - protein, 14 aa, Homo sapiens
  CDR3 for beta chain variable domain of TCR clone 278349 (TRBV6-1, TRBJ1-3)
CASVQGGGGNTIYF

SEQ ID NO: 556699 - protein, 16 aa, Homo sapiens
  CDR3 for alpha chain variable domain of TCR clone 278350 (TRAV35, TRAJ28)
CAGQRYSGAGSYQLTF

SEQ ID NO: 556700 - protein, 16 aa, Homo sapiens
  CDR3 for beta chain variable domain of TCR clone 278350 (TRBV7-3, TRBJ2-2)
CASSLKRGTLSGELFF

SEQ ID NO: 556701 - protein, 13 aa, Homo sapiens
  CDR3 for alpha chain variable domain of TCR clone 278351 (TRAV2, TRAJ15)
CAVASQAGTALIL

SEQ ID NO: 556702 - protein, 17 aa, Homo sapiens
  CDR3 for beta chain variable domain of TCR clone 278351 (TRBV20-1, TRBJ2-2)
CSASGSGQGGVTGELFF

SEQ ID NO: 556703 - protein, 15 aa, Homo sapiens
  CDR3 for alpha chain variable domain of TCR clone 278352 (TRAV8-3, TRAJ45)
WASSYSGGGADGLTF

SEQ ID NO: 556704 - protein, 18 aa, Homo sapiens
  CDR3 for beta chain variable domain of TCR clone 278352 (TRBV18, TRBJ1-3)
CASSPRGGAGPSGNTIYF

SEQ ID NO: 556705 - protein, 14 aa, Homo sapiens
  CDR3 for alpha chain variable domain of TCR clone 278353 (TRAV12-2, TRAJ13)
CAVKKTGGYQKVTF

SEQ ID NO: 556706 - protein, 15 aa, Homo sapiens
  CDR3 for beta chain variable domain of TCR clone 278353 (TRBV20-1, TRBJ2-6)
CSARDRGPGANVLTF

SEQ ID NO: 556707 - protein, 13 aa, Homo sapiens
  CDR3 for alpha chain variable domain of TCR clone 278354 (TRAV35, TRAJ42)
CAGFPGSPGNLIF

SEQ ID NO: 556708 - protein, 14 aa, Homo sapiens
  CDR3 for beta chain variable domain of TCR clone 278354 (TRBV29-1, TRBJ2-2)
CSVLAETNTGELFF

SEQ ID NO: 556709 - protein, 13 aa, Homo sapiens
  CDR3 for alpha chain variable domain of TCR clone 278355 (TRAV3, TRAJ20)
CAVRDTPRYNLSF

SEQ ID NO: 556710 - protein, 16 aa, Homo sapiens
  CDR3 for beta chain variable domain of TCR clone 278355 (TRBV20-1, TRBJ2-7)
CSARAPGLALSYEQYF

SEQ ID NO: 556711 - protein, 13 aa, Homo sapiens
  CDR3 for alpha chain variable domain of TCR clone 278356 (TRAV21, TRAJ56)
CAVRLGANSKLTF

SEQ ID NO: 556712 - protein, 14 aa, Homo sapiens
  CDR3 for beta chain variable domain of TCR clone 278356 (TRBV7-6, TRBJ2-3)
CASSLGTVTDTQYF

SEQ ID NO: 556713 - protein, 13 aa, Homo sapiens
  CDR3 for alpha chain variable domain of TCR clone 278357 (TRAV1-2, TRAJ16)
CAVNRFSDGQAAL

SEQ ID NO: 556714 - protein, 15 aa, Homo sapiens
  CDR3 for beta chain variable domain of TCR clone 278357 (TRBV5-1, TRBJ2-1)
CASSPPRAPYNEQFF

SEQ ID NO: 556715 - protein, 16 aa, Homo sapiens
  CDR3 for alpha chain variable domain of TCR clone 278358 (TRAV17, TRAJ28)
CASYAYSGAGSYQLTF

SEQ ID NO: 556716 - protein, 15 aa, Homo sapiens
  CDR3 for beta chain variable domain of TCR clone 278358 (TRBV4-2, TRBJ2-1)
CASSPSRGLYNEQFF

SEQ ID NO: 556717 - protein, 14 aa, Homo sapiens
  CDR3 for alpha chain variable domain of TCR clone 278359 (TRAV13-1, TRAJ35)
CAASKGGFGNVLHC

SEQ ID NO: 556718 - protein, 15 aa, Homo sapiens
  CDR3 for beta chain variable domain of TCR clone 278359 (TRBV20-1, TRBJ1-1)
CSASRGVTGNTEAFF

SEQ ID NO: 556719 - protein, 13 aa, Homo sapiens
  CDR3 for alpha chain variable domain of TCR clone 278360 (TRAV36/DV7, TRAJ37)
CAVFSSNTGKLIF

SEQ ID NO: 556720 - protein, 14 aa, Homo sapiens
  CDR3 for beta chain variable domain of TCR clone 278360 (TRBV7-9, TRBJ2-2)
CASSLVQDTGELFF

SEQ ID NO: 556721 - protein, 14 aa, Homo sapiens
  CDR3 for alpha chain variable domain of TCR clone 278361 (TRAV8-6, TRAJ37)
CAVRSRSNTGKLIF

SEQ ID NO: 556722 - protein, 11 aa, Homo sapiens
  CDR3 for beta chain variable domain of TCR clone 278361 (TRBV6-3, TRBJ2-7)
CASSFSYEQYF

SEQ ID NO: 556723 - protein, 15 aa, Homo sapiens
  CDR3 for alpha chain variable domain of TCR clone 278362 (TRAV13-1, TRAJ44)
CSASRNTATASKLTF

SEQ ID NO: 556724 - protein, 14 aa, Homo sapiens
  CDR3 for beta chain variable domain of TCR clone 278362 (TRBV11-2, TRBJ1-2)
CASSLYRGNYGYTF

SEQ ID NO: 556725 - protein, 14 aa, Homo sapiens
  CDR3 for alpha chain variable domain of TCR clone 278363 (TRAV2, TRAJ37)
CAVDFTINTGKLIF

SEQ ID NO: 556726 - protein, 16 aa, Homo sapiens
  CDR3 for beta chain variable domain of TCR clone 278363 (TRBV20-1, TRBJ1-2)
CSASMGQGVANYGYTF

SEQ ID NO: 556727 - protein, 14 aa, Homo sapiens
  CDR3 for alpha chain variable domain of TCR clone 278364 (TRAV1-2, TRAJ16)
CAVNRFSAGQKLLF

SEQ ID NO: 556728 - protein, 15 aa, Homo sapiens
  CDR3 for beta chain variable domain of TCR clone 278364 (TRBV9, TRBJ1-6)
CASSVAGTGESPLHF

SEQ ID NO: 556729 - protein, 14 aa, Homo sapiens
  CDR3 for alpha chain variable domain of TCR clone 278365 (TRAV12-2, TRAJ17)
CAALFKAAGNKLTF

SEQ ID NO: 556730 - protein, 15 aa, Homo sapiens
  CDR3 for beta chain variable domain of TCR clone 278365 (TRBV7-9, TRBJ1-6)
CASSSPGRGNSPLHF

SEQ ID NO: 556731 - protein, 10 aa, Homo sapiens
  CDR3 for alpha chain variable domain of TCR clone 278366 (TRAV23/DV6, TRAJ57)
CAASSTLSQH

SEQ ID NO: 556732 - protein, 14 aa, Homo sapiens
  CDR3 for beta chain variable domain of TCR clone 278366 (TRBV25-1, TRBJ1-1)
CASTHLGGNTEAFF

SEQ ID NO: 556733 - protein, 14 aa, Homo sapiens
  CDR3 for alpha chain variable domain of TCR clone 278367 (TRAV29/DV5, TRAJ32)
CAAAYGGATNKLIF

SEQ ID NO: 556734 - protein, 13 aa, Homo sapiens
  CDR3 for beta chain variable domain of TCR clone 278367 (TRBV15, TRBJ2-7)
CATSTTGHYEQYF

SEQ ID NO: 556735 - protein, 16 aa, Homo sapiens
  CDR3 for alpha chain variable domain of TCR clone 278368 (TRAV4, TRAJ18)
CCVLLIGGSTLWRLYF

SEQ ID NO: 556736 - protein, 12 aa, Homo sapiens
  CDR3 for beta chain variable domain of TCR clone 278368 (TRBV6-3, TRBJ2-7)
CASSLTPYEQYF

SEQ ID NO: 556737 - protein, 10 aa, Homo sapiens
  CDR3 for alpha chain variable domain of TCR clone 278369 (TRAV12-3, TRAJ49)
CAMNDNQFYF

SEQ ID NO: 556738 - protein, 13 aa, Homo sapiens
  CDR3 for beta chain variable domain of TCR clone 278369 (TRBV12-4, TRBJ1-1)
CASSPGTGCEAFF

SEQ ID NO: 556739 - protein, 14 aa, Homo sapiens
  CDR3 for alpha chain variable domain of TCR clone 278370 (TRAV13-1, TRAJ40)
CAARSTSGTYKYIF

SEQ ID NO: 556740 - protein, 15 aa, Homo sapiens
  CDR3 for beta chain variable domain of TCR clone 278370 (TRBV18, TRBJ1-5)
CASSETGGNNQTQHF

SEQ ID NO: 556741 - protein, 15 aa, Homo sapiens
  CDR3 for alpha chain variable domain of TCR clone 278371 (TRAV8-2, TRAJ24)
CVVSDRTDSWGKLQF

SEQ ID NO: 556742 - protein, 15 aa, Homo sapiens
  CDR3 for beta chain variable domain of TCR clone 278371 (TRBV7-9, TRBJ1-5)
CASSQGHQPNQPQHF

SEQ ID NO: 556743 - protein, 13 aa, Homo sapiens
  CDR3 for alpha chain variable domain of TCR clone 278372 (TRAV17, TRAJ5)
CAPMYTGRRALTF

SEQ ID NO: 556744 - protein, 11 aa, Homo sapiens
  CDR3 for beta chain variable domain of TCR clone 278372 (TRBV19, TRBJ1-1)
CASSIGSEAFF

SEQ ID NO: 556745 - protein, 14 aa, Homo sapiens
  CDR3 for alpha chain variable domain of TCR clone 278373 (TRAV12-2, TRAJ40)
CTVKIPSGTYKSIF

SEQ ID NO: 556746 - protein, 14 aa, Homo sapiens
  CDR3 for beta chain variable domain of TCR clone 278373 (TRBV20-1, TRBJ1-1)
CSAQTRIGGTEAFF

SEQ ID NO: 556747 - protein, 14 aa, Homo sapiens
  CDR3 for alpha chain variable domain of TCR clone 278374 (TRAV12-2, TRAJ13)
CAVKKTGGYQKVTF

SEQ ID NO: 556748 - protein, 16 aa, Homo sapiens
  CDR3 for beta chain variable domain of TCR clone 278374 (TRBV4-2, TRBJ2-4)
CASSQELRRAKNILYF

SEQ ID NO: 556749 - protein, 14 aa, Homo sapiens
  CDR3 for alpha chain variable domain of TCR clone 278375 (TRAV12-2, TRAJ40)
CAVKIPSGTSKYIF

SEQ ID NO: 556750 - protein, 12 aa, Homo sapiens
  CDR3 for beta chain variable domain of TCR clone 278375 (TRBV11-2, TRBJ2-2)
CASSLGGGELFF

SEQ ID NO: 556751 - protein, 15 aa, Homo sapiens
  CDR3 for alpha chain variable domain of TCR clone 278376 (TRAV8-3, TRAJ27)
CAVGASKTNAGKSTF

SEQ ID NO: 556752 - protein, 15 aa, Homo sapiens
  CDR3 for beta chain variable domain of TCR clone 278376 (TRBV7-2, TRBJ2-1)
CASSSGLAGGNERFF

SEQ ID NO: 556753 - protein, 12 aa, Homo sapiens
  CDR3 for alpha chain variable domain of TCR clone 278377 (TRAV13-1, TRAJ21)
CAAKEGFNRFYF

SEQ ID NO: 556754 - protein, 14 aa, Homo sapiens
  CDR3 for beta chain variable domain of TCR clone 278377 (TRBV7-2, TRBJ2-5)
CASSLSGGGETQYF

SEQ ID NO: 556755 - protein, 15 aa, Homo sapiens
  CDR3 for alpha chain variable domain of TCR clone 278378 (TRAV13-1, TRAJ44)
CAASRNTGTASNLTF

SEQ ID NO: 556756 - protein, 14 aa, Homo sapiens
  CDR3 for beta chain variable domain of TCR clone 278378 (TRBV11-2, TRBJ1-2)
CASSLYRGNYGYTF

SEQ ID NO: 556757 - protein, 12 aa, Homo sapiens
  CDR3 for alpha chain variable domain of TCR clone 278379 (TRAV17, TRAJ20)
CATDANDYKLSF

SEQ ID NO: 556758 - protein, 19 aa, Homo sapiens
  CDR3 for beta chain variable domain of TCR clone 278379 (TRBV19, TRBJ2-5)
CASSIGQVTDFFLGETQYF

SEQ ID NO: 556759 - protein, 13 aa, Homo sapiens
  CDR3 for alpha chain variable domain of TCR clone 278380 (TRAV12-3, TRAJ33)
CAMCVNSNYQLIW

SEQ ID NO: 556760 - protein, 13 aa, Homo sapiens
  CDR3 for beta chain variable domain of TCR clone 278380 (TRBV7-2, TRBJ2-2)
CASSLAVTGELFF

SEQ ID NO: 556761 - protein, 13 aa, Homo sapiens
  CDR3 for alpha chain variable domain of TCR clone 278381 (TRAV13-2, TRAJ13)
CADFSGGYQKVTF

SEQ ID NO: 556762 - protein, 15 aa, Homo sapiens
  CDR3 for beta chain variable domain of TCR clone 278381 (TRBV19, TRBJ1-1)
CASSIGGGRNTEAFF

SEQ ID NO: 556763 - protein, 11 aa, Homo sapiens
  CDR3 for alpha chain variable domain of TCR clone 278382 (TRAV12-2, TRAJ26)
CPSQGGQNFVF

SEQ ID NO: 556764 - protein, 11 aa, Homo sapiens
  CDR3 for beta chain variable domain of TCR clone 278382 (TRBV12-4, TRBJ2-3)
WASTATDTQYF

SEQ ID NO: 556765 - protein, 12 aa, Homo sapiens
  CDR3 for alpha chain variable domain of TCR clone 278383 (TRAV27, TRAJ9)
CAGESGGFKTIF

SEQ ID NO: 556766 - protein, 15 aa, Homo sapiens
  CDR3 for beta chain variable domain of TCR clone 278383 (TRBV29-1, TRBJ2-7)
CSVEFFDRGSYEQYF

SEQ ID NO: 556767 - protein, 15 aa, Homo sapiens
  CDR3 for alpha chain variable domain of TCR clone 278384 (TRAV3, TRAJ24)
CAVRDKMTAGGNCSL

SEQ ID NO: 556768 - protein, 14 aa, Homo sapiens
  CDR3 for beta chain variable domain of TCR clone 278384 (TRBV7-2, TRBJ2-3)
CARSQTGSSYTQYF

SEQ ID NO: 556769 - protein, 15 aa, Homo sapiens
  CDR3 for alpha chain variable domain of TCR clone 278385 (TRAV27, TRAJ45)
CAPVDSGGGADGLPF

SEQ ID NO: 556770 - protein, 15 aa, Homo sapiens
  CDR3 for beta chain variable domain of TCR clone 278385 (TRBV23-1, TRBJ1-5)
CASSQSRGQGWGAYI

SEQ ID NO: 556771 - protein, 18 aa, Homo sapiens
  CDR3 for alpha chain variable domain of TCR clone 278386 (TRAV21, TRAJ52)
CAVRPSPAGGTSYGKLSF

SEQ ID NO: 556772 - protein, 17 aa, Homo sapiens
  CDR3 for beta chain variable domain of TCR clone 278386 (TRBV13, TRBJ2-3)
CASILSRVAGGRNTQYF

SEQ ID NO: 556773 - protein, 11 aa, Homo sapiens
  CDR3 for alpha chain variable domain of TCR clone 278387 (TRAV8-3, TRAJ15)
CAVGPGTALIF

SEQ ID NO: 556774 - protein, 20 aa, Homo sapiens
  CDR3 for beta chain variable domain of TCR clone 278387 (TRBV18, TRBJ2-3)
CASSYTSGPLVAQIRSILAQ

SEQ ID NO: 556775 - protein, 13 aa, Homo sapiens
  CDR3 for alpha chain variable domain of TCR clone 278388 (TRAV13-2, TRAJ53)
CAENMGSDYKLTF

SEQ ID NO: 556776 - protein, 13 aa, Homo sapiens
  CDR3 for beta chain variable domain of TCR clone 278388 (TRBV4-1, TRBJ2-2)
CASSQENTGELSF

SEQ ID NO: 556777 - protein, 15 aa, Homo sapiens
  CDR3 for alpha chain variable domain of TCR clone 278389 (TRAV25, TRAJ10)
CAGPLLTGGGNKLTF

SEQ ID NO: 556778 - protein, 13 aa, Homo sapiens
  CDR3 for beta chain variable domain of TCR clone 278389 (TRBV5-5, TRBJ1-2)
CASSFWRGEDYTF

SEQ ID NO: 556779 - protein, 13 aa, Homo sapiens
  CDR3 for alpha chain variable domain of TCR clone 278390 (TRAV23/DV6, TRAJ16)
CAASISDGQKLLF

SEQ ID NO: 556780 - protein, 15 aa, Homo sapiens
  CDR3 for beta chain variable domain of TCR clone 278390 (TRBV6-1, TRBJ1-3)
CASSDFGFSGNTIYF

SEQ ID NO: 556781 - protein, 16 aa, Homo sapiens
  CDR3 for alpha chain variable domain of TCR clone 278391 (TRAV30, TRAJ24)
CGTESVDADSWGKFHV

SEQ ID NO: 556782 - protein, 15 aa, Homo sapiens
  CDR3 for beta chain variable domain of TCR clone 278391 (TRBV7-9, TRBJ1-4)
CASSARTGGNEKLFF

SEQ ID NO: 556783 - protein, 14 aa, Homo sapiens
  CDR3 for alpha chain variable domain of TCR clone 278392 (TRAV1-2, TRAJ16)
CAVNRFSDGQKLLF

SEQ ID NO: 556784 - protein, 15 aa, Homo sapiens
  CDR3 for beta chain variable domain of TCR clone 278392 (TRBV19, TRBJ2-1)
CASSGGGTLYNEQFF

SEQ ID NO: 556785 - protein, 14 aa, Homo sapiens
  CDR3 for alpha chain variable domain of TCR clone 278393 (TRAV12-1, TRAJ37)
CVVNRSGNTGKLIF

SEQ ID NO: 556786 - protein, 14 aa, Homo sapiens
  CDR3 for beta chain variable domain of TCR clone 278393 (TRBV27, TRBJ2-1)
CASRHLGGGKEQFF

SEQ ID NO: 556787 - protein, 11 aa, Homo sapiens
  CDR3 for alpha chain variable domain of TCR clone 278394 (TRAV1-2, TRAJ40)
CAVPGTYKYIF

SEQ ID NO: 556788 - protein, 15 aa, Homo sapiens
  CDR3 for beta chain variable domain of TCR clone 278394 (TRBV20-1, TRBJ2-2)
CSARGGQGNTGELFF

SEQ ID NO: 556789 - protein, 13 aa, Homo sapiens
  CDR3 for alpha chain variable domain of TCR clone 278395 (TRAV1-1, TRAJ9)
CAAKNTGGFKTIF

SEQ ID NO: 556790 - protein, 14 aa, Homo sapiens
  CDR3 for beta chain variable domain of TCR clone 278395 (TRBV5-4, TRBJ1-1)
CASSLDSRRDEAFF

SEQ ID NO: 556791 - protein, 14 aa, Homo sapiens
  CDR3 for alpha chain variable domain of TCR clone 278396 (TRAV1-2, TRAJ8)
CAVRDDTGFQKLVF

SEQ ID NO: 556792 - protein, 12 aa, Homo sapiens
  CDR3 for beta chain variable domain of TCR clone 278396 (TRBV11-2, TRBJ2-2)
CASSLPTGELFF

SEQ ID NO: 556793 - protein, 15 aa, Homo sapiens
  CDR3 for alpha chain variable domain of TCR clone 278397 (TRAV8-3, TRAJ40)
CAAPSLGSGTYKDIF

SEQ ID NO: 556794 - protein, 16 aa, Homo sapiens
  CDR3 for beta chain variable domain of TCR clone 278397 (TRBV7-3, TRBJ2-3)
CASSLSGYRPEDTQYF

SEQ ID NO: 556795 - protein, 14 aa, Homo sapiens
  CDR3 for alpha chain variable domain of TCR clone 278398 (TRAV38-1, TRAJ45)
CASHSGGGADGLTF

SEQ ID NO: 556796 - protein, 12 aa, Homo sapiens
  CDR3 for beta chain variable domain of TCR clone 278398 (TRBV5-5, TRBJ2-5)
CASSYFGETQYF

SEQ ID NO: 556797 - protein, 12 aa, Homo sapiens
  CDR3 for alpha chain variable domain of TCR clone 278399 (TRAV12-3, TRAJ17)
CAMTLTGNKLTF

SEQ ID NO: 556798 - protein, 14 aa, Homo sapiens
  CDR3 for beta chain variable domain of TCR clone 278399 (TRBV6-1, TRBJ1-3)
CASVQGGGGSTIYF

SEQ ID NO: 556799 - protein, 14 aa, Homo sapiens
  CDR3 for alpha chain variable domain of TCR clone 278400 (TRAV12-2, TRAJ13)
CAVKKTGGYQKVTF

SEQ ID NO: 556800 - protein, 18 aa, Homo sapiens
  CDR3 for beta chain variable domain of TCR clone 278400 (TRBV5-8, TRBJ2-7)
CASSPHYRVWATSSTSGR

SEQ ID NO: 556801 - protein, 15 aa, Homo sapiens
  CDR3 for alpha chain variable domain of TCR clone 278401 (TRAV26-2, TRAJ39)
CSLRGDNNAGKMLTF

SEQ ID NO: 556802 - protein, 15 aa, Homo sapiens
  CDR3 for beta chain variable domain of TCR clone 278401 (TRBV5-4, TRBJ1-1)
CASSSLGWANTEAFF

SEQ ID NO: 556803 - protein, 14 aa, Homo sapiens
  CDR3 for alpha chain variable domain of TCR clone 278402 (TRAV13-1, TRAJ39)
CAASYNNAGNMLTF

SEQ ID NO: 556804 - protein, 15 aa, Homo sapiens
  CDR3 for beta chain variable domain of TCR clone 278402 (TRBV18, TRBJ2-7)
CASSPSSTGNYEQYF

SEQ ID NO: 556805 - protein, 14 aa, Homo sapiens
  CDR3 for alpha chain variable domain of TCR clone 278403 (TRAV30, TRAJ26)
CGTARISYGQNFVF

SEQ ID NO: 556806 - protein, 13 aa, Homo sapiens
  CDR3 for beta chain variable domain of TCR clone 278403 (TRBV19, TRBJ1-3)
CASRLSLGNTIYF

SEQ ID NO: 556807 - protein, 12 aa, Homo sapiens
  CDR3 for alpha chain variable domain of TCR clone 278404 (TRAV12-1, TRAJ20)
CVAHCNDYKLSF

SEQ ID NO: 556808 - protein, 14 aa, Homo sapiens
  CDR3 for beta chain variable domain of TCR clone 278404 (TRBV3-1, TRBJ2-2)
CASSLPDNTGELFF

SEQ ID NO: 556809 - protein, 17 aa, Homo sapiens
  CDR3 for alpha chain variable domain of TCR clone 278405 (TRAV12-2, TRAJ52)
CAVNPYAGGTSYGKLTF

SEQ ID NO: 556810 - protein, 15 aa, Homo sapiens
  CDR3 for beta chain variable domain of TCR clone 278405 (TRBV11-3, TRBJ2-3)
CASSHDTKIRSILAQ

SEQ ID NO: 556811 - protein, 13 aa, Homo sapiens
  CDR3 for alpha chain variable domain of TCR clone 278406 (TRAV21, TRAJ57)
CAVTQGGSEKLAF

SEQ ID NO: 556812 - protein, 13 aa, Homo sapiens
  CDR3 for beta chain variable domain of TCR clone 278406 (TRBV4-2, TRBJ1-1)
CASSQAGNTEAFF

SEQ ID NO: 556813 - protein, 13 aa, Homo sapiens
  CDR3 for alpha chain variable domain of TCR clone 278407 (TRAV21, TRAJ27)
CAARPGNAGKSTF

SEQ ID NO: 556814 - protein, 13 aa, Homo sapiens
  CDR3 for beta chain variable domain of TCR clone 278407 (TRBV7-8, TRBJ2-7)
CASSFAGLYEQYF

SEQ ID NO: 556815 - protein, 12 aa, Homo sapiens
  CDR3 for alpha chain variable domain of TCR clone 278408 (TRAV12-2, TRAJ20)
CAVNRNDYELSF

SEQ ID NO: 556816 - protein, 16 aa, Homo sapiens
  CDR3 for beta chain variable domain of TCR clone 278408 (TRBV7-3, TRBJ1-2)
CASSLGAPVPNYGYTF

SEQ ID NO: 556817 - protein, 15 aa, Homo sapiens
  CDR3 for alpha chain variable domain of TCR clone 278409 (TRAV38-1, TRAJ37)
CAFILGAGNTGKLIF

SEQ ID NO: 556818 - protein, 12 aa, Homo sapiens
  CDR3 for beta chain variable domain of TCR clone 278409 (TRBV7-9, TRBJ2-7)
CASSLEGYEQYF

SEQ ID NO: 556819 - protein, 12 aa, Homo sapiens
  CDR3 for alpha chain variable domain of TCR clone 278410 (TRAV29/DV5, TRAJ31)
CVASSHNARLMF

SEQ ID NO: 556820 - protein, 17 aa, Homo sapiens
  CDR3 for beta chain variable domain of TCR clone 278410 (TRBV18, TRBJ2-6)
CASSPRKGAVGANVLSF

SEQ ID NO: 556821 - protein, 13 aa, Homo sapiens
  CDR3 for alpha chain variable domain of TCR clone 278411 (TRAV8-6, TRAJ9)
CAVWDTGGFKTIF

SEQ ID NO: 556822 - protein, 13 aa, Homo sapiens
  CDR3 for beta chain variable domain of TCR clone 278411 (TRBV27, TRBJ1-1)
CAISLSIGAEAFF

SEQ ID NO: 556823 - protein, 13 aa, Homo sapiens
  CDR3 for alpha chain variable domain of TCR clone 278412 (TRAV27, TRAJ29)
CAGAHSGNTPLVF

SEQ ID NO: 556824 - protein, 13 aa, Homo sapiens
  CDR3 for beta chain variable domain of TCR clone 278412 (TRBV2, TRBJ1-1)
CARNPTGGFHAFF

SEQ ID NO: 556825 - protein, 14 aa, Homo sapiens
  CDR3 for alpha chain variable domain of TCR clone 278413 (TRAV38-2/DV8, TRAJ54)
AAMYQIEGAQKLVF

SEQ ID NO: 556826 - protein, 17 aa, Homo sapiens
  CDR3 for beta chain variable domain of TCR clone 278413 (TRBV6-1, TRBJ2-3)
CASSEALRLISTDTQYF

SEQ ID NO: 556827 - protein, 21 aa, Homo sapiens
  CDR3 for alpha chain variable domain of TCR clone 278414 (TRAV29/DV5, TRAJ52)
CSVLLCSKRAAGGTSYGKLTF

SEQ ID NO: 556828 - protein, 15 aa, Homo sapiens
  CDR3 for beta chain variable domain of TCR clone 278414 (TRBV6-1, TRBJ2-1)
CASSELRGQYNEQFF

SEQ ID NO: 556829 - protein, 17 aa, Homo sapiens
  CDR3 for alpha chain variable domain of TCR clone 278415 (TRAV4, TRAJ18)
CLVGERSVGSTLGRRYF

SEQ ID NO: 556830 - protein, 11 aa, Homo sapiens
  CDR3 for beta chain variable domain of TCR clone 278415 (TRBV20-1, TRBJ2-7)
CSARLSYEQYF

SEQ ID NO: 556831 - protein, 14 aa, Homo sapiens
  CDR3 for alpha chain variable domain of TCR clone 278416 (TRAV8-2, TRAJ4)
CVVSPSDGYNKLIF

SEQ ID NO: 556832 - protein, 15 aa, Homo sapiens
  CDR3 for beta chain variable domain of TCR clone 278416 (TRBV4-1, TRBJ1-4)
CASSDTGGTNEKLFF

SEQ ID NO: 556833 - protein, 12 aa, Homo sapiens
  CDR3 for alpha chain variable domain of TCR clone 278417 (TRAV8-3, TRAJ20)
CAVGANDYKLSF

SEQ ID NO: 556834 - protein, 18 aa, Homo sapiens
  CDR3 for beta chain variable domain of TCR clone 278417 (TRBV27, TRBJ2-1)
CASGNRAVGVGSKNEQFF

SEQ ID NO: 556835 - protein, 14 aa, Homo sapiens
  CDR3 for alpha chain variable domain of TCR clone 278418 (TRAV35, TRAJ42)
CAGRYVGSQGNLIF

SEQ ID NO: 556836 - protein, 15 aa, Homo sapiens
  CDR3 for beta chain variable domain of TCR clone 278418 (TRBV7-9, TRBJ2-1)
CASSLGWGRANEQFF

SEQ ID NO: 556837 - protein, 13 aa, Homo sapiens
  CDR3 for alpha chain variable domain of TCR clone 278419 (TRAV12-1, TRAJ6)
CVVTPGGSYIPTF

SEQ ID NO: 556838 - protein, 13 aa, Homo sapiens
  CDR3 for beta chain variable domain of TCR clone 278419 (TRBV7-9, TRBJ1-1)
CASNNREGTEAFF

SEQ ID NO: 556839 - protein, 14 aa, Homo sapiens
  CDR3 for alpha chain variable domain of TCR clone 278420 (TRAV1-2, TRAJ8)
CAVREDTGFQKLVF

SEQ ID NO: 556840 - protein, 14 aa, Homo sapiens
  CDR3 for beta chain variable domain of TCR clone 278420 (TRBV7-9, TRBJ2-1)
CVSSPRDSLYEQFF

SEQ ID NO: 556841 - protein, 16 aa, Homo sapiens
  CDR3 for alpha chain variable domain of TCR clone 278421 (TRAV30, TRAJ24)
CGTEIVDADSWGKFQC

SEQ ID NO: 556842 - protein, 16 aa, Homo sapiens
  CDR3 for beta chain variable domain of TCR clone 278421 (TRBV12-5, TRBJ2-5)
CASGPRTSGNQETQYF

SEQ ID NO: 556843 - protein, 18 aa, Homo sapiens
  CDR3 for alpha chain variable domain of TCR clone 278422 (TRAV29/DV5, TRAJ52)
CAAGFRGAGGTSYGKLTF

SEQ ID NO: 556844 - protein, 16 aa, Homo sapiens
  CDR3 for beta chain variable domain of TCR clone 278422 (TRBV6-1, TRBJ2-5)
CASSETLDRGAETQYF

SEQ ID NO: 556845 - protein, 12 aa, Homo sapiens
  CDR3 for alpha chain variable domain of TCR clone 278423 (TRAV12-1, TRAJ20)
CVVNPDDYKLSF

SEQ ID NO: 556846 - protein, 12 aa, Homo sapiens
  CDR3 for beta chain variable domain of TCR clone 278423 (TRBV11-2, TRBJ2-2)
CASGLGGGELFF

SEQ ID NO: 556847 - protein, 15 aa, Homo sapiens
  CDR3 for alpha chain variable domain of TCR clone 278424 (TRAV12-1, TRAJ44)
CVSDLPTGTASKLTF

SEQ ID NO: 556848 - protein, 15 aa, Homo sapiens
  CDR3 for beta chain variable domain of TCR clone 278424 (TRBV5-4, TRBJ2-1)
CASSPTSGGDVGQFF

SEQ ID NO: 556849 - protein, 14 aa, Homo sapiens
  CDR3 for alpha chain variable domain of TCR clone 278425 (TRAV26-1, TRAJ34)
CIVRVADNTDKLIF

SEQ ID NO: 556850 - protein, 14 aa, Homo sapiens
  CDR3 for beta chain variable domain of TCR clone 278425 (TRBV20-1, TRBJ2-7)
CSAWTALSSYEQYF

SEQ ID NO: 556851 - protein, 15 aa, Homo sapiens
  CDR3 for alpha chain variable domain of TCR clone 278426 (TRAV3, TRAJ29)
CALRDLYSGNTPLVF

SEQ ID NO: 556852 - protein, 14 aa, Homo sapiens
  CDR3 for beta chain variable domain of TCR clone 278426 (TRBV11-2, TRBJ2-7)
CASSSTGEGYEQYF

SEQ ID NO: 556853 - protein, 14 aa, Homo sapiens
  CDR3 for alpha chain variable domain of TCR clone 278427 (TRAV35, TRAJ13)
CAGRSPGGYQKVTF

SEQ ID NO: 556854 - protein, 15 aa, Homo sapiens
  CDR3 for beta chain variable domain of TCR clone 278427 (TRBV7-3, TRBJ2-2)
CASSETGQGTGELFF

SEQ ID NO: 556855 - protein, 15 aa, Homo sapiens
  CDR3 for alpha chain variable domain of TCR clone 278428 (TRAV27, TRAJ38)
CAARRNAGNNRKLIW

SEQ ID NO: 556856 - protein, 12 aa, Homo sapiens
  CDR3 for beta chain variable domain of TCR clone 278428 (TRBV10-2, TRBJ2-5)
CASSGGGKTQYF

SEQ ID NO: 556857 - protein, 14 aa, Homo sapiens
  CDR3 for alpha chain variable domain of TCR clone 278429 (TRAV6, TRAJ8)
CALDNDTGFQKLVF

SEQ ID NO: 556858 - protein, 16 aa, Homo sapiens
  CDR3 for beta chain variable domain of TCR clone 278429 (TRBV11-2, TRBJ2-7)
CASSTVTAPKTYEQYF

SEQ ID NO: 556859 - protein, 14 aa, Homo sapiens
  CDR3 for alpha chain variable domain of TCR clone 278430 (TRAV4, TRAJ17)
CLVGDMAAGNKLTF

SEQ ID NO: 556860 - protein, 14 aa, Homo sapiens
  CDR3 for beta chain variable domain of TCR clone 278430 (TRBV4-1, TRBJ2-7)
CASSPVARGDEQYF

SEQ ID NO: 556861 - protein, 18 aa, Homo sapiens
  CDR3 for alpha chain variable domain of TCR clone 278431 (TRAV12-3, TRAJ52)
CAMSVGGAGGTIYGKLTF

SEQ ID NO: 556862 - protein, 15 aa, Homo sapiens
  CDR3 for beta chain variable domain of TCR clone 278431 (TRBV27, TRBJ1-6)
CASSFDRGLGSPLHF

SEQ ID NO: 556863 - protein, 12 aa, Homo sapiens
  CDR3 for alpha chain variable domain of TCR clone 278432 (TRAV35, TRAJ39)
LAPNNAGNMLTF

SEQ ID NO: 556864 - protein, 16 aa, Homo sapiens
  CDR3 for beta chain variable domain of TCR clone 278432 (TRBV28, TRBJ1-5)
CASSFRGGYSNQPQHF

SEQ ID NO: 556865 - protein, 14 aa, Homo sapiens
  CDR3 for alpha chain variable domain of TCR clone 278433 (TRAV20, TRAJ56)
CAVQFGGANSKLTL

SEQ ID NO: 556866 - protein, 14 aa, Homo sapiens
  CDR3 for beta chain variable domain of TCR clone 278433 (TRBV20-1, TRBJ2-7)
CSAKRGRSSYEQYF

SEQ ID NO: 556867 - protein, 16 aa, Homo sapiens
  CDR3 for alpha chain variable domain of TCR clone 278434 (TRAV26-1, TRAJ52)
CIVSNAGGTSYGKLTF

SEQ ID NO: 556868 - protein, 16 aa, Homo sapiens
  CDR3 for beta chain variable domain of TCR clone 278434 (TRBV5-1, TRBJ2-1)
RASSLEGRGLYNEQFF

SEQ ID NO: 556869 - protein, 14 aa, Homo sapiens
  CDR3 for alpha chain variable domain of TCR clone 278435 (TRAV1-2, TRAJ8)
CAVREDTGFKKLVF

SEQ ID NO: 556870 - protein, 14 aa, Homo sapiens
  CDR3 for beta chain variable domain of TCR clone 278435 (TRBV20-1, TRBJ1-1)
CSAQTRIGGTEAFF

SEQ ID NO: 556871 - protein, 11 aa, Homo sapiens
  CDR3 for alpha chain variable domain of TCR clone 278436 (TRAV12-3, TRAJ27)
CAMATAGKSTS

SEQ ID NO: 556872 - protein, 13 aa, Homo sapiens
  CDR3 for beta chain variable domain of TCR clone 278436 (TRBV20-1, TRBJ1-1)
CSARVGGNTEAFF

SEQ ID NO: 556873 - protein, 12 aa, Homo sapiens
  CDR3 for alpha chain variable domain of TCR clone 278437 (TRAV26-2, TRAJ21)
CILKGNFNKFYF

SEQ ID NO: 556874 - protein, 16 aa, Homo sapiens
  CDR3 for beta chain variable domain of TCR clone 278437 (TRBV15, TRBJ1-2)
CATSRGPRTGGGGYTF

SEQ ID NO: 556875 - protein, 13 aa, Homo sapiens
  CDR3 for alpha chain variable domain of TCR clone 278438 (TRAV22, TRAJ29)
CAVGGSGNTPLVF

SEQ ID NO: 556876 - protein, 14 aa, Homo sapiens
  CDR3 for beta chain variable domain of TCR clone 278438 (TRBV5-4, TRBJ1-1)
CASSLDSRRDEAFF

SEQ ID NO: 556877 - protein, 12 aa, Homo sapiens
  CDR3 for alpha chain variable domain of TCR clone 278439 (TRAV17, TRAJ12)
CATLRRSYELIF

SEQ ID NO: 556878 - protein, 16 aa, Homo sapiens
  CDR3 for beta chain variable domain of TCR clone 278439 (TRBV28, TRBJ2-7)
CASSLFFETGGPEQYF

SEQ ID NO: 556879 - protein, 14 aa, Homo sapiens
  CDR3 for alpha chain variable domain of TCR clone 278440 (TRAV1-2, TRAJ8)
CALREDTGFQKLVF

SEQ ID NO: 556880 - protein, 13 aa, Homo sapiens
  CDR3 for beta chain variable domain of TCR clone 278440 (TRBV4-2, TRBJ2-2)
CASEDRGTGELFF

SEQ ID NO: 556881 - protein, 14 aa, Homo sapiens
  CDR3 for alpha chain variable domain of TCR clone 278441 (TRAV16, TRAJ4)
CAPHFSGGYNKLIF

SEQ ID NO: 556882 - protein, 15 aa, Homo sapiens
  CDR3 for beta chain variable domain of TCR clone 278441 (TRBV7-2, TRBJ2-7)
CASSTRLAGVDEQYF

SEQ ID NO: 556883 - protein, 11 aa, Homo sapiens
  CDR3 for alpha chain variable domain of TCR clone 278442 (TRAV12-2, TRAJ54)
CAVEGAQKLVF

SEQ ID NO: 556884 - protein, 17 aa, Homo sapiens
  CDR3 for beta chain variable domain of TCR clone 278442 (TRBV18, TRBJ1-3)
CASSLYPTGPSGNTMYF

SEQ ID NO: 556885 - protein, 14 aa, Homo sapiens
  CDR3 for alpha chain variable domain of TCR clone 278443 (TRAV12-2, TRAJ40)
CAVKIPSGTHKYIF

SEQ ID NO: 556886 - protein, 13 aa, Homo sapiens
  CDR3 for beta chain variable domain of TCR clone 278443 (TRBV20-1, TRBJ1-3)
CSARVQGRDTIYF

SEQ ID NO: 556887 - protein, 11 aa, Homo sapiens
  CDR3 for alpha chain variable domain of TCR clone 278444 (TRAV13-1, TRAJ39)
CAPHAGNMLTF

SEQ ID NO: 556888 - protein, 15 aa, Homo sapiens
  CDR3 for beta chain variable domain of TCR clone 278444 (TRBV6-3, TRBJ2-7)
CASSSPGTVFYEQYF

SEQ ID NO: 556889 - protein, 13 aa, Homo sapiens
  CDR3 for alpha chain variable domain of TCR clone 278445 (TRAV3, TRAJ26)
CAERGAEGQNFVF

SEQ ID NO: 556890 - protein, 13 aa, Homo sapiens
  CDR3 for beta chain variable domain of TCR clone 278445 (TRBV15, TRBJ2-7)
CATSTTGHYEQYF

SEQ ID NO: 556891 - protein, 12 aa, Homo sapiens
  CDR3 for alpha chain variable domain of TCR clone 278446 (TRAV12-3, TRAJ17)
CAMTLTGNKLTF

SEQ ID NO: 556892 - protein, 15 aa, Homo sapiens
  CDR3 for beta chain variable domain of TCR clone 278446 (TRBV11-3, TRBJ2-3)
CASLKDGRERDTQYF

SEQ ID NO: 556893 - protein, 18 aa, Homo sapiens
  CDR3 for alpha chain variable domain of TCR clone 278447 (TRAV21, TRAJ52)
CAARPSPAGGTSYGKLTF

SEQ ID NO: 556894 - protein, 12 aa, Homo sapiens
  CDR3 for beta chain variable domain of TCR clone 278447 (TRBV7-9, TRBJ1-4)
CASSTDREKLFF

SEQ ID NO: 556895 - protein, 15 aa, Homo sapiens
  CDR3 for alpha chain variable domain of TCR clone 278448 (TRAV26-1, TRAJ12)
IASSELMDSGYKLIF

SEQ ID NO: 556896 - protein, 11 aa, Homo sapiens
  CDR3 for beta chain variable domain of TCR clone 278448 (TRBV7-9, TRBJ2-3)
CASSPPDTQYF

SEQ ID NO: 556897 - protein, 11 aa, Homo sapiens
  CDR3 for alpha chain variable domain of TCR clone 278449 (TRAV23/DV6, TRAJ48)
CAPRWGEKLTF

SEQ ID NO: 556898 - protein, 14 aa, Homo sapiens
  CDR3 for beta chain variable domain of TCR clone 278449 (TRBV7-8, TRBJ2-3)
CASSLEAGTDTQYF

SEQ ID NO: 556899 - protein, 15 aa, Homo sapiens
  CDR3 for alpha chain variable domain of TCR clone 278450 (TRAV26-2, TRAJ13)
CILRDLSGGYPKVTF

SEQ ID NO: 556900 - protein, 14 aa, Homo sapiens
  CDR3 for beta chain variable domain of TCR clone 278450 (TRBV4-1, TRBJ2-3)
CASSQEGSTDTQYF

SEQ ID NO: 556901 - protein, 14 aa, Homo sapiens
  CDR3 for alpha chain variable domain of TCR clone 278451 (TRAV1-1, TRAJ23)
CAVSIYNQGGKLIF

SEQ ID NO: 556902 - protein, 14 aa, Homo sapiens
  CDR3 for beta chain variable domain of TCR clone 278451 (TRBV7-2, TRBJ2-7)
CASSPKTSFYEQYF

SEQ ID NO: 556903 - protein, 13 aa, Homo sapiens
  CDR3 for alpha chain variable domain of TCR clone 278452 (TRAV12-1, TRAJ33)
CGDAPDSNYKLIW

SEQ ID NO: 556904 - protein, 15 aa, Homo sapiens
  CDR3 for beta chain variable domain of TCR clone 278452 (TRBV27, TRBJ2-1)
CASSNGGGSSNEQFF

SEQ ID NO: 556905 - protein, 15 aa, Homo sapiens
  CDR3 for alpha chain variable domain of TCR clone 278453 (TRAV8-3, TRAJ27)
CAVCPSKTNAGKSTF

SEQ ID NO: 556906 - protein, 13 aa, Homo sapiens
  CDR3 for beta chain variable domain of TCR clone 278453 (TRBV20-1, TRBJ1-1)
CSAPLGGGTEAFF

SEQ ID NO: 556907 - protein, 11 aa, Homo sapiens
  CDR3 for alpha chain variable domain of TCR clone 278454 (TRAV16, TRAJ34)
CALYNTDKLIF

SEQ ID NO: 556908 - protein, 20 aa, Homo sapiens
  CDR3 for beta chain variable domain of TCR clone 278454 (TRBV4-2, TRBJ2-7)
CASSQASGGNLRAVLRAGHQ

SEQ ID NO: 556909 - protein, 11 aa, Homo sapiens
  CDR3 for alpha chain variable domain of TCR clone 278455 (TRAV17, TRAJ29)
CYVATDTPLVF

SEQ ID NO: 556910 - protein, 12 aa, Homo sapiens
  CDR3 for beta chain variable domain of TCR clone 278455 (TRBV7-9, TRBJ2-7)
SASSIKREEQYF

SEQ ID NO: 556911 - protein, 11 aa, Homo sapiens
  CDR3 for alpha chain variable domain of TCR clone 278456 (TRAV3, TRAJ49)
CAPITGNQVYC

SEQ ID NO: 556912 - protein, 17 aa, Homo sapiens
  CDR3 for beta chain variable domain of TCR clone 278456 (TRBV3-1, TRBJ2-5)
CASSQDTLAGGGETQYF

SEQ ID NO: 556913 - protein, 12 aa, Homo sapiens
  CDR3 for alpha chain variable domain of TCR clone 278457 (TRAV1-1, TRAJ8)
CAGGTVFQKLVF

SEQ ID NO: 556914 - protein, 16 aa, Homo sapiens
  CDR3 for beta chain variable domain of TCR clone 278457 (TRBV12-4, TRBJ1-5)
CASSRPVGGSNQPQHF

SEQ ID NO: 556915 - protein, 15 aa, Homo sapiens
  CDR3 for alpha chain variable domain of TCR clone 278458 (TRAV8-6, TRAJ23)
CAVRLIYNQGGKLIF

SEQ ID NO: 556916 - protein, 13 aa, Homo sapiens
  CDR3 for beta chain variable domain of TCR clone 278458 (TRBV11-2, TRBJ2-2)
CASSLQNTEELFF

SEQ ID NO: 556917 - protein, 12 aa, Homo sapiens
  CDR3 for alpha chain variable domain of TCR clone 278459 (TRAV3, TRAJ31)
CAVRDGNARLMF

SEQ ID NO: 556918 - protein, 13 aa, Homo sapiens
  CDR3 for beta chain variable domain of TCR clone 278459 (TRBV19, TRBJ2-5)
CASSIPYGETQYF

SEQ ID NO: 556919 - protein, 12 aa, Homo sapiens
  CDR3 for alpha chain variable domain of TCR clone 278460 (TRAV1-1, TRAJ24)
CAATDSWGKLQF

SEQ ID NO: 556920 - protein, 12 aa, Homo sapiens
  CDR3 for beta chain variable domain of TCR clone 278460 (TRBV5-1, TRBJ2-3)
CASSILTDTQYF

SEQ ID NO: 556921 - protein, 14 aa, Homo sapiens
  CDR3 for alpha chain variable domain of TCR clone 278461 (TRAV14/DV4, TRAJ41)
CARGGPDSGHALNF

SEQ ID NO: 556922 - protein, 15 aa, Homo sapiens
  CDR3 for beta chain variable domain of TCR clone 278461 (TRBV19, TRBJ2-1)
CASSIQATSYNEQFF

SEQ ID NO: 556923 - protein, 14 aa, Homo sapiens
  CDR3 for alpha chain variable domain of TCR clone 278462 (TRAV2, TRAJ37)
CSVDFTSDTGKLIF

SEQ ID NO: 556924 - protein, 15 aa, Homo sapiens
  CDR3 for beta chain variable domain of TCR clone 278462 (TRBV20-1, TRBJ1-1)
CSASRGVTGNTEAFF

SEQ ID NO: 556925 - protein, 14 aa, Homo sapiens
  CDR3 for alpha chain variable domain of TCR clone 278463 (TRAV21, TRAJ12)
CAVRNGDSSYKLSF

SEQ ID NO: 556926 - protein, 14 aa, Homo sapiens
  CDR3 for beta chain variable domain of TCR clone 278463 (TRBV7-6, TRBJ2-7)
CASSLTGTGNEQYF

SEQ ID NO: 556927 - protein, 15 aa, Homo sapiens
  CDR3 for alpha chain variable domain of TCR clone 278464 (TRAV38-1, TRAJ57)
CAFMDSQGGSEKLVF

SEQ ID NO: 556928 - protein, 16 aa, Homo sapiens
  CDR3 for beta chain variable domain of TCR clone 278464 (TRBV10-3, TRBJ2-1)
CASRGGGRGDYSEQFF

SEQ ID NO: 556929 - protein, 14 aa, Homo sapiens
  CDR3 for alpha chain variable domain of TCR clone 278465 (TRAV12-3, TRAJ10)
SHLPLTGGGNTLTF

SEQ ID NO: 556930 - protein, 15 aa, Homo sapiens
  CDR3 for beta chain variable domain of TCR clone 278465 (TRBV11-3, TRBJ2-3)
CASLKDGREGDTQYF

SEQ ID NO: 556931 - protein, 15 aa, Homo sapiens
  CDR3 for alpha chain variable domain of TCR clone 278466 (TRAV27, TRAJ38)
CAARRNAGNNRKLIW

SEQ ID NO: 556932 - protein, 14 aa, Homo sapiens
  CDR3 for beta chain variable domain of TCR clone 278466 (TRBV19, TRBJ2-1)
CASSEPGGHGEQFF

SEQ ID NO: 556933 - protein, 13 aa, Homo sapiens
  CDR3 for alpha chain variable domain of TCR clone 278467 (TRAV8-4, TRAJ8)
CAVSNTGFQKLVF

SEQ ID NO: 556934 - protein, 20 aa, Homo sapiens
  CDR3 for beta chain variable domain of TCR clone 278467 (TRBV28, TRBJ2-1)
CASTPIGRSPGLAGGNEQFF

SEQ ID NO: 556935 - protein, 14 aa, Homo sapiens
  CDR3 for alpha chain variable domain of TCR clone 278468 (TRAV17, TRAJ57)
CATDPQGGSEKLVF

SEQ ID NO: 556936 - protein, 14 aa, Homo sapiens
  CDR3 for beta chain variable domain of TCR clone 278468 (TRBV27, TRBJ2-5)
CASSSLRGWETQYF

SEQ ID NO: 556937 - protein, 17 aa, Homo sapiens
  CDR3 for alpha chain variable domain of TCR clone 278469 (TRAV17, TRAJ28)
CATDPRRGGAGSYQLTF

SEQ ID NO: 556938 - protein, 16 aa, Homo sapiens
  CDR3 for beta chain variable domain of TCR clone 278469 (TRBV25-1, TRBJ1-1)
CASGGDRDRGRIEAFF

SEQ ID NO: 556939 - protein, 14 aa, Homo sapiens
  CDR3 for alpha chain variable domain of TCR clone 278470 (TRAV17, TRAJ6)
CATDASGGSYIPTF

SEQ ID NO: 556940 - protein, 13 aa, Homo sapiens
  CDR3 for beta chain variable domain of TCR clone 278470 (TRBV7-9, TRBJ2-7)
CASSFAGAYEQYF

SEQ ID NO: 556941 - protein, 13 aa, Homo sapiens
  CDR3 for alpha chain variable domain of TCR clone 278471 (TRAV12-2, TRAJ30)
RAMNLNRDDKIIF

SEQ ID NO: 556942 - protein, 14 aa, Homo sapiens
  CDR3 for beta chain variable domain of TCR clone 278471 (TRBV7-2, TRBJ1-2)
CASSSQGAHYGYTF

SEQ ID NO: 556943 - protein, 14 aa, Homo sapiens
  CDR3 for alpha chain variable domain of TCR clone 278472 (TRAV20, TRAJ56)
CAVQFGGANSKLTF

SEQ ID NO: 556944 - protein, 13 aa, Homo sapiens
  CDR3 for beta chain variable domain of TCR clone 278472 (TRBV12-4, TRBJ1-5)
CASSPDRAQPQHV

SEQ ID NO: 556945 - protein, 13 aa, Homo sapiens
  CDR3 for alpha chain variable domain of TCR clone 278473 (TRAV27, TRAJ29)
CAGAHTGNTPLVF

SEQ ID NO: 556946 - protein, 14 aa, Homo sapiens
  CDR3 for beta chain variable domain of TCR clone 278473 (TRBV7-9, TRBJ2-7)
CASSIGQGAGEQYF

SEQ ID NO: 556947 - protein, 18 aa, Homo sapiens
  CDR3 for alpha chain variable domain of TCR clone 278474 (TRAV13-1, TRAJ52)
CAAKNPNAGGTSYGKLTF

SEQ ID NO: 556948 - protein, 14 aa, Homo sapiens
  CDR3 for beta chain variable domain of TCR clone 278474 (TRBV7-2, TRBJ2-7)
CASSPRTSFYEQYF

SEQ ID NO: 556949 - protein, 11 aa, Homo sapiens
  CDR3 for alpha chain variable domain of TCR clone 278475 (TRAV12-3, TRAJ27)
CAMANAGKSTF

SEQ ID NO: 556950 - protein, 14 aa, Homo sapiens
  CDR3 for beta chain variable domain of TCR clone 278475 (TRBV12-5, TRBJ2-5)
CASGSRTHQETQYV

SEQ ID NO: 556951 - protein, 14 aa, Homo sapiens
  CDR3 for alpha chain variable domain of TCR clone 278476 (TRAV12-1, TRAJ12)
CVVTRMDSSYKLIF

SEQ ID NO: 556952 - protein, 13 aa, Homo sapiens
  CDR3 for beta chain variable domain of TCR clone 278476 (TRBV20-1, TRBJ1-1)
CSARGGGSTEAVF

SEQ ID NO: 556953 - protein, 15 aa, Homo sapiens
  CDR3 for alpha chain variable domain of TCR clone 278477 (TRAV8-4, TRAJ12)
CAVSDRVDSSYKLIF

SEQ ID NO: 556954 - protein, 11 aa, Homo sapiens
  CDR3 for beta chain variable domain of TCR clone 278477 (TRBV12-4, TRBJ2-1)
CASSKFNEQFF

SEQ ID NO: 556955 - protein, 12 aa, Homo sapiens
  CDR3 for alpha chain variable domain of TCR clone 278478 (TRAV36/DV7, TRAJ54)
CAVVRGAQNLVF

SEQ ID NO: 556956 - protein, 13 aa, Homo sapiens
  CDR3 for beta chain variable domain of TCR clone 278478 (TRBV7-9, TRBJ1-2)
CASSLKQNYGYTF

SEQ ID NO: 556957 - protein, 11 aa, Homo sapiens
  CDR3 for alpha chain variable domain of TCR clone 278479 (TRAV1-1, TRAJ23)
CAVRQGGKLIF

SEQ ID NO: 556958 - protein, 20 aa, Homo sapiens
  CDR3 for beta chain variable domain of TCR clone 278479 (TRBV7-8, TRBJ2-2)
CASSHLFPGPTIHITGEQFF

SEQ ID NO: 556959 - protein, 11 aa, Homo sapiens
  CDR3 for alpha chain variable domain of TCR clone 278480 (TRAV20, TRAJ34)
CTRDDTDKLIF

SEQ ID NO: 556960 - protein, 15 aa, Homo sapiens
  CDR3 for beta chain variable domain of TCR clone 278480 (TRBV2, TRBJ2-1)
CASSVTSEGTDEQFF

SEQ ID NO: 556961 - protein, 17 aa, Homo sapiens
  CDR3 for alpha chain variable domain of TCR clone 278481 (TRAV36/DV7, TRAJ52)
FAVAQRAGGTSYGKLTF

SEQ ID NO: 556962 - protein, 15 aa, Homo sapiens
  CDR3 for beta chain variable domain of TCR clone 278481 (TRBV28, TRBJ2-1)
CASSIIAGGRSEQFF

SEQ ID NO: 556963 - protein, 14 aa, Homo sapiens
  CDR3 for alpha chain variable domain of TCR clone 278482 (TRAV1-2, TRAJ8)
CAVRKDTGFQKLVF

SEQ ID NO: 556964 - protein, 15 aa, Homo sapiens
  CDR3 for beta chain variable domain of TCR clone 278482 (TRBV6-3, TRBJ2-7)
CASSSPWTVFYEQYF

SEQ ID NO: 556965 - protein, 19 aa, Homo sapiens
  CDR3 for alpha chain variable domain of TCR clone 278483 (TRAV21, TRAJ20)
SLVTQPPTSVLPNDNKLSF

SEQ ID NO: 556966 - protein, 16 aa, Homo sapiens
  CDR3 for beta chain variable domain of TCR clone 278483 (TRBV12-5, TRBJ2-5)
CASGPRTSGNQETQYF

SEQ ID NO: 556967 - protein, 13 aa, Homo sapiens
  CDR3 for alpha chain variable domain of TCR clone 278484 (TRAV2, TRAJ15)
CAVASQAGTALIF

SEQ ID NO: 556968 - protein, 16 aa, Homo sapiens
  CDR3 for beta chain variable domain of TCR clone 278484 (TRBV19, TRBJ2-2)
CAGRSPGTGATGELFF

SEQ ID NO: 556969 - protein, 16 aa, Homo sapiens
  CDR3 for alpha chain variable domain of TCR clone 278485 (TRAV29/DV5, TRAJ39)
CSASLLFNNAGNMLTF

SEQ ID NO: 556970 - protein, 16 aa, Homo sapiens
  CDR3 for beta chain variable domain of TCR clone 278485 (TRBV19, TRBJ2-6)
CASSMSGLSGANVLTF

SEQ ID NO: 556971 - protein, 16 aa, Homo sapiens
  CDR3 for alpha chain variable domain of TCR clone 278486 (TRAV30, TRAJ24)
CGTEIVYADSWGKFQF

SEQ ID NO: 556972 - protein, 17 aa, Homo sapiens
  CDR3 for beta chain variable domain of TCR clone 278486 (TRBV20-1, TRBJ2-1)
CSASSSGLAGSYNEQFF

SEQ ID NO: 556973 - protein, 12 aa, Homo sapiens
  CDR3 for alpha chain variable domain of TCR clone 278487 (TRAV12-1, TRAJ16)
CVVFRDGQKLLF

SEQ ID NO: 556974 - protein, 20 aa, Homo sapiens
  CDR3 for beta chain variable domain of TCR clone 278487 (TRBV7-8, TRBJ2-2)
CASSHLFPGPTIHITGELFF

SEQ ID NO: 556975 - protein, 13 aa, Homo sapiens
  CDR3 for alpha chain variable domain of TCR clone 278488 (TRAV2, TRAJ11)
CAVEEIGYSTLTL

SEQ ID NO: 556976 - protein, 17 aa, Homo sapiens
  CDR3 for beta chain variable domain of TCR clone 278488 (TRBV7-2, TRBJ2-1)
CASSRGTSGAVGWEQFF

SEQ ID NO: 556977 - protein, 11 aa, Homo sapiens
  CDR3 for alpha chain variable domain of TCR clone 278489 (TRAV12-3, TRAJ27)
CAMANAGKSPF

SEQ ID NO: 556978 - protein, 14 aa, Homo sapiens
  CDR3 for beta chain variable domain of TCR clone 278489 (TRBV4-1, TRBJ2-2)
CASSQAVNTGELFF

SEQ ID NO: 556979 - protein, 16 aa, Homo sapiens
  CDR3 for alpha chain variable domain of TCR clone 278490 (TRAV13-1, TRAJ48)
CAASIFGNFGNEKLTF

SEQ ID NO: 556980 - protein, 13 aa, Homo sapiens
  CDR3 for beta chain variable domain of TCR clone 278490 (TRBV5-5, TRBJ2-7)
CASSSQTRQRQYF

SEQ ID NO: 556981 - protein, 13 aa, Homo sapiens
  CDR3 for alpha chain variable domain of TCR clone 278491 (TRAV27, TRAJ11)
CAGARSGYSTLTF

SEQ ID NO: 556982 - protein, 13 aa, Homo sapiens
  CDR3 for beta chain variable domain of TCR clone 278491 (TRBV7-2, TRBJ2-2)
CASSLAVTGELFF

SEQ ID NO: 556983 - protein, 17 aa, Homo sapiens
  CDR3 for alpha chain variable domain of TCR clone 278492 (TRAV14/DV4, TRAJ28)
CAMRKVSSGAGSYQLTF

SEQ ID NO: 556984 - protein, 15 aa, Homo sapiens
  CDR3 for beta chain variable domain of TCR clone 278492 (TRBV11-2, TRBJ1-6)
CASTLRETGNSPLHF

SEQ ID NO: 556985 - protein, 13 aa, Homo sapiens
  CDR3 for alpha chain variable domain of TCR clone 278493 (TRAV29/DV5, TRAJ31)
CAASRNNNARLMF

SEQ ID NO: 556986 - protein, 12 aa, Homo sapiens
  CDR3 for beta chain variable domain of TCR clone 278493 (TRBV14, TRBJ2-4)
SASSNLKSIQYF

SEQ ID NO: 556987 - protein, 17 aa, Homo sapiens
  CDR3 for alpha chain variable domain of TCR clone 278494 (TRAV3, TRAJ42)
CAVRDRYYGGSQGNLIF

SEQ ID NO: 556988 - protein, 16 aa, Homo sapiens
  CDR3 for beta chain variable domain of TCR clone 278494 (TRBV7-7, TRBJ2-1)
CASSLASGTSYNEQFF

SEQ ID NO: 556989 - protein, 14 aa, Homo sapiens
  CDR3 for alpha chain variable domain of TCR clone 278495 (TRAV12-2, TRAJ13)
CAVKKTGGYQKVTF

SEQ ID NO: 556990 - protein, 10 aa, Homo sapiens
  CDR3 for beta chain variable domain of TCR clone 278495 (TRBV12-4, TRBJ1-2)
CASSVIWLHL

SEQ ID NO: 556991 - protein, 17 aa, Homo sapiens
  CDR3 for alpha chain variable domain of TCR clone 278496 (TRAV3, TRAJ6)
CAVRDGPRAGGSYIPTF

SEQ ID NO: 556992 - protein, 18 aa, Homo sapiens
  CDR3 for beta chain variable domain of TCR clone 278496 (TRBV7-9, TRBJ2-7)
CASSLTTSRSRTWYEQYF

SEQ ID NO: 556993 - protein, 12 aa, Homo sapiens
  CDR3 for alpha chain variable domain of TCR clone 278497 (TRAV12-3, TRAJ17)
CAMTLTGNKLTF

SEQ ID NO: 556994 - protein, 15 aa, Homo sapiens
  CDR3 for beta chain variable domain of TCR clone 278497 (TRBV29-1, TRBJ2-6)
CSFTGGRSGANVLTL

SEQ ID NO: 556995 - protein, 16 aa, Homo sapiens
  CDR3 for alpha chain variable domain of TCR clone 278498 (TRAV30, TRAJ24)
CGTEIVDADSWGKFQF

SEQ ID NO: 556996 - protein, 20 aa, Homo sapiens
  CDR3 for beta chain variable domain of TCR clone 278498 (TRBV7-2, TRBJ2-2)
CASSHLFPGPTIHITGELFF

SEQ ID NO: 556997 - protein, 12 aa, Homo sapiens
  CDR3 for alpha chain variable domain of TCR clone 278499 (TRAV2, TRAJ10)
CASTGGGNKLTF

SEQ ID NO: 556998 - protein, 16 aa, Homo sapiens
  CDR3 for beta chain variable domain of TCR clone 278499 (TRBV28, TRBJ2-7)
CASSLFFETGGPEQYF

SEQ ID NO: 556999 - protein, 11 aa, Homo sapiens
  CDR3 for alpha chain variable domain of TCR clone 278500 (TRAV17, TRAJ9)
CGFTGGFKTIF

SEQ ID NO: 557000 - protein, 18 aa, Homo sapiens
  CDR3 for beta chain variable domain of TCR clone 278500 (TRBV12-4, TRBJ2-2)
FASSLVAGTRGRTGELFF

SEQ ID NO: 557001 - protein, 15 aa, Homo sapiens
  CDR3 for alpha chain variable domain of TCR clone 278501 (TRAV17, TRAJ37)
CATYHGSSNTGKLLY

SEQ ID NO: 557002 - protein, 14 aa, Homo sapiens
  CDR3 for beta chain variable domain of TCR clone 278501 (TRBV7-2, TRBJ2-3)
CASSRTSGADTQYF

SEQ ID NO: 557003 - protein, 16 aa, Homo sapiens
  CDR3 for alpha chain variable domain of TCR clone 278502 (TRAV3, TRAJ37)
CAVRPHGSGNPGKLIF

SEQ ID NO: 557004 - protein, 15 aa, Homo sapiens
  CDR3 for beta chain variable domain of TCR clone 278502 (TRBV6-3, TRBJ2-7)
CASSSPGTVFYEQYF

SEQ ID NO: 557005 - protein, 16 aa, Homo sapiens
  CDR3 for alpha chain variable domain of TCR clone 278503 (TRAV23/DV6, TRAJ9)
CAASIGGNTGGFRTIF

SEQ ID NO: 557006 - protein, 13 aa, Homo sapiens
  CDR3 for beta chain variable domain of TCR clone 278503 (TRBV12-4, TRBJ1-1)
CASSPGTGFEAFF

SEQ ID NO: 557007 - protein, 15 aa, Homo sapiens
  CDR3 for alpha chain variable domain of TCR clone 278504 (TRAV3, TRAJ3)
CAVRHMSSSASKIIF

SEQ ID NO: 557008 - protein, 14 aa, Homo sapiens
  CDR3 for beta chain variable domain of TCR clone 278504 (TRBV6-6, TRBJ2-7)
CASSIAGGVDEQYF

SEQ ID NO: 557009 - protein, 15 aa, Homo sapiens
  CDR3 for alpha chain variable domain of TCR clone 278505 (TRAV26-2, TRAJ39)
CSLRGNNNAGNMLTF

SEQ ID NO: 557010 - protein, 16 aa, Homo sapiens
  CDR3 for beta chain variable domain of TCR clone 278505 (TRBV12-5, TRBJ2-5)
CASGPRTSGNQETQYF

SEQ ID NO: 557011 - protein, 18 aa, Homo sapiens
  CDR3 for alpha chain variable domain of TCR clone 278506 (TRAV26-1, TRAJ37)
CIVRVDMHGSSNTGKLIF

SEQ ID NO: 557012 - protein, 15 aa, Homo sapiens
  CDR3 for beta chain variable domain of TCR clone 278506 (TRBV20-1, TRBJ2-7)
CSARVSASPLYEQYF

SEQ ID NO: 557013 - protein, 16 aa, Homo sapiens
  CDR3 for alpha chain variable domain of TCR clone 278507 (TRAV23/DV6, TRAJ48)
CAASGVVNFGNEKLTF

SEQ ID NO: 557014 - protein, 14 aa, Homo sapiens
  CDR3 for beta chain variable domain of TCR clone 278507 (TRBV7-2, TRBJ2-7)
CASRSQGAAYEQYF

SEQ ID NO: 557015 - protein, 14 aa, Homo sapiens
  CDR3 for alpha chain variable domain of TCR clone 278508 (TRAV9-2, TRAJ39)
CALYIYNAGNMLTF

SEQ ID NO: 557016 - protein, 16 aa, Homo sapiens
  CDR3 for beta chain variable domain of TCR clone 278508 (TRBV28, TRBJ2-5)
CASSFSPAGGWETQYF

SEQ ID NO: 557017 - protein, 10 aa, Homo sapiens
  CDR3 for alpha chain variable domain of TCR clone 278509 (TRAV23/DV6, TRAJ57)
CAASSTLSQG

SEQ ID NO: 557018 - protein, 14 aa, Homo sapiens
  CDR3 for beta chain variable domain of TCR clone 278509 (TRBV7-8, TRBJ2-5)
CASSATVGQETQYF

SEQ ID NO: 557019 - protein, 12 aa, Homo sapiens
  CDR3 for alpha chain variable domain of TCR clone 278510 (TRAV17, TRAJ39)
CATGDAGNMLTF

SEQ ID NO: 557020 - protein, 14 aa, Homo sapiens
  CDR3 for beta chain variable domain of TCR clone 278510 (TRBV7-9, TRBJ1-2)
CASSRQGANYSYTF

SEQ ID NO: 557021 - protein, 14 aa, Homo sapiens
  CDR3 for alpha chain variable domain of TCR clone 278511 (TRAV16, TRAJ21)
CACGWATTSTNFTL

SEQ ID NO: 557022 - protein, 15 aa, Homo sapiens
  CDR3 for beta chain variable domain of TCR clone 278511 (TRBV19, TRBJ2-1)
CASSIQATSYNEQFF

SEQ ID NO: 557023 - protein, 13 aa, Homo sapiens
  CDR3 for alpha chain variable domain of TCR clone 278512 (TRAV2, TRAJ40)
CAVVTSGTYKYIF

SEQ ID NO: 557024 - protein, 14 aa, Homo sapiens
  CDR3 for beta chain variable domain of TCR clone 278512 (TRBV28, TRBJ2-7)
CASSLRARGNEQYC

SEQ ID NO: 557025 - protein, 14 aa, Homo sapiens
  CDR3 for alpha chain variable domain of TCR clone 278513 (TRAV12-1, TRAJ17)
CVVNYKAAGNKLTF

SEQ ID NO: 557026 - protein, 17 aa, Homo sapiens
  CDR3 for beta chain variable domain of TCR clone 278513 (TRBV20-1, TRBJ2-1)
CSASSSGLAGSYHEPFF

SEQ ID NO: 557027 - protein, 14 aa, Homo sapiens
  CDR3 for alpha chain variable domain of TCR clone 278514 (TRAV26-1, TRAJ34)
CIVRVAYNTDKPIF

SEQ ID NO: 557028 - protein, 15 aa, Homo sapiens
  CDR3 for beta chain variable domain of TCR clone 278514 (TRBV7-3, TRBJ2-1)
CASSPTGGGEVEQFF

SEQ ID NO: 557029 - protein, 16 aa, Homo sapiens
  CDR3 for alpha chain variable domain of TCR clone 278515 (TRAV30, TRAJ24)
CGTEIVDADSWGKFQF

SEQ ID NO: 557030 - protein, 14 aa, Homo sapiens
  CDR3 for beta chain variable domain of TCR clone 278515 (TRBV4-1, TRBJ2-5)
CASSQERGRETQYF

SEQ ID NO: 557031 - protein, 18 aa, Homo sapiens
  CDR3 for alpha chain variable domain of TCR clone 278516 (TRAV26-2, TRAJ45)
CILRLWGYSGGGADGLTF

SEQ ID NO: 557032 - protein, 17 aa, Homo sapiens
  CDR3 for beta chain variable domain of TCR clone 278516 (TRBV28, TRBJ2-3)
CASTPTPAGGRVDTQYF

SEQ ID NO: 557033 - protein, 18 aa, Homo sapiens
  CDR3 for alpha chain variable domain of TCR clone 278517 (TRAV21, TRAJ52)
CAVRPSPAGGTSYGELTF

SEQ ID NO: 557034 - protein, 17 aa, Homo sapiens
  CDR3 for beta chain variable domain of TCR clone 278517 (TRBV13, TRBJ2-3)
CASSLARVAGGRNTQYF

SEQ ID NO: 557035 - protein, 15 aa, Homo sapiens
  CDR3 for alpha chain variable domain of TCR clone 278518 (TRAV26-1, TRAJ29)
CIVRVEGSGNTPFVF

SEQ ID NO: 557036 - protein, 13 aa, Homo sapiens
  CDR3 for beta chain variable domain of TCR clone 278518 (TRBV7-3, TRBJ1-1)
CASSQDWGAEAFF

SEQ ID NO: 557037 - protein, 13 aa, Homo sapiens
  CDR3 for alpha chain variable domain of TCR clone 278519 (TRAV16, TRAJ29)
CALSRRGNKPLVF

SEQ ID NO: 557038 - protein, 15 aa, Homo sapiens
  CDR3 for beta chain variable domain of TCR clone 278519 (TRBV4-1, TRBJ2-3)
CASSRGQGIPDTQYF

SEQ ID NO: 557039 - protein, 13 aa, Homo sapiens
  CDR3 for alpha chain variable domain of TCR clone 278520 (TRAV20, TRAJ37)
CAGCSSNTGKLIF

SEQ ID NO: 557040 - protein, 16 aa, Homo sapiens
  CDR3 for beta chain variable domain of TCR clone 278520 (TRBV13, TRBJ2-2)
CASSPRTGEHTVELFF

SEQ ID NO: 557041 - protein, 15 aa, Homo sapiens
  CDR3 for alpha chain variable domain of TCR clone 278521 (TRAV25, TRAJ53)
CAATGGGGSNYKLTF

SEQ ID NO: 557042 - protein, 11 aa, Homo sapiens
  CDR3 for beta chain variable domain of TCR clone 278521 (TRBV11-3, TRBJ2-2)
CASSSGGELVF

SEQ ID NO: 557043 - protein, 13 aa, Homo sapiens
  CDR3 for alpha chain variable domain of TCR clone 278522 (TRAV13-1, TRAJ43)
CAASLSNNNDMRF

SEQ ID NO: 557044 - protein, 11 aa, Homo sapiens
  CDR3 for beta chain variable domain of TCR clone 278522 (TRBV19, TRBJ1-1)
CASSIGSEAFF

SEQ ID NO: 557045 - protein, 14 aa, Homo sapiens
  CDR3 for alpha chain variable domain of TCR clone 278523 (TRAV3, TRAJ32)
CCERRAGATNKLIF

SEQ ID NO: 557046 - protein, 11 aa, Homo sapiens
  CDR3 for beta chain variable domain of TCR clone 278523 (TRBV11-2, TRBJ2-2)
CASSLPGELFF

SEQ ID NO: 557047 - protein, 12 aa, Homo sapiens
  CDR3 for alpha chain variable domain of TCR clone 278524 (TRAV2, TRAJ31)
CAVEDNNARLMF

SEQ ID NO: 557048 - protein, 14 aa, Homo sapiens
  CDR3 for beta chain variable domain of TCR clone 278524 (TRBV11-1, TRBJ2-7)
CASSWTGTAYEQYF

SEQ ID NO: 557049 - protein, 12 aa, Homo sapiens
  CDR3 for alpha chain variable domain of TCR clone 278525 (TRAV23/DV6, TRAJ16)
CAATGTGQKLLF

SEQ ID NO: 557050 - protein, 20 aa, Homo sapiens
  CDR3 for beta chain variable domain of TCR clone 278525 (TRBV6-7, TRBJ1-2)
CASSYSAGQGNPRRVYGYTF

SEQ ID NO: 557051 - protein, 17 aa, Homo sapiens
  CDR3 for alpha chain variable domain of TCR clone 278526 (TRAV23/DV6, TRAJ57)
SAASSTLSQGGSEKLVF

SEQ ID NO: 557052 - protein, 14 aa, Homo sapiens
  CDR3 for beta chain variable domain of TCR clone 278526 (TRBV7-3, TRBJ2-1)
CASSLSGSYNEQFF

SEQ ID NO: 557053 - protein, 11 aa, Homo sapiens
  CDR3 for alpha chain variable domain of TCR clone 278527 (TRAV39, TRAJ49)
CAVDISTKFYF

SEQ ID NO: 557054 - protein, 11 aa, Homo sapiens
  CDR3 for beta chain variable domain of TCR clone 278527 (TRBV7-8, TRBJ2-7)
CASSLSLEQYF

SEQ ID NO: 557055 - protein, 14 aa, Homo sapiens
  CDR3 for alpha chain variable domain of TCR clone 278528 (TRAV12-1, TRAJ12)
CVVTRMDSSYKLIF

SEQ ID NO: 557056 - protein, 18 aa, Homo sapiens
  CDR3 for beta chain variable domain of TCR clone 278528 (TRBV20-1, TRBJ2-6)
CSAETTPTHGSGANILTF

SEQ ID NO: 557057 - protein, 18 aa, Homo sapiens
  CDR3 for alpha chain variable domain of TCR clone 278529 (TRAV26-1, TRAJ23)
CIVRVGLEGWNQGGGLIF

SEQ ID NO: 557058 - protein, 16 aa, Homo sapiens
  CDR3 for beta chain variable domain of TCR clone 278529 (TRBV12-4, TRBJ2-5)
CASSFFVRGRQETQYF

SEQ ID NO: 557059 - protein, 15 aa, Homo sapiens
  CDR3 for alpha chain variable domain of TCR clone 278530 (TRAV21, TRAJ53)
CVTLNSGGSNYKLTF

SEQ ID NO: 557060 - protein, 13 aa, Homo sapiens
  CDR3 for beta chain variable domain of TCR clone 278530 (TRBV12-4, TRBJ2-7)
CASSFVPTAEQYF

SEQ ID NO: 557061 - protein, 16 aa, Homo sapiens
  CDR3 for alpha chain variable domain of TCR clone 278531 (TRAV30, TRAJ24)
CGTEIVDADSWGKFQF

SEQ ID NO: 557062 - protein, 15 aa, Homo sapiens
  CDR3 for beta chain variable domain of TCR clone 278531 (TRBV7-3, TRBJ2-1)
CASILDGNSYNEQFF

SEQ ID NO: 557063 - protein, 13 aa, Homo sapiens
  CDR3 for alpha chain variable domain of TCR clone 278532 (TRAV13-2, TRAJ13)
CADLSGGYKNVTF

SEQ ID NO: 557064 - protein, 15 aa, Homo sapiens
  CDR3 for beta chain variable domain of TCR clone 278532 (TRBV19, TRBJ1-1)
CASNIGGGRNTEAFF

SEQ ID NO: 557065 - protein, 12 aa, Homo sapiens
  CDR3 for alpha chain variable domain of TCR clone 278533 (TRAV3, TRAJ20)
CAVRDHDYKLIF

SEQ ID NO: 557066 - protein, 15 aa, Homo sapiens
  CDR3 for beta chain variable domain of TCR clone 278533 (TRBV9, TRBJ1-6)
CASSVAGTGDSPLHF

SEQ ID NO: 557067 - protein, 15 aa, Homo sapiens
  CDR3 for alpha chain variable domain of TCR clone 278534 (TRAV12-2, TRAJ43)
CAFDMRFGAGTRLTV

SEQ ID NO: 557068 - protein, 15 aa, Homo sapiens
  CDR3 for beta chain variable domain of TCR clone 278534 (TRBV7-9, TRBJ1-1)
CASSDSLGENTEAFF

SEQ ID NO: 557069 - protein, 17 aa, Homo sapiens
  CDR3 for alpha chain variable domain of TCR clone 278535 (TRAV13-1, TRAJ52)
CAAGRNAGGTSYGKLTF

SEQ ID NO: 557070 - protein, 13 aa, Homo sapiens
  CDR3 for beta chain variable domain of TCR clone 278535 (TRBV7-2, TRBJ1-1)
CASNIKGAKVAFF

SEQ ID NO: 557071 - protein, 13 aa, Homo sapiens
  CDR3 for alpha chain variable domain of TCR clone 278536 (TRAV8-3, TRAJ20)
CAVGRPNDYKLSF

SEQ ID NO: 557072 - protein, 13 aa, Homo sapiens
  CDR3 for beta chain variable domain of TCR clone 278536 (TRBV7-3, TRBJ1-1)
CASSQDWGAEAFF

SEQ ID NO: 557073 - protein, 14 aa, Homo sapiens
  CDR3 for alpha chain variable domain of TCR clone 278537 (TRAV17, TRAJ16)
CATADFSDGQKMLF

SEQ ID NO: 557074 - protein, 12 aa, Homo sapiens
  CDR3 for beta chain variable domain of TCR clone 278537 (TRBV5-4, TRBJ2-5)
CASSSTRETQYF

SEQ ID NO: 557075 - protein, 12 aa, Homo sapiens
  CDR3 for alpha chain variable domain of TCR clone 278538 (TRAV13-1, TRAJ21)
CAAKEGFYKFYF

SEQ ID NO: 557076 - protein, 17 aa, Homo sapiens
  CDR3 for beta chain variable domain of TCR clone 278538 (TRBV19, TRBJ2-7)
CASSISFYDSYPYEQYF

SEQ ID NO: 557077 - protein, 19 aa, Homo sapiens
  CDR3 for alpha chain variable domain of TCR clone 278539 (TRAV29/DV5, TRAJ53)
CSVLLCSKPDRGSNYKPTF

SEQ ID NO: 557078 - protein, 15 aa, Homo sapiens
  CDR3 for beta chain variable domain of TCR clone 278539 (TRBV19, TRBJ2-4)
CASSIGLAGANSQYF

SEQ ID NO: 557079 - protein, 17 aa, Homo sapiens
  CDR3 for alpha chain variable domain of TCR clone 278540 (TRAV13-1, TRAJ28)
CAASPPYSGAGSHQLTF

SEQ ID NO: 557080 - protein, 12 aa, Homo sapiens
  CDR3 for beta chain variable domain of TCR clone 278540 (TRBV11-2, TRBJ2-2)
CASSLPTGELFF

SEQ ID NO: 557081 - protein, 12 aa, Homo sapiens
  CDR3 for alpha chain variable domain of TCR clone 278541 (TRAV3, TRAJ20)
CAVRDPDYKLNF

SEQ ID NO: 557082 - protein, 13 aa, Homo sapiens
  CDR3 for beta chain variable domain of TCR clone 278541 (TRBV12-4, TRBJ1-2)
CASSLRQGKGYTF

SEQ ID NO: 557083 - protein, 13 aa, Homo sapiens
  CDR3 for alpha chain variable domain of TCR clone 278542 (TRAV20, TRAJ21)
FAVEGYNFNKFYF

SEQ ID NO: 557084 - protein, 14 aa, Homo sapiens
  CDR3 for beta chain variable domain of TCR clone 278542 (TRBV12-5, TRBJ2-5)
CASGSRTHQETQYF

SEQ ID NO: 557085 - protein, 16 aa, Homo sapiens
  CDR3 for alpha chain variable domain of TCR clone 278543 (TRAV3, TRAJ37)
CAVRVRGSGNTGKRIF

SEQ ID NO: 557086 - protein, 11 aa, Homo sapiens
  CDR3 for beta chain variable domain of TCR clone 278543 (TRBV11-2, TRBJ2-2)
CASSLPGELFF

SEQ ID NO: 557087 - protein, 23 aa, Homo sapiens
  CDR3 for alpha chain variable domain of TCR clone 278544 (TRAV26-1, TRAJ38)
CIADNAGNNHIQNPDPAMYQLRD

SEQ ID NO: 557088 - protein, 13 aa, Homo sapiens
  CDR3 for beta chain variable domain of TCR clone 278544 (TRBV10-3, TRBJ2-7)
CASKLAVNYEQYF

SEQ ID NO: 557089 - protein, 14 aa, Homo sapiens
  CDR3 for alpha chain variable domain of TCR clone 278545 (TRAV29/DV5, TRAJ45)
CAASFRGGADGLTF

SEQ ID NO: 557090 - protein, 15 aa, Homo sapiens
  CDR3 for beta chain variable domain of TCR clone 278545 (TRBV6-5, TRBJ2-1)
CASSYDAGAGNEQFF

SEQ ID NO: 557091 - protein, 15 aa, Homo sapiens
  CDR3 for alpha chain variable domain of TCR clone 278546 (TRAV12-2, TRAJ53)
CAVNGGGGSNYKLTF

SEQ ID NO: 557092 - protein, 17 aa, Homo sapiens
  CDR3 for beta chain variable domain of TCR clone 278546 (TRBV7-3, TRBJ2-3)
CASSLMKRMLGADTQYF

SEQ ID NO: 557093 - protein, 12 aa, Homo sapiens
  CDR3 for alpha chain variable domain of TCR clone 278547 (TRAV12-3, TRAJ20)
CAMVRGDYKLSF

SEQ ID NO: 557094 - protein, 13 aa, Homo sapiens
  CDR3 for beta chain variable domain of TCR clone 278547 (TRBV23-1, TRAJ7)
CASRGKFNEKLFF

SEQ ID NO: 557095 - protein, 13 aa, Homo sapiens
  CDR3 for alpha chain variable domain of TCR clone 278548 (TRAV8-2, TRAJ43)
CVVSDQGDNYMRF

SEQ ID NO: 557096 - protein, 12 aa, Homo sapiens
  CDR3 for beta chain variable domain of TCR clone 278548 (TRBV7-9, TRBJ2-7)
CASGTGFDEQYF

SEQ ID NO: 557097 - protein, 12 aa, Homo sapiens
  CDR3 for alpha chain variable domain of TCR clone 278549 (TRAV3, TRAJ27)
CAVRDKAGNSTF

SEQ ID NO: 557098 - protein, 14 aa, Homo sapiens
  CDR3 for beta chain variable domain of TCR clone 278549 (TRBV5-1, TRBJ1-2)
FASSVDSTNYGYTF

SEQ ID NO: 557099 - protein, 12 aa, Homo sapiens
  CDR3 for alpha chain variable domain of TCR clone 278550 (TRAV2, TRAJ9)
CAVVSGGFKTIF

SEQ ID NO: 557100 - protein, 16 aa, Homo sapiens
  CDR3 for beta chain variable domain of TCR clone 278550 (TRBV13, TRBJ2-2)
CASSPRTGEHTGELFF

SEQ ID NO: 557101 - protein, 12 aa, Homo sapiens
  CDR3 for alpha chain variable domain of TCR clone 278551 (TRAV12-2, TRAJ10)
WGVTGGGNKLTF

SEQ ID NO: 557102 - protein, 15 aa, Homo sapiens
  CDR3 for beta chain variable domain of TCR clone 278551 (TRBV20-1, TRBJ2-7)
CSARDRVSGMDELYF

SEQ ID NO: 557103 - protein, 11 aa, Homo sapiens
  CDR3 for alpha chain variable domain of TCR clone 278552 (TRAV2, TRAJ13)
CASGGYQKVTF

SEQ ID NO: 557104 - protein, 10 aa, Homo sapiens
  CDR3 for beta chain variable domain of TCR clone 278552 (TRBV19, TRBJ2-1)
VRTGANEQFF

SEQ ID NO: 557105 - protein, 13 aa, Homo sapiens
  CDR3 for alpha chain variable domain of TCR clone 278553 (TRAV21, TRAJ27)
CAARPGNPGKSTF

SEQ ID NO: 557106 - protein, 16 aa, Homo sapiens
  CDR3 for beta chain variable domain of TCR clone 278553 (TRBV20-1, TRBJ1-2)
CSASMGQGVANYGYTF

SEQ ID NO: 557107 - protein, 17 aa, Homo sapiens
  CDR3 for alpha chain variable domain of TCR clone 278554 (TRAV3, TRAJ6)
CAVKDGLRAGGSYIPTF

SEQ ID NO: 557108 - protein, 14 aa, Homo sapiens
  CDR3 for beta chain variable domain of TCR clone 278554 (TRBV7-2, TRBJ2-7)
CASSPKTSFYEQYF

SEQ ID NO: 557109 - protein, 14 aa, Homo sapiens
  CDR3 for alpha chain variable domain of TCR clone 278555 (TRAV29/DV5, TRAJ44)
CAAFLVGPASKLTF

SEQ ID NO: 557110 - protein, 15 aa, Homo sapiens
  CDR3 for beta chain variable domain of TCR clone 278555 (TRBV7-3, TRBJ2-2)
CASSETGQGTGELFF

SEQ ID NO: 557111 - protein, 14 aa, Homo sapiens
  CDR3 for alpha chain variable domain of TCR clone 278556 (TRAV12-1, TRAJ30)
CVVNIGNRDDKIIF

SEQ ID NO: 557112 - protein, 15 aa, Homo sapiens
  CDR3 for beta chain variable domain of TCR clone 278556 (TRBV10-1, TRBJ2-3)
CASSATSGGFDTQYF

SEQ ID NO: 557113 - protein, 11 aa, Homo sapiens
  CDR3 for alpha chain variable domain of TCR clone 278557 (TRAV12-3, TRAJ43)
CAMSVSNDMRF

SEQ ID NO: 557114 - protein, 19 aa, Homo sapiens
  CDR3 for beta chain variable domain of TCR clone 278557 (TRBV28, TRBJ2-7)
CASSYYGTSRLGWVYEQYF

SEQ ID NO: 557115 - protein, 14 aa, Homo sapiens
  CDR3 for alpha chain variable domain of TCR clone 278558 (TRAV12-2, TRAJ13)
CSVNPSGGYPKVTF

SEQ ID NO: 557116 - protein, 13 aa, Homo sapiens
  CDR3 for beta chain variable domain of TCR clone 278558 (TRBV20-1, TRBJ1-6)
CSAKLGGTSPLHF

SEQ ID NO: 557117 - protein, 14 aa, Homo sapiens
  CDR3 for alpha chain variable domain of TCR clone 278559 (TRAV8-6, TRAJ57)
CAVSSKGGSEKLVF

SEQ ID NO: 557118 - protein, 13 aa, Homo sapiens
  CDR3 for beta chain variable domain of TCR clone 278559 (TRBV7-2, TRBJ2-2)
CASSLAVTGELFF

SEQ ID NO: 557119 - protein, 13 aa, Homo sapiens
  CDR3 for alpha chain variable domain of TCR clone 278560 (TRAV29/DV5, TRAJ31)
CAASRNNNARLMF

SEQ ID NO: 557120 - protein, 15 aa, Homo sapiens
  CDR3 for beta chain variable domain of TCR clone 278560 (TRBV6-1, TRBJ2-3)
CASSERGGITDTQYF

SEQ ID NO: 557121 - protein, 13 aa, Homo sapiens
  CDR3 for alpha chain variable domain of TCR clone 278561 (TRAV20, TRAJ29)
CAVQAVRNTPLVF

SEQ ID NO: 557122 - protein, 15 aa, Homo sapiens
  CDR3 for beta chain variable domain of TCR clone 278561 (TRBV10-2, TRBJ2-5)
CASRGSGGPQETQYF

SEQ ID NO: 557123 - protein, 12 aa, Homo sapiens
  CDR3 for alpha chain variable domain of TCR clone 278562 (TRAV8-4, TRAJ43)
CAVRVNNNDMRF

SEQ ID NO: 557124 - protein, 14 aa, Homo sapiens
  CDR3 for beta chain variable domain of TCR clone 278562 (TRBV11-2, TRBJ1-2)
CASSLGTANYGYAF

SEQ ID NO: 557125 - protein, 13 aa, Homo sapiens
  CDR3 for alpha chain variable domain of TCR clone 278563 (TRAV21, TRAJ20)
CAVGVFADYKLSF

SEQ ID NO: 557126 - protein, 12 aa, Homo sapiens
  CDR3 for beta chain variable domain of TCR clone 278563 (TRBV6-1, TRBJ2-7)
CASRTGRYEQYF

SEQ ID NO: 557127 - protein, 14 aa, Homo sapiens
  CDR3 for alpha chain variable domain of TCR clone 278564 (TRAV30, TRAJ33)
CGTERRFSNYQLIW

SEQ ID NO: 557128 - protein, 15 aa, Homo sapiens
  CDR3 for beta chain variable domain of TCR clone 278564 (TRBV12-4, TRBJ2-5)
CASSPPTGLQETQYF

SEQ ID NO: 557129 - protein, 13 aa, Homo sapiens
  CDR3 for alpha chain variable domain of TCR clone 278565 (TRAV36/DV7, TRAJ53)
CALSGGSNYKLTF

SEQ ID NO: 557130 - protein, 13 aa, Homo sapiens
  CDR3 for beta chain variable domain of TCR clone 278565 (TRBV28, TRBJ2-4)
CASSQSSKNIQHF

SEQ ID NO: 557131 - protein, 14 aa, Homo sapiens
  CDR3 for alpha chain variable domain of TCR clone 278566 (TRAV12-2, TRAJ40)
CVVKIPSGTYKYIF

SEQ ID NO: 557132 - protein, 14 aa, Homo sapiens
  CDR3 for beta chain variable domain of TCR clone 278566 (TRBV20-1, TRBJ1-1)
CSAQTRIGGTEDVF

SEQ ID NO: 557133 - protein, 14 aa, Homo sapiens
  CDR3 for alpha chain variable domain of TCR clone 278567 (TRAV8-3, TRAJ39)
CAVGANNAGNMLTF

SEQ ID NO: 557134 - protein, 15 aa, Homo sapiens
  CDR3 for beta chain variable domain of TCR clone 278567 (TRBV9, TRBJ1-6)
CASSVAGTGDSPLHF

SEQ ID NO: 557135 - protein, 11 aa, Homo sapiens
  CDR3 for alpha chain variable domain of TCR clone 278568 (TRAV3, TRAJ17)
PRGAAGNKLTF

SEQ ID NO: 557136 - protein, 16 aa, Homo sapiens
  CDR3 for beta chain variable domain of TCR clone 278568 (TRBV19, TRBJ2-1)
CASSMGGGSSYNEQFF

SEQ ID NO: 557137 - protein, 12 aa, Homo sapiens
  CDR3 for alpha chain variable domain of TCR clone 278569 (TRAV27, TRAJ9)
CAGEFGGFKTIF

SEQ ID NO: 557138 - protein, 18 aa, Homo sapiens
  CDR3 for beta chain variable domain of TCR clone 278569 (TRBV10-2, TRBJ2-2)
CISAPAVHRQADAGELFF

SEQ ID NO: 557139 - protein, 17 aa, Homo sapiens
  CDR3 for alpha chain variable domain of TCR clone 278570 (TRAV3, TRAJ12)
CAVRDGGRMDSSYKLIF

SEQ ID NO: 557140 - protein, 13 aa, Homo sapiens
  CDR3 for beta chain variable domain of TCR clone 278570 (TRBV15, TRBJ1-6)
CATSGGSNSPLHF

SEQ ID NO: 557141 - protein, 15 aa, Homo sapiens
  CDR3 for alpha chain variable domain of TCR clone 278571 (TRAV36/DV7, TRAJ53)
CAVEGSGGSNYKLTF

SEQ ID NO: 557142 - protein, 16 aa, Homo sapiens
  CDR3 for beta chain variable domain of TCR clone 278571 (TRBV27, TRBJ2-2)
CASSLSGFWVNGELFF

SEQ ID NO: 557143 - protein, 16 aa, Homo sapiens
  CDR3 for alpha chain variable domain of TCR clone 278572 (TRAV4, TRAJ22)
CLVGDLYSGSARQLTF

SEQ ID NO: 557144 - protein, 12 aa, Homo sapiens
  CDR3 for beta chain variable domain of TCR clone 278572 (TRBV7-9, TRBJ2-7)
CASRTGFDEQYF

SEQ ID NO: 557145 - protein, 14 aa, Homo sapiens
  CDR3 for alpha chain variable domain of TCR clone 278573 (TRAV8-3, TRAJ39)
CAVGANNAGNMLTF

SEQ ID NO: 557146 - protein, 17 aa, Homo sapiens
  CDR3 for beta chain variable domain of TCR clone 278573 (TRBV4-1, TRBJ2-7)
CASSRDPLGVRGGEQYF

SEQ ID NO: 557147 - protein, 17 aa, Homo sapiens
  CDR3 for alpha chain variable domain of TCR clone 278574 (TRAV3, TRAJ6)
CAVRDGPRAGGSYIPTF

SEQ ID NO: 557148 - protein, 13 aa, Homo sapiens
  CDR3 for beta chain variable domain of TCR clone 278574 (TRBV29-1, TRBJ1-3)
CSVEGGSGNTMYF

SEQ ID NO: 557149 - protein, 12 aa, Homo sapiens
  CDR3 for alpha chain variable domain of TCR clone 278575 (TRAV13-2, TRAJ8)
CAPWRGFQKLVF

SEQ ID NO: 557150 - protein, 13 aa, Homo sapiens
  CDR3 for beta chain variable domain of TCR clone 278575 (TRBV12-4, TRBJ1-1)
CASSPGTGFEAFF

SEQ ID NO: 557151 - protein, 11 aa, Homo sapiens
  CDR3 for alpha chain variable domain of TCR clone 278576 (TRAV21, TRAJ34)
CAVTNTDKLIF

SEQ ID NO: 557152 - protein, 14 aa, Homo sapiens
  CDR3 for beta chain variable domain of TCR clone 278576 (TRBV6-1, TRBJ1-5)
CASSEIRARQPQHF

SEQ ID NO: 557153 - protein, 14 aa, Homo sapiens
  CDR3 for alpha chain variable domain of TCR clone 278577 (TRAV13-1, TRAJ35)
CAASKGGFGNVLHC

SEQ ID NO: 557154 - protein, 13 aa, Homo sapiens
  CDR3 for beta chain variable domain of TCR clone 278577 (TRBV11-2, TRBJ2-5)
CASSFSSQETQYF

SEQ ID NO: 557155 - protein, 14 aa, Homo sapiens
  CDR3 for alpha chain variable domain of TCR clone 278578 (TRAV29/DV5, TRAJ36)
CAARRKTGANNLFF

SEQ ID NO: 557156 - protein, 15 aa, Homo sapiens
  CDR3 for beta chain variable domain of TCR clone 278578 (TRBV19, TRBJ2-1)
CASSRPGQNYNEQFF

SEQ ID NO: 557157 - protein, 23 aa, Homo sapiens
  CDR3 for alpha chain variable domain of TCR clone 278579 (TRAV17, TRAJ17)
CFLLLCYGRASWVIKAAGNKLTF

SEQ ID NO: 557158 - protein, 17 aa, Homo sapiens
  CDR3 for beta chain variable domain of TCR clone 278579 (TRBV12-4, TRBJ1-1)
CASSLSGFRTMNTEAFF

SEQ ID NO: 557159 - protein, 14 aa, Homo sapiens
  CDR3 for alpha chain variable domain of TCR clone 278580 (TRAV1-2, TRAJ10)
CAVRVTGGGNKLTF

SEQ ID NO: 557160 - protein, 15 aa, Homo sapiens
  CDR3 for beta chain variable domain of TCR clone 278580 (TRBV11-2, TRBJ1-6)
CASSLDPWAVSPLHF

SEQ ID NO: 557161 - protein, 14 aa, Homo sapiens
  CDR3 for alpha chain variable domain of TCR clone 278581 (TRAV1-2, TRAJ16)
CAVNRVSDGQKLLF

SEQ ID NO: 557162 - protein, 15 aa, Homo sapiens
  CDR3 for beta chain variable domain of TCR clone 278581 (TRBV20-1, TRBJ2-7)
CSARKGLAESYEQYF

SEQ ID NO: 557163 - protein, 14 aa, Homo sapiens
  CDR3 for alpha chain variable domain of TCR clone 278582 (TRAV29/DV5, TRAJ36)
CAARRKTGANNHFF

SEQ ID NO: 557164 - protein, 15 aa, Homo sapiens
  CDR3 for beta chain variable domain of TCR clone 278582 (TRBV19, TRBJ1-1)
CASTSGQIQNTEAFF

SEQ ID NO: 557165 - protein, 13 aa, Homo sapiens
  CDR3 for alpha chain variable domain of TCR clone 278583 (TRAV27, TRAJ6)
CAGGTRGSYIPTF

SEQ ID NO: 557166 - protein, 13 aa, Homo sapiens
  CDR3 for beta chain variable domain of TCR clone 278583 (TRBV4-1, TRBJ2-5)
YASILTRGETQYF

SEQ ID NO: 557167 - protein, 13 aa, Homo sapiens
  CDR3 for alpha chain variable domain of TCR clone 278584 (TRAV8-3, TRAJ44)
CAVVPGTASKLTL

SEQ ID NO: 557168 - protein, 14 aa, Homo sapiens
  CDR3 for beta chain variable domain of TCR clone 278584 (TRBV11-2, TRBJ2-3)
CASSRLARTDTQYF

SEQ ID NO: 557169 - protein, 14 aa, Homo sapiens
  CDR3 for alpha chain variable domain of TCR clone 278585 (TRAV12-1, TRAJ6)
CVVARIRRKLHTYI

SEQ ID NO: 557170 - protein, 15 aa, Homo sapiens
  CDR3 for beta chain variable domain of TCR clone 278585 (TRBV7-3, TRBJ2-1)
CARSLKASEYNERFF

SEQ ID NO: 557171 - protein, 12 aa, Homo sapiens
  CDR3 for alpha chain variable domain of TCR clone 278586 (TRAV12-3, TRAJ17)
CAMTLTGNKLTF

SEQ ID NO: 557172 - protein, 20 aa, Homo sapiens
  CDR3 for beta chain variable domain of TCR clone 278586 (TRBV7-8, TRBJ2-2)
CASSHLFPGATIHITGELFF

SEQ ID NO: 557173 - protein, 13 aa, Homo sapiens
  CDR3 for alpha chain variable domain of TCR clone 278587 (TRAV4, TRAJ20)
CLVGNPNDYKLSF

SEQ ID NO: 557174 - protein, 14 aa, Homo sapiens
  CDR3 for beta chain variable domain of TCR clone 278587 (TRBV19, TRBJ2-1)
CASPTFVLSGEQFF

SEQ ID NO: 557175 - protein, 11 aa, Homo sapiens
  CDR3 for alpha chain variable domain of TCR clone 278588 (TRAV30, TRAJ23)
CGTEIAGKLIF

SEQ ID NO: 557176 - protein, 15 aa, Homo sapiens
  CDR3 for beta chain variable domain of TCR clone 278588 (TRBV11-2, TRBJ2-7)
CASSLVGGRGYEQYF

SEQ ID NO: 557177 - protein, 13 aa, Homo sapiens
  CDR3 for alpha chain variable domain of TCR clone 278589 (TRAV12-2, TRAJ52)
CAVSGTSYGKLTF

SEQ ID NO: 557178 - protein, 13 aa, Homo sapiens
  CDR3 for beta chain variable domain of TCR clone 278589 (TRBV10-3, TRBJ2-7)
CASKLSVNYEQYF

SEQ ID NO: 557179 - protein, 13 aa, Homo sapiens
  CDR3 for alpha chain variable domain of TCR clone 278590 (TRAV2, TRAJ40)
CAVVTSGTYKYIF

SEQ ID NO: 557180 - protein, 11 aa, Homo sapiens
  CDR3 for beta chain variable domain of TCR clone 278590 (TRBV23-1, TRBJ2-7)
SSSGTGREQYF

SEQ ID NO: 557181 - protein, 13 aa, Homo sapiens
  CDR3 for alpha chain variable domain of TCR clone 278591 (TRAV21, TRAJ9)
CAALNTGGFKTIF

SEQ ID NO: 557182 - protein, 15 aa, Homo sapiens
  CDR3 for beta chain variable domain of TCR clone 278591 (TRBV6-6, TRBJ1-1)
CASSYASGAGTEAFF

SEQ ID NO: 557183 - protein, 17 aa, Homo sapiens
  CDR3 for alpha chain variable domain of TCR clone 278592 (TRAV3, TRAJ42)
CAVRDRDYGGSQGNLIF

SEQ ID NO: 557184 - protein, 16 aa, Homo sapiens
  CDR3 for beta chain variable domain of TCR clone 278592 (TRBV7-2, TRBJ2-5)
CASSLESAGGRETQYF

SEQ ID NO: 557185 - protein, 15 aa, Homo sapiens
  CDR3 for alpha chain variable domain of TCR clone 278593 (TRAV8-3, TRAJ27)
CAVGPSKTNAGKSTF

SEQ ID NO: 557186 - protein, 14 aa, Homo sapiens
  CDR3 for beta chain variable domain of TCR clone 278593 (TRBV7-2, TRBJ2-1)
CQQLGLAGGNEQFF

SEQ ID NO: 557187 - protein, 12 aa, Homo sapiens
  CDR3 for alpha chain variable domain of TCR clone 278594 (TRAV24, TRAJ26)
CALDNYGQNFVF

SEQ ID NO: 557188 - protein, 15 aa, Homo sapiens
  CDR3 for beta chain variable domain of TCR clone 278594 (TRBV7-2, TRBJ1-1)
CASSFAGDRHTEAFF

SEQ ID NO: 557189 - protein, 15 aa, Homo sapiens
  CDR3 for alpha chain variable domain of TCR clone 278595 (TRAV1-1, TRAJ23)
CAVREGDNQGGKLIF

SEQ ID NO: 557190 - protein, 15 aa, Homo sapiens
  CDR3 for beta chain variable domain of TCR clone 278595 (TRBV18, TRBJ2-7)
CASSPSSTGNYEQYF

SEQ ID NO: 557191 - protein, 12 aa, Homo sapiens
  CDR3 for alpha chain variable domain of TCR clone 278596 (TRAV23/DV6, TRAJ24)
CAANDSWGKVQF

SEQ ID NO: 557192 - protein, 16 aa, Homo sapiens
  CDR3 for beta chain variable domain of TCR clone 278596 (TRBV12-4, TRBJ2-5)
CASSLSTSGGKETQYF

SEQ ID NO: 557193 - protein, 20 aa, Homo sapiens
  CDR3 for alpha chain variable domain of TCR clone 278597 (TRAV26-2, TRAJ43)
CCVLLHPETRALYNNNDMLF

SEQ ID NO: 557194 - protein, 18 aa, Homo sapiens
  CDR3 for beta chain variable domain of TCR clone 278597 (TRBV11-2, TRBJ2-3)
CASSLGGASRGAPNTQYF

SEQ ID NO: 557195 - protein, 15 aa, Homo sapiens
  CDR3 for alpha chain variable domain of TCR clone 278598 (TRAV27, TRAJ53)
CRAINSGGSNYKLTF

SEQ ID NO: 557196 - protein, 15 aa, Homo sapiens
  CDR3 for beta chain variable domain of TCR clone 278598 (TRBV6-1, TRBJ2-6)
CASSSRPSGANVLTF

SEQ ID NO: 557197 - protein, 12 aa, Homo sapiens
  CDR3 for alpha chain variable domain of TCR clone 278599 (TRAV12-1, TRAJ40)
CVVSSGTYKYIF

SEQ ID NO: 557198 - protein, 14 aa, Homo sapiens
  CDR3 for beta chain variable domain of TCR clone 278599 (TRBV20-1, TRBJ2-1)
CSAQIGGSANEQFF

SEQ ID NO: 557199 - protein, 18 aa, Homo sapiens
  CDR3 for alpha chain variable domain of TCR clone 278600 (TRAV8-4, TRAJ52)
CAVTRANAGGTSYGRLTF

SEQ ID NO: 557200 - protein, 14 aa, Homo sapiens
  CDR3 for beta chain variable domain of TCR clone 278600 (TRBV19, TRBJ2-7)
CASTVQGRPYEQYF

SEQ ID NO: 557201 - protein, 15 aa, Homo sapiens
  CDR3 for alpha chain variable domain of TCR clone 278601 (TRAV16, TRAJ48)
CSLLISNFGNEKLTF

SEQ ID NO: 557202 - protein, 15 aa, Homo sapiens
  CDR3 for beta chain variable domain of TCR clone 278601 (TRBV5-4, TRBJ2-7)
CASSRFGTGSYEQYF

SEQ ID NO: 557203 - protein, 11 aa, Homo sapiens
  CDR3 for alpha chain variable domain of TCR clone 278602 (TRAV17, TRAJ12)
CATTGSYKLIF

SEQ ID NO: 557204 - protein, 15 aa, Homo sapiens
  CDR3 for beta chain variable domain of TCR clone 278602 (TRBV28, TRBJ2-7)
CASSLISGGSYEQYF

SEQ ID NO: 557205 - protein, 15 aa, Homo sapiens
  CDR3 for alpha chain variable domain of TCR clone 278603 (TRAV12-2, TRAJ50)
CAVNGLETSYDKAIF

SEQ ID NO: 557206 - protein, 16 aa, Homo sapiens
  CDR3 for beta chain variable domain of TCR clone 278603 (TRBV7-9, TRBJ2-3)
CASSPWREVGTDTQYF

SEQ ID NO: 557207 - protein, 15 aa, Homo sapiens
  CDR3 for alpha chain variable domain of TCR clone 278604 (TRAV3, TRAJ29)
CAERAPLSGNTPLVL

SEQ ID NO: 557208 - protein, 15 aa, Homo sapiens
  CDR3 for beta chain variable domain of TCR clone 278604 (TRBV28, TRBJ1-1)
CASRIKGGLNTEAFF

SEQ ID NO: 557209 - protein, 14 aa, Homo sapiens
  CDR3 for alpha chain variable domain of TCR clone 278605 (TRAV1-2, TRAJ16)
CAVNRFSDGQKLLF

SEQ ID NO: 557210 - protein, 15 aa, Homo sapiens
  CDR3 for beta chain variable domain of TCR clone 278605 (TRBV9, TRBJ1-6)
CASGVAGTGDSPIHF

SEQ ID NO: 557211 - protein, 14 aa, Homo sapiens
  CDR3 for alpha chain variable domain of TCR clone 278606 (TRAV12-3, TRAJ13)
CAMRNSGGYQKVTF

SEQ ID NO: 557212 - protein, 16 aa, Homo sapiens
  CDR3 for beta chain variable domain of TCR clone 278606 (TRBV6-1, TRBJ2-5)
CASSETLDREAETQYF

SEQ ID NO: 557213 - protein, 12 aa, Homo sapiens
  CDR3 for alpha chain variable domain of TCR clone 278607 (TRAV13-2, TRAJ23)
CSERHRGGKLIF

SEQ ID NO: 557214 - protein, 14 aa, Homo sapiens
  CDR3 for beta chain variable domain of TCR clone 278607 (TRBV5-1, TRBJ1-2)
CASSPQGANYGYTF

SEQ ID NO: 557215 - protein, 15 aa, Homo sapiens
  CDR3 for alpha chain variable domain of TCR clone 278608 (TRAV12-3, TRAJ13)
CAMSARSGGYQKVTF

SEQ ID NO: 557216 - protein, 14 aa, Homo sapiens
  CDR3 for beta chain variable domain of TCR clone 278608 (TRBV12-4, TRBJ1-1)
CASSPIRRTGEAFF

SEQ ID NO: 557217 - protein, 17 aa, Homo sapiens
  CDR3 for alpha chain variable domain of TCR clone 278609 (TRAV3, TRAJ42)
CAVRDRDYGGSQGNLIF

SEQ ID NO: 557218 - protein, 14 aa, Homo sapiens
  CDR3 for beta chain variable domain of TCR clone 278609 (TRBV7-6, TRBJ2-4)
CASSPAPGSFLWYF

SEQ ID NO: 557219 - protein, 14 aa, Homo sapiens
  CDR3 for alpha chain variable domain of TCR clone 278610 (TRAV29/DV5, TRAJ36)
CAARRKTGANNLFI

SEQ ID NO: 557220 - protein, 14 aa, Homo sapiens
  CDR3 for beta chain variable domain of TCR clone 278610 (TRBV12-5, TRBJ2-5)
CASGSRTHQETQYF

SEQ ID NO: 557221 - protein, 14 aa, Homo sapiens
  CDR3 for alpha chain variable domain of TCR clone 278611 (TRAV26-1, TRAJ38)
CIADNAGNNRKLIW

SEQ ID NO: 557222 - protein, 13 aa, Homo sapiens
  CDR3 for beta chain variable domain of TCR clone 278611 (TRBV20-1, TRBJ1-1)
CSARCGGNTEAFL

SEQ ID NO: 557223 - protein, 15 aa, Homo sapiens
  CDR3 for alpha chain variable domain of TCR clone 278612 (TRAV3, TRAJ36)
CAVRASQTGANNLFF

SEQ ID NO: 557224 - protein, 15 aa, Homo sapiens
  CDR3 for beta chain variable domain of TCR clone 278612 (TRBV3-1, TRBJ2-1)
CARSQDYTPRGEQFF

SEQ ID NO: 557225 - protein, 13 aa, Homo sapiens
  CDR3 for alpha chain variable domain of TCR clone 278613 (TRAV3, TRAJ36)
CAVRDTGANNLCF

SEQ ID NO: 557226 - protein, 15 aa, Homo sapiens
  CDR3 for beta chain variable domain of TCR clone 278613 (TRBV24-1, TRBJ2-1)
CATSGSGGFYNEQFF

SEQ ID NO: 557227 - protein, 13 aa, Homo sapiens
  CDR3 for alpha chain variable domain of TCR clone 278614 (TRAV25, )
CADIQNPDPAVYQ

SEQ ID NO: 557228 - protein, 16 aa, Homo sapiens
  CDR3 for beta chain variable domain of TCR clone 278614 (TRBV5-1, TRBJ2-2)
CASSLWDTTNTGELFF

SEQ ID NO: 557229 - protein, 13 aa, Homo sapiens
  CDR3 for alpha chain variable domain of TCR clone 278615 (TRAV34, TRAJ33)
CGADMNSNYQLIC

SEQ ID NO: 557230 - protein, 16 aa, Homo sapiens
  CDR3 for beta chain variable domain of TCR clone 278615 (TRBV20-1, TRBJ2-1)
CSASLAGGPGYNEQLF

SEQ ID NO: 557231 - protein, 14 aa, Homo sapiens
  CDR3 for alpha chain variable domain of TCR clone 278616 (TRAV29/DV5, TRAJ48)
CAAMALFGNDKLTF

SEQ ID NO: 557232 - protein, 15 aa, Homo sapiens
  CDR3 for beta chain variable domain of TCR clone 278616 (TRBV7-2, TRBJ2-1)
CASTHGTGIYNEQFF

SEQ ID NO: 557233 - protein, 13 aa, Homo sapiens
  CDR3 for alpha chain variable domain of TCR clone 278617 (TRAV30, TRAJ6)
CGFIGGGSYIPTF

SEQ ID NO: 557234 - protein, 16 aa, Homo sapiens
  CDR3 for beta chain variable domain of TCR clone 278617 (TRBV7-6, TRBJ2-3)
CASSARTSRGTDTQYF

SEQ ID NO: 557235 - protein, 14 aa, Homo sapiens
  CDR3 for alpha chain variable domain of TCR clone 278618 (TRAV9-2, TRAJ39)
CALYIYNAGNMLTF

SEQ ID NO: 557236 - protein, 15 aa, Homo sapiens
  CDR3 for beta chain variable domain of TCR clone 278618 (TRBV5-1, TRBJ2-3)
CDSSVTSGSTDTQYF

SEQ ID NO: 557237 - protein, 17 aa, Homo sapiens
  CDR3 for alpha chain variable domain of TCR clone 278619 (TRAV26-1, TRAJ37)
CIVRVITVSSNTGKLIF

SEQ ID NO: 557238 - protein, 14 aa, Homo sapiens
  CDR3 for beta chain variable domain of TCR clone 278619 (TRBV19, TRBJ2-1)
CASPTVVLSGEQFF

SEQ ID NO: 557239 - protein, 15 aa, Homo sapiens
  CDR3 for alpha chain variable domain of TCR clone 278620 (TRAV8-2, TRAJ40)
CVVSARGSGTYKYIF

SEQ ID NO: 557240 - protein, 17 aa, Homo sapiens
  CDR3 for beta chain variable domain of TCR clone 278620 (TRBV9, TRBJ2-1)
CASSVRSLSGGNNEQFF

SEQ ID NO: 557241 - protein, 21 aa, Homo sapiens
  CDR3 for alpha chain variable domain of TCR clone 278621 (TRAV34, TRAJ44)
PAMQASTSVEHGTGTASKLTF

SEQ ID NO: 557242 - protein, 15 aa, Homo sapiens
  CDR3 for beta chain variable domain of TCR clone 278621 (TRBV5-1, TRBJ2-1)
CASSPPRAPYNEQFF

SEQ ID NO: 557243 - protein, 13 aa, Homo sapiens
  CDR3 for alpha chain variable domain of TCR clone 278622 (TRAV35, TRAJ37)
CAGSSGNTGKIIF

SEQ ID NO: 557244 - protein, 16 aa, Homo sapiens
  CDR3 for beta chain variable domain of TCR clone 278622 (TRBV10-3, TRBJ2-1)
CAVSLTSGNSYNEQFF

SEQ ID NO: 557245 - protein, 15 aa, Homo sapiens
  CDR3 for alpha chain variable domain of TCR clone 278623 (TRAV29/DV5, TRAJ8)
CAASGRNTGFQTLVF

SEQ ID NO: 557246 - protein, 13 aa, Homo sapiens
  CDR3 for beta chain variable domain of TCR clone 278623 (TRBV2, TRBJ2-3)
CASIIPASDTQYF

SEQ ID NO: 557247 - protein, 13 aa, Homo sapiens
  CDR3 for alpha chain variable domain of TCR clone 278624 (TRAV13-1, TRAJ43)
CAARKNNNNDMRF

SEQ ID NO: 557248 - protein, 17 aa, Homo sapiens
  CDR3 for beta chain variable domain of TCR clone 278624 (TRBV27, TRBJ2-6)
CASSLTGFASGANVLSF

SEQ ID NO: 557249 - protein, 15 aa, Homo sapiens
  CDR3 for alpha chain variable domain of TCR clone 278625 (TRAV3, TRAJ47)
CAVRDRGKYGNKLVF

SEQ ID NO: 557250 - protein, 14 aa, Homo sapiens
  CDR3 for beta chain variable domain of TCR clone 278625 (TRBV13, TRBJ2-5)
CASSLERVGETQYF

SEQ ID NO: 557251 - protein, 11 aa, Homo sapiens
  CDR3 for alpha chain variable domain of TCR clone 278626 (TRAV13-1, TRAJ43)
CAAHNNNDMRF

SEQ ID NO: 557252 - protein, 13 aa, Homo sapiens
  CDR3 for beta chain variable domain of TCR clone 278626 (TRBV7-9, TRBJ1-2)
CASSLKQNYGYTF

SEQ ID NO: 557253 - protein, 13 aa, Homo sapiens
  CDR3 for alpha chain variable domain of TCR clone 278627 (TRAV13-2, TRAJ48)
CAAMDFGNEKLTF

SEQ ID NO: 557254 - protein, 13 aa, Homo sapiens
  CDR3 for beta chain variable domain of TCR clone 278627 (TRBV7-9, TRBJ1-2)
CASSLKQNYGYTF

SEQ ID NO: 557255 - protein, 14 aa, Homo sapiens
  CDR3 for alpha chain variable domain of TCR clone 278628 (TRAV9-2, TRAJ39)
CALYIYNEGNMLTF

SEQ ID NO: 557256 - protein, 13 aa, Homo sapiens
  CDR3 for beta chain variable domain of TCR clone 278628 (TRBV24-1, TRBJ2-2)
CATSDWSTGELFF

SEQ ID NO: 557257 - protein, 11 aa, Homo sapiens
  CDR3 for alpha chain variable domain of TCR clone 278629 (TRAV12-1, TRAJ15)
FVVNAGTALIF

SEQ ID NO: 557258 - protein, 16 aa, Homo sapiens
  CDR3 for beta chain variable domain of TCR clone 278629 (TRBV28, TRBJ2-1)
CASSSRVRDSYNEQFF

SEQ ID NO: 557259 - protein, 18 aa, Homo sapiens
  CDR3 for alpha chain variable domain of TCR clone 278630 (TRAV21, TRAJ52)
CAVRPSPAGGNSYGKLTF

SEQ ID NO: 557260 - protein, 17 aa, Homo sapiens
  CDR3 for beta chain variable domain of TCR clone 278630 (TRBV25-1, TRBJ2-1)
CASSAYGQGRGVYEQFF

SEQ ID NO: 557261 - protein, 11 aa, Homo sapiens
  CDR3 for alpha chain variable domain of TCR clone 278631 (TRAV12-2, TRAJ29)
CAVTLRSPLVF

SEQ ID NO: 557262 - protein, 16 aa, Homo sapiens
  CDR3 for beta chain variable domain of TCR clone 278631 (TRBV29-1, TRBJ2-2)
CSVETRASGNIGELFF

SEQ ID NO: 557263 - protein, 13 aa, Homo sapiens
  CDR3 for alpha chain variable domain of TCR clone 278632 (TRAV2, TRAJ40)
CAVVTSGTYKYIF

SEQ ID NO: 557264 - protein, 14 aa, Homo sapiens
  CDR3 for beta chain variable domain of TCR clone 278632 (TRBV2, TRBJ2-2)
CASSQPGLAGGEHR

SEQ ID NO: 557265 - protein, 12 aa, Homo sapiens
  CDR3 for alpha chain variable domain of TCR clone 278633 (TRAV21, TRAJ11)
CAVRGGNSTLTF

SEQ ID NO: 557266 - protein, 15 aa, Homo sapiens
  CDR3 for beta chain variable domain of TCR clone 278633 (TRBV6-1, TRBJ2-7)
CASSEPIAATTEHYF

SEQ ID NO: 557267 - protein, 12 aa, Homo sapiens
  CDR3 for alpha chain variable domain of TCR clone 278634 (TRAV13-1, TRAJ15)
CAASQAGTALIF

SEQ ID NO: 557268 - protein, 16 aa, Homo sapiens
  CDR3 for beta chain variable domain of TCR clone 278634 (TRBV7-3, TRBJ2-2)
CASSLKRGTLSGELFF

SEQ ID NO: 557269 - protein, 14 aa, Homo sapiens
  CDR3 for alpha chain variable domain of TCR clone 278635 (TRAV26-1, TRAJ34)
CIVRVAYNTDKLIF

SEQ ID NO: 557270 - protein, 13 aa, Homo sapiens
  CDR3 for beta chain variable domain of TCR clone 278635 (TRBV2, TRBJ2-7)
CASSEGGQFEQYF

SEQ ID NO: 557271 - protein, 11 aa, Homo sapiens
  CDR3 for alpha chain variable domain of TCR clone 278636 (TRAV12-1, TRAJ43)
CVEYDNNEMRF

SEQ ID NO: 557272 - protein, 15 aa, Homo sapiens
  CDR3 for beta chain variable domain of TCR clone 278636 (TRBV18, TRBJ2-5)
CASSPRASEAENQYF

SEQ ID NO: 557273 - protein, 10 aa, Homo sapiens
  CDR3 for alpha chain variable domain of TCR clone 278637 (TRAV13-1, TRAJ41)
CAASGPQRTQ

SEQ ID NO: 557274 - protein, 16 aa, Homo sapiens
  CDR3 for beta chain variable domain of TCR clone 278637 (TRBV18, TRBJ2-3)
CASSPPAGGPRKYAVF

SEQ ID NO: 557275 - protein, 15 aa, Homo sapiens
  CDR3 for alpha chain variable domain of TCR clone 278638 (TRAV8-3, TRAJ27)
CAVGPSKTNAGKSTF

SEQ ID NO: 557276 - protein, 13 aa, Homo sapiens
  CDR3 for beta chain variable domain of TCR clone 278638 (TRBV4-1, TRBJ2-1)
CASSQEVQYEQFF

SEQ ID NO: 557277 - protein, 11 aa, Homo sapiens
  CDR3 for alpha chain variable domain of TCR clone 278639 (TRAV38-1, TRAJ35)
CAFMSLARLWE

SEQ ID NO: 557278 - protein, 13 aa, Homo sapiens
  CDR3 for beta chain variable domain of TCR clone 278639 (TRBV4-1, TRBJ2-5)
CASSQEVQETQYF

SEQ ID NO: 557279 - protein, 18 aa, Homo sapiens
  CDR3 for alpha chain variable domain of TCR clone 278640 (TRAV21, TRAJ52)
CAVRPSPAGGTSYGKLTF

SEQ ID NO: 557280 - protein, 13 aa, Homo sapiens
  CDR3 for beta chain variable domain of TCR clone 278640 (TRBV20-1, TRBJ1-2)
CSASTERIYGYTF

SEQ ID NO: 557281 - protein, 13 aa, Homo sapiens
  CDR3 for alpha chain variable domain of TCR clone 278641 (TRAV12-3, TRAJ53)
CAMRGGSNYKLTL

SEQ ID NO: 557282 - protein, 13 aa, Homo sapiens
  CDR3 for beta chain variable domain of TCR clone 278641 (TRBV18, TRBJ2-5)
CASSLQGQETQYF

SEQ ID NO: 557283 - protein, 15 aa, Homo sapiens
  CDR3 for alpha chain variable domain of TCR clone 278642 (TRAV8-3, TRAJ23)
CAGGDRYNQGGKLIF

SEQ ID NO: 557284 - protein, 15 aa, Homo sapiens
  CDR3 for beta chain variable domain of TCR clone 278642 (TRBV12-4, TRBJ2-5)
CASSPPTGLQETQYF

SEQ ID NO: 557285 - protein, 15 aa, Homo sapiens
  CDR3 for alpha chain variable domain of TCR clone 278643 (TRAV12-2, TRAJ50)
CAVNGLETSYDKMIF

SEQ ID NO: 557286 - protein, 16 aa, Homo sapiens
  CDR3 for beta chain variable domain of TCR clone 278643 (TRBV5-4, TRBJ2-3)
CASQQPGAGGADTQYF

SEQ ID NO: 557287 - protein, 15 aa, Homo sapiens
  CDR3 for alpha chain variable domain of TCR clone 278644 (TRAV17, TRAJ57)
CATGPSQGGSEKLVF

SEQ ID NO: 557288 - protein, 16 aa, Homo sapiens
  CDR3 for beta chain variable domain of TCR clone 278644 (TRBV4-1, TRBJ2-7)
CASSQEWTSGPLEQYF

SEQ ID NO: 557289 - protein, 14 aa, Homo sapiens
  CDR3 for alpha chain variable domain of TCR clone 278645 (TRAV12-2, TRAJ40)
CAMKIPSGTYKYIF

SEQ ID NO: 557290 - protein, 17 aa, Homo sapiens
  CDR3 for beta chain variable domain of TCR clone 278645 (TRBV7-8, TRBJ2-6)
CASSAGTGGAGANVLTF

SEQ ID NO: 557291 - protein, 11 aa, Homo sapiens
  CDR3 for alpha chain variable domain of TCR clone 278646 (TRAV21, TRAJ48)
CAVDGNEKLTF

SEQ ID NO: 557292 - protein, 15 aa, Homo sapiens
  CDR3 for beta chain variable domain of TCR clone 278646 (TRBV12-4, TRBJ1-5)
CQQFRSRGSNQPQHF

SEQ ID NO: 557293 - protein, 14 aa, Homo sapiens
  CDR3 for alpha chain variable domain of TCR clone 278647 (TRAV1-2, TRAJ8)
CAVREDTGFQKFVF

SEQ ID NO: 557294 - protein, 11 aa, Homo sapiens
  CDR3 for beta chain variable domain of TCR clone 278647 (TRBV29-1, TRBJ1-4)
CSVSSGEKLFF

SEQ ID NO: 557295 - protein, 14 aa, Homo sapiens
  CDR3 for alpha chain variable domain of TCR clone 278648 (TRAV2, TRAJ9)
CAVEDRSGGFKTIS

SEQ ID NO: 557296 - protein, 17 aa, Homo sapiens
  CDR3 for beta chain variable domain of TCR clone 278648 (TRBV24-1, TRBJ2-3)
CATSDLPSGEDTDTQYF

SEQ ID NO: 557297 - protein, 15 aa, Homo sapiens
  CDR3 for alpha chain variable domain of TCR clone 278649 (TRAV1-2, TRAJ13)
CAVRGSSGGYQKVTF

SEQ ID NO: 557298 - protein, 16 aa, Homo sapiens
  CDR3 for beta chain variable domain of TCR clone 278649 (TRBV6-6, TRBJ1-5)
CASSYSTLVGNQPQHF

SEQ ID NO: 557299 - protein, 13 aa, Homo sapiens
  CDR3 for alpha chain variable domain of TCR clone 278650 (TRAV30, TRAJ6)
CGFIEAGSYIPTF

SEQ ID NO: 557300 - protein, 13 aa, Homo sapiens
  CDR3 for beta chain variable domain of TCR clone 278650 (TRBV5-4, TRBJ2-5)
CASSPVSQETQYF

SEQ ID NO: 557301 - protein, 11 aa, Homo sapiens
  CDR3 for alpha chain variable domain of TCR clone 278651 (TRAV27, TRAJ45)
CAGAQEEVLTD

SEQ ID NO: 557302 - protein, 13 aa, Homo sapiens
  CDR3 for beta chain variable domain of TCR clone 278651 (TRBV20-1, TRBJ1-1)
CSAGTVGNTEAFF

SEQ ID NO: 557303 - protein, 16 aa, Homo sapiens
  CDR3 for alpha chain variable domain of TCR clone 278652 (TRAV12-2, TRAJ45)
CAVIFLSGGGADGLTF

SEQ ID NO: 557304 - protein, 19 aa, Homo sapiens
  CDR3 for beta chain variable domain of TCR clone 278652 (TRBV28, TRBJ2-4)
CASSFQPGGPAHSKNNQYF

SEQ ID NO: 557305 - protein, 14 aa, Homo sapiens
  CDR3 for alpha chain variable domain of TCR clone 278653 (TRAV4, TRAJ30)
CLVGDMNRDDKIIC

SEQ ID NO: 557306 - protein, 16 aa, Homo sapiens
  CDR3 for beta chain variable domain of TCR clone 278653 (TRBV20-1, TRBJ1-4)
CSAPGQGLLTNEKLFF

SEQ ID NO: 557307 - protein, 15 aa, Homo sapiens
  CDR3 for alpha chain variable domain of TCR clone 278654 (TRAV26-1, TRAJ29)
CIVRVEGSGNTPLVC

SEQ ID NO: 557308 - protein, 15 aa, Homo sapiens
  CDR3 for beta chain variable domain of TCR clone 278654 (TRBV12-4, TRBJ1-1)
CQQQDRVVANTEAFF

SEQ ID NO: 557309 - protein, 10 aa, Homo sapiens
  CDR3 for alpha chain variable domain of TCR clone 278655 (TRAV21, TRAJ13)
CAGGYQKVTF

SEQ ID NO: 557310 - protein, 13 aa, Homo sapiens
  CDR3 for beta chain variable domain of TCR clone 278655 (TRBV4-1, TRBJ2-2)
CASSQENTGELFF

SEQ ID NO: 557311 - protein, 15 aa, Homo sapiens
  CDR3 for alpha chain variable domain of TCR clone 278656 (TRAV3, TRAJ39)
CAVRDRYNAGNMLTF

SEQ ID NO: 557312 - protein, 18 aa, Homo sapiens
  CDR3 for beta chain variable domain of TCR clone 278656 (TRBV4-3, TRBJ2-1)
CASSQDLASGTAYSEQFF

SEQ ID NO: 557313 - protein, 15 aa, Homo sapiens
  CDR3 for alpha chain variable domain of TCR clone 278657 (TRAV21, TRAJ57)
CAVIITHGGSEKLVF

SEQ ID NO: 557314 - protein, 14 aa, Homo sapiens
  CDR3 for beta chain variable domain of TCR clone 278657 (TRBV5-1, TRBJ2-2)
CASSLIWIPGELFF

SEQ ID NO: 557315 - protein, 14 aa, Homo sapiens
  CDR3 for alpha chain variable domain of TCR clone 278658 (TRAV1-1, TRAJ27)
CAVIYNANAGKSTF

SEQ ID NO: 557316 - protein, 18 aa, Homo sapiens
  CDR3 for beta chain variable domain of TCR clone 278658 (TRBV7-3, TRBJ2-1)
CASSLTLASGRAMVSSSS

SEQ ID NO: 557317 - protein, 13 aa, Homo sapiens
  CDR3 for alpha chain variable domain of TCR clone 278659 (TRAV8-6, TRAJ49)
CAVITNTGNQFYF

SEQ ID NO: 557318 - protein, 14 aa, Homo sapiens
  CDR3 for beta chain variable domain of TCR clone 278659 (TRBV7-2, TRBJ2-5)
CASSLAPDQETQYF

SEQ ID NO: 557319 - protein, 13 aa, Homo sapiens
  CDR3 for alpha chain variable domain of TCR clone 278660 (TRAV35, TRAJ49)
CAGRLNTGNQFYF

SEQ ID NO: 557320 - protein, 12 aa, Homo sapiens
  CDR3 for beta chain variable domain of TCR clone 278660 (TRBV12-4, TRBJ1-3)
CASSFSGNTIYF

SEQ ID NO: 557321 - protein, 16 aa, Homo sapiens
  CDR3 for alpha chain variable domain of TCR clone 278661 (TRAV8-1, TRAJ48)
CAVTLISHFGNEKLTF

SEQ ID NO: 557322 - protein, 12 aa, Homo sapiens
  CDR3 for beta chain variable domain of TCR clone 278661 (TRBV20-1, TRBJ1-2)
CSAPGFNYGYTF

SEQ ID NO: 557323 - protein, 14 aa, Homo sapiens
  CDR3 for alpha chain variable domain of TCR clone 278662 (TRAV8-3, TRAJ31)
CAVGRGLNNARLIF

SEQ ID NO: 557324 - protein, 15 aa, Homo sapiens
  CDR3 for beta chain variable domain of TCR clone 278662 (TRBV7-2, TRBJ2-2)
CASSLAGGLTGELFF

SEQ ID NO: 557325 - protein, 17 aa, Homo sapiens
  CDR3 for alpha chain variable domain of TCR clone 278663 (TRAV1-2, TRAJ6)
CAVRDTTRTGGSYIPTF

SEQ ID NO: 557326 - protein, 12 aa, Homo sapiens
  CDR3 for beta chain variable domain of TCR clone 278663 (TRBV7-3, TRBJ2-5)
CASSSPGGTQYF

SEQ ID NO: 557327 - protein, 14 aa, Homo sapiens
  CDR3 for alpha chain variable domain of TCR clone 278664 (TRAV1-2, TRAJ16)
CAVNRFSDGQKLLF

SEQ ID NO: 557328 - protein, 17 aa, Homo sapiens
  CDR3 for beta chain variable domain of TCR clone 278664 (TRBV7-9, TRBJ1-6)
CAAAPRDVEIHPSTLGT

SEQ ID NO: 557329 - protein, 14 aa, Homo sapiens
  CDR3 for alpha chain variable domain of TCR clone 278665 (TRAV9-2, TRAJ39)
CALYIYNAGNMLTF

SEQ ID NO: 557330 - protein, 13 aa, Homo sapiens
  CDR3 for beta chain variable domain of TCR clone 278665 (TRBV11-2, TRBJ2-7)
CASSGTRPYEQYF

SEQ ID NO: 557331 - protein, 10 aa, Homo sapiens
  CDR3 for alpha chain variable domain of TCR clone 278666 (TRAV12-2, TRAJ52)
RSTSYGKLTF

SEQ ID NO: 557332 - protein, 11 aa, Homo sapiens
  CDR3 for beta chain variable domain of TCR clone 278666 (TRBV11-2, TRBJ2-2)
CASSLTGELFF

SEQ ID NO: 557333 - protein, 13 aa, Homo sapiens
  CDR3 for alpha chain variable domain of TCR clone 278667 (TRAV17, TRAJ40)
CAVALGGTYKYIF

SEQ ID NO: 557334 - protein, 16 aa, Homo sapiens
  CDR3 for beta chain variable domain of TCR clone 278667 (TRBV11-2, TRBJ1-2)
CASSLDTGGADYGYTF

SEQ ID NO: 557335 - protein, 16 aa, Homo sapiens
  CDR3 for alpha chain variable domain of TCR clone 278668 (TRAV8-4, TRAJ18)
CAVTANGGSTLGRLYF

SEQ ID NO: 557336 - protein, 14 aa, Homo sapiens
  CDR3 for beta chain variable domain of TCR clone 278668 (TRBV12-4, TRBJ1-2)
CASSSAGHIYGYTF

SEQ ID NO: 557337 - protein, 14 aa, Homo sapiens
  CDR3 for alpha chain variable domain of TCR clone 278669 (TRAV13-2, TRAJ17)
CAENSKSAGNKLTF

SEQ ID NO: 557338 - protein, 15 aa, Homo sapiens
  CDR3 for beta chain variable domain of TCR clone 278669 (TRBV27, TRBJ2-1)
CASSNGGGSSNEQFF

SEQ ID NO: 557339 - protein, 14 aa, Homo sapiens
  CDR3 for alpha chain variable domain of TCR clone 278670 (TRAV12-1, TRAJ17)
CVVNYKAAGDKLTF

SEQ ID NO: 557340 - protein, 16 aa, Homo sapiens
  CDR3 for beta chain variable domain of TCR clone 278670 (TRBV12-4, TRBJ1-5)
CASSRPVGGSNQPQHF

SEQ ID NO: 557341 - protein, 14 aa, Homo sapiens
  CDR3 for alpha chain variable domain of TCR clone 278671 (TRAV1-2, TRAJ8)
CAVREDTGFQKLVF

SEQ ID NO: 557342 - protein, 14 aa, Homo sapiens
  CDR3 for beta chain variable domain of TCR clone 278671 (TRBV7-2, TRBJ2-1)
CASIQNSGYNEQFF

SEQ ID NO: 557343 - protein, 11 aa, Homo sapiens
  CDR3 for alpha chain variable domain of TCR clone 278672 (TRAV1-2, TRAJ40)
CAVPGTYKYIF

SEQ ID NO: 557344 - protein, 16 aa, Homo sapiens
  CDR3 for beta chain variable domain of TCR clone 278672 (TRBV29-1, TRBJ2-7)
CSVEVVETSGSYEQYF

SEQ ID NO: 557345 - protein, 23 aa, Homo sapiens
  CDR3 for alpha chain variable domain of TCR clone 278673 (TRAV26-1, )
CIADKAGNNHIQNPDPTVYQLRD

SEQ ID NO: 557346 - protein, 13 aa, Homo sapiens
  CDR3 for beta chain variable domain of TCR clone 278673 (TRBV20-1, TRBJ1-1)
CSARGGGNTEAFF

SEQ ID NO: 557347 - protein, 15 aa, Homo sapiens
  CDR3 for alpha chain variable domain of TCR clone 278674 (TRAV21, TRAJ17)
CAVDEQKAAGNKLTF

SEQ ID NO: 557348 - protein, 17 aa, Homo sapiens
  CDR3 for beta chain variable domain of TCR clone 278674 (TRBV4-1, TRBJ2-5)
CASSQDLTGGPIETQYF

SEQ ID NO: 557349 - protein, 14 aa, Homo sapiens
  CDR3 for alpha chain variable domain of TCR clone 278675 (TRAV12-3, TRAJ35)
CAMSLIGFGNVLHC

SEQ ID NO: 557350 - protein, 16 aa, Homo sapiens
  CDR3 for beta chain variable domain of TCR clone 278675 (TRBV7-6, TRBJ2-7)
CQQLSSASGNSYEQYF

SEQ ID NO: 557351 - protein, 13 aa, Homo sapiens
  CDR3 for alpha chain variable domain of TCR clone 278676 (TRAV35, TRAJ22)
CAGLSGSARQLTF

SEQ ID NO: 557352 - protein, 17 aa, Homo sapiens
  CDR3 for beta chain variable domain of TCR clone 278676 (TRBV25-1, TRBJ2-1)
CASSAYGQGRGVYEQFF

SEQ ID NO: 557353 - protein, 13 aa, Homo sapiens
  CDR3 for alpha chain variable domain of TCR clone 278677 (TRAV17, TRAJ9)
SATDYTGGFKTIF

SEQ ID NO: 557354 - protein, 16 aa, Homo sapiens
  CDR3 for beta chain variable domain of TCR clone 278677 (TRBV7-7, TRBJ2-1)
CASSLASGTSYNEQFF

SEQ ID NO: 557355 - protein, 13 aa, Homo sapiens
  CDR3 for alpha chain variable domain of TCR clone 278678 (TRAV22, TRAJ50)
CAVMKTSYDKVIF

SEQ ID NO: 557356 - protein, 15 aa, Homo sapiens
  CDR3 for beta chain variable domain of TCR clone 278678 (TRBV19, TRBJ2-4)
CASRGPRRGENIQYF

SEQ ID NO: 557357 - protein, 12 aa, Homo sapiens
  CDR3 for alpha chain variable domain of TCR clone 278679 (TRAV17, TRAJ12)
CATLHSSYKLIF

SEQ ID NO: 557358 - protein, 16 aa, Homo sapiens
  CDR3 for beta chain variable domain of TCR clone 278679 (TRBV28, TRBJ2-7)
CASSLFVETGGPEQYF

SEQ ID NO: 557359 - protein, 15 aa, Homo sapiens
  CDR3 for alpha chain variable domain of TCR clone 278680 (TRAV12-3, TRAJ6)
CAMSATTGGSYIPTL

SEQ ID NO: 557360 - protein, 13 aa, Homo sapiens
  CDR3 for beta chain variable domain of TCR clone 278680 (TRBV12-4, TRBJ2-1)
CASSLSPSNEQFF

SEQ ID NO: 557361 - protein, 15 aa, Homo sapiens
  CDR3 for alpha chain variable domain of TCR clone 278681 (TRAV13-1, TRAJ5)
CAASKADTCRRALTF

SEQ ID NO: 557362 - protein, 16 aa, Homo sapiens
  CDR3 for beta chain variable domain of TCR clone 278681 (TRBV7-2, TRBJ2-1)
CASSLGRTSGDNEQFF

SEQ ID NO: 557363 - protein, 15 aa, Homo sapiens
  CDR3 for alpha chain variable domain of TCR clone 278682 (TRAV26-1, TRAJ29)
CIVRVEGSGKIPLVF

SEQ ID NO: 557364 - protein, 14 aa, Homo sapiens
  CDR3 for beta chain variable domain of TCR clone 278682 (TRBV18, TRBJ2-5)
CASSPGVSQETQYF

SEQ ID NO: 557365 - protein, 13 aa, Homo sapiens
  CDR3 for alpha chain variable domain of TCR clone 278683 (TRAV12-2, TRAJ3)
CAFQYTSASKIIF

SEQ ID NO: 557366 - protein, 11 aa, Homo sapiens
  CDR3 for beta chain variable domain of TCR clone 278683 (TRBV20-1, TRBJ2-3)
CSGTSSTTQYF

SEQ ID NO: 557367 - protein, 11 aa, Homo sapiens
  CDR3 for alpha chain variable domain of TCR clone 278684 (TRAV1-2, TRAJ20)
CAVANDYKLSF

SEQ ID NO: 557368 - protein, 13 aa, Homo sapiens
  CDR3 for beta chain variable domain of TCR clone 278684 (TRBV4-3, TRBJ1-1)
CSSSQAGNTEAFF

SEQ ID NO: 557369 - protein, 15 aa, Homo sapiens
  CDR3 for alpha chain variable domain of TCR clone 278685 (TRAV21, TRAJ53)
CATLNSGGSNYKLTF

SEQ ID NO: 557370 - protein, 14 aa, Homo sapiens
  CDR3 for beta chain variable domain of TCR clone 278685 (TRBV7-2, TRBJ1-3)
CASSRLRSGNTIYF

SEQ ID NO: 557371 - protein, 11 aa, Homo sapiens
  CDR3 for alpha chain variable domain of TCR clone 278686 (TRAV35, TRAJ30)
CAGERDDKIIF

SEQ ID NO: 557372 - protein, 13 aa, Homo sapiens
  CDR3 for beta chain variable domain of TCR clone 278686 (TRBV27, TRBJ2-1)
CASRTLGVGEQFF

SEQ ID NO: 557373 - protein, 14 aa, Homo sapiens
  CDR3 for alpha chain variable domain of TCR clone 278687 (TRAV8-1, TRAJ24)
CAVNAADSWGKLQF

SEQ ID NO: 557374 - protein, 16 aa, Homo sapiens
  CDR3 for beta chain variable domain of TCR clone 278687 (TRBV4-3, TRBJ2-1)
CSSSPALDRGVNEQLF

SEQ ID NO: 557375 - protein, 15 aa, Homo sapiens
  CDR3 for alpha chain variable domain of TCR clone 278688 (TRAV27, TRAJ38)
CAARRNAGNNRKLIW

SEQ ID NO: 557376 - protein, 13 aa, Homo sapiens
  CDR3 for beta chain variable domain of TCR clone 278688 (TRBV12-5, TRBJ2-3)
CASGERQSDTQYL

SEQ ID NO: 557377 - protein, 13 aa, Homo sapiens
  CDR3 for alpha chain variable domain of TCR clone 278689 (TRAV17, TRAJ9)
CSTDYTGGFKTIF

SEQ ID NO: 557378 - protein, 13 aa, Homo sapiens
  CDR3 for beta chain variable domain of TCR clone 278689 (TRBV7-9, TRBJ1-2)
CASSLKQNYGYTF

SEQ ID NO: 557379 - protein, 13 aa, Homo sapiens
  CDR3 for alpha chain variable domain of TCR clone 278690 (TRAV8-3, TRAJ28)
CPVGAVGSYQLTF

SEQ ID NO: 557380 - protein, 15 aa, Homo sapiens
  CDR3 for beta chain variable domain of TCR clone 278690 (TRBV7-9, TRBJ1-5)
CASSQGHQPNQPQHF

SEQ ID NO: 557381 - protein, 15 aa, Homo sapiens
  CDR3 for alpha chain variable domain of TCR clone 278691 (TRAV21, TRAJ38)
CPVRQDAGNNRKLIW

SEQ ID NO: 557382 - protein, 16 aa, Homo sapiens
  CDR3 for beta chain variable domain of TCR clone 278691 (TRBV4-2, TRBJ1-1)
CASRPLDGGGDTEAFF

SEQ ID NO: 557383 - protein, 15 aa, Homo sapiens
  CDR3 for alpha chain variable domain of TCR clone 278692 (TRAV16, TRAJ4)
CALEAPSGGYNKLIF

SEQ ID NO: 557384 - protein, 12 aa, Homo sapiens
  CDR3 for beta chain variable domain of TCR clone 278692 (TRBV7-3, TRBJ2-7)
CQQPSRGYEQYF

SEQ ID NO: 557385 - protein, 12 aa, Homo sapiens
  CDR3 for alpha chain variable domain of TCR clone 278693 (TRAV21, TRAJ31)
CVLAGNNARLMF

SEQ ID NO: 557386 - protein, 14 aa, Homo sapiens
  CDR3 for beta chain variable domain of TCR clone 278693 (TRBV19, TRBJ2-7)
CASSMGQGAIEQYF

SEQ ID NO: 557387 - protein, 16 aa, Homo sapiens
  CDR3 for alpha chain variable domain of TCR clone 278694 (TRAV26-1, TRAJ37)
CIVRGDGSGNTGKLIF

SEQ ID NO: 557388 - protein, 13 aa, Homo sapiens
  CDR3 for beta chain variable domain of TCR clone 278694 (TRBV19, TRBJ2-1)
CASSMYRVNEQFF

SEQ ID NO: 557389 - protein, 12 aa, Homo sapiens
  CDR3 for alpha chain variable domain of TCR clone 278695 (TRAV8-3, TRAJ20)
CAVGANDYKLSF

SEQ ID NO: 557390 - protein, 13 aa, Homo sapiens
  CDR3 for beta chain variable domain of TCR clone 278695 (TRBV7-2, TRBJ2-4)
CASSLAEGGIQYF

SEQ ID NO: 557391 - protein, 12 aa, Homo sapiens
  CDR3 for alpha chain variable domain of TCR clone 278696 (TRAV27, TRAJ41)
CAGRISGYALNF

SEQ ID NO: 557392 - protein, 15 aa, Homo sapiens
  CDR3 for beta chain variable domain of TCR clone 278696 (TRBV20-1, TRBJ1-5)
CSATSDRGLGQPQHF

SEQ ID NO: 557393 - protein, 13 aa, Homo sapiens
  CDR3 for alpha chain variable domain of TCR clone 278697 (TRAV17, TRAJ15)
CATDARAGTAMIF

SEQ ID NO: 557394 - protein, 15 aa, Homo sapiens
  CDR3 for beta chain variable domain of TCR clone 278697 (TRBV20-1, TRBJ2-7)
CSARDRVSGMDEQYF

SEQ ID NO: 557395 - protein, 19 aa, Homo sapiens
  CDR3 for alpha chain variable domain of TCR clone 278698 (TRAV17, TRAJ17)
CATDGRPGVIKAAGNKLTF

SEQ ID NO: 557396 - protein, 13 aa, Homo sapiens
  CDR3 for beta chain variable domain of TCR clone 278698 (TRBV12-5, TRBJ2-3)
CASGDRQSDTQYF

SEQ ID NO: 557397 - protein, 14 aa, Homo sapiens
  CDR3 for alpha chain variable domain of TCR clone 278699 (TRAV8-2, TRAJ4)
CVVSPSGGYNKLIF

SEQ ID NO: 557398 - protein, 15 aa, Homo sapiens
  CDR3 for beta chain variable domain of TCR clone 278699 (TRBV11-3, TRBJ2-3)
CASLKDGREGDTQYF

SEQ ID NO: 557399 - protein, 13 aa, Homo sapiens
  CDR3 for alpha chain variable domain of TCR clone 278700 (TRAV12-3, TRAJ13)
CAMSSGGYQKVTF

SEQ ID NO: 557400 - protein, 14 aa, Homo sapiens
  CDR3 for beta chain variable domain of TCR clone 278700 (TRBV2, TRBJ2-1)
CASRTGSSYNEQFY

SEQ ID NO: 557401 - protein, 12 aa, Homo sapiens
  CDR3 for alpha chain variable domain of TCR clone 278701 (TRAV2, TRAJ9)
CAVGAGGFKTIF

SEQ ID NO: 557402 - protein, 15 aa, Homo sapiens
  CDR3 for beta chain variable domain of TCR clone 278701 (TRBV5-1, TRBJ1-5)
CASSLSGNSNQPQHF

SEQ ID NO: 557403 - protein, 21 aa, Homo sapiens
  CDR3 for alpha chain variable domain of TCR clone 278702 (TRAV20, )
CAVTGANNIQNPDPAVYQLRD

SEQ ID NO: 557404 - protein, 13 aa, Homo sapiens
  CDR3 for beta chain variable domain of TCR clone 278702 (TRBV20-1, TRBJ1-1)
CSARGGGNTEAFF

SEQ ID NO: 557405 - protein, 16 aa, Homo sapiens
  CDR3 for alpha chain variable domain of TCR clone 278703 (TRAV26-1, TRAJ23)
CIVRVERYNQGGKLIF

SEQ ID NO: 557406 - protein, 15 aa, Homo sapiens
  CDR3 for beta chain variable domain of TCR clone 278703 (TRBV18, TRBJ2-7)
CASSPRGGKGYKQYF

SEQ ID NO: 557407 - protein, 12 aa, Homo sapiens
  CDR3 for alpha chain variable domain of TCR clone 278704 (TRAV12-1, TRAJ29)
CVADSGNTPLVF

SEQ ID NO: 557408 - protein, 11 aa, Homo sapiens
  CDR3 for beta chain variable domain of TCR clone 278704 (TRBV2, TRBJ2-7)
CQQKRSYEQYF

SEQ ID NO: 557409 - protein, 14 aa, Homo sapiens
  CDR3 for alpha chain variable domain of TCR clone 278705 (TRAV12-3, TRAJ9)
CAMSPKTGGFKTIF

SEQ ID NO: 557410 - protein, 12 aa, Homo sapiens
  CDR3 for beta chain variable domain of TCR clone 278705 (TRBV19, TRBJ1-5)
CASSIAQQPQHF

SEQ ID NO: 557411 - protein, 15 aa, Homo sapiens
  CDR3 for alpha chain variable domain of TCR clone 278706 (TRAV25, TRAJ53)
CPTSNSGGSNYKLTF

SEQ ID NO: 557412 - protein, 16 aa, Homo sapiens
  CDR3 for beta chain variable domain of TCR clone 278706 (TRBV11-2, TRBJ2-1)
CASSDVAGGSYNEQFF

SEQ ID NO: 557413 - protein, 12 aa, Homo sapiens
  CDR3 for alpha chain variable domain of TCR clone 278707 (TRAV12-3, TRAJ17)
CAMTLTGNKLNF

SEQ ID NO: 557414 - protein, 15 aa, Homo sapiens
  CDR3 for beta chain variable domain of TCR clone 278707 (TRBV11-2, TRBJ2-2)
CASSSDRVNAGELFF

SEQ ID NO: 557415 - protein, 14 aa, Homo sapiens
  CDR3 for alpha chain variable domain of TCR clone 278708 (TRAV8-4, TRAJ13)
CAVTLSGGYQKVTF

SEQ ID NO: 557416 - protein, 14 aa, Homo sapiens
  CDR3 for beta chain variable domain of TCR clone 278708 (TRBV12-4, TRBJ2-3)
CASSGQGSTDTQYF

SEQ ID NO: 557417 - protein, 10 aa, Homo sapiens
  CDR3 for alpha chain variable domain of TCR clone 278709 (TRAV26-1, TRAJ22)
CIAGSRQLTF

SEQ ID NO: 557418 - protein, 18 aa, Homo sapiens
  CDR3 for beta chain variable domain of TCR clone 278709 (TRBV25-1, TRBJ1-2)
CASSGLQNGQGLIFGYTF

SEQ ID NO: 557419 - protein, 12 aa, Homo sapiens
  CDR3 for alpha chain variable domain of TCR clone 278710 (TRAV25, TRAJ29)
CAGHSGNTPHVF

SEQ ID NO: 557420 - protein, 14 aa, Homo sapiens
  CDR3 for beta chain variable domain of TCR clone 278710 (TRBV6-1, TRBJ2-7)
CASTRTWDYYEQYF

SEQ ID NO: 557421 - protein, 17 aa, Homo sapiens
  CDR3 for alpha chain variable domain of TCR clone 278711 (TRAV26-2, TRAJ42)
CILRDVGDGGSQGNLIF

SEQ ID NO: 557422 - protein, 16 aa, Homo sapiens
  CDR3 for beta chain variable domain of TCR clone 278711 (TRBV12-4, TRBJ2-7)
CSSSWIGGTGTYEQYF

SEQ ID NO: 557423 - protein, 14 aa, Homo sapiens
  CDR3 for alpha chain variable domain of TCR clone 278712 (TRAV1-2, TRAJ16)
CAVNRFSDCHKLLF

SEQ ID NO: 557424 - protein, 15 aa, Homo sapiens
  CDR3 for beta chain variable domain of TCR clone 278712 (TRBV20-1, TRBJ2-7)
CSARDRVSGMDEQYF

SEQ ID NO: 557425 - protein, 13 aa, Homo sapiens
  CDR3 for alpha chain variable domain of TCR clone 278713 (TRAV8-4, TRAJ36)
RAVSDSGANNLFF

SEQ ID NO: 557426 - protein, 11 aa, Homo sapiens
  CDR3 for beta chain variable domain of TCR clone 278713 (TRBV29-1, TRBJ1-1)
CSVEVNVITFF

SEQ ID NO: 557427 - protein, 20 aa, Homo sapiens
  CDR3 for alpha chain variable domain of TCR clone 278714 (TRAV26-1, TRAJ42)
CCVLLHRQTYYGGSQGNLIF

SEQ ID NO: 557428 - protein, 15 aa, Homo sapiens
  CDR3 for beta chain variable domain of TCR clone 278714 (TRBV19, TRBJ2-1)
CASSSPGVPLDEQFF

SEQ ID NO: 557429 - protein, 15 aa, Homo sapiens
  CDR3 for alpha chain variable domain of TCR clone 278715 (TRAV13-2, TRAJ5)
CAENPHWTGRRALTF

SEQ ID NO: 557430 - protein, 16 aa, Homo sapiens
  CDR3 for beta chain variable domain of TCR clone 278715 (TRBV7-9, TRBJ1-3)
CASSETSGLRMGTIYF

SEQ ID NO: 557431 - protein, 11 aa, Homo sapiens
  CDR3 for alpha chain variable domain of TCR clone 278716 (TRAV3, TRAJ21)
CAVGNFNKFYF

SEQ ID NO: 557432 - protein, 11 aa, Homo sapiens
  CDR3 for beta chain variable domain of TCR clone 278716 (TRBV19, TRBJ1-2)
CASSISSGYSF

SEQ ID NO: 557433 - protein, 14 aa, Homo sapiens
  CDR3 for alpha chain variable domain of TCR clone 278717 (TRAV2, TRAJ23)
CAVGLRNQGGKLIF

SEQ ID NO: 557434 - protein, 13 aa, Homo sapiens
  CDR3 for beta chain variable domain of TCR clone 278717 (TRBV7-2, TRBJ2-2)
CASSLAVTGELFF

SEQ ID NO: 557435 - protein, 13 aa, Homo sapiens
  CDR3 for alpha chain variable domain of TCR clone 278718 (TRAV8-3, TRAJ48)
CAVVPFGNEKLTF

SEQ ID NO: 557436 - protein, 15 aa, Homo sapiens
  CDR3 for beta chain variable domain of TCR clone 278718 (TRBV11-2, TRBJ2-1)
CASSSPATRYNKQFF

SEQ ID NO: 557437 - protein, 13 aa, Homo sapiens
  CDR3 for alpha chain variable domain of TCR clone 278719 (TRAV8-3, TRAJ43)
CAVCPDNNNDMRF

SEQ ID NO: 557438 - protein, 14 aa, Homo sapiens
  CDR3 for beta chain variable domain of TCR clone 278719 (TRBV19, TRBJ2-1)
CASPTFVLSGGQFF

SEQ ID NO: 557439 - protein, 17 aa, Homo sapiens
  CDR3 for alpha chain variable domain of TCR clone 278720 (TRAV13-2, TRAJ28)
CAEEPAGSGAGSYQLTF

SEQ ID NO: 557440 - protein, 14 aa, Homo sapiens
  CDR3 for beta chain variable domain of TCR clone 278720 (TRBV2, TRBJ2-1)
CASRTGRSYNEQFF

SEQ ID NO: 557441 - protein, 12 aa, Homo sapiens
  CDR3 for alpha chain variable domain of TCR clone 278721 (TRAV25, TRAJ11)
CAGASGYSTLTF

SEQ ID NO: 557442 - protein, 14 aa, Homo sapiens
  CDR3 for beta chain variable domain of TCR clone 278721 (TRBV12-4, TRBJ1-1)
CASTWTGHDTEAFF

SEQ ID NO: 557443 - protein, 15 aa, Homo sapiens
  CDR3 for alpha chain variable domain of TCR clone 278722 (TRAV12-2, TRAJ53)
CAANGGGGSNYKLTF

SEQ ID NO: 557444 - protein, 17 aa, Homo sapiens
  CDR3 for beta chain variable domain of TCR clone 278722 (TRBV7-3, TRBJ2-3)
CASSLMKRMRGADTQYF

SEQ ID NO: 557445 - protein, 16 aa, Homo sapiens
  CDR3 for alpha chain variable domain of TCR clone 278723 (TRAV3, TRAJ10)
CAVRDMRAGGGNKLTF

SEQ ID NO: 557446 - protein, 15 aa, Homo sapiens
  CDR3 for beta chain variable domain of TCR clone 278723 (TRBV19, TRBJ2-1)
CASSIGLAGWDEQFF

SEQ ID NO: 557447 - protein, 12 aa, Homo sapiens
  CDR3 for alpha chain variable domain of TCR clone 278724 (TRAV12-3, TRAJ40)
CAMTSGTYKYIF

SEQ ID NO: 557448 - protein, 17 aa, Homo sapiens
  CDR3 for beta chain variable domain of TCR clone 278724 (TRBV7-8, TRBJ2-6)
CASSAGTGGAGANDLTF

SEQ ID NO: 557449 - protein, 18 aa, Homo sapiens
  CDR3 for alpha chain variable domain of TCR clone 278725 (TRAV13-1, TRAJ52)
CAARKRSAGGTSYGTLTF

SEQ ID NO: 557450 - protein, 13 aa, Homo sapiens
  CDR3 for beta chain variable domain of TCR clone 278725 (TRBV12-4, TRBJ1-2)
CASSLRQGNGYTF

SEQ ID NO: 557451 - protein, 17 aa, Homo sapiens
  CDR3 for alpha chain variable domain of TCR clone 278726 (TRAV13-1, TRAJ31)
CAPRDRLMFGDGTQLVV

SEQ ID NO: 557452 - protein, 16 aa, Homo sapiens
  CDR3 for beta chain variable domain of TCR clone 278726 (TRBV28, TRBJ2-6)
CASSNRRGSGANVLTF

SEQ ID NO: 557453 - protein, 15 aa, Homo sapiens
  CDR3 for alpha chain variable domain of TCR clone 278727 (TRAV30, TRAJ32)
CGTEILGGATNKLIF

SEQ ID NO: 557454 - protein, 15 aa, Homo sapiens
  CDR3 for beta chain variable domain of TCR clone 278727 (TRBV7-3, TRBJ2-1)
CASSLGQGPFGEQFF

SEQ ID NO: 557455 - protein, 14 aa, Homo sapiens
  CDR3 for alpha chain variable domain of TCR clone 278728 (TRAV26-1, TRAJ38)
CIADNAGNNRKLIW

SEQ ID NO: 557456 - protein, 13 aa, Homo sapiens
  CDR3 for beta chain variable domain of TCR clone 278728 (TRBV7-9, TRBJ1-2)
CASSLKQNYGYSF

SEQ ID NO: 557457 - protein, 16 aa, Homo sapiens
  CDR3 for alpha chain variable domain of TCR clone 278729 (TRAV8-3, TRAJ52)
CAVQPAGGTSYGKLTF

SEQ ID NO: 557458 - protein, 13 aa, Homo sapiens
  CDR3 for beta chain variable domain of TCR clone 278729 (TRBV7-7, TRBJ1-1)
CASSLGANTEAFF

SEQ ID NO: 557459 - protein, 23 aa, Homo sapiens
  CDR3 for alpha chain variable domain of TCR clone 278730 (TRAV26-1, TRAJ38)
CIADNAGNNHIQSPDPAVYQLRD

SEQ ID NO: 557460 - protein, 17 aa, Homo sapiens
  CDR3 for beta chain variable domain of TCR clone 278730 (TRBV11-2, TRBJ2-6)
CASSQRDIFSGANVLTF

SEQ ID NO: 557461 - protein, 13 aa, Homo sapiens
  CDR3 for alpha chain variable domain of TCR clone 278731 (TRAV1-2, TRAJ31)
CAVRPNNNARLMF

SEQ ID NO: 557462 - protein, 14 aa, Homo sapiens
  CDR3 for beta chain variable domain of TCR clone 278731 (TRBV11-2, TRBJ2-1)
CASSLSVPYNEQFF

SEQ ID NO: 557463 - protein, 16 aa, Homo sapiens
  CDR3 for alpha chain variable domain of TCR clone 278732 (TRAV16, TRAJ52)
CALSAAGGTSDGKLTF

SEQ ID NO: 557464 - protein, 16 aa, Homo sapiens
  CDR3 for beta chain variable domain of TCR clone 278732 (TRBV12-4, TRBJ1-5)
CASSRPVGGSNQPQHF

SEQ ID NO: 557465 - protein, 12 aa, Homo sapiens
  CDR3 for alpha chain variable domain of TCR clone 278733 (TRAV12-3, TRAJ17)
CAMTLTGNKLTF

SEQ ID NO: 557466 - protein, 13 aa, Homo sapiens
  CDR3 for beta chain variable domain of TCR clone 278733 (TRBV2, TRBJ1-2)
CASRETRSDGYTF

SEQ ID NO: 557467 - protein, 13 aa, Homo sapiens
  CDR3 for alpha chain variable domain of TCR clone 278734 (TRAV8-4, TRAJ9)
CAVSETGGFKPIF

SEQ ID NO: 557468 - protein, 14 aa, Homo sapiens
  CDR3 for beta chain variable domain of TCR clone 278734 (TRBV18, TRBJ2-3)
CASSGLADTDTQYF

SEQ ID NO: 557469 - protein, 14 aa, Homo sapiens
  CDR3 for alpha chain variable domain of TCR clone 278735 (TRAV1-2, TRAJ8)
CAVREDTGLQKLVF

SEQ ID NO: 557470 - protein, 16 aa, Homo sapiens
  CDR3 for beta chain variable domain of TCR clone 278735 (TRBV5-5, TRBJ1-2)
CASSPTWGRGLYGYTF

SEQ ID NO: 557471 - protein, 13 aa, Homo sapiens
  CDR3 for alpha chain variable domain of TCR clone 278736 (TRAV16, TRAJ22)
SAMLAGSARQLTF

SEQ ID NO: 557472 - protein, 18 aa, Homo sapiens
  CDR3 for beta chain variable domain of TCR clone 278736 (TRBV7-2, TRBJ2-3)
CASSLETSRGRKADSQYF

SEQ ID NO: 557473 - protein, 13 aa, Homo sapiens
  CDR3 for alpha chain variable domain of TCR clone 278737 (TRAV27, TRAJ42)
CAGARGSQGNLIF

SEQ ID NO: 557474 - protein, 14 aa, Homo sapiens
  CDR3 for beta chain variable domain of TCR clone 278737 (TRBV5-7, TRBJ2-7)
CASSSGQVTYEQYF

SEQ ID NO: 557475 - protein, 22 aa, Homo sapiens
  CDR3 for alpha chain variable domain of TCR clone 278738 (TRAV34, TRAJ52)
STSVEQTRRSNAGGTSYGKLTF

SEQ ID NO: 557476 - protein, 15 aa, Homo sapiens
  CDR3 for beta chain variable domain of TCR clone 278738 (TRBV10-1, TRBJ2-3)
CASSATSGGFDTQYF

SEQ ID NO: 557477 - protein, 14 aa, Homo sapiens
  CDR3 for alpha chain variable domain of TCR clone 278739 (TRAV12-2, TRAJ13)
CAVKKTGGYQKVTF

SEQ ID NO: 557478 - protein, 19 aa, Homo sapiens
  CDR3 for beta chain variable domain of TCR clone 278739 (TRBV12-4, TRBJ2-7)
CASSPRSLRTSGRGHEQYF

SEQ ID NO: 557479 - protein, 12 aa, Homo sapiens
  CDR3 for alpha chain variable domain of TCR clone 278740 (TRAV36/DV7, TRAJ50)
CAVEPENLLRQG

SEQ ID NO: 557480 - protein, 15 aa, Homo sapiens
  CDR3 for beta chain variable domain of TCR clone 278740 (TRBV4-3, TRBJ2-7)
CASSQDLGSSYEQYF

SEQ ID NO: 557481 - protein, 15 aa, Homo sapiens
  CDR3 for alpha chain variable domain of TCR clone 278741 (TRAV8-3, TRAJ23)
CAVGDRYNQGGKIIF

SEQ ID NO: 557482 - protein, 17 aa, Homo sapiens
  CDR3 for beta chain variable domain of TCR clone 278741 (TRBV4-1, TRBJ1-4)
CASSQEGPRGVEEKLSF

SEQ ID NO: 557483 - protein, 13 aa, Homo sapiens
  CDR3 for alpha chain variable domain of TCR clone 278742 (TRAV8-3, TRAJ36)
CAVVATGANNLFF

SEQ ID NO: 557484 - protein, 15 aa, Homo sapiens
  CDR3 for beta chain variable domain of TCR clone 278742 (TRBV5-1, TRBJ2-3)
CASSVTSGSTDTQYF

SEQ ID NO: 557485 - protein, 16 aa, Homo sapiens
  CDR3 for alpha chain variable domain of TCR clone 278743 (TRAV3, TRAJ21)
CAVRDIERGNLNKFYF

SEQ ID NO: 557486 - protein, 13 aa, Homo sapiens
  CDR3 for beta chain variable domain of TCR clone 278743 (TRBV12-5, TRBJ2-3)
CASGDRQSDTQYF

SEQ ID NO: 557487 - protein, 13 aa, Homo sapiens
  CDR3 for alpha chain variable domain of TCR clone 278744 (TRAV38-1, TRAJ42)
CARWGGSQGNLIF

SEQ ID NO: 557488 - protein, 15 aa, Homo sapiens
  CDR3 for beta chain variable domain of TCR clone 278744 (TRBV19, TRBJ1-6)
CASSTQGAVGSPLHF

SEQ ID NO: 557489 - protein, 11 aa, Homo sapiens
  CDR3 for alpha chain variable domain of TCR clone 278745 (TRAV12-3, TRAJ43)
CAMSVSNDMRF

SEQ ID NO: 557490 - protein, 13 aa, Homo sapiens
  CDR3 for beta chain variable domain of TCR clone 278745 (TRBV27, TRBJ2-1)
CASSSGSYNEQFF

SEQ ID NO: 557491 - protein, 12 aa, Homo sapiens
  CDR3 for alpha chain variable domain of TCR clone 278746 (TRAV2, TRAJ9)
CAVGAGGFKTIF

SEQ ID NO: 557492 - protein, 14 aa, Homo sapiens
  CDR3 for beta chain variable domain of TCR clone 278746 (TRBV13, TRBJ2-7)
CASSLKGASYEQYF

SEQ ID NO: 557493 - protein, 15 aa, Homo sapiens
  CDR3 for alpha chain variable domain of TCR clone 278747 (TRAV3, TRAJ23)
CAVRDRCNQGGKLIF

SEQ ID NO: 557494 - protein, 15 aa, Homo sapiens
  CDR3 for beta chain variable domain of TCR clone 278747 (TRBV7-3, TRBJ2-1)
CQQLAPSGSYNEQFF

SEQ ID NO: 557495 - protein, 13 aa, Homo sapiens
  CDR3 for alpha chain variable domain of TCR clone 278748 (TRAV27, TRAJ41)
CAGEGNSGYALNF

SEQ ID NO: 557496 - protein, 15 aa, Homo sapiens
  CDR3 for beta chain variable domain of TCR clone 278748 (TRBV7-3, TRBJ2-2)
CASSETGQGTGELFF

SEQ ID NO: 557497 - protein, 15 aa, Homo sapiens
  CDR3 for alpha chain variable domain of TCR clone 278749 (TRAV38-1, TRAJ57)
CAFMKHQGGSEKLVF

SEQ ID NO: 557498 - protein, 13 aa, Homo sapiens
  CDR3 for beta chain variable domain of TCR clone 278749 (TRBV24-1, TRBJ2-2)
CATSDWSTGELFF

SEQ ID NO: 557499 - protein, 14 aa, Homo sapiens
  CDR3 for alpha chain variable domain of TCR clone 278750 (TRAV23/DV6, TRAJ23)
CAAGPYNQGGKLIF

SEQ ID NO: 557500 - protein, 13 aa, Homo sapiens
  CDR3 for beta chain variable domain of TCR clone 278750 (TRBV4-1, TRBJ2-1)
CASSQAGGDEQFF

SEQ ID NO: 557501 - protein, 12 aa, Homo sapiens
  CDR3 for alpha chain variable domain of TCR clone 278751 (TRAV16, TRAJ10)
CSRTGGGNKLNF

SEQ ID NO: 557502 - protein, 14 aa, Homo sapiens
  CDR3 for beta chain variable domain of TCR clone 278751 (TRBV19, TRBJ2-1)
CASSRLASINEQFF

SEQ ID NO: 557503 - protein, 11 aa, Homo sapiens
  CDR3 for alpha chain variable domain of TCR clone 278752 (TRAV2, TRAJ13)
CASGGYQKVTF

SEQ ID NO: 557504 - protein, 15 aa, Homo sapiens
  CDR3 for beta chain variable domain of TCR clone 278752 (TRBV7-9, TRBJ1-6)
CASSSPGRGNPPLHF

SEQ ID NO: 557505 - protein, 14 aa, Homo sapiens
  CDR3 for alpha chain variable domain of TCR clone 278753 (TRAV8-6, TRAJ5)
CAVSVDTGRRALPF

SEQ ID NO: 557506 - protein, 11 aa, Homo sapiens
  CDR3 for beta chain variable domain of TCR clone 278753 (TRBV7-3, TRBJ2-5)
CASSLSETQYF

SEQ ID NO: 557507 - protein, 12 aa, Homo sapiens
  CDR3 for alpha chain variable domain of TCR clone 278754 (TRAV27, TRAJ9)
CAGESGGFKTIF

SEQ ID NO: 557508 - protein, 17 aa, Homo sapiens
  CDR3 for beta chain variable domain of TCR clone 278754 (TRBV28, TRBJ2-1)
CASSFIPGGSSYNEQFF

SEQ ID NO: 557509 - protein, 12 aa, Homo sapiens
  CDR3 for alpha chain variable domain of TCR clone 278755 (TRAV12-2, TRAJ10)
WGVTGGGNKLTF

SEQ ID NO: 557510 - protein, 16 aa, Homo sapiens
  CDR3 for beta chain variable domain of TCR clone 278755 (TRBV12-4, TRBJ2-7)
CASSLIGGTGTYEQYF

SEQ ID NO: 557511 - protein, 12 aa, Homo sapiens
  CDR3 for alpha chain variable domain of TCR clone 278756 (TRAV20, TRAJ13)
CCVKRGYKKVTF

SEQ ID NO: 557512 - protein, 13 aa, Homo sapiens
  CDR3 for beta chain variable domain of TCR clone 278756 (TRBV12-5, TRBJ2-1)
CASGLGRGNEQFF

SEQ ID NO: 557513 - protein, 15 aa, Homo sapiens
  CDR3 for alpha chain variable domain of TCR clone 278757 (TRAV27, TRAJ38)
CAARRNAGNNRKLIL

SEQ ID NO: 557514 - protein, 13 aa, Homo sapiens
  CDR3 for beta chain variable domain of TCR clone 278757 (TRBV20-1, TRBJ1-1)
CSARAGGNTEAFF

SEQ ID NO: 557515 - protein, 17 aa, Homo sapiens
  CDR3 for alpha chain variable domain of TCR clone 278758 (TRAV36/DV7, TRAJ52)
CAVAQRAGGTSYGKLTF

SEQ ID NO: 557516 - protein, 13 aa, Homo sapiens
  CDR3 for beta chain variable domain of TCR clone 278758 (TRBV7-2, TRBJ2-2)
CASSLAVTGELFF

SEQ ID NO: 557517 - protein, 15 aa, Homo sapiens
  CDR3 for alpha chain variable domain of TCR clone 278759 (TRAV26-1, TRAJ29)
CIVRVEGSGNTPLVF

SEQ ID NO: 557518 - protein, 14 aa, Homo sapiens
  CDR3 for beta chain variable domain of TCR clone 278759 (TRBV7-9, TRBJ1-5)
CQQPSHQPNQPQHF

SEQ ID NO: 557519 - protein, 13 aa, Homo sapiens
  CDR3 for alpha chain variable domain of TCR clone 278760 (TRAV27, TRAJ45)
CGGSGGGADGLTF

SEQ ID NO: 557520 - protein, 17 aa, Homo sapiens
  CDR3 for beta chain variable domain of TCR clone 278760 (TRBV11-2, TRBJ2-1)
CASSLYPPGVEYNEQFF

SEQ ID NO: 557521 - protein, 20 aa, Homo sapiens
  CDR3 for alpha chain variable domain of TCR clone 278761 (TRAV1-1, TRAJ4)
CLLLLRCEGFLSAGYNKLIF

SEQ ID NO: 557522 - protein, 16 aa, Homo sapiens
  CDR3 for beta chain variable domain of TCR clone 278761 (TRBV28, TRBJ1-4)
CASSPPYRGRSEKLFF

SEQ ID NO: 557523 - protein, 13 aa, Homo sapiens
  CDR3 for alpha chain variable domain of TCR clone 278762 (TRAV17, TRAJ26)
CATVDNYGQNFVF

SEQ ID NO: 557524 - protein, 16 aa, Homo sapiens
  CDR3 for beta chain variable domain of TCR clone 278762 (TRBV19, TRBJ2-1)
CASSIWGQGARNEQFF

SEQ ID NO: 557525 - protein, 10 aa, Homo sapiens
  CDR3 for alpha chain variable domain of TCR clone 278763 (TRAV8-4, TRAJ43)
CAVSADDMRF

SEQ ID NO: 557526 - protein, 15 aa, Homo sapiens
  CDR3 for beta chain variable domain of TCR clone 278763 (TRBV5-1, TRBJ2-3)
CASSVTSGSADTQYF

SEQ ID NO: 557527 - protein, 16 aa, Homo sapiens
  CDR3 for alpha chain variable domain of TCR clone 278764 (TRAV30, TRAJ24)
CGTEIVDADSWGKFQF

SEQ ID NO: 557528 - protein, 13 aa, Homo sapiens
  CDR3 for beta chain variable domain of TCR clone 278764 (TRBV13, TRBJ2-7)
CASSQGVSYEQYF

SEQ ID NO: 557529 - protein, 13 aa, Homo sapiens
  CDR3 for alpha chain variable domain of TCR clone 278765 (TRAV12-2, TRAJ20)
CAVNRLDDYKLSF

SEQ ID NO: 557530 - protein, 12 aa, Homo sapiens
  CDR3 for beta chain variable domain of TCR clone 278765 (TRBV28, TRBJ2-3)
CASILYRDTQYF

SEQ ID NO: 557531 - protein, 14 aa, Homo sapiens
  CDR3 for alpha chain variable domain of TCR clone 278766 (TRAV26-1, TRAJ38)
CIADNAGNNRKLIG

SEQ ID NO: 557532 - protein, 13 aa, Homo sapiens
  CDR3 for beta chain variable domain of TCR clone 278766 (TRBV20-1, TRBJ1-1)
CSASGGGNTEAFF

SEQ ID NO: 557533 - protein, 12 aa, Homo sapiens
  CDR3 for alpha chain variable domain of TCR clone 278767 (TRAV12-3, TRAJ17)
WAMTLTGNKLTY

SEQ ID NO: 557534 - protein, 15 aa, Homo sapiens
  CDR3 for beta chain variable domain of TCR clone 278767 (TRBV20-1, TRBJ2-7)
CSARDRVSGMDEQYF

SEQ ID NO: 557535 - protein, 14 aa, Homo sapiens
  CDR3 for alpha chain variable domain of TCR clone 278768 (TRAV17, TRAJ12)
CAFLPMDSSYKLIF

SEQ ID NO: 557536 - protein, 11 aa, Homo sapiens
  CDR3 for beta chain variable domain of TCR clone 278768 (TRBV19, TRBJ1-1)
CASSIGSEAFF

SEQ ID NO: 557537 - protein, 13 aa, Homo sapiens
  CDR3 for alpha chain variable domain of TCR clone 278769 (TRAV13-1, TRAJ21)
CAASIYNINKFYF

SEQ ID NO: 557538 - protein, 13 aa, Homo sapiens
  CDR3 for beta chain variable domain of TCR clone 278769 (TRBV27, TRBJ1-4)
CASSLMGDEKLFF

SEQ ID NO: 557539 - protein, 15 aa, Homo sapiens
  CDR3 for alpha chain variable domain of TCR clone 278770 (TRAV3, TRAJ3)
CAVRDRDSSVSKIIF

SEQ ID NO: 557540 - protein, 18 aa, Homo sapiens
  CDR3 for beta chain variable domain of TCR clone 278770 (TRBV25-1, TRBJ1-2)
CASSGLQSGQGLIFGYTF

SEQ ID NO: 557541 - protein, 16 aa, Homo sapiens
  CDR3 for alpha chain variable domain of TCR clone 278771 (TRAV30, TRAJ24)
CGTEIVDADSWGKCQF

SEQ ID NO: 557542 - protein, 14 aa, Homo sapiens
  CDR3 for beta chain variable domain of TCR clone 278771 (TRBV4-1, TRBJ2-2)
CASSQAVNTGELFF

SEQ ID NO: 557543 - protein, 14 aa, Homo sapiens
  CDR3 for alpha chain variable domain of TCR clone 278772 (TRAV23/DV6, TRAJ27)
CATSRDTNAGKSTF

SEQ ID NO: 557544 - protein, 13 aa, Homo sapiens
  CDR3 for beta chain variable domain of TCR clone 278772 (TRBV20-1, TRBJ1-5)
CSASGRGNQPQHF

SEQ ID NO: 557545 - protein, 16 aa, Homo sapiens
  CDR3 for alpha chain variable domain of TCR clone 278773 (TRAV12-2, TRAJ45)
CAVIFLSGGGADGLTF

SEQ ID NO: 557546 - protein, 15 aa, Homo sapiens
  CDR3 for beta chain variable domain of TCR clone 278773 (TRBV19, TRBJ2-7)
CASSPAGSGEALRYF

SEQ ID NO: 557547 - protein, 14 aa, Homo sapiens
  CDR3 for alpha chain variable domain of TCR clone 278774 (TRAV17, TRAJ39)
CATDPVRAGNMLTF

SEQ ID NO: 557548 - protein, 14 aa, Homo sapiens
  CDR3 for beta chain variable domain of TCR clone 278774 (TRBV13, TRBJ1-5)
CQQLRTGGVQTQHF

SEQ ID NO: 557549 - protein, 11 aa, Homo sapiens
  CDR3 for alpha chain variable domain of TCR clone 278775 (TRAV10, TRAJ20)
CVVSYVKRLQA

SEQ ID NO: 557550 - protein, 17 aa, Homo sapiens
  CDR3 for beta chain variable domain of TCR clone 278775 (TRBV20-1, TRBJ2-1)
CSAPPRLAGTRYNEQFF

SEQ ID NO: 557551 - protein, 13 aa, Homo sapiens
  CDR3 for alpha chain variable domain of TCR clone 278776 (TRAV27, TRAJ6)
CAGGARGSYIPTF

SEQ ID NO: 557552 - protein, 14 aa, Homo sapiens
  CDR3 for beta chain variable domain of TCR clone 278776 (TRBV20-1, TRBJ2-4)
CSASGRVGENIQYF

SEQ ID NO: 557553 - protein, 16 aa, Homo sapiens
  CDR3 for alpha chain variable domain of TCR clone 278777 (TRAV26-1, TRAJ45)
CIVEKYSGGGADGLTF

SEQ ID NO: 557554 - protein, 15 aa, Homo sapiens
  CDR3 for beta chain variable domain of TCR clone 278777 (TRBV15, TRBJ2-7)
CHQQRPIRQAYEQYF

SEQ ID NO: 557555 - protein, 11 aa, Homo sapiens
  CDR3 for alpha chain variable domain of TCR clone 278778 (TRAV13-1, TRAJ49)
CACVGGNQFYF

SEQ ID NO: 557556 - protein, 16 aa, Homo sapiens
  CDR3 for beta chain variable domain of TCR clone 278778 (TRBV11-2, TRBJ2-2)
FASSLRTGNLIGELFF

SEQ ID NO: 557557 - protein, 15 aa, Homo sapiens
  CDR3 for alpha chain variable domain of TCR clone 278779 (TRAV5, TRAJ33)
CAEAPAMDSNYQLIW

SEQ ID NO: 557558 - protein, 12 aa, Homo sapiens
  CDR3 for beta chain variable domain of TCR clone 278779 (TRBV6-3, TRBJ2-7)
CASSPTPYEQYF

SEQ ID NO: 557559 - protein, 16 aa, Homo sapiens
  CDR3 for alpha chain variable domain of TCR clone 278780 (TRAV26-1, TRAJ40)
CIVRGHPTSGTYKYIF

SEQ ID NO: 557560 - protein, 16 aa, Homo sapiens
  CDR3 for beta chain variable domain of TCR clone 278780 (TRBV5-1, TRBJ1-4)
CASSSGQGGEKLFLAV

SEQ ID NO: 557561 - protein, 14 aa, Homo sapiens
  CDR3 for alpha chain variable domain of TCR clone 278781 (TRAV26-1, TRAJ38)
CIADNAGNNRKLIW

SEQ ID NO: 557562 - protein, 14 aa, Homo sapiens
  CDR3 for beta chain variable domain of TCR clone 278781 (TRBV4-3, TRBJ2-2)
CASSQGHVTGELFF

SEQ ID NO: 557563 - protein, 11 aa, Homo sapiens
  CDR3 for alpha chain variable domain of TCR clone 278782 (TRAV3, TRAJ21)
CAVGNFNTFCF

SEQ ID NO: 557564 - protein, 13 aa, Homo sapiens
  CDR3 for beta chain variable domain of TCR clone 278782 (TRBV20-1, TRBJ2-5)
CSARGDYQETQYF

SEQ ID NO: 557565 - protein, 13 aa, Homo sapiens
  CDR3 for alpha chain variable domain of TCR clone 278783 (TRAV36/DV7, TRAJ49)
CAGDSNTGNQFYF

SEQ ID NO: 557566 - protein, 15 aa, Homo sapiens
  CDR3 for beta chain variable domain of TCR clone 278783 (TRBV6-5, TRBJ1-6)
CASSLGQGFRSPLHV

SEQ ID NO: 557567 - protein, 19 aa, Homo sapiens
  CDR3 for alpha chain variable domain of TCR clone 278784 (TRAV26-1, TRAJ52)
CIVRAHRNAGGTSYGKLTF

SEQ ID NO: 557568 - protein, 13 aa, Homo sapiens
  CDR3 for beta chain variable domain of TCR clone 278784 (TRBV19, TRBJ2-7)
CDSRKAGGSEQYF

SEQ ID NO: 557569 - protein, 13 aa, Homo sapiens
  CDR3 for alpha chain variable domain of TCR clone 278785 (TRAV35, TRAJ53)
CAGRESSNYKLTF

SEQ ID NO: 557570 - protein, 11 aa, Homo sapiens
  CDR3 for beta chain variable domain of TCR clone 278785 (TRBV29-1, TRBJ2-5)
CSEDRTGTQYF

SEQ ID NO: 557571 - protein, 19 aa, Homo sapiens
  CDR3 for alpha chain variable domain of TCR clone 278786 (TRAV30, TRAJ52)
CGTAANTNAGGTSYGKLTF

SEQ ID NO: 557572 - protein, 11 aa, Homo sapiens
  CDR3 for beta chain variable domain of TCR clone 278786 (TRBV29-1, TRBJ2-5)
RSEDRTGTQNF

SEQ ID NO: 557573 - protein, 16 aa, Homo sapiens
  CDR3 for alpha chain variable domain of TCR clone 278787 (TRAV3, TRAJ37)
CAVRGKGSGNTGKLIF

SEQ ID NO: 557574 - protein, 10 aa, Homo sapiens
  CDR3 for beta chain variable domain of TCR clone 278787 (TRBV28, TRBJ1-2)
CASSSDRAVF

SEQ ID NO: 557575 - protein, 12 aa, Homo sapiens
  CDR3 for alpha chain variable domain of TCR clone 278788 (TRAV20, TRAJ33)
CAVRGSNYQLIW

SEQ ID NO: 557576 - protein, 13 aa, Homo sapiens
  CDR3 for beta chain variable domain of TCR clone 278788 (TRBV20-1, TRBJ1-1)
CSAPLGGGTEAFF

SEQ ID NO: 557577 - protein, 22 aa, Homo sapiens
  CDR3 for alpha chain variable domain of TCR clone 278789 (TRAV8-6, TRAJ6)
CAVTLGEEATYLHLEEGPALLF

SEQ ID NO: 557578 - protein, 15 aa, Homo sapiens
  CDR3 for beta chain variable domain of TCR clone 278789 (TRBV7-2, TRBJ1-1)
CARSPQGGANTEAFF

SEQ ID NO: 557579 - protein, 13 aa, Homo sapiens
  CDR3 for alpha chain variable domain of TCR clone 278790 (TRAV8-3, TRAJ47)
CAVSMEYGNKLVF

SEQ ID NO: 557580 - protein, 14 aa, Homo sapiens
  CDR3 for beta chain variable domain of TCR clone 278790 (TRBV2, TRBJ1-5)
CASSGTGFNHPQHF

SEQ ID NO: 557581 - protein, 17 aa, Homo sapiens
  CDR3 for alpha chain variable domain of TCR clone 278791 (TRAV26-1, TRAJ27)
CIVSTPWISTNASKSTF

SEQ ID NO: 557582 - protein, 16 aa, Homo sapiens
  CDR3 for beta chain variable domain of TCR clone 278791 (TRBV7-9, TRBJ2-1)
CASSLDPGLAIDEQFF

SEQ ID NO: 557583 - protein, 16 aa, Homo sapiens
  CDR3 for alpha chain variable domain of TCR clone 278792 (TRAV13-1, TRAJ45)
CAARGSRKGGADGLTF

SEQ ID NO: 557584 - protein, 13 aa, Homo sapiens
  CDR3 for beta chain variable domain of TCR clone 278792 (TRBV12-4, TRBJ2-5)
CASRKRGKGTQYF

SEQ ID NO: 557585 - protein, 14 aa, Homo sapiens
  CDR3 for alpha chain variable domain of TCR clone 278793 (TRAV25, TRAJ45)
CAGNSGGGADGLTF

SEQ ID NO: 557586 - protein, 14 aa, Homo sapiens
  CDR3 for beta chain variable domain of TCR clone 278793 (TRBV29-1, TRBJ1-2)
CSARRGTQTSGYSF

SEQ ID NO: 557587 - protein, 12 aa, Homo sapiens
  CDR3 for alpha chain variable domain of TCR clone 278794 (TRAV25, TRAJ5)
CAGGGGRRALPF

SEQ ID NO: 557588 - protein, 15 aa, Homo sapiens
  CDR3 for beta chain variable domain of TCR clone 278794 (TRBV9, TRBJ1-2)
CASSVVGQANYGYTF

SEQ ID NO: 557589 - protein, 15 aa, Homo sapiens
  CDR3 for alpha chain variable domain of TCR clone 278795 (TRAV8-2, TRAJ16)
CVVSDGFSDGQKLLF

SEQ ID NO: 557590 - protein, 12 aa, Homo sapiens
  CDR3 for beta chain variable domain of TCR clone 278795 (TRBV12-4, TRBJ2-7)
CASSLEGYEQYF

SEQ ID NO: 557591 - protein, 12 aa, Homo sapiens
  CDR3 for alpha chain variable domain of TCR clone 278796 (TRAV21, TRAJ49)
CAVRNTGNQFYF

SEQ ID NO: 557592 - protein, 12 aa, Homo sapiens
  CDR3 for beta chain variable domain of TCR clone 278796 (TRBV7-9, TRBJ2-7)
CATRMDAYEQYF

SEQ ID NO: 557593 - protein, 15 aa, Homo sapiens
  CDR3 for alpha chain variable domain of TCR clone 278797 (TRAV26-1, TRAJ48)
CIVRVGDFGNEKLTF

SEQ ID NO: 557594 - protein, 13 aa, Homo sapiens
  CDR3 for beta chain variable domain of TCR clone 278797 (TRBV10-3, TRBJ2-7)
CASKLAVNYEQYF

SEQ ID NO: 557595 - protein, 13 aa, Homo sapiens
  CDR3 for alpha chain variable domain of TCR clone 278798 (TRAV8-4, TRAJ9)
CAVSETGGFKTIF

SEQ ID NO: 557596 - protein, 14 aa, Homo sapiens
  CDR3 for beta chain variable domain of TCR clone 278798 (TRBV18, TRBJ2-3)
CASSGLAYTDTQYF

SEQ ID NO: 557597 - protein, 11 aa, Homo sapiens
  CDR3 for alpha chain variable domain of TCR clone 278799 (TRAV29/DV5, TRAJ37)
CATSNTGKLIF

SEQ ID NO: 557598 - protein, 13 aa, Homo sapiens
  CDR3 for beta chain variable domain of TCR clone 278799 (TRBV7-9, TRBJ1-4)
CATQIGPNEKLFF

SEQ ID NO: 557599 - protein, 18 aa, Homo sapiens
  CDR3 for alpha chain variable domain of TCR clone 278800 (TRAV2, TRAJ32)
CCLLLCFHYGGATNKLSF

SEQ ID NO: 557600 - protein, 16 aa, Homo sapiens
  CDR3 for beta chain variable domain of TCR clone 278800 (TRBV7-9, TRBJ2-7)
CASSYPDGEGGYEQYF

SEQ ID NO: 557601 - protein, 14 aa, Homo sapiens
  CDR3 for alpha chain variable domain of TCR clone 278801 (TRAV12-2, TRAJ24)
CAVTPADSWGKLQC

SEQ ID NO: 557602 - protein, 12 aa, Homo sapiens
  CDR3 for beta chain variable domain of TCR clone 278801 (TRBV3-1, TRBJ2-1)
WASSQGSSGQFF

SEQ ID NO: 557603 - protein, 12 aa, Homo sapiens
  CDR3 for alpha chain variable domain of TCR clone 278802 (TRAV1-1, TRAJ9)
CAVDTGGFKTIF

SEQ ID NO: 557604 - protein, 14 aa, Homo sapiens
  CDR3 for beta chain variable domain of TCR clone 278802 (TRBV7-8, TRBJ2-3)
CASSLEAGTDTQYF

SEQ ID NO: 557605 - protein, 14 aa, Homo sapiens
  CDR3 for alpha chain variable domain of TCR clone 278803 (TRAV3, TRAJ22)
CAVRDYGSARQLTF

SEQ ID NO: 557606 - protein, 15 aa, Homo sapiens
  CDR3 for beta chain variable domain of TCR clone 278803 (TRBV7-9, TRBJ1-6)
CASSSPGRGNSPLHF

SEQ ID NO: 557607 - protein, 13 aa, Homo sapiens
  CDR3 for alpha chain variable domain of TCR clone 278804 (TRAV1-2, TRAJ20)
CAVPRFNDYKLSF

SEQ ID NO: 557608 - protein, 14 aa, Homo sapiens
  CDR3 for beta chain variable domain of TCR clone 278804 (TRBV20-1, TRBJ2-7)
CSARYGTTYYEQYF

SEQ ID NO: 557609 - protein, 19 aa, Homo sapiens
  CDR3 for alpha chain variable domain of TCR clone 278805 (TRAV1-2, TRAJ16)
LSYNVLDGLEEKDGQKLVF

SEQ ID NO: 557610 - protein, 15 aa, Homo sapiens
  CDR3 for beta chain variable domain of TCR clone 278805 (TRBV9, TRBJ1-6)
CASSVAGTGDSPLHF

SEQ ID NO: 557611 - protein, 14 aa, Homo sapiens
  CDR3 for alpha chain variable domain of TCR clone 278806 (TRAV1-2, TRAJ16)
CAVRGFSDGQTLLF

SEQ ID NO: 557612 - protein, 12 aa, Homo sapiens
  CDR3 for beta chain variable domain of TCR clone 278806 (TRBV14, TRBJ2-7)
CASSRLKGEQYF

SEQ ID NO: 557613 - protein, 14 aa, Homo sapiens
  CDR3 for alpha chain variable domain of TCR clone 278807 (TRAV12-3, TRAJ42)
CAMNYGGSQGNLIF

SEQ ID NO: 557614 - protein, 12 aa, Homo sapiens
  CDR3 for beta chain variable domain of TCR clone 278807 (TRBV5-1, TRBJ1-2)
CASSQDTYGYTF

SEQ ID NO: 557615 - protein, 18 aa, Homo sapiens
  CDR3 for alpha chain variable domain of TCR clone 278808 (TRAV4, TRAJ23)
CIVRVGLEVWNQGGKLIF

SEQ ID NO: 557616 - protein, 16 aa, Homo sapiens
  CDR3 for beta chain variable domain of TCR clone 278808 (TRBV12-4, TRBJ2-5)
CASSFFVRGRQETQYF

SEQ ID NO: 557617 - protein, 15 aa, Homo sapiens
  CDR3 for alpha chain variable domain of TCR clone 278809 (TRAV20, TRAJ53)
CAVQASGGSNYKLTF

SEQ ID NO: 557618 - protein, 12 aa, Homo sapiens
  CDR3 for beta chain variable domain of TCR clone 278809 (TRBV7-8, TRBJ2-7)
CASGLGDGEQYF

SEQ ID NO: 557619 - protein, 15 aa, Homo sapiens
  CDR3 for alpha chain variable domain of TCR clone 278810 (TRAV12-3, TRAJ10)
CASYILTGGGNKLTF

SEQ ID NO: 557620 - protein, 15 aa, Homo sapiens
  CDR3 for beta chain variable domain of TCR clone 278810 (TRBV7-2, TRBJ1-6)
CASSLGPDGGMPLHF

SEQ ID NO: 557621 - protein, 14 aa, Homo sapiens
  CDR3 for alpha chain variable domain of TCR clone 278811 (TRAV26-1, TRAJ48)
CIVRVGFGTEKLTF

SEQ ID NO: 557622 - protein, 13 aa, Homo sapiens
  CDR3 for beta chain variable domain of TCR clone 278811 (TRBV11-3, TRBJ2-3)
CASSHDTKDTQYF

SEQ ID NO: 557623 - protein, 16 aa, Homo sapiens
  CDR3 for alpha chain variable domain of TCR clone 278812 (TRAV3, TRAJ3)
CAVRDRAKSSASKIIF

SEQ ID NO: 557624 - protein, 16 aa, Homo sapiens
  CDR3 for beta chain variable domain of TCR clone 278812 (TRBV20-1, TRBJ2-4)
CSATSLAKLAKNIQYF

SEQ ID NO: 557625 - protein, 14 aa, Homo sapiens
  CDR3 for alpha chain variable domain of TCR clone 278813 (TRAV8-2, TRAJ4)
RVVSPSGGYNKRIF

SEQ ID NO: 557626 - protein, 15 aa, Homo sapiens
  CDR3 for beta chain variable domain of TCR clone 278813 (TRBV4-1, TRBJ1-4)
CASSDTGGTNEKLFF

SEQ ID NO: 557627 - protein, 13 aa, Homo sapiens
  CDR3 for alpha chain variable domain of TCR clone 278814 (TRAV27, TRAJ39)
CAGDTPAGNMLTF

SEQ ID NO: 557628 - protein, 13 aa, Homo sapiens
  CDR3 for beta chain variable domain of TCR clone 278814 (TRBV13, TRBJ2-1)
CASILGGRGEQFF

SEQ ID NO: 557629 - protein, 10 aa, Homo sapiens
  CDR3 for alpha chain variable domain of TCR clone 278815 (TRAV38-1, TRAJ34)
WAFMDDKLIF

SEQ ID NO: 557630 - protein, 14 aa, Homo sapiens
  CDR3 for beta chain variable domain of TCR clone 278815 (TRBV7-2, TRBJ2-2)
CASSLNSNTGELFF

SEQ ID NO: 557631 - protein, 14 aa, Homo sapiens
  CDR3 for alpha chain variable domain of TCR clone 278816 (TRAV21, TRAJ48)
CAVRSNFGNEKLTF

SEQ ID NO: 557632 - protein, 20 aa, Homo sapiens
  CDR3 for beta chain variable domain of TCR clone 278816 (TRBV28, TRBJ2-1)
CASTPIGRSPGLAGGNEQFF

SEQ ID NO: 557633 - protein, 15 aa, Homo sapiens
  CDR3 for alpha chain variable domain of TCR clone 278817 (TRAV3, TRAJ13)
CAVRGIAGGYQKVTF

SEQ ID NO: 557634 - protein, 13 aa, Homo sapiens
  CDR3 for beta chain variable domain of TCR clone 278817 (TRBV2, TRBJ2-2)
CASSKKNTGELFF

SEQ ID NO: 557635 - protein, 12 aa, Homo sapiens
  CDR3 for alpha chain variable domain of TCR clone 278818 (TRAV13-1, TRAJ21)
CAAKEAFNKFYF

SEQ ID NO: 557636 - protein, 12 aa, Homo sapiens
  CDR3 for beta chain variable domain of TCR clone 278818 (TRBV7-6, TRBJ2-3)
CASSTGTDTQYF

SEQ ID NO: 557637 - protein, 14 aa, Homo sapiens
  CDR3 for alpha chain variable domain of TCR clone 278819 (TRAV23/DV6, TRAJ4)
CAANLTGGYNKLIF

SEQ ID NO: 557638 - protein, 11 aa, Homo sapiens
  CDR3 for beta chain variable domain of TCR clone 278819 (TRBV7-9, TRBJ2-3)
CASSPTDTQYF

SEQ ID NO: 557639 - protein, 16 aa, Homo sapiens
  CDR3 for alpha chain variable domain of TCR clone 278820 (TRAV8-3, TRAJ13)
CAVGAYPSRGYQKVTF

SEQ ID NO: 557640 - protein, 15 aa, Homo sapiens
  CDR3 for beta chain variable domain of TCR clone 278820 (TRBV19, TRBJ1-5)
CASSIVWADNQPQHF

SEQ ID NO: 557641 - protein, 13 aa, Homo sapiens
  CDR3 for alpha chain variable domain of TCR clone 278821 (TRAV3, TRAJ20)
CAVRDTGDYKLSF

SEQ ID NO: 557642 - protein, 13 aa, Homo sapiens
  CDR3 for beta chain variable domain of TCR clone 278821 (TRBV19, TRBJ2-7)
CASSIDRTYEQYF

SEQ ID NO: 557643 - protein, 11 aa, Homo sapiens
  CDR3 for alpha chain variable domain of TCR clone 278822 (TRAV13-1, TRAJ39)
CASHAGNMLTF

SEQ ID NO: 557644 - protein, 13 aa, Homo sapiens
  CDR3 for beta chain variable domain of TCR clone 278822 (TRBV7-3, TRBJ2-2)
CASSPHGTGELFF

SEQ ID NO: 557645 - protein, 15 aa, Homo sapiens
  CDR3 for alpha chain variable domain of TCR clone 278823 (TRAV27, TRAJ38)
CAGRFNAGNNRKLIW

SEQ ID NO: 557646 - protein, 16 aa, Homo sapiens
  CDR3 for beta chain variable domain of TCR clone 278823 (TRBV4-2, TRBJ2-1)
CASSQGEGRTVNEQFF

SEQ ID NO: 557647 - protein, 15 aa, Homo sapiens
  CDR3 for alpha chain variable domain of TCR clone 278824 (TRAV3, TRAJ4)
CAQNMFSGGYNKLIF

SEQ ID NO: 557648 - protein, 18 aa, Homo sapiens
  CDR3 for beta chain variable domain of TCR clone 278824 (TRBV6-6, TRBJ1-3)
CASSYSKWDSISGNTIYF

SEQ ID NO: 557649 - protein, 14 aa, Homo sapiens
  CDR3 for alpha chain variable domain of TCR clone 278825 (TRAV2, TRAJ9)
CAVEDRSGGFKTIF

SEQ ID NO: 557650 - protein, 14 aa, Homo sapiens
  CDR3 for beta chain variable domain of TCR clone 278825 (TRBV28, TRBJ1-2)
CASRIQGANYGYTF

SEQ ID NO: 557651 - protein, 11 aa, Homo sapiens
  CDR3 for alpha chain variable domain of TCR clone 278826 (TRAV13-1, TRAJ49)
CACVGGNQFVF

SEQ ID NO: 557652 - protein, 16 aa, Homo sapiens
  CDR3 for beta chain variable domain of TCR clone 278826 (TRBV11-2, TRBJ2-2)
CASSLRTGNLIGELFF

SEQ ID NO: 557653 - protein, 15 aa, Homo sapiens
  CDR3 for alpha chain variable domain of TCR clone 278827 (TRAV12-1, TRAJ48)
CVVNKVNFGNEKLTF

SEQ ID NO: 557654 - protein, 17 aa, Homo sapiens
  CDR3 for beta chain variable domain of TCR clone 278827 (TRBV4-3, TRBJ1-1)
CASSQDLGPFMNTEAFF

SEQ ID NO: 557655 - protein, 15 aa, Homo sapiens
  CDR3 for alpha chain variable domain of TCR clone 278828 (TRAV17, TRAJ23)
CATDAEDNQGGKLIF

SEQ ID NO: 557656 - protein, 16 aa, Homo sapiens
  CDR3 for beta chain variable domain of TCR clone 278828 (TRBV27, TRBJ2-7)
CASSSERRDSAYEQYF

SEQ ID NO: 557657 - protein, 14 aa, Homo sapiens
  CDR3 for alpha chain variable domain of TCR clone 278829 (TRAV1-2, TRAJ16)
CAVNRFYDGQKLLF

SEQ ID NO: 557658 - protein, 15 aa, Homo sapiens
  CDR3 for beta chain variable domain of TCR clone 278829 (TRBV9, TRBJ1-6)
CASSVAGTGDSPLHF

SEQ ID NO: 557659 - protein, 14 aa, Homo sapiens
  CDR3 for alpha chain variable domain of TCR clone 278830 (TRAV34, TRAJ44)
CGADGTGTASKLTF

SEQ ID NO: 557660 - protein, 12 aa, Homo sapiens
  CDR3 for beta chain variable domain of TCR clone 278830 (TRBV5-4, TRBJ2-7)
CASSLEAYEQYF

SEQ ID NO: 557661 - protein, 13 aa, Homo sapiens
  CDR3 for alpha chain variable domain of TCR clone 278831 (TRAV29/DV5, TRAJ31)
CAASRNNNARLMF

SEQ ID NO: 557662 - protein, 13 aa, Homo sapiens
  CDR3 for beta chain variable domain of TCR clone 278831 (TRBV9, TRBJ2-1)
CASSPSGGNEQFF

SEQ ID NO: 557663 - protein, 12 aa, Homo sapiens
  CDR3 for alpha chain variable domain of TCR clone 278832 (TRAV2, TRAJ29)
CAVDSGNTPLVL

SEQ ID NO: 557664 - protein, 14 aa, Homo sapiens
  CDR3 for beta chain variable domain of TCR clone 278832 (TRBV7-8, TRBJ2-7)
CASSLRGSSYEQYF

SEQ ID NO: 557665 - protein, 10 aa, Homo sapiens
  CDR3 for alpha chain variable domain of TCR clone 278833 (TRAV16, TRAJ22)
SAMYLRQLTF

SEQ ID NO: 557666 - protein, 13 aa, Homo sapiens
  CDR3 for beta chain variable domain of TCR clone 278833 (TRBV7-9, TRBJ2-7)
CASSFAGAYEQYF

SEQ ID NO: 557667 - protein, 14 aa, Homo sapiens
  CDR3 for alpha chain variable domain of TCR clone 278834 (TRAV1-2, TRAJ16)
CAVNRFSDGQKLLF

SEQ ID NO: 557668 - protein, 15 aa, Homo sapiens
  CDR3 for beta chain variable domain of TCR clone 278834 (TRBV7-9, TRBJ2-7)
CASSWGQGAIYEQYF

SEQ ID NO: 557669 - protein, 13 aa, Homo sapiens
  CDR3 for alpha chain variable domain of TCR clone 278835 (TRAV3, TRAJ43)
CAVKARNNNDMRC

SEQ ID NO: 557670 - protein, 16 aa, Homo sapiens
  CDR3 for beta chain variable domain of TCR clone 278835 (TRBV7-9, TRBJ2-3)
CASSFSVAGGTDTQYF

SEQ ID NO: 557671 - protein, 13 aa, Homo sapiens
  CDR3 for alpha chain variable domain of TCR clone 278836 (TRAV12-3, TRAJ31)
CAMSANNNARLMF

SEQ ID NO: 557672 - protein, 16 aa, Homo sapiens
  CDR3 for beta chain variable domain of TCR clone 278836 (TRBV7-9, TRBJ2-7)
CASSLGFSSGEDGYTF

SEQ ID NO: 557673 - protein, 16 aa, Homo sapiens
  CDR3 for alpha chain variable domain of TCR clone 278837 (TRAV38-1, TRAJ56)
CAFMKRQTGANSKLTF

SEQ ID NO: 557674 - protein, 13 aa, Homo sapiens
  CDR3 for beta chain variable domain of TCR clone 278837 (TRBV12-4, TRBJ2-7)
CASSLTETYEQYF

SEQ ID NO: 557675 - protein, 16 aa, Homo sapiens
  CDR3 for alpha chain variable domain of TCR clone 278838 (TRAV13-1, TRAJ13)
CTAFFLGVTRKLHLEL

SEQ ID NO: 557676 - protein, 15 aa, Homo sapiens
  CDR3 for beta chain variable domain of TCR clone 278838 (TRBV7-8, TRBJ2-1)
CASSLADSLYNEQFF

SEQ ID NO: 557677 - protein, 14 aa, Homo sapiens
  CDR3 for alpha chain variable domain of TCR clone 278839 (TRAV4, TRAJ26)
CLVGPHNYGQNFVF

SEQ ID NO: 557678 - protein, 17 aa, Homo sapiens
  CDR3 for beta chain variable domain of TCR clone 278839 (TRBV24-1, TRBJ2-1)
CATSDVSTSGTYDEQFF

SEQ ID NO: 557679 - protein, 15 aa, Homo sapiens
  CDR3 for alpha chain variable domain of TCR clone 278840 (TRAV2, TRAJ9)
CAVEDRGTGGFKTIF

SEQ ID NO: 557680 - protein, 17 aa, Homo sapiens
  CDR3 for beta chain variable domain of TCR clone 278840 (TRBV7-2, TRBJ2-3)
CASSLEARGTSTDTQYF

SEQ ID NO: 557681 - protein, 14 aa, Homo sapiens
  CDR3 for alpha chain variable domain of TCR clone 278841 (TRAV23/DV6, TRAJ11)
CAASLESGYSTFTF

SEQ ID NO: 557682 - protein, 13 aa, Homo sapiens
  CDR3 for beta chain variable domain of TCR clone 278841 (TRBV4-1, TRBJ2-5)
CASSLTRGETQYF

SEQ ID NO: 557683 - protein, 16 aa, Homo sapiens
  CDR3 for alpha chain variable domain of TCR clone 278842 (TRAV1-2, TRAJ16)
CAVNRFQMARSCSLQG

SEQ ID NO: 557684 - protein, 15 aa, Homo sapiens
  CDR3 for beta chain variable domain of TCR clone 278842 (TRBV9, TRBJ1-6)
SASSVAGTGDSPLHF

SEQ ID NO: 557685 - protein, 17 aa, Homo sapiens
  CDR3 for alpha chain variable domain of TCR clone 278843 (TRAV12-3, TRAJ26)
CAMSGGRWRNYGQNFVF

SEQ ID NO: 557686 - protein, 12 aa, Homo sapiens
  CDR3 for beta chain variable domain of TCR clone 278843 (TRBV19, TRBJ1-1)
CASSTTGIEAFF

SEQ ID NO: 557687 - protein, 15 aa, Homo sapiens
  CDR3 for alpha chain variable domain of TCR clone 278844 (TRAV12-3, TRAJ6)
CAMSATTGGSYIPTF

SEQ ID NO: 557688 - protein, 19 aa, Homo sapiens
  CDR3 for beta chain variable domain of TCR clone 278844 (TRBV25-1, TRBJ2-2)
CAILVYRVVRGRKTGELFF

SEQ ID NO: 557689 - protein, 11 aa, Homo sapiens
  CDR3 for alpha chain variable domain of TCR clone 278845 (TRAV12-3, TRAJ43)
CSMSVSNDIRF

SEQ ID NO: 557690 - protein, 13 aa, Homo sapiens
  CDR3 for beta chain variable domain of TCR clone 278845 (TRBV20-1, TRBJ1-1)
CSAPLGGGTEAFF

SEQ ID NO: 557691 - protein, 13 aa, Homo sapiens
  CDR3 for alpha chain variable domain of TCR clone 278846 (TRAV3, TRAJ21)
CAVREPDFNKFYF

SEQ ID NO: 557692 - protein, 17 aa, Homo sapiens
  CDR3 for beta chain variable domain of TCR clone 278846 (TRBV11-2, TRBJ2-4)
CASSSVGPGGHRNIQYF

SEQ ID NO: 557693 - protein, 12 aa, Homo sapiens
  CDR3 for alpha chain variable domain of TCR clone 278847 (TRAV1-1, TRAJ15)
CAVGQAGTALIF

SEQ ID NO: 557694 - protein, 20 aa, Homo sapiens
  CDR3 for beta chain variable domain of TCR clone 278847 (TRBV28, TRBJ2-1)
CASTPIGRSPGLAGGNEQFF

SEQ ID NO: 557695 - protein, 14 aa, Homo sapiens
  CDR3 for alpha chain variable domain of TCR clone 278848 (TRAV27, TRAJ23)
CAGLSHNQGGKLIF

SEQ ID NO: 557696 - protein, 15 aa, Homo sapiens
  CDR3 for beta chain variable domain of TCR clone 278848 (TRBV20-1, TRBJ2-7)
CSARDRVSGMDEQYF

SEQ ID NO: 557697 - protein, 12 aa, Homo sapiens
  CDR3 for alpha chain variable domain of TCR clone 278849 (TRAV12-3, TRAJ17)
CAMTLTGNKLTF

SEQ ID NO: 557698 - protein, 15 aa, Homo sapiens
  CDR3 for beta chain variable domain of TCR clone 278849 (TRBV20-1, TRBJ2-7)
CSARDRGSGIDEQYF

SEQ ID NO: 557699 - protein, 15 aa, Homo sapiens
  CDR3 for alpha chain variable domain of TCR clone 278850 (TRAV21, TRAJ23)
CCEAGIYNQGGKLIF

SEQ ID NO: 557700 - protein, 13 aa, Homo sapiens
  CDR3 for beta chain variable domain of TCR clone 278850 (TRBV7-9, TRBJ1-2)
CASSLKQNYGYTF

SEQ ID NO: 557701 - protein, 12 aa, Homo sapiens
  CDR3 for alpha chain variable domain of TCR clone 278851 (TRAV12-3, TRAJ42)
CALGGSQGNLIF

SEQ ID NO: 557702 - protein, 13 aa, Homo sapiens
  CDR3 for beta chain variable domain of TCR clone 278851 (TRBV5-7, TRBJ2-6)
CASTSSGANVLTF

SEQ ID NO: 557703 - protein, 13 aa, Homo sapiens
  CDR3 for alpha chain variable domain of TCR clone 278852 (TRAV13-2, TRAJ53)
CAENMGSNYKLTF

SEQ ID NO: 557704 - protein, 13 aa, Homo sapiens
  CDR3 for beta chain variable domain of TCR clone 278852 (TRBV4-1, TRBJ2-2)
RASSQENTGELFF

SEQ ID NO: 557705 - protein, 13 aa, Homo sapiens
  CDR3 for alpha chain variable domain of TCR clone 278853 (TRAV26-1, TRAJ34)
CIVRPWITDKLIF

SEQ ID NO: 557706 - protein, 13 aa, Homo sapiens
  CDR3 for beta chain variable domain of TCR clone 278853 (TRBV5-1, TRBJ2-1)
CASSLGSYDEQFF

SEQ ID NO: 557707 - protein, 15 aa, Homo sapiens
  CDR3 for alpha chain variable domain of TCR clone 278854 (TRAV3, TRAJ22)
CAVRDRGGSARLLTF

SEQ ID NO: 557708 - protein, 13 aa, Homo sapiens
  CDR3 for beta chain variable domain of TCR clone 278854 (TRBV20-1, TRBJ1-1)
CSARVGGNTEAFF

SEQ ID NO: 557709 - protein, 14 aa, Homo sapiens
  CDR3 for alpha chain variable domain of TCR clone 278855 (TRAV29/DV5, TRAJ36)
CAARRKTGANNLFF

SEQ ID NO: 557710 - protein, 13 aa, Homo sapiens
  CDR3 for beta chain variable domain of TCR clone 278855 (TRBV4-1, TRBJ2-5)
CASSLTRGETQYF

SEQ ID NO: 557711 - protein, 14 aa, Homo sapiens
  CDR3 for alpha chain variable domain of TCR clone 278856 (TRAV39, TRAJ58)
CAVDSETSGSRLTF

SEQ ID NO: 557712 - protein, 15 aa, Homo sapiens
  CDR3 for beta chain variable domain of TCR clone 278856 (TRBV7-3, TRBJ2-1)
CASSPTGGGEVEQFF

SEQ ID NO: 557713 - protein, 16 aa, Homo sapiens
  CDR3 for alpha chain variable domain of TCR clone 278857 (TRAV8-4, TRAJ5)
CAVSPLTDTGRGALTF

SEQ ID NO: 557714 - protein, 14 aa, Homo sapiens
  CDR3 for beta chain variable domain of TCR clone 278857 (TRBV19, TRBJ1-6)
CASSTDGWNSPLHF

SEQ ID NO: 557715 - protein, 16 aa, Homo sapiens
  CDR3 for alpha chain variable domain of TCR clone 278858 (TRAV36/DV7, TRAJ33)
WRPGNKVQDSNYQLIW

SEQ ID NO: 557716 - protein, 15 aa, Homo sapiens
  CDR3 for beta chain variable domain of TCR clone 278858 (TRBV29-1, TRBJ2-1)
CSVGRYALFYNEQFF

SEQ ID NO: 557717 - protein, 17 aa, Homo sapiens
  CDR3 for alpha chain variable domain of TCR clone 278859 (TRAV26-1, TRAJ58)
CIVRVGAEETSGSRLTF

SEQ ID NO: 557718 - protein, 13 aa, Homo sapiens
  CDR3 for beta chain variable domain of TCR clone 278859 (TRBV7-9, TRBJ1-2)
CASSLKQNYGYTF

SEQ ID NO: 557719 - protein, 12 aa, Homo sapiens
  CDR3 for alpha chain variable domain of TCR clone 278860 (TRAV27, TRAJ9)
CAGESGGFKTIF

SEQ ID NO: 557720 - protein, 18 aa, Homo sapiens
  CDR3 for beta chain variable domain of TCR clone 278860 (TRBV10-2, TRBJ2-2)
CISAPAVHRQADAGELFF

SEQ ID NO: 557721 - protein, 14 aa, Homo sapiens
  CDR3 for alpha chain variable domain of TCR clone 278861 (TRAV12-2, TRAJ44)
CAVNKAGTASKLTF

SEQ ID NO: 557722 - protein, 12 aa, Homo sapiens
  CDR3 for beta chain variable domain of TCR clone 278861 (TRBV19)
CESKEWNGGLFF

SEQ ID NO: 557723 - protein, 19 aa, Homo sapiens
  CDR3 for alpha chain variable domain of TCR clone 278862 (TRAV1-2, TRAJ32)
CLLPLCCETPCGATNKLIF

SEQ ID NO: 557724 - protein, 18 aa, Homo sapiens
  CDR3 for beta chain variable domain of TCR clone 278862 (TRBV7-9, TRBJ2-7)
CASSLTTSGSRTWYEQYF

SEQ ID NO: 557725 - protein, 15 aa, Homo sapiens
  CDR3 for alpha chain variable domain of TCR clone 278863 (TRAV2, TRAJ13)
CATPSYSGGYQKVTF

SEQ ID NO: 557726 - protein, 14 aa, Homo sapiens
  CDR3 for beta chain variable domain of TCR clone 278863 (TRBV4-2, TRBJ2-1)
CASGLDRAYDEQFF

SEQ ID NO: 557727 - protein, 13 aa, Homo sapiens
  CDR3 for alpha chain variable domain of TCR clone 278864 (TRAV12-2, TRAJ50)
CAVIVTSYDKVIF

SEQ ID NO: 557728 - protein, 14 aa, Homo sapiens
  CDR3 for beta chain variable domain of TCR clone 278864 (TRBV9, TRBJ2-1)
CASSVDPRGKEQVF

SEQ ID NO: 557729 - protein, 15 aa, Homo sapiens
  CDR3 for alpha chain variable domain of TCR clone 278865 (TRAV13-1, TRAJ9)
CAASTLNTGGFKTIF

SEQ ID NO: 557730 - protein, 17 aa, Homo sapiens
  CDR3 for beta chain variable domain of TCR clone 278865 (TRBV7-3, TRBJ2-3)
CASSPRGQGYGTDTQYF

SEQ ID NO: 557731 - protein, 14 aa, Homo sapiens
  CDR3 for alpha chain variable domain of TCR clone 278866 (TRAV12-2, TRAJ45)
CAVNKGGGADGLTF

SEQ ID NO: 557732 - protein, 15 aa, Homo sapiens
  CDR3 for beta chain variable domain of TCR clone 278866 (TRBV9, TRBJ1-6)
CASSVAGTGDSPLHY

SEQ ID NO: 557733 - protein, 16 aa, Homo sapiens
  CDR3 for alpha chain variable domain of TCR clone 278867 (TRAV12-2, TRAJ40)
CAVIRGGTSRTYKYIF

SEQ ID NO: 557734 - protein, 13 aa, Homo sapiens
  CDR3 for beta chain variable domain of TCR clone 278867 (TRBV7-9, TRBJ1-2)
CASSLKQNYGYTF

SEQ ID NO: 557735 - protein, 13 aa, Homo sapiens
  CDR3 for alpha chain variable domain of TCR clone 278868 (TRAV26-2, TRAJ37)
CIRGSSNTGKLIF

SEQ ID NO: 557736 - protein, 16 aa, Homo sapiens
  CDR3 for beta chain variable domain of TCR clone 278868 (TRBV7-3, TRBJ2-2)
CASSFLPSGYTGELFF

SEQ ID NO: 557737 - protein, 16 aa, Homo sapiens
  CDR3 for alpha chain variable domain of TCR clone 278869 (TRAV3, TRAJ21)
CAVRDIERGNFNKFYF

SEQ ID NO: 557738 - protein, 13 aa, Homo sapiens
  CDR3 for beta chain variable domain of TCR clone 278869 (TRBV27, TRBJ2-7)
CASSLTAGYEQYF

SEQ ID NO: 557739 - protein, 15 aa, Homo sapiens
  CDR3 for alpha chain variable domain of TCR clone 278870 (TRAV26-1, TRAJ22)
CIVRVSFWFCKATDL

SEQ ID NO: 557740 - protein, 15 aa, Homo sapiens
  CDR3 for beta chain variable domain of TCR clone 278870 (TRBV19, TRBJ2-1)
CASSIVRGEGREQFF

SEQ ID NO: 557741 - protein, 13 aa, Homo sapiens
  CDR3 for alpha chain variable domain of TCR clone 278871 (TRAV13-2, TRAJ13)
CAERPGGYQKVTF

SEQ ID NO: 557742 - protein, 14 aa, Homo sapiens
  CDR3 for beta chain variable domain of TCR clone 278871 (TRBV20-1, TRBJ2-4)
CSASGRVGENIQYF

SEQ ID NO: 557743 - protein, 11 aa, Homo sapiens
  CDR3 for alpha chain variable domain of TCR clone 278872 (TRAV1-1, TRAJ23)
CALRQGGKLIF

SEQ ID NO: 557744 - protein, 12 aa, Homo sapiens
  CDR3 for beta chain variable domain of TCR clone 278872 (TRBV11-2, TRBJ2-2)
CASSLGGGELFF

SEQ ID NO: 557745 - protein, 13 aa, Homo sapiens
  CDR3 for alpha chain variable domain of TCR clone 278873 (TRAV8-1, TRAJ32)
CAADGGATNMLIF

SEQ ID NO: 557746 - protein, 18 aa, Homo sapiens
  CDR3 for beta chain variable domain of TCR clone 278873 (TRBV18, TRBJ2-3)
CASSYTSGAAGGTDTQYF

SEQ ID NO: 557747 - protein, 12 aa, Homo sapiens
  CDR3 for alpha chain variable domain of TCR clone 278874 (TRAV12-3, TRAJ17)
CAMTLTGNKLTF

SEQ ID NO: 557748 - protein, 16 aa, Homo sapiens
  CDR3 for beta chain variable domain of TCR clone 278874 (TRBV5-1, TRBJ2-3)
CASSSGLAVYTDTQYF

SEQ ID NO: 557749 - protein, 14 aa, Homo sapiens
  CDR3 for alpha chain variable domain of TCR clone 278875 (TRAV1-2, TRAJ16)
CAVNRFSDVQKLLF

SEQ ID NO: 557750 - protein, 15 aa, Homo sapiens
  CDR3 for beta chain variable domain of TCR clone 278875 (TRBV9, TRBJ1-6)
CASSVAGTGDSPLHV

SEQ ID NO: 557751 - protein, 15 aa, Homo sapiens
  CDR3 for alpha chain variable domain of TCR clone 278876 (TRAV27, TRAJ32)
CAGRGYGGATNKLIF

SEQ ID NO: 557752 - protein, 15 aa, Homo sapiens
  CDR3 for beta chain variable domain of TCR clone 278876 (TRBV20-1, TRBJ2-7)
CSARDRVSGMDEQYF

SEQ ID NO: 557753 - protein, 15 aa, Homo sapiens
  CDR3 for alpha chain variable domain of TCR clone 278877 (TRAV26-1, TRAJ29)
CIVRVEGSGNTPLVF

SEQ ID NO: 557754 - protein, 13 aa, Homo sapiens
  CDR3 for beta chain variable domain of TCR clone 278877 (TRBV18, TRBJ2-5)
CQPTWGVQETQYF

SEQ ID NO: 557755 - protein, 14 aa, Homo sapiens
  CDR3 for alpha chain variable domain of TCR clone 278878 (TRAV23/DV6, TRAJ4)
CAANFSGGYNKLIF

SEQ ID NO: 557756 - protein, 11 aa, Homo sapiens
  CDR3 for beta chain variable domain of TCR clone 278878 (TRBV7-9, TRBJ2-3)
CASSPTDTQYF

SEQ ID NO: 557757 - protein, 13 aa, Homo sapiens
  CDR3 for alpha chain variable domain of TCR clone 278879 (TRAV8-6, TRAJ49)
CAVITNTGNQFYF

SEQ ID NO: 557758 - protein, 14 aa, Homo sapiens
  CDR3 for beta chain variable domain of TCR clone 278879 (TRBV4-2, TRBJ2-1)
CASGLDRAYNEQFF

SEQ ID NO: 557759 - protein, 13 aa, Homo sapiens
  CDR3 for alpha chain variable domain of TCR clone 278880 (TRAV2, TRAJ40)
CAVVTSGAYKYIF

SEQ ID NO: 557760 - protein, 15 aa, Homo sapiens
  CDR3 for beta chain variable domain of TCR clone 278880 (TRBV18, TRBJ2-1)
CASSPPSASYNEQFF

SEQ ID NO: 557761 - protein, 23 aa, Homo sapiens
  CDR3 for alpha chain variable domain of TCR clone 278881 (TRAV3, TRAJ32)
CAVSSYGGATNKLILELALCLLS

SEQ ID NO: 557762 - protein, 14 aa, Homo sapiens
  CDR3 for beta chain variable domain of TCR clone 278881 (TRBV20-1, TRBJ1-4)
CSARDGSGWEKLFF

SEQ ID NO: 557763 - protein, 15 aa, Homo sapiens
  CDR3 for alpha chain variable domain of TCR clone 278882 (TRAV21, TRAJ13)
CSVGPTSGGYQKVTF

SEQ ID NO: 557764 - protein, 18 aa, Homo sapiens
  CDR3 for beta chain variable domain of TCR clone 278882 (TRBV11-3, TRBJ2-1)
CASSSYPGGRDSYNEQFF

SEQ ID NO: 557765 - protein, 15 aa, Homo sapiens
  CDR3 for alpha chain variable domain of TCR clone 278883 (TRAV4, TRAJ26)
CLVGGLDNYGQNFVF

SEQ ID NO: 557766 - protein, 14 aa, Homo sapiens
  CDR3 for beta chain variable domain of TCR clone 278883 (TRBV7-2, TRBJ2-7)
CASSPKTSFYEQYF

SEQ ID NO: 557767 - protein, 15 aa, Homo sapiens
  CDR3 for alpha chain variable domain of TCR clone 278884 (TRAV26-1, TRAJ22)
CIVRVSFWFCKATDL

SEQ ID NO: 557768 - protein, 13 aa, Homo sapiens
  CDR3 for beta chain variable domain of TCR clone 278884 (TRBV12-4, TRBJ1-2)
CASSSGLTVISTF

SEQ ID NO: 557769 - protein, 18 aa, Homo sapiens
  CDR3 for alpha chain variable domain of TCR clone 278885 (TRAV21, TRAJ52)
CAVRPSPAGGTSYGKLTF

SEQ ID NO: 557770 - protein, 15 aa, Homo sapiens
  CDR3 for beta chain variable domain of TCR clone 278885 (TRBV28, TRBJ2-5)
CASSPGQGSIETQYF

SEQ ID NO: 557771 - protein, 14 aa, Homo sapiens
  CDR3 for alpha chain variable domain of TCR clone 278886 (TRAV12-2, TRAJ44)
CAVNPAGTASKLTF

SEQ ID NO: 557772 - protein, 16 aa, Homo sapiens
  CDR3 for beta chain variable domain of TCR clone 278886 (TRBV2, TRBJ2-6)
CASSEVGGAGANVLTC

SEQ ID NO: 557773 - protein, 13 aa, Homo sapiens
  CDR3 for alpha chain variable domain of TCR clone 278887 (TRAV35, TRAJ42)
CAGFPGSQGNLIF

SEQ ID NO: 557774 - protein, 15 aa, Homo sapiens
  CDR3 for beta chain variable domain of TCR clone 278887 (TRBV7-2, TRBJ2-1)
CASSLASGRVNEQFF

SEQ ID NO: 557775 - protein, 15 aa, Homo sapiens
  CDR3 for alpha chain variable domain of TCR clone 278888 (TRAV3, TRAJ22)
CAVRGRGGSARQLTF

SEQ ID NO: 557776 - protein, 16 aa, Homo sapiens
  CDR3 for beta chain variable domain of TCR clone 278888 (TRBV5-4, TRBJ2-3)
CASQQPGAGGSDTQYF

SEQ ID NO: 557777 - protein, 15 aa, Homo sapiens
  CDR3 for alpha chain variable domain of TCR clone 278889 (TRAV34, TRAJ38)
CGADFTPGNNRKLIW

SEQ ID NO: 557778 - protein, 16 aa, Homo sapiens
  CDR3 for beta chain variable domain of TCR clone 278889 (TRBV12-5, TRBJ2-5)
CASSPRTSGNQETQYF

SEQ ID NO: 557779 - protein, 11 aa, Homo sapiens
  CDR3 for alpha chain variable domain of TCR clone 278890 (TRAV8-3, TRAJ42)
NYGGSQGNLIF

SEQ ID NO: 557780 - protein, 15 aa, Homo sapiens
  CDR3 for beta chain variable domain of TCR clone 278890 (TRBV7-9, TRBJ1-5)
CASSQGHQPNQPQHF

SEQ ID NO: 557781 - protein, 14 aa, Homo sapiens
  CDR3 for alpha chain variable domain of TCR clone 278891 (TRAV12-2, TRAJ13)
CAVKKTGGYQKVTF

SEQ ID NO: 557782 - protein, 16 aa, Homo sapiens
  CDR3 for beta chain variable domain of TCR clone 278891 (TRBV7-3, TRBJ2-2)
CTSSLKRGTLSGELFF

SEQ ID NO: 557783 - protein, 14 aa, Homo sapiens
  CDR3 for alpha chain variable domain of TCR clone 278892 (TRAV3, TRAJ5)
CAVRDGTGRRALTF

SEQ ID NO: 557784 - protein, 18 aa, Homo sapiens
  CDR3 for beta chain variable domain of TCR clone 278892 (TRBV7-9, TRBJ2-7)
CASSLTTSGSRTWYEQYF

SEQ ID NO: 557785 - protein, 12 aa, Homo sapiens
  CDR3 for alpha chain variable domain of TCR clone 278893 (TRAV27, TRAJ35)
CAGADFGNVLHC

SEQ ID NO: 557786 - protein, 20 aa, Homo sapiens
  CDR3 for beta chain variable domain of TCR clone 278893 (TRBV28, TRBJ2-1)
CASTPIGRSPGLAGGNEQFF

SEQ ID NO: 557787 - protein, 12 aa, Homo sapiens
  CDR3 for alpha chain variable domain of TCR clone 278894 (TRAV36/DV7, TRAJ54)
CAVVQGAQKLVF

SEQ ID NO: 557788 - protein, 14 aa, Homo sapiens
  CDR3 for beta chain variable domain of TCR clone 278894 (TRBV7-3, TRBJ1-1)
CASRLKGGNTEAFF

SEQ ID NO: 557789 - protein, 12 aa, Homo sapiens
  CDR3 for alpha chain variable domain of TCR clone 278895 (TRAV4, TRAJ26)
CLVGDYGQNFVF

SEQ ID NO: 557790 - protein, 16 aa, Homo sapiens
  CDR3 for beta chain variable domain of TCR clone 278895 (TRBV7-2, TRBJ1-2)
CASSSNQDMRGHGYTF

SEQ ID NO: 557791 - protein, 14 aa, Homo sapiens
  CDR3 for alpha chain variable domain of TCR clone 278896 (TRAV3, TRAJ28)
CAVRRGAGCYQLTF

SEQ ID NO: 557792 - protein, 16 aa, Homo sapiens
  CDR3 for beta chain variable domain of TCR clone 278896 (TRBV4-1, TRBJ2-7)
CASSQEWTSGPLEQYF

SEQ ID NO: 557793 - protein, 11 aa, Homo sapiens
  CDR3 for alpha chain variable domain of TCR clone 278897 (TRAV12-3, TRAJ43)
CAMSVSNDMCF

SEQ ID NO: 557794 - protein, 12 aa, Homo sapiens
  CDR3 for beta chain variable domain of TCR clone 278897 (TRBV20-1, TRBJ1-1)
QCSTWGGTEAFF

SEQ ID NO: 557795 - protein, 13 aa, Homo sapiens
  CDR3 for alpha chain variable domain of TCR clone 278898 (TRAV13-2, TRAJ48)
CAEMDFGNEKLTF

SEQ ID NO: 557796 - protein, 16 aa, Homo sapiens
  CDR3 for beta chain variable domain of TCR clone 278898 (TRBV27, TRBJ2-2)
CASSFRGLVRTEELFF

SEQ ID NO: 557797 - protein, 13 aa, Homo sapiens
  CDR3 for alpha chain variable domain of TCR clone 278899 (TRAV13-1, TRAJ6)
CEASSGGSYIPTF

SEQ ID NO: 557798 - protein, 14 aa, Homo sapiens
  CDR3 for beta chain variable domain of TCR clone 278899 (TRBV20-1, TRBJ2-4)
CSAVAGGPGNIQYF

SEQ ID NO: 557799 - protein, 16 aa, Homo sapiens
  CDR3 for alpha chain variable domain of TCR clone 278900 (TRAV30, TRAJ24)
CGTEIVDADSWVKFQF

SEQ ID NO: 557800 - protein, 13 aa, Homo sapiens
  CDR3 for beta chain variable domain of TCR clone 278900 (TRBV11-2, TRBJ2-5)
CASSSTGEETQYF

SEQ ID NO: 557801 - protein, 15 aa, Homo sapiens
  CDR3 for alpha chain variable domain of TCR clone 278901 (TRAV12-2, TRAJ20)
CAVKGGFGAGTTATV

SEQ ID NO: 557802 - protein, 13 aa, Homo sapiens
  CDR3 for beta chain variable domain of TCR clone 278901 (TRBV12-4, TRBJ2-7)
CASSPGQLYEQYF

SEQ ID NO: 557803 - protein, 15 aa, Homo sapiens
  CDR3 for alpha chain variable domain of TCR clone 278902 (TRAV26-1, TRAJ3)
CIVRSGYSSASKIIF

SEQ ID NO: 557804 - protein, 16 aa, Homo sapiens
  CDR3 for beta chain variable domain of TCR clone 278902 (TRBV19, TRBJ2-3)
CASSFYTTGIGDTQYF

SEQ ID NO: 557805 - protein, 13 aa, Homo sapiens
  CDR3 for alpha chain variable domain of TCR clone 278903 (TRAV21, TRAJ27)
CAARPGKAGKSTF

SEQ ID NO: 557806 - protein, 14 aa, Homo sapiens
  CDR3 for beta chain variable domain of TCR clone 278903 (TRBV7-6, TRBJ2-3)
CASSIGTVTDTQYF

SEQ ID NO: 557807 - protein, 15 aa, Homo sapiens
  CDR3 for alpha chain variable domain of TCR clone 278904 (TRAV3, TRAJ36)
CAVRASQTGSNNLFF

SEQ ID NO: 557808 - protein, 16 aa, Homo sapiens
  CDR3 for beta chain variable domain of TCR clone 278904 (TRBV19, TRBJ2-2)
CASRSPGTGATGELFF

SEQ ID NO: 557809 - protein, 12 aa, Homo sapiens
  CDR3 for alpha chain variable domain of TCR clone 278905 (TRAV21, TRAJ49)
CALTNTGNQFYF

SEQ ID NO: 557810 - protein, 17 aa, Homo sapiens
  CDR3 for beta chain variable domain of TCR clone 278905 (TRBV13, TRBJ2-3)
CASSLSRVAGGRNTQYF

SEQ ID NO: 557811 - protein, 13 aa, Homo sapiens
  CDR3 for alpha chain variable domain of TCR clone 278906 (TRAV13-1, TRAJ37)
CAAVSGNTGKLIF

SEQ ID NO: 557812 - protein, 17 aa, Homo sapiens
  CDR3 for beta chain variable domain of TCR clone 278906 (TRBV10-2, TRBJ1-6)
RASSENRGSSYNSPLYF

SEQ ID NO: 557813 - protein, 14 aa, Homo sapiens
  CDR3 for alpha chain variable domain of TCR clone 278907 (TRAV19, TRAJ49)
CALREGNTGNQFYF

SEQ ID NO: 557814 - protein, 13 aa, Homo sapiens
  CDR3 for beta chain variable domain of TCR clone 278907 (TRBV7-2, TRBJ2-2)
CASSSVRAGELFF

SEQ ID NO: 557815 - protein, 15 aa, Homo sapiens
  CDR3 for alpha chain variable domain of TCR clone 278908 (TRAV16, TRAJ57)
CALSGGQGGSEKLVF

SEQ ID NO: 557816 - protein, 15 aa, Homo sapiens
  CDR3 for beta chain variable domain of TCR clone 278908 (TRBV20-1, TRBJ2-7)
CSARDRVSGMDEQYF

SEQ ID NO: 557817 - protein, 13 aa, Homo sapiens
  CDR3 for alpha chain variable domain of TCR clone 278909 (TRAV8-6, TRAJ37)
CAVSAGNTGKLIF

SEQ ID NO: 557818 - protein, 18 aa, Homo sapiens
  CDR3 for beta chain variable domain of TCR clone 278909 (TRBV25-1, TRBJ1-2)
CASSGLQNGQGLIFGYTF

SEQ ID NO: 557819 - protein, 15 aa, Homo sapiens
  CDR3 for alpha chain variable domain of TCR clone 278910 (TRAV17, TRAJ22)
CATVAPSGSARQLTF

SEQ ID NO: 557820 - protein, 16 aa, Homo sapiens
  CDR3 for beta chain variable domain of TCR clone 278910 (TRBV20-1, TRBJ2-3)
CSGEAGLAGGQDTQYF

SEQ ID NO: 557821 - protein, 16 aa, Homo sapiens
  CDR3 for alpha chain variable domain of TCR clone 278911 (TRAV14/DV4, TRAJ20)
CAMREGRSRDDYKLSF

SEQ ID NO: 557822 - protein, 17 aa, Homo sapiens
  CDR3 for beta chain variable domain of TCR clone 278911 (TRBV15, TRBJ1-1)
CAASRVGGADGDTEAFF

SEQ ID NO: 557823 - protein, 16 aa, Homo sapiens
  CDR3 for alpha chain variable domain of TCR clone 278912 (TRAV12-2, TRAJ10)
CAVNRVLTGGGNKLTF

SEQ ID NO: 557824 - protein, 16 aa, Homo sapiens
  CDR3 for beta chain variable domain of TCR clone 278912 (TRBV12-5, TRBJ2-5)
CDSGPRTSGNQETQYF

SEQ ID NO: 557825 - protein, 14 aa, Homo sapiens
  CDR3 for alpha chain variable domain of TCR clone 278913 (TRAV1-2, TRAJ15)
CAVRDRQAGTALIF

SEQ ID NO: 557826 - protein, 14 aa, Homo sapiens
  CDR3 for beta chain variable domain of TCR clone 278913 (TRBV5-1, TRBJ1-1)
CASSLTRRSTEAFF

SEQ ID NO: 557827 - protein, 14 aa, Homo sapiens
  CDR3 for alpha chain variable domain of TCR clone 278914 (TRAV20, TRAJ42)
CAVQAGGSQGNLIF

SEQ ID NO: 557828 - protein, 14 aa, Homo sapiens
  CDR3 for beta chain variable domain of TCR clone 278914 (TRBV28, TRBJ1-2)
CASRIQGTNYGYTF

SEQ ID NO: 557829 - protein, 13 aa, Homo sapiens
  CDR3 for alpha chain variable domain of TCR clone 278915 (TRAV12-3, TRAJ40)
CAMSDSGTYKYIF

SEQ ID NO: 557830 - protein, 14 aa, Homo sapiens
  CDR3 for beta chain variable domain of TCR clone 278915 (TRBV7-2, TRBJ1-5)
CASGTQGAGQPQHF

SEQ ID NO: 557831 - protein, 11 aa, Homo sapiens
  CDR3 for alpha chain variable domain of TCR clone 278916 (TRAV1-2, TRAJ20)
CAVANDYKLSF

SEQ ID NO: 557832 - protein, 14 aa, Homo sapiens
  CDR3 for beta chain variable domain of TCR clone 278916 (TRBV10-3, TRBJ2-2)
CAISEVSHSGELFF

SEQ ID NO: 557833 - protein, 17 aa, Homo sapiens
  CDR3 for alpha chain variable domain of TCR clone 278917 (TRAV26-1, TRAJ27)
CIVSTPWINTNAGKSTF

SEQ ID NO: 557834 - protein, 16 aa, Homo sapiens
  CDR3 for beta chain variable domain of TCR clone 278917 (TRBV7-9, TRBJ2-1)
CASSVDPGLAIDEQFF

SEQ ID NO: 557835 - protein, 13 aa, Homo sapiens
  CDR3 for alpha chain variable domain of TCR clone 278918 (TRAV1-2, TRAJ9)
CAALNTVGFKTIF

SEQ ID NO: 557836 - protein, 20 aa, Homo sapiens
  CDR3 for beta chain variable domain of TCR clone 278918 (TRBV28, TRBJ2-1)
CASTPIGRSPGLAGGNEQFF

SEQ ID NO: 557837 - protein, 16 aa, Homo sapiens
  CDR3 for alpha chain variable domain of TCR clone 278919 (TRAV3, TRAJ37)
CAVRGKGSGNTGKLIF

SEQ ID NO: 557838 - protein, 15 aa, Homo sapiens
  CDR3 for beta chain variable domain of TCR clone 278919 (TRBV20-1, TRBJ2-1)
CSARGIGGTYNEQFF

SEQ ID NO: 557839 - protein, 11 aa, Homo sapiens
  CDR3 for alpha chain variable domain of TCR clone 278920 (TRAV8-4, TRAJ20)
CAVTNVLTTTS

SEQ ID NO: 557840 - protein, 13 aa, Homo sapiens
  CDR3 for beta chain variable domain of TCR clone 278920 (TRBV2, TRBJ1-1)
CASSVLMNTEAFF

SEQ ID NO: 557841 - protein, 18 aa, Homo sapiens
  CDR3 for alpha chain variable domain of TCR clone 278921 (TRAV13-1, TRAJ52)
CAATNPNAGGTSYGKLTF

SEQ ID NO: 557842 - protein, 11 aa, Homo sapiens
  CDR3 for beta chain variable domain of TCR clone 278921 (TRBV29-1, TRBJ2-5)
CSEDRTGTQYF

SEQ ID NO: 557843 - protein, 12 aa, Homo sapiens
  CDR3 for alpha chain variable domain of TCR clone 278922 (TRAV27, TRAJ36)
CAGMTGANNLFF

SEQ ID NO: 557844 - protein, 12 aa, Homo sapiens
  CDR3 for beta chain variable domain of TCR clone 278922 (TRBV28, TRBJ2-3)
CASSLYRDTQYF

SEQ ID NO: 557845 - protein, 16 aa, Homo sapiens
  CDR3 for alpha chain variable domain of TCR clone 278923 (TRAV12-2, TRAJ18)
CAVTTARGSTLGRLYF

SEQ ID NO: 557846 - protein, 13 aa, Homo sapiens
  CDR3 for beta chain variable domain of TCR clone 278923 (TRBV19, TRBJ2-3)
CATWDKITDTQYF

SEQ ID NO: 557847 - protein, 10 aa, Homo sapiens
  CDR3 for alpha chain variable domain of TCR clone 278924 (TRAV26-1, TRAJ48)
SNVGNEKLTF

SEQ ID NO: 557848 - protein, 14 aa, Homo sapiens
  CDR3 for beta chain variable domain of TCR clone 278924 (TRBV13, TRBJ2-7)
CASSLKGASYEQYF

SEQ ID NO: 557849 - protein, 22 aa, Homo sapiens
  CDR3 for alpha chain variable domain of TCR clone 278925 (TRAV1-1, TRAJ34)
LLQELQMKDSASYLQNTDKLIY

SEQ ID NO: 557850 - protein, 14 aa, Homo sapiens
  CDR3 for beta chain variable domain of TCR clone 278925 (TRBV12-5, TRBJ2-5)
CASGSRTHQETQYF

SEQ ID NO: 557851 - protein, 17 aa, Homo sapiens
  CDR3 for alpha chain variable domain of TCR clone 278926 (TRAV3, TRAJ28)
CAVREAYSGAGSYRLTF

SEQ ID NO: 557852 - protein, 11 aa, Homo sapiens
  CDR3 for beta chain variable domain of TCR clone 278926 (TRBV11-2, TRBJ2-2)
CASSLPGELFF

SEQ ID NO: 557853 - protein, 14 aa, Homo sapiens
  CDR3 for alpha chain variable domain of TCR clone 278927 (TRAV12-2, TRAJ17)
CAVLFKAAVNKLTF

SEQ ID NO: 557854 - protein, 14 aa, Homo sapiens
  CDR3 for beta chain variable domain of TCR clone 278927 (TRBV7-8, TRBJ2-5)
CASSATGGQETQYF

SEQ ID NO: 557855 - protein, 13 aa, Homo sapiens
  CDR3 for alpha chain variable domain of TCR clone 278928 (TRAV27, TRAJ42)
CAGARGSQGHLIF

SEQ ID NO: 557856 - protein, 14 aa, Homo sapiens
  CDR3 for beta chain variable domain of TCR clone 278928 (TRBV20-1, TRBJ1-1)
CSAQTRIGGTEAFY

SEQ ID NO: 557857 - protein, 14 aa, Homo sapiens
  CDR3 for alpha chain variable domain of TCR clone 278929 (TRAV20, TRAJ42)
CAVQAGGSQGKLNF

SEQ ID NO: 557858 - protein, 14 aa, Homo sapiens
  CDR3 for beta chain variable domain of TCR clone 278929 (TRBV28, TRBJ1-2)
CASRIQGANYGYTF

SEQ ID NO: 557859 - protein, 14 aa, Homo sapiens
  CDR3 for alpha chain variable domain of TCR clone 278930 (TRAV12-2, TRAJ17)
CAALFKAAGNKLTF

SEQ ID NO: 557860 - protein, 16 aa, Homo sapiens
  CDR3 for beta chain variable domain of TCR clone 278930 (TRBV20-1, TRBJ2-2)
CSASASGIPGAGELVF

SEQ ID NO: 557861 - protein, 19 aa, Homo sapiens
  CDR3 for alpha chain variable domain of TCR clone 278931 (TRAV2, TRAJ20)
ILQVREADAAVYRDCKLSF

SEQ ID NO: 557862 - protein, 13 aa, Homo sapiens
  CDR3 for beta chain variable domain of TCR clone 278931 (TRBV15, TRBJ1-6)
CATSGGLNSPLHS

SEQ ID NO: 557863 - protein, 12 aa, Homo sapiens
  CDR3 for alpha chain variable domain of TCR clone 278932 (TRAV27, TRAJ35)
CAGADFGNVLHC

SEQ ID NO: 557864 - protein, 16 aa, Homo sapiens
  CDR3 for beta chain variable domain of TCR clone 278932 (TRBV6-1, TRBJ2-1)
CASILRQGSSYNEHFF

SEQ ID NO: 557865 - protein, 21 aa, Homo sapiens
  CDR3 for alpha chain variable domain of TCR clone 278933 (TRAV23/DV6, TRAJ30)
PSLETQPPTSVQQARDDKIIF

SEQ ID NO: 557866 - protein, 11 aa, Homo sapiens
  CDR3 for beta chain variable domain of TCR clone 278933 (TRBV9, TRBJ2-2)
CASSLVTGELF

SEQ ID NO: 557867 - protein, 13 aa, Homo sapiens
  CDR3 for alpha chain variable domain of TCR clone 278934 (TRAV8-3, TRAJ28)
CAVGAVGSYQLTF

SEQ ID NO: 557868 - protein, 17 aa, Homo sapiens
  CDR3 for beta chain variable domain of TCR clone 278934 (TRBV20-1, TRBJ2-1)
CSAPPRLAGTRYNEQFF

SEQ ID NO: 557869 - protein, 16 aa, Homo sapiens
  CDR3 for alpha chain variable domain of TCR clone 278935 (TRAV3, TRAJ37)
CAVRGKGSGNTGKLIF

SEQ ID NO: 557870 - protein, 16 aa, Homo sapiens
  CDR3 for beta chain variable domain of TCR clone 278935 (TRBV5-1, TRBJ1-1)
CASSSGGNSLNSEAFF

SEQ ID NO: 557871 - protein, 13 aa, Homo sapiens
  CDR3 for alpha chain variable domain of TCR clone 278936 (TRAV21, TRAJ57)
CAVTQGGSEKLVF

SEQ ID NO: 557872 - protein, 17 aa, Homo sapiens
  CDR3 for beta chain variable domain of TCR clone 278936 (TRBV10-3, TRBJ2-6)
CAISELAQSSGANVLTF

SEQ ID NO: 557873 - protein, 14 aa, Homo sapiens
  CDR3 for alpha chain variable domain of TCR clone 278937 (TRAV3, TRAJ9)
CAVRLNTGGFKTIF

SEQ ID NO: 557874 - protein, 13 aa, Homo sapiens
  CDR3 for beta chain variable domain of TCR clone 278937 (TRBV25-1, TRBJ2-7)
CASSEDGDYEQYF

SEQ ID NO: 557875 - protein, 12 aa, Homo sapiens
  CDR3 for alpha chain variable domain of TCR clone 278938 (TRAV8-3, TRAJ41)
CAVALSGYALNF

SEQ ID NO: 557876 - protein, 14 aa, Homo sapiens
  CDR3 for beta chain variable domain of TCR clone 278938 (TRBV7-2, TRBJ2-1)
CASSLGVGYNEQFF

SEQ ID NO: 557877 - protein, 15 aa, Homo sapiens
  CDR3 for alpha chain variable domain of TCR clone 278939 (TRAV8-3, TRAJ3)
CAVVTGYSSASKIIF

SEQ ID NO: 557878 - protein, 17 aa, Homo sapiens
  CDR3 for beta chain variable domain of TCR clone 278939 (TRBV13, TRBJ2-3)
CASSLSGVAGGRNTQYF

SEQ ID NO: 557879 - protein, 13 aa, Homo sapiens
  CDR3 for alpha chain variable domain of TCR clone 278940 (TRAV8-3, TRAJ28)
CAVGAVGSYQLTF

SEQ ID NO: 557880 - protein, 15 aa, Homo sapiens
  CDR3 for beta chain variable domain of TCR clone 278940 (TRBV28, TRBJ2-5)
CASSPGQGSEETQYF

SEQ ID NO: 557881 - protein, 15 aa, Homo sapiens
  CDR3 for alpha chain variable domain of TCR clone 278941 (TRAV21, TRAJ38)
CAVRQDAGDNRKLIW

SEQ ID NO: 557882 - protein, 16 aa, Homo sapiens
  CDR3 for beta chain variable domain of TCR clone 278941 (TRBV4-2, TRBJ1-1)
CASRPLDGGGDTEAFF

SEQ ID NO: 557883 - protein, 12 aa, Homo sapiens
  CDR3 for alpha chain variable domain of TCR clone 278942 (TRAV12-3, TRAJ17)
CAMTLTGNKLTF

SEQ ID NO: 557884 - protein, 13 aa, Homo sapiens
  CDR3 for beta chain variable domain of TCR clone 278942 (TRBV11-3, TRBJ2-5)
CASSRQGGETQYF

SEQ ID NO: 557885 - protein, 17 aa, Homo sapiens
  CDR3 for alpha chain variable domain of TCR clone 278943 (TRAV3, TRAJ6)
CAVRDGPRAGGSYMPTF

SEQ ID NO: 557886 - protein, 15 aa, Homo sapiens
  CDR3 for beta chain variable domain of TCR clone 278943 (TRBV7-9, TRBJ1-6)
CASSSPGRGNSPLHF

SEQ ID NO: 557887 - protein, 10 aa, Homo sapiens
  CDR3 for alpha chain variable domain of TCR clone 278944 (TRAV12-3, TRAJ49)
CAMNDDPFYF

SEQ ID NO: 557888 - protein, 15 aa, Homo sapiens
  CDR3 for beta chain variable domain of TCR clone 278944 (TRBV20-1, TRBJ2-7)
CSARDRVSGMDEQYF

SEQ ID NO: 557889 - protein, 14 aa, Homo sapiens
  CDR3 for alpha chain variable domain of TCR clone 278945 (TRAV17, TRAJ22)
CATSPSGSARQLTF

SEQ ID NO: 557890 - protein, 15 aa, Homo sapiens
  CDR3 for beta chain variable domain of TCR clone 278945 (TRBV6-3, TRBJ2-7)
RASGSPGTVFYEQYF

SEQ ID NO: 557891 - protein, 15 aa, Homo sapiens
  CDR3 for alpha chain variable domain of TCR clone 278946 (TRAV1-1, TRAJ23)
CAVREGDNQGGKLIF

SEQ ID NO: 557892 - protein, 13 aa, Homo sapiens
  CDR3 for beta chain variable domain of TCR clone 278946 (TRBV12-4, TRBJ2-3)
CASSSPLGGTQYF

SEQ ID NO: 557893 - protein, 11 aa, Homo sapiens
  CDR3 for alpha chain variable domain of TCR clone 278947 (TRAV13-1, TRAJ6)
CATLGSYIPTF

SEQ ID NO: 557894 - protein, 17 aa, Homo sapiens
  CDR3 for beta chain variable domain of TCR clone 278947 (TRBV7-2, TRBJ1-4)
CASSFRAGPTTNEKLFF

SEQ ID NO: 557895 - protein, 23 aa, Homo sapiens
  CDR3 for alpha chain variable domain of TCR clone 278948 (TRAV26-1, TRAJ38)
CIADNAGNNHIQNPDPAVYTLRD

SEQ ID NO: 557896 - protein, 13 aa, Homo sapiens
  CDR3 for beta chain variable domain of TCR clone 278948 (TRBV5-4, TRBJ1-1)
CASSVDLGTEAFF

SEQ ID NO: 557897 - protein, 14 aa, Homo sapiens
  CDR3 for alpha chain variable domain of TCR clone 278949 (TRAV12-1, TRAJ17)
CVVNYKAAGNKLTF

SEQ ID NO: 557898 - protein, 17 aa, Homo sapiens
  CDR3 for beta chain variable domain of TCR clone 278949 (TRBV20-1, TRBJ2-1)
CSASSSGLGGSYDEQFF

SEQ ID NO: 557899 - protein, 14 aa, Homo sapiens
  CDR3 for alpha chain variable domain of TCR clone 278950 (TRAV13-1, TRAJ44)
CAAKATGTASKLTF

SEQ ID NO: 557900 - protein, 15 aa, Homo sapiens
  CDR3 for beta chain variable domain of TCR clone 278950 (TRBV6-3, TRBJ2-7)
CASSSPGAVFYEQYF

SEQ ID NO: 557901 - protein, 13 aa, Homo sapiens
  CDR3 for alpha chain variable domain of TCR clone 278951 (TRAV12-1, TRAJ42)
CGGVGGSQGNLIF

SEQ ID NO: 557902 - protein, 13 aa, Homo sapiens
  CDR3 for beta chain variable domain of TCR clone 278951 (TRBV2, TRBJ1-5)
CATAGPGNQPQHF

SEQ ID NO: 557903 - protein, 11 aa, Homo sapiens
  CDR3 for alpha chain variable domain of TCR clone 278952 (TRAV2, TRAJ4)
CAVGWYNKLIF

SEQ ID NO: 557904 - protein, 15 aa, Homo sapiens
  CDR3 for beta chain variable domain of TCR clone 278952 (TRBV7-2, TRBJ2-2)
CASNFQRGETGELFF

SEQ ID NO: 557905 - protein, 14 aa, Homo sapiens
  CDR3 for alpha chain variable domain of TCR clone 278953 (TRAV12-2, TRAJ45)
FAVYSGGGADGLTF

SEQ ID NO: 557906 - protein, 15 aa, Homo sapiens
  CDR3 for beta chain variable domain of TCR clone 278953 (TRBV4-1, TRBJ1-4)
CASSDTGGTNEKLFF

SEQ ID NO: 557907 - protein, 16 aa, Homo sapiens
  CDR3 for alpha chain variable domain of TCR clone 278954 (TRAV3, TRAJ3)
CAVRDRAKSSTSKIIF

SEQ ID NO: 557908 - protein, 13 aa, Homo sapiens
  CDR3 for beta chain variable domain of TCR clone 278954 (TRBV10-3, TRBJ2-7)
CASKLAVNYEQYF

SEQ ID NO: 557909 - protein, 14 aa, Homo sapiens
  CDR3 for alpha chain variable domain of TCR clone 278955 (TRAV16, TRAJ26)
FALSSANYGQNFVF

SEQ ID NO: 557910 - protein, 12 aa, Homo sapiens
  CDR3 for beta chain variable domain of TCR clone 278955 (TRBV6-5, TRBJ2-2)
CASRTGTGELFF

SEQ ID NO: 557911 - protein, 17 aa, Homo sapiens
  CDR3 for alpha chain variable domain of TCR clone 278956 (TRAV3, TRAJ6)
CAVRDGPRAGGSYIPTY

SEQ ID NO: 557912 - protein, 20 aa, Homo sapiens
  CDR3 for beta chain variable domain of TCR clone 278956 (TRBV28, TRBJ2-1)
CASTPIGRSPGLAGGNEQFF

SEQ ID NO: 557913 - protein, 21 aa, Homo sapiens
  CDR3 for alpha chain variable domain of TCR clone 278957 (TRAV3, TRAJ17)
CAVRARRGGRSCRQEAHCGRR

SEQ ID NO: 557914 - protein, 14 aa, Homo sapiens
  CDR3 for beta chain variable domain of TCR clone 278957 (TRBV4-1, TRBJ2-2)
CASSQAVNTGELFF

SEQ ID NO: 557915 - protein, 11 aa, Homo sapiens
  CDR3 for alpha chain variable domain of TCR clone 278958 (TRAV21, TRAJ41)
CAVRSGYALHF

SEQ ID NO: 557916 - protein, 18 aa, Homo sapiens
  CDR3 for beta chain variable domain of TCR clone 278958 (TRBV11-2, TRBJ1-3)
CASTPRVTTLGSGNTIYF

SEQ ID NO: 557917 - protein, 14 aa, Homo sapiens
  CDR3 for alpha chain variable domain of TCR clone 278959 (TRAV17, TRAJ35)
FATDRPGFGNVLHC

SEQ ID NO: 557918 - protein, 19 aa, Homo sapiens
  CDR3 for beta chain variable domain of TCR clone 278959 (TRBV11-3, TRBJ2-2)
CASSTRPGAKTTNTGELFF

SEQ ID NO: 557919 - protein, 14 aa, Homo sapiens
  CDR3 for alpha chain variable domain of TCR clone 278960 (TRAV1-2, TRAJ16)
CAVNRFSDGQKLLF

SEQ ID NO: 557920 - protein, 12 aa, Homo sapiens
  CDR3 for beta chain variable domain of TCR clone 278960 (TRBV5-1, TRBJ2-7)
CASSFRGYEQYF

SEQ ID NO: 557921 - protein, 14 aa, Homo sapiens
  CDR3 for alpha chain variable domain of TCR clone 278961 (TRAV35, TRAJ33)
CAGSSQDSNYLLIW

SEQ ID NO: 557922 - protein, 15 aa, Homo sapiens
  CDR3 for beta chain variable domain of TCR clone 278961 (TRBV5-1, TRBJ1-4)
FAPAAWKDGNEKLFF

SEQ ID NO: 557923 - protein, 12 aa, Homo sapiens
  CDR3 for alpha chain variable domain of TCR clone 278962 (TRAV16, TRAJ10)
CSRTGGGNKLTF

SEQ ID NO: 557924 - protein, 14 aa, Homo sapiens
  CDR3 for beta chain variable domain of TCR clone 278962 (TRBV20-1, TRBJ2-3)
CSARGGTSTDTQYF

SEQ ID NO: 557925 - protein, 13 aa, Homo sapiens
  CDR3 for alpha chain variable domain of TCR clone 278963 (TRAV27, TRAJ34)
CAGGLDNTDKLIF

SEQ ID NO: 557926 - protein, 14 aa, Homo sapiens
  CDR3 for beta chain variable domain of TCR clone 278963 (TRBV19, TRBJ2-1)
CASPTFVLSGEQFF

SEQ ID NO: 557927 - protein, 15 aa, Homo sapiens
  CDR3 for alpha chain variable domain of TCR clone 278964 (TRAV12-2, TRAJ53)
CAVNGGGGSNYKLTF

SEQ ID NO: 557928 - protein, 14 aa, Homo sapiens
  CDR3 for beta chain variable domain of TCR clone 278964 (TRBV19, TRBJ2-2)
CASSTLHRSGDLFF

SEQ ID NO: 557929 - protein, 14 aa, Homo sapiens
  CDR3 for alpha chain variable domain of TCR clone 278965 (TRAV1-2, TRAJ8)
CAAREDTGFQKLVF

SEQ ID NO: 557930 - protein, 17 aa, Homo sapiens
  CDR3 for beta chain variable domain of TCR clone 278965 (TRBV19, TRBJ2-6)
CASSTGQVFSGANVLTF

SEQ ID NO: 557931 - protein, 14 aa, Homo sapiens
  CDR3 for alpha chain variable domain of TCR clone 278966 (TRAV12-2, TRAJ53)
CAVKGGGSNYKLTF

SEQ ID NO: 557932 - protein, 14 aa, Homo sapiens
  CDR3 for beta chain variable domain of TCR clone 278966 (TRBV7-7, TRBJ2-2)
CATRQDSDTGELFF

SEQ ID NO: 557933 - protein, 13 aa, Homo sapiens
  CDR3 for alpha chain variable domain of TCR clone 278967 (TRAV20, TRAJ37)
YAGCSSNTGKLIF

SEQ ID NO: 557934 - protein, 21 aa, Homo sapiens
  CDR3 for beta chain variable domain of TCR clone 278967 (TRBV4-2, TRBJ2-3)
PCSQKTRPCISVPAAPDTQYF

SEQ ID NO: 557935 - protein, 13 aa, Homo sapiens
  CDR3 for alpha chain variable domain of TCR clone 278968 (TRAV12-1, TRAJ21)
CVVTLYNFNKFYF

SEQ ID NO: 557936 - protein, 16 aa, Homo sapiens
  CDR3 for beta chain variable domain of TCR clone 278968 (TRBV12-5, TRBJ2-5)
CASGPRTSGNQETQYF

SEQ ID NO: 557937 - protein, 12 aa, Homo sapiens
  CDR3 for alpha chain variable domain of TCR clone 278969 (TRAV30, TRAJ43)
CGTEERGNDMRF

SEQ ID NO: 557938 - protein, 11 aa, Homo sapiens
  CDR3 for beta chain variable domain of TCR clone 278969 (TRBV29-1, TRBJ2-5)
CIEDRTGTQYF

SEQ ID NO: 557939 - protein, 14 aa, Homo sapiens
  CDR3 for alpha chain variable domain of TCR clone 278970 (TRAV23/DV6, TRAJ37)
CAASTSSNTGKIIF

SEQ ID NO: 557940 - protein, 15 aa, Homo sapiens
  CDR3 for beta chain variable domain of TCR clone 278970 (TRBV7-9, TRBJ2-7)
CASSPGGGLTYEQYF

SEQ ID NO: 557941 - protein, 18 aa, Homo sapiens
  CDR3 for alpha chain variable domain of TCR clone 278971 (TRAV13-1, TRAJ52)
CAAKNPNAGGTSYGKLTF

SEQ ID NO: 557942 - protein, 14 aa, Homo sapiens
  CDR3 for beta chain variable domain of TCR clone 278971 (TRBV10-2, TRBJ1-5)
CASSSTGRNQPQHF

SEQ ID NO: 557943 - protein, 18 aa, Homo sapiens
  CDR3 for alpha chain variable domain of TCR clone 278972 (TRAV1-2, TRAJ18)
CAVRDMGDRGSTLGRLYF

SEQ ID NO: 557944 - protein, 14 aa, Homo sapiens
  CDR3 for beta chain variable domain of TCR clone 278972 (TRBV7-2, TRBJ2-5)
CASSLFGREETQYF

SEQ ID NO: 557945 - protein, 13 aa, Homo sapiens
  CDR3 for alpha chain variable domain of TCR clone 278973 (TRAV21, TRAJ15)
CAVANQAGTALIF

SEQ ID NO: 557946 - protein, 13 aa, Homo sapiens
  CDR3 for beta chain variable domain of TCR clone 278973 (TRBV12-4, TRBJ2-7)
CASSLSGVYEQYF

SEQ ID NO: 557947 - protein, 15 aa, Homo sapiens
  CDR3 for alpha chain variable domain of TCR clone 278974 (TRAV8-6, TRAJ26)
CAVSDQSPGGQNFVF

SEQ ID NO: 557948 - protein, 12 aa, Homo sapiens
  CDR3 for beta chain variable domain of TCR clone 278974 (TRBV11-2, TRBJ2-2)
CASSLGGGELFF

SEQ ID NO: 557949 - protein, 14 aa, Homo sapiens
  CDR3 for alpha chain variable domain of TCR clone 278975 (TRAV17, TRAJ6)
CATDERRGSYTPTF

SEQ ID NO: 557950 - protein, 13 aa, Homo sapiens
  CDR3 for beta chain variable domain of TCR clone 278975 (TRBV27, TRBJ2-1)
CASSLGRIWGQFF

SEQ ID NO: 557951 - protein, 13 aa, Homo sapiens
  CDR3 for alpha chain variable domain of TCR clone 278976 (TRAV12-1, TRAJ11)
CVVTRGGYSTLTF

SEQ ID NO: 557952 - protein, 13 aa, Homo sapiens
  CDR3 for beta chain variable domain of TCR clone 278976 (TRBV20-1, TRBJ1-2)
CSARDQCAYGYTF

SEQ ID NO: 557953 - protein, 12 aa, Homo sapiens
  CDR3 for alpha chain variable domain of TCR clone 278977 (TRAV25, TRAJ53)
CQRGGSNYKLTF

SEQ ID NO: 557954 - protein, 15 aa, Homo sapiens
  CDR3 for beta chain variable domain of TCR clone 278977 (TRBV5-1, TRBJ2-2)
CASSWTSPNTGELFF

SEQ ID NO: 557955 - protein, 13 aa, Homo sapiens
  CDR3 for alpha chain variable domain of TCR clone 278978 (TRAV1-2, TRAJ9)
CAALNTGGFKTIF

SEQ ID NO: 557956 - protein, 16 aa, Homo sapiens
  CDR3 for beta chain variable domain of TCR clone 278978 (TRBV28, TRBJ2-2)
CASSLEGGSNTEELFF

SEQ ID NO: 557957 - protein, 15 aa, Homo sapiens
  CDR3 for alpha chain variable domain of TCR clone 278979 (TRAV12-3, TRAJ22)
CAMRTISGSARELTF

SEQ ID NO: 557958 - protein, 16 aa, Homo sapiens
  CDR3 for beta chain variable domain of TCR clone 278979 (TRBV20-1, TRBJ2-2)
CSARRPGTGNTGELFF

SEQ ID NO: 557959 - protein, 11 aa, Homo sapiens
  CDR3 for alpha chain variable domain of TCR clone 278980 (TRAV12-1, TRAJ21)
CVVNNFNKFYF

SEQ ID NO: 557960 - protein, 14 aa, Homo sapiens
  CDR3 for beta chain variable domain of TCR clone 278980 (TRBV18, TRBJ2-7)
CASSPRGGGLRAVL

SEQ ID NO: 557961 - protein, 13 aa, Homo sapiens
  CDR3 for alpha chain variable domain of TCR clone 278981 (TRAV23/DV6, TRAJ10)
ASVLTGGGNKLTF

SEQ ID NO: 557962 - protein, 13 aa, Homo sapiens
  CDR3 for beta chain variable domain of TCR clone 278981 (TRBV11-1, TRBJ1-2)
CASVGSWGYGYTL

SEQ ID NO: 557963 - protein, 10 aa, Homo sapiens
  CDR3 for alpha chain variable domain of TCR clone 278982 (TRAV26-1, TRAJ40)
CIAGTYKYIF

SEQ ID NO: 557964 - protein, 18 aa, Homo sapiens
  CDR3 for beta chain variable domain of TCR clone 278982 (TRBV12-4, TRBJ2-2)
CASSLVAGTRGRTGELFF

SEQ ID NO: 557965 - protein, 12 aa, Homo sapiens
  CDR3 for alpha chain variable domain of TCR clone 278983 (TRAV13-1, TRAJ21)
CAAKEGFNKFYF

SEQ ID NO: 557966 - protein, 14 aa, Homo sapiens
  CDR3 for beta chain variable domain of TCR clone 278983 (TRBV18, TRBJ2-7)
CASSTRGGAYEQYF

SEQ ID NO: 557967 - protein, 15 aa, Homo sapiens
  CDR3 for alpha chain variable domain of TCR clone 278984 (TRAV1-2, TRAJ9)
CAVRDDGTGCFKTIF

SEQ ID NO: 557968 - protein, 16 aa, Homo sapiens
  CDR3 for beta chain variable domain of TCR clone 278984 (TRBV7-2, TRBJ1-6)
CASSSFESSYNSPLHF

SEQ ID NO: 557969 - protein, 13 aa, Homo sapiens
  CDR3 for alpha chain variable domain of TCR clone 278985 (TRAV27, TRAJ24)
CAGDRDSWGKLQF

SEQ ID NO: 557970 - protein, 13 aa, Homo sapiens
  CDR3 for beta chain variable domain of TCR clone 278985 (TRBV11-2, TRBJ1-1)
CASGPQTNTEAFF

SEQ ID NO: 557971 - protein, 14 aa, Homo sapiens
  CDR3 for alpha chain variable domain of TCR clone 278986 (TRAV1-2, TRAJ16)
CAVNRFSDGQQLLF

SEQ ID NO: 557972 - protein, 17 aa, Homo sapiens
  CDR3 for beta chain variable domain of TCR clone 278986 (TRBV4-1, TRBJ1-3)
CASSPQRGIRFGNTIYF

SEQ ID NO: 557973 - protein, 14 aa, Homo sapiens
  CDR3 for alpha chain variable domain of TCR clone 278987 (TRAV19, TRAJ5)
CALKKDTGRRALTF

SEQ ID NO: 557974 - protein, 15 aa, Homo sapiens
  CDR3 for beta chain variable domain of TCR clone 278987 (TRBV2, TRBJ2-5)
CASSDAGTRQETQYF

SEQ ID NO: 557975 - protein, 14 aa, Homo sapiens
  CDR3 for alpha chain variable domain of TCR clone 278988 (TRAV13-1, TRAJ35)
CAASKGGFGNVLHC

SEQ ID NO: 557976 - protein, 16 aa, Homo sapiens
  CDR3 for beta chain variable domain of TCR clone 278988 (TRBV2, TRBJ2-3)
CQHRGAPRRCTDTQYF

SEQ ID NO: 557977 - protein, 17 aa, Homo sapiens
  CDR3 for alpha chain variable domain of TCR clone 278989 (TRAV22, TRAJ53)
CAVEFSNSGGSNYKLTF

SEQ ID NO: 557978 - protein, 15 aa, Homo sapiens
  CDR3 for beta chain variable domain of TCR clone 278989 (TRBV29-1, TRBJ2-1)
CRVPTGLALYNEQFF

SEQ ID NO: 557979 - protein, 23 aa, Homo sapiens
  CDR3 for alpha chain variable domain of TCR clone 278990 (TRAV3, )
CAVRDCLNAGNNNIQNPDPAVYH

SEQ ID NO: 557980 - protein, 19 aa, Homo sapiens
  CDR3 for beta chain variable domain of TCR clone 278990 (TRBV7-2, TRBJ2-3)
CASSFLSRNWGGGTDTQYF

SEQ ID NO: 557981 - protein, 15 aa, Homo sapiens
  CDR3 for alpha chain variable domain of TCR clone 278991 (TRAV12-3, TRAJ6)
CAMSATLGGSYIPTF

SEQ ID NO: 557982 - protein, 16 aa, Homo sapiens
  CDR3 for beta chain variable domain of TCR clone 278991 (TRBV13, TRBJ2-2)
CASSPRTGEHTGELFF

SEQ ID NO: 557983 - protein, 15 aa, Homo sapiens
  CDR3 for alpha chain variable domain of TCR clone 278992 (TRAV17, TRAJ57)
CATGPSQGASEKLVF

SEQ ID NO: 557984 - protein, 16 aa, Homo sapiens
  CDR3 for beta chain variable domain of TCR clone 278992 (TRBV12-4, TRBJ1-5)
CASSRPVGGSNQPQHF

SEQ ID NO: 557985 - protein, 14 aa, Homo sapiens
  CDR3 for alpha chain variable domain of TCR clone 278993 (TRAV1-2, TRAJ15)
CAVRDRQAGTALIF

SEQ ID NO: 557986 - protein, 13 aa, Homo sapiens
  CDR3 for beta chain variable domain of TCR clone 278993 (TRBV19, TRBJ1-2)
CASSVPGQDGYTF

SEQ ID NO: 557987 - protein, 14 aa, Homo sapiens
  CDR3 for alpha chain variable domain of TCR clone 278994 (TRAV10, TRAJ34)
CVVSRGGDTDKLIV

SEQ ID NO: 557988 - protein, 17 aa, Homo sapiens
  CDR3 for beta chain variable domain of TCR clone 278994 (TRBV6-3, TRBJ2-3)
CASRRPLGGGGTDTQYF

SEQ ID NO: 557989 - protein, 11 aa, Homo sapiens
  CDR3 for alpha chain variable domain of TCR clone 278995 (TRAV12-1, TRAJ26)
CVVAYGQNFVF

SEQ ID NO: 557990 - protein, 15 aa, Homo sapiens
  CDR3 for beta chain variable domain of TCR clone 278995 (TRBV11-2, TRBJ2-1)
CASSLGPDSYNEQFF

SEQ ID NO: 557991 - protein, 12 aa, Homo sapiens
  CDR3 for alpha chain variable domain of TCR clone 278996 (TRAV8-3, TRAJ27)
CAVGAEADKSTF

SEQ ID NO: 557992 - protein, 14 aa, Homo sapiens
  CDR3 for beta chain variable domain of TCR clone 278996 (TRBV2, TRBJ2-1)
CASRLIVGHDEQFF

SEQ ID NO: 557993 - protein, 19 aa, Homo sapiens
  CDR3 for alpha chain variable domain of TCR clone 278997 (TRAV26-1, TRAJ52)
CIVRAHRNAGGTSYGKLTF

SEQ ID NO: 557994 - protein, 15 aa, Homo sapiens
  CDR3 for beta chain variable domain of TCR clone 278997 (TRBV12-4, TRBJ2-5)
CASSPPRGLQETQYF

SEQ ID NO: 557995 - protein, 14 aa, Homo sapiens
  CDR3 for alpha chain variable domain of TCR clone 278998 (TRAV2, TRAJ9)
CAVEDRSGGFKPIF

SEQ ID NO: 557996 - protein, 15 aa, Homo sapiens
  CDR3 for beta chain variable domain of TCR clone 278998 (TRBV5-6, TRBJ1-5)
CASSYGKLWDQPQHF

SEQ ID NO: 557997 - protein, 14 aa, Homo sapiens
  CDR3 for alpha chain variable domain of TCR clone 278999 (TRAV17, TRAJ57)
CATDPQGGSEKLVV

SEQ ID NO: 557998 - protein, 14 aa, Homo sapiens
  CDR3 for beta chain variable domain of TCR clone 278999 (TRBV27, TRBJ2-5)
CASSSLKGWETQYF

SEQ ID NO: 557999 - protein, 15 aa, Homo sapiens
  CDR3 for alpha chain variable domain of TCR clone 279000 (TRAV1-2, TRAJ35)
CDVRDPGGFGNVLHC

SEQ ID NO: 558000 - protein, 14 aa, Homo sapiens
  CDR3 for beta chain variable domain of TCR clone 279000 (TRBV5-1, TRBJ2-1)
CASSLDDRFDEQFF

SEQ ID NO: 558001 - protein, 13 aa, Homo sapiens
  CDR3 for alpha chain variable domain of TCR clone 279001 (TRAV8-3, TRAJ4)
WVFYSGGYNKLIF

SEQ ID NO: 558002 - protein, 14 aa, Homo sapiens
  CDR3 for beta chain variable domain of TCR clone 279001 (TRBV7-9, TRBJ2-3)
CASSLGDGTDTQYF

SEQ ID NO: 558003 - protein, 12 aa, Homo sapiens
  CDR3 for alpha chain variable domain of TCR clone 279002 (TRAV12-1, TRAJ40)
CVFYSGTYKYIF

SEQ ID NO: 558004 - protein, 15 aa, Homo sapiens
  CDR3 for beta chain variable domain of TCR clone 279002 (TRBV19, TRBJ2-7)
CASSPAGSGEALRYF

SEQ ID NO: 558005 - protein, 14 aa, Homo sapiens
  CDR3 for alpha chain variable domain of TCR clone 279003 (TRAV13-2, TRAJ32)
CAESLGGATNKLIF

SEQ ID NO: 558006 - protein, 15 aa, Homo sapiens
  CDR3 for beta chain variable domain of TCR clone 279003 (TRBV20-1, TRBJ1-2)
RSARDSRGRNYGYTF

SEQ ID NO: 558007 - protein, 13 aa, Homo sapiens
  CDR3 for alpha chain variable domain of TCR clone 279004 (TRAV38-1, TRAJ52)
CAFRGTSYGKLTF

SEQ ID NO: 558008 - protein, 15 aa, Homo sapiens
  CDR3 for beta chain variable domain of TCR clone 279004 (TRBV7-8, TRBJ2-5)
CASSDAAGFQETQYF

SEQ ID NO: 558009 - protein, 15 aa, Homo sapiens
  CDR3 for alpha chain variable domain of TCR clone 279005 (TRAV3, TRAJ5)
CAVSDLDMGRRALTF

SEQ ID NO: 558010 - protein, 13 aa, Homo sapiens
  CDR3 for beta chain variable domain of TCR clone 279005 (TRBV12-4, TRBJ2-7)
CASSPTETYEQYF

SEQ ID NO: 558011 - protein, 15 aa, Homo sapiens
  CDR3 for alpha chain variable domain of TCR clone 279006 (TRAV26-1, TRAJ29)
FIVRVEGSGNTPLIF

SEQ ID NO: 558012 - protein, 15 aa, Homo sapiens
  CDR3 for beta chain variable domain of TCR clone 279006 (TRBV7-9, TRBJ1-5)
CASSQGHQPNQPQHF

SEQ ID NO: 558013 - protein, 13 aa, Homo sapiens
  CDR3 for alpha chain variable domain of TCR clone 279007 (TRAV12-2, TRAJ20)
CAVNRFDDYKLSF

SEQ ID NO: 558014 - protein, 15 aa, Homo sapiens
  CDR3 for beta chain variable domain of TCR clone 279007 (TRBV4-1, TRBJ1-4)
CASSDTGGTNEKLFF

SEQ ID NO: 558015 - protein, 16 aa, Homo sapiens
  CDR3 for alpha chain variable domain of TCR clone 279008 (TRAV12-2, TRAJ43)
CAGDDMRFGAGTRLTV

SEQ ID NO: 558016 - protein, 15 aa, Homo sapiens
  CDR3 for beta chain variable domain of TCR clone 279008 (TRBV6-5, TRBJ2-1)
CASSYDAGAGNEQFF

SEQ ID NO: 558017 - protein, 13 aa, Homo sapiens
  CDR3 for alpha chain variable domain of TCR clone 279009 (TRAV12-2, TRAJ22)
CAVRFSGCKATDL

SEQ ID NO: 558018 - protein, 13 aa, Homo sapiens
  CDR3 for beta chain variable domain of TCR clone 279009 (TRBV6-1, TRBJ2-1)
CASTGTGLNEQFF

SEQ ID NO: 558019 - protein, 12 aa, Homo sapiens
  CDR3 for alpha chain variable domain of TCR clone 279010 (TRAV3, TRAJ27)
CAVRDGTGKSTF

SEQ ID NO: 558020 - protein, 15 aa, Homo sapiens
  CDR3 for beta chain variable domain of TCR clone 279010 (TRBV13, TRBJ2-2)
CASGYRGRRTGELFF

SEQ ID NO: 558021 - protein, 14 aa, Homo sapiens
  CDR3 for alpha chain variable domain of TCR clone 279011 (TRAV16, TRAJ33)
CALSAMDSNYKLIW

SEQ ID NO: 558022 - protein, 12 aa, Homo sapiens
  CDR3 for beta chain variable domain of TCR clone 279011 (TRBV28, TRBJ2-6)
CAIQAGANDLTF

SEQ ID NO: 558023 - protein, 16 aa, Homo sapiens
  CDR3 for alpha chain variable domain of TCR clone 279012 (TRAV30, TRAJ24)
CGTEIVDADSWGKFQF

SEQ ID NO: 558024 - protein, 15 aa, Homo sapiens
  CDR3 for beta chain variable domain of TCR clone 279012 (TRBV7-9, TRBJ1-4)
CASSARTGVNEKLFF

SEQ ID NO: 558025 - protein, 14 aa, Homo sapiens
  CDR3 for alpha chain variable domain of TCR clone 279013 (TRAV13-1, TRAJ44)
CAAKATGTASKRTF

SEQ ID NO: 558026 - protein, 17 aa, Homo sapiens
  CDR3 for beta chain variable domain of TCR clone 279013 (TRBV7-3, TRBJ2-3)
RASSLMKRMRGADTQYS

SEQ ID NO: 558027 - protein, 12 aa, Homo sapiens
  CDR3 for alpha chain variable domain of TCR clone 279014 (TRAV17, TRAJ39)
CATGAAGNMLTF

SEQ ID NO: 558028 - protein, 14 aa, Homo sapiens
  CDR3 for beta chain variable domain of TCR clone 279014 (TRBV7-9, TRBJ2-2)
CASSLVQDTGELFF

SEQ ID NO: 558029 - protein, 14 aa, Homo sapiens
  CDR3 for alpha chain variable domain of TCR clone 279015 (TRAV8-4, TRAJ38)
CARLNAGNNRKLIW

SEQ ID NO: 558030 - protein, 12 aa, Homo sapiens
  CDR3 for beta chain variable domain of TCR clone 279015 (TRBV6-1, TRBJ2-7)
CARSEPLYEQYF

SEQ ID NO: 558031 - protein, 16 aa, Homo sapiens
  CDR3 for alpha chain variable domain of TCR clone 279016 (TRAV12-1, TRAJ12)
CVVNTLLMDSSYKLIF

SEQ ID NO: 558032 - protein, 13 aa, Homo sapiens
  CDR3 for beta chain variable domain of TCR clone 279016 (TRBV11-3, TRBJ2-1)
CASSSEAYNEQFF

SEQ ID NO: 558033 - protein, 14 aa, Homo sapiens
  CDR3 for alpha chain variable domain of TCR clone 279017 (TRAV8-2, TRAJ4)
CVVSPSGGYNKLIF

SEQ ID NO: 558034 - protein, 15 aa, Homo sapiens
  CDR3 for beta chain variable domain of TCR clone 279017 (TRBV4-1, TRBJ1-4)
CASSDTGGTNEILFF

SEQ ID NO: 558035 - protein, 17 aa, Homo sapiens
  CDR3 for alpha chain variable domain of TCR clone 279018 (TRAV1-1, TRAJ28)
CAVDPAYSGAGSYQLTF

SEQ ID NO: 558036 - protein, 16 aa, Homo sapiens
  CDR3 for beta chain variable domain of TCR clone 279018 (TRBV19, TRBJ2-1)
CASSKAGPSSYNEQFF

SEQ ID NO: 558037 - protein, 17 aa, Homo sapiens
  CDR3 for alpha chain variable domain of TCR clone 279019 (TRAV4, TRAJ42)
CLVGVLNYGGSQGNLIF

SEQ ID NO: 558038 - protein, 13 aa, Homo sapiens
  CDR3 for beta chain variable domain of TCR clone 279019 (TRBV7-3, TRBJ1-1)
CASSLTQGTEAFF

SEQ ID NO: 558039 - protein, 14 aa, Homo sapiens
  CDR3 for alpha chain variable domain of TCR clone 279020 (TRAV10, TRAJ15)
CVVSASQAGTALLF

SEQ ID NO: 558040 - protein, 16 aa, Homo sapiens
  CDR3 for beta chain variable domain of TCR clone 279020 (TRBV2, TRBJ2-5)
CASSTLRDRDRETQYF

SEQ ID NO: 558041 - protein, 12 aa, Homo sapiens
  CDR3 for alpha chain variable domain of TCR clone 279021 (TRAV6, TRAJ34)
CALHRGTDKLIF

SEQ ID NO: 558042 - protein, 14 aa, Homo sapiens
  CDR3 for beta chain variable domain of TCR clone 279021 (TRBV12-5, TRBJ2-5)
CASGSRTHQETQYF

SEQ ID NO: 558043 - protein, 15 aa, Homo sapiens
  CDR3 for alpha chain variable domain of TCR clone 279022 (TRAV26-1, TRAJ39)
CIVRSYNNAGNMLTF

SEQ ID NO: 558044 - protein, 16 aa, Homo sapiens
  CDR3 for beta chain variable domain of TCR clone 279022 (TRBV10-2, TRBJ2-7)
CASSESPGSSGFEQYF

SEQ ID NO: 558045 - protein, 14 aa, Homo sapiens
  CDR3 for alpha chain variable domain of TCR clone 279023 (TRAV3, TRAJ22)
CAVRDYGSARQLTF

SEQ ID NO: 558046 - protein, 14 aa, Homo sapiens
  CDR3 for beta chain variable domain of TCR clone 279023 (TRBV11-2, TRBJ2-5)
CASRPLAGRETQYF

SEQ ID NO: 558047 - protein, 14 aa, Homo sapiens
  CDR3 for alpha chain variable domain of TCR clone 279024 (TRAV1-2, TRAJ8)
CAVREDTGFQKLVF

SEQ ID NO: 558048 - protein, 15 aa, Homo sapiens
  CDR3 for beta chain variable domain of TCR clone 279024 (TRBV6-3, TRBJ2-7)
CASSSPGRVFYEQYF

SEQ ID NO: 558049 - protein, 12 aa, Homo sapiens
  CDR3 for alpha chain variable domain of TCR clone 279025 (TRAV12-3, TRAJ17)
CPMTLTGNKLTF

SEQ ID NO: 558050 - protein, 14 aa, Homo sapiens
  CDR3 for beta chain variable domain of TCR clone 279025 (TRBV7-3, TRBJ2-1)
CASSLAGGTNEQFF

SEQ ID NO: 558051 - protein, 14 aa, Homo sapiens
  CDR3 for alpha chain variable domain of TCR clone 279026 (TRAV17, TRAJ6)
CATDASGGSYIPTF

SEQ ID NO: 558052 - protein, 15 aa, Homo sapiens
  CDR3 for beta chain variable domain of TCR clone 279026 (TRBV6-3, TRBJ2-7)
CASSSPGTVFYEQYF

SEQ ID NO: 558053 - protein, 11 aa, Homo sapiens
  CDR3 for alpha chain variable domain of TCR clone 279027 (TRAV12-2, TRAJ30)
CAVGRDDKNIF

SEQ ID NO: 558054 - protein, 14 aa, Homo sapiens
  CDR3 for beta chain variable domain of TCR clone 279027 (TRBV6-1, TRBJ1-3)
CASVQGGGGNTIYF

SEQ ID NO: 558055 - protein, 14 aa, Homo sapiens
  CDR3 for alpha chain variable domain of TCR clone 279028 (TRAV12-2, TRAJ13)
CAVKKTGGYQKVTF

SEQ ID NO: 558056 - protein, 15 aa, Homo sapiens
  CDR3 for beta chain variable domain of TCR clone 279028 (TRBV27, TRBJ2-1)
CASSNGGGSSNDHFF

SEQ ID NO: 558057 - protein, 15 aa, Homo sapiens
  CDR3 for alpha chain variable domain of TCR clone 279029 (TRAV3, TRAJ42)
CAVRGGTGSQGNLIF

SEQ ID NO: 558058 - protein, 15 aa, Homo sapiens
  CDR3 for beta chain variable domain of TCR clone 279029 (TRBV7-9, TRBJ1-5)
CASCQGHQPNQPQHF

SEQ ID NO: 558059 - protein, 14 aa, Homo sapiens
  CDR3 for alpha chain variable domain of TCR clone 279030 (TRAV2, TRAJ9)
CAVEDRSGGCKTIF

SEQ ID NO: 558060 - protein, 12 aa, Homo sapiens
  CDR3 for beta chain variable domain of TCR clone 279030 (TRBV11-2, TRBJ2-1)
CASSPGNNEQFF

SEQ ID NO: 558061 - protein, 16 aa, Homo sapiens
  CDR3 for alpha chain variable domain of TCR clone 279031 (TRAV26-1, TRAJ53)
CIVRVAMGGSNYKLTF

SEQ ID NO: 558062 - protein, 13 aa, Homo sapiens
  CDR3 for beta chain variable domain of TCR clone 279031 (TRBV7-3, TRBJ1-2)
CASSLKRGYGYTF

SEQ ID NO: 558063 - protein, 23 aa, Homo sapiens
  CDR3 for alpha chain variable domain of TCR clone 279032 (TRAV3, TRAJ32)
CAVRDELVLQTRSSLELALCLLS

SEQ ID NO: 558064 - protein, 12 aa, Homo sapiens
  CDR3 for beta chain variable domain of TCR clone 279032 (TRBV6-1, TRBJ2-7)
CASSDYSYEQYF

SEQ ID NO: 558065 - protein, 12 aa, Homo sapiens
  CDR3 for alpha chain variable domain of TCR clone 279033 (TRAV12-3, TRAJ17)
SHLPLPGNKLTF

SEQ ID NO: 558066 - protein, 15 aa, Homo sapiens
  CDR3 for beta chain variable domain of TCR clone 279033 (TRBV20-1, TRBJ2-7)
CSARDRVSGMDEQYF

SEQ ID NO: 558067 - protein, 10 aa, Homo sapiens
  CDR3 for alpha chain variable domain of TCR clone 279034 (TRAV30, TRAJ20)
CGTDDYKLSF

SEQ ID NO: 558068 - protein, 15 aa, Homo sapiens
  CDR3 for beta chain variable domain of TCR clone 279034 (TRBV19, TRBJ2-1)
CASSSPGVPPDEQFF

SEQ ID NO: 558069 - protein, 16 aa, Homo sapiens
  CDR3 for alpha chain variable domain of TCR clone 279035 (TRAV23/DV6, TRAJ9)
FAASIGGNTGGFKTIF

SEQ ID NO: 558070 - protein, 14 aa, Homo sapiens
  CDR3 for beta chain variable domain of TCR clone 279035 (TRBV11-2, TRBJ1-5)
CASSLDRGRQPQHF

SEQ ID NO: 558071 - protein, 13 aa, Homo sapiens
  CDR3 for alpha chain variable domain of TCR clone 279036 (TRAV23/DV6, TRAJ16)
CAASISDGQKLVF

SEQ ID NO: 558072 - protein, 15 aa, Homo sapiens
  CDR3 for beta chain variable domain of TCR clone 279036 (TRBV2, TRBJ2-2)
CASSRETVGTGELFF

SEQ ID NO: 558073 - protein, 16 aa, Homo sapiens
  CDR3 for alpha chain variable domain of TCR clone 279037 (TRAV21, TRAJ37)
CAVRPRGSSNTGKLIF

SEQ ID NO: 558074 - protein, 12 aa, Homo sapiens
  CDR3 for beta chain variable domain of TCR clone 279037 (TRBV12-4, TRBJ1-2)
CASSFIWLHLRF

SEQ ID NO: 558075 - protein, 14 aa, Homo sapiens
  CDR3 for alpha chain variable domain of TCR clone 279038 (TRAV3, TRAJ34)
CAVRARGTPTSSSF

SEQ ID NO: 558076 - protein, 15 aa, Homo sapiens
  CDR3 for beta chain variable domain of TCR clone 279038 (TRBV6-3, TRBJ2-7)
CASSSPGTVFYEQYF

SEQ ID NO: 558077 - protein, 17 aa, Homo sapiens
  CDR3 for alpha chain variable domain of TCR clone 279039 (TRAV26-1, TRAJ53)
CIVRVEASGGSNYKLTF

SEQ ID NO: 558078 - protein, 15 aa, Homo sapiens
  CDR3 for beta chain variable domain of TCR clone 279039 (TRBV20-1, TRBJ2-7)
CSARVPAAYFYEQYF

SEQ ID NO: 558079 - protein, 14 aa, Homo sapiens
  CDR3 for alpha chain variable domain of TCR clone 279040 (TRAV17, TRAJ22)
CATSPSGSARQLTF

SEQ ID NO: 558080 - protein, 15 aa, Homo sapiens
  CDR3 for beta chain variable domain of TCR clone 279040 (TRBV4-1, TRBJ2-5)
CASSQWDLYEETQYF

SEQ ID NO: 558081 - protein, 16 aa, Homo sapiens
  CDR3 for alpha chain variable domain of TCR clone 279041 (TRAV20, TRAJ22)
CAVQASSSGSARQLTF

SEQ ID NO: 558082 - protein, 12 aa, Homo sapiens
  CDR3 for beta chain variable domain of TCR clone 279041 (TRBV24-1, TRBJ2-7)
CATGGDSNEQYF

SEQ ID NO: 558083 - protein, 14 aa, Homo sapiens
  CDR3 for alpha chain variable domain of TCR clone 279042 (TRAV1-2, TRAJ16)
CAVNRFSDGQKLLF

SEQ ID NO: 558084 - protein, 13 aa, Homo sapiens
  CDR3 for beta chain variable domain of TCR clone 279042 (TRBV6-1, TRBJ1-1)
CASSWTVDTEAFC

SEQ ID NO: 558085 - protein, 11 aa, Homo sapiens
  CDR3 for alpha chain variable domain of TCR clone 279043 (TRAV13-1, TRAJ23)
CAASSRGKLIF

SEQ ID NO: 558086 - protein, 18 aa, Homo sapiens
  CDR3 for beta chain variable domain of TCR clone 279043 (TRBV20-1, TRBJ2-3)
CSASGLAGGPGTTDTQYF

SEQ ID NO: 558087 - protein, 14 aa, Homo sapiens
  CDR3 for alpha chain variable domain of TCR clone 279044 (TRAV12-3, TRAJ10)
SHLPLTGGGNKLTF

SEQ ID NO: 558088 - protein, 16 aa, Homo sapiens
  CDR3 for beta chain variable domain of TCR clone 279044 (TRBV19, TRBJ2-1)
CASSKAGPSSYDEQFF

SEQ ID NO: 558089 - protein, 11 aa, Homo sapiens
  CDR3 for alpha chain variable domain of TCR clone 279045 (TRAV2, TRAJ13)
CASGGYQKATF

SEQ ID NO: 558090 - protein, 15 aa, Homo sapiens
  CDR3 for beta chain variable domain of TCR clone 279045 (TRBV5-4, TRBJ1-1)
CASSSLGWANTEAFF

SEQ ID NO: 558091 - protein, 14 aa, Homo sapiens
  CDR3 for alpha chain variable domain of TCR clone 279046 (TRAV9-2, TRAJ39)
CALYIYNAGNVLTF

SEQ ID NO: 558092 - protein, 14 aa, Homo sapiens
  CDR3 for beta chain variable domain of TCR clone 279046 (TRBV25-1, TRBJ1-1)
CASTHLGGNTEAFF

SEQ ID NO: 558093 - protein, 16 aa, Homo sapiens
  CDR3 for alpha chain variable domain of TCR clone 279047 (TRAV35, TRAJ20)
CWADPSSGFNDYKLSF

SEQ ID NO: 558094 - protein, 16 aa, Homo sapiens
  CDR3 for beta chain variable domain of TCR clone 279047 (TRBV4-3, TRBJ1-6)
CASSAQPGGEGSHLHF

SEQ ID NO: 558095 - protein, 13 aa, Homo sapiens
  CDR3 for alpha chain variable domain of TCR clone 279048 (TRAV27, TRAJ6)
CTGGTRGSYIPTF

SEQ ID NO: 558096 - protein, 14 aa, Homo sapiens
  CDR3 for beta chain variable domain of TCR clone 279048 (TRBV20-1, TRBJ2-4)
CSASGRVGENIQYF

SEQ ID NO: 558097 - protein, 12 aa, Homo sapiens
  CDR3 for alpha chain variable domain of TCR clone 279049 (TRAV2, TRAJ34)
CAVARNTDKLIF

SEQ ID NO: 558098 - protein, 20 aa, Homo sapiens
  CDR3 for beta chain variable domain of TCR clone 279049 (TRBV7-2, TRBJ2-5)
CASSFLRGGGRDPVLRARHA

SEQ ID NO: 558099 - protein, 15 aa, Homo sapiens
  CDR3 for alpha chain variable domain of TCR clone 279050 (TRAV2, TRAJ24)
CAAVRLKNSWGKLQF

SEQ ID NO: 558100 - protein, 17 aa, Homo sapiens
  CDR3 for beta chain variable domain of TCR clone 279050 (TRBV13, TRBJ2-3)
CASSLSRVAGGRNTQYF

SEQ ID NO: 558101 - protein, 14 aa, Homo sapiens
  CDR3 for alpha chain variable domain of TCR clone 279051 (TRAV13-2, TRAJ11)
CAETGNSGYSTLTF

SEQ ID NO: 558102 - protein, 11 aa, Homo sapiens
  CDR3 for beta chain variable domain of TCR clone 279051 (TRBV10-3, TRBJ2-7)
CANSEGLEQYF

SEQ ID NO: 558103 - protein, 13 aa, Homo sapiens
  CDR3 for alpha chain variable domain of TCR clone 279052 (TRAV38-1, TRAJ42)
CARGGGSQGNLIF

SEQ ID NO: 558104 - protein, 13 aa, Homo sapiens
  CDR3 for beta chain variable domain of TCR clone 279052 (TRBV14, TRBJ1-2)
CASSEDRRYGYTF

SEQ ID NO: 558105 - protein, 14 aa, Homo sapiens
  CDR3 for alpha chain variable domain of TCR clone 279053 (TRAV8-4, TRAJ42)
CAVSEGGSQGKLIL

SEQ ID NO: 558106 - protein, 15 aa, Homo sapiens
  CDR3 for beta chain variable domain of TCR clone 279053 (TRBV28, TRBJ2-7)
CASSLEAYPIYEQYF

SEQ ID NO: 558107 - protein, 14 aa, Homo sapiens
  CDR3 for alpha chain variable domain of TCR clone 279054 (TRAV1-2, TRAJ16)
CAVNRFSDGQKLLF

SEQ ID NO: 558108 - protein, 15 aa, Homo sapiens
  CDR3 for beta chain variable domain of TCR clone 279054 (TRBV29-1, TRBJ2-7)
CSVEFFARGSYEQYF

SEQ ID NO: 558109 - protein, 13 aa, Homo sapiens
  CDR3 for alpha chain variable domain of TCR clone 279055 (TRAV12-1, TRAJ40)
CGVNSSGTYKYIF

SEQ ID NO: 558110 - protein, 14 aa, Homo sapiens
  CDR3 for beta chain variable domain of TCR clone 279055 (TRBV2, TRBJ1-6)
CASEVSSYNSPLHF

SEQ ID NO: 558111 - protein, 13 aa, Homo sapiens
  CDR3 for alpha chain variable domain of TCR clone 279056 (TRAV21, TRAJ20)
CAVSRLGDYKLSF

SEQ ID NO: 558112 - protein, 13 aa, Homo sapiens
  CDR3 for beta chain variable domain of TCR clone 279056 (TRBV7-3, TRBJ1-1)
CASSPAGGCEAFF

SEQ ID NO: 558113 - protein, 11 aa, Homo sapiens
  CDR3 for alpha chain variable domain of TCR clone 279057 (TRAV12-1, TRAJ30)
YVVNGQDKIIF

SEQ ID NO: 558114 - protein, 12 aa, Homo sapiens
  CDR3 for beta chain variable domain of TCR clone 279057 (TRBV27, TRBJ2-2)
SASKLFTGELFF

SEQ ID NO: 558115 - protein, 18 aa, Homo sapiens
  CDR3 for alpha chain variable domain of TCR clone 279058 (TRAV26-1, TRAJ52)
CIVDPVGAGGTSYGKLTF

SEQ ID NO: 558116 - protein, 16 aa, Homo sapiens
  CDR3 for beta chain variable domain of TCR clone 279058 (TRBV2, TRBJ2-1)
CASSANPRDWQEEQFF

SEQ ID NO: 558117 - protein, 13 aa, Homo sapiens
  CDR3 for alpha chain variable domain of TCR clone 279059 (TRAV27, TRAJ29)
CAGAHSGNTPLVF

SEQ ID NO: 558118 - protein, 14 aa, Homo sapiens
  CDR3 for beta chain variable domain of TCR clone 279059 (TRBV20-1, TRBJ2-7)
CSAISREASYEQYF

SEQ ID NO: 558119 - protein, 15 aa, Homo sapiens
  CDR3 for alpha chain variable domain of TCR clone 279060 (TRAV16, TRAJ12)
CSKWPLRDSSYKLIF

SEQ ID NO: 558120 - protein, 13 aa, Homo sapiens
  CDR3 for beta chain variable domain of TCR clone 279060 (TRBV4-2, TRBJ1-1)
CASSQAGNTEAFF

SEQ ID NO: 558121 - protein, 11 aa, Homo sapiens
  CDR3 for alpha chain variable domain of TCR clone 279061 (TRAV23/DV6, TRAJ9)
CFHTGGFKTIF

SEQ ID NO: 558122 - protein, 13 aa, Homo sapiens
  CDR3 for beta chain variable domain of TCR clone 279061 (TRBV7-2, TRBJ2-2)
CASSSVRAGELFF

SEQ ID NO: 558123 - protein, 15 aa, Homo sapiens
  CDR3 for alpha chain variable domain of TCR clone 279062 (TRAV3, TRAJ11)
CAVRDRGSGYSTLTL

SEQ ID NO: 558124 - protein, 13 aa, Homo sapiens
  CDR3 for beta chain variable domain of TCR clone 279062 (TRBV7-9, TRBJ1-2)
CASSLKQNYGYTF

SEQ ID NO: 558125 - protein, 13 aa, Homo sapiens
  CDR3 for alpha chain variable domain of TCR clone 279063 (TRAV20, TRAJ37)
CAGCSSNTGKLIF

SEQ ID NO: 558126 - protein, 15 aa, Homo sapiens
  CDR3 for beta chain variable domain of TCR clone 279063 (TRBV11-1, TRBJ2-3)
CASSLLAGRTDTQYF

SEQ ID NO: 558127 - protein, 17 aa, Homo sapiens
  CDR3 for alpha chain variable domain of TCR clone 279064 (TRAV21, TRAJ52)
CAVGTNAGGTSYGKLTF

SEQ ID NO: 558128 - protein, 14 aa, Homo sapiens
  CDR3 for beta chain variable domain of TCR clone 279064 (TRBV6-1, TRBJ1-3)
CASVQGGGGNTIYF

SEQ ID NO: 558129 - protein, 12 aa, Homo sapiens
  CDR3 for alpha chain variable domain of TCR clone 279065 (TRAV8-3, TRAJ26)
CAGDNYGQNFVF

SEQ ID NO: 558130 - protein, 17 aa, Homo sapiens
  CDR3 for beta chain variable domain of TCR clone 279065 (TRBV20-1, TRBJ2-1)
CSAPPRLAGTRYNEQFS

SEQ ID NO: 558131 - protein, 14 aa, Homo sapiens
  CDR3 for alpha chain variable domain of TCR clone 279066 (TRAV23/DV6, TRAJ8)
CAASKATGFQKLVF

SEQ ID NO: 558132 - protein, 15 aa, Homo sapiens
  CDR3 for beta chain variable domain of TCR clone 279066 (TRBV28, TRBJ2-3)
CASSPDRQGANTQYI

SEQ ID NO: 558133 - protein, 13 aa, Homo sapiens
  CDR3 for alpha chain variable domain of TCR clone 279067 (TRAV35, TRAJ32)
CAGVGGATNKLIF

SEQ ID NO: 558134 - protein, 13 aa, Homo sapiens
  CDR3 for beta chain variable domain of TCR clone 279067 (TRBV7-3, TRBJ1-1)
CASSQDWGAEAFF

SEQ ID NO: 558135 - protein, 16 aa, Homo sapiens
  CDR3 for alpha chain variable domain of TCR clone 279068 (TRAV13-1, TRAJ48)
CAASIFGNFGNVKLTF

SEQ ID NO: 558136 - protein, 16 aa, Homo sapiens
  CDR3 for beta chain variable domain of TCR clone 279068 (TRBV7-2, TRBJ2-6)
CASGERRASGANVLTF

SEQ ID NO: 558137 - protein, 14 aa, Homo sapiens
  CDR3 for alpha chain variable domain of TCR clone 279069 (TRAV13-2, TRAJ23)
CAENTYNQGGKLIF

SEQ ID NO: 558138 - protein, 16 aa, Homo sapiens
  CDR3 for beta chain variable domain of TCR clone 279069 (TRBV4-1, TRBJ1-2)
CASSQEGRGQYNGYTF

SEQ ID NO: 558139 - protein, 13 aa, Homo sapiens
  CDR3 for alpha chain variable domain of TCR clone 279070 (TRAV36/DV7, TRAJ49)
CTGDSNTGNQFYF

SEQ ID NO: 558140 - protein, 12 aa, Homo sapiens
  CDR3 for beta chain variable domain of TCR clone 279070 (TRBV11-2, TRBJ2-2)
CASSLGGGELFF

SEQ ID NO: 558141 - protein, 12 aa, Homo sapiens
  CDR3 for alpha chain variable domain of TCR clone 279071 (TRAV13-1, TRAJ21)
CAAKEGFNKFYF

SEQ ID NO: 558142 - protein, 15 aa, Homo sapiens
  CDR3 for beta chain variable domain of TCR clone 279071 (TRBV29-1, TRBJ2-6)
CSVGDRGSGANVLTF

SEQ ID NO: 558143 - protein, 14 aa, Homo sapiens
  CDR3 for alpha chain variable domain of TCR clone 279072 (TRAV17, TRAJ6)
CATDASGGSYIPTF

SEQ ID NO: 558144 - protein, 15 aa, Homo sapiens
  CDR3 for beta chain variable domain of TCR clone 279072 (TRBV20-1, TRBJ1-1)
CSARKAETSNTEAFF

SEQ ID NO: 558145 - protein, 15 aa, Homo sapiens
  CDR3 for alpha chain variable domain of TCR clone 279073 (TRAV3, TRAJ5)
CAVRDRKTGRRARTF

SEQ ID NO: 558146 - protein, 15 aa, Homo sapiens
  CDR3 for beta chain variable domain of TCR clone 279073 (TRBV7-8, TRBJ2-1)
RASSLADSLYNEQFF

SEQ ID NO: 558147 - protein, 13 aa, Homo sapiens
  CDR3 for alpha chain variable domain of TCR clone 279074 (TRAV3, TRAJ35)
CGMRKSFGNVLHC

SEQ ID NO: 558148 - protein, 14 aa, Homo sapiens
  CDR3 for beta chain variable domain of TCR clone 279074 (TRBV6-5, TRBJ1-4)
CASSYRAAEETLFF

SEQ ID NO: 558149 - protein, 13 aa, Homo sapiens
  CDR3 for alpha chain variable domain of TCR clone 279075 (TRAV26-2, TRAJ43)
CILRAVNNNDMRF

SEQ ID NO: 558150 - protein, 14 aa, Homo sapiens
  CDR3 for beta chain variable domain of TCR clone 279075 (TRBV12-4, TRBJ1-1)
CASSLGTGGTEAFF

SEQ ID NO: 558151 - protein, 14 aa, Homo sapiens
  CDR3 for alpha chain variable domain of TCR clone 279076 (TRAV1-2, TRAJ16)
CAVNRFSAGQKLLF

SEQ ID NO: 558152 - protein, 17 aa, Homo sapiens
  CDR3 for beta chain variable domain of TCR clone 279076 (TRBV7-3, TRBJ2-5)
CASSLGSGRSGSETQYF

SEQ ID NO: 558153 - protein, 13 aa, Homo sapiens
  CDR3 for alpha chain variable domain of TCR clone 279077 (TRAV36/DV7, TRAJ34)
CAGRPYNTDKLIF

SEQ ID NO: 558154 - protein, 15 aa, Homo sapiens
  CDR3 for beta chain variable domain of TCR clone 279077 (TRBV27, TRBJ1-6)
CASSFDMGLGSPLHF

SEQ ID NO: 558155 - protein, 18 aa, Homo sapiens
  CDR3 for alpha chain variable domain of TCR clone 279078 (TRAV29/DV5, TRAJ52)
QCTSVQQAVGTSYGKLTF

SEQ ID NO: 558156 - protein, 13 aa, Homo sapiens
  CDR3 for beta chain variable domain of TCR clone 279078 (TRBV7-2, TRBJ1-1)
CASNLKGAKVAFF

SEQ ID NO: 558157 - protein, 12 aa, Homo sapiens
  CDR3 for alpha chain variable domain of TCR clone 279079 (TRAV20, TRAJ54)
CAEQEGAQKLVF

SEQ ID NO: 558158 - protein, 17 aa, Homo sapiens
  CDR3 for beta chain variable domain of TCR clone 279079 (TRBV13, TRBJ2-3)
CASSLSRVAGGRNTQYF

SEQ ID NO: 558159 - protein, 16 aa, Homo sapiens
  CDR3 for alpha chain variable domain of TCR clone 279080 (TRAV1-1, TRAJ29)
CAVRSTRNSGNTPLVF

SEQ ID NO: 558160 - protein, 15 aa, Homo sapiens
  CDR3 for beta chain variable domain of TCR clone 279080 (TRBV20-1, TRBJ2-7)
CSARDRVSGMDEQYF

SEQ ID NO: 558161 - protein, 14 aa, Homo sapiens
  CDR3 for alpha chain variable domain of TCR clone 279081 (TRAV9-2, TRAJ39)
CALYIYIAGNMLTF

SEQ ID NO: 558162 - protein, 12 aa, Homo sapiens
  CDR3 for beta chain variable domain of TCR clone 279081 (TRBV11-2, TRBJ2-2)
CASSLGGGELFF

SEQ ID NO: 558163 - protein, 11 aa, Homo sapiens
  CDR3 for alpha chain variable domain of TCR clone 279082 (TRAV12-3, TRAJ49)
CAANTGNQFYF

SEQ ID NO: 558164 - protein, 15 aa, Homo sapiens
  CDR3 for beta chain variable domain of TCR clone 279082 (TRBV11-2, TRBJ2-1)
CASSLGTSGLNEHFF

SEQ ID NO: 558165 - protein, 21 aa, Homo sapiens
  CDR3 for alpha chain variable domain of TCR clone 279083 (TRAV29/DV5, TRAJ52)
CSVLLCSKREAGGTSYGQLTF

SEQ ID NO: 558166 - protein, 13 aa, Homo sapiens
  CDR3 for beta chain variable domain of TCR clone 279083 (TRBV27, TRBJ1-4)
CASSLMGDEKLFF

SEQ ID NO: 558167 - protein, 13 aa, Homo sapiens
  CDR3 for alpha chain variable domain of TCR clone 279084 (TRAV25, TRAJ47)
CAGHREYGNKLGF

SEQ ID NO: 558168 - protein, 17 aa, Homo sapiens
  CDR3 for beta chain variable domain of TCR clone 279084 (TRBV7-8, TRBJ2-5)
CASSLASGGRFQENQYF

SEQ ID NO: 558169 - protein, 16 aa, Homo sapiens
  CDR3 for alpha chain variable domain of TCR clone 279085 (TRAV12-1, TRAJ48)
CVVNMLSNFGNEKLTF

SEQ ID NO: 558170 - protein, 18 aa, Homo sapiens
  CDR3 for beta chain variable domain of TCR clone 279085 (TRBV11-2, TRBJ2-6)
CASSLNPFPGTGANVLTF

SEQ ID NO: 558171 - protein, 14 aa, Homo sapiens
  CDR3 for alpha chain variable domain of TCR clone 279086 (TRAV26-1, TRAJ38)
CIADNAGNNRKLMW

SEQ ID NO: 558172 - protein, 12 aa, Homo sapiens
  CDR3 for beta chain variable domain of TCR clone 279086 (TRBV6-1, TRBJ2-7)
CASSDYSYEQYF

SEQ ID NO: 558173 - protein, 17 aa, Homo sapiens
  CDR3 for alpha chain variable domain of TCR clone 279087 (TRAV2, TRAJ40)
CAVVTSGTYKYIWNRHQ

SEQ ID NO: 558174 - protein, 14 aa, Homo sapiens
  CDR3 for beta chain variable domain of TCR clone 279087 (TRBV19, TRBJ2-1)
CASPTFVLSGEQFF

SEQ ID NO: 558175 - protein, 12 aa, Homo sapiens
  CDR3 for alpha chain variable domain of TCR clone 279088 (TRAV1-1, TRAJ24)
CAARGSWGRFQF

SEQ ID NO: 558176 - protein, 16 aa, Homo sapiens
  CDR3 for beta chain variable domain of TCR clone 279088 (TRBV27, TRBJ2-2)
CASSFRGLVRTGELFF

SEQ ID NO: 558177 - protein, 15 aa, Homo sapiens
  CDR3 for alpha chain variable domain of TCR clone 279089 (TRAV12-1, TRAJ44)
FVADLPTGTASKLTF

SEQ ID NO: 558178 - protein, 13 aa, Homo sapiens
  CDR3 for beta chain variable domain of TCR clone 279089 (TRBV7-9, TRBJ1-2)
CASSLKQNYGYTF

SEQ ID NO: 558179 - protein, 15 aa, Homo sapiens
  CDR3 for alpha chain variable domain of TCR clone 279090 (TRAV2, TRAJ9)
CAVAALNTGGFKTIF

SEQ ID NO: 558180 - protein, 13 aa, Homo sapiens
  CDR3 for beta chain variable domain of TCR clone 279090 (TRBV4-1, TRBJ1-1)
CASSLRGPTEAFF

SEQ ID NO: 558181 - protein, 18 aa, Homo sapiens
  CDR3 for alpha chain variable domain of TCR clone 279091 (TRAV13-1, TRAJ52)
CAASKRSAGGTSYGKLTF

SEQ ID NO: 558182 - protein, 12 aa, Homo sapiens
  CDR3 for beta chain variable domain of TCR clone 279091 (TRBV2, TRBJ2-1)
CAYGPPGNEQFF

SEQ ID NO: 558183 - protein, 15 aa, Homo sapiens
  CDR3 for alpha chain variable domain of TCR clone 279092 (TRAV17, TRAJ57)
CATGPSQGGSEKLLF

SEQ ID NO: 558184 - protein, 16 aa, Homo sapiens
  CDR3 for beta chain variable domain of TCR clone 279092 (TRBV12-4, TRBJ1-5)
CASSRPVGGSNQTQHF

SEQ ID NO: 558185 - protein, 17 aa, Homo sapiens
  CDR3 for alpha chain variable domain of TCR clone 279093 (TRAV3, TRAJ42)
CAVRDRDYGGSQGNLIF

SEQ ID NO: 558186 - protein, 13 aa, Homo sapiens
  CDR3 for beta chain variable domain of TCR clone 279093 (TRBV10-2, TRBJ1-1)
CASNDQMNTEAFF

SEQ ID NO: 558187 - protein, 14 aa, Homo sapiens
  CDR3 for alpha chain variable domain of TCR clone 279094 (TRAV26-1, TRAJ48)
CIVRVGFGIEKLTF

SEQ ID NO: 558188 - protein, 14 aa, Homo sapiens
  CDR3 for beta chain variable domain of TCR clone 279094 (TRBV19, TRBJ2-1)
CASPTFVLSGEQFF

SEQ ID NO: 558189 - protein, 13 aa, Homo sapiens
  CDR3 for alpha chain variable domain of TCR clone 279095 (TRAV8-6, TRAJ49)
CAVITNTGNKFYF

SEQ ID NO: 558190 - protein, 12 aa, Homo sapiens
  CDR3 for beta chain variable domain of TCR clone 279095 (TRBV12-4, TRBJ2-7)
CASSLGGYEQYF

SEQ ID NO: 558191 - protein, 10 aa, Homo sapiens
  CDR3 for alpha chain variable domain of TCR clone 279096 (TRAV12-1, TRAJ43)
CVVHNNDMRF

SEQ ID NO: 558192 - protein, 13 aa, Homo sapiens
  CDR3 for beta chain variable domain of TCR clone 279096 (TRBV12-4, TRBJ1-2)
RASSSGLTVISAF

SEQ ID NO: 558193 - protein, 15 aa, Homo sapiens
  CDR3 for alpha chain variable domain of TCR clone 279097 (TRAV8-3, TRAJ45)
CAASYSGGGADGLTF

SEQ ID NO: 558194 - protein, 13 aa, Homo sapiens
  CDR3 for beta chain variable domain of TCR clone 279097 (TRBV10-3, TRBJ2-7)
CASKLTVNYEQYF

SEQ ID NO: 558195 - protein, 15 aa, Homo sapiens
  CDR3 for alpha chain variable domain of TCR clone 279098 (TRAV12-3, TRAJ11)
CAMSEENSGYSTLTF

SEQ ID NO: 558196 - protein, 15 aa, Homo sapiens
  CDR3 for beta chain variable domain of TCR clone 279098 (TRBV27, TRBJ2-7)
CASSTAGTGSYEQYF

SEQ ID NO: 558197 - protein, 15 aa, Homo sapiens
  CDR3 for alpha chain variable domain of TCR clone 279099 (TRAV8-4, TRAJ17)
CAVSRVKAAGNKLTF

SEQ ID NO: 558198 - protein, 17 aa, Homo sapiens
  CDR3 for beta chain variable domain of TCR clone 279099 (TRBV13, TRBJ2-3)
CASSLSRVAGGRSTQYF

SEQ ID NO: 558199 - protein, 14 aa, Homo sapiens
  CDR3 for alpha chain variable domain of TCR clone 279100 (TRAV17, TRAJ15)
CATDRGQAGTALIF

SEQ ID NO: 558200 - protein, 13 aa, Homo sapiens
  CDR3 for beta chain variable domain of TCR clone 279100 (TRBV7-9, TRBJ1-2)
CASSLKQNYGYTF

SEQ ID NO: 558201 - protein, 14 aa, Homo sapiens
  CDR3 for alpha chain variable domain of TCR clone 279101 (TRAV12-2, TRAJ48)
CAVNAFFGNEKLTF

SEQ ID NO: 558202 - protein, 13 aa, Homo sapiens
  CDR3 for beta chain variable domain of TCR clone 279101 (TRBV28, TRBJ2-7)
CAGAQQGHDEQYF

SEQ ID NO: 558203 - protein, 12 aa, Homo sapiens
  CDR3 for alpha chain variable domain of TCR clone 279102 (TRAV12-2, TRAJ21)
CAPSDNFNKFYF

SEQ ID NO: 558204 - protein, 14 aa, Homo sapiens
  CDR3 for beta chain variable domain of TCR clone 279102 (TRBV12-4, TRBJ1-1)
CASSLGSSGTEAFF

SEQ ID NO: 558205 - protein, 15 aa, Homo sapiens
  CDR3 for alpha chain variable domain of TCR clone 279103 (TRAV17, TRAJ4)
CATGTWSGGYNKLIF

SEQ ID NO: 558206 - protein, 16 aa, Homo sapiens
  CDR3 for beta chain variable domain of TCR clone 279103 (TRBV20-1, TRBJ1-4)
CSAPGQGLLTNEQLFF

SEQ ID NO: 558207 - protein, 13 aa, Homo sapiens
  CDR3 for alpha chain variable domain of TCR clone 279104 (TRAV3, TRAJ27)
CAVRPLGAGKSTF

SEQ ID NO: 558208 - protein, 15 aa, Homo sapiens
  CDR3 for beta chain variable domain of TCR clone 279104 (TRBV7-9, TRBJ1-4)
CASSARTGGNEKLFF

SEQ ID NO: 558209 - protein, 14 aa, Homo sapiens
  CDR3 for alpha chain variable domain of TCR clone 279105 (TRAV13-2, TRAJ17)
CAENSKAPGNKLTF

SEQ ID NO: 558210 - protein, 17 aa, Homo sapiens
  CDR3 for beta chain variable domain of TCR clone 279105 (TRBV23-1, TRBJ1-5)
CASSQSRTGGPNQPQHF

SEQ ID NO: 558211 - protein, 12 aa, Homo sapiens
  CDR3 for alpha chain variable domain of TCR clone 279106 (TRAV8-3, TRAJ20)
CAVGANDYKISF

SEQ ID NO: 558212 - protein, 15 aa, Homo sapiens
  CDR3 for beta chain variable domain of TCR clone 279106 (TRBV11-2, TRBJ2-1)
CASSLGTSGLNEQFF

SEQ ID NO: 558213 - protein, 15 aa, Homo sapiens
  CDR3 for alpha chain variable domain of TCR clone 279107 (TRAV12-3, TRAJ6)
CAMSATTGGSYVPTF

SEQ ID NO: 558214 - protein, 16 aa, Homo sapiens
  CDR3 for beta chain variable domain of TCR clone 279107 (TRBV20-1, TRBJ1-2)
CSASMGQGVANYGYIF

SEQ ID NO: 558215 - protein, 14 aa, Homo sapiens
  CDR3 for alpha chain variable domain of TCR clone 279108 (TRAV12-2, TRAJ13)
CAVKKTGGYQKVTF

SEQ ID NO: 558216 - protein, 14 aa, Homo sapiens
  CDR3 for beta chain variable domain of TCR clone 279108 (TRBV9, TRBJ2-7)
CASSVGVGSYEQYF

SEQ ID NO: 558217 - protein, 13 aa, Homo sapiens
  CDR3 for alpha chain variable domain of TCR clone 279109 (TRAV20, TRAJ20)
CAVQALNDYKLSF

SEQ ID NO: 558218 - protein, 15 aa, Homo sapiens
  CDR3 for beta chain variable domain of TCR clone 279109 (TRBV7-9, TRBJ2-7)
CISVSEAPPMNEQYF

SEQ ID NO: 558219 - protein, 11 aa, Homo sapiens
  CDR3 for alpha chain variable domain of TCR clone 279110 (TRAV17, TRAJ9)
CGFTGGFKTIF

SEQ ID NO: 558220 - protein, 14 aa, Homo sapiens
  CDR3 for beta chain variable domain of TCR clone 279110 (TRBV5-1, TRBJ2-7)
CASSLGVRAYEQYF

SEQ ID NO: 558221 - protein, 12 aa, Homo sapiens
  CDR3 for alpha chain variable domain of TCR clone 279111 (TRAV21, TRAJ48)
CAPGTGNEKLTF

SEQ ID NO: 558222 - protein, 14 aa, Homo sapiens
  CDR3 for beta chain variable domain of TCR clone 279111 (TRBV7-2, TRBJ1-1)
CASSFLTGTTEAFF

SEQ ID NO: 558223 - protein, 12 aa, Homo sapiens
  CDR3 for alpha chain variable domain of TCR clone 279112 (TRAV12-3, TRAJ5)
CAMDTGRRALTF

SEQ ID NO: 558224 - protein, 14 aa, Homo sapiens
  CDR3 for beta chain variable domain of TCR clone 279112 (TRBV5-1, TRBJ2-2)
CASSLGGGSGELFF

SEQ ID NO: 558225 - protein, 18 aa, Homo sapiens
  CDR3 for alpha chain variable domain of TCR clone 279113 (TRAV20, TRAJ4)
GAVQPYYMFSGGYNKLIF

SEQ ID NO: 558226 - protein, 13 aa, Homo sapiens
  CDR3 for beta chain variable domain of TCR clone 279113 (TRBV19, TRBJ2-3)
CATWDKITDTQYF

SEQ ID NO: 558227 - protein, 14 aa, Homo sapiens
  CDR3 for alpha chain variable domain of TCR clone 279114 (TRAV9-2, TRAJ39)
CALYTYNAGNMLTF

SEQ ID NO: 558228 - protein, 16 aa, Homo sapiens
  CDR3 for beta chain variable domain of TCR clone 279114 (TRBV19, TRBJ2-1)
CASSKAGPSSYNEQFF

SEQ ID NO: 558229 - protein, 12 aa, Homo sapiens
  CDR3 for alpha chain variable domain of TCR clone 279115 (TRAV3, TRAJ20)
CAVRDPDYKLSF

SEQ ID NO: 558230 - protein, 15 aa, Homo sapiens
  CDR3 for beta chain variable domain of TCR clone 279115 (TRBV2, TRBJ2-2)
CASSRETVGTGELFV

SEQ ID NO: 558231 - protein, 10 aa, Homo sapiens
  CDR3 for alpha chain variable domain of TCR clone 279116 (TRAV13-1, TRAJ43)
CAASKNDLRF

SEQ ID NO: 558232 - protein, 13 aa, Homo sapiens
  CDR3 for beta chain variable domain of TCR clone 279116 (TRBV20-1, TRBJ1-5)
CSARTGVNQPQHF

SEQ ID NO: 558233 - protein, 15 aa, Homo sapiens
  CDR3 for alpha chain variable domain of TCR clone 279117 (TRAV23/DV6, TRAJ13)
CAAWPGGGGYRKVTF

SEQ ID NO: 558234 - protein, 16 aa, Homo sapiens
  CDR3 for beta chain variable domain of TCR clone 279117 (TRBV11-2, TRBJ2-7)
CASSPTTGGVSYEQYF

SEQ ID NO: 558235 - protein, 16 aa, Homo sapiens
  CDR3 for alpha chain variable domain of TCR clone 279118 (TRAV8-6, TRAJ34)
CAVSDQGNTESSSLGL

SEQ ID NO: 558236 - protein, 15 aa, Homo sapiens
  CDR3 for beta chain variable domain of TCR clone 279118 (TRBV27, TRBJ2-1)
CASSNGGGSSNEQFF

SEQ ID NO: 558237 - protein, 13 aa, Homo sapiens
  CDR3 for alpha chain variable domain of TCR clone 279119 (TRAV16, TRAJ29)
CALSRRGNTPLVF

SEQ ID NO: 558238 - protein, 14 aa, Homo sapiens
  CDR3 for beta chain variable domain of TCR clone 279119 (TRBV7-6, TRBJ2-3)
CASSLGTVTDTQYF

SEQ ID NO: 558239 - protein, 12 aa, Homo sapiens
  CDR3 for alpha chain variable domain of TCR clone 279120 (TRAV20, TRAJ37)
YALPSNTGKLTF

SEQ ID NO: 558240 - protein, 14 aa, Homo sapiens
  CDR3 for beta chain variable domain of TCR clone 279120 (TRBV19, TRBJ2-1)
CASPTFVLSGEQFF

SEQ ID NO: 558241 - protein, 16 aa, Homo sapiens
  CDR3 for alpha chain variable domain of TCR clone 279121 (TRAV16, TRAJ4)
CALSRMFSGGYNKLIF

SEQ ID NO: 558242 - protein, 14 aa, Homo sapiens
  CDR3 for beta chain variable domain of TCR clone 279121 (TRBV2, TRBJ1-5)
CASSENRGGQPQHF

SEQ ID NO: 558243 - protein, 15 aa, Homo sapiens
  CDR3 for alpha chain variable domain of TCR clone 279122 (TRAV4, TRAJ39)
CLVGPNNNAGNMLTF

SEQ ID NO: 558244 - protein, 17 aa, Homo sapiens
  CDR3 for beta chain variable domain of TCR clone 279122 (TRBV6-5, TRBJ1-4)
CASRETGGLATNEKLFF

SEQ ID NO: 558245 - protein, 12 aa, Homo sapiens
  CDR3 for alpha chain variable domain of TCR clone 279123 (TRAV1-2, TRAJ42)
CVAGGSQGNLIF

SEQ ID NO: 558246 - protein, 12 aa, Homo sapiens
  CDR3 for beta chain variable domain of TCR clone 279123 (TRBV24-1, TRBJ1-1)
CATSDSDRGAVF

SEQ ID NO: 558247 - protein, 13 aa, Homo sapiens
  CDR3 for alpha chain variable domain of TCR clone 279124 (TRAV3, TRAJ15)
CAVRDQAGTAQIF

SEQ ID NO: 558248 - protein, 15 aa, Homo sapiens
  CDR3 for beta chain variable domain of TCR clone 279124 (TRBV11-1, TRBJ2-7)
CASSLNYGSSYEQYL

SEQ ID NO: 558249 - protein, 13 aa, Homo sapiens
  CDR3 for alpha chain variable domain of TCR clone 279125 (TRAV1-2, TRAJ12)
CAVSMDSSYKLIF

SEQ ID NO: 558250 - protein, 17 aa, Homo sapiens
  CDR3 for beta chain variable domain of TCR clone 279125 (TRBV11-3, TRBJ2-1)
CASSLYPTGVEYNEQFF

SEQ ID NO: 558251 - protein, 11 aa, Homo sapiens
  CDR3 for alpha chain variable domain of TCR clone 279126 (TRAV17, TRAJ43)
FATPRSNDMRF

SEQ ID NO: 558252 - protein, 15 aa, Homo sapiens
  CDR3 for beta chain variable domain of TCR clone 279126 (TRBV11-2, TRBJ2-1)
CASSLGTSGLNEQFF

SEQ ID NO: 558253 - protein, 11 aa, Homo sapiens
  CDR3 for alpha chain variable domain of TCR clone 279127 (TRAV21, TRAJ34)
CAHYNTDKLIF

SEQ ID NO: 558254 - protein, 13 aa, Homo sapiens
  CDR3 for beta chain variable domain of TCR clone 279127 (TRBV7-6, TRBJ1-2)
CASRVVADYGYTF

SEQ ID NO: 558255 - protein, 14 aa, Homo sapiens
  CDR3 for alpha chain variable domain of TCR clone 279128 (TRAV12-3, TRAJ10)
SHLPLTGGGNKLTF

SEQ ID NO: 558256 - protein, 15 aa, Homo sapiens
  CDR3 for beta chain variable domain of TCR clone 279128 (TRBV18, TRBJ1-3)
CQLTRDPEWRNTIYF

SEQ ID NO: 558257 - protein, 10 aa, Homo sapiens
  CDR3 for alpha chain variable domain of TCR clone 279129 (TRAV2, TRAJ33)
CCGKHYQLIW

SEQ ID NO: 558258 - protein, 15 aa, Homo sapiens
  CDR3 for beta chain variable domain of TCR clone 279129 (TRBV19, TRBJ1-1)
CASTSGQTQNTEAFF

SEQ ID NO: 558259 - protein, 12 aa, Homo sapiens
  CDR3 for alpha chain variable domain of TCR clone 279130 (TRAV12-3, TRAJ34)
CAMGYNTDKPIF

SEQ ID NO: 558260 - protein, 14 aa, Homo sapiens
  CDR3 for beta chain variable domain of TCR clone 279130 (TRBV4-1, TRBJ2-2)
CASSQAVNTGELFV

SEQ ID NO: 558261 - protein, 11 aa, Homo sapiens
  CDR3 for alpha chain variable domain of TCR clone 279131 (TRAV35, TRAJ30)
CAPGGDDKIIF

SEQ ID NO: 558262 - protein, 17 aa, Homo sapiens
  CDR3 for beta chain variable domain of TCR clone 279131 (TRBV4-1, TRBJ1-4)
CASSQEGPRGVEEKLFF

SEQ ID NO: 558263 - protein, 14 aa, Homo sapiens
  CDR3 for alpha chain variable domain of TCR clone 279132 (TRAV26-1, TRAJ34)
CIVRVAYNTDKLIF

SEQ ID NO: 558264 - protein, 15 aa, Homo sapiens
  CDR3 for beta chain variable domain of TCR clone 279132 (TRBV20-1, TRBJ2-7)
CSARIPAAYFYEQYF

SEQ ID NO: 558265 - protein, 14 aa, Homo sapiens
  CDR3 for alpha chain variable domain of TCR clone 279133 (TRAV12-2, TRAJ53)
CRERGGGSNYKLTF

SEQ ID NO: 558266 - protein, 17 aa, Homo sapiens
  CDR3 for beta chain variable domain of TCR clone 279133 (TRBV7-3, TRBJ2-3)
CASSLMRRMRGADTQYF

SEQ ID NO: 558267 - protein, 18 aa, Homo sapiens
  CDR3 for alpha chain variable domain of TCR clone 279134 (TRAV21, TRAJ52)
CAVRPSPAGGASYGKLTF

SEQ ID NO: 558268 - protein, 16 aa, Homo sapiens
  CDR3 for beta chain variable domain of TCR clone 279134 (TRBV7-3, TRBJ2-1)
CASSLEGYRSYNEQFF

SEQ ID NO: 558269 - protein, 10 aa, Homo sapiens
  CDR3 for alpha chain variable domain of TCR clone 279135 (TRAV27, TRAJ58)
SETSGSRLTF

SEQ ID NO: 558270 - protein, 15 aa, Homo sapiens
  CDR3 for beta chain variable domain of TCR clone 279135 (TRBV6-3, TRBJ2-7)
CASSSPGTVFYEQYF

SEQ ID NO: 558271 - protein, 13 aa, Homo sapiens
  CDR3 for alpha chain variable domain of TCR clone 279136 (TRAV12-1, TRAJ49)
CVVTPFTGNQFHF

SEQ ID NO: 558272 - protein, 13 aa, Homo sapiens
  CDR3 for beta chain variable domain of TCR clone 279136 (TRBV20-1, TRBJ1-1)
CSARGGANTEAFF

SEQ ID NO: 558273 - protein, 15 aa, Homo sapiens
  CDR3 for alpha chain variable domain of TCR clone 279137 (TRAV27, TRAJ38)
CAGRFNAGNNRKLLW

SEQ ID NO: 558274 - protein, 12 aa, Homo sapiens
  CDR3 for beta chain variable domain of TCR clone 279137 (TRBV7-2, TRBJ2-3)
CASSLEQGRQYF

SEQ ID NO: 558275 - protein, 16 aa, Homo sapiens
  CDR3 for alpha chain variable domain of TCR clone 279138 (TRAV2, TRAJ10)
CCGGSMVTGGGNKLTF

SEQ ID NO: 558276 - protein, 16 aa, Homo sapiens
  CDR3 for beta chain variable domain of TCR clone 279138 (TRBV18, TRBJ1-5)
CASSPSTGNSNQPQHF

SEQ ID NO: 558277 - protein, 16 aa, Homo sapiens
  CDR3 for alpha chain variable domain of TCR clone 279139 (TRAV23/DV6, TRAJ48)
CAASGVVNFGNEKLTF

SEQ ID NO: 558278 - protein, 13 aa, Homo sapiens
  CDR3 for beta chain variable domain of TCR clone 279139 (TRBV28, TRBJ2-7)
CASSPSGTYEQYF

SEQ ID NO: 558279 - protein, 13 aa, Homo sapiens
  CDR3 for alpha chain variable domain of TCR clone 279140 (TRAV16, TRAJ37)
CALRGSNKGKLIF

SEQ ID NO: 558280 - protein, 15 aa, Homo sapiens
  CDR3 for beta chain variable domain of TCR clone 279140 (TRBV20-1, TRBJ2-1)
CSARGRGLSYNEQFF

SEQ ID NO: 558281 - protein, 16 aa, Homo sapiens
  CDR3 for alpha chain variable domain of TCR clone 279141 (TRAV12-2, TRAJ28)
CAVITDSGAGSYQLTF

SEQ ID NO: 558282 - protein, 14 aa, Homo sapiens
  CDR3 for beta chain variable domain of TCR clone 279141 (TRBV25-1, TRBJ1-1)
CASTHLGGNTVAFF

SEQ ID NO: 558283 - protein, 12 aa, Homo sapiens
  CDR3 for alpha chain variable domain of TCR clone 279142 (TRAV4, TRAJ6)
CLAPGGSYITTF

SEQ ID NO: 558284 - protein, 12 aa, Homo sapiens
  CDR3 for beta chain variable domain of TCR clone 279142 (TRBV6-5, TRBJ2-3)
CASSDTTDTQYF

SEQ ID NO: 558285 - protein, 16 aa, Homo sapiens
  CDR3 for alpha chain variable domain of TCR clone 279143 (TRAV12-1, TRAJ52)
CVVPPAGGTSYGKLTF

SEQ ID NO: 558286 - protein, 15 aa, Homo sapiens
  CDR3 for beta chain variable domain of TCR clone 279143 (TRBV20-1, TRBJ2-7)
CSARVPAAYFYEQYF

SEQ ID NO: 558287 - protein, 14 aa, Homo sapiens
  CDR3 for alpha chain variable domain of TCR clone 279144 (TRAV26-1, TRAJ38)
CIADNAGNNRKLIW

SEQ ID NO: 558288 - protein, 14 aa, Homo sapiens
  CDR3 for beta chain variable domain of TCR clone 279144 (TRBV20-1, TRBJ1-1)
CSAQTRIGGTDAFF

SEQ ID NO: 558289 - protein, 16 aa, Homo sapiens
  CDR3 for alpha chain variable domain of TCR clone 279145 (TRAV8-3, TRAJ8)
CAVPRDGNTGFQKLVF

SEQ ID NO: 558290 - protein, 14 aa, Homo sapiens
  CDR3 for beta chain variable domain of TCR clone 279145 (TRBV4-1, TRBJ2-2)
RASSQAVNTGELFF

SEQ ID NO: 558291 - protein, 15 aa, Homo sapiens
  CDR3 for alpha chain variable domain of TCR clone 279146 (TRAV8-6, TRAJ45)
CAVSEQGGGADGLTF

SEQ ID NO: 558292 - protein, 14 aa, Homo sapiens
  CDR3 for beta chain variable domain of TCR clone 279146 (TRBV28, TRBJ2-5)
CASRGSSFWDTQYF

SEQ ID NO: 558293 - protein, 15 aa, Homo sapiens
  CDR3 for alpha chain variable domain of TCR clone 279147 (TRAV2, TRAJ15)
CAVEDREQAGTALIF

SEQ ID NO: 558294 - protein, 17 aa, Homo sapiens
  CDR3 for beta chain variable domain of TCR clone 279147 (TRBV19, TRBJ2-6)
CASSTGQVFSGANVLTF

SEQ ID NO: 558295 - protein, 10 aa, Homo sapiens
  CDR3 for alpha chain variable domain of TCR clone 279148 (TRAV13-1, TRAJ8)
CAAPFQKLVF

SEQ ID NO: 558296 - protein, 17 aa, Homo sapiens
  CDR3 for beta chain variable domain of TCR clone 279148 (TRBV5-1, TRBJ2-1)
CASSTGTSGYSYNEQFF

SEQ ID NO: 558297 - protein, 12 aa, Homo sapiens
  CDR3 for alpha chain variable domain of TCR clone 279149 (TRAV12-1, TRAJ40)
CVVYSGTYKYIF

SEQ ID NO: 558298 - protein, 12 aa, Homo sapiens
  CDR3 for beta chain variable domain of TCR clone 279149 (TRBV18, TRBJ2-1)
CASSSDEDEQFF

SEQ ID NO: 558299 - protein, 12 aa, Homo sapiens
  CDR3 for alpha chain variable domain of TCR clone 279150 (TRAV35, TRAJ54)
CADLQGAQKLVF

SEQ ID NO: 558300 - protein, 14 aa, Homo sapiens
  CDR3 for beta chain variable domain of TCR clone 279150 (TRBV7-2, TRBJ2-1)
CASSPGLAGNEQFF

SEQ ID NO: 558301 - protein, 14 aa, Homo sapiens
  CDR3 for alpha chain variable domain of TCR clone 279151 (TRAV12-3, TRAJ10)
SHLPLTGGGNKLTF

SEQ ID NO: 558302 - protein, 16 aa, Homo sapiens
  CDR3 for beta chain variable domain of TCR clone 279151 (TRBV10-3, TRBJ2-1)
CAISLTSGNSYNEHFF

SEQ ID NO: 558303 - protein, 16 aa, Homo sapiens
  CDR3 for alpha chain variable domain of TCR clone 279152 (TRAV30, TRAJ24)
CGTEIVDADSWGKFQF

SEQ ID NO: 558304 - protein, 13 aa, Homo sapiens
  CDR3 for beta chain variable domain of TCR clone 279152 (TRBV7-2, TRBJ2-2)
CASSAVRAGELFF

SEQ ID NO: 558305 - protein, 14 aa, Homo sapiens
  CDR3 for alpha chain variable domain of TCR clone 279153 (TRAV2, TRAJ9)
CAVDPNTGGFKNIF

SEQ ID NO: 558306 - protein, 14 aa, Homo sapiens
  CDR3 for beta chain variable domain of TCR clone 279153 (TRBV19, TRBJ2-1)
CASPTFVLSGEQFF

SEQ ID NO: 558307 - protein, 13 aa, Homo sapiens
  CDR3 for alpha chain variable domain of TCR clone 279154 (TRAV2, TRAJ40)
CAVVTSGTYKYIF

SEQ ID NO: 558308 - protein, 13 aa, Homo sapiens
  CDR3 for beta chain variable domain of TCR clone 279154 (TRBV10-2, TRBJ2-7)
CASVASGGYEQYF

SEQ ID NO: 558309 - protein, 10 aa, Homo sapiens
  CDR3 for alpha chain variable domain of TCR clone 279155 (TRAV12-2, TRAJ43)
CALKVLSMRF

SEQ ID NO: 558310 - protein, 14 aa, Homo sapiens
  CDR3 for beta chain variable domain of TCR clone 279155 (TRBV11-2, TRBJ2-7)
CASSLGNSLYEQYF

SEQ ID NO: 558311 - protein, 11 aa, Homo sapiens
  CDR3 for alpha chain variable domain of TCR clone 279156 (TRAV12-1, TRAJ15)
CVVNAGTALIF

SEQ ID NO: 558312 - protein, 11 aa, Homo sapiens
  CDR3 for beta chain variable domain of TCR clone 279156 (TRBV29-1, TRBJ2-5)
CSVASGETQYF

SEQ ID NO: 558313 - protein, 16 aa, Homo sapiens
  CDR3 for alpha chain variable domain of TCR clone 279157 (TRAV38-1, TRAJ45)
CAFMKRSGGGADGLTF

SEQ ID NO: 558314 - protein, 15 aa, Homo sapiens
  CDR3 for beta chain variable domain of TCR clone 279157 (TRBV7-2, TRBJ2-3)
CASSSTGLETDTQYF

SEQ ID NO: 558315 - protein, 14 aa, Homo sapiens
  CDR3 for alpha chain variable domain of TCR clone 279158 (TRAV8-3, TRAJ36)
CAVGATGKQPLLWD

SEQ ID NO: 558316 - protein, 14 aa, Homo sapiens
  CDR3 for beta chain variable domain of TCR clone 279158 (TRBV7-2, TRBJ2-7)
CASRSQGAAYEQYF

SEQ ID NO: 558317 - protein, 11 aa, Homo sapiens
  CDR3 for alpha chain variable domain of TCR clone 279159 (TRAV12-3, TRAJ43)
CAMSVSNDMRF

SEQ ID NO: 558318 - protein, 13 aa, Homo sapiens
  CDR3 for beta chain variable domain of TCR clone 279159 (TRBV20-1, TRBJ1-1)
CSAPLGGGTGAVF

SEQ ID NO: 558319 - protein, 14 aa, Homo sapiens
  CDR3 for alpha chain variable domain of TCR clone 279160 (TRAV1-2, TRAJ8)
CAVREDTGFQKLVF

SEQ ID NO: 558320 - protein, 14 aa, Homo sapiens
  CDR3 for beta chain variable domain of TCR clone 279160 (TRBV7-9, TRBJ1-1)
CASTPIQSYTEAFF

SEQ ID NO: 558321 - protein, 17 aa, Homo sapiens
  CDR3 for alpha chain variable domain of TCR clone 279161 (TRAV3, TRAJ38)
CAVRDCLNAGNNRKLIW

SEQ ID NO: 558322 - protein, 14 aa, Homo sapiens
  CDR3 for beta chain variable domain of TCR clone 279161 (TRBV7-8, TRBJ2-3)
CASSLEAGTDTQYF

SEQ ID NO: 558323 - protein, 23 aa, Homo sapiens
  CDR3 for alpha chain variable domain of TCR clone 279162 (TRAV8-3, TRAJ38)
CAVGASNAGNNHIQNPDPAVYQL

SEQ ID NO: 558324 - protein, 15 aa, Homo sapiens
  CDR3 for beta chain variable domain of TCR clone 279162 (TRBV11-3, TRBJ1-3)
SASSLFGPSGNTIYF

SEQ ID NO: 558325 - protein, 12 aa, Homo sapiens
  CDR3 for alpha chain variable domain of TCR clone 279163 (TRAV20, TRAJ39)
CAVGNAGNMLTF

SEQ ID NO: 558326 - protein, 16 aa, Homo sapiens
  CDR3 for beta chain variable domain of TCR clone 279163 (TRBV19, TRBJ2-1)
CASSKAGPSSYNEQFF

SEQ ID NO: 558327 - protein, 18 aa, Homo sapiens
  CDR3 for alpha chain variable domain of TCR clone 279164 (TRAV26-2, TRAJ45)
CILRVDKYSGGGADGLTF

SEQ ID NO: 558328 - protein, 13 aa, Homo sapiens
  CDR3 for beta chain variable domain of TCR clone 279164 (TRBV12-4, TRBJ2-5)
CASRKRGKETQYF

SEQ ID NO: 558329 - protein, 15 aa, Homo sapiens
  CDR3 for alpha chain variable domain of TCR clone 279165 (TRAV2, TRAJ37)
CAVEDGSSNTGKLIF

SEQ ID NO: 558330 - protein, 13 aa, Homo sapiens
  CDR3 for beta chain variable domain of TCR clone 279165 (TRBV20-1, TRBJ1-6)
CSTFREGNSALHF

SEQ ID NO: 558331 - protein, 14 aa, Homo sapiens
  CDR3 for alpha chain variable domain of TCR clone 279166 (TRAV38-1, TRAJ40)
CALRPTSGTYKYIF

SEQ ID NO: 558332 - protein, 14 aa, Homo sapiens
  CDR3 for beta chain variable domain of TCR clone 279166 (TRBV13, TRBJ2-3)
CASSLGGPQRPQYF

SEQ ID NO: 558333 - protein, 15 aa, Homo sapiens
  CDR3 for alpha chain variable domain of TCR clone 279167 (TRAV12-2, TRAJ57)
CAVSRCQGGSEKLVF

SEQ ID NO: 558334 - protein, 14 aa, Homo sapiens
  CDR3 for beta chain variable domain of TCR clone 279167 (TRBV20-1, TRBJ2-1)
CSAHPGLPYNEQFF

SEQ ID NO: 558335 - protein, 15 aa, Homo sapiens
  CDR3 for alpha chain variable domain of TCR clone 279168 (TRAV3, TRAJ22)
CAVRDRGGSARQLTF

SEQ ID NO: 558336 - protein, 14 aa, Homo sapiens
  CDR3 for beta chain variable domain of TCR clone 279168 (TRBV19, TRBJ1-5)
CASSLGLSGQPQHF

SEQ ID NO: 558337 - protein, 15 aa, Homo sapiens
  CDR3 for alpha chain variable domain of TCR clone 279169 (TRAV29/DV5, TRAJ42)
CAAQTDGGSQGNLIF

SEQ ID NO: 558338 - protein, 12 aa, Homo sapiens
  CDR3 for beta chain variable domain of TCR clone 279169 (TRBV11-2, TRBJ2-1)
CASSPGNNEQFF

SEQ ID NO: 558339 - protein, 14 aa, Homo sapiens
  CDR3 for alpha chain variable domain of TCR clone 279170 (TRAV38-1, TRAJ40)
CALRPTSGTYKSIF

SEQ ID NO: 558340 - protein, 14 aa, Homo sapiens
  CDR3 for beta chain variable domain of TCR clone 279170 (TRBV19, TRBJ2-1)
CASPTFVLSGEQFF

SEQ ID NO: 558341 - protein, 14 aa, Homo sapiens
  CDR3 for alpha chain variable domain of TCR clone 279171 (TRAV8-2, TRAJ4)
CVGSPSGGYNKLIF

SEQ ID NO: 558342 - protein, 15 aa, Homo sapiens
  CDR3 for beta chain variable domain of TCR clone 279171 (TRBV2, TRBJ2-1)
CASSELAGGYNEQFF

SEQ ID NO: 558343 - protein, 16 aa, Homo sapiens
  CDR3 for alpha chain variable domain of TCR clone 279172 (TRAV12-2, TRAJ10)
CAVNRVLTGGGNKHTF

SEQ ID NO: 558344 - protein, 16 aa, Homo sapiens
  CDR3 for beta chain variable domain of TCR clone 279172 (TRBV12-5, TRBJ2-5)
CASGPRTSGNQETQYF

SEQ ID NO: 558345 - protein, 15 aa, Homo sapiens
  CDR3 for alpha chain variable domain of TCR clone 279173 (TRAV27, TRAJ38)
CAARRNAGNNRKLIW

SEQ ID NO: 558346 - protein, 15 aa, Homo sapiens
  CDR3 for beta chain variable domain of TCR clone 279173 (TRBV29-1, TRBJ2-7)
CSVEFFDRGSYEQYF

SEQ ID NO: 558347 - protein, 16 aa, Homo sapiens
  CDR3 for alpha chain variable domain of TCR clone 279174 (TRAV1-2, TRAJ10)
CAVRGVLTGGGNKLTF

SEQ ID NO: 558348 - protein, 12 aa, Homo sapiens
  CDR3 for beta chain variable domain of TCR clone 279174 (TRBV7-8, TRBJ2-7)
CASSLADREQYF

SEQ ID NO: 558349 - protein, 13 aa, Homo sapiens
  CDR3 for alpha chain variable domain of TCR clone 279175 (TRAV35, TRAJ42)
CWRYGGSQGNLIF

SEQ ID NO: 558350 - protein, 15 aa, Homo sapiens
  CDR3 for beta chain variable domain of TCR clone 279175 (TRBV2, TRBJ2-7)
CASSEGLARSYEQYF

SEQ ID NO: 558351 - protein, 14 aa, Homo sapiens
  CDR3 for alpha chain variable domain of TCR clone 279176 (TRAV29/DV5, TRAJ49)
CAASLSNTGNQFYF

SEQ ID NO: 558352 - protein, 17 aa, Homo sapiens
  CDR3 for beta chain variable domain of TCR clone 279176 (TRBV7-8, TRBJ2-6)
CASSAGTGGAGANVLTF

SEQ ID NO: 558353 - protein, 13 aa, Homo sapiens
  CDR3 for alpha chain variable domain of TCR clone 279177 (TRAV21, TRAJ15)
CAVRNQAGTALIF

SEQ ID NO: 558354 - protein, 14 aa, Homo sapiens
  CDR3 for beta chain variable domain of TCR clone 279177 (TRBV12-5, TRBJ2-5)
CASGSRTHQETQYF

SEQ ID NO: 558355 - protein, 14 aa, Homo sapiens
  CDR3 for alpha chain variable domain of TCR clone 279178 (TRAV12-2, TRAJ13)
CAVKKTGGYQRVTF

SEQ ID NO: 558356 - protein, 17 aa, Homo sapiens
  CDR3 for beta chain variable domain of TCR clone 279178 (TRBV20-1, TRBJ2-2)
CSASGSGQGGLTGELFF

SEQ ID NO: 558357 - protein, 12 aa, Homo sapiens
  CDR3 for alpha chain variable domain of TCR clone 279179 (TRAV13-1, TRAJ49)
CAASIRSNQFYF

SEQ ID NO: 558358 - protein, 14 aa, Homo sapiens
  CDR3 for beta chain variable domain of TCR clone 279179 (TRBV7-2, TRBJ2-1)
CASSPGLAGNEQLF

SEQ ID NO: 558359 - protein, 12 aa, Homo sapiens
  CDR3 for alpha chain variable domain of TCR clone 279180 (TRAV17, TRAJ28)
WDSGAGIYQLTF

SEQ ID NO: 558360 - protein, 13 aa, Homo sapiens
  CDR3 for beta chain variable domain of TCR clone 279180 (TRBV11-3, TRBJ1-1)
CASSRQPNTEAFF

SEQ ID NO: 558361 - protein, 20 aa, Homo sapiens
  CDR3 for alpha chain variable domain of TCR clone 279181 (TRAV21, TRAJ4)
AASQPGDSATLAGGYNKLIL

SEQ ID NO: 558362 - protein, 19 aa, Homo sapiens
  CDR3 for beta chain variable domain of TCR clone 279181 (TRBV18, TRBJ1-3)
CASSPLSRTGMSSGNTIYF

SEQ ID NO: 558363 - protein, 14 aa, Homo sapiens
  CDR3 for alpha chain variable domain of TCR clone 279182 (TRAV8-3, TRAJ4)
CAVGAAGGYNELIF

SEQ ID NO: 558364 - protein, 14 aa, Homo sapiens
  CDR3 for beta chain variable domain of TCR clone 279182 (TRBV6-3, TRBJ2-7)
CASSPGTVFYEQYF

SEQ ID NO: 558365 - protein, 13 aa, Homo sapiens
  CDR3 for alpha chain variable domain of TCR clone 279183 (TRAV13-2, TRAJ40)
FAEFTSGTYKYIF

SEQ ID NO: 558366 - protein, 14 aa, Homo sapiens
  CDR3 for beta chain variable domain of TCR clone 279183 (TRBV10-2, TRBJ1-5)
CASSSTGRNQPQHS

SEQ ID NO: 558367 - protein, 14 aa, Homo sapiens
  CDR3 for alpha chain variable domain of TCR clone 279184 (TRAV1-2, TRAJ16)
CVVNRFSDGQKLLF

SEQ ID NO: 558368 - protein, 13 aa, Homo sapiens
  CDR3 for beta chain variable domain of TCR clone 279184 (TRBV20-1, TRBJ1-1)
CSARLGQGTEAFF

SEQ ID NO: 558369 - protein, 13 aa, Homo sapiens
  CDR3 for alpha chain variable domain of TCR clone 279185 (TRAV27, TRAJ54)
CAGAGQGAQKLVF

SEQ ID NO: 558370 - protein, 17 aa, Homo sapiens
  CDR3 for beta chain variable domain of TCR clone 279185 (TRBV20-1, TRBJ2-1)
CSASSSGLAGSYNEQFF

SEQ ID NO: 558371 - protein, 16 aa, Homo sapiens
  CDR3 for alpha chain variable domain of TCR clone 279186 (TRAV21, TRAJ33)
WAVSPASMDSNYQLIW

SEQ ID NO: 558372 - protein, 17 aa, Homo sapiens
  CDR3 for beta chain variable domain of TCR clone 279186 (TRBV2, TRBJ1-4)
CASSKRELTQGEEKLFF

SEQ ID NO: 558373 - protein, 12 aa, Homo sapiens
  CDR3 for alpha chain variable domain of TCR clone 279187 (TRAV36/DV7, TRAJ54)
CAVVRGAQKPVF

SEQ ID NO: 558374 - protein, 13 aa, Homo sapiens
  CDR3 for beta chain variable domain of TCR clone 279187 (TRBV14, TRBJ2-7)
CASSQDRRYEQYF

SEQ ID NO: 558375 - protein, 12 aa, Homo sapiens
  CDR3 for alpha chain variable domain of TCR clone 279188 (TRAV27, TRAJ42)
CVGGGSQGNLIF

SEQ ID NO: 558376 - protein, 13 aa, Homo sapiens
  CDR3 for beta chain variable domain of TCR clone 279188 (TRBV19, TRBJ2-7)
CASSIRSSYEQYF

SEQ ID NO: 558377 - protein, 13 aa, Homo sapiens
  CDR3 for alpha chain variable domain of TCR clone 279189 (TRAV12-1, TRAJ6)
CVVFPGGSYIPTF

SEQ ID NO: 558378 - protein, 17 aa, Homo sapiens
  CDR3 for beta chain variable domain of TCR clone 279189 (TRBV20-1, TRBJ2-2)
CSASGSGQGGLTGELFF

SEQ ID NO: 558379 - protein, 13 aa, Homo sapiens
  CDR3 for alpha chain variable domain of TCR clone 279190 (TRAV36/DV7, TRAJ49)
CAGDSNTGNQSYF

SEQ ID NO: 558380 - protein, 15 aa, Homo sapiens
  CDR3 for beta chain variable domain of TCR clone 279190 (TRBV6-5, TRBJ1-6)
CASSLGQGCRSPLHF

SEQ ID NO: 558381 - protein, 12 aa, Homo sapiens
  CDR3 for alpha chain variable domain of TCR clone 279191 (TRAV13-1, TRAJ53)
AASGGSNYKLTF

SEQ ID NO: 558382 - protein, 12 aa, Homo sapiens
  CDR3 for beta chain variable domain of TCR clone 279191 (TRBV18, IGLJ4)
CASSPSREKLFF

SEQ ID NO: 558383 - protein, 16 aa, Homo sapiens
  CDR3 for alpha chain variable domain of TCR clone 279192 (TRAV12-3, TRAJ45)
CAMGWGSGGGADGLTF

SEQ ID NO: 558384 - protein, 16 aa, Homo sapiens
  CDR3 for beta chain variable domain of TCR clone 279192 (TRBV4-1, TRBJ2-7)
CASSLTAGQATYEQYF

SEQ ID NO: 558385 - protein, 12 aa, Homo sapiens
  CDR3 for alpha chain variable domain of TCR clone 279193 (TRAV30, TRAJ43)
CGTEERGNDMRF

SEQ ID NO: 558386 - protein, 15 aa, Homo sapiens
  CDR3 for beta chain variable domain of TCR clone 279193 (TRBV7-2, TRBJ2-1)
CASSFQADEYNEQFF

SEQ ID NO: 558387 - protein, 16 aa, Homo sapiens
  CDR3 for alpha chain variable domain of TCR clone 279194 (TRAV16, TRAJ42)
CARKMNYVGSQGNLIF

SEQ ID NO: 558388 - protein, 15 aa, Homo sapiens
  CDR3 for beta chain variable domain of TCR clone 279194 (TRBV20-1, TRBJ2-7)
CSAREGRDSLYEQYF

SEQ ID NO: 558389 - protein, 15 aa, Homo sapiens
  CDR3 for alpha chain variable domain of TCR clone 279195 (TRAV13-2, TRAJ10)
CAENKIGGGGNKLTF

SEQ ID NO: 558390 - protein, 15 aa, Homo sapiens
  CDR3 for beta chain variable domain of TCR clone 279195 (TRBV5-1, TRBJ1-2)
CASSPGDRGSYGYAF

SEQ ID NO: 558391 - protein, 15 aa, Homo sapiens
  CDR3 for alpha chain variable domain of TCR clone 279196 (TRAV8-2, TRAJ52)
CVVSGGGTSYGKLTF

SEQ ID NO: 558392 - protein, 15 aa, Homo sapiens
  CDR3 for beta chain variable domain of TCR clone 279196 (TRBV6-5, TRBJ1-6)
CASSLGQGFRSPLHF

SEQ ID NO: 558393 - protein, 14 aa, Homo sapiens
  CDR3 for alpha chain variable domain of TCR clone 279197 (TRAV12-3, TRAJ22)
CAMSSFGSARQLTF

SEQ ID NO: 558394 - protein, 20 aa, Homo sapiens
  CDR3 for beta chain variable domain of TCR clone 279197 (TRBV11-2, TRBJ1-6)
CASSLVFATGGSVHPSTLGT

SEQ ID NO: 558395 - protein, 12 aa, Homo sapiens
  CDR3 for alpha chain variable domain of TCR clone 279198 (TRAV3, TRAJ43)
CAVRDPNNDMRC

SEQ ID NO: 558396 - protein, 17 aa, Homo sapiens
  CDR3 for beta chain variable domain of TCR clone 279198 (TRBV7-8, TRBJ2-6)
CASSAGTGGAGANVLTF

SEQ ID NO: 558397 - protein, 16 aa, Homo sapiens
  CDR3 for alpha chain variable domain of TCR clone 279199 (TRAV12-1, TRAJ13)
CVVNLKVSGGYQKVTF

SEQ ID NO: 558398 - protein, 16 aa, Homo sapiens
  CDR3 for beta chain variable domain of TCR clone 279199 (TRBV24-1, TRBJ2-6)
CATSDRRVSGANVLTF

SEQ ID NO: 558399 - protein, 13 aa, Homo sapiens
  CDR3 for alpha chain variable domain of TCR clone 279200 (TRAV17, TRAJ22)
CAHHSGSARQLTF

SEQ ID NO: 558400 - protein, 14 aa, Homo sapiens
  CDR3 for beta chain variable domain of TCR clone 279200 (TRBV16, TRBJ1-1)
CASSQAGPNTGAFF

SEQ ID NO: 558401 - protein, 13 aa, Homo sapiens
  CDR3 for alpha chain variable domain of TCR clone 279201 (TRAV12-1, TRAJ39)
CVVNYNAGNMLTF

SEQ ID NO: 558402 - protein, 12 aa, Homo sapiens
  CDR3 for beta chain variable domain of TCR clone 279201 (TRBV5-7, TRBJ1-1)
CASSVGRGKAFF

SEQ ID NO: 558403 - protein, 16 aa, Homo sapiens
  CDR3 for alpha chain variable domain of TCR clone 279202 (TRAV1-2, TRAJ18)
RAVRVERGSTLGRLYF

SEQ ID NO: 558404 - protein, 16 aa, Homo sapiens
  CDR3 for beta chain variable domain of TCR clone 279202 (TRBV20-1, TRBJ2-7)
CSASTSGRLSSYEQYF

SEQ ID NO: 558405 - protein, 14 aa, Homo sapiens
  CDR3 for alpha chain variable domain of TCR clone 279203 (TRAV26-1, TRAJ34)
CIVRVAYSTDKLIF

SEQ ID NO: 558406 - protein, 15 aa, Homo sapiens
  CDR3 for beta chain variable domain of TCR clone 279203 (TRBV20-1, TRBJ2-7)
CSARVAAAYFYEQYF

SEQ ID NO: 558407 - protein, 13 aa, Homo sapiens
  CDR3 for alpha chain variable domain of TCR clone 279204 (TRAV13-1, TRAJ43)
CAASKNNNNDIRF

SEQ ID NO: 558408 - protein, 17 aa, Homo sapiens
  CDR3 for beta chain variable domain of TCR clone 279204 (TRBV27, TRBJ2-6)
CASSLTGCASGANVLTF

SEQ ID NO: 558409 - protein, 15 aa, Homo sapiens
  CDR3 for alpha chain variable domain of TCR clone 279205 (TRAV13-2, TRAJ40)
CAENRSRQGTYKYIF

SEQ ID NO: 558410 - protein, 16 aa, Homo sapiens
  CDR3 for beta chain variable domain of TCR clone 279205 (TRBV7-2, TRBJ2-1)
CASSVGRTSGDNEQFF

SEQ ID NO: 558411 - protein, 13 aa, Homo sapiens
  CDR3 for alpha chain variable domain of TCR clone 279206 (TRAV8-3, TRAJ4)
WVFYSGGYIKLIF

SEQ ID NO: 558412 - protein, 16 aa, Homo sapiens
  CDR3 for beta chain variable domain of TCR clone 279206 (TRBV7-8, TRBJ2-3)
CASSTEGQRETDTQYF

SEQ ID NO: 558413 - protein, 13 aa, Homo sapiens
  CDR3 for alpha chain variable domain of TCR clone 279207 (TRAV8-3, TRAJ43)
CAVVPHNDNDMRF

SEQ ID NO: 558414 - protein, 17 aa, Homo sapiens
  CDR3 for beta chain variable domain of TCR clone 279207 (TRBV7-7, TRBJ1-1)
CASIGDRPNLGVTEAFF

SEQ ID NO: 558415 - protein, 13 aa, Homo sapiens
  CDR3 for alpha chain variable domain of TCR clone 279208 (TRAV8-1, TRAJ39)
CAGLNNSGNMLTF

SEQ ID NO: 558416 - protein, 17 aa, Homo sapiens
  CDR3 for beta chain variable domain of TCR clone 279208 (TRBV19, TRBJ2-3)
CASSIDPAGGGTDTQYF

SEQ ID NO: 558417 - protein, 14 aa, Homo sapiens
  CDR3 for alpha chain variable domain of TCR clone 279209 (TRAV9-2, TRAJ39)
CALYIYNEGNMLTF

SEQ ID NO: 558418 - protein, 13 aa, Homo sapiens
  CDR3 for beta chain variable domain of TCR clone 279209 (TRBV20-1, TRBJ1-1)
CSAPLGGGTEAFF

SEQ ID NO: 558419 - protein, 14 aa, Homo sapiens
  CDR3 for alpha chain variable domain of TCR clone 279210 (TRAV12-3, TRAJ10)
SHLPLTGGGNKLTF

SEQ ID NO: 558420 - protein, 13 aa, Homo sapiens
  CDR3 for beta chain variable domain of TCR clone 279210 (TRBV2, TRBJ2-7)
CASSQGQDYEQYF

SEQ ID NO: 558421 - protein, 13 aa, Homo sapiens
  CDR3 for alpha chain variable domain of TCR clone 279211 (TRAV26-1, TRAJ48)
CIVRVVGDEKLTF

SEQ ID NO: 558422 - protein, 16 aa, Homo sapiens
  CDR3 for beta chain variable domain of TCR clone 279211 (TRBV12-5, TRBJ2-5)
CASGPRTSGIQETQYF

SEQ ID NO: 558423 - protein, 12 aa, Homo sapiens
  CDR3 for alpha chain variable domain of TCR clone 279212 (TRAV21, TRAJ33)
CAKMDSNYQLIW

SEQ ID NO: 558424 - protein, 14 aa, Homo sapiens
  CDR3 for beta chain variable domain of TCR clone 279212 (TRBV2, TRBJ2-7)
SASSLTSGGYEQYF

SEQ ID NO: 558425 - protein, 15 aa, Homo sapiens
  CDR3 for alpha chain variable domain of TCR clone 279213 (TRAV3, TRAJ29)
CAVRDINSGNTPLFF

SEQ ID NO: 558426 - protein, 16 aa, Homo sapiens
  CDR3 for beta chain variable domain of TCR clone 279213 (TRBV4-1, TRBJ2-5)
CASSQTFYGDQETQYF

SEQ ID NO: 558427 - protein, 12 aa, Homo sapiens
  CDR3 for alpha chain variable domain of TCR clone 279214 (TRAV8-3, TRAJ26)
CAGDNYGQNFVF

SEQ ID NO: 558428 - protein, 13 aa, Homo sapiens
  CDR3 for beta chain variable domain of TCR clone 279214 (TRBV20-1, TRBJ1-1)
CSAPLGRGTEAFF

SEQ ID NO: 558429 - protein, 12 aa, Homo sapiens
  CDR3 for alpha chain variable domain of TCR clone 279215 (TRAV17, TRAJ20)
CATDGDDYKLSF

SEQ ID NO: 558430 - protein, 15 aa, Homo sapiens
  CDR3 for beta chain variable domain of TCR clone 279215 (TRBV28, TRBJ1-3)
CASSMGWASGNTIYF

SEQ ID NO: 558431 - protein, 12 aa, Homo sapiens
  CDR3 for alpha chain variable domain of TCR clone 279216 (TRAV9-2, TRAJ24)
CAQTASWGKLQF

SEQ ID NO: 558432 - protein, 13 aa, Homo sapiens
  CDR3 for beta chain variable domain of TCR clone 279216 (TRBV12-4, TRBJ2-1)
CASSFQGYNEQFF

SEQ ID NO: 558433 - protein, 17 aa, Homo sapiens
  CDR3 for alpha chain variable domain of TCR clone 279217 (TRAV13-2, TRAJ42)
CAEGASHYGGSQGNLIF

SEQ ID NO: 558434 - protein, 14 aa, Homo sapiens
  CDR3 for beta chain variable domain of TCR clone 279217 (TRBV11-2, TRBJ2-3)
CASSRLARTDTQYF

SEQ ID NO: 558435 - protein, 13 aa, Homo sapiens
  CDR3 for alpha chain variable domain of TCR clone 279218 (TRAV13-1, TRAJ33)
CAASRADNYQLIW

SEQ ID NO: 558436 - protein, 20 aa, Homo sapiens
  CDR3 for beta chain variable domain of TCR clone 279218 (TRBV7-8, TRBJ2-2)
CASSHLFPGPTIHITGELFF

SEQ ID NO: 558437 - protein, 13 aa, Homo sapiens
  CDR3 for alpha chain variable domain of TCR clone 279219 (TRAV39, TRAJ40)
CAVYTSGTYKYIF

SEQ ID NO: 558438 - protein, 17 aa, Homo sapiens
  CDR3 for beta chain variable domain of TCR clone 279219 (TRBV6-3, TRBJ2-2)
CASSYAGQGINTGELFF

SEQ ID NO: 558439 - protein, 13 aa, Homo sapiens
  CDR3 for alpha chain variable domain of TCR clone 279220 (TRAV26-1, TRAJ54)
CIVRVKGAQKLVF

SEQ ID NO: 558440 - protein, 15 aa, Homo sapiens
  CDR3 for beta chain variable domain of TCR clone 279220 (TRBV20-1, TRBJ2-1)
CSAQPGGGPYNEQFV

SEQ ID NO: 558441 - protein, 13 aa, Homo sapiens
  CDR3 for alpha chain variable domain of TCR clone 279221 (TRAV20, TRAJ48)
CAVHLFGNEKVTF

SEQ ID NO: 558442 - protein, 15 aa, Homo sapiens
  CDR3 for beta chain variable domain of TCR clone 279221 (TRBV6-5, TRBJ2-6)
CASSQWEAGANVLTF

SEQ ID NO: 558443 - protein, 15 aa, Homo sapiens
  CDR3 for alpha chain variable domain of TCR clone 279222 (TRAV21, TRAJ53)
CATWNSGGSNYKLTF

SEQ ID NO: 558444 - protein, 13 aa, Homo sapiens
  CDR3 for beta chain variable domain of TCR clone 279222 (TRBV4-1, TRBJ2-2)
CASSQENTGELFF

SEQ ID NO: 558445 - protein, 22 aa, Homo sapiens
  CDR3 for alpha chain variable domain of TCR clone 279223 (TRAV1-2, TRAJ18)
CLLPLCCERYGRQRLTLGRLYF

SEQ ID NO: 558446 - protein, 16 aa, Homo sapiens
  CDR3 for beta chain variable domain of TCR clone 279223 (TRBV29-1, TRBJ1-2)
CSVEANRDIANYGYTF

SEQ ID NO: 558447 - protein, 15 aa, Homo sapiens
  CDR3 for alpha chain variable domain of TCR clone 279224 (TRAV35, TRAJ50)
CAGQLRKTSYDKVIF

SEQ ID NO: 558448 - protein, 12 aa, Homo sapiens
  CDR3 for beta chain variable domain of TCR clone 279224 (TRBV5-1, TRBJ2-7)
CASSLGLETQYC

SEQ ID NO: 558449 - protein, 13 aa, Homo sapiens
  CDR3 for alpha chain variable domain of TCR clone 279225 (TRAV26-1, TRAJ34)
CIVRVGNTDKLIF

SEQ ID NO: 558450 - protein, 13 aa, Homo sapiens
  CDR3 for beta chain variable domain of TCR clone 279225 (TRBV7-3, TRBJ1-1)
CASSQDWGAEAFF

SEQ ID NO: 558451 - protein, 14 aa, Homo sapiens
  CDR3 for alpha chain variable domain of TCR clone 279226 (TRAV1-2, TRAJ16)
CAVNRFSDGQKLLF

SEQ ID NO: 558452 - protein, 13 aa, Homo sapiens
  CDR3 for beta chain variable domain of TCR clone 279226 (TRBV20-1, TRBJ1-6)
CSTFREGNSPLHF

SEQ ID NO: 558453 - protein, 16 aa, Homo sapiens
  CDR3 for alpha chain variable domain of TCR clone 279227 (TRAV30, TRAJ24)
CGTEIVDADSWGTFQF

SEQ ID NO: 558454 - protein, 12 aa, Homo sapiens
  CDR3 for beta chain variable domain of TCR clone 279227 (TRBV11-2, TRBJ2-2)
CASSLPTGELFF

SEQ ID NO: 558455 - protein, 14 aa, Homo sapiens
  CDR3 for alpha chain variable domain of TCR clone 279228 (TRAV1-2, TRAJ16)
CAVNRFSDGQKLLF

SEQ ID NO: 558456 - protein, 16 aa, Homo sapiens
  CDR3 for beta chain variable domain of TCR clone 279228 (TRBV27, TRBJ2-2)
CASSFRGLVRAGELFF

SEQ ID NO: 558457 - protein, 14 aa, Homo sapiens
  CDR3 for alpha chain variable domain of TCR clone 279229 (TRAV26-1, TRAJ38)
CIADNAGNNRKLIW

SEQ ID NO: 558458 - protein, 15 aa, Homo sapiens
  CDR3 for beta chain variable domain of TCR clone 279229 (TRBV6-6, TRBJ2-7)
CASSYSYGGSYEQYF

SEQ ID NO: 558459 - protein, 14 aa, Homo sapiens
  CDR3 for alpha chain variable domain of TCR clone 279230 (TRAV8-2, TRAJ4)
CVVSPSGGNNKLIF

SEQ ID NO: 558460 - protein, 15 aa, Homo sapiens
  CDR3 for beta chain variable domain of TCR clone 279230 (TRBV10-2, TRBJ2-5)
CASRGSGGPQETQYF

SEQ ID NO: 558461 - protein, 14 aa, Homo sapiens
  CDR3 for alpha chain variable domain of TCR clone 279231 (TRAV8-1, TRAJ24)
CAVNAADSWGKLQL

SEQ ID NO: 558462 - protein, 16 aa, Homo sapiens
  CDR3 for beta chain variable domain of TCR clone 279231 (TRBV4-3, TRBJ2-1)
CASSPALDRGVNEQLF

SEQ ID NO: 558463 - protein, 14 aa, Homo sapiens
  CDR3 for alpha chain variable domain of TCR clone 279232 (TRAV17, TRAJ48)
CATEGNFGNEKLTF

SEQ ID NO: 558464 - protein, 15 aa, Homo sapiens
  CDR3 for beta chain variable domain of TCR clone 279232 (TRBV20-1, TRBJ2-7)
CSARDRVSGMDEQYF

SEQ ID NO: 558465 - protein, 15 aa, Homo sapiens
  CDR3 for alpha chain variable domain of TCR clone 279233 (TRAV26-1, TRAJ24)
CINVGATDSWGKLQF

SEQ ID NO: 558466 - protein, 15 aa, Homo sapiens
  CDR3 for beta chain variable domain of TCR clone 279233 (TRBV27, TRBJ2-5)
CASSLYPRGGETQYF

SEQ ID NO: 558467 - protein, 13 aa, Homo sapiens
  CDR3 for alpha chain variable domain of TCR clone 279234 (TRAV38-1, TRAJ42)
CARWGGSQGNPIC

SEQ ID NO: 558468 - protein, 15 aa, Homo sapiens
  CDR3 for beta chain variable domain of TCR clone 279234 (TRBV18, TRBJ2-1)
CASSPPSASYNEQFF

SEQ ID NO: 558469 - protein, 13 aa, Homo sapiens
  CDR3 for alpha chain variable domain of TCR clone 279235 (TRAV21, TRAJ11)
CAVPNSGYSTLTF

SEQ ID NO: 558470 - protein, 13 aa, Homo sapiens
  CDR3 for beta chain variable domain of TCR clone 279235 (TRBV19, TRBJ1-2)
CASSVPGQDGYTF

SEQ ID NO: 558471 - protein, 18 aa, Homo sapiens
  CDR3 for alpha chain variable domain of TCR clone 279236 (TRAV12-3, TRAJ52)
CAMSVGGAGGTSYGKLTF

SEQ ID NO: 558472 - protein, 14 aa, Homo sapiens
  CDR3 for beta chain variable domain of TCR clone 279236 (TRBV11-2, TRBJ1-5)
CASSLDRGRQPQHF

SEQ ID NO: 558473 - protein, 15 aa, Homo sapiens
  CDR3 for alpha chain variable domain of TCR clone 279237 (TRAV14/DV4, TRAJ26)
CAMREGQNSGQNFVF

SEQ ID NO: 558474 - protein, 13 aa, Homo sapiens
  CDR3 for beta chain variable domain of TCR clone 279237 (TRBV24-1, TRBJ2-2)
CATSDWSTGELFF

SEQ ID NO: 558475 - protein, 13 aa, Homo sapiens
  CDR3 for alpha chain variable domain of TCR clone 279238 (TRAV2, TRAJ40)
CAVVTSGTYKYIF

SEQ ID NO: 558476 - protein, 16 aa, Homo sapiens
  CDR3 for beta chain variable domain of TCR clone 279238 (TRBV19, TRBJ2-2)
CASRSAGTGATGELFF

SEQ ID NO: 558477 - protein, 11 aa, Homo sapiens
  CDR3 for alpha chain variable domain of TCR clone 279239 (TRAV35, TRAJ30)
CAGERDDKIIF

SEQ ID NO: 558478 - protein, 13 aa, Homo sapiens
  CDR3 for beta chain variable domain of TCR clone 279239 (TRBV7-2, TRBJ2-2)
CASSSVRAGELFF

SEQ ID NO: 558479 - protein, 17 aa, Homo sapiens
  CDR3 for alpha chain variable domain of TCR clone 279240 (TRAV3, TRAJ12)
CTVRDGGRMDSSYKLIF

SEQ ID NO: 558480 - protein, 14 aa, Homo sapiens
  CDR3 for beta chain variable domain of TCR clone 279240 (TRBV7-9, TRBJ1-2)
CASSRQGANYGYTF

SEQ ID NO: 558481 - protein, 12 aa, Homo sapiens
  CDR3 for alpha chain variable domain of TCR clone 279241 (TRAV12-2, TRAJ8)
CAVNTGFQKLVF

SEQ ID NO: 558482 - protein, 14 aa, Homo sapiens
  CDR3 for beta chain variable domain of TCR clone 279241 (TRBV20-1, TRBJ1-1)
CSAQTRIGATEAFF

SEQ ID NO: 558483 - protein, 13 aa, Homo sapiens
  CDR3 for alpha chain variable domain of TCR clone 279242 (TRAV16, TRAJ11)
CALTQSGYSNLTF

SEQ ID NO: 558484 - protein, 17 aa, Homo sapiens
  CDR3 for beta chain variable domain of TCR clone 279242 (TRBV5-1, TRBJ1-5)
CASSLAFLTRGNQPQHF

SEQ ID NO: 558485 - protein, 14 aa, Homo sapiens
  CDR3 for alpha chain variable domain of TCR clone 279243 (TRAV3, TRAJ34)
CAMRDINNTDKLIF

SEQ ID NO: 558486 - protein, 14 aa, Homo sapiens
  CDR3 for beta chain variable domain of TCR clone 279243 (TRBV7-2, TRBJ2-2)
CASSLGQNTGELFF

SEQ ID NO: 558487 - protein, 13 aa, Homo sapiens
  CDR3 for alpha chain variable domain of TCR clone 279244 (TRAV27, TRAJ29)
CAGAHSGNTPLVF

SEQ ID NO: 558488 - protein, 14 aa, Homo sapiens
  CDR3 for beta chain variable domain of TCR clone 279244 (TRBV11-2, TRBJ2-5)
CASSRTGGIETQYF

SEQ ID NO: 558489 - protein, 15 aa, Homo sapiens
  CDR3 for alpha chain variable domain of TCR clone 279245 (TRAV13-1, TRAJ17)
CTASIERAAGNKLTF

SEQ ID NO: 558490 - protein, 14 aa, Homo sapiens
  CDR3 for beta chain variable domain of TCR clone 279245 (TRBV7-9, TRBJ2-1)
CASSPRDSLYEQFF

SEQ ID NO: 558491 - protein, 16 aa, Homo sapiens
  CDR3 for alpha chain variable domain of TCR clone 279246 (TRAV27, TRAJ53)
CAAPEGSGGSNYKLTF

SEQ ID NO: 558492 - protein, 14 aa, Homo sapiens
  CDR3 for beta chain variable domain of TCR clone 279246 (TRBV4-3, TRBJ1-5)
CASSQGGQGWTQHF

SEQ ID NO: 558493 - protein, 16 aa, Homo sapiens
  CDR3 for alpha chain variable domain of TCR clone 279247 (TRAV16, TRAJ4)
CALSRMFSGGYNKLIF

SEQ ID NO: 558494 - protein, 13 aa, Homo sapiens
  CDR3 for beta chain variable domain of TCR clone 279247 (TRBV7-3, TRBJ2-5)
CASSSDREETQYF

SEQ ID NO: 558495 - protein, 17 aa, Homo sapiens
  CDR3 for alpha chain variable domain of TCR clone 279248 (TRAV27, TRAJ52)
CAGAGWAGGTSYGKVTF

SEQ ID NO: 558496 - protein, 16 aa, Homo sapiens
  CDR3 for beta chain variable domain of TCR clone 279248 (TRBV19, TRBJ2-1)
CASSKAGPSSYNEQFF

SEQ ID NO: 558497 - protein, 15 aa, Homo sapiens
  CDR3 for alpha chain variable domain of TCR clone 279249 (TRAV2, TRAJ15)
CTVEDRGQAGTALIF

SEQ ID NO: 558498 - protein, 13 aa, Homo sapiens
  CDR3 for beta chain variable domain of TCR clone 279249 (TRBV10-2, TRBJ2-7)
CASGASGGYEQYL

SEQ ID NO: 558499 - protein, 13 aa, Homo sapiens
  CDR3 for alpha chain variable domain of TCR clone 279250 (TRAV2, TRAJ15)
CAVASQAGTARIV

SEQ ID NO: 558500 - protein, 16 aa, Homo sapiens
  CDR3 for beta chain variable domain of TCR clone 279250 (TRBV11-3, TRBJ2-3)
CASSSGSGGGTDTQYF

SEQ ID NO: 558501 - protein, 14 aa, Homo sapiens
  CDR3 for alpha chain variable domain of TCR clone 279251 (TRAV1-2, TRAJ8)
CAVREDTGFQELVF

SEQ ID NO: 558502 - protein, 15 aa, Homo sapiens
  CDR3 for beta chain variable domain of TCR clone 279251 (TRBV10-2, TRBJ2-7)
CASWNRGQATYEQYF

SEQ ID NO: 558503 - protein, 15 aa, Homo sapiens
  CDR3 for alpha chain variable domain of TCR clone 279252 (TRAV21, TRAJ53)
CAVRQSGGSNYKLTF

SEQ ID NO: 558504 - protein, 13 aa, Homo sapiens
  CDR3 for beta chain variable domain of TCR clone 279252 (TRBV7-9, TRBJ1-2)
CASSLNQNYGYTF

SEQ ID NO: 558505 - protein, 16 aa, Homo sapiens
  CDR3 for alpha chain variable domain of TCR clone 279253 (TRAV3, TRAJ10)
CAVRDMRAGGGNKLTF

SEQ ID NO: 558506 - protein, 14 aa, Homo sapiens
  CDR3 for beta chain variable domain of TCR clone 279253 (TRBV24-1, TRBJ1-1)
CATSIPRGDTEAFF

SEQ ID NO: 558507 - protein, 14 aa, Homo sapiens
  CDR3 for alpha chain variable domain of TCR clone 279254 (TRAV17, TRAJ11)
CGTDGRLGYSTLTF

SEQ ID NO: 558508 - protein, 16 aa, Homo sapiens
  CDR3 for beta chain variable domain of TCR clone 279254 (TRBV14, TRBJ1-5)
CASSLSRVHSNQTQHF

SEQ ID NO: 558509 - protein, 15 aa, Homo sapiens
  CDR3 for alpha chain variable domain of TCR clone 279255 (TRAV2, TRAJ11)
CAVGGRNSGYSTLTF

SEQ ID NO: 558510 - protein, 20 aa, Homo sapiens
  CDR3 for beta chain variable domain of TCR clone 279255 (TRBV7-8, TRBJ2-2)
CASSHLFPGPTIHITGELFF

SEQ ID NO: 558511 - protein, 13 aa, Homo sapiens
  CDR3 for alpha chain variable domain of TCR clone 279256 (TRAV36/DV7, TRAJ54)
CAVDIQGAQKLVF

SEQ ID NO: 558512 - protein, 16 aa, Homo sapiens
  CDR3 for beta chain variable domain of TCR clone 279256 (TRBV7-3, TRBJ2-1)
CASSLEGYRSYNQQFF

SEQ ID NO: 558513 - protein, 12 aa, Homo sapiens
  CDR3 for alpha chain variable domain of TCR clone 279257 (TRAV27, TRAJ36)
CAGMTGANNLSF

SEQ ID NO: 558514 - protein, 14 aa, Homo sapiens
  CDR3 for beta chain variable domain of TCR clone 279257 (TRBV12-4, TRBJ2-3)
CASSLVPSTDTQYF

SEQ ID NO: 558515 - protein, 14 aa, Homo sapiens
  CDR3 for alpha chain variable domain of TCR clone 279258 (TRAV13-1, TRAJ24)
CAASPADSWGKFQF

SEQ ID NO: 558516 - protein, 17 aa, Homo sapiens
  CDR3 for beta chain variable domain of TCR clone 279258 (TRBV12-5, TRBJ2-3)
CASGLVRSAIPTDTQYF

SEQ ID NO: 558517 - protein, 14 aa, Homo sapiens
  CDR3 for alpha chain variable domain of TCR clone 279259 (TRAV12-3, TRAJ10)
SHLPLTGGGNKLTF

SEQ ID NO: 558518 - protein, 13 aa, Homo sapiens
  CDR3 for beta chain variable domain of TCR clone 279259 (TRBV20-1, TRBJ2-2)
CSASAAGTGELFS

SEQ ID NO: 558519 - protein, 17 aa, Homo sapiens
  CDR3 for alpha chain variable domain of TCR clone 279260 (TRAV24, TRAJ42)
CSFRVKNYGGSQGNLIF

SEQ ID NO: 558520 - protein, 15 aa, Homo sapiens
  CDR3 for beta chain variable domain of TCR clone 279260 (TRBV4-3, TRBJ2-7)
CASSQGDWGDYEQYF

SEQ ID NO: 558521 - protein, 14 aa, Homo sapiens
  CDR3 for alpha chain variable domain of TCR clone 279261 (TRAV1-2, TRAJ16)
CAVNRFSDGQKLLF

SEQ ID NO: 558522 - protein, 16 aa, Homo sapiens
  CDR3 for beta chain variable domain of TCR clone 279261 (TRBV5-1, TRBJ2-3)
CASSLTSGTSGGTQYF

SEQ ID NO: 558523 - protein, 14 aa, Homo sapiens
  CDR3 for alpha chain variable domain of TCR clone 279262 (TRAV13-2, TRAJ43)
CAEIPTYNNNDMRF

SEQ ID NO: 558524 - protein, 16 aa, Homo sapiens
  CDR3 for beta chain variable domain of TCR clone 279262 (TRBV7-9, TRBJ1-2)
CASSLGFSSGEDGYTF

SEQ ID NO: 558525 - protein, 13 aa, Homo sapiens
  CDR3 for alpha chain variable domain of TCR clone 279263 (TRAV2, TRAJ29)
CAEQNSGNTPLVF

SEQ ID NO: 558526 - protein, 13 aa, Homo sapiens
  CDR3 for beta chain variable domain of TCR clone 279263 (TRBV28, TRBJ1-2)
CASSPGSRNGYTF

SEQ ID NO: 558527 - protein, 13 aa, Homo sapiens
  CDR3 for alpha chain variable domain of TCR clone 279264 (TRAV2, TRAJ40)
CAVVTSGTYKYIF

SEQ ID NO: 558528 - protein, 15 aa, Homo sapiens
  CDR3 for beta chain variable domain of TCR clone 279264 (TRBV4-3, TRBJ2-1)
CASSQVLSSYNEQFF

SEQ ID NO: 558529 - protein, 16 aa, Homo sapiens
  CDR3 for alpha chain variable domain of TCR clone 279265 (TRAV13-1, TRAJ37)
CAASSLGSSNTGKLIF

SEQ ID NO: 558530 - protein, 12 aa, Homo sapiens
  CDR3 for beta chain variable domain of TCR clone 279265 (TRBV6-1, TRBJ2-5)
CASSEGRESQYF

SEQ ID NO: 558531 - protein, 15 aa, Homo sapiens
  CDR3 for alpha chain variable domain of TCR clone 279266 (TRAV34, TRAJ38)
CGADFTPGNNRKLIW

SEQ ID NO: 558532 - protein, 15 aa, Homo sapiens
  CDR3 for beta chain variable domain of TCR clone 279266 (TRBV15, TRBJ2-2)
CATSRGLADTGELFF

SEQ ID NO: 558533 - protein, 12 aa, Homo sapiens
  CDR3 for alpha chain variable domain of TCR clone 279267 (TRAV29/DV5, TRAJ49)
CAALNPGNQFYF

SEQ ID NO: 558534 - protein, 14 aa, Homo sapiens
  CDR3 for beta chain variable domain of TCR clone 279267 (TRBV2, TRBJ2-2)
CASSEWTPTGELFF

SEQ ID NO: 558535 - protein, 18 aa, Homo sapiens
  CDR3 for alpha chain variable domain of TCR clone 279268 (TRAV13-1, TRAJ52)
CAAKNPNAGGTSYGKLTF

SEQ ID NO: 558536 - protein, 16 aa, Homo sapiens
  CDR3 for beta chain variable domain of TCR clone 279268 (TRBV2, TRBJ2-1)
CASSVGGSLSYNEQFF

SEQ ID NO: 558537 - protein, 19 aa, Homo sapiens
  CDR3 for alpha chain variable domain of TCR clone 279269 (TRAV26-1, TRAJ28)
CIVRVAHAYSGAGSYQLTL

SEQ ID NO: 558538 - protein, 15 aa, Homo sapiens
  CDR3 for beta chain variable domain of TCR clone 279269 (TRBV5-1, TRBJ1-3)
CASSSKTGAGNTIYF

SEQ ID NO: 558539 - protein, 15 aa, Homo sapiens
  CDR3 for alpha chain variable domain of TCR clone 279270 (TRAV3, TRAJ4)
CAVRDGTGGYNKLIF

SEQ ID NO: 558540 - protein, 16 aa, Homo sapiens
  CDR3 for beta chain variable domain of TCR clone 279270 (TRBV27, TRBJ2-2)
CASSSSGVTNTGELFF

SEQ ID NO: 558541 - protein, 13 aa, Homo sapiens
  CDR3 for alpha chain variable domain of TCR clone 279271 (TRAV1-2, TRAJ9)
CAVLNTGGFKTIF

SEQ ID NO: 558542 - protein, 17 aa, Homo sapiens
  CDR3 for beta chain variable domain of TCR clone 279271 (TRBV13, TRBJ2-3)
CASSLSRVAGGRDTQYF

SEQ ID NO: 558543 - protein, 13 aa, Homo sapiens
  CDR3 for alpha chain variable domain of TCR clone 279272 (TRAV12-1, TRAJ7)
CVVNMRGNNRLAF

SEQ ID NO: 558544 - protein, 14 aa, Homo sapiens
  CDR3 for beta chain variable domain of TCR clone 279272 (TRBV19, TRBJ1-5)
CASSLGTGGQPQHF

SEQ ID NO: 558545 - protein, 17 aa, Homo sapiens
  CDR3 for alpha chain variable domain of TCR clone 279273 (TRAV23/DV6, TRAJ57)
CAASSTLSQGGSEKLVF

SEQ ID NO: 558546 - protein, 15 aa, Homo sapiens
  CDR3 for beta chain variable domain of TCR clone 279273 (TRBV11-2, TRBJ2-2)
CASSSDRVNAGELFF

SEQ ID NO: 558547 - protein, 14 aa, Homo sapiens
  CDR3 for alpha chain variable domain of TCR clone 279274 (TRAV35, TRAJ22)
CAGLRPGSARQLTF

SEQ ID NO: 558548 - protein, 12 aa, Homo sapiens
  CDR3 for beta chain variable domain of TCR clone 279274 (TRBV11-2, TRBJ2-5)
CASSLGQETQYF

SEQ ID NO: 558549 - protein, 14 aa, Homo sapiens
  CDR3 for alpha chain variable domain of TCR clone 279275 (TRAV29/DV5, TRAJ32)
CAAAYGGATNKPIF

SEQ ID NO: 558550 - protein, 11 aa, Homo sapiens
  CDR3 for beta chain variable domain of TCR clone 279275 (TRBV11-2, TRBJ2-2)
CSSSLPGELFF

SEQ ID NO: 558551 - protein, 13 aa, Homo sapiens
  CDR3 for alpha chain variable domain of TCR clone 279276 (TRAV12-3, TRAJ5)
CAMIYTGRRALTL

SEQ ID NO: 558552 - protein, 16 aa, Homo sapiens
  CDR3 for beta chain variable domain of TCR clone 279276 (TRBV7-2, TRBJ2-7)
CASSLVMGVGSYEQYF

SEQ ID NO: 558553 - protein, 12 aa, Homo sapiens
  CDR3 for alpha chain variable domain of TCR clone 279277 (TRAV21, TRAJ52)
CAVGVNAGGTSY

SEQ ID NO: 558554 - protein, 13 aa, Homo sapiens
  CDR3 for beta chain variable domain of TCR clone 279277 (TRBV5-1, TRBJ1-2)
CASSFQGNYGYTF

SEQ ID NO: 558555 - protein, 14 aa, Homo sapiens
  CDR3 for alpha chain variable domain of TCR clone 279278 (TRAV12-1, TRAJ3)
CVLNPGSSASKIIF

SEQ ID NO: 558556 - protein, 14 aa, Homo sapiens
  CDR3 for beta chain variable domain of TCR clone 279278 (TRBV20-1, TRBJ2-3)
CSARGGTSTDTQYF

SEQ ID NO: 558557 - protein, 14 aa, Homo sapiens
  CDR3 for alpha chain variable domain of TCR clone 279279 (TRAV8-4, TRAJ4)
CAVSPSGGYNKLIF

SEQ ID NO: 558558 - protein, 15 aa, Homo sapiens
  CDR3 for beta chain variable domain of TCR clone 279279 (TRBV7-8, TRBJ2-3)
CASSLSAASGGAQYF

SEQ ID NO: 558559 - protein, 14 aa, Homo sapiens
  CDR3 for alpha chain variable domain of TCR clone 279280 (TRAV8-1, TRAJ34)
CAVITTYNTDKLIC

SEQ ID NO: 558560 - protein, 14 aa, Homo sapiens
  CDR3 for beta chain variable domain of TCR clone 279280 (TRBV11-3, TRBJ1-3)
CASSHNGQGNTIYF

SEQ ID NO: 558561 - protein, 14 aa, Homo sapiens
  CDR3 for alpha chain variable domain of TCR clone 279281 (TRAV12-1, TRAJ38)
CVVHNAGNNCKLIW

SEQ ID NO: 558562 - protein, 16 aa, Homo sapiens
  CDR3 for beta chain variable domain of TCR clone 279281 (TRBV7-3, TRBJ2-1)
CASSLEGYRSYNEQFF

SEQ ID NO: 558563 - protein, 11 aa, Homo sapiens
  CDR3 for alpha chain variable domain of TCR clone 279282 (TRAV21, TRAJ11)
CAVNGYSTLTF

SEQ ID NO: 558564 - protein, 14 aa, Homo sapiens
  CDR3 for beta chain variable domain of TCR clone 279282 (TRBV6-1, TRBJ2-2)
CASVEHIESGELFF

SEQ ID NO: 558565 - protein, 13 aa, Homo sapiens
  CDR3 for alpha chain variable domain of TCR clone 279283 (TRAV13-2, TRAJ54)
CAENYQGAQKLVF

SEQ ID NO: 558566 - protein, 16 aa, Homo sapiens
  CDR3 for beta chain variable domain of TCR clone 279283 (TRBV7-3, TRBJ2-3)
CASSLSGYRPDDTQYF

SEQ ID NO: 558567 - protein, 14 aa, Homo sapiens
  CDR3 for alpha chain variable domain of TCR clone 279284 (TRAV8-6, TRAJ54)
CAVSPAPGAQKLVF

SEQ ID NO: 558568 - protein, 15 aa, Homo sapiens
  CDR3 for beta chain variable domain of TCR clone 279284 (TRBV4-1, TRBJ1-6)
CASSAGQGYNSPLHF

SEQ ID NO: 558569 - protein, 15 aa, Homo sapiens
  CDR3 for alpha chain variable domain of TCR clone 279285 (TRAV3, TRAJ5)
CAVRDLDTSRRASTF

SEQ ID NO: 558570 - protein, 13 aa, Homo sapiens
  CDR3 for beta chain variable domain of TCR clone 279285 (TRBV12-4, TRBJ2-7)
CASSPTETYEQYF

SEQ ID NO: 558571 - protein, 11 aa, Homo sapiens
  CDR3 for alpha chain variable domain of TCR clone 279286 (TRAV12-3, TRAJ43)
CAMSVSNDMRF

SEQ ID NO: 558572 - protein, 15 aa, Homo sapiens
  CDR3 for beta chain variable domain of TCR clone 279286 (TRBV7-3, TRBJ2-1)
CASSPTGGGEVEQFF

SEQ ID NO: 558573 - protein, 13 aa, Homo sapiens
  CDR3 for alpha chain variable domain of TCR clone 279287 (TRAV12-2, TRAJ20)
CAVYPSNDYKPSF

SEQ ID NO: 558574 - protein, 20 aa, Homo sapiens
  CDR3 for beta chain variable domain of TCR clone 279287 (TRBV27, TRBJ2-5)
CASSLYPRGGRDPVLRARHA

SEQ ID NO: 558575 - protein, 14 aa, Homo sapiens
  CDR3 for alpha chain variable domain of TCR clone 279288 (TRAV26-1, TRAJ38)
FIADNAGNSRKLIW

SEQ ID NO: 558576 - protein, 13 aa, Homo sapiens
  CDR3 for beta chain variable domain of TCR clone 279288 (TRBV4-1, TRBJ2-7)
CASSQGQAYEQYF

SEQ ID NO: 558577 - protein, 15 aa, Homo sapiens
  CDR3 for alpha chain variable domain of TCR clone 279289 (TRAV8-2, TRAJ36)
CGVSENWGKQPLLWD

SEQ ID NO: 558578 - protein, 15 aa, Homo sapiens
  CDR3 for beta chain variable domain of TCR clone 279289 (TRBV20-1, TRBJ2-5)
CSAEGTGGLQETQYL

SEQ ID NO: 558579 - protein, 16 aa, Homo sapiens
  CDR3 for alpha chain variable domain of TCR clone 279290 (TRAV26-1, TRAJ23)
CIVRVANSNQGGKLIF

SEQ ID NO: 558580 - protein, 14 aa, Homo sapiens
  CDR3 for beta chain variable domain of TCR clone 279290 (TRBV6-1, TRBJ1-3)
CASVQGGGGNTIYF

SEQ ID NO: 558581 - protein, 15 aa, Homo sapiens
  CDR3 for alpha chain variable domain of TCR clone 279291 (TRAV8-6, TRAJ23)
CAVREFYNQGGKLNF

SEQ ID NO: 558582 - protein, 15 aa, Homo sapiens
  CDR3 for beta chain variable domain of TCR clone 279291 (TRBV20-1, TRBJ2-1)
CSAITGTSGSNEQFF

SEQ ID NO: 558583 - protein, 13 aa, Homo sapiens
  CDR3 for alpha chain variable domain of TCR clone 279292 (TRAV30, TRAJ24)
CGTVTDSWGKLQF

SEQ ID NO: 558584 - protein, 20 aa, Homo sapiens
  CDR3 for beta chain variable domain of TCR clone 279292 (TRBV7-8, TRBJ2-2)
CASSHLFPGPTIHITGELFF

SEQ ID NO: 558585 - protein, 16 aa, Homo sapiens
  CDR3 for alpha chain variable domain of TCR clone 279293 (TRAV23/DV6, TRAJ9)
CAASIGGNTGGFKTIF

SEQ ID NO: 558586 - protein, 16 aa, Homo sapiens
  CDR3 for beta chain variable domain of TCR clone 279293 (TRBV2, TRBJ2-1)
CASSVGGSLSYNEQFF

SEQ ID NO: 558587 - protein, 12 aa, Homo sapiens
  CDR3 for alpha chain variable domain of TCR clone 279294 (TRAV8-3, TRAJ48)
CAVVPFGNEINL

SEQ ID NO: 558588 - protein, 12 aa, Homo sapiens
  CDR3 for beta chain variable domain of TCR clone 279294 (TRBV11-2, TRBJ2-2)
CASSLGGGELFF

SEQ ID NO: 558589 - protein, 13 aa, Homo sapiens
  CDR3 for alpha chain variable domain of TCR clone 279295 (TRAV8-6, TRAJ54)
CAGGIQGAQKLVF

SEQ ID NO: 558590 - protein, 13 aa, Homo sapiens
  CDR3 for beta chain variable domain of TCR clone 279295 (TRBV10-3, TRBJ2-7)
CASKLAVNYEQYF

SEQ ID NO: 558591 - protein, 13 aa, Homo sapiens
  CDR3 for alpha chain variable domain of TCR clone 279296 (TRAV13-2, TRAJ48)
CAEMDFANEKLTF

SEQ ID NO: 558592 - protein, 12 aa, Homo sapiens
  CDR3 for beta chain variable domain of TCR clone 279296 (TRBV5-1, TRBJ1-2)
CASSQDTYGYTF

SEQ ID NO: 558593 - protein, 14 aa, Homo sapiens
  CDR3 for alpha chain variable domain of TCR clone 279297 (TRAV12-2, TRAJ44)
CAVNPAGTASKLTF

SEQ ID NO: 558594 - protein, 13 aa, Homo sapiens
  CDR3 for beta chain variable domain of TCR clone 279297 (TRBV20-1, TRBJ1-6)
CSASLGVGSPLLF

SEQ ID NO: 558595 - protein, 14 aa, Homo sapiens
  CDR3 for alpha chain variable domain of TCR clone 279298 (TRAV1-2, TRAJ8)
CAVSEDTGFQKLVF

SEQ ID NO: 558596 - protein, 14 aa, Homo sapiens
  CDR3 for beta chain variable domain of TCR clone 279298 (TRBV7-2, TRBJ2-7)
CASSPKTSFYEQYF

SEQ ID NO: 558597 - protein, 15 aa, Homo sapiens
  CDR3 for alpha chain variable domain of TCR clone 279299 (TRAV2, TRAJ9)
CAVEDRGTGGFKTIF

SEQ ID NO: 558598 - protein, 15 aa, Homo sapiens
  CDR3 for beta chain variable domain of TCR clone 279299 (TRBV7-9, TRBJ1-6)
CASSSPGRGNSPLHL

SEQ ID NO: 558599 - protein, 16 aa, Homo sapiens
  CDR3 for alpha chain variable domain of TCR clone 279300 (TRAV23/DV6, TRAJ9)
CAARIGGNTGGFKTIF

SEQ ID NO: 558600 - protein, 18 aa, Homo sapiens
  CDR3 for beta chain variable domain of TCR clone 279300 (TRBV7-9, TRBJ2-7)
CASSLTTSGSRTWYEQYF

SEQ ID NO: 558601 - protein, 10 aa, Homo sapiens
  CDR3 for alpha chain variable domain of TCR clone 279301 (TRAV13-1, TRAJ8)
CAAPFQKLVF

SEQ ID NO: 558602 - protein, 18 aa, Homo sapiens
  CDR3 for beta chain variable domain of TCR clone 279301 (TRBV11-2, TRBJ2-3)
CASSLGGASRGAPNTQYF

SEQ ID NO: 558603 - protein, 14 aa, Homo sapiens
  CDR3 for alpha chain variable domain of TCR clone 279302 (TRAV34, TRAJ44)
CGADGTGTASKLTF

SEQ ID NO: 558604 - protein, 17 aa, Homo sapiens
  CDR3 for beta chain variable domain of TCR clone 279302 (TRBV28, TRBJ2-5)
CASSRQGGLAGDETQYF

SEQ ID NO: 558605 - protein, 14 aa, Homo sapiens
  CDR3 for alpha chain variable domain of TCR clone 279303 (TRAV8-2, TRAJ4)
CVVSPSGGCNKLIF

SEQ ID NO: 558606 - protein, 14 aa, Homo sapiens
  CDR3 for beta chain variable domain of TCR clone 279303 (TRBV7-3, TRBJ2-2)
CASSSGGYTGELFF

SEQ ID NO: 558607 - protein, 13 aa, Homo sapiens
  CDR3 for alpha chain variable domain of TCR clone 279304 (TRAV12-2, TRAJ9)
CAVKWAGGFKTIF

SEQ ID NO: 558608 - protein, 16 aa, Homo sapiens
  CDR3 for beta chain variable domain of TCR clone 279304 (TRBV10-3, TRBJ2-1)
CAISGVGDGGGGEQFF

SEQ ID NO: 558609 - protein, 14 aa, Homo sapiens
  CDR3 for alpha chain variable domain of TCR clone 279305 (TRAV1-2, TRAJ16)
CAVNRFSDGQKLRF

SEQ ID NO: 558610 - protein, 16 aa, Homo sapiens
  CDR3 for beta chain variable domain of TCR clone 279305 (TRBV7-3, TRBJ2-2)
CASSLKRGTLSGELFF

SEQ ID NO: 558611 - protein, 12 aa, Homo sapiens
  CDR3 for alpha chain variable domain of TCR clone 279306 (TRAV25, TRAJ31)
CAGHLNNARLMF

SEQ ID NO: 558612 - protein, 14 aa, Homo sapiens
  CDR3 for beta chain variable domain of TCR clone 279306 (TRBV7-9, TRBJ2-7)
CASSLSQGSYEQYF

SEQ ID NO: 558613 - protein, 14 aa, Homo sapiens
  CDR3 for alpha chain variable domain of TCR clone 279307 (TRAV17, TRAJ54)
CATDANQGAQKLEF

SEQ ID NO: 558614 - protein, 12 aa, Homo sapiens
  CDR3 for beta chain variable domain of TCR clone 279307 (TRBV7-9, TRBJ2-7)
CASSIKREEQYF

SEQ ID NO: 558615 - protein, 12 aa, Homo sapiens
  CDR3 for alpha chain variable domain of TCR clone 279308 (TRAV21, TRAJ58)
CSAETSGTRLTF

SEQ ID NO: 558616 - protein, 15 aa, Homo sapiens
  CDR3 for beta chain variable domain of TCR clone 279308 (TRBV20-1, TRBJ2-7)
CSARDPVKGEGEQYF

SEQ ID NO: 558617 - protein, 14 aa, Homo sapiens
  CDR3 for alpha chain variable domain of TCR clone 279309 (TRAV26-1, TRAJ22)
CIVRVYGSARQLTF

SEQ ID NO: 558618 - protein, 17 aa, Homo sapiens
  CDR3 for beta chain variable domain of TCR clone 279309 (TRBV7-3, TRBJ2-3)
CASSPGVLAGFGDTQYF

SEQ ID NO: 558619 - protein, 13 aa, Homo sapiens
  CDR3 for alpha chain variable domain of TCR clone 279310 (TRAV1-1, TRAJ23)
CAVVANQGGKLIF

SEQ ID NO: 558620 - protein, 16 aa, Homo sapiens
  CDR3 for beta chain variable domain of TCR clone 279310 (TRBV5-5, TRBJ1-2)
CASSPTWGRGLYGYSF

SEQ ID NO: 558621 - protein, 15 aa, Homo sapiens
  CDR3 for alpha chain variable domain of TCR clone 279311 (TRAV2, TRAJ9)
CAVEDRGTGGFKTIF

SEQ ID NO: 558622 - protein, 16 aa, Homo sapiens
  CDR3 for beta chain variable domain of TCR clone 279311 (TRBV24-1, TRBJ2-3)
CATSDPGTGAADTQYY

SEQ ID NO: 558623 - protein, 13 aa, Homo sapiens
  CDR3 for alpha chain variable domain of TCR clone 279312 (TRAV1-2, TRAJ9)
CAVLNTGGFKTIF

SEQ ID NO: 558624 - protein, 14 aa, Homo sapiens
  CDR3 for beta chain variable domain of TCR clone 279312 (TRBV12-5, TRBJ2-5)
CASGSRTHQETQYF

SEQ ID NO: 558625 - protein, 14 aa, Homo sapiens
  CDR3 for alpha chain variable domain of TCR clone 279313 (TRAV9-2, TRAJ39)
CALYNYNAGNMLTF

SEQ ID NO: 558626 - protein, 14 aa, Homo sapiens
  CDR3 for beta chain variable domain of TCR clone 279313 (TRBV19, TRBJ2-1)
CASPTFVLSGEQFF

SEQ ID NO: 558627 - protein, 14 aa, Homo sapiens
  CDR3 for alpha chain variable domain of TCR clone 279314 (TRAV12-2, TRAJ13)
CAVKKNGGYQKVTF

SEQ ID NO: 558628 - protein, 13 aa, Homo sapiens
  CDR3 for beta chain variable domain of TCR clone 279314 (TRBV7-7, TRBJ2-3)
CASSLSRADTQDF

SEQ ID NO: 558629 - protein, 13 aa, Homo sapiens
  CDR3 for alpha chain variable domain of TCR clone 279315 (TRAV13-1, TRAJ5)
CAASDTGRRALTF

SEQ ID NO: 558630 - protein, 11 aa, Homo sapiens
  CDR3 for beta chain variable domain of TCR clone 279315 (TRBV28, TRBJ2-3)
CQQFIPRTAVF

SEQ ID NO: 558631 - protein, 13 aa, Homo sapiens
  CDR3 for alpha chain variable domain of TCR clone 279316 (TRAV2, TRAJ15)
CAVASQAGTALIF

SEQ ID NO: 558632 - protein, 15 aa, Homo sapiens
  CDR3 for beta chain variable domain of TCR clone 279316 (TRBV19, TRBJ2-3)
CASSMSTTSTDTQYF

SEQ ID NO: 558633 - protein, 16 aa, Homo sapiens
  CDR3 for alpha chain variable domain of TCR clone 279317 (TRAV17, TRAJ22)
CATGPISSGSARQLTF

SEQ ID NO: 558634 - protein, 14 aa, Homo sapiens
  CDR3 for beta chain variable domain of TCR clone 279317 (TRBV7-2, TRBJ2-2)
CASSLEANTGELFF

SEQ ID NO: 558635 - protein, 13 aa, Homo sapiens
  CDR3 for alpha chain variable domain of TCR clone 279318 (TRAV17, TRAJ9)
CATFLTGGFKTIF

SEQ ID NO: 558636 - protein, 16 aa, Homo sapiens
  CDR3 for beta chain variable domain of TCR clone 279318 (TRBV5-7, TRBJ1-4)
CASSPSGGLKTEKVFF

SEQ ID NO: 558637 - protein, 13 aa, Homo sapiens
  CDR3 for alpha chain variable domain of TCR clone 279319 (TRAV12-3, TRAJ33)
CAMSMNSSYQLIW

SEQ ID NO: 558638 - protein, 13 aa, Homo sapiens
  CDR3 for beta chain variable domain of TCR clone 279319 (TRBV7-2, TRBJ2-2)
CASSLAVTGELFF

SEQ ID NO: 558639 - protein, 14 aa, Homo sapiens
  CDR3 for alpha chain variable domain of TCR clone 279320 (TRAV29/DV5, TRAJ49)
CAASAQNTGNQFYF

SEQ ID NO: 558640 - protein, 14 aa, Homo sapiens
  CDR3 for beta chain variable domain of TCR clone 279320 (TRBV12-5, TRBJ2-5)
CASGSRTHQETQYF

SEQ ID NO: 558641 - protein, 14 aa, Homo sapiens
  CDR3 for alpha chain variable domain of TCR clone 279321 (TRAV21, TRAJ28)
CAVGSGAGSYQLTF

SEQ ID NO: 558642 - protein, 14 aa, Homo sapiens
  CDR3 for beta chain variable domain of TCR clone 279321 (TRBV18, IGHJ2)
CASSPGPNGDKLFF

SEQ ID NO: 558643 - protein, 12 aa, Homo sapiens
  CDR3 for alpha chain variable domain of TCR clone 279322 (TRAV3, TRAJ7)
CADLLWEQQTRF

SEQ ID NO: 558644 - protein, 13 aa, Homo sapiens
  CDR3 for beta chain variable domain of TCR clone 279322 (TRBV7-3, TRBJ2-5)
CASSFRGGDTQYF

SEQ ID NO: 558645 - protein, 15 aa, Homo sapiens
  CDR3 for alpha chain variable domain of TCR clone 279323 (TRAV35, TRAJ58)
CAGRRQETSGSRLTF

SEQ ID NO: 558646 - protein, 15 aa, Homo sapiens
  CDR3 for beta chain variable domain of TCR clone 279323 (TRBV11-2, TRBJ1-1)
CASSSRSSLLLSLDK

SEQ ID NO: 558647 - protein, 15 aa, Homo sapiens
  CDR3 for alpha chain variable domain of TCR clone 279324 (TRAV1-2, TRAJ3)
CAVRGGYSSASKIIF

SEQ ID NO: 558648 - protein, 13 aa, Homo sapiens
  CDR3 for beta chain variable domain of TCR clone 279324 (TRBV7-9, TRBJ1-2)
CASSLKQNYGYTF

SEQ ID NO: 558649 - protein, 12 aa, Homo sapiens
  CDR3 for alpha chain variable domain of TCR clone 279325 (TRAV26-1, TRAJ48)
CIAVFGNEKLTF

SEQ ID NO: 558650 - protein, 17 aa, Homo sapiens
  CDR3 for beta chain variable domain of TCR clone 279325 (TRBV7-6, TRBJ2-1)
CASSFGLAGGTYNEQFS

SEQ ID NO: 558651 - protein, 15 aa, Homo sapiens
  CDR3 for alpha chain variable domain of TCR clone 279326 (TRAV17, TRAJ57)
CATGPSQGGSEKLVV

SEQ ID NO: 558652 - protein, 15 aa, Homo sapiens
  CDR3 for beta chain variable domain of TCR clone 279326 (TRBV6-3, TRBJ2-7)
CASSSPGTVFYEQYF

SEQ ID NO: 558653 - protein, 18 aa, Homo sapiens
  CDR3 for alpha chain variable domain of TCR clone 279327 (TRAV12-3, TRAJ52)
CAMSRTYAGGTSYGKLTF

SEQ ID NO: 558654 - protein, 17 aa, Homo sapiens
  CDR3 for beta chain variable domain of TCR clone 279327 (TRBV7-3, TRBJ2-3)
CASSLTKRMRGADTRYF

SEQ ID NO: 558655 - protein, 11 aa, Homo sapiens
  CDR3 for alpha chain variable domain of TCR clone 279328 (TRAV1-2, TRAJ40)
FSVPGTYKYIF

SEQ ID NO: 558656 - protein, 16 aa, Homo sapiens
  CDR3 for beta chain variable domain of TCR clone 279328 (TRBV29-1, TRBJ2-7)
CSVEVVGTSGGYEQYF

SEQ ID NO: 558657 - protein, 15 aa, Homo sapiens
  CDR3 for alpha chain variable domain of TCR clone 279329 (TRAV17, TRAJ40)
CATVSSTSGTYKYIF

SEQ ID NO: 558658 - protein, 14 aa, Homo sapiens
  CDR3 for beta chain variable domain of TCR clone 279329 (TRBV7-6, TRBJ2-3)
CASSLGTVTDTQYF

SEQ ID NO: 558659 - protein, 13 aa, Homo sapiens
  CDR3 for alpha chain variable domain of TCR clone 279330 (TRAV12-3, TRAJ53)
CAMRGGSNYKLTF

SEQ ID NO: 558660 - protein, 16 aa, Homo sapiens
  CDR3 for beta chain variable domain of TCR clone 279330 (TRBV7-3, TRBJ2-2)
CASSLKRGTLSGELFF

SEQ ID NO: 558661 - protein, 13 aa, Homo sapiens
  CDR3 for alpha chain variable domain of TCR clone 279331 (TRAV8-6, TRAJ49)
CAVITNTGNQFYF

SEQ ID NO: 558662 - protein, 14 aa, Homo sapiens
  CDR3 for beta chain variable domain of TCR clone 279331 (TRBV5-1, TRBJ2-7)
CVSSRGESLYEQYF

SEQ ID NO: 558663 - protein, 15 aa, Homo sapiens
  CDR3 for alpha chain variable domain of TCR clone 279332 (TRAV8-3, TRAJ45)
CASSYSGGGADGLTF

SEQ ID NO: 558664 - protein, 13 aa, Homo sapiens
  CDR3 for beta chain variable domain of TCR clone 279332 (TRBV11-2, TRBJ1-6)
CASSLAGVSPLHF

SEQ ID NO: 558665 - protein, 12 aa, Homo sapiens
  CDR3 for alpha chain variable domain of TCR clone 279333 (TRAV23/DV6, TRAJ58)
CAARLLRGETSC

SEQ ID NO: 558666 - protein, 13 aa, Homo sapiens
  CDR3 for beta chain variable domain of TCR clone 279333 (TRBV6-4, TRBJ1-5)
CASSADLNQPQHF

SEQ ID NO: 558667 - protein, 20 aa, Homo sapiens
  CDR3 for alpha chain variable domain of TCR clone 279334 (TRAV8-3, )
CAVGAGDIQNPDPAVYQMRD

SEQ ID NO: 558668 - protein, 13 aa, Homo sapiens
  CDR3 for beta chain variable domain of TCR clone 279334 (TRBV7-2, TRBJ2-2)
CASSLAVTGELFF

SEQ ID NO: 558669 - protein, 13 aa, Homo sapiens
  CDR3 for alpha chain variable domain of TCR clone 279335 (TRAV38-2/DV8, TRAJ56)
CAYQSRANSKLPF

SEQ ID NO: 558670 - protein, 16 aa, Homo sapiens
  CDR3 for beta chain variable domain of TCR clone 279335 (TRBV28, TRBJ1-1)
CASSSGGQPVATEAFF

SEQ ID NO: 558671 - protein, 17 aa, Homo sapiens
  CDR3 for alpha chain variable domain of TCR clone 279336 (TRAV3, TRAJ6)
CAVRDGPRAGGSYIPTF

SEQ ID NO: 558672 - protein, 19 aa, Homo sapiens
  CDR3 for beta chain variable domain of TCR clone 279336 (TRBV19, TRBJ2-6)
CASTPTWGRAASGANVLTF

SEQ ID NO: 558673 - protein, 14 aa, Homo sapiens
  CDR3 for alpha chain variable domain of TCR clone 279337 (TRAV27, TRAJ23)
CAGLSYNQGGKLIF

SEQ ID NO: 558674 - protein, 14 aa, Homo sapiens
  CDR3 for beta chain variable domain of TCR clone 279337 (TRBV14, TRBJ2-1)
CASRRPGAGGEQFF

SEQ ID NO: 558675 - protein, 13 aa, Homo sapiens
  CDR3 for alpha chain variable domain of TCR clone 279338 (TRAV27, TRAJ54)
CAGAGQGAHKLVF

SEQ ID NO: 558676 - protein, 15 aa, Homo sapiens
  CDR3 for beta chain variable domain of TCR clone 279338 (TRBV18, TRBJ2-6)
CASSPSYAGANVLTF

SEQ ID NO: 558677 - protein, 15 aa, Homo sapiens
  CDR3 for alpha chain variable domain of TCR clone 279339 (TRAV8-3, TRAJ27)
CAVGPSKTNAGKSTF

SEQ ID NO: 558678 - protein, 22 aa, Homo sapiens
  CDR3 for beta chain variable domain of TCR clone 279339 (TRBV7-2, TRBJ2-1)
RRTRPCISVPAARLAGGNEQFF

SEQ ID NO: 558679 - protein, 17 aa, Homo sapiens
  CDR3 for alpha chain variable domain of TCR clone 279340 (TRAV8-6, TRAJ8)
CAVKEGIENTGFQKLVF

SEQ ID NO: 558680 - protein, 15 aa, Homo sapiens
  CDR3 for beta chain variable domain of TCR clone 279340 (TRBV7-9, TRBJ1-5)
CASSQGHQPNQPQHF

SEQ ID NO: 558681 - protein, 14 aa, Homo sapiens
  CDR3 for alpha chain variable domain of TCR clone 279341 (TRAV1-2, TRAJ16)
CAVNRFSDGQKLLF

SEQ ID NO: 558682 - protein, 12 aa, Homo sapiens
  CDR3 for beta chain variable domain of TCR clone 279341 (TRBV24-1, TRBJ2-3)
CATSDSTGTQYF

SEQ ID NO: 558683 - protein, 11 aa, Homo sapiens
  CDR3 for alpha chain variable domain of TCR clone 279342 (TRAV1-1, TRAJ23)
CAVRQGGKLIF

SEQ ID NO: 558684 - protein, 18 aa, Homo sapiens
  CDR3 for beta chain variable domain of TCR clone 279342 (TRBV20-1, TRBJ2-3)
CSASGLAGGPGTTDTQYF

SEQ ID NO: 558685 - protein, 17 aa, Homo sapiens
  CDR3 for alpha chain variable domain of TCR clone 279343 (TRAV8-4, TRAJ3)
CAVTGENLVQQCFQDNF

SEQ ID NO: 558686 - protein, 16 aa, Homo sapiens
  CDR3 for beta chain variable domain of TCR clone 279343 (TRBV4-2, TRBJ1-1)
CASSQAGFGMNTEAFF

SEQ ID NO: 558687 - protein, 16 aa, Homo sapiens
  CDR3 for alpha chain variable domain of TCR clone 279344 (TRAV3, TRAJ10)
CAVRDMRAGGGNKLTF

SEQ ID NO: 558688 - protein, 16 aa, Homo sapiens
  CDR3 for beta chain variable domain of TCR clone 279344 (TRBV7-2, TRBJ2-1)
CASSLVAGAGYNEQFF

SEQ ID NO: 558689 - protein, 16 aa, Homo sapiens
  CDR3 for alpha chain variable domain of TCR clone 279345 (TRAV12-3, TRAJ53)
CAMSPGSGGSNYKLTF

SEQ ID NO: 558690 - protein, 13 aa, Homo sapiens
  CDR3 for beta chain variable domain of TCR clone 279345 (TRBV2, TRBJ1-2)
CASSVRGNYGYTF

SEQ ID NO: 558691 - protein, 14 aa, Homo sapiens
  CDR3 for alpha chain variable domain of TCR clone 279346 (TRAV3, TRAJ17)
CAVRDAAAGNKLTF

SEQ ID NO: 558692 - protein, 13 aa, Homo sapiens
  CDR3 for beta chain variable domain of TCR clone 279346 (TRBV19, TRBJ1-2)
CANSVPGQDGYTF

SEQ ID NO: 558693 - protein, 13 aa, Homo sapiens
  CDR3 for alpha chain variable domain of TCR clone 279347 (TRAV16, TRAJ30)
CALAHNRDDKIIF

SEQ ID NO: 558694 - protein, 15 aa, Homo sapiens
  CDR3 for beta chain variable domain of TCR clone 279347 (TRBV2, TRBJ1-1)
CASTEPGQGASGAFF

SEQ ID NO: 558695 - protein, 16 aa, Homo sapiens
  CDR3 for alpha chain variable domain of TCR clone 279348 (TRAV1-2, TRAJ10)
CAVRGVLTGGGNKLTF

SEQ ID NO: 558696 - protein, 14 aa, Homo sapiens
  CDR3 for beta chain variable domain of TCR clone 279348 (TRBV11-2, TRBJ1-2)
CASSLGTANYGYAF

SEQ ID NO: 558697 - protein, 14 aa, Homo sapiens
  CDR3 for alpha chain variable domain of TCR clone 279349 (TRAV35, TRAJ22)
CAGLRPGSARQLTS

SEQ ID NO: 558698 - protein, 14 aa, Homo sapiens
  CDR3 for beta chain variable domain of TCR clone 279349 (TRBV12-5, TRBJ2-5)
CASGSRTHQETQYF

SEQ ID NO: 558699 - protein, 14 aa, Homo sapiens
  CDR3 for alpha chain variable domain of TCR clone 279350 (TRAV12-2, TRAJ13)
CAVQKTGGYQKVTF

SEQ ID NO: 558700 - protein, 11 aa, Homo sapiens
  CDR3 for beta chain variable domain of TCR clone 279350 (TRBV11-2, TRBJ2-2)
CASSLPGELFF

SEQ ID NO: 558701 - protein, 12 aa, Homo sapiens
  CDR3 for alpha chain variable domain of TCR clone 279351 (TRAV21, TRAJ31)
CAVSPARGRLKF

SEQ ID NO: 558702 - protein, 14 aa, Homo sapiens
  CDR3 for beta chain variable domain of TCR clone 279351 (TRBV28, TRBJ2-7)
CASSLLRISYEQYF

SEQ ID NO: 558703 - protein, 15 aa, Homo sapiens
  CDR3 for alpha chain variable domain of TCR clone 279352 (TRAV26-1, TRAJ29)
CIVRVAGSGNTSLVF

SEQ ID NO: 558704 - protein, 14 aa, Homo sapiens
  CDR3 for beta chain variable domain of TCR clone 279352 (TRBV18, TRBJ2-5)
CASSPGVSQATQYF

SEQ ID NO: 558705 - protein, 11 aa, Homo sapiens
  CDR3 for alpha chain variable domain of TCR clone 279353 (TRAV3, TRAJ21)
CAVGNFNKFYF

SEQ ID NO: 558706 - protein, 16 aa, Homo sapiens
  CDR3 for beta chain variable domain of TCR clone 279353 (TRBV28, TRBJ2-1)
CASSSPEYPRDNEQFF

SEQ ID NO: 558707 - protein, 11 aa, Homo sapiens
  CDR3 for alpha chain variable domain of TCR clone 279354 (TRAV4, TRAJ28)
NSGAGSYQLTF

SEQ ID NO: 558708 - protein, 13 aa, Homo sapiens
  CDR3 for beta chain variable domain of TCR clone 279354 (TRBV12-4, TRBJ2-6)
RASSGTGANVLTF

SEQ ID NO: 558709 - protein, 12 aa, Homo sapiens
  CDR3 for alpha chain variable domain of TCR clone 279355 (TRAV12-1, TRAJ9)
CVVPWAGFKTIF

SEQ ID NO: 558710 - protein, 16 aa, Homo sapiens
  CDR3 for beta chain variable domain of TCR clone 279355 (TRBV7-3, TRBJ2-2)
CASSLKRGTLSGELSF

SEQ ID NO: 558711 - protein, 14 aa, Homo sapiens
  CDR3 for alpha chain variable domain of TCR clone 279356 (TRAV12-2, TRAJ52)
CRCAGGTSYGKLTF

SEQ ID NO: 558712 - protein, 12 aa, Homo sapiens
  CDR3 for beta chain variable domain of TCR clone 279356 (TRBV24-1, TRBJ1-1)
CATLYPDTEASF

SEQ ID NO: 558713 - protein, 14 aa, Homo sapiens
  CDR3 for alpha chain variable domain of TCR clone 279357 (TRAV1-1, TRAJ27)
CAVIYNTNAGKSTF

SEQ ID NO: 558714 - protein, 14 aa, Homo sapiens
  CDR3 for beta chain variable domain of TCR clone 279357 (TRBV25-1, TRBJ1-1)
CASTHLVGNTEAFF

SEQ ID NO: 558715 - protein, 12 aa, Homo sapiens
  CDR3 for alpha chain variable domain of TCR clone 279358 (TRAV12-3, TRAJ17)
CAMTLTGNKLTF

SEQ ID NO: 558716 - protein, 16 aa, Homo sapiens
  CDR3 for beta chain variable domain of TCR clone 279358 (TRBV12-4, TRBJ2-5)
CASSFFVRGRQENQYF

SEQ ID NO: 558717 - protein, 14 aa, Homo sapiens
  CDR3 for alpha chain variable domain of TCR clone 279359 (TRAV8-6, TRAJ12)
CAVKAADSSYKLIF

SEQ ID NO: 558718 - protein, 19 aa, Homo sapiens
  CDR3 for beta chain variable domain of TCR clone 279359 (TRBV5-1, TRBJ2-5)
CASSLGLAEQETSTSGQAR

SEQ ID NO: 558719 - protein, 12 aa, Homo sapiens
  CDR3 for alpha chain variable domain of TCR clone 279360 (TRAV12-2, TRAJ8)
CAVNTGFQKLVF

SEQ ID NO: 558720 - protein, 16 aa, Homo sapiens
  CDR3 for beta chain variable domain of TCR clone 279360 (TRBV19, TRBJ2-2)
CASRSPGTGATGELFF

SEQ ID NO: 558721 - protein, 11 aa, Homo sapiens
  CDR3 for alpha chain variable domain of TCR clone 279361 (TRAV1-2, TRAJ20)
CAVANDYKISF

SEQ ID NO: 558722 - protein, 18 aa, Homo sapiens
  CDR3 for beta chain variable domain of TCR clone 279361 (TRBV20-1, TRBJ2-6)
CSAETTPTHGSGANVLTF

SEQ ID NO: 558723 - protein, 12 aa, Homo sapiens
  CDR3 for alpha chain variable domain of TCR clone 279362 (TRAV2, TRAJ9)
CAVGAGGFKTIF

SEQ ID NO: 558724 - protein, 15 aa, Homo sapiens
  CDR3 for beta chain variable domain of TCR clone 279362 (TRBV7-9, TRBJ2-2)
CASGPLDTFPGELFF

SEQ ID NO: 558725 - protein, 14 aa, Homo sapiens
  CDR3 for alpha chain variable domain of TCR clone 279363 (TRAV8-6, TRAJ54)
CAVSDFQGAQKLVF

SEQ ID NO: 558726 - protein, 11 aa, Homo sapiens
  CDR3 for beta chain variable domain of TCR clone 279363 (TRBV11-2, TRBJ1-1)
CASSINTEAFF

SEQ ID NO: 558727 - protein, 11 aa, Homo sapiens
  CDR3 for alpha chain variable domain of TCR clone 279364 (TRAV21, TRAJ34)
CAHYNTDKLIF

SEQ ID NO: 558728 - protein, 13 aa, Homo sapiens
  CDR3 for beta chain variable domain of TCR clone 279364 (TRBV7-6, TRBJ1-2)
CASSLKQNYGYTF

SEQ ID NO: 558729 - protein, 11 aa, Homo sapiens
  CDR3 for alpha chain variable domain of TCR clone 279365 (TRAV26-1, TRAJ27)
CIDPNAGKSTF

SEQ ID NO: 558730 - protein, 18 aa, Homo sapiens
  CDR3 for beta chain variable domain of TCR clone 279365 (TRBV7-9, TRBJ2-6)
CASSFPGAGITGANVLTF

SEQ ID NO: 558731 - protein, 12 aa, Homo sapiens
  CDR3 for alpha chain variable domain of TCR clone 279366 (TRAV2, TRAJ9)
CAVGAGGFKTIF

SEQ ID NO: 558732 - protein, 15 aa, Homo sapiens
  CDR3 for beta chain variable domain of TCR clone 279366 (TRBV28, TRBJ2-7)
CASSLISGGSYEQYF

SEQ ID NO: 558733 - protein, 13 aa, Homo sapiens
  CDR3 for alpha chain variable domain of TCR clone 279367 (TRAV29/DV5, TRAJ31)
CAASRNNNARLMF

SEQ ID NO: 558734 - protein, 15 aa, Homo sapiens
  CDR3 for beta chain variable domain of TCR clone 279367 (TRBV7-2, TRBJ2-1)
CASAHGTGIYNEQFF

SEQ ID NO: 558735 - protein, 14 aa, Homo sapiens
  CDR3 for alpha chain variable domain of TCR clone 279368 (TRAV13-1, TRAJ35)
CAPSKGGFGNVLHC

SEQ ID NO: 558736 - protein, 16 aa, Homo sapiens
  CDR3 for beta chain variable domain of TCR clone 279368 (TRBV19, TRBJ1-1)
CASSPTRFWPGTEAFF

SEQ ID NO: 558737 - protein, 16 aa, Homo sapiens
  CDR3 for alpha chain variable domain of TCR clone 279369 (TRAV12-3, TRAJ53)
CAMSPRSGGSNYKLTF

SEQ ID NO: 558738 - protein, 17 aa, Homo sapiens
  CDR3 for beta chain variable domain of TCR clone 279369 (TRBV20-1, TRBJ2-2)
CSASGSGQGGLTGELFF

SEQ ID NO: 558739 - protein, 14 aa, Homo sapiens
  CDR3 for alpha chain variable domain of TCR clone 279370 (TRAV1-2, TRAJ16)
CAVNRFSDGQKLLF

SEQ ID NO: 558740 - protein, 14 aa, Homo sapiens
  CDR3 for beta chain variable domain of TCR clone 279370 (TRBV12-5, TRBJ2-5)
CASGSRTNQETQYF

SEQ ID NO: 558741 - protein, 12 aa, Homo sapiens
  CDR3 for alpha chain variable domain of TCR clone 279371 (TRAV13-1, TRAJ21)
CAAKEGFNKFYF

SEQ ID NO: 558742 - protein, 13 aa, Homo sapiens
  CDR3 for beta chain variable domain of TCR clone 279371 (TRBV19, TRBJ1-2)
CAGSVPGQDGYTF

SEQ ID NO: 558743 - protein, 14 aa, Homo sapiens
  CDR3 for alpha chain variable domain of TCR clone 279372 (TRAV12-3, TRAJ10)
SHLPLTGGGNKLTF

SEQ ID NO: 558744 - protein, 15 aa, Homo sapiens
  CDR3 for beta chain variable domain of TCR clone 279372 (TRBV13, TRBJ2-1)
CASSLLSGLNNEPFF

SEQ ID NO: 558745 - protein, 12 aa, Homo sapiens
  CDR3 for alpha chain variable domain of TCR clone 279373 (TRAV29/DV5, TRAJ26)
CAASEYGQNFVL

SEQ ID NO: 558746 - protein, 11 aa, Homo sapiens
  CDR3 for beta chain variable domain of TCR clone 279373 (TRBV12-4, TRBJ2-3)
CASTATDTQYF

SEQ ID NO: 558747 - protein, 14 aa, Homo sapiens
  CDR3 for alpha chain variable domain of TCR clone 279374 (TRAV12-2, TRAJ17)
CAALFKAAGNKLTF

SEQ ID NO: 558748 - protein, 15 aa, Homo sapiens
  CDR3 for beta chain variable domain of TCR clone 279374 (TRBV6-5, TRBJ2-1)
CASSYDAGAGNEQFF

SEQ ID NO: 558749 - protein, 17 aa, Homo sapiens
  CDR3 for alpha chain variable domain of TCR clone 279375 (TRAV23/DV6, TRAJ28)
CAALLAYSGAGSYQLTF

SEQ ID NO: 558750 - protein, 13 aa, Homo sapiens
  CDR3 for beta chain variable domain of TCR clone 279375 (TRBV18, TRBJ2-5)
CASSLQGQETQYF

SEQ ID NO: 558751 - protein, 16 aa, Homo sapiens
  CDR3 for alpha chain variable domain of TCR clone 279376 (TRAV35, TRAJ54)
SDVGIYPLQGAQKLVF

SEQ ID NO: 558752 - protein, 13 aa, Homo sapiens
  CDR3 for beta chain variable domain of TCR clone 279376 (TRBV2, TRBJ1-1)
CARNPTGGFHAFF

SEQ ID NO: 558753 - protein, 15 aa, Homo sapiens
  CDR3 for alpha chain variable domain of TCR clone 279377 (TRAV38-1, TRAJ37)
CAFIFGSANTGKLIF

SEQ ID NO: 558754 - protein, 16 aa, Homo sapiens
  CDR3 for beta chain variable domain of TCR clone 279377 (TRBV6-1, TRBJ2-3)
CASSEVIGQGTDTQYF

SEQ ID NO: 558755 - protein, 14 aa, Homo sapiens
  CDR3 for alpha chain variable domain of TCR clone 279378 (TRAV16, TRAJ39)
CALSKNNAGNMLTF

SEQ ID NO: 558756 - protein, 15 aa, Homo sapiens
  CDR3 for beta chain variable domain of TCR clone 279378 (TRBV27, TRBJ2-1)
CASSNGGGSSNEQFF

SEQ ID NO: 558757 - protein, 11 aa, Homo sapiens
  CDR3 for alpha chain variable domain of TCR clone 279379 (TRAV21, TRAJ31)
CAVRNNARLMF

SEQ ID NO: 558758 - protein, 15 aa, Homo sapiens
  CDR3 for beta chain variable domain of TCR clone 279379 (TRBV19, TRBJ2-7)
CASSPAGSGEALRYF

SEQ ID NO: 558759 - protein, 14 aa, Homo sapiens
  CDR3 for alpha chain variable domain of TCR clone 279380 (TRAV26-1, TRAJ6)
CIVSPVGGSYIPTF

SEQ ID NO: 558760 - protein, 14 aa, Homo sapiens
  CDR3 for beta chain variable domain of TCR clone 279380 (TRBV7-2, TRBJ2-7)
CASSPKTSFYEQYF

SEQ ID NO: 558761 - protein, 12 aa, Homo sapiens
  CDR3 for alpha chain variable domain of TCR clone 279381 (TRAV12-3, TRAJ20)
CAMVRGDYKLSF

SEQ ID NO: 558762 - protein, 14 aa, Homo sapiens
  CDR3 for beta chain variable domain of TCR clone 279381 (TRBV20-1, TRBJ1-2)
CSGRKDGRAYGYTF

SEQ ID NO: 558763 - protein, 13 aa, Homo sapiens
  CDR3 for alpha chain variable domain of TCR clone 279382 (TRAV8-6, TRAJ16)
CAVSRWVGQKLPF

SEQ ID NO: 558764 - protein, 15 aa, Homo sapiens
  CDR3 for beta chain variable domain of TCR clone 279382 (TRBV12-4, TRBJ2-1)
CASSLSTGVSNEQFF

SEQ ID NO: 558765 - protein, 15 aa, Homo sapiens
  CDR3 for alpha chain variable domain of TCR clone 279383 (TRAV26-1, TRAJ29)
CIVRVEGSGNTPLVF

SEQ ID NO: 558766 - protein, 15 aa, Homo sapiens
  CDR3 for beta chain variable domain of TCR clone 279383 (TRBV2, TRBJ2-1)
CASSELAGSYNEQFF

SEQ ID NO: 558767 - protein, 15 aa, Homo sapiens
  CDR3 for alpha chain variable domain of TCR clone 279384 (TRAV13-2, TRAJ10)
CAENKIGGGGNKITF

SEQ ID NO: 558768 - protein, 15 aa, Homo sapiens
  CDR3 for beta chain variable domain of TCR clone 279384 (TRBV5-1, TRBJ1-2)
CASSPGDRGSYGYTF

SEQ ID NO: 558769 - protein, 18 aa, Homo sapiens
  CDR3 for alpha chain variable domain of TCR clone 279385 (TRAV8-4, TRAJ52)
CAVTRANAGGTSYGKLTF

SEQ ID NO: 558770 - protein, 20 aa, Homo sapiens
  CDR3 for beta chain variable domain of TCR clone 279385 (TRBV19, TRBJ2-1)
CASSISQTVTSTRLNNEQFF

SEQ ID NO: 558771 - protein, 11 aa, Homo sapiens
  CDR3 for alpha chain variable domain of TCR clone 279386 (TRAV12-1, TRAJ23)
CGELGGGKLIF

SEQ ID NO: 558772 - protein, 14 aa, Homo sapiens
  CDR3 for beta chain variable domain of TCR clone 279386 (TRBV27, TRBJ2-7)
CASSPQRGTYEQYF

SEQ ID NO: 558773 - protein, 13 aa, Homo sapiens
  CDR3 for alpha chain variable domain of TCR clone 279387 (TRAV25, TRAJ23)
CAGVNNQGGKLIF

SEQ ID NO: 558774 - protein, 15 aa, Homo sapiens
  CDR3 for beta chain variable domain of TCR clone 279387 (TRBV4-1, TRBJ1-1)
RASSQEWGHYTEAFF

SEQ ID NO: 558775 - protein, 16 aa, Homo sapiens
  CDR3 for alpha chain variable domain of TCR clone 279388 (TRAV26-1, TRAJ52)
CIVRNAGGTSYGKLTF

SEQ ID NO: 558776 - protein, 15 aa, Homo sapiens
  CDR3 for beta chain variable domain of TCR clone 279388 (TRBV7-3, TRBJ2-1)
CASSPTGGGEVEQFF

SEQ ID NO: 558777 - protein, 13 aa, Homo sapiens
  CDR3 for alpha chain variable domain of TCR clone 279389 (TRAV2, TRAJ40)
CAVVTSVTSKYIF

SEQ ID NO: 558778 - protein, 14 aa, Homo sapiens
  CDR3 for beta chain variable domain of TCR clone 279389 (TRBV19, TRBJ2-1)
CASPTFVLSGEQFF

SEQ ID NO: 558779 - protein, 15 aa, Homo sapiens
  CDR3 for alpha chain variable domain of TCR clone 279390 (TRAV27, TRAJ38)
CAARRNTGNNRKLIW

SEQ ID NO: 558780 - protein, 15 aa, Homo sapiens
  CDR3 for beta chain variable domain of TCR clone 279390 (TRBV5-1, TRBJ2-1)
CASSPPRAPYNEQFF

SEQ ID NO: 558781 - protein, 17 aa, Homo sapiens
  CDR3 for alpha chain variable domain of TCR clone 279391 (TRAV8-4, TRAJ53)
CAVSGPRREGSDYKLTF

SEQ ID NO: 558782 - protein, 14 aa, Homo sapiens
  CDR3 for beta chain variable domain of TCR clone 279391 (TRBV7-3, TRBJ2-1)
CASSALAGGPEQFF

SEQ ID NO: 558783 - protein, 15 aa, Homo sapiens
  CDR3 for alpha chain variable domain of TCR clone 279392 (TRAV2, TRAJ15)
CAVEDRGQAGTALIF

SEQ ID NO: 558784 - protein, 13 aa, Homo sapiens
  CDR3 for beta chain variable domain of TCR clone 279392 (TRBV10-2, TRBJ2-7)
WASGASGGYEQYF

SEQ ID NO: 558785 - protein, 14 aa, Homo sapiens
  CDR3 for alpha chain variable domain of TCR clone 279393 (TRAV13-2, TRAJ54)
CAETAQQGAQKLVL

SEQ ID NO: 558786 - protein, 13 aa, Homo sapiens
  CDR3 for beta chain variable domain of TCR clone 279393 (TRBV7-9, TRBJ1-2)
CASSLKQNYGYTF

SEQ ID NO: 558787 - protein, 15 aa, Homo sapiens
  CDR3 for alpha chain variable domain of TCR clone 279394 (TRAV2, TRAJ15)
CTVEDRGQAGTALIF

SEQ ID NO: 558788 - protein, 17 aa, Homo sapiens
  CDR3 for beta chain variable domain of TCR clone 279394 (TRBV4-1, TRBJ1-5)
CASSQQPPTVANQPQHF

SEQ ID NO: 558789 - protein, 12 aa, Homo sapiens
  CDR3 for alpha chain variable domain of TCR clone 279395 (TRAV12-3, TRAJ17)
CAMTLTGNKLTF

SEQ ID NO: 558790 - protein, 16 aa, Homo sapiens
  CDR3 for beta chain variable domain of TCR clone 279395 (TRBV10-3, TRBJ2-1)
CAIRGGGRGDYNEQFF

SEQ ID NO: 558791 - protein, 16 aa, Homo sapiens
  CDR3 for alpha chain variable domain of TCR clone 279396 (TRAV29/DV5, TRAJ26)
CAASVSPRVRILSLVL

SEQ ID NO: 558792 - protein, 17 aa, Homo sapiens
  CDR3 for beta chain variable domain of TCR clone 279396 (TRBV20-1, TRBJ2-2)
CSASGSGQGGLTGELFF

SEQ ID NO: 558793 - protein, 14 aa, Homo sapiens
  CDR3 for alpha chain variable domain of TCR clone 279397 (TRAV12-2, TRAJ13)
CAVKKTGGYQKVTF

SEQ ID NO: 558794 - protein, 16 aa, Homo sapiens
  CDR3 for beta chain variable domain of TCR clone 279397 (TRBV2, TRBJ2-1)
CASRSPAGGKYNEQIF

SEQ ID NO: 558795 - protein, 15 aa, Homo sapiens
  CDR3 for alpha chain variable domain of TCR clone 279398 (TRAV2, TRAJ3)
CAVPPGYSSASKIIF

SEQ ID NO: 558796 - protein, 14 aa, Homo sapiens
  CDR3 for beta chain variable domain of TCR clone 279398 (TRBV11-2, TRBJ1-2)
RASSLGTANYGYTF

SEQ ID NO: 558797 - protein, 14 aa, Homo sapiens
  CDR3 for alpha chain variable domain of TCR clone 279399 (TRAV8-4, TRAJ13)
CAVSGVRGYQKVTF

SEQ ID NO: 558798 - protein, 14 aa, Homo sapiens
  CDR3 for beta chain variable domain of TCR clone 279399 (TRBV7-3, TRBJ2-1)
CASSLAGGTNEQFF

SEQ ID NO: 558799 - protein, 13 aa, Homo sapiens
  CDR3 for alpha chain variable domain of TCR clone 279400 (TRAV12-2, TRAJ20)
CAVYPSNDSKLSF

SEQ ID NO: 558800 - protein, 14 aa, Homo sapiens
  CDR3 for beta chain variable domain of TCR clone 279400 (TRBV25-1, TRBJ1-1)
CASTHLGGNTEAFF

SEQ ID NO: 558801 - protein, 12 aa, Homo sapiens
  CDR3 for alpha chain variable domain of TCR clone 279401 (TRAV8-2, TRAJ6)
CVVSKGIYIPTF

SEQ ID NO: 558802 - protein, 18 aa, Homo sapiens
  CDR3 for beta chain variable domain of TCR clone 279401 (TRBV4-1, TRBJ2-3)
CASSPGGASGGATDTQYF

SEQ ID NO: 558803 - protein, 18 aa, Homo sapiens
  CDR3 for alpha chain variable domain of TCR clone 279402 (TRAV8-4, TRAJ52)
CAVASFNAGGTRYGKLTF

SEQ ID NO: 558804 - protein, 14 aa, Homo sapiens
  CDR3 for beta chain variable domain of TCR clone 279402 (TRBV18, TRBJ1-5)
CASSRQQRNQPQHF

SEQ ID NO: 558805 - protein, 14 aa, Homo sapiens
  CDR3 for alpha chain variable domain of TCR clone 279403 (TRAV26-1, TRAJ45)
CIEVTGGGADGLIF

SEQ ID NO: 558806 - protein, 12 aa, Homo sapiens
  CDR3 for beta chain variable domain of TCR clone 279403 (TRBV12-4, TRBJ2-7)
CASSLGGYEQYF

SEQ ID NO: 558807 - protein, 15 aa, Homo sapiens
  CDR3 for alpha chain variable domain of TCR clone 279404 (TRAV12-3, TRAJ6)
CAISATTGGSYIPTF

SEQ ID NO: 558808 - protein, 15 aa, Homo sapiens
  CDR3 for beta chain variable domain of TCR clone 279404 (TRBV5-1, TRBJ2-7)
CASSLNGGPAREQYF

SEQ ID NO: 558809 - protein, 14 aa, Homo sapiens
  CDR3 for alpha chain variable domain of TCR clone 279405 (TRAV13-2, TRAJ17)
CAENSKATCNKLTF

SEQ ID NO: 558810 - protein, 12 aa, Homo sapiens
  CDR3 for beta chain variable domain of TCR clone 279405 (TRBV14, TRBJ2-7)
CASSSLKGEQYF

SEQ ID NO: 558811 - protein, 10 aa, Homo sapiens
  CDR3 for alpha chain variable domain of TCR clone 279406 (TRAV8-3, TRAJ43)
CAVALADTRF

SEQ ID NO: 558812 - protein, 12 aa, Homo sapiens
  CDR3 for beta chain variable domain of TCR clone 279406 (TRBV11-2, TRBJ2-2)
CASSLGGGELFF

SEQ ID NO: 558813 - protein, 13 aa, Homo sapiens
  CDR3 for alpha chain variable domain of TCR clone 279407 (TRAV12-1, TRAJ21)
CVMTLYNFNKFYF

SEQ ID NO: 558814 - protein, 20 aa, Homo sapiens
  CDR3 for beta chain variable domain of TCR clone 279407 (TRBV7-8, TRBJ2-1)
CASSLAHRLAGVRSYNEQFF

SEQ ID NO: 558815 - protein, 15 aa, Homo sapiens
  CDR3 for alpha chain variable domain of TCR clone 279408 (TRAV23/DV6, TRAJ13)
CAAWPGGGGYQKVTF

SEQ ID NO: 558816 - protein, 16 aa, Homo sapiens
  CDR3 for beta chain variable domain of TCR clone 279408 (TRBV4-1, TRBJ2-3)
CASSQRAGGLTDTQYF

SEQ ID NO: 558817 - protein, 13 aa, Homo sapiens
  CDR3 for alpha chain variable domain of TCR clone 279409 (TRAV1-2, TRAJ9)
CAALNTGGFKTIF

SEQ ID NO: 558818 - protein, 13 aa, Homo sapiens
  CDR3 for beta chain variable domain of TCR clone 279409 (TRBV24-1, TRBJ2-2)
CATSDWSTGELFF

SEQ ID NO: 558819 - protein, 13 aa, Homo sapiens
  CDR3 for alpha chain variable domain of TCR clone 279410 (TRAV38-2/DV8, TRAJ49)
CAYRRRTGNQFSF

SEQ ID NO: 558820 - protein, 15 aa, Homo sapiens
  CDR3 for beta chain variable domain of TCR clone 279410 (TRBV24-1, TRBJ1-1)
CATSDSKTVNTEAFF

SEQ ID NO: 558821 - protein, 16 aa, Homo sapiens
  CDR3 for alpha chain variable domain of TCR clone 279411 (TRAV12-2, TRAJ6)
CAAPLAGSGGSYIPTF

SEQ ID NO: 558822 - protein, 14 aa, Homo sapiens
  CDR3 for beta chain variable domain of TCR clone 279411 (TRBV7-2, TRBJ2-5)
CASSLVVGQETQYF

SEQ ID NO: 558823 - protein, 11 aa, Homo sapiens
  CDR3 for alpha chain variable domain of TCR clone 279412 (TRAV2, TRAJ13)
CASGGYQKVTF

SEQ ID NO: 558824 - protein, 13 aa, Homo sapiens
  CDR3 for beta chain variable domain of TCR clone 279412 (TRBV10-3, TRBJ1-2)
CAISERDSYGYAF

SEQ ID NO: 558825 - protein, 13 aa, Homo sapiens
  CDR3 for alpha chain variable domain of TCR clone 279413 (TRAV8-1, TRAJ30)
CAVIMNRDDKIIF

SEQ ID NO: 558826 - protein, 14 aa, Homo sapiens
  CDR3 for beta chain variable domain of TCR clone 279413 (TRBV7-8, TRBJ2-3)
CASSLEAGTDTQYF

SEQ ID NO: 558827 - protein, 16 aa, Homo sapiens
  CDR3 for alpha chain variable domain of TCR clone 279414 (TRAV14/DV4, TRAJ20)
CAMREGRSRDDYKLSF

SEQ ID NO: 558828 - protein, 14 aa, Homo sapiens
  CDR3 for beta chain variable domain of TCR clone 279414 (TRBV19, TRBJ1-2)
CASSLQGQAYGYTF

SEQ ID NO: 558829 - protein, 10 aa, Homo sapiens
  CDR3 for alpha chain variable domain of TCR clone 279415 (TRAV26-1, TRAJ40)
CIAGTYKYIF

SEQ ID NO: 558830 - protein, 19 aa, Homo sapiens
  CDR3 for beta chain variable domain of TCR clone 279415 (TRBV11-3, TRBJ2-2)
CASSTRPGAKTTNTGELFF

SEQ ID NO: 558831 - protein, 12 aa, Homo sapiens
  CDR3 for alpha chain variable domain of TCR clone 279416 (TRAV12-3, TRAJ43)
CAISSTNNDIRF

SEQ ID NO: 558832 - protein, 15 aa, Homo sapiens
  CDR3 for beta chain variable domain of TCR clone 279416 (TRBV27, TRBJ1-4)
CASSPRHATNEKLFF

SEQ ID NO: 558833 - protein, 17 aa, Homo sapiens
  CDR3 for alpha chain variable domain of TCR clone 279417 (TRAV3, TRAJ38)
CAVRDCLNAGNNRKLIW

SEQ ID NO: 558834 - protein, 14 aa, Homo sapiens
  CDR3 for beta chain variable domain of TCR clone 279417 (TRBV12-5, TRBJ2-5)
CASGSRKHQETQYF

SEQ ID NO: 558835 - protein, 13 aa, Homo sapiens
  CDR3 for alpha chain variable domain of TCR clone 279418 (TRAV8-3, TRAJ28)
FAVGAVGGYQLTF

SEQ ID NO: 558836 - protein, 14 aa, Homo sapiens
  CDR3 for beta chain variable domain of TCR clone 279418 (TRBV7-2, TRBJ2-7)
CASRSQGAAYEQYF

SEQ ID NO: 558837 - protein, 17 aa, Homo sapiens
  CDR3 for alpha chain variable domain of TCR clone 279419 (TRAV12-3, TRAJ6)
CAMSARGGAGGSYIPTF

SEQ ID NO: 558838 - protein, 12 aa, Homo sapiens
  CDR3 for beta chain variable domain of TCR clone 279419 (TRBV12-4, TRBJ2-3)
CASSTVPDTQYF

SEQ ID NO: 558839 - protein, 13 aa, Homo sapiens
  CDR3 for alpha chain variable domain of TCR clone 279420 (TRAV8-3, TRAJ36)
CAVGATGANNLFF

SEQ ID NO: 558840 - protein, 15 aa, Homo sapiens
  CDR3 for beta chain variable domain of TCR clone 279420 (TRBV6-6, TRBJ2-5)
CASSPGGGLEETQYF

SEQ ID NO: 558841 - protein, 12 aa, Homo sapiens
  CDR3 for alpha chain variable domain of TCR clone 279421 (TRAV12-3, TRAJ17)
CAMTLTGNKLTF

SEQ ID NO: 558842 - protein, 13 aa, Homo sapiens
  CDR3 for beta chain variable domain of TCR clone 279421 (TRBV10-3, TRBJ1-1)
CAIIPEGGTEALF

SEQ ID NO: 558843 - protein, 12 aa, Homo sapiens
  CDR3 for alpha chain variable domain of TCR clone 279422 (TRAV1-1, TRAJ24)
CAATESWGKLQF

SEQ ID NO: 558844 - protein, 14 aa, Homo sapiens
  CDR3 for beta chain variable domain of TCR clone 279422 (TRBV7-3, TRBJ1-1)
CASSLGTEYTEAFF

SEQ ID NO: 558845 - protein, 11 aa, Homo sapiens
  CDR3 for alpha chain variable domain of TCR clone 279423 (TRAV13-1, TRAJ8)
CAARGFQKLVF

SEQ ID NO: 558846 - protein, 16 aa, Homo sapiens
  CDR3 for beta chain variable domain of TCR clone 279423 (TRBV19, TRBJ1-5)
CASSTRRTRSNQPQHF

SEQ ID NO: 558847 - protein, 14 aa, Homo sapiens
  CDR3 for alpha chain variable domain of TCR clone 279424 (TRAV2, TRAJ9)
CTVEDRSGGFKTIF

SEQ ID NO: 558848 - protein, 16 aa, Homo sapiens
  CDR3 for beta chain variable domain of TCR clone 279424 (TRBV7-3, TRBJ2-1)
CASSLEGYRSYNEQFF

SEQ ID NO: 558849 - protein, 13 aa, Homo sapiens
  CDR3 for alpha chain variable domain of TCR clone 279425 (TRAV21, TRAJ27)
CAARPGNAGKSTF

SEQ ID NO: 558850 - protein, 15 aa, Homo sapiens
  CDR3 for beta chain variable domain of TCR clone 279425 (TRBV5-1, TRBJ2-1)
CARSLVANSYNEQFF

SEQ ID NO: 558851 - protein, 13 aa, Homo sapiens
  CDR3 for alpha chain variable domain of TCR clone 279426 (TRAV13-2, TRAJ13)
CAERPGGYKKVTF

SEQ ID NO: 558852 - protein, 12 aa, Homo sapiens
  CDR3 for beta chain variable domain of TCR clone 279426 (TRBV5-4, TRBJ2-5)
CASSSTRETQYF

SEQ ID NO: 558853 - protein, 12 aa, Homo sapiens
  CDR3 for alpha chain variable domain of TCR clone 279427 (TRAV12-3, TRAJ40)
CAMSSGTYKYIF

SEQ ID NO: 558854 - protein, 15 aa, Homo sapiens
  CDR3 for beta chain variable domain of TCR clone 279427 (TRBV7-2, TRBJ2-1)
CASTHGTGIYNEQFF

SEQ ID NO: 558855 - protein, 11 aa, Homo sapiens
  CDR3 for alpha chain variable domain of TCR clone 279428 (TRAV3, TRAJ21)
CAVGNFSKFYF

SEQ ID NO: 558856 - protein, 14 aa, Homo sapiens
  CDR3 for beta chain variable domain of TCR clone 279428 (TRBV25-1, TRBJ1-1)
CASTHLGGNTEAFF

SEQ ID NO: 558857 - protein, 14 aa, Homo sapiens
  CDR3 for alpha chain variable domain of TCR clone 279429 (TRAV17, TRAJ5)
FATVALTGRRALTF

SEQ ID NO: 558858 - protein, 14 aa, Homo sapiens
  CDR3 for beta chain variable domain of TCR clone 279429 (TRBV28, TRBJ2-7)
CASSPYGMAYEQYF

SEQ ID NO: 558859 - protein, 14 aa, Homo sapiens
  CDR3 for alpha chain variable domain of TCR clone 279430 (TRAV12-2, TRAJ5)
CAVNRSTGRRALTF

SEQ ID NO: 558860 - protein, 13 aa, Homo sapiens
  CDR3 for beta chain variable domain of TCR clone 279430 (TRBV7-2, TRBJ1-1)
CATNLKGAKVAFF

SEQ ID NO: 558861 - protein, 10 aa, Homo sapiens
  CDR3 for alpha chain variable domain of TCR clone 279431 (TRAV1-1, TRAJ27)
CAVGCRQINL

SEQ ID NO: 558862 - protein, 16 aa, Homo sapiens
  CDR3 for beta chain variable domain of TCR clone 279431 (TRBV20-1, TRBJ1-4)
CSAIGGPRGANEKLFF

SEQ ID NO: 558863 - protein, 11 aa, Homo sapiens
  CDR3 for alpha chain variable domain of TCR clone 279432 (TRAV3, TRAJ17)
CAEAAGNKLTF

SEQ ID NO: 558864 - protein, 19 aa, Homo sapiens
  CDR3 for beta chain variable domain of TCR clone 279432 (TRBV12-4, TRBJ2-7)
CASSLGSWSLRAVLRAGHQ

SEQ ID NO: 558865 - protein, 14 aa, Homo sapiens
  CDR3 for alpha chain variable domain of TCR clone 279433 (TRAV3, TRAJ9)
CAVRGNTGGFKTIF

SEQ ID NO: 558866 - protein, 15 aa, Homo sapiens
  CDR3 for beta chain variable domain of TCR clone 279433 (TRBV7-2, TRBJ2-1)
CASTHGTGIYNEQFF

SEQ ID NO: 558867 - protein, 16 aa, Homo sapiens
  CDR3 for alpha chain variable domain of TCR clone 279434 (TRAV12-1, TRAJ43)
CVVNPHRFGAGARLTG

SEQ ID NO: 558868 - protein, 16 aa, Homo sapiens
  CDR3 for beta chain variable domain of TCR clone 279434 (TRBV27, TRBJ2-2)
CASSSTGGGDTGELFF

SEQ ID NO: 558869 - protein, 12 aa, Homo sapiens
  CDR3 for alpha chain variable domain of TCR clone 279435 (TRAV13-1, TRAJ21)
CAEKEGFNKFYF

SEQ ID NO: 558870 - protein, 13 aa, Homo sapiens
  CDR3 for beta chain variable domain of TCR clone 279435 (TRBV7-9, TRBJ1-2)
CASSLKQNYGYTF

SEQ ID NO: 558871 - protein, 11 aa, Homo sapiens
  CDR3 for alpha chain variable domain of TCR clone 279436 (TRAV1-2, TRAJ20)
CAVSNDYKLSF

SEQ ID NO: 558872 - protein, 13 aa, Homo sapiens
  CDR3 for beta chain variable domain of TCR clone 279436 (TRBV11-2, TRBJ1-3)
CASSLEPVNTIYF

SEQ ID NO: 558873 - protein, 15 aa, Homo sapiens
  CDR3 for alpha chain variable domain of TCR clone 279437 (TRAV2, TRAJ24)
CAVVRLKNSWGKLQF

SEQ ID NO: 558874 - protein, 14 aa, Homo sapiens
  CDR3 for beta chain variable domain of TCR clone 279437 (TRBV7-2, TRBJ2-7)
CASSPKTSFYEQYF

SEQ ID NO: 558875 - protein, 12 aa, Homo sapiens
  CDR3 for alpha chain variable domain of TCR clone 279438 (TRAV27, TRAJ35)
CAGADFGNGLHC

SEQ ID NO: 558876 - protein, 15 aa, Homo sapiens
  CDR3 for beta chain variable domain of TCR clone 279438 (TRBV6-1, TRBJ2-1)
CQHFKTGSSYNEQFF

SEQ ID NO: 558877 - protein, 13 aa, Homo sapiens
  CDR3 for alpha chain variable domain of TCR clone 279439 (TRAV20, TRAJ20)
CAVRDFNDYKLSF

SEQ ID NO: 558878 - protein, 15 aa, Homo sapiens
  CDR3 for beta chain variable domain of TCR clone 279439 (TRBV6-1, TRBJ2-1)
CASSELRGQYNEQFF

SEQ ID NO: 558879 - protein, 19 aa, Homo sapiens
  CDR3 for alpha chain variable domain of TCR clone 279440 (TRAV3, TRAJ6)
CGVRDRNPSRSGGSYIPTF

SEQ ID NO: 558880 - protein, 15 aa, Homo sapiens
  CDR3 for beta chain variable domain of TCR clone 279440 (TRBV18, TRBJ2-7)
CASSPTFMDSYEQYF

SEQ ID NO: 558881 - protein, 13 aa, Homo sapiens
  CDR3 for alpha chain variable domain of TCR clone 279441 (TRAV35, TRAJ48)
CAGHEFGNEQLTF

SEQ ID NO: 558882 - protein, 14 aa, Homo sapiens
  CDR3 for beta chain variable domain of TCR clone 279441 (TRBV19, TRBJ2-1)
CASPTFVLSGEQFF

SEQ ID NO: 558883 - protein, 20 aa, Homo sapiens
  CDR3 for alpha chain variable domain of TCR clone 279442 (TRAV26-1, TRAJ23)
CCVLLHRQSRTYNQGGKLIF

SEQ ID NO: 558884 - protein, 15 aa, Homo sapiens
  CDR3 for beta chain variable domain of TCR clone 279442 (TRBV18, TRBJ2-7)
CASSPRGGKGYEQYF

SEQ ID NO: 558885 - protein, 12 aa, Homo sapiens
  CDR3 for alpha chain variable domain of TCR clone 279443 (TRAV12-3, TRAJ43)
CAISSNNNDMRF

SEQ ID NO: 558886 - protein, 15 aa, Homo sapiens
  CDR3 for beta chain variable domain of TCR clone 279443 (TRBV27, TRBJ1-4)
CASCPRHATNERLFF

SEQ ID NO: 558887 - protein, 14 aa, Homo sapiens
  CDR3 for alpha chain variable domain of TCR clone 279444 (TRAV12-3, TRAJ10)
SHLPLTGGGNKLNF

SEQ ID NO: 558888 - protein, 17 aa, Homo sapiens
  CDR3 for beta chain variable domain of TCR clone 279444 (TRBV19, TRBJ2-6)
CASSKGATASGANVLTF

SEQ ID NO: 558889 - protein, 16 aa, Homo sapiens
  CDR3 for alpha chain variable domain of TCR clone 279445 (TRAV23/DV6, TRAJ21)
CAAYKSGPGTNFTLDL

SEQ ID NO: 558890 - protein, 15 aa, Homo sapiens
  CDR3 for beta chain variable domain of TCR clone 279445 (TRBV5-4, TRBJ2-2)
CASSLTSRGTGELFF

SEQ ID NO: 558891 - protein, 15 aa, Homo sapiens
  CDR3 for alpha chain variable domain of TCR clone 279446 (TRAV21, TRAJ53)
CATLNSGGRNYKLTF

SEQ ID NO: 558892 - protein, 16 aa, Homo sapiens
  CDR3 for beta chain variable domain of TCR clone 279446 (TRBV20-1, TRBJ1-2)
CSASMGQGVANYGYTF

SEQ ID NO: 558893 - protein, 14 aa, Homo sapiens
  CDR3 for alpha chain variable domain of TCR clone 279447 (TRAV12-2, TRAJ52)
CRCAGGTSHGKLTF

SEQ ID NO: 558894 - protein, 13 aa, Homo sapiens
  CDR3 for beta chain variable domain of TCR clone 279447 (TRBV11-2, TRBJ2-1)
CASSSRLTHEQFF

SEQ ID NO: 558895 - protein, 10 aa, Homo sapiens
  CDR3 for alpha chain variable domain of TCR clone 279448 (TRAV1-1, TRAJ26)
CAVNGQNFVF

SEQ ID NO: 558896 - protein, 15 aa, Homo sapiens
  CDR3 for beta chain variable domain of TCR clone 279448 (TRBV9, TRBJ1-6)
CASSVAGTGDSALHF

SEQ ID NO: 558897 - protein, 17 aa, Homo sapiens
  CDR3 for alpha chain variable domain of TCR clone 279449 (TRAV3, TRAJ6)
CAVRDGPMAGGSYIPTF

SEQ ID NO: 558898 - protein, 20 aa, Homo sapiens
  CDR3 for beta chain variable domain of TCR clone 279449 (TRBV28, TRBJ2-1)
CASTPIGRSPGLAGGNEEFF

SEQ ID NO: 558899 - protein, 12 aa, Homo sapiens
  CDR3 for alpha chain variable domain of TCR clone 279450 (TRAV12-3, TRAJ20)
CARVRGDYKLSF

SEQ ID NO: 558900 - protein, 14 aa, Homo sapiens
  CDR3 for beta chain variable domain of TCR clone 279450 (TRBV5-5, TRBJ1-5)
CASSGQGVDQPQHF

SEQ ID NO: 558901 - protein, 13 aa, Homo sapiens
  CDR3 for alpha chain variable domain of TCR clone 279451 (TRAV12-3, TRAJ21)
CAPGPHNFNKFYF

SEQ ID NO: 558902 - protein, 14 aa, Homo sapiens
  CDR3 for beta chain variable domain of TCR clone 279451 (TRBV7-9, TRBJ1-2)
CASSRQGANYGYTF

SEQ ID NO: 558903 - protein, 15 aa, Homo sapiens
  CDR3 for alpha chain variable domain of TCR clone 279452 (TRAV25, TRAJ52)
CAGTSGGTSYGKLTF

SEQ ID NO: 558904 - protein, 16 aa, Homo sapiens
  CDR3 for beta chain variable domain of TCR clone 279452 (TRBV15, TRBJ1-2)
CATSRGPRTGGCGYTF

SEQ ID NO: 558905 - protein, 15 aa, Homo sapiens
  CDR3 for alpha chain variable domain of TCR clone 279453 (TRAV21, TRAJ53)
CATLNSGGSNYKLTF

SEQ ID NO: 558906 - protein, 16 aa, Homo sapiens
  CDR3 for beta chain variable domain of TCR clone 279453 (TRBV12-4, TRBJ2-3)
CASSPETGGFSDTQYF

SEQ ID NO: 558907 - protein, 16 aa, Homo sapiens
  CDR3 for alpha chain variable domain of TCR clone 279454 (TRAV3, TRAJ18)
CAVRDGRGSTLGRLYF

SEQ ID NO: 558908 - protein, 15 aa, Homo sapiens
  CDR3 for beta chain variable domain of TCR clone 279454 (TRBV7-9, TRBJ1-6)
CASSSPGRGNSPLPF

SEQ ID NO: 558909 - protein, 15 aa, Homo sapiens
  CDR3 for alpha chain variable domain of TCR clone 279455 (TRAV21, TRAJ53)
CAVRKSGGSNYKLTF

SEQ ID NO: 558910 - protein, 14 aa, Homo sapiens
  CDR3 for beta chain variable domain of TCR clone 279455 (TRBV18, TRBJ2-5)
CASSPGVSQETQYF

SEQ ID NO: 558911 - protein, 14 aa, Homo sapiens
  CDR3 for alpha chain variable domain of TCR clone 279456 (TRAV8-4, TRAJ13)
CAVTLSGGYQKVTF

SEQ ID NO: 558912 - protein, 16 aa, Homo sapiens
  CDR3 for beta chain variable domain of TCR clone 279456 (TRBV7-9, TRBJ1-2)
CASSLGFSSGEDGYTF

SEQ ID NO: 558913 - protein, 12 aa, Homo sapiens
  CDR3 for alpha chain variable domain of TCR clone 279457 (TRAV21, TRAJ11)
CAATSGYSTLTF

SEQ ID NO: 558914 - protein, 14 aa, Homo sapiens
  CDR3 for beta chain variable domain of TCR clone 279457 (TRBV7-2, TRBJ2-5)
CASSPRGSSETQYF

SEQ ID NO: 558915 - protein, 13 aa, Homo sapiens
  CDR3 for alpha chain variable domain of TCR clone 279458 (TRAV1-1, TRAJ33)
CAVRRDSNYQLIW

SEQ ID NO: 558916 - protein, 16 aa, Homo sapiens
  CDR3 for beta chain variable domain of TCR clone 279458 (TRBV6-1, TRBJ2-2)
CASSAFRGGDTGEQFF

SEQ ID NO: 558917 - protein, 15 aa, Homo sapiens
  CDR3 for alpha chain variable domain of TCR clone 279459 (TRAV3, TRAJ20)
CAVRDIKLSDYRLSF

SEQ ID NO: 558918 - protein, 15 aa, Homo sapiens
  CDR3 for beta chain variable domain of TCR clone 279459 (TRBV20-1, TRBJ2-7)
CSARDRVSGMDEQYF

SEQ ID NO: 558919 - protein, 16 aa, Homo sapiens
  CDR3 for alpha chain variable domain of TCR clone 279460 (TRAV26-1, TRAJ53)
CIVRVAMGGSNYKLTF

SEQ ID NO: 558920 - protein, 14 aa, Homo sapiens
  CDR3 for beta chain variable domain of TCR clone 279460 (TRBV7-3, TRBJ1-1)
CASSLGTGYTEAFF

SEQ ID NO: 558921 - protein, 11 aa, Homo sapiens
  CDR3 for alpha chain variable domain of TCR clone 279461 (TRAV12-2, TRAJ49)
CALQGGNQFYV

SEQ ID NO: 558922 - protein, 13 aa, Homo sapiens
  CDR3 for beta chain variable domain of TCR clone 279461 (TRBV4-1, TRBJ1-1)
CASSQLGTGEAFF

SEQ ID NO: 558923 - protein, 14 aa, Homo sapiens
  CDR3 for alpha chain variable domain of TCR clone 279462 (TRAV13-1, TRAJ40)
SAARSTSGTYKYIF

SEQ ID NO: 558924 - protein, 15 aa, Homo sapiens
  CDR3 for beta chain variable domain of TCR clone 279462 (TRBV18, TRBJ1-5)
CASSETGGNNQPQHF

SEQ ID NO: 558925 - protein, 16 aa, Homo sapiens
  CDR3 for alpha chain variable domain of TCR clone 279463 (TRAV12-3, TRAJ20)
CAMDKLSFGAGTTVNV

SEQ ID NO: 558926 - protein, 14 aa, Homo sapiens
  CDR3 for beta chain variable domain of TCR clone 279463 (TRBV5-4, TRBJ2-2)
CASSLTSRTGELFF

SEQ ID NO: 558927 - protein, 14 aa, Homo sapiens
  CDR3 for alpha chain variable domain of TCR clone 279464 (TRAV8-3, TRAJ44)
CAVGAGGTASKLTF

SEQ ID NO: 558928 - protein, 13 aa, Homo sapiens
  CDR3 for beta chain variable domain of TCR clone 279464 (TRBV29-1, TRBJ1-1)
CSVGDSRNTEAFF

SEQ ID NO: 558929 - protein, 15 aa, Homo sapiens
  CDR3 for alpha chain variable domain of TCR clone 279465 (TRAV25, TRAJ10)
CAGPLLTGGGNKLTF

SEQ ID NO: 558930 - protein, 15 aa, Homo sapiens
  CDR3 for beta chain variable domain of TCR clone 279465 (TRBV5-5, TRBJ1-5)
CASSSTPGSNQPQHF

SEQ ID NO: 558931 - protein, 13 aa, Homo sapiens
  CDR3 for alpha chain variable domain of TCR clone 279466 (TRAV3, TRAJ3)
CAVADSSDSKIIF

SEQ ID NO: 558932 - protein, 16 aa, Homo sapiens
  CDR3 for beta chain variable domain of TCR clone 279466 (TRBV5-1, TRBJ2-3)
CASSLGLAVYTDTQYF

SEQ ID NO: 558933 - protein, 17 aa, Homo sapiens
  CDR3 for alpha chain variable domain of TCR clone 279467 (TRAV3, TRAJ6)
CAVRDGPRAGGNYIHTF

SEQ ID NO: 558934 - protein, 14 aa, Homo sapiens
  CDR3 for beta chain variable domain of TCR clone 279467 (TRBV7-2, TRBJ2-7)
CASSPKTSFYEQYF

SEQ ID NO: 558935 - protein, 16 aa, Homo sapiens
  CDR3 for alpha chain variable domain of TCR clone 279468 (TRAV30, TRAJ24)
CGTEIVDADSWGKFQF

SEQ ID NO: 558936 - protein, 13 aa, Homo sapiens
  CDR3 for beta chain variable domain of TCR clone 279468 (TRBV20-1, TRBJ2-1)
TSGALPPGNEQFF

SEQ ID NO: 558937 - protein, 13 aa, Homo sapiens
  CDR3 for alpha chain variable domain of TCR clone 279469 (TRAV8-3, TRAJ48)
CDVVPFGNEKLTC

SEQ ID NO: 558938 - protein, 15 aa, Homo sapiens
  CDR3 for beta chain variable domain of TCR clone 279469 (TRBV11-2, TRBJ2-1)
CASSSSSTRYNEQFF

SEQ ID NO: 558939 - protein, 13 aa, Homo sapiens
  CDR3 for alpha chain variable domain of TCR clone 279470 (TRAV13-2, TRAJ48)
CAEMDFGNEKLTF

SEQ ID NO: 558940 - protein, 15 aa, Homo sapiens
  CDR3 for beta chain variable domain of TCR clone 279470 (TRBV20-1, TRBJ2-1)
CSARGIGGTYNEQFF

SEQ ID NO: 558941 - protein, 14 aa, Homo sapiens
  CDR3 for alpha chain variable domain of TCR clone 279471 (TRAV12-1, TRAJ17)
CVVNYKAAGNKLTF

SEQ ID NO: 558942 - protein, 18 aa, Homo sapiens
  CDR3 for beta chain variable domain of TCR clone 279471 (TRBV7-9, TRBJ2-7)
CASSLTSSGSRTWYEQYF

SEQ ID NO: 558943 - protein, 17 aa, Homo sapiens
  CDR3 for alpha chain variable domain of TCR clone 279472 (TRAV38-2/DV8, TRAJ28)
CAFLTLYSGAGRYQLTF

SEQ ID NO: 558944 - protein, 13 aa, Homo sapiens
  CDR3 for beta chain variable domain of TCR clone 279472 (TRBV7-2, TRBJ2-5)
CQQLVRGGETQYF

SEQ ID NO: 558945 - protein, 16 aa, Homo sapiens
  CDR3 for alpha chain variable domain of TCR clone 279473 (TRAV4, TRAJ22)
CLVGDLYSGSARQLTF

SEQ ID NO: 558946 - protein, 15 aa, Homo sapiens
  CDR3 for beta chain variable domain of TCR clone 279473 (TRBV10-3, TRBJ2-1)
CATNGGPGQGDEQFF

SEQ ID NO: 558947 - protein, 16 aa, Homo sapiens
  CDR3 for alpha chain variable domain of TCR clone 279474 (TRAV30, TRAJ24)
CGTEIVDADSWGKFQF

SEQ ID NO: 558948 - protein, 19 aa, Homo sapiens
  CDR3 for beta chain variable domain of TCR clone 279474 (TRBV25-1, TRBJ2-2)
CAILVYRVNRGRKTGELFF

SEQ ID NO: 558949 - protein, 14 aa, Homo sapiens
  CDR3 for alpha chain variable domain of TCR clone 279475 (TRAV17, TRAJ22)
CATSPSGSARQLTF

SEQ ID NO: 558950 - protein, 17 aa, Homo sapiens
  CDR3 for beta chain variable domain of TCR clone 279475 (TRBV5-4, TRBJ2-1)
CASSSAGGRGPYNEQFF

SEQ ID NO: 558951 - protein, 14 aa, Homo sapiens
  CDR3 for alpha chain variable domain of TCR clone 279476 (TRAV1-2, TRAJ16)
CAVNRFSDGQKLLF

SEQ ID NO: 558952 - protein, 15 aa, Homo sapiens
  CDR3 for beta chain variable domain of TCR clone 279476 (TRBV7-9, TRAJ15)
CGSSARTGGNEKLFF

SEQ ID NO: 558953 - protein, 11 aa, Homo sapiens
  CDR3 for alpha chain variable domain of TCR clone 279477 (TRAV21, TRAJ11)
CAVNGYSTPTF

SEQ ID NO: 558954 - protein, 11 aa, Homo sapiens
  CDR3 for beta chain variable domain of TCR clone 279477 (TRBV19, TRBJ1-1)
CASSIGGEAFF

SEQ ID NO: 558955 - protein, 15 aa, Homo sapiens
  CDR3 for alpha chain variable domain of TCR clone 279478 (TRAV13-2, TRAJ10)
CAENRDTGGGNKITF

SEQ ID NO: 558956 - protein, 20 aa, Homo sapiens
  CDR3 for beta chain variable domain of TCR clone 279478 (TRBV28, TRBJ2-1)
CASTPIGRSPGLAGGNEQFF

SEQ ID NO: 558957 - protein, 14 aa, Homo sapiens
  CDR3 for alpha chain variable domain of TCR clone 279479 (TRAV26-1, TRAJ34)
CIVRESYNTDTLIF

SEQ ID NO: 558958 - protein, 13 aa, Homo sapiens
  CDR3 for beta chain variable domain of TCR clone 279479 (TRBV19, TRBJ2-1)
CATSRGVYNEQFF

SEQ ID NO: 558959 - protein, 14 aa, Homo sapiens
  CDR3 for alpha chain variable domain of TCR clone 279480 (TRAV12-2, TRAJ17)
CAVNIKAAGNKLTF

SEQ ID NO: 558960 - protein, 13 aa, Homo sapiens
  CDR3 for beta chain variable domain of TCR clone 279480 (TRBV7-8, TRBJ2-7)
CTSSLTGGREQYF

SEQ ID NO: 558961 - protein, 11 aa, Homo sapiens
  CDR3 for alpha chain variable domain of TCR clone 279481 (TRAV21, TRAJ9)
CAVPGGFKTNF

SEQ ID NO: 558962 - protein, 12 aa, Homo sapiens
  CDR3 for beta chain variable domain of TCR clone 279481 (TRBV20-1, TRBJ2-3)
CSARVGTDTQYF

SEQ ID NO: 558963 - protein, 15 aa, Homo sapiens
  CDR3 for alpha chain variable domain of TCR clone 279482 (TRAV12-1, TRAJ42)
CVVTRDGGSQGNLIF

SEQ ID NO: 558964 - protein, 15 aa, Homo sapiens
  CDR3 for beta chain variable domain of TCR clone 279482 (TRBV11-3, TRBJ2-3)
CASLKDGREGDTQYF

SEQ ID NO: 558965 - protein, 15 aa, Homo sapiens
  CDR3 for alpha chain variable domain of TCR clone 279483 (TRAV12-2, TRAJ43)
CAFDMRFGAGTRLTV

SEQ ID NO: 558966 - protein, 18 aa, Homo sapiens
  CDR3 for beta chain variable domain of TCR clone 279483 (TRBV7-9, TRBJ2-3)
CASSLPINGQISTDTQYF

SEQ ID NO: 558967 - protein, 15 aa, Homo sapiens
  CDR3 for alpha chain variable domain of TCR clone 279484 (TRAV26-1, TRAJ47)
CIVRVGWGYGNKLVF

SEQ ID NO: 558968 - protein, 14 aa, Homo sapiens
  CDR3 for beta chain variable domain of TCR clone 279484 (TRBV7-3, TRBJ2-2)
CASSSGGYTGELFF

SEQ ID NO: 558969 - protein, 13 aa, Homo sapiens
  CDR3 for alpha chain variable domain of TCR clone 279485 (TRAV21, TRAJ42)
CAVRAGSQGNLIF

SEQ ID NO: 558970 - protein, 13 aa, Homo sapiens
  CDR3 for beta chain variable domain of TCR clone 279485 (TRBV4-2, TRBJ1-2)
CASSLSASGGYSF

SEQ ID NO: 558971 - protein, 14 aa, Homo sapiens
  CDR3 for alpha chain variable domain of TCR clone 279486 (TRAV17, TRAJ31)
CATVLRNNNARLMF

SEQ ID NO: 558972 - protein, 13 aa, Homo sapiens
  CDR3 for beta chain variable domain of TCR clone 279486 (TRBV19, TRBJ1-1)
CASSIGPQAEAFF

SEQ ID NO: 558973 - protein, 14 aa, Homo sapiens
  CDR3 for alpha chain variable domain of TCR clone 279487 (TRAV2, TRAJ9)
CAVEDRSGGFKTIF

SEQ ID NO: 558974 - protein, 16 aa, Homo sapiens
  CDR3 for beta chain variable domain of TCR clone 279487 (TRBV4-1, TRBJ2-3)
CASSQSTSGAEDTQYF

SEQ ID NO: 558975 - protein, 13 aa, Homo sapiens
  CDR3 for alpha chain variable domain of TCR clone 279488 (TRAV36/DV7, TRAJ17)
CARASAAGNKLTF

SEQ ID NO: 558976 - protein, 15 aa, Homo sapiens
  CDR3 for beta chain variable domain of TCR clone 279488 (TRBV3-1, TRBJ1-2)
CASSHTGQGGYGYTF

SEQ ID NO: 558977 - protein, 20 aa, Homo sapiens
  CDR3 for alpha chain variable domain of TCR clone 279489 (TRAV1-2, TRAJ8)
CAERGHRLSETCIWNWHPTS

SEQ ID NO: 558978 - protein, 15 aa, Homo sapiens
  CDR3 for beta chain variable domain of TCR clone 279489 (TRBV10-2, TRBJ2-6)
CASSEQGTGANVLTF

SEQ ID NO: 558979 - protein, 17 aa, Homo sapiens
  CDR3 for alpha chain variable domain of TCR clone 279490 (TRAV3, TRAJ6)
CAVRDGPRAGGSYIPTF

SEQ ID NO: 558980 - protein, 13 aa, Homo sapiens
  CDR3 for beta chain variable domain of TCR clone 279490 (TRBV27, TRBJ2-1)
CASTTLGVGEQFF

SEQ ID NO: 558981 - protein, 15 aa, Homo sapiens
  CDR3 for alpha chain variable domain of TCR clone 279491 (TRAV26-1, TRAJ29)
CIVRVEGSGNTPLVF

SEQ ID NO: 558982 - protein, 14 aa, Homo sapiens
  CDR3 for beta chain variable domain of TCR clone 279491 (TRBV6-1, TRBJ1-1)
CASKGAGRRTEAFF

SEQ ID NO: 558983 - protein, 11 aa, Homo sapiens
  CDR3 for alpha chain variable domain of TCR clone 279492 (TRAV12-3, TRAJ43)
CAMSVSNAIRF

SEQ ID NO: 558984 - protein, 13 aa, Homo sapiens
  CDR3 for beta chain variable domain of TCR clone 279492 (TRBV20-1, TRBJ1-1)
CSAPLGGGTEAFF

SEQ ID NO: 558985 - protein, 16 aa, Homo sapiens
  CDR3 for alpha chain variable domain of TCR clone 279493 (TRAV12-3, TRAJ53)
CAMSPGSGGGNYKLTF

SEQ ID NO: 558986 - protein, 15 aa, Homo sapiens
  CDR3 for beta chain variable domain of TCR clone 279493 (TRBV4-1, TRBJ2-5)
CASSQSRGDQETQYF

SEQ ID NO: 558987 - protein, 15 aa, Homo sapiens
  CDR3 for alpha chain variable domain of TCR clone 279494 (TRAV16, TRAJ17)
CALSGNKAARNKLTF

SEQ ID NO: 558988 - protein, 16 aa, Homo sapiens
  CDR3 for beta chain variable domain of TCR clone 279494 (TRBV7-6, TRBJ1-6)
CASSSLPAGEYSPLHF

SEQ ID NO: 558989 - protein, 18 aa, Homo sapiens
  CDR3 for alpha chain variable domain of TCR clone 279495 (TRAV27, TRAJ36)
PSLVIQASTPAGANNLFF

SEQ ID NO: 558990 - protein, 13 aa, Homo sapiens
  CDR3 for beta chain variable domain of TCR clone 279495 (TRBV7-9, TRBJ2-3)
CASSPRSTDTHYL

SEQ ID NO: 558991 - protein, 12 aa, Homo sapiens
  CDR3 for alpha chain variable domain of TCR clone 279496 (TRAV35, TRAJ49)
CAGWNTGNQFYS

SEQ ID NO: 558992 - protein, 16 aa, Homo sapiens
  CDR3 for beta chain variable domain of TCR clone 279496 (TRBV5-1, TRBJ2-2)
CASSLWDTTNTGELFS

SEQ ID NO: 558993 - protein, 14 aa, Homo sapiens
  CDR3 for alpha chain variable domain of TCR clone 279497 (TRAV12-2, TRAJ44)
CAVNKAGTASKLTF

SEQ ID NO: 558994 - protein, 12 aa, Homo sapiens
  CDR3 for beta chain variable domain of TCR clone 279497 (TRBV19, TRBJ1-4)
CASKGWPGGLFF

SEQ ID NO: 558995 - protein, 14 aa, Homo sapiens
  CDR3 for alpha chain variable domain of TCR clone 279498 (TRAV12-2, TRAJ9)
CAVNMEGGGFKTIF

SEQ ID NO: 558996 - protein, 17 aa, Homo sapiens
  CDR3 for beta chain variable domain of TCR clone 279498 (TRBV7-2, TRBJ2-3)
CASSLEARGTSTDTQYF

SEQ ID NO: 558997 - protein, 11 aa, Homo sapiens
  CDR3 for alpha chain variable domain of TCR clone 279499 (TRAV2, TRAJ33)
CAVDSNYQLIW

SEQ ID NO: 558998 - protein, 16 aa, Homo sapiens
  CDR3 for beta chain variable domain of TCR clone 279499 (TRBV5-7, TRBJ2-7)
CASSSPGGRTPYEQYF

SEQ ID NO: 558999 - protein, 15 aa, Homo sapiens
  CDR3 for alpha chain variable domain of TCR clone 279500 (TRAV23/DV6, TRAJ18)
CAARYRGSTLGRQYF

SEQ ID NO: 559000 - protein, 13 aa, Homo sapiens
  CDR3 for beta chain variable domain of TCR clone 279500 (TRBV7-2, TRBJ2-7)
CASSSPGGSEQYF

SEQ ID NO: 559001 - protein, 15 aa, Homo sapiens
  CDR3 for alpha chain variable domain of TCR clone 279501 (TRAV35, TRAJ40)
CAGQLGTSGTYKYIF

SEQ ID NO: 559002 - protein, 17 aa, Homo sapiens
  CDR3 for beta chain variable domain of TCR clone 279501 (TRBV13, TRBJ2-3)
CASSLSRVAGGRNTQYF

SEQ ID NO: 559003 - protein, 13 aa, Homo sapiens
  CDR3 for alpha chain variable domain of TCR clone 279502 (TRAV2, TRAJ15)
CAVASQAVTALIF

SEQ ID NO: 559004 - protein, 15 aa, Homo sapiens
  CDR3 for beta chain variable domain of TCR clone 279502 (TRBV20-1, TRBJ2-7)
CSARDRVSGMDEQYF

SEQ ID NO: 559005 - protein, 19 aa, Homo sapiens
  CDR3 for alpha chain variable domain of TCR clone 279503 (TRAV2, TRAJ20)
ILQEREADAAVYRDCKLSF

SEQ ID NO: 559006 - protein, 12 aa, Homo sapiens
  CDR3 for beta chain variable domain of TCR clone 279503 (TRBV11-2, TRBJ2-1)
CASSPGNNEQFF

SEQ ID NO: 559007 - protein, 16 aa, Homo sapiens
  CDR3 for alpha chain variable domain of TCR clone 279504 (TRAV17, TRAJ52)
CATGIIGGTSYGKLTF

SEQ ID NO: 559008 - protein, 14 aa, Homo sapiens
  CDR3 for beta chain variable domain of TCR clone 279504 (TRBV7-3, TRBJ2-2)
CASSSGVYTGELFF

SEQ ID NO: 559009 - protein, 15 aa, Homo sapiens
  CDR3 for alpha chain variable domain of TCR clone 279505 (TRAV21, TRAJ53)
CATLNSGGSNYKLKF

SEQ ID NO: 559010 - protein, 13 aa, Homo sapiens
  CDR3 for beta chain variable domain of TCR clone 279505 (TRBV11-2, TRBJ2-5)
CASSSTGEETQYF

SEQ ID NO: 559011 - protein, 16 aa, Homo sapiens
  CDR3 for alpha chain variable domain of TCR clone 279506 (TRAV30, TRAJ24)
CGTEIVDAVSWGKFQF

SEQ ID NO: 559012 - protein, 15 aa, Homo sapiens
  CDR3 for beta chain variable domain of TCR clone 279506 (TRBV27, TRBJ2-1)
CASSNGGGSSNEQFF

SEQ ID NO: 559013 - protein, 13 aa, Homo sapiens
  CDR3 for alpha chain variable domain of TCR clone 279507 (TRAV21, TRAJ27)
CAARPGNAGKSTF

SEQ ID NO: 559014 - protein, 15 aa, Homo sapiens
  CDR3 for beta chain variable domain of TCR clone 279507 (TRBV6-3, TRBJ2-7)
CASSSPGTVVYEQFF

SEQ ID NO: 559015 - protein, 13 aa, Homo sapiens
  CDR3 for alpha chain variable domain of TCR clone 279508 (TRAV8-3, TRAJ44)
CAVVPGTASHLTF

SEQ ID NO: 559016 - protein, 14 aa, Homo sapiens
  CDR3 for beta chain variable domain of TCR clone 279508 (TRBV11-2, TRBJ2-3)
CASSRLARTDTQYF

SEQ ID NO: 559017 - protein, 13 aa, Homo sapiens
  CDR3 for alpha chain variable domain of TCR clone 279509 (TRAV26-1, TRAJ16)
IAVPFSDGQKLLF

SEQ ID NO: 559018 - protein, 11 aa, Homo sapiens
  CDR3 for beta chain variable domain of TCR clone 279509 (TRBV4-2, TRBJ2-1)
CQVSAKNEQFF

SEQ ID NO: 559019 - protein, 15 aa, Homo sapiens
  CDR3 for alpha chain variable domain of TCR clone 279510 (TRAV8-2, TRAJ16)
CVVSDGFSDGQKLLF

SEQ ID NO: 559020 - protein, 15 aa, Homo sapiens
  CDR3 for beta chain variable domain of TCR clone 279510 (TRBV12-4, TRBJ2-5)
CASSPPTGLQETQYV

SEQ ID NO: 559021 - protein, 12 aa, Homo sapiens
  CDR3 for alpha chain variable domain of TCR clone 279511 (TRAV13-2, TRAJ8)
CAPWLGFQKLVF

SEQ ID NO: 559022 - protein, 14 aa, Homo sapiens
  CDR3 for beta chain variable domain of TCR clone 279511 (TRBV18, TRBJ1-5)
CASSRQPRNQPQHF

SEQ ID NO: 559023 - protein, 13 aa, Homo sapiens
  CDR3 for alpha chain variable domain of TCR clone 279512 (TRAV27, TRAJ17)
CAGAATAGNKLTF

SEQ ID NO: 559024 - protein, 15 aa, Homo sapiens
  CDR3 for beta chain variable domain of TCR clone 279512 (TRBV5-1, TRBJ2-3)
CASRNQAGSTDTQDF

SEQ ID NO: 559025 - protein, 15 aa, Homo sapiens
  CDR3 for alpha chain variable domain of TCR clone 279513 (TRAV21, TRAJ24)
CAARSSTASWGQLQF

SEQ ID NO: 559026 - protein, 13 aa, Homo sapiens
  CDR3 for beta chain variable domain of TCR clone 279513 (TRBV11-2, TRBJ2-5)
CASSSTGEETQYF

SEQ ID NO: 559027 - protein, 15 aa, Homo sapiens
  CDR3 for alpha chain variable domain of TCR clone 279514 (TRAV1-2, TRAJ28)
CAVQYSGAGRYQLTL

SEQ ID NO: 559028 - protein, 13 aa, Homo sapiens
  CDR3 for beta chain variable domain of TCR clone 279514 (TRBV20-1, TRBJ2-7)
CSATHTSGYEQYF

SEQ ID NO: 559029 - protein, 15 aa, Homo sapiens
  CDR3 for alpha chain variable domain of TCR clone 279515 (TRAV25, TRAJ53)
CAARGGGGSNCKLTF

SEQ ID NO: 559030 - protein, 19 aa, Homo sapiens
  CDR3 for beta chain variable domain of TCR clone 279515 (TRBV7-2, TRBJ2-3)
CASSFLSRNWGGGTDTQYF

SEQ ID NO: 559031 - protein, 15 aa, Homo sapiens
  CDR3 for alpha chain variable domain of TCR clone 279516 (TRAV34, TRAJ38)
CGADFTPGNNRKLIW

SEQ ID NO: 559032 - protein, 12 aa, Homo sapiens
  CDR3 for beta chain variable domain of TCR clone 279516 (TRBV7-9, TRBJ2-7)
CATRTDAYEQDF

SEQ ID NO: 559033 - protein, 12 aa, Homo sapiens
  CDR3 for alpha chain variable domain of TCR clone 279517 (TRAV27, TRAJ33)
CAGDGSNYQLIW

SEQ ID NO: 559034 - protein, 16 aa, Homo sapiens
  CDR3 for beta chain variable domain of TCR clone 279517 (TRBV20-1, TRBJ2-1)
CSALTWTSGSYNEQFF

SEQ ID NO: 559035 - protein, 13 aa, Homo sapiens
  CDR3 for alpha chain variable domain of TCR clone 279518 (TRAV12-2, TRAJ52)
CAVSGTSYGKLTF

SEQ ID NO: 559036 - protein, 14 aa, Homo sapiens
  CDR3 for beta chain variable domain of TCR clone 279518 (TRBV4-1, TRBJ2-7)
CASSPVAGGDEQYF

SEQ ID NO: 559037 - protein, 12 aa, Homo sapiens
  CDR3 for alpha chain variable domain of TCR clone 279519 (TRAV21, TRAJ13)
PGPSGGYQKVTF

SEQ ID NO: 559038 - protein, 13 aa, Homo sapiens
  CDR3 for beta chain variable domain of TCR clone 279519 (TRBV7-9, TRBJ1-2)
CASSLKQNYAYTF

SEQ ID NO: 559039 - protein, 18 aa, Homo sapiens
  CDR3 for alpha chain variable domain of TCR clone 279520 (TRAV26-2, TRAJ54)
CILRDVDVGIQGAQKLVF

SEQ ID NO: 559040 - protein, 16 aa, Homo sapiens
  CDR3 for beta chain variable domain of TCR clone 279520 (TRBV6-1, TRBJ2-5)
CASSETLDRGAETQYF

SEQ ID NO: 559041 - protein, 14 aa, Homo sapiens
  CDR3 for alpha chain variable domain of TCR clone 279521 (TRAV1-2, TRAJ4)
CAVGSPGGYNKLIF

SEQ ID NO: 559042 - protein, 16 aa, Homo sapiens
  CDR3 for beta chain variable domain of TCR clone 279521 (TRBV20-1, TRBJ2-3)
CSAASGRGVSTDTQYF

SEQ ID NO: 559043 - protein, 16 aa, Homo sapiens
  CDR3 for alpha chain variable domain of TCR clone 279522 (TRAV13-2, TRAJ23)
CRESLMIYNQGGKLIF

SEQ ID NO: 559044 - protein, 13 aa, Homo sapiens
  CDR3 for beta chain variable domain of TCR clone 279522 (TRBV28, TRBJ1-6)
CASSLYRNSPLHF

SEQ ID NO: 559045 - protein, 18 aa, Homo sapiens
  CDR3 for alpha chain variable domain of TCR clone 279523 (TRAV26-1, TRAJ23)
CIVRVGLEVWNQGGKLIF

SEQ ID NO: 559046 - protein, 13 aa, Homo sapiens
  CDR3 for beta chain variable domain of TCR clone 279523 (TRBV7-3, TRBJ1-1)
CASSQDWGAEAVF

SEQ ID NO: 559047 - protein, 14 aa, Homo sapiens
  CDR3 for alpha chain variable domain of TCR clone 279524 (TRAV8-3, TRAJ27)
CAVGARAMQANQPL

SEQ ID NO: 559048 - protein, 14 aa, Homo sapiens
  CDR3 for beta chain variable domain of TCR clone 279524 (TRBV19, TRBJ2-2)
CASSGQGIAGELFF

SEQ ID NO: 559049 - protein, 12 aa, Homo sapiens
  CDR3 for alpha chain variable domain of TCR clone 279525 (TRAV9-2, TRAJ41)
CALTNSGYALNF

SEQ ID NO: 559050 - protein, 15 aa, Homo sapiens
  CDR3 for beta chain variable domain of TCR clone 279525 (TRBV3-1, TRBJ2-1)
CASSQQPSGGNEQFF

SEQ ID NO: 559051 - protein, 13 aa, Homo sapiens
  CDR3 for alpha chain variable domain of TCR clone 279526 (TRAV13-2, TRAJ48)
CSEMDSGNGKLTF

SEQ ID NO: 559052 - protein, 15 aa, Homo sapiens
  CDR3 for beta chain variable domain of TCR clone 279526 (TRBV7-9, TRBJ1-6)
CASSSPGRGNSPLHF

SEQ ID NO: 559053 - protein, 14 aa, Homo sapiens
  CDR3 for alpha chain variable domain of TCR clone 279527 (TRAV35, TRAJ42)
CAGRYGGSQGNLIF

SEQ ID NO: 559054 - protein, 15 aa, Homo sapiens
  CDR3 for beta chain variable domain of TCR clone 279527 (TRBV2, TRBJ2-5)
RASSEQGLIGETQYF

SEQ ID NO: 559055 - protein, 14 aa, Homo sapiens
  CDR3 for alpha chain variable domain of TCR clone 279528 (TRAV2, TRAJ9)
CAVEDRSGGFKTIF

SEQ ID NO: 559056 - protein, 12 aa, Homo sapiens
  CDR3 for beta chain variable domain of TCR clone 279528 (TRBV7-9, TRBJ2-7)
CATSLEGYEQYF

SEQ ID NO: 559057 - protein, 16 aa, Homo sapiens
  CDR3 for alpha chain variable domain of TCR clone 279529 (TRAV30, TRAJ24)
CGTEIVDADSWGKFLF

SEQ ID NO: 559058 - protein, 19 aa, Homo sapiens
  CDR3 for beta chain variable domain of TCR clone 279529 (TRBV25-1, TRBJ2-2)
CAILVYRVDRGRKTGELFF

SEQ ID NO: 559059 - protein, 13 aa, Homo sapiens
  CDR3 for alpha chain variable domain of TCR clone 279530 (TRAV12-1, TRAJ6)
CVVFPGGSYIPTF

SEQ ID NO: 559060 - protein, 13 aa, Homo sapiens
  CDR3 for beta chain variable domain of TCR clone 279530 (TRBV7-9, TRBJ1-2)
CASSLKQNYGYIF

SEQ ID NO: 559061 - protein, 14 aa, Homo sapiens
  CDR3 for alpha chain variable domain of TCR clone 279531 (TRAV13-1, TRAJ40)
CAASMTSGTYKYIF

SEQ ID NO: 559062 - protein, 15 aa, Homo sapiens
  CDR3 for beta chain variable domain of TCR clone 279531 (TRBV7-9, TRBJ2-1)
CQQRCSGGLLNEQFF

SEQ ID NO: 559063 - protein, 13 aa, Homo sapiens
  CDR3 for alpha chain variable domain of TCR clone 279532 (TRAV21, TRAJ27)
CAARPGNAGKSTF

SEQ ID NO: 559064 - protein, 16 aa, Homo sapiens
  CDR3 for beta chain variable domain of TCR clone 279532 (TRBV20-1, TRBJ2-1)
CSARDHLAGGRGEQFF

SEQ ID NO: 559065 - protein, 14 aa, Homo sapiens
  CDR3 for alpha chain variable domain of TCR clone 279533 (TRAV12-2, TRAJ17)
CAVLLKAAGNKLTF

SEQ ID NO: 559066 - protein, 15 aa, Homo sapiens
  CDR3 for beta chain variable domain of TCR clone 279533 (TRBV20-1, TRBJ2-7)
CSARDRVSGMDEQYF

SEQ ID NO: 559067 - protein, 11 aa, Homo sapiens
  CDR3 for alpha chain variable domain of TCR clone 279534 (TRAV13-1, TRAJ8)
CAARGSQKLVL

SEQ ID NO: 559068 - protein, 16 aa, Homo sapiens
  CDR3 for beta chain variable domain of TCR clone 279534 (TRBV19, TRBJ1-5)
CASSTRGTRSNQPQHF

SEQ ID NO: 559069 - protein, 16 aa, Homo sapiens
  CDR3 for alpha chain variable domain of TCR clone 279535 (TRAV26-1, TRAJ45)
CIVEKYSGGGADGLTF

SEQ ID NO: 559070 - protein, 17 aa, Homo sapiens
  CDR3 for beta chain variable domain of TCR clone 279535 (TRBV13, TRBJ2-3)
CASSLSRVAGGRNTQYF

SEQ ID NO: 559071 - protein, 13 aa, Homo sapiens
  CDR3 for alpha chain variable domain of TCR clone 279536 (TRAV12-1, TRAJ22)
CVVYSGSARQLTF

SEQ ID NO: 559072 - protein, 15 aa, Homo sapiens
  CDR3 for beta chain variable domain of TCR clone 279536 (TRBV6-5, TRBJ2-1)
CASSYDAGAGNEQFF

SEQ ID NO: 559073 - protein, 10 aa, Homo sapiens
  CDR3 for alpha chain variable domain of TCR clone 279537 (TRAV4, TRAJ15)
CLPFWTALIL

SEQ ID NO: 559074 - protein, 15 aa, Homo sapiens
  CDR3 for beta chain variable domain of TCR clone 279537 (TRBV5-1, TRBJ2-1)
CASSFSGTGYNEQFF

SEQ ID NO: 559075 - protein, 15 aa, Homo sapiens
  CDR3 for alpha chain variable domain of TCR clone 279538 (TRAV26-1, TRAJ29)
CIVRVEGSGNTPLVF

SEQ ID NO: 559076 - protein, 15 aa, Homo sapiens
  CDR3 for beta chain variable domain of TCR clone 279538 (TRBV20-1, TRBJ2-7)
CSAESGTSGAYEQYF

SEQ ID NO: 559077 - protein, 12 aa, Homo sapiens
  CDR3 for alpha chain variable domain of TCR clone 279539 (TRAV8-3, TRAJ20)
WAVDFNDYKLSF

SEQ ID NO: 559078 - protein, 12 aa, Homo sapiens
  CDR3 for beta chain variable domain of TCR clone 279539 (TRBV29-1, TRBJ2-3)
CSVTGGADTQYF

SEQ ID NO: 559079 - protein, 12 aa, Homo sapiens
  CDR3 for alpha chain variable domain of TCR clone 279540 (TRAV21, TRAJ49)
CAVNDGGNTFYF

SEQ ID NO: 559080 - protein, 14 aa, Homo sapiens
  CDR3 for beta chain variable domain of TCR clone 279540 (TRBV12-5, TRBJ2-5)
CASGSRTHQETQYF

SEQ ID NO: 559081 - protein, 12 aa, Homo sapiens
  CDR3 for alpha chain variable domain of TCR clone 279541 (TRAV12-1, TRAJ40)
CVVYSGTYKYIF

SEQ ID NO: 559082 - protein, 15 aa, Homo sapiens
  CDR3 for beta chain variable domain of TCR clone 279541 (TRBV28, TRBJ1-2)
CASTRPGIMAYGYTF

SEQ ID NO: 559083 - protein, 17 aa, Homo sapiens
  CDR3 for alpha chain variable domain of TCR clone 279542 (TRAV3, TRAJ7)
CAVRDMSPLEGTTDSLL

SEQ ID NO: 559084 - protein, 17 aa, Homo sapiens
  CDR3 for beta chain variable domain of TCR clone 279542 (TRBV15, TRBJ1-2)
CATSGRVIDVVNYGYTF

SEQ ID NO: 559085 - protein, 12 aa, Homo sapiens
  CDR3 for alpha chain variable domain of TCR clone 279543 (TRAV13-1, TRAJ5)
CAAKAGRKALTF

SEQ ID NO: 559086 - protein, 13 aa, Homo sapiens
  CDR3 for beta chain variable domain of TCR clone 279543 (TRBV7-9, TRBJ1-2)
CASSLKQNYGYTF

SEQ ID NO: 559087 - protein, 14 aa, Homo sapiens
  CDR3 for alpha chain variable domain of TCR clone 279544 (TRAV1-2, TRAJ16)
CAANRFSDGQKLLF

SEQ ID NO: 559088 - protein, 15 aa, Homo sapiens
  CDR3 for beta chain variable domain of TCR clone 279544 (TRBV19, TRBJ1-5)
CASSIVWADNQPQHF

SEQ ID NO: 559089 - protein, 11 aa, Homo sapiens
  CDR3 for alpha chain variable domain of TCR clone 279545 (TRAV13-1, TRAJ20)
CAAKRRLQAQR

SEQ ID NO: 559090 - protein, 13 aa, Homo sapiens
  CDR3 for beta chain variable domain of TCR clone 279545 (TRBV12-4, TRBJ1-1)
CASSLIGDTEAFF

SEQ ID NO: 559091 - protein, 13 aa, Homo sapiens
  CDR3 for alpha chain variable domain of TCR clone 279546 (TRAV8-3, TRAJ28)
CAVGAVGSYHITF

SEQ ID NO: 559092 - protein, 14 aa, Homo sapiens
  CDR3 for beta chain variable domain of TCR clone 279546 (TRBV7-2, TRBJ2-7)
CASRSQGAAYEQYF

SEQ ID NO: 559093 - protein, 16 aa, Homo sapiens
  CDR3 for alpha chain variable domain of TCR clone 279547 (TRAV3, TRAJ37)
CAVRPHGSGNTGKLIF

SEQ ID NO: 559094 - protein, 17 aa, Homo sapiens
  CDR3 for beta chain variable domain of TCR clone 279547 (TRBV5-1, TRBJ2-5)
CASSPVSLGQNQETQYF

SEQ ID NO: 559095 - protein, 14 aa, Homo sapiens
  CDR3 for alpha chain variable domain of TCR clone 279548 (TRAV12-2, TRAJ24)
CAVTPADTWGKLQF

SEQ ID NO: 559096 - protein, 12 aa, Homo sapiens
  CDR3 for beta chain variable domain of TCR clone 279548 (TRBV3-1, TRBJ2-1)
CASSQGSSGQFF

SEQ ID NO: 559097 - protein, 14 aa, Homo sapiens
  CDR3 for alpha chain variable domain of TCR clone 279549 (TRAV13-2, TRAJ17)
CAENSKTAGNKLTF

SEQ ID NO: 559098 - protein, 11 aa, Homo sapiens
  CDR3 for beta chain variable domain of TCR clone 279549 (TRBV6-3, TRBJ2-3)
CATGQADTQYF

SEQ ID NO: 559099 - protein, 15 aa, Homo sapiens
  CDR3 for alpha chain variable domain of TCR clone 279550 (TRAV3, TRAJ22)
CAVRDRGGSATQLTF

SEQ ID NO: 559100 - protein, 16 aa, Homo sapiens
  CDR3 for beta chain variable domain of TCR clone 279550 (TRBV11-2, TRBJ2-1)
CASARGSYSHHNEQFF

SEQ ID NO: 559101 - protein, 16 aa, Homo sapiens
  CDR3 for alpha chain variable domain of TCR clone 279551 (TRAV21, TRAJ52)
CAVTNAGGTSYGKLTF

SEQ ID NO: 559102 - protein, 11 aa, Homo sapiens
  CDR3 for beta chain variable domain of TCR clone 279551 (TRBV2, TRBJ1-1)
CASREGTDASF

SEQ ID NO: 559103 - protein, 11 aa, Homo sapiens
  CDR3 for alpha chain variable domain of TCR clone 279552 (TRAV4, TRAJ31)
CLVGDNARLMF

SEQ ID NO: 559104 - protein, 14 aa, Homo sapiens
  CDR3 for beta chain variable domain of TCR clone 279552 (TRBV19, TRBJ1-5)
CASRAPDSFLSQHF

SEQ ID NO: 559105 - protein, 15 aa, Homo sapiens
  CDR3 for alpha chain variable domain of TCR clone 279553 (TRAV8-1, TRAJ6)
CAVNTPPGGSYIPTF

SEQ ID NO: 559106 - protein, 15 aa, Homo sapiens
  CDR3 for beta chain variable domain of TCR clone 279553 (TRBV11-2, TRBJ2-2)
CASSSDRVNAGELFF

SEQ ID NO: 559107 - protein, 15 aa, Homo sapiens
  CDR3 for alpha chain variable domain of TCR clone 279554 (TRAV38-2/DV8, TRAJ50)
CAYRSEETSYDKVIF

SEQ ID NO: 559108 - protein, 13 aa, Homo sapiens
  CDR3 for beta chain variable domain of TCR clone 279554 (TRBV4-2, TRBJ2-3)
CASSQGNTDTQYF

SEQ ID NO: 559109 - protein, 11 aa, Homo sapiens
  CDR3 for alpha chain variable domain of TCR clone 279555 (TRAV2, TRAJ13)
CASGGYQKVTF

SEQ ID NO: 559110 - protein, 14 aa, Homo sapiens
  CDR3 for beta chain variable domain of TCR clone 279555 (TRBV7-3, TRBJ2-1)
CASSLSGSYNEQFF

SEQ ID NO: 559111 - protein, 11 aa, Homo sapiens
  CDR3 for alpha chain variable domain of TCR clone 279556 (TRAV29/DV5, TRAJ47)
WAATYGNKLVF

SEQ ID NO: 559112 - protein, 17 aa, Homo sapiens
  CDR3 for beta chain variable domain of TCR clone 279556 (TRBV7-9, TRBJ2-1)
CASSLVASYPSYNEQFF

SEQ ID NO: 559113 - protein, 14 aa, Homo sapiens
  CDR3 for alpha chain variable domain of TCR clone 279557 (TRAV38-1, TRAJ45)
CASHSGGGVDGLAF

SEQ ID NO: 559114 - protein, 14 aa, Homo sapiens
  CDR3 for beta chain variable domain of TCR clone 279557 (TRBV20-1, TRBJ1-1)
CSAQTRIGGTEAFF

SEQ ID NO: 559115 - protein, 15 aa, Homo sapiens
  CDR3 for alpha chain variable domain of TCR clone 279558 (TRAV12-3, TRAJ10)
CASYILTRGGNKLTF

SEQ ID NO: 559116 - protein, 15 aa, Homo sapiens
  CDR3 for beta chain variable domain of TCR clone 279558 (TRBV7-2, TRBJ1-6)
CASSLGPDRGMPLHF

SEQ ID NO: 559117 - protein, 12 aa, Homo sapiens
  CDR3 for alpha chain variable domain of TCR clone 279559 (TRAV13-1, TRAJ48)
CAANFGNEKLTF

SEQ ID NO: 559118 - protein, 15 aa, Homo sapiens
  CDR3 for beta chain variable domain of TCR clone 279559 (TRBV2, TRBJ2-1)
CASSELAGNYNEQFF

SEQ ID NO: 559119 - protein, 15 aa, Homo sapiens
  CDR3 for alpha chain variable domain of TCR clone 279560 (TRAV8-3, TRAJ6)
CAVGEDRGGSYIPAF

SEQ ID NO: 559120 - protein, 14 aa, Homo sapiens
  CDR3 for beta chain variable domain of TCR clone 279560 (TRBV27, TRBJ2-2)
CASLRSPPGGELFF

SEQ ID NO: 559121 - protein, 14 aa, Homo sapiens
  CDR3 for alpha chain variable domain of TCR clone 279561 (TRAV13-1, TRAJ10)
CAAKEPGGGNKLTF

SEQ ID NO: 559122 - protein, 15 aa, Homo sapiens
  CDR3 for beta chain variable domain of TCR clone 279561 (TRBV27, TRBJ2-1)
CASSNGGGSSNEQLF

SEQ ID NO: 559123 - protein, 14 aa, Homo sapiens
  CDR3 for alpha chain variable domain of TCR clone 279562 (TRAV26-1, TRAJ49)
CIVRLTNTGNQFYF

SEQ ID NO: 559124 - protein, 15 aa, Homo sapiens
  CDR3 for beta chain variable domain of TCR clone 279562 (TRBV20-1, TRBJ2-1)
CSARGIGGTYNEQFF

SEQ ID NO: 559125 - protein, 13 aa, Homo sapiens
  CDR3 for alpha chain variable domain of TCR clone 279563 (TRAV2, TRAJ15)
CAVASQAGTALIF

SEQ ID NO: 559126 - protein, 13 aa, Homo sapiens
  CDR3 for beta chain variable domain of TCR clone 279563 (TRBV28, TRBJ1-2)
CAGRDRGNYGYTF

SEQ ID NO: 559127 - protein, 12 aa, Homo sapiens
  CDR3 for alpha chain variable domain of TCR clone 279564 (TRAV12-1, TRAJ6)
CVVSERSYIPTF

SEQ ID NO: 559128 - protein, 21 aa, Homo sapiens
  CDR3 for beta chain variable domain of TCR clone 279564 (TRBV7-3, TRBJ2-1)
GGTQPCISVPAVYGLAGAQFF

SEQ ID NO: 559129 - protein, 13 aa, Homo sapiens
  CDR3 for alpha chain variable domain of TCR clone 279565 (TRAV8-3, TRAJ44)
CAVVPGTASKPTF

SEQ ID NO: 559130 - protein, 14 aa, Homo sapiens
  CDR3 for beta chain variable domain of TCR clone 279565 (TRBV11-2, TRBJ2-3)
CASSRLARTDTQHF

SEQ ID NO: 559131 - protein, 15 aa, Homo sapiens
  CDR3 for alpha chain variable domain of TCR clone 279566 (TRAV27, TRAJ38)
CAARRNAGNNRKLIW

SEQ ID NO: 559132 - protein, 15 aa, Homo sapiens
  CDR3 for beta chain variable domain of TCR clone 279566 (TRBV11-2, TRBJ1-2)
CASSLEGVQRNGYTF

SEQ ID NO: 559133 - protein, 13 aa, Homo sapiens
  CDR3 for alpha chain variable domain of TCR clone 279567 (TRAV3, TRAJ8)
CAVRFTGFQKLVF

SEQ ID NO: 559134 - protein, 10 aa, Homo sapiens
  CDR3 for beta chain variable domain of TCR clone 279567 (TRBV20-1, TRBJ2-7)
IGSGMDEQYF

SEQ ID NO: 559135 - protein, 13 aa, Homo sapiens
  CDR3 for alpha chain variable domain of TCR clone 279568 (TRAV2, TRAJ29)
CAAGNSGNTPLVF

SEQ ID NO: 559136 - protein, 16 aa, Homo sapiens
  CDR3 for beta chain variable domain of TCR clone 279568 (TRBV7-9, TRBJ1-2)
CASSPCGGAINYGYTF

SEQ ID NO: 559137 - protein, 13 aa, Homo sapiens
  CDR3 for alpha chain variable domain of TCR clone 279569 (TRAV3, TRAJ20)
FAVRDTGDYKLSF

SEQ ID NO: 559138 - protein, 15 aa, Homo sapiens
  CDR3 for beta chain variable domain of TCR clone 279569 (TRBV6-1, TRBJ2-7)
CASSEGGGVSYEQYF

SEQ ID NO: 559139 - protein, 10 aa, Homo sapiens
  CDR3 for alpha chain variable domain of TCR clone 279570 (TRAV8-3, TRAJ39)
CAVGPDMLTF

SEQ ID NO: 559140 - protein, 15 aa, Homo sapiens
  CDR3 for beta chain variable domain of TCR clone 279570 (TRBV6-3, TRBJ2-7)
CASSSPGTVFYEQYF

SEQ ID NO: 559141 - protein, 15 aa, Homo sapiens
  CDR3 for alpha chain variable domain of TCR clone 279571 (TRAV38-1, TRAJ37)
CAFIHGSGNTGKLIF

SEQ ID NO: 559142 - protein, 16 aa, Homo sapiens
  CDR3 for beta chain variable domain of TCR clone 279571 (TRBV7-3, TRBJ2-1)
CASSLSSGGGAKEQFF

SEQ ID NO: 559143 - protein, 17 aa, Homo sapiens
  CDR3 for alpha chain variable domain of TCR clone 279572 (TRAV3, TRAJ42)
CAVRDRVYGGSQGNLIF

SEQ ID NO: 559144 - protein, 14 aa, Homo sapiens
  CDR3 for beta chain variable domain of TCR clone 279572 (TRBV19, TRBJ2-2)
CTSSGQGIAGELFF

SEQ ID NO: 559145 - protein, 16 aa, Homo sapiens
  CDR3 for alpha chain variable domain of TCR clone 279573 (TRAV38-1, TRAJ32)
CAFLKGGGGATNKLIF

SEQ ID NO: 559146 - protein, 13 aa, Homo sapiens
  CDR3 for beta chain variable domain of TCR clone 279573 (TRBV20-1, TRBJ2-5)
CSAREAFQETQYF

SEQ ID NO: 559147 - protein, 20 aa, Homo sapiens
  CDR3 for alpha chain variable domain of TCR clone 279574 (TRAV30, TRAJ54)
SAAQSRSETQVVQGAQKRVF

SEQ ID NO: 559148 - protein, 11 aa, Homo sapiens
  CDR3 for beta chain variable domain of TCR clone 279574 (TRBV25-1, TRBJ2-4)
CQSRDQNIQYF

SEQ ID NO: 559149 - protein, 13 aa, Homo sapiens
  CDR3 for alpha chain variable domain of TCR clone 279575 (TRAV27, TRAJ6)
CAGGTRGSYIPTF

SEQ ID NO: 559150 - protein, 14 aa, Homo sapiens
  CDR3 for beta chain variable domain of TCR clone 279575 (TRBV6-3, TRBJ1-1)
CASSYHRRDTEAFF

SEQ ID NO: 559151 - protein, 14 aa, Homo sapiens
  CDR3 for alpha chain variable domain of TCR clone 279576 (TRAV12-2, TRAJ13)
CAVKKTGGYQKVTF

SEQ ID NO: 559152 - protein, 15 aa, Homo sapiens
  CDR3 for beta chain variable domain of TCR clone 279576 (TRBV27, TRBJ2-1)
CASSNGGESYNEQFF

SEQ ID NO: 559153 - protein, 16 aa, Homo sapiens
  CDR3 for alpha chain variable domain of TCR clone 279577 (TRAV16, TRAJ52)
CALSAAVGTSYGKLTF

SEQ ID NO: 559154 - protein, 16 aa, Homo sapiens
  CDR3 for beta chain variable domain of TCR clone 279577 (TRBV12-4, TRBJ1-5)
CASSRPVGGSNQPQHF

SEQ ID NO: 559155 - protein, 14 aa, Homo sapiens
  CDR3 for alpha chain variable domain of TCR clone 279578 (TRAV26-1, TRAJ38)
FIADNAGNNRKLIW

SEQ ID NO: 559156 - protein, 13 aa, Homo sapiens
  CDR3 for beta chain variable domain of TCR clone 279578 (TRBV20-1, TRBJ1-1)
YSARGGGNTEAFF

SEQ ID NO: 559157 - protein, 16 aa, Homo sapiens
  CDR3 for alpha chain variable domain of TCR clone 279579 (TRAV13-2, TRAJ32)
CAENMNYGGATNKLIF

SEQ ID NO: 559158 - protein, 14 aa, Homo sapiens
  CDR3 for beta chain variable domain of TCR clone 279579 (TRBV15, TRBJ2-5)
CATSSTGDQETQYF

SEQ ID NO: 559159 - protein, 16 aa, Homo sapiens
  CDR3 for alpha chain variable domain of TCR clone 279580 (TRAV3, TRAJ5)
CAVRNLMDTGRISLTF

SEQ ID NO: 559160 - protein, 16 aa, Homo sapiens
  CDR3 for beta chain variable domain of TCR clone 279580 (TRBV4-2, TRBJ2-7)
CASSQEGLANSYEQYF

SEQ ID NO: 559161 - protein, 15 aa, Homo sapiens
  CDR3 for alpha chain variable domain of TCR clone 279581 (TRAV3, TRAJ9)
CAVRARNTGGFKTIF

SEQ ID NO: 559162 - protein, 15 aa, Homo sapiens
  CDR3 for beta chain variable domain of TCR clone 279581 (TRBV27, TRBJ1-1)
CARSPYADPYTEAFF

SEQ ID NO: 559163 - protein, 12 aa, Homo sapiens
  CDR3 for alpha chain variable domain of TCR clone 279582 (TRAV13-2, TRAJ39)
CADNNAGNMLTF

SEQ ID NO: 559164 - protein, 13 aa, Homo sapiens
  CDR3 for beta chain variable domain of TCR clone 279582 (TRBV19, TRBJ1-1)
CASSPSNGGEAFF

SEQ ID NO: 559165 - protein, 14 aa, Homo sapiens
  CDR3 for alpha chain variable domain of TCR clone 279583 (TRAV35, TRAJ13)
CAGSPSGGYQKVTF

SEQ ID NO: 559166 - protein, 17 aa, Homo sapiens
  CDR3 for beta chain variable domain of TCR clone 279583 (TRBV7-6, TRBJ2-5)
CASSHGLADPWGETQYF

SEQ ID NO: 559167 - protein, 15 aa, Homo sapiens
  CDR3 for alpha chain variable domain of TCR clone 279584 (TRAV17, TRAJ16)
CATALRFSDGQKLLF

SEQ ID NO: 559168 - protein, 15 aa, Homo sapiens
  CDR3 for beta chain variable domain of TCR clone 279584 (TRBV27, TRBJ2-1)
CASSNGGGSSNEQFF

SEQ ID NO: 559169 - protein, 11 aa, Homo sapiens
  CDR3 for alpha chain variable domain of TCR clone 279585 (TRAV21, TRAJ34)
CAHYNTDKLIF

SEQ ID NO: 559170 - protein, 18 aa, Homo sapiens
  CDR3 for beta chain variable domain of TCR clone 279585 (TRBV4-1, TRBJ1-5)
CASSQDPRGQGLNQPQHF

SEQ ID NO: 559171 - protein, 15 aa, Homo sapiens
  CDR3 for alpha chain variable domain of TCR clone 279586 (TRAV4, TRAJ15)
CLVGAIRRAGTALIF

SEQ ID NO: 559172 - protein, 16 aa, Homo sapiens
  CDR3 for beta chain variable domain of TCR clone 279586 (TRBV12-5, TRBJ2-5)
CASGPRTSGNQETQYF

SEQ ID NO: 559173 - protein, 13 aa, Homo sapiens
  CDR3 for alpha chain variable domain of TCR clone 279587 (TRAV13-2, TRAJ53)
CAENMGGNYNLTF

SEQ ID NO: 559174 - protein, 13 aa, Homo sapiens
  CDR3 for beta chain variable domain of TCR clone 279587 (TRBV4-1, TRBJ2-2)
CASSQENTGELFF

SEQ ID NO: 559175 - protein, 12 aa, Homo sapiens
  CDR3 for alpha chain variable domain of TCR clone 279588 (TRAV6, TRAJ41)
CSSPLGRYALNF

SEQ ID NO: 559176 - protein, 12 aa, Homo sapiens
  CDR3 for beta chain variable domain of TCR clone 279588 (TRBV29-1, TRBJ2-2)
CSVDKYAGELFF

SEQ ID NO: 559177 - protein, 12 aa, Homo sapiens
  CDR3 for alpha chain variable domain of TCR clone 279589 (TRAV20, TRAJ39)
CAVGNAGNMLTF

SEQ ID NO: 559178 - protein, 15 aa, Homo sapiens
  CDR3 for beta chain variable domain of TCR clone 279589 (TRBV7-3, TRBJ2-7)
CASSLNAQGAYEQYF

SEQ ID NO: 559179 - protein, 12 aa, Homo sapiens
  CDR3 for alpha chain variable domain of TCR clone 279590 (TRAV12-3, TRAJ17)
CAMTLPGNKLTF

SEQ ID NO: 559180 - protein, 15 aa, Homo sapiens
  CDR3 for beta chain variable domain of TCR clone 279590 (TRBV20-1, TRBJ2-7)
CSARERVSGMDEQYF

SEQ ID NO: 559181 - protein, 13 aa, Homo sapiens
  CDR3 for alpha chain variable domain of TCR clone 279591 (TRAV27, TRAJ49)
CAPRPYTGNQFYF

SEQ ID NO: 559182 - protein, 15 aa, Homo sapiens
  CDR3 for beta chain variable domain of TCR clone 279591 (TRBV18, TRBJ2-1)
CASSPPSASYNEQFF

SEQ ID NO: 559183 - protein, 13 aa, Homo sapiens
  CDR3 for alpha chain variable domain of TCR clone 279592 (TRAV12-2, TRAJ53)
CAGVGGSNYKLTF

SEQ ID NO: 559184 - protein, 14 aa, Homo sapiens
  CDR3 for beta chain variable domain of TCR clone 279592 (TRBV25-1, TRBJ1-1)
CASTHLGGNTEAFF

SEQ ID NO: 559185 - protein, 13 aa, Homo sapiens
  CDR3 for alpha chain variable domain of TCR clone 279593 (TRAV12-2, TRAJ42)
CSVKRGSQGNLIF

SEQ ID NO: 559186 - protein, 16 aa, Homo sapiens
  CDR3 for beta chain variable domain of TCR clone 279593 (TRBV9, TRBJ2-2)
CASSAMGKGNTGELFF

SEQ ID NO: 559187 - protein, 13 aa, Homo sapiens
  CDR3 for alpha chain variable domain of TCR clone 279594 (TRAV8-2, TRAJ29)
CALPGAGNTPLVF

SEQ ID NO: 559188 - protein, 20 aa, Homo sapiens
  CDR3 for beta chain variable domain of TCR clone 279594 (TRBV28, TRBJ2-1)
CASTPIGRSPGLAGGNEQFF

SEQ ID NO: 559189 - protein, 12 aa, Homo sapiens
  CDR3 for alpha chain variable domain of TCR clone 279595 (TRAV16, TRAJ10)
CSRTGGGNKLTF

SEQ ID NO: 559190 - protein, 13 aa, Homo sapiens
  CDR3 for beta chain variable domain of TCR clone 279595 (TRBV24-1, TRBJ2-2)
CATSDWSTGELFS

SEQ ID NO: 559191 - protein, 16 aa, Homo sapiens
  CDR3 for alpha chain variable domain of TCR clone 279596 (TRAV12-3, TRAJ53)
CAMMEFREGSNYKLTF

SEQ ID NO: 559192 - protein, 15 aa, Homo sapiens
  CDR3 for beta chain variable domain of TCR clone 279596 (TRBV4-1, TRBJ2-3)
CASRSTRAGTDTQYF

SEQ ID NO: 559193 - protein, 12 aa, Homo sapiens
  CDR3 for alpha chain variable domain of TCR clone 279597 (TRAV8-6, TRAJ43)
CAVSNNNNDMRF

SEQ ID NO: 559194 - protein, 15 aa, Homo sapiens
  CDR3 for beta chain variable domain of TCR clone 279597 (TRBV7-3, TRBJ2-6)
CSSSLGGSGANVLTF

SEQ ID NO: 559195 - protein, 16 aa, Homo sapiens
  CDR3 for alpha chain variable domain of TCR clone 279598 (TRAV8-4, TRAJ52)
CAVSDPGGTSYGKLTF

SEQ ID NO: 559196 - protein, 16 aa, Homo sapiens
  CDR3 for beta chain variable domain of TCR clone 279598 (TRBV9, TRBJ2-1)
CASSVGGGGNYNEQFF

SEQ ID NO: 559197 - protein, 13 aa, Homo sapiens
  CDR3 for alpha chain variable domain of TCR clone 279599 (TRAV1-1, TRAJ9)
CAATNTGDFKTIF

SEQ ID NO: 559198 - protein, 14 aa, Homo sapiens
  CDR3 for beta chain variable domain of TCR clone 279599 (TRBV20-1, TRBJ2-1)
CSAQIGGSANEQFF

SEQ ID NO: 559199 - protein, 16 aa, Homo sapiens
  CDR3 for alpha chain variable domain of TCR clone 279600 (TRAV4, TRAJ8)
CLVGDSGNTGFQKLVF

SEQ ID NO: 559200 - protein, 15 aa, Homo sapiens
  CDR3 for beta chain variable domain of TCR clone 279600 (TRBV15, TRBJ1-2)
CATSRVRASGSGDTF

SEQ ID NO: 559201 - protein, 14 aa, Homo sapiens
  CDR3 for alpha chain variable domain of TCR clone 279601 (TRAV12-1, TRAJ46)
CVVTAKSSGDKLTF

SEQ ID NO: 559202 - protein, 17 aa, Homo sapiens
  CDR3 for beta chain variable domain of TCR clone 279601 (TRBV4-1, TRBJ2-3)
CASSRAPAGGPLDTQYF

SEQ ID NO: 559203 - protein, 16 aa, Homo sapiens
  CDR3 for alpha chain variable domain of TCR clone 279602 (TRAV21, TRAJ37)
CAVRTAGSSNTGKQTF

SEQ ID NO: 559204 - protein, 13 aa, Homo sapiens
  CDR3 for beta chain variable domain of TCR clone 279602 (TRBV7-9, TRBJ2-5)
CASLPSGRETQYF

SEQ ID NO: 559205 - protein, 10 aa, Homo sapiens
  CDR3 for alpha chain variable domain of TCR clone 279603 (TRAV12-3, TRAJ23)
CAPGGGKLIF

SEQ ID NO: 559206 - protein, 17 aa, Homo sapiens
  CDR3 for beta chain variable domain of TCR clone 279603 (TRBV7-8, TRBJ2-6)
CASSAGTGGAGANVLTF

SEQ ID NO: 559207 - protein, 15 aa, Homo sapiens
  CDR3 for alpha chain variable domain of TCR clone 279604 (TRAV12-1, TRAJ44)
CVVFVNTGTASTLTF

SEQ ID NO: 559208 - protein, 20 aa, Homo sapiens
  CDR3 for beta chain variable domain of TCR clone 279604 (TRBV7-8, TRBJ2-2)
CASSHLFPGPTIHITGELFF

SEQ ID NO: 559209 - protein, 14 aa, Homo sapiens
  CDR3 for alpha chain variable domain of TCR clone 279605 (TRAV29/DV5, TRAJ57)
CAARSQGGSEKLVF

SEQ ID NO: 559210 - protein, 13 aa, Homo sapiens
  CDR3 for beta chain variable domain of TCR clone 279605 (TRBV24-1, TRBJ2-2)
CATSDWSTGELFF

SEQ ID NO: 559211 - protein, 14 aa, Homo sapiens
  CDR3 for alpha chain variable domain of TCR clone 279606 (TRAV14/DV4, TRAJ20)
CAMRESLNDYKLSF

SEQ ID NO: 559212 - protein, 16 aa, Homo sapiens
  CDR3 for beta chain variable domain of TCR clone 279606 (TRBV4-2, TRBJ1-4)
CASSQARGPTNEKLFF

SEQ ID NO: 559213 - protein, 11 aa, Homo sapiens
  CDR3 for alpha chain variable domain of TCR clone 279607 (TRAV12-2, TRAJ33)
CAVGSNYQLIW

SEQ ID NO: 559214 - protein, 14 aa, Homo sapiens
  CDR3 for beta chain variable domain of TCR clone 279607 (TRBV6-1, TRBJ2-2)
CASVEHIESGELFS

SEQ ID NO: 559215 - protein, 13 aa, Homo sapiens
  CDR3 for alpha chain variable domain of TCR clone 279608 (TRAV9-2, TRAJ53)
CALSGGSNYKLTF

SEQ ID NO: 559216 - protein, 17 aa, Homo sapiens
  CDR3 for beta chain variable domain of TCR clone 279608 (TRBV11-2, TRBJ2-1)
CASSLYPPGVEYNKQFF

SEQ ID NO: 559217 - protein, 12 aa, Homo sapiens
  CDR3 for alpha chain variable domain of TCR clone 279609 (TRAV20, TRAJ6)
CVHAGGSYIPTF

SEQ ID NO: 559218 - protein, 13 aa, Homo sapiens
  CDR3 for beta chain variable domain of TCR clone 279609 (TRBV11-3, TRBJ2-3)
CASSHDTKDTQYF

SEQ ID NO: 559219 - protein, 17 aa, Homo sapiens
  CDR3 for alpha chain variable domain of TCR clone 279610 (TRAV26-1, TRAJ12)
CTIASSELMDSSYKLIF

SEQ ID NO: 559220 - protein, 10 aa, Homo sapiens
  CDR3 for beta chain variable domain of TCR clone 279610 (TRBV7-9, TRBJ2-3)
CQQPPDTQYF

SEQ ID NO: 559221 - protein, 12 aa, Homo sapiens
  CDR3 for alpha chain variable domain of TCR clone 279611 (TRAV21, TRAJ37)
CAVRGNTGKLIF

SEQ ID NO: 559222 - protein, 13 aa, Homo sapiens
  CDR3 for beta chain variable domain of TCR clone 279611 (TRBV20-1, TRBJ1-1)
CSARGGGNTEAFF

SEQ ID NO: 559223 - protein, 13 aa, Homo sapiens
  CDR3 for alpha chain variable domain of TCR clone 279612 (TRAV12-3, TRAJ13)
CAMGTGGYQKVTF

SEQ ID NO: 559224 - protein, 16 aa, Homo sapiens
  CDR3 for beta chain variable domain of TCR clone 279612 (TRBV9, TRBJ2-1)
CASSVGGGGNYNEQFV

SEQ ID NO: 559225 - protein, 12 aa, Homo sapiens
  CDR3 for alpha chain variable domain of TCR clone 279613 (TRAV12-1, TRAJ40)
CVFYSGTYKYIF

SEQ ID NO: 559226 - protein, 15 aa, Homo sapiens
  CDR3 for beta chain variable domain of TCR clone 279613 (TRBV20-1, TRBJ1-5)
CSAKPPGQGPQPQHF

SEQ ID NO: 559227 - protein, 13 aa, Homo sapiens
  CDR3 for alpha chain variable domain of TCR clone 279614 (TRAV13-2, TRAJ40)
CAEFTSGTYKYIF

SEQ ID NO: 559228 - protein, 11 aa, Homo sapiens
  CDR3 for beta chain variable domain of TCR clone 279614 (TRBV13, TRBJ2-2)
CASSPRTGEHT

SEQ ID NO: 559229 - protein, 13 aa, Homo sapiens
  CDR3 for alpha chain variable domain of TCR clone 279615 (TRAV21, TRAJ27)
CAARPGNAGKSTF

SEQ ID NO: 559230 - protein, 17 aa, Homo sapiens
  CDR3 for beta chain variable domain of TCR clone 279615 (TRBV28, TRBJ2-5)
CASSTPEGDALQETHYF

SEQ ID NO: 559231 - protein, 15 aa, Homo sapiens
  CDR3 for alpha chain variable domain of TCR clone 279616 (TRAV21, TRAJ40)
CAVRPQTSGTYKYIF

SEQ ID NO: 559232 - protein, 14 aa, Homo sapiens
  CDR3 for beta chain variable domain of TCR clone 279616 (TRBV19, TRBJ2-7)
CASSMGQGAIEQYF

SEQ ID NO: 559233 - protein, 12 aa, Homo sapiens
  CDR3 for alpha chain variable domain of TCR clone 279617 (TRAV1-2, TRAJ42)
CVAGGSQGNLIF

SEQ ID NO: 559234 - protein, 15 aa, Homo sapiens
  CDR3 for beta chain variable domain of TCR clone 279617 (TRBV19, TRBJ2-1)
CASSSPGVPLDEQFF

SEQ ID NO: 559235 - protein, 14 aa, Homo sapiens
  CDR3 for alpha chain variable domain of TCR clone 279618 (TRAV12-3, TRAJ10)
SHLPLTGGGNKLTF

SEQ ID NO: 559236 - protein, 13 aa, Homo sapiens
  CDR3 for beta chain variable domain of TCR clone 279618 (TRBV7-9, TRBJ2-3)
CASSPGGHVTQYF

SEQ ID NO: 559237 - protein, 13 aa, Homo sapiens
  CDR3 for alpha chain variable domain of TCR clone 279619 (TRAV12-1, TRAJ40)
CVVPTSGPYKYIF

SEQ ID NO: 559238 - protein, 13 aa, Homo sapiens
  CDR3 for beta chain variable domain of TCR clone 279619 (TRBV4-2, TRBJ1-1)
CASSQAGNTEAFF

SEQ ID NO: 559239 - protein, 13 aa, Homo sapiens
  CDR3 for alpha chain variable domain of TCR clone 279620 (TRAV13-1, TRAJ9)
CAASGTGGFKTIF

SEQ ID NO: 559240 - protein, 12 aa, Homo sapiens
  CDR3 for beta chain variable domain of TCR clone 279620 (TRBV19, TRBJ1-5)
CASSIAQQPQHF

SEQ ID NO: 559241 - protein, 14 aa, Homo sapiens
  CDR3 for alpha chain variable domain of TCR clone 279621 (TRAV26-2, TRAJ43)
CILRQGRYTITMTF

SEQ ID NO: 559242 - protein, 14 aa, Homo sapiens
  CDR3 for beta chain variable domain of TCR clone 279621 (TRBV7-2, TRBJ2-7)
CASSLPPGQGPQYF

SEQ ID NO: 559243 - protein, 12 aa, Homo sapiens
  CDR3 for alpha chain variable domain of TCR clone 279622 (TRAV8-3, TRAJ26)
CAGDNYGQNFVF

SEQ ID NO: 559244 - protein, 15 aa, Homo sapiens
  CDR3 for beta chain variable domain of TCR clone 279622 (TRBV5-1, TRBJ2-3)
CASSVTTGSTDTQYF

SEQ ID NO: 559245 - protein, 15 aa, Homo sapiens
  CDR3 for alpha chain variable domain of TCR clone 279623 (TRAV8-3, TRAJ45)
CASSYSGGGADGLTF

SEQ ID NO: 559246 - protein, 14 aa, Homo sapiens
  CDR3 for beta chain variable domain of TCR clone 279623 (TRBV18, TRBJ2-5)
CASSPPGHQETQYF

SEQ ID NO: 559247 - protein, 14 aa, Homo sapiens
  CDR3 for alpha chain variable domain of TCR clone 279624 (TRAV26-2, TRAJ23)
CSRTLYNQVGKLIF

SEQ ID NO: 559248 - protein, 15 aa, Homo sapiens
  CDR3 for beta chain variable domain of TCR clone 279624 (TRBV20-1, TRBJ2-7)
CSARDRVSGMDEQYF

SEQ ID NO: 559249 - protein, 13 aa, Homo sapiens
  CDR3 for alpha chain variable domain of TCR clone 279625 (TRAV23/DV6, TRAJ27)
CAASKPMQANQPL

SEQ ID NO: 559250 - protein, 14 aa, Homo sapiens
  CDR3 for beta chain variable domain of TCR clone 279625 (TRBV5-4, TRBJ1-1)
CASSFDSRRDEAFF

SEQ ID NO: 559251 - protein, 18 aa, Homo sapiens
  CDR3 for alpha chain variable domain of TCR clone 279626 (TRAV12-3, TRAJ52)
CAMSVGGAGGTSYGKLTC

SEQ ID NO: 559252 - protein, 17 aa, Homo sapiens
  CDR3 for beta chain variable domain of TCR clone 279626 (TRBV20-1, TRBJ2-1)
CSARDPLAGVWDNEQFF

SEQ ID NO: 559253 - protein, 14 aa, Homo sapiens
  CDR3 for alpha chain variable domain of TCR clone 279627 (TRAV1-2, TRAJ16)
CAVNRFSDGQRLLF

SEQ ID NO: 559254 - protein, 12 aa, Homo sapiens
  CDR3 for beta chain variable domain of TCR clone 279627 (TRBV28, TRBJ2-6)
CAIQAGANFLTF

SEQ ID NO: 559255 - protein, 13 aa, Homo sapiens
  CDR3 for alpha chain variable domain of TCR clone 279628 (TRAV12-3, TRAJ7)
CAMTPYGNNRLAF

SEQ ID NO: 559256 - protein, 13 aa, Homo sapiens
  CDR3 for beta chain variable domain of TCR clone 279628 (TRBV20-1, TRBJ1-5)
CSASPRANQPQHF

SEQ ID NO: 559257 - protein, 14 aa, Homo sapiens
  CDR3 for alpha chain variable domain of TCR clone 279629 (TRAV8-4, TRAJ9)
CAVRINTGGFKTIF

SEQ ID NO: 559258 - protein, 16 aa, Homo sapiens
  CDR3 for beta chain variable domain of TCR clone 279629 (TRBV12-5, TRBJ2-5)
CASGPRSSGNQETQYF

SEQ ID NO: 559259 - protein, 15 aa, Homo sapiens
  CDR3 for alpha chain variable domain of TCR clone 279630 (TRAV26-1, TRAJ48)
CIARWAWFGNGKLTF

SEQ ID NO: 559260 - protein, 12 aa, Homo sapiens
  CDR3 for beta chain variable domain of TCR clone 279630 (TRBV19, TRBJ2-5)
CASSISEETQYF

SEQ ID NO: 559261 - protein, 14 aa, Homo sapiens
  CDR3 for alpha chain variable domain of TCR clone 279631 (TRAV13-1, TRAJ6)
CAASITGGSYVPTF

SEQ ID NO: 559262 - protein, 14 aa, Homo sapiens
  CDR3 for beta chain variable domain of TCR clone 279631 (TRBV6-3, TRBJ2-1)
CASLHSAYYIEQFF

SEQ ID NO: 559263 - protein, 14 aa, Homo sapiens
  CDR3 for alpha chain variable domain of TCR clone 279632 (TRAV2, TRAJ16)
CAVERGSDGQRLLF

SEQ ID NO: 559264 - protein, 12 aa, Homo sapiens
  CDR3 for beta chain variable domain of TCR clone 279632 (TRBV6-5, TRBJ2-7)
WASYIYGYEQYF

SEQ ID NO: 559265 - protein, 13 aa, Homo sapiens
  CDR3 for alpha chain variable domain of TCR clone 279633 (TRAV21, TRAJ24)
GLMTTDSWGKFQF

SEQ ID NO: 559266 - protein, 12 aa, Homo sapiens
  CDR3 for beta chain variable domain of TCR clone 279633 (TRBV11-2, TRBJ2-7)
CASSPPADEQYF

SEQ ID NO: 559267 - protein, 14 aa, Homo sapiens
  CDR3 for alpha chain variable domain of TCR clone 279634 (TRAV26-1, TRAJ26)
CIVSDYNYGQNFVF

SEQ ID NO: 559268 - protein, 14 aa, Homo sapiens
  CDR3 for beta chain variable domain of TCR clone 279634 (TRBV18, TRBJ2-7)
CASSPRGGAYEQYF

SEQ ID NO: 559269 - protein, 15 aa, Homo sapiens
  CDR3 for alpha chain variable domain of TCR clone 279635 (TRAV4, TRAJ39)
CLVGPNNNAGNMLTF

SEQ ID NO: 559270 - protein, 12 aa, Homo sapiens
  CDR3 for beta chain variable domain of TCR clone 279635 (TRBV3-1, TRBJ2-1)
CASGGLGNEQFF

SEQ ID NO: 559271 - protein, 13 aa, Homo sapiens
  CDR3 for alpha chain variable domain of TCR clone 279636 (TRAV1-2, TRAJ9)
CAALNTGGFKTIF

SEQ ID NO: 559272 - protein, 16 aa, Homo sapiens
  CDR3 for beta chain variable domain of TCR clone 279636 (TRBV10-3, TRBJ2-1)
CAISGVGDGGGGEQFF

SEQ ID NO: 559273 - protein, 13 aa, Homo sapiens
  CDR3 for alpha chain variable domain of TCR clone 279637 (TRAV8-3, TRAJ43)
CAVGPDNNNDLRF

SEQ ID NO: 559274 - protein, 19 aa, Homo sapiens
  CDR3 for beta chain variable domain of TCR clone 279637 (TRBV7-2, TRBJ2-3)
CASSFLSRNWGGGTDTQYF

SEQ ID NO: 559275 - protein, 15 aa, Homo sapiens
  CDR3 for alpha chain variable domain of TCR clone 279638 (TRAV2, TRAJ22)
CDVPSRGGSARQLTF

SEQ ID NO: 559276 - protein, 11 aa, Homo sapiens
  CDR3 for beta chain variable domain of TCR clone 279638 (TRBV27, TRBJ2-3)
CASSLGDTQYF

SEQ ID NO: 559277 - protein, 13 aa, Homo sapiens
  CDR3 for alpha chain variable domain of TCR clone 279639 (TRAV13-1, TRAJ5)
CAASDTGRRAHTF

SEQ ID NO: 559278 - protein, 12 aa, Homo sapiens
  CDR3 for beta chain variable domain of TCR clone 279639 (TRBV28, TRBJ2-3)
CASSLYRDTQYF

SEQ ID NO: 559279 - protein, 14 aa, Homo sapiens
  CDR3 for alpha chain variable domain of TCR clone 279640 (TRAV26-1, TRAJ34)
CIVRVAYNTAKLIF

SEQ ID NO: 559280 - protein, 15 aa, Homo sapiens
  CDR3 for beta chain variable domain of TCR clone 279640 (TRBV20-1, TRBJ2-7)
CSVRVPAAYFYEQYF

SEQ ID NO: 559281 - protein, 14 aa, Homo sapiens
  CDR3 for alpha chain variable domain of TCR clone 279641 (TRAV1-2, TRAJ16)
CAVNRFSDGQKLLF

SEQ ID NO: 559282 - protein, 15 aa, Homo sapiens
  CDR3 for beta chain variable domain of TCR clone 279641 (TRBV3-1, TRBJ2-5)
CASSANLGGPETQYS

SEQ ID NO: 559283 - protein, 15 aa, Homo sapiens
  CDR3 for alpha chain variable domain of TCR clone 279642 (TRAV23/DV6, TRAJ18)
CAARYRGSTLGMLYS

SEQ ID NO: 559284 - protein, 13 aa, Homo sapiens
  CDR3 for beta chain variable domain of TCR clone 279642 (TRBV7-2, TRBJ2-7)
CASSSPSRSEQYF

SEQ ID NO: 559285 - protein, 14 aa, Homo sapiens
  CDR3 for alpha chain variable domain of TCR clone 279643 (TRAV17, TRAJ22)
CATSPSGSARQLTF

SEQ ID NO: 559286 - protein, 19 aa, Homo sapiens
  CDR3 for beta chain variable domain of TCR clone 279643 (TRBV7-2, TRBJ2-3)
CASSFLSRNWGGGTDTQYF

SEQ ID NO: 559287 - protein, 14 aa, Homo sapiens
  CDR3 for alpha chain variable domain of TCR clone 279644 (TRAV1-2, TRAJ16)
CAVNRFSDGQKLLF

SEQ ID NO: 559288 - protein, 14 aa, Homo sapiens
  CDR3 for beta chain variable domain of TCR clone 279644 (TRBV7-2, TRBJ2-7)
CASRPKTSFYEQYF

SEQ ID NO: 559289 - protein, 13 aa, Homo sapiens
  CDR3 for alpha chain variable domain of TCR clone 279645 (TRAV29/DV5, TRAJ31)
CAASRNNNARLMF

SEQ ID NO: 559290 - protein, 16 aa, Homo sapiens
  CDR3 for beta chain variable domain of TCR clone 279645 (TRBV10-3, TRBJ2-1)
CAISGVGDGGGGEQFF

SEQ ID NO: 559291 - protein, 14 aa, Homo sapiens
  CDR3 for alpha chain variable domain of TCR clone 279646 (TRAV1-2, TRAJ8)
CAVREDTGFHKLVF

SEQ ID NO: 559292 - protein, 13 aa, Homo sapiens
  CDR3 for beta chain variable domain of TCR clone 279646 (TRBV7-3, TRBJ2-1)
CASSLDSYNAQFF

SEQ ID NO: 559293 - protein, 23 aa, Homo sapiens
  CDR3 for alpha chain variable domain of TCR clone 279647 (TRAV12-2, TRAJ43)
SLLIRDSQPSDSATYLCAFDMRF

SEQ ID NO: 559294 - protein, 18 aa, Homo sapiens
  CDR3 for beta chain variable domain of TCR clone 279647 (TRBV20-1, TRBJ2-3)
CSASGLAGGPGTTDMQYF

SEQ ID NO: 559295 - protein, 14 aa, Homo sapiens
  CDR3 for alpha chain variable domain of TCR clone 279648 (TRAV12-3, TRAJ5)
CAVNRSTGRRALTF

SEQ ID NO: 559296 - protein, 11 aa, Homo sapiens
  CDR3 for beta chain variable domain of TCR clone 279648 (TRBV29-1, TRBJ2-5)
CSEDRTGTQYF

SEQ ID NO: 559297 - protein, 16 aa, Homo sapiens
  CDR3 for alpha chain variable domain of TCR clone 279649 (TRAV21, TRAJ17)
CAVRPGEEAAGNKLTF

SEQ ID NO: 559298 - protein, 16 aa, Homo sapiens
  CDR3 for beta chain variable domain of TCR clone 279649 (TRBV2, TRBJ2-5)
CASSEPWTGPSYEQYF

SEQ ID NO: 559299 - protein, 19 aa, Homo sapiens
  CDR3 for alpha chain variable domain of TCR clone 279650 (TRAV26-1, TRAJ28)
CIVRVAHAYSGAGSYQLTF

SEQ ID NO: 559300 - protein, 15 aa, Homo sapiens
  CDR3 for beta chain variable domain of TCR clone 279650 (TRBV20-1, TRBJ1-1)
CSASRGVTGNTDAFF

SEQ ID NO: 559301 - protein, 13 aa, Homo sapiens
  CDR3 for alpha chain variable domain of TCR clone 279651 (TRAV17, TRAJ9)
CATDYTGGFKTIF

SEQ ID NO: 559302 - protein, 16 aa, Homo sapiens
  CDR3 for beta chain variable domain of TCR clone 279651 (TRBV3-1, TRBJ2-5)
CASSPGQFNGFGTQYF

SEQ ID NO: 559303 - protein, 12 aa, Homo sapiens
  CDR3 for alpha chain variable domain of TCR clone 279652 (TRAV12-3, TRAJ17)
CAMTLTGNKLTF

SEQ ID NO: 559304 - protein, 16 aa, Homo sapiens
  CDR3 for beta chain variable domain of TCR clone 279652 (TRBV5-1, TRBJ2-3)
CASSLGLAVYTDTQYL

SEQ ID NO: 559305 - protein, 14 aa, Homo sapiens
  CDR3 for alpha chain variable domain of TCR clone 279653 (TRAV8-4, TRAJ15)
CAVTIREAGTALIF

SEQ ID NO: 559306 - protein, 16 aa, Homo sapiens
  CDR3 for beta chain variable domain of TCR clone 279653 (TRBV29-1, TRBJ2-6)
CSVEDITYSGANVLTF

SEQ ID NO: 559307 - protein, 12 aa, Homo sapiens
  CDR3 for alpha chain variable domain of TCR clone 279654 (TRAV8-3, TRAJ26)
CACDNYGQNFVF

SEQ ID NO: 559308 - protein, 11 aa, Homo sapiens
  CDR3 for beta chain variable domain of TCR clone 279654 (TRBV29-1, TRBJ2-5)
CSEDRTGTQYF

SEQ ID NO: 559309 - protein, 15 aa, Homo sapiens
  CDR3 for alpha chain variable domain of TCR clone 279655 (TRAV3, TRAJ11)
CAVRDRGSGYSTLTF

SEQ ID NO: 559310 - protein, 15 aa, Homo sapiens
  CDR3 for beta chain variable domain of TCR clone 279655 (TRBV5-7, TRBJ2-1)
CASSRRLAGDNEQFF

SEQ ID NO: 559311 - protein, 14 aa, Homo sapiens
  CDR3 for alpha chain variable domain of TCR clone 279656 (TRAV38-1, TRAJ45)
CAYYSGGGADGITF

SEQ ID NO: 559312 - protein, 14 aa, Homo sapiens
  CDR3 for beta chain variable domain of TCR clone 279656 (TRBV19, TRBJ2-1)
CASPTFVLSGEQFF

SEQ ID NO: 559313 - protein, 12 aa, Homo sapiens
  CDR3 for alpha chain variable domain of TCR clone 279657 (TRAV6, TRAJ27)
CSRLRGAGKSTF

SEQ ID NO: 559314 - protein, 16 aa, Homo sapiens
  CDR3 for beta chain variable domain of TCR clone 279657 (TRBV9, TRBJ2-1)
CASSVGGGGNYNEQFF

SEQ ID NO: 559315 - protein, 14 aa, Homo sapiens
  CDR3 for alpha chain variable domain of TCR clone 279658 (TRAV8-1, TRAJ5)
CAVSMDTGRRALAF

SEQ ID NO: 559316 - protein, 15 aa, Homo sapiens
  CDR3 for beta chain variable domain of TCR clone 279658 (TRBV19, TRBJ2-4)
CASRGPRRGENIQYF

SEQ ID NO: 559317 - protein, 13 aa, Homo sapiens
  CDR3 for alpha chain variable domain of TCR clone 279659 (TRAV8-4, TRAJ31)
CAVSDSGNARLMF

SEQ ID NO: 559318 - protein, 15 aa, Homo sapiens
  CDR3 for beta chain variable domain of TCR clone 279659 (TRBV4-1, TRBJ2-5)
RQQPLSSGTEETQYF

SEQ ID NO: 559319 - protein, 14 aa, Homo sapiens
  CDR3 for alpha chain variable domain of TCR clone 279660 (TRAV23/DV6, TRAJ3)
CAASMASSASKIIF

SEQ ID NO: 559320 - protein, 13 aa, Homo sapiens
  CDR3 for beta chain variable domain of TCR clone 279660 (TRBV27, TRBJ2-5)
CASFSRGLENQYF

SEQ ID NO: 559321 - protein, 11 aa, Homo sapiens
  CDR3 for alpha chain variable domain of TCR clone 279661 (TRAV12-3, TRAJ43)
CARSVANDVRF

SEQ ID NO: 559322 - protein, 13 aa, Homo sapiens
  CDR3 for beta chain variable domain of TCR clone 279661 (TRBV20-1, TRBJ1-1)
CSAPLGGGTEAFF

SEQ ID NO: 559323 - protein, 11 aa, Homo sapiens
  CDR3 for alpha chain variable domain of TCR clone 279662 (TRAV12-1, TRAJ31)
CVGRVQCQTHV

SEQ ID NO: 559324 - protein, 16 aa, Homo sapiens
  CDR3 for beta chain variable domain of TCR clone 279662 (TRBV19, TRBJ2-2)
CASRSPGTGATGELFF

SEQ ID NO: 559325 - protein, 12 aa, Homo sapiens
  CDR3 for alpha chain variable domain of TCR clone 279663 (TRAV3, TRAJ43)
CAVRDPNNDMRF

SEQ ID NO: 559326 - protein, 13 aa, Homo sapiens
  CDR3 for beta chain variable domain of TCR clone 279663 (TRBV19, TRBJ1-2)
CASSVPGQDGYTC

SEQ ID NO: 559327 - protein, 11 aa, Homo sapiens
  CDR3 for alpha chain variable domain of TCR clone 279664 (TRAV35, TRAJ30)
CAPGGDDKIIF

SEQ ID NO: 559328 - protein, 13 aa, Homo sapiens
  CDR3 for beta chain variable domain of TCR clone 279664 (TRBV2, TRBJ1-4)
CASSERAGEKLFF

SEQ ID NO: 559329 - protein, 14 aa, Homo sapiens
  CDR3 for alpha chain variable domain of TCR clone 279665 (TRAV12-2, TRAJ17)
CAVLFKAAGNKLTF

SEQ ID NO: 559330 - protein, 17 aa, Homo sapiens
  CDR3 for beta chain variable domain of TCR clone 279665 (TRBV11-2, TRBJ2-1)
CASSLYPPGVEYNEQFY

SEQ ID NO: 559331 - protein, 14 aa, Homo sapiens
  CDR3 for alpha chain variable domain of TCR clone 279666 (TRAV35, TRAJ42)
CAGRYGGSQGNLIF

SEQ ID NO: 559332 - protein, 18 aa, Homo sapiens
  CDR3 for beta chain variable domain of TCR clone 279666 (TRBV12-4, TRBJ1-2)
CASSPNPGQAGPYYGYTF

SEQ ID NO: 559333 - protein, 14 aa, Homo sapiens
  CDR3 for alpha chain variable domain of TCR clone 279667 (TRAV26-2, TRAJ32)
CILFRGGATHKLIF

SEQ ID NO: 559334 - protein, 15 aa, Homo sapiens
  CDR3 for beta chain variable domain of TCR clone 279667 (TRBV2, TRBJ2-2)
CASSGFGAGTGELFF

SEQ ID NO: 559335 - protein, 14 aa, Homo sapiens
  CDR3 for alpha chain variable domain of TCR clone 279668 (TRAV17, TRAJ57)
CATDPQGGSEKLVF

SEQ ID NO: 559336 - protein, 16 aa, Homo sapiens
  CDR3 for beta chain variable domain of TCR clone 279668 (TRBV5-1, TRBJ2-2)
CASSLWDTTNTGELFF

SEQ ID NO: 559337 - protein, 12 aa, Homo sapiens
  CDR3 for alpha chain variable domain of TCR clone 279669 (TRAV8-3, TRAJ4)
PAFSGGYNNLIF

SEQ ID NO: 559338 - protein, 13 aa, Homo sapiens
  CDR3 for beta chain variable domain of TCR clone 279669 (TRBV20-1, TRBJ1-3)
CSAGAYSGNTIYF

SEQ ID NO: 559339 - protein, 12 aa, Homo sapiens
  CDR3 for alpha chain variable domain of TCR clone 279670 (TRAV4, TRAJ9)
CLVPTGGFKTIF

SEQ ID NO: 559340 - protein, 15 aa, Homo sapiens
  CDR3 for beta chain variable domain of TCR clone 279670 (TRBV12-4, TRBJ2-5)
CASSPPTGLQETQYF

SEQ ID NO: 559341 - protein, 14 aa, Homo sapiens
  CDR3 for alpha chain variable domain of TCR clone 279671 (TRAV39, TRAJ29)
CAVGQPSGNTPLVF

SEQ ID NO: 559342 - protein, 13 aa, Homo sapiens
  CDR3 for beta chain variable domain of TCR clone 279671 (TRBV27, TRBJ1-4)
CASSLMGDEKLFF

SEQ ID NO: 559343 - protein, 18 aa, Homo sapiens
  CDR3 for alpha chain variable domain of TCR clone 279672 (TRAV21, TRAJ52)
CAVRPSPAGVTSYGKLTF

SEQ ID NO: 559344 - protein, 15 aa, Homo sapiens
  CDR3 for beta chain variable domain of TCR clone 279672 (TRBV19, TRBJ1-1)
CASTSGQIQNTEASF

SEQ ID NO: 559345 - protein, 11 aa, Homo sapiens
  CDR3 for alpha chain variable domain of TCR clone 279673 (TRAV17, TRAJ9)
CATTGGFKTIF

SEQ ID NO: 559346 - protein, 11 aa, Homo sapiens
  CDR3 for beta chain variable domain of TCR clone 279673 (TRBV29-1, TRBJ2-5)
CSKDRTGTQYF

SEQ ID NO: 559347 - protein, 13 aa, Homo sapiens
  CDR3 for alpha chain variable domain of TCR clone 279674 (TRAV1-2, TRAJ9)
CAALNTGGFKTIF

SEQ ID NO: 559348 - protein, 16 aa, Homo sapiens
  CDR3 for beta chain variable domain of TCR clone 279674 (TRBV4-2, TRBJ2-3)
CASSQELAGDTDTQYF

SEQ ID NO: 559349 - protein, 12 aa, Homo sapiens
  CDR3 for alpha chain variable domain of TCR clone 279675 (TRAV2, TRAJ24)
CVATDSWGKFQF

SEQ ID NO: 559350 - protein, 12 aa, Homo sapiens
  CDR3 for beta chain variable domain of TCR clone 279675 (TRBV5-8, TRBJ1-1)
PAAGGGGTEAFF

SEQ ID NO: 559351 - protein, 16 aa, Homo sapiens
  CDR3 for alpha chain variable domain of TCR clone 279676 (TRAV12-3, TRAJ10)
CAMKKGITGGGNKLTF

SEQ ID NO: 559352 - protein, 18 aa, Homo sapiens
  CDR3 for beta chain variable domain of TCR clone 279676 (TRBV7-8, TRBJ2-1)
CASSPYLGQRGSNNEQFF

SEQ ID NO: 559353 - protein, 10 aa, Homo sapiens
  CDR3 for alpha chain variable domain of TCR clone 279677 (TRAV12-1, TRAJ43)
CVVHNNDMRF

SEQ ID NO: 559354 - protein, 14 aa, Homo sapiens
  CDR3 for beta chain variable domain of TCR clone 279677 (TRBV20-1, TRBJ2-3)
CSARGGTSTDTQYF

SEQ ID NO: 559355 - protein, 13 aa, Homo sapiens
  CDR3 for alpha chain variable domain of TCR clone 279678 (TRAV8-2, TRAJ43)
CVVSDQGDNDMRF

SEQ ID NO: 559356 - protein, 19 aa, Homo sapiens
  CDR3 for beta chain variable domain of TCR clone 279678 (TRBV7-2, TRBJ2-3)
CASSFLSRNWGGGTDTQYF

SEQ ID NO: 559357 - protein, 12 aa, Homo sapiens
  CDR3 for alpha chain variable domain of TCR clone 279679 (TRAV30, TRAJ20)
CGTESNDYKLSF

SEQ ID NO: 559358 - protein, 15 aa, Homo sapiens
  CDR3 for beta chain variable domain of TCR clone 279679 (TRBV9, TRBJ2-7)
CASSAVPIPGYERYF

SEQ ID NO: 559359 - protein, 17 aa, Homo sapiens
  CDR3 for alpha chain variable domain of TCR clone 279680 (TRAV38-1, TRAJ45)
CAFMRAHSGGGADGLTF

SEQ ID NO: 559360 - protein, 15 aa, Homo sapiens
  CDR3 for beta chain variable domain of TCR clone 279680 (TRBV7-2, TRBJ2-3)
CASSLVVRGPDTQYF

SEQ ID NO: 559361 - protein, 13 aa, Homo sapiens
  CDR3 for alpha chain variable domain of TCR clone 279681 (TRAV8-3, TRAJ28)
CAVGAVGSYQRTF

SEQ ID NO: 559362 - protein, 14 aa, Homo sapiens
  CDR3 for beta chain variable domain of TCR clone 279681 (TRBV7-2, TRBJ2-7)
CARRSQGAAYEQYF

SEQ ID NO: 559363 - protein, 15 aa, Homo sapiens
  CDR3 for alpha chain variable domain of TCR clone 279682 (TRAV3, TRAJ36)
CAVRASQTGANNLFF

SEQ ID NO: 559364 - protein, 14 aa, Homo sapiens
  CDR3 for beta chain variable domain of TCR clone 279682 (TRBV19, TRBJ2-1)
CASPTFVLSGEQFF

SEQ ID NO: 559365 - protein, 16 aa, Homo sapiens
  CDR3 for alpha chain variable domain of TCR clone 279683 (TRAV12-1, TRAJ45)
CVVIRYSGGGADGLTF

SEQ ID NO: 559366 - protein, 14 aa, Homo sapiens
  CDR3 for beta chain variable domain of TCR clone 279683 (TRBV9, TRBJ2-7)
CASSVGVGSYEQYF

SEQ ID NO: 559367 - protein, 15 aa, Homo sapiens
  CDR3 for alpha chain variable domain of TCR clone 279684 (TRAV8-2, TRAJ36)
CVVSENCGKQPLLWD

SEQ ID NO: 559368 - protein, 15 aa, Homo sapiens
  CDR3 for beta chain variable domain of TCR clone 279684 (TRBV20-1, TRBJ2-5)
CSAEGTGGLQETQYF

SEQ ID NO: 559369 - protein, 22 aa, Homo sapiens
  CDR3 for alpha chain variable domain of TCR clone 279685 (TRAV13-1, TRAJ9)
CAASALTGGFKTILEQEQDYLL

SEQ ID NO: 559370 - protein, 13 aa, Homo sapiens
  CDR3 for beta chain variable domain of TCR clone 279685 (TRBV20-1, TRBJ1-1)
CSAGTVGNTEAFF

SEQ ID NO: 559371 - protein, 14 aa, Homo sapiens
  CDR3 for alpha chain variable domain of TCR clone 279686 (TRAV13-2, TRAJ43)
CAEVPTYNNNDIRF

SEQ ID NO: 559372 - protein, 15 aa, Homo sapiens
  CDR3 for beta chain variable domain of TCR clone 279686 (TRBV7-9, TRBJ2-2)
CASGPLDTFPGELFF

SEQ ID NO: 559373 - protein, 15 aa, Homo sapiens
  CDR3 for alpha chain variable domain of TCR clone 279687 (TRAV8-4, TRAJ6)
CAVSAPSGGSYIPTF

SEQ ID NO: 559374 - protein, 17 aa, Homo sapiens
  CDR3 for beta chain variable domain of TCR clone 279687 (TRBV20-1, TRBJ2-1)
CSASSSGLAGSYNEQFF

SEQ ID NO: 559375 - protein, 16 aa, Homo sapiens
  CDR3 for alpha chain variable domain of TCR clone 279688 (TRAV3, TRAJ10)
CAVRDMRAGVGNKLTF

SEQ ID NO: 559376 - protein, 14 aa, Homo sapiens
  CDR3 for beta chain variable domain of TCR clone 279688 (TRBV25-1, TRBJ1-1)
CASTHLGGNTEAFF

SEQ ID NO: 559377 - protein, 14 aa, Homo sapiens
  CDR3 for alpha chain variable domain of TCR clone 279689 (TRAV17, TRAJ16)
CATADFSDGQKLLF

SEQ ID NO: 559378 - protein, 16 aa, Homo sapiens
  CDR3 for beta chain variable domain of TCR clone 279689 (TRBV9, TRBJ1-2)
CASSVEEKVSPYGYTF

SEQ ID NO: 559379 - protein, 13 aa, Homo sapiens
  CDR3 for alpha chain variable domain of TCR clone 279690 (TRAV12-3, TRAJ7)
CAMTPYGNNRLAF

SEQ ID NO: 559380 - protein, 12 aa, Homo sapiens
  CDR3 for beta chain variable domain of TCR clone 279690 (TRBV7-9, TRBJ1-4)
CASSTDREKLFF

SEQ ID NO: 559381 - protein, 14 aa, Homo sapiens
  CDR3 for alpha chain variable domain of TCR clone 279691 (TRAV17, TRAJ16)
CATADFSDGQELPF

SEQ ID NO: 559382 - protein, 12 aa, Homo sapiens
  CDR3 for beta chain variable domain of TCR clone 279691 (TRBV24-1, TRBJ1-1)
CATLYPDTEAFF

SEQ ID NO: 559383 - protein, 18 aa, Homo sapiens
  CDR3 for alpha chain variable domain of TCR clone 279692 (TRAV38-2/DV8, TRAJ52)
CAYRSVGAGGTSYGKLTF

SEQ ID NO: 559384 - protein, 15 aa, Homo sapiens
  CDR3 for beta chain variable domain of TCR clone 279692 (TRBV28, TRBJ2-7)
CASSPGGRGFYEQYF

SEQ ID NO: 559385 - protein, 13 aa, Homo sapiens
  CDR3 for alpha chain variable domain of TCR clone 279693 (TRAV20, TRAJ4)
CAVLAGGSNKLIF

SEQ ID NO: 559386 - protein, 17 aa, Homo sapiens
  CDR3 for beta chain variable domain of TCR clone 279693 (TRBV20-1, TRBJ2-7)
CSARDPEGDHREYEQYF

SEQ ID NO: 559387 - protein, 16 aa, Homo sapiens
  CDR3 for alpha chain variable domain of TCR clone 279694 (TRAV35, TRAJ28)
CAGQKYSGAGSYQLTF

SEQ ID NO: 559388 - protein, 16 aa, Homo sapiens
  CDR3 for beta chain variable domain of TCR clone 279694 (TRBV13, TRBJ2-2)
CASSPRTGEHTGELFF

SEQ ID NO: 559389 - protein, 16 aa, Homo sapiens
  CDR3 for alpha chain variable domain of TCR clone 279695 (TRAV13-1, TRAJ45)
CAASMRSGGGADGLTF

SEQ ID NO: 559390 - protein, 15 aa, Homo sapiens
  CDR3 for beta chain variable domain of TCR clone 279695 (TRBV3-1, TRBJ2-3)
CASSQTMGSTDTQYF

SEQ ID NO: 559391 - protein, 14 aa, Homo sapiens
  CDR3 for alpha chain variable domain of TCR clone 279696 (TRAV8-1, TRAJ24)
CAVNAADSRGKLQF

SEQ ID NO: 559392 - protein, 16 aa, Homo sapiens
  CDR3 for beta chain variable domain of TCR clone 279696 (TRBV4-3, TRBJ2-1)
CASSPALDRGVNEQFF

SEQ ID NO: 559393 - protein, 18 aa, Homo sapiens
  CDR3 for alpha chain variable domain of TCR clone 279697 (TRAV21, TRAJ52)
CAVRPSPAGGTSYGKLTF

SEQ ID NO: 559394 - protein, 11 aa, Homo sapiens
  CDR3 for beta chain variable domain of TCR clone 279697 (TRBV12-4, TRBJ2-2)
CASSSAGELFF

SEQ ID NO: 559395 - protein, 15 aa, Homo sapiens
  CDR3 for alpha chain variable domain of TCR clone 279698 (TRAV26-1, TRAJ29)
CIVRVEGSGNTPLVF

SEQ ID NO: 559396 - protein, 13 aa, Homo sapiens
  CDR3 for beta chain variable domain of TCR clone 279698 (TRBV12-4, TRBJ1-2)
CASSSGLTVISTF

SEQ ID NO: 559397 - protein, 11 aa, Homo sapiens
  CDR3 for alpha chain variable domain of TCR clone 279699 (TRAV2, TRAJ33)
CAVDSNYQLIW

SEQ ID NO: 559398 - protein, 15 aa, Homo sapiens
  CDR3 for beta chain variable domain of TCR clone 279699 (TRBV12-4, TRBJ1-5)
CASTRGSGFGQPQHF

SEQ ID NO: 559399 - protein, 16 aa, Homo sapiens
  CDR3 for alpha chain variable domain of TCR clone 279700 (TRAV3, TRAJ10)
CAVRDMRAGGGNKLTF

SEQ ID NO: 559400 - protein, 16 aa, Homo sapiens
  CDR3 for beta chain variable domain of TCR clone 279700 (TRBV20-1, TRBJ1-4)
CSAPGQCLLTNEKLFF

SEQ ID NO: 559401 - protein, 14 aa, Homo sapiens
  CDR3 for alpha chain variable domain of TCR clone 279701 (TRAV26-1, TRAJ21)
CIVRSPYNFNKFYF

SEQ ID NO: 559402 - protein, 14 aa, Homo sapiens
  CDR3 for beta chain variable domain of TCR clone 279701 (TRBV4-1, TRBJ2-2)
CASSQAVNTGELFF

SEQ ID NO: 559403 - protein, 12 aa, Homo sapiens
  CDR3 for alpha chain variable domain of TCR clone 279702 (TRAV2, TRAJ31)
CAVEDNNARLMF

SEQ ID NO: 559404 - protein, 16 aa, Homo sapiens
  CDR3 for beta chain variable domain of TCR clone 279702 (TRBV10-3, TRBJ2-1)
CAISGVGDGGGGKQFL

SEQ ID NO: 559405 - protein, 15 aa, Homo sapiens
  CDR3 for alpha chain variable domain of TCR clone 279703 (TRAV38-1, TRAJ37)
CAFIFGSGNTGKLIF

SEQ ID NO: 559406 - protein, 15 aa, Homo sapiens
  CDR3 for beta chain variable domain of TCR clone 279703 (TRBV7-9, TRBJ1-5)
CASSLTQGLEGSQHF

SEQ ID NO: 559407 - protein, 15 aa, Homo sapiens
  CDR3 for alpha chain variable domain of TCR clone 279704 (TRAV25, TRAJ52)
CAGRHGGTSYGKLKF

SEQ ID NO: 559408 - protein, 17 aa, Homo sapiens
  CDR3 for beta chain variable domain of TCR clone 279704 (TRBV7-8, TRBJ2-6)
CASSAGTGGAGANVLTF

SEQ ID NO: 559409 - protein, 14 aa, Homo sapiens
  CDR3 for alpha chain variable domain of TCR clone 279705 (TRAV29/DV5, TRAJ20)
CAASAPIEDYKLSF

SEQ ID NO: 559410 - protein, 12 aa, Homo sapiens
  CDR3 for beta chain variable domain of TCR clone 279705 (TRBV11-2, TRBJ2-2)
CASSLGGGELFF

SEQ ID NO: 559411 - protein, 14 aa, Homo sapiens
  CDR3 for alpha chain variable domain of TCR clone 279706 (TRAV12-1, TRAJ28)
WVSHSGAGSDQLTF

SEQ ID NO: 559412 - protein, 12 aa, Homo sapiens
  CDR3 for beta chain variable domain of TCR clone 279706 (TRBV7-9, TRBJ1-5)
CASSPQGQPQHV

SEQ ID NO: 559413 - protein, 14 aa, Homo sapiens
  CDR3 for alpha chain variable domain of TCR clone 279707 (TRAV13-2, TRAJ10)
CAGTFTGGGNKLTF

SEQ ID NO: 559414 - protein, 16 aa, Homo sapiens
  CDR3 for beta chain variable domain of TCR clone 279707 (TRBV18, TRBJ2-7)
CASSPRSQGISYEQYF

SEQ ID NO: 559415 - protein, 14 aa, Homo sapiens
  CDR3 for alpha chain variable domain of TCR clone 279708 (TRAV1-2, TRAJ8)
CAVREDTGFQKLVF

SEQ ID NO: 559416 - protein, 16 aa, Homo sapiens
  CDR3 for beta chain variable domain of TCR clone 279708 (TRBV7-2, TRBJ2-6)
CASSERRASGANVLTF

SEQ ID NO: 559417 - protein, 14 aa, Homo sapiens
  CDR3 for alpha chain variable domain of TCR clone 279709 (TRAV12-1, TRAJ54)
CVVNIYQGAQKLVF

SEQ ID NO: 559418 - protein, 12 aa, Homo sapiens
  CDR3 for beta chain variable domain of TCR clone 279709 (TRBV11-2, TRBJ2-1)
CASSPGNNEQFF

SEQ ID NO: 559419 - protein, 15 aa, Homo sapiens
  CDR3 for alpha chain variable domain of TCR clone 279710 (TRAV16, TRAJ12)
CSKWPLRDSSYKLIF

SEQ ID NO: 559420 - protein, 14 aa, Homo sapiens
  CDR3 for beta chain variable domain of TCR clone 279710 (TRBV12-5, TRBJ2-5)
CASGSRTHQETQYF

SEQ ID NO: 559421 - protein, 15 aa, Homo sapiens
  CDR3 for alpha chain variable domain of TCR clone 279711 (TRAV8-4, TRAJ3)
YAVTGENLVQQGFQD

SEQ ID NO: 559422 - protein, 16 aa, Homo sapiens
  CDR3 for beta chain variable domain of TCR clone 279711 (TRBV4-2, TRBJ1-1)
CASSQAGFGMNTEAFF

SEQ ID NO: 559423 - protein, 22 aa, Homo sapiens
  CDR3 for alpha chain variable domain of TCR clone 279712 (TRAV4, )
CLVCPHNYDIQNPDPAVYQLRD

SEQ ID NO: 559424 - protein, 17 aa, Homo sapiens
  CDR3 for beta chain variable domain of TCR clone 279712 (TRBV24-1, TRBJ2-1)
CATSDVSTSGTYNEQFF

SEQ ID NO: 559425 - protein, 15 aa, Homo sapiens
  CDR3 for alpha chain variable domain of TCR clone 279713 (TRAV2, TRAJ11)
FAVEDPNSGYSTLTF

SEQ ID NO: 559426 - protein, 15 aa, Homo sapiens
  CDR3 for beta chain variable domain of TCR clone 279713 (TRBV20-1, TRBJ2-7)
CSARDRVSGMDEQYF

SEQ ID NO: 559427 - protein, 10 aa, Homo sapiens
  CDR3 for alpha chain variable domain of TCR clone 279714 (TRAV1-2, TRAJ31)
CAFFDARLMF

SEQ ID NO: 559428 - protein, 14 aa, Homo sapiens
  CDR3 for beta chain variable domain of TCR clone 279714 (TRBV11-2, TRBJ2-5)
CASSRTGGIETQYF

SEQ ID NO: 559429 - protein, 11 aa, Homo sapiens
  CDR3 for alpha chain variable domain of TCR clone 279715 (TRAV13-1, TRAJ23)
CAASSRGKLIF

SEQ ID NO: 559430 - protein, 17 aa, Homo sapiens
  CDR3 for beta chain variable domain of TCR clone 279715 (TRBV28, TRBJ2-5)
CASSRQGGLAGAETQYF

SEQ ID NO: 559431 - protein, 10 aa, Homo sapiens
  CDR3 for alpha chain variable domain of TCR clone 279716 (TRAV12-1, TRAJ43)
CVVHNNDMRF

SEQ ID NO: 559432 - protein, 19 aa, Homo sapiens
  CDR3 for beta chain variable domain of TCR clone 279716 (TRBV7-2, TRBJ2-3)
CASSFLSRNWGGGTDTQYF

SEQ ID NO: 559433 - protein, 19 aa, Homo sapiens
  CDR3 for alpha chain variable domain of TCR clone 279717 (TRAV1-2, TRAJ26)
CLLPLCCERPDNYGQNFVF

SEQ ID NO: 559434 - protein, 17 aa, Homo sapiens
  CDR3 for beta chain variable domain of TCR clone 279717 (TRBV7-9, TRBJ2-1)
CASSLVASYPSYNEQFF

SEQ ID NO: 559435 - protein, 13 aa, Homo sapiens
  CDR3 for alpha chain variable domain of TCR clone 279718 (TRAV27, TRAJ6)
CAGGTRGSYIPTF

SEQ ID NO: 559436 - protein, 13 aa, Homo sapiens
  CDR3 for beta chain variable domain of TCR clone 279718 (TRBV4-1, TRBJ2-2)
CASSQENTGELFC

SEQ ID NO: 559437 - protein, 16 aa, Homo sapiens
  CDR3 for alpha chain variable domain of TCR clone 279719 (TRAV27, TRAJ52)
CAGAPAGGPSYGKLTF

SEQ ID NO: 559438 - protein, 12 aa, Homo sapiens
  CDR3 for beta chain variable domain of TCR clone 279719 (TRBV27, TRBJ2-1)
CASRGFYNEQFF

SEQ ID NO: 559439 - protein, 14 aa, Homo sapiens
  CDR3 for alpha chain variable domain of TCR clone 279720 (TRAV12-1, TRAJ28)
WVSHSGAGSYQLTF

SEQ ID NO: 559440 - protein, 12 aa, Homo sapiens
  CDR3 for beta chain variable domain of TCR clone 279720 (TRBV7-9, TRBJ1-5)
CASSPQGQPQHF

SEQ ID NO: 559441 - protein, 13 aa, Homo sapiens
  CDR3 for alpha chain variable domain of TCR clone 279721 (TRAV2, TRAJ20)
CAVEGPSGYKLSF

SEQ ID NO: 559442 - protein, 16 aa, Homo sapiens
  CDR3 for beta chain variable domain of TCR clone 279721 (TRBV25-1, TRBJ2-7)
CASSELTGGGIDEQYF

SEQ ID NO: 559443 - protein, 14 aa, Homo sapiens
  CDR3 for alpha chain variable domain of TCR clone 279722 (TRAV1-2, TRAJ16)
CAVNRFSDDQKLLF

SEQ ID NO: 559444 - protein, 15 aa, Homo sapiens
  CDR3 for beta chain variable domain of TCR clone 279722 (TRBV5-1, TRBJ2-1)
CASSPPRAPYNEQFF

SEQ ID NO: 559445 - protein, 15 aa, Homo sapiens
  CDR3 for alpha chain variable domain of TCR clone 279723 (TRAV8-3, TRAJ45)
CAASYSGGGADGLTF

SEQ ID NO: 559446 - protein, 15 aa, Homo sapiens
  CDR3 for beta chain variable domain of TCR clone 279723 (TRBV27, TRBJ1-4)
CASSPRHATNEKLFF

SEQ ID NO: 559447 - protein, 15 aa, Homo sapiens
  CDR3 for alpha chain variable domain of TCR clone 279724 (TRAV12-1, TRAJ45)
CVVLSRGGGADGLTF

SEQ ID NO: 559448 - protein, 15 aa, Homo sapiens
  CDR3 for beta chain variable domain of TCR clone 279724 (TRBV7-2, TRBJ2-1)
CASTHGTGIYNEQFF

SEQ ID NO: 559449 - protein, 13 aa, Homo sapiens
  CDR3 for alpha chain variable domain of TCR clone 279725 (TRAV39, TRAJ58)
CAGEETSGPRSTC

SEQ ID NO: 559450 - protein, 13 aa, Homo sapiens
  CDR3 for beta chain variable domain of TCR clone 279725 (TRBV15, TRBJ2-7)
CATSTTGHYEQYF

SEQ ID NO: 559451 - protein, 14 aa, Homo sapiens
  CDR3 for alpha chain variable domain of TCR clone 279726 (TRAV1-2, TRAJ8)
CAVREDTGFQKLVF

SEQ ID NO: 559452 - protein, 12 aa, Homo sapiens
  CDR3 for beta chain variable domain of TCR clone 279726 (TRBV7-8, TRBJ2-7)
CASSRGDREQYF

SEQ ID NO: 559453 - protein, 17 aa, Homo sapiens
  CDR3 for alpha chain variable domain of TCR clone 279727 (TRAV13-1, TRAJ17)
CLPLSSRSKAAGNKLTF

SEQ ID NO: 559454 - protein, 14 aa, Homo sapiens
  CDR3 for beta chain variable domain of TCR clone 279727 (TRBV7-9, TRBJ2-1)
CASSSMVGFGEQFF

SEQ ID NO: 559455 - protein, 12 aa, Homo sapiens
  CDR3 for alpha chain variable domain of TCR clone 279728 (TRAV12-3, TRAJ17)
CAMTLTGNKLTF

SEQ ID NO: 559456 - protein, 15 aa, Homo sapiens
  CDR3 for beta chain variable domain of TCR clone 279728 (TRBV18, TRBJ1-5)
CASSETGGNNQPQHF

SEQ ID NO: 559457 - protein, 15 aa, Homo sapiens
  CDR3 for alpha chain variable domain of TCR clone 279729 (TRAV3, TRAJ5)
CAVRDLDTGRRSLTF

SEQ ID NO: 559458 - protein, 13 aa, Homo sapiens
  CDR3 for beta chain variable domain of TCR clone 279729 (TRBV7-3, TRBJ1-1)
CASSQDWGAEAFF

SEQ ID NO: 559459 - protein, 13 aa, Homo sapiens
  CDR3 for alpha chain variable domain of TCR clone 279730 (TRAV29/DV5, TRAJ31)
CAASRNNNARLMF

SEQ ID NO: 559460 - protein, 13 aa, Homo sapiens
  CDR3 for beta chain variable domain of TCR clone 279730 (TRBV7-2, TRBJ2-4)
CASSREHANTQYF

SEQ ID NO: 559461 - protein, 18 aa, Homo sapiens
  CDR3 for alpha chain variable domain of TCR clone 279731 (TRAV26-1, TRAJ23)
CIVRVGLEVWNQGGKIIF

SEQ ID NO: 559462 - protein, 14 aa, Homo sapiens
  CDR3 for beta chain variable domain of TCR clone 279731 (TRBV7-6, TRBJ2-3)
CASSLGTVTDTQYF

SEQ ID NO: 559463 - protein, 14 aa, Homo sapiens
  CDR3 for alpha chain variable domain of TCR clone 279732 (TRAV12-2, TRAJ24)
RAVTPADSWGKLQF

SEQ ID NO: 559464 - protein, 13 aa, Homo sapiens
  CDR3 for beta chain variable domain of TCR clone 279732 (TRBV6-4, TRBJ1-5)
CASSADLNQPQHF

SEQ ID NO: 559465 - protein, 13 aa, Homo sapiens
  CDR3 for alpha chain variable domain of TCR clone 279733 (TRAV27, TRAJ42)
CAGARGSKGNLIF

SEQ ID NO: 559466 - protein, 14 aa, Homo sapiens
  CDR3 for beta chain variable domain of TCR clone 279733 (TRBV20-1, TRBJ1-1)
CSAQTRIGGTESFF

SEQ ID NO: 559467 - protein, 13 aa, Homo sapiens
  CDR3 for alpha chain variable domain of TCR clone 279734 (TRAV12-1, TRAJ6)
CVVFPGGSYIPTF

SEQ ID NO: 559468 - protein, 14 aa, Homo sapiens
  CDR3 for beta chain variable domain of TCR clone 279734 (TRBV7-2, TRBJ2-7)
CASSLRWEVNEQYF

SEQ ID NO: 559469 - protein, 15 aa, Homo sapiens
  CDR3 for alpha chain variable domain of TCR clone 279735 (TRAV17, TRAJ35)
CATAFVIGFGNVLHC

SEQ ID NO: 559470 - protein, 14 aa, Homo sapiens
  CDR3 for beta chain variable domain of TCR clone 279735 (TRBV12-4, TRBJ2-5)
CASSQSGGGETQCF

SEQ ID NO: 559471 - protein, 15 aa, Homo sapiens
  CDR3 for alpha chain variable domain of TCR clone 279736 (TRAV3, TRAJ9)
CAVRDSNTEGFKTIF

SEQ ID NO: 559472 - protein, 16 aa, Homo sapiens
  CDR3 for beta chain variable domain of TCR clone 279736 (TRBV15, TRBJ2-5)
CATSPTTGQGMETQYF

SEQ ID NO: 559473 - protein, 12 aa, Homo sapiens
  CDR3 for alpha chain variable domain of TCR clone 279737 (TRAV2, TRAJ26)
CAVGEYGQNVVF

SEQ ID NO: 559474 - protein, 14 aa, Homo sapiens
  CDR3 for beta chain variable domain of TCR clone 279737 (TRBV7-2, TRBJ2-2)
CASSPSGGTGELFF

SEQ ID NO: 559475 - protein, 13 aa, Homo sapiens
  CDR3 for alpha chain variable domain of TCR clone 279738 (TRAV8-6, TRAJ39)
CAVSSPPGNMLTF

SEQ ID NO: 559476 - protein, 15 aa, Homo sapiens
  CDR3 for beta chain variable domain of TCR clone 279738 (TRBV9, TRBJ2-6)
CASSVGLSGANVLTF

SEQ ID NO: 559477 - protein, 14 aa, Homo sapiens
  CDR3 for alpha chain variable domain of TCR clone 279739 (TRAV29/DV5, TRAJ47)
CAASEPEYGNKLVF

SEQ ID NO: 559478 - protein, 18 aa, Homo sapiens
  CDR3 for beta chain variable domain of TCR clone 279739 (TRBV11-2, TRBJ2-3)
CASSLGGASRGAPNTQYF

SEQ ID NO: 559479 - protein, 15 aa, Homo sapiens
  CDR3 for alpha chain variable domain of TCR clone 279740 (TRAV21, TRAJ52)
WAVRGGGTSYGKLTF

SEQ ID NO: 559480 - protein, 15 aa, Homo sapiens
  CDR3 for beta chain variable domain of TCR clone 279740 (TRBV18, TRBJ1-5)
CASSPSDRSNQPQHF

SEQ ID NO: 559481 - protein, 13 aa, Homo sapiens
  CDR3 for alpha chain variable domain of TCR clone 279741 (TRAV27, TRAJ17)
CSGAATAGNKLTF

SEQ ID NO: 559482 - protein, 15 aa, Homo sapiens
  CDR3 for beta chain variable domain of TCR clone 279741 (TRBV5-1, TRBJ2-3)
CASRNQAGSTDTQYF

SEQ ID NO: 559483 - protein, 12 aa, Homo sapiens
  CDR3 for alpha chain variable domain of TCR clone 279742 (TRAV17, TRAJ4)
CAVSGGYSKLIF

SEQ ID NO: 559484 - protein, 13 aa, Homo sapiens
  CDR3 for beta chain variable domain of TCR clone 279742 (TRBV6-1, TRBJ1-1)
CASSEGWGTEAFF

SEQ ID NO: 559485 - protein, 14 aa, Homo sapiens
  CDR3 for alpha chain variable domain of TCR clone 279743 (TRAV12-2, TRAJ13)
CAVKKTGGYQKVTF

SEQ ID NO: 559486 - protein, 15 aa, Homo sapiens
  CDR3 for beta chain variable domain of TCR clone 279743 (TRBV28, TRBJ2-1)
CASSNGGGSSNEQFF

SEQ ID NO: 559487 - protein, 15 aa, Homo sapiens
  CDR3 for alpha chain variable domain of TCR clone 279744 (TRAV3, TRAJ22)
CAVRDRGGSARQLTF

SEQ ID NO: 559488 - protein, 13 aa, Homo sapiens
  CDR3 for beta chain variable domain of TCR clone 279744 (TRBV2, TRBJ1-5)
CATAAPGNQPQHF

SEQ ID NO: 559489 - protein, 12 aa, Homo sapiens
  CDR3 for alpha chain variable domain of TCR clone 279745 (TRAV8-3, TRAJ20)
CAVGANDYKLSF

SEQ ID NO: 559490 - protein, 14 aa, Homo sapiens
  CDR3 for beta chain variable domain of TCR clone 279745 (TRBV7-9, TRBJ2-4)
CASSLAMGGNIQYF

SEQ ID NO: 559491 - protein, 14 aa, Homo sapiens
  CDR3 for alpha chain variable domain of TCR clone 279746 (TRAV12-3, TRAJ10)
SHLPLTGGGNKLTF

SEQ ID NO: 559492 - protein, 15 aa, Homo sapiens
  CDR3 for beta chain variable domain of TCR clone 279746 (TRBV12-4, TRBJ2-3)
CASSRLRGSTDAQYF

SEQ ID NO: 559493 - protein, 12 aa, Homo sapiens
  CDR3 for alpha chain variable domain of TCR clone 279747 (TRAV16, TRAJ10)
CSRTGGGNKLTF

SEQ ID NO: 559494 - protein, 15 aa, Homo sapiens
  CDR3 for beta chain variable domain of TCR clone 279747 (TRBV28, TRBJ1-3)
CASSMGWASGNTIYV

SEQ ID NO: 559495 - protein, 16 aa, Homo sapiens
  CDR3 for alpha chain variable domain of TCR clone 279748 (TRAV12-3, TRAJ53)
CAMSPGSGGSNYKLTF

SEQ ID NO: 559496 - protein, 17 aa, Homo sapiens
  CDR3 for beta chain variable domain of TCR clone 279748 (TRBV20-1, TRBJ2-2)
CSARDRTSGRHTGELFF

SEQ ID NO: 559497 - protein, 15 aa, Homo sapiens
  CDR3 for alpha chain variable domain of TCR clone 279749 (TRAV13-1, TRAJ17)
CAASIERAAGNKLTF

SEQ ID NO: 559498 - protein, 15 aa, Homo sapiens
  CDR3 for beta chain variable domain of TCR clone 279749 (TRBV6-1, TRBJ2-3)
CASSERGVITDTQYF

SEQ ID NO: 559499 - protein, 14 aa, Homo sapiens
  CDR3 for alpha chain variable domain of TCR clone 279750 (TRAV38-1, TRAJ40)
CALRPTSGTYKYIF

SEQ ID NO: 559500 - protein, 16 aa, Homo sapiens
  CDR3 for beta chain variable domain of TCR clone 279750 (TRBV19, TRBJ1-1)
CASRPRSEALNTEAFF

SEQ ID NO: 559501 - protein, 13 aa, Homo sapiens
  CDR3 for alpha chain variable domain of TCR clone 279751 (TRAV29/DV5, TRAJ31)
CAASRNNNARLMF

SEQ ID NO: 559502 - protein, 15 aa, Homo sapiens
  CDR3 for beta chain variable domain of TCR clone 279751 (TRBV13, TRBJ2-1)
CASSFRGTGDFSKFF

SEQ ID NO: 559503 - protein, 13 aa, Homo sapiens
  CDR3 for alpha chain variable domain of TCR clone 279752 (TRAV12-2, TRAJ30)
CAVNLNRDDKIIF

SEQ ID NO: 559504 - protein, 14 aa, Homo sapiens
  CDR3 for beta chain variable domain of TCR clone 279752 (TRBV7-2, TRBJ2-7)
CASRSQGAAYEQYF

SEQ ID NO: 559505 - protein, 14 aa, Homo sapiens
  CDR3 for alpha chain variable domain of TCR clone 279753 (TRAV20, TRAJ29)
CAVQESVRKHTSCL

SEQ ID NO: 559506 - protein, 16 aa, Homo sapiens
  CDR3 for beta chain variable domain of TCR clone 279753 (TRBV7-2, TRBJ2-7)
CASSLDLSGGAYEQYF

SEQ ID NO: 559507 - protein, 12 aa, Homo sapiens
  CDR3 for alpha chain variable domain of TCR clone 279754 (TRAV13-1, TRAJ21)
CVAKEGFNKFYF

SEQ ID NO: 559508 - protein, 15 aa, Homo sapiens
  CDR3 for beta chain variable domain of TCR clone 279754 (TRBV28, TRBJ1-3)
CASSLAGSSGNTIYF

SEQ ID NO: 559509 - protein, 15 aa, Homo sapiens
  CDR3 for alpha chain variable domain of TCR clone 279755 (TRAV35, TRAJ40)
CAGVPGASGTYKYIF

SEQ ID NO: 559510 - protein, 15 aa, Homo sapiens
  CDR3 for beta chain variable domain of TCR clone 279755 (TRBV20-1, TRBJ2-5)
CSAPPRTGFGETQYF

SEQ ID NO: 559511 - protein, 14 aa, Homo sapiens
  CDR3 for alpha chain variable domain of TCR clone 279756 (TRAV30, TRAJ33)
CGTVAPRSTYQLIW

SEQ ID NO: 559512 - protein, 14 aa, Homo sapiens
  CDR3 for beta chain variable domain of TCR clone 279756 (TRBV19, TRBJ2-1)
CASPTFVLSGEQFF

SEQ ID NO: 559513 - protein, 10 aa, Homo sapiens
  CDR3 for alpha chain variable domain of TCR clone 279757 (TRAV1-2, TRAJ18)
CAVRGEAQPW

SEQ ID NO: 559514 - protein, 14 aa, Homo sapiens
  CDR3 for beta chain variable domain of TCR clone 279757 (TRBV7-2, TRBJ2-7)
CASSFNGQDHEQYF

SEQ ID NO: 559515 - protein, 12 aa, Homo sapiens
  CDR3 for alpha chain variable domain of TCR clone 279758 (TRAV12-1, TRAJ23)
CVVNIQGGKLIF

SEQ ID NO: 559516 - protein, 15 aa, Homo sapiens
  CDR3 for beta chain variable domain of TCR clone 279758 (TRBV7-2, TRBJ2-7)
CASSLVSSGSYEQYF

SEQ ID NO: 559517 - protein, 15 aa, Homo sapiens
  CDR3 for alpha chain variable domain of TCR clone 279759 (TRAV35, TRAJ52)
CAGPQGGTSYGKLTF

SEQ ID NO: 559518 - protein, 14 aa, Homo sapiens
  CDR3 for beta chain variable domain of TCR clone 279759 (TRBV20-1, TRBJ2-7)
CSAWTALSSYEQYF

SEQ ID NO: 559519 - protein, 13 aa, Homo sapiens
  CDR3 for alpha chain variable domain of TCR clone 279760 (TRAV35, TRAJ42)
CAGFPGSQGNLIF

SEQ ID NO: 559520 - protein, 12 aa, Homo sapiens
  CDR3 for beta chain variable domain of TCR clone 279760 (TRBV6-6, TRBJ2-3)
CASSSRGDTQYF

SEQ ID NO: 559521 - protein, 12 aa, Homo sapiens
  CDR3 for alpha chain variable domain of TCR clone 279761 (TRAV8-4, TRAJ43)
CAVSVNNNDMRF

SEQ ID NO: 559522 - protein, 15 aa, Homo sapiens
  CDR3 for beta chain variable domain of TCR clone 279761 (TRBV4-3, TRBJ2-3)
CASSLGTRSSDTQYF

SEQ ID NO: 559523 - protein, 14 aa, Homo sapiens
  CDR3 for alpha chain variable domain of TCR clone 279762 (TRAV4, TRAJ30)
CLLTRMNRDDKIIF

SEQ ID NO: 559524 - protein, 13 aa, Homo sapiens
  CDR3 for beta chain variable domain of TCR clone 279762 (TRBV11-2, TRBJ2-1)
CASSLDLVNEQFF

SEQ ID NO: 559525 - protein, 14 aa, Homo sapiens
  CDR3 for alpha chain variable domain of TCR clone 279763 (TRAV8-2, TRAJ23)
CVVSDDNQGGKLIF

SEQ ID NO: 559526 - protein, 13 aa, Homo sapiens
  CDR3 for beta chain variable domain of TCR clone 279763 (TRBV7-7, TRBJ2-2)
CASSLTSTGELFF

SEQ ID NO: 559527 - protein, 14 aa, Homo sapiens
  CDR3 for alpha chain variable domain of TCR clone 279764 (TRAV1-2, TRAJ24)
CAVLTTDSWGKFQF

SEQ ID NO: 559528 - protein, 14 aa, Homo sapiens
  CDR3 for beta chain variable domain of TCR clone 279764 (TRBV7-2, TRBJ1-5)
CASSPRGGPQPQHF

SEQ ID NO: 559529 - protein, 11 aa, Homo sapiens
  CDR3 for alpha chain variable domain of TCR clone 279765 (TRAV13-2, TRAJ36)
CAETGANNLFF

SEQ ID NO: 559530 - protein, 20 aa, Homo sapiens
  CDR3 for beta chain variable domain of TCR clone 279765 (TRBV7-8, TRBJ2-2)
CASSHLFPGPTIHITGELFF

SEQ ID NO: 559531 - protein, 13 aa, Homo sapiens
  CDR3 for alpha chain variable domain of TCR clone 279766 (TRAV38-1, TRAJ42)
CARWGGSQGNPIF

SEQ ID NO: 559532 - protein, 13 aa, Homo sapiens
  CDR3 for beta chain variable domain of TCR clone 279766 (TRBV14, TRBJ1-2)
CASSEDRRYGYTF

SEQ ID NO: 559533 - protein, 15 aa, Homo sapiens
  CDR3 for alpha chain variable domain of TCR clone 279767 (TRAV13-2, TRAJ23)
CAETALWGQGGKLIF

SEQ ID NO: 559534 - protein, 17 aa, Homo sapiens
  CDR3 for beta chain variable domain of TCR clone 279767 (TRBV9, TRBJ1-6)
CASSVAGTGDSPSTLGT

SEQ ID NO: 559535 - protein, 15 aa, Homo sapiens
  CDR3 for alpha chain variable domain of TCR clone 279768 (TRAV8-3, TRAJ45)
CASSYSGGGADGLTF

SEQ ID NO: 559536 - protein, 17 aa, Homo sapiens
  CDR3 for beta chain variable domain of TCR clone 279768 (TRBV7-3, TRBJ2-3)
RASSLMKRMRGADTQYF

SEQ ID NO: 559537 - protein, 14 aa, Homo sapiens
  CDR3 for alpha chain variable domain of TCR clone 279769 (TRAV26-1, TRAJ21)
CIVRPPYNFNKFYF

SEQ ID NO: 559538 - protein, 17 aa, Homo sapiens
  CDR3 for beta chain variable domain of TCR clone 279769 (TRBV11-2, TRBJ2-1)
CASSLYPPGVEYNEQFF

SEQ ID NO: 559539 - protein, 16 aa, Homo sapiens
  CDR3 for alpha chain variable domain of TCR clone 279770 (TRAV3, TRAJ23)
CAVRDSSYNQGGKLNF

SEQ ID NO: 559540 - protein, 13 aa, Homo sapiens
  CDR3 for beta chain variable domain of TCR clone 279770 (TRBV10-3, TRBJ2-7)
CASKLAVNYEQYF

SEQ ID NO: 559541 - protein, 13 aa, Homo sapiens
  CDR3 for alpha chain variable domain of TCR clone 279771 (TRAV2, TRAJ15)
CAVASQAGTALIF

SEQ ID NO: 559542 - protein, 13 aa, Homo sapiens
  CDR3 for beta chain variable domain of TCR clone 279771 (TRBV28, TRBJ2-7)
CASKAGGVYEQFF

SEQ ID NO: 559543 - protein, 16 aa, Homo sapiens
  CDR3 for alpha chain variable domain of TCR clone 279772 (TRAV27, TRAJ52)
CAGAPAGGTSYGKLTF

SEQ ID NO: 559544 - protein, 13 aa, Homo sapiens
  CDR3 for beta chain variable domain of TCR clone 279772 (TRBV7-9, TRBJ2-3)
CASSPGSTDTQYF

SEQ ID NO: 559545 - protein, 16 aa, Homo sapiens
  CDR3 for alpha chain variable domain of TCR clone 279773 (TRAV38-1, TRAJ32)
CDFMKGGGGATNKLIF

SEQ ID NO: 559546 - protein, 13 aa, Homo sapiens
  CDR3 for beta chain variable domain of TCR clone 279773 (TRBV20-1, TRBJ2-5)
CSAREAFQETQYF

SEQ ID NO: 559547 - protein, 12 aa, Homo sapiens
  CDR3 for alpha chain variable domain of TCR clone 279774 (TRAV12-2, TRAJ44)
CADTGTASTLTF

SEQ ID NO: 559548 - protein, 17 aa, Homo sapiens
  CDR3 for beta chain variable domain of TCR clone 279774 (TRBV20-1, TRBJ1-1)
CSASGTGGSYGNTGAFF

SEQ ID NO: 559549 - protein, 15 aa, Homo sapiens
  CDR3 for alpha chain variable domain of TCR clone 279775 (TRAV1-1, TRAJ24)
CALSGGTDSWGKFQF

SEQ ID NO: 559550 - protein, 14 aa, Homo sapiens
  CDR3 for beta chain variable domain of TCR clone 279775 (TRBV11-3, TRBJ2-3)
CASSLDPATDTQYF

SEQ ID NO: 559551 - protein, 15 aa, Homo sapiens
  CDR3 for alpha chain variable domain of TCR clone 279776 (TRAV14/DV4, TRAJ39)
CAMRAVNNAGNMLTF

SEQ ID NO: 559552 - protein, 13 aa, Homo sapiens
  CDR3 for beta chain variable domain of TCR clone 279776 (TRBV6-5, TRBJ2-5)
CASRTPGWETQYF

SEQ ID NO: 559553 - protein, 13 aa, Homo sapiens
  CDR3 for alpha chain variable domain of TCR clone 279777 (TRAV3, TRAJ20)
CAVRPLNDYKLSF

SEQ ID NO: 559554 - protein, 12 aa, Homo sapiens
  CDR3 for beta chain variable domain of TCR clone 279777 (TRBV14, TRBJ1-1)
CASRPYETEAFF

SEQ ID NO: 559555 - protein, 14 aa, Homo sapiens
  CDR3 for alpha chain variable domain of TCR clone 279778 (TRAV12-3, TRAJ33)
CAMSVPGSNYQLIW

SEQ ID NO: 559556 - protein, 14 aa, Homo sapiens
  CDR3 for beta chain variable domain of TCR clone 279778 (TRBV19, TRBJ2-3)
CASSAPRGTDTQYF

SEQ ID NO: 559557 - protein, 15 aa, Homo sapiens
  CDR3 for alpha chain variable domain of TCR clone 279779 (TRAV8-3, TRAJ11)
CAVGLLNSGYSTLTF

SEQ ID NO: 559558 - protein, 12 aa, Homo sapiens
  CDR3 for beta chain variable domain of TCR clone 279779 (TRBV6-3, TRBJ2-1)
CASSGSYNEQFF

SEQ ID NO: 559559 - protein, 11 aa, Homo sapiens
  CDR3 for alpha chain variable domain of TCR clone 279780 (TRAV21, TRAJ34)
CAHYNTDKLIF

SEQ ID NO: 559560 - protein, 10 aa, Homo sapiens
  CDR3 for beta chain variable domain of TCR clone 279780 (TRBV7-6, TRBJ1-2)
CASSLVADYG

SEQ ID NO: 559561 - protein, 12 aa, Homo sapiens
  CDR3 for alpha chain variable domain of TCR clone 279781 (TRAV13-1, TRAJ49)
CAASIWGNQFFF

SEQ ID NO: 559562 - protein, 14 aa, Homo sapiens
  CDR3 for beta chain variable domain of TCR clone 279781 (TRBV12-4, TRBJ1-1)
CASSLDGLNTEAFF

SEQ ID NO: 559563 - protein, 15 aa, Homo sapiens
  CDR3 for alpha chain variable domain of TCR clone 279782 (TRAV1-2, TRAJ11)
CAVRVPNSGYSTLTF

SEQ ID NO: 559564 - protein, 12 aa, Homo sapiens
  CDR3 for beta chain variable domain of TCR clone 279782 (TRBV7-8, TRBJ2-7)
CASSLGDREQYF

SEQ ID NO: 559565 - protein, 14 aa, Homo sapiens
  CDR3 for alpha chain variable domain of TCR clone 279783 (TRAV1-2, TRAJ6)
CAVSLSGGSYIPTF

SEQ ID NO: 559566 - protein, 13 aa, Homo sapiens
  CDR3 for beta chain variable domain of TCR clone 279783 (TRBV11-3, TRBJ2-7)
CASSLDKLYEQYF

SEQ ID NO: 559567 - protein, 14 aa, Homo sapiens
  CDR3 for alpha chain variable domain of TCR clone 279784 (TRAV12-3, TRAJ10)
SHLSLTGGGNKLTF

SEQ ID NO: 559568 - protein, 13 aa, Homo sapiens
  CDR3 for beta chain variable domain of TCR clone 279784 (TRBV7-9, TRBJ2-3)
CASSPGSTDTQYF

SEQ ID NO: 559569 - protein, 14 aa, Homo sapiens
  CDR3 for alpha chain variable domain of TCR clone 279785 (TRAV12-1, TRAJ30)
CVVNIGGRDDKIIF

SEQ ID NO: 559570 - protein, 13 aa, Homo sapiens
  CDR3 for beta chain variable domain of TCR clone 279785 (TRBV12-5, TRBJ2-1)
CASGLGRGNVQFF

SEQ ID NO: 559571 - protein, 15 aa, Homo sapiens
  CDR3 for alpha chain variable domain of TCR clone 279786 (TRAV26-1, TRAJ29)
CIVRVEGSGKTPLVL

SEQ ID NO: 559572 - protein, 14 aa, Homo sapiens
  CDR3 for beta chain variable domain of TCR clone 279786 (TRBV18, TRBJ2-5)
CASSPGVSQETQYF

SEQ ID NO: 559573 - protein, 12 aa, Homo sapiens
  CDR3 for alpha chain variable domain of TCR clone 279787 (TRAV3, TRAJ20)
CAVRDHDYKISF

SEQ ID NO: 559574 - protein, 15 aa, Homo sapiens
  CDR3 for beta chain variable domain of TCR clone 279787 (TRBV9, TRBJ1-6)
CASSVAGTGDSPLHF

SEQ ID NO: 559575 - protein, 14 aa, Homo sapiens
  CDR3 for alpha chain variable domain of TCR clone 279788 (TRAV35, TRAJ22)
CAGLRPGSARQLTF

SEQ ID NO: 559576 - protein, 17 aa, Homo sapiens
  CDR3 for beta chain variable domain of TCR clone 279788 (TRBV4-1, TRBJ1-5)
CASSQQPPTVANQPQHF

SEQ ID NO: 559577 - protein, 14 aa, Homo sapiens
  CDR3 for alpha chain variable domain of TCR clone 279789 (TRAV12-3, TRAJ33)
CAMSVPGSNYQLIW

SEQ ID NO: 559578 - protein, 14 aa, Homo sapiens
  CDR3 for beta chain variable domain of TCR clone 279789 (TRBV7-2, TRBJ2-7)
CASSPKTSFYEQYF

SEQ ID NO: 559579 - protein, 15 aa, Homo sapiens
  CDR3 for alpha chain variable domain of TCR clone 279790 (TRAV12-3, TRAJ49)
CAMAVTPNTGNQFYF

SEQ ID NO: 559580 - protein, 15 aa, Homo sapiens
  CDR3 for beta chain variable domain of TCR clone 279790 (TRBV4-1, TRBJ2-5)
CASSQWDLYQETQYF

SEQ ID NO: 559581 - protein, 14 aa, Homo sapiens
  CDR3 for alpha chain variable domain of TCR clone 279791 (TRAV4, TRAJ10)
CLVGDTGGGNKLTF

SEQ ID NO: 559582 - protein, 13 aa, Homo sapiens
  CDR3 for beta chain variable domain of TCR clone 279791 (TRBV10-2, TRBJ2-5)
CASSVGPQGTQYF

SEQ ID NO: 559583 - protein, 13 aa, Homo sapiens
  CDR3 for alpha chain variable domain of TCR clone 279792 (TRAV8-3, TRAJ43)
CAVVPYNNNDMRF

SEQ ID NO: 559584 - protein, 19 aa, Homo sapiens
  CDR3 for beta chain variable domain of TCR clone 279792 (TRBV7-7, TRBJ1-1)
CIAVPAGDRPNLGVTEAFF

SEQ ID NO: 559585 - protein, 12 aa, Homo sapiens
  CDR3 for alpha chain variable domain of TCR clone 279793 (TRAV12-3, TRAJ17)
CAMRLTGKKLTF

SEQ ID NO: 559586 - protein, 15 aa, Homo sapiens
  CDR3 for beta chain variable domain of TCR clone 279793 (TRBV20-1, TRBJ2-7)
CSARDRVSGMDEQYF

SEQ ID NO: 559587 - protein, 14 aa, Homo sapiens
  CDR3 for alpha chain variable domain of TCR clone 279794 (TRAV21, TRAJ45)
CAVVSGGGADGLTF

SEQ ID NO: 559588 - protein, 14 aa, Homo sapiens
  CDR3 for beta chain variable domain of TCR clone 279794 (TRBV20-1, TRBJ2-3)
CSALGLGGADTQYF

SEQ ID NO: 559589 - protein, 14 aa, Homo sapiens
  CDR3 for alpha chain variable domain of TCR clone 279795 (TRAV12-1, TRAJ30)
CVVNIGGRVDKIIF

SEQ ID NO: 559590 - protein, 14 aa, Homo sapiens
  CDR3 for beta chain variable domain of TCR clone 279795 (TRBV20-1, TRBJ2-1)
CSAQIGGSANEQFF

SEQ ID NO: 559591 - protein, 15 aa, Homo sapiens
  CDR3 for alpha chain variable domain of TCR clone 279796 (TRAV17, TRAJ45)
TSVLRTGGGSDGLTF

SEQ ID NO: 559592 - protein, 14 aa, Homo sapiens
  CDR3 for beta chain variable domain of TCR clone 279796 (TRBV7-2, TRBJ2-5)
CASSFTQGQETQYF

SEQ ID NO: 559593 - protein, 14 aa, Homo sapiens
  CDR3 for alpha chain variable domain of TCR clone 279797 (TRAV29/DV5, TRAJ45)
CAVYSGGGADGLTF

SEQ ID NO: 559594 - protein, 18 aa, Homo sapiens
  CDR3 for beta chain variable domain of TCR clone 279797 (TRBV11-2, TRBJ2-3)
CASSLGGASRGAPNTQYF

SEQ ID NO: 559595 - protein, 15 aa, Homo sapiens
  CDR3 for alpha chain variable domain of TCR clone 279798 (TRAV2, TRAJ15)
CAVEDRNQGGTALIF

SEQ ID NO: 559596 - protein, 13 aa, Homo sapiens
  CDR3 for beta chain variable domain of TCR clone 279798 (TRBV10-2, TRBJ2-1)
CASGASGDAKQFF

SEQ ID NO: 559597 - protein, 14 aa, Homo sapiens
  CDR3 for alpha chain variable domain of TCR clone 279799 (TRAV12-1, TRAJ12)
RVVTRMDSSYKLIF

SEQ ID NO: 559598 - protein, 13 aa, Homo sapiens
  CDR3 for beta chain variable domain of TCR clone 279799 (TRBV20-1, TRBJ1-1)
CSARGGGNTETFF

SEQ ID NO: 559599 - protein, 12 aa, Homo sapiens
  CDR3 for alpha chain variable domain of TCR clone 279800 (TRAV13-2, TRAJ39)
CAESRPGNMLTF

SEQ ID NO: 559600 - protein, 14 aa, Homo sapiens
  CDR3 for beta chain variable domain of TCR clone 279800 (TRBV19, TRBJ2-1)
CASPTFVLSGEQFF

SEQ ID NO: 559601 - protein, 16 aa, Homo sapiens
  CDR3 for alpha chain variable domain of TCR clone 279801 (TRAV3, TRAJ10)
CAVRDMRAGGGNKLTF

SEQ ID NO: 559602 - protein, 14 aa, Homo sapiens
  CDR3 for beta chain variable domain of TCR clone 279801 (TRBV28, TRBJ2-2)
YASTRRSGDGELFF

SEQ ID NO: 559603 - protein, 15 aa, Homo sapiens
  CDR3 for alpha chain variable domain of TCR clone 279802 (TRAV27, TRAJ38)
CAARRNAGNNRKLIW

SEQ ID NO: 559604 - protein, 14 aa, Homo sapiens
  CDR3 for beta chain variable domain of TCR clone 279802 (TRBV6-1, TRBJ2-7)
CASSQSTGLYEQYF

SEQ ID NO: 559605 - protein, 16 aa, Homo sapiens
  CDR3 for alpha chain variable domain of TCR clone 279803 (TRAV8-3, TRAJ44)
CAVGASNTGTARKLTF

SEQ ID NO: 559606 - protein, 15 aa, Homo sapiens
  CDR3 for beta chain variable domain of TCR clone 279803 (TRBV27, TRBJ1-5)
RASTFNRGSNQPQHF

SEQ ID NO: 559607 - protein, 16 aa, Homo sapiens
  CDR3 for alpha chain variable domain of TCR clone 279804 (TRAV26-1, TRAJ38)
CIVRPLNAGNHRKLIW

SEQ ID NO: 559608 - protein, 13 aa, Homo sapiens
  CDR3 for beta chain variable domain of TCR clone 279804 (TRBV18, TRBJ1-1)
CASSPNGDTEAFF

SEQ ID NO: 559609 - protein, 13 aa, Homo sapiens
  CDR3 for alpha chain variable domain of TCR clone 279805 (TRAV12-1, TRAJ9)
CVVRNTGGFKTIF

SEQ ID NO: 559610 - protein, 14 aa, Homo sapiens
  CDR3 for beta chain variable domain of TCR clone 279805 (TRBV20-1, TRBJ2-1)
CSAQIGWSANEQFF

SEQ ID NO: 559611 - protein, 11 aa, Homo sapiens
  CDR3 for alpha chain variable domain of TCR clone 279806 (TRAV29/DV5, TRAJ49)
CAAVPGNQFYF

SEQ ID NO: 559612 - protein, 15 aa, Homo sapiens
  CDR3 for beta chain variable domain of TCR clone 279806 (TRBV10-3, TRBJ2-3)
CAVSLTSGGTDTQYF

SEQ ID NO: 559613 - protein, 15 aa, Homo sapiens
  CDR3 for alpha chain variable domain of TCR clone 279807 (TRAV12-2, TRAJ56)
CAVNPFTGAKSKLTF

SEQ ID NO: 559614 - protein, 13 aa, Homo sapiens
  CDR3 for beta chain variable domain of TCR clone 279807 (TRBV20-1, TRBJ1-2)
RSARDRVYGGYTF

SEQ ID NO: 559615 - protein, 14 aa, Homo sapiens
  CDR3 for alpha chain variable domain of TCR clone 279808 (TRAV12-2, TRAJ13)
CAVKKTGGYQNVTF

SEQ ID NO: 559616 - protein, 14 aa, Homo sapiens
  CDR3 for beta chain variable domain of TCR clone 279808 (TRBV7-9, TRBJ2-1)
CASSPRGSLYEQFF

SEQ ID NO: 559617 - protein, 14 aa, Homo sapiens
  CDR3 for alpha chain variable domain of TCR clone 279809 (TRAV12-2, TRAJ13)
CAVKKTGGYQKVNF

SEQ ID NO: 559618 - protein, 12 aa, Homo sapiens
  CDR3 for beta chain variable domain of TCR clone 279809 (TRBV11-2, TRBJ2-2)
CASSLGGGELFF

SEQ ID NO: 559619 - protein, 12 aa, Homo sapiens
  CDR3 for alpha chain variable domain of TCR clone 279810 (TRAV12-3, TRAJ17)
CAMTPTGNKLTF

SEQ ID NO: 559620 - protein, 15 aa, Homo sapiens
  CDR3 for beta chain variable domain of TCR clone 279810 (TRBV6-6, TRBJ2-5)
CASSPGGGLEETQYF

SEQ ID NO: 559621 - protein, 17 aa, Homo sapiens
  CDR3 for alpha chain variable domain of TCR clone 279811 (TRAV3, TRAJ42)
CAVIDRDYGGSQGNLIF

SEQ ID NO: 559622 - protein, 18 aa, Homo sapiens
  CDR3 for beta chain variable domain of TCR clone 279811 (TRBV20-1, TRBJ2-3)
CSASGLAGGPGTTDTQYF

SEQ ID NO: 559623 - protein, 17 aa, Homo sapiens
  CDR3 for alpha chain variable domain of TCR clone 279812 (TRAV23/DV6, TRAJ57)
CAASSTLSQGGSEKMVF

SEQ ID NO: 559624 - protein, 15 aa, Homo sapiens
  CDR3 for beta chain variable domain of TCR clone 279812 (TRBV7-2, TRBJ1-2)
CASSLVSGGDYGYTF

SEQ ID NO: 559625 - protein, 17 aa, Homo sapiens
  CDR3 for alpha chain variable domain of TCR clone 279813 (TRAV36/DV7, TRAJ52)
CAVAQRAGGTSYGKLTF

SEQ ID NO: 559626 - protein, 15 aa, Homo sapiens
  CDR3 for beta chain variable domain of TCR clone 279813 (TRBV20-1, TRBJ2-7)
CSAESVTSGAYEQYF

SEQ ID NO: 559627 - protein, 14 aa, Homo sapiens
  CDR3 for alpha chain variable domain of TCR clone 279814 (TRAV16, TRAJ48)
RALTPGFGNEKLTF

SEQ ID NO: 559628 - protein, 14 aa, Homo sapiens
  CDR3 for beta chain variable domain of TCR clone 279814 (TRBV7-2, TRBJ2-7)
CASSSISGFSEQYF

SEQ ID NO: 559629 - protein, 13 aa, Homo sapiens
  CDR3 for alpha chain variable domain of TCR clone 279815 (TRAV26-1, TRAJ34)
CIVRPWITDKLIF

SEQ ID NO: 559630 - protein, 15 aa, Homo sapiens
  CDR3 for beta chain variable domain of TCR clone 279815 (TRBV6-1, TRBJ2-3)
CASSERGGITDTQYF

SEQ ID NO: 559631 - protein, 13 aa, Homo sapiens
  CDR3 for alpha chain variable domain of TCR clone 279816 (TRAV8-4, TRAJ10)
CAAFTGGGNKLTF

SEQ ID NO: 559632 - protein, 15 aa, Homo sapiens
  CDR3 for beta chain variable domain of TCR clone 279816 (TRBV2, TRBJ2-3)
CASSDFEKATDTQYC

SEQ ID NO: 559633 - protein, 14 aa, Homo sapiens
  CDR3 for alpha chain variable domain of TCR clone 279817 (TRAV29/DV5, TRAJ20)
CAATIRSNDYKLSF

SEQ ID NO: 559634 - protein, 13 aa, Homo sapiens
  CDR3 for beta chain variable domain of TCR clone 279817 (TRBV7-9, TRBJ2-1)
CASSLDVGNEQFF

SEQ ID NO: 559635 - protein, 14 aa, Homo sapiens
  CDR3 for alpha chain variable domain of TCR clone 279818 (TRAV3, TRAJ9)
FAVRLNTGGFKTIF

SEQ ID NO: 559636 - protein, 16 aa, Homo sapiens
  CDR3 for beta chain variable domain of TCR clone 279818 (TRBV12-5, TRBJ2-5)
CASGPRTSGNQETQYF

SEQ ID NO: 559637 - protein, 17 aa, Homo sapiens
  CDR3 for alpha chain variable domain of TCR clone 279819 (TRAV26-2, TRAJ28)
CILRPLLIVAGSYQLTF

SEQ ID NO: 559638 - protein, 17 aa, Homo sapiens
  CDR3 for beta chain variable domain of TCR clone 279819 (TRBV7-8, TRBJ2-6)
CASSAGTGGAGANVLTF

SEQ ID NO: 559639 - protein, 12 aa, Homo sapiens
  CDR3 for alpha chain variable domain of TCR clone 279820 (TRAV21, TRAJ13)
PGPSGGYQKVTF

SEQ ID NO: 559640 - protein, 11 aa, Homo sapiens
  CDR3 for beta chain variable domain of TCR clone 279820 (TRBV11-2, TRBJ1-1)
CASSINTEAFF

SEQ ID NO: 559641 - protein, 14 aa, Homo sapiens
  CDR3 for alpha chain variable domain of TCR clone 279821 (TRAV12-2, TRAJ11)
CAVEGGSGYSTLTL

SEQ ID NO: 559642 - protein, 13 aa, Homo sapiens
  CDR3 for beta chain variable domain of TCR clone 279821 (TRBV7-2, TRBJ2-7)
CASSSPSGSEQYF

SEQ ID NO: 559643 - protein, 14 aa, Homo sapiens
  CDR3 for alpha chain variable domain of TCR clone 279822 (TRAV21, TRAJ35)
CAVMPIGFGNVLHC

SEQ ID NO: 559644 - protein, 12 aa, Homo sapiens
  CDR3 for beta chain variable domain of TCR clone 279822 (TRBV11-2, TRBJ2-2)
CASSLGGGELFF

SEQ ID NO: 559645 - protein, 12 aa, Homo sapiens
  CDR3 for alpha chain variable domain of TCR clone 279823 (TRAV13-2, TRAJ16)
CAENIVGQKLLF

SEQ ID NO: 559646 - protein, 15 aa, Homo sapiens
  CDR3 for beta chain variable domain of TCR clone 279823 (TRBV20-1, TRBJ2-7)
CSARDRVSGMDEQYF

SEQ ID NO: 559647 - protein, 15 aa, Homo sapiens
  CDR3 for alpha chain variable domain of TCR clone 279824 (TRAV2, TRAJ9)
CAVEDRGTGGFKTIF

SEQ ID NO: 559648 - protein, 14 aa, Homo sapiens
  CDR3 for beta chain variable domain of TCR clone 279824 (TRBV7-2, TRBJ2-7)
CASSSISGFSEQYF

SEQ ID NO: 559649 - protein, 16 aa, Homo sapiens
  CDR3 for alpha chain variable domain of TCR clone 279825 (TRAV8-3, TRAJ22)
CAVDLLGPGSARQLTF

SEQ ID NO: 559650 - protein, 14 aa, Homo sapiens
  CDR3 for beta chain variable domain of TCR clone 279825 (TRBV11-2, TRBJ2-7)
CASSLELEGYEQYL

SEQ ID NO: 559651 - protein, 15 aa, Homo sapiens
  CDR3 for alpha chain variable domain of TCR clone 279826 (TRAV21, TRAJ52)
CAVRGGGTSYGKLTF

SEQ ID NO: 559652 - protein, 14 aa, Homo sapiens
  CDR3 for beta chain variable domain of TCR clone 279826 (TRBV18, TRBJ1-5)
CQLTLRQEQSAQHF

SEQ ID NO: 559653 - protein, 14 aa, Homo sapiens
  CDR3 for alpha chain variable domain of TCR clone 279827 (TRAV12-3, TRAJ10)
SHLPLTGGGNKLTF

SEQ ID NO: 559654 - protein, 15 aa, Homo sapiens
  CDR3 for beta chain variable domain of TCR clone 279827 (TRBV5-1, TRBJ2-5)
CASSLGLAEQETQYF

SEQ ID NO: 559655 - protein, 12 aa, Homo sapiens
  CDR3 for alpha chain variable domain of TCR clone 279828 (TRAV35, TRAJ31)
CAAASNTARLMF

SEQ ID NO: 559656 - protein, 14 aa, Homo sapiens
  CDR3 for beta chain variable domain of TCR clone 279828 (TRBV2, TRBJ2-2)
CASSLFGGNGELFF

SEQ ID NO: 559657 - protein, 14 aa, Homo sapiens
  CDR3 for alpha chain variable domain of TCR clone 279829 (TRAV12-2, TRAJ15)
CAPHTGQAGTALIF

SEQ ID NO: 559658 - protein, 14 aa, Homo sapiens
  CDR3 for beta chain variable domain of TCR clone 279829 (TRBV6-1, TRBJ1-3)
CACVQGGGGNTIYF

SEQ ID NO: 559659 - protein, 10 aa, Homo sapiens
  CDR3 for alpha chain variable domain of TCR clone 279830 (TRAV12-3, TRAJ18)
CAMSAEAQPW

SEQ ID NO: 559660 - protein, 15 aa, Homo sapiens
  CDR3 for beta chain variable domain of TCR clone 279830 (TRBV7-2, TRBJ2-1)
CASSSGLAGGNEQFF

SEQ ID NO: 559661 - protein, 13 aa, Homo sapiens
  CDR3 for alpha chain variable domain of TCR clone 279831 (TRAV38-2/DV8, TRAJ34)
CAYRTWNTDKLIF

SEQ ID NO: 559662 - protein, 16 aa, Homo sapiens
  CDR3 for beta chain variable domain of TCR clone 279831 (TRBV5-4, TRBJ2-1)
CASSLALAGAYNEQFF

SEQ ID NO: 559663 - protein, 16 aa, Homo sapiens
  CDR3 for alpha chain variable domain of TCR clone 279832 (TRAV30, TRAJ24)
CGTEIVDADSWGKFQF

SEQ ID NO: 559664 - protein, 15 aa, Homo sapiens
  CDR3 for beta chain variable domain of TCR clone 279832 (TRBV11-3, TRBJ2-1)
CASSLAGQTYNEQFF

SEQ ID NO: 559665 - protein, 14 aa, Homo sapiens
  CDR3 for alpha chain variable domain of TCR clone 279833 (TRAV26-2, TRAJ32)
CCVGYGGATNKLIF

SEQ ID NO: 559666 - protein, 15 aa, Homo sapiens
  CDR3 for beta chain variable domain of TCR clone 279833 (TRBV5-1, TRBJ1-1)
CASSLGEGENTEAFF

SEQ ID NO: 559667 - protein, 13 aa, Homo sapiens
  CDR3 for alpha chain variable domain of TCR clone 279834 (TRAV21, TRAJ11)
CAVPNSGYSTLTF

SEQ ID NO: 559668 - protein, 14 aa, Homo sapiens
  CDR3 for beta chain variable domain of TCR clone 279834 (TRBV20-1, TRBJ1-1)
CSAQTRIGGTEAFF

SEQ ID NO: 559669 - protein, 11 aa, Homo sapiens
  CDR3 for alpha chain variable domain of TCR clone 279835 (TRAV1-2, TRAJ34)
CAVQNTDKLIF

SEQ ID NO: 559670 - protein, 14 aa, Homo sapiens
  CDR3 for beta chain variable domain of TCR clone 279835 (TRBV11-2, TRBJ2-5)
CASSRTGGIETQYF

SEQ ID NO: 559671 - protein, 16 aa, Homo sapiens
  CDR3 for alpha chain variable domain of TCR clone 279836 (TRAV1-2, TRAJ10)
CAVRGVLTGGGNKLTF

SEQ ID NO: 559672 - protein, 16 aa, Homo sapiens
  CDR3 for beta chain variable domain of TCR clone 279836 (TRBV29-1, TRBJ2-7)
CSVEGVGTSGSYEQYF

SEQ ID NO: 559673 - protein, 23 aa, Homo sapiens
  CDR3 for alpha chain variable domain of TCR clone 279837 (TRAV26-1, TRAJ38)
CIADNAGNNHIQNPDPAVYHLRD

SEQ ID NO: 559674 - protein, 13 aa, Homo sapiens
  CDR3 for beta chain variable domain of TCR clone 279837 (TRBV5-4, TRBJ1-1)
CASSVDLGTEAFF

SEQ ID NO: 559675 - protein, 12 aa, Homo sapiens
  CDR3 for alpha chain variable domain of TCR clone 279838 (TRAV4, TRAJ6)
CLAPGGSYIPTF

SEQ ID NO: 559676 - protein, 12 aa, Homo sapiens
  CDR3 for beta chain variable domain of TCR clone 279838 (TRBV7-8, TRBJ2-7)
CASSLGDREQYF

SEQ ID NO: 559677 - protein, 14 aa, Homo sapiens
  CDR3 for alpha chain variable domain of TCR clone 279839 (TRAV16, TRAJ29)
CALSGRAGNTPLVF

SEQ ID NO: 559678 - protein, 14 aa, Homo sapiens
  CDR3 for beta chain variable domain of TCR clone 279839 (TRBV11-2, TRBJ2-5)
CASSRTGGIETQYF

SEQ ID NO: 559679 - protein, 12 aa, Homo sapiens
  CDR3 for alpha chain variable domain of TCR clone 279840 (TRAV1-1, TRAJ39)
CAVPVVGNMLTF

SEQ ID NO: 559680 - protein, 15 aa, Homo sapiens
  CDR3 for beta chain variable domain of TCR clone 279840 (TRBV19, TRBJ1-6)
CASSTQGAVGSPPHF

SEQ ID NO: 559681 - protein, 13 aa, Homo sapiens
  CDR3 for alpha chain variable domain of TCR clone 279841 (TRAV17, TRAJ15)
CVTDARAGTALIF

SEQ ID NO: 559682 - protein, 15 aa, Homo sapiens
  CDR3 for beta chain variable domain of TCR clone 279841 (TRBV20-1, TRBJ2-7)
CSARDRVSGMDEQYF

SEQ ID NO: 559683 - protein, 16 aa, Homo sapiens
  CDR3 for alpha chain variable domain of TCR clone 279842 (TRAV27, TRAJ34)
CAGGGLGDYNTDKLIF

SEQ ID NO: 559684 - protein, 16 aa, Homo sapiens
  CDR3 for beta chain variable domain of TCR clone 279842 (TRBV11-1, TRBJ2-7)
CASSAQTGTLSYEQYF

SEQ ID NO: 559685 - protein, 15 aa, Homo sapiens
  CDR3 for alpha chain variable domain of TCR clone 279843 (TRAV3, TRAJ29)
CAVRDLYSGNTLLVF

SEQ ID NO: 559686 - protein, 17 aa, Homo sapiens
  CDR3 for beta chain variable domain of TCR clone 279843 (TRBV20-1, TRBJ2-1)
CSARDPLAGVWDNEQFF

SEQ ID NO: 559687 - protein, 14 aa, Homo sapiens
  CDR3 for alpha chain variable domain of TCR clone 279844 (TRAV20, TRAJ56)
CAVQFGGANSKLTF

SEQ ID NO: 559688 - protein, 15 aa, Homo sapiens
  CDR3 for beta chain variable domain of TCR clone 279844 (TRBV4-1, TRBJ1-4)
CASSDTGGTNEKLFF

SEQ ID NO: 559689 - protein, 10 aa, Homo sapiens
  CDR3 for alpha chain variable domain of TCR clone 279845 (TRAV1-2, TRAJ31)
CVSEDARLMF

SEQ ID NO: 559690 - protein, 14 aa, Homo sapiens
  CDR3 for beta chain variable domain of TCR clone 279845 (TRBV19, TRBJ2-1)
CASQTFVLSGEQFF

SEQ ID NO: 559691 - protein, 14 aa, Homo sapiens
  CDR3 for alpha chain variable domain of TCR clone 279846 (TRAV1-2, TRAJ8)
CAVREDTGFQKLVF

SEQ ID NO: 559692 - protein, 15 aa, Homo sapiens
  CDR3 for beta chain variable domain of TCR clone 279846 (TRBV4-3, TRBJ2-3)
CASSPSLLSTDTQYF

SEQ ID NO: 559693 - protein, 12 aa, Homo sapiens
  CDR3 for alpha chain variable domain of TCR clone 279847 (TRAV38-1, TRAJ47)
CSFEAYGNKLVF

SEQ ID NO: 559694 - protein, 14 aa, Homo sapiens
  CDR3 for beta chain variable domain of TCR clone 279847 (TRBV12-5, TRBJ2-5)
CASGSRTHQETQYF

SEQ ID NO: 559695 - protein, 13 aa, Homo sapiens
  CDR3 for alpha chain variable domain of TCR clone 279848 (TRAV12-3, TRAJ39)
CAMSNNAGNMLTF

SEQ ID NO: 559696 - protein, 14 aa, Homo sapiens
  CDR3 for beta chain variable domain of TCR clone 279848 (TRBV7-9, TRBJ2-7)
CASSLGQPAGEQYV

SEQ ID NO: 559697 - protein, 14 aa, Homo sapiens
  CDR3 for alpha chain variable domain of TCR clone 279849 (TRAV13-2, TRAJ17)
CAENSKAAGNKLTF

SEQ ID NO: 559698 - protein, 15 aa, Homo sapiens
  CDR3 for beta chain variable domain of TCR clone 279849 (TRBV7-3, TRBJ2-7)
CASSLNAQGAYEQYF

SEQ ID NO: 559699 - protein, 15 aa, Homo sapiens
  CDR3 for alpha chain variable domain of TCR clone 279850 (TRAV8-3, TRAJ45)
GAASYAGGGADVLTF

SEQ ID NO: 559700 - protein, 13 aa, Homo sapiens
  CDR3 for beta chain variable domain of TCR clone 279850 (TRBV10-3, TRBJ2-7)
CASKLAVNYEQYF

SEQ ID NO: 559701 - protein, 14 aa, Homo sapiens
  CDR3 for alpha chain variable domain of TCR clone 279851 (TRAV12-3, TRAJ10)
SHLPLTGGGNKLTF

SEQ ID NO: 559702 - protein, 14 aa, Homo sapiens
  CDR3 for beta chain variable domain of TCR clone 279851 (TRBV4-1, TRBJ2-3)
CASSQDWSTDTQYF

SEQ ID NO: 559703 - protein, 15 aa, Homo sapiens
  CDR3 for alpha chain variable domain of TCR clone 279852 (TRAV13-1, TRAJ44)
CAASRGGGTASKLTF

SEQ ID NO: 559704 - protein, 13 aa, Homo sapiens
  CDR3 for beta chain variable domain of TCR clone 279852 (TRBV2, TRBJ2-7)
CASTGGSSYEQYF

SEQ ID NO: 559705 - protein, 15 aa, Homo sapiens
  CDR3 for alpha chain variable domain of TCR clone 279853 (TRAV21, TRAJ32)
CAAAPYVGATNKLIF

SEQ ID NO: 559706 - protein, 17 aa, Homo sapiens
  CDR3 for beta chain variable domain of TCR clone 279853 (TRBV18, TRBJ2-3)
CASSPFGDGGFTDTQYF

SEQ ID NO: 559707 - protein, 16 aa, Homo sapiens
  CDR3 for alpha chain variable domain of TCR clone 279854 (TRAV29/DV5, TRAJ36)
CAARAHYQSGANNLFF

SEQ ID NO: 559708 - protein, 16 aa, Homo sapiens
  CDR3 for beta chain variable domain of TCR clone 279854 (TRBV4-2, TRBJ2-3)
CASSQELAGDTDTQYF

SEQ ID NO: 559709 - protein, 15 aa, Homo sapiens
  CDR3 for alpha chain variable domain of TCR clone 279855 (TRAV8-3, TRAJ23)
CAVGAPYNQGGKLIF

SEQ ID NO: 559710 - protein, 15 aa, Homo sapiens
  CDR3 for beta chain variable domain of TCR clone 279855 (TRBV20-1, TRBJ2-7)
CSARDRVSGMDEQYF

SEQ ID NO: 559711 - protein, 14 aa, Homo sapiens
  CDR3 for alpha chain variable domain of TCR clone 279856 (TRAV12-2, TRAJ40)
CAVKNPSGTYKCIF

SEQ ID NO: 559712 - protein, 14 aa, Homo sapiens
  CDR3 for beta chain variable domain of TCR clone 279856 (TRBV18, TRBJ2-5)
CASSPLRVQETQYF

SEQ ID NO: 559713 - protein, 12 aa, Homo sapiens
  CDR3 for alpha chain variable domain of TCR clone 279857 (TRAV2, TRAJ33)
FAFMDSNYQLIW

SEQ ID NO: 559714 - protein, 16 aa, Homo sapiens
  CDR3 for beta chain variable domain of TCR clone 279857 (TRBV2, TRBJ2-7)
CASSEPCTGPSYEQYF

SEQ ID NO: 559715 - protein, 13 aa, Homo sapiens
  CDR3 for alpha chain variable domain of TCR clone 279858 (TRAV38-1, TRAJ42)
CARWGGSQGNLIF

SEQ ID NO: 559716 - protein, 17 aa, Homo sapiens
  CDR3 for beta chain variable domain of TCR clone 279858 (TRBV20-1, TRBJ2-1)
GSARGPLAGVWDNEQFF

SEQ ID NO: 559717 - protein, 11 aa, Homo sapiens
  CDR3 for alpha chain variable domain of TCR clone 279859 (TRAV3, TRAJ21)
CAVGNFNKFYF

SEQ ID NO: 559718 - protein, 13 aa, Homo sapiens
  CDR3 for beta chain variable domain of TCR clone 279859 (TRBV7-3, TRBJ1-1)
CASSQDWGAEAFF

SEQ ID NO: 559719 - protein, 14 aa, Homo sapiens
  CDR3 for alpha chain variable domain of TCR clone 279860 (TRAV12-3, TRAJ22)
CAMSSFGSTRQLTF

SEQ ID NO: 559720 - protein, 11 aa, Homo sapiens
  CDR3 for beta chain variable domain of TCR clone 279860 (TRBV12-4, TRBJ2-2)
CASSSAGELFF

SEQ ID NO: 559721 - protein, 14 aa, Homo sapiens
  CDR3 for alpha chain variable domain of TCR clone 279861 (TRAV20, TRAJ20)
CAVRRGYNDYKLSF

SEQ ID NO: 559722 - protein, 13 aa, Homo sapiens
  CDR3 for beta chain variable domain of TCR clone 279861 (TRBV19, TRBJ2-5)
CASSETAPDTQYF

SEQ ID NO: 559723 - protein, 13 aa, Homo sapiens
  CDR3 for alpha chain variable domain of TCR clone 279862 (TRAV12-1, TRAJ29)
CVLDTSGNTPLVF

SEQ ID NO: 559724 - protein, 14 aa, Homo sapiens
  CDR3 for beta chain variable domain of TCR clone 279862 (TRBV12-4, TRBJ2-3)
CASSLVPSTDTQYF

SEQ ID NO: 559725 - protein, 18 aa, Homo sapiens
  CDR3 for alpha chain variable domain of TCR clone 279863 (TRAV21, TRAJ52)
CAVRPTPAGGTSYGKLTF

SEQ ID NO: 559726 - protein, 15 aa, Homo sapiens
  CDR3 for beta chain variable domain of TCR clone 279863 (TRBV6-6, TRBJ2-7)
CASSYSYGGSYEQYF

SEQ ID NO: 559727 - protein, 21 aa, Homo sapiens
  CDR3 for alpha chain variable domain of TCR clone 279864 (TRAV27, TRAJ49)
TAAQPGDTGLYLCSGASQFYF

SEQ ID NO: 559728 - protein, 15 aa, Homo sapiens
  CDR3 for beta chain variable domain of TCR clone 279864 (TRBV4-1, TRBJ2-7)
CASSQQGQGFDEQYF

SEQ ID NO: 559729 - protein, 15 aa, Homo sapiens
  CDR3 for alpha chain variable domain of TCR clone 279865 (TRAV3, TRAJ5)
CAVRDRKTGRRALTF

SEQ ID NO: 559730 - protein, 14 aa, Homo sapiens
  CDR3 for beta chain variable domain of TCR clone 279865 (TRBV5-7, TRBJ1-1)
CASSNPGRNTEAFF

SEQ ID NO: 559731 - protein, 17 aa, Homo sapiens
  CDR3 for alpha chain variable domain of TCR clone 279866 (TRAV3, TRAJ12)
CAVRDGVRMDSSYKLIF

SEQ ID NO: 559732 - protein, 15 aa, Homo sapiens
  CDR3 for beta chain variable domain of TCR clone 279866 (TRBV20-1, TRBJ2-5)
CSAEGTGGLQETQYF

SEQ ID NO: 559733 - protein, 15 aa, Homo sapiens
  CDR3 for alpha chain variable domain of TCR clone 279867 (TRAV25, TRAJ52)
CAGTSGGTSYGKLTF

SEQ ID NO: 559734 - protein, 14 aa, Homo sapiens
  CDR3 for beta chain variable domain of TCR clone 279867 (TRBV11-2, TRBJ2-7)
CASSLGAGAYEQYF

SEQ ID NO: 559735 - protein, 12 aa, Homo sapiens
  CDR3 for alpha chain variable domain of TCR clone 279868 (TRAV2, TRAJ5)
CALDTGRRALTF

SEQ ID NO: 559736 - protein, 15 aa, Homo sapiens
  CDR3 for beta chain variable domain of TCR clone 279868 (TRBV10-3, TRBJ2-1)
CAISDLQDRAYEQFF

SEQ ID NO: 559737 - protein, 14 aa, Homo sapiens
  CDR3 for alpha chain variable domain of TCR clone 279869 (TRAV23/DV6, TRAJ23)
CAAGPYNQGGKLIF

SEQ ID NO: 559738 - protein, 17 aa, Homo sapiens
  CDR3 for beta chain variable domain of TCR clone 279869 (TRBV4-2, TRBJ1-1)
CASSQVATGGMSTGAFF

SEQ ID NO: 559739 - protein, 15 aa, Homo sapiens
  CDR3 for alpha chain variable domain of TCR clone 279870 (TRAV13-2, TRAJ10)
CAENRDTGGGNKLTF

SEQ ID NO: 559740 - protein, 15 aa, Homo sapiens
  CDR3 for beta chain variable domain of TCR clone 279870 (TRBV7-2, TRBJ2-7)
CASSLKGALTYEQYF

SEQ ID NO: 559741 - protein, 12 aa, Homo sapiens
  CDR3 for alpha chain variable domain of TCR clone 279871 (TRAV12-3, TRAJ17)
CGMTLTGNKLTF

SEQ ID NO: 559742 - protein, 15 aa, Homo sapiens
  CDR3 for beta chain variable domain of TCR clone 279871 (TRBV20-1, TRBJ2-7)
CSARDRVSGMEEQYF

SEQ ID NO: 559743 - protein, 15 aa, Homo sapiens
  CDR3 for alpha chain variable domain of TCR clone 279872 (TRAV13-1, TRAJ44)
CAASRNTGTASKRTF

SEQ ID NO: 559744 - protein, 14 aa, Homo sapiens
  CDR3 for beta chain variable domain of TCR clone 279872 (TRBV2, TRBJ2-7)
CASSLTSGGYEQYF

SEQ ID NO: 559745 - protein, 11 aa, Homo sapiens
  CDR3 for alpha chain variable domain of TCR clone 279873 (TRAV4, TRAJ31)
CLVGDNARLMF

SEQ ID NO: 559746 - protein, 15 aa, Homo sapiens
  CDR3 for beta chain variable domain of TCR clone 279873 (TRBV7-2, TRBJ2-5)
CQQLKMVERQETQYF

SEQ ID NO: 559747 - protein, 12 aa, Homo sapiens
  CDR3 for alpha chain variable domain of TCR clone 279874 (TRAV12-3, TRAJ17)
CAMTLTGNKLTF

SEQ ID NO: 559748 - protein, 16 aa, Homo sapiens
  CDR3 for beta chain variable domain of TCR clone 279874 (TRBV20-1, TRBJ1-4)
CSAPGQGLFTNDKLFF

SEQ ID NO: 559749 - protein, 14 aa, Homo sapiens
  CDR3 for alpha chain variable domain of TCR clone 279875 (TRAV27, TRAJ13)
CRSSNSGGYQKVTF

SEQ ID NO: 559750 - protein, 13 aa, Homo sapiens
  CDR3 for beta chain variable domain of TCR clone 279875 (TRBV25-1, TRBJ2-5)
CASSESGRETQYF

SEQ ID NO: 559751 - protein, 14 aa, Homo sapiens
  CDR3 for alpha chain variable domain of TCR clone 279876 (TRAV12-3, TRAJ10)
SHLPLTGGGNKLTF

SEQ ID NO: 559752 - protein, 14 aa, Homo sapiens
  CDR3 for beta chain variable domain of TCR clone 279876 (TRBV12-4, TRBJ1-1)
CASSFSQMNTEAFF

SEQ ID NO: 559753 - protein, 15 aa, Homo sapiens
  CDR3 for alpha chain variable domain of TCR clone 279877 (TRAV35, TRAJ40)
CAGQLLDSGTYKYIF

SEQ ID NO: 559754 - protein, 12 aa, Homo sapiens
  CDR3 for beta chain variable domain of TCR clone 279877 (TRBV7-8, TRBJ2-7)
CASSLAGYEQYF

SEQ ID NO: 559755 - protein, 12 aa, Homo sapiens
  CDR3 for alpha chain variable domain of TCR clone 279878 (TRAV25, TRAJ16)
CAGQQDGQKLLV

SEQ ID NO: 559756 - protein, 14 aa, Homo sapiens
  CDR3 for beta chain variable domain of TCR clone 279878 (TRBV12-4, TRBJ2-1)
CASSLGQGASEQFF

SEQ ID NO: 559757 - protein, 14 aa, Homo sapiens
  CDR3 for alpha chain variable domain of TCR clone 279879 (TRAV12-2, TRAJ17)
CAVLFKAAGNKLPF

SEQ ID NO: 559758 - protein, 14 aa, Homo sapiens
  CDR3 for beta chain variable domain of TCR clone 279879 (TRBV7-9, TRBJ1-2)
CASSLGPPQWPATF

SEQ ID NO: 559759 - protein, 14 aa, Homo sapiens
  CDR3 for alpha chain variable domain of TCR clone 279880 (TRAV30, TRAJ33)
CGTVAPRNNYQLIW

SEQ ID NO: 559760 - protein, 19 aa, Homo sapiens
  CDR3 for beta chain variable domain of TCR clone 279880 (TRBV25-1, TRBJ2-2)
CAILVYRVDRGRKTGELFF

SEQ ID NO: 559761 - protein, 12 aa, Homo sapiens
  CDR3 for alpha chain variable domain of TCR clone 279881 (TRAV23/DV6, TRAJ24)
CAAHDSWGKLQF

SEQ ID NO: 559762 - protein, 16 aa, Homo sapiens
  CDR3 for beta chain variable domain of TCR clone 279881 (TRBV12-4, TRBJ2-5)
CASSLSTSGGKETQYF

SEQ ID NO: 559763 - protein, 13 aa, Homo sapiens
  CDR3 for alpha chain variable domain of TCR clone 279882 (TRAV12-2, TRAJ33)
CGDAPDSNYQLIL

SEQ ID NO: 559764 - protein, 13 aa, Homo sapiens
  CDR3 for beta chain variable domain of TCR clone 279882 (TRBV7-2, TRBJ2-5)
CASSQTSVETQYF

SEQ ID NO: 559765 - protein, 11 aa, Homo sapiens
  CDR3 for alpha chain variable domain of TCR clone 279883 (TRAV12-3, TRAJ6)
CAMSGSYIPTF

SEQ ID NO: 559766 - protein, 14 aa, Homo sapiens
  CDR3 for beta chain variable domain of TCR clone 279883 (TRBV25-1, TRBJ1-1)
CASTHLGGNTEAFF

SEQ ID NO: 559767 - protein, 14 aa, Homo sapiens
  CDR3 for alpha chain variable domain of TCR clone 279884 (TRAV26-1, TRAJ38)
CIAYNAGNNRKLIW

SEQ ID NO: 559768 - protein, 15 aa, Homo sapiens
  CDR3 for beta chain variable domain of TCR clone 279884 (TRBV27, TRBJ2-1)
CASSNGGGSSNEQFF

SEQ ID NO: 559769 - protein, 15 aa, Homo sapiens
  CDR3 for alpha chain variable domain of TCR clone 279885 (TRAV27, TRAJ38)
CAARRNAGNNRKPIW

SEQ ID NO: 559770 - protein, 13 aa, Homo sapiens
  CDR3 for beta chain variable domain of TCR clone 279885 (TRBV28, TRBJ2-5)
CAGVSLGEETQYF

SEQ ID NO: 559771 - protein, 14 aa, Homo sapiens
  CDR3 for alpha chain variable domain of TCR clone 279886 (TRAV26-1, TRAJ38)
CIADNAGHNRKLTW

SEQ ID NO: 559772 - protein, 17 aa, Homo sapiens
  CDR3 for beta chain variable domain of TCR clone 279886 (TRBV7-9, TRBJ2-3)
CASSPTVAGDLTDTQYF

SEQ ID NO: 559773 - protein, 14 aa, Homo sapiens
  CDR3 for alpha chain variable domain of TCR clone 279887 (TRAV8-4, TRAJ23)
CAVSAPGSGGKLIF

SEQ ID NO: 559774 - protein, 17 aa, Homo sapiens
  CDR3 for beta chain variable domain of TCR clone 279887 (TRBV4-2, TRBJ2-3)
CASSQDPLAGAVDTQYF

SEQ ID NO: 559775 - protein, 13 aa, Homo sapiens
  CDR3 for alpha chain variable domain of TCR clone 279888 (TRAV2, TRAJ40)
CAVVTSGTYKYSF

SEQ ID NO: 559776 - protein, 14 aa, Homo sapiens
  CDR3 for beta chain variable domain of TCR clone 279888 (TRBV19, TRBJ2-3)
CASSAPRGTDTQYF

SEQ ID NO: 559777 - protein, 14 aa, Homo sapiens
  CDR3 for alpha chain variable domain of TCR clone 279889 (TRAV21, TRAJ45)
CAVSSGGGADGLTF

SEQ ID NO: 559778 - protein, 15 aa, Homo sapiens
  CDR3 for beta chain variable domain of TCR clone 279889 (TRBV28, TRBJ2-1)
CASSIKAGGRSEQFF

SEQ ID NO: 559779 - protein, 13 aa, Homo sapiens
  CDR3 for alpha chain variable domain of TCR clone 279890 (TRAV8-3, TRAJ36)
CAVGATGANNLFF

SEQ ID NO: 559780 - protein, 15 aa, Homo sapiens
  CDR3 for beta chain variable domain of TCR clone 279890 (TRBV7-2, TRBJ1-2)
CATSPRAGWNYGYTF

SEQ ID NO: 559781 - protein, 13 aa, Homo sapiens
  CDR3 for alpha chain variable domain of TCR clone 279891 (TRAV12-1, TRAJ16)
CVVNGPDGQRLLF

SEQ ID NO: 559782 - protein, 13 aa, Homo sapiens
  CDR3 for beta chain variable domain of TCR clone 279891 (TRBV2, TRBJ1-1)
CARNPTGGFHAFF

SEQ ID NO: 559783 - protein, 16 aa, Homo sapiens
  CDR3 for alpha chain variable domain of TCR clone 279892 (TRAV3, TRAJ42)
CAVRDIEGGSQGNLIF

SEQ ID NO: 559784 - protein, 15 aa, Homo sapiens
  CDR3 for beta chain variable domain of TCR clone 279892 (TRBV6-3, TRBJ2-7)
CASSSPGTVFYEQYF

SEQ ID NO: 559785 - protein, 14 aa, Homo sapiens
  CDR3 for alpha chain variable domain of TCR clone 279893 (TRAV1-2, TRAJ8)
CAVREDTGFQKLVF

SEQ ID NO: 559786 - protein, 17 aa, Homo sapiens
  CDR3 for beta chain variable domain of TCR clone 279893 (TRBV6-1, TRBJ1-3)
CASVQGGGVETPYILER

SEQ ID NO: 559787 - protein, 14 aa, Homo sapiens
  CDR3 for alpha chain variable domain of TCR clone 279894 (TRAV12-2, TRAJ44)
CAVNPAGPASKLTF

SEQ ID NO: 559788 - protein, 15 aa, Homo sapiens
  CDR3 for beta chain variable domain of TCR clone 279894 (TRBV28, TRBJ2-7)
CASSVRQVSSYEQYF

SEQ ID NO: 559789 - protein, 11 aa, Homo sapiens
  CDR3 for alpha chain variable domain of TCR clone 279895 (TRAV1-1, TRAJ23)
CAVRFGGKLIF

SEQ ID NO: 559790 - protein, 19 aa, Homo sapiens
  CDR3 for beta chain variable domain of TCR clone 279895 (TRBV2, TRBJ2-7)
CASSRGPNDQGLASYEQYF

SEQ ID NO: 559791 - protein, 13 aa, Homo sapiens
  CDR3 for alpha chain variable domain of TCR clone 279896 (TRAV21, TRAJ57)
CAVTQGGPEKLVF

SEQ ID NO: 559792 - protein, 16 aa, Homo sapiens
  CDR3 for beta chain variable domain of TCR clone 279896 (TRBV29-1, TRBJ2-7)
CSVEDAEDGTAYEQYC

SEQ ID NO: 559793 - protein, 12 aa, Homo sapiens
  CDR3 for alpha chain variable domain of TCR clone 279897 (TRAV25, TRAJ20)
CAGRSNDYKLSF

SEQ ID NO: 559794 - protein, 15 aa, Homo sapiens
  CDR3 for beta chain variable domain of TCR clone 279897 (TRBV7-6, TRBJ2-7)
GASSGRRDTFGEQYF

SEQ ID NO: 559795 - protein, 10 aa, Homo sapiens
  CDR3 for alpha chain variable domain of TCR clone 279898 (TRAV1-2, TRAJ18)
CAVRGEAQPW

SEQ ID NO: 559796 - protein, 11 aa, Homo sapiens
  CDR3 for beta chain variable domain of TCR clone 279898 (TRBV12-4, TRBJ2-3)
CASTATDTQYF

SEQ ID NO: 559797 - protein, 13 aa, Homo sapiens
  CDR3 for alpha chain variable domain of TCR clone 279899 (TRAV12-1, TRAJ21)
CVVTLYNFNKFYF

SEQ ID NO: 559798 - protein, 20 aa, Homo sapiens
  CDR3 for beta chain variable domain of TCR clone 279899 (TRBV7-8, TRBJ2-1)
CASSLAHRLAGFRSYNEQFF

SEQ ID NO: 559799 - protein, 16 aa, Homo sapiens
  CDR3 for alpha chain variable domain of TCR clone 279900 (TRAV30, TRAJ24)
CGTEVVDAHSWGKFQF

SEQ ID NO: 559800 - protein, 14 aa, Homo sapiens
  CDR3 for beta chain variable domain of TCR clone 279900 (TRBV12-5, TRBJ2-5)
CASGSRTHQETQYF

SEQ ID NO: 559801 - protein, 11 aa, Homo sapiens
  CDR3 for alpha chain variable domain of TCR clone 279901 (TRAV3, TRAJ21)
CAVGSFNKFYF

SEQ ID NO: 559802 - protein, 17 aa, Homo sapiens
  CDR3 for beta chain variable domain of TCR clone 279901 (TRBV20-1, TRBJ2-1)
CSASSSGLAGSYNEQFF

SEQ ID NO: 559803 - protein, 13 aa, Homo sapiens
  CDR3 for alpha chain variable domain of TCR clone 279902 (TRAV2, TRAJ16)
CAVERSDGQKLLS

SEQ ID NO: 559804 - protein, 15 aa, Homo sapiens
  CDR3 for beta chain variable domain of TCR clone 279902 (TRBV20-1, TRBJ2-5)
CSAIKGQGSQETQYF

SEQ ID NO: 559805 - protein, 16 aa, Homo sapiens
  CDR3 for alpha chain variable domain of TCR clone 279903 (TRAV3, TRAJ37)
CAVRGKGSGNTGKLIF

SEQ ID NO: 559806 - protein, 12 aa, Homo sapiens
  CDR3 for beta chain variable domain of TCR clone 279903 (TRBV2, TRBJ2-1)
CAYGPPGNEQFF

SEQ ID NO: 559807 - protein, 12 aa, Homo sapiens
  CDR3 for alpha chain variable domain of TCR clone 279904 (TRAV17, TRAJ4)
CATDGGYNKLIF

SEQ ID NO: 559808 - protein, 17 aa, Homo sapiens
  CDR3 for beta chain variable domain of TCR clone 279904 (TRBV2, TRBJ2-1)
CASSEEGVRGQIDEQFF

SEQ ID NO: 559809 - protein, 15 aa, Homo sapiens
  CDR3 for alpha chain variable domain of TCR clone 279905 (TRAV8-3, TRAJ32)
CAVGPYGGATNRLIF

SEQ ID NO: 559810 - protein, 14 aa, Homo sapiens
  CDR3 for beta chain variable domain of TCR clone 279905 (TRBV29-1, TRBJ2-2)
CSVLAETNTGELFF

SEQ ID NO: 559811 - protein, 18 aa, Homo sapiens
  CDR3 for alpha chain variable domain of TCR clone 279906 (TRAV26-1, TRAJ52)
CIVRVAGAGRTSYGKLTF

SEQ ID NO: 559812 - protein, 13 aa, Homo sapiens
  CDR3 for beta chain variable domain of TCR clone 279906 (TRBV7-8, TRBJ1-2)
CASSAQSYYGYTF

SEQ ID NO: 559813 - protein, 14 aa, Homo sapiens
  CDR3 for alpha chain variable domain of TCR clone 279907 (TRAV12-3, TRAJ40)
CAVKIPSGTYKYIF

SEQ ID NO: 559814 - protein, 17 aa, Homo sapiens
  CDR3 for beta chain variable domain of TCR clone 279907 (TRBV20-1, TRBJ2-1)
CSAFSGTSGSLYNEQFF

SEQ ID NO: 559815 - protein, 13 aa, Homo sapiens
  CDR3 for alpha chain variable domain of TCR clone 279908 (TRAV27, TRAJ16)
CAGACSDGQKLLF

SEQ ID NO: 559816 - protein, 14 aa, Homo sapiens
  CDR3 for beta chain variable domain of TCR clone 279908 (TRBV11-2, TRBJ1-3)
CASILAVPGNTIYF

SEQ ID NO: 559817 - protein, 14 aa, Homo sapiens
  CDR3 for alpha chain variable domain of TCR clone 279909 (TRAV12-3, TRAJ22)
CAMSLFGSARQLTF

SEQ ID NO: 559818 - protein, 16 aa, Homo sapiens
  CDR3 for beta chain variable domain of TCR clone 279909 (TRBV19, TRBJ2-3)
CASSPGAASRTDTQYF

SEQ ID NO: 559819 - protein, 15 aa, Homo sapiens
  CDR3 for alpha chain variable domain of TCR clone 279910 (TRAV4, TRAJ48)
CLVGDIDFGNEKLTF

SEQ ID NO: 559820 - protein, 13 aa, Homo sapiens
  CDR3 for beta chain variable domain of TCR clone 279910 (TRBV19, TRBJ1-2)
CASSVPGQDGYTF

SEQ ID NO: 559821 - protein, 14 aa, Homo sapiens
  CDR3 for alpha chain variable domain of TCR clone 279911 (TRAV1-2, TRAJ16)
CAVNRFSDGQKRLF

SEQ ID NO: 559822 - protein, 15 aa, Homo sapiens
  CDR3 for beta chain variable domain of TCR clone 279911 (TRBV27, TRBJ2-1)
CASSNGGGSSNEQFF

SEQ ID NO: 559823 - protein, 12 aa, Homo sapiens
  CDR3 for alpha chain variable domain of TCR clone 279912 (TRAV12-3, TRAJ17)
CAMTLTGNELTS

SEQ ID NO: 559824 - protein, 15 aa, Homo sapiens
  CDR3 for beta chain variable domain of TCR clone 279912 (TRBV20-1, TRBJ2-7)
CSARDRVSGMDEQYF

SEQ ID NO: 559825 - protein, 13 aa, Homo sapiens
  CDR3 for alpha chain variable domain of TCR clone 279913 (TRAV17, TRAJ9)
CATGSTGGVKTIF

SEQ ID NO: 559826 - protein, 14 aa, Homo sapiens
  CDR3 for beta chain variable domain of TCR clone 279913 (TRBV7-8, TRBJ2-7)
CASTFRGGPNEQYF

SEQ ID NO: 559827 - protein, 14 aa, Homo sapiens
  CDR3 for alpha chain variable domain of TCR clone 279914 (TRAV12-3, TRAJ53)
CGATSEGSNYKLTF

SEQ ID NO: 559828 - protein, 13 aa, Homo sapiens
  CDR3 for beta chain variable domain of TCR clone 279914 (TRBV19, TRBJ1-5)
CASSTQDGQPQHF

SEQ ID NO: 559829 - protein, 14 aa, Homo sapiens
  CDR3 for alpha chain variable domain of TCR clone 279915 (TRAV8-4, TRAJ34)
CAVSDPCDTDKLIF

SEQ ID NO: 559830 - protein, 13 aa, Homo sapiens
  CDR3 for beta chain variable domain of TCR clone 279915 (TRBV7-9, TRBJ2-5)
CASLSPGQETQYF

SEQ ID NO: 559831 - protein, 12 aa, Homo sapiens
  CDR3 for alpha chain variable domain of TCR clone 279916 (TRAV1-1, TRAJ39)
CAVPVVGNMLTF

SEQ ID NO: 559832 - protein, 16 aa, Homo sapiens
  CDR3 for beta chain variable domain of TCR clone 279916 (TRBV4-1, TRBJ2-7)
CASSPADRLSTTEQYF

SEQ ID NO: 559833 - protein, 13 aa, Homo sapiens
  CDR3 for alpha chain variable domain of TCR clone 279917 (TRAV30, TRAJ34)
CGTVGYNADKLIF

SEQ ID NO: 559834 - protein, 16 aa, Homo sapiens
  CDR3 for beta chain variable domain of TCR clone 279917 (TRBV7-9, TRBJ1-2)
CASSLGFSSGEDGYTF

SEQ ID NO: 559835 - protein, 13 aa, Homo sapiens
  CDR3 for alpha chain variable domain of TCR clone 279918 (TRAV3, TRAJ15)
CAVRDQAGTALIF

SEQ ID NO: 559836 - protein, 16 aa, Homo sapiens
  CDR3 for beta chain variable domain of TCR clone 279918 (TRBV6-1, TRBJ2-5)
CASSETLDRGAETQYF

SEQ ID NO: 559837 - protein, 13 aa, Homo sapiens
  CDR3 for alpha chain variable domain of TCR clone 279919 (TRAV14/DV4, TRAJ23)
CAMREVKGGKLIF

SEQ ID NO: 559838 - protein, 16 aa, Homo sapiens
  CDR3 for beta chain variable domain of TCR clone 279919 (TRBV4-2, TRBJ2-7)
CASSQEGLANSYEQYF

SEQ ID NO: 559839 - protein, 16 aa, Homo sapiens
  CDR3 for alpha chain variable domain of TCR clone 279920 (TRAV16, TRAJ37)
CSKWPDGSSNTGKLIF

SEQ ID NO: 559840 - protein, 13 aa, Homo sapiens
  CDR3 for beta chain variable domain of TCR clone 279920 (TRBV7-2, TRBJ2-2)
CAISLAVTGELFF

SEQ ID NO: 559841 - protein, 16 aa, Homo sapiens
  CDR3 for alpha chain variable domain of TCR clone 279921 (TRAV12-2, TRAJ18)
CAVTTDRGSTLGRLYF

SEQ ID NO: 559842 - protein, 15 aa, Homo sapiens
  CDR3 for beta chain variable domain of TCR clone 279921 (TRBV27, TRBJ1-6)
CASSFDRGLGSPLHF

SEQ ID NO: 559843 - protein, 15 aa, Homo sapiens
  CDR3 for alpha chain variable domain of TCR clone 279922 (TRAV8-4, TRAJ7)
CAVRGGNYGNNRLAF

SEQ ID NO: 559844 - protein, 15 aa, Homo sapiens
  CDR3 for beta chain variable domain of TCR clone 279922 (TRBV6-4, TRBJ2-1)
CASSSGTSGYNEQFF

SEQ ID NO: 559845 - protein, 14 aa, Homo sapiens
  CDR3 for alpha chain variable domain of TCR clone 279923 (TRAV17, TRAJ22)
CATVLSGSARQLTF

SEQ ID NO: 559846 - protein, 11 aa, Homo sapiens
  CDR3 for beta chain variable domain of TCR clone 279923 (TRBV12-4, TRBJ2-3)
CASAATDTQYF

SEQ ID NO: 559847 - protein, 18 aa, Homo sapiens
  CDR3 for alpha chain variable domain of TCR clone 279924 (TRAV8-3, TRAJ4)
WVRDPTSNDPGGYNKLIF

SEQ ID NO: 559848 - protein, 13 aa, Homo sapiens
  CDR3 for beta chain variable domain of TCR clone 279924 (TRBV20-1, TRBJ1-2)
CSATGSQGSGYTF

SEQ ID NO: 559849 - protein, 14 aa, Homo sapiens
  CDR3 for alpha chain variable domain of TCR clone 279925 (TRAV1-2, TRAJ16)
CAVNRFSDGQKMLF

SEQ ID NO: 559850 - protein, 13 aa, Homo sapiens
  CDR3 for beta chain variable domain of TCR clone 279925 (TRBV18, TRBJ2-5)
CASSPAGKETQYF

SEQ ID NO: 559851 - protein, 14 aa, Homo sapiens
  CDR3 for alpha chain variable domain of TCR clone 279926 (TRAV1-2, TRAJ8)
CAVREDTGFQKLVF

SEQ ID NO: 559852 - protein, 14 aa, Homo sapiens
  CDR3 for beta chain variable domain of TCR clone 279926 (TRBV15, TRBJ2-3)
CATRSGTSTETQYF

SEQ ID NO: 559853 - protein, 15 aa, Homo sapiens
  CDR3 for alpha chain variable domain of TCR clone 279927 (TRAV3, TRAJ22)
CAVRDRGGSARQLNF

SEQ ID NO: 559854 - protein, 13 aa, Homo sapiens
  CDR3 for beta chain variable domain of TCR clone 279927 (TRBV12-4, TRBJ1-2)
CASSLRQGKGDTF

SEQ ID NO: 559855 - protein, 12 aa, Homo sapiens
  CDR3 for alpha chain variable domain of TCR clone 279928 (TRAV17, TRAJ30)
CAASKGDDKIIF

SEQ ID NO: 559856 - protein, 15 aa, Homo sapiens
  CDR3 for beta chain variable domain of TCR clone 279928 (TRBV12-4, TRBJ2-1)
CASRPTRTGYNEQFF

SEQ ID NO: 559857 - protein, 14 aa, Homo sapiens
  CDR3 for alpha chain variable domain of TCR clone 279929 (TRAV8-3, TRAJ15)
CAVGRHQAGTALIF

SEQ ID NO: 559858 - protein, 12 aa, Homo sapiens
  CDR3 for beta chain variable domain of TCR clone 279929 (TRBV9, TRBJ2-7)
CASPSDSYEQYF

SEQ ID NO: 559859 - protein, 14 aa, Homo sapiens
  CDR3 for alpha chain variable domain of TCR clone 279930 (TRAV12-3, TRAJ41)
CAMSAGNAGYALNF

SEQ ID NO: 559860 - protein, 11 aa, Homo sapiens
  CDR3 for beta chain variable domain of TCR clone 279930 (TRBV7-2, TRBJ2-3)
CASSSSDTQYF

SEQ ID NO: 559861 - protein, 13 aa, Homo sapiens
  CDR3 for alpha chain variable domain of TCR clone 279931 (TRAV2, TRAJ15)
CAVASQAGTALIF

SEQ ID NO: 559862 - protein, 14 aa, Homo sapiens
  CDR3 for beta chain variable domain of TCR clone 279931 (TRBV7-2, TRBJ2-5)
CASSPRGSSETQYS

SEQ ID NO: 559863 - protein, 17 aa, Homo sapiens
  CDR3 for alpha chain variable domain of TCR clone 279932 (TRAV3, TRAJ6)
CAVRDGPRAGGSYIPTF

SEQ ID NO: 559864 - protein, 12 aa, Homo sapiens
  CDR3 for beta chain variable domain of TCR clone 279932 (TRBV7-2, TRBJ2-2)
CASSLGGGELFF

SEQ ID NO: 559865 - protein, 11 aa, Homo sapiens
  CDR3 for alpha chain variable domain of TCR clone 279933 (TRAV35, TRAJ30)
CAPGGDDKIVF

SEQ ID NO: 559866 - protein, 13 aa, Homo sapiens
  CDR3 for beta chain variable domain of TCR clone 279933 (TRBV7-6, TRBJ2-1)
CQQLGGGADEQFF

SEQ ID NO: 559867 - protein, 16 aa, Homo sapiens
  CDR3 for alpha chain variable domain of TCR clone 279934 (TRAV4, TRAJ22)
CLVGDLYSGSASQLTF

SEQ ID NO: 559868 - protein, 16 aa, Homo sapiens
  CDR3 for beta chain variable domain of TCR clone 279934 (TRBV7-9, TRBJ2-1)
CACSDVAGGSYNEQFF

SEQ ID NO: 559869 - protein, 14 aa, Homo sapiens
  CDR3 for alpha chain variable domain of TCR clone 279935 (TRAV17, TRAJ32)
CATDPGGATNRLIF

SEQ ID NO: 559870 - protein, 14 aa, Homo sapiens
  CDR3 for beta chain variable domain of TCR clone 279935 (TRBV2, TRBJ1-5)
CASSENRGGQPQHF

SEQ ID NO: 559871 - protein, 16 aa, Homo sapiens
  CDR3 for alpha chain variable domain of TCR clone 279936 (TRAV1-1, TRAJ24)
CLLLLRCAGQLGKFQF

SEQ ID NO: 559872 - protein, 16 aa, Homo sapiens
  CDR3 for beta chain variable domain of TCR clone 279936 (TRBV27, TRBJ2-5)
CASSSQTSGFQETQYF

SEQ ID NO: 559873 - protein, 14 aa, Homo sapiens
  CDR3 for alpha chain variable domain of TCR clone 279937 (TRAV8-4, TRAJ9)
RAVRINTGGFTTIF

SEQ ID NO: 559874 - protein, 15 aa, Homo sapiens
  CDR3 for beta chain variable domain of TCR clone 279937 (TRBV10-2, TRBJ2-6)
CASSEQGTGANVLTF

SEQ ID NO: 559875 - protein, 20 aa, Homo sapiens
  CDR3 for alpha chain variable domain of TCR clone 279938 (TRAV21, TRAJ4)
AASQPGDSATFAGGYNKLIF

SEQ ID NO: 559876 - protein, 19 aa, Homo sapiens
  CDR3 for beta chain variable domain of TCR clone 279938 (TRBV18, TRBJ1-3)
CASSPPSRTGMSSGNTIYF

SEQ ID NO: 559877 - protein, 17 aa, Homo sapiens
  CDR3 for alpha chain variable domain of TCR clone 279939 (TRAV3, TRAJ6)
CAVSRRTDTVGSYITTF

SEQ ID NO: 559878 - protein, 18 aa, Homo sapiens
  CDR3 for beta chain variable domain of TCR clone 279939 (TRBV7-2, TRBJ2-3)
CASSLETSRGRKADTQYF

SEQ ID NO: 559879 - protein, 12 aa, Homo sapiens
  CDR3 for alpha chain variable domain of TCR clone 279940 (TRAV38-1, TRAJ57)
CAFMKLPPTLVF

SEQ ID NO: 559880 - protein, 13 aa, Homo sapiens
  CDR3 for beta chain variable domain of TCR clone 279940 (TRBV19, TRBJ2-7)
CASSTSGSNEQYF

SEQ ID NO: 559881 - protein, 12 aa, Homo sapiens
  CDR3 for alpha chain variable domain of TCR clone 279941 (TRAV21, TRAJ49)
CAVRNTGNQFYF

SEQ ID NO: 559882 - protein, 13 aa, Homo sapiens
  CDR3 for beta chain variable domain of TCR clone 279941 (TRBV5-1, TRBJ2-7)
CASSATGGNEQYF

SEQ ID NO: 559883 - protein, 12 aa, Homo sapiens
  CDR3 for alpha chain variable domain of TCR clone 279942 (TRAV3, TRAJ43)
CAVRDPNNDMRF

SEQ ID NO: 559884 - protein, 16 aa, Homo sapiens
  CDR3 for beta chain variable domain of TCR clone 279942 (TRBV7-9, TRBJ2-1)
CASSDVAGGSYNEQFF

SEQ ID NO: 559885 - protein, 16 aa, Homo sapiens
  CDR3 for alpha chain variable domain of TCR clone 279943 (TRAV20, TRAJ22)
CAVQASSSGSARQLTF

SEQ ID NO: 559886 - protein, 13 aa, Homo sapiens
  CDR3 for beta chain variable domain of TCR clone 279943 (TRBV7-2, TRBJ2-5)
CASSQTSVETQSF

SEQ ID NO: 559887 - protein, 13 aa, Homo sapiens
  CDR3 for alpha chain variable domain of TCR clone 279944 (TRAV1-1, TRAJ9)
CAAKNTGVFKTIF

SEQ ID NO: 559888 - protein, 14 aa, Homo sapiens
  CDR3 for beta chain variable domain of TCR clone 279944 (TRBV12-5, TRBJ2-5)
CASGSRTHQETQYF

SEQ ID NO: 559889 - protein, 13 aa, Homo sapiens
  CDR3 for alpha chain variable domain of TCR clone 279945 (TRAV3, TRAJ27)
CAVRPLGAGRSTF

SEQ ID NO: 559890 - protein, 13 aa, Homo sapiens
  CDR3 for beta chain variable domain of TCR clone 279945 (TRBV7-9, TRBJ1-2)
CASSLKQNYGYTF

SEQ ID NO: 559891 - protein, 16 aa, Homo sapiens
  CDR3 for alpha chain variable domain of TCR clone 279946 (TRAV13-1, TRAJ38)
CAASTSNAGNTRKLIW

SEQ ID NO: 559892 - protein, 15 aa, Homo sapiens
  CDR3 for beta chain variable domain of TCR clone 279946 (TRBV27, TRBJ2-1)
CASSNGGGSSNEQFF

SEQ ID NO: 559893 - protein, 15 aa, Homo sapiens
  CDR3 for alpha chain variable domain of TCR clone 279947 (TRAV13-1, TRAJ32)
CAASNGWWCYKQAHL

SEQ ID NO: 559894 - protein, 17 aa, Homo sapiens
  CDR3 for beta chain variable domain of TCR clone 279947 (TRBV15, TRBJ1-2)
CATSGREIDVVNYGYSF

SEQ ID NO: 559895 - protein, 14 aa, Homo sapiens
  CDR3 for alpha chain variable domain of TCR clone 279948 (TRAV1-2, TRAJ16)
CAVNRLSDVQKLLF

SEQ ID NO: 559896 - protein, 12 aa, Homo sapiens
  CDR3 for beta chain variable domain of TCR clone 279948 (TRBV28, TRBJ2-6)
CAIQAGANVLTF

SEQ ID NO: 559897 - protein, 14 aa, Homo sapiens
  CDR3 for alpha chain variable domain of TCR clone 279949 (TRAV12-2, TRAJ24)
CAVTPADSWGKLQF

SEQ ID NO: 559898 - protein, 13 aa, Homo sapiens
  CDR3 for beta chain variable domain of TCR clone 279949 (TRBV7-7, TRBJ2-2)
CASSLTSAGELFF

SEQ ID NO: 559899 - protein, 13 aa, Homo sapiens
  CDR3 for alpha chain variable domain of TCR clone 279950 (TRAV38-1, TRAJ42)
CARWGGSQGNLIF

SEQ ID NO: 559900 - protein, 14 aa, Homo sapiens
  CDR3 for beta chain variable domain of TCR clone 279950 (TRBV18, TRBJ2-7)
CASSPRGGAYEQYF

SEQ ID NO: 559901 - protein, 11 aa, Homo sapiens
  CDR3 for alpha chain variable domain of TCR clone 279951 (TRAV27, TRAJ47)
CRSNQGNKLVF

SEQ ID NO: 559902 - protein, 16 aa, Homo sapiens
  CDR3 for beta chain variable domain of TCR clone 279951 (TRBV7-9, TRBJ2-1)
CASSDGAGGSYNEQFF

SEQ ID NO: 559903 - protein, 16 aa, Homo sapiens
  CDR3 for alpha chain variable domain of TCR clone 279952 (TRAV21, TRAJ37)
CAVRPRGSSNTAKLIF

SEQ ID NO: 559904 - protein, 13 aa, Homo sapiens
  CDR3 for beta chain variable domain of TCR clone 279952 (TRBV7-9, TRBJ2-5)
CASLSPGQETQYF

SEQ ID NO: 559905 - protein, 14 aa, Homo sapiens
  CDR3 for alpha chain variable domain of TCR clone 279953 (TRAV26-1, TRAJ48)
CIVRVGFGNEKLTF

SEQ ID NO: 559906 - protein, 13 aa, Homo sapiens
  CDR3 for beta chain variable domain of TCR clone 279953 (TRBV11-3, TRBJ2-3)
FASSHDTKDTQYF

SEQ ID NO: 559907 - protein, 16 aa, Homo sapiens
  CDR3 for alpha chain variable domain of TCR clone 279954 (TRAV3, TRAJ21)
CAVRDIERGNFNKFYF

SEQ ID NO: 559908 - protein, 15 aa, Homo sapiens
  CDR3 for beta chain variable domain of TCR clone 279954 (TRBV19, TRBJ2-1)
CASNAQGLAGREQFF

SEQ ID NO: 559909 - protein, 16 aa, Homo sapiens
  CDR3 for alpha chain variable domain of TCR clone 279955 (TRAV30, TRAJ24)
CGTEIVDADGWGKFQL

SEQ ID NO: 559910 - protein, 14 aa, Homo sapiens
  CDR3 for beta chain variable domain of TCR clone 279955 (TRBV12-5, TRBJ2-5)
CASGSRTHQETQYF

SEQ ID NO: 559911 - protein, 12 aa, Homo sapiens
  CDR3 for alpha chain variable domain of TCR clone 279956 (TRAV23/DV6, TRAJ33)
CAASRSNYQLIW

SEQ ID NO: 559912 - protein, 12 aa, Homo sapiens
  CDR3 for beta chain variable domain of TCR clone 279956 (TRBV7-8, TRBJ2-7)
CASSLGDREQYF

SEQ ID NO: 559913 - protein, 13 aa, Homo sapiens
  CDR3 for alpha chain variable domain of TCR clone 279957 (TRAV8-3, TRAJ21)
CAVGAYNFNKFYF

SEQ ID NO: 559914 - protein, 13 aa, Homo sapiens
  CDR3 for beta chain variable domain of TCR clone 279957 (TRBV7-9, TRBJ1-2)
CASSLKQNYGYTF

SEQ ID NO: 559915 - protein, 11 aa, Homo sapiens
  CDR3 for alpha chain variable domain of TCR clone 279958 (TRAV22, TRAJ49)
CAVLTGNQFYF

SEQ ID NO: 559916 - protein, 11 aa, Homo sapiens
  CDR3 for beta chain variable domain of TCR clone 279958 (TRBV5-6, TRBJ2-1)
CASSLGGEQLF

SEQ ID NO: 559917 - protein, 17 aa, Homo sapiens
  CDR3 for alpha chain variable domain of TCR clone 279959 (TRAV38-2/DV8, TRAJ28)
CAYRFAYSGAGSYQLTF

SEQ ID NO: 559918 - protein, 16 aa, Homo sapiens
  CDR3 for beta chain variable domain of TCR clone 279959 (TRBV18, TRBJ1-5)
CASSPYRVEGNQPQHF

SEQ ID NO: 559919 - protein, 14 aa, Homo sapiens
  CDR3 for alpha chain variable domain of TCR clone 279960 (TRAV38-1, TRAJ29)
CAFITPSGNTPLVF

SEQ ID NO: 559920 - protein, 15 aa, Homo sapiens
  CDR3 for beta chain variable domain of TCR clone 279960 (TRBV7-3, TRBJ2-2)
CASSETGQGTGELFF

SEQ ID NO: 559921 - protein, 15 aa, Homo sapiens
  CDR3 for alpha chain variable domain of TCR clone 279961 (TRAV21, TRAJ24)
CAARSSTDRWGKLQF

SEQ ID NO: 559922 - protein, 15 aa, Homo sapiens
  CDR3 for beta chain variable domain of TCR clone 279961 (TRBV19, TRBJ1-1)
CASTSGQIQNTEAFF

SEQ ID NO: 559923 - protein, 15 aa, Homo sapiens
  CDR3 for alpha chain variable domain of TCR clone 279962 (TRAV29/DV5, TRAJ24)
CAASGAADSWGKFQF

SEQ ID NO: 559924 - protein, 12 aa, Homo sapiens
  CDR3 for beta chain variable domain of TCR clone 279962 (TRBV11-2, TRBJ2-2)
CASSLPTGELFF

SEQ ID NO: 559925 - protein, 14 aa, Homo sapiens
  CDR3 for alpha chain variable domain of TCR clone 279963 (TRAV1-2, TRAJ16)
CAVNRFSDGQKLLF

SEQ ID NO: 559926 - protein, 14 aa, Homo sapiens
  CDR3 for beta chain variable domain of TCR clone 279963 (TRBV20-1, TRBJ2-3)
CSARSGTSTDTQYF

SEQ ID NO: 559927 - protein, 14 aa, Homo sapiens
  CDR3 for alpha chain variable domain of TCR clone 279964 (TRAV2, TRAJ9)
CAVEDRSGGFKTIF

SEQ ID NO: 559928 - protein, 13 aa, Homo sapiens
  CDR3 for beta chain variable domain of TCR clone 279964 (TRBV13, TRBJ2-5)
CASSPEVGETQYF

SEQ ID NO: 559929 - protein, 12 aa, Homo sapiens
  CDR3 for alpha chain variable domain of TCR clone 279965 (TRAV16, TRAJ26)
CALRSYGQNFVF

SEQ ID NO: 559930 - protein, 15 aa, Homo sapiens
  CDR3 for beta chain variable domain of TCR clone 279965 (TRBV7-2, TRBJ2-1)
CASTHGTGIYNEQFF

SEQ ID NO: 559931 - protein, 14 aa, Homo sapiens
  CDR3 for alpha chain variable domain of TCR clone 279966 (TRAV12-2, TRAJ13)
CAVKKTGGYQKVTF

SEQ ID NO: 559932 - protein, 10 aa, Homo sapiens
  CDR3 for beta chain variable domain of TCR clone 279966 (TRBV12-4, TRBJ1-2)
CASSFICYTF

SEQ ID NO: 559933 - protein, 15 aa, Homo sapiens
  CDR3 for alpha chain variable domain of TCR clone 279967 (TRAV13-1, TRAJ5)
CAVSPIDTGRRALPF

SEQ ID NO: 559934 - protein, 18 aa, Homo sapiens
  CDR3 for beta chain variable domain of TCR clone 279967 (TRBV4-1, TRBJ2-2)
RASSFRTSGGEGPGELFF

SEQ ID NO: 559935 - protein, 15 aa, Homo sapiens
  CDR3 for alpha chain variable domain of TCR clone 279968 (TRAV16, TRAJ12)
CFKWPLRDSSYKLIF

SEQ ID NO: 559936 - protein, 13 aa, Homo sapiens
  CDR3 for beta chain variable domain of TCR clone 279968 (TRBV4-2, TRBJ1-1)
CASSQAGNTEAFF

SEQ ID NO: 559937 - protein, 16 aa, Homo sapiens
  CDR3 for alpha chain variable domain of TCR clone 279969 (TRAV14/DV4, TRAJ15)
CTMREGPAQAGTALIF

SEQ ID NO: 559938 - protein, 12 aa, Homo sapiens
  CDR3 for beta chain variable domain of TCR clone 279969 (TRBV28, TRBJ2-6)
CAIQAGANVLTF

SEQ ID NO: 559939 - protein, 15 aa, Homo sapiens
  CDR3 for alpha chain variable domain of TCR clone 279970 (TRAV13-1, TRAJ57)
CAASNTQGGSEKLVF

SEQ ID NO: 559940 - protein, 16 aa, Homo sapiens
  CDR3 for beta chain variable domain of TCR clone 279970 (TRBV19, TRBJ2-1)
CASSTAGPSSYNEQFF

SEQ ID NO: 559941 - protein, 14 aa, Homo sapiens
  CDR3 for alpha chain variable domain of TCR clone 279971 (TRAV8-4, TRAJ9)
CAVRINTGGLKTIL

SEQ ID NO: 559942 - protein, 15 aa, Homo sapiens
  CDR3 for beta chain variable domain of TCR clone 279971 (TRBV11-3, TRBJ2-5)
CASSLSGRGGETQYF

SEQ ID NO: 559943 - protein, 14 aa, Homo sapiens
  CDR3 for alpha chain variable domain of TCR clone 279972 (TRAV29/DV5, TRAJ45)
CAASVRGGADGLTF

SEQ ID NO: 559944 - protein, 14 aa, Homo sapiens
  CDR3 for beta chain variable domain of TCR clone 279972 (TRBV4-1, TRBJ2-2)
CASSQAVNTGELFF

SEQ ID NO: 559945 - protein, 15 aa, Homo sapiens
  CDR3 for alpha chain variable domain of TCR clone 279973 (TRAV3, TRAJ22)
CAVRDRGGSARHLAF

SEQ ID NO: 559946 - protein, 16 aa, Homo sapiens
  CDR3 for beta chain variable domain of TCR clone 279973 (TRBV5-4, TRBJ2-3)
CASQQPGAGGADTQYF

SEQ ID NO: 559947 - protein, 19 aa, Homo sapiens
  CDR3 for alpha chain variable domain of TCR clone 279974 (TRAV1-2, TRAJ26)
CLLPLCCERPDNYGQNFVF

SEQ ID NO: 559948 - protein, 16 aa, Homo sapiens
  CDR3 for beta chain variable domain of TCR clone 279974 (TRBV27, TRBJ2-2)
CASSFRGLVRTGELFF

SEQ ID NO: 559949 - protein, 14 aa, Homo sapiens
  CDR3 for alpha chain variable domain of TCR clone 279975 (TRAV36/DV7, TRAJ44)
CRGANTGTASKLTF

SEQ ID NO: 559950 - protein, 15 aa, Homo sapiens
  CDR3 for beta chain variable domain of TCR clone 279975 (TRBV13, TRBJ1-5)
CASSFGQGGVQPQHF

SEQ ID NO: 559951 - protein, 15 aa, Homo sapiens
  CDR3 for alpha chain variable domain of TCR clone 279976 (TRAV3, TRAJ5)
CAVRDLDTGRRALTF

SEQ ID NO: 559952 - protein, 13 aa, Homo sapiens
  CDR3 for beta chain variable domain of TCR clone 279976 (TRBV12-4, TRBJ2-7)
CASSRTETYEQYF

SEQ ID NO: 559953 - protein, 10 aa, Homo sapiens
  CDR3 for alpha chain variable domain of TCR clone 279977 (TRAV1-2, TRAJ31)
CAFFDARLMF

SEQ ID NO: 559954 - protein, 15 aa, Homo sapiens
  CDR3 for beta chain variable domain of TCR clone 279977 (TRBV4-1, TRBJ1-4)
CASSDTGGTNEKLFF

SEQ ID NO: 559955 - protein, 15 aa, Homo sapiens
  CDR3 for alpha chain variable domain of TCR clone 279978 (TRAV8-2, TRAJ40)
CVVSDRGSGTYKYIF

SEQ ID NO: 559956 - protein, 13 aa, Homo sapiens
  CDR3 for beta chain variable domain of TCR clone 279978 (TRBV6-1, TRBJ1-1)
CASSEVFGTEAFF

SEQ ID NO: 559957 - protein, 15 aa, Homo sapiens
  CDR3 for alpha chain variable domain of TCR clone 279979 (TRAV8-3, TRAJ45)
CASSYSGGGADGLTF

SEQ ID NO: 559958 - protein, 13 aa, Homo sapiens
  CDR3 for beta chain variable domain of TCR clone 279979 (TRBV10-3, TRBJ2-7)
CASKLTVNYELYF

SEQ ID NO: 559959 - protein, 14 aa, Homo sapiens
  CDR3 for alpha chain variable domain of TCR clone 279980 (TRAV21, TRAJ35)
CAVMPIGFGDVLPC

SEQ ID NO: 559960 - protein, 12 aa, Homo sapiens
  CDR3 for beta chain variable domain of TCR clone 279980 (TRBV7-9, TRBJ2-7)
CASSIKREEQYF

SEQ ID NO: 559961 - protein, 12 aa, Homo sapiens
  CDR3 for alpha chain variable domain of TCR clone 279981 (TRAV12-3, TRAJ17)
CAMTLTGNKLTF

SEQ ID NO: 559962 - protein, 12 aa, Homo sapiens
  CDR3 for beta chain variable domain of TCR clone 279981 (TRBV11-2, TRBJ2-7)
CASSLPTYEQYL

SEQ ID NO: 559963 - protein, 15 aa, Homo sapiens
  CDR3 for alpha chain variable domain of TCR clone 279982 (TRAV8-4, TRAJ8)
CAVSELKTGFQKLVF

SEQ ID NO: 559964 - protein, 14 aa, Homo sapiens
  CDR3 for beta chain variable domain of TCR clone 279982 (TRBV7-2, TRBJ2-3)
CASSQTGSSYTQYF

SEQ ID NO: 559965 - protein, 15 aa, Homo sapiens
  CDR3 for alpha chain variable domain of TCR clone 279983 (TRAV27, TRAJ57)
CAGVPSQGGSEKLVF

SEQ ID NO: 559966 - protein, 15 aa, Homo sapiens
  CDR3 for beta chain variable domain of TCR clone 279983 (TRBV12-4, TRBJ1-5)
CASSHTGHLGQHQHF

SEQ ID NO: 559967 - protein, 13 aa, Homo sapiens
  CDR3 for alpha chain variable domain of TCR clone 279984 (TRAV12-3, TRAJ17)
CAMTLTGNKQLLE

SEQ ID NO: 559968 - protein, 15 aa, Homo sapiens
  CDR3 for beta chain variable domain of TCR clone 279984 (TRBV20-1, TRBJ2-7)
CSARDRVSGMDEQYF

SEQ ID NO: 559969 - protein, 14 aa, Homo sapiens
  CDR3 for alpha chain variable domain of TCR clone 279985 (TRAV26-1, TRAJ38)
CIADNAGNNRKLIW

SEQ ID NO: 559970 - protein, 12 aa, Homo sapiens
  CDR3 for beta chain variable domain of TCR clone 279985 (TRBV14, TRBJ1-1)
CASSQLKGRAFF

SEQ ID NO: 559971 - protein, 12 aa, Homo sapiens
  CDR3 for alpha chain variable domain of TCR clone 279986 (TRAV17, TRAJ20)
CATYSNDYKLSF

SEQ ID NO: 559972 - protein, 15 aa, Homo sapiens
  CDR3 for beta chain variable domain of TCR clone 279986 (TRBV7-2, TRBJ2-1)
CASTHGTGIDNEQFF

SEQ ID NO: 559973 - protein, 13 aa, Homo sapiens
  CDR3 for alpha chain variable domain of TCR clone 279987 (TRAV8-2, TRAJ15)
CVVSGPGRNCSDL

SEQ ID NO: 559974 - protein, 14 aa, Homo sapiens
  CDR3 for beta chain variable domain of TCR clone 279987 (TRBV7-2, TRBJ2-7)
CASRSQGAAYEQYF

SEQ ID NO: 559975 - protein, 20 aa, Homo sapiens
  CDR3 for alpha chain variable domain of TCR clone 279988 (TRAV26-1, TRAJ47)
CWVLLHRQSSFMEYGNKLVF

SEQ ID NO: 559976 - protein, 14 aa, Homo sapiens
  CDR3 for beta chain variable domain of TCR clone 279988 (TRBV7-2, TRBJ1-2)
CASSRGGTNYGYTF

SEQ ID NO: 559977 - protein, 16 aa, Homo sapiens
  CDR3 for alpha chain variable domain of TCR clone 279989 (TRAV12-3, TRAJ45)
CAMGWGSGGGADGLTF

SEQ ID NO: 559978 - protein, 18 aa, Homo sapiens
  CDR3 for beta chain variable domain of TCR clone 279989 (TRBV12-4, TRBJ2-2)
CGSSLVAGTRGRTGELFF

SEQ ID NO: 559979 - protein, 11 aa, Homo sapiens
  CDR3 for alpha chain variable domain of TCR clone 279990 (TRAV2, TRAJ33)
CAVESNYQLIW

SEQ ID NO: 559980 - protein, 14 aa, Homo sapiens
  CDR3 for beta chain variable domain of TCR clone 279990 (TRBV15, TRBJ1-5)
CATSREQSNQPQHF

SEQ ID NO: 559981 - protein, 13 aa, Homo sapiens
  CDR3 for alpha chain variable domain of TCR clone 279991 (TRAV21, TRAJ27)
CAARHGNAGKSTF

SEQ ID NO: 559982 - protein, 14 aa, Homo sapiens
  CDR3 for beta chain variable domain of TCR clone 279991 (TRBV7-6, TRBJ2-3)
CASRLGTVTDTQYF

SEQ ID NO: 559983 - protein, 15 aa, Homo sapiens
  CDR3 for alpha chain variable domain of TCR clone 279992 (TRAV38-1, TRAJ57)
CAFMKLQGGSEKLVF

SEQ ID NO: 559984 - protein, 13 aa, Homo sapiens
  CDR3 for beta chain variable domain of TCR clone 279992 (TRBV2, TRBJ2-5)
CASGTPYQETQYF

SEQ ID NO: 559985 - protein, 18 aa, Homo sapiens
  CDR3 for alpha chain variable domain of TCR clone 279993 (TRAV26-2, TRAJ45)
CILRLWGYSGGGADGLTF

SEQ ID NO: 559986 - protein, 17 aa, Homo sapiens
  CDR3 for beta chain variable domain of TCR clone 279993 (TRBV28, TRBJ2-3)
CASSPSPAGGRVDTQYF

SEQ ID NO: 559987 - protein, 15 aa, Homo sapiens
  CDR3 for alpha chain variable domain of TCR clone 279994 (TRAV26-1, TRAJ52)
CIVSDLGTSYGKLTF

SEQ ID NO: 559988 - protein, 15 aa, Homo sapiens
  CDR3 for beta chain variable domain of TCR clone 279994 (TRBV6-5, TRBJ2-7)
CASSASGWWSYEQYF

SEQ ID NO: 559989 - protein, 16 aa, Homo sapiens
  CDR3 for alpha chain variable domain of TCR clone 279995 (TRAV30, TRAJ24)
CGTEIVDADSWGKFQF

SEQ ID NO: 559990 - protein, 14 aa, Homo sapiens
  CDR3 for beta chain variable domain of TCR clone 279995 (TRBV19, TRBJ1-2)
CASSLQGQAYGYTV

SEQ ID NO: 559991 - protein, 14 aa, Homo sapiens
  CDR3 for alpha chain variable domain of TCR clone 279996 (TRAV21, TRAJ45)
CAVSSGGGADGLTF

SEQ ID NO: 559992 - protein, 16 aa, Homo sapiens
  CDR3 for beta chain variable domain of TCR clone 279996 (TRBV13, TRBJ2-2)
CASSPRTGEHTGELFF

SEQ ID NO: 559993 - protein, 10 aa, Homo sapiens
  CDR3 for alpha chain variable domain of TCR clone 279997 (TRAV13-2, TRAJ8)
CSLGFQKLVF

SEQ ID NO: 559994 - protein, 15 aa, Homo sapiens
  CDR3 for beta chain variable domain of TCR clone 279997 (TRBV12-4, TRBJ2-5)
CASSLSGAFQETQYF

SEQ ID NO: 559995 - protein, 12 aa, Homo sapiens
  CDR3 for alpha chain variable domain of TCR clone 279998 (TRAV17, TRAJ43)
CATDAFPADMRF

SEQ ID NO: 559996 - protein, 14 aa, Homo sapiens
  CDR3 for beta chain variable domain of TCR clone 279998 (TRBV20-1, TRBJ2-3)
CSARNGGSTDTQYF

SEQ ID NO: 559997 - protein, 14 aa, Homo sapiens
  CDR3 for alpha chain variable domain of TCR clone 279999 (TRAV9-2, TRAJ39)
CAFYIYNAGNMLTF

SEQ ID NO: 559998 - protein, 16 aa, Homo sapiens
  CDR3 for beta chain variable domain of TCR clone 279999 (TRBV19, TRBJ2-2)
CASRSPGTGATGELFF

SEQ ID NO: 559999 - protein, 13 aa, Homo sapiens
  CDR3 for alpha chain variable domain of TCR clone 280000 (TRAV12-3, TRAJ21)
YAPGPHNFNKFYF

SEQ ID NO: 560000 - protein, 16 aa, Homo sapiens
  CDR3 for beta chain variable domain of TCR clone 280000 (TRBV12-4, TRBJ1-5)
CASSRPVGGSNQPQHF

SEQ ID NO: 560001 - protein, 16 aa, Homo sapiens
  CDR3 for alpha chain variable domain of TCR clone 280001 (TRAV13-2, TRAJ15)
CLLFAEKNQAGTALIF

SEQ ID NO: 560002 - protein, 15 aa, Homo sapiens
  CDR3 for beta chain variable domain of TCR clone 280001 (TRBV29-1, TRBJ2-5)
CSVAPGQGARETQYF

SEQ ID NO: 560003 - protein, 17 aa, Homo sapiens
  CDR3 for alpha chain variable domain of TCR clone 280002 (TRAV3, TRAJ6)
CAVRDGPRAGGSYIPTF

SEQ ID NO: 560004 - protein, 13 aa, Homo sapiens
  CDR3 for beta chain variable domain of TCR clone 280002 (TRBV20-1, TRBJ1-1)
CSVRGGGNTEAFF

SEQ ID NO: 560005 - protein, 16 aa, Homo sapiens
  CDR3 for alpha chain variable domain of TCR clone 280003 (TRAV3, TRAJ37)
CAVRVRVSGNTGKLIF

SEQ ID NO: 560006 - protein, 13 aa, Homo sapiens
  CDR3 for beta chain variable domain of TCR clone 280003 (TRBV7-9, TRBJ1-2)
CASSLKQDYGYTF

SEQ ID NO: 560007 - protein, 19 aa, Homo sapiens
  CDR3 for alpha chain variable domain of TCR clone 280004 (TRAV1-2, TRAJ26)
CLLPLCCERPDNYGQNFVF

SEQ ID NO: 560008 - protein, 19 aa, Homo sapiens
  CDR3 for beta chain variable domain of TCR clone 280004 (TRBV24-1, TRBJ2-1)
TSVPPVIFPNNSSYNEQFF

SEQ ID NO: 560009 - protein, 15 aa, Homo sapiens
  CDR3 for alpha chain variable domain of TCR clone 280005 (TRAV21, TRAJ53)
CATLNSGGSNYKMTF

SEQ ID NO: 560010 - protein, 13 aa, Homo sapiens
  CDR3 for beta chain variable domain of TCR clone 280005 (TRBV7-3, TRBJ1-1)
CASSQDWGAEAFF

SEQ ID NO: 560011 - protein, 11 aa, Homo sapiens
  CDR3 for alpha chain variable domain of TCR clone 280006 (TRAV27, TRAJ45)
CAGAQEEVLTG

SEQ ID NO: 560012 - protein, 15 aa, Homo sapiens
  CDR3 for beta chain variable domain of TCR clone 280006 (TRBV9, TRBJ2-2)
CASSDFAGASGELFF

SEQ ID NO: 560013 - protein, 13 aa, Homo sapiens
  CDR3 for alpha chain variable domain of TCR clone 280007 (TRAV13-2, TRAJ53)
CAENMGSNYKLTF

SEQ ID NO: 560014 - protein, 13 aa, Homo sapiens
  CDR3 for beta chain variable domain of TCR clone 280007 (TRBV4-1, TRBJ2-2)
CASRQENTGELFF

SEQ ID NO: 560015 - protein, 15 aa, Homo sapiens
  CDR3 for alpha chain variable domain of TCR clone 280008 (TRAV12-3, TRAJ10)
CASYILTGGGNKLNF

SEQ ID NO: 560016 - protein, 15 aa, Homo sapiens
  CDR3 for beta chain variable domain of TCR clone 280008 (TRBV7-2, TRBJ1-6)
CASSLGPDRGMPLHC

SEQ ID NO: 560017 - protein, 16 aa, Homo sapiens
  CDR3 for alpha chain variable domain of TCR clone 280009 (TRAV12-2, TRAJ5)
CAVTRGSGTGRRALTF

SEQ ID NO: 560018 - protein, 20 aa, Homo sapiens
  CDR3 for beta chain variable domain of TCR clone 280009 (TRBV7-8, TRBJ2-2)
CASSHFFPGPTIHITGELFF

SEQ ID NO: 560019 - protein, 19 aa, Homo sapiens
  CDR3 for alpha chain variable domain of TCR clone 280010 (TRAV2, TRAJ13)
CAARILGVTRKLPLELEQI

SEQ ID NO: 560020 - protein, 14 aa, Homo sapiens
  CDR3 for beta chain variable domain of TCR clone 280010 (TRBV19, TRBJ2-1)
CASEVTGARNEQFF

SEQ ID NO: 560021 - protein, 13 aa, Homo sapiens
  CDR3 for alpha chain variable domain of TCR clone 280011 (TRAV20, TRAJ37)
CAGCSSNTGKLIF

SEQ ID NO: 560022 - protein, 14 aa, Homo sapiens
  CDR3 for beta chain variable domain of TCR clone 280011 (TRBV7-2, TRBJ2-7)
CASSPKTSFYEQNF

SEQ ID NO: 560023 - protein, 16 aa, Homo sapiens
  CDR3 for alpha chain variable domain of TCR clone 280012 (TRAV1-2, TRAJ10)
CAVRGVLTGGGNKHTF

SEQ ID NO: 560024 - protein, 13 aa, Homo sapiens
  CDR3 for beta chain variable domain of TCR clone 280012 (TRBV20-1, TRBJ1-1)
CSAGTVGNTEAFF

SEQ ID NO: 560025 - protein, 14 aa, Homo sapiens
  CDR3 for alpha chain variable domain of TCR clone 280013 (TRAV12-3, TRAJ10)
SHLPLTGGGNKLTF

SEQ ID NO: 560026 - protein, 17 aa, Homo sapiens
  CDR3 for beta chain variable domain of TCR clone 280013 (TRBV28, TRBJ2-5)
CASSTPEGDALQATQYF

SEQ ID NO: 560027 - protein, 12 aa, Homo sapiens
  CDR3 for alpha chain variable domain of TCR clone 280014 (TRAV12-1, TRAJ20)
CVAHFNDYKLSF

SEQ ID NO: 560028 - protein, 15 aa, Homo sapiens
  CDR3 for beta chain variable domain of TCR clone 280014 (TRBV7-9, TRBJ1-4)
CASSRTGGFNEKLFF

SEQ ID NO: 560029 - protein, 17 aa, Homo sapiens
  CDR3 for alpha chain variable domain of TCR clone 280015 (TRAV13-1, TRAJ52)
CAASSGAGGTSYGQLKF

SEQ ID NO: 560030 - protein, 15 aa, Homo sapiens
  CDR3 for beta chain variable domain of TCR clone 280015 (TRBV2, TRBJ2-1)
CASSELAGSYNEQFF

SEQ ID NO: 560031 - protein, 14 aa, Homo sapiens
  CDR3 for alpha chain variable domain of TCR clone 280016 (TRAV2, TRAJ9)
CAVEDRSGGFKTIF

SEQ ID NO: 560032 - protein, 15 aa, Homo sapiens
  CDR3 for beta chain variable domain of TCR clone 280016 (TRBV12-4, TRBJ2-5)
CASSGTGQAQETQYF

SEQ ID NO: 560033 - protein, 15 aa, Homo sapiens
  CDR3 for alpha chain variable domain of TCR clone 280017 (TRAV35, TRAJ58)
CAGRRQETSGSRLTF

SEQ ID NO: 560034 - protein, 11 aa, Homo sapiens
  CDR3 for beta chain variable domain of TCR clone 280017 (TRBV11-2, TRBJ1-1)
CASSINTEAFC

SEQ ID NO: 560035 - protein, 15 aa, Homo sapiens
  CDR3 for alpha chain variable domain of TCR clone 280018 (TRAV27, TRAJ38)
CAARRNAGNNRKLIW

SEQ ID NO: 560036 - protein, 13 aa, Homo sapiens
  CDR3 for beta chain variable domain of TCR clone 280018 (TRBV7-7, TRBJ2-1)
CASSLYLGNEQFF

SEQ ID NO: 560037 - protein, 14 aa, Homo sapiens
  CDR3 for alpha chain variable domain of TCR clone 280019 (TRAV14/DV4, TRAJ15)
CAMRASPLGTALIF

SEQ ID NO: 560038 - protein, 13 aa, Homo sapiens
  CDR3 for beta chain variable domain of TCR clone 280019 (TRBV19, TRBJ1-2)
CASSVPGQDGYTF

SEQ ID NO: 560039 - protein, 13 aa, Homo sapiens
  CDR3 for alpha chain variable domain of TCR clone 280020 (TRAV13-1, TRAJ35)
CAASKGGFGNVLH

SEQ ID NO: 560040 - protein, 13 aa, Homo sapiens
  CDR3 for beta chain variable domain of TCR clone 280020 (TRBV7-3, TRBJ1-1)
CASSQDWGAEAFF

SEQ ID NO: 560041 - protein, 16 aa, Homo sapiens
  CDR3 for alpha chain variable domain of TCR clone 280021 (TRAV26-1, TRAJ37)
CIVRGDGSGNTGNLIF

SEQ ID NO: 560042 - protein, 15 aa, Homo sapiens
  CDR3 for beta chain variable domain of TCR clone 280021 (TRBV7-3, TRBJ2-1)
CASSPTGGGEVEQFF

SEQ ID NO: 560043 - protein, 12 aa, Homo sapiens
  CDR3 for alpha chain variable domain of TCR clone 280022 (TRAV1-1, TRAJ30)
CAVRGRDDKIIF

SEQ ID NO: 560044 - protein, 16 aa, Homo sapiens
  CDR3 for beta chain variable domain of TCR clone 280022 (TRBV12-4, TRBJ1-5)
CASSRPVGGSNQPQHF

SEQ ID NO: 560045 - protein, 14 aa, Homo sapiens
  CDR3 for alpha chain variable domain of TCR clone 280023 (TRAV2, TRAJ37)
CAVDFTSNTGKLIF

SEQ ID NO: 560046 - protein, 15 aa, Homo sapiens
  CDR3 for beta chain variable domain of TCR clone 280023 (TRBV7-3, TRBJ2-1)
CASSFGQSNYNEQFF

SEQ ID NO: 560047 - protein, 16 aa, Homo sapiens
  CDR3 for alpha chain variable domain of TCR clone 280024 (TRAV12-1, TRAJ42)
CVVTPYYGGSQGNPIF

SEQ ID NO: 560048 - protein, 18 aa, Homo sapiens
  CDR3 for beta chain variable domain of TCR clone 280024 (TRBV24-1, TRBJ2-3)
CATSDFPRLAGGADTQYF

SEQ ID NO: 560049 - protein, 14 aa, Homo sapiens
  CDR3 for alpha chain variable domain of TCR clone 280025 (TRAV20, TRAJ56)
CAVQFCGANSKLKF

SEQ ID NO: 560050 - protein, 14 aa, Homo sapiens
  CDR3 for beta chain variable domain of TCR clone 280025 (TRBV20-1, TRBJ2-7)
CSAKRGRSSYEQYF

SEQ ID NO: 560051 - protein, 17 aa, Homo sapiens
  CDR3 for alpha chain variable domain of TCR clone 280026 (TRAV3, TRAJ6)
CAVSRRTDTGGSYIPTL

SEQ ID NO: 560052 - protein, 18 aa, Homo sapiens
  CDR3 for beta chain variable domain of TCR clone 280026 (TRBV7-2, TRBJ2-3)
CASSLDTSRGRKADTQYF

SEQ ID NO: 560053 - protein, 11 aa, Homo sapiens
  CDR3 for alpha chain variable domain of TCR clone 280027 (TRAV2, TRAJ13)
CASGGYQKVTF

SEQ ID NO: 560054 - protein, 15 aa, Homo sapiens
  CDR3 for beta chain variable domain of TCR clone 280027 (TRBV11-2, TRBJ2-2)
CASSSDRVNDGELFF

SEQ ID NO: 560055 - protein, 16 aa, Homo sapiens
  CDR3 for alpha chain variable domain of TCR clone 280028 (TRAV3, TRAJ40)
CAVRDRIASGTYKYIF

SEQ ID NO: 560056 - protein, 12 aa, Homo sapiens
  CDR3 for beta chain variable domain of TCR clone 280028 (TRBV7-8, TRBJ2-7)
CASSLGDREQYF

SEQ ID NO: 560057 - protein, 11 aa, Homo sapiens
  CDR3 for alpha chain variable domain of TCR clone 280029 (TRAV17, TRAJ49)
CATNTGNQFYF

SEQ ID NO: 560058 - protein, 12 aa, Homo sapiens
  CDR3 for beta chain variable domain of TCR clone 280029 (TRBV2, TRBJ2-7)
FASSGGSGIPYF

SEQ ID NO: 560059 - protein, 11 aa, Homo sapiens
  CDR3 for alpha chain variable domain of TCR clone 280030 (TRAV21, TRAJ34)
CAVTNPDKLIF

SEQ ID NO: 560060 - protein, 16 aa, Homo sapiens
  CDR3 for beta chain variable domain of TCR clone 280030 (TRBV18, TRBJ1-1)
CASSPGVGGRGGEAFF

SEQ ID NO: 560061 - protein, 12 aa, Homo sapiens
  CDR3 for alpha chain variable domain of TCR clone 280031 (TRAV8-6, TRAJ43)
CAVSNNNNDMRF

SEQ ID NO: 560062 - protein, 15 aa, Homo sapiens
  CDR3 for beta chain variable domain of TCR clone 280031 (TRBV7-3, TRBJ2-6)
CASSLGGSGANDPTF

SEQ ID NO: 560063 - protein, 12 aa, Homo sapiens
  CDR3 for alpha chain variable domain of TCR clone 280032 (TRAV21, TRAJ49)
CAATNTGNQFYF

SEQ ID NO: 560064 - protein, 17 aa, Homo sapiens
  CDR3 for beta chain variable domain of TCR clone 280032 (TRBV13, TRBJ2-3)
CASSLSRVAGGRNTQYF

SEQ ID NO: 560065 - protein, 18 aa, Homo sapiens
  CDR3 for alpha chain variable domain of TCR clone 280033 (TRAV26-1, TRAJ52)
CIVRVEGAGGTSYGKLTF

SEQ ID NO: 560066 - protein, 13 aa, Homo sapiens
  CDR3 for beta chain variable domain of TCR clone 280033 (TRBV7-2, TRBJ2-2)
CASSLAVTGELFF

SEQ ID NO: 560067 - protein, 14 aa, Homo sapiens
  CDR3 for alpha chain variable domain of TCR clone 280034 (TRAV12-2, TRAJ17)
CAVLFKAAGNKLTF

SEQ ID NO: 560068 - protein, 15 aa, Homo sapiens
  CDR3 for beta chain variable domain of TCR clone 280034 (TRBV29-1, TRBJ2-6)
CSVGDRGSGANDLTF

SEQ ID NO: 560069 - protein, 13 aa, Homo sapiens
  CDR3 for alpha chain variable domain of TCR clone 280035 (TRAV12-1, TRAJ40)
CVVPTSGTYKYNF

SEQ ID NO: 560070 - protein, 13 aa, Homo sapiens
  CDR3 for beta chain variable domain of TCR clone 280035 (TRBV4-2, TRBJ1-1)
CASSQAGNTEAFF

SEQ ID NO: 560071 - protein, 10 aa, Homo sapiens
  CDR3 for alpha chain variable domain of TCR clone 280036 (TRAV2, TRAJ15)
RGQAGTALIF

SEQ ID NO: 560072 - protein, 14 aa, Homo sapiens
  CDR3 for beta chain variable domain of TCR clone 280036 (TRBV7-3, TRBJ2-2)
CASSSGGYTGELFF

SEQ ID NO: 560073 - protein, 13 aa, Homo sapiens
  CDR3 for alpha chain variable domain of TCR clone 280037 (TRAV8-3, TRAJ28)
CAVGAVGSYQLTF

SEQ ID NO: 560074 - protein, 15 aa, Homo sapiens
  CDR3 for beta chain variable domain of TCR clone 280037 (TRBV7-9, TRBJ2-7)
CASSPGGGLTYEQYF

SEQ ID NO: 560075 - protein, 12 aa, Homo sapiens
  CDR3 for alpha chain variable domain of TCR clone 280038 (TRAV23/DV6, TRAJ16)
CAATGTGQKLLF

SEQ ID NO: 560076 - protein, 13 aa, Homo sapiens
  CDR3 for beta chain variable domain of TCR clone 280038 (TRBV20-1, TRBJ1-1)
CSARGGGNTEAFF

SEQ ID NO: 560077 - protein, 15 aa, Homo sapiens
  CDR3 for alpha chain variable domain of TCR clone 280039 (TRAV38-1, TRAJ37)
CAFIHGSGNTGKLIF

SEQ ID NO: 560078 - protein, 13 aa, Homo sapiens
  CDR3 for beta chain variable domain of TCR clone 280039 (TRBV20-1, TRBJ1-1)
CSPRGGGNTEAFF

SEQ ID NO: 560079 - protein, 14 aa, Homo sapiens
  CDR3 for alpha chain variable domain of TCR clone 280040 (TRAV13-1, TRAJ44)
CAAKAPGTASKLTF

SEQ ID NO: 560080 - protein, 13 aa, Homo sapiens
  CDR3 for beta chain variable domain of TCR clone 280040 (TRBV5-5, TRBJ1-2)
CASSFWRGEDYTF

SEQ ID NO: 560081 - protein, 18 aa, Homo sapiens
  CDR3 for alpha chain variable domain of TCR clone 280041 (TRAV26-2, TRAJ54)
CILRDVEVGIQGAQKLGF

SEQ ID NO: 560082 - protein, 14 aa, Homo sapiens
  CDR3 for beta chain variable domain of TCR clone 280041 (TRBV19, TRBJ2-1)
CASTTARTGNEQFF

SEQ ID NO: 560083 - protein, 13 aa, Homo sapiens
  CDR3 for alpha chain variable domain of TCR clone 280042 (TRAV12-2, TRAJ9)
CAVLETGGFKTIF

SEQ ID NO: 560084 - protein, 14 aa, Homo sapiens
  CDR3 for beta chain variable domain of TCR clone 280042 (TRBV4-1, TRBJ2-5)
CASSRSGSGETQYF

SEQ ID NO: 560085 - protein, 12 aa, Homo sapiens
  CDR3 for alpha chain variable domain of TCR clone 280043 (TRAV26-2, TRAJ21)
CILKGNFNKFYF

SEQ ID NO: 560086 - protein, 14 aa, Homo sapiens
  CDR3 for beta chain variable domain of TCR clone 280043 (TRBV7-9, TRBJ1-1)
CASTPLQSYTETFF

SEQ ID NO: 560087 - protein, 14 aa, Homo sapiens
  CDR3 for alpha chain variable domain of TCR clone 280044 (TRAV23/DV6, TRAJ27)
CAASRDTNEGKSTF

SEQ ID NO: 560088 - protein, 13 aa, Homo sapiens
  CDR3 for beta chain variable domain of TCR clone 280044 (TRBV20-1, TRBJ1-5)
CSASGRGNQPQHF

SEQ ID NO: 560089 - protein, 17 aa, Homo sapiens
  CDR3 for alpha chain variable domain of TCR clone 280045 (TRAV8-6, TRAJ58)
CAVSSWGGETSGSRLTF

SEQ ID NO: 560090 - protein, 15 aa, Homo sapiens
  CDR3 for beta chain variable domain of TCR clone 280045 (TRBV6-5, TRBJ2-1)
CASSYDAGAGNEQFF

SEQ ID NO: 560091 - protein, 15 aa, Homo sapiens
  CDR3 for alpha chain variable domain of TCR clone 280046 (TRAV35, TRAJ23)
CAGPLGNNQGGKLIF

SEQ ID NO: 560092 - protein, 14 aa, Homo sapiens
  CDR3 for beta chain variable domain of TCR clone 280046 (TRBV4-1, TRBJ2-2)
CASSQAVNTGELFF

SEQ ID NO: 560093 - protein, 11 aa, Homo sapiens
  CDR3 for alpha chain variable domain of TCR clone 280047 (TRAV2, TRAJ13)
CASGGYQKVTF

SEQ ID NO: 560094 - protein, 14 aa, Homo sapiens
  CDR3 for beta chain variable domain of TCR clone 280047 (TRBV2, TRBJ2-3)
GASSEGQNTDTQYF

SEQ ID NO: 560095 - protein, 11 aa, Homo sapiens
  CDR3 for alpha chain variable domain of TCR clone 280048 (TRAV4, TRAJ28)
CLVGDNRAETL

SEQ ID NO: 560096 - protein, 13 aa, Homo sapiens
  CDR3 for beta chain variable domain of TCR clone 280048 (TRBV27, TRBJ1-1)
CASSLSIGAEAFF

SEQ ID NO: 560097 - protein, 17 aa, Homo sapiens
  CDR3 for alpha chain variable domain of TCR clone 280049 (TRAV3, TRAJ28)
CAVRDGYSGAGSYQLTF

SEQ ID NO: 560098 - protein, 14 aa, Homo sapiens
  CDR3 for beta chain variable domain of TCR clone 280049 (TRBV12-4, TRBJ2-5)
CASSSTEGTKTQYF

SEQ ID NO: 560099 - protein, 18 aa, Homo sapiens
  CDR3 for alpha chain variable domain of TCR clone 280050 (TRAV26-1, TRAJ5)
CIVRVVPPQDTGRRALPF

SEQ ID NO: 560100 - protein, 15 aa, Homo sapiens
  CDR3 for beta chain variable domain of TCR clone 280050 (TRBV7-9, TRBJ2-7)
CASSLPMGQANEQYF

SEQ ID NO: 560101 - protein, 20 aa, Homo sapiens
  CDR3 for alpha chain variable domain of TCR clone 280051 (TRAV20, TRAJ34)
KTQPLISVLCTRDNTDKLIF

SEQ ID NO: 560102 - protein, 15 aa, Homo sapiens
  CDR3 for beta chain variable domain of TCR clone 280051 (TRBV2, TRBJ2-1)
CASSVTSEGTDEQFF

SEQ ID NO: 560103 - protein, 12 aa, Homo sapiens
  CDR3 for alpha chain variable domain of TCR clone 280052 (TRAV29/DV5, TRAJ53)
CAASGGNYKLTF

SEQ ID NO: 560104 - protein, 15 aa, Homo sapiens
  CDR3 for beta chain variable domain of TCR clone 280052 (TRBV5-7, TRBJ1-5)
CASSYGKLWDQPQHF

SEQ ID NO: 560105 - protein, 16 aa, Homo sapiens
  CDR3 for alpha chain variable domain of TCR clone 280053 (TRAV3, TRAJ21)
CAVRDIERGNFNKFYF

SEQ ID NO: 560106 - protein, 13 aa, Homo sapiens
  CDR3 for beta chain variable domain of TCR clone 280053 (TRBV27, TRBJ2-7)
YASSLTTGYEQYF

SEQ ID NO: 560107 - protein, 17 aa, Homo sapiens
  CDR3 for alpha chain variable domain of TCR clone 280054 (TRAV26-1, TRAJ46)
IASSESEKRSSGDKLTF

SEQ ID NO: 560108 - protein, 16 aa, Homo sapiens
  CDR3 for beta chain variable domain of TCR clone 280054 (TRBV27, TRBJ2-2)
CASSFRGLVRTGELFF

SEQ ID NO: 560109 - protein, 14 aa, Homo sapiens
  CDR3 for alpha chain variable domain of TCR clone 280055 (TRAV8-4, TRAJ15)
CAVTIRESGTALIF

SEQ ID NO: 560110 - protein, 13 aa, Homo sapiens
  CDR3 for beta chain variable domain of TCR clone 280055 (TRBV10-3, TRBJ2-7)
CAISEKGGYEQYF

SEQ ID NO: 560111 - protein, 16 aa, Homo sapiens
  CDR3 for alpha chain variable domain of TCR clone 280056 (TRAV30, TRAJ24)
CGTELVDADSWGKFPF

SEQ ID NO: 560112 - protein, 15 aa, Homo sapiens
  CDR3 for beta chain variable domain of TCR clone 280056 (TRBV6-3, TRBJ2-7)
CASSSPGTVFYEQYF

SEQ ID NO: 560113 - protein, 14 aa, Homo sapiens
  CDR3 for alpha chain variable domain of TCR clone 280057 (TRAV8-3, TRAJ4)
CAVGAAGGYNKLIF

SEQ ID NO: 560114 - protein, 15 aa, Homo sapiens
  CDR3 for beta chain variable domain of TCR clone 280057 (TRBV6-5, TRBJ2-1)
CASSYVAGAGNEQFF

SEQ ID NO: 560115 - protein, 13 aa, Homo sapiens
  CDR3 for alpha chain variable domain of TCR clone 280058 (TRAV21, TRAJ27)
CAARPGNAGKSTF

SEQ ID NO: 560116 - protein, 14 aa, Homo sapiens
  CDR3 for beta chain variable domain of TCR clone 280058 (TRBV20-1, TRBJ2-1)
RSAAGSGEYNEQFF

SEQ ID NO: 560117 - protein, 13 aa, Homo sapiens
  CDR3 for alpha chain variable domain of TCR clone 280059 (TRAV3, TRAJ21)
CAVRKPDFNKFYF

SEQ ID NO: 560118 - protein, 15 aa, Homo sapiens
  CDR3 for beta chain variable domain of TCR clone 280059 (TRBV20-1, TRBJ1-1)
CSAIRGVTGNTEAFF

SEQ ID NO: 560119 - protein, 13 aa, Homo sapiens
  CDR3 for alpha chain variable domain of TCR clone 280060 (TRAV29/DV5, TRAJ31)
CAASRNNNARLML

SEQ ID NO: 560120 - protein, 13 aa, Homo sapiens
  CDR3 for beta chain variable domain of TCR clone 280060 (TRBV7-2, TRBJ2-4)
CASSREHANIQYF

SEQ ID NO: 560121 - protein, 15 aa, Homo sapiens
  CDR3 for alpha chain variable domain of TCR clone 280061 (TRAV3, TRAJ9)
CAVRARNTGGFKTIF

SEQ ID NO: 560122 - protein, 15 aa, Homo sapiens
  CDR3 for beta chain variable domain of TCR clone 280061 (TRBV2, TRBJ2-1)
CATQARLVMIGEQFF

SEQ ID NO: 560123 - protein, 14 aa, Homo sapiens
  CDR3 for alpha chain variable domain of TCR clone 280062 (TRAV17, TRAJ8)
CATDLNTGFQKLVF

SEQ ID NO: 560124 - protein, 14 aa, Homo sapiens
  CDR3 for beta chain variable domain of TCR clone 280062 (TRBV7-3, TRBJ1-1)
CASSLKGGNTEAFF

SEQ ID NO: 560125 - protein, 15 aa, Homo sapiens
  CDR3 for alpha chain variable domain of TCR clone 280063 (TRAV8-3, TRAJ45)
CASSYSGGGADVLTF

SEQ ID NO: 560126 - protein, 13 aa, Homo sapiens
  CDR3 for beta chain variable domain of TCR clone 280063 (TRBV10-3, TRBJ2-7)
CASKLAVNYEQYV

SEQ ID NO: 560127 - protein, 15 aa, Homo sapiens
  CDR3 for alpha chain variable domain of TCR clone 280064 (TRAV12-3, TRAJ6)
CAMSATPGGSYIPTF

SEQ ID NO: 560128 - protein, 13 aa, Homo sapiens
  CDR3 for beta chain variable domain of TCR clone 280064 (TRBV7-9, TRBJ1-2)
CASSLKQNYGYTF

SEQ ID NO: 560129 - protein, 14 aa, Homo sapiens
  CDR3 for alpha chain variable domain of TCR clone 280065 (TRAV8-3, TRAJ9)
CAVVYNTGGFKTIF

SEQ ID NO: 560130 - protein, 15 aa, Homo sapiens
  CDR3 for beta chain variable domain of TCR clone 280065 (TRBV11-3, TRBJ2-3)
CASLKDGREGDTQYF

SEQ ID NO: 560131 - protein, 14 aa, Homo sapiens
  CDR3 for alpha chain variable domain of TCR clone 280066 (TRAV12-1, TRAJ34)
CVVNLDSNTDKLIF

SEQ ID NO: 560132 - protein, 13 aa, Homo sapiens
  CDR3 for beta chain variable domain of TCR clone 280066 (TRBV29-1, TRBJ2-1)
CSVEGGRVNEQFF

SEQ ID NO: 560133 - protein, 17 aa, Homo sapiens
  CDR3 for alpha chain variable domain of TCR clone 280067 (TRAV3, TRAJ42)
CAVRDRDYGGSQGNLIF

SEQ ID NO: 560134 - protein, 12 aa, Homo sapiens
  CDR3 for beta chain variable domain of TCR clone 280067 (TRBV19, TRBJ2-1)
CASSRQGAEQFF

SEQ ID NO: 560135 - protein, 14 aa, Homo sapiens
  CDR3 for alpha chain variable domain of TCR clone 280068 (TRAV8-3, TRAJ6)
CAVSSSGGSYIPTF

SEQ ID NO: 560136 - protein, 14 aa, Homo sapiens
  CDR3 for beta chain variable domain of TCR clone 280068 (TRBV10-2, TRBJ2-1)
CASSVGRVINEQFF

SEQ ID NO: 560137 - protein, 12 aa, Homo sapiens
  CDR3 for alpha chain variable domain of TCR clone 280069 (TRAV12-3, TRAJ20)
CAMARGDYKLSF

SEQ ID NO: 560138 - protein, 13 aa, Homo sapiens
  CDR3 for beta chain variable domain of TCR clone 280069 (TRBV23-1, TRBJ1-4)
CASRGKFNEKLFF

SEQ ID NO: 560139 - protein, 14 aa, Homo sapiens
  CDR3 for alpha chain variable domain of TCR clone 280070 (TRAV12-1, TRAJ9)
CVVTGYTGGFKTIF

SEQ ID NO: 560140 - protein, 14 aa, Homo sapiens
  CDR3 for beta chain variable domain of TCR clone 280070 (TRBV20-1, TRBJ1-1)
CSAQTRIGGTEAFF

SEQ ID NO: 560141 - protein, 17 aa, Homo sapiens
  CDR3 for alpha chain variable domain of TCR clone 280071 (TRAV3, TRAJ28)
CAVREAYAGAGSYQLTF

SEQ ID NO: 560142 - protein, 18 aa, Homo sapiens
  CDR3 for beta chain variable domain of TCR clone 280071 (TRBV27, TRBJ2-1)
CASGNRAVGVGSKNEQFF

SEQ ID NO: 560143 - protein, 12 aa, Homo sapiens
  CDR3 for alpha chain variable domain of TCR clone 280072 (TRAV8-3, TRAJ20)
CAVGANDYKLSF

SEQ ID NO: 560144 - protein, 10 aa, Homo sapiens
  CDR3 for beta chain variable domain of TCR clone 280072 (TRBV28, TRBJ1-2)
CASSSDRAVF

SEQ ID NO: 560145 - protein, 13 aa, Homo sapiens
  CDR3 for alpha chain variable domain of TCR clone 280073 (TRAV13-2, TRAJ15)
CAENPNQAGTADL

SEQ ID NO: 560146 - protein, 16 aa, Homo sapiens
  CDR3 for beta chain variable domain of TCR clone 280073 (TRBV12-4, TRBJ1-2)
CASSPTATGKTRGYTF

SEQ ID NO: 560147 - protein, 14 aa, Homo sapiens
  CDR3 for alpha chain variable domain of TCR clone 280074 (TRAV13-1, TRAJ35)
CAASKAGFGNALHC

SEQ ID NO: 560148 - protein, 13 aa, Homo sapiens
  CDR3 for beta chain variable domain of TCR clone 280074 (TRBV7-3, TRBJ1-1)
CASSQDWGAEAFF

SEQ ID NO: 560149 - protein, 14 aa, Homo sapiens
  CDR3 for alpha chain variable domain of TCR clone 280075 (TRAV23/DV6, TRAJ22)
CAASVSGSARQLTF

SEQ ID NO: 560150 - protein, 16 aa, Homo sapiens
  CDR3 for beta chain variable domain of TCR clone 280075 (TRBV19, TRBJ2-1)
CASSKAGPSSYNEQFF

SEQ ID NO: 560151 - protein, 16 aa, Homo sapiens
  CDR3 for alpha chain variable domain of TCR clone 280076 (TRAV8-3, TRAJ28)
CAVGSTLGLGVTNSLS

SEQ ID NO: 560152 - protein, 14 aa, Homo sapiens
  CDR3 for beta chain variable domain of TCR clone 280076 (TRBV7-2, TRBJ2-1)
CASSLGVGYNEQFF

SEQ ID NO: 560153 - protein, 16 aa, Homo sapiens
  CDR3 for alpha chain variable domain of TCR clone 280077 (TRAV3, TRAJ13)
CAVRDFESGGYQKDTF

SEQ ID NO: 560154 - protein, 16 aa, Homo sapiens
  CDR3 for beta chain variable domain of TCR clone 280077 (TRBV27, TRBJ2-5)
CASSYGPGGQKETQYF

SEQ ID NO: 560155 - protein, 12 aa, Homo sapiens
  CDR3 for alpha chain variable domain of TCR clone 280078 (TRAV21, TRAJ31)
CAVWGNNARLMF

SEQ ID NO: 560156 - protein, 13 aa, Homo sapiens
  CDR3 for beta chain variable domain of TCR clone 280078 (TRBV27, TRBJ1-1)
CASSVSANTEAFF

SEQ ID NO: 560157 - protein, 15 aa, Homo sapiens
  CDR3 for alpha chain variable domain of TCR clone 280079 (TRAV30, TRAJ13)
CGPQGVTGGYQKVTF

SEQ ID NO: 560158 - protein, 17 aa, Homo sapiens
  CDR3 for beta chain variable domain of TCR clone 280079 (TRBV20-1, TRBJ2-2)
CSARVKRTHVRYGELFF

SEQ ID NO: 560159 - protein, 13 aa, Homo sapiens
  CDR3 for alpha chain variable domain of TCR clone 280080 (TRAV27, TRAJ29)
CAGAHSGNTPLVF

SEQ ID NO: 560160 - protein, 16 aa, Homo sapiens
  CDR3 for beta chain variable domain of TCR clone 280080 (TRBV7-9, TRBJ2-2)
CASSGFGGANTGELFF

SEQ ID NO: 560161 - protein, 13 aa, Homo sapiens
  CDR3 for alpha chain variable domain of TCR clone 280081 (TRAV5, TRAJ30)
CAESSNRDDKIIF

SEQ ID NO: 560162 - protein, 14 aa, Homo sapiens
  CDR3 for beta chain variable domain of TCR clone 280081 (TRBV7-6, TRBJ2-3)
CASSLGTVTDTQYF

SEQ ID NO: 560163 - protein, 13 aa, Homo sapiens
  CDR3 for alpha chain variable domain of TCR clone 280082 (TRAV3, TRAJ20)
CAVRDTPRYKLSF

SEQ ID NO: 560164 - protein, 14 aa, Homo sapiens
  CDR3 for beta chain variable domain of TCR clone 280082 (TRBV11-1, TRBJ2-7)
CVSTFAVPSYEQYF

SEQ ID NO: 560165 - protein, 14 aa, Homo sapiens
  CDR3 for alpha chain variable domain of TCR clone 280083 (TRAV9-2, TRAJ24)
CALNPRGSWGKWQF

SEQ ID NO: 560166 - protein, 15 aa, Homo sapiens
  CDR3 for beta chain variable domain of TCR clone 280083 (TRBV7-2, TRBJ2-3)
CASSSTGLETDTQYF

SEQ ID NO: 560167 - protein, 12 aa, Homo sapiens
  CDR3 for alpha chain variable domain of TCR clone 280084 (TRAV13-1, TRAJ49)
CAASPMGNQFYF

SEQ ID NO: 560168 - protein, 15 aa, Homo sapiens
  CDR3 for beta chain variable domain of TCR clone 280084 (TRBV7-3, TRBJ2-1)
CASSLAGAGADEQFF

SEQ ID NO: 560169 - protein, 14 aa, Homo sapiens
  CDR3 for alpha chain variable domain of TCR clone 280085 (TRAV17, TRAJ6)
CATFSSGGSYIPTF

SEQ ID NO: 560170 - protein, 15 aa, Homo sapiens
  CDR3 for beta chain variable domain of TCR clone 280085 (TRBV6-3, TRBJ2-7)
CASSSPGTVFYEQYF

SEQ ID NO: 560171 - protein, 16 aa, Homo sapiens
  CDR3 for alpha chain variable domain of TCR clone 280086 (TRAV29/DV5, TRAJ36)
CSASAHYQSGANNLFF

SEQ ID NO: 560172 - protein, 16 aa, Homo sapiens
  CDR3 for beta chain variable domain of TCR clone 280086 (TRBV4-2, TRBJ2-3)
CASSQELAGDTDTQYF

SEQ ID NO: 560173 - protein, 13 aa, Homo sapiens
  CDR3 for alpha chain variable domain of TCR clone 280087 (TRAV26-1, TRAJ48)
CIVRVAGDEKLTF

SEQ ID NO: 560174 - protein, 16 aa, Homo sapiens
  CDR3 for beta chain variable domain of TCR clone 280087 (TRBV7-9, TRBJ1-2)
CASSLGFSSGEDGYTF

SEQ ID NO: 560175 - protein, 12 aa, Homo sapiens
  CDR3 for alpha chain variable domain of TCR clone 280088 (TRAV13-1, TRAJ16)
CAAVSDGQKLLF

SEQ ID NO: 560176 - protein, 12 aa, Homo sapiens
  CDR3 for beta chain variable domain of TCR clone 280088 (TRBV7-8, TRBJ2-7)
CASSLGDREQYF

SEQ ID NO: 560177 - protein, 14 aa, Homo sapiens
  CDR3 for alpha chain variable domain of TCR clone 280089 (TRAV22, TRAJ29)
CAVTRNAGNTPLVF

SEQ ID NO: 560178 - protein, 13 aa, Homo sapiens
  CDR3 for beta chain variable domain of TCR clone 280089 (TRBV18, TRBJ1-1)
CASSPETKPEAFF

SEQ ID NO: 560179 - protein, 12 aa, Homo sapiens
  CDR3 for alpha chain variable domain of TCR clone 280090 (TRAV12-3, TRAJ17)
CAMTLTGNKLTF

SEQ ID NO: 560180 - protein, 14 aa, Homo sapiens
  CDR3 for beta chain variable domain of TCR clone 280090 (TRBV25-1, TRBJ2-7)
CASSEYGRGYEQYF

SEQ ID NO: 560181 - protein, 14 aa, Homo sapiens
  CDR3 for alpha chain variable domain of TCR clone 280091 (TRAV8-6, TRAJ9)
CAVSSYTGGFKTIF

SEQ ID NO: 560182 - protein, 15 aa, Homo sapiens
  CDR3 for beta chain variable domain of TCR clone 280091 (TRBV2, TRBJ1-2)
RASSESRTVNYGYTF

SEQ ID NO: 560183 - protein, 15 aa, Homo sapiens
  CDR3 for alpha chain variable domain of TCR clone 280092 (TRAV12-1, TRAJ45)
CVALSGGGGADGLTF

SEQ ID NO: 560184 - protein, 12 aa, Homo sapiens
  CDR3 for beta chain variable domain of TCR clone 280092 (TRBV12-5, TRBJ2-5)
CASGQGVETQYF

SEQ ID NO: 560185 - protein, 12 aa, Homo sapiens
  CDR3 for alpha chain variable domain of TCR clone 280093 (TRAV4, TRAJ26)
CLVGDYGQNFVF

SEQ ID NO: 560186 - protein, 15 aa, Homo sapiens
  CDR3 for beta chain variable domain of TCR clone 280093 (TRBV6-1, TRBJ2-2)
CASSERQGLTGELFF

SEQ ID NO: 560187 - protein, 13 aa, Homo sapiens
  CDR3 for alpha chain variable domain of TCR clone 280094 (TRAV27, TRAJ41)
CAGEGNSGYALNF

SEQ ID NO: 560188 - protein, 13 aa, Homo sapiens
  CDR3 for beta chain variable domain of TCR clone 280094 (TRBV19, TRBJ2-7)
CASSPRQSYEQYF

SEQ ID NO: 560189 - protein, 15 aa, Homo sapiens
  CDR3 for alpha chain variable domain of TCR clone 280095 (TRAV17, TRAJ37)
CATDHGSSNTGKLIF

SEQ ID NO: 560190 - protein, 15 aa, Homo sapiens
  CDR3 for beta chain variable domain of TCR clone 280095 (TRBV11-3, TRBJ2-3)
CASLKDGREGDTQYF

SEQ ID NO: 560191 - protein, 12 aa, Homo sapiens
  CDR3 for alpha chain variable domain of TCR clone 280096 (TRAV12-3, TRAJ17)
CAMTLTGIKLTF

SEQ ID NO: 560192 - protein, 16 aa, Homo sapiens
  CDR3 for beta chain variable domain of TCR clone 280096 (TRBV13, TRBJ2-2)
CASSPRTGENTGELFF

SEQ ID NO: 560193 - protein, 17 aa, Homo sapiens
  CDR3 for alpha chain variable domain of TCR clone 280097 (TRAV3, TRAJ38)
CAVRDGLNAGNNRKLIW

SEQ ID NO: 560194 - protein, 13 aa, Homo sapiens
  CDR3 for beta chain variable domain of TCR clone 280097 (TRBV23-1, TRBJ1-4)
CASRGKFNEKLFF

SEQ ID NO: 560195 - protein, 12 aa, Homo sapiens
  CDR3 for alpha chain variable domain of TCR clone 280098 (TRAV12-3, TRAJ17)
YAMTLTGNKLTF

SEQ ID NO: 560196 - protein, 16 aa, Homo sapiens
  CDR3 for beta chain variable domain of TCR clone 280098 (TRBV4-2, TRBJ1-1)
CASSQAGFGMNTEAFF

SEQ ID NO: 560197 - protein, 14 aa, Homo sapiens
  CDR3 for alpha chain variable domain of TCR clone 280099 (TRAV9-2, TRAJ57)
CALSGQGGSEKLVF

SEQ ID NO: 560198 - protein, 13 aa, Homo sapiens
  CDR3 for beta chain variable domain of TCR clone 280099 (TRBV19, TRBJ1-2)
CASSVPGQDGYTF

SEQ ID NO: 560199 - protein, 12 aa, Homo sapiens
  CDR3 for alpha chain variable domain of TCR clone 280100 (TRAV12-3, TRAJ17)
CAMTLTGNKLTF

SEQ ID NO: 560200 - protein, 11 aa, Homo sapiens
  CDR3 for beta chain variable domain of TCR clone 280100 (TRBV7-9, TRBJ2-5)
CASSLSATQYF

SEQ ID NO: 560201 - protein, 12 aa, Homo sapiens
  CDR3 for alpha chain variable domain of TCR clone 280101 (TRAV13-1, TRAJ21)
CAAKEGFNKFYF

SEQ ID NO: 560202 - protein, 13 aa, Homo sapiens
  CDR3 for beta chain variable domain of TCR clone 280101 (TRBV18, TRBJ2-3)
CASSTGRTDTQYF

SEQ ID NO: 560203 - protein, 18 aa, Homo sapiens
  CDR3 for alpha chain variable domain of TCR clone 280102 (TRAV21, TRAJ52)
CAVRPSPAGGTSYVKLTF

SEQ ID NO: 560204 - protein, 17 aa, Homo sapiens
  CDR3 for beta chain variable domain of TCR clone 280102 (TRBV13, TRBJ2-3)
CASSLPRVAGGRNTQYF

SEQ ID NO: 560205 - protein, 16 aa, Homo sapiens
  CDR3 for alpha chain variable domain of TCR clone 280103 (TRAV3, TRAJ10)
CAVRDRLTGGGNKLTF

SEQ ID NO: 560206 - protein, 14 aa, Homo sapiens
  CDR3 for beta chain variable domain of TCR clone 280103 (TRBV11-1, TRBJ2-7)
CASSFRQGSYEQYF

SEQ ID NO: 560207 - protein, 14 aa, Homo sapiens
  CDR3 for alpha chain variable domain of TCR clone 280104 (TRAV12-2, TRAJ4)
CAVLIGGGYNKLIF

SEQ ID NO: 560208 - protein, 14 aa, Homo sapiens
  CDR3 for beta chain variable domain of TCR clone 280104 (TRBV7-6, TRBJ2-3)
CASSLGTVTDTQYF

SEQ ID NO: 560209 - protein, 16 aa, Homo sapiens
  CDR3 for alpha chain variable domain of TCR clone 280105 (TRAV30, TRAJ24)
CGTEIVDADSWGKFQF

SEQ ID NO: 560210 - protein, 11 aa, Homo sapiens
  CDR3 for beta chain variable domain of TCR clone 280105 (TRBV7-6, TRBJ2-1)
CASSNYGEQFF

SEQ ID NO: 560211 - protein, 13 aa, Homo sapiens
  CDR3 for alpha chain variable domain of TCR clone 280106 (TRAV16, TRAJ37)
CALGSGNTGKLIF

SEQ ID NO: 560212 - protein, 14 aa, Homo sapiens
  CDR3 for beta chain variable domain of TCR clone 280106 (TRBV7-2, TRBJ2-7)
CASSPKTSFYEQYF

SEQ ID NO: 560213 - protein, 14 aa, Homo sapiens
  CDR3 for alpha chain variable domain of TCR clone 280107 (TRAV12-2, TRAJ40)
CAVKIPSGPYKYIF

SEQ ID NO: 560214 - protein, 12 aa, Homo sapiens
  CDR3 for beta chain variable domain of TCR clone 280107 (TRBV11-2, TRBJ2-2)
CASSLGGGELFF

SEQ ID NO: 560215 - protein, 15 aa, Homo sapiens
  CDR3 for alpha chain variable domain of TCR clone 280108 (TRAV2, TRAJ32)
CAVANYGGATNKLIF

SEQ ID NO: 560216 - protein, 15 aa, Homo sapiens
  CDR3 for beta chain variable domain of TCR clone 280108 (TRBV5-1, TRBJ2-5)
CASSFAGVGEETQYF

SEQ ID NO: 560217 - protein, 13 aa, Homo sapiens
  CDR3 for alpha chain variable domain of TCR clone 280109 (TRAV12-1, TRAJ11)
CVVTRGGYSTLTF

SEQ ID NO: 560218 - protein, 13 aa, Homo sapiens
  CDR3 for beta chain variable domain of TCR clone 280109 (TRBV20-1, TRBJ1-2)
CSASDQGAYGYTF

SEQ ID NO: 560219 - protein, 17 aa, Homo sapiens
  CDR3 for alpha chain variable domain of TCR clone 280110 (TRAV16, TRAJ42)
CALSPKLYGGSQGNLIF

SEQ ID NO: 560220 - protein, 13 aa, Homo sapiens
  CDR3 for beta chain variable domain of TCR clone 280110 (TRBV19, TRBJ1-5)
CASSTRRHQPQHF

SEQ ID NO: 560221 - protein, 15 aa, Homo sapiens
  CDR3 for alpha chain variable domain of TCR clone 280111 (TRAV12-2, TRAJ9)
CAVNNERTRGFKTIF

SEQ ID NO: 560222 - protein, 14 aa, Homo sapiens
  CDR3 for beta chain variable domain of TCR clone 280111 (TRBV4-1, TRBJ1-4)
CASSQERKNEKLFF

SEQ ID NO: 560223 - protein, 12 aa, Homo sapiens
  CDR3 for alpha chain variable domain of TCR clone 280112 (TRAV38-1, TRAJ20)
CAFIWNDYKLSF

SEQ ID NO: 560224 - protein, 17 aa, Homo sapiens
  CDR3 for beta chain variable domain of TCR clone 280112 (TRBV7-8, TRBJ2-6)
CASSAGTGGAGANVLTF

SEQ ID NO: 560225 - protein, 11 aa, Homo sapiens
  CDR3 for alpha chain variable domain of TCR clone 280113 (TRAV23/DV6, )
CAATALIPVIQ

SEQ ID NO: 560226 - protein, 16 aa, Homo sapiens
  CDR3 for beta chain variable domain of TCR clone 280113 (TRBV10-3, TRBJ2-7)
CAISPRGQEQTYEQYF

SEQ ID NO: 560227 - protein, 14 aa, Homo sapiens
  CDR3 for alpha chain variable domain of TCR clone 280114 (TRAV12-3, TRAJ42)
CAMNYGGSQGNLIF

SEQ ID NO: 560228 - protein, 15 aa, Homo sapiens
  CDR3 for beta chain variable domain of TCR clone 280114 (TRBV5-7, TRBJ1-5)
CASSYGKVWGQPQHF

SEQ ID NO: 560229 - protein, 14 aa, Homo sapiens
  CDR3 for alpha chain variable domain of TCR clone 280115 (TRAV27, TRAJ49)
CARRPEGTGNQFYF

SEQ ID NO: 560230 - protein, 15 aa, Homo sapiens
  CDR3 for beta chain variable domain of TCR clone 280115 (TRBV19, TRBJ2-1)
CASSIQATSYNEQFF

SEQ ID NO: 560231 - protein, 13 aa, Homo sapiens
  CDR3 for alpha chain variable domain of TCR clone 280116 (TRAV8-1, TRAJ34)
CAVRPYNTDKLIF

SEQ ID NO: 560232 - protein, 11 aa, Homo sapiens
  CDR3 for beta chain variable domain of TCR clone 280116 (TRBV29-1, TRBJ2-5)
CSEDRTGTQYF

SEQ ID NO: 560233 - protein, 10 aa, Homo sapiens
  CDR3 for alpha chain variable domain of TCR clone 280117 (TRAV20, TRAJ22)
CAAPARQLTF

SEQ ID NO: 560234 - protein, 16 aa, Homo sapiens
  CDR3 for beta chain variable domain of TCR clone 280117 (TRBV7-3, TRBJ2-2)
CASSLKRGTLSGELFF

SEQ ID NO: 560235 - protein, 12 aa, Homo sapiens
  CDR3 for alpha chain variable domain of TCR clone 280118 (TRAV12-3, TRAJ17)
CAMTLTGKKLTF

SEQ ID NO: 560236 - protein, 16 aa, Homo sapiens
  CDR3 for beta chain variable domain of TCR clone 280118 (TRBV12-4, TRBJ2-5)
CASSFFVRGRQETQYF

SEQ ID NO: 560237 - protein, 14 aa, Homo sapiens
  CDR3 for alpha chain variable domain of TCR clone 280119 (TRAV12-1, TRAJ46)
CVVTAKSSGDKLTF

SEQ ID NO: 560238 - protein, 16 aa, Homo sapiens
  CDR3 for beta chain variable domain of TCR clone 280119 (TRBV4-1, TRBJ2-3)
RQQPRSGGGPLDTQYF

SEQ ID NO: 560239 - protein, 14 aa, Homo sapiens
  CDR3 for alpha chain variable domain of TCR clone 280120 (TRAV12-3, TRAJ10)
SHLPLRGGGNKLTF

SEQ ID NO: 560240 - protein, 15 aa, Homo sapiens
  CDR3 for beta chain variable domain of TCR clone 280120 (TRBV27, TRBJ1-5)
CASSLGTGFDQPQHF

SEQ ID NO: 560241 - protein, 15 aa, Homo sapiens
  CDR3 for alpha chain variable domain of TCR clone 280121 (TRAV2, TRAJ15)
CAVEDREQAGTAVIF

SEQ ID NO: 560242 - protein, 13 aa, Homo sapiens
  CDR3 for beta chain variable domain of TCR clone 280121 (TRBV10-2, TRBJ2-3)
CASSESGDHTQYF

SEQ ID NO: 560243 - protein, 17 aa, Homo sapiens
  CDR3 for alpha chain variable domain of TCR clone 280122 (TRAV3, TRAJ6)
CAVRDGPRAGGSYIPTF

SEQ ID NO: 560244 - protein, 14 aa, Homo sapiens
  CDR3 for beta chain variable domain of TCR clone 280122 (TRBV7-9, TRBJ2-7)
CASSPRTGTYEQYF

SEQ ID NO: 560245 - protein, 18 aa, Homo sapiens
  CDR3 for alpha chain variable domain of TCR clone 280123 (TRAV13-1, TRAJ52)
CAAKNPNAGGTSYGKLTF

SEQ ID NO: 560246 - protein, 15 aa, Homo sapiens
  CDR3 for beta chain variable domain of TCR clone 280123 (TRBV9, TRBJ1-6)
CASSVAGTGYSPLHF

SEQ ID NO: 560247 - protein, 12 aa, Homo sapiens
  CDR3 for alpha chain variable domain of TCR clone 280124 (TRAV8-3, TRAJ20)
CAVGANDYKLSF

SEQ ID NO: 560248 - protein, 13 aa, Homo sapiens
  CDR3 for beta chain variable domain of TCR clone 280124 (TRBV11-2, TRBJ2-5)
CASSFSSQETQYF

SEQ ID NO: 560249 - protein, 13 aa, Homo sapiens
  CDR3 for alpha chain variable domain of TCR clone 280125 (TRAV12-3, TRAJ33)
CAMSVNSNYQLIW

SEQ ID NO: 560250 - protein, 13 aa, Homo sapiens
  CDR3 for beta chain variable domain of TCR clone 280125 (TRBV20-1, TRBJ1-1)
CSAGTVGNTEAFF

SEQ ID NO: 560251 - protein, 23 aa, Homo sapiens
  CDR3 for alpha chain variable domain of TCR clone 280126 (TRAV12-2, TRAJ22)
CAVSFRVHPGPPIVSGSARQLTL

SEQ ID NO: 560252 - protein, 13 aa, Homo sapiens
  CDR3 for beta chain variable domain of TCR clone 280126 (TRBV12-4, TRBJ1-2)
CASSLDSNYGYTF

SEQ ID NO: 560253 - protein, 13 aa, Homo sapiens
  CDR3 for alpha chain variable domain of TCR clone 280127 (TRAV3, TRAJ27)
CAVRPLGAGKSTF

SEQ ID NO: 560254 - protein, 15 aa, Homo sapiens
  CDR3 for beta chain variable domain of TCR clone 280127 (TRBV9, TRBJ1-6)
CASSVAGTGDSPPHF

SEQ ID NO: 560255 - protein, 15 aa, Homo sapiens
  CDR3 for alpha chain variable domain of TCR clone 280128 (TRAV13-1, TRAJ17)
CAASIERAAGNKLTF

SEQ ID NO: 560256 - protein, 13 aa, Homo sapiens
  CDR3 for beta chain variable domain of TCR clone 280128 (TRBV10-3, TRBJ2-7)
CAAKLAVNYEQYF

SEQ ID NO: 560257 - protein, 15 aa, Homo sapiens
  CDR3 for alpha chain variable domain of TCR clone 280129 (TRAV16, TRAJ16)
CALQGGGSDGQKLLF

SEQ ID NO: 560258 - protein, 15 aa, Homo sapiens
  CDR3 for beta chain variable domain of TCR clone 280129 (TRBV20-1, TRBJ2-7)
CSARDRVAGMDEQYF

SEQ ID NO: 560259 - protein, 13 aa, Homo sapiens
  CDR3 for alpha chain variable domain of TCR clone 280130 (TRAV35, TRAJ42)
CAGFPGSQGNLIF

SEQ ID NO: 560260 - protein, 14 aa, Homo sapiens
  CDR3 for beta chain variable domain of TCR clone 280130 (TRBV3-1, TRBJ2-7)
CASSHASGTYEQYF

SEQ ID NO: 560261 - protein, 15 aa, Homo sapiens
  CDR3 for alpha chain variable domain of TCR clone 280131 (TRAV3, TRAJ40)
CAVRDVTSGTYKYIF

SEQ ID NO: 560262 - protein, 15 aa, Homo sapiens
  CDR3 for beta chain variable domain of TCR clone 280131 (TRBV5-1, TRBJ1-1)
CASSSTTGTNTEAFF

SEQ ID NO: 560263 - protein, 14 aa, Homo sapiens
  CDR3 for alpha chain variable domain of TCR clone 280132 (TRAV26-2, TRAJ32)
CILFRGGATNKIIF

SEQ ID NO: 560264 - protein, 15 aa, Homo sapiens
  CDR3 for beta chain variable domain of TCR clone 280132 (TRBV2, TRBJ2-2)
CASSGFGAGTGELFF

SEQ ID NO: 560265 - protein, 15 aa, Homo sapiens
  CDR3 for alpha chain variable domain of TCR clone 280133 (TRAV35, TRAJ58)
CAGRRQETSGSRLTF

SEQ ID NO: 560266 - protein, 13 aa, Homo sapiens
  CDR3 for beta chain variable domain of TCR clone 280133 (TRBV20-1, TRBJ1-1)
CSAPLGGGTEAFF

SEQ ID NO: 560267 - protein, 18 aa, Homo sapiens
  CDR3 for alpha chain variable domain of TCR clone 280134 (TRAV26-1, TRAJ37)
CIVRVDMHGSSNTGKLIF

SEQ ID NO: 560268 - protein, 16 aa, Homo sapiens
  CDR3 for beta chain variable domain of TCR clone 280134 (TRBV4-2, TRBJ2-1)
CASSHDDNPEGAQEFF

SEQ ID NO: 560269 - protein, 12 aa, Homo sapiens
  CDR3 for alpha chain variable domain of TCR clone 280135 (TRAV38-2/DV8, TRAJ57)
CAWKGGSEKLVF

SEQ ID NO: 560270 - protein, 13 aa, Homo sapiens
  CDR3 for beta chain variable domain of TCR clone 280135 (TRBV5-1, TRBJ1-5)
CASSLAQEQPQHF

SEQ ID NO: 560271 - protein, 13 aa, Homo sapiens
  CDR3 for alpha chain variable domain of TCR clone 280136 (TRAV27, TRAJ41)
CAGEGNSGYALNV

SEQ ID NO: 560272 - protein, 13 aa, Homo sapiens
  CDR3 for beta chain variable domain of TCR clone 280136 (TRBV19, TRBJ1-2)
CASSVPGQDGYTF

SEQ ID NO: 560273 - protein, 14 aa, Homo sapiens
  CDR3 for alpha chain variable domain of TCR clone 280137 (TRAV13-1, TRAJ35)
CAASKGGFGSGLHC

SEQ ID NO: 560274 - protein, 13 aa, Homo sapiens
  CDR3 for beta chain variable domain of TCR clone 280137 (TRBV7-3, TRBJ1-1)
CASSQDWGAEALF

SEQ ID NO: 560275 - protein, 12 aa, Homo sapiens
  CDR3 for alpha chain variable domain of TCR clone 280138 (TRAV13-1, TRAJ34)
CAASKGTDKLIF

SEQ ID NO: 560276 - protein, 13 aa, Homo sapiens
  CDR3 for beta chain variable domain of TCR clone 280138 (TRBV4-2, TRBJ1-1)
CASSQAGNTEAFF

SEQ ID NO: 560277 - protein, 13 aa, Homo sapiens
  CDR3 for alpha chain variable domain of TCR clone 280139 (TRAV8-3, TRAJ40)
CAVITSGTYKYIF

SEQ ID NO: 560278 - protein, 17 aa, Homo sapiens
  CDR3 for beta chain variable domain of TCR clone 280139 (TRBV24-1, TRBJ2-1)
CATSDVSTSGTYNEQFF

SEQ ID NO: 560279 - protein, 15 aa, Homo sapiens
  CDR3 for alpha chain variable domain of TCR clone 280140 (TRAV13-1, TRAJ12)
CAATTRWIAAINLSS

SEQ ID NO: 560280 - protein, 11 aa, Homo sapiens
  CDR3 for beta chain variable domain of TCR clone 280140 (TRBV20-1, TRBJ2-1)
CSLSSGSEQFF

SEQ ID NO: 560281 - protein, 15 aa, Homo sapiens
  CDR3 for alpha chain variable domain of TCR clone 280141 (TRAV13-2, TRAJ5)
CAENPNWTGRRALTF

SEQ ID NO: 560282 - protein, 16 aa, Homo sapiens
  CDR3 for beta chain variable domain of TCR clone 280141 (TRBV7-9, TRBJ1-3)
CASSQTSGLRMGTIYF

SEQ ID NO: 560283 - protein, 14 aa, Homo sapiens
  CDR3 for alpha chain variable domain of TCR clone 280142 (TRAV12-2, TRAJ53)
CAVKGGGSNNKLAF

SEQ ID NO: 560284 - protein, 14 aa, Homo sapiens
  CDR3 for beta chain variable domain of TCR clone 280142 (TRBV7-7, TRBJ2-2)
CATRQDSDTGELFF

SEQ ID NO: 560285 - protein, 15 aa, Homo sapiens
  CDR3 for alpha chain variable domain of TCR clone 280143 (TRAV8-4, TRAJ37)
CAVTYGSSNTDKLIF

SEQ ID NO: 560286 - protein, 13 aa, Homo sapiens
  CDR3 for beta chain variable domain of TCR clone 280143 (TRBV12-4, TRBJ2-5)
CASSLGGSRTQYF

SEQ ID NO: 560287 - protein, 12 aa, Homo sapiens
  CDR3 for alpha chain variable domain of TCR clone 280144 (TRAV12-1, TRAJ34)
CVVTFNTDQPIF

SEQ ID NO: 560288 - protein, 14 aa, Homo sapiens
  CDR3 for beta chain variable domain of TCR clone 280144 (TRBV19, TRBJ1-1)
CASLRTGLNTEAFF

SEQ ID NO: 560289 - protein, 14 aa, Homo sapiens
  CDR3 for alpha chain variable domain of TCR clone 280145 (TRAV12-1, TRAJ12)
CVVISMDSSYKSIF

SEQ ID NO: 560290 - protein, 13 aa, Homo sapiens
  CDR3 for beta chain variable domain of TCR clone 280145 (TRBV20-1, TRBJ2-7)
CSATHTSGYEQYF

SEQ ID NO: 560291 - protein, 15 aa, Homo sapiens
  CDR3 for alpha chain variable domain of TCR clone 280146 (TRAV4, TRAJ39)
CLVGPNNNAGNMLTF

SEQ ID NO: 560292 - protein, 12 aa, Homo sapiens
  CDR3 for beta chain variable domain of TCR clone 280146 (TRBV12-4, TRBJ2-7)
CASNPGRGEQYF

SEQ ID NO: 560293 - protein, 18 aa, Homo sapiens
  CDR3 for alpha chain variable domain of TCR clone 280147 (TRAV26-2, TRAJ45)
CILIVDKYSGGGADGLTF

SEQ ID NO: 560294 - protein, 12 aa, Homo sapiens
  CDR3 for beta chain variable domain of TCR clone 280147 (TRBV29-1, TRBJ2-3)
CSVTGGADTQYF

SEQ ID NO: 560295 - protein, 14 aa, Homo sapiens
  CDR3 for alpha chain variable domain of TCR clone 280148 (TRAV12-1, TRAJ30)
CVPTGTNRDDKIIF

SEQ ID NO: 560296 - protein, 15 aa, Homo sapiens
  CDR3 for beta chain variable domain of TCR clone 280148 (TRBV7-2, TRBJ1-3)
CASSPGGADGNTIYF

SEQ ID NO: 560297 - protein, 12 aa, Homo sapiens
  CDR3 for alpha chain variable domain of TCR clone 280149 (TRAV13-1, TRAJ21)
CAAKEGFNKFYF

SEQ ID NO: 560298 - protein, 12 aa, Homo sapiens
  CDR3 for beta chain variable domain of TCR clone 280149 (TRBV7-3, TRBJ1-1)
CASSHGGTEAFF

SEQ ID NO: 560299 - protein, 15 aa, Homo sapiens
  CDR3 for alpha chain variable domain of TCR clone 280150 (TRAV3, TRAJ3)
RAVRDRDSSASKIIF

SEQ ID NO: 560300 - protein, 16 aa, Homo sapiens
  CDR3 for beta chain variable domain of TCR clone 280150 (TRBV7-2, TRBJ2-7)
CASSLEAGGPWYEQYF

SEQ ID NO: 560301 - protein, 13 aa, Homo sapiens
  CDR3 for alpha chain variable domain of TCR clone 280151 (TRAV30, TRAJ31)
CGTETRNNARLMF

SEQ ID NO: 560302 - protein, 13 aa, Homo sapiens
  CDR3 for beta chain variable domain of TCR clone 280151 (TRBV7-9, TRBJ1-2)
CASSLKQNYGYTF

SEQ ID NO: 560303 - protein, 15 aa, Homo sapiens
  CDR3 for alpha chain variable domain of TCR clone 280152 (TRAV21, TRAJ24)
CAARSSTDSWGKLQF

SEQ ID NO: 560304 - protein, 12 aa, Homo sapiens
  CDR3 for beta chain variable domain of TCR clone 280152 (TRBV12-4, TRBJ2-3)
CASSTLPDTQYF

SEQ ID NO: 560305 - protein, 14 aa, Homo sapiens
  CDR3 for alpha chain variable domain of TCR clone 280153 (TRAV2, TRAJ37)
CAVDFTSNTGKLIF

SEQ ID NO: 560306 - protein, 14 aa, Homo sapiens
  CDR3 for beta chain variable domain of TCR clone 280153 (TRBV5-5, TRBJ2-2)
CASSLLGDTGELFF

SEQ ID NO: 560307 - protein, 14 aa, Homo sapiens
  CDR3 for alpha chain variable domain of TCR clone 280154 (TRAV27, TRAJ45)
CAGTQEEVLTDLPL

SEQ ID NO: 560308 - protein, 14 aa, Homo sapiens
  CDR3 for beta chain variable domain of TCR clone 280154 (TRBV7-9, TRBJ2-1)
CASSSMVGFGEQFF

SEQ ID NO: 560309 - protein, 15 aa, Homo sapiens
  CDR3 for alpha chain variable domain of TCR clone 280155 (TRAV12-1, TRAJ44)
CVVFVNTGTAGKLTF

SEQ ID NO: 560310 - protein, 17 aa, Homo sapiens
  CDR3 for beta chain variable domain of TCR clone 280155 (TRBV7-8, TRBJ2-6)
CASSAGTGGAGANVLSF

SEQ ID NO: 560311 - protein, 14 aa, Homo sapiens
  CDR3 for alpha chain variable domain of TCR clone 280156 (TRAV12-2, TRAJ17)
CAVLFKAAGNKLTF

SEQ ID NO: 560312 - protein, 15 aa, Homo sapiens
  CDR3 for beta chain variable domain of TCR clone 280156 (TRBV7-9, TRBJ2-7)
GASSPGGGLTYEQYF

SEQ ID NO: 560313 - protein, 10 aa, Homo sapiens
  CDR3 for alpha chain variable domain of TCR clone 280157 (TRAV8-6, TRAJ34)
CAVNTDKLIF

SEQ ID NO: 560314 - protein, 15 aa, Homo sapiens
  CDR3 for beta chain variable domain of TCR clone 280157 (TRBV6-3, TRBJ2-7)
CASSSPGTVFYEQYF

SEQ ID NO: 560315 - protein, 11 aa, Homo sapiens
  CDR3 for alpha chain variable domain of TCR clone 280158 (TRAV12-3, TRAJ27)
CAMANAGKSTF

SEQ ID NO: 560316 - protein, 17 aa, Homo sapiens
  CDR3 for beta chain variable domain of TCR clone 280158 (TRBV7-3, TRBJ2-3)
CASSLMKRMRGADTQYF

SEQ ID NO: 560317 - protein, 12 aa, Homo sapiens
  CDR3 for alpha chain variable domain of TCR clone 280159 (TRAV35, TRAJ40)
CAGRAGTYKYIF

SEQ ID NO: 560318 - protein, 15 aa, Homo sapiens
  CDR3 for beta chain variable domain of TCR clone 280159 (TRBV3-1, TRBJ1-2)
CASSPTRLPEGGYTF

SEQ ID NO: 560319 - protein, 13 aa, Homo sapiens
  CDR3 for alpha chain variable domain of TCR clone 280160 (TRAV24, TRAJ42)
CAFSTGSQGNLIF

SEQ ID NO: 560320 - protein, 13 aa, Homo sapiens
  CDR3 for beta chain variable domain of TCR clone 280160 (TRBV24-1, TRBJ2-2)
CATSDWSTGELFF

SEQ ID NO: 560321 - protein, 16 aa, Homo sapiens
  CDR3 for alpha chain variable domain of TCR clone 280161 (TRAV13-2, TRAJ28)
CAEKSYSGAGSYQLTF

SEQ ID NO: 560322 - protein, 16 aa, Homo sapiens
  CDR3 for beta chain variable domain of TCR clone 280161 (TRBV19, TRBJ2-1)
CASSNAGPSSYNEQFF

SEQ ID NO: 560323 - protein, 14 aa, Homo sapiens
  CDR3 for alpha chain variable domain of TCR clone 280162 (TRAV17, TRAJ6)
YATDASGGSYIPTF

SEQ ID NO: 560324 - protein, 19 aa, Homo sapiens
  CDR3 for beta chain variable domain of TCR clone 280162 (TRBV4-3, TRBJ2-7)
CASSQEFIGWQVTPYEQYF

SEQ ID NO: 560325 - protein, 14 aa, Homo sapiens
  CDR3 for alpha chain variable domain of TCR clone 280163 (TRAV12-2, TRAJ45)
CAVTIGGGADGLTF

SEQ ID NO: 560326 - protein, 13 aa, Homo sapiens
  CDR3 for beta chain variable domain of TCR clone 280163 (TRBV19, TRBJ2-2)
CASSIWSTGDLFF

SEQ ID NO: 560327 - protein, 13 aa, Homo sapiens
  CDR3 for alpha chain variable domain of TCR clone 280164 (TRAV17, TRAJ34)
CATDLYNTDKLIF

SEQ ID NO: 560328 - protein, 11 aa, Homo sapiens
  CDR3 for beta chain variable domain of TCR clone 280164 (TRBV11-2, TRBJ2-2)
CSSLGGGELFF

SEQ ID NO: 560329 - protein, 12 aa, Homo sapiens
  CDR3 for alpha chain variable domain of TCR clone 280165 (TRAV26-2, TRAJ21)
CILKGNFNKFSF

SEQ ID NO: 560330 - protein, 14 aa, Homo sapiens
  CDR3 for beta chain variable domain of TCR clone 280165 (TRBV12-4, TRBJ1-1)
CASSLGTGGTEAFF

SEQ ID NO: 560331 - protein, 16 aa, Homo sapiens
  CDR3 for alpha chain variable domain of TCR clone 280166 (TRAV26-1, TRAJ23)
CIVRVAHSNQGGKLIF

SEQ ID NO: 560332 - protein, 16 aa, Homo sapiens
  CDR3 for beta chain variable domain of TCR clone 280166 (TRBV10-3, TRBJ2-1)
CAISGVGDGGGGEQFF

SEQ ID NO: 560333 - protein, 13 aa, Homo sapiens
  CDR3 for alpha chain variable domain of TCR clone 280167 (TRAV17, TRAJ54)
CAAGIQGAQKLVV

SEQ ID NO: 560334 - protein, 14 aa, Homo sapiens
  CDR3 for beta chain variable domain of TCR clone 280167 (TRBV11-2, TRBJ1-2)
CASSLGTANYGYTF

SEQ ID NO: 560335 - protein, 14 aa, Homo sapiens
  CDR3 for alpha chain variable domain of TCR clone 280168 (TRAV26-1, TRAJ21)
CIVRPPYNFNKFYF

SEQ ID NO: 560336 - protein, 13 aa, Homo sapiens
  CDR3 for beta chain variable domain of TCR clone 280168 (TRBV7-3, TRBJ1-1)
CASSQDWGAEAFF

SEQ ID NO: 560337 - protein, 14 aa, Homo sapiens
  CDR3 for alpha chain variable domain of TCR clone 280169 (TRAV8-4, TRAJ43)
CAVSDPRNNNDMSF

SEQ ID NO: 560338 - protein, 15 aa, Homo sapiens
  CDR3 for beta chain variable domain of TCR clone 280169 (TRBV4-2, TRBJ1-2)
CASSQRTGGRDGYTF

SEQ ID NO: 560339 - protein, 16 aa, Homo sapiens
  CDR3 for alpha chain variable domain of TCR clone 280170 (TRAV30, TRAJ24)
CGTEIVDADSWGKFKF

SEQ ID NO: 560340 - protein, 14 aa, Homo sapiens
  CDR3 for beta chain variable domain of TCR clone 280170 (TRBV18, TRBJ2-7)
CASSPRGGAYEQYF

SEQ ID NO: 560341 - protein, 14 aa, Homo sapiens
  CDR3 for alpha chain variable domain of TCR clone 280171 (TRAV1-2, TRAJ16)
GAVNRFSDGQKLLF

SEQ ID NO: 560342 - protein, 18 aa, Homo sapiens
  CDR3 for beta chain variable domain of TCR clone 280171 (TRBV20-1, TRBJ2-3)
CSASGLAGGPGTTDTQYF

SEQ ID NO: 560343 - protein, 13 aa, Homo sapiens
  CDR3 for alpha chain variable domain of TCR clone 280172 (TRAV17, TRAJ9)
CATDGTGGFKTIF

SEQ ID NO: 560344 - protein, 14 aa, Homo sapiens
  CDR3 for beta chain variable domain of TCR clone 280172 (TRBV11-2, TRBJ2-5)
CASSRTGGIETQYF

SEQ ID NO: 560345 - protein, 11 aa, Homo sapiens
  CDR3 for alpha chain variable domain of TCR clone 280173 (TRAV1-1, TRAJ20)
CAVRDRTKLSF

SEQ ID NO: 560346 - protein, 18 aa, Homo sapiens
  CDR3 for beta chain variable domain of TCR clone 280173 (TRBV20-1, TRBJ2-6)
CSAETTPTHGSGANVLTF

SEQ ID NO: 560347 - protein, 13 aa, Homo sapiens
  CDR3 for alpha chain variable domain of TCR clone 280174 (TRAV12-3, TRAJ9)
CAMKNTGGFKTIF

SEQ ID NO: 560348 - protein, 14 aa, Homo sapiens
  CDR3 for beta chain variable domain of TCR clone 280174 (TRBV11-2, TRBJ2-7)
CASSSTGEGYEQYF

SEQ ID NO: 560349 - protein, 13 aa, Homo sapiens
  CDR3 for alpha chain variable domain of TCR clone 280175 (TRAV6, TRAJ16)
CALDDSDGQKLLF

SEQ ID NO: 560350 - protein, 14 aa, Homo sapiens
  CDR3 for beta chain variable domain of TCR clone 280175 (TRBV4-1, TRBJ2-2)
CASSQAVNTGELFF

SEQ ID NO: 560351 - protein, 12 aa, Homo sapiens
  CDR3 for alpha chain variable domain of TCR clone 280176 (TRAV21, TRAJ11)
CAATAGYSTLTF

SEQ ID NO: 560352 - protein, 13 aa, Homo sapiens
  CDR3 for beta chain variable domain of TCR clone 280176 (TRBV20-1, TRBJ2-7)
QCPELAGVGEQYF

SEQ ID NO: 560353 - protein, 13 aa, Homo sapiens
  CDR3 for alpha chain variable domain of TCR clone 280177 (TRAV8-6, TRAJ8)
CAVSNTGFQKLVF

SEQ ID NO: 560354 - protein, 15 aa, Homo sapiens
  CDR3 for beta chain variable domain of TCR clone 280177 (TRBV7-9, TRBJ1-6)
CASSSPGRGNSPLHF

SEQ ID NO: 560355 - protein, 11 aa, Homo sapiens
  CDR3 for alpha chain variable domain of TCR clone 280178 (TRAV21, TRAJ31)
CAVRNNARLMF

SEQ ID NO: 560356 - protein, 13 aa, Homo sapiens
  CDR3 for beta chain variable domain of TCR clone 280178 (TRBV12-5, TRBJ2-3)
CASGDRQSDTQYF

SEQ ID NO: 560357 - protein, 15 aa, Homo sapiens
  CDR3 for alpha chain variable domain of TCR clone 280179 (TRAV17, TRAJ22)
CATVAPSGSERQLTF

SEQ ID NO: 560358 - protein, 14 aa, Homo sapiens
  CDR3 for beta chain variable domain of TCR clone 280179 (TRBV20-1, TRBJ1-5)
CSARDGGSGQPQHF

SEQ ID NO: 560359 - protein, 17 aa, Homo sapiens
  CDR3 for alpha chain variable domain of TCR clone 280180 (TRAV13-1, TRAJ52)
CGAGRNAGGTSYGKLTF

SEQ ID NO: 560360 - protein, 13 aa, Homo sapiens
  CDR3 for beta chain variable domain of TCR clone 280180 (TRBV7-2, TRBJ1-1)
CASNLKGAKVAFF

SEQ ID NO: 560361 - protein, 14 aa, Homo sapiens
  CDR3 for alpha chain variable domain of TCR clone 280181 (TRAV13-1, TRAJ20)
CAARPGSTDYKLSF

SEQ ID NO: 560362 - protein, 13 aa, Homo sapiens
  CDR3 for beta chain variable domain of TCR clone 280181 (TRBV20-1, TRBJ1-1)
CSAPPGGHTEAFF

SEQ ID NO: 560363 - protein, 15 aa, Homo sapiens
  CDR3 for alpha chain variable domain of TCR clone 280182 (TRAV12-3, TRAJ42)
CAMSGHGGSQGNLIF

SEQ ID NO: 560364 - protein, 17 aa, Homo sapiens
  CDR3 for beta chain variable domain of TCR clone 280182 (TRBV11-2, TRBJ2-1)
CTSSLYPPGVEYNEQFF

SEQ ID NO: 560365 - protein, 13 aa, Homo sapiens
  CDR3 for alpha chain variable domain of TCR clone 280183 (TRAV1-2, TRAJ9)
CAALNTVVFKTIF

SEQ ID NO: 560366 - protein, 13 aa, Homo sapiens
  CDR3 for beta chain variable domain of TCR clone 280183 (TRBV19, TRBJ1-2)
CASSVPGQDGYTF

SEQ ID NO: 560367 - protein, 11 aa, Homo sapiens
  CDR3 for alpha chain variable domain of TCR clone 280184 (TRAV13-1, TRAJ49)
CACVGGNPFYF

SEQ ID NO: 560368 - protein, 16 aa, Homo sapiens
  CDR3 for beta chain variable domain of TCR clone 280184 (TRBV11-2, TRBJ2-2)
CASSLRTGNLIGELFF

SEQ ID NO: 560369 - protein, 12 aa, Homo sapiens
  CDR3 for alpha chain variable domain of TCR clone 280185 (TRAV12-3, TRAJ17)
CAMTLTGNKLTF

SEQ ID NO: 560370 - protein, 16 aa, Homo sapiens
  CDR3 for beta chain variable domain of TCR clone 280185 (TRBV19, TRBJ2-1)
CASSKAGPSYYNEQFF

SEQ ID NO: 560371 - protein, 19 aa, Homo sapiens
  CDR3 for alpha chain variable domain of TCR clone 280186 (TRAV1-2, TRAJ26)
CLLPLCCERPDNYGQNFVF

SEQ ID NO: 560372 - protein, 14 aa, Homo sapiens
  CDR3 for beta chain variable domain of TCR clone 280186 (TRBV7-9, TRBJ2-5)
CASSLVGGEETQYF

SEQ ID NO: 560373 - protein, 14 aa, Homo sapiens
  CDR3 for alpha chain variable domain of TCR clone 280187 (TRAV2, TRAJ9)
CAVEDRSGGFKTIF

SEQ ID NO: 560374 - protein, 15 aa, Homo sapiens
  CDR3 for beta chain variable domain of TCR clone 280187 (TRBV20-1, TRBJ2-1)
CSAVIGTGTYNEQFF

SEQ ID NO: 560375 - protein, 15 aa, Homo sapiens
  CDR3 for alpha chain variable domain of TCR clone 280188 (TRAV13-1, TRAJ11)
CAASNRNSGYSTLTF

SEQ ID NO: 560376 - protein, 14 aa, Homo sapiens
  CDR3 for beta chain variable domain of TCR clone 280188 (TRBV4-2, TRBJ2-1)
CASGLDRAYNEQFF

SEQ ID NO: 560377 - protein, 12 aa, Homo sapiens
  CDR3 for alpha chain variable domain of TCR clone 280189 (TRAV8-3, TRAJ26)
CAGDNYGQNFVF

SEQ ID NO: 560378 - protein, 18 aa, Homo sapiens
  CDR3 for beta chain variable domain of TCR clone 280189 (TRBV24-1, TRBJ2-3)
CATSGWRVDSSSTDTQYF

SEQ ID NO: 560379 - protein, 13 aa, Homo sapiens
  CDR3 for alpha chain variable domain of TCR clone 280190 (TRAV35, TRAJ42)
CGGFPGSQGNLIF

SEQ ID NO: 560380 - protein, 13 aa, Homo sapiens
  CDR3 for beta chain variable domain of TCR clone 280190 (TRBV29-1, TRBJ2-1)
CSVEGGRVNEQFF

SEQ ID NO: 560381 - protein, 14 aa, Homo sapiens
  CDR3 for alpha chain variable domain of TCR clone 280191 (TRAV12-1, TRAJ34)
CVVNLDYNTDKLIF

SEQ ID NO: 560382 - protein, 16 aa, Homo sapiens
  CDR3 for beta chain variable domain of TCR clone 280191 (TRBV20-1, TRBJ1-4)
CSAPGQGLLTNEKLFF

SEQ ID NO: 560383 - protein, 14 aa, Homo sapiens
  CDR3 for alpha chain variable domain of TCR clone 280192 (TRAV35, TRAJ22)
CAGLRPGSARQLTF

SEQ ID NO: 560384 - protein, 15 aa, Homo sapiens
  CDR3 for beta chain variable domain of TCR clone 280192 (TRBV12-4, TRBJ2-5)
WASSPPTGLQETQYF

SEQ ID NO: 560385 - protein, 14 aa, Homo sapiens
  CDR3 for alpha chain variable domain of TCR clone 280193 (TRAV13-1, TRAJ6)
CAASNGGGSYIPTF

SEQ ID NO: 560386 - protein, 15 aa, Homo sapiens
  CDR3 for beta chain variable domain of TCR clone 280193 (TRBV28, TRBJ1-1)
CASRIKGGLNTEAFF

SEQ ID NO: 560387 - protein, 14 aa, Homo sapiens
  CDR3 for alpha chain variable domain of TCR clone 280194 (TRAV1-1, TRAJ33)
CAVRPEDSNYQLIW

SEQ ID NO: 560388 - protein, 15 aa, Homo sapiens
  CDR3 for beta chain variable domain of TCR clone 280194 (TRBV20-1, TRBJ2-1)
CSARPPGGPGNEQFF

SEQ ID NO: 560389 - protein, 12 aa, Homo sapiens
  CDR3 for alpha chain variable domain of TCR clone 280195 (TRAV38-1, TRAJ47)
CAFETYGNKLVF

SEQ ID NO: 560390 - protein, 14 aa, Homo sapiens
  CDR3 for beta chain variable domain of TCR clone 280195 (TRBV4-3, TRBJ1-5)
CASSQGGQGWPQHF

SEQ ID NO: 560391 - protein, 14 aa, Homo sapiens
  CDR3 for alpha chain variable domain of TCR clone 280196 (TRAV38-1, TRAJ45)
CAYYSGGGSDGLTF

SEQ ID NO: 560392 - protein, 15 aa, Homo sapiens
  CDR3 for beta chain variable domain of TCR clone 280196 (TRBV11-2, TRBJ2-1)
CASSKNRGLIYEQFF

SEQ ID NO: 560393 - protein, 14 aa, Homo sapiens
  CDR3 for alpha chain variable domain of TCR clone 280197 (TRAV29/DV5, TRAJ36)
CAARRKTGATNLFF

SEQ ID NO: 560394 - protein, 13 aa, Homo sapiens
  CDR3 for beta chain variable domain of TCR clone 280197 (TRBV10-3, TRBJ1-1)
CAIIPEGGTEAFF

SEQ ID NO: 560395 - protein, 15 aa, Homo sapiens
  CDR3 for alpha chain variable domain of TCR clone 280198 (TRAV2, TRAJ9)
CAVEDRGTGGFKTIF

SEQ ID NO: 560396 - protein, 14 aa, Homo sapiens
  CDR3 for beta chain variable domain of TCR clone 280198 (TRBV6-3, TRBJ1-1)
CASSNLLPGAEAFF

SEQ ID NO: 560397 - protein, 13 aa, Homo sapiens
  CDR3 for alpha chain variable domain of TCR clone 280199 (TRAV3, TRAJ27)
CAVRPLGAGKSTF

SEQ ID NO: 560398 - protein, 13 aa, Homo sapiens
  CDR3 for beta chain variable domain of TCR clone 280199 (TRBV7-8, TRBJ2-7)
CASSLTGGREQYF

SEQ ID NO: 560399 - protein, 15 aa, Homo sapiens
  CDR3 for alpha chain variable domain of TCR clone 280200 (TRAV12-2, TRAJ43)
CAFDMRFGAGTRLTV

SEQ ID NO: 560400 - protein, 18 aa, Homo sapiens
  CDR3 for beta chain variable domain of TCR clone 280200 (TRBV25-1, TRBJ1-2)
CASSGLQNGQGLIFGYTF

SEQ ID NO: 560401 - protein, 14 aa, Homo sapiens
  CDR3 for alpha chain variable domain of TCR clone 280201 (TRAV12-3, TRAJ10)
SHLPLTGGGNKLTF

SEQ ID NO: 560402 - protein, 13 aa, Homo sapiens
  CDR3 for beta chain variable domain of TCR clone 280201 (TRBV2, TRBJ1-6)
CVSGRGGISPLHF

SEQ ID NO: 560403 - protein, 13 aa, Homo sapiens
  CDR3 for alpha chain variable domain of TCR clone 280202 (TRAV12-2, TRAJ26)
CAVNENYGQNFVF

SEQ ID NO: 560404 - protein, 12 aa, Homo sapiens
  CDR3 for beta chain variable domain of TCR clone 280202 (TRBV14, TRBJ2-5)
CASSQLKETQYF

SEQ ID NO: 560405 - protein, 11 aa, Homo sapiens
  CDR3 for alpha chain variable domain of TCR clone 280203 (TRAV2, TRAJ13)
CASGGYQKVTF

SEQ ID NO: 560406 - protein, 18 aa, Homo sapiens
  CDR3 for beta chain variable domain of TCR clone 280203 (TRBV19, TRBJ2-6)
CASIGPTTGGSGANDLTF

SEQ ID NO: 560407 - protein, 12 aa, Homo sapiens
  CDR3 for alpha chain variable domain of TCR clone 280204 (TRAV12-3, TRAJ17)
CAMTLTGNKLTF

SEQ ID NO: 560408 - protein, 15 aa, Homo sapiens
  CDR3 for beta chain variable domain of TCR clone 280204 (TRBV5-1, TRBJ2-7)
CASSPQGRPLDEQYF

SEQ ID NO: 560409 - protein, 14 aa, Homo sapiens
  CDR3 for alpha chain variable domain of TCR clone 280205 (TRAV1-2, TRAJ16)
CAVNRFSDGQKLLF

SEQ ID NO: 560410 - protein, 16 aa, Homo sapiens
  CDR3 for beta chain variable domain of TCR clone 280205 (TRBV7-3, TRBJ2-3)
CASSLGLAGVADTQYF

SEQ ID NO: 560411 - protein, 13 aa, Homo sapiens
  CDR3 for alpha chain variable domain of TCR clone 280206 (TRAV23/DV6, TRAJ47)
CAASIRNGIWKQP

SEQ ID NO: 560412 - protein, 13 aa, Homo sapiens
  CDR3 for beta chain variable domain of TCR clone 280206 (TRBV19, TRBJ1-2)
CASSQGQVYGYTF

SEQ ID NO: 560413 - protein, 15 aa, Homo sapiens
  CDR3 for alpha chain variable domain of TCR clone 280207 (TRAV8-3, TRAJ45)
CASSYSGGGADGFTF

SEQ ID NO: 560414 - protein, 13 aa, Homo sapiens
  CDR3 for beta chain variable domain of TCR clone 280207 (TRBV7-3, TRBJ1-1)
CASSQDWGAEAFF

SEQ ID NO: 560415 - protein, 14 aa, Homo sapiens
  CDR3 for alpha chain variable domain of TCR clone 280208 (TRAV17, TRAJ34)
CATDSRGGTDKLIF

SEQ ID NO: 560416 - protein, 13 aa, Homo sapiens
  CDR3 for beta chain variable domain of TCR clone 280208 (TRBV11-2, TRBJ2-7)
CASSGTRPYEQYF

SEQ ID NO: 560417 - protein, 14 aa, Homo sapiens
  CDR3 for alpha chain variable domain of TCR clone 280209 (TRAV8-2, TRAJ23)
CVVSDDNQGGKLIF

SEQ ID NO: 560418 - protein, 13 aa, Homo sapiens
  CDR3 for beta chain variable domain of TCR clone 280209 (TRBV7-2, TRBJ1-5)
CQQPEGGPQPQHF

SEQ ID NO: 560419 - protein, 13 aa, Homo sapiens
  CDR3 for alpha chain variable domain of TCR clone 280210 (TRAV29/DV5, TRAJ29)
CAASAAGNTPLVF

SEQ ID NO: 560420 - protein, 14 aa, Homo sapiens
  CDR3 for beta chain variable domain of TCR clone 280210 (TRBV19, TRBJ2-3)
RASSAPRGTDTQYF

SEQ ID NO: 560421 - protein, 14 aa, Homo sapiens
  CDR3 for alpha chain variable domain of TCR clone 280211 (TRAV8-3, TRAJ13)
CAVGPSGGYQKVTF

SEQ ID NO: 560422 - protein, 12 aa, Homo sapiens
  CDR3 for beta chain variable domain of TCR clone 280211 (TRBV11-2, TRBJ2-1)
CASSPGNNEQFF

SEQ ID NO: 560423 - protein, 12 aa, Homo sapiens
  CDR3 for alpha chain variable domain of TCR clone 280212 (TRAV12-3, TRAJ20)
CAMVRGDYKLSF

SEQ ID NO: 560424 - protein, 15 aa, Homo sapiens
  CDR3 for beta chain variable domain of TCR clone 280212 (TRBV7-2, TRBJ2-1)
CASSSGLAGGNEQFF

SEQ ID NO: 560425 - protein, 14 aa, Homo sapiens
  CDR3 for alpha chain variable domain of TCR clone 280213 (TRAV8-3, TRAJ4)
CAVGASGGYNKLIF

SEQ ID NO: 560426 - protein, 15 aa, Homo sapiens
  CDR3 for beta chain variable domain of TCR clone 280213 (TRBV7-9, TRBJ1-6)
CASSSPGRGNSPLHF

SEQ ID NO: 560427 - protein, 13 aa, Homo sapiens
  CDR3 for alpha chain variable domain of TCR clone 280214 (TRAV23/DV6, TRAJ33)
CAASADSNYQLIW

SEQ ID NO: 560428 - protein, 13 aa, Homo sapiens
  CDR3 for beta chain variable domain of TCR clone 280214 (TRBV28, TRBJ2-2)
CASIRESTGELFF

SEQ ID NO: 560429 - protein, 16 aa, Homo sapiens
  CDR3 for alpha chain variable domain of TCR clone 280215 (TRAV16, TRAJ4)
CITVLPFSGGYHKLIF

SEQ ID NO: 560430 - protein, 14 aa, Homo sapiens
  CDR3 for beta chain variable domain of TCR clone 280215 (TRBV19, TRBJ2-7)
CASSMGQGAIEQYF

SEQ ID NO: 560431 - protein, 12 aa, Homo sapiens
  CDR3 for alpha chain variable domain of TCR clone 280216 (TRAV13-1, TRAJ48)
CAANFGNEKLAF

SEQ ID NO: 560432 - protein, 15 aa, Homo sapiens
  CDR3 for beta chain variable domain of TCR clone 280216 (TRBV9, TRBJ2-1)
CASSLAGSSYNEQFF

SEQ ID NO: 560433 - protein, 14 aa, Homo sapiens
  CDR3 for alpha chain variable domain of TCR clone 280217 (TRAV17, TRAJ39)
CATDPVRAGNMLTF

SEQ ID NO: 560434 - protein, 11 aa, Homo sapiens
  CDR3 for beta chain variable domain of TCR clone 280217 (TRBV6-3, TRBJ2-3)
CATGQADTQYF

SEQ ID NO: 560435 - protein, 12 aa, Homo sapiens
  CDR3 for alpha chain variable domain of TCR clone 280218 (TRAV12-3, TRAJ17)
CAMTLTGNKLTF

SEQ ID NO: 560436 - protein, 15 aa, Homo sapiens
  CDR3 for beta chain variable domain of TCR clone 280218 (TRBV10-2, TRBJ2-6)
RASSEQGTGANVLTF

SEQ ID NO: 560437 - protein, 14 aa, Homo sapiens
  CDR3 for alpha chain variable domain of TCR clone 280219 (TRAV12-2, TRAJ3)
CAVSLYSSASKIIF

SEQ ID NO: 560438 - protein, 14 aa, Homo sapiens
  CDR3 for beta chain variable domain of TCR clone 280219 (TRBV27, TRBJ2-1)
CAGSIAETYNDQFF

SEQ ID NO: 560439 - protein, 15 aa, Homo sapiens
  CDR3 for alpha chain variable domain of TCR clone 280220 (TRAV21, TRAJ53)
CATLNSGGSNYKLTF

SEQ ID NO: 560440 - protein, 17 aa, Homo sapiens
  CDR3 for beta chain variable domain of TCR clone 280220 (TRBV6-5, TRBJ1-4)
CASRETGGLATNEKLFF

SEQ ID NO: 560441 - protein, 13 aa, Homo sapiens
  CDR3 for alpha chain variable domain of TCR clone 280221 (TRAV13-1, TRAJ39)
CSKYNNAGNMLTF

SEQ ID NO: 560442 - protein, 16 aa, Homo sapiens
  CDR3 for beta chain variable domain of TCR clone 280221 (TRBV20-1, TRBJ1-4)
CSAPGQGLLTNEKLFF

SEQ ID NO: 560443 - protein, 14 aa, Homo sapiens
  CDR3 for alpha chain variable domain of TCR clone 280222 (TRAV12-3, TRAJ10)
SHLPLTGGGNKLTF

SEQ ID NO: 560444 - protein, 16 aa, Homo sapiens
  CDR3 for beta chain variable domain of TCR clone 280222 (TRBV11-2, TRBJ1-2)
CASSLDTGGADYGYNF

SEQ ID NO: 560445 - protein, 14 aa, Homo sapiens
  CDR3 for alpha chain variable domain of TCR clone 280223 (TRAV1-2, TRAJ8)
CAVREDTGFQKLEF

SEQ ID NO: 560446 - protein, 14 aa, Homo sapiens
  CDR3 for beta chain variable domain of TCR clone 280223 (TRBV7-6, TRBJ2-3)
CASSLGTVTDTQYF

SEQ ID NO: 560447 - protein, 14 aa, Homo sapiens
  CDR3 for alpha chain variable domain of TCR clone 280224 (TRAV25, TRAJ20)
CAGKGRWEDYKLSF

SEQ ID NO: 560448 - protein, 12 aa, Homo sapiens
  CDR3 for beta chain variable domain of TCR clone 280224 (TRBV12-5, TRBJ2-3)
CASQASTDTQYF

SEQ ID NO: 560449 - protein, 12 aa, Homo sapiens
  CDR3 for alpha chain variable domain of TCR clone 280225 (TRAV21, TRAJ58)
CAAETSGSRLTF

SEQ ID NO: 560450 - protein, 15 aa, Homo sapiens
  CDR3 for beta chain variable domain of TCR clone 280225 (TRBV20-1, TRBJ2-7)
CSAREPVKGEGEQYF

SEQ ID NO: 560451 - protein, 14 aa, Homo sapiens
  CDR3 for alpha chain variable domain of TCR clone 280226 (TRAV1-2, TRAJ16)
CAVNRFSDGQNLLF

SEQ ID NO: 560452 - protein, 14 aa, Homo sapiens
  CDR3 for beta chain variable domain of TCR clone 280226 (TRBV12-4, TRBJ2-5)
CASSLWQKQETQYF

SEQ ID NO: 560453 - protein, 13 aa, Homo sapiens
  CDR3 for alpha chain variable domain of TCR clone 280227 (TRAV23/DV6, TRAJ17)
LLYKWAAGNKLTF

SEQ ID NO: 560454 - protein, 14 aa, Homo sapiens
  CDR3 for beta chain variable domain of TCR clone 280227 (TRBV6-1, TRBJ2-7)
CASSGGSYLYEQYF

SEQ ID NO: 560455 - protein, 12 aa, Homo sapiens
  CDR3 for alpha chain variable domain of TCR clone 280228 (TRAV2, TRAJ9)
CAVGAGGFKTIF

SEQ ID NO: 560456 - protein, 17 aa, Homo sapiens
  CDR3 for beta chain variable domain of TCR clone 280228 (TRBV12-4, TRBJ1-1)
CASSLSGFRTMNTEAFF

SEQ ID NO: 560457 - protein, 15 aa, Homo sapiens
  CDR3 for alpha chain variable domain of TCR clone 280229 (TRAV8-3, TRAJ27)
CAVGPSKTNAGKSTF

SEQ ID NO: 560458 - protein, 13 aa, Homo sapiens
  CDR3 for beta chain variable domain of TCR clone 280229 (TRBV29-1, TRBJ2-1)
CSVEGGRVNEQFF

SEQ ID NO: 560459 - protein, 13 aa, Homo sapiens
  CDR3 for alpha chain variable domain of TCR clone 280230 (TRAV23/DV6, TRAJ27)
CSASKPMQANQPL

SEQ ID NO: 560460 - protein, 12 aa, Homo sapiens
  CDR3 for beta chain variable domain of TCR clone 280230 (TRBV12-4, TRBJ2-7)
CASSLGGYEQYF

SEQ ID NO: 560461 - protein, 15 aa, Homo sapiens
  CDR3 for alpha chain variable domain of TCR clone 280231 (TRAV21, TRAJ24)
CAARSSTDSWGKWQI

SEQ ID NO: 560462 - protein, 15 aa, Homo sapiens
  CDR3 for beta chain variable domain of TCR clone 280231 (TRBV6-1, TRBJ2-3)
CASSERGGITDTQYF

SEQ ID NO: 560463 - protein, 15 aa, Homo sapiens
  CDR3 for alpha chain variable domain of TCR clone 280232 (TRAV21, TRAJ45)
CAVSYSGGGADGLTF

SEQ ID NO: 560464 - protein, 14 aa, Homo sapiens
  CDR3 for beta chain variable domain of TCR clone 280232 (TRBV9, TRBJ2-7)
CASSVGVGSYEQYF

SEQ ID NO: 560465 - protein, 15 aa, Homo sapiens
  CDR3 for alpha chain variable domain of TCR clone 280233 (TRAV20, TRAJ50)
CAVRQMKTSYDKVKF

SEQ ID NO: 560466 - protein, 16 aa, Homo sapiens
  CDR3 for beta chain variable domain of TCR clone 280233 (TRBV15, TRBJ1-2)
CATSRGPRTGGGGYTF

SEQ ID NO: 560467 - protein, 11 aa, Homo sapiens
  CDR3 for alpha chain variable domain of TCR clone 280234 (TRAV12-1, TRAJ34)
CVVNKGRELIF

SEQ ID NO: 560468 - protein, 13 aa, Homo sapiens
  CDR3 for beta chain variable domain of TCR clone 280234 (TRBV12-5, TRBJ2-3)
CASGDRQSDTQYF

SEQ ID NO: 560469 - protein, 14 aa, Homo sapiens
  CDR3 for alpha chain variable domain of TCR clone 280235 (TRAV35, TRAJ22)
CAGLRPGSARQLTF

SEQ ID NO: 560470 - protein, 15 aa, Homo sapiens
  CDR3 for beta chain variable domain of TCR clone 280235 (TRBV12-4, TRBJ2-5)
CASSPPTGLQQTQYF

SEQ ID NO: 560471 - protein, 13 aa, Homo sapiens
  CDR3 for alpha chain variable domain of TCR clone 280236 (TRAV12-3, TRAJ7)
CAMTPYGNNRLAF

SEQ ID NO: 560472 - protein, 13 aa, Homo sapiens
  CDR3 for beta chain variable domain of TCR clone 280236 (TRBV5-6, TRBJ2-2)
CASTNIDTGELFF

SEQ ID NO: 560473 - protein, 13 aa, Homo sapiens
  CDR3 for alpha chain variable domain of TCR clone 280237 (TRAV35, TRAJ32)
CAGVGGATNKLIF

SEQ ID NO: 560474 - protein, 13 aa, Homo sapiens
  CDR3 for beta chain variable domain of TCR clone 280237 (TRBV11-2, TRBJ1-4)
CASSPGTLEKLFF

SEQ ID NO: 560475 - protein, 13 aa, Homo sapiens
  CDR3 for alpha chain variable domain of TCR clone 280238 (TRAV1-2, TRAJ9)
CAALNTGGFKTIF

SEQ ID NO: 560476 - protein, 15 aa, Homo sapiens
  CDR3 for beta chain variable domain of TCR clone 280238 (TRBV6-3, TRBJ2-7)
CASSAPGTVFYEQYF

SEQ ID NO: 560477 - protein, 12 aa, Homo sapiens
  CDR3 for alpha chain variable domain of TCR clone 280239 (TRAV12-3, TRAJ17)
CAMALTGDKLTF

SEQ ID NO: 560478 - protein, 15 aa, Homo sapiens
  CDR3 for beta chain variable domain of TCR clone 280239 (TRBV10-2, TRBJ2-6)
CASSEQGTGANVLTF

SEQ ID NO: 560479 - protein, 14 aa, Homo sapiens
  CDR3 for alpha chain variable domain of TCR clone 280240 (TRAV23/DV6, TRAJ22)
CAASDSGSARQLTF

SEQ ID NO: 560480 - protein, 16 aa, Homo sapiens
  CDR3 for beta chain variable domain of TCR clone 280240 (TRBV19, TRBJ2-2)
CASSFPGQGLAGELFF

SEQ ID NO: 560481 - protein, 11 aa, Homo sapiens
  CDR3 for alpha chain variable domain of TCR clone 280241 (TRAV3, TRAJ21)
CAVGTFNKFYF

SEQ ID NO: 560482 - protein, 15 aa, Homo sapiens
  CDR3 for beta chain variable domain of TCR clone 280241 (TRBV15, TRBJ2-2)
CATSGTGGRVGELFF

SEQ ID NO: 560483 - protein, 15 aa, Homo sapiens
  CDR3 for alpha chain variable domain of TCR clone 280242 (TRAV26-1, TRAJ40)
CIDRYATSGTYKYTF

SEQ ID NO: 560484 - protein, 16 aa, Homo sapiens
  CDR3 for beta chain variable domain of TCR clone 280242 (TRBV28, TRBJ2-1)
CASSSPEYPRDNEQFF

SEQ ID NO: 560485 - protein, 12 aa, Homo sapiens
  CDR3 for alpha chain variable domain of TCR clone 280243 (TRAV13-2, TRAJ23)
CAERHRGVKLIF

SEQ ID NO: 560486 - protein, 12 aa, Homo sapiens
  CDR3 for beta chain variable domain of TCR clone 280243 (TRBV29-1, TRBJ2-3)
CSVTGGADTQYF

SEQ ID NO: 560487 - protein, 11 aa, Homo sapiens
  CDR3 for alpha chain variable domain of TCR clone 280244 (TRAV13-1, TRAJ6)
CATLGSYIPTF

SEQ ID NO: 560488 - protein, 12 aa, Homo sapiens
  CDR3 for beta chain variable domain of TCR clone 280244 (TRBV11-2, TRBJ2-1)
CASSPGNNEPFF

SEQ ID NO: 560489 - protein, 15 aa, Homo sapiens
  CDR3 for alpha chain variable domain of TCR clone 280245 (TRAV12-1, TRAJ44)
CVVFVNTGTASKLTF

SEQ ID NO: 560490 - protein, 15 aa, Homo sapiens
  CDR3 for beta chain variable domain of TCR clone 280245 (TRBV20-1, TRBJ2-3)
CSASGTSGYTDTQYF

SEQ ID NO: 560491 - protein, 17 aa, Homo sapiens
  CDR3 for alpha chain variable domain of TCR clone 280246 (TRAV3, TRAJ6)
CAVRDGPRAGGRYIPTF

SEQ ID NO: 560492 - protein, 15 aa, Homo sapiens
  CDR3 for beta chain variable domain of TCR clone 280246 (TRBV5-1, TRBJ2-1)
CASSPPRAPYNEQFF

SEQ ID NO: 560493 - protein, 14 aa, Homo sapiens
  CDR3 for alpha chain variable domain of TCR clone 280247 (TRAV12-2, TRAJ17)
CAALFKASGNKLTF

SEQ ID NO: 560494 - protein, 15 aa, Homo sapiens
  CDR3 for beta chain variable domain of TCR clone 280247 (TRBV2, TRBJ2-7)
CASTLLGSGATEQYF

SEQ ID NO: 560495 - protein, 14 aa, Homo sapiens
  CDR3 for alpha chain variable domain of TCR clone 280248 (TRAV16, TRAJ17)
CAPRIKAAGNKLTF

SEQ ID NO: 560496 - protein, 15 aa, Homo sapiens
  CDR3 for beta chain variable domain of TCR clone 280248 (TRBV12-4, TRBJ2-5)
CASSPPTGLQETQYF

SEQ ID NO: 560497 - protein, 14 aa, Homo sapiens
  CDR3 for alpha chain variable domain of TCR clone 280249 (TRAV23/DV6, TRAJ57)
CAASHQGGSEKLVF

SEQ ID NO: 560498 - protein, 13 aa, Homo sapiens
  CDR3 for beta chain variable domain of TCR clone 280249 (TRBV11-2, TRBJ2-7)
CASSSYPSYEQYF

SEQ ID NO: 560499 - protein, 12 aa, Homo sapiens
  CDR3 for alpha chain variable domain of TCR clone 280250 (TRAV8-3, TRAJ20)
CAVGANDYKLSF

SEQ ID NO: 560500 - protein, 16 aa, Homo sapiens
  CDR3 for beta chain variable domain of TCR clone 280250 (TRBV19, TRBJ2-2)
CASRSPMTGATGELFI

SEQ ID NO: 560501 - protein, 18 aa, Homo sapiens
  CDR3 for alpha chain variable domain of TCR clone 280251 (TRAV26-1, TRAJ23)
CIVRVGQEVWNQGGKLIF

SEQ ID NO: 560502 - protein, 16 aa, Homo sapiens
  CDR3 for beta chain variable domain of TCR clone 280251 (TRBV12-4, TRBJ2-5)
CASSFFVRGRQETQYF

SEQ ID NO: 560503 - protein, 17 aa, Homo sapiens
  CDR3 for alpha chain variable domain of TCR clone 280252 (TRAV23/DV6, TRAJ57)
CAASSTLSQGGSEQLVF

SEQ ID NO: 560504 - protein, 14 aa, Homo sapiens
  CDR3 for beta chain variable domain of TCR clone 280252 (TRBV25-1, TRBJ1-1)
CASIHLGGNTEAFF

SEQ ID NO: 560505 - protein, 14 aa, Homo sapiens
  CDR3 for alpha chain variable domain of TCR clone 280253 (TRAV20, TRAJ56)
CAVQFGGANSKLTF

SEQ ID NO: 560506 - protein, 14 aa, Homo sapiens
  CDR3 for beta chain variable domain of TCR clone 280253 (TRBV25-1, TRBJ1-4)
CASSGGGQPEKLFF

SEQ ID NO: 560507 - protein, 18 aa, Homo sapiens
  CDR3 for alpha chain variable domain of TCR clone 280254 (TRAV21, TRAJ52)
WAVRPSPAGGTSYGKLTF

SEQ ID NO: 560508 - protein, 15 aa, Homo sapiens
  CDR3 for beta chain variable domain of TCR clone 280254 (TRBV27, TRBJ2-1)
CASSNGGGSSNEQFF

SEQ ID NO: 560509 - protein, 16 aa, Homo sapiens
  CDR3 for alpha chain variable domain of TCR clone 280255 (TRAV17, TRAJ53)
CATDALSGGSNYKLTF

SEQ ID NO: 560510 - protein, 15 aa, Homo sapiens
  CDR3 for beta chain variable domain of TCR clone 280255 (TRBV7-3, TRBJ2-1)
CASSPTGGGEVEQFF

SEQ ID NO: 560511 - protein, 15 aa, Homo sapiens
  CDR3 for alpha chain variable domain of TCR clone 280256 (TRAV8-3, TRAJ44)
CCGTLMTGTASKLTF

SEQ ID NO: 560512 - protein, 13 aa, Homo sapiens
  CDR3 for beta chain variable domain of TCR clone 280256 (TRBV11-2, TRBJ2-1)
CASSLRLTHEQFF

SEQ ID NO: 560513 - protein, 16 aa, Homo sapiens
  CDR3 for alpha chain variable domain of TCR clone 280257 (TRAV29/DV5, TRAJ28)
CAADAYSGAGSYKLTF

SEQ ID NO: 560514 - protein, 15 aa, Homo sapiens
  CDR3 for beta chain variable domain of TCR clone 280257 (TRBV24-1, TRBJ1-4)
CATSDPQGADEKLFF

SEQ ID NO: 560515 - protein, 14 aa, Homo sapiens
  CDR3 for alpha chain variable domain of TCR clone 280258 (TRAV12-2, TRAJ17)
CAALFKAAGNMLTF

SEQ ID NO: 560516 - protein, 16 aa, Homo sapiens
  CDR3 for beta chain variable domain of TCR clone 280258 (TRBV20-1, TRBJ2-2)
CSASASGIPGAGELFF

SEQ ID NO: 560517 - protein, 15 aa, Homo sapiens
  CDR3 for alpha chain variable domain of TCR clone 280259 (TRAV36/DV7, TRAJ53)
CAVEGSGGSNYKLTF

SEQ ID NO: 560518 - protein, 15 aa, Homo sapiens
  CDR3 for beta chain variable domain of TCR clone 280259 (TRBV29-1, TRBJ2-7)
CSVEFFDRGSYEQYF

SEQ ID NO: 560519 - protein, 13 aa, Homo sapiens
  CDR3 for alpha chain variable domain of TCR clone 280260 (TRAV8-3, TRAJ30)
CAVGGWRDDKVIF

SEQ ID NO: 560520 - protein, 14 aa, Homo sapiens
  CDR3 for beta chain variable domain of TCR clone 280260 (TRBV20-1, TRBJ1-1)
CSAPPADMNTEAFF

SEQ ID NO: 560521 - protein, 15 aa, Homo sapiens
  CDR3 for alpha chain variable domain of TCR clone 280261 (TRAV12-1, TRAJ44)
CVVFVNTGTASKLTF

SEQ ID NO: 560522 - protein, 12 aa, Homo sapiens
  CDR3 for beta chain variable domain of TCR clone 280261 (TRBV5-1, TRBJ2-5)
CASSLGLETQYF

SEQ ID NO: 560523 - protein, 23 aa, Homo sapiens
  CDR3 for alpha chain variable domain of TCR clone 280262 (TRAV25, TRAJ26)
PAHHSHPDYRCRNRGVYGQNFVF

SEQ ID NO: 560524 - protein, 14 aa, Homo sapiens
  CDR3 for beta chain variable domain of TCR clone 280262 (TRBV7-2, TRBJ2-7)
CASSPKTSFYEQYF

SEQ ID NO: 560525 - protein, 14 aa, Homo sapiens
  CDR3 for alpha chain variable domain of TCR clone 280263 (TRAV26-1, TRAJ45)
CIEVTGRGADGLTF

SEQ ID NO: 560526 - protein, 13 aa, Homo sapiens
  CDR3 for beta chain variable domain of TCR clone 280263 (TRBV7-6, TRBJ1-2)
CASSLVADYGYTF

SEQ ID NO: 560527 - protein, 21 aa, Homo sapiens
  CDR3 for alpha chain variable domain of TCR clone 280264 (TRAV36/DV7, TRAJ39)
TATQTGDSAIYLPNAGNMLTF

SEQ ID NO: 560528 - protein, 16 aa, Homo sapiens
  CDR3 for beta chain variable domain of TCR clone 280264 (TRBV19, TRBJ2-1)
CASSKAEPSSYNEQFF

SEQ ID NO: 560529 - protein, 14 aa, Homo sapiens
  CDR3 for alpha chain variable domain of TCR clone 280265 (TRAV20, TRAJ37)
CAVQSSSNTGKLIF

SEQ ID NO: 560530 - protein, 15 aa, Homo sapiens
  CDR3 for beta chain variable domain of TCR clone 280265 (TRBV7-3, TRBJ2-2)
CASSETGQGTGELFF

SEQ ID NO: 560531 - protein, 12 aa, Homo sapiens
  CDR3 for alpha chain variable domain of TCR clone 280266 (TRAV2, TRAJ31)
CAVGDNNARLMF

SEQ ID NO: 560532 - protein, 16 aa, Homo sapiens
  CDR3 for beta chain variable domain of TCR clone 280266 (TRBV10-3, TRBJ2-1)
CAISGVGDGGGGEQFF

SEQ ID NO: 560533 - protein, 14 aa, Homo sapiens
  CDR3 for alpha chain variable domain of TCR clone 280267 (TRAV3, TRAJ21)
CAVRDKYNFNKFYF

SEQ ID NO: 560534 - protein, 14 aa, Homo sapiens
  CDR3 for beta chain variable domain of TCR clone 280267 (TRBV27, TRBJ2-3)
CASRDSPITDTQYL

SEQ ID NO: 560535 - protein, 23 aa, Homo sapiens
  CDR3 for alpha chain variable domain of TCR clone 280268 (TRAV1-1, TRAJ29)
LLQELQMKDSASYFLGGNTPLVF

SEQ ID NO: 560536 - protein, 13 aa, Homo sapiens
  CDR3 for beta chain variable domain of TCR clone 280268 (TRBV25-1, TRBJ2-7)
CASSEDEDYEQYF

SEQ ID NO: 560537 - protein, 12 aa, Homo sapiens
  CDR3 for alpha chain variable domain of TCR clone 280269 (TRAV27, TRAJ35)
CSGADFGNVLHC

SEQ ID NO: 560538 - protein, 16 aa, Homo sapiens
  CDR3 for beta chain variable domain of TCR clone 280269 (TRBV6-1, TRBJ2-1)
CASILRQGSSYNEQFF

SEQ ID NO: 560539 - protein, 14 aa, Homo sapiens
  CDR3 for alpha chain variable domain of TCR clone 280270 (TRAV12-3, TRAJ9)
CAMSPNAGGFKTIF

SEQ ID NO: 560540 - protein, 13 aa, Homo sapiens
  CDR3 for beta chain variable domain of TCR clone 280270 (TRBV20-1, TRBJ2-5)
CSAREGGKETQYF

SEQ ID NO: 560541 - protein, 15 aa, Homo sapiens
  CDR3 for alpha chain variable domain of TCR clone 280271 (TRAV13-1, TRAJ5)
CAASPRGHGQESTYF

SEQ ID NO: 560542 - protein, 14 aa, Homo sapiens
  CDR3 for beta chain variable domain of TCR clone 280271 (TRBV6-5, TRBJ1-2)
CASTRGGGSDGYAF

SEQ ID NO: 560543 - protein, 15 aa, Homo sapiens
  CDR3 for alpha chain variable domain of TCR clone 280272 (TRAV8-6, TRAJ6)
CAVSGESGGSYIPTF

SEQ ID NO: 560544 - protein, 13 aa, Homo sapiens
  CDR3 for beta chain variable domain of TCR clone 280272 (TRBV19, TRBJ1-3)
CASRLSLGNTIYF

SEQ ID NO: 560545 - protein, 10 aa, Homo sapiens
  CDR3 for alpha chain variable domain of TCR clone 280273 (TRAV8-4, TRAJ43)
CAVSADDMRF

SEQ ID NO: 560546 - protein, 12 aa, Homo sapiens
  CDR3 for beta chain variable domain of TCR clone 280273 (TRBV2, TRBJ2-1)
CAYGPPGNEQFF

SEQ ID NO: 560547 - protein, 13 aa, Homo sapiens
  CDR3 for alpha chain variable domain of TCR clone 280274 (TRAV36/DV7, TRAJ49)
CAGDSNTGNQFYF

SEQ ID NO: 560548 - protein, 13 aa, Homo sapiens
  CDR3 for beta chain variable domain of TCR clone 280274 (TRBV7-2, TRBJ2-7)
CASSSPSGSEQYF

SEQ ID NO: 560549 - protein, 12 aa, Homo sapiens
  CDR3 for alpha chain variable domain of TCR clone 280275 (TRAV36/DV7, TRAJ40)
CAVGTGTYKYIF

SEQ ID NO: 560550 - protein, 16 aa, Homo sapiens
  CDR3 for beta chain variable domain of TCR clone 280275 (TRBV19, TRBJ2-2)
CASRSPGTGATGELFF

SEQ ID NO: 560551 - protein, 15 aa, Homo sapiens
  CDR3 for alpha chain variable domain of TCR clone 280276 (TRAV26-2, TRAJ13)
CILRDLSGGYQKVTF

SEQ ID NO: 560552 - protein, 13 aa, Homo sapiens
  CDR3 for beta chain variable domain of TCR clone 280276 (TRBV7-9, TRBJ1-2)
CASSLKQNYGYTF

SEQ ID NO: 560553 - protein, 14 aa, Homo sapiens
  CDR3 for alpha chain variable domain of TCR clone 280277 (TRAV2, TRAJ37)
CAVDFTSNTGKLIF

SEQ ID NO: 560554 - protein, 14 aa, Homo sapiens
  CDR3 for beta chain variable domain of TCR clone 280277 (TRBV20-1, TRBJ2-2)
CSAPDTANTGELFF

SEQ ID NO: 560555 - protein, 13 aa, Homo sapiens
  CDR3 for alpha chain variable domain of TCR clone 280278 (TRAV26-2, TRAJ43)
CILRAVNNNDMRF

SEQ ID NO: 560556 - protein, 13 aa, Homo sapiens
  CDR3 for beta chain variable domain of TCR clone 280278 (TRBV27, TRBJ2-7)
CASSFSQGYEQYF

SEQ ID NO: 560557 - protein, 13 aa, Homo sapiens
  CDR3 for alpha chain variable domain of TCR clone 280279 (TRAV21, TRAJ20)
CAVGLRVDYKLSF

SEQ ID NO: 560558 - protein, 14 aa, Homo sapiens
  CDR3 for beta chain variable domain of TCR clone 280279 (TRBV7-9, TRBJ2-5)
CASSLAFGQETQYF

SEQ ID NO: 560559 - protein, 14 aa, Homo sapiens
  CDR3 for alpha chain variable domain of TCR clone 280280 (TRAV13-2, TRAJ9)
CAENSFTGGFKTIF

SEQ ID NO: 560560 - protein, 13 aa, Homo sapiens
  CDR3 for beta chain variable domain of TCR clone 280280 (TRBV19, TRBJ2-7)
CASSSDRTYEQYF

SEQ ID NO: 560561 - protein, 16 aa, Homo sapiens
  CDR3 for alpha chain variable domain of TCR clone 280281 (TRAV30, TRAJ24)
CGTEIVDADSWGKFHF

SEQ ID NO: 560562 - protein, 15 aa, Homo sapiens
  CDR3 for beta chain variable domain of TCR clone 280281 (TRBV20-1, TRBJ2-7)
CSARDRVTGMDEQYF

SEQ ID NO: 560563 - protein, 12 aa, Homo sapiens
  CDR3 for alpha chain variable domain of TCR clone 280282 (TRAV12-1, TRAJ40)
CVVYSGTYKYIF

SEQ ID NO: 560564 - protein, 18 aa, Homo sapiens
  CDR3 for beta chain variable domain of TCR clone 280282 (TRBV11-2, TRBJ2-3)
CGSSLGGAPRGAPNTQYF

SEQ ID NO: 560565 - protein, 14 aa, Homo sapiens
  CDR3 for alpha chain variable domain of TCR clone 280283 (TRAV3, TRAJ34)
CAVRDINNTDKLIF

SEQ ID NO: 560566 - protein, 18 aa, Homo sapiens
  CDR3 for beta chain variable domain of TCR clone 280283 (TRBV11-2, TRBJ2-3)
CASSLGGASRGAPNTQYF

SEQ ID NO: 560567 - protein, 12 aa, Homo sapiens
  CDR3 for alpha chain variable domain of TCR clone 280284 (TRAV29/DV5, TRAJ34)
CAASGNTDKLIF

SEQ ID NO: 560568 - protein, 16 aa, Homo sapiens
  CDR3 for beta chain variable domain of TCR clone 280284 (TRBV12-4, TRBJ1-5)
CASRQPVEGSNQHQHF

SEQ ID NO: 560569 - protein, 14 aa, Homo sapiens
  CDR3 for alpha chain variable domain of TCR clone 280285 (TRAV1-2, TRAJ8)
CAVREDTGFQKLVF

SEQ ID NO: 560570 - protein, 11 aa, Homo sapiens
  CDR3 for beta chain variable domain of TCR clone 280285 (TRBV11-2, TRBJ2-2)
CASRLPGELFF

SEQ ID NO: 560571 - protein, 13 aa, Homo sapiens
  CDR3 for alpha chain variable domain of TCR clone 280286 (TRAV2, TRAJ40)
CAVVTSGTYKYIF

SEQ ID NO: 560572 - protein, 16 aa, Homo sapiens
  CDR3 for beta chain variable domain of TCR clone 280286 (TRBV4-1, TRBJ2-1)
CASSPYAGGHDNEQFF

SEQ ID NO: 560573 - protein, 14 aa, Homo sapiens
  CDR3 for alpha chain variable domain of TCR clone 280287 (TRAV3, TRAJ9)
CAVRGNTGGFKTIF

SEQ ID NO: 560574 - protein, 11 aa, Homo sapiens
  CDR3 for beta chain variable domain of TCR clone 280287 (TRBV7-8, TRBJ2-7)
CASSLSLEQYF

SEQ ID NO: 560575 - protein, 18 aa, Homo sapiens
  CDR3 for alpha chain variable domain of TCR clone 280288 (TRAV29/DV5, TRAJ48)
QCTSVQQRYNFGNEKLTF

SEQ ID NO: 560576 - protein, 15 aa, Homo sapiens
  CDR3 for beta chain variable domain of TCR clone 280288 (TRBV7-8, TRBJ2-1)
CASSPSGTIYNEQFF

SEQ ID NO: 560577 - protein, 13 aa, Homo sapiens
  CDR3 for alpha chain variable domain of TCR clone 280289 (TRAV12-2, TRAJ37)
CAGCSGNTGKLIF

SEQ ID NO: 560578 - protein, 14 aa, Homo sapiens
  CDR3 for beta chain variable domain of TCR clone 280289 (TRBV6-1, TRBJ2-6)
CASQQGAGANVLTF

SEQ ID NO: 560579 - protein, 11 aa, Homo sapiens
  CDR3 for alpha chain variable domain of TCR clone 280290 (TRAV12-2, TRAJ43)
CAAYNNNDMRF

SEQ ID NO: 560580 - protein, 12 aa, Homo sapiens
  CDR3 for beta chain variable domain of TCR clone 280290 (TRBV7-2, TRBJ1-6)
CASSLSSSPLHF

SEQ ID NO: 560581 - protein, 18 aa, Homo sapiens
  CDR3 for alpha chain variable domain of TCR clone 280291 (TRAV21, TRAJ52)
CAVRPSPAGGTSYGKLTF

SEQ ID NO: 560582 - protein, 16 aa, Homo sapiens
  CDR3 for beta chain variable domain of TCR clone 280291 (TRBV13, TRBJ2-3)
CQQPRQGSGGRNTQYF

SEQ ID NO: 560583 - protein, 16 aa, Homo sapiens
  CDR3 for alpha chain variable domain of TCR clone 280292 (TRAV30, TRAJ24)
CGTAIVDADSRGKFQF

SEQ ID NO: 560584 - protein, 14 aa, Homo sapiens
  CDR3 for beta chain variable domain of TCR clone 280292 (TRBV12-5, TRBJ2-5)
CASGSRTHQETQYF

SEQ ID NO: 560585 - protein, 21 aa, Homo sapiens
  CDR3 for alpha chain variable domain of TCR clone 280293 (TRAV25, TRAJ47)
TATQTTDVGTYFWEYGNKLVF

SEQ ID NO: 560586 - protein, 16 aa, Homo sapiens
  CDR3 for beta chain variable domain of TCR clone 280293 (TRBV6-6, TRBJ2-1)
CASSWGGQGPYNEQLF

SEQ ID NO: 560587 - protein, 17 aa, Homo sapiens
  CDR3 for alpha chain variable domain of TCR clone 280294 (TRAV26-1, TRAJ57)
CIVRPRFTQGGSEKLVF

SEQ ID NO: 560588 - protein, 16 aa, Homo sapiens
  CDR3 for beta chain variable domain of TCR clone 280294 (TRBV13, TRBJ2-2)
CASGEVFGANTGELFF

SEQ ID NO: 560589 - protein, 14 aa, Homo sapiens
  CDR3 for alpha chain variable domain of TCR clone 280295 (TRAV12-2, TRAJ13)
CAVKKTGGYQKVTF

SEQ ID NO: 560590 - protein, 14 aa, Homo sapiens
  CDR3 for beta chain variable domain of TCR clone 280295 (TRBV5-1, TRBJ2-7)
CASSRGEPLYEQYF

SEQ ID NO: 560591 - protein, 11 aa, Homo sapiens
  CDR3 for alpha chain variable domain of TCR clone 280296 (TRAV21, TRAJ20)
CAVRDDYKISF

SEQ ID NO: 560592 - protein, 14 aa, Homo sapiens
  CDR3 for beta chain variable domain of TCR clone 280296 (TRBV7-2, TRBJ2-7)
CASSPKTSFYEQYF

SEQ ID NO: 560593 - protein, 13 aa, Homo sapiens
  CDR3 for alpha chain variable domain of TCR clone 280297 (TRAV27, TRAJ45)
CRSSGGGADGLTF

SEQ ID NO: 560594 - protein, 16 aa, Homo sapiens
  CDR3 for beta chain variable domain of TCR clone 280297 (TRBV3-1, TRBJ2-3)
CASSQGTGYGTDTQYF

SEQ ID NO: 560595 - protein, 14 aa, Homo sapiens
  CDR3 for alpha chain variable domain of TCR clone 280298 (TRAV12-2, TRAJ17)
CAALFKAAGNKLTF

SEQ ID NO: 560596 - protein, 15 aa, Homo sapiens
  CDR3 for beta chain variable domain of TCR clone 280298 (TRBV18, TRBJ2-3)
CASSPLAVETDTQYF

SEQ ID NO: 560597 - protein, 16 aa, Homo sapiens
  CDR3 for alpha chain variable domain of TCR clone 280299 (TRAV3, TRAJ3)
CGVRDRAKSSASKIIF

SEQ ID NO: 560598 - protein, 16 aa, Homo sapiens
  CDR3 for beta chain variable domain of TCR clone 280299 (TRBV20-1, TRBJ2-4)
CSATSLAELAKNIQYF

SEQ ID NO: 560599 - protein, 15 aa, Homo sapiens
  CDR3 for alpha chain variable domain of TCR clone 280300 (TRAV2, TRAJ24)
CAVEVLTDSWGKFQF

SEQ ID NO: 560600 - protein, 13 aa, Homo sapiens
  CDR3 for beta chain variable domain of TCR clone 280300 (TRBV10-2, TRBJ2-7)
CASGTSGGYGQYF

SEQ ID NO: 560601 - protein, 12 aa, Homo sapiens
  CDR3 for alpha chain variable domain of TCR clone 280301 (TRAV13-2, TRAJ41)
CAKNIGRYALNS

SEQ ID NO: 560602 - protein, 12 aa, Homo sapiens
  CDR3 for beta chain variable domain of TCR clone 280301 (TRBV7-9, TRBJ1-1)
CASSLSGGVAFF

SEQ ID NO: 560603 - protein, 14 aa, Homo sapiens
  CDR3 for alpha chain variable domain of TCR clone 280302 (TRAV17, TRAJ57)
CATDPQGGSEKLVF

SEQ ID NO: 560604 - protein, 15 aa, Homo sapiens
  CDR3 for beta chain variable domain of TCR clone 280302 (TRBV2, TRBJ2-7)
CASSEGLARSYEQYF

SEQ ID NO: 560605 - protein, 12 aa, Homo sapiens
  CDR3 for alpha chain variable domain of TCR clone 280303 (TRAV8-4, TRAJ31)
CAVSDSNARLMF

SEQ ID NO: 560606 - protein, 13 aa, Homo sapiens
  CDR3 for beta chain variable domain of TCR clone 280303 (TRBV12-4, TRBJ1-2)
CASSSGSKDGYTF

SEQ ID NO: 560607 - protein, 16 aa, Homo sapiens
  CDR3 for alpha chain variable domain of TCR clone 280304 (TRAV3, TRAJ37)
CAVRVRGSGNTGKLIF

SEQ ID NO: 560608 - protein, 11 aa, Homo sapiens
  CDR3 for beta chain variable domain of TCR clone 280304 (TRBV11-2, TRBJ2-2)
CTSSLPGELFF

SEQ ID NO: 560609 - protein, 14 aa, Homo sapiens
  CDR3 for alpha chain variable domain of TCR clone 280305 (TRAV20, TRAJ20)
CAVRRGYNDSKLSF

SEQ ID NO: 560610 - protein, 13 aa, Homo sapiens
  CDR3 for beta chain variable domain of TCR clone 280305 (TRBV19, TRBJ2-5)
CASSETAPETQYF

SEQ ID NO: 560611 - protein, 17 aa, Homo sapiens
  CDR3 for alpha chain variable domain of TCR clone 280306 (TRAV13-1, TRAJ31)
CSPSDRLMFGVGTQLVV

SEQ ID NO: 560612 - protein, 12 aa, Homo sapiens
  CDR3 for beta chain variable domain of TCR clone 280306 (TRBV7-9, TRBJ2-7)
CASSLEGYEQYF

SEQ ID NO: 560613 - protein, 13 aa, Homo sapiens
  CDR3 for alpha chain variable domain of TCR clone 280307 (TRAV3, TRAJ29)
CAVRDWGNTPLVC

SEQ ID NO: 560614 - protein, 15 aa, Homo sapiens
  CDR3 for beta chain variable domain of TCR clone 280307 (TRBV12-4, TRBJ2-5)
CASIGRTGEGETQYF

SEQ ID NO: 560615 - protein, 14 aa, Homo sapiens
  CDR3 for alpha chain variable domain of TCR clone 280308 (TRAV1-2, TRAJ8)
CAVREDTGFKKLVF

SEQ ID NO: 560616 - protein, 16 aa, Homo sapiens
  CDR3 for beta chain variable domain of TCR clone 280308 (TRBV4-1, TRBJ2-3)
CASSQSTSGAEDTQYF

SEQ ID NO: 560617 - protein, 16 aa, Homo sapiens
  CDR3 for alpha chain variable domain of TCR clone 280309 (TRAV30, TRAJ24)
CGTEIVDADSRWKFQF

SEQ ID NO: 560618 - protein, 14 aa, Homo sapiens
  CDR3 for beta chain variable domain of TCR clone 280309 (TRBV12-5, TRBJ2-5)
CASGSRTHQETQYF

SEQ ID NO: 560619 - protein, 12 aa, Homo sapiens
  CDR3 for alpha chain variable domain of TCR clone 280310 (TRAV12-3, TRAJ17)
CAMTLTGNKLTF

SEQ ID NO: 560620 - protein, 15 aa, Homo sapiens
  CDR3 for beta chain variable domain of TCR clone 280310 (TRBV11-3, TRBJ2-7)
CASSLLSGSSYEQYF

SEQ ID NO: 560621 - protein, 15 aa, Homo sapiens
  CDR3 for alpha chain variable domain of TCR clone 280311 (TRAV27, TRAJ38)
CAARRNAGNNRKLIW

SEQ ID NO: 560622 - protein, 14 aa, Homo sapiens
  CDR3 for beta chain variable domain of TCR clone 280311 (TRBV7-9, TRBJ2-4)
CASSLAMGGNIQYF

SEQ ID NO: 560623 - protein, 14 aa, Homo sapiens
  CDR3 for alpha chain variable domain of TCR clone 280312 (TRAV12-1, TRAJ15)
CVPPANQAGTALTF

SEQ ID NO: 560624 - protein, 13 aa, Homo sapiens
  CDR3 for beta chain variable domain of TCR clone 280312 (TRBV7-2, TRBJ2-4)
CASSREHANIQYF

SEQ ID NO: 560625 - protein, 16 aa, Homo sapiens
  CDR3 for alpha chain variable domain of TCR clone 280313 (TRAV2, TRAJ10)
CCGGSTVTGGGNNLTF

SEQ ID NO: 560626 - protein, 16 aa, Homo sapiens
  CDR3 for beta chain variable domain of TCR clone 280313 (TRBV18, TRBJ1-5)
CASSPSTGNSNQPQHF

SEQ ID NO: 560627 - protein, 15 aa, Homo sapiens
  CDR3 for alpha chain variable domain of TCR clone 280314 (TRAV26-1, TRAJ22)
CIVRVSFWFCKATDL

SEQ ID NO: 560628 - protein, 11 aa, Homo sapiens
  CDR3 for beta chain variable domain of TCR clone 280314 (TRBV19, TRBJ1-1)
CASSIGSEAFF

SEQ ID NO: 560629 - protein, 12 aa, Homo sapiens
  CDR3 for alpha chain variable domain of TCR clone 280315 (TRAV3, TRAJ43)
CAVRDPNNDMRF

SEQ ID NO: 560630 - protein, 14 aa, Homo sapiens
  CDR3 for beta chain variable domain of TCR clone 280315 (TRBV19, TRBJ1-2)
CASSTSRTVYGYTF

SEQ ID NO: 560631 - protein, 14 aa, Homo sapiens
  CDR3 for alpha chain variable domain of TCR clone 280316 (TRAV3, TRAJ21)
CAVRDRSASTNFTL

SEQ ID NO: 560632 - protein, 16 aa, Homo sapiens
  CDR3 for beta chain variable domain of TCR clone 280316 (TRBV7-2, TRBJ2-5)
CASSLESAGGRETQYF

SEQ ID NO: 560633 - protein, 15 aa, Homo sapiens
  CDR3 for alpha chain variable domain of TCR clone 280317 (TRAV17, TRAJ22)
CATVAPSGPARQLTF

SEQ ID NO: 560634 - protein, 15 aa, Homo sapiens
  CDR3 for beta chain variable domain of TCR clone 280317 (TRBV11-3, TRBJ2-3)
CASLKDGREGDTQYF

SEQ ID NO: 560635 - protein, 15 aa, Homo sapiens
  CDR3 for alpha chain variable domain of TCR clone 280318 (TRAV35, TRAJ41)
CAGQLFSNSGYALNF

SEQ ID NO: 560636 - protein, 15 aa, Homo sapiens
  CDR3 for beta chain variable domain of TCR clone 280318 (TRBV3-1, TRBJ2-7)
CASSQDSSGAYEQYF

SEQ ID NO: 560637 - protein, 14 aa, Homo sapiens
  CDR3 for alpha chain variable domain of TCR clone 280319 (TRAV13-1, TRAJ35)
CAASKGGFGNVLHC

SEQ ID NO: 560638 - protein, 13 aa, Homo sapiens
  CDR3 for beta chain variable domain of TCR clone 280319 (TRBV7-6, TRBJ2-3)
CQQRSGGTDTQYF

SEQ ID NO: 560639 - protein, 14 aa, Homo sapiens
  CDR3 for alpha chain variable domain of TCR clone 280320 (TRAV26-1, TRAJ38)
CIADNAGNNRKLIW

SEQ ID NO: 560640 - protein, 16 aa, Homo sapiens
  CDR3 for beta chain variable domain of TCR clone 280320 (TRBV5-1, TRBJ2-3)
CASSLQGRVGADTQYF

SEQ ID NO: 560641 - protein, 15 aa, Homo sapiens
  CDR3 for alpha chain variable domain of TCR clone 280321 (TRAV21, TRAJ53)
CATLNSGGSNYKLTF

SEQ ID NO: 560642 - protein, 13 aa, Homo sapiens
  CDR3 for beta chain variable domain of TCR clone 280321 (TRBV7-3, TRBJ1-1)
CASSQDWWAEAFF

SEQ ID NO: 560643 - protein, 17 aa, Homo sapiens
  CDR3 for alpha chain variable domain of TCR clone 280322 (TRAV27, TRAJ52)
CAGAGWAGGTSYGKLTF

SEQ ID NO: 560644 - protein, 16 aa, Homo sapiens
  CDR3 for beta chain variable domain of TCR clone 280322 (TRBV19, TRBJ2-1)
CASSKAGPISYNEQFF

SEQ ID NO: 560645 - protein, 16 aa, Homo sapiens
  CDR3 for alpha chain variable domain of TCR clone 280323 (TRAV8-4, TRAJ18)
CAVTANGGSTLGRLYF

SEQ ID NO: 560646 - protein, 14 aa, Homo sapiens
  CDR3 for beta chain variable domain of TCR clone 280323 (TRBV12-4, TRBJ1-2)
CASSCAGHIYGYTF

SEQ ID NO: 560647 - protein, 14 aa, Homo sapiens
  CDR3 for alpha chain variable domain of TCR clone 280324 (TRAV26-2, TRAJ45)
CIPRLNSGYSTLTF

SEQ ID NO: 560648 - protein, 13 aa, Homo sapiens
  CDR3 for beta chain variable domain of TCR clone 280324 (TRBV7-3, TRBJ2-1)
CASSPVAYNEQFF

SEQ ID NO: 560649 - protein, 15 aa, Homo sapiens
  CDR3 for alpha chain variable domain of TCR clone 280325 (TRAV8-4, TRAJ7)
CAGSGGNYGNKRLAF

SEQ ID NO: 560650 - protein, 11 aa, Homo sapiens
  CDR3 for beta chain variable domain of TCR clone 280325 (TRBV20-1, TRBJ2-1)
CSLSSGSEQFF

SEQ ID NO: 560651 - protein, 16 aa, Homo sapiens
  CDR3 for alpha chain variable domain of TCR clone 280326 (TRAV8-3, TRAJ10)
CAVGPILKGGGNKLTF

SEQ ID NO: 560652 - protein, 13 aa, Homo sapiens
  CDR3 for beta chain variable domain of TCR clone 280326 (TRBV11-2, TRBJ1-3)
CASSLEPVNTIYF

SEQ ID NO: 560653 - protein, 16 aa, Homo sapiens
  CDR3 for alpha chain variable domain of TCR clone 280327 (TRAV17, TRAJ52)
CATSNAGGTSYGKLTF

SEQ ID NO: 560654 - protein, 13 aa, Homo sapiens
  CDR3 for beta chain variable domain of TCR clone 280327 (TRBV27, TRBJ1-6)
CARSLVLVSPLHF

SEQ ID NO: 560655 - protein, 11 aa, Homo sapiens
  CDR3 for alpha chain variable domain of TCR clone 280328 (TRAV12-2, TRAJ43)
CASPIGNDMRF

SEQ ID NO: 560656 - protein, 13 aa, Homo sapiens
  CDR3 for beta chain variable domain of TCR clone 280328 (TRBV20-1, TRBJ1-1)
CSARVGGNTEAFF

SEQ ID NO: 560657 - protein, 16 aa, Homo sapiens
  CDR3 for alpha chain variable domain of TCR clone 280329 (TRAV27, TRAJ13)
CAGAKSDSGGYQKVTF

SEQ ID NO: 560658 - protein, 15 aa, Homo sapiens
  CDR3 for beta chain variable domain of TCR clone 280329 (TRBV6-6, TRBJ2-7)
CASSYSYGGSYEQYF

SEQ ID NO: 560659 - protein, 15 aa, Homo sapiens
  CDR3 for alpha chain variable domain of TCR clone 280330 (TRAV8-6, TRAJ23)
CAVRLIYNQGGKLIF

SEQ ID NO: 560660 - protein, 12 aa, Homo sapiens
  CDR3 for beta chain variable domain of TCR clone 280330 (TRBV12-4, TRBJ2-7)
CASSLGGYEQYF

SEQ ID NO: 560661 - protein, 15 aa, Homo sapiens
  CDR3 for alpha chain variable domain of TCR clone 280331 (TRAV26-1, TRAJ22)
CIVRVSFWFCEATDL

SEQ ID NO: 560662 - protein, 12 aa, Homo sapiens
  CDR3 for beta chain variable domain of TCR clone 280331 (TRBV11-2, TRBJ2-2)
CASSLGGGELFF

SEQ ID NO: 560663 - protein, 13 aa, Homo sapiens
  CDR3 for alpha chain variable domain of TCR clone 280332 (TRAV3, TRAJ27)
CAVRRLGAGKSTF

SEQ ID NO: 560664 - protein, 13 aa, Homo sapiens
  CDR3 for beta chain variable domain of TCR clone 280332 (TRBV7-9, TRBJ2-3)
CASSPGSTDTQYC

SEQ ID NO: 560665 - protein, 14 aa, Homo sapiens
  CDR3 for alpha chain variable domain of TCR clone 280333 (TRAV8-6, TRAJ48)
CAVISNFGNEKLTF

SEQ ID NO: 560666 - protein, 15 aa, Homo sapiens
  CDR3 for beta chain variable domain of TCR clone 280333 (TRBV9, TRBJ1-6)
CASSVAGTGDSPLHF

SEQ ID NO: 560667 - protein, 12 aa, Homo sapiens
  CDR3 for alpha chain variable domain of TCR clone 280334 (TRAV17, TRAJ30)
CVPERRDDKIIF

SEQ ID NO: 560668 - protein, 14 aa, Homo sapiens
  CDR3 for beta chain variable domain of TCR clone 280334 (TRBV7-7, TRBJ2-2)
RASSRDRSTGELFF

SEQ ID NO: 560669 - protein, 15 aa, Homo sapiens
  CDR3 for alpha chain variable domain of TCR clone 280335 (TRAV21, TRAJ53)
CATLNSGGSNYKLTF

SEQ ID NO: 560670 - protein, 12 aa, Homo sapiens
  CDR3 for beta chain variable domain of TCR clone 280335 (TRBV7-9, TRBJ1-6)
CASSLMTSPLHF

SEQ ID NO: 560671 - protein, 14 aa, Homo sapiens
  CDR3 for alpha chain variable domain of TCR clone 280336 (TRAV26-1, TRAJ44)
CIVRPTGTASKLTF

SEQ ID NO: 560672 - protein, 12 aa, Homo sapiens
  CDR3 for beta chain variable domain of TCR clone 280336 (TRBV11-3, TRBJ1-1)
CASRLRDSEAFF

SEQ ID NO: 560673 - protein, 13 aa, Homo sapiens
  CDR3 for alpha chain variable domain of TCR clone 280337 (TRAV16, TRAJ34)
CALTGYNTDKLIF

SEQ ID NO: 560674 - protein, 13 aa, Homo sapiens
  CDR3 for beta chain variable domain of TCR clone 280337 (TRBV6-1, TRBJ2-1)
CASREDGGHEHFF

SEQ ID NO: 560675 - protein, 12 aa, Homo sapiens
  CDR3 for alpha chain variable domain of TCR clone 280338 (TRAV12-3, TRAJ17)
CAMTLTGNKLTF

SEQ ID NO: 560676 - protein, 15 aa, Homo sapiens
  CDR3 for beta chain variable domain of TCR clone 280338 (TRBV20-1, TRBJ2-7)
CSARNRISGMDEQYF

SEQ ID NO: 560677 - protein, 11 aa, Homo sapiens
  CDR3 for alpha chain variable domain of TCR clone 280339 (TRAV20, TRAJ23)
CACNQGGKLIF

SEQ ID NO: 560678 - protein, 13 aa, Homo sapiens
  CDR3 for beta chain variable domain of TCR clone 280339 (TRBV27, TRBJ1-4)
CASSLMGDEKLFF

SEQ ID NO: 560679 - protein, 15 aa, Homo sapiens
  CDR3 for alpha chain variable domain of TCR clone 280340 (TRAV12-2, TRAJ52)
CAVTSGGTSYGKLTF

SEQ ID NO: 560680 - protein, 15 aa, Homo sapiens
  CDR3 for beta chain variable domain of TCR clone 280340 (TRBV7-2, TRBJ2-1)
GASSPGFISGNEQFF

SEQ ID NO: 560681 - protein, 16 aa, Homo sapiens
  CDR3 for alpha chain variable domain of TCR clone 280341 (TRAV23/DV6, TRAJ9)
CAASIGGITGGFKTIF

SEQ ID NO: 560682 - protein, 15 aa, Homo sapiens
  CDR3 for beta chain variable domain of TCR clone 280341 (TRBV6-3, TRBJ2-7)
CASSSPGTVLYEQYF

SEQ ID NO: 560683 - protein, 12 aa, Homo sapiens
  CDR3 for alpha chain variable domain of TCR clone 280342 (TRAV29/DV5, TRAJ15)
CASTQAGTALIF

SEQ ID NO: 560684 - protein, 15 aa, Homo sapiens
  CDR3 for beta chain variable domain of TCR clone 280342 (TRBV11-2, TRBJ2-2)
CASSSDRVNAGELFF

SEQ ID NO: 560685 - protein, 15 aa, Homo sapiens
  CDR3 for alpha chain variable domain of TCR clone 280343 (TRAV13-1, TRAJ9)
CAASTLNTGGFKTIF

SEQ ID NO: 560686 - protein, 14 aa, Homo sapiens
  CDR3 for beta chain variable domain of TCR clone 280343 (TRBV15, TRBJ2-5)
CATSIGGLGETQYF

SEQ ID NO: 560687 - protein, 13 aa, Homo sapiens
  CDR3 for alpha chain variable domain of TCR clone 280344 (TRAV23/DV6, TRAJ22)
CAPYSGSARQLTF

SEQ ID NO: 560688 - protein, 14 aa, Homo sapiens
  CDR3 for beta chain variable domain of TCR clone 280344 (TRBV7-2, TRBJ2-7)
CASSPKTSFYEQYF

SEQ ID NO: 560689 - protein, 16 aa, Homo sapiens
  CDR3 for alpha chain variable domain of TCR clone 280345 (TRAV12-1, TRAJ22)
CVVNTISSGSARQLTF

SEQ ID NO: 560690 - protein, 14 aa, Homo sapiens
  CDR3 for beta chain variable domain of TCR clone 280345 (TRBV19, TRBJ2-1)
CASPTFVLSGEQFF

SEQ ID NO: 560691 - protein, 16 aa, Homo sapiens
  CDR3 for alpha chain variable domain of TCR clone 280346 (TRAV3, TRAJ10)
CAVRDMRAGGGNKLTF

SEQ ID NO: 560692 - protein, 14 aa, Homo sapiens
  CDR3 for beta chain variable domain of TCR clone 280346 (TRBV18, TRBJ2-5)
CASSPRASSETQYF

SEQ ID NO: 560693 - protein, 15 aa, Homo sapiens
  CDR3 for alpha chain variable domain of TCR clone 280347 (TRAV2, TRAJ9)
CAVAAVNTGGFKTIF

SEQ ID NO: 560694 - protein, 13 aa, Homo sapiens
  CDR3 for beta chain variable domain of TCR clone 280347 (TRBV5-5, TRBJ1-2)
CASSFWRGEDYTF

SEQ ID NO: 560695 - protein, 13 aa, Homo sapiens
  CDR3 for alpha chain variable domain of TCR clone 280348 (TRAV8-3, TRAJ28)
CAVGAVGSYQLTF

SEQ ID NO: 560696 - protein, 16 aa, Homo sapiens
  CDR3 for beta chain variable domain of TCR clone 280348 (TRBV4-2, TRBJ2-3)
CASSQELAGDTDTQYF

SEQ ID NO: 560697 - protein, 14 aa, Homo sapiens
  CDR3 for alpha chain variable domain of TCR clone 280349 (TRAV12-3, TRAJ42)
CAMNYGGSQGNLIF

SEQ ID NO: 560698 - protein, 14 aa, Homo sapiens
  CDR3 for beta chain variable domain of TCR clone 280349 (TRBV19, TRBJ1-5)
CASSLSGGSQPQHF

SEQ ID NO: 560699 - protein, 14 aa, Homo sapiens
  CDR3 for alpha chain variable domain of TCR clone 280350 (TRAV2, TRAJ9)
CAVEDRSRGFKTIF

SEQ ID NO: 560700 - protein, 13 aa, Homo sapiens
  CDR3 for beta chain variable domain of TCR clone 280350 (TRBV27, TRBJ1-1)
CASSLSIGAEAFF

SEQ ID NO: 560701 - protein, 13 aa, Homo sapiens
  CDR3 for alpha chain variable domain of TCR clone 280351 (TRAV3, TRAJ4)
CAVRDGGYSKLIF

SEQ ID NO: 560702 - protein, 15 aa, Homo sapiens
  CDR3 for beta chain variable domain of TCR clone 280351 (TRBV5-1, TRBJ2-1)
CASSPPRAPYNEQFF

SEQ ID NO: 560703 - protein, 15 aa, Homo sapiens
  CDR3 for alpha chain variable domain of TCR clone 280352 (TRAV3, TRAJ17)
CAVRYGPAAGNKLTF

SEQ ID NO: 560704 - protein, 12 aa, Homo sapiens
  CDR3 for beta chain variable domain of TCR clone 280352 (TRBV12-4, TRBJ2-1)
CASSPGRNEQFF

SEQ ID NO: 560705 - protein, 13 aa, Homo sapiens
  CDR3 for alpha chain variable domain of TCR clone 280353 (TRAV2, TRAJ39)
TTVHNNAGNMLTF

SEQ ID NO: 560706 - protein, 16 aa, Homo sapiens
  CDR3 for beta chain variable domain of TCR clone 280353 (TRBV24-1, TRBJ2-3)
YATSGYRDRDTDTQYF

SEQ ID NO: 560707 - protein, 13 aa, Homo sapiens
  CDR3 for alpha chain variable domain of TCR clone 280354 (TRAV12-1, TRAJ11)
CVVTRGGYSTLTF

SEQ ID NO: 560708 - protein, 13 aa, Homo sapiens
  CDR3 for beta chain variable domain of TCR clone 280354 (TRBV20-1, TRBJ1-2)
SAVLDQGAYGYTF

SEQ ID NO: 560709 - protein, 13 aa, Homo sapiens
  CDR3 for alpha chain variable domain of TCR clone 280355 (TRAV38-2/DV8, TRAJ45)
CAYVGGGADGLTF

SEQ ID NO: 560710 - protein, 13 aa, Homo sapiens
  CDR3 for beta chain variable domain of TCR clone 280355 (TRBV29-1, TRBJ2-1)
CSVEGGRVNEQFY

SEQ ID NO: 560711 - protein, 15 aa, Homo sapiens
  CDR3 for alpha chain variable domain of TCR clone 280356 (TRAV13-2, TRAJ45)
CAESDSGGGADGLTF

SEQ ID NO: 560712 - protein, 16 aa, Homo sapiens
  CDR3 for beta chain variable domain of TCR clone 280356 (TRBV20-1, TRBJ1-4)
CSAPGQGLLTNEKLFF

SEQ ID NO: 560713 - protein, 12 aa, Homo sapiens
  CDR3 for alpha chain variable domain of TCR clone 280357 (TRAV20, TRAJ39)
CAVGNAGNMLTF

SEQ ID NO: 560714 - protein, 15 aa, Homo sapiens
  CDR3 for beta chain variable domain of TCR clone 280357 (TRBV15, TRBJ1-2)
CHQQRPRTGGGGYTF

SEQ ID NO: 560715 - protein, 14 aa, Homo sapiens
  CDR3 for alpha chain variable domain of TCR clone 280358 (TRAV1-2, TRAJ8)
CAVREDTGFQKLVF

SEQ ID NO: 560716 - protein, 11 aa, Homo sapiens
  CDR3 for beta chain variable domain of TCR clone 280358 (TRBV27, TRBJ2-3)
CASSLGDKQYF

SEQ ID NO: 560717 - protein, 21 aa, Homo sapiens
  CDR3 for alpha chain variable domain of TCR clone 280359 (TRAV12-1, TRAJ32)
RSVIQPPTSMNYGGATNKLIF

SEQ ID NO: 560718 - protein, 15 aa, Homo sapiens
  CDR3 for beta chain variable domain of TCR clone 280359 (TRBV7-9, TRBJ2-2)
CASGPLDTFPGELFF

SEQ ID NO: 560719 - protein, 13 aa, Homo sapiens
  CDR3 for alpha chain variable domain of TCR clone 280360 (TRAV3, TRAJ27)
CAVRPLGAGKSTF

SEQ ID NO: 560720 - protein, 16 aa, Homo sapiens
  CDR3 for beta chain variable domain of TCR clone 280360 (TRBV2, TRBJ1-1)
CASSPPNRGMNTEAFF

SEQ ID NO: 560721 - protein, 14 aa, Homo sapiens
  CDR3 for alpha chain variable domain of TCR clone 280361 (TRAV29/DV5, TRAJ6)
CAARVSGGSYIPTF

SEQ ID NO: 560722 - protein, 13 aa, Homo sapiens
  CDR3 for beta chain variable domain of TCR clone 280361 (TRBV12-4, TRBJ1-1)
CASSFGEDTEAFF

SEQ ID NO: 560723 - protein, 14 aa, Homo sapiens
  CDR3 for alpha chain variable domain of TCR clone 280362 (TRAV17, TRAJ57)
CATDPQGGSEKLVF

SEQ ID NO: 560724 - protein, 15 aa, Homo sapiens
  CDR3 for beta chain variable domain of TCR clone 280362 (TRBV6-3, TRBJ2-7)
CSSSSPGTVFYEQYF

SEQ ID NO: 560725 - protein, 12 aa, Homo sapiens
  CDR3 for alpha chain variable domain of TCR clone 280363 (TRAV12-2, TRAJ10)
WGVTGGGNKLPF

SEQ ID NO: 560726 - protein, 15 aa, Homo sapiens
  CDR3 for beta chain variable domain of TCR clone 280363 (TRBV20-1, TRBJ2-7)
CSARDRVSGMDGQYF

SEQ ID NO: 560727 - protein, 14 aa, Homo sapiens
  CDR3 for alpha chain variable domain of TCR clone 280364 (TRAV17, TRAJ16)
CATADFSDGQKLLF

SEQ ID NO: 560728 - protein, 15 aa, Homo sapiens
  CDR3 for beta chain variable domain of TCR clone 280364 (TRBV7-9, TRBJ1-6)
CASSSPGRGNSPLHF

SEQ ID NO: 560729 - protein, 13 aa, Homo sapiens
  CDR3 for alpha chain variable domain of TCR clone 280365 (TRAV6, TRAJ45)
SPFSGGGADGLTF

SEQ ID NO: 560730 - protein, 13 aa, Homo sapiens
  CDR3 for beta chain variable domain of TCR clone 280365 (TRBV7-9, TRBJ1-2)
CASSLKQNYGYPF

SEQ ID NO: 560731 - protein, 16 aa, Homo sapiens
  CDR3 for alpha chain variable domain of TCR clone 280366 (TRAV30, TRAJ24)
CGTEIVDADSWGKFQF

SEQ ID NO: 560732 - protein, 13 aa, Homo sapiens
  CDR3 for beta chain variable domain of TCR clone 280366 (TRBV7-2, TRBJ1-4)
CASSLAGLENLFF

SEQ ID NO: 560733 - protein, 14 aa, Homo sapiens
  CDR3 for alpha chain variable domain of TCR clone 280367 (TRAV23/DV6, TRAJ10)
CAASIGTHGRRKQT

SEQ ID NO: 560734 - protein, 13 aa, Homo sapiens
  CDR3 for beta chain variable domain of TCR clone 280367 (TRBV11-1, TRBJ1-2)
CASVGSWGYGYAF

SEQ ID NO: 560735 - protein, 13 aa, Homo sapiens
  CDR3 for alpha chain variable domain of TCR clone 280368 (TRAV30, TRAJ16)
CGTFGGDGQKLLF

SEQ ID NO: 560736 - protein, 15 aa, Homo sapiens
  CDR3 for beta chain variable domain of TCR clone 280368 (TRBV7-6, TRBJ2-5)
CASSKPTGPQETQYF

SEQ ID NO: 560737 - protein, 15 aa, Homo sapiens
  CDR3 for alpha chain variable domain of TCR clone 280369 (TRAV26-1, TRAJ48)
CIARWSWFGNEKLTF

SEQ ID NO: 560738 - protein, 12 aa, Homo sapiens
  CDR3 for beta chain variable domain of TCR clone 280369 (TRBV19, TRBJ2-5)
CASSISEETQNF

SEQ ID NO: 560739 - protein, 14 aa, Homo sapiens
  CDR3 for alpha chain variable domain of TCR clone 280370 (TRAV16, TRAJ37)
CGLDISGNTGKLIF

SEQ ID NO: 560740 - protein, 14 aa, Homo sapiens
  CDR3 for beta chain variable domain of TCR clone 280370 (TRBV7-6, TRBJ2-7)
CASSFRQGADEQYF

SEQ ID NO: 560741 - protein, 16 aa, Homo sapiens
  CDR3 for alpha chain variable domain of TCR clone 280371 (TRAV4, TRAJ5)
CLVGPDHGHGQERTYF

SEQ ID NO: 560742 - protein, 17 aa, Homo sapiens
  CDR3 for beta chain variable domain of TCR clone 280371 (TRBV11-2, TRBJ2-1)
CASSLYPPGVEYNEQFF

SEQ ID NO: 560743 - protein, 10 aa, Homo sapiens
  CDR3 for alpha chain variable domain of TCR clone 280372 (TRAV12-2, TRAJ48)
CAVTSEKLTF

SEQ ID NO: 560744 - protein, 13 aa, Homo sapiens
  CDR3 for beta chain variable domain of TCR clone 280372 (TRBV7-8, TRBJ2-7)
CASSLTGGREQYF

SEQ ID NO: 560745 - protein, 15 aa, Homo sapiens
  CDR3 for alpha chain variable domain of TCR clone 280373 (TRAV17, TRAJ22)
CATVAPSGSARQLTF

SEQ ID NO: 560746 - protein, 15 aa, Homo sapiens
  CDR3 for beta chain variable domain of TCR clone 280373 (TRBV7-9, TRBJ1-5)
CASSQGHQPNQPQHF

SEQ ID NO: 560747 - protein, 14 aa, Homo sapiens
  CDR3 for alpha chain variable domain of TCR clone 280374 (TRAV12-2, TRAJ13)
CAVKKTGGYQKVPF

SEQ ID NO: 560748 - protein, 14 aa, Homo sapiens
  CDR3 for beta chain variable domain of TCR clone 280374 (TRBV19, TRBJ2-1)
CASPTFVLSGEQFF

SEQ ID NO: 560749 - protein, 14 aa, Homo sapiens
  CDR3 for alpha chain variable domain of TCR clone 280375 (TRAV17, TRAJ12)
CAILPMDSSYKLIF

SEQ ID NO: 560750 - protein, 12 aa, Homo sapiens
  CDR3 for beta chain variable domain of TCR clone 280375 (TRBV2, TRBJ2-7)
CASTYRTDEQYF

SEQ ID NO: 560751 - protein, 10 aa, Homo sapiens
  CDR3 for alpha chain variable domain of TCR clone 280376 (TRAV26-1, TRAJ22)
CIVSLNFFWF

SEQ ID NO: 560752 - protein, 15 aa, Homo sapiens
  CDR3 for beta chain variable domain of TCR clone 280376 (TRBV4-2, TRBJ1-2)
CASSQRTGGRDGYTV

SEQ ID NO: 560753 - protein, 16 aa, Homo sapiens
  CDR3 for alpha chain variable domain of TCR clone 280377 (TRAV30, TRAJ24)
CGTEIVDADSWGKFQF

SEQ ID NO: 560754 - protein, 15 aa, Homo sapiens
  CDR3 for beta chain variable domain of TCR clone 280377 (TRBV4-1, TRBJ1-4)
CACSDTGGTNEKLFF

SEQ ID NO: 560755 - protein, 17 aa, Homo sapiens
  CDR3 for alpha chain variable domain of TCR clone 280378 (TRAV5, TRAJ37)
CAETPHRQTTLWARDNF

SEQ ID NO: 560756 - protein, 17 aa, Homo sapiens
  CDR3 for beta chain variable domain of TCR clone 280378 (TRBV29-1, TRBJ2-3)
CSVNAFRASGGVDTQYF

SEQ ID NO: 560757 - protein, 15 aa, Homo sapiens
  CDR3 for alpha chain variable domain of TCR clone 280379 (TRAV20, TRAJ53)
CAVQASGGSNYKLTF

SEQ ID NO: 560758 - protein, 12 aa, Homo sapiens
  CDR3 for beta chain variable domain of TCR clone 280379 (TRBV7-8, TRBJ2-7)
CASSLSDTGQYF

SEQ ID NO: 560759 - protein, 13 aa, Homo sapiens
  CDR3 for alpha chain variable domain of TCR clone 280380 (TRAV27, TRAJ6)
CAGGTRGSYIPPF

SEQ ID NO: 560760 - protein, 14 aa, Homo sapiens
  CDR3 for beta chain variable domain of TCR clone 280380 (TRBV5-1, TRBJ2-7)
CASSRGESLYEQYF

SEQ ID NO: 560761 - protein, 12 aa, Homo sapiens
  CDR3 for alpha chain variable domain of TCR clone 280381 (TRAV13-1, TRAJ21)
CAAKEGFYKFYF

SEQ ID NO: 560762 - protein, 14 aa, Homo sapiens
  CDR3 for beta chain variable domain of TCR clone 280381 (TRBV18, TRBJ2-7)
CASSPRGGAYEQYF

SEQ ID NO: 560763 - protein, 16 aa, Homo sapiens
  CDR3 for alpha chain variable domain of TCR clone 280382 (TRAV4, TRAJ9)
CLVGDPNRPGGFKTIF

SEQ ID NO: 560764 - protein, 16 aa, Homo sapiens
  CDR3 for beta chain variable domain of TCR clone 280382 (TRBV28, TRBJ1-4)
CASSPPYSGRSEKLFF

SEQ ID NO: 560765 - protein, 14 aa, Homo sapiens
  CDR3 for alpha chain variable domain of TCR clone 280383 (TRAV1-1, TRAJ27)
CAGIYNTNAGKSTF

SEQ ID NO: 560766 - protein, 12 aa, Homo sapiens
  CDR3 for beta chain variable domain of TCR clone 280383 (TRBV11-2, TRBJ2-1)
CASSPGNNEQFF

SEQ ID NO: 560767 - protein, 15 aa, Homo sapiens
  CDR3 for alpha chain variable domain of TCR clone 280384 (TRAV3, TRAJ5)
CAVRDLDTGRRALTF

SEQ ID NO: 560768 - protein, 13 aa, Homo sapiens
  CDR3 for beta chain variable domain of TCR clone 280384 (TRBV9, TRBJ2-1)
CASSVGQGGEQFF

SEQ ID NO: 560769 - protein, 14 aa, Homo sapiens
  CDR3 for alpha chain variable domain of TCR clone 280385 (TRAV8-2, TRAJ4)
CVVSPSGGYNKLIF

SEQ ID NO: 560770 - protein, 15 aa, Homo sapiens
  CDR3 for beta chain variable domain of TCR clone 280385 (TRBV4-1, TRBJ1-4)
SASSDTGGTNEKLFF

SEQ ID NO: 560771 - protein, 12 aa, Homo sapiens
  CDR3 for alpha chain variable domain of TCR clone 280386 (TRAV17, TRAJ20)
CATDRSDYKLSF

SEQ ID NO: 560772 - protein, 14 aa, Homo sapiens
  CDR3 for beta chain variable domain of TCR clone 280386 (TRBV19, TRBJ2-1)
CASPTFVLSGEQFF

SEQ ID NO: 560773 - protein, 16 aa, Homo sapiens
  CDR3 for alpha chain variable domain of TCR clone 280387 (TRAV21, TRAJ52)
CAVSDAGGTRYGKLTF

SEQ ID NO: 560774 - protein, 13 aa, Homo sapiens
  CDR3 for beta chain variable domain of TCR clone 280387 (TRBV7-3, TRBJ2-5)
CASSFRGSQTQYF

SEQ ID NO: 560775 - protein, 14 aa, Homo sapiens
  CDR3 for alpha chain variable domain of TCR clone 280388 (TRAV12-1, TRAJ8)
CVVTSNTGFQKLVF

SEQ ID NO: 560776 - protein, 17 aa, Homo sapiens
  CDR3 for beta chain variable domain of TCR clone 280388 (TRBV7-8, TRBJ2-6)
CASSAGTGGAGANVLTF

SEQ ID NO: 560777 - protein, 15 aa, Homo sapiens
  CDR3 for alpha chain variable domain of TCR clone 280389 (TRAV17, TRAJ57)
CATGPSQGGSEMLVF

SEQ ID NO: 560778 - protein, 16 aa, Homo sapiens
  CDR3 for beta chain variable domain of TCR clone 280389 (TRBV12-4, TRBJ1-5)
CASSRPVGGSNQPQHF

SEQ ID NO: 560779 - protein, 14 aa, Homo sapiens
  CDR3 for alpha chain variable domain of TCR clone 280390 (TRAV35, TRAJ38)
CAGSNAGNNRKLIW

SEQ ID NO: 560780 - protein, 12 aa, Homo sapiens
  CDR3 for beta chain variable domain of TCR clone 280390 (TRBV19, TRBJ2-7)
CASTDRGYKQYF

SEQ ID NO: 560781 - protein, 14 aa, Homo sapiens
  CDR3 for alpha chain variable domain of TCR clone 280391 (TRAV12-1, TRAJ17)
CVVNYKAAGNKLTF

SEQ ID NO: 560782 - protein, 17 aa, Homo sapiens
  CDR3 for beta chain variable domain of TCR clone 280391 (TRBV3-1, TRBJ2-2)
CASSQFRDKVDTGELFF

SEQ ID NO: 560783 - protein, 13 aa, Homo sapiens
  CDR3 for alpha chain variable domain of TCR clone 280392 (TRAV1-2, TRAJ33)
CAVSEDSNYQLIW

SEQ ID NO: 560784 - protein, 13 aa, Homo sapiens
  CDR3 for beta chain variable domain of TCR clone 280392 (TRBV7-2, TRBJ2-7)
CASSSPSGSEQYF

SEQ ID NO: 560785 - protein, 15 aa, Homo sapiens
  CDR3 for alpha chain variable domain of TCR clone 280393 (TRAV25, TRAJ52)
CAGRPGGTSYGKLTF

SEQ ID NO: 560786 - protein, 20 aa, Homo sapiens
  CDR3 for beta chain variable domain of TCR clone 280393 (TRBV28, TRBJ2-1)
CASTPIGRSPGLAGGNEQFF

SEQ ID NO: 560787 - protein, 14 aa, Homo sapiens
  CDR3 for alpha chain variable domain of TCR clone 280394 (TRAV12-3, TRAJ10)
SHLPLTGGGNKLTF

SEQ ID NO: 560788 - protein, 17 aa, Homo sapiens
  CDR3 for beta chain variable domain of TCR clone 280394 (TRBV4-2, TRBJ1-1)
CASTQFGGGSGNAEAFF

SEQ ID NO: 560789 - protein, 14 aa, Homo sapiens
  CDR3 for alpha chain variable domain of TCR clone 280395 (TRAV8-1, TRAJ39)
CAVNASNAGNMLTF

SEQ ID NO: 560790 - protein, 13 aa, Homo sapiens
  CDR3 for beta chain variable domain of TCR clone 280395 (TRBV12-4, TRBJ2-5)
CASSPGTAETQYF

SEQ ID NO: 560791 - protein, 12 aa, Homo sapiens
  CDR3 for alpha chain variable domain of TCR clone 280396 (TRAV26-1, TRAJ35)
CIGLSFGNVLHC

SEQ ID NO: 560792 - protein, 14 aa, Homo sapiens
  CDR3 for beta chain variable domain of TCR clone 280396 (TRBV7-6, TRBJ2-3)
CASSLGTVTDTQYF

SEQ ID NO: 560793 - protein, 16 aa, Homo sapiens
  CDR3 for alpha chain variable domain of TCR clone 280397 (TRAV17, TRAJ22)
CATGPISSGSARQLTF

SEQ ID NO: 560794 - protein, 17 aa, Homo sapiens
  CDR3 for beta chain variable domain of TCR clone 280397 (TRBV7-3, TRBJ2-2)
CASSLSGTSGGTGELFF

SEQ ID NO: 560795 - protein, 13 aa, Homo sapiens
  CDR3 for alpha chain variable domain of TCR clone 280398 (TRAV30, TRAJ34)
CGTVGYNTDKLIF

SEQ ID NO: 560796 - protein, 16 aa, Homo sapiens
  CDR3 for beta chain variable domain of TCR clone 280398 (TRBV7-9, TRBJ1-2)
CASSLGLSSGEDGDTF

SEQ ID NO: 560797 - protein, 15 aa, Homo sapiens
  CDR3 for alpha chain variable domain of TCR clone 280399 (TRAV3, TRAJ4)
CAVRDGTGGYNKRSF

SEQ ID NO: 560798 - protein, 16 aa, Homo sapiens
  CDR3 for beta chain variable domain of TCR clone 280399 (TRBV27, TRBJ2-2)
CASSSSGVSNTGELFF

SEQ ID NO: 560799 - protein, 16 aa, Homo sapiens
  CDR3 for alpha chain variable domain of TCR clone 280400 (TRAV3, TRAJ10)
CAVRDMRAGGGNKLTF

SEQ ID NO: 560800 - protein, 23 aa, Homo sapiens
  CDR3 for beta chain variable domain of TCR clone 280400 (TRBV11-3, TRBJ2-7)
LGTRPCISVPAAKGLAGACEQYF

SEQ ID NO: 560801 - protein, 12 aa, Homo sapiens
  CDR3 for alpha chain variable domain of TCR clone 280401 (TRAV12-3, TRAJ20)
CAMVRGDYKLSF

SEQ ID NO: 560802 - protein, 15 aa, Homo sapiens
  CDR3 for beta chain variable domain of TCR clone 280401 (TRBV2, TRBJ2-1)
CASSDRSSGAREQFF

SEQ ID NO: 560803 - protein, 14 aa, Homo sapiens
  CDR3 for alpha chain variable domain of TCR clone 280402 (TRAV1-2, TRAJ15)
CAVIDRQAGTALIF

SEQ ID NO: 560804 - protein, 15 aa, Homo sapiens
  CDR3 for beta chain variable domain of TCR clone 280402 (TRBV7-2, TRBJ2-1)
CASSLASGRVNEQFF

SEQ ID NO: 560805 - protein, 14 aa, Homo sapiens
  CDR3 for alpha chain variable domain of TCR clone 280403 (TRAV12-2, TRAJ24)
CAVTPADSWGKLQF

SEQ ID NO: 560806 - protein, 13 aa, Homo sapiens
  CDR3 for beta chain variable domain of TCR clone 280403 (TRBV10-3, TRBJ2-7)
CASKLAVNYEQYF

SEQ ID NO: 560807 - protein, 12 aa, Homo sapiens
  CDR3 for alpha chain variable domain of TCR clone 280404 (TRAV1-2, TRAJ42)
CVAGGSQGNLIF

SEQ ID NO: 560808 - protein, 14 aa, Homo sapiens
  CDR3 for beta chain variable domain of TCR clone 280404 (TRBV5-1, TRBJ2-7)
CASSLFTGTHEQYF

SEQ ID NO: 560809 - protein, 15 aa, Homo sapiens
  CDR3 for alpha chain variable domain of TCR clone 280405 (TRAV20, TRAJ53)
CAVQASGGSNYKLTF

SEQ ID NO: 560810 - protein, 12 aa, Homo sapiens
  CDR3 for beta chain variable domain of TCR clone 280405 (TRBV7-8, TRBJ2-7)
CASSLSEIEQYF

SEQ ID NO: 560811 - protein, 18 aa, Homo sapiens
  CDR3 for alpha chain variable domain of TCR clone 280406 (TRAV21, TRAJ52)
CAVRPSPAGGTIYGKLTF

SEQ ID NO: 560812 - protein, 13 aa, Homo sapiens
  CDR3 for beta chain variable domain of TCR clone 280406 (TRBV10-3, TRBJ2-7)
CASKLAVNYEQYF

SEQ ID NO: 560813 - protein, 14 aa, Homo sapiens
  CDR3 for alpha chain variable domain of TCR clone 280407 (TRAV13-2, TRAJ17)
CAENSKAAGNKLTF

SEQ ID NO: 560814 - protein, 12 aa, Homo sapiens
  CDR3 for beta chain variable domain of TCR clone 280407 (TRBV19, TRBJ2-1)
CASSRQGAEQFF

SEQ ID NO: 560815 - protein, 15 aa, Homo sapiens
  CDR3 for alpha chain variable domain of TCR clone 280408 (TRAV1-2, TRAJ28)
CAVQYSGAGSYQLTF

SEQ ID NO: 560816 - protein, 13 aa, Homo sapiens
  CDR3 for beta chain variable domain of TCR clone 280408 (TRBV28, TRBJ2-7)
CASKAGGVYQQYF

SEQ ID NO: 560817 - protein, 15 aa, Homo sapiens
  CDR3 for alpha chain variable domain of TCR clone 280409 (TRAV29/DV5, TRAJ29)
CAASERSSGNTPLVF

SEQ ID NO: 560818 - protein, 17 aa, Homo sapiens
  CDR3 for beta chain variable domain of TCR clone 280409 (TRBV11-2, TRBJ2-1)
CASSLYPPGVEYNEQFF

SEQ ID NO: 560819 - protein, 14 aa, Homo sapiens
  CDR3 for alpha chain variable domain of TCR clone 280410 (TRAV2, TRAJ9)
CAVEDRSGGFNTIF

SEQ ID NO: 560820 - protein, 15 aa, Homo sapiens
  CDR3 for beta chain variable domain of TCR clone 280410 (TRBV29-1, TRBJ2-1)
CSGRDRKSSYNEQFF

SEQ ID NO: 560821 - protein, 14 aa, Homo sapiens
  CDR3 for alpha chain variable domain of TCR clone 280411 (TRAV35, TRAJ34)
CAGRGTPTSSSLGL

SEQ ID NO: 560822 - protein, 16 aa, Homo sapiens
  CDR3 for beta chain variable domain of TCR clone 280411 (TRBV12-5, TRBJ2-5)
CASGPRTSGNQETQYF

SEQ ID NO: 560823 - protein, 11 aa, Homo sapiens
  CDR3 for alpha chain variable domain of TCR clone 280412 (TRAV21, TRAJ41)
CAVRSGYALNS

SEQ ID NO: 560824 - protein, 13 aa, Homo sapiens
  CDR3 for beta chain variable domain of TCR clone 280412 (TRBV7-9, TRBJ1-2)
CASSLKQNYGYTV

SEQ ID NO: 560825 - protein, 15 aa, Homo sapiens
  CDR3 for alpha chain variable domain of TCR clone 280413 (TRAV26-1, TRAJ29)
CIVRFEGSGNTPLVF

SEQ ID NO: 560826 - protein, 15 aa, Homo sapiens
  CDR3 for beta chain variable domain of TCR clone 280413 (TRBV7-9, TRBJ1-5)
CASSRGHQPNQPQHF

SEQ ID NO: 560827 - protein, 17 aa, Homo sapiens
  CDR3 for alpha chain variable domain of TCR clone 280414 (TRAV29/DV5, TRAJ40)
CAASVIYTTSGTYKYIF

SEQ ID NO: 560828 - protein, 11 aa, Homo sapiens
  CDR3 for beta chain variable domain of TCR clone 280414 (TRBV19, TRBJ1-1)
CASSIGSEAFF

SEQ ID NO: 560829 - protein, 13 aa, Homo sapiens
  CDR3 for alpha chain variable domain of TCR clone 280415 (TRAV2, TRAJ15)
CAVASQAGTALIF

SEQ ID NO: 560830 - protein, 14 aa, Homo sapiens
  CDR3 for beta chain variable domain of TCR clone 280415 (TRBV25-1, TRBJ1-1)
CASTHLGGNTDAFF

SEQ ID NO: 560831 - protein, 14 aa, Homo sapiens
  CDR3 for alpha chain variable domain of TCR clone 280416 (TRAV12-3, TRAJ33)
CAMSVPGSNYQLIW

SEQ ID NO: 560832 - protein, 15 aa, Homo sapiens
  CDR3 for beta chain variable domain of TCR clone 280416 (TRBV9, TRBJ2-1)
CASSLAGSSYNEQFF

SEQ ID NO: 560833 - protein, 14 aa, Homo sapiens
  CDR3 for alpha chain variable domain of TCR clone 280417 (TRAV26-1, TRAJ33)
CIVRNMDSNYQLIW

SEQ ID NO: 560834 - protein, 16 aa, Homo sapiens
  CDR3 for beta chain variable domain of TCR clone 280417 (TRBV19, TRBJ2-1)
CASSKAGPSSYNEQFF

SEQ ID NO: 560835 - protein, 14 aa, Homo sapiens
  CDR3 for alpha chain variable domain of TCR clone 280418 (TRAV12-3, TRAJ9)
CAMSPNTGGFKTIF

SEQ ID NO: 560836 - protein, 13 aa, Homo sapiens
  CDR3 for beta chain variable domain of TCR clone 280418 (TRBV4-1, TRBJ1-1)
CASSLRGPTEAFF

SEQ ID NO: 560837 - protein, 11 aa, Homo sapiens
  CDR3 for alpha chain variable domain of TCR clone 280419 (TRAV12-2, TRAJ39)
CAVNNMLTFGG

SEQ ID NO: 560838 - protein, 16 aa, Homo sapiens
  CDR3 for beta chain variable domain of TCR clone 280419 (TRBV5-3, TRBJ2-2)
CARSLGTGTNTGELFF

SEQ ID NO: 560839 - protein, 14 aa, Homo sapiens
  CDR3 for alpha chain variable domain of TCR clone 280420 (TRAV8-1, TRAJ5)
CVVRTDTGRRALTF

SEQ ID NO: 560840 - protein, 14 aa, Homo sapiens
  CDR3 for beta chain variable domain of TCR clone 280420 (TRBV7-8, TRBJ2-3)
CASSFPDGQDTQYF

SEQ ID NO: 560841 - protein, 15 aa, Homo sapiens
  CDR3 for alpha chain variable domain of TCR clone 280421 (TRAV3, TRAJ3)
CAVRDLRSSASKIIF

SEQ ID NO: 560842 - protein, 13 aa, Homo sapiens
  CDR3 for beta chain variable domain of TCR clone 280421 (TRBV9, TRBJ2-5)
CASSPAGLGTQYF

SEQ ID NO: 560843 - protein, 14 aa, Homo sapiens
  CDR3 for alpha chain variable domain of TCR clone 280422 (TRAV12-2, TRAJ13)
CAVKTTGGYQKVTF

SEQ ID NO: 560844 - protein, 17 aa, Homo sapiens
  CDR3 for beta chain variable domain of TCR clone 280422 (TRBV28, TRBJ2-5)
CASSTPEGDALQETQYF

SEQ ID NO: 560845 - protein, 18 aa, Homo sapiens
  CDR3 for alpha chain variable domain of TCR clone 280423 (TRAV21, TRAJ52)
CAVRPSPAGGTSYGKLTF

SEQ ID NO: 560846 - protein, 11 aa, Homo sapiens
  CDR3 for beta chain variable domain of TCR clone 280423 (TRBV25-1, TRBJ2-4)
CQSGDQNIQYF

SEQ ID NO: 560847 - protein, 15 aa, Homo sapiens
  CDR3 for alpha chain variable domain of TCR clone 280424 (TRAV29/DV5, TRAJ42)
SAAKADGGSQGNLIF

SEQ ID NO: 560848 - protein, 12 aa, Homo sapiens
  CDR3 for beta chain variable domain of TCR clone 280424 (TRBV11-2, TRBJ2-1)
CASSPGNNEQFF

SEQ ID NO: 560849 - protein, 16 aa, Homo sapiens
  CDR3 for alpha chain variable domain of TCR clone 280425 (TRAV27, TRAJ48)
TAAQPGDTGLYPPLTF

SEQ ID NO: 560850 - protein, 13 aa, Homo sapiens
  CDR3 for beta chain variable domain of TCR clone 280425 (TRBV7-2, TRBJ2-5)
CASSQTSVETQYF

SEQ ID NO: 560851 - protein, 13 aa, Homo sapiens
  CDR3 for alpha chain variable domain of TCR clone 280426 (TRAV26-1, TRAJ40)
CIVATSGTYKYIF

SEQ ID NO: 560852 - protein, 13 aa, Homo sapiens
  CDR3 for beta chain variable domain of TCR clone 280426 (TRBV7-3, TRBJ1-1)
CASSQDWGAEAFF

SEQ ID NO: 560853 - protein, 14 aa, Homo sapiens
  CDR3 for alpha chain variable domain of TCR clone 280427 (TRAV1-2, TRAJ16)
CAVNRFSDGQTLLF

SEQ ID NO: 560854 - protein, 14 aa, Homo sapiens
  CDR3 for beta chain variable domain of TCR clone 280427 (TRBV7-8, TRBJ2-3)
CASSLEAGTDTQYF

SEQ ID NO: 560855 - protein, 12 aa, Homo sapiens
  CDR3 for alpha chain variable domain of TCR clone 280428 (TRAV12-2, TRAJ4)
GWPEAGYNKLIF

SEQ ID NO: 560856 - protein, 16 aa, Homo sapiens
  CDR3 for beta chain variable domain of TCR clone 280428 (TRBV6-1, TRBJ2-5)
CASSETLDRGAETQYF

SEQ ID NO: 560857 - protein, 14 aa, Homo sapiens
  CDR3 for alpha chain variable domain of TCR clone 280429 (TRAV12-2, TRAJ40)
CAVKIPSGTYKYIF

SEQ ID NO: 560858 - protein, 14 aa, Homo sapiens
  CDR3 for beta chain variable domain of TCR clone 280429 (TRBV18, TRBJ2-5)
CASSPLRVQGTQYF

SEQ ID NO: 560859 - protein, 16 aa, Homo sapiens
  CDR3 for alpha chain variable domain of TCR clone 280430 (TRAV3, TRAJ37)
CSVRPHGSGNTGKPIF

SEQ ID NO: 560860 - protein, 11 aa, Homo sapiens
  CDR3 for beta chain variable domain of TCR clone 280430 (TRBV10-3, TRBJ2-7)
CAISEGLEQYF

SEQ ID NO: 560861 - protein, 14 aa, Homo sapiens
  CDR3 for alpha chain variable domain of TCR clone 280431 (TRAV2, TRAJ37)
CAVAFTSNTGTLIF

SEQ ID NO: 560862 - protein, 15 aa, Homo sapiens
  CDR3 for beta chain variable domain of TCR clone 280431 (TRBV20-1, TRBJ1-1)
CSASRGVTGNTEAFF

SEQ ID NO: 560863 - protein, 11 aa, Homo sapiens
  CDR3 for alpha chain variable domain of TCR clone 280432 (TRAV17, TRAJ43)
CATPRSNDVRF

SEQ ID NO: 560864 - protein, 15 aa, Homo sapiens
  CDR3 for beta chain variable domain of TCR clone 280432 (TRBV11-2, TRBJ2-1)
CTSSLGTSGLNEQFF

SEQ ID NO: 560865 - protein, 11 aa, Homo sapiens
  CDR3 for alpha chain variable domain of TCR clone 280433 (TRAV2, TRAJ33)
CAVESNYLLIW

SEQ ID NO: 560866 - protein, 15 aa, Homo sapiens
  CDR3 for beta chain variable domain of TCR clone 280433 (TRBV19, TRBJ1-1)
CASTSGQIQNTEAFL

SEQ ID NO: 560867 - protein, 15 aa, Homo sapiens
  CDR3 for alpha chain variable domain of TCR clone 280434 (TRAV13-1, TRAJ44)
CAASRGGGTASKLTF

SEQ ID NO: 560868 - protein, 14 aa, Homo sapiens
  CDR3 for beta chain variable domain of TCR clone 280434 (TRBV7-2, TRBJ2-5)
YASSPRGISETQYF

SEQ ID NO: 560869 - protein, 13 aa, Homo sapiens
  CDR3 for alpha chain variable domain of TCR clone 280435 (TRAV17, TRAJ26)
CVTVVNYGQNFVF

SEQ ID NO: 560870 - protein, 16 aa, Homo sapiens
  CDR3 for beta chain variable domain of TCR clone 280435 (TRBV2, TRBJ2-1)
CASSVGGSLSYNEQFF

SEQ ID NO: 560871 - protein, 14 aa, Homo sapiens
  CDR3 for alpha chain variable domain of TCR clone 280436 (TRAV23/DV6, TRAJ4)
CAANPSGGYNKLIF

SEQ ID NO: 560872 - protein, 11 aa, Homo sapiens
  CDR3 for beta chain variable domain of TCR clone 280436 (TRBV7-9, TRBJ2-3)
CASSPTDTQYF

SEQ ID NO: 560873 - protein, 17 aa, Homo sapiens
  CDR3 for alpha chain variable domain of TCR clone 280437 (TRAV23/DV6, TRAJ53)
CAAGKLGSGGSNYKLTF

SEQ ID NO: 560874 - protein, 14 aa, Homo sapiens
  CDR3 for beta chain variable domain of TCR clone 280437 (TRBV7-9, TRBJ2-3)
CASSLEQGTNTQYF

SEQ ID NO: 560875 - protein, 10 aa, Homo sapiens
  CDR3 for alpha chain variable domain of TCR clone 280438 (TRAV8-4, TRAJ43)
CAVSADDMRF

SEQ ID NO: 560876 - protein, 15 aa, Homo sapiens
  CDR3 for beta chain variable domain of TCR clone 280438 (TRBV5-1, TRBJ2-3)
WASSVTSGSTDTQYF

SEQ ID NO: 560877 - protein, 12 aa, Homo sapiens
  CDR3 for alpha chain variable domain of TCR clone 280439 (TRAV12-1, TRAJ40)
CVFYSGTYKYLF

SEQ ID NO: 560878 - protein, 10 aa, Homo sapiens
  CDR3 for beta chain variable domain of TCR clone 280439 (TRBV12-4, TRBJ2-2)
CASSLVAGTR

SEQ ID NO: 560879 - protein, 13 aa, Homo sapiens
  CDR3 for alpha chain variable domain of TCR clone 280440 (TRAV39, TRAJ48)
CAAVNFGNEKLTF

SEQ ID NO: 560880 - protein, 12 aa, Homo sapiens
  CDR3 for beta chain variable domain of TCR clone 280440 (TRBV5-5, TRBJ2-5)
CASSYFGEAQYF

SEQ ID NO: 560881 - protein, 12 aa, Homo sapiens
  CDR3 for alpha chain variable domain of TCR clone 280441 (TRAV12-3, TRAJ5)
CAMDTGRRALTF

SEQ ID NO: 560882 - protein, 16 aa, Homo sapiens
  CDR3 for beta chain variable domain of TCR clone 280441 (TRBV18, TRBJ1-1)
CASSPGVGGRGGEAFF

SEQ ID NO: 560883 - protein, 15 aa, Homo sapiens
  CDR3 for alpha chain variable domain of TCR clone 280442 (TRAV26-1, TRAJ23)
CIVRVAGYQGGKLIF

SEQ ID NO: 560884 - protein, 18 aa, Homo sapiens
  CDR3 for beta chain variable domain of TCR clone 280442 (TRBV28, TRBJ2-1)
CACSSTSGRANSYNEQFF

SEQ ID NO: 560885 - protein, 17 aa, Homo sapiens
  CDR3 for alpha chain variable domain of TCR clone 280443 (TRAV17, TRAJ7)
CATLGRPAFGKGNQVVV

SEQ ID NO: 560886 - protein, 13 aa, Homo sapiens
  CDR3 for beta chain variable domain of TCR clone 280443 (TRBV12-4, TRBJ2-7)
CASSLERVSEQYF

SEQ ID NO: 560887 - protein, 14 aa, Homo sapiens
  CDR3 for alpha chain variable domain of TCR clone 280444 (TRAV3, TRAJ21)
CAVEYQANFNKFYF

SEQ ID NO: 560888 - protein, 12 aa, Homo sapiens
  CDR3 for beta chain variable domain of TCR clone 280444 (TRBV6-3, TRBJ2-7)
CASSLTPYEQYF

SEQ ID NO: 560889 - protein, 13 aa, Homo sapiens
  CDR3 for alpha chain variable domain of TCR clone 280445 (TRAV41, TRAJ44)
CAVISGTASKLTF

SEQ ID NO: 560890 - protein, 15 aa, Homo sapiens
  CDR3 for beta chain variable domain of TCR clone 280445 (TRBV20-1, TRBJ2-7)
CSARDRVSGMDEQYF

SEQ ID NO: 560891 - protein, 18 aa, Homo sapiens
  CDR3 for alpha chain variable domain of TCR clone 280446 (TRAV13-2, TRAJ52)
CAETPLNAGGTSLGKLTF

SEQ ID NO: 560892 - protein, 15 aa, Homo sapiens
  CDR3 for beta chain variable domain of TCR clone 280446 (TRBV7-2, TRBJ2-7)
CASSLKGALTYEQYF

SEQ ID NO: 560893 - protein, 13 aa, Homo sapiens
  CDR3 for alpha chain variable domain of TCR clone 280447 (TRAV2, TRAJ15)
CAVASQAGTALIF

SEQ ID NO: 560894 - protein, 13 aa, Homo sapiens
  CDR3 for beta chain variable domain of TCR clone 280447 (TRBV29-1, TRBJ2-1)
CSVEGGRVNEQFF

SEQ ID NO: 560895 - protein, 13 aa, Homo sapiens
  CDR3 for alpha chain variable domain of TCR clone 280448 (TRAV2, TRAJ15)
CAVASQAGTALIF

SEQ ID NO: 560896 - protein, 15 aa, Homo sapiens
  CDR3 for beta chain variable domain of TCR clone 280448 (TRBV11-3, TRBJ2-3)
CASLKDGRQGDTQYF

SEQ ID NO: 560897 - protein, 16 aa, Homo sapiens
  CDR3 for alpha chain variable domain of TCR clone 280449 (TRAV27, TRAJ45)
CPPRGRSGGGADGLTF

SEQ ID NO: 560898 - protein, 13 aa, Homo sapiens
  CDR3 for beta chain variable domain of TCR clone 280449 (TRBV7-3, TRBJ1-1)
CASSQDWGAEAFF

SEQ ID NO: 560899 - protein, 14 aa, Homo sapiens
  CDR3 for alpha chain variable domain of TCR clone 280450 (TRAV3, TRAJ26)
CAVRDYNYGQYFVF

SEQ ID NO: 560900 - protein, 15 aa, Homo sapiens
  CDR3 for beta chain variable domain of TCR clone 280450 (TRBV20-1, TRBJ2-5)
CSANPPGRGGETQYF

SEQ ID NO: 560901 - protein, 14 aa, Homo sapiens
  CDR3 for alpha chain variable domain of TCR clone 280451 (TRAV1-2, TRAJ16)
CAVNRFSDGQKLLF

SEQ ID NO: 560902 - protein, 15 aa, Homo sapiens
  CDR3 for beta chain variable domain of TCR clone 280451 (TRBV3-1, TRBJ2-5)
CASSANLGDPETQYF

SEQ ID NO: 560903 - protein, 13 aa, Homo sapiens
  CDR3 for alpha chain variable domain of TCR clone 280452 (TRAV38-2/DV8, TRAJ34)
CAYRNYNTDKLIF

SEQ ID NO: 560904 - protein, 16 aa, Homo sapiens
  CDR3 for beta chain variable domain of TCR clone 280452 (TRBV7-3, TRBJ2-2)
CASSLRRGTLSGELFF

SEQ ID NO: 560905 - protein, 16 aa, Homo sapiens
  CDR3 for alpha chain variable domain of TCR clone 280453 (TRAV30, TRAJ24)
CGTEIVDADSWGKFQF

SEQ ID NO: 560906 - protein, 16 aa, Homo sapiens
  CDR3 for beta chain variable domain of TCR clone 280453 (TRBV2, TRBJ1-3)
CASSGGAGRSGDTIYF

SEQ ID NO: 560907 - protein, 12 aa, Homo sapiens
  CDR3 for alpha chain variable domain of TCR clone 280454 (TRAV21, TRAJ3)
CCFYSSASKIIF

SEQ ID NO: 560908 - protein, 16 aa, Homo sapiens
  CDR3 for beta chain variable domain of TCR clone 280454 (TRBV19, TRBJ2-1)
CASSKAGPSSYMSSSS

SEQ ID NO: 560909 - protein, 14 aa, Homo sapiens
  CDR3 for alpha chain variable domain of TCR clone 280455 (TRAV12-2, TRAJ5)
CAVNRSTGRRALTF

SEQ ID NO: 560910 - protein, 18 aa, Homo sapiens
  CDR3 for beta chain variable domain of TCR clone 280455 (TRBV18, TRBJ2-3)
CASSYTSGAAGGTDTQYF

SEQ ID NO: 560911 - protein, 14 aa, Homo sapiens
  CDR3 for alpha chain variable domain of TCR clone 280456 (TRAV12-2, TRAJ40)
CAVKIPSGTYNYLF

SEQ ID NO: 560912 - protein, 14 aa, Homo sapiens
  CDR3 for beta chain variable domain of TCR clone 280456 (TRBV20-1, TRBJ1-1)
CSAQTRIGGTEAFF

SEQ ID NO: 560913 - protein, 11 aa, Homo sapiens
  CDR3 for alpha chain variable domain of TCR clone 280457 (TRAV12-3, TRAJ43)
CAMSVSNDIRF

SEQ ID NO: 560914 - protein, 13 aa, Homo sapiens
  CDR3 for beta chain variable domain of TCR clone 280457 (TRBV20-1, TRBJ1-1)
CSATLGGGTEAFF

SEQ ID NO: 560915 - protein, 14 aa, Homo sapiens
  CDR3 for alpha chain variable domain of TCR clone 280458 (TRAV13-1, TRAJ40)
CAASMTSGTYKYIF

SEQ ID NO: 560916 - protein, 15 aa, Homo sapiens
  CDR3 for beta chain variable domain of TCR clone 280458 (TRBV7-3, TRBJ2-1)
CASSPTEGGEVEQFC

SEQ ID NO: 560917 - protein, 14 aa, Homo sapiens
  CDR3 for alpha chain variable domain of TCR clone 280459 (TRAV8-4, TRAJ37)
CAVSEPSNTGKLIF

SEQ ID NO: 560918 - protein, 14 aa, Homo sapiens
  CDR3 for beta chain variable domain of TCR clone 280459 (TRBV28, TRBJ2-1)
CAIHRTGARTAQFF

SEQ ID NO: 560919 - protein, 14 aa, Homo sapiens
  CDR3 for alpha chain variable domain of TCR clone 280460 (TRAV8-6, TRAJ29)
CAVSRASGNTPLVF

SEQ ID NO: 560920 - protein, 13 aa, Homo sapiens
  CDR3 for beta chain variable domain of TCR clone 280460 (TRBV19, TRBJ1-5)
CASGEGSNQPQHF

SEQ ID NO: 560921 - protein, 13 aa, Homo sapiens
  CDR3 for alpha chain variable domain of TCR clone 280461 (TRAV13-2, TRAJ10)
CADSTGGGNKLTF

SEQ ID NO: 560922 - protein, 17 aa, Homo sapiens
  CDR3 for beta chain variable domain of TCR clone 280461 (TRBV11-2, TRBJ2-1)
CASSLYPPGVEYNEQFF

SEQ ID NO: 560923 - protein, 13 aa, Homo sapiens
  CDR3 for alpha chain variable domain of TCR clone 280462 (TRAV12-3, TRAJ9)
CAMRNTGGFKTIF

SEQ ID NO: 560924 - protein, 16 aa, Homo sapiens
  CDR3 for beta chain variable domain of TCR clone 280462 (TRBV6-1, TRBJ1-3)
CASVQGGVETPYILER

SEQ ID NO: 560925 - protein, 15 aa, Homo sapiens
  CDR3 for alpha chain variable domain of TCR clone 280463 (TRAV3, TRAJ22)
CAVRDRGGSARHLTF

SEQ ID NO: 560926 - protein, 14 aa, Homo sapiens
  CDR3 for beta chain variable domain of TCR clone 280463 (TRBV19, TRBJ2-1)
CASSRLASINEQSF

SEQ ID NO: 560927 - protein, 13 aa, Homo sapiens
  CDR3 for alpha chain variable domain of TCR clone 280464 (TRAV13-1, TRAJ9)
CAARGTGGFKTIF

SEQ ID NO: 560928 - protein, 12 aa, Homo sapiens
  CDR3 for beta chain variable domain of TCR clone 280464 (TRBV2, TRBJ2-1)
YAYGPPGNEQYF

SEQ ID NO: 560929 - protein, 12 aa, Homo sapiens
  CDR3 for alpha chain variable domain of TCR clone 280465 (TRAV29/DV5, TRAJ49)
CAATDTGNQFYF

SEQ ID NO: 560930 - protein, 12 aa, Homo sapiens
  CDR3 for beta chain variable domain of TCR clone 280465 (TRBV6-5, TRBJ2-2)
CASRTGTGELFF

SEQ ID NO: 560931 - protein, 14 aa, Homo sapiens
  CDR3 for alpha chain variable domain of TCR clone 280466 (TRAV17, TRAJ34)
CATDSLEGTDKLIF

SEQ ID NO: 560932 - protein, 12 aa, Homo sapiens
  CDR3 for beta chain variable domain of TCR clone 280466 (TRBV11-2, TRBJ2-2)
CASSLGGGELFF

SEQ ID NO: 560933 - protein, 14 aa, Homo sapiens
  CDR3 for alpha chain variable domain of TCR clone 280467 (TRAV36/DV7, TRAJ44)
CCGANTGTASKLTF

SEQ ID NO: 560934 - protein, 18 aa, Homo sapiens
  CDR3 for beta chain variable domain of TCR clone 280467 (TRBV12-4, TRBJ2-2)
CASSLVAGTRGRTGELFF

SEQ ID NO: 560935 - protein, 14 aa, Homo sapiens
  CDR3 for alpha chain variable domain of TCR clone 280468 (TRAV12-2, TRAJ48)
CAVDAFFGNEKLTF

SEQ ID NO: 560936 - protein, 13 aa, Homo sapiens
  CDR3 for beta chain variable domain of TCR clone 280468 (TRBV28, TRBJ2-7)
CAGAQQGLDEQYF

SEQ ID NO: 560937 - protein, 14 aa, Homo sapiens
  CDR3 for alpha chain variable domain of TCR clone 280469 (TRAV17, TRAJ12)
CATDGVDSSYKLIF

SEQ ID NO: 560938 - protein, 14 aa, Homo sapiens
  CDR3 for beta chain variable domain of TCR clone 280469 (TRBV18, TRBJ2-5)
CASSPGVSQETQYF

SEQ ID NO: 560939 - protein, 14 aa, Homo sapiens
  CDR3 for alpha chain variable domain of TCR clone 280470 (TRAV29/DV5, TRAJ36)
CAARRKTGATNLFF

SEQ ID NO: 560940 - protein, 12 aa, Homo sapiens
  CDR3 for beta chain variable domain of TCR clone 280470 (TRBV12-5, TRBJ2-5)
CASGQGVETQYF

SEQ ID NO: 560941 - protein, 18 aa, Homo sapiens
  CDR3 for alpha chain variable domain of TCR clone 280471 (TRAV8-4, TRAJ52)
CAVTRANAGGTSYGKLTF

SEQ ID NO: 560942 - protein, 20 aa, Homo sapiens
  CDR3 for beta chain variable domain of TCR clone 280471 (TRBV19, TRBJ2-1)
CASSISRTVTSTRLNKEQFF

SEQ ID NO: 560943 - protein, 15 aa, Homo sapiens
  CDR3 for alpha chain variable domain of TCR clone 280472 (TRAV17, TRAJ35)
CATAFVIGFGNVLHC

SEQ ID NO: 560944 - protein, 13 aa, Homo sapiens
  CDR3 for beta chain variable domain of TCR clone 280472 (TRBV11-2, TRBJ2-5)
CASSSTGEETQYF

SEQ ID NO: 560945 - protein, 14 aa, Homo sapiens
  CDR3 for alpha chain variable domain of TCR clone 280473 (TRAV26-1, TRAJ49)
CIVRLTNTGNQFYC

SEQ ID NO: 560946 - protein, 13 aa, Homo sapiens
  CDR3 for beta chain variable domain of TCR clone 280473 (TRBV4-1, TRBJ2-7)
CASSQGQAYEQYF

SEQ ID NO: 560947 - protein, 12 aa, Homo sapiens
  CDR3 for alpha chain variable domain of TCR clone 280474 (TRAV20, TRAJ39)
CAVGNAGTMLTF

SEQ ID NO: 560948 - protein, 16 aa, Homo sapiens
  CDR3 for beta chain variable domain of TCR clone 280474 (TRBV15, TRBJ1-2)
CATSRGPRTGGGGYTF

SEQ ID NO: 560949 - protein, 13 aa, Homo sapiens
  CDR3 for alpha chain variable domain of TCR clone 280475 (TRAV1-1, TRAJ9)
CAAKNTGGFKTIF

SEQ ID NO: 560950 - protein, 13 aa, Homo sapiens
  CDR3 for beta chain variable domain of TCR clone 280475 (TRBV29-1, TRBJ1-1)
CSVGDSRNTEAFF

SEQ ID NO: 560951 - protein, 14 aa, Homo sapiens
  CDR3 for alpha chain variable domain of TCR clone 280476 (TRAV12-1, TRAJ42)
CVVIYGGSQGNLIF

SEQ ID NO: 560952 - protein, 13 aa, Homo sapiens
  CDR3 for beta chain variable domain of TCR clone 280476 (TRBV18, TRBJ2-5)
CASSPPGKEQQYF

SEQ ID NO: 560953 - protein, 16 aa, Homo sapiens
  CDR3 for alpha chain variable domain of TCR clone 280477 (TRAV16, TRAJ42)
CARKMNYGRSQGNLIF

SEQ ID NO: 560954 - protein, 15 aa, Homo sapiens
  CDR3 for beta chain variable domain of TCR clone 280477 (TRBV20-1, TRBJ2-7)
CSAREGRDSLYEQYF

SEQ ID NO: 560955 - protein, 15 aa, Homo sapiens
  CDR3 for alpha chain variable domain of TCR clone 280478 (TRAV12-3, TRAJ6)
CAMSATSGGSYIPTF

SEQ ID NO: 560956 - protein, 13 aa, Homo sapiens
  CDR3 for beta chain variable domain of TCR clone 280478 (TRBV19, TRBJ1-5)
CASKVGPWEPQHF

SEQ ID NO: 560957 - protein, 11 aa, Homo sapiens
  CDR3 for alpha chain variable domain of TCR clone 280479 (TRAV12-1, TRAJ30)
CVVNGQDKIIF

SEQ ID NO: 560958 - protein, 17 aa, Homo sapiens
  CDR3 for beta chain variable domain of TCR clone 280479 (TRBV5-5, TRBJ1-1)
CASSLRFRGLMNTEAFL

SEQ ID NO: 560959 - protein, 14 aa, Homo sapiens
  CDR3 for alpha chain variable domain of TCR clone 280480 (TRAV16, TRAJ39)
CALSKNNAGNMLIL

SEQ ID NO: 560960 - protein, 16 aa, Homo sapiens
  CDR3 for beta chain variable domain of TCR clone 280480 (TRBV6-6, TRBJ2-1)
CASSYSFSGSYNEQFF

SEQ ID NO: 560961 - protein, 17 aa, Homo sapiens
  CDR3 for alpha chain variable domain of TCR clone 280481 (TRAV3, TRAJ6)
CAVRDGPRAGGSYIPTF

SEQ ID NO: 560962 - protein, 15 aa, Homo sapiens
  CDR3 for beta chain variable domain of TCR clone 280481 (TRBV7-3, TRBJ2-3)
CASSLRGGSTDTQYF

SEQ ID NO: 560963 - protein, 14 aa, Homo sapiens
  CDR3 for alpha chain variable domain of TCR clone 280482 (TRAV12-3, TRAJ29)
CSMSPYSGNTPLVF

SEQ ID NO: 560964 - protein, 11 aa, Homo sapiens
  CDR3 for beta chain variable domain of TCR clone 280482 (TRBV29-1, TRBJ2-5)
CSEDRTGTQYF

SEQ ID NO: 560965 - protein, 15 aa, Homo sapiens
  CDR3 for alpha chain variable domain of TCR clone 280483 (TRAV3, TRAJ20)
CAVRDIKLSDYKLSF

SEQ ID NO: 560966 - protein, 15 aa, Homo sapiens
  CDR3 for beta chain variable domain of TCR clone 280483 (TRBV7-9, TRBJ1-6)
CGSSSPGRGNSPLHF

SEQ ID NO: 560967 - protein, 13 aa, Homo sapiens
  CDR3 for alpha chain variable domain of TCR clone 280484 (TRAV14/DV4, TRAJ4)
CAMKAGGYNKLIF

SEQ ID NO: 560968 - protein, 11 aa, Homo sapiens
  CDR3 for beta chain variable domain of TCR clone 280484 (TRBV29-1, TRBJ2-5)
CSEDRTGTQYF

SEQ ID NO: 560969 - protein, 13 aa, Homo sapiens
  CDR3 for alpha chain variable domain of TCR clone 280485 (TRAV12-1, TRAJ20)
CVVNRETDYKLSF

SEQ ID NO: 560970 - protein, 15 aa, Homo sapiens
  CDR3 for beta chain variable domain of TCR clone 280485 (TRBV20-1, TRBJ2-7)
CSARDRVSGMDEQYF

SEQ ID NO: 560971 - protein, 13 aa, Homo sapiens
  CDR3 for alpha chain variable domain of TCR clone 280486 (TRAV12-3, TRAJ53)
RAMRGGSNYKLTF

SEQ ID NO: 560972 - protein, 14 aa, Homo sapiens
  CDR3 for beta chain variable domain of TCR clone 280486 (TRBV25-1, TRBJ1-1)
CASTHLGGNTEAFF

SEQ ID NO: 560973 - protein, 16 aa, Homo sapiens
  CDR3 for alpha chain variable domain of TCR clone 280487 (TRAV16, TRAJ42)
CARKMNYGGSQGNLIF

SEQ ID NO: 560974 - protein, 15 aa, Homo sapiens
  CDR3 for beta chain variable domain of TCR clone 280487 (TRBV20-1, TRBJ2-7)
CSGREGRDSLYEQYF

SEQ ID NO: 560975 - protein, 17 aa, Homo sapiens
  CDR3 for alpha chain variable domain of TCR clone 280488 (TRAV3, TRAJ6)
CAVRDGPRAGGSYIPTL

SEQ ID NO: 560976 - protein, 14 aa, Homo sapiens
  CDR3 for beta chain variable domain of TCR clone 280488 (TRBV7-6, TRBJ2-7)
CASSPKTSFYEQYF

SEQ ID NO: 560977 - protein, 13 aa, Homo sapiens
  CDR3 for alpha chain variable domain of TCR clone 280489 (TRAV12-1, TRAJ34)
CVVTGHNTDKLIF

SEQ ID NO: 560978 - protein, 14 aa, Homo sapiens
  CDR3 for beta chain variable domain of TCR clone 280489 (TRBV19, TRBJ2-1)
CASPTFVLSGEQFF

SEQ ID NO: 560979 - protein, 14 aa, Homo sapiens
  CDR3 for alpha chain variable domain of TCR clone 280490 (TRAV1-1, TRAJ34)
CAVGPSYNTDKLIF

SEQ ID NO: 560980 - protein, 16 aa, Homo sapiens
  CDR3 for beta chain variable domain of TCR clone 280490 (TRBV19, TRBJ2-1)
CASSSKGTRSYNEQFF

SEQ ID NO: 560981 - protein, 16 aa, Homo sapiens
  CDR3 for alpha chain variable domain of TCR clone 280491 (TRAV29/DV5, TRAJ36)
CAASAHYQSGANNLFF

SEQ ID NO: 560982 - protein, 17 aa, Homo sapiens
  CDR3 for beta chain variable domain of TCR clone 280491 (TRBV7-7, TRBJ1-4)
CASSLVGQGASNEKLFF

SEQ ID NO: 560983 - protein, 15 aa, Homo sapiens
  CDR3 for alpha chain variable domain of TCR clone 280492 (TRAV12-2, TRAJ53)
CAVNGGGGGNYKLTC

SEQ ID NO: 560984 - protein, 17 aa, Homo sapiens
  CDR3 for beta chain variable domain of TCR clone 280492 (TRBV7-3, TRBJ2-3)
CASSLMKRMRGADTQYF

SEQ ID NO: 560985 - protein, 14 aa, Homo sapiens
  CDR3 for alpha chain variable domain of TCR clone 280493 (TRAV1-2, TRAJ16)
CAVNRFSDGQKLLF

SEQ ID NO: 560986 - protein, 12 aa, Homo sapiens
  CDR3 for beta chain variable domain of TCR clone 280493 (TRBV24-1, TRBJ1-1)
CATLYPDTEDFF

SEQ ID NO: 560987 - protein, 13 aa, Homo sapiens
  CDR3 for alpha chain variable domain of TCR clone 280494 (TRAV29/DV5, TRAJ48)
CAASPVGNEKLTF

SEQ ID NO: 560988 - protein, 14 aa, Homo sapiens
  CDR3 for beta chain variable domain of TCR clone 280494 (TRBV3-1, TRBJ2-2)
CASSQDWVQGELFF

SEQ ID NO: 560989 - protein, 14 aa, Homo sapiens
  CDR3 for alpha chain variable domain of TCR clone 280495 (TRAV23/DV6, TRAJ26)
CAPPCVNYGQNFVF

SEQ ID NO: 560990 - protein, 16 aa, Homo sapiens
  CDR3 for beta chain variable domain of TCR clone 280495 (TRBV7-6, TRBJ2-2)
CASSPGLADYTGELFF

SEQ ID NO: 560991 - protein, 15 aa, Homo sapiens
  CDR3 for alpha chain variable domain of TCR clone 280496 (TRAV25, TRAJ28)
CAGAYSGAGSYQLTF

SEQ ID NO: 560992 - protein, 12 aa, Homo sapiens
  CDR3 for beta chain variable domain of TCR clone 280496 (TRBV11-2, TRBJ2-2)
CASSLGGGELFF

SEQ ID NO: 560993 - protein, 13 aa, Homo sapiens
  CDR3 for alpha chain variable domain of TCR clone 280497 (TRAV17, TRAJ34)
CATVYYNTDKLIF

SEQ ID NO: 560994 - protein, 14 aa, Homo sapiens
  CDR3 for beta chain variable domain of TCR clone 280497 (TRBV19, TRBJ2-1)
CASPTFVLSGEQFF

SEQ ID NO: 560995 - protein, 20 aa, Homo sapiens
  CDR3 for alpha chain variable domain of TCR clone 280498 (TRAV1-2, TRAJ4)
CLLLLRCEGFLSGGYNKLIF

SEQ ID NO: 560996 - protein, 16 aa, Homo sapiens
  CDR3 for beta chain variable domain of TCR clone 280498 (TRBV28, TRBJ1-4)
CASSPPYRGRSEKLFF

SEQ ID NO: 560997 - protein, 14 aa, Homo sapiens
  CDR3 for alpha chain variable domain of TCR clone 280499 (TRAV1-2, TRAJ17)
CALRRGAAGNKLTF

SEQ ID NO: 560998 - protein, 12 aa, Homo sapiens
  CDR3 for beta chain variable domain of TCR clone 280499 (TRBV12-4, TRBJ2-7)
CASSLGGYEQYF

SEQ ID NO: 560999 - protein, 14 aa, Homo sapiens
  CDR3 for alpha chain variable domain of TCR clone 280500 (TRAV9-2, TRAJ39)
CDLYIYNAGNMLTF

SEQ ID NO: 561000 - protein, 14 aa, Homo sapiens
  CDR3 for beta chain variable domain of TCR clone 280500 (TRBV12-5, TRBJ2-5)
CASGSRTHQETQYF

SEQ ID NO: 561001 - protein, 15 aa, Homo sapiens
  CDR3 for alpha chain variable domain of TCR clone 280501 (TRAV3, TRAJ8)
CAVRDNETGFQKLVF

SEQ ID NO: 561002 - protein, 13 aa, Homo sapiens
  CDR3 for beta chain variable domain of TCR clone 280501 (TRBV7-9, TRBJ1-2)
CASSLKQNYGYTF

SEQ ID NO: 561003 - protein, 13 aa, Homo sapiens
  CDR3 for alpha chain variable domain of TCR clone 280502 (TRAV12-1, TRAJ33)
CVVKGGSNYQLIW

SEQ ID NO: 561004 - protein, 16 aa, Homo sapiens
  CDR3 for beta chain variable domain of TCR clone 280502 (TRBV11-2, TRBJ2-2)
CASSLRTGNLIGELFF

SEQ ID NO: 561005 - protein, 13 aa, Homo sapiens
  CDR3 for alpha chain variable domain of TCR clone 280503 (TRAV12-3, TRAJ4)
CNEQAGGYNKLIF

SEQ ID NO: 561006 - protein, 15 aa, Homo sapiens
  CDR3 for beta chain variable domain of TCR clone 280503 (TRBV7-9, TRBJ1-6)
CASSSPGRGNSPLHF

SEQ ID NO: 561007 - protein, 16 aa, Homo sapiens
  CDR3 for alpha chain variable domain of TCR clone 280504 (TRAV12-1, TRAJ53)
CVVTSVAGGSNYKLTF

SEQ ID NO: 561008 - protein, 16 aa, Homo sapiens
  CDR3 for beta chain variable domain of TCR clone 280504 (TRBV6-6, TRBJ2-3)
CASSYSHAGSRDTQYF

SEQ ID NO: 561009 - protein, 12 aa, Homo sapiens
  CDR3 for alpha chain variable domain of TCR clone 280505 (TRAV8-3, TRAJ9)
CAVGAGGFNTIF

SEQ ID NO: 561010 - protein, 16 aa, Homo sapiens
  CDR3 for beta chain variable domain of TCR clone 280505 (TRBV13, TRBJ2-2)
CASSPRTGEHTGELFF

SEQ ID NO: 561011 - protein, 13 aa, Homo sapiens
  CDR3 for alpha chain variable domain of TCR clone 280506 (TRAV30, TRAJ34)
CGTVGYNTDKLIF

SEQ ID NO: 561012 - protein, 16 aa, Homo sapiens
  CDR3 for beta chain variable domain of TCR clone 280506 (TRBV7-9, TRBJ1-2)
CASSLGFTSGEDGYTF

SEQ ID NO: 561013 - protein, 16 aa, Homo sapiens
  CDR3 for alpha chain variable domain of TCR clone 280507 (TRAV30, TRAJ24)
CGTEIVDADSWGKFQF

SEQ ID NO: 561014 - protein, 17 aa, Homo sapiens
  CDR3 for beta chain variable domain of TCR clone 280507 (TRBV20-1, TRBJ2-2)
SAVLADREGGLTGELFF

SEQ ID NO: 561015 - protein, 12 aa, Homo sapiens
  CDR3 for alpha chain variable domain of TCR clone 280508 (TRAV12-1, TRAJ40)
CVVYSGTYKYIF

SEQ ID NO: 561016 - protein, 14 aa, Homo sapiens
  CDR3 for beta chain variable domain of TCR clone 280508 (TRBV20-1, TRBJ2-3)
YSARGGTSTDTQYF

SEQ ID NO: 561017 - protein, 11 aa, Homo sapiens
  CDR3 for alpha chain variable domain of TCR clone 280509 (TRAV1-1, TRAJ23)
CAVRQGGKLIF

SEQ ID NO: 561018 - protein, 19 aa, Homo sapiens
  CDR3 for beta chain variable domain of TCR clone 280509 (TRBV7-8, TRBJ2-2)
CQQPFISRADYPYRRELFF

SEQ ID NO: 561019 - protein, 11 aa, Homo sapiens
  CDR3 for alpha chain variable domain of TCR clone 280510 (TRAV1-2, TRAJ31)
CAVNNNARLMF

SEQ ID NO: 561020 - protein, 14 aa, Homo sapiens
  CDR3 for beta chain variable domain of TCR clone 280510 (TRBV20-1, TRBJ1-3)
CSASPTGAGNTIYF

SEQ ID NO: 561021 - protein, 11 aa, Homo sapiens
  CDR3 for alpha chain variable domain of TCR clone 280511 (TRAV1-2, TRAJ40)
CAVPGTYKYIF

SEQ ID NO: 561022 - protein, 16 aa, Homo sapiens
  CDR3 for beta chain variable domain of TCR clone 280511 (TRBV29-1, TRBJ2-7)
CGVDVVGTSGSYEQYF

SEQ ID NO: 561023 - protein, 12 aa, Homo sapiens
  CDR3 for alpha chain variable domain of TCR clone 280512 (TRAV5, TRAJ27)
CAEITDAGKSTF

SEQ ID NO: 561024 - protein, 15 aa, Homo sapiens
  CDR3 for beta chain variable domain of TCR clone 280512 (TRBV11-2, TRBJ1-2)
CASSLEGVQRNGYTF

SEQ ID NO: 561025 - protein, 17 aa, Homo sapiens
  CDR3 for alpha chain variable domain of TCR clone 280513 (TRAV13-1, TRAJ28)
CAASPPYSGAGSYQLSF

SEQ ID NO: 561026 - protein, 15 aa, Homo sapiens
  CDR3 for beta chain variable domain of TCR clone 280513 (TRBV6-3, TRBJ2-2)
CASSFLATLTGELFF

SEQ ID NO: 561027 - protein, 20 aa, Homo sapiens
  CDR3 for alpha chain variable domain of TCR clone 280514 (TRAV26-1, TRAJ52)
CSVLLHRPSAGGTSYGKLTF

SEQ ID NO: 561028 - protein, 14 aa, Homo sapiens
  CDR3 for beta chain variable domain of TCR clone 280514 (TRBV7-2, TRBJ1-4)
CASSHSKTNEKLFF

SEQ ID NO: 561029 - protein, 14 aa, Homo sapiens
  CDR3 for alpha chain variable domain of TCR clone 280515 (TRAV29/DV5, TRAJ45)
CAVYSGGGADGLTF

SEQ ID NO: 561030 - protein, 13 aa, Homo sapiens
  CDR3 for beta chain variable domain of TCR clone 280515 (TRBV20-1, TRBJ1-1)
CSPRGGGNTEAIF

SEQ ID NO: 561031 - protein, 12 aa, Homo sapiens
  CDR3 for alpha chain variable domain of TCR clone 280516 (TRAV12-2, TRAJ52)
IGGGTSYGKLTF

SEQ ID NO: 561032 - protein, 13 aa, Homo sapiens
  CDR3 for beta chain variable domain of TCR clone 280516 (TRBV20-1, TRBJ2-1)
RSARDLVSNEQFF

SEQ ID NO: 561033 - protein, 15 aa, Homo sapiens
  CDR3 for alpha chain variable domain of TCR clone 280517 (TRAV12-1, TRAJ5)
CVVNMLETGRRELTF

SEQ ID NO: 561034 - protein, 13 aa, Homo sapiens
  CDR3 for beta chain variable domain of TCR clone 280517 (TRBV14, TRBJ1-5)
CASSQDRRGPQHF

SEQ ID NO: 561035 - protein, 16 aa, Homo sapiens
  CDR3 for alpha chain variable domain of TCR clone 280518 (TRAV20, TRAJ22)
CAVQASSSGSARLLTF

SEQ ID NO: 561036 - protein, 13 aa, Homo sapiens
  CDR3 for beta chain variable domain of TCR clone 280518 (TRBV7-2, TRBJ2-5)
CASSQTSVETQYF

SEQ ID NO: 561037 - protein, 13 aa, Homo sapiens
  CDR3 for alpha chain variable domain of TCR clone 280519 (TRAV27, TRAJ29)
CAGAHSGNTPLVF

SEQ ID NO: 561038 - protein, 15 aa, Homo sapiens
  CDR3 for beta chain variable domain of TCR clone 280519 (TRBV15, TRBJ1-4)
CATSRDMGSYGKLFF

SEQ ID NO: 561039 - protein, 13 aa, Homo sapiens
  CDR3 for alpha chain variable domain of TCR clone 280520 (TRAV27, TRAJ49)
CAQRPYTGNQFYF

SEQ ID NO: 561040 - protein, 16 aa, Homo sapiens
  CDR3 for beta chain variable domain of TCR clone 280520 (TRBV4-1, TRBJ1-2)
CASSQDAGQVLYGYTF

SEQ ID NO: 561041 - protein, 17 aa, Homo sapiens
  CDR3 for alpha chain variable domain of TCR clone 280521 (TRAV3, TRAJ42)
CAVRDRDYGGSKGNLSF

SEQ ID NO: 561042 - protein, 15 aa, Homo sapiens
  CDR3 for beta chain variable domain of TCR clone 280521 (TRBV6-6, TRBJ2-7)
CASSYSYGGSYEQYF

SEQ ID NO: 561043 - protein, 11 aa, Homo sapiens
  CDR3 for alpha chain variable domain of TCR clone 280522 (TRAV27, TRAJ20)
CAGLNDYKLSF

SEQ ID NO: 561044 - protein, 16 aa, Homo sapiens
  CDR3 for beta chain variable domain of TCR clone 280522 (TRBV27, TRBJ2-2)
CASSFRGLVRTGELFL

SEQ ID NO: 561045 - protein, 14 aa, Homo sapiens
  CDR3 for alpha chain variable domain of TCR clone 280523 (TRAV12-1, TRAJ12)
CVVTRMDSSYKLIF

SEQ ID NO: 561046 - protein, 13 aa, Homo sapiens
  CDR3 for beta chain variable domain of TCR clone 280523 (TRBV20-1, TRBJ1-1)
CSARGGGNTEGFF

SEQ ID NO: 561047 - protein, 15 aa, Homo sapiens
  CDR3 for alpha chain variable domain of TCR clone 280524 (TRAV8-6, TRAJ27)
CAVREGNTNAGKSTF

SEQ ID NO: 561048 - protein, 17 aa, Homo sapiens
  CDR3 for beta chain variable domain of TCR clone 280524 (TRBV11-2, TRBJ2-1)
CASSLYPPGVEYNEQFF

SEQ ID NO: 561049 - protein, 14 aa, Homo sapiens
  CDR3 for alpha chain variable domain of TCR clone 280525 (TRAV8-6, TRAJ15)
CAVSEDQAGTALIF

SEQ ID NO: 561050 - protein, 15 aa, Homo sapiens
  CDR3 for beta chain variable domain of TCR clone 280525 (TRBV5-4, TRBJ2-7)
CASSPRTSGTYEQYF

SEQ ID NO: 561051 - protein, 12 aa, Homo sapiens
  CDR3 for alpha chain variable domain of TCR clone 280526 (TRAV12-3, TRAJ49)
CAKFKAGNQFYF

SEQ ID NO: 561052 - protein, 17 aa, Homo sapiens
  CDR3 for beta chain variable domain of TCR clone 280526 (TRBV15, TRBJ1-4)
CATSRYGTGDPNEKLFF

SEQ ID NO: 561053 - protein, 14 aa, Homo sapiens
  CDR3 for alpha chain variable domain of TCR clone 280527 (TRAV21, TRAJ23)
CAPRLYNQGGKLIF

SEQ ID NO: 561054 - protein, 16 aa, Homo sapiens
  CDR3 for beta chain variable domain of TCR clone 280527 (TRBV12-4, TRBJ1-5)
CASSRPVGGSNQPQHF

SEQ ID NO: 561055 - protein, 14 aa, Homo sapiens
  CDR3 for alpha chain variable domain of TCR clone 280528 (TRAV8-3, TRAJ4)
CAVGAAVVYNKLIF

SEQ ID NO: 561056 - protein, 15 aa, Homo sapiens
  CDR3 for beta chain variable domain of TCR clone 280528 (TRBV6-5, TRBJ2-1)
CASSYDAGAGNEQFF

SEQ ID NO: 561057 - protein, 16 aa, Homo sapiens
  CDR3 for alpha chain variable domain of TCR clone 280529 (TRAV12-2, TRAJ43)
CAGDDMRFGAGTRLTV

SEQ ID NO: 561058 - protein, 16 aa, Homo sapiens
  CDR3 for beta chain variable domain of TCR clone 280529 (TRBV19, TRBJ1-5)
CASSIDRGGPRQPQHF

SEQ ID NO: 561059 - protein, 17 aa, Homo sapiens
  CDR3 for alpha chain variable domain of TCR clone 280530 (TRAV3, TRAJ6)
CAVRDGPSAGGSYIPTF

SEQ ID NO: 561060 - protein, 14 aa, Homo sapiens
  CDR3 for beta chain variable domain of TCR clone 280530 (TRBV7-2, TRBJ2-7)
CASSPKTSFYEQYL

SEQ ID NO: 561061 - protein, 11 aa, Homo sapiens
  CDR3 for alpha chain variable domain of TCR clone 280531 (TRAV12-2, TRAJ49)
CAVWAGNQFYF

SEQ ID NO: 561062 - protein, 19 aa, Homo sapiens
  CDR3 for beta chain variable domain of TCR clone 280531 (TRBV4-1, TRBJ2-1)
CASSQGPRPGLGSRNEQFF

SEQ ID NO: 561063 - protein, 13 aa, Homo sapiens
  CDR3 for alpha chain variable domain of TCR clone 280532 (TRAV5, TRAJ30)
CAEIANRDHKIIF

SEQ ID NO: 561064 - protein, 14 aa, Homo sapiens
  CDR3 for beta chain variable domain of TCR clone 280532 (TRBV4-1, TRBJ2-2)
CASSQAVNTGELFF

SEQ ID NO: 561065 - protein, 11 aa, Homo sapiens
  CDR3 for alpha chain variable domain of TCR clone 280533 (TRAV2, TRAJ13)
CASGGYQKVTF

SEQ ID NO: 561066 - protein, 12 aa, Homo sapiens
  CDR3 for beta chain variable domain of TCR clone 280533 (TRBV14, TRBJ2-5)
CASSQLKETQYF

SEQ ID NO: 561067 - protein, 15 aa, Homo sapiens
  CDR3 for alpha chain variable domain of TCR clone 280534 (TRAV26-1, TRAJ22)
CVVRVSFWFCKATDL

SEQ ID NO: 561068 - protein, 13 aa, Homo sapiens
  CDR3 for beta chain variable domain of TCR clone 280534 (TRBV7-9, TRBJ1-2)
CGSSLKQNYGYAF

SEQ ID NO: 561069 - protein, 12 aa, Homo sapiens
  CDR3 for alpha chain variable domain of TCR clone 280535 (TRAV12-3, TRAJ17)
CAMTVTGNKLTF

SEQ ID NO: 561070 - protein, 12 aa, Homo sapiens
  CDR3 for beta chain variable domain of TCR clone 280535 (TRBV2, TRBJ2-1)
CAYGPPGNEQFF

SEQ ID NO: 561071 - protein, 16 aa, Homo sapiens
  CDR3 for alpha chain variable domain of TCR clone 280536 (TRAV21, TRAJ52)
CAVSDAGGTSYGKLTF

SEQ ID NO: 561072 - protein, 13 aa, Homo sapiens
  CDR3 for beta chain variable domain of TCR clone 280536 (TRBV7-3, TRBJ2-5)
CASSFRGSQTPYF

SEQ ID NO: 561073 - protein, 14 aa, Homo sapiens
  CDR3 for alpha chain variable domain of TCR clone 280537 (TRAV4, TRAJ6)
CLVGEAGGSYIPAF

SEQ ID NO: 561074 - protein, 13 aa, Homo sapiens
  CDR3 for beta chain variable domain of TCR clone 280537 (TRBV7-3, TRBJ1-1)
CASSQDWGAEAFF

SEQ ID NO: 561075 - protein, 16 aa, Homo sapiens
  CDR3 for alpha chain variable domain of TCR clone 280538 (TRAV26-1, TRAJ53)
CIVRVAMGGSNYKLTF

SEQ ID NO: 561076 - protein, 12 aa, Homo sapiens
  CDR3 for beta chain variable domain of TCR clone 280538 (TRBV7-9, TRBJ1-5)
CASIPQGQPQYF

SEQ ID NO: 561077 - protein, 15 aa, Homo sapiens
  CDR3 for alpha chain variable domain of TCR clone 280539 (TRAV10, TRAJ44)
CVVSGATDTSSKLTF

SEQ ID NO: 561078 - protein, 15 aa, Homo sapiens
  CDR3 for beta chain variable domain of TCR clone 280539 (TRBV12-4, TRBJ1-5)
CASTRQGSGNQPQHF

SEQ ID NO: 561079 - protein, 13 aa, Homo sapiens
  CDR3 for alpha chain variable domain of TCR clone 280540 (TRAV25, TRAJ10)
CAGRTGGGNKLTF

SEQ ID NO: 561080 - protein, 15 aa, Homo sapiens
  CDR3 for beta chain variable domain of TCR clone 280540 (TRBV19, TRBJ2-1)
CASSSPGVPLDEQFV

SEQ ID NO: 561081 - protein, 15 aa, Homo sapiens
  CDR3 for alpha chain variable domain of TCR clone 280541 (TRAV3, TRAJ20)
CAVRDIKLSDYKISF

SEQ ID NO: 561082 - protein, 16 aa, Homo sapiens
  CDR3 for beta chain variable domain of TCR clone 280541 (TRBV20-1, TRBJ1-4)
CSAPGQGLLTNEKLFF

SEQ ID NO: 561083 - protein, 13 aa, Homo sapiens
  CDR3 for alpha chain variable domain of TCR clone 280542 (TRAV2, TRAJ16)
SAVERSDGQKLLF

SEQ ID NO: 561084 - protein, 15 aa, Homo sapiens
  CDR3 for beta chain variable domain of TCR clone 280542 (TRBV20-1, TRBJ2-5)
CSAIKGQGSQETQYF

SEQ ID NO: 561085 - protein, 14 aa, Homo sapiens
  CDR3 for alpha chain variable domain of TCR clone 280543 (TRAV16, TRAJ39)
CALSKNNAGNMLTF

SEQ ID NO: 561086 - protein, 13 aa, Homo sapiens
  CDR3 for beta chain variable domain of TCR clone 280543 (TRBV7-9, TRBJ1-2)
CASSLKQNYGYTF

SEQ ID NO: 561087 - protein, 15 aa, Homo sapiens
  CDR3 for alpha chain variable domain of TCR clone 280544 (TRAV23/DV6, TRAJ18)
CAARYRGSTRGRLYF

SEQ ID NO: 561088 - protein, 13 aa, Homo sapiens
  CDR3 for beta chain variable domain of TCR clone 280544 (TRBV7-2, TRBJ2-7)
CASSSPSGGEQYF

SEQ ID NO: 561089 - protein, 13 aa, Homo sapiens
  CDR3 for alpha chain variable domain of TCR clone 280545 (TRAV27, TRAJ49)
CAPRPYTGNQFYF

SEQ ID NO: 561090 - protein, 16 aa, Homo sapiens
  CDR3 for beta chain variable domain of TCR clone 280545 (TRBV4-1, TRBJ1-2)
CASSQNAGQVLYGYTF

SEQ ID NO: 561091 - protein, 14 aa, Homo sapiens
  CDR3 for alpha chain variable domain of TCR clone 280546 (TRAV17, TRAJ22)
CATSPSGSARQLTF

SEQ ID NO: 561092 - protein, 15 aa, Homo sapiens
  CDR3 for beta chain variable domain of TCR clone 280546 (TRBV4-1, TRBJ2-5)
CASRQWDLYQEAQYF

SEQ ID NO: 561093 - protein, 13 aa, Homo sapiens
  CDR3 for alpha chain variable domain of TCR clone 280547 (TRAV21, TRAJ27)
CAARPGNACKSTF

SEQ ID NO: 561094 - protein, 13 aa, Homo sapiens
  CDR3 for beta chain variable domain of TCR clone 280547 (TRBV7-3, TRBJ1-1)
CASSQDWGAEAFF

SEQ ID NO: 561095 - protein, 12 aa, Homo sapiens
  CDR3 for alpha chain variable domain of TCR clone 280548 (TRAV25, TRAJ35)
CAGIGFGNVLHC

SEQ ID NO: 561096 - protein, 15 aa, Homo sapiens
  CDR3 for beta chain variable domain of TCR clone 280548 (TRBV7-9, TRBJ1-5)
CASSQGHQPNQPQHF

SEQ ID NO: 561097 - protein, 11 aa, Homo sapiens
  CDR3 for alpha chain variable domain of TCR clone 280549 (TRAV13-1, TRAJ15)
CAATPGTALIF

SEQ ID NO: 561098 - protein, 16 aa, Homo sapiens
  CDR3 for beta chain variable domain of TCR clone 280549 (TRBV13, TRBJ2-3)
CQPPLQGSGGGNTQYF

SEQ ID NO: 561099 - protein, 16 aa, Homo sapiens
  CDR3 for alpha chain variable domain of TCR clone 280550 (TRAV3, TRAJ10)
CAVRDMRAGGGNKLTF

SEQ ID NO: 561100 - protein, 13 aa, Homo sapiens
  CDR3 for beta chain variable domain of TCR clone 280550 (TRBV12-5, TRBJ1-2)
CASGVRTGNGYTF

SEQ ID NO: 561101 - protein, 15 aa, Homo sapiens
  CDR3 for alpha chain variable domain of TCR clone 280551 (TRAV13-2, TRAJ45)
CAEHHSGRGADGLTF

SEQ ID NO: 561102 - protein, 15 aa, Homo sapiens
  CDR3 for beta chain variable domain of TCR clone 280551 (TRBV7-2, TRBJ2-7)
CASSLALGSAYEQYF

SEQ ID NO: 561103 - protein, 15 aa, Homo sapiens
  CDR3 for alpha chain variable domain of TCR clone 280552 (TRAV26-2, TRAJ28)
CILVESGAGSYQLTF

SEQ ID NO: 561104 - protein, 17 aa, Homo sapiens
  CDR3 for beta chain variable domain of TCR clone 280552 (TRBV4-1, TRBJ2-7)
CASSRDPLGVRGGEQYF

SEQ ID NO: 561105 - protein, 14 aa, Homo sapiens
  CDR3 for alpha chain variable domain of TCR clone 280553 (TRAV16, TRAJ37)
CALDISGNTGKLIF

SEQ ID NO: 561106 - protein, 11 aa, Homo sapiens
  CDR3 for beta chain variable domain of TCR clone 280553 (TRBV29-1, TRBJ2-5)
CSEDRTGTQYF

SEQ ID NO: 561107 - protein, 14 aa, Homo sapiens
  CDR3 for alpha chain variable domain of TCR clone 280554 (TRAV13-1, TRAJ20)
CSARPGSNDYKLSF

SEQ ID NO: 561108 - protein, 13 aa, Homo sapiens
  CDR3 for beta chain variable domain of TCR clone 280554 (TRBV20-1, TRBJ1-1)
CSAPPGGHTEAFF

SEQ ID NO: 561109 - protein, 14 aa, Homo sapiens
  CDR3 for alpha chain variable domain of TCR clone 280555 (TRAV1-2, TRAJ8)
CAVREDTGFQNLGF

SEQ ID NO: 561110 - protein, 15 aa, Homo sapiens
  CDR3 for beta chain variable domain of TCR clone 280555 (TRBV6-3, TRBJ2-7)
CASSSPGTVFYEQYF

SEQ ID NO: 561111 - protein, 14 aa, Homo sapiens
  CDR3 for alpha chain variable domain of TCR clone 280556 (TRAV8-2, TRAJ37)
CVVSISGNTGKLIF

SEQ ID NO: 561112 - protein, 11 aa, Homo sapiens
  CDR3 for beta chain variable domain of TCR clone 280556 (TRBV29-1, TRBJ2-5)
CSEDRTGTQYF

SEQ ID NO: 561113 - protein, 12 aa, Homo sapiens
  CDR3 for alpha chain variable domain of TCR clone 280557 (TRAV3, TRAJ9)
CAVLPAGFKTIF

SEQ ID NO: 561114 - protein, 17 aa, Homo sapiens
  CDR3 for beta chain variable domain of TCR clone 280557 (TRBV4-1, TRBJ2-3)
CASSQGYVSGGTDTQYF

SEQ ID NO: 561115 - protein, 18 aa, Homo sapiens
  CDR3 for alpha chain variable domain of TCR clone 280558 (TRAV12-3, TRAJ52)
RAMSVGGAGGTSYGKLTF

SEQ ID NO: 561116 - protein, 13 aa, Homo sapiens
  CDR3 for beta chain variable domain of TCR clone 280558 (TRBV6-5, TRBJ2-7)
CASSGGSFYEQYF

SEQ ID NO: 561117 - protein, 15 aa, Homo sapiens
  CDR3 for alpha chain variable domain of TCR clone 280559 (TRAV26-2, TRAJ53)
CIRGNSGGSNYKLTF

SEQ ID NO: 561118 - protein, 14 aa, Homo sapiens
  CDR3 for beta chain variable domain of TCR clone 280559 (TRBV7-6, TRBJ2-3)
CASSLGAVTDTQYF

SEQ ID NO: 561119 - protein, 17 aa, Homo sapiens
  CDR3 for alpha chain variable domain of TCR clone 280560 (TRAV26-1, TRAJ22)
CIVRVPSHSGSARQLTF

SEQ ID NO: 561120 - protein, 16 aa, Homo sapiens
  CDR3 for beta chain variable domain of TCR clone 280560 (TRBV28, TRBJ2-1)
CASRRSRRVVGNEQFF

SEQ ID NO: 561121 - protein, 15 aa, Homo sapiens
  CDR3 for alpha chain variable domain of TCR clone 280561 (TRAV3, TRAJ22)
CAVRDRSGSARKLTF

SEQ ID NO: 561122 - protein, 15 aa, Homo sapiens
  CDR3 for beta chain variable domain of TCR clone 280561 (TRBV27, TRBJ2-1)
CASSNGGGSSNEQFF

SEQ ID NO: 561123 - protein, 18 aa, Homo sapiens
  CDR3 for alpha chain variable domain of TCR clone 280562 (TRAV21, TRAJ52)
CAVRPSPAGGTSYGKLTF

SEQ ID NO: 561124 - protein, 20 aa, Homo sapiens
  CDR3 for beta chain variable domain of TCR clone 280562 (TRBV11-2, TRBJ2-7)
CASSPVGRERAGGPSYEQYF

SEQ ID NO: 561125 - protein, 16 aa, Homo sapiens
  CDR3 for alpha chain variable domain of TCR clone 280563 (TRAV26-1, TRAJ36)
CIVRVPDQTGANNLFF

SEQ ID NO: 561126 - protein, 21 aa, Homo sapiens
  CDR3 for beta chain variable domain of TCR clone 280563 (TRBV6-1, TRBJ1-1)
CASSGVGNYKGISGVDTEAFF

SEQ ID NO: 561127 - protein, 18 aa, Homo sapiens
  CDR3 for alpha chain variable domain of TCR clone 280564 (TRAV21, TRAJ52)
CAVRPSPAGGTSYGKLTF

SEQ ID NO: 561128 - protein, 16 aa, Homo sapiens
  CDR3 for beta chain variable domain of TCR clone 280564 (TRBV7-3, TRBJ2-1)
CASSLEGYRSYNEHFF

SEQ ID NO: 561129 - protein, 14 aa, Homo sapiens
  CDR3 for alpha chain variable domain of TCR clone 280565 (TRAV12-1, TRAJ39)
CAVNFNNAGNMLTF

SEQ ID NO: 561130 - protein, 14 aa, Homo sapiens
  CDR3 for beta chain variable domain of TCR clone 280565 (TRBV12-4, TRBJ1-1)
CASSLGTGGTEAFF

SEQ ID NO: 561131 - protein, 14 aa, Homo sapiens
  CDR3 for alpha chain variable domain of TCR clone 280566 (TRAV26-1, TRAJ38)
CIADNAGNKRKLIW

SEQ ID NO: 561132 - protein, 14 aa, Homo sapiens
  CDR3 for beta chain variable domain of TCR clone 280566 (TRBV20-1, TRBJ1-1)
CSAQTRIGGTEAFF

SEQ ID NO: 561133 - protein, 14 aa, Homo sapiens
  CDR3 for alpha chain variable domain of TCR clone 280567 (TRAV2, TRAJ9)
CAMEDRSGGFKTIF

SEQ ID NO: 561134 - protein, 12 aa, Homo sapiens
  CDR3 for beta chain variable domain of TCR clone 280567 (TRBV7-9, TRBJ2-7)
CASSLEGYEQYF

SEQ ID NO: 561135 - protein, 14 aa, Homo sapiens
  CDR3 for alpha chain variable domain of TCR clone 280568 (TRAV4, TRAJ17)
CLVGDMAAGNKLTF

SEQ ID NO: 561136 - protein, 13 aa, Homo sapiens
  CDR3 for beta chain variable domain of TCR clone 280568 (TRBV7-8, TRBJ2-3)
CASSLRGPDTQYF

SEQ ID NO: 561137 - protein, 13 aa, Homo sapiens
  CDR3 for alpha chain variable domain of TCR clone 280569 (TRAV17, TRAJ54)
CAAGIQGAQKLVF

SEQ ID NO: 561138 - protein, 14 aa, Homo sapiens
  CDR3 for beta chain variable domain of TCR clone 280569 (TRBV11-2, TRBJ1-2)
CASSLVAANYGYTF

SEQ ID NO: 561139 - protein, 13 aa, Homo sapiens
  CDR3 for alpha chain variable domain of TCR clone 280570 (TRAV19, TRAJ57)
CALLQGGSEKLVF

SEQ ID NO: 561140 - protein, 14 aa, Homo sapiens
  CDR3 for beta chain variable domain of TCR clone 280570 (TRBV18, TRBJ2-7)
CASSPTSGGYEQYF

SEQ ID NO: 561141 - protein, 15 aa, Homo sapiens
  CDR3 for alpha chain variable domain of TCR clone 280571 (TRAV3, TRAJ5)
CAVRDLDTCRRAITF

SEQ ID NO: 561142 - protein, 13 aa, Homo sapiens
  CDR3 for beta chain variable domain of TCR clone 280571 (TRBV12-4, TRBJ2-7)
CASSPTETYEQYF

SEQ ID NO: 561143 - protein, 13 aa, Homo sapiens
  CDR3 for alpha chain variable domain of TCR clone 280572 (TRAV27, TRAJ49)
CAPRPYTGNQFYY

SEQ ID NO: 561144 - protein, 16 aa, Homo sapiens
  CDR3 for beta chain variable domain of TCR clone 280572 (TRBV4-1, TRBJ1-2)
CASSQDAGQVLYGYTF

SEQ ID NO: 561145 - protein, 12 aa, Homo sapiens
  CDR3 for alpha chain variable domain of TCR clone 280573 (TRAV1-1, TRAJ8)
CAGGTGFQKLVF

SEQ ID NO: 561146 - protein, 15 aa, Homo sapiens
  CDR3 for beta chain variable domain of TCR clone 280573 (TRBV7-9, TRBJ1-4)
CASSRTGGFNEQLFF

SEQ ID NO: 561147 - protein, 13 aa, Homo sapiens
  CDR3 for alpha chain variable domain of TCR clone 280574 (TRAV29/DV5, TRAJ31)
CAASRNNNARRMF

SEQ ID NO: 561148 - protein, 12 aa, Homo sapiens
  CDR3 for beta chain variable domain of TCR clone 280574 (TRBV14, TRBJ2-4)
CASSNLKSTQYF

SEQ ID NO: 561149 - protein, 16 aa, Homo sapiens
  CDR3 for alpha chain variable domain of TCR clone 280575 (TRAV29/DV5, TRAJ32)
CAASALNGGATNKLIF

SEQ ID NO: 561150 - protein, 15 aa, Homo sapiens
  CDR3 for beta chain variable domain of TCR clone 280575 (TRBV6-1, TRBJ2-3)
CASSERGGITDTQYF

SEQ ID NO: 561151 - protein, 13 aa, Homo sapiens
  CDR3 for alpha chain variable domain of TCR clone 280576 (TRAV35, TRAJ33)
CAGLMDSNYQLIW

SEQ ID NO: 561152 - protein, 13 aa, Homo sapiens
  CDR3 for beta chain variable domain of TCR clone 280576 (TRBV10-3, TRBJ2-1)
CAISECSGREQFF

SEQ ID NO: 561153 - protein, 14 aa, Homo sapiens
  CDR3 for alpha chain variable domain of TCR clone 280577 (TRAV12-2, TRAJ13)
CPVKKTGGYQKVTF

SEQ ID NO: 561154 - protein, 15 aa, Homo sapiens
  CDR3 for beta chain variable domain of TCR clone 280577 (TRBV19, TRBJ1-6)
CASSTQGAVGSPLHF

SEQ ID NO: 561155 - protein, 11 aa, Homo sapiens
  CDR3 for alpha chain variable domain of TCR clone 280578 (TRAV12-3, TRAJ43)
CAMSVSNDMCF

SEQ ID NO: 561156 - protein, 20 aa, Homo sapiens
  CDR3 for beta chain variable domain of TCR clone 280578 (TRBV28, TRBJ2-1)
CASTPIGRSPGLAGGNEQFF

SEQ ID NO: 561157 - protein, 17 aa, Homo sapiens
  CDR3 for alpha chain variable domain of TCR clone 280579 (TRAV26-2, TRAJ42)
CIPRDVGYGGSQGNLIF

SEQ ID NO: 561158 - protein, 16 aa, Homo sapiens
  CDR3 for beta chain variable domain of TCR clone 280579 (TRBV12-4, TRBJ2-7)
CASSLIGGTGTYEQCF

SEQ ID NO: 561159 - protein, 17 aa, Homo sapiens
  CDR3 for alpha chain variable domain of TCR clone 280580 (TRAV16, TRAJ37)
CAFWPKNGSSKTGKLIF

SEQ ID NO: 561160 - protein, 15 aa, Homo sapiens
  CDR3 for beta chain variable domain of TCR clone 280580 (TRBV20-1, TRBJ2-6)
CSAYVQVSGANVLTF

SEQ ID NO: 561161 - protein, 16 aa, Homo sapiens
  CDR3 for alpha chain variable domain of TCR clone 280581 (TRAV30, TRAJ26)
CGTESVGDNYGQNFVF

SEQ ID NO: 561162 - protein, 13 aa, Homo sapiens
  CDR3 for beta chain variable domain of TCR clone 280581 (TRBV19, TRBJ1-2)
CASSISEDYGYAF

SEQ ID NO: 561163 - protein, 13 aa, Homo sapiens
  CDR3 for alpha chain variable domain of TCR clone 280582 (TRAV8-3, TRAJ48)
CAVVPFGNEKLTF

SEQ ID NO: 561164 - protein, 15 aa, Homo sapiens
  CDR3 for beta chain variable domain of TCR clone 280582 (TRBV13, TRBJ1-2)
CASGLGRQPGYGYTF

SEQ ID NO: 561165 - protein, 17 aa, Homo sapiens
  CDR3 for alpha chain variable domain of TCR clone 280583 (TRAV3, TRAJ12)
CAVRDGGRMDSSYKLIF

SEQ ID NO: 561166 - protein, 12 aa, Homo sapiens
  CDR3 for beta chain variable domain of TCR clone 280583 (TRBV11-2, TRBJ2-2)
CASSLGGGEMFF

SEQ ID NO: 561167 - protein, 19 aa, Homo sapiens
  CDR3 for alpha chain variable domain of TCR clone 280584 (TRAV12-1, TRAJ45)
CVVTHDLGYSGGGADGLTF

SEQ ID NO: 561168 - protein, 14 aa, Homo sapiens
  CDR3 for beta chain variable domain of TCR clone 280584 (TRBV4-1, TRBJ2-2)
CASSQAVNTGELFF

SEQ ID NO: 561169 - protein, 14 aa, Homo sapiens
  CDR3 for alpha chain variable domain of TCR clone 280585 (TRAV1-2, TRAJ8)
CAVGEDTGFQKLVF

SEQ ID NO: 561170 - protein, 15 aa, Homo sapiens
  CDR3 for beta chain variable domain of TCR clone 280585 (TRBV7-9, TRBJ1-6)
CASSSPGRGNSPLHF

SEQ ID NO: 561171 - protein, 16 aa, Homo sapiens
  CDR3 for alpha chain variable domain of TCR clone 280586 (TRAV38-1, TRAJ56)
CAFMKRQTGANSKLTF

SEQ ID NO: 561172 - protein, 16 aa, Homo sapiens
  CDR3 for beta chain variable domain of TCR clone 280586 (TRBV5-7, TRBJ2-5)
CASTLAPAGGRETQYF

SEQ ID NO: 561173 - protein, 17 aa, Homo sapiens
  CDR3 for alpha chain variable domain of TCR clone 280587 (TRAV38-1, TRAJ45)
CAFMRSHSGGGADGLTF

SEQ ID NO: 561174 - protein, 12 aa, Homo sapiens
  CDR3 for beta chain variable domain of TCR clone 280587 (TRBV29-1, TRBJ2-3)
CSVTGGADTQYF

SEQ ID NO: 561175 - protein, 16 aa, Homo sapiens
  CDR3 for alpha chain variable domain of TCR clone 280588 (TRAV1-2, TRAJ10)
CAVRGVLTGGGNKLTF

SEQ ID NO: 561176 - protein, 14 aa, Homo sapiens
  CDR3 for beta chain variable domain of TCR clone 280588 (TRBV10-3, TRBJ1-1)
CAISDTDRGVEAFF

SEQ ID NO: 561177 - protein, 14 aa, Homo sapiens
  CDR3 for alpha chain variable domain of TCR clone 280589 (TRAV1-2, TRAJ16)
CAVNRFSDGQKLLF

SEQ ID NO: 561178 - protein, 15 aa, Homo sapiens
  CDR3 for beta chain variable domain of TCR clone 280589 (TRBV9, TRBJ1-6)
CASSVAGTGDSHHHF

SEQ ID NO: 561179 - protein, 23 aa, Homo sapiens
  CDR3 for alpha chain variable domain of TCR clone 280590 (TRAV12-1, TRAJ44)
SSVIQPPTSVWCSNTGTASKLTF

SEQ ID NO: 561180 - protein, 16 aa, Homo sapiens
  CDR3 for beta chain variable domain of TCR clone 280590 (TRBV20-1, TRBJ2-5)
CSPGGTSGGYMETQYF

SEQ ID NO: 561181 - protein, 14 aa, Homo sapiens
  CDR3 for alpha chain variable domain of TCR clone 280591 (TRAV39, TRAJ54)
FAVVLIQGAQKLVF

SEQ ID NO: 561182 - protein, 16 aa, Homo sapiens
  CDR3 for beta chain variable domain of TCR clone 280591 (TRBV3-1, TRBJ2-7)
CASSQGATGVAYEQYF

SEQ ID NO: 561183 - protein, 15 aa, Homo sapiens
  CDR3 for alpha chain variable domain of TCR clone 280592 (TRAV2, TRAJ9)
CAVEDRGTGGFKTIF

SEQ ID NO: 561184 - protein, 16 aa, Homo sapiens
  CDR3 for beta chain variable domain of TCR clone 280592 (TRBV4-2, TRBJ1-1)
CASSQAGFGMNTEAFF

SEQ ID NO: 561185 - protein, 12 aa, Homo sapiens
  CDR3 for alpha chain variable domain of TCR clone 280593 (TRAV25, TRAJ38)
CAGTGNNRKLIW

SEQ ID NO: 561186 - protein, 11 aa, Homo sapiens
  CDR3 for beta chain variable domain of TCR clone 280593 (TRBV19, TRBJ1-1)
CASSIGSEAFF

SEQ ID NO: 561187 - protein, 14 aa, Homo sapiens
  CDR3 for alpha chain variable domain of TCR clone 280594 (TRAV12-1, TRAJ42)
RVVIYGGSQGNLIF

SEQ ID NO: 561188 - protein, 14 aa, Homo sapiens
  CDR3 for beta chain variable domain of TCR clone 280594 (TRBV25-1, TRBJ1-1)
CASTHLGGNTEAFF

SEQ ID NO: 561189 - protein, 12 aa, Homo sapiens
  CDR3 for alpha chain variable domain of TCR clone 280595 (TRAV13-2, TRAJ8)
CAPWLGFQKLVF

SEQ ID NO: 561190 - protein, 13 aa, Homo sapiens
  CDR3 for beta chain variable domain of TCR clone 280595 (TRBV12-4, TRBJ1-5)
CASSPDRAQPQHV

SEQ ID NO: 561191 - protein, 21 aa, Homo sapiens
  CDR3 for alpha chain variable domain of TCR clone 280596 (TRAV1-1, TRAJ6)
CLLLLRCERLERIGGSYIPTF

SEQ ID NO: 561192 - protein, 13 aa, Homo sapiens
  CDR3 for beta chain variable domain of TCR clone 280596 (TRBV10-2, TRBJ2-7)
CASGASGGYEQYF

SEQ ID NO: 561193 - protein, 16 aa, Homo sapiens
  CDR3 for alpha chain variable domain of TCR clone 280597 (TRAV12-1, TRAJ22)
CVVNSISSGSARQLTF

SEQ ID NO: 561194 - protein, 20 aa, Homo sapiens
  CDR3 for beta chain variable domain of TCR clone 280597 (TRBV7-8, TRBJ2-2)
CASSHLFPGPTIHITGELFF

SEQ ID NO: 561195 - protein, 12 aa, Homo sapiens
  CDR3 for alpha chain variable domain of TCR clone 280598 (TRAV26-1, TRAJ36)
CIVRVRADNLFF

SEQ ID NO: 561196 - protein, 15 aa, Homo sapiens
  CDR3 for beta chain variable domain of TCR clone 280598 (TRBV6-3, TRBJ2-7)
CASSSHGTVFYEQYF

SEQ ID NO: 561197 - protein, 12 aa, Homo sapiens
  CDR3 for alpha chain variable domain of TCR clone 280599 (TRAV13-2, TRAJ39)
CAENSERNMLTF

SEQ ID NO: 561198 - protein, 13 aa, Homo sapiens
  CDR3 for beta chain variable domain of TCR clone 280599 (TRBV6-1, TRBJ1-2)
CASSGGISFGHTF

SEQ ID NO: 561199 - protein, 15 aa, Homo sapiens
  CDR3 for alpha chain variable domain of TCR clone 280600 (TRAV3, TRAJ13)
CAVRVYSGGYQKGTF

SEQ ID NO: 561200 - protein, 15 aa, Homo sapiens
  CDR3 for beta chain variable domain of TCR clone 280600 (TRBV5-7, TRBJ1-2)
CASSLGVAANYGYTF

SEQ ID NO: 561201 - protein, 12 aa, Homo sapiens
  CDR3 for alpha chain variable domain of TCR clone 280601 (TRAV12-3, TRAJ17)
CAMTLTGNKLTF

SEQ ID NO: 561202 - protein, 17 aa, Homo sapiens
  CDR3 for beta chain variable domain of TCR clone 280601 (TRBV11-2, TRBJ2-1)
CASSLYPPGVEYNDQFF

SEQ ID NO: 561203 - protein, 13 aa, Homo sapiens
  CDR3 for alpha chain variable domain of TCR clone 280602 (TRAV17, TRAJ54)
CAAGIHGAQKLVF

SEQ ID NO: 561204 - protein, 14 aa, Homo sapiens
  CDR3 for beta chain variable domain of TCR clone 280602 (TRBV11-2, TRBJ1-2)
CASSLGPANYGYTF

SEQ ID NO: 561205 - protein, 14 aa, Homo sapiens
  CDR3 for alpha chain variable domain of TCR clone 280603 (TRAV1-1, TRAJ27)
CAVIYNTNACKSTF

SEQ ID NO: 561206 - protein, 13 aa, Homo sapiens
  CDR3 for beta chain variable domain of TCR clone 280603 (TRBV12-5, TRBJ1-2)
CASGVRTGNGYTF

SEQ ID NO: 561207 - protein, 12 aa, Homo sapiens
  CDR3 for alpha chain variable domain of TCR clone 280604 (TRAV21, TRAJ24)
CAVMDSWGKLQL

SEQ ID NO: 561208 - protein, 16 aa, Homo sapiens
  CDR3 for beta chain variable domain of TCR clone 280604 (TRBV13, TRBJ2-2)
CASSEVFGANTGELFF

SEQ ID NO: 561209 - protein, 14 aa, Homo sapiens
  CDR3 for alpha chain variable domain of TCR clone 280605 (TRAV1-2, TRAJ16)
CAVNRFSDGQELLF

SEQ ID NO: 561210 - protein, 11 aa, Homo sapiens
  CDR3 for beta chain variable domain of TCR clone 280605 (TRBV12-4, TRBJ2-3)
CASTATDTQYF

SEQ ID NO: 561211 - protein, 13 aa, Homo sapiens
  CDR3 for alpha chain variable domain of TCR clone 280606 (TRAV12-1, TRAJ31)
CVVIPNNNARLMF

SEQ ID NO: 561212 - protein, 15 aa, Homo sapiens
  CDR3 for beta chain variable domain of TCR clone 280606 (TRBV19, TRBJ1-2)
CASNLGGETPYGYIF

SEQ ID NO: 561213 - protein, 12 aa, Homo sapiens
  CDR3 for alpha chain variable domain of TCR clone 280607 (TRAV2, TRAJ31)
RAVEDNNARLMV

SEQ ID NO: 561214 - protein, 16 aa, Homo sapiens
  CDR3 for beta chain variable domain of TCR clone 280607 (TRBV10-3, TRBJ2-1)
CAISGVGDGGGGEQFF

SEQ ID NO: 561215 - protein, 16 aa, Homo sapiens
  CDR3 for alpha chain variable domain of TCR clone 280608 (TRAV4, TRAJ18)
CCVLLIGGSTLGRLYF

SEQ ID NO: 561216 - protein, 16 aa, Homo sapiens
  CDR3 for beta chain variable domain of TCR clone 280608 (TRBV7-2, TRBJ1-2)
CASSSNQDRRGHGYTF

SEQ ID NO: 561217 - protein, 12 aa, Homo sapiens
  CDR3 for alpha chain variable domain of TCR clone 280609 (TRAV13-2, TRAJ23)
CAERHRGGKLIF

SEQ ID NO: 561218 - protein, 16 aa, Homo sapiens
  CDR3 for beta chain variable domain of TCR clone 280609 (TRBV20-1, TRBJ1-4)
RSAPGHGLLTNEKLFF

SEQ ID NO: 561219 - protein, 14 aa, Homo sapiens
  CDR3 for alpha chain variable domain of TCR clone 280610 (TRAV8-3, TRAJ23)
CAVIIYNQGGKIIF

SEQ ID NO: 561220 - protein, 15 aa, Homo sapiens
  CDR3 for beta chain variable domain of TCR clone 280610 (TRBV18, TRBJ2-1)
CASSPPSASYNEQFF

SEQ ID NO: 561221 - protein, 15 aa, Homo sapiens
  CDR3 for alpha chain variable domain of TCR clone 280611 (TRAV8-2, TRAJ40)
CVVSDRGSGTYKYIF

SEQ ID NO: 561222 - protein, 14 aa, Homo sapiens
  CDR3 for beta chain variable domain of TCR clone 280611 (TRBV7-6, TRBJ2-3)
CASSLGTVTDTQYF

SEQ ID NO: 561223 - protein, 11 aa, Homo sapiens
  CDR3 for alpha chain variable domain of TCR clone 280612 (TRAV17, TRAJ31)
CATSTNARLMF

SEQ ID NO: 561224 - protein, 16 aa, Homo sapiens
  CDR3 for beta chain variable domain of TCR clone 280612 (TRBV7-8, TRBJ2-4)
CASSAERTLAKNIQYF

SEQ ID NO: 561225 - protein, 13 aa, Homo sapiens
  CDR3 for alpha chain variable domain of TCR clone 280613 (TRAV20, TRAJ54)
CAVQAGGAQKLVF

SEQ ID NO: 561226 - protein, 18 aa, Homo sapiens
  CDR3 for beta chain variable domain of TCR clone 280613 (TRBV11-2, TRBJ2-3)
CASGLGGASRGAPNTQYF

SEQ ID NO: 561227 - protein, 15 aa, Homo sapiens
  CDR3 for alpha chain variable domain of TCR clone 280614 (TRAV8-3, TRAJ32)
CAVGPYGGATNKLIL

SEQ ID NO: 561228 - protein, 14 aa, Homo sapiens
  CDR3 for beta chain variable domain of TCR clone 280614 (TRBV29-1, TRBJ2-2)
CSVLAETNTGELFF

SEQ ID NO: 561229 - protein, 14 aa, Homo sapiens
  CDR3 for alpha chain variable domain of TCR clone 280615 (TRAV1-2, TRAJ16)
CAVNRFSDGQKLLF

SEQ ID NO: 561230 - protein, 13 aa, Homo sapiens
  CDR3 for beta chain variable domain of TCR clone 280615 (TRBV7-9, TRBJ2-7)
CASKGEGAYEQYF

SEQ ID NO: 561231 - protein, 14 aa, Homo sapiens
  CDR3 for alpha chain variable domain of TCR clone 280616 (TRAV8-3, TRAJ16)
CAMDRFSDGQKLLF

SEQ ID NO: 561232 - protein, 15 aa, Homo sapiens
  CDR3 for beta chain variable domain of TCR clone 280616 (TRBV7-6, TRBJ2-1)
CASSPGQGPYNEQFF

SEQ ID NO: 561233 - protein, 11 aa, Homo sapiens
  CDR3 for alpha chain variable domain of TCR clone 280617 (TRAV12-2, TRAJ33)
CAVTSNYQLIW

SEQ ID NO: 561234 - protein, 14 aa, Homo sapiens
  CDR3 for beta chain variable domain of TCR clone 280617 (TRBV12-4, TRBJ2-2)
CASNQGANAGELFF

SEQ ID NO: 561235 - protein, 13 aa, Homo sapiens
  CDR3 for alpha chain variable domain of TCR clone 280618 (TRAV12-2, TRAJ31)
CAVKADNNARLIF

SEQ ID NO: 561236 - protein, 15 aa, Homo sapiens
  CDR3 for beta chain variable domain of TCR clone 280618 (TRBV7-2, TRBJ1-2)
CASSLVSGGDYGYTF

SEQ ID NO: 561237 - protein, 15 aa, Homo sapiens
  CDR3 for alpha chain variable domain of TCR clone 280619 (TRAV27, TRAJ38)
CAGRSNAGNNRKLIW

SEQ ID NO: 561238 - protein, 13 aa, Homo sapiens
  CDR3 for beta chain variable domain of TCR clone 280619 (TRBV12-5, TRBJ2-3)
CASQNRGTDTQYF

SEQ ID NO: 561239 - protein, 11 aa, Homo sapiens
  CDR3 for alpha chain variable domain of TCR clone 280620 (TRAV17, TRAJ9)
CATTGGFKTIF

SEQ ID NO: 561240 - protein, 14 aa, Homo sapiens
  CDR3 for beta chain variable domain of TCR clone 280620 (TRBV7-9, TRBJ2-2)
CASSGVADTGELFF

SEQ ID NO: 561241 - protein, 10 aa, Homo sapiens
  CDR3 for alpha chain variable domain of TCR clone 280621 (TRAV38-2/DV8, TRAJ40)
CASGTYKYIF

SEQ ID NO: 561242 - protein, 20 aa, Homo sapiens
  CDR3 for beta chain variable domain of TCR clone 280621 (TRBV28, TRBJ2-1)
CASTPIGRSPGLAGGNEQFF

SEQ ID NO: 561243 - protein, 12 aa, Homo sapiens
  CDR3 for alpha chain variable domain of TCR clone 280622 (TRAV1-1, TRAJ39)
CAVPVVGNILTF

SEQ ID NO: 561244 - protein, 18 aa, Homo sapiens
  CDR3 for beta chain variable domain of TCR clone 280622 (TRBV7-9, TRBJ2-7)
CASSLTTSGSRTWYEQYF

SEQ ID NO: 561245 - protein, 14 aa, Homo sapiens
  CDR3 for alpha chain variable domain of TCR clone 280623 (TRAV8-3, TRAJ4)
CAVGAAGGYNKLIF

SEQ ID NO: 561246 - protein, 16 aa, Homo sapiens
  CDR3 for beta chain variable domain of TCR clone 280623 (TRBV7-6, TRBJ2-7)
CASSGGTGALSYEQYF

SEQ ID NO: 561247 - protein, 14 aa, Homo sapiens
  CDR3 for alpha chain variable domain of TCR clone 280624 (TRAV1-2, TRAJ16)
CAVNRFSDGQKLLF

SEQ ID NO: 561248 - protein, 13 aa, Homo sapiens
  CDR3 for beta chain variable domain of TCR clone 280624 (TRBV7-3, TRBJ1-1)
CASSQDWGDEAFF

SEQ ID NO: 561249 - protein, 16 aa, Homo sapiens
  CDR3 for alpha chain variable domain of TCR clone 280625 (TRAV3, TRAJ4)
CAVRPSPSGGYNKQIF

SEQ ID NO: 561250 - protein, 12 aa, Homo sapiens
  CDR3 for beta chain variable domain of TCR clone 280625 (TRBV7-9, TRBJ2-7)
CASSQGVYEQYF

SEQ ID NO: 561251 - protein, 16 aa, Homo sapiens
  CDR3 for alpha chain variable domain of TCR clone 280626 (TRAV38-1, TRAJ32)
CAFMPFLCGATNKLIF

SEQ ID NO: 561252 - protein, 13 aa, Homo sapiens
  CDR3 for beta chain variable domain of TCR clone 280626 (TRBV7-9, TRBJ2-7)
CASSFAGAYEQYF

SEQ ID NO: 561253 - protein, 14 aa, Homo sapiens
  CDR3 for alpha chain variable domain of TCR clone 280627 (TRAV12-2, TRAJ9)
CAVNMEGGGFKSIF

SEQ ID NO: 561254 - protein, 14 aa, Homo sapiens
  CDR3 for beta chain variable domain of TCR clone 280627 (TRBV27, TRBJ2-3)
CASRKGGRTDTQYF

SEQ ID NO: 561255 - protein, 17 aa, Homo sapiens
  CDR3 for alpha chain variable domain of TCR clone 280628 (TRAV3, TRAJ42)
CAVRDRDYGGSQGNLIV

SEQ ID NO: 561256 - protein, 14 aa, Homo sapiens
  CDR3 for beta chain variable domain of TCR clone 280628 (TRBV19, TRBJ2-2)
CTSSGQGIAGELFF

SEQ ID NO: 561257 - protein, 15 aa, Homo sapiens
  CDR3 for alpha chain variable domain of TCR clone 280629 (TRAV26-1, TRAJ22)
CTVRVSFWFCKATDL

SEQ ID NO: 561258 - protein, 13 aa, Homo sapiens
  CDR3 for beta chain variable domain of TCR clone 280629 (TRBV7-9, TRBJ1-2)
CASSLKQHYGYTF

SEQ ID NO: 561259 - protein, 16 aa, Homo sapiens
  CDR3 for alpha chain variable domain of TCR clone 280630 (TRAV30, TRAJ24)
CGTEIVDADSWGKFQF

SEQ ID NO: 561260 - protein, 14 aa, Homo sapiens
  CDR3 for beta chain variable domain of TCR clone 280630 (TRBV19, TRBJ2-7)
CASSIEASSYEQYF

SEQ ID NO: 561261 - protein, 12 aa, Homo sapiens
  CDR3 for alpha chain variable domain of TCR clone 280631 (TRAV12-2, TRAJ7)
CAVMRGDNRLAS

SEQ ID NO: 561262 - protein, 15 aa, Homo sapiens
  CDR3 for beta chain variable domain of TCR clone 280631 (TRBV2, TRBJ2-1)
CASSELAGGYNEQFF

SEQ ID NO: 561263 - protein, 11 aa, Homo sapiens
  CDR3 for alpha chain variable domain of TCR clone 280632 (TRAV2, TRAJ37)
CSVDNTGKLIF

SEQ ID NO: 561264 - protein, 14 aa, Homo sapiens
  CDR3 for beta chain variable domain of TCR clone 280632 (TRBV20-1, TRBJ2-1)
CSATLAGGLGEQFF

SEQ ID NO: 561265 - protein, 15 aa, Homo sapiens
  CDR3 for alpha chain variable domain of TCR clone 280633 (TRAV26-1, TRAJ40)
CIVRVTTSGTYKYIF

SEQ ID NO: 561266 - protein, 12 aa, Homo sapiens
  CDR3 for beta chain variable domain of TCR clone 280633 (TRBV7-9, TRGJ1)
CASSTDREKLFF

SEQ ID NO: 561267 - protein, 12 aa, Homo sapiens
  CDR3 for alpha chain variable domain of TCR clone 280634 (TRAV12-1, TRAJ34)
CVVAGATDKLIF

SEQ ID NO: 561268 - protein, 18 aa, Homo sapiens
  CDR3 for beta chain variable domain of TCR clone 280634 (TRBV24-1, TRBJ2-1)
CATSDLMFLGRGVHEQFF

SEQ ID NO: 561269 - protein, 15 aa, Homo sapiens
  CDR3 for alpha chain variable domain of TCR clone 280635 (TRAV8-6, TRAJ23)
CAVRLIYNQGGKLIS

SEQ ID NO: 561270 - protein, 13 aa, Homo sapiens
  CDR3 for beta chain variable domain of TCR clone 280635 (TRBV11-2, TRBJ2-2)
CASSLQNTGELFF

SEQ ID NO: 561271 - protein, 17 aa, Homo sapiens
  CDR3 for alpha chain variable domain of TCR clone 280636 (TRAV4, TRAJ18)
CLVGEGSVCSTLGRLYF

SEQ ID NO: 561272 - protein, 16 aa, Homo sapiens
  CDR3 for beta chain variable domain of TCR clone 280636 (TRBV15, TRBJ1-4)
CATSRDSPPGREKLFF

SEQ ID NO: 561273 - protein, 12 aa, Homo sapiens
  CDR3 for alpha chain variable domain of TCR clone 280637 (TRAV13-1, TRAJ21)
CAAKEGFNKFYF

SEQ ID NO: 561274 - protein, 16 aa, Homo sapiens
  CDR3 for beta chain variable domain of TCR clone 280637 (TRBV4-1, TRBJ2-5)
CASSHADRARGETQYF

SEQ ID NO: 561275 - protein, 17 aa, Homo sapiens
  CDR3 for alpha chain variable domain of TCR clone 280638 (TRAV3, TRAJ6)
CAVRDGPRAGGSYIPTF

SEQ ID NO: 561276 - protein, 14 aa, Homo sapiens
  CDR3 for beta chain variable domain of TCR clone 280638 (TRBV5-1, TRBJ2-5)
CASSLAGKQETQYF

SEQ ID NO: 561277 - protein, 14 aa, Homo sapiens
  CDR3 for alpha chain variable domain of TCR clone 280639 (TRAV12-1, TRAJ3)
CVVNGWSSASKIIF

SEQ ID NO: 561278 - protein, 17 aa, Homo sapiens
  CDR3 for beta chain variable domain of TCR clone 280639 (TRBV7-8, TRBJ2-1)
CASSPPTGTLAYNEQFF

SEQ ID NO: 561279 - protein, 15 aa, Homo sapiens
  CDR3 for alpha chain variable domain of TCR clone 280640 (TRAV30, TRAJ57)
CGTAIPQGGSAKLVF

SEQ ID NO: 561280 - protein, 13 aa, Homo sapiens
  CDR3 for beta chain variable domain of TCR clone 280640 (TRBV7-9, TRBJ1-2)
CASSPSNFWGYTF

SEQ ID NO: 561281 - protein, 12 aa, Homo sapiens
  CDR3 for alpha chain variable domain of TCR clone 280641 (TRAV3, TRAJ43)
CAVRGPNNDIRF

SEQ ID NO: 561282 - protein, 15 aa, Homo sapiens
  CDR3 for beta chain variable domain of TCR clone 280641 (TRBV27, TRBJ1-5)
CASSLGTGFDQPQHF

SEQ ID NO: 561283 - protein, 14 aa, Homo sapiens
  CDR3 for alpha chain variable domain of TCR clone 280642 (TRAV12-2, TRAJ40)
RAVKIPSGTYKYIF

SEQ ID NO: 561284 - protein, 13 aa, Homo sapiens
  CDR3 for beta chain variable domain of TCR clone 280642 (TRBV7-9, TRBJ1-2)
RASSLKQNYGYSF

SEQ ID NO: 561285 - protein, 17 aa, Homo sapiens
  CDR3 for alpha chain variable domain of TCR clone 280643 (TRAV36/DV7, TRAJ52)
CAVAQRAGRTSYGKLTF

SEQ ID NO: 561286 - protein, 15 aa, Homo sapiens
  CDR3 for beta chain variable domain of TCR clone 280643 (TRBV20-1, TRBJ2-7)
CSARDRVSGMDEQYF

SEQ ID NO: 561287 - protein, 13 aa, Homo sapiens
  CDR3 for alpha chain variable domain of TCR clone 280644 (TRAV2, TRAJ15)
CAVASQAGTALIF

SEQ ID NO: 561288 - protein, 12 aa, Homo sapiens
  CDR3 for beta chain variable domain of TCR clone 280644 (TRBV7-9, TRBJ2-7)
CASSFGSYEQYF

SEQ ID NO: 561289 - protein, 11 aa, Homo sapiens
  CDR3 for alpha chain variable domain of TCR clone 280645 (TRAV20, TRAJ34)
CRTKGTDKLIF

SEQ ID NO: 561290 - protein, 14 aa, Homo sapiens
  CDR3 for beta chain variable domain of TCR clone 280645 (TRBV12-4, TRBJ1-1)
CASSLGTGGTEAFF

SEQ ID NO: 561291 - protein, 12 aa, Homo sapiens
  CDR3 for alpha chain variable domain of TCR clone 280646 (TRAV3, TRAJ31)
CAVRDVNARLMF

SEQ ID NO: 561292 - protein, 18 aa, Homo sapiens
  CDR3 for beta chain variable domain of TCR clone 280646 (TRBV7-2, TRBJ2-3)
CASSLKREGSGITDTQYF

SEQ ID NO: 561293 - protein, 17 aa, Homo sapiens
  CDR3 for alpha chain variable domain of TCR clone 280647 (TRAV1-2, TRAJ27)
CSVRDKTGDTNAGKSTF

SEQ ID NO: 561294 - protein, 15 aa, Homo sapiens
  CDR3 for beta chain variable domain of TCR clone 280647 (TRBV2, TRBJ2-5)
CASSGTVAAGETQYF

SEQ ID NO: 561295 - protein, 14 aa, Homo sapiens
  CDR3 for alpha chain variable domain of TCR clone 280648 (TRAV12-2, TRAJ13)
CAVKKTVGYQKVTF

SEQ ID NO: 561296 - protein, 14 aa, Homo sapiens
  CDR3 for beta chain variable domain of TCR clone 280648 (TRBV2, TRBJ1-5)
CASKKTDSNQPQHF

SEQ ID NO: 561297 - protein, 11 aa, Homo sapiens
  CDR3 for alpha chain variable domain of TCR clone 280649 (TRAV12-1, TRAJ15)
CGVNAGTALIF

SEQ ID NO: 561298 - protein, 16 aa, Homo sapiens
  CDR3 for beta chain variable domain of TCR clone 280649 (TRBV28, TRBJ2-1)
CASSSRVRDSYNEQFF

SEQ ID NO: 561299 - protein, 14 aa, Homo sapiens
  CDR3 for alpha chain variable domain of TCR clone 280650 (TRAV14/DV4, TRAJ49)
CAMREGVNGNQFYF

SEQ ID NO: 561300 - protein, 13 aa, Homo sapiens
  CDR3 for beta chain variable domain of TCR clone 280650 (TRBV12-5, TRBJ2-3)
CASGDRQSDTQYF

SEQ ID NO: 561301 - protein, 11 aa, Homo sapiens
  CDR3 for alpha chain variable domain of TCR clone 280651 (TRAV3, TRAJ21)
CAVCNFNKFYF

SEQ ID NO: 561302 - protein, 15 aa, Homo sapiens
  CDR3 for beta chain variable domain of TCR clone 280651 (TRBV29-1, TRBJ2-1)
CSVEGGPASYNEQIF

SEQ ID NO: 561303 - protein, 14 aa, Homo sapiens
  CDR3 for alpha chain variable domain of TCR clone 280652 (TRAV23/DV6, TRAJ4)
CAAPSSGGYNKLIF

SEQ ID NO: 561304 - protein, 15 aa, Homo sapiens
  CDR3 for beta chain variable domain of TCR clone 280652 (TRBV13, TRBJ2-1)
CASSLLSGLNNEQFF

SEQ ID NO: 561305 - protein, 14 aa, Homo sapiens
  CDR3 for alpha chain variable domain of TCR clone 280653 (TRAV3, TRAJ16)
CAVSLFSDGQKLLF

SEQ ID NO: 561306 - protein, 15 aa, Homo sapiens
  CDR3 for beta chain variable domain of TCR clone 280653 (TRBV5-1, TRBJ2-3)
CASSVTSGSTDTQYF

SEQ ID NO: 561307 - protein, 13 aa, Homo sapiens
  CDR3 for alpha chain variable domain of TCR clone 280654 (TRAV2, TRAJ12)
CAVGADSSYKLIF

SEQ ID NO: 561308 - protein, 13 aa, Homo sapiens
  CDR3 for beta chain variable domain of TCR clone 280654 (TRBV20-1, TRBJ2-1)
CSARSRPRDEQFF

SEQ ID NO: 561309 - protein, 16 aa, Homo sapiens
  CDR3 for alpha chain variable domain of TCR clone 280655 (TRAV8-3, TRAJ8)
CAAPRDGNTGFQKLVF

SEQ ID NO: 561310 - protein, 15 aa, Homo sapiens
  CDR3 for beta chain variable domain of TCR clone 280655 (TRBV6-1, TRBJ2-6)
CASSSRPSGANALTF

SEQ ID NO: 561311 - protein, 15 aa, Homo sapiens
  CDR3 for alpha chain variable domain of TCR clone 280656 (TRAV26-1, TRAJ29)
CIVRVEGSGNTPLVF

SEQ ID NO: 561312 - protein, 15 aa, Homo sapiens
  CDR3 for beta chain variable domain of TCR clone 280656 (TRBV7-3, TRBJ2-1)
CASSPTGGGEVEQFF

SEQ ID NO: 561313 - protein, 16 aa, Homo sapiens
  CDR3 for alpha chain variable domain of TCR clone 280657 (TRAV30, TRAJ24)
CGTEIVDADSWGKFQF

SEQ ID NO: 561314 - protein, 15 aa, Homo sapiens
  CDR3 for beta chain variable domain of TCR clone 280657 (TRBV7-8, TRBJ2-1)
RASSLADSLYNEQFF

SEQ ID NO: 561315 - protein, 18 aa, Homo sapiens
  CDR3 for alpha chain variable domain of TCR clone 280658 (TRAV26-1, TRAJ38)
CCVLLHRHNAGNNRKLIW

SEQ ID NO: 561316 - protein, 14 aa, Homo sapiens
  CDR3 for beta chain variable domain of TCR clone 280658 (TRBV4-1, TRBJ2-2)
CASSQAVNTGELFF

SEQ ID NO: 561317 - protein, 15 aa, Homo sapiens
  CDR3 for alpha chain variable domain of TCR clone 280659 (TRAV3, TRAJ20)
CAVRAPRSNDYKLSF

SEQ ID NO: 561318 - protein, 14 aa, Homo sapiens
  CDR3 for beta chain variable domain of TCR clone 280659 (TRBV20-1, TRBJ2-7)
CSARRGNGIYEQYF

SEQ ID NO: 561319 - protein, 15 aa, Homo sapiens
  CDR3 for alpha chain variable domain of TCR clone 280660 (TRAV3, TRAJ5)
WSVRDRKTGRRALTF

SEQ ID NO: 561320 - protein, 15 aa, Homo sapiens
  CDR3 for beta chain variable domain of TCR clone 280660 (TRBV7-8, TRBJ2-1)
CASSLADSLYNEQFF

SEQ ID NO: 561321 - protein, 12 aa, Homo sapiens
  CDR3 for alpha chain variable domain of TCR clone 280661 (TRAV13-2, TRAJ23)
WSERHRGGKLIL

SEQ ID NO: 561322 - protein, 16 aa, Homo sapiens
  CDR3 for beta chain variable domain of TCR clone 280661 (TRBV20-1, TRBJ1-4)
CSAPGQGLLTNEKLFF

SEQ ID NO: 561323 - protein, 13 aa, Homo sapiens
  CDR3 for alpha chain variable domain of TCR clone 280662 (TRAV17, TRAJ5)
CALRGTGRRALTF

SEQ ID NO: 561324 - protein, 14 aa, Homo sapiens
  CDR3 for beta chain variable domain of TCR clone 280662 (TRBV12-5, TRBJ2-5)
CASGSRTHQETRYF

SEQ ID NO: 561325 - protein, 13 aa, Homo sapiens
  CDR3 for alpha chain variable domain of TCR clone 280663 (TRAV29/DV5, TRAJ31)
CAASRNNNARLMF

SEQ ID NO: 561326 - protein, 13 aa, Homo sapiens
  CDR3 for beta chain variable domain of TCR clone 280663 (TRBV20-1, TRBJ2-5)
CSAREAFQETQYF

SEQ ID NO: 561327 - protein, 16 aa, Homo sapiens
  CDR3 for alpha chain variable domain of TCR clone 280664 (TRAV36/DV7, TRAJ33)
WRPGNKVQDSNSQLIW

SEQ ID NO: 561328 - protein, 15 aa, Homo sapiens
  CDR3 for beta chain variable domain of TCR clone 280664 (TRBV29-1, TRBJ2-1)
CSVGRHALFYNEQFF

SEQ ID NO: 561329 - protein, 13 aa, Homo sapiens
  CDR3 for alpha chain variable domain of TCR clone 280665 (TRAV2, TRAJ15)
CAVASQAGTALIF

SEQ ID NO: 561330 - protein, 13 aa, Homo sapiens
  CDR3 for beta chain variable domain of TCR clone 280665 (TRBV27, TRBJ2-7)
CASGRGGAYEQYF

SEQ ID NO: 561331 - protein, 14 aa, Homo sapiens
  CDR3 for alpha chain variable domain of TCR clone 280666 (TRAV35, TRAJ29)
CAGQLTSGNTPLVF

SEQ ID NO: 561332 - protein, 14 aa, Homo sapiens
  CDR3 for beta chain variable domain of TCR clone 280666 (TRBV12-5, TRBJ2-5)
CASGSRTHQETQYF

SEQ ID NO: 561333 - protein, 13 aa, Homo sapiens
  CDR3 for alpha chain variable domain of TCR clone 280667 (TRAV26-2, TRAJ54)
CIPRVGGAQKLVF

SEQ ID NO: 561334 - protein, 18 aa, Homo sapiens
  CDR3 for beta chain variable domain of TCR clone 280667 (TRBV4-1, TRBJ1-1)
CASSSMSERPNTEAFLDK

SEQ ID NO: 561335 - protein, 10 aa, Homo sapiens
  CDR3 for alpha chain variable domain of TCR clone 280668 (TRAV1-2, TRAJ20)
CACNDYKLSF

SEQ ID NO: 561336 - protein, 12 aa, Homo sapiens
  CDR3 for beta chain variable domain of TCR clone 280668 (TRBV7-8, TRBJ2-4)
CASSLGGNIQYF

SEQ ID NO: 561337 - protein, 17 aa, Homo sapiens
  CDR3 for alpha chain variable domain of TCR clone 280669 (TRAV4, TRAJ42)
CLVGVLNYGGSQGNLIF

SEQ ID NO: 561338 - protein, 12 aa, Homo sapiens
  CDR3 for beta chain variable domain of TCR clone 280669 (TRBV12-4, TRBJ2-1)
CASSLVRVEQFF

SEQ ID NO: 561339 - protein, 12 aa, Homo sapiens
  CDR3 for alpha chain variable domain of TCR clone 280670 (TRAV21, TRAJ6)
CAVKGGSYIPTF

SEQ ID NO: 561340 - protein, 12 aa, Homo sapiens
  CDR3 for beta chain variable domain of TCR clone 280670 (TRBV7-8, TRBJ2-7)
CASSLGDREQYF

SEQ ID NO: 561341 - protein, 13 aa, Homo sapiens
  CDR3 for alpha chain variable domain of TCR clone 280671 (TRAV21, TRAJ27)
CAALNTNAGKSTF

SEQ ID NO: 561342 - protein, 14 aa, Homo sapiens
  CDR3 for beta chain variable domain of TCR clone 280671 (TRBV27, TRBJ1-1)
CASSLLSGLSDAFF

SEQ ID NO: 561343 - protein, 14 aa, Homo sapiens
  CDR3 for alpha chain variable domain of TCR clone 280672 (TRAV13-2, TRAJ15)
CAENPNQEGTALIF

SEQ ID NO: 561344 - protein, 16 aa, Homo sapiens
  CDR3 for beta chain variable domain of TCR clone 280672 (TRBV12-4, TRBJ1-2)
CASSPTATGKTRGYTF

SEQ ID NO: 561345 - protein, 14 aa, Homo sapiens
  CDR3 for alpha chain variable domain of TCR clone 280673 (TRAV12-1, TRAJ42)
CVVIYGGSQGNLIF

SEQ ID NO: 561346 - protein, 17 aa, Homo sapiens
  CDR3 for beta chain variable domain of TCR clone 280673 (TRBV3-1, TRBJ2-6)
CASSPNTGPAGANVLVF

SEQ ID NO: 561347 - protein, 13 aa, Homo sapiens
  CDR3 for alpha chain variable domain of TCR clone 280674 (TRAV12-1, TRAJ11)
CVVTRGGYSTLTF

SEQ ID NO: 561348 - protein, 14 aa, Homo sapiens
  CDR3 for beta chain variable domain of TCR clone 280674 (TRBV11-2, TRBJ2-5)
CASSRTGGIETQYF

SEQ ID NO: 561349 - protein, 15 aa, Homo sapiens
  CDR3 for alpha chain variable domain of TCR clone 280675 (TRAV12-3, TRAJ53)
CNERPIEGSNYKLTF

SEQ ID NO: 561350 - protein, 11 aa, Homo sapiens
  CDR3 for beta chain variable domain of TCR clone 280675 (TRBV4-1, TRBJ1-4)
CASKENEKLFF

SEQ ID NO: 561351 - protein, 11 aa, Homo sapiens
  CDR3 for alpha chain variable domain of TCR clone 280676 (TRAV4, TRAJ31)
CLVGLNARLMF

SEQ ID NO: 561352 - protein, 16 aa, Homo sapiens
  CDR3 for beta chain variable domain of TCR clone 280676 (TRBV15, TRBJ2-6)
CATSVNGGFLDNVLTF

SEQ ID NO: 561353 - protein, 17 aa, Homo sapiens
  CDR3 for alpha chain variable domain of TCR clone 280677 (TRAV4, TRAJ18)
CLVGERAVGSTLGRRYF

SEQ ID NO: 561354 - protein, 18 aa, Homo sapiens
  CDR3 for beta chain variable domain of TCR clone 280677 (TRBV11-2, TRBJ2-3)
CASSLGGASRGAPNTQYF

SEQ ID NO: 561355 - protein, 14 aa, Homo sapiens
  CDR3 for alpha chain variable domain of TCR clone 280678 (TRAV2, TRAJ37)
CAVDFTSNTGKLIF

SEQ ID NO: 561356 - protein, 13 aa, Homo sapiens
  CDR3 for beta chain variable domain of TCR clone 280678 (TRBV6-4, TRBJ1-5)
CASSADLNQPQHF

SEQ ID NO: 561357 - protein, 13 aa, Homo sapiens
  CDR3 for alpha chain variable domain of TCR clone 280679 (TRAV26-1, TRAJ33)
CIVIVEGNYQLIW

SEQ ID NO: 561358 - protein, 16 aa, Homo sapiens
  CDR3 for beta chain variable domain of TCR clone 280679 (TRBV15, TRBJ2-7)
CATSRDRGRRRGEQYF

SEQ ID NO: 561359 - protein, 13 aa, Homo sapiens
  CDR3 for alpha chain variable domain of TCR clone 280680 (TRAV2, TRAJ29)
CAAQNSGNTPLVF

SEQ ID NO: 561360 - protein, 12 aa, Homo sapiens
  CDR3 for beta chain variable domain of TCR clone 280680 (TRBV18, TRBJ2-3)
CASSPLSDTQYF

SEQ ID NO: 561361 - protein, 13 aa, Homo sapiens
  CDR3 for alpha chain variable domain of TCR clone 280681 (TRAV13-2, TRAJ48)
CAEMDFGNVKLTF

SEQ ID NO: 561362 - protein, 16 aa, Homo sapiens
  CDR3 for beta chain variable domain of TCR clone 280681 (TRBV27, TRBJ2-2)
CASSFRGLVRTGELFF

SEQ ID NO: 561363 - protein, 13 aa, Homo sapiens
  CDR3 for alpha chain variable domain of TCR clone 280682 (TRAV12-3, TRAJ33)
CAMSVNSNYQLNW

SEQ ID NO: 561364 - protein, 13 aa, Homo sapiens
  CDR3 for beta chain variable domain of TCR clone 280682 (TRBV7-2, TRBJ2-2)
CASSLAVTGELFF

SEQ ID NO: 561365 - protein, 14 aa, Homo sapiens
  CDR3 for alpha chain variable domain of TCR clone 280683 (TRAV12-3, TRAJ10)
SHLPLTGGGNKITF

SEQ ID NO: 561366 - protein, 13 aa, Homo sapiens
  CDR3 for beta chain variable domain of TCR clone 280683 (TRBV7-6, TRBJ2-3)
CASSLAVGDTQYF

SEQ ID NO: 561367 - protein, 12 aa, Homo sapiens
  CDR3 for alpha chain variable domain of TCR clone 280684 (TRAV36/DV7, TRAJ54)
CAVVRGAQKLIF

SEQ ID NO: 561368 - protein, 14 aa, Homo sapiens
  CDR3 for beta chain variable domain of TCR clone 280684 (TRBV7-3, TRBJ1-1)
CASSLKGGNTEAFF

SEQ ID NO: 561369 - protein, 13 aa, Homo sapiens
  CDR3 for alpha chain variable domain of TCR clone 280685 (TRAV8-3, TRAJ48)
CAVVRFGKEKLTF

SEQ ID NO: 561370 - protein, 16 aa, Homo sapiens
  CDR3 for beta chain variable domain of TCR clone 280685 (TRBV20-1, TRBJ2-5)
CSARDFASGIQETQYF

SEQ ID NO: 561371 - protein, 11 aa, Homo sapiens
  CDR3 for alpha chain variable domain of TCR clone 280686 (TRAV8-3, TRAJ15)
CAVGPGTALIF

SEQ ID NO: 561372 - protein, 18 aa, Homo sapiens
  CDR3 for beta chain variable domain of TCR clone 280686 (TRBV18, TRBJ2-3)
CASSYTSGAAGGTYTQYF

SEQ ID NO: 561373 - protein, 11 aa, Homo sapiens
  CDR3 for alpha chain variable domain of TCR clone 280687 (TRAV3, TRAJ21)
CALGNFNKFYF

SEQ ID NO: 561374 - protein, 14 aa, Homo sapiens
  CDR3 for beta chain variable domain of TCR clone 280687 (TRBV18, TRBJ2-5)
CASSPGVSQETQYF

SEQ ID NO: 561375 - protein, 12 aa, Homo sapiens
  CDR3 for alpha chain variable domain of TCR clone 280688 (TRAV27, TRAJ41)
CAGRNSGYAFNF

SEQ ID NO: 561376 - protein, 13 aa, Homo sapiens
  CDR3 for beta chain variable domain of TCR clone 280688 (TRBV12-4, TRBJ1-1)
CASSPGTGFEAFF

SEQ ID NO: 561377 - protein, 15 aa, Homo sapiens
  CDR3 for alpha chain variable domain of TCR clone 280689 (TRAV21, TRAJ53)
CATLNSSGSNYKLTF

SEQ ID NO: 561378 - protein, 16 aa, Homo sapiens
  CDR3 for beta chain variable domain of TCR clone 280689 (TRBV9, TRBJ2-1)
CASSGGGGGNYNEQFF

SEQ ID NO: 561379 - protein, 14 aa, Homo sapiens
  CDR3 for alpha chain variable domain of TCR clone 280690 (TRAV13-1, TRAJ35)
CAASIGGFGNVLHC

SEQ ID NO: 561380 - protein, 14 aa, Homo sapiens
  CDR3 for beta chain variable domain of TCR clone 280690 (TRBV4-1, TRBJ2-2)
CASSQAVNTGELFF

SEQ ID NO: 561381 - protein, 14 aa, Homo sapiens
  CDR3 for alpha chain variable domain of TCR clone 280691 (TRAV12-2, TRAJ5)
CAVNRSTGRRALTF

SEQ ID NO: 561382 - protein, 14 aa, Homo sapiens
  CDR3 for beta chain variable domain of TCR clone 280691 (TRBV7-9, TRBJ2-5)
CASSLDTAQETQYF

SEQ ID NO: 561383 - protein, 13 aa, Homo sapiens
  CDR3 for alpha chain variable domain of TCR clone 280692 (TRAV13-1, TRAJ5)
CAAEHTGRRALTF

SEQ ID NO: 561384 - protein, 14 aa, Homo sapiens
  CDR3 for beta chain variable domain of TCR clone 280692 (TRBV28, TRBJ2-7)
CASSLLRISYEQYF

SEQ ID NO: 561385 - protein, 13 aa, Homo sapiens
  CDR3 for alpha chain variable domain of TCR clone 280693 (TRAV21, TRAJ57)
CAVTQGGSEKLVF

SEQ ID NO: 561386 - protein, 18 aa, Homo sapiens
  CDR3 for beta chain variable domain of TCR clone 280693 (TRBV18, TRBJ2-5)
CALTWGVPRDPVLRARHA

SEQ ID NO: 561387 - protein, 15 aa, Homo sapiens
  CDR3 for alpha chain variable domain of TCR clone 280694 (TRAV36/DV7, TRAJ53)
CAVEGSGGSNDKLTF

SEQ ID NO: 561388 - protein, 16 aa, Homo sapiens
  CDR3 for beta chain variable domain of TCR clone 280694 (TRBV27, TRBJ2-2)
CASSLSGFWVTGELFF

SEQ ID NO: 561389 - protein, 14 aa, Homo sapiens
  CDR3 for alpha chain variable domain of TCR clone 280695 (TRAV1-2, TRAJ16)
CAVNRFSDGQKLLF

SEQ ID NO: 561390 - protein, 17 aa, Homo sapiens
  CDR3 for beta chain variable domain of TCR clone 280695 (TRBV28, TRBJ2-5)
WASSFGGEWGGQETQYF

SEQ ID NO: 561391 - protein, 14 aa, Homo sapiens
  CDR3 for alpha chain variable domain of TCR clone 280696 (TRAV26-1, TRAJ40)
CIVRLLSGTYKYIF

SEQ ID NO: 561392 - protein, 15 aa, Homo sapiens
  CDR3 for beta chain variable domain of TCR clone 280696 (TRBV15, TRBJ2-4)
CATSRRGSTKNIQYF

SEQ ID NO: 561393 - protein, 10 aa, Homo sapiens
  CDR3 for alpha chain variable domain of TCR clone 280697 (TRAV12-2, TRAJ20)
CAVYLYKLSF

SEQ ID NO: 561394 - protein, 20 aa, Homo sapiens
  CDR3 for beta chain variable domain of TCR clone 280697 (TRBV11-2, TRBJ2-1)
CASSPRISALGRGAMNEQFF

SEQ ID NO: 561395 - protein, 15 aa, Homo sapiens
  CDR3 for alpha chain variable domain of TCR clone 280698 (TRAV21, TRAJ40)
CAVRPQTSGTYKYIF

SEQ ID NO: 561396 - protein, 15 aa, Homo sapiens
  CDR3 for beta chain variable domain of TCR clone 280698 (TRBV5-1, TRBJ2-1)
GASSPPRAPYNEQFF

SEQ ID NO: 561397 - protein, 13 aa, Homo sapiens
  CDR3 for alpha chain variable domain of TCR clone 280699 (TRAV9-2, TRAJ49)
CALIQIGGNQFYF

SEQ ID NO: 561398 - protein, 13 aa, Homo sapiens
  CDR3 for beta chain variable domain of TCR clone 280699 (TRBV20-1, TRBJ1-1)
CSARVGGNTEAFF

SEQ ID NO: 561399 - protein, 13 aa, Homo sapiens
  CDR3 for alpha chain variable domain of TCR clone 280700 (TRAV3, TRAJ20)
CAVRDTEDYKLSF

SEQ ID NO: 561400 - protein, 13 aa, Homo sapiens
  CDR3 for beta chain variable domain of TCR clone 280700 (TRBV7-9, TRBJ1-2)
CASSLKQNYGYTF

SEQ ID NO: 561401 - protein, 14 aa, Homo sapiens
  CDR3 for alpha chain variable domain of TCR clone 280701 (TRAV1-2, TRAJ8)
CSVREDTGFQKLVF

SEQ ID NO: 561402 - protein, 12 aa, Homo sapiens
  CDR3 for beta chain variable domain of TCR clone 280701 (TRBV11-2, TRBJ2-1)
CASSPGNNEQFF

SEQ ID NO: 561403 - protein, 15 aa, Homo sapiens
  CDR3 for alpha chain variable domain of TCR clone 280702 (TRAV13-1, TRAJ17)
CSASIERAAGNKLTF

SEQ ID NO: 561404 - protein, 13 aa, Homo sapiens
  CDR3 for beta chain variable domain of TCR clone 280702 (TRBV7-7, TRBJ2-3)
CASSLSRADTQYF

SEQ ID NO: 561405 - protein, 20 aa, Homo sapiens
  CDR3 for alpha chain variable domain of TCR clone 280703 (TRAV12-1, TRAJ42)
SSVIQAPTSVKGGSQGNLIF

SEQ ID NO: 561406 - protein, 13 aa, Homo sapiens
  CDR3 for beta chain variable domain of TCR clone 280703 (TRBV4-1, TRBJ2-2)
CASSQENTGELFF

SEQ ID NO: 561407 - protein, 15 aa, Homo sapiens
  CDR3 for alpha chain variable domain of TCR clone 280704 (TRAV8-1, TRAJ37)
CAVKKGSGNTGKLIF

SEQ ID NO: 561408 - protein, 14 aa, Homo sapiens
  CDR3 for beta chain variable domain of TCR clone 280704 (TRBV25-1, TRBJ1-1)
CASTHLGGNTEAFF

SEQ ID NO: 561409 - protein, 13 aa, Homo sapiens
  CDR3 for alpha chain variable domain of TCR clone 280705 (TRAV27, TRAJ45)
CRSSGGGADGLTV

SEQ ID NO: 561410 - protein, 11 aa, Homo sapiens
  CDR3 for beta chain variable domain of TCR clone 280705 (TRBV19, TRBJ1-1)
CASSIGSEAFF

SEQ ID NO: 561411 - protein, 13 aa, Homo sapiens
  CDR3 for alpha chain variable domain of TCR clone 280706 (TRAV27, TRAJ8)
CPGGPTGFQKLVF

SEQ ID NO: 561412 - protein, 15 aa, Homo sapiens
  CDR3 for beta chain variable domain of TCR clone 280706 (TRBV6-1, TRBJ2-7)
CASSESMGDFYEQYF

SEQ ID NO: 561413 - protein, 15 aa, Homo sapiens
  CDR3 for alpha chain variable domain of TCR clone 280707 (TRAV21, TRAJ32)
CAVNSYGGATNKFVF

SEQ ID NO: 561414 - protein, 18 aa, Homo sapiens
  CDR3 for beta chain variable domain of TCR clone 280707 (TRBV7-9, TRBJ2-1)
CASSTGLAEGSSYNEQFF

SEQ ID NO: 561415 - protein, 11 aa, Homo sapiens
  CDR3 for alpha chain variable domain of TCR clone 280708 (TRAV2, TRAJ33)
CAVESNYQLIW

SEQ ID NO: 561416 - protein, 10 aa, Homo sapiens
  CDR3 for beta chain variable domain of TCR clone 280708 (TRBV12-4, TRBJ2-3)
CQTATDTQYF

SEQ ID NO: 561417 - protein, 14 aa, Homo sapiens
  CDR3 for alpha chain variable domain of TCR clone 280709 (TRAV1-2, TRAJ16)
CAVNRFSDGQKLLF

SEQ ID NO: 561418 - protein, 14 aa, Homo sapiens
  CDR3 for beta chain variable domain of TCR clone 280709 (TRBV20-1, TRBJ2-4)
CSASGRVGGNIQYF

SEQ ID NO: 561419 - protein, 15 aa, Homo sapiens
  CDR3 for alpha chain variable domain of TCR clone 280710 (TRAV2, TRAJ15)
CAVEDRGQAGNALIF

SEQ ID NO: 561420 - protein, 13 aa, Homo sapiens
  CDR3 for beta chain variable domain of TCR clone 280710 (TRBV10-2, TRBJ2-7)
CASGASGGYEQYF

SEQ ID NO: 561421 - protein, 14 aa, Homo sapiens
  CDR3 for alpha chain variable domain of TCR clone 280711 (TRAV12-2, TRAJ13)
CAVKKTGGYQKVTF

SEQ ID NO: 561422 - protein, 16 aa, Homo sapiens
  CDR3 for beta chain variable domain of TCR clone 280711 (TRBV13, TRBJ2-3)
CQQPLQVAGGRNTQYF

SEQ ID NO: 561423 - protein, 11 aa, Homo sapiens
  CDR3 for alpha chain variable domain of TCR clone 280712 (TRAV12-3, TRAJ41)
CAMNARETLNF

SEQ ID NO: 561424 - protein, 16 aa, Homo sapiens
  CDR3 for beta chain variable domain of TCR clone 280712 (TRBV7-8, TRBJ2-3)
CASSTEGQRETDTQYF

SEQ ID NO: 561425 - protein, 17 aa, Homo sapiens
  CDR3 for alpha chain variable domain of TCR clone 280713 (TRAV3, TRAJ42)
CAVRDRDYGGSQGNLIF

SEQ ID NO: 561426 - protein, 15 aa, Homo sapiens
  CDR3 for beta chain variable domain of TCR clone 280713 (TRBV27, TRBJ1-6)
CASSFDRGLGSPLHL

SEQ ID NO: 561427 - protein, 13 aa, Homo sapiens
  CDR3 for alpha chain variable domain of TCR clone 280714 (TRAV3, TRAJ20)
CAVRDTPRYKLSF

SEQ ID NO: 561428 - protein, 14 aa, Homo sapiens
  CDR3 for beta chain variable domain of TCR clone 280714 (TRBV20-1, TRBJ2-5)
CSAHRQGLWETQYF

SEQ ID NO: 561429 - protein, 12 aa, Homo sapiens
  CDR3 for alpha chain variable domain of TCR clone 280715 (TRAV1-1, TRAJ39)
CAVPVVGNMLTF

SEQ ID NO: 561430 - protein, 15 aa, Homo sapiens
  CDR3 for beta chain variable domain of TCR clone 280715 (TRBV7-9, TRBJ1-2)
CASSLDREPNYGYTF

SEQ ID NO: 561431 - protein, 14 aa, Homo sapiens
  CDR3 for alpha chain variable domain of TCR clone 280716 (TRAV12-2, TRAJ17)
CAVNIKAAGNKLTF

SEQ ID NO: 561432 - protein, 16 aa, Homo sapiens
  CDR3 for beta chain variable domain of TCR clone 280716 (TRBV10-3, TRBJ2-1)
CAVSGVGDGGGGEQFF

SEQ ID NO: 561433 - protein, 11 aa, Homo sapiens
  CDR3 for alpha chain variable domain of TCR clone 280717 (TRAV3, TRAJ21)
CAFGNFNKFYF

SEQ ID NO: 561434 - protein, 16 aa, Homo sapiens
  CDR3 for beta chain variable domain of TCR clone 280717 (TRBV19, TRBJ2-1)
CASSKAGPSSYNEQFF

SEQ ID NO: 561435 - protein, 11 aa, Homo sapiens
  CDR3 for alpha chain variable domain of TCR clone 280718 (TRAV17, TRAJ31)
CATSNNARLMF

SEQ ID NO: 561436 - protein, 14 aa, Homo sapiens
  CDR3 for beta chain variable domain of TCR clone 280718 (TRBV7-8, TRBJ1-2)
CASSPDSLSYGYTF

SEQ ID NO: 561437 - protein, 12 aa, Homo sapiens
  CDR3 for alpha chain variable domain of TCR clone 280719 (TRAV4, TRAJ26)
CLVGDYGQNFVF

SEQ ID NO: 561438 - protein, 16 aa, Homo sapiens
  CDR3 for beta chain variable domain of TCR clone 280719 (TRBV7-2, TRBJ1-2)
CASISNQDRRGDGYTF

SEQ ID NO: 561439 - protein, 16 aa, Homo sapiens
  CDR3 for alpha chain variable domain of TCR clone 280720 (TRAV4, TRAJ18)
CCVLLIGGSTLGRLYF

SEQ ID NO: 561440 - protein, 13 aa, Homo sapiens
  CDR3 for beta chain variable domain of TCR clone 280720 (TRBV7-9, TRBJ1-2)
CASSLKQNYRYTF

SEQ ID NO: 561441 - protein, 13 aa, Homo sapiens
  CDR3 for alpha chain variable domain of TCR clone 280721 (TRAV13-1, TRAJ21)
CAASIYNFNKFYF

SEQ ID NO: 561442 - protein, 16 aa, Homo sapiens
  CDR3 for beta chain variable domain of TCR clone 280721 (TRBV4-2, TRBJ1-1)
CASSQAGFGMNTEAFF

SEQ ID NO: 561443 - protein, 15 aa, Homo sapiens
  CDR3 for alpha chain variable domain of TCR clone 280722 (TRAV4, TRAJ4)
CLVGPLSGVYNKLIF

SEQ ID NO: 561444 - protein, 16 aa, Homo sapiens
  CDR3 for beta chain variable domain of TCR clone 280722 (TRBV7-8, TRBJ1-4)
CASSLGVGTSNEKLFF

SEQ ID NO: 561445 - protein, 15 aa, Homo sapiens
  CDR3 for alpha chain variable domain of TCR clone 280723 (TRAV8-3, TRAJ27)
CSVGPYKTNAGKSTF

SEQ ID NO: 561446 - protein, 15 aa, Homo sapiens
  CDR3 for beta chain variable domain of TCR clone 280723 (TRBV7-2, TRBJ2-1)
CASSSGLAGGNEQFF

SEQ ID NO: 561447 - protein, 12 aa, Homo sapiens
  CDR3 for alpha chain variable domain of TCR clone 280724 (TRAV21, TRAJ23)
CAVGPQGGKLIF

SEQ ID NO: 561448 - protein, 20 aa, Homo sapiens
  CDR3 for beta chain variable domain of TCR clone 280724 (TRBV7-8, TRBJ2-2)
CASSHLFPGPTIHITGELFF

SEQ ID NO: 561449 - protein, 17 aa, Homo sapiens
  CDR3 for alpha chain variable domain of TCR clone 280725 (TRAV2, TRAJ22)
ILQVREADAAGQRQLTF

SEQ ID NO: 561450 - protein, 16 aa, Homo sapiens
  CDR3 for beta chain variable domain of TCR clone 280725 (TRBV2, TRBJ2-5)
CASSETQGVGEETQYF

SEQ ID NO: 561451 - protein, 14 aa, Homo sapiens
  CDR3 for alpha chain variable domain of TCR clone 280726 (TRAV1-2, TRAJ8)
CAVREDTGFQKLVF

SEQ ID NO: 561452 - protein, 15 aa, Homo sapiens
  CDR3 for beta chain variable domain of TCR clone 280726 (TRBV7-9, TRBJ1-5)
CASSPGHQPNQPQHF

SEQ ID NO: 561453 - protein, 15 aa, Homo sapiens
  CDR3 for alpha chain variable domain of TCR clone 280727 (TRAV10, TRAJ34)
CVVSGKHRQAHLLDW

SEQ ID NO: 561454 - protein, 14 aa, Homo sapiens
  CDR3 for beta chain variable domain of TCR clone 280727 (TRBV19, TRBJ2-1)
CASPTFVLSGEQFF

SEQ ID NO: 561455 - protein, 15 aa, Homo sapiens
  CDR3 for alpha chain variable domain of TCR clone 280728 (TRAV2, TRAJ40)
CAVVPQEPTNTSLEQ

SEQ ID NO: 561456 - protein, 14 aa, Homo sapiens
  CDR3 for beta chain variable domain of TCR clone 280728 (TRBV11-3, TRBJ2-3)
CSLKDGREGDTQYF

SEQ ID NO: 561457 - protein, 13 aa, Homo sapiens
  CDR3 for alpha chain variable domain of TCR clone 280729 (TRAV1-1, TRAJ31)
CASYLNNNARLMF

SEQ ID NO: 561458 - protein, 13 aa, Homo sapiens
  CDR3 for beta chain variable domain of TCR clone 280729 (TRBV15, TRBJ1-6)
CATSGGLNSPLHC

SEQ ID NO: 561459 - protein, 14 aa, Homo sapiens
  CDR3 for alpha chain variable domain of TCR clone 280730 (TRAV12-2, TRAJ45)
CAVNKGGGADGLTF

SEQ ID NO: 561460 - protein, 15 aa, Homo sapiens
  CDR3 for beta chain variable domain of TCR clone 280730 (TRBV9, TRBJ1-6)
CASSVAGTGDTPLHF

SEQ ID NO: 561461 - protein, 23 aa, Homo sapiens
  CDR3 for alpha chain variable domain of TCR clone 280731 (TRAV1-1, TRAJ29)
LLQELQMKDSASYFLGVNTPLVF

SEQ ID NO: 561462 - protein, 13 aa, Homo sapiens
  CDR3 for beta chain variable domain of TCR clone 280731 (TRBV25-1, TRBJ2-7)
CASSEDGDYEQYF

SEQ ID NO: 561463 - protein, 14 aa, Homo sapiens
  CDR3 for alpha chain variable domain of TCR clone 280732 (TRAV26-1, TRAJ44)
CMARTTGTASKLTF

SEQ ID NO: 561464 - protein, 14 aa, Homo sapiens
  CDR3 for beta chain variable domain of TCR clone 280732 (TRBV19, TRBJ2-7)
CASSIEASSYEQYF

SEQ ID NO: 561465 - protein, 13 aa, Homo sapiens
  CDR3 for alpha chain variable domain of TCR clone 280733 (TRAV27, TRAJ54)
CAGAGKGAQKLVF

SEQ ID NO: 561466 - protein, 15 aa, Homo sapiens
  CDR3 for beta chain variable domain of TCR clone 280733 (TRBV18, TRBJ2-6)
CASSPSYAGANVLTF

SEQ ID NO: 561467 - protein, 14 aa, Homo sapiens
  CDR3 for alpha chain variable domain of TCR clone 280734 (TRAV17, TRAJ54)
CATDANKGAQKLVF

SEQ ID NO: 561468 - protein, 14 aa, Homo sapiens
  CDR3 for beta chain variable domain of TCR clone 280734 (TRBV25-1, TRBJ1-1)
CASTHLGGNTEAFF

SEQ ID NO: 561469 - protein, 11 aa, Homo sapiens
  CDR3 for alpha chain variable domain of TCR clone 280735 (TRAV29/DV5, TRAJ31)
CAAMNNASLMF

SEQ ID NO: 561470 - protein, 15 aa, Homo sapiens
  CDR3 for beta chain variable domain of TCR clone 280735 (TRBV20-1, TRBJ2-7)
CSARGPLAGGREQYF

SEQ ID NO: 561471 - protein, 13 aa, Homo sapiens
  CDR3 for alpha chain variable domain of TCR clone 280736 (TRAV8-3, TRAJ4)
WVFYSGCYNKLIF

SEQ ID NO: 561472 - protein, 14 aa, Homo sapiens
  CDR3 for beta chain variable domain of TCR clone 280736 (TRBV7-9, TRBJ2-3)
CASSLEDGTDTQYF

SEQ ID NO: 561473 - protein, 14 aa, Homo sapiens
  CDR3 for alpha chain variable domain of TCR clone 280737 (TRAV14/DV4, TRAJ54)
CAMREAQGAQKLVF

SEQ ID NO: 561474 - protein, 15 aa, Homo sapiens
  CDR3 for beta chain variable domain of TCR clone 280737 (TRBV5-1, TRBJ2-7)
CASSLNGGPAREQYF

SEQ ID NO: 561475 - protein, 12 aa, Homo sapiens
  CDR3 for alpha chain variable domain of TCR clone 280738 (TRAV26-1, TRAJ43)
CIVRPRGDDMRF

SEQ ID NO: 561476 - protein, 16 aa, Homo sapiens
  CDR3 for beta chain variable domain of TCR clone 280738 (TRBV3-1, TRBJ2-1)
CASSHGGRRSFDEQFF

SEQ ID NO: 561477 - protein, 11 aa, Homo sapiens
  CDR3 for alpha chain variable domain of TCR clone 280739 (TRAV13-1, TRAJ50)
CAYLLLRQGDI

SEQ ID NO: 561478 - protein, 15 aa, Homo sapiens
  CDR3 for beta chain variable domain of TCR clone 280739 (TRBV6-5, TRBJ1-2)
CASSYSQAFNYGYTF

SEQ ID NO: 561479 - protein, 14 aa, Homo sapiens
  CDR3 for alpha chain variable domain of TCR clone 280740 (TRAV17, TRAJ57)
CATDPQGGSEKLVF

SEQ ID NO: 561480 - protein, 15 aa, Homo sapiens
  CDR3 for beta chain variable domain of TCR clone 280740 (TRBV7-9, TRBJ1-5)
CASSIHGPGDQPQHF

SEQ ID NO: 561481 - protein, 12 aa, Homo sapiens
  CDR3 for alpha chain variable domain of TCR clone 280741 (TRAV23/DV6, TRAJ31)
CAARRSGARLMF

SEQ ID NO: 561482 - protein, 13 aa, Homo sapiens
  CDR3 for beta chain variable domain of TCR clone 280741 (TRBV28, TRBJ2-7)
CASKAGGVYEQYF

SEQ ID NO: 561483 - protein, 12 aa, Homo sapiens
  CDR3 for alpha chain variable domain of TCR clone 280742 (TRAV29/DV5, TRAJ49)
CAALSTGNQFYF

SEQ ID NO: 561484 - protein, 17 aa, Homo sapiens
  CDR3 for beta chain variable domain of TCR clone 280742 (TRBV7-8, TRBJ2-6)
CASSAGTGGAGANVLTF

SEQ ID NO: 561485 - protein, 16 aa, Homo sapiens
  CDR3 for alpha chain variable domain of TCR clone 280743 (TRAV17, TRAJ35)
CATAEGGIGFGNVLHC

SEQ ID NO: 561486 - protein, 15 aa, Homo sapiens
  CDR3 for beta chain variable domain of TCR clone 280743 (TRBV20-1, TRBJ2-7)
CSARDRVSGMDEQYF

SEQ ID NO: 561487 - protein, 10 aa, Homo sapiens
  CDR3 for alpha chain variable domain of TCR clone 280744 (TRAV12-3, TRAJ49)
CAMNDDQFYF

SEQ ID NO: 561488 - protein, 13 aa, Homo sapiens
  CDR3 for beta chain variable domain of TCR clone 280744 (TRBV20-1, TRBJ2-5)
CSAREAFQETQYF

SEQ ID NO: 561489 - protein, 16 aa, Homo sapiens
  CDR3 for alpha chain variable domain of TCR clone 280745 (TRAV3, TRAJ37)
CAVRPHGPGNTGKLIF

SEQ ID NO: 561490 - protein, 15 aa, Homo sapiens
  CDR3 for beta chain variable domain of TCR clone 280745 (TRBV10-3, TRBJ2-3)
CAISLTSGGTDTQYF

SEQ ID NO: 561491 - protein, 16 aa, Homo sapiens
  CDR3 for alpha chain variable domain of TCR clone 280746 (TRAV3, TRAJ42)
CAVRDIEGGSQVNLIF

SEQ ID NO: 561492 - protein, 14 aa, Homo sapiens
  CDR3 for beta chain variable domain of TCR clone 280746 (TRBV18, TRBJ1-1)
CASSPPTGRTEAFF

SEQ ID NO: 561493 - protein, 11 aa, Homo sapiens
  CDR3 for alpha chain variable domain of TCR clone 280747 (TRAV3, TRAJ21)
CAVGNFNNFYL

SEQ ID NO: 561494 - protein, 16 aa, Homo sapiens
  CDR3 for beta chain variable domain of TCR clone 280747 (TRBV19, TRBJ2-1)
CARSKAGPSSYNEQFF

SEQ ID NO: 561495 - protein, 11 aa, Homo sapiens
  CDR3 for alpha chain variable domain of TCR clone 280748 (TRAV12-1, TRAJ34)
RVVNKGRELIF

SEQ ID NO: 561496 - protein, 18 aa, Homo sapiens
  CDR3 for beta chain variable domain of TCR clone 280748 (TRBV4-1, TRBJ1-4)
CASSPRTGGAWTNEKLFF

SEQ ID NO: 561497 - protein, 13 aa, Homo sapiens
  CDR3 for alpha chain variable domain of TCR clone 280749 (TRAV13-1, TRAJ39)
CAASIVMQATWSP

SEQ ID NO: 561498 - protein, 16 aa, Homo sapiens
  CDR3 for beta chain variable domain of TCR clone 280749 (TRBV20-1, TRBJ1-4)
CSAPGQGLLTNEKLFF

SEQ ID NO: 561499 - protein, 22 aa, Homo sapiens
  CDR3 for alpha chain variable domain of TCR clone 280750 (TRAV8-3, TRAJ32)
CAVEVVLQTSSSLELALCLLSS

SEQ ID NO: 561500 - protein, 15 aa, Homo sapiens
  CDR3 for beta chain variable domain of TCR clone 280750 (TRBV7-2, TRBJ2-1)
CASSSRTSREDDQFF

SEQ ID NO: 561501 - protein, 11 aa, Homo sapiens
  CDR3 for alpha chain variable domain of TCR clone 280751 (TRAV2, TRAJ13)
CASGGYQKVTF

SEQ ID NO: 561502 - protein, 12 aa, Homo sapiens
  CDR3 for beta chain variable domain of TCR clone 280751 (TRBV7-9, TRBJ1-5)
CASSPQGQPQHF

SEQ ID NO: 561503 - protein, 14 aa, Homo sapiens
  CDR3 for alpha chain variable domain of TCR clone 280752 (TRAV3, TRAJ6)
CAVRRTGGSYIPTF

SEQ ID NO: 561504 - protein, 16 aa, Homo sapiens
  CDR3 for beta chain variable domain of TCR clone 280752 (TRBV7-3, TRBJ2-1)
CASSKPLAGGYNEQFF

SEQ ID NO: 561505 - protein, 11 aa, Homo sapiens
  CDR3 for alpha chain variable domain of TCR clone 280753 (TRAV3, TRAJ21)
CAVGNFNKFYF

SEQ ID NO: 561506 - protein, 16 aa, Homo sapiens
  CDR3 for beta chain variable domain of TCR clone 280753 (TRBV12-5, TRBJ2-5)
CASGPRTSGKQETQYF

SEQ ID NO: 561507 - protein, 15 aa, Homo sapiens
  CDR3 for alpha chain variable domain of TCR clone 280754 (TRAV21, TRAJ53)
CATLNSGGSNYKLTF

SEQ ID NO: 561508 - protein, 15 aa, Homo sapiens
  CDR3 for beta chain variable domain of TCR clone 280754 (TRBV7-3, TRBJ2-7)
CASSPSTGPNYEQYF

SEQ ID NO: 561509 - protein, 13 aa, Homo sapiens
  CDR3 for alpha chain variable domain of TCR clone 280755 (TRAV12-1, TRAJ16)
CVVNGPDGQKLLF

SEQ ID NO: 561510 - protein, 13 aa, Homo sapiens
  CDR3 for beta chain variable domain of TCR clone 280755 (TRBV11-3, TRBJ1-1)
CATEEGLNTEAFF

SEQ ID NO: 561511 - protein, 14 aa, Homo sapiens
  CDR3 for alpha chain variable domain of TCR clone 280756 (TRAV26-1, TRAJ21)
CIVRPPYNFNKFYF

SEQ ID NO: 561512 - protein, 14 aa, Homo sapiens
  CDR3 for beta chain variable domain of TCR clone 280756 (TRBV19, TRBJ2-1)
CASPTFVLSGQQFF

SEQ ID NO: 561513 - protein, 12 aa, Homo sapiens
  CDR3 for alpha chain variable domain of TCR clone 280757 (TRAV25, TRAJ5)
CAGGGAGEHLLL

SEQ ID NO: 561514 - protein, 15 aa, Homo sapiens
  CDR3 for beta chain variable domain of TCR clone 280757 (TRBV19, TRBJ2-4)
CASRGPRRGGNIQYF

SEQ ID NO: 561515 - protein, 13 aa, Homo sapiens
  CDR3 for alpha chain variable domain of TCR clone 280758 (TRAV13-1, TRAJ5)
CAARVTGRRALTS

SEQ ID NO: 561516 - protein, 15 aa, Homo sapiens
  CDR3 for beta chain variable domain of TCR clone 280758 (TRBV7-9, TRBJ2-7)
CASSPGGGLTYEQYV

SEQ ID NO: 561517 - protein, 14 aa, Homo sapiens
  CDR3 for alpha chain variable domain of TCR clone 280759 (TRAV26-1, TRAJ21)
CIVRVVYNFNKFYF

SEQ ID NO: 561518 - protein, 13 aa, Homo sapiens
  CDR3 for beta chain variable domain of TCR clone 280759 (TRBV11-2, TRBJ2-7)
CASSPLGSYEQYF

SEQ ID NO: 561519 - protein, 16 aa, Homo sapiens
  CDR3 for alpha chain variable domain of TCR clone 280760 (TRAV26-2, TRAJ52)
CIRGPAGGTSYGKLTF

SEQ ID NO: 561520 - protein, 15 aa, Homo sapiens
  CDR3 for beta chain variable domain of TCR clone 280760 (TRBV20-1, TRBJ1-1)
CSASRGVTGNTEAFC

SEQ ID NO: 561521 - protein, 17 aa, Homo sapiens
  CDR3 for alpha chain variable domain of TCR clone 280761 (TRAV3, TRAJ42)
CAVRDRDYGGSQGNLIL

SEQ ID NO: 561522 - protein, 15 aa, Homo sapiens
  CDR3 for beta chain variable domain of TCR clone 280761 (TRBV3-1, TRBJ2-1)
CASSQVVDDGEEQFF

SEQ ID NO: 561523 - protein, 15 aa, Homo sapiens
  CDR3 for alpha chain variable domain of TCR clone 280762 (TRAV27, TRAJ38)
CAARRNAGNNRKLIG

SEQ ID NO: 561524 - protein, 15 aa, Homo sapiens
  CDR3 for beta chain variable domain of TCR clone 280762 (TRBV19, TRBJ1-5)
CASSIVWADKQPQHF

SEQ ID NO: 561525 - protein, 13 aa, Homo sapiens
  CDR3 for alpha chain variable domain of TCR clone 280763 (TRAV13-1, TRAJ6)
CARGSGGSYIPTF

SEQ ID NO: 561526 - protein, 13 aa, Homo sapiens
  CDR3 for beta chain variable domain of TCR clone 280763 (TRBV7-3, TRBJ1-1)
CASSQDWGAEAFF

SEQ ID NO: 561527 - protein, 13 aa, Homo sapiens
  CDR3 for alpha chain variable domain of TCR clone 280764 (TRAV13-1, TRAJ9)
CAARGTGGFKTIF

SEQ ID NO: 561528 - protein, 12 aa, Homo sapiens
  CDR3 for beta chain variable domain of TCR clone 280764 (TRBV2, TRBJ2-1)
WAYGPPGNEQFF

SEQ ID NO: 561529 - protein, 14 aa, Homo sapiens
  CDR3 for alpha chain variable domain of TCR clone 280765 (TRAV12-3, TRAJ10)
SHLPLTGGGNKLIF

SEQ ID NO: 561530 - protein, 15 aa, Homo sapiens
  CDR3 for beta chain variable domain of TCR clone 280765 (TRBV7-9, TRBJ1-4)
CASSRTGGFNEKLFF

SEQ ID NO: 561531 - protein, 10 aa, Homo sapiens
  CDR3 for alpha chain variable domain of TCR clone 280766 (TRAV36/DV7, TRAJ48)
CAVGNEKLTF

SEQ ID NO: 561532 - protein, 11 aa, Homo sapiens
  CDR3 for beta chain variable domain of TCR clone 280766 (TRBV20-1, TRBJ2-5)
QCRGAGETQYF

SEQ ID NO: 561533 - protein, 14 aa, Homo sapiens
  CDR3 for alpha chain variable domain of TCR clone 280767 (TRAV1-2, TRAJ16)
CAVNRFSDGQKLLF

SEQ ID NO: 561534 - protein, 12 aa, Homo sapiens
  CDR3 for beta chain variable domain of TCR clone 280767 (TRBV7-2, TRBJ1-6)
CASRLSSSLLHF

SEQ ID NO: 561535 - protein, 15 aa, Homo sapiens
  CDR3 for alpha chain variable domain of TCR clone 280768 (TRAV13-1, TRAJ3)
CAASKLASSASQIIF

SEQ ID NO: 561536 - protein, 16 aa, Homo sapiens
  CDR3 for beta chain variable domain of TCR clone 280768 (TRBV25-1, TRBJ1-5)
CASGAPTVNSNQPQHF

SEQ ID NO: 561537 - protein, 12 aa, Homo sapiens
  CDR3 for alpha chain variable domain of TCR clone 280769 (TRAV13-1, TRAJ21)
CAAKEGFNKFYF

SEQ ID NO: 561538 - protein, 16 aa, Homo sapiens
  CDR3 for beta chain variable domain of TCR clone 280769 (TRBV5-1, TRBJ2-2)
CASSSRTGGRTGELFF

SEQ ID NO: 561539 - protein, 14 aa, Homo sapiens
  CDR3 for alpha chain variable domain of TCR clone 280770 (TRAV8-1, TRAJ13)
CAVKRSGGYQKVTF

SEQ ID NO: 561540 - protein, 18 aa, Homo sapiens
  CDR3 for beta chain variable domain of TCR clone 280770 (TRBV7-6, TRBJ2-1)
CASSPRTSGMSSYNEQFF

SEQ ID NO: 561541 - protein, 12 aa, Homo sapiens
  CDR3 for alpha chain variable domain of TCR clone 280771 (TRAV3, TRAJ20)
CAVRDGDYKLSF

SEQ ID NO: 561542 - protein, 13 aa, Homo sapiens
  CDR3 for beta chain variable domain of TCR clone 280771 (TRBV20-1, TRBJ2-2)
CSALSGGAGELFF

SEQ ID NO: 561543 - protein, 18 aa, Homo sapiens
  CDR3 for alpha chain variable domain of TCR clone 280772 (TRAV29/DV5, TRAJ53)
CSVLLCSKRGGTNYKLTF

SEQ ID NO: 561544 - protein, 17 aa, Homo sapiens
  CDR3 for beta chain variable domain of TCR clone 280772 (TRBV7-8, TRBJ2-6)
CASSAGTGGAGANVLTF

SEQ ID NO: 561545 - protein, 15 aa, Homo sapiens
  CDR3 for alpha chain variable domain of TCR clone 280773 (TRAV25, TRAJ53)
CPTSTSGGSNYKPTF

SEQ ID NO: 561546 - protein, 14 aa, Homo sapiens
  CDR3 for beta chain variable domain of TCR clone 280773 (TRBV11-2, TRBJ2-3)
CASSRLARTDTQYF

SEQ ID NO: 561547 - protein, 10 aa, Homo sapiens
  CDR3 for alpha chain variable domain of TCR clone 280774 (TRAV8-4, TRAJ43)
CTVSADDMRF

SEQ ID NO: 561548 - protein, 15 aa, Homo sapiens
  CDR3 for beta chain variable domain of TCR clone 280774 (TRBV5-1, TRBJ2-3)
CASSVTSGSTDTQYF

SEQ ID NO: 561549 - protein, 16 aa, Homo sapiens
  CDR3 for alpha chain variable domain of TCR clone 280775 (TRAV21, TRAJ37)
CAVRTAGSSNTGKLIF

SEQ ID NO: 561550 - protein, 15 aa, Homo sapiens
  CDR3 for beta chain variable domain of TCR clone 280775 (TRBV20-1, TRBJ1-1)
CSASRGVTGNTEAFF

SEQ ID NO: 561551 - protein, 10 aa, Homo sapiens
  CDR3 for alpha chain variable domain of TCR clone 280776 (TRAV8-4, TRAJ43)
CGVSADDMRF

SEQ ID NO: 561552 - protein, 15 aa, Homo sapiens
  CDR3 for beta chain variable domain of TCR clone 280776 (TRBV28, TRBJ2-7)
CASSQLGAGGHEQYF

SEQ ID NO: 561553 - protein, 15 aa, Homo sapiens
  CDR3 for alpha chain variable domain of TCR clone 280777 (TRAV13-1, TRAJ28)
CAASYSGAGSYQLTF

SEQ ID NO: 561554 - protein, 16 aa, Homo sapiens
  CDR3 for beta chain variable domain of TCR clone 280777 (TRBV19, TRBJ2-1)
CASSKAGPSSYNEQFF

SEQ ID NO: 561555 - protein, 18 aa, Homo sapiens
  CDR3 for alpha chain variable domain of TCR clone 280778 (TRAV13-1, TRAJ52)
CAASKRSAGGTSYGKLTF

SEQ ID NO: 561556 - protein, 16 aa, Homo sapiens
  CDR3 for beta chain variable domain of TCR clone 280778 (TRBV4-1, TRBJ2-3)
CASSQSTSGAEDTQYF

SEQ ID NO: 561557 - protein, 18 aa, Homo sapiens
  CDR3 for alpha chain variable domain of TCR clone 280779 (TRAV21, TRAJ8)
CAVNTGFQTCIWNWHPTS

SEQ ID NO: 561558 - protein, 13 aa, Homo sapiens
  CDR3 for beta chain variable domain of TCR clone 280779 (TRBV6-3, TRBJ2-1)
CASSYDNYNEQFF

SEQ ID NO: 561559 - protein, 14 aa, Homo sapiens
  CDR3 for alpha chain variable domain of TCR clone 280780 (TRAV13-2, TRAJ17)
CAETSKAAGNKLTF

SEQ ID NO: 561560 - protein, 11 aa, Homo sapiens
  CDR3 for beta chain variable domain of TCR clone 280780 (TRBV6-3, TRBJ2-3)
CATGQADTQYF

SEQ ID NO: 561561 - protein, 11 aa, Homo sapiens
  CDR3 for alpha chain variable domain of TCR clone 280781 (TRAV29/DV5, TRAJ30)
CAVREVDKIIL

SEQ ID NO: 561562 - protein, 16 aa, Homo sapiens
  CDR3 for beta chain variable domain of TCR clone 280781 (TRBV27, TRBJ1-5)
CASSLSGGASNQPQHF

SEQ ID NO: 561563 - protein, 14 aa, Homo sapiens
  CDR3 for alpha chain variable domain of TCR clone 280782 (TRAV8-4, TRAJ3)
CAVIEYSSVSKIIF

SEQ ID NO: 561564 - protein, 12 aa, Homo sapiens
  CDR3 for beta chain variable domain of TCR clone 280782 (TRBV27, TRBJ2-5)
CASSFMEETQYF

SEQ ID NO: 561565 - protein, 16 aa, Homo sapiens
  CDR3 for alpha chain variable domain of TCR clone 280783 (TRAV30, TRAJ24)
CGTEIVDADSWGKFQF

SEQ ID NO: 561566 - protein, 13 aa, Homo sapiens
  CDR3 for beta chain variable domain of TCR clone 280783 (TRBV20-1, TRBJ1-1)
CSAPTGGHTEAFF

SEQ ID NO: 561567 - protein, 15 aa, Homo sapiens
  CDR3 for alpha chain variable domain of TCR clone 280784 (TRAV26-1, TRAJ29)
RIVRVEGSGNTPLVF

SEQ ID NO: 561568 - protein, 14 aa, Homo sapiens
  CDR3 for beta chain variable domain of TCR clone 280784 (TRBV18, TRBJ2-5)
CASSPGVSQETQYV

SEQ ID NO: 561569 - protein, 13 aa, Homo sapiens
  CDR3 for alpha chain variable domain of TCR clone 280785 (TRAV13-1, TRAJ5)
CAASDTGRRALTF

SEQ ID NO: 561570 - protein, 13 aa, Homo sapiens
  CDR3 for beta chain variable domain of TCR clone 280785 (TRBV12-4, TRBJ1-1)
CASSPGTGFEAFF

SEQ ID NO: 561571 - protein, 15 aa, Homo sapiens
  CDR3 for alpha chain variable domain of TCR clone 280786 (TRAV12-2, TRAJ43)
CAFDMRFGAGTRLTV

SEQ ID NO: 561572 - protein, 12 aa, Homo sapiens
  CDR3 for beta chain variable domain of TCR clone 280786 (TRBV24-1, TRBJ2-3)
CATSDSTDTQYF

SEQ ID NO: 561573 - protein, 16 aa, Homo sapiens
  CDR3 for alpha chain variable domain of TCR clone 280787 (TRAV27, TRAJ13)
CAGAKSDSGGYQKVTF

SEQ ID NO: 561574 - protein, 13 aa, Homo sapiens
  CDR3 for beta chain variable domain of TCR clone 280787 (TRBV4-2, TRBJ1-1)
CASSQAGNTEAFF

SEQ ID NO: 561575 - protein, 14 aa, Homo sapiens
  CDR3 for alpha chain variable domain of TCR clone 280788 (TRAV3, TRAJ9)
CAVRLNTGGFIYIF

SEQ ID NO: 561576 - protein, 15 aa, Homo sapiens
  CDR3 for beta chain variable domain of TCR clone 280788 (TRBV7-2, TRBJ2-1)
CASSLASGRVNEQFF

SEQ ID NO: 561577 - protein, 14 aa, Homo sapiens
  CDR3 for alpha chain variable domain of TCR clone 280789 (TRAV5, TRAJ4)
CAASFSGGYNKLIF

SEQ ID NO: 561578 - protein, 19 aa, Homo sapiens
  CDR3 for beta chain variable domain of TCR clone 280789 (TRBV2, TRBJ2-7)
CASSDDETGGRANDYEQYF

SEQ ID NO: 561579 - protein, 16 aa, Homo sapiens
  CDR3 for alpha chain variable domain of TCR clone 280790 (TRAV36/DV7, TRAJ30)
CAVETYGLDRDDKIIF

SEQ ID NO: 561580 - protein, 16 aa, Homo sapiens
  CDR3 for beta chain variable domain of TCR clone 280790 (TRBV13, TRBJ2-2)
CASSPRTGEHTGELFF

SEQ ID NO: 561581 - protein, 12 aa, Homo sapiens
  CDR3 for alpha chain variable domain of TCR clone 280791 (TRAV1-2, TRAJ17)
CAVRAAGNKLTF

SEQ ID NO: 561582 - protein, 14 aa, Homo sapiens
  CDR3 for beta chain variable domain of TCR clone 280791 (TRBV25-1, TRBJ1-1)
CASTHLGGNTEAFF

SEQ ID NO: 561583 - protein, 16 aa, Homo sapiens
  CDR3 for alpha chain variable domain of TCR clone 280792 (TRAV1-2, TRAJ10)
CSVRGVLTGGGNKLTF

SEQ ID NO: 561584 - protein, 16 aa, Homo sapiens
  CDR3 for beta chain variable domain of TCR clone 280792 (TRBV12-5, TRBJ2-5)
CASGPRTSGNQETQYF

SEQ ID NO: 561585 - protein, 14 aa, Homo sapiens
  CDR3 for alpha chain variable domain of TCR clone 280793 (TRAV12-1, TRAJ24)
CVVRSTDSWGKFQF

SEQ ID NO: 561586 - protein, 16 aa, Homo sapiens
  CDR3 for beta chain variable domain of TCR clone 280793 (TRBV5-1, TRBJ2-5)
CASSLSLAGAQETQYF

SEQ ID NO: 561587 - protein, 10 aa, Homo sapiens
  CDR3 for alpha chain variable domain of TCR clone 280794 (TRAV1-2, TRAJ23)
CAGQGGKLIF

SEQ ID NO: 561588 - protein, 15 aa, Homo sapiens
  CDR3 for beta chain variable domain of TCR clone 280794 (TRBV7-2, TRBJ2-3)
CASSLEQGGTDTQYF

SEQ ID NO: 561589 - protein, 16 aa, Homo sapiens
  CDR3 for alpha chain variable domain of TCR clone 280795 (TRAV1-2, TRAJ10)
CAVRGVLTGGGNKLTF

SEQ ID NO: 561590 - protein, 12 aa, Homo sapiens
  CDR3 for beta chain variable domain of TCR clone 280795 (TRBV7-3, TRBJ2-1)
CASSLGFNEQFF

SEQ ID NO: 561591 - protein, 16 aa, Homo sapiens
  CDR3 for alpha chain variable domain of TCR clone 280796 (TRAV30, TRAJ24)
CGTETVDADSWGKFQF

SEQ ID NO: 561592 - protein, 14 aa, Homo sapiens
  CDR3 for beta chain variable domain of TCR clone 280796 (TRBV7-2, TRBJ1-1)
CASSFLTGTTEAFF

SEQ ID NO: 561593 - protein, 14 aa, Homo sapiens
  CDR3 for alpha chain variable domain of TCR clone 280797 (TRAV12-2, TRAJ13)
CAVKKTGGCQKVNF

SEQ ID NO: 561594 - protein, 16 aa, Homo sapiens
  CDR3 for beta chain variable domain of TCR clone 280797 (TRBV12-5, TRBJ2-5)
CASGPRTSGNQETQYF

SEQ ID NO: 561595 - protein, 14 aa, Homo sapiens
  CDR3 for alpha chain variable domain of TCR clone 280798 (TRAV12-2, TRAJ40)
CAVKIPSGTYKYIF

SEQ ID NO: 561596 - protein, 12 aa, Homo sapiens
  CDR3 for beta chain variable domain of TCR clone 280798 (TRBV2, TRBJ2-1)
CAYGPPGNEQFF

SEQ ID NO: 561597 - protein, 12 aa, Homo sapiens
  CDR3 for alpha chain variable domain of TCR clone 280799 (TRAV12-1, TRAJ40)
CVFYSGTYKSIF

SEQ ID NO: 561598 - protein, 12 aa, Homo sapiens
  CDR3 for beta chain variable domain of TCR clone 280799 (TRBV7-3, TRBJ2-1)
CASSFINNEQFF

SEQ ID NO: 561599 - protein, 14 aa, Homo sapiens
  CDR3 for alpha chain variable domain of TCR clone 280800 (TRAV26-1, TRAJ38)
CIADNAGNNRKLMW

SEQ ID NO: 561600 - protein, 14 aa, Homo sapiens
  CDR3 for beta chain variable domain of TCR clone 280800 (TRBV20-1, TRBJ1-1)
CSAQTRIGGTEAFF

SEQ ID NO: 561601 - protein, 12 aa, Homo sapiens
  CDR3 for alpha chain variable domain of TCR clone 280801 (TRAV1-2, TRAJ17)
CAVGAEGNKLTF

SEQ ID NO: 561602 - protein, 16 aa, Homo sapiens
  CDR3 for beta chain variable domain of TCR clone 280801 (TRBV20-1, TRBJ2-1)
CSAPGLAGSYSDEQFF

SEQ ID NO: 561603 - protein, 15 aa, Homo sapiens
  CDR3 for alpha chain variable domain of TCR clone 280802 (TRAV8-3, TRAJ27)
CAVGPSKTNAGKSTF

SEQ ID NO: 561604 - protein, 13 aa, Homo sapiens
  CDR3 for beta chain variable domain of TCR clone 280802 (TRBV11-2, TRBJ2-7)
CASSLEGANEQYF

SEQ ID NO: 561605 - protein, 16 aa, Homo sapiens
  CDR3 for alpha chain variable domain of TCR clone 280803 (TRAV30, TRAJ24)
CGTEIVDADSWGKFQF

SEQ ID NO: 561606 - protein, 14 aa, Homo sapiens
  CDR3 for beta chain variable domain of TCR clone 280803 (TRBV7-9, TRBJ2-3)
CASSPSGRAGTQYF

SEQ ID NO: 561607 - protein, 15 aa, Homo sapiens
  CDR3 for alpha chain variable domain of TCR clone 280804 (TRAV4, TRAJ39)
CLMGPNNNAGNMLTF

SEQ ID NO: 561608 - protein, 14 aa, Homo sapiens
  CDR3 for beta chain variable domain of TCR clone 280804 (TRBV19, TRBJ2-7)
CASNFRDTFTGMYF

SEQ ID NO: 561609 - protein, 16 aa, Homo sapiens
  CDR3 for alpha chain variable domain of TCR clone 280805 (TRAV16, TRAJ4)
CALSRMFSGGYNKLMF

SEQ ID NO: 561610 - protein, 15 aa, Homo sapiens
  CDR3 for beta chain variable domain of TCR clone 280805 (TRBV7-9, TRBJ1-4)
CASSARTGGSEKLFF

SEQ ID NO: 561611 - protein, 14 aa, Homo sapiens
  CDR3 for alpha chain variable domain of TCR clone 280806 (TRAV2, TRAJ8)
CAGRGNTGFQKLVF

SEQ ID NO: 561612 - protein, 13 aa, Homo sapiens
  CDR3 for beta chain variable domain of TCR clone 280806 (TRBV20-1, TRBJ1-1)
QCTNTDWGTEAFF

SEQ ID NO: 561613 - protein, 16 aa, Homo sapiens
  CDR3 for alpha chain variable domain of TCR clone 280807 (TRAV12-3, TRAJ53)
CAMSPGSGGSKYKLTF

SEQ ID NO: 561614 - protein, 11 aa, Homo sapiens
  CDR3 for beta chain variable domain of TCR clone 280807 (TRBV29-1, TRBJ2-5)
CSEDRTETQYF

SEQ ID NO: 561615 - protein, 18 aa, Homo sapiens
  CDR3 for alpha chain variable domain of TCR clone 280808 (TRAV8-4, TRAJ52)
CAVTRANAGGTSYGKLTL

SEQ ID NO: 561616 - protein, 20 aa, Homo sapiens
  CDR3 for beta chain variable domain of TCR clone 280808 (TRBV19, TRBJ2-1)
CASSISRTVTSTRLNNEQLF

SEQ ID NO: 561617 - protein, 14 aa, Homo sapiens
  CDR3 for alpha chain variable domain of TCR clone 280809 (TRAV23/DV6, TRAJ37)
CAASTSTNTGKLIF

SEQ ID NO: 561618 - protein, 15 aa, Homo sapiens
  CDR3 for beta chain variable domain of TCR clone 280809 (TRBV7-9, TRBJ2-7)
CASSPGGGLTYEQYF

SEQ ID NO: 561619 - protein, 16 aa, Homo sapiens
  CDR3 for alpha chain variable domain of TCR clone 280810 (TRAV30, TRAJ24)
CGTEIVDADSWGKFQF

SEQ ID NO: 561620 - protein, 16 aa, Homo sapiens
  CDR3 for beta chain variable domain of TCR clone 280810 (TRBV3-1, TRBJ2-7)
CASSQGATGVAYEQYF

SEQ ID NO: 561621 - protein, 12 aa, Homo sapiens
  CDR3 for alpha chain variable domain of TCR clone 280811 (TRAV38-1, TRAJ32)
CAPLGATTKLIF

SEQ ID NO: 561622 - protein, 14 aa, Homo sapiens
  CDR3 for beta chain variable domain of TCR clone 280811 (TRBV29-1, TRBJ2-5)
CSVETSGSGGTQYF

SEQ ID NO: 561623 - protein, 14 aa, Homo sapiens
  CDR3 for alpha chain variable domain of TCR clone 280812 (TRAV12-1, TRAJ43)
CVVNGRSNNNDMRF

SEQ ID NO: 561624 - protein, 13 aa, Homo sapiens
  CDR3 for beta chain variable domain of TCR clone 280812 (TRBV2, TRBJ1-4)
CASSELGVDKLFF

SEQ ID NO: 561625 - protein, 15 aa, Homo sapiens
  CDR3 for alpha chain variable domain of TCR clone 280813 (TRAV12-1, TRAJ44)
CVADLPTGAASKLTF

SEQ ID NO: 561626 - protein, 17 aa, Homo sapiens
  CDR3 for beta chain variable domain of TCR clone 280813 (TRBV6-5, TRBJ2-5)
CDSSPREARPSTSGQAR

SEQ ID NO: 561627 - protein, 16 aa, Homo sapiens
  CDR3 for alpha chain variable domain of TCR clone 280814 (TRAV8-2, TRAJ7)
CVVSEGPYYGNNRLAF

SEQ ID NO: 561628 - protein, 12 aa, Homo sapiens
  CDR3 for beta chain variable domain of TCR clone 280814 (TRBV2, TRBJ1-5)
CASSGRDQPQHF

SEQ ID NO: 561629 - protein, 15 aa, Homo sapiens
  CDR3 for alpha chain variable domain of TCR clone 280815 (TRAV26-1, TRAJ29)
CIVRVEGSGNTPHVF

SEQ ID NO: 561630 - protein, 14 aa, Homo sapiens
  CDR3 for beta chain variable domain of TCR clone 280815 (TRBV25-1, TRBJ1-1)
CASTHLGGNTEAFF

SEQ ID NO: 561631 - protein, 14 aa, Homo sapiens
  CDR3 for alpha chain variable domain of TCR clone 280816 (TRAV29/DV5, TRAJ36)
CAARRKTGANNLFF

SEQ ID NO: 561632 - protein, 13 aa, Homo sapiens
  CDR3 for beta chain variable domain of TCR clone 280816 (TRBV4-1, TRBJ2-1)
CASSQAGGDEQFF

SEQ ID NO: 561633 - protein, 13 aa, Homo sapiens
  CDR3 for alpha chain variable domain of TCR clone 280817 (TRAV12-3, TRAJ46)
CAVKKSSGDKLTF

SEQ ID NO: 561634 - protein, 13 aa, Homo sapiens
  CDR3 for beta chain variable domain of TCR clone 280817 (TRBV6-1, TRBJ2-1)
CARSHDRNNEQFF

SEQ ID NO: 561635 - protein, 13 aa, Homo sapiens
  CDR3 for alpha chain variable domain of TCR clone 280818 (TRAV2, TRAJ15)
CAVASQAGTALIF

SEQ ID NO: 561636 - protein, 16 aa, Homo sapiens
  CDR3 for beta chain variable domain of TCR clone 280818 (TRBV18, TRBJ1-5)
CASSPDRVEGNQPQHF

SEQ ID NO: 561637 - protein, 16 aa, Homo sapiens
  CDR3 for alpha chain variable domain of TCR clone 280819 (TRAV3, TRAJ10)
CAVRDMRAGGGNKLTF

SEQ ID NO: 561638 - protein, 13 aa, Homo sapiens
  CDR3 for beta chain variable domain of TCR clone 280819 (TRBV11-3, TRBJ2-1)
CASSSRRVDEQFF

SEQ ID NO: 561639 - protein, 13 aa, Homo sapiens
  CDR3 for alpha chain variable domain of TCR clone 280820 (TRAV20, TRAJ37)
CAGCSSNTGKLIF

SEQ ID NO: 561640 - protein, 14 aa, Homo sapiens
  CDR3 for beta chain variable domain of TCR clone 280820 (TRBV20-1, TRBJ2-5)
CSARDGRSGETQYF

SEQ ID NO: 561641 - protein, 11 aa, Homo sapiens
  CDR3 for alpha chain variable domain of TCR clone 280821 (TRAV2, TRAJ13)
CASGGYQKVTF

SEQ ID NO: 561642 - protein, 16 aa, Homo sapiens
  CDR3 for beta chain variable domain of TCR clone 280821 (TRBV6-1, TRBJ2-5)
CASSEALDRGAENQYF

SEQ ID NO: 561643 - protein, 14 aa, Homo sapiens
  CDR3 for alpha chain variable domain of TCR clone 280822 (TRAV1-2, TRAJ16)
CAVNRFSDGQKMLF

SEQ ID NO: 561644 - protein, 14 aa, Homo sapiens
  CDR3 for beta chain variable domain of TCR clone 280822 (TRBV20-1, TRBJ1-5)
CSAPGTGVGQPQHF

SEQ ID NO: 561645 - protein, 15 aa, Homo sapiens
  CDR3 for alpha chain variable domain of TCR clone 280823 (TRAV13-1, TRAJ17)
CAASIERAAGNKLTF

SEQ ID NO: 561646 - protein, 13 aa, Homo sapiens
  CDR3 for beta chain variable domain of TCR clone 280823 (TRBV7-3, TRBJ2-5)
CASSIGFFETQYF

SEQ ID NO: 561647 - protein, 14 aa, Homo sapiens
  CDR3 for alpha chain variable domain of TCR clone 280824 (TRAV29/DV5, TRAJ36)
CAARRKTGANNLFF

SEQ ID NO: 561648 - protein, 16 aa, Homo sapiens
  CDR3 for beta chain variable domain of TCR clone 280824 (TRBV7-2, TRBJ2-5)
CASSLVLWTKQETQYF

SEQ ID NO: 561649 - protein, 15 aa, Homo sapiens
  CDR3 for alpha chain variable domain of TCR clone 280825 (TRAV17, TRAJ35)
CATAFVIGVGNVLHC

SEQ ID NO: 561650 - protein, 16 aa, Homo sapiens
  CDR3 for beta chain variable domain of TCR clone 280825 (TRBV11-2, TRBJ2-7)
CASSPLAGGPRYEQYF

SEQ ID NO: 561651 - protein, 10 aa, Homo sapiens
  CDR3 for alpha chain variable domain of TCR clone 280826 (TRAV12-3, TRAJ49)
CAMNDDQVYF

SEQ ID NO: 561652 - protein, 13 aa, Homo sapiens
  CDR3 for beta chain variable domain of TCR clone 280826 (TRBV12-4, TRBJ1-1)
CASSPGTGFEAVV

SEQ ID NO: 561653 - protein, 15 aa, Homo sapiens
  CDR3 for alpha chain variable domain of TCR clone 280827 (TRAV14/DV4, TRAJ10)
CAMRELTGGGNKLTF

SEQ ID NO: 561654 - protein, 11 aa, Homo sapiens
  CDR3 for beta chain variable domain of TCR clone 280827 (TRBV19, TRBJ1-2)
CASSISSGYTF

SEQ ID NO: 561655 - protein, 14 aa, Homo sapiens
  CDR3 for alpha chain variable domain of TCR clone 280828 (TRAV8-4, TRAJ43)
CAVSDPRNNNDMRF

SEQ ID NO: 561656 - protein, 13 aa, Homo sapiens
  CDR3 for beta chain variable domain of TCR clone 280828 (TRBV6-6, TRBJ2-7)
CASSPKHLAEQYF

SEQ ID NO: 561657 - protein, 13 aa, Homo sapiens
  CDR3 for alpha chain variable domain of TCR clone 280829 (TRAV13-2, TRAJ40)
CVEFTSGTYKYIF

SEQ ID NO: 561658 - protein, 14 aa, Homo sapiens
  CDR3 for beta chain variable domain of TCR clone 280829 (TRBV10-2, TRBJ1-5)
CASSSTGRNQPQHF

SEQ ID NO: 561659 - protein, 14 aa, Homo sapiens
  CDR3 for alpha chain variable domain of TCR clone 280830 (TRAV13-1, TRAJ40)
CAASMTSGTYTYIF

SEQ ID NO: 561660 - protein, 15 aa, Homo sapiens
  CDR3 for beta chain variable domain of TCR clone 280830 (TRBV7-3, TRBJ2-1)
CASSPTGGGEGEQFF

SEQ ID NO: 561661 - protein, 18 aa, Homo sapiens
  CDR3 for alpha chain variable domain of TCR clone 280831 (TRAV21, TRAJ52)
CAVRPSQAGGTSYGKLTF

SEQ ID NO: 561662 - protein, 13 aa, Homo sapiens
  CDR3 for beta chain variable domain of TCR clone 280831 (TRBV7-9, TRBJ1-2)
CASSLKQNYGYTF

SEQ ID NO: 561663 - protein, 16 aa, Homo sapiens
  CDR3 for alpha chain variable domain of TCR clone 280832 (TRAV8-2, TRAJ7)
CVVSEGPYYGNNRLAF

SEQ ID NO: 561664 - protein, 16 aa, Homo sapiens
  CDR3 for beta chain variable domain of TCR clone 280832 (TRBV3-1, TRBJ2-5)
CASSPGQFNGFGTQYF

SEQ ID NO: 561665 - protein, 15 aa, Homo sapiens
  CDR3 for alpha chain variable domain of TCR clone 280833 (TRAV35, TRAJ38)
CAGFSNSGNNRKLIW

SEQ ID NO: 561666 - protein, 18 aa, Homo sapiens
  CDR3 for beta chain variable domain of TCR clone 280833 (TRBV3-1, TRBJ1-2)
CASSQDVIGWNGDCGYTF

SEQ ID NO: 561667 - protein, 15 aa, Homo sapiens
  CDR3 for alpha chain variable domain of TCR clone 280834 (TRAV21, TRAJ56)
CAVTKYTGANSKLTF

SEQ ID NO: 561668 - protein, 15 aa, Homo sapiens
  CDR3 for beta chain variable domain of TCR clone 280834 (TRBV3-1, TRBJ2-2)
CASSQDWTRAGELFF

SEQ ID NO: 561669 - protein, 14 aa, Homo sapiens
  CDR3 for alpha chain variable domain of TCR clone 280835 (TRAV8-3, TRAJ30)
CAVGDMNRDDKIIV

SEQ ID NO: 561670 - protein, 17 aa, Homo sapiens
  CDR3 for beta chain variable domain of TCR clone 280835 (TRBV19, TRBJ2-2)
CASSRNPGGFGTGELFF

SEQ ID NO: 561671 - protein, 11 aa, Homo sapiens
  CDR3 for alpha chain variable domain of TCR clone 280836 (TRAV13-1, TRAJ20)
CAASNDYKLSF

SEQ ID NO: 561672 - protein, 16 aa, Homo sapiens
  CDR3 for beta chain variable domain of TCR clone 280836 (TRBV19, TRBJ2-2)
CASRSPGTGATGELFF

SEQ ID NO: 561673 - protein, 15 aa, Homo sapiens
  CDR3 for alpha chain variable domain of TCR clone 280837 (TRAV20, TRAJ58)
CAVQDLETSGSSLTF

SEQ ID NO: 561674 - protein, 12 aa, Homo sapiens
  CDR3 for beta chain variable domain of TCR clone 280837 (TRBV9, TRBJ2-2)
CASSARTGELFF

SEQ ID NO: 561675 - protein, 13 aa, Homo sapiens
  CDR3 for alpha chain variable domain of TCR clone 280838 (TRAV8-3, TRAJ43)
CAVGPDNNNDMRF

SEQ ID NO: 561676 - protein, 12 aa, Homo sapiens
  CDR3 for beta chain variable domain of TCR clone 280838 (TRBV7-9, TRBJ2-7)
CASSLEGYEQYF

SEQ ID NO: 561677 - protein, 15 aa, Homo sapiens
  CDR3 for alpha chain variable domain of TCR clone 280839 (TRAV27, TRAJ38)
CAARRNAGNNRKVIW

SEQ ID NO: 561678 - protein, 15 aa, Homo sapiens
  CDR3 for beta chain variable domain of TCR clone 280839 (TRBV5-1, TRBJ2-1)
CASSPPRAPYNEQFF

SEQ ID NO: 561679 - protein, 14 aa, Homo sapiens
  CDR3 for alpha chain variable domain of TCR clone 280840 (TRAV13-2, TRAJ17)
YAENSKAAGNKLTF

SEQ ID NO: 561680 - protein, 12 aa, Homo sapiens
  CDR3 for beta chain variable domain of TCR clone 280840 (TRBV14, TRBJ2-7)
CASSSLKGEQYF

SEQ ID NO: 561681 - protein, 11 aa, Homo sapiens
  CDR3 for alpha chain variable domain of TCR clone 280841 (TRAV2, TRAJ23)
CAVDTRGKLIF

SEQ ID NO: 561682 - protein, 14 aa, Homo sapiens
  CDR3 for beta chain variable domain of TCR clone 280841 (TRBV2, TRBJ2-3)
FASSEGQNTDTQYF

SEQ ID NO: 561683 - protein, 15 aa, Homo sapiens
  CDR3 for alpha chain variable domain of TCR clone 280842 (TRAV3, TRAJ32)
CAVSSYGGATNKLIF

SEQ ID NO: 561684 - protein, 15 aa, Homo sapiens
  CDR3 for beta chain variable domain of TCR clone 280842 (TRBV11-3, TRBJ2-3)
CASLKDGREGDTQYF

SEQ ID NO: 561685 - protein, 16 aa, Homo sapiens
  CDR3 for alpha chain variable domain of TCR clone 280843 (TRAV16, TRAJ4)
CALSRMFSGGYNKLIF

SEQ ID NO: 561686 - protein, 15 aa, Homo sapiens
  CDR3 for beta chain variable domain of TCR clone 280843 (TRBV20-1, TRBJ2-1)
CSASSAGSSYNEQFF

SEQ ID NO: 561687 - protein, 13 aa, Homo sapiens
  CDR3 for alpha chain variable domain of TCR clone 280844 (TRAV4, TRAJ33)
CLGGDMNNYQLIW

SEQ ID NO: 561688 - protein, 14 aa, Homo sapiens
  CDR3 for beta chain variable domain of TCR clone 280844 (TRBV7-9, TRBJ1-1)
CASSLGGANTEAFF

SEQ ID NO: 561689 - protein, 14 aa, Homo sapiens
  CDR3 for alpha chain variable domain of TCR clone 280845 (TRAV30, TRAJ33)
CGTERRFSNYQLIW

SEQ ID NO: 561690 - protein, 15 aa, Homo sapiens
  CDR3 for beta chain variable domain of TCR clone 280845 (TRBV7-2, TRBJ2-3)
CASSLAGAFIDTQYF

SEQ ID NO: 561691 - protein, 14 aa, Homo sapiens
  CDR3 for alpha chain variable domain of TCR clone 280846 (TRAV26-1, TRAJ38)
CIADNAGNNRKLIW

SEQ ID NO: 561692 - protein, 14 aa, Homo sapiens
  CDR3 for beta chain variable domain of TCR clone 280846 (TRBV11-2, TRBJ2-7)
CASSLGNSLYEQYF

SEQ ID NO: 561693 - protein, 10 aa, Homo sapiens
  CDR3 for alpha chain variable domain of TCR clone 280847 (TRAV3, TRAJ30)
CAVREIEIIF

SEQ ID NO: 561694 - protein, 12 aa, Homo sapiens
  CDR3 for beta chain variable domain of TCR clone 280847 (TRBV20-1, TRBJ2-3)
CSAYGAGDTQYF

SEQ ID NO: 561695 - protein, 17 aa, Homo sapiens
  CDR3 for alpha chain variable domain of TCR clone 280848 (TRAV3, TRAJ6)
CAVRDGPRAGGSYKPTF

SEQ ID NO: 561696 - protein, 14 aa, Homo sapiens
  CDR3 for beta chain variable domain of TCR clone 280848 (TRBV20-1, TRBJ2-2)
CSAPDTANTGELFF

SEQ ID NO: 561697 - protein, 16 aa, Homo sapiens
  CDR3 for alpha chain variable domain of TCR clone 280849 (TRAV30, TRAJ24)
CGTEIVDADSWGKFQF

SEQ ID NO: 561698 - protein, 15 aa, Homo sapiens
  CDR3 for beta chain variable domain of TCR clone 280849 (TRBV19, TRBJ1-5)
CASSIDPAEDQPQHF

SEQ ID NO: 561699 - protein, 13 aa, Homo sapiens
  CDR3 for alpha chain variable domain of TCR clone 280850 (TRAV12-3, TRAJ9)
CAMRADGGFKTIF

SEQ ID NO: 561700 - protein, 13 aa, Homo sapiens
  CDR3 for beta chain variable domain of TCR clone 280850 (TRBV12-5, TRBJ2-3)
CASGDRQSDTQYF

SEQ ID NO: 561701 - protein, 13 aa, Homo sapiens
  CDR3 for alpha chain variable domain of TCR clone 280851 (TRAV8-2, TRAJ49)
CVVSPSTGNQFYF

SEQ ID NO: 561702 - protein, 11 aa, Homo sapiens
  CDR3 for beta chain variable domain of TCR clone 280851 (TRBV11-2, TRBJ2-2)
CASSLPGELFF

SEQ ID NO: 561703 - protein, 12 aa, Homo sapiens
  CDR3 for alpha chain variable domain of TCR clone 280852 (TRAV13-2, TRAJ8)
CAPWLGFQKLVF

SEQ ID NO: 561704 - protein, 14 aa, Homo sapiens
  CDR3 for beta chain variable domain of TCR clone 280852 (TRBV4-1, TRBJ2-7)
CASRLTSGSYEQYF

SEQ ID NO: 561705 - protein, 14 aa, Homo sapiens
  CDR3 for alpha chain variable domain of TCR clone 280853 (TRAV10, TRAJ39)
CVVILNNAGNMLTF

SEQ ID NO: 561706 - protein, 13 aa, Homo sapiens
  CDR3 for beta chain variable domain of TCR clone 280853 (TRBV7-9, TRBJ1-2)
CASSLKQNYGYTF

SEQ ID NO: 561707 - protein, 16 aa, Homo sapiens
  CDR3 for alpha chain variable domain of TCR clone 280854 (TRAV8-3, TRAJ44)
CAVGTLMTGTASTLTF

SEQ ID NO: 561708 - protein, 15 aa, Homo sapiens
  CDR3 for beta chain variable domain of TCR clone 280854 (TRBV10-2, TRBJ2-6)
CASSEQGTGANVLTF

SEQ ID NO: 561709 - protein, 11 aa, Homo sapiens
  CDR3 for alpha chain variable domain of TCR clone 280855 (TRAV12-2, TRAJ21)
CAVKGFNKFYF

SEQ ID NO: 561710 - protein, 15 aa, Homo sapiens
  CDR3 for beta chain variable domain of TCR clone 280855 (TRBV20-1, TRBJ1-5)
CSASRRGDLGQPQHF

SEQ ID NO: 561711 - protein, 11 aa, Homo sapiens
  CDR3 for alpha chain variable domain of TCR clone 280856 (TRAV17, TRAJ29)
CYVATDTPLVF

SEQ ID NO: 561712 - protein, 14 aa, Homo sapiens
  CDR3 for beta chain variable domain of TCR clone 280856 (TRBV6-1, TRBJ1-3)
CASVQGGGGNTIYF

SEQ ID NO: 561713 - protein, 17 aa, Homo sapiens
  CDR3 for alpha chain variable domain of TCR clone 280857 (TRAV3, TRAJ21)
CAVRALYGQLQQILLWI

SEQ ID NO: 561714 - protein, 13 aa, Homo sapiens
  CDR3 for beta chain variable domain of TCR clone 280857 (TRBV10-3, TRBJ2-7)
CASKLAVNYEQYF

SEQ ID NO: 561715 - protein, 12 aa, Homo sapiens
  CDR3 for alpha chain variable domain of TCR clone 280858 (TRAV27, TRAJ13)
CEGAGGYQKVTF

SEQ ID NO: 561716 - protein, 15 aa, Homo sapiens
  CDR3 for beta chain variable domain of TCR clone 280858 (TRBV20-1, TRBJ2-6)
CSARDRGPGANVLTF

SEQ ID NO: 561717 - protein, 14 aa, Homo sapiens
  CDR3 for alpha chain variable domain of TCR clone 280859 (TRAV1-2, TRAJ8)
CAVREDTGFQKLVF

SEQ ID NO: 561718 - protein, 15 aa, Homo sapiens
  CDR3 for beta chain variable domain of TCR clone 280859 (TRBV28, TRBJ2-4)
CAAGSGRLVMGIQYF

SEQ ID NO: 561719 - protein, 14 aa, Homo sapiens
  CDR3 for alpha chain variable domain of TCR clone 280860 (TRAV14/DV4, TRAJ32)
SNVLPLTPTNKLIF

SEQ ID NO: 561720 - protein, 17 aa, Homo sapiens
  CDR3 for beta chain variable domain of TCR clone 280860 (TRBV20-1, TRBJ2-1)
CSASSSVLAGSYNEQFF

SEQ ID NO: 561721 - protein, 12 aa, Homo sapiens
  CDR3 for alpha chain variable domain of TCR clone 280861 (TRAV20, TRAJ37)
CALPSNTGKLIF

SEQ ID NO: 561722 - protein, 13 aa, Homo sapiens
  CDR3 for beta chain variable domain of TCR clone 280861 (TRBV2, TRBJ1-4)
CASSERAGEKLFF

SEQ ID NO: 561723 - protein, 14 aa, Homo sapiens
  CDR3 for alpha chain variable domain of TCR clone 280862 (TRAV12-3, TRAJ56)
CAMSVTGANSKLTF

SEQ ID NO: 561724 - protein, 13 aa, Homo sapiens
  CDR3 for beta chain variable domain of TCR clone 280862 (TRBV20-1, TRBJ1-1)
CSAGTVGNAEAFF

SEQ ID NO: 561725 - protein, 13 aa, Homo sapiens
  CDR3 for alpha chain variable domain of TCR clone 280863 (TRAV27, TRAJ57)
CRGAQGGSERLVF

SEQ ID NO: 561726 - protein, 11 aa, Homo sapiens
  CDR3 for beta chain variable domain of TCR clone 280863 (TRBV11-2, TRBJ1-1)
CASSINTEASF

SEQ ID NO: 561727 - protein, 12 aa, Homo sapiens
  CDR3 for alpha chain variable domain of TCR clone 280864 (TRAV16, TRAJ10)
CSRTGGGNKLTF

SEQ ID NO: 561728 - protein, 14 aa, Homo sapiens
  CDR3 for beta chain variable domain of TCR clone 280864 (TRBV6-1, TRBJ2-7)
CASNRARPDYEQYF

SEQ ID NO: 561729 - protein, 12 aa, Homo sapiens
  CDR3 for alpha chain variable domain of TCR clone 280865 (TRAV5, TRAJ9)
CAGNTGGFKTIF

SEQ ID NO: 561730 - protein, 15 aa, Homo sapiens
  CDR3 for beta chain variable domain of TCR clone 280865 (TRBV13, TRBJ1-2)
CASSLGRQPGYGDTF

SEQ ID NO: 561731 - protein, 13 aa, Homo sapiens
  CDR3 for alpha chain variable domain of TCR clone 280866 (TRAV8-3, TRAJ36)
CAFGATGANNLFF

SEQ ID NO: 561732 - protein, 15 aa, Homo sapiens
  CDR3 for beta chain variable domain of TCR clone 280866 (TRBV5-1, TRBJ2-3)
CASSVTSGSTDTQYF

SEQ ID NO: 561733 - protein, 14 aa, Homo sapiens
  CDR3 for alpha chain variable domain of TCR clone 280867 (TRAV8-3, TRAJ6)
CAVGASGGSYIPTF

SEQ ID NO: 561734 - protein, 15 aa, Homo sapiens
  CDR3 for beta chain variable domain of TCR clone 280867 (TRBV6-3, TRBJ2-7)
CASGSPGTVFYEQYF

SEQ ID NO: 561735 - protein, 13 aa, Homo sapiens
  CDR3 for alpha chain variable domain of TCR clone 280868 (TRAV21, TRAJ57)
CAVPQGGSEKLVF

SEQ ID NO: 561736 - protein, 11 aa, Homo sapiens
  CDR3 for beta chain variable domain of TCR clone 280868 (TRBV11-2, TRBJ2-2)
CASSLPGELFC

SEQ ID NO: 561737 - protein, 15 aa, Homo sapiens
  CDR3 for alpha chain variable domain of TCR clone 280869 (TRAV8-6, TRAJ10)
CAVSDQAGGGNKLTF

SEQ ID NO: 561738 - protein, 15 aa, Homo sapiens
  CDR3 for beta chain variable domain of TCR clone 280869 (TRBV5-1, TRBJ2-2)
CASSLAAGGSGELFF

SEQ ID NO: 561739 - protein, 14 aa, Homo sapiens
  CDR3 for alpha chain variable domain of TCR clone 280870 (TRAV1-2, TRAJ8)
CAVREDTGFQKLVF

SEQ ID NO: 561740 - protein, 15 aa, Homo sapiens
  CDR3 for beta chain variable domain of TCR clone 280870 (TRBV20-1, TRBJ2-7)
CSARDRVPGMDEQYF

SEQ ID NO: 561741 - protein, 14 aa, Homo sapiens
  CDR3 for alpha chain variable domain of TCR clone 280871 (TRAV8-1, TRAJ13)
CAVTPSGGYQKVTF

SEQ ID NO: 561742 - protein, 14 aa, Homo sapiens
  CDR3 for beta chain variable domain of TCR clone 280871 (TRBV19, TRBJ2-2)
CASSGQGIAGELFF

SEQ ID NO: 561743 - protein, 13 aa, Homo sapiens
  CDR3 for alpha chain variable domain of TCR clone 280872 (TRAV24, TRAJ15)
CALSNQAGTALIF

SEQ ID NO: 561744 - protein, 13 aa, Homo sapiens
  CDR3 for beta chain variable domain of TCR clone 280872 (TRBV7-3, TRBJ1-1)
CASSQGWGAEAFF

SEQ ID NO: 561745 - protein, 11 aa, Homo sapiens
  CDR3 for alpha chain variable domain of TCR clone 280873 (TRAV21, TRAJ9)
CAVPGGFKTLF

SEQ ID NO: 561746 - protein, 12 aa, Homo sapiens
  CDR3 for beta chain variable domain of TCR clone 280873 (TRBV20-1, TRBJ2-3)
CSARVGTDTQYF

SEQ ID NO: 561747 - protein, 13 aa, Homo sapiens
  CDR3 for alpha chain variable domain of TCR clone 280874 (TRAV17, TRAJ31)
CATDENNNARLMF

SEQ ID NO: 561748 - protein, 15 aa, Homo sapiens
  CDR3 for beta chain variable domain of TCR clone 280874 (TRBV5-1, TRBJ2-7)
CASSLYPDGGYEQYF

SEQ ID NO: 561749 - protein, 16 aa, Homo sapiens
  CDR3 for alpha chain variable domain of TCR clone 280875 (TRAV30, TRAJ24)
CGTEIVDADSWGKFQF

SEQ ID NO: 561750 - protein, 13 aa, Homo sapiens
  CDR3 for beta chain variable domain of TCR clone 280875 (TRBV2, TRBJ1-4)
CASSERAGENLFF

SEQ ID NO: 561751 - protein, 12 aa, Homo sapiens
  CDR3 for alpha chain variable domain of TCR clone 280876 (TRAV26-2, TRAJ21)
CILKGNFNKFYF

SEQ ID NO: 561752 - protein, 12 aa, Homo sapiens
  CDR3 for beta chain variable domain of TCR clone 280876 (TRBV12-4, TRBJ2-7)
CASSLGSYEQYF

SEQ ID NO: 561753 - protein, 14 aa, Homo sapiens
  CDR3 for alpha chain variable domain of TCR clone 280877 (TRAV8-4, TRAJ9)
CAVRINTGGFKTIF

SEQ ID NO: 561754 - protein, 16 aa, Homo sapiens
  CDR3 for beta chain variable domain of TCR clone 280877 (TRBV20-1, TRBJ1-4)
CSAPGQGLITNEKLFF

SEQ ID NO: 561755 - protein, 11 aa, Homo sapiens
  CDR3 for alpha chain variable domain of TCR clone 280878 (TRAV35, TRAJ30)
CAPGGDDKIIF

SEQ ID NO: 561756 - protein, 12 aa, Homo sapiens
  CDR3 for beta chain variable domain of TCR clone 280878 (TRBV29-1, TRBJ2-3)
CSVTGGADTQYF

SEQ ID NO: 561757 - protein, 13 aa, Homo sapiens
  CDR3 for alpha chain variable domain of TCR clone 280879 (TRAV27, TRAJ43)
CAGAGNNNNDMRF

SEQ ID NO: 561758 - protein, 15 aa, Homo sapiens
  CDR3 for beta chain variable domain of TCR clone 280879 (TRBV20-1, TRBJ2-7)
CSARDRVSGIDEQYF

SEQ ID NO: 561759 - protein, 14 aa, Homo sapiens
  CDR3 for alpha chain variable domain of TCR clone 280880 (TRAV26-1, TRAJ21)
CIVRPPYNFNKFYF

SEQ ID NO: 561760 - protein, 14 aa, Homo sapiens
  CDR3 for beta chain variable domain of TCR clone 280880 (TRBV19, TRBJ2-2)
CASSTGQGAGELFF

SEQ ID NO: 561761 - protein, 18 aa, Homo sapiens
  CDR3 for alpha chain variable domain of TCR clone 280881 (TRAV12-3, TRAJ52)
CAMSVGGAGGTSYGKLTF

SEQ ID NO: 561762 - protein, 16 aa, Homo sapiens
  CDR3 for beta chain variable domain of TCR clone 280881 (TRBV7-9, TRBJ1-2)
CASSMSLDRGGYGYTF

SEQ ID NO: 561763 - protein, 17 aa, Homo sapiens
  CDR3 for alpha chain variable domain of TCR clone 280882 (TRAV4, TRAJ18)
CLVGERSVGSTLGRLYS

SEQ ID NO: 561764 - protein, 18 aa, Homo sapiens
  CDR3 for beta chain variable domain of TCR clone 280882 (TRBV11-2, TRBJ2-3)
CASSLGGASRGSPNTQYF

SEQ ID NO: 561765 - protein, 14 aa, Homo sapiens
  CDR3 for alpha chain variable domain of TCR clone 280883 (TRAV12-2, TRAJ11)
CAVNMNSGYSPLTF

SEQ ID NO: 561766 - protein, 13 aa, Homo sapiens
  CDR3 for beta chain variable domain of TCR clone 280883 (TRBV6-1, TRBJ1-2)
CASSDSPSYGYTF

SEQ ID NO: 561767 - protein, 16 aa, Homo sapiens
  CDR3 for alpha chain variable domain of TCR clone 280884 (TRAV3, TRAJ6)
CAMRDGMRRRKLHTYI

SEQ ID NO: 561768 - protein, 15 aa, Homo sapiens
  CDR3 for beta chain variable domain of TCR clone 280884 (TRBV5-1, TRBJ2-1)
CASSLAGSSYNEQFF

SEQ ID NO: 561769 - protein, 14 aa, Homo sapiens
  CDR3 for alpha chain variable domain of TCR clone 280885 (TRAV1-2, TRAJ8)
CAVREATGFQKLVF

SEQ ID NO: 561770 - protein, 16 aa, Homo sapiens
  CDR3 for beta chain variable domain of TCR clone 280885 (TRBV7-3, TRBJ2-2)
CASSLKRGTLSGELFF

SEQ ID NO: 561771 - protein, 13 aa, Homo sapiens
  CDR3 for alpha chain variable domain of TCR clone 280886 (TRAV8-4, TRAJ48)
CAVSLFGNEKLTF

SEQ ID NO: 561772 - protein, 15 aa, Homo sapiens
  CDR3 for beta chain variable domain of TCR clone 280886 (TRBV20-1, TRBJ2-7)
CSARKGLAESYERYF

SEQ ID NO: 561773 - protein, 16 aa, Homo sapiens
  CDR3 for alpha chain variable domain of TCR clone 280887 (TRAV12-1, TRAJ4)
CLVNPGISGGYNKLIL

SEQ ID NO: 561774 - protein, 14 aa, Homo sapiens
  CDR3 for beta chain variable domain of TCR clone 280887 (TRBV5-7, TRBJ2-3)
CASRTSGGTDTQYF

SEQ ID NO: 561775 - protein, 12 aa, Homo sapiens
  CDR3 for alpha chain variable domain of TCR clone 280888 (TRAV1-1, TRAJ30)
CAVRGRDDKIIF

SEQ ID NO: 561776 - protein, 13 aa, Homo sapiens
  CDR3 for beta chain variable domain of TCR clone 280888 (TRBV11-3, TRBJ2-7)
CSSSLDNLYEQYF

SEQ ID NO: 561777 - protein, 16 aa, Homo sapiens
  CDR3 for alpha chain variable domain of TCR clone 280889 (TRAV14/DV4, TRAJ20)
CAMREGRSRDDYKLSL

SEQ ID NO: 561778 - protein, 12 aa, Homo sapiens
  CDR3 for beta chain variable domain of TCR clone 280889 (TRBV7-9, TRBJ2-7)
CASSQGVYEQYF

SEQ ID NO: 561779 - protein, 13 aa, Homo sapiens
  CDR3 for alpha chain variable domain of TCR clone 280890 (TRAV1-2, TRAJ9)
CAALNTGGFKTIF

SEQ ID NO: 561780 - protein, 15 aa, Homo sapiens
  CDR3 for beta chain variable domain of TCR clone 280890 (TRBV3-1, TRBJ2-7)
CASSQDSSGAYEQYF

SEQ ID NO: 561781 - protein, 15 aa, Homo sapiens
  CDR3 for alpha chain variable domain of TCR clone 280891 (TRAV35, TRAJ40)
CAGQLGTTGTYKYIF

SEQ ID NO: 561782 - protein, 15 aa, Homo sapiens
  CDR3 for beta chain variable domain of TCR clone 280891 (TRBV25-1, TRBJ1-4)
CASSKRIATNEKLFF

SEQ ID NO: 561783 - protein, 16 aa, Homo sapiens
  CDR3 for alpha chain variable domain of TCR clone 280892 (TRAV30, TRAJ24)
CGTEIVDADSWGKFQF

SEQ ID NO: 561784 - protein, 12 aa, Homo sapiens
  CDR3 for beta chain variable domain of TCR clone 280892 (TRBV11-2, TRBJ2-1)
CASSPGINEQFF

SEQ ID NO: 561785 - protein, 12 aa, Homo sapiens
  CDR3 for alpha chain variable domain of TCR clone 280893 (TRAV13-1, TRAJ53)
AASGGSNYKLTF

SEQ ID NO: 561786 - protein, 18 aa, Homo sapiens
  CDR3 for beta chain variable domain of TCR clone 280893 (TRBV4-1, TRBJ2-7)
YASSQDTGAGSGLNEQYF

SEQ ID NO: 561787 - protein, 16 aa, Homo sapiens
  CDR3 for alpha chain variable domain of TCR clone 280894 (TRAV26-1, TRAJ45)
CIVEKYSGGGADGLTF

SEQ ID NO: 561788 - protein, 15 aa, Homo sapiens
  CDR3 for beta chain variable domain of TCR clone 280894 (TRBV18, TRBJ2-7)
CASSPLQGRTYEQYF

SEQ ID NO: 561789 - protein, 16 aa, Homo sapiens
  CDR3 for alpha chain variable domain of TCR clone 280895 (TRAV3, TRAJ10)
CAVRDMRAGGGNKLTF

SEQ ID NO: 561790 - protein, 13 aa, Homo sapiens
  CDR3 for beta chain variable domain of TCR clone 280895 (TRBV6-1, TRBJ1-1)
CASSRQGNTEAVV

SEQ ID NO: 561791 - protein, 16 aa, Homo sapiens
  CDR3 for alpha chain variable domain of TCR clone 280896 (TRAV30, TRAJ24)
CGTEIVDADSWGKFQF

SEQ ID NO: 561792 - protein, 16 aa, Homo sapiens
  CDR3 for beta chain variable domain of TCR clone 280896 (TRBV12-4, TRBJ2-5)
CASGPRTSGNQETQYF

SEQ ID NO: 561793 - protein, 15 aa, Homo sapiens
  CDR3 for alpha chain variable domain of TCR clone 280897 (TRAV40, TRAJ53)
CLLANSGGSNYKLTF

SEQ ID NO: 561794 - protein, 12 aa, Homo sapiens
  CDR3 for beta chain variable domain of TCR clone 280897 (TRBV5-4, TRBJ2-5)
CASSSTRETQYF

SEQ ID NO: 561795 - protein, 16 aa, Homo sapiens
  CDR3 for alpha chain variable domain of TCR clone 280898 (TRAV35, TRAJ37)
CWAFLRGSSNTGKLIF

SEQ ID NO: 561796 - protein, 13 aa, Homo sapiens
  CDR3 for beta chain variable domain of TCR clone 280898 (TRBV2, TRBJ1-2)
CASSVRVNYGYTF

SEQ ID NO: 561797 - protein, 20 aa, Homo sapiens
  CDR3 for alpha chain variable domain of TCR clone 280899 (TRAV12-1, TRAJ42)
SSVIQPPTSVKGGSQGNLIF

SEQ ID NO: 561798 - protein, 18 aa, Homo sapiens
  CDR3 for beta chain variable domain of TCR clone 280899 (TRBV11-2, TRBJ2-3)
CASSLGEASRGAPNTQYF

SEQ ID NO: 561799 - protein, 16 aa, Homo sapiens
  CDR3 for alpha chain variable domain of TCR clone 280900 (TRAV1-2, TRAJ10)
CAVRGVLTGGGNKLPF

SEQ ID NO: 561800 - protein, 12 aa, Homo sapiens
  CDR3 for beta chain variable domain of TCR clone 280900 (TRBV12-4, TRBJ2-7)
CASSLGGYEQYF

SEQ ID NO: 561801 - protein, 14 aa, Homo sapiens
  CDR3 for alpha chain variable domain of TCR clone 280901 (TRAV12-2, TRAJ13)
CAVNKTGGCQKVTF

SEQ ID NO: 561802 - protein, 12 aa, Homo sapiens
  CDR3 for beta chain variable domain of TCR clone 280901 (TRBV6-3, TRBJ2-7)
CASSLTPYEQYF

SEQ ID NO: 561803 - protein, 14 aa, Homo sapiens
  CDR3 for alpha chain variable domain of TCR clone 280902 (TRAV12-1, TRAJ9)
CVVNIITGGFRTIF

SEQ ID NO: 561804 - protein, 17 aa, Homo sapiens
  CDR3 for beta chain variable domain of TCR clone 280902 (TRBV9, TRBJ2-1)
CASSVEPTGMARDEQFF

SEQ ID NO: 561805 - protein, 13 aa, Homo sapiens
  CDR3 for alpha chain variable domain of TCR clone 280903 (TRAV38-2/DV8, TRAJ34)
CAYRNYNTDKLIF

SEQ ID NO: 561806 - protein, 15 aa, Homo sapiens
  CDR3 for beta chain variable domain of TCR clone 280903 (TRBV20-1, TRBJ2-5)
CSAGGTGGLKETQYF

SEQ ID NO: 561807 - protein, 13 aa, Homo sapiens
  CDR3 for alpha chain variable domain of TCR clone 280904 (TRAV1-2, TRAJ9)
CAALNTGGFKTIF

SEQ ID NO: 561808 - protein, 11 aa, Homo sapiens
  CDR3 for beta chain variable domain of TCR clone 280904 (TRBV20-1, TRBJ2-7)
CSARLSYEQYF

SEQ ID NO: 561809 - protein, 14 aa, Homo sapiens
  CDR3 for alpha chain variable domain of TCR clone 280905 (TRAV35, TRAJ33)
CAGSSQDSNYQLIW

SEQ ID NO: 561810 - protein, 14 aa, Homo sapiens
  CDR3 for beta chain variable domain of TCR clone 280905 (TRBV7-9, TRBJ2-1)
CASSSVVGFGEQFF

SEQ ID NO: 561811 - protein, 14 aa, Homo sapiens
  CDR3 for alpha chain variable domain of TCR clone 280906 (TRAV12-3, TRAJ10)
SHLPLTEGGNKLTF

SEQ ID NO: 561812 - protein, 13 aa, Homo sapiens
  CDR3 for beta chain variable domain of TCR clone 280906 (TRBV20-1, TRBJ1-6)
CSAPLGVGSPLHF

SEQ ID NO: 561813 - protein, 13 aa, Homo sapiens
  CDR3 for alpha chain variable domain of TCR clone 280907 (TRAV21, TRAJ27)
CAARPGNAGKSTF

SEQ ID NO: 561814 - protein, 17 aa, Homo sapiens
  CDR3 for beta chain variable domain of TCR clone 280907 (TRBV7-8, TRBJ2-6)
CASSAGTGGAGSNVLTF

SEQ ID NO: 561815 - protein, 16 aa, Homo sapiens
  CDR3 for alpha chain variable domain of TCR clone 280908 (TRAV3, TRAJ37)
CAVRPHGSGNTGKLIF

SEQ ID NO: 561816 - protein, 15 aa, Homo sapiens
  CDR3 for beta chain variable domain of TCR clone 280908 (TRBV7-9, TRBJ2-7)
CASSLALAEAYEQYS

SEQ ID NO: 561817 - protein, 16 aa, Homo sapiens
  CDR3 for alpha chain variable domain of TCR clone 280909 (TRAV12-3, TRAJ53)
CAMSPGSGSSNYKLTF

SEQ ID NO: 561818 - protein, 17 aa, Homo sapiens
  CDR3 for beta chain variable domain of TCR clone 280909 (TRBV20-1, TRBJ2-2)
CSASGSGQGGLTGELFF

SEQ ID NO: 561819 - protein, 15 aa, Homo sapiens
  CDR3 for alpha chain variable domain of TCR clone 280910 (TRAV2, TRAJ15)
CAVEDRGQAGTAMIF

SEQ ID NO: 561820 - protein, 15 aa, Homo sapiens
  CDR3 for beta chain variable domain of TCR clone 280910 (TRBV20-1, TRBJ1-5)
CSATSDRGLGQPQHF

SEQ ID NO: 561821 - protein, 10 aa, Homo sapiens
  CDR3 for alpha chain variable domain of TCR clone 280911 (TRAV3, TRAJ30)
CAVREIEIIF

SEQ ID NO: 561822 - protein, 13 aa, Homo sapiens
  CDR3 for beta chain variable domain of TCR clone 280911 (TRBV20-1, TRBJ1-1)
CSAPLGGGTEAFF

SEQ ID NO: 561823 - protein, 12 aa, Homo sapiens
  CDR3 for alpha chain variable domain of TCR clone 280912 (TRAV4, TRAJ26)
CLGGDYGQNFVF

SEQ ID NO: 561824 - protein, 12 aa, Homo sapiens
  CDR3 for beta chain variable domain of TCR clone 280912 (TRBV11-2, TRBJ2-2)
CASSLGGGELFF

SEQ ID NO: 561825 - protein, 15 aa, Homo sapiens
  CDR3 for alpha chain variable domain of TCR clone 280913 (TRAV26-1, TRAJ29)
CIVRVEGSGNTPLVC

SEQ ID NO: 561826 - protein, 14 aa, Homo sapiens
  CDR3 for beta chain variable domain of TCR clone 280913 (TRBV18, TRBJ2-5)
CASSPGVSQETLYF

SEQ ID NO: 561827 - protein, 22 aa, Homo sapiens
  CDR3 for alpha chain variable domain of TCR clone 280914 (TRAV13-1, )
CAASGPRRPQIPDIQNPDPAVY

SEQ ID NO: 561828 - protein, 16 aa, Homo sapiens
  CDR3 for beta chain variable domain of TCR clone 280914 (TRBV18, TRBJ2-3)
CASSRPAGGPRKYAVF

SEQ ID NO: 561829 - protein, 16 aa, Homo sapiens
  CDR3 for alpha chain variable domain of TCR clone 280915 (TRAV13-1, TRAJ37)
CAASTLGSSNTGKLIF

SEQ ID NO: 561830 - protein, 12 aa, Homo sapiens
  CDR3 for beta chain variable domain of TCR clone 280915 (TRBV6-1, TRBJ2-5)
CASGEGRETQYF

SEQ ID NO: 561831 - protein, 14 aa, Homo sapiens
  CDR3 for alpha chain variable domain of TCR clone 280916 (TRAV29/DV5, TRAJ36)
CAARRKTGANNHFF

SEQ ID NO: 561832 - protein, 12 aa, Homo sapiens
  CDR3 for beta chain variable domain of TCR clone 280916 (TRBV12-4, TRBJ2-7)
CASSLGGYEQYF

SEQ ID NO: 561833 - protein, 14 aa, Homo sapiens
  CDR3 for alpha chain variable domain of TCR clone 280917 (TRAV26-1, TRAJ10)
CIVRATGGGNKLTF

SEQ ID NO: 561834 - protein, 14 aa, Homo sapiens
  CDR3 for beta chain variable domain of TCR clone 280917 (TRBV19, TRBJ2-1)
CASPTFVLSGEQFF

SEQ ID NO: 561835 - protein, 13 aa, Homo sapiens
  CDR3 for alpha chain variable domain of TCR clone 280918 (TRAV12-1, TRAJ43)
CVVSHHNNHDMRF

SEQ ID NO: 561836 - protein, 14 aa, Homo sapiens
  CDR3 for beta chain variable domain of TCR clone 280918 (TRBV25-1, TRBJ1-1)
CASTHLGGNTEAFF

SEQ ID NO: 561837 - protein, 12 aa, Homo sapiens
  CDR3 for alpha chain variable domain of TCR clone 280919 (TRAV30, TRAJ43)
CGTEERGNDMRF

SEQ ID NO: 561838 - protein, 14 aa, Homo sapiens
  CDR3 for beta chain variable domain of TCR clone 280919 (TRBV4-2, TRBJ1-2)
CASSPGGSNYGYTF

SEQ ID NO: 561839 - protein, 11 aa, Homo sapiens
  CDR3 for alpha chain variable domain of TCR clone 280920 (TRAV17, TRAJ29)
CYVATDTHLVF

SEQ ID NO: 561840 - protein, 12 aa, Homo sapiens
  CDR3 for beta chain variable domain of TCR clone 280920 (TRBV7-9, TRBJ2-7)
CASSIKREEQYF

SEQ ID NO: 561841 - protein, 17 aa, Homo sapiens
  CDR3 for alpha chain variable domain of TCR clone 280921 (TRAV12-2, TRAJ52)
CAVNPYAGGTSYGKLTF

SEQ ID NO: 561842 - protein, 14 aa, Homo sapiens
  CDR3 for beta chain variable domain of TCR clone 280921 (TRBV7-8, TRBJ2-3)
CASSLEAGTDTQYF

SEQ ID NO: 561843 - protein, 10 aa, Homo sapiens
  CDR3 for alpha chain variable domain of TCR clone 280922 (TRAV30, TRAJ34)
CGTNPDKLIF

SEQ ID NO: 561844 - protein, 12 aa, Homo sapiens
  CDR3 for beta chain variable domain of TCR clone 280922 (TRBV19, TRBJ1-1)
CASSLSDTESFF

SEQ ID NO: 561845 - protein, 14 aa, Homo sapiens
  CDR3 for alpha chain variable domain of TCR clone 280923 (TRAV13-1, TRAJ44)
CAAKATGTASKLTF

SEQ ID NO: 561846 - protein, 17 aa, Homo sapiens
  CDR3 for beta chain variable domain of TCR clone 280923 (TRBV7-3, TRBJ2-3)
CASSLMKRMRGADTLYF

SEQ ID NO: 561847 - protein, 17 aa, Homo sapiens
  CDR3 for alpha chain variable domain of TCR clone 280924 (TRAV3, TRAJ42)
CAVRDRAYGGSQGNLIF

SEQ ID NO: 561848 - protein, 16 aa, Homo sapiens
  CDR3 for beta chain variable domain of TCR clone 280924 (TRBV5-4, TRBJ2-3)
CASSWGTSGGTDTQYF

SEQ ID NO: 561849 - protein, 19 aa, Homo sapiens
  CDR3 for alpha chain variable domain of TCR clone 280925 (TRAV26-1, TRAJ52)
CIVRAHRNAGGTSYGKLTF

SEQ ID NO: 561850 - protein, 15 aa, Homo sapiens
  CDR3 for beta chain variable domain of TCR clone 280925 (TRBV29-1, TRBJ2-1)
CSGRDRKSSYNEQFV

SEQ ID NO: 561851 - protein, 14 aa, Homo sapiens
  CDR3 for alpha chain variable domain of TCR clone 280926 (TRAV26-1, TRAJ34)
CIVRVAYNTDKLIF

SEQ ID NO: 561852 - protein, 14 aa, Homo sapiens
  CDR3 for beta chain variable domain of TCR clone 280926 (TRBV7-8, TRBJ1-2)
CASSPDSLSYGYTF

SEQ ID NO: 561853 - protein, 10 aa, Homo sapiens
  CDR3 for alpha chain variable domain of TCR clone 280927 (TRAV8-3, TRAJ43)
CAVALAHMRF

SEQ ID NO: 561854 - protein, 17 aa, Homo sapiens
  CDR3 for beta chain variable domain of TCR clone 280927 (TRBV10-1, TRBJ2-1)
CASSPQRAGGPFNEQFF

SEQ ID NO: 561855 - protein, 14 aa, Homo sapiens
  CDR3 for alpha chain variable domain of TCR clone 280928 (TRAV16, TRAJ15)
CALSFNQAGTALIF

SEQ ID NO: 561856 - protein, 15 aa, Homo sapiens
  CDR3 for beta chain variable domain of TCR clone 280928 (TRBV11-2, TRBJ2-1)
CASSSPSTRYNEQFF

SEQ ID NO: 561857 - protein, 13 aa, Homo sapiens
  CDR3 for alpha chain variable domain of TCR clone 280929 (TRAV1-2, TRAJ9)
CAVLNTGGFKTIF

SEQ ID NO: 561858 - protein, 13 aa, Homo sapiens
  CDR3 for beta chain variable domain of TCR clone 280929 (TRBV19, TRBJ2-7)
FASRKAGGSEQYF

SEQ ID NO: 561859 - protein, 14 aa, Homo sapiens
  CDR3 for alpha chain variable domain of TCR clone 280930 (TRAV12-2, TRAJ17)
CAVLFKAAGNKLTF

SEQ ID NO: 561860 - protein, 14 aa, Homo sapiens
  CDR3 for beta chain variable domain of TCR clone 280930 (TRBV15, TRBJ1-2)
CATSRDFDRVDYSF

SEQ ID NO: 561861 - protein, 10 aa, Homo sapiens
  CDR3 for alpha chain variable domain of TCR clone 280931 (TRAV12-1, TRAJ24)
CVVNRGKFQF

SEQ ID NO: 561862 - protein, 15 aa, Homo sapiens
  CDR3 for beta chain variable domain of TCR clone 280931 (TRBV11-3, TRBJ2-3)
CASLKDGREGDTQYF

SEQ ID NO: 561863 - protein, 13 aa, Homo sapiens
  CDR3 for alpha chain variable domain of TCR clone 280932 (TRAV8-3, TRAJ36)
CAVGATGANNLFF

SEQ ID NO: 561864 - protein, 11 aa, Homo sapiens
  CDR3 for beta chain variable domain of TCR clone 280932 (TRBV7-2, TRBJ2-3)
CASSSSDTQYF

SEQ ID NO: 561865 - protein, 15 aa, Homo sapiens
  CDR3 for alpha chain variable domain of TCR clone 280933 (TRAV3, TRAJ5)
WAVRDRKTGRRALTF

SEQ ID NO: 561866 - protein, 15 aa, Homo sapiens
  CDR3 for beta chain variable domain of TCR clone 280933 (TRBV7-8, TRBJ2-1)
CAISLADSLYNEQFF

SEQ ID NO: 561867 - protein, 20 aa, Homo sapiens
  CDR3 for alpha chain variable domain of TCR clone 280934 (TRAV25, TRAJ21)
TATQTTDVGTYPLSCNKFYF

SEQ ID NO: 561868 - protein, 14 aa, Homo sapiens
  CDR3 for beta chain variable domain of TCR clone 280934 (TRBV6-1, TRBJ2-1)
CASAKDGFYNEQFL

SEQ ID NO: 561869 - protein, 13 aa, Homo sapiens
  CDR3 for alpha chain variable domain of TCR clone 280935 (TRAV21, TRAJ27)
CAALNTNAGKSTF

SEQ ID NO: 561870 - protein, 14 aa, Homo sapiens
  CDR3 for beta chain variable domain of TCR clone 280935 (TRBV27, TRBJ1-1)
CASSLLSVLSEAFF

SEQ ID NO: 561871 - protein, 13 aa, Homo sapiens
  CDR3 for alpha chain variable domain of TCR clone 280936 (TRAV27, TRAJ49)
CAPRPYTGNQFYF

SEQ ID NO: 561872 - protein, 14 aa, Homo sapiens
  CDR3 for beta chain variable domain of TCR clone 280936 (TRBV4-1, TRBJ2-2)
CASSQAVNTGELFF

SEQ ID NO: 561873 - protein, 15 aa, Homo sapiens
  CDR3 for alpha chain variable domain of TCR clone 280937 (TRAV2, TRAJ15)
CAVEDRGQAGTALIV

SEQ ID NO: 561874 - protein, 15 aa, Homo sapiens
  CDR3 for beta chain variable domain of TCR clone 280937 (TRBV9, TRBJ1-6)
CASSVAGTGDSPLHF

SEQ ID NO: 561875 - protein, 11 aa, Homo sapiens
  CDR3 for alpha chain variable domain of TCR clone 280938 (TRAV12-1, TRAJ33)
CVVNSNYKLIW

SEQ ID NO: 561876 - protein, 14 aa, Homo sapiens
  CDR3 for beta chain variable domain of TCR clone 280938 (TRBV25-1, TRBJ1-1)
CASTHLGGNTEAFF

SEQ ID NO: 561877 - protein, 13 aa, Homo sapiens
  CDR3 for alpha chain variable domain of TCR clone 280939 (TRAV27, TRAJ40)
CSGPPSGTYKYIF

SEQ ID NO: 561878 - protein, 13 aa, Homo sapiens
  CDR3 for beta chain variable domain of TCR clone 280939 (TRBV28, TRBJ1-2)
CAGRDRGNYGYTF

SEQ ID NO: 561879 - protein, 18 aa, Homo sapiens
  CDR3 for alpha chain variable domain of TCR clone 280940 (TRAV29/DV5, TRAJ26)
CSVLLCSKRKPEGQNFVF

SEQ ID NO: 561880 - protein, 15 aa, Homo sapiens
  CDR3 for beta chain variable domain of TCR clone 280940 (TRBV20-1, TRBJ2-7)
CSARDRVSGMDEQYF

SEQ ID NO: 561881 - protein, 23 aa, Homo sapiens
  CDR3 for alpha chain variable domain of TCR clone 280941 (TRAV26-1, TRAJ38)
CIADNAGNNHIQNPDPAVYQLID

SEQ ID NO: 561882 - protein, 16 aa, Homo sapiens
  CDR3 for beta chain variable domain of TCR clone 280941 (TRBV19, TRBJ2-1)
CASSKAGPSSYNEQFF

SEQ ID NO: 561883 - protein, 10 aa, Homo sapiens
  CDR3 for alpha chain variable domain of TCR clone 280942 (TRAV8-3, TRAJ36)
GATGANNLFF

SEQ ID NO: 561884 - protein, 16 aa, Homo sapiens
  CDR3 for beta chain variable domain of TCR clone 280942 (TRBV7-2, TRBJ2-5)
CASSPFPTGGEETQYF

SEQ ID NO: 561885 - protein, 13 aa, Homo sapiens
  CDR3 for alpha chain variable domain of TCR clone 280943 (TRAV12-1, TRAJ11)
CVVTRGGYSTLTF

SEQ ID NO: 561886 - protein, 13 aa, Homo sapiens
  CDR3 for beta chain variable domain of TCR clone 280943 (TRBV20-1, TRBJ1-2)
CSARDQGAYGYTF

SEQ ID NO: 561887 - protein, 14 aa, Homo sapiens
  CDR3 for alpha chain variable domain of TCR clone 280944 (TRAV1-2, TRAJ8)
CAVREGTGFQKLVF

SEQ ID NO: 561888 - protein, 13 aa, Homo sapiens
  CDR3 for beta chain variable domain of TCR clone 280944 (TRBV11-2, TRBJ2-5)
SASSSTGEETQYF

SEQ ID NO: 561889 - protein, 13 aa, Homo sapiens
  CDR3 for alpha chain variable domain of TCR clone 280945 (TRAV12-1, TRAJ36)
CVVNYWGKQPLLW

SEQ ID NO: 561890 - protein, 13 aa, Homo sapiens
  CDR3 for beta chain variable domain of TCR clone 280945 (TRBV14, TRBJ1-1)
CASSREFGTEAFF

SEQ ID NO: 561891 - protein, 15 aa, Homo sapiens
  CDR3 for alpha chain variable domain of TCR clone 280946 (TRAV3, TRAJ22)
CAVRDRGRSARQLTF

SEQ ID NO: 561892 - protein, 20 aa, Homo sapiens
  CDR3 for beta chain variable domain of TCR clone 280946 (TRBV11-2, TRBJ1-6)
CASSLVFATGGSVHPSTLGT

SEQ ID NO: 561893 - protein, 13 aa, Homo sapiens
  CDR3 for alpha chain variable domain of TCR clone 280947 (TRAV12-2, TRAJ20)
CAVYPSNDYKLSF

SEQ ID NO: 561894 - protein, 19 aa, Homo sapiens
  CDR3 for beta chain variable domain of TCR clone 280947 (TRBV2, TRBJ2-7)
CASSDDETSGRANDYEQYF

SEQ ID NO: 561895 - protein, 14 aa, Homo sapiens
  CDR3 for alpha chain variable domain of TCR clone 280948 (TRAV1-2, TRAJ16)
CAVNRFSDGQKLLF

SEQ ID NO: 561896 - protein, 15 aa, Homo sapiens
  CDR3 for beta chain variable domain of TCR clone 280948 (TRBV6-1, TRBJ1-5)
CASSELREGNQPQHF

SEQ ID NO: 561897 - protein, 14 aa, Homo sapiens
  CDR3 for alpha chain variable domain of TCR clone 280949 (TRAV12-3, TRAJ10)
SHLPLTGGGNKLTF

SEQ ID NO: 561898 - protein, 14 aa, Homo sapiens
  CDR3 for beta chain variable domain of TCR clone 280949 (TRBV7-2, TRBJ2-7)
YASSTKTSFYEQYF

SEQ ID NO: 561899 - protein, 14 aa, Homo sapiens
  CDR3 for alpha chain variable domain of TCR clone 280950 (TRAV2, TRAJ37)
CAVDFTSNTGKLVF

SEQ ID NO: 561900 - protein, 12 aa, Homo sapiens
  CDR3 for beta chain variable domain of TCR clone 280950 (TRBV11-2, TRBJ2-2)
CASSLGGEELFF

SEQ ID NO: 561901 - protein, 12 aa, Homo sapiens
  CDR3 for alpha chain variable domain of TCR clone 280951 (TRAV13-1, TRAJ49)
CAASPMGNQFYF

SEQ ID NO: 561902 - protein, 17 aa, Homo sapiens
  CDR3 for beta chain variable domain of TCR clone 280951 (TRBV11-2, TRBJ2-1)
CASSLYPPGDEYNEQFF

SEQ ID NO: 561903 - protein, 15 aa, Homo sapiens
  CDR3 for alpha chain variable domain of TCR clone 280952 (TRAV26-1, TRAJ44)
SIVRANTGTASKLTF

SEQ ID NO: 561904 - protein, 16 aa, Homo sapiens
  CDR3 for beta chain variable domain of TCR clone 280952 (TRBV7-7, TRBJ2-1)
CASSLASGTSYNEQFF

SEQ ID NO: 561905 - protein, 15 aa, Homo sapiens
  CDR3 for alpha chain variable domain of TCR clone 280953 (TRAV26-1, TRAJ29)
CIVRVEGSGNTPLVF

SEQ ID NO: 561906 - protein, 15 aa, Homo sapiens
  CDR3 for beta chain variable domain of TCR clone 280953 (TRBV11-2, TRBJ2-7)
CASSLMVGGSYEQYF

SEQ ID NO: 561907 - protein, 13 aa, Homo sapiens
  CDR3 for alpha chain variable domain of TCR clone 280954 (TRAV8-6, TRAJ49)
CAVITNTGNQFYF

SEQ ID NO: 561908 - protein, 17 aa, Homo sapiens
  CDR3 for beta chain variable domain of TCR clone 280954 (TRBV11-2, TRBJ2-1)
CASSLYPPGVEYNQQFF

SEQ ID NO: 561909 - protein, 14 aa, Homo sapiens
  CDR3 for alpha chain variable domain of TCR clone 280955 (TRAV12-3, TRAJ58)
CAMSTETSGSSLTF

SEQ ID NO: 561910 - protein, 15 aa, Homo sapiens
  CDR3 for beta chain variable domain of TCR clone 280955 (TRBV11-3, TRBJ2-3)
CASLKDGREGDTQYF

SEQ ID NO: 561911 - protein, 12 aa, Homo sapiens
  CDR3 for alpha chain variable domain of TCR clone 280956 (TRAV35, TRAJ54)
CADLQGAQKLVF

SEQ ID NO: 561912 - protein, 16 aa, Homo sapiens
  CDR3 for beta chain variable domain of TCR clone 280956 (TRBV7-3, TRBJ2-2)
CASSLKRGTLSGELFF

SEQ ID NO: 561913 - protein, 18 aa, Homo sapiens
  CDR3 for alpha chain variable domain of TCR clone 280957 (TRAV9-2, TRAJ52)
CALGRHNAVGTSYGKLTF

SEQ ID NO: 561914 - protein, 13 aa, Homo sapiens
  CDR3 for beta chain variable domain of TCR clone 280957 (TRBV7-9, TRBJ1-2)
CASSLKQNYGYTF

SEQ ID NO: 561915 - protein, 16 aa, Homo sapiens
  CDR3 for alpha chain variable domain of TCR clone 280958 (TRAV26-1, TRAJ45)
CIVEKYSGGGADGLTF

SEQ ID NO: 561916 - protein, 13 aa, Homo sapiens
  CDR3 for beta chain variable domain of TCR clone 280958 (TRBV12-5, TRBJ2-3)
CASGDRQSDTQYF

SEQ ID NO: 561917 - protein, 13 aa, Homo sapiens
  CDR3 for alpha chain variable domain of TCR clone 280959 (TRAV1-2, TRAJ9)
CAVLNTGGFKTIF

SEQ ID NO: 561918 - protein, 13 aa, Homo sapiens
  CDR3 for beta chain variable domain of TCR clone 280959 (TRBV7-9, TRBJ1-2)
CASSLKQNYGDTF

SEQ ID NO: 561919 - protein, 12 aa, Homo sapiens
  CDR3 for alpha chain variable domain of TCR clone 280960 (TRAV12-3, TRAJ17)
CAMTLTGKKLTF

SEQ ID NO: 561920 - protein, 15 aa, Homo sapiens
  CDR3 for beta chain variable domain of TCR clone 280960 (TRBV20-1, TRBJ2-7)
CSARDRVSGVDEQYF

SEQ ID NO: 561921 - protein, 14 aa, Homo sapiens
  CDR3 for alpha chain variable domain of TCR clone 280961 (TRAV1-2, TRAJ16)
CAVNRLSDGQKLLF

SEQ ID NO: 561922 - protein, 13 aa, Homo sapiens
  CDR3 for beta chain variable domain of TCR clone 280961 (TRBV7-3, TRBJ1-1)
CASSQDWGAEAFF

SEQ ID NO: 561923 - protein, 17 aa, Homo sapiens
  CDR3 for alpha chain variable domain of TCR clone 280962 (TRAV14/DV4, TRAJ12)
CAMRELPWTDSSYKWIF

SEQ ID NO: 561924 - protein, 14 aa, Homo sapiens
  CDR3 for beta chain variable domain of TCR clone 280962 (TRBV20-1, TRBJ2-7)
CSARRSGSSYEQYF

SEQ ID NO: 561925 - protein, 18 aa, Homo sapiens
  CDR3 for alpha chain variable domain of TCR clone 280963 (TRAV21, TRAJ52)
CAVRPSPAGGPSDGKLTF

SEQ ID NO: 561926 - protein, 12 aa, Homo sapiens
  CDR3 for beta chain variable domain of TCR clone 280963 (TRBV11-2, TRBJ2-2)
CASSLGGGELFF

SEQ ID NO: 561927 - protein, 15 aa, Homo sapiens
  CDR3 for alpha chain variable domain of TCR clone 280964 (TRAV3, TRAJ5)
CAVRDLDTGRRALTF

SEQ ID NO: 561928 - protein, 14 aa, Homo sapiens
  CDR3 for beta chain variable domain of TCR clone 280964 (TRBV7-2, TRBJ2-7)
CASSLRWEVNEQYF

SEQ ID NO: 561929 - protein, 14 aa, Homo sapiens
  CDR3 for alpha chain variable domain of TCR clone 280965 (TRAV8-3, TRAJ30)
CAVGDMNRDDKIIF

SEQ ID NO: 561930 - protein, 10 aa, Homo sapiens
  CDR3 for beta chain variable domain of TCR clone 280965 (TRBV19, TRBJ2-2)
CASSRNPGGF

SEQ ID NO: 561931 - protein, 16 aa, Homo sapiens
  CDR3 for alpha chain variable domain of TCR clone 280966 (TRAV27, TRAJ53)
ASTSGGKRGSNYKLTF

SEQ ID NO: 561932 - protein, 16 aa, Homo sapiens
  CDR3 for beta chain variable domain of TCR clone 280966 (TRBV20-1, TRBJ2-5)
CSPGGTSGGYMETQYF

SEQ ID NO: 561933 - protein, 13 aa, Homo sapiens
  CDR3 for alpha chain variable domain of TCR clone 280967 (TRAV1-2, TRAJ9)
CAALNTGGFTTIF

SEQ ID NO: 561934 - protein, 13 aa, Homo sapiens
  CDR3 for beta chain variable domain of TCR clone 280967 (TRBV11-2, TRBJ2-5)
CASSRGPSETQYF

SEQ ID NO: 561935 - protein, 15 aa, Homo sapiens
  CDR3 for alpha chain variable domain of TCR clone 280968 (TRAV12-2, TRAJ53)
CAVNGGGGSNYKLTF

SEQ ID NO: 561936 - protein, 17 aa, Homo sapiens
  CDR3 for beta chain variable domain of TCR clone 280968 (TRBV7-3, TRBJ2-3)
CAISLMKRMRGADTQYF

SEQ ID NO: 561937 - protein, 14 aa, Homo sapiens
  CDR3 for alpha chain variable domain of TCR clone 280969 (TRAV1-1, TRAJ27)
CAVIYNTNAGKSTF

SEQ ID NO: 561938 - protein, 15 aa, Homo sapiens
  CDR3 for beta chain variable domain of TCR clone 280969 (TRBV7-2, TRBJ2-1)
CASSSGLAGGNEPFF

SEQ ID NO: 561939 - protein, 20 aa, Homo sapiens
  CDR3 for alpha chain variable domain of TCR clone 280970 (TRAV25, TRAJ21)
TATQTTDVGTYPLSFNKFYF

SEQ ID NO: 561940 - protein, 15 aa, Homo sapiens
  CDR3 for beta chain variable domain of TCR clone 280970 (TRBV10-3, TRBJ2-3)
CAISLTSGGTDTQYF

SEQ ID NO: 561941 - protein, 13 aa, Homo sapiens
  CDR3 for alpha chain variable domain of TCR clone 280971 (TRAV19, TRAJ57)
CALLQGGSEKLVF

SEQ ID NO: 561942 - protein, 14 aa, Homo sapiens
  CDR3 for beta chain variable domain of TCR clone 280971 (TRBV7-9, TRBJ2-7)
CASSLSQGSYEQYF

SEQ ID NO: 561943 - protein, 12 aa, Homo sapiens
  CDR3 for alpha chain variable domain of TCR clone 280972 (TRAV27, TRAJ9)
CAGESGGFKTIF

SEQ ID NO: 561944 - protein, 14 aa, Homo sapiens
  CDR3 for beta chain variable domain of TCR clone 280972 (TRBV7-8, TRBJ2-3)
CASSLEAGTDTQYF

SEQ ID NO: 561945 - protein, 14 aa, Homo sapiens
  CDR3 for alpha chain variable domain of TCR clone 280973 (TRAV29/DV5, TRAJ36)
CAARRKTGANNLFF

SEQ ID NO: 561946 - protein, 14 aa, Homo sapiens
  CDR3 for beta chain variable domain of TCR clone 280973 (TRBV10-3, TRBJ1-1)
CAISDGSGVTEAFF

SEQ ID NO: 561947 - protein, 14 aa, Homo sapiens
  CDR3 for alpha chain variable domain of TCR clone 280974 (TRAV13-2, TRAJ15)
CAENPNQAGTALIF

SEQ ID NO: 561948 - protein, 14 aa, Homo sapiens
  CDR3 for beta chain variable domain of TCR clone 280974 (TRBV6-3, TRBJ2-2)
CASSSTSNTGELFF

SEQ ID NO: 561949 - protein, 16 aa, Homo sapiens
  CDR3 for alpha chain variable domain of TCR clone 280975 (TRAV14/DV4, TRAJ54)
CAMREGRIQGAQKLVF

SEQ ID NO: 561950 - protein, 14 aa, Homo sapiens
  CDR3 for beta chain variable domain of TCR clone 280975 (TRBV6-1, TRBJ2-7)
CASTRTGDYYEQYF

SEQ ID NO: 561951 - protein, 12 aa, Homo sapiens
  CDR3 for alpha chain variable domain of TCR clone 280976 (TRAV3, TRAJ43)
CAVRDPNNDMRF

SEQ ID NO: 561952 - protein, 14 aa, Homo sapiens
  CDR3 for beta chain variable domain of TCR clone 280976 (TRBV4-2, TRBJ2-3)
CASSQPVLTDTQYF

SEQ ID NO: 561953 - protein, 14 aa, Homo sapiens
  CDR3 for alpha chain variable domain of TCR clone 280977 (TRAV29/DV5, TRAJ28)
CAARAGAGSYQLPF

SEQ ID NO: 561954 - protein, 13 aa, Homo sapiens
  CDR3 for beta chain variable domain of TCR clone 280977 (TRBV7-2, TRBJ1-5)
CASSFARNQPQHF

SEQ ID NO: 561955 - protein, 19 aa, Homo sapiens
  CDR3 for alpha chain variable domain of TCR clone 280978 (TRAV26-1, TRAJ44)
CCVLFIVRANTGTASKLTF

SEQ ID NO: 561956 - protein, 16 aa, Homo sapiens
  CDR3 for beta chain variable domain of TCR clone 280978 (TRBV7-7, TRBJ2-1)
CASSLASGTAYNEQFF

SEQ ID NO: 561957 - protein, 17 aa, Homo sapiens
  CDR3 for alpha chain variable domain of TCR clone 280979 (TRAV17, TRAJ52)
CATERPSGGTSYGKLTF

SEQ ID NO: 561958 - protein, 13 aa, Homo sapiens
  CDR3 for beta chain variable domain of TCR clone 280979 (TRBV7-9, TRBJ1-2)
CASSLKQNDGYTF

SEQ ID NO: 561959 - protein, 18 aa, Homo sapiens
  CDR3 for alpha chain variable domain of TCR clone 280980 (TRAV26-1, TRAJ23)
CIVRVGLEVWNQGGKLIF

SEQ ID NO: 561960 - protein, 14 aa, Homo sapiens
  CDR3 for beta chain variable domain of TCR clone 280980 (TRBV7-6, TRBJ2-3)
SASSLGTVTDTQYF

SEQ ID NO: 561961 - protein, 14 aa, Homo sapiens
  CDR3 for alpha chain variable domain of TCR clone 280981 (TRAV1-2, TRAJ28)
CAPPDGAGSYQLTF

SEQ ID NO: 561962 - protein, 14 aa, Homo sapiens
  CDR3 for beta chain variable domain of TCR clone 280981 (TRBV7-2, TRBJ2-7)
CASRSQGAAYEQYF

SEQ ID NO: 561963 - protein, 11 aa, Homo sapiens
  CDR3 for alpha chain variable domain of TCR clone 280982 (TRAV3, TRAJ21)
CAVGNFNKFYF

SEQ ID NO: 561964 - protein, 14 aa, Homo sapiens
  CDR3 for beta chain variable domain of TCR clone 280982 (TRBV18, TRBJ1-2)
CASSPDRVVYGYTF

SEQ ID NO: 561965 - protein, 15 aa, Homo sapiens
  CDR3 for alpha chain variable domain of TCR clone 280983 (TRAV3, TRAJ13)
CAVRVYSGGYQKVTF

SEQ ID NO: 561966 - protein, 15 aa, Homo sapiens
  CDR3 for beta chain variable domain of TCR clone 280983 (TRBV9, TRBJ1-6)
CASSVAGTGDSPLHF

SEQ ID NO: 561967 - protein, 12 aa, Homo sapiens
  CDR3 for alpha chain variable domain of TCR clone 280984 (TRAV29/DV5, TRAJ49)
CAATDTGNQFYF

SEQ ID NO: 561968 - protein, 17 aa, Homo sapiens
  CDR3 for beta chain variable domain of TCR clone 280984 (TRBV20-1, TRBJ2-1)
CSASSSGLAGSYNEQFF

SEQ ID NO: 561969 - protein, 18 aa, Homo sapiens
  CDR3 for alpha chain variable domain of TCR clone 280985 (TRAV21, TRAJ52)
CAVRPSPAGGTSYGKLTF

SEQ ID NO: 561970 - protein, 19 aa, Homo sapiens
  CDR3 for beta chain variable domain of TCR clone 280985 (TRBV4-1, TRBJ1-4)
CASGQEGPRGVRKNCFLAV

SEQ ID NO: 561971 - protein, 16 aa, Homo sapiens
  CDR3 for alpha chain variable domain of TCR clone 280986 (TRAV12-1, TRAJ43)
CVVNPHRFGAGTRLTV

SEQ ID NO: 561972 - protein, 18 aa, Homo sapiens
  CDR3 for beta chain variable domain of TCR clone 280986 (TRBV7-9, TRBJ2-7)
CASSLTTSGSRTWYEQYF

SEQ ID NO: 561973 - protein, 12 aa, Homo sapiens
  CDR3 for alpha chain variable domain of TCR clone 280987 (TRAV1-1, TRAJ39)
CAVPVVGNMLTF

SEQ ID NO: 561974 - protein, 15 aa, Homo sapiens
  CDR3 for beta chain variable domain of TCR clone 280987 (TRBV7-3, TRBJ2-2)
CASSETGQGTGELFS

SEQ ID NO: 561975 - protein, 14 aa, Homo sapiens
  CDR3 for alpha chain variable domain of TCR clone 280988 (TRAV12-2, TRAJ13)
CAVRKTGGYQKVTF

SEQ ID NO: 561976 - protein, 16 aa, Homo sapiens
  CDR3 for beta chain variable domain of TCR clone 280988 (TRBV6-5, TRBJ2-1)
CASSETLAGHYNEQFF

SEQ ID NO: 561977 - protein, 16 aa, Homo sapiens
  CDR3 for alpha chain variable domain of TCR clone 280989 (TRAV3, TRAJ18)
CAVRDGRGSTLGRLYV

SEQ ID NO: 561978 - protein, 16 aa, Homo sapiens
  CDR3 for beta chain variable domain of TCR clone 280989 (TRBV12-4, TRBJ2-1)
CASSAVGQGNGDEQFF

SEQ ID NO: 561979 - protein, 14 aa, Homo sapiens
  CDR3 for alpha chain variable domain of TCR clone 280990 (TRAV20, TRAJ4)
CAVRLGGGYNKLIF

SEQ ID NO: 561980 - protein, 21 aa, Homo sapiens
  CDR3 for beta chain variable domain of TCR clone 280990 (TRBV15, TRBJ2-1)
AWGTQPCTCVPPAEVDTALFF

SEQ ID NO: 561981 - protein, 16 aa, Homo sapiens
  CDR3 for alpha chain variable domain of TCR clone 280991 (TRAV30, TRAJ24)
CGTEIVDADSWGKFQF

SEQ ID NO: 561982 - protein, 14 aa, Homo sapiens
  CDR3 for beta chain variable domain of TCR clone 280991 (TRBV7-2, TRBJ2-7)
CASSFLGRVYEQYF

SEQ ID NO: 561983 - protein, 12 aa, Homo sapiens
  CDR3 for alpha chain variable domain of TCR clone 280992 (TRAV12-3, TRAJ5)
CAMDTGRRALTF

SEQ ID NO: 561984 - protein, 14 aa, Homo sapiens
  CDR3 for beta chain variable domain of TCR clone 280992 (TRBV7-2, TRBJ2-7)
CASSPKTSFYEQYF

SEQ ID NO: 561985 - protein, 16 aa, Homo sapiens
  CDR3 for alpha chain variable domain of TCR clone 280993 (TRAV12-1, TRAJ22)
CVVNLFLDRSARQLTF

SEQ ID NO: 561986 - protein, 13 aa, Homo sapiens
  CDR3 for beta chain variable domain of TCR clone 280993 (TRBV19, TRBJ1-3)
CASRLSLGNTIYF

SEQ ID NO: 561987 - protein, 14 aa, Homo sapiens
  CDR3 for alpha chain variable domain of TCR clone 280994 (TRAV38-1, TRAJ28)
CAFTSGAGSYQLTF

SEQ ID NO: 561988 - protein, 18 aa, Homo sapiens
  CDR3 for beta chain variable domain of TCR clone 280994 (TRBV7-9, TRBJ1-1)
CASSKPWETMGMNTEAFF

SEQ ID NO: 561989 - protein, 15 aa, Homo sapiens
  CDR3 for alpha chain variable domain of TCR clone 280995 (TRAV12-3, TRAJ6)
CAMSATTGGSYLPTF

SEQ ID NO: 561990 - protein, 13 aa, Homo sapiens
  CDR3 for beta chain variable domain of TCR clone 280995 (TRBV7-9, TRBJ1-2)
CASSLKQNYGYTF

SEQ ID NO: 561991 - protein, 14 aa, Homo sapiens
  CDR3 for alpha chain variable domain of TCR clone 280996 (TRAV1-2, TRAJ8)
CAVREDTGFQKLVF

SEQ ID NO: 561992 - protein, 16 aa, Homo sapiens
  CDR3 for beta chain variable domain of TCR clone 280996 (TRBV5-1, TRBJ1-1)
YASSSGGNSLNTEAFF

SEQ ID NO: 561993 - protein, 14 aa, Homo sapiens
  CDR3 for alpha chain variable domain of TCR clone 280997 (TRAV26-1, TRAJ34)
CIVRVAYNTDKLIF

SEQ ID NO: 561994 - protein, 13 aa, Homo sapiens
  CDR3 for beta chain variable domain of TCR clone 280997 (TRBV4-2, TRBJ1-1)
CASSQAGNTEAVF

SEQ ID NO: 561995 - protein, 12 aa, Homo sapiens
  CDR3 for alpha chain variable domain of TCR clone 280998 (TRAV12-3, TRAJ17)
CPMTLTGNKLTF

SEQ ID NO: 561996 - protein, 13 aa, Homo sapiens
  CDR3 for beta chain variable domain of TCR clone 280998 (TRBV27, TRBJ2-1)
CASRTLGVGEQFF

SEQ ID NO: 561997 - protein, 12 aa, Homo sapiens
  CDR3 for alpha chain variable domain of TCR clone 280999 (TRAV13-2, TRAJ23)
CAERQRGGKLIF

SEQ ID NO: 561998 - protein, 15 aa, Homo sapiens
  CDR3 for beta chain variable domain of TCR clone 280999 (TRBV7-9, TRBJ1-6)
CASSSPGRGNSPLHF

SEQ ID NO: 561999 - protein, 14 aa, Homo sapiens
  CDR3 for alpha chain variable domain of TCR clone 281000 (TRAV2, TRAJ3)
CAVPPYSSASKIIF

SEQ ID NO: 562000 - protein, 15 aa, Homo sapiens
  CDR3 for beta chain variable domain of TCR clone 281000 (TRBV7-3, TRBJ2-1)
CASSPTGGGEVEQFF

SEQ ID NO: 562001 - protein, 12 aa, Homo sapiens
  CDR3 for alpha chain variable domain of TCR clone 281001 (TRAV13-1, TRAJ48)
CAANFGNEKLTF

SEQ ID NO: 562002 - protein, 16 aa, Homo sapiens
  CDR3 for beta chain variable domain of TCR clone 281001 (TRBV7-9, TRBJ2-3)
CASSFSVAGGTDTQYF

SEQ ID NO: 562003 - protein, 15 aa, Homo sapiens
  CDR3 for alpha chain variable domain of TCR clone 281002 (TRAV26-1, TRAJ22)
CIVRVSFWFCKATDL

SEQ ID NO: 562004 - protein, 17 aa, Homo sapiens
  CDR3 for beta chain variable domain of TCR clone 281002 (TRBV4-1, TRBJ1-3)
CASSPQRGIRFGNTIYF

SEQ ID NO: 562005 - protein, 11 aa, Homo sapiens
  CDR3 for alpha chain variable domain of TCR clone 281003 (TRAV1-1, TRAJ23)
FAVRQGGKLIF

SEQ ID NO: 562006 - protein, 13 aa, Homo sapiens
  CDR3 for beta chain variable domain of TCR clone 281003 (TRBV12-5, TRBJ2-3)
CASGDRQSDTQYF

SEQ ID NO: 562007 - protein, 15 aa, Homo sapiens
  CDR3 for alpha chain variable domain of TCR clone 281004 (TRAV3, TRAJ22)
CAVRDRGGSARQLTF

SEQ ID NO: 562008 - protein, 15 aa, Homo sapiens
  CDR3 for beta chain variable domain of TCR clone 281004 (TRBV19, TRBJ2-5)
CASGIVRASQETQYF

SEQ ID NO: 562009 - protein, 12 aa, Homo sapiens
  CDR3 for alpha chain variable domain of TCR clone 281005 (TRAV17, TRAJ36)
CATLSGANNLFF

SEQ ID NO: 562010 - protein, 15 aa, Homo sapiens
  CDR3 for beta chain variable domain of TCR clone 281005 (TRBV19, TRBJ1-2)
CASSTKTDTNYGYTF

SEQ ID NO: 562011 - protein, 16 aa, Homo sapiens
  CDR3 for alpha chain variable domain of TCR clone 281006 (TRAV12-3, TRAJ53)
CAMSPGSGGSNYELTF

SEQ ID NO: 562012 - protein, 11 aa, Homo sapiens
  CDR3 for beta chain variable domain of TCR clone 281006 (TRBV29-1, TRBJ2-5)
CSEDRTVTQYF

SEQ ID NO: 562013 - protein, 12 aa, Homo sapiens
  CDR3 for alpha chain variable domain of TCR clone 281007 (TRAV38-2/DV8, TRAJ57)
CAWKGGSEKLVF

SEQ ID NO: 562014 - protein, 13 aa, Homo sapiens
  CDR3 for beta chain variable domain of TCR clone 281007 (TRBV5-1, TRBJ1-5)
CASSVAQDQPQHF

SEQ ID NO: 562015 - protein, 15 aa, Homo sapiens
  CDR3 for alpha chain variable domain of TCR clone 281008 (TRAV3, TRAJ5)
CAVRDLYTGRRALTF

SEQ ID NO: 562016 - protein, 16 aa, Homo sapiens
  CDR3 for beta chain variable domain of TCR clone 281008 (TRBV20-1, TRBJ1-4)
CSSPGQGLLTNEKLFF

SEQ ID NO: 562017 - protein, 18 aa, Homo sapiens
  CDR3 for alpha chain variable domain of TCR clone 281009 (TRAV13-1, TRAJ52)
CAAKNTNAGCTSYGKLTF

SEQ ID NO: 562018 - protein, 15 aa, Homo sapiens
  CDR3 for beta chain variable domain of TCR clone 281009 (TRBV6-1, TRBJ2-3)
CASSERGGITDTQYF

SEQ ID NO: 562019 - protein, 15 aa, Homo sapiens
  CDR3 for alpha chain variable domain of TCR clone 281010 (TRAV35, TRAJ40)
CAGQLGTSGTYKFIF

SEQ ID NO: 562020 - protein, 14 aa, Homo sapiens
  CDR3 for beta chain variable domain of TCR clone 281010 (TRBV7-3, TRBJ2-1)
CASSLAGGTNEQFF

SEQ ID NO: 562021 - protein, 15 aa, Homo sapiens
  CDR3 for alpha chain variable domain of TCR clone 281011 (TRAV21, TRAJ53)
CATLNSGGSNYKLTF

SEQ ID NO: 562022 - protein, 13 aa, Homo sapiens
  CDR3 for beta chain variable domain of TCR clone 281011 (TRBV7-2, TRBJ2-7)
CASSSHSGSEQYF

SEQ ID NO: 562023 - protein, 12 aa, Homo sapiens
  CDR3 for alpha chain variable domain of TCR clone 281012 (TRAV2, TRAJ34)
CAVERNTDKLIF

SEQ ID NO: 562024 - protein, 20 aa, Homo sapiens
  CDR3 for beta chain variable domain of TCR clone 281012 (TRBV7-2, TRBJ2-5)
CASSFLRGGGRDPVLWARHA

SEQ ID NO: 562025 - protein, 12 aa, Homo sapiens
  CDR3 for alpha chain variable domain of TCR clone 281013 (TRAV12-2, TRAJ34)
CAVNFFTDKLIF

SEQ ID NO: 562026 - protein, 15 aa, Homo sapiens
  CDR3 for beta chain variable domain of TCR clone 281013 (TRBV4-3, TRBJ1-1)
CASSQELGRGTEAFF

SEQ ID NO: 562027 - protein, 14 aa, Homo sapiens
  CDR3 for alpha chain variable domain of TCR clone 281014 (TRAV12-3, TRAJ54)
CAMRGIQGAQKLVF

SEQ ID NO: 562028 - protein, 16 aa, Homo sapiens
  CDR3 for beta chain variable domain of TCR clone 281014 (TRBV11-1, TRBJ1-1)
CASSPRGAHMNSEAFF

SEQ ID NO: 562029 - protein, 14 aa, Homo sapiens
  CDR3 for alpha chain variable domain of TCR clone 281015 (TRAV12-2, TRAJ53)
CAVKGGGSNYKLTF

SEQ ID NO: 562030 - protein, 17 aa, Homo sapiens
  CDR3 for beta chain variable domain of TCR clone 281015 (TRBV11-2, TRBJ2-6)
CASSQRDIFSGANVLTF

SEQ ID NO: 562031 - protein, 13 aa, Homo sapiens
  CDR3 for alpha chain variable domain of TCR clone 281016 (TRAV13-1, TRAJ12)
CAASPDSSYKLIF

SEQ ID NO: 562032 - protein, 16 aa, Homo sapiens
  CDR3 for beta chain variable domain of TCR clone 281016 (TRBV15, TRBJ2-1)
CATSREGLAGAYEQFF

SEQ ID NO: 562033 - protein, 16 aa, Homo sapiens
  CDR3 for alpha chain variable domain of TCR clone 281017 (TRAV17, TRAJ9)
CATGAWGGTGGFKTLF

SEQ ID NO: 562034 - protein, 12 aa, Homo sapiens
  CDR3 for beta chain variable domain of TCR clone 281017 (TRBV11-2, TRBJ2-1)
CASSPGNNEQFF

SEQ ID NO: 562035 - protein, 16 aa, Homo sapiens
  CDR3 for alpha chain variable domain of TCR clone 281018 (TRAV26-1, TRAJ36)
CIVRVPDQTGANNLFF

SEQ ID NO: 562036 - protein, 17 aa, Homo sapiens
  CDR3 for beta chain variable domain of TCR clone 281018 (TRBV19, TRBJ2-6)
CASSTGQVFSGANVLTF

SEQ ID NO: 562037 - protein, 16 aa, Homo sapiens
  CDR3 for alpha chain variable domain of TCR clone 281019 (TRAV12-3, TRAJ53)
CVMRPGSGGSNYKLTF

SEQ ID NO: 562038 - protein, 11 aa, Homo sapiens
  CDR3 for beta chain variable domain of TCR clone 281019 (TRBV29-1, TRBJ2-5)
CSEDRTGTQYF

SEQ ID NO: 562039 - protein, 14 aa, Homo sapiens
  CDR3 for alpha chain variable domain of TCR clone 281020 (TRAV1-2, TRAJ8)
CAVREDTGFQKFVF

SEQ ID NO: 562040 - protein, 19 aa, Homo sapiens
  CDR3 for beta chain variable domain of TCR clone 281020 (TRBV14, TRBJ2-1)
CASSQDQLWEAPEYNEQFF

SEQ ID NO: 562041 - protein, 13 aa, Homo sapiens
  CDR3 for alpha chain variable domain of TCR clone 281021 (TRAV27, TRAJ6)
CAGGTRGSYIPTF

SEQ ID NO: 562042 - protein, 16 aa, Homo sapiens
  CDR3 for beta chain variable domain of TCR clone 281021 (TRBV10-3, TRBJ2-1)
CAISGVGDGGGGEQFF

SEQ ID NO: 562043 - protein, 14 aa, Homo sapiens
  CDR3 for alpha chain variable domain of TCR clone 281022 (TRAV35, TRAJ33)
CAGSSQDSNYQLIW

SEQ ID NO: 562044 - protein, 15 aa, Homo sapiens
  CDR3 for beta chain variable domain of TCR clone 281022 (TRBV5-1, TRBJ1-4)
CAPAAWKDGNEKLFF

SEQ ID NO: 562045 - protein, 11 aa, Homo sapiens
  CDR3 for alpha chain variable domain of TCR clone 281023 (TRAV12-2, TRAJ26)
CAVNNGQNFVF

SEQ ID NO: 562046 - protein, 11 aa, Homo sapiens
  CDR3 for beta chain variable domain of TCR clone 281023 (TRBV12-4, TRBJ2-5)
CARSFQGAQYF

SEQ ID NO: 562047 - protein, 15 aa, Homo sapiens
  CDR3 for alpha chain variable domain of TCR clone 281024 (TRAV26-1, TRAJ29)
CIVRVEGSGNTPLVF

SEQ ID NO: 562048 - protein, 15 aa, Homo sapiens
  CDR3 for beta chain variable domain of TCR clone 281024 (TRBV7-9, TRBJ1-5)
CASSQGHPPNQPPHF

SEQ ID NO: 562049 - protein, 11 aa, Homo sapiens
  CDR3 for alpha chain variable domain of TCR clone 281025 (TRAV2, TRAJ13)
CASGGYQNVTF

SEQ ID NO: 562050 - protein, 12 aa, Homo sapiens
  CDR3 for beta chain variable domain of TCR clone 281025 (TRBV7-8, TRBJ2-7)
CASSLGDREQYF

SEQ ID NO: 562051 - protein, 12 aa, Homo sapiens
  CDR3 for alpha chain variable domain of TCR clone 281026 (TRAV2, TRAJ10)
CASTGGGNKLTF

SEQ ID NO: 562052 - protein, 16 aa, Homo sapiens
  CDR3 for beta chain variable domain of TCR clone 281026 (TRBV5-1, TRBJ2-2)
CASSLWDTTNTGELFF

SEQ ID NO: 562053 - protein, 14 aa, Homo sapiens
  CDR3 for alpha chain variable domain of TCR clone 281027 (TRAV13-1, TRAJ35)
CAASKGGFGNVMHC

SEQ ID NO: 562054 - protein, 13 aa, Homo sapiens
  CDR3 for beta chain variable domain of TCR clone 281027 (TRBV7-3, TRBJ1-1)
CASSQDWGAEASF

SEQ ID NO: 562055 - protein, 14 aa, Homo sapiens
  CDR3 for alpha chain variable domain of TCR clone 281028 (TRAV27, TRAJ36)
CAGPPKRGANNLFF

SEQ ID NO: 562056 - protein, 15 aa, Homo sapiens
  CDR3 for beta chain variable domain of TCR clone 281028 (TRBV18, TRBJ2-7)
CASSPASTPNDEQYF

SEQ ID NO: 562057 - protein, 11 aa, Homo sapiens
  CDR3 for alpha chain variable domain of TCR clone 281029 (TRAV4, TRAJ23)
CLVAPGGKLIF

SEQ ID NO: 562058 - protein, 15 aa, Homo sapiens
  CDR3 for beta chain variable domain of TCR clone 281029 (TRBV7-2, TRBJ2-1)
CASSFQADEYNEQWF

SEQ ID NO: 562059 - protein, 15 aa, Homo sapiens
  CDR3 for alpha chain variable domain of TCR clone 281030 (TRAV26-1, TRAJ12)
CIVRVQMDSSYKLIF

SEQ ID NO: 562060 - protein, 14 aa, Homo sapiens
  CDR3 for beta chain variable domain of TCR clone 281030 (TRBV7-2, TRBJ2-7)
CASSPKTSFYEQYF

SEQ ID NO: 562061 - protein, 15 aa, Homo sapiens
  CDR3 for alpha chain variable domain of TCR clone 281031 (TRAV26-1, TRAJ40)
CIVRVTTSGTYKYIS

SEQ ID NO: 562062 - protein, 12 aa, Homo sapiens
  CDR3 for beta chain variable domain of TCR clone 281031 (TRBV7-9, TRBJ1-4)
CASSTDREKLFF

SEQ ID NO: 562063 - protein, 14 aa, Homo sapiens
  CDR3 for alpha chain variable domain of TCR clone 281032 (TRAV12-3, TRAJ10)
SHLPLTGGGNKITF

SEQ ID NO: 562064 - protein, 13 aa, Homo sapiens
  CDR3 for beta chain variable domain of TCR clone 281032 (TRBV4-1, TRBJ2-2)
CASSQENTGELFF

SEQ ID NO: 562065 - protein, 12 aa, Homo sapiens
  CDR3 for alpha chain variable domain of TCR clone 281033 (TRAV8-6, TRAJ4)
CAVSDHPNKLIF

SEQ ID NO: 562066 - protein, 14 aa, Homo sapiens
  CDR3 for beta chain variable domain of TCR clone 281033 (TRBV7-2, TRBJ1-1)
CASSFLTGTTEAFF

SEQ ID NO: 562067 - protein, 14 aa, Homo sapiens
  CDR3 for alpha chain variable domain of TCR clone 281034 (TRAV27, TRAJ22)
CAGLPSGSARQLTF

SEQ ID NO: 562068 - protein, 16 aa, Homo sapiens
  CDR3 for beta chain variable domain of TCR clone 281034 (TRBV7-3, TRBJ2-2)
CASRLKRGTLSGGLFF

SEQ ID NO: 562069 - protein, 14 aa, Homo sapiens
  CDR3 for alpha chain variable domain of TCR clone 281035 (TRAV12-2, TRAJ6)
CVPLRPGGSYIPTF

SEQ ID NO: 562070 - protein, 16 aa, Homo sapiens
  CDR3 for beta chain variable domain of TCR clone 281035 (TRBV12-4, TRBJ2-5)
CASSFFVRGRQETQYF

SEQ ID NO: 562071 - protein, 14 aa, Homo sapiens
  CDR3 for alpha chain variable domain of TCR clone 281036 (TRAV12-2, TRAJ13)
CAVKKTGGYQKVTF

SEQ ID NO: 562072 - protein, 15 aa, Homo sapiens
  CDR3 for beta chain variable domain of TCR clone 281036 (TRBV6-3, TRBJ2-7)
CASSSPGTVFYEQYC

SEQ ID NO: 562073 - protein, 12 aa, Homo sapiens
  CDR3 for alpha chain variable domain of TCR clone 281037 (TRAV12-3, TRAJ3)
CAIDSGASKIIF

SEQ ID NO: 562074 - protein, 17 aa, Homo sapiens
  CDR3 for beta chain variable domain of TCR clone 281037 (TRBV7-9, TRBJ2-3)
CASSLEEAGAYPDTQYF

SEQ ID NO: 562075 - protein, 15 aa, Homo sapiens
  CDR3 for alpha chain variable domain of TCR clone 281038 (TRAV20, TRAJ52)
CAVQAGGTSYGKLTF

SEQ ID NO: 562076 - protein, 14 aa, Homo sapiens
  CDR3 for beta chain variable domain of TCR clone 281038 (TRBV19, TRBJ2-1)
CASPTFVLSGEQFF

SEQ ID NO: 562077 - protein, 12 aa, Homo sapiens
  CDR3 for alpha chain variable domain of TCR clone 281039 (TRAV8-3, TRAJ20)
CAVDFNDYKLSF

SEQ ID NO: 562078 - protein, 13 aa, Homo sapiens
  CDR3 for beta chain variable domain of TCR clone 281039 (TRBV5-7, TRBJ2-3)
CASSSGRTDTQYF

SEQ ID NO: 562079 - protein, 11 aa, Homo sapiens
  CDR3 for alpha chain variable domain of TCR clone 281040 (TRAV23/DV6, TRAJ17)
CKWAAGNKLTF

SEQ ID NO: 562080 - protein, 17 aa, Homo sapiens
  CDR3 for beta chain variable domain of TCR clone 281040 (TRBV7-8, TRBJ2-6)
CASSAGTGGAGANVLTF

SEQ ID NO: 562081 - protein, 17 aa, Homo sapiens
  CDR3 for alpha chain variable domain of TCR clone 281041 (TRAV3, TRAJ42)
CAVRDLDYGVSQGNLIF

SEQ ID NO: 562082 - protein, 15 aa, Homo sapiens
  CDR3 for beta chain variable domain of TCR clone 281041 (TRBV6-6, TRBJ2-7)
CASSYSYGGSYEQYF

SEQ ID NO: 562083 - protein, 11 aa, Homo sapiens
  CDR3 for alpha chain variable domain of TCR clone 281042 (TRAV21, TRAJ48)
CAVDGNEKLTF

SEQ ID NO: 562084 - protein, 16 aa, Homo sapiens
  CDR3 for beta chain variable domain of TCR clone 281042 (TRBV12-4, TRBJ1-5)
CASSSGPKGSNQPKHF

SEQ ID NO: 562085 - protein, 14 aa, Homo sapiens
  CDR3 for alpha chain variable domain of TCR clone 281043 (TRAV35, TRAJ22)
CAGLRPGSARQLTF

SEQ ID NO: 562086 - protein, 15 aa, Homo sapiens
  CDR3 for beta chain variable domain of TCR clone 281043 (TRBV12-5, TRBJ2-2)
CASCRLGGNTGELFF

SEQ ID NO: 562087 - protein, 15 aa, Homo sapiens
  CDR3 for alpha chain variable domain of TCR clone 281044 (TRAV3, TRAJ22)
CAVRDRGGSARQLTF

SEQ ID NO: 562088 - protein, 13 aa, Homo sapiens
  CDR3 for beta chain variable domain of TCR clone 281044 (TRBV12-4, TRBJ1-2)
CASSLQQGKGYTF

SEQ ID NO: 562089 - protein, 14 aa, Homo sapiens
  CDR3 for alpha chain variable domain of TCR clone 281045 (TRAV21, TRAJ12)
CAVRNGDSSYKLIF

SEQ ID NO: 562090 - protein, 14 aa, Homo sapiens
  CDR3 for beta chain variable domain of TCR clone 281045 (TRBV7-6, TRBJ2-7)
CASSVTGTGNEQYF

SEQ ID NO: 562091 - protein, 16 aa, Homo sapiens
  CDR3 for alpha chain variable domain of TCR clone 281046 (TRAV3, TRAJ10)
CAVRDMRAGGGNKLTF

SEQ ID NO: 562092 - protein, 15 aa, Homo sapiens
  CDR3 for beta chain variable domain of TCR clone 281046 (TRBV11-2, TRBJ1-6)
SASTGFGTAVSPLHF

SEQ ID NO: 562093 - protein, 15 aa, Homo sapiens
  CDR3 for alpha chain variable domain of TCR clone 281047 (TRAV8-3, TRAJ7)
CAVGSISYGNNRLAF

SEQ ID NO: 562094 - protein, 13 aa, Homo sapiens
  CDR3 for beta chain variable domain of TCR clone 281047 (TRBV12-4, TRBJ1-5)
CASSPDRAQPQHF

SEQ ID NO: 562095 - protein, 15 aa, Homo sapiens
  CDR3 for alpha chain variable domain of TCR clone 281048 (TRAV3, TRAJ5)
CAVRDLDTGGRALTF

SEQ ID NO: 562096 - protein, 14 aa, Homo sapiens
  CDR3 for beta chain variable domain of TCR clone 281048 (TRBV25-1, TRBJ1-1)
CASTHLGGNTEAFF

SEQ ID NO: 562097 - protein, 11 aa, Homo sapiens
  CDR3 for alpha chain variable domain of TCR clone 281049 (TRAV12-3, TRAJ27)
CAMANAGKSTF

SEQ ID NO: 562098 - protein, 11 aa, Homo sapiens
  CDR3 for beta chain variable domain of TCR clone 281049 (TRBV6-1, TRBJ2-1)
CASISSNEQFF

SEQ ID NO: 562099 - protein, 14 aa, Homo sapiens
  CDR3 for alpha chain variable domain of TCR clone 281050 (TRAV12-1, TRAJ12)
CVVNGRDSSSKLIF

SEQ ID NO: 562100 - protein, 13 aa, Homo sapiens
  CDR3 for beta chain variable domain of TCR clone 281050 (TRBV28, TRBJ2-2)
CASIRESTGELFF

SEQ ID NO: 562101 - protein, 13 aa, Homo sapiens
  CDR3 for alpha chain variable domain of TCR clone 281051 (TRAV12-1, TRAJ16)
CVVNGPDGQKLLF

SEQ ID NO: 562102 - protein, 13 aa, Homo sapiens
  CDR3 for beta chain variable domain of TCR clone 281051 (TRBV2, TRBJ1-1)
CARNPTGGLHAVF

SEQ ID NO: 562103 - protein, 13 aa, Homo sapiens
  CDR3 for alpha chain variable domain of TCR clone 281052 (TRAV21, TRAJ15)
CAVANQAGTALIF

SEQ ID NO: 562104 - protein, 15 aa, Homo sapiens
  CDR3 for beta chain variable domain of TCR clone 281052 (TRBV6-5, TRBJ2-1)
CASSYDAGAGNEQFF

SEQ ID NO: 562105 - protein, 15 aa, Homo sapiens
  CDR3 for alpha chain variable domain of TCR clone 281053 (TRAV25, TRAJ52)
CAGRPGGTSYGTLTF

SEQ ID NO: 562106 - protein, 17 aa, Homo sapiens
  CDR3 for beta chain variable domain of TCR clone 281053 (TRBV7-8, TRBJ2-6)
CASSAGTGCAGANVLSF

SEQ ID NO: 562107 - protein, 12 aa, Homo sapiens
  CDR3 for alpha chain variable domain of TCR clone 281054 (TRAV12-2, TRAJ35)
CAVSGFGNVLHC

SEQ ID NO: 562108 - protein, 17 aa, Homo sapiens
  CDR3 for beta chain variable domain of TCR clone 281054 (TRBV28, TRBJ2-3)
CASSPTPAGGRVDTQYF

SEQ ID NO: 562109 - protein, 16 aa, Homo sapiens
  CDR3 for alpha chain variable domain of TCR clone 281055 (TRAV26-1, TRAJ32)
CIVRTNYGGATNKLIF

SEQ ID NO: 562110 - protein, 15 aa, Homo sapiens
  CDR3 for beta chain variable domain of TCR clone 281055 (TRBV11-3, TRBJ2-2)
CASSLGGRPTGELFF

SEQ ID NO: 562111 - protein, 12 aa, Homo sapiens
  CDR3 for alpha chain variable domain of TCR clone 281056 (TRAV12-1, TRAJ30)
CVVDPRDDKIIF

SEQ ID NO: 562112 - protein, 18 aa, Homo sapiens
  CDR3 for beta chain variable domain of TCR clone 281056 (TRBV5-1, TRBJ2-7)
CASSLAGFGGMSSYEQYF

SEQ ID NO: 562113 - protein, 14 aa, Homo sapiens
  CDR3 for alpha chain variable domain of TCR clone 281057 (TRAV12-2, TRAJ13)
CAVKKTGGYQKVTF

SEQ ID NO: 562114 - protein, 14 aa, Homo sapiens
  CDR3 for beta chain variable domain of TCR clone 281057 (TRBV28, TRBJ2-7)
CASSLLRISYEQYF

SEQ ID NO: 562115 - protein, 18 aa, Homo sapiens
  CDR3 for alpha chain variable domain of TCR clone 281058 (TRAV29/DV5, TRAJ52)
CAAGFRGAGGTSYGKLTF

SEQ ID NO: 562116 - protein, 16 aa, Homo sapiens
  CDR3 for beta chain variable domain of TCR clone 281058 (TRBV7-3, TRBJ2-2)
CASSLKRGILSGELFF

SEQ ID NO: 562117 - protein, 14 aa, Homo sapiens
  CDR3 for alpha chain variable domain of TCR clone 281059 (TRAV2, TRAJ20)
CAVEDGTNDYKLSF

SEQ ID NO: 562118 - protein, 13 aa, Homo sapiens
  CDR3 for beta chain variable domain of TCR clone 281059 (TRBV13, TRBJ2-1)
CASILGGRGEQFF

SEQ ID NO: 562119 - protein, 14 aa, Homo sapiens
  CDR3 for alpha chain variable domain of TCR clone 281060 (TRAV30, TRAJ33)
CGTVAPRSNYQLIW

SEQ ID NO: 562120 - protein, 17 aa, Homo sapiens
  CDR3 for beta chain variable domain of TCR clone 281060 (TRBV13, TRBJ2-3)
CASSLSRVAGGRNTQYV

SEQ ID NO: 562121 - protein, 15 aa, Homo sapiens
  CDR3 for alpha chain variable domain of TCR clone 281061 (TRAV12-2, TRAJ13)
CRVSLGSGGYQKVTF

SEQ ID NO: 562122 - protein, 15 aa, Homo sapiens
  CDR3 for beta chain variable domain of TCR clone 281061 (TRBV6-5, TRBJ2-1)
CASRRAQLSYNEQFF

SEQ ID NO: 562123 - protein, 18 aa, Homo sapiens
  CDR3 for alpha chain variable domain of TCR clone 281062 (TRAV12-3, TRAJ52)
CAMSVGGAGGTSYGKLTF

SEQ ID NO: 562124 - protein, 16 aa, Homo sapiens
  CDR3 for beta chain variable domain of TCR clone 281062 (TRBV7-2, TRBJ1-2)
CASSSNQDRRGHGYTF

SEQ ID NO: 562125 - protein, 11 aa, Homo sapiens
  CDR3 for alpha chain variable domain of TCR clone 281063 (TRAV26-1, TRAJ37)
CIVRVGRKLIF

SEQ ID NO: 562126 - protein, 13 aa, Homo sapiens
  CDR3 for beta chain variable domain of TCR clone 281063 (TRBV12-4, TRBJ2-7)
CASSPTETYEQDF

SEQ ID NO: 562127 - protein, 13 aa, Homo sapiens
  CDR3 for alpha chain variable domain of TCR clone 281064 (TRAV17, TRAJ9)
CATDGTGGFKTIF

SEQ ID NO: 562128 - protein, 17 aa, Homo sapiens
  CDR3 for beta chain variable domain of TCR clone 281064 (TRBV11-2, TRBJ2-1)
CASSLYPPGVEYNEQFF

SEQ ID NO: 562129 - protein, 16 aa, Homo sapiens
  CDR3 for alpha chain variable domain of TCR clone 281065 (TRAV12-2, TRAJ32)
CAVNLGQGGATNKLIF

SEQ ID NO: 562130 - protein, 16 aa, Homo sapiens
  CDR3 for beta chain variable domain of TCR clone 281065 (TRBV13, TRBJ2-2)
CASSPRTGEHTGELFF

SEQ ID NO: 562131 - protein, 15 aa, Homo sapiens
  CDR3 for alpha chain variable domain of TCR clone 281066 (TRAV23/DV6, TRAJ18)
CAARYRGSTLGRLYF

SEQ ID NO: 562132 - protein, 13 aa, Homo sapiens
  CDR3 for beta chain variable domain of TCR clone 281066 (TRBV4-1, TRBJ2-2)
CASSQENTGELFF

SEQ ID NO: 562133 - protein, 14 aa, Homo sapiens
  CDR3 for alpha chain variable domain of TCR clone 281067 (TRAV13-1, TRAJ45)
FAAIGGGGADGLTF

SEQ ID NO: 562134 - protein, 16 aa, Homo sapiens
  CDR3 for beta chain variable domain of TCR clone 281067 (TRBV7-2, TRBJ1-1)
CASSLGAGWTNTEAFF

SEQ ID NO: 562135 - protein, 13 aa, Homo sapiens
  CDR3 for alpha chain variable domain of TCR clone 281068 (TRAV12-1, TRAJ13)
CVVTSGGYQKVTF

SEQ ID NO: 562136 - protein, 14 aa, Homo sapiens
  CDR3 for beta chain variable domain of TCR clone 281068 (TRBV27, TRBJ2-1)
CASSAAGGYNEQFF

SEQ ID NO: 562137 - protein, 16 aa, Homo sapiens
  CDR3 for alpha chain variable domain of TCR clone 281069 (TRAV2, TRAJ23)
CVGGKLIFGQGTELSV

SEQ ID NO: 562138 - protein, 20 aa, Homo sapiens
  CDR3 for beta chain variable domain of TCR clone 281069 (TRBV20-1, TRBJ2-5)
CSARAGLAGRLAGHFETQYF

SEQ ID NO: 562139 - protein, 16 aa, Homo sapiens
  CDR3 for alpha chain variable domain of TCR clone 281070 (TRAV30, TRAJ24)
CGTEIVDADSWGKFQF

SEQ ID NO: 562140 - protein, 12 aa, Homo sapiens
  CDR3 for beta chain variable domain of TCR clone 281070 (TRBV11-2, TRBJ2-1)
CASSVQREGQFF

SEQ ID NO: 562141 - protein, 18 aa, Homo sapiens
  CDR3 for alpha chain variable domain of TCR clone 281071 (TRAV12-3, TRAJ52)
CAMSRTNAGGTNYGKLTF

SEQ ID NO: 562142 - protein, 17 aa, Homo sapiens
  CDR3 for beta chain variable domain of TCR clone 281071 (TRBV7-3, TRBJ2-3)
CASSLMKRMRGAYTQYF

SEQ ID NO: 562143 - protein, 15 aa, Homo sapiens
  CDR3 for alpha chain variable domain of TCR clone 281072 (TRAV12-1, TRAJ6)
CVVNCPLRRKLHTYI

SEQ ID NO: 562144 - protein, 16 aa, Homo sapiens
  CDR3 for beta chain variable domain of TCR clone 281072 (TRBV19, TRBJ2-1)
CASSKAGPSSYNEQFF

SEQ ID NO: 562145 - protein, 13 aa, Homo sapiens
  CDR3 for alpha chain variable domain of TCR clone 281073 (TRAV29/DV5, TRAJ49)
CAASTNTGNQFYF

SEQ ID NO: 562146 - protein, 12 aa, Homo sapiens
  CDR3 for beta chain variable domain of TCR clone 281073 (TRBV12-5, TRBJ2-5)
CASGQGVETQYF

SEQ ID NO: 562147 - protein, 15 aa, Homo sapiens
  CDR3 for alpha chain variable domain of TCR clone 281074 (TRAV8-2, TRAJ40)
CVVWGTTSGTYKYIF

SEQ ID NO: 562148 - protein, 16 aa, Homo sapiens
  CDR3 for beta chain variable domain of TCR clone 281074 (TRBV7-3, TRBJ2-1)
CASSLEGYRAYNEQFF

SEQ ID NO: 562149 - protein, 15 aa, Homo sapiens
  CDR3 for alpha chain variable domain of TCR clone 281075 (TRAV12-3, TRAJ49)
CAMAVTPNTGNQFYF

SEQ ID NO: 562150 - protein, 13 aa, Homo sapiens
  CDR3 for beta chain variable domain of TCR clone 281075 (TRBV7-3, TRBJ1-1)
CASSQDWGAEAFF

SEQ ID NO: 562151 - protein, 14 aa, Homo sapiens
  CDR3 for alpha chain variable domain of TCR clone 281076 (TRAV26-1, TRAJ38)
CIADNAGNNRKLIW

SEQ ID NO: 562152 - protein, 15 aa, Homo sapiens
  CDR3 for beta chain variable domain of TCR clone 281076 (TRBV25-1, TRBJ2-5)
CASSDTGTHQETQYF

SEQ ID NO: 562153 - protein, 18 aa, Homo sapiens
  CDR3 for alpha chain variable domain of TCR clone 281077 (TRAV21, TRAJ52)
CAVRPSPAGGTSYGKLTV

SEQ ID NO: 562154 - protein, 14 aa, Homo sapiens
  CDR3 for beta chain variable domain of TCR clone 281077 (TRBV20-1, TRBJ2-1)
CSAQIGGSANEQFF

SEQ ID NO: 562155 - protein, 16 aa, Homo sapiens
  CDR3 for alpha chain variable domain of TCR clone 281078 (TRAV1-1, TRAJ29)
CAVRSTRNSGNTPLVF

SEQ ID NO: 562156 - protein, 16 aa, Homo sapiens
  CDR3 for beta chain variable domain of TCR clone 281078 (TRBV11-1, TRBJ1-1)
CASSSRGRTGYTEAFF

SEQ ID NO: 562157 - protein, 12 aa, Homo sapiens
  CDR3 for alpha chain variable domain of TCR clone 281079 (TRAV25, TRAJ11)
CAGASGYSTLTF

SEQ ID NO: 562158 - protein, 14 aa, Homo sapiens
  CDR3 for beta chain variable domain of TCR clone 281079 (TRBV5-8, TRBJ2-3)
CASSLGQGTETQYF

SEQ ID NO: 562159 - protein, 15 aa, Homo sapiens
  CDR3 for alpha chain variable domain of TCR clone 281080 (TRAV21, TRAJ40)
CAVRPQTSGTYKYIF

SEQ ID NO: 562160 - protein, 13 aa, Homo sapiens
  CDR3 for beta chain variable domain of TCR clone 281080 (TRBV7-2, TRBJ2-2)
CANSSVRAGELFF

SEQ ID NO: 562161 - protein, 13 aa, Homo sapiens
  CDR3 for alpha chain variable domain of TCR clone 281081 (TRAV12-3, TRAJ33)
CAMSVNSNYQLIW

SEQ ID NO: 562162 - protein, 11 aa, Homo sapiens
  CDR3 for beta chain variable domain of TCR clone 281081 (TRBV7-3, TRBJ2-5)
CASTLSETQYF

SEQ ID NO: 562163 - protein, 14 aa, Homo sapiens
  CDR3 for alpha chain variable domain of TCR clone 281082 (TRAV8-3, TRAJ4)
CAVGSAGGYNKLIF

SEQ ID NO: 562164 - protein, 18 aa, Homo sapiens
  CDR3 for beta chain variable domain of TCR clone 281082 (TRBV6-5, TRBJ1-1)
CASSYSAPGGTGGTEAFF

SEQ ID NO: 562165 - protein, 16 aa, Homo sapiens
  CDR3 for alpha chain variable domain of TCR clone 281083 (TRAV38-1, TRAJ32)
CAFMKGGGGATNKLIF

SEQ ID NO: 562166 - protein, 15 aa, Homo sapiens
  CDR3 for beta chain variable domain of TCR clone 281083 (TRBV28, TRBJ2-1)
CASSPPGLADHEQFF

SEQ ID NO: 562167 - protein, 12 aa, Homo sapiens
  CDR3 for alpha chain variable domain of TCR clone 281084 (TRAV12-3, TRAJ17)
CAMTLTGNKLTF

SEQ ID NO: 562168 - protein, 15 aa, Homo sapiens
  CDR3 for beta chain variable domain of TCR clone 281084 (TRBV4-1, TRBJ2-1)
CASSQRQGAWDEQFF

SEQ ID NO: 562169 - protein, 15 aa, Homo sapiens
  CDR3 for alpha chain variable domain of TCR clone 281085 (TRAV16, TRAJ20)
CALKGVLRADYKLSF

SEQ ID NO: 562170 - protein, 16 aa, Homo sapiens
  CDR3 for beta chain variable domain of TCR clone 281085 (TRBV11-3, TRBJ2-2)
CASSSRTSPGTGELFF

SEQ ID NO: 562171 - protein, 11 aa, Homo sapiens
  CDR3 for alpha chain variable domain of TCR clone 281086 (TRAV25, TRAJ21)
CAGINFNKFYF

SEQ ID NO: 562172 - protein, 17 aa, Homo sapiens
  CDR3 for beta chain variable domain of TCR clone 281086 (TRBV24-1, TRBJ2-1)
CATSDVSTSGTYNEQFF

SEQ ID NO: 562173 - protein, 16 aa, Homo sapiens
  CDR3 for alpha chain variable domain of TCR clone 281087 (TRAV1-2, TRAJ33)
CAVRAISMDSNYQLIW

SEQ ID NO: 562174 - protein, 12 aa, Homo sapiens
  CDR3 for beta chain variable domain of TCR clone 281087 (TRBV10-2, TRBJ2-3)
CASSPESDTQYF

SEQ ID NO: 562175 - protein, 11 aa, Homo sapiens
  CDR3 for alpha chain variable domain of TCR clone 281088 (TRAV13-1, TRAJ39)
CASHAGNMLTF

SEQ ID NO: 562176 - protein, 14 aa, Homo sapiens
  CDR3 for beta chain variable domain of TCR clone 281088 (TRBV7-2, TRBJ1-2)
CASSQTGSTYGYTF

SEQ ID NO: 562177 - protein, 11 aa, Homo sapiens
  CDR3 for alpha chain variable domain of TCR clone 281089 (TRAV1-2, TRAJ31)
YAVKNNARLMF

SEQ ID NO: 562178 - protein, 15 aa, Homo sapiens
  CDR3 for beta chain variable domain of TCR clone 281089 (TRBV6-3, TRBJ2-2)
RASRGMTVDTGELFF

SEQ ID NO: 562179 - protein, 18 aa, Homo sapiens
  CDR3 for alpha chain variable domain of TCR clone 281090 (TRAV21, TRAJ52)
CAVRPSPTGGTSYGKLTF

SEQ ID NO: 562180 - protein, 12 aa, Homo sapiens
  CDR3 for beta chain variable domain of TCR clone 281090 (TRBV11-2, TRBJ2-2)
CASSLGGGELFF

SEQ ID NO: 562181 - protein, 14 aa, Homo sapiens
  CDR3 for alpha chain variable domain of TCR clone 281091 (TRAV16, TRAJ32)
CALKSGGATKSLIF

SEQ ID NO: 562182 - protein, 13 aa, Homo sapiens
  CDR3 for beta chain variable domain of TCR clone 281091 (TRBV15, TRBJ1-6)
CATSGGLNSPLHF

SEQ ID NO: 562183 - protein, 13 aa, Homo sapiens
  CDR3 for alpha chain variable domain of TCR clone 281092 (TRAV12-3, TRAJ33)
CAMSVNSNYQLLW

SEQ ID NO: 562184 - protein, 13 aa, Homo sapiens
  CDR3 for beta chain variable domain of TCR clone 281092 (TRBV7-2, TRBJ2-2)
CASSVAVTGELFF

SEQ ID NO: 562185 - protein, 14 aa, Homo sapiens
  CDR3 for alpha chain variable domain of TCR clone 281093 (TRAV8-3, TRAJ34)
CAVGPPHNTDKLIF

SEQ ID NO: 562186 - protein, 14 aa, Homo sapiens
  CDR3 for beta chain variable domain of TCR clone 281093 (TRBV11-2, TRBJ2-5)
CASSRTGGIETQYF

SEQ ID NO: 562187 - protein, 14 aa, Homo sapiens
  CDR3 for alpha chain variable domain of TCR clone 281094 (TRAV26-1, TRAJ34)
CIVRVAYNTDKLIF

SEQ ID NO: 562188 - protein, 15 aa, Homo sapiens
  CDR3 for beta chain variable domain of TCR clone 281094 (TRBV5-1, TRBJ2-1)
CASTGSGRTYNEQFF

SEQ ID NO: 562189 - protein, 12 aa, Homo sapiens
  CDR3 for alpha chain variable domain of TCR clone 281095 (TRAV3, TRAJ20)
CAVRDPDYKLSF

SEQ ID NO: 562190 - protein, 13 aa, Homo sapiens
  CDR3 for beta chain variable domain of TCR clone 281095 (TRBV9, TRBJ2-3)
CASSVGGRDTQYF

SEQ ID NO: 562191 - protein, 16 aa, Homo sapiens
  CDR3 for alpha chain variable domain of TCR clone 281096 (TRAV22, TRAJ45)
CAVERGKRGGADGLTF

SEQ ID NO: 562192 - protein, 13 aa, Homo sapiens
  CDR3 for beta chain variable domain of TCR clone 281096 (TRBV27, TRBJ1-1)
CASSLSSGAEAFF

SEQ ID NO: 562193 - protein, 14 aa, Homo sapiens
  CDR3 for alpha chain variable domain of TCR clone 281097 (TRAV8-6, TRAJ39)
CAVSERDAGNMLTF

SEQ ID NO: 562194 - protein, 17 aa, Homo sapiens
  CDR3 for beta chain variable domain of TCR clone 281097 (TRBV4-1, TRBJ2-1)
CASSQDPRGASYNEQFF

SEQ ID NO: 562195 - protein, 14 aa, Homo sapiens
  CDR3 for alpha chain variable domain of TCR clone 281098 (TRAV13-2, TRAJ57)
CAENFQGGSEKLVF

SEQ ID NO: 562196 - protein, 13 aa, Homo sapiens
  CDR3 for beta chain variable domain of TCR clone 281098 (TRBV20-1, TRBJ2-2)
CSASAAGTGELFF

SEQ ID NO: 562197 - protein, 19 aa, Homo sapiens
  CDR3 for alpha chain variable domain of TCR clone 281099 (TRAV38-1, TRAJ53)
CAFMKHGLESGGSNYKLTF

SEQ ID NO: 562198 - protein, 11 aa, Homo sapiens
  CDR3 for beta chain variable domain of TCR clone 281099 (TRBV7-8, TRBJ2-7)
CASSLSLEQYF

SEQ ID NO: 562199 - protein, 13 aa, Homo sapiens
  CDR3 for alpha chain variable domain of TCR clone 281100 (TRAV41, TRAJ48)
SVPVNFGNEKLTF

SEQ ID NO: 562200 - protein, 15 aa, Homo sapiens
  CDR3 for beta chain variable domain of TCR clone 281100 (TRBV9, TRBJ1-6)
CASSVAGTGDSPLHF

SEQ ID NO: 562201 - protein, 14 aa, Homo sapiens
  CDR3 for alpha chain variable domain of TCR clone 281101 (TRAV38-1, TRAJ45)
CAYYAGGGADGLTF

SEQ ID NO: 562202 - protein, 20 aa, Homo sapiens
  CDR3 for beta chain variable domain of TCR clone 281101 (TRBV28, TRBJ2-1)
CASTPIGRSPGLAGGNEQFF

SEQ ID NO: 562203 - protein, 10 aa, Homo sapiens
  CDR3 for alpha chain variable domain of TCR clone 281102 (TRAV30, TRAJ34)
CGTNPDKLIF

SEQ ID NO: 562204 - protein, 13 aa, Homo sapiens
  CDR3 for beta chain variable domain of TCR clone 281102 (TRBV20-1, TRBJ1-1)
CSARGGGNTEAFF

SEQ ID NO: 562205 - protein, 13 aa, Homo sapiens
  CDR3 for alpha chain variable domain of TCR clone 281103 (TRAV12-3, TRAJ31)
CAMSANKNARLMF

SEQ ID NO: 562206 - protein, 16 aa, Homo sapiens
  CDR3 for beta chain variable domain of TCR clone 281103 (TRBV7-9, TRBJ1-2)
CACSLGFSSGEDGYTF

SEQ ID NO: 562207 - protein, 12 aa, Homo sapiens
  CDR3 for alpha chain variable domain of TCR clone 281104 (TRAV3, TRAJ31)
CAVRDGNARLMF

SEQ ID NO: 562208 - protein, 18 aa, Homo sapiens
  CDR3 for beta chain variable domain of TCR clone 281104 (TRBV7-2, TRBJ2-3)
CASSLQREGSGITDTQYF

SEQ ID NO: 562209 - protein, 13 aa, Homo sapiens
  CDR3 for alpha chain variable domain of TCR clone 281105 (TRAV9-2, TRAJ9)
CALSKAGGFKTIF

SEQ ID NO: 562210 - protein, 13 aa, Homo sapiens
  CDR3 for beta chain variable domain of TCR clone 281105 (TRBV19, TRBJ1-5)
CASSIGGEKPQHF

SEQ ID NO: 562211 - protein, 17 aa, Homo sapiens
  CDR3 for alpha chain variable domain of TCR clone 281106 (TRAV3, TRAJ12)
CAVRDGGRRDSSYKLIF

SEQ ID NO: 562212 - protein, 15 aa, Homo sapiens
  CDR3 for beta chain variable domain of TCR clone 281106 (TRBV20-1, TRBJ2-5)
CSAEGTGGLQETQYF

SEQ ID NO: 562213 - protein, 12 aa, Homo sapiens
  CDR3 for alpha chain variable domain of TCR clone 281107 (TRAV12-3, TRAJ17)
CAMTLTGNKLTF

SEQ ID NO: 562214 - protein, 12 aa, Homo sapiens
  CDR3 for beta chain variable domain of TCR clone 281107 (TRBV12-4, TRBJ2-7)
CARRLGGYEQYF

SEQ ID NO: 562215 - protein, 11 aa, Homo sapiens
  CDR3 for alpha chain variable domain of TCR clone 281108 (TRAV12-1, TRAJ15)
CVVNSGTALIF

SEQ ID NO: 562216 - protein, 16 aa, Homo sapiens
  CDR3 for beta chain variable domain of TCR clone 281108 (TRBV28, TRBJ2-1)
CASSSRVRDSYNEQFF

SEQ ID NO: 562217 - protein, 19 aa, Homo sapiens
  CDR3 for alpha chain variable domain of TCR clone 281109 (TRAV14/DV4, )
CAMREDIQNPDPAVYQLRD

SEQ ID NO: 562218 - protein, 14 aa, Homo sapiens
  CDR3 for beta chain variable domain of TCR clone 281109 (TRBV25-1, TRBJ1-1)
CASTHLGGNTEAFF

SEQ ID NO: 562219 - protein, 15 aa, Homo sapiens
  CDR3 for alpha chain variable domain of TCR clone 281110 (TRAV3, TRAJ29)
CAMRDINSGNKPLVF

SEQ ID NO: 562220 - protein, 16 aa, Homo sapiens
  CDR3 for beta chain variable domain of TCR clone 281110 (TRBV4-1, TRBJ2-5)
CASSQTFYGDQETQYF

SEQ ID NO: 562221 - protein, 17 aa, Homo sapiens
  CDR3 for alpha chain variable domain of TCR clone 281111 (TRAV3, TRAJ6)
CAVRDGPRAGESYIPTF

SEQ ID NO: 562222 - protein, 18 aa, Homo sapiens
  CDR3 for beta chain variable domain of TCR clone 281111 (TRBV7-9, TRBJ2-7)
CASSLTTSGSRTWYEQYF

SEQ ID NO: 562223 - protein, 17 aa, Homo sapiens
  CDR3 for alpha chain variable domain of TCR clone 281112 (TRAV23/DV6, TRAJ57)
CAASSTLSQGGSEKLVF

SEQ ID NO: 562224 - protein, 13 aa, Homo sapiens
  CDR3 for beta chain variable domain of TCR clone 281112 (TRBV7-9, TRBJ2-1)
CASSLDVGNEQFF

SEQ ID NO: 562225 - protein, 18 aa, Homo sapiens
  CDR3 for alpha chain variable domain of TCR clone 281113 (TRAV29/DV5, TRAJ10)
CSVLLCSKRTGGGNKLTC

SEQ ID NO: 562226 - protein, 13 aa, Homo sapiens
  CDR3 for beta chain variable domain of TCR clone 281113 (TRBV3-1, TRBJ1-1)
CASSPGVITEAFF

SEQ ID NO: 562227 - protein, 15 aa, Homo sapiens
  CDR3 for alpha chain variable domain of TCR clone 281114 (TRAV3, TRAJ5)
CAVRSSNTGRRALTF

SEQ ID NO: 562228 - protein, 14 aa, Homo sapiens
  CDR3 for beta chain variable domain of TCR clone 281114 (TRBV19, TRBJ2-1)
CASGKSTQYNEQFF

SEQ ID NO: 562229 - protein, 12 aa, Homo sapiens
  CDR3 for alpha chain variable domain of TCR clone 281115 (TRAV27, TRAJ35)
CAGADFGNVLHC

SEQ ID NO: 562230 - protein, 15 aa, Homo sapiens
  CDR3 for beta chain variable domain of TCR clone 281115 (TRBV7-2, TRBJ1-2)
CASSLVSGGDYGYAF

SEQ ID NO: 562231 - protein, 15 aa, Homo sapiens
  CDR3 for alpha chain variable domain of TCR clone 281116 (TRAV3, TRAJ22)
CAVRDRGGSARQLTF

SEQ ID NO: 562232 - protein, 17 aa, Homo sapiens
  CDR3 for beta chain variable domain of TCR clone 281116 (TRBV13, TRBJ2-3)
CASSRSRVEGGRNTQYF

SEQ ID NO: 562233 - protein, 13 aa, Homo sapiens
  CDR3 for alpha chain variable domain of TCR clone 281117 (TRAV23/DV6, TRAJ22)
CACGAGSARQLTF

SEQ ID NO: 562234 - protein, 15 aa, Homo sapiens
  CDR3 for beta chain variable domain of TCR clone 281117 (TRBV7-9, TRBJ1-5)
CASSQGHQPNQPQHF

SEQ ID NO: 562235 - protein, 14 aa, Homo sapiens
  CDR3 for alpha chain variable domain of TCR clone 281118 (TRAV8-3, TRAJ4)
CAVGAAGGYNKLIF

SEQ ID NO: 562236 - protein, 18 aa, Homo sapiens
  CDR3 for beta chain variable domain of TCR clone 281118 (TRBV4-1, TRBJ1-5)
CASSQDPRGQGLNQPQHF

SEQ ID NO: 562237 - protein, 14 aa, Homo sapiens
  CDR3 for alpha chain variable domain of TCR clone 281119 (TRAV23/DV6, TRAJ22)
CAASVSGSAMQLTF

SEQ ID NO: 562238 - protein, 16 aa, Homo sapiens
  CDR3 for beta chain variable domain of TCR clone 281119 (TRBV19, TRBJ2-2)
CASSFPGQGLAGELFF

SEQ ID NO: 562239 - protein, 13 aa, Homo sapiens
  CDR3 for alpha chain variable domain of TCR clone 281120 (TRAV12-3, TRAJ13)
CAMSSGGHPKVTF

SEQ ID NO: 562240 - protein, 14 aa, Homo sapiens
  CDR3 for beta chain variable domain of TCR clone 281120 (TRBV2, TRBJ2-1)
CASRTGSSYNEQFF

SEQ ID NO: 562241 - protein, 14 aa, Homo sapiens
  CDR3 for alpha chain variable domain of TCR clone 281121 (TRAV26-1, TRAJ39)
CIVRGSRAGNMLTF

SEQ ID NO: 562242 - protein, 15 aa, Homo sapiens
  CDR3 for beta chain variable domain of TCR clone 281121 (TRBV7-9, TRBJ1-5)
CASSQGHQPNHPQHF

SEQ ID NO: 562243 - protein, 11 aa, Homo sapiens
  CDR3 for alpha chain variable domain of TCR clone 281122 (TRAV2, TRAJ13)
CASGGYQKVTF

SEQ ID NO: 562244 - protein, 14 aa, Homo sapiens
  CDR3 for beta chain variable domain of TCR clone 281122 (TRBV7-9, TRBJ2-5)
CASSLAPDQETQYF

SEQ ID NO: 562245 - protein, 15 aa, Homo sapiens
  CDR3 for alpha chain variable domain of TCR clone 281123 (TRAV12-3, TRAJ42)
CAMSGHGGSQGNLIF

SEQ ID NO: 562246 - protein, 13 aa, Homo sapiens
  CDR3 for beta chain variable domain of TCR clone 281123 (TRBV19, TRBJ2-5)
CASSGRAGETLYF

SEQ ID NO: 562247 - protein, 15 aa, Homo sapiens
  CDR3 for alpha chain variable domain of TCR clone 281124 (TRAV17, TRAJ6)
CATDLPSAGSYIPTF

SEQ ID NO: 562248 - protein, 16 aa, Homo sapiens
  CDR3 for beta chain variable domain of TCR clone 281124 (TRBV4-1, TRBJ2-7)
CASSQDPTGYSYEQYF

SEQ ID NO: 562249 - protein, 16 aa, Homo sapiens
  CDR3 for alpha chain variable domain of TCR clone 281125 (TRAV23/DV6, TRAJ9)
CAASIGGHTGGFKTIF

SEQ ID NO: 562250 - protein, 12 aa, Homo sapiens
  CDR3 for beta chain variable domain of TCR clone 281125 (TRBV11-2, TRBJ2-1)
CASSVQREGQFF

SEQ ID NO: 562251 - protein, 15 aa, Homo sapiens
  CDR3 for alpha chain variable domain of TCR clone 281126 (TRAV12-1, TRAJ4)
CVVNGFSGGYNTLIF

SEQ ID NO: 562252 - protein, 18 aa, Homo sapiens
  CDR3 for beta chain variable domain of TCR clone 281126 (TRBV6-5, TRBJ2-1)
CASSYSSRRAGVYNEQFF

SEQ ID NO: 562253 - protein, 20 aa, Homo sapiens
  CDR3 for alpha chain variable domain of TCR clone 281127 (TRAV21, TRAJ4)
AASQPGDSATLAGGYNKLIF

SEQ ID NO: 562254 - protein, 14 aa, Homo sapiens
  CDR3 for beta chain variable domain of TCR clone 281127 (TRBV7-2, TRBJ1-1)
CASSFLTGTTEAFF

SEQ ID NO: 562255 - protein, 21 aa, Homo sapiens
  CDR3 for alpha chain variable domain of TCR clone 281128 (TRAV1-1, TRAJ6)
CLLLLRCERLERTGGSYIPTF

SEQ ID NO: 562256 - protein, 16 aa, Homo sapiens
  CDR3 for beta chain variable domain of TCR clone 281128 (TRBV7-7, TRBJ2-1)
CASSLASGTSYNEQFF

SEQ ID NO: 562257 - protein, 13 aa, Homo sapiens
  CDR3 for alpha chain variable domain of TCR clone 281129 (TRAV3, TRAJ21)
CAVREPYFNKFYF

SEQ ID NO: 562258 - protein, 15 aa, Homo sapiens
  CDR3 for beta chain variable domain of TCR clone 281129 (TRBV2, TRBJ2-1)
CASSELAGGYNEQFF

SEQ ID NO: 562259 - protein, 14 aa, Homo sapiens
  CDR3 for alpha chain variable domain of TCR clone 281130 (TRAV12-3, TRAJ9)
CAMSPNTRGFKTIF

SEQ ID NO: 562260 - protein, 12 aa, Homo sapiens
  CDR3 for beta chain variable domain of TCR clone 281130 (TRBV11-2, TRBJ2-2)
CASSLGGGELFF

SEQ ID NO: 562261 - protein, 14 aa, Homo sapiens
  CDR3 for alpha chain variable domain of TCR clone 281131 (TRAV2, TRAJ9)
CAVEDRSGVFKTIF

SEQ ID NO: 562262 - protein, 16 aa, Homo sapiens
  CDR3 for beta chain variable domain of TCR clone 281131 (TRBV7-7, TRBJ2-1)
CASSLASGTSYNEQFF

SEQ ID NO: 562263 - protein, 15 aa, Homo sapiens
  CDR3 for alpha chain variable domain of TCR clone 281132 (TRAV3, TRAJ3)
CAVRDMSSSASKLIF

SEQ ID NO: 562264 - protein, 14 aa, Homo sapiens
  CDR3 for beta chain variable domain of TCR clone 281132 (TRBV6-6, TRBJ2-7)
CASSIAGGVDEQYV

SEQ ID NO: 562265 - protein, 13 aa, Homo sapiens
  CDR3 for alpha chain variable domain of TCR clone 281133 (TRAV2, TRAJ29)
CAAGNSGNTPLVF

SEQ ID NO: 562266 - protein, 16 aa, Homo sapiens
  CDR3 for beta chain variable domain of TCR clone 281133 (TRBV7-9, TRBJ1-2)
CACSPGGGAINYGYTF

SEQ ID NO: 562267 - protein, 14 aa, Homo sapiens
  CDR3 for alpha chain variable domain of TCR clone 281134 (TRAV38-1, TRAJ45)
CASHSGGGADGLTF

SEQ ID NO: 562268 - protein, 15 aa, Homo sapiens
  CDR3 for beta chain variable domain of TCR clone 281134 (TRBV7-6, TRBJ1-2)
CASSSGGRGGYGYTF

SEQ ID NO: 562269 - protein, 14 aa, Homo sapiens
  CDR3 for alpha chain variable domain of TCR clone 281135 (TRAV34, TRAJ44)
CGADGTGTASKLTF

SEQ ID NO: 562270 - protein, 11 aa, Homo sapiens
  CDR3 for beta chain variable domain of TCR clone 281135 (TRBV7-9, TRBJ2-2)
CIQWNTGELFF

SEQ ID NO: 562271 - protein, 16 aa, Homo sapiens
  CDR3 for alpha chain variable domain of TCR clone 281136 (TRAV30, TRAJ24)
CGTEIVDADSWGKFQF

SEQ ID NO: 562272 - protein, 13 aa, Homo sapiens
  CDR3 for beta chain variable domain of TCR clone 281136 (TRBV15, TRBJ2-7)
CATSATGHYEQYF

SEQ ID NO: 562273 - protein, 14 aa, Homo sapiens
  CDR3 for alpha chain variable domain of TCR clone 281137 (TRAV1-2, TRAJ8)
CAVREDTGFQKLVF

SEQ ID NO: 562274 - protein, 14 aa, Homo sapiens
  CDR3 for beta chain variable domain of TCR clone 281137 (TRBV7-9, TRBJ1-1)
CASTPVQSYTEAFF

SEQ ID NO: 562275 - protein, 13 aa, Homo sapiens
  CDR3 for alpha chain variable domain of TCR clone 281138 (TRAV21, TRAJ27)
CAALNTNAGKLTF

SEQ ID NO: 562276 - protein, 14 aa, Homo sapiens
  CDR3 for beta chain variable domain of TCR clone 281138 (TRBV27, TRBJ1-1)
CASSLLSGLSEAFF

SEQ ID NO: 562277 - protein, 14 aa, Homo sapiens
  CDR3 for alpha chain variable domain of TCR clone 281139 (TRAV9-2, TRAJ6)
CALSDPGGSYIPTF

SEQ ID NO: 562278 - protein, 16 aa, Homo sapiens
  CDR3 for beta chain variable domain of TCR clone 281139 (TRBV5-7, TRBJ2-3)
CASSPWTSGGTDTQYF

SEQ ID NO: 562279 - protein, 18 aa, Homo sapiens
  CDR3 for alpha chain variable domain of TCR clone 281140 (TRAV21, TRAJ52)
WAVRPSPTGGTSYGKLTF

SEQ ID NO: 562280 - protein, 17 aa, Homo sapiens
  CDR3 for beta chain variable domain of TCR clone 281140 (TRBV13, TRBJ2-3)
CASSLSRVAGGRNTQYF

SEQ ID NO: 562281 - protein, 11 aa, Homo sapiens
  CDR3 for alpha chain variable domain of TCR clone 281141 (TRAV12-3, TRAJ43)
CVEYDNNDMRF

SEQ ID NO: 562282 - protein, 16 aa, Homo sapiens
  CDR3 for beta chain variable domain of TCR clone 281141 (TRBV12-4, TRBJ1-5)
CASSRPVGGSNQPQHF

SEQ ID NO: 562283 - protein, 16 aa, Homo sapiens
  CDR3 for alpha chain variable domain of TCR clone 281142 (TRAV12-1, TRAJ43)
CVVNHHRFGAGTRLTG

SEQ ID NO: 562284 - protein, 16 aa, Homo sapiens
  CDR3 for beta chain variable domain of TCR clone 281142 (TRBV27, TRBJ2-2)
CASSSTGGGDTGELFF

SEQ ID NO: 562285 - protein, 15 aa, Homo sapiens
  CDR3 for alpha chain variable domain of TCR clone 281143 (TRAV35, TRAJ38)
CAGFSNAGNNRKLIW

SEQ ID NO: 562286 - protein, 14 aa, Homo sapiens
  CDR3 for beta chain variable domain of TCR clone 281143 (TRBV7-8, TRBJ2-1)
CQQLSGGLYNEQFF

SEQ ID NO: 562287 - protein, 14 aa, Homo sapiens
  CDR3 for alpha chain variable domain of TCR clone 281144 (TRAV12-2, TRAJ13)
CAVKKTGGYQKVTF

SEQ ID NO: 562288 - protein, 15 aa, Homo sapiens
  CDR3 for beta chain variable domain of TCR clone 281144 (TRBV27, TRBJ2-1)
LATSNGEGPPMSSSS

SEQ ID NO: 562289 - protein, 13 aa, Homo sapiens
  CDR3 for alpha chain variable domain of TCR clone 281145 (TRAV21, TRAJ27)
CAARPGNVGKSTF

SEQ ID NO: 562290 - protein, 16 aa, Homo sapiens
  CDR3 for beta chain variable domain of TCR clone 281145 (TRBV7-6, TRBJ2-1)
CIAVPAAWGGADEQFF

SEQ ID NO: 562291 - protein, 13 aa, Homo sapiens
  CDR3 for alpha chain variable domain of TCR clone 281146 (TRAV1-2, TRAJ9)
CAAINTGGFKTIF

SEQ ID NO: 562292 - protein, 13 aa, Homo sapiens
  CDR3 for beta chain variable domain of TCR clone 281146 (TRBV4-1, TRBJ2-3)
CASSQPPTDTQYF

SEQ ID NO: 562293 - protein, 15 aa, Homo sapiens
  CDR3 for alpha chain variable domain of TCR clone 281147 (TRAV17, TRAJ48)
CATDETNFGNEQLTF

SEQ ID NO: 562294 - protein, 13 aa, Homo sapiens
  CDR3 for beta chain variable domain of TCR clone 281147 (TRBV12-4, TRBJ1-5)
CASSPDRAQPQHF

SEQ ID NO: 562295 - protein, 12 aa, Homo sapiens
  CDR3 for alpha chain variable domain of TCR clone 281148 (TRAV35, TRAJ28)
GVEGAGSYQLTF

SEQ ID NO: 562296 - protein, 15 aa, Homo sapiens
  CDR3 for beta chain variable domain of TCR clone 281148 (TRBV27, TRBJ2-1)
CASSNGGGSANEQFF

SEQ ID NO: 562297 - protein, 12 aa, Homo sapiens
  CDR3 for alpha chain variable domain of TCR clone 281149 (TRAV1-2, TRAJ33)
CAALDSNYQLIW

SEQ ID NO: 562298 - protein, 16 aa, Homo sapiens
  CDR3 for beta chain variable domain of TCR clone 281149 (TRBV5-1, TRBJ2-3)
CASSLGLAVYTDTQYF

SEQ ID NO: 562299 - protein, 16 aa, Homo sapiens
  CDR3 for alpha chain variable domain of TCR clone 281150 (TRAV30, TRAJ24)
CGTALVDADSWGKFQF

SEQ ID NO: 562300 - protein, 16 aa, Homo sapiens
  CDR3 for beta chain variable domain of TCR clone 281150 (TRBV28, TRBJ2-7)
CASSLFFETGGPEQYF

SEQ ID NO: 562301 - protein, 14 aa, Homo sapiens
  CDR3 for alpha chain variable domain of TCR clone 281151 (TRAV4, TRAJ23)
CLVGSYNQGGKLIF

SEQ ID NO: 562302 - protein, 14 aa, Homo sapiens
  CDR3 for beta chain variable domain of TCR clone 281151 (TRBV2, TRBJ2-1)
CASSEALDGNEQFF

SEQ ID NO: 562303 - protein, 12 aa, Homo sapiens
  CDR3 for alpha chain variable domain of TCR clone 281152 (TRAV21, TRAJ23)
CAVMLQGGKLIF

SEQ ID NO: 562304 - protein, 14 aa, Homo sapiens
  CDR3 for beta chain variable domain of TCR clone 281152 (TRBV7-6, TRBJ2-3)
CASSLGTVTDTQYF

SEQ ID NO: 562305 - protein, 17 aa, Homo sapiens
  CDR3 for alpha chain variable domain of TCR clone 281153 (TRAV23/DV6, TRAJ53)
CAASKLGSGGSNYKLTF

SEQ ID NO: 562306 - protein, 13 aa, Homo sapiens
  CDR3 for beta chain variable domain of TCR clone 281153 (TRBV2, TRBJ1-1)
CASSEGGNTEAFF

SEQ ID NO: 562307 - protein, 15 aa, Homo sapiens
  CDR3 for alpha chain variable domain of TCR clone 281154 (TRAV2, TRAJ15)
CAVEDREQAGTALIF

SEQ ID NO: 562308 - protein, 13 aa, Homo sapiens
  CDR3 for beta chain variable domain of TCR clone 281154 (TRBV7-9, TRBJ2-2)
CASSLDPTGELFF

SEQ ID NO: 562309 - protein, 15 aa, Homo sapiens
  CDR3 for alpha chain variable domain of TCR clone 281155 (TRAV3, TRAJ22)
CAVRDRGGSARQLTF

SEQ ID NO: 562310 - protein, 16 aa, Homo sapiens
  CDR3 for beta chain variable domain of TCR clone 281155 (TRBV5-4, TRBJ2-3)
CGSQQPGAGGADTQYF

SEQ ID NO: 562311 - protein, 14 aa, Homo sapiens
  CDR3 for alpha chain variable domain of TCR clone 281156 (TRAV12-1, TRAJ12)
CVVTRMDSSYKLIF

SEQ ID NO: 562312 - protein, 14 aa, Homo sapiens
  CDR3 for beta chain variable domain of TCR clone 281156 (TRBV20-1, TRBJ1-1)
SAGLGGGGNTEAFF

SEQ ID NO: 562313 - protein, 16 aa, Homo sapiens
  CDR3 for alpha chain variable domain of TCR clone 281157 (TRAV23/DV6, )
CAEPDIQNPDPAAYQL

SEQ ID NO: 562314 - protein, 15 aa, Homo sapiens
  CDR3 for beta chain variable domain of TCR clone 281157 (TRBV12-4, TRBJ2-5)
CASTLNSGRGETQYF

SEQ ID NO: 562315 - protein, 16 aa, Homo sapiens
  CDR3 for alpha chain variable domain of TCR clone 281158 (TRAV30, TRAJ24)
CGTEIVDADSWGKFQV

SEQ ID NO: 562316 - protein, 16 aa, Homo sapiens
  CDR3 for beta chain variable domain of TCR clone 281158 (TRBV28, TRBJ2-7)
CASSLFFETGGPEQYF

SEQ ID NO: 562317 - protein, 12 aa, Homo sapiens
  CDR3 for alpha chain variable domain of TCR clone 281159 (TRAV12-2, TRAJ43)
CAVNVINNDMRF

SEQ ID NO: 562318 - protein, 14 aa, Homo sapiens
  CDR3 for beta chain variable domain of TCR clone 281159 (TRBV25-1, TRBJ2-2)
CASSELGLPGELFF

SEQ ID NO: 562319 - protein, 13 aa, Homo sapiens
  CDR3 for alpha chain variable domain of TCR clone 281160 (TRAV8-3, TRAJ20)
CAVGRPNDYKLSF

SEQ ID NO: 562320 - protein, 14 aa, Homo sapiens
  CDR3 for beta chain variable domain of TCR clone 281160 (TRBV12-5, TRBJ2-5)
CASGSRTRQETQYF

SEQ ID NO: 562321 - protein, 12 aa, Homo sapiens
  CDR3 for alpha chain variable domain of TCR clone 281161 (TRAV16, TRAJ8)
CAPLGGFQKLVF

SEQ ID NO: 562322 - protein, 16 aa, Homo sapiens
  CDR3 for beta chain variable domain of TCR clone 281161 (TRBV19, TRBJ2-1)
CASSKAGPSSYNEQFF

SEQ ID NO: 562323 - protein, 12 aa, Homo sapiens
  CDR3 for alpha chain variable domain of TCR clone 281162 (TRAV17, TRAJ29)
CATPHQETHLLS

SEQ ID NO: 562324 - protein, 15 aa, Homo sapiens
  CDR3 for beta chain variable domain of TCR clone 281162 (TRBV10-2, TRBJ2-6)
CASSEQGTGANVLTF

SEQ ID NO: 562325 - protein, 17 aa, Homo sapiens
  CDR3 for alpha chain variable domain of TCR clone 281163 (TRAV12-3, TRAJ4)
CAMTGAGTRLAVRPYIS

SEQ ID NO: 562326 - protein, 14 aa, Homo sapiens
  CDR3 for beta chain variable domain of TCR clone 281163 (TRBV10-3, TRBJ1-1)
CAISDTDRGVEAFF

SEQ ID NO: 562327 - protein, 14 aa, Homo sapiens
  CDR3 for alpha chain variable domain of TCR clone 281164 (TRAV38-1, TRAJ40)
CALRPTSGTYKYIF

SEQ ID NO: 562328 - protein, 13 aa, Homo sapiens
  CDR3 for beta chain variable domain of TCR clone 281164 (TRBV19, TRBJ2-1)
CQSTFVLSGEQFF

SEQ ID NO: 562329 - protein, 13 aa, Homo sapiens
  CDR3 for alpha chain variable domain of TCR clone 281165 (TRAV20, TRAJ21)
CAVEGYNFNKFYF

SEQ ID NO: 562330 - protein, 18 aa, Homo sapiens
  CDR3 for beta chain variable domain of TCR clone 281165 (TRBV3-1, TRBJ2-5)
CASSQGGSRDPVLRARHA

SEQ ID NO: 562331 - protein, 14 aa, Homo sapiens
  CDR3 for alpha chain variable domain of TCR clone 281166 (TRAV8-2, TRAJ31)
CVVSDRNNNARLMF

SEQ ID NO: 562332 - protein, 16 aa, Homo sapiens
  CDR3 for beta chain variable domain of TCR clone 281166 (TRBV6-1, TRBJ1-3)
CASVQGGVETPYILER

SEQ ID NO: 562333 - protein, 14 aa, Homo sapiens
  CDR3 for alpha chain variable domain of TCR clone 281167 (TRAV17, TRAJ37)
CATDCSSNTGKLNV

SEQ ID NO: 562334 - protein, 13 aa, Homo sapiens
  CDR3 for beta chain variable domain of TCR clone 281167 (TRBV11-2, TRBJ2-1)
CASSLDLVNEQFF

SEQ ID NO: 562335 - protein, 14 aa, Homo sapiens
  CDR3 for alpha chain variable domain of TCR clone 281168 (TRAV25, TRAJ44)
CAVFPTGTASKLTF

SEQ ID NO: 562336 - protein, 17 aa, Homo sapiens
  CDR3 for beta chain variable domain of TCR clone 281168 (TRBV13, TRBJ2-3)
CASSLSRVAGGRNTQYF

SEQ ID NO: 562337 - protein, 12 aa, Homo sapiens
  CDR3 for alpha chain variable domain of TCR clone 281169 (TRAV21, TRAJ33)
CAKMGSNYQLIW

SEQ ID NO: 562338 - protein, 13 aa, Homo sapiens
  CDR3 for beta chain variable domain of TCR clone 281169 (TRBV10-3, TRBJ1-1)
CAIIPEGGTEAFF

SEQ ID NO: 562339 - protein, 15 aa, Homo sapiens
  CDR3 for alpha chain variable domain of TCR clone 281170 (TRAV4, TRAJ39)
CLVGPNNNAGNMLTF

SEQ ID NO: 562340 - protein, 13 aa, Homo sapiens
  CDR3 for beta chain variable domain of TCR clone 281170 (TRBV4-1, TRBJ2-1)
CASSQEVQYEQFF

SEQ ID NO: 562341 - protein, 17 aa, Homo sapiens
  CDR3 for alpha chain variable domain of TCR clone 281171 (TRAV3, TRAJ6)
CAVRDGPRAGGSYIHTL

SEQ ID NO: 562342 - protein, 13 aa, Homo sapiens
  CDR3 for beta chain variable domain of TCR clone 281171 (TRBV20-1, TRBJ1-6)
CSAPLGVGSPLHF

SEQ ID NO: 562343 - protein, 12 aa, Homo sapiens
  CDR3 for alpha chain variable domain of TCR clone 281172 (TRAV23/DV6, TRAJ31)
CAARRIGARLMF

SEQ ID NO: 562344 - protein, 13 aa, Homo sapiens
  CDR3 for beta chain variable domain of TCR clone 281172 (TRBV28, TRBJ2-7)
CASTAGGVYEQYF

SEQ ID NO: 562345 - protein, 13 aa, Homo sapiens
  CDR3 for alpha chain variable domain of TCR clone 281173 (TRAV2, TRAJ38)
CAYGAGNNRTLIW

SEQ ID NO: 562346 - protein, 13 aa, Homo sapiens
  CDR3 for beta chain variable domain of TCR clone 281173 (TRBV6-1, TRBJ1-6)
CASSSSWDSPLHF

SEQ ID NO: 562347 - protein, 17 aa, Homo sapiens
  CDR3 for alpha chain variable domain of TCR clone 281174 (TRAV13-1, TRAJ52)
CAAGRNAGGTSYGKLTF

SEQ ID NO: 562348 - protein, 15 aa, Homo sapiens
  CDR3 for beta chain variable domain of TCR clone 281174 (TRBV5-7, TRBJ2-7)
CASSLPGQVFYEQYF

SEQ ID NO: 562349 - protein, 13 aa, Homo sapiens
  CDR3 for alpha chain variable domain of TCR clone 281175 (TRAV3, TRAJ21)
CAVREPDFNKFYF

SEQ ID NO: 562350 - protein, 15 aa, Homo sapiens
  CDR3 for beta chain variable domain of TCR clone 281175 (TRBV2, TRBJ2-1)
CASSELAGGYNSSSS

SEQ ID NO: 562351 - protein, 13 aa, Homo sapiens
  CDR3 for alpha chain variable domain of TCR clone 281176 (TRAV12-1, TRAJ37)
CVVSSGNTGKLIF

SEQ ID NO: 562352 - protein, 13 aa, Homo sapiens
  CDR3 for beta chain variable domain of TCR clone 281176 (TRBV7-9, TRBJ1-2)
CASSLKQNYGYTF

SEQ ID NO: 562353 - protein, 14 aa, Homo sapiens
  CDR3 for alpha chain variable domain of TCR clone 281177 (TRAV26-1, TRAJ38)
CIADNAGNNRKLIW

SEQ ID NO: 562354 - protein, 12 aa, Homo sapiens
  CDR3 for beta chain variable domain of TCR clone 281177 (TRBV7-9, TRBJ2-3)
CQQPRVTDTQYF

SEQ ID NO: 562355 - protein, 16 aa, Homo sapiens
  CDR3 for alpha chain variable domain of TCR clone 281178 (TRAV38-1, TRAJ32)
CAFMKGGGGASNKLIF

SEQ ID NO: 562356 - protein, 13 aa, Homo sapiens
  CDR3 for beta chain variable domain of TCR clone 281178 (TRBV20-1, TRBJ2-5)
CSAREAFQETQYF

SEQ ID NO: 562357 - protein, 20 aa, Homo sapiens
  CDR3 for alpha chain variable domain of TCR clone 281179 (TRAV27, TRAJ35)
CAGADFGNVPHCGSGPQVIV

SEQ ID NO: 562358 - protein, 12 aa, Homo sapiens
  CDR3 for beta chain variable domain of TCR clone 281179 (TRBV7-8, TRBJ2-7)
CASSLGDREQYF

SEQ ID NO: 562359 - protein, 13 aa, Homo sapiens
  CDR3 for alpha chain variable domain of TCR clone 281180 (TRAV8-3, TRAJ43)
CAVVPYNNNDMRF

SEQ ID NO: 562360 - protein, 16 aa, Homo sapiens
  CDR3 for beta chain variable domain of TCR clone 281180 (TRBV3-1, TRBJ2-1)
CASSQVGGTSYNEQFF

SEQ ID NO: 562361 - protein, 14 aa, Homo sapiens
  CDR3 for alpha chain variable domain of TCR clone 281181 (TRAV4, TRAJ26)
CLVGPPNYGQNFVF

SEQ ID NO: 562362 - protein, 15 aa, Homo sapiens
  CDR3 for beta chain variable domain of TCR clone 281181 (TRBV11-2, TRBJ2-2)
CASSPSGGGTGELFF

SEQ ID NO: 562363 - protein, 13 aa, Homo sapiens
  CDR3 for alpha chain variable domain of TCR clone 281182 (TRAV25, TRAJ26)
CAGMDNYGQNFVF

SEQ ID NO: 562364 - protein, 15 aa, Homo sapiens
  CDR3 for beta chain variable domain of TCR clone 281182 (TRBV10-3, TRBJ2-1)
CAIRNGKSGHNEQFF

SEQ ID NO: 562365 - protein, 14 aa, Homo sapiens
  CDR3 for alpha chain variable domain of TCR clone 281183 (TRAV9-2, TRAJ39)
CALYIYNAGNMLTF

SEQ ID NO: 562366 - protein, 14 aa, Homo sapiens
  CDR3 for beta chain variable domain of TCR clone 281183 (TRBV6-1, TRBJ1-3)
CASVQGGGGNTIYY

SEQ ID NO: 562367 - protein, 12 aa, Homo sapiens
  CDR3 for alpha chain variable domain of TCR clone 281184 (TRAV36/DV7, TRAJ37)
CACYGNSGKLIF

SEQ ID NO: 562368 - protein, 13 aa, Homo sapiens
  CDR3 for beta chain variable domain of TCR clone 281184 (TRBV10-3, TRBJ2-7)
CASKLAVNYEQYF

SEQ ID NO: 562369 - protein, 14 aa, Homo sapiens
  CDR3 for alpha chain variable domain of TCR clone 281185 (TRAV13-1, TRAJ35)
CAASKGGFGDVLHC

SEQ ID NO: 562370 - protein, 12 aa, Homo sapiens
  CDR3 for beta chain variable domain of TCR clone 281185 (TRBV7-3, TRBJ1-1)
CQQPGLGAEAFF

SEQ ID NO: 562371 - protein, 13 aa, Homo sapiens
  CDR3 for alpha chain variable domain of TCR clone 281186 (TRAV20, TRAJ20)
CAVRWVRDYKLSF

SEQ ID NO: 562372 - protein, 17 aa, Homo sapiens
  CDR3 for beta chain variable domain of TCR clone 281186 (TRBV28, TRBJ2-5)
CASSRQEGLAGAETQYF

SEQ ID NO: 562373 - protein, 11 aa, Homo sapiens
  CDR3 for alpha chain variable domain of TCR clone 281187 (TRAV2, TRAJ13)
CASGGYQKVTF

SEQ ID NO: 562374 - protein, 15 aa, Homo sapiens
  CDR3 for beta chain variable domain of TCR clone 281187 (TRBV7-9, TRBJ1-6)
CASSSPGRGNSHLHF

SEQ ID NO: 562375 - protein, 15 aa, Homo sapiens
  CDR3 for alpha chain variable domain of TCR clone 281188 (TRAV12-1, TRAJ4)
CVVNHFSGGYNKLIF

SEQ ID NO: 562376 - protein, 16 aa, Homo sapiens
  CDR3 for beta chain variable domain of TCR clone 281188 (TRBV5-1, TRBJ1-1)
CASSKTGTEVGTEAFF

SEQ ID NO: 562377 - protein, 14 aa, Homo sapiens
  CDR3 for alpha chain variable domain of TCR clone 281189 (TRAV12-2, TRAJ11)
CAVNRESGYSTLTF

SEQ ID NO: 562378 - protein, 10 aa, Homo sapiens
  CDR3 for beta chain variable domain of TCR clone 281189 (TRBV20-1, TRBJ2-5)
CSATFETQYF

SEQ ID NO: 562379 - protein, 14 aa, Homo sapiens
  CDR3 for alpha chain variable domain of TCR clone 281190 (TRAV1-2, TRAJ8)
CAVREDTVFQKLVF

SEQ ID NO: 562380 - protein, 13 aa, Homo sapiens
  CDR3 for beta chain variable domain of TCR clone 281190 (TRBV23-1, TRBJ1-4)
CASRGKFNEKLFF

SEQ ID NO: 562381 - protein, 14 aa, Homo sapiens
  CDR3 for alpha chain variable domain of TCR clone 281191 (TRAV12-3, TRAJ10)
SHLPLTGGGNKITF

SEQ ID NO: 562382 - protein, 13 aa, Homo sapiens
  CDR3 for beta chain variable domain of TCR clone 281191 (TRBV20-1, TRBJ2-5)
CSARGDYQETQYF

SEQ ID NO: 562383 - protein, 13 aa, Homo sapiens
  CDR3 for alpha chain variable domain of TCR clone 281192 (TRAV13-1, TRAJ10)
CAALEGGGSKLTF

SEQ ID NO: 562384 - protein, 13 aa, Homo sapiens
  CDR3 for beta chain variable domain of TCR clone 281192 (TRBV7-9, TRBJ1-2)
CASSLKQNYGYTF

SEQ ID NO: 562385 - protein, 12 aa, Homo sapiens
  CDR3 for alpha chain variable domain of TCR clone 281193 (TRAV8-4, TRAJ43)
CAVSVNNNEMRF

SEQ ID NO: 562386 - protein, 15 aa, Homo sapiens
  CDR3 for beta chain variable domain of TCR clone 281193 (TRBV20-1, TRBJ2-7)
CSARDPVKGEGEQYF

SEQ ID NO: 562387 - protein, 15 aa, Homo sapiens
  CDR3 for alpha chain variable domain of TCR clone 281194 (TRAV22, TRAJ45)
CAAKYSGGGADGLTF

SEQ ID NO: 562388 - protein, 15 aa, Homo sapiens
  CDR3 for beta chain variable domain of TCR clone 281194 (TRBV19, TRBJ1-2)
CASSVGQVLNYGYTF

SEQ ID NO: 562389 - protein, 11 aa, Homo sapiens
  CDR3 for alpha chain variable domain of TCR clone 281195 (TRAV2, TRAJ13)
CASGGYQTVTC

SEQ ID NO: 562390 - protein, 14 aa, Homo sapiens
  CDR3 for beta chain variable domain of TCR clone 281195 (TRBV7-3, TRBJ2-1)
CASRLAGGTNEQFF

SEQ ID NO: 562391 - protein, 12 aa, Homo sapiens
  CDR3 for alpha chain variable domain of TCR clone 281196 (TRAV3, TRAJ43)
CAVRDPNNDMRF

SEQ ID NO: 562392 - protein, 17 aa, Homo sapiens
  CDR3 for beta chain variable domain of TCR clone 281196 (TRBV7-3, TRBJ2-3)
CASSLMKRMRGADTQYF

SEQ ID NO: 562393 - protein, 15 aa, Homo sapiens
  CDR3 for alpha chain variable domain of TCR clone 281197 (TRAV9-2, TRAJ10)
CALKVLTGGGNKLTF

SEQ ID NO: 562394 - protein, 15 aa, Homo sapiens
  CDR3 for beta chain variable domain of TCR clone 281197 (TRBV20-1, TRBJ2-5)
CSARGTSGGGETQYF

SEQ ID NO: 562395 - protein, 15 aa, Homo sapiens
  CDR3 for alpha chain variable domain of TCR clone 281198 (TRAV26-1, TRAJ29)
CIVRVEGSGNTRLVF

SEQ ID NO: 562396 - protein, 14 aa, Homo sapiens
  CDR3 for beta chain variable domain of TCR clone 281198 (TRBV25-1, TRBJ1-1)
CASTHLGGNTEAFF

SEQ ID NO: 562397 - protein, 13 aa, Homo sapiens
  CDR3 for alpha chain variable domain of TCR clone 281199 (TRAV12-2, TRAJ12)
CAVNWDSSYKLIF

SEQ ID NO: 562398 - protein, 16 aa, Homo sapiens
  CDR3 for beta chain variable domain of TCR clone 281199 (TRBV13, TRBJ2-2)
CASSEVFGANTGELFF

SEQ ID NO: 562399 - protein, 15 aa, Homo sapiens
  CDR3 for alpha chain variable domain of TCR clone 281200 (TRAV23/DV6, TRAJ44)
CAASGGTGTASKLTF

SEQ ID NO: 562400 - protein, 17 aa, Homo sapiens
  CDR3 for beta chain variable domain of TCR clone 281200 (TRBV20-1, TRBJ2-1)
CSASSSGLAGSYNEQFF

SEQ ID NO: 562401 - protein, 19 aa, Homo sapiens
  CDR3 for alpha chain variable domain of TCR clone 281201 (TRAV8-3, TRAJ4)
LSTSVVWVFYSGGYNKLIF

SEQ ID NO: 562402 - protein, 14 aa, Homo sapiens
  CDR3 for beta chain variable domain of TCR clone 281201 (TRBV7-9, TRBJ2-3)
CASSLEDGTDTQYF

SEQ ID NO: 562403 - protein, 14 aa, Homo sapiens
  CDR3 for alpha chain variable domain of TCR clone 281202 (TRAV12-1, TRAJ34)
CVVNLDYNTDKLIF

SEQ ID NO: 562404 - protein, 17 aa, Homo sapiens
  CDR3 for beta chain variable domain of TCR clone 281202 (TRBV20-1, TRBJ2-7)
CSAAGTSGGGSSYEQYV

SEQ ID NO: 562405 - protein, 15 aa, Homo sapiens
  CDR3 for alpha chain variable domain of TCR clone 281203 (TRAV17, TRAJ54)
CATEKLGQGAQKLVF

SEQ ID NO: 562406 - protein, 15 aa, Homo sapiens
  CDR3 for beta chain variable domain of TCR clone 281203 (TRBV5-1, TRBJ2-7)
CASSLNGGPAREQYF

SEQ ID NO: 562407 - protein, 13 aa, Homo sapiens
  CDR3 for alpha chain variable domain of TCR clone 281204 (TRAV20, TRAJ37)
CAGCSSNTGKLIF

SEQ ID NO: 562408 - protein, 15 aa, Homo sapiens
  CDR3 for beta chain variable domain of TCR clone 281204 (TRBV2, TRBJ1-2)
CASSEIGGANYGYTF

SEQ ID NO: 562409 - protein, 10 aa, Homo sapiens
  CDR3 for alpha chain variable domain of TCR clone 281205 (TRAV27, TRAJ37)
CAGGVGKLIF

SEQ ID NO: 562410 - protein, 13 aa, Homo sapiens
  CDR3 for beta chain variable domain of TCR clone 281205 (TRBV19, TRBJ2-7)
CASRKAGGSEQYF

SEQ ID NO: 562411 - protein, 12 aa, Homo sapiens
  CDR3 for alpha chain variable domain of TCR clone 281206 (TRAV13-2, TRAJ8)
CAPWLGFQKLVF

SEQ ID NO: 562412 - protein, 12 aa, Homo sapiens
  CDR3 for beta chain variable domain of TCR clone 281206 (TRBV12-4, TRBJ2-1)
CASSPGRNEQFF

SEQ ID NO: 562413 - protein, 16 aa, Homo sapiens
  CDR3 for alpha chain variable domain of TCR clone 281207 (TRAV20, TRAJ28)
CAVRDPSGAGSYQLTF

SEQ ID NO: 562414 - protein, 14 aa, Homo sapiens
  CDR3 for beta chain variable domain of TCR clone 281207 (TRBV25-1, TRBJ1-1)
CASTHLGGNTEAFF

SEQ ID NO: 562415 - protein, 14 aa, Homo sapiens
  CDR3 for alpha chain variable domain of TCR clone 281208 (TRAV1-2, TRAJ8)
CAVREDTGFQKLVF

SEQ ID NO: 562416 - protein, 15 aa, Homo sapiens
  CDR3 for beta chain variable domain of TCR clone 281208 (TRBV11-2, TRBJ2-2)
CASSPSGGGTGELFF

SEQ ID NO: 562417 - protein, 14 aa, Homo sapiens
  CDR3 for alpha chain variable domain of TCR clone 281209 (TRAV26-1, TRAJ38)
CIADNAGNNRKLIW

SEQ ID NO: 562418 - protein, 15 aa, Homo sapiens
  CDR3 for beta chain variable domain of TCR clone 281209 (TRBV27, TRBJ2-1)
CASSNGGGSANEQFF

SEQ ID NO: 562419 - protein, 13 aa, Homo sapiens
  CDR3 for alpha chain variable domain of TCR clone 281210 (TRAV21, TRAJ27)
CAARPGNAGKSTF

SEQ ID NO: 562420 - protein, 15 aa, Homo sapiens
  CDR3 for beta chain variable domain of TCR clone 281210 (TRBV11-3, TRBJ2-7)
CASSAGPASSYEQYF

SEQ ID NO: 562421 - protein, 11 aa, Homo sapiens
  CDR3 for alpha chain variable domain of TCR clone 281211 (TRAV17, TRAJ9)
CATTGGFKTIF

SEQ ID NO: 562422 - protein, 19 aa, Homo sapiens
  CDR3 for beta chain variable domain of TCR clone 281211 (TRBV28, TRBJ2-7)
CASSYSGTSRLGWVYEQYF

SEQ ID NO: 562423 - protein, 11 aa, Homo sapiens
  CDR3 for alpha chain variable domain of TCR clone 281212 (TRAV2, TRAJ21)
CAVFNFNKFYF

SEQ ID NO: 562424 - protein, 18 aa, Homo sapiens
  CDR3 for beta chain variable domain of TCR clone 281212 (TRBV18, TRBJ2-3)
CASSYTSGAAGGTDTQYF

SEQ ID NO: 562425 - protein, 14 aa, Homo sapiens
  CDR3 for alpha chain variable domain of TCR clone 281213 (TRAV12-3, TRAJ42)
CAMNYGGSQGNLIF

SEQ ID NO: 562426 - protein, 17 aa, Homo sapiens
  CDR3 for beta chain variable domain of TCR clone 281213 (TRBV15, TRBJ1-4)
CATSRYGTGDPNEKLFF

SEQ ID NO: 562427 - protein, 14 aa, Homo sapiens
  CDR3 for alpha chain variable domain of TCR clone 281214 (TRAV4, TRAJ26)
CLVRPHNSGQNFVF

SEQ ID NO: 562428 - protein, 17 aa, Homo sapiens
  CDR3 for beta chain variable domain of TCR clone 281214 (TRBV24-1, TRBJ2-1)
CATSDVSTSGTYNEQFF

SEQ ID NO: 562429 - protein, 12 aa, Homo sapiens
  CDR3 for alpha chain variable domain of TCR clone 281215 (TRAV1-1, TRAJ8)
CAGGTGFQKLVF

SEQ ID NO: 562430 - protein, 16 aa, Homo sapiens
  CDR3 for beta chain variable domain of TCR clone 281215 (TRBV7-7, TRBJ2-1)
CASSLASGTSYNEQFF

SEQ ID NO: 562431 - protein, 12 aa, Homo sapiens
  CDR3 for alpha chain variable domain of TCR clone 281216 (TRAV1-1, TRAJ39)
CAVPVVGNMLTF

SEQ ID NO: 562432 - protein, 15 aa, Homo sapiens
  CDR3 for beta chain variable domain of TCR clone 281216 (TRBV19, TRBJ1-6)
CASSTQVAVGSPLHF

SEQ ID NO: 562433 - protein, 16 aa, Homo sapiens
  CDR3 for alpha chain variable domain of TCR clone 281217 (TRAV12-2, TRAJ43)
CAGDDMRFGAGTRLTV

SEQ ID NO: 562434 - protein, 16 aa, Homo sapiens
  CDR3 for beta chain variable domain of TCR clone 281217 (TRBV7-6, TRBJ2-1)
CASSAPGPSSYNEQFF

SEQ ID NO: 562435 - protein, 18 aa, Homo sapiens
  CDR3 for alpha chain variable domain of TCR clone 281218 (TRAV29/DV5, TRAJ52)
CAAGFRGAGGTSYGKLTF

SEQ ID NO: 562436 - protein, 16 aa, Homo sapiens
  CDR3 for beta chain variable domain of TCR clone 281218 (TRBV7-3, TRBJ2-1)
CASSVEGYRSYNEQFF

SEQ ID NO: 562437 - protein, 13 aa, Homo sapiens
  CDR3 for alpha chain variable domain of TCR clone 281219 (TRAV12-3, TRAJ54)
CAMKVQGAQKLVF

SEQ ID NO: 562438 - protein, 15 aa, Homo sapiens
  CDR3 for beta chain variable domain of TCR clone 281219 (TRBV7-9, TRBJ1-2)
CASSSVDRSNYGYTF

SEQ ID NO: 562439 - protein, 14 aa, Homo sapiens
  CDR3 for alpha chain variable domain of TCR clone 281220 (TRAV12-3, TRAJ41)
CAMSAGNSGYELNF

SEQ ID NO: 562440 - protein, 11 aa, Homo sapiens
  CDR3 for beta chain variable domain of TCR clone 281220 (TRBV7-2, TRBJ2-3)
CASSSSDTQYF

SEQ ID NO: 562441 - protein, 11 aa, Homo sapiens
  CDR3 for alpha chain variable domain of TCR clone 281221 (TRAV12-3, TRAJ43)
CAMSVSTDMRF

SEQ ID NO: 562442 - protein, 14 aa, Homo sapiens
  CDR3 for beta chain variable domain of TCR clone 281221 (TRBV12-5, TRBJ2-5)
CASGSRTHQETQYF

SEQ ID NO: 562443 - protein, 17 aa, Homo sapiens
  CDR3 for alpha chain variable domain of TCR clone 281222 (TRAV3, TRAJ6)
CAVRDGPRAEGSYIPTF

SEQ ID NO: 562444 - protein, 14 aa, Homo sapiens
  CDR3 for beta chain variable domain of TCR clone 281222 (TRBV7-2, TRBJ2-7)
CASTPKTSFYEQYF

SEQ ID NO: 562445 - protein, 14 aa, Homo sapiens
  CDR3 for alpha chain variable domain of TCR clone 281223 (TRAV12-1, TRAJ17)
CVVNYKAAGNKLTF

SEQ ID NO: 562446 - protein, 14 aa, Homo sapiens
  CDR3 for beta chain variable domain of TCR clone 281223 (TRBV7-2, TRBJ1-1)
CASSFLTGTTAAFF

SEQ ID NO: 562447 - protein, 14 aa, Homo sapiens
  CDR3 for alpha chain variable domain of TCR clone 281224 (TRAV16, TRAJ17)
CALSGRAAGNKLIS

SEQ ID NO: 562448 - protein, 15 aa, Homo sapiens
  CDR3 for beta chain variable domain of TCR clone 281224 (TRBV3-1, TRBJ1-2)
CASSPTRLPEGGYTF

SEQ ID NO: 562449 - protein, 15 aa, Homo sapiens
  CDR3 for alpha chain variable domain of TCR clone 281225 (TRAV3, TRAJ5)
CAVRDLDTGRRALIF

SEQ ID NO: 562450 - protein, 13 aa, Homo sapiens
  CDR3 for beta chain variable domain of TCR clone 281225 (TRBV6-4, TRBJ2-3)
CASRDSGTDTQYF

SEQ ID NO: 562451 - protein, 14 aa, Homo sapiens
  CDR3 for alpha chain variable domain of TCR clone 281226 (TRAV1-2, TRAJ16)
CAVNRFSDGQKLIF

SEQ ID NO: 562452 - protein, 14 aa, Homo sapiens
  CDR3 for beta chain variable domain of TCR clone 281226 (TRBV12-5, TRBJ2-5)
CASGSRTHQETQYF

SEQ ID NO: 562453 - protein, 16 aa, Homo sapiens
  CDR3 for alpha chain variable domain of TCR clone 281227 (TRAV30, TRAJ24)
WGTEIVDADSWGKFQF

SEQ ID NO: 562454 - protein, 17 aa, Homo sapiens
  CDR3 for beta chain variable domain of TCR clone 281227 (TRBV20-1, TRBJ2-1)
CSAPTRLAGTRYNEQFF

SEQ ID NO: 562455 - protein, 17 aa, Homo sapiens
  CDR3 for alpha chain variable domain of TCR clone 281228 (TRAV14/DV4, TRAJ4)
CSMREASGRGGYNKLIF

SEQ ID NO: 562456 - protein, 15 aa, Homo sapiens
  CDR3 for beta chain variable domain of TCR clone 281228 (TRBV20-1, TRBJ2-1)
CSARGIGGTYNEQFF

SEQ ID NO: 562457 - protein, 11 aa, Homo sapiens
  CDR3 for alpha chain variable domain of TCR clone 281229 (TRAV13-1, TRAJ6)
CATLESYIPTF

SEQ ID NO: 562458 - protein, 12 aa, Homo sapiens
  CDR3 for beta chain variable domain of TCR clone 281229 (TRBV11-2, TRBJ2-1)
CASSPGNNEQFF

SEQ ID NO: 562459 - protein, 15 aa, Homo sapiens
  CDR3 for alpha chain variable domain of TCR clone 281230 (TRAV3, TRAJ22)
CAVRDRGGSARQLTF

SEQ ID NO: 562460 - protein, 13 aa, Homo sapiens
  CDR3 for beta chain variable domain of TCR clone 281230 (TRBV10-3, TRBJ1-2)
CAISERDSYGYTF

SEQ ID NO: 562461 - protein, 13 aa, Homo sapiens
  CDR3 for alpha chain variable domain of TCR clone 281231 (TRAV13-1, TRAJ21)
CAASIYNFNKFYF

SEQ ID NO: 562462 - protein, 18 aa, Homo sapiens
  CDR3 for beta chain variable domain of TCR clone 281231 (TRBV7-9, TRBJ2-7)
CASSLTTSGSRTWYEQYF

SEQ ID NO: 562463 - protein, 15 aa, Homo sapiens
  CDR3 for alpha chain variable domain of TCR clone 281232 (TRAV16, TRAJ17)
FALSVQEAAGNKLTF

SEQ ID NO: 562464 - protein, 15 aa, Homo sapiens
  CDR3 for beta chain variable domain of TCR clone 281232 (TRBV12-4, TRBJ1-5)
CASTQGTGPLQPQHF

SEQ ID NO: 562465 - protein, 15 aa, Homo sapiens
  CDR3 for alpha chain variable domain of TCR clone 281233 (TRAV2, TRAJ15)
CAVEDRGQAGTALIF

SEQ ID NO: 562466 - protein, 15 aa, Homo sapiens
  CDR3 for beta chain variable domain of TCR clone 281233 (TRBV28, TRBJ2-3)
CASSPDRQGANTQYF

SEQ ID NO: 562467 - protein, 16 aa, Homo sapiens
  CDR3 for alpha chain variable domain of TCR clone 281234 (TRAV26-1, TRAJ36)
CIVRVPDQTGANNLFF

SEQ ID NO: 562468 - protein, 21 aa, Homo sapiens
  CDR3 for beta chain variable domain of TCR clone 281234 (TRBV6-1, TRBJ1-1)
CASSGVGIYKGISGFDTEAFF

SEQ ID NO: 562469 - protein, 11 aa, Homo sapiens
  CDR3 for alpha chain variable domain of TCR clone 281235 (TRAV13-2, TRAJ47)
CAEIRGNKLVF

SEQ ID NO: 562470 - protein, 13 aa, Homo sapiens
  CDR3 for beta chain variable domain of TCR clone 281235 (TRBV2, TRBJ1-1)
CASSEGGNTEAFF

SEQ ID NO: 562471 - protein, 14 aa, Homo sapiens
  CDR3 for alpha chain variable domain of TCR clone 281236 (TRAV14/DV4, TRAJ15)
CAMRRDQAGTALIF

SEQ ID NO: 562472 - protein, 13 aa, Homo sapiens
  CDR3 for beta chain variable domain of TCR clone 281236 (TRBV7-8, TRBJ1-2)
CASSAQSYYGYTF

SEQ ID NO: 562473 - protein, 12 aa, Homo sapiens
  CDR3 for alpha chain variable domain of TCR clone 281237 (TRAV13-1, TRAJ49)
CAAPNTGNQFYF

SEQ ID NO: 562474 - protein, 17 aa, Homo sapiens
  CDR3 for beta chain variable domain of TCR clone 281237 (TRBV25-1, TRBJ2-7)
CASSDARVVFSSYEQYF

SEQ ID NO: 562475 - protein, 17 aa, Homo sapiens
  CDR3 for alpha chain variable domain of TCR clone 281238 (TRAV27, TRAJ49)
TAAQPGDTTNTGNQFYF

SEQ ID NO: 562476 - protein, 16 aa, Homo sapiens
  CDR3 for beta chain variable domain of TCR clone 281238 (TRBV19, TRBJ2-2)
CASSFPGQGLAGELFF

SEQ ID NO: 562477 - protein, 13 aa, Homo sapiens
  CDR3 for alpha chain variable domain of TCR clone 281239 (TRAV13-1, TRAJ11)
CAASKEGYSTLTF

SEQ ID NO: 562478 - protein, 21 aa, Homo sapiens
  CDR3 for beta chain variable domain of TCR clone 281239 (TRBV23-1, TRBJ2-5)
CASTPPGQGPGGDPVLRARHA

SEQ ID NO: 562479 - protein, 12 aa, Homo sapiens
  CDR3 for alpha chain variable domain of TCR clone 281240 (TRAV16, TRAJ36)
CALQTGANNLFF

SEQ ID NO: 562480 - protein, 16 aa, Homo sapiens
  CDR3 for beta chain variable domain of TCR clone 281240 (TRBV13, TRBJ2-2)
CASSPRTGEHTGELFF

SEQ ID NO: 562481 - protein, 11 aa, Homo sapiens
  CDR3 for alpha chain variable domain of TCR clone 281241 (TRAV12-2, TRAJ31)
CAVTRWARLMF

SEQ ID NO: 562482 - protein, 13 aa, Homo sapiens
  CDR3 for beta chain variable domain of TCR clone 281241 (TRBV20-1, TRBJ2-7)
CSARSVHPYEQYF

SEQ ID NO: 562483 - protein, 11 aa, Homo sapiens
  CDR3 for alpha chain variable domain of TCR clone 281242 (TRAV17, TRAJ9)
CATTGGFKTIF

SEQ ID NO: 562484 - protein, 14 aa, Homo sapiens
  CDR3 for beta chain variable domain of TCR clone 281242 (TRBV6-5, TRBJ2-2)
CASTEGQETGELFF

SEQ ID NO: 562485 - protein, 13 aa, Homo sapiens
  CDR3 for alpha chain variable domain of TCR clone 281243 (TRAV4, TRAJ36)
CLVGPTGANNLFF

SEQ ID NO: 562486 - protein, 16 aa, Homo sapiens
  CDR3 for beta chain variable domain of TCR clone 281243 (TRBV7-9, TRBJ1-2)
CASSPGGGAINYGYAF

SEQ ID NO: 562487 - protein, 16 aa, Homo sapiens
  CDR3 for alpha chain variable domain of TCR clone 281244 (TRAV3, TRAJ10)
CAVRDMRAGGGNKLTF

SEQ ID NO: 562488 - protein, 14 aa, Homo sapiens
  CDR3 for beta chain variable domain of TCR clone 281244 (TRBV12-4, TRBJ1-4)
CASRMTGRSEKLFC

SEQ ID NO: 562489 - protein, 13 aa, Homo sapiens
  CDR3 for alpha chain variable domain of TCR clone 281245 (TRAV2, TRAJ17)
CAVWGAAGNKLTF

SEQ ID NO: 562490 - protein, 15 aa, Homo sapiens
  CDR3 for beta chain variable domain of TCR clone 281245 (TRBV12-4, TRBJ2-1)
CASSLSGGASNEQFF

SEQ ID NO: 562491 - protein, 14 aa, Homo sapiens
  CDR3 for alpha chain variable domain of TCR clone 281246 (TRAV26-1, TRAJ39)
CIVRGSRAGNMLTF

SEQ ID NO: 562492 - protein, 15 aa, Homo sapiens
  CDR3 for beta chain variable domain of TCR clone 281246 (TRBV7-9, TRBJ2-2)
CASGPLDTFPGELFF

SEQ ID NO: 562493 - protein, 14 aa, Homo sapiens
  CDR3 for alpha chain variable domain of TCR clone 281247 (TRAV8-3, TRAJ44)
CAVGLTGTASKLTF

SEQ ID NO: 562494 - protein, 15 aa, Homo sapiens
  CDR3 for beta chain variable domain of TCR clone 281247 (TRBV7-9, TRBJ1-6)
CASSSPGRGNSPLHF

SEQ ID NO: 562495 - protein, 13 aa, Homo sapiens
  CDR3 for alpha chain variable domain of TCR clone 281248 (TRAV12-2, TRAJ17)
CLLFKAAGNKLTF

SEQ ID NO: 562496 - protein, 17 aa, Homo sapiens
  CDR3 for beta chain variable domain of TCR clone 281248 (TRBV20-1, TRBJ2-2)
CSASGSGQGGLTGELFF

SEQ ID NO: 562497 - protein, 13 aa, Homo sapiens
  CDR3 for alpha chain variable domain of TCR clone 281249 (TRAV12-2, TRAJ40)
CAVKGPGTYKYIF

SEQ ID NO: 562498 - protein, 16 aa, Homo sapiens
  CDR3 for beta chain variable domain of TCR clone 281249 (TRBV6-1, TRBJ2-5)
CASSETLDRGAETQYF

SEQ ID NO: 562499 - protein, 12 aa, Homo sapiens
  CDR3 for alpha chain variable domain of TCR clone 281250 (TRAV21, TRAJ15)
CAVNQAGTALIF

SEQ ID NO: 562500 - protein, 13 aa, Homo sapiens
  CDR3 for beta chain variable domain of TCR clone 281250 (TRBV11-2, TRBJ2-5)
CASSSTGEDTHYF

SEQ ID NO: 562501 - protein, 10 aa, Homo sapiens
  CDR3 for alpha chain variable domain of TCR clone 281251 (TRAV8-3, TRAJ43)
CAVALADMRF

SEQ ID NO: 562502 - protein, 14 aa, Homo sapiens
  CDR3 for beta chain variable domain of TCR clone 281251 (TRBV4-2, TRBJ2-1)
CGSGLDRAYNEQFF

SEQ ID NO: 562503 - protein, 13 aa, Homo sapiens
  CDR3 for alpha chain variable domain of TCR clone 281252 (TRAV30, TRAJ24)
CGTVNDSWGQLQF

SEQ ID NO: 562504 - protein, 15 aa, Homo sapiens
  CDR3 for beta chain variable domain of TCR clone 281252 (TRBV25-1, TRBJ1-4)
CASSPGDSTNEKLFF

SEQ ID NO: 562505 - protein, 17 aa, Homo sapiens
  CDR3 for alpha chain variable domain of TCR clone 281253 (TRAV26-1, TRAJ11)
CIFRVGQSNSGYSTLTF

SEQ ID NO: 562506 - protein, 15 aa, Homo sapiens
  CDR3 for beta chain variable domain of TCR clone 281253 (TRBV27, TRBJ2-5)
CASSLIPSGGETQYF

SEQ ID NO: 562507 - protein, 13 aa, Homo sapiens
  CDR3 for alpha chain variable domain of TCR clone 281254 (TRAV8-3, TRAJ48)
CAVVRFGNEKLSF

SEQ ID NO: 562508 - protein, 16 aa, Homo sapiens
  CDR3 for beta chain variable domain of TCR clone 281254 (TRBV20-1, TRBJ2-5)
CSARDFASGIQETQYF

SEQ ID NO: 562509 - protein, 12 aa, Homo sapiens
  CDR3 for alpha chain variable domain of TCR clone 281255 (TRAV1-1, TRAJ20)
CAVREDDYRLSF

SEQ ID NO: 562510 - protein, 15 aa, Homo sapiens
  CDR3 for beta chain variable domain of TCR clone 281255 (TRBV5-1, TRBJ2-1)
CASSPPRAPYNEQFF

SEQ ID NO: 562511 - protein, 14 aa, Homo sapiens
  CDR3 for alpha chain variable domain of TCR clone 281256 (TRAV1-2, TRAJ8)
CAVREDTGFQKLVF

SEQ ID NO: 562512 - protein, 15 aa, Homo sapiens
  CDR3 for beta chain variable domain of TCR clone 281256 (TRBV11-1, TRBJ1-3)
CASTDPRAFGNTIYF

SEQ ID NO: 562513 - protein, 12 aa, Homo sapiens
  CDR3 for alpha chain variable domain of TCR clone 281257 (TRAV12-1, TRAJ40)
FVVNGETYKYIF

SEQ ID NO: 562514 - protein, 14 aa, Homo sapiens
  CDR3 for beta chain variable domain of TCR clone 281257 (TRBV7-9, TRBJ1-1)
CASSSTKGNTEAFF

SEQ ID NO: 562515 - protein, 15 aa, Homo sapiens
  CDR3 for alpha chain variable domain of TCR clone 281258 (TRAV3, TRAJ5)
CAVRDLDTGRRALIF

SEQ ID NO: 562516 - protein, 13 aa, Homo sapiens
  CDR3 for beta chain variable domain of TCR clone 281258 (TRBV12-4, TRBJ2-7)
CASSPTGTYEQYF

SEQ ID NO: 562517 - protein, 14 aa, Homo sapiens
  CDR3 for alpha chain variable domain of TCR clone 281259 (TRAV8-4, TRAJ13)
CAVTLSGGYQKVTF

SEQ ID NO: 562518 - protein, 15 aa, Homo sapiens
  CDR3 for beta chain variable domain of TCR clone 281259 (TRBV7-3, TRBJ2-1)
CASSSLAGVHNEQFS

SEQ ID NO: 562519 - protein, 16 aa, Homo sapiens
  CDR3 for alpha chain variable domain of TCR clone 281260 (TRAV20, TRAJ28)
CAVRDPSGAGSYQLTF

SEQ ID NO: 562520 - protein, 12 aa, Homo sapiens
  CDR3 for beta chain variable domain of TCR clone 281260 (TRBV7-9, TRBJ1-4)
CASSTDREKLFF

SEQ ID NO: 562521 - protein, 14 aa, Homo sapiens
  CDR3 for alpha chain variable domain of TCR clone 281261 (TRAV5, TRAJ4)
CAASFSGGYNKLIF

SEQ ID NO: 562522 - protein, 14 aa, Homo sapiens
  CDR3 for beta chain variable domain of TCR clone 281261 (TRBV5-1, TRBJ2-7)
CASSRGESLYEQYF

SEQ ID NO: 562523 - protein, 14 aa, Homo sapiens
  CDR3 for alpha chain variable domain of TCR clone 281262 (TRAV38-1, TRAJ33)
CAFMKTYSNYQLIW

SEQ ID NO: 562524 - protein, 15 aa, Homo sapiens
  CDR3 for beta chain variable domain of TCR clone 281262 (TRBV7-6, TRBJ2-1)
CASSLGGQSHNEQFF

SEQ ID NO: 562525 - protein, 13 aa, Homo sapiens
  CDR3 for alpha chain variable domain of TCR clone 281263 (TRAV17, TRAJ22)
CAHHSGSARKLTF

SEQ ID NO: 562526 - protein, 13 aa, Homo sapiens
  CDR3 for beta chain variable domain of TCR clone 281263 (TRBV27, TRBJ1-4)
CASSLMGDEKLFF

SEQ ID NO: 562527 - protein, 12 aa, Homo sapiens
  CDR3 for alpha chain variable domain of TCR clone 281264 (TRAV13-1, TRAJ49)
CAAPNTGNQFYF

SEQ ID NO: 562528 - protein, 13 aa, Homo sapiens
  CDR3 for beta chain variable domain of TCR clone 281264 (TRBV2, TRBJ2-3)
CASGRGRTDTQYF

SEQ ID NO: 562529 - protein, 13 aa, Homo sapiens
  CDR3 for alpha chain variable domain of TCR clone 281265 (TRAV26-1, TRAJ41)
CIVRINSGYALNF

SEQ ID NO: 562530 - protein, 13 aa, Homo sapiens
  CDR3 for beta chain variable domain of TCR clone 281265 (TRBV20-1, TRBJ1-5)
CSATSAGGQPQHF

SEQ ID NO: 562531 - protein, 15 aa, Homo sapiens
  CDR3 for alpha chain variable domain of TCR clone 281266 (TRAV3, TRAJ30)
CAVRDEYGRDDKNIL

SEQ ID NO: 562532 - protein, 16 aa, Homo sapiens
  CDR3 for beta chain variable domain of TCR clone 281266 (TRBV5-1, TRBJ2-5)
CASSLANHRGRETQYF

SEQ ID NO: 562533 - protein, 15 aa, Homo sapiens
  CDR3 for alpha chain variable domain of TCR clone 281267 (TRAV21, TRAJ45)
CAVSYSGGGADGLTF

SEQ ID NO: 562534 - protein, 13 aa, Homo sapiens
  CDR3 for beta chain variable domain of TCR clone 281267 (TRBV20-1, TRBJ2-5)
CSGATELQETQYF

SEQ ID NO: 562535 - protein, 20 aa, Homo sapiens
  CDR3 for alpha chain variable domain of TCR clone 281268 (TRAV25, TRAJ21)
TATQTTDVGTYPLSFNKFYF

SEQ ID NO: 562536 - protein, 16 aa, Homo sapiens
  CDR3 for beta chain variable domain of TCR clone 281268 (TRBV13, TRBJ2-2)
CASSPRTGEHTGELFF

SEQ ID NO: 562537 - protein, 15 aa, Homo sapiens
  CDR3 for alpha chain variable domain of TCR clone 281269 (TRAV12-3, TRAJ27)
CAMRAYNTSAGKSTF

SEQ ID NO: 562538 - protein, 13 aa, Homo sapiens
  CDR3 for beta chain variable domain of TCR clone 281269 (TRBV11-2, TRBJ2-5)
CASSRGPSETQYF

SEQ ID NO: 562539 - protein, 12 aa, Homo sapiens
  CDR3 for alpha chain variable domain of TCR clone 281270 (TRAV2, TRAJ31)
CAVEDNNARRMF

SEQ ID NO: 562540 - protein, 13 aa, Homo sapiens
  CDR3 for beta chain variable domain of TCR clone 281270 (TRBV7-9, TRBJ2-3)
CASSAAGSDTQYF

SEQ ID NO: 562541 - protein, 14 aa, Homo sapiens
  CDR3 for alpha chain variable domain of TCR clone 281271 (TRAV1-2, TRAJ16)
CAVNRLSDGQKLLF

SEQ ID NO: 562542 - protein, 14 aa, Homo sapiens
  CDR3 for beta chain variable domain of TCR clone 281271 (TRBV6-6, TRBJ1-5)
CASSYGPANQPQHF

SEQ ID NO: 562543 - protein, 16 aa, Homo sapiens
  CDR3 for alpha chain variable domain of TCR clone 281272 (TRAV12-2, TRAJ28)
CAVITDSGAGSYQLTF

SEQ ID NO: 562544 - protein, 15 aa, Homo sapiens
  CDR3 for beta chain variable domain of TCR clone 281272 (TRBV28, TRBJ2-5)
CASSSGRTIQETQYF

SEQ ID NO: 562545 - protein, 14 aa, Homo sapiens
  CDR3 for alpha chain variable domain of TCR clone 281273 (TRAV12-1, TRAJ23)
CVVIVYNQGGKLIF

SEQ ID NO: 562546 - protein, 18 aa, Homo sapiens
  CDR3 for beta chain variable domain of TCR clone 281273 (TRBV11-2, TRBJ2-3)
CASSLGGASRGAPNTQYF

SEQ ID NO: 562547 - protein, 14 aa, Homo sapiens
  CDR3 for alpha chain variable domain of TCR clone 281274 (TRAV1-2, TRAJ16)
CAVNRFSDGQKLLF

SEQ ID NO: 562548 - protein, 13 aa, Homo sapiens
  CDR3 for beta chain variable domain of TCR clone 281274 (TRBV6-5, TRBJ1-1)
QTSVYFCALRDFF

SEQ ID NO: 562549 - protein, 16 aa, Homo sapiens
  CDR3 for alpha chain variable domain of TCR clone 281275 (TRAV23/DV6, TRAJ9)
CEASIGGNTGGFKTIF

SEQ ID NO: 562550 - protein, 13 aa, Homo sapiens
  CDR3 for beta chain variable domain of TCR clone 281275 (TRBV7-9, TRBJ1-2)
CASSLKQNYGYTF

SEQ ID NO: 562551 - protein, 15 aa, Homo sapiens
  CDR3 for alpha chain variable domain of TCR clone 281276 (TRAV12-1, TRAJ45)
CVVLSGGGGADGLTF

SEQ ID NO: 562552 - protein, 13 aa, Homo sapiens
  CDR3 for beta chain variable domain of TCR clone 281276 (TRBV2, TRBJ1-1)
CARNPTGGFHAFF

SEQ ID NO: 562553 - protein, 15 aa, Homo sapiens
  CDR3 for alpha chain variable domain of TCR clone 281277 (TRAV17, TRAJ35)
CATAFVIVFGNVLHC

SEQ ID NO: 562554 - protein, 15 aa, Homo sapiens
  CDR3 for beta chain variable domain of TCR clone 281277 (TRBV7-9, TRBJ2-7)
CASSLALAEAYEQYF

SEQ ID NO: 562555 - protein, 17 aa, Homo sapiens
  CDR3 for alpha chain variable domain of TCR clone 281278 (TRAV13-1, TRAJ28)
CAASPPYPGAGSYQLTF

SEQ ID NO: 562556 - protein, 15 aa, Homo sapiens
  CDR3 for beta chain variable domain of TCR clone 281278 (TRBV6-3, TRBJ2-2)
CASSFLATLTGELFF

SEQ ID NO: 562557 - protein, 13 aa, Homo sapiens
  CDR3 for alpha chain variable domain of TCR clone 281279 (TRAV30, TRAJ18)
CGTEAPTLGRLYF

SEQ ID NO: 562558 - protein, 14 aa, Homo sapiens
  CDR3 for beta chain variable domain of TCR clone 281279 (TRBV19, TRBJ2-1)
CASSAGLSGNEQFF

SEQ ID NO: 562559 - protein, 14 aa, Homo sapiens
  CDR3 for alpha chain variable domain of TCR clone 281280 (TRAV12-3, TRAJ10)
SHLPLTGGGNKLTF

SEQ ID NO: 562560 - protein, 16 aa, Homo sapiens
  CDR3 for beta chain variable domain of TCR clone 281280 (TRBV19, TRBJ2-2)
CASSPSGGLNTGELFF

SEQ ID NO: 562561 - protein, 17 aa, Homo sapiens
  CDR3 for alpha chain variable domain of TCR clone 281281 (TRAV3, TRAJ6)
CAVRDGPRAGGSYIPTF

SEQ ID NO: 562562 - protein, 20 aa, Homo sapiens
  CDR3 for beta chain variable domain of TCR clone 281281 (TRBV28, TRBJ2-1)
CASTPIGRSPGLTGGNEQFF

SEQ ID NO: 562563 - protein, 15 aa, Homo sapiens
  CDR3 for alpha chain variable domain of TCR clone 281282 (TRAV26-1, TRAJ33)
CIVRVAKGSNYQLIW

SEQ ID NO: 562564 - protein, 15 aa, Homo sapiens
  CDR3 for beta chain variable domain of TCR clone 281282 (TRBV5-1, TRBJ2-2)
CASSSQGGNTGELFF

SEQ ID NO: 562565 - protein, 11 aa, Homo sapiens
  CDR3 for alpha chain variable domain of TCR clone 281283 (TRAV1-1, TRAJ23)
CAVRQGGKLIF

SEQ ID NO: 562566 - protein, 15 aa, Homo sapiens
  CDR3 for beta chain variable domain of TCR clone 281283 (TRBV20-1, TRBJ1-1)
CSASRGVTGNTEAFV

SEQ ID NO: 562567 - protein, 14 aa, Homo sapiens
  CDR3 for alpha chain variable domain of TCR clone 281284 (TRAV1-2, TRAJ16)
CAVNRFSDGQKRLF

SEQ ID NO: 562568 - protein, 13 aa, Homo sapiens
  CDR3 for beta chain variable domain of TCR clone 281284 (TRBV19, TRBJ1-2)
CASSVPGQDGYTF

SEQ ID NO: 562569 - protein, 15 aa, Homo sapiens
  CDR3 for alpha chain variable domain of TCR clone 281285 (TRAV3, TRAJ22)
CAVRDRGGSARQLTF

SEQ ID NO: 562570 - protein, 14 aa, Homo sapiens
  CDR3 for beta chain variable domain of TCR clone 281285 (TRBV7-8, TRBJ2-7)
CASSVGQGAYEQYF

SEQ ID NO: 562571 - protein, 14 aa, Homo sapiens
  CDR3 for alpha chain variable domain of TCR clone 281286 (TRAV12-3, TRAJ10)
SHLPLMGGGNKLTF

SEQ ID NO: 562572 - protein, 22 aa, Homo sapiens
  CDR3 for beta chain variable domain of TCR clone 281286 (TRBV6-1, TRBJ1-3)
CASVQGGGWKHHVFWRGKLAHC

SEQ ID NO: 562573 - protein, 15 aa, Homo sapiens
  CDR3 for alpha chain variable domain of TCR clone 281287 (TRAV12-1, TRAJ42)
CMVTRDGGSQGNLIF

SEQ ID NO: 562574 - protein, 14 aa, Homo sapiens
  CDR3 for beta chain variable domain of TCR clone 281287 (TRBV11-2, TRBJ2-3)
CASSLGGGANTQYF

SEQ ID NO: 562575 - protein, 12 aa, Homo sapiens
  CDR3 for alpha chain variable domain of TCR clone 281288 (TRAV3, TRAJ20)
CAVRDPDYKLSF

SEQ ID NO: 562576 - protein, 15 aa, Homo sapiens
  CDR3 for beta chain variable domain of TCR clone 281288 (TRBV13, TRBJ2-1)
CASSFQPTRGNEQFF

SEQ ID NO: 562577 - protein, 13 aa, Homo sapiens
  CDR3 for alpha chain variable domain of TCR clone 281289 (TRAV38-1, TRAJ42)
CARWGGSLGNLIF

SEQ ID NO: 562578 - protein, 15 aa, Homo sapiens
  CDR3 for beta chain variable domain of TCR clone 281289 (TRBV10-3, TRBJ2-3)
CAISLTSGGTDTQYF

SEQ ID NO: 562579 - protein, 16 aa, Homo sapiens
  CDR3 for alpha chain variable domain of TCR clone 281290 (TRAV3, TRAJ37)
CAVRPHGSGNTGKLIF

SEQ ID NO: 562580 - protein, 17 aa, Homo sapiens
  CDR3 for beta chain variable domain of TCR clone 281290 (TRBV20-1, TRBJ2-1)
GSASSSGLAGSYNEQFF

SEQ ID NO: 562581 - protein, 15 aa, Homo sapiens
  CDR3 for alpha chain variable domain of TCR clone 281291 (TRAV13-2, TRAJ40)
CAENRSRQGTYKYIF

SEQ ID NO: 562582 - protein, 15 aa, Homo sapiens
  CDR3 for beta chain variable domain of TCR clone 281291 (TRBV19, TRBJ2-1)
CASSMGWNSNNQQFF

SEQ ID NO: 562583 - protein, 13 aa, Homo sapiens
  CDR3 for alpha chain variable domain of TCR clone 281292 (TRAV13-1, TRAJ39)
CSKYSNAGNMLTF

SEQ ID NO: 562584 - protein, 15 aa, Homo sapiens
  CDR3 for beta chain variable domain of TCR clone 281292 (TRBV20-1, TRBJ2-7)
CSARDWVSGMDEQYF

SEQ ID NO: 562585 - protein, 13 aa, Homo sapiens
  CDR3 for alpha chain variable domain of TCR clone 281293 (TRAV23/DV6, TRAJ16)
CAASISDGQKLLV

SEQ ID NO: 562586 - protein, 15 aa, Homo sapiens
  CDR3 for beta chain variable domain of TCR clone 281293 (TRBV2, TRBJ2-2)
CASSRETVGTGELFF

SEQ ID NO: 562587 - protein, 14 aa, Homo sapiens
  CDR3 for alpha chain variable domain of TCR clone 281294 (TRAV8-4, TRAJ11)
CAVSGGVGYSTLTF

SEQ ID NO: 562588 - protein, 16 aa, Homo sapiens
  CDR3 for beta chain variable domain of TCR clone 281294 (TRBV19, TRBJ2-1)
CASSKAGPSSYNEQFF

SEQ ID NO: 562589 - protein, 12 aa, Homo sapiens
  CDR3 for alpha chain variable domain of TCR clone 281295 (TRAV8-3, TRAJ20)
CAVGANDYKLSF

SEQ ID NO: 562590 - protein, 13 aa, Homo sapiens
  CDR3 for beta chain variable domain of TCR clone 281295 (TRBV24-1, TRBJ2-1)
CATSAGPYNEQFF

SEQ ID NO: 562591 - protein, 15 aa, Homo sapiens
  CDR3 for alpha chain variable domain of TCR clone 281296 (TRAV12-1, TRAJ42)
CVVTREGGSQGNLIF

SEQ ID NO: 562592 - protein, 13 aa, Homo sapiens
  CDR3 for beta chain variable domain of TCR clone 281296 (TRBV27, TRBJ2-7)
CASSLTTGYEQYF

SEQ ID NO: 562593 - protein, 17 aa, Homo sapiens
  CDR3 for alpha chain variable domain of TCR clone 281297 (TRAV8-6, TRAJ58)
CAVSSCVGETSGSRLTF

SEQ ID NO: 562594 - protein, 14 aa, Homo sapiens
  CDR3 for beta chain variable domain of TCR clone 281297 (TRBV4-2, TRBJ2-1)
CASGLDRAYNEQFL

SEQ ID NO: 562595 - protein, 12 aa, Homo sapiens
  CDR3 for alpha chain variable domain of TCR clone 281298 (TRAV12-3, TRAJ17)
CSMTLTGNKLTF

SEQ ID NO: 562596 - protein, 17 aa, Homo sapiens
  CDR3 for beta chain variable domain of TCR clone 281298 (TRBV11-2, TRBJ2-1)
CASSLYPPGVEYNEHFF

SEQ ID NO: 562597 - protein, 15 aa, Homo sapiens
  CDR3 for alpha chain variable domain of TCR clone 281299 (TRAV26-1, TRAJ58)
CIVRIQETSGSRLTF

SEQ ID NO: 562598 - protein, 13 aa, Homo sapiens
  CDR3 for beta chain variable domain of TCR clone 281299 (TRBV6-5, TRBJ2-1)
FASIGETSKREFF

SEQ ID NO: 562599 - protein, 13 aa, Homo sapiens
  CDR3 for alpha chain variable domain of TCR clone 281300 (TRAV27, TRAJ45)
CRSSGGGADGLTF

SEQ ID NO: 562600 - protein, 15 aa, Homo sapiens
  CDR3 for beta chain variable domain of TCR clone 281300 (TRBV9, TRBJ2-2)
CASSDFAGASGELLF

SEQ ID NO: 562601 - protein, 16 aa, Homo sapiens
  CDR3 for alpha chain variable domain of TCR clone 281301 (TRAV27, TRAJ48)
TAAQPGDTGLYLPLTF

SEQ ID NO: 562602 - protein, 12 aa, Homo sapiens
  CDR3 for beta chain variable domain of TCR clone 281301 (TRBV11-2, TRBJ2-2)
CASSLGGGELFL

SEQ ID NO: 562603 - protein, 17 aa, Homo sapiens
  CDR3 for alpha chain variable domain of TCR clone 281302 (TRAV13-1, TRAJ53)
CAASWKSSGGSNYKLTS

SEQ ID NO: 562604 - protein, 19 aa, Homo sapiens
  CDR3 for beta chain variable domain of TCR clone 281302 (TRBV7-9, TRBJ2-1)
CASSHNRGALLRSYNEQFF

SEQ ID NO: 562605 - protein, 12 aa, Homo sapiens
  CDR3 for alpha chain variable domain of TCR clone 281303 (TRAV12-3, TRAJ17)
CAITLTGNKLTF

SEQ ID NO: 562606 - protein, 13 aa, Homo sapiens
  CDR3 for beta chain variable domain of TCR clone 281303 (TRBV7-9, TRBJ1-2)
CASSLKQNYGYIF

SEQ ID NO: 562607 - protein, 13 aa, Homo sapiens
  CDR3 for alpha chain variable domain of TCR clone 281304 (TRAV1-1, TRAJ15)
CRCPNQAGTALIF

SEQ ID NO: 562608 - protein, 15 aa, Homo sapiens
  CDR3 for beta chain variable domain of TCR clone 281304 (TRBV27, TRBJ2-3)
CASSLGLAGPDTQYF

SEQ ID NO: 562609 - protein, 14 aa, Homo sapiens
  CDR3 for alpha chain variable domain of TCR clone 281305 (TRAV13-1, TRAJ35)
CAASKGGFGNVLHC

SEQ ID NO: 562610 - protein, 15 aa, Homo sapiens
  CDR3 for beta chain variable domain of TCR clone 281305 (TRBV6-3, TRBJ2-7)
CASSSPGTVFYEQYF

SEQ ID NO: 562611 - protein, 17 aa, Homo sapiens
  CDR3 for alpha chain variable domain of TCR clone 281306 (TRAV3, TRAJ42)
CAVRDRDYGGSQGNLIF

SEQ ID NO: 562612 - protein, 17 aa, Homo sapiens
  CDR3 for beta chain variable domain of TCR clone 281306 (TRBV7-8, TRBJ2-1)
CASSPPTGTLAYNEQFF

SEQ ID NO: 562613 - protein, 14 aa, Homo sapiens
  CDR3 for alpha chain variable domain of TCR clone 281307 (TRAV12-1, TRAJ33)
CVVAGVDSNYQLIW

SEQ ID NO: 562614 - protein, 15 aa, Homo sapiens
  CDR3 for beta chain variable domain of TCR clone 281307 (TRBV20-1, TRBJ2-7)
CSARDRVSGMDEQYF

SEQ ID NO: 562615 - protein, 14 aa, Homo sapiens
  CDR3 for alpha chain variable domain of TCR clone 281308 (TRAV12-3, TRAJ10)
SHLPLTGGGNKLTF

SEQ ID NO: 562616 - protein, 16 aa, Homo sapiens
  CDR3 for beta chain variable domain of TCR clone 281308 (TRBV5-1, TRBJ2-5)
CASSLALLRAGETQYF

SEQ ID NO: 562617 - protein, 12 aa, Homo sapiens
  CDR3 for alpha chain variable domain of TCR clone 281309 (TRAV12-3, TRAJ17)
YAMTLTGNKLTS

SEQ ID NO: 562618 - protein, 15 aa, Homo sapiens
  CDR3 for beta chain variable domain of TCR clone 281309 (TRBV20-1, TRBJ2-7)
CSARDRVSGMDEQYF

SEQ ID NO: 562619 - protein, 13 aa, Homo sapiens
  CDR3 for alpha chain variable domain of TCR clone 281310 (TRAV12-2, TRAJ15)
CAVFNQAGTALIF

SEQ ID NO: 562620 - protein, 14 aa, Homo sapiens
  CDR3 for beta chain variable domain of TCR clone 281310 (TRBV5-1, TRBJ2-7)
CASSRGESLYEQYF

SEQ ID NO: 562621 - protein, 14 aa, Homo sapiens
  CDR3 for alpha chain variable domain of TCR clone 281311 (TRAV20, TRAJ22)
RAVQVSGSARQLTF

SEQ ID NO: 562622 - protein, 13 aa, Homo sapiens
  CDR3 for beta chain variable domain of TCR clone 281311 (TRBV20-1, TRBJ2-5)
CSAREGGKETQYF

SEQ ID NO: 562623 - protein, 14 aa, Homo sapiens
  CDR3 for alpha chain variable domain of TCR clone 281312 (TRAV12-2, TRAJ9)
CAVSFGTGGFKTIF

SEQ ID NO: 562624 - protein, 17 aa, Homo sapiens
  CDR3 for beta chain variable domain of TCR clone 281312 (TRBV3-1, TRBJ2-7)
CQQPYLRGGRSSYEQYF

SEQ ID NO: 562625 - protein, 21 aa, Homo sapiens
  CDR3 for alpha chain variable domain of TCR clone 281313 (TRAV26-1, )
CIADNDGNNHIQNPDPAVYQL

SEQ ID NO: 562626 - protein, 13 aa, Homo sapiens
  CDR3 for beta chain variable domain of TCR clone 281313 (TRBV20-1, TRBJ1-1)
CSARGGGNTEAFF

SEQ ID NO: 562627 - protein, 14 aa, Homo sapiens
  CDR3 for alpha chain variable domain of TCR clone 281314 (TRAV20, TRAJ44)
CAVQDTGTASKLTF

SEQ ID NO: 562628 - protein, 13 aa, Homo sapiens
  CDR3 for beta chain variable domain of TCR clone 281314 (TRBV29-1, TRBJ1-3)
CSAGTGRGTTIYF

SEQ ID NO: 562629 - protein, 14 aa, Homo sapiens
  CDR3 for alpha chain variable domain of TCR clone 281315 (TRAV1-2, TRAJ16)
CAVNRFSDGQKRLF

SEQ ID NO: 562630 - protein, 14 aa, Homo sapiens
  CDR3 for beta chain variable domain of TCR clone 281315 (TRBV20-1, TRBJ2-1)
CSARGGSSYNEQFF

SEQ ID NO: 562631 - protein, 14 aa, Homo sapiens
  CDR3 for alpha chain variable domain of TCR clone 281316 (TRAV23/DV6, TRAJ11)
CAASLASGYTTLTF

SEQ ID NO: 562632 - protein, 13 aa, Homo sapiens
  CDR3 for beta chain variable domain of TCR clone 281316 (TRBV4-1, TRBJ2-5)
CASSLTRGETQYF

SEQ ID NO: 562633 - protein, 13 aa, Homo sapiens
  CDR3 for alpha chain variable domain of TCR clone 281317 (TRAV17, TRAJ26)
CATVDNYGQNFVF

SEQ ID NO: 562634 - protein, 21 aa, Homo sapiens
  CDR3 for beta chain variable domain of TCR clone 281317 (TRBV6-1, TRBJ1-3)
CASVQGGGKHHIFWRGKLAHC

SEQ ID NO: 562635 - protein, 13 aa, Homo sapiens
  CDR3 for alpha chain variable domain of TCR clone 281318 (TRAV26-2, TRAJ57)
CILSRGGSEKLVF

SEQ ID NO: 562636 - protein, 16 aa, Homo sapiens
  CDR3 for beta chain variable domain of TCR clone 281318 (TRBV18, TRBJ1-5)
CASSPRTGGGNQPQHV

SEQ ID NO: 562637 - protein, 14 aa, Homo sapiens
  CDR3 for alpha chain variable domain of TCR clone 281319 (TRAV12-3, TRAJ42)
CAMNYGGSQGNLIF

SEQ ID NO: 562638 - protein, 15 aa, Homo sapiens
  CDR3 for beta chain variable domain of TCR clone 281319 (TRBV7-9, TRBJ1-4)
CASSRTGGFNEKLFF

SEQ ID NO: 562639 - protein, 14 aa, Homo sapiens
  CDR3 for alpha chain variable domain of TCR clone 281320 (TRAV1-2, TRAJ16)
CAVNRFSDGQKLLF

SEQ ID NO: 562640 - protein, 15 aa, Homo sapiens
  CDR3 for beta chain variable domain of TCR clone 281320 (TRBV9, TRBJ1-6)
CASSVAGTGDSHLYF

SEQ ID NO: 562641 - protein, 15 aa, Homo sapiens
  CDR3 for alpha chain variable domain of TCR clone 281321 (TRAV12-1, TRAJ6)
CVVNCPLRRKLHTYI

SEQ ID NO: 562642 - protein, 15 aa, Homo sapiens
  CDR3 for beta chain variable domain of TCR clone 281321 (TRBV5-8, TRBJ2-7)
CASKGGTTISYEQYF

SEQ ID NO: 562643 - protein, 13 aa, Homo sapiens
  CDR3 for alpha chain variable domain of TCR clone 281322 (TRAV6, TRAJ16)
CALDDSDGQKLLF

SEQ ID NO: 562644 - protein, 14 aa, Homo sapiens
  CDR3 for beta chain variable domain of TCR clone 281322 (TRBV19, TRBJ2-2)
CATTGHANTGELFF

SEQ ID NO: 562645 - protein, 12 aa, Homo sapiens
  CDR3 for alpha chain variable domain of TCR clone 281323 (TRAV12-1, TRAJ40)
CVVYSGTYKYIF

SEQ ID NO: 562646 - protein, 14 aa, Homo sapiens
  CDR3 for beta chain variable domain of TCR clone 281323 (TRBV20-1, TRBJ1-3)
CSASPTGAGNTIYF

SEQ ID NO: 562647 - protein, 13 aa, Homo sapiens
  CDR3 for alpha chain variable domain of TCR clone 281324 (TRAV8-6, TRAJ9)
CAVWHTGGFKTIF

SEQ ID NO: 562648 - protein, 14 aa, Homo sapiens
  CDR3 for beta chain variable domain of TCR clone 281324 (TRBV2, TRBJ2-1)
CASSEALIYNEQFF

SEQ ID NO: 562649 - protein, 12 aa, Homo sapiens
  CDR3 for alpha chain variable domain of TCR clone 281325 (TRAV2, TRAJ31)
CAVEDNNARLMF

SEQ ID NO: 562650 - protein, 16 aa, Homo sapiens
  CDR3 for beta chain variable domain of TCR clone 281325 (TRBV10-3, TRBJ2-1)
CGISGVGDGGGGEQFF

SEQ ID NO: 562651 - protein, 13 aa, Homo sapiens
  CDR3 for alpha chain variable domain of TCR clone 281326 (TRAV1-1, TRAJ11)
CAVVNSGYSTLTF

SEQ ID NO: 562652 - protein, 17 aa, Homo sapiens
  CDR3 for beta chain variable domain of TCR clone 281326 (TRBV6-3, TRBJ2-2)
CASSYAGQGINTGELFF

SEQ ID NO: 562653 - protein, 14 aa, Homo sapiens
  CDR3 for alpha chain variable domain of TCR clone 281327 (TRAV12-2, TRAJ17)
CAVLFRAAGNTLTF

SEQ ID NO: 562654 - protein, 13 aa, Homo sapiens
  CDR3 for beta chain variable domain of TCR clone 281327 (TRBV19, TRBJ1-2)
CASSQGQVYGYTF

SEQ ID NO: 562655 - protein, 17 aa, Homo sapiens
  CDR3 for alpha chain variable domain of TCR clone 281328 (TRAV14/DV4, TRAJ4)
CAMREASGRGGYNKLIF

SEQ ID NO: 562656 - protein, 17 aa, Homo sapiens
  CDR3 for beta chain variable domain of TCR clone 281328 (TRBV19, TRBJ2-6)
CASSTGQVFSGANVLTF

SEQ ID NO: 562657 - protein, 14 aa, Homo sapiens
  CDR3 for alpha chain variable domain of TCR clone 281329 (TRAV12-3, TRAJ53)
CGATSGGSNYKQTF

SEQ ID NO: 562658 - protein, 13 aa, Homo sapiens
  CDR3 for beta chain variable domain of TCR clone 281329 (TRBV19, TRBJ1-5)
CASSTQDGQPQHF

SEQ ID NO: 562659 - protein, 13 aa, Homo sapiens
  CDR3 for alpha chain variable domain of TCR clone 281330 (TRAV13-2, TRAJ40)
CAEFTSGTYKYIF

SEQ ID NO: 562660 - protein, 15 aa, Homo sapiens
  CDR3 for beta chain variable domain of TCR clone 281330 (TRBV5-1, TRBJ2-3)
CASSVTSGSTDTQYF

SEQ ID NO: 562661 - protein, 13 aa, Homo sapiens
  CDR3 for alpha chain variable domain of TCR clone 281331 (TRAV2, TRAJ40)
CAVVTSGTYKYIF

SEQ ID NO: 562662 - protein, 14 aa, Homo sapiens
  CDR3 for beta chain variable domain of TCR clone 281331 (TRBV7-8, TRBJ2-1)
CASSSQGTYNEQFF

SEQ ID NO: 562663 - protein, 16 aa, Homo sapiens
  CDR3 for alpha chain variable domain of TCR clone 281332 (TRAV30, TRAJ24)
FGTEIVDADSWGKFQF

SEQ ID NO: 562664 - protein, 16 aa, Homo sapiens
  CDR3 for beta chain variable domain of TCR clone 281332 (TRBV12-5, TRBJ2-5)
CASGPRTSGNQETQYF

SEQ ID NO: 562665 - protein, 16 aa, Homo sapiens
  CDR3 for alpha chain variable domain of TCR clone 281333 (TRAV20, TRAJ10)
CAVLRGLTGGGNKRTC

SEQ ID NO: 562666 - protein, 14 aa, Homo sapiens
  CDR3 for beta chain variable domain of TCR clone 281333 (TRBV19, TRBJ1-5)
CASRAPDSFLSQHF

SEQ ID NO: 562667 - protein, 13 aa, Homo sapiens
  CDR3 for alpha chain variable domain of TCR clone 281334 (TRAV8-6, TRAJ16)
CAVGSPDGQKLLF

SEQ ID NO: 562668 - protein, 16 aa, Homo sapiens
  CDR3 for beta chain variable domain of TCR clone 281334 (TRBV5-7, TRBJ2-3)
CASSSLGGAITDTQYF

SEQ ID NO: 562669 - protein, 15 aa, Homo sapiens
  CDR3 for alpha chain variable domain of TCR clone 281335 (TRAV8-3, TRAJ27)
CSLGPSKTNAGKSTF

SEQ ID NO: 562670 - protein, 15 aa, Homo sapiens
  CDR3 for beta chain variable domain of TCR clone 281335 (TRBV7-2, TRBJ2-1)
CASSSGLAGGNEQFF

SEQ ID NO: 562671 - protein, 12 aa, Homo sapiens
  CDR3 for alpha chain variable domain of TCR clone 281336 (TRAV8-3, TRAJ20)
CAVDFNDYKLSF

SEQ ID NO: 562672 - protein, 17 aa, Homo sapiens
  CDR3 for beta chain variable domain of TCR clone 281336 (TRBV7-8, TRBJ2-6)
CASSAGTGGAGAIVLTF

SEQ ID NO: 562673 - protein, 15 aa, Homo sapiens
  CDR3 for alpha chain variable domain of TCR clone 281337 (TRAV9-2, TRAJ9)
CALSLTNTGGFKTIF

SEQ ID NO: 562674 - protein, 13 aa, Homo sapiens
  CDR3 for beta chain variable domain of TCR clone 281337 (TRBV7-3, TRBJ2-5)
CASSVRGGETQYF

SEQ ID NO: 562675 - protein, 15 aa, Homo sapiens
  CDR3 for alpha chain variable domain of TCR clone 281338 (TRAV8-3, TRAJ11)
CAVGLLNSGYSTLTF

SEQ ID NO: 562676 - protein, 16 aa, Homo sapiens
  CDR3 for beta chain variable domain of TCR clone 281338 (TRBV7-9, TRBJ1-2)
CASSLGFSAGEDGYAF

SEQ ID NO: 562677 - protein, 13 aa, Homo sapiens
  CDR3 for alpha chain variable domain of TCR clone 281339 (TRAV20, TRAJ42)
CAVQGGSQGNLIF

SEQ ID NO: 562678 - protein, 15 aa, Homo sapiens
  CDR3 for beta chain variable domain of TCR clone 281339 (TRBV10-1, TRBJ2-1)
CAGSEWRGTYKEQFF

SEQ ID NO: 562679 - protein, 15 aa, Homo sapiens
  CDR3 for alpha chain variable domain of TCR clone 281340 (TRAV3, TRAJ4)
CAVRDGTGGYNKLIF

SEQ ID NO: 562680 - protein, 15 aa, Homo sapiens
  CDR3 for beta chain variable domain of TCR clone 281340 (TRBV4-3, TRBJ2-7)
CASSQDLGSSYEQYF

SEQ ID NO: 562681 - protein, 14 aa, Homo sapiens
  CDR3 for alpha chain variable domain of TCR clone 281341 (TRAV8-3, TRAJ4)
CAVGAAGGYNKLIF

SEQ ID NO: 562682 - protein, 14 aa, Homo sapiens
  CDR3 for beta chain variable domain of TCR clone 281341 (TRBV7-2, TRBJ2-1)
CASSLGVGYNEQFF

SEQ ID NO: 562683 - protein, 17 aa, Homo sapiens
  CDR3 for alpha chain variable domain of TCR clone 281342 (TRAV3, TRAJ42)
CAVRDRDYGGSQGNLIF

SEQ ID NO: 562684 - protein, 15 aa, Homo sapiens
  CDR3 for beta chain variable domain of TCR clone 281342 (TRBV29-1, TRBJ1-2)
CSVVLDAGSNYGYTF

SEQ ID NO: 562685 - protein, 13 aa, Homo sapiens
  CDR3 for alpha chain variable domain of TCR clone 281343 (TRAV30, TRAJ6)
CGFIEGGSYIPTF

SEQ ID NO: 562686 - protein, 16 aa, Homo sapiens
  CDR3 for beta chain variable domain of TCR clone 281343 (TRBV7-6, TRBJ2-3)
RASSARTSRGTDTQYF

SEQ ID NO: 562687 - protein, 14 aa, Homo sapiens
  CDR3 for alpha chain variable domain of TCR clone 281344 (TRAV8-4, TRAJ44)
CAVSGAGTASKLTF

SEQ ID NO: 562688 - protein, 13 aa, Homo sapiens
  CDR3 for beta chain variable domain of TCR clone 281344 (TRBV24-1, TRBJ2-1)
CATSRGARNEQFF

SEQ ID NO: 562689 - protein, 13 aa, Homo sapiens
  CDR3 for alpha chain variable domain of TCR clone 281345 (TRAV1-2, TRAJ9)
CAALNTGGFKTIF

SEQ ID NO: 562690 - protein, 11 aa, Homo sapiens
  CDR3 for beta chain variable domain of TCR clone 281345 (TRBV7-2, TRBJ2-2)
CASSARDREGR

SEQ ID NO: 562691 - protein, 14 aa, Homo sapiens
  CDR3 for alpha chain variable domain of TCR clone 281346 (TRAV12-3, TRAJ54)
CAMRGIQGAQKLVF

SEQ ID NO: 562692 - protein, 20 aa, Homo sapiens
  CDR3 for beta chain variable domain of TCR clone 281346 (TRBV7-8, TRBJ2-2)
CASSHLFPGPTIHITGELFF

SEQ ID NO: 562693 - protein, 11 aa, Homo sapiens
  CDR3 for alpha chain variable domain of TCR clone 281347 (TRAV2, TRAJ33)
CAVESNYQLIW

SEQ ID NO: 562694 - protein, 15 aa, Homo sapiens
  CDR3 for beta chain variable domain of TCR clone 281347 (TRBV5-7, TRBJ1-5)
CASSYGKLWDQPQHF

SEQ ID NO: 562695 - protein, 14 aa, Homo sapiens
  CDR3 for alpha chain variable domain of TCR clone 281348 (TRAV2, TRAJ37)
CAVDFTSNTGKLIF

SEQ ID NO: 562696 - protein, 15 aa, Homo sapiens
  CDR3 for beta chain variable domain of TCR clone 281348 (TRBV6-6, TRBJ2-7)
CASSYSYGGSYEQYF

SEQ ID NO: 562697 - protein, 14 aa, Homo sapiens
  CDR3 for alpha chain variable domain of TCR clone 281349 (TRAV9-2, TRAJ39)
CALYIYNAGNMLTF

SEQ ID NO: 562698 - protein, 13 aa, Homo sapiens
  CDR3 for beta chain variable domain of TCR clone 281349 (TRBV4-1, TRBJ1-1)
CASSQLGTGEAFF

SEQ ID NO: 562699 - protein, 14 aa, Homo sapiens
  CDR3 for alpha chain variable domain of TCR clone 281350 (TRAV26-1, TRAJ21)
CIVRVVYNLNKFYF

SEQ ID NO: 562700 - protein, 17 aa, Homo sapiens
  CDR3 for beta chain variable domain of TCR clone 281350 (TRBV11-2, TRBJ2-1)
CASSLYPPGVEYNEQFF

SEQ ID NO: 562701 - protein, 14 aa, Homo sapiens
  CDR3 for alpha chain variable domain of TCR clone 281351 (TRAV13-1, TRAJ9)
CAASALTGGFKTIF

SEQ ID NO: 562702 - protein, 13 aa, Homo sapiens
  CDR3 for beta chain variable domain of TCR clone 281351 (TRBV20-1, TRBJ1-1)
CSAGTVGNTEEFF

SEQ ID NO: 562703 - protein, 17 aa, Homo sapiens
  CDR3 for alpha chain variable domain of TCR clone 281352 (TRAV38-1, TRAJ45)
CAFMRSHSGGGADGLTF

SEQ ID NO: 562704 - protein, 16 aa, Homo sapiens
  CDR3 for beta chain variable domain of TCR clone 281352 (TRBV7-8, TRBJ2-4)
CASSAERTLAKNIQYF

SEQ ID NO: 562705 - protein, 11 aa, Homo sapiens
  CDR3 for alpha chain variable domain of TCR clone 281353 (TRAV3, TRAJ21)
CAVGNFNKFYF

SEQ ID NO: 562706 - protein, 14 aa, Homo sapiens
  CDR3 for beta chain variable domain of TCR clone 281353 (TRBV4-1, TRBJ2-3)
CASSQQGTTDTQYF

SEQ ID NO: 562707 - protein, 13 aa, Homo sapiens
  CDR3 for alpha chain variable domain of TCR clone 281354 (TRAV8-6, TRAJ49)
CAVITNTGNQFYF

SEQ ID NO: 562708 - protein, 14 aa, Homo sapiens
  CDR3 for beta chain variable domain of TCR clone 281354 (TRBV5-1, TRBJ2-7)
CASSRGESLYEQHF

SEQ ID NO: 562709 - protein, 14 aa, Homo sapiens
  CDR3 for alpha chain variable domain of TCR clone 281355 (TRAV13-2, TRAJ41)
CAERPDWAGYALNL

SEQ ID NO: 562710 - protein, 13 aa, Homo sapiens
  CDR3 for beta chain variable domain of TCR clone 281355 (TRBV19, TRBJ1-2)
CASSVPGQDGYTF

SEQ ID NO: 562711 - protein, 15 aa, Homo sapiens
  CDR3 for alpha chain variable domain of TCR clone 281356 (TRAV13-1, TRAJ10)
CAATIITGGGNKLTF

SEQ ID NO: 562712 - protein, 15 aa, Homo sapiens
  CDR3 for beta chain variable domain of TCR clone 281356 (TRBV2, TRBJ2-7)
CASTLLGSGATEQYF

SEQ ID NO: 562713 - protein, 13 aa, Homo sapiens
  CDR3 for alpha chain variable domain of TCR clone 281357 (TRAV8-3, TRAJ43)
CAVGPDNNNDMRF

SEQ ID NO: 562714 - protein, 12 aa, Homo sapiens
  CDR3 for beta chain variable domain of TCR clone 281357 (TRBV12-4, TRBJ1-3)
CASSFSGNTIYF

SEQ ID NO: 562715 - protein, 16 aa, Homo sapiens
  CDR3 for alpha chain variable domain of TCR clone 281358 (TRAV3, TRAJ27)
CAVRDPQGTSAGKSTF

SEQ ID NO: 562716 - protein, 17 aa, Homo sapiens
  CDR3 for beta chain variable domain of TCR clone 281358 (TRBV4-1, TRBJ2-7)
CASSQGRGLQTSYEQYF

SEQ ID NO: 562717 - protein, 16 aa, Homo sapiens
  CDR3 for alpha chain variable domain of TCR clone 281359 (TRAV26-1, TRAJ53)
CIVRVAMGGSNYKLTF

SEQ ID NO: 562718 - protein, 16 aa, Homo sapiens
  CDR3 for beta chain variable domain of TCR clone 281359 (TRBV6-3, TRBJ1-2)
CASSYSRRASNYGYTL

SEQ ID NO: 562719 - protein, 16 aa, Homo sapiens
  CDR3 for alpha chain variable domain of TCR clone 281360 (TRAV30, TRAJ24)
CGTEIVDADSWGKFQF

SEQ ID NO: 562720 - protein, 15 aa, Homo sapiens
  CDR3 for beta chain variable domain of TCR clone 281360 (TRBV12-4, TRBJ2-2)
CSSSPNGSGTGELFF

SEQ ID NO: 562721 - protein, 12 aa, Homo sapiens
  CDR3 for alpha chain variable domain of TCR clone 281361 (TRAV1-2, TRAJ33)
CAALDSNYQLIW

SEQ ID NO: 562722 - protein, 14 aa, Homo sapiens
  CDR3 for beta chain variable domain of TCR clone 281361 (TRBV7-8, TRBJ2-7)
CASSPRDRVYEQYF

SEQ ID NO: 562723 - protein, 10 aa, Homo sapiens
  CDR3 for alpha chain variable domain of TCR clone 281362 (TRAV9-2, TRAJ49)
CALTGNQFYF

SEQ ID NO: 562724 - protein, 16 aa, Homo sapiens
  CDR3 for beta chain variable domain of TCR clone 281362 (TRBV19, TRBJ2-3)
CASSPGAASRTDTQYV

SEQ ID NO: 562725 - protein, 14 aa, Homo sapiens
  CDR3 for alpha chain variable domain of TCR clone 281363 (TRAV17, TRAJ16)
CATADFSDGQKLLF

SEQ ID NO: 562726 - protein, 16 aa, Homo sapiens
  CDR3 for beta chain variable domain of TCR clone 281363 (TRBV29-1, TRBJ2-7)
CSVEVVGTSGSYEQYF

SEQ ID NO: 562727 - protein, 14 aa, Homo sapiens
  CDR3 for alpha chain variable domain of TCR clone 281364 (TRAV12-2, TRAJ45)
CAVNIGGGADGLTF

SEQ ID NO: 562728 - protein, 13 aa, Homo sapiens
  CDR3 for beta chain variable domain of TCR clone 281364 (TRBV19, TRBJ1-5)
CASKVGPWEPQHF

SEQ ID NO: 562729 - protein, 14 aa, Homo sapiens
  CDR3 for alpha chain variable domain of TCR clone 281365 (TRAV39, TRAJ58)
CAVDSETSGSRLTF

SEQ ID NO: 562730 - protein, 16 aa, Homo sapiens
  CDR3 for beta chain variable domain of TCR clone 281365 (TRBV12-4, TRBJ1-5)
CASSRPVGGSNQPQHF

SEQ ID NO: 562731 - protein, 13 aa, Homo sapiens
  CDR3 for alpha chain variable domain of TCR clone 281366 (TRAV8-3, TRAJ28)
CAVGAVGSYQLTF

SEQ ID NO: 562732 - protein, 15 aa, Homo sapiens
  CDR3 for beta chain variable domain of TCR clone 281366 (TRBV7-9, TRBJ1-5)
CSSSQGHQRNQPQHF

SEQ ID NO: 562733 - protein, 12 aa, Homo sapiens
  CDR3 for alpha chain variable domain of TCR clone 281367 (TRAV8-3, TRAJ26)
CAVDYYGQNFVF

SEQ ID NO: 562734 - protein, 15 aa, Homo sapiens
  CDR3 for beta chain variable domain of TCR clone 281367 (TRBV5-1, TRBJ2-3)
CASSVTSGYTDTQYF

SEQ ID NO: 562735 - protein, 13 aa, Homo sapiens
  CDR3 for alpha chain variable domain of TCR clone 281368 (TRAV2, TRAJ29)
CAEQNSGNTPLVF

SEQ ID NO: 562736 - protein, 13 aa, Homo sapiens
  CDR3 for beta chain variable domain of TCR clone 281368 (TRBV28, TRBJ1-2)
CARSPGSRNGYTF

SEQ ID NO: 562737 - protein, 14 aa, Homo sapiens
  CDR3 for alpha chain variable domain of TCR clone 281369 (TRAV8-3, TRAJ4)
CAVCAAGGYNKLIF

SEQ ID NO: 562738 - protein, 14 aa, Homo sapiens
  CDR3 for beta chain variable domain of TCR clone 281369 (TRBV19, TRBJ2-1)
CASPTFVLSGEQFF

SEQ ID NO: 562739 - protein, 13 aa, Homo sapiens
  CDR3 for alpha chain variable domain of TCR clone 281370 (TRAV20, TRAJ37)
CAGCSSNTGKLIF

SEQ ID NO: 562740 - protein, 15 aa, Homo sapiens
  CDR3 for beta chain variable domain of TCR clone 281370 (TRBV11-2, TRBJ1-1)
CASSFSTRMNTEAFF

SEQ ID NO: 562741 - protein, 16 aa, Homo sapiens
  CDR3 for alpha chain variable domain of TCR clone 281371 (TRAV3, TRAJ40)
CAVRDRIASGTYKYIF

SEQ ID NO: 562742 - protein, 16 aa, Homo sapiens
  CDR3 for beta chain variable domain of TCR clone 281371 (TRBV6-1, TRBJ1-2)
CARSEANSIINYGYTF

SEQ ID NO: 562743 - protein, 18 aa, Homo sapiens
  CDR3 for alpha chain variable domain of TCR clone 281372 (TRAV13-1, TRAJ52)
CAASKRSACGTSYGKLTF

SEQ ID NO: 562744 - protein, 14 aa, Homo sapiens
  CDR3 for beta chain variable domain of TCR clone 281372 (TRBV7-2, TRBJ2-5)
CASSTGGELKTQYF

SEQ ID NO: 562745 - protein, 14 aa, Homo sapiens
  CDR3 for alpha chain variable domain of TCR clone 281373 (TRAV12-1, TRAJ3)
CVVNPGSSASKIIF

SEQ ID NO: 562746 - protein, 14 aa, Homo sapiens
  CDR3 for beta chain variable domain of TCR clone 281373 (TRBV20-1, TRBJ2-3)
CSARGGTSTDTQYF

SEQ ID NO: 562747 - protein, 12 aa, Homo sapiens
  CDR3 for alpha chain variable domain of TCR clone 281374 (TRAV16, TRAJ56)
CAPTGANSKLTF

SEQ ID NO: 562748 - protein, 13 aa, Homo sapiens
  CDR3 for beta chain variable domain of TCR clone 281374 (TRBV7-6, TRBJ1-2)
CASSLVADYGYTF

SEQ ID NO: 562749 - protein, 14 aa, Homo sapiens
  CDR3 for alpha chain variable domain of TCR clone 281375 (TRAV38-1, TRAJ40)
CALRPTSGTYKYIF

SEQ ID NO: 562750 - protein, 13 aa, Homo sapiens
  CDR3 for beta chain variable domain of TCR clone 281375 (TRBV20-1, TRBJ2-2)
CSALSGGAGELFF

SEQ ID NO: 562751 - protein, 12 aa, Homo sapiens
  CDR3 for alpha chain variable domain of TCR clone 281376 (TRAV21, TRAJ29)
CAVTSGNTPLVF

SEQ ID NO: 562752 - protein, 16 aa, Homo sapiens
  CDR3 for beta chain variable domain of TCR clone 281376 (TRBV7-3, TRBJ2-2)
CASSFLPSGYTGELFF

SEQ ID NO: 562753 - protein, 14 aa, Homo sapiens
  CDR3 for alpha chain variable domain of TCR clone 281377 (TRAV1-2, TRAJ8)
CAVREATGFQKLVF

SEQ ID NO: 562754 - protein, 15 aa, Homo sapiens
  CDR3 for beta chain variable domain of TCR clone 281377 (TRBV20-1, TRBJ2-7)
CSARARVSGMDEQYF

SEQ ID NO: 562755 - protein, 13 aa, Homo sapiens
  CDR3 for alpha chain variable domain of TCR clone 281378 (TRAV27, TRAJ6)
CAGGTRGIYIPTF

SEQ ID NO: 562756 - protein, 15 aa, Homo sapiens
  CDR3 for beta chain variable domain of TCR clone 281378 (TRBV11-2, TRBJ1-3)
CASSLSPLVRDTIYF

SEQ ID NO: 562757 - protein, 11 aa, Homo sapiens
  CDR3 for alpha chain variable domain of TCR clone 281379 (TRAV3, TRAJ13)
CAVTSYQKLTF

SEQ ID NO: 562758 - protein, 15 aa, Homo sapiens
  CDR3 for beta chain variable domain of TCR clone 281379 (TRBV7-9, TRBJ2-7)
CASSSSGLAVYEQYF

SEQ ID NO: 562759 - protein, 15 aa, Homo sapiens
  CDR3 for alpha chain variable domain of TCR clone 281380 (TRAV13-2, TRAJ8)
CSPGGRNTGFQKLVF

SEQ ID NO: 562760 - protein, 14 aa, Homo sapiens
  CDR3 for beta chain variable domain of TCR clone 281380 (TRBV4-1, TRBJ2-2)
CASSQAVNTGELFF

SEQ ID NO: 562761 - protein, 12 aa, Homo sapiens
  CDR3 for alpha chain variable domain of TCR clone 281381 (TRAV13-1, TRAJ21)
CAAKEGFNKFYF

SEQ ID NO: 562762 - protein, 20 aa, Homo sapiens
  CDR3 for beta chain variable domain of TCR clone 281381 (TRBV28, TRBJ2-1)
CASTPIGRSPGLAGANEQFF

SEQ ID NO: 562763 - protein, 17 aa, Homo sapiens
  CDR3 for alpha chain variable domain of TCR clone 281382 (TRAV12-2, TRAJ36)
CAVKDNLFFGPGTRLTV

SEQ ID NO: 562764 - protein, 15 aa, Homo sapiens
  CDR3 for beta chain variable domain of TCR clone 281382 (TRBV28, TRBJ2-2)
CASTVAGANTGELFF

SEQ ID NO: 562765 - protein, 17 aa, Homo sapiens
  CDR3 for alpha chain variable domain of TCR clone 281383 (TRAV13-1, TRAJ52)
CAASSGAGGTIYGKMTF

SEQ ID NO: 562766 - protein, 15 aa, Homo sapiens
  CDR3 for beta chain variable domain of TCR clone 281383 (TRBV2, TRBJ2-1)
CASSKLAGSYNEQFF

SEQ ID NO: 562767 - protein, 21 aa, Homo sapiens
  CDR3 for alpha chain variable domain of TCR clone 281384 (TRAV3, TRAJ27)
CAVRPLGAGKSTFGDVNTLTV

SEQ ID NO: 562768 - protein, 13 aa, Homo sapiens
  CDR3 for beta chain variable domain of TCR clone 281384 (TRBV7-9, TRBJ2-3)
CASSPGSTDTQYF

SEQ ID NO: 562769 - protein, 16 aa, Homo sapiens
  CDR3 for alpha chain variable domain of TCR clone 281385 (TRAV3, TRAJ37)
FAVRPHGSVNTGKLIF

SEQ ID NO: 562770 - protein, 16 aa, Homo sapiens
  CDR3 for beta chain variable domain of TCR clone 281385 (TRBV9, TRBJ1-2)
CASSVEEKVSPYGYTF

SEQ ID NO: 562771 - protein, 14 aa, Homo sapiens
  CDR3 for alpha chain variable domain of TCR clone 281386 (TRAV30, TRAJ12)
CGTAWMDSSYKLIF

SEQ ID NO: 562772 - protein, 15 aa, Homo sapiens
  CDR3 for beta chain variable domain of TCR clone 281386 (TRBV5-1, TRBJ2-2)
CASSWTSPNTGELFF

SEQ ID NO: 562773 - protein, 16 aa, Homo sapiens
  CDR3 for alpha chain variable domain of TCR clone 281387 (TRAV12-2, TRAJ6)
CAAPLAGSGGSYIPTC

SEQ ID NO: 562774 - protein, 13 aa, Homo sapiens
  CDR3 for beta chain variable domain of TCR clone 281387 (TRBV6-9, TRBJ2-5)
CASKGDGRRTQYF

SEQ ID NO: 562775 - protein, 12 aa, Homo sapiens
  CDR3 for alpha chain variable domain of TCR clone 281388 (TRAV2, TRAJ26)
CAWSPGRLWSEF

SEQ ID NO: 562776 - protein, 16 aa, Homo sapiens
  CDR3 for beta chain variable domain of TCR clone 281388 (TRBV13, TRBJ2-2)
CASSPRTGEHTGELFF

SEQ ID NO: 562777 - protein, 13 aa, Homo sapiens
  CDR3 for alpha chain variable domain of TCR clone 281389 (TRAV12-2, TRAJ7)
CAGLIYGNNRLAF

SEQ ID NO: 562778 - protein, 16 aa, Homo sapiens
  CDR3 for beta chain variable domain of TCR clone 281389 (TRBV27, TRBJ2-2)
CDSSFRGLVRTGELFF

SEQ ID NO: 562779 - protein, 18 aa, Homo sapiens
  CDR3 for alpha chain variable domain of TCR clone 281390 (TRAV13-1, TRAJ10)
CAASKGRAVTGGGNKLTF

SEQ ID NO: 562780 - protein, 15 aa, Homo sapiens
  CDR3 for beta chain variable domain of TCR clone 281390 (TRBV28, TRBJ1-3)
CASSMGWASGNTIYF

SEQ ID NO: 562781 - protein, 11 aa, Homo sapiens
  CDR3 for alpha chain variable domain of TCR clone 281391 (TRAV1-2, TRAJ40)
CAVPGTYKYIF

SEQ ID NO: 562782 - protein, 16 aa, Homo sapiens
  CDR3 for beta chain variable domain of TCR clone 281391 (TRBV27, TRBJ2-2)
CASSFRGLVRTGELFF

SEQ ID NO: 562783 - protein, 15 aa, Homo sapiens
  CDR3 for alpha chain variable domain of TCR clone 281392 (TRAV17, TRAJ57)
CATGPSQGGSEKLVF

SEQ ID NO: 562784 - protein, 12 aa, Homo sapiens
  CDR3 for beta chain variable domain of TCR clone 281392 (TRBV7-9, TRBJ2-7)
CASGDPDYEQYF

SEQ ID NO: 562785 - protein, 21 aa, Homo sapiens
  CDR3 for alpha chain variable domain of TCR clone 281393 (TRAV1-2, TRAJ37)
CLLPLCCERFHGSGNTGKLIF

SEQ ID NO: 562786 - protein, 14 aa, Homo sapiens
  CDR3 for beta chain variable domain of TCR clone 281393 (TRBV2, TRBJ2-5)
CATSEVLAQETQYF

SEQ ID NO: 562787 - protein, 14 aa, Homo sapiens
  CDR3 for alpha chain variable domain of TCR clone 281394 (TRAV38-1, TRAJ40)
CALRPTSGTYKYIF

SEQ ID NO: 562788 - protein, 14 aa, Homo sapiens
  CDR3 for beta chain variable domain of TCR clone 281394 (TRBV25-1, TRBJ1-1)
CASTHLGGNTEACF

SEQ ID NO: 562789 - protein, 21 aa, Homo sapiens
  CDR3 for alpha chain variable domain of TCR clone 281395 (TRAV23/DV6, TRAJ30)
TSLETQPPTSVQQARDDKIIF

SEQ ID NO: 562790 - protein, 17 aa, Homo sapiens
  CDR3 for beta chain variable domain of TCR clone 281395 (TRBV10-3, TRBJ1-2)
CAISETRDRGLEYGYTF

SEQ ID NO: 562791 - protein, 14 aa, Homo sapiens
  CDR3 for alpha chain variable domain of TCR clone 281396 (TRAV12-1, TRAJ29)
CVVNEGSGNTPLVF

SEQ ID NO: 562792 - protein, 13 aa, Homo sapiens
  CDR3 for beta chain variable domain of TCR clone 281396 (TRBV7-9, TRBJ2-3)
CASSTGSTDTQYF

SEQ ID NO: 562793 - protein, 18 aa, Homo sapiens
  CDR3 for alpha chain variable domain of TCR clone 281397 (TRAV21, TRAJ52)
CAVRPSPAGGTSYGKLTF

SEQ ID NO: 562794 - protein, 15 aa, Homo sapiens
  CDR3 for beta chain variable domain of TCR clone 281397 (TRBV20-1, TRBJ1-5)
CSARPRGQLNQPQHF

SEQ ID NO: 562795 - protein, 13 aa, Homo sapiens
  CDR3 for alpha chain variable domain of TCR clone 281398 (TRAV21, TRAJ15)
CAVRNQAGTALIF

SEQ ID NO: 562796 - protein, 15 aa, Homo sapiens
  CDR3 for beta chain variable domain of TCR clone 281398 (TRBV5-1, TRBJ2-2)
CASSTFNINTGELFF

SEQ ID NO: 562797 - protein, 14 aa, Homo sapiens
  CDR3 for alpha chain variable domain of TCR clone 281399 (TRAV38-1, TRAJ39)
CAFSHNNAGNMLTF

SEQ ID NO: 562798 - protein, 15 aa, Homo sapiens
  CDR3 for beta chain variable domain of TCR clone 281399 (TRBV19, TRBJ2-6)
CASSIGPSGANVLTF

SEQ ID NO: 562799 - protein, 14 aa, Homo sapiens
  CDR3 for alpha chain variable domain of TCR clone 281400 (TRAV1-2, TRAJ16)
CAVNRFSDGPKLLF

SEQ ID NO: 562800 - protein, 14 aa, Homo sapiens
  CDR3 for beta chain variable domain of TCR clone 281400 (TRBV7-2, TRBJ2-7)
CASSPKTSFYEQYF

SEQ ID NO: 562801 - protein, 11 aa, Homo sapiens
  CDR3 for alpha chain variable domain of TCR clone 281401 (TRAV12-1, TRAJ8)
CVVTGFQKLVF

SEQ ID NO: 562802 - protein, 15 aa, Homo sapiens
  CDR3 for beta chain variable domain of TCR clone 281401 (TRBV7-9, TRBJ1-6)
CASGSPGRGNSPLHF

SEQ ID NO: 562803 - protein, 21 aa, Homo sapiens
  CDR3 for alpha chain variable domain of TCR clone 281402 (TRAV30, TRAJ43)
GLPAQLLRNPLPIIELNDMRF

SEQ ID NO: 562804 - protein, 14 aa, Homo sapiens
  CDR3 for beta chain variable domain of TCR clone 281402 (TRBV27, TRBJ2-1)
CASRHLGGGKEEFF

SEQ ID NO: 562805 - protein, 13 aa, Homo sapiens
  CDR3 for alpha chain variable domain of TCR clone 281403 (TRAV20, TRAJ37)
CAGCSSNTGKLIF

SEQ ID NO: 562806 - protein, 13 aa, Homo sapiens
  CDR3 for beta chain variable domain of TCR clone 281403 (TRBV12-4, TRBJ1-5)
CASSPRQYQPQHF

SEQ ID NO: 562807 - protein, 12 aa, Homo sapiens
  CDR3 for alpha chain variable domain of TCR clone 281404 (TRAV17, TRAJ30)
CVPERRDDKIIF

SEQ ID NO: 562808 - protein, 14 aa, Homo sapiens
  CDR3 for beta chain variable domain of TCR clone 281404 (TRBV7-7, TRBJ2-2)
CASSRVRSTGELFF

SEQ ID NO: 562809 - protein, 14 aa, Homo sapiens
  CDR3 for alpha chain variable domain of TCR clone 281405 (TRAV8-3, TRAJ39)
CAVGAWGAGNMLTF

SEQ ID NO: 562810 - protein, 16 aa, Homo sapiens
  CDR3 for beta chain variable domain of TCR clone 281405 (TRBV7-2, TRBJ1-3)
CASSSGRVLSGSTIYF

SEQ ID NO: 562811 - protein, 15 aa, Homo sapiens
  CDR3 for alpha chain variable domain of TCR clone 281406 (TRAV25, TRAJ52)
CAGRPGGTSYGKLTF

SEQ ID NO: 562812 - protein, 17 aa, Homo sapiens
  CDR3 for beta chain variable domain of TCR clone 281406 (TRBV7-8, TRBJ2-6)
CARSVGTGGAGANVLTF

SEQ ID NO: 562813 - protein, 16 aa, Homo sapiens
  CDR3 for alpha chain variable domain of TCR clone 281407 (TRAV21, TRAJ37)
CAVRPRGSSNTGKPIF

SEQ ID NO: 562814 - protein, 13 aa, Homo sapiens
  CDR3 for beta chain variable domain of TCR clone 281407 (TRBV7-9, TRBJ2-5)
CASLSPGQETQYF

SEQ ID NO: 562815 - protein, 14 aa, Homo sapiens
  CDR3 for alpha chain variable domain of TCR clone 281408 (TRAV26-2, TRAJ11)
CIPRLNSGYSTLTF

SEQ ID NO: 562816 - protein, 14 aa, Homo sapiens
  CDR3 for beta chain variable domain of TCR clone 281408 (TRBV12-5, TRBJ2-5)
CASGSRTHQETQYF

SEQ ID NO: 562817 - protein, 12 aa, Homo sapiens
  CDR3 for alpha chain variable domain of TCR clone 281409 (TRAV20, TRAJ30)
CAGGVGNDKIIF

SEQ ID NO: 562818 - protein, 15 aa, Homo sapiens
  CDR3 for beta chain variable domain of TCR clone 281409 (TRBV7-6, TRBJ2-3)
CASSPIIYSTDTQYF

SEQ ID NO: 562819 - protein, 14 aa, Homo sapiens
  CDR3 for alpha chain variable domain of TCR clone 281410 (TRAV1-2, TRAJ16)
CAVNRFSDGQKLLF

SEQ ID NO: 562820 - protein, 14 aa, Homo sapiens
  CDR3 for beta chain variable domain of TCR clone 281410 (TRBV7-9, TRBJ1-4)
CAVTEGEANEKLFF

SEQ ID NO: 562821 - protein, 12 aa, Homo sapiens
  CDR3 for alpha chain variable domain of TCR clone 281411 (TRAV12-3, TRAJ17)
CAMTLTGNKLTF

SEQ ID NO: 562822 - protein, 10 aa, Homo sapiens
  CDR3 for beta chain variable domain of TCR clone 281411 (TRBV20-1, TRBJ2-1)
PGVEYNEQFF

SEQ ID NO: 562823 - protein, 11 aa, Homo sapiens
  CDR3 for alpha chain variable domain of TCR clone 281412 (TRAV12-3, TRAJ49)
CAANTGNQFYF

SEQ ID NO: 562824 - protein, 15 aa, Homo sapiens
  CDR3 for beta chain variable domain of TCR clone 281412 (TRBV11-2, TRBJ2-1)
CASSLGTSGINEQFF

SEQ ID NO: 562825 - protein, 22 aa, Homo sapiens
  CDR3 for alpha chain variable domain of TCR clone 281413 (TRAV12-3, TRAJ17)
CAMTLTGNKLTLEEEPGCELNQ

SEQ ID NO: 562826 - protein, 15 aa, Homo sapiens
  CDR3 for beta chain variable domain of TCR clone 281413 (TRBV20-1, TRBJ2-7)
CSARDRVSGMDEQYF

SEQ ID NO: 562827 - protein, 14 aa, Homo sapiens
  CDR3 for alpha chain variable domain of TCR clone 281414 (TRAV12-2, TRAJ13)
CAVKKTGGYQKLTF

SEQ ID NO: 562828 - protein, 14 aa, Homo sapiens
  CDR3 for beta chain variable domain of TCR clone 281414 (TRBV25-1, TRBJ1-1)
CASTHLGGNTEAFF

SEQ ID NO: 562829 - protein, 14 aa, Homo sapiens
  CDR3 for alpha chain variable domain of TCR clone 281415 (TRAV2, TRAJ9)
CAVEDRSGGFKTIF

SEQ ID NO: 562830 - protein, 16 aa, Homo sapiens
  CDR3 for beta chain variable domain of TCR clone 281415 (TRBV4-2, TRBJ2-4)
CASSQELRRAKNIQYF

SEQ ID NO: 562831 - protein, 11 aa, Homo sapiens
  CDR3 for alpha chain variable domain of TCR clone 281416 (TRAV21, TRAJ34)
CAHYNTDKLIF

SEQ ID NO: 562832 - protein, 16 aa, Homo sapiens
  CDR3 for beta chain variable domain of TCR clone 281416 (TRBV5-4, TRBJ2-3)
CASQQPGAGGADTQYF

SEQ ID NO: 562833 - protein, 16 aa, Homo sapiens
  CDR3 for alpha chain variable domain of TCR clone 281417 (TRAV13-1, TRAJ18)
CAASRMRGSTLGRLYF

SEQ ID NO: 562834 - protein, 17 aa, Homo sapiens
  CDR3 for beta chain variable domain of TCR clone 281417 (TRBV7-2, TRBJ2-2)
CASSPRGAGEGTGELFF

SEQ ID NO: 562835 - protein, 14 aa, Homo sapiens
  CDR3 for alpha chain variable domain of TCR clone 281418 (TRAV12-3, TRAJ9)
CAVSPNTGGFKTIF

SEQ ID NO: 562836 - protein, 12 aa, Homo sapiens
  CDR3 for beta chain variable domain of TCR clone 281418 (TRBV11-2, TRBJ2-2)
CASSLGGGELFF

SEQ ID NO: 562837 - protein, 12 aa, Homo sapiens
  CDR3 for alpha chain variable domain of TCR clone 281419 (TRAV1-2, TRAJ42)
CVAGGSQGNLIF

SEQ ID NO: 562838 - protein, 14 aa, Homo sapiens
  CDR3 for beta chain variable domain of TCR clone 281419 (TRBV19, TRBJ2-1)
CASPTFVLSGEQFF

SEQ ID NO: 562839 - protein, 13 aa, Homo sapiens
  CDR3 for alpha chain variable domain of TCR clone 281420 (TRAV27, TRAJ45)
CRSSGGGADGLTF

SEQ ID NO: 562840 - protein, 16 aa, Homo sapiens
  CDR3 for beta chain variable domain of TCR clone 281420 (TRBV5-1, TRBJ1-2)
CASSWTTGTANYGYTF

SEQ ID NO: 562841 - protein, 11 aa, Homo sapiens
  CDR3 for alpha chain variable domain of TCR clone 281421 (TRAV12-1, TRAJ30)
CVVNGQDKIIF

SEQ ID NO: 562842 - protein, 17 aa, Homo sapiens
  CDR3 for beta chain variable domain of TCR clone 281421 (TRBV18, TRBJ2-1)
CASSKGLSGGADNEQFF

SEQ ID NO: 562843 - protein, 14 aa, Homo sapiens
  CDR3 for alpha chain variable domain of TCR clone 281422 (TRAV1-2, TRAJ8)
FAVIEDTGFQKLVF

SEQ ID NO: 562844 - protein, 14 aa, Homo sapiens
  CDR3 for beta chain variable domain of TCR clone 281422 (TRBV5-4, TRBJ1-1)
CASSLDSRRDEAFF

SEQ ID NO: 562845 - protein, 13 aa, Homo sapiens
  CDR3 for alpha chain variable domain of TCR clone 281423 (TRAV35, TRAJ36)
CAGPRIGANNLFS

SEQ ID NO: 562846 - protein, 18 aa, Homo sapiens
  CDR3 for beta chain variable domain of TCR clone 281423 (TRBV7-9, TRBJ2-1)
CASSTGLAEGSSYNEQFF

SEQ ID NO: 562847 - protein, 14 aa, Homo sapiens
  CDR3 for alpha chain variable domain of TCR clone 281424 (TRAV2, TRAJ9)
CAVEDRSGGFKTSF

SEQ ID NO: 562848 - protein, 14 aa, Homo sapiens
  CDR3 for beta chain variable domain of TCR clone 281424 (TRBV4-1, TRBJ2-2)
CASSQAVNTGELFF

SEQ ID NO: 562849 - protein, 14 aa, Homo sapiens
  CDR3 for alpha chain variable domain of TCR clone 281425 (TRAV27, TRAJ23)
CAGLSYNQGGKLTF

SEQ ID NO: 562850 - protein, 15 aa, Homo sapiens
  CDR3 for beta chain variable domain of TCR clone 281425 (TRBV7-2, TRBJ2-1)
CASSSGLAGGNEQFF

SEQ ID NO: 562851 - protein, 16 aa, Homo sapiens
  CDR3 for alpha chain variable domain of TCR clone 281426 (TRAV23/DV6, TRAJ57)
CAERSTLSQGGSEKLF

SEQ ID NO: 562852 - protein, 14 aa, Homo sapiens
  CDR3 for beta chain variable domain of TCR clone 281426 (TRBV25-1, TRBJ1-1)
CASTHLGGNTEAFF

SEQ ID NO: 562853 - protein, 16 aa, Homo sapiens
  CDR3 for alpha chain variable domain of TCR clone 281427 (TRAV16, TRAJ57)
CAPYLITQGGSEKLVF

SEQ ID NO: 562854 - protein, 17 aa, Homo sapiens
  CDR3 for beta chain variable domain of TCR clone 281427 (TRBV24-1, TRBJ2-4)
CATSDAEARGVRNIHYF

SEQ ID NO: 562855 - protein, 14 aa, Homo sapiens
  CDR3 for alpha chain variable domain of TCR clone 281428 (TRAV13-1, TRAJ35)
CAASKGGFGNVLHC

SEQ ID NO: 562856 - protein, 13 aa, Homo sapiens
  CDR3 for beta chain variable domain of TCR clone 281428 (TRBV7-3, TRBJ1-1)
CASSQDWGAEDFL

SEQ ID NO: 562857 - protein, 16 aa, Homo sapiens
  CDR3 for alpha chain variable domain of TCR clone 281429 (TRAV27, TRAJ53)
WAAPEGSGGSNYKLTF

SEQ ID NO: 562858 - protein, 15 aa, Homo sapiens
  CDR3 for beta chain variable domain of TCR clone 281429 (TRBV20-1, TRBJ1-1)
CSASRGVTGNTEAFF

SEQ ID NO: 562859 - protein, 15 aa, Homo sapiens
  CDR3 for alpha chain variable domain of TCR clone 281430 (TRAV2, TRAJ15)
CAVEDWGQAGTALIF

SEQ ID NO: 562860 - protein, 14 aa, Homo sapiens
  CDR3 for beta chain variable domain of TCR clone 281430 (TRBV6-1, TRBJ1-3)
CASVQGGGGNTIYF

SEQ ID NO: 562861 - protein, 16 aa, Homo sapiens
  CDR3 for alpha chain variable domain of TCR clone 281431 (TRAV3, TRAJ37)
CAVRVRGSGNTGTLIF

SEQ ID NO: 562862 - protein, 15 aa, Homo sapiens
  CDR3 for beta chain variable domain of TCR clone 281431 (TRBV3-1, TRBJ2-1)
CASSPRDSGFNEQFF

SEQ ID NO: 562863 - protein, 14 aa, Homo sapiens
  CDR3 for alpha chain variable domain of TCR clone 281432 (TRAV13-1, TRAJ35)
CSASKGGFGNVLHC

SEQ ID NO: 562864 - protein, 13 aa, Homo sapiens
  CDR3 for beta chain variable domain of TCR clone 281432 (TRBV7-3, TRBJ1-1)
CASSQDWGAEASF

SEQ ID NO: 562865 - protein, 12 aa, Homo sapiens
  CDR3 for alpha chain variable domain of TCR clone 281433 (TRAV3, TRAJ7)
CADLLWEQQTRF

SEQ ID NO: 562866 - protein, 13 aa, Homo sapiens
  CDR3 for beta chain variable domain of TCR clone 281433 (TRBV7-3, TRBJ2-5)
CASGFRGGETQYF

SEQ ID NO: 562867 - protein, 14 aa, Homo sapiens
  CDR3 for alpha chain variable domain of TCR clone 281434 (TRAV26-1, TRAJ34)
CIVRVAYNTEKLIL

SEQ ID NO: 562868 - protein, 15 aa, Homo sapiens
  CDR3 for beta chain variable domain of TCR clone 281434 (TRBV20-1, TRBJ2-7)
CSARVPAAYFYEQYF

SEQ ID NO: 562869 - protein, 14 aa, Homo sapiens
  CDR3 for alpha chain variable domain of TCR clone 281435 (TRAV12-2, TRAJ15)
CAPHTGQAGTALIF

SEQ ID NO: 562870 - protein, 14 aa, Homo sapiens
  CDR3 for beta chain variable domain of TCR clone 281435 (TRBV7-2, TRBJ2-7)
CASSPKTSFYERYF

SEQ ID NO: 562871 - protein, 13 aa, Homo sapiens
  CDR3 for alpha chain variable domain of TCR clone 281436 (TRAV3, TRAJ27)
CAVRPLGAGKSTF

SEQ ID NO: 562872 - protein, 15 aa, Homo sapiens
  CDR3 for beta chain variable domain of TCR clone 281436 (TRBV10-2, TRBJ2-6)
CASSEQGTGANVLTF

SEQ ID NO: 562873 - protein, 15 aa, Homo sapiens
  CDR3 for alpha chain variable domain of TCR clone 281437 (TRAV4, TRAJ39)
CVVGPNTNAGNMLTF

SEQ ID NO: 562874 - protein, 13 aa, Homo sapiens
  CDR3 for beta chain variable domain of TCR clone 281437 (TRBV11-2, TRBJ2-5)
CASSSTGEETQYF

SEQ ID NO: 562875 - protein, 16 aa, Homo sapiens
  CDR3 for alpha chain variable domain of TCR clone 281438 (TRAV26-1, TRAJ53)
CIVRVAMGGSNYKLTF

SEQ ID NO: 562876 - protein, 15 aa, Homo sapiens
  CDR3 for beta chain variable domain of TCR clone 281438 (TRBV4-1, TRBJ1-2)
CASSQGQGAAYGYTF

SEQ ID NO: 562877 - protein, 15 aa, Homo sapiens
  CDR3 for alpha chain variable domain of TCR clone 281439 (TRAV27, TRAJ38)
CAGRFNAGNNRKLIW

SEQ ID NO: 562878 - protein, 13 aa, Homo sapiens
  CDR3 for beta chain variable domain of TCR clone 281439 (TRBV20-1, TRBJ2-1)
TSGALPPGNEQCF

SEQ ID NO: 562879 - protein, 13 aa, Homo sapiens
  CDR3 for alpha chain variable domain of TCR clone 281440 (TRAV27, TRAJ54)
CAGAGQGAQKPVF

SEQ ID NO: 562880 - protein, 15 aa, Homo sapiens
  CDR3 for beta chain variable domain of TCR clone 281440 (TRBV18, TRBJ2-6)
CASSPSYAGANVLTF

SEQ ID NO: 562881 - protein, 14 aa, Homo sapiens
  CDR3 for alpha chain variable domain of TCR clone 281441 (TRAV4, TRAJ23)
CLVGSYNHGGKLIF

SEQ ID NO: 562882 - protein, 15 aa, Homo sapiens
  CDR3 for beta chain variable domain of TCR clone 281441 (TRBV6-1, TRBJ2-1)
CASSEAAYSYNEQFF

SEQ ID NO: 562883 - protein, 17 aa, Homo sapiens
  CDR3 for alpha chain variable domain of TCR clone 281442 (TRAV3, TRAJ6)
CAVRDGPRAGGSYIPTC

SEQ ID NO: 562884 - protein, 16 aa, Homo sapiens
  CDR3 for beta chain variable domain of TCR clone 281442 (TRBV19, TRBJ1-5)
CASSTWTGGGNQPQHF

SEQ ID NO: 562885 - protein, 15 aa, Homo sapiens
  CDR3 for alpha chain variable domain of TCR clone 281443 (TRAV26-1, TRAJ40)
CIVRVTTSGTYKYIL

SEQ ID NO: 562886 - protein, 15 aa, Homo sapiens
  CDR3 for beta chain variable domain of TCR clone 281443 (TRBV7-9, TRBJ1-6)
CASSSPGRGNSPLHF

SEQ ID NO: 562887 - protein, 15 aa, Homo sapiens
  CDR3 for alpha chain variable domain of TCR clone 281444 (TRAV14/DV4, TRAJ12)
CAMREERDSSYKLIF

SEQ ID NO: 562888 - protein, 13 aa, Homo sapiens
  CDR3 for beta chain variable domain of TCR clone 281444 (TRBV18, TRBJ1-1)
CASSPETKPEAFF

SEQ ID NO: 562889 - protein, 14 aa, Homo sapiens
  CDR3 for alpha chain variable domain of TCR clone 281445 (TRAV17, TRAJ22)
CATSPSGSARQLTF

SEQ ID NO: 562890 - protein, 16 aa, Homo sapiens
  CDR3 for beta chain variable domain of TCR clone 281445 (TRBV19, TRBJ1-1)
CASRFGGPVTGTEAFF

SEQ ID NO: 562891 - protein, 18 aa, Homo sapiens
  CDR3 for alpha chain variable domain of TCR clone 281446 (TRAV21, TRAJ52)
CAVRPSPAGCTSYGRLTF

SEQ ID NO: 562892 - protein, 15 aa, Homo sapiens
  CDR3 for beta chain variable domain of TCR clone 281446 (TRBV20-1, TRBJ1-5)
CSAFKNGQRNQPQHF

SEQ ID NO: 562893 - protein, 14 aa, Homo sapiens
  CDR3 for alpha chain variable domain of TCR clone 281447 (TRAV20, TRAJ56)
CAVQFGGANSKLTF

SEQ ID NO: 562894 - protein, 15 aa, Homo sapiens
  CDR3 for beta chain variable domain of TCR clone 281447 (TRBV7-9, TRBJ1-1)
CASSLLEQGGTEAFF

SEQ ID NO: 562895 - protein, 16 aa, Homo sapiens
  CDR3 for alpha chain variable domain of TCR clone 281448 (TRAV30, TRAJ24)
CGTEIVDTDSWGKFQF

SEQ ID NO: 562896 - protein, 18 aa, Homo sapiens
  CDR3 for beta chain variable domain of TCR clone 281448 (TRBV11-2, TRBJ2-3)
CASSLGGASRGAPNTQYF

SEQ ID NO: 562897 - protein, 14 aa, Homo sapiens
  CDR3 for alpha chain variable domain of TCR clone 281449 (TRAV12-3, TRAJ6)
CAMGATGGSYIHTF

SEQ ID NO: 562898 - protein, 16 aa, Homo sapiens
  CDR3 for beta chain variable domain of TCR clone 281449 (TRBV4-2, TRBJ2-1)
CASSPRAGQGANEQFF

SEQ ID NO: 562899 - protein, 16 aa, Homo sapiens
  CDR3 for alpha chain variable domain of TCR clone 281450 (TRAV30, TRAJ24)
CGTEIVDADSGGKFKF

SEQ ID NO: 562900 - protein, 14 aa, Homo sapiens
  CDR3 for beta chain variable domain of TCR clone 281450 (TRBV12-5, TRBJ2-5)
CASGSRTHQEAQYF

SEQ ID NO: 562901 - protein, 14 aa, Homo sapiens
  CDR3 for alpha chain variable domain of TCR clone 281451 (TRAV12-3, TRAJ22)
CAMSLFGSARQLTF

SEQ ID NO: 562902 - protein, 15 aa, Homo sapiens
  CDR3 for beta chain variable domain of TCR clone 281451 (TRBV7-3, TRBJ2-2)
CASSETGQGTGELFF

SEQ ID NO: 562903 - protein, 16 aa, Homo sapiens
  CDR3 for alpha chain variable domain of TCR clone 281452 (TRAV12-3, TRAJ53)
CAMSPGSGGSNYKLTF

SEQ ID NO: 562904 - protein, 15 aa, Homo sapiens
  CDR3 for beta chain variable domain of TCR clone 281452 (TRBV6-4, TRBJ2-3)
CASSALAGSGYTQYF

SEQ ID NO: 562905 - protein, 14 aa, Homo sapiens
  CDR3 for alpha chain variable domain of TCR clone 281453 (TRAV29/DV5, TRAJ45)
CAASFRGGADGSTF

SEQ ID NO: 562906 - protein, 11 aa, Homo sapiens
  CDR3 for beta chain variable domain of TCR clone 281453 (TRBV11-2, TRBJ2-2)
CASSLPGELFF

SEQ ID NO: 562907 - protein, 15 aa, Homo sapiens
  CDR3 for alpha chain variable domain of TCR clone 281454 (TRAV3, TRAJ20)
CAVRDIKLSDQKLSF

SEQ ID NO: 562908 - protein, 15 aa, Homo sapiens
  CDR3 for beta chain variable domain of TCR clone 281454 (TRBV7-9, TRBJ1-6)
CASSSPGCGNSPLHF

SEQ ID NO: 562909 - protein, 10 aa, Homo sapiens
  CDR3 for alpha chain variable domain of TCR clone 281455 (TRAV1-2, TRAJ34)
YAVNTDKLIF

SEQ ID NO: 562910 - protein, 18 aa, Homo sapiens
  CDR3 for beta chain variable domain of TCR clone 281455 (TRBV7-9, TRBJ2-7)
CASSLTTSGSRTWYEQYF

SEQ ID NO: 562911 - protein, 13 aa, Homo sapiens
  CDR3 for alpha chain variable domain of TCR clone 281456 (TRAV3, TRAJ7)
CAVSSYGNNRLAF

SEQ ID NO: 562912 - protein, 17 aa, Homo sapiens
  CDR3 for beta chain variable domain of TCR clone 281456 (TRBV19, TRBJ2-2)
CASSRNPGGFGTGELFF

SEQ ID NO: 562913 - protein, 20 aa, Homo sapiens
  CDR3 for alpha chain variable domain of TCR clone 281457 (TRAV12-1, TRAJ42)
SSVIQPPTSVKGGSQGNLIF

SEQ ID NO: 562914 - protein, 15 aa, Homo sapiens
  CDR3 for beta chain variable domain of TCR clone 281457 (TRBV7-3, TRBJ2-1)
CASSPTGGGEVEQFF

SEQ ID NO: 562915 - protein, 14 aa, Homo sapiens
  CDR3 for alpha chain variable domain of TCR clone 281458 (TRAV29/DV5, TRAJ36)
CAARRKTGANNLFF

SEQ ID NO: 562916 - protein, 16 aa, Homo sapiens
  CDR3 for beta chain variable domain of TCR clone 281458 (TRBV5-5, TRBJ1-6)
CASSYLSTGFNSPLHF

SEQ ID NO: 562917 - protein, 15 aa, Homo sapiens
  CDR3 for alpha chain variable domain of TCR clone 281459 (TRAV26-1, TRAJ29)
CIVRVEGSGNTAPVF

SEQ ID NO: 562918 - protein, 15 aa, Homo sapiens
  CDR3 for beta chain variable domain of TCR clone 281459 (TRBV28, TRBJ2-5)
CASSPGQGSIETQYF

SEQ ID NO: 562919 - protein, 14 aa, Homo sapiens
  CDR3 for alpha chain variable domain of TCR clone 281460 (TRAV8-3, TRAJ4)
CAVGASGCYNKLIF

SEQ ID NO: 562920 - protein, 16 aa, Homo sapiens
  CDR3 for beta chain variable domain of TCR clone 281460 (TRBV5-1, TRBJ1-1)
CASSSGGNSLNTEAFF

SEQ ID NO: 562921 - protein, 13 aa, Homo sapiens
  CDR3 for alpha chain variable domain of TCR clone 281461 (TRAV30, TRAJ49)
CGTESQPVTSSIL

SEQ ID NO: 562922 - protein, 15 aa, Homo sapiens
  CDR3 for beta chain variable domain of TCR clone 281461 (TRBV5-1, TRBJ2-7)
CASSPQGRPLDEQYF

SEQ ID NO: 562923 - protein, 15 aa, Homo sapiens
  CDR3 for alpha chain variable domain of TCR clone 281462 (TRAV35, TRAJ23)
CAGPLGNNQGGKLFF

SEQ ID NO: 562924 - protein, 14 aa, Homo sapiens
  CDR3 for beta chain variable domain of TCR clone 281462 (TRBV7-9, TRBJ1-1)
CASTPLQSYTEAFF

SEQ ID NO: 562925 - protein, 11 aa, Homo sapiens
  CDR3 for alpha chain variable domain of TCR clone 281463 (TRAV17, TRAJ9)
CATAGGFKTIF

SEQ ID NO: 562926 - protein, 15 aa, Homo sapiens
  CDR3 for beta chain variable domain of TCR clone 281463 (TRBV9, TRBJ1-6)
CASSVAGTGDSPLHF

SEQ ID NO: 562927 - protein, 16 aa, Homo sapiens
  CDR3 for alpha chain variable domain of TCR clone 281464 (TRAV3, TRAJ18)
CAVRDGRGSTLGRRYF

SEQ ID NO: 562928 - protein, 15 aa, Homo sapiens
  CDR3 for beta chain variable domain of TCR clone 281464 (TRBV7-9, TRBJ1-6)
CASSSPVRGNSPLHF

SEQ ID NO: 562929 - protein, 14 aa, Homo sapiens
  CDR3 for alpha chain variable domain of TCR clone 281465 (TRAV2, TRAJ12)
CAVDAMDSSYKLIF

SEQ ID NO: 562930 - protein, 14 aa, Homo sapiens
  CDR3 for beta chain variable domain of TCR clone 281465 (TRBV12-5, TRBJ2-5)
CASGSRTHQETQYF

SEQ ID NO: 562931 - protein, 14 aa, Homo sapiens
  CDR3 for alpha chain variable domain of TCR clone 281466 (TRAV1-1, TRAJ28)
CAAPSGAGSYQLTF

SEQ ID NO: 562932 - protein, 17 aa, Homo sapiens
  CDR3 for beta chain variable domain of TCR clone 281466 (TRBV20-1, TRBJ2-1)
CSASSSGLAGSYNEQFF

SEQ ID NO: 562933 - protein, 20 aa, Homo sapiens
  CDR3 for alpha chain variable domain of TCR clone 281467 (TRAV26-1, TRAJ42)
CCVLLHRQTYYGGSRGNLIF

SEQ ID NO: 562934 - protein, 11 aa, Homo sapiens
  CDR3 for beta chain variable domain of TCR clone 281467 (TRBV7-3, TRBJ2-2)
CASSLKRGTLS

SEQ ID NO: 562935 - protein, 16 aa, Homo sapiens
  CDR3 for alpha chain variable domain of TCR clone 281468 (TRAV12-1, TRAJ12)
CVVNTLLMDSSYKLIF

SEQ ID NO: 562936 - protein, 13 aa, Homo sapiens
  CDR3 for beta chain variable domain of TCR clone 281468 (TRBV14, TRBJ2-7)
CASSQGRRYEQYF

SEQ ID NO: 562937 - protein, 15 aa, Homo sapiens
  CDR3 for alpha chain variable domain of TCR clone 281469 (TRAV23/DV6, TRAJ18)
SAARYRGSTLGRLYF

SEQ ID NO: 562938 - protein, 13 aa, Homo sapiens
  CDR3 for beta chain variable domain of TCR clone 281469 (TRBV7-2, TRBJ2-7)
CASSSPSGSEQYF

SEQ ID NO: 562939 - protein, 12 aa, Homo sapiens
  CDR3 for alpha chain variable domain of TCR clone 281470 (TRAV13-1, TRAJ21)
CAAKEGFNKFYF

SEQ ID NO: 562940 - protein, 15 aa, Homo sapiens
  CDR3 for beta chain variable domain of TCR clone 281470 (TRBV3-1, TRBJ2-5)
CASSANLGGPETQYF

SEQ ID NO: 562941 - protein, 14 aa, Homo sapiens
  CDR3 for alpha chain variable domain of TCR clone 281471 (TRAV17, TRAJ34)
CATDSLEGTDKLIF

SEQ ID NO: 562942 - protein, 15 aa, Homo sapiens
  CDR3 for beta chain variable domain of TCR clone 281471 (TRBV7-6, TRBJ2-1)
CASSSLAGEGNEQFF

SEQ ID NO: 562943 - protein, 15 aa, Homo sapiens
  CDR3 for alpha chain variable domain of TCR clone 281472 (TRAV26-2, TRAJ50)
CTLRDEETSYDKVIF

SEQ ID NO: 562944 - protein, 13 aa, Homo sapiens
  CDR3 for beta chain variable domain of TCR clone 281472 (TRBV7-3, TRBJ1-1)
CASSQDWGAEAFF

SEQ ID NO: 562945 - protein, 15 aa, Homo sapiens
  CDR3 for alpha chain variable domain of TCR clone 281473 (TRAV12-2, TRAJ43)
CAFDMRFGAGTRLTV

SEQ ID NO: 562946 - protein, 14 aa, Homo sapiens
  CDR3 for beta chain variable domain of TCR clone 281473 (TRBV20-1, TRBJ2-3)
RTSGGAGDTDTQYF

SEQ ID NO: 562947 - protein, 15 aa, Homo sapiens
  CDR3 for alpha chain variable domain of TCR clone 281474 (TRAV17, TRAJ20)
CATDGGGSNDYKLSF

SEQ ID NO: 562948 - protein, 14 aa, Homo sapiens
  CDR3 for beta chain variable domain of TCR clone 281474 (TRBV19, TRBJ2-1)
CASPTFVLSGEQFF

SEQ ID NO: 562949 - protein, 14 aa, Homo sapiens
  CDR3 for alpha chain variable domain of TCR clone 281475 (TRAV12-3, TRAJ57)
CAMSAWGGSEKLVF

SEQ ID NO: 562950 - protein, 12 aa, Homo sapiens
  CDR3 for beta chain variable domain of TCR clone 281475 (TRBV3-1, TRBJ2-7)
CASSQVRYEQYF

SEQ ID NO: 562951 - protein, 16 aa, Homo sapiens
  CDR3 for alpha chain variable domain of TCR clone 281476 (TRAV27, TRAJ13)
CAGAKSDSGGYQKVTF

SEQ ID NO: 562952 - protein, 12 aa, Homo sapiens
  CDR3 for beta chain variable domain of TCR clone 281476 (TRBV29-1, TRBJ2-1)
GRHALFHNEQFF

SEQ ID NO: 562953 - protein, 14 aa, Homo sapiens
  CDR3 for alpha chain variable domain of TCR clone 281477 (TRAV12-3, TRAJ10)
SHLPLTGGGNKLTF

SEQ ID NO: 562954 - protein, 15 aa, Homo sapiens
  CDR3 for beta chain variable domain of TCR clone 281477 (TRBV7-9, TRBJ2-1)
CASSLGWGRANEQFF

SEQ ID NO: 562955 - protein, 16 aa, Homo sapiens
  CDR3 for alpha chain variable domain of TCR clone 281478 (TRAV30, TRAJ24)
CGTEIVDADSWGNSSL

SEQ ID NO: 562956 - protein, 18 aa, Homo sapiens
  CDR3 for beta chain variable domain of TCR clone 281478 (TRBV7-9, TRBJ2-7)
CASSLTTSGSRTWYEQYF

SEQ ID NO: 562957 - protein, 12 aa, Homo sapiens
  CDR3 for alpha chain variable domain of TCR clone 281479 (TRAV12-3, TRAJ17)
CAMTLTGNKLTF

SEQ ID NO: 562958 - protein, 14 aa, Homo sapiens
  CDR3 for beta chain variable domain of TCR clone 281479 (TRBV16, TRBJ1-1)
CASSQAGPNTEAFF

SEQ ID NO: 562959 - protein, 12 aa, Homo sapiens
  CDR3 for alpha chain variable domain of TCR clone 281480 (TRAV3, TRAJ26)
CAVRDYGQNFVF

SEQ ID NO: 562960 - protein, 16 aa, Homo sapiens
  CDR3 for beta chain variable domain of TCR clone 281480 (TRBV7-3, TRBJ2-3)
CASSLSGYRPEDTQYF

SEQ ID NO: 562961 - protein, 12 aa, Homo sapiens
  CDR3 for alpha chain variable domain of TCR clone 281481 (TRAV2, TRAJ33)
CAVWGSNYQLIS

SEQ ID NO: 562962 - protein, 16 aa, Homo sapiens
  CDR3 for beta chain variable domain of TCR clone 281481 (TRBV20-1, TRBJ1-4)
CSAPGQGLLTNEKLFF

SEQ ID NO: 562963 - protein, 12 aa, Homo sapiens
  CDR3 for alpha chain variable domain of TCR clone 281482 (TRAV1-1, TRAJ8)
CAGGTGFQKLVF

SEQ ID NO: 562964 - protein, 15 aa, Homo sapiens
  CDR3 for beta chain variable domain of TCR clone 281482 (TRBV19, TRBJ1-1)
CASSIRRQMNTEAFF

SEQ ID NO: 562965 - protein, 11 aa, Homo sapiens
  CDR3 for alpha chain variable domain of TCR clone 281483 (TRAV1-2, TRAJ20)
CAVANDYKLSS

SEQ ID NO: 562966 - protein, 18 aa, Homo sapiens
  CDR3 for beta chain variable domain of TCR clone 281483 (TRBV20-1, TRBJ2-6)
CSAGTTPTHGSGANVLTF

SEQ ID NO: 562967 - protein, 14 aa, Homo sapiens
  CDR3 for alpha chain variable domain of TCR clone 281484 (TRAV12-2, TRAJ41)
CAVNRANLGYALNF

SEQ ID NO: 562968 - protein, 13 aa, Homo sapiens
  CDR3 for beta chain variable domain of TCR clone 281484 (TRBV7-9, TRBJ1-2)
CASSLKQNYGYTF

SEQ ID NO: 562969 - protein, 14 aa, Homo sapiens
  CDR3 for alpha chain variable domain of TCR clone 281485 (TRAV1-2, TRAJ16)
CAVNRFSDGQKLLF

SEQ ID NO: 562970 - protein, 14 aa, Homo sapiens
  CDR3 for beta chain variable domain of TCR clone 281485 (TRBV11-2, TRBJ2-5)
CASSRTGGIETQHF

SEQ ID NO: 562971 - protein, 13 aa, Homo sapiens
  CDR3 for alpha chain variable domain of TCR clone 281486 (TRAV2, TRAJ29)
CASQNSGNTPLVF

SEQ ID NO: 562972 - protein, 14 aa, Homo sapiens
  CDR3 for beta chain variable domain of TCR clone 281486 (TRBV7-9, TRBJ2-4)
CASSLAMGGNIQYF

SEQ ID NO: 562973 - protein, 15 aa, Homo sapiens
  CDR3 for alpha chain variable domain of TCR clone 281487 (TRAV2, TRAJ15)
CAVEDRGQAGTALIF

SEQ ID NO: 562974 - protein, 14 aa, Homo sapiens
  CDR3 for beta chain variable domain of TCR clone 281487 (TRBV13, TRBJ2-5)
CASSLGPRGETQYF

SEQ ID NO: 562975 - protein, 14 aa, Homo sapiens
  CDR3 for alpha chain variable domain of TCR clone 281488 (TRAV20, TRAJ40)
CAVSLTSGTYKYIF

SEQ ID NO: 562976 - protein, 13 aa, Homo sapiens
  CDR3 for beta chain variable domain of TCR clone 281488 (TRBV20-1, TRBJ1-1)
CSARGGGNTEAFF

SEQ ID NO: 562977 - protein, 14 aa, Homo sapiens
  CDR3 for alpha chain variable domain of TCR clone 281489 (TRAV12-3, TRAJ54)
CAMRGIQGAQKLVF

SEQ ID NO: 562978 - protein, 13 aa, Homo sapiens
  CDR3 for beta chain variable domain of TCR clone 281489 (TRBV19, TRBJ1-1)
CASSSSNGGEAFF

SEQ ID NO: 562979 - protein, 13 aa, Homo sapiens
  CDR3 for alpha chain variable domain of TCR clone 281490 (TRAV21, TRAJ27)
CAARPGNAGKSTF

SEQ ID NO: 562980 - protein, 15 aa, Homo sapiens
  CDR3 for beta chain variable domain of TCR clone 281490 (TRBV19, TRBJ1-1)
CASSIRRQMNTEAFF

SEQ ID NO: 562981 - protein, 11 aa, Homo sapiens
  CDR3 for alpha chain variable domain of TCR clone 281491 (TRAV16, TRAJ26)
CALTRWSEFCL

SEQ ID NO: 562982 - protein, 16 aa, Homo sapiens
  CDR3 for beta chain variable domain of TCR clone 281491 (TRBV13, TRBJ2-2)
CASSPRTGEHTGELFF

SEQ ID NO: 562983 - protein, 11 aa, Homo sapiens
  CDR3 for alpha chain variable domain of TCR clone 281492 (TRAV1-1, TRAJ23)
CAVRQGGKLIF

SEQ ID NO: 562984 - protein, 12 aa, Homo sapiens
  CDR3 for beta chain variable domain of TCR clone 281492 (TRBV19, TRBJ1-5)
CASSIAQPPQHF

SEQ ID NO: 562985 - protein, 14 aa, Homo sapiens
  CDR3 for alpha chain variable domain of TCR clone 281493 (TRAV13-2, TRAJ10)
CAETFTGGGNKLTF

SEQ ID NO: 562986 - protein, 14 aa, Homo sapiens
  CDR3 for beta chain variable domain of TCR clone 281493 (TRBV19, TRBJ2-1)
CASPTFVLSGEQFF

SEQ ID NO: 562987 - protein, 12 aa, Homo sapiens
  CDR3 for alpha chain variable domain of TCR clone 281494 (TRAV12-1, TRAJ40)
CVVYSGTYKYIF

SEQ ID NO: 562988 - protein, 18 aa, Homo sapiens
  CDR3 for beta chain variable domain of TCR clone 281494 (TRBV11-2, TRBJ2-3)
GASSLGGAARGAPNTQYF

SEQ ID NO: 562989 - protein, 14 aa, Homo sapiens
  CDR3 for alpha chain variable domain of TCR clone 281495 (TRAV1-2, TRAJ16)
CAVNRFSDGQKLLS

SEQ ID NO: 562990 - protein, 15 aa, Homo sapiens
  CDR3 for beta chain variable domain of TCR clone 281495 (TRBV9, TRBJ1-6)
CASSVAGTGDPPLHF

SEQ ID NO: 562991 - protein, 16 aa, Homo sapiens
  CDR3 for alpha chain variable domain of TCR clone 281496 (TRAV8-6, TRAJ4)
CAVSPTFSGGYNKLIF

SEQ ID NO: 562992 - protein, 13 aa, Homo sapiens
  CDR3 for beta chain variable domain of TCR clone 281496 (TRBV4-1, TRBJ2-1)
CASSQEVQYEQFF

SEQ ID NO: 562993 - protein, 16 aa, Homo sapiens
  CDR3 for alpha chain variable domain of TCR clone 281497 (TRAV20, TRAJ53)
CAVQAESGGSNYKLTF

SEQ ID NO: 562994 - protein, 14 aa, Homo sapiens
  CDR3 for beta chain variable domain of TCR clone 281497 (TRBV27, TRBJ2-5)
CASSRTFPVDTQYF

SEQ ID NO: 562995 - protein, 14 aa, Homo sapiens
  CDR3 for alpha chain variable domain of TCR clone 281498 (TRAV12-1, TRAJ9)
CVVTLNTGGFKTIF

SEQ ID NO: 562996 - protein, 11 aa, Homo sapiens
  CDR3 for beta chain variable domain of TCR clone 281498 (TRBV29-1, TRBJ2-5)
CSEDRAGTQYF

SEQ ID NO: 562997 - protein, 15 aa, Homo sapiens
  CDR3 for alpha chain variable domain of TCR clone 281499 (TRAV13-1, TRAJ52)
SYYNAGGTSYGKLTF

SEQ ID NO: 562998 - protein, 15 aa, Homo sapiens
  CDR3 for beta chain variable domain of TCR clone 281499 (TRBV18, TRBJ2-1)
CASLPDRGRDNEQFF

SEQ ID NO: 562999 - protein, 12 aa, Homo sapiens
  CDR3 for alpha chain variable domain of TCR clone 281500 (TRAV3, TRAJ43)
CAVRDPNTDMRF

SEQ ID NO: 563000 - protein, 15 aa, Homo sapiens
  CDR3 for beta chain variable domain of TCR clone 281500 (TRBV6-5, TRBJ2-1)
CASSYDAGAGNEQFF

SEQ ID NO: 563001 - protein, 11 aa, Homo sapiens
  CDR3 for alpha chain variable domain of TCR clone 281501 (TRAV13-1, TRAJ49)
CTCVGGNQFYF

SEQ ID NO: 563002 - protein, 15 aa, Homo sapiens
  CDR3 for beta chain variable domain of TCR clone 281501 (TRBV11-2, TRBJ2-2)
CQQPSDREPNRELFF

SEQ ID NO: 563003 - protein, 11 aa, Homo sapiens
  CDR3 for alpha chain variable domain of TCR clone 281502 (TRAV12-2, TRAJ39)
CAVNNMPTFGG

SEQ ID NO: 563004 - protein, 14 aa, Homo sapiens
  CDR3 for beta chain variable domain of TCR clone 281502 (TRBV7-9, TRBJ2-1)
CASSPIEGLATKFF

SEQ ID NO: 563005 - protein, 12 aa, Homo sapiens
  CDR3 for alpha chain variable domain of TCR clone 281503 (TRAV13-1, TRAJ21)
CAAKEGFKKFYF

SEQ ID NO: 563006 - protein, 16 aa, Homo sapiens
  CDR3 for beta chain variable domain of TCR clone 281503 (TRBV7-2, TRBJ2-6)
CASSLAGRSGANVLTF

SEQ ID NO: 563007 - protein, 17 aa, Homo sapiens
  CDR3 for alpha chain variable domain of TCR clone 281504 (TRAV1-1, TRAJ6)
CLLLLRCEAGGSYIPTF

SEQ ID NO: 563008 - protein, 15 aa, Homo sapiens
  CDR3 for beta chain variable domain of TCR clone 281504 (TRBV6-6, TRBJ2-1)
CATRQGVSSYNEQFF

SEQ ID NO: 563009 - protein, 16 aa, Homo sapiens
  CDR3 for alpha chain variable domain of TCR clone 281505 (TRAV12-1, TRAJ53)
CVVTSVAGGSNDKLTF

SEQ ID NO: 563010 - protein, 16 aa, Homo sapiens
  CDR3 for beta chain variable domain of TCR clone 281505 (TRBV6-6, TRBJ2-3)
CASSYSHAGSTDTQYF

SEQ ID NO: 563011 - protein, 15 aa, Homo sapiens
  CDR3 for alpha chain variable domain of TCR clone 281506 (TRAV22, TRAJ37)
CAVALLVSNTGKLIF

SEQ ID NO: 563012 - protein, 14 aa, Homo sapiens
  CDR3 for beta chain variable domain of TCR clone 281506 (TRBV5-4, TRBJ2-5)
CASSLVRGQETQYF

SEQ ID NO: 563013 - protein, 17 aa, Homo sapiens
  CDR3 for alpha chain variable domain of TCR clone 281507 (TRAV3, TRAJ6)
CAVSRCTDTGGSYIPTF

SEQ ID NO: 563014 - protein, 18 aa, Homo sapiens
  CDR3 for beta chain variable domain of TCR clone 281507 (TRBV7-4, TRBJ2-7)
CISVPAATGTSGCYEQYF

SEQ ID NO: 563015 - protein, 12 aa, Homo sapiens
  CDR3 for alpha chain variable domain of TCR clone 281508 (TRAV17, TRAJ53)
CATGGSNYKLTV

SEQ ID NO: 563016 - protein, 19 aa, Homo sapiens
  CDR3 for beta chain variable domain of TCR clone 281508 (TRBV5-1, TRBJ2-3)
CASSLWTSGGITTPDTQYF

SEQ ID NO: 563017 - protein, 13 aa, Homo sapiens
  CDR3 for alpha chain variable domain of TCR clone 281509 (TRAV27, TRAJ37)
CAGGPSNTGKLIF

SEQ ID NO: 563018 - protein, 13 aa, Homo sapiens
  CDR3 for beta chain variable domain of TCR clone 281509 (TRBV19, TRBJ2-5)
CASSMGGAGTQYF

SEQ ID NO: 563019 - protein, 12 aa, Homo sapiens
  CDR3 for alpha chain variable domain of TCR clone 281510 (TRAV21, TRAJ35)
CAVMPIGFGNVL

SEQ ID NO: 563020 - protein, 12 aa, Homo sapiens
  CDR3 for beta chain variable domain of TCR clone 281510 (TRBV7-9, TRBJ2-7)
CASSIKREEQYF

SEQ ID NO: 563021 - protein, 17 aa, Homo sapiens
  CDR3 for alpha chain variable domain of TCR clone 281511 (TRAV17, TRAJ52)
CATERPSGGTSDGKLTF

SEQ ID NO: 563022 - protein, 13 aa, Homo sapiens
  CDR3 for beta chain variable domain of TCR clone 281511 (TRBV6-4, TRBJ1-5)
CASSADLNQPQHF

SEQ ID NO: 563023 - protein, 12 aa, Homo sapiens
  CDR3 for alpha chain variable domain of TCR clone 281512 (TRAV36/DV7, TRAJ37)
CACYGNTGKLIF

SEQ ID NO: 563024 - protein, 12 aa, Homo sapiens
  CDR3 for beta chain variable domain of TCR clone 281512 (TRBV11-2, TRBJ2-2)
CASSLGGGELFF

SEQ ID NO: 563025 - protein, 11 aa, Homo sapiens
  CDR3 for alpha chain variable domain of TCR clone 281513 (TRAV17, TRAJ9)
CATTGGFKTIF

SEQ ID NO: 563026 - protein, 14 aa, Homo sapiens
  CDR3 for beta chain variable domain of TCR clone 281513 (TRBV19, TRBJ1-5)
CASSKMTGPQPQHF

SEQ ID NO: 563027 - protein, 12 aa, Homo sapiens
  CDR3 for alpha chain variable domain of TCR clone 281514 (TRAV3, TRAJ20)
CAVRDGDYKLSF

SEQ ID NO: 563028 - protein, 14 aa, Homo sapiens
  CDR3 for beta chain variable domain of TCR clone 281514 (TRBV7-2, TRBJ2-3)
CASSQTGSSYTQYF

SEQ ID NO: 563029 - protein, 12 aa, Homo sapiens
  CDR3 for alpha chain variable domain of TCR clone 281515 (TRAV12-3, TRAJ17)
CAMTLTGNKLTF

SEQ ID NO: 563030 - protein, 15 aa, Homo sapiens
  CDR3 for beta chain variable domain of TCR clone 281515 (TRBV27, TRBJ2-1)
CASSNGGGSSNEQCF

SEQ ID NO: 563031 - protein, 12 aa, Homo sapiens
  CDR3 for alpha chain variable domain of TCR clone 281516 (TRAV25, TRAJ17)
CAGEAAGNKLNF

SEQ ID NO: 563032 - protein, 14 aa, Homo sapiens
  CDR3 for beta chain variable domain of TCR clone 281516 (TRBV5-1, TRBJ2-1)
CASSALWAGNEQFF

SEQ ID NO: 563033 - protein, 14 aa, Homo sapiens
  CDR3 for alpha chain variable domain of TCR clone 281517 (TRAV1-2, TRAJ8)
CAVREDTGFQKLVF

SEQ ID NO: 563034 - protein, 15 aa, Homo sapiens
  CDR3 for beta chain variable domain of TCR clone 281517 (TRBV20-1, TRBJ2-1)
CSARDRVSGMDEQYF

SEQ ID NO: 563035 - protein, 15 aa, Homo sapiens
  CDR3 for alpha chain variable domain of TCR clone 281518 (TRAV13-1, TRAJ57)
QVPPLSQGGSEKLVF

SEQ ID NO: 563036 - protein, 12 aa, Homo sapiens
  CDR3 for beta chain variable domain of TCR clone 281518 (TRBV20-1, TRBJ2-5)
CRVAGAGETQYF

SEQ ID NO: 563037 - protein, 17 aa, Homo sapiens
  CDR3 for alpha chain variable domain of TCR clone 281519 (TRAV12-2, TRAJ4)
CAVNVRPVSGGYNKLIF

SEQ ID NO: 563038 - protein, 17 aa, Homo sapiens
  CDR3 for beta chain variable domain of TCR clone 281519 (TRBV6-3, TRBJ2-1)
CASSYSFGTRGLDEQFF

SEQ ID NO: 563039 - protein, 12 aa, Homo sapiens
  CDR3 for alpha chain variable domain of TCR clone 281520 (TRAV29/DV5, TRAJ34)
CAASDNTDKPIF

SEQ ID NO: 563040 - protein, 13 aa, Homo sapiens
  CDR3 for beta chain variable domain of TCR clone 281520 (TRBV20-1, TRBJ2-7)
CSASPPSSYEQYF

SEQ ID NO: 563041 - protein, 16 aa, Homo sapiens
  CDR3 for alpha chain variable domain of TCR clone 281521 (TRAV12-3, TRAJ53)
CAMSPGSGGSNYKLTF

SEQ ID NO: 563042 - protein, 13 aa, Homo sapiens
  CDR3 for beta chain variable domain of TCR clone 281521 (TRBV18, TRBJ2-7)
CQLTGRGAYEQYF

SEQ ID NO: 563043 - protein, 14 aa, Homo sapiens
  CDR3 for alpha chain variable domain of TCR clone 281522 (TRAV26-1, TRAJ38)
CIADNAGNNRKLIW

SEQ ID NO: 563044 - protein, 13 aa, Homo sapiens
  CDR3 for beta chain variable domain of TCR clone 281522 (TRBV18, TRBJ1-2)
CASSASATEGYTF

SEQ ID NO: 563045 - protein, 14 aa, Homo sapiens
  CDR3 for alpha chain variable domain of TCR clone 281523 (TRAV8-4, TRAJ26)
CAVSEDNYGQNFVF

SEQ ID NO: 563046 - protein, 15 aa, Homo sapiens
  CDR3 for beta chain variable domain of TCR clone 281523 (TRBV7-9, TRBJ1-6)
CASSSPGRGNSPLHF

SEQ ID NO: 563047 - protein, 12 aa, Homo sapiens
  CDR3 for alpha chain variable domain of TCR clone 281524 (TRAV12-3, TRAJ17)
CAMTLTGNKLTF

SEQ ID NO: 563048 - protein, 18 aa, Homo sapiens
  CDR3 for beta chain variable domain of TCR clone 281524 (TRBV7-2, TRBJ2-7)
CASSLAQGLRDSSYEQYF

SEQ ID NO: 563049 - protein, 18 aa, Homo sapiens
  CDR3 for alpha chain variable domain of TCR clone 281525 (TRAV13-1, TRAJ52)
CAAKNPNAGGTSYGKLTF

SEQ ID NO: 563050 - protein, 18 aa, Homo sapiens
  CDR3 for beta chain variable domain of TCR clone 281525 (TRBV20-1, TRBJ2-3)
CSASGLAGGPGTTDTQYF

SEQ ID NO: 563051 - protein, 14 aa, Homo sapiens
  CDR3 for alpha chain variable domain of TCR clone 281526 (TRAV13-2, TRAJ6)
CAERGSGGSYIPTF

SEQ ID NO: 563052 - protein, 14 aa, Homo sapiens
  CDR3 for beta chain variable domain of TCR clone 281526 (TRBV20-1, TRBJ2-7)
CSAKRGRSSYEQYF

SEQ ID NO: 563053 - protein, 14 aa, Homo sapiens
  CDR3 for alpha chain variable domain of TCR clone 281527 (TRAV16, TRAJ33)
CALSAMDSNYQVIL

SEQ ID NO: 563054 - protein, 12 aa, Homo sapiens
  CDR3 for beta chain variable domain of TCR clone 281527 (TRBV5-1, TRBJ1-2)
CASSQDTYGYTF

SEQ ID NO: 563055 - protein, 14 aa, Homo sapiens
  CDR3 for alpha chain variable domain of TCR clone 281528 (TRAV1-2, TRAJ16)
CAVNRFSDGQKLLF

SEQ ID NO: 563056 - protein, 16 aa, Homo sapiens
  CDR3 for beta chain variable domain of TCR clone 281528 (TRBV12-5, TRBJ2-5)
CASGPRTSGNKETQYF

SEQ ID NO: 563057 - protein, 13 aa, Homo sapiens
  CDR3 for alpha chain variable domain of TCR clone 281529 (TRAV27, TRAJ45)
CRSSGGGADGFTF

SEQ ID NO: 563058 - protein, 15 aa, Homo sapiens
  CDR3 for beta chain variable domain of TCR clone 281529 (TRBV20-1, TRBJ2-7)
CSARDRVSGMDEQYF

SEQ ID NO: 563059 - protein, 15 aa, Homo sapiens
  CDR3 for alpha chain variable domain of TCR clone 281530 (TRAV29/DV5, TRAJ12)
CAAAPRMDSSYKLIF

SEQ ID NO: 563060 - protein, 16 aa, Homo sapiens
  CDR3 for beta chain variable domain of TCR clone 281530 (TRBV7-2, TRBJ2-5)
CASSPFPTGGEETQYF

SEQ ID NO: 563061 - protein, 18 aa, Homo sapiens
  CDR3 for alpha chain variable domain of TCR clone 281531 (TRAV13-1, TRAJ52)
CAAKNPNAGGTSYGKLTF

SEQ ID NO: 563062 - protein, 15 aa, Homo sapiens
  CDR3 for beta chain variable domain of TCR clone 281531 (TRBV28, TRBJ2-1)
CASRVGLDEYNEQFF

SEQ ID NO: 563063 - protein, 14 aa, Homo sapiens
  CDR3 for alpha chain variable domain of TCR clone 281532 (TRAV16, TRAJ48)
CALTPGFGNEKLTF

SEQ ID NO: 563064 - protein, 14 aa, Homo sapiens
  CDR3 for beta chain variable domain of TCR clone 281532 (TRBV7-2, TRBJ2-7)
CASSSIAGFSEQYF

SEQ ID NO: 563065 - protein, 15 aa, Homo sapiens
  CDR3 for alpha chain variable domain of TCR clone 281533 (TRAV14/DV4, TRAJ10)
CAMRELTGGGNKLTF

SEQ ID NO: 563066 - protein, 14 aa, Homo sapiens
  CDR3 for beta chain variable domain of TCR clone 281533 (TRBV7-9, TRBJ1-1)
CASTPLQAYTEAFF

SEQ ID NO: 563067 - protein, 17 aa, Homo sapiens
  CDR3 for alpha chain variable domain of TCR clone 281534 (TRAV26-1, TRAJ37)
CIVRVITVSSNTGKLIF

SEQ ID NO: 563068 - protein, 16 aa, Homo sapiens
  CDR3 for beta chain variable domain of TCR clone 281534 (TRBV13, TRBJ2-2)
CASSPRTGEHTGELFF

SEQ ID NO: 563069 - protein, 15 aa, Homo sapiens
  CDR3 for alpha chain variable domain of TCR clone 281535 (TRAV13-1, TRAJ5)
CAASPRGHGQESTYF

SEQ ID NO: 563070 - protein, 16 aa, Homo sapiens
  CDR3 for beta chain variable domain of TCR clone 281535 (TRBV12-4, TRBJ1-5)
CASSRPVGGSNQPQHF

SEQ ID NO: 563071 - protein, 17 aa, Homo sapiens
  CDR3 for alpha chain variable domain of TCR clone 281536 (TRAV38-2/DV8, TRAJ57)
CADRSVLTQGGSEKLVF

SEQ ID NO: 563072 - protein, 16 aa, Homo sapiens
  CDR3 for beta chain variable domain of TCR clone 281536 (TRBV7-3, TRBJ2-2)
CASSLKRGTLSGELFF

SEQ ID NO: 563073 - protein, 13 aa, Homo sapiens
  CDR3 for alpha chain variable domain of TCR clone 281537 (TRAV21, TRAJ27)
CAARPGNAGKSTF

SEQ ID NO: 563074 - protein, 14 aa, Homo sapiens
  CDR3 for beta chain variable domain of TCR clone 281537 (TRBV11-2, TRBJ2-7)
CASSLGAGAYEQYI

SEQ ID NO: 563075 - protein, 12 aa, Homo sapiens
  CDR3 for alpha chain variable domain of TCR clone 281538 (TRAV17, TRAJ39)
CATGAAGNMLTF

SEQ ID NO: 563076 - protein, 14 aa, Homo sapiens
  CDR3 for beta chain variable domain of TCR clone 281538 (TRBV7-9, TRBJ1-2)
CASSRQGANYRHTF

SEQ ID NO: 563077 - protein, 16 aa, Homo sapiens
  CDR3 for alpha chain variable domain of TCR clone 281539 (TRAV3, TRAJ10)
CAVRDMRAGGGNKLTF

SEQ ID NO: 563078 - protein, 14 aa, Homo sapiens
  CDR3 for beta chain variable domain of TCR clone 281539 (TRBV7-2, TRBJ1-1)
CDSSFLTGTTEAFF

SEQ ID NO: 563079 - protein, 15 aa, Homo sapiens
  CDR3 for alpha chain variable domain of TCR clone 281540 (TRAV2, TRAJ24)
CAVVRLKNSWGKLQF

SEQ ID NO: 563080 - protein, 17 aa, Homo sapiens
  CDR3 for beta chain variable domain of TCR clone 281540 (TRBV24-1, TRBJ2-1)
CATSDVSTSGTYNEQFF

SEQ ID NO: 563081 - protein, 13 aa, Homo sapiens
  CDR3 for alpha chain variable domain of TCR clone 281541 (TRAV13-2, TRAJ13)
CADRPGGYQKVTF

SEQ ID NO: 563082 - protein, 14 aa, Homo sapiens
  CDR3 for beta chain variable domain of TCR clone 281541 (TRBV4-1, TRBJ2-2)
CASSQAVNTGELFF

SEQ ID NO: 563083 - protein, 11 aa, Homo sapiens
  CDR3 for alpha chain variable domain of TCR clone 281542 (TRAV21, TRAJ34)
CAPLDTDKLIF

SEQ ID NO: 563084 - protein, 16 aa, Homo sapiens
  CDR3 for beta chain variable domain of TCR clone 281542 (TRBV5-1, TRBJ2-3)
CASSLAGYRGTDTQYF

SEQ ID NO: 563085 - protein, 17 aa, Homo sapiens
  CDR3 for alpha chain variable domain of TCR clone 281543 (TRAV26-1, TRAJ37)
CIVRVINVSSNTGKLIF

SEQ ID NO: 563086 - protein, 13 aa, Homo sapiens
  CDR3 for beta chain variable domain of TCR clone 281543 (TRBV7-9, TRBJ2-3)
CASSPGSTDTQYF

SEQ ID NO: 563087 - protein, 10 aa, Homo sapiens
  CDR3 for alpha chain variable domain of TCR clone 281544 (TRAV20, TRAJ22)
CAAPARQLTF

SEQ ID NO: 563088 - protein, 15 aa, Homo sapiens
  CDR3 for beta chain variable domain of TCR clone 281544 (TRBV12-4, TRBJ2-2)
CASGPGQLNTGELFF

SEQ ID NO: 563089 - protein, 13 aa, Homo sapiens
  CDR3 for alpha chain variable domain of TCR clone 281545 (TRAV29/DV5, TRAJ31)
CAASRNNNARLMF

SEQ ID NO: 563090 - protein, 18 aa, Homo sapiens
  CDR3 for beta chain variable domain of TCR clone 281545 (TRBV12-4, TRBJ2-2)
CASRPFGAGALNTGELFF

SEQ ID NO: 563091 - protein, 13 aa, Homo sapiens
  CDR3 for alpha chain variable domain of TCR clone 281546 (TRAV12-3, TRAJ35)
CAMAIGFGNVLHC

SEQ ID NO: 563092 - protein, 15 aa, Homo sapiens
  CDR3 for beta chain variable domain of TCR clone 281546 (TRBV20-1, TRBJ2-1)
CSARGSGTYYNEQLF

SEQ ID NO: 563093 - protein, 13 aa, Homo sapiens
  CDR3 for alpha chain variable domain of TCR clone 281547 (TRAV8-3, TRAJ48)
CCGCNFGNEKLTF

SEQ ID NO: 563094 - protein, 12 aa, Homo sapiens
  CDR3 for beta chain variable domain of TCR clone 281547 (TRBV7-2, TRBJ2-5)
CASSKYQETQYF

SEQ ID NO: 563095 - protein, 13 aa, Homo sapiens
  CDR3 for alpha chain variable domain of TCR clone 281548 (TRAV21, TRAJ32)
CAVSGGATNKIIF

SEQ ID NO: 563096 - protein, 15 aa, Homo sapiens
  CDR3 for beta chain variable domain of TCR clone 281548 (TRBV23-1, TRBJ2-1)
CASSQWPQLTMSSSS

SEQ ID NO: 563097 - protein, 17 aa, Homo sapiens
  CDR3 for alpha chain variable domain of TCR clone 281549 (TRAV38-1, TRAJ45)
CAFMTHYMGGGADGLTF

SEQ ID NO: 563098 - protein, 19 aa, Homo sapiens
  CDR3 for beta chain variable domain of TCR clone 281549 (TRBV6-1, TRBJ2-5)
CASSEQGLAGGLYQETQYF

SEQ ID NO: 563099 - protein, 15 aa, Homo sapiens
  CDR3 for alpha chain variable domain of TCR clone 281550 (TRAV2, TRAJ9)
GAVEDRGTGGFKTIF

SEQ ID NO: 563100 - protein, 17 aa, Homo sapiens
  CDR3 for beta chain variable domain of TCR clone 281550 (TRBV4-3, TRBJ2-1)
CASSQFSSGRASGEQFF

SEQ ID NO: 563101 - protein, 16 aa, Homo sapiens
  CDR3 for alpha chain variable domain of TCR clone 281551 (TRAV12-1, TRAJ48)
CVVNMVSNFGNEKLTF

SEQ ID NO: 563102 - protein, 18 aa, Homo sapiens
  CDR3 for beta chain variable domain of TCR clone 281551 (TRBV11-2, TRBJ2-6)
CDSSLNPFLGTGANVLTF

SEQ ID NO: 563103 - protein, 14 aa, Homo sapiens
  CDR3 for alpha chain variable domain of TCR clone 281552 (TRAV13-1, TRAJ28)
CAASKGAGSYQLTF

SEQ ID NO: 563104 - protein, 12 aa, Homo sapiens
  CDR3 for beta chain variable domain of TCR clone 281552 (TRBV7-8, TRBJ2-7)
CASSLGDREQYF

SEQ ID NO: 563105 - protein, 15 aa, Homo sapiens
  CDR3 for alpha chain variable domain of TCR clone 281553 (TRAV27, TRAJ38)
CAARRNAGNNLKLLW

SEQ ID NO: 563106 - protein, 13 aa, Homo sapiens
  CDR3 for beta chain variable domain of TCR clone 281553 (TRBV12-5, TRBJ2-3)
CASGDRQSDTQYF

SEQ ID NO: 563107 - protein, 16 aa, Homo sapiens
  CDR3 for alpha chain variable domain of TCR clone 281554 (TRAV30, TRAJ24)
CGTEIVDADSWGKFQF

SEQ ID NO: 563108 - protein, 15 aa, Homo sapiens
  CDR3 for beta chain variable domain of TCR clone 281554 (TRBV11-2, TRBJ2-2)
YASSSDRVNAGELFF

SEQ ID NO: 563109 - protein, 18 aa, Homo sapiens
  CDR3 for alpha chain variable domain of TCR clone 281555 (TRAV12-3, TRAJ52)
CAMSVGGAGGTSYGKLTF

SEQ ID NO: 563110 - protein, 15 aa, Homo sapiens
  CDR3 for beta chain variable domain of TCR clone 281555 (TRBV7-2, TRBJ1-2)
CASSPRAGWNYGYAF

SEQ ID NO: 563111 - protein, 11 aa, Homo sapiens
  CDR3 for alpha chain variable domain of TCR clone 281556 (TRAV29/DV5, TRAJ45)
CAASLEEVLTD

SEQ ID NO: 563112 - protein, 12 aa, Homo sapiens
  CDR3 for beta chain variable domain of TCR clone 281556 (TRBV11-3, TRBJ1-1)
CASSLRDSEAFF

SEQ ID NO: 563113 - protein, 12 aa, Homo sapiens
  CDR3 for alpha chain variable domain of TCR clone 281557 (TRAV17, TRAJ20)
CATDSNDYKLSF

SEQ ID NO: 563114 - protein, 14 aa, Homo sapiens
  CDR3 for beta chain variable domain of TCR clone 281557 (TRBV11-2, TRBJ2-7)
CASSLELEGYEQYF

SEQ ID NO: 563115 - protein, 16 aa, Homo sapiens
  CDR3 for alpha chain variable domain of TCR clone 281558 (TRAV36/DV7, TRAJ33)
WRPGNKVQDSNYQLIW

SEQ ID NO: 563116 - protein, 15 aa, Homo sapiens
  CDR3 for beta chain variable domain of TCR clone 281558 (TRBV29-1, TRBJ2-1)
CSVVRHALFYNEQFF

SEQ ID NO: 563117 - protein, 12 aa, Homo sapiens
  CDR3 for alpha chain variable domain of TCR clone 281559 (TRAV8-6, TRAJ11)
CAVSSGNSTLTF

SEQ ID NO: 563118 - protein, 11 aa, Homo sapiens
  CDR3 for beta chain variable domain of TCR clone 281559 (TRBV20-1, TRBJ1-5)
CSAQGDQPQHF

SEQ ID NO: 563119 - protein, 15 aa, Homo sapiens
  CDR3 for alpha chain variable domain of TCR clone 281560 (TRAV17, TRAJ22)
CATVSPSGSARQLTF

SEQ ID NO: 563120 - protein, 16 aa, Homo sapiens
  CDR3 for beta chain variable domain of TCR clone 281560 (TRBV10-3, TRBJ2-7)
CAISADFADRPYEQYF

SEQ ID NO: 563121 - protein, 14 aa, Homo sapiens
  CDR3 for alpha chain variable domain of TCR clone 281561 (TRAV1-2, TRAJ8)
CAVREDTGFQKLVF

SEQ ID NO: 563122 - protein, 16 aa, Homo sapiens
  CDR3 for beta chain variable domain of TCR clone 281561 (TRBV19, TRBJ2-1)
CASSMGAGSSYNEQFF

SEQ ID NO: 563123 - protein, 12 aa, Homo sapiens
  CDR3 for alpha chain variable domain of TCR clone 281562 (TRAV13-1, TRAJ53)
AASGGSNYKLTF

SEQ ID NO: 563124 - protein, 13 aa, Homo sapiens
  CDR3 for beta chain variable domain of TCR clone 281562 (TRBV7-3, TRBJ2-3)
CASSLRGSQTQYF

SEQ ID NO: 563125 - protein, 15 aa, Homo sapiens
  CDR3 for alpha chain variable domain of TCR clone 281563 (TRAV25, TRAJ52)
CAGTSGGTSYGKLTF

SEQ ID NO: 563126 - protein, 12 aa, Homo sapiens
  CDR3 for beta chain variable domain of TCR clone 281563 (TRBV5-1, TRBJ2-1)
CASIGGYNEQFF

SEQ ID NO: 563127 - protein, 14 aa, Homo sapiens
  CDR3 for alpha chain variable domain of TCR clone 281564 (TRAV12-1, TRAJ17)
CVVNYKAAGNKLTF

SEQ ID NO: 563128 - protein, 15 aa, Homo sapiens
  CDR3 for beta chain variable domain of TCR clone 281564 (TRBV7-8, TRBJ1-2)
CASSLVRDGGLGYTF

SEQ ID NO: 563129 - protein, 16 aa, Homo sapiens
  CDR3 for alpha chain variable domain of TCR clone 281565 (TRAV21, TRAJ37)
CAVRTAGSSNPGKLIF

SEQ ID NO: 563130 - protein, 13 aa, Homo sapiens
  CDR3 for beta chain variable domain of TCR clone 281565 (TRBV7-9, TRBJ2-5)
CASRPSGRETQYF

SEQ ID NO: 563131 - protein, 14 aa, Homo sapiens
  CDR3 for alpha chain variable domain of TCR clone 281566 (TRAV17, TRAJ57)
CATDPHGGSEKLVF

SEQ ID NO: 563132 - protein, 17 aa, Homo sapiens
  CDR3 for beta chain variable domain of TCR clone 281566 (TRBV5-1, TRBJ2-2)
CASSLAGLSGGTGELFF

SEQ ID NO: 563133 - protein, 11 aa, Homo sapiens
  CDR3 for alpha chain variable domain of TCR clone 281567 (TRAV2, TRAJ13)
CASGGYQKVTF

SEQ ID NO: 563134 - protein, 15 aa, Homo sapiens
  CDR3 for beta chain variable domain of TCR clone 281567 (TRBV6-1, TRBJ2-2)
CASSRVRGDTGELFF

SEQ ID NO: 563135 - protein, 13 aa, Homo sapiens
  CDR3 for alpha chain variable domain of TCR clone 281568 (TRAV12-3, TRAJ13)
CAMTSGGYQQVTL

SEQ ID NO: 563136 - protein, 13 aa, Homo sapiens
  CDR3 for beta chain variable domain of TCR clone 281568 (TRBV20-1, TRBJ2-2)
CSALSGGAGELFF

SEQ ID NO: 563137 - protein, 16 aa, Homo sapiens
  CDR3 for alpha chain variable domain of TCR clone 281569 (TRAV30, TRAJ24)
CGTEMVDADSWGKFQF

SEQ ID NO: 563138 - protein, 13 aa, Homo sapiens
  CDR3 for beta chain variable domain of TCR clone 281569 (TRBV7-3, TRBJ1-1)
CASSQDWGAEAFF

SEQ ID NO: 563139 - protein, 10 aa, Homo sapiens
  CDR3 for alpha chain variable domain of TCR clone 281570 (TRAV30, TRAJ48)
CGIGNEKLTF

SEQ ID NO: 563140 - protein, 13 aa, Homo sapiens
  CDR3 for beta chain variable domain of TCR clone 281570 (TRBV29-1, TRBJ2-7)
CRVGPSGGYEQYF

SEQ ID NO: 563141 - protein, 14 aa, Homo sapiens
  CDR3 for alpha chain variable domain of TCR clone 281571 (TRAV13-1, TRAJ44)
CAAKATGTASKLTF

SEQ ID NO: 563142 - protein, 16 aa, Homo sapiens
  CDR3 for beta chain variable domain of TCR clone 281571 (TRBV13, TRBJ2-2)
CASSPRTGEHTGELFF

SEQ ID NO: 563143 - protein, 13 aa, Homo sapiens
  CDR3 for alpha chain variable domain of TCR clone 281572 (TRAV21, TRAJ57)
CAVTQGGSEKLVF

SEQ ID NO: 563144 - protein, 14 aa, Homo sapiens
  CDR3 for beta chain variable domain of TCR clone 281572 (TRBV20-1, TRBJ2-7)
CSAKRGRSSYEQYF

SEQ ID NO: 563145 - protein, 13 aa, Homo sapiens
  CDR3 for alpha chain variable domain of TCR clone 281573 (TRAV21, TRAJ27)
CAASPGNAGKSTF

SEQ ID NO: 563146 - protein, 13 aa, Homo sapiens
  CDR3 for beta chain variable domain of TCR clone 281573 (TRBV18, TRBJ2-7)
CASQSGGGYEQYF

SEQ ID NO: 563147 - protein, 14 aa, Homo sapiens
  CDR3 for alpha chain variable domain of TCR clone 281574 (TRAV8-2, TRAJ29)
CVVSSSSGNTPLVF

SEQ ID NO: 563148 - protein, 14 aa, Homo sapiens
  CDR3 for beta chain variable domain of TCR clone 281574 (TRBV7-7, TRBJ2-2)
CATRQDSDTGELFF

SEQ ID NO: 563149 - protein, 11 aa, Homo sapiens
  CDR3 for alpha chain variable domain of TCR clone 281575 (TRAV21, TRAJ39)
LLVNVGNMLTF

SEQ ID NO: 563150 - protein, 15 aa, Homo sapiens
  CDR3 for beta chain variable domain of TCR clone 281575 (TRBV29-1, TRBJ2-1)
CSGRDRKSSYNEQFF

SEQ ID NO: 563151 - protein, 14 aa, Homo sapiens
  CDR3 for alpha chain variable domain of TCR clone 281576 (TRAV12-2, TRAJ5)
CAVNRSTGRRELTF

SEQ ID NO: 563152 - protein, 15 aa, Homo sapiens
  CDR3 for beta chain variable domain of TCR clone 281576 (TRBV20-1, TRBJ2-7)
CSARDRVSGMDEQYF

SEQ ID NO: 563153 - protein, 17 aa, Homo sapiens
  CDR3 for alpha chain variable domain of TCR clone 281577 (TRAV3, TRAJ6)
CAVRDGPRAEGSYIPTF

SEQ ID NO: 563154 - protein, 14 aa, Homo sapiens
  CDR3 for beta chain variable domain of TCR clone 281577 (TRBV20-1, TRBJ2-7)
CSAKRGGSSYEQYF

SEQ ID NO: 563155 - protein, 10 aa, Homo sapiens
  CDR3 for alpha chain variable domain of TCR clone 281578 (TRAV16, TRAJ22)
SAMYLRQLTF

SEQ ID NO: 563156 - protein, 16 aa, Homo sapiens
  CDR3 for beta chain variable domain of TCR clone 281578 (TRBV4-2, TRBJ2-4)
CASSQELRRAENIQYF

SEQ ID NO: 563157 - protein, 13 aa, Homo sapiens
  CDR3 for alpha chain variable domain of TCR clone 281579 (TRAV12-3, TRAJ7)
CAMTPYGNNRLGF

SEQ ID NO: 563158 - protein, 16 aa, Homo sapiens
  CDR3 for beta chain variable domain of TCR clone 281579 (TRBV20-1, TRBJ1-4)
CSARPYGGELNEKLFF

SEQ ID NO: 563159 - protein, 14 aa, Homo sapiens
  CDR3 for alpha chain variable domain of TCR clone 281580 (TRAV12-1, TRAJ42)
CVVIYGGGQGNLIF

SEQ ID NO: 563160 - protein, 15 aa, Homo sapiens
  CDR3 for beta chain variable domain of TCR clone 281580 (TRBV15, TRBJ1-4)
CATSRDMGSYEKLFF

SEQ ID NO: 563161 - protein, 12 aa, Homo sapiens
  CDR3 for alpha chain variable domain of TCR clone 281581 (TRAV12-3, TRAJ17)
CAMTLTGDKLTF

SEQ ID NO: 563162 - protein, 15 aa, Homo sapiens
  CDR3 for beta chain variable domain of TCR clone 281581 (TRBV20-1, TRBJ1-1)
CSASRVVTGNTEAFF

SEQ ID NO: 563163 - protein, 11 aa, Homo sapiens
  CDR3 for alpha chain variable domain of TCR clone 281582 (TRAV4, TRAJ28)
CLVGDNRAETL

SEQ ID NO: 563164 - protein, 13 aa, Homo sapiens
  CDR3 for beta chain variable domain of TCR clone 281582 (TRBV20-1, TRBJ2-7)
CSAIHTSGYEQYF

SEQ ID NO: 563165 - protein, 18 aa, Homo sapiens
  CDR3 for alpha chain variable domain of TCR clone 281583 (TRAV21, TRAJ52)
CAVRPSPAGGTSYGKLTF

SEQ ID NO: 563166 - protein, 14 aa, Homo sapiens
  CDR3 for beta chain variable domain of TCR clone 281583 (TRBV4-1, TRBJ2-7)
CASRLTSGSYEQYF

SEQ ID NO: 563167 - protein, 14 aa, Homo sapiens
  CDR3 for alpha chain variable domain of TCR clone 281584 (TRAV12-2, TRAJ13)
CAVKKTGGYQKVTF

SEQ ID NO: 563168 - protein, 16 aa, Homo sapiens
  CDR3 for beta chain variable domain of TCR clone 281584 (TRBV2, TRBJ2-1)
CSSRSPAGGKYNEQFF

SEQ ID NO: 563169 - protein, 13 aa, Homo sapiens
  CDR3 for alpha chain variable domain of TCR clone 281585 (TRAV1-1, TRAJ9)
CAAKNTGGFKTIF

SEQ ID NO: 563170 - protein, 14 aa, Homo sapiens
  CDR3 for beta chain variable domain of TCR clone 281585 (TRBV20-1, TRBJ2-1)
CSAKIGGSAMSSSS

SEQ ID NO: 563171 - protein, 12 aa, Homo sapiens
  CDR3 for alpha chain variable domain of TCR clone 281586 (TRAV13-2, TRAJ23)
CAERHRGGKLIF

SEQ ID NO: 563172 - protein, 13 aa, Homo sapiens
  CDR3 for beta chain variable domain of TCR clone 281586 (TRBV10-3, TRBJ2-7)
CAPKLAVNYEQYF

SEQ ID NO: 563173 - protein, 16 aa, Homo sapiens
  CDR3 for alpha chain variable domain of TCR clone 281587 (TRAV3, TRAJ37)
CAVRGKGSGNTGKLIF

SEQ ID NO: 563174 - protein, 20 aa, Homo sapiens
  CDR3 for beta chain variable domain of TCR clone 281587 (TRBV7-8, TRBJ2-2)
CASSDLFPGPTSHITGELFF

SEQ ID NO: 563175 - protein, 23 aa, Homo sapiens
  CDR3 for alpha chain variable domain of TCR clone 281588 (TRAV26-1, TRAJ38)
CIAYNAGNNHIQNPDPAVYQLRD

SEQ ID NO: 563176 - protein, 12 aa, Homo sapiens
  CDR3 for beta chain variable domain of TCR clone 281588 (TRBV11-2, TRBJ2-2)
RASSLGGGELFF

SEQ ID NO: 563177 - protein, 14 aa, Homo sapiens
  CDR3 for alpha chain variable domain of TCR clone 281589 (TRAV2, TRAJ9)
CAAEDRSGGFKTIF

SEQ ID NO: 563178 - protein, 14 aa, Homo sapiens
  CDR3 for beta chain variable domain of TCR clone 281589 (TRBV25-1, TRBJ1-4)
CASSGGGQPEKLFF

SEQ ID NO: 563179 - protein, 14 aa, Homo sapiens
  CDR3 for alpha chain variable domain of TCR clone 281590 (TRAV1-2, TRAJ8)
CAVREDTGVQKLVL

SEQ ID NO: 563180 - protein, 14 aa, Homo sapiens
  CDR3 for beta chain variable domain of TCR clone 281590 (TRBV29-1, TRBJ1-4)
CSVTGTGGNEKLFF

SEQ ID NO: 563181 - protein, 18 aa, Homo sapiens
  CDR3 for alpha chain variable domain of TCR clone 281591 (TRAV21, TRAJ52)
CAVRPSPAGGTSYGKLTF

SEQ ID NO: 563182 - protein, 14 aa, Homo sapiens
  CDR3 for beta chain variable domain of TCR clone 281591 (TRBV7-2, TRBJ2-7)
CASSPKTSFYEKYF

SEQ ID NO: 563183 - protein, 13 aa, Homo sapiens
  CDR3 for alpha chain variable domain of TCR clone 281592 (TRAV8-3, TRAJ36)
CAVGATGANNLFF

SEQ ID NO: 563184 - protein, 13 aa, Homo sapiens
  CDR3 for beta chain variable domain of TCR clone 281592 (TRBV12-4, TRBJ1-2)
CASSLRQGKGYTL

SEQ ID NO: 563185 - protein, 16 aa, Homo sapiens
  CDR3 for alpha chain variable domain of TCR clone 281593 (TRAV12-1, TRAJ42)
CVVTPYYGGSQGTLIF

SEQ ID NO: 563186 - protein, 15 aa, Homo sapiens
  CDR3 for beta chain variable domain of TCR clone 281593 (TRBV4-3, TRBJ2-7)
CASSQGGRGIYEQYF

SEQ ID NO: 563187 - protein, 17 aa, Homo sapiens
  CDR3 for alpha chain variable domain of TCR clone 281594 (TRAV12-1, TRAJ6)
CVVKGGIPSGGSYIPTL

SEQ ID NO: 563188 - protein, 13 aa, Homo sapiens
  CDR3 for beta chain variable domain of TCR clone 281594 (TRBV5-1, TRBJ2-5)
CASSLIPAETQYF

SEQ ID NO: 563189 - protein, 17 aa, Homo sapiens
  CDR3 for alpha chain variable domain of TCR clone 281595 (TRAV13-1, TRAJ52)
CPASSGAGGTSYGKLTF

SEQ ID NO: 563190 - protein, 15 aa, Homo sapiens
  CDR3 for beta chain variable domain of TCR clone 281595 (TRBV2, TRBJ2-1)
CASSELAGSYNEQFF

SEQ ID NO: 563191 - protein, 13 aa, Homo sapiens
  CDR3 for alpha chain variable domain of TCR clone 281596 (TRAV26-1, TRAJ38)
CIRKGGNNRKLIW

SEQ ID NO: 563192 - protein, 15 aa, Homo sapiens
  CDR3 for beta chain variable domain of TCR clone 281596 (TRBV28, TRBJ2-7)
CASSLYMGSSYEQYV

SEQ ID NO: 563193 - protein, 14 aa, Homo sapiens
  CDR3 for alpha chain variable domain of TCR clone 281597 (TRAV12-3, TRAJ33)
CAMSGRDSNYQLIW

SEQ ID NO: 563194 - protein, 17 aa, Homo sapiens
  CDR3 for beta chain variable domain of TCR clone 281597 (TRBV7-8, TRBJ2-6)
CASSAGTGGAGANVLTF

SEQ ID NO: 563195 - protein, 11 aa, Homo sapiens
  CDR3 for alpha chain variable domain of TCR clone 281598 (TRAV21, TRAJ34)
CAHYNTDKLIF

SEQ ID NO: 563196 - protein, 18 aa, Homo sapiens
  CDR3 for beta chain variable domain of TCR clone 281598 (TRBV7-3, TRBJ2-3)
CAISSTGTYPGSTDTQYF

SEQ ID NO: 563197 - protein, 14 aa, Homo sapiens
  CDR3 for alpha chain variable domain of TCR clone 281599 (TRAV8-3, TRAJ39)
CAVGANNAGNMITF

SEQ ID NO: 563198 - protein, 15 aa, Homo sapiens
  CDR3 for beta chain variable domain of TCR clone 281599 (TRBV4-3, TRBJ1-1)
CASSQELGRGTEAFF

SEQ ID NO: 563199 - protein, 14 aa, Homo sapiens
  CDR3 for alpha chain variable domain of TCR clone 281600 (TRAV8-3, TRAJ4)
CAVGASGGYNKLIF

SEQ ID NO: 563200 - protein, 17 aa, Homo sapiens
  CDR3 for beta chain variable domain of TCR clone 281600 (TRBV20-1, TRBJ2-2)
CSASGSGQGGLTGELFF

SEQ ID NO: 563201 - protein, 13 aa, Homo sapiens
  CDR3 for alpha chain variable domain of TCR clone 281601 (TRAV8-3, TRAJ36)
CAVGATAANNRFF

SEQ ID NO: 563202 - protein, 15 aa, Homo sapiens
  CDR3 for beta chain variable domain of TCR clone 281601 (TRBV7-2, TRBJ1-2)
CASSPRAGWNYGYTF

SEQ ID NO: 563203 - protein, 13 aa, Homo sapiens
  CDR3 for alpha chain variable domain of TCR clone 281602 (TRAV27, TRAJ49)
CAPRPYTGNQFYF

SEQ ID NO: 563204 - protein, 17 aa, Homo sapiens
  CDR3 for beta chain variable domain of TCR clone 281602 (TRBV4-1, TRBJ1-2)
CDSSQDAGGSLWLHLRF

SEQ ID NO: 563205 - protein, 12 aa, Homo sapiens
  CDR3 for alpha chain variable domain of TCR clone 281603 (TRAV1-1, TRAJ8)
CAGGTGFQKLVF

SEQ ID NO: 563206 - protein, 15 aa, Homo sapiens
  CDR3 for beta chain variable domain of TCR clone 281603 (TRBV7-9, TRBJ1-4)
CASSGTGGFNEKLFF

SEQ ID NO: 563207 - protein, 13 aa, Homo sapiens
  CDR3 for alpha chain variable domain of TCR clone 281604 (TRAV17, TRAJ21)
CSTDGGNFNKFYF

SEQ ID NO: 563208 - protein, 15 aa, Homo sapiens
  CDR3 for beta chain variable domain of TCR clone 281604 (TRBV7-9, TRBJ1-6)
CASSSPGRGNSPLHF

SEQ ID NO: 563209 - protein, 12 aa, Homo sapiens
  CDR3 for alpha chain variable domain of TCR clone 281605 (TRAV30, TRAJ43)
CGTEERGNDMRV

SEQ ID NO: 563210 - protein, 13 aa, Homo sapiens
  CDR3 for beta chain variable domain of TCR clone 281605 (TRBV12-4, TRBJ1-2)
CASSSGSKDGYTF

SEQ ID NO: 563211 - protein, 12 aa, Homo sapiens
  CDR3 for alpha chain variable domain of TCR clone 281606 (TRAV22, TRAJ22)
CAPGGSAKQLTF

SEQ ID NO: 563212 - protein, 13 aa, Homo sapiens
  CDR3 for beta chain variable domain of TCR clone 281606 (TRBV7-9, TRBJ2-7)
CASSFAGAYEQYF

SEQ ID NO: 563213 - protein, 15 aa, Homo sapiens
  CDR3 for alpha chain variable domain of TCR clone 281607 (TRAV29/DV5, TRAJ12)
CAAAPRMDSSYKLIF

SEQ ID NO: 563214 - protein, 16 aa, Homo sapiens
  CDR3 for beta chain variable domain of TCR clone 281607 (TRBV7-2, TRBJ2-1)
CASSLVARGPYNEQFF

SEQ ID NO: 563215 - protein, 23 aa, Homo sapiens
  CDR3 for alpha chain variable domain of TCR clone 281608 (TRAV26-1, TRAJ38)
CIADNAGNNHIQNPDPAVYQLRD

SEQ ID NO: 563216 - protein, 14 aa, Homo sapiens
  CDR3 for beta chain variable domain of TCR clone 281608 (TRBV20-1, TRBJ1-1)
CSARGGTLKLSLDK

SEQ ID NO: 563217 - protein, 12 aa, Homo sapiens
  CDR3 for alpha chain variable domain of TCR clone 281609 (TRAV12-1, TRAJ40)
CVVYSGTYKYIF

SEQ ID NO: 563218 - protein, 15 aa, Homo sapiens
  CDR3 for beta chain variable domain of TCR clone 281609 (TRBV7-9, TRBJ1-6)
CASSPPGRGNSPLHF

SEQ ID NO: 563219 - protein, 15 aa, Homo sapiens
  CDR3 for alpha chain variable domain of TCR clone 281610 (TRAV8-3, TRAJ37)
CAVGARASNTGKPIF

SEQ ID NO: 563220 - protein, 15 aa, Homo sapiens
  CDR3 for beta chain variable domain of TCR clone 281610 (TRBV5-4, TRBJ2-3)
CASSLAGRVTDTQYF

SEQ ID NO: 563221 - protein, 18 aa, Homo sapiens
  CDR3 for alpha chain variable domain of TCR clone 281611 (TRAV21, TRAJ52)
CAVRPSPASGTSYGKLTF

SEQ ID NO: 563222 - protein, 13 aa, Homo sapiens
  CDR3 for beta chain variable domain of TCR clone 281611 (TRBV10-3, TRBJ2-7)
CASKLAVNYEQYF

SEQ ID NO: 563223 - protein, 12 aa, Homo sapiens
  CDR3 for alpha chain variable domain of TCR clone 281612 (TRAV12-3, TRAJ20)
CAMVRGDYQLSF

SEQ ID NO: 563224 - protein, 12 aa, Homo sapiens
  CDR3 for beta chain variable domain of TCR clone 281612 (TRBV6-1, TRBJ2-7)
CASSDYSYEQYF

SEQ ID NO: 563225 - protein, 12 aa, Homo sapiens
  CDR3 for alpha chain variable domain of TCR clone 281613 (TRAV12-3, TRAJ42)
CAPGGSQGNLIF

SEQ ID NO: 563226 - protein, 14 aa, Homo sapiens
  CDR3 for beta chain variable domain of TCR clone 281613 (TRBV7-2, TRBJ1-6)
CASSRQGANSPLHF

SEQ ID NO: 563227 - protein, 12 aa, Homo sapiens
  CDR3 for alpha chain variable domain of TCR clone 281614 (TRAV12-3, TRAJ17)
CAMTLKGNKLTF

SEQ ID NO: 563228 - protein, 13 aa, Homo sapiens
  CDR3 for beta chain variable domain of TCR clone 281614 (TRBV2, TRBJ1-1)
CASSVSGYTEAFF

SEQ ID NO: 563229 - protein, 14 aa, Homo sapiens
  CDR3 for alpha chain variable domain of TCR clone 281615 (TRAV3, TRAJ20)
CAVPPAPNDYKLSF

SEQ ID NO: 563230 - protein, 16 aa, Homo sapiens
  CDR3 for beta chain variable domain of TCR clone 281615 (TRBV20-1, TRBJ1-2)
CSASMGQGVANYGYTF

SEQ ID NO: 563231 - protein, 14 aa, Homo sapiens
  CDR3 for alpha chain variable domain of TCR clone 281616 (TRAV27, TRAJ12)
CAGARMVSSYKLIF

SEQ ID NO: 563232 - protein, 17 aa, Homo sapiens
  CDR3 for beta chain variable domain of TCR clone 281616 (TRBV13, TRBJ2-3)
CASSLSRVAGGRNTQYF

SEQ ID NO: 563233 - protein, 15 aa, Homo sapiens
  CDR3 for alpha chain variable domain of TCR clone 281617 (TRAV34, TRAJ38)
CGADFTPGNNRKLIW

SEQ ID NO: 563234 - protein, 12 aa, Homo sapiens
  CDR3 for beta chain variable domain of TCR clone 281617 (TRBV5-1, TRBJ1-2)
CASSQDTYGYTF

SEQ ID NO: 563235 - protein, 14 aa, Homo sapiens
  CDR3 for alpha chain variable domain of TCR clone 281618 (TRAV30, TRAJ33)
CGTVAPRSNYQVIW

SEQ ID NO: 563236 - protein, 16 aa, Homo sapiens
  CDR3 for beta chain variable domain of TCR clone 281618 (TRBV3-1, TRBJ2-5)
CASSPGQFNGFGTQYF

SEQ ID NO: 563237 - protein, 14 aa, Homo sapiens
  CDR3 for alpha chain variable domain of TCR clone 281619 (TRAV13-2, TRAJ17)
CAENSKAAGNKLAF

SEQ ID NO: 563238 - protein, 14 aa, Homo sapiens
  CDR3 for beta chain variable domain of TCR clone 281619 (TRBV19, TRBJ2-1)
CASPTFVLSGEQFF

SEQ ID NO: 563239 - protein, 14 aa, Homo sapiens
  CDR3 for alpha chain variable domain of TCR clone 281620 (TRAV12-3, TRAJ10)
SHLPLTGGGNKLTF

SEQ ID NO: 563240 - protein, 16 aa, Homo sapiens
  CDR3 for beta chain variable domain of TCR clone 281620 (TRBV12-4, TRBJ2-5)
CASSCRPSGDLETQYF

SEQ ID NO: 563241 - protein, 15 aa, Homo sapiens
  CDR3 for alpha chain variable domain of TCR clone 281621 (TRAV27, TRAJ38)
CAGRFNAGNNRKLIW

SEQ ID NO: 563242 - protein, 14 aa, Homo sapiens
  CDR3 for beta chain variable domain of TCR clone 281621 (TRBV20-1, TRBJ1-1)
CSAQTRIGGAEAFF

SEQ ID NO: 563243 - protein, 14 aa, Homo sapiens
  CDR3 for alpha chain variable domain of TCR clone 281622 (TRAV26-1, TRAJ52)
CIPAGGTSYGKLTF

SEQ ID NO: 563244 - protein, 16 aa, Homo sapiens
  CDR3 for beta chain variable domain of TCR clone 281622 (TRBV19, TRBJ2-2)
CASTIGARAGAGEVFF

SEQ ID NO: 563245 - protein, 11 aa, Homo sapiens
  CDR3 for alpha chain variable domain of TCR clone 281623 (TRAV8-6, TRAJ34)
CAVWNTDKLIF

SEQ ID NO: 563246 - protein, 14 aa, Homo sapiens
  CDR3 for beta chain variable domain of TCR clone 281623 (TRBV7-2, TRBJ2-7)
CASSPKTSFYEQYF

SEQ ID NO: 563247 - protein, 14 aa, Homo sapiens
  CDR3 for alpha chain variable domain of TCR clone 281624 (TRAV12-2, TRAJ13)
CAVKKTGGYQKVTF

SEQ ID NO: 563248 - protein, 19 aa, Homo sapiens
  CDR3 for beta chain variable domain of TCR clone 281624 (TRBV25-1, TRBJ2-2)
CAILVYRVYRGRKTGELFF

SEQ ID NO: 563249 - protein, 15 aa, Homo sapiens
  CDR3 for alpha chain variable domain of TCR clone 281625 (TRAV2, TRAJ24)
CAVVRLKNSWGKLQF

SEQ ID NO: 563250 - protein, 17 aa, Homo sapiens
  CDR3 for beta chain variable domain of TCR clone 281625 (TRBV13, TRBJ2-3)
CASSRSRVAGGRNTQYF

SEQ ID NO: 563251 - protein, 16 aa, Homo sapiens
  CDR3 for alpha chain variable domain of TCR clone 281626 (TRAV12-2, TRAJ32)
CAVNLGQGGATNKLIF

SEQ ID NO: 563252 - protein, 12 aa, Homo sapiens
  CDR3 for beta chain variable domain of TCR clone 281626 (TRBV9, TRBJ2-2)
CQQPPTCRGAVF

SEQ ID NO: 563253 - protein, 14 aa, Homo sapiens
  CDR3 for alpha chain variable domain of TCR clone 281627 (TRAV4, TRAJ43)
CLVGPMYNNNDMRF

SEQ ID NO: 563254 - protein, 21 aa, Homo sapiens
  CDR3 for beta chain variable domain of TCR clone 281627 (TRBV11-1, TRBJ2-1)
CASSARERLRPEGPSYSEQFF

SEQ ID NO: 563255 - protein, 13 aa, Homo sapiens
  CDR3 for alpha chain variable domain of TCR clone 281628 (TRAV29/DV5, TRAJ31)
CAASRNNNARLMF

SEQ ID NO: 563256 - protein, 12 aa, Homo sapiens
  CDR3 for beta chain variable domain of TCR clone 281628 (TRBV14, TRBJ2-5)
CASSQLEGTQYF

SEQ ID NO: 563257 - protein, 15 aa, Homo sapiens
  CDR3 for alpha chain variable domain of TCR clone 281629 (TRAV13-1, TRAJ5)
CAVSPIDTGRRALTF

SEQ ID NO: 563258 - protein, 18 aa, Homo sapiens
  CDR3 for beta chain variable domain of TCR clone 281629 (TRBV4-1, TRBJ2-2)
CASSFRTSGGGGPGELFF

SEQ ID NO: 563259 - protein, 12 aa, Homo sapiens
  CDR3 for alpha chain variable domain of TCR clone 281630 (TRAV16, TRAJ56)
YAPTGANSKLTF

SEQ ID NO: 563260 - protein, 17 aa, Homo sapiens
  CDR3 for beta chain variable domain of TCR clone 281630 (TRBV27, TRBJ2-6)
CASSLTGFASGANVLTF

SEQ ID NO: 563261 - protein, 10 aa, Homo sapiens
  CDR3 for alpha chain variable domain of TCR clone 281631 (TRAV38-2/DV8, TRAJ40)
CASGTYKYIF

SEQ ID NO: 563262 - protein, 13 aa, Homo sapiens
  CDR3 for beta chain variable domain of TCR clone 281631 (TRBV12-4, TRBJ2-3)
CASSSPLGGTQYF

SEQ ID NO: 563263 - protein, 11 aa, Homo sapiens
  CDR3 for alpha chain variable domain of TCR clone 281632 (TRAV4, TRAJ31)
CLVGDNARLMF

SEQ ID NO: 563264 - protein, 16 aa, Homo sapiens
  CDR3 for beta chain variable domain of TCR clone 281632 (TRBV7-2, TRBJ2-5)
CASSPKWLSGQETQYF

SEQ ID NO: 563265 - protein, 14 aa, Homo sapiens
  CDR3 for alpha chain variable domain of TCR clone 281633 (TRAV35, TRAJ24)
CAGPRRDSWGQLQF

SEQ ID NO: 563266 - protein, 12 aa, Homo sapiens
  CDR3 for beta chain variable domain of TCR clone 281633 (TRBV12-4, TRBJ2-3)
CASSLGQDTQYF

SEQ ID NO: 563267 - protein, 13 aa, Homo sapiens
  CDR3 for alpha chain variable domain of TCR clone 281634 (TRAV27, TRAJ21)
CAGGTHNFNKFYF

SEQ ID NO: 563268 - protein, 14 aa, Homo sapiens
  CDR3 for beta chain variable domain of TCR clone 281634 (TRBV2, TRBJ2-2)
CASKVVRETGELFF

SEQ ID NO: 563269 - protein, 14 aa, Homo sapiens
  CDR3 for alpha chain variable domain of TCR clone 281635 (TRAV26-1, TRAJ48)
CIVRVGFGNEKLTF

SEQ ID NO: 563270 - protein, 13 aa, Homo sapiens
  CDR3 for beta chain variable domain of TCR clone 281635 (TRBV11-3, TRBJ2-3)
CASSHDTKDTLYF

SEQ ID NO: 563271 - protein, 13 aa, Homo sapiens
  CDR3 for alpha chain variable domain of TCR clone 281636 (TRAV12-3, TRAJ40)
CAMSDSGTYKYIF

SEQ ID NO: 563272 - protein, 12 aa, Homo sapiens
  CDR3 for beta chain variable domain of TCR clone 281636 (TRBV11-2, TRBJ2-2)
CASSLGGGELFF

SEQ ID NO: 563273 - protein, 16 aa, Homo sapiens
  CDR3 for alpha chain variable domain of TCR clone 281637 (TRAV8-3, TRAJ8)
CAVPRDWNTGFQKLVV

SEQ ID NO: 563274 - protein, 15 aa, Homo sapiens
  CDR3 for beta chain variable domain of TCR clone 281637 (TRBV6-1, TRBJ2-6)
CASSSRPSGANVLTF

SEQ ID NO: 563275 - protein, 14 aa, Homo sapiens
  CDR3 for alpha chain variable domain of TCR clone 281638 (TRAV13-1, TRAJ35)
CAASKGGFGDVLHC

SEQ ID NO: 563276 - protein, 15 aa, Homo sapiens
  CDR3 for beta chain variable domain of TCR clone 281638 (TRBV28, TRBJ2-1)
CASSGLAEVDNEQFF

SEQ ID NO: 563277 - protein, 15 aa, Homo sapiens
  CDR3 for alpha chain variable domain of TCR clone 281639 (TRAV26-1, TRAJ44)
CIVRANTGTASKLTF

SEQ ID NO: 563278 - protein, 13 aa, Homo sapiens
  CDR3 for beta chain variable domain of TCR clone 281639 (TRBV9, TRBJ2-1)
CASSPSGGNEQFF

SEQ ID NO: 563279 - protein, 16 aa, Homo sapiens
  CDR3 for alpha chain variable domain of TCR clone 281640 (TRAV30, TRAJ24)
CGTEIEDADSWGKFQF

SEQ ID NO: 563280 - protein, 15 aa, Homo sapiens
  CDR3 for beta chain variable domain of TCR clone 281640 (TRBV12-4, TRBJ2-2)
CASSPNDSGTGELFF

SEQ ID NO: 563281 - protein, 13 aa, Homo sapiens
  CDR3 for alpha chain variable domain of TCR clone 281641 (TRAV36/DV7, TRAJ50)
CAVDQTSYDKVIF

SEQ ID NO: 563282 - protein, 17 aa, Homo sapiens
  CDR3 for beta chain variable domain of TCR clone 281641 (TRBV7-3, TRBJ2-3)
CASSRGLAGEVPDTQYF

SEQ ID NO: 563283 - protein, 13 aa, Homo sapiens
  CDR3 for alpha chain variable domain of TCR clone 281642 (TRAV20, TRAJ37)
CAGCSSNIGKLIF

SEQ ID NO: 563284 - protein, 14 aa, Homo sapiens
  CDR3 for beta chain variable domain of TCR clone 281642 (TRBV20-1, TRBJ2-5)
CSARDGRAGETQYF

SEQ ID NO: 563285 - protein, 12 aa, Homo sapiens
  CDR3 for alpha chain variable domain of TCR clone 281643 (TRAV13-1, TRAJ21)
CAAKEGFNKLYF

SEQ ID NO: 563286 - protein, 15 aa, Homo sapiens
  CDR3 for beta chain variable domain of TCR clone 281643 (TRBV25-1, TRBJ1-4)
CASSPGDSTNEKLFF

SEQ ID NO: 563287 - protein, 13 aa, Homo sapiens
  CDR3 for alpha chain variable domain of TCR clone 281644 (TRAV21, TRAJ57)
CAVTQGGSEKLVF

SEQ ID NO: 563288 - protein, 17 aa, Homo sapiens
  CDR3 for beta chain variable domain of TCR clone 281644 (TRBV13, TRBJ2-3)
CASSLSGVAGGRNTQYF

SEQ ID NO: 563289 - protein, 16 aa, Homo sapiens
  CDR3 for alpha chain variable domain of TCR clone 281645 (TRAV6, TRAJ37)
CALDIFGSSNTGKLIF

SEQ ID NO: 563290 - protein, 14 aa, Homo sapiens
  CDR3 for beta chain variable domain of TCR clone 281645 (TRBV5-7, TRBJ2-7)
YASSLRSATYEQYF

SEQ ID NO: 563291 - protein, 12 aa, Homo sapiens
  CDR3 for alpha chain variable domain of TCR clone 281646 (TRAV1-2, TRAJ26)
CAVRYYGQNFVF

SEQ ID NO: 563292 - protein, 13 aa, Homo sapiens
  CDR3 for beta chain variable domain of TCR clone 281646 (TRBV7-9, TRBJ2-3)
CASSPGSTDTQYF

SEQ ID NO: 563293 - protein, 13 aa, Homo sapiens
  CDR3 for alpha chain variable domain of TCR clone 281647 (TRAV12-1, TRAJ31)
CVVNMNNNARLMF

SEQ ID NO: 563294 - protein, 15 aa, Homo sapiens
  CDR3 for beta chain variable domain of TCR clone 281647 (TRBV11-2, TRBJ2-2)
CASSLDTGNTGELFF

SEQ ID NO: 563295 - protein, 17 aa, Homo sapiens
  CDR3 for alpha chain variable domain of TCR clone 281648 (TRAV19, TRAJ28)
CSLSEASSGAGSYQLTF

SEQ ID NO: 563296 - protein, 15 aa, Homo sapiens
  CDR3 for beta chain variable domain of TCR clone 281648 (TRBV9, TRBJ2-1)
CASSLAGSSYNEQFF

SEQ ID NO: 563297 - protein, 16 aa, Homo sapiens
  CDR3 for alpha chain variable domain of TCR clone 281649 (TRAV12-2, TRAJ10)
CAVNRVRTGGGNKLTF

SEQ ID NO: 563298 - protein, 12 aa, Homo sapiens
  CDR3 for beta chain variable domain of TCR clone 281649 (TRBV28, TRBJ2-7)
CASSFSSYEQYF

SEQ ID NO: 563299 - protein, 12 aa, Homo sapiens
  CDR3 for alpha chain variable domain of TCR clone 281650 (TRAV21, TRAJ31)
CAVSPARGRLMF

SEQ ID NO: 563300 - protein, 13 aa, Homo sapiens
  CDR3 for beta chain variable domain of TCR clone 281650 (TRBV11-2, TRBJ2-5)
CASSRGPSETQYF

SEQ ID NO: 563301 - protein, 14 aa, Homo sapiens
  CDR3 for alpha chain variable domain of TCR clone 281651 (TRAV8-4, TRAJ53)
CCEWSGGSNYKLTF

SEQ ID NO: 563302 - protein, 14 aa, Homo sapiens
  CDR3 for beta chain variable domain of TCR clone 281651 (TRBV7-2, TRBJ2-7)
CASRSQGAAYEQYF

SEQ ID NO: 563303 - protein, 12 aa, Homo sapiens
  CDR3 for alpha chain variable domain of TCR clone 281652 (TRAV3, TRAJ43)
RAVRDPNNDMRF

SEQ ID NO: 563304 - protein, 15 aa, Homo sapiens
  CDR3 for beta chain variable domain of TCR clone 281652 (TRBV27, TRBJ1-5)
CASSLGTGFDQPQHF

SEQ ID NO: 563305 - protein, 14 aa, Homo sapiens
  CDR3 for alpha chain variable domain of TCR clone 281653 (TRAV12-2, TRAJ15)
CAPHTGQAGTALIF

SEQ ID NO: 563306 - protein, 15 aa, Homo sapiens
  CDR3 for beta chain variable domain of TCR clone 281653 (TRBV7-2, TRBJ2-1)
CASTHGTGIYNEQFF

SEQ ID NO: 563307 - protein, 13 aa, Homo sapiens
  CDR3 for alpha chain variable domain of TCR clone 281654 (TRAV23/DV6, TRAJ34)
CAAIENNADKLIF

SEQ ID NO: 563308 - protein, 16 aa, Homo sapiens
  CDR3 for beta chain variable domain of TCR clone 281654 (TRBV15, TRBJ1-2)
CATSRGPRTGGGGYTF

SEQ ID NO: 563309 - protein, 16 aa, Homo sapiens
  CDR3 for alpha chain variable domain of TCR clone 281655 (TRAV30, TRAJ24)
CGTEIVDADSWGKFQF

SEQ ID NO: 563310 - protein, 17 aa, Homo sapiens
  CDR3 for beta chain variable domain of TCR clone 281655 (TRBV20-1, TRBJ2-1)
CSARSPSGGPPTMSSSS

SEQ ID NO: 563311 - protein, 15 aa, Homo sapiens
  CDR3 for alpha chain variable domain of TCR clone 281656 (TRAV17, TRAJ35)
CATALVIGFGNVLHC

SEQ ID NO: 563312 - protein, 16 aa, Homo sapiens
  CDR3 for beta chain variable domain of TCR clone 281656 (TRBV7-3, TRBJ2-2)
CASSLKRGTLSGELFF

SEQ ID NO: 563313 - protein, 15 aa, Homo sapiens
  CDR3 for alpha chain variable domain of TCR clone 281657 (TRAV16, TRAJ12)
CSKWSLRDSSYKLIF

SEQ ID NO: 563314 - protein, 13 aa, Homo sapiens
  CDR3 for beta chain variable domain of TCR clone 281657 (TRBV4-2, TRBJ1-1)
CASSQAGNTEAFF

SEQ ID NO: 563315 - protein, 17 aa, Homo sapiens
  CDR3 for alpha chain variable domain of TCR clone 281658 (TRAV3, TRAJ6)
CAVRDGPRAEGSYIPTF

SEQ ID NO: 563316 - protein, 16 aa, Homo sapiens
  CDR3 for beta chain variable domain of TCR clone 281658 (TRBV4-1, TRBJ2-7)
CASSLTAGQATYEQYF

SEQ ID NO: 563317 - protein, 13 aa, Homo sapiens
  CDR3 for alpha chain variable domain of TCR clone 281659 (TRAV26-1, TRAJ12)
CIVRPDSSYKLIF

SEQ ID NO: 563318 - protein, 16 aa, Homo sapiens
  CDR3 for beta chain variable domain of TCR clone 281659 (TRBV19, TRBJ2-1)
CASSKAGPSSYNEQFF

SEQ ID NO: 563319 - protein, 16 aa, Homo sapiens
  CDR3 for alpha chain variable domain of TCR clone 281660 (TRAV26-1, TRAJ53)
YIVRVAMGGSNYKLTF

SEQ ID NO: 563320 - protein, 12 aa, Homo sapiens
  CDR3 for beta chain variable domain of TCR clone 281660 (TRBV7-9, TRBJ1-5)
CASSPQGQPQHF

SEQ ID NO: 563321 - protein, 14 aa, Homo sapiens
  CDR3 for alpha chain variable domain of TCR clone 281661 (TRAV13-1, TRAJ44)
CAAKATGTASKLTF

SEQ ID NO: 563322 - protein, 13 aa, Homo sapiens
  CDR3 for beta chain variable domain of TCR clone 281661 (TRBV18, TRBJ2-7)
CASSPGRNYEQYF

SEQ ID NO: 563323 - protein, 15 aa, Homo sapiens
  CDR3 for alpha chain variable domain of TCR clone 281662 (TRAV8-6, TRAJ6)
CAVSFTSGGSYIPTF

SEQ ID NO: 563324 - protein, 18 aa, Homo sapiens
  CDR3 for beta chain variable domain of TCR clone 281662 (TRBV4-3, TRBJ2-6)
CASSQDIQGGPGANVLTF

SEQ ID NO: 563325 - protein, 12 aa, Homo sapiens
  CDR3 for alpha chain variable domain of TCR clone 281663 (TRAV12-1, TRAJ9)
YVVNPASFKTIF

SEQ ID NO: 563326 - protein, 15 aa, Homo sapiens
  CDR3 for beta chain variable domain of TCR clone 281663 (TRBV4-3, TRBJ2-2)
CASSQGTGGTGELFF

SEQ ID NO: 563327 - protein, 18 aa, Homo sapiens
  CDR3 for alpha chain variable domain of TCR clone 281664 (TRAV26-1, TRAJ23)
CIVRVGLEVWNQGGKLIF

SEQ ID NO: 563328 - protein, 16 aa, Homo sapiens
  CDR3 for beta chain variable domain of TCR clone 281664 (TRBV6-1, TRBJ2-5)
CASSETLDRGAETQYF

SEQ ID NO: 563329 - protein, 11 aa, Homo sapiens
  CDR3 for alpha chain variable domain of TCR clone 281665 (TRAV2, TRAJ33)
CAVDSNYQLIW

SEQ ID NO: 563330 - protein, 15 aa, Homo sapiens
  CDR3 for beta chain variable domain of TCR clone 281665 (TRBV7-2, TRBJ2-1)
CASRKTGSSYNEQFF

SEQ ID NO: 563331 - protein, 12 aa, Homo sapiens
  CDR3 for alpha chain variable domain of TCR clone 281666 (TRAV12-1, TRAJ34)
CVVAGATDKLIF

SEQ ID NO: 563332 - protein, 13 aa, Homo sapiens
  CDR3 for beta chain variable domain of TCR clone 281666 (TRBV4-1, TRBJ2-5)
CASSLTRGETQYF

SEQ ID NO: 563333 - protein, 14 aa, Homo sapiens
  CDR3 for alpha chain variable domain of TCR clone 281667 (TRAV1-1, TRAJ27)
CAVIYNTNAGKSTF

SEQ ID NO: 563334 - protein, 18 aa, Homo sapiens
  CDR3 for beta chain variable domain of TCR clone 281667 (TRBV7-3, TRBJ2-1)
CASSLTLASGRAMVSSPT

SEQ ID NO: 563335 - protein, 12 aa, Homo sapiens
  CDR3 for alpha chain variable domain of TCR clone 281668 (TRAV8-3, TRAJ20)
CAVGANDYKLSF

SEQ ID NO: 563336 - protein, 13 aa, Homo sapiens
  CDR3 for beta chain variable domain of TCR clone 281668 (TRBV11-2, TRBJ2-7)
CASSSYPSYEQYF

SEQ ID NO: 563337 - protein, 22 aa, Homo sapiens
  CDR3 for alpha chain variable domain of TCR clone 281669 (TRAV27, TRAJ41)
CAVRTQIPDIQNPDPAVYHLRA

SEQ ID NO: 563338 - protein, 16 aa, Homo sapiens
  CDR3 for beta chain variable domain of TCR clone 281669 (TRBV5-1, TRBJ2-3)
CASSLGLAVYTDTQYF

SEQ ID NO: 563339 - protein, 12 aa, Homo sapiens
  CDR3 for alpha chain variable domain of TCR clone 281670 (TRAV16, TRAJ10)
CSRTGGGNKLTF

SEQ ID NO: 563340 - protein, 13 aa, Homo sapiens
  CDR3 for beta chain variable domain of TCR clone 281670 (TRBV10-1, TRBJ2-1)
CASSAGPDNEQFF

SEQ ID NO: 563341 - protein, 13 aa, Homo sapiens
  CDR3 for alpha chain variable domain of TCR clone 281671 (TRAV12-1, TRAJ16)
CVVNTRNGQKLLF

SEQ ID NO: 563342 - protein, 12 aa, Homo sapiens
  CDR3 for beta chain variable domain of TCR clone 281671 (TRBV29-1, TRBJ2-3)
CSVTGGADTQYF

SEQ ID NO: 563343 - protein, 14 aa, Homo sapiens
  CDR3 for alpha chain variable domain of TCR clone 281672 (TRAV12-2, TRAJ24)
CAVTPADSWGKLQF

SEQ ID NO: 563344 - protein, 11 aa, Homo sapiens
  CDR3 for beta chain variable domain of TCR clone 281672 (TRBV12-4, TRBJ2-3)
CASTATDTQYF

SEQ ID NO: 563345 - protein, 14 aa, Homo sapiens
  CDR3 for alpha chain variable domain of TCR clone 281673 (TRAV22, TRAJ6)
CAGVGPGGSYIPTF

SEQ ID NO: 563346 - protein, 11 aa, Homo sapiens
  CDR3 for beta chain variable domain of TCR clone 281673 (TRBV20-1, TRBJ2-1)
CSVASGSEQFF

SEQ ID NO: 563347 - protein, 14 aa, Homo sapiens
  CDR3 for alpha chain variable domain of TCR clone 281674 (TRAV26-1, TRAJ49)
FIVRPSNTGNQFYF

SEQ ID NO: 563348 - protein, 15 aa, Homo sapiens
  CDR3 for beta chain variable domain of TCR clone 281674 (TRBV19, TRBJ1-1)
CASMGFRDVNTEALF

SEQ ID NO: 563349 - protein, 13 aa, Homo sapiens
  CDR3 for alpha chain variable domain of TCR clone 281675 (TRAV21, TRAJ40)
CAVRPSRAYKYIF

SEQ ID NO: 563350 - protein, 15 aa, Homo sapiens
  CDR3 for beta chain variable domain of TCR clone 281675 (TRBV12-4, TRBJ2-5)
CASSPPTGLQETQYF

SEQ ID NO: 563351 - protein, 12 aa, Homo sapiens
  CDR3 for alpha chain variable domain of TCR clone 281676 (TRAV21, TRAJ33)
CAKMDSNYQLIW

SEQ ID NO: 563352 - protein, 16 aa, Homo sapiens
  CDR3 for beta chain variable domain of TCR clone 281676 (TRBV4-1, TRBJ1-5)
CASSQGGHTTNQPQHF

SEQ ID NO: 563353 - protein, 14 aa, Homo sapiens
  CDR3 for alpha chain variable domain of TCR clone 281677 (TRAV12-3, TRAJ20)
CAMSARRGDYKLSF

SEQ ID NO: 563354 - protein, 20 aa, Homo sapiens
  CDR3 for beta chain variable domain of TCR clone 281677 (TRBV4-1, TRBJ2-2)
CASSQASPPGLASNTGELFF

SEQ ID NO: 563355 - protein, 17 aa, Homo sapiens
  CDR3 for alpha chain variable domain of TCR clone 281678 (TRAV12-2, TRAJ4)
CAVNVRPVSGGYNKLIF

SEQ ID NO: 563356 - protein, 13 aa, Homo sapiens
  CDR3 for beta chain variable domain of TCR clone 281678 (TRBV7-6, TRBJ1-2)
CASSLVADYGYTF

SEQ ID NO: 563357 - protein, 14 aa, Homo sapiens
  CDR3 for alpha chain variable domain of TCR clone 281679 (TRAV1-2, TRAJ8)
CAVREDTGFQKLVF

SEQ ID NO: 563358 - protein, 13 aa, Homo sapiens
  CDR3 for beta chain variable domain of TCR clone 281679 (TRBV2, TRBJ1-1)
CARNPTGRCHAFF

SEQ ID NO: 563359 - protein, 12 aa, Homo sapiens
  CDR3 for alpha chain variable domain of TCR clone 281680 (TRAV2, TRAJ32)
CAVGGATNKLIL

SEQ ID NO: 563360 - protein, 15 aa, Homo sapiens
  CDR3 for beta chain variable domain of TCR clone 281680 (TRBV7-2, TRBJ2-1)
CARSSRTSREDEQFF

SEQ ID NO: 563361 - protein, 15 aa, Homo sapiens
  CDR3 for alpha chain variable domain of TCR clone 281681 (TRAV14/DV4, TRAJ12)
CAMREERDSSYKLIF

SEQ ID NO: 563362 - protein, 14 aa, Homo sapiens
  CDR3 for beta chain variable domain of TCR clone 281681 (TRBV11-2, TRBJ2-3)
CASSLEAGTDTQYF

SEQ ID NO: 563363 - protein, 12 aa, Homo sapiens
  CDR3 for alpha chain variable domain of TCR clone 281682 (TRAV1-1, TRAJ8)
CAGGTGFQKLVF

SEQ ID NO: 563364 - protein, 11 aa, Homo sapiens
  CDR3 for beta chain variable domain of TCR clone 281682 (TRBV7-9, TRBJ2-3)
CASSYTDTQYF

SEQ ID NO: 563365 - protein, 14 aa, Homo sapiens
  CDR3 for alpha chain variable domain of TCR clone 281683 (TRAV2, TRAJ20)
CAVELTPNDYKLSL

SEQ ID NO: 563366 - protein, 14 aa, Homo sapiens
  CDR3 for beta chain variable domain of TCR clone 281683 (TRBV4-2, TRBJ1-2)
CASSQVGQNYGYTF

SEQ ID NO: 563367 - protein, 15 aa, Homo sapiens
  CDR3 for alpha chain variable domain of TCR clone 281684 (TRAV12-3, TRAJ20)
CAVKGGFGAGTTVTV

SEQ ID NO: 563368 - protein, 13 aa, Homo sapiens
  CDR3 for beta chain variable domain of TCR clone 281684 (TRBV12-4, TRBJ2-7)
CASSPGQLYEQYF

SEQ ID NO: 563369 - protein, 14 aa, Homo sapiens
  CDR3 for alpha chain variable domain of TCR clone 281685 (TRAV35, TRAJ22)
CAVLRPGSARQLTF

SEQ ID NO: 563370 - protein, 15 aa, Homo sapiens
  CDR3 for beta chain variable domain of TCR clone 281685 (TRBV12-4, TRBJ2-5)
CASSPPTGLQETQYV

SEQ ID NO: 563371 - protein, 15 aa, Homo sapiens
  CDR3 for alpha chain variable domain of TCR clone 281686 (TRAV12-2, TRAJ53)
CAVNGGGGSNYKLTF

SEQ ID NO: 563372 - protein, 15 aa, Homo sapiens
  CDR3 for beta chain variable domain of TCR clone 281686 (TRBV5-1, TRBJ1-1)
CASSSTTGTNTEAFF

SEQ ID NO: 563373 - protein, 14 aa, Homo sapiens
  CDR3 for alpha chain variable domain of TCR clone 281687 (TRAV1-2, TRAJ16)
CAVNRFSDGQKLLF

SEQ ID NO: 563374 - protein, 16 aa, Homo sapiens
  CDR3 for beta chain variable domain of TCR clone 281687 (TRBV12-4, TRBJ2-5)
CASIFFVRGRQETQYF

SEQ ID NO: 563375 - protein, 15 aa, Homo sapiens
  CDR3 for alpha chain variable domain of TCR clone 281688 (TRAV26-1, TRAJ29)
CIVRVEGSGNTPLVL

SEQ ID NO: 563376 - protein, 14 aa, Homo sapiens
  CDR3 for beta chain variable domain of TCR clone 281688 (TRBV18, TRBJ2-5)
CASSPGVSQETQYF

SEQ ID NO: 563377 - protein, 14 aa, Homo sapiens
  CDR3 for alpha chain variable domain of TCR clone 281689 (TRAV8-3, TRAJ39)
CAVGAWGAGNMLTF

SEQ ID NO: 563378 - protein, 16 aa, Homo sapiens
  CDR3 for beta chain variable domain of TCR clone 281689 (TRBV7-2, TRBJ1-3)
CASSSGRVVSGNTIYF

SEQ ID NO: 563379 - protein, 13 aa, Homo sapiens
  CDR3 for alpha chain variable domain of TCR clone 281690 (TRAV8-4, TRAJ30)
CATYKNRDDKIIF

SEQ ID NO: 563380 - protein, 19 aa, Homo sapiens
  CDR3 for beta chain variable domain of TCR clone 281690 (TRBV7-2, TRBJ2-3)
CASSFLSRNWGGGTDTQYF

SEQ ID NO: 563381 - protein, 16 aa, Homo sapiens
  CDR3 for alpha chain variable domain of TCR clone 281691 (TRAV8-2, TRAJ7)
CVVSEGPYYGNNRLAF

SEQ ID NO: 563382 - protein, 14 aa, Homo sapiens
  CDR3 for beta chain variable domain of TCR clone 281691 (TRBV13, TRBJ2-3)
CASSSGSPTDTQYF

SEQ ID NO: 563383 - protein, 16 aa, Homo sapiens
  CDR3 for alpha chain variable domain of TCR clone 281692 (TRAV30, TRAJ24)
CGTEIVDADSWGKFQF

SEQ ID NO: 563384 - protein, 18 aa, Homo sapiens
  CDR3 for beta chain variable domain of TCR clone 281692 (TRBV6-3, TRBJ1-1)
CASSYPSEGPPLNTEAFF

SEQ ID NO: 563385 - protein, 19 aa, Homo sapiens
  CDR3 for alpha chain variable domain of TCR clone 281693 (TRAV1-2, TRAJ26)
CLLTLCCERPDNYGQNFVF

SEQ ID NO: 563386 - protein, 12 aa, Homo sapiens
  CDR3 for beta chain variable domain of TCR clone 281693 (TRBV7-9, TRBJ2-7)
CATRTDAYEQYF

SEQ ID NO: 563387 - protein, 16 aa, Homo sapiens
  CDR3 for alpha chain variable domain of TCR clone 281694 (TRAV30, TRAJ24)
CSTEIVGADSWGKFQF

SEQ ID NO: 563388 - protein, 15 aa, Homo sapiens
  CDR3 for beta chain variable domain of TCR clone 281694 (TRBV7-9, TRBJ1-4)
CASSARTGGNEKLFF

SEQ ID NO: 563389 - protein, 13 aa, Homo sapiens
  CDR3 for alpha chain variable domain of TCR clone 281695 (TRAV21, TRAJ36)
CAVIKTGANNFFF

SEQ ID NO: 563390 - protein, 12 aa, Homo sapiens
  CDR3 for beta chain variable domain of TCR clone 281695 (TRBV5-1, TRBJ1-2)
CASSQDTYGYTF

SEQ ID NO: 563391 - protein, 17 aa, Homo sapiens
  CDR3 for alpha chain variable domain of TCR clone 281696 (TRAV3, TRAJ6)
CAVRDGPRAGGTYIPTF

SEQ ID NO: 563392 - protein, 20 aa, Homo sapiens
  CDR3 for beta chain variable domain of TCR clone 281696 (TRBV28, TRBJ2-1)
CASTPIGRSPGLAGGNEQFF

SEQ ID NO: 563393 - protein, 15 aa, Homo sapiens
  CDR3 for alpha chain variable domain of TCR clone 281697 (TRAV3, TRAJ22)
CAVRDRGGSARQLTF

SEQ ID NO: 563394 - protein, 17 aa, Homo sapiens
  CDR3 for beta chain variable domain of TCR clone 281697 (TRBV6-1, TRBJ2-1)
CASSEGGSGRGRNEQFF

SEQ ID NO: 563395 - protein, 10 aa, Homo sapiens
  CDR3 for alpha chain variable domain of TCR clone 281698 (TRAV12-3, TRAJ49)
CAMNDDQSCF

SEQ ID NO: 563396 - protein, 13 aa, Homo sapiens
  CDR3 for beta chain variable domain of TCR clone 281698 (TRBV12-4, TRBJ1-1)
CASSPGTGFEAFF

SEQ ID NO: 563397 - protein, 14 aa, Homo sapiens
  CDR3 for alpha chain variable domain of TCR clone 281699 (TRAV1-2, TRAJ13)
CAVKHSGGYQKVTF

SEQ ID NO: 563398 - protein, 14 aa, Homo sapiens
  CDR3 for beta chain variable domain of TCR clone 281699 (TRBV20-1, TRBJ2-4)
CSASGRVGENIQYF

SEQ ID NO: 563399 - protein, 12 aa, Homo sapiens
  CDR3 for alpha chain variable domain of TCR clone 281700 (TRAV12-3, TRAJ17)
CATTLTGNKLTF

SEQ ID NO: 563400 - protein, 16 aa, Homo sapiens
  CDR3 for beta chain variable domain of TCR clone 281700 (TRBV7-9, TRBJ2-1)
CASSDVAGGSYNEQFF

SEQ ID NO: 563401 - protein, 18 aa, Homo sapiens
  CDR3 for alpha chain variable domain of TCR clone 281701 (TRAV14/DV4, TRAJ52)
CAMREANAGGTGYGKLTF

SEQ ID NO: 563402 - protein, 14 aa, Homo sapiens
  CDR3 for beta chain variable domain of TCR clone 281701 (TRBV4-1, TRBJ2-5)
CASSRSGSGETQYF

SEQ ID NO: 563403 - protein, 13 aa, Homo sapiens
  CDR3 for alpha chain variable domain of TCR clone 281702 (TRAV2, TRAJ40)
CAVVTSGTYKYIF

SEQ ID NO: 563404 - protein, 15 aa, Homo sapiens
  CDR3 for beta chain variable domain of TCR clone 281702 (TRBV28, TRBJ2-1)
CASSGLEEVDNEQFF

SEQ ID NO: 563405 - protein, 15 aa, Homo sapiens
  CDR3 for alpha chain variable domain of TCR clone 281703 (TRAV26-2, TRAJ13)
CILRDLSGGYQQVTF

SEQ ID NO: 563406 - protein, 14 aa, Homo sapiens
  CDR3 for beta chain variable domain of TCR clone 281703 (TRBV4-1, TRBJ2-3)
CASSQEGSTDTQYF

SEQ ID NO: 563407 - protein, 12 aa, Homo sapiens
  CDR3 for alpha chain variable domain of TCR clone 281704 (TRAV13-1, TRAJ42)
VNYGGSQGNLIF

SEQ ID NO: 563408 - protein, 12 aa, Homo sapiens
  CDR3 for beta chain variable domain of TCR clone 281704 (TRBV7-9, TRBJ2-7)
CASSVEGYEQYF

SEQ ID NO: 563409 - protein, 16 aa, Homo sapiens
  CDR3 for alpha chain variable domain of TCR clone 281705 (TRAV23/DV6, TRAJ9)
CAASIGGNTGCFKTIF

SEQ ID NO: 563410 - protein, 13 aa, Homo sapiens
  CDR3 for beta chain variable domain of TCR clone 281705 (TRBV7-9, TRBJ1-2)
CASSLKQNYGYTF

SEQ ID NO: 563411 - protein, 15 aa, Homo sapiens
  CDR3 for alpha chain variable domain of TCR clone 281706 (TRAV8-3, TRAJ40)
CAAPSLGSGTYKYIF

SEQ ID NO: 563412 - protein, 16 aa, Homo sapiens
  CDR3 for beta chain variable domain of TCR clone 281706 (TRBV7-3, TRBJ2-3)
CVSSLSGYRPEDTQYF

SEQ ID NO: 563413 - protein, 14 aa, Homo sapiens
  CDR3 for alpha chain variable domain of TCR clone 281707 (TRAV4, TRAJ10)
CLVGDTGGGNKLTF

SEQ ID NO: 563414 - protein, 13 aa, Homo sapiens
  CDR3 for beta chain variable domain of TCR clone 281707 (TRBV10-2, TRBJ2-5)
CASSVGPQETQYC

SEQ ID NO: 563415 - protein, 14 aa, Homo sapiens
  CDR3 for alpha chain variable domain of TCR clone 281708 (TRAV29/DV5, TRAJ48)
CAAMALFGIEKLTF

SEQ ID NO: 563416 - protein, 15 aa, Homo sapiens
  CDR3 for beta chain variable domain of TCR clone 281708 (TRBV7-2, TRBJ2-1)
CASTHGTGIYNEQFF

SEQ ID NO: 563417 - protein, 14 aa, Homo sapiens
  CDR3 for alpha chain variable domain of TCR clone 281709 (TRAV23/DV6, TRAJ24)
CAASLSDSWGKLQF

SEQ ID NO: 563418 - protein, 18 aa, Homo sapiens
  CDR3 for beta chain variable domain of TCR clone 281709 (TRBV7-9, TRBJ1-2)
CASSSIAVTSQANYGYTF

SEQ ID NO: 563419 - protein, 10 aa, Homo sapiens
  CDR3 for alpha chain variable domain of TCR clone 281710 (TRAV8-3, TRAJ43)
CAVSLADMRF

SEQ ID NO: 563420 - protein, 14 aa, Homo sapiens
  CDR3 for beta chain variable domain of TCR clone 281710 (TRBV4-2, TRBJ2-1)
CASGLDRAYNEQFF

SEQ ID NO: 563421 - protein, 13 aa, Homo sapiens
  CDR3 for alpha chain variable domain of TCR clone 281711 (TRAV1-2, TRAJ9)
CAVLNTGGFKTIF

SEQ ID NO: 563422 - protein, 14 aa, Homo sapiens
  CDR3 for beta chain variable domain of TCR clone 281711 (TRBV19, TRBJ2-1)
CASSEPGGHGEQFF

SEQ ID NO: 563423 - protein, 15 aa, Homo sapiens
  CDR3 for alpha chain variable domain of TCR clone 281712 (TRAV12-3, TRAJ52)
CNGGAGGTSYGKLTF

SEQ ID NO: 563424 - protein, 14 aa, Homo sapiens
  CDR3 for beta chain variable domain of TCR clone 281712 (TRBV7-3, TRBJ2-2)
CASSSGGYTGELFF

SEQ ID NO: 563425 - protein, 13 aa, Homo sapiens
  CDR3 for alpha chain variable domain of TCR clone 281713 (TRAV3, TRAJ8)
CAVRFTGSQKLVF

SEQ ID NO: 563426 - protein, 13 aa, Homo sapiens
  CDR3 for beta chain variable domain of TCR clone 281713 (TRBV24-1, TRBJ2-2)
CATSDWSTGELFF

SEQ ID NO: 563427 - protein, 13 aa, Homo sapiens
  CDR3 for alpha chain variable domain of TCR clone 281714 (TRAV8-3, TRAJ42)
CARYGGSRGNLIF

SEQ ID NO: 563428 - protein, 14 aa, Homo sapiens
  CDR3 for beta chain variable domain of TCR clone 281714 (TRBV20-1, TRBJ2-1)
CSALDRGTYNEQFF

SEQ ID NO: 563429 - protein, 11 aa, Homo sapiens
  CDR3 for alpha chain variable domain of TCR clone 281715 (TRAV1-1, TRAJ23)
CAVRQGGKLIF

SEQ ID NO: 563430 - protein, 12 aa, Homo sapiens
  CDR3 for beta chain variable domain of TCR clone 281715 (TRBV24-1, TRBJ1-1)
YATSDSDRGAFF

SEQ ID NO: 563431 - protein, 13 aa, Homo sapiens
  CDR3 for alpha chain variable domain of TCR clone 281716 (TRAV20, TRAJ20)
CAVQAGSGYKLSF

SEQ ID NO: 563432 - protein, 12 aa, Homo sapiens
  CDR3 for beta chain variable domain of TCR clone 281716 (TRBV11-2, TRBJ2-2)
CDSSLGGGELFF

SEQ ID NO: 563433 - protein, 17 aa, Homo sapiens
  CDR3 for alpha chain variable domain of TCR clone 281717 (TRAV3, TRAJ6)
CAVRDGPRAGGSYIPTF

SEQ ID NO: 563434 - protein, 18 aa, Homo sapiens
  CDR3 for beta chain variable domain of TCR clone 281717 (TRBV20-1, TRBJ2-6)
CSARTLAGGPSGANVLTF

SEQ ID NO: 563435 - protein, 14 aa, Homo sapiens
  CDR3 for alpha chain variable domain of TCR clone 281718 (TRAV35, TRAJ53)
CAGNSGCGNYKLTF

SEQ ID NO: 563436 - protein, 11 aa, Homo sapiens
  CDR3 for beta chain variable domain of TCR clone 281718 (TRBV4-1, TRBJ1-4)
CASRENEKLFF

SEQ ID NO: 563437 - protein, 15 aa, Homo sapiens
  CDR3 for alpha chain variable domain of TCR clone 281719 (TRAV26-1, TRAJ29)
CIVRGEGSGNTPRVL

SEQ ID NO: 563438 - protein, 15 aa, Homo sapiens
  CDR3 for beta chain variable domain of TCR clone 281719 (TRBV7-9, TRBJ1-5)
CASSQGHQPNQPQHF

SEQ ID NO: 563439 - protein, 17 aa, Homo sapiens
  CDR3 for alpha chain variable domain of TCR clone 281720 (TRAV13-2, TRAJ5)
CAESVVIVGHEQESTYF

SEQ ID NO: 563440 - protein, 18 aa, Homo sapiens
  CDR3 for beta chain variable domain of TCR clone 281720 (TRBV4-1, TRBJ2-3)
CASSHQLAGGRSTDTQYF

SEQ ID NO: 563441 - protein, 15 aa, Homo sapiens
  CDR3 for alpha chain variable domain of TCR clone 281721 (TRAV23/DV6, TRAJ37)
CAAGEGSSNTGKLIF

SEQ ID NO: 563442 - protein, 15 aa, Homo sapiens
  CDR3 for beta chain variable domain of TCR clone 281721 (TRBV7-2, TRBJ2-3)
CASSLAGAFIDTQYF

SEQ ID NO: 563443 - protein, 15 aa, Homo sapiens
  CDR3 for alpha chain variable domain of TCR clone 281722 (TRAV2, TRAJ15)
CAVEDREQAGTALTF

SEQ ID NO: 563444 - protein, 14 aa, Homo sapiens
  CDR3 for beta chain variable domain of TCR clone 281722 (TRBV5-1, TRBJ2-7)
CASSRGESLYEQYF

SEQ ID NO: 563445 - protein, 11 aa, Homo sapiens
  CDR3 for alpha chain variable domain of TCR clone 281723 (TRAV21, TRAJ34)
CAVTNTDKLIF

SEQ ID NO: 563446 - protein, 20 aa, Homo sapiens
  CDR3 for beta chain variable domain of TCR clone 281723 (TRBV11-2, TRBJ2-7)
CASSPVGRERAGGPSYEQYF

SEQ ID NO: 563447 - protein, 12 aa, Homo sapiens
  CDR3 for alpha chain variable domain of TCR clone 281724 (TRAV21, TRAJ33)
CAKMDSNYQLIW

SEQ ID NO: 563448 - protein, 14 aa, Homo sapiens
  CDR3 for beta chain variable domain of TCR clone 281724 (TRBV2, TRBJ2-7)
CASSLTSGGFEQYF

SEQ ID NO: 563449 - protein, 15 aa, Homo sapiens
  CDR3 for alpha chain variable domain of TCR clone 281725 (TRAV17, TRAJ35)
CAKAFVIGFGNVLHC

SEQ ID NO: 563450 - protein, 16 aa, Homo sapiens
  CDR3 for beta chain variable domain of TCR clone 281725 (TRBV11-2, TRBJ2-7)
CASSPLAGGPRYEQYF

SEQ ID NO: 563451 - protein, 15 aa, Homo sapiens
  CDR3 for alpha chain variable domain of TCR clone 281726 (TRAV3, TRAJ5)
CAGGDRKTGRRALTF

SEQ ID NO: 563452 - protein, 15 aa, Homo sapiens
  CDR3 for beta chain variable domain of TCR clone 281726 (TRBV7-8, TRBJ2-1)
CASSLADSLYNEQFF

SEQ ID NO: 563453 - protein, 11 aa, Homo sapiens
  CDR3 for alpha chain variable domain of TCR clone 281727 (TRAV29/DV5, TRAJ49)
CAAFTGNQFYF

SEQ ID NO: 563454 - protein, 16 aa, Homo sapiens
  CDR3 for beta chain variable domain of TCR clone 281727 (TRBV7-9, TRBJ1-2)
CASSLGFSSGEDGYTF

SEQ ID NO: 563455 - protein, 13 aa, Homo sapiens
  CDR3 for alpha chain variable domain of TCR clone 281728 (TRAV21, TRAJ27)
CAARPGNAGKSHF

SEQ ID NO: 563456 - protein, 16 aa, Homo sapiens
  CDR3 for beta chain variable domain of TCR clone 281728 (TRBV20-1, TRBJ1-2)
CSASMGQGVANYGYTF

SEQ ID NO: 563457 - protein, 12 aa, Homo sapiens
  CDR3 for alpha chain variable domain of TCR clone 281729 (TRAV12-2, TRAJ10)
WGVTGGGNKLTC

SEQ ID NO: 563458 - protein, 14 aa, Homo sapiens
  CDR3 for beta chain variable domain of TCR clone 281729 (TRBV19, TRBJ2-3)
CASSAPRGTDTQYF

SEQ ID NO: 563459 - protein, 14 aa, Homo sapiens
  CDR3 for alpha chain variable domain of TCR clone 281730 (TRAV1-2, TRAJ16)
CAVNRFSDGQKLLF

SEQ ID NO: 563460 - protein, 11 aa, Homo sapiens
  CDR3 for beta chain variable domain of TCR clone 281730 (TRBV27, TRBJ2-7)
CASSLGYEQYF

SEQ ID NO: 563461 - protein, 16 aa, Homo sapiens
  CDR3 for alpha chain variable domain of TCR clone 281731 (TRAV30, TRAJ24)
CGTEIVDADSWGKFKF

SEQ ID NO: 563462 - protein, 14 aa, Homo sapiens
  CDR3 for beta chain variable domain of TCR clone 281731 (TRBV12-5, TRBJ2-5)
CASGSRTHQGTQHF

SEQ ID NO: 563463 - protein, 10 aa, Homo sapiens
  CDR3 for alpha chain variable domain of TCR clone 281732 (TRAV1-2, TRAJ31)
CAFFDARLMF

SEQ ID NO: 563464 - protein, 14 aa, Homo sapiens
  CDR3 for beta chain variable domain of TCR clone 281732 (TRBV10-3, TRBJ2-7)
CHKCGTSETYEQYF

SEQ ID NO: 563465 - protein, 15 aa, Homo sapiens
  CDR3 for alpha chain variable domain of TCR clone 281733 (TRAV8-1, TRAJ6)
CAVNTPPGGSYIPTF

SEQ ID NO: 563466 - protein, 14 aa, Homo sapiens
  CDR3 for beta chain variable domain of TCR clone 281733 (TRBV12-4, TRBJ2-1)
CATSLGQGASEQFF

SEQ ID NO: 563467 - protein, 11 aa, Homo sapiens
  CDR3 for alpha chain variable domain of TCR clone 281734 (TRAV2, TRAJ33)
CAVASNYQLMW

SEQ ID NO: 563468 - protein, 15 aa, Homo sapiens
  CDR3 for beta chain variable domain of TCR clone 281734 (TRBV19, TRBJ1-2)
CASSVGQVLNYGYTF

SEQ ID NO: 563469 - protein, 12 aa, Homo sapiens
  CDR3 for alpha chain variable domain of TCR clone 281735 (TRAV2, TRAJ10)
CASTGGGNKLTF

SEQ ID NO: 563470 - protein, 14 aa, Homo sapiens
  CDR3 for beta chain variable domain of TCR clone 281735 (TRBV7-8, TRBJ2-3)
CASSSRDSTDTQYF

SEQ ID NO: 563471 - protein, 13 aa, Homo sapiens
  CDR3 for alpha chain variable domain of TCR clone 281736 (TRAV27, TRAJ41)
CAGEGNSGYALNF

SEQ ID NO: 563472 - protein, 13 aa, Homo sapiens
  CDR3 for beta chain variable domain of TCR clone 281736 (TRBV25-1, TRBJ1-1)
CSTHLGGNTEAFF

SEQ ID NO: 563473 - protein, 18 aa, Homo sapiens
  CDR3 for alpha chain variable domain of TCR clone 281737 (TRAV12-3, TRAJ52)
CAMSVEGAGGTSYGKLTF

SEQ ID NO: 563474 - protein, 15 aa, Homo sapiens
  CDR3 for beta chain variable domain of TCR clone 281737 (TRBV27, TRBJ1-6)
CASSFDRGLGSPLHF

SEQ ID NO: 563475 - protein, 14 aa, Homo sapiens
  CDR3 for alpha chain variable domain of TCR clone 281738 (TRAV1-2, TRAJ16)
CAVNRFSDGQKLLF

SEQ ID NO: 563476 - protein, 17 aa, Homo sapiens
  CDR3 for beta chain variable domain of TCR clone 281738 (TRBV11-3, TRBJ2-1)
CASSLYPPGVEYNEQFF

SEQ ID NO: 563477 - protein, 15 aa, Homo sapiens
  CDR3 for alpha chain variable domain of TCR clone 281739 (TRAV23/DV6, TRAJ30)
CAASSQESRYDKIIF

SEQ ID NO: 563478 - protein, 17 aa, Homo sapiens
  CDR3 for beta chain variable domain of TCR clone 281739 (TRBV4-3, TRBJ2-1)
CASSQFSSGRASGEQFF

SEQ ID NO: 563479 - protein, 14 aa, Homo sapiens
  CDR3 for alpha chain variable domain of TCR clone 281740 (TRAV1-2, TRAJ8)
CAVREDTGFQKLVF

SEQ ID NO: 563480 - protein, 17 aa, Homo sapiens
  CDR3 for beta chain variable domain of TCR clone 281740 (TRBV28, TRBJ2-5)
WASSRQGGLAGAETQYF

SEQ ID NO: 563481 - protein, 12 aa, Homo sapiens
  CDR3 for alpha chain variable domain of TCR clone 281741 (TRAV25, TRAJ5)
CAGGGGRRALTF

SEQ ID NO: 563482 - protein, 14 aa, Homo sapiens
  CDR3 for beta chain variable domain of TCR clone 281741 (TRBV12-4, TRBJ2-5)
CASSFGASGGTQYF

SEQ ID NO: 563483 - protein, 17 aa, Homo sapiens
  CDR3 for alpha chain variable domain of TCR clone 281742 (TRAV3, TRAJ42)
CAVRDRDYGGSQGNLIF

SEQ ID NO: 563484 - protein, 14 aa, Homo sapiens
  CDR3 for beta chain variable domain of TCR clone 281742 (TRBV28, TRBJ2-2)
CASSMQGYTGELFF

SEQ ID NO: 563485 - protein, 17 aa, Homo sapiens
  CDR3 for alpha chain variable domain of TCR clone 281743 (TRAV3, TRAJ42)
CAVRDREYGGSQVNLIF

SEQ ID NO: 563486 - protein, 12 aa, Homo sapiens
  CDR3 for beta chain variable domain of TCR clone 281743 (TRBV11-2, TRBJ2-1)
CASSPGNNEQFF

SEQ ID NO: 563487 - protein, 14 aa, Homo sapiens
  CDR3 for alpha chain variable domain of TCR clone 281744 (TRAV20, TRAJ47)
CAVTFGEYGNKLVF

SEQ ID NO: 563488 - protein, 13 aa, Homo sapiens
  CDR3 for beta chain variable domain of TCR clone 281744 (TRBV20-1, TRBJ2-7)
CSATHTSGYEQYF

SEQ ID NO: 563489 - protein, 14 aa, Homo sapiens
  CDR3 for alpha chain variable domain of TCR clone 281745 (TRAV1-1, TRAJ27)
CAVIYNTNAGTSTF

SEQ ID NO: 563490 - protein, 15 aa, Homo sapiens
  CDR3 for beta chain variable domain of TCR clone 281745 (TRBV7-2, TRBJ2-1)
CASSSGLAGGNEQFF

SEQ ID NO: 563491 - protein, 15 aa, Homo sapiens
  CDR3 for alpha chain variable domain of TCR clone 281746 (TRAV25, TRAJ52)
CAGRPGGTSYGKLTF

SEQ ID NO: 563492 - protein, 13 aa, Homo sapiens
  CDR3 for beta chain variable domain of TCR clone 281746 (TRBV28, TRBJ1-2)
CAGRDRGNYGYTF

SEQ ID NO: 563493 - protein, 16 aa, Homo sapiens
  CDR3 for alpha chain variable domain of TCR clone 281747 (TRAV3, TRAJ6)
GAVRDGMGRRKLHTYI

SEQ ID NO: 563494 - protein, 15 aa, Homo sapiens
  CDR3 for beta chain variable domain of TCR clone 281747 (TRBV5-1, TRBJ2-7)
CASSLGDFTTYEQYF

SEQ ID NO: 563495 - protein, 14 aa, Homo sapiens
  CDR3 for alpha chain variable domain of TCR clone 281748 (TRAV3, TRAJ9)
CAVRLNTGGFKTIF

SEQ ID NO: 563496 - protein, 16 aa, Homo sapiens
  CDR3 for beta chain variable domain of TCR clone 281748 (TRBV12-5, TRBJ2-5)
CASGSRTSGNQETQYF

SEQ ID NO: 563497 - protein, 14 aa, Homo sapiens
  CDR3 for alpha chain variable domain of TCR clone 281749 (TRAV17, TRAJ12)
CAILPMDSSYKLIF

SEQ ID NO: 563498 - protein, 11 aa, Homo sapiens
  CDR3 for beta chain variable domain of TCR clone 281749 (TRBV19, TRBJ1-1)
CASGIGSEAFF

SEQ ID NO: 563499 - protein, 14 aa, Homo sapiens
  CDR3 for alpha chain variable domain of TCR clone 281750 (TRAV23/DV6, TRAJ4)
CAAPSSGGYNKLIF

SEQ ID NO: 563500 - protein, 16 aa, Homo sapiens
  CDR3 for beta chain variable domain of TCR clone 281750 (TRBV19, TRBJ1-1)
CDSRFGGPVTGTEAFF

SEQ ID NO: 563501 - protein, 16 aa, Homo sapiens
  CDR3 for alpha chain variable domain of TCR clone 281751 (TRAV20, TRAJ53)
CAVQGNSGGSNYKLSF

SEQ ID NO: 563502 - protein, 16 aa, Homo sapiens
  CDR3 for beta chain variable domain of TCR clone 281751 (TRBV29-1, TRBJ2-6)
CSVEDITYSGANVLTF

SEQ ID NO: 563503 - protein, 11 aa, Homo sapiens
  CDR3 for alpha chain variable domain of TCR clone 281752 (TRAV39, TRAJ49)
CAVDISTQFYV

SEQ ID NO: 563504 - protein, 11 aa, Homo sapiens
  CDR3 for beta chain variable domain of TCR clone 281752 (TRBV7-8, TRBJ2-7)
CASSLSLEQYF

SEQ ID NO: 563505 - protein, 17 aa, Homo sapiens
  CDR3 for alpha chain variable domain of TCR clone 281753 (TRAV23/DV6, TRAJ57)
CAASSTLSQGGSEKLVF

SEQ ID NO: 563506 - protein, 14 aa, Homo sapiens
  CDR3 for beta chain variable domain of TCR clone 281753 (TRBV25-1, TRBJ1-1)
CASTPLGGNTEAFS

SEQ ID NO: 563507 - protein, 13 aa, Homo sapiens
  CDR3 for alpha chain variable domain of TCR clone 281754 (TRAV27, TRAJ57)
CAGCQGGSEKLVF

SEQ ID NO: 563508 - protein, 14 aa, Homo sapiens
  CDR3 for beta chain variable domain of TCR clone 281754 (TRBV20-1, TRBJ1-2)
CSGRKDGRAYGYTF

SEQ ID NO: 563509 - protein, 15 aa, Homo sapiens
  CDR3 for alpha chain variable domain of TCR clone 281755 (TRAV8-3, TRAJ15)
CAVGAPNQAGTALIF

SEQ ID NO: 563510 - protein, 14 aa, Homo sapiens
  CDR3 for beta chain variable domain of TCR clone 281755 (TRBV20-1, TRBJ2-1)
FSPNDEASYNEQFF

SEQ ID NO: 563511 - protein, 13 aa, Homo sapiens
  CDR3 for alpha chain variable domain of TCR clone 281756 (TRAV12-2, TRAJ52)
CAVGGTSYGKLTF

SEQ ID NO: 563512 - protein, 14 aa, Homo sapiens
  CDR3 for beta chain variable domain of TCR clone 281756 (TRBV10-2, TRBJ1-1)
CASSFREGNTEAFF

SEQ ID NO: 563513 - protein, 14 aa, Homo sapiens
  CDR3 for alpha chain variable domain of TCR clone 281757 (TRAV1-2, TRAJ27)
CAPAEYTNSGKSTF

SEQ ID NO: 563514 - protein, 18 aa, Homo sapiens
  CDR3 for beta chain variable domain of TCR clone 281757 (TRBV28, TRBJ1-2)
CASRQQQGKRGSNYGYTF

SEQ ID NO: 563515 - protein, 13 aa, Homo sapiens
  CDR3 for alpha chain variable domain of TCR clone 281758 (TRAV26-2, TRAJ43)
CILRAVNNNDMRF

SEQ ID NO: 563516 - protein, 15 aa, Homo sapiens
  CDR3 for beta chain variable domain of TCR clone 281758 (TRBV11-2, TRBJ2-2)
CASSSDRVNAGELFF

SEQ ID NO: 563517 - protein, 13 aa, Homo sapiens
  CDR3 for alpha chain variable domain of TCR clone 281759 (TRAV1-1, TRAJ23)
CAVVVNQGGKLIF

SEQ ID NO: 563518 - protein, 16 aa, Homo sapiens
  CDR3 for beta chain variable domain of TCR clone 281759 (TRBV5-5, TRBJ1-2)
CASSPTWGRGLYGYTF

SEQ ID NO: 563519 - protein, 17 aa, Homo sapiens
  CDR3 for alpha chain variable domain of TCR clone 281760 (TRAV21, TRAJ52)
CAVGSNAGGTSYGKLTF

SEQ ID NO: 563520 - protein, 13 aa, Homo sapiens
  CDR3 for beta chain variable domain of TCR clone 281760 (TRBV5-1, TRBJ1-2)
CASSFQGNYGYTF

SEQ ID NO: 563521 - protein, 14 aa, Homo sapiens
  CDR3 for alpha chain variable domain of TCR clone 281761 (TRAV26-1, TRAJ45)
CIDVTGGGADGLTF

SEQ ID NO: 563522 - protein, 13 aa, Homo sapiens
  CDR3 for beta chain variable domain of TCR clone 281761 (TRBV7-6, TRBJ1-2)
CASSLVADYGYTF

SEQ ID NO: 563523 - protein, 13 aa, Homo sapiens
  CDR3 for alpha chain variable domain of TCR clone 281762 (TRAV12-2, TRAJ15)
CPHTGQAGTALIF

SEQ ID NO: 563524 - protein, 16 aa, Homo sapiens
  CDR3 for beta chain variable domain of TCR clone 281762 (TRBV7-8, TRBJ2-3)
CASSLSGYRPEDTQYF

SEQ ID NO: 563525 - protein, 14 aa, Homo sapiens
  CDR3 for alpha chain variable domain of TCR clone 281763 (TRAV17, TRAJ42)
CAQNYGGSKGNLIF

SEQ ID NO: 563526 - protein, 13 aa, Homo sapiens
  CDR3 for beta chain variable domain of TCR clone 281763 (TRBV20-1, TRBJ1-2)
CSAPRSGRYGYTF

SEQ ID NO: 563527 - protein, 15 aa, Homo sapiens
  CDR3 for alpha chain variable domain of TCR clone 281764 (TRAV2, TRAJ9)
CAVEDRGTGGFKTIF

SEQ ID NO: 563528 - protein, 15 aa, Homo sapiens
  CDR3 for beta chain variable domain of TCR clone 281764 (TRBV4-1, TRBJ2-7)
CASSQNTGRLYEQYF

SEQ ID NO: 563529 - protein, 13 aa, Homo sapiens
  CDR3 for alpha chain variable domain of TCR clone 281765 (TRAV21, TRAJ27)
CAARPGNAGKSTF

SEQ ID NO: 563530 - protein, 13 aa, Homo sapiens
  CDR3 for beta chain variable domain of TCR clone 281765 (TRBV12-4, TRBJ2-1)
CASSLQIVNEQFF

SEQ ID NO: 563531 - protein, 23 aa, Homo sapiens
  CDR3 for alpha chain variable domain of TCR clone 281766 (TRAV8-4, TRAJ32)
CAAYMVVLQTSSSLELALCLLST

SEQ ID NO: 563532 - protein, 16 aa, Homo sapiens
  CDR3 for beta chain variable domain of TCR clone 281766 (TRBV27, TRBJ2-2)
CASSPLAAANTGELFF

SEQ ID NO: 563533 - protein, 17 aa, Homo sapiens
  CDR3 for alpha chain variable domain of TCR clone 281767 (TRAV3, TRAJ6)
CAVRDGPRAGGSYIPNF

SEQ ID NO: 563534 - protein, 17 aa, Homo sapiens
  CDR3 for beta chain variable domain of TCR clone 281767 (TRBV20-1, TRBJ1-5)
CSASLSPGQGGNQPQHF

SEQ ID NO: 563535 - protein, 14 aa, Homo sapiens
  CDR3 for alpha chain variable domain of TCR clone 281768 (TRAV4, TRAJ32)
RLVNYGGATNKLIF

SEQ ID NO: 563536 - protein, 14 aa, Homo sapiens
  CDR3 for beta chain variable domain of TCR clone 281768 (TRBV15, TRBJ2-5)
CATSGGTRTETQYF

SEQ ID NO: 563537 - protein, 14 aa, Homo sapiens
  CDR3 for alpha chain variable domain of TCR clone 281769 (TRAV9-2, TRAJ38)
CALSNAGNNRKLIW

SEQ ID NO: 563538 - protein, 17 aa, Homo sapiens
  CDR3 for beta chain variable domain of TCR clone 281769 (TRBV20-1, TRBJ2-1)
CSARDPLAGVWDNEQFF

SEQ ID NO: 563539 - protein, 13 aa, Homo sapiens
  CDR3 for alpha chain variable domain of TCR clone 281770 (TRAV3, TRAJ21)
CAVGNFNKFYLVL

SEQ ID NO: 563540 - protein, 16 aa, Homo sapiens
  CDR3 for beta chain variable domain of TCR clone 281770 (TRBV19, TRBJ2-1)
CASSKAGPSSYNEQFF

SEQ ID NO: 563541 - protein, 15 aa, Homo sapiens
  CDR3 for alpha chain variable domain of TCR clone 281771 (TRAV22, TRAJ28)
CAARRPGAGSYQLTF

SEQ ID NO: 563542 - protein, 15 aa, Homo sapiens
  CDR3 for beta chain variable domain of TCR clone 281771 (TRBV14, TRBJ1-1)
CASSQDGMGRREAFF

SEQ ID NO: 563543 - protein, 13 aa, Homo sapiens
  CDR3 for alpha chain variable domain of TCR clone 281772 (TRAV1-2, TRAJ9)
CAALNTGGFKTIF

SEQ ID NO: 563544 - protein, 13 aa, Homo sapiens
  CDR3 for beta chain variable domain of TCR clone 281772 (TRBV15, TRBJ1-6)
CATSVGLNSPLHF

SEQ ID NO: 563545 - protein, 14 aa, Homo sapiens
  CDR3 for alpha chain variable domain of TCR clone 281773 (TRAV30, TRAJ26)
CGSEIVSYGQNFVF

SEQ ID NO: 563546 - protein, 13 aa, Homo sapiens
  CDR3 for beta chain variable domain of TCR clone 281773 (TRBV10-3, TRBJ2-7)
CASKLAVNYEQYF

SEQ ID NO: 563547 - protein, 13 aa, Homo sapiens
  CDR3 for alpha chain variable domain of TCR clone 281774 (TRAV2, TRAJ27)
CAVEAPMQANQPL

SEQ ID NO: 563548 - protein, 15 aa, Homo sapiens
  CDR3 for beta chain variable domain of TCR clone 281774 (TRBV11-1, TRBJ2-7)
CASSLNYGASYEQYF

SEQ ID NO: 563549 - protein, 17 aa, Homo sapiens
  CDR3 for alpha chain variable domain of TCR clone 281775 (TRAV35, TRAJ28)
CAGLQVYSGAGSYQLTC

SEQ ID NO: 563550 - protein, 15 aa, Homo sapiens
  CDR3 for beta chain variable domain of TCR clone 281775 (TRBV2, TRBJ1-2)
CASSEIGGANYGYTF

SEQ ID NO: 563551 - protein, 10 aa, Homo sapiens
  CDR3 for alpha chain variable domain of TCR clone 281776 (TRAV26-1, TRAJ40)
CIAGTYKYIL

SEQ ID NO: 563552 - protein, 14 aa, Homo sapiens
  CDR3 for beta chain variable domain of TCR clone 281776 (TRBV12-5, TRBJ2-5)
CASGSRTHQETQYF

SEQ ID NO: 563553 - protein, 12 aa, Homo sapiens
  CDR3 for alpha chain variable domain of TCR clone 281777 (TRAV1-1, TRAJ20)
CAVREDDYNISF

SEQ ID NO: 563554 - protein, 15 aa, Homo sapiens
  CDR3 for beta chain variable domain of TCR clone 281777 (TRBV5-7, TRBJ2-7)
CASSLPGQVFYEQYF

SEQ ID NO: 563555 - protein, 13 aa, Homo sapiens
  CDR3 for alpha chain variable domain of TCR clone 281778 (TRAV12-1, TRAJ7)
CVVNMRGNNRLGL

SEQ ID NO: 563556 - protein, 15 aa, Homo sapiens
  CDR3 for beta chain variable domain of TCR clone 281778 (TRBV27, TRBJ2-3)
CASSLGLAATDTQYF

SEQ ID NO: 563557 - protein, 14 aa, Homo sapiens
  CDR3 for alpha chain variable domain of TCR clone 281779 (TRAV12-2, TRAJ13)
CAVKKTGGYKKVTF

SEQ ID NO: 563558 - protein, 15 aa, Homo sapiens
  CDR3 for beta chain variable domain of TCR clone 281779 (TRBV27, TRBJ2-1)
CARSNGGGSSNEQFF

SEQ ID NO: 563559 - protein, 14 aa, Homo sapiens
  CDR3 for alpha chain variable domain of TCR clone 281780 (TRAV1-2, TRAJ8)
CAVREDTGFQKLVF

SEQ ID NO: 563560 - protein, 13 aa, Homo sapiens
  CDR3 for beta chain variable domain of TCR clone 281780 (TRBV12-4, TRBJ2-5)
CASRLAVQETQYF

SEQ ID NO: 563561 - protein, 12 aa, Homo sapiens
  CDR3 for alpha chain variable domain of TCR clone 281781 (TRAV12-3, TRAJ17)
CAMTLPGNKLTF

SEQ ID NO: 563562 - protein, 15 aa, Homo sapiens
  CDR3 for beta chain variable domain of TCR clone 281781 (TRBV10-2, TRBJ2-6)
CASSEQGTGANVLTF

SEQ ID NO: 563563 - protein, 19 aa, Homo sapiens
  CDR3 for alpha chain variable domain of TCR clone 281782 (TRAV3, TRAJ37)
CAVRDIVGGYPSNTGKLIF

SEQ ID NO: 563564 - protein, 14 aa, Homo sapiens
  CDR3 for beta chain variable domain of TCR clone 281782 (TRBV11-3, TRBJ2-3)
CASSLEAGTDTQYF

SEQ ID NO: 563565 - protein, 17 aa, Homo sapiens
  CDR3 for alpha chain variable domain of TCR clone 281783 (TRAV3, TRAJ42)
CAVRDRDYGGIQGNLIF

SEQ ID NO: 563566 - protein, 16 aa, Homo sapiens
  CDR3 for beta chain variable domain of TCR clone 281783 (TRBV9, TRBJ2-1)
CASSVGGGGNYNEQFF

SEQ ID NO: 563567 - protein, 15 aa, Homo sapiens
  CDR3 for alpha chain variable domain of TCR clone 281784 (TRAV29/DV5, TRAJ45)
CAALRGGGGADGLTL

SEQ ID NO: 563568 - protein, 15 aa, Homo sapiens
  CDR3 for beta chain variable domain of TCR clone 281784 (TRBV13, TRBJ1-2)
CASSLGRQPGYGYTF

SEQ ID NO: 563569 - protein, 13 aa, Homo sapiens
  CDR3 for alpha chain variable domain of TCR clone 281785 (TRAV13-2, TRAJ13)
GAERTGGYQKVTF

SEQ ID NO: 563570 - protein, 15 aa, Homo sapiens
  CDR3 for beta chain variable domain of TCR clone 281785 (TRBV11-3, TRBJ2-7)
CASSPGPASSYEQYF

SEQ ID NO: 563571 - protein, 11 aa, Homo sapiens
  CDR3 for alpha chain variable domain of TCR clone 281786 (TRAV35, TRAJ30)
CAPGGDDKIIF

SEQ ID NO: 563572 - protein, 14 aa, Homo sapiens
  CDR3 for beta chain variable domain of TCR clone 281786 (TRBV7-6, TRBJ2-1)
CASSLGGGQMSSYS

SEQ ID NO: 563573 - protein, 15 aa, Homo sapiens
  CDR3 for alpha chain variable domain of TCR clone 281787 (TRAV17, TRAJ57)
FATGPSPGGSEKLVF

SEQ ID NO: 563574 - protein, 18 aa, Homo sapiens
  CDR3 for beta chain variable domain of TCR clone 281787 (TRBV7-9, TRBJ2-7)
CASSLTTSGSRTWYEQYF

SEQ ID NO: 563575 - protein, 14 aa, Homo sapiens
  CDR3 for alpha chain variable domain of TCR clone 281788 (TRAV26-1, TRAJ49)
CIVRPSNTVNQFYF

SEQ ID NO: 563576 - protein, 15 aa, Homo sapiens
  CDR3 for beta chain variable domain of TCR clone 281788 (TRBV19, TRBJ1-1)
CASMGFRDVNTEAFF

SEQ ID NO: 563577 - protein, 13 aa, Homo sapiens
  CDR3 for alpha chain variable domain of TCR clone 281789 (TRAV8-3, TRAJ36)
CAAGATGANNLFF

SEQ ID NO: 563578 - protein, 17 aa, Homo sapiens
  CDR3 for beta chain variable domain of TCR clone 281789 (TRBV4-1, TRBJ1-4)
CASSQEGPRGVEEKLFF

SEQ ID NO: 563579 - protein, 14 aa, Homo sapiens
  CDR3 for alpha chain variable domain of TCR clone 281790 (TRAV29/DV5, TRAJ36)
CAARRKTGANNLFF

SEQ ID NO: 563580 - protein, 14 aa, Homo sapiens
  CDR3 for beta chain variable domain of TCR clone 281790 (TRBV7-2, TRBJ2-3)
CASSQTGSSYTQYF

SEQ ID NO: 563581 - protein, 13 aa, Homo sapiens
  CDR3 for alpha chain variable domain of TCR clone 281791 (TRAV26-1, TRAJ40)
CIVATSGTYKYIF

SEQ ID NO: 563582 - protein, 13 aa, Homo sapiens
  CDR3 for beta chain variable domain of TCR clone 281791 (TRBV2, TRBJ1-4)
CASSERAGEKLFF

SEQ ID NO: 563583 - protein, 12 aa, Homo sapiens
  CDR3 for alpha chain variable domain of TCR clone 281792 (TRAV12-3, TRAJ17)
CAMTLTGNKLTF

SEQ ID NO: 563584 - protein, 14 aa, Homo sapiens
  CDR3 for beta chain variable domain of TCR clone 281792 (TRBV15, TRBJ2-5)
CATSMGGSGETQYF

SEQ ID NO: 563585 - protein, 16 aa, Homo sapiens
  CDR3 for alpha chain variable domain of TCR clone 281793 (TRAV30, TRAJ24)
CGTEIVDADSWGNSSL

SEQ ID NO: 563586 - protein, 16 aa, Homo sapiens
  CDR3 for beta chain variable domain of TCR clone 281793 (TRBV4-1, TRBJ2-7)
CASSQEGTASSYEQYF

SEQ ID NO: 563587 - protein, 14 aa, Homo sapiens
  CDR3 for alpha chain variable domain of TCR clone 281794 (TRAV36/DV7, TRAJ40)
CAVETTSGTYKYIF

SEQ ID NO: 563588 - protein, 16 aa, Homo sapiens
  CDR3 for beta chain variable domain of TCR clone 281794 (TRBV13, TRBJ2-2)
CASSPRTGEHTGELFF

SEQ ID NO: 563589 - protein, 11 aa, Homo sapiens
  CDR3 for alpha chain variable domain of TCR clone 281795 (TRAV10, TRAJ11)
CGERERCTLTF

SEQ ID NO: 563590 - protein, 15 aa, Homo sapiens
  CDR3 for beta chain variable domain of TCR clone 281795 (TRBV7-2, TRBJ2-1)
CASSFQADEYNEQFF

SEQ ID NO: 563591 - protein, 10 aa, Homo sapiens
  CDR3 for alpha chain variable domain of TCR clone 281796 (TRAV12-3, TRAJ49)
CAMNDDQFYF

SEQ ID NO: 563592 - protein, 14 aa, Homo sapiens
  CDR3 for beta chain variable domain of TCR clone 281796 (TRBV5-4, TRBJ2-5)
CASSFSGGQETQYF

SEQ ID NO: 563593 - protein, 15 aa, Homo sapiens
  CDR3 for alpha chain variable domain of TCR clone 281797 (TRAV3, TRAJ22)
CAVRDRSGSARQLTF

SEQ ID NO: 563594 - protein, 14 aa, Homo sapiens
  CDR3 for beta chain variable domain of TCR clone 281797 (TRBV25-1, TRBJ1-1)
CASTHLGGNTEASF

SEQ ID NO: 563595 - protein, 13 aa, Homo sapiens
  CDR3 for alpha chain variable domain of TCR clone 281798 (TRAV22, TRAJ29)
SAVGGSGNTPIVF

SEQ ID NO: 563596 - protein, 13 aa, Homo sapiens
  CDR3 for beta chain variable domain of TCR clone 281798 (TRBV4-2, TRBJ1-1)
CASSQAGNTEAFF

SEQ ID NO: 563597 - protein, 16 aa, Homo sapiens
  CDR3 for alpha chain variable domain of TCR clone 281799 (TRAV26-1, TRAJ48)
IASSDLSNFGNEKLTF

SEQ ID NO: 563598 - protein, 14 aa, Homo sapiens
  CDR3 for beta chain variable domain of TCR clone 281799 (TRBV13, TRBJ2-7)
CASSLRGASYEQYF

SEQ ID NO: 563599 - protein, 13 aa, Homo sapiens
  CDR3 for alpha chain variable domain of TCR clone 281800 (TRAV12-3, TRAJ7)
CAMSASGNNRLAF

SEQ ID NO: 563600 - protein, 15 aa, Homo sapiens
  CDR3 for beta chain variable domain of TCR clone 281800 (TRBV4-1, TRBJ1-2)
CASSQGQGAAYGYTF

SEQ ID NO: 563601 - protein, 18 aa, Homo sapiens
  CDR3 for alpha chain variable domain of TCR clone 281801 (TRAV8-6, TRAJ52)
CAVSRANAGGTSYGKLTF

SEQ ID NO: 563602 - protein, 17 aa, Homo sapiens
  CDR3 for beta chain variable domain of TCR clone 281801 (TRBV6-1, TRBJ1-2)
GASSGTHSQRGNYGYTL

SEQ ID NO: 563603 - protein, 13 aa, Homo sapiens
  CDR3 for alpha chain variable domain of TCR clone 281802 (TRAV36/DV7, TRAJ37)
CAVFSRNTGKLIF

SEQ ID NO: 563604 - protein, 16 aa, Homo sapiens
  CDR3 for beta chain variable domain of TCR clone 281802 (TRBV3-1, TRBJ2-5)
CASSPGQFNGFGTQYF

SEQ ID NO: 563605 - protein, 14 aa, Homo sapiens
  CDR3 for alpha chain variable domain of TCR clone 281803 (TRAV13-1, TRAJ35)
CAASKGGFGNVLHC

SEQ ID NO: 563606 - protein, 13 aa, Homo sapiens
  CDR3 for beta chain variable domain of TCR clone 281803 (TRBV7-3, TRBJ1-1)
CASSQDWVAEAFY

SEQ ID NO: 563607 - protein, 14 aa, Homo sapiens
  CDR3 for alpha chain variable domain of TCR clone 281804 (TRAV26-1, TRAJ38)
CIADNAGNNRKLIW

SEQ ID NO: 563608 - protein, 17 aa, Homo sapiens
  CDR3 for beta chain variable domain of TCR clone 281804 (TRBV7-9, TRBJ2-6)
CASSFGAGYSGANVLTF

SEQ ID NO: 563609 - protein, 16 aa, Homo sapiens
  CDR3 for alpha chain variable domain of TCR clone 281805 (TRAV25, TRAJ24)
CAQRRGTTDSWGKLQF

SEQ ID NO: 563610 - protein, 14 aa, Homo sapiens
  CDR3 for beta chain variable domain of TCR clone 281805 (TRBV7-8, TRBJ2-3)
CASSLEAGTDTQYF

SEQ ID NO: 563611 - protein, 15 aa, Homo sapiens
  CDR3 for alpha chain variable domain of TCR clone 281806 (TRAV12-1, TRAJ42)
CVVTRDGGSQGNLIF

SEQ ID NO: 563612 - protein, 14 aa, Homo sapiens
  CDR3 for beta chain variable domain of TCR clone 281806 (TRBV11-2, TRBJ2-3)
CASSLGGGTNTQYF

SEQ ID NO: 563613 - protein, 13 aa, Homo sapiens
  CDR3 for alpha chain variable domain of TCR clone 281807 (TRAV12-1, TRAJ49)
CVVGANTGNQFYF

SEQ ID NO: 563614 - protein, 14 aa, Homo sapiens
  CDR3 for beta chain variable domain of TCR clone 281807 (TRBV5-7, TRBJ2-1)
CASSSVANYNEQFF

SEQ ID NO: 563615 - protein, 12 aa, Homo sapiens
  CDR3 for alpha chain variable domain of TCR clone 281808 (TRAV3, TRAJ20)
CAVRDGDYKLSF

SEQ ID NO: 563616 - protein, 16 aa, Homo sapiens
  CDR3 for beta chain variable domain of TCR clone 281808 (TRBV7-9, TRBJ1-2)
CASSLGFSSGEDGYTF

SEQ ID NO: 563617 - protein, 13 aa, Homo sapiens
  CDR3 for alpha chain variable domain of TCR clone 281809 (TRAV21, TRAJ27)
CAARPGNAGKSTF

SEQ ID NO: 563618 - protein, 14 aa, Homo sapiens
  CDR3 for beta chain variable domain of TCR clone 281809 (TRBV7-6, TRBJ2-3)
CASSLGTVTDEQYF

SEQ ID NO: 563619 - protein, 13 aa, Homo sapiens
  CDR3 for alpha chain variable domain of TCR clone 281810 (TRAV1-2, TRAJ11)
CAVRDSGYSTLTF

SEQ ID NO: 563620 - protein, 16 aa, Homo sapiens
  CDR3 for beta chain variable domain of TCR clone 281810 (TRBV20-1, TRBJ1-4)
CSAPGQGLLTNEKLFF

SEQ ID NO: 563621 - protein, 16 aa, Homo sapiens
  CDR3 for alpha chain variable domain of TCR clone 281811 (TRAV1-2, TRAJ40)
CAGRGSRTSGTYKYIF

SEQ ID NO: 563622 - protein, 14 aa, Homo sapiens
  CDR3 for beta chain variable domain of TCR clone 281811 (TRBV4-1, TRBJ2-3)
CASSQESGTDTQYF

SEQ ID NO: 563623 - protein, 16 aa, Homo sapiens
  CDR3 for alpha chain variable domain of TCR clone 281812 (TRAV27, TRAJ13)
CAGAKSDSGGYQKVTF

SEQ ID NO: 563624 - protein, 15 aa, Homo sapiens
  CDR3 for beta chain variable domain of TCR clone 281812 (TRBV11-2, TRBJ2-1)
CASSLGPDSYNEQFF

SEQ ID NO: 563625 - protein, 14 aa, Homo sapiens
  CDR3 for alpha chain variable domain of TCR clone 281813 (TRAV8-3, TRAJ4)
CVEGAAGGYNKLIF

SEQ ID NO: 563626 - protein, 15 aa, Homo sapiens
  CDR3 for beta chain variable domain of TCR clone 281813 (TRBV6-5, TRBJ2-1)
CASSYDAGAGNEQFF

SEQ ID NO: 563627 - protein, 18 aa, Homo sapiens
  CDR3 for alpha chain variable domain of TCR clone 281814 (TRAV26-1, TRAJ52)
CIVRVEGAGGTSYGKLTF

SEQ ID NO: 563628 - protein, 13 aa, Homo sapiens
  CDR3 for beta chain variable domain of TCR clone 281814 (TRBV25-1, TRBJ2-6)
CASRGPGANVLTF

SEQ ID NO: 563629 - protein, 14 aa, Homo sapiens
  CDR3 for alpha chain variable domain of TCR clone 281815 (TRAV20, TRAJ20)
CAVRRGYNEYKLSF

SEQ ID NO: 563630 - protein, 13 aa, Homo sapiens
  CDR3 for beta chain variable domain of TCR clone 281815 (TRBV19, TRBJ2-5)
CASSETAPETQYF

SEQ ID NO: 563631 - protein, 14 aa, Homo sapiens
  CDR3 for alpha chain variable domain of TCR clone 281816 (TRAV5, TRAJ4)
CAASFSGGYNKLIF

SEQ ID NO: 563632 - protein, 19 aa, Homo sapiens
  CDR3 for beta chain variable domain of TCR clone 281816 (TRBV2, TRBJ2-7)
WASSDDETSGRANDYEQYF

SEQ ID NO: 563633 - protein, 14 aa, Homo sapiens
  CDR3 for alpha chain variable domain of TCR clone 281817 (TRAV8-3, TRAJ6)
CAVGASGGSYIPTF

SEQ ID NO: 563634 - protein, 17 aa, Homo sapiens
  CDR3 for beta chain variable domain of TCR clone 281817 (TRBV18, TRBJ2-2)
CASTPSDPWQNTGELFF

SEQ ID NO: 563635 - protein, 15 aa, Homo sapiens
  CDR3 for alpha chain variable domain of TCR clone 281818 (TRAV17, TRAJ57)
CATGPSQGGSERLVF

SEQ ID NO: 563636 - protein, 15 aa, Homo sapiens
  CDR3 for beta chain variable domain of TCR clone 281818 (TRBV25-1, TRBJ1-4)
CASSPGHSTNEKLFF

SEQ ID NO: 563637 - protein, 15 aa, Homo sapiens
  CDR3 for alpha chain variable domain of TCR clone 281819 (TRAV41, TRAJ22)
CASDLSWGSARQLTF

SEQ ID NO: 563638 - protein, 14 aa, Homo sapiens
  CDR3 for beta chain variable domain of TCR clone 281819 (TRBV5-7, TRBJ2-1)
CASSSVANYNEQFF

SEQ ID NO: 563639 - protein, 12 aa, Homo sapiens
  CDR3 for alpha chain variable domain of TCR clone 281820 (TRAV13-1, TRAJ43)
SVQQYNNNDMRF

SEQ ID NO: 563640 - protein, 15 aa, Homo sapiens
  CDR3 for beta chain variable domain of TCR clone 281820 (TRBV12-4, TRBJ2-5)
CASSPGSNRQGTQYF

SEQ ID NO: 563641 - protein, 12 aa, Homo sapiens
  CDR3 for alpha chain variable domain of TCR clone 281821 (TRAV1-2, TRAJ11)
CAVRGGYSTLTL

SEQ ID NO: 563642 - protein, 16 aa, Homo sapiens
  CDR3 for beta chain variable domain of TCR clone 281821 (TRBV7-9, TRBJ2-1)
CASSSPQGTTRNEQFF

SEQ ID NO: 563643 - protein, 14 aa, Homo sapiens
  CDR3 for alpha chain variable domain of TCR clone 281822 (TRAV26-1, TRAJ34)
CILRVAYNTDKLIF

SEQ ID NO: 563644 - protein, 15 aa, Homo sapiens
  CDR3 for beta chain variable domain of TCR clone 281822 (TRBV20-1, TRBJ2-7)
CSARVPAAYFYEQYF

SEQ ID NO: 563645 - protein, 12 aa, Homo sapiens
  CDR3 for alpha chain variable domain of TCR clone 281823 (TRAV1-2, TRAJ24)
CAVGGSWGKFQF

SEQ ID NO: 563646 - protein, 15 aa, Homo sapiens
  CDR3 for beta chain variable domain of TCR clone 281823 (TRBV6-1, TRBJ2-2)
CASSRLRGDTGELFF

SEQ ID NO: 563647 - protein, 12 aa, Homo sapiens
  CDR3 for alpha chain variable domain of TCR clone 281824 (TRAV21, TRAJ13)
PGTSGGYQKVTF

SEQ ID NO: 563648 - protein, 15 aa, Homo sapiens
  CDR3 for beta chain variable domain of TCR clone 281824 (TRBV7-9, TRBJ1-6)
CASSSPGRGNSPLHF

SEQ ID NO: 563649 - protein, 16 aa, Homo sapiens
  CDR3 for alpha chain variable domain of TCR clone 281825 (TRAV3, TRAJ37)
CAVRGKGSGNTGKLIF

SEQ ID NO: 563650 - protein, 13 aa, Homo sapiens
  CDR3 for beta chain variable domain of TCR clone 281825 (TRBV12-4, TRBJ2-5)
CASRLAVQDTQYF

SEQ ID NO: 563651 - protein, 15 aa, Homo sapiens
  CDR3 for alpha chain variable domain of TCR clone 281826 (TRAV3, TRAJ5)
CAVRDLDTGRIALTF

SEQ ID NO: 563652 - protein, 15 aa, Homo sapiens
  CDR3 for beta chain variable domain of TCR clone 281826 (TRBV28, TRBJ2-5)
CASSPPWSYQETQYF

SEQ ID NO: 563653 - protein, 12 aa, Homo sapiens
  CDR3 for alpha chain variable domain of TCR clone 281827 (TRAV12-1, TRAJ40)
CVFYSGTYKYIF

SEQ ID NO: 563654 - protein, 18 aa, Homo sapiens
  CDR3 for beta chain variable domain of TCR clone 281827 (TRBV12-4, TRBJ2-2)
CDSSLVACTRGRTGELFF

SEQ ID NO: 563655 - protein, 12 aa, Homo sapiens
  CDR3 for alpha chain variable domain of TCR clone 281828 (TRAV3, TRAJ20)
CAVRDPDYKLSF

SEQ ID NO: 563656 - protein, 15 aa, Homo sapiens
  CDR3 for beta chain variable domain of TCR clone 281828 (TRBV2, TRBJ2-1)
CASSELAGSYNEQFF

SEQ ID NO: 563657 - protein, 15 aa, Homo sapiens
  CDR3 for alpha chain variable domain of TCR clone 281829 (TRAV26-1, TRAJ44)
CIVRANTGTASKLTF

SEQ ID NO: 563658 - protein, 13 aa, Homo sapiens
  CDR3 for beta chain variable domain of TCR clone 281829 (TRBV7-3, TRBJ2-1)
CASSLDSYNEQFF

SEQ ID NO: 563659 - protein, 10 aa, Homo sapiens
  CDR3 for alpha chain variable domain of TCR clone 281830 (TRAV12-3, TRAJ49)
CAMNDDQFYF

SEQ ID NO: 563660 - protein, 14 aa, Homo sapiens
  CDR3 for beta chain variable domain of TCR clone 281830 (TRBV11-2, TRBJ2-3)
CASSRLARTDTQYF

SEQ ID NO: 563661 - protein, 15 aa, Homo sapiens
  CDR3 for alpha chain variable domain of TCR clone 281831 (TRAV26-1, TRAJ28)
CIVRVAGAGSYQLAF

SEQ ID NO: 563662 - protein, 19 aa, Homo sapiens
  CDR3 for beta chain variable domain of TCR clone 281831 (TRBV7-3, TRBJ2-7)
CASSLTGVAGGWPSYEQYF

SEQ ID NO: 563663 - protein, 15 aa, Homo sapiens
  CDR3 for alpha chain variable domain of TCR clone 281832 (TRAV13-1, TRAJ45)
CAASGSGGGADGLTV

SEQ ID NO: 563664 - protein, 12 aa, Homo sapiens
  CDR3 for beta chain variable domain of TCR clone 281832 (TRBV11-2, TRBJ2-2)
CASSLGGGELFF

SEQ ID NO: 563665 - protein, 12 aa, Homo sapiens
  CDR3 for alpha chain variable domain of TCR clone 281833 (TRAV29/DV5, TRAJ43)
CAAPYNTNDMRF

SEQ ID NO: 563666 - protein, 17 aa, Homo sapiens
  CDR3 for beta chain variable domain of TCR clone 281833 (TRBV19, TRBJ2-6)
CASSTGQVFSGANVLTF

SEQ ID NO: 563667 - protein, 12 aa, Homo sapiens
  CDR3 for alpha chain variable domain of TCR clone 281834 (TRAV13-2, TRAJ23)
CAERHRGGKLIF

SEQ ID NO: 563668 - protein, 15 aa, Homo sapiens
  CDR3 for beta chain variable domain of TCR clone 281834 (TRBV7-3, TRBJ2-1)
CASSLGQGPFGEQFF

SEQ ID NO: 563669 - protein, 11 aa, Homo sapiens
  CDR3 for alpha chain variable domain of TCR clone 281835 (TRAV2, TRAJ13)
CASGGYRNVTF

SEQ ID NO: 563670 - protein, 17 aa, Homo sapiens
  CDR3 for beta chain variable domain of TCR clone 281835 (TRBV20-1, TRBJ2-2)
CSASGSGQGGLTGELFF

SEQ ID NO: 563671 - protein, 14 aa, Homo sapiens
  CDR3 for alpha chain variable domain of TCR clone 281836 (TRAV12-1, TRAJ9)
CVVTGYTGGFKTIF

SEQ ID NO: 563672 - protein, 12 aa, Homo sapiens
  CDR3 for beta chain variable domain of TCR clone 281836 (TRBV11-2, TRBJ2-2)
CASSLGGGELFF

SEQ ID NO: 563673 - protein, 17 aa, Homo sapiens
  CDR3 for alpha chain variable domain of TCR clone 281837 (TRAV12-2, TRAJ42)
CAVNILNYGGSQGNLIF

SEQ ID NO: 563674 - protein, 13 aa, Homo sapiens
  CDR3 for beta chain variable domain of TCR clone 281837 (TRBV3-1, TRBJ1-5)
CASSQDLDQTQHF

SEQ ID NO: 563675 - protein, 14 aa, Homo sapiens
  CDR3 for alpha chain variable domain of TCR clone 281838 (TRAV1-1, TRAJ23)
CAVSIYNQGGKLIF

SEQ ID NO: 563676 - protein, 15 aa, Homo sapiens
  CDR3 for beta chain variable domain of TCR clone 281838 (TRBV7-2, TRBJ2-1)
CASSLASGRVNEQFF

SEQ ID NO: 563677 - protein, 18 aa, Homo sapiens
  CDR3 for alpha chain variable domain of TCR clone 281839 (TRAV12-3, TRAJ52)
CAMSVGGAGGTSDGKMTF

SEQ ID NO: 563678 - protein, 15 aa, Homo sapiens
  CDR3 for beta chain variable domain of TCR clone 281839 (TRBV27, TRBJ1-6)
CASSFDRGLGSPLHF

SEQ ID NO: 563679 - protein, 14 aa, Homo sapiens
  CDR3 for alpha chain variable domain of TCR clone 281840 (TRAV12-2, TRAJ53)
CAVKGGGSNYKLAF

SEQ ID NO: 563680 - protein, 17 aa, Homo sapiens
  CDR3 for beta chain variable domain of TCR clone 281840 (TRBV7-2, TRBJ1-4)
CASSFKAGPTTNEKLFF

SEQ ID NO: 563681 - protein, 14 aa, Homo sapiens
  CDR3 for alpha chain variable domain of TCR clone 281841 (TRAV2, TRAJ37)
CAIDFTSNTGILIF

SEQ ID NO: 563682 - protein, 13 aa, Homo sapiens
  CDR3 for beta chain variable domain of TCR clone 281841 (TRBV20-1, TRBJ1-1)
CSAPLGGGTEAFF

SEQ ID NO: 563683 - protein, 14 aa, Homo sapiens
  CDR3 for alpha chain variable domain of TCR clone 281842 (TRAV26-1, TRAJ40)
CIVRVDRGTYKYIF

SEQ ID NO: 563684 - protein, 14 aa, Homo sapiens
  CDR3 for beta chain variable domain of TCR clone 281842 (TRBV7-3, TRBJ2-7)
CASSLKADSYEQYF

SEQ ID NO: 563685 - protein, 18 aa, Homo sapiens
  CDR3 for alpha chain variable domain of TCR clone 281843 (TRAV8-4, TRAJ52)
CAVTRANAGGTSYGKLTF

SEQ ID NO: 563686 - protein, 20 aa, Homo sapiens
  CDR3 for beta chain variable domain of TCR clone 281843 (TRBV19, TRBJ2-1)
CASSISRTVNSTRLNNEQFF

SEQ ID NO: 563687 - protein, 12 aa, Homo sapiens
  CDR3 for alpha chain variable domain of TCR clone 281844 (TRAV26-1, TRAJ13)
CIVSRGYQKVTF

SEQ ID NO: 563688 - protein, 16 aa, Homo sapiens
  CDR3 for beta chain variable domain of TCR clone 281844 (TRBV7-3, TRBJ2-2)
CASSLKRGTLSGELFF

SEQ ID NO: 563689 - protein, 14 aa, Homo sapiens
  CDR3 for alpha chain variable domain of TCR clone 281845 (TRAV29/DV5, TRAJ32)
CAAAYGGATNKLIV

SEQ ID NO: 563690 - protein, 11 aa, Homo sapiens
  CDR3 for beta chain variable domain of TCR clone 281845 (TRBV11-2, TRBJ2-2)
CASSLPGELFF

SEQ ID NO: 563691 - protein, 18 aa, Homo sapiens
  CDR3 for alpha chain variable domain of TCR clone 281846 (TRAV13-1, TRAJ52)
CAAKNPNAGGTSYGKLTF

SEQ ID NO: 563692 - protein, 12 aa, Homo sapiens
  CDR3 for beta chain variable domain of TCR clone 281846 (TRBV29-1, TRBJ2-3)
CSVTGGADTQYF

SEQ ID NO: 563693 - protein, 17 aa, Homo sapiens
  CDR3 for alpha chain variable domain of TCR clone 281847 (TRAV13-1, TRAJ53)
CAASWKSSGGSNYKLTF

SEQ ID NO: 563694 - protein, 19 aa, Homo sapiens
  CDR3 for beta chain variable domain of TCR clone 281847 (TRBV7-9, TRBJ2-1)
CASSHNRGALLRSYNEQYF

SEQ ID NO: 563695 - protein, 14 aa, Homo sapiens
  CDR3 for alpha chain variable domain of TCR clone 281848 (TRAV12-1, TRAJ45)
CVVNIGGGADGRTF

SEQ ID NO: 563696 - protein, 15 aa, Homo sapiens
  CDR3 for beta chain variable domain of TCR clone 281848 (TRBV7-2, TRBJ2-7)
CASSLKGALTYEQYF

SEQ ID NO: 563697 - protein, 15 aa, Homo sapiens
  CDR3 for alpha chain variable domain of TCR clone 281849 (TRAV17, TRAJ53)
CATDDSGGSNYKLTF

SEQ ID NO: 563698 - protein, 14 aa, Homo sapiens
  CDR3 for beta chain variable domain of TCR clone 281849 (TRBV20-1, TRBJ2-7)
CSAKTGTGGYEQYF

SEQ ID NO: 563699 - protein, 14 aa, Homo sapiens
  CDR3 for alpha chain variable domain of TCR clone 281850 (TRAV12-3, TRAJ10)
SHLPLTGGGNKLTF

SEQ ID NO: 563700 - protein, 15 aa, Homo sapiens
  CDR3 for beta chain variable domain of TCR clone 281850 (TRBV28, TRBJ2-1)
CASSIIAGGRSEQFL

SEQ ID NO: 563701 - protein, 14 aa, Homo sapiens
  CDR3 for alpha chain variable domain of TCR clone 281851 (TRAV12-3, TRAJ29)
CAMILLSGNTPLVF

SEQ ID NO: 563702 - protein, 17 aa, Homo sapiens
  CDR3 for beta chain variable domain of TCR clone 281851 (TRBV11-2, TRBJ2-3)
CASSPTGTGGLTDTQYF

SEQ ID NO: 563703 - protein, 13 aa, Homo sapiens
  CDR3 for alpha chain variable domain of TCR clone 281852 (TRAV17, TRAJ9)
CATDYTGGFKTIF

SEQ ID NO: 563704 - protein, 12 aa, Homo sapiens
  CDR3 for beta chain variable domain of TCR clone 281852 (TRBV12-4, TRBJ1-3)
CASSFSGNTIYF

SEQ ID NO: 563705 - protein, 13 aa, Homo sapiens
  CDR3 for alpha chain variable domain of TCR clone 281853 (TRAV1-2, TRAJ9)
CAALNTGGFKTIF

SEQ ID NO: 563706 - protein, 12 aa, Homo sapiens
  CDR3 for beta chain variable domain of TCR clone 281853 (TRBV11-3, TRBJ1-1)
YASSHRQGEAFF

SEQ ID NO: 563707 - protein, 18 aa, Homo sapiens
  CDR3 for alpha chain variable domain of TCR clone 281854 (TRAV13-1, TRAJ52)
SAAKNPNAGGTSYGKLTF

SEQ ID NO: 563708 - protein, 12 aa, Homo sapiens
  CDR3 for beta chain variable domain of TCR clone 281854 (TRBV5-1, TRBJ2-3)
CASSILTDTQYF

SEQ ID NO: 563709 - protein, 14 aa, Homo sapiens
  CDR3 for alpha chain variable domain of TCR clone 281855 (TRAV8-2, TRAJ4)
CVVSPSGGYNKLIF

SEQ ID NO: 563710 - protein, 14 aa, Homo sapiens
  CDR3 for beta chain variable domain of TCR clone 281855 (TRBV5-1, TRBJ2-3)
CASSLFGPTDTQYF

SEQ ID NO: 563711 - protein, 10 aa, Homo sapiens
  CDR3 for alpha chain variable domain of TCR clone 281856 (TRAV26-1, TRAJ22)
RSGSARHLTF

SEQ ID NO: 563712 - protein, 13 aa, Homo sapiens
  CDR3 for beta chain variable domain of TCR clone 281856 (TRBV7-9, TRBJ1-2)
CASSLKQNCGYTF

SEQ ID NO: 563713 - protein, 14 aa, Homo sapiens
  CDR3 for alpha chain variable domain of TCR clone 281857 (TRAV12-2, TRAJ17)
CAVLSKVAGNKLTF

SEQ ID NO: 563714 - protein, 17 aa, Homo sapiens
  CDR3 for beta chain variable domain of TCR clone 281857 (TRBV20-1, TRBJ2-2)
CSASGSGQGGLTGELFF

SEQ ID NO: 563715 - protein, 10 aa, Homo sapiens
  CDR3 for alpha chain variable domain of TCR clone 281858 (TRAV8-4, TRAJ43)
CAVSADDMRF

SEQ ID NO: 563716 - protein, 15 aa, Homo sapiens
  CDR3 for beta chain variable domain of TCR clone 281858 (TRBV5-1, TRBJ2-3)
CATSVTSGSTDTQYF

SEQ ID NO: 563717 - protein, 14 aa, Homo sapiens
  CDR3 for alpha chain variable domain of TCR clone 281859 (TRAV23/DV6, TRAJ24)
SAASLSDSWGIVQF

SEQ ID NO: 563718 - protein, 16 aa, Homo sapiens
  CDR3 for beta chain variable domain of TCR clone 281859 (TRBV7-9, TRBJ2-6)
CASSLKGPLRANVLTF

SEQ ID NO: 563719 - protein, 13 aa, Homo sapiens
  CDR3 for alpha chain variable domain of TCR clone 281860 (TRAV29/DV5, TRAJ31)
CAASRNNNARLMF

SEQ ID NO: 563720 - protein, 15 aa, Homo sapiens
  CDR3 for beta chain variable domain of TCR clone 281860 (TRBV13, TRBJ1-5)
CASSFGQGGVQPQHF

SEQ ID NO: 563721 - protein, 15 aa, Homo sapiens
  CDR3 for alpha chain variable domain of TCR clone 281861 (TRAV26-1, TRAJ23)
CIVRVLNNQGGKLIF

SEQ ID NO: 563722 - protein, 15 aa, Homo sapiens
  CDR3 for beta chain variable domain of TCR clone 281861 (TRBV7-3, TRBJ2-1)
CASSLGQSNYNEQFF

SEQ ID NO: 563723 - protein, 16 aa, Homo sapiens
  CDR3 for alpha chain variable domain of TCR clone 281862 (TRAV12-2, TRAJ13)
CAVKKTGGYQKVTLEL

SEQ ID NO: 563724 - protein, 15 aa, Homo sapiens
  CDR3 for beta chain variable domain of TCR clone 281862 (TRBV9, TRBJ1-6)
CASSVAGTGDSPLHF

SEQ ID NO: 563725 - protein, 14 aa, Homo sapiens
  CDR3 for alpha chain variable domain of TCR clone 281863 (TRAV12-3, TRAJ10)
SHLPLTGGGNTLTF

SEQ ID NO: 563726 - protein, 13 aa, Homo sapiens
  CDR3 for beta chain variable domain of TCR clone 281863 (TRBV9, TRBJ2-1)
CASSPSGGNEQFF

SEQ ID NO: 563727 - protein, 11 aa, Homo sapiens
  CDR3 for alpha chain variable domain of TCR clone 281864 (TRAV21, TRAJ20)
CAVSDDYKLSF

SEQ ID NO: 563728 - protein, 14 aa, Homo sapiens
  CDR3 for beta chain variable domain of TCR clone 281864 (TRBV7-2, TRBJ2-7)
CASSPKTSFYEQYF

SEQ ID NO: 563729 - protein, 13 aa, Homo sapiens
  CDR3 for alpha chain variable domain of TCR clone 281865 (TRAV13-2, TRAJ13)
CAERPGGYQKVTF

SEQ ID NO: 563730 - protein, 14 aa, Homo sapiens
  CDR3 for beta chain variable domain of TCR clone 281865 (TRBV25-1, TRBJ2-4)
CASSRNSAKNIQYF

SEQ ID NO: 563731 - protein, 16 aa, Homo sapiens
  CDR3 for alpha chain variable domain of TCR clone 281866 (TRAV12-1, TRAJ22)
CVVNSISSGSARQLTF

SEQ ID NO: 563732 - protein, 15 aa, Homo sapiens
  CDR3 for beta chain variable domain of TCR clone 281866 (TRBV6-3, TRBJ2-7)
CASSSPGTVFYEQYF

SEQ ID NO: 563733 - protein, 15 aa, Homo sapiens
  CDR3 for alpha chain variable domain of TCR clone 281867 (TRAV20, TRAJ50)
CAVRQMKTSYDKVIF

SEQ ID NO: 563734 - protein, 14 aa, Homo sapiens
  CDR3 for beta chain variable domain of TCR clone 281867 (TRBV7-2, TRBJ2-7)
CASSGLAGRGEQYF

SEQ ID NO: 563735 - protein, 15 aa, Homo sapiens
  CDR3 for alpha chain variable domain of TCR clone 281868 (TRAV34, TRAJ38)
CGADFTPGNNRKLIW

SEQ ID NO: 563736 - protein, 16 aa, Homo sapiens
  CDR3 for beta chain variable domain of TCR clone 281868 (TRBV14, TRBJ2-2)
CASSRSLGDDTGELFF

SEQ ID NO: 563737 - protein, 14 aa, Homo sapiens
  CDR3 for alpha chain variable domain of TCR clone 281869 (TRAV1-2, TRAJ8)
CAVREDTVFQKLVF

SEQ ID NO: 563738 - protein, 13 aa, Homo sapiens
  CDR3 for beta chain variable domain of TCR clone 281869 (TRBV20-1, TRBJ1-6)
CSASLGVGSPLHF

SEQ ID NO: 563739 - protein, 14 aa, Homo sapiens
  CDR3 for alpha chain variable domain of TCR clone 281870 (TRAV8-6, TRAJ49)
CAVSVRYTGNQFHF

SEQ ID NO: 563740 - protein, 19 aa, Homo sapiens
  CDR3 for beta chain variable domain of TCR clone 281870 (TRBV28, TRBJ2-1)
CASSFSIRGSGRTRYEQFF

SEQ ID NO: 563741 - protein, 16 aa, Homo sapiens
  CDR3 for alpha chain variable domain of TCR clone 281871 (TRAV13-2, TRAJ53)
CAENANSGGSNYKLTF

SEQ ID NO: 563742 - protein, 19 aa, Homo sapiens
  CDR3 for beta chain variable domain of TCR clone 281871 (TRBV28, TRBJ2-7)
YASSYSGTSRLGWVYEQYF

SEQ ID NO: 563743 - protein, 16 aa, Homo sapiens
  CDR3 for alpha chain variable domain of TCR clone 281872 (TRAV3, TRAJ10)
CAVRDMRAGGGNKLTL

SEQ ID NO: 563744 - protein, 19 aa, Homo sapiens
  CDR3 for beta chain variable domain of TCR clone 281872 (TRBV7-2, TRBJ2-3)
CASSFLSRNWGGGTDTQYL

SEQ ID NO: 563745 - protein, 13 aa, Homo sapiens
  CDR3 for alpha chain variable domain of TCR clone 281873 (TRAV8-6, TRAJ49)
CAVIRTPVTSSIL

SEQ ID NO: 563746 - protein, 14 aa, Homo sapiens
  CDR3 for beta chain variable domain of TCR clone 281873 (TRBV5-1, TRBJ2-7)
CASSRGESLYEQYF

SEQ ID NO: 563747 - protein, 12 aa, Homo sapiens
  CDR3 for alpha chain variable domain of TCR clone 281874 (TRAV21, TRAJ31)
CAVSPARGRLMF

SEQ ID NO: 563748 - protein, 14 aa, Homo sapiens
  CDR3 for beta chain variable domain of TCR clone 281874 (TRBV28, TRBJ2-7)
CASSLLRISYERYF

SEQ ID NO: 563749 - protein, 13 aa, Homo sapiens
  CDR3 for alpha chain variable domain of TCR clone 281875 (TRAV12-2, TRAJ20)
CAVYPSNDYKLSF

SEQ ID NO: 563750 - protein, 17 aa, Homo sapiens
  CDR3 for beta chain variable domain of TCR clone 281875 (TRBV4-1, TRBJ2-3)
CASSQGYVSGGTDTQYF

SEQ ID NO: 563751 - protein, 14 aa, Homo sapiens
  CDR3 for alpha chain variable domain of TCR clone 281876 (TRAV1-2, TRAJ8)
CAVREDTGFQKLVF

SEQ ID NO: 563752 - protein, 15 aa, Homo sapiens
  CDR3 for beta chain variable domain of TCR clone 281876 (TRBV6-3, TRBJ2-7)
CASSSPGTVFYEKHF

SEQ ID NO: 563753 - protein, 12 aa, Homo sapiens
  CDR3 for alpha chain variable domain of TCR clone 281877 (TRAV12-3, TRAJ17)
CAMTLTGNKLTF

SEQ ID NO: 563754 - protein, 16 aa, Homo sapiens
  CDR3 for beta chain variable domain of TCR clone 281877 (TRBV7-2, TRBJ2-5)
CASSSKWLSGQETQYF

SEQ ID NO: 563755 - protein, 12 aa, Homo sapiens
  CDR3 for alpha chain variable domain of TCR clone 281878 (TRAV26-1, TRAJ36)
CIVRVRADNLFF

SEQ ID NO: 563756 - protein, 15 aa, Homo sapiens
  CDR3 for beta chain variable domain of TCR clone 281878 (TRBV11-2, TRBJ1-3)
CASSAHSSSGNTIYF

SEQ ID NO: 563757 - protein, 14 aa, Homo sapiens
  CDR3 for alpha chain variable domain of TCR clone 281879 (TRAV12-3, TRAJ12)
CAMSRMGSSYKLIF

SEQ ID NO: 563758 - protein, 14 aa, Homo sapiens
  CDR3 for beta chain variable domain of TCR clone 281879 (TRBV20-1, TRBJ1-4)
CSARSGQSNEKLFF

SEQ ID NO: 563759 - protein, 12 aa, Homo sapiens
  CDR3 for alpha chain variable domain of TCR clone 281880 (TRAV12-3, TRAJ17)
CAMTLTGNKLTF

SEQ ID NO: 563760 - protein, 13 aa, Homo sapiens
  CDR3 for beta chain variable domain of TCR clone 281880 (TRBV3-1, TRBJ1-5)
CASSQFGDQPQHF

SEQ ID NO: 563761 - protein, 16 aa, Homo sapiens
  CDR3 for alpha chain variable domain of TCR clone 281881 (TRAV1-2, TRAJ10)
CAVRGVLTGGGNKLTF

SEQ ID NO: 563762 - protein, 14 aa, Homo sapiens
  CDR3 for beta chain variable domain of TCR clone 281881 (TRBV2, TRBJ1-5)
CASSGTVSNQPQHF

SEQ ID NO: 563763 - protein, 14 aa, Homo sapiens
  CDR3 for alpha chain variable domain of TCR clone 281882 (TRAV12-3, TRAJ33)
CAMSVPGSNYQLIW

SEQ ID NO: 563764 - protein, 12 aa, Homo sapiens
  CDR3 for beta chain variable domain of TCR clone 281882 (TRBV11-2, TRBJ2-2)
CASSLGGGELFF

SEQ ID NO: 563765 - protein, 13 aa, Homo sapiens
  CDR3 for alpha chain variable domain of TCR clone 281883 (TRAV9-2, TRAJ53)
CALSGGSNYKLTF

SEQ ID NO: 563766 - protein, 15 aa, Homo sapiens
  CDR3 for beta chain variable domain of TCR clone 281883 (TRBV12-4, TRBJ2-5)
CASSPPTGLQETQYF

SEQ ID NO: 563767 - protein, 14 aa, Homo sapiens
  CDR3 for alpha chain variable domain of TCR clone 281884 (TRAV38-1, TRAJ45)
CAYYSGGGADGLTF

SEQ ID NO: 563768 - protein, 16 aa, Homo sapiens
  CDR3 for beta chain variable domain of TCR clone 281884 (TRBV12-5, TRBJ2-5)
CASGTRTSGNQETQYF

SEQ ID NO: 563769 - protein, 15 aa, Homo sapiens
  CDR3 for alpha chain variable domain of TCR clone 281885 (TRAV3, TRAJ5)
RAVRDLDTGRRALTF

SEQ ID NO: 563770 - protein, 14 aa, Homo sapiens
  CDR3 for beta chain variable domain of TCR clone 281885 (TRBV25-1, TRBJ1-4)
CASSGGGQPEKLFF

SEQ ID NO: 563771 - protein, 16 aa, Homo sapiens
  CDR3 for alpha chain variable domain of TCR clone 281886 (TRAV4, TRAJ9)
CLVGDPNRSRGFKTIF

SEQ ID NO: 563772 - protein, 16 aa, Homo sapiens
  CDR3 for beta chain variable domain of TCR clone 281886 (TRBV28, TRBJ1-4)
CASSPPYRGRSEKLFF

SEQ ID NO: 563773 - protein, 15 aa, Homo sapiens
  CDR3 for alpha chain variable domain of TCR clone 281887 (TRAV38-1, TRAJ37)
CAFIFGSGNTGKLIF

SEQ ID NO: 563774 - protein, 12 aa, Homo sapiens
  CDR3 for beta chain variable domain of TCR clone 281887 (TRBV7-9, TRBJ2-7)
CASSLEGYEQCF

SEQ ID NO: 563775 - protein, 16 aa, Homo sapiens
  CDR3 for alpha chain variable domain of TCR clone 281888 (TRAV26-1, TRAJ23)
CIVRVHPYNQGGKLIF

SEQ ID NO: 563776 - protein, 16 aa, Homo sapiens
  CDR3 for beta chain variable domain of TCR clone 281888 (TRBV5-1, TRBJ1-1)
CASSSGGNSLNTEAFF

SEQ ID NO: 563777 - protein, 10 aa, Homo sapiens
  CDR3 for alpha chain variable domain of TCR clone 281889 (TRAV1-2, TRAJ18)
CAVRGEAQPW

SEQ ID NO: 563778 - protein, 19 aa, Homo sapiens
  CDR3 for beta chain variable domain of TCR clone 281889 (TRBV6-3, TRBJ1-2)
CASSYSKGRTGPPNYVYTF

SEQ ID NO: 563779 - protein, 18 aa, Homo sapiens
  CDR3 for alpha chain variable domain of TCR clone 281890 (TRAV21, TRAJ52)
CAVRPSPAGGPSYGKLTF

SEQ ID NO: 563780 - protein, 13 aa, Homo sapiens
  CDR3 for beta chain variable domain of TCR clone 281890 (TRBV10-3, TRBJ2-7)
CASKLAVNYEQYF

SEQ ID NO: 563781 - protein, 13 aa, Homo sapiens
  CDR3 for alpha chain variable domain of TCR clone 281891 (TRAV36/DV7, TRAJ34)
CAVGEVNTDKLIF

SEQ ID NO: 563782 - protein, 13 aa, Homo sapiens
  CDR3 for beta chain variable domain of TCR clone 281891 (TRBV6-1, TRBJ1-2)
CASSAREGYGYTF

SEQ ID NO: 563783 - protein, 18 aa, Homo sapiens
  CDR3 for alpha chain variable domain of TCR clone 281892 (TRAV13-1, TRAJ52)
CAAKNPNAGGTSYGMLTF

SEQ ID NO: 563784 - protein, 15 aa, Homo sapiens
  CDR3 for beta chain variable domain of TCR clone 281892 (TRBV6-1, TRBJ2-3)
CASSERGGITDTQYF

SEQ ID NO: 563785 - protein, 16 aa, Homo sapiens
  CDR3 for alpha chain variable domain of TCR clone 281893 (TRAV4, TRAJ22)
CLVGDLYSGSARQLTF

SEQ ID NO: 563786 - protein, 12 aa, Homo sapiens
  CDR3 for beta chain variable domain of TCR clone 281893 (TRBV7-9, TRBJ2-7)
CASSFGSYEQYF

SEQ ID NO: 563787 - protein, 18 aa, Homo sapiens
  CDR3 for alpha chain variable domain of TCR clone 281894 (TRAV21, TRAJ52)
CAVRPSPAGGTSYGRLTF

SEQ ID NO: 563788 - protein, 13 aa, Homo sapiens
  CDR3 for beta chain variable domain of TCR clone 281894 (TRBV20-1, TRBJ1-1)
CSARVGGNTEAFF

SEQ ID NO: 563789 - protein, 15 aa, Homo sapiens
  CDR3 for alpha chain variable domain of TCR clone 281895 (TRAV3, TRAJ45)
CAVRTPWGGADGLTF

SEQ ID NO: 563790 - protein, 15 aa, Homo sapiens
  CDR3 for beta chain variable domain of TCR clone 281895 (TRBV6-1, TRBJ2-2)
CQQFRTGSEHRGLFF

SEQ ID NO: 563791 - protein, 15 aa, Homo sapiens
  CDR3 for alpha chain variable domain of TCR clone 281896 (TRAV17, TRAJ57)
CATGPSQGGSEKLVF

SEQ ID NO: 563792 - protein, 17 aa, Homo sapiens
  CDR3 for beta chain variable domain of TCR clone 281896 (TRBV20-1, TRBJ2-1)
CSASYSGLAGSYNEQFF

SEQ ID NO: 563793 - protein, 11 aa, Homo sapiens
  CDR3 for alpha chain variable domain of TCR clone 281897 (TRAV3, TRAJ21)
CAVGNFNKFYF

SEQ ID NO: 563794 - protein, 14 aa, Homo sapiens
  CDR3 for beta chain variable domain of TCR clone 281897 (TRBV5-7, TRBJ1-5)
CASSRTGGGQAQHF

SEQ ID NO: 563795 - protein, 17 aa, Homo sapiens
  CDR3 for alpha chain variable domain of TCR clone 281898 (TRAV21, TRAJ52)
CAVGTNAGGTSYGKLAF

SEQ ID NO: 563796 - protein, 13 aa, Homo sapiens
  CDR3 for beta chain variable domain of TCR clone 281898 (TRBV5-1, TRBJ1-2)
CASSFSGNLGYTF

SEQ ID NO: 563797 - protein, 13 aa, Homo sapiens
  CDR3 for alpha chain variable domain of TCR clone 281899 (TRAV21, TRAJ20)
CAVGLRVDYKLSF

SEQ ID NO: 563798 - protein, 15 aa, Homo sapiens
  CDR3 for beta chain variable domain of TCR clone 281899 (TRBV15, TRBJ1-5)
CATSRDPVSNQPQHF

SEQ ID NO: 563799 - protein, 19 aa, Homo sapiens
  CDR3 for alpha chain variable domain of TCR clone 281900 (TRAV26-1, TRAJ28)
CIVRVAHAHSGAGSYQLTF

SEQ ID NO: 563800 - protein, 17 aa, Homo sapiens
  CDR3 for beta chain variable domain of TCR clone 281900 (TRBV4-1, TRBJ1-4)
CASSQEGPRGVEEKLFF

SEQ ID NO: 563801 - protein, 15 aa, Homo sapiens
  CDR3 for alpha chain variable domain of TCR clone 281901 (TRAV1-2, TRAJ20)
CAVRDIKLSDYKLSF

SEQ ID NO: 563802 - protein, 15 aa, Homo sapiens
  CDR3 for beta chain variable domain of TCR clone 281901 (TRBV7-9, TRBJ1-6)
CASSSPGRGNSPLHF

SEQ ID NO: 563803 - protein, 14 aa, Homo sapiens
  CDR3 for alpha chain variable domain of TCR clone 281902 (TRAV12-2, TRAJ13)
CAVKKTGGYQKVTF

SEQ ID NO: 563804 - protein, 13 aa, Homo sapiens
  CDR3 for beta chain variable domain of TCR clone 281902 (TRBV7-9, TRBJ1-2)
CASSLKQNYGDTV

SEQ ID NO: 563805 - protein, 12 aa, Homo sapiens
  CDR3 for alpha chain variable domain of TCR clone 281903 (TRAV12-1, TRAJ6)
CVVSERSYIPTF

SEQ ID NO: 563806 - protein, 13 aa, Homo sapiens
  CDR3 for beta chain variable domain of TCR clone 281903 (TRBV14, TRBJ1-2)
CASSQQGYYDYTF

SEQ ID NO: 563807 - protein, 13 aa, Homo sapiens
  CDR3 for alpha chain variable domain of TCR clone 281904 (TRAV27, TRAJ49)
CAPRPYTGNKFYF

SEQ ID NO: 563808 - protein, 16 aa, Homo sapiens
  CDR3 for beta chain variable domain of TCR clone 281904 (TRBV4-1, TRBJ1-2)
CASSQDAGQVLYGDTF

SEQ ID NO: 563809 - protein, 11 aa, Homo sapiens
  CDR3 for alpha chain variable domain of TCR clone 281905 (TRAV12-1, TRAJ21)
RVVNNFNKFYF

SEQ ID NO: 563810 - protein, 14 aa, Homo sapiens
  CDR3 for beta chain variable domain of TCR clone 281905 (TRBV18, TRBJ2-7)
CASSPRGGAYEQYF

SEQ ID NO: 563811 - protein, 14 aa, Homo sapiens
  CDR3 for alpha chain variable domain of TCR clone 281906 (TRAV35, TRAJ33)
CWPRGRDSNYQLIW

SEQ ID NO: 563812 - protein, 14 aa, Homo sapiens
  CDR3 for beta chain variable domain of TCR clone 281906 (TRBV7-2, TRBJ2-7)
CASSPKTSFYEQYF

SEQ ID NO: 563813 - protein, 16 aa, Homo sapiens
  CDR3 for alpha chain variable domain of TCR clone 281907 (TRAV30, TRAJ24)
CGTEIVDADSWGKSQF

SEQ ID NO: 563814 - protein, 17 aa, Homo sapiens
  CDR3 for beta chain variable domain of TCR clone 281907 (TRBV7-9, TRBJ2-7)
CASSPTLSWGPDYEQYF

SEQ ID NO: 563815 - protein, 18 aa, Homo sapiens
  CDR3 for alpha chain variable domain of TCR clone 281908 (TRAV13-1, TRAJ52)
CAASKRSAGGTSYGKLTF

SEQ ID NO: 563816 - protein, 14 aa, Homo sapiens
  CDR3 for beta chain variable domain of TCR clone 281908 (TRBV7-9, TRBJ2-1)
CASSQGQAEAEQFF

SEQ ID NO: 563817 - protein, 14 aa, Homo sapiens
  CDR3 for alpha chain variable domain of TCR clone 281909 (TRAV12-2, TRAJ13)
CAVKKTGGYQKVTF

SEQ ID NO: 563818 - protein, 12 aa, Homo sapiens
  CDR3 for beta chain variable domain of TCR clone 281909 (TRBV14, TRBJ2-7)
CASSRLKGEQYF

SEQ ID NO: 563819 - protein, 15 aa, Homo sapiens
  CDR3 for alpha chain variable domain of TCR clone 281910 (TRAV8-2, TRAJ15)
CVLSDRYQAGTALIF

SEQ ID NO: 563820 - protein, 13 aa, Homo sapiens
  CDR3 for beta chain variable domain of TCR clone 281910 (TRBV20-1, TRBJ1-1)
CSAPDRRNTEAFF

SEQ ID NO: 563821 - protein, 15 aa, Homo sapiens
  CDR3 for alpha chain variable domain of TCR clone 281911 (TRAV8-3, TRAJ45)
CASSYSGGGADGLTF

SEQ ID NO: 563822 - protein, 13 aa, Homo sapiens
  CDR3 for beta chain variable domain of TCR clone 281911 (TRBV10-3, TRBJ2-7)
CAANLAVNCEQYF

SEQ ID NO: 563823 - protein, 12 aa, Homo sapiens
  CDR3 for alpha chain variable domain of TCR clone 281912 (TRAV13-2, TRAJ23)
CPERHRGGKLIF

SEQ ID NO: 563824 - protein, 16 aa, Homo sapiens
  CDR3 for beta chain variable domain of TCR clone 281912 (TRBV27, TRBJ2-2)
CASSLSGFWVTGELFF

SEQ ID NO: 563825 - protein, 18 aa, Homo sapiens
  CDR3 for alpha chain variable domain of TCR clone 281913 (TRAV21, TRAJ52)
CAVRPSPAGGTSYGKLTF

SEQ ID NO: 563826 - protein, 21 aa, Homo sapiens
  CDR3 for beta chain variable domain of TCR clone 281913 (TRBV6-4, TRBJ1-6)
CASRGRGRFTPPLWERDQAHC

SEQ ID NO: 563827 - protein, 12 aa, Homo sapiens
  CDR3 for alpha chain variable domain of TCR clone 281914 (TRAV8-3, TRAJ26)
CAGDYYGQNFVF

SEQ ID NO: 563828 - protein, 15 aa, Homo sapiens
  CDR3 for beta chain variable domain of TCR clone 281914 (TRBV5-1, TRBJ2-3)
CASSVTAGSTDTQYF

SEQ ID NO: 563829 - protein, 16 aa, Homo sapiens
  CDR3 for alpha chain variable domain of TCR clone 281915 (TRAV3, TRAJ10)
CAVRYMRAGGGNKLTF

SEQ ID NO: 563830 - protein, 17 aa, Homo sapiens
  CDR3 for beta chain variable domain of TCR clone 281915 (TRBV20-1, TRBJ2-2)
CSASGSGQGGLTGELFF

SEQ ID NO: 563831 - protein, 14 aa, Homo sapiens
  CDR3 for alpha chain variable domain of TCR clone 281916 (TRAV1-2, TRAJ16)
CAANRFSDVQKLLF

SEQ ID NO: 563832 - protein, 14 aa, Homo sapiens
  CDR3 for beta chain variable domain of TCR clone 281916 (TRBV6-1, TRBJ1-3)
CASVQGGGGNTIYF

SEQ ID NO: 563833 - protein, 14 aa, Homo sapiens
  CDR3 for alpha chain variable domain of TCR clone 281917 (TRAV1-2, TRAJ29)
CAVRELTNATPLVF

SEQ ID NO: 563834 - protein, 15 aa, Homo sapiens
  CDR3 for beta chain variable domain of TCR clone 281917 (TRBV27, TRBJ2-7)
CASSPQREGQREQYF

SEQ ID NO: 563835 - protein, 14 aa, Homo sapiens
  CDR3 for alpha chain variable domain of TCR clone 281918 (TRAV12-1, TRAJ30)
CVVNIGGRDDKIIF

SEQ ID NO: 563836 - protein, 13 aa, Homo sapiens
  CDR3 for beta chain variable domain of TCR clone 281918 (TRBV12-5, TRBJ2-1)
CARGLGGGNEHFF

SEQ ID NO: 563837 - protein, 17 aa, Homo sapiens
  CDR3 for alpha chain variable domain of TCR clone 281919 (TRAV3, TRAJ6)
CAVRDGPRAGGGYIPTF

SEQ ID NO: 563838 - protein, 14 aa, Homo sapiens
  CDR3 for beta chain variable domain of TCR clone 281919 (TRBV6-1, TRBJ1-3)
CASVQGGGGNTIYF

SEQ ID NO: 563839 - protein, 15 aa, Homo sapiens
  CDR3 for alpha chain variable domain of TCR clone 281920 (TRAV21, TRAJ40)
CAVRPQTSGTYKYIF

SEQ ID NO: 563840 - protein, 11 aa, Homo sapiens
  CDR3 for beta chain variable domain of TCR clone 281920 (TRBV7-8, TRBJ2-7)
CASSLSLEQYF

SEQ ID NO: 563841 - protein, 10 aa, Homo sapiens
  CDR3 for alpha chain variable domain of TCR clone 281921 (TRAV12-1, TRAJ43)
CVVHNNDMRF

SEQ ID NO: 563842 - protein, 18 aa, Homo sapiens
  CDR3 for beta chain variable domain of TCR clone 281921 (TRBV18, TRBJ2-3)
ISVPAHHRREGRGNTQYF

SEQ ID NO: 563843 - protein, 12 aa, Homo sapiens
  CDR3 for alpha chain variable domain of TCR clone 281922 (TRAV16, TRAJ10)
CSRTGGGDKLTF

SEQ ID NO: 563844 - protein, 12 aa, Homo sapiens
  CDR3 for beta chain variable domain of TCR clone 281922 (TRBV11-2, TRBJ2-2)
CASSLGGGELFF

SEQ ID NO: 563845 - protein, 10 aa, Homo sapiens
  CDR3 for alpha chain variable domain of TCR clone 281923 (TRAV21, TRAJ35)
CAVFGNVLHC

SEQ ID NO: 563846 - protein, 16 aa, Homo sapiens
  CDR3 for beta chain variable domain of TCR clone 281923 (TRBV7-9, TRBJ2-1)
CASSDVAGGSYNEQFF

SEQ ID NO: 563847 - protein, 13 aa, Homo sapiens
  CDR3 for alpha chain variable domain of TCR clone 281924 (TRAV12-2, TRAJ20)
CAVYPSNDYKLSF

SEQ ID NO: 563848 - protein, 13 aa, Homo sapiens
  CDR3 for beta chain variable domain of TCR clone 281924 (TRBV27, TRBJ2-5)
CQQFIPGGETQYF

SEQ ID NO: 563849 - protein, 13 aa, Homo sapiens
  CDR3 for alpha chain variable domain of TCR clone 281925 (TRAV20, TRAJ34)
CAVSSYNTDKLIF

SEQ ID NO: 563850 - protein, 14 aa, Homo sapiens
  CDR3 for beta chain variable domain of TCR clone 281925 (TRBV4-2, TRBJ2-1)
CASGLDRAYNEQFF

SEQ ID NO: 563851 - protein, 10 aa, Homo sapiens
  CDR3 for alpha chain variable domain of TCR clone 281926 (TRAV1-2, TRAJ20)
CALNDYKLSF

SEQ ID NO: 563852 - protein, 14 aa, Homo sapiens
  CDR3 for beta chain variable domain of TCR clone 281926 (TRBV7-6, TRBJ2-3)
CASSLGTVTDTQYF

SEQ ID NO: 563853 - protein, 14 aa, Homo sapiens
  CDR3 for alpha chain variable domain of TCR clone 281927 (TRAV12-1, TRAJ22)
CVVPYRGSARQLNF

SEQ ID NO: 563854 - protein, 15 aa, Homo sapiens
  CDR3 for beta chain variable domain of TCR clone 281927 (TRBV12-4, TRBJ2-1)
CASSLGTSAVNEQFF

SEQ ID NO: 563855 - protein, 14 aa, Homo sapiens
  CDR3 for alpha chain variable domain of TCR clone 281928 (TRAV29/DV5, TRAJ36)
CAARRKTGANNLFF

SEQ ID NO: 563856 - protein, 15 aa, Homo sapiens
  CDR3 for beta chain variable domain of TCR clone 281928 (TRBV10-2, TRBJ2-7)
CASWNRGQATYEQYF

SEQ ID NO: 563857 - protein, 13 aa, Homo sapiens
  CDR3 for alpha chain variable domain of TCR clone 281929 (TRAV41, TRAJ33)
CAANMDSNYQLIW

SEQ ID NO: 563858 - protein, 17 aa, Homo sapiens
  CDR3 for beta chain variable domain of TCR clone 281929 (TRBV19, TRBJ2-3)
CASSRERGGRFTDTQYF

SEQ ID NO: 563859 - protein, 13 aa, Homo sapiens
  CDR3 for alpha chain variable domain of TCR clone 281930 (TRAV2, TRAJ40)
CAVVTSGTYKYIF

SEQ ID NO: 563860 - protein, 16 aa, Homo sapiens
  CDR3 for beta chain variable domain of TCR clone 281930 (TRBV11-2, TRBJ2-1)
CQQLIPPGVEYNEQFF

SEQ ID NO: 563861 - protein, 15 aa, Homo sapiens
  CDR3 for alpha chain variable domain of TCR clone 281931 (TRAV12-3, TRAJ42)
CAMITSVGGQGNLIF

SEQ ID NO: 563862 - protein, 13 aa, Homo sapiens
  CDR3 for beta chain variable domain of TCR clone 281931 (TRBV25-1, TRBJ2-6)
CASRGPGANVLTF

SEQ ID NO: 563863 - protein, 16 aa, Homo sapiens
  CDR3 for alpha chain variable domain of TCR clone 281932 (TRAV12-3, TRAJ53)
CAMSPGSGGSNYKLTF

SEQ ID NO: 563864 - protein, 14 aa, Homo sapiens
  CDR3 for beta chain variable domain of TCR clone 281932 (TRBV13, TRBJ2-7)
CASSLKGASYEQYF

SEQ ID NO: 563865 - protein, 14 aa, Homo sapiens
  CDR3 for alpha chain variable domain of TCR clone 281933 (TRAV35, TRAJ13)
CAGSPSGGYQKVTF

SEQ ID NO: 563866 - protein, 17 aa, Homo sapiens
  CDR3 for beta chain variable domain of TCR clone 281933 (TRBV18, TRBJ1-5)
CQLTTCRVRQNNQAQHF

SEQ ID NO: 563867 - protein, 12 aa, Homo sapiens
  CDR3 for alpha chain variable domain of TCR clone 281934 (TRAV13-2, TRAJ23)
CAERHRGGKLIF

SEQ ID NO: 563868 - protein, 16 aa, Homo sapiens
  CDR3 for beta chain variable domain of TCR clone 281934 (TRBV5-4, TRBJ2-3)
CASQQPGAGGADTQYF

SEQ ID NO: 563869 - protein, 14 aa, Homo sapiens
  CDR3 for alpha chain variable domain of TCR clone 281935 (TRAV12-2, TRAJ13)
CAVKKTGGYQKVTF

SEQ ID NO: 563870 - protein, 15 aa, Homo sapiens
  CDR3 for beta chain variable domain of TCR clone 281935 (TRBV6-6, TRBJ1-1)
CASSYPTAMNTEAFC

SEQ ID NO: 563871 - protein, 13 aa, Homo sapiens
  CDR3 for alpha chain variable domain of TCR clone 281936 (TRAV17, TRAJ39)
CATEDNAGNMPTF

SEQ ID NO: 563872 - protein, 14 aa, Homo sapiens
  CDR3 for beta chain variable domain of TCR clone 281936 (TRBV19, TRBJ1-2)
CASSPTGGAGGYTF

SEQ ID NO: 563873 - protein, 14 aa, Homo sapiens
  CDR3 for alpha chain variable domain of TCR clone 281937 (TRAV12-3, TRAJ10)
SHLPLTGGGNKLTF

SEQ ID NO: 563874 - protein, 14 aa, Homo sapiens
  CDR3 for beta chain variable domain of TCR clone 281937 (TRBV19, TRBJ1-4)
CASAIEAEGEKLFF

SEQ ID NO: 563875 - protein, 14 aa, Homo sapiens
  CDR3 for alpha chain variable domain of TCR clone 281938 (TRAV23/DV6, TRAJ17)
CAARGRAAGNKPTF

SEQ ID NO: 563876 - protein, 12 aa, Homo sapiens
  CDR3 for beta chain variable domain of TCR clone 281938 (TRBV7-9, TRBJ2-3)
CASSFITDTQYF

SEQ ID NO: 563877 - protein, 23 aa, Homo sapiens
  CDR3 for alpha chain variable domain of TCR clone 281939 (TRAV26-1, )
CIADNAGDNHIQNPDPAVYPLRD

SEQ ID NO: 563878 - protein, 13 aa, Homo sapiens
  CDR3 for beta chain variable domain of TCR clone 281939 (TRBV20-1, TRBJ1-1)
CSARGGGNTEAFF

SEQ ID NO: 563879 - protein, 17 aa, Homo sapiens
  CDR3 for alpha chain variable domain of TCR clone 281940 (TRAV13-1, TRAJ31)
CAPRDRLMFGGGTQLEV

SEQ ID NO: 563880 - protein, 12 aa, Homo sapiens
  CDR3 for beta chain variable domain of TCR clone 281940 (TRBV7-9, TRBJ2-7)
CASSLEGYEQYF

SEQ ID NO: 563881 - protein, 14 aa, Homo sapiens
  CDR3 for alpha chain variable domain of TCR clone 281941 (TRAV12-3, TRAJ10)
SHLPLTGGGNKLTF

SEQ ID NO: 563882 - protein, 16 aa, Homo sapiens
  CDR3 for beta chain variable domain of TCR clone 281941 (TRBV3-1, TRBJ2-1)
CASSQVGGTSYNEQFF

SEQ ID NO: 563883 - protein, 15 aa, Homo sapiens
  CDR3 for alpha chain variable domain of TCR clone 281942 (TRAV1-1, TRAJ24)
CALSGGTDSWGNFQF

SEQ ID NO: 563884 - protein, 16 aa, Homo sapiens
  CDR3 for beta chain variable domain of TCR clone 281942 (TRBV2, TRBJ2-7)
CASSEPWTGPSYEQYF

SEQ ID NO: 563885 - protein, 18 aa, Homo sapiens
  CDR3 for alpha chain variable domain of TCR clone 281943 (TRAV12-3, TRAJ52)
CAMSVGGAGGTSYGKLTF

SEQ ID NO: 563886 - protein, 15 aa, Homo sapiens
  CDR3 for beta chain variable domain of TCR clone 281943 (TRBV27, TRBJ1-6)
CASSFDRGLGSPLHF

SEQ ID NO: 563887 - protein, 14 aa, Homo sapiens
  CDR3 for alpha chain variable domain of TCR clone 281944 (TRAV29/DV5, TRAJ4)
CAATVLGGYNKLIF

SEQ ID NO: 563888 - protein, 16 aa, Homo sapiens
  CDR3 for beta chain variable domain of TCR clone 281944 (TRBV12-5, TRBJ2-5)
CASGPRTSGNQETQYF

SEQ ID NO: 563889 - protein, 15 aa, Homo sapiens
  CDR3 for alpha chain variable domain of TCR clone 281945 (TRAV38-1, TRAJ37)
FAFIHGSGNTGKLIL

SEQ ID NO: 563890 - protein, 12 aa, Homo sapiens
  CDR3 for beta chain variable domain of TCR clone 281945 (TRBV7-9, TRBJ2-7)
CASSFGSYEQYF

SEQ ID NO: 563891 - protein, 17 aa, Homo sapiens
  CDR3 for alpha chain variable domain of TCR clone 281946 (TRAV3, TRAJ6)
CAVRDGPRAGGSYIPTF

SEQ ID NO: 563892 - protein, 15 aa, Homo sapiens
  CDR3 for beta chain variable domain of TCR clone 281946 (TRBV7-9, TRBJ1-6)
CASSSPGRGNSPLHV

SEQ ID NO: 563893 - protein, 16 aa, Homo sapiens
  CDR3 for alpha chain variable domain of TCR clone 281947 (TRAV30, TRAJ24)
CGTEIVDADSWGTFKF

SEQ ID NO: 563894 - protein, 14 aa, Homo sapiens
  CDR3 for beta chain variable domain of TCR clone 281947 (TRBV12-5, TRBJ2-5)
CASGSRTHQETQYF

SEQ ID NO: 563895 - protein, 15 aa, Homo sapiens
  CDR3 for alpha chain variable domain of TCR clone 281948 (TRAV27, TRAJ56)
CAGRDGTGANSKLTF

SEQ ID NO: 563896 - protein, 16 aa, Homo sapiens
  CDR3 for beta chain variable domain of TCR clone 281948 (TRBV20-1, TRBJ1-4)
CSAPGQGLLTNEKLFF

SEQ ID NO: 563897 - protein, 15 aa, Homo sapiens
  CDR3 for alpha chain variable domain of TCR clone 281949 (TRAV4, TRAJ42)
CLVGGYGGSQGNLIF

SEQ ID NO: 563898 - protein, 16 aa, Homo sapiens
  CDR3 for beta chain variable domain of TCR clone 281949 (TRBV19, TRBJ2-2)
CASRSPGTGATGELFF

SEQ ID NO: 563899 - protein, 14 aa, Homo sapiens
  CDR3 for alpha chain variable domain of TCR clone 281950 (TRAV2, TRAJ37)
CAVDFTSNTGKLIF

SEQ ID NO: 563900 - protein, 13 aa, Homo sapiens
  CDR3 for beta chain variable domain of TCR clone 281950 (TRBV27, TRBJ2-7)
CASSLRHRYEQYF

SEQ ID NO: 563901 - protein, 14 aa, Homo sapiens
  CDR3 for alpha chain variable domain of TCR clone 281951 (TRAV3, TRAJ17)
CAMRDAAAGNKPTF

SEQ ID NO: 563902 - protein, 16 aa, Homo sapiens
  CDR3 for beta chain variable domain of TCR clone 281951 (TRBV20-1, TRBJ1-2)
CSASMGQGVANYGYTF

SEQ ID NO: 563903 - protein, 16 aa, Homo sapiens
  CDR3 for alpha chain variable domain of TCR clone 281952 (TRAV12-2, TRAJ32)
CAVNLGQGGATNKLIF

SEQ ID NO: 563904 - protein, 18 aa, Homo sapiens
  CDR3 for beta chain variable domain of TCR clone 281952 (TRBV28, TRBJ2-5)
CASSFPNFGTGGGETQYF

SEQ ID NO: 563905 - protein, 12 aa, Homo sapiens
  CDR3 for alpha chain variable domain of TCR clone 281953 (TRAV13-1, TRAJ43)
CAAGRSNNDMRF

SEQ ID NO: 563906 - protein, 14 aa, Homo sapiens
  CDR3 for beta chain variable domain of TCR clone 281953 (TRBV6-3, TRBJ2-5)
CASRRDGGEETQYF

SEQ ID NO: 563907 - protein, 12 aa, Homo sapiens
  CDR3 for alpha chain variable domain of TCR clone 281954 (TRAV8-4, TRAJ37)
CAKSSNTGKLIF

SEQ ID NO: 563908 - protein, 16 aa, Homo sapiens
  CDR3 for beta chain variable domain of TCR clone 281954 (TRBV6-1, TRBJ1-2)
CASSGAWQGRSHGYTF

SEQ ID NO: 563909 - protein, 12 aa, Homo sapiens
  CDR3 for alpha chain variable domain of TCR clone 281955 (TRAV27, TRAJ42)
CAGAGSQGNLIF

SEQ ID NO: 563910 - protein, 14 aa, Homo sapiens
  CDR3 for beta chain variable domain of TCR clone 281955 (TRBV7-2, TRBJ2-7)
CASSLPPGQGPQYF

SEQ ID NO: 563911 - protein, 13 aa, Homo sapiens
  CDR3 for alpha chain variable domain of TCR clone 281956 (TRAV21, TRAJ27)
CAARPGNAGKSTV

SEQ ID NO: 563912 - protein, 15 aa, Homo sapiens
  CDR3 for beta chain variable domain of TCR clone 281956 (TRBV20-1, TRBJ2-7)
CSARDRVSGMDEQYF

SEQ ID NO: 563913 - protein, 14 aa, Homo sapiens
  CDR3 for alpha chain variable domain of TCR clone 281957 (TRAV8-3, TRAJ33)
CAVGPLGGNYQLIW

SEQ ID NO: 563914 - protein, 12 aa, Homo sapiens
  CDR3 for beta chain variable domain of TCR clone 281957 (TRBV29-1, TRBJ2-3)
CSVTGGADTQYF

SEQ ID NO: 563915 - protein, 15 aa, Homo sapiens
  CDR3 for alpha chain variable domain of TCR clone 281958 (TRAV17, TRAJ4)
CATGTWSGGYNKLIF

SEQ ID NO: 563916 - protein, 15 aa, Homo sapiens
  CDR3 for beta chain variable domain of TCR clone 281958 (TRBV4-1, TRBJ1-4)
CASSDTGGTNEKLFF

SEQ ID NO: 563917 - protein, 11 aa, Homo sapiens
  CDR3 for alpha chain variable domain of TCR clone 281959 (TRAV1-2, TRAJ20)
CAVSNDYKLSF

SEQ ID NO: 563918 - protein, 13 aa, Homo sapiens
  CDR3 for beta chain variable domain of TCR clone 281959 (TRBV7-3, TRBJ1-1)
CASSQDWGAEAFF

SEQ ID NO: 563919 - protein, 15 aa, Homo sapiens
  CDR3 for alpha chain variable domain of TCR clone 281960 (TRAV3, TRAJ5)
CAVRDLDTGRRALTF

SEQ ID NO: 563920 - protein, 13 aa, Homo sapiens
  CDR3 for beta chain variable domain of TCR clone 281960 (TRBV20-1, TRBJ2-5)
CSARDSEQATQYF

SEQ ID NO: 563921 - protein, 14 aa, Homo sapiens
  CDR3 for alpha chain variable domain of TCR clone 281961 (TRAV1-2, TRAJ16)
CAVNRFSDGQKLLF

SEQ ID NO: 563922 - protein, 16 aa, Homo sapiens
  CDR3 for beta chain variable domain of TCR clone 281961 (TRBV19, TRBJ2-3)
CPSSPEWDRGTDTQYF

SEQ ID NO: 563923 - protein, 13 aa, Homo sapiens
  CDR3 for alpha chain variable domain of TCR clone 281962 (TRAV21, TRAJ27)
CAARPGNAGKSAF

SEQ ID NO: 563924 - protein, 14 aa, Homo sapiens
  CDR3 for beta chain variable domain of TCR clone 281962 (TRBV7-6, TRBJ2-3)
CASSVGTVTDTQYF

SEQ ID NO: 563925 - protein, 16 aa, Homo sapiens
  CDR3 for alpha chain variable domain of TCR clone 281963 (TRAV23/DV6, TRAJ48)
WAASGVVNFGNEKLTF

SEQ ID NO: 563926 - protein, 15 aa, Homo sapiens
  CDR3 for beta chain variable domain of TCR clone 281963 (TRBV20-1, TRBJ2-5)
CSAGLAGVSQETQYF

SEQ ID NO: 563927 - protein, 17 aa, Homo sapiens
  CDR3 for alpha chain variable domain of TCR clone 281964 (TRAV12-1, TRAJ8)
CVVNPKRVNAGFQKLVF

SEQ ID NO: 563928 - protein, 14 aa, Homo sapiens
  CDR3 for beta chain variable domain of TCR clone 281964 (TRBV3-1, TRBJ2-7)
CASSRTSGKEEQYF

SEQ ID NO: 563929 - protein, 19 aa, Homo sapiens
  CDR3 for alpha chain variable domain of TCR clone 281965 (TRAV26-1, TRAJ52)
CIVRAHRNAGGTSYGKLTF

SEQ ID NO: 563930 - protein, 15 aa, Homo sapiens
  CDR3 for beta chain variable domain of TCR clone 281965 (TRBV29-1, TRBJ2-1)
CSGRERKSSYNEQFF

SEQ ID NO: 563931 - protein, 12 aa, Homo sapiens
  CDR3 for alpha chain variable domain of TCR clone 281966 (TRAV13-2, TRAJ42)
CAEGGSQGNLIF

SEQ ID NO: 563932 - protein, 11 aa, Homo sapiens
  CDR3 for beta chain variable domain of TCR clone 281966 (TRBV19, TRBJ1-2)
CASSISSGYTF

SEQ ID NO: 563933 - protein, 17 aa, Homo sapiens
  CDR3 for alpha chain variable domain of TCR clone 281967 (TRAV3, TRAJ6)
CAVRDGPRAEGSYIPTF

SEQ ID NO: 563934 - protein, 20 aa, Homo sapiens
  CDR3 for beta chain variable domain of TCR clone 281967 (TRBV28, TRBJ2-1)
CASTPIGRSPGRAGGNEQFF

SEQ ID NO: 563935 - protein, 11 aa, Homo sapiens
  CDR3 for alpha chain variable domain of TCR clone 281968 (TRAV3, TRAJ21)
CAVGNFNKFYF

SEQ ID NO: 563936 - protein, 16 aa, Homo sapiens
  CDR3 for beta chain variable domain of TCR clone 281968 (TRBV28, TRBJ2-7)
CASSLFFETGGPEQYF

SEQ ID NO: 563937 - protein, 17 aa, Homo sapiens
  CDR3 for alpha chain variable domain of TCR clone 281969 (TRAV3, TRAJ6)
CAVRDGPRAGGSYIPTF

SEQ ID NO: 563938 - protein, 15 aa, Homo sapiens
  CDR3 for beta chain variable domain of TCR clone 281969 (TRBV27, TRBJ2-3)
CASSLGLAATDTQYF

SEQ ID NO: 563939 - protein, 17 aa, Homo sapiens
  CDR3 for alpha chain variable domain of TCR clone 281970 (TRAV3, TRAJ6)
CAVRDGPRAGGSYIPTF

SEQ ID NO: 563940 - protein, 12 aa, Homo sapiens
  CDR3 for beta chain variable domain of TCR clone 281970 (TRBV15, TRBJ2-3)
CATSTSPPGQTD

SEQ ID NO: 563941 - protein, 13 aa, Homo sapiens
  CDR3 for alpha chain variable domain of TCR clone 281971 (TRAV3, TRAJ20)
CAVRDTPRSKLSF

SEQ ID NO: 563942 - protein, 14 aa, Homo sapiens
  CDR3 for beta chain variable domain of TCR clone 281971 (TRBV11-1, TRBJ2-7)
CASTFAVPSYEQYF

SEQ ID NO: 563943 - protein, 18 aa, Homo sapiens
  CDR3 for alpha chain variable domain of TCR clone 281972 (TRAV2, TRAJ20)
LRVREADAAVYRDCKLSF

SEQ ID NO: 563944 - protein, 14 aa, Homo sapiens
  CDR3 for beta chain variable domain of TCR clone 281972 (TRBV25-1, TRBJ1-1)
CASTHLGGNTEAFF

SEQ ID NO: 563945 - protein, 14 aa, Homo sapiens
  CDR3 for alpha chain variable domain of TCR clone 281973 (TRAV38-1, TRAJ40)
CALRPTSGTYKYIF

SEQ ID NO: 563946 - protein, 11 aa, Homo sapiens
  CDR3 for beta chain variable domain of TCR clone 281973 (TRBV7-9, TRBJ2-3)
CASSPTDTQYF

SEQ ID NO: 563947 - protein, 14 aa, Homo sapiens
  CDR3 for alpha chain variable domain of TCR clone 281974 (TRAV2, TRAJ21)
CAVEDRNNSNKFYF

SEQ ID NO: 563948 - protein, 11 aa, Homo sapiens
  CDR3 for beta chain variable domain of TCR clone 281974 (TRBV10-3, TRBJ2-1)
CAISDRGLQFF

SEQ ID NO: 563949 - protein, 15 aa, Homo sapiens
  CDR3 for alpha chain variable domain of TCR clone 281975 (TRAV25, TRAJ53)
CAATGGGGSNYKLTF

SEQ ID NO: 563950 - protein, 16 aa, Homo sapiens
  CDR3 for beta chain variable domain of TCR clone 281975 (TRBV11-3, TRBJ2-5)
CASSSVVAGSTETQYF

SEQ ID NO: 563951 - protein, 12 aa, Homo sapiens
  CDR3 for alpha chain variable domain of TCR clone 281976 (TRAV3, TRAJ20)
CAVRDPDYKPSF

SEQ ID NO: 563952 - protein, 12 aa, Homo sapiens
  CDR3 for beta chain variable domain of TCR clone 281976 (TRBV11-2, TRBJ2-2)
CASSLGGGELFF

SEQ ID NO: 563953 - protein, 16 aa, Homo sapiens
  CDR3 for alpha chain variable domain of TCR clone 281977 (TRAV17, TRAJ36)
CATVSLNWGKQPLLCD

SEQ ID NO: 563954 - protein, 13 aa, Homo sapiens
  CDR3 for beta chain variable domain of TCR clone 281977 (TRBV4-1, TRBJ1-1)
CASSQLGTGEAFF

SEQ ID NO: 563955 - protein, 16 aa, Homo sapiens
  CDR3 for alpha chain variable domain of TCR clone 281978 (TRAV2, TRAJ4)
CAVEDRFSGGYNKLIF

SEQ ID NO: 563956 - protein, 13 aa, Homo sapiens
  CDR3 for beta chain variable domain of TCR clone 281978 (TRBV7-7, TRBJ2-7)
CASSRSGQETQYF

SEQ ID NO: 563957 - protein, 13 aa, Homo sapiens
  CDR3 for alpha chain variable domain of TCR clone 281979 (TRAV12-3, TRAJ33)
CAMSLNSNYQLIW

SEQ ID NO: 563958 - protein, 13 aa, Homo sapiens
  CDR3 for beta chain variable domain of TCR clone 281979 (TRBV7-2, TRBJ1-4)
CASSLAGLEKLFF

SEQ ID NO: 563959 - protein, 18 aa, Homo sapiens
  CDR3 for alpha chain variable domain of TCR clone 281980 (TRAV26-1, TRAJ52)
CIVRVAGAGGTSYGKLTF

SEQ ID NO: 563960 - protein, 13 aa, Homo sapiens
  CDR3 for beta chain variable domain of TCR clone 281980 (TRBV7-8, TRBJ1-2)
CASSAQSYYGYTF

SEQ ID NO: 563961 - protein, 15 aa, Homo sapiens
  CDR3 for alpha chain variable domain of TCR clone 281981 (TRAV23/DV6, TRAJ27)
CAASKPMQANQPLVI

SEQ ID NO: 563962 - protein, 12 aa, Homo sapiens
  CDR3 for beta chain variable domain of TCR clone 281981 (TRBV12-4, TRBJ2-7)
CASSLGGYEQYF

SEQ ID NO: 563963 - protein, 14 aa, Homo sapiens
  CDR3 for alpha chain variable domain of TCR clone 281982 (TRAV13-1, TRAJ3)
CAAEGYSSASKIIF

SEQ ID NO: 563964 - protein, 14 aa, Homo sapiens
  CDR3 for beta chain variable domain of TCR clone 281982 (TRBV19, TRBJ2-5)
CASASSGIQETQYF

SEQ ID NO: 563965 - protein, 14 aa, Homo sapiens
  CDR3 for alpha chain variable domain of TCR clone 281983 (TRAV26-1, TRAJ44)
CISPLPGTASKLTF

SEQ ID NO: 563966 - protein, 14 aa, Homo sapiens
  CDR3 for beta chain variable domain of TCR clone 281983 (TRBV19, TRBJ2-1)
CASPTFFLSGEQFF

SEQ ID NO: 563967 - protein, 21 aa, Homo sapiens
  CDR3 for alpha chain variable domain of TCR clone 281984 (TRAV4, TRAJ3)
CCVLLPRGCPPGYSSASKIIF

SEQ ID NO: 563968 - protein, 14 aa, Homo sapiens
  CDR3 for beta chain variable domain of TCR clone 281984 (TRBV2, TRBJ1-6)
CALSPSDPRSPLHV

SEQ ID NO: 563969 - protein, 18 aa, Homo sapiens
  CDR3 for alpha chain variable domain of TCR clone 281985 (TRAV26-1, TRAJ23)
CIVRVGLEVCNQGGKLIF

SEQ ID NO: 563970 - protein, 14 aa, Homo sapiens
  CDR3 for beta chain variable domain of TCR clone 281985 (TRBV7-6, TRBJ2-3)
CASSLGTVTDTQYF

SEQ ID NO: 563971 - protein, 15 aa, Homo sapiens
  CDR3 for alpha chain variable domain of TCR clone 281986 (TRAV23/DV6, TRAJ13)
CAAWPGGGGYQKGTF

SEQ ID NO: 563972 - protein, 17 aa, Homo sapiens
  CDR3 for beta chain variable domain of TCR clone 281986 (TRBV19, TRBJ2-7)
CASGISFYDSYPYEQYF

SEQ ID NO: 563973 - protein, 11 aa, Homo sapiens
  CDR3 for alpha chain variable domain of TCR clone 281987 (TRAV1-2, TRAJ40)
CAVPGTYKYIF

SEQ ID NO: 563974 - protein, 14 aa, Homo sapiens
  CDR3 for beta chain variable domain of TCR clone 281987 (TRBV19, TRBJ2-1)
CASEVTGARNEQFF

SEQ ID NO: 563975 - protein, 13 aa, Homo sapiens
  CDR3 for alpha chain variable domain of TCR clone 281988 (TRAV22, TRAJ29)
CAVGGSGNTPLVF

SEQ ID NO: 563976 - protein, 16 aa, Homo sapiens
  CDR3 for beta chain variable domain of TCR clone 281988 (TRBV7-3, TRBJ2-2)
CASSLKRGTLSGELFF

SEQ ID NO: 563977 - protein, 17 aa, Homo sapiens
  CDR3 for alpha chain variable domain of TCR clone 281989 (TRAV27, TRAJ18)
CAGLHRGRGSTLGRLYF

SEQ ID NO: 563978 - protein, 14 aa, Homo sapiens
  CDR3 for beta chain variable domain of TCR clone 281989 (TRBV20-1, TRBJ1-1)
CSAQTRIGGTEAFF

SEQ ID NO: 563979 - protein, 14 aa, Homo sapiens
  CDR3 for alpha chain variable domain of TCR clone 281990 (TRAV12-2, TRAJ13)
CALKKTGGYQKVTF

SEQ ID NO: 563980 - protein, 16 aa, Homo sapiens
  CDR3 for beta chain variable domain of TCR clone 281990 (TRBV12-5, TRBJ2-5)
CASGPRTSGNQETQYF

SEQ ID NO: 563981 - protein, 14 aa, Homo sapiens
  CDR3 for alpha chain variable domain of TCR clone 281991 (TRAV20, TRAJ44)
CAVQDTGTASKPTF

SEQ ID NO: 563982 - protein, 13 aa, Homo sapiens
  CDR3 for beta chain variable domain of TCR clone 281991 (TRBV29-1, TRBJ1-3)
CSAGTGRGNTIYF

SEQ ID NO: 563983 - protein, 15 aa, Homo sapiens
  CDR3 for alpha chain variable domain of TCR clone 281992 (TRAV23/DV6, TRAJ37)
CAAGEGSSNTRKLIF

SEQ ID NO: 563984 - protein, 17 aa, Homo sapiens
  CDR3 for beta chain variable domain of TCR clone 281992 (TRBV20-1, TRBJ2-7)
CSATRAGGVAGVEEQYF

SEQ ID NO: 563985 - protein, 15 aa, Homo sapiens
  CDR3 for alpha chain variable domain of TCR clone 281993 (TRAV3, TRAJ47)
CAVRDIGEYGNKLVF

SEQ ID NO: 563986 - protein, 14 aa, Homo sapiens
  CDR3 for beta chain variable domain of TCR clone 281993 (TRBV4-2, TRBJ1-2)
CASSQDRREGGYTF

SEQ ID NO: 563987 - protein, 14 aa, Homo sapiens
  CDR3 for alpha chain variable domain of TCR clone 281994 (TRAV12-2, TRAJ24)
CAMTPADSWGKLQF

SEQ ID NO: 563988 - protein, 13 aa, Homo sapiens
  CDR3 for beta chain variable domain of TCR clone 281994 (TRBV6-4, TRBJ1-5)
CASSADLNQPQHF

SEQ ID NO: 563989 - protein, 11 aa, Homo sapiens
  CDR3 for alpha chain variable domain of TCR clone 281995 (TRAV13-1, TRAJ20)
CAASNDYKLSC

SEQ ID NO: 563990 - protein, 16 aa, Homo sapiens
  CDR3 for beta chain variable domain of TCR clone 281995 (TRBV27, TRBJ2-1)
CASSLSKGFGLDEQFF

SEQ ID NO: 563991 - protein, 15 aa, Homo sapiens
  CDR3 for alpha chain variable domain of TCR clone 281996 (TRAV4, TRAJ39)
CLVGPNNNAGNMLTF

SEQ ID NO: 563992 - protein, 14 aa, Homo sapiens
  CDR3 for beta chain variable domain of TCR clone 281996 (TRBV13, TRBJ2-7)
CASSLKGASYEQYF

SEQ ID NO: 563993 - protein, 14 aa, Homo sapiens
  CDR3 for alpha chain variable domain of TCR clone 281997 (TRAV12-1, TRAJ12)
CVVTRMDSSYKLIF

SEQ ID NO: 563994 - protein, 13 aa, Homo sapiens
  CDR3 for beta chain variable domain of TCR clone 281997 (TRBV20-1, TRBJ1-1)
CSARGWENTEAFF

SEQ ID NO: 563995 - protein, 15 aa, Homo sapiens
  CDR3 for alpha chain variable domain of TCR clone 281998 (TRAV8-2, TRAJ49)
CVVSDPTNTGNQFYF

SEQ ID NO: 563996 - protein, 14 aa, Homo sapiens
  CDR3 for beta chain variable domain of TCR clone 281998 (TRBV7-9, TRBJ2-5)
CASSLDTAQETQYF

SEQ ID NO: 563997 - protein, 13 aa, Homo sapiens
  CDR3 for alpha chain variable domain of TCR clone 281999 (TRAV1-1, TRAJ9)
YAAKNTGGFTTIF

SEQ ID NO: 563998 - protein, 14 aa, Homo sapiens
  CDR3 for beta chain variable domain of TCR clone 281999 (TRBV20-1, TRBJ2-1)
CSAQIGGSANEQFF

SEQ ID NO: 563999 - protein, 14 aa, Homo sapiens
  CDR3 for alpha chain variable domain of TCR clone 282000 (TRAV27, TRAJ17)
CRSTIRAAGNKLTF

SEQ ID NO: 564000 - protein, 16 aa, Homo sapiens
  CDR3 for beta chain variable domain of TCR clone 282000 (TRBV5-7, TRBJ2-5)
CTSTLAPAGGGETQYF

SEQ ID NO: 564001 - protein, 15 aa, Homo sapiens
  CDR3 for alpha chain variable domain of TCR clone 282001 (TRAV3, TRAJ21)
CAVRERTSTNFTLDL

SEQ ID NO: 564002 - protein, 15 aa, Homo sapiens
  CDR3 for beta chain variable domain of TCR clone 282001 (TRBV9, TRBJ1-6)
CASSVAGTGDSPLHF

SEQ ID NO: 564003 - protein, 17 aa, Homo sapiens
  CDR3 for alpha chain variable domain of TCR clone 282002 (TRAV23/DV6, TRAJ57)
CAASSTLSQVGSEKLVF

SEQ ID NO: 564004 - protein, 12 aa, Homo sapiens
  CDR3 for beta chain variable domain of TCR clone 282002 (TRBV7-8, TRBJ1-1)
CASSSLGGEAFF

SEQ ID NO: 564005 - protein, 14 aa, Homo sapiens
  CDR3 for alpha chain variable domain of TCR clone 282003 (TRAV13-2, TRAJ43)
CAEIPTDNNNDIRF

SEQ ID NO: 564006 - protein, 15 aa, Homo sapiens
  CDR3 for beta chain variable domain of TCR clone 282003 (TRBV7-9, TRBJ2-2)
CASGPLDTFPGELFF

SEQ ID NO: 564007 - protein, 14 aa, Homo sapiens
  CDR3 for alpha chain variable domain of TCR clone 282004 (TRAV17, TRAJ11)
CATDTSRGYSTLTC

SEQ ID NO: 564008 - protein, 13 aa, Homo sapiens
  CDR3 for beta chain variable domain of TCR clone 282004 (TRBV19, TRBJ2-5)
CASRDSRRETQYF

SEQ ID NO: 564009 - protein, 12 aa, Homo sapiens
  CDR3 for alpha chain variable domain of TCR clone 282005 (TRAV29/DV5, TRAJ26)
CAAIPSGQNFVF

SEQ ID NO: 564010 - protein, 15 aa, Homo sapiens
  CDR3 for beta chain variable domain of TCR clone 282005 (TRBV19, TRBJ1-5)
CAGSDSGPRNQPQHF

SEQ ID NO: 564011 - protein, 12 aa, Homo sapiens
  CDR3 for alpha chain variable domain of TCR clone 282006 (TRAV13-1, TRAJ21)
CAAKEGFNKFYF

SEQ ID NO: 564012 - protein, 17 aa, Homo sapiens
  CDR3 for beta chain variable domain of TCR clone 282006 (TRBV20-1, TRBJ2-2)
CSASGAGQGGLTGELFF

SEQ ID NO: 564013 - protein, 14 aa, Homo sapiens
  CDR3 for alpha chain variable domain of TCR clone 282007 (TRAV8-3, TRAJ42)
CAVGAWGSQGNLIF

SEQ ID NO: 564014 - protein, 15 aa, Homo sapiens
  CDR3 for beta chain variable domain of TCR clone 282007 (TRBV29-1, TRBJ1-2)
CSVVLEAGSNYGDTF

SEQ ID NO: 564015 - protein, 13 aa, Homo sapiens
  CDR3 for alpha chain variable domain of TCR clone 282008 (TRAV12-1, TRAJ26)
CVVRRNYGQNFVF

SEQ ID NO: 564016 - protein, 11 aa, Homo sapiens
  CDR3 for beta chain variable domain of TCR clone 282008 (TRBV6-3, TRBJ2-3)
CATGQADTQYF

SEQ ID NO: 564017 - protein, 16 aa, Homo sapiens
  CDR3 for alpha chain variable domain of TCR clone 282009 (TRAV12-3, TRAJ53)
CAMSPGSGGSNYKLTF

SEQ ID NO: 564018 - protein, 17 aa, Homo sapiens
  CDR3 for beta chain variable domain of TCR clone 282009 (TRBV13, TRBJ2-7)
CASSLKPGASGTYEQYF

SEQ ID NO: 564019 - protein, 14 aa, Homo sapiens
  CDR3 for alpha chain variable domain of TCR clone 282010 (TRAV12-3, TRAJ12)
CAMSALNSSYKLIF

SEQ ID NO: 564020 - protein, 16 aa, Homo sapiens
  CDR3 for beta chain variable domain of TCR clone 282010 (TRBV7-9, TRBJ2-3)
CASSLQGNPGTDTQYS

SEQ ID NO: 564021 - protein, 14 aa, Homo sapiens
  CDR3 for alpha chain variable domain of TCR clone 282011 (TRAV16, TRAJ15)
CALSDPQAGTALIF

SEQ ID NO: 564022 - protein, 12 aa, Homo sapiens
  CDR3 for beta chain variable domain of TCR clone 282011 (TRBV18, TRBJ2-5)
CASSPSKETQYF

SEQ ID NO: 564023 - protein, 14 aa, Homo sapiens
  CDR3 for alpha chain variable domain of TCR clone 282012 (TRAV10, TRAJ39)
CVVSAGGAGNMLTV

SEQ ID NO: 564024 - protein, 16 aa, Homo sapiens
  CDR3 for beta chain variable domain of TCR clone 282012 (TRBV2, TRBJ2-7)
CASSEPWTGPSYEQYF

SEQ ID NO: 564025 - protein, 15 aa, Homo sapiens
  CDR3 for alpha chain variable domain of TCR clone 282013 (TRAV12-2, TRAJ43)
CAFDIRFGAGTRLTV

SEQ ID NO: 564026 - protein, 16 aa, Homo sapiens
  CDR3 for beta chain variable domain of TCR clone 282013 (TRBV13, TRBJ2-3)
CQQPLQGSGGRNTQYF

SEQ ID NO: 564027 - protein, 15 aa, Homo sapiens
  CDR3 for alpha chain variable domain of TCR clone 282014 (TRAV26-1, TRAJ29)
CIVRVEGSGNTPLFF

SEQ ID NO: 564028 - protein, 15 aa, Homo sapiens
  CDR3 for beta chain variable domain of TCR clone 282014 (TRBV7-9, TRBJ1-5)
CASSQGRQPNQPQHF

SEQ ID NO: 564029 - protein, 15 aa, Homo sapiens
  CDR3 for alpha chain variable domain of TCR clone 282015 (TRAV8-3, TRAJ6)
CAVGPRGGGSYIPTF

SEQ ID NO: 564030 - protein, 14 aa, Homo sapiens
  CDR3 for beta chain variable domain of TCR clone 282015 (TRBV19, TRBJ2-2)
CASGTGQGAGELFF

SEQ ID NO: 564031 - protein, 15 aa, Homo sapiens
  CDR3 for alpha chain variable domain of TCR clone 282016 (TRAV27, TRAJ38)
CAGRFNAGNNRKLIW

SEQ ID NO: 564032 - protein, 14 aa, Homo sapiens
  CDR3 for beta chain variable domain of TCR clone 282016 (TRBV27, TRBJ2-1)
CAGSIAETYNEQFF

SEQ ID NO: 564033 - protein, 14 aa, Homo sapiens
  CDR3 for alpha chain variable domain of TCR clone 282017 (TRAV3, TRAJ22)
CAVRDPGSARQLTF

SEQ ID NO: 564034 - protein, 15 aa, Homo sapiens
  CDR3 for beta chain variable domain of TCR clone 282017 (TRBV11-2, TRBJ2-5)
CASSLASYSGETQYF

SEQ ID NO: 564035 - protein, 12 aa, Homo sapiens
  CDR3 for alpha chain variable domain of TCR clone 282018 (TRAV13-1, TRAJ21)
CAAKEGFNKFYF

SEQ ID NO: 564036 - protein, 15 aa, Homo sapiens
  CDR3 for beta chain variable domain of TCR clone 282018 (TRBV2, TRBJ1-2)
CASSEIGGANYGYTF

SEQ ID NO: 564037 - protein, 14 aa, Homo sapiens
  CDR3 for alpha chain variable domain of TCR clone 282019 (TRAV23/DV6, TRAJ27)
CAASMDTNAGKSNF

SEQ ID NO: 564038 - protein, 13 aa, Homo sapiens
  CDR3 for beta chain variable domain of TCR clone 282019 (TRBV20-1, TRBJ1-5)
CSASGRGNQPQHF

SEQ ID NO: 564039 - protein, 13 aa, Homo sapiens
  CDR3 for alpha chain variable domain of TCR clone 282020 (TRAV17, TRAJ9)
CATDYTGGFKTIF

SEQ ID NO: 564040 - protein, 14 aa, Homo sapiens
  CDR3 for beta chain variable domain of TCR clone 282020 (TRBV19, TRBJ2-5)
CAGSMTGQQETQFF

SEQ ID NO: 564041 - protein, 13 aa, Homo sapiens
  CDR3 for alpha chain variable domain of TCR clone 282021 (TRAV21, TRAJ37)
CAVSSGNTGKLIF

SEQ ID NO: 564042 - protein, 15 aa, Homo sapiens
  CDR3 for beta chain variable domain of TCR clone 282021 (TRBV28, TRBJ2-1)
CASSGLAEVDNEQFF

SEQ ID NO: 564043 - protein, 10 aa, Homo sapiens
  CDR3 for alpha chain variable domain of TCR clone 282022 (TRAV1-2, TRAJ31)
CAFFYARLMF

SEQ ID NO: 564044 - protein, 15 aa, Homo sapiens
  CDR3 for beta chain variable domain of TCR clone 282022 (TRBV4-1, TRBJ1-4)
CASSDTGGTNEKLFF

SEQ ID NO: 564045 - protein, 12 aa, Homo sapiens
  CDR3 for alpha chain variable domain of TCR clone 282023 (TRAV12-1, TRAJ6)
CVVSERSYIPTF

SEQ ID NO: 564046 - protein, 21 aa, Homo sapiens
  CDR3 for beta chain variable domain of TCR clone 282023 (TRBV7-3, TRBJ2-1)
GGTQPCISVQAAYGLAGAQFF

SEQ ID NO: 564047 - protein, 15 aa, Homo sapiens
  CDR3 for alpha chain variable domain of TCR clone 282024 (TRAV26-2, TRAJ28)
CILVESGAGSYQLTF

SEQ ID NO: 564048 - protein, 13 aa, Homo sapiens
  CDR3 for beta chain variable domain of TCR clone 282024 (TRBV12-4, TRBJ2-2)
CASSITGSGELFL

SEQ ID NO: 564049 - protein, 16 aa, Homo sapiens
  CDR3 for alpha chain variable domain of TCR clone 282025 (TRAV16, TRAJ52)
CALSAAGGTSYGKLTF

SEQ ID NO: 564050 - protein, 16 aa, Homo sapiens
  CDR3 for beta chain variable domain of TCR clone 282025 (TRBV12-4, TRBJ1-5)
CASSRPVGGSNQAQHF

SEQ ID NO: 564051 - protein, 16 aa, Homo sapiens
  CDR3 for alpha chain variable domain of TCR clone 282026 (TRAV1-2, TRAJ10)
CAVRGVLTGGGNKLTF

SEQ ID NO: 564052 - protein, 17 aa, Homo sapiens
  CDR3 for beta chain variable domain of TCR clone 282026 (TRBV15, TRBJ1-5)
CTTSRAPPGTRNQPQHF

SEQ ID NO: 564053 - protein, 16 aa, Homo sapiens
  CDR3 for alpha chain variable domain of TCR clone 282027 (TRAV23/DV6, TRAJ57)
CRSSTLSQGGSEKLVF

SEQ ID NO: 564054 - protein, 14 aa, Homo sapiens
  CDR3 for beta chain variable domain of TCR clone 282027 (TRBV25-1, TRBJ1-1)
CASTHLGGNTEAFF

SEQ ID NO: 564055 - protein, 14 aa, Homo sapiens
  CDR3 for alpha chain variable domain of TCR clone 282028 (TRAV1-2, TRAJ16)
CAVNRFSDGQKLLF

SEQ ID NO: 564056 - protein, 17 aa, Homo sapiens
  CDR3 for beta chain variable domain of TCR clone 282028 (TRBV7-2, TRBJ2-7)
CASSFETSGSNSSTSGR

SEQ ID NO: 564057 - protein, 13 aa, Homo sapiens
  CDR3 for alpha chain variable domain of TCR clone 282029 (TRAV27, TRAJ43)
CAGAGNNNYDMRF

SEQ ID NO: 564058 - protein, 14 aa, Homo sapiens
  CDR3 for beta chain variable domain of TCR clone 282029 (TRBV7-2, TRBJ2-7)
CASRSQGAAYEQYF

SEQ ID NO: 564059 - protein, 11 aa, Homo sapiens
  CDR3 for alpha chain variable domain of TCR clone 282030 (TRAV13-1, TRAJ30)
CAASRGDKIIF

SEQ ID NO: 564060 - protein, 15 aa, Homo sapiens
  CDR3 for beta chain variable domain of TCR clone 282030 (TRBV18, TRBJ1-1)
CASSPSSWVNTEAFF

SEQ ID NO: 564061 - protein, 11 aa, Homo sapiens
  CDR3 for alpha chain variable domain of TCR clone 282031 (TRAV17, TRAJ9)
CGFTGGFKTIF

SEQ ID NO: 564062 - protein, 12 aa, Homo sapiens
  CDR3 for beta chain variable domain of TCR clone 282031 (TRBV7-9, TRBJ1-4)
CASSTDREKLFF

SEQ ID NO: 564063 - protein, 13 aa, Homo sapiens
  CDR3 for alpha chain variable domain of TCR clone 282032 (TRAV27, TRAJ45)
CRSSGGGADGLTF

SEQ ID NO: 564064 - protein, 16 aa, Homo sapiens
  CDR3 for beta chain variable domain of TCR clone 282032 (TRBV12-4, TRBJ2-5)
CASSFFVRGRQETQYF

SEQ ID NO: 564065 - protein, 14 aa, Homo sapiens
  CDR3 for alpha chain variable domain of TCR clone 282033 (TRAV1-2, TRAJ16)
CAVNRSSDGQKLLF

SEQ ID NO: 564066 - protein, 14 aa, Homo sapiens
  CDR3 for beta chain variable domain of TCR clone 282033 (TRBV7-9, TRBJ2-7)
CASSPRTGTYEQYF

SEQ ID NO: 564067 - protein, 12 aa, Homo sapiens
  CDR3 for alpha chain variable domain of TCR clone 282034 (TRAV21, TRAJ33)
CAKMDSNYQLIW

SEQ ID NO: 564068 - protein, 14 aa, Homo sapiens
  CDR3 for beta chain variable domain of TCR clone 282034 (TRBV5-4, TRBJ1-1)
CASSLDSRRDEAFF

SEQ ID NO: 564069 - protein, 16 aa, Homo sapiens
  CDR3 for alpha chain variable domain of TCR clone 282035 (TRAV30, TRAJ24)
CGTEIVDVDSWGKFKF

SEQ ID NO: 564070 - protein, 14 aa, Homo sapiens
  CDR3 for beta chain variable domain of TCR clone 282035 (TRBV12-5, TRBJ2-5)
CASGSRTHQETQYF

SEQ ID NO: 564071 - protein, 15 aa, Homo sapiens
  CDR3 for alpha chain variable domain of TCR clone 282036 (TRAV26-1, TRAJ23)
CIVRVAINQGGKLIF

SEQ ID NO: 564072 - protein, 16 aa, Homo sapiens
  CDR3 for beta chain variable domain of TCR clone 282036 (TRBV2, TRBJ2-1)
CASSVGGSLSYNEQFF

SEQ ID NO: 564073 - protein, 13 aa, Homo sapiens
  CDR3 for alpha chain variable domain of TCR clone 282037 (TRAV1-1, TRAJ9)
CAAKNTEGFKTIF

SEQ ID NO: 564074 - protein, 12 aa, Homo sapiens
  CDR3 for beta chain variable domain of TCR clone 282037 (TRBV11-2, TRBJ2-2)
CASSLGGGELFF

SEQ ID NO: 564075 - protein, 11 aa, Homo sapiens
  CDR3 for alpha chain variable domain of TCR clone 282038 (TRAV3, TRAJ21)
CAVGNFNKFYS

SEQ ID NO: 564076 - protein, 16 aa, Homo sapiens
  CDR3 for beta chain variable domain of TCR clone 282038 (TRBV19, TRBJ2-1)
CAGSKAGPSSYNEQFF

SEQ ID NO: 564077 - protein, 12 aa, Homo sapiens
  CDR3 for alpha chain variable domain of TCR clone 282039 (TRAV12-3, TRAJ17)
CAMTLTGHKLTF

SEQ ID NO: 564078 - protein, 13 aa, Homo sapiens
  CDR3 for beta chain variable domain of TCR clone 282039 (TRBV5-1, TRBJ1-1)
CASSADWDTEAFF

SEQ ID NO: 564079 - protein, 10 aa, Homo sapiens
  CDR3 for alpha chain variable domain of TCR clone 282040 (TRAV12-1, TRAJ20)
CVVNPRKLSF

SEQ ID NO: 564080 - protein, 15 aa, Homo sapiens
  CDR3 for beta chain variable domain of TCR clone 282040 (TRBV28, TRBJ1-5)
CASSPPGQFNQPQHF

SEQ ID NO: 564081 - protein, 14 aa, Homo sapiens
  CDR3 for alpha chain variable domain of TCR clone 282041 (TRAV27, TRAJ42)
RAGGDGGSQGNLIF

SEQ ID NO: 564082 - protein, 14 aa, Homo sapiens
  CDR3 for beta chain variable domain of TCR clone 282041 (TRBV19, TRBJ1-2)
CASSRQGSSIGYTF

SEQ ID NO: 564083 - protein, 14 aa, Homo sapiens
  CDR3 for alpha chain variable domain of TCR clone 282042 (TRAV8-2, TRAJ23)
CVVSDDNQGGKLIF

SEQ ID NO: 564084 - protein, 17 aa, Homo sapiens
  CDR3 for beta chain variable domain of TCR clone 282042 (TRBV7-8, TRBJ2-7)
CASSFTSGRPPSYEQYF

SEQ ID NO: 564085 - protein, 15 aa, Homo sapiens
  CDR3 for alpha chain variable domain of TCR clone 282043 (TRAV8-3, TRAJ45)
CASSYSGGGADGLTF

SEQ ID NO: 564086 - protein, 18 aa, Homo sapiens
  CDR3 for beta chain variable domain of TCR clone 282043 (TRBV18, TRBJ1-3)
CASPPRGGAGPSGNTIYF

SEQ ID NO: 564087 - protein, 13 aa, Homo sapiens
  CDR3 for alpha chain variable domain of TCR clone 282044 (TRAV12-2, TRAJ15)
CAVFNQAGTALIF

SEQ ID NO: 564088 - protein, 14 aa, Homo sapiens
  CDR3 for beta chain variable domain of TCR clone 282044 (TRBV7-8, TRBJ1-5)
CKQPGGGADQPQHF

SEQ ID NO: 564089 - protein, 13 aa, Homo sapiens
  CDR3 for alpha chain variable domain of TCR clone 282045 (TRAV8-4, TRAJ30)
CAVSVNRDDKIIF

SEQ ID NO: 564090 - protein, 14 aa, Homo sapiens
  CDR3 for beta chain variable domain of TCR clone 282045 (TRBV7-2, TRBJ2-7)
CASSPKTSFYEQYF

SEQ ID NO: 564091 - protein, 16 aa, Homo sapiens
  CDR3 for alpha chain variable domain of TCR clone 282046 (TRAV30, TRAJ24)
CGTEIEDADSWGKFQF

SEQ ID NO: 564092 - protein, 13 aa, Homo sapiens
  CDR3 for beta chain variable domain of TCR clone 282046 (TRBV18, TRBJ1-2)
CASSASATEGYTF

SEQ ID NO: 564093 - protein, 17 aa, Homo sapiens
  CDR3 for alpha chain variable domain of TCR clone 282047 (TRAV8-6, TRAJ8)
CVVKEGIENTGFQKLVF

SEQ ID NO: 564094 - protein, 12 aa, Homo sapiens
  CDR3 for beta chain variable domain of TCR clone 282047 (TRBV19, TRBJ1-4)
CASKDWPGGLFF

SEQ ID NO: 564095 - protein, 14 aa, Homo sapiens
  CDR3 for alpha chain variable domain of TCR clone 282048 (TRAV8-4, TRAJ33)
CAVSSFDSNYQLIW

SEQ ID NO: 564096 - protein, 13 aa, Homo sapiens
  CDR3 for beta chain variable domain of TCR clone 282048 (TRBV7-9, TRBJ2-7)
CASSFAGAYEQYF

SEQ ID NO: 564097 - protein, 13 aa, Homo sapiens
  CDR3 for alpha chain variable domain of TCR clone 282049 (TRAV20, TRAJ21)
CAVEGYNFNKFYF

SEQ ID NO: 564098 - protein, 14 aa, Homo sapiens
  CDR3 for beta chain variable domain of TCR clone 282049 (TRBV3-1, TRBJ2-5)
CASSQGPDHETQYF

SEQ ID NO: 564099 - protein, 14 aa, Homo sapiens
  CDR3 for alpha chain variable domain of TCR clone 282050 (TRAV26-1, TRAJ38)
CIADNAGNNRKLIW

SEQ ID NO: 564100 - protein, 17 aa, Homo sapiens
  CDR3 for beta chain variable domain of TCR clone 282050 (TRBV7-9, TRBJ2-3)
CARSPTVAGDLTDTQYF

SEQ ID NO: 564101 - protein, 15 aa, Homo sapiens
  CDR3 for alpha chain variable domain of TCR clone 282051 (TRAV26-1, TRAJ29)
CIVRVEGSGNTPLVV

SEQ ID NO: 564102 - protein, 14 aa, Homo sapiens
  CDR3 for beta chain variable domain of TCR clone 282051 (TRBV25-1, TRBJ1-1)
CASTHLGGNTEAFF

SEQ ID NO: 564103 - protein, 15 aa, Homo sapiens
  CDR3 for alpha chain variable domain of TCR clone 282052 (TRAV24, TRAJ28)
CARLWDGAGSYQLTF

SEQ ID NO: 564104 - protein, 15 aa, Homo sapiens
  CDR3 for beta chain variable domain of TCR clone 282052 (TRBV7-3, TRBJ2-5)
CASSLIAGGQETQYF

SEQ ID NO: 564105 - protein, 16 aa, Homo sapiens
  CDR3 for alpha chain variable domain of TCR clone 282053 (TRAV12-3, TRAJ53)
CAMSPRSGGGNYKLTF

SEQ ID NO: 564106 - protein, 11 aa, Homo sapiens
  CDR3 for beta chain variable domain of TCR clone 282053 (TRBV29-1, TRBJ2-5)
CSEDRTGTQYC

SEQ ID NO: 564107 - protein, 14 aa, Homo sapiens
  CDR3 for alpha chain variable domain of TCR clone 282054 (TRAV13-1, TRAJ35)
CAASKGGFGNVPHC

SEQ ID NO: 564108 - protein, 17 aa, Homo sapiens
  CDR3 for beta chain variable domain of TCR clone 282054 (TRBV11-2, TRBJ2-1)
CASSLYPPGVEYNEQFF

SEQ ID NO: 564109 - protein, 15 aa, Homo sapiens
  CDR3 for alpha chain variable domain of TCR clone 282055 (TRAV17, TRAJ29)
CATDAFRKHTSCLWK

SEQ ID NO: 564110 - protein, 19 aa, Homo sapiens
  CDR3 for beta chain variable domain of TCR clone 282055 (TRBV7-2, TRBJ2-3)
CASSFLSRNWGGGTNTQYF

SEQ ID NO: 564111 - protein, 23 aa, Homo sapiens
  CDR3 for alpha chain variable domain of TCR clone 282056 (TRAV26-1, )
CIADNDGNNHIQNPDPAVYQLRD

SEQ ID NO: 564112 - protein, 15 aa, Homo sapiens
  CDR3 for beta chain variable domain of TCR clone 282056 (TRBV27, TRBJ2-1)
CASSNGGGSSNEQFF

SEQ ID NO: 564113 - protein, 14 aa, Homo sapiens
  CDR3 for alpha chain variable domain of TCR clone 282057 (TRAV35, TRAJ46)
CAGPQKSSGDKLTF

SEQ ID NO: 564114 - protein, 15 aa, Homo sapiens
  CDR3 for beta chain variable domain of TCR clone 282057 (TRBV7-9, TRBJ1-5)
CASSQGHQPNQPQHF

SEQ ID NO: 564115 - protein, 12 aa, Homo sapiens
  CDR3 for alpha chain variable domain of TCR clone 282058 (TRAV12-3, TRAJ17)
CAMTLTGNKLPF

SEQ ID NO: 564116 - protein, 15 aa, Homo sapiens
  CDR3 for beta chain variable domain of TCR clone 282058 (TRBV20-1, TRBJ2-7)
CSARDRVSGKDEQYF

SEQ ID NO: 564117 - protein, 14 aa, Homo sapiens
  CDR3 for alpha chain variable domain of TCR clone 282059 (TRAV1-2, TRAJ8)
CAVREDTGFQKLVF

SEQ ID NO: 564118 - protein, 14 aa, Homo sapiens
  CDR3 for beta chain variable domain of TCR clone 282059 (TRBV15, TRBJ2-3)
CATRSVTSTDTQYF

SEQ ID NO: 564119 - protein, 15 aa, Homo sapiens
  CDR3 for alpha chain variable domain of TCR clone 282060 (TRAV3, TRAJ21)
CAVRDRRYNFNKFYF

SEQ ID NO: 564120 - protein, 15 aa, Homo sapiens
  CDR3 for beta chain variable domain of TCR clone 282060 (TRBV11-3, TRBJ2-5)
CASSLRGRVQETQYF

SEQ ID NO: 564121 - protein, 11 aa, Homo sapiens
  CDR3 for alpha chain variable domain of TCR clone 282061 (TRAV1-2, TRAJ40)
CAVPGTYKYIF

SEQ ID NO: 564122 - protein, 13 aa, Homo sapiens
  CDR3 for beta chain variable domain of TCR clone 282061 (TRBV19, TRBJ1-3)
CASRLSLGNTIYF

SEQ ID NO: 564123 - protein, 16 aa, Homo sapiens
  CDR3 for alpha chain variable domain of TCR clone 282062 (TRAV12-3, TRAJ53)
CAMSPGGGGSNYKLTF

SEQ ID NO: 564124 - protein, 12 aa, Homo sapiens
  CDR3 for beta chain variable domain of TCR clone 282062 (TRBV7-8, TRBJ2-7)
CASSLGDREQYF

SEQ ID NO: 564125 - protein, 14 aa, Homo sapiens
  CDR3 for alpha chain variable domain of TCR clone 282063 (TRAV12-3, TRAJ10)
SHLPLTGGGNKLTF

SEQ ID NO: 564126 - protein, 23 aa, Homo sapiens
  CDR3 for beta chain variable domain of TCR clone 282063 (TRBV7-9, TRBJ1-4)
RGTRPCISVPAAGQGGFNEKLFF

SEQ ID NO: 564127 - protein, 10 aa, Homo sapiens
  CDR3 for alpha chain variable domain of TCR clone 282064 (TRAV1-2, TRAJ20)
CACNDYKLSF

SEQ ID NO: 564128 - protein, 16 aa, Homo sapiens
  CDR3 for beta chain variable domain of TCR clone 282064 (TRBV20-1, TRBJ2-1)
CSARDLEQGMNKEQFF

SEQ ID NO: 564129 - protein, 15 aa, Homo sapiens
  CDR3 for alpha chain variable domain of TCR clone 282065 (TRAV8-4, TRAJ3)
CAVTGESLVHQCFQD

SEQ ID NO: 564130 - protein, 16 aa, Homo sapiens
  CDR3 for beta chain variable domain of TCR clone 282065 (TRBV4-2, TRBJ1-1)
CASSQAGFGMNTEAFF

SEQ ID NO: 564131 - protein, 14 aa, Homo sapiens
  CDR3 for alpha chain variable domain of TCR clone 282066 (TRAV12-1, TRAJ30)
CVPTGTNRDDKIIF

SEQ ID NO: 564132 - protein, 16 aa, Homo sapiens
  CDR3 for beta chain variable domain of TCR clone 282066 (TRBV4-3, TRBJ2-3)
CASSLGLAGEGDTQYF

SEQ ID NO: 564133 - protein, 15 aa, Homo sapiens
  CDR3 for alpha chain variable domain of TCR clone 282067 (TRAV21, TRAJ52)
CAVRGGGTSYGKLSF

SEQ ID NO: 564134 - protein, 12 aa, Homo sapiens
  CDR3 for beta chain variable domain of TCR clone 282067 (TRBV11-2, TRBJ2-2)
CASSLGGGELFF

SEQ ID NO: 564135 - protein, 19 aa, Homo sapiens
  CDR3 for alpha chain variable domain of TCR clone 282068 (TRAV2, TRAJ20)
ILQVREADAAVYRDCKLSF

SEQ ID NO: 564136 - protein, 22 aa, Homo sapiens
  CDR3 for beta chain variable domain of TCR clone 282068 (TRBV6-1, TRBJ1-3)
CASVQGGGWKHHIFWRGKLAHC

SEQ ID NO: 564137 - protein, 14 aa, Homo sapiens
  CDR3 for alpha chain variable domain of TCR clone 282069 (TRAV1-2, TRAJ8)
CAVREDTGFQKLVF

SEQ ID NO: 564138 - protein, 14 aa, Homo sapiens
  CDR3 for beta chain variable domain of TCR clone 282069 (TRBV28, TRBJ2-2)
CASSMQGYTGELFF

SEQ ID NO: 564139 - protein, 12 aa, Homo sapiens
  CDR3 for alpha chain variable domain of TCR clone 282070 (TRAV12-2, TRAJ9)
CRERTGGFKTIF

SEQ ID NO: 564140 - protein, 13 aa, Homo sapiens
  CDR3 for beta chain variable domain of TCR clone 282070 (TRBV7-2, TRBJ2-5)
CASSRGGLETQYF

SEQ ID NO: 564141 - protein, 13 aa, Homo sapiens
  CDR3 for alpha chain variable domain of TCR clone 282071 (TRAV27, TRAJ45)
CRSSGGGADGLTF

SEQ ID NO: 564142 - protein, 12 aa, Homo sapiens
  CDR3 for beta chain variable domain of TCR clone 282071 (TRBV11-2, TRBJ1-4)
CASSTDREKLFF

SEQ ID NO: 564143 - protein, 15 aa, Homo sapiens
  CDR3 for alpha chain variable domain of TCR clone 282072 (TRAV3, TRAJ5)
CAVRDLYTGRRALTF

SEQ ID NO: 564144 - protein, 15 aa, Homo sapiens
  CDR3 for beta chain variable domain of TCR clone 282072 (TRBV28, TRBJ2-5)
CASSPPWSYQETQYF

SEQ ID NO: 564145 - protein, 15 aa, Homo sapiens
  CDR3 for alpha chain variable domain of TCR clone 282073 (TRAV8-4, TRAJ37)
CAVSRGSGNTGKLNF

SEQ ID NO: 564146 - protein, 15 aa, Homo sapiens
  CDR3 for beta chain variable domain of TCR clone 282073 (TRBV5-1, TRBJ2-7)
CASSLDLTISYEQYF

SEQ ID NO: 564147 - protein, 14 aa, Homo sapiens
  CDR3 for alpha chain variable domain of TCR clone 282074 (TRAV26-1, TRAJ38)
CIADNAGNNRKLIW

SEQ ID NO: 564148 - protein, 14 aa, Homo sapiens
  CDR3 for beta chain variable domain of TCR clone 282074 (TRBV4-1, TRBJ2-2)
CASSPAGNHGELFF

SEQ ID NO: 564149 - protein, 13 aa, Homo sapiens
  CDR3 for alpha chain variable domain of TCR clone 282075 (TRAV38-2/DV8, TRAJ43)
CAYRGYNNNDMRF

SEQ ID NO: 564150 - protein, 15 aa, Homo sapiens
  CDR3 for beta chain variable domain of TCR clone 282075 (TRBV28, TRBJ2-1)
CASSIIAGGRSEQFF

SEQ ID NO: 564151 - protein, 14 aa, Homo sapiens
  CDR3 for alpha chain variable domain of TCR clone 282076 (TRAV1-2, TRAJ27)
CAVRSGINAGKSTF

SEQ ID NO: 564152 - protein, 15 aa, Homo sapiens
  CDR3 for beta chain variable domain of TCR clone 282076 (TRBV18, TRBJ2-7)
CASSPLQGRTYEQYF

SEQ ID NO: 564153 - protein, 10 aa, Homo sapiens
  CDR3 for alpha chain variable domain of TCR clone 282077 (TRAV5, TRAJ34)
CAEDTDKLIF

SEQ ID NO: 564154 - protein, 13 aa, Homo sapiens
  CDR3 for beta chain variable domain of TCR clone 282077 (TRBV7-9, TRBJ2-5)
CASLPSGRETQYF

SEQ ID NO: 564155 - protein, 14 aa, Homo sapiens
  CDR3 for alpha chain variable domain of TCR clone 282078 (TRAV12-2, TRAJ13)
CAVKKTGGYQKVTF

SEQ ID NO: 564156 - protein, 13 aa, Homo sapiens
  CDR3 for beta chain variable domain of TCR clone 282078 (TRBV4-1, TRBJ2-5)
CASSLTRGETQYF

SEQ ID NO: 564157 - protein, 16 aa, Homo sapiens
  CDR3 for alpha chain variable domain of TCR clone 282079 (TRAV14/DV4, TRAJ53)
CAMREGGGGSNYKLTF

SEQ ID NO: 564158 - protein, 12 aa, Homo sapiens
  CDR3 for beta chain variable domain of TCR clone 282079 (TRBV5-1, TRBJ2-3)
CASSLAADTQYF

SEQ ID NO: 564159 - protein, 11 aa, Homo sapiens
  CDR3 for alpha chain variable domain of TCR clone 282080 (TRAV2, TRAJ13)
CASGGYQKVTF

SEQ ID NO: 564160 - protein, 13 aa, Homo sapiens
  CDR3 for beta chain variable domain of TCR clone 282080 (TRBV4-2, TRBJ1-2)
CASSQERGLGYTF

SEQ ID NO: 564161 - protein, 15 aa, Homo sapiens
  CDR3 for alpha chain variable domain of TCR clone 282081 (TRAV12-2, TRAJ53)
CAVNGGGGSNHKLTF

SEQ ID NO: 564162 - protein, 15 aa, Homo sapiens
  CDR3 for beta chain variable domain of TCR clone 282081 (TRBV19, TRBJ1-5)
CASSYSGPRNQPQHF

SEQ ID NO: 564163 - protein, 11 aa, Homo sapiens
  CDR3 for alpha chain variable domain of TCR clone 282082 (TRAV12-2, TRAJ33)
CAVTSNYQLIW

SEQ ID NO: 564164 - protein, 14 aa, Homo sapiens
  CDR3 for beta chain variable domain of TCR clone 282082 (TRBV28, TRBJ2-2)
CASRIRSGTWELFF

SEQ ID NO: 564165 - protein, 14 aa, Homo sapiens
  CDR3 for alpha chain variable domain of TCR clone 282083 (TRAV13-1, TRAJ35)
CAASKGGFGNVLHC

SEQ ID NO: 564166 - protein, 13 aa, Homo sapiens
  CDR3 for beta chain variable domain of TCR clone 282083 (TRBV28, TRBJ1-2)
CAGRDRGNYGYTF

SEQ ID NO: 564167 - protein, 17 aa, Homo sapiens
  CDR3 for alpha chain variable domain of TCR clone 282084 (TRAV23/DV6, TRAJ3)
CSNPFCFGWSSASKIIF

SEQ ID NO: 564168 - protein, 15 aa, Homo sapiens
  CDR3 for beta chain variable domain of TCR clone 282084 (TRBV19, TRBJ1-6)
CASSTQGAVGSPLHF

SEQ ID NO: 564169 - protein, 14 aa, Homo sapiens
  CDR3 for alpha chain variable domain of TCR clone 282085 (TRAV1-2, TRAJ16)
CSVNRFSDGQKLLF

SEQ ID NO: 564170 - protein, 14 aa, Homo sapiens
  CDR3 for beta chain variable domain of TCR clone 282085 (TRBV7-9, TRBJ2-1)
CASSPRDSLYEQFF

SEQ ID NO: 564171 - protein, 14 aa, Homo sapiens
  CDR3 for alpha chain variable domain of TCR clone 282086 (TRAV29/DV5, TRAJ45)
CAASFRGGADGLTF

SEQ ID NO: 564172 - protein, 11 aa, Homo sapiens
  CDR3 for beta chain variable domain of TCR clone 282086 (TRBV6-1, TRBJ2-1)
CASISSNEQFF

SEQ ID NO: 564173 - protein, 17 aa, Homo sapiens
  CDR3 for alpha chain variable domain of TCR clone 282087 (TRAV4, TRAJ13)
CLVGVRGSSVGYQKVTF

SEQ ID NO: 564174 - protein, 16 aa, Homo sapiens
  CDR3 for beta chain variable domain of TCR clone 282087 (TRBV28, TRBJ2-7)
CASSLFFETGGHEQYF

SEQ ID NO: 564175 - protein, 15 aa, Homo sapiens
  CDR3 for alpha chain variable domain of TCR clone 282088 (TRAV17, TRAJ57)
CATGPSQGGSEKLVF

SEQ ID NO: 564176 - protein, 14 aa, Homo sapiens
  CDR3 for beta chain variable domain of TCR clone 282088 (TRBV19, TRBJ2-1)
CASSPGLAPNEQFF

SEQ ID NO: 564177 - protein, 14 aa, Homo sapiens
  CDR3 for alpha chain variable domain of TCR clone 282089 (TRAV12-3, TRAJ58)
CAMSTESSGSRLTF

SEQ ID NO: 564178 - protein, 13 aa, Homo sapiens
  CDR3 for beta chain variable domain of TCR clone 282089 (TRBV27, TRBJ2-3)
CASSWGRTDTRYF

SEQ ID NO: 564179 - protein, 14 aa, Homo sapiens
  CDR3 for alpha chain variable domain of TCR clone 282090 (TRAV1-2, TRAJ8)
CAVREDTGFQKLVF

SEQ ID NO: 564180 - protein, 17 aa, Homo sapiens
  CDR3 for beta chain variable domain of TCR clone 282090 (TRBV7-8, TRBJ2-6)
CASSAGTGGAGDNVLTF

SEQ ID NO: 564181 - protein, 12 aa, Homo sapiens
  CDR3 for alpha chain variable domain of TCR clone 282091 (TRAV30, TRAJ39)
CGRGNAGNMLTF

SEQ ID NO: 564182 - protein, 13 aa, Homo sapiens
  CDR3 for beta chain variable domain of TCR clone 282091 (TRBV7-3, TRBJ1-1)
CASSQDWGAEAFF

SEQ ID NO: 564183 - protein, 13 aa, Homo sapiens
  CDR3 for alpha chain variable domain of TCR clone 282092 (TRAV3, TRAJ20)
CAVRSLNDHKLSF

SEQ ID NO: 564184 - protein, 13 aa, Homo sapiens
  CDR3 for beta chain variable domain of TCR clone 282092 (TRBV6-1, TRBJ2-1)
CAGMDPTNNEQFF

SEQ ID NO: 564185 - protein, 18 aa, Homo sapiens
  CDR3 for alpha chain variable domain of TCR clone 282093 (TRAV21, TRAJ52)
CAVRPSPAGGTSYGKLTF

SEQ ID NO: 564186 - protein, 18 aa, Homo sapiens
  CDR3 for beta chain variable domain of TCR clone 282093 (TRBV19, TRBJ2-2)
CASSRPPSGSLNTGELFF

SEQ ID NO: 564187 - protein, 18 aa, Homo sapiens
  CDR3 for alpha chain variable domain of TCR clone 282094 (TRAV13-1, TRAJ52)
CAASKRIAGGTSYGKLTF

SEQ ID NO: 564188 - protein, 13 aa, Homo sapiens
  CDR3 for beta chain variable domain of TCR clone 282094 (TRBV29-1, TRBJ2-1)
CSVEGGRVNEQFF

SEQ ID NO: 564189 - protein, 13 aa, Homo sapiens
  CDR3 for alpha chain variable domain of TCR clone 282095 (TRAV13-2, TRAJ48)
CAEMDFGNYKLTF

SEQ ID NO: 564190 - protein, 15 aa, Homo sapiens
  CDR3 for beta chain variable domain of TCR clone 282095 (TRBV7-9, TRBJ1-6)
CASSSPGRGNSPLHF

SEQ ID NO: 564191 - protein, 10 aa, Homo sapiens
  CDR3 for alpha chain variable domain of TCR clone 282096 (TRAV30, TRAJ43)
CGTGVGDMRF

SEQ ID NO: 564192 - protein, 13 aa, Homo sapiens
  CDR3 for beta chain variable domain of TCR clone 282096 (TRBV12-4, TRBJ1-2)
CASSLRQGKGYTF

SEQ ID NO: 564193 - protein, 15 aa, Homo sapiens
  CDR3 for alpha chain variable domain of TCR clone 282097 (TRAV8-3, TRAJ11)
CAVGLLNSGYSTLTF

SEQ ID NO: 564194 - protein, 14 aa, Homo sapiens
  CDR3 for beta chain variable domain of TCR clone 282097 (TRBV18, TRBJ2-7)
CASSPRGGAYEQYF

SEQ ID NO: 564195 - protein, 16 aa, Homo sapiens
  CDR3 for alpha chain variable domain of TCR clone 282098 (TRAV12-1, TRAJ28)
CVLIAYSGAGSYQLTF

SEQ ID NO: 564196 - protein, 15 aa, Homo sapiens
  CDR3 for beta chain variable domain of TCR clone 282098 (TRBV14, TRBJ1-1)
CASSQEGMGFTEAFF

SEQ ID NO: 564197 - protein, 15 aa, Homo sapiens
  CDR3 for alpha chain variable domain of TCR clone 282099 (TRAV12-3, TRAJ49)
CAMAVTPNTGNQFYF

SEQ ID NO: 564198 - protein, 19 aa, Homo sapiens
  CDR3 for beta chain variable domain of TCR clone 282099 (TRBV25-1, TRBJ2-2)
CAILVYRVDRGRKTGELFF

SEQ ID NO: 564199 - protein, 17 aa, Homo sapiens
  CDR3 for alpha chain variable domain of TCR clone 282100 (TRAV4, TRAJ13)
CLVGDNLGVTRKLPLEL

SEQ ID NO: 564200 - protein, 16 aa, Homo sapiens
  CDR3 for beta chain variable domain of TCR clone 282100 (TRBV12-5, TRBJ2-5)
CASGPRTSGNQETQYF

SEQ ID NO: 564201 - protein, 15 aa, Homo sapiens
  CDR3 for alpha chain variable domain of TCR clone 282101 (TRAV29/DV5, TRAJ24)
CAASGATDSGGKFQF

SEQ ID NO: 564202 - protein, 13 aa, Homo sapiens
  CDR3 for beta chain variable domain of TCR clone 282101 (TRBV19, TRBJ1-2)
CASSVPGQDGYTF

SEQ ID NO: 564203 - protein, 11 aa, Homo sapiens
  CDR3 for alpha chain variable domain of TCR clone 282102 (TRAV1-1, TRAJ23)
CAVRQGGKLIF

SEQ ID NO: 564204 - protein, 19 aa, Homo sapiens
  CDR3 for beta chain variable domain of TCR clone 282102 (TRBV7-8, TRBJ2-2)
CQQPFISRADYPYHWELFF

SEQ ID NO: 564205 - protein, 15 aa, Homo sapiens
  CDR3 for alpha chain variable domain of TCR clone 282103 (TRAV8-3, TRAJ45)
CASSYAGGGADGLTF

SEQ ID NO: 564206 - protein, 15 aa, Homo sapiens
  CDR3 for beta chain variable domain of TCR clone 282103 (TRBV5-1, TRBJ1-1)
CASSLAPRGNTEAFF

SEQ ID NO: 564207 - protein, 17 aa, Homo sapiens
  CDR3 for alpha chain variable domain of TCR clone 282104 (TRAV13-1, TRAJ5)
CSNPSLSRDTGRRALTF

SEQ ID NO: 564208 - protein, 17 aa, Homo sapiens
  CDR3 for beta chain variable domain of TCR clone 282104 (TRBV24-1, TRBJ2-1)
CATSDVSTSVTYNEQFF

SEQ ID NO: 564209 - protein, 16 aa, Homo sapiens
  CDR3 for alpha chain variable domain of TCR clone 282105 (TRAV38-2/DV8, TRAJ45)
CAYSGNSGGGADGLTF

SEQ ID NO: 564210 - protein, 17 aa, Homo sapiens
  CDR3 for beta chain variable domain of TCR clone 282105 (TRBV11-3, TRBJ2-5)
CASSLPGVRGGKETQYF

SEQ ID NO: 564211 - protein, 13 aa, Homo sapiens
  CDR3 for alpha chain variable domain of TCR clone 282106 (TRAV20, TRAJ37)
CAGCSSDTGKIIF

SEQ ID NO: 564212 - protein, 11 aa, Homo sapiens
  CDR3 for beta chain variable domain of TCR clone 282106 (TRBV12-4, TRBJ2-3)
CASTATDTQYF

SEQ ID NO: 564213 - protein, 12 aa, Homo sapiens
  CDR3 for alpha chain variable domain of TCR clone 282107 (TRAV3, TRAJ7)
CADLLWEQQTRF

SEQ ID NO: 564214 - protein, 13 aa, Homo sapiens
  CDR3 for beta chain variable domain of TCR clone 282107 (TRBV7-3, TRBJ2-5)
CPSSFRGGETQYF

SEQ ID NO: 564215 - protein, 14 aa, Homo sapiens
  CDR3 for alpha chain variable domain of TCR clone 282108 (TRAV3, TRAJ21)
CAVESQANFNKFYF

SEQ ID NO: 564216 - protein, 18 aa, Homo sapiens
  CDR3 for beta chain variable domain of TCR clone 282108 (TRBV7-9, TRBJ2-1)
CASSLAVSGTSGRNAQFF

SEQ ID NO: 564217 - protein, 12 aa, Homo sapiens
  CDR3 for alpha chain variable domain of TCR clone 282109 (TRAV12-3, TRAJ17)
CAMTLTGNKPTF

SEQ ID NO: 564218 - protein, 12 aa, Homo sapiens
  CDR3 for beta chain variable domain of TCR clone 282109 (TRBV12-4, TRBJ2-7)
CASSLGGHEQYF

SEQ ID NO: 564219 - protein, 13 aa, Homo sapiens
  CDR3 for alpha chain variable domain of TCR clone 282110 (TRAV2, TRAJ37)
CAVQSGNTGKLIF

SEQ ID NO: 564220 - protein, 15 aa, Homo sapiens
  CDR3 for beta chain variable domain of TCR clone 282110 (TRBV20-1, TRBJ2-3)
CSAREAGAYTDTQYF

SEQ ID NO: 564221 - protein, 12 aa, Homo sapiens
  CDR3 for alpha chain variable domain of TCR clone 282111 (TRAV35, TRAJ39)
LAPNNAGNMLTF

SEQ ID NO: 564222 - protein, 15 aa, Homo sapiens
  CDR3 for beta chain variable domain of TCR clone 282111 (TRBV2, TRBJ2-3)
CASSTSVEGVRYAVF

SEQ ID NO: 564223 - protein, 13 aa, Homo sapiens
  CDR3 for alpha chain variable domain of TCR clone 282112 (TRAV30, TRAJ29)
CGTEDSGNTPLVF

SEQ ID NO: 564224 - protein, 10 aa, Homo sapiens
  CDR3 for beta chain variable domain of TCR clone 282112 (TRBV28, TRBJ1-2)
CASSSDRAVF

SEQ ID NO: 564225 - protein, 10 aa, Homo sapiens
  CDR3 for alpha chain variable domain of TCR clone 282113 (TRAV23/DV6, TRAJ57)
CAARPTPSQG

SEQ ID NO: 564226 - protein, 14 aa, Homo sapiens
  CDR3 for beta chain variable domain of TCR clone 282113 (TRBV25-1, TRBJ1-1)
CASTHLGGNTEAFF

SEQ ID NO: 564227 - protein, 14 aa, Homo sapiens
  CDR3 for alpha chain variable domain of TCR clone 282114 (TRAV25, TRAJ18)
CAGRQRLNPGEAIL

SEQ ID NO: 564228 - protein, 17 aa, Homo sapiens
  CDR3 for beta chain variable domain of TCR clone 282114 (TRBV20-1, TRBJ2-1)
CSASSSGLAGSYNEQFF

SEQ ID NO: 564229 - protein, 17 aa, Homo sapiens
  CDR3 for alpha chain variable domain of TCR clone 282115 (TRAV27, TRAJ42)
CAERVIYYGGSKGNLIF

SEQ ID NO: 564230 - protein, 14 aa, Homo sapiens
  CDR3 for beta chain variable domain of TCR clone 282115 (TRBV6-6, TRBJ2-3)
CASRMQREADTQYF

SEQ ID NO: 564231 - protein, 17 aa, Homo sapiens
  CDR3 for alpha chain variable domain of TCR clone 282116 (TRAV8-1, TRAJ43)
CAVTNDMRFGAGTRLTV

SEQ ID NO: 564232 - protein, 11 aa, Homo sapiens
  CDR3 for beta chain variable domain of TCR clone 282116 (TRBV7-9, TRBJ2-5)
CASSLGETQYF

SEQ ID NO: 564233 - protein, 16 aa, Homo sapiens
  CDR3 for alpha chain variable domain of TCR clone 282117 (TRAV4, TRAJ22)
CLVGDLYSGSARQLTF

SEQ ID NO: 564234 - protein, 16 aa, Homo sapiens
  CDR3 for beta chain variable domain of TCR clone 282117 (TRBV7-9, TRBJ2-3)
CASSPWREVGTETQYF

SEQ ID NO: 564235 - protein, 12 aa, Homo sapiens
  CDR3 for alpha chain variable domain of TCR clone 282118 (TRAV12-2, TRAJ10)
WGVTGGGNKLTF

SEQ ID NO: 564236 - protein, 13 aa, Homo sapiens
  CDR3 for beta chain variable domain of TCR clone 282118 (TRBV4-2, TRBJ1-1)
CASSQAGNTEAFF

SEQ ID NO: 564237 - protein, 15 aa, Homo sapiens
  CDR3 for alpha chain variable domain of TCR clone 282119 (TRAV26-1, TRAJ42)
LIVRVKGGSQGNLIF

SEQ ID NO: 564238 - protein, 14 aa, Homo sapiens
  CDR3 for beta chain variable domain of TCR clone 282119 (TRBV19, TRBJ2-2)
CATTGHANTGELFF

SEQ ID NO: 564239 - protein, 13 aa, Homo sapiens
  CDR3 for alpha chain variable domain of TCR clone 282120 (TRAV3, TRAJ20)
CCEAFCNDYKLSF

SEQ ID NO: 564240 - protein, 16 aa, Homo sapiens
  CDR3 for beta chain variable domain of TCR clone 282120 (TRBV4-1, TRBJ2-1)
CASSQEAGQGSDEQFF

SEQ ID NO: 564241 - protein, 15 aa, Homo sapiens
  CDR3 for alpha chain variable domain of TCR clone 282121 (TRAV3, TRAJ17)
CAVSPKEAAGNKLTF

SEQ ID NO: 564242 - protein, 12 aa, Homo sapiens
  CDR3 for beta chain variable domain of TCR clone 282121 (TRBV7-9, TRBJ1-6)
CASSLMTSALHF

SEQ ID NO: 564243 - protein, 15 aa, Homo sapiens
  CDR3 for alpha chain variable domain of TCR clone 282122 (TRAV4, TRAJ39)
CLVGPNNNAGTMLTF

SEQ ID NO: 564244 - protein, 15 aa, Homo sapiens
  CDR3 for beta chain variable domain of TCR clone 282122 (TRBV7-9, TRBJ1-6)
CASSSPGRGNSPLHF

SEQ ID NO: 564245 - protein, 12 aa, Homo sapiens
  CDR3 for alpha chain variable domain of TCR clone 282123 (TRAV29/DV5, TRAJ49)
CAATDTGNQFDF

SEQ ID NO: 564246 - protein, 15 aa, Homo sapiens
  CDR3 for beta chain variable domain of TCR clone 282123 (TRBV19, TRBJ2-2)
CASRQTGADTGELFF

SEQ ID NO: 564247 - protein, 13 aa, Homo sapiens
  CDR3 for alpha chain variable domain of TCR clone 282124 (TRAV12-3, TRAJ7)
CAMSASGNNRLAF

SEQ ID NO: 564248 - protein, 14 aa, Homo sapiens
  CDR3 for beta chain variable domain of TCR clone 282124 (TRBV13, TRBJ2-5)
CASSLGPRGETEYF

SEQ ID NO: 564249 - protein, 16 aa, Homo sapiens
  CDR3 for alpha chain variable domain of TCR clone 282125 (TRAV26-1, TRAJ32)
CIVRTNYGGATNKFIF

SEQ ID NO: 564250 - protein, 14 aa, Homo sapiens
  CDR3 for beta chain variable domain of TCR clone 282125 (TRBV27, TRBJ1-1)
CASSLLSGLSVAFF

SEQ ID NO: 564251 - protein, 15 aa, Homo sapiens
  CDR3 for alpha chain variable domain of TCR clone 282126 (TRAV25, TRAJ10)
CAGPLLTGGGNKLTF

SEQ ID NO: 564252 - protein, 15 aa, Homo sapiens
  CDR3 for beta chain variable domain of TCR clone 282126 (TRBV20-1, TRBJ2-7)
CSAESGTSGEYEQYF

SEQ ID NO: 564253 - protein, 12 aa, Homo sapiens
  CDR3 for alpha chain variable domain of TCR clone 282127 (TRAV3, TRAJ43)
GAVRDPNNDMRF

SEQ ID NO: 564254 - protein, 13 aa, Homo sapiens
  CDR3 for beta chain variable domain of TCR clone 282127 (TRBV19, TRBJ1-2)
CASSVPGQDGYTF

SEQ ID NO: 564255 - protein, 12 aa, Homo sapiens
  CDR3 for alpha chain variable domain of TCR clone 282128 (TRAV3, TRAJ20)
CAVRDPDYKLSF

SEQ ID NO: 564256 - protein, 13 aa, Homo sapiens
  CDR3 for beta chain variable domain of TCR clone 282128 (TRBV7-3, TRBJ1-1)
CASSLTQGTEAFF

SEQ ID NO: 564257 - protein, 13 aa, Homo sapiens
  CDR3 for alpha chain variable domain of TCR clone 282129 (TRAV3, TRAJ21)
CAVREPDFNKFYF

SEQ ID NO: 564258 - protein, 14 aa, Homo sapiens
  CDR3 for beta chain variable domain of TCR clone 282129 (TRBV19, TRBJ2-1)
CASPTSVLSGEQFF

SEQ ID NO: 564259 - protein, 17 aa, Homo sapiens
  CDR3 for alpha chain variable domain of TCR clone 282130 (TRAV35, TRAJ38)
CAGQLQRNAGNNRKLIW

SEQ ID NO: 564260 - protein, 12 aa, Homo sapiens
  CDR3 for beta chain variable domain of TCR clone 282130 (TRBV11-2, TRBJ2-1)
CASSPGNNEQFF

SEQ ID NO: 564261 - protein, 19 aa, Homo sapiens
  CDR3 for alpha chain variable domain of TCR clone 282131 (TRAV1-2, TRAJ26)
CLLPLCCERPDNYGQNFVF

SEQ ID NO: 564262 - protein, 12 aa, Homo sapiens
  CDR3 for beta chain variable domain of TCR clone 282131 (TRBV28, TRBJ2-3)
CASSLYRDTQYS

SEQ ID NO: 564263 - protein, 20 aa, Homo sapiens
  CDR3 for alpha chain variable domain of TCR clone 282132 (TRAV12-1, TRAJ42)
SSVIQPPTSVKGGSQGNLIF

SEQ ID NO: 564264 - protein, 15 aa, Homo sapiens
  CDR3 for beta chain variable domain of TCR clone 282132 (TRBV11-3, TRBJ2-3)
CASLKDGREGDTQYF

SEQ ID NO: 564265 - protein, 13 aa, Homo sapiens
  CDR3 for alpha chain variable domain of TCR clone 282133 (TRAV39, TRAJ58)
CAGEETSGSRLTF

SEQ ID NO: 564266 - protein, 13 aa, Homo sapiens
  CDR3 for beta chain variable domain of TCR clone 282133 (TRBV7-9, TRBJ2-5)
CASLPSGRETQFF

SEQ ID NO: 564267 - protein, 18 aa, Homo sapiens
  CDR3 for alpha chain variable domain of TCR clone 282134 (TRAV26-2, TRAJ45)
CILRVDKYSGGGADGPTF

SEQ ID NO: 564268 - protein, 16 aa, Homo sapiens
  CDR3 for beta chain variable domain of TCR clone 282134 (TRBV2, TRBJ1-4)
CASNLLQGATSEKLFF

SEQ ID NO: 564269 - protein, 13 aa, Homo sapiens
  CDR3 for alpha chain variable domain of TCR clone 282135 (TRAV27, TRAJ42)
CAGARGSQGNHIF

SEQ ID NO: 564270 - protein, 14 aa, Homo sapiens
  CDR3 for beta chain variable domain of TCR clone 282135 (TRBV20-1, TRBJ1-1)
CSAQTRIGGTEAFF

SEQ ID NO: 564271 - protein, 13 aa, Homo sapiens
  CDR3 for alpha chain variable domain of TCR clone 282136 (TRAV3, TRAJ20)
CAVRSLNDYKLSF

SEQ ID NO: 564272 - protein, 15 aa, Homo sapiens
  CDR3 for beta chain variable domain of TCR clone 282136 (TRBV19, TRBJ2-4)
CASRGPRRGENIQYF

SEQ ID NO: 564273 - protein, 13 aa, Homo sapiens
  CDR3 for alpha chain variable domain of TCR clone 282137 (TRAV21, TRAJ34)
CAGSEGDTDKLIF

SEQ ID NO: 564274 - protein, 17 aa, Homo sapiens
  CDR3 for beta chain variable domain of TCR clone 282137 (TRBV20-1, TRBJ1-5)
CSARDPSAQGFNQPQHF

SEQ ID NO: 564275 - protein, 14 aa, Homo sapiens
  CDR3 for alpha chain variable domain of TCR clone 282138 (TRAV23/DV6, TRAJ22)
CAASVSGSARQLTF

SEQ ID NO: 564276 - protein, 15 aa, Homo sapiens
  CDR3 for beta chain variable domain of TCR clone 282138 (TRBV19, TRBJ2-6)
CASVRRDSGANVLTF

SEQ ID NO: 564277 - protein, 16 aa, Homo sapiens
  CDR3 for alpha chain variable domain of TCR clone 282139 (TRAV8-3, TRAJ13)
CAVGAYPSGGYQKVTF

SEQ ID NO: 564278 - protein, 14 aa, Homo sapiens
  CDR3 for beta chain variable domain of TCR clone 282139 (TRBV18, TRBJ2-5)
CASSPRASSETRYF

SEQ ID NO: 564279 - protein, 18 aa, Homo sapiens
  CDR3 for alpha chain variable domain of TCR clone 282140 (TRAV29/DV5, TRAJ52)
CAAGFRGAVGTSYGKLTF

SEQ ID NO: 564280 - protein, 16 aa, Homo sapiens
  CDR3 for beta chain variable domain of TCR clone 282140 (TRBV7-3, TRBJ2-2)
CVSSLKRGTLSGELFF

SEQ ID NO: 564281 - protein, 12 aa, Homo sapiens
  CDR3 for alpha chain variable domain of TCR clone 282141 (TRAV12-3, TRAJ29)
CAAREGNTPLVF

SEQ ID NO: 564282 - protein, 17 aa, Homo sapiens
  CDR3 for beta chain variable domain of TCR clone 282141 (TRBV18, TRBJ2-1)
CASSPLAAGAGDNEHFF

SEQ ID NO: 564283 - protein, 11 aa, Homo sapiens
  CDR3 for alpha chain variable domain of TCR clone 282142 (TRAV2, TRAJ33)
CAVESNYQLIW

SEQ ID NO: 564284 - protein, 15 aa, Homo sapiens
  CDR3 for beta chain variable domain of TCR clone 282142 (TRBV19, TRBJ1-1)
CASTSGQIQYTEAFF

SEQ ID NO: 564285 - protein, 13 aa, Homo sapiens
  CDR3 for alpha chain variable domain of TCR clone 282143 (TRAV12-2, TRAJ20)
CAVYTSNAYKLSF

SEQ ID NO: 564286 - protein, 15 aa, Homo sapiens
  CDR3 for beta chain variable domain of TCR clone 282143 (TRBV18, TRBJ1-2)
CASSPGNGLGYGYTF

SEQ ID NO: 564287 - protein, 23 aa, Homo sapiens
  CDR3 for alpha chain variable domain of TCR clone 282144 (TRAV3, TRAJ24)
CAVRDKMTAGGNCSLEQGPRLVF

SEQ ID NO: 564288 - protein, 14 aa, Homo sapiens
  CDR3 for beta chain variable domain of TCR clone 282144 (TRBV7-2, TRBJ2-3)
CASSQTGSSYTQYF

SEQ ID NO: 564289 - protein, 15 aa, Homo sapiens
  CDR3 for alpha chain variable domain of TCR clone 282145 (TRAV13-2, TRAJ10)
CAENRDTGGGNKITF

SEQ ID NO: 564290 - protein, 16 aa, Homo sapiens
  CDR3 for beta chain variable domain of TCR clone 282145 (TRBV2, TRBJ1-3)
CASSRTGGSTGNTIYF

SEQ ID NO: 564291 - protein, 14 aa, Homo sapiens
  CDR3 for alpha chain variable domain of TCR clone 282146 (TRAV1-2, TRAJ8)
CAVREDTGFEKLVF

SEQ ID NO: 564292 - protein, 15 aa, Homo sapiens
  CDR3 for beta chain variable domain of TCR clone 282146 (TRBV7-9, TRBJ1-4)
CASSARTGGNEKLFF

SEQ ID NO: 564293 - protein, 15 aa, Homo sapiens
  CDR3 for alpha chain variable domain of TCR clone 282147 (TRAV13-1, TRAJ49)
CAASTEGNTGNQFYF

SEQ ID NO: 564294 - protein, 12 aa, Homo sapiens
  CDR3 for beta chain variable domain of TCR clone 282147 (TRBV11-2, TRBJ2-2)
CASSLGGGELFI

SEQ ID NO: 564295 - protein, 13 aa, Homo sapiens
  CDR3 for alpha chain variable domain of TCR clone 282148 (TRAV14/DV4, TRAJ23)
CATREGKGGKLIF

SEQ ID NO: 564296 - protein, 15 aa, Homo sapiens
  CDR3 for beta chain variable domain of TCR clone 282148 (TRBV6-3, TRBJ2-1)
CASSYASDSYNEQFF

SEQ ID NO: 564297 - protein, 13 aa, Homo sapiens
  CDR3 for alpha chain variable domain of TCR clone 282149 (TRAV30, TRAJ24)
CGTVTDSGGKLQF

SEQ ID NO: 564298 - protein, 15 aa, Homo sapiens
  CDR3 for beta chain variable domain of TCR clone 282149 (TRBV4-1, TRBJ2-1)
CASSQDPGNYNEQFF

SEQ ID NO: 564299 - protein, 15 aa, Homo sapiens
  CDR3 for alpha chain variable domain of TCR clone 282150 (TRAV17, TRAJ56)
CATEPFTGANSKLTF

SEQ ID NO: 564300 - protein, 14 aa, Homo sapiens
  CDR3 for beta chain variable domain of TCR clone 282150 (TRBV7-6, TRBJ2-3)
CASSLGTVTDTQYF

SEQ ID NO: 564301 - protein, 15 aa, Homo sapiens
  CDR3 for alpha chain variable domain of TCR clone 282151 (TRAV12-2, TRAJ20)
CAVKGGFGAGTTLTV

SEQ ID NO: 564302 - protein, 13 aa, Homo sapiens
  CDR3 for beta chain variable domain of TCR clone 282151 (TRBV12-4, TRBJ2-7)
CASSPGQLYEQYF

SEQ ID NO: 564303 - protein, 13 aa, Homo sapiens
  CDR3 for alpha chain variable domain of TCR clone 282152 (TRAV17, TRAJ13)
CATDSGGYQKVTF

SEQ ID NO: 564304 - protein, 15 aa, Homo sapiens
  CDR3 for beta chain variable domain of TCR clone 282152 (TRBV2, TRBJ2-7)
CASSEGLARSYEQYF

SEQ ID NO: 564305 - protein, 13 aa, Homo sapiens
  CDR3 for alpha chain variable domain of TCR clone 282153 (TRAV23/DV6, TRAJ58)
CAARGTSGSRLTF

SEQ ID NO: 564306 - protein, 15 aa, Homo sapiens
  CDR3 for beta chain variable domain of TCR clone 282153 (TRBV7-2, TRBJ2-7)
CASSLKGALTYEQYF

SEQ ID NO: 564307 - protein, 13 aa, Homo sapiens
  CDR3 for alpha chain variable domain of TCR clone 282154 (TRAV13-1, TRAJ52)
VLPGGTSYGKLTF

SEQ ID NO: 564308 - protein, 16 aa, Homo sapiens
  CDR3 for beta chain variable domain of TCR clone 282154 (TRBV28, TRBJ2-7)
CASSPWVATGDLSQYF

SEQ ID NO: 564309 - protein, 14 aa, Homo sapiens
  CDR3 for alpha chain variable domain of TCR clone 282155 (TRAV12-1, TRAJ38)
CVVHNAGNNRRLIL

SEQ ID NO: 564310 - protein, 13 aa, Homo sapiens
  CDR3 for beta chain variable domain of TCR clone 282155 (TRBV19, TRBJ2-1)
CATSRGVYNEQFF

SEQ ID NO: 564311 - protein, 14 aa, Homo sapiens
  CDR3 for alpha chain variable domain of TCR clone 282156 (TRAV13-2, TRAJ10)
CAERGTGRGNKLTF

SEQ ID NO: 564312 - protein, 15 aa, Homo sapiens
  CDR3 for beta chain variable domain of TCR clone 282156 (TRBV5-1, TRBJ1-1)
CASSLGMGTSTEAFF

SEQ ID NO: 564313 - protein, 14 aa, Homo sapiens
  CDR3 for alpha chain variable domain of TCR clone 282157 (TRAV38-1, TRAJ27)
CAFIHNTNAGNSTF

SEQ ID NO: 564314 - protein, 12 aa, Homo sapiens
  CDR3 for beta chain variable domain of TCR clone 282157 (TRBV7-8, TRBJ2-7)
CASSLGDREQYF

SEQ ID NO: 564315 - protein, 13 aa, Homo sapiens
  CDR3 for alpha chain variable domain of TCR clone 282158 (TRAV2, TRAJ29)
CAAQNSGNTPLVF

SEQ ID NO: 564316 - protein, 14 aa, Homo sapiens
  CDR3 for beta chain variable domain of TCR clone 282158 (TRBV11-2, TRBJ2-5)
CASRPLAGRETQYF

SEQ ID NO: 564317 - protein, 14 aa, Homo sapiens
  CDR3 for alpha chain variable domain of TCR clone 282159 (TRAV3, TRAJ9)
CAVRLNTGCFKTIF

SEQ ID NO: 564318 - protein, 13 aa, Homo sapiens
  CDR3 for beta chain variable domain of TCR clone 282159 (TRBV20-1, TRBJ1-1)
CSARVGGNTEAFF

SEQ ID NO: 564319 - protein, 14 aa, Homo sapiens
  CDR3 for alpha chain variable domain of TCR clone 282160 (TRAV8-3, TRAJ23)
CAVIIYNQGGKRIF

SEQ ID NO: 564320 - protein, 15 aa, Homo sapiens
  CDR3 for beta chain variable domain of TCR clone 282160 (TRBV18, TRBJ2-1)
CASSPPSASYNEQFF

SEQ ID NO: 564321 - protein, 16 aa, Homo sapiens
  CDR3 for alpha chain variable domain of TCR clone 282161 (TRAV13-2, TRAJ28)
CAEKSYSGAGSYKLTF

SEQ ID NO: 564322 - protein, 14 aa, Homo sapiens
  CDR3 for beta chain variable domain of TCR clone 282161 (TRBV5-1, TRBJ1-4)
CASSLGDRNEKLFF

SEQ ID NO: 564323 - protein, 16 aa, Homo sapiens
  CDR3 for alpha chain variable domain of TCR clone 282162 (TRAV13-1, TRAJ37)
CAASSLGSSNTGKLIF

SEQ ID NO: 564324 - protein, 12 aa, Homo sapiens
  CDR3 for beta chain variable domain of TCR clone 282162 (TRBV6-1, TRBJ2-5)
CASSEGRETKYF

SEQ ID NO: 564325 - protein, 17 aa, Homo sapiens
  CDR3 for alpha chain variable domain of TCR clone 282163 (TRAV1-2, TRAJ27)
CAVRDKTGDTNAGKSTF

SEQ ID NO: 564326 - protein, 15 aa, Homo sapiens
  CDR3 for beta chain variable domain of TCR clone 282163 (TRBV4-1, TRBJ1-4)
CASSDTGGTNEKLFF

SEQ ID NO: 564327 - protein, 14 aa, Homo sapiens
  CDR3 for alpha chain variable domain of TCR clone 282164 (TRAV1-2, TRAJ16)
CAVNRFSDGQKLLF

SEQ ID NO: 564328 - protein, 13 aa, Homo sapiens
  CDR3 for beta chain variable domain of TCR clone 282164 (TRBV20-1, TRBJ1-1)
CSARVCGNTEAFF

SEQ ID NO: 564329 - protein, 14 aa, Homo sapiens
  CDR3 for alpha chain variable domain of TCR clone 282165 (TRAV12-3, TRAJ10)
SHLPLTGGGNKLTF

SEQ ID NO: 564330 - protein, 12 aa, Homo sapiens
  CDR3 for beta chain variable domain of TCR clone 282165 (TRBV7-2, TRBJ2-2)
CATQIVTGELFF

SEQ ID NO: 564331 - protein, 10 aa, Homo sapiens
  CDR3 for alpha chain variable domain of TCR clone 282166 (TRAV21, TRAJ31)
CAVDNARLMF

SEQ ID NO: 564332 - protein, 15 aa, Homo sapiens
  CDR3 for beta chain variable domain of TCR clone 282166 (TRBV7-2, TRBJ2-3)
CASSLAGAFIDTQYF

SEQ ID NO: 564333 - protein, 13 aa, Homo sapiens
  CDR3 for alpha chain variable domain of TCR clone 282167 (TRAV21, TRAJ20)
CAVGLRVDYKLSF

SEQ ID NO: 564334 - protein, 13 aa, Homo sapiens
  CDR3 for beta chain variable domain of TCR clone 282167 (TRBV6-1, TRBJ2-5)
CASRGPAEETQYF

SEQ ID NO: 564335 - protein, 12 aa, Homo sapiens
  CDR3 for alpha chain variable domain of TCR clone 282168 (TRAV13-1, TRAJ53)
AASGGSNYKLTF

SEQ ID NO: 564336 - protein, 13 aa, Homo sapiens
  CDR3 for beta chain variable domain of TCR clone 282168 (TRBV20-1, TRBJ2-1)
CSARSSPRDEQFF

SEQ ID NO: 564337 - protein, 14 aa, Homo sapiens
  CDR3 for alpha chain variable domain of TCR clone 282169 (TRAV26-1, TRAJ34)
CIVRVAYNPDKLIF

SEQ ID NO: 564338 - protein, 16 aa, Homo sapiens
  CDR3 for beta chain variable domain of TCR clone 282169 (TRBV7-3, TRBJ2-2)
CASSLKRGTLSGELFF

SEQ ID NO: 564339 - protein, 11 aa, Homo sapiens
  CDR3 for alpha chain variable domain of TCR clone 282170 (TRAV26-1, TRAJ37)
CIVRVGRKLIF

SEQ ID NO: 564340 - protein, 13 aa, Homo sapiens
  CDR3 for beta chain variable domain of TCR clone 282170 (TRBV19, TRBJ1-1)
CASSIGPQAEAFF

SEQ ID NO: 564341 - protein, 11 aa, Homo sapiens
  CDR3 for alpha chain variable domain of TCR clone 282171 (TRAV1-2, TRAJ11)
CAVRGYSTLSF

SEQ ID NO: 564342 - protein, 13 aa, Homo sapiens
  CDR3 for beta chain variable domain of TCR clone 282171 (TRBV10-3, TRBJ2-7)
CASKLAVNYEQYF

SEQ ID NO: 564343 - protein, 14 aa, Homo sapiens
  CDR3 for alpha chain variable domain of TCR clone 282172 (TRAV20, TRAJ42)
CCAADGGSQGNLIC

SEQ ID NO: 564344 - protein, 15 aa, Homo sapiens
  CDR3 for beta chain variable domain of TCR clone 282172 (TRBV12-4, TRBJ1-3)
CASTPGRRSGNTIYF

SEQ ID NO: 564345 - protein, 14 aa, Homo sapiens
  CDR3 for alpha chain variable domain of TCR clone 282173 (TRAV12-1, TRAJ9)
CVVNRRTGGFKTIF

SEQ ID NO: 564346 - protein, 16 aa, Homo sapiens
  CDR3 for beta chain variable domain of TCR clone 282173 (TRBV4-1, TRBJ2-3)
CASSKSTSGAEDTQYF

SEQ ID NO: 564347 - protein, 13 aa, Homo sapiens
  CDR3 for alpha chain variable domain of TCR clone 282174 (TRAV8-6, TRAJ8)
SAVSNTGFQKLVF

SEQ ID NO: 564348 - protein, 15 aa, Homo sapiens
  CDR3 for beta chain variable domain of TCR clone 282174 (TRBV28, TRBJ2-5)
CASSSGRTIQETQYF

SEQ ID NO: 564349 - protein, 16 aa, Homo sapiens
  CDR3 for alpha chain variable domain of TCR clone 282175 (TRAV8-1, TRAJ39)
CAVNVPSYNAGNMLTF

SEQ ID NO: 564350 - protein, 12 aa, Homo sapiens
  CDR3 for beta chain variable domain of TCR clone 282175 (TRBV7-8, TRBJ2-7)
CASSLGDREQYF

SEQ ID NO: 564351 - protein, 13 aa, Homo sapiens
  CDR3 for alpha chain variable domain of TCR clone 282176 (TRAV13-2, TRAJ13)
CAERPGGYQKVTF

SEQ ID NO: 564352 - protein, 15 aa, Homo sapiens
  CDR3 for beta chain variable domain of TCR clone 282176 (TRBV6-6, TRBJ2-5)
CASSPGGGLEETQYF

SEQ ID NO: 564353 - protein, 15 aa, Homo sapiens
  CDR3 for alpha chain variable domain of TCR clone 282177 (TRAV13-2, TRAJ5)
YAENPHWTGRRALTF

SEQ ID NO: 564354 - protein, 16 aa, Homo sapiens
  CDR3 for beta chain variable domain of TCR clone 282177 (TRBV7-9, TRBJ1-3)
CASSQTSGLRMGTIYF

SEQ ID NO: 564355 - protein, 17 aa, Homo sapiens
  CDR3 for alpha chain variable domain of TCR clone 282178 (TRAV3, TRAJ38)
CAVRYCLNAGNNRKLVW

SEQ ID NO: 564356 - protein, 16 aa, Homo sapiens
  CDR3 for beta chain variable domain of TCR clone 282178 (TRBV6-5, TRBJ2-1)
CASSYSLSGGYNEQFF

SEQ ID NO: 564357 - protein, 17 aa, Homo sapiens
  CDR3 for alpha chain variable domain of TCR clone 282179 (TRAV8-6, TRAJ58)
CAVSSWVGETSGPRLTF

SEQ ID NO: 564358 - protein, 16 aa, Homo sapiens
  CDR3 for beta chain variable domain of TCR clone 282179 (TRBV7-8, TRBJ2-4)
CASSAERTLAKNIQYF

SEQ ID NO: 564359 - protein, 16 aa, Homo sapiens
  CDR3 for alpha chain variable domain of TCR clone 282180 (TRAV12-2, TRAJ10)
CAVNRVLTGGGNKLTF

SEQ ID NO: 564360 - protein, 12 aa, Homo sapiens
  CDR3 for beta chain variable domain of TCR clone 282180 (TRBV28, TRBJ2-7)
CASSFSSYDQYF

SEQ ID NO: 564361 - protein, 17 aa, Homo sapiens
  CDR3 for alpha chain variable domain of TCR clone 282181 (TRAV26-1, TRAJ22)
CIVRVPSHSGSARQLTF

SEQ ID NO: 564362 - protein, 16 aa, Homo sapiens
  CDR3 for beta chain variable domain of TCR clone 282181 (TRBV28, TRBJ2-1)
CASRRSGRVVGNEQFF

SEQ ID NO: 564363 - protein, 11 aa, Homo sapiens
  CDR3 for alpha chain variable domain of TCR clone 282182 (TRAV12-1, TRAJ30)
CVVNGQDKLIF

SEQ ID NO: 564364 - protein, 12 aa, Homo sapiens
  CDR3 for beta chain variable domain of TCR clone 282182 (TRBV27, TRBJ2-2)
CASKLLTGELFF

SEQ ID NO: 564365 - protein, 14 aa, Homo sapiens
  CDR3 for alpha chain variable domain of TCR clone 282183 (TRAV29/DV5, TRAJ36)
CAARRKTGANNLFF

SEQ ID NO: 564366 - protein, 14 aa, Homo sapiens
  CDR3 for beta chain variable domain of TCR clone 282183 (TRBV12-5, TRBJ2-5)
RASGSRTHQETQYV

SEQ ID NO: 564367 - protein, 15 aa, Homo sapiens
  CDR3 for alpha chain variable domain of TCR clone 282184 (TRAV13-1, TRAJ52)
CAATSPRTSYGKLTF

SEQ ID NO: 564368 - protein, 17 aa, Homo sapiens
  CDR3 for beta chain variable domain of TCR clone 282184 (TRBV7-3, TRBJ2-5)
CASSLGSGRSGSETQYF

SEQ ID NO: 564369 - protein, 14 aa, Homo sapiens
  CDR3 for alpha chain variable domain of TCR clone 282185 (TRAV13-1, TRAJ44)
CAAKATGTASKLTF

SEQ ID NO: 564370 - protein, 17 aa, Homo sapiens
  CDR3 for beta chain variable domain of TCR clone 282185 (TRBV7-3, TRBJ2-3)
RDSSLMKRMRGADTQYF

SEQ ID NO: 564371 - protein, 17 aa, Homo sapiens
  CDR3 for alpha chain variable domain of TCR clone 282186 (TRAV35, TRAJ38)
CAGQLQRNAGNNRKLIW

SEQ ID NO: 564372 - protein, 15 aa, Homo sapiens
  CDR3 for beta chain variable domain of TCR clone 282186 (TRBV7-9, TRBJ1-6)
CASSSPGRGNSPLHF

SEQ ID NO: 564373 - protein, 16 aa, Homo sapiens
  CDR3 for alpha chain variable domain of TCR clone 282187 (TRAV30, TRAJ24)
CGTEIVDADSWGQFQF

SEQ ID NO: 564374 - protein, 17 aa, Homo sapiens
  CDR3 for beta chain variable domain of TCR clone 282187 (TRBV20-1, TRBJ2-1)
CSAPPRLAGTRYNEQFF

SEQ ID NO: 564375 - protein, 16 aa, Homo sapiens
  CDR3 for alpha chain variable domain of TCR clone 282188 (TRAV30, TRAJ24)
CGTESVDADSGWKVQF

SEQ ID NO: 564376 - protein, 13 aa, Homo sapiens
  CDR3 for beta chain variable domain of TCR clone 282188 (TRBV20-1, TRBJ1-1)
CSAPPGGHTEAFF

SEQ ID NO: 564377 - protein, 18 aa, Homo sapiens
  CDR3 for alpha chain variable domain of TCR clone 282189 (TRAV21, TRAJ52)
CAVRPSPAGGTSYGKLTF

SEQ ID NO: 564378 - protein, 15 aa, Homo sapiens
  CDR3 for beta chain variable domain of TCR clone 282189 (TRBV18, TRBJ2-7)
CASSPRSGTAYEQYF

SEQ ID NO: 564379 - protein, 12 aa, Homo sapiens
  CDR3 for alpha chain variable domain of TCR clone 282190 (TRAV1-2, TRAJ33)
CAVMDSNYQLIW

SEQ ID NO: 564380 - protein, 14 aa, Homo sapiens
  CDR3 for beta chain variable domain of TCR clone 282190 (TRBV29-1, TRBJ2-1)
CSVRKPHTGNEQFF

SEQ ID NO: 564381 - protein, 16 aa, Homo sapiens
  CDR3 for alpha chain variable domain of TCR clone 282191 (TRAV3, TRAJ37)
CAVRGKGSGNTGKLIF

SEQ ID NO: 564382 - protein, 16 aa, Homo sapiens
  CDR3 for beta chain variable domain of TCR clone 282191 (TRBV12-5, TRBJ2-5)
CSSGPRTSGSQETQSF

SEQ ID NO: 564383 - protein, 14 aa, Homo sapiens
  CDR3 for alpha chain variable domain of TCR clone 282192 (TRAV1-2, TRAJ16)
CAVNRFSDGQKLPF

SEQ ID NO: 564384 - protein, 15 aa, Homo sapiens
  CDR3 for beta chain variable domain of TCR clone 282192 (TRBV5-8, TRBJ1-5)
CASSWTPGTPQPQHF

SEQ ID NO: 564385 - protein, 13 aa, Homo sapiens
  CDR3 for alpha chain variable domain of TCR clone 282193 (TRAV16, TRAJ9)
CALRATGGFKTIF

SEQ ID NO: 564386 - protein, 16 aa, Homo sapiens
  CDR3 for beta chain variable domain of TCR clone 282193 (TRBV5-1, TRBJ1-3)
CVSSRSGEDSGNTIYF

SEQ ID NO: 564387 - protein, 14 aa, Homo sapiens
  CDR3 for alpha chain variable domain of TCR clone 282194 (TRAV17, TRAJ56)
CATVPAGANSKLTF

SEQ ID NO: 564388 - protein, 11 aa, Homo sapiens
  CDR3 for beta chain variable domain of TCR clone 282194 (TRBV29-1, TRBJ2-5)
CSEDRTGTQYF

SEQ ID NO: 564389 - protein, 15 aa, Homo sapiens
  CDR3 for alpha chain variable domain of TCR clone 282195 (TRAV12-3, TRAJ6)
CAMSATTGGSYIPTF

SEQ ID NO: 564390 - protein, 16 aa, Homo sapiens
  CDR3 for beta chain variable domain of TCR clone 282195 (TRBV5-1, TRBJ2-3)
CASSSVGRRSTDTQYF

SEQ ID NO: 564391 - protein, 17 aa, Homo sapiens
  CDR3 for alpha chain variable domain of TCR clone 282196 (TRAV3, TRAJ42)
CAVRDRDYGGSQGNLIF

SEQ ID NO: 564392 - protein, 20 aa, Homo sapiens
  CDR3 for beta chain variable domain of TCR clone 282196 (TRBV28, TRBJ2-1)
CGSTPIGRSPGLAGGNEQFF

SEQ ID NO: 564393 - protein, 14 aa, Homo sapiens
  CDR3 for alpha chain variable domain of TCR clone 282197 (TRAV12-1, TRAJ4)
CVGDFSGGYNKLIF

SEQ ID NO: 564394 - protein, 12 aa, Homo sapiens
  CDR3 for beta chain variable domain of TCR clone 282197 (TRBV11-2, TRBJ2-2)
CASSLGGGELFF

SEQ ID NO: 564395 - protein, 12 aa, Homo sapiens
  CDR3 for alpha chain variable domain of TCR clone 282198 (TRAV13-1, TRAJ21)
CAAKEGFNKFYL

SEQ ID NO: 564396 - protein, 13 aa, Homo sapiens
  CDR3 for beta chain variable domain of TCR clone 282198 (TRBV3-1, TRBJ1-1)
CASSPGVITEAFF

SEQ ID NO: 564397 - protein, 16 aa, Homo sapiens
  CDR3 for alpha chain variable domain of TCR clone 282199 (TRAV12-3, TRAJ53)
CAMSPGSGGSNYKLTF

SEQ ID NO: 564398 - protein, 11 aa, Homo sapiens
  CDR3 for beta chain variable domain of TCR clone 282199 (TRBV29-1, TRBJ2-5)
CSEGRAGTQYF

SEQ ID NO: 564399 - protein, 13 aa, Homo sapiens
  CDR3 for alpha chain variable domain of TCR clone 282200 (TRAV21, TRAJ20)
CAVGLRVDYKLSF

SEQ ID NO: 564400 - protein, 13 aa, Homo sapiens
  CDR3 for beta chain variable domain of TCR clone 282200 (TRBV24-1, TRBJ1-4)
CATNNGRSEKLFF

SEQ ID NO: 564401 - protein, 12 aa, Homo sapiens
  CDR3 for alpha chain variable domain of TCR clone 282201 (TRAV8-3, TRAJ20)
LAVGANDYKLSF

SEQ ID NO: 564402 - protein, 16 aa, Homo sapiens
  CDR3 for beta chain variable domain of TCR clone 282201 (TRBV19, TRBJ2-2)
CASRSPGTGATGELFF

SEQ ID NO: 564403 - protein, 15 aa, Homo sapiens
  CDR3 for alpha chain variable domain of TCR clone 282202 (TRAV2, TRAJ9)
CAVAALNTGGFKTIF

SEQ ID NO: 564404 - protein, 15 aa, Homo sapiens
  CDR3 for beta chain variable domain of TCR clone 282202 (TRBV3-1, TRBJ2-5)
CASSANLGGPETQYF

SEQ ID NO: 564405 - protein, 14 aa, Homo sapiens
  CDR3 for alpha chain variable domain of TCR clone 282203 (TRAV1-1, TRAJ23)
CAVSIYNQGGKLIF

SEQ ID NO: 564406 - protein, 15 aa, Homo sapiens
  CDR3 for beta chain variable domain of TCR clone 282203 (TRBV5-8, TRBJ2-2)
CASSLARGATGELFF

SEQ ID NO: 564407 - protein, 14 aa, Homo sapiens
  CDR3 for alpha chain variable domain of TCR clone 282204 (TRAV2, TRAJ9)
CAVDPNTGGFKNIF

SEQ ID NO: 564408 - protein, 14 aa, Homo sapiens
  CDR3 for beta chain variable domain of TCR clone 282204 (TRBV7-2, TRBJ2-7)
CASSPKTSFYEQYF

SEQ ID NO: 564409 - protein, 14 aa, Homo sapiens
  CDR3 for alpha chain variable domain of TCR clone 282205 (TRAV12-3, TRAJ54)
CAMRGIQGAHKLVF

SEQ ID NO: 564410 - protein, 13 aa, Homo sapiens
  CDR3 for beta chain variable domain of TCR clone 282205 (TRBV19, TRBJ1-1)
CASSPSNGGEAFF

SEQ ID NO: 564411 - protein, 16 aa, Homo sapiens
  CDR3 for alpha chain variable domain of TCR clone 282206 (TRAV30, TRAJ24)
CGTEIVDADSWGKFQF

SEQ ID NO: 564412 - protein, 13 aa, Homo sapiens
  CDR3 for beta chain variable domain of TCR clone 282206 (TRBV4-2, TRBJ2-7)
CASSRDPHDEQYF

SEQ ID NO: 564413 - protein, 11 aa, Homo sapiens
  CDR3 for alpha chain variable domain of TCR clone 282207 (TRAV12-3, TRAJ27)
CAMANASKSTF

SEQ ID NO: 564414 - protein, 13 aa, Homo sapiens
  CDR3 for beta chain variable domain of TCR clone 282207 (TRBV20-1, TRBJ1-1)
CSARVGGNTEAFF

SEQ ID NO: 564415 - protein, 14 aa, Homo sapiens
  CDR3 for alpha chain variable domain of TCR clone 282208 (TRAV23/DV6, TRAJ8)
CAASKATGFQKLVF

SEQ ID NO: 564416 - protein, 13 aa, Homo sapiens
  CDR3 for beta chain variable domain of TCR clone 282208 (TRBV11-3, TRBJ2-5)
CASSAGLQETQYF

SEQ ID NO: 564417 - protein, 13 aa, Homo sapiens
  CDR3 for alpha chain variable domain of TCR clone 282209 (TRAV1-2, TRAJ9)
CAALNTGGFKTIF

SEQ ID NO: 564418 - protein, 12 aa, Homo sapiens
  CDR3 for beta chain variable domain of TCR clone 282209 (TRBV28, TRBJ2-1)
CASSFRGNEQFF

SEQ ID NO: 564419 - protein, 15 aa, Homo sapiens
  CDR3 for alpha chain variable domain of TCR clone 282210 (TRAV38-2/DV8, TRAJ48)
CAYGGRDFGNVKLTF

SEQ ID NO: 564420 - protein, 18 aa, Homo sapiens
  CDR3 for beta chain variable domain of TCR clone 282210 (TRBV5-1, TRBJ1-6)
CASSRSGQGTARGSPLHF

SEQ ID NO: 564421 - protein, 16 aa, Homo sapiens
  CDR3 for alpha chain variable domain of TCR clone 282211 (TRAV3, TRAJ21)
CAVRDIERGNFNKFYF

SEQ ID NO: 564422 - protein, 16 aa, Homo sapiens
  CDR3 for beta chain variable domain of TCR clone 282211 (TRBV19, TRBJ2-2)
CASRSPGTGATGELFF

SEQ ID NO: 564423 - protein, 11 aa, Homo sapiens
  CDR3 for alpha chain variable domain of TCR clone 282212 (TRAV21, TRAJ34)
CAHYNTDKLIF

SEQ ID NO: 564424 - protein, 15 aa, Homo sapiens
  CDR3 for beta chain variable domain of TCR clone 282212 (TRBV12-4, TRBJ2-1)
CASSLLATGNNEQFF

SEQ ID NO: 564425 - protein, 19 aa, Homo sapiens
  CDR3 for alpha chain variable domain of TCR clone 282213 (TRAV2, TRAJ20)
ILQVREADAAVYRDYKLSF

SEQ ID NO: 564426 - protein, 13 aa, Homo sapiens
  CDR3 for beta chain variable domain of TCR clone 282213 (TRBV15, TRBJ1-6)
CATSGGLNSPLHF

SEQ ID NO: 564427 - protein, 13 aa, Homo sapiens
  CDR3 for alpha chain variable domain of TCR clone 282214 (TRAV13-2, TRAJ40)
CAEFTSGTYKYIF

SEQ ID NO: 564428 - protein, 14 aa, Homo sapiens
  CDR3 for beta chain variable domain of TCR clone 282214 (TRBV10-2, TRBJ1-5)
CASSSTGRYQPQHF

SEQ ID NO: 564429 - protein, 13 aa, Homo sapiens
  CDR3 for alpha chain variable domain of TCR clone 282215 (TRAV22, TRAJ29)
CAVGGSGNKPLVF

SEQ ID NO: 564430 - protein, 13 aa, Homo sapiens
  CDR3 for beta chain variable domain of TCR clone 282215 (TRBV7-9, TRBJ1-2)
CASSLKQNYGYTF

SEQ ID NO: 564431 - protein, 14 aa, Homo sapiens
  CDR3 for alpha chain variable domain of TCR clone 282216 (TRAV8-3, TRAJ26)
CAVAPGNYGQNFVF

SEQ ID NO: 564432 - protein, 16 aa, Homo sapiens
  CDR3 for beta chain variable domain of TCR clone 282216 (TRBV3-1, TRBJ2-1)
CASSQVGGTSDNEQFF

SEQ ID NO: 564433 - protein, 14 aa, Homo sapiens
  CDR3 for alpha chain variable domain of TCR clone 282217 (TRAV36/DV7, TRAJ40)
CAVETTSGTYKYIF

SEQ ID NO: 564434 - protein, 13 aa, Homo sapiens
  CDR3 for beta chain variable domain of TCR clone 282217 (TRBV10-3, TRBJ2-5)
CAMTSGDGETQYF

SEQ ID NO: 564435 - protein, 14 aa, Homo sapiens
  CDR3 for alpha chain variable domain of TCR clone 282218 (TRAV8-4, TRAJ11)
CAVSLNSGYSTLTF

SEQ ID NO: 564436 - protein, 14 aa, Homo sapiens
  CDR3 for beta chain variable domain of TCR clone 282218 (TRBV19, TRBJ2-1)
CASKDQGLANEQFF

SEQ ID NO: 564437 - protein, 14 aa, Homo sapiens
  CDR3 for alpha chain variable domain of TCR clone 282219 (TRAV17, TRAJ16)
CSTADFSDGQKLLF

SEQ ID NO: 564438 - protein, 15 aa, Homo sapiens
  CDR3 for beta chain variable domain of TCR clone 282219 (TRBV25-1, TRBJ1-5)
CASSAGPGGNQPQHF

SEQ ID NO: 564439 - protein, 13 aa, Homo sapiens
  CDR3 for alpha chain variable domain of TCR clone 282220 (TRAV23/DV6, TRAJ37)
CAQRSSNTGKLIF

SEQ ID NO: 564440 - protein, 14 aa, Homo sapiens
  CDR3 for beta chain variable domain of TCR clone 282220 (TRBV4-1, TRBJ2-2)
CASSQAVNTGELFF

SEQ ID NO: 564441 - protein, 16 aa, Homo sapiens
  CDR3 for alpha chain variable domain of TCR clone 282221 (TRAV30, TRAJ24)
CGTEIVDADSWGKFQF

SEQ ID NO: 564442 - protein, 14 aa, Homo sapiens
  CDR3 for beta chain variable domain of TCR clone 282221 (TRBV7-2, TRBJ1-2)
CASSRGGTNYGYTF

SEQ ID NO: 564443 - protein, 18 aa, Homo sapiens
  CDR3 for alpha chain variable domain of TCR clone 282222 (TRAV13-1, TRAJ52)
CAAKNPNAGGTSYGKLTF

SEQ ID NO: 564444 - protein, 20 aa, Homo sapiens
  CDR3 for beta chain variable domain of TCR clone 282222 (TRBV4-1, TRBJ1-4)
CASSQGQGALGLMKNCFLAV

SEQ ID NO: 564445 - protein, 11 aa, Homo sapiens
  CDR3 for alpha chain variable domain of TCR clone 282223 (TRAV12-2, TRAJ33)
CAVGSNYQLIW

SEQ ID NO: 564446 - protein, 14 aa, Homo sapiens
  CDR3 for beta chain variable domain of TCR clone 282223 (TRBV6-1, TRBJ2-2)
CAGVEHIESGELFF

SEQ ID NO: 564447 - protein, 14 aa, Homo sapiens
  CDR3 for alpha chain variable domain of TCR clone 282224 (TRAV8-4, TRAJ54)
CAGSEVLGAQKRVF

SEQ ID NO: 564448 - protein, 13 aa, Homo sapiens
  CDR3 for beta chain variable domain of TCR clone 282224 (TRBV27, TRBJ2-7)
CASSFVSSYEQYF

SEQ ID NO: 564449 - protein, 11 aa, Homo sapiens
  CDR3 for alpha chain variable domain of TCR clone 282225 (TRAV17, TRAJ9)
CATTGGFKTIF

SEQ ID NO: 564450 - protein, 14 aa, Homo sapiens
  CDR3 for beta chain variable domain of TCR clone 282225 (TRBV7-9, TRBJ2-2)
CASSLVQDTGELFF

SEQ ID NO: 564451 - protein, 14 aa, Homo sapiens
  CDR3 for alpha chain variable domain of TCR clone 282226 (TRAV12-1, TRAJ3)
CGAARYSRASKIIF

SEQ ID NO: 564452 - protein, 16 aa, Homo sapiens
  CDR3 for beta chain variable domain of TCR clone 282226 (TRBV4-3, TRBJ2-2)
CASSHLQGSGTGELFF

SEQ ID NO: 564453 - protein, 11 aa, Homo sapiens
  CDR3 for alpha chain variable domain of TCR clone 282227 (TRAV12-3, TRAJ43)
CAMSVSNDMRF

SEQ ID NO: 564454 - protein, 15 aa, Homo sapiens
  CDR3 for beta chain variable domain of TCR clone 282227 (TRBV28, TRBJ1-5)
CASSRTGGYVQPQHF

SEQ ID NO: 564455 - protein, 16 aa, Homo sapiens
  CDR3 for alpha chain variable domain of TCR clone 282228 (TRAV12-3, TRAJ58)
CAMTDTEETSGSRLIF

SEQ ID NO: 564456 - protein, 22 aa, Homo sapiens
  CDR3 for beta chain variable domain of TCR clone 282228 (TRBV23-1, TRBJ2-7)
CASSRRLDSGQGYVGGGYEQYF

SEQ ID NO: 564457 - protein, 14 aa, Homo sapiens
  CDR3 for alpha chain variable domain of TCR clone 282229 (TRAV12-3, TRAJ10)
SHLPLTGGGNKLTF

SEQ ID NO: 564458 - protein, 12 aa, Homo sapiens
  CDR3 for beta chain variable domain of TCR clone 282229 (TRBV12-4, TRBJ2-3)
CASSTLPDTQYF

SEQ ID NO: 564459 - protein, 17 aa, Homo sapiens
  CDR3 for alpha chain variable domain of TCR clone 282230 (TRAV26-1, TRAJ37)
CIVRVITVSSNTGKLIF

SEQ ID NO: 564460 - protein, 15 aa, Homo sapiens
  CDR3 for beta chain variable domain of TCR clone 282230 (TRBV19, TRBJ1-6)
CASSTQGAVGSPLHF

SEQ ID NO: 564461 - protein, 15 aa, Homo sapiens
  CDR3 for alpha chain variable domain of TCR clone 282231 (TRAV8-3, TRAJ45)
CASSYSGGGADGLTF

SEQ ID NO: 564462 - protein, 17 aa, Homo sapiens
  CDR3 for beta chain variable domain of TCR clone 282231 (TRBV19, TRBJ2-1)
CASSIWSAQPTHNEQFF

SEQ ID NO: 564463 - protein, 13 aa, Homo sapiens
  CDR3 for alpha chain variable domain of TCR clone 282232 (TRAV3, TRAJ3)
CAVADSSASKIIF

SEQ ID NO: 564464 - protein, 14 aa, Homo sapiens
  CDR3 for beta chain variable domain of TCR clone 282232 (TRBV7-8, TRBJ2-7)
CASEGVPMGSTSGR

SEQ ID NO: 564465 - protein, 14 aa, Homo sapiens
  CDR3 for alpha chain variable domain of TCR clone 282233 (TRAV26-1, TRAJ38)
CIADNAGSNRKLIW

SEQ ID NO: 564466 - protein, 13 aa, Homo sapiens
  CDR3 for beta chain variable domain of TCR clone 282233 (TRBV19, TRBJ1-2)
CASSVPGQDGYTF

SEQ ID NO: 564467 - protein, 13 aa, Homo sapiens
  CDR3 for alpha chain variable domain of TCR clone 282234 (TRAV8-3, TRAJ43)
CAVGIYNNNDMGF

SEQ ID NO: 564468 - protein, 16 aa, Homo sapiens
  CDR3 for beta chain variable domain of TCR clone 282234 (TRBV7-2, TRBJ2-5)
CASSLVLWTKQETQYF

SEQ ID NO: 564469 - protein, 14 aa, Homo sapiens
  CDR3 for alpha chain variable domain of TCR clone 282235 (TRAV35, TRAJ22)
CAGLRPGSARQLAF

SEQ ID NO: 564470 - protein, 16 aa, Homo sapiens
  CDR3 for beta chain variable domain of TCR clone 282235 (TRBV7-3, TRBJ2-2)
CASSLKRGTLSGELFF

SEQ ID NO: 564471 - protein, 13 aa, Homo sapiens
  CDR3 for alpha chain variable domain of TCR clone 282236 (TRAV25, TRAJ30)
CAGRVARDDKIIF

SEQ ID NO: 564472 - protein, 17 aa, Homo sapiens
  CDR3 for beta chain variable domain of TCR clone 282236 (TRBV7-9, TRBJ2-6)
CASSFGAGYSGANVLTF

SEQ ID NO: 564473 - protein, 14 aa, Homo sapiens
  CDR3 for alpha chain variable domain of TCR clone 282237 (TRAV13-1, TRAJ9)
CAASALTGGFKTIF

SEQ ID NO: 564474 - protein, 13 aa, Homo sapiens
  CDR3 for beta chain variable domain of TCR clone 282237 (TRBV20-1, TRBJ1-1)
CSAGSVGNTEAFF

SEQ ID NO: 564475 - protein, 14 aa, Homo sapiens
  CDR3 for alpha chain variable domain of TCR clone 282238 (TRAV13-1, TRAJ26)
CAASRGNYGQNFVF

SEQ ID NO: 564476 - protein, 16 aa, Homo sapiens
  CDR3 for beta chain variable domain of TCR clone 282238 (TRBV11-2, TRBJ2-7)
CASSTVTAPKTYEQYS

SEQ ID NO: 564477 - protein, 17 aa, Homo sapiens
  CDR3 for alpha chain variable domain of TCR clone 282239 (TRAV4, TRAJ18)
CLVGERSVGPTLGGLDF

SEQ ID NO: 564478 - protein, 14 aa, Homo sapiens
  CDR3 for beta chain variable domain of TCR clone 282239 (TRBV6-5, TRBJ1-2)
CASSYDGTGGGYTF

SEQ ID NO: 564479 - protein, 14 aa, Homo sapiens
  CDR3 for alpha chain variable domain of TCR clone 282240 (TRAV1-1, TRAJ27)
CAVIYNTNAGKSTF

SEQ ID NO: 564480 - protein, 13 aa, Homo sapiens
  CDR3 for beta chain variable domain of TCR clone 282240 (TRBV28, TRBJ2-7)
CASTPGLAGEQYF

SEQ ID NO: 564481 - protein, 14 aa, Homo sapiens
  CDR3 for alpha chain variable domain of TCR clone 282241 (TRAV8-3, TRAJ4)
CAVGASGGYNKLIF

SEQ ID NO: 564482 - protein, 12 aa, Homo sapiens
  CDR3 for beta chain variable domain of TCR clone 282241 (TRBV11-2, TRBJ2-2)
CASSLGGGELFF

SEQ ID NO: 564483 - protein, 13 aa, Homo sapiens
  CDR3 for alpha chain variable domain of TCR clone 282242 (TRAV1-1, TRAJ9)
CAAKNTVGFKTIF

SEQ ID NO: 564484 - protein, 14 aa, Homo sapiens
  CDR3 for beta chain variable domain of TCR clone 282242 (TRBV12-5, TRBJ2-5)
CASGSRTHQETQYF

SEQ ID NO: 564485 - protein, 13 aa, Homo sapiens
  CDR3 for alpha chain variable domain of TCR clone 282243 (TRAV3, TRAJ20)
CCEAFCNDYKLSF

SEQ ID NO: 564486 - protein, 15 aa, Homo sapiens
  CDR3 for beta chain variable domain of TCR clone 282243 (TRBV11-3, TRBJ2-7)
CASSPGPASSYEQYF

SEQ ID NO: 564487 - protein, 13 aa, Homo sapiens
  CDR3 for alpha chain variable domain of TCR clone 282244 (TRAV1-2, TRAJ9)
CAALNTGGFKTIF

SEQ ID NO: 564488 - protein, 14 aa, Homo sapiens
  CDR3 for beta chain variable domain of TCR clone 282244 (TRBV3-1, TRBJ2-5)
CASSHWGQGETQYF

SEQ ID NO: 564489 - protein, 14 aa, Homo sapiens
  CDR3 for alpha chain variable domain of TCR clone 282245 (TRAV1-2, TRAJ8)
CAVREDTSFQKLVF

SEQ ID NO: 564490 - protein, 17 aa, Homo sapiens
  CDR3 for beta chain variable domain of TCR clone 282245 (TRBV20-1, TRBJ2-2)
CSASGSGQGGLTGELFF

SEQ ID NO: 564491 - protein, 11 aa, Homo sapiens
  CDR3 for alpha chain variable domain of TCR clone 282246 (TRAV35, TRAJ34)
CWARNTDKLLF

SEQ ID NO: 564492 - protein, 13 aa, Homo sapiens
  CDR3 for beta chain variable domain of TCR clone 282246 (TRBV7-3, TRBJ1-1)
CASSQDWGAEAFF

SEQ ID NO: 564493 - protein, 15 aa, Homo sapiens
  CDR3 for alpha chain variable domain of TCR clone 282247 (TRAV12-3, TRAJ49)
CAMAVTPNTGNQFYF

SEQ ID NO: 564494 - protein, 12 aa, Homo sapiens
  CDR3 for beta chain variable domain of TCR clone 282247 (TRBV11-2, TRBJ2-1)
CASSPGNNEQFF

SEQ ID NO: 564495 - protein, 18 aa, Homo sapiens
  CDR3 for alpha chain variable domain of TCR clone 282248 (TRAV29/DV5, TRAJ52)
CSAGCRGAGGTSYGKLTF

SEQ ID NO: 564496 - protein, 16 aa, Homo sapiens
  CDR3 for beta chain variable domain of TCR clone 282248 (TRBV7-3, TRBJ2-2)
CASSLKRGTLSGELFF

SEQ ID NO: 564497 - protein, 15 aa, Homo sapiens
  CDR3 for alpha chain variable domain of TCR clone 282249 (TRAV36/DV7, TRAJ53)
WEGENSGGSNYKLTF

SEQ ID NO: 564498 - protein, 15 aa, Homo sapiens
  CDR3 for beta chain variable domain of TCR clone 282249 (TRBV6-1, TRBJ2-5)
CASSEGWAIQETQYF

SEQ ID NO: 564499 - protein, 16 aa, Homo sapiens
  CDR3 for alpha chain variable domain of TCR clone 282250 (TRAV27, TRAJ53)
CAAPEGSGGSNYKLTC

SEQ ID NO: 564500 - protein, 15 aa, Homo sapiens
  CDR3 for beta chain variable domain of TCR clone 282250 (TRBV20-1, TRBJ1-1)
CSASRGVTGNTEAFF

SEQ ID NO: 564501 - protein, 19 aa, Homo sapiens
  CDR3 for alpha chain variable domain of TCR clone 282251 (TRAV3, TRAJ6)
CAVRDRNPSRSGGSYIPTF

SEQ ID NO: 564502 - protein, 15 aa, Homo sapiens
  CDR3 for beta chain variable domain of TCR clone 282251 (TRBV18, TRBJ2-7)
CVSSPTFMDSYEQYF

SEQ ID NO: 564503 - protein, 11 aa, Homo sapiens
  CDR3 for alpha chain variable domain of TCR clone 282252 (TRAV16, TRAJ31)
CALFNNARLMI

SEQ ID NO: 564504 - protein, 15 aa, Homo sapiens
  CDR3 for beta chain variable domain of TCR clone 282252 (TRBV18, TRBJ1-1)
CASSPRQGENTEAFF

SEQ ID NO: 564505 - protein, 12 aa, Homo sapiens
  CDR3 for alpha chain variable domain of TCR clone 282253 (TRAV12-1, TRAJ40)
CVVYSGTYEYIF

SEQ ID NO: 564506 - protein, 18 aa, Homo sapiens
  CDR3 for beta chain variable domain of TCR clone 282253 (TRBV11-2, TRBJ2-3)
CASSFGGASRGAPNTQYF

SEQ ID NO: 564507 - protein, 12 aa, Homo sapiens
  CDR3 for alpha chain variable domain of TCR clone 282254 (TRAV12-3, TRAJ41)
CAMSYSGYALNF

SEQ ID NO: 564508 - protein, 16 aa, Homo sapiens
  CDR3 for beta chain variable domain of TCR clone 282254 (TRBV29-1, TRBJ2-7)
CSVEVVGTSGSYEQYF

SEQ ID NO: 564509 - protein, 15 aa, Homo sapiens
  CDR3 for alpha chain variable domain of TCR clone 282255 (TRAV29/DV5, TRAJ24)
CAASGATDSWGKFQF

SEQ ID NO: 564510 - protein, 15 aa, Homo sapiens
  CDR3 for beta chain variable domain of TCR clone 282255 (TRBV15, TRBJ1-5)
CATSRDPVSNQPQHF

SEQ ID NO: 564511 - protein, 17 aa, Homo sapiens
  CDR3 for alpha chain variable domain of TCR clone 282256 (TRAV26-2, TRAJ42)
CILRDESYGGSQGNHIF

SEQ ID NO: 564512 - protein, 15 aa, Homo sapiens
  CDR3 for beta chain variable domain of TCR clone 282256 (TRBV6-6, TRBJ2-7)
CASSYSYGGSYEQYF

SEQ ID NO: 564513 - protein, 12 aa, Homo sapiens
  CDR3 for alpha chain variable domain of TCR clone 282257 (TRAV21, TRAJ33)
CAKMDSNYQLIG

SEQ ID NO: 564514 - protein, 14 aa, Homo sapiens
  CDR3 for beta chain variable domain of TCR clone 282257 (TRBV2, TRBJ2-7)
CASSLTAGGYEQYF

SEQ ID NO: 564515 - protein, 16 aa, Homo sapiens
  CDR3 for alpha chain variable domain of TCR clone 282258 (TRAV12-3, TRAJ53)
CAMSPGSGGSNYKLTF

SEQ ID NO: 564516 - protein, 11 aa, Homo sapiens
  CDR3 for beta chain variable domain of TCR clone 282258 (TRBV20-1, TRBJ2-7)
CSARLSYEQYF

SEQ ID NO: 564517 - protein, 12 aa, Homo sapiens
  CDR3 for alpha chain variable domain of TCR clone 282259 (TRAV13-2, TRAJ23)
CAERHRGGKLIF

SEQ ID NO: 564518 - protein, 16 aa, Homo sapiens
  CDR3 for beta chain variable domain of TCR clone 282259 (TRBV7-3, TRBJ2-2)
CASSLKRGALSGELFF

SEQ ID NO: 564519 - protein, 14 aa, Homo sapiens
  CDR3 for alpha chain variable domain of TCR clone 282260 (TRAV3, TRAJ36)
CAVRDGTGANNLFF

SEQ ID NO: 564520 - protein, 16 aa, Homo sapiens
  CDR3 for beta chain variable domain of TCR clone 282260 (TRBV7-3, TRBJ2-5)
CASIQPGGSVQETEYF

SEQ ID NO: 564521 - protein, 17 aa, Homo sapiens
  CDR3 for alpha chain variable domain of TCR clone 282261 (TRAV3, TRAJ6)
CAVRDGPRAGGSYLPTF

SEQ ID NO: 564522 - protein, 16 aa, Homo sapiens
  CDR3 for beta chain variable domain of TCR clone 282261 (TRBV7-8, TRBJ2-3)
CASSTEGQRETDTQYF

SEQ ID NO: 564523 - protein, 14 aa, Homo sapiens
  CDR3 for alpha chain variable domain of TCR clone 282262 (TRAV12-2, TRAJ9)
CTVSFGTGGFKTIF

SEQ ID NO: 564524 - protein, 18 aa, Homo sapiens
  CDR3 for beta chain variable domain of TCR clone 282262 (TRBV3-1, TRBJ2-7)
CASSRISAGGRSSYEQYF

SEQ ID NO: 564525 - protein, 15 aa, Homo sapiens
  CDR3 for alpha chain variable domain of TCR clone 282263 (TRAV21, TRAJ53)
CATLNSGDSNYKLTF

SEQ ID NO: 564526 - protein, 15 aa, Homo sapiens
  CDR3 for beta chain variable domain of TCR clone 282263 (TRBV20-1, TRBJ2-7)
CSARYRVSGMDEQYF

SEQ ID NO: 564527 - protein, 17 aa, Homo sapiens
  CDR3 for alpha chain variable domain of TCR clone 282264 (TRAV26-1, TRAJ58)
CIVRVGAGETSGSRLTF

SEQ ID NO: 564528 - protein, 18 aa, Homo sapiens
  CDR3 for beta chain variable domain of TCR clone 282264 (TRBV7-9, TRBJ2-7)
CASSLTTSGSRTWYEQYF

SEQ ID NO: 564529 - protein, 11 aa, Homo sapiens
  CDR3 for alpha chain variable domain of TCR clone 282265 (TRAV13-1, TRAJ9)
CAASEGWRLQN

SEQ ID NO: 564530 - protein, 16 aa, Homo sapiens
  CDR3 for beta chain variable domain of TCR clone 282265 (TRBV27, TRBJ2-2)
CASSFRGLVRTGELFF

SEQ ID NO: 564531 - protein, 14 aa, Homo sapiens
  CDR3 for alpha chain variable domain of TCR clone 282266 (TRAV1-2, TRAJ16)
CAVNRFSDGQKLLF

SEQ ID NO: 564532 - protein, 15 aa, Homo sapiens
  CDR3 for beta chain variable domain of TCR clone 282266 (TRBV20-1, TRBJ1-5)
CSAFKNGQRNQHQHF

SEQ ID NO: 564533 - protein, 16 aa, Homo sapiens
  CDR3 for alpha chain variable domain of TCR clone 282267 (TRAV30, TRAJ24)
CGTEIVDADSWGKFQF

SEQ ID NO: 564534 - protein, 13 aa, Homo sapiens
  CDR3 for beta chain variable domain of TCR clone 282267 (TRBV18, TRBJ1-2)
CASSASATEGYAF

SEQ ID NO: 564535 - protein, 12 aa, Homo sapiens
  CDR3 for alpha chain variable domain of TCR clone 282268 (TRAV13-2, TRAJ8)
CAPWLGFQKLVF

SEQ ID NO: 564536 - protein, 12 aa, Homo sapiens
  CDR3 for beta chain variable domain of TCR clone 282268 (TRBV28, TRBJ2-6)
CAIQAGANVLTF

SEQ ID NO: 564537 - protein, 15 aa, Homo sapiens
  CDR3 for alpha chain variable domain of TCR clone 282269 (TRAV26-1, TRAJ29)
CIVRVEGSGKPPLGF

SEQ ID NO: 564538 - protein, 15 aa, Homo sapiens
  CDR3 for beta chain variable domain of TCR clone 282269 (TRBV7-9, TRBJ1-5)
CASSQGHQPNQPQHF

SEQ ID NO: 564539 - protein, 16 aa, Homo sapiens
  CDR3 for alpha chain variable domain of TCR clone 282270 (TRAV30, TRAJ24)
CGTEIVDADSWGKFQF

SEQ ID NO: 564540 - protein, 15 aa, Homo sapiens
  CDR3 for beta chain variable domain of TCR clone 282270 (TRBV20-1, TRBJ2-4)
CSARDLTGGQNIQYF

SEQ ID NO: 564541 - protein, 15 aa, Homo sapiens
  CDR3 for alpha chain variable domain of TCR clone 282271 (TRAV21, TRAJ53)
WATLNSGGSNYKLTF

SEQ ID NO: 564542 - protein, 12 aa, Homo sapiens
  CDR3 for beta chain variable domain of TCR clone 282271 (TRBV11-2, TRBJ2-2)
CASSLGGGELFF

SEQ ID NO: 564543 - protein, 22 aa, Homo sapiens
  CDR3 for alpha chain variable domain of TCR clone 282272 (TRAV1-1, )
CASNACNNHIQNPDPAVYQLRD

SEQ ID NO: 564544 - protein, 14 aa, Homo sapiens
  CDR3 for beta chain variable domain of TCR clone 282272 (TRBV15, TRBJ2-1)
CATSGVEDYNEQFF

SEQ ID NO: 564545 - protein, 13 aa, Homo sapiens
  CDR3 for alpha chain variable domain of TCR clone 282273 (TRAV2, TRAJ40)
CAVVTSGTYKYIF

SEQ ID NO: 564546 - protein, 17 aa, Homo sapiens
  CDR3 for beta chain variable domain of TCR clone 282273 (TRBV15, TRBJ1-2)
CATSGREIDVVNYGYTF

SEQ ID NO: 564547 - protein, 13 aa, Homo sapiens
  CDR3 for alpha chain variable domain of TCR clone 282274 (TRAV27, TRAJ6)
CAGGTRVSYIPTF

SEQ ID NO: 564548 - protein, 15 aa, Homo sapiens
  CDR3 for beta chain variable domain of TCR clone 282274 (TRBV5-5, TRBJ2-7)
CASSLAAPLSYEQYF

SEQ ID NO: 564549 - protein, 16 aa, Homo sapiens
  CDR3 for alpha chain variable domain of TCR clone 282275 (TRAV3, TRAJ37)
CAVRGKGSGKTGKLIF

SEQ ID NO: 564550 - protein, 14 aa, Homo sapiens
  CDR3 for beta chain variable domain of TCR clone 282275 (TRBV7-2, TRBJ2-7)
CASSPKTSFYEQYF

SEQ ID NO: 564551 - protein, 10 aa, Homo sapiens
  CDR3 for alpha chain variable domain of TCR clone 282276 (TRAV38-2/DV8, TRAJ40)
CASGTYKYIF

SEQ ID NO: 564552 - protein, 18 aa, Homo sapiens
  CDR3 for beta chain variable domain of TCR clone 282276 (TRBV7-9, TRBJ2-7)
CASSLTTSGSRMWYEQYF

SEQ ID NO: 564553 - protein, 14 aa, Homo sapiens
  CDR3 for alpha chain variable domain of TCR clone 282277 (TRAV27, TRAJ13)
CRSSNSGGYQKVTF

SEQ ID NO: 564554 - protein, 12 aa, Homo sapiens
  CDR3 for beta chain variable domain of TCR clone 282277 (TRBV14, TRBJ2-5)
CASSQLNETQYF

SEQ ID NO: 564555 - protein, 17 aa, Homo sapiens
  CDR3 for alpha chain variable domain of TCR clone 282278 (TRAV12-2, TRAJ53)
CAPLTDSQEGSTYKLTF

SEQ ID NO: 564556 - protein, 16 aa, Homo sapiens
  CDR3 for beta chain variable domain of TCR clone 282278 (TRBV20-1, TRBJ2-3)
CSAVRDRGPIADTQYF

SEQ ID NO: 564557 - protein, 17 aa, Homo sapiens
  CDR3 for alpha chain variable domain of TCR clone 282279 (TRAV3, TRAJ6)
CAVRDGPRAGGSYIPTF

SEQ ID NO: 564558 - protein, 15 aa, Homo sapiens
  CDR3 for beta chain variable domain of TCR clone 282279 (TRBV19, TRBJ1-1)
CASSIGGGRNTEAFL

SEQ ID NO: 564559 - protein, 14 aa, Homo sapiens
  CDR3 for alpha chain variable domain of TCR clone 282280 (TRAV8-3, TRAJ30)
CAVGDMNRDDKSIF

SEQ ID NO: 564560 - protein, 17 aa, Homo sapiens
  CDR3 for beta chain variable domain of TCR clone 282280 (TRBV19, TRBJ2-2)
CASSRNTGGFGTGELFF

SEQ ID NO: 564561 - protein, 11 aa, Homo sapiens
  CDR3 for alpha chain variable domain of TCR clone 282281 (TRAV3, TRAJ21)
CAVGNFNKFYF

SEQ ID NO: 564562 - protein, 18 aa, Homo sapiens
  CDR3 for beta chain variable domain of TCR clone 282281 (TRBV19, TRBJ2-6)
CAWSADRAGSSGANVLTF

SEQ ID NO: 564563 - protein, 12 aa, Homo sapiens
  CDR3 for alpha chain variable domain of TCR clone 282282 (TRAV17, TRAJ30)
CVPERRGDKIIC

SEQ ID NO: 564564 - protein, 14 aa, Homo sapiens
  CDR3 for beta chain variable domain of TCR clone 282282 (TRBV7-7, TRBJ2-2)
CASSRDRSTGELFF

SEQ ID NO: 564565 - protein, 16 aa, Homo sapiens
  CDR3 for alpha chain variable domain of TCR clone 282283 (TRAV12-3, TRAJ53)
CAMSPGSGGSHYKLTF

SEQ ID NO: 564566 - protein, 13 aa, Homo sapiens
  CDR3 for beta chain variable domain of TCR clone 282283 (TRBV12-5, TRBJ2-3)
CASGDRQSDTQYF

SEQ ID NO: 564567 - protein, 18 aa, Homo sapiens
  CDR3 for alpha chain variable domain of TCR clone 282284 (TRAV1-1, TRAJ12)
CLLLLRCERGGSSYKLIF

SEQ ID NO: 564568 - protein, 15 aa, Homo sapiens
  CDR3 for beta chain variable domain of TCR clone 282284 (TRBV18, TRBJ2-5)
CASTDRGPRQETQYF

SEQ ID NO: 564569 - protein, 16 aa, Homo sapiens
  CDR3 for alpha chain variable domain of TCR clone 282285 (TRAV27, TRAJ13)
CAGAKSDSGGYQKVTF

SEQ ID NO: 564570 - protein, 14 aa, Homo sapiens
  CDR3 for beta chain variable domain of TCR clone 282285 (TRBV20-1, TRBJ2-7)
CSAPELAGVGEQYF

SEQ ID NO: 564571 - protein, 14 aa, Homo sapiens
  CDR3 for alpha chain variable domain of TCR clone 282286 (TRAV29/DV5, TRAJ36)
CAARRKTGANNLFS

SEQ ID NO: 564572 - protein, 15 aa, Homo sapiens
  CDR3 for beta chain variable domain of TCR clone 282286 (TRBV19, TRBJ1-6)
CASSTQGAVGSPLHF

SEQ ID NO: 564573 - protein, 13 aa, Homo sapiens
  CDR3 for alpha chain variable domain of TCR clone 282287 (TRAV1-1, TRAJ9)
CAAKNTGGFIPIF

SEQ ID NO: 564574 - protein, 14 aa, Homo sapiens
  CDR3 for beta chain variable domain of TCR clone 282287 (TRBV20-1, TRBJ2-1)
CSAQIGGSANEQFF

SEQ ID NO: 564575 - protein, 14 aa, Homo sapiens
  CDR3 for alpha chain variable domain of TCR clone 282288 (TRAV13-1, TRAJ35)
CAASKGGFGYALHC

SEQ ID NO: 564576 - protein, 13 aa, Homo sapiens
  CDR3 for beta chain variable domain of TCR clone 282288 (TRBV7-3, TRBJ1-1)
CASSQDWGAEAFF

SEQ ID NO: 564577 - protein, 13 aa, Homo sapiens
  CDR3 for alpha chain variable domain of TCR clone 282289 (TRAV4, TRAJ22)
CLGGSGSARQLTF

SEQ ID NO: 564578 - protein, 15 aa, Homo sapiens
  CDR3 for beta chain variable domain of TCR clone 282289 (TRBV7-9, TRBJ1-6)
CASSSPGRGNSPLHL

SEQ ID NO: 564579 - protein, 13 aa, Homo sapiens
  CDR3 for alpha chain variable domain of TCR clone 282290 (TRAV8-4, TRAJ47)
CAVTALYGNKLVF

SEQ ID NO: 564580 - protein, 12 aa, Homo sapiens
  CDR3 for beta chain variable domain of TCR clone 282290 (TRBV11-2, TRBJ2-2)
CASSLGGGELFF

SEQ ID NO: 564581 - protein, 14 aa, Homo sapiens
  CDR3 for alpha chain variable domain of TCR clone 282291 (TRAV1-2, TRAJ16)
CAVNRLSDGQTLLF

SEQ ID NO: 564582 - protein, 12 aa, Homo sapiens
  CDR3 for beta chain variable domain of TCR clone 282291 (TRBV11-2, TRBJ2-2)
CASSLGGGELFF

SEQ ID NO: 564583 - protein, 18 aa, Homo sapiens
  CDR3 for alpha chain variable domain of TCR clone 282292 (TRAV21, TRAJ52)
FAARPSPAGGTSYGKLTF

SEQ ID NO: 564584 - protein, 17 aa, Homo sapiens
  CDR3 for beta chain variable domain of TCR clone 282292 (TRBV13, TRBJ2-3)
CASSLSRVAGGRNTQYF

SEQ ID NO: 564585 - protein, 17 aa, Homo sapiens
  CDR3 for alpha chain variable domain of TCR clone 282293 (TRAV26-1, TRAJ37)
CIVRVITVSSNTGKLIF

SEQ ID NO: 564586 - protein, 15 aa, Homo sapiens
  CDR3 for beta chain variable domain of TCR clone 282293 (TRBV7-9, TRBJ1-4)
CASSRTGGFNEKLFF

SEQ ID NO: 564587 - protein, 13 aa, Homo sapiens
  CDR3 for alpha chain variable domain of TCR clone 282294 (TRAV2, TRAJ15)
CAVASQAGTALLF

SEQ ID NO: 564588 - protein, 16 aa, Homo sapiens
  CDR3 for beta chain variable domain of TCR clone 282294 (TRBV18, TRBJ1-5)
CASSPYRVEGNQPQHF

SEQ ID NO: 564589 - protein, 13 aa, Homo sapiens
  CDR3 for alpha chain variable domain of TCR clone 282295 (TRAV30, TRAJ39)
CGTERNAGNMLTF

SEQ ID NO: 564590 - protein, 12 aa, Homo sapiens
  CDR3 for beta chain variable domain of TCR clone 282295 (TRBV11-2, TRBJ2-2)
CASSLGGGELFF

SEQ ID NO: 564591 - protein, 14 aa, Homo sapiens
  CDR3 for alpha chain variable domain of TCR clone 282296 (TRAV23/DV6, TRAJ37)
CAANTSSNTGKLIF

SEQ ID NO: 564592 - protein, 12 aa, Homo sapiens
  CDR3 for beta chain variable domain of TCR clone 282296 (TRBV7-7, TRBJ1-1)
CQQLGANTEAFF

SEQ ID NO: 564593 - protein, 18 aa, Homo sapiens
  CDR3 for alpha chain variable domain of TCR clone 282297 (TRAV13-1, TRAJ52)
CAASKRSAGGTSYGKMTF

SEQ ID NO: 564594 - protein, 13 aa, Homo sapiens
  CDR3 for beta chain variable domain of TCR clone 282297 (TRBV7-3, TRBJ1-1)
CASSQDWGAEAFF

SEQ ID NO: 564595 - protein, 12 aa, Homo sapiens
  CDR3 for alpha chain variable domain of TCR clone 282298 (TRAV8-3, TRAJ43)
CAVGAGNNDMRF

SEQ ID NO: 564596 - protein, 14 aa, Homo sapiens
  CDR3 for beta chain variable domain of TCR clone 282298 (TRBV7-2, TRBJ2-7)
CASSPKTSFYGQYF

SEQ ID NO: 564597 - protein, 13 aa, Homo sapiens
  CDR3 for alpha chain variable domain of TCR clone 282299 (TRAV8-3, TRAJ28)
CAVGAVGSYQLTF

SEQ ID NO: 564598 - protein, 13 aa, Homo sapiens
  CDR3 for beta chain variable domain of TCR clone 282299 (TRBV20-1, TRBJ2-7)
CSASPFSSYEQYF

SEQ ID NO: 564599 - protein, 15 aa, Homo sapiens
  CDR3 for alpha chain variable domain of TCR clone 282300 (TRAV12-2, TRAJ56)
CAVNPFTGANSKLTL

SEQ ID NO: 564600 - protein, 13 aa, Homo sapiens
  CDR3 for beta chain variable domain of TCR clone 282300 (TRBV20-1, TRBJ1-2)
CSARDRVYGGYTF

SEQ ID NO: 564601 - protein, 18 aa, Homo sapiens
  CDR3 for alpha chain variable domain of TCR clone 282301 (TRAV13-1, TRAJ52)
CAASKRSAGGTSYGKLTF

SEQ ID NO: 564602 - protein, 13 aa, Homo sapiens
  CDR3 for beta chain variable domain of TCR clone 282301 (TRBV12-4, TRBJ1-2)
YASSLRQGKGYIF

SEQ ID NO: 564603 - protein, 15 aa, Homo sapiens
  CDR3 for alpha chain variable domain of TCR clone 282302 (TRAV2, TRAJ9)
CAVADLNTGGFKTIF

SEQ ID NO: 564604 - protein, 19 aa, Homo sapiens
  CDR3 for beta chain variable domain of TCR clone 282302 (TRBV28, TRBJ2-4)
CASSFQPGGPAHSKNIQYF

SEQ ID NO: 564605 - protein, 13 aa, Homo sapiens
  CDR3 for alpha chain variable domain of TCR clone 282303 (TRAV13-2, TRAJ40)
CAETLSGTYKYIF

SEQ ID NO: 564606 - protein, 14 aa, Homo sapiens
  CDR3 for beta chain variable domain of TCR clone 282303 (TRBV19, TRBJ2-1)
CASPTFVLSGEQFF

SEQ ID NO: 564607 - protein, 13 aa, Homo sapiens
  CDR3 for alpha chain variable domain of TCR clone 282304 (TRAV2, TRAJ15)
CAVASQAGTALIF

SEQ ID NO: 564608 - protein, 15 aa, Homo sapiens
  CDR3 for beta chain variable domain of TCR clone 282304 (TRBV9, TRBJ2-1)
CASSLAGSSYNEQFF

SEQ ID NO: 564609 - protein, 13 aa, Homo sapiens
  CDR3 for alpha chain variable domain of TCR clone 282305 (TRAV12-2, TRAJ13)
CAVTAGGYQKVTF

SEQ ID NO: 564610 - protein, 14 aa, Homo sapiens
  CDR3 for beta chain variable domain of TCR clone 282305 (TRBV19, TRBJ2-1)
CASPTFVLSGEQFF

SEQ ID NO: 564611 - protein, 16 aa, Homo sapiens
  CDR3 for alpha chain variable domain of TCR clone 282306 (TRAV3, TRAJ37)
CAVRVRGSGNTGKLIF

SEQ ID NO: 564612 - protein, 12 aa, Homo sapiens
  CDR3 for beta chain variable domain of TCR clone 282306 (TRBV11-2, TRBJ2-1)
CASSPGNNEQFF

SEQ ID NO: 564613 - protein, 14 aa, Homo sapiens
  CDR3 for alpha chain variable domain of TCR clone 282307 (TRAV12-2, TRAJ40)
CAVKIPSGTYKYIF

SEQ ID NO: 564614 - protein, 20 aa, Homo sapiens
  CDR3 for beta chain variable domain of TCR clone 282307 (TRBV28, TRBJ2-1)
CASTPIGRSPGLAGGSEQFF

SEQ ID NO: 564615 - protein, 17 aa, Homo sapiens
  CDR3 for alpha chain variable domain of TCR clone 282308 (TRAV3, TRAJ6)
CAVRDGPRAGGSYIPTS

SEQ ID NO: 564616 - protein, 16 aa, Homo sapiens
  CDR3 for beta chain variable domain of TCR clone 282308 (TRBV7-8, TRBJ2-3)
CASSTEGQRETDTQYF

SEQ ID NO: 564617 - protein, 14 aa, Homo sapiens
  CDR3 for alpha chain variable domain of TCR clone 282309 (TRAV22, TRAJ23)
CAVGLYNQGGKLIF

SEQ ID NO: 564618 - protein, 14 aa, Homo sapiens
  CDR3 for beta chain variable domain of TCR clone 282309 (TRBV19, TRBJ2-1)
CASPTFVLSGEQFF

SEQ ID NO: 564619 - protein, 16 aa, Homo sapiens
  CDR3 for alpha chain variable domain of TCR clone 282310 (TRAV20, TRAJ28)
CAVRDPSGAGSYQLTF

SEQ ID NO: 564620 - protein, 17 aa, Homo sapiens
  CDR3 for beta chain variable domain of TCR clone 282310 (TRBV13, TRBJ2-3)
CASSLSRVAGGRNTQYF

SEQ ID NO: 564621 - protein, 14 aa, Homo sapiens
  CDR3 for alpha chain variable domain of TCR clone 282311 (TRAV26-1, TRAJ34)
CIVRVAYNTDNLIF

SEQ ID NO: 564622 - protein, 15 aa, Homo sapiens
  CDR3 for beta chain variable domain of TCR clone 282311 (TRBV6-6, TRBJ2-7)
CASSYSYGGSYEQYF

SEQ ID NO: 564623 - protein, 11 aa, Homo sapiens
  CDR3 for alpha chain variable domain of TCR clone 282312 (TRAV21, TRAJ39)
LLVNAGNMLSF

SEQ ID NO: 564624 - protein, 12 aa, Homo sapiens
  CDR3 for beta chain variable domain of TCR clone 282312 (TRBV3-1, TRBJ2-1)
CASSQGSSGQFF

SEQ ID NO: 564625 - protein, 18 aa, Homo sapiens
  CDR3 for alpha chain variable domain of TCR clone 282313 (TRAV21, TRAJ52)
CAVRSSPAGGTSYGKLTF

SEQ ID NO: 564626 - protein, 16 aa, Homo sapiens
  CDR3 for beta chain variable domain of TCR clone 282313 (TRBV13, TRBJ2-3)
CQQPLQGSGGRNTQYF

SEQ ID NO: 564627 - protein, 14 aa, Homo sapiens
  CDR3 for alpha chain variable domain of TCR clone 282314 (TRAV12-1, TRAJ3)
CVVNPGSSASKIIF

SEQ ID NO: 564628 - protein, 17 aa, Homo sapiens
  CDR3 for beta chain variable domain of TCR clone 282314 (TRBV11-2, TRBJ2-1)
CASSLYPPGVEYNEQFF

SEQ ID NO: 564629 - protein, 14 aa, Homo sapiens
  CDR3 for alpha chain variable domain of TCR clone 282315 (TRAV12-2, TRAJ52)
CAVPGGTSYGKMTF

SEQ ID NO: 564630 - protein, 12 aa, Homo sapiens
  CDR3 for beta chain variable domain of TCR clone 282315 (TRBV18, TRBJ2-1)
CASSPGTSEGFF

SEQ ID NO: 564631 - protein, 10 aa, Homo sapiens
  CDR3 for alpha chain variable domain of TCR clone 282316 (TRAV13-2, TRAJ20)
CAENICRLQA

SEQ ID NO: 564632 - protein, 15 aa, Homo sapiens
  CDR3 for beta chain variable domain of TCR clone 282316 (TRBV6-1, TRBJ2-3)
CASSERGGITDTQYF

SEQ ID NO: 564633 - protein, 15 aa, Homo sapiens
  CDR3 for alpha chain variable domain of TCR clone 282317 (TRAV13-1, TRAJ32)
CAASIYGGSTNKLIF

SEQ ID NO: 564634 - protein, 12 aa, Homo sapiens
  CDR3 for beta chain variable domain of TCR clone 282317 (TRBV7-6, TRBJ2-3)
CASRTGTDTQYF

SEQ ID NO: 564635 - protein, 14 aa, Homo sapiens
  CDR3 for alpha chain variable domain of TCR clone 282318 (TRAV17, TRAJ57)
CATDPQGGSEKLVF

SEQ ID NO: 564636 - protein, 15 aa, Homo sapiens
  CDR3 for beta chain variable domain of TCR clone 282318 (TRBV18, TRBJ2-1)
CASSPPSASYNEQFF

SEQ ID NO: 564637 - protein, 16 aa, Homo sapiens
  CDR3 for alpha chain variable domain of TCR clone 282319 (TRAV30, TRAJ24)
CGTEIVDADSWGKSQF

SEQ ID NO: 564638 - protein, 14 aa, Homo sapiens
  CDR3 for beta chain variable domain of TCR clone 282319 (TRBV9, TRBJ2-4)
CASSPSGTSGFQYF

SEQ ID NO: 564639 - protein, 13 aa, Homo sapiens
  CDR3 for alpha chain variable domain of TCR clone 282320 (TRAV27, TRAJ56)
CAGKPGANSKLTF

SEQ ID NO: 564640 - protein, 15 aa, Homo sapiens
  CDR3 for beta chain variable domain of TCR clone 282320 (TRBV7-9, TRBJ1-4)
CASSRTGGFNEKLFF

SEQ ID NO: 564641 - protein, 14 aa, Homo sapiens
  CDR3 for alpha chain variable domain of TCR clone 282321 (TRAV12-3, TRAJ56)
CAMSVTGANSKLTF

SEQ ID NO: 564642 - protein, 15 aa, Homo sapiens
  CDR3 for beta chain variable domain of TCR clone 282321 (TRBV6-6, TRBJ2-7)
CASSYSYGGSYEQYF

SEQ ID NO: 564643 - protein, 16 aa, Homo sapiens
  CDR3 for alpha chain variable domain of TCR clone 282322 (TRAV8-3, TRAJ13)
CAVGAYPSGGYQKVTF

SEQ ID NO: 564644 - protein, 15 aa, Homo sapiens
  CDR3 for beta chain variable domain of TCR clone 282322 (TRBV19, TRBJ1-5)
CVSSIVWADNQPQHF

SEQ ID NO: 564645 - protein, 16 aa, Homo sapiens
  CDR3 for alpha chain variable domain of TCR clone 282323 (TRAV26-2, TRAJ57)
CILRDVGSGGSEKLVF

SEQ ID NO: 564646 - protein, 13 aa, Homo sapiens
  CDR3 for beta chain variable domain of TCR clone 282323 (TRBV18, TRBJ2-3)
CASSPGVTDTQYC

SEQ ID NO: 564647 - protein, 12 aa, Homo sapiens
  CDR3 for alpha chain variable domain of TCR clone 282324 (TRAV26-1, TRAJ36)
CIVRVRADNLFF

SEQ ID NO: 564648 - protein, 19 aa, Homo sapiens
  CDR3 for beta chain variable domain of TCR clone 282324 (TRBV25-1, TRBJ2-2)
CAILVYRVDRGRKTGELFF

SEQ ID NO: 564649 - protein, 13 aa, Homo sapiens
  CDR3 for alpha chain variable domain of TCR clone 282325 (TRAV20, TRAJ21)
CSVEGYNFNKFYF

SEQ ID NO: 564650 - protein, 14 aa, Homo sapiens
  CDR3 for beta chain variable domain of TCR clone 282325 (TRBV12-5, TRBJ2-5)
CASGSRTHQETQYF

SEQ ID NO: 564651 - protein, 14 aa, Homo sapiens
  CDR3 for alpha chain variable domain of TCR clone 282326 (TRAV12-2, TRAJ17)
CAVPFKAAGNKLTF

SEQ ID NO: 564652 - protein, 13 aa, Homo sapiens
  CDR3 for beta chain variable domain of TCR clone 282326 (TRBV10-3, TRBJ2-7)
CASKLAVNYEQYF

SEQ ID NO: 564653 - protein, 16 aa, Homo sapiens
  CDR3 for alpha chain variable domain of TCR clone 282327 (TRAV30, TRAJ24)
SGTEIVDADSWGKFQF

SEQ ID NO: 564654 - protein, 16 aa, Homo sapiens
  CDR3 for beta chain variable domain of TCR clone 282327 (TRBV6-1, TRBJ2-5)
CASSETLDRGAETQYF

SEQ ID NO: 564655 - protein, 16 aa, Homo sapiens
  CDR3 for alpha chain variable domain of TCR clone 282328 (TRAV3, TRAJ37)
CAARGKGSGNTGKLIF

SEQ ID NO: 564656 - protein, 12 aa, Homo sapiens
  CDR3 for beta chain variable domain of TCR clone 282328 (TRBV11-2, TRBJ2-2)
CASSLGGGELFF

SEQ ID NO: 564657 - protein, 23 aa, Homo sapiens
  CDR3 for alpha chain variable domain of TCR clone 282329 (TRAV12-2, TRAJ36)
SLLIRDSQPSDSATLERANNLFF

SEQ ID NO: 564658 - protein, 12 aa, Homo sapiens
  CDR3 for beta chain variable domain of TCR clone 282329 (TRBV29-1, TRBJ1-3)
CSTRDSGNTIYF

SEQ ID NO: 564659 - protein, 17 aa, Homo sapiens
  CDR3 for alpha chain variable domain of TCR clone 282330 (TRAV8-6, TRAJ8)
SAVKEGVENTGFQKLVF

SEQ ID NO: 564660 - protein, 12 aa, Homo sapiens
  CDR3 for beta chain variable domain of TCR clone 282330 (TRBV19, TRBJ1-4)
CASKDWPGGLFF

SEQ ID NO: 564661 - protein, 11 aa, Homo sapiens
  CDR3 for alpha chain variable domain of TCR clone 282331 (TRAV3, TRAJ13)
CAVTCYQKVTF

SEQ ID NO: 564662 - protein, 15 aa, Homo sapiens
  CDR3 for beta chain variable domain of TCR clone 282331 (TRBV7-9, TRBJ2-7)
CASSSSGLAVYEQYF

SEQ ID NO: 564663 - protein, 16 aa, Homo sapiens
  CDR3 for alpha chain variable domain of TCR clone 282332 (TRAV23/DV6, TRAJ21)
CAASSEGGTTSTNFTL

SEQ ID NO: 564664 - protein, 14 aa, Homo sapiens
  CDR3 for beta chain variable domain of TCR clone 282332 (TRBV2, TRBJ2-7)
CASSLTSGGYEQYF

SEQ ID NO: 564665 - protein, 15 aa, Homo sapiens
  CDR3 for alpha chain variable domain of TCR clone 282333 (TRAV8-3, TRAJ27)
CAVGPSKTNAGKSTF

SEQ ID NO: 564666 - protein, 15 aa, Homo sapiens
  CDR3 for beta chain variable domain of TCR clone 282333 (TRBV7-2, TRBJ2-1)
CASSTGLAGGNEQFF

SEQ ID NO: 564667 - protein, 17 aa, Homo sapiens
  CDR3 for alpha chain variable domain of TCR clone 282334 (TRAV3, TRAJ6)
CAVRDGHRAGGSYIPTF

SEQ ID NO: 564668 - protein, 20 aa, Homo sapiens
  CDR3 for beta chain variable domain of TCR clone 282334 (TRBV28, TRBJ2-1)
CASTPIGRSPGLAGGNEQFF

SEQ ID NO: 564669 - protein, 14 aa, Homo sapiens
  CDR3 for alpha chain variable domain of TCR clone 282335 (TRAV4, TRAJ33)
CLVGDSDSNYQLIW

SEQ ID NO: 564670 - protein, 12 aa, Homo sapiens
  CDR3 for beta chain variable domain of TCR clone 282335 (TRBV11-2, TRBJ2-2)
CASSLGGGELFF

SEQ ID NO: 564671 - protein, 15 aa, Homo sapiens
  CDR3 for alpha chain variable domain of TCR clone 282336 (TRAV3, TRAJ9)
CAGRDSNTGGFKTIF

SEQ ID NO: 564672 - protein, 16 aa, Homo sapiens
  CDR3 for beta chain variable domain of TCR clone 282336 (TRBV15, TRBJ2-5)
CATSPTTGQGMETHYF

SEQ ID NO: 564673 - protein, 17 aa, Homo sapiens
  CDR3 for alpha chain variable domain of TCR clone 282337 (TRAV2, TRAJ20)
FTTVLWSFRSNDYKLSF

SEQ ID NO: 564674 - protein, 12 aa, Homo sapiens
  CDR3 for beta chain variable domain of TCR clone 282337 (TRBV7-6, TRBJ2-3)
CASSTGTDTQYF

SEQ ID NO: 564675 - protein, 11 aa, Homo sapiens
  CDR3 for alpha chain variable domain of TCR clone 282338 (TRAV2, TRAJ33)
CAVDSNYQLIW

SEQ ID NO: 564676 - protein, 15 aa, Homo sapiens
  CDR3 for beta chain variable domain of TCR clone 282338 (TRBV19, TRBJ1-1)
CASTSGQIQNIEAFF

SEQ ID NO: 564677 - protein, 13 aa, Homo sapiens
  CDR3 for alpha chain variable domain of TCR clone 282339 (TRAV8-6, TRAJ40)
CVVSVTGTYKYIF

SEQ ID NO: 564678 - protein, 15 aa, Homo sapiens
  CDR3 for beta chain variable domain of TCR clone 282339 (TRBV4-1, TRBJ2-3)
CASGRGQGIPDTQYF

SEQ ID NO: 564679 - protein, 12 aa, Homo sapiens
  CDR3 for alpha chain variable domain of TCR clone 282340 (TRAV2, TRAJ33)
CAVEDSNYQLIW

SEQ ID NO: 564680 - protein, 14 aa, Homo sapiens
  CDR3 for beta chain variable domain of TCR clone 282340 (TRBV19, TRBJ1-2)
CASSRQGSSIGYTF

SEQ ID NO: 564681 - protein, 13 aa, Homo sapiens
  CDR3 for alpha chain variable domain of TCR clone 282341 (TRAV26-1, TRAJ31)
CIVRVDGNARLMF

SEQ ID NO: 564682 - protein, 17 aa, Homo sapiens
  CDR3 for beta chain variable domain of TCR clone 282341 (TRBV11-3, TRBJ2-1)
CASSLYPPGVEYNEQFF

SEQ ID NO: 564683 - protein, 13 aa, Homo sapiens
  CDR3 for alpha chain variable domain of TCR clone 282342 (TRAV12-3, TRAJ47)
CAMKKEYGNKLVF

SEQ ID NO: 564684 - protein, 16 aa, Homo sapiens
  CDR3 for beta chain variable domain of TCR clone 282342 (TRBV20-1, TRBJ1-2)
SAVPRWDGVANYGYTF

SEQ ID NO: 564685 - protein, 14 aa, Homo sapiens
  CDR3 for alpha chain variable domain of TCR clone 282343 (TRAV12-3, TRAJ10)
SHLPLTGGGNKLTF

SEQ ID NO: 564686 - protein, 14 aa, Homo sapiens
  CDR3 for beta chain variable domain of TCR clone 282343 (TRBV15, TRBJ2-7)
CATSRVARGYEQYF

SEQ ID NO: 564687 - protein, 16 aa, Homo sapiens
  CDR3 for alpha chain variable domain of TCR clone 282344 (TRAV3, TRAJ10)
CAVRDMTAGGGNKLTL

SEQ ID NO: 564688 - protein, 16 aa, Homo sapiens
  CDR3 for beta chain variable domain of TCR clone 282344 (TRBV6-3, TRBJ1-2)
CASSYSRRASNYGYTF

SEQ ID NO: 564689 - protein, 13 aa, Homo sapiens
  CDR3 for alpha chain variable domain of TCR clone 282345 (TRAV12-2, TRAJ20)
CAVYPSNDYKLSF

SEQ ID NO: 564690 - protein, 14 aa, Homo sapiens
  CDR3 for beta chain variable domain of TCR clone 282345 (TRBV10-2, TRBJ1-5)
CASSSTGRNQPQHF

SEQ ID NO: 564691 - protein, 15 aa, Homo sapiens
  CDR3 for alpha chain variable domain of TCR clone 282346 (TRAV12-2, TRAJ56)
CAVNPFTGANSKLTF

SEQ ID NO: 564692 - protein, 17 aa, Homo sapiens
  CDR3 for beta chain variable domain of TCR clone 282346 (TRBV13, TRBJ2-3)
CASSLSRVAGGRNTQYF

SEQ ID NO: 564693 - protein, 15 aa, Homo sapiens
  CDR3 for alpha chain variable domain of TCR clone 282347 (TRAV3, TRAJ22)
CAVRDRGGSARQLTF

SEQ ID NO: 564694 - protein, 15 aa, Homo sapiens
  CDR3 for beta chain variable domain of TCR clone 282347 (TRBV20-1, TRBJ1-1)
CSASRGVTGKTEAFF

SEQ ID NO: 564695 - protein, 13 aa, Homo sapiens
  CDR3 for alpha chain variable domain of TCR clone 282348 (TRAV2, TRAJ9)
CAVESTGGFKTIF

SEQ ID NO: 564696 - protein, 18 aa, Homo sapiens
  CDR3 for beta chain variable domain of TCR clone 282348 (TRBV10-3, TRBJ2-1)
CTSVPSPSAGGTDNEQFF

SEQ ID NO: 564697 - protein, 13 aa, Homo sapiens
  CDR3 for alpha chain variable domain of TCR clone 282349 (TRAV13-1, TRAJ43)
CAASLSNNNDMRF

SEQ ID NO: 564698 - protein, 15 aa, Homo sapiens
  CDR3 for beta chain variable domain of TCR clone 282349 (TRBV5-1, TRBJ2-1)
CASSQAVYRWNEQFF

SEQ ID NO: 564699 - protein, 20 aa, Homo sapiens
  CDR3 for alpha chain variable domain of TCR clone 282350 (TRAV1-1, TRAJ39)
CLLLLRCESSAYNAGNMLTF

SEQ ID NO: 564700 - protein, 13 aa, Homo sapiens
  CDR3 for beta chain variable domain of TCR clone 282350 (TRBV12-4, TRBJ1-5)
CASIPDRAQPQHF

SEQ ID NO: 564701 - protein, 14 aa, Homo sapiens
  CDR3 for alpha chain variable domain of TCR clone 282351 (TRAV26-1, TRAJ38)
CIADNAGNNRKLIW

SEQ ID NO: 564702 - protein, 16 aa, Homo sapiens
  CDR3 for beta chain variable domain of TCR clone 282351 (TRBV7-9, TRBJ1-2)
CASSPGGGAINYGYTF

SEQ ID NO: 564703 - protein, 13 aa, Homo sapiens
  CDR3 for alpha chain variable domain of TCR clone 282352 (TRAV8-4, TRAJ36)
CAVSEGGENNLFF

SEQ ID NO: 564704 - protein, 12 aa, Homo sapiens
  CDR3 for beta chain variable domain of TCR clone 282352 (TRBV28, TRBJ2-7)
CASTGNHYEQYF

SEQ ID NO: 564705 - protein, 14 aa, Homo sapiens
  CDR3 for alpha chain variable domain of TCR clone 282353 (TRAV12-2, TRAJ44)
CAVNPAGTASKLTF

SEQ ID NO: 564706 - protein, 12 aa, Homo sapiens
  CDR3 for beta chain variable domain of TCR clone 282353 (TRBV24-1, TRBJ1-1)
CATLYPDTEAFF

SEQ ID NO: 564707 - protein, 17 aa, Homo sapiens
  CDR3 for alpha chain variable domain of TCR clone 282354 (TRAV3, TRAJ6)
CAVRDGPRAGGSYIPSF

SEQ ID NO: 564708 - protein, 12 aa, Homo sapiens
  CDR3 for beta chain variable domain of TCR clone 282354 (TRBV11-2, TRBJ2-1)
CASSPGNNEQFF

SEQ ID NO: 564709 - protein, 11 aa, Homo sapiens
  CDR3 for alpha chain variable domain of TCR clone 282355 (TRAV1-1, TRAJ23)
CAERQGGKLIF

SEQ ID NO: 564710 - protein, 20 aa, Homo sapiens
  CDR3 for beta chain variable domain of TCR clone 282355 (TRBV7-8, TRBJ2-2)
CASSHLFPGPTIHITGELFF

SEQ ID NO: 564711 - protein, 23 aa, Homo sapiens
  CDR3 for alpha chain variable domain of TCR clone 282356 (TRAV12-2, TRAJ22)
CAVSFRVHPGPPIGSGSARQLTC

SEQ ID NO: 564712 - protein, 13 aa, Homo sapiens
  CDR3 for beta chain variable domain of TCR clone 282356 (TRBV12-4, TRBJ1-2)
CASSLDSNYGYTF

SEQ ID NO: 564713 - protein, 13 aa, Homo sapiens
  CDR3 for alpha chain variable domain of TCR clone 282357 (TRAV16, TRAJ9)
CALRATGGFKTNF

SEQ ID NO: 564714 - protein, 16 aa, Homo sapiens
  CDR3 for beta chain variable domain of TCR clone 282357 (TRBV5-1, TRBJ1-3)
CASSRSGEDSGNTIYF

SEQ ID NO: 564715 - protein, 10 aa, Homo sapiens
  CDR3 for alpha chain variable domain of TCR clone 282358 (TRAV26-1, TRAJ40)
CVAGTYKYIF

SEQ ID NO: 564716 - protein, 15 aa, Homo sapiens
  CDR3 for beta chain variable domain of TCR clone 282358 (TRBV19, TRBJ2-1)
CASSSPGVPLDEQFF

SEQ ID NO: 564717 - protein, 14 aa, Homo sapiens
  CDR3 for alpha chain variable domain of TCR clone 282359 (TRAV8-2, TRAJ4)
CVVSRSGGYNKLIF

SEQ ID NO: 564718 - protein, 15 aa, Homo sapiens
  CDR3 for beta chain variable domain of TCR clone 282359 (TRBV4-1, TRBJ1-4)
CASSDTGGTNEKLFF

SEQ ID NO: 564719 - protein, 14 aa, Homo sapiens
  CDR3 for alpha chain variable domain of TCR clone 282360 (TRAV38-1, TRAJ40)
CALRPTSGTYKYIF

SEQ ID NO: 564720 - protein, 13 aa, Homo sapiens
  CDR3 for beta chain variable domain of TCR clone 282360 (TRBV18, TRBJ2-5)
CASSPAGKETQYF

SEQ ID NO: 564721 - protein, 15 aa, Homo sapiens
  CDR3 for alpha chain variable domain of TCR clone 282361 (TRAV2, TRAJ9)
CAVEDRGTGGFKTIF

SEQ ID NO: 564722 - protein, 12 aa, Homo sapiens
  CDR3 for beta chain variable domain of TCR clone 282361 (TRBV7-9, TRBJ2-7)
CASSMKREEQYF

SEQ ID NO: 564723 - protein, 18 aa, Homo sapiens
  CDR3 for alpha chain variable domain of TCR clone 282362 (TRAV26-2, TRAJ45)
CILRVDKYSGGGADGLPF

SEQ ID NO: 564724 - protein, 16 aa, Homo sapiens
  CDR3 for beta chain variable domain of TCR clone 282362 (TRBV12-5, TRBJ2-5)
CASGPRTSGDQETQYF

SEQ ID NO: 564725 - protein, 16 aa, Homo sapiens
  CDR3 for alpha chain variable domain of TCR clone 282363 (TRAV21, TRAJ37)
CAVRTAGSSNTGKPIF

SEQ ID NO: 564726 - protein, 13 aa, Homo sapiens
  CDR3 for beta chain variable domain of TCR clone 282363 (TRBV7-9, TRBJ2-5)
CASLPSGREAQYF

SEQ ID NO: 564727 - protein, 14 aa, Homo sapiens
  CDR3 for alpha chain variable domain of TCR clone 282364 (TRAV38-1, TRAJ40)
CALRTTSGTSKYIF

SEQ ID NO: 564728 - protein, 14 aa, Homo sapiens
  CDR3 for beta chain variable domain of TCR clone 282364 (TRBV25-1, TRBJ1-1)
CASTHLGGNTEAFF

SEQ ID NO: 564729 - protein, 16 aa, Homo sapiens
  CDR3 for alpha chain variable domain of TCR clone 282365 (TRAV30, TRAJ24)
CGTEIVDADSWGKFQF

SEQ ID NO: 564730 - protein, 14 aa, Homo sapiens
  CDR3 for beta chain variable domain of TCR clone 282365 (TRBV12-5, TRBJ2-5)
CASGSRTHQGTQYL

SEQ ID NO: 564731 - protein, 14 aa, Homo sapiens
  CDR3 for alpha chain variable domain of TCR clone 282366 (TRAV12-1, TRAJ15)
CVVNRNQAGTALIF

SEQ ID NO: 564732 - protein, 15 aa, Homo sapiens
  CDR3 for beta chain variable domain of TCR clone 282366 (TRBV11-3, TRBJ2-3)
CASLKDGREGDTQYF

SEQ ID NO: 564733 - protein, 21 aa, Homo sapiens
  CDR3 for alpha chain variable domain of TCR clone 282367 (TRAV8-3, TRAJ10)
CAVGHTHGRRKQTHLWDRHPA

SEQ ID NO: 564734 - protein, 10 aa, Homo sapiens
  CDR3 for beta chain variable domain of TCR clone 282367 (TRBV20-1, TRBJ2-5)
CSARFETQYF

SEQ ID NO: 564735 - protein, 16 aa, Homo sapiens
  CDR3 for alpha chain variable domain of TCR clone 282368 (TRAV8-3, TRAJ10)
CAVGPIFTGGGNKLTF

SEQ ID NO: 564736 - protein, 16 aa, Homo sapiens
  CDR3 for beta chain variable domain of TCR clone 282368 (TRBV7-2, TRBJ2-5)
CASSSKWLSGQETQYF

SEQ ID NO: 564737 - protein, 20 aa, Homo sapiens
  CDR3 for alpha chain variable domain of TCR clone 282369 (TRAV21, TRAJ4)
AASQPGDSATLAGGYNKLIF

SEQ ID NO: 564738 - protein, 19 aa, Homo sapiens
  CDR3 for beta chain variable domain of TCR clone 282369 (TRBV18, TRBJ1-3)
CANSPLSRTGMSSGNTIYF

SEQ ID NO: 564739 - protein, 13 aa, Homo sapiens
  CDR3 for alpha chain variable domain of TCR clone 282370 (TRAV12-3, TRAJ16)
CAVQLSDCQKLLF

SEQ ID NO: 564740 - protein, 14 aa, Homo sapiens
  CDR3 for beta chain variable domain of TCR clone 282370 (TRBV5-1, TRBJ2-1)
CASSLDGDWNEQFF

SEQ ID NO: 564741 - protein, 12 aa, Homo sapiens
  CDR3 for alpha chain variable domain of TCR clone 282371 (TRAV13-1, TRAJ49)
CAAPNTGNQFHF

SEQ ID NO: 564742 - protein, 19 aa, Homo sapiens
  CDR3 for beta chain variable domain of TCR clone 282371 (TRBV25-1, TRBJ2-7)
CASSDARVVFHPTSSTSGR

SEQ ID NO: 564743 - protein, 12 aa, Homo sapiens
  CDR3 for alpha chain variable domain of TCR clone 282372 (TRAV8-4, TRAJ31)
CAVSDSNARLMF

SEQ ID NO: 564744 - protein, 14 aa, Homo sapiens
  CDR3 for beta chain variable domain of TCR clone 282372 (TRBV20-1, TRBJ2-7)
CSAKRGRGSYEQYF

SEQ ID NO: 564745 - protein, 15 aa, Homo sapiens
  CDR3 for alpha chain variable domain of TCR clone 282373 (TRAV21, TRAJ40)
CAVRPQTSGTYKYIF

SEQ ID NO: 564746 - protein, 13 aa, Homo sapiens
  CDR3 for beta chain variable domain of TCR clone 282373 (TRBV7-2, TRBJ2-2)
CSSSSVRAGELFF

SEQ ID NO: 564747 - protein, 14 aa, Homo sapiens
  CDR3 for alpha chain variable domain of TCR clone 282374 (TRAV12-3, TRAJ10)
SHLPLTGGGNKLTF

SEQ ID NO: 564748 - protein, 14 aa, Homo sapiens
  CDR3 for beta chain variable domain of TCR clone 282374 (TRBV19, TRBJ2-3)
CASSRLARTDTQYF

SEQ ID NO: 564749 - protein, 13 aa, Homo sapiens
  CDR3 for alpha chain variable domain of TCR clone 282375 (TRAV22, TRAJ29)
FAVGGSGNTPLVF

SEQ ID NO: 564750 - protein, 13 aa, Homo sapiens
  CDR3 for beta chain variable domain of TCR clone 282375 (TRBV4-2, TRBJ1-1)
CASSQAVNTEAFF

SEQ ID NO: 564751 - protein, 13 aa, Homo sapiens
  CDR3 for alpha chain variable domain of TCR clone 282376 (TRAV21, TRAJ27)
CAALNNNAGKSTF

SEQ ID NO: 564752 - protein, 14 aa, Homo sapiens
  CDR3 for beta chain variable domain of TCR clone 282376 (TRBV27, TRBJ1-1)
CASSLLSGLSEAFF

SEQ ID NO: 564753 - protein, 13 aa, Homo sapiens
  CDR3 for alpha chain variable domain of TCR clone 282377 (TRAV21, TRAJ57)
CAVIEGGSEKLVF

SEQ ID NO: 564754 - protein, 15 aa, Homo sapiens
  CDR3 for beta chain variable domain of TCR clone 282377 (TRBV28, TRBJ1-3)
CASSMGWASGNTIYF

SEQ ID NO: 564755 - protein, 10 aa, Homo sapiens
  CDR3 for alpha chain variable domain of TCR clone 282378 (TRAV12-2, TRAJ52)
RSTSYGKLTF

SEQ ID NO: 564756 - protein, 12 aa, Homo sapiens
  CDR3 for beta chain variable domain of TCR clone 282378 (TRBV24-1, TRBJ1-1)
CATSDSDRGAFF

SEQ ID NO: 564757 - protein, 13 aa, Homo sapiens
  CDR3 for alpha chain variable domain of TCR clone 282379 (TRAV2, TRAJ23)
CAVMGNQGGKLIF

SEQ ID NO: 564758 - protein, 15 aa, Homo sapiens
  CDR3 for beta chain variable domain of TCR clone 282379 (TRBV11-2, TRBJ2-1)
CASSSSTISYNGQFF

SEQ ID NO: 564759 - protein, 14 aa, Homo sapiens
  CDR3 for alpha chain variable domain of TCR clone 282380 (TRAV27, TRAJ22)
CAGVSVLAKRQLTF

SEQ ID NO: 564760 - protein, 17 aa, Homo sapiens
  CDR3 for beta chain variable domain of TCR clone 282380 (TRBV14, TRBJ2-1)
CASSQDRRVTSYNEQFF

SEQ ID NO: 564761 - protein, 13 aa, Homo sapiens
  CDR3 for alpha chain variable domain of TCR clone 282381 (TRAV29/DV5, TRAJ22)
CAHHSGSARQLTF

SEQ ID NO: 564762 - protein, 14 aa, Homo sapiens
  CDR3 for beta chain variable domain of TCR clone 282381 (TRBV16, TRBJ1-1)
CASSQAGPNTEAFF

SEQ ID NO: 564763 - protein, 11 aa, Homo sapiens
  CDR3 for alpha chain variable domain of TCR clone 282382 (TRAV2, TRAJ31)
CAAGPPARLMF

SEQ ID NO: 564764 - protein, 13 aa, Homo sapiens
  CDR3 for beta chain variable domain of TCR clone 282382 (TRBV7-9, TRBJ1-2)
CASSLKQNYGYTF

SEQ ID NO: 564765 - protein, 16 aa, Homo sapiens
  CDR3 for alpha chain variable domain of TCR clone 282383 (TRAV9-2, TRAJ10)
CALSEGGTGGGNKPTF

SEQ ID NO: 564766 - protein, 16 aa, Homo sapiens
  CDR3 for beta chain variable domain of TCR clone 282383 (TRBV7-2, TRBJ1-4)
CASSPVGRFDREKLFF

SEQ ID NO: 564767 - protein, 15 aa, Homo sapiens
  CDR3 for alpha chain variable domain of TCR clone 282384 (TRAV13-1, TRAJ44)
CAASRNTGTASKLTF

SEQ ID NO: 564768 - protein, 14 aa, Homo sapiens
  CDR3 for beta chain variable domain of TCR clone 282384 (TRBV11-2, TRBJ1-2)
CASSLYRGNYVYTF

SEQ ID NO: 564769 - protein, 16 aa, Homo sapiens
  CDR3 for alpha chain variable domain of TCR clone 282385 (TRAV26-1, TRAJ33)
CIVPFWGEDSNYQLIW

SEQ ID NO: 564770 - protein, 13 aa, Homo sapiens
  CDR3 for beta chain variable domain of TCR clone 282385 (TRBV7-3, TRBJ1-1)
CASSQDWGAEAFF

SEQ ID NO: 564771 - protein, 13 aa, Homo sapiens
  CDR3 for alpha chain variable domain of TCR clone 282386 (TRAV35, TRAJ47)
CAGSGEYGNKLVF

SEQ ID NO: 564772 - protein, 16 aa, Homo sapiens
  CDR3 for beta chain variable domain of TCR clone 282386 (TRBV4-3, TRBJ1-6)
CASSAQPGGEGSPLHF

SEQ ID NO: 564773 - protein, 13 aa, Homo sapiens
  CDR3 for alpha chain variable domain of TCR clone 282387 (TRAV21, TRAJ27)
CAALNTNAGKSTF

SEQ ID NO: 564774 - protein, 14 aa, Homo sapiens
  CDR3 for beta chain variable domain of TCR clone 282387 (TRBV7-3, TRBJ2-1)
CASSLAGGTNEQFF

SEQ ID NO: 564775 - protein, 14 aa, Homo sapiens
  CDR3 for alpha chain variable domain of TCR clone 282388 (TRAV13-1, TRAJ10)
CAASSTGGGNKLTF

SEQ ID NO: 564776 - protein, 15 aa, Homo sapiens
  CDR3 for beta chain variable domain of TCR clone 282388 (TRBV11-3, TRBJ1-3)
CASSLFGPSGNTIYV

SEQ ID NO: 564777 - protein, 12 aa, Homo sapiens
  CDR3 for alpha chain variable domain of TCR clone 282389 (TRAV8-3, TRAJ40)
CAVTSGTYKYIF

SEQ ID NO: 564778 - protein, 14 aa, Homo sapiens
  CDR3 for beta chain variable domain of TCR clone 282389 (TRBV12-4, TRBJ2-3)
CASSGQGSSDTQYF

SEQ ID NO: 564779 - protein, 13 aa, Homo sapiens
  CDR3 for alpha chain variable domain of TCR clone 282390 (TRAV13-2, TRAJ49)
CAETLHGGNQFYF

SEQ ID NO: 564780 - protein, 15 aa, Homo sapiens
  CDR3 for beta chain variable domain of TCR clone 282390 (TRBV29-1, TRBJ2-1)
CSVRTSLSSYNEQFF

SEQ ID NO: 564781 - protein, 14 aa, Homo sapiens
  CDR3 for alpha chain variable domain of TCR clone 282391 (TRAV8-2, TRAJ37)
CVVSISGNTGKLIF

SEQ ID NO: 564782 - protein, 14 aa, Homo sapiens
  CDR3 for beta chain variable domain of TCR clone 282391 (TRBV2, TRBJ2-5)
CASSEVLAQETQYF

SEQ ID NO: 564783 - protein, 13 aa, Homo sapiens
  CDR3 for alpha chain variable domain of TCR clone 282392 (TRAV8-6, TRAJ13)
CAVRDWGYQKVTF

SEQ ID NO: 564784 - protein, 15 aa, Homo sapiens
  CDR3 for beta chain variable domain of TCR clone 282392 (TRBV7-9, TRBJ2-2)
CASRPEGTSTGELFF

SEQ ID NO: 564785 - protein, 14 aa, Homo sapiens
  CDR3 for alpha chain variable domain of TCR clone 282393 (TRAV12-2, TRAJ45)
CAVYSGGGADGLTF

SEQ ID NO: 564786 - protein, 14 aa, Homo sapiens
  CDR3 for beta chain variable domain of TCR clone 282393 (TRBV3-1, TRBJ2-7)
CASSPSSGTYEQYF

SEQ ID NO: 564787 - protein, 11 aa, Homo sapiens
  CDR3 for alpha chain variable domain of TCR clone 282394 (TRAV1-2, TRAJ20)
CAVAKDYKLIF

SEQ ID NO: 564788 - protein, 15 aa, Homo sapiens
  CDR3 for beta chain variable domain of TCR clone 282394 (TRBV2, TRBJ2-1)
CASSELAGSYNEQFF

SEQ ID NO: 564789 - protein, 11 aa, Homo sapiens
  CDR3 for alpha chain variable domain of TCR clone 282395 (TRAV17, TRAJ43)
CATPRSNDMRF

SEQ ID NO: 564790 - protein, 13 aa, Homo sapiens
  CDR3 for beta chain variable domain of TCR clone 282395 (TRBV29-1, TRBJ1-1)
CSVGDSRNTEAFF

SEQ ID NO: 564791 - protein, 15 aa, Homo sapiens
  CDR3 for alpha chain variable domain of TCR clone 282396 (TRAV38-1, TRAJ37)
CAFIFGSGNTGKLIF

SEQ ID NO: 564792 - protein, 14 aa, Homo sapiens
  CDR3 for beta chain variable domain of TCR clone 282396 (TRBV7-2, TRBJ2-5)
CASSPRGSSETQYF

SEQ ID NO: 564793 - protein, 14 aa, Homo sapiens
  CDR3 for alpha chain variable domain of TCR clone 282397 (TRAV4, TRAJ17)
CLVGDMAAGNKLTF

SEQ ID NO: 564794 - protein, 17 aa, Homo sapiens
  CDR3 for beta chain variable domain of TCR clone 282397 (TRBV4-1, TRBJ2-5)
CASSQDLTGGPIETQYF

SEQ ID NO: 564795 - protein, 10 aa, Homo sapiens
  CDR3 for alpha chain variable domain of TCR clone 282398 (TRAV35, TRAJ37)
GRGNTGKLIF

SEQ ID NO: 564796 - protein, 12 aa, Homo sapiens
  CDR3 for beta chain variable domain of TCR clone 282398 (TRBV5-4, TRBJ2-5)
CASSSTRETQYF

SEQ ID NO: 564797 - protein, 12 aa, Homo sapiens
  CDR3 for alpha chain variable domain of TCR clone 282399 (TRAV21, TRAJ49)
CAVSWTVNQFYF

SEQ ID NO: 564798 - protein, 18 aa, Homo sapiens
  CDR3 for beta chain variable domain of TCR clone 282399 (TRBV7-8, TRBJ2-1)
CASSPAEGLAGGLNEQFF

SEQ ID NO: 564799 - protein, 13 aa, Homo sapiens
  CDR3 for alpha chain variable domain of TCR clone 282400 (TRAV8-3, TRAJ6)
CAVCSGGSYIPTF

SEQ ID NO: 564800 - protein, 14 aa, Homo sapiens
  CDR3 for beta chain variable domain of TCR clone 282400 (TRBV11-2, TRBJ1-1)
CASSTQRGRTEAFF

SEQ ID NO: 564801 - protein, 14 aa, Homo sapiens
  CDR3 for alpha chain variable domain of TCR clone 282401 (TRAV1-2, TRAJ8)
CAGREDTGFQKIVF

SEQ ID NO: 564802 - protein, 15 aa, Homo sapiens
  CDR3 for beta chain variable domain of TCR clone 282401 (TRBV6-3, TRBJ2-7)
CASSSPGTVFYEQYF

SEQ ID NO: 564803 - protein, 21 aa, Homo sapiens
  CDR3 for alpha chain variable domain of TCR clone 282402 (TRAV21, TRAJ27)
CAARPGNAGKSPFGDGPPLTV

SEQ ID NO: 564804 - protein, 14 aa, Homo sapiens
  CDR3 for beta chain variable domain of TCR clone 282402 (TRBV7-6, TRBJ2-3)
CASSLGTVTDTQYF

SEQ ID NO: 564805 - protein, 16 aa, Homo sapiens
  CDR3 for alpha chain variable domain of TCR clone 282403 (TRAV27, TRAJ52)
CAGAPAGGTSYGRLTF

SEQ ID NO: 564806 - protein, 12 aa, Homo sapiens
  CDR3 for beta chain variable domain of TCR clone 282403 (TRBV27, TRBJ2-1)
CASRGFYSEQFF

SEQ ID NO: 564807 - protein, 12 aa, Homo sapiens
  CDR3 for alpha chain variable domain of TCR clone 282404 (TRAV12-3, TRAJ17)
CAMTLTGNKLTF

SEQ ID NO: 564808 - protein, 14 aa, Homo sapiens
  CDR3 for beta chain variable domain of TCR clone 282404 (TRBV13, TRBJ2-3)
CASSLGGPQRTQYF

SEQ ID NO: 564809 - protein, 14 aa, Homo sapiens
  CDR3 for alpha chain variable domain of TCR clone 282405 (TRAV17, TRAJ15)
CATGPDQAGTALIF

SEQ ID NO: 564810 - protein, 15 aa, Homo sapiens
  CDR3 for beta chain variable domain of TCR clone 282405 (TRBV11-2, TRBJ2-2)
CASSSDRVNAGELFF

SEQ ID NO: 564811 - protein, 15 aa, Homo sapiens
  CDR3 for alpha chain variable domain of TCR clone 282406 (TRAV17, TRAJ57)
CATGPSQGGSEKLVF

SEQ ID NO: 564812 - protein, 13 aa, Homo sapiens
  CDR3 for beta chain variable domain of TCR clone 282406 (TRBV4-2, TRBJ2-3)
CASSLTTTDTQYF

SEQ ID NO: 564813 - protein, 15 aa, Homo sapiens
  CDR3 for alpha chain variable domain of TCR clone 282407 (TRAV25, TRAJ52)
CAGTSGGTSYGKLTL

SEQ ID NO: 564814 - protein, 15 aa, Homo sapiens
  CDR3 for beta chain variable domain of TCR clone 282407 (TRBV18, TRBJ2-7)
CASSPSSTGNYEQYF

SEQ ID NO: 564815 - protein, 12 aa, Homo sapiens
  CDR3 for alpha chain variable domain of TCR clone 282408 (TRAV23/DV6, TRAJ24)
SAANDSWGKLQL

SEQ ID NO: 564816 - protein, 16 aa, Homo sapiens
  CDR3 for beta chain variable domain of TCR clone 282408 (TRBV12-4, TRBJ2-5)
CASSLSTSGGKETQYF

SEQ ID NO: 564817 - protein, 12 aa, Homo sapiens
  CDR3 for alpha chain variable domain of TCR clone 282409 (TRAV8-3, TRAJ26)
CSGDSYGQNSVF

SEQ ID NO: 564818 - protein, 13 aa, Homo sapiens
  CDR3 for beta chain variable domain of TCR clone 282409 (TRBV27, TRBJ1-1)
CASSLSIGAEAFF

SEQ ID NO: 564819 - protein, 16 aa, Homo sapiens
  CDR3 for alpha chain variable domain of TCR clone 282410 (TRAV4, TRAJ42)
CLVGPIYGGSQGNLIL

SEQ ID NO: 564820 - protein, 13 aa, Homo sapiens
  CDR3 for beta chain variable domain of TCR clone 282410 (TRBV11-2, TRBJ2-7)
CASSPLGSYEQYF

SEQ ID NO: 564821 - protein, 15 aa, Homo sapiens
  CDR3 for alpha chain variable domain of TCR clone 282411 (TRAV8-2, TRAJ44)
CVVSPNTGTASKLTF

SEQ ID NO: 564822 - protein, 12 aa, Homo sapiens
  CDR3 for beta chain variable domain of TCR clone 282411 (TRBV11-2, TRBJ2-2)
CAVRRNTGELFF

SEQ ID NO: 564823 - protein, 18 aa, Homo sapiens
  CDR3 for alpha chain variable domain of TCR clone 282412 (TRAV21, TRAJ52)
CAVGPSPAGGTSYGKLTF

SEQ ID NO: 564824 - protein, 17 aa, Homo sapiens
  CDR3 for beta chain variable domain of TCR clone 282412 (TRBV13, TRBJ2-3)
CASSLSRVTGGRNTQYF

SEQ ID NO: 564825 - protein, 14 aa, Homo sapiens
  CDR3 for alpha chain variable domain of TCR clone 282413 (TRAV35, TRAJ13)
CAGSPSGGYQKVTF

SEQ ID NO: 564826 - protein, 17 aa, Homo sapiens
  CDR3 for beta chain variable domain of TCR clone 282413 (TRBV18, TRBJ1-5)
CQLTPCRVRQNNQPQHF

SEQ ID NO: 564827 - protein, 15 aa, Homo sapiens
  CDR3 for alpha chain variable domain of TCR clone 282414 (TRAV12-2, TRAJ53)
CAVNGGGGSNYKLTF

SEQ ID NO: 564828 - protein, 14 aa, Homo sapiens
  CDR3 for beta chain variable domain of TCR clone 282414 (TRBV11-3, TRBJ2-5)
CASSRTGGIETQYF

SEQ ID NO: 564829 - protein, 12 aa, Homo sapiens
  CDR3 for alpha chain variable domain of TCR clone 282415 (TRAV12-3, TRAJ17)
CAMTLTGNKLTL

SEQ ID NO: 564830 - protein, 15 aa, Homo sapiens
  CDR3 for beta chain variable domain of TCR clone 282415 (TRBV20-1, TRBJ2-7)
CSDRDRVSGMDEQYF

SEQ ID NO: 564831 - protein, 15 aa, Homo sapiens
  CDR3 for alpha chain variable domain of TCR clone 282416 (TRAV21, TRAJ53)
CATLNSGGSNYKLTF

SEQ ID NO: 564832 - protein, 10 aa, Homo sapiens
  CDR3 for beta chain variable domain of TCR clone 282416 (TRBV11-2, TRBJ2-2)
CQQLTRELFF

SEQ ID NO: 564833 - protein, 15 aa, Homo sapiens
  CDR3 for alpha chain variable domain of TCR clone 282417 (TRAV12-2, TRAJ53)
CAVNGGGGSNYKLTF

SEQ ID NO: 564834 - protein, 16 aa, Homo sapiens
  CDR3 for beta chain variable domain of TCR clone 282417 (TRBV4-1, TRBJ1-2)
CASSQDAGQVLYGYAF

SEQ ID NO: 564835 - protein, 13 aa, Homo sapiens
  CDR3 for alpha chain variable domain of TCR clone 282418 (TRAV17, TRAJ26)
CATVDNYGQNFVF

SEQ ID NO: 564836 - protein, 16 aa, Homo sapiens
  CDR3 for beta chain variable domain of TCR clone 282418 (TRBV19, TRBJ2-2)
CASRSPGTGATGELFF

SEQ ID NO: 564837 - protein, 13 aa, Homo sapiens
  CDR3 for alpha chain variable domain of TCR clone 282419 (TRAV1-2, TRAJ9)
CAALNTGGFKTIF

SEQ ID NO: 564838 - protein, 13 aa, Homo sapiens
  CDR3 for beta chain variable domain of TCR clone 282419 (TRBV19, TRBJ1-2)
CASSVTGQDGDTF

SEQ ID NO: 564839 - protein, 13 aa, Homo sapiens
  CDR3 for alpha chain variable domain of TCR clone 282420 (TRAV17, TRAJ9)
CATFLTGGFKTIF

SEQ ID NO: 564840 - protein, 17 aa, Homo sapiens
  CDR3 for beta chain variable domain of TCR clone 282420 (TRBV4-1, TRBJ1-4)
CASSQEGPRGVEEKLFF

SEQ ID NO: 564841 - protein, 14 aa, Homo sapiens
  CDR3 for alpha chain variable domain of TCR clone 282421 (TRAV2, TRAJ9)
CAVEDRSGAFKTIF

SEQ ID NO: 564842 - protein, 14 aa, Homo sapiens
  CDR3 for beta chain variable domain of TCR clone 282421 (TRBV6-1, TRBJ1-3)
CASVQGGGGNTIYF

SEQ ID NO: 564843 - protein, 12 aa, Homo sapiens
  CDR3 for alpha chain variable domain of TCR clone 282422 (TRAV12-3, TRAJ42)
CAPGGSQGNLIF

SEQ ID NO: 564844 - protein, 15 aa, Homo sapiens
  CDR3 for beta chain variable domain of TCR clone 282422 (TRBV9, TRBJ1-6)
CASSVAGTGDSPLHF

SEQ ID NO: 564845 - protein, 18 aa, Homo sapiens
  CDR3 for alpha chain variable domain of TCR clone 282423 (TRAV26-2, TRAJ54)
CILRDVEVGIQGAQKLVF

SEQ ID NO: 564846 - protein, 16 aa, Homo sapiens
  CDR3 for beta chain variable domain of TCR clone 282423 (TRBV6-1, TRBJ2-5)
CPSSETLDRGAETQYF

SEQ ID NO: 564847 - protein, 17 aa, Homo sapiens
  CDR3 for alpha chain variable domain of TCR clone 282424 (TRAV3, TRAJ6)
CAVSDGPSAGGSYIPTF

SEQ ID NO: 564848 - protein, 14 aa, Homo sapiens
  CDR3 for beta chain variable domain of TCR clone 282424 (TRBV7-2, TRBJ2-7)
CASSPKTSFYEQYF

SEQ ID NO: 564849 - protein, 13 aa, Homo sapiens
  CDR3 for alpha chain variable domain of TCR clone 282425 (TRAV21, TRAJ27)
CAARPGNAGKSTF

SEQ ID NO: 564850 - protein, 14 aa, Homo sapiens
  CDR3 for beta chain variable domain of TCR clone 282425 (TRBV25-1, TRBJ1-2)
CASSDTTGVVGYTF

SEQ ID NO: 564851 - protein, 15 aa, Homo sapiens
  CDR3 for alpha chain variable domain of TCR clone 282426 (TRAV17, TRAJ45)
CATAYSGGGADGLTF

SEQ ID NO: 564852 - protein, 11 aa, Homo sapiens
  CDR3 for beta chain variable domain of TCR clone 282426 (TRBV7-8, TRBJ2-7)
CASSHSLEQYF

SEQ ID NO: 564853 - protein, 13 aa, Homo sapiens
  CDR3 for alpha chain variable domain of TCR clone 282427 (TRAV1-2, TRAJ31)
CAVRGYNNARLMF

SEQ ID NO: 564854 - protein, 16 aa, Homo sapiens
  CDR3 for beta chain variable domain of TCR clone 282427 (TRBV2, TRBJ1-1)
CASSPPNRGMNTEAFF

SEQ ID NO: 564855 - protein, 13 aa, Homo sapiens
  CDR3 for alpha chain variable domain of TCR clone 282428 (TRAV3, TRAJ20)
CAVRSPNDYKLSF

SEQ ID NO: 564856 - protein, 13 aa, Homo sapiens
  CDR3 for beta chain variable domain of TCR clone 282428 (TRBV7-3, TRBJ1-1)
CASSQDWGAEAFF

SEQ ID NO: 564857 - protein, 15 aa, Homo sapiens
  CDR3 for alpha chain variable domain of TCR clone 282429 (TRAV4, TRAJ39)
CLVGPNNNAGNMLTF

SEQ ID NO: 564858 - protein, 14 aa, Homo sapiens
  CDR3 for beta chain variable domain of TCR clone 282429 (TRBV11-2, TRBJ2-5)
CASSRTGGIETQYV

SEQ ID NO: 564859 - protein, 14 aa, Homo sapiens
  CDR3 for alpha chain variable domain of TCR clone 282430 (TRAV23/DV6, TRAJ22)
CAADPSGSARQLTF

SEQ ID NO: 564860 - protein, 14 aa, Homo sapiens
  CDR3 for beta chain variable domain of TCR clone 282430 (TRBV5-1, TRBJ2-5)
CASSLWGAQDEQYF

SEQ ID NO: 564861 - protein, 11 aa, Homo sapiens
  CDR3 for alpha chain variable domain of TCR clone 282431 (TRAV29/DV5, TRAJ49)
CSVLLCSKLTV

SEQ ID NO: 564862 - protein, 15 aa, Homo sapiens
  CDR3 for beta chain variable domain of TCR clone 282431 (TRBV4-3, TRBJ2-2)
CASSQGGTPTGELFF

SEQ ID NO: 564863 - protein, 16 aa, Homo sapiens
  CDR3 for alpha chain variable domain of TCR clone 282432 (TRAV8-1, TRAJ42)
CAVTSRYGGSQGHLIF

SEQ ID NO: 564864 - protein, 12 aa, Homo sapiens
  CDR3 for beta chain variable domain of TCR clone 282432 (TRBV6-3, TRBJ2-7)
CASSLGRRGLYF

SEQ ID NO: 564865 - protein, 15 aa, Homo sapiens
  CDR3 for alpha chain variable domain of TCR clone 282433 (TRAV3, TRAJ30)
CAVRDEYGRDDKIIF

SEQ ID NO: 564866 - protein, 16 aa, Homo sapiens
  CDR3 for beta chain variable domain of TCR clone 282433 (TRBV5-1, TRBJ2-5)
CASSLANHRGRETQYY

SEQ ID NO: 564867 - protein, 21 aa, Homo sapiens
  CDR3 for alpha chain variable domain of TCR clone 282434 (TRAV9-2, )
CALIQIGDIQNPDPAVYQLRD

SEQ ID NO: 564868 - protein, 15 aa, Homo sapiens
  CDR3 for beta chain variable domain of TCR clone 282434 (TRBV11-3, TRBJ2-3)
CASLKDGREGDTQYF

SEQ ID NO: 564869 - protein, 10 aa, Homo sapiens
  CDR3 for alpha chain variable domain of TCR clone 282435 (TRAV16, TRAJ22)
SAMYLRQLTF

SEQ ID NO: 564870 - protein, 14 aa, Homo sapiens
  CDR3 for beta chain variable domain of TCR clone 282435 (TRBV2, TRBJ2-3)
CASSEGQNTDTQYF

SEQ ID NO: 564871 - protein, 10 aa, Homo sapiens
  CDR3 for alpha chain variable domain of TCR clone 282436 (TRAV1-2, TRAJ23)
CAGQGGKLIF

SEQ ID NO: 564872 - protein, 17 aa, Homo sapiens
  CDR3 for beta chain variable domain of TCR clone 282436 (TRBV5-4, TRBJ2-3)
CISVPAVLTASTDTQYF

SEQ ID NO: 564873 - protein, 15 aa, Homo sapiens
  CDR3 for alpha chain variable domain of TCR clone 282437 (TRAV27, TRAJ38)
CAARRNAGNNRKLIW

SEQ ID NO: 564874 - protein, 11 aa, Homo sapiens
  CDR3 for beta chain variable domain of TCR clone 282437 (TRBV12-4, TRBJ2-2)
CASSSAWELFF

SEQ ID NO: 564875 - protein, 15 aa, Homo sapiens
  CDR3 for alpha chain variable domain of TCR clone 282438 (TRAV27, TRAJ38)
CAGRFDAGNNRKLIW

SEQ ID NO: 564876 - protein, 13 aa, Homo sapiens
  CDR3 for beta chain variable domain of TCR clone 282438 (TRBV20-1, TRBJ2-1)
TSGAIPPGNEQFF

SEQ ID NO: 564877 - protein, 11 aa, Homo sapiens
  CDR3 for alpha chain variable domain of TCR clone 282439 (TRAV2, TRAJ37)
CAVDNTGKLIF

SEQ ID NO: 564878 - protein, 14 aa, Homo sapiens
  CDR3 for beta chain variable domain of TCR clone 282439 (TRBV20-1, TRBJ2-1)
CSATLAGGIGEQFF

SEQ ID NO: 564879 - protein, 15 aa, Homo sapiens
  CDR3 for alpha chain variable domain of TCR clone 282440 (TRAV13-1, TRAJ5)
CAASMADTGRRALTF

SEQ ID NO: 564880 - protein, 16 aa, Homo sapiens
  CDR3 for beta chain variable domain of TCR clone 282440 (TRBV7-2, TRBJ2-1)
CASSLGRTSGDNEQFF

SEQ ID NO: 564881 - protein, 13 aa, Homo sapiens
  CDR3 for alpha chain variable domain of TCR clone 282441 (TRAV6, TRAJ37)
CSRSRSNTGKLIF

SEQ ID NO: 564882 - protein, 13 aa, Homo sapiens
  CDR3 for beta chain variable domain of TCR clone 282441 (TRBV6-1, TRBJ1-1)
CASSRQGNTEAFF

SEQ ID NO: 564883 - protein, 15 aa, Homo sapiens
  CDR3 for alpha chain variable domain of TCR clone 282442 (TRAV8-4, TRAJ11)
CAVSRALSGYSTLTF

SEQ ID NO: 564884 - protein, 12 aa, Homo sapiens
  CDR3 for beta chain variable domain of TCR clone 282442 (TRBV14, TRBJ2-5)
CASSHLKETQYF

SEQ ID NO: 564885 - protein, 16 aa, Homo sapiens
  CDR3 for alpha chain variable domain of TCR clone 282443 (TRAV35, TRAJ28)
CAGQKYSGAGSYQLTF

SEQ ID NO: 564886 - protein, 13 aa, Homo sapiens
  CDR3 for beta chain variable domain of TCR clone 282443 (TRBV19, TRBJ1-2)
CASSQGQVYGYPF

SEQ ID NO: 564887 - protein, 11 aa, Homo sapiens
  CDR3 for alpha chain variable domain of TCR clone 282444 (TRAV17, TRAJ9)
CGFTGGFKTIF

SEQ ID NO: 564888 - protein, 15 aa, Homo sapiens
  CDR3 for beta chain variable domain of TCR clone 282444 (TRBV2, TRBJ1-5)
CASSPGPTGNQPQHF

SEQ ID NO: 564889 - protein, 13 aa, Homo sapiens
  CDR3 for alpha chain variable domain of TCR clone 282445 (TRAV17, TRAJ26)
CATVDNYGQNFVF

SEQ ID NO: 564890 - protein, 13 aa, Homo sapiens
  CDR3 for beta chain variable domain of TCR clone 282445 (TRBV28, TRBJ1-5)
CASSLRGNQTQHF

SEQ ID NO: 564891 - protein, 13 aa, Homo sapiens
  CDR3 for alpha chain variable domain of TCR clone 282446 (TRAV30, TRAJ24)
CGTVTDSWGKLQF

SEQ ID NO: 564892 - protein, 12 aa, Homo sapiens
  CDR3 for beta chain variable domain of TCR clone 282446 (TRBV11-2, TRBJ2-1)
CASSPGNNEQFF

SEQ ID NO: 564893 - protein, 16 aa, Homo sapiens
  CDR3 for alpha chain variable domain of TCR clone 282447 (TRAV23/DV6, TRAJ9)
CAASIGGNTGGFKTIF

SEQ ID NO: 564894 - protein, 14 aa, Homo sapiens
  CDR3 for beta chain variable domain of TCR clone 282447 (TRBV9, TRBJ2-7)
CASSVGVGSYKQYF

SEQ ID NO: 564895 - protein, 13 aa, Homo sapiens
  CDR3 for alpha chain variable domain of TCR clone 282448 (TRAV1-2, TRAJ9)
CAALNTGGLKTIF

SEQ ID NO: 564896 - protein, 16 aa, Homo sapiens
  CDR3 for beta chain variable domain of TCR clone 282448 (TRBV11-2, TRBJ2-1)
CASSPRLAGVYNEQFF

SEQ ID NO: 564897 - protein, 10 aa, Homo sapiens
  CDR3 for alpha chain variable domain of TCR clone 282449 (TRAV12-3, TRAJ49)
CAMNDDQFYF

SEQ ID NO: 564898 - protein, 12 aa, Homo sapiens
  CDR3 for beta chain variable domain of TCR clone 282449 (TRBV6-3, TRBJ2-7)
CASSLTPYEQYF

SEQ ID NO: 564899 - protein, 16 aa, Homo sapiens
  CDR3 for alpha chain variable domain of TCR clone 282450 (TRAV12-2, TRAJ4)
CAVILPFSGGYNKLIF

SEQ ID NO: 564900 - protein, 12 aa, Homo sapiens
  CDR3 for beta chain variable domain of TCR clone 282450 (TRBV7-8, TRBJ2-7)
CASSLGDREQYF

SEQ ID NO: 564901 - protein, 15 aa, Homo sapiens
  CDR3 for alpha chain variable domain of TCR clone 282451 (TRAV23/DV6, TRAJ37)
CAAGEGSSNTGKLIF

SEQ ID NO: 564902 - protein, 17 aa, Homo sapiens
  CDR3 for beta chain variable domain of TCR clone 282451 (TRBV20-1, TRBJ2-7)
CSATRAGGVAGVEEQDF

SEQ ID NO: 564903 - protein, 12 aa, Homo sapiens
  CDR3 for alpha chain variable domain of TCR clone 282452 (TRAV12-1, TRAJ20)
CVENPDDYKLSF

SEQ ID NO: 564904 - protein, 14 aa, Homo sapiens
  CDR3 for beta chain variable domain of TCR clone 282452 (TRBV20-1, TRBJ2-1)
CSPNDEASYNEQFF

SEQ ID NO: 564905 - protein, 13 aa, Homo sapiens
  CDR3 for alpha chain variable domain of TCR clone 282453 (TRAV21, TRAJ27)
CAARPGNAGKSTF

SEQ ID NO: 564906 - protein, 12 aa, Homo sapiens
  CDR3 for beta chain variable domain of TCR clone 282453 (TRBV5-1, TRBJ2-5)
CASSLGLETQYF

SEQ ID NO: 564907 - protein, 15 aa, Homo sapiens
  CDR3 for alpha chain variable domain of TCR clone 282454 (TRAV8-4, TRAJ36)
CDVRKSWTGANNLFF

SEQ ID NO: 564908 - protein, 15 aa, Homo sapiens
  CDR3 for beta chain variable domain of TCR clone 282454 (TRBV28, TRBJ2-6)
CASSHRGFGANVLTF

SEQ ID NO: 564909 - protein, 13 aa, Homo sapiens
  CDR3 for alpha chain variable domain of TCR clone 282455 (TRAV38-2/DV8, TRAJ34)
CAYRTWNTDKLIF

SEQ ID NO: 564910 - protein, 15 aa, Homo sapiens
  CDR3 for beta chain variable domain of TCR clone 282455 (TRBV7-8, TRBJ2-1)
CASSLAGGLYNEQFF

SEQ ID NO: 564911 - protein, 15 aa, Homo sapiens
  CDR3 for alpha chain variable domain of TCR clone 282456 (TRAV26-1, TRAJ17)
CIVSSFKAAGNKLTF

SEQ ID NO: 564912 - protein, 13 aa, Homo sapiens
  CDR3 for beta chain variable domain of TCR clone 282456 (TRBV7-9, TRBJ1-2)
CASSPSNFWGYTF

SEQ ID NO: 564913 - protein, 14 aa, Homo sapiens
  CDR3 for alpha chain variable domain of TCR clone 282457 (TRAV17, TRAJ57)
CATDPQAGSEKLVF

SEQ ID NO: 564914 - protein, 15 aa, Homo sapiens
  CDR3 for beta chain variable domain of TCR clone 282457 (TRBV7-2, TRBJ1-2)
CASSPRAGWNYGYTF

SEQ ID NO: 564915 - protein, 14 aa, Homo sapiens
  CDR3 for alpha chain variable domain of TCR clone 282458 (TRAV17, TRAJ57)
CATDPQGGSEKLVF

SEQ ID NO: 564916 - protein, 13 aa, Homo sapiens
  CDR3 for beta chain variable domain of TCR clone 282458 (TRBV2, TRBJ2-7)
CASSVGGSGEQYF

SEQ ID NO: 564917 - protein, 14 aa, Homo sapiens
  CDR3 for alpha chain variable domain of TCR clone 282459 (TRAV12-3, TRAJ42)
CAMNYGGSQGNLIS

SEQ ID NO: 564918 - protein, 15 aa, Homo sapiens
  CDR3 for beta chain variable domain of TCR clone 282459 (TRBV5-7, TRBJ1-5)
CASSYGKLWDQPHHF

SEQ ID NO: 564919 - protein, 15 aa, Homo sapiens
  CDR3 for alpha chain variable domain of TCR clone 282460 (TRAV1-2, TRAJ8)
TSVLREDTGFQKLVF

SEQ ID NO: 564920 - protein, 13 aa, Homo sapiens
  CDR3 for beta chain variable domain of TCR clone 282460 (TRBV12-4, TRBJ2-5)
CASRKRGKETQYF

SEQ ID NO: 564921 - protein, 15 aa, Homo sapiens
  CDR3 for alpha chain variable domain of TCR clone 282461 (TRAV25, TRAJ52)
CAGTSGGTSYGKLTF

SEQ ID NO: 564922 - protein, 13 aa, Homo sapiens
  CDR3 for beta chain variable domain of TCR clone 282461 (TRBV15, TRBJ1-6)
CATSGGLNSPLHF

SEQ ID NO: 564923 - protein, 16 aa, Homo sapiens
  CDR3 for alpha chain variable domain of TCR clone 282462 (TRAV27, TRAJ13)
CAGAKSDSGGYQKVTF

SEQ ID NO: 564924 - protein, 13 aa, Homo sapiens
  CDR3 for beta chain variable domain of TCR clone 282462 (TRBV4-1, TRBJ2-2)
CASSQENTGELFF

SEQ ID NO: 564925 - protein, 11 aa, Homo sapiens
  CDR3 for alpha chain variable domain of TCR clone 282463 (TRAV21, TRAJ11)
CAVNGYSTLTF

SEQ ID NO: 564926 - protein, 15 aa, Homo sapiens
  CDR3 for beta chain variable domain of TCR clone 282463 (TRBV7-2, TRBJ2-1)
CAWSSGLAGGNEQFF

SEQ ID NO: 564927 - protein, 11 aa, Homo sapiens
  CDR3 for alpha chain variable domain of TCR clone 282464 (TRAV20, TRAJ23)
CACNQGGKLMF

SEQ ID NO: 564928 - protein, 16 aa, Homo sapiens
  CDR3 for beta chain variable domain of TCR clone 282464 (TRBV7-8, TRBJ2-5)
CASSFGGQPAQETQYF

SEQ ID NO: 564929 - protein, 12 aa, Homo sapiens
  CDR3 for alpha chain variable domain of TCR clone 282465 (TRAV12-2, TRAJ36)
CAAPRGANNLFF

SEQ ID NO: 564930 - protein, 15 aa, Homo sapiens
  CDR3 for beta chain variable domain of TCR clone 282465 (TRBV11-2, TRBJ1-3)
CAISLDGTVGNTIYF

SEQ ID NO: 564931 - protein, 15 aa, Homo sapiens
  CDR3 for alpha chain variable domain of TCR clone 282466 (TRAV12-2, TRAJ50)
CAVNGLETSYDKVIF

SEQ ID NO: 564932 - protein, 18 aa, Homo sapiens
  CDR3 for beta chain variable domain of TCR clone 282466 (TRBV4-1, TRBJ1-5)
CASSQDPRGQGLNQPQHF

SEQ ID NO: 564933 - protein, 17 aa, Homo sapiens
  CDR3 for alpha chain variable domain of TCR clone 282467 (TRAV26-1, TRAJ37)
CIVRVITVSSNTGKLIF

SEQ ID NO: 564934 - protein, 15 aa, Homo sapiens
  CDR3 for beta chain variable domain of TCR clone 282467 (TRBV6-5, TRBJ2-1)
CASSYDAGAGNEQFF

SEQ ID NO: 564935 - protein, 13 aa, Homo sapiens
  CDR3 for alpha chain variable domain of TCR clone 282468 (TRAV17, TRAJ5)
CAPMDTGRRALTF

SEQ ID NO: 564936 - protein, 17 aa, Homo sapiens
  CDR3 for beta chain variable domain of TCR clone 282468 (TRBV29-1, TRBJ2-7)
SAALTRDRPPTSSTSGR

SEQ ID NO: 564937 - protein, 13 aa, Homo sapiens
  CDR3 for alpha chain variable domain of TCR clone 282469 (TRAV21, TRAJ57)
CAVTQGGSEKLVF

SEQ ID NO: 564938 - protein, 16 aa, Homo sapiens
  CDR3 for beta chain variable domain of TCR clone 282469 (TRBV7-7, TRBJ2-1)
CASSLASGTSYNEQFF

SEQ ID NO: 564939 - protein, 11 aa, Homo sapiens
  CDR3 for alpha chain variable domain of TCR clone 282470 (TRAV2, TRAJ13)
CASGGYQKVTF

SEQ ID NO: 564940 - protein, 16 aa, Homo sapiens
  CDR3 for beta chain variable domain of TCR clone 282470 (TRBV6-1, TRBJ2-5)
CASSETLDRGAENQHF

SEQ ID NO: 564941 - protein, 11 aa, Homo sapiens
  CDR3 for alpha chain variable domain of TCR clone 282471 (TRAV12-1, TRAJ8)
CVVTGFQKLVF

SEQ ID NO: 564942 - protein, 13 aa, Homo sapiens
  CDR3 for beta chain variable domain of TCR clone 282471 (TRBV7-3, TRBJ1-1)
CAISQDWGAEAFF

SEQ ID NO: 564943 - protein, 13 aa, Homo sapiens
  CDR3 for alpha chain variable domain of TCR clone 282472 (TRAV13-1, TRAJ41)
CADAPNSGYAPTF

SEQ ID NO: 564944 - protein, 13 aa, Homo sapiens
  CDR3 for beta chain variable domain of TCR clone 282472 (TRBV19, TRBJ2-7)
CASEGTTTYEQYF

SEQ ID NO: 564945 - protein, 14 aa, Homo sapiens
  CDR3 for alpha chain variable domain of TCR clone 282473 (TRAV1-2, TRAJ16)
CAVNRFSDGQKLLF

SEQ ID NO: 564946 - protein, 13 aa, Homo sapiens
  CDR3 for beta chain variable domain of TCR clone 282473 (TRBV10-3, TRBJ1-2)
CAISERGSYGYTF

SEQ ID NO: 564947 - protein, 15 aa, Homo sapiens
  CDR3 for alpha chain variable domain of TCR clone 282474 (TRAV8-6, TRAJ10)
CAVSDQAGGGNKLTF

SEQ ID NO: 564948 - protein, 14 aa, Homo sapiens
  CDR3 for beta chain variable domain of TCR clone 282474 (TRBV7-8, TRBJ2-3)
CASSLEAGTYTQYF

SEQ ID NO: 564949 - protein, 14 aa, Homo sapiens
  CDR3 for alpha chain variable domain of TCR clone 282475 (TRAV3, TRAJ21)
WAVESQANFNKFYF

SEQ ID NO: 564950 - protein, 15 aa, Homo sapiens
  CDR3 for beta chain variable domain of TCR clone 282475 (TRBV6-1, TRBJ2-3)
CASSERGGITDTQYF

SEQ ID NO: 564951 - protein, 15 aa, Homo sapiens
  CDR3 for alpha chain variable domain of TCR clone 282476 (TRAV17, TRAJ45)
TSVLRTGGGADGLTF

SEQ ID NO: 564952 - protein, 15 aa, Homo sapiens
  CDR3 for beta chain variable domain of TCR clone 282476 (TRBV5-7, TRBJ1-5)
CASSYGKLWDQHQHF

SEQ ID NO: 564953 - protein, 12 aa, Homo sapiens
  CDR3 for alpha chain variable domain of TCR clone 282477 (TRAV17, TRAJ12)
CATLRSSYKLIF

SEQ ID NO: 564954 - protein, 14 aa, Homo sapiens
  CDR3 for beta chain variable domain of TCR clone 282477 (TRBV12-4, TRBJ1-1)
CASSFDRVNTEAFF

SEQ ID NO: 564955 - protein, 13 aa, Homo sapiens
  CDR3 for alpha chain variable domain of TCR clone 282478 (TRAV21, TRAJ27)
CAARPGNAGKSTF

SEQ ID NO: 564956 - protein, 15 aa, Homo sapiens
  CDR3 for beta chain variable domain of TCR clone 282478 (TRBV9, TRBJ1-6)
CASSVAGAGDSPLHF

SEQ ID NO: 564957 - protein, 14 aa, Homo sapiens
  CDR3 for alpha chain variable domain of TCR clone 282479 (TRAV21, TRAJ35)
CAVMPIGFGNVLHC

SEQ ID NO: 564958 - protein, 13 aa, Homo sapiens
  CDR3 for beta chain variable domain of TCR clone 282479 (TRBV23-1, TRBJ1-4)
CASRAKFNEKLFF

SEQ ID NO: 564959 - protein, 12 aa, Homo sapiens
  CDR3 for alpha chain variable domain of TCR clone 282480 (TRAV21, TRAJ3)
CCFYSSASKIIF

SEQ ID NO: 564960 - protein, 15 aa, Homo sapiens
  CDR3 for beta chain variable domain of TCR clone 282480 (TRBV2, TRBJ2-3)
CASSDAGGPPDTQYF

SEQ ID NO: 564961 - protein, 15 aa, Homo sapiens
  CDR3 for alpha chain variable domain of TCR clone 282481 (TRAV8-3, TRAJ45)
CALSYSGGGADVLTF

SEQ ID NO: 564962 - protein, 13 aa, Homo sapiens
  CDR3 for beta chain variable domain of TCR clone 282481 (TRBV20-1, TRBJ1-1)
CSAFDEENTEAFF

SEQ ID NO: 564963 - protein, 16 aa, Homo sapiens
  CDR3 for alpha chain variable domain of TCR clone 282482 (TRAV3, TRAJ23)
YAVKIGIYNQGGKLIF

SEQ ID NO: 564964 - protein, 17 aa, Homo sapiens
  CDR3 for beta chain variable domain of TCR clone 282482 (TRBV10-3, TRBJ2-6)
CAISESTAHSGANVLTF

SEQ ID NO: 564965 - protein, 18 aa, Homo sapiens
  CDR3 for alpha chain variable domain of TCR clone 282483 (TRAV26-2, TRAJ54)
CILRDVEVGIQGAQKLVF

SEQ ID NO: 564966 - protein, 14 aa, Homo sapiens
  CDR3 for beta chain variable domain of TCR clone 282483 (TRBV5-1, TRBJ2-7)
CASSRGESLYEQYF

SEQ ID NO: 564967 - protein, 12 aa, Homo sapiens
  CDR3 for alpha chain variable domain of TCR clone 282484 (TRAV8-3, TRAJ20)
CAVGANDYKLSF

SEQ ID NO: 564968 - protein, 17 aa, Homo sapiens
  CDR3 for beta chain variable domain of TCR clone 282484 (TRBV13, TRBJ2-3)
CASSLSRVAGGRNRQYF

SEQ ID NO: 564969 - protein, 12 aa, Homo sapiens
  CDR3 for alpha chain variable domain of TCR clone 282485 (TRAV25, TRAJ35)
CAGIGFGNVLHC

SEQ ID NO: 564970 - protein, 15 aa, Homo sapiens
  CDR3 for beta chain variable domain of TCR clone 282485 (TRBV20-1, TRBJ2-5)
CSAPPRTGVGETQYF

SEQ ID NO: 564971 - protein, 10 aa, Homo sapiens
  CDR3 for alpha chain variable domain of TCR clone 282486 (TRAV13-1, TRAJ21)
CAVSLNKFYF

SEQ ID NO: 564972 - protein, 13 aa, Homo sapiens
  CDR3 for beta chain variable domain of TCR clone 282486 (TRBV7-9, TRBJ2-7)
CASSFYGSYEQHF

SEQ ID NO: 564973 - protein, 14 aa, Homo sapiens
  CDR3 for alpha chain variable domain of TCR clone 282487 (TRAV38-2/DV8, TRAJ54)
AAMYQIQGAQKLVF

SEQ ID NO: 564974 - protein, 17 aa, Homo sapiens
  CDR3 for beta chain variable domain of TCR clone 282487 (TRBV6-1, TRBJ2-3)
CASSEALRLISTDTQYC

SEQ ID NO: 564975 - protein, 13 aa, Homo sapiens
  CDR3 for alpha chain variable domain of TCR clone 282488 (TRAV3, TRAJ20)
CAVRPLNDYKFSF

SEQ ID NO: 564976 - protein, 12 aa, Homo sapiens
  CDR3 for beta chain variable domain of TCR clone 282488 (TRBV6-1, TRBJ2-1)
CATYGLNNEQFF

SEQ ID NO: 564977 - protein, 14 aa, Homo sapiens
  CDR3 for alpha chain variable domain of TCR clone 282489 (TRAV1-2, TRAJ8)
CAVREETGFQKLVF

SEQ ID NO: 564978 - protein, 14 aa, Homo sapiens
  CDR3 for beta chain variable domain of TCR clone 282489 (TRBV7-2, TRBJ1-1)
CASSFLTGTTEAFF

SEQ ID NO: 564979 - protein, 14 aa, Homo sapiens
  CDR3 for alpha chain variable domain of TCR clone 282490 (TRAV12-2, TRAJ13)
CAVKRTGGYQKVTF

SEQ ID NO: 564980 - protein, 13 aa, Homo sapiens
  CDR3 for beta chain variable domain of TCR clone 282490 (TRBV10-3, TRBJ2-7)
CASKLAVNYEQYF

SEQ ID NO: 564981 - protein, 14 aa, Homo sapiens
  CDR3 for alpha chain variable domain of TCR clone 282491 (TRAV2, TRAJ29)
CAVTPPSGNNPLVF

SEQ ID NO: 564982 - protein, 13 aa, Homo sapiens
  CDR3 for beta chain variable domain of TCR clone 282491 (TRBV11-2, TRBJ2-1)
CASSLGRAGGRFF

SEQ ID NO: 564983 - protein, 11 aa, Homo sapiens
  CDR3 for alpha chain variable domain of TCR clone 282492 (TRAV12-2, TRAJ31)
CAILNNSRLMF

SEQ ID NO: 564984 - protein, 16 aa, Homo sapiens
  CDR3 for beta chain variable domain of TCR clone 282492 (TRBV13, TRBJ2-2)
CASSPRTGEHTGELFF

SEQ ID NO: 564985 - protein, 12 aa, Homo sapiens
  CDR3 for alpha chain variable domain of TCR clone 282493 (TRAV12-2, TRAJ10)
WGVTGGGNKLTF

SEQ ID NO: 564986 - protein, 16 aa, Homo sapiens
  CDR3 for beta chain variable domain of TCR clone 282493 (TRBV20-1, TRBJ2-2)
CSASASGIPGAGELFF

SEQ ID NO: 564987 - protein, 20 aa, Homo sapiens
  CDR3 for alpha chain variable domain of TCR clone 282494 (TRAV25, TRAJ21)
PATQTTDVGTYPLSFNKFYF

SEQ ID NO: 564988 - protein, 14 aa, Homo sapiens
  CDR3 for beta chain variable domain of TCR clone 282494 (TRBV6-1, TRBJ2-1)
CASAKDGFYNEQFF

SEQ ID NO: 564989 - protein, 13 aa, Homo sapiens
  CDR3 for alpha chain variable domain of TCR clone 282495 (TRAV3, TRAJ30)
CAVRDRGDDKIIF

SEQ ID NO: 564990 - protein, 16 aa, Homo sapiens
  CDR3 for beta chain variable domain of TCR clone 282495 (TRBV2, TRBJ2-1)
CASSVGGSLSYNEQFF

SEQ ID NO: 564991 - protein, 12 aa, Homo sapiens
  CDR3 for alpha chain variable domain of TCR clone 282496 (TRAV17, TRAJ20)
CATDSNDYKLSF

SEQ ID NO: 564992 - protein, 17 aa, Homo sapiens
  CDR3 for beta chain variable domain of TCR clone 282496 (TRBV4-1, TRBJ2-7)
CASSPFLTSGGVVEQYF

SEQ ID NO: 564993 - protein, 13 aa, Homo sapiens
  CDR3 for alpha chain variable domain of TCR clone 282497 (TRAV26-1, )
CIVSHRVKGFWNQ

SEQ ID NO: 564994 - protein, 14 aa, Homo sapiens
  CDR3 for beta chain variable domain of TCR clone 282497 (TRBV20-1, TRBJ2-7)
CSAWTALSSYEQYF

SEQ ID NO: 564995 - protein, 12 aa, Homo sapiens
  CDR3 for alpha chain variable domain of TCR clone 282498 (TRAV27, TRAJ21)
CAGVRRLQQILL

SEQ ID NO: 564996 - protein, 14 aa, Homo sapiens
  CDR3 for beta chain variable domain of TCR clone 282498 (TRBV7-9, TRBJ1-4)
CGSSLEGQSEKLFF

SEQ ID NO: 564997 - protein, 14 aa, Homo sapiens
  CDR3 for alpha chain variable domain of TCR clone 282499 (TRAV1-2, TRAJ29)
CAVRELTSATPLVF

SEQ ID NO: 564998 - protein, 17 aa, Homo sapiens
  CDR3 for beta chain variable domain of TCR clone 282499 (TRBV20-1, TRBJ2-2)
CSASGSGQGGLTGELFF

SEQ ID NO: 564999 - protein, 15 aa, Homo sapiens
  CDR3 for alpha chain variable domain of TCR clone 282500 (TRAV29/DV5, TRAJ39)
CAASGRNNAGNMLTF

SEQ ID NO: 565000 - protein, 16 aa, Homo sapiens
  CDR3 for beta chain variable domain of TCR clone 282500 (TRBV4-2, TRBJ2-7)
CASSQEELAGTYEQYF

SEQ ID NO: 565001 - protein, 16 aa, Homo sapiens
  CDR3 for alpha chain variable domain of TCR clone 282501 (TRAV1-2, TRAJ10)
CAVRGVLTGGGNKLTF

SEQ ID NO: 565002 - protein, 15 aa, Homo sapiens
  CDR3 for beta chain variable domain of TCR clone 282501 (TRBV7-9, TRBJ1-6)
CASSAPGRGNSPLHF

SEQ ID NO: 565003 - protein, 14 aa, Homo sapiens
  CDR3 for alpha chain variable domain of TCR clone 282502 (TRAV8-1, TRAJ22)
CAAPSSGSARQLTF

SEQ ID NO: 565004 - protein, 14 aa, Homo sapiens
  CDR3 for beta chain variable domain of TCR clone 282502 (TRBV9, TRBJ2-2)
CASSAGQGAGELFF

SEQ ID NO: 565005 - protein, 14 aa, Homo sapiens
  CDR3 for alpha chain variable domain of TCR clone 282503 (TRAV8-3, TRAJ10)
CAGGNAGGGNKLTF

SEQ ID NO: 565006 - protein, 16 aa, Homo sapiens
  CDR3 for beta chain variable domain of TCR clone 282503 (TRBV11-2, TRBJ1-2)
CASSLDTGGADYGYTF

SEQ ID NO: 565007 - protein, 17 aa, Homo sapiens
  CDR3 for alpha chain variable domain of TCR clone 282504 (TRAV36/DV7, TRAJ52)
CAVAQRAGGTSYGKLTF

SEQ ID NO: 565008 - protein, 18 aa, Homo sapiens
  CDR3 for beta chain variable domain of TCR clone 282504 (TRBV7-9, TRBJ2-1)
CASSTGLAEGSSYNEQFF

SEQ ID NO: 565009 - protein, 14 aa, Homo sapiens
  CDR3 for alpha chain variable domain of TCR clone 282505 (TRAV1-2, TRAJ8)
CAVREDTGFQKLVF

SEQ ID NO: 565010 - protein, 16 aa, Homo sapiens
  CDR3 for beta chain variable domain of TCR clone 282505 (TRBV20-1, TRBJ2-1)
CSARDLKHGMNNEQFF

SEQ ID NO: 565011 - protein, 15 aa, Homo sapiens
  CDR3 for alpha chain variable domain of TCR clone 282506 (TRAV25, TRAJ53)
CAATGGGGSNYKLTF

SEQ ID NO: 565012 - protein, 17 aa, Homo sapiens
  CDR3 for beta chain variable domain of TCR clone 282506 (TRBV20-1, TRBJ2-1)
CSASSSGLAGSYNEQFF

SEQ ID NO: 565013 - protein, 15 aa, Homo sapiens
  CDR3 for alpha chain variable domain of TCR clone 282507 (TRAV13-1, TRAJ9)
CAASTLNTGGFKTIF

SEQ ID NO: 565014 - protein, 15 aa, Homo sapiens
  CDR3 for beta chain variable domain of TCR clone 282507 (TRBV6-5, TRBJ2-4)
CASSLRESPKNSQYF

SEQ ID NO: 565015 - protein, 12 aa, Homo sapiens
  CDR3 for alpha chain variable domain of TCR clone 282508 (TRAV21, TRAJ37)
CAVRGNTGKLIF

SEQ ID NO: 565016 - protein, 14 aa, Homo sapiens
  CDR3 for beta chain variable domain of TCR clone 282508 (TRBV7-2, TRBJ2-7)
CASSPKTSFYEQYF

SEQ ID NO: 565017 - protein, 14 aa, Homo sapiens
  CDR3 for alpha chain variable domain of TCR clone 282509 (TRAV3, TRAJ21)
CAVESQANFNNFYF

SEQ ID NO: 565018 - protein, 18 aa, Homo sapiens
  CDR3 for beta chain variable domain of TCR clone 282509 (TRBV7-9, TRBJ2-1)
CASSLAVAGTSGRNEQFF

SEQ ID NO: 565019 - protein, 14 aa, Homo sapiens
  CDR3 for alpha chain variable domain of TCR clone 282510 (TRAV12-3, TRAJ9)
CAMTPNTGGFKTIF

SEQ ID NO: 565020 - protein, 12 aa, Homo sapiens
  CDR3 for beta chain variable domain of TCR clone 282510 (TRBV19, TRBJ1-5)
CASSIAQQPQHF

SEQ ID NO: 565021 - protein, 13 aa, Homo sapiens
  CDR3 for alpha chain variable domain of TCR clone 282511 (TRAV1-2, TRAJ9)
CAVLNTGGFKTIF

SEQ ID NO: 565022 - protein, 16 aa, Homo sapiens
  CDR3 for beta chain variable domain of TCR clone 282511 (TRBV15, TRBJ2-1)
CATSRNLAGGYNEQFF

SEQ ID NO: 565023 - protein, 13 aa, Homo sapiens
  CDR3 for alpha chain variable domain of TCR clone 282512 (TRAV13-1, TRAJ13)
CAASKGGYQKVTS

SEQ ID NO: 565024 - protein, 16 aa, Homo sapiens
  CDR3 for beta chain variable domain of TCR clone 282512 (TRBV18, TRBJ1-2)
CASSPPERVTIYGYTF

SEQ ID NO: 565025 - protein, 13 aa, Homo sapiens
  CDR3 for alpha chain variable domain of TCR clone 282513 (TRAV8-4, TRAJ30)
CAVSVNRDDKIIF

SEQ ID NO: 565026 - protein, 15 aa, Homo sapiens
  CDR3 for beta chain variable domain of TCR clone 282513 (TRBV20-1, TRBJ2-7)
CSAESGTSGAYEQYF

SEQ ID NO: 565027 - protein, 15 aa, Homo sapiens
  CDR3 for alpha chain variable domain of TCR clone 282514 (TRAV3, TRAJ3)
CAVRDRDSSSSKIIF

SEQ ID NO: 565028 - protein, 15 aa, Homo sapiens
  CDR3 for beta chain variable domain of TCR clone 282514 (TRBV19, TRBJ2-1)
CASSSPGVPLDEQFF

SEQ ID NO: 565029 - protein, 12 aa, Homo sapiens
  CDR3 for alpha chain variable domain of TCR clone 282515 (TRAV12-3, TRAJ42)
CAPGGSQGNLIF

SEQ ID NO: 565030 - protein, 13 aa, Homo sapiens
  CDR3 for beta chain variable domain of TCR clone 282515 (TRBV5-7, TRBJ2-6)
CASTFSGANVLTF

SEQ ID NO: 565031 - protein, 18 aa, Homo sapiens
  CDR3 for alpha chain variable domain of TCR clone 282516 (TRAV12-1, TRAJ52)
CVVKLINAGGTRYGKLTF

SEQ ID NO: 565032 - protein, 16 aa, Homo sapiens
  CDR3 for beta chain variable domain of TCR clone 282516 (TRBV7-6, TRBJ2-7)
CASSGGTGALSYEQYF

SEQ ID NO: 565033 - protein, 13 aa, Homo sapiens
  CDR3 for alpha chain variable domain of TCR clone 282517 (TRAV12-2, TRAJ7)
CAGLIYGNNRLAF

SEQ ID NO: 565034 - protein, 20 aa, Homo sapiens
  CDR3 for beta chain variable domain of TCR clone 282517 (TRBV7-8, TRBJ2-2)
CASSHLFPGPTIHITGELFF

SEQ ID NO: 565035 - protein, 12 aa, Homo sapiens
  CDR3 for alpha chain variable domain of TCR clone 282518 (TRAV12-1, TRAJ40)
CVFYSGPYKYIF

SEQ ID NO: 565036 - protein, 18 aa, Homo sapiens
  CDR3 for beta chain variable domain of TCR clone 282518 (TRBV12-4, TRBJ2-2)
CASSLVAGTRGRTGELFF

SEQ ID NO: 565037 - protein, 14 aa, Homo sapiens
  CDR3 for alpha chain variable domain of TCR clone 282519 (TRAV39, TRAJ42)
CAVDIARSQGNLIF

SEQ ID NO: 565038 - protein, 15 aa, Homo sapiens
  CDR3 for beta chain variable domain of TCR clone 282519 (TRBV27, TRBJ2-7)
CASSLFRTGLDEQYF

SEQ ID NO: 565039 - protein, 15 aa, Homo sapiens
  CDR3 for alpha chain variable domain of TCR clone 282520 (TRAV27, TRAJ38)
CAARRNAGNNRKLIW

SEQ ID NO: 565040 - protein, 11 aa, Homo sapiens
  CDR3 for beta chain variable domain of TCR clone 282520 (TRBV12-4, TRBJ2-2)
RASSSAGELFF

SEQ ID NO: 565041 - protein, 20 aa, Homo sapiens
  CDR3 for alpha chain variable domain of TCR clone 282521 (TRAV30, TRAJ54)
SAAQSRSETQVVQGAQKLVF

SEQ ID NO: 565042 - protein, 17 aa, Homo sapiens
  CDR3 for beta chain variable domain of TCR clone 282521 (TRBV11-2, TRBJ2-1)
CASSLYPPGVEYNEQFF

SEQ ID NO: 565043 - protein, 14 aa, Homo sapiens
  CDR3 for alpha chain variable domain of TCR clone 282522 (TRAV35, TRAJ54)
CAGYLIQVAQKLVF

SEQ ID NO: 565044 - protein, 14 aa, Homo sapiens
  CDR3 for beta chain variable domain of TCR clone 282522 (TRBV7-2, TRBJ2-5)
CASSVGWAEETQYF

SEQ ID NO: 565045 - protein, 15 aa, Homo sapiens
  CDR3 for alpha chain variable domain of TCR clone 282523 (TRAV35, TRAJ40)
CAGQLGTSGTYKYIF

SEQ ID NO: 565046 - protein, 15 aa, Homo sapiens
  CDR3 for beta chain variable domain of TCR clone 282523 (TRBV5-7, TRBJ1-5)
CASSYGKLWDQPQHF

SEQ ID NO: 565047 - protein, 18 aa, Homo sapiens
  CDR3 for alpha chain variable domain of TCR clone 282524 (TRAV16, TRAJ45)
CAQASYPSSGGGADGLTF

SEQ ID NO: 565048 - protein, 13 aa, Homo sapiens
  CDR3 for beta chain variable domain of TCR clone 282524 (TRBV7-9, TRBJ1-2)
CASSVKQNYGYTF

SEQ ID NO: 565049 - protein, 14 aa, Homo sapiens
  CDR3 for alpha chain variable domain of TCR clone 282525 (TRAV13-1, TRAJ9)
CAASALTGGFKTIL

SEQ ID NO: 565050 - protein, 16 aa, Homo sapiens
  CDR3 for beta chain variable domain of TCR clone 282525 (TRBV12-4, TRBJ2-3)
CASSFGTGGISDTQYF

SEQ ID NO: 565051 - protein, 15 aa, Homo sapiens
  CDR3 for alpha chain variable domain of TCR clone 282526 (TRAV8-3, TRAJ45)
CASSYSGGGADGRTF

SEQ ID NO: 565052 - protein, 13 aa, Homo sapiens
  CDR3 for beta chain variable domain of TCR clone 282526 (TRBV10-3, TRBJ2-7)
CASKLAVNYGQYF

SEQ ID NO: 565053 - protein, 15 aa, Homo sapiens
  CDR3 for alpha chain variable domain of TCR clone 282527 (TRAV17, TRAJ37)
GATDGGSSNTGKLIF

SEQ ID NO: 565054 - protein, 15 aa, Homo sapiens
  CDR3 for beta chain variable domain of TCR clone 282527 (TRBV28, TRBJ2-5)
CASSSGRTIQETQYF

SEQ ID NO: 565055 - protein, 17 aa, Homo sapiens
  CDR3 for alpha chain variable domain of TCR clone 282528 (TRAV23/DV6, TRAJ58)
CAARLLRGETSGSRLTY

SEQ ID NO: 565056 - protein, 14 aa, Homo sapiens
  CDR3 for beta chain variable domain of TCR clone 282528 (TRBV6-1, TRBJ1-3)
CASVQGGGGNTIYF

SEQ ID NO: 565057 - protein, 10 aa, Homo sapiens
  CDR3 for alpha chain variable domain of TCR clone 282529 (TRAV20, TRAJ49)
CAVQAEPVLC

SEQ ID NO: 565058 - protein, 12 aa, Homo sapiens
  CDR3 for beta chain variable domain of TCR clone 282529 (TRBV7-3, TRBJ2-1)
CASSFINNEQFF

SEQ ID NO: 565059 - protein, 15 aa, Homo sapiens
  CDR3 for alpha chain variable domain of TCR clone 282530 (TRAV8-3, TRAJ37)
WAVGARASNTGKLIF

SEQ ID NO: 565060 - protein, 15 aa, Homo sapiens
  CDR3 for beta chain variable domain of TCR clone 282530 (TRBV5-4, TRBJ2-3)
CASSLAGRVTDTQYF

SEQ ID NO: 565061 - protein, 14 aa, Homo sapiens
  CDR3 for alpha chain variable domain of TCR clone 282531 (TRAV16, TRAJ54)
CALSDGHGAQKLVF

SEQ ID NO: 565062 - protein, 13 aa, Homo sapiens
  CDR3 for beta chain variable domain of TCR clone 282531 (TRBV20-1, TRBJ2-4)
CSAPTWAGNIQYF

SEQ ID NO: 565063 - protein, 12 aa, Homo sapiens
  CDR3 for alpha chain variable domain of TCR clone 282532 (TRAV1-1, TRAJ8)
CAGGTGFQKLVF

SEQ ID NO: 565064 - protein, 16 aa, Homo sapiens
  CDR3 for beta chain variable domain of TCR clone 282532 (TRBV12-5, TRBJ2-5)
CASGPRASGNQETQYF

SEQ ID NO: 565065 - protein, 14 aa, Homo sapiens
  CDR3 for alpha chain variable domain of TCR clone 282533 (TRAV1-2, TRAJ27)
CAPAEYTNAGKSTF

SEQ ID NO: 565066 - protein, 14 aa, Homo sapiens
  CDR3 for beta chain variable domain of TCR clone 282533 (TRBV25-1, TRBJ1-1)
CASTHLGGNTEAFF

SEQ ID NO: 565067 - protein, 14 aa, Homo sapiens
  CDR3 for alpha chain variable domain of TCR clone 282534 (TRAV20, TRAJ10)
CAVRVEGGGNKLTF

SEQ ID NO: 565068 - protein, 18 aa, Homo sapiens
  CDR3 for beta chain variable domain of TCR clone 282534 (TRBV24-1, TRBJ2-1)
CATSDVMFLGRGVHEQFF

SEQ ID NO: 565069 - protein, 12 aa, Homo sapiens
  CDR3 for alpha chain variable domain of TCR clone 282535 (TRAV16, TRAJ10)
CSRTGGGNKLTF

SEQ ID NO: 565070 - protein, 14 aa, Homo sapiens
  CDR3 for beta chain variable domain of TCR clone 282535 (TRBV18, TRBJ2-7)
CASSPIGGAYEQYF

SEQ ID NO: 565071 - protein, 15 aa, Homo sapiens
  CDR3 for alpha chain variable domain of TCR clone 282536 (TRAV12-2, TRAJ53)
CAVNGGGGSNYKLTF

SEQ ID NO: 565072 - protein, 14 aa, Homo sapiens
  CDR3 for beta chain variable domain of TCR clone 282536 (TRBV11-2, TRBJ2-5)
CASSRTGGIETQYL

SEQ ID NO: 565073 - protein, 13 aa, Homo sapiens
  CDR3 for alpha chain variable domain of TCR clone 282537 (TRAV12-3, TRAJ48)
CAMSLVGNDKLTF

SEQ ID NO: 565074 - protein, 11 aa, Homo sapiens
  CDR3 for beta chain variable domain of TCR clone 282537 (TRBV7-2, TRBJ2-7)
CASSSGLWQYF

SEQ ID NO: 565075 - protein, 14 aa, Homo sapiens
  CDR3 for alpha chain variable domain of TCR clone 282538 (TRAV12-3, TRAJ10)
SHLPLTGGGNKLTF

SEQ ID NO: 565076 - protein, 15 aa, Homo sapiens
  CDR3 for beta chain variable domain of TCR clone 282538 (TRBV29-1, TRBJ2-7)
CSVEFFDRGSFEQYF

SEQ ID NO: 565077 - protein, 13 aa, Homo sapiens
  CDR3 for alpha chain variable domain of TCR clone 282539 (TRAV17, TRAJ26)
CATVDNYGQNFFF

SEQ ID NO: 565078 - protein, 15 aa, Homo sapiens
  CDR3 for beta chain variable domain of TCR clone 282539 (TRBV11-3, TRBJ2-3)
CASLKDGREGDTQYF

SEQ ID NO: 565079 - protein, 13 aa, Homo sapiens
  CDR3 for alpha chain variable domain of TCR clone 282540 (TRAV12-3, TRAJ41)
CAIAPNSGDALNF

SEQ ID NO: 565080 - protein, 14 aa, Homo sapiens
  CDR3 for beta chain variable domain of TCR clone 282540 (TRBV7-2, TRBJ1-3)
CASSLGTAGNTIYF

SEQ ID NO: 565081 - protein, 14 aa, Homo sapiens
  CDR3 for alpha chain variable domain of TCR clone 282541 (TRAV12-3, TRAJ12)
CAMSEVDSTYKLIF

SEQ ID NO: 565082 - protein, 12 aa, Homo sapiens
  CDR3 for beta chain variable domain of TCR clone 282541 (TRBV18, TRBJ1-4)
CASSPSREKLFF

SEQ ID NO: 565083 - protein, 18 aa, Homo sapiens
  CDR3 for alpha chain variable domain of TCR clone 282542 (TRAV12-3, TRAJ52)
CAMSVGGAGGTSYGKLTF

SEQ ID NO: 565084 - protein, 15 aa, Homo sapiens
  CDR3 for beta chain variable domain of TCR clone 282542 (TRBV27, TRBJ1-6)
CASSFDMGLGSPLLF

SEQ ID NO: 565085 - protein, 14 aa, Homo sapiens
  CDR3 for alpha chain variable domain of TCR clone 282543 (TRAV1-2, TRAJ8)
CAVIEDTGFQKLVF

SEQ ID NO: 565086 - protein, 13 aa, Homo sapiens
  CDR3 for beta chain variable domain of TCR clone 282543 (TRBV18, TRBJ2-5)
CASSLQGQETQYF

SEQ ID NO: 565087 - protein, 17 aa, Homo sapiens
  CDR3 for alpha chain variable domain of TCR clone 282544 (TRAV23/DV6, TRAJ57)
CVASSTLSQGGSEKLVF

SEQ ID NO: 565088 - protein, 14 aa, Homo sapiens
  CDR3 for beta chain variable domain of TCR clone 282544 (TRBV25-1, TRBJ1-1)
CASTHLGGNTEAFF

SEQ ID NO: 565089 - protein, 12 aa, Homo sapiens
  CDR3 for alpha chain variable domain of TCR clone 282545 (TRAV21, TRAJ39)
CAADNAGNKLTF

SEQ ID NO: 565090 - protein, 13 aa, Homo sapiens
  CDR3 for beta chain variable domain of TCR clone 282545 (TRBV6-1, TRBJ1-1)
CASSRQGNTEAFF

SEQ ID NO: 565091 - protein, 11 aa, Homo sapiens
  CDR3 for alpha chain variable domain of TCR clone 282546 (TRAV2, TRAJ13)
CASGGYQKVTF

SEQ ID NO: 565092 - protein, 12 aa, Homo sapiens
  CDR3 for beta chain variable domain of TCR clone 282546 (TRBV19, TRBJ2-1)
FASSRQGAEQFF

SEQ ID NO: 565093 - protein, 12 aa, Homo sapiens
  CDR3 for alpha chain variable domain of TCR clone 282547 (TRAV12-1, TRAJ40)
CVFYSGTYKYIF

SEQ ID NO: 565094 - protein, 13 aa, Homo sapiens
  CDR3 for beta chain variable domain of TCR clone 282547 (TRBV5-7, TRBJ2-5)
CASQKRPEETQYF

SEQ ID NO: 565095 - protein, 18 aa, Homo sapiens
  CDR3 for alpha chain variable domain of TCR clone 282548 (TRAV1-2, TRAJ18)
CAVRDMGDRGSTLGRLYF

SEQ ID NO: 565096 - protein, 16 aa, Homo sapiens
  CDR3 for beta chain variable domain of TCR clone 282548 (TRBV7-3, TRBJ2-2)
CASSLKRGTLSGELFF

SEQ ID NO: 565097 - protein, 17 aa, Homo sapiens
  CDR3 for alpha chain variable domain of TCR clone 282549 (TRAV13-1, TRAJ5)
CSNPSLSRDTGRRALTF

SEQ ID NO: 565098 - protein, 13 aa, Homo sapiens
  CDR3 for beta chain variable domain of TCR clone 282549 (TRBV28, TRBJ2-5)
CASSSRNQETQYF

SEQ ID NO: 565099 - protein, 16 aa, Homo sapiens
  CDR3 for alpha chain variable domain of TCR clone 282550 (TRAV13-1, TRAJ18)
CAASRMRGSTLGRLYF

SEQ ID NO: 565100 - protein, 15 aa, Homo sapiens
  CDR3 for beta chain variable domain of TCR clone 282550 (TRBV7-2, TRBJ2-3)
CASSSTGLETDTQYF

SEQ ID NO: 565101 - protein, 23 aa, Homo sapiens
  CDR3 for alpha chain variable domain of TCR clone 282551 (TRAV3, TRAJ38)
CAVRDCLNAGNNHIQNPDPAVYQ

SEQ ID NO: 565102 - protein, 14 aa, Homo sapiens
  CDR3 for beta chain variable domain of TCR clone 282551 (TRBV5-5, TRBJ1-5)
CASSGQGVVQPQHF

SEQ ID NO: 565103 - protein, 15 aa, Homo sapiens
  CDR3 for alpha chain variable domain of TCR clone 282552 (TRAV4, TRAJ39)
CLVGPNNNAGHMLTF

SEQ ID NO: 565104 - protein, 14 aa, Homo sapiens
  CDR3 for beta chain variable domain of TCR clone 282552 (TRBV19, TRBJ2-1)
CASPTFVLSGEQFF

SEQ ID NO: 565105 - protein, 14 aa, Homo sapiens
  CDR3 for alpha chain variable domain of TCR clone 282553 (TRAV27, TRAJ22)
CAGVSVLGKRQLTF

SEQ ID NO: 565106 - protein, 16 aa, Homo sapiens
  CDR3 for beta chain variable domain of TCR clone 282553 (TRBV14, TRBJ2-1)
CQQPRSRVTSYNEQFF

SEQ ID NO: 565107 - protein, 18 aa, Homo sapiens
  CDR3 for alpha chain variable domain of TCR clone 282554 (TRAV21, TRAJ52)
CAVRPSPAGGTSNGKLTL

SEQ ID NO: 565108 - protein, 17 aa, Homo sapiens
  CDR3 for beta chain variable domain of TCR clone 282554 (TRBV13, TRBJ2-3)
CASSLSRVAGGRNTQYF

SEQ ID NO: 565109 - protein, 16 aa, Homo sapiens
  CDR3 for alpha chain variable domain of TCR clone 282555 (TRAV23/DV6, TRAJ9)
CAASIGGNTGGFKTTF

SEQ ID NO: 565110 - protein, 16 aa, Homo sapiens
  CDR3 for beta chain variable domain of TCR clone 282555 (TRBV27, TRBJ2-2)
CASSLRPGGAPGELFF

SEQ ID NO: 565111 - protein, 16 aa, Homo sapiens
  CDR3 for alpha chain variable domain of TCR clone 282556 (TRAV4, TRAJ22)
CLVGDLYSGSARQLTF

SEQ ID NO: 565112 - protein, 16 aa, Homo sapiens
  CDR3 for beta chain variable domain of TCR clone 282556 (TRBV7-9, TRBJ2-1)
FASSDVAGGSYNEQFF

SEQ ID NO: 565113 - protein, 17 aa, Homo sapiens
  CDR3 for alpha chain variable domain of TCR clone 282557 (TRAV3, TRAJ42)
CAVRDRYYGGSQGNLIF

SEQ ID NO: 565114 - protein, 15 aa, Homo sapiens
  CDR3 for beta chain variable domain of TCR clone 282557 (TRBV13, TRBJ1-2)
CASSLGRQPGYGYTF

SEQ ID NO: 565115 - protein, 16 aa, Homo sapiens
  CDR3 for alpha chain variable domain of TCR clone 282558 (TRAV12-2, TRAJ45)
CAVNMYSGGGADGLTF

SEQ ID NO: 565116 - protein, 17 aa, Homo sapiens
  CDR3 for beta chain variable domain of TCR clone 282558 (TRBV6-3, TRBJ2-2)
CASSYRGRDFDTGELFF

SEQ ID NO: 565117 - protein, 13 aa, Homo sapiens
  CDR3 for alpha chain variable domain of TCR clone 282559 (TRAV25, TRAJ47)
CAGHREYGNKLVF

SEQ ID NO: 565118 - protein, 17 aa, Homo sapiens
  CDR3 for beta chain variable domain of TCR clone 282559 (TRBV7-8, TRBJ2-5)
CASSLASGGRFQEPQYF

SEQ ID NO: 565119 - protein, 16 aa, Homo sapiens
  CDR3 for alpha chain variable domain of TCR clone 282560 (TRAV16, TRAJ52)
CALSSAGGTSYGKLTF

SEQ ID NO: 565120 - protein, 19 aa, Homo sapiens
  CDR3 for beta chain variable domain of TCR clone 282560 (TRBV19, TRBJ2-5)
CASSIGQVTDFFLGETQYF

SEQ ID NO: 565121 - protein, 12 aa, Homo sapiens
  CDR3 for alpha chain variable domain of TCR clone 282561 (TRAV3, TRAJ31)
CAVRPRGPRLMF

SEQ ID NO: 565122 - protein, 17 aa, Homo sapiens
  CDR3 for beta chain variable domain of TCR clone 282561 (TRBV7-9, TRBJ1-5)
CASSASQGGDSNQPQHF

SEQ ID NO: 565123 - protein, 15 aa, Homo sapiens
  CDR3 for alpha chain variable domain of TCR clone 282562 (TRAV3, TRAJ3)
CAVRDMSSSASKIIF

SEQ ID NO: 565124 - protein, 18 aa, Homo sapiens
  CDR3 for beta chain variable domain of TCR clone 282562 (TRBV6-6, TRBJ1-3)
CASSYSKWDSISGNTIYF

SEQ ID NO: 565125 - protein, 14 aa, Homo sapiens
  CDR3 for alpha chain variable domain of TCR clone 282563 (TRAV1-2, TRAJ6)
CAVRSSGGSYIPNF

SEQ ID NO: 565126 - protein, 18 aa, Homo sapiens
  CDR3 for beta chain variable domain of TCR clone 282563 (TRBV20-1, TRBJ2-3)
CSASGLAGGPGTTDTQYF

SEQ ID NO: 565127 - protein, 14 aa, Homo sapiens
  CDR3 for alpha chain variable domain of TCR clone 282564 (TRAV26-1, TRAJ38)
CIADNAANNRKLIW

SEQ ID NO: 565128 - protein, 13 aa, Homo sapiens
  CDR3 for beta chain variable domain of TCR clone 282564 (TRBV2, TRBJ1-5)
CATAGPGNQPQHF

SEQ ID NO: 565129 - protein, 15 aa, Homo sapiens
  CDR3 for alpha chain variable domain of TCR clone 282565 (TRAV3, TRAJ23)
CAVRDRGNQGGKLIF

SEQ ID NO: 565130 - protein, 13 aa, Homo sapiens
  CDR3 for beta chain variable domain of TCR clone 282565 (TRBV7-2, TRBJ2-7)
CASSSPSGSEQHF

SEQ ID NO: 565131 - protein, 12 aa, Homo sapiens
  CDR3 for alpha chain variable domain of TCR clone 282566 (TRAV13-1, TRAJ21)
CSAKEGFNKFYF

SEQ ID NO: 565132 - protein, 15 aa, Homo sapiens
  CDR3 for beta chain variable domain of TCR clone 282566 (TRBV12-4, TRBJ2-5)
CASSPPTGLQETQYF

SEQ ID NO: 565133 - protein, 13 aa, Homo sapiens
  CDR3 for alpha chain variable domain of TCR clone 282567 (TRAV17, TRAJ9)
CATDYTGDFKTIF

SEQ ID NO: 565134 - protein, 14 aa, Homo sapiens
  CDR3 for beta chain variable domain of TCR clone 282567 (TRBV19, TRBJ2-5)
CASSMTGQQETQYF

SEQ ID NO: 565135 - protein, 14 aa, Homo sapiens
  CDR3 for alpha chain variable domain of TCR clone 282568 (TRAV2, TRAJ9)
CAVEDRSGGFKTIF

SEQ ID NO: 565136 - protein, 14 aa, Homo sapiens
  CDR3 for beta chain variable domain of TCR clone 282568 (TRBV13, TRBJ2-5)
CASSLERVVETQYF

SEQ ID NO: 565137 - protein, 14 aa, Homo sapiens
  CDR3 for alpha chain variable domain of TCR clone 282569 (TRAV1-2, TRAJ8)
GAVREDTGFQKLVF

SEQ ID NO: 565138 - protein, 13 aa, Homo sapiens
  CDR3 for beta chain variable domain of TCR clone 282569 (TRBV7-3, TRBJ2-1)
CASSLDSYNEQFF

SEQ ID NO: 565139 - protein, 14 aa, Homo sapiens
  CDR3 for alpha chain variable domain of TCR clone 282570 (TRAV3, TRAJ5)
FAVRSDTGRRALTF

SEQ ID NO: 565140 - protein, 14 aa, Homo sapiens
  CDR3 for beta chain variable domain of TCR clone 282570 (TRBV7-2, TRBJ2-3)
CASSFVMPTDTQYF

SEQ ID NO: 565141 - protein, 14 aa, Homo sapiens
  CDR3 for alpha chain variable domain of TCR clone 282571 (TRAV12-1, TRAJ17)
CVVNVKAAGNKLTF

SEQ ID NO: 565142 - protein, 14 aa, Homo sapiens
  CDR3 for beta chain variable domain of TCR clone 282571 (TRBV7-2, TRBJ2-7)
CASRSQGAAYEQYF

SEQ ID NO: 565143 - protein, 21 aa, Homo sapiens
  CDR3 for alpha chain variable domain of TCR clone 282572 (TRAV1-1, TRAJ6)
CAVRREEATYLHLEEEPALFF

SEQ ID NO: 565144 - protein, 15 aa, Homo sapiens
  CDR3 for beta chain variable domain of TCR clone 282572 (TRBV6-6, TRBJ2-1)
CATRQGVSSYNEQSF

SEQ ID NO: 565145 - protein, 17 aa, Homo sapiens
  CDR3 for alpha chain variable domain of TCR clone 282573 (TRAV3, TRAJ6)
CAVRDGTRAGGSYIPTF

SEQ ID NO: 565146 - protein, 13 aa, Homo sapiens
  CDR3 for beta chain variable domain of TCR clone 282573 (TRBV7-9, TRBJ1-2)
CASSLKQNYGYTF

SEQ ID NO: 565147 - protein, 12 aa, Homo sapiens
  CDR3 for alpha chain variable domain of TCR clone 282574 (TRAV12-3, TRAJ17)
CAMTLTGNTLTF

SEQ ID NO: 565148 - protein, 15 aa, Homo sapiens
  CDR3 for beta chain variable domain of TCR clone 282574 (TRBV20-1, TRBJ2-7)
CSARDWVSGMDEQYF

SEQ ID NO: 565149 - protein, 18 aa, Homo sapiens
  CDR3 for alpha chain variable domain of TCR clone 282575 (TRAV13-1, TRAJ52)
CAASKRSAGGNSYGKLTF

SEQ ID NO: 565150 - protein, 14 aa, Homo sapiens
  CDR3 for beta chain variable domain of TCR clone 282575 (TRBV19, TRBJ2-1)
CASPTFVLSGEQFF

SEQ ID NO: 565151 - protein, 13 aa, Homo sapiens
  CDR3 for alpha chain variable domain of TCR clone 282576 (TRAV16, TRAJ20)
FALGPSNDYKLSF

SEQ ID NO: 565152 - protein, 15 aa, Homo sapiens
  CDR3 for beta chain variable domain of TCR clone 282576 (TRBV5-1, TRBJ2-2)
CASSRVGSDTGELFF

SEQ ID NO: 565153 - protein, 14 aa, Homo sapiens
  CDR3 for alpha chain variable domain of TCR clone 282577 (TRAV35, TRAJ22)
CAGLRPGSARQLTF

SEQ ID NO: 565154 - protein, 15 aa, Homo sapiens
  CDR3 for beta chain variable domain of TCR clone 282577 (TRBV12-4, TRBJ2-5)
CASSPPTGLQEPQYF

SEQ ID NO: 565155 - protein, 15 aa, Homo sapiens
  CDR3 for alpha chain variable domain of TCR clone 282578 (TRAV1-2, TRAJ28)
CAVQYSGAGSYQLTF

SEQ ID NO: 565156 - protein, 12 aa, Homo sapiens
  CDR3 for beta chain variable domain of TCR clone 282578 (TRBV11-2, TRBJ2-2)
CASSLGGGELFF

SEQ ID NO: 565157 - protein, 13 aa, Homo sapiens
  CDR3 for alpha chain variable domain of TCR clone 282579 (TRAV12-1, TRAJ21)
CVVTLYNFNKFYF

SEQ ID NO: 565158 - protein, 20 aa, Homo sapiens
  CDR3 for beta chain variable domain of TCR clone 282579 (TRBV7-8, TRBJ2-2)
CASSHLFPGPTIHITGELFF

SEQ ID NO: 565159 - protein, 20 aa, Homo sapiens
  CDR3 for alpha chain variable domain of TCR clone 282580 (TRAV1-1, TRAJ4)
CLLLLRCEGFLSGGYNKLIF

SEQ ID NO: 565160 - protein, 16 aa, Homo sapiens
  CDR3 for beta chain variable domain of TCR clone 282580 (TRBV28, TRBJ1-4)
CASSPPYRGRREKLFF

SEQ ID NO: 565161 - protein, 19 aa, Homo sapiens
  CDR3 for alpha chain variable domain of TCR clone 282581 (TRAV26-1, TRAJ42)
CVLWHRQTYYGGSQGNLIF

SEQ ID NO: 565162 - protein, 16 aa, Homo sapiens
  CDR3 for beta chain variable domain of TCR clone 282581 (TRBV7-3, TRBJ2-2)
CASSLKRGTLSGELFF

SEQ ID NO: 565163 - protein, 13 aa, Homo sapiens
  CDR3 for alpha chain variable domain of TCR clone 282582 (TRAV12-1, TRAJ26)
CVVRRNYGQNFVF

SEQ ID NO: 565164 - protein, 15 aa, Homo sapiens
  CDR3 for beta chain variable domain of TCR clone 282582 (TRBV5-7, TRBJ1-5)
CASSYGKLWDQPQHF

SEQ ID NO: 565165 - protein, 20 aa, Homo sapiens
  CDR3 for alpha chain variable domain of TCR clone 282583 (TRAV26-1, TRAJ37)
CCVLLHRQINGYSNTGKLIF

SEQ ID NO: 565166 - protein, 13 aa, Homo sapiens
  CDR3 for beta chain variable domain of TCR clone 282583 (TRBV20-1, TRBJ2-7)
CSARTSGNYEQYF

SEQ ID NO: 565167 - protein, 17 aa, Homo sapiens
  CDR3 for alpha chain variable domain of TCR clone 282584 (TRAV3, TRAJ6)
CAVRDGPRAGGSYLPTF

SEQ ID NO: 565168 - protein, 20 aa, Homo sapiens
  CDR3 for beta chain variable domain of TCR clone 282584 (TRBV28, TRBJ2-1)
CASTPIGRSPGLAGGNEQSF

SEQ ID NO: 565169 - protein, 16 aa, Homo sapiens
  CDR3 for alpha chain variable domain of TCR clone 282585 (TRAV30, TRAJ24)
CGTEIVDADSWGKFQV

SEQ ID NO: 565170 - protein, 15 aa, Homo sapiens
  CDR3 for beta chain variable domain of TCR clone 282585 (TRBV5-1, TRBJ1-1)
CASSSTTGTNTEAFF

SEQ ID NO: 565171 - protein, 16 aa, Homo sapiens
  CDR3 for alpha chain variable domain of TCR clone 282586 (TRAV12-2, TRAJ5)
CAVTRGSGTGRRALTF

SEQ ID NO: 565172 - protein, 18 aa, Homo sapiens
  CDR3 for beta chain variable domain of TCR clone 282586 (TRBV11-2, TRBJ2-3)
CASSLGGASRGAPNTQYF

SEQ ID NO: 565173 - protein, 12 aa, Homo sapiens
  CDR3 for alpha chain variable domain of TCR clone 282587 (TRAV2, TRAJ37)
CAVTMNTGKLIF

SEQ ID NO: 565174 - protein, 15 aa, Homo sapiens
  CDR3 for beta chain variable domain of TCR clone 282587 (TRBV5-1, TRBJ2-5)
CASSVGGRPQETQYF

SEQ ID NO: 565175 - protein, 14 aa, Homo sapiens
  CDR3 for alpha chain variable domain of TCR clone 282588 (TRAV1-1, TRAJ30)
CAVRSLNRDDKIIF

SEQ ID NO: 565176 - protein, 15 aa, Homo sapiens
  CDR3 for beta chain variable domain of TCR clone 282588 (TRBV27, TRBJ1-4)
CASSAQQDHNEKLFF

SEQ ID NO: 565177 - protein, 14 aa, Homo sapiens
  CDR3 for alpha chain variable domain of TCR clone 282589 (TRAV12-2, TRAJ40)
CAVKIPSGTYKYIF

SEQ ID NO: 565178 - protein, 16 aa, Homo sapiens
  CDR3 for beta chain variable domain of TCR clone 282589 (TRBV7-2, TRBJ2-1)
CASSLARTSGDNEQFF

SEQ ID NO: 565179 - protein, 17 aa, Homo sapiens
  CDR3 for alpha chain variable domain of TCR clone 282590 (TRAV4, TRAJ18)
CLVGERSVGSTLGRLYF

SEQ ID NO: 565180 - protein, 14 aa, Homo sapiens
  CDR3 for beta chain variable domain of TCR clone 282590 (TRBV18, TRBJ2-7)
CASSPRGGAYEQYF

SEQ ID NO: 565181 - protein, 14 aa, Homo sapiens
  CDR3 for alpha chain variable domain of TCR clone 282591 (TRAV23/DV6, TRAJ24)
CAASLSDSGGKLQF

SEQ ID NO: 565182 - protein, 16 aa, Homo sapiens
  CDR3 for beta chain variable domain of TCR clone 282591 (TRBV18, TRBJ2-7)
CASSPRSQGISYEQYF

SEQ ID NO: 565183 - protein, 10 aa, Homo sapiens
  CDR3 for alpha chain variable domain of TCR clone 282592 (TRAV1-2, TRAJ31)
RAFFDARLMF

SEQ ID NO: 565184 - protein, 14 aa, Homo sapiens
  CDR3 for beta chain variable domain of TCR clone 282592 (TRBV10-3, TRBJ2-7)
CHQCGTSETYEQYF

SEQ ID NO: 565185 - protein, 16 aa, Homo sapiens
  CDR3 for alpha chain variable domain of TCR clone 282593 (TRAV3, TRAJ21)
CAVRDIERGNFNKFYF

SEQ ID NO: 565186 - protein, 13 aa, Homo sapiens
  CDR3 for beta chain variable domain of TCR clone 282593 (TRBV4-2, TRBJ1-1)
CASSQAGNTEASF

SEQ ID NO: 565187 - protein, 15 aa, Homo sapiens
  CDR3 for alpha chain variable domain of TCR clone 282594 (TRAV26-1, TRAJ44)
CIVRANTGTASKLTF

SEQ ID NO: 565188 - protein, 15 aa, Homo sapiens
  CDR3 for beta chain variable domain of TCR clone 282594 (TRBV6-1, TRBJ2-4)
CTSSEAVWTINIQYF

SEQ ID NO: 565189 - protein, 14 aa, Homo sapiens
  CDR3 for alpha chain variable domain of TCR clone 282595 (TRAV12-2, TRAJ52)
CAVPGGTSYGKLTF

SEQ ID NO: 565190 - protein, 12 aa, Homo sapiens
  CDR3 for beta chain variable domain of TCR clone 282595 (TRBV18, TRBJ2-1)
CASSTGTSEGFF

SEQ ID NO: 565191 - protein, 14 aa, Homo sapiens
  CDR3 for alpha chain variable domain of TCR clone 282596 (TRAV13-1, TRAJ48)
CAASRSFGNEKLTF

SEQ ID NO: 565192 - protein, 13 aa, Homo sapiens
  CDR3 for beta chain variable domain of TCR clone 282596 (TRBV29-1, TRBJ2-1)
CSVEGGRVNEQFF

SEQ ID NO: 565193 - protein, 12 aa, Homo sapiens
  CDR3 for alpha chain variable domain of TCR clone 282597 (TRAV13-1, TRAJ49)
CAASPMGNQFYF

SEQ ID NO: 565194 - protein, 13 aa, Homo sapiens
  CDR3 for beta chain variable domain of TCR clone 282597 (TRBV20-1, TRBJ2-2)
CSSSAAGTGELFF

SEQ ID NO: 565195 - protein, 14 aa, Homo sapiens
  CDR3 for alpha chain variable domain of TCR clone 282598 (TRAV34, TRAJ22)
CGADTSGSARQLTF

SEQ ID NO: 565196 - protein, 16 aa, Homo sapiens
  CDR3 for beta chain variable domain of TCR clone 282598 (TRBV2, TRBJ2-3)
CASTEGPPAMDRYAVF

SEQ ID NO: 565197 - protein, 14 aa, Homo sapiens
  CDR3 for alpha chain variable domain of TCR clone 282599 (TRAV30, TRAJ33)
CGTVAPRSNYQLIW

SEQ ID NO: 565198 - protein, 18 aa, Homo sapiens
  CDR3 for beta chain variable domain of TCR clone 282599 (TRBV11-2, TRBJ2-3)
SASSLGGASRGAPNTQYF

SEQ ID NO: 565199 - protein, 14 aa, Homo sapiens
  CDR3 for alpha chain variable domain of TCR clone 282600 (TRAV26-1, TRAJ21)
CIVRPPYNFNKFYF

SEQ ID NO: 565200 - protein, 14 aa, Homo sapiens
  CDR3 for beta chain variable domain of TCR clone 282600 (TRBV11-2, TRBJ2-5)
CASSRTGGIETQYF

SEQ ID NO: 565201 - protein, 17 aa, Homo sapiens
  CDR3 for alpha chain variable domain of TCR clone 282601 (TRAV16, TRAJ58)
CITVLSNGETSGSRLTF

SEQ ID NO: 565202 - protein, 17 aa, Homo sapiens
  CDR3 for beta chain variable domain of TCR clone 282601 (TRBV18, TRBJ2-1)
CASSKGLSGGDDNEQFF

SEQ ID NO: 565203 - protein, 14 aa, Homo sapiens
  CDR3 for alpha chain variable domain of TCR clone 282602 (TRAV12-1, TRAJ3)
CVVNPCSSASKIIF

SEQ ID NO: 565204 - protein, 18 aa, Homo sapiens
  CDR3 for beta chain variable domain of TCR clone 282602 (TRBV4-2, TRBJ1-2)
CASSQDKVGHTVNYGYTF

SEQ ID NO: 565205 - protein, 12 aa, Homo sapiens
  CDR3 for alpha chain variable domain of TCR clone 282603 (TRAV1-1, TRAJ8)
CAGGTGFQKLVF

SEQ ID NO: 565206 - protein, 15 aa, Homo sapiens
  CDR3 for beta chain variable domain of TCR clone 282603 (TRBV7-9, TRAJ7)
CASSRTGGFNEKLFL

SEQ ID NO: 565207 - protein, 14 aa, Homo sapiens
  CDR3 for alpha chain variable domain of TCR clone 282604 (TRAV23/DV6, TRAJ40)
CAASLTSGTNKYIF

SEQ ID NO: 565208 - protein, 15 aa, Homo sapiens
  CDR3 for beta chain variable domain of TCR clone 282604 (TRBV29-1, TRBJ2-1)
CSVPTGLALYNEQFF

SEQ ID NO: 565209 - protein, 13 aa, Homo sapiens
  CDR3 for alpha chain variable domain of TCR clone 282605 (TRAV38-2/DV8, TRAJ48)
CASCNFGNEKLTF

SEQ ID NO: 565210 - protein, 19 aa, Homo sapiens
  CDR3 for beta chain variable domain of TCR clone 282605 (TRBV25-1, TRBJ2-2)
CAILVYRVDRGRKTGELFF

SEQ ID NO: 565211 - protein, 17 aa, Homo sapiens
  CDR3 for alpha chain variable domain of TCR clone 282606 (TRAV3, TRAJ6)
CAVRDGPRAGGSYIPTF

SEQ ID NO: 565212 - protein, 18 aa, Homo sapiens
  CDR3 for beta chain variable domain of TCR clone 282606 (TRBV7-9, TRBJ2-7)
YASSLTTSGSRTWYEQYF

SEQ ID NO: 565213 - protein, 14 aa, Homo sapiens
  CDR3 for alpha chain variable domain of TCR clone 282607 (TRAV12-2, TRAJ48)
CAVNAFFGNEKLTF

SEQ ID NO: 565214 - protein, 13 aa, Homo sapiens
  CDR3 for beta chain variable domain of TCR clone 282607 (TRBV28, TRBJ2-7)
CAGAQQGLDEEYF

SEQ ID NO: 565215 - protein, 11 aa, Homo sapiens
  CDR3 for alpha chain variable domain of TCR clone 282608 (TRAV4, TRAJ28)
CLVGDNRAETL

SEQ ID NO: 565216 - protein, 19 aa, Homo sapiens
  CDR3 for beta chain variable domain of TCR clone 282608 (TRBV19, TRBJ2-2)
CASTRPGLAGGRVTGELFF

SEQ ID NO: 565217 - protein, 13 aa, Homo sapiens
  CDR3 for alpha chain variable domain of TCR clone 282609 (TRAV12-3, TRAJ33)
CAMSVNSNSQLIW

SEQ ID NO: 565218 - protein, 16 aa, Homo sapiens
  CDR3 for beta chain variable domain of TCR clone 282609 (TRBV13, TRBJ2-5)
CASSLRTGGSWETQYF

SEQ ID NO: 565219 - protein, 18 aa, Homo sapiens
  CDR3 for alpha chain variable domain of TCR clone 282610 (TRAV21, TRAJ52)
CAVRPSPAGGTSYGKLTF

SEQ ID NO: 565220 - protein, 17 aa, Homo sapiens
  CDR3 for beta chain variable domain of TCR clone 282610 (TRBV13, TRBJ2-3)
GASSLARVAGGRNTQYF

SEQ ID NO: 565221 - protein, 13 aa, Homo sapiens
  CDR3 for alpha chain variable domain of TCR clone 282611 (TRAV12-2, TRAJ20)
CAVNRFDDYKLSF

SEQ ID NO: 565222 - protein, 15 aa, Homo sapiens
  CDR3 for beta chain variable domain of TCR clone 282611 (TRBV6-3, TRBJ2-7)
CASSSPGTVFYEQYF

SEQ ID NO: 565223 - protein, 18 aa, Homo sapiens
  CDR3 for alpha chain variable domain of TCR clone 282612 (TRAV17, TRAJ28)
CATDPPRGSGAGSYPLTF

SEQ ID NO: 565224 - protein, 14 aa, Homo sapiens
  CDR3 for beta chain variable domain of TCR clone 282612 (TRBV13, TRBJ2-5)
CASSLDYPQETQYF

SEQ ID NO: 565225 - protein, 15 aa, Homo sapiens
  CDR3 for alpha chain variable domain of TCR clone 282613 (TRAV38-1, TRAJ57)
CISVRSSRASEKLVF

SEQ ID NO: 565226 - protein, 17 aa, Homo sapiens
  CDR3 for beta chain variable domain of TCR clone 282613 (TRBV29-1, TRBJ2-3)
CSVDSPPRGARTDTQYF

SEQ ID NO: 565227 - protein, 18 aa, Homo sapiens
  CDR3 for alpha chain variable domain of TCR clone 282614 (TRAV26-2, TRAJ45)
CILRDDKYSGGGADGLTF

SEQ ID NO: 565228 - protein, 16 aa, Homo sapiens
  CDR3 for beta chain variable domain of TCR clone 282614 (TRBV2, TRBJ1-4)
CASNLLQGATNEKLFF

SEQ ID NO: 565229 - protein, 13 aa, Homo sapiens
  CDR3 for alpha chain variable domain of TCR clone 282615 (TRAV13-2, TRAJ13)
CAERPGGYQKVTF

SEQ ID NO: 565230 - protein, 14 aa, Homo sapiens
  CDR3 for beta chain variable domain of TCR clone 282615 (TRBV5-1, TRBJ2-4)
CASSPQGGQNIQYF

SEQ ID NO: 565231 - protein, 14 aa, Homo sapiens
  CDR3 for alpha chain variable domain of TCR clone 282616 (TRAV1-2, TRAJ12)
CAVSGTDSSYKLIF

SEQ ID NO: 565232 - protein, 13 aa, Homo sapiens
  CDR3 for beta chain variable domain of TCR clone 282616 (TRBV19, TRBJ2-7)
CASSPRQSYEQYF

SEQ ID NO: 565233 - protein, 18 aa, Homo sapiens
  CDR3 for alpha chain variable domain of TCR clone 282617 (TRAV21, TRAJ52)
CAVRPSPASGTSYRKLTF

SEQ ID NO: 565234 - protein, 15 aa, Homo sapiens
  CDR3 for beta chain variable domain of TCR clone 282617 (TRBV10-3, TRBJ2-3)
CAISLTSGGTDTQYF

SEQ ID NO: 565235 - protein, 11 aa, Homo sapiens
  CDR3 for alpha chain variable domain of TCR clone 282618 (TRAV3, TRAJ21)
CAVGNFNKFYF

SEQ ID NO: 565236 - protein, 16 aa, Homo sapiens
  CDR3 for beta chain variable domain of TCR clone 282618 (TRBV19, TRBJ2-1)
CASSKAGPSCYNEQFS

SEQ ID NO: 565237 - protein, 13 aa, Homo sapiens
  CDR3 for alpha chain variable domain of TCR clone 282619 (TRAV3, TRAJ8)
CAVRFTGFQQLVF

SEQ ID NO: 565238 - protein, 15 aa, Homo sapiens
  CDR3 for beta chain variable domain of TCR clone 282619 (TRBV20-1, TRBJ2-7)
CSARDRVSGMDEQYF

SEQ ID NO: 565239 - protein, 12 aa, Homo sapiens
  CDR3 for alpha chain variable domain of TCR clone 282620 (TRAV8-3, TRAJ20)
CAVDFNDYELSF

SEQ ID NO: 565240 - protein, 13 aa, Homo sapiens
  CDR3 for beta chain variable domain of TCR clone 282620 (TRBV5-7, TRBJ2-3)
CASSVGRTDTQYF

SEQ ID NO: 565241 - protein, 13 aa, Homo sapiens
  CDR3 for alpha chain variable domain of TCR clone 282621 (TRAV12-2, TRAJ37)
CAGGSGNTGKLIF

SEQ ID NO: 565242 - protein, 16 aa, Homo sapiens
  CDR3 for beta chain variable domain of TCR clone 282621 (TRBV12-4, TRBJ1-5)
CASSRPVGGSNQPQHF

SEQ ID NO: 565243 - protein, 14 aa, Homo sapiens
  CDR3 for alpha chain variable domain of TCR clone 282622 (TRAV1-2, TRAJ16)
CVVNRFSDGQKLLF

SEQ ID NO: 565244 - protein, 16 aa, Homo sapiens
  CDR3 for beta chain variable domain of TCR clone 282622 (TRBV7-2, TRBJ2-7)
CASSLDLSGGAYEQYF

SEQ ID NO: 565245 - protein, 16 aa, Homo sapiens
  CDR3 for alpha chain variable domain of TCR clone 282623 (TRAV26-2, TRAJ45)
CTTASPIGGGADVLTF

SEQ ID NO: 565246 - protein, 20 aa, Homo sapiens
  CDR3 for beta chain variable domain of TCR clone 282623 (TRBV28, TRBJ2-1)
CASTHIGRSPGLAGGNEQFF

SEQ ID NO: 565247 - protein, 18 aa, Homo sapiens
  CDR3 for alpha chain variable domain of TCR clone 282624 (TRAV26-1, TRAJ23)
CIVRVGLEVWNQGGKLIF

SEQ ID NO: 565248 - protein, 16 aa, Homo sapiens
  CDR3 for beta chain variable domain of TCR clone 282624 (TRBV12-4, TRBJ2-5)
CASSFFVRGRQETQSF

SEQ ID NO: 565249 - protein, 12 aa, Homo sapiens
  CDR3 for alpha chain variable domain of TCR clone 282625 (TRAV2, TRAJ9)
CAVGAGGFNTIF

SEQ ID NO: 565250 - protein, 19 aa, Homo sapiens
  CDR3 for beta chain variable domain of TCR clone 282625 (TRBV7-9, TRBJ2-6)
CASSLESATVLPGANVLTF

SEQ ID NO: 565251 - protein, 11 aa, Homo sapiens
  CDR3 for alpha chain variable domain of TCR clone 282626 (TRAV12-3, TRAJ43)
CAMSVSNDMRF

SEQ ID NO: 565252 - protein, 18 aa, Homo sapiens
  CDR3 for beta chain variable domain of TCR clone 282626 (TRBV5-1, TRBJ1-6)
CASSPGQTRIPYNSPLHF

SEQ ID NO: 565253 - protein, 12 aa, Homo sapiens
  CDR3 for alpha chain variable domain of TCR clone 282627 (TRAV36/DV7, TRAJ40)
CAVGTGTYKYIF

SEQ ID NO: 565254 - protein, 14 aa, Homo sapiens
  CDR3 for beta chain variable domain of TCR clone 282627 (TRBV7-2, TRBJ2-7)
CASSPKTSFYEQFF

SEQ ID NO: 565255 - protein, 13 aa, Homo sapiens
  CDR3 for alpha chain variable domain of TCR clone 282628 (TRAV17, TRAJ34)
CATVHYNTDKLIF

SEQ ID NO: 565256 - protein, 17 aa, Homo sapiens
  CDR3 for beta chain variable domain of TCR clone 282628 (TRBV4-2, TRBJ1-1)
CASSQVATGGMNTEAFF

SEQ ID NO: 565257 - protein, 12 aa, Homo sapiens
  CDR3 for alpha chain variable domain of TCR clone 282629 (TRAV21, TRAJ11)
SAATSGYSTLTF

SEQ ID NO: 565258 - protein, 16 aa, Homo sapiens
  CDR3 for beta chain variable domain of TCR clone 282629 (TRBV28, TRBJ2-2)
CASSLEGGSNTGELFF

SEQ ID NO: 565259 - protein, 14 aa, Homo sapiens
  CDR3 for alpha chain variable domain of TCR clone 282630 (TRAV8-2, TRAJ11)
CVVSERPGYSTLTF

SEQ ID NO: 565260 - protein, 13 aa, Homo sapiens
  CDR3 for beta chain variable domain of TCR clone 282630 (TRBV27, TRBJ2-3)
CASSWGRTDTQYF

SEQ ID NO: 565261 - protein, 11 aa, Homo sapiens
  CDR3 for alpha chain variable domain of TCR clone 282631 (TRAV16, TRAJ21)
CACGWATTSTN

SEQ ID NO: 565262 - protein, 15 aa, Homo sapiens
  CDR3 for beta chain variable domain of TCR clone 282631 (TRBV19, TRBJ2-1)
CASSIQATSYNEQFF

SEQ ID NO: 565263 - protein, 13 aa, Homo sapiens
  CDR3 for alpha chain variable domain of TCR clone 282632 (TRAV6, TRAJ40)
CALVPSGTYKYIF

SEQ ID NO: 565264 - protein, 16 aa, Homo sapiens
  CDR3 for beta chain variable domain of TCR clone 282632 (TRBV7-7, TRBJ2-1)
CASSLASGTSYNEQFF

SEQ ID NO: 565265 - protein, 18 aa, Homo sapiens
  CDR3 for alpha chain variable domain of TCR clone 282633 (TRAV13-1, TRAJ52)
CAAKNPNAGGTSYGKLTF

SEQ ID NO: 565266 - protein, 17 aa, Homo sapiens
  CDR3 for beta chain variable domain of TCR clone 282633 (TRBV7-3, TRBJ2-6)
CASSLAASGTGANVLTF

SEQ ID NO: 565267 - protein, 13 aa, Homo sapiens
  CDR3 for alpha chain variable domain of TCR clone 282634 (TRAV9-2, TRAJ58)
CSATGTGGSRVTF

SEQ ID NO: 565268 - protein, 14 aa, Homo sapiens
  CDR3 for beta chain variable domain of TCR clone 282634 (TRBV7-9, TRBJ2-1)
CASSPRDSLYEQFF

SEQ ID NO: 565269 - protein, 10 aa, Homo sapiens
  CDR3 for alpha chain variable domain of TCR clone 282635 (TRAV12-2, TRAJ41)
WAVTGYALNF

SEQ ID NO: 565270 - protein, 15 aa, Homo sapiens
  CDR3 for beta chain variable domain of TCR clone 282635 (TRBV4-2, TRBJ2-1)
CASSQDVGLAGEQFF

SEQ ID NO: 565271 - protein, 13 aa, Homo sapiens
  CDR3 for alpha chain variable domain of TCR clone 282636 (TRAV1-1, TRAJ33)
CAVRRDSNYQLIW

SEQ ID NO: 565272 - protein, 16 aa, Homo sapiens
  CDR3 for beta chain variable domain of TCR clone 282636 (TRBV6-1, TRBJ2-2)
CASSAFRGDDTGELFF

SEQ ID NO: 565273 - protein, 14 aa, Homo sapiens
  CDR3 for alpha chain variable domain of TCR clone 282637 (TRAV20, TRAJ29)
CAVQAWVGNTPLVF

SEQ ID NO: 565274 - protein, 16 aa, Homo sapiens
  CDR3 for beta chain variable domain of TCR clone 282637 (TRBV20-1, TRBJ1-5)
CSASRGTGYSNQPQHF

SEQ ID NO: 565275 - protein, 15 aa, Homo sapiens
  CDR3 for alpha chain variable domain of TCR clone 282638 (TRAV6, TRAJ21)
CAGLDTTSTNFTLDL

SEQ ID NO: 565276 - protein, 14 aa, Homo sapiens
  CDR3 for beta chain variable domain of TCR clone 282638 (TRBV7-2, TRBJ1-1)
CASSFLTGTTEAFF

SEQ ID NO: 565277 - protein, 14 aa, Homo sapiens
  CDR3 for alpha chain variable domain of TCR clone 282639 (TRAV38-1, TRAJ27)
CAFIHNTNAGKSTF

SEQ ID NO: 565278 - protein, 17 aa, Homo sapiens
  CDR3 for beta chain variable domain of TCR clone 282639 (TRBV13, TRBJ2-3)
CASSLSRVAGGRNTQYF

SEQ ID NO: 565279 - protein, 14 aa, Homo sapiens
  CDR3 for alpha chain variable domain of TCR clone 282640 (TRAV38-1, TRAJ40)
CALRPTSGPYKYIF

SEQ ID NO: 565280 - protein, 13 aa, Homo sapiens
  CDR3 for beta chain variable domain of TCR clone 282640 (TRBV7-2, TRBJ2-2)
CASSLAVTGELFF

SEQ ID NO: 565281 - protein, 15 aa, Homo sapiens
  CDR3 for alpha chain variable domain of TCR clone 282641 (TRAV3, TRAJ22)
CALRDRGGSARQLTF

SEQ ID NO: 565282 - protein, 16 aa, Homo sapiens
  CDR3 for beta chain variable domain of TCR clone 282641 (TRBV19, TRBJ2-2)
CASRSPGTGATGELFF

SEQ ID NO: 565283 - protein, 13 aa, Homo sapiens
  CDR3 for alpha chain variable domain of TCR clone 282642 (TRAV20, TRAJ15)
CATINQAGTALIF

SEQ ID NO: 565284 - protein, 13 aa, Homo sapiens
  CDR3 for beta chain variable domain of TCR clone 282642 (TRBV10-3, TRBJ2-7)
CASKLAVNCEQYF

SEQ ID NO: 565285 - protein, 17 aa, Homo sapiens
  CDR3 for alpha chain variable domain of TCR clone 282643 (TRAV12-2, TRAJ48)
CASTETLTFGTGTRLTI

SEQ ID NO: 565286 - protein, 14 aa, Homo sapiens
  CDR3 for beta chain variable domain of TCR clone 282643 (TRBV5-1, TRBJ2-5)
CASSLAGKQETQYF

SEQ ID NO: 565287 - protein, 14 aa, Homo sapiens
  CDR3 for alpha chain variable domain of TCR clone 282644 (TRAV29/DV5, TRAJ32)
CAAAYGGATNKLIF

SEQ ID NO: 565288 - protein, 14 aa, Homo sapiens
  CDR3 for beta chain variable domain of TCR clone 282644 (TRBV20-1, TRBJ1-1)
CSAQTRIAGTEAFF

SEQ ID NO: 565289 - protein, 12 aa, Homo sapiens
  CDR3 for alpha chain variable domain of TCR clone 282645 (TRAV12-1, TRAJ34)
CVVAGATDKLIF

SEQ ID NO: 565290 - protein, 15 aa, Homo sapiens
  CDR3 for beta chain variable domain of TCR clone 282645 (TRBV11-2, TRBJ1-3)
CASSLDGTVGNTIYF

SEQ ID NO: 565291 - protein, 22 aa, Homo sapiens
  CDR3 for alpha chain variable domain of TCR clone 282646 (TRAV21, )
CAVRQDAGNNHIQNRDPAVYQL

SEQ ID NO: 565292 - protein, 16 aa, Homo sapiens
  CDR3 for beta chain variable domain of TCR clone 282646 (TRBV4-2, TRBJ1-1)
CASRPLDGGGDTEAFF

SEQ ID NO: 565293 - protein, 16 aa, Homo sapiens
  CDR3 for alpha chain variable domain of TCR clone 282647 (TRAV3, TRAJ37)
CDVRVRGSGNTGKLIF

SEQ ID NO: 565294 - protein, 13 aa, Homo sapiens
  CDR3 for beta chain variable domain of TCR clone 282647 (TRBV14, TRBJ2-1)
CASSQDRRNEQFF

SEQ ID NO: 565295 - protein, 15 aa, Homo sapiens
  CDR3 for alpha chain variable domain of TCR clone 282648 (TRAV20, TRAJ23)
CAVQAVRNQGGKLIF

SEQ ID NO: 565296 - protein, 16 aa, Homo sapiens
  CDR3 for beta chain variable domain of TCR clone 282648 (TRBV27, TRBJ2-7)
CASSKQGRGWDYEQYF

SEQ ID NO: 565297 - protein, 12 aa, Homo sapiens
  CDR3 for alpha chain variable domain of TCR clone 282649 (TRAV13-1, TRAJ49)
WAASIRSNQFYF

SEQ ID NO: 565298 - protein, 14 aa, Homo sapiens
  CDR3 for beta chain variable domain of TCR clone 282649 (TRBV7-2, TRBJ2-1)
CASSPGLAGNEQFF

SEQ ID NO: 565299 - protein, 13 aa, Homo sapiens
  CDR3 for alpha chain variable domain of TCR clone 282650 (TRAV21, TRAJ57)
CAVTQGGSEKLVF

SEQ ID NO: 565300 - protein, 15 aa, Homo sapiens
  CDR3 for beta chain variable domain of TCR clone 282650 (TRBV9, TRBJ1-2)
CASSVVGQANYGYAF

SEQ ID NO: 565301 - protein, 14 aa, Homo sapiens
  CDR3 for alpha chain variable domain of TCR clone 282651 (TRAV1-1, TRAJ27)
RAVIYNTNAGKSTF

SEQ ID NO: 565302 - protein, 16 aa, Homo sapiens
  CDR3 for beta chain variable domain of TCR clone 282651 (TRBV6-1, TRBJ2-5)
CASSETLDRGAETQYF

SEQ ID NO: 565303 - protein, 14 aa, Homo sapiens
  CDR3 for alpha chain variable domain of TCR clone 282652 (TRAV26-1, TRAJ38)
CIADNAGNNRKLIW

SEQ ID NO: 565304 - protein, 14 aa, Homo sapiens
  CDR3 for beta chain variable domain of TCR clone 282652 (TRBV3-1, TRBJ1-5)
CASSPLWSNQPQHF

SEQ ID NO: 565305 - protein, 15 aa, Homo sapiens
  CDR3 for alpha chain variable domain of TCR clone 282653 (TRAV38-2/DV8, TRAJ57)
CAYKSGLGGSEKLVF

SEQ ID NO: 565306 - protein, 12 aa, Homo sapiens
  CDR3 for beta chain variable domain of TCR clone 282653 (TRBV19, TRBJ1-1)
CASSIGTEEAFF

SEQ ID NO: 565307 - protein, 14 aa, Homo sapiens
  CDR3 for alpha chain variable domain of TCR clone 282654 (TRAV27, TRAJ58)
CAGDGETSGSRLTF

SEQ ID NO: 565308 - protein, 13 aa, Homo sapiens
  CDR3 for beta chain variable domain of TCR clone 282654 (TRBV12-4, TRBJ2-7)
CASSPTETYEQYF

SEQ ID NO: 565309 - protein, 15 aa, Homo sapiens
  CDR3 for alpha chain variable domain of TCR clone 282655 (TRAV21, TRAJ53)
CASLNSGGSNYKLTF

SEQ ID NO: 565310 - protein, 12 aa, Homo sapiens
  CDR3 for beta chain variable domain of TCR clone 282655 (TRBV5-4, TRBJ2-7)
CASSLEAYEQYF

SEQ ID NO: 565311 - protein, 14 aa, Homo sapiens
  CDR3 for alpha chain variable domain of TCR clone 282656 (TRAV12-2, TRAJ9)
CAVNPDTGGFKTIF

SEQ ID NO: 565312 - protein, 16 aa, Homo sapiens
  CDR3 for beta chain variable domain of TCR clone 282656 (TRBV27, TRBJ2-1)
CASSLKLAEIYNEQFF

SEQ ID NO: 565313 - protein, 10 aa, Homo sapiens
  CDR3 for alpha chain variable domain of TCR clone 282657 (TRAV13-1, TRAJ26)
CAPYGQNFVF

SEQ ID NO: 565314 - protein, 15 aa, Homo sapiens
  CDR3 for beta chain variable domain of TCR clone 282657 (TRBV28, TRBJ2-3)
CARSQELGGTDTQYF

SEQ ID NO: 565315 - protein, 16 aa, Homo sapiens
  CDR3 for alpha chain variable domain of TCR clone 282658 (TRAV21, TRAJ52)
CAVTHAGGTSYGKLTF

SEQ ID NO: 565316 - protein, 11 aa, Homo sapiens
  CDR3 for beta chain variable domain of TCR clone 282658 (TRBV2, TRBJ1-1)
CASREGTEAFF

SEQ ID NO: 565317 - protein, 13 aa, Homo sapiens
  CDR3 for alpha chain variable domain of TCR clone 282659 (TRAV8-3, TRAJ36)
CAVGATGANNLFF

SEQ ID NO: 565318 - protein, 16 aa, Homo sapiens
  CDR3 for beta chain variable domain of TCR clone 282659 (TRBV7-2, TRBJ2-1)
CASSSQGAAAYNEQFF

SEQ ID NO: 565319 - protein, 14 aa, Homo sapiens
  CDR3 for alpha chain variable domain of TCR clone 282660 (TRAV2, TRAJ37)
CAVDFTINTGKLIF

SEQ ID NO: 565320 - protein, 15 aa, Homo sapiens
  CDR3 for beta chain variable domain of TCR clone 282660 (TRBV20-1, TRBJ1-1)
CSASRGVAGNTEAFF

SEQ ID NO: 565321 - protein, 16 aa, Homo sapiens
  CDR3 for alpha chain variable domain of TCR clone 282661 (TRAV27, TRAJ13)
CAGAKSDSGGYQKVTF

SEQ ID NO: 565322 - protein, 17 aa, Homo sapiens
  CDR3 for beta chain variable domain of TCR clone 282661 (TRBV7-9, TRBJ2-5)
CATSGGARDPVLRARHA

SEQ ID NO: 565323 - protein, 16 aa, Homo sapiens
  CDR3 for alpha chain variable domain of TCR clone 282662 (TRAV13-1, TRAJ48)
CAASIFGNFGNVKLTF

SEQ ID NO: 565324 - protein, 12 aa, Homo sapiens
  CDR3 for beta chain variable domain of TCR clone 282662 (TRBV14, TRBJ2-4)
CASSNLKSMQYF

SEQ ID NO: 565325 - protein, 15 aa, Homo sapiens
  CDR3 for alpha chain variable domain of TCR clone 282663 (TRAV12-1, TRAJ44)
CVADLPTGTASKLTF

SEQ ID NO: 565326 - protein, 14 aa, Homo sapiens
  CDR3 for beta chain variable domain of TCR clone 282663 (TRBV7-2, TRBJ1-1)
CASSFLTGTTEAFF

SEQ ID NO: 565327 - protein, 14 aa, Homo sapiens
  CDR3 for alpha chain variable domain of TCR clone 282664 (TRAV26-1, TRAJ48)
CIVRVGFGNEKLTF

SEQ ID NO: 565328 - protein, 15 aa, Homo sapiens
  CDR3 for beta chain variable domain of TCR clone 282664 (TRBV20-1, TRBJ2-7)
CSARDRVAGMDEQYF

SEQ ID NO: 565329 - protein, 17 aa, Homo sapiens
  CDR3 for alpha chain variable domain of TCR clone 282665 (TRAV38-2/DV8, TRAJ28)
CAFLTLYSGAGSYQLTL

SEQ ID NO: 565330 - protein, 14 aa, Homo sapiens
  CDR3 for beta chain variable domain of TCR clone 282665 (TRBV6-1, TRBJ1-3)
CASVQGGGWKHHVF

SEQ ID NO: 565331 - protein, 12 aa, Homo sapiens
  CDR3 for alpha chain variable domain of TCR clone 282666 (TRAV24, TRAJ37)
CASSSNTGKLLF

SEQ ID NO: 565332 - protein, 11 aa, Homo sapiens
  CDR3 for beta chain variable domain of TCR clone 282666 (TRBV29-1, TRBJ2-5)
CSEDRTGTQYF

SEQ ID NO: 565333 - protein, 12 aa, Homo sapiens
  CDR3 for alpha chain variable domain of TCR clone 282667 (TRAV16, TRAJ10)
CSRTGGGNKLTF

SEQ ID NO: 565334 - protein, 14 aa, Homo sapiens
  CDR3 for beta chain variable domain of TCR clone 282667 (TRBV19, TRBJ1-2)
CASSLQGQAYGYTF

SEQ ID NO: 565335 - protein, 18 aa, Homo sapiens
  CDR3 for alpha chain variable domain of TCR clone 282668 (TRAV12-3, TRAJ52)
CAMSVGGAGGTSYGKLTF

SEQ ID NO: 565336 - protein, 14 aa, Homo sapiens
  CDR3 for beta chain variable domain of TCR clone 282668 (TRBV10-3, TRBJ2-5)
CATSRDRDRETQYF

SEQ ID NO: 565337 - protein, 12 aa, Homo sapiens
  CDR3 for alpha chain variable domain of TCR clone 282669 (TRAV3, TRAJ39)
CAVIEWSNMLTF

SEQ ID NO: 565338 - protein, 14 aa, Homo sapiens
  CDR3 for beta chain variable domain of TCR clone 282669 (TRBV7-8, TRBJ2-3)
CASSFPDGQDTQFF

SEQ ID NO: 565339 - protein, 19 aa, Homo sapiens
  CDR3 for alpha chain variable domain of TCR clone 282670 (TRAV26-1, TRAJ52)
CIVRVANNAGGTSYGKLTF

SEQ ID NO: 565340 - protein, 17 aa, Homo sapiens
  CDR3 for beta chain variable domain of TCR clone 282670 (TRBV2, TRBJ2-7)
CASSQALTGWDSYEQYF

SEQ ID NO: 565341 - protein, 12 aa, Homo sapiens
  CDR3 for alpha chain variable domain of TCR clone 282671 (TRAV22, TRAJ21)
CAVSYNFNKFYF

SEQ ID NO: 565342 - protein, 15 aa, Homo sapiens
  CDR3 for beta chain variable domain of TCR clone 282671 (TRBV18, TRBJ1-6)
CASSPASAAGSTLHF

SEQ ID NO: 565343 - protein, 14 aa, Homo sapiens
  CDR3 for alpha chain variable domain of TCR clone 282672 (TRAV20, TRAJ42)
CAVQAGGSQGNLIF

SEQ ID NO: 565344 - protein, 12 aa, Homo sapiens
  CDR3 for beta chain variable domain of TCR clone 282672 (TRBV11-2, TRBJ2-5)
CASSLVGETQYF

SEQ ID NO: 565345 - protein, 15 aa, Homo sapiens
  CDR3 for alpha chain variable domain of TCR clone 282673 (TRAV17, TRAJ56)
CATEPFTGANSKLTF

SEQ ID NO: 565346 - protein, 17 aa, Homo sapiens
  CDR3 for beta chain variable domain of TCR clone 282673 (TRBV11-2, TRBJ2-1)
RASSLYPPGVEYNEQFF

SEQ ID NO: 565347 - protein, 14 aa, Homo sapiens
  CDR3 for alpha chain variable domain of TCR clone 282674 (TRAV8-4, TRAJ9)
CAVRINTGGYKTIF

SEQ ID NO: 565348 - protein, 15 aa, Homo sapiens
  CDR3 for beta chain variable domain of TCR clone 282674 (TRBV10-2, TRBJ2-6)
CASSEQGTGANVLTF

SEQ ID NO: 565349 - protein, 12 aa, Homo sapiens
  CDR3 for alpha chain variable domain of TCR clone 282675 (TRAV12-2, TRAJ44)
CADTGTASKLTF

SEQ ID NO: 565350 - protein, 17 aa, Homo sapiens
  CDR3 for beta chain variable domain of TCR clone 282675 (TRBV20-1, TRBJ1-1)
CSARGSGGSYGNTGAFF

SEQ ID NO: 565351 - protein, 17 aa, Homo sapiens
  CDR3 for alpha chain variable domain of TCR clone 282676 (TRAV3, TRAJ6)
CAVRDGPRAGGNYIPTF

SEQ ID NO: 565352 - protein, 15 aa, Homo sapiens
  CDR3 for beta chain variable domain of TCR clone 282676 (TRBV28, TRBJ2-3)
CASSQELGGTDTQYF

SEQ ID NO: 565353 - protein, 11 aa, Homo sapiens
  CDR3 for alpha chain variable domain of TCR clone 282677 (TRAV12-1, TRAJ21)
CVVYNFNKFYF

SEQ ID NO: 565354 - protein, 14 aa, Homo sapiens
  CDR3 for beta chain variable domain of TCR clone 282677 (TRBV19, TRBJ2-7)
CASSMGQGAIKQYF

SEQ ID NO: 565355 - protein, 14 aa, Homo sapiens
  CDR3 for alpha chain variable domain of TCR clone 282678 (TRAV16, TRAJ44)
CSKRRTGTASKLTF

SEQ ID NO: 565356 - protein, 16 aa, Homo sapiens
  CDR3 for beta chain variable domain of TCR clone 282678 (TRBV19, TRBJ2-2)
CASRSPGTGATGELFF

SEQ ID NO: 565357 - protein, 12 aa, Homo sapiens
  CDR3 for alpha chain variable domain of TCR clone 282679 (TRAV13-1, TRAJ53)
AASGGSNYKLTF

SEQ ID NO: 565358 - protein, 15 aa, Homo sapiens
  CDR3 for beta chain variable domain of TCR clone 282679 (TRBV5-1, TRBJ2-1)
CASSPPRAPYKEQFF

SEQ ID NO: 565359 - protein, 15 aa, Homo sapiens
  CDR3 for alpha chain variable domain of TCR clone 282680 (TRAV1-2, TRAJ28)
CAVQYSGAWSYQLTF

SEQ ID NO: 565360 - protein, 13 aa, Homo sapiens
  CDR3 for beta chain variable domain of TCR clone 282680 (TRBV20-1, TRBJ2-7)
CSATLTSGYEQSF

SEQ ID NO: 565361 - protein, 15 aa, Homo sapiens
  CDR3 for alpha chain variable domain of TCR clone 282681 (TRAV21, TRAJ53)
CATLNSGGSNYKLTF

SEQ ID NO: 565362 - protein, 16 aa, Homo sapiens
  CDR3 for beta chain variable domain of TCR clone 282681 (TRBV24-1, TRBJ2-3)
CATSDTGTGATDTQYF

SEQ ID NO: 565363 - protein, 13 aa, Homo sapiens
  CDR3 for alpha chain variable domain of TCR clone 282682 (TRAV12-3, TRAJ40)
CAMSDSGTYKYIF

SEQ ID NO: 565364 - protein, 22 aa, Homo sapiens
  CDR3 for beta chain variable domain of TCR clone 282682 (TRBV14, TRBJ1-5)
CASSQDGVTPYLPPIGNQPQHY

SEQ ID NO: 565365 - protein, 16 aa, Homo sapiens
  CDR3 for alpha chain variable domain of TCR clone 282683 (TRAV3, TRAJ10)
CAVRDMNAGGGNKLTF

SEQ ID NO: 565366 - protein, 14 aa, Homo sapiens
  CDR3 for beta chain variable domain of TCR clone 282683 (TRBV28, TRBJ2-3)
CASSFVQGTDTQYF

SEQ ID NO: 565367 - protein, 14 aa, Homo sapiens
  CDR3 for alpha chain variable domain of TCR clone 282684 (TRAV35, TRAJ33)
CAGSSQDSNYQLIW

SEQ ID NO: 565368 - protein, 13 aa, Homo sapiens
  CDR3 for beta chain variable domain of TCR clone 282684 (TRBV6-5, TRBJ2-5)
CASSPQGGETQYF

SEQ ID NO: 565369 - protein, 11 aa, Homo sapiens
  CDR3 for alpha chain variable domain of TCR clone 282685 (TRAV2, TRAJ13)
CASVGYQKVTF

SEQ ID NO: 565370 - protein, 15 aa, Homo sapiens
  CDR3 for beta chain variable domain of TCR clone 282685 (TRBV6-1, TRBJ2-2)
CASSRLRGDTGELFF

SEQ ID NO: 565371 - protein, 14 aa, Homo sapiens
  CDR3 for alpha chain variable domain of TCR clone 282686 (TRAV8-3, TRAJ36)
CAVGPINGANNLFF

SEQ ID NO: 565372 - protein, 15 aa, Homo sapiens
  CDR3 for beta chain variable domain of TCR clone 282686 (TRBV4-1, TRBJ2-1)
CASSQDPGNYNEQFF

SEQ ID NO: 565373 - protein, 14 aa, Homo sapiens
  CDR3 for alpha chain variable domain of TCR clone 282687 (TRAV12-2, TRAJ13)
CAVKKTGGYQKATF

SEQ ID NO: 565374 - protein, 15 aa, Homo sapiens
  CDR3 for beta chain variable domain of TCR clone 282687 (TRBV19, TRBJ1-6)
CASSTQGAVGSPLHF

SEQ ID NO: 565375 - protein, 13 aa, Homo sapiens
  CDR3 for alpha chain variable domain of TCR clone 282688 (TRAV20, TRAJ20)
CAVRWVRDYKLSF

SEQ ID NO: 565376 - protein, 17 aa, Homo sapiens
  CDR3 for beta chain variable domain of TCR clone 282688 (TRBV6-5, TRBJ2-7)
CASSYSFWGQGSYEQYF

SEQ ID NO: 565377 - protein, 12 aa, Homo sapiens
  CDR3 for alpha chain variable domain of TCR clone 282689 (TRAV21, TRAJ31)
CAVWGNNATLMF

SEQ ID NO: 565378 - protein, 16 aa, Homo sapiens
  CDR3 for beta chain variable domain of TCR clone 282689 (TRBV27, TRBJ2-5)
CASSYGPGGQKETQYF

SEQ ID NO: 565379 - protein, 14 aa, Homo sapiens
  CDR3 for alpha chain variable domain of TCR clone 282690 (TRAV3, TRAJ16)
CAVSGFSDGQKLLF

SEQ ID NO: 565380 - protein, 11 aa, Homo sapiens
  CDR3 for beta chain variable domain of TCR clone 282690 (TRBV11-2, TRBJ2-2)
CASSLPGELFF

SEQ ID NO: 565381 - protein, 13 aa, Homo sapiens
  CDR3 for alpha chain variable domain of TCR clone 282691 (TRAV4, TRAJ34)
CLVGDYNTDKLIF

SEQ ID NO: 565382 - protein, 23 aa, Homo sapiens
  CDR3 for beta chain variable domain of TCR clone 282691 (TRBV4-2, TRBJ2-3)
CASSQDPPLASSISGGRGDTQYF

SEQ ID NO: 565383 - protein, 15 aa, Homo sapiens
  CDR3 for alpha chain variable domain of TCR clone 282692 (TRAV21, TRAJ24)
CAARSSTDSWGKLQF

SEQ ID NO: 565384 - protein, 12 aa, Homo sapiens
  CDR3 for beta chain variable domain of TCR clone 282692 (TRBV11-2, TRBJ2-7)
CASSPPADEQYF

SEQ ID NO: 565385 - protein, 14 aa, Homo sapiens
  CDR3 for alpha chain variable domain of TCR clone 282693 (TRAV30, TRAJ26)
CGSEIVSYGQNFVF

SEQ ID NO: 565386 - protein, 15 aa, Homo sapiens
  CDR3 for beta chain variable domain of TCR clone 282693 (TRBV11-2, TRBJ2-1)
CASSLGPDSYNEQFF

SEQ ID NO: 565387 - protein, 18 aa, Homo sapiens
  CDR3 for alpha chain variable domain of TCR clone 282694 (TRAV13-1, TRAJ52)
CAASKRSAGGTSFGKLTF

SEQ ID NO: 565388 - protein, 12 aa, Homo sapiens
  CDR3 for beta chain variable domain of TCR clone 282694 (TRBV28, TRBJ2-3)
CASSLYRDTQYF

SEQ ID NO: 565389 - protein, 11 aa, Homo sapiens
  CDR3 for alpha chain variable domain of TCR clone 282695 (TRAV12-3, TRAJ27)
CAMANAGKSTF

SEQ ID NO: 565390 - protein, 14 aa, Homo sapiens
  CDR3 for beta chain variable domain of TCR clone 282695 (TRBV4-1, TRBJ2-2)
CAGSQAVNTGDLFF

SEQ ID NO: 565391 - protein, 12 aa, Homo sapiens
  CDR3 for alpha chain variable domain of TCR clone 282696 (TRAV2, TRAJ10)
CASTGGGNKLPF

SEQ ID NO: 565392 - protein, 13 aa, Homo sapiens
  CDR3 for beta chain variable domain of TCR clone 282696 (TRBV19, TRBJ1-5)
CASSMRGYQPQHF

SEQ ID NO: 565393 - protein, 14 aa, Homo sapiens
  CDR3 for alpha chain variable domain of TCR clone 282697 (TRAV29/DV5, TRAJ44)
CAAFLVGTASKLTF

SEQ ID NO: 565394 - protein, 16 aa, Homo sapiens
  CDR3 for beta chain variable domain of TCR clone 282697 (TRBV19, TRBJ1-5)
FASSIQGGYSNQPQHF

SEQ ID NO: 565395 - protein, 16 aa, Homo sapiens
  CDR3 for alpha chain variable domain of TCR clone 282698 (TRAV14/DV4, TRAJ20)
CAMREGRSRDDYKLSF

SEQ ID NO: 565396 - protein, 14 aa, Homo sapiens
  CDR3 for beta chain variable domain of TCR clone 282698 (TRBV5-1, TRBJ2-7)
CASSLQGAVDEQYF

SEQ ID NO: 565397 - protein, 15 aa, Homo sapiens
  CDR3 for alpha chain variable domain of TCR clone 282699 (TRAV26-1, TRAJ22)
CIVRVSFWFCKATDL

SEQ ID NO: 565398 - protein, 14 aa, Homo sapiens
  CDR3 for beta chain variable domain of TCR clone 282699 (TRBV7-2, TRBJ1-3)
CASSLGTAGNTIYF

SEQ ID NO: 565399 - protein, 15 aa, Homo sapiens
  CDR3 for alpha chain variable domain of TCR clone 282700 (TRAV17, TRAJ56)
CATDANTGANSKLTF

SEQ ID NO: 565400 - protein, 14 aa, Homo sapiens
  CDR3 for beta chain variable domain of TCR clone 282700 (TRBV19, TRBJ1-5)
CVSSLGTGGQPQHF

SEQ ID NO: 565401 - protein, 12 aa, Homo sapiens
  CDR3 for alpha chain variable domain of TCR clone 282701 (TRAV21, TRAJ11)
CAATTGYSTLTF

SEQ ID NO: 565402 - protein, 14 aa, Homo sapiens
  CDR3 for beta chain variable domain of TCR clone 282701 (TRBV20-1, TRBJ2-7)
CSAPELAGVGEQYF

SEQ ID NO: 565403 - protein, 14 aa, Homo sapiens
  CDR3 for alpha chain variable domain of TCR clone 282702 (TRAV20, TRAJ32)
CRGRYGGATNKLIF

SEQ ID NO: 565404 - protein, 16 aa, Homo sapiens
  CDR3 for beta chain variable domain of TCR clone 282702 (TRBV19, TRBJ2-2)
CASRSPGTGATGELFF

SEQ ID NO: 565405 - protein, 14 aa, Homo sapiens
  CDR3 for alpha chain variable domain of TCR clone 282703 (TRAV8-3, TRAJ4)
CAVGASGGFNKLIF

SEQ ID NO: 565406 - protein, 16 aa, Homo sapiens
  CDR3 for beta chain variable domain of TCR clone 282703 (TRBV4-3, TRBJ2-2)
CASSHLQGSGTGELFF

SEQ ID NO: 565407 - protein, 15 aa, Homo sapiens
  CDR3 for alpha chain variable domain of TCR clone 282704 (TRAV27, TRAJ38)
CAARRNAGNNRKLLW

SEQ ID NO: 565408 - protein, 11 aa, Homo sapiens
  CDR3 for beta chain variable domain of TCR clone 282704 (TRBV12-4, TRBJ2-2)
CASSSAGELFF

SEQ ID NO: 565409 - protein, 15 aa, Homo sapiens
  CDR3 for alpha chain variable domain of TCR clone 282705 (TRAV38-1, TRAJ57)
CAFMDSQGGSEKLVF

SEQ ID NO: 565410 - protein, 16 aa, Homo sapiens
  CDR3 for beta chain variable domain of TCR clone 282705 (TRBV10-3, TRBJ2-1)
CAIRRGGRGDYNEQFF

SEQ ID NO: 565411 - protein, 14 aa, Homo sapiens
  CDR3 for alpha chain variable domain of TCR clone 282706 (TRAV1-2, TRAJ8)
CAVREDTGCQKLVF

SEQ ID NO: 565412 - protein, 15 aa, Homo sapiens
  CDR3 for beta chain variable domain of TCR clone 282706 (TRBV7-9, TRBJ1-6)
CASSSPGRGNSPLHF

SEQ ID NO: 565413 - protein, 19 aa, Homo sapiens
  CDR3 for alpha chain variable domain of TCR clone 282707 (TRAV1-2, TRAJ18)
CLLPLCCERRGSTLGRLYL

SEQ ID NO: 565414 - protein, 19 aa, Homo sapiens
  CDR3 for beta chain variable domain of TCR clone 282707 (TRBV6-3, TRBJ1-2)
CASSYSKGRTGPPNYGYTF

SEQ ID NO: 565415 - protein, 13 aa, Homo sapiens
  CDR3 for alpha chain variable domain of TCR clone 282708 (TRAV27, TRAJ45)
CRSSGGGADGLTF

SEQ ID NO: 565416 - protein, 19 aa, Homo sapiens
  CDR3 for beta chain variable domain of TCR clone 282708 (TRBV19, TRBJ2-2)
CASTRPGLAGGRVTGELFF

SEQ ID NO: 565417 - protein, 15 aa, Homo sapiens
  CDR3 for alpha chain variable domain of TCR clone 282709 (TRAV26-1, TRAJ56)
CIVRVDNGANTKLTF

SEQ ID NO: 565418 - protein, 14 aa, Homo sapiens
  CDR3 for beta chain variable domain of TCR clone 282709 (TRBV5-1, TRBJ2-7)
CASSRGESLYEQYF

SEQ ID NO: 565419 - protein, 12 aa, Homo sapiens
  CDR3 for alpha chain variable domain of TCR clone 282710 (TRAV23/DV6, TRAJ31)
RAARRIGARLMF

SEQ ID NO: 565420 - protein, 13 aa, Homo sapiens
  CDR3 for beta chain variable domain of TCR clone 282710 (TRBV28, TRBJ2-7)
CASKAGGVYEQYF

SEQ ID NO: 565421 - protein, 16 aa, Homo sapiens
  CDR3 for alpha chain variable domain of TCR clone 282711 (TRAV8-3, TRAJ10)
CAVGPGVTGGGNKLTF

SEQ ID NO: 565422 - protein, 22 aa, Homo sapiens
  CDR3 for beta chain variable domain of TCR clone 282711 (TRBV18, TRBJ2-2)
QKENIIDESGMPKERFSGELFF

SEQ ID NO: 565423 - protein, 13 aa, Homo sapiens
  CDR3 for alpha chain variable domain of TCR clone 282712 (TRAV2, TRAJ29)
CAAQNSGNTPLAF

SEQ ID NO: 565424 - protein, 14 aa, Homo sapiens
  CDR3 for beta chain variable domain of TCR clone 282712 (TRBV7-9, TRBJ2-4)
CASSLAMGGNIQFF

SEQ ID NO: 565425 - protein, 14 aa, Homo sapiens
  CDR3 for alpha chain variable domain of TCR clone 282713 (TRAV20, TRAJ29)
CAVQVWVGNTLLVF

SEQ ID NO: 565426 - protein, 15 aa, Homo sapiens
  CDR3 for beta chain variable domain of TCR clone 282713 (TRBV29-1, TRBJ2-7)
CSVEFFDRGSYEQYF

SEQ ID NO: 565427 - protein, 14 aa, Homo sapiens
  CDR3 for alpha chain variable domain of TCR clone 282714 (TRAV1-2, TRAJ16)
CAVNRFSDGQKLLF

SEQ ID NO: 565428 - protein, 15 aa, Homo sapiens
  CDR3 for beta chain variable domain of TCR clone 282714 (TRBV6-1, TRBJ2-7)
CASSEGVGNPYEQYF

SEQ ID NO: 565429 - protein, 22 aa, Homo sapiens
  CDR3 for alpha chain variable domain of TCR clone 282715 (TRAV36/DV7, TRAJ38)
CVANAGNNHIQNPDPAVYPLRD

SEQ ID NO: 565430 - protein, 14 aa, Homo sapiens
  CDR3 for beta chain variable domain of TCR clone 282715 (TRBV7-2, TRBJ2-7)
CASSLRWEVNEQYF

SEQ ID NO: 565431 - protein, 13 aa, Homo sapiens
  CDR3 for alpha chain variable domain of TCR clone 282716 (TRAV8-6, TRAJ50)
CAVIKTSYDKVIF

SEQ ID NO: 565432 - protein, 15 aa, Homo sapiens
  CDR3 for beta chain variable domain of TCR clone 282716 (TRBV28, TRBJ2-1)
CASSIIAGGRSEQFF

SEQ ID NO: 565433 - protein, 14 aa, Homo sapiens
  CDR3 for alpha chain variable domain of TCR clone 282717 (TRAV16, TRAJ4)
CALHFSGGYNKLIF

SEQ ID NO: 565434 - protein, 15 aa, Homo sapiens
  CDR3 for beta chain variable domain of TCR clone 282717 (TRBV7-2, TRBJ2-7)
CAISTRLAGVDEQYF

SEQ ID NO: 565435 - protein, 12 aa, Homo sapiens
  CDR3 for alpha chain variable domain of TCR clone 282718 (TRAV2, TRAJ31)
CAVEDNNARLMF

SEQ ID NO: 565436 - protein, 18 aa, Homo sapiens
  CDR3 for beta chain variable domain of TCR clone 282718 (TRBV12-4, TRBJ1-2)
CASSPNPGQAGPYYGYTF

SEQ ID NO: 565437 - protein, 16 aa, Homo sapiens
  CDR3 for alpha chain variable domain of TCR clone 282719 (TRAV3, TRAJ37)
CAVRGKGSGNTGKLIF

SEQ ID NO: 565438 - protein, 13 aa, Homo sapiens
  CDR3 for beta chain variable domain of TCR clone 282719 (TRBV19, TRBJ2-7)
CASSTTGNYEQYF

SEQ ID NO: 565439 - protein, 13 aa, Homo sapiens
  CDR3 for alpha chain variable domain of TCR clone 282720 (TRAV16, TRAJ31)
CSLSAHNNDRLMF

SEQ ID NO: 565440 - protein, 17 aa, Homo sapiens
  CDR3 for beta chain variable domain of TCR clone 282720 (TRBV12-4, TRBJ2-1)
CASSPGLAGGRINEQFF

SEQ ID NO: 565441 - protein, 13 aa, Homo sapiens
  CDR3 for alpha chain variable domain of TCR clone 282721 (TRAV9-2, TRAJ21)
CALSLYNFNKFYF

SEQ ID NO: 565442 - protein, 17 aa, Homo sapiens
  CDR3 for beta chain variable domain of TCR clone 282721 (TRBV11-2, TRBJ2-1)
CASSLYPPGVEYNEQFF

SEQ ID NO: 565443 - protein, 13 aa, Homo sapiens
  CDR3 for alpha chain variable domain of TCR clone 282722 (TRAV21, TRAJ15)
CAVANQAGTALIF

SEQ ID NO: 565444 - protein, 17 aa, Homo sapiens
  CDR3 for beta chain variable domain of TCR clone 282722 (TRBV13, TRBJ2-3)
CASSLSRVAGGRNTQYF

SEQ ID NO: 565445 - protein, 13 aa, Homo sapiens
  CDR3 for alpha chain variable domain of TCR clone 282723 (TRAV13-2, TRAJ13)
FAERPGGYQKVTF

SEQ ID NO: 565446 - protein, 16 aa, Homo sapiens
  CDR3 for beta chain variable domain of TCR clone 282723 (TRBV11-1, TRBJ1-1)
CASSPRGAHMNSEAFF

SEQ ID NO: 565447 - protein, 11 aa, Homo sapiens
  CDR3 for alpha chain variable domain of TCR clone 282724 (TRAV13-2, TRAJ45)
VTGGGADGLTF

SEQ ID NO: 565448 - protein, 15 aa, Homo sapiens
  CDR3 for beta chain variable domain of TCR clone 282724 (TRBV19, TRBJ1-1)
CANSIAGRGLIEAFF

SEQ ID NO: 565449 - protein, 14 aa, Homo sapiens
  CDR3 for alpha chain variable domain of TCR clone 282725 (TRAV3, TRAJ9)
CAVRLNTGGFKTIF

SEQ ID NO: 565450 - protein, 12 aa, Homo sapiens
  CDR3 for beta chain variable domain of TCR clone 282725 (TRBV7-2, TRBJ2-1)
CASSPQDIEQFF

SEQ ID NO: 565451 - protein, 11 aa, Homo sapiens
  CDR3 for alpha chain variable domain of TCR clone 282726 (TRAV3, TRAJ21)
CAVGNFNKFYF

SEQ ID NO: 565452 - protein, 14 aa, Homo sapiens
  CDR3 for beta chain variable domain of TCR clone 282726 (TRBV12-5, TRBJ2-5)
CASGSRTHQETQYF

SEQ ID NO: 565453 - protein, 13 aa, Homo sapiens
  CDR3 for alpha chain variable domain of TCR clone 282727 (TRAV26-2, TRAJ43)
CILRAVNNNDMRF

SEQ ID NO: 565454 - protein, 15 aa, Homo sapiens
  CDR3 for beta chain variable domain of TCR clone 282727 (TRBV29-1, TRBJ2-7)
CSVEFFDRGSYEQYF

SEQ ID NO: 565455 - protein, 14 aa, Homo sapiens
  CDR3 for alpha chain variable domain of TCR clone 282728 (TRAV12-2, TRAJ13)
CAVKKTGGYQKVTF

SEQ ID NO: 565456 - protein, 15 aa, Homo sapiens
  CDR3 for beta chain variable domain of TCR clone 282728 (TRBV7-9, TRBJ2-7)
CASSLRTSGSYEQYF

SEQ ID NO: 565457 - protein, 15 aa, Homo sapiens
  CDR3 for alpha chain variable domain of TCR clone 282729 (TRAV17, TRAJ57)
CATGPSQGGSEKLVF

SEQ ID NO: 565458 - protein, 18 aa, Homo sapiens
  CDR3 for beta chain variable domain of TCR clone 282729 (TRBV12-4, TRBJ1-5)
CASSRPVGGSNSPSILVR

SEQ ID NO: 565459 - protein, 14 aa, Homo sapiens
  CDR3 for alpha chain variable domain of TCR clone 282730 (TRAV20, TRAJ56)
CAVQFGGDNSKLTF

SEQ ID NO: 565460 - protein, 14 aa, Homo sapiens
  CDR3 for beta chain variable domain of TCR clone 282730 (TRBV7-2, TRBJ1-1)
CASSFLTGTTEAFF

SEQ ID NO: 565461 - protein, 15 aa, Homo sapiens
  CDR3 for alpha chain variable domain of TCR clone 282731 (TRAV3, TRAJ5)
CAVRDLDTGRRALTF

SEQ ID NO: 565462 - protein, 14 aa, Homo sapiens
  CDR3 for beta chain variable domain of TCR clone 282731 (TRBV5-5, TRBJ1-2)
CASSLDPYNYGYTF

SEQ ID NO: 565463 - protein, 12 aa, Homo sapiens
  CDR3 for alpha chain variable domain of TCR clone 282732 (TRAV25, TRAJ33)
CAGPDSNYQLIW

SEQ ID NO: 565464 - protein, 20 aa, Homo sapiens
  CDR3 for beta chain variable domain of TCR clone 282732 (TRBV4-1, TRBJ2-2)
CASSQASPPGLASNTGELLF

SEQ ID NO: 565465 - protein, 15 aa, Homo sapiens
  CDR3 for alpha chain variable domain of TCR clone 282733 (TRAV4, TRAJ15)
CLVGDIRRAGTALIF

SEQ ID NO: 565466 - protein, 14 aa, Homo sapiens
  CDR3 for beta chain variable domain of TCR clone 282733 (TRBV7-6, TRBJ2-3)
CASSLGTVTDTQYF

SEQ ID NO: 565467 - protein, 14 aa, Homo sapiens
  CDR3 for alpha chain variable domain of TCR clone 282734 (TRAV35, TRAJ13)
CAGSPSGGYQKVTF

SEQ ID NO: 565468 - protein, 13 aa, Homo sapiens
  CDR3 for beta chain variable domain of TCR clone 282734 (TRBV29-1, TRBJ1-1)
FSVGDSRNTEAFF

SEQ ID NO: 565469 - protein, 14 aa, Homo sapiens
  CDR3 for alpha chain variable domain of TCR clone 282735 (TRAV26-1, TRAJ5)
CIVRVRFNRRALTF

SEQ ID NO: 565470 - protein, 17 aa, Homo sapiens
  CDR3 for beta chain variable domain of TCR clone 282735 (TRBV29-1, TRBJ2-3)
CSVEVLAGETSIDTQYF

SEQ ID NO: 565471 - protein, 15 aa, Homo sapiens
  CDR3 for alpha chain variable domain of TCR clone 282736 (TRAV17, TRAJ52)
CATEAGGTSYGKLTF

SEQ ID NO: 565472 - protein, 16 aa, Homo sapiens
  CDR3 for beta chain variable domain of TCR clone 282736 (TRBV20-1, TRBJ2-1)
CSAGRPAGGPYNKQFF

SEQ ID NO: 565473 - protein, 13 aa, Homo sapiens
  CDR3 for alpha chain variable domain of TCR clone 282737 (TRAV26-1, TRAJ48)
CIVRVVGDEELTF

SEQ ID NO: 565474 - protein, 17 aa, Homo sapiens
  CDR3 for beta chain variable domain of TCR clone 282737 (TRBV7-3, TRBJ2-2)
CASSLSGTSGGTGELFF

SEQ ID NO: 565475 - protein, 13 aa, Homo sapiens
  CDR3 for alpha chain variable domain of TCR clone 282738 (TRAV4, TRAJ42)
CLVGAGSQGNLIF

SEQ ID NO: 565476 - protein, 16 aa, Homo sapiens
  CDR3 for beta chain variable domain of TCR clone 282738 (TRBV5-1, TRBJ2-3)
CASSLQGRVGADTQYF

SEQ ID NO: 565477 - protein, 10 aa, Homo sapiens
  CDR3 for alpha chain variable domain of TCR clone 282739 (TRAV38-1, TRAJ53)
CAFMKHGLEV

SEQ ID NO: 565478 - protein, 13 aa, Homo sapiens
  CDR3 for beta chain variable domain of TCR clone 282739 (TRBV19, TRBJ2-7)
CASSPRQSYEQYF

SEQ ID NO: 565479 - protein, 14 aa, Homo sapiens
  CDR3 for alpha chain variable domain of TCR clone 282740 (TRAV17, TRAJ57)
CATDPQGGSEKLVF

SEQ ID NO: 565480 - protein, 14 aa, Homo sapiens
  CDR3 for beta chain variable domain of TCR clone 282740 (TRBV7-8, TRBJ2-7)
CASSPRDRVYEQCF

SEQ ID NO: 565481 - protein, 14 aa, Homo sapiens
  CDR3 for alpha chain variable domain of TCR clone 282741 (TRAV35, TRAJ20)
CWAAGWSNDYKLSF

SEQ ID NO: 565482 - protein, 13 aa, Homo sapiens
  CDR3 for beta chain variable domain of TCR clone 282741 (TRBV19, TRBJ2-7)
CASSKTGTHEQYF

SEQ ID NO: 565483 - protein, 17 aa, Homo sapiens
  CDR3 for alpha chain variable domain of TCR clone 282742 (TRAV3, TRAJ6)
CAVRDGPRAGGSHIPTF

SEQ ID NO: 565484 - protein, 15 aa, Homo sapiens
  CDR3 for beta chain variable domain of TCR clone 282742 (TRBV20-1, TRBJ1-1)
CSASWDRFLNTEAFF

SEQ ID NO: 565485 - protein, 20 aa, Homo sapiens
  CDR3 for alpha chain variable domain of TCR clone 282743 (TRAV25, TRAJ33)
TATQTTDVGTSRGSNYQLIW

SEQ ID NO: 565486 - protein, 17 aa, Homo sapiens
  CDR3 for beta chain variable domain of TCR clone 282743 (TRBV13, TRBJ2-3)
CASSLSRVAGGRNTQYF

SEQ ID NO: 565487 - protein, 14 aa, Homo sapiens
  CDR3 for alpha chain variable domain of TCR clone 282744 (TRAV12-2, TRAJ40)
CAVKIPSGTYKYIF

SEQ ID NO: 565488 - protein, 18 aa, Homo sapiens
  CDR3 for beta chain variable domain of TCR clone 282744 (TRBV20-1, TRBJ2-6)
CSAETTPTHGSGANVLSF

SEQ ID NO: 565489 - protein, 13 aa, Homo sapiens
  CDR3 for alpha chain variable domain of TCR clone 282745 (TRAV12-2, TRAJ20)
CAVYPSNDYKLSF

SEQ ID NO: 565490 - protein, 16 aa, Homo sapiens
  CDR3 for beta chain variable domain of TCR clone 282745 (TRBV20-1, TRBJ1-4)
CSAPGQGLLTNEKLFF

SEQ ID NO: 565491 - protein, 15 aa, Homo sapiens
  CDR3 for alpha chain variable domain of TCR clone 282746 (TRAV21, TRAJ53)
CSALNSGGSNYKLTF

SEQ ID NO: 565492 - protein, 14 aa, Homo sapiens
  CDR3 for beta chain variable domain of TCR clone 282746 (TRBV7-2, TRBJ2-7)
CASRSQGAAYEQYF

SEQ ID NO: 565493 - protein, 14 aa, Homo sapiens
  CDR3 for alpha chain variable domain of TCR clone 282747 (TRAV13-1, TRAJ24)
CAARRTDSGGKLQF

SEQ ID NO: 565494 - protein, 15 aa, Homo sapiens
  CDR3 for beta chain variable domain of TCR clone 282747 (TRBV6-1, TRBJ2-1)
CASSAAVAGSVEQFF

SEQ ID NO: 565495 - protein, 15 aa, Homo sapiens
  CDR3 for alpha chain variable domain of TCR clone 282748 (TRAV26-1, TRAJ29)
CIVRVEGSGNTPIVF

SEQ ID NO: 565496 - protein, 14 aa, Homo sapiens
  CDR3 for beta chain variable domain of TCR clone 282748 (TRBV18, TRBJ2-5)
CASSPGVSKETQYF

SEQ ID NO: 565497 - protein, 14 aa, Homo sapiens
  CDR3 for alpha chain variable domain of TCR clone 282749 (TRAV12-2, TRAJ13)
CAVKKTGGYQKVTF

SEQ ID NO: 565498 - protein, 18 aa, Homo sapiens
  CDR3 for beta chain variable domain of TCR clone 282749 (TRBV24-1, TRBJ2-2)
CATSDSGQGTANTRELFF

SEQ ID NO: 565499 - protein, 13 aa, Homo sapiens
  CDR3 for alpha chain variable domain of TCR clone 282750 (TRAV12-3, TRAJ21)
CATGPHNFNKFYF

SEQ ID NO: 565500 - protein, 13 aa, Homo sapiens
  CDR3 for beta chain variable domain of TCR clone 282750 (TRBV4-2, TRBJ1-1)
CASSQAGNTEAFF

SEQ ID NO: 565501 - protein, 12 aa, Homo sapiens
  CDR3 for alpha chain variable domain of TCR clone 282751 (TRAV1-1, TRAJ43)
CAPRVSSNDMRF

SEQ ID NO: 565502 - protein, 14 aa, Homo sapiens
  CDR3 for beta chain variable domain of TCR clone 282751 (TRBV18, TRBJ2-7)
CASSPRGGAYEQYF

SEQ ID NO: 565503 - protein, 13 aa, Homo sapiens
  CDR3 for alpha chain variable domain of TCR clone 282752 (TRAV2, TRAJ29)
CAAGNSGNTPLVF

SEQ ID NO: 565504 - protein, 15 aa, Homo sapiens
  CDR3 for beta chain variable domain of TCR clone 282752 (TRBV10-2, TRBJ2-6)
CASSEQGTGANVLTF

SEQ ID NO: 565505 - protein, 11 aa, Homo sapiens
  CDR3 for alpha chain variable domain of TCR clone 282753 (TRAV12-1, TRAJ31)
CVGKVQCQTHV

SEQ ID NO: 565506 - protein, 17 aa, Homo sapiens
  CDR3 for beta chain variable domain of TCR clone 282753 (TRBV20-1, TRBJ2-1)
CSASSSGLAGSYNEQFF

SEQ ID NO: 565507 - protein, 15 aa, Homo sapiens
  CDR3 for alpha chain variable domain of TCR clone 282754 (TRAV21, TRAJ40)
CAVRPQTSGTYKYIF

SEQ ID NO: 565508 - protein, 18 aa, Homo sapiens
  CDR3 for beta chain variable domain of TCR clone 282754 (TRBV11-2, TRBJ2-3)
CASSLGGASRGAPNTQYF

SEQ ID NO: 565509 - protein, 13 aa, Homo sapiens
  CDR3 for alpha chain variable domain of TCR clone 282755 (TRAV26-2, TRAJ57)
CILSRGGSEQLVF

SEQ ID NO: 565510 - protein, 16 aa, Homo sapiens
  CDR3 for beta chain variable domain of TCR clone 282755 (TRBV18, TRBJ1-5)
CASSPRTGGGNQPQHF

SEQ ID NO: 565511 - protein, 13 aa, Homo sapiens
  CDR3 for alpha chain variable domain of TCR clone 282756 (TRAV17, TRAJ9)
CATDYTGGFKTIF

SEQ ID NO: 565512 - protein, 13 aa, Homo sapiens
  CDR3 for beta chain variable domain of TCR clone 282756 (TRBV7-9, TRBJ1-2)
CASSLKQNYGYAF

SEQ ID NO: 565513 - protein, 13 aa, Homo sapiens
  CDR3 for alpha chain variable domain of TCR clone 282757 (TRAV17, TRAJ7)
CATDNYGNNRLAF

SEQ ID NO: 565514 - protein, 13 aa, Homo sapiens
  CDR3 for beta chain variable domain of TCR clone 282757 (TRBV14, TRBJ2-7)
CASSQDRRYEQYF

SEQ ID NO: 565515 - protein, 13 aa, Homo sapiens
  CDR3 for alpha chain variable domain of TCR clone 282758 (TRAV38-1, TRAJ42)
CARWGGSQGNLIY

SEQ ID NO: 565516 - protein, 10 aa, Homo sapiens
  CDR3 for beta chain variable domain of TCR clone 282758 (TRBV2, TRBJ2-5)
CASSAATQYF

SEQ ID NO: 565517 - protein, 14 aa, Homo sapiens
  CDR3 for alpha chain variable domain of TCR clone 282759 (TRAV13-1, TRAJ9)
CAASRPSGGFKTIF

SEQ ID NO: 565518 - protein, 16 aa, Homo sapiens
  CDR3 for beta chain variable domain of TCR clone 282759 (TRBV2, TRBJ2-3)
CASSGGGLTSTDTQYF

SEQ ID NO: 565519 - protein, 14 aa, Homo sapiens
  CDR3 for alpha chain variable domain of TCR clone 282760 (TRAV26-1, TRAJ21)
CIVRVVYNFNKFYF

SEQ ID NO: 565520 - protein, 16 aa, Homo sapiens
  CDR3 for beta chain variable domain of TCR clone 282760 (TRBV13, TRBJ2-2)
CASSPMTGEHTGELFF

SEQ ID NO: 565521 - protein, 14 aa, Homo sapiens
  CDR3 for alpha chain variable domain of TCR clone 282761 (TRAV12-3, TRAJ4)
CAMSATGGYNKLIF

SEQ ID NO: 565522 - protein, 14 aa, Homo sapiens
  CDR3 for beta chain variable domain of TCR clone 282761 (TRBV19, TRBJ2-7)
CASTVQGRPYEQYF

SEQ ID NO: 565523 - protein, 14 aa, Homo sapiens
  CDR3 for alpha chain variable domain of TCR clone 282762 (TRAV3, TRAJ21)
CAVESQANFNKFYF

SEQ ID NO: 565524 - protein, 18 aa, Homo sapiens
  CDR3 for beta chain variable domain of TCR clone 282762 (TRBV7-9, TRBJ2-1)
CASSLADSGTSGRNEQFF

SEQ ID NO: 565525 - protein, 14 aa, Homo sapiens
  CDR3 for alpha chain variable domain of TCR clone 282763 (TRAV1-2, TRAJ8)
CAVREDTGFQKLVF

SEQ ID NO: 565526 - protein, 15 aa, Homo sapiens
  CDR3 for beta chain variable domain of TCR clone 282763 (TRBV27, TRBJ1-6)
CASSFGRGLGSPLHF

SEQ ID NO: 565527 - protein, 14 aa, Homo sapiens
  CDR3 for alpha chain variable domain of TCR clone 282764 (TRAV8-4, TRAJ5)
CAVSTDTGRRALTF

SEQ ID NO: 565528 - protein, 16 aa, Homo sapiens
  CDR3 for beta chain variable domain of TCR clone 282764 (TRBV7-6, TRBJ2-3)
CASSARTSRGTDTQYF

SEQ ID NO: 565529 - protein, 13 aa, Homo sapiens
  CDR3 for alpha chain variable domain of TCR clone 282765 (TRAV12-2, TRAJ20)
CAVYPSNDYKLSF

SEQ ID NO: 565530 - protein, 16 aa, Homo sapiens
  CDR3 for beta chain variable domain of TCR clone 282765 (TRBV29-1, TRBJ2-6)
CSVEDITYSGANVLTF

SEQ ID NO: 565531 - protein, 12 aa, Homo sapiens
  CDR3 for alpha chain variable domain of TCR clone 282766 (TRAV13-1, TRAJ53)
VASGGSNYKLTF

SEQ ID NO: 565532 - protein, 15 aa, Homo sapiens
  CDR3 for beta chain variable domain of TCR clone 282766 (TRBV5-1, TRBJ2-1)
CASSPPRAPYNEQSF

SEQ ID NO: 565533 - protein, 22 aa, Homo sapiens
  CDR3 for alpha chain variable domain of TCR clone 282767 (TRAV27, TRAJ38)
CAARRNAGNNHIQNPDPAVYQL

SEQ ID NO: 565534 - protein, 16 aa, Homo sapiens
  CDR3 for beta chain variable domain of TCR clone 282767 (TRBV7-2, TRBJ2-1)
CASSPRLAGSNNEQFF

SEQ ID NO: 565535 - protein, 14 aa, Homo sapiens
  CDR3 for alpha chain variable domain of TCR clone 282768 (TRAV23/DV6, TRAJ5)
CAAKRPAGRRALTF

SEQ ID NO: 565536 - protein, 20 aa, Homo sapiens
  CDR3 for beta chain variable domain of TCR clone 282768 (TRBV7-8, TRBJ2-2)
CASSHLFPGPTIHITGELFF

SEQ ID NO: 565537 - protein, 22 aa, Homo sapiens
  CDR3 for alpha chain variable domain of TCR clone 282769 (TRAV38-1, TRAJ35)
CAFLTIGFGNVLHCGSVTQVIF

SEQ ID NO: 565538 - protein, 17 aa, Homo sapiens
  CDR3 for beta chain variable domain of TCR clone 282769 (TRBV28, TRBJ1-1)
CASSGDLRTESNTEAFF

SEQ ID NO: 565539 - protein, 12 aa, Homo sapiens
  CDR3 for alpha chain variable domain of TCR clone 282770 (TRAV40, TRAJ42)
LNYGGSQGNLIF

SEQ ID NO: 565540 - protein, 15 aa, Homo sapiens
  CDR3 for beta chain variable domain of TCR clone 282770 (TRBV11-3, TRBJ2-7)
CASSPGPASSYEQYF

SEQ ID NO: 565541 - protein, 15 aa, Homo sapiens
  CDR3 for alpha chain variable domain of TCR clone 282771 (TRAV26-1, TRAJ39)
CIVRVARNAGNMLTF

SEQ ID NO: 565542 - protein, 14 aa, Homo sapiens
  CDR3 for beta chain variable domain of TCR clone 282771 (TRBV12-4, TRBJ2-3)
CASSLVPSTDTQYF

SEQ ID NO: 565543 - protein, 17 aa, Homo sapiens
  CDR3 for alpha chain variable domain of TCR clone 282772 (TRAV3, TRAJ6)
CAVRDGLRAGGRYIPTF

SEQ ID NO: 565544 - protein, 14 aa, Homo sapiens
  CDR3 for beta chain variable domain of TCR clone 282772 (TRBV7-2, TRBJ2-7)
CASSPKTSFYEQYF

SEQ ID NO: 565545 - protein, 16 aa, Homo sapiens
  CDR3 for alpha chain variable domain of TCR clone 282773 (TRAV30, TRAJ24)
CGTEIVDADSWGNSSL

SEQ ID NO: 565546 - protein, 12 aa, Homo sapiens
  CDR3 for beta chain variable domain of TCR clone 282773 (TRBV27, TRBJ2-1)
CASRGFYNEQFF

SEQ ID NO: 565547 - protein, 16 aa, Homo sapiens
  CDR3 for alpha chain variable domain of TCR clone 282774 (TRAV8-1, TRAJ42)
CAVTSRYGGSQGNLLF

SEQ ID NO: 565548 - protein, 12 aa, Homo sapiens
  CDR3 for beta chain variable domain of TCR clone 282774 (TRBV6-3, TRBJ2-7)
CANSLGRRGLYF

SEQ ID NO: 565549 - protein, 11 aa, Homo sapiens
  CDR3 for alpha chain variable domain of TCR clone 282775 (TRAV3, TRAJ21)
CAVGNFEKFYF

SEQ ID NO: 565550 - protein, 16 aa, Homo sapiens
  CDR3 for beta chain variable domain of TCR clone 282775 (TRBV19, TRBJ2-1)
CAGSKAGPSSYNEQFF

SEQ ID NO: 565551 - protein, 17 aa, Homo sapiens
  CDR3 for alpha chain variable domain of TCR clone 282776 (TRAV3, TRAJ6)
CAVRDGPRAGGSYIPTF

SEQ ID NO: 565552 - protein, 15 aa, Homo sapiens
  CDR3 for beta chain variable domain of TCR clone 282776 (TRBV7-2, TRBJ2-1)
CASSFRESSYNEQFF

SEQ ID NO: 565553 - protein, 15 aa, Homo sapiens
  CDR3 for alpha chain variable domain of TCR clone 282777 (TRAV13-1, TRAJ36)
CAASIRQTGANNLFF

SEQ ID NO: 565554 - protein, 17 aa, Homo sapiens
  CDR3 for beta chain variable domain of TCR clone 282777 (TRBV7-3, TRBJ2-5)
CASSWGSGRSGSETQYF

SEQ ID NO: 565555 - protein, 15 aa, Homo sapiens
  CDR3 for alpha chain variable domain of TCR clone 282778 (TRAV3, TRAJ5)
CAGRDLDTGRRALTF

SEQ ID NO: 565556 - protein, 15 aa, Homo sapiens
  CDR3 for beta chain variable domain of TCR clone 282778 (TRBV20-1, TRBJ2-1)
CSARSPGGPGNEQFF

SEQ ID NO: 565557 - protein, 17 aa, Homo sapiens
  CDR3 for alpha chain variable domain of TCR clone 282779 (TRAV1-2, TRAJ8)
CAVGDPDENTGFQKLVF

SEQ ID NO: 565558 - protein, 16 aa, Homo sapiens
  CDR3 for beta chain variable domain of TCR clone 282779 (TRBV7-9, TRBJ2-2)
CASSGFGGANTGELFF

SEQ ID NO: 565559 - protein, 16 aa, Homo sapiens
  CDR3 for alpha chain variable domain of TCR clone 282780 (TRAV30, TRAJ24)
CGTEIVDADSWGKLQF

SEQ ID NO: 565560 - protein, 13 aa, Homo sapiens
  CDR3 for beta chain variable domain of TCR clone 282780 (TRBV11-2, TRBJ2-5)
CASSATGEETQYF

SEQ ID NO: 565561 - protein, 14 aa, Homo sapiens
  CDR3 for alpha chain variable domain of TCR clone 282781 (TRAV12-2, TRAJ13)
CAVKKTGGYQKVTF

SEQ ID NO: 565562 - protein, 14 aa, Homo sapiens
  CDR3 for beta chain variable domain of TCR clone 282781 (TRBV12-4, TRBJ1-5)
CASSLLSVNQPQHF

SEQ ID NO: 565563 - protein, 15 aa, Homo sapiens
  CDR3 for alpha chain variable domain of TCR clone 282782 (TRAV26-1, TRAJ56)
CIVRVATGANSKLTF

SEQ ID NO: 565564 - protein, 13 aa, Homo sapiens
  CDR3 for beta chain variable domain of TCR clone 282782 (TRBV20-1, TRBJ2-1)
CSASTGTSNEQFF

SEQ ID NO: 565565 - protein, 13 aa, Homo sapiens
  CDR3 for alpha chain variable domain of TCR clone 282783 (TRAV8-3, TRAJ36)
CAVGATGAINFFF

SEQ ID NO: 565566 - protein, 15 aa, Homo sapiens
  CDR3 for beta chain variable domain of TCR clone 282783 (TRBV7-2, TRBJ1-2)
CASSPRAGWNYGYTF

SEQ ID NO: 565567 - protein, 20 aa, Homo sapiens
  CDR3 for alpha chain variable domain of TCR clone 282784 (TRAV25, TRAJ21)
TATQTTDVGTYPLSLNKFYF

SEQ ID NO: 565568 - protein, 14 aa, Homo sapiens
  CDR3 for beta chain variable domain of TCR clone 282784 (TRBV6-1, TRBJ2-1)
CASAKDGFYNEQFF

SEQ ID NO: 565569 - protein, 11 aa, Homo sapiens
  CDR3 for alpha chain variable domain of TCR clone 282785 (TRAV25, TRAJ5)
CRGGGRRGLTF

SEQ ID NO: 565570 - protein, 15 aa, Homo sapiens
  CDR3 for beta chain variable domain of TCR clone 282785 (TRBV19, TRBJ2-4)
CASRGPRRGENIQYF

SEQ ID NO: 565571 - protein, 13 aa, Homo sapiens
  CDR3 for alpha chain variable domain of TCR clone 282786 (TRAV35, TRAJ50)
CAGHRKTYDKVIF

SEQ ID NO: 565572 - protein, 13 aa, Homo sapiens
  CDR3 for beta chain variable domain of TCR clone 282786 (TRBV7-7, TRBJ2-3)
CASSLSRADTQYF

SEQ ID NO: 565573 - protein, 15 aa, Homo sapiens
  CDR3 for alpha chain variable domain of TCR clone 282787 (TRAV13-2, TRAJ8)
CAPGGRNTGFQKLVF

SEQ ID NO: 565574 - protein, 14 aa, Homo sapiens
  CDR3 for beta chain variable domain of TCR clone 282787 (TRBV7-9, TRBJ2-7)
CASSIGQGAGEQYF

SEQ ID NO: 565575 - protein, 12 aa, Homo sapiens
  CDR3 for alpha chain variable domain of TCR clone 282788 (TRAV2, TRAJ33)
CAVEDSNYQLIW

SEQ ID NO: 565576 - protein, 13 aa, Homo sapiens
  CDR3 for beta chain variable domain of TCR clone 282788 (TRBV19, TRBJ2-7)
CASSPRQSYEQYF

SEQ ID NO: 565577 - protein, 13 aa, Homo sapiens
  CDR3 for alpha chain variable domain of TCR clone 282789 (TRAV8-3, TRAJ6)
CAVEKGGSYIPTF

SEQ ID NO: 565578 - protein, 14 aa, Homo sapiens
  CDR3 for beta chain variable domain of TCR clone 282789 (TRBV4-2, TRBJ2-1)
CASGLDRAYNEQFF

SEQ ID NO: 565579 - protein, 18 aa, Homo sapiens
  CDR3 for alpha chain variable domain of TCR clone 282790 (TRAV26-1, TRAJ27)
CIVRPSFNYNTNAGKSTF

SEQ ID NO: 565580 - protein, 14 aa, Homo sapiens
  CDR3 for beta chain variable domain of TCR clone 282790 (TRBV10-3, TRBJ1-6)
CAISVDGDESHLHF

SEQ ID NO: 565581 - protein, 14 aa, Homo sapiens
  CDR3 for alpha chain variable domain of TCR clone 282791 (TRAV17, TRAJ35)
CATDRPGFGNVLHC

SEQ ID NO: 565582 - protein, 13 aa, Homo sapiens
  CDR3 for beta chain variable domain of TCR clone 282791 (TRBV4-2, TRBJ1-1)
CASSQAGNTEAFF

SEQ ID NO: 565583 - protein, 23 aa, Homo sapiens
  CDR3 for alpha chain variable domain of TCR clone 282792 (TRAV8-3, )
CAVVTTRIPDIQNPDPAVYQLRD

SEQ ID NO: 565584 - protein, 13 aa, Homo sapiens
  CDR3 for beta chain variable domain of TCR clone 282792 (TRBV7-9, TRBJ1-2)
CASSLKQNYGYTF

SEQ ID NO: 565585 - protein, 15 aa, Homo sapiens
  CDR3 for alpha chain variable domain of TCR clone 282793 (TRAV5, TRAJ33)
CAEAPAMDSNYQLIW

SEQ ID NO: 565586 - protein, 15 aa, Homo sapiens
  CDR3 for beta chain variable domain of TCR clone 282793 (TRBV19, TRBJ1-5)
CASSIVWADNQPQHF

SEQ ID NO: 565587 - protein, 14 aa, Homo sapiens
  CDR3 for alpha chain variable domain of TCR clone 282794 (TRAV39, TRAJ42)
CAVDIARSPGNLIF

SEQ ID NO: 565588 - protein, 12 aa, Homo sapiens
  CDR3 for beta chain variable domain of TCR clone 282794 (TRBV7-9, TRBJ1-5)
CASSPQGQPQHF

SEQ ID NO: 565589 - protein, 14 aa, Homo sapiens
  CDR3 for alpha chain variable domain of TCR clone 282795 (TRAV2, TRAJ39)
CAVEGDNAGNVLTF

SEQ ID NO: 565590 - protein, 14 aa, Homo sapiens
  CDR3 for beta chain variable domain of TCR clone 282795 (TRBV28, TRBJ2-4)
CGSSPRARGNIQYF

SEQ ID NO: 565591 - protein, 14 aa, Homo sapiens
  CDR3 for alpha chain variable domain of TCR clone 282796 (TRAV20, TRAJ42)
CAVQAGGSQGNLIF

SEQ ID NO: 565592 - protein, 13 aa, Homo sapiens
  CDR3 for beta chain variable domain of TCR clone 282796 (TRBV28, TRBJ1-2)
CASSVKQNYGYTF

SEQ ID NO: 565593 - protein, 12 aa, Homo sapiens
  CDR3 for alpha chain variable domain of TCR clone 282797 (TRAV13-2, TRAJ23)
FAERHRGGKLIF

SEQ ID NO: 565594 - protein, 12 aa, Homo sapiens
  CDR3 for beta chain variable domain of TCR clone 282797 (TRBV29-1, TRBJ2-3)
CSVTGGADTQYF

SEQ ID NO: 565595 - protein, 15 aa, Homo sapiens
  CDR3 for alpha chain variable domain of TCR clone 282798 (TRAV12-1, TRAJ5)
CVVNMLETGRRALTF

SEQ ID NO: 565596 - protein, 16 aa, Homo sapiens
  CDR3 for beta chain variable domain of TCR clone 282798 (TRBV6-1, TRBJ1-2)
CASSGAWQGRSHGYTF

SEQ ID NO: 565597 - protein, 13 aa, Homo sapiens
  CDR3 for alpha chain variable domain of TCR clone 282799 (TRAV13-1, TRAJ17)
CAADGASGNKLTF

SEQ ID NO: 565598 - protein, 14 aa, Homo sapiens
  CDR3 for beta chain variable domain of TCR clone 282799 (TRBV11-2, TRBJ1-3)
CASSLTQGRNTIYF

SEQ ID NO: 565599 - protein, 15 aa, Homo sapiens
  CDR3 for alpha chain variable domain of TCR clone 282800 (TRAV8-2, TRAJ15)
CVVTMGNQAGTALIF

SEQ ID NO: 565600 - protein, 13 aa, Homo sapiens
  CDR3 for beta chain variable domain of TCR clone 282800 (TRBV7-9, TRBJ1-2)
CASSLKQNYGYTF

SEQ ID NO: 565601 - protein, 17 aa, Homo sapiens
  CDR3 for alpha chain variable domain of TCR clone 282801 (TRAV3, TRAJ6)
CAVRDGPRAGGRYIPTF

SEQ ID NO: 565602 - protein, 13 aa, Homo sapiens
  CDR3 for beta chain variable domain of TCR clone 282801 (TRBV27, TRBJ1-1)
CASSLSIGAEAFF

SEQ ID NO: 565603 - protein, 11 aa, Homo sapiens
  CDR3 for alpha chain variable domain of TCR clone 282802 (TRAV1-2, TRAJ40)
CAVPGTYKYIF

SEQ ID NO: 565604 - protein, 16 aa, Homo sapiens
  CDR3 for beta chain variable domain of TCR clone 282802 (TRBV29-1, TRBJ2-7)
CGVEVVGTSGNYEQYF

SEQ ID NO: 565605 - protein, 17 aa, Homo sapiens
  CDR3 for alpha chain variable domain of TCR clone 282803 (TRAV3, TRAJ42)
CAVRDRAYGGSQGNLLF

SEQ ID NO: 565606 - protein, 15 aa, Homo sapiens
  CDR3 for beta chain variable domain of TCR clone 282803 (TRBV2, TRBJ2-1)
CASSEEREGDNEQFF

SEQ ID NO: 565607 - protein, 12 aa, Homo sapiens
  CDR3 for alpha chain variable domain of TCR clone 282804 (TRAV34, TRAJ27)
CGADTNAGKSTF

SEQ ID NO: 565608 - protein, 13 aa, Homo sapiens
  CDR3 for beta chain variable domain of TCR clone 282804 (TRBV24-1, TRBJ2-2)
CATSDWSTGELFF

SEQ ID NO: 565609 - protein, 19 aa, Homo sapiens
  CDR3 for alpha chain variable domain of TCR clone 282805 (TRAV2, TRAJ20)
ILQVREADAAVYRDCKLSF

SEQ ID NO: 565610 - protein, 12 aa, Homo sapiens
  CDR3 for beta chain variable domain of TCR clone 282805 (TRBV11-2, TRBJ2-1)
CASSPGNSEQFF

SEQ ID NO: 565611 - protein, 14 aa, Homo sapiens
  CDR3 for alpha chain variable domain of TCR clone 282806 (TRAV2, TRAJ9)
CAVVLNTGGFKTIF

SEQ ID NO: 565612 - protein, 15 aa, Homo sapiens
  CDR3 for beta chain variable domain of TCR clone 282806 (TRBV20-1, TRBJ2-7)
CSARDRVSGMDEQYF

SEQ ID NO: 565613 - protein, 16 aa, Homo sapiens
  CDR3 for alpha chain variable domain of TCR clone 282807 (TRAV30, TRAJ24)
CGTVIVDSDSLGKFQF

SEQ ID NO: 565614 - protein, 14 aa, Homo sapiens
  CDR3 for beta chain variable domain of TCR clone 282807 (TRBV12-5, TRBJ2-5)
CASGSRTHQETQYF

SEQ ID NO: 565615 - protein, 15 aa, Homo sapiens
  CDR3 for alpha chain variable domain of TCR clone 282808 (TRAV27, TRAJ38)
RAARRNAGNNRKLIW

SEQ ID NO: 565616 - protein, 13 aa, Homo sapiens
  CDR3 for beta chain variable domain of TCR clone 282808 (TRBV20-1, TRBJ1-1)
CSARAGGNTEAFF

SEQ ID NO: 565617 - protein, 14 aa, Homo sapiens
  CDR3 for alpha chain variable domain of TCR clone 282809 (TRAV12-2, TRAJ53)
CAVKGGGRDYKLTF

SEQ ID NO: 565618 - protein, 14 aa, Homo sapiens
  CDR3 for beta chain variable domain of TCR clone 282809 (TRBV7-7, TRBJ2-2)
CATRQDSDTGELFF

SEQ ID NO: 565619 - protein, 14 aa, Homo sapiens
  CDR3 for alpha chain variable domain of TCR clone 282810 (TRAV1-2, TRAJ8)
CAVREDTGFQKLVF

SEQ ID NO: 565620 - protein, 16 aa, Homo sapiens
  CDR3 for beta chain variable domain of TCR clone 282810 (TRBV27, TRBJ2-2)
CASSVRGLVRTGELFF

SEQ ID NO: 565621 - protein, 14 aa, Homo sapiens
  CDR3 for alpha chain variable domain of TCR clone 282811 (TRAV4, TRAJ6)
CLVGEAGGSNIPTF

SEQ ID NO: 565622 - protein, 16 aa, Homo sapiens
  CDR3 for beta chain variable domain of TCR clone 282811 (TRBV7-6, TRBJ2-1)
CASSLNEGPSYNEQFF

SEQ ID NO: 565623 - protein, 11 aa, Homo sapiens
  CDR3 for alpha chain variable domain of TCR clone 282812 (TRAV13-1, TRAJ39)
CASHAGNMLTF

SEQ ID NO: 565624 - protein, 14 aa, Homo sapiens
  CDR3 for beta chain variable domain of TCR clone 282812 (TRBV6-6, TRBJ1-6)
CASSFEGTTSPLHF

SEQ ID NO: 565625 - protein, 11 aa, Homo sapiens
  CDR3 for alpha chain variable domain of TCR clone 282813 (TRAV17, TRAJ31)
CATFNNARLMF

SEQ ID NO: 565626 - protein, 14 aa, Homo sapiens
  CDR3 for beta chain variable domain of TCR clone 282813 (TRBV18, TRBJ2-7)
CASSPRGGAYEQYF

SEQ ID NO: 565627 - protein, 14 aa, Homo sapiens
  CDR3 for alpha chain variable domain of TCR clone 282814 (TRAV12-1, TRAJ23)
CVVMIYNQGGKLIF

SEQ ID NO: 565628 - protein, 17 aa, Homo sapiens
  CDR3 for beta chain variable domain of TCR clone 282814 (TRBV4-1, TRBJ2-7)
CASSRDPLGVRGGEQYF

SEQ ID NO: 565629 - protein, 16 aa, Homo sapiens
  CDR3 for alpha chain variable domain of TCR clone 282815 (TRAV30, TRAJ24)
CGTEIVDADSWGKFQF

SEQ ID NO: 565630 - protein, 15 aa, Homo sapiens
  CDR3 for beta chain variable domain of TCR clone 282815 (TRBV5-7, TRBJ2-7)
CASSLPGQVFYEQYF

SEQ ID NO: 565631 - protein, 13 aa, Homo sapiens
  CDR3 for alpha chain variable domain of TCR clone 282816 (TRAV8-6, TRAJ49)
CAVITNTGNQFYF

SEQ ID NO: 565632 - protein, 13 aa, Homo sapiens
  CDR3 for beta chain variable domain of TCR clone 282816 (TRBV7-2, TRBJ2-7)
CASSSPSGSEQYF

SEQ ID NO: 565633 - protein, 14 aa, Homo sapiens
  CDR3 for alpha chain variable domain of TCR clone 282817 (TRAV21, TRAJ32)
CAVWDGGATNKLIF

SEQ ID NO: 565634 - protein, 14 aa, Homo sapiens
  CDR3 for beta chain variable domain of TCR clone 282817 (TRBV12-4, TRBJ1-1)
CASSLGTGGTEAFF

SEQ ID NO: 565635 - protein, 11 aa, Homo sapiens
  CDR3 for alpha chain variable domain of TCR clone 282818 (TRAV1-2, TRAJ20)
CAVANDYKLSF

SEQ ID NO: 565636 - protein, 15 aa, Homo sapiens
  CDR3 for beta chain variable domain of TCR clone 282818 (TRBV19, TRBJ2-7)
CASSPAGSGEALRYF

SEQ ID NO: 565637 - protein, 14 aa, Homo sapiens
  CDR3 for alpha chain variable domain of TCR clone 282819 (TRAV13-1, TRAJ23)
CAASRLGRGGKRSF

SEQ ID NO: 565638 - protein, 15 aa, Homo sapiens
  CDR3 for beta chain variable domain of TCR clone 282819 (TRBV7-2, TRBJ2-1)
CASSLVAGRYNEQFF

SEQ ID NO: 565639 - protein, 12 aa, Homo sapiens
  CDR3 for alpha chain variable domain of TCR clone 282820 (TRAV17, TRAJ20)
CATYSNDYMLSF

SEQ ID NO: 565640 - protein, 11 aa, Homo sapiens
  CDR3 for beta chain variable domain of TCR clone 282820 (TRBV4-1, TRBJ2-2)
CASERTGELFF

SEQ ID NO: 565641 - protein, 18 aa, Homo sapiens
  CDR3 for alpha chain variable domain of TCR clone 282821 (TRAV12-3, TRAJ52)
CAMSVGGAGGTSYGKLTF

SEQ ID NO: 565642 - protein, 14 aa, Homo sapiens
  CDR3 for beta chain variable domain of TCR clone 282821 (TRBV11-2, TRBJ2-5)
CASSRTGGIETQYF

SEQ ID NO: 565643 - protein, 13 aa, Homo sapiens
  CDR3 for alpha chain variable domain of TCR clone 282822 (TRAV2, TRAJ24)
CAVTTDSWGKLQF

SEQ ID NO: 565644 - protein, 13 aa, Homo sapiens
  CDR3 for beta chain variable domain of TCR clone 282822 (TRBV13, TRBJ2-5)
CQQLRPGARDLYF

SEQ ID NO: 565645 - protein, 14 aa, Homo sapiens
  CDR3 for alpha chain variable domain of TCR clone 282823 (TRAV1-2, TRAJ29)
CAVRELTSATPLVF

SEQ ID NO: 565646 - protein, 14 aa, Homo sapiens
  CDR3 for beta chain variable domain of TCR clone 282823 (TRBV3-1, TRBJ2-5)
CASSQGPDQETQYS

SEQ ID NO: 565647 - protein, 13 aa, Homo sapiens
  CDR3 for alpha chain variable domain of TCR clone 282824 (TRAV12-2, TRAJ48)
CAAPNFGNEKLTF

SEQ ID NO: 565648 - protein, 14 aa, Homo sapiens
  CDR3 for beta chain variable domain of TCR clone 282824 (TRBV7-3, TRBJ2-3)
CASSPSARTDTQYF

SEQ ID NO: 565649 - protein, 16 aa, Homo sapiens
  CDR3 for alpha chain variable domain of TCR clone 282825 (TRAV14/DV4, TRAJ54)
CAMREGRIQGAQKLVF

SEQ ID NO: 565650 - protein, 17 aa, Homo sapiens
  CDR3 for beta chain variable domain of TCR clone 282825 (TRBV18, TRBJ1-3)
CQLTARGRGSSGNTIYF

SEQ ID NO: 565651 - protein, 11 aa, Homo sapiens
  CDR3 for alpha chain variable domain of TCR clone 282826 (TRAV21, TRAJ34)
CAHYNTDKLIF

SEQ ID NO: 565652 - protein, 15 aa, Homo sapiens
  CDR3 for beta chain variable domain of TCR clone 282826 (TRBV7-3, TRBJ2-1)
CASSLDGNSYNEQFF

SEQ ID NO: 565653 - protein, 12 aa, Homo sapiens
  CDR3 for alpha chain variable domain of TCR clone 282827 (TRAV30, TRAJ39)
CGRGNAGNILTF

SEQ ID NO: 565654 - protein, 12 aa, Homo sapiens
  CDR3 for beta chain variable domain of TCR clone 282827 (TRBV10-3, TRBJ1-1)
CATMDRPPEAFF

SEQ ID NO: 565655 - protein, 14 aa, Homo sapiens
  CDR3 for alpha chain variable domain of TCR clone 282828 (TRAV4, TRAJ9)
CLVGSGTGGFKTIF

SEQ ID NO: 565656 - protein, 13 aa, Homo sapiens
  CDR3 for beta chain variable domain of TCR clone 282828 (TRBV11-2, TRBJ2-7)
CASSSYPSYEQYF

SEQ ID NO: 565657 - protein, 13 aa, Homo sapiens
  CDR3 for alpha chain variable domain of TCR clone 282829 (TRAV8-3, TRAJ28)
CAVGAVGSYQLTF

SEQ ID NO: 565658 - protein, 15 aa, Homo sapiens
  CDR3 for beta chain variable domain of TCR clone 282829 (TRBV7-9, TRBJ1-5)
CASSQVHQPNQPQHF

SEQ ID NO: 565659 - protein, 15 aa, Homo sapiens
  CDR3 for alpha chain variable domain of TCR clone 282830 (TRAV26-1, TRAJ17)
CISQSCRQQAHFWRR

SEQ ID NO: 565660 - protein, 16 aa, Homo sapiens
  CDR3 for beta chain variable domain of TCR clone 282830 (TRBV28, TRBJ1-4)
CASSSRTGAANEKLFF

SEQ ID NO: 565661 - protein, 14 aa, Homo sapiens
  CDR3 for alpha chain variable domain of TCR clone 282831 (TRAV12-1, TRAJ42)
CVVIYGGSQGNLIF

SEQ ID NO: 565662 - protein, 13 aa, Homo sapiens
  CDR3 for beta chain variable domain of TCR clone 282831 (TRBV18, TRBJ2-5)
CASSPPGKETQYS

SEQ ID NO: 565663 - protein, 14 aa, Homo sapiens
  CDR3 for alpha chain variable domain of TCR clone 282832 (TRAV26-1, TRAJ49)
CIVRLTNPVNQFYF

SEQ ID NO: 565664 - protein, 13 aa, Homo sapiens
  CDR3 for beta chain variable domain of TCR clone 282832 (TRBV4-1, TRBJ2-7)
CASSQGQAYEQYF

SEQ ID NO: 565665 - protein, 14 aa, Homo sapiens
  CDR3 for alpha chain variable domain of TCR clone 282833 (TRAV17, TRAJ57)
CATDPQGGSEKLVC

SEQ ID NO: 565666 - protein, 13 aa, Homo sapiens
  CDR3 for beta chain variable domain of TCR clone 282833 (TRBV19, TRBJ2-7)
CASSPRQSYEQYF

SEQ ID NO: 565667 - protein, 14 aa, Homo sapiens
  CDR3 for alpha chain variable domain of TCR clone 282834 (TRAV4, TRAJ9)
CLVGSRTGGFKTIF

SEQ ID NO: 565668 - protein, 13 aa, Homo sapiens
  CDR3 for beta chain variable domain of TCR clone 282834 (TRBV7-2, TRBJ2-7)
CASSSPSGSEQYF

SEQ ID NO: 565669 - protein, 12 aa, Homo sapiens
  CDR3 for alpha chain variable domain of TCR clone 282835 (TRAV13-1, TRAJ49)
CAAPNTGYQFYF

SEQ ID NO: 565670 - protein, 14 aa, Homo sapiens
  CDR3 for beta chain variable domain of TCR clone 282835 (TRBV19, TRBJ2-5)
CASSLTGGEETQYF

SEQ ID NO: 565671 - protein, 12 aa, Homo sapiens
  CDR3 for alpha chain variable domain of TCR clone 282836 (TRAV23/DV6, TRAJ8)
CAASKNTGFQKL

SEQ ID NO: 565672 - protein, 16 aa, Homo sapiens
  CDR3 for beta chain variable domain of TCR clone 282836 (TRBV4-1, TRBJ2-6)
CASSQVGDPGANVLTF

SEQ ID NO: 565673 - protein, 15 aa, Homo sapiens
  CDR3 for alpha chain variable domain of TCR clone 282837 (TRAV26-1, TRAJ29)
CLVRVEGSGNTTLVF

SEQ ID NO: 565674 - protein, 15 aa, Homo sapiens
  CDR3 for beta chain variable domain of TCR clone 282837 (TRBV7-9, TRBJ1-5)
CASSQGHQPNQPQHF

SEQ ID NO: 565675 - protein, 12 aa, Homo sapiens
  CDR3 for alpha chain variable domain of TCR clone 282838 (TRAV12-2, TRAJ20)
CAVRPSDYKLSF

SEQ ID NO: 565676 - protein, 14 aa, Homo sapiens
  CDR3 for beta chain variable domain of TCR clone 282838 (TRBV7-2, TRBJ1-3)
CASSLGTAGNTIYF

SEQ ID NO: 565677 - protein, 17 aa, Homo sapiens
  CDR3 for alpha chain variable domain of TCR clone 282839 (TRAV38-1, TRAJ28)
CAFMKPTSGAGSYQLTF

SEQ ID NO: 565678 - protein, 11 aa, Homo sapiens
  CDR3 for beta chain variable domain of TCR clone 282839 (TRBV29-1, TRBJ2-5)
CSEDRTGTQYF

SEQ ID NO: 565679 - protein, 11 aa, Homo sapiens
  CDR3 for alpha chain variable domain of TCR clone 282840 (TRAV13-1, TRAJ20)
CSPHGPYKLSF

SEQ ID NO: 565680 - protein, 14 aa, Homo sapiens
  CDR3 for beta chain variable domain of TCR clone 282840 (TRBV28, TRBJ2-5)
CASTGAGGVETQYF

SEQ ID NO: 565681 - protein, 14 aa, Homo sapiens
  CDR3 for alpha chain variable domain of TCR clone 282841 (TRAV1-2, TRAJ16)
CAVNRFSDCQKLLF

SEQ ID NO: 565682 - protein, 15 aa, Homo sapiens
  CDR3 for beta chain variable domain of TCR clone 282841 (TRBV7-9, TRBJ1-6)
CASSSPGRGNPPLHF

SEQ ID NO: 565683 - protein, 16 aa, Homo sapiens
  CDR3 for alpha chain variable domain of TCR clone 282842 (TRAV27, TRAJ13)
CAGAKSDSGGYQKVTF

SEQ ID NO: 565684 - protein, 19 aa, Homo sapiens
  CDR3 for beta chain variable domain of TCR clone 282842 (TRBV28, TRBJ2-7)
CASSYSGTSRLGWVYEQYF

SEQ ID NO: 565685 - protein, 13 aa, Homo sapiens
  CDR3 for alpha chain variable domain of TCR clone 282843 (TRAV17, TRAJ22)
CAHHSGSAMQLTF

SEQ ID NO: 565686 - protein, 14 aa, Homo sapiens
  CDR3 for beta chain variable domain of TCR clone 282843 (TRBV16, TRBJ1-1)
CASSQAGPNTEAFF

SEQ ID NO: 565687 - protein, 13 aa, Homo sapiens
  CDR3 for alpha chain variable domain of TCR clone 282844 (TRAV1-1, TRAJ39)
CAVRDGAGNMLTF

SEQ ID NO: 565688 - protein, 13 aa, Homo sapiens
  CDR3 for beta chain variable domain of TCR clone 282844 (TRBV6-1, TRBJ1-6)
CASIRDSNSPLHF

SEQ ID NO: 565689 - protein, 15 aa, Homo sapiens
  CDR3 for alpha chain variable domain of TCR clone 282845 (TRAV12-2, TRAJ53)
CAVNGGGGSNYKLTF

SEQ ID NO: 565690 - protein, 13 aa, Homo sapiens
  CDR3 for beta chain variable domain of TCR clone 282845 (TRBV3-1, TRBJ1-1)
CASSPVVITEAFF

SEQ ID NO: 565691 - protein, 13 aa, Homo sapiens
  CDR3 for alpha chain variable domain of TCR clone 282846 (TRAV36/DV7, TRAJ40)
CAFTTSGTYKYIF

SEQ ID NO: 565692 - protein, 16 aa, Homo sapiens
  CDR3 for beta chain variable domain of TCR clone 282846 (TRBV12-4, TRBJ1-5)
CASSRPVGGSNQPQHF

SEQ ID NO: 565693 - protein, 15 aa, Homo sapiens
  CDR3 for alpha chain variable domain of TCR clone 282847 (TRAV12-1, TRAJ45)
CGDPYSGGGADGLTF

SEQ ID NO: 565694 - protein, 12 aa, Homo sapiens
  CDR3 for beta chain variable domain of TCR clone 282847 (TRBV6-5, TRBJ2-2)
CASRQITGELFF

SEQ ID NO: 565695 - protein, 16 aa, Homo sapiens
  CDR3 for alpha chain variable domain of TCR clone 282848 (TRAV30, TRAJ24)
CGTGIVDADSWGKFQF

SEQ ID NO: 565696 - protein, 17 aa, Homo sapiens
  CDR3 for beta chain variable domain of TCR clone 282848 (TRBV13, TRBJ2-3)
CASSLSRVAGGRNTQYF

SEQ ID NO: 565697 - protein, 16 aa, Homo sapiens
  CDR3 for alpha chain variable domain of TCR clone 282849 (TRAV3, TRAJ13)
CAVRDPNSWGYQKVTF

SEQ ID NO: 565698 - protein, 14 aa, Homo sapiens
  CDR3 for beta chain variable domain of TCR clone 282849 (TRBV6-3, TRBJ2-5)
CASSYSGRLSGQYF

SEQ ID NO: 565699 - protein, 15 aa, Homo sapiens
  CDR3 for alpha chain variable domain of TCR clone 282850 (TRAV17, TRAJ22)
CDTVAPSGSARQLTF

SEQ ID NO: 565700 - protein, 16 aa, Homo sapiens
  CDR3 for beta chain variable domain of TCR clone 282850 (TRBV10-3, TRBJ2-7)
CAISADFADRPYEQYF

SEQ ID NO: 565701 - protein, 13 aa, Homo sapiens
  CDR3 for alpha chain variable domain of TCR clone 282851 (TRAV35, TRAJ42)
CAGFPGSQGNLIF

SEQ ID NO: 565702 - protein, 11 aa, Homo sapiens
  CDR3 for beta chain variable domain of TCR clone 282851 (TRBV11-2, TRBJ2-2)
CASSLPGELFF

SEQ ID NO: 565703 - protein, 14 aa, Homo sapiens
  CDR3 for alpha chain variable domain of TCR clone 282852 (TRAV1-2, TRAJ8)
CAVREDTGFQKLVF

SEQ ID NO: 565704 - protein, 15 aa, Homo sapiens
  CDR3 for beta chain variable domain of TCR clone 282852 (TRBV2, TRBJ1-3)
CASSVELPSGNTIYF

SEQ ID NO: 565705 - protein, 11 aa, Homo sapiens
  CDR3 for alpha chain variable domain of TCR clone 282853 (TRAV12-1, TRAJ30)
CVVNGQDKIIF

SEQ ID NO: 565706 - protein, 12 aa, Homo sapiens
  CDR3 for beta chain variable domain of TCR clone 282853 (TRBV27, TRBJ2-2)
CASKLITGELFF

SEQ ID NO: 565707 - protein, 12 aa, Homo sapiens
  CDR3 for alpha chain variable domain of TCR clone 282854 (TRAV12-2, TRAJ4)
GWPEGGYNKLIF

SEQ ID NO: 565708 - protein, 17 aa, Homo sapiens
  CDR3 for beta chain variable domain of TCR clone 282854 (TRBV7-3, TRBJ2-2)
CASSLSGTSGGTGELFF

SEQ ID NO: 565709 - protein, 15 aa, Homo sapiens
  CDR3 for alpha chain variable domain of TCR clone 282855 (TRAV8-3, TRAJ45)
CALSYSGGGADGLTF

SEQ ID NO: 565710 - protein, 15 aa, Homo sapiens
  CDR3 for beta chain variable domain of TCR clone 282855 (TRBV5-1, TRBJ1-1)
CASSSRTGRNTEAFF

SEQ ID NO: 565711 - protein, 12 aa, Homo sapiens
  CDR3 for alpha chain variable domain of TCR clone 282856 (TRAV20, TRAJ54)
CAVQEGAKKLVF

SEQ ID NO: 565712 - protein, 17 aa, Homo sapiens
  CDR3 for beta chain variable domain of TCR clone 282856 (TRBV13, TRBJ2-3)
CASSLSRVAGGRNTQYF

SEQ ID NO: 565713 - protein, 14 aa, Homo sapiens
  CDR3 for alpha chain variable domain of TCR clone 282857 (TRAV13-1, TRAJ22)
CAASYSGSARQLTF

SEQ ID NO: 565714 - protein, 10 aa, Homo sapiens
  CDR3 for beta chain variable domain of TCR clone 282857 (TRBV6-3, TRBJ1-2)
CASSLTGDYG

SEQ ID NO: 565715 - protein, 14 aa, Homo sapiens
  CDR3 for alpha chain variable domain of TCR clone 282858 (TRAV8-2, TRAJ13)
CVVTASGGYQKVTF

SEQ ID NO: 565716 - protein, 13 aa, Homo sapiens
  CDR3 for beta chain variable domain of TCR clone 282858 (TRBV20-1, TRBJ1-1)
CSAPLGGGTEAFF

SEQ ID NO: 565717 - protein, 15 aa, Homo sapiens
  CDR3 for alpha chain variable domain of TCR clone 282859 (TRAV8-3, TRAJ45)
CASSYSGGGADGLTF

SEQ ID NO: 565718 - protein, 18 aa, Homo sapiens
  CDR3 for beta chain variable domain of TCR clone 282859 (TRBV7-9, TRBJ2-7)
CASSLTASGSRTWYEQYF

SEQ ID NO: 565719 - protein, 13 aa, Homo sapiens
  CDR3 for alpha chain variable domain of TCR clone 282860 (TRAV3, TRAJ15)
CAVRDQAGTALIF

SEQ ID NO: 565720 - protein, 13 aa, Homo sapiens
  CDR3 for beta chain variable domain of TCR clone 282860 (TRBV19, TRBJ1-2)
CASSVPGQDGYTF

SEQ ID NO: 565721 - protein, 14 aa, Homo sapiens
  CDR3 for alpha chain variable domain of TCR clone 282861 (TRAV1-2, TRAJ8)
CAVREDTGFQKLVF

SEQ ID NO: 565722 - protein, 13 aa, Homo sapiens
  CDR3 for beta chain variable domain of TCR clone 282861 (TRBV15, TRBJ2-7)
YATSTTGHYEQYF

SEQ ID NO: 565723 - protein, 15 aa, Homo sapiens
  CDR3 for alpha chain variable domain of TCR clone 282862 (TRAV3, TRAJ22)
CAVRYRGGSARQLTF

SEQ ID NO: 565724 - protein, 13 aa, Homo sapiens
  CDR3 for beta chain variable domain of TCR clone 282862 (TRBV12-4, TRBJ1-2)
CASSLRQGKGYTF

SEQ ID NO: 565725 - protein, 14 aa, Homo sapiens
  CDR3 for alpha chain variable domain of TCR clone 282863 (TRAV1-2, TRAJ16)
CAVNRFSDGQKLLF

SEQ ID NO: 565726 - protein, 13 aa, Homo sapiens
  CDR3 for beta chain variable domain of TCR clone 282863 (TRBV5-4, TRBJ1-1)
CASSVDLGTEAFF

SEQ ID NO: 565727 - protein, 13 aa, Homo sapiens
  CDR3 for alpha chain variable domain of TCR clone 282864 (TRAV8-3, TRAJ43)
CAVGIYNNIDMRF

SEQ ID NO: 565728 - protein, 16 aa, Homo sapiens
  CDR3 for beta chain variable domain of TCR clone 282864 (TRBV7-2, TRBJ2-5)
CASSLVLWTKQETQYF

SEQ ID NO: 565729 - protein, 14 aa, Homo sapiens
  CDR3 for alpha chain variable domain of TCR clone 282865 (TRAV8-4, TRAJ16)
CAVSPVGRWPEAAL

SEQ ID NO: 565730 - protein, 17 aa, Homo sapiens
  CDR3 for beta chain variable domain of TCR clone 282865 (TRBV7-3, TRBJ2-3)
CASSLMKRMRGADTQYF

SEQ ID NO: 565731 - protein, 14 aa, Homo sapiens
  CDR3 for alpha chain variable domain of TCR clone 282866 (TRAV27, TRAJ40)
CAGSLLSGTYKYIF

SEQ ID NO: 565732 - protein, 15 aa, Homo sapiens
  CDR3 for beta chain variable domain of TCR clone 282866 (TRBV6-3, TRBJ1-4)
CASSSPGQENEKLFC

SEQ ID NO: 565733 - protein, 14 aa, Homo sapiens
  CDR3 for alpha chain variable domain of TCR clone 282867 (TRAV1-2, TRAJ8)
CAVREDTGSEKLVF

SEQ ID NO: 565734 - protein, 12 aa, Homo sapiens
  CDR3 for beta chain variable domain of TCR clone 282867 (TRBV24-1, TRBJ1-1)
CATLYPDTEAFF

SEQ ID NO: 565735 - protein, 17 aa, Homo sapiens
  CDR3 for alpha chain variable domain of TCR clone 282868 (TRAV3, TRAJ6)
CAVRDGPRAGGSYIPTF

SEQ ID NO: 565736 - protein, 13 aa, Homo sapiens
  CDR3 for beta chain variable domain of TCR clone 282868 (TRBV7-2, TRBJ2-5)
CASSLYRQETQYF

SEQ ID NO: 565737 - protein, 14 aa, Homo sapiens
  CDR3 for alpha chain variable domain of TCR clone 282869 (TRAV16, TRAJ17)
CALSGRAAGNKLTF

SEQ ID NO: 565738 - protein, 15 aa, Homo sapiens
  CDR3 for beta chain variable domain of TCR clone 282869 (TRBV3-1, TRBJ1-2)
CASSPTRLPEGGHTF

SEQ ID NO: 565739 - protein, 14 aa, Homo sapiens
  CDR3 for alpha chain variable domain of TCR clone 282870 (TRAV12-3, TRAJ10)
SHLPLTGGGNKLTF

SEQ ID NO: 565740 - protein, 15 aa, Homo sapiens
  CDR3 for beta chain variable domain of TCR clone 282870 (TRBV29-1, TRBJ2-1)
CSVPTGLALYNEQFF

SEQ ID NO: 565741 - protein, 15 aa, Homo sapiens
  CDR3 for alpha chain variable domain of TCR clone 282871 (TRAV12-2, TRAJ43)
CAFDMPFGAGTRLTV

SEQ ID NO: 565742 - protein, 19 aa, Homo sapiens
  CDR3 for beta chain variable domain of TCR clone 282871 (TRBV25-1, TRBJ2-2)
CAILVYRVDRGRKTGELFF

SEQ ID NO: 565743 - protein, 15 aa, Homo sapiens
  CDR3 for alpha chain variable domain of TCR clone 282872 (TRAV26-1, TRAJ29)
CIVRVEGSGNTPPVF

SEQ ID NO: 565744 - protein, 14 aa, Homo sapiens
  CDR3 for beta chain variable domain of TCR clone 282872 (TRBV18, TRBJ2-5)
CASSPGVSQETQCF

SEQ ID NO: 565745 - protein, 14 aa, Homo sapiens
  CDR3 for alpha chain variable domain of TCR clone 282873 (TRAV8-3, TRAJ4)
CAVGGAGGCNKLIF

SEQ ID NO: 565746 - protein, 15 aa, Homo sapiens
  CDR3 for beta chain variable domain of TCR clone 282873 (TRBV5-1, TRBJ2-1)
CASSPPRAPYNEQFF

SEQ ID NO: 565747 - protein, 15 aa, Homo sapiens
  CDR3 for alpha chain variable domain of TCR clone 282874 (TRAV16, TRAJ16)
CALQGGGSDGQKLLC

SEQ ID NO: 565748 - protein, 14 aa, Homo sapiens
  CDR3 for beta chain variable domain of TCR clone 282874 (TRBV6-1, TRBJ2-7)
CASSERVNPYEQYF

SEQ ID NO: 565749 - protein, 15 aa, Homo sapiens
  CDR3 for alpha chain variable domain of TCR clone 282875 (TRAV17, TRAJ57)
CATGPSQGGYEKLVF

SEQ ID NO: 565750 - protein, 14 aa, Homo sapiens
  CDR3 for beta chain variable domain of TCR clone 282875 (TRBV5-1, TRBJ2-7)
CASSRGESLYEQYF

SEQ ID NO: 565751 - protein, 15 aa, Homo sapiens
  CDR3 for alpha chain variable domain of TCR clone 282876 (TRAV1-2, TRAJ32)
CAVRGYGGATNKLIF

SEQ ID NO: 565752 - protein, 15 aa, Homo sapiens
  CDR3 for beta chain variable domain of TCR clone 282876 (TRBV25-1, TRBJ2-5)
CASSDTGTHQETQYL

SEQ ID NO: 565753 - protein, 14 aa, Homo sapiens
  CDR3 for alpha chain variable domain of TCR clone 282877 (TRAV13-1, TRAJ9)
CAASALTGGFKTIF

SEQ ID NO: 565754 - protein, 16 aa, Homo sapiens
  CDR3 for beta chain variable domain of TCR clone 282877 (TRBV12-4, TRBJ1-5)
CASSRPVGGSNQHQHF

SEQ ID NO: 565755 - protein, 11 aa, Homo sapiens
  CDR3 for alpha chain variable domain of TCR clone 282878 (TRAV12-3, TRAJ17)
CAMTLTGKLTV

SEQ ID NO: 565756 - protein, 15 aa, Homo sapiens
  CDR3 for beta chain variable domain of TCR clone 282878 (TRBV20-1, TRBJ2-7)
CSASDRVSGMDEQYF

SEQ ID NO: 565757 - protein, 13 aa, Homo sapiens
  CDR3 for alpha chain variable domain of TCR clone 282879 (TRAV13-1, TRAJ6)
CAASSGGSYIPTF

SEQ ID NO: 565758 - protein, 15 aa, Homo sapiens
  CDR3 for beta chain variable domain of TCR clone 282879 (TRBV12-4, TRBJ2-5)
CASSPPTGLQGTQYF

SEQ ID NO: 565759 - protein, 14 aa, Homo sapiens
  CDR3 for alpha chain variable domain of TCR clone 282880 (TRAV17, TRAJ31)
CATVLLNNNARLMF

SEQ ID NO: 565760 - protein, 13 aa, Homo sapiens
  CDR3 for beta chain variable domain of TCR clone 282880 (TRBV12-4, TRBJ1-2)
CASSLRQGKGYTF

SEQ ID NO: 565761 - protein, 15 aa, Homo sapiens
  CDR3 for alpha chain variable domain of TCR clone 282881 (TRAV26-1, TRAJ29)
CIVRVEGSGNTPLVF

SEQ ID NO: 565762 - protein, 15 aa, Homo sapiens
  CDR3 for beta chain variable domain of TCR clone 282881 (TRBV6-3, TRBJ2-2)
CASSFLATLTGELFF

SEQ ID NO: 565763 - protein, 16 aa, Homo sapiens
  CDR3 for alpha chain variable domain of TCR clone 282882 (TRAV3, TRAJ10)
CAGRDMRAGGGNKLTL

SEQ ID NO: 565764 - protein, 18 aa, Homo sapiens
  CDR3 for beta chain variable domain of TCR clone 282882 (TRBV6-5, TRBJ2-5)
CASSYSQAGGSYQETQYF

SEQ ID NO: 565765 - protein, 13 aa, Homo sapiens
  CDR3 for alpha chain variable domain of TCR clone 282883 (TRAV21, TRAJ8)
CAETNTGFRKLVF

SEQ ID NO: 565766 - protein, 14 aa, Homo sapiens
  CDR3 for beta chain variable domain of TCR clone 282883 (TRBV19, TRBJ2-1)
CASPTFVLSGEQFF

SEQ ID NO: 565767 - protein, 14 aa, Homo sapiens
  CDR3 for alpha chain variable domain of TCR clone 282884 (TRAV12-1, TRAJ45)
CVVNIGGGADGLTF

SEQ ID NO: 565768 - protein, 15 aa, Homo sapiens
  CDR3 for beta chain variable domain of TCR clone 282884 (TRBV7-2, TRBJ2-7)
CASSLKGALTDEQYF

SEQ ID NO: 565769 - protein, 13 aa, Homo sapiens
  CDR3 for alpha chain variable domain of TCR clone 282885 (TRAV21, TRAJ20)
CAVGLRADYKLSF

SEQ ID NO: 565770 - protein, 12 aa, Homo sapiens
  CDR3 for beta chain variable domain of TCR clone 282885 (TRBV24-1, TRBJ1-1)
CATSDSDRGAFF

SEQ ID NO: 565771 - protein, 13 aa, Homo sapiens
  CDR3 for alpha chain variable domain of TCR clone 282886 (TRAV12-2, TRAJ12)
CAVNEDSSYKLIF

SEQ ID NO: 565772 - protein, 16 aa, Homo sapiens
  CDR3 for beta chain variable domain of TCR clone 282886 (TRBV20-1, TRBJ2-6)
CSASSQGYDGANVLTF

SEQ ID NO: 565773 - protein, 18 aa, Homo sapiens
  CDR3 for alpha chain variable domain of TCR clone 282887 (TRAV13-1, TRAJ52)
CAAKNPNAGGTSYGKLTL

SEQ ID NO: 565774 - protein, 18 aa, Homo sapiens
  CDR3 for beta chain variable domain of TCR clone 282887 (TRBV12-4, TRBJ2-4)
CASSRTGAVDVAKNIQYF

SEQ ID NO: 565775 - protein, 12 aa, Homo sapiens
  CDR3 for alpha chain variable domain of TCR clone 282888 (TRAV8-3, TRAJ26)
CAGDNYGQNFVF

SEQ ID NO: 565776 - protein, 18 aa, Homo sapiens
  CDR3 for beta chain variable domain of TCR clone 282888 (TRBV2, TRBJ2-3)
CASSEAGGQALGADTQYF

SEQ ID NO: 565777 - protein, 13 aa, Homo sapiens
  CDR3 for alpha chain variable domain of TCR clone 282889 (TRAV12-1, TRAJ33)
CGDAPDSNYQLIW

SEQ ID NO: 565778 - protein, 13 aa, Homo sapiens
  CDR3 for beta chain variable domain of TCR clone 282889 (TRBV7-2, TRBJ2-7)
SASSSPSGSEQYF

SEQ ID NO: 565779 - protein, 14 aa, Homo sapiens
  CDR3 for alpha chain variable domain of TCR clone 282890 (TRAV3, TRAJ28)
CAVRRGAGSYQLTF

SEQ ID NO: 565780 - protein, 14 aa, Homo sapiens
  CDR3 for beta chain variable domain of TCR clone 282890 (TRBV2, TRBJ2-3)
CASSEWQNTDTQYF

SEQ ID NO: 565781 - protein, 14 aa, Homo sapiens
  CDR3 for alpha chain variable domain of TCR clone 282891 (TRAV26-1, TRAJ48)
CIVRTNFGKEKLTF

SEQ ID NO: 565782 - protein, 12 aa, Homo sapiens
  CDR3 for beta chain variable domain of TCR clone 282891 (TRBV20-1, TRBJ2-7)
CSASSGANEQYF

SEQ ID NO: 565783 - protein, 13 aa, Homo sapiens
  CDR3 for alpha chain variable domain of TCR clone 282892 (TRAV12-3, TRAJ54)
CALVPQGAQKLVF

SEQ ID NO: 565784 - protein, 15 aa, Homo sapiens
  CDR3 for beta chain variable domain of TCR clone 282892 (TRBV4-1, TRBJ2-2)
CASSRDSRGTGELFF

SEQ ID NO: 565785 - protein, 16 aa, Homo sapiens
  CDR3 for alpha chain variable domain of TCR clone 282893 (TRAV30, TRAJ24)
CGTEIVDADSWGKFQF

SEQ ID NO: 565786 - protein, 13 aa, Homo sapiens
  CDR3 for beta chain variable domain of TCR clone 282893 (TRBV7-9, TRBJ2-5)
CASPPSGRETQYF

SEQ ID NO: 565787 - protein, 14 aa, Homo sapiens
  CDR3 for alpha chain variable domain of TCR clone 282894 (TRAV1-2, TRAJ16)
CAVNRFSDGQMLLF

SEQ ID NO: 565788 - protein, 15 aa, Homo sapiens
  CDR3 for beta chain variable domain of TCR clone 282894 (TRBV27, TRBJ2-3)
CASSSLAGVIDTQYF

SEQ ID NO: 565789 - protein, 15 aa, Homo sapiens
  CDR3 for alpha chain variable domain of TCR clone 282895 (TRAV29/DV5, TRAJ40)
CAASAQGSGTYKYIF

SEQ ID NO: 565790 - protein, 14 aa, Homo sapiens
  CDR3 for beta chain variable domain of TCR clone 282895 (TRBV28, TRBJ1-1)
CASSESGRGTEAFF

SEQ ID NO: 565791 - protein, 13 aa, Homo sapiens
  CDR3 for alpha chain variable domain of TCR clone 282896 (TRAV13-1, TRAJ39)
CSKYSNAGNMLTF

SEQ ID NO: 565792 - protein, 14 aa, Homo sapiens
  CDR3 for beta chain variable domain of TCR clone 282896 (TRBV7-9, TRBJ1-1)
CASTPLQSYTEAFF

SEQ ID NO: 565793 - protein, 15 aa, Homo sapiens
  CDR3 for alpha chain variable domain of TCR clone 282897 (TRAV2, TRAJ11)
CAVGGRNSGYSTITF

SEQ ID NO: 565794 - protein, 14 aa, Homo sapiens
  CDR3 for beta chain variable domain of TCR clone 282897 (TRBV4-1, TRBJ2-2)
CASSQAVNTGELFF

SEQ ID NO: 565795 - protein, 13 aa, Homo sapiens
  CDR3 for alpha chain variable domain of TCR clone 282898 (TRAV21, TRAJ20)
CAVGLRVDYKRSF

SEQ ID NO: 565796 - protein, 11 aa, Homo sapiens
  CDR3 for beta chain variable domain of TCR clone 282898 (TRBV12-4, TRBJ2-3)
CASTATDTQYF

SEQ ID NO: 565797 - protein, 11 aa, Homo sapiens
  CDR3 for alpha chain variable domain of TCR clone 282899 (TRAV12-1, TRAJ21)
CVVNNFKKFYF

SEQ ID NO: 565798 - protein, 14 aa, Homo sapiens
  CDR3 for beta chain variable domain of TCR clone 282899 (TRBV15, TRBJ1-5)
CATSREQSNQPQHF

SEQ ID NO: 565799 - protein, 17 aa, Homo sapiens
  CDR3 for alpha chain variable domain of TCR clone 282900 (TRAV3, TRAJ6)
CAVRDGPRAGGRYIPTS

SEQ ID NO: 565800 - protein, 14 aa, Homo sapiens
  CDR3 for beta chain variable domain of TCR clone 282900 (TRBV27, TRBJ2-2)
CASRPGVNTGELFF

SEQ ID NO: 565801 - protein, 13 aa, Homo sapiens
  CDR3 for alpha chain variable domain of TCR clone 282901 (TRAV36/DV7, TRAJ49)
CAGDSNTGNQFYF

SEQ ID NO: 565802 - protein, 15 aa, Homo sapiens
  CDR3 for beta chain variable domain of TCR clone 282901 (TRBV6-5, TRBJ1-6)
CASSLGHGFRSPLHF

SEQ ID NO: 565803 - protein, 16 aa, Homo sapiens
  CDR3 for alpha chain variable domain of TCR clone 282902 (TRAV3, TRAJ5)
CAVRNLMDTGRRALTF

SEQ ID NO: 565804 - protein, 12 aa, Homo sapiens
  CDR3 for beta chain variable domain of TCR clone 282902 (TRBV5-4, TRBJ2-5)
CASSSTRETQYF

SEQ ID NO: 565805 - protein, 13 aa, Homo sapiens
  CDR3 for alpha chain variable domain of TCR clone 282903 (TRAV13-1, TRAJ10)
CAALEGGGNKLTF

SEQ ID NO: 565806 - protein, 17 aa, Homo sapiens
  CDR3 for beta chain variable domain of TCR clone 282903 (TRBV7-3, TRBJ2-2)
CASSLSGTSGGTGELFF

SEQ ID NO: 565807 - protein, 14 aa, Homo sapiens
  CDR3 for alpha chain variable domain of TCR clone 282904 (TRAV13-1, TRAJ26)
CAAPKGPAGQNFVF

SEQ ID NO: 565808 - protein, 15 aa, Homo sapiens
  CDR3 for beta chain variable domain of TCR clone 282904 (TRBV28, TRBJ2-5)
CASSFRQGALETQYF

SEQ ID NO: 565809 - protein, 10 aa, Homo sapiens
  CDR3 for alpha chain variable domain of TCR clone 282905 (TRAV12-1, TRAJ43)
CVVHNNDMRF

SEQ ID NO: 565810 - protein, 12 aa, Homo sapiens
  CDR3 for beta chain variable domain of TCR clone 282905 (TRBV12-4, TRBJ1-2)
CSSSGLTVISTF

SEQ ID NO: 565811 - protein, 19 aa, Homo sapiens
  CDR3 for alpha chain variable domain of TCR clone 282906 (TRAV13-1, TRAJ52)
CAASPYQNAGGTSYGKLTF

SEQ ID NO: 565812 - protein, 14 aa, Homo sapiens
  CDR3 for beta chain variable domain of TCR clone 282906 (TRBV6-1, TRBJ1-3)
CASVQGGGGNTIYF

SEQ ID NO: 565813 - protein, 11 aa, Homo sapiens
  CDR3 for alpha chain variable domain of TCR clone 282907 (TRAV4, TRAJ31)
CLVVNNARLMF

SEQ ID NO: 565814 - protein, 17 aa, Homo sapiens
  CDR3 for beta chain variable domain of TCR clone 282907 (TRBV19, TRBJ2-7)
CASSISFYDSYPYEQYF

SEQ ID NO: 565815 - protein, 15 aa, Homo sapiens
  CDR3 for alpha chain variable domain of TCR clone 282908 (TRAV3, TRAJ3)
CAVRDRDSSASKIIF

SEQ ID NO: 565816 - protein, 14 aa, Homo sapiens
  CDR3 for beta chain variable domain of TCR clone 282908 (TRBV7-2, TRBJ2-7)
CASRSQGAAYEQYF

SEQ ID NO: 565817 - protein, 14 aa, Homo sapiens
  CDR3 for alpha chain variable domain of TCR clone 282909 (TRAV12-2, TRAJ13)
CAVTKTGGYQKVTF

SEQ ID NO: 565818 - protein, 15 aa, Homo sapiens
  CDR3 for beta chain variable domain of TCR clone 282909 (TRBV27, TRBJ2-1)
CASSNGGGSPNEQFF

SEQ ID NO: 565819 - protein, 11 aa, Homo sapiens
  CDR3 for alpha chain variable domain of TCR clone 282910 (TRAV12-2, TRAJ31)
CAILNNARLMF

SEQ ID NO: 565820 - protein, 15 aa, Homo sapiens
  CDR3 for beta chain variable domain of TCR clone 282910 (TRBV13, TRBJ2-2)
CQQPRTGEHTGELFF

SEQ ID NO: 565821 - protein, 12 aa, Homo sapiens
  CDR3 for alpha chain variable domain of TCR clone 282911 (TRAV35, TRAJ30)
CAGQLSDDKIIF

SEQ ID NO: 565822 - protein, 17 aa, Homo sapiens
  CDR3 for beta chain variable domain of TCR clone 282911 (TRBV4-2, TRBJ2-5)
CTSSPGRWRNFQETQYF

SEQ ID NO: 565823 - protein, 12 aa, Homo sapiens
  CDR3 for alpha chain variable domain of TCR clone 282912 (TRAV12-3, TRAJ17)
CAMTLTGNKLTF

SEQ ID NO: 565824 - protein, 14 aa, Homo sapiens
  CDR3 for beta chain variable domain of TCR clone 282912 (TRBV11-2, TRBJ2-7)
CASSLPPTSSTSGR

SEQ ID NO: 565825 - protein, 14 aa, Homo sapiens
  CDR3 for alpha chain variable domain of TCR clone 282913 (TRAV2, TRAJ9)
CAVEDRSGGFKPIF

SEQ ID NO: 565826 - protein, 13 aa, Homo sapiens
  CDR3 for beta chain variable domain of TCR clone 282913 (TRBV7-3, TRBJ2-5)
CASSFRGGETQYF

SEQ ID NO: 565827 - protein, 17 aa, Homo sapiens
  CDR3 for alpha chain variable domain of TCR clone 282914 (TRAV3, TRAJ6)
CAVRDGPRAGGSHIPTF

SEQ ID NO: 565828 - protein, 19 aa, Homo sapiens
  CDR3 for beta chain variable domain of TCR clone 282914 (TRBV25-1, TRBJ2-2)
CAILVYRVDRGRKTGELFF

SEQ ID NO: 565829 - protein, 19 aa, Homo sapiens
  CDR3 for alpha chain variable domain of TCR clone 282915 (TRAV26-1, TRAJ22)
CCVLLHRWVFSGSARQLTF

SEQ ID NO: 565830 - protein, 15 aa, Homo sapiens
  CDR3 for beta chain variable domain of TCR clone 282915 (TRBV7-9, TRBJ1-6)
CASSSPGRGNSPLHF

SEQ ID NO: 565831 - protein, 14 aa, Homo sapiens
  CDR3 for alpha chain variable domain of TCR clone 282916 (TRAV9-2, TRAJ39)
CALYIYNAGNMLTF

SEQ ID NO: 565832 - protein, 13 aa, Homo sapiens
  CDR3 for beta chain variable domain of TCR clone 282916 (TRBV19, TRBJ2-7)
CASSPRQSYDQYF

SEQ ID NO: 565833 - protein, 17 aa, Homo sapiens
  CDR3 for alpha chain variable domain of TCR clone 282917 (TRAV3, TRAJ6)
YAVRDGPRAGGRYIPTF

SEQ ID NO: 565834 - protein, 14 aa, Homo sapiens
  CDR3 for beta chain variable domain of TCR clone 282917 (TRBV7-2, TRBJ2-7)
CASSPKTSFYEQYF

SEQ ID NO: 565835 - protein, 18 aa, Homo sapiens
  CDR3 for alpha chain variable domain of TCR clone 282918 (TRAV35, TRAJ52)
CAGLLRYPGGTSYGKLTF

SEQ ID NO: 565836 - protein, 12 aa, Homo sapiens
  CDR3 for beta chain variable domain of TCR clone 282918 (TRBV7-9, TRBJ1-4)
CASSLADSKLFF

SEQ ID NO: 565837 - protein, 16 aa, Homo sapiens
  CDR3 for alpha chain variable domain of TCR clone 282919 (TRAV26-1, TRAJ53)
CIVRVAMGGSNYKLTF

SEQ ID NO: 565838 - protein, 15 aa, Homo sapiens
  CDR3 for beta chain variable domain of TCR clone 282919 (TRBV7-9, TRBJ1-4)
CASSARTGGNEKLFF

SEQ ID NO: 565839 - protein, 10 aa, Homo sapiens
  CDR3 for alpha chain variable domain of TCR clone 282920 (TRAV1-2, TRAJ18)
CAVRGEAQPW

SEQ ID NO: 565840 - protein, 13 aa, Homo sapiens
  CDR3 for beta chain variable domain of TCR clone 282920 (TRBV7-3, TRBJ1-1)
CASSQDWGAEAFL

SEQ ID NO: 565841 - protein, 12 aa, Homo sapiens
  CDR3 for alpha chain variable domain of TCR clone 282921 (TRAV8-3, TRAJ43)
CAVGAGNNDMRF

SEQ ID NO: 565842 - protein, 14 aa, Homo sapiens
  CDR3 for beta chain variable domain of TCR clone 282921 (TRBV4-2, TRBJ1-5)
CASSRDRCNQPQHF

SEQ ID NO: 565843 - protein, 14 aa, Homo sapiens
  CDR3 for alpha chain variable domain of TCR clone 282922 (TRAV23/DV6, TRAJ4)
CAANLSVGYNKLMF

SEQ ID NO: 565844 - protein, 17 aa, Homo sapiens
  CDR3 for beta chain variable domain of TCR clone 282922 (TRBV4-1, TRBJ1-3)
CASSPQRGIRFGNTIYF

SEQ ID NO: 565845 - protein, 18 aa, Homo sapiens
  CDR3 for alpha chain variable domain of TCR clone 282923 (TRAV26-2, TRAJ54)
CILRDVEVGIQGAQKLVF

SEQ ID NO: 565846 - protein, 17 aa, Homo sapiens
  CDR3 for beta chain variable domain of TCR clone 282923 (TRBV18, TRBJ1-5)
CQLTTCRVRQNNQPQHF

SEQ ID NO: 565847 - protein, 12 aa, Homo sapiens
  CDR3 for alpha chain variable domain of TCR clone 282924 (TRAV8-1, TRAJ31)
CAVINNNASLMF

SEQ ID NO: 565848 - protein, 15 aa, Homo sapiens
  CDR3 for beta chain variable domain of TCR clone 282924 (TRBV20-1, TRBJ2-2)
CSARGGQGNTGELFF

SEQ ID NO: 565849 - protein, 15 aa, Homo sapiens
  CDR3 for alpha chain variable domain of TCR clone 282925 (TRAV16, TRAJ4)
CALEDLSGGYNKLIF

SEQ ID NO: 565850 - protein, 13 aa, Homo sapiens
  CDR3 for beta chain variable domain of TCR clone 282925 (TRBV7-3, TRBJ2-7)
CASSQAGGYEQYF

SEQ ID NO: 565851 - protein, 13 aa, Homo sapiens
  CDR3 for alpha chain variable domain of TCR clone 282926 (TRAV12-1, TRAJ7)
CVVNMRGNNRLAF

SEQ ID NO: 565852 - protein, 16 aa, Homo sapiens
  CDR3 for beta chain variable domain of TCR clone 282926 (TRBV20-1, TRBJ1-4)
RSAPGQGLLTNEKLFF

SEQ ID NO: 565853 - protein, 16 aa, Homo sapiens
  CDR3 for alpha chain variable domain of TCR clone 282927 (TRAV4, TRAJ9)
CLVGDPTRPGGFKTIF

SEQ ID NO: 565854 - protein, 16 aa, Homo sapiens
  CDR3 for beta chain variable domain of TCR clone 282927 (TRBV28, TRBJ1-4)
CASSPPYRGRSEKLLF

SEQ ID NO: 565855 - protein, 13 aa, Homo sapiens
  CDR3 for alpha chain variable domain of TCR clone 282928 (TRAV4, TRAJ27)
CLVGDPGAGKSTF

SEQ ID NO: 565856 - protein, 14 aa, Homo sapiens
  CDR3 for beta chain variable domain of TCR clone 282928 (TRBV18, TRBJ2-7)
CASSPRGGAYEQYF

SEQ ID NO: 565857 - protein, 14 aa, Homo sapiens
  CDR3 for alpha chain variable domain of TCR clone 282929 (TRAV1-2, TRAJ16)
CVVNRFSDGQKLLF

SEQ ID NO: 565858 - protein, 11 aa, Homo sapiens
  CDR3 for beta chain variable domain of TCR clone 282929 (TRBV12-4, TRBJ2-3)
CASSSVRGRYF

SEQ ID NO: 565859 - protein, 14 aa, Homo sapiens
  CDR3 for alpha chain variable domain of TCR clone 282930 (TRAV25, TRAJ45)
CARESGGGADGLTF

SEQ ID NO: 565860 - protein, 12 aa, Homo sapiens
  CDR3 for beta chain variable domain of TCR clone 282930 (TRBV7-9, TRBJ2-7)
CASSVDSYEQYF

SEQ ID NO: 565861 - protein, 14 aa, Homo sapiens
  CDR3 for alpha chain variable domain of TCR clone 282931 (TRAV8-2, TRAJ33)
CVVSDRNSNYQLIW

SEQ ID NO: 565862 - protein, 15 aa, Homo sapiens
  CDR3 for beta chain variable domain of TCR clone 282931 (TRBV6-5, TRBJ2-3)
CASSRSGGARDTQYF

SEQ ID NO: 565863 - protein, 12 aa, Homo sapiens
  CDR3 for alpha chain variable domain of TCR clone 282932 (TRAV20, TRAJ33)
CAVRGSNYQLIW

SEQ ID NO: 565864 - protein, 14 aa, Homo sapiens
  CDR3 for beta chain variable domain of TCR clone 282932 (TRBV18, TRBJ2-7)
CASSPRGGAYEQYF

SEQ ID NO: 565865 - protein, 13 aa, Homo sapiens
  CDR3 for alpha chain variable domain of TCR clone 282933 (TRAV12-2, TRAJ27)
CAARPGNAGKSTF

SEQ ID NO: 565866 - protein, 14 aa, Homo sapiens
  CDR3 for beta chain variable domain of TCR clone 282933 (TRBV12-4, TRBJ2-2)
CASNQGANTGELFF

SEQ ID NO: 565867 - protein, 12 aa, Homo sapiens
  CDR3 for alpha chain variable domain of TCR clone 282934 (TRAV12-3, TRAJ40)
CAMSSGTYKYIF

SEQ ID NO: 565868 - protein, 15 aa, Homo sapiens
  CDR3 for beta chain variable domain of TCR clone 282934 (TRBV25-1, TRBJ1-4)
CASSPGDSTNEKLFF

SEQ ID NO: 565869 - protein, 13 aa, Homo sapiens
  CDR3 for alpha chain variable domain of TCR clone 282935 (TRAV12-1, TRAJ16)
CVVNGPDGQKLLC

SEQ ID NO: 565870 - protein, 13 aa, Homo sapiens
  CDR3 for beta chain variable domain of TCR clone 282935 (TRBV2, TRBJ1-1)
CARNPTGGFHAFF

SEQ ID NO: 565871 - protein, 17 aa, Homo sapiens
  CDR3 for alpha chain variable domain of TCR clone 282936 (TRAV3, TRAJ6)
CAVRDGPRAGGSYIPTF

SEQ ID NO: 565872 - protein, 14 aa, Homo sapiens
  CDR3 for beta chain variable domain of TCR clone 282936 (TRBV7-2, TRBJ2-7)
CASSPKTVFYEQYF

SEQ ID NO: 565873 - protein, 14 aa, Homo sapiens
  CDR3 for alpha chain variable domain of TCR clone 282937 (TRAV12-1, TRAJ24)
CVVIPTDSWGKLQF

SEQ ID NO: 565874 - protein, 12 aa, Homo sapiens
  CDR3 for beta chain variable domain of TCR clone 282937 (TRBV7-9, TRBJ1-1)
CASSLVRGEAFF

SEQ ID NO: 565875 - protein, 14 aa, Homo sapiens
  CDR3 for alpha chain variable domain of TCR clone 282938 (TRAV13-1, TRAJ16)
CAAAYFFRWPEAAL

SEQ ID NO: 565876 - protein, 12 aa, Homo sapiens
  CDR3 for beta chain variable domain of TCR clone 282938 (TRBV12-4, TRBJ2-7)
CASSLGGYEQYF

SEQ ID NO: 565877 - protein, 18 aa, Homo sapiens
  CDR3 for alpha chain variable domain of TCR clone 282939 (TRAV13-1, TRAJ52)
CAASKRSAGGTSYGKLTF

SEQ ID NO: 565878 - protein, 17 aa, Homo sapiens
  CDR3 for beta chain variable domain of TCR clone 282939 (TRBV13, TRBJ2-3)
CASGLSRVAGGRNTQYF

SEQ ID NO: 565879 - protein, 13 aa, Homo sapiens
  CDR3 for alpha chain variable domain of TCR clone 282940 (TRAV38-2/DV8, TRAJ34)
CAYRTWNTDKLIF

SEQ ID NO: 565880 - protein, 15 aa, Homo sapiens
  CDR3 for beta chain variable domain of TCR clone 282940 (TRBV9, TRBJ2-1)
CASSLAGSSYNEQFF

SEQ ID NO: 565881 - protein, 13 aa, Homo sapiens
  CDR3 for alpha chain variable domain of TCR clone 282941 (TRAV8-4, TRAJ30)
FAVSVNRDDKIIF

SEQ ID NO: 565882 - protein, 14 aa, Homo sapiens
  CDR3 for beta chain variable domain of TCR clone 282941 (TRBV4-1, TRBJ2-2)
CASSQAVNTGELFF

SEQ ID NO: 565883 - protein, 14 aa, Homo sapiens
  CDR3 for alpha chain variable domain of TCR clone 282942 (TRAV12-2, TRAJ44)
CAVNPAGTASKLTF

SEQ ID NO: 565884 - protein, 13 aa, Homo sapiens
  CDR3 for beta chain variable domain of TCR clone 282942 (TRBV24-1, TRBJ2-1)
CATSAGPYNEQFF

SEQ ID NO: 565885 - protein, 16 aa, Homo sapiens
  CDR3 for alpha chain variable domain of TCR clone 282943 (TRAV8-3, TRAJ13)
CAVGAYPSGGYQKVTF

SEQ ID NO: 565886 - protein, 14 aa, Homo sapiens
  CDR3 for beta chain variable domain of TCR clone 282943 (TRBV12-4, TRBJ1-1)
CASSLGTGGTEAFF

SEQ ID NO: 565887 - protein, 13 aa, Homo sapiens
  CDR3 for alpha chain variable domain of TCR clone 282944 (TRAV9-2, TRAJ53)
CALSGGSNYKLTF

SEQ ID NO: 565888 - protein, 15 aa, Homo sapiens
  CDR3 for beta chain variable domain of TCR clone 282944 (TRBV10-3, TRBJ2-3)
CAISVLGQETDTHYF

SEQ ID NO: 565889 - protein, 14 aa, Homo sapiens
  CDR3 for alpha chain variable domain of TCR clone 282945 (TRAV1-2, TRAJ16)
CAVNRFSDGQKLLF

SEQ ID NO: 565890 - protein, 16 aa, Homo sapiens
  CDR3 for beta chain variable domain of TCR clone 282945 (TRBV29-1, TRBJ2-7)
CSVEVVGTSGRYEQYF

SEQ ID NO: 565891 - protein, 13 aa, Homo sapiens
  CDR3 for alpha chain variable domain of TCR clone 282946 (TRAV20, TRAJ37)
CAGCSSNTGKLIF

SEQ ID NO: 565892 - protein, 11 aa, Homo sapiens
  CDR3 for beta chain variable domain of TCR clone 282946 (TRBV12-4, TRBJ2-3)
CASTATATQYF

SEQ ID NO: 565893 - protein, 14 aa, Homo sapiens
  CDR3 for alpha chain variable domain of TCR clone 282947 (TRAV2, TRAJ37)
CAVDFTSNTGKLIF

SEQ ID NO: 565894 - protein, 14 aa, Homo sapiens
  CDR3 for beta chain variable domain of TCR clone 282947 (TRBV18, TRBJ2-5)
CASAPPGHQETQYF

SEQ ID NO: 565895 - protein, 15 aa, Homo sapiens
  CDR3 for alpha chain variable domain of TCR clone 282948 (TRAV17, TRAJ4)
CATGTWSGGHNKLIF

SEQ ID NO: 565896 - protein, 15 aa, Homo sapiens
  CDR3 for beta chain variable domain of TCR clone 282948 (TRBV20-1, TRBJ2-7)
CSARDRVSGMDEQYF

SEQ ID NO: 565897 - protein, 13 aa, Homo sapiens
  CDR3 for alpha chain variable domain of TCR clone 282949 (TRAV2, TRAJ40)
CPVVTSGTYKYIF

SEQ ID NO: 565898 - protein, 16 aa, Homo sapiens
  CDR3 for beta chain variable domain of TCR clone 282949 (TRBV29-1, TRBJ1-2)
CSVEANRDIANYGYTF

SEQ ID NO: 565899 - protein, 14 aa, Homo sapiens
  CDR3 for alpha chain variable domain of TCR clone 282950 (TRAV1-2, TRAJ8)
CAVREDTGFQKLVF

SEQ ID NO: 565900 - protein, 13 aa, Homo sapiens
  CDR3 for beta chain variable domain of TCR clone 282950 (TRBV7-2, TRBJ1-6)
CASSLVGSSPLHF

SEQ ID NO: 565901 - protein, 15 aa, Homo sapiens
  CDR3 for alpha chain variable domain of TCR clone 282951 (TRAV9-2, TRAJ10)
CALKVLTGGGNKLTF

SEQ ID NO: 565902 - protein, 15 aa, Homo sapiens
  CDR3 for beta chain variable domain of TCR clone 282951 (TRBV20-1, TRBJ2-5)
CSASGTRGGGETQYF

SEQ ID NO: 565903 - protein, 13 aa, Homo sapiens
  CDR3 for alpha chain variable domain of TCR clone 282952 (TRAV13-1, TRAJ6)
CAASRGGSYIPTF

SEQ ID NO: 565904 - protein, 13 aa, Homo sapiens
  CDR3 for beta chain variable domain of TCR clone 282952 (TRBV29-1, TRBJ2-1)
CSVEGGRVNEQFF

SEQ ID NO: 565905 - protein, 14 aa, Homo sapiens
  CDR3 for alpha chain variable domain of TCR clone 282953 (TRAV12-1, TRAJ17)
CVVNYKAAGNKLTF

SEQ ID NO: 565906 - protein, 16 aa, Homo sapiens
  CDR3 for beta chain variable domain of TCR clone 282953 (TRBV20-1, TRBJ2-1)
SASSSGLAGSYNEQFF

SEQ ID NO: 565907 - protein, 14 aa, Homo sapiens
  CDR3 for alpha chain variable domain of TCR clone 282954 (TRAV35, TRAJ33)
CAGSSQDSDHQLIW

SEQ ID NO: 565908 - protein, 15 aa, Homo sapiens
  CDR3 for beta chain variable domain of TCR clone 282954 (TRBV28, TRBJ2-5)
CASSPGQGSIETQYF

SEQ ID NO: 565909 - protein, 17 aa, Homo sapiens
  CDR3 for alpha chain variable domain of TCR clone 282955 (TRAV4, TRAJ33)
CCVLLPRGGDSNYQLIW

SEQ ID NO: 565910 - protein, 13 aa, Homo sapiens
  CDR3 for beta chain variable domain of TCR clone 282955 (TRBV7-9, TRBJ2-5)
CASLSPGQETQYF

SEQ ID NO: 565911 - protein, 15 aa, Homo sapiens
  CDR3 for alpha chain variable domain of TCR clone 282956 (TRAV3, TRAJ3)
CAVRDMSSSASRIIF

SEQ ID NO: 565912 - protein, 14 aa, Homo sapiens
  CDR3 for beta chain variable domain of TCR clone 282956 (TRBV6-6, TRBJ2-7)
CASSIAGGVDEQYF

SEQ ID NO: 565913 - protein, 14 aa, Homo sapiens
  CDR3 for alpha chain variable domain of TCR clone 282957 (TRAV4, TRAJ17)
CLVGDPLVGNKLTF

SEQ ID NO: 565914 - protein, 20 aa, Homo sapiens
  CDR3 for beta chain variable domain of TCR clone 282957 (TRBV20-1, TRBJ2-1)
CSARPYSVARGPSYYNEQFF

SEQ ID NO: 565915 - protein, 12 aa, Homo sapiens
  CDR3 for alpha chain variable domain of TCR clone 282958 (TRAV21, TRAJ33)
CAKMDSNYPLIW

SEQ ID NO: 565916 - protein, 13 aa, Homo sapiens
  CDR3 for beta chain variable domain of TCR clone 282958 (TRBV2, TRBJ2-7)
CQQPNPGGYEQYF

SEQ ID NO: 565917 - protein, 12 aa, Homo sapiens
  CDR3 for alpha chain variable domain of TCR clone 282959 (TRAV12-3, TRAJ17)
CAMTLTGNKLTF

SEQ ID NO: 565918 - protein, 17 aa, Homo sapiens
  CDR3 for beta chain variable domain of TCR clone 282959 (TRBV7-8, TRBJ1-2)
CASSLRPLQGHLYGYSF

SEQ ID NO: 565919 - protein, 14 aa, Homo sapiens
  CDR3 for alpha chain variable domain of TCR clone 282960 (TRAV13-1, TRAJ44)
CAAKATGPASKLTF

SEQ ID NO: 565920 - protein, 17 aa, Homo sapiens
  CDR3 for beta chain variable domain of TCR clone 282960 (TRBV11-2, TRBJ2-1)
CASSLYPPGVEYNEQFF

SEQ ID NO: 565921 - protein, 16 aa, Homo sapiens
  CDR3 for alpha chain variable domain of TCR clone 282961 (TRAV8-1, TRAJ39)
CAVKVPSYNAGNMLTF

SEQ ID NO: 565922 - protein, 15 aa, Homo sapiens
  CDR3 for beta chain variable domain of TCR clone 282961 (TRBV4-1, TRBJ2-3)
CASRSTRAGTDTQYF

SEQ ID NO: 565923 - protein, 14 aa, Homo sapiens
  CDR3 for alpha chain variable domain of TCR clone 282962 (TRAV13-1, TRAJ13)
CAASRVGGYQKVTF

SEQ ID NO: 565924 - protein, 13 aa, Homo sapiens
  CDR3 for beta chain variable domain of TCR clone 282962 (TRBV20-1, TRBJ1-1)
CSARGGGNTEAFF

SEQ ID NO: 565925 - protein, 10 aa, Homo sapiens
  CDR3 for alpha chain variable domain of TCR clone 282963 (TRAV21, TRAJ43)
CAVRIGDMRF

SEQ ID NO: 565926 - protein, 16 aa, Homo sapiens
  CDR3 for beta chain variable domain of TCR clone 282963 (TRBV19, TRBJ2-2)
CASRSPGTGATGELFF

SEQ ID NO: 565927 - protein, 15 aa, Homo sapiens
  CDR3 for alpha chain variable domain of TCR clone 282964 (TRAV26-1, TRAJ22)
CIVRVSFWFCKAIDL

SEQ ID NO: 565928 - protein, 14 aa, Homo sapiens
  CDR3 for beta chain variable domain of TCR clone 282964 (TRBV18, TRBJ2-7)
CASSPRGGAYEQYF

SEQ ID NO: 565929 - protein, 14 aa, Homo sapiens
  CDR3 for alpha chain variable domain of TCR clone 282965 (TRAV8-3, TRAJ10)
CAVGNAGGGNKLTF

SEQ ID NO: 565930 - protein, 13 aa, Homo sapiens
  CDR3 for beta chain variable domain of TCR clone 282965 (TRBV29-1, TRBJ1-1)
CSVGDSRNTEAFF

SEQ ID NO: 565931 - protein, 12 aa, Homo sapiens
  CDR3 for alpha chain variable domain of TCR clone 282966 (TRAV3, TRAJ20)
CAVRDPAYKLSF

SEQ ID NO: 565932 - protein, 14 aa, Homo sapiens
  CDR3 for beta chain variable domain of TCR clone 282966 (TRBV4-2, TRBJ2-1)
CASGLDRAYNEQFF

SEQ ID NO: 565933 - protein, 12 aa, Homo sapiens
  CDR3 for alpha chain variable domain of TCR clone 282967 (TRAV38-1, TRAJ47)
CAFETYGNKLVF

SEQ ID NO: 565934 - protein, 15 aa, Homo sapiens
  CDR3 for beta chain variable domain of TCR clone 282967 (TRBV5-7, TRBJ2-7)
CASSGGRPVPDEQYF

SEQ ID NO: 565935 - protein, 12 aa, Homo sapiens
  CDR3 for alpha chain variable domain of TCR clone 282968 (TRAV3, TRAJ20)
CAVRDGDYKLSF

SEQ ID NO: 565936 - protein, 14 aa, Homo sapiens
  CDR3 for beta chain variable domain of TCR clone 282968 (TRBV19, TRBJ2-1)
CASSKDRGQDEQFF

SEQ ID NO: 565937 - protein, 11 aa, Homo sapiens
  CDR3 for alpha chain variable domain of TCR clone 282969 (TRAV2, TRAJ13)
CASGGYQKVTF

SEQ ID NO: 565938 - protein, 17 aa, Homo sapiens
  CDR3 for beta chain variable domain of TCR clone 282969 (TRBV28, TRBJ2-5)
CASSPPEGDALQETQYF

SEQ ID NO: 565939 - protein, 13 aa, Homo sapiens
  CDR3 for alpha chain variable domain of TCR clone 282970 (TRAV13-1, TRAJ43)
CVASLSNNNYMRF

SEQ ID NO: 565940 - protein, 14 aa, Homo sapiens
  CDR3 for beta chain variable domain of TCR clone 282970 (TRBV5-1, TRBJ2-5)
CAGSLAGKQETQYF

SEQ ID NO: 565941 - protein, 13 aa, Homo sapiens
  CDR3 for alpha chain variable domain of TCR clone 282971 (TRAV21, TRAJ27)
CAARPGNAGKSTF

SEQ ID NO: 565942 - protein, 14 aa, Homo sapiens
  CDR3 for beta chain variable domain of TCR clone 282971 (TRBV20-1, TRBJ2-1)
CSAAGSGEDNEQFF

SEQ ID NO: 565943 - protein, 12 aa, Homo sapiens
  CDR3 for alpha chain variable domain of TCR clone 282972 (TRAV12-1, TRAJ40)
CVVYSGTYKYIF

SEQ ID NO: 565944 - protein, 17 aa, Homo sapiens
  CDR3 for beta chain variable domain of TCR clone 282972 (TRBV11-3, TRBJ1-5)
CTSSPLTGLRGNQPQHF

SEQ ID NO: 565945 - protein, 12 aa, Homo sapiens
  CDR3 for alpha chain variable domain of TCR clone 282973 (TRAV1-1, TRAJ8)
FAGGTGFQKLVF

SEQ ID NO: 565946 - protein, 16 aa, Homo sapiens
  CDR3 for beta chain variable domain of TCR clone 282973 (TRBV12-5, TRBJ2-5)
CASGPRTSGNQETQYF

SEQ ID NO: 565947 - protein, 14 aa, Homo sapiens
  CDR3 for alpha chain variable domain of TCR clone 282974 (TRAV2, TRAJ37)
CAVDFTSNTGKLIF

SEQ ID NO: 565948 - protein, 14 aa, Homo sapiens
  CDR3 for beta chain variable domain of TCR clone 282974 (TRBV20-1, TRBJ2-7)
CSATELAGVGEQYF

SEQ ID NO: 565949 - protein, 15 aa, Homo sapiens
  CDR3 for alpha chain variable domain of TCR clone 282975 (TRAV17, TRAJ13)
CATDAGSGGYQKVTF

SEQ ID NO: 565950 - protein, 17 aa, Homo sapiens
  CDR3 for beta chain variable domain of TCR clone 282975 (TRBV11-2, TRBJ2-1)
CASSLYPPGVEDNEQFF

SEQ ID NO: 565951 - protein, 13 aa, Homo sapiens
  CDR3 for alpha chain variable domain of TCR clone 282976 (TRAV35, TRAJ42)
CAGFPGSQGNLIF

SEQ ID NO: 565952 - protein, 13 aa, Homo sapiens
  CDR3 for beta chain variable domain of TCR clone 282976 (TRBV29-1, TRBJ2-1)
CSVEGRRVNEHFF

SEQ ID NO: 565953 - protein, 15 aa, Homo sapiens
  CDR3 for alpha chain variable domain of TCR clone 282977 (TRAV26-1, TRAJ29)
CIIRVGGSGNTPLVF

SEQ ID NO: 565954 - protein, 15 aa, Homo sapiens
  CDR3 for beta chain variable domain of TCR clone 282977 (TRBV7-9, TRBJ1-5)
CASSQGHQPNQPQHF

SEQ ID NO: 565955 - protein, 15 aa, Homo sapiens
  CDR3 for alpha chain variable domain of TCR clone 282978 (TRAV34, TRAJ38)
CGADFTTGNNRKLIW

SEQ ID NO: 565956 - protein, 16 aa, Homo sapiens
  CDR3 for beta chain variable domain of TCR clone 282978 (TRBV6-1, TRBJ2-3)
CASSEVIGQGTDTQYF

SEQ ID NO: 565957 - protein, 13 aa, Homo sapiens
  CDR3 for alpha chain variable domain of TCR clone 282979 (TRAV35, TRAJ32)
CAGVGGATNKLIF

SEQ ID NO: 565958 - protein, 16 aa, Homo sapiens
  CDR3 for beta chain variable domain of TCR clone 282979 (TRBV28, TRBJ2-3)
CASSLYQRVSTDTQYF

SEQ ID NO: 565959 - protein, 12 aa, Homo sapiens
  CDR3 for alpha chain variable domain of TCR clone 282980 (TRAV13-1, TRAJ21)
CAAFFNFNKFYF

SEQ ID NO: 565960 - protein, 14 aa, Homo sapiens
  CDR3 for beta chain variable domain of TCR clone 282980 (TRBV4-1, TRBJ2-7)
CASRLTSGSYEQYV

SEQ ID NO: 565961 - protein, 15 aa, Homo sapiens
  CDR3 for alpha chain variable domain of TCR clone 282981 (TRAV26-1, TRAJ40)
CIVRVTTSGTYKFIF

SEQ ID NO: 565962 - protein, 12 aa, Homo sapiens
  CDR3 for beta chain variable domain of TCR clone 282981 (TRBV7-9, TRBJ2-7)
CASSIKREEQYF

SEQ ID NO: 565963 - protein, 13 aa, Homo sapiens
  CDR3 for alpha chain variable domain of TCR clone 282982 (TRAV21, TRAJ27)
CAARPGNAGKSTF

SEQ ID NO: 565964 - protein, 14 aa, Homo sapiens
  CDR3 for beta chain variable domain of TCR clone 282982 (TRBV20-1, TRBJ1-5)
CSARDDRGNQPQHF

SEQ ID NO: 565965 - protein, 10 aa, Homo sapiens
  CDR3 for alpha chain variable domain of TCR clone 282983 (TRAV36/DV7, TRAJ49)
CALTGNQFYF

SEQ ID NO: 565966 - protein, 12 aa, Homo sapiens
  CDR3 for beta chain variable domain of TCR clone 282983 (TRBV14, TRBJ2-5)
CASSQLKETQYF

SEQ ID NO: 565967 - protein, 17 aa, Homo sapiens
  CDR3 for alpha chain variable domain of TCR clone 282984 (TRAV3, TRAJ6)
RAVRDGPRAGGSDIPTF

SEQ ID NO: 565968 - protein, 13 aa, Homo sapiens
  CDR3 for beta chain variable domain of TCR clone 282984 (TRBV20-1, TRBJ1-6)
CSAPLGVGSPLHF

SEQ ID NO: 565969 - protein, 11 aa, Homo sapiens
  CDR3 for alpha chain variable domain of TCR clone 282985 (TRAV12-1, TRAJ8)
CVVTGFQKLVF

SEQ ID NO: 565970 - protein, 15 aa, Homo sapiens
  CDR3 for beta chain variable domain of TCR clone 282985 (TRBV28, TRBJ2-2)
CASRLQGVGTGELFF

SEQ ID NO: 565971 - protein, 15 aa, Homo sapiens
  CDR3 for alpha chain variable domain of TCR clone 282986 (TRAV8-3, TRAJ27)
CAVGPSKTNAGKSTL

SEQ ID NO: 565972 - protein, 10 aa, Homo sapiens
  CDR3 for beta chain variable domain of TCR clone 282986 (TRBV6-6, TRBJ2-1)
SDSSYNEQFF

SEQ ID NO: 565973 - protein, 13 aa, Homo sapiens
  CDR3 for alpha chain variable domain of TCR clone 282987 (TRAV2, TRAJ13)
CAVESGGDQKVTF

SEQ ID NO: 565974 - protein, 13 aa, Homo sapiens
  CDR3 for beta chain variable domain of TCR clone 282987 (TRBV7-2, TRBJ1-1)
CASNLKGAKVAFF

SEQ ID NO: 565975 - protein, 15 aa, Homo sapiens
  CDR3 for alpha chain variable domain of TCR clone 282988 (TRAV8-4, TRAJ36)
CAGRKSWTGANNLFF

SEQ ID NO: 565976 - protein, 17 aa, Homo sapiens
  CDR3 for beta chain variable domain of TCR clone 282988 (TRBV3-1, TRBJ2-2)
CASSQDSQGPNTGELFF

SEQ ID NO: 565977 - protein, 17 aa, Homo sapiens
  CDR3 for alpha chain variable domain of TCR clone 282989 (TRAV14/DV4, TRAJ10)
CAMSEGRTTGGGNKLTF

SEQ ID NO: 565978 - protein, 14 aa, Homo sapiens
  CDR3 for beta chain variable domain of TCR clone 282989 (TRBV3-1, TRBJ1-5)
CASSPLWSNQPQHF

SEQ ID NO: 565979 - protein, 14 aa, Homo sapiens
  CDR3 for alpha chain variable domain of TCR clone 282990 (TRAV1-2, TRAJ28)
CVARSGAGSYQLTF

SEQ ID NO: 565980 - protein, 12 aa, Homo sapiens
  CDR3 for beta chain variable domain of TCR clone 282990 (TRBV28, TRBJ2-7)
CASSFSSYEQYF

SEQ ID NO: 565981 - protein, 14 aa, Homo sapiens
  CDR3 for alpha chain variable domain of TCR clone 282991 (TRAV12-3, TRAJ10)
SHLPLTGGGNKLSF

SEQ ID NO: 565982 - protein, 13 aa, Homo sapiens
  CDR3 for beta chain variable domain of TCR clone 282991 (TRBV20-1, TRBJ2-5)
CSARGDYQETQYF

SEQ ID NO: 565983 - protein, 14 aa, Homo sapiens
  CDR3 for alpha chain variable domain of TCR clone 282992 (TRAV1-2, TRAJ33)
CAVRAPDSNYQLIW

SEQ ID NO: 565984 - protein, 14 aa, Homo sapiens
  CDR3 for beta chain variable domain of TCR clone 282992 (TRBV19, TRBJ2-1)
CASPTFVLSGEQFF

SEQ ID NO: 565985 - protein, 13 aa, Homo sapiens
  CDR3 for alpha chain variable domain of TCR clone 282993 (TRAV21, TRAJ27)
CAARPGTAGKSTF

SEQ ID NO: 565986 - protein, 13 aa, Homo sapiens
  CDR3 for beta chain variable domain of TCR clone 282993 (TRBV7-6, TRBJ2-1)
CQQLGGGADEQFF

SEQ ID NO: 565987 - protein, 14 aa, Homo sapiens
  CDR3 for alpha chain variable domain of TCR clone 282994 (TRAV17, TRAJ54)
CATDDNQGAQKLLF

SEQ ID NO: 565988 - protein, 12 aa, Homo sapiens
  CDR3 for beta chain variable domain of TCR clone 282994 (TRBV7-9, TRBJ2-7)
CASSIKREEQYF

SEQ ID NO: 565989 - protein, 12 aa, Homo sapiens
  CDR3 for alpha chain variable domain of TCR clone 282995 (TRAV3, TRAJ20)
CAVRAGDYKLSF

SEQ ID NO: 565990 - protein, 15 aa, Homo sapiens
  CDR3 for beta chain variable domain of TCR clone 282995 (TRBV7-2, TRBJ2-7)
CASSLALGSAYEQYF

SEQ ID NO: 565991 - protein, 14 aa, Homo sapiens
  CDR3 for alpha chain variable domain of TCR clone 282996 (TRAV23/DV6, TRAJ8)
CAASKNTGFQKLVF

SEQ ID NO: 565992 - protein, 16 aa, Homo sapiens
  CDR3 for beta chain variable domain of TCR clone 282996 (TRBV4-1, TRBJ2-6)
CASSRVGDPEANVLTF

SEQ ID NO: 565993 - protein, 12 aa, Homo sapiens
  CDR3 for alpha chain variable domain of TCR clone 282997 (TRAV2, TRAJ33)
CAVPDSNYQLIW

SEQ ID NO: 565994 - protein, 13 aa, Homo sapiens
  CDR3 for beta chain variable domain of TCR clone 282997 (TRBV7-9, TRBJ1-2)
CASSLKQNYGYTF

SEQ ID NO: 565995 - protein, 15 aa, Homo sapiens
  CDR3 for alpha chain variable domain of TCR clone 282998 (TRAV26-1, TRAJ29)
CIVRVEGSGNTPLVF

SEQ ID NO: 565996 - protein, 17 aa, Homo sapiens
  CDR3 for beta chain variable domain of TCR clone 282998 (TRBV4-3, TRBJ2-1)
CASSQELAIVSSNEQFF

SEQ ID NO: 565997 - protein, 11 aa, Homo sapiens
  CDR3 for alpha chain variable domain of TCR clone 282999 (TRAV2, TRAJ13)
CASGCYQKVTF

SEQ ID NO: 565998 - protein, 17 aa, Homo sapiens
  CDR3 for beta chain variable domain of TCR clone 282999 (TRBV20-1, TRBJ2-2)
CSASGSGQGGLTGELFF

SEQ ID NO: 565999 - protein, 16 aa, Homo sapiens
  CDR3 for alpha chain variable domain of TCR clone 283000 (TRAV26-1, TRAJ37)
CIVRGDGSGNTGKLTF

SEQ ID NO: 566000 - protein, 17 aa, Homo sapiens
  CDR3 for beta chain variable domain of TCR clone 283000 (TRBV4-1, TRBJ2-7)
CSSSRDPLGVRGGEQYF

SEQ ID NO: 566001 - protein, 13 aa, Homo sapiens
  CDR3 for alpha chain variable domain of TCR clone 283001 (TRAV2, TRAJ15)
CGVASQAGTALIF

SEQ ID NO: 566002 - protein, 17 aa, Homo sapiens
  CDR3 for beta chain variable domain of TCR clone 283001 (TRBV20-1, TRBJ2-2)
CSASGSGQGGLTGELFF

SEQ ID NO: 566003 - protein, 11 aa, Homo sapiens
  CDR3 for alpha chain variable domain of TCR clone 283002 (TRAV1-1, TRAJ23)
CAVRQGGKLIF

SEQ ID NO: 566004 - protein, 16 aa, Homo sapiens
  CDR3 for beta chain variable domain of TCR clone 283002 (TRBV29-1, TRBJ2-7)
CSVEDAEDGTAYEQYF

SEQ ID NO: 566005 - protein, 18 aa, Homo sapiens
  CDR3 for alpha chain variable domain of TCR clone 283003 (TRAV13-1, TRAJ52)
CAAKNPNAGGTSYGKLTV

SEQ ID NO: 566006 - protein, 18 aa, Homo sapiens
  CDR3 for beta chain variable domain of TCR clone 283003 (TRBV12-4, TRBJ2-4)
CASSRTGAVDVAKNIQYF

SEQ ID NO: 566007 - protein, 12 aa, Homo sapiens
  CDR3 for alpha chain variable domain of TCR clone 283004 (TRAV13-1, TRAJ21)
CAAKEGFNKFYF

SEQ ID NO: 566008 - protein, 15 aa, Homo sapiens
  CDR3 for beta chain variable domain of TCR clone 283004 (TRBV20-1, TRBJ2-7)
CSARARVSGMDEQYF

SEQ ID NO: 566009 - protein, 11 aa, Homo sapiens
  CDR3 for alpha chain variable domain of TCR clone 283005 (TRAV12-3, TRAJ43)
CAMSVSNDMRF

SEQ ID NO: 566010 - protein, 14 aa, Homo sapiens
  CDR3 for beta chain variable domain of TCR clone 283005 (TRBV20-1, TRBJ1-1)
SAVIHLGGGTEAFF

SEQ ID NO: 566011 - protein, 16 aa, Homo sapiens
  CDR3 for alpha chain variable domain of TCR clone 283006 (TRAV3, TRAJ21)
CAVRDIERGNFNKFYF

SEQ ID NO: 566012 - protein, 16 aa, Homo sapiens
  CDR3 for beta chain variable domain of TCR clone 283006 (TRBV12-4, TRBJ1-5)
CASSRAVGGSNQHQHF

SEQ ID NO: 566013 - protein, 15 aa, Homo sapiens
  CDR3 for alpha chain variable domain of TCR clone 283007 (TRAV25, TRAJ52)
CAGCPGGTSYGKLTF

SEQ ID NO: 566014 - protein, 17 aa, Homo sapiens
  CDR3 for beta chain variable domain of TCR clone 283007 (TRBV7-8, TRBJ2-6)
CASSAGKGGAGANVLTF

SEQ ID NO: 566015 - protein, 12 aa, Homo sapiens
  CDR3 for alpha chain variable domain of TCR clone 283008 (TRAV12-2, TRAJ8)
CAVNTGFQKLVF

SEQ ID NO: 566016 - protein, 14 aa, Homo sapiens
  CDR3 for beta chain variable domain of TCR clone 283008 (TRBV12-5, TRBJ2-5)
CASGSRTHQETHYF

SEQ ID NO: 566017 - protein, 13 aa, Homo sapiens
  CDR3 for alpha chain variable domain of TCR clone 283009 (TRAV17, TRAJ5)
CAPMDTGRRALTF

SEQ ID NO: 566018 - protein, 15 aa, Homo sapiens
  CDR3 for beta chain variable domain of TCR clone 283009 (TRBV20-1, TRBJ2-7)
CSARGPLAGGREQYF

SEQ ID NO: 566019 - protein, 14 aa, Homo sapiens
  CDR3 for alpha chain variable domain of TCR clone 283010 (TRAV14/DV4, TRAJ42)
CTRGSLRSQGNLIF

SEQ ID NO: 566020 - protein, 16 aa, Homo sapiens
  CDR3 for beta chain variable domain of TCR clone 283010 (TRBV19, TRBJ2-1)
CASSKAGPSSYNEQFF

SEQ ID NO: 566021 - protein, 13 aa, Homo sapiens
  CDR3 for alpha chain variable domain of TCR clone 283011 (TRAV23/DV6, TRAJ47)
CAASMTRGNKLVF

SEQ ID NO: 566022 - protein, 15 aa, Homo sapiens
  CDR3 for beta chain variable domain of TCR clone 283011 (TRBV24-1, TRBJ2-4)
CATSDPRDRANIQYF

SEQ ID NO: 566023 - protein, 14 aa, Homo sapiens
  CDR3 for alpha chain variable domain of TCR clone 283012 (TRAV8-3, TRAJ39)
CAVGANNAGNMLTF

SEQ ID NO: 566024 - protein, 11 aa, Homo sapiens
  CDR3 for beta chain variable domain of TCR clone 283012 (TRBV6-3, TRBJ2-3)
CATGQADTQYF

SEQ ID NO: 566025 - protein, 14 aa, Homo sapiens
  CDR3 for alpha chain variable domain of TCR clone 283013 (TRAV13-1, TRAJ39)
CAASKNNEGNMLTF

SEQ ID NO: 566026 - protein, 15 aa, Homo sapiens
  CDR3 for beta chain variable domain of TCR clone 283013 (TRBV7-9, TRBJ1-6)
CASSSPGRGNSPLHF

SEQ ID NO: 566027 - protein, 13 aa, Homo sapiens
  CDR3 for alpha chain variable domain of TCR clone 283014 (TRAV8-3, TRAJ48)
CAVVPFGNEKLTF

SEQ ID NO: 566028 - protein, 13 aa, Homo sapiens
  CDR3 for beta chain variable domain of TCR clone 283014 (TRBV7-9, TRBJ2-7)
CASSFAGAYEQYF

SEQ ID NO: 566029 - protein, 16 aa, Homo sapiens
  CDR3 for alpha chain variable domain of TCR clone 283015 (TRAV16, TRAJ52)
CALSAAGGTSYGTLTF

SEQ ID NO: 566030 - protein, 12 aa, Homo sapiens
  CDR3 for beta chain variable domain of TCR clone 283015 (TRBV12-4, TRBJ1-3)
CASSFSGNTIYF

SEQ ID NO: 566031 - protein, 14 aa, Homo sapiens
  CDR3 for alpha chain variable domain of TCR clone 283016 (TRAV16, TRAJ33)
CALSAMDSNYQLIW

SEQ ID NO: 566032 - protein, 15 aa, Homo sapiens
  CDR3 for beta chain variable domain of TCR clone 283016 (TRBV7-2, TRBJ1-1)
CASSFAGDRDTEAFF

SEQ ID NO: 566033 - protein, 16 aa, Homo sapiens
  CDR3 for alpha chain variable domain of TCR clone 283017 (TRAV20, TRAJ53)
FAVRRGSGGSNYKLTF

SEQ ID NO: 566034 - protein, 12 aa, Homo sapiens
  CDR3 for beta chain variable domain of TCR clone 283017 (TRBV29-1, TRBJ2-3)
CSVVLGADTQYF

SEQ ID NO: 566035 - protein, 15 aa, Homo sapiens
  CDR3 for alpha chain variable domain of TCR clone 283018 (TRAV35, TRAJ58)
CAGRRQETSGSRLTF

SEQ ID NO: 566036 - protein, 15 aa, Homo sapiens
  CDR3 for beta chain variable domain of TCR clone 283018 (TRBV28, TRBJ2-5)
CASSPPWSYQETQYF

SEQ ID NO: 566037 - protein, 13 aa, Homo sapiens
  CDR3 for alpha chain variable domain of TCR clone 283019 (TRAV2, TRAJ16)
CAVERPDGQKVLF

SEQ ID NO: 566038 - protein, 15 aa, Homo sapiens
  CDR3 for beta chain variable domain of TCR clone 283019 (TRBV20-1, TRBJ2-5)
CSAIKGQGSQETQYF

SEQ ID NO: 566039 - protein, 11 aa, Homo sapiens
  CDR3 for alpha chain variable domain of TCR clone 283020 (TRAV1-1, TRAJ23)
CAVRQGGKLIL

SEQ ID NO: 566040 - protein, 20 aa, Homo sapiens
  CDR3 for beta chain variable domain of TCR clone 283020 (TRBV7-8, TRBJ2-2)
CASSHLFPGPTIHITGELFF

SEQ ID NO: 566041 - protein, 16 aa, Homo sapiens
  CDR3 for alpha chain variable domain of TCR clone 283021 (TRAV30, TRAJ24)
CGTEIVDADSWGKFQF

SEQ ID NO: 566042 - protein, 16 aa, Homo sapiens
  CDR3 for beta chain variable domain of TCR clone 283021 (TRBV12-5, TRBJ2-5)
CASGTRTSGNQETQYF

SEQ ID NO: 566043 - protein, 14 aa, Homo sapiens
  CDR3 for alpha chain variable domain of TCR clone 283022 (TRAV1-2, TRAJ16)
CVVNRFSDGQKLLF

SEQ ID NO: 566044 - protein, 15 aa, Homo sapiens
  CDR3 for beta chain variable domain of TCR clone 283022 (TRBV9, TRBJ1-6)
CASSVAGTGDSPLLF

SEQ ID NO: 566045 - protein, 11 aa, Homo sapiens
  CDR3 for alpha chain variable domain of TCR clone 283023 (TRAV12-3, TRAJ43)
CAMSVSNDMRF

SEQ ID NO: 566046 - protein, 15 aa, Homo sapiens
  CDR3 for beta chain variable domain of TCR clone 283023 (TRBV28, TRBJ2-7)
CASSPGGRGSYEQYF

SEQ ID NO: 566047 - protein, 13 aa, Homo sapiens
  CDR3 for alpha chain variable domain of TCR clone 283024 (TRAV8-1, TRAJ28)
CAVSGAGSDQLTF

SEQ ID NO: 566048 - protein, 14 aa, Homo sapiens
  CDR3 for beta chain variable domain of TCR clone 283024 (TRBV19, TRBJ2-5)
CASSMTGQQETQYF

SEQ ID NO: 566049 - protein, 13 aa, Homo sapiens
  CDR3 for alpha chain variable domain of TCR clone 283025 (TRAV20, TRAJ21)
CAVEGYNFNKFYF

SEQ ID NO: 566050 - protein, 14 aa, Homo sapiens
  CDR3 for beta chain variable domain of TCR clone 283025 (TRBV12-5, TRBJ2-5)
CASGSRTHQETQNF

SEQ ID NO: 566051 - protein, 14 aa, Homo sapiens
  CDR3 for alpha chain variable domain of TCR clone 283026 (TRAV12-3, TRAJ10)
SHLPLTGGGNKLTF

SEQ ID NO: 566052 - protein, 13 aa, Homo sapiens
  CDR3 for beta chain variable domain of TCR clone 283026 (TRBV9, TRBJ2-1)
CASSPSGGNGQFF

SEQ ID NO: 566053 - protein, 13 aa, Homo sapiens
  CDR3 for alpha chain variable domain of TCR clone 283027 (TRAV8-3, TRAJ48)
CFGCNFGNEKLTF

SEQ ID NO: 566054 - protein, 12 aa, Homo sapiens
  CDR3 for beta chain variable domain of TCR clone 283027 (TRBV7-2, TRBJ2-5)
CASSQYQETQYF

SEQ ID NO: 566055 - protein, 13 aa, Homo sapiens
  CDR3 for alpha chain variable domain of TCR clone 283028 (TRAV26-1, TRAJ30)
CIVRVESNDKIIF

SEQ ID NO: 566056 - protein, 17 aa, Homo sapiens
  CDR3 for beta chain variable domain of TCR clone 283028 (TRBV13, TRBJ2-3)
CASSLTRVAGGRNTQYF

SEQ ID NO: 566057 - protein, 15 aa, Homo sapiens
  CDR3 for alpha chain variable domain of TCR clone 283029 (TRAV20, TRAJ42)
CAVQATRGSQGNLIF

SEQ ID NO: 566058 - protein, 15 aa, Homo sapiens
  CDR3 for beta chain variable domain of TCR clone 283029 (TRBV28, TRBJ2-1)
CASRVGLDEYNEQFF

SEQ ID NO: 566059 - protein, 12 aa, Homo sapiens
  CDR3 for alpha chain variable domain of TCR clone 283030 (TRAV12-3, TRAJ40)
CAVSSGTYEYIF

SEQ ID NO: 566060 - protein, 15 aa, Homo sapiens
  CDR3 for beta chain variable domain of TCR clone 283030 (TRBV7-9, TRBJ2-7)
CASSPGGGLTYEQYF

SEQ ID NO: 566061 - protein, 15 aa, Homo sapiens
  CDR3 for alpha chain variable domain of TCR clone 283031 (TRAV26-1, TRAJ44)
CIVRANTGTASKLTF

SEQ ID NO: 566062 - protein, 16 aa, Homo sapiens
  CDR3 for beta chain variable domain of TCR clone 283031 (TRBV7-7, TRBJ2-1)
CSSSLASGTSYNGQFF

SEQ ID NO: 566063 - protein, 16 aa, Homo sapiens
  CDR3 for alpha chain variable domain of TCR clone 283032 (TRAV16, TRAJ4)
CAGSRMFSGGYNKLIF

SEQ ID NO: 566064 - protein, 16 aa, Homo sapiens
  CDR3 for beta chain variable domain of TCR clone 283032 (TRBV24-1, TRBJ2-3)
CATSDPGTGATDTQYF

SEQ ID NO: 566065 - protein, 15 aa, Homo sapiens
  CDR3 for alpha chain variable domain of TCR clone 283033 (TRAV26-2, TRAJ39)
CSLRGNNNGRNMLTF

SEQ ID NO: 566066 - protein, 15 aa, Homo sapiens
  CDR3 for beta chain variable domain of TCR clone 283033 (TRBV5-4, TRBJ1-1)
CASSSLGWANTEAFF

SEQ ID NO: 566067 - protein, 14 aa, Homo sapiens
  CDR3 for alpha chain variable domain of TCR clone 283034 (TRAV12-3, TRAJ53)
CGATSGSSNYKLTF

SEQ ID NO: 566068 - protein, 13 aa, Homo sapiens
  CDR3 for beta chain variable domain of TCR clone 283034 (TRBV19, TRBJ1-5)
CASSTQDGQPQHF

SEQ ID NO: 566069 - protein, 11 aa, Homo sapiens
  CDR3 for alpha chain variable domain of TCR clone 283035 (TRAV16, TRAJ31)
CALFNNARLMF

SEQ ID NO: 566070 - protein, 17 aa, Homo sapiens
  CDR3 for beta chain variable domain of TCR clone 283035 (TRBV20-1, TRBJ2-1)
CSASSSGLAGSYNEQFF

SEQ ID NO: 566071 - protein, 16 aa, Homo sapiens
  CDR3 for alpha chain variable domain of TCR clone 283036 (TRAV30, TRAJ24)
SGTEIVDADSWGKFQF

SEQ ID NO: 566072 - protein, 13 aa, Homo sapiens
  CDR3 for beta chain variable domain of TCR clone 283036 (TRBV14, TRBJ1-2)
CASSEDRRYGYTF

SEQ ID NO: 566073 - protein, 12 aa, Homo sapiens
  CDR3 for alpha chain variable domain of TCR clone 283037 (TRAV13-1, TRAJ21)
CAVKEGFNKFYF

SEQ ID NO: 566074 - protein, 13 aa, Homo sapiens
  CDR3 for beta chain variable domain of TCR clone 283037 (TRBV19, TRBJ2-7)
CASSPRQSYEQYF

SEQ ID NO: 566075 - protein, 15 aa, Homo sapiens
  CDR3 for alpha chain variable domain of TCR clone 283038 (TRAV27, TRAJ38)
CAARRNAGNNRKLIW

SEQ ID NO: 566076 - protein, 15 aa, Homo sapiens
  CDR3 for beta chain variable domain of TCR clone 283038 (TRBV2, TRBJ2-3)
CASGDFEKATDTQYF

SEQ ID NO: 566077 - protein, 16 aa, Homo sapiens
  CDR3 for alpha chain variable domain of TCR clone 283039 (TRAV16, TRAJ4)
CALSRMCSGCYNKLIF

SEQ ID NO: 566078 - protein, 16 aa, Homo sapiens
  CDR3 for beta chain variable domain of TCR clone 283039 (TRBV24-1, TRBJ2-3)
CATSDPGTGATDTQYF

SEQ ID NO: 566079 - protein, 12 aa, Homo sapiens
  CDR3 for alpha chain variable domain of TCR clone 283040 (TRAV21, TRAJ23)
CAVGPQGGKLIF

SEQ ID NO: 566080 - protein, 15 aa, Homo sapiens
  CDR3 for beta chain variable domain of TCR clone 283040 (TRBV20-1, TRBJ2-7)
CSARDPTEVGHEQYV

SEQ ID NO: 566081 - protein, 14 aa, Homo sapiens
  CDR3 for alpha chain variable domain of TCR clone 283041 (TRAV12-1, TRAJ23)
CVVAGYNQGGKLIF

SEQ ID NO: 566082 - protein, 13 aa, Homo sapiens
  CDR3 for beta chain variable domain of TCR clone 283041 (TRBV6-6, TRBJ2-3)
CASSQGGRDTQYF

SEQ ID NO: 566083 - protein, 16 aa, Homo sapiens
  CDR3 for alpha chain variable domain of TCR clone 283042 (TRAV4, TRAJ22)
CLVGDLYSGSARKLTF

SEQ ID NO: 566084 - protein, 14 aa, Homo sapiens
  CDR3 for beta chain variable domain of TCR clone 283042 (TRBV7-2, TRBJ2-7)
CASRSQGAAYEQYF

SEQ ID NO: 566085 - protein, 14 aa, Homo sapiens
  CDR3 for alpha chain variable domain of TCR clone 283043 (TRAV1-2, TRAJ16)
CAVNLFSYGQKLLF

SEQ ID NO: 566086 - protein, 13 aa, Homo sapiens
  CDR3 for beta chain variable domain of TCR clone 283043 (TRBV12-5, TRBJ2-3)
CASGDRQSDTQYF

SEQ ID NO: 566087 - protein, 13 aa, Homo sapiens
  CDR3 for alpha chain variable domain of TCR clone 283044 (TRAV1-2, TRAJ9)
CAALNTGGFRTIF

SEQ ID NO: 566088 - protein, 13 aa, Homo sapiens
  CDR3 for beta chain variable domain of TCR clone 283044 (TRBV15, TRBJ1-6)
CATSGGPNSPLHF

SEQ ID NO: 566089 - protein, 15 aa, Homo sapiens
  CDR3 for alpha chain variable domain of TCR clone 283045 (TRAV3, TRAJ20)
CAVRDSRSNDSKLSF

SEQ ID NO: 566090 - protein, 14 aa, Homo sapiens
  CDR3 for beta chain variable domain of TCR clone 283045 (TRBV20-1, TRBJ2-7)
CSARRGNEIYEQYF

SEQ ID NO: 566091 - protein, 10 aa, Homo sapiens
  CDR3 for alpha chain variable domain of TCR clone 283046 (TRAV30, TRAJ16)
CGTGGQKRLF

SEQ ID NO: 566092 - protein, 13 aa, Homo sapiens
  CDR3 for beta chain variable domain of TCR clone 283046 (TRBV7-9, TRBJ1-2)
CASSLKQNYGYTF

SEQ ID NO: 566093 - protein, 14 aa, Homo sapiens
  CDR3 for alpha chain variable domain of TCR clone 283047 (TRAV26-1, TRAJ38)
CIADNAGNNRKLIW

SEQ ID NO: 566094 - protein, 14 aa, Homo sapiens
  CDR3 for beta chain variable domain of TCR clone 283047 (TRBV27, TRBJ2-5)
CASSSLKGWETQYF

SEQ ID NO: 566095 - protein, 13 aa, Homo sapiens
  CDR3 for alpha chain variable domain of TCR clone 283048 (TRAV26-1, TRAJ33)
CIVRVEGNYQLIS

SEQ ID NO: 566096 - protein, 16 aa, Homo sapiens
  CDR3 for beta chain variable domain of TCR clone 283048 (TRBV15, TRBJ2-7)
CATSRDRGRRRGEQYF

SEQ ID NO: 566097 - protein, 14 aa, Homo sapiens
  CDR3 for alpha chain variable domain of TCR clone 283049 (TRAV35, TRAJ33)
CWPRGRGSNYQLIW

SEQ ID NO: 566098 - protein, 11 aa, Homo sapiens
  CDR3 for beta chain variable domain of TCR clone 283049 (TRBV10-3, TRBJ2-7)
CAISEGLEQYF

SEQ ID NO: 566099 - protein, 16 aa, Homo sapiens
  CDR3 for alpha chain variable domain of TCR clone 283050 (TRAV12-3, TRAJ53)
CAMSPGSGGSHYKMTF

SEQ ID NO: 566100 - protein, 11 aa, Homo sapiens
  CDR3 for beta chain variable domain of TCR clone 283050 (TRBV29-1, TRBJ2-5)
CSEDRTGTQYF

SEQ ID NO: 566101 - protein, 18 aa, Homo sapiens
  CDR3 for alpha chain variable domain of TCR clone 283051 (TRAV21, TRAJ52)
CAVRPSPAGGTSYGNLTF

SEQ ID NO: 566102 - protein, 13 aa, Homo sapiens
  CDR3 for beta chain variable domain of TCR clone 283051 (TRBV12-4, TRBJ1-1)
CASSPGTGFEAFF

SEQ ID NO: 566103 - protein, 11 aa, Homo sapiens
  CDR3 for alpha chain variable domain of TCR clone 283052 (TRAV2, TRAJ13)
CASGGYQKVTF

SEQ ID NO: 566104 - protein, 15 aa, Homo sapiens
  CDR3 for beta chain variable domain of TCR clone 283052 (TRBV6-3, TRBJ2-3)
RLIRYSVGQADTQYF

SEQ ID NO: 566105 - protein, 13 aa, Homo sapiens
  CDR3 for alpha chain variable domain of TCR clone 283053 (TRAV12-3, TRAJ33)
CAISVNSNYQLIW

SEQ ID NO: 566106 - protein, 13 aa, Homo sapiens
  CDR3 for beta chain variable domain of TCR clone 283053 (TRBV4-1, TRBJ2-2)
CASSQENTGELFF

SEQ ID NO: 566107 - protein, 12 aa, Homo sapiens
  CDR3 for alpha chain variable domain of TCR clone 283054 (TRAV13-2, TRAJ23)
CAECHRGGKLIF

SEQ ID NO: 566108 - protein, 12 aa, Homo sapiens
  CDR3 for beta chain variable domain of TCR clone 283054 (TRBV11-2, TRBJ2-2)
CASSLGGGELFF

SEQ ID NO: 566109 - protein, 14 aa, Homo sapiens
  CDR3 for alpha chain variable domain of TCR clone 283055 (TRAV13-2, TRAJ15)
CAENPNQSGTALIF

SEQ ID NO: 566110 - protein, 16 aa, Homo sapiens
  CDR3 for beta chain variable domain of TCR clone 283055 (TRBV12-4, TRBJ1-2)
CASSPTATGKTRGYTF

SEQ ID NO: 566111 - protein, 14 aa, Homo sapiens
  CDR3 for alpha chain variable domain of TCR clone 283056 (TRAV20, TRAJ42)
CAVQAGGSQGNLIF

SEQ ID NO: 566112 - protein, 14 aa, Homo sapiens
  CDR3 for beta chain variable domain of TCR clone 283056 (TRBV28, TRBJ1-2)
CASRIQGANDGYSF

SEQ ID NO: 566113 - protein, 13 aa, Homo sapiens
  CDR3 for alpha chain variable domain of TCR clone 283057 (TRAV21, TRAJ57)
CAVTQGGSEKLVF

SEQ ID NO: 566114 - protein, 12 aa, Homo sapiens
  CDR3 for beta chain variable domain of TCR clone 283057 (TRBV18, TRBJ2-1)
CASSPGTSEGFF

SEQ ID NO: 566115 - protein, 15 aa, Homo sapiens
  CDR3 for alpha chain variable domain of TCR clone 283058 (TRAV3, TRAJ4)
CAVRDGTGGYNKLIF

SEQ ID NO: 566116 - protein, 16 aa, Homo sapiens
  CDR3 for beta chain variable domain of TCR clone 283058 (TRBV27, TRBJ2-2)
CASSSSGVANTGEVFF

SEQ ID NO: 566117 - protein, 14 aa, Homo sapiens
  CDR3 for alpha chain variable domain of TCR clone 283059 (TRAV38-1, TRAJ45)
CAYYSGGGAVGLTF

SEQ ID NO: 566118 - protein, 15 aa, Homo sapiens
  CDR3 for beta chain variable domain of TCR clone 283059 (TRBV7-9, TRBJ1-6)
CASSSPGRGNSPLHF

SEQ ID NO: 566119 - protein, 11 aa, Homo sapiens
  CDR3 for alpha chain variable domain of TCR clone 283060 (TRAV27, TRAJ47)
CRSNQGNRLVF

SEQ ID NO: 566120 - protein, 16 aa, Homo sapiens
  CDR3 for beta chain variable domain of TCR clone 283060 (TRBV7-9, TRBJ2-1)
CASSDVAGGSYNEQFF

SEQ ID NO: 566121 - protein, 16 aa, Homo sapiens
  CDR3 for alpha chain variable domain of TCR clone 283061 (TRAV26-1, TRAJ36)
CIVRAIGRSGANNLFF

SEQ ID NO: 566122 - protein, 14 aa, Homo sapiens
  CDR3 for beta chain variable domain of TCR clone 283061 (TRBV25-1, TRBJ2-1)
CASSKTGGYNKQFF

SEQ ID NO: 566123 - protein, 12 aa, Homo sapiens
  CDR3 for alpha chain variable domain of TCR clone 283062 (TRAV36/DV7, TRAJ37)
CACYSNTGKLIF

SEQ ID NO: 566124 - protein, 13 aa, Homo sapiens
  CDR3 for beta chain variable domain of TCR clone 283062 (TRBV10-3, TRBJ2-7)
CASKLAVNYEQYF

SEQ ID NO: 566125 - protein, 13 aa, Homo sapiens
  CDR3 for alpha chain variable domain of TCR clone 283063 (TRAV3, TRAJ9)
CAFWNTGGFKTIF

SEQ ID NO: 566126 - protein, 16 aa, Homo sapiens
  CDR3 for beta chain variable domain of TCR clone 283063 (TRBV4-2, TRBJ2-5)
CASSRELVGSQETQYF

SEQ ID NO: 566127 - protein, 18 aa, Homo sapiens
  CDR3 for alpha chain variable domain of TCR clone 283064 (TRAV13-1, TRAJ52)
CAAKNPNSGGTSYGKLTF

SEQ ID NO: 566128 - protein, 15 aa, Homo sapiens
  CDR3 for beta chain variable domain of TCR clone 283064 (TRBV11-3, TRBJ2-3)
CASLKDGREGDTQYF

SEQ ID NO: 566129 - protein, 15 aa, Homo sapiens
  CDR3 for alpha chain variable domain of TCR clone 283065 (TRAV13-1, TRAJ42)
CAASIAGGSQGNLIF

SEQ ID NO: 566130 - protein, 15 aa, Homo sapiens
  CDR3 for beta chain variable domain of TCR clone 283065 (TRBV19, TRBJ2-1)
CASSIVRGEGHEQFF

SEQ ID NO: 566131 - protein, 13 aa, Homo sapiens
  CDR3 for alpha chain variable domain of TCR clone 283066 (TRAV13-2, TRAJ13)
CAERPGGYQKVTF

SEQ ID NO: 566132 - protein, 18 aa, Homo sapiens
  CDR3 for beta chain variable domain of TCR clone 283066 (TRBV25-1, TRBJ1-2)
CASSGLQNGQGLIFGDAF

SEQ ID NO: 566133 - protein, 14 aa, Homo sapiens
  CDR3 for alpha chain variable domain of TCR clone 283067 (TRAV26-1, TRAJ49)
CIVRPSNTGNQFYF

SEQ ID NO: 566134 - protein, 15 aa, Homo sapiens
  CDR3 for beta chain variable domain of TCR clone 283067 (TRBV19, TRBJ1-1)
CASMGFRDVDTEAFF

SEQ ID NO: 566135 - protein, 11 aa, Homo sapiens
  CDR3 for alpha chain variable domain of TCR clone 283068 (TRAV3, TRAJ21)
CAVGNFNKFYF

SEQ ID NO: 566136 - protein, 15 aa, Homo sapiens
  CDR3 for beta chain variable domain of TCR clone 283068 (TRBV7-9, TRBJ1-5)
CDSSQGHQPNQPQHF

SEQ ID NO: 566137 - protein, 15 aa, Homo sapiens
  CDR3 for alpha chain variable domain of TCR clone 283069 (TRAV10, TRAJ44)
CVVSGATDTASNLTF

SEQ ID NO: 566138 - protein, 15 aa, Homo sapiens
  CDR3 for beta chain variable domain of TCR clone 283069 (TRBV12-4, TRBJ1-5)
CASTRQGSGNQPQHF

SEQ ID NO: 566139 - protein, 10 aa, Homo sapiens
  CDR3 for alpha chain variable domain of TCR clone 283070 (TRAV38-1, TRAJ34)
CAFMADKLIF

SEQ ID NO: 566140 - protein, 17 aa, Homo sapiens
  CDR3 for beta chain variable domain of TCR clone 283070 (TRBV11-3, TRBJ2-3)
CASSLGLTGGGTDTQYF

SEQ ID NO: 566141 - protein, 14 aa, Homo sapiens
  CDR3 for alpha chain variable domain of TCR clone 283071 (TRAV12-2, TRAJ40)
CAVKIPSGTYKYIF

SEQ ID NO: 566142 - protein, 19 aa, Homo sapiens
  CDR3 for beta chain variable domain of TCR clone 283071 (TRBV11-3, TRBJ2-2)
CASSTRPGAKTTNTGELFF

SEQ ID NO: 566143 - protein, 17 aa, Homo sapiens
  CDR3 for alpha chain variable domain of TCR clone 283072 (TRAV3, TRAJ6)
CAVRDGTRAGGSYIPTF

SEQ ID NO: 566144 - protein, 14 aa, Homo sapiens
  CDR3 for beta chain variable domain of TCR clone 283072 (TRBV7-2, TRBJ2-7)
CASGPKTSFYEQYF

SEQ ID NO: 566145 - protein, 15 aa, Homo sapiens
  CDR3 for alpha chain variable domain of TCR clone 283073 (TRAV14/DV4, TRAJ22)
CNERGHPGSARQLTF

SEQ ID NO: 566146 - protein, 16 aa, Homo sapiens
  CDR3 for beta chain variable domain of TCR clone 283073 (TRBV19, TRBJ1-6)
CASSVAPVAGNSPLHF

SEQ ID NO: 566147 - protein, 14 aa, Homo sapiens
  CDR3 for alpha chain variable domain of TCR clone 283074 (TRAV1-2, TRAJ8)
CAVREDTSFQKLVF

SEQ ID NO: 566148 - protein, 16 aa, Homo sapiens
  CDR3 for beta chain variable domain of TCR clone 283074 (TRBV7-9, TRBJ2-1)
CASSDVAGGSYNEQFF

SEQ ID NO: 566149 - protein, 13 aa, Homo sapiens
  CDR3 for alpha chain variable domain of TCR clone 283075 (TRAV3, TRAJ16)
CAVRDRDGQKLLF

SEQ ID NO: 566150 - protein, 15 aa, Homo sapiens
  CDR3 for beta chain variable domain of TCR clone 283075 (TRBV5-1, TRBJ2-1)
CASSPPRAPYNEQFF

SEQ ID NO: 566151 - protein, 11 aa, Homo sapiens
  CDR3 for alpha chain variable domain of TCR clone 283076 (TRAV3, TRAJ21)
CAVGNLNKFYF

SEQ ID NO: 566152 - protein, 16 aa, Homo sapiens
  CDR3 for beta chain variable domain of TCR clone 283076 (TRBV19, TRBJ2-1)
CANSKAGPSSYNEQFF

SEQ ID NO: 566153 - protein, 15 aa, Homo sapiens
  CDR3 for alpha chain variable domain of TCR clone 283077 (TRAV25, TRAJ52)
CAGRPGGTSYGKLTF

SEQ ID NO: 566154 - protein, 14 aa, Homo sapiens
  CDR3 for beta chain variable domain of TCR clone 283077 (TRBV7-9, TRBJ2-7)
CASSLSQRSYEQYF

SEQ ID NO: 566155 - protein, 13 aa, Homo sapiens
  CDR3 for alpha chain variable domain of TCR clone 283078 (TRAV38-1, TRAJ42)
CARWGRSQGNLIF

SEQ ID NO: 566156 - protein, 10 aa, Homo sapiens
  CDR3 for beta chain variable domain of TCR clone 283078 (TRBV2, TRBJ2-5)
CASSAATQYF

SEQ ID NO: 566157 - protein, 13 aa, Homo sapiens
  CDR3 for alpha chain variable domain of TCR clone 283079 (TRAV13-1, TRAJ6)
CAASSGGSYIPTF

SEQ ID NO: 566158 - protein, 15 aa, Homo sapiens
  CDR3 for beta chain variable domain of TCR clone 283079 (TRBV12-4, TRBJ2-5)
CDSSPPTGLQETQYF

SEQ ID NO: 566159 - protein, 13 aa, Homo sapiens
  CDR3 for alpha chain variable domain of TCR clone 283080 (TRAV8-4, TRAJ48)
CAVSLFGNEKLTL

SEQ ID NO: 566160 - protein, 15 aa, Homo sapiens
  CDR3 for beta chain variable domain of TCR clone 283080 (TRBV20-1, TRBJ2-7)
CSARKGLAESYEQYF

SEQ ID NO: 566161 - protein, 13 aa, Homo sapiens
  CDR3 for alpha chain variable domain of TCR clone 283081 (TRAV3, TRAJ20)
CAVRDWGDYKLSF

SEQ ID NO: 566162 - protein, 16 aa, Homo sapiens
  CDR3 for beta chain variable domain of TCR clone 283081 (TRBV4-1, TRBJ2-5)
CASSQTSGGPLETQYF

SEQ ID NO: 566163 - protein, 15 aa, Homo sapiens
  CDR3 for alpha chain variable domain of TCR clone 283082 (TRAV12-2, TRAJ53)
CAVNGGGGSNYKLTF

SEQ ID NO: 566164 - protein, 14 aa, Homo sapiens
  CDR3 for beta chain variable domain of TCR clone 283082 (TRBV11-2, TRBJ1-2)
CASSLYRGNYGYTF

SEQ ID NO: 566165 - protein, 15 aa, Homo sapiens
  CDR3 for alpha chain variable domain of TCR clone 283083 (TRAV3, TRAJ5)
CAVRDLDTGMRALTF

SEQ ID NO: 566166 - protein, 15 aa, Homo sapiens
  CDR3 for beta chain variable domain of TCR clone 283083 (TRBV28, TRBJ2-5)
CASSPPWSYQETQYF

SEQ ID NO: 566167 - protein, 17 aa, Homo sapiens
  CDR3 for alpha chain variable domain of TCR clone 283084 (TRAV12-2, TRAJ52)
CAVNPYAGGTSYGKLTF

SEQ ID NO: 566168 - protein, 16 aa, Homo sapiens
  CDR3 for beta chain variable domain of TCR clone 283084 (TRBV24-1, TRBJ2-5)
CATRLAEDCWEKTQYF

SEQ ID NO: 566169 - protein, 13 aa, Homo sapiens
  CDR3 for alpha chain variable domain of TCR clone 283085 (TRAV9-2, TRAJ49)
CALGHFTGNQFYF

SEQ ID NO: 566170 - protein, 16 aa, Homo sapiens
  CDR3 for beta chain variable domain of TCR clone 283085 (TRBV7-9, TRBJ2-1)
CASSPRLGSSYNEQFF

SEQ ID NO: 566171 - protein, 13 aa, Homo sapiens
  CDR3 for alpha chain variable domain of TCR clone 283086 (TRAV12-1, TRAJ33)
CGDAPDSNYQLIW

SEQ ID NO: 566172 - protein, 15 aa, Homo sapiens
  CDR3 for beta chain variable domain of TCR clone 283086 (TRBV7-2, TRBJ1-2)
CASSPRAGWNYGYTF

SEQ ID NO: 566173 - protein, 14 aa, Homo sapiens
  CDR3 for alpha chain variable domain of TCR clone 283087 (TRAV1-2, TRAJ16)
CAVNRLSDGQKLLF

SEQ ID NO: 566174 - protein, 18 aa, Homo sapiens
  CDR3 for beta chain variable domain of TCR clone 283087 (TRBV20-1, TRBJ2-6)
CSAETTPTHGSGANVLTF

SEQ ID NO: 566175 - protein, 11 aa, Homo sapiens
  CDR3 for alpha chain variable domain of TCR clone 283088 (TRAV12-2, TRAJ26)
CAVEGGQNFVF

SEQ ID NO: 566176 - protein, 17 aa, Homo sapiens
  CDR3 for beta chain variable domain of TCR clone 283088 (TRBV20-1, TRBJ2-1)
GSASGGENTGAYNEQFF

SEQ ID NO: 566177 - protein, 16 aa, Homo sapiens
  CDR3 for alpha chain variable domain of TCR clone 283089 (TRAV8-4, TRAJ52)
CAVSDPGGTSYGKLTF

SEQ ID NO: 566178 - protein, 16 aa, Homo sapiens
  CDR3 for beta chain variable domain of TCR clone 283089 (TRBV24-1, TRBJ2-3)
CATSDPGTGATDTQYF

SEQ ID NO: 566179 - protein, 12 aa, Homo sapiens
  CDR3 for alpha chain variable domain of TCR clone 283090 (TRAV13-1, TRAJ5)
CAAKAGRRALTF

SEQ ID NO: 566180 - protein, 15 aa, Homo sapiens
  CDR3 for beta chain variable domain of TCR clone 283090 (TRBV28, TRBJ2-7)
CASSLLAGARSEQYF

SEQ ID NO: 566181 - protein, 13 aa, Homo sapiens
  CDR3 for alpha chain variable domain of TCR clone 283091 (TRAV23/DV6, TRAJ16)
CAASISDGQQPLF

SEQ ID NO: 566182 - protein, 15 aa, Homo sapiens
  CDR3 for beta chain variable domain of TCR clone 283091 (TRBV2, TRBJ2-2)
CASSRETVGTGELFF

SEQ ID NO: 566183 - protein, 14 aa, Homo sapiens
  CDR3 for alpha chain variable domain of TCR clone 283092 (TRAV26-1, TRAJ57)
CIVITQGGSEKLVF

SEQ ID NO: 566184 - protein, 13 aa, Homo sapiens
  CDR3 for beta chain variable domain of TCR clone 283092 (TRBV23-1, TRBJ1-4)
CASRGKFNEKLFF

SEQ ID NO: 566185 - protein, 14 aa, Homo sapiens
  CDR3 for alpha chain variable domain of TCR clone 283093 (TRAV12-3, TRAJ9)
CAMSPNTGGFKTIF

SEQ ID NO: 566186 - protein, 13 aa, Homo sapiens
  CDR3 for beta chain variable domain of TCR clone 283093 (TRBV10-2, TRBJ2-3)
CASSESGDHTRYF

SEQ ID NO: 566187 - protein, 13 aa, Homo sapiens
  CDR3 for alpha chain variable domain of TCR clone 283094 (TRAV1-2, TRAJ9)
CAALNTGGFKTIF

SEQ ID NO: 566188 - protein, 15 aa, Homo sapiens
  CDR3 for beta chain variable domain of TCR clone 283094 (TRBV7-2, TRBJ2-3)
CASSLRGGSTDTQYF

SEQ ID NO: 566189 - protein, 14 aa, Homo sapiens
  CDR3 for alpha chain variable domain of TCR clone 283095 (TRAV1-2, TRAJ16)
CAVNRCSDGQKLLF

SEQ ID NO: 566190 - protein, 12 aa, Homo sapiens
  CDR3 for beta chain variable domain of TCR clone 283095 (TRBV11-2, TRBJ2-2)
CASSLGGGELFF

SEQ ID NO: 566191 - protein, 13 aa, Homo sapiens
  CDR3 for alpha chain variable domain of TCR clone 283096 (TRAV1-2, TRAJ9)
CAALNTGGFKTIF

SEQ ID NO: 566192 - protein, 13 aa, Homo sapiens
  CDR3 for beta chain variable domain of TCR clone 283096 (TRBV7-9, TRBJ1-1)
CASSLEAGTEAFF

SEQ ID NO: 566193 - protein, 13 aa, Homo sapiens
  CDR3 for alpha chain variable domain of TCR clone 283097 (TRAV12-1, TRAJ30)
CVVNTYRDDKIIF

SEQ ID NO: 566194 - protein, 15 aa, Homo sapiens
  CDR3 for beta chain variable domain of TCR clone 283097 (TRBV4-1, TRBJ2-7)
CTSSQQGQGFDEQYF

SEQ ID NO: 566195 - protein, 14 aa, Homo sapiens
  CDR3 for alpha chain variable domain of TCR clone 283098 (TRAV12-2, TRAJ44)
RAVNPAGTASKLTF

SEQ ID NO: 566196 - protein, 14 aa, Homo sapiens
  CDR3 for beta chain variable domain of TCR clone 283098 (TRBV7-2, TRBJ1-3)
CASSRLRSGNTIYF

SEQ ID NO: 566197 - protein, 14 aa, Homo sapiens
  CDR3 for alpha chain variable domain of TCR clone 283099 (TRAV1-2, TRAJ8)
CAVREHTGFQKLVF

SEQ ID NO: 566198 - protein, 16 aa, Homo sapiens
  CDR3 for beta chain variable domain of TCR clone 283099 (TRBV19, TRBJ2-3)
CASGTGPNDGTDTQYF

SEQ ID NO: 566199 - protein, 16 aa, Homo sapiens
  CDR3 for alpha chain variable domain of TCR clone 283100 (TRAV21, TRAJ52)
CAGTNAGGTSYGKLTF

SEQ ID NO: 566200 - protein, 15 aa, Homo sapiens
  CDR3 for beta chain variable domain of TCR clone 283100 (TRBV19, TRBJ1-1)
CASSIGGGRNTEAFF

SEQ ID NO: 566201 - protein, 11 aa, Homo sapiens
  CDR3 for alpha chain variable domain of TCR clone 283101 (TRAV17, TRAJ49)
CATITGNQFYF

SEQ ID NO: 566202 - protein, 12 aa, Homo sapiens
  CDR3 for beta chain variable domain of TCR clone 283101 (TRBV2, TRBJ2-7)
CASSGGSGIPYF

SEQ ID NO: 566203 - protein, 13 aa, Homo sapiens
  CDR3 for alpha chain variable domain of TCR clone 283102 (TRAV13-1, TRAJ6)
CAASKGGSYIPTF

SEQ ID NO: 566204 - protein, 15 aa, Homo sapiens
  CDR3 for beta chain variable domain of TCR clone 283102 (TRBV12-4, TRBJ2-5)
CASSPPTGLQETQYF

SEQ ID NO: 566205 - protein, 14 aa, Homo sapiens
  CDR3 for alpha chain variable domain of TCR clone 283103 (TRAV13-1, TRAJ9)
CAASALTGGFKTIF

SEQ ID NO: 566206 - protein, 16 aa, Homo sapiens
  CDR3 for beta chain variable domain of TCR clone 283103 (TRBV7-9, TRBJ2-4)
CASSLGPPGDKNIQYF

SEQ ID NO: 566207 - protein, 15 aa, Homo sapiens
  CDR3 for alpha chain variable domain of TCR clone 283104 (TRAV26-1, TRAJ29)
CIVRVEGSGNTPLVF

SEQ ID NO: 566208 - protein, 15 aa, Homo sapiens
  CDR3 for beta chain variable domain of TCR clone 283104 (TRBV7-9, TRBJ1-5)
RASSQGHQPKQTQHF

SEQ ID NO: 566209 - protein, 15 aa, Homo sapiens
  CDR3 for alpha chain variable domain of TCR clone 283105 (TRAV3, TRAJ15)
CAVRPANQAGNALIF

SEQ ID NO: 566210 - protein, 14 aa, Homo sapiens
  CDR3 for beta chain variable domain of TCR clone 283105 (TRBV4-1, TRBJ2-2)
CASSQAVNTGELFF

SEQ ID NO: 566211 - protein, 13 aa, Homo sapiens
  CDR3 for alpha chain variable domain of TCR clone 283106 (TRAV17, TRAJ4)
CATKSGGYNKLIF

SEQ ID NO: 566212 - protein, 15 aa, Homo sapiens
  CDR3 for beta chain variable domain of TCR clone 283106 (TRBV9, TRBJ1-6)
CASSVAGTGDSPLHF

SEQ ID NO: 566213 - protein, 10 aa, Homo sapiens
  CDR3 for alpha chain variable domain of TCR clone 283107 (TRAV23/DV6, TRAJ4)
CEARDFWSRD

SEQ ID NO: 566214 - protein, 15 aa, Homo sapiens
  CDR3 for beta chain variable domain of TCR clone 283107 (TRBV27, TRBJ2-1)
CASSNGGGSSNEQFF

SEQ ID NO: 566215 - protein, 13 aa, Homo sapiens
  CDR3 for alpha chain variable domain of TCR clone 283108 (TRAV27, TRAJ56)
CAGLTGANSKLTF

SEQ ID NO: 566216 - protein, 14 aa, Homo sapiens
  CDR3 for beta chain variable domain of TCR clone 283108 (TRBV7-6, TRBJ2-7)
CASSRGQDTYEQYF

SEQ ID NO: 566217 - protein, 13 aa, Homo sapiens
  CDR3 for alpha chain variable domain of TCR clone 283109 (TRAV10, TRAJ45)
CVGSGGGADGLTF

SEQ ID NO: 566218 - protein, 11 aa, Homo sapiens
  CDR3 for beta chain variable domain of TCR clone 283109 (TRBV29-1, TRBJ2-5)
CSEDRTGTQYF

SEQ ID NO: 566219 - protein, 14 aa, Homo sapiens
  CDR3 for alpha chain variable domain of TCR clone 283110 (TRAV8-3, TRAJ23)
CAVIIYNQGGKLIF

SEQ ID NO: 566220 - protein, 15 aa, Homo sapiens
  CDR3 for beta chain variable domain of TCR clone 283110 (TRBV18, TRBJ2-1)
CASSPPSDSYNEQFF

SEQ ID NO: 566221 - protein, 18 aa, Homo sapiens
  CDR3 for alpha chain variable domain of TCR clone 283111 (TRAV29/DV5, TRAJ53)
CSVLLCSKRGVSNYKLTF

SEQ ID NO: 566222 - protein, 17 aa, Homo sapiens
  CDR3 for beta chain variable domain of TCR clone 283111 (TRBV7-8, TRBJ2-6)
CASSAGTGGAGANVLTF

SEQ ID NO: 566223 - protein, 13 aa, Homo sapiens
  CDR3 for alpha chain variable domain of TCR clone 283112 (TRAV29/DV5, TRAJ21)
CAASVSNFNKFYF

SEQ ID NO: 566224 - protein, 12 aa, Homo sapiens
  CDR3 for beta chain variable domain of TCR clone 283112 (TRBV2, TRBJ2-1)
GRGLPSYNEQFF

SEQ ID NO: 566225 - protein, 14 aa, Homo sapiens
  CDR3 for alpha chain variable domain of TCR clone 283113 (TRAV2, TRAJ22)
CAVGRGGSARQLTF

SEQ ID NO: 566226 - protein, 16 aa, Homo sapiens
  CDR3 for beta chain variable domain of TCR clone 283113 (TRBV6-5, TRBJ1-1)
CASSYSGGLRNTEAFF

SEQ ID NO: 566227 - protein, 14 aa, Homo sapiens
  CDR3 for alpha chain variable domain of TCR clone 283114 (TRAV17, TRAJ34)
CATDSLEGTDKLIF

SEQ ID NO: 566228 - protein, 17 aa, Homo sapiens
  CDR3 for beta chain variable domain of TCR clone 283114 (TRBV13, TRBJ2-3)
CASSLSRVAGGRNTQYF

SEQ ID NO: 566229 - protein, 14 aa, Homo sapiens
  CDR3 for alpha chain variable domain of TCR clone 283115 (TRAV8-2, TRAJ37)
CVVSISGNTGQLIF

SEQ ID NO: 566230 - protein, 13 aa, Homo sapiens
  CDR3 for beta chain variable domain of TCR clone 283115 (TRBV19, TRBJ1-2)
CASSVPGQDGYTF

SEQ ID NO: 566231 - protein, 16 aa, Homo sapiens
  CDR3 for alpha chain variable domain of TCR clone 283116 (TRAV30, TRAJ24)
CGTGIVEADSWGKFQF

SEQ ID NO: 566232 - protein, 14 aa, Homo sapiens
  CDR3 for beta chain variable domain of TCR clone 283116 (TRBV12-5, TRBJ2-5)
CASGSRTHQETQYF

SEQ ID NO: 566233 - protein, 12 aa, Homo sapiens
  CDR3 for alpha chain variable domain of TCR clone 283117 (TRAV12-1, TRAJ40)
CVFYSGTYKVIF

SEQ ID NO: 566234 - protein, 18 aa, Homo sapiens
  CDR3 for beta chain variable domain of TCR clone 283117 (TRBV12-4, TRBJ2-2)
CASSLVAGTRGRTGELFF

SEQ ID NO: 566235 - protein, 13 aa, Homo sapiens
  CDR3 for alpha chain variable domain of TCR clone 283118 (TRAV17, TRAJ5)
CALRGTGRIALTF

SEQ ID NO: 566236 - protein, 13 aa, Homo sapiens
  CDR3 for beta chain variable domain of TCR clone 283118 (TRBV4-2, TRBJ1-1)
CASSQAGNTEAFF

SEQ ID NO: 566237 - protein, 16 aa, Homo sapiens
  CDR3 for alpha chain variable domain of TCR clone 283119 (TRAV8-3, TRAJ18)
CAVGARRGSTLGRLYF

SEQ ID NO: 566238 - protein, 14 aa, Homo sapiens
  CDR3 for beta chain variable domain of TCR clone 283119 (TRBV6-1, TRBJ1-3)
CASVQGGGGNTIYF

SEQ ID NO: 566239 - protein, 11 aa, Homo sapiens
  CDR3 for alpha chain variable domain of TCR clone 283120 (TRAV27, TRAJ47)
SIVEYGNKLVF

SEQ ID NO: 566240 - protein, 18 aa, Homo sapiens
  CDR3 for beta chain variable domain of TCR clone 283120 (TRBV2, TRBJ2-1)
WASRGLAGGPRTYNEQFF

SEQ ID NO: 566241 - protein, 12 aa, Homo sapiens
  CDR3 for alpha chain variable domain of TCR clone 283121 (TRAV8-3, TRAJ26)
CAGDNYGQKFGF

SEQ ID NO: 566242 - protein, 17 aa, Homo sapiens
  CDR3 for beta chain variable domain of TCR clone 283121 (TRBV7-8, TRBJ2-6)
CASSAGTGGAGANVLTF

SEQ ID NO: 566243 - protein, 16 aa, Homo sapiens
  CDR3 for alpha chain variable domain of TCR clone 283122 (TRAV26-1, TRAJ48)
IASSDLSNFGNEELTF

SEQ ID NO: 566244 - protein, 13 aa, Homo sapiens
  CDR3 for beta chain variable domain of TCR clone 283122 (TRBV10-2, TRBJ2-7)
CASGASGGYEQYF

SEQ ID NO: 566245 - protein, 16 aa, Homo sapiens
  CDR3 for alpha chain variable domain of TCR clone 283123 (TRAV30, TRAJ49)
SAAQRVGPNTGNQFYF

SEQ ID NO: 566246 - protein, 13 aa, Homo sapiens
  CDR3 for beta chain variable domain of TCR clone 283123 (TRBV20-1, TRBJ2-2)
CRASAAGTGELFF

SEQ ID NO: 566247 - protein, 14 aa, Homo sapiens
  CDR3 for alpha chain variable domain of TCR clone 283124 (TRAV26-1, TRAJ45)
CIEVTGGGADGLTF

SEQ ID NO: 566248 - protein, 12 aa, Homo sapiens
  CDR3 for beta chain variable domain of TCR clone 283124 (TRBV12-4, TRBJ2-7)
CASSLGGYEHYF

SEQ ID NO: 566249 - protein, 16 aa, Homo sapiens
  CDR3 for alpha chain variable domain of TCR clone 283125 (TRAV3, TRAJ10)
CAVRDMRAGGGKKLTF

SEQ ID NO: 566250 - protein, 16 aa, Homo sapiens
  CDR3 for beta chain variable domain of TCR clone 283125 (TRBV5-7, TRBJ1-5)
CASSLQQDREYQPQHF

SEQ ID NO: 566251 - protein, 16 aa, Homo sapiens
  CDR3 for alpha chain variable domain of TCR clone 283126 (TRAV14/DV4, TRAJ21)
CAMREGPENNFNKFYF

SEQ ID NO: 566252 - protein, 14 aa, Homo sapiens
  CDR3 for beta chain variable domain of TCR clone 283126 (TRBV25-1, TRBJ1-1)
CASTHLGGNTEAFF

SEQ ID NO: 566253 - protein, 16 aa, Homo sapiens
  CDR3 for alpha chain variable domain of TCR clone 283127 (TRAV3, TRAJ37)
CAVRGKGSGNTGKLIF

SEQ ID NO: 566254 - protein, 15 aa, Homo sapiens
  CDR3 for beta chain variable domain of TCR clone 283127 (TRBV28, TRBJ2-3)
CAPTFRDWSTDTQYF

SEQ ID NO: 566255 - protein, 13 aa, Homo sapiens
  CDR3 for alpha chain variable domain of TCR clone 283128 (TRAV10, TRAJ45)
CVGSGGGADGPTF

SEQ ID NO: 566256 - protein, 15 aa, Homo sapiens
  CDR3 for beta chain variable domain of TCR clone 283128 (TRBV5-1, TRBJ2-7)
CASSLYPDGGYEQYF

SEQ ID NO: 566257 - protein, 14 aa, Homo sapiens
  CDR3 for alpha chain variable domain of TCR clone 283129 (TRAV26-1, TRAJ38)
CIADNAGNNRKLIG

SEQ ID NO: 566258 - protein, 15 aa, Homo sapiens
  CDR3 for beta chain variable domain of TCR clone 283129 (TRBV4-1, TRBJ1-1)
CTSSQEWGHYTEAFF

SEQ ID NO: 566259 - protein, 11 aa, Homo sapiens
  CDR3 for alpha chain variable domain of TCR clone 283130 (TRAV1-2, TRAJ20)
CALANDYKLSF

SEQ ID NO: 566260 - protein, 18 aa, Homo sapiens
  CDR3 for beta chain variable domain of TCR clone 283130 (TRBV20-1, TRBJ2-6)
CSAETTPTHGSGANVLTS

SEQ ID NO: 566261 - protein, 16 aa, Homo sapiens
  CDR3 for alpha chain variable domain of TCR clone 283131 (TRAV30, TRAJ24)
CGTEIVDADSWGKFQF

SEQ ID NO: 566262 - protein, 14 aa, Homo sapiens
  CDR3 for beta chain variable domain of TCR clone 283131 (TRBV5-4, TRBJ2-2)
CASRLDGGTGELFF

SEQ ID NO: 566263 - protein, 14 aa, Homo sapiens
  CDR3 for alpha chain variable domain of TCR clone 283132 (TRAV21, TRAJ12)
CAVSNGDSSYKLIF

SEQ ID NO: 566264 - protein, 14 aa, Homo sapiens
  CDR3 for beta chain variable domain of TCR clone 283132 (TRBV7-6, TRBJ2-7)
CASSLTGTGNEQYF

SEQ ID NO: 566265 - protein, 11 aa, Homo sapiens
  CDR3 for alpha chain variable domain of TCR clone 283133 (TRAV12-3, TRAJ26)
CAMSHGQNFVF

SEQ ID NO: 566266 - protein, 14 aa, Homo sapiens
  CDR3 for beta chain variable domain of TCR clone 283133 (TRBV28, TRBJ1-1)
CASSSEQGYTEAFF

SEQ ID NO: 566267 - protein, 12 aa, Homo sapiens
  CDR3 for alpha chain variable domain of TCR clone 283134 (TRAV12-3, TRAJ17)
CVMTLTGNKLTF

SEQ ID NO: 566268 - protein, 14 aa, Homo sapiens
  CDR3 for beta chain variable domain of TCR clone 283134 (TRBV10-2, TRBJ1-5)
CASSSTGRNQPQHF

SEQ ID NO: 566269 - protein, 14 aa, Homo sapiens
  CDR3 for alpha chain variable domain of TCR clone 283135 (TRAV3, TRAJ9)
CAVRLNTGGFKTIF

SEQ ID NO: 566270 - protein, 15 aa, Homo sapiens
  CDR3 for beta chain variable domain of TCR clone 283135 (TRBV7-9, TRBJ2-2)
CASRPADRDTGELFF

SEQ ID NO: 566271 - protein, 15 aa, Homo sapiens
  CDR3 for alpha chain variable domain of TCR clone 283136 (TRAV8-4, TRAJ42)
CAVSDDRGSQGNLTF

SEQ ID NO: 566272 - protein, 17 aa, Homo sapiens
  CDR3 for beta chain variable domain of TCR clone 283136 (TRBV11-2, TRBJ2-1)
CASSFYPPGVEYNEQFF

SEQ ID NO: 566273 - protein, 17 aa, Homo sapiens
  CDR3 for alpha chain variable domain of TCR clone 283137 (TRAV8-6, TRAJ58)
CAVSSWVGETSGSRLTF

SEQ ID NO: 566274 - protein, 17 aa, Homo sapiens
  CDR3 for beta chain variable domain of TCR clone 283137 (TRBV4-3, TRBJ1-2)
CASSSRLQAGGSGGYTF

SEQ ID NO: 566275 - protein, 13 aa, Homo sapiens
  CDR3 for alpha chain variable domain of TCR clone 283138 (TRAV3, TRAJ29)
CAVRDIIDTPLVF

SEQ ID NO: 566276 - protein, 14 aa, Homo sapiens
  CDR3 for beta chain variable domain of TCR clone 283138 (TRBV27, TRBJ2-1)
CASSATVGYNEQFF

SEQ ID NO: 566277 - protein, 13 aa, Homo sapiens
  CDR3 for alpha chain variable domain of TCR clone 283139 (TRAV12-2, TRAJ10)
CAVPTGGGNKLTF

SEQ ID NO: 566278 - protein, 14 aa, Homo sapiens
  CDR3 for beta chain variable domain of TCR clone 283139 (TRBV28, TRBJ2-7)
CASSLLRISYEQYF

SEQ ID NO: 566279 - protein, 11 aa, Homo sapiens
  CDR3 for alpha chain variable domain of TCR clone 283140 (TRAV2, TRAJ4)
CAAGGYNKLIS

SEQ ID NO: 566280 - protein, 13 aa, Homo sapiens
  CDR3 for beta chain variable domain of TCR clone 283140 (TRBV20-1, TRBJ1-1)
CSARVGGNTEAFF

SEQ ID NO: 566281 - protein, 12 aa, Homo sapiens
  CDR3 for alpha chain variable domain of TCR clone 283141 (TRAV12-1, TRAJ40)
CVVYSGTYKYIL

SEQ ID NO: 566282 - protein, 18 aa, Homo sapiens
  CDR3 for beta chain variable domain of TCR clone 283141 (TRBV7-6, TRBJ2-1)
GHVSLRQQLGGGADEQFF

SEQ ID NO: 566283 - protein, 11 aa, Homo sapiens
  CDR3 for alpha chain variable domain of TCR clone 283142 (TRAV12-1, TRAJ16)
CGDPDGQKLLF

SEQ ID NO: 566284 - protein, 14 aa, Homo sapiens
  CDR3 for beta chain variable domain of TCR clone 283142 (TRBV7-2, TRBJ2-7)
CASSPKTSFYEQYF

SEQ ID NO: 566285 - protein, 11 aa, Homo sapiens
  CDR3 for alpha chain variable domain of TCR clone 283143 (TRAV36/DV7, TRAJ23)
CAVEARESLSS

SEQ ID NO: 566286 - protein, 15 aa, Homo sapiens
  CDR3 for beta chain variable domain of TCR clone 283143 (TRBV10-3, TRBJ2-3)
CAISLTSGGTDTQYF

SEQ ID NO: 566287 - protein, 16 aa, Homo sapiens
  CDR3 for alpha chain variable domain of TCR clone 283144 (TRAV16, TRAJ21)
CACGWATTSTNFTLNL

SEQ ID NO: 566288 - protein, 15 aa, Homo sapiens
  CDR3 for beta chain variable domain of TCR clone 283144 (TRBV19, TRBJ2-1)
CASSIQATSYNEQFF

SEQ ID NO: 566289 - protein, 14 aa, Homo sapiens
  CDR3 for alpha chain variable domain of TCR clone 283145 (TRAV1-2, TRAJ16)
CAVNRFSDGQKLLF

SEQ ID NO: 566290 - protein, 15 aa, Homo sapiens
  CDR3 for beta chain variable domain of TCR clone 283145 (TRBV10-3, TRBJ2-2)
CAISPGRTNTGELFF

SEQ ID NO: 566291 - protein, 14 aa, Homo sapiens
  CDR3 for alpha chain variable domain of TCR clone 283146 (TRAV12-2, TRAJ17)
CAVLFKAAGNKLTF

SEQ ID NO: 566292 - protein, 14 aa, Homo sapiens
  CDR3 for beta chain variable domain of TCR clone 283146 (TRBV7-8, TRBJ2-5)
CASSATGGQENQYF

SEQ ID NO: 566293 - protein, 14 aa, Homo sapiens
  CDR3 for alpha chain variable domain of TCR clone 283147 (TRAV12-2, TRAJ13)
CAVKKTGGYQEVTF

SEQ ID NO: 566294 - protein, 12 aa, Homo sapiens
  CDR3 for beta chain variable domain of TCR clone 283147 (TRBV6-3, TRBJ2-7)
CASSLTPYEQYC

SEQ ID NO: 566295 - protein, 14 aa, Homo sapiens
  CDR3 for alpha chain variable domain of TCR clone 283148 (TRAV1-2, TRAJ16)
CAVYRFSDGQKLLF

SEQ ID NO: 566296 - protein, 14 aa, Homo sapiens
  CDR3 for beta chain variable domain of TCR clone 283148 (TRBV7-9, TRBJ2-3)
CASSLEDGTDTQYF

SEQ ID NO: 566297 - protein, 15 aa, Homo sapiens
  CDR3 for alpha chain variable domain of TCR clone 283149 (TRAV23/DV6, TRAJ13)
CAAWPGGGGYQKVTF

SEQ ID NO: 566298 - protein, 16 aa, Homo sapiens
  CDR3 for beta chain variable domain of TCR clone 283149 (TRBV19, TRBJ2-7)
CASSLTGTSELGEQYF

SEQ ID NO: 566299 - protein, 13 aa, Homo sapiens
  CDR3 for alpha chain variable domain of TCR clone 283150 (TRAV27, TRAJ29)
CAGAHSGNTPLVF

SEQ ID NO: 566300 - protein, 13 aa, Homo sapiens
  CDR3 for beta chain variable domain of TCR clone 283150 (TRBV7-7, TRBJ1-1)
CASSLGANTEAFF

SEQ ID NO: 566301 - protein, 15 aa, Homo sapiens
  CDR3 for alpha chain variable domain of TCR clone 283151 (TRAV12-2, TRAJ56)
SAVNPFTGANSKLTF

SEQ ID NO: 566302 - protein, 13 aa, Homo sapiens
  CDR3 for beta chain variable domain of TCR clone 283151 (TRBV20-1, TRBJ1-2)
CSARDRVYGGYTF

SEQ ID NO: 566303 - protein, 11 aa, Homo sapiens
  CDR3 for alpha chain variable domain of TCR clone 283152 (TRAV20, TRAJ23)
CACNQGGKLIF

SEQ ID NO: 566304 - protein, 16 aa, Homo sapiens
  CDR3 for beta chain variable domain of TCR clone 283152 (TRBV7-8, TRBJ2-5)
CDSSFGGQPAQETQYF

SEQ ID NO: 566305 - protein, 14 aa, Homo sapiens
  CDR3 for alpha chain variable domain of TCR clone 283153 (TRAV8-1, TRAJ5)
CAVRTDTGRRALTF

SEQ ID NO: 566306 - protein, 16 aa, Homo sapiens
  CDR3 for beta chain variable domain of TCR clone 283153 (TRBV5-7, TRBJ2-5)
CASIRGQTGYQETQYF

SEQ ID NO: 566307 - protein, 14 aa, Homo sapiens
  CDR3 for alpha chain variable domain of TCR clone 283154 (TRAV13-1, TRAJ44)
CAAKATGTASKLTF

SEQ ID NO: 566308 - protein, 15 aa, Homo sapiens
  CDR3 for beta chain variable domain of TCR clone 283154 (TRBV19, TRBJ2-1)
CASIKCRGPYNEQFF

SEQ ID NO: 566309 - protein, 13 aa, Homo sapiens
  CDR3 for alpha chain variable domain of TCR clone 283155 (TRAV27, TRAJ6)
CAGGTRGSYIPTF

SEQ ID NO: 566310 - protein, 14 aa, Homo sapiens
  CDR3 for beta chain variable domain of TCR clone 283155 (TRBV3-1, TRBJ2-5)
CASSQAVRQETQYF

SEQ ID NO: 566311 - protein, 13 aa, Homo sapiens
  CDR3 for alpha chain variable domain of TCR clone 283156 (TRAV12-2, TRAJ45)
CAARGGGADGLTF

SEQ ID NO: 566312 - protein, 12 aa, Homo sapiens
  CDR3 for beta chain variable domain of TCR clone 283156 (TRBV11-2, TRBJ2-2)
CASSLPTGELFF

SEQ ID NO: 566313 - protein, 16 aa, Homo sapiens
  CDR3 for alpha chain variable domain of TCR clone 283157 (TRAV16, TRAJ4)
CALSRMFSGGYNKLIF

SEQ ID NO: 566314 - protein, 19 aa, Homo sapiens
  CDR3 for beta chain variable domain of TCR clone 283157 (TRBV28, TRBJ2-7)
CDSSYSGTSRLGWVYEQYF

SEQ ID NO: 566315 - protein, 14 aa, Homo sapiens
  CDR3 for alpha chain variable domain of TCR clone 283158 (TRAV13-1, TRAJ44)
CAAKATGTASKLTF

SEQ ID NO: 566316 - protein, 13 aa, Homo sapiens
  CDR3 for beta chain variable domain of TCR clone 283158 (TRBV5-5, TRBJ1-2)
CASSFWRGEDCAF

SEQ ID NO: 566317 - protein, 12 aa, Homo sapiens
  CDR3 for alpha chain variable domain of TCR clone 283159 (TRAV21, TRAJ13)
PGPSGGYQKVTF

SEQ ID NO: 566318 - protein, 12 aa, Homo sapiens
  CDR3 for beta chain variable domain of TCR clone 283159 (TRBV20-1, TRBJ2-1)
CSARLGTDEQFF

SEQ ID NO: 566319 - protein, 14 aa, Homo sapiens
  CDR3 for alpha chain variable domain of TCR clone 283160 (TRAV12-3, TRAJ6)
CAMSAPGGSYIPTF

SEQ ID NO: 566320 - protein, 16 aa, Homo sapiens
  CDR3 for beta chain variable domain of TCR clone 283160 (TRBV4-2, TRBJ2-1)
CASSPRAGQGANEQFF

SEQ ID NO: 566321 - protein, 15 aa, Homo sapiens
  CDR3 for alpha chain variable domain of TCR clone 283161 (TRAV23/DV6, TRAJ18)
CAARYRGSTLGRLYF

SEQ ID NO: 566322 - protein, 17 aa, Homo sapiens
  CDR3 for beta chain variable domain of TCR clone 283161 (TRBV7-3, TRBJ2-3)
CACSLMKRMRGADTQYF

SEQ ID NO: 566323 - protein, 15 aa, Homo sapiens
  CDR3 for alpha chain variable domain of TCR clone 283162 (TRAV4, TRAJ39)
CIVGPNNNAGNMLTF

SEQ ID NO: 566324 - protein, 16 aa, Homo sapiens
  CDR3 for beta chain variable domain of TCR clone 283162 (TRBV13, TRBJ2-2)
CASSPRTGEHTGELFF

SEQ ID NO: 566325 - protein, 15 aa, Homo sapiens
  CDR3 for alpha chain variable domain of TCR clone 283163 (TRAV17, TRAJ57)
CATGPSQGGSEKRVF

SEQ ID NO: 566326 - protein, 12 aa, Homo sapiens
  CDR3 for beta chain variable domain of TCR clone 283163 (TRBV11-2, TRBJ2-4)
CASSSASGSEYF

SEQ ID NO: 566327 - protein, 14 aa, Homo sapiens
  CDR3 for alpha chain variable domain of TCR clone 283164 (TRAV12-2, TRAJ53)
CAVKGGGSNYKLTF

SEQ ID NO: 566328 - protein, 15 aa, Homo sapiens
  CDR3 for beta chain variable domain of TCR clone 283164 (TRBV3-1, TRBJ2-7)
CASSQEWTGSYEQYF

SEQ ID NO: 566329 - protein, 17 aa, Homo sapiens
  CDR3 for alpha chain variable domain of TCR clone 283165 (TRAV16, TRAJ58)
CITVLSNGETSGSRLTF

SEQ ID NO: 566330 - protein, 14 aa, Homo sapiens
  CDR3 for beta chain variable domain of TCR clone 283165 (TRBV19, TRBJ2-1)
CASPTFVLSGEQFF

SEQ ID NO: 566331 - protein, 17 aa, Homo sapiens
  CDR3 for alpha chain variable domain of TCR clone 283166 (TRAV3, TRAJ12)
CAVRDGGRMDGSYKLIF

SEQ ID NO: 566332 - protein, 13 aa, Homo sapiens
  CDR3 for beta chain variable domain of TCR clone 283166 (TRBV15, TRBJ1-6)
CATSGGLNSPLHF

SEQ ID NO: 566333 - protein, 15 aa, Homo sapiens
  CDR3 for alpha chain variable domain of TCR clone 283167 (TRAV8-4, TRAJ7)
CPVSGGNYGNNRLAF

SEQ ID NO: 566334 - protein, 11 aa, Homo sapiens
  CDR3 for beta chain variable domain of TCR clone 283167 (TRBV20-1, TRBJ2-1)
CSLSSGSEQFF

SEQ ID NO: 566335 - protein, 13 aa, Homo sapiens
  CDR3 for alpha chain variable domain of TCR clone 283168 (TRAV17, TRAJ5)
CATMDTGRRALTF

SEQ ID NO: 566336 - protein, 15 aa, Homo sapiens
  CDR3 for beta chain variable domain of TCR clone 283168 (TRBV20-1, TRBJ2-5)
CSATRTSGGLETQYV

SEQ ID NO: 566337 - protein, 15 aa, Homo sapiens
  CDR3 for alpha chain variable domain of TCR clone 283169 (TRAV1-2, TRAJ28)
CAVQYSGAGSYQLTC

SEQ ID NO: 566338 - protein, 13 aa, Homo sapiens
  CDR3 for beta chain variable domain of TCR clone 283169 (TRBV4-2, TRBJ1-1)
CASSQAGNTEAFF

SEQ ID NO: 566339 - protein, 16 aa, Homo sapiens
  CDR3 for alpha chain variable domain of TCR clone 283170 (TRAV27, TRAJ13)
CAGAKSDSGGYKKVTF

SEQ ID NO: 566340 - protein, 16 aa, Homo sapiens
  CDR3 for beta chain variable domain of TCR clone 283170 (TRBV12-4, TRBJ1-5)
CASRQPVEGSNQPQHF

SEQ ID NO: 566341 - protein, 16 aa, Homo sapiens
  CDR3 for alpha chain variable domain of TCR clone 283171 (TRAV38-1, TRAJ56)
CAFMKRQTGANSKLTF

SEQ ID NO: 566342 - protein, 15 aa, Homo sapiens
  CDR3 for beta chain variable domain of TCR clone 283171 (TRBV2, TRBJ1-3)
CASIREYSSGNTIYF

SEQ ID NO: 566343 - protein, 15 aa, Homo sapiens
  CDR3 for alpha chain variable domain of TCR clone 283172 (TRAV12-1, TRAJ44)
CVADLPTGTASKLTF

SEQ ID NO: 566344 - protein, 16 aa, Homo sapiens
  CDR3 for beta chain variable domain of TCR clone 283172 (TRBV12-5, TRBJ2-5)
CASGPRTSGDQETQYF

SEQ ID NO: 566345 - protein, 15 aa, Homo sapiens
  CDR3 for alpha chain variable domain of TCR clone 283173 (TRAV3, TRAJ24)
CAVSDKMTAGGNCSL

SEQ ID NO: 566346 - protein, 14 aa, Homo sapiens
  CDR3 for beta chain variable domain of TCR clone 283173 (TRBV7-2, TRBJ2-3)
CASSQTGSSYTQYF

SEQ ID NO: 566347 - protein, 14 aa, Homo sapiens
  CDR3 for alpha chain variable domain of TCR clone 283174 (TRAV26-1, TRAJ38)
CIADNAGNKRKLIW

SEQ ID NO: 566348 - protein, 13 aa, Homo sapiens
  CDR3 for beta chain variable domain of TCR clone 283174 (TRBV20-1, TRBJ1-1)
CSARGGGNIEAFF

SEQ ID NO: 566349 - protein, 14 aa, Homo sapiens
  CDR3 for alpha chain variable domain of TCR clone 283175 (TRAV1-1, TRAJ35)
CAAPPIGFGNVLHC

SEQ ID NO: 566350 - protein, 15 aa, Homo sapiens
  CDR3 for beta chain variable domain of TCR clone 283175 (TRBV7-9, TRBJ1-6)
CASSSPGRGNSPLHF

SEQ ID NO: 566351 - protein, 15 aa, Homo sapiens
  CDR3 for alpha chain variable domain of TCR clone 283176 (TRAV26-1, TRAJ44)
CIVRANTGTASKLTF

SEQ ID NO: 566352 - protein, 14 aa, Homo sapiens
  CDR3 for beta chain variable domain of TCR clone 283176 (TRBV11-2, TRBJ2-7)
CASSSTGEGYEQYF

SEQ ID NO: 566353 - protein, 14 aa, Homo sapiens
  CDR3 for alpha chain variable domain of TCR clone 283177 (TRAV12-2, TRAJ44)
CAVNPAGTASKLTF

SEQ ID NO: 566354 - protein, 14 aa, Homo sapiens
  CDR3 for beta chain variable domain of TCR clone 283177 (TRBV6-6, TRBJ2-7)
CASSDSGAGYEQYF

SEQ ID NO: 566355 - protein, 16 aa, Homo sapiens
  CDR3 for alpha chain variable domain of TCR clone 283178 (TRAV6, TRAJ6)
CALDMPPSGGSYIPTC

SEQ ID NO: 566356 - protein, 19 aa, Homo sapiens
  CDR3 for beta chain variable domain of TCR clone 283178 (TRBV20-1, TRBJ2-3)
CSARGVSGGTVSSTDTQYF

SEQ ID NO: 566357 - protein, 14 aa, Homo sapiens
  CDR3 for alpha chain variable domain of TCR clone 283179 (TRAV12-3, TRAJ10)
SHLPLTGGGNKLTF

SEQ ID NO: 566358 - protein, 13 aa, Homo sapiens
  CDR3 for beta chain variable domain of TCR clone 283179 (TRBV2, TRBJ1-6)
CADAGSYNSPLHF

SEQ ID NO: 566359 - protein, 14 aa, Homo sapiens
  CDR3 for alpha chain variable domain of TCR clone 283180 (TRAV2, TRAJ9)
CAVEDRSGGFKTIF

SEQ ID NO: 566360 - protein, 13 aa, Homo sapiens
  CDR3 for beta chain variable domain of TCR clone 283180 (TRBV12-4, TRBJ1-2)
RASTMTSNYGYTF

SEQ ID NO: 566361 - protein, 14 aa, Homo sapiens
  CDR3 for alpha chain variable domain of TCR clone 283181 (TRAV17, TRAJ33)
CATDARRSNYQLIW

SEQ ID NO: 566362 - protein, 14 aa, Homo sapiens
  CDR3 for beta chain variable domain of TCR clone 283181 (TRBV7-6, TRBJ2-3)
CASSLGTVTDTQYF

SEQ ID NO: 566363 - protein, 14 aa, Homo sapiens
  CDR3 for alpha chain variable domain of TCR clone 283182 (TRAV8-4, TRAJ4)
CAVSPSGGCNKLIF

SEQ ID NO: 566364 - protein, 15 aa, Homo sapiens
  CDR3 for beta chain variable domain of TCR clone 283182 (TRBV7-8, TRBJ2-3)
CASSLSADSGGAQYF

SEQ ID NO: 566365 - protein, 15 aa, Homo sapiens
  CDR3 for alpha chain variable domain of TCR clone 283183 (TRAV3, TRAJ45)
CAVRTPWGGDDGLTF

SEQ ID NO: 566366 - protein, 16 aa, Homo sapiens
  CDR3 for beta chain variable domain of TCR clone 283183 (TRBV6-1, TRBJ2-2)
CASSFGQGANTGELFF

SEQ ID NO: 566367 - protein, 15 aa, Homo sapiens
  CDR3 for alpha chain variable domain of TCR clone 283184 (TRAV25, TRAJ52)
CAGTSGGTSYGKLTF

SEQ ID NO: 566368 - protein, 13 aa, Homo sapiens
  CDR3 for beta chain variable domain of TCR clone 283184 (TRBV11-2, TRBJ2-5)
CASSSTGEETQYF

SEQ ID NO: 566369 - protein, 12 aa, Homo sapiens
  CDR3 for alpha chain variable domain of TCR clone 283185 (TRAV1-2, TRAJ33)
CAALDSNYQLIW

SEQ ID NO: 566370 - protein, 16 aa, Homo sapiens
  CDR3 for beta chain variable domain of TCR clone 283185 (TRBV19, TRBJ2-2)
CASQSPGTGATGELFF

SEQ ID NO: 566371 - protein, 11 aa, Homo sapiens
  CDR3 for alpha chain variable domain of TCR clone 283186 (TRAV17, TRAJ9)
CGFTGGFKTIF

SEQ ID NO: 566372 - protein, 13 aa, Homo sapiens
  CDR3 for beta chain variable domain of TCR clone 283186 (TRBV7-9, TRBJ1-2)
CASSLKRNYGYTF

SEQ ID NO: 566373 - protein, 12 aa, Homo sapiens
  CDR3 for alpha chain variable domain of TCR clone 283187 (TRAV12-3, TRAJ17)
CAMTLTGNKLTF

SEQ ID NO: 566374 - protein, 16 aa, Homo sapiens
  CDR3 for beta chain variable domain of TCR clone 283187 (TRBV2, TRBJ2-3)
CASSGGGLTSTDTKYF

SEQ ID NO: 566375 - protein, 20 aa, Homo sapiens
  CDR3 for alpha chain variable domain of TCR clone 283188 (TRAV21, TRAJ4)
AASQPGDSATLAGGYNKLIF

SEQ ID NO: 566376 - protein, 19 aa, Homo sapiens
  CDR3 for beta chain variable domain of TCR clone 283188 (TRBV18, TRBJ1-3)
CASSPLSRTGVSSGNTIYF

SEQ ID NO: 566377 - protein, 16 aa, Homo sapiens
  CDR3 for alpha chain variable domain of TCR clone 283189 (TRAV26-1, TRAJ32)
CIVRTNYGGATNKLIF

SEQ ID NO: 566378 - protein, 12 aa, Homo sapiens
  CDR3 for beta chain variable domain of TCR clone 283189 (TRBV7-9, TRBJ1-5)
CASSPQGQPQHF

SEQ ID NO: 566379 - protein, 13 aa, Homo sapiens
  CDR3 for alpha chain variable domain of TCR clone 283190 (TRAV13-1, TRAJ5)
CAAEHTGRRALTF

SEQ ID NO: 566380 - protein, 14 aa, Homo sapiens
  CDR3 for beta chain variable domain of TCR clone 283190 (TRBV5-1, TRBJ1-1)
CASSLQGASTEAFF

SEQ ID NO: 566381 - protein, 11 aa, Homo sapiens
  CDR3 for alpha chain variable domain of TCR clone 283191 (TRAV13-1, TRAJ5)
CAPKGRRALTF

SEQ ID NO: 566382 - protein, 13 aa, Homo sapiens
  CDR3 for beta chain variable domain of TCR clone 283191 (TRBV4-2, TRBJ1-1)
CASSQAGNTEAFF

SEQ ID NO: 566383 - protein, 21 aa, Homo sapiens
  CDR3 for alpha chain variable domain of TCR clone 283192 (TRAV13-1, TRAJ26)
SLHITETQPEDSAVYFCAIVF

SEQ ID NO: 566384 - protein, 14 aa, Homo sapiens
  CDR3 for beta chain variable domain of TCR clone 283192 (TRBV18, TRBJ2-3)
CASSPRTSTDTQYF

SEQ ID NO: 566385 - protein, 13 aa, Homo sapiens
  CDR3 for alpha chain variable domain of TCR clone 283193 (TRAV4, TRAJ44)
CLEETGTASKLTF

SEQ ID NO: 566386 - protein, 14 aa, Homo sapiens
  CDR3 for beta chain variable domain of TCR clone 283193 (TRBV19, TRBJ2-1)
CASPTFVLSGEQFF

SEQ ID NO: 566387 - protein, 14 aa, Homo sapiens
  CDR3 for alpha chain variable domain of TCR clone 283194 (TRAV12-2, TRAJ13)
CAVKKTWGYQKVTF

SEQ ID NO: 566388 - protein, 15 aa, Homo sapiens
  CDR3 for beta chain variable domain of TCR clone 283194 (TRBV20-1, TRBJ2-1)
CSARGIGGTYNEQFF

SEQ ID NO: 566389 - protein, 13 aa, Homo sapiens
  CDR3 for alpha chain variable domain of TCR clone 283195 (TRAV26-2, TRAJ54)
CIPRVGGDQKLVF

SEQ ID NO: 566390 - protein, 16 aa, Homo sapiens
  CDR3 for beta chain variable domain of TCR clone 283195 (TRBV4-1, TRBJ1-1)
CASSSMSERPNTEAFF

SEQ ID NO: 566391 - protein, 12 aa, Homo sapiens
  CDR3 for alpha chain variable domain of TCR clone 283196 (TRAV17, TRAJ53)
CAFGGSNYKLTF

SEQ ID NO: 566392 - protein, 16 aa, Homo sapiens
  CDR3 for beta chain variable domain of TCR clone 283196 (TRBV11-2, TRBJ2-4)
CASSQEGRGGLDMQYF

SEQ ID NO: 566393 - protein, 13 aa, Homo sapiens
  CDR3 for alpha chain variable domain of TCR clone 283197 (TRAV21, TRAJ20)
CAVGLRVDYKLSF

SEQ ID NO: 566394 - protein, 16 aa, Homo sapiens
  CDR3 for beta chain variable domain of TCR clone 283197 (TRBV28, TRBJ2-3)
CASSFFRDPRLVTQYF

SEQ ID NO: 566395 - protein, 11 aa, Homo sapiens
  CDR3 for alpha chain variable domain of TCR clone 283198 (TRAV12-2, TRAJ49)
CAVNTRNQFYF

SEQ ID NO: 566396 - protein, 19 aa, Homo sapiens
  CDR3 for beta chain variable domain of TCR clone 283198 (TRBV11-3, TRBJ2-2)
CASSFLGTSGGPNTGELFF

SEQ ID NO: 566397 - protein, 12 aa, Homo sapiens
  CDR3 for alpha chain variable domain of TCR clone 283199 (TRAV12-3, TRAJ17)
CAMTLTGNKLTF

SEQ ID NO: 566398 - protein, 15 aa, Homo sapiens
  CDR3 for beta chain variable domain of TCR clone 283199 (TRBV20-1, TRBJ2-7)
CRARDRVSGRDEQYF

SEQ ID NO: 566399 - protein, 14 aa, Homo sapiens
  CDR3 for alpha chain variable domain of TCR clone 283200 (TRAV8-4, TRAJ54)
CAVSEVLGAQKQVF

SEQ ID NO: 566400 - protein, 14 aa, Homo sapiens
  CDR3 for beta chain variable domain of TCR clone 283200 (TRBV11-2, TRBJ2-5)
CASRPLAGRETQYF

SEQ ID NO: 566401 - protein, 14 aa, Homo sapiens
  CDR3 for alpha chain variable domain of TCR clone 283201 (TRAV1-2, TRAJ29)
CAVRELTSATPLAF

SEQ ID NO: 566402 - protein, 14 aa, Homo sapiens
  CDR3 for beta chain variable domain of TCR clone 283201 (TRBV3-1, TRBJ2-5)
CASSQGPDQGTQYF

SEQ ID NO: 566403 - protein, 13 aa, Homo sapiens
  CDR3 for alpha chain variable domain of TCR clone 283202 (TRAV13-1, TRAJ49)
CAAIWALGSQFYF

SEQ ID NO: 566404 - protein, 12 aa, Homo sapiens
  CDR3 for beta chain variable domain of TCR clone 283202 (TRBV11-2, TRBJ2-2)
CASSLPTGELFF

SEQ ID NO: 566405 - protein, 13 aa, Homo sapiens
  CDR3 for alpha chain variable domain of TCR clone 283203 (TRAV12-2, TRAJ15)
CAVFNQAGTALIF

SEQ ID NO: 566406 - protein, 15 aa, Homo sapiens
  CDR3 for beta chain variable domain of TCR clone 283203 (TRBV7-2, TRBJ2-1)
CASSSGLAGGNEQFF

SEQ ID NO: 566407 - protein, 11 aa, Homo sapiens
  CDR3 for alpha chain variable domain of TCR clone 283204 (TRAV2, TRAJ33)
CAVDSNYQLIW

SEQ ID NO: 566408 - protein, 15 aa, Homo sapiens
  CDR3 for beta chain variable domain of TCR clone 283204 (TRBV12-4, TRBJ2-2)
CASSFKSTNTGELFF

SEQ ID NO: 566409 - protein, 14 aa, Homo sapiens
  CDR3 for alpha chain variable domain of TCR clone 283205 (TRAV30, TRAJ33)
CGTVAPRSNYQLIW

SEQ ID NO: 566410 - protein, 16 aa, Homo sapiens
  CDR3 for beta chain variable domain of TCR clone 283205 (TRBV3-1, TRBJ2-5)
CASSPGQFNGFGTRYF

SEQ ID NO: 566411 - protein, 17 aa, Homo sapiens
  CDR3 for alpha chain variable domain of TCR clone 283206 (TRAV3, TRAJ6)
CAVRDGPRAGGSYITTF

SEQ ID NO: 566412 - protein, 14 aa, Homo sapiens
  CDR3 for beta chain variable domain of TCR clone 283206 (TRBV7-2, TRBJ2-7)
CASSPKASFYEQYF

SEQ ID NO: 566413 - protein, 15 aa, Homo sapiens
  CDR3 for alpha chain variable domain of TCR clone 283207 (TRAV25, TRAJ53)
CPTSNSGGSNYKLTF

SEQ ID NO: 566414 - protein, 15 aa, Homo sapiens
  CDR3 for beta chain variable domain of TCR clone 283207 (TRBV28, TRBJ2-1)
CASSGLAEVDNEQFF

SEQ ID NO: 566415 - protein, 15 aa, Homo sapiens
  CDR3 for alpha chain variable domain of TCR clone 283208 (TRAV20, TRAJ4)
CAVEGSSGGYNKPIF

SEQ ID NO: 566416 - protein, 14 aa, Homo sapiens
  CDR3 for beta chain variable domain of TCR clone 283208 (TRBV7-8, TRBJ2-7)
CASTLGGALGEQYF

SEQ ID NO: 566417 - protein, 14 aa, Homo sapiens
  CDR3 for alpha chain variable domain of TCR clone 283209 (TRAV12-2, TRAJ44)
CAVNKAGTTSKLTF

SEQ ID NO: 566418 - protein, 12 aa, Homo sapiens
  CDR3 for beta chain variable domain of TCR clone 283209 (TRBV19, TRBJ1-4)
CASKDWPGGLFF

SEQ ID NO: 566419 - protein, 18 aa, Homo sapiens
  CDR3 for alpha chain variable domain of TCR clone 283210 (TRAV12-3, TRAJ52)
CAMSVGGAGGTSYGKLTF

SEQ ID NO: 566420 - protein, 15 aa, Homo sapiens
  CDR3 for beta chain variable domain of TCR clone 283210 (TRBV11-2, TRBJ2-1)
CASSSPSTRYNEQFF

SEQ ID NO: 566421 - protein, 15 aa, Homo sapiens
  CDR3 for alpha chain variable domain of TCR clone 283211 (TRAV16, TRAJ10)
CALEGLTGGGNKLTF

SEQ ID NO: 566422 - protein, 16 aa, Homo sapiens
  CDR3 for beta chain variable domain of TCR clone 283211 (TRBV11-2, TRBJ1-1)
CASSLRQGGEHSKAFF

SEQ ID NO: 566423 - protein, 18 aa, Homo sapiens
  CDR3 for alpha chain variable domain of TCR clone 283212 (TRAV8-1, TRAJ5)
CAVKTEQPGRRAGEHLLL

SEQ ID NO: 566424 - protein, 16 aa, Homo sapiens
  CDR3 for beta chain variable domain of TCR clone 283212 (TRBV12-5, TRBJ2-5)
CASGPRTSGNQGTQYF

SEQ ID NO: 566425 - protein, 12 aa, Homo sapiens
  CDR3 for alpha chain variable domain of TCR clone 283213 (TRAV16, TRAJ26)
CALRSYGQNFVF

SEQ ID NO: 566426 - protein, 14 aa, Homo sapiens
  CDR3 for beta chain variable domain of TCR clone 283213 (TRBV10-3, TRBJ2-1)
CAISSDLAYNAQFF

SEQ ID NO: 566427 - protein, 14 aa, Homo sapiens
  CDR3 for alpha chain variable domain of TCR clone 283214 (TRAV12-3, TRAJ29)
CAMILLSGNTPLVF

SEQ ID NO: 566428 - protein, 16 aa, Homo sapiens
  CDR3 for beta chain variable domain of TCR clone 283214 (TRBV28, TRBJ2-7)
CASSSGTSGRGYEHYF

SEQ ID NO: 566429 - protein, 11 aa, Homo sapiens
  CDR3 for alpha chain variable domain of TCR clone 283215 (TRAV3, TRAJ21)
CAVGNFNKFYF

SEQ ID NO: 566430 - protein, 15 aa, Homo sapiens
  CDR3 for beta chain variable domain of TCR clone 283215 (TRBV4-1, TRBJ2-5)
CASSQSRGDQETQYF

SEQ ID NO: 566431 - protein, 11 aa, Homo sapiens
  CDR3 for alpha chain variable domain of TCR clone 283216 (TRAV23/DV6, TRAJ48)
CAPRWGEKLTF

SEQ ID NO: 566432 - protein, 12 aa, Homo sapiens
  CDR3 for beta chain variable domain of TCR clone 283216 (TRBV12-4, TRBJ2-5)
CQQSRTEETQYF

SEQ ID NO: 566433 - protein, 14 aa, Homo sapiens
  CDR3 for alpha chain variable domain of TCR clone 283217 (TRAV1-2, TRAJ8)
CAVREDTGFQKLVF

SEQ ID NO: 566434 - protein, 12 aa, Homo sapiens
  CDR3 for beta chain variable domain of TCR clone 283217 (TRBV12-4, TRBJ2-5)
CASGDYEETQYF

SEQ ID NO: 566435 - protein, 16 aa, Homo sapiens
  CDR3 for alpha chain variable domain of TCR clone 283218 (TRAV13-1, TRAJ48)
CAASIFGKFGNEKLTF

SEQ ID NO: 566436 - protein, 14 aa, Homo sapiens
  CDR3 for beta chain variable domain of TCR clone 283218 (TRBV24-1, TRBJ1-1)
CATSIPRGDTEAFF

SEQ ID NO: 566437 - protein, 12 aa, Homo sapiens
  CDR3 for alpha chain variable domain of TCR clone 283219 (TRAV1-1, TRAJ8)
FAGGTGFQKLVF

SEQ ID NO: 566438 - protein, 13 aa, Homo sapiens
  CDR3 for beta chain variable domain of TCR clone 283219 (TRBV19, TRBJ1-2)
CASSQGQVYGYTF

SEQ ID NO: 566439 - protein, 13 aa, Homo sapiens
  CDR3 for alpha chain variable domain of TCR clone 283220 (TRAV2, TRAJ29)
CAAGNSGNTPLVF

SEQ ID NO: 566440 - protein, 16 aa, Homo sapiens
  CDR3 for beta chain variable domain of TCR clone 283220 (TRBV7-9, TRBJ1-2)
CASSAGGGAMNYGYTF

SEQ ID NO: 566441 - protein, 15 aa, Homo sapiens
  CDR3 for alpha chain variable domain of TCR clone 283221 (TRAV26-1, TRAJ29)
CIVRVEGSGNTPLVF

SEQ ID NO: 566442 - protein, 14 aa, Homo sapiens
  CDR3 for beta chain variable domain of TCR clone 283221 (TRBV18, TRBJ2-5)
CASSPRVSQETQYF

SEQ ID NO: 566443 - protein, 16 aa, Homo sapiens
  CDR3 for alpha chain variable domain of TCR clone 283222 (TRAV25, TRAJ24)
CAQRRGTTDSWGKLQF

SEQ ID NO: 566444 - protein, 14 aa, Homo sapiens
  CDR3 for beta chain variable domain of TCR clone 283222 (TRBV6-6, TRBJ1-5)
CASSYGPASQPQHF

SEQ ID NO: 566445 - protein, 14 aa, Homo sapiens
  CDR3 for alpha chain variable domain of TCR clone 283223 (TRAV2, TRAJ37)
CAVDFTSNTGKLIF

SEQ ID NO: 566446 - protein, 14 aa, Homo sapiens
  CDR3 for beta chain variable domain of TCR clone 283223 (TRBV20-1, TRBJ2-7)
CSASSTSGTYEQYF

SEQ ID NO: 566447 - protein, 11 aa, Homo sapiens
  CDR3 for alpha chain variable domain of TCR clone 283224 (TRAV13-1, TRAJ23)
CAARSRGKLIF

SEQ ID NO: 566448 - protein, 13 aa, Homo sapiens
  CDR3 for beta chain variable domain of TCR clone 283224 (TRBV7-9, TRBJ1-2)
CASSLKQNYGYTF

SEQ ID NO: 566449 - protein, 13 aa, Homo sapiens
  CDR3 for alpha chain variable domain of TCR clone 283225 (TRAV29/DV5, TRAJ29)
CTASAAGNNPLVF

SEQ ID NO: 566450 - protein, 14 aa, Homo sapiens
  CDR3 for beta chain variable domain of TCR clone 283225 (TRBV19, TRBJ2-3)
CASSAPRGTDTQYF

SEQ ID NO: 566451 - protein, 14 aa, Homo sapiens
  CDR3 for alpha chain variable domain of TCR clone 283226 (TRAV1-2, TRAJ8)
CAVREDTGFQKLVC

SEQ ID NO: 566452 - protein, 14 aa, Homo sapiens
  CDR3 for beta chain variable domain of TCR clone 283226 (TRBV19, TRBJ2-2)
CASSGQGIAGELFF

SEQ ID NO: 566453 - protein, 15 aa, Homo sapiens
  CDR3 for alpha chain variable domain of TCR clone 283227 (TRAV16, TRAJ16)
CALQGGGSDGQKLLF

SEQ ID NO: 566454 - protein, 13 aa, Homo sapiens
  CDR3 for beta chain variable domain of TCR clone 283227 (TRBV7-9, TRBJ1-2)
CASSLKQNYGYTF

SEQ ID NO: 566455 - protein, 15 aa, Homo sapiens
  CDR3 for alpha chain variable domain of TCR clone 283228 (TRAV2, TRAJ37)
CAVGDGSSNTGRLIF

SEQ ID NO: 566456 - protein, 13 aa, Homo sapiens
  CDR3 for beta chain variable domain of TCR clone 283228 (TRBV20-1, TRBJ2-7)
CSAQTGLSYEQYF

SEQ ID NO: 566457 - protein, 15 aa, Homo sapiens
  CDR3 for alpha chain variable domain of TCR clone 283229 (TRAV12-1, TRAJ9)
CVVSFGDTGGFKTIF

SEQ ID NO: 566458 - protein, 13 aa, Homo sapiens
  CDR3 for beta chain variable domain of TCR clone 283229 (TRBV2, TRBJ1-4)
CASSDRAGEKLFF

SEQ ID NO: 566459 - protein, 12 aa, Homo sapiens
  CDR3 for alpha chain variable domain of TCR clone 283230 (TRAV13-1, TRAJ34)
CAASKGTDKLIF

SEQ ID NO: 566460 - protein, 19 aa, Homo sapiens
  CDR3 for beta chain variable domain of TCR clone 283230 (TRBV7-2, TRBJ2-3)
CASSFLSRNWGGGTDTQYF

SEQ ID NO: 566461 - protein, 23 aa, Homo sapiens
  CDR3 for alpha chain variable domain of TCR clone 283231 (TRAV1-1, TRAJ37)
CLLLLRCAVLWRYGSGNTGKLIF

SEQ ID NO: 566462 - protein, 14 aa, Homo sapiens
  CDR3 for beta chain variable domain of TCR clone 283231 (TRBV7-6, TRBJ2-7)
CASSLGDRGYEQYF

SEQ ID NO: 566463 - protein, 12 aa, Homo sapiens
  CDR3 for alpha chain variable domain of TCR clone 283232 (TRAV12-1, TRAJ40)
CVVYSGTYKYIF

SEQ ID NO: 566464 - protein, 14 aa, Homo sapiens
  CDR3 for beta chain variable domain of TCR clone 283232 (TRBV7-7, TRBJ2-7)
CASSLGRGVGEQYF

SEQ ID NO: 566465 - protein, 14 aa, Homo sapiens
  CDR3 for alpha chain variable domain of TCR clone 283233 (TRAV34, TRAJ44)
CGADGTGTASKLTF

SEQ ID NO: 566466 - protein, 17 aa, Homo sapiens
  CDR3 for beta chain variable domain of TCR clone 283233 (TRBV11-2, TRBJ2-7)
CASSLYPPGVEYNEQYF

SEQ ID NO: 566467 - protein, 16 aa, Homo sapiens
  CDR3 for alpha chain variable domain of TCR clone 283234 (TRAV39, TRAJ45)
CALDRSAGGGADGLTF

SEQ ID NO: 566468 - protein, 14 aa, Homo sapiens
  CDR3 for beta chain variable domain of TCR clone 283234 (TRBV28, TRBJ1-3)
CASSFRDRVNTIYF

SEQ ID NO: 566469 - protein, 13 aa, Homo sapiens
  CDR3 for alpha chain variable domain of TCR clone 283235 (TRAV12-2, TRAJ20)
CAVYPSNDYKLSF

SEQ ID NO: 566470 - protein, 20 aa, Homo sapiens
  CDR3 for beta chain variable domain of TCR clone 283235 (TRBV28, TRBJ2-1)
CASTPIGRSPGLAGGNEQFF

SEQ ID NO: 566471 - protein, 14 aa, Homo sapiens
  CDR3 for alpha chain variable domain of TCR clone 283236 (TRAV1-2, TRAJ16)
CAVNRFSDGEKLLF

SEQ ID NO: 566472 - protein, 17 aa, Homo sapiens
  CDR3 for beta chain variable domain of TCR clone 283236 (TRBV20-1, TRBJ2-1)
FSASSSGLAGSYNEQFF

SEQ ID NO: 566473 - protein, 11 aa, Homo sapiens
  CDR3 for alpha chain variable domain of TCR clone 283237 (TRAV3, TRAJ21)
CAVGNFNKFFF

SEQ ID NO: 566474 - protein, 15 aa, Homo sapiens
  CDR3 for beta chain variable domain of TCR clone 283237 (TRBV20-1, TRBJ2-7)
CSARDRVSGMDEQYF

SEQ ID NO: 566475 - protein, 16 aa, Homo sapiens
  CDR3 for alpha chain variable domain of TCR clone 283238 (TRAV38-1, TRAJ32)
CAFMKGGGGATNKLTF

SEQ ID NO: 566476 - protein, 13 aa, Homo sapiens
  CDR3 for beta chain variable domain of TCR clone 283238 (TRBV20-1, TRBJ2-5)
CSAREAFQETQYF

SEQ ID NO: 566477 - protein, 17 aa, Homo sapiens
  CDR3 for alpha chain variable domain of TCR clone 283239 (TRAV16, TRAJ42)
SALSPKLYGGSQGNLIF

SEQ ID NO: 566478 - protein, 12 aa, Homo sapiens
  CDR3 for beta chain variable domain of TCR clone 283239 (TRBV7-3, TRBJ2-1)
CASSFQSGPQFF

SEQ ID NO: 566479 - protein, 15 aa, Homo sapiens
  CDR3 for alpha chain variable domain of TCR clone 283240 (TRAV23/DV6, TRAJ37)
CAAGEGSSNTGKLIF

SEQ ID NO: 566480 - protein, 14 aa, Homo sapiens
  CDR3 for beta chain variable domain of TCR clone 283240 (TRBV7-3, TRBJ1-1)
YASSLKGGNTEAFF

SEQ ID NO: 566481 - protein, 14 aa, Homo sapiens
  CDR3 for alpha chain variable domain of TCR clone 283241 (TRAV34, TRAJ22)
CGADTSGSARQLNF

SEQ ID NO: 566482 - protein, 15 aa, Homo sapiens
  CDR3 for beta chain variable domain of TCR clone 283241 (TRBV5-1, TRBJ2-1)
CASSPPRAHYNEQFF

SEQ ID NO: 566483 - protein, 14 aa, Homo sapiens
  CDR3 for alpha chain variable domain of TCR clone 283242 (TRAV12-2, TRAJ6)
CASKWGGGSYKPTF

SEQ ID NO: 566484 - protein, 13 aa, Homo sapiens
  CDR3 for beta chain variable domain of TCR clone 283242 (TRBV2, TRBJ1-1)
CASSEGGNTEAFF

SEQ ID NO: 566485 - protein, 12 aa, Homo sapiens
  CDR3 for alpha chain variable domain of TCR clone 283243 (TRAV27, TRAJ13)
CAGAGGYQKVTF

SEQ ID NO: 566486 - protein, 15 aa, Homo sapiens
  CDR3 for beta chain variable domain of TCR clone 283243 (TRBV20-1, TRBJ2-6)
CSARVRGPGANVLTF

SEQ ID NO: 566487 - protein, 16 aa, Homo sapiens
  CDR3 for alpha chain variable domain of TCR clone 283244 (TRAV30, TRAJ24)
CGTEIVDADSWGKFQF

SEQ ID NO: 566488 - protein, 15 aa, Homo sapiens
  CDR3 for beta chain variable domain of TCR clone 283244 (TRBV5-1, TRBJ1-2)
YASSPGDRGSYGYTF

SEQ ID NO: 566489 - protein, 12 aa, Homo sapiens
  CDR3 for alpha chain variable domain of TCR clone 283245 (TRAV1-2, TRAJ20)
TSVLANDYKLSF

SEQ ID NO: 566490 - protein, 18 aa, Homo sapiens
  CDR3 for beta chain variable domain of TCR clone 283245 (TRBV20-1, TRBJ2-6)
CSAETTPTHGSGANVLTF

SEQ ID NO: 566491 - protein, 12 aa, Homo sapiens
  CDR3 for alpha chain variable domain of TCR clone 283246 (TRAV12-3, TRAJ17)
CTMTLTGNKLTF

SEQ ID NO: 566492 - protein, 15 aa, Homo sapiens
  CDR3 for beta chain variable domain of TCR clone 283246 (TRBV20-1, TRBJ2-7)
CIARDRVSGMDEQYF

SEQ ID NO: 566493 - protein, 13 aa, Homo sapiens
  CDR3 for alpha chain variable domain of TCR clone 283247 (TRAV21, TRAJ57)
CAVIEGGSEKLVF

SEQ ID NO: 566494 - protein, 15 aa, Homo sapiens
  CDR3 for beta chain variable domain of TCR clone 283247 (TRBV10-3, TRBJ2-5)
CAISEFGRCQETQYF

SEQ ID NO: 566495 - protein, 16 aa, Homo sapiens
  CDR3 for alpha chain variable domain of TCR clone 283248 (TRAV30, TRAJ24)
CGTEIVDADSWGKFQF

SEQ ID NO: 566496 - protein, 15 aa, Homo sapiens
  CDR3 for beta chain variable domain of TCR clone 283248 (TRBV28, TRBJ2-1)
CASSIIAGGRSEQFV

SEQ ID NO: 566497 - protein, 14 aa, Homo sapiens
  CDR3 for alpha chain variable domain of TCR clone 283249 (TRAV8-3, TRAJ11)
CAVGSNSGYSTLTF

SEQ ID NO: 566498 - protein, 13 aa, Homo sapiens
  CDR3 for beta chain variable domain of TCR clone 283249 (TRBV10-3, TRBJ2-7)
CASKLAVNYEQYF

SEQ ID NO: 566499 - protein, 11 aa, Homo sapiens
  CDR3 for alpha chain variable domain of TCR clone 283250 (TRAV26-1, TRAJ37)
CIVRVGRKLIF

SEQ ID NO: 566500 - protein, 13 aa, Homo sapiens
  CDR3 for beta chain variable domain of TCR clone 283250 (TRBV14, TRBJ1-2)
CASSEDRRYGYNF

SEQ ID NO: 566501 - protein, 14 aa, Homo sapiens
  CDR3 for alpha chain variable domain of TCR clone 283251 (TRAV4, TRAJ12)
CLVCYMDSSYKLIF

SEQ ID NO: 566502 - protein, 14 aa, Homo sapiens
  CDR3 for beta chain variable domain of TCR clone 283251 (TRBV27, TRBJ1-1)
CASSPGGGATEAFF

SEQ ID NO: 566503 - protein, 13 aa, Homo sapiens
  CDR3 for alpha chain variable domain of TCR clone 283252 (TRAV17, TRAJ53)
CATEGGSNYKLTF

SEQ ID NO: 566504 - protein, 16 aa, Homo sapiens
  CDR3 for beta chain variable domain of TCR clone 283252 (TRBV7-3, TRBJ2-2)
CASSLKRGTLSGELFF

SEQ ID NO: 566505 - protein, 14 aa, Homo sapiens
  CDR3 for alpha chain variable domain of TCR clone 283253 (TRAV29/DV5, TRAJ44)
CAAFLVGTASKLTF

SEQ ID NO: 566506 - protein, 15 aa, Homo sapiens
  CDR3 for beta chain variable domain of TCR clone 283253 (TRBV28, TRBJ2-1)
CASSIIAGGRSEQFF

SEQ ID NO: 566507 - protein, 15 aa, Homo sapiens
  CDR3 for alpha chain variable domain of TCR clone 283254 (TRAV9-2, TRAJ8)
CALSGLNTGFQKLVF

SEQ ID NO: 566508 - protein, 12 aa, Homo sapiens
  CDR3 for beta chain variable domain of TCR clone 283254 (TRBV12-5, TRBJ2-5)
CASGQGVETQYF

SEQ ID NO: 566509 - protein, 15 aa, Homo sapiens
  CDR3 for alpha chain variable domain of TCR clone 283255 (TRAV3, TRAJ22)
CAVRDRGGSARQLTF

SEQ ID NO: 566510 - protein, 17 aa, Homo sapiens
  CDR3 for beta chain variable domain of TCR clone 283255 (TRBV28, TRBJ2-5)
CASSTPEGDSLQETQYF

SEQ ID NO: 566511 - protein, 14 aa, Homo sapiens
  CDR3 for alpha chain variable domain of TCR clone 283256 (TRAV38-2/DV8, TRAJ23)
CAYRSQNQGGKLIF

SEQ ID NO: 566512 - protein, 13 aa, Homo sapiens
  CDR3 for beta chain variable domain of TCR clone 283256 (TRBV24-1, TRBJ2-1)
CATSTGPYNEQFF

SEQ ID NO: 566513 - protein, 14 aa, Homo sapiens
  CDR3 for alpha chain variable domain of TCR clone 283257 (TRAV17, TRAJ57)
CATDPQAGSEKLVF

SEQ ID NO: 566514 - protein, 14 aa, Homo sapiens
  CDR3 for beta chain variable domain of TCR clone 283257 (TRBV5-8, TRBJ2-3)
CASSLGQGTDTQYF

SEQ ID NO: 566515 - protein, 10 aa, Homo sapiens
  CDR3 for alpha chain variable domain of TCR clone 283258 (TRAV20, TRAJ22)
CAAPARQLTF

SEQ ID NO: 566516 - protein, 12 aa, Homo sapiens
  CDR3 for beta chain variable domain of TCR clone 283258 (TRBV7-8, TRBJ2-7)
CASSLGDREQYF

SEQ ID NO: 566517 - protein, 12 aa, Homo sapiens
  CDR3 for alpha chain variable domain of TCR clone 283259 (TRAV12-3, TRAJ17)
CAMTLTGNKLTF

SEQ ID NO: 566518 - protein, 14 aa, Homo sapiens
  CDR3 for beta chain variable domain of TCR clone 283259 (TRBV20-1, TRBJ2-7)
QCWGSGRWDDEQYF

SEQ ID NO: 566519 - protein, 13 aa, Homo sapiens
  CDR3 for alpha chain variable domain of TCR clone 283260 (TRAV12-1, TRAJ29)
CGERGSGNTPLVF

SEQ ID NO: 566520 - protein, 13 aa, Homo sapiens
  CDR3 for beta chain variable domain of TCR clone 283260 (TRBV7-9, TRBJ2-3)
CASSPGSTDTQYF

SEQ ID NO: 566521 - protein, 13 aa, Homo sapiens
  CDR3 for alpha chain variable domain of TCR clone 283261 (TRAV13-1, TRAJ39)
CSKYSDACNMLTF

SEQ ID NO: 566522 - protein, 16 aa, Homo sapiens
  CDR3 for beta chain variable domain of TCR clone 283261 (TRBV20-1, TRBJ1-4)
CSAPGQGLLTNEKLFF

SEQ ID NO: 566523 - protein, 15 aa, Homo sapiens
  CDR3 for alpha chain variable domain of TCR clone 283262 (TRAV38-1, TRAJ37)
CAFIHGSGNTVKLIF

SEQ ID NO: 566524 - protein, 16 aa, Homo sapiens
  CDR3 for beta chain variable domain of TCR clone 283262 (TRBV12-5, TRBJ2-5)
CASGPRTSGNQETQYF

SEQ ID NO: 566525 - protein, 15 aa, Homo sapiens
  CDR3 for alpha chain variable domain of TCR clone 283263 (TRAV25, TRAJ53)
CPATGGGGSNYKLTF

SEQ ID NO: 566526 - protein, 19 aa, Homo sapiens
  CDR3 for beta chain variable domain of TCR clone 283263 (TRBV7-8, TRBJ2-3)
CASSFLSRNWGGGTDTQYF

SEQ ID NO: 566527 - protein, 12 aa, Homo sapiens
  CDR3 for alpha chain variable domain of TCR clone 283264 (TRAV29/DV5, TRAJ49)
CAAMDTGNQFYF

SEQ ID NO: 566528 - protein, 12 aa, Homo sapiens
  CDR3 for beta chain variable domain of TCR clone 283264 (TRBV12-4, TRBJ2-7)
CASSLGGYEQYF

SEQ ID NO: 566529 - protein, 18 aa, Homo sapiens
  CDR3 for alpha chain variable domain of TCR clone 283265 (TRAV21, TRAJ52)
CAVRPSPAGCTSYGKLTF

SEQ ID NO: 566530 - protein, 15 aa, Homo sapiens
  CDR3 for beta chain variable domain of TCR clone 283265 (TRBV7-2, TRBJ1-2)
CASSLVSGGDYGYTF

SEQ ID NO: 566531 - protein, 11 aa, Homo sapiens
  CDR3 for alpha chain variable domain of TCR clone 283266 (TRAV12-2, TRAJ33)
CAVTSNYQIIW

SEQ ID NO: 566532 - protein, 14 aa, Homo sapiens
  CDR3 for beta chain variable domain of TCR clone 283266 (TRBV12-4, TRBJ2-2)
CASNQGANTGELFF

SEQ ID NO: 566533 - protein, 14 aa, Homo sapiens
  CDR3 for alpha chain variable domain of TCR clone 283267 (TRAV17, TRAJ56)
CATVPAGANSKLTF

SEQ ID NO: 566534 - protein, 11 aa, Homo sapiens
  CDR3 for beta chain variable domain of TCR clone 283267 (TRBV19, TRBJ2-2)
CASRYSGELFF

SEQ ID NO: 566535 - protein, 12 aa, Homo sapiens
  CDR3 for alpha chain variable domain of TCR clone 283268 (TRAV29/DV5, TRAJ49)
CAATNTGSQFYF

SEQ ID NO: 566536 - protein, 19 aa, Homo sapiens
  CDR3 for beta chain variable domain of TCR clone 283268 (TRBV25-1, TRBJ2-2)
CAILVYRVDRGRKTGELFF

SEQ ID NO: 566537 - protein, 18 aa, Homo sapiens
  CDR3 for alpha chain variable domain of TCR clone 283269 (TRAV21, TRAJ52)
RAVRPSPAGGTCYGKLTF

SEQ ID NO: 566538 - protein, 15 aa, Homo sapiens
  CDR3 for beta chain variable domain of TCR clone 283269 (TRBV19, TRBJ1-1)
CASTSGQIQNTEAFF

SEQ ID NO: 566539 - protein, 12 aa, Homo sapiens
  CDR3 for alpha chain variable domain of TCR clone 283270 (TRAV12-1, TRAJ23)
CVVNNQGGKLIF

SEQ ID NO: 566540 - protein, 13 aa, Homo sapiens
  CDR3 for beta chain variable domain of TCR clone 283270 (TRBV19, TRBJ1-2)
CASSVPGQDGYTF

SEQ ID NO: 566541 - protein, 14 aa, Homo sapiens
  CDR3 for alpha chain variable domain of TCR clone 283271 (TRAV26-1, TRAJ44)
CIVRPTGTASQLTF

SEQ ID NO: 566542 - protein, 12 aa, Homo sapiens
  CDR3 for beta chain variable domain of TCR clone 283271 (TRBV11-3, TRBJ1-1)
CASSLRDSEAVF

SEQ ID NO: 566543 - protein, 16 aa, Homo sapiens
  CDR3 for alpha chain variable domain of TCR clone 283272 (TRAV21, TRAJ37)
CAVRTAGSSNTGKLIF

SEQ ID NO: 566544 - protein, 13 aa, Homo sapiens
  CDR3 for beta chain variable domain of TCR clone 283272 (TRBV7-9, TRBJ2-5)
CASLPSGRETQYI

SEQ ID NO: 566545 - protein, 14 aa, Homo sapiens
  CDR3 for alpha chain variable domain of TCR clone 283273 (TRAV8-1, TRAJ49)
CASSIANTGNQFYF

SEQ ID NO: 566546 - protein, 13 aa, Homo sapiens
  CDR3 for beta chain variable domain of TCR clone 283273 (TRBV11-2, TRBJ2-5)
CASSLSSQETQYF

SEQ ID NO: 566547 - protein, 13 aa, Homo sapiens
  CDR3 for alpha chain variable domain of TCR clone 283274 (TRAV12-3, TRAJ40)
CAMSARGTYKYIF

SEQ ID NO: 566548 - protein, 14 aa, Homo sapiens
  CDR3 for beta chain variable domain of TCR clone 283274 (TRBV25-1, TRBJ1-1)
CASTHLGGNTEAFF

SEQ ID NO: 566549 - protein, 12 aa, Homo sapiens
  CDR3 for alpha chain variable domain of TCR clone 283275 (TRAV8-1, TRAJ23)
CAVGNQGGKLIF

SEQ ID NO: 566550 - protein, 16 aa, Homo sapiens
  CDR3 for beta chain variable domain of TCR clone 283275 (TRBV7-3, TRBJ2-2)
CASSLKRGTLSGELFC

SEQ ID NO: 566551 - protein, 13 aa, Homo sapiens
  CDR3 for alpha chain variable domain of TCR clone 283276 (TRAV21, TRAJ20)
CAVSRLGYYKLSF

SEQ ID NO: 566552 - protein, 13 aa, Homo sapiens
  CDR3 for beta chain variable domain of TCR clone 283276 (TRBV7-3, TRBJ1-1)
CASSPAGGLEAFF

SEQ ID NO: 566553 - protein, 13 aa, Homo sapiens
  CDR3 for alpha chain variable domain of TCR clone 283277 (TRAV13-1, TRAJ39)
CSKYSNAGNMLTF

SEQ ID NO: 566554 - protein, 16 aa, Homo sapiens
  CDR3 for beta chain variable domain of TCR clone 283277 (TRBV20-1, TRBJ1-4)
CCAPGQGLLTNEKLFF

SEQ ID NO: 566555 - protein, 14 aa, Homo sapiens
  CDR3 for alpha chain variable domain of TCR clone 283278 (TRAV17, TRAJ22)
CATVLSGSARQLAF

SEQ ID NO: 566556 - protein, 13 aa, Homo sapiens
  CDR3 for beta chain variable domain of TCR clone 283278 (TRBV15, TRBJ1-6)
CATSGGLNSPLHF

SEQ ID NO: 566557 - protein, 17 aa, Homo sapiens
  CDR3 for alpha chain variable domain of TCR clone 283279 (TRAV3, TRAJ6)
CAVRDGPRAGGSYIPTF

SEQ ID NO: 566558 - protein, 13 aa, Homo sapiens
  CDR3 for beta chain variable domain of TCR clone 283279 (TRBV2, TRBJ1-4)
CASSERAGEKLLF

SEQ ID NO: 566559 - protein, 15 aa, Homo sapiens
  CDR3 for alpha chain variable domain of TCR clone 283280 (TRAV20, TRAJ53)
CAVQASGGSNYKLTF

SEQ ID NO: 566560 - protein, 16 aa, Homo sapiens
  CDR3 for beta chain variable domain of TCR clone 283280 (TRBV18, TRBJ2-3)
CASSPRTSGGANTQYF

SEQ ID NO: 566561 - protein, 15 aa, Homo sapiens
  CDR3 for alpha chain variable domain of TCR clone 283281 (TRAV30, TRAJ32)
CVTAILGGATNKLIF

SEQ ID NO: 566562 - protein, 17 aa, Homo sapiens
  CDR3 for beta chain variable domain of TCR clone 283281 (TRBV5-4, TRBJ2-1)
CASSSAGGRGPYNEQFF

SEQ ID NO: 566563 - protein, 16 aa, Homo sapiens
  CDR3 for alpha chain variable domain of TCR clone 283282 (TRAV12-3, TRAJ53)
CAMSPGSGGSNYRLTF

SEQ ID NO: 566564 - protein, 11 aa, Homo sapiens
  CDR3 for beta chain variable domain of TCR clone 283282 (TRBV29-1, TRBJ2-5)
CSEERTGTQYF

SEQ ID NO: 566565 - protein, 15 aa, Homo sapiens
  CDR3 for alpha chain variable domain of TCR clone 283283 (TRAV12-3, TRAJ6)
CAMSATTGGSYIPKF

SEQ ID NO: 566566 - protein, 15 aa, Homo sapiens
  CDR3 for beta chain variable domain of TCR clone 283283 (TRBV5-1, TRBJ2-7)
CASSLNGGPAREQYF

SEQ ID NO: 566567 - protein, 22 aa, Homo sapiens
  CDR3 for alpha chain variable domain of TCR clone 283284 (TRAV40, )
CLLGDGIPDIKNPDPAVYQLRD

SEQ ID NO: 566568 - protein, 16 aa, Homo sapiens
  CDR3 for beta chain variable domain of TCR clone 283284 (TRBV20-1, TRBJ1-5)
CSAELPGQQTNQPQHF

SEQ ID NO: 566569 - protein, 14 aa, Homo sapiens
  CDR3 for alpha chain variable domain of TCR clone 283285 (TRAV13-1, TRAJ45)
VNMYSGGGSDGLTF

SEQ ID NO: 566570 - protein, 13 aa, Homo sapiens
  CDR3 for beta chain variable domain of TCR clone 283285 (TRBV19, TRBJ1-2)
CASSVPGQDGYTF

SEQ ID NO: 566571 - protein, 14 aa, Homo sapiens
  CDR3 for alpha chain variable domain of TCR clone 283286 (TRAV23/DV6, TRAJ13)
CAASETGGYQKVTF

SEQ ID NO: 566572 - protein, 16 aa, Homo sapiens
  CDR3 for beta chain variable domain of TCR clone 283286 (TRBV5-1, TRBJ1-3)
CASSPWAPSSGNTIYV

SEQ ID NO: 566573 - protein, 14 aa, Homo sapiens
  CDR3 for alpha chain variable domain of TCR clone 283287 (TRAV13-1, TRAJ32)
CAARGSGATNKLIF

SEQ ID NO: 566574 - protein, 16 aa, Homo sapiens
  CDR3 for beta chain variable domain of TCR clone 283287 (TRBV7-9, TRBJ2-2)
CGSSGFGGANTGELFF

SEQ ID NO: 566575 - protein, 11 aa, Homo sapiens
  CDR3 for alpha chain variable domain of TCR clone 283288 (TRAV12-3, TRAJ49)
CAANTGNQFYF

SEQ ID NO: 566576 - protein, 15 aa, Homo sapiens
  CDR3 for beta chain variable domain of TCR clone 283288 (TRBV11-2, TRBJ2-1)
CASSLGTSGLNEQVF

SEQ ID NO: 566577 - protein, 11 aa, Homo sapiens
  CDR3 for alpha chain variable domain of TCR clone 283289 (TRAV13-2, TRAJ20)
CAENMSYKLSF

SEQ ID NO: 566578 - protein, 16 aa, Homo sapiens
  CDR3 for beta chain variable domain of TCR clone 283289 (TRBV19, TRBJ2-1)
CASSKAGPSSYNEQFF

SEQ ID NO: 566579 - protein, 15 aa, Homo sapiens
  CDR3 for alpha chain variable domain of TCR clone 283290 (TRAV2, TRAJ15)
CAVEDRGQAGTAVIF

SEQ ID NO: 566580 - protein, 13 aa, Homo sapiens
  CDR3 for beta chain variable domain of TCR clone 283290 (TRBV10-2, TRBJ2-7)
CASGASGGYEQYF

SEQ ID NO: 566581 - protein, 14 aa, Homo sapiens
  CDR3 for alpha chain variable domain of TCR clone 283291 (TRAV1-2, TRAJ16)
CAVNRFSVGQKLLF

SEQ ID NO: 566582 - protein, 15 aa, Homo sapiens
  CDR3 for beta chain variable domain of TCR clone 283291 (TRBV7-9, TRBJ1-6)
CASSSPGRGNSPLYF

SEQ ID NO: 566583 - protein, 16 aa, Homo sapiens
  CDR3 for alpha chain variable domain of TCR clone 283292 (TRAV13-1, TRAJ45)
YAASWESGGGADGLTF

SEQ ID NO: 566584 - protein, 14 aa, Homo sapiens
  CDR3 for beta chain variable domain of TCR clone 283292 (TRBV12-4, TRBJ1-3)
CASGQTVSGNTIYF

SEQ ID NO: 566585 - protein, 13 aa, Homo sapiens
  CDR3 for alpha chain variable domain of TCR clone 283293 (TRAV13-1, TRAJ5)
FASSDTGMIALTF

SEQ ID NO: 566586 - protein, 12 aa, Homo sapiens
  CDR3 for beta chain variable domain of TCR clone 283293 (TRBV28, TRBJ2-3)
CASSLYRDTQYF

SEQ ID NO: 566587 - protein, 14 aa, Homo sapiens
  CDR3 for alpha chain variable domain of TCR clone 283294 (TRAV12-1, TRAJ10)
CVAILTGGGNKLTF

SEQ ID NO: 566588 - protein, 15 aa, Homo sapiens
  CDR3 for beta chain variable domain of TCR clone 283294 (TRBV20-1, TRBJ2-7)
CSARGFRPQTYEQYL

SEQ ID NO: 566589 - protein, 14 aa, Homo sapiens
  CDR3 for alpha chain variable domain of TCR clone 283295 (TRAV9-2, TRAJ6)
CALSDPGGSYIPTF

SEQ ID NO: 566590 - protein, 14 aa, Homo sapiens
  CDR3 for beta chain variable domain of TCR clone 283295 (TRBV6-1, TRBJ1-3)
CTSVQGGGGNTIYF

SEQ ID NO: 566591 - protein, 16 aa, Homo sapiens
  CDR3 for alpha chain variable domain of TCR clone 283296 (TRAV4, TRAJ22)
CLVGDLYSGSARQLTF

SEQ ID NO: 566592 - protein, 16 aa, Homo sapiens
  CDR3 for beta chain variable domain of TCR clone 283296 (TRBV7-9, TRBJ2-1)
CASSDVVGGSYNEQFF

SEQ ID NO: 566593 - protein, 12 aa, Homo sapiens
  CDR3 for alpha chain variable domain of TCR clone 283297 (TRAV3, TRAJ43)
CAVRDPNNDMRF

SEQ ID NO: 566594 - protein, 15 aa, Homo sapiens
  CDR3 for beta chain variable domain of TCR clone 283297 (TRBV27, TRBJ1-5)
CASSPGTGFDQHQHF

SEQ ID NO: 566595 - protein, 14 aa, Homo sapiens
  CDR3 for alpha chain variable domain of TCR clone 283298 (TRAV13-2, TRAJ17)
CAENSKAAGNKLTF

SEQ ID NO: 566596 - protein, 17 aa, Homo sapiens
  CDR3 for beta chain variable domain of TCR clone 283298 (TRBV20-1, TRBJ2-1)
CSARDPLAGVWDNEQFF

SEQ ID NO: 566597 - protein, 15 aa, Homo sapiens
  CDR3 for alpha chain variable domain of TCR clone 283299 (TRAV4, TRAJ26)
CLVGGLDNYGQNFVF

SEQ ID NO: 566598 - protein, 20 aa, Homo sapiens
  CDR3 for beta chain variable domain of TCR clone 283299 (TRBV7-8, TRBJ2-2)
CASSHLFPGPTIHITGELFF

SEQ ID NO: 566599 - protein, 15 aa, Homo sapiens
  CDR3 for alpha chain variable domain of TCR clone 283300 (TRAV21, TRAJ52)
CAVRGGGTSYGKLTF

SEQ ID NO: 566600 - protein, 16 aa, Homo sapiens
  CDR3 for beta chain variable domain of TCR clone 283300 (TRBV19, TRBJ2-2)
CASRSPGTGATGELFF

SEQ ID NO: 566601 - protein, 11 aa, Homo sapiens
  CDR3 for alpha chain variable domain of TCR clone 283301 (TRAV27, TRAJ47)
CRSNQGNKLVF

SEQ ID NO: 566602 - protein, 16 aa, Homo sapiens
  CDR3 for beta chain variable domain of TCR clone 283301 (TRBV12-4, TRBJ1-5)
CASSRPVGGPNQPQHF

SEQ ID NO: 566603 - protein, 16 aa, Homo sapiens
  CDR3 for alpha chain variable domain of TCR clone 283302 (TRAV4, TRAJ5)
CLVGPDHGHGQESTYF

SEQ ID NO: 566604 - protein, 11 aa, Homo sapiens
  CDR3 for beta chain variable domain of TCR clone 283302 (TRBV11-2, TRBJ2-2)
CASSLPGELFF

SEQ ID NO: 566605 - protein, 14 aa, Homo sapiens
  CDR3 for alpha chain variable domain of TCR clone 283303 (TRAV17, TRAJ12)
CAILPMDSSYKLIF

SEQ ID NO: 566606 - protein, 13 aa, Homo sapiens
  CDR3 for beta chain variable domain of TCR clone 283303 (TRBV4-1, TRBJ2-2)
CASSPESTGELFF

SEQ ID NO: 566607 - protein, 14 aa, Homo sapiens
  CDR3 for alpha chain variable domain of TCR clone 283304 (TRAV38-1, TRAJ54)
CDFMSPSGAQKLVF

SEQ ID NO: 566608 - protein, 16 aa, Homo sapiens
  CDR3 for beta chain variable domain of TCR clone 283304 (TRBV28, TRBJ2-1)
CASSLGGSGSYNEQFF

SEQ ID NO: 566609 - protein, 17 aa, Homo sapiens
  CDR3 for alpha chain variable domain of TCR clone 283305 (TRAV17, TRAJ52)
CAKDANAGGTSYGKRTF

SEQ ID NO: 566610 - protein, 14 aa, Homo sapiens
  CDR3 for beta chain variable domain of TCR clone 283305 (TRBV2, TRBJ2-1)
CASRTGSSYNEQFF

SEQ ID NO: 566611 - protein, 17 aa, Homo sapiens
  CDR3 for alpha chain variable domain of TCR clone 283306 (TRAV13-1, )
CAANIQNPDPAVYQLSD

SEQ ID NO: 566612 - protein, 16 aa, Homo sapiens
  CDR3 for beta chain variable domain of TCR clone 283306 (TRBV5-4, TRBJ2-3)
CASSWGTSGGTDTQYF

SEQ ID NO: 566613 - protein, 13 aa, Homo sapiens
  CDR3 for alpha chain variable domain of TCR clone 283307 (TRAV27, TRAJ29)
CAGAHSGNTPLVF

SEQ ID NO: 566614 - protein, 14 aa, Homo sapiens
  CDR3 for beta chain variable domain of TCR clone 283307 (TRBV20-1, TRBJ1-1)
CSAQTRIGGTEAFF

SEQ ID NO: 566615 - protein, 11 aa, Homo sapiens
  CDR3 for alpha chain variable domain of TCR clone 283308 (TRAV4, TRAJ31)
CLVGDNARLMS

SEQ ID NO: 566616 - protein, 14 aa, Homo sapiens
  CDR3 for beta chain variable domain of TCR clone 283308 (TRBV4-1, TRBJ2-2)
CASSQAVNTGELFF

SEQ ID NO: 566617 - protein, 13 aa, Homo sapiens
  CDR3 for alpha chain variable domain of TCR clone 283309 (TRAV21, TRAJ20)
CAVGLRVDYKLSL

SEQ ID NO: 566618 - protein, 17 aa, Homo sapiens
  CDR3 for beta chain variable domain of TCR clone 283309 (TRBV7-3, TRBJ2-3)
CASSLMKRMRGADTQYF

SEQ ID NO: 566619 - protein, 13 aa, Homo sapiens
  CDR3 for alpha chain variable domain of TCR clone 283310 (TRAV36/DV7, TRAJ54)
CAVLIQGAKKLVF

SEQ ID NO: 566620 - protein, 13 aa, Homo sapiens
  CDR3 for beta chain variable domain of TCR clone 283310 (TRBV29-1, TRBJ2-4)
CSVGEGTKNIQYF

SEQ ID NO: 566621 - protein, 15 aa, Homo sapiens
  CDR3 for alpha chain variable domain of TCR clone 283311 (TRAV8-4, TRAJ11)
CAVSRALSGYRPLTF

SEQ ID NO: 566622 - protein, 13 aa, Homo sapiens
  CDR3 for beta chain variable domain of TCR clone 283311 (TRBV10-3, TRBJ2-7)
CASKLAVNYEQYF

SEQ ID NO: 566623 - protein, 15 aa, Homo sapiens
  CDR3 for alpha chain variable domain of TCR clone 283312 (TRAV17, TRAJ42)
CATDHYGGSQGNLIF

SEQ ID NO: 566624 - protein, 13 aa, Homo sapiens
  CDR3 for beta chain variable domain of TCR clone 283312 (TRBV7-2, TRBJ1-5)
CANSFARNQPQHF

SEQ ID NO: 566625 - protein, 17 aa, Homo sapiens
  CDR3 for alpha chain variable domain of TCR clone 283313 (TRAV3, TRAJ42)
CAVRDRDYGGSQGNLLF

SEQ ID NO: 566626 - protein, 12 aa, Homo sapiens
  CDR3 for beta chain variable domain of TCR clone 283313 (TRBV11-2, TRBJ2-1)
CASSPGNNEQFF

SEQ ID NO: 566627 - protein, 13 aa, Homo sapiens
  CDR3 for alpha chain variable domain of TCR clone 283314 (TRAV24, TRAJ42)
CAFSTGSQGNLIF

SEQ ID NO: 566628 - protein, 14 aa, Homo sapiens
  CDR3 for beta chain variable domain of TCR clone 283314 (TRBV7-2, TRBJ2-7)
CASSPKTSFYEQYF

SEQ ID NO: 566629 - protein, 13 aa, Homo sapiens
  CDR3 for alpha chain variable domain of TCR clone 283315 (TRAV17, TRAJ5)
CAPMDTGKRALTF

SEQ ID NO: 566630 - protein, 15 aa, Homo sapiens
  CDR3 for beta chain variable domain of TCR clone 283315 (TRBV6-6, TRBJ2-5)
CASSPGGGLEETQCF

SEQ ID NO: 566631 - protein, 15 aa, Homo sapiens
  CDR3 for alpha chain variable domain of TCR clone 283316 (TRAV23/DV6, TRAJ33)
WAVSNSGGGNYQLIW

SEQ ID NO: 566632 - protein, 14 aa, Homo sapiens
  CDR3 for beta chain variable domain of TCR clone 283316 (TRBV7-2, TRBJ2-7)
CASSLYPGRYEQYF

SEQ ID NO: 566633 - protein, 12 aa, Homo sapiens
  CDR3 for alpha chain variable domain of TCR clone 283317 (TRAV17, TRAJ12)
CATLRSSYKLIF

SEQ ID NO: 566634 - protein, 16 aa, Homo sapiens
  CDR3 for beta chain variable domain of TCR clone 283317 (TRBV28, TRBJ2-7)
CASSLFLETGGHEQYF

SEQ ID NO: 566635 - protein, 14 aa, Homo sapiens
  CDR3 for alpha chain variable domain of TCR clone 283318 (TRAV12-2, TRAJ49)
CAVTLGLYGNQFYF

SEQ ID NO: 566636 - protein, 14 aa, Homo sapiens
  CDR3 for beta chain variable domain of TCR clone 283318 (TRBV7-3, TRBJ1-1)
CASSLKGGNTEAFF

SEQ ID NO: 566637 - protein, 13 aa, Homo sapiens
  CDR3 for alpha chain variable domain of TCR clone 283319 (TRAV3, TRAJ21)
CAVREPDFNKFYF

SEQ ID NO: 566638 - protein, 13 aa, Homo sapiens
  CDR3 for beta chain variable domain of TCR clone 283319 (TRBV12-4, TRBJ2-2)
CASSPLPPGELFF

SEQ ID NO: 566639 - protein, 18 aa, Homo sapiens
  CDR3 for alpha chain variable domain of TCR clone 283320 (TRAV16, TRAJ52)
CALSGVDAGGTSYGKLTL

SEQ ID NO: 566640 - protein, 14 aa, Homo sapiens
  CDR3 for beta chain variable domain of TCR clone 283320 (TRBV7-9, TRBJ2-3)
CASSLEDGTDTQYF

SEQ ID NO: 566641 - protein, 15 aa, Homo sapiens
  CDR3 for alpha chain variable domain of TCR clone 283321 (TRAV26-1, TRAJ16)
CIVSFRFSDGQKLLF

SEQ ID NO: 566642 - protein, 17 aa, Homo sapiens
  CDR3 for beta chain variable domain of TCR clone 283321 (TRBV25-1, TRBJ2-7)
CQPQQPPRTGVTYEQYF

SEQ ID NO: 566643 - protein, 11 aa, Homo sapiens
  CDR3 for alpha chain variable domain of TCR clone 283322 (TRAV12-2, TRAJ33)
CAVTSTYQLIW

SEQ ID NO: 566644 - protein, 14 aa, Homo sapiens
  CDR3 for beta chain variable domain of TCR clone 283322 (TRBV28, TRBJ2-2)
CASRIRSGTGELFF

SEQ ID NO: 566645 - protein, 11 aa, Homo sapiens
  CDR3 for alpha chain variable domain of TCR clone 283323 (TRAV23/DV6, TRAJ56)
CAAPANSKLTF

SEQ ID NO: 566646 - protein, 14 aa, Homo sapiens
  CDR3 for beta chain variable domain of TCR clone 283323 (TRBV27, TRBJ2-1)
CASSFGREANERFF

SEQ ID NO: 566647 - protein, 19 aa, Homo sapiens
  CDR3 for alpha chain variable domain of TCR clone 283324 (TRAV4, TRAJ41)
PRVSLSDTAVYYWGYALNF

SEQ ID NO: 566648 - protein, 13 aa, Homo sapiens
  CDR3 for beta chain variable domain of TCR clone 283324 (TRBV7-2, TRBJ2-7)
CASSSPSGSEQYF

SEQ ID NO: 566649 - protein, 14 aa, Homo sapiens
  CDR3 for alpha chain variable domain of TCR clone 283325 (TRAV12-2, TRAJ40)
CAVKIPSGTYKYIF

SEQ ID NO: 566650 - protein, 14 aa, Homo sapiens
  CDR3 for beta chain variable domain of TCR clone 283325 (TRBV19, TRBJ2-1)
CASPTFVVSGEQFF

SEQ ID NO: 566651 - protein, 13 aa, Homo sapiens
  CDR3 for alpha chain variable domain of TCR clone 283326 (TRAV35, TRAJ42)
CAGLPGSQGNLIF

SEQ ID NO: 566652 - protein, 14 aa, Homo sapiens
  CDR3 for beta chain variable domain of TCR clone 283326 (TRBV4-1, TRBJ2-2)
CASSQAVNTGELFF

SEQ ID NO: 566653 - protein, 13 aa, Homo sapiens
  CDR3 for alpha chain variable domain of TCR clone 283327 (TRAV14/DV4, TRAJ34)
CNERGAHTDKLIF

SEQ ID NO: 566654 - protein, 14 aa, Homo sapiens
  CDR3 for beta chain variable domain of TCR clone 283327 (TRBV19, TRBJ2-1)
CASPTFVLSGEQFF

SEQ ID NO: 566655 - protein, 14 aa, Homo sapiens
  CDR3 for alpha chain variable domain of TCR clone 283328 (TRAV26-1, TRAJ48)
CIVKSNFGNEKLTF

SEQ ID NO: 566656 - protein, 14 aa, Homo sapiens
  CDR3 for beta chain variable domain of TCR clone 283328 (TRBV7-6, TRBJ2-6)
CASSLSGGANVLTF

SEQ ID NO: 566657 - protein, 16 aa, Homo sapiens
  CDR3 for alpha chain variable domain of TCR clone 283329 (TRAV3, TRAJ10)
CAVRDMRAGGGNKLTF

SEQ ID NO: 566658 - protein, 17 aa, Homo sapiens
  CDR3 for beta chain variable domain of TCR clone 283329 (TRBV19, TRBJ2-6)
CASSTGQVFSGANVLTF

SEQ ID NO: 566659 - protein, 13 aa, Homo sapiens
  CDR3 for alpha chain variable domain of TCR clone 283330 (TRAV27, TRAJ57)
CRNAQGGSEKLVF

SEQ ID NO: 566660 - protein, 11 aa, Homo sapiens
  CDR3 for beta chain variable domain of TCR clone 283330 (TRBV11-2, TRBJ1-1)
CASSINTEAFF

SEQ ID NO: 566661 - protein, 16 aa, Homo sapiens
  CDR3 for alpha chain variable domain of TCR clone 283331 (TRAV26-1, TRAJ53)
CIVRVAMGGSNCKLTF

SEQ ID NO: 566662 - protein, 12 aa, Homo sapiens
  CDR3 for beta chain variable domain of TCR clone 283331 (TRBV7-9, TRBJ1-5)
CASSPQGQPQHF

SEQ ID NO: 566663 - protein, 11 aa, Homo sapiens
  CDR3 for alpha chain variable domain of TCR clone 283332 (TRAV16, TRAJ42)
CALASQGNLIF

SEQ ID NO: 566664 - protein, 14 aa, Homo sapiens
  CDR3 for beta chain variable domain of TCR clone 283332 (TRBV11-2, TRBJ2-7)
CASSLELEGYEQYF

SEQ ID NO: 566665 - protein, 12 aa, Homo sapiens
  CDR3 for alpha chain variable domain of TCR clone 283333 (TRAV8-4, TRAJ43)
CAVSVNNNDIRF

SEQ ID NO: 566666 - protein, 13 aa, Homo sapiens
  CDR3 for beta chain variable domain of TCR clone 283333 (TRBV11-2, TRBJ1-5)
CASSLDRNQPQHF

SEQ ID NO: 566667 - protein, 13 aa, Homo sapiens
  CDR3 for alpha chain variable domain of TCR clone 283334 (TRAV27, TRAJ45)
CRSSGGGADVLTF

SEQ ID NO: 566668 - protein, 11 aa, Homo sapiens
  CDR3 for beta chain variable domain of TCR clone 283334 (TRBV19, TRBJ1-1)
CASSIGSEAFF

SEQ ID NO: 566669 - protein, 11 aa, Homo sapiens
  CDR3 for alpha chain variable domain of TCR clone 283335 (TRAV21, TRAJ41)
CAVRSGYELNF

SEQ ID NO: 566670 - protein, 13 aa, Homo sapiens
  CDR3 for beta chain variable domain of TCR clone 283335 (TRBV7-9, TRBJ1-2)
CASSLKQNYGYTV

SEQ ID NO: 566671 - protein, 11 aa, Homo sapiens
  CDR3 for alpha chain variable domain of TCR clone 283336 (TRAV29/DV5, TRAJ31)
CAAMNNARLMF

SEQ ID NO: 566672 - protein, 15 aa, Homo sapiens
  CDR3 for beta chain variable domain of TCR clone 283336 (TRBV6-5, TRBJ2-1)
CASSYDAGAGNEQFF

SEQ ID NO: 566673 - protein, 13 aa, Homo sapiens
  CDR3 for alpha chain variable domain of TCR clone 283337 (TRAV35, TRAJ53)
CAGQESSNYKLTF

SEQ ID NO: 566674 - protein, 11 aa, Homo sapiens
  CDR3 for beta chain variable domain of TCR clone 283337 (TRBV29-1, TRBJ2-5)
CSEDRTGTKYF

SEQ ID NO: 566675 - protein, 13 aa, Homo sapiens
  CDR3 for alpha chain variable domain of TCR clone 283338 (TRAV17, TRAJ26)
CATVDNYGQNFVF

SEQ ID NO: 566676 - protein, 15 aa, Homo sapiens
  CDR3 for beta chain variable domain of TCR clone 283338 (TRBV2, TRBJ2-2)
CASSRETVGTGELFF

SEQ ID NO: 566677 - protein, 13 aa, Homo sapiens
  CDR3 for alpha chain variable domain of TCR clone 283339 (TRAV21, TRAJ27)
CAARPGNAGESTF

SEQ ID NO: 566678 - protein, 15 aa, Homo sapiens
  CDR3 for beta chain variable domain of TCR clone 283339 (TRBV12-4, TRBJ2-5)
CASSPPTGLQETQYF

SEQ ID NO: 566679 - protein, 15 aa, Homo sapiens
  CDR3 for alpha chain variable domain of TCR clone 283340 (TRAV13-2, TRAJ5)
CAENPHWTGRRALTF

SEQ ID NO: 566680 - protein, 16 aa, Homo sapiens
  CDR3 for beta chain variable domain of TCR clone 283340 (TRBV4-2, TRBJ2-2)
CASTTKEGGLSGELFF

SEQ ID NO: 566681 - protein, 16 aa, Homo sapiens
  CDR3 for alpha chain variable domain of TCR clone 283341 (TRAV3, TRAJ10)
CAVRDMRAGGGNKLTF

SEQ ID NO: 566682 - protein, 15 aa, Homo sapiens
  CDR3 for beta chain variable domain of TCR clone 283341 (TRBV20-1, TRBJ2-7)
CSARDRVSGVDEQYF

SEQ ID NO: 566683 - protein, 13 aa, Homo sapiens
  CDR3 for alpha chain variable domain of TCR clone 283342 (TRAV8-3, TRAJ48)
CAVVPFGNEKLTF

SEQ ID NO: 566684 - protein, 14 aa, Homo sapiens
  CDR3 for beta chain variable domain of TCR clone 283342 (TRBV12-5, TRBJ2-5)
CASGPRTHQETQYF

SEQ ID NO: 566685 - protein, 13 aa, Homo sapiens
  CDR3 for alpha chain variable domain of TCR clone 283343 (TRAV1-2, TRAJ7)
CAGPYYGNNRLAF

SEQ ID NO: 566686 - protein, 14 aa, Homo sapiens
  CDR3 for beta chain variable domain of TCR clone 283343 (TRBV28, TRBJ2-7)
CASSLLRISYEQYF

SEQ ID NO: 566687 - protein, 15 aa, Homo sapiens
  CDR3 for alpha chain variable domain of TCR clone 283344 (TRAV26-1, TRAJ29)
CIVRVEGSGNTPLVF

SEQ ID NO: 566688 - protein, 15 aa, Homo sapiens
  CDR3 for beta chain variable domain of TCR clone 283344 (TRBV7-9, TRBJ1-6)
CASSPPGRGNSPLHF

SEQ ID NO: 566689 - protein, 14 aa, Homo sapiens
  CDR3 for alpha chain variable domain of TCR clone 283345 (TRAV13-1, TRAJ23)
CAAIRLGRGGKLIF

SEQ ID NO: 566690 - protein, 15 aa, Homo sapiens
  CDR3 for beta chain variable domain of TCR clone 283345 (TRBV7-2, TRBJ2-1)
CASSLVAGRYNEQFF

SEQ ID NO: 566691 - protein, 14 aa, Homo sapiens
  CDR3 for alpha chain variable domain of TCR clone 283346 (TRAV29/DV5, TRAJ45)
CAASFRGGADGLTF

SEQ ID NO: 566692 - protein, 12 aa, Homo sapiens
  CDR3 for beta chain variable domain of TCR clone 283346 (TRBV7-7, TRBJ2-5)
CASSLGGETQYF

SEQ ID NO: 566693 - protein, 12 aa, Homo sapiens
  CDR3 for alpha chain variable domain of TCR clone 283347 (TRAV13-1, TRAJ49)
CAASPMGNQFYF

SEQ ID NO: 566694 - protein, 17 aa, Homo sapiens
  CDR3 for beta chain variable domain of TCR clone 283347 (TRBV11-2, TRBJ2-1)
CASSVYPPGVEYNEQFF

SEQ ID NO: 566695 - protein, 15 aa, Homo sapiens
  CDR3 for alpha chain variable domain of TCR clone 283348 (TRAV25, TRAJ53)
CPTSNSGGSNYKLTF

SEQ ID NO: 566696 - protein, 14 aa, Homo sapiens
  CDR3 for beta chain variable domain of TCR clone 283348 (TRBV11-3, TRBJ2-3)
CASSGQGSTDTQYF

SEQ ID NO: 566697 - protein, 12 aa, Homo sapiens
  CDR3 for alpha chain variable domain of TCR clone 283349 (TRAV27, TRAJ9)
CAGESGGFKTVF

SEQ ID NO: 566698 - protein, 14 aa, Homo sapiens
  CDR3 for beta chain variable domain of TCR clone 283349 (TRBV6-1, TRBJ2-1)
CASAKDGFYNEQFF

SEQ ID NO: 566699 - protein, 13 aa, Homo sapiens
  CDR3 for alpha chain variable domain of TCR clone 283350 (TRAV38-2/DV8, TRAJ34)
CAYRNYNTDKLIF

SEQ ID NO: 566700 - protein, 16 aa, Homo sapiens
  CDR3 for beta chain variable domain of TCR clone 283350 (TRBV7-2, TRBJ2-5)
CASSSKWLSGQETQYF

SEQ ID NO: 566701 - protein, 18 aa, Homo sapiens
  CDR3 for alpha chain variable domain of TCR clone 283351 (TRAV21, TRAJ52)
CALGPSPAGGTSYGKLTF

SEQ ID NO: 566702 - protein, 17 aa, Homo sapiens
  CDR3 for beta chain variable domain of TCR clone 283351 (TRBV13, TRBJ2-3)
CASSLSRVAGGRNTQYF

SEQ ID NO: 566703 - protein, 15 aa, Homo sapiens
  CDR3 for alpha chain variable domain of TCR clone 283352 (TRAV12-3, TRAJ6)
CAMSATTGGSYIPTF

SEQ ID NO: 566704 - protein, 14 aa, Homo sapiens
  CDR3 for beta chain variable domain of TCR clone 283352 (TRBV7-9, TRBJ2-1)
CASSPRDSLYEQFF

SEQ ID NO: 566705 - protein, 11 aa, Homo sapiens
  CDR3 for alpha chain variable domain of TCR clone 283353 (TRAV21, TRAJ34)
CAHYNTDKLIF

SEQ ID NO: 566706 - protein, 13 aa, Homo sapiens
  CDR3 for beta chain variable domain of TCR clone 283353 (TRBV7-6, TRBJ1-2)
CASSSVADYGDTF

SEQ ID NO: 566707 - protein, 14 aa, Homo sapiens
  CDR3 for alpha chain variable domain of TCR clone 283354 (TRAV23/DV6, TRAJ13)
CAASETGGYQKATF

SEQ ID NO: 566708 - protein, 13 aa, Homo sapiens
  CDR3 for beta chain variable domain of TCR clone 283354 (TRBV29-1, TRBJ2-1)
CSVEGGRVNEQFF

SEQ ID NO: 566709 - protein, 12 aa, Homo sapiens
  CDR3 for alpha chain variable domain of TCR clone 283355 (TRAV2, TRAJ36)
CAELTGANNLFF

SEQ ID NO: 566710 - protein, 14 aa, Homo sapiens
  CDR3 for beta chain variable domain of TCR clone 283355 (TRBV7-2, TRBJ2-7)
CASSPKTSFYEQYF

SEQ ID NO: 566711 - protein, 14 aa, Homo sapiens
  CDR3 for alpha chain variable domain of TCR clone 283356 (TRAV22, TRAJ29)
CAVTRNSGNTPLVF

SEQ ID NO: 566712 - protein, 15 aa, Homo sapiens
  CDR3 for beta chain variable domain of TCR clone 283356 (TRBV19, TRBJ1-6)
CASSTQGAVGAPLHF

SEQ ID NO: 566713 - protein, 10 aa, Homo sapiens
  CDR3 for alpha chain variable domain of TCR clone 283357 (TRAV30, TRAJ32)
CGTEKDMVVL

SEQ ID NO: 566714 - protein, 15 aa, Homo sapiens
  CDR3 for beta chain variable domain of TCR clone 283357 (TRBV6-3, TRBJ2-7)
CASSSPGTVFYEQYF

SEQ ID NO: 566715 - protein, 16 aa, Homo sapiens
  CDR3 for alpha chain variable domain of TCR clone 283358 (TRAV1-2, TRAJ6)
CAVRDQGTGGSYIPTF

SEQ ID NO: 566716 - protein, 13 aa, Homo sapiens
  CDR3 for beta chain variable domain of TCR clone 283358 (TRBV12-4, TRBJ1-2)
CASSLRQGKGYAF

SEQ ID NO: 566717 - protein, 16 aa, Homo sapiens
  CDR3 for alpha chain variable domain of TCR clone 283359 (TRAV30, TRAJ24)
CGTEIVNADSWGKFQF

SEQ ID NO: 566718 - protein, 13 aa, Homo sapiens
  CDR3 for beta chain variable domain of TCR clone 283359 (TRBV7-3, TRBJ1-1)
CASSQDWGAEAFF

SEQ ID NO: 566719 - protein, 23 aa, Homo sapiens
  CDR3 for alpha chain variable domain of TCR clone 283360 (TRAV26-1, )
CIVRVAGNNHIQNPDPAVYQLRD

SEQ ID NO: 566720 - protein, 16 aa, Homo sapiens
  CDR3 for beta chain variable domain of TCR clone 283360 (TRBV13, TRBJ2-2)
CASSPRTGEHTGELFF

SEQ ID NO: 566721 - protein, 16 aa, Homo sapiens
  CDR3 for alpha chain variable domain of TCR clone 283361 (TRAV30, TRAJ24)
CGTEIVDADSWGKFQF

SEQ ID NO: 566722 - protein, 14 aa, Homo sapiens
  CDR3 for beta chain variable domain of TCR clone 283361 (TRBV11-2, TRBJ2-7)
CASSSLADGYEQYF

SEQ ID NO: 566723 - protein, 15 aa, Homo sapiens
  CDR3 for alpha chain variable domain of TCR clone 283362 (TRAV35, TRAJ58)
CAGRRQETSGSRLTF

SEQ ID NO: 566724 - protein, 16 aa, Homo sapiens
  CDR3 for beta chain variable domain of TCR clone 283362 (TRBV2, TRBJ2-1)
CASSVGGALSYNEQFF

SEQ ID NO: 566725 - protein, 16 aa, Homo sapiens
  CDR3 for alpha chain variable domain of TCR clone 283363 (TRAV30, TRAJ24)
CGTELVDADSWGKFQF

SEQ ID NO: 566726 - protein, 15 aa, Homo sapiens
  CDR3 for beta chain variable domain of TCR clone 283363 (TRBV12-4, TRBJ2-2)
CASSPNDSGTGELFF

SEQ ID NO: 566727 - protein, 13 aa, Homo sapiens
  CDR3 for alpha chain variable domain of TCR clone 283364 (TRAV21, TRAJ57)
CAVTHGGSEKLVF

SEQ ID NO: 566728 - protein, 14 aa, Homo sapiens
  CDR3 for beta chain variable domain of TCR clone 283364 (TRBV7-2, TRBJ2-7)
CASSPKTSFYEQYF

SEQ ID NO: 566729 - protein, 11 aa, Homo sapiens
  CDR3 for alpha chain variable domain of TCR clone 283365 (TRAV1-2, TRAJ31)
CAVNNNARLMF

SEQ ID NO: 566730 - protein, 15 aa, Homo sapiens
  CDR3 for beta chain variable domain of TCR clone 283365 (TRBV28, TRBJ2-1)
CASSIIAGGRSEQVF

SEQ ID NO: 566731 - protein, 12 aa, Homo sapiens
  CDR3 for alpha chain variable domain of TCR clone 283366 (TRAV27, TRAJ9)
CAGEPGGFKTIF

SEQ ID NO: 566732 - protein, 18 aa, Homo sapiens
  CDR3 for beta chain variable domain of TCR clone 283366 (TRBV10-2, TRBJ2-2)
CISAPAVHRQADAGELFF

SEQ ID NO: 566733 - protein, 11 aa, Homo sapiens
  CDR3 for alpha chain variable domain of TCR clone 283367 (TRAV13-1, TRAJ6)
CATLGSYIPTF

SEQ ID NO: 566734 - protein, 14 aa, Homo sapiens
  CDR3 for beta chain variable domain of TCR clone 283367 (TRBV19, TRBJ2-1)
CASPTFVLSGEQFF

SEQ ID NO: 566735 - protein, 16 aa, Homo sapiens
  CDR3 for alpha chain variable domain of TCR clone 283368 (TRAV12-2, TRAJ52)
CAVNNRGGTSYGKLTF

SEQ ID NO: 566736 - protein, 14 aa, Homo sapiens
  CDR3 for beta chain variable domain of TCR clone 283368 (TRBV20-1, TRBJ2-5)
CSAHRQGLWETQYF

SEQ ID NO: 566737 - protein, 13 aa, Homo sapiens
  CDR3 for alpha chain variable domain of TCR clone 283369 (TRAV8-3, TRAJ28)
CAVGAVGSYQLTF

SEQ ID NO: 566738 - protein, 15 aa, Homo sapiens
  CDR3 for beta chain variable domain of TCR clone 283369 (TRBV7-9, TRBJ1-5)
CASSQGHQSNQPQHF

SEQ ID NO: 566739 - protein, 14 aa, Homo sapiens
  CDR3 for alpha chain variable domain of TCR clone 283370 (TRAV26-2, TRAJ32)
CCVGYGGATNKLIF

SEQ ID NO: 566740 - protein, 13 aa, Homo sapiens
  CDR3 for beta chain variable domain of TCR clone 283370 (TRBV12-5, TRBJ2-3)
CASGDRQSDTQHF

SEQ ID NO: 566741 - protein, 14 aa, Homo sapiens
  CDR3 for alpha chain variable domain of TCR clone 283371 (TRAV35, TRAJ22)
CAWLRPGSARQLTF

SEQ ID NO: 566742 - protein, 15 aa, Homo sapiens
  CDR3 for beta chain variable domain of TCR clone 283371 (TRBV20-1, TRBJ2-7)
CSARDRVSGMDEQYF

SEQ ID NO: 566743 - protein, 16 aa, Homo sapiens
  CDR3 for alpha chain variable domain of TCR clone 283372 (TRAV26-1, TRAJ40)
CIVRALTTSGTYKYIF

SEQ ID NO: 566744 - protein, 12 aa, Homo sapiens
  CDR3 for beta chain variable domain of TCR clone 283372 (TRBV6-3, TRBJ2-7)
CASSLTPYEQYF

SEQ ID NO: 566745 - protein, 15 aa, Homo sapiens
  CDR3 for alpha chain variable domain of TCR clone 283373 (TRAV17, TRAJ40)
CATVSSTSGTYKYIF

SEQ ID NO: 566746 - protein, 12 aa, Homo sapiens
  CDR3 for beta chain variable domain of TCR clone 283373 (TRBV7-3, TRBJ2-1)
CASSFINNEQFF

SEQ ID NO: 566747 - protein, 13 aa, Homo sapiens
  CDR3 for alpha chain variable domain of TCR clone 283374 (TRAV29/DV5, TRAJ44)
CAANTGTASKLTF

SEQ ID NO: 566748 - protein, 15 aa, Homo sapiens
  CDR3 for beta chain variable domain of TCR clone 283374 (TRBV7-3, TRBJ2-2)
CASSETGQGTGELFF

SEQ ID NO: 566749 - protein, 16 aa, Homo sapiens
  CDR3 for alpha chain variable domain of TCR clone 283375 (TRAV29/DV5, TRAJ53)
CAASGMGGGSNYKLTF

SEQ ID NO: 566750 - protein, 15 aa, Homo sapiens
  CDR3 for beta chain variable domain of TCR clone 283375 (TRBV7-3, TRBJ2-1)
CASSLGQGPFGEQFF

SEQ ID NO: 566751 - protein, 13 aa, Homo sapiens
  CDR3 for alpha chain variable domain of TCR clone 283376 (TRAV12-3, TRAJ7)
CAMTPYGNNRLAF

SEQ ID NO: 566752 - protein, 15 aa, Homo sapiens
  CDR3 for beta chain variable domain of TCR clone 283376 (TRBV12-4, TRBJ2-2)
CASSPQPGSTGELFF

SEQ ID NO: 566753 - protein, 11 aa, Homo sapiens
  CDR3 for alpha chain variable domain of TCR clone 283377 (TRAV3, TRAJ49)
CAPITGNQFYF

SEQ ID NO: 566754 - protein, 17 aa, Homo sapiens
  CDR3 for beta chain variable domain of TCR clone 283377 (TRBV20-1, TRBJ2-2)
CSASGSGQGGLTGELFF

SEQ ID NO: 566755 - protein, 15 aa, Homo sapiens
  CDR3 for alpha chain variable domain of TCR clone 283378 (TRAV25, TRAJ52)
CAGRPGGTSYGKLTF

SEQ ID NO: 566756 - protein, 12 aa, Homo sapiens
  CDR3 for beta chain variable domain of TCR clone 283378 (TRBV7-2, TRBJ1-6)
CASSLSSSPLHF

SEQ ID NO: 566757 - protein, 11 aa, Homo sapiens
  CDR3 for alpha chain variable domain of TCR clone 283379 (TRAV1-2, TRAJ20)
CAVANDYKLSF

SEQ ID NO: 566758 - protein, 13 aa, Homo sapiens
  CDR3 for beta chain variable domain of TCR clone 283379 (TRBV11-2, TRBJ1-6)
CASSLAGTSPLHF

SEQ ID NO: 566759 - protein, 11 aa, Homo sapiens
  CDR3 for alpha chain variable domain of TCR clone 283380 (TRAV3, TRAJ21)
CAVGNFNKFYF

SEQ ID NO: 566760 - protein, 12 aa, Homo sapiens
  CDR3 for beta chain variable domain of TCR clone 283380 (TRBV12-4, TRBJ1-3)
CASSFSGNTIYF

SEQ ID NO: 566761 - protein, 12 aa, Homo sapiens
  CDR3 for alpha chain variable domain of TCR clone 283381 (TRAV1-1, TRAJ9)
CAVDTGGFKTIF

SEQ ID NO: 566762 - protein, 20 aa, Homo sapiens
  CDR3 for beta chain variable domain of TCR clone 283381 (TRBV9, TRBJ1-3)
CASSVDPGETTIALETPYIF

SEQ ID NO: 566763 - protein, 15 aa, Homo sapiens
  CDR3 for alpha chain variable domain of TCR clone 283382 (TRAV8-4, TRAJ6)
CAVSATSGGSYIPTF

SEQ ID NO: 566764 - protein, 15 aa, Homo sapiens
  CDR3 for beta chain variable domain of TCR clone 283382 (TRBV7-3, TRBJ2-2)
CASKANGANTGELFF

SEQ ID NO: 566765 - protein, 14 aa, Homo sapiens
  CDR3 for alpha chain variable domain of TCR clone 283383 (TRAV1-2, TRAJ16)
CSVNRFSDGQKLLF

SEQ ID NO: 566766 - protein, 14 aa, Homo sapiens
  CDR3 for beta chain variable domain of TCR clone 283383 (TRBV12-5, TRBJ2-5)
CASGSRTHRETQYF

SEQ ID NO: 566767 - protein, 15 aa, Homo sapiens
  CDR3 for alpha chain variable domain of TCR clone 283384 (TRAV3, TRAJ36)
CSVRASQTGANNLFF

SEQ ID NO: 566768 - protein, 13 aa, Homo sapiens
  CDR3 for beta chain variable domain of TCR clone 283384 (TRBV10-3, TRBJ1-2)
CAISERDSYGYTF

SEQ ID NO: 566769 - protein, 12 aa, Homo sapiens
  CDR3 for alpha chain variable domain of TCR clone 283385 (TRAV22, TRAJ29)
CDPPSGNTPPVF

SEQ ID NO: 566770 - protein, 14 aa, Homo sapiens
  CDR3 for beta chain variable domain of TCR clone 283385 (TRBV11-2, TRBJ2-7)
CASSLGAGAYEQYF

SEQ ID NO: 566771 - protein, 14 aa, Homo sapiens
  CDR3 for alpha chain variable domain of TCR clone 283386 (TRAV8-1, TRAJ4)
CAVKFSGGYNKLIF

SEQ ID NO: 566772 - protein, 22 aa, Homo sapiens
  CDR3 for beta chain variable domain of TCR clone 283386 (TRBV7-3, TRBJ2-5)
RASAWDRVILRPRDPVLRARHA

SEQ ID NO: 566773 - protein, 14 aa, Homo sapiens
  CDR3 for alpha chain variable domain of TCR clone 283387 (TRAV1-2, TRAJ8)
CAVREDTGFQKLVF

SEQ ID NO: 566774 - protein, 13 aa, Homo sapiens
  CDR3 for beta chain variable domain of TCR clone 283387 (TRBV4-1, TRBJ1-3)
CASSPGQGNTIYF

SEQ ID NO: 566775 - protein, 16 aa, Homo sapiens
  CDR3 for alpha chain variable domain of TCR clone 283388 (TRAV12-3, TRAJ10)
CAMKKGITGGGNKITF

SEQ ID NO: 566776 - protein, 13 aa, Homo sapiens
  CDR3 for beta chain variable domain of TCR clone 283388 (TRBV4-1, TRBJ2-2)
CASSQENTGELFF

SEQ ID NO: 566777 - protein, 13 aa, Homo sapiens
  CDR3 for alpha chain variable domain of TCR clone 283389 (TRAV38-2/DV8, TRAJ34)
CAYRNYNTDKLIF

SEQ ID NO: 566778 - protein, 16 aa, Homo sapiens
  CDR3 for beta chain variable domain of TCR clone 283389 (TRBV9, TRBJ2-2)
CASSALGKGNTGELFF

SEQ ID NO: 566779 - protein, 12 aa, Homo sapiens
  CDR3 for alpha chain variable domain of TCR clone 283390 (TRAV3, TRAJ43)
CSVRDPNNNMRL

SEQ ID NO: 566780 - protein, 15 aa, Homo sapiens
  CDR3 for beta chain variable domain of TCR clone 283390 (TRBV27, TRBJ1-5)
CASSLGTGFDQPQHF

SEQ ID NO: 566781 - protein, 16 aa, Homo sapiens
  CDR3 for alpha chain variable domain of TCR clone 283391 (TRAV12-2, TRAJ28)
CAVITDSGAWSYQLTF

SEQ ID NO: 566782 - protein, 12 aa, Homo sapiens
  CDR3 for beta chain variable domain of TCR clone 283391 (TRBV9, TRBJ2-2)
CASSLVTGELFF

SEQ ID NO: 566783 - protein, 14 aa, Homo sapiens
  CDR3 for alpha chain variable domain of TCR clone 283392 (TRAV3, TRAJ17)
CAVRDAAAGNQLTF

SEQ ID NO: 566784 - protein, 13 aa, Homo sapiens
  CDR3 for beta chain variable domain of TCR clone 283392 (TRBV2, TRBJ1-1)
CASSVSGYTEAFF

SEQ ID NO: 566785 - protein, 15 aa, Homo sapiens
  CDR3 for alpha chain variable domain of TCR clone 283393 (TRAV26-2, TRAJ45)
CILRDRVDQEEVLTD

SEQ ID NO: 566786 - protein, 15 aa, Homo sapiens
  CDR3 for beta chain variable domain of TCR clone 283393 (TRBV7-6, TRBJ2-5)
CASSKPTGTQETQYF

SEQ ID NO: 566787 - protein, 15 aa, Homo sapiens
  CDR3 for alpha chain variable domain of TCR clone 283394 (TRAV3, TRAJ5)
CAVRDLDTGRRALTF

SEQ ID NO: 566788 - protein, 14 aa, Homo sapiens
  CDR3 for beta chain variable domain of TCR clone 283394 (TRBV25-1, TRBJ1-4)
CASSGGRQPEKLFF

SEQ ID NO: 566789 - protein, 13 aa, Homo sapiens
  CDR3 for alpha chain variable domain of TCR clone 283395 (TRAV1-2, TRAJ9)
CAALNTGGFNTIF

SEQ ID NO: 566790 - protein, 13 aa, Homo sapiens
  CDR3 for beta chain variable domain of TCR clone 283395 (TRBV19, TRBJ1-2)
CASSVPGQDGHTF

SEQ ID NO: 566791 - protein, 13 aa, Homo sapiens
  CDR3 for alpha chain variable domain of TCR clone 283396 (TRAV8-3, TRAJ36)
CAVGATGANNLFF

SEQ ID NO: 566792 - protein, 15 aa, Homo sapiens
  CDR3 for beta chain variable domain of TCR clone 283396 (TRBV7-2, TRBJ1-2)
CASSPRAAWNYGYTF

SEQ ID NO: 566793 - protein, 14 aa, Homo sapiens
  CDR3 for alpha chain variable domain of TCR clone 283397 (TRAV12-2, TRAJ3)
CAVSLYSSASKIIF

SEQ ID NO: 566794 - protein, 12 aa, Homo sapiens
  CDR3 for beta chain variable domain of TCR clone 283397 (TRBV18, TRBJ2-1)
CASSSDEDEQFF

SEQ ID NO: 566795 - protein, 14 aa, Homo sapiens
  CDR3 for alpha chain variable domain of TCR clone 283398 (TRAV17, TRAJ12)
CATDGVDSSYKLIF

SEQ ID NO: 566796 - protein, 13 aa, Homo sapiens
  CDR3 for beta chain variable domain of TCR clone 283398 (TRBV7-3, TRBJ2-5)
CASSFRGGETQYF

SEQ ID NO: 566797 - protein, 13 aa, Homo sapiens
  CDR3 for alpha chain variable domain of TCR clone 283399 (TRAV12-1, TRAJ9)
CVVRNNGGFKTIF

SEQ ID NO: 566798 - protein, 14 aa, Homo sapiens
  CDR3 for beta chain variable domain of TCR clone 283399 (TRBV20-1, TRBJ2-1)
CSAQIGGSANEQFF

SEQ ID NO: 566799 - protein, 11 aa, Homo sapiens
  CDR3 for alpha chain variable domain of TCR clone 283400 (TRAV21, TRAJ34)
CAHYNTDNLIF

SEQ ID NO: 566800 - protein, 16 aa, Homo sapiens
  CDR3 for beta chain variable domain of TCR clone 283400 (TRBV10-2, TRBJ1-1)
CASSEFGEGASTEAFF

SEQ ID NO: 566801 - protein, 13 aa, Homo sapiens
  CDR3 for alpha chain variable domain of TCR clone 283401 (TRAV1-1, TRAJ40)
CAVRTSGTYKYIF

SEQ ID NO: 566802 - protein, 15 aa, Homo sapiens
  CDR3 for beta chain variable domain of TCR clone 283401 (TRBV7-3, TRBJ2-6)
CASSLGGSGANVLTF

SEQ ID NO: 566803 - protein, 18 aa, Homo sapiens
  CDR3 for alpha chain variable domain of TCR clone 283402 (TRAV13-1, TRAJ52)
CAAKKPNAGGTSYGKLTF

SEQ ID NO: 566804 - protein, 15 aa, Homo sapiens
  CDR3 for beta chain variable domain of TCR clone 283402 (TRBV6-1, TRBJ2-3)
CAGSERGGITDTQYF

SEQ ID NO: 566805 - protein, 12 aa, Homo sapiens
  CDR3 for alpha chain variable domain of TCR clone 283403 (TRAV1-2, TRAJ26)
CAVRYYGQSFVF

SEQ ID NO: 566806 - protein, 15 aa, Homo sapiens
  CDR3 for beta chain variable domain of TCR clone 283403 (TRBV28, TRBJ2-1)
CASSIIAGGRSEQFF

SEQ ID NO: 566807 - protein, 13 aa, Homo sapiens
  CDR3 for alpha chain variable domain of TCR clone 283404 (TRAV8-1, TRAJ30)
CAVIMNGDDKIIF

SEQ ID NO: 566808 - protein, 13 aa, Homo sapiens
  CDR3 for beta chain variable domain of TCR clone 283404 (TRBV7-9, TRBJ1-2)
CASSLKQNYGYTF

SEQ ID NO: 566809 - protein, 14 aa, Homo sapiens
  CDR3 for alpha chain variable domain of TCR clone 283405 (TRAV30, TRAJ26)
CGTEIVSYSQNFVF

SEQ ID NO: 566810 - protein, 13 aa, Homo sapiens
  CDR3 for beta chain variable domain of TCR clone 283405 (TRBV7-3, TRBJ1-1)
CASSQDWGAEAFF

SEQ ID NO: 566811 - protein, 13 aa, Homo sapiens
  CDR3 for alpha chain variable domain of TCR clone 283406 (TRAV13-1, TRAJ10)
RAALEGGGNKLTF

SEQ ID NO: 566812 - protein, 11 aa, Homo sapiens
  CDR3 for beta chain variable domain of TCR clone 283406 (TRBV6-3, TRBJ2-7)
CASSFSYEQYF

SEQ ID NO: 566813 - protein, 11 aa, Homo sapiens
  CDR3 for alpha chain variable domain of TCR clone 283407 (TRAV12-3, TRAJ27)
CAIANAGKSTF

SEQ ID NO: 566814 - protein, 15 aa, Homo sapiens
  CDR3 for beta chain variable domain of TCR clone 283407 (TRBV20-1, TRBJ2-7)
CSARDRVSGMDEQYF

SEQ ID NO: 566815 - protein, 15 aa, Homo sapiens
  CDR3 for alpha chain variable domain of TCR clone 283408 (TRAV27, TRAJ38)
CAGRFNAGNNRKLIG

SEQ ID NO: 566816 - protein, 13 aa, Homo sapiens
  CDR3 for beta chain variable domain of TCR clone 283408 (TRBV12-5, TRBJ2-3)
CASQNRGTDTQYF

SEQ ID NO: 566817 - protein, 14 aa, Homo sapiens
  CDR3 for alpha chain variable domain of TCR clone 283409 (TRAV1-2, TRAJ8)
CAVREDTGFQNLVF

SEQ ID NO: 566818 - protein, 16 aa, Homo sapiens
  CDR3 for beta chain variable domain of TCR clone 283409 (TRBV12-4, TRBJ1-5)
CASSRPVGGSNQPQHF

SEQ ID NO: 566819 - protein, 13 aa, Homo sapiens
  CDR3 for alpha chain variable domain of TCR clone 283410 (TRAV13-1, TRAJ20)
CAARVSNDYKLSF

SEQ ID NO: 566820 - protein, 14 aa, Homo sapiens
  CDR3 for beta chain variable domain of TCR clone 283410 (TRBV12-5, TRBJ2-5)
CASGSRTHQETQYF

SEQ ID NO: 566821 - protein, 17 aa, Homo sapiens
  CDR3 for alpha chain variable domain of TCR clone 283411 (TRAV1-2, TRAJ6)
CAVRDTTRTGGSYIPTF

SEQ ID NO: 566822 - protein, 12 aa, Homo sapiens
  CDR3 for beta chain variable domain of TCR clone 283411 (TRBV24-1, TRBJ2-3)
CATSSGGDTQYV

SEQ ID NO: 566823 - protein, 14 aa, Homo sapiens
  CDR3 for alpha chain variable domain of TCR clone 283412 (TRAV8-2, TRAJ5)
CVVDMDTGRRAITF

SEQ ID NO: 566824 - protein, 15 aa, Homo sapiens
  CDR3 for beta chain variable domain of TCR clone 283412 (TRBV5-7, TRBJ2-1)
CASSYMSGRGNEQFF

SEQ ID NO: 566825 - protein, 17 aa, Homo sapiens
  CDR3 for alpha chain variable domain of TCR clone 283413 (TRAV26-2, TRAJ42)
CILRDVGYGGSQGNPIF

SEQ ID NO: 566826 - protein, 14 aa, Homo sapiens
  CDR3 for beta chain variable domain of TCR clone 283413 (TRBV19, TRBJ2-3)
CASSEGPRTDTQYF

SEQ ID NO: 566827 - protein, 12 aa, Homo sapiens
  CDR3 for alpha chain variable domain of TCR clone 283414 (TRAV21, TRAJ11)
CAATSGYSTLTF

SEQ ID NO: 566828 - protein, 15 aa, Homo sapiens
  CDR3 for beta chain variable domain of TCR clone 283414 (TRBV6-1, TRBJ2-3)
CASSERGGITGTQYF

SEQ ID NO: 566829 - protein, 16 aa, Homo sapiens
  CDR3 for alpha chain variable domain of TCR clone 283415 (TRAV26-2, TRAJ52)
CIRGPAGGTSYGKLTF

SEQ ID NO: 566830 - protein, 15 aa, Homo sapiens
  CDR3 for beta chain variable domain of TCR clone 283415 (TRBV20-1, TRBJ1-1)
CSASRGVTGNTEAVF

SEQ ID NO: 566831 - protein, 10 aa, Homo sapiens
  CDR3 for alpha chain variable domain of TCR clone 283416 (TRAV12-1, TRAJ37)
ARGNTCELIF

SEQ ID NO: 566832 - protein, 15 aa, Homo sapiens
  CDR3 for beta chain variable domain of TCR clone 283416 (TRBV7-2, TRBJ2-3)
CASSLEQGGTDTQYF

SEQ ID NO: 566833 - protein, 16 aa, Homo sapiens
  CDR3 for alpha chain variable domain of TCR clone 283417 (TRAV1-2, TRAJ10)
RAVRDQGGGGGNKLTF

SEQ ID NO: 566834 - protein, 13 aa, Homo sapiens
  CDR3 for beta chain variable domain of TCR clone 283417 (TRBV29-1, TRBJ1-1)
CSVGDSRNTEAFF

SEQ ID NO: 566835 - protein, 16 aa, Homo sapiens
  CDR3 for alpha chain variable domain of TCR clone 283418 (TRAV30, TRAJ24)
CGTKIVDAASWGKFQF

SEQ ID NO: 566836 - protein, 14 aa, Homo sapiens
  CDR3 for beta chain variable domain of TCR clone 283418 (TRBV12-5, TRBJ2-5)
CASGSRTHQETQYF

SEQ ID NO: 566837 - protein, 17 aa, Homo sapiens
  CDR3 for alpha chain variable domain of TCR clone 283419 (TRAV3, TRAJ12)
CAVRDGGRMDSSYKLIF

SEQ ID NO: 566838 - protein, 13 aa, Homo sapiens
  CDR3 for beta chain variable domain of TCR clone 283419 (TRBV27, TRBJ1-4)
CASSLMGDEKLFF

SEQ ID NO: 566839 - protein, 15 aa, Homo sapiens
  CDR3 for alpha chain variable domain of TCR clone 283420 (TRAV21, TRAJ53)
CATLNSGGSNYKLTF

SEQ ID NO: 566840 - protein, 13 aa, Homo sapiens
  CDR3 for beta chain variable domain of TCR clone 283420 (TRBV20-1, TRBJ1-1)
CSAGTVGNTEAFF

SEQ ID NO: 566841 - protein, 12 aa, Homo sapiens
  CDR3 for alpha chain variable domain of TCR clone 283421 (TRAV12-2, TRAJ4)
GWPEGGYTKLIF

SEQ ID NO: 566842 - protein, 16 aa, Homo sapiens
  CDR3 for beta chain variable domain of TCR clone 283421 (TRBV6-1, TRBJ2-5)
CASSETLDRGAETQYF

SEQ ID NO: 566843 - protein, 13 aa, Homo sapiens
  CDR3 for alpha chain variable domain of TCR clone 283422 (TRAV13-1, TRAJ13)
CAASRGGYQKVTF

SEQ ID NO: 566844 - protein, 16 aa, Homo sapiens
  CDR3 for beta chain variable domain of TCR clone 283422 (TRBV18, TRBJ1-2)
CASSPPERVTIYGYTF

SEQ ID NO: 566845 - protein, 18 aa, Homo sapiens
  CDR3 for alpha chain variable domain of TCR clone 283423 (TRAV13-1, TRAJ31)
CAAIVTMPDSCLEMELSW

SEQ ID NO: 566846 - protein, 11 aa, Homo sapiens
  CDR3 for beta chain variable domain of TCR clone 283423 (TRBV20-1, TRBJ2-7)
CSARTIYEQYF

SEQ ID NO: 566847 - protein, 12 aa, Homo sapiens
  CDR3 for alpha chain variable domain of TCR clone 283424 (TRAV17, TRAJ30)
CVPERRDAKIIF

SEQ ID NO: 566848 - protein, 14 aa, Homo sapiens
  CDR3 for beta chain variable domain of TCR clone 283424 (TRBV7-7, TRBJ2-2)
CASSRDRSTGELCF

SEQ ID NO: 566849 - protein, 10 aa, Homo sapiens
  CDR3 for alpha chain variable domain of TCR clone 283425 (TRAV30, TRAJ32)
CGTEKDMVVL

SEQ ID NO: 566850 - protein, 13 aa, Homo sapiens
  CDR3 for beta chain variable domain of TCR clone 283425 (TRBV10-3, TRBJ2-7)
CASKLAVNYEQDF

SEQ ID NO: 566851 - protein, 14 aa, Homo sapiens
  CDR3 for alpha chain variable domain of TCR clone 283426 (TRAV1-2, TRAJ8)
CAVIEDTGFQKPVF

SEQ ID NO: 566852 - protein, 15 aa, Homo sapiens
  CDR3 for beta chain variable domain of TCR clone 283426 (TRBV6-3, TRBJ2-7)
CASSSPGTVFYEQYF

SEQ ID NO: 566853 - protein, 15 aa, Homo sapiens
  CDR3 for alpha chain variable domain of TCR clone 283427 (TRAV4, TRAJ39)
CLVGPNNNAGNMLTF

SEQ ID NO: 566854 - protein, 14 aa, Homo sapiens
  CDR3 for beta chain variable domain of TCR clone 283427 (TRBV11-2, TRBJ1-1)
CASSFLTGTTEAFF

SEQ ID NO: 566855 - protein, 12 aa, Homo sapiens
  CDR3 for alpha chain variable domain of TCR clone 283428 (TRAV3, TRAJ17)
CAVKAAGNKLTF

SEQ ID NO: 566856 - protein, 14 aa, Homo sapiens
  CDR3 for beta chain variable domain of TCR clone 283428 (TRBV12-4, TRBJ1-1)
CASSLGTGGTEAFF

SEQ ID NO: 566857 - protein, 13 aa, Homo sapiens
  CDR3 for alpha chain variable domain of TCR clone 283429 (TRAV1-2, TRAJ9)
CAALNPGGFKTIF

SEQ ID NO: 566858 - protein, 12 aa, Homo sapiens
  CDR3 for beta chain variable domain of TCR clone 283429 (TRBV11-3, TRBJ1-1)
CASSHRQGEAFF

SEQ ID NO: 566859 - protein, 11 aa, Homo sapiens
  CDR3 for alpha chain variable domain of TCR clone 283430 (TRAV35, TRAJ30)
CAPGGDDKIIF

SEQ ID NO: 566860 - protein, 15 aa, Homo sapiens
  CDR3 for beta chain variable domain of TCR clone 283430 (TRBV19, TRBJ2-5)
CASSRLAGVEETQYF

SEQ ID NO: 566861 - protein, 14 aa, Homo sapiens
  CDR3 for alpha chain variable domain of TCR clone 283431 (TRAV12-2, TRAJ40)
FAVKIPSGAYKYIF

SEQ ID NO: 566862 - protein, 14 aa, Homo sapiens
  CDR3 for beta chain variable domain of TCR clone 283431 (TRBV20-1, TRBJ1-1)
CSAQTRIGGTEAFF

SEQ ID NO: 566863 - protein, 15 aa, Homo sapiens
  CDR3 for alpha chain variable domain of TCR clone 283432 (TRAV8-3, TRAJ45)
CASSYSGGGATDSPL

SEQ ID NO: 566864 - protein, 16 aa, Homo sapiens
  CDR3 for beta chain variable domain of TCR clone 283432 (TRBV12-5, TRBJ2-5)
CASGPRTSGNQETQYF

SEQ ID NO: 566865 - protein, 11 aa, Homo sapiens
  CDR3 for alpha chain variable domain of TCR clone 283433 (TRAV27, TRAJ45)
CAGAQAGVLTD

SEQ ID NO: 566866 - protein, 17 aa, Homo sapiens
  CDR3 for beta chain variable domain of TCR clone 283433 (TRBV11-2, TRBJ2-1)
CASSLYPPGVEYNEQFF

SEQ ID NO: 566867 - protein, 15 aa, Homo sapiens
  CDR3 for alpha chain variable domain of TCR clone 283434 (TRAV26-1, TRAJ28)
CIVRVAGAGSYQLTF

SEQ ID NO: 566868 - protein, 19 aa, Homo sapiens
  CDR3 for beta chain variable domain of TCR clone 283434 (TRBV7-3, TRBJ2-7)
CASSLTGGAGGWPSYEQYF

SEQ ID NO: 566869 - protein, 15 aa, Homo sapiens
  CDR3 for alpha chain variable domain of TCR clone 283435 (TRAV3, TRAJ5)
CAVRDRKTGRRALTF

SEQ ID NO: 566870 - protein, 15 aa, Homo sapiens
  CDR3 for beta chain variable domain of TCR clone 283435 (TRBV11-2, TRBJ2-2)
CASSSDRVNAGELFF

SEQ ID NO: 566871 - protein, 11 aa, Homo sapiens
  CDR3 for alpha chain variable domain of TCR clone 283436 (TRAV23/DV6, TRAJ58)
CAARLLRGETS

SEQ ID NO: 566872 - protein, 14 aa, Homo sapiens
  CDR3 for beta chain variable domain of TCR clone 283436 (TRBV28, TRBJ2-3)
CASSFVAGTDTQYF

SEQ ID NO: 566873 - protein, 16 aa, Homo sapiens
  CDR3 for alpha chain variable domain of TCR clone 283437 (TRAV17, TRAJ28)
CASYAYSGAGIYQLTF

SEQ ID NO: 566874 - protein, 15 aa, Homo sapiens
  CDR3 for beta chain variable domain of TCR clone 283437 (TRBV4-3, TRBJ2-1)
CASSPSGGLYNEQFF

SEQ ID NO: 566875 - protein, 15 aa, Homo sapiens
  CDR3 for alpha chain variable domain of TCR clone 283438 (TRAV26-2, TRAJ39)
CSLRGSNNAGNMLTF

SEQ ID NO: 566876 - protein, 14 aa, Homo sapiens
  CDR3 for beta chain variable domain of TCR clone 283438 (TRBV4-2, TRBJ2-1)
CASGLDRAYNEQFF

SEQ ID NO: 566877 - protein, 17 aa, Homo sapiens
  CDR3 for alpha chain variable domain of TCR clone 283439 (TRAV21, TRAJ13)
CAVPRSFWGLPESYLWN

SEQ ID NO: 566878 - protein, 16 aa, Homo sapiens
  CDR3 for beta chain variable domain of TCR clone 283439 (TRBV4-1, TRBJ1-5)
CASSQGGHTTNQPQHF

SEQ ID NO: 566879 - protein, 16 aa, Homo sapiens
  CDR3 for alpha chain variable domain of TCR clone 283440 (TRAV3, TRAJ37)
CAVRPHGSGNTGQLIF

SEQ ID NO: 566880 - protein, 15 aa, Homo sapiens
  CDR3 for beta chain variable domain of TCR clone 283440 (TRBV7-3, TRBJ2-1)
CASSLSSGSFDEQFF

SEQ ID NO: 566881 - protein, 18 aa, Homo sapiens
  CDR3 for alpha chain variable domain of TCR clone 283441 (TRAV26-1, TRAJ42)
CIVRPIKEEAKEISSLEK

SEQ ID NO: 566882 - protein, 16 aa, Homo sapiens
  CDR3 for beta chain variable domain of TCR clone 283441 (TRBV7-3, TRBJ2-2)
CASSVKRGTLSGEPFF

SEQ ID NO: 566883 - protein, 16 aa, Homo sapiens
  CDR3 for alpha chain variable domain of TCR clone 283442 (TRAV30, TRAJ24)
CGTEIVDADSWGKFQF

SEQ ID NO: 566884 - protein, 13 aa, Homo sapiens
  CDR3 for beta chain variable domain of TCR clone 283442 (TRBV20-1, TRBJ1-1)
CSARGGGNTEAFV

SEQ ID NO: 566885 - protein, 10 aa, Homo sapiens
  CDR3 for alpha chain variable domain of TCR clone 283443 (TRAV13-1, TRAJ26)
CAPYGQNFVF

SEQ ID NO: 566886 - protein, 14 aa, Homo sapiens
  CDR3 for beta chain variable domain of TCR clone 283443 (TRBV28, TRBJ2-3)
CQQPRTRGHDTQYF

SEQ ID NO: 566887 - protein, 15 aa, Homo sapiens
  CDR3 for alpha chain variable domain of TCR clone 283444 (TRAV21, TRAJ53)
CATLNSAGSNYKLTF

SEQ ID NO: 566888 - protein, 15 aa, Homo sapiens
  CDR3 for beta chain variable domain of TCR clone 283444 (TRBV20-1, TRBJ2-7)
CSARDRVSGMDEQYF

SEQ ID NO: 566889 - protein, 11 aa, Homo sapiens
  CDR3 for alpha chain variable domain of TCR clone 283445 (TRAV12-3, TRAJ20)
CNGRGDYKLSF

SEQ ID NO: 566890 - protein, 12 aa, Homo sapiens
  CDR3 for beta chain variable domain of TCR clone 283445 (TRBV6-1, TRBJ2-7)
CASSDYSYEQYF

SEQ ID NO: 566891 - protein, 16 aa, Homo sapiens
  CDR3 for alpha chain variable domain of TCR clone 283446 (TRAV26-1, TRAJ52)
CIVSNAGGTSYGNLTF

SEQ ID NO: 566892 - protein, 16 aa, Homo sapiens
  CDR3 for beta chain variable domain of TCR clone 283446 (TRBV5-1, TRBJ2-1)
CASSLEGRGLYNEQSF

SEQ ID NO: 566893 - protein, 16 aa, Homo sapiens
  CDR3 for alpha chain variable domain of TCR clone 283447 (TRAV27, TRAJ13)
CEGAKSDYGGYQKVTF

SEQ ID NO: 566894 - protein, 15 aa, Homo sapiens
  CDR3 for beta chain variable domain of TCR clone 283447 (TRBV29-1, TRBJ2-1)
CSVGRHALFYNEQLF

SEQ ID NO: 566895 - protein, 15 aa, Homo sapiens
  CDR3 for alpha chain variable domain of TCR clone 283448 (TRAV27, TRAJ38)
CAARRNAGNNRKPIW

SEQ ID NO: 566896 - protein, 15 aa, Homo sapiens
  CDR3 for beta chain variable domain of TCR clone 283448 (TRBV12-4, TRBJ2-5)
CASSPPTGLQETQYF

SEQ ID NO: 566897 - protein, 17 aa, Homo sapiens
  CDR3 for alpha chain variable domain of TCR clone 283449 (TRAV12-3, TRAJ6)
CAMSARGGAGGSYIPTF

SEQ ID NO: 566898 - protein, 19 aa, Homo sapiens
  CDR3 for beta chain variable domain of TCR clone 283449 (TRBV28, TRBJ2-1)
CASSFSIRGSGRTRYEQFF

SEQ ID NO: 566899 - protein, 13 aa, Homo sapiens
  CDR3 for alpha chain variable domain of TCR clone 283450 (TRAV22, TRAJ29)
CAVGGSGNTPLVF

SEQ ID NO: 566900 - protein, 16 aa, Homo sapiens
  CDR3 for beta chain variable domain of TCR clone 283450 (TRBV5-4, TRBJ2-3)
CASQQPGAGGADTQYF

SEQ ID NO: 566901 - protein, 12 aa, Homo sapiens
  CDR3 for alpha chain variable domain of TCR clone 283451 (TRAV8-3, TRAJ45)
CASSYSGGGLTD

SEQ ID NO: 566902 - protein, 13 aa, Homo sapiens
  CDR3 for beta chain variable domain of TCR clone 283451 (TRBV20-1, TRBJ1-1)
CSAFDKENTEAFF

SEQ ID NO: 566903 - protein, 11 aa, Homo sapiens
  CDR3 for alpha chain variable domain of TCR clone 283452 (TRAV2, TRAJ33)
CAVDSNYQLIW

SEQ ID NO: 566904 - protein, 15 aa, Homo sapiens
  CDR3 for beta chain variable domain of TCR clone 283452 (TRBV28, TRBJ1-5)
CASSRTGGYVQPQHF

SEQ ID NO: 566905 - protein, 11 aa, Homo sapiens
  CDR3 for alpha chain variable domain of TCR clone 283453 (TRAV12-3, TRAJ6)
CAMSGSYIPTF

SEQ ID NO: 566906 - protein, 15 aa, Homo sapiens
  CDR3 for beta chain variable domain of TCR clone 283453 (TRBV12-4, TRBJ2-1)
CASSLLATGNNEQFF

SEQ ID NO: 566907 - protein, 12 aa, Homo sapiens
  CDR3 for alpha chain variable domain of TCR clone 283454 (TRAV36/DV7, TRAJ54)
RAVVRGAQKLGF

SEQ ID NO: 566908 - protein, 14 aa, Homo sapiens
  CDR3 for beta chain variable domain of TCR clone 283454 (TRBV7-3, TRBJ1-1)
CASSLKGGNTEAFF

SEQ ID NO: 566909 - protein, 17 aa, Homo sapiens
  CDR3 for alpha chain variable domain of TCR clone 283455 (TRAV3, TRAJ6)
CAVRDGPRAGGSYIPTF

SEQ ID NO: 566910 - protein, 15 aa, Homo sapiens
  CDR3 for beta chain variable domain of TCR clone 283455 (TRBV20-1, TRBJ2-7)
CSARDWVSGMDEQYF

SEQ ID NO: 566911 - protein, 12 aa, Homo sapiens
  CDR3 for alpha chain variable domain of TCR clone 283456 (TRAV12-3, TRAJ17)
CAMTLTGNKLTF

SEQ ID NO: 566912 - protein, 15 aa, Homo sapiens
  CDR3 for beta chain variable domain of TCR clone 283456 (TRBV11-3, TRBJ2-7)
CASSPGPASSYEQYV

SEQ ID NO: 566913 - protein, 12 aa, Homo sapiens
  CDR3 for alpha chain variable domain of TCR clone 283457 (TRAV13-2, TRAJ48)
CGDGLGNEKLTF

SEQ ID NO: 566914 - protein, 15 aa, Homo sapiens
  CDR3 for beta chain variable domain of TCR clone 283457 (TRBV7-9, TRBJ1-6)
CASSSPGRGNSPLHF

SEQ ID NO: 566915 - protein, 14 aa, Homo sapiens
  CDR3 for alpha chain variable domain of TCR clone 283458 (TRAV3, TRAJ20)
CAVPPAPNVYKLSF

SEQ ID NO: 566916 - protein, 13 aa, Homo sapiens
  CDR3 for beta chain variable domain of TCR clone 283458 (TRBV15, TRBJ1-2)
CATSRVDARSPVF

SEQ ID NO: 566917 - protein, 15 aa, Homo sapiens
  CDR3 for alpha chain variable domain of TCR clone 283459 (TRAV2, TRAJ37)
CAVEDGSSNTGELIF

SEQ ID NO: 566918 - protein, 16 aa, Homo sapiens
  CDR3 for beta chain variable domain of TCR clone 283459 (TRBV19, TRBJ2-1)
CASSKAGPSSYNEQFF

SEQ ID NO: 566919 - protein, 10 aa, Homo sapiens
  CDR3 for alpha chain variable domain of TCR clone 283460 (TRAV12-1, TRAJ37)
ARGNTGELIF

SEQ ID NO: 566920 - protein, 13 aa, Homo sapiens
  CDR3 for beta chain variable domain of TCR clone 283460 (TRBV7-2, TRBJ2-5)
CASSQTSVETQYF

SEQ ID NO: 566921 - protein, 14 aa, Homo sapiens
  CDR3 for alpha chain variable domain of TCR clone 283461 (TRAV12-2, TRAJ13)
CAVRKTGGYQKVTF

SEQ ID NO: 566922 - protein, 15 aa, Homo sapiens
  CDR3 for beta chain variable domain of TCR clone 283461 (TRBV27, TRBJ2-1)
CASSNVGGSSNEQFF

SEQ ID NO: 566923 - protein, 14 aa, Homo sapiens
  CDR3 for alpha chain variable domain of TCR clone 283462 (TRAV2, TRAJ37)
TTVPGSSNTGKLIF

SEQ ID NO: 566924 - protein, 14 aa, Homo sapiens
  CDR3 for beta chain variable domain of TCR clone 283462 (TRBV7-8, TRBJ2-7)
CASSLWKSSYEQYF

SEQ ID NO: 566925 - protein, 14 aa, Homo sapiens
  CDR3 for alpha chain variable domain of TCR clone 283463 (TRAV8-1, TRAJ23)
CAVQAYNQGGKLIF

SEQ ID NO: 566926 - protein, 14 aa, Homo sapiens
  CDR3 for beta chain variable domain of TCR clone 283463 (TRBV19, TRBJ2-7)
CASNFRDTFTGMYF

SEQ ID NO: 566927 - protein, 14 aa, Homo sapiens
  CDR3 for alpha chain variable domain of TCR clone 283464 (TRAV12-2, TRAJ17)
WAVLFKAAGNKLTF

SEQ ID NO: 566928 - protein, 17 aa, Homo sapiens
  CDR3 for beta chain variable domain of TCR clone 283464 (TRBV20-1, TRBJ2-2)
FSASGSGQGGLTGELFF

SEQ ID NO: 566929 - protein, 14 aa, Homo sapiens
  CDR3 for alpha chain variable domain of TCR clone 283465 (TRAV8-3, TRAJ9)
CAVVYNTEGFKTTF

SEQ ID NO: 566930 - protein, 14 aa, Homo sapiens
  CDR3 for beta chain variable domain of TCR clone 283465 (TRBV7-3, TRBJ2-2)
CASSSGGYTGELFF

SEQ ID NO: 566931 - protein, 15 aa, Homo sapiens
  CDR3 for alpha chain variable domain of TCR clone 283466 (TRAV8-3, TRAJ40)
CAAPSLGSGTYQYIF

SEQ ID NO: 566932 - protein, 16 aa, Homo sapiens
  CDR3 for beta chain variable domain of TCR clone 283466 (TRBV7-3, TRBJ2-3)
CASSLSGYRPEDTQYF

SEQ ID NO: 566933 - protein, 13 aa, Homo sapiens
  CDR3 for alpha chain variable domain of TCR clone 283467 (TRAV21, TRAJ27)
RAARPGNAGKSTF

SEQ ID NO: 566934 - protein, 20 aa, Homo sapiens
  CDR3 for beta chain variable domain of TCR clone 283467 (TRBV7-8, TRBJ2-2)
CASSHLFPGPTIHITGELFF

SEQ ID NO: 566935 - protein, 13 aa, Homo sapiens
  CDR3 for alpha chain variable domain of TCR clone 283468 (TRAV20, TRAJ20)
CAVQAGSGYKLSF

SEQ ID NO: 566936 - protein, 15 aa, Homo sapiens
  CDR3 for beta chain variable domain of TCR clone 283468 (TRBV9, TRBJ1-6)
CASSVAGTGDSPLHF

SEQ ID NO: 566937 - protein, 14 aa, Homo sapiens
  CDR3 for alpha chain variable domain of TCR clone 283469 (TRAV13-1, TRAJ24)
CAASRTDRWGKLKF

SEQ ID NO: 566938 - protein, 15 aa, Homo sapiens
  CDR3 for beta chain variable domain of TCR clone 283469 (TRBV7-9, TRBJ1-5)
CASSQGHQPNQPQHF

SEQ ID NO: 566939 - protein, 13 aa, Homo sapiens
  CDR3 for alpha chain variable domain of TCR clone 283470 (TRAV9-2, TRAJ39)
CALYIYNAGNMLP

SEQ ID NO: 566940 - protein, 13 aa, Homo sapiens
  CDR3 for beta chain variable domain of TCR clone 283470 (TRBV12-4, TRBJ2-7)
CASSRDSGYEQYF

SEQ ID NO: 566941 - protein, 16 aa, Homo sapiens
  CDR3 for alpha chain variable domain of TCR clone 283471 (TRAV23/DV6, TRAJ9)
CAASIGGNTVGFKTSF

SEQ ID NO: 566942 - protein, 15 aa, Homo sapiens
  CDR3 for beta chain variable domain of TCR clone 283471 (TRBV6-3, TRBJ2-7)
CASSSPGTVLYEQYF

SEQ ID NO: 566943 - protein, 14 aa, Homo sapiens
  CDR3 for alpha chain variable domain of TCR clone 283472 (TRAV12-2, TRAJ36)
CAVKISTGANNLFF

SEQ ID NO: 566944 - protein, 14 aa, Homo sapiens
  CDR3 for beta chain variable domain of TCR clone 283472 (TRBV25-1, TRBJ1-2)
CASSDTTGVVVYTV

SEQ ID NO: 566945 - protein, 14 aa, Homo sapiens
  CDR3 for alpha chain variable domain of TCR clone 283473 (TRAV8-3, TRAJ17)
CCGCGKAAGNKLTF

SEQ ID NO: 566946 - protein, 15 aa, Homo sapiens
  CDR3 for beta chain variable domain of TCR clone 283473 (TRBV6-3, TRBJ2-7)
CASSSPGTAFYEQYF

SEQ ID NO: 566947 - protein, 12 aa, Homo sapiens
  CDR3 for alpha chain variable domain of TCR clone 283474 (TRAV26-1, TRAJ31)
CIVRNNNNRLMF

SEQ ID NO: 566948 - protein, 15 aa, Homo sapiens
  CDR3 for beta chain variable domain of TCR clone 283474 (TRBV20-1, TRBJ2-4)
CSARDLTGGPNIQYF

SEQ ID NO: 566949 - protein, 11 aa, Homo sapiens
  CDR3 for alpha chain variable domain of TCR clone 283475 (TRAV1-1, TRAJ23)
CAVRQGGKLIF

SEQ ID NO: 566950 - protein, 15 aa, Homo sapiens
  CDR3 for beta chain variable domain of TCR clone 283475 (TRBV2, TRBJ2-1)
CASSELAGGYNEQFF

SEQ ID NO: 566951 - protein, 15 aa, Homo sapiens
  CDR3 for alpha chain variable domain of TCR clone 283476 (TRAV26-1, TRAJ40)
CIVRVTTSGTYKYIF

SEQ ID NO: 566952 - protein, 12 aa, Homo sapiens
  CDR3 for beta chain variable domain of TCR clone 283476 (TRBV7-9, TRBJ1-4)
CASSTNREKLFF

SEQ ID NO: 566953 - protein, 12 aa, Homo sapiens
  CDR3 for alpha chain variable domain of TCR clone 283477 (TRAV1-2, TRAJ33)
CAALDRNYQLIW

SEQ ID NO: 566954 - protein, 14 aa, Homo sapiens
  CDR3 for beta chain variable domain of TCR clone 283477 (TRBV19, TRBJ2-3)
CASSAPRGTDTQYF

SEQ ID NO: 566955 - protein, 15 aa, Homo sapiens
  CDR3 for alpha chain variable domain of TCR clone 283478 (TRAV38-2/DV8, TRAJ48)
CAYRSGGVGNEKLTF

SEQ ID NO: 566956 - protein, 18 aa, Homo sapiens
  CDR3 for beta chain variable domain of TCR clone 283478 (TRBV28, TRBJ2-7)
CASSPWVATGTFHSTSGR

SEQ ID NO: 566957 - protein, 10 aa, Homo sapiens
  CDR3 for alpha chain variable domain of TCR clone 283479 (TRAV1-2, TRAJ18)
CAVRGEAQPW

SEQ ID NO: 566958 - protein, 13 aa, Homo sapiens
  CDR3 for beta chain variable domain of TCR clone 283479 (TRBV20-1, TRBJ1-1)
CSARVGGNTEAFI

SEQ ID NO: 566959 - protein, 19 aa, Homo sapiens
  CDR3 for alpha chain variable domain of TCR clone 283480 (TRAV17, TRAJ40)
TASRAADTASYFCASKYIF

SEQ ID NO: 566960 - protein, 17 aa, Homo sapiens
  CDR3 for beta chain variable domain of TCR clone 283480 (TRBV11-2, TRBJ2-4)
CASSFLTLGGAGDIQYF

SEQ ID NO: 566961 - protein, 17 aa, Homo sapiens
  CDR3 for alpha chain variable domain of TCR clone 283481 (TRAV3, TRAJ6)
CAVRDGPTAGGSYIPTF

SEQ ID NO: 566962 - protein, 14 aa, Homo sapiens
  CDR3 for beta chain variable domain of TCR clone 283481 (TRBV7-2, TRBJ2-7)
CASSPKTSFYEQNF

SEQ ID NO: 566963 - protein, 13 aa, Homo sapiens
  CDR3 for alpha chain variable domain of TCR clone 283482 (TRAV2, TRAJ40)
CAVVTSGTYKYIF

SEQ ID NO: 566964 - protein, 15 aa, Homo sapiens
  CDR3 for beta chain variable domain of TCR clone 283482 (TRBV18, TRBJ2-1)
CASSSPSASYNEQFF

SEQ ID NO: 566965 - protein, 13 aa, Homo sapiens
  CDR3 for alpha chain variable domain of TCR clone 283483 (TRAV27, TRAJ45)
CRSSGGGADGLTF

SEQ ID NO: 566966 - protein, 14 aa, Homo sapiens
  CDR3 for beta chain variable domain of TCR clone 283483 (TRBV15, TRBJ2-3)
CATARDGGGDTQYF

SEQ ID NO: 566967 - protein, 13 aa, Homo sapiens
  CDR3 for alpha chain variable domain of TCR clone 283484 (TRAV23/DV6, TRAJ20)
CAAGGCHDYKLGF

SEQ ID NO: 566968 - protein, 14 aa, Homo sapiens
  CDR3 for beta chain variable domain of TCR clone 283484 (TRBV3-1, TRBJ2-7)
CASSQSGAHYEQYF

SEQ ID NO: 566969 - protein, 12 aa, Homo sapiens
  CDR3 for alpha chain variable domain of TCR clone 283485 (TRAV12-2, TRAJ47)
CAVAEYGNKLVF

SEQ ID NO: 566970 - protein, 13 aa, Homo sapiens
  CDR3 for beta chain variable domain of TCR clone 283485 (TRBV7-6, TRBJ2-3)
CASSLRSDNTQYF

SEQ ID NO: 566971 - protein, 14 aa, Homo sapiens
  CDR3 for alpha chain variable domain of TCR clone 283486 (TRAV23/DV6, TRAJ13)
CAAMYSGGYQKVTF

SEQ ID NO: 566972 - protein, 16 aa, Homo sapiens
  CDR3 for beta chain variable domain of TCR clone 283486 (TRBV9, TRBJ2-1)
CASSALGGIGNNQQFF

SEQ ID NO: 566973 - protein, 14 aa, Homo sapiens
  CDR3 for alpha chain variable domain of TCR clone 283487 (TRAV25, TRAJ35)
CARRMDGFGNVLHC

SEQ ID NO: 566974 - protein, 13 aa, Homo sapiens
  CDR3 for beta chain variable domain of TCR clone 283487 (TRBV7-2, TRBJ1-4)
CASSLAGLEKLFF

SEQ ID NO: 566975 - protein, 16 aa, Homo sapiens
  CDR3 for alpha chain variable domain of TCR clone 283488 (TRAV30, TRAJ24)
CGTEIVDADSWGKFQF

SEQ ID NO: 566976 - protein, 14 aa, Homo sapiens
  CDR3 for beta chain variable domain of TCR clone 283488 (TRBV7-3, TRBJ2-1)
CASSLAGGTNEQFF

SEQ ID NO: 566977 - protein, 16 aa, Homo sapiens
  CDR3 for alpha chain variable domain of TCR clone 283489 (TRAV30, TRAJ24)
CGTEIGDADSWGRFQF

SEQ ID NO: 566978 - protein, 14 aa, Homo sapiens
  CDR3 for beta chain variable domain of TCR clone 283489 (TRBV12-5, TRBJ2-5)
CASGSRTHQETQYF

SEQ ID NO: 566979 - protein, 14 aa, Homo sapiens
  CDR3 for alpha chain variable domain of TCR clone 283490 (TRAV20, TRAJ22)
CAVALGGSARQLTF

SEQ ID NO: 566980 - protein, 16 aa, Homo sapiens
  CDR3 for beta chain variable domain of TCR clone 283490 (TRBV7-3, TRBJ2-2)
CASSLKRGTLSGELFF

SEQ ID NO: 566981 - protein, 16 aa, Homo sapiens
  CDR3 for alpha chain variable domain of TCR clone 283491 (TRAV30, TRAJ24)
CGTEIVGADSWGKFQF

SEQ ID NO: 566982 - protein, 13 aa, Homo sapiens
  CDR3 for beta chain variable domain of TCR clone 283491 (TRBV18, TRBJ1-2)
CASSASATEGYTF

SEQ ID NO: 566983 - protein, 15 aa, Homo sapiens
  CDR3 for alpha chain variable domain of TCR clone 283492 (TRAV17, TRAJ4)
CATGTWSGGYNKLIF

SEQ ID NO: 566984 - protein, 18 aa, Homo sapiens
  CDR3 for beta chain variable domain of TCR clone 283492 (TRBV11-2, TRBJ2-3)
CASSLGGASRGAPNTQYF

SEQ ID NO: 566985 - protein, 15 aa, Homo sapiens
  CDR3 for alpha chain variable domain of TCR clone 283493 (TRAV25, TRAJ53)
CPTSNSGGSNYKLTF

SEQ ID NO: 566986 - protein, 13 aa, Homo sapiens
  CDR3 for beta chain variable domain of TCR clone 283493 (TRBV5-7, TRBJ2-3)
CASSLGRTDTQYF

SEQ ID NO: 566987 - protein, 17 aa, Homo sapiens
  CDR3 for alpha chain variable domain of TCR clone 283494 (TRAV13-2, TRAJ31)
CAENARLMFGDGTQLEV

SEQ ID NO: 566988 - protein, 14 aa, Homo sapiens
  CDR3 for beta chain variable domain of TCR clone 283494 (TRBV7-9, TRBJ2-1)
CASSLGVADNEQFF

SEQ ID NO: 566989 - protein, 16 aa, Homo sapiens
  CDR3 for alpha chain variable domain of TCR clone 283495 (TRAV8-3, TRAJ8)
CAVPRDGNTGFQKLVF

SEQ ID NO: 566990 - protein, 15 aa, Homo sapiens
  CDR3 for beta chain variable domain of TCR clone 283495 (TRBV4-1, TRBJ1-2)
CASSQDPGRAYGYTF

SEQ ID NO: 566991 - protein, 11 aa, Homo sapiens
  CDR3 for alpha chain variable domain of TCR clone 283496 (TRAV16, TRAJ29)
WAPSGNTPLVF

SEQ ID NO: 566992 - protein, 15 aa, Homo sapiens
  CDR3 for beta chain variable domain of TCR clone 283496 (TRBV4-1, TRBJ2-5)
CASSQWDLYQETQYF

SEQ ID NO: 566993 - protein, 18 aa, Homo sapiens
  CDR3 for alpha chain variable domain of TCR clone 283497 (TRAV1-1, TRAJ4)
CAVRVSFLVATISCFLEQ

SEQ ID NO: 566994 - protein, 16 aa, Homo sapiens
  CDR3 for beta chain variable domain of TCR clone 283497 (TRBV28, TRBJ1-4)
CASSPPYRGRSEKLFF

SEQ ID NO: 566995 - protein, 11 aa, Homo sapiens
  CDR3 for alpha chain variable domain of TCR clone 283498 (TRAV2, TRAJ13)
CASGGYQKVTF

SEQ ID NO: 566996 - protein, 14 aa, Homo sapiens
  CDR3 for beta chain variable domain of TCR clone 283498 (TRBV19, TRBJ2-1)
CASATFVLSGEQFF

SEQ ID NO: 566997 - protein, 13 aa, Homo sapiens
  CDR3 for alpha chain variable domain of TCR clone 283499 (TRAV12-3, TRAJ13)
CAMSSGGYQKVTF

SEQ ID NO: 566998 - protein, 13 aa, Homo sapiens
  CDR3 for beta chain variable domain of TCR clone 283499 (TRBV7-3, TRBJ1-1)
CASSQDWGDEAFF

SEQ ID NO: 566999 - protein, 13 aa, Homo sapiens
  CDR3 for alpha chain variable domain of TCR clone 283500 (TRAV12-1, TRAJ3)
CVVNPRGASKIIF

SEQ ID NO: 567000 - protein, 16 aa, Homo sapiens
  CDR3 for beta chain variable domain of TCR clone 283500 (TRBV5-7, TRBJ2-7)
PAANEGGGRGSYEQYF

SEQ ID NO: 567001 - protein, 12 aa, Homo sapiens
  CDR3 for alpha chain variable domain of TCR clone 283501 (TRAV12-3, TRAJ17)
CAMTLTGNKLTF

SEQ ID NO: 567002 - protein, 17 aa, Homo sapiens
  CDR3 for beta chain variable domain of TCR clone 283501 (TRBV27, TRBJ2-7)
CASSISPAGLHPTEQYF

SEQ ID NO: 567003 - protein, 15 aa, Homo sapiens
  CDR3 for alpha chain variable domain of TCR clone 283502 (TRAV26-1, TRAJ29)
CIVRVQGSGNTPLVF

SEQ ID NO: 567004 - protein, 15 aa, Homo sapiens
  CDR3 for beta chain variable domain of TCR clone 283502 (TRBV7-9, TRBJ1-5)
CASSQGHQPNQRQHF

SEQ ID NO: 567005 - protein, 14 aa, Homo sapiens
  CDR3 for alpha chain variable domain of TCR clone 283503 (TRAV2, TRAJ9)
CAVEDRSGGFRTIF

SEQ ID NO: 567006 - protein, 16 aa, Homo sapiens
  CDR3 for beta chain variable domain of TCR clone 283503 (TRBV7-3, TRBJ2-1)
CASSLEGYRSYNEQFF

SEQ ID NO: 567007 - protein, 10 aa, Homo sapiens
  CDR3 for alpha chain variable domain of TCR clone 283504 (TRAV5, TRAJ34)
CAEDPDKLIF

SEQ ID NO: 567008 - protein, 13 aa, Homo sapiens
  CDR3 for beta chain variable domain of TCR clone 283504 (TRBV19, TRBJ1-2)
CASSVPGQDGYTF

SEQ ID NO: 567009 - protein, 14 aa, Homo sapiens
  CDR3 for alpha chain variable domain of TCR clone 283505 (TRAV29/DV5, TRAJ34)
CAASASRETDKLIF

SEQ ID NO: 567010 - protein, 13 aa, Homo sapiens
  CDR3 for beta chain variable domain of TCR clone 283505 (TRBV11-2, TRBJ2-5)
CASGHGAKETQYF

SEQ ID NO: 567011 - protein, 14 aa, Homo sapiens
  CDR3 for alpha chain variable domain of TCR clone 283506 (TRAV12-1, TRAJ3)
CVVNPGSSASKIIF

SEQ ID NO: 567012 - protein, 15 aa, Homo sapiens
  CDR3 for beta chain variable domain of TCR clone 283506 (TRBV5-7, TRBJ1-2)
CAGSSPGQGNYGYSF

SEQ ID NO: 567013 - protein, 14 aa, Homo sapiens
  CDR3 for alpha chain variable domain of TCR clone 283507 (TRAV8-4, TRAJ9)
CAVRINTEGFKTIF

SEQ ID NO: 567014 - protein, 15 aa, Homo sapiens
  CDR3 for beta chain variable domain of TCR clone 283507 (TRBV10-2, TRBJ2-6)
CASSEQGTGANVLNF

SEQ ID NO: 567015 - protein, 17 aa, Homo sapiens
  CDR3 for alpha chain variable domain of TCR clone 283508 (TRAV38-1, TRAJ45)
CAFMRSQSGGGADGLTF

SEQ ID NO: 567016 - protein, 15 aa, Homo sapiens
  CDR3 for beta chain variable domain of TCR clone 283508 (TRBV7-2, TRBJ2-3)
CASSLVVRGPDTQYF

SEQ ID NO: 567017 - protein, 12 aa, Homo sapiens
  CDR3 for alpha chain variable domain of TCR clone 283509 (TRAV13-1, TRAJ48)
CAANFGNEKLTF

SEQ ID NO: 567018 - protein, 15 aa, Homo sapiens
  CDR3 for beta chain variable domain of TCR clone 283509 (TRBV7-2, TRBJ2-3)
CASSLAGAFIDTQYF

SEQ ID NO: 567019 - protein, 14 aa, Homo sapiens
  CDR3 for alpha chain variable domain of TCR clone 283510 (TRAV1-2, TRAJ16)
CAVNRFSDGQKLLF

SEQ ID NO: 567020 - protein, 14 aa, Homo sapiens
  CDR3 for beta chain variable domain of TCR clone 283510 (TRBV12-4, TRBJ2-3)
CASSLGQGTDTQYF

SEQ ID NO: 567021 - protein, 22 aa, Homo sapiens
  CDR3 for alpha chain variable domain of TCR clone 283511 (TRAV26-1, TRAJ30)
CIVRIRTEMTRSSLEKGHDFIF

SEQ ID NO: 567022 - protein, 18 aa, Homo sapiens
  CDR3 for beta chain variable domain of TCR clone 283511 (TRBV4-1, TRBJ1-5)
CASSQDPRGQGLNQPQHF

SEQ ID NO: 567023 - protein, 16 aa, Homo sapiens
  CDR3 for alpha chain variable domain of TCR clone 283512 (TRAV8-6, TRAJ13)
CAVSDKGIWGVPESYL

SEQ ID NO: 567024 - protein, 14 aa, Homo sapiens
  CDR3 for beta chain variable domain of TCR clone 283512 (TRBV12-4, TRBJ2-1)
CASSLGQGASEQFF

SEQ ID NO: 567025 - protein, 16 aa, Homo sapiens
  CDR3 for alpha chain variable domain of TCR clone 283513 (TRAV27, TRAJ13)
FAGAKSDSGGYKKVTF

SEQ ID NO: 567026 - protein, 15 aa, Homo sapiens
  CDR3 for beta chain variable domain of TCR clone 283513 (TRBV29-1, TRBJ2-1)
CSVGRHALFYNEQFF

SEQ ID NO: 567027 - protein, 14 aa, Homo sapiens
  CDR3 for alpha chain variable domain of TCR clone 283514 (TRAV1-2, TRAJ16)
CAVNRFSDGQNLLF

SEQ ID NO: 567028 - protein, 13 aa, Homo sapiens
  CDR3 for beta chain variable domain of TCR clone 283514 (TRBV20-1, TRBJ1-6)
CSAPTGLGSPLHF

SEQ ID NO: 567029 - protein, 14 aa, Homo sapiens
  CDR3 for alpha chain variable domain of TCR clone 283515 (TRAV8-1, TRAJ48)
CAVNAGFGNEKLTF

SEQ ID NO: 567030 - protein, 15 aa, Homo sapiens
  CDR3 for beta chain variable domain of TCR clone 283515 (TRBV9, TRBJ1-6)
CASSVAGTGASPLHF

SEQ ID NO: 567031 - protein, 10 aa, Homo sapiens
  CDR3 for alpha chain variable domain of TCR clone 283516 (TRAV26-1, TRAJ22)
RSGSARHLTF

SEQ ID NO: 567032 - protein, 16 aa, Homo sapiens
  CDR3 for beta chain variable domain of TCR clone 283516 (TRBV7-3, TRBJ2-2)
CASSLKRGTLSGELFF

SEQ ID NO: 567033 - protein, 20 aa, Homo sapiens
  CDR3 for alpha chain variable domain of TCR clone 283517 (TRAV25, TRAJ21)
TATQTTDVGTYPLSFNKFYF

SEQ ID NO: 567034 - protein, 14 aa, Homo sapiens
  CDR3 for beta chain variable domain of TCR clone 283517 (TRBV6-1, TRBJ2-7)
CASAKDGFYNEQFF

SEQ ID NO: 567035 - protein, 14 aa, Homo sapiens
  CDR3 for alpha chain variable domain of TCR clone 283518 (TRAV8-1, TRAJ39)
CAVNASNAGNMLTF

SEQ ID NO: 567036 - protein, 12 aa, Homo sapiens
  CDR3 for beta chain variable domain of TCR clone 283518 (TRBV6-3, TRBJ2-1)
CASSGSYNEQFF

SEQ ID NO: 567037 - protein, 17 aa, Homo sapiens
  CDR3 for alpha chain variable domain of TCR clone 283519 (TRAV8-6, TRAJ58)
CAVSSWVGETSGSRLTF

SEQ ID NO: 567038 - protein, 13 aa, Homo sapiens
  CDR3 for beta chain variable domain of TCR clone 283519 (TRBV3-1, TRBJ2-5)
CASSLGLVGTQYF

SEQ ID NO: 567039 - protein, 14 aa, Homo sapiens
  CDR3 for alpha chain variable domain of TCR clone 283520 (TRAV12-2, TRAJ24)
CAVTPADSWGKLQF

SEQ ID NO: 567040 - protein, 16 aa, Homo sapiens
  CDR3 for beta chain variable domain of TCR clone 283520 (TRBV28, TRBJ2-7)
CASSPWVATGDLSQYF

SEQ ID NO: 567041 - protein, 14 aa, Homo sapiens
  CDR3 for alpha chain variable domain of TCR clone 283521 (TRAV20, TRAJ56)
CVVQFGGANSKLTF

SEQ ID NO: 567042 - protein, 14 aa, Homo sapiens
  CDR3 for beta chain variable domain of TCR clone 283521 (TRBV20-1, TRBJ2-7)
CSAKRGRSSYEQYF

SEQ ID NO: 567043 - protein, 16 aa, Homo sapiens
  CDR3 for alpha chain variable domain of TCR clone 283522 (TRAV3, TRAJ37)
CAVRVRGSGNTGKLIF

SEQ ID NO: 567044 - protein, 15 aa, Homo sapiens
  CDR3 for beta chain variable domain of TCR clone 283522 (TRBV10-3, TRBJ2-3)
CAISLTSGGTDTQYF

SEQ ID NO: 567045 - protein, 14 aa, Homo sapiens
  CDR3 for alpha chain variable domain of TCR clone 283523 (TRAV13-1, TRAJ35)
CAATKGGFGNVLHC

SEQ ID NO: 567046 - protein, 13 aa, Homo sapiens
  CDR3 for beta chain variable domain of TCR clone 283523 (TRBV7-3, TRBJ1-1)
CASSQDWEAEAFF

SEQ ID NO: 567047 - protein, 18 aa, Homo sapiens
  CDR3 for alpha chain variable domain of TCR clone 283524 (TRAV13-1, TRAJ52)
CAAKNPNAGGTSYGKLTF

SEQ ID NO: 567048 - protein, 17 aa, Homo sapiens
  CDR3 for beta chain variable domain of TCR clone 283524 (TRBV4-1, TRBJ1-4)
CASSDTGGTMKNCFLAV

SEQ ID NO: 567049 - protein, 12 aa, Homo sapiens
  CDR3 for alpha chain variable domain of TCR clone 283525 (TRAV27, TRAJ11)
CAGASGYSTLTF

SEQ ID NO: 567050 - protein, 14 aa, Homo sapiens
  CDR3 for beta chain variable domain of TCR clone 283525 (TRBV12-5, TRBJ2-5)
CASGSRTHQETQYF

SEQ ID NO: 567051 - protein, 12 aa, Homo sapiens
  CDR3 for alpha chain variable domain of TCR clone 283526 (TRAV8-3, TRAJ20)
CAVDFNDYKLSF

SEQ ID NO: 567052 - protein, 13 aa, Homo sapiens
  CDR3 for beta chain variable domain of TCR clone 283526 (TRBV27, TRBJ2-7)
CASSLTAGYEQYF

SEQ ID NO: 567053 - protein, 16 aa, Homo sapiens
  CDR3 for alpha chain variable domain of TCR clone 283527 (TRAV26-1, TRAJ53)
CIVRVAMGGSNYKLTF

SEQ ID NO: 567054 - protein, 12 aa, Homo sapiens
  CDR3 for beta chain variable domain of TCR clone 283527 (TRBV7-9, TRBJ1-5)
CASSPQGQPLHF

SEQ ID NO: 567055 - protein, 14 aa, Homo sapiens
  CDR3 for alpha chain variable domain of TCR clone 283528 (TRAV1-2, TRAJ8)
CAVREDTGFQKLVF

SEQ ID NO: 567056 - protein, 14 aa, Homo sapiens
  CDR3 for beta chain variable domain of TCR clone 283528 (TRBV6-5, TRBJ1-1)
CASSKQGVNTEAFF

SEQ ID NO: 567057 - protein, 15 aa, Homo sapiens
  CDR3 for alpha chain variable domain of TCR clone 283529 (TRAV25, TRAJ52)
CAGRPGGTSYGELTF

SEQ ID NO: 567058 - protein, 17 aa, Homo sapiens
  CDR3 for beta chain variable domain of TCR clone 283529 (TRBV7-8, TRBJ2-6)
CASSAGTGGAGANDLTL

SEQ ID NO: 567059 - protein, 12 aa, Homo sapiens
  CDR3 for alpha chain variable domain of TCR clone 283530 (TRAV35, TRAJ39)
LAPNNAGNMLTF

SEQ ID NO: 567060 - protein, 16 aa, Homo sapiens
  CDR3 for beta chain variable domain of TCR clone 283530 (TRBV2, TRBJ2-3)
CSSSTSVEGVTDTQYF

SEQ ID NO: 567061 - protein, 16 aa, Homo sapiens
  CDR3 for alpha chain variable domain of TCR clone 283531 (TRAV30, TRAJ42)
CGTSKNYGGSQGNLIF

SEQ ID NO: 567062 - protein, 17 aa, Homo sapiens
  CDR3 for beta chain variable domain of TCR clone 283531 (TRBV7-8, TRBJ2-6)
CASSAGTGGAGANVLTF

SEQ ID NO: 567063 - protein, 14 aa, Homo sapiens
  CDR3 for alpha chain variable domain of TCR clone 283532 (TRAV13-1, TRAJ45)
CAATSGGGADGLTF

SEQ ID NO: 567064 - protein, 16 aa, Homo sapiens
  CDR3 for beta chain variable domain of TCR clone 283532 (TRBV12-4, TRBJ2-5)
CASSFFVRGRQETQYF

SEQ ID NO: 567065 - protein, 17 aa, Homo sapiens
  CDR3 for alpha chain variable domain of TCR clone 283533 (TRAV19, TRAJ28)
CALSEASSGAGSYQLTF

SEQ ID NO: 567066 - protein, 18 aa, Homo sapiens
  CDR3 for beta chain variable domain of TCR clone 283533 (TRBV20-1, TRBJ2-6)
CSAETTPTHGSGANVLTF

SEQ ID NO: 567067 - protein, 16 aa, Homo sapiens
  CDR3 for alpha chain variable domain of TCR clone 283534 (TRAV3, TRAJ37)
CAVRPHGSGNTGKLIF

SEQ ID NO: 567068 - protein, 15 aa, Homo sapiens
  CDR3 for beta chain variable domain of TCR clone 283534 (TRBV7-2, TRBJ2-1)
CASTHGTGIYNEQFF

SEQ ID NO: 567069 - protein, 18 aa, Homo sapiens
  CDR3 for alpha chain variable domain of TCR clone 283535 (TRAV26-1, TRAJ23)
CIVRVGLEVWNQGGKLIF

SEQ ID NO: 567070 - protein, 16 aa, Homo sapiens
  CDR3 for beta chain variable domain of TCR clone 283535 (TRBV12-4, TRBJ2-5)
CASSFFVRVRQETQYF

SEQ ID NO: 567071 - protein, 14 aa, Homo sapiens
  CDR3 for alpha chain variable domain of TCR clone 283536 (TRAV12-2, TRAJ17)
CAVLFKAACNKLTF

SEQ ID NO: 567072 - protein, 14 aa, Homo sapiens
  CDR3 for beta chain variable domain of TCR clone 283536 (TRBV7-2, TRBJ2-7)
RASRSQGAAYEQYF

SEQ ID NO: 567073 - protein, 14 aa, Homo sapiens
  CDR3 for alpha chain variable domain of TCR clone 283537 (TRAV12-2, TRAJ40)
CAVKIPSGTYNYIF

SEQ ID NO: 567074 - protein, 14 aa, Homo sapiens
  CDR3 for beta chain variable domain of TCR clone 283537 (TRBV19, TRBJ2-1)
CASPTFVLSGEQFF

SEQ ID NO: 567075 - protein, 14 aa, Homo sapiens
  CDR3 for alpha chain variable domain of TCR clone 283538 (TRAV2, TRAJ9)
CAVEDRSGGFKTIS

SEQ ID NO: 567076 - protein, 15 aa, Homo sapiens
  CDR3 for beta chain variable domain of TCR clone 283538 (TRBV19, TRBJ2-1)
CASSSPGVPLDEQFF

SEQ ID NO: 567077 - protein, 12 aa, Homo sapiens
  CDR3 for alpha chain variable domain of TCR clone 283539 (TRAV27, TRAJ35)
CAGADFGHVLHG

SEQ ID NO: 567078 - protein, 16 aa, Homo sapiens
  CDR3 for beta chain variable domain of TCR clone 283539 (TRBV6-1, TRBJ2-1)
CASILRQGSSYNEQFF

SEQ ID NO: 567079 - protein, 12 aa, Homo sapiens
  CDR3 for alpha chain variable domain of TCR clone 283540 (TRAV8-3, TRAJ26)
CSVGAGGQNFVF

SEQ ID NO: 567080 - protein, 14 aa, Homo sapiens
  CDR3 for beta chain variable domain of TCR clone 283540 (TRBV5-1, TRBJ1-5)
CASSLGQGAQPQHF

SEQ ID NO: 567081 - protein, 18 aa, Homo sapiens
  CDR3 for alpha chain variable domain of TCR clone 283541 (TRAV21, TRAJ52)
CAVRPSPAGGTSYGKLTF

SEQ ID NO: 567082 - protein, 17 aa, Homo sapiens
  CDR3 for beta chain variable domain of TCR clone 283541 (TRBV13, TRBJ2-3)
GASSLSRVAGGGNTQYF

SEQ ID NO: 567083 - protein, 15 aa, Homo sapiens
  CDR3 for alpha chain variable domain of TCR clone 283542 (TRAV26-2, TRAJ45)
CILRDSVDQEEVLTD

SEQ ID NO: 567084 - protein, 15 aa, Homo sapiens
  CDR3 for beta chain variable domain of TCR clone 283542 (TRBV7-6, TRBJ2-5)
CASSKPTGPQETQYF

SEQ ID NO: 567085 - protein, 13 aa, Homo sapiens
  CDR3 for alpha chain variable domain of TCR clone 283543 (TRAV17, TRAJ39)
CAISTNAGNMLTF

SEQ ID NO: 567086 - protein, 15 aa, Homo sapiens
  CDR3 for beta chain variable domain of TCR clone 283543 (TRBV19, TRBJ1-1)
CASTSGQIQNTEAFF

SEQ ID NO: 567087 - protein, 16 aa, Homo sapiens
  CDR3 for alpha chain variable domain of TCR clone 283544 (TRAV30, TRAJ24)
CGTDIVDADSRGKFQF

SEQ ID NO: 567088 - protein, 14 aa, Homo sapiens
  CDR3 for beta chain variable domain of TCR clone 283544 (TRBV12-5, TRBJ2-5)
CASGSRTHQETQYF

SEQ ID NO: 567089 - protein, 12 aa, Homo sapiens
  CDR3 for alpha chain variable domain of TCR clone 283545 (TRAV12-1, TRAJ40)
CVVYSGTYKYIF

SEQ ID NO: 567090 - protein, 16 aa, Homo sapiens
  CDR3 for beta chain variable domain of TCR clone 283545 (TRBV11-3, TRBJ1-5)
CQQPIDRASGNQPQHF

SEQ ID NO: 567091 - protein, 14 aa, Homo sapiens
  CDR3 for alpha chain variable domain of TCR clone 283546 (TRAV12-2, TRAJ40)
CAVKIPSGTDKYIF

SEQ ID NO: 567092 - protein, 14 aa, Homo sapiens
  CDR3 for beta chain variable domain of TCR clone 283546 (TRBV20-1, TRBJ1-1)
CSAQTRIGGTAAFF

SEQ ID NO: 567093 - protein, 17 aa, Homo sapiens
  CDR3 for alpha chain variable domain of TCR clone 283547 (TRAV3, TRAJ6)
CAVRDGPRAGGGYIPTF

SEQ ID NO: 567094 - protein, 12 aa, Homo sapiens
  CDR3 for beta chain variable domain of TCR clone 283547 (TRBV11-2, TRBJ2-1)
CASSPGNNEQFF

SEQ ID NO: 567095 - protein, 11 aa, Homo sapiens
  CDR3 for alpha chain variable domain of TCR clone 283548 (TRAV12-3, TRAJ49)
CAANTGNQFYF

SEQ ID NO: 567096 - protein, 16 aa, Homo sapiens
  CDR3 for beta chain variable domain of TCR clone 283548 (TRBV7-9, TRBJ2-3)
CASSPWREVGTDTRYF

SEQ ID NO: 567097 - protein, 15 aa, Homo sapiens
  CDR3 for alpha chain variable domain of TCR clone 283549 (TRAV27, TRAJ38)
CAARRNSGNNRKLIW

SEQ ID NO: 567098 - protein, 13 aa, Homo sapiens
  CDR3 for beta chain variable domain of TCR clone 283549 (TRBV12-5, TRBJ2-3)
RASGDRQSDTQYF

SEQ ID NO: 567099 - protein, 15 aa, Homo sapiens
  CDR3 for alpha chain variable domain of TCR clone 283550 (TRAV8-4, TRAJ56)
CAVSGGTGANSKLTF

SEQ ID NO: 567100 - protein, 13 aa, Homo sapiens
  CDR3 for beta chain variable domain of TCR clone 283550 (TRBV7-3, TRBJ1-1)
CASSQDWGAEAFF

SEQ ID NO: 567101 - protein, 14 aa, Homo sapiens
  CDR3 for alpha chain variable domain of TCR clone 283551 (TRAV17, TRAJ31)
CATVLRNNNARLMF

SEQ ID NO: 567102 - protein, 14 aa, Homo sapiens
  CDR3 for beta chain variable domain of TCR clone 283551 (TRBV12-4, TRBJ2-5)
CASSLWQKHETQYF

SEQ ID NO: 567103 - protein, 14 aa, Homo sapiens
  CDR3 for alpha chain variable domain of TCR clone 283552 (TRAV1-2, TRAJ8)
CAVREDTGFQTLVF

SEQ ID NO: 567104 - protein, 15 aa, Homo sapiens
  CDR3 for beta chain variable domain of TCR clone 283552 (TRBV19, TRBJ2-1)
CASSTGTSSYNEQFF

SEQ ID NO: 567105 - protein, 13 aa, Homo sapiens
  CDR3 for alpha chain variable domain of TCR clone 283553 (TRAV36/DV7, TRAJ53)
CALSGGSNYKLTF

SEQ ID NO: 567106 - protein, 13 aa, Homo sapiens
  CDR3 for beta chain variable domain of TCR clone 283553 (TRBV28, TRBJ2-4)
WASSQSSKNIQYF

SEQ ID NO: 567107 - protein, 15 aa, Homo sapiens
  CDR3 for alpha chain variable domain of TCR clone 283554 (TRAV17, TRAJ4)
CATGTWSGGYNKLIF

SEQ ID NO: 567108 - protein, 15 aa, Homo sapiens
  CDR3 for beta chain variable domain of TCR clone 283554 (TRBV5-7, TRBJ2-7)
CASSGERPVPYEQYF

SEQ ID NO: 567109 - protein, 13 aa, Homo sapiens
  CDR3 for alpha chain variable domain of TCR clone 283555 (TRAV12-1, TRAJ7)
CVVNIRGNNRLAF

SEQ ID NO: 567110 - protein, 15 aa, Homo sapiens
  CDR3 for beta chain variable domain of TCR clone 283555 (TRBV27, TRBJ2-3)
CASSLGLAATYTQYF

SEQ ID NO: 567111 - protein, 13 aa, Homo sapiens
  CDR3 for alpha chain variable domain of TCR clone 283556 (TRAV8-3, TRAJ44)
CAVVPGTASKLTF

SEQ ID NO: 567112 - protein, 13 aa, Homo sapiens
  CDR3 for beta chain variable domain of TCR clone 283556 (TRBV10-3, TRBJ1-2)
CAISERDSYGYTV

SEQ ID NO: 567113 - protein, 17 aa, Homo sapiens
  CDR3 for alpha chain variable domain of TCR clone 283557 (TRAV3, TRAJ42)
CAVRDRDYGGSQGNLIF

SEQ ID NO: 567114 - protein, 14 aa, Homo sapiens
  CDR3 for beta chain variable domain of TCR clone 283557 (TRBV19, TRBJ2-5)
CASSMTGQQESQYF

SEQ ID NO: 567115 - protein, 18 aa, Homo sapiens
  CDR3 for alpha chain variable domain of TCR clone 283558 (TRAV21, TRAJ52)
CAVRPSPAVGTIYGKLTF

SEQ ID NO: 567116 - protein, 13 aa, Homo sapiens
  CDR3 for beta chain variable domain of TCR clone 283558 (TRBV7-3, TRBJ1-1)
CASSQDWGAEAFF

SEQ ID NO: 567117 - protein, 10 aa, Homo sapiens
  CDR3 for alpha chain variable domain of TCR clone 283559 (TRAV27, TRAJ28)
SGAGSYQLTF

SEQ ID NO: 567118 - protein, 16 aa, Homo sapiens
  CDR3 for beta chain variable domain of TCR clone 283559 (TRBV20-1, TRBJ1-6)
CSARAVGRVYNSPLHF

SEQ ID NO: 567119 - protein, 16 aa, Homo sapiens
  CDR3 for alpha chain variable domain of TCR clone 283560 (TRAV38-1, TRAJ56)
CALMKRQTGANSKLTF

SEQ ID NO: 567120 - protein, 15 aa, Homo sapiens
  CDR3 for beta chain variable domain of TCR clone 283560 (TRBV11-2, TRBJ1-6)
CASTGFGTAVSPLHF

SEQ ID NO: 567121 - protein, 17 aa, Homo sapiens
  CDR3 for alpha chain variable domain of TCR clone 283561 (TRAV13-1, TRAJ52)
CAASSGDGGTSYGTLTF

SEQ ID NO: 567122 - protein, 15 aa, Homo sapiens
  CDR3 for beta chain variable domain of TCR clone 283561 (TRBV2, TRBJ2-1)
CASSELAGSYNEQFF

SEQ ID NO: 567123 - protein, 14 aa, Homo sapiens
  CDR3 for alpha chain variable domain of TCR clone 283562 (TRAV13-1, TRAJ9)
CAASALTRGFKTIF

SEQ ID NO: 567124 - protein, 13 aa, Homo sapiens
  CDR3 for beta chain variable domain of TCR clone 283562 (TRBV20-1, TRBJ1-1)
CSAGTVGNTEAFV

SEQ ID NO: 567125 - protein, 13 aa, Homo sapiens
  CDR3 for alpha chain variable domain of TCR clone 283563 (TRAV1-2, TRAJ9)
CAALNTGGFKTIF

SEQ ID NO: 567126 - protein, 13 aa, Homo sapiens
  CDR3 for beta chain variable domain of TCR clone 283563 (TRBV4-1, TRBJ2-5)
CASSLTRGETQYF

SEQ ID NO: 567127 - protein, 13 aa, Homo sapiens
  CDR3 for alpha chain variable domain of TCR clone 283564 (TRAV2, TRAJ40)
CAVVTSGTYKYIF

SEQ ID NO: 567128 - protein, 14 aa, Homo sapiens
  CDR3 for beta chain variable domain of TCR clone 283564 (TRBV19, TRBJ2-1)
CARPTCVVSGEQFF

SEQ ID NO: 567129 - protein, 15 aa, Homo sapiens
  CDR3 for alpha chain variable domain of TCR clone 283565 (TRAV17, TRAJ22)
CATVAPSGSARQLTF

SEQ ID NO: 567130 - protein, 16 aa, Homo sapiens
  CDR3 for beta chain variable domain of TCR clone 283565 (TRBV10-3, TRBJ2-7)
CAISADFADRLYEQYF

SEQ ID NO: 567131 - protein, 14 aa, Homo sapiens
  CDR3 for alpha chain variable domain of TCR clone 283566 (TRAV13-1, TRAJ44)
CAAKATGTASKLTF

SEQ ID NO: 567132 - protein, 15 aa, Homo sapiens
  CDR3 for beta chain variable domain of TCR clone 283566 (TRBV18, TRBJ2-6)
CASSPSYAGANVLTF

SEQ ID NO: 567133 - protein, 14 aa, Homo sapiens
  CDR3 for alpha chain variable domain of TCR clone 283567 (TRAV12-2, TRAJ22)
FAVRFSGSARQLTF

SEQ ID NO: 567134 - protein, 13 aa, Homo sapiens
  CDR3 for beta chain variable domain of TCR clone 283567 (TRBV6-1, TRBJ2-1)
CASTGTGLNEQFF

SEQ ID NO: 567135 - protein, 14 aa, Homo sapiens
  CDR3 for alpha chain variable domain of TCR clone 283568 (TRAV1-2, TRAJ16)
CAVNRFSDGQKLLF

SEQ ID NO: 567136 - protein, 16 aa, Homo sapiens
  CDR3 for beta chain variable domain of TCR clone 283568 (TRBV4-3, TRBJ2-1)
CASSEGIRDYYNEQFF

SEQ ID NO: 567137 - protein, 13 aa, Homo sapiens
  CDR3 for alpha chain variable domain of TCR clone 283569 (TRAV8-6, TRAJ50)
CAVIKTSYDKVIF

SEQ ID NO: 567138 - protein, 16 aa, Homo sapiens
  CDR3 for beta chain variable domain of TCR clone 283569 (TRBV7-6, TRBJ2-1)
CASSAPGPSSYNEQFF

SEQ ID NO: 567139 - protein, 15 aa, Homo sapiens
  CDR3 for alpha chain variable domain of TCR clone 283570 (TRAV14/DV4, TRAJ12)
CAMREGWDSSYKLIF

SEQ ID NO: 567140 - protein, 16 aa, Homo sapiens
  CDR3 for beta chain variable domain of TCR clone 283570 (TRBV11-2, TRBJ2-2)
CASSLKRGTLSGELFF

SEQ ID NO: 567141 - protein, 15 aa, Homo sapiens
  CDR3 for alpha chain variable domain of TCR clone 283571 (TRAV26-1, TRAJ29)
CIVRVEGSGNTPLVF

SEQ ID NO: 567142 - protein, 14 aa, Homo sapiens
  CDR3 for beta chain variable domain of TCR clone 283571 (TRBV7-3, TRBJ2-1)
CASSLAGGTNEQFF

SEQ ID NO: 567143 - protein, 16 aa, Homo sapiens
  CDR3 for alpha chain variable domain of TCR clone 283572 (TRAV30, TRAJ24)
CGTEIVDADSWGKFQF

SEQ ID NO: 567144 - protein, 16 aa, Homo sapiens
  CDR3 for beta chain variable domain of TCR clone 283572 (TRBV15, TRBJ2-7)
CATSRDRGRRRGEQYF

SEQ ID NO: 567145 - protein, 15 aa, Homo sapiens
  CDR3 for alpha chain variable domain of TCR clone 283573 (TRAV8-2, TRAJ13)
CVVSDLSGGYQKVTF

SEQ ID NO: 567146 - protein, 16 aa, Homo sapiens
  CDR3 for beta chain variable domain of TCR clone 283573 (TRBV27, TRBJ2-2)
CASRFRGLVRTGELFF

SEQ ID NO: 567147 - protein, 17 aa, Homo sapiens
  CDR3 for alpha chain variable domain of TCR clone 283574 (TRAV13-1, TRAJ31)
CAPRDRLMFGDGTQLVV

SEQ ID NO: 567148 - protein, 14 aa, Homo sapiens
  CDR3 for beta chain variable domain of TCR clone 283574 (TRBV11-2, TRBJ1-2)
CASSLGTANYGYTF

SEQ ID NO: 567149 - protein, 15 aa, Homo sapiens
  CDR3 for alpha chain variable domain of TCR clone 283575 (TRAV25, TRAJ53)
RAATGGGGSNYKLTF

SEQ ID NO: 567150 - protein, 19 aa, Homo sapiens
  CDR3 for beta chain variable domain of TCR clone 283575 (TRBV7-2, TRBJ2-3)
CASSFLSRNWGGGTDTQYF

SEQ ID NO: 567151 - protein, 12 aa, Homo sapiens
  CDR3 for alpha chain variable domain of TCR clone 283576 (TRAV3, TRAJ20)
CAVRDPDYKLSF

SEQ ID NO: 567152 - protein, 16 aa, Homo sapiens
  CDR3 for beta chain variable domain of TCR clone 283576 (TRBV6-4, TRBJ2-3)
APSEGGRAWGTDTQYF

SEQ ID NO: 567153 - protein, 15 aa, Homo sapiens
  CDR3 for alpha chain variable domain of TCR clone 283577 (TRAV12-1, TRAJ44)
CVADLPTGTASKLTF

SEQ ID NO: 567154 - protein, 12 aa, Homo sapiens
  CDR3 for beta chain variable domain of TCR clone 283577 (TRBV6-5, TRBJ2-5)
CQQSQGGETQYF

SEQ ID NO: 567155 - protein, 14 aa, Homo sapiens
  CDR3 for alpha chain variable domain of TCR clone 283578 (TRAV1-2, TRAJ8)
CAVREDTGFQKLVF

SEQ ID NO: 567156 - protein, 18 aa, Homo sapiens
  CDR3 for beta chain variable domain of TCR clone 283578 (TRBV11-2, TRBJ2-7)
CASSPRGVAGFLIYEQYF

SEQ ID NO: 567157 - protein, 14 aa, Homo sapiens
  CDR3 for alpha chain variable domain of TCR clone 283579 (TRAV23/DV6, TRAJ6)
CAARWTGGSYIPTF

SEQ ID NO: 567158 - protein, 17 aa, Homo sapiens
  CDR3 for beta chain variable domain of TCR clone 283579 (TRBV11-2, TRBJ2-1)
CASSLYPPGVEYNEQFF

SEQ ID NO: 567159 - protein, 13 aa, Homo sapiens
  CDR3 for alpha chain variable domain of TCR clone 283580 (TRAV1-1, TRAJ9)
CAAKNTGGFKTIF

SEQ ID NO: 567160 - protein, 13 aa, Homo sapiens
  CDR3 for beta chain variable domain of TCR clone 283580 (TRBV11-2, TRBJ2-5)
CASSSTGEETQYF

SEQ ID NO: 567161 - protein, 17 aa, Homo sapiens
  CDR3 for alpha chain variable domain of TCR clone 283581 (TRAV3, TRAJ38)
CAVRDGLNAGNNRKLIL

SEQ ID NO: 567162 - protein, 14 aa, Homo sapiens
  CDR3 for beta chain variable domain of TCR clone 283581 (TRBV5-5, TRBJ1-5)
CASSGQGVDQPQHF

SEQ ID NO: 567163 - protein, 14 aa, Homo sapiens
  CDR3 for alpha chain variable domain of TCR clone 283582 (TRAV35, TRAJ22)
CAGLRSGSARQLTF

SEQ ID NO: 567164 - protein, 15 aa, Homo sapiens
  CDR3 for beta chain variable domain of TCR clone 283582 (TRBV12-4, TRBJ2-5)
CASSPPTGLQETQYL

SEQ ID NO: 567165 - protein, 13 aa, Homo sapiens
  CDR3 for alpha chain variable domain of TCR clone 283583 (TRAV3, TRAJ15)
CAVRDQAGTALIF

SEQ ID NO: 567166 - protein, 16 aa, Homo sapiens
  CDR3 for beta chain variable domain of TCR clone 283583 (TRBV24-1, TRBJ2-3)
CATSDPGTGATDTQYF

SEQ ID NO: 567167 - protein, 16 aa, Homo sapiens
  CDR3 for alpha chain variable domain of TCR clone 283584 (TRAV12-3, TRAJ53)
CAMSVGSGGSNYKLTF

SEQ ID NO: 567168 - protein, 11 aa, Homo sapiens
  CDR3 for beta chain variable domain of TCR clone 283584 (TRBV29-1, TRBJ2-5)
CSVASGETQYF

SEQ ID NO: 567169 - protein, 12 aa, Homo sapiens
  CDR3 for alpha chain variable domain of TCR clone 283585 (TRAV21, TRAJ13)
PGPSGGYPKVTF

SEQ ID NO: 567170 - protein, 14 aa, Homo sapiens
  CDR3 for beta chain variable domain of TCR clone 283585 (TRBV27, TRBJ2-5)
CASSSLKGWETQYF

SEQ ID NO: 567171 - protein, 15 aa, Homo sapiens
  CDR3 for alpha chain variable domain of TCR clone 283586 (TRAV23/DV6, TRAJ13)
CVAWPGGGSYQKVTF

SEQ ID NO: 567172 - protein, 17 aa, Homo sapiens
  CDR3 for beta chain variable domain of TCR clone 283586 (TRBV19, TRBJ2-7)
CASSISFYDSYPYEQYF

SEQ ID NO: 567173 - protein, 18 aa, Homo sapiens
  CDR3 for alpha chain variable domain of TCR clone 283587 (TRAV21, TRAJ52)
CAVMPSPAGGTSYGKLTF

SEQ ID NO: 567174 - protein, 12 aa, Homo sapiens
  CDR3 for beta chain variable domain of TCR clone 283587 (TRBV11-2, TRBJ2-2)
CASSLGGGELFF

SEQ ID NO: 567175 - protein, 17 aa, Homo sapiens
  CDR3 for alpha chain variable domain of TCR clone 283588 (TRAV26-1, TRAJ53)
CIVRDDDSGGSHYKLTF

SEQ ID NO: 567176 - protein, 15 aa, Homo sapiens
  CDR3 for beta chain variable domain of TCR clone 283588 (TRBV20-1, TRBJ2-7)
CSARVPAAYFYEQYF

SEQ ID NO: 567177 - protein, 12 aa, Homo sapiens
  CDR3 for alpha chain variable domain of TCR clone 283589 (TRAV1-1, TRAJ8)
CAGVTGFQKLVF

SEQ ID NO: 567178 - protein, 15 aa, Homo sapiens
  CDR3 for beta chain variable domain of TCR clone 283589 (TRBV20-1, TRBJ2-7)
CSARDRVSGMDEQYF

SEQ ID NO: 567179 - protein, 13 aa, Homo sapiens
  CDR3 for alpha chain variable domain of TCR clone 283590 (TRAV16, TRAJ31)
CALSAHNNARPMF

SEQ ID NO: 567180 - protein, 17 aa, Homo sapiens
  CDR3 for beta chain variable domain of TCR clone 283590 (TRBV12-4, TRBJ2-1)
CASSPGLAGGRTNEQFF

SEQ ID NO: 567181 - protein, 14 aa, Homo sapiens
  CDR3 for alpha chain variable domain of TCR clone 283591 (TRAV26-1, TRAJ38)
CIADNAGNNRKLLW

SEQ ID NO: 567182 - protein, 15 aa, Homo sapiens
  CDR3 for beta chain variable domain of TCR clone 283591 (TRBV4-1, TRBJ1-1)
CASSQEWGHYTEAFF

SEQ ID NO: 567183 - protein, 15 aa, Homo sapiens
  CDR3 for alpha chain variable domain of TCR clone 283592 (TRAV3, TRAJ22)
CAVRDRGGSARQLTF

SEQ ID NO: 567184 - protein, 15 aa, Homo sapiens
  CDR3 for beta chain variable domain of TCR clone 283592 (TRBV7-2, TRBJ2-5)
CASSFLRGGEETQYF

SEQ ID NO: 567185 - protein, 16 aa, Homo sapiens
  CDR3 for alpha chain variable domain of TCR clone 283593 (TRAV12-1, TRAJ53)
CVVTSVAGGSNYKLTF

SEQ ID NO: 567186 - protein, 13 aa, Homo sapiens
  CDR3 for beta chain variable domain of TCR clone 283593 (TRBV7-9, TRBJ1-2)
CASSPSNFWGYTF

SEQ ID NO: 567187 - protein, 13 aa, Homo sapiens
  CDR3 for alpha chain variable domain of TCR clone 283594 (TRAV12-2, TRAJ42)
FAVKRGSQGNLIF

SEQ ID NO: 567188 - protein, 16 aa, Homo sapiens
  CDR3 for beta chain variable domain of TCR clone 283594 (TRBV9, TRBJ2-2)
CASSAMGKGNTGELFF

SEQ ID NO: 567189 - protein, 18 aa, Homo sapiens
  CDR3 for alpha chain variable domain of TCR clone 283595 (TRAV9-2, TRAJ52)
CALSRHNAGGTSYGKLTF

SEQ ID NO: 567190 - protein, 13 aa, Homo sapiens
  CDR3 for beta chain variable domain of TCR clone 283595 (TRBV7-9, TRBJ1-2)
CVSSLKQNYGYTF

SEQ ID NO: 567191 - protein, 15 aa, Homo sapiens
  CDR3 for alpha chain variable domain of TCR clone 283596 (TRAV26-1, TRAJ29)
CIVRVEGSGNTPLVF

SEQ ID NO: 567192 - protein, 13 aa, Homo sapiens
  CDR3 for beta chain variable domain of TCR clone 283596 (TRBV12-4, TRBJ2-7)
CASSWTGSYEQYF

SEQ ID NO: 567193 - protein, 13 aa, Homo sapiens
  CDR3 for alpha chain variable domain of TCR clone 283597 (TRAV3, TRAJ20)
CAVRSLNDYKLSF

SEQ ID NO: 567194 - protein, 13 aa, Homo sapiens
  CDR3 for beta chain variable domain of TCR clone 283597 (TRBV7-3, TRBJ1-1)
CASSQDWGAESFF

SEQ ID NO: 567195 - protein, 14 aa, Homo sapiens
  CDR3 for alpha chain variable domain of TCR clone 283598 (TRAV12-3, TRAJ9)
CAMSPNTGGFKTIF

SEQ ID NO: 567196 - protein, 17 aa, Homo sapiens
  CDR3 for beta chain variable domain of TCR clone 283598 (TRBV11-2, TRBJ2-4)
CASSSVGPGGHRNIQYF

SEQ ID NO: 567197 - protein, 13 aa, Homo sapiens
  CDR3 for alpha chain variable domain of TCR clone 283599 (TRAV8-3, TRAJ28)
CAVGAVGSYQLTF

SEQ ID NO: 567198 - protein, 15 aa, Homo sapiens
  CDR3 for beta chain variable domain of TCR clone 283599 (TRBV28, TRBJ2-5)
CASSPGLGSIETQYF

SEQ ID NO: 567199 - protein, 12 aa, Homo sapiens
  CDR3 for alpha chain variable domain of TCR clone 283600 (TRAV27, TRAJ35)
CAGADFGNVLHC

SEQ ID NO: 567200 - protein, 15 aa, Homo sapiens
  CDR3 for beta chain variable domain of TCR clone 283600 (TRBV19, TRBJ1-2)
CASSVGQVLNYGYTF

SEQ ID NO: 567201 - protein, 14 aa, Homo sapiens
  CDR3 for alpha chain variable domain of TCR clone 283601 (TRAV8-2, TRAJ11)
CVVREKSGYSTLTF

SEQ ID NO: 567202 - protein, 15 aa, Homo sapiens
  CDR3 for beta chain variable domain of TCR clone 283601 (TRBV6-5, TRBJ1-2)
CASSYSPPRFYGYTF

SEQ ID NO: 567203 - protein, 13 aa, Homo sapiens
  CDR3 for alpha chain variable domain of TCR clone 283602 (TRAV20, TRAJ37)
CAGCSSNTGKLIF

SEQ ID NO: 567204 - protein, 16 aa, Homo sapiens
  CDR3 for beta chain variable domain of TCR clone 283602 (TRBV19, TRBJ2-1)
CASSIKLAGSYNEQFF

SEQ ID NO: 567205 - protein, 14 aa, Homo sapiens
  CDR3 for alpha chain variable domain of TCR clone 283603 (TRAV8-1, TRAJ15)
CAVNGQQAGTALIF

SEQ ID NO: 567206 - protein, 15 aa, Homo sapiens
  CDR3 for beta chain variable domain of TCR clone 283603 (TRBV28, TRBJ2-1)
CASSIIAGGRSEQFF

SEQ ID NO: 567207 - protein, 15 aa, Homo sapiens
  CDR3 for alpha chain variable domain of TCR clone 283604 (TRAV17, TRAJ16)
CATALRFSDGRKLLF

SEQ ID NO: 567208 - protein, 15 aa, Homo sapiens
  CDR3 for beta chain variable domain of TCR clone 283604 (TRBV20-1, TRBJ1-1)
CSASRGVTWNTEAFF

SEQ ID NO: 567209 - protein, 14 aa, Homo sapiens
  CDR3 for alpha chain variable domain of TCR clone 283605 (TRAV4, TRAJ9)
CLVGTGTGGFKTIF

SEQ ID NO: 567210 - protein, 14 aa, Homo sapiens
  CDR3 for beta chain variable domain of TCR clone 283605 (TRBV27, TRBJ2-7)
CASATGTERREQYF

SEQ ID NO: 567211 - protein, 14 aa, Homo sapiens
  CDR3 for alpha chain variable domain of TCR clone 283606 (TRAV35, TRAJ42)
CAGRYGGSQGNLIF

SEQ ID NO: 567212 - protein, 15 aa, Homo sapiens
  CDR3 for beta chain variable domain of TCR clone 283606 (TRBV7-9, TRBJ2-1)
CASSLGWGRANEHLF

SEQ ID NO: 567213 - protein, 14 aa, Homo sapiens
  CDR3 for alpha chain variable domain of TCR clone 283607 (TRAV13-1, TRAJ3)
CAASKSGSASKIIF

SEQ ID NO: 567214 - protein, 13 aa, Homo sapiens
  CDR3 for beta chain variable domain of TCR clone 283607 (TRBV25-1, TRBJ2-5)
CASSESGRETQYF

SEQ ID NO: 567215 - protein, 15 aa, Homo sapiens
  CDR3 for alpha chain variable domain of TCR clone 283608 (TRAV3, TRAJ29)
CAVRAALSGNTPLVF

SEQ ID NO: 567216 - protein, 15 aa, Homo sapiens
  CDR3 for beta chain variable domain of TCR clone 283608 (TRBV28, TRBJ1-1)
FASRIKGGLNTEAFF

SEQ ID NO: 567217 - protein, 17 aa, Homo sapiens
  CDR3 for alpha chain variable domain of TCR clone 283609 (TRAV3, TRAJ12)
CAVRDGGRMDSSYKLIF

SEQ ID NO: 567218 - protein, 13 aa, Homo sapiens
  CDR3 for beta chain variable domain of TCR clone 283609 (TRBV10-2, TRBJ1-1)
CASNDQMNTEAFF

SEQ ID NO: 567219 - protein, 15 aa, Homo sapiens
  CDR3 for alpha chain variable domain of TCR clone 283610 (TRAV4, TRAJ26)
CPVGDMNNYGQNFVF

SEQ ID NO: 567220 - protein, 16 aa, Homo sapiens
  CDR3 for beta chain variable domain of TCR clone 283610 (TRBV28, TRBJ1-4)
CASSSRTGAANEKLFF

SEQ ID NO: 567221 - protein, 14 aa, Homo sapiens
  CDR3 for alpha chain variable domain of TCR clone 283611 (TRAV12-2, TRAJ13)
CAVKKTGGYQKVTF

SEQ ID NO: 567222 - protein, 19 aa, Homo sapiens
  CDR3 for beta chain variable domain of TCR clone 283611 (TRBV4-2, TRBJ2-5)
CASSQEEIRLAGLQETQYF

SEQ ID NO: 567223 - protein, 15 aa, Homo sapiens
  CDR3 for alpha chain variable domain of TCR clone 283612 (TRAV4, TRAJ36)
CLVGDRQTGANNLFF

SEQ ID NO: 567224 - protein, 15 aa, Homo sapiens
  CDR3 for beta chain variable domain of TCR clone 283612 (TRBV7-6, TRBJ2-1)
CASSFLAGEGNEQFF

SEQ ID NO: 567225 - protein, 14 aa, Homo sapiens
  CDR3 for alpha chain variable domain of TCR clone 283613 (TRAV35, TRAJ22)
CAGLRPGSASQLTF

SEQ ID NO: 567226 - protein, 15 aa, Homo sapiens
  CDR3 for beta chain variable domain of TCR clone 283613 (TRBV12-4, TRBJ2-5)
CASSPPAGLQETQYL

SEQ ID NO: 567227 - protein, 15 aa, Homo sapiens
  CDR3 for alpha chain variable domain of TCR clone 283614 (TRAV16, TRAJ23)
CALSGPYNQGGKLIF

SEQ ID NO: 567228 - protein, 14 aa, Homo sapiens
  CDR3 for beta chain variable domain of TCR clone 283614 (TRBV7-3, TRBJ2-1)
CASSLAGGTNEQFF

SEQ ID NO: 567229 - protein, 14 aa, Homo sapiens
  CDR3 for alpha chain variable domain of TCR clone 283615 (TRAV25, TRAJ21)
CADYTTSTNFTLDL

SEQ ID NO: 567230 - protein, 12 aa, Homo sapiens
  CDR3 for beta chain variable domain of TCR clone 283615 (TRBV5-1, TRBJ2-7)
CASSLDSYEQYF

SEQ ID NO: 567231 - protein, 17 aa, Homo sapiens
  CDR3 for alpha chain variable domain of TCR clone 283616 (TRAV13-1, TRAJ52)
CAASSGSGGTSYGKLTF

SEQ ID NO: 567232 - protein, 12 aa, Homo sapiens
  CDR3 for beta chain variable domain of TCR clone 283616 (TRBV11-2, TRBJ2-2)
CASSLGGGELFS

SEQ ID NO: 567233 - protein, 13 aa, Homo sapiens
  CDR3 for alpha chain variable domain of TCR clone 283617 (TRAV12-1, TRAJ10)
CVVSTGGGNELTF

SEQ ID NO: 567234 - protein, 16 aa, Homo sapiens
  CDR3 for beta chain variable domain of TCR clone 283617 (TRBV12-4, TRBJ1-5)
CASSRPVGGSNQPQHF

SEQ ID NO: 567235 - protein, 14 aa, Homo sapiens
  CDR3 for alpha chain variable domain of TCR clone 283618 (TRAV12-2, TRAJ12)
CAVINRDSSYKLIF

SEQ ID NO: 567236 - protein, 15 aa, Homo sapiens
  CDR3 for beta chain variable domain of TCR clone 283618 (TRBV28, TRBJ2-1)
CASSLDTSSYNEQFC

SEQ ID NO: 567237 - protein, 17 aa, Homo sapiens
  CDR3 for alpha chain variable domain of TCR clone 283619 (TRAV3, TRAJ6)
CAARDGPRAGGSYIPTF

SEQ ID NO: 567238 - protein, 14 aa, Homo sapiens
  CDR3 for beta chain variable domain of TCR clone 283619 (TRBV6-1, TRBJ1-3)
CASVQGGGGNTIYF

SEQ ID NO: 567239 - protein, 13 aa, Homo sapiens
  CDR3 for alpha chain variable domain of TCR clone 283620 (TRAV27, TRAJ57)
CRSAQGGSERLVF

SEQ ID NO: 567240 - protein, 15 aa, Homo sapiens
  CDR3 for beta chain variable domain of TCR clone 283620 (TRBV27, TRBJ1-6)
CASSFDRGLGSPLHF

SEQ ID NO: 567241 - protein, 15 aa, Homo sapiens
  CDR3 for alpha chain variable domain of TCR clone 283621 (TRAV12-3, TRAJ11)
CAMSEENSGYSTLTF

SEQ ID NO: 567242 - protein, 15 aa, Homo sapiens
  CDR3 for beta chain variable domain of TCR clone 283621 (TRBV20-1, TRBJ2-7)
CSARVPAAYFYEQYF

SEQ ID NO: 567243 - protein, 15 aa, Homo sapiens
  CDR3 for alpha chain variable domain of TCR clone 283622 (TRAV12-1, TRAJ9)
CVVSFGDTGGFKTIF

SEQ ID NO: 567244 - protein, 13 aa, Homo sapiens
  CDR3 for beta chain variable domain of TCR clone 283622 (TRBV7-2, TRBJ2-5)
CASSQTSVETQYF

SEQ ID NO: 567245 - protein, 12 aa, Homo sapiens
  CDR3 for alpha chain variable domain of TCR clone 283623 (TRAV8-4, TRAJ43)
CAVSVNNNDMRF

SEQ ID NO: 567246 - protein, 14 aa, Homo sapiens
  CDR3 for beta chain variable domain of TCR clone 283623 (TRBV12-4, TRBJ2-7)
CASSPAGLKYEQYF

SEQ ID NO: 567247 - protein, 15 aa, Homo sapiens
  CDR3 for alpha chain variable domain of TCR clone 283624 (TRAV12-3, TRAJ5)
CAMSGLGTGRRALTF

SEQ ID NO: 567248 - protein, 15 aa, Homo sapiens
  CDR3 for beta chain variable domain of TCR clone 283624 (TRBV19, TRBJ1-1)
CASTSGLIQNTEAFF

SEQ ID NO: 567249 - protein, 15 aa, Homo sapiens
  CDR3 for alpha chain variable domain of TCR clone 283625 (TRAV26-1, TRAJ40)
CIVRAVPSGTYKYIF

SEQ ID NO: 567250 - protein, 14 aa, Homo sapiens
  CDR3 for beta chain variable domain of TCR clone 283625 (TRBV19, TRBJ2-1)
CASKTRDSLMSSSS

SEQ ID NO: 567251 - protein, 12 aa, Homo sapiens
  CDR3 for alpha chain variable domain of TCR clone 283626 (TRAV12-3, TRAJ17)
CAMALTDNKLTF

SEQ ID NO: 567252 - protein, 15 aa, Homo sapiens
  CDR3 for beta chain variable domain of TCR clone 283626 (TRBV20-1, TRBJ2-7)
CSARDRVSGMDEQYF

SEQ ID NO: 567253 - protein, 11 aa, Homo sapiens
  CDR3 for alpha chain variable domain of TCR clone 283627 (TRAV21, TRAJ11)
CAVNGYSTLTF

SEQ ID NO: 567254 - protein, 16 aa, Homo sapiens
  CDR3 for beta chain variable domain of TCR clone 283627 (TRBV4-3, TRBJ2-2)
CASSHLQGSGTEELFF

SEQ ID NO: 567255 - protein, 16 aa, Homo sapiens
  CDR3 for alpha chain variable domain of TCR clone 283628 (TRAV30, TRAJ24)
CDTEIVDADSWGKFQF

SEQ ID NO: 567256 - protein, 14 aa, Homo sapiens
  CDR3 for beta chain variable domain of TCR clone 283628 (TRBV12-5, TRBJ2-5)
CASGSRTHQDTQYF

SEQ ID NO: 567257 - protein, 14 aa, Homo sapiens
  CDR3 for alpha chain variable domain of TCR clone 283629 (TRAV20, TRAJ56)
CAVQFGGAHSKLTF

SEQ ID NO: 567258 - protein, 14 aa, Homo sapiens
  CDR3 for beta chain variable domain of TCR clone 283629 (TRBV20-1, TRBJ2-7)
CSAKRGRSSYEQYF

SEQ ID NO: 567259 - protein, 13 aa, Homo sapiens
  CDR3 for alpha chain variable domain of TCR clone 283630 (TRAV2, TRAJ24)
CAVPTDSWGKLQF

SEQ ID NO: 567260 - protein, 13 aa, Homo sapiens
  CDR3 for beta chain variable domain of TCR clone 283630 (TRBV12-4, TRBJ2-5)
CASSPGTEETQYF

SEQ ID NO: 567261 - protein, 16 aa, Homo sapiens
  CDR3 for alpha chain variable domain of TCR clone 283631 (TRAV13-1, TRAJ45)
CAAIKGTGGGAAGLTF

SEQ ID NO: 567262 - protein, 15 aa, Homo sapiens
  CDR3 for beta chain variable domain of TCR clone 283631 (TRBV27, TRBJ2-1)
CASSNGGGSSNEQFF

SEQ ID NO: 567263 - protein, 14 aa, Homo sapiens
  CDR3 for alpha chain variable domain of TCR clone 283632 (TRAV1-2, TRAJ16)
CAVNRVSDGQKLLF

SEQ ID NO: 567264 - protein, 15 aa, Homo sapiens
  CDR3 for beta chain variable domain of TCR clone 283632 (TRBV9, TRBJ1-6)
CASSVAGTGDSPLHV

SEQ ID NO: 567265 - protein, 13 aa, Homo sapiens
  CDR3 for alpha chain variable domain of TCR clone 283633 (TRAV13-1, TRAJ39)
CSKYSNAGNMLTF

SEQ ID NO: 567266 - protein, 14 aa, Homo sapiens
  CDR3 for beta chain variable domain of TCR clone 283633 (TRBV12-4, TRBJ2-6)
WASTGRAGANVLTF

SEQ ID NO: 567267 - protein, 16 aa, Homo sapiens
  CDR3 for alpha chain variable domain of TCR clone 283634 (TRAV12-3, TRAJ53)
CAMSQGSGGSNYKLTF

SEQ ID NO: 567268 - protein, 14 aa, Homo sapiens
  CDR3 for beta chain variable domain of TCR clone 283634 (TRBV7-6, TRBJ2-3)
CASSLGTVTDTQYF

SEQ ID NO: 567269 - protein, 15 aa, Homo sapiens
  CDR3 for alpha chain variable domain of TCR clone 283635 (TRAV3, TRAJ5)
CAVRDRQKGRRALTF

SEQ ID NO: 567270 - protein, 15 aa, Homo sapiens
  CDR3 for beta chain variable domain of TCR clone 283635 (TRBV7-8, TRBJ2-1)
CASSLADSLYNEQFF

SEQ ID NO: 567271 - protein, 15 aa, Homo sapiens
  CDR3 for alpha chain variable domain of TCR clone 283636 (TRAV8-3, TRAJ45)
CASSYSGGDADGLTF

SEQ ID NO: 567272 - protein, 13 aa, Homo sapiens
  CDR3 for beta chain variable domain of TCR clone 283636 (TRBV10-3, TRBJ2-7)
CASELAVNYEQYF

SEQ ID NO: 567273 - protein, 14 aa, Homo sapiens
  CDR3 for alpha chain variable domain of TCR clone 283637 (TRAV12-2, TRAJ17)
CAVLFKAAGNKITF

SEQ ID NO: 567274 - protein, 13 aa, Homo sapiens
  CDR3 for beta chain variable domain of TCR clone 283637 (TRBV19, TRBJ1-2)
CASSQGQVYGYTF

SEQ ID NO: 567275 - protein, 15 aa, Homo sapiens
  CDR3 for alpha chain variable domain of TCR clone 283638 (TRAV8-3, TRAJ45)
CAVASSGGGADGLTF

SEQ ID NO: 567276 - protein, 16 aa, Homo sapiens
  CDR3 for beta chain variable domain of TCR clone 283638 (TRBV12-4, TRBJ1-5)
CASSRPVGGSNQPQHF

SEQ ID NO: 567277 - protein, 15 aa, Homo sapiens
  CDR3 for alpha chain variable domain of TCR clone 283639 (TRAV8-3, TRAJ45)
CASSYSGVGAAGLPF

SEQ ID NO: 567278 - protein, 13 aa, Homo sapiens
  CDR3 for beta chain variable domain of TCR clone 283639 (TRBV10-3, TRBJ2-7)
CASKLAVNYEQYF

SEQ ID NO: 567279 - protein, 13 aa, Homo sapiens
  CDR3 for alpha chain variable domain of TCR clone 283640 (TRAV21, TRAJ27)
CAARPGNAGKSTF

SEQ ID NO: 567280 - protein, 13 aa, Homo sapiens
  CDR3 for beta chain variable domain of TCR clone 283640 (TRBV13, TRBJ2-1)
CASILGGRCEQFF

SEQ ID NO: 567281 - protein, 15 aa, Homo sapiens
  CDR3 for alpha chain variable domain of TCR clone 283641 (TRAV4, TRAJ39)
CLVGPNNNAGNMPTF

SEQ ID NO: 567282 - protein, 13 aa, Homo sapiens
  CDR3 for beta chain variable domain of TCR clone 283641 (TRBV11-2, TRBJ2-5)
YASSSTGEETQYF

SEQ ID NO: 567283 - protein, 16 aa, Homo sapiens
  CDR3 for alpha chain variable domain of TCR clone 283642 (TRAV26-1, TRAJ39)
CCVLLHRRVCRQHATF

SEQ ID NO: 567284 - protein, 13 aa, Homo sapiens
  CDR3 for beta chain variable domain of TCR clone 283642 (TRBV6-1, TRBJ1-1)
CASSRQGNTEAFF

SEQ ID NO: 567285 - protein, 14 aa, Homo sapiens
  CDR3 for alpha chain variable domain of TCR clone 283643 (TRAV13-1, TRAJ44)
CAAKATGTASKLTF

SEQ ID NO: 567286 - protein, 14 aa, Homo sapiens
  CDR3 for beta chain variable domain of TCR clone 283643 (TRBV25-1, TRBJ1-1)
CASTHLGGDTEAFF

SEQ ID NO: 567287 - protein, 13 aa, Homo sapiens
  CDR3 for alpha chain variable domain of TCR clone 283644 (TRAV1-1, TRAJ23)
CAVVANQGGKLIF

SEQ ID NO: 567288 - protein, 15 aa, Homo sapiens
  CDR3 for beta chain variable domain of TCR clone 283644 (TRBV11-3, TRBJ2-3)
CASLKDGREGDTQYF

SEQ ID NO: 567289 - protein, 13 aa, Homo sapiens
  CDR3 for alpha chain variable domain of TCR clone 283645 (TRAV3, TRAJ20)
CCQAFCNDYKLSF

SEQ ID NO: 567290 - protein, 15 aa, Homo sapiens
  CDR3 for beta chain variable domain of TCR clone 283645 (TRBV19, TRBJ2-6)
CASVRRDSGANVLTF

SEQ ID NO: 567291 - protein, 16 aa, Homo sapiens
  CDR3 for alpha chain variable domain of TCR clone 283646 (TRAV30, TRAJ24)
CGTEIVDADSWGRFQF

SEQ ID NO: 567292 - protein, 14 aa, Homo sapiens
  CDR3 for beta chain variable domain of TCR clone 283646 (TRBV12-5, TRBJ2-5)
CASGSRTRQETQYF

SEQ ID NO: 567293 - protein, 15 aa, Homo sapiens
  CDR3 for alpha chain variable domain of TCR clone 283647 (TRAV8-3, TRAJ45)
CASSYSGGGADGFPF

SEQ ID NO: 567294 - protein, 13 aa, Homo sapiens
  CDR3 for beta chain variable domain of TCR clone 283647 (TRBV10-3, TRBJ2-7)
CASKLAVNYEQYF

SEQ ID NO: 567295 - protein, 12 aa, Homo sapiens
  CDR3 for alpha chain variable domain of TCR clone 283648 (TRAV22, TRAJ22)
CAPGGSARQLTF

SEQ ID NO: 567296 - protein, 13 aa, Homo sapiens
  CDR3 for beta chain variable domain of TCR clone 283648 (TRBV20-1, TRBJ1-2)
CSASTERIYGYNF

SEQ ID NO: 567297 - protein, 19 aa, Homo sapiens
  CDR3 for alpha chain variable domain of TCR clone 283649 (TRAV2, TRAJ20)
ILQVREPDAAVYRDCKLSF

SEQ ID NO: 567298 - protein, 16 aa, Homo sapiens
  CDR3 for beta chain variable domain of TCR clone 283649 (TRBV24-1, TRBJ2-3)
CATSDPGTGATDTQYF

SEQ ID NO: 567299 - protein, 13 aa, Homo sapiens
  CDR3 for alpha chain variable domain of TCR clone 283650 (TRAV9-2, TRAJ53)
CALSGGSNYKLTF

SEQ ID NO: 567300 - protein, 15 aa, Homo sapiens
  CDR3 for beta chain variable domain of TCR clone 283650 (TRBV7-2, TRBJ2-1)
CASRSGLAGGNEQFF

SEQ ID NO: 567301 - protein, 14 aa, Homo sapiens
  CDR3 for alpha chain variable domain of TCR clone 283651 (TRAV12-1, TRAJ12)
CVVTRMDSSYKLIF

SEQ ID NO: 567302 - protein, 15 aa, Homo sapiens
  CDR3 for beta chain variable domain of TCR clone 283651 (TRBV7-3, TRBJ2-2)
CASKANGANTGELFF

SEQ ID NO: 567303 - protein, 14 aa, Homo sapiens
  CDR3 for alpha chain variable domain of TCR clone 283652 (TRAV2, TRAJ9)
CAVEDRSGGFKTIF

SEQ ID NO: 567304 - protein, 13 aa, Homo sapiens
  CDR3 for beta chain variable domain of TCR clone 283652 (TRBV12-4, TRBJ1-5)
CAGSPDRAQPQHF

SEQ ID NO: 567305 - protein, 17 aa, Homo sapiens
  CDR3 for alpha chain variable domain of TCR clone 283653 (TRAV38-1, TRAJ45)
CAFMKHYTGGGADGLTF

SEQ ID NO: 567306 - protein, 13 aa, Homo sapiens
  CDR3 for beta chain variable domain of TCR clone 283653 (TRBV4-2, TRBJ1-1)
CASSQAGNTEAFF

SEQ ID NO: 567307 - protein, 11 aa, Homo sapiens
  CDR3 for alpha chain variable domain of TCR clone 283654 (TRAV2, TRAJ13)
CASGVYQKVTF

SEQ ID NO: 567308 - protein, 16 aa, Homo sapiens
  CDR3 for beta chain variable domain of TCR clone 283654 (TRBV19, TRBJ2-1)
CASSMGGGSSYNEQFF

SEQ ID NO: 567309 - protein, 15 aa, Homo sapiens
  CDR3 for alpha chain variable domain of TCR clone 283655 (TRAV8-3, TRAJ44)
CAVGAGAGTASKLTF

SEQ ID NO: 567310 - protein, 13 aa, Homo sapiens
  CDR3 for beta chain variable domain of TCR clone 283655 (TRBV2, TRBJ1-1)
CARNPTGGFHAFF

SEQ ID NO: 567311 - protein, 11 aa, Homo sapiens
  CDR3 for alpha chain variable domain of TCR clone 283656 (TRAV2, TRAJ13)
CASGGYQKVTF

SEQ ID NO: 567312 - protein, 15 aa, Homo sapiens
  CDR3 for beta chain variable domain of TCR clone 283656 (TRBV28, TRBJ2-5)
CASSPPWSYQETQYF

SEQ ID NO: 567313 - protein, 15 aa, Homo sapiens
  CDR3 for alpha chain variable domain of TCR clone 283657 (TRAV21, TRAJ53)
CATLNSGGSNDKLTF

SEQ ID NO: 567314 - protein, 16 aa, Homo sapiens
  CDR3 for beta chain variable domain of TCR clone 283657 (TRBV12-4, TRBJ1-5)
CASSRPVGGSNQPQHF

SEQ ID NO: 567315 - protein, 13 aa, Homo sapiens
  CDR3 for alpha chain variable domain of TCR clone 283658 (TRAV27, TRAJ29)
FAGAHSGNTPLVF

SEQ ID NO: 567316 - protein, 14 aa, Homo sapiens
  CDR3 for beta chain variable domain of TCR clone 283658 (TRBV7-9, TRBJ2-7)
CASSIGQGAGEQYF

SEQ ID NO: 567317 - protein, 10 aa, Homo sapiens
  CDR3 for alpha chain variable domain of TCR clone 283659 (TRAV30, TRAJ48)
CGIGNEKLTF

SEQ ID NO: 567318 - protein, 16 aa, Homo sapiens
  CDR3 for beta chain variable domain of TCR clone 283659 (TRBV19, TRBJ1-5)
CASSTCTGGGNQPQHF

SEQ ID NO: 567319 - protein, 14 aa, Homo sapiens
  CDR3 for alpha chain variable domain of TCR clone 283660 (TRAV8-2, TRAJ4)
CVVSHSGVYNKLIF

SEQ ID NO: 567320 - protein, 15 aa, Homo sapiens
  CDR3 for beta chain variable domain of TCR clone 283660 (TRBV4-1, TRBJ1-4)
CASSDTGGTNEKLFF

SEQ ID NO: 567321 - protein, 17 aa, Homo sapiens
  CDR3 for alpha chain variable domain of TCR clone 283661 (TRAV26-1, TRAJ28)
FIVRARYSGAGSYQLTF

SEQ ID NO: 567322 - protein, 10 aa, Homo sapiens
  CDR3 for beta chain variable domain of TCR clone 283661 (TRBV12-4, TRBJ2-7)
CASLTFEQYF

SEQ ID NO: 567323 - protein, 14 aa, Homo sapiens
  CDR3 for alpha chain variable domain of TCR clone 283662 (TRAV26-1, TRAJ38)
CIADNAGNNCKMIW

SEQ ID NO: 567324 - protein, 13 aa, Homo sapiens
  CDR3 for beta chain variable domain of TCR clone 283662 (TRBV20-1, TRBJ1-1)
CSARGGGNTEAFF

SEQ ID NO: 567325 - protein, 14 aa, Homo sapiens
  CDR3 for alpha chain variable domain of TCR clone 283663 (TRAV8-3, TRAJ39)
CAVGANNAGNMLTF

SEQ ID NO: 567326 - protein, 14 aa, Homo sapiens
  CDR3 for beta chain variable domain of TCR clone 283663 (TRBV7-2, TRBJ2-3)
CQQLRTGGTDTQYF

SEQ ID NO: 567327 - protein, 14 aa, Homo sapiens
  CDR3 for alpha chain variable domain of TCR clone 283664 (TRAV26-1, TRAJ34)
CIVRVAYNTDKLIF

SEQ ID NO: 567328 - protein, 14 aa, Homo sapiens
  CDR3 for beta chain variable domain of TCR clone 283664 (TRBV7-9, TRBJ2-2)
CASSGLADTGELFF

SEQ ID NO: 567329 - protein, 16 aa, Homo sapiens
  CDR3 for alpha chain variable domain of TCR clone 283665 (TRAV16, TRAJ42)
CALSVYYGGSHGNLIF

SEQ ID NO: 567330 - protein, 14 aa, Homo sapiens
  CDR3 for beta chain variable domain of TCR clone 283665 (TRBV3-1, TRBJ2-5)
CASSQAVRQETQYF

SEQ ID NO: 567331 - protein, 15 aa, Homo sapiens
  CDR3 for alpha chain variable domain of TCR clone 283666 (TRAV2, TRAJ22)
CAVPSRGGSARPLTF

SEQ ID NO: 567332 - protein, 14 aa, Homo sapiens
  CDR3 for beta chain variable domain of TCR clone 283666 (TRBV19, TRBJ2-1)
CASPTFVLSGEQFF

SEQ ID NO: 567333 - protein, 14 aa, Homo sapiens
  CDR3 for alpha chain variable domain of TCR clone 283667 (TRAV8-3, TRAJ4)
CAVGAAGGDNKLIF

SEQ ID NO: 567334 - protein, 17 aa, Homo sapiens
  CDR3 for beta chain variable domain of TCR clone 283667 (TRBV13, TRBJ2-3)
CASSLSRVAGGRNTQYF

SEQ ID NO: 567335 - protein, 13 aa, Homo sapiens
  CDR3 for alpha chain variable domain of TCR clone 283668 (TRAV13-2, TRAJ40)
CAEFTSGTYKYIF

SEQ ID NO: 567336 - protein, 16 aa, Homo sapiens
  CDR3 for beta chain variable domain of TCR clone 283668 (TRBV7-3, TRBJ2-2)
CASSLKRGTLSGELFF

SEQ ID NO: 567337 - protein, 14 aa, Homo sapiens
  CDR3 for alpha chain variable domain of TCR clone 283669 (TRAV12-1, TRAJ38)
CVVNDAGNNRKLIW

SEQ ID NO: 567338 - protein, 14 aa, Homo sapiens
  CDR3 for beta chain variable domain of TCR clone 283669 (TRBV19, TRBJ1-5)
CASSIVQGIQAQHF

SEQ ID NO: 567339 - protein, 15 aa, Homo sapiens
  CDR3 for alpha chain variable domain of TCR clone 283670 (TRAV3, TRAJ3)
CAVRDRGSSASKIIF

SEQ ID NO: 567340 - protein, 15 aa, Homo sapiens
  CDR3 for beta chain variable domain of TCR clone 283670 (TRBV20-1, TRBJ2-7)
CSARDRVSGMDEQYF

SEQ ID NO: 567341 - protein, 12 aa, Homo sapiens
  CDR3 for alpha chain variable domain of TCR clone 283671 (TRAV13-2, TRAJ23)
CAERHRGGKLIF

SEQ ID NO: 567342 - protein, 14 aa, Homo sapiens
  CDR3 for beta chain variable domain of TCR clone 283671 (TRBV4-1, TRBJ1-1)
CASSQQGNGNEAFF

SEQ ID NO: 567343 - protein, 11 aa, Homo sapiens
  CDR3 for alpha chain variable domain of TCR clone 283672 (TRAV2, TRAJ13)
CASGGYQKVTF

SEQ ID NO: 567344 - protein, 11 aa, Homo sapiens
  CDR3 for beta chain variable domain of TCR clone 283672 (TRBV20-1, TRBJ2-7)
CSGRQGHEQYF

SEQ ID NO: 567345 - protein, 13 aa, Homo sapiens
  CDR3 for alpha chain variable domain of TCR clone 283673 (TRAV23/DV6, TRAJ22)
CAPYSGSARQLTF

SEQ ID NO: 567346 - protein, 14 aa, Homo sapiens
  CDR3 for beta chain variable domain of TCR clone 283673 (TRBV7-8, TRBJ2-1)
CASSFFGGRNEQFF

SEQ ID NO: 567347 - protein, 12 aa, Homo sapiens
  CDR3 for alpha chain variable domain of TCR clone 283674 (TRAV9-2, TRAJ26)
CALRDYGQNFVF

SEQ ID NO: 567348 - protein, 18 aa, Homo sapiens
  CDR3 for beta chain variable domain of TCR clone 283674 (TRBV25-1, TRBJ1-2)
CASSGLQNGQGLIFGYTF

SEQ ID NO: 567349 - protein, 12 aa, Homo sapiens
  CDR3 for alpha chain variable domain of TCR clone 283675 (TRAV20, TRAJ40)
CCAFLRNHKYIF

SEQ ID NO: 567350 - protein, 13 aa, Homo sapiens
  CDR3 for beta chain variable domain of TCR clone 283675 (TRBV15, TRBJ2-5)
CATSQIGEETQYF

SEQ ID NO: 567351 - protein, 12 aa, Homo sapiens
  CDR3 for alpha chain variable domain of TCR clone 283676 (TRAV29/DV5, TRAJ49)
RAATDTGNQFYF

SEQ ID NO: 567352 - protein, 19 aa, Homo sapiens
  CDR3 for beta chain variable domain of TCR clone 283676 (TRBV25-1, TRBJ2-2)
CAILVYRVDRGRKTGELVF

SEQ ID NO: 567353 - protein, 14 aa, Homo sapiens
  CDR3 for alpha chain variable domain of TCR clone 283677 (TRAV1-2, TRAJ8)
CAVREDTGFQTLVF

SEQ ID NO: 567354 - protein, 15 aa, Homo sapiens
  CDR3 for beta chain variable domain of TCR clone 283677 (TRBV6-3, TRBJ2-7)
CASSAPGTVFYEQYF

SEQ ID NO: 567355 - protein, 14 aa, Homo sapiens
  CDR3 for alpha chain variable domain of TCR clone 283678 (TRAV12-2, TRAJ17)
CAMLFKAAGNKLTF

SEQ ID NO: 567356 - protein, 16 aa, Homo sapiens
  CDR3 for beta chain variable domain of TCR clone 283678 (TRBV11-2, TRBJ2-7)
CASSPLAGGPRYEQYF

SEQ ID NO: 567357 - protein, 14 aa, Homo sapiens
  CDR3 for alpha chain variable domain of TCR clone 283679 (TRAV14/DV4, TRAJ35)
CAMRLIGFGNVLHC

SEQ ID NO: 567358 - protein, 15 aa, Homo sapiens
  CDR3 for beta chain variable domain of TCR clone 283679 (TRBV7-9, TRBJ1-6)
CASSSPGRGNSPLHF

SEQ ID NO: 567359 - protein, 15 aa, Homo sapiens
  CDR3 for alpha chain variable domain of TCR clone 283680 (TRAV2, TRAJ9)
CAVEDRGTGGFKTIF

SEQ ID NO: 567360 - protein, 14 aa, Homo sapiens
  CDR3 for beta chain variable domain of TCR clone 283680 (TRBV18, TRBJ1-2)
CASSPDRVVYGYTF

SEQ ID NO: 567361 - protein, 15 aa, Homo sapiens
  CDR3 for alpha chain variable domain of TCR clone 283681 (TRAV21, TRAJ24)
CAARSSTDSCGKLQF

SEQ ID NO: 567362 - protein, 13 aa, Homo sapiens
  CDR3 for beta chain variable domain of TCR clone 283681 (TRBV10-3, TRBJ2-7)
CASKLAVNYEQYF

SEQ ID NO: 567363 - protein, 14 aa, Homo sapiens
  CDR3 for alpha chain variable domain of TCR clone 283682 (TRAV9-2, TRAJ11)
CALSSSSGYSTLTF

SEQ ID NO: 567364 - protein, 17 aa, Homo sapiens
  CDR3 for beta chain variable domain of TCR clone 283682 (TRBV3-1, TRBJ2-7)
CASSQDLTGLSSYEQYF

SEQ ID NO: 567365 - protein, 12 aa, Homo sapiens
  CDR3 for alpha chain variable domain of TCR clone 283683 (TRAV13-1, TRAJ21)
CAAKEAFNKFYF

SEQ ID NO: 567366 - protein, 13 aa, Homo sapiens
  CDR3 for beta chain variable domain of TCR clone 283683 (TRBV20-1, TRBJ1-1)
CSAPLGGGTEAFF

SEQ ID NO: 567367 - protein, 18 aa, Homo sapiens
  CDR3 for alpha chain variable domain of TCR clone 283684 (TRAV21, TRAJ52)
CAVRPSPAGGTSYGKLTF

SEQ ID NO: 567368 - protein, 13 aa, Homo sapiens
  CDR3 for beta chain variable domain of TCR clone 283684 (TRBV27, TRBJ2-1)
CASSSGSYNEQFF

SEQ ID NO: 567369 - protein, 16 aa, Homo sapiens
  CDR3 for alpha chain variable domain of TCR clone 283685 (TRAV12-2, TRAJ40)
CAVIRGGTSGTYKYIF

SEQ ID NO: 567370 - protein, 14 aa, Homo sapiens
  CDR3 for beta chain variable domain of TCR clone 283685 (TRBV20-1, TRBJ2-5)
CSARYGRAGETQYF

SEQ ID NO: 567371 - protein, 14 aa, Homo sapiens
  CDR3 for alpha chain variable domain of TCR clone 283686 (TRAV35, TRAJ38)
CAGSNAGNNRKLIW

SEQ ID NO: 567372 - protein, 12 aa, Homo sapiens
  CDR3 for beta chain variable domain of TCR clone 283686 (TRBV19, TRBJ2-7)
CARTDRGYEQYF

SEQ ID NO: 567373 - protein, 13 aa, Homo sapiens
  CDR3 for alpha chain variable domain of TCR clone 283687 (TRAV27, TRAJ41)
CAGEGNSGYALNF

SEQ ID NO: 567374 - protein, 14 aa, Homo sapiens
  CDR3 for beta chain variable domain of TCR clone 283687 (TRBV7-2, TRBJ1-1)
CVSSFLTGTTEAFF

SEQ ID NO: 567375 - protein, 11 aa, Homo sapiens
  CDR3 for alpha chain variable domain of TCR clone 283688 (TRAV12-3, TRAJ27)
CAMANAGKSTF

SEQ ID NO: 567376 - protein, 16 aa, Homo sapiens
  CDR3 for beta chain variable domain of TCR clone 283688 (TRBV20-1, TRBJ1-2)
CSASMGQGVANYGYTF

SEQ ID NO: 567377 - protein, 16 aa, Homo sapiens
  CDR3 for alpha chain variable domain of TCR clone 283689 (TRAV17, TRAJ9)
CATGEWGGTGGFKTIF

SEQ ID NO: 567378 - protein, 11 aa, Homo sapiens
  CDR3 for beta chain variable domain of TCR clone 283689 (TRBV29-1, TRBJ2-5)
CSEDRTGTQYF

SEQ ID NO: 567379 - protein, 11 aa, Homo sapiens
  CDR3 for alpha chain variable domain of TCR clone 283690 (TRAV29/DV5, TRAJ49)
CAAVPGNQFYF

SEQ ID NO: 567380 - protein, 13 aa, Homo sapiens
  CDR3 for beta chain variable domain of TCR clone 283690 (TRBV11-2, TRBJ2-7)
CASSLGDSYEQYF

SEQ ID NO: 567381 - protein, 12 aa, Homo sapiens
  CDR3 for alpha chain variable domain of TCR clone 283691 (TRAV17, TRAJ12)
CATLRSSYKLSF

SEQ ID NO: 567382 - protein, 16 aa, Homo sapiens
  CDR3 for beta chain variable domain of TCR clone 283691 (TRBV28, TRBJ2-7)
CASSLFFETGGHEQYF

SEQ ID NO: 567383 - protein, 18 aa, Homo sapiens
  CDR3 for alpha chain variable domain of TCR clone 283692 (TRAV1-2, TRAJ27)
CLLPLCCEIGYQCRQITF

SEQ ID NO: 567384 - protein, 15 aa, Homo sapiens
  CDR3 for beta chain variable domain of TCR clone 283692 (TRBV18, TRBJ2-7)
CASSPLQGRTYEQYF

SEQ ID NO: 567385 - protein, 18 aa, Homo sapiens
  CDR3 for alpha chain variable domain of TCR clone 283693 (TRAV21, TRAJ52)
CAVRHSPAGGPSYGKLTF

SEQ ID NO: 567386 - protein, 17 aa, Homo sapiens
  CDR3 for beta chain variable domain of TCR clone 283693 (TRBV13, TRBJ2-3)
CASSLSRVAGGRNTQYF

SEQ ID NO: 567387 - protein, 15 aa, Homo sapiens
  CDR3 for alpha chain variable domain of TCR clone 283694 (TRAV26-1, TRAJ44)
CIARVPFGTASELTF

SEQ ID NO: 567388 - protein, 12 aa, Homo sapiens
  CDR3 for beta chain variable domain of TCR clone 283694 (TRBV11-2, TRBJ2-2)
CASSLGGGELFF

SEQ ID NO: 567389 - protein, 12 aa, Homo sapiens
  CDR3 for alpha chain variable domain of TCR clone 283695 (TRAV12-3, TRAJ17)
CAMTLTGNKLTF

SEQ ID NO: 567390 - protein, 15 aa, Homo sapiens
  CDR3 for beta chain variable domain of TCR clone 283695 (TRBV20-1, TRBJ2-7)
CSASDRVTGMDEQYF

SEQ ID NO: 567391 - protein, 14 aa, Homo sapiens
  CDR3 for alpha chain variable domain of TCR clone 283696 (TRAV13-1, TRAJ35)
CAASKGGFGNVLHC

SEQ ID NO: 567392 - protein, 15 aa, Homo sapiens
  CDR3 for beta chain variable domain of TCR clone 283696 (TRBV19, TRBJ2-7)
CASSIGGGLVNEQYF

SEQ ID NO: 567393 - protein, 17 aa, Homo sapiens
  CDR3 for alpha chain variable domain of TCR clone 283697 (TRAV26-1, TRAJ53)
CIVRVDDSGGSNYKLTV

SEQ ID NO: 567394 - protein, 15 aa, Homo sapiens
  CDR3 for beta chain variable domain of TCR clone 283697 (TRBV20-1, TRBJ2-7)
CSARVPAAYFYEQYF

SEQ ID NO: 567395 - protein, 11 aa, Homo sapiens
  CDR3 for alpha chain variable domain of TCR clone 283698 (TRAV12-2, TRAJ21)
CAVEGVNKFYF

SEQ ID NO: 567396 - protein, 15 aa, Homo sapiens
  CDR3 for beta chain variable domain of TCR clone 283698 (TRBV20-1, TRBJ1-5)
CSASGRGDLGQPQHF

SEQ ID NO: 567397 - protein, 14 aa, Homo sapiens
  CDR3 for alpha chain variable domain of TCR clone 283699 (TRAV26-1, TRAJ48)
CIVKSNFGNEKLTF

SEQ ID NO: 567398 - protein, 14 aa, Homo sapiens
  CDR3 for beta chain variable domain of TCR clone 283699 (TRBV5-1, TRBJ1-1)
CASSLQGASTEAFF

SEQ ID NO: 567399 - protein, 13 aa, Homo sapiens
  CDR3 for alpha chain variable domain of TCR clone 283700 (TRAV21, TRAJ27)
CAARPGNACKSAL

SEQ ID NO: 567400 - protein, 14 aa, Homo sapiens
  CDR3 for beta chain variable domain of TCR clone 283700 (TRBV7-6, TRBJ2-3)
CASSLGTVTDTQYF

SEQ ID NO: 567401 - protein, 19 aa, Homo sapiens
  CDR3 for alpha chain variable domain of TCR clone 283701 (TRAV26-1, TRAJ50)
CCVLLHRQNPKTSYDKVIF

SEQ ID NO: 567402 - protein, 13 aa, Homo sapiens
  CDR3 for beta chain variable domain of TCR clone 283701 (TRBV7-3, TRBJ1-2)
CASSLKRGYGYTF

SEQ ID NO: 567403 - protein, 12 aa, Homo sapiens
  CDR3 for alpha chain variable domain of TCR clone 283702 (TRAV17, TRAJ39)
CSTGAAGNMLTF

SEQ ID NO: 567404 - protein, 14 aa, Homo sapiens
  CDR3 for beta chain variable domain of TCR clone 283702 (TRBV7-9, TRBJ1-2)
CASSRQGANYGYTF

SEQ ID NO: 567405 - protein, 15 aa, Homo sapiens
  CDR3 for alpha chain variable domain of TCR clone 283703 (TRAV25, TRAJ53)
CPTSNSGGSNYKLTF

SEQ ID NO: 567406 - protein, 14 aa, Homo sapiens
  CDR3 for beta chain variable domain of TCR clone 283703 (TRBV11-2, TRBJ2-3)
FASSRLARTDTQYF

SEQ ID NO: 567407 - protein, 11 aa, Homo sapiens
  CDR3 for alpha chain variable domain of TCR clone 283704 (TRAV2, TRAJ33)
CAVENNYQLIW

SEQ ID NO: 567408 - protein, 15 aa, Homo sapiens
  CDR3 for beta chain variable domain of TCR clone 283704 (TRBV19, TRBJ1-1)
CASTSGQIQNTEAFF

SEQ ID NO: 567409 - protein, 14 aa, Homo sapiens
  CDR3 for alpha chain variable domain of TCR clone 283705 (TRAV29/DV5, TRAJ45)
CAASFRGGAEGLTF

SEQ ID NO: 567410 - protein, 11 aa, Homo sapiens
  CDR3 for beta chain variable domain of TCR clone 283705 (TRBV11-2, TRBJ2-2)
CASSLPGELFF

SEQ ID NO: 567411 - protein, 12 aa, Homo sapiens
  CDR3 for alpha chain variable domain of TCR clone 283706 (TRAV12-3, TRAJ17)
CAMTLIGNKLTF

SEQ ID NO: 567412 - protein, 14 aa, Homo sapiens
  CDR3 for beta chain variable domain of TCR clone 283706 (TRBV12-4, TRBJ1-1)
CASSLGTGGTEAFF

SEQ ID NO: 567413 - protein, 13 aa, Homo sapiens
  CDR3 for alpha chain variable domain of TCR clone 283707 (TRAV8-3, TRAJ41)
CAVGADSGYALNF

SEQ ID NO: 567414 - protein, 16 aa, Homo sapiens
  CDR3 for beta chain variable domain of TCR clone 283707 (TRBV12-4, TRBJ1-5)
CASSRPVGGSNQPQHF

SEQ ID NO: 567415 - protein, 11 aa, Homo sapiens
  CDR3 for alpha chain variable domain of TCR clone 283708 (TRAV12-3, TRAJ17)
CNDATGNELTF

SEQ ID NO: 567416 - protein, 15 aa, Homo sapiens
  CDR3 for beta chain variable domain of TCR clone 283708 (TRBV20-1, TRBJ2-7)
CSARDRVSGMDEQYF

SEQ ID NO: 567417 - protein, 15 aa, Homo sapiens
  CDR3 for alpha chain variable domain of TCR clone 283709 (TRAV3, TRAJ32)
CAVSSYGGATNKLIF

SEQ ID NO: 567418 - protein, 19 aa, Homo sapiens
  CDR3 for beta chain variable domain of TCR clone 283709 (TRBV7-2, TRBJ2-3)
CASSPGLAGGGLTTDTQYF

SEQ ID NO: 567419 - protein, 15 aa, Homo sapiens
  CDR3 for alpha chain variable domain of TCR clone 283710 (TRAV3, TRAJ22)
CAVRDRGGSARHLTF

SEQ ID NO: 567420 - protein, 15 aa, Homo sapiens
  CDR3 for beta chain variable domain of TCR clone 283710 (TRBV7-2, TRBJ2-1)
CASSLASGRVNEQFF

SEQ ID NO: 567421 - protein, 14 aa, Homo sapiens
  CDR3 for alpha chain variable domain of TCR clone 283711 (TRAV8-2, TRAJ45)
CVVSAGGGADGLTF

SEQ ID NO: 567422 - protein, 12 aa, Homo sapiens
  CDR3 for beta chain variable domain of TCR clone 283711 (TRBV12-4, TRBJ2-1)
CASSLGRVEQFF

SEQ ID NO: 567423 - protein, 13 aa, Homo sapiens
  CDR3 for alpha chain variable domain of TCR clone 283712 (TRAV13-1, TRAJ5)
CAAEHTGRRALTF

SEQ ID NO: 567424 - protein, 13 aa, Homo sapiens
  CDR3 for beta chain variable domain of TCR clone 283712 (TRBV2, TRBJ1-4)
CASNRGTKEKLFF

SEQ ID NO: 567425 - protein, 15 aa, Homo sapiens
  CDR3 for alpha chain variable domain of TCR clone 283713 (TRAV3, TRAJ9)
CAVRDSNTGGFKTIF

SEQ ID NO: 567426 - protein, 16 aa, Homo sapiens
  CDR3 for beta chain variable domain of TCR clone 283713 (TRBV15, TRBJ2-5)
CATSPTTGQGMETQYC

SEQ ID NO: 567427 - protein, 13 aa, Homo sapiens
  CDR3 for alpha chain variable domain of TCR clone 283714 (TRAV23/DV6, TRAJ43)
CAASMGGNNNMRF

SEQ ID NO: 567428 - protein, 14 aa, Homo sapiens
  CDR3 for beta chain variable domain of TCR clone 283714 (TRBV3-1, TRBJ2-3)
CASSWSGVGDTQYF

SEQ ID NO: 567429 - protein, 10 aa, Homo sapiens
  CDR3 for alpha chain variable domain of TCR clone 283715 (TRAV35, TRAJ41)
DANSGYALNF

SEQ ID NO: 567430 - protein, 13 aa, Homo sapiens
  CDR3 for beta chain variable domain of TCR clone 283715 (TRBV4-1, TRBJ2-7)
CASSQGQAYEQYF

SEQ ID NO: 567431 - protein, 16 aa, Homo sapiens
  CDR3 for alpha chain variable domain of TCR clone 283716 (TRAV12-3, TRAJ53)
CAMSPGSGGSNYKRTF

SEQ ID NO: 567432 - protein, 13 aa, Homo sapiens
  CDR3 for beta chain variable domain of TCR clone 283716 (TRBV10-3, TRBJ2-7)
CASKLAVNYEQYF

SEQ ID NO: 567433 - protein, 14 aa, Homo sapiens
  CDR3 for alpha chain variable domain of TCR clone 283717 (TRAV35, TRAJ50)
CAGHRKTSYDKVIF

SEQ ID NO: 567434 - protein, 17 aa, Homo sapiens
  CDR3 for beta chain variable domain of TCR clone 283717 (TRBV7-8, TRBJ2-6)
CANSAGTVGAGANVLTF

SEQ ID NO: 567435 - protein, 13 aa, Homo sapiens
  CDR3 for alpha chain variable domain of TCR clone 283718 (TRAV12-2, TRAJ10)
CAVPTGGGDKLTF

SEQ ID NO: 567436 - protein, 14 aa, Homo sapiens
  CDR3 for beta chain variable domain of TCR clone 283718 (TRBV7-2, TRBJ2-2)
CASRGQGAAGELFF

SEQ ID NO: 567437 - protein, 13 aa, Homo sapiens
  CDR3 for alpha chain variable domain of TCR clone 283719 (TRAV1-1, TRAJ31)
CASYLNNNARLMF

SEQ ID NO: 567438 - protein, 18 aa, Homo sapiens
  CDR3 for beta chain variable domain of TCR clone 283719 (TRBV24-1, TRBJ2-1)
CATSDLMFLGRGVHEQFF

SEQ ID NO: 567439 - protein, 15 aa, Homo sapiens
  CDR3 for alpha chain variable domain of TCR clone 283720 (TRAV26-1, TRAJ48)
CIARWSWFANEKLTF

SEQ ID NO: 567440 - protein, 12 aa, Homo sapiens
  CDR3 for beta chain variable domain of TCR clone 283720 (TRBV19, TRBJ2-5)
CASSISEETQYF

SEQ ID NO: 567441 - protein, 14 aa, Homo sapiens
  CDR3 for alpha chain variable domain of TCR clone 283721 (TRAV13-1, TRAJ12)
CSNYPMDSGYKLIF

SEQ ID NO: 567442 - protein, 11 aa, Homo sapiens
  CDR3 for beta chain variable domain of TCR clone 283721 (TRBV20-1, TRBJ2-1)
CSLSSGSEQFF

SEQ ID NO: 567443 - protein, 14 aa, Homo sapiens
  CDR3 for alpha chain variable domain of TCR clone 283722 (TRAV12-2, TRAJ13)
CAVKKTGGYQKVTF

SEQ ID NO: 567444 - protein, 13 aa, Homo sapiens
  CDR3 for beta chain variable domain of TCR clone 283722 (TRBV20-1, TRBJ1-5)
CSARILGNQPQHF

SEQ ID NO: 567445 - protein, 14 aa, Homo sapiens
  CDR3 for alpha chain variable domain of TCR clone 283723 (TRAV12-1, TRAJ3)
CVVNPGSSASKIIF

SEQ ID NO: 567446 - protein, 13 aa, Homo sapiens
  CDR3 for beta chain variable domain of TCR clone 283723 (TRBV20-1, TRBJ1-2)
CSARDQGAYGYTF

SEQ ID NO: 567447 - protein, 14 aa, Homo sapiens
  CDR3 for alpha chain variable domain of TCR clone 283724 (TRAV9-2, TRAJ39)
CALYIYNTGNMLTF

SEQ ID NO: 567448 - protein, 14 aa, Homo sapiens
  CDR3 for beta chain variable domain of TCR clone 283724 (TRBV19, TRBJ2-1)
CASPTFVLSGEQFF

SEQ ID NO: 567449 - protein, 15 aa, Homo sapiens
  CDR3 for alpha chain variable domain of TCR clone 283725 (TRAV3, TRAJ5)
CAVRDRKTGRKALTF

SEQ ID NO: 567450 - protein, 15 aa, Homo sapiens
  CDR3 for beta chain variable domain of TCR clone 283725 (TRBV7-9, TRBJ2-2)
CASGPLDTFPGELFF

SEQ ID NO: 567451 - protein, 15 aa, Homo sapiens
  CDR3 for alpha chain variable domain of TCR clone 283726 (TRAV8-4, TRAJ11)
CAVSRALPGYSTLTF

SEQ ID NO: 567452 - protein, 16 aa, Homo sapiens
  CDR3 for beta chain variable domain of TCR clone 283726 (TRBV5-4, TRBJ2-7)
CASSSKMTSGTYEQYF

SEQ ID NO: 567453 - protein, 15 aa, Homo sapiens
  CDR3 for alpha chain variable domain of TCR clone 283727 (TRAV8-3, TRAJ23)
CAVGDRYNQGGKLTF

SEQ ID NO: 567454 - protein, 17 aa, Homo sapiens
  CDR3 for beta chain variable domain of TCR clone 283727 (TRBV4-1, TRBJ1-4)
CASSQEGPRGVEEKLFV

SEQ ID NO: 567455 - protein, 10 aa, Homo sapiens
  CDR3 for alpha chain variable domain of TCR clone 283728 (TRAV23/DV6, TRAJ57)
CAASSTLSQG

SEQ ID NO: 567456 - protein, 14 aa, Homo sapiens
  CDR3 for beta chain variable domain of TCR clone 283728 (TRBV25-1, TRBJ1-1)
CSSTHLGGNTEAVF

SEQ ID NO: 567457 - protein, 15 aa, Homo sapiens
  CDR3 for alpha chain variable domain of TCR clone 283729 (TRAV8-3, TRAJ45)
FASSYSGGGADVLTF

SEQ ID NO: 567458 - protein, 13 aa, Homo sapiens
  CDR3 for beta chain variable domain of TCR clone 283729 (TRBV10-3, TRBJ2-7)
CASKLAVNYEQYF

SEQ ID NO: 567459 - protein, 13 aa, Homo sapiens
  CDR3 for alpha chain variable domain of TCR clone 283730 (TRAV38-2/DV8, TRAJ45)
CAYVGGGAEGLTF

SEQ ID NO: 567460 - protein, 13 aa, Homo sapiens
  CDR3 for beta chain variable domain of TCR clone 283730 (TRBV29-1, TRBJ2-1)
CSVEGGRVNEQFF

SEQ ID NO: 567461 - protein, 14 aa, Homo sapiens
  CDR3 for alpha chain variable domain of TCR clone 283731 (TRAV27, TRAJ13)
CRSSNSGGYQEVTF

SEQ ID NO: 567462 - protein, 14 aa, Homo sapiens
  CDR3 for beta chain variable domain of TCR clone 283731 (TRBV7-6, TRBJ2-1)
CASSWGGGADEQFF

SEQ ID NO: 567463 - protein, 13 aa, Homo sapiens
  CDR3 for alpha chain variable domain of TCR clone 283732 (TRAV39, TRAJ58)
FAGEETSGSRLTV

SEQ ID NO: 567464 - protein, 13 aa, Homo sapiens
  CDR3 for beta chain variable domain of TCR clone 283732 (TRBV15, TRBJ2-7)
CATSTTGHYEQYF

SEQ ID NO: 567465 - protein, 14 aa, Homo sapiens
  CDR3 for alpha chain variable domain of TCR clone 283733 (TRAV12-2, TRAJ17)
CAVNIKAAGNKLTF

SEQ ID NO: 567466 - protein, 16 aa, Homo sapiens
  CDR3 for beta chain variable domain of TCR clone 283733 (TRBV20-1, TRBJ2-6)
CSASSQGYDGAHGLTF

SEQ ID NO: 567467 - protein, 15 aa, Homo sapiens
  CDR3 for alpha chain variable domain of TCR clone 283734 (TRAV2, TRAJ44)
CAVDAYTGTASKLTF

SEQ ID NO: 567468 - protein, 14 aa, Homo sapiens
  CDR3 for beta chain variable domain of TCR clone 283734 (TRBV11-2, TRBJ2-1)
CASSPGSRDNEQFF

SEQ ID NO: 567469 - protein, 10 aa, Homo sapiens
  CDR3 for alpha chain variable domain of TCR clone 283735 (TRAV8-4, TRAJ43)
CAGSPDDIRF

SEQ ID NO: 567470 - protein, 15 aa, Homo sapiens
  CDR3 for beta chain variable domain of TCR clone 283735 (TRBV5-1, TRBJ2-3)
CASSVTSGSTDTQYF

SEQ ID NO: 567471 - protein, 16 aa, Homo sapiens
  CDR3 for alpha chain variable domain of TCR clone 283736 (TRAV3, TRAJ37)
CSVRGKGSGNTGKLIF

SEQ ID NO: 567472 - protein, 13 aa, Homo sapiens
  CDR3 for beta chain variable domain of TCR clone 283736 (TRBV7-2, TRBJ2-2)
CASSSVRAGELFF

SEQ ID NO: 567473 - protein, 14 aa, Homo sapiens
  CDR3 for alpha chain variable domain of TCR clone 283737 (TRAV12-2, TRAJ13)
CAAKKTGGYQKVTF

SEQ ID NO: 567474 - protein, 14 aa, Homo sapiens
  CDR3 for beta chain variable domain of TCR clone 283737 (TRBV6-1, TRBJ1-3)
CASVQGGGGNTIYF

SEQ ID NO: 567475 - protein, 13 aa, Homo sapiens
  CDR3 for alpha chain variable domain of TCR clone 283738 (TRAV3, TRAJ21)
CAVREPDFNKFYF

SEQ ID NO: 567476 - protein, 14 aa, Homo sapiens
  CDR3 for beta chain variable domain of TCR clone 283738 (TRBV4-1, TRBJ1-2)
CASSQDGQVRGYTF

SEQ ID NO: 567477 - protein, 13 aa, Homo sapiens
  CDR3 for alpha chain variable domain of TCR clone 283739 (TRAV21, TRAJ27)
CAALNTNAGKSTF

SEQ ID NO: 567478 - protein, 15 aa, Homo sapiens
  CDR3 for beta chain variable domain of TCR clone 283739 (TRBV6-5, TRBJ2-1)
CASSYDAGAGNEQFF

SEQ ID NO: 567479 - protein, 16 aa, Homo sapiens
  CDR3 for alpha chain variable domain of TCR clone 283740 (TRAV8-3, TRAJ52)
CAVQPASGTSYGKLTF

SEQ ID NO: 567480 - protein, 15 aa, Homo sapiens
  CDR3 for beta chain variable domain of TCR clone 283740 (TRBV11-2, TRBJ2-7)
CASSLAGGVATEQYF

SEQ ID NO: 567481 - protein, 14 aa, Homo sapiens
  CDR3 for alpha chain variable domain of TCR clone 283741 (TRAV4, TRAJ43)
CLVGPMYNNNGMRF

SEQ ID NO: 567482 - protein, 21 aa, Homo sapiens
  CDR3 for beta chain variable domain of TCR clone 283741 (TRBV11-1, TRBJ2-1)
CASSARERLRPEGPSYNEQFF

SEQ ID NO: 567483 - protein, 14 aa, Homo sapiens
  CDR3 for alpha chain variable domain of TCR clone 283742 (TRAV29/DV5, TRAJ36)
CAARRKTVANNPFF

SEQ ID NO: 567484 - protein, 13 aa, Homo sapiens
  CDR3 for beta chain variable domain of TCR clone 283742 (TRBV10-3, TRBJ2-7)
CASKLAVNYEQYF

SEQ ID NO: 567485 - protein, 14 aa, Homo sapiens
  CDR3 for alpha chain variable domain of TCR clone 283743 (TRAV17, TRAJ12)
CAILPMDSSYKLIS

SEQ ID NO: 567486 - protein, 16 aa, Homo sapiens
  CDR3 for beta chain variable domain of TCR clone 283743 (TRBV5-1, TRBJ2-3)
CASSLGLAVYTDTQYF

SEQ ID NO: 567487 - protein, 16 aa, Homo sapiens
  CDR3 for alpha chain variable domain of TCR clone 283744 (TRAV3, TRAJ10)
CAVRDMRAGGGNKLTF

SEQ ID NO: 567488 - protein, 15 aa, Homo sapiens
  CDR3 for beta chain variable domain of TCR clone 283744 (TRBV28, TRBJ1-1)
CASRTKGGLNTEAFF

SEQ ID NO: 567489 - protein, 16 aa, Homo sapiens
  CDR3 for alpha chain variable domain of TCR clone 283745 (TRAV20, TRAJ53)
CAVQAESGGSNYKLTF

SEQ ID NO: 567490 - protein, 15 aa, Homo sapiens
  CDR3 for beta chain variable domain of TCR clone 283745 (TRBV12-4, TRBJ1-1)
CASSLAVSRGAEAFF

SEQ ID NO: 567491 - protein, 16 aa, Homo sapiens
  CDR3 for alpha chain variable domain of TCR clone 283746 (TRAV8-1, TRAJ18)
CAVNAGRGSTLGRLYF

SEQ ID NO: 567492 - protein, 15 aa, Homo sapiens
  CDR3 for beta chain variable domain of TCR clone 283746 (TRBV7-2, TRBJ2-5)
CASTPRGAAGETQYF

SEQ ID NO: 567493 - protein, 14 aa, Homo sapiens
  CDR3 for alpha chain variable domain of TCR clone 283747 (TRAV12-3, TRAJ56)
CAMSVTGANSKLTF

SEQ ID NO: 567494 - protein, 17 aa, Homo sapiens
  CDR3 for beta chain variable domain of TCR clone 283747 (TRBV20-1, TRBJ2-3)
CSASILGRGGSADTQYF

SEQ ID NO: 567495 - protein, 12 aa, Homo sapiens
  CDR3 for alpha chain variable domain of TCR clone 283748 (TRAV8-3, TRAJ40)
CAVTSGTYKYFF

SEQ ID NO: 567496 - protein, 14 aa, Homo sapiens
  CDR3 for beta chain variable domain of TCR clone 283748 (TRBV12-4, TRBJ2-3)
CASSGQGSTDTQYF

SEQ ID NO: 567497 - protein, 14 aa, Homo sapiens
  CDR3 for alpha chain variable domain of TCR clone 283749 (TRAV12-2, TRAJ13)
CAVKKTGGYQKVTF

SEQ ID NO: 567498 - protein, 14 aa, Homo sapiens
  CDR3 for beta chain variable domain of TCR clone 283749 (TRBV27, TRBJ2-1)
CAGSIAETYNEQFF

SEQ ID NO: 567499 - protein, 13 aa, Homo sapiens
  CDR3 for alpha chain variable domain of TCR clone 283750 (TRAV8-6, TRAJ24)
CAVSSDSWGKLQF

SEQ ID NO: 567500 - protein, 14 aa, Homo sapiens
  CDR3 for beta chain variable domain of TCR clone 283750 (TRBV18, TRBJ2-7)
CASSPRGGAYEQYF

SEQ ID NO: 567501 - protein, 15 aa, Homo sapiens
  CDR3 for alpha chain variable domain of TCR clone 283751 (TRAV17, TRAJ54)
CATEKLGQGAQTLVF

SEQ ID NO: 567502 - protein, 14 aa, Homo sapiens
  CDR3 for beta chain variable domain of TCR clone 283751 (TRBV7-3, TRBJ1-1)
CQQLRGQMNTEAFF

SEQ ID NO: 567503 - protein, 14 aa, Homo sapiens
  CDR3 for alpha chain variable domain of TCR clone 283752 (TRAV8-6, TRAJ23)
CAVTVPGQGGKLIF

SEQ ID NO: 567504 - protein, 12 aa, Homo sapiens
  CDR3 for beta chain variable domain of TCR clone 283752 (TRBV7-9, TRBJ2-7)
CASSIKREEQYF

SEQ ID NO: 567505 - protein, 16 aa, Homo sapiens
  CDR3 for alpha chain variable domain of TCR clone 283753 (TRAV30, TRAJ24)
CGTEIVDADSWGKFQF

SEQ ID NO: 567506 - protein, 14 aa, Homo sapiens
  CDR3 for beta chain variable domain of TCR clone 283753 (TRBV12-5, TRBJ2-5)
CASGSRTQQEIQYF

SEQ ID NO: 567507 - protein, 17 aa, Homo sapiens
  CDR3 for alpha chain variable domain of TCR clone 283754 (TRAV3, TRAJ6)
CAVRDGPRAGGSYIPTF

SEQ ID NO: 567508 - protein, 16 aa, Homo sapiens
  CDR3 for beta chain variable domain of TCR clone 283754 (TRBV7-7, TRBJ2-1)
CASSLASGTSYNEQFF

SEQ ID NO: 567509 - protein, 17 aa, Homo sapiens
  CDR3 for alpha chain variable domain of TCR clone 283755 (TRAV26-1, TRAJ28)
CIVRALYSGAGSHQLTF

SEQ ID NO: 567510 - protein, 12 aa, Homo sapiens
  CDR3 for beta chain variable domain of TCR clone 283755 (TRBV12-4, TRBJ2-1)
CASRQTENEQFF

SEQ ID NO: 567511 - protein, 11 aa, Homo sapiens
  CDR3 for alpha chain variable domain of TCR clone 283756 (TRAV1-1, TRAJ23)
CAVRQGGKLIF

SEQ ID NO: 567512 - protein, 12 aa, Homo sapiens
  CDR3 for beta chain variable domain of TCR clone 283756 (TRBV19, TRBJ1-5)
CASSIAQQPQNF

SEQ ID NO: 567513 - protein, 13 aa, Homo sapiens
  CDR3 for alpha chain variable domain of TCR clone 283757 (TRAV20, TRAJ21)
CAVEGYNFNKFYF

SEQ ID NO: 567514 - protein, 16 aa, Homo sapiens
  CDR3 for beta chain variable domain of TCR clone 283757 (TRBV2, TRBJ2-7)
CASSEPWTGPSYEQYF

SEQ ID NO: 567515 - protein, 12 aa, Homo sapiens
  CDR3 for alpha chain variable domain of TCR clone 283758 (TRAV1-1, TRAJ9)
CAVDTGGFKSIF

SEQ ID NO: 567516 - protein, 19 aa, Homo sapiens
  CDR3 for beta chain variable domain of TCR clone 283758 (TRBV9, TRBJ1-3)
CQQRRPGRNNDRSGNTIYF

SEQ ID NO: 567517 - protein, 14 aa, Homo sapiens
  CDR3 for alpha chain variable domain of TCR clone 283759 (TRAV35, TRAJ40)
CAGSTTSGTYKYIF

SEQ ID NO: 567518 - protein, 16 aa, Homo sapiens
  CDR3 for beta chain variable domain of TCR clone 283759 (TRBV12-4, TRBJ1-5)
CASSRPVGGSNQPQHF

SEQ ID NO: 567519 - protein, 13 aa, Homo sapiens
  CDR3 for alpha chain variable domain of TCR clone 283760 (TRAV2, TRAJ40)
CAVVTSGTYKYIF

SEQ ID NO: 567520 - protein, 12 aa, Homo sapiens
  CDR3 for beta chain variable domain of TCR clone 283760 (TRBV11-2, TRBJ2-4)
CASSSASGSEYF

SEQ ID NO: 567521 - protein, 12 aa, Homo sapiens
  CDR3 for alpha chain variable domain of TCR clone 283761 (TRAV3, TRAJ26)
CAVRDYCQNFFF

SEQ ID NO: 567522 - protein, 16 aa, Homo sapiens
  CDR3 for beta chain variable domain of TCR clone 283761 (TRBV11-2, TRBJ1-2)
CASSPSGREANYGYTF

SEQ ID NO: 567523 - protein, 15 aa, Homo sapiens
  CDR3 for alpha chain variable domain of TCR clone 283762 (TRAV12-2, TRAJ13)
CRESLGSGGYQKVTF

SEQ ID NO: 567524 - protein, 15 aa, Homo sapiens
  CDR3 for beta chain variable domain of TCR clone 283762 (TRBV6-5, TRBJ2-1)
GASRRAQLSYNEQFF

SEQ ID NO: 567525 - protein, 12 aa, Homo sapiens
  CDR3 for alpha chain variable domain of TCR clone 283763 (TRAV12-3, TRAJ20)
CAMVRGDYKPSF

SEQ ID NO: 567526 - protein, 13 aa, Homo sapiens
  CDR3 for beta chain variable domain of TCR clone 283763 (TRBV23-1, TRBJ1-4)
CASRGKFNEKLFF

SEQ ID NO: 567527 - protein, 13 aa, Homo sapiens
  CDR3 for alpha chain variable domain of TCR clone 283764 (TRAV12-3, TRAJ16)
CAVQLPDGQKLLF

SEQ ID NO: 567528 - protein, 14 aa, Homo sapiens
  CDR3 for beta chain variable domain of TCR clone 283764 (TRBV5-1, TRBJ2-1)
CARSLDGDWNEQFF

SEQ ID NO: 567529 - protein, 15 aa, Homo sapiens
  CDR3 for alpha chain variable domain of TCR clone 283765 (TRAV16, TRAJ4)
CALEDPSGGYNKLIF

SEQ ID NO: 567530 - protein, 13 aa, Homo sapiens
  CDR3 for beta chain variable domain of TCR clone 283765 (TRBV7-3, TRBJ2-7)
CASSHAGGYEPYF

SEQ ID NO: 567531 - protein, 15 aa, Homo sapiens
  CDR3 for alpha chain variable domain of TCR clone 283766 (TRAV3, TRAJ20)
CAVKDSRSNDYKRSF

SEQ ID NO: 567532 - protein, 14 aa, Homo sapiens
  CDR3 for beta chain variable domain of TCR clone 283766 (TRBV20-1, TRBJ2-7)
CSARRGNGIYEQYF

SEQ ID NO: 567533 - protein, 15 aa, Homo sapiens
  CDR3 for alpha chain variable domain of TCR clone 283767 (TRAV26-1, TRAJ29)
CIVRVEGSGNTPLVC

SEQ ID NO: 567534 - protein, 15 aa, Homo sapiens
  CDR3 for beta chain variable domain of TCR clone 283767 (TRBV11-3, TRBJ2-3)
CASLKDGREGDTQYF

SEQ ID NO: 567535 - protein, 12 aa, Homo sapiens
  CDR3 for alpha chain variable domain of TCR clone 283768 (TRAV12-3, TRAJ17)
CAMTLTGNKLTF

SEQ ID NO: 567536 - protein, 15 aa, Homo sapiens
  CDR3 for beta chain variable domain of TCR clone 283768 (TRBV20-1, TRBJ2-7)
CSPRDRVSGTDEQYF

SEQ ID NO: 567537 - protein, 17 aa, Homo sapiens
  CDR3 for alpha chain variable domain of TCR clone 283769 (TRAV8-6, TRAJ58)
CAVSSCVGETSGSRLTF

SEQ ID NO: 567538 - protein, 14 aa, Homo sapiens
  CDR3 for beta chain variable domain of TCR clone 283769 (TRBV4-2, TRBJ2-1)
CASDLDRAYNEQFF

SEQ ID NO: 567539 - protein, 14 aa, Homo sapiens
  CDR3 for alpha chain variable domain of TCR clone 283770 (TRAV16, TRAJ37)
CALDISGNTGKLIF

SEQ ID NO: 567540 - protein, 16 aa, Homo sapiens
  CDR3 for beta chain variable domain of TCR clone 283770 (TRBV4-1, TRBJ2-7)
CASSQEWTSGPLEQYF

SEQ ID NO: 567541 - protein, 16 aa, Homo sapiens
  CDR3 for alpha chain variable domain of TCR clone 283771 (TRAV3, TRAJ3)
CAVRDRAKSSASKIIF

SEQ ID NO: 567542 - protein, 13 aa, Homo sapiens
  CDR3 for beta chain variable domain of TCR clone 283771 (TRBV27, TRBJ1-1)
CASSLSIGAEAFF

SEQ ID NO: 567543 - protein, 20 aa, Homo sapiens
  CDR3 for alpha chain variable domain of TCR clone 283772 (TRAV12-1, TRAJ42)
SSVIQPPTSAKGGSQGNLIF

SEQ ID NO: 567544 - protein, 13 aa, Homo sapiens
  CDR3 for beta chain variable domain of TCR clone 283772 (TRBV2, TRBJ1-6)
CASGRGGISPLHF

SEQ ID NO: 567545 - protein, 13 aa, Homo sapiens
  CDR3 for alpha chain variable domain of TCR clone 283773 (TRAV8-2, TRAJ36)
CVVSHLPTNNLFF

SEQ ID NO: 567546 - protein, 18 aa, Homo sapiens
  CDR3 for beta chain variable domain of TCR clone 283773 (TRBV7-9, TRBJ2-6)
CASSFPGAGISGANVLAF

SEQ ID NO: 567547 - protein, 16 aa, Homo sapiens
  CDR3 for alpha chain variable domain of TCR clone 283774 (TRAV21, TRAJ33)
CPVSPASMDSNYQSIW

SEQ ID NO: 567548 - protein, 17 aa, Homo sapiens
  CDR3 for beta chain variable domain of TCR clone 283774 (TRBV2, TRBJ1-4)
CASSKRELTQGEEKLFF

SEQ ID NO: 567549 - protein, 14 aa, Homo sapiens
  CDR3 for alpha chain variable domain of TCR clone 283775 (TRAV12-2, TRAJ13)
CAVKKTGGYQKVTF

SEQ ID NO: 567550 - protein, 18 aa, Homo sapiens
  CDR3 for beta chain variable domain of TCR clone 283775 (TRBV11-2, TRBJ2-3)
CASSFGGASRGAPNTQYF

SEQ ID NO: 567551 - protein, 12 aa, Homo sapiens
  CDR3 for alpha chain variable domain of TCR clone 283776 (TRAV8-3, TRAJ27)
YAVGAEAGKSTF

SEQ ID NO: 567552 - protein, 14 aa, Homo sapiens
  CDR3 for beta chain variable domain of TCR clone 283776 (TRBV2, TRBJ2-1)
CASRLIVGHDEQFF

SEQ ID NO: 567553 - protein, 12 aa, Homo sapiens
  CDR3 for alpha chain variable domain of TCR clone 283777 (TRAV8-6, TRAJ8)
CAVTPGFHKLVF

SEQ ID NO: 567554 - protein, 16 aa, Homo sapiens
  CDR3 for beta chain variable domain of TCR clone 283777 (TRBV7-3, TRBJ2-2)
CASSLKRGTLSGELFF

SEQ ID NO: 567555 - protein, 14 aa, Homo sapiens
  CDR3 for alpha chain variable domain of TCR clone 283778 (TRAV1-2, TRAJ8)
CAVREDTGFPKLVF

SEQ ID NO: 567556 - protein, 14 aa, Homo sapiens
  CDR3 for beta chain variable domain of TCR clone 283778 (TRBV12-4, TRBJ2-5)
CASSLWQKQETQYF

SEQ ID NO: 567557 - protein, 12 aa, Homo sapiens
  CDR3 for alpha chain variable domain of TCR clone 283779 (TRAV12-3, TRAJ17)
CAMTLTGNKLTF

SEQ ID NO: 567558 - protein, 14 aa, Homo sapiens
  CDR3 for beta chain variable domain of TCR clone 283779 (TRBV7-3, TRBJ2-1)
CASSLAGGTKEQFF

SEQ ID NO: 567559 - protein, 14 aa, Homo sapiens
  CDR3 for alpha chain variable domain of TCR clone 283780 (TRAV12-3, TRAJ53)
CWATSGGSNYKLTF

SEQ ID NO: 567560 - protein, 13 aa, Homo sapiens
  CDR3 for beta chain variable domain of TCR clone 283780 (TRBV19, TRBJ1-5)
CASSTQDGQPQHF

SEQ ID NO: 567561 - protein, 15 aa, Homo sapiens
  CDR3 for alpha chain variable domain of TCR clone 283781 (TRAV27, TRAJ33)
CAGADIMDSNYQLIW

SEQ ID NO: 567562 - protein, 13 aa, Homo sapiens
  CDR3 for beta chain variable domain of TCR clone 283781 (TRBV28, TRBJ1-2)
CASRLQGRGGYTF

SEQ ID NO: 567563 - protein, 19 aa, Homo sapiens
  CDR3 for alpha chain variable domain of TCR clone 283782 (TRAV29/DV5, TRAJ49)
CSVLLCSKLTVDTVNQFYF

SEQ ID NO: 567564 - protein, 14 aa, Homo sapiens
  CDR3 for beta chain variable domain of TCR clone 283782 (TRBV29-1, TRBJ1-3)
CSVADRVVGNTIYF

SEQ ID NO: 567565 - protein, 15 aa, Homo sapiens
  CDR3 for alpha chain variable domain of TCR clone 283783 (TRAV3, TRAJ15)
CAVRPTNQAGTALIF

SEQ ID NO: 567566 - protein, 14 aa, Homo sapiens
  CDR3 for beta chain variable domain of TCR clone 283783 (TRBV4-1, TRBJ2-2)
CASSQAVNTGELFF

SEQ ID NO: 567567 - protein, 16 aa, Homo sapiens
  CDR3 for alpha chain variable domain of TCR clone 283784 (TRAV30, TRAJ24)
CGTEIVDADSWGKFQV

SEQ ID NO: 567568 - protein, 18 aa, Homo sapiens
  CDR3 for beta chain variable domain of TCR clone 283784 (TRBV20-1, TRBJ2-6)
CSAETTQTHGSGANVLTF

SEQ ID NO: 567569 - protein, 16 aa, Homo sapiens
  CDR3 for alpha chain variable domain of TCR clone 283785 (TRAV3, TRAJ10)
CAVRGMRAGGGNKLTF

SEQ ID NO: 567570 - protein, 15 aa, Homo sapiens
  CDR3 for beta chain variable domain of TCR clone 283785 (TRBV9, TRBJ1-6)
CASSVAGTGDSPLHF

SEQ ID NO: 567571 - protein, 15 aa, Homo sapiens
  CDR3 for alpha chain variable domain of TCR clone 283786 (TRAV23/DV6, TRAJ33)
CAASNSGGGNYQLIL

SEQ ID NO: 567572 - protein, 14 aa, Homo sapiens
  CDR3 for beta chain variable domain of TCR clone 283786 (TRBV23-1, TRBJ2-5)
CASSFLRSQETQYF

SEQ ID NO: 567573 - protein, 17 aa, Homo sapiens
  CDR3 for alpha chain variable domain of TCR clone 283787 (TRAV13-1, TRAJ52)
CAASSGAGGTSCGKLTF

SEQ ID NO: 567574 - protein, 14 aa, Homo sapiens
  CDR3 for beta chain variable domain of TCR clone 283787 (TRBV12-4, TRBJ2-3)
CASTIAGWGDTQYF

SEQ ID NO: 567575 - protein, 22 aa, Homo sapiens
  CDR3 for alpha chain variable domain of TCR clone 283788 (TRAV29/DV5, TRAJ52)
CSVLLCRGFRGAGGTSYGKLTF

SEQ ID NO: 567576 - protein, 16 aa, Homo sapiens
  CDR3 for beta chain variable domain of TCR clone 283788 (TRBV7-3, TRBJ2-2)
CASSLKRGTLSGELFF

SEQ ID NO: 567577 - protein, 16 aa, Homo sapiens
  CDR3 for alpha chain variable domain of TCR clone 283789 (TRAV1-1, TRAJ45)
CAVSAYSGGGADGLTF

SEQ ID NO: 567578 - protein, 13 aa, Homo sapiens
  CDR3 for beta chain variable domain of TCR clone 283789 (TRBV20-1, TRBJ1-2)
CSARGTADYGYTF

SEQ ID NO: 567579 - protein, 15 aa, Homo sapiens
  CDR3 for alpha chain variable domain of TCR clone 283790 (TRAV21, TRAJ53)
CANLNSGGSNYKLTF

SEQ ID NO: 567580 - protein, 15 aa, Homo sapiens
  CDR3 for beta chain variable domain of TCR clone 283790 (TRBV18, TRBJ2-1)
CASSPPSASYNEQFF

SEQ ID NO: 567581 - protein, 14 aa, Homo sapiens
  CDR3 for alpha chain variable domain of TCR clone 283791 (TRAV1-2, TRAJ16)
CAVNRFSDGQKLLY

SEQ ID NO: 567582 - protein, 13 aa, Homo sapiens
  CDR3 for beta chain variable domain of TCR clone 283791 (TRBV7-9, TRBJ1-2)
CASSLKQNYGYTF

SEQ ID NO: 567583 - protein, 12 aa, Homo sapiens
  CDR3 for alpha chain variable domain of TCR clone 283792 (TRAV27, TRAJ13)
CAGAGGYQKVTF

SEQ ID NO: 567584 - protein, 15 aa, Homo sapiens
  CDR3 for beta chain variable domain of TCR clone 283792 (TRBV20-1, TRBJ2-6)
CSARDRGHGANVLTF

SEQ ID NO: 567585 - protein, 11 aa, Homo sapiens
  CDR3 for alpha chain variable domain of TCR clone 283793 (TRAV12-1, TRAJ23)
CGEHSGGKLIF

SEQ ID NO: 567586 - protein, 15 aa, Homo sapiens
  CDR3 for beta chain variable domain of TCR clone 283793 (TRBV7-2, TRBJ2-7)
CASSLVSSGSYEQYF

SEQ ID NO: 567587 - protein, 14 aa, Homo sapiens
  CDR3 for alpha chain variable domain of TCR clone 283794 (TRAV12-3, TRAJ58)
SAMSTETSGSRLTF

SEQ ID NO: 567588 - protein, 13 aa, Homo sapiens
  CDR3 for beta chain variable domain of TCR clone 283794 (TRBV27, TRBJ2-3)
CASSWGRTDTQYF

SEQ ID NO: 567589 - protein, 14 aa, Homo sapiens
  CDR3 for alpha chain variable domain of TCR clone 283795 (TRAV13-1, TRAJ44)
CAAKATGTASKLTF

SEQ ID NO: 567590 - protein, 15 aa, Homo sapiens
  CDR3 for beta chain variable domain of TCR clone 283795 (TRBV10-2, TRBJ2-5)
CASKPEDRRQETQYF

SEQ ID NO: 567591 - protein, 13 aa, Homo sapiens
  CDR3 for alpha chain variable domain of TCR clone 283796 (TRAV21, TRAJ20)
CVVGLRVDYKLSF

SEQ ID NO: 567592 - protein, 15 aa, Homo sapiens
  CDR3 for beta chain variable domain of TCR clone 283796 (TRBV19, TRBJ1-2)
CASSVGQVLNYGYTF

SEQ ID NO: 567593 - protein, 14 aa, Homo sapiens
  CDR3 for alpha chain variable domain of TCR clone 283797 (TRAV13-1, TRAJ9)
CAASALTGGFKTIF

SEQ ID NO: 567594 - protein, 13 aa, Homo sapiens
  CDR3 for beta chain variable domain of TCR clone 283797 (TRBV12-4, TRBJ2-5)
CASSLGGSRTQYF

SEQ ID NO: 567595 - protein, 14 aa, Homo sapiens
  CDR3 for alpha chain variable domain of TCR clone 283798 (TRAV26-1, TRAJ11)
RIVPLYSGYSTLTF

SEQ ID NO: 567596 - protein, 16 aa, Homo sapiens
  CDR3 for beta chain variable domain of TCR clone 283798 (TRBV12-4, TRBJ1-5)
CASSRPVGGSNQPQHF

SEQ ID NO: 567597 - protein, 16 aa, Homo sapiens
  CDR3 for alpha chain variable domain of TCR clone 283799 (TRAV3, TRAJ18)
CAVSDGRGSTLGRLYL

SEQ ID NO: 567598 - protein, 17 aa, Homo sapiens
  CDR3 for beta chain variable domain of TCR clone 283799 (TRBV5-1, TRBJ2-3)
CASSKIGLADRTDTQYF

SEQ ID NO: 567599 - protein, 12 aa, Homo sapiens
  CDR3 for alpha chain variable domain of TCR clone 283800 (TRAV13-2, TRAJ23)
CAERHRGGKLIF

SEQ ID NO: 567600 - protein, 18 aa, Homo sapiens
  CDR3 for beta chain variable domain of TCR clone 283800 (TRBV12-4, TRBJ2-2)
CASSLVAGTRGRTGELFF

SEQ ID NO: 567601 - protein, 16 aa, Homo sapiens
  CDR3 for alpha chain variable domain of TCR clone 283801 (TRAV30, TRAJ24)
CGTEIVDADSWGNFQF

SEQ ID NO: 567602 - protein, 12 aa, Homo sapiens
  CDR3 for beta chain variable domain of TCR clone 283801 (TRBV6-3, TRBJ2-7)
CASSLTPYEQYF

SEQ ID NO: 567603 - protein, 11 aa, Homo sapiens
  CDR3 for alpha chain variable domain of TCR clone 283802 (TRAV12-1, TRAJ30)
CVVNGHDKIIF

SEQ ID NO: 567604 - protein, 12 aa, Homo sapiens
  CDR3 for beta chain variable domain of TCR clone 283802 (TRBV27, TRBJ2-2)
CASKLFTGELFF

SEQ ID NO: 567605 - protein, 12 aa, Homo sapiens
  CDR3 for alpha chain variable domain of TCR clone 283803 (TRAV17, TRAJ30)
CATDARDDKIIF

SEQ ID NO: 567606 - protein, 15 aa, Homo sapiens
  CDR3 for beta chain variable domain of TCR clone 283803 (TRBV4-1, TRBJ2-1)
CASSQGGELYNEQFL

SEQ ID NO: 567607 - protein, 18 aa, Homo sapiens
  CDR3 for alpha chain variable domain of TCR clone 283804 (TRAV21, TRAJ52)
CAVRPSPAGGTSYGKLTF

SEQ ID NO: 567608 - protein, 15 aa, Homo sapiens
  CDR3 for beta chain variable domain of TCR clone 283804 (TRBV10-3, TRBJ2-3)
CAISVLGQETDTQYF

SEQ ID NO: 567609 - protein, 15 aa, Homo sapiens
  CDR3 for alpha chain variable domain of TCR clone 283805 (TRAV4, TRAJ36)
CLVGDRQTGASNLFF

SEQ ID NO: 567610 - protein, 15 aa, Homo sapiens
  CDR3 for beta chain variable domain of TCR clone 283805 (TRBV7-6, TRBJ2-1)
CASSSLAGEGNEQFF

SEQ ID NO: 567611 - protein, 16 aa, Homo sapiens
  CDR3 for alpha chain variable domain of TCR clone 283806 (TRAV26-1, TRAJ37)
CMVRGDGSGNTGKLIF

SEQ ID NO: 567612 - protein, 17 aa, Homo sapiens
  CDR3 for beta chain variable domain of TCR clone 283806 (TRBV4-1, TRBJ2-7)
CASSRDPLGVRGGEQYF

SEQ ID NO: 567613 - protein, 14 aa, Homo sapiens
  CDR3 for alpha chain variable domain of TCR clone 283807 (TRAV13-2, TRAJ41)
CAEKPDWAGYALNF

SEQ ID NO: 567614 - protein, 14 aa, Homo sapiens
  CDR3 for beta chain variable domain of TCR clone 283807 (TRBV19, TRBJ2-1)
CASPTFVLSGEQFF

SEQ ID NO: 567615 - protein, 12 aa, Homo sapiens
  CDR3 for alpha chain variable domain of TCR clone 283808 (TRAV12-1, TRAJ40)
CVFYSGTYKYIF

SEQ ID NO: 567616 - protein, 18 aa, Homo sapiens
  CDR3 for beta chain variable domain of TCR clone 283808 (TRBV12-4, TRBJ2-2)
CASSLVAGPRGRTGELFF

SEQ ID NO: 567617 - protein, 14 aa, Homo sapiens
  CDR3 for alpha chain variable domain of TCR clone 283809 (TRAV12-3, TRAJ10)
SHLPLTGGGNKLTF

SEQ ID NO: 567618 - protein, 16 aa, Homo sapiens
  CDR3 for beta chain variable domain of TCR clone 283809 (TRBV20-1, TRBJ1-2)
CSASMGQGVANYGYTL

SEQ ID NO: 567619 - protein, 13 aa, Homo sapiens
  CDR3 for alpha chain variable domain of TCR clone 283810 (TRAV17, TRAJ54)
CATDLWGAQKLVF

SEQ ID NO: 567620 - protein, 12 aa, Homo sapiens
  CDR3 for beta chain variable domain of TCR clone 283810 (TRBV19, TRBJ2-1)
CASSRQGAEQFF

SEQ ID NO: 567621 - protein, 16 aa, Homo sapiens
  CDR3 for alpha chain variable domain of TCR clone 283811 (TRAV30, TRAJ24)
CGSEIVDADSWGKFQF

SEQ ID NO: 567622 - protein, 16 aa, Homo sapiens
  CDR3 for beta chain variable domain of TCR clone 283811 (TRBV6-1, TRBJ2-1)
CASILRQGSSYNEQFF

SEQ ID NO: 567623 - protein, 14 aa, Homo sapiens
  CDR3 for alpha chain variable domain of TCR clone 283812 (TRAV17, TRAJ45)
CSTDARGGADGLTF

SEQ ID NO: 567624 - protein, 11 aa, Homo sapiens
  CDR3 for beta chain variable domain of TCR clone 283812 (TRBV28, TRBJ2-5)
CATGNQETQYF

SEQ ID NO: 567625 - protein, 14 aa, Homo sapiens
  CDR3 for alpha chain variable domain of TCR clone 283813 (TRAV12-3, TRAJ13)
CAMRNSGGYPKVTF

SEQ ID NO: 567626 - protein, 14 aa, Homo sapiens
  CDR3 for beta chain variable domain of TCR clone 283813 (TRBV4-1, TRBJ1-6)
CASSPGSDSSPLHF

SEQ ID NO: 567627 - protein, 13 aa, Homo sapiens
  CDR3 for alpha chain variable domain of TCR clone 283814 (TRAV12-1, TRAJ37)
CVVNIDNTGKLIF

SEQ ID NO: 567628 - protein, 13 aa, Homo sapiens
  CDR3 for beta chain variable domain of TCR clone 283814 (TRBV19, TRBJ1-2)
CASSVPGQDGYTF

SEQ ID NO: 567629 - protein, 13 aa, Homo sapiens
  CDR3 for alpha chain variable domain of TCR clone 283815 (TRAV12-2, TRAJ20)
CAVYPSNDYKLSF

SEQ ID NO: 567630 - protein, 14 aa, Homo sapiens
  CDR3 for beta chain variable domain of TCR clone 283815 (TRBV7-2, TRBJ1-2)
CASSQTGSTYGYTF

SEQ ID NO: 567631 - protein, 16 aa, Homo sapiens
  CDR3 for alpha chain variable domain of TCR clone 283816 (TRAV30, TRAJ24)
CGTEIVDADSWGKFQF

SEQ ID NO: 567632 - protein, 13 aa, Homo sapiens
  CDR3 for beta chain variable domain of TCR clone 283816 (TRBV11-2, TRBJ2-5)
CASSFSSQEAQYF

SEQ ID NO: 567633 - protein, 21 aa, Homo sapiens
  CDR3 for alpha chain variable domain of TCR clone 283817 (TRAV12-1, TRAJ32)
SSVIQPPTSMNFGGATNKLIF

SEQ ID NO: 567634 - protein, 15 aa, Homo sapiens
  CDR3 for beta chain variable domain of TCR clone 283817 (TRBV7-9, TRBJ2-2)
CASGPLDTFPGELFF

SEQ ID NO: 567635 - protein, 17 aa, Homo sapiens
  CDR3 for alpha chain variable domain of TCR clone 283818 (TRAV3, TRAJ6)
CAVRDGPRAGGSYIPTF

SEQ ID NO: 567636 - protein, 12 aa, Homo sapiens
  CDR3 for beta chain variable domain of TCR clone 283818 (TRBV7-2, TRBJ1-1)
CASSHGGTEAFF

SEQ ID NO: 567637 - protein, 15 aa, Homo sapiens
  CDR3 for alpha chain variable domain of TCR clone 283819 (TRAV27, TRAJ38)
CAGRRNAGNNRKLIW

SEQ ID NO: 567638 - protein, 13 aa, Homo sapiens
  CDR3 for beta chain variable domain of TCR clone 283819 (TRBV12-5, TRBJ2-3)
CASGDRQSDTQYF

SEQ ID NO: 567639 - protein, 13 aa, Homo sapiens
  CDR3 for alpha chain variable domain of TCR clone 283820 (TRAV12-3, TRAJ40)
CAMSDSGTYKSIF

SEQ ID NO: 567640 - protein, 14 aa, Homo sapiens
  CDR3 for beta chain variable domain of TCR clone 283820 (TRBV7-2, TRBJ1-5)
CASSTQGAGQPQHF

SEQ ID NO: 567641 - protein, 14 aa, Homo sapiens
  CDR3 for alpha chain variable domain of TCR clone 283821 (TRAV26-1, TRAJ39)
CIVRANNAVNMLTF

SEQ ID NO: 567642 - protein, 15 aa, Homo sapiens
  CDR3 for beta chain variable domain of TCR clone 283821 (TRBV28, TRBJ1-2)
CASSLMGGRRDGYTF

SEQ ID NO: 567643 - protein, 14 aa, Homo sapiens
  CDR3 for alpha chain variable domain of TCR clone 283822 (TRAV1-2, TRAJ8)
CSVREDTGFQKLVF

SEQ ID NO: 567644 - protein, 13 aa, Homo sapiens
  CDR3 for beta chain variable domain of TCR clone 283822 (TRBV7-3, TRBJ2-1)
CASSLDSYNEQFF

SEQ ID NO: 567645 - protein, 11 aa, Homo sapiens
  CDR3 for alpha chain variable domain of TCR clone 283823 (TRAV2, TRAJ13)
CASGGYRKVTF

SEQ ID NO: 567646 - protein, 18 aa, Homo sapiens
  CDR3 for beta chain variable domain of TCR clone 283823 (TRBV11-2, TRBJ2-3)
CASSLGGASRGAPNTQYF

SEQ ID NO: 567647 - protein, 15 aa, Homo sapiens
  CDR3 for alpha chain variable domain of TCR clone 283824 (TRAV26-1, TRAJ29)
CIVRDEGSGNTPLVF

SEQ ID NO: 567648 - protein, 14 aa, Homo sapiens
  CDR3 for beta chain variable domain of TCR clone 283824 (TRBV18, TRBJ2-5)
CASSPGVSQETQYL

SEQ ID NO: 567649 - protein, 15 aa, Homo sapiens
  CDR3 for alpha chain variable domain of TCR clone 283825 (TRAV26-1, TRAJ29)
CIVRVEGSVNTPLVF

SEQ ID NO: 567650 - protein, 15 aa, Homo sapiens
  CDR3 for beta chain variable domain of TCR clone 283825 (TRBV7-9, TRBJ1-5)
CASSQVHQPNQPQHF

SEQ ID NO: 567651 - protein, 14 aa, Homo sapiens
  CDR3 for alpha chain variable domain of TCR clone 283826 (TRAV1-2, TRAJ16)
CAVNRFSDGHKLLF

SEQ ID NO: 567652 - protein, 20 aa, Homo sapiens
  CDR3 for beta chain variable domain of TCR clone 283826 (TRBV7-8, TRBJ2-2)
CASSHLFPGPTIHITGELFF

SEQ ID NO: 567653 - protein, 16 aa, Homo sapiens
  CDR3 for alpha chain variable domain of TCR clone 283827 (TRAV30, TRAJ24)
CGTEIGDADSWGKFQF

SEQ ID NO: 567654 - protein, 14 aa, Homo sapiens
  CDR3 for beta chain variable domain of TCR clone 283827 (TRBV12-5, TRBJ2-5)
CASGSRTQQETQYF

SEQ ID NO: 567655 - protein, 11 aa, Homo sapiens
  CDR3 for alpha chain variable domain of TCR clone 283828 (TRAV22, TRAJ30)
CAGNRDDKIIF

SEQ ID NO: 567656 - protein, 14 aa, Homo sapiens
  CDR3 for beta chain variable domain of TCR clone 283828 (TRBV25-1, TRBJ1-1)
CASTHLGGNTEAFF

SEQ ID NO: 567657 - protein, 16 aa, Homo sapiens
  CDR3 for alpha chain variable domain of TCR clone 283829 (TRAV3, TRAJ10)
CAGRDMRAGGGNKLTF

SEQ ID NO: 567658 - protein, 19 aa, Homo sapiens
  CDR3 for beta chain variable domain of TCR clone 283829 (TRBV6-3, TRBJ1-2)
CASSYSKGRTGPPNYGYTF

SEQ ID NO: 567659 - protein, 10 aa, Homo sapiens
  CDR3 for alpha chain variable domain of TCR clone 283830 (TRAV20, TRAJ23)
CLQQGGKLIF

SEQ ID NO: 567660 - protein, 16 aa, Homo sapiens
  CDR3 for beta chain variable domain of TCR clone 283830 (TRBV7-8, TRBJ2-5)
CASSFGGQPAQETQYF

SEQ ID NO: 567661 - protein, 11 aa, Homo sapiens
  CDR3 for alpha chain variable domain of TCR clone 283831 (TRAV23/DV6, TRAJ58)
CAARLLRGETS

SEQ ID NO: 567662 - protein, 15 aa, Homo sapiens
  CDR3 for beta chain variable domain of TCR clone 283831 (TRBV9, TRBJ1-6)
CASSVAGTGESPLHF

SEQ ID NO: 567663 - protein, 15 aa, Homo sapiens
  CDR3 for alpha chain variable domain of TCR clone 283832 (TRAV17, TRAJ57)
CATGPSQGGAEKLVF

SEQ ID NO: 567664 - protein, 13 aa, Homo sapiens
  CDR3 for beta chain variable domain of TCR clone 283832 (TRBV11-2, TRBJ2-5)
CASSSTGEETQYF

SEQ ID NO: 567665 - protein, 19 aa, Homo sapiens
  CDR3 for alpha chain variable domain of TCR clone 283833 (TRAV26-1, TRAJ52)
CIVRAHRNAGGTSYGKLTF

SEQ ID NO: 567666 - protein, 15 aa, Homo sapiens
  CDR3 for beta chain variable domain of TCR clone 283833 (TRBV12-4, TRBJ2-5)
GASSPPTGLQETQYF

SEQ ID NO: 567667 - protein, 12 aa, Homo sapiens
  CDR3 for alpha chain variable domain of TCR clone 283834 (TRAV8-3, TRAJ10)
CAVRGGGNKLTF

SEQ ID NO: 567668 - protein, 14 aa, Homo sapiens
  CDR3 for beta chain variable domain of TCR clone 283834 (TRBV7-3, TRBJ2-1)
CASSLAGGTNEQFF

SEQ ID NO: 567669 - protein, 11 aa, Homo sapiens
  CDR3 for alpha chain variable domain of TCR clone 283835 (TRAV21, TRAJ11)
CAVNGYSTLTF

SEQ ID NO: 567670 - protein, 20 aa, Homo sapiens
  CDR3 for beta chain variable domain of TCR clone 283835 (TRBV28, TRBJ2-1)
CASTPIGRSPGLAGGNEQFL

SEQ ID NO: 567671 - protein, 10 aa, Homo sapiens
  CDR3 for alpha chain variable domain of TCR clone 283836 (TRAV1-2, TRAJ20)
CALNDYKLSF

SEQ ID NO: 567672 - protein, 16 aa, Homo sapiens
  CDR3 for beta chain variable domain of TCR clone 283836 (TRBV7-9, TRBJ2-1)
CASSDVAGGSYNEQFF

SEQ ID NO: 567673 - protein, 15 aa, Homo sapiens
  CDR3 for alpha chain variable domain of TCR clone 283837 (TRAV17, TRAJ57)
CATGPSQGGSEKLVF

SEQ ID NO: 567674 - protein, 18 aa, Homo sapiens
  CDR3 for beta chain variable domain of TCR clone 283837 (TRBV7-9, TRBJ2-7)
CASTLTTSGSRTWYEQYF

SEQ ID NO: 567675 - protein, 11 aa, Homo sapiens
  CDR3 for alpha chain variable domain of TCR clone 283838 (TRAV2, TRAJ33)
CVVDSNYQLIW

SEQ ID NO: 567676 - protein, 13 aa, Homo sapiens
  CDR3 for beta chain variable domain of TCR clone 283838 (TRBV7-2, TRBJ2-7)
GASSSPSGSEQYF

SEQ ID NO: 567677 - protein, 15 aa, Homo sapiens
  CDR3 for alpha chain variable domain of TCR clone 283839 (TRAV26-1, TRAJ9)
CIVRASNTGGFKTIF

SEQ ID NO: 567678 - protein, 11 aa, Homo sapiens
  CDR3 for beta chain variable domain of TCR clone 283839 (TRBV7-6, TRBJ2-5)
CASSFQGTQYF

SEQ ID NO: 567679 - protein, 15 aa, Homo sapiens
  CDR3 for alpha chain variable domain of TCR clone 283840 (TRAV17, TRAJ35)
CATAFVIGFGNVLHC

SEQ ID NO: 567680 - protein, 14 aa, Homo sapiens
  CDR3 for beta chain variable domain of TCR clone 283840 (TRBV19, TRBJ2-1)
CASPTFVLSGEQFF

SEQ ID NO: 567681 - protein, 16 aa, Homo sapiens
  CDR3 for alpha chain variable domain of TCR clone 283841 (TRAV30, TRAJ24)
CGTEIVDADSWGKFQF

SEQ ID NO: 567682 - protein, 16 aa, Homo sapiens
  CDR3 for beta chain variable domain of TCR clone 283841 (TRBV15, TRBJ2-7)
CATSRDGGIPSYEQYF

SEQ ID NO: 567683 - protein, 14 aa, Homo sapiens
  CDR3 for alpha chain variable domain of TCR clone 283842 (TRAV8-3, TRAJ4)
CAVGAAGGYNKLIF

SEQ ID NO: 567684 - protein, 16 aa, Homo sapiens
  CDR3 for beta chain variable domain of TCR clone 283842 (TRBV7-3, TRBJ1-2)
CASSLGAPVPNYGYTF

SEQ ID NO: 567685 - protein, 17 aa, Homo sapiens
  CDR3 for alpha chain variable domain of TCR clone 283843 (TRAV3, TRAJ6)
CAVRDGPRAGGSNIPTF

SEQ ID NO: 567686 - protein, 13 aa, Homo sapiens
  CDR3 for beta chain variable domain of TCR clone 283843 (TRBV27, TRBJ1-1)
CASSLSIGAEAFF

SEQ ID NO: 567687 - protein, 14 aa, Homo sapiens
  CDR3 for alpha chain variable domain of TCR clone 283844 (TRAV12-2, TRAJ13)
CAVKKTGDYQKGTF

SEQ ID NO: 567688 - protein, 15 aa, Homo sapiens
  CDR3 for beta chain variable domain of TCR clone 283844 (TRBV27, TRBJ2-1)
CASSNGGGSSNEQFF

SEQ ID NO: 567689 - protein, 17 aa, Homo sapiens
  CDR3 for alpha chain variable domain of TCR clone 283845 (TRAV26-1, TRAJ11)
CIVRVGQSNSGYSTLTF

SEQ ID NO: 567690 - protein, 20 aa, Homo sapiens
  CDR3 for beta chain variable domain of TCR clone 283845 (TRBV27, TRBJ2-5)
CASSLIPSGGGDPVLRARHA

SEQ ID NO: 567691 - protein, 13 aa, Homo sapiens
  CDR3 for alpha chain variable domain of TCR clone 283846 (TRAV13-1, TRAJ10)
CAATAGGGNKLTV

SEQ ID NO: 567692 - protein, 14 aa, Homo sapiens
  CDR3 for beta chain variable domain of TCR clone 283846 (TRBV12-4, TRBJ2-7)
CASSPAGLKYEQYF

SEQ ID NO: 567693 - protein, 15 aa, Homo sapiens
  CDR3 for alpha chain variable domain of TCR clone 283847 (TRAV17, TRAJ56)
CATDANTGASSKLTF

SEQ ID NO: 567694 - protein, 13 aa, Homo sapiens
  CDR3 for beta chain variable domain of TCR clone 283847 (TRBV11-2, TRBJ2-5)
CASSSTGEETQYF

SEQ ID NO: 567695 - protein, 23 aa, Homo sapiens
  CDR3 for alpha chain variable domain of TCR clone 283848 (TRAV8-4, TRAJ38)
CARLNAGNNHIQNPDPAAYQLRD

SEQ ID NO: 567696 - protein, 12 aa, Homo sapiens
  CDR3 for beta chain variable domain of TCR clone 283848 (TRBV6-1, TRBJ2-7)
CASSEPLYEQYF

SEQ ID NO: 567697 - protein, 17 aa, Homo sapiens
  CDR3 for alpha chain variable domain of TCR clone 283849 (TRAV3, TRAJ42)
CAVRDRDYGGSQGNLIF

SEQ ID NO: 567698 - protein, 15 aa, Homo sapiens
  CDR3 for beta chain variable domain of TCR clone 283849 (TRBV2, TRBJ2-7)
CASGEGLARSYEQYF

SEQ ID NO: 567699 - protein, 15 aa, Homo sapiens
  CDR3 for alpha chain variable domain of TCR clone 283850 (TRAV23/DV6, TRAJ30)
CAASSQESRDDNIIF

SEQ ID NO: 567700 - protein, 17 aa, Homo sapiens
  CDR3 for beta chain variable domain of TCR clone 283850 (TRBV4-3, TRBJ2-1)
CASSQFSSGRASGEQFF

SEQ ID NO: 567701 - protein, 15 aa, Homo sapiens
  CDR3 for alpha chain variable domain of TCR clone 283851 (TRAV21, TRAJ53)
CATLNSGGSNYKLTF

SEQ ID NO: 567702 - protein, 15 aa, Homo sapiens
  CDR3 for beta chain variable domain of TCR clone 283851 (TRBV2, TRBJ2-7)
CASNEGLARSYEQYF

SEQ ID NO: 567703 - protein, 13 aa, Homo sapiens
  CDR3 for alpha chain variable domain of TCR clone 283852 (TRAV12-2, TRAJ10)
CAVPTGGGNKLTF

SEQ ID NO: 567704 - protein, 11 aa, Homo sapiens
  CDR3 for beta chain variable domain of TCR clone 283852 (TRBV6-1, TRBJ2-1)
CASISYNEQFF

SEQ ID NO: 567705 - protein, 12 aa, Homo sapiens
  CDR3 for alpha chain variable domain of TCR clone 283853 (TRAV13-1, TRAJ49)
CAASIRSNQFYF

SEQ ID NO: 567706 - protein, 14 aa, Homo sapiens
  CDR3 for beta chain variable domain of TCR clone 283853 (TRBV7-2, TRBJ2-1)
CASSPGLAGNERFF

SEQ ID NO: 567707 - protein, 20 aa, Homo sapiens
  CDR3 for alpha chain variable domain of TCR clone 283854 (TRAV12-2, TRAJ52)
SPVIQPHTSFRSTSYGKLTF

SEQ ID NO: 567708 - protein, 11 aa, Homo sapiens
  CDR3 for beta chain variable domain of TCR clone 283854 (TRBV11-2, TRBJ2-2)
CASSLPGELFF

SEQ ID NO: 567709 - protein, 14 aa, Homo sapiens
  CDR3 for alpha chain variable domain of TCR clone 283855 (TRAV12-3, TRAJ13)
CAVKKTGGDQKVTF

SEQ ID NO: 567710 - protein, 15 aa, Homo sapiens
  CDR3 for beta chain variable domain of TCR clone 283855 (TRBV27, TRBJ2-1)
CASSNGGGSSNEQFF

SEQ ID NO: 567711 - protein, 14 aa, Homo sapiens
  CDR3 for alpha chain variable domain of TCR clone 283856 (TRAV8-6, TRAJ29)
CAVSGWAGNTPLVF

SEQ ID NO: 567712 - protein, 17 aa, Homo sapiens
  CDR3 for beta chain variable domain of TCR clone 283856 (TRBV13, TRBJ2-3)
CASSLSRVAGGRNTQYF

SEQ ID NO: 567713 - protein, 17 aa, Homo sapiens
  CDR3 for alpha chain variable domain of TCR clone 283857 (TRAV13-1, TRAJ52)
CAAGRNAGGTSYGKLTF

SEQ ID NO: 567714 - protein, 13 aa, Homo sapiens
  CDR3 for beta chain variable domain of TCR clone 283857 (TRBV7-2, TRBJ1-1)
CASNLKGAKVACF

SEQ ID NO: 567715 - protein, 16 aa, Homo sapiens
  CDR3 for alpha chain variable domain of TCR clone 283858 (TRAV12-3, TRAJ53)
CAMSPGSGGSNYKLTF

SEQ ID NO: 567716 - protein, 16 aa, Homo sapiens
  CDR3 for beta chain variable domain of TCR clone 283858 (TRBV7-9, TRBJ1-2)
CASSLGFSSGEDGYTL

SEQ ID NO: 567717 - protein, 13 aa, Homo sapiens
  CDR3 for alpha chain variable domain of TCR clone 283859 (TRAV1-1, TRAJ23)
CAVVANQGGKLIF

SEQ ID NO: 567718 - protein, 14 aa, Homo sapiens
  CDR3 for beta chain variable domain of TCR clone 283859 (TRBV25-1, TRBJ1-1)
CASTHLGGNTEAFF

SEQ ID NO: 567719 - protein, 14 aa, Homo sapiens
  CDR3 for alpha chain variable domain of TCR clone 283860 (TRAV17, TRAJ31)
CATVLRNNNARLMF

SEQ ID NO: 567720 - protein, 14 aa, Homo sapiens
  CDR3 for beta chain variable domain of TCR clone 283860 (TRBV12-4, TRBJ2-5)
CASSVGQKQETQYF

SEQ ID NO: 567721 - protein, 11 aa, Homo sapiens
  CDR3 for alpha chain variable domain of TCR clone 283861 (TRAV3, TRAJ21)
CAVGNFNKFYF

SEQ ID NO: 567722 - protein, 12 aa, Homo sapiens
  CDR3 for beta chain variable domain of TCR clone 283861 (TRBV6-3, TRBJ2-1)
CASSGSYNEQFF

SEQ ID NO: 567723 - protein, 12 aa, Homo sapiens
  CDR3 for alpha chain variable domain of TCR clone 283862 (TRAV1-1, TRAJ9)
CAEDTGGFKTIF

SEQ ID NO: 567724 - protein, 14 aa, Homo sapiens
  CDR3 for beta chain variable domain of TCR clone 283862 (TRBV7-8, TRBJ2-5)
CASSATGGQETQYF

SEQ ID NO: 567725 - protein, 15 aa, Homo sapiens
  CDR3 for alpha chain variable domain of TCR clone 283863 (TRAV29/DV5, TRAJ41)
CAASAVGYSGYALNF

SEQ ID NO: 567726 - protein, 13 aa, Homo sapiens
  CDR3 for beta chain variable domain of TCR clone 283863 (TRBV7-3, TRBJ1-1)
CASSQDWGAEAFF

SEQ ID NO: 567727 - protein, 11 aa, Homo sapiens
  CDR3 for alpha chain variable domain of TCR clone 283864 (TRAV2, TRAJ20)
CAVLNDYKLSF

SEQ ID NO: 567728 - protein, 15 aa, Homo sapiens
  CDR3 for beta chain variable domain of TCR clone 283864 (TRBV4-1, TRBJ2-7)
CASSQNTGRLYEQYF

SEQ ID NO: 567729 - protein, 16 aa, Homo sapiens
  CDR3 for alpha chain variable domain of TCR clone 283865 (TRAV3, TRAJ37)
CAVRGKGSGNTGKLLF

SEQ ID NO: 567730 - protein, 16 aa, Homo sapiens
  CDR3 for beta chain variable domain of TCR clone 283865 (TRBV12-5, TRBJ2-5)
CASGPRTSGNQETQYF

SEQ ID NO: 567731 - protein, 11 aa, Homo sapiens
  CDR3 for alpha chain variable domain of TCR clone 283866 (TRAV21, TRAJ11)
CAVNGYSTLTF

SEQ ID NO: 567732 - protein, 11 aa, Homo sapiens
  CDR3 for beta chain variable domain of TCR clone 283866 (TRBV19, TRBJ2-7)
CASSILGEQYF

SEQ ID NO: 567733 - protein, 14 aa, Homo sapiens
  CDR3 for alpha chain variable domain of TCR clone 283867 (TRAV12-3, TRAJ47)
CAMSVREYGNKLVF

SEQ ID NO: 567734 - protein, 15 aa, Homo sapiens
  CDR3 for beta chain variable domain of TCR clone 283867 (TRBV20-1, TRBJ2-2)
CSARDIRLNTGELFF

SEQ ID NO: 567735 - protein, 13 aa, Homo sapiens
  CDR3 for alpha chain variable domain of TCR clone 283868 (TRAV8-3, TRAJ43)
CAVVPYNNNDMRF

SEQ ID NO: 567736 - protein, 15 aa, Homo sapiens
  CDR3 for beta chain variable domain of TCR clone 283868 (TRBV5-7, TRBJ2-7)
CASSLGPGRGHEQYF

SEQ ID NO: 567737 - protein, 19 aa, Homo sapiens
  CDR3 for alpha chain variable domain of TCR clone 283869 (TRAV14/DV4, TRAJ52)
CNERGPKDAGGTSYGKLTF

SEQ ID NO: 567738 - protein, 12 aa, Homo sapiens
  CDR3 for beta chain variable domain of TCR clone 283869 (TRBV7-3, TRBJ2-5)
CASSSPGGTQYF

SEQ ID NO: 567739 - protein, 13 aa, Homo sapiens
  CDR3 for alpha chain variable domain of TCR clone 283870 (TRAV25, TRAJ10)
CAGRTGGGNKLTF

SEQ ID NO: 567740 - protein, 14 aa, Homo sapiens
  CDR3 for beta chain variable domain of TCR clone 283870 (TRBV7-8, TRBJ2-3)
CASSFKSSTDTQYF

SEQ ID NO: 567741 - protein, 13 aa, Homo sapiens
  CDR3 for alpha chain variable domain of TCR clone 283871 (TRAV17, TRAJ54)
CATVIQGAQKLVF

SEQ ID NO: 567742 - protein, 15 aa, Homo sapiens
  CDR3 for beta chain variable domain of TCR clone 283871 (TRBV13, TRBJ2-1)
CASSLLSALNNEQFF

SEQ ID NO: 567743 - protein, 15 aa, Homo sapiens
  CDR3 for alpha chain variable domain of TCR clone 283872 (TRAV8-6, TRAJ11)
CAVNFMNSGYSTLTF

SEQ ID NO: 567744 - protein, 17 aa, Homo sapiens
  CDR3 for beta chain variable domain of TCR clone 283872 (TRBV3-1, TRBJ2-5)
CASSNWGGTSGQETEYF

SEQ ID NO: 567745 - protein, 12 aa, Homo sapiens
  CDR3 for alpha chain variable domain of TCR clone 283873 (TRAV2, TRAJ33)
CAVEDSNYQLIW

SEQ ID NO: 567746 - protein, 13 aa, Homo sapiens
  CDR3 for beta chain variable domain of TCR clone 283873 (TRBV27, TRBJ1-1)
CASSLSIGAEAFF

SEQ ID NO: 567747 - protein, 14 aa, Homo sapiens
  CDR3 for alpha chain variable domain of TCR clone 283874 (TRAV25, TRAJ18)
CAGRQRLNPGEAIL

SEQ ID NO: 567748 - protein, 14 aa, Homo sapiens
  CDR3 for beta chain variable domain of TCR clone 283874 (TRBV7-2, TRBJ1-1)
CASSFLTGTTEAFF

SEQ ID NO: 567749 - protein, 17 aa, Homo sapiens
  CDR3 for alpha chain variable domain of TCR clone 283875 (TRAV3, TRAJ6)
CAVRDGPRAGGSYIPTF

SEQ ID NO: 567750 - protein, 16 aa, Homo sapiens
  CDR3 for beta chain variable domain of TCR clone 283875 (TRBV7-9, TRBJ1-3)
CASSQTSGLRMGTIYF

SEQ ID NO: 567751 - protein, 13 aa, Homo sapiens
  CDR3 for alpha chain variable domain of TCR clone 283876 (TRAV30, TRAJ6)
CGFIEGGSYVPTF

SEQ ID NO: 567752 - protein, 16 aa, Homo sapiens
  CDR3 for beta chain variable domain of TCR clone 283876 (TRBV7-6, TRBJ2-3)
CASSARTSRGTDTQYF

SEQ ID NO: 567753 - protein, 13 aa, Homo sapiens
  CDR3 for alpha chain variable domain of TCR clone 283877 (TRAV8-4, TRAJ9)
CAVSDTGGFKSIF

SEQ ID NO: 567754 - protein, 15 aa, Homo sapiens
  CDR3 for beta chain variable domain of TCR clone 283877 (TRBV5-1, TRBJ2-1)
CASSPPRAPYNEQFF

SEQ ID NO: 567755 - protein, 16 aa, Homo sapiens
  CDR3 for alpha chain variable domain of TCR clone 283878 (TRAV30, TRAJ24)
CGTEIMDADSWGKFKF

SEQ ID NO: 567756 - protein, 14 aa, Homo sapiens
  CDR3 for beta chain variable domain of TCR clone 283878 (TRBV12-5, TRBJ2-5)
CASGSRTHQETQYF

SEQ ID NO: 567757 - protein, 15 aa, Homo sapiens
  CDR3 for alpha chain variable domain of TCR clone 283879 (TRAV26-1, TRAJ17)
CIVRVVKAAGNKLTF

SEQ ID NO: 567758 - protein, 16 aa, Homo sapiens
  CDR3 for beta chain variable domain of TCR clone 283879 (TRBV27, TRBJ2-2)
CASSFRGLVRTGELFF

SEQ ID NO: 567759 - protein, 16 aa, Homo sapiens
  CDR3 for alpha chain variable domain of TCR clone 283880 (TRAV17, TRAJ22)
CATGPSSSGSARQLTF

SEQ ID NO: 567760 - protein, 14 aa, Homo sapiens
  CDR3 for beta chain variable domain of TCR clone 283880 (TRBV20-1, TRBJ1-1)
CSAQTRIGGTEAFF

SEQ ID NO: 567761 - protein, 12 aa, Homo sapiens
  CDR3 for alpha chain variable domain of TCR clone 283881 (TRAV36/DV7, TRAJ54)
CAVVRGAQKLVF

SEQ ID NO: 567762 - protein, 18 aa, Homo sapiens
  CDR3 for beta chain variable domain of TCR clone 283881 (TRBV20-1, TRBJ2-3)
CSASGLAGGPVTTDTQYF

SEQ ID NO: 567763 - protein, 14 aa, Homo sapiens
  CDR3 for alpha chain variable domain of TCR clone 283882 (TRAV12-2, TRAJ11)
CAVEGGSGYSTLTF

SEQ ID NO: 567764 - protein, 15 aa, Homo sapiens
  CDR3 for beta chain variable domain of TCR clone 283882 (TRBV11-3, TRBJ2-3)
CASLKDGREGDTQYF

SEQ ID NO: 567765 - protein, 14 aa, Homo sapiens
  CDR3 for alpha chain variable domain of TCR clone 283883 (TRAV21, TRAJ37)
CAVKGSSNTGKLIF

SEQ ID NO: 567766 - protein, 13 aa, Homo sapiens
  CDR3 for beta chain variable domain of TCR clone 283883 (TRBV12-5, TRBJ2-3)
CASQNRGTDTQYF

SEQ ID NO: 567767 - protein, 13 aa, Homo sapiens
  CDR3 for alpha chain variable domain of TCR clone 283884 (TRAV8-3, TRAJ28)
CAVGAVGSYQLTF

SEQ ID NO: 567768 - protein, 13 aa, Homo sapiens
  CDR3 for beta chain variable domain of TCR clone 283884 (TRBV5-1, TRBJ1-2)
CASSIDRPEGYTF

SEQ ID NO: 567769 - protein, 15 aa, Homo sapiens
  CDR3 for alpha chain variable domain of TCR clone 283885 (TRAV3, TRAJ22)
CAVRDRGGSAWQLTF

SEQ ID NO: 567770 - protein, 13 aa, Homo sapiens
  CDR3 for beta chain variable domain of TCR clone 283885 (TRBV20-1, TRBJ1-1)
CSARVGGNTEAFF

SEQ ID NO: 567771 - protein, 13 aa, Homo sapiens
  CDR3 for alpha chain variable domain of TCR clone 283886 (TRAV12-1, TRAJ49)
CVVSKSTGNQFYF

SEQ ID NO: 567772 - protein, 17 aa, Homo sapiens
  CDR3 for beta chain variable domain of TCR clone 283886 (TRBV20-1, TRBJ2-2)
CSASGSGQGGLTGELFF

SEQ ID NO: 567773 - protein, 12 aa, Homo sapiens
  CDR3 for alpha chain variable domain of TCR clone 283887 (TRAV4, TRAJ34)
CLVGEGTDKLIF

SEQ ID NO: 567774 - protein, 17 aa, Homo sapiens
  CDR3 for beta chain variable domain of TCR clone 283887 (TRBV13, TRBJ2-3)
CASSLSRVAGGRNTQYF

SEQ ID NO: 567775 - protein, 16 aa, Homo sapiens
  CDR3 for alpha chain variable domain of TCR clone 283888 (TRAV26-1, TRAJ36)
CIVRVPDQTGANNRFF

SEQ ID NO: 567776 - protein, 12 aa, Homo sapiens
  CDR3 for beta chain variable domain of TCR clone 283888 (TRBV29-1, TRBJ2-3)
CSVTGGADTQYF

SEQ ID NO: 567777 - protein, 13 aa, Homo sapiens
  CDR3 for alpha chain variable domain of TCR clone 283889 (TRAV36/DV7, TRAJ49)
CAGDSNTGKQFYF

SEQ ID NO: 567778 - protein, 12 aa, Homo sapiens
  CDR3 for beta chain variable domain of TCR clone 283889 (TRBV11-2, TRBJ2-2)
CASSRGGGELFF

SEQ ID NO: 567779 - protein, 12 aa, Homo sapiens
  CDR3 for alpha chain variable domain of TCR clone 283890 (TRAV21, TRAJ3)
CCFYSSASKIIF

SEQ ID NO: 567780 - protein, 16 aa, Homo sapiens
  CDR3 for beta chain variable domain of TCR clone 283890 (TRBV19, TRBJ2-1)
CASSKPGPSSYNEQFF

SEQ ID NO: 567781 - protein, 16 aa, Homo sapiens
  CDR3 for alpha chain variable domain of TCR clone 283891 (TRAV4, TRAJ22)
CLVGDLYSGSARQLTF

SEQ ID NO: 567782 - protein, 15 aa, Homo sapiens
  CDR3 for beta chain variable domain of TCR clone 283891 (TRBV10-3, TRBJ2-3)
CAIRLTSGGTDTQYF

SEQ ID NO: 567783 - protein, 15 aa, Homo sapiens
  CDR3 for alpha chain variable domain of TCR clone 283892 (TRAV12-3, TRAJ49)
CAMAVTPNTGNQFYF

SEQ ID NO: 567784 - protein, 14 aa, Homo sapiens
  CDR3 for beta chain variable domain of TCR clone 283892 (TRBV7-8, TRBJ2-3)
CASSLEAGTYTQYF

SEQ ID NO: 567785 - protein, 16 aa, Homo sapiens
  CDR3 for alpha chain variable domain of TCR clone 283893 (TRAV3, TRAJ18)
CAVRDGRGSTLGRLYF

SEQ ID NO: 567786 - protein, 15 aa, Homo sapiens
  CDR3 for beta chain variable domain of TCR clone 283893 (TRBV7-9, TRBJ1-6)
CASSSPGRGNSPLLC

SEQ ID NO: 567787 - protein, 15 aa, Homo sapiens
  CDR3 for alpha chain variable domain of TCR clone 283894 (TRAV3, TRAJ20)
CAVRDIKLSDHKLSF

SEQ ID NO: 567788 - protein, 15 aa, Homo sapiens
  CDR3 for beta chain variable domain of TCR clone 283894 (TRBV7-9, TRBJ1-6)
FASSSPGRGNSPLHF

SEQ ID NO: 567789 - protein, 14 aa, Homo sapiens
  CDR3 for alpha chain variable domain of TCR clone 283895 (TRAV12-2, TRAJ17)
CAVLFKAAGNKLTF

SEQ ID NO: 567790 - protein, 13 aa, Homo sapiens
  CDR3 for beta chain variable domain of TCR clone 283895 (TRBV13, TRBJ2-5)
CASSPEVGETQYF

SEQ ID NO: 567791 - protein, 14 aa, Homo sapiens
  CDR3 for alpha chain variable domain of TCR clone 283896 (TRAV12-2, TRAJ17)
CAVLFKAAGNKLTF

SEQ ID NO: 567792 - protein, 13 aa, Homo sapiens
  CDR3 for beta chain variable domain of TCR clone 283896 (TRBV13, TRBJ2-7)
CASSPEVGETQYF

SEQ ID NO: 567793 - protein, 17 aa, Homo sapiens
  CDR3 for alpha chain variable domain of TCR clone 283897 (TRAV26-2, TRAJ42)
CILRNVGYGGRQGNLIF

SEQ ID NO: 567794 - protein, 16 aa, Homo sapiens
  CDR3 for beta chain variable domain of TCR clone 283897 (TRBV12-4, TRBJ2-7)
CASSLIGGTGTYEQYF

SEQ ID NO: 567795 - protein, 17 aa, Homo sapiens
  CDR3 for alpha chain variable domain of TCR clone 283898 (TRAV27, TRAJ42)
CAERVIYYGGSQGNVIF

SEQ ID NO: 567796 - protein, 14 aa, Homo sapiens
  CDR3 for beta chain variable domain of TCR clone 283898 (TRBV19, TRBJ1-5)
CASRAPDSFLSQHF

SEQ ID NO: 567797 - protein, 11 aa, Homo sapiens
  CDR3 for alpha chain variable domain of TCR clone 283899 (TRAV2, TRAJ13)
CAPVGYQKVTF

SEQ ID NO: 567798 - protein, 16 aa, Homo sapiens
  CDR3 for beta chain variable domain of TCR clone 283899 (TRBV6-1, TRBJ2-5)
CASSETLDRGAETQYF

SEQ ID NO: 567799 - protein, 13 aa, Homo sapiens
  CDR3 for alpha chain variable domain of TCR clone 283900 (TRAV30, TRAJ34)
CGTVGDNTDQLIF

SEQ ID NO: 567800 - protein, 16 aa, Homo sapiens
  CDR3 for beta chain variable domain of TCR clone 283900 (TRBV7-9, TRBJ1-2)
CASSLGFSSGEDGYTF

SEQ ID NO: 567801 - protein, 14 aa, Homo sapiens
  CDR3 for alpha chain variable domain of TCR clone 283901 (TRAV12-2, TRAJ13)
CAVKKTGGYQKVTF

SEQ ID NO: 567802 - protein, 15 aa, Homo sapiens
  CDR3 for beta chain variable domain of TCR clone 283901 (TRBV27, TRBJ2-3)
CASSLGLAATDTQYF

SEQ ID NO: 567803 - protein, 13 aa, Homo sapiens
  CDR3 for alpha chain variable domain of TCR clone 283902 (TRAV16, TRAJ28)
CALTGAGSDQLTF

SEQ ID NO: 567804 - protein, 16 aa, Homo sapiens
  CDR3 for beta chain variable domain of TCR clone 283902 (TRBV28, TRBJ1-5)
CASSLTGQGWNQPQHF

SEQ ID NO: 567805 - protein, 11 aa, Homo sapiens
  CDR3 for alpha chain variable domain of TCR clone 283903 (TRAV2, TRAJ13)
CASGGYQKVTF

SEQ ID NO: 567806 - protein, 14 aa, Homo sapiens
  CDR3 for beta chain variable domain of TCR clone 283903 (TRBV12-4, TRBJ1-1)
CASRPDRESTEAFF

SEQ ID NO: 567807 - protein, 12 aa, Homo sapiens
  CDR3 for alpha chain variable domain of TCR clone 283904 (TRAV12-2, TRAJ9)
CAVNTGGFKTNF

SEQ ID NO: 567808 - protein, 13 aa, Homo sapiens
  CDR3 for beta chain variable domain of TCR clone 283904 (TRBV10-3, TRBJ2-7)
CASKLAVNYEQYF

SEQ ID NO: 567809 - protein, 14 aa, Homo sapiens
  CDR3 for alpha chain variable domain of TCR clone 283905 (TRAV1-2, TRAJ16)
CAVNRFSDGQKLLF

SEQ ID NO: 567810 - protein, 13 aa, Homo sapiens
  CDR3 for beta chain variable domain of TCR clone 283905 (TRBV11-2, TRBJ2-1)
WASSLGLAGERFF

SEQ ID NO: 567811 - protein, 16 aa, Homo sapiens
  CDR3 for alpha chain variable domain of TCR clone 283906 (TRAV26-1, TRAJ56)
CIVRARERGANSKLTL

SEQ ID NO: 567812 - protein, 13 aa, Homo sapiens
  CDR3 for beta chain variable domain of TCR clone 283906 (TRBV7-2, TRBJ1-1)
CASSLRANTEAFF

SEQ ID NO: 567813 - protein, 14 aa, Homo sapiens
  CDR3 for alpha chain variable domain of TCR clone 283907 (TRAV12-3, TRAJ12)
CAMSEVDSSYKLIF

SEQ ID NO: 567814 - protein, 12 aa, Homo sapiens
  CDR3 for beta chain variable domain of TCR clone 283907 (TRBV18, TRBJ1-4)
CARSPSREKLFF

SEQ ID NO: 567815 - protein, 15 aa, Homo sapiens
  CDR3 for alpha chain variable domain of TCR clone 283908 (TRAV8-6, TRAJ4)
CAVRSLSGGYNKLSF

SEQ ID NO: 567816 - protein, 13 aa, Homo sapiens
  CDR3 for beta chain variable domain of TCR clone 283908 (TRBV7-2, TRBJ2-3)
CASSTDNLDTQYF

SEQ ID NO: 567817 - protein, 13 aa, Homo sapiens
  CDR3 for alpha chain variable domain of TCR clone 283909 (TRAV10, TRAJ15)
CVVSGQAGTDLIF

SEQ ID NO: 567818 - protein, 15 aa, Homo sapiens
  CDR3 for beta chain variable domain of TCR clone 283909 (TRBV6-1, TRBJ1-2)
CASSDTIDRGYGYTF

SEQ ID NO: 567819 - protein, 13 aa, Homo sapiens
  CDR3 for alpha chain variable domain of TCR clone 283910 (TRAV35, TRAJ48)
GRSRVFGNEKVTF

SEQ ID NO: 567820 - protein, 14 aa, Homo sapiens
  CDR3 for beta chain variable domain of TCR clone 283910 (TRBV20-1, TRBJ2-5)
CSALVPGYQETQYF

SEQ ID NO: 567821 - protein, 14 aa, Homo sapiens
  CDR3 for alpha chain variable domain of TCR clone 283911 (TRAV1-2, TRAJ16)
CAVNRFSDGQKLLF

SEQ ID NO: 567822 - protein, 14 aa, Homo sapiens
  CDR3 for beta chain variable domain of TCR clone 283911 (TRBV5-8, TRBJ1-1)
CASSPRTGFSEAFF

SEQ ID NO: 567823 - protein, 15 aa, Homo sapiens
  CDR3 for alpha chain variable domain of TCR clone 283912 (TRAV13-1, TRAJ5)
CAASPRGHGQESTYF

SEQ ID NO: 567824 - protein, 18 aa, Homo sapiens
  CDR3 for beta chain variable domain of TCR clone 283912 (TRBV12-4, TRBJ2-2)
CASSLVAGTRGRTGELFF

SEQ ID NO: 567825 - protein, 14 aa, Homo sapiens
  CDR3 for alpha chain variable domain of TCR clone 283913 (TRAV12-3, TRAJ13)
CAMRNSGGYQKVTF

SEQ ID NO: 567826 - protein, 14 aa, Homo sapiens
  CDR3 for beta chain variable domain of TCR clone 283913 (TRBV4-1, TRBJ1-6)
CASSPGSDRSPLHF

SEQ ID NO: 567827 - protein, 13 aa, Homo sapiens
  CDR3 for alpha chain variable domain of TCR clone 283914 (TRAV2, TRAJ40)
FAVVTSGTYKYLF

SEQ ID NO: 567828 - protein, 14 aa, Homo sapiens
  CDR3 for beta chain variable domain of TCR clone 283914 (TRBV19, TRBJ2-1)
CASPTFVLSGEQFF

SEQ ID NO: 567829 - protein, 18 aa, Homo sapiens
  CDR3 for alpha chain variable domain of TCR clone 283915 (TRAV26-1, TRAJ23)
CIVRVGLEVWNQGGKLIF

SEQ ID NO: 567830 - protein, 16 aa, Homo sapiens
  CDR3 for beta chain variable domain of TCR clone 283915 (TRBV12-4, TRBJ2-5)
CASSFFVRGRQETRYF

SEQ ID NO: 567831 - protein, 17 aa, Homo sapiens
  CDR3 for alpha chain variable domain of TCR clone 283916 (TRAV13-2, TRAJ31)
CAEHARLMFGDGTQLVV

SEQ ID NO: 567832 - protein, 14 aa, Homo sapiens
  CDR3 for beta chain variable domain of TCR clone 283916 (TRBV7-9, TRBJ2-1)
CASSLGVADNEQFF

SEQ ID NO: 567833 - protein, 11 aa, Homo sapiens
  CDR3 for alpha chain variable domain of TCR clone 283917 (TRAV1-1, TRAJ20)
CSVFNDYKLSF

SEQ ID NO: 567834 - protein, 16 aa, Homo sapiens
  CDR3 for beta chain variable domain of TCR clone 283917 (TRBV29-1, TRBJ2-2)
CSVEKTSEGNTGELFF

SEQ ID NO: 567835 - protein, 11 aa, Homo sapiens
  CDR3 for alpha chain variable domain of TCR clone 283918 (TRAV12-3, TRAJ27)
CAMANAGKSTF

SEQ ID NO: 567836 - protein, 13 aa, Homo sapiens
  CDR3 for beta chain variable domain of TCR clone 283918 (TRBV20-1, TRBJ1-1)
CSARVGGNTQAFF

SEQ ID NO: 567837 - protein, 10 aa, Homo sapiens
  CDR3 for alpha chain variable domain of TCR clone 283919 (TRAV16, TRAJ22)
SAMYLRHLTF

SEQ ID NO: 567838 - protein, 15 aa, Homo sapiens
  CDR3 for beta chain variable domain of TCR clone 283919 (TRBV7-9, TRBJ1-6)
CASSSPGRGNSTLHF

SEQ ID NO: 567839 - protein, 12 aa, Homo sapiens
  CDR3 for alpha chain variable domain of TCR clone 283920 (TRAV26-1, TRAJ35)
CIGLSFGNVLHC

SEQ ID NO: 567840 - protein, 17 aa, Homo sapiens
  CDR3 for beta chain variable domain of TCR clone 283920 (TRBV7-7, TRBJ1-1)
CASIGDRPNLGVTEAFF

SEQ ID NO: 567841 - protein, 13 aa, Homo sapiens
  CDR3 for alpha chain variable domain of TCR clone 283921 (TRAV12-3, TRAJ13)
CAMSSGGYQKVTF

SEQ ID NO: 567842 - protein, 17 aa, Homo sapiens
  CDR3 for beta chain variable domain of TCR clone 283921 (TRBV20-1, TRBJ2-2)
CSASGSGQGGLTGELFF

SEQ ID NO: 567843 - protein, 13 aa, Homo sapiens
  CDR3 for alpha chain variable domain of TCR clone 283922 (TRAV12-1, TRAJ13)
CVAALLGYQKDTF

SEQ ID NO: 567844 - protein, 13 aa, Homo sapiens
  CDR3 for beta chain variable domain of TCR clone 283922 (TRBV20-1, TRBJ2-5)
CSAILTGQETQYF

SEQ ID NO: 567845 - protein, 14 aa, Homo sapiens
  CDR3 for alpha chain variable domain of TCR clone 283923 (TRAV1-2, TRAJ16)
CAVNRFSEGQKLLF

SEQ ID NO: 567846 - protein, 14 aa, Homo sapiens
  CDR3 for beta chain variable domain of TCR clone 283923 (TRBV20-1, TRBJ1-5)
CSAPGTGVGQPQHF

SEQ ID NO: 567847 - protein, 13 aa, Homo sapiens
  CDR3 for alpha chain variable domain of TCR clone 283924 (TRAV13-2, TRAJ13)
CAERPGGYQKATF

SEQ ID NO: 567848 - protein, 17 aa, Homo sapiens
  CDR3 for beta chain variable domain of TCR clone 283924 (TRBV11-2, TRBJ2-1)
CASSLYPPGVEYNEQFF

SEQ ID NO: 567849 - protein, 13 aa, Homo sapiens
  CDR3 for alpha chain variable domain of TCR clone 283925 (TRAV17, TRAJ26)
CATVDNYGRILSL

SEQ ID NO: 567850 - protein, 16 aa, Homo sapiens
  CDR3 for beta chain variable domain of TCR clone 283925 (TRBV2, TRBJ2-1)
CASSVGGSLSYNEQFF

SEQ ID NO: 567851 - protein, 18 aa, Homo sapiens
  CDR3 for alpha chain variable domain of TCR clone 283926 (TRAV26-2, TRAJ45)
CILRVEKYSGGGSDGLTF

SEQ ID NO: 567852 - protein, 14 aa, Homo sapiens
  CDR3 for beta chain variable domain of TCR clone 283926 (TRBV7-2, TRBJ2-7)
CASRSQGAAYEQYF

SEQ ID NO: 567853 - protein, 14 aa, Homo sapiens
  CDR3 for alpha chain variable domain of TCR clone 283927 (TRAV2, TRAJ9)
CAVEDRSGGFKTIF

SEQ ID NO: 567854 - protein, 17 aa, Homo sapiens
  CDR3 for beta chain variable domain of TCR clone 283927 (TRBV7-8, TRBJ2-6)
CASSAGTGGAGASVLTF

SEQ ID NO: 567855 - protein, 14 aa, Homo sapiens
  CDR3 for alpha chain variable domain of TCR clone 283928 (TRAV21, TRAJ58)
CAVRRGRSGSRLTF

SEQ ID NO: 567856 - protein, 20 aa, Homo sapiens
  CDR3 for beta chain variable domain of TCR clone 283928 (TRBV7-8, TRBJ2-2)
CASSHLFPGPTIHITGELFF

SEQ ID NO: 567857 - protein, 13 aa, Homo sapiens
  CDR3 for alpha chain variable domain of TCR clone 283929 (TRAV36/DV7, TRAJ38)
CVANAGNNRKLIW

SEQ ID NO: 567858 - protein, 14 aa, Homo sapiens
  CDR3 for beta chain variable domain of TCR clone 283929 (TRBV7-2, TRBJ2-7)
CASSVRWEVNEQYF

SEQ ID NO: 567859 - protein, 10 aa, Homo sapiens
  CDR3 for alpha chain variable domain of TCR clone 283930 (TRAV36/DV7, TRAJ49)
CALTGNQFYF

SEQ ID NO: 567860 - protein, 14 aa, Homo sapiens
  CDR3 for beta chain variable domain of TCR clone 283930 (TRBV4-2, TRBJ2-5)
CASSPDRGRETQYF

SEQ ID NO: 567861 - protein, 12 aa, Homo sapiens
  CDR3 for alpha chain variable domain of TCR clone 283931 (TRAV13-1, TRAJ21)
CAAKEGFNKFYF

SEQ ID NO: 567862 - protein, 15 aa, Homo sapiens
  CDR3 for beta chain variable domain of TCR clone 283931 (TRBV20-1, TRBJ2-6)
CSAYGQVSGANVLTF

SEQ ID NO: 567863 - protein, 14 aa, Homo sapiens
  CDR3 for alpha chain variable domain of TCR clone 283932 (TRAV23/DV6, TRAJ6)
CAASRSGGRYIPTF

SEQ ID NO: 567864 - protein, 17 aa, Homo sapiens
  CDR3 for beta chain variable domain of TCR clone 283932 (TRBV20-1, TRBJ2-1)
CSASASGLAGSYNEQFF

SEQ ID NO: 567865 - protein, 13 aa, Homo sapiens
  CDR3 for alpha chain variable domain of TCR clone 283933 (TRAV17, TRAJ9)
CATDYTGGFKTIF

SEQ ID NO: 567866 - protein, 12 aa, Homo sapiens
  CDR3 for beta chain variable domain of TCR clone 283933 (TRBV5-7, TRBJ1-2)
CASSDRIHGYTF

SEQ ID NO: 567867 - protein, 14 aa, Homo sapiens
  CDR3 for alpha chain variable domain of TCR clone 283934 (TRAV1-2, TRAJ8)
CTVREDTGFQKLVF

SEQ ID NO: 567868 - protein, 15 aa, Homo sapiens
  CDR3 for beta chain variable domain of TCR clone 283934 (TRBV20-1, TRBJ2-7)
CSARDRVSGMDEQYF

SEQ ID NO: 567869 - protein, 19 aa, Homo sapiens
  CDR3 for alpha chain variable domain of TCR clone 283935 (TRAV2, TRAJ32)
TTVLSTPPSQGGATNTLIF

SEQ ID NO: 567870 - protein, 12 aa, Homo sapiens
  CDR3 for beta chain variable domain of TCR clone 283935 (TRBV20-1, TRBJ2-7)
CSAITPTKEQYF

SEQ ID NO: 567871 - protein, 15 aa, Homo sapiens
  CDR3 for alpha chain variable domain of TCR clone 283936 (TRAV2, TRAJ15)
CAVEDREQAGTALIF

SEQ ID NO: 567872 - protein, 13 aa, Homo sapiens
  CDR3 for beta chain variable domain of TCR clone 283936 (TRBV10-2, TRBJ2-3)
CASSESGVHTQYF

SEQ ID NO: 567873 - protein, 11 aa, Homo sapiens
  CDR3 for alpha chain variable domain of TCR clone 283937 (TRAV23/DV6, TRAJ47)
CAAGYGNKLVF

SEQ ID NO: 567874 - protein, 16 aa, Homo sapiens
  CDR3 for beta chain variable domain of TCR clone 283937 (TRBV19, TRBJ2-1)
CASSKAGPSSYNEQFF

SEQ ID NO: 567875 - protein, 16 aa, Homo sapiens
  CDR3 for alpha chain variable domain of TCR clone 283938 (TRAV3, TRAJ37)
CAVRPHSSGNTGKLIF

SEQ ID NO: 567876 - protein, 13 aa, Homo sapiens
  CDR3 for beta chain variable domain of TCR clone 283938 (TRBV2, TRBJ1-5)
CASGTGGYQPQQF

SEQ ID NO: 567877 - protein, 15 aa, Homo sapiens
  CDR3 for alpha chain variable domain of TCR clone 283939 (TRAV13-1, TRAJ45)
CAASGSGGGADGLTF

SEQ ID NO: 567878 - protein, 14 aa, Homo sapiens
  CDR3 for beta chain variable domain of TCR clone 283939 (TRBV12-4, TRBJ1-2)
CASSFVGTAYGYTV

SEQ ID NO: 567879 - protein, 14 aa, Homo sapiens
  CDR3 for alpha chain variable domain of TCR clone 283940 (TRAV9-2, TRAJ39)
CALYIYNAGNMLTF

SEQ ID NO: 567880 - protein, 13 aa, Homo sapiens
  CDR3 for beta chain variable domain of TCR clone 283940 (TRBV7-6, TRBJ1-2)
CASSLVADYGYTF

SEQ ID NO: 567881 - protein, 16 aa, Homo sapiens
  CDR3 for alpha chain variable domain of TCR clone 283941 (TRAV8-1, TRAJ39)
CAVNVPSYNAGNMLTF

SEQ ID NO: 567882 - protein, 15 aa, Homo sapiens
  CDR3 for beta chain variable domain of TCR clone 283941 (TRBV4-1, TRBJ2-3)
CASRSTRAGTDTQCF

SEQ ID NO: 567883 - protein, 15 aa, Homo sapiens
  CDR3 for alpha chain variable domain of TCR clone 283942 (TRAV12-3, TRAJ49)
CAMAVTPNTSNQFYF

SEQ ID NO: 567884 - protein, 18 aa, Homo sapiens
  CDR3 for beta chain variable domain of TCR clone 283942 (TRBV4-1, TRBJ1-5)
CASSQDPRGQGLNQPQHF

SEQ ID NO: 567885 - protein, 13 aa, Homo sapiens
  CDR3 for alpha chain variable domain of TCR clone 283943 (TRAV3, TRAJ21)
CAVRGPDFNKFYF

SEQ ID NO: 567886 - protein, 14 aa, Homo sapiens
  CDR3 for beta chain variable domain of TCR clone 283943 (TRBV20-1, TRBJ1-1)
CSARAVNGYTEAFF

SEQ ID NO: 567887 - protein, 15 aa, Homo sapiens
  CDR3 for alpha chain variable domain of TCR clone 283944 (TRAV2, TRAJ24)
CAVVRLKNSWGNLQF

SEQ ID NO: 567888 - protein, 17 aa, Homo sapiens
  CDR3 for beta chain variable domain of TCR clone 283944 (TRBV13, TRBJ2-3)
CASSLSRVAGGRNTQYF

SEQ ID NO: 567889 - protein, 10 aa, Homo sapiens
  CDR3 for alpha chain variable domain of TCR clone 283945 (TRAV38-2/DV8, TRAJ40)
CASGTYKYIF

SEQ ID NO: 567890 - protein, 14 aa, Homo sapiens
  CDR3 for beta chain variable domain of TCR clone 283945 (TRBV7-3, TRBJ2-1)
CASSLAGGTNEQFF

SEQ ID NO: 567891 - protein, 12 aa, Homo sapiens
  CDR3 for alpha chain variable domain of TCR clone 283946 (TRAV38-1, TRAJ32)
CAPLGATNKLIF

SEQ ID NO: 567892 - protein, 19 aa, Homo sapiens
  CDR3 for beta chain variable domain of TCR clone 283946 (TRBV29-1, TRBJ2-5)
SAALKLGEWRDPVLRARHA

SEQ ID NO: 567893 - protein, 11 aa, Homo sapiens
  CDR3 for alpha chain variable domain of TCR clone 283947 (TRAV17, TRAJ9)
CATTGGFKTIF

SEQ ID NO: 567894 - protein, 16 aa, Homo sapiens
  CDR3 for beta chain variable domain of TCR clone 283947 (TRBV11-2, TRBJ2-7)
CASSPTTGGVSYEQYF

SEQ ID NO: 567895 - protein, 15 aa, Homo sapiens
  CDR3 for alpha chain variable domain of TCR clone 283948 (TRAV3, TRAJ5)
CAVRDRKTGRRALTF

SEQ ID NO: 567896 - protein, 12 aa, Homo sapiens
  CDR3 for beta chain variable domain of TCR clone 283948 (TRBV11-2, TRBJ2-1)
CASSPGNNEQFF

SEQ ID NO: 567897 - protein, 14 aa, Homo sapiens
  CDR3 for alpha chain variable domain of TCR clone 283949 (TRAV12-2, TRAJ45)
CAVNKGGGADGLTF

SEQ ID NO: 567898 - protein, 14 aa, Homo sapiens
  CDR3 for beta chain variable domain of TCR clone 283949 (TRBV20-1, TRBJ1-1)
CSAMGRTANTEAFF

SEQ ID NO: 567899 - protein, 11 aa, Homo sapiens
  CDR3 for alpha chain variable domain of TCR clone 283950 (TRAV2, TRAJ20)
AAVYRDCKLSF

SEQ ID NO: 567900 - protein, 16 aa, Homo sapiens
  CDR3 for beta chain variable domain of TCR clone 283950 (TRBV5-1, TRBJ2-5)
CASSLALLRAGETQYF

SEQ ID NO: 567901 - protein, 11 aa, Homo sapiens
  CDR3 for alpha chain variable domain of TCR clone 283951 (TRAV12-2, TRAJ49)
CAVDTGNQFYF

SEQ ID NO: 567902 - protein, 16 aa, Homo sapiens
  CDR3 for beta chain variable domain of TCR clone 283951 (TRBV12-4, TRBJ1-5)
CASSRPVGGSNQPQHF

SEQ ID NO: 567903 - protein, 14 aa, Homo sapiens
  CDR3 for alpha chain variable domain of TCR clone 283952 (TRAV16, TRAJ16)
CALSVLSDGQKLLF

SEQ ID NO: 567904 - protein, 16 aa, Homo sapiens
  CDR3 for beta chain variable domain of TCR clone 283952 (TRBV12-5, TRBJ2-5)
CASGPRTSGNQETQYF

SEQ ID NO: 567905 - protein, 16 aa, Homo sapiens
  CDR3 for alpha chain variable domain of TCR clone 283953 (TRAV21, TRAJ52)
CAVTNAGGTSSGKLTF

SEQ ID NO: 567906 - protein, 13 aa, Homo sapiens
  CDR3 for beta chain variable domain of TCR clone 283953 (TRBV20-1, TRBJ2-3)
CSARLAGADTQYF

SEQ ID NO: 567907 - protein, 15 aa, Homo sapiens
  CDR3 for alpha chain variable domain of TCR clone 283954 (TRAV3, TRAJ29)
CAVRDLYSGNTPLVF

SEQ ID NO: 567908 - protein, 17 aa, Homo sapiens
  CDR3 for beta chain variable domain of TCR clone 283954 (TRBV20-1, TRBJ2-1)
CSARDPLAGVWDNEQCF

SEQ ID NO: 567909 - protein, 14 aa, Homo sapiens
  CDR3 for alpha chain variable domain of TCR clone 283955 (TRAV35, TRAJ33)
CAGSSQDSNYQLIW

SEQ ID NO: 567910 - protein, 14 aa, Homo sapiens
  CDR3 for beta chain variable domain of TCR clone 283955 (TRBV12-4, TRBJ2-3)
CASTIAGWGDTQYF

SEQ ID NO: 567911 - protein, 11 aa, Homo sapiens
  CDR3 for alpha chain variable domain of TCR clone 283956 (TRAV12-2, TRAJ36)
CAVDGANNLFF

SEQ ID NO: 567912 - protein, 13 aa, Homo sapiens
  CDR3 for beta chain variable domain of TCR clone 283956 (TRBV28, TRBJ2-5)
CARVSRGEETQYS

SEQ ID NO: 567913 - protein, 14 aa, Homo sapiens
  CDR3 for alpha chain variable domain of TCR clone 283957 (TRAV8-6, TRAJ53)
CAALVLGSNYKLKF

SEQ ID NO: 567914 - protein, 15 aa, Homo sapiens
  CDR3 for beta chain variable domain of TCR clone 283957 (TRBV20-1, TRBJ2-3)
CSAEPLAGHGDTQYF

SEQ ID NO: 567915 - protein, 18 aa, Homo sapiens
  CDR3 for alpha chain variable domain of TCR clone 283958 (TRAV26-2, TRAJ45)
CILRVDKYSGGGGDGPTF

SEQ ID NO: 567916 - protein, 16 aa, Homo sapiens
  CDR3 for beta chain variable domain of TCR clone 283958 (TRBV2, TRBJ1-4)
CASNLLQGATNEKLFF

SEQ ID NO: 567917 - protein, 16 aa, Homo sapiens
  CDR3 for alpha chain variable domain of TCR clone 283959 (TRAV12-3, TRAJ53)
CAMSPGSGGSNYKLTF

SEQ ID NO: 567918 - protein, 16 aa, Homo sapiens
  CDR3 for beta chain variable domain of TCR clone 283959 (TRBV7-9, TRBJ1-2)
CASSLGFSSGEDGYFF

SEQ ID NO: 567919 - protein, 15 aa, Homo sapiens
  CDR3 for alpha chain variable domain of TCR clone 283960 (TRAV3, TRAJ22)
CAVRDRGGSARQLTF

SEQ ID NO: 567920 - protein, 20 aa, Homo sapiens
  CDR3 for beta chain variable domain of TCR clone 283960 (TRBV11-2, TRBJ1-6)
CASSLVFATGGSVRPSTLGT

SEQ ID NO: 567921 - protein, 13 aa, Homo sapiens
  CDR3 for alpha chain variable domain of TCR clone 283961 (TRAV8-3, TRAJ43)
CAVGPDNNNDMRF

SEQ ID NO: 567922 - protein, 13 aa, Homo sapiens
  CDR3 for beta chain variable domain of TCR clone 283961 (TRBV12-4, TRBJ1-1)
CASSLGGTTEAFF

SEQ ID NO: 567923 - protein, 20 aa, Homo sapiens
  CDR3 for alpha chain variable domain of TCR clone 283962 (TRAV30, TRAJ32)
RNLLLRHREGYGVATNKLIF

SEQ ID NO: 567924 - protein, 13 aa, Homo sapiens
  CDR3 for beta chain variable domain of TCR clone 283962 (TRBV10-3, TRBJ2-7)
CASKLAVNYEQYF

SEQ ID NO: 567925 - protein, 13 aa, Homo sapiens
  CDR3 for alpha chain variable domain of TCR clone 283963 (TRAV1-2, TRAJ9)
CAALNTGGFKTIF

SEQ ID NO: 567926 - protein, 15 aa, Homo sapiens
  CDR3 for beta chain variable domain of TCR clone 283963 (TRBV19, TRBJ2-2)
CASSLNRGVTGELFF

SEQ ID NO: 567927 - protein, 13 aa, Homo sapiens
  CDR3 for alpha chain variable domain of TCR clone 283964 (TRAV27, TRAJ41)
CAGEGNSGYALNL

SEQ ID NO: 567928 - protein, 14 aa, Homo sapiens
  CDR3 for beta chain variable domain of TCR clone 283964 (TRBV7-2, TRBJ1-1)
CASSFLTGTTEAFF

SEQ ID NO: 567929 - protein, 13 aa, Homo sapiens
  CDR3 for alpha chain variable domain of TCR clone 283965 (TRAV29/DV5, TRAJ48)
CAASSFGNEKLTF

SEQ ID NO: 567930 - protein, 14 aa, Homo sapiens
  CDR3 for beta chain variable domain of TCR clone 283965 (TRBV3-1, TRBJ2-2)
CASSQEWVQGELFF

SEQ ID NO: 567931 - protein, 16 aa, Homo sapiens
  CDR3 for alpha chain variable domain of TCR clone 283966 (TRAV3, TRAJ27)
CAVRDPQGTNAGKSTF

SEQ ID NO: 567932 - protein, 12 aa, Homo sapiens
  CDR3 for beta chain variable domain of TCR clone 283966 (TRBV24-1, TRBJ2-3)
CATSDSTDTQYF

SEQ ID NO: 567933 - protein, 22 aa, Homo sapiens
  CDR3 for alpha chain variable domain of TCR clone 283967 (TRAV36/DV7, TRAJ38)
CVANAGNNHIQNPDPAVYQLRD

SEQ ID NO: 567934 - protein, 14 aa, Homo sapiens
  CDR3 for beta chain variable domain of TCR clone 283967 (TRBV2, TRBJ2-1)
CASSEARQGVSEFF

SEQ ID NO: 567935 - protein, 15 aa, Homo sapiens
  CDR3 for alpha chain variable domain of TCR clone 283968 (TRAV3, TRAJ22)
CAVRDRGGSARQLAF

SEQ ID NO: 567936 - protein, 16 aa, Homo sapiens
  CDR3 for beta chain variable domain of TCR clone 283968 (TRBV5-4, TRBJ2-3)
CASQQPGAGGADTQYC

SEQ ID NO: 567937 - protein, 13 aa, Homo sapiens
  CDR3 for alpha chain variable domain of TCR clone 283969 (TRAV8-3, TRAJ48)
CCGCNFGNEKLTF

SEQ ID NO: 567938 - protein, 12 aa, Homo sapiens
  CDR3 for beta chain variable domain of TCR clone 283969 (TRBV7-2, TRBJ2-5)
CTSSQYQETQYF

SEQ ID NO: 567939 - protein, 15 aa, Homo sapiens
  CDR3 for alpha chain variable domain of TCR clone 283970 (TRAV2, TRAJ9)
CAVEDRGTGGFKTIF

SEQ ID NO: 567940 - protein, 17 aa, Homo sapiens
  CDR3 for beta chain variable domain of TCR clone 283970 (TRBV15, TRBJ1-2)
CATSGREIDVVNYGYTF

SEQ ID NO: 567941 - protein, 17 aa, Homo sapiens
  CDR3 for alpha chain variable domain of TCR clone 283971 (TRAV3, TRAJ42)
CAVRDRDYGGSQGNLIF

SEQ ID NO: 567942 - protein, 18 aa, Homo sapiens
  CDR3 for beta chain variable domain of TCR clone 283971 (TRBV7-3, TRBJ2-3)
CASSSTGTYPGSTDTQYF

SEQ ID NO: 567943 - protein, 13 aa, Homo sapiens
  CDR3 for alpha chain variable domain of TCR clone 283972 (TRAV13-1, TRAJ11)
CAASIRGYNTLTF

SEQ ID NO: 567944 - protein, 17 aa, Homo sapiens
  CDR3 for beta chain variable domain of TCR clone 283972 (TRBV4-3, TRBJ1-2)
CASSSRLQAGGSVGYTF

SEQ ID NO: 567945 - protein, 15 aa, Homo sapiens
  CDR3 for alpha chain variable domain of TCR clone 283973 (TRAV26-1, TRAJ29)
CIVRVEGSGNTPLVF

SEQ ID NO: 567946 - protein, 18 aa, Homo sapiens
  CDR3 for beta chain variable domain of TCR clone 283973 (TRBV18, TRBJ1-1)
CASSLPGAPQGAGTEAFF

SEQ ID NO: 567947 - protein, 13 aa, Homo sapiens
  CDR3 for alpha chain variable domain of TCR clone 283974 (TRAV21, TRAJ27)
CAARPGNAGKSTL

SEQ ID NO: 567948 - protein, 14 aa, Homo sapiens
  CDR3 for beta chain variable domain of TCR clone 283974 (TRBV20-1, TRBJ2-1)
CSAAGSGEYNEQFF

SEQ ID NO: 567949 - protein, 12 aa, Homo sapiens
  CDR3 for alpha chain variable domain of TCR clone 283975 (TRAV8-6, TRAJ20)
CAVSSNDYKLSF

SEQ ID NO: 567950 - protein, 16 aa, Homo sapiens
  CDR3 for beta chain variable domain of TCR clone 283975 (TRBV12-5, TRBJ2-5)
CASGPRTSGNQETQYF

SEQ ID NO: 567951 - protein, 12 aa, Homo sapiens
  CDR3 for alpha chain variable domain of TCR clone 283976 (TRAV12-3, TRAJ17)
CAMTLTGNKLTV

SEQ ID NO: 567952 - protein, 13 aa, Homo sapiens
  CDR3 for beta chain variable domain of TCR clone 283976 (TRBV27, TRBJ2-1)
CASRTLGVGEQFF

SEQ ID NO: 567953 - protein, 16 aa, Homo sapiens
  CDR3 for alpha chain variable domain of TCR clone 283977 (TRAV14/DV4, TRAJ15)
CAMREGSFQAGTALIF

SEQ ID NO: 567954 - protein, 20 aa, Homo sapiens
  CDR3 for beta chain variable domain of TCR clone 283977 (TRBV12-4, TRBJ2-4)
CASSRTGAVDVAKTFSTSAP

SEQ ID NO: 567955 - protein, 14 aa, Homo sapiens
  CDR3 for alpha chain variable domain of TCR clone 283978 (TRAV8-2, TRAJ4)
CVVSPSGGYNKLIF

SEQ ID NO: 567956 - protein, 15 aa, Homo sapiens
  CDR3 for beta chain variable domain of TCR clone 283978 (TRBV7-3, TRBJ2-1)
CQQLQTSGRYNEQFF

SEQ ID NO: 567957 - protein, 13 aa, Homo sapiens
  CDR3 for alpha chain variable domain of TCR clone 283979 (TRAV8-1, TRAJ39)
CAVANNAGNMLTF

SEQ ID NO: 567958 - protein, 15 aa, Homo sapiens
  CDR3 for beta chain variable domain of TCR clone 283979 (TRBV7-2, TRBJ2-1)
CASSLNRGAYNEQFC

SEQ ID NO: 567959 - protein, 13 aa, Homo sapiens
  CDR3 for alpha chain variable domain of TCR clone 283980 (TRAV12-2, TRAJ49)
CAVKPNTGNQFYF

SEQ ID NO: 567960 - protein, 15 aa, Homo sapiens
  CDR3 for beta chain variable domain of TCR clone 283980 (TRBV7-2, TRBJ2-3)
CASSSTGLETDTQYF

SEQ ID NO: 567961 - protein, 17 aa, Homo sapiens
  CDR3 for alpha chain variable domain of TCR clone 283981 (TRAV12-2, TRAJ4)
CAVNVRPVSGGYNKLIF

SEQ ID NO: 567962 - protein, 16 aa, Homo sapiens
  CDR3 for beta chain variable domain of TCR clone 283981 (TRBV7-2, TRBJ1-4)
CASSLAPGRRDEKLFF

SEQ ID NO: 567963 - protein, 14 aa, Homo sapiens
  CDR3 for alpha chain variable domain of TCR clone 283982 (TRAV12-2, TRAJ13)
CAVKKTGGYQTVTF

SEQ ID NO: 567964 - protein, 13 aa, Homo sapiens
  CDR3 for beta chain variable domain of TCR clone 283982 (TRBV15, TRBJ1-6)
CATSGGLNSPLHF

SEQ ID NO: 567965 - protein, 14 aa, Homo sapiens
  CDR3 for alpha chain variable domain of TCR clone 283983 (TRAV12-2, TRAJ5)
CAVNRSTGRRALTF

SEQ ID NO: 567966 - protein, 14 aa, Homo sapiens
  CDR3 for beta chain variable domain of TCR clone 283983 (TRBV2, TRBJ2-7)
CASSLTSGGYEQYF

SEQ ID NO: 567967 - protein, 13 aa, Homo sapiens
  CDR3 for alpha chain variable domain of TCR clone 283984 (TRAV8-3, TRAJ44)
CAMVPGTASKLTF

SEQ ID NO: 567968 - protein, 14 aa, Homo sapiens
  CDR3 for beta chain variable domain of TCR clone 283984 (TRBV11-2, TRBJ2-3)
CASSRLARTDTQYF

SEQ ID NO: 567969 - protein, 13 aa, Homo sapiens
  CDR3 for alpha chain variable domain of TCR clone 283985 (TRAV12-3, TRAJ39)
CAMIDNAGNMLTF

SEQ ID NO: 567970 - protein, 18 aa, Homo sapiens
  CDR3 for beta chain variable domain of TCR clone 283985 (TRBV9, TRBJ2-5)
CASSVAEGTNAFGETLYF

SEQ ID NO: 567971 - protein, 14 aa, Homo sapiens
  CDR3 for alpha chain variable domain of TCR clone 283986 (TRAV12-2, TRAJ45)
CAVNIRGGADGLTF

SEQ ID NO: 567972 - protein, 13 aa, Homo sapiens
  CDR3 for beta chain variable domain of TCR clone 283986 (TRBV19, TRBJ2-2)
CASSIWSTGELFF

SEQ ID NO: 567973 - protein, 14 aa, Homo sapiens
  CDR3 for alpha chain variable domain of TCR clone 283987 (TRAV26-1, TRAJ26)
CIVRATFLGQNFVF

SEQ ID NO: 567974 - protein, 16 aa, Homo sapiens
  CDR3 for beta chain variable domain of TCR clone 283987 (TRBV12-4, TRBJ2-7)
CASRSTGTGPSYEQCF

SEQ ID NO: 567975 - protein, 14 aa, Homo sapiens
  CDR3 for alpha chain variable domain of TCR clone 283988 (TRAV1-1, TRAJ23)
CAVSIYNQGGKLIF

SEQ ID NO: 567976 - protein, 16 aa, Homo sapiens
  CDR3 for beta chain variable domain of TCR clone 283988 (TRBV12-5, TRBJ2-5)
CASGPRTSGNQETQYF

SEQ ID NO: 567977 - protein, 15 aa, Homo sapiens
  CDR3 for alpha chain variable domain of TCR clone 283989 (TRAV17, TRAJ57)
CATSPSQGGSEKLVF

SEQ ID NO: 567978 - protein, 15 aa, Homo sapiens
  CDR3 for beta chain variable domain of TCR clone 283989 (TRBV7-2, TRBJ1-2)
CASSPRAGWNYGYTF

SEQ ID NO: 567979 - protein, 15 aa, Homo sapiens
  CDR3 for alpha chain variable domain of TCR clone 283990 (TRAV35, TRAJ50)
CAGQLRKTSYDKVIF

SEQ ID NO: 567980 - protein, 12 aa, Homo sapiens
  CDR3 for beta chain variable domain of TCR clone 283990 (TRBV5-1, TRBJ2-5)
CASSLGLETEYF

SEQ ID NO: 567981 - protein, 14 aa, Homo sapiens
  CDR3 for alpha chain variable domain of TCR clone 283991 (TRAV12-2, TRAJ13)
CAVKKTGVYQKVTF

SEQ ID NO: 567982 - protein, 15 aa, Homo sapiens
  CDR3 for beta chain variable domain of TCR clone 283991 (TRBV12-4, TRBJ2-5)
CASSPPTGLQETQYF

SEQ ID NO: 567983 - protein, 13 aa, Homo sapiens
  CDR3 for alpha chain variable domain of TCR clone 283992 (TRAV21, TRAJ22)
CAVTSGSARQLTF

SEQ ID NO: 567984 - protein, 19 aa, Homo sapiens
  CDR3 for beta chain variable domain of TCR clone 283992 (TRBV6-5, TRBJ2-7)
CASSYSNRGSNPFTYEQYF

SEQ ID NO: 567985 - protein, 14 aa, Homo sapiens
  CDR3 for alpha chain variable domain of TCR clone 283993 (TRAV3, TRAJ22)
CAVRDYGSARQLTF

SEQ ID NO: 567986 - protein, 13 aa, Homo sapiens
  CDR3 for beta chain variable domain of TCR clone 283993 (TRBV7-3, TRBJ2-5)
CASSFRGGETQYF

SEQ ID NO: 567987 - protein, 13 aa, Homo sapiens
  CDR3 for alpha chain variable domain of TCR clone 283994 (TRAV8-1, TRAJ23)
CAWRDNQGGKLIF

SEQ ID NO: 567988 - protein, 11 aa, Homo sapiens
  CDR3 for beta chain variable domain of TCR clone 283994 (TRBV29-1, TRBJ2-5)
CSEDRTGTQYF

SEQ ID NO: 567989 - protein, 12 aa, Homo sapiens
  CDR3 for alpha chain variable domain of TCR clone 283995 (TRAV27, TRAJ9)
CAGESGGFKTIF

SEQ ID NO: 567990 - protein, 13 aa, Homo sapiens
  CDR3 for beta chain variable domain of TCR clone 283995 (TRBV7-2, TRBJ2-2)
CASSLAVTGELFF

SEQ ID NO: 567991 - protein, 14 aa, Homo sapiens
  CDR3 for alpha chain variable domain of TCR clone 283996 (TRAV8-1, TRAJ36)
CAVNSPAGANNLFF

SEQ ID NO: 567992 - protein, 15 aa, Homo sapiens
  CDR3 for beta chain variable domain of TCR clone 283996 (TRBV7-2, TRBJ2-3)
CASSLEQGGTDTQYF

SEQ ID NO: 567993 - protein, 14 aa, Homo sapiens
  CDR3 for alpha chain variable domain of TCR clone 283997 (TRAV38-1, TRAJ28)
CAFTSGAGRYQLTF

SEQ ID NO: 567994 - protein, 18 aa, Homo sapiens
  CDR3 for beta chain variable domain of TCR clone 283997 (TRBV7-9, TRBJ1-1)
CASSKPWDTMGMNTEAVF

SEQ ID NO: 567995 - protein, 14 aa, Homo sapiens
  CDR3 for alpha chain variable domain of TCR clone 283998 (TRAV8-3, TRAJ4)
CAVGAAGGYNKLIF

SEQ ID NO: 567996 - protein, 16 aa, Homo sapiens
  CDR3 for beta chain variable domain of TCR clone 283998 (TRBV18, TRBJ2-3)
CASSPGGLASTDTQYF

SEQ ID NO: 567997 - protein, 17 aa, Homo sapiens
  CDR3 for alpha chain variable domain of TCR clone 283999 (TRAV3, TRAJ12)
CAVRDGGRMDSSYKLIF

SEQ ID NO: 567998 - protein, 14 aa, Homo sapiens
  CDR3 for beta chain variable domain of TCR clone 283999 (TRBV11-2, TRBJ1-2)
CASSLGTANYGYTL

SEQ ID NO: 567999 - protein, 14 aa, Homo sapiens
  CDR3 for alpha chain variable domain of TCR clone 284000 (TRAV12-3, TRAJ13)
CAMKNSGGYQKVTF

SEQ ID NO: 568000 - protein, 13 aa, Homo sapiens
  CDR3 for beta chain variable domain of TCR clone 284000 (TRBV12-4, TRBJ1-1)
CASSPGTGFEAFF

SEQ ID NO: 568001 - protein, 15 aa, Homo sapiens
  CDR3 for alpha chain variable domain of TCR clone 284001 (TRAV8-3, TRAJ23)
CAVGAVYNQGGKLIF

SEQ ID NO: 568002 - protein, 14 aa, Homo sapiens
  CDR3 for beta chain variable domain of TCR clone 284001 (TRBV13, TRBJ2-3)
CASSLGARTDTQYF

SEQ ID NO: 568003 - protein, 16 aa, Homo sapiens
  CDR3 for alpha chain variable domain of TCR clone 284002 (TRAV36/DV7, TRAJ33)
WRPGNKVQDSNYQLIW

SEQ ID NO: 568004 - protein, 15 aa, Homo sapiens
  CDR3 for beta chain variable domain of TCR clone 284002 (TRBV29-1, TRBJ2-1)
CSVGRPALFYNEQFY

SEQ ID NO: 568005 - protein, 11 aa, Homo sapiens
  CDR3 for alpha chain variable domain of TCR clone 284003 (TRAV17, TRAJ39)
CATNPYNILTF

SEQ ID NO: 568006 - protein, 13 aa, Homo sapiens
  CDR3 for beta chain variable domain of TCR clone 284003 (TRBV7-8, TRBJ2-1)
CASTRDAVDEQFF

SEQ ID NO: 568007 - protein, 14 aa, Homo sapiens
  CDR3 for alpha chain variable domain of TCR clone 284004 (TRAV12-3, TRAJ42)
CAMNHGGSQGNLIF

SEQ ID NO: 568008 - protein, 13 aa, Homo sapiens
  CDR3 for beta chain variable domain of TCR clone 284004 (TRBV20-1, TRBJ1-6)
CSAPLGVGSPLHF

SEQ ID NO: 568009 - protein, 14 aa, Homo sapiens
  CDR3 for alpha chain variable domain of TCR clone 284005 (TRAV9-2, TRAJ39)
CALYIYNAGNMPTF

SEQ ID NO: 568010 - protein, 15 aa, Homo sapiens
  CDR3 for beta chain variable domain of TCR clone 284005 (TRBV27, TRBJ1-6)
CASSFDRGLGSPLHF

SEQ ID NO: 568011 - protein, 14 aa, Homo sapiens
  CDR3 for alpha chain variable domain of TCR clone 284006 (TRAV1-2, TRAJ8)
CAVREDTGFQKLVF

SEQ ID NO: 568012 - protein, 12 aa, Homo sapiens
  CDR3 for beta chain variable domain of TCR clone 284006 (TRBV28, TRBJ2-3)
CASSLYRGTQYF

SEQ ID NO: 568013 - protein, 18 aa, Homo sapiens
  CDR3 for alpha chain variable domain of TCR clone 284007 (TRAV21, TRAJ52)
CAVRPSPAGGTSYGTLTF

SEQ ID NO: 568014 - protein, 17 aa, Homo sapiens
  CDR3 for beta chain variable domain of TCR clone 284007 (TRBV25-1, TRBJ2-1)
CASSAYGQGRGVYEQFF

SEQ ID NO: 568015 - protein, 15 aa, Homo sapiens
  CDR3 for alpha chain variable domain of TCR clone 284008 (TRAV3, TRAJ9)
CSVRARNTGGFKTIF

SEQ ID NO: 568016 - protein, 15 aa, Homo sapiens
  CDR3 for beta chain variable domain of TCR clone 284008 (TRBV11-3, TRBJ2-3)
CASLKDGREGDTQYF

SEQ ID NO: 568017 - protein, 12 aa, Homo sapiens
  CDR3 for alpha chain variable domain of TCR clone 284009 (TRAV13-1, TRAJ15)
CAASQAGTALIF

SEQ ID NO: 568018 - protein, 14 aa, Homo sapiens
  CDR3 for beta chain variable domain of TCR clone 284009 (TRBV19, TRBJ2-2)
CASSTLHTSGELFF

SEQ ID NO: 568019 - protein, 13 aa, Homo sapiens
  CDR3 for alpha chain variable domain of TCR clone 284010 (TRAV26-1, TRAJ48)
CIVRVVGDEKLTF

SEQ ID NO: 568020 - protein, 17 aa, Homo sapiens
  CDR3 for beta chain variable domain of TCR clone 284010 (TRBV7-3, TRBJ2-2)
CASSLSGTSGGTGEPFF

SEQ ID NO: 568021 - protein, 13 aa, Homo sapiens
  CDR3 for alpha chain variable domain of TCR clone 284011 (TRAV12-2, TRAJ20)
GAVYPSNDYKLSF

SEQ ID NO: 568022 - protein, 15 aa, Homo sapiens
  CDR3 for beta chain variable domain of TCR clone 284011 (TRBV27, TRBJ2-5)
CASSLYPRGGETQYF

SEQ ID NO: 568023 - protein, 17 aa, Homo sapiens
  CDR3 for alpha chain variable domain of TCR clone 284012 (TRAV13-1, TRAJ28)
CAASPPYSGAGSYQLTF

SEQ ID NO: 568024 - protein, 13 aa, Homo sapiens
  CDR3 for beta chain variable domain of TCR clone 284012 (TRBV20-1, TRBJ1-1)
CSARGGGNTEAFF

SEQ ID NO: 568025 - protein, 10 aa, Homo sapiens
  CDR3 for alpha chain variable domain of TCR clone 284013 (TRAV16, TRAJ22)
SAMYLRQLTF

SEQ ID NO: 568026 - protein, 16 aa, Homo sapiens
  CDR3 for beta chain variable domain of TCR clone 284013 (TRBV12-4, TRBJ1-5)
CASSRPVGGSNQPQHF

SEQ ID NO: 568027 - protein, 16 aa, Homo sapiens
  CDR3 for alpha chain variable domain of TCR clone 284014 (TRAV8-4, TRAJ5)
CAVSPLTDTGRRALTF

SEQ ID NO: 568028 - protein, 14 aa, Homo sapiens
  CDR3 for beta chain variable domain of TCR clone 284014 (TRBV19, TRBJ1-6)
CASSTDGWNSPLHY

SEQ ID NO: 568029 - protein, 14 aa, Homo sapiens
  CDR3 for alpha chain variable domain of TCR clone 284015 (TRAV29/DV5, TRAJ20)
CAASAPIEDSKLSF

SEQ ID NO: 568030 - protein, 15 aa, Homo sapiens
  CDR3 for beta chain variable domain of TCR clone 284015 (TRBV6-1, TRBJ2-1)
CASSEAAYSYNEQFF

SEQ ID NO: 568031 - protein, 14 aa, Homo sapiens
  CDR3 for alpha chain variable domain of TCR clone 284016 (TRAV8-1, TRAJ32)
CAVNARGATNKLIF

SEQ ID NO: 568032 - protein, 14 aa, Homo sapiens
  CDR3 for beta chain variable domain of TCR clone 284016 (TRBV19, TRBJ2-1)
CASPTFVLSGEQFF

SEQ ID NO: 568033 - protein, 16 aa, Homo sapiens
  CDR3 for alpha chain variable domain of TCR clone 284017 (TRAV4, TRAJ22)
CLVGDLYSGSARQLTF

SEQ ID NO: 568034 - protein, 14 aa, Homo sapiens
  CDR3 for beta chain variable domain of TCR clone 284017 (TRBV2, TRBJ2-3)
CASSEGQNTDTQYF

SEQ ID NO: 568035 - protein, 22 aa, Homo sapiens
  CDR3 for alpha chain variable domain of TCR clone 284018 (TRAV8-6, TRAJ6)
CAATLGEEATYLHLEEEPALLF

SEQ ID NO: 568036 - protein, 15 aa, Homo sapiens
  CDR3 for beta chain variable domain of TCR clone 284018 (TRBV7-2, TRBJ1-1)
CASSPQGGENTEAFF

SEQ ID NO: 568037 - protein, 12 aa, Homo sapiens
  CDR3 for alpha chain variable domain of TCR clone 284019 (TRAV12-2, TRAJ24)
CAVTPADSRGEI

SEQ ID NO: 568038 - protein, 13 aa, Homo sapiens
  CDR3 for beta chain variable domain of TCR clone 284019 (TRBV19, TRBJ1-2)
CASSVPGQDGYTF

SEQ ID NO: 568039 - protein, 12 aa, Homo sapiens
  CDR3 for alpha chain variable domain of TCR clone 284020 (TRAV8-3, TRAJ26)
CSGDNYGQNFVF

SEQ ID NO: 568040 - protein, 12 aa, Homo sapiens
  CDR3 for beta chain variable domain of TCR clone 284020 (TRBV11-2, TRBJ2-2)
CASSLGGGELFF

SEQ ID NO: 568041 - protein, 14 aa, Homo sapiens
  CDR3 for alpha chain variable domain of TCR clone 284021 (TRAV14/DV4, TRAJ26)
CAMREGTYGQNFVF

SEQ ID NO: 568042 - protein, 13 aa, Homo sapiens
  CDR3 for beta chain variable domain of TCR clone 284021 (TRBV2, TRBJ2-2)
CASRAWRTGELFF

SEQ ID NO: 568043 - protein, 13 aa, Homo sapiens
  CDR3 for alpha chain variable domain of TCR clone 284022 (TRAV27, TRAJ56)
CAGKPGANRKLTF

SEQ ID NO: 568044 - protein, 17 aa, Homo sapiens
  CDR3 for beta chain variable domain of TCR clone 284022 (TRBV5-1, TRBJ2-7)
FAPAADNPGQIPYEQYF

SEQ ID NO: 568045 - protein, 12 aa, Homo sapiens
  CDR3 for alpha chain variable domain of TCR clone 284023 (TRAV27, TRAJ35)
CAGADFGNVLHC

SEQ ID NO: 568046 - protein, 16 aa, Homo sapiens
  CDR3 for beta chain variable domain of TCR clone 284023 (TRBV6-1, TRBJ2-1)
CASISRQGGYYNEQFF

SEQ ID NO: 568047 - protein, 10 aa, Homo sapiens
  CDR3 for alpha chain variable domain of TCR clone 284024 (TRAV36/DV7, TRAJ49)
CSLTGNQFYF

SEQ ID NO: 568048 - protein, 13 aa, Homo sapiens
  CDR3 for beta chain variable domain of TCR clone 284024 (TRBV4-1, TRBJ2-7)
CASSQGQAYEQYF

SEQ ID NO: 568049 - protein, 14 aa, Homo sapiens
  CDR3 for alpha chain variable domain of TCR clone 284025 (TRAV27, TRAJ22)
CAGLPSGSARQLTF

SEQ ID NO: 568050 - protein, 12 aa, Homo sapiens
  CDR3 for beta chain variable domain of TCR clone 284025 (TRBV19, TRBJ1-5)
CASSIAQQPQHF

SEQ ID NO: 568051 - protein, 16 aa, Homo sapiens
  CDR3 for alpha chain variable domain of TCR clone 284026 (TRAV14/DV4, TRAJ54)
CAMREGRIQGAQKLVF

SEQ ID NO: 568052 - protein, 16 aa, Homo sapiens
  CDR3 for beta chain variable domain of TCR clone 284026 (TRBV15, TRBJ2-7)
CATSRDGGIPSYEQYF

SEQ ID NO: 568053 - protein, 14 aa, Homo sapiens
  CDR3 for alpha chain variable domain of TCR clone 284027 (TRAV4, TRAJ17)
CLVGDPSVGNKLTF

SEQ ID NO: 568054 - protein, 20 aa, Homo sapiens
  CDR3 for beta chain variable domain of TCR clone 284027 (TRBV20-1, TRBJ2-1)
CSARPYSVAGGPSYYNEQFF

SEQ ID NO: 568055 - protein, 13 aa, Homo sapiens
  CDR3 for alpha chain variable domain of TCR clone 284028 (TRAV27, TRAJ56)
CAGKPGANSKLTF

SEQ ID NO: 568056 - protein, 17 aa, Homo sapiens
  CDR3 for beta chain variable domain of TCR clone 284028 (TRBV5-1, TRBJ2-7)
FAPAADNPGQMPYEQYF

SEQ ID NO: 568057 - protein, 12 aa, Homo sapiens
  CDR3 for alpha chain variable domain of TCR clone 284029 (TRAV40, TRAJ20)
CLRGLNDYKLSF

SEQ ID NO: 568058 - protein, 14 aa, Homo sapiens
  CDR3 for beta chain variable domain of TCR clone 284029 (TRBV19, TRBJ2-1)
CASSSGRDYNEQSF

SEQ ID NO: 568059 - protein, 13 aa, Homo sapiens
  CDR3 for alpha chain variable domain of TCR clone 284030 (TRAV17, TRAJ34)
CATDLYNTDKLIF

SEQ ID NO: 568060 - protein, 14 aa, Homo sapiens
  CDR3 for beta chain variable domain of TCR clone 284030 (TRBV20-1, TRBJ2-5)
CSASDSGSGETQYF

SEQ ID NO: 568061 - protein, 17 aa, Homo sapiens
  CDR3 for alpha chain variable domain of TCR clone 284031 (TRAV8-3, TRAJ50)
CAVGAVDTETSYDKVIV

SEQ ID NO: 568062 - protein, 13 aa, Homo sapiens
  CDR3 for beta chain variable domain of TCR clone 284031 (TRBV7-9, TRBJ2-2)
CASSSAGTGELFF

SEQ ID NO: 568063 - protein, 15 aa, Homo sapiens
  CDR3 for alpha chain variable domain of TCR clone 284032 (TRAV12-2, TRAJ53)
CAVNGGGGSNYKLTF

SEQ ID NO: 568064 - protein, 14 aa, Homo sapiens
  CDR3 for beta chain variable domain of TCR clone 284032 (TRBV11-2, TRBJ2-7)
CASSPSTTSYEQYF

SEQ ID NO: 568065 - protein, 13 aa, Homo sapiens
  CDR3 for alpha chain variable domain of TCR clone 284033 (TRAV21, TRAJ27)
CAARPGNAGKSTF

SEQ ID NO: 568066 - protein, 16 aa, Homo sapiens
  CDR3 for beta chain variable domain of TCR clone 284033 (TRBV11-2, TRBJ2-7)
CASSPLAGGPRYEQYF

SEQ ID NO: 568067 - protein, 13 aa, Homo sapiens
  CDR3 for alpha chain variable domain of TCR clone 284034 (TRAV20, TRAJ31)
CAVQVWNNARLMF

SEQ ID NO: 568068 - protein, 16 aa, Homo sapiens
  CDR3 for beta chain variable domain of TCR clone 284034 (TRBV6-6, TRBJ2-1)
CASSWGGQGPYNEQFF

SEQ ID NO: 568069 - protein, 15 aa, Homo sapiens
  CDR3 for alpha chain variable domain of TCR clone 284035 (TRAV8-3, TRAJ44)
CAVGAGAGTASKLTF

SEQ ID NO: 568070 - protein, 12 aa, Homo sapiens
  CDR3 for beta chain variable domain of TCR clone 284035 (TRBV7-8, TRBJ2-4)
CASSLGGNIRYF

SEQ ID NO: 568071 - protein, 14 aa, Homo sapiens
  CDR3 for alpha chain variable domain of TCR clone 284036 (TRAV8-4, TRAJ54)
CAVSEVLGPQKLVF

SEQ ID NO: 568072 - protein, 13 aa, Homo sapiens
  CDR3 for beta chain variable domain of TCR clone 284036 (TRBV27, TRBJ2-7)
CASSFVSSYEQYF

SEQ ID NO: 568073 - protein, 12 aa, Homo sapiens
  CDR3 for alpha chain variable domain of TCR clone 284037 (TRAV8-2, TRAJ30)
CVVSDRDDKIIF

SEQ ID NO: 568074 - protein, 14 aa, Homo sapiens
  CDR3 for beta chain variable domain of TCR clone 284037 (TRBV11-2, TRBJ2-7)
CASSSTGEGYEQYF

SEQ ID NO: 568075 - protein, 14 aa, Homo sapiens
  CDR3 for alpha chain variable domain of TCR clone 284038 (TRAV12-2, TRAJ13)
CAVKKTGGYPKVTF

SEQ ID NO: 568076 - protein, 11 aa, Homo sapiens
  CDR3 for beta chain variable domain of TCR clone 284038 (TRBV29-1, TRBJ2-5)
CSEDRTGTQYF

SEQ ID NO: 568077 - protein, 13 aa, Homo sapiens
  CDR3 for alpha chain variable domain of TCR clone 284039 (TRAV13-2, TRAJ13)
CAERPGGYQKVTF

SEQ ID NO: 568078 - protein, 14 aa, Homo sapiens
  CDR3 for beta chain variable domain of TCR clone 284039 (TRBV27, TRBJ2-1)
CAGSIAETYNEQFF

SEQ ID NO: 568079 - protein, 15 aa, Homo sapiens
  CDR3 for alpha chain variable domain of TCR clone 284040 (TRAV23/DV6, TRAJ44)
CAAMKPTGTASKLTF

SEQ ID NO: 568080 - protein, 16 aa, Homo sapiens
  CDR3 for beta chain variable domain of TCR clone 284040 (TRBV28, TRBJ2-5)
CATSGWSSRLKETQYF

SEQ ID NO: 568081 - protein, 16 aa, Homo sapiens
  CDR3 for alpha chain variable domain of TCR clone 284041 (TRAV30, TRAJ24)
CSTEIVDADSWGKFQF

SEQ ID NO: 568082 - protein, 13 aa, Homo sapiens
  CDR3 for beta chain variable domain of TCR clone 284041 (TRBV15, TRBJ1-6)
CATSGGLNSPLHF

SEQ ID NO: 568083 - protein, 15 aa, Homo sapiens
  CDR3 for alpha chain variable domain of TCR clone 284042 (TRAV21, TRAJ24)
CAARSSTDSWGKLQF

SEQ ID NO: 568084 - protein, 15 aa, Homo sapiens
  CDR3 for beta chain variable domain of TCR clone 284042 (TRBV4-1, TRBJ2-7)
CASSQKTGRLYELYF

SEQ ID NO: 568085 - protein, 13 aa, Homo sapiens
  CDR3 for alpha chain variable domain of TCR clone 284043 (TRAV12-3, TRAJ33)
CAMSVNSNYQLIW

SEQ ID NO: 568086 - protein, 14 aa, Homo sapiens
  CDR3 for beta chain variable domain of TCR clone 284043 (TRBV25-1, TRBJ1-2)
CASSDTTGVVGYTF

SEQ ID NO: 568087 - protein, 14 aa, Homo sapiens
  CDR3 for alpha chain variable domain of TCR clone 284044 (TRAV8-4, TRAJ5)
CAVSTDTSRRALTF

SEQ ID NO: 568088 - protein, 14 aa, Homo sapiens
  CDR3 for beta chain variable domain of TCR clone 284044 (TRBV5-1, TRBJ2-2)
CASSLGGGSGELFF

SEQ ID NO: 568089 - protein, 14 aa, Homo sapiens
  CDR3 for alpha chain variable domain of TCR clone 284045 (TRAV2, TRAJ9)
CAVEDRSGGFKTNF

SEQ ID NO: 568090 - protein, 15 aa, Homo sapiens
  CDR3 for beta chain variable domain of TCR clone 284045 (TRBV15, TRBJ2-1)
CATSRDLGSYNEQFF

SEQ ID NO: 568091 - protein, 15 aa, Homo sapiens
  CDR3 for alpha chain variable domain of TCR clone 284046 (TRAV12-1, TRAJ5)
CVVNMLETGRRALTF

SEQ ID NO: 568092 - protein, 12 aa, Homo sapiens
  CDR3 for beta chain variable domain of TCR clone 284046 (TRBV11-2, TRBJ2-2)
CASSIGGGELFF

SEQ ID NO: 568093 - protein, 14 aa, Homo sapiens
  CDR3 for alpha chain variable domain of TCR clone 284047 (TRAV23/DV6, TRAJ23)
CAAGPYNQGGKLIF

SEQ ID NO: 568094 - protein, 15 aa, Homo sapiens
  CDR3 for beta chain variable domain of TCR clone 284047 (TRBV9, TRBJ1-6)
CASSVAGTGDSPLHF

SEQ ID NO: 568095 - protein, 21 aa, Homo sapiens
  CDR3 for alpha chain variable domain of TCR clone 284048 (TRAV12-1, TRAJ37)
CVVNGGLGQHRQTNLWARDNF

SEQ ID NO: 568096 - protein, 12 aa, Homo sapiens
  CDR3 for beta chain variable domain of TCR clone 284048 (TRBV20-1, TRBJ1-2)
CSAPGFNYGYTF

SEQ ID NO: 568097 - protein, 10 aa, Homo sapiens
  CDR3 for alpha chain variable domain of TCR clone 284049 (TRAV23/DV6, TRAJ57)
CAASSTLSQG

SEQ ID NO: 568098 - protein, 14 aa, Homo sapiens
  CDR3 for beta chain variable domain of TCR clone 284049 (TRBV12-4, TRBJ2-2)
CASRPGVNTGELFF

SEQ ID NO: 568099 - protein, 16 aa, Homo sapiens
  CDR3 for alpha chain variable domain of TCR clone 284050 (TRAV30, TRAJ24)
CGTEIVDADSWGNSSL

SEQ ID NO: 568100 - protein, 12 aa, Homo sapiens
  CDR3 for beta chain variable domain of TCR clone 284050 (TRBV6-3, TRBJ2-7)
CASSLTPYEQYF

SEQ ID NO: 568101 - protein, 16 aa, Homo sapiens
  CDR3 for alpha chain variable domain of TCR clone 284051 (TRAV30, TRAJ24)
CGTEIVDADSWGKFQF

SEQ ID NO: 568102 - protein, 22 aa, Homo sapiens
  CDR3 for beta chain variable domain of TCR clone 284051 (TRBV11-3, TRBJ2-2)
LGTRPCISVPAAQGGTPGSCFF

SEQ ID NO: 568103 - protein, 17 aa, Homo sapiens
  CDR3 for alpha chain variable domain of TCR clone 284052 (TRAV13-2, TRAJ42)
CAEKGKNYGGSQGNLIF

SEQ ID NO: 568104 - protein, 16 aa, Homo sapiens
  CDR3 for beta chain variable domain of TCR clone 284052 (TRBV7-9, TRBJ2-1)
CASSLGTGWDYNEHFF

SEQ ID NO: 568105 - protein, 14 aa, Homo sapiens
  CDR3 for alpha chain variable domain of TCR clone 284053 (TRAV13-1, TRAJ5)
CAASGGTGRRALTF

SEQ ID NO: 568106 - protein, 15 aa, Homo sapiens
  CDR3 for beta chain variable domain of TCR clone 284053 (TRBV20-1, TRBJ2-1)
CSARSPGGPGNEQFF

SEQ ID NO: 568107 - protein, 14 aa, Homo sapiens
  CDR3 for alpha chain variable domain of TCR clone 284054 (TRAV2, TRAJ37)
CAVDFTSNTGKLIF

SEQ ID NO: 568108 - protein, 15 aa, Homo sapiens
  CDR3 for beta chain variable domain of TCR clone 284054 (TRBV20-1, TRBJ1-1)
CSVSRGVTGYTEAFF

SEQ ID NO: 568109 - protein, 14 aa, Homo sapiens
  CDR3 for alpha chain variable domain of TCR clone 284055 (TRAV2, TRAJ9)
GAVEDRSGGFKTIF

SEQ ID NO: 568110 - protein, 15 aa, Homo sapiens
  CDR3 for beta chain variable domain of TCR clone 284055 (TRBV7-2, TRBJ2-1)
CASSSGLAGGNEQFF

SEQ ID NO: 568111 - protein, 13 aa, Homo sapiens
  CDR3 for alpha chain variable domain of TCR clone 284056 (TRAV8-3, TRAJ36)
CAVGATGANSLFF

SEQ ID NO: 568112 - protein, 16 aa, Homo sapiens
  CDR3 for beta chain variable domain of TCR clone 284056 (TRBV29-1, TRBJ2-7)
CSVEDAEDGTAYEQYF

SEQ ID NO: 568113 - protein, 12 aa, Homo sapiens
  CDR3 for alpha chain variable domain of TCR clone 284057 (TRAV1-1, TRAJ23)
CAVTNQGGKLIF

SEQ ID NO: 568114 - protein, 13 aa, Homo sapiens
  CDR3 for beta chain variable domain of TCR clone 284057 (TRBV12-4, TRBJ2-7)
CASSLSGVYEQYF

SEQ ID NO: 568115 - protein, 13 aa, Homo sapiens
  CDR3 for alpha chain variable domain of TCR clone 284058 (TRAV38-2/DV8, TRAJ34)
CAYRTWNTDKLIF

SEQ ID NO: 568116 - protein, 14 aa, Homo sapiens
  CDR3 for beta chain variable domain of TCR clone 284058 (TRBV7-3, TRBJ1-1)
CASSLKGGNTEAFF

SEQ ID NO: 568117 - protein, 15 aa, Homo sapiens
  CDR3 for alpha chain variable domain of TCR clone 284059 (TRAV26-1, TRAJ29)
CIVRVEGSGNTPLVL

SEQ ID NO: 568118 - protein, 14 aa, Homo sapiens
  CDR3 for beta chain variable domain of TCR clone 284059 (TRBV28, TRBJ2-5)
CASTGAGGVETQYF

SEQ ID NO: 568119 - protein, 12 aa, Homo sapiens
  CDR3 for alpha chain variable domain of TCR clone 284060 (TRAV12-3, TRAJ39)
CAMTQAGNMLTF

SEQ ID NO: 568120 - protein, 14 aa, Homo sapiens
  CDR3 for beta chain variable domain of TCR clone 284060 (TRBV20-1, TRBJ1-1)
CSAQTRIGGTEAFF

SEQ ID NO: 568121 - protein, 14 aa, Homo sapiens
  CDR3 for alpha chain variable domain of TCR clone 284061 (TRAV12-3, TRAJ10)
SHLPLKGGGNKLTF

SEQ ID NO: 568122 - protein, 20 aa, Homo sapiens
  CDR3 for beta chain variable domain of TCR clone 284061 (TRBV7-8, TRBJ2-2)
CASSHLFPGPTIHITGELFF

SEQ ID NO: 568123 - protein, 14 aa, Homo sapiens
  CDR3 for alpha chain variable domain of TCR clone 284062 (TRAV17, TRAJ57)
CATDPQGGSEKLVF

SEQ ID NO: 568124 - protein, 15 aa, Homo sapiens
  CDR3 for beta chain variable domain of TCR clone 284062 (TRBV12-4, TRBJ1-2)
CASRLGVAGNYGDTF

SEQ ID NO: 568125 - protein, 10 aa, Homo sapiens
  CDR3 for alpha chain variable domain of TCR clone 284063 (TRAV30, TRAJ16)
CGTGGQKLLF

SEQ ID NO: 568126 - protein, 11 aa, Homo sapiens
  CDR3 for beta chain variable domain of TCR clone 284063 (TRBV12-4, TRBJ2-3)
CASTATDTQYF

SEQ ID NO: 568127 - protein, 13 aa, Homo sapiens
  CDR3 for alpha chain variable domain of TCR clone 284064 (TRAV1-2, TRAJ12)
CAVSIDSSYKLIF

SEQ ID NO: 568128 - protein, 17 aa, Homo sapiens
  CDR3 for beta chain variable domain of TCR clone 284064 (TRBV11-2, TRBJ2-1)
CASSLYPPGVEYNEQFF

SEQ ID NO: 568129 - protein, 14 aa, Homo sapiens
  CDR3 for alpha chain variable domain of TCR clone 284065 (TRAV38-1, TRAJ29)
CAFITPSGNTPTVF

SEQ ID NO: 568130 - protein, 14 aa, Homo sapiens
  CDR3 for beta chain variable domain of TCR clone 284065 (TRBV18, TRBJ2-7)
CASSPRGGAYEQYF

SEQ ID NO: 568131 - protein, 14 aa, Homo sapiens
  CDR3 for alpha chain variable domain of TCR clone 284066 (TRAV3, TRAJ21)
CAVESQANFNKFNF

SEQ ID NO: 568132 - protein, 12 aa, Homo sapiens
  CDR3 for beta chain variable domain of TCR clone 284066 (TRBV6-3, TRBJ2-7)
CASSLTPYEQYF

SEQ ID NO: 568133 - protein, 10 aa, Homo sapiens
  CDR3 for alpha chain variable domain of TCR clone 284067 (TRAV30, TRAJ16)
CGTGGQKLLF

SEQ ID NO: 568134 - protein, 15 aa, Homo sapiens
  CDR3 for beta chain variable domain of TCR clone 284067 (TRBV7-9, TRBJ1-6)
CASSSPGRGNSPLHF

SEQ ID NO: 568135 - protein, 14 aa, Homo sapiens
  CDR3 for alpha chain variable domain of TCR clone 284068 (TRAV17, TRAJ57)
CATDPQGGSEKLVF

SEQ ID NO: 568136 - protein, 16 aa, Homo sapiens
  CDR3 for beta chain variable domain of TCR clone 284068 (TRBV7-3, TRBJ2-1)
CASSLSGGVHYNEQFF

SEQ ID NO: 568137 - protein, 17 aa, Homo sapiens
  CDR3 for alpha chain variable domain of TCR clone 284069 (TRAV3, TRAJ6)
CAVRDGPRAGGSYIPTF

SEQ ID NO: 568138 - protein, 14 aa, Homo sapiens
  CDR3 for beta chain variable domain of TCR clone 284069 (TRBV7-8, TRBJ1-2)
CASSPDSLSYGYTF

SEQ ID NO: 568139 - protein, 11 aa, Homo sapiens
  CDR3 for alpha chain variable domain of TCR clone 284070 (TRAV1-2, TRAJ20)
CAVANDYKLSF

SEQ ID NO: 568140 - protein, 18 aa, Homo sapiens
  CDR3 for beta chain variable domain of TCR clone 284070 (TRBV20-1, TRBJ2-6)
CSAETTPTHGSGANVLLS

SEQ ID NO: 568141 - protein, 15 aa, Homo sapiens
  CDR3 for alpha chain variable domain of TCR clone 284071 (TRAV26-1, TRAJ29)
SIVRVEGSGKTPLVF

SEQ ID NO: 568142 - protein, 15 aa, Homo sapiens
  CDR3 for beta chain variable domain of TCR clone 284071 (TRBV7-9, TRBJ1-5)
CASSHGHQPNQPQHF

SEQ ID NO: 568143 - protein, 14 aa, Homo sapiens
  CDR3 for alpha chain variable domain of TCR clone 284072 (TRAV12-2, TRAJ17)
CPVLFKAAGNKLTF

SEQ ID NO: 568144 - protein, 14 aa, Homo sapiens
  CDR3 for beta chain variable domain of TCR clone 284072 (TRBV15, TRBJ1-2)
CATSRDFDRVGYTF

SEQ ID NO: 568145 - protein, 17 aa, Homo sapiens
  CDR3 for alpha chain variable domain of TCR clone 284073 (TRAV14/DV4, TRAJ4)
CAMREASGRGGYTKLIF

SEQ ID NO: 568146 - protein, 12 aa, Homo sapiens
  CDR3 for beta chain variable domain of TCR clone 284073 (TRBV12-4, TRBJ2-7)
CASSLGGYEQYF

SEQ ID NO: 568147 - protein, 14 aa, Homo sapiens
  CDR3 for alpha chain variable domain of TCR clone 284074 (TRAV20, TRAJ20)
CAVRRGYNDYKLSF

SEQ ID NO: 568148 - protein, 13 aa, Homo sapiens
  CDR3 for beta chain variable domain of TCR clone 284074 (TRBV19, TRBJ2-5)
CASSGTAPETQYF

SEQ ID NO: 568149 - protein, 16 aa, Homo sapiens
  CDR3 for alpha chain variable domain of TCR clone 284075 (TRAV38-1, TRAJ32)
CAFMPFLGGATNKLIF

SEQ ID NO: 568150 - protein, 15 aa, Homo sapiens
  CDR3 for beta chain variable domain of TCR clone 284075 (TRBV7-9, TRBJ2-7)
CASSFAGPTSSTSGR

SEQ ID NO: 568151 - protein, 14 aa, Homo sapiens
  CDR3 for alpha chain variable domain of TCR clone 284076 (TRAV35, TRAJ42)
CAGRYGGRQGNLIF

SEQ ID NO: 568152 - protein, 15 aa, Homo sapiens
  CDR3 for beta chain variable domain of TCR clone 284076 (TRBV7-9, TRBJ2-1)
CASSLGWGRANEQFF

SEQ ID NO: 568153 - protein, 12 aa, Homo sapiens
  CDR3 for alpha chain variable domain of TCR clone 284077 (TRAV17, TRAJ39)
CATGAAGIMLTF

SEQ ID NO: 568154 - protein, 14 aa, Homo sapiens
  CDR3 for beta chain variable domain of TCR clone 284077 (TRBV7-9, TRBJ1-2)
CASSRQGANYGYTF

SEQ ID NO: 568155 - protein, 12 aa, Homo sapiens
  CDR3 for alpha chain variable domain of TCR clone 284078 (TRAV1-1, TRAJ8)
CAGGTGVQKLVF

SEQ ID NO: 568156 - protein, 15 aa, Homo sapiens
  CDR3 for beta chain variable domain of TCR clone 284078 (TRBV7-9, TRBJ1-4)
CASSRTGGFNEKLFV

SEQ ID NO: 568157 - protein, 12 aa, Homo sapiens
  CDR3 for alpha chain variable domain of TCR clone 284079 (TRAV29/DV5, TRAJ41)
CAAISSGYALNF

SEQ ID NO: 568158 - protein, 12 aa, Homo sapiens
  CDR3 for beta chain variable domain of TCR clone 284079 (TRBV11-2, TRBJ2-1)
CASSPGNNEQFF

SEQ ID NO: 568159 - protein, 18 aa, Homo sapiens
  CDR3 for alpha chain variable domain of TCR clone 284080 (TRAV21, TRAJ52)
CAVRPSPAGGTSYGKLTF

SEQ ID NO: 568160 - protein, 15 aa, Homo sapiens
  CDR3 for beta chain variable domain of TCR clone 284080 (TRBV20-1, TRBJ2-7)
CSARDRVSWMDEQYF

SEQ ID NO: 568161 - protein, 12 aa, Homo sapiens
  CDR3 for alpha chain variable domain of TCR clone 284081 (TRAV12-3, TRAJ17)
CAMTLTGNKLTF

SEQ ID NO: 568162 - protein, 18 aa, Homo sapiens
  CDR3 for beta chain variable domain of TCR clone 284081 (TRBV18, TRBJ1-1)
CASSLPGAPQGAGTEAFF

SEQ ID NO: 568163 - protein, 15 aa, Homo sapiens
  CDR3 for alpha chain variable domain of TCR clone 284082 (TRAV2, TRAJ15)
CAVEDRGQAGTALIF

SEQ ID NO: 568164 - protein, 13 aa, Homo sapiens
  CDR3 for beta chain variable domain of TCR clone 284082 (TRBV7-9, TRBJ2-3)
CASSPGSTDTQYF

SEQ ID NO: 568165 - protein, 14 aa, Homo sapiens
  CDR3 for alpha chain variable domain of TCR clone 284083 (TRAV12-2, TRAJ36)
CSVKISTGANNLFF

SEQ ID NO: 568166 - protein, 14 aa, Homo sapiens
  CDR3 for beta chain variable domain of TCR clone 284083 (TRBV25-1, TRBJ1-2)
CASSDTTGVVGYTF

SEQ ID NO: 568167 - protein, 14 aa, Homo sapiens
  CDR3 for alpha chain variable domain of TCR clone 284084 (TRAV23/DV6, TRAJ21)
GAAYKSGPRDKFYF

SEQ ID NO: 568168 - protein, 15 aa, Homo sapiens
  CDR3 for beta chain variable domain of TCR clone 284084 (TRBV5-4, TRBJ2-2)
CASSLTSRGTGELFF

SEQ ID NO: 568169 - protein, 13 aa, Homo sapiens
  CDR3 for alpha chain variable domain of TCR clone 284085 (TRAV5, TRAJ30)
CAEIANRDDKIIF

SEQ ID NO: 568170 - protein, 14 aa, Homo sapiens
  CDR3 for beta chain variable domain of TCR clone 284085 (TRBV4-1, TRBJ2-2)
CASSQAVNTGELIF

SEQ ID NO: 568171 - protein, 16 aa, Homo sapiens
  CDR3 for alpha chain variable domain of TCR clone 284086 (TRAV26-2, TRAJ37)
CILSDFGSSNTGKLIF

SEQ ID NO: 568172 - protein, 15 aa, Homo sapiens
  CDR3 for beta chain variable domain of TCR clone 284086 (TRBV6-5, TRBJ2-7)
CASRSLAVSSYEQYF

SEQ ID NO: 568173 - protein, 14 aa, Homo sapiens
  CDR3 for alpha chain variable domain of TCR clone 284087 (TRAV26-1, TRAJ22)
CIVRVYGSARQLTF

SEQ ID NO: 568174 - protein, 17 aa, Homo sapiens
  CDR3 for beta chain variable domain of TCR clone 284087 (TRBV7-3, TRBJ2-3)
CASIPGGLAGFGDTQYF

SEQ ID NO: 568175 - protein, 13 aa, Homo sapiens
  CDR3 for alpha chain variable domain of TCR clone 284088 (TRAV1-2, TRAJ12)
CAVSMDSSYKLIF

SEQ ID NO: 568176 - protein, 15 aa, Homo sapiens
  CDR3 for beta chain variable domain of TCR clone 284088 (TRBV27, TRBJ2-5)
GASSLIPSGGETQYF

SEQ ID NO: 568177 - protein, 14 aa, Homo sapiens
  CDR3 for alpha chain variable domain of TCR clone 284089 (TRAV23/DV6, TRAJ22)
CADISSGFARQLTF

SEQ ID NO: 568178 - protein, 16 aa, Homo sapiens
  CDR3 for beta chain variable domain of TCR clone 284089 (TRBV5-7, TRBJ2-5)
CASIRGQTGYQETQYF

SEQ ID NO: 568179 - protein, 16 aa, Homo sapiens
  CDR3 for alpha chain variable domain of TCR clone 284090 (TRAV16, TRAJ52)
CALSAAGGTSYGKRTF

SEQ ID NO: 568180 - protein, 19 aa, Homo sapiens
  CDR3 for beta chain variable domain of TCR clone 284090 (TRBV19, TRBJ2-5)
CASSIGQVTDFFLGETQYF

SEQ ID NO: 568181 - protein, 16 aa, Homo sapiens
  CDR3 for alpha chain variable domain of TCR clone 284091 (TRAV3, TRAJ21)
CAVRDIERGNFNKFYF

SEQ ID NO: 568182 - protein, 19 aa, Homo sapiens
  CDR3 for beta chain variable domain of TCR clone 284091 (TRBV7-2, TRBJ2-3)
CASSFLSRNWGGGTDTQYF

SEQ ID NO: 568183 - protein, 14 aa, Homo sapiens
  CDR3 for alpha chain variable domain of TCR clone 284092 (TRAV13-1, TRAJ5)
CAAHPDTGRRALTF

SEQ ID NO: 568184 - protein, 15 aa, Homo sapiens
  CDR3 for beta chain variable domain of TCR clone 284092 (TRBV7-2, TRBJ2-7)
CASSFKGALTYEQYF

SEQ ID NO: 568185 - protein, 16 aa, Homo sapiens
  CDR3 for alpha chain variable domain of TCR clone 284093 (TRAV8-6, TRAJ58)
CAVSDHTETSGSRLTV

SEQ ID NO: 568186 - protein, 14 aa, Homo sapiens
  CDR3 for beta chain variable domain of TCR clone 284093 (TRBV7-2, TRBJ1-5)
CASSPRGGPQPQHL

SEQ ID NO: 568187 - protein, 17 aa, Homo sapiens
  CDR3 for alpha chain variable domain of TCR clone 284094 (TRAV3, TRAJ6)
CAVRDVPRAGGSYITTF

SEQ ID NO: 568188 - protein, 13 aa, Homo sapiens
  CDR3 for beta chain variable domain of TCR clone 284094 (TRBV20-1, TRBJ2-5)
CSARYTGEETQYF

SEQ ID NO: 568189 - protein, 15 aa, Homo sapiens
  CDR3 for alpha chain variable domain of TCR clone 284095 (TRAV3, TRAJ5)
CAVRDRKTGRRALTF

SEQ ID NO: 568190 - protein, 15 aa, Homo sapiens
  CDR3 for beta chain variable domain of TCR clone 284095 (TRBV7-8, TRBJ2-1)
CASNLADSLYNEQFF

SEQ ID NO: 568191 - protein, 11 aa, Homo sapiens
  CDR3 for alpha chain variable domain of TCR clone 284096 (TRAV2, TRAJ33)
CAVECNYQLIW

SEQ ID NO: 568192 - protein, 14 aa, Homo sapiens
  CDR3 for beta chain variable domain of TCR clone 284096 (TRBV12-5, TRBJ2-5)
CASGSRTHQETQYF

SEQ ID NO: 568193 - protein, 13 aa, Homo sapiens
  CDR3 for alpha chain variable domain of TCR clone 284097 (TRAV26-2, TRAJ43)
CILRAVNNNDMRF

SEQ ID NO: 568194 - protein, 10 aa, Homo sapiens
  CDR3 for beta chain variable domain of TCR clone 284097 (TRBV2, TRBJ2-5)
CASSAATQYF

SEQ ID NO: 568195 - protein, 22 aa, Homo sapiens
  CDR3 for alpha chain variable domain of TCR clone 284098 (TRAV3, )
CAVRDCLNAGNNNIQNPDPAVY

SEQ ID NO: 568196 - protein, 19 aa, Homo sapiens
  CDR3 for beta chain variable domain of TCR clone 284098 (TRBV7-2, TRBJ2-3)
CASSFLSRNWGGGTDTQYF

SEQ ID NO: 568197 - protein, 15 aa, Homo sapiens
  CDR3 for alpha chain variable domain of TCR clone 284099 (TRAV25, TRAJ52)
CAGTSGGTSYGKLTF

SEQ ID NO: 568198 - protein, 13 aa, Homo sapiens
  CDR3 for beta chain variable domain of TCR clone 284099 (TRBV6-5, TRBJ2-5)
CACSPQGGETQYF

SEQ ID NO: 568199 - protein, 12 aa, Homo sapiens
  CDR3 for alpha chain variable domain of TCR clone 284100 (TRAV13-2, TRAJ23)
CAERHRGGKLIF

SEQ ID NO: 568200 - protein, 14 aa, Homo sapiens
  CDR3 for beta chain variable domain of TCR clone 284100 (TRBV5-5, TRBJ1-2)
CASSLDPYNYGYTF

SEQ ID NO: 568201 - protein, 16 aa, Homo sapiens
  CDR3 for alpha chain variable domain of TCR clone 284101 (TRAV3, TRAJ5)
CAVRNLMDTGRRALTF

SEQ ID NO: 568202 - protein, 16 aa, Homo sapiens
  CDR3 for beta chain variable domain of TCR clone 284101 (TRBV4-2, TRBJ2-7)
CASSQEGLAISYEEYF

SEQ ID NO: 568203 - protein, 14 aa, Homo sapiens
  CDR3 for alpha chain variable domain of TCR clone 284102 (TRAV8-2, TRAJ11)
CVVSEKSGYSTLTF

SEQ ID NO: 568204 - protein, 14 aa, Homo sapiens
  CDR3 for beta chain variable domain of TCR clone 284102 (TRBV7-9, TRBJ2-1)
CASSPRDSLYEQFF

SEQ ID NO: 568205 - protein, 16 aa, Homo sapiens
  CDR3 for alpha chain variable domain of TCR clone 284103 (TRAV20, TRAJ53)
CAVQAESGGSNFKLTF

SEQ ID NO: 568206 - protein, 14 aa, Homo sapiens
  CDR3 for beta chain variable domain of TCR clone 284103 (TRBV27, TRBJ2-5)
CASSRTFLVDTQYF

SEQ ID NO: 568207 - protein, 14 aa, Homo sapiens
  CDR3 for alpha chain variable domain of TCR clone 284104 (TRAV8-4, TRAJ37)
CAVSEPSNTGKLIF

SEQ ID NO: 568208 - protein, 14 aa, Homo sapiens
  CDR3 for beta chain variable domain of TCR clone 284104 (TRBV28, TRBJ2-1)
CASHRTGARTEQFF

SEQ ID NO: 568209 - protein, 18 aa, Homo sapiens
  CDR3 for alpha chain variable domain of TCR clone 284105 (TRAV9-2, TRAJ52)
CALSRHNAGGTSYGKLTF

SEQ ID NO: 568210 - protein, 14 aa, Homo sapiens
  CDR3 for beta chain variable domain of TCR clone 284105 (TRBV6-1, TRBJ1-3)
CASVQGGGGNTIYF

SEQ ID NO: 568211 - protein, 13 aa, Homo sapiens
  CDR3 for alpha chain variable domain of TCR clone 284106 (TRAV26-1, TRAJ31)
CIVRVDGNARLMF

SEQ ID NO: 568212 - protein, 17 aa, Homo sapiens
  CDR3 for beta chain variable domain of TCR clone 284106 (TRBV11-2, TRBJ2-1)
CASSLSPPGVEYNEQFF

SEQ ID NO: 568213 - protein, 14 aa, Homo sapiens
  CDR3 for alpha chain variable domain of TCR clone 284107 (TRAV8-3, TRAJ35)
CAVVPQGFGNVLHC

SEQ ID NO: 568214 - protein, 14 aa, Homo sapiens
  CDR3 for beta chain variable domain of TCR clone 284107 (TRBV7-6, TRBJ2-3)
CASSLGTVTDTQYF

SEQ ID NO: 568215 - protein, 12 aa, Homo sapiens
  CDR3 for alpha chain variable domain of TCR clone 284108 (TRAV16, TRAJ10)
CSRTGGGNKITF

SEQ ID NO: 568216 - protein, 15 aa, Homo sapiens
  CDR3 for beta chain variable domain of TCR clone 284108 (TRBV11-3, TRBJ2-3)
CASLKDGREGDTQYF

SEQ ID NO: 568217 - protein, 15 aa, Homo sapiens
  CDR3 for alpha chain variable domain of TCR clone 284109 (TRAV14/DV4, TRAJ54)
CAMRPSIQGAQKLVF

SEQ ID NO: 568218 - protein, 14 aa, Homo sapiens
  CDR3 for beta chain variable domain of TCR clone 284109 (TRBV5-5, TRBJ1-2)
CASSLDPYNYSYTF

SEQ ID NO: 568219 - protein, 14 aa, Homo sapiens
  CDR3 for alpha chain variable domain of TCR clone 284110 (TRAV12-2, TRAJ40)
CAVKIPSGTYKYIF

SEQ ID NO: 568220 - protein, 13 aa, Homo sapiens
  CDR3 for beta chain variable domain of TCR clone 284110 (TRBV13, TRBJ2-1)
CASILGGRGELFF

SEQ ID NO: 568221 - protein, 11 aa, Homo sapiens
  CDR3 for alpha chain variable domain of TCR clone 284111 (TRAV29/DV5, TRAJ47)
CAATYGNKLVF

SEQ ID NO: 568222 - protein, 17 aa, Homo sapiens
  CDR3 for beta chain variable domain of TCR clone 284111 (TRBV7-9, TRBJ2-1)
CASILVASYPSYNEQFF

SEQ ID NO: 568223 - protein, 23 aa, Homo sapiens
  CDR3 for alpha chain variable domain of TCR clone 284112 (TRAV26-1, TRAJ38)
CIADNAGNNHIQNPDPAVYQLRD

SEQ ID NO: 568224 - protein, 14 aa, Homo sapiens
  CDR3 for beta chain variable domain of TCR clone 284112 (TRBV19, TRBJ2-1)
CASPTFVLSGGQFF

SEQ ID NO: 568225 - protein, 12 aa, Homo sapiens
  CDR3 for alpha chain variable domain of TCR clone 284113 (TRAV8-3, TRAJ26)
CAGDNYGQNSAF

SEQ ID NO: 568226 - protein, 13 aa, Homo sapiens
  CDR3 for beta chain variable domain of TCR clone 284113 (TRBV27, TRBJ1-1)
CASSLSIGAEAFF

SEQ ID NO: 568227 - protein, 10 aa, Homo sapiens
  CDR3 for alpha chain variable domain of TCR clone 284114 (TRAV2, TRAJ34)
CAVVTDKLIF

SEQ ID NO: 568228 - protein, 20 aa, Homo sapiens
  CDR3 for beta chain variable domain of TCR clone 284114 (TRBV19, TRBJ2-1)
CASSISRTVTSTRLNNEQFF

SEQ ID NO: 568229 - protein, 15 aa, Homo sapiens
  CDR3 for alpha chain variable domain of TCR clone 284115 (TRAV29/DV5, TRAJ24)
CAAIGATDSWGKFQF

SEQ ID NO: 568230 - protein, 12 aa, Homo sapiens
  CDR3 for beta chain variable domain of TCR clone 284115 (TRBV11-2, TRBJ2-2)
CASSLPTGELFF

SEQ ID NO: 568231 - protein, 15 aa, Homo sapiens
  CDR3 for alpha chain variable domain of TCR clone 284116 (TRAV4, TRAJ39)
CLVGPNNNAGNMLTF

SEQ ID NO: 568232 - protein, 14 aa, Homo sapiens
  CDR3 for beta chain variable domain of TCR clone 284116 (TRBV19, TRBJ2-1)
CASPTCVLSGEQFF

SEQ ID NO: 568233 - protein, 12 aa, Homo sapiens
  CDR3 for alpha chain variable domain of TCR clone 284117 (TRAV2, TRAJ9)
CAVGVGGFKTIF

SEQ ID NO: 568234 - protein, 16 aa, Homo sapiens
  CDR3 for beta chain variable domain of TCR clone 284117 (TRBV13, TRBJ2-2)
CASSPKTGEHTGELFF

SEQ ID NO: 568235 - protein, 12 aa, Homo sapiens
  CDR3 for alpha chain variable domain of TCR clone 284118 (TRAV12-3, TRAJ17)
CAMTLTGNKLSF

SEQ ID NO: 568236 - protein, 13 aa, Homo sapiens
  CDR3 for beta chain variable domain of TCR clone 284118 (TRBV7-3, TRBJ1-1)
CASSQDWGAEAFF

SEQ ID NO: 568237 - protein, 15 aa, Homo sapiens
  CDR3 for alpha chain variable domain of TCR clone 284119 (TRAV17, TRAJ16)
CATALRFSDGQKLLF

SEQ ID NO: 568238 - protein, 15 aa, Homo sapiens
  CDR3 for beta chain variable domain of TCR clone 284119 (TRBV20-1, TRBJ1-1)
CSASRGVTGNTEAFL

SEQ ID NO: 568239 - protein, 14 aa, Homo sapiens
  CDR3 for alpha chain variable domain of TCR clone 284120 (TRAV27, TRAJ58)
CAGDGETSGSRLTF

SEQ ID NO: 568240 - protein, 14 aa, Homo sapiens
  CDR3 for beta chain variable domain of TCR clone 284120 (TRBV5-1, TRBJ2-3)
CASSIDGLTDTQYF

SEQ ID NO: 568241 - protein, 15 aa, Homo sapiens
  CDR3 for alpha chain variable domain of TCR clone 284121 (TRAV17, TRAJ52)
CATEAGGASYGKLTF

SEQ ID NO: 568242 - protein, 14 aa, Homo sapiens
  CDR3 for beta chain variable domain of TCR clone 284121 (TRBV28, TRBJ1-5)
CASSLGVLVKPQHF

SEQ ID NO: 568243 - protein, 13 aa, Homo sapiens
  CDR3 for alpha chain variable domain of TCR clone 284122 (TRAV8-6, TRAJ50)
CAVIKTSYDKVIF

SEQ ID NO: 568244 - protein, 15 aa, Homo sapiens
  CDR3 for beta chain variable domain of TCR clone 284122 (TRBV7-2, TRBJ2-2)
CAGRRPGQNTGELFF

SEQ ID NO: 568245 - protein, 16 aa, Homo sapiens
  CDR3 for alpha chain variable domain of TCR clone 284123 (TRAV38-2/DV8, TRAJ45)
CAYRGNSGGGADGLTF

SEQ ID NO: 568246 - protein, 16 aa, Homo sapiens
  CDR3 for beta chain variable domain of TCR clone 284123 (TRBV4-1, TRBJ1-3)
CASSQDELLAGNTIYF

SEQ ID NO: 568247 - protein, 17 aa, Homo sapiens
  CDR3 for alpha chain variable domain of TCR clone 284124 (TRAV3, TRAJ12)
CAVRDGGRMDSSDKLIF

SEQ ID NO: 568248 - protein, 15 aa, Homo sapiens
  CDR3 for beta chain variable domain of TCR clone 284124 (TRBV20-1, TRBJ2-5)
CSAEGTGGLQETQYF

SEQ ID NO: 568249 - protein, 13 aa, Homo sapiens
  CDR3 for alpha chain variable domain of TCR clone 284125 (TRAV29/DV5, TRAJ44)
CAASTGTASKLTF

SEQ ID NO: 568250 - protein, 14 aa, Homo sapiens
  CDR3 for beta chain variable domain of TCR clone 284125 (TRBV4-1, TRBJ2-2)
CASSQAVNTGELFF

SEQ ID NO: 568251 - protein, 16 aa, Homo sapiens
  CDR3 for alpha chain variable domain of TCR clone 284126 (TRAV12-1, TRAJ53)
CVVTSVAGGGNYKLTF

SEQ ID NO: 568252 - protein, 16 aa, Homo sapiens
  CDR3 for beta chain variable domain of TCR clone 284126 (TRBV6-6, TRBJ2-3)
CASSYSHAGSTDTQYF

SEQ ID NO: 568253 - protein, 16 aa, Homo sapiens
  CDR3 for alpha chain variable domain of TCR clone 284127 (TRAV12-1, TRAJ43)
CVVNPHRFGAGTILTV

SEQ ID NO: 568254 - protein, 16 aa, Homo sapiens
  CDR3 for beta chain variable domain of TCR clone 284127 (TRBV27, TRBJ2-2)
CASSSTGGGDTGELFF

SEQ ID NO: 568255 - protein, 15 aa, Homo sapiens
  CDR3 for alpha chain variable domain of TCR clone 284128 (TRAV38-1, TRAJ45)
CAFMTGGGGADGLTF

SEQ ID NO: 568256 - protein, 13 aa, Homo sapiens
  CDR3 for beta chain variable domain of TCR clone 284128 (TRBV7-9, TRBJ1-2)
CASSLKQNYGYTF

SEQ ID NO: 568257 - protein, 11 aa, Homo sapiens
  CDR3 for alpha chain variable domain of TCR clone 284129 (TRAV13-2, TRAJ54)
CAESGSGSLEA

SEQ ID NO: 568258 - protein, 15 aa, Homo sapiens
  CDR3 for beta chain variable domain of TCR clone 284129 (TRBV11-2, TRBJ1-2)
CASSLEGVQRNGYTF

SEQ ID NO: 568259 - protein, 17 aa, Homo sapiens
  CDR3 for alpha chain variable domain of TCR clone 284130 (TRAV26-1, TRAJ37)
CIVRVITVSSNTGKLIF

SEQ ID NO: 568260 - protein, 16 aa, Homo sapiens
  CDR3 for beta chain variable domain of TCR clone 284130 (TRBV19, TRBJ1-1)
CASSPTRFWPGTEAFF

SEQ ID NO: 568261 - protein, 15 aa, Homo sapiens
  CDR3 for alpha chain variable domain of TCR clone 284131 (TRAV12-1, TRAJ42)
CVVTRYGGSQGNLIF

SEQ ID NO: 568262 - protein, 13 aa, Homo sapiens
  CDR3 for beta chain variable domain of TCR clone 284131 (TRBV27, TRBJ2-7)
CASSLTTGYEQYF

SEQ ID NO: 568263 - protein, 14 aa, Homo sapiens
  CDR3 for alpha chain variable domain of TCR clone 284132 (TRAV12-2, TRAJ13)
CAVKKTGGYQKVTF

SEQ ID NO: 568264 - protein, 15 aa, Homo sapiens
  CDR3 for beta chain variable domain of TCR clone 284132 (TRBV27, TRBJ2-1)
CASSNGVGSSNGQFF

SEQ ID NO: 568265 - protein, 11 aa, Homo sapiens
  CDR3 for alpha chain variable domain of TCR clone 284133 (TRAV21, TRAJ23)
CAPQRRGKLIF

SEQ ID NO: 568266 - protein, 15 aa, Homo sapiens
  CDR3 for beta chain variable domain of TCR clone 284133 (TRBV11-3, TRBJ2-3)
CASLKDGREGDTQYF

SEQ ID NO: 568267 - protein, 11 aa, Homo sapiens
  CDR3 for alpha chain variable domain of TCR clone 284134 (TRAV26-1, TRAJ37)
CIVRVGRKLIF

SEQ ID NO: 568268 - protein, 16 aa, Homo sapiens
  CDR3 for beta chain variable domain of TCR clone 284134 (TRBV11-3, TRBJ2-5)
CASSSVVAGSTETQYF

SEQ ID NO: 568269 - protein, 13 aa, Homo sapiens
  CDR3 for alpha chain variable domain of TCR clone 284135 (TRAV8-2, TRAJ49)
CVVSPSTGNQFFF

SEQ ID NO: 568270 - protein, 14 aa, Homo sapiens
  CDR3 for beta chain variable domain of TCR clone 284135 (TRBV11-2, TRBJ2-7)
CASSRSGGAGEQYF

SEQ ID NO: 568271 - protein, 14 aa, Homo sapiens
  CDR3 for alpha chain variable domain of TCR clone 284136 (TRAV3, TRAJ34)
CAVRAPGNTDKLVF

SEQ ID NO: 568272 - protein, 17 aa, Homo sapiens
  CDR3 for beta chain variable domain of TCR clone 284136 (TRBV20-1, TRBJ2-7)
CSAAPGLARGISYEQYF

SEQ ID NO: 568273 - protein, 13 aa, Homo sapiens
  CDR3 for alpha chain variable domain of TCR clone 284137 (TRAV27, TRAJ24)
CAGDRDSWGKLQF

SEQ ID NO: 568274 - protein, 14 aa, Homo sapiens
  CDR3 for beta chain variable domain of TCR clone 284137 (TRBV7-3, TRBJ2-1)
CASSLAGGTNEQFF

SEQ ID NO: 568275 - protein, 12 aa, Homo sapiens
  CDR3 for alpha chain variable domain of TCR clone 284138 (TRAV13-2, TRAJ23)
CAERHRGGKLTF

SEQ ID NO: 568276 - protein, 15 aa, Homo sapiens
  CDR3 for beta chain variable domain of TCR clone 284138 (TRBV25-1, TRBJ2-1)
CASSNGGGSSNEQFF

SEQ ID NO: 568277 - protein, 12 aa, Homo sapiens
  CDR3 for alpha chain variable domain of TCR clone 284139 (TRAV12-2, TRAJ16)
CAVDLDGQKLLF

SEQ ID NO: 568278 - protein, 12 aa, Homo sapiens
  CDR3 for beta chain variable domain of TCR clone 284139 (TRBV5-7, TRBJ2-7)
CASSVQGGEQYF

SEQ ID NO: 568279 - protein, 10 aa, Homo sapiens
  CDR3 for alpha chain variable domain of TCR clone 284140 (TRAV23/DV6, TRAJ57)
CSASSTLSQG

SEQ ID NO: 568280 - protein, 14 aa, Homo sapiens
  CDR3 for beta chain variable domain of TCR clone 284140 (TRBV25-1, TRBJ1-1)
CASTNLGGNTEAFF

SEQ ID NO: 568281 - protein, 11 aa, Homo sapiens
  CDR3 for alpha chain variable domain of TCR clone 284141 (TRAV2, TRAJ13)
CASGGYQKVTF

SEQ ID NO: 568282 - protein, 16 aa, Homo sapiens
  CDR3 for beta chain variable domain of TCR clone 284141 (TRBV6-1, TRBJ2-5)
CASSETLDRGAQTQYF

SEQ ID NO: 568283 - protein, 15 aa, Homo sapiens
  CDR3 for alpha chain variable domain of TCR clone 284142 (TRAV17, TRAJ35)
CATAFVIGFGNGLHC

SEQ ID NO: 568284 - protein, 15 aa, Homo sapiens
  CDR3 for beta chain variable domain of TCR clone 284142 (TRBV7-9, TRBJ2-7)
CASSLALAEAYEQYF

SEQ ID NO: 568285 - protein, 16 aa, Homo sapiens
  CDR3 for alpha chain variable domain of TCR clone 284143 (TRAV12-3, TRAJ53)
FAMSPGSGGSTYKLTF

SEQ ID NO: 568286 - protein, 13 aa, Homo sapiens
  CDR3 for beta chain variable domain of TCR clone 284143 (TRBV7-3, TRBJ1-1)
CASSQDWGAEAFF

SEQ ID NO: 568287 - protein, 13 aa, Homo sapiens
  CDR3 for alpha chain variable domain of TCR clone 284144 (TRAV12-1, TRAJ7)
CVVNMRGNNRLAF

SEQ ID NO: 568288 - protein, 14 aa, Homo sapiens
  CDR3 for beta chain variable domain of TCR clone 284144 (TRBV11-1, TRBJ2-7)
CASSFRQGSYEQYF

SEQ ID NO: 568289 - protein, 14 aa, Homo sapiens
  CDR3 for alpha chain variable domain of TCR clone 284145 (TRAV12-2, TRAJ53)
CAVKGGGSNYKLPF

SEQ ID NO: 568290 - protein, 15 aa, Homo sapiens
  CDR3 for beta chain variable domain of TCR clone 284145 (TRBV11-2, TRBJ2-2)
CASSSDRVNAGELFF

SEQ ID NO: 568291 - protein, 17 aa, Homo sapiens
  CDR3 for alpha chain variable domain of TCR clone 284146 (TRAV3, TRAJ6)
CAVRDGPRTGGSYIPTF

SEQ ID NO: 568292 - protein, 15 aa, Homo sapiens
  CDR3 for beta chain variable domain of TCR clone 284146 (TRBV20-1, TRBJ1-1)
CSASWDRVLNTEAFF

SEQ ID NO: 568293 - protein, 15 aa, Homo sapiens
  CDR3 for alpha chain variable domain of TCR clone 284147 (TRAV12-2, TRAJ53)
RAVNGGGGSNYKLTF

SEQ ID NO: 568294 - protein, 14 aa, Homo sapiens
  CDR3 for beta chain variable domain of TCR clone 284147 (TRBV12-5, TRBJ2-5)
CASGSRTHQETQYF

SEQ ID NO: 568295 - protein, 15 aa, Homo sapiens
  CDR3 for alpha chain variable domain of TCR clone 284148 (TRAV3, TRAJ5)
CAVRDLDTGRRALTF

SEQ ID NO: 568296 - protein, 17 aa, Homo sapiens
  CDR3 for beta chain variable domain of TCR clone 284148 (TRBV25-1, TRBJ2-1)
CASSAYGQGRGVYEQFF

SEQ ID NO: 568297 - protein, 15 aa, Homo sapiens
  CDR3 for alpha chain variable domain of TCR clone 284149 (TRAV21, TRAJ24)
CAARSSTDSWGKLQF

SEQ ID NO: 568298 - protein, 12 aa, Homo sapiens
  CDR3 for beta chain variable domain of TCR clone 284149 (TRBV12-4, TRBJ2-7)
CASSLGGYEQYF
